(19) United States
(12) Patent Application Publication
(10) Pub. No.: US 2020/0123570 A1
(43) Pub. Date: Apr. 23, 2020

(54) MATERIALS AND METHODS FOR TREATMENT OF APOLIPOPROTEIN C3 (APOCIII)-RELATED DISORDERS

(71) Applicant: CRISPR THERAPEUTICS AG, Zug (CH)

(72) Inventors: Ante Sven LUNDBERG, Cambridge, MA (US); Lawrence KLEIN, Cambridge, MA (US); Samarth KULKARNI, Cambridge, MA (US); Hari Kumar PADMANABHAN, Cambridge, MA (US)

(73) Assignee: CRISPR Therapeutics AG, Zug (CH)

(21) Appl. No.: 16/312,656

(22) PCT Filed: Jun. 29, 2017
(86) PCT No.: PCT/IB2017/001112

§ 371 Date: Dec. 21, 2018

Related U.S. Application Data
(60) Provisional application No. 62/461,836, filed on Feb. 22, 2017.
(60) Provisional application No. 62/355,909, filed on Jun. 29, 2016.

(51) Int. Cl. C12N 15/86; C12N 15/11; C12N 9/22; C12N 7/00

(52) U.S. Cl. CPC C12N 15/86; C12N 15/11; C12N 9/22; C12N 2750/14143; C12N 2310/20; C12N 2800/80; C12N 7/00

(57) ABSTRACT

The present application provides materials and methods for treating a patient with one or more conditions associated with APOCIII whether ex vivo or in vivo. In addition, the present application provides materials and methods for editing and/or modulating the expression of APOCIII gene in a cell by genome editing.

### RELATED APPLICATIONS

[0001] This application claims the benefit of U.S. Provisional Application No. 62/355,909, filed Jun. 29, 2016 and U.S. Provisional Application No. 62/461,836, filed Feb. 22, 2017; the contents of each of which are incorporated herein by reference in their entirety.

### SEQUENCE LISTING

[0002] The present application is being filed along with a Sequence Listing in electronic format. The Sequence Listing file, entitled CRIS015001WOSeqListv2, was created on Jun. 8, 2017, and is 12,955,430 bytes in size. The information in electronic format of the Sequence Listing is incorporated herein by reference in its entirety.

### FIELD

[0003] The invention relates to the field of gene editing and specifically to the alteration of the Apolipoprotein C3 (APOCIII) gene. The present application provides materials and methods for treating a patient with dyslipidemia and/or other diseases or disorders associated with APOCIII, both ex vivo and in vivo. In addition, the present application provides materials and methods for genome editing to modulate the expression, function, or activity of an Apolipoprotein C3 (APOCIII) gene in a cell.

### BACKGROUND

[0004] Genome engineering refers to the strategies and techniques for the targeted, specific modification of the genetic information (genome) of living organisms. Genome engineering is a very active field of research because of the wide range of possible applications, particularly in the areas of human health. For example, genome engineering can be used to alter (e.g., correct or knock-out) a gene carrying a harmful mutation or to explore the function of a gene. Early technologies developed to insert a transgene into a living cell were often limited by the random nature of the insertion of the new sequence into the genome. Random insertions into the genome may result in disrupting normal regulation of neighboring genes leading to severe unwanted effects. Furthermore, random integration technologies offer little reproducibility, as there is no guarantee that the sequence would be inserted at the same place in two different cells. Recent genome engineering strategies, such as zinc finger nucleases (ZFNs), transcription activator like effector nucleases (TALENs), homing endonucleases (HEs) and MegaTALs, enable a specific area of the DNA to be modified, thereby increasing the precision of the alteration compared to early technologies. These newer platforms offer a much larger degree of reproducibility, but still have their limitations.

[0005] Despite efforts from researchers and medical professionals worldwide who have been trying to address APOCIII-related genetic disorders, and despite the promise of genome engineering approaches, there still remains a critical need for developing safe and effective treatments involving APOCIII-related indications.

[0006] The present disclosure presents an approach to address the genetic basis of APOCIII-related genetic disorders and conditions. By using genome engineering tools to create permanent changes to the genome that can address the APOCIII-related disorders or conditions with a single treatment, the resulting therapy may completely remedy and/or stop the disease progression of certain APOCIII related indications and/or diseases.

### SUMMARY

[0007] Provided herein are cellular, ex vivo and in vivo methods for creating permanent changes to the genome by introducing insertions, deletions or mutations of at least one nucleotide within or near the Apolipoprotein C3 (APOCIII) gene or other DNA sequences that encode regulatory elements of the APOCIII gene by genome editing and reducing or eliminating the expression or function of APOCIII gene products, which can be used to treat an APOCIII related condition or disorder such as Dyslipidemias. Also provided herein are components and compositions, and vectors for performing such methods. Also provided are cells produced by such methods.

[0008] Provided herein is a method for editing an Apolipoprotein C3 (APOCIII) gene in a cell by genome editing comprising the step of introducing into the cell one or more deoxyribonucleic acid (DNA) endonucleases to effect one or more single-strand breaks (SSBs) or double-strand breaks (DSBs) within or near the APOCIII gene or APOCIII regulatory elements that results in one or more permanent insertions, deletions or mutations of at least one nucleotide within or near the APOCIII gene, thereby reducing or eliminating the expression or function of APOCIII gene products.

[0009] Also provided herein is an ex vivo method for treating a patient having an APOCIII related condition or disorder comprising the steps of: isolating a hepatocyte from a patient; editing within or near an Apolipoprotein C3 (APOCIII) gene or other DNA sequences that encode regulatory elements of the APOCIII gene of the hepatocyte; and implanting the genome-edited hepatocyte into the patient.

[0010] In some aspects, the editing step comprises introducing into the hepatocyte one or more deoxyribonucleic acid (DNA) endonucleases to effect one or more single-strand breaks (SSBs) or double-strand breaks (DSBs) within or near the APOCIII gene or APOCIII regulatory elements that results in one or more permanent insertions, deletions or mutations of at least one nucleotide within or near the APOCIII gene, thereby reducing or eliminating the expression or function of APOCIII gene products.

[0011] Also provided herein is an ex vivo method for treating a patient having an APOCIII related condition or disorder comprising the steps of: creating a patient specific induced pluripotent stem cell (iPSC); editing within or near an Apolipoprotein C3 (APOCIII) gene or other DNA sequences that encode regulatory elements of the APOCIII gene of the iPSC; differentiating the genome-edited iPSC into a hepatocyte; and implanting the hepatocyte into the patient.

[0012] In some aspects, the editing step comprises introducing into the iPSC one or more deoxyribonucleic acid (DNA) endonucleases to effect one or more single-strand breaks (SSBs) or double-strand breaks (DSBs) within or near the APOCIII gene or APOCIII regulatory elements that results in one or more permanent insertions, deletions or mutations of at least one nucleotide within or near the APOCIII gene, thereby reducing or eliminating the expression or function of APOCIII gene products.

[0013] Also provided herein is an ex vivo method for treating a patient having an APOCIII related condition or disorder comprising the steps of: isolating a mesenchymal stem cell from the patient; editing within or near an Apolipoprotein C3 (APOCIII) gene or other DNA sequences that encode regulatory elements of the APOCIII gene of the mesenchymal stem cell; differentiating the genome-edited mesenchymal stem cell into a hepatocyte; and implanting the hepatocyte into the patient.

[0014] In some aspects, the editing step comprises introducing into the mesenchymal stem cell one or more deoxyribonucleic acid (DNA) endonucleases to effect one or more single-strand breaks (SSBs) or double-strand breaks (DSBs) within or near the APOCIII gene or APOCIII regulatory elements that results in one or more permanent insertions, deletions or mutations of at least one nucleotide within or near the APOCIII gene, thereby reducing or eliminating the expression or function of APOCIII gene products.

[0015] Also provided herein is an in vivo method for treating a patient with an APOCIII related disorder comprising the step of editing the Apolipoprotein C3 (APOCIII) gene in a cell of the patient. In some aspects, the editing step comprises introducing into the cell one or more deoxyribonucleic acid (DNA) endonucleases to effect one or more single-strand breaks (SSBs) or double-strand breaks (DSBs) within or near the APOCIII gene or APOCIII regulatory elements that results in one or more permanent insertions, deletions or mutations of at least one nucleotide within or near the APOCIII gene, thereby reducing or eliminating the expression or function of APOCIII gene products. In some aspects, the cell is a hepatocyte. In some aspects, the one or more deoxyribonucleic acid (DNA) endonuclease is delivered to the hepatocyte by local injection, systemic infusion, or combinations thereof.

[0016] Also provided herein is a method of altering the contiguous genomic sequence of an APOCIII gene in a cell comprising contacting the cell with one or more deoxyribonucleic acid (DNA) endonuclease to effect one or more single-strand breaks (SSBs) or double-strand breaks (DSBs). In some aspects, the alteration of the contiguous genomic sequence occurs in one or more exons of the APOCIII gene.

[0017] In some aspects, the one or more deoxyribonucleic acid (DNA) endonuclease is selected from any of those sequences in SEQ ID NOs: 1-620 and variants having at least 90% homology to any of the sequences listed in SEQ ID NOs: 1-620.

[0018] In some aspects, the one or more deoxyribonucleic acid (DNA) endonuclease is one or more protein or polypeptide. In some aspects, the one or more deoxyribonucleic acid (DNA) endonuclease is one or more polynucleotide encoding the one or more DNA endonuclease. In some aspects, the one or more deoxyribonucleic acid (DNA) endonuclease is one or more ribonucleic acid (RNA) encoding the one or more DNA endonuclease. In some aspects, the one or more ribonucleic acid (RNA) is one or more chemically modified RNA.

[0019] In some aspects, the Cas9 or Cpf1 mRNA is formulated into a lipid nanoparticle, and the gRNA is delivered to the cell by electroporation.

[0020] In some aspects, the gRNA is delivered to the cell by electroporation.

[0021] In some aspects, the cell is a human cell.

[0022] In some aspects, the human cell is a hepatocyte.

[0023] Also provided herein is a single-molecule guide RNA comprising at least a spacer sequence that is an RNA sequence corresponding to any of SEQ ID NOs: 5,305-14,350. In some aspects, the single-molecule guide RNA further comprises a spacer extension region. In some aspects, the single-molecule guide RNA further comprises a tracrRNA extension region. In some aspects, the single-molecule guide RNA is chemically modified.

[0024] In some aspects, the single-molecule guide RNA is pre-complexed with a DNA endonuclease. In some aspects, the DNA endonuclease is a Cas9 or CPf1 endonuclease. In some aspects, the Cas9 or Cpf1 endonuclease is selected from S. pyogenes Cas9, S. aureus Cas9, N. meningitides Cas9, S. thermophilus CRISPR1 Cas9, S. thermophilus CRISPR 3 Cas9, T. denticola Cas9, L. bacterium ND2006 Cpf1 and Acidaminococcus sp. BV3L6 Cpf1, and variants having at least 90% homology to these enzymes. In some aspects, the Cas9 or Cpf1 endonuclease comprises one or more nuclear localization signals (NLSs). In some aspects, at least one NLS is at or within 50 amino acids of the amino-terminus of the Cas9 or Cpf1 endonuclease and/or at least one NLS is at or within 50 amino acids of the carboxy-terminus of the Cas9 or Cpf1 endonuclease.

[0025] Also provided herein is a non-naturally occurring CRISPR/Cas system comprising a polynucleotide encoding a Cas9 or Cpf1 enzyme and at least one single-molecule guide RNA described herein. In some aspects, the polynucleotide encoding a Cas9 or Cpf1 enzyme is selected from S. pyogenes Cas9, S. aureus Cas9, N. meningitides Cas9, S. thermophilus CRISPR1 Cas9, S. thermophilus CRISPR 3 Cas9, T. denticola Cas9, L. bacterium ND2006 Cpf1 and Acidaminococcus sp. BV3L6 Cpf1, and variants having at least 70% homology to these enzymes. In some aspects, the polynucleotide encoding a Cas9 or Cpf1 enzyme comprises one or more nuclear localization signals (NLSs). In some aspects, at least one NLS is at or within 50 amino acids of the amino-terminus of the polynucleotide encoding a Cas9 or Cpf1 enzyme and/or at least one NLS is at or within 50 amino acids of the carboxy-terminus of the polynucleotide encoding a Cas9 or Cpf1 enzyme. In some aspects, polynucleotide encoding a Cas9 or Cpf1 enzyme is codon optimized for expression in a eukaryotic cell.

[0026] Also provided herein is a DNA encoding the single-molecule guide RNA described herein.

[0027] Also provided herein is a DNA encoding the CRISPR/Cas system described herein.

[0028] Also provided herein is a vector comprising a DNA encoding the single-molecule guide RNA and CRISPR/Cas system. In some aspects, the vector is a plasmid. In some aspects, the vector is an AAV vector particle, wherein the AAV vector serotype is selected from those listed in Table 6 and in SEQ ID NOs: 4,734-5,302 and Table 6.

[0029] In another aspect, provided herein are cells that have been modified by the preceding methods to permanently change at least one nucleotide within or near the APOCIII gene and reduce or eliminate the expression or function of APOCIII gene products. Further provided herein are methods for ameliorating APOCIII-related disorders and/or conditions by the administration of cells that have been modified by the preceding methods to a patient.

[0030] It is understood that the inventions described in this specification are not limited to the examples summarized in this Summary. Various other aspects are described and exemplified herein.

### BRIEF DESCRIPTION OF THE DRAWINGS

[0031] Various aspects of materials and methods disclosed and described in this specification can be better understood by reference to the accompanying figures, in which:

[0032] FIG. 1A is a depiction of the type II CRISPR/Cas system.

[0033] FIG. 1B is another depiction of the type II CRISPR/Cas system.

[0034] FIGS. 2, 3, and 4 describe the cutting efficiency of gRNAs with an S. pyogenes Cas9 in HEK293T cells targeting the APOCIII gene.

### BRIEF DESCRIPTION OF THE SEQUENCE LISTING

[0035] SEQ ID NOs: 1-620 are Cas endonuclease ortholog sequences.

[0036] SEQ ID NOs: 621-631 are intentionally blank.

[0037] SEQ ID NOs: 632-4,715 are microRNA sequences.

[0038] SEQ ID NOs: 4,716-4,733 are intentionally blank.

[0039] SEQ ID NOs: 4,734-5,302 are AAV serotype sequences.

[0040] SEQ ID NO: 5,303 is an APOCIII nucleotide sequence, and SEQ ID NO: 5,304 is an extended nucleotide sequence that includes an APOCIII nucleic acid sequence including 1-5 kilobase pairs upstream and/or downstream of the target gene.

[0041] SEQ ID NOs: 5,305-5,319 are 20 bp spacer sequences for targeting an APOCIII gene with a T. denticola Cas9 endonuclease.

[0042] SEQ ID NOs: 5,320-5,404 are 20 bp spacer sequences for targeting an APOCIII gene with a S. thermophilus Cas9 endonuclease.

[0043] SEQ ID NOs: 5,405-5,783 are 20 bp spacer sequences for targeting an APOCIII gene with a S. aureus Cas9 endonuclease.

[0044] SEQ ID NOs: 5,784-5,986 are 20 bp spacer sequences for targeting an APOCIII gene with a N. meningitides Cas9 endonuclease.

[0045] SEQ ID NOs: 5,987-10,852 are 20 bp spacer sequences for targeting an APOCIII gene with a S. pyogenes Cas9 endonuclease.

[0046] SEQ ID NOs: 10,853-14,350 are 20 bp spacer sequences for targeting an APOCIII gene with an Acidaminococcus, Lachnospiraceae, and Francisella novicida Cpf1 endonuclease.

[0047] SEQ ID NOs: 14,351-14,380 are intentionally blank.

[0048] SEQ ID NO: 14,381 is a sample guide RNA (gRNA) for a S. pyogenes Cas9 endonuclease.

[0049] SEQ ID NOs: 14,382-14,384 are sample sgRNA sequences.

### DETAILED DESCRIPTION

[0050] Therapeutic Approach

[0051] APOCIII has been associated with diseases and disorders such as, but not limited to, Alzheimer's Disease, Amyotrophic Lateral Sclerosis, Arteriosclerosis, Ataxia Telangiectasia, Atherosclerosis, Malignant neoplasm of breast, Cardiovascular Diseases, Cerebrovascular Disorders, Cholelithiasis, Cholestasis, Chorioamnionitis, Coronary Arteriosclerosis, Coronary heart disease, Drug Eruptions, Diabetes, Diabetes Mellitus, Insulin-Dependent Diabetes Mellitus, Non-Insulin-Dependent Diabetes Mellitus, Diabetic Nephropathy, Fatty Liver, Fetal Membranes Premature Rupture, Generalized atherosclerosis, Heart Diseases, Hepatitis B, Hepatitis C, HIV Infections, Hypercholesterolemia, Hypercholesterolemia Familial, Hyperglycemia, Hyperlipidemia, Hyperlipidemia Familial Combined, Hyperlipoproteinemias, Hyperlipoproteinemia Type III, Hypertensive disease, Hyperthyroidism, Hypertriglyceridemia, Hypothyroidism, Inflammation, Insulin Resistance, Ischemia, Kidney Diseases, Chronic Kidney Failure, Premature Obstetric Labor, Lipodystrophy, Hyperlipoproteinemia Type I, Liver diseases, Liver neoplasms, Lung Neoplasms, Myocardial Infarction, Neoplasm Metastasis, Obesity, Pre-Eclampsia, Retinal Diseases, Schizophrenia, Cerebrovascular accident, Vascular Diseases, Premature Birth, Myocardial Ischemia, Lipid Metabolism Disorders, Hepatoblastoma, Intestinal carcinoma, Dyslipidemias, Age related macular degeneration, Congenital Disorders of Glycosylation, Abdominal Obesity, Restenosis, Maturity onset diabetes mellitus in young, Cholesteryl Ester Transfer Protein Deficiency, Non-alcoholic Fatty Liver Disease, Hypoalphalipoproteinemias, Overweight, body mass, Metabolic Syndrome X, Hepatitis C Chronic, Hypotriglyceridemia, Carotid Atherosclerosis, Breast Carcinoma, Hyperuricemia, Pregnancy associated hypertension, Fat redistribution, Cholecystolithiasis, Ischemic stroke, Acute Coronary Syndrome, HIV-Associated Lipodystrophy Syndrome, Blood pressure finding, Systemic arterial pressure, Lipoatrophy, Hypertriglyceridemia result, Colorectal Cancer, Fibrinogen Adverse Event, Hypoalphalipoproteinemia Familial, Venous Thromboembolism, Coronary Artery Disease, Liver carcinoma, Steatohepatitis, Combined hyperlipidemia, Weight Loss Adverse Event, unspecified Infection of amniotic sac and membranes, unspecified trimester, Visceral Obesity, Apolipoprotein C-III Deficiency, and Hypertriglyceridemia Waist. Editing the APOCIII gene using any of the methods described herein may be used to treat, prevent and/or mitigate the symptoms of the diseases and disorders described herein.

[0052] The activity of APOCIII is associated with Dyslipidemias, Hyperalphalipoproteinemia Type 2, Lupus Nephritis, Wilms Tumor 5, Morbid obesity and spermatogenic, Glaucoma, Diabetic Retinopathy, Arthrogryposis renal dysfunction cholestasis syndrome, Cognition Disorders, Altered response to myocardial infarction, Glucose Intolerance, Positive regulation of triglyceride biosynthetic process, Renal Insufficiency, Chronic, Hyperlipidemias, Chronic Kidney Failure, Apolipoprotein C-III Deficiency, Coronary Disease, Neonatal Diabetes Mellitus, Neonatal, with Congenital Hypothyroidism, Hypercholesterolemia Autosomal Dominant 3, Hyperlipoproteinemia Type III, Hyperthyroidism, Coronary Artery Disease, Renal Artery Obstruction, Metabolic Syndrome X, Hyperlipidemia, Familial Combined, Insulin Resistance, Transient infantile hypertriglyceridemia, Diabetic Nephropathies, Diabetes Mellitus (Type 1), Nephrotic Syndrome Type 5 with or without ocular abnormalities, and Hemorrhagic Fever with renal syndrome. Hyperalphalipoproteinemia 2 is an inherited disease (autosomal dominant) where the body accumulates excess amounts of high density lipoprotein (HDL) cholesterol. Hyperalphalipoproteinemia Type 2 affects between 1 in 500 heterozygotes and 1 in 1,000,000 homozygotes in the United States and is less common in Asian and Asian Indian populations. Common symptoms of Hyperalphalipoproteinemia Type 2 include tendon xanthoma, xanthelasma, and premature cardiovascular disease. Current treatment of Hyperalphalipoproteinemia Type 2 includes changes in diet to decrease intake total fat to less than 30% of total calories with a ratio of monounsaturated:polyunsaturated:saturated fat of 1:1:1. Another option for treating Hyperalphalipoproteinemia Type 2 is reduction of cholesterol to less than 300 mg/day by avoidance of animal products and increase fiber intake to more than 20 g/day with 6 g of soluble fiber/day.

[0053] Dyslipidemias is a genetic disease characterized by elevated level of lipids in the blood that contributes to the development of clogged arteries (atherosclerosis). These lipids include plasma cholesterol, triglycerides, or high-density lipoprotein. Dyslipidemia increases the risk of heart attacks, stroke, or other circulatory concerns. Current management includes lifestyle changes such as exercise and dietary modifications as well as use of lipid-lowering drugs such as statins. Non-statin lipid-lowering drugs include bile acid sequestrants, cholesterol absorption inhibitors, drugs for homozygous familial hypercholesteremia, fibrates, nicotinic acid, omega-3 fatty acids and/or combination products. Treatment options usually depend on the specific lipid abnormality, although different lipid abnormalities often coexist. Treatment of children is more challenging as dietary changes may be difficult to implement and lipid-lowering therapies have not been proven effective.

[0054] In one embodiment, the target tissue for the compositions and methods described herein is liver tissue.

[0055] In one embodiment, the gene is Apolipoprotein C-III (APOCIII) which may also be referred to as Apolipoprotein C3, Apo-CIII, ApoC-III, and HALP2. APOCIII has a cytogenetic location of 11q23.3 and the genomic coordinate are on Chromosome 11 on the forward strand at position 116,829,706-116,833,072. The nucleotide sequence of APOCIII is shown as SEQ ID NO: 5,303. AP000770.1 is the gene upstream of APOCIII on the forward strand and APOA1-AS is the gene downstream of APOCIII on the forward strand. APOCIII has a NCBI gene ID of 345, Uniprot ID of P02656 and Ensembl Gene ID of ENSG00000110245. APOCIII has 476 SNPs, 12 introns and 14 exons. The exon identifier from Ensembl and the start/stop sites of the introns and exons are shown in Table 1.

TABLE 1
Introns and Exons for APOCIII

| Exon | | | Intron | | |
|---|---|---|---|---|---|
| No. | Exon ID | Start/Stop | No. | Intron based on Exon ID | Start/Stop |
| EX1 | ENSE00001615517 | 116,829,892- | INT1 | Intron ENSE00001615517- | 116,829,941- |
| | | 116,829,940 | | ENSE00003501097 | 116,830,569 |
| EX2 | ENSE00003501097 | 116,830,570- | INT2 | Intron ENSE00003501097- | 116,830,638- |
| | | 116,830,637 | | ENSE00003643258 | 116,830,772 |
| EX3 | ENSE00003643258 | 116,830,773- | INT3 | Intron ENSE00003643258- | 116,830,897- |
| | | 116,830,896 | | ENSE00001413859 | 116,832,763 |
| EX4 | ENSE00001413859 | 116,832,764- | INT4 | Intron ENSE00001411831- | 116,829,941- |
| | | 116,833,072 | | ENSE00001466774 | 116,830,492 |
| EX5 | ENSE00001411831 | 116,829,915- | INT5 | Intron ENSE00001466774- | 116,830,638- |
| | | 116,829,940 | | ENSE00003643258 | 116,830,772 |
| EX6 | ENSE00001466774 | 116,830,493- | INT6 | Intron ENSE00003767853- | 116,830,638- |
| | | 116,830,637 | | ENSE00003643258 | 116,830,772 |
| EX7 | ENSE00003767853 | 116,830,529- | INT7 | Intron ENSE00003643258- | 116,830,897- |
| | | 116,830,637 | | ENSE00003769857 | 116,832,763 |
| EX8 | ENSE00003769857 | 116,832,764- | INT8 | Intron ENSE00001757601- | 116,829,887- |
| | | 116,833,071 | | ENSE00003501097 | 116,830,569 |
| EX9 | ENSE00001757601 | 116,829,706- | INT9 | Intron ENSE00003501097- | 116,830,638- |
| | | 116,829,886 | | ENSE00001613584 | 116,830,772 |
| EX10 | ENSE00001613584 | 116,830,773- | INT10 | Intron ENSE00002466955- | 116,829,941- |
| | | 116,830,882 | | ENSE00003491403 | 116,830,569 |
| EX11 | ENSE00002466955 | 116,829,922- | INT11 | Intron ENSE00003491403- | 116,830,638- |
| | | 116,829,940 | | ENSE00003603501 | 116,830,772 |
| EX12 | ENSE00003491403 | 116,830,570- | INT12 | Intron ENSE00003603501- | 116,830,897- |
| | | 116,830,637 | | ENSE00001905352 | 116,831,042 |
| EX13 | ENSE00003603501 | 116,830,773- | | | |
| | | 116,830,896 | | | |
| EX14 | ENSE00001905352 | 116,831,043- | | | |
| | | 116,831,100 | | | |

[0056] Table 2 provides information on all of the transcripts for the APOCIII gene based on the Ensembl database. Provided in Table 2 are the transcript ID from Ensembl and corresponding NCBI RefSeq ID for the transcript, the translation ID from Ensembl and the corresponding NCBI RefSeq ID for the protein, the biotype of the transcript sequence as classified by Ensembl and the exons and introns in the transcript based on the information in Table 1.

TABLE 2
Transcript Information for APOCIII

| | Transcript | | Protein | | | |
|---|---|---|---|---|---|---|
| Transcript | NCBI | Translation | NCBI | Sequence | Exon ID from | |
| ID | RefSeq ID | ID | RefSeq ID | Biotype | Table 1 | Intron ID from Table 1 |
| ENST00000470144.1 | — | — | — | Processed | EX11, EX12, | INT10, INT11, INT12 |
| | | | | transcript | EX13, EX14 | |
| ENST00000227667.7 | NM_000040 | ENSP00000227667 | NP_000031 | Protein | EX1, EX2, EX3, | INT1, INT2, INT3 |
| | | | | coding | EX4 | |
| ENST00000375345.3 | — | ENSP00000364494 | — | Protein | EX3, EX4, EX5, | INT3, INT4, INT5 |
| | | | | coding | EX6 | |
| ENST00000630701.1 | — | ENSP00000486182 | — | Protein | EX3, EX7, EX8 | INT6, INT7 |
| | | | | coding | | |
| ENST00000433777.5 | — | ENSP00000410614 | — | Protein | EX2, EX9, EX10 | INT8, INT9 |
| | | | | coding | | |

[0057] APOCIII has 476 SNPs and the NCBI rs number and/or UniProt VAR number for this APOCIII gene are rs4225, rs4520, rs5128, rs5129, rs5130, rs5131, rs5132, rs2542052, rs2467048, rs2070669, rs2070668, rs2070667, rs2070666, rs1318040, rs1269330, rs885722, rs734104, rs645901, rs618354, rs595049, rs553080, rs5143, rs5142, rs5141, rs5140, rs5139, rs5138, rs5137, rs5136, rs5135, rs5134, rs5133, rs535301255, rs534220908, rs533891893, rs533807829, rs532858217, rs532177088, rs532162219, rs531852682, rs531641148, rs530973342, rs530535775, rs530355846, rs530328372, rs529938030, rs528230648, rs528009182, rs527591419, rs397777828, rs376694274, rs376272192, rs376038822, rs375928164, rs375900378, rs375393286, rs374842256, rs553878928, rs373975305, rs373712771, rs373110458, rs372158089, rs371805175, rs371762865, rs371642961, rs370356658, rs370278328, rs370227405, rs369731620, rs369061754, rs368906402, rs368892201, rs368411805, rs367836026, rs202197102, rs202129174, rs201803883, rs201799944, rs201477146, rs201402851, rs201402310, rs201360025, rs201293676, rs200945195, rs200557528, rs200501619, rs199963291, rs199696784, rs199660886, rs192830070, rs192473046, rs191491486, rs191196015, rs191078641, rs190704003, rs189907059, rs189639056, rs189264571, rs188386444, rs187628630, rs187592696, rs187542976, rs186706792, rs186110240, rs184842636, rs184637772, rs184359086, rs142433547, rs142380132, rs142122586, rs141810510, rs141492364, rs140621530, rs140223477, rs138617853, rs138326449, rs138099880, rs121918382, rs121918381, rs113643578, rs113617501, rs113565160, rs113543888, rs113344456, rs112889374, rs112695578, rs112075161, rs111429645, rs76353203, rs72441743, rs71865367, rs67895214, rs61905139, rs45487999, rs35331369, rs35243197, rs34648689, rs34523203, rs13306209, rs12803983, rs12802579, rs12802571, rs12802567, rs12802559, rs12802558, rs12721099, rs12721098, rs12721096, rs12721095, rs12721093, rs12721092, rs12721091, rs12721090, rs12721089, rs12721088, rs12721086, rs12721085, rs12721084, rs12721083, rs12721081, rs12721080, rs12721079, rs12721078, rs12721077, rs12420607, rs12365462, rs12365440, rs12284864, rs11827682, rs11568823, rs11540884, rs10892037, rs10790164, rs10661008, rs7123454, rs7101528, rs2854117, rs2854116, rs2727788, rs183624506, rs182939465, rs182106227, rs181903942, rs181671627, rs181473925, rs181237234, rs181006521, rs150821374, rs149862332, rs149707394, rs149531328, rs149249154, rs148662685, rs148295370, rs147714119, rs147310394, rs147210663, rs146930192, rs146427279, rs146213231, rs145834983, rs145735257, rs145549735, rs145482404, rs144573427, rs143893093, rs143321802, rs536197704, rs536256890, rs536484556, rs537154082, rs537211575, rs537876452, rs539003433, rs539057093, rs539342120, rs539651986, rs540228480, rs540254281, rs540318704, rs540392882, rs541177581, rs541324078, rs541390151, rs541449537, rs541512801, rs542534043, rs542590176, rs543343659, rs543359482, rs544015853, rs544627416, rs544792664, rs544884872, rs544895505, rs545774116, rs546043674, rs546341253, rs547429056, rs547595758, rs548373866, rs548558918, rs548741530, rs548782777, rs548845435, rs549657398, rs549983053, rs550016671, rs550495061, rs550561729, rs550779341, rs551435589, rs551640205, rs551692816, rs552297309, rs552950736, rs552968252, rs553270129, rs553952367, rs554062307, rs554870449, rs554950735, rs556290847, rs556476122, rs556855397, rs557260134, rs558206291, rs558936201, rs559071280, rs559134486, rs559774987, rs560242799, rs561204544, rs561318344, rs561855524, rs562062966, rs562374246, rs562399936, rs562877651, rs563010130, rs563287967, rs563732911, rs565074524, rs565353360, rs566143834, rs566441269, rs567387918, rs567643181, rs567906074, rs568474622, rs568527542, rs568564112, rs568711543, rs569422691, rs569673597, rs569701964, rs570082807, rs570363519, rs570839541, rs570944406, rs571215555, rs571476926, rs571562221, rs572252158, rs572316740, rs573023527, rs573458295, rs573683984, rs574622546, rs574655114, rs574912557, rs574946387, rs575906328, rs576387356, rs577085953, rs577345195, rs577447615, rs745570289, rs745586339, rs745617955, rs745640192, rs745663150, rs745897503, rs745953356, rs746444672, rs746755234, rs746962602, rs746987820, rs747115806, rs747191960, rs747600230, rs747666720, rs748362626, rs748417654, rs748446140, rs748494867, rs748747574, rs748953052, rs749698182, rs749751769, rs750185333, rs750875844, rs751027972, rs751325346, rs751544205, rs751917840, rs752110149, rs752258449, rs752414079, rs752676984, rs752681827, rs752729869, rs753302821, rs753924368, rs754046943, rs754115632, rs754247562, rs754642371, rs754898637, rs755061758, rs755499995, rs755603051, rs755858436, rs755980592, rs756176987, rs756383000, rs756867305, rs756875519, rs756891658, rs757490802, rs757721512, rs758179886, rs758192735, rs758831300, rs758919178, rs759040679, rs759067678, rs759846028, rs759969349, rs760028617, rs760184875, rs760335222, rs760520323, rs760769978, rs760995260, rs761215628, rs761543892, rs761599481, rs761647644, rs761832101, rs762551524, rs764650833, rs772522961, rs772626724, rs772815802, rs772883352, rs772916031, rs773126795, rs773273781, rs773670132, rs774065480, rs774177361, rs774196233, rs774247573, rs774493749, rs774635085, rs774680652, rs774709008, rs774793390, rs775316139, rs775525097, rs775599308, rs775956260, rs776223814, rs776415050, rs776707156, rs776966126, rs777142178, rs777800202, rs777954156, rs777982400, rs778006147, rs778327867, rs778343447, rs778463167, rs778880307, rs778919124, rs779472664, rs779542288, rs779597455, rs779756520, rs779886571, rs780047340, rs780284678, rs781170854, rs781440793, rs781466038, rs781497809, VAR 000643, VAR 000644, rs762766868, rs762869825, rs762932648, rs763263721, rs763333861, rs763348157, rs763606461, rs763650454, rs763816050, rs764031664, rs764032204, rs764157867, rs764210608, rs764325965, rs764910753, rs764996088, rs765406427, rs765694714, rs766055151, rs766564537, rs766939690, rs767860422, rs767886491, rs768184827, rs768720746, rs768771162, rs769165532, rs769848609, rs770499173, rs770678622, rs771435413, rs771803274, rs771868523, rs772057064, rs772255301, and rs772397071.

[0058] In one example, the guide RNA used in the invention may comprise at least one 20 nucleotide (nt) target nucleic acid sequence listed in Table 3. Provided in Table 3 are the gene symbol and the sequence identifier of the gene (Gene SEQ ID NO), the gene sequence including 1-5 kilobase pairs upstream and/or downstream of the target gene (Extended Gene SEQ ID NO), and the 20 nt target nucleic acid sequence (20 nt Target Sequence SEQ ID NO). In the sequence listing the respective target gene, the strand for targeting the gene (noted by a (+) strand or (−) strand in the sequence listing), the associated PAM type and the PAM sequence are described for each of the 20 nt target nucleic acid sequences (SEQ ID NO: 5,305-14,350). It is understood in the art that the spacer sequence, where “T” is “U,” may be an RNA sequence corresponding to the 20 nt sequences listed in Table 3.

TABLE 3
Nucleic Acid Sequences

| Gene | Gene | Extended Gene | 20 nt Target Sequence |
|---|---|---|---|
| Symbol | SEQ ID NO | SEQ ID NO | SEQ ID NO |
| APOC3 | 5,303 | 5,304 | 5,305-14,350 |

[0059] In one example, the guide RNA used in the invention may comprise at least one spacer sequence that, where “T” is “U”, may be an RNA sequence corresponding to a 20 nucleotide (nt) target sequence such as, but not limited to, any of SEQ ID NO: 5,305-14,350.

[0060] In one example, the guide RNA used in the invention may comprise at least one spacer sequence which, where “T” is “U,” is an RNA sequence corresponding to the 20 nt sequences such as, but not limited to, any of SEQ ID NO: 5,305-14,350.

[0061] In one example, a guide RNA may comprise a 20 nucleotide (nt) target nucleic acid sequence associated with the PAM type such as, but not limited to, NAAAAC, NNAGAAW, NNGRRT, NNNNGHTT, NRG, or YTN. As a non-limiting example, the 20 nt target nucleic acid sequence for a specific target gene and a specific PAM type may be, where “T” is “U,” the RNA sequence corresponding to any one of the 20 nt nucleic acid sequences in Table 4.

TABLE 4
Nucleic Acid Sequences by PAM Type

| | PAM: | | PAM: | | | PAM: |
|---|---|---|---|---|---|---|
| | NAAAAC | PAM: | NNGRRT | | PAM: NRG | YTN |
| | 20 nt | NNAGAAW | 20 nt | PAM: | 20 nt | 20 nt |
| | Target | 20 nt Target | Target | NNNNGHTT | Target | Target |
| | Nucleic | Nucleic | Nucleic | 20 nt Target | Nucleic | Nucleic |
| Gene | Acid SEQ | Acid SEQ | Acid SEQ | Nucleic Acid | Acid SEQ | Acid SEQ |
| Symbol | ID NO | ID NO | ID NO | SEQ ID NO | ID NO | ID NO |
| APOC3 | 5,305-5,319 | 5,320-5,404 | 5,405-5,783 | 5,784-5,986 | 5,987-10,852 | 10,853-14,351 |

[0062] In one example, a guide RNA may comprise a 22 nucleotide (nt) target nucleic acid sequence associated with the YTN PAM type. As a non-limiting example, the 22 nt target nucleic acid sequence for a specific target gene may comprise a 20 nt core sequence where the 20 nt core sequence, where “T” is “U,” may be the RNA sequence corresponding to SEQ ID NO: 10,853-14,350. As another non-limiting example, the 22 nt target nucleic acid sequence for a specific target gene may comprise a core sequence where the core sequence, where “T” is “U,” may be a fragment, segment or region of the RNA sequence corresponding to any of SEQ ID NO: 10,853-14,350.

[0063] Provided herein are cellular, ex vivo and in vivo methods for using genome engineering tools to create permanent changes to the genome by deleting or mutating the APOCIII gene or other DNA sequences that encode regulatory elements of the APOCIII gene. Such methods use endonucleases, such as CRISPR-associated (Cas9, Cpf1 and the like) nucleases, to permanently edit within or near the genomic locus of the APOCIII gene or other DNA sequences that encode regulatory elements of the APOCIII gene. In this way, examples set forth in the present disclosure can help to reduce or eliminate the expression of the APOCIII gene with a single treatment (rather than deliver potential therapies for the lifetime of the patient).

[0064] Provided herein are methods for treating a patient with Dyslipidemias. An aspect of such method is an ex vivo cell-based therapy. For example, a biopsy of the patient's liver is performed. Then, a liver specific progenitor cell or primary hepatocyte is isolated from the biopsied material. Next, the chromosomal DNA of these progenitor cells or primary hepatocytes is edited using the materials and methods described herein. Finally, the progenitor cells or primary hepatocytes are implanted into the patient. Any source or type of cell may be used as the progenitor cell.

[0065] Another aspect of such method is an ex vivo cell-based therapy. For example, a patient specific induced pluripotent stem cell (iPSC) can be created. Then, the chromosomal DNA of these iPS cells can be edited using the materials and methods described herein. Next, the genome-edited iPSCs are differentiated into other cells. Finally, the differentiated cells are implanted into the patient.

[0066] Yet another aspect of such method is an ex vivo cell-based therapy. For example, a mesenchymal stem cell can be isolated from the patient, which is isolated from the patient's bone marrow or peripheral blood. Next, the chromosomal DNA of these mesenchymal stem cells is edited using the materials and methods described herein. Next, the genome-edited mesenchymal stem cells are differentiated into any type of cell, e.g., hepatocytes. Finally, the differentiated cells, e.g., hepatocytes are implanted into the patient.

[0067] One advantage of an ex vivo cell therapy approach is the ability to conduct a comprehensive analysis of the therapeutic prior to administration. Nuclease-based therapeutics can have some level of off-target effects. Performing gene editing ex vivo allows one to fully characterize the edited cell population prior to implantation. The present disclosure includes sequencing the entire genome of the edited cells to ensure that the off-target effects, if any, are in genomic locations associated with minimal risk to the patient. Furthermore, populations of specific cells, including clonal populations, can be isolated prior to implantation.

[0068] Another advantage of ex vivo cell therapy relates to genetic modification in iPSCs compared to other primary cell sources. iPSCs are prolific, making it easy to obtain the large number of cells that will be required for a cell-based therapy. Furthermore, iPSCs are an ideal cell type for performing clonal isolations. This allows screening for the correct genomic modification, without risking a decrease in viability. In contrast, other primary cells, such as hepatocytes, are viable for only a few passages and difficult to clonally expand. Thus, manipulation of iPSCs for the treatment of Dyslipidemias can be much easier, and can shorten the amount of time needed to make the desired genetic modification.

[0069] Methods can also include an in vivo based therapy. Chromosomal DNA of the cells in the patient is edited using the materials and methods described herein.

[0070] Although certain cells present an attractive target for ex vivo treatment and therapy, increased efficacy in delivery may permit direct in vivo delivery to such cells. Ideally the targeting and editing would be directed to the relevant cells. Cleavage in other cells can also be prevented by the use of promoters only active in certain cells and or developmental stages. Additional promoters are inducible, and therefore can be temporally controlled if the nuclease is delivered as a plasmid. The amount of time that delivered RNA and protein remain in the cell can also be adjusted using treatments or domains added to change the half-life. In vivo treatment would eliminate a number of treatment steps, but a lower rate of delivery can require higher rates of editing. In vivo treatment can eliminate problems and losses from ex vivo treatment and engraftment.

[0071] An advantage of in vivo gene therapy can be the ease of therapeutic production and administration. The same therapeutic approach and therapy will have the potential to be used to treat more than one patient, for example a number of patients who share the same or similar genotype or allele. In contrast, ex vivo cell therapy typically requires using a patient's own cells, which are isolated, manipulated and returned to the same patient.

[0072] Also provided herein is a cellular method for editing the APOCIII gene in a cell by genome editing. For example, a cell can be isolated from a patient or animal. Then, the chromosomal DNA of the cell can be edited using the materials and methods described herein.

[0073] The methods provided herein, regardless of whether a cellular or ex vivo or in vivo method, can involve reducing (knock-down) or eliminating (knock-out) the expression of the APOCIII gene by introducing one or more insertions, deletions or mutations within or near the APOCIII gene or other DNA sequences that encode regulatory elements of the APOCIII gene.

[0074] For example, the knock-down or knock-out strategy can involve disrupting the reading frame in the APOCIII gene by introducing random insertions or deletions (indels) that arise due to the imprecise NHEJ repair pathway. This can be achieved by inducing one single stranded break or double stranded break in the gene of interest with one or more CRISPR endonucleases and a gRNA (e.g., crRNA+tracrRNA, or sgRNA), or two or more single stranded breaks or double stranded breaks in the gene of interest with two or more CRISPR endonucleases and two or more sgRNAs. This approach can require development and optimization of sgRNAs for the APOCIII gene.

[0075] Alternatively, the knock-down or knock-out strategy can also involve deletion of one or more segments within or near the APOCIII gene or other DNA sequences that encode regulatory elements of the APOCIII gene. This deletion strategy requires at least a pair of gRNAs (e.g., crRNA+tracrRNA, or sgRNA) capable of binding to two different sites within or near the APOCIII gene and one or more CRISPR endonucleases. The CRISPR endonucleases, configured with the two gRNAs, induce two double stranded breaks at the desired locations. After cleavage, the two ends, regardless of whether blunt or with overhangs, can be joined by NHEJ, leading to the deletion of the intervening segment. NHEJ repair pathways can lead to insertions, deletions or mutations at the joints.

[0076] In addition to the above genome editing strategies, another strategy involves modulating expression, function, or activity of APOCIII by editing in the regulatory sequence.

[0077] In addition to the editing options listed above, Cas9 or similar proteins can be used to target effector domains to the same target sites that can be identified for editing, or additional target sites within range of the effector domain. A range of chromatin modifying enzymes, methylases or demethylases can be used to alter expression of the target gene. One possibility is reducing the expression of the APOCIII protein if a mutation leads to undesirable activity. These types of epigenetic regulation have some advantages, particularly as they are limited in possible off-target effects.

[0078] A number of types of genomic target sites can be present in addition to the coding and splicing sequences.

[0079] The regulation of transcription and translation implicates a number of different classes of sites that interact with cellular proteins or nucleotides. Often the DNA binding sites of transcription factors or other proteins can be targeted for mutation or deletion to study the role of the site, though they can also be targeted to change gene expression. Sites can be added through non-homologous end joining NHEJ or direct genome editing by homology directed repair (HDR). Increased use of genome sequencing, RNA expression and genome-wide studies of transcription factor binding have increased the ability to identify how the sites lead to developmental or temporal gene regulation. These control systems can be direct or can involve extensive cooperative regulation that can require the integration of activities from multiple enhancers. Transcription factors typically bind 6-12 bp-long degenerate DNA sequences. The low level of specificity provided by individual sites suggests that complex interactions and rules are involved in binding and the functional outcome. Binding sites with less degeneracy can provide simpler means of regulation. Artificial transcription factors can be designed to specify longer sequences that have less similar sequences in the genome and have lower potential for off-target cleavage. Any of these types of binding sites can be mutated, deleted or even created to enable changes in gene regulation or expression (Canver, M. C. et al., Nature (2015)).

[0080] Another class of gene regulatory regions having these features is microRNA (miRNA) binding sites. miRNAs are non-coding RNAs that play key roles in post-transcriptional gene regulation. miRNA can regulate the expression of 30% of all mammalian protein-encoding genes. Specific and potent gene silencing by double stranded RNA (RNAi) was discovered, plus additional small noncoding RNA (Canver, M. C. et al., Nature (2015)). The largest class of noncoding RNAs important for gene silencing are miRNAs. In mammals, miRNAs are first transcribed as a long RNA transcripts, which can be separate transcriptional units, part of protein introns, or other transcripts. The long transcripts are called primary miRNA (pri-miRNA) that include imperfectly base-paired hairpin structures. These pri-miRNA can be cleaved into one or more shorter precursor miRNAs (pre-miRNAs) by Microprocessor, a protein complex in the nucleus, involving Drosha.

[0081] Pre-miRNAs are short stem loops ˜70 nucleotides in length with a 2-nucleotide 3′-overhang that are exported, into the mature 19-25 nucleotide miRNA:miRNA* duplexes. The miRNA strand with lower base pairing stability (the guide strand) can be loaded onto the RNA-induced silencing complex (RISC). The passenger guide strand (marked with *), can be functional, but is usually degraded. The mature miRNA tethers RISC to partly complementary sequence motifs in target mRNAs predominantly found within the 3′ untranslated regions (UTRs) and induces posttranscriptional gene silencing (Bartel, D. P. Cell 136, 215-233 (2009); Saj, A. & Lai, E. C. Curr Opin Genet Dev 21, 504-510 (2011)).

[0082] miRNAs can be important in development, differentiation, cell cycle and growth control, and in virtually all biological pathways in mammals and other multicellular organisms. miRNAs can also be involved in cell cycle control, apoptosis and stem cell differentiation, hematopoiesis, hypoxia, muscle development, neurogenesis, insulin secretion, cholesterol metabolism, aging, viral replication and immune responses.

[0083] A single miRNA can target hundreds of different mRNA transcripts, while an individual miRNA transcript can be targeted by many different miRNAs. More than 28645 microRNAs have been annotated in the latest release of miRBase (v.21). Some miRNAs can be encoded by multiple loci, some of which can be expressed from tandemly co-transcribed clusters. The features allow for complex regulatory networks with multiple pathways and feedback controls. miRNAs can be integral parts of these feedback and regulatory circuits and can help regulate gene expression by keeping protein production within limits (Herranz, H. & Cohen, S. M. Genes Dev 24, 1339-1344 (2010); Posadas, D. M. & Carthew, R. W. Curr Opin Genet Dev 27, 1-6 (2014)).

[0084] miRNA can also be important in a large number of human diseases that are associated with abnormal miRNA expression. This association underscores the importance of the miRNA regulatory pathway. Recent miRNA deletion studies have linked miRNA with regulation of the immune responses (Stern-Ginossar, N. et al., Science 317, 376-381 (2007)).

[0085] miRNA also has a strong link to cancer and can play a role in different types of cancer. miRNAs have been found to be downregulated in a number of tumors. miRNA can be important in the regulation of key cancer-related pathways, such as cell cycle control and the DNA damage response, and can therefore be used in diagnosis and can be targeted clinically. MicroRNAs can delicately regulate the balance of angiogenesis, such that experiments depleting all microRNAs suppresses tumor angiogenesis (Chen, S. et al., Genes Dev 28, 1054-1067 (2014)).

[0086] As has been shown for protein coding genes, miRNA genes can also be subject to epigenetic changes occurring with cancer. Many miRNA loci can be associated with CpG islands increasing their opportunity for regulation by DNA methylation (Weber, B., Stresemann, C., Brueckner, B. & Lyko, F. Cell Cycle 6, 1001-1005 (2007)). The majority of studies have used treatment with chromatin remodeling drugs to reveal epigenetically silenced miRNAs.

[0087] In addition to their role in RNA silencing, miRNA can also activate translation (Posadas, D. M. & Carthew, R. W. Curr Opin Genet Dev 27, 1-6 (2014)). Knocking out miRNA sites may lead to decreased expression of the targeted gene, while introducing these sites may increase expression.

[0088] Individual miRNA can be knocked out using any suitable technique(s) known in the art.

[0089] According to the present invention, any of the microRNA (miRNA) or their binding sites may be incorporated into the compositions of the invention.

[0090] The compositions may have a region such as, but not limited to, a region comprising the sequence of any of the microRNAs listed in SEQ ID NOs: 632-4,715 the reverse complement of the microRNAs listed in SEQ ID NOs: 632-4,715, or the microRNA anti-seed region of any of the microRNAs listed in SEQ ID NOs: 632-4,715.

[0091] The compositions of the invention may comprise one or more microRNA target sequences, microRNA sequences, or microRNA seeds. Such sequences may correspond to any known microRNA such as those taught in US Publication US2005/0261218 and US Publication US2005/0059005. As a non-limiting example, known microRNAs, their sequences, and their binding site sequences in the human genome are listed in SEQ ID NOs: 632-4,715.

[0092] A microRNA sequence comprises a “seed” sequence, i.e., a sequence in the region of positions 2-8 of the mature microRNA, which sequence has perfect Watson-Crick complementarity to the miRNA target sequence. A microRNA seed may comprise positions 2-8 or 2-7 of the mature microRNA. In some aspects, a microRNA seed may comprise 7 nucleotides (e.g., nucleotides 2-8 of the mature microRNA), wherein the seed-complementary site in the corresponding miRNA target is flanked by an adenine (A) opposed to microRNA position 1. In some aspects, a microRNA seed may comprise 6 nucleotides (e.g., nucleotides 2-7 of the mature microRNA), wherein the seed-complementary site in the corresponding miRNA target is flanked by an adenine (A) opposed to microRNA position 1. See for example, Grimson A, Farh K K, Johnston W K, Garrett-Engele P, Lim L P, Bartel D P; Mol Cell. 2007 Jul. 6; 27(1):91-105. The bases of the microRNA seed have complete complementarity with the target sequence.

[0093] Identification of microRNA, microRNA target regions, and their expression patterns and role in biology have been reported (Bonauer et al., Curr Drug Targets 2010 11:943-949; Anand and Cheresh Curr Opin Hematol 2011 18:171-176; Contreras and Rao Leukemia 2012 26:404-413 (2011 December 20. doi: 10.1038/leu.2011.356); Bartel Cell 2009 136:215-233; Landgraf et al, Cell, 2007 129:1401-1414; Gentner and Naldini, Tissue Antigens. 2012 80:393-403).

[0094] As used herein, the term “microRNA site” refers to a microRNA target site or a microRNA recognition site, or any nucleotide sequence to which a microRNA binds or associates. It should be understood that “binding” may follow traditional Watson-Crick hybridization rules or may reflect any stable association of the microRNA with the target sequence at or adjacent to the microRNA site.

[0095] Conversely, for the purposes of the compositions of the present invention, microRNA binding sites can be engineered out of (i.e. removed from) sequences in which they naturally occur (e.g., miR-122, a microRNA abundant in the liver) in order to increase protein expression in specific tissues. For example, miR-122 binding sites may be removed to improve protein expression in the liver.

[0096] Specifically, microRNAs are known to be differentially expressed in immune cells (also called hematopoietic cells), such as antigen presenting cells (APCs) (e.g. dendritic cells and macrophages), macrophages, monocytes, B lymphocytes, T lymphocytes, granulocytes, natural killer cells, etc. Immune cell specific microRNAs are involved in immunogenicity, autoimmunity, the immune-response to infection, inflammation, as well as unwanted immune response after gene therapy and tissue/organ transplantation. Immune cells specific microRNAs also regulate many aspects of development, proliferation, differentiation and apoptosis of hematopoietic cells (immune cells). For example, miR-142 and miR-146 are exclusively expressed in the immune cells, particularly abundant in myeloid dendritic cells. Introducing the miR-142 binding site into the 3′-UTR of a polypeptide of the present invention can selectively suppress the gene expression in the antigen presenting cells through miR-142 mediated mRNA degradation, limiting antigen presentation in professional APCs (e.g. dendritic cells) and thereby preventing antigen-mediated immune response after gene delivery (see, Annoni A et al., blood, 2009, 114, 5152-5161).

[0097] In one embodiment, microRNAs binding sites that are known to be expressed in immune cells, in particular, the antigen presenting cells, can be engineered into the polynucleotides to suppress the expression of the polynucleotide in APCs through microRNA mediated RNA degradation, subduing the antigen-mediated immune response, while the expression of the polynucleotide is maintained in non-immune cells where the immune cell specific microRNAs are not expressed.

[0098] Many microRNA expression studies have been conducted, and are described in the art, to profile the differential expression of microRNAs in various cancer cells/tissues and other diseases. Some microRNAs are abnormally over-expressed in certain cancer cells and others are under-expressed. For example, microRNAs are differentially expressed in cancer cells (WO2008/154098, US2013/0059015, US2013/0042333, WO2011/157294); cancer stem cells (US2012/0053224); pancreatic cancers and diseases (US2009/0131348, US2011/0171646, US2010/0286232, U.S. Pat. No. 8,389,210); asthma and inflammation (U.S. Pat. No. 8,415,096); prostate cancer (US2013/0053264); hepatocellular carcinoma (WO2012/151212, US2012/0329672, WO2008/054828, U.S. Pat. No. 8,252,538); lung cancer cells (WO2011/076143, WO2013/033640, WO2009/070653, US2010/0323357); cutaneous T cell lymphoma (WO2013/011378); colorectal cancer cells (WO2011/0281756, WO2011/076142); cancer positive lymph nodes (WO2009/100430, US2009/0263803); nasopharyngeal carcinoma (EP2112235); chronic obstructive pulmonary disease (US2012/0264626, US2013/0053263); thyroid cancer (WO2013/066678); ovarian cancer cells (US2012/0309645, WO2011/095623); breast cancer cells (WO2008/154098, WO2007/081740, US2012/0214699), leukemia and lymphoma (WO2008/073915, US2009/0092974, US2012/0316081, US2012/0283310, WO2010/018563).

[0099] Non-limiting examples of microRNA sequences and the targeted tissues and/or cells are described in SEQ ID NOs: 632-4,715.

[0100] Human Cells

[0101] For ameliorating Dyslipidemias or any disorder associated with APOCIII, as described and illustrated herein, the principal targets for gene editing are human cells. For example, in the ex vivo methods, the human cells can be somatic cells, which after being modified using the techniques as described, can give rise to differentiated cells, e.g., hepatocytes or progenitor cells. For example, in the in vivo methods, the human cells may be hepatocytes, renal cells or cells from other affected organs.

[0102] By performing gene editing in autologous cells that are derived from and therefore already completely matched with the patient in need, it is possible to generate cells that can be safely re-introduced into the patient, and effectively give rise to a population of cells that will be effective in ameliorating one or more clinical conditions associated with the patient's disease.

[0103] Stem cells are capable of both proliferation and giving rise to more progenitor cells, these in turn having the ability to generate a large number of mother cells that can in turn give rise to differentiated or differentiable daughter cells. The daughter cells themselves can be induced to proliferate and produce progeny that subsequently differentiate into one or more mature cell types, while also retaining one or more cells with parental developmental potential. The term “stem cell” refers then, to a cell with the capacity or potential, under particular circumstances, to differentiate to a more specialized or differentiated phenotype, and which retains the capacity, under certain circumstances, to proliferate without substantially differentiating. In one aspect, the term progenitor or stem cell refers to a generalized mother cell whose descendants (progeny) specialize, often in different directions, by differentiation, e.g., by acquiring completely individual characters, as occurs in progressive diversification of embryonic cells and tissues. Cellular differentiation is a complex process typically occurring through many cell divisions. A differentiated cell may derive from a multipotent cell that itself is derived from a multipotent cell, and so on. While each of these multipotent cells may be considered stem cells, the range of cell types that each can give rise to may vary considerably. Some differentiated cells also have the capacity to give rise to cells of greater developmental potential. Such capacity may be natural or may be induced artificially upon treatment with various factors. In many biological instances, stem cells can also be “multipotent” because they can produce progeny of more than one distinct cell type, but this is not required for “stem-ness.”

[0104] Self-renewal can be another important aspect of the stem cell. In theory, self-renewal can occur by either of two major mechanisms. Stem cells can divide asymmetrically, with one daughter retaining the stem state and the other daughter expressing some distinct other specific function and phenotype. Alternatively, some of the stem cells in a population can divide symmetrically into two stems, thus maintaining some stem cells in the population as a whole, while other cells in the population give rise to differentiated progeny only. Generally, “progenitor cells” have a cellular phenotype that is more primitive (i.e., is at an earlier step along a developmental pathway or progression than is a fully differentiated cell). Often, progenitor cells also have significant or very high proliferative potential. Progenitor cells can give rise to multiple distinct differentiated cell types or to a single differentiated cell type, depending on the developmental pathway and on the environment in which the cells develop and differentiate.

[0105] In the context of cell ontogeny, the adjective “differentiated,” or “differentiating” is a relative term. A “differentiated cell” is a cell that has progressed further down the developmental pathway than the cell to which it is being compared. Thus, stem cells can differentiate into lineage-restricted precursor cells (such as a myocyte progenitor cell), which in turn can differentiate into other types of precursor cells further down the pathway (such as a myocyte precursor), and then to an end-stage differentiated cell, such as a myocyte, which plays a characteristic role in a certain tissue type, and may or may not retain the capacity to proliferate further.

[0106] Induced Pluripotent Stem Cells

[0107] The genetically engineered human cells described herein can be induced pluripotent stem cells (iPSCs). An advantage of using iPSCs is that the cells can be derived from the same subject to which the progenitor cells are to be administered. That is, a somatic cell can be obtained from a subject, reprogrammed to an induced pluripotent stem cell, and then re-differentiated into a progenitor cell to be administered to the subject (e.g., autologous cells). Because the progenitors are essentially derived from an autologous source, the risk of engraftment rejection or allergic response can be reduced compared to the use of cells from another subject or group of subjects. In addition, the use of iPSCs negates the need for cells obtained from an embryonic source. Thus, in one aspect, the stem cells used in the disclosed methods are not embryonic stem cells.

[0108] Although differentiation is generally irreversible under physiological contexts, several methods have been recently developed to reprogram somatic cells to iPSCs. Exemplary methods are known to those of skill in the art and are described briefly herein below.

[0109] The term “reprogramming” refers to a process that alters or reverses the differentiation state of a differentiated cell (e.g., a somatic cell). Stated another way, reprogramming refers to a process of driving the differentiation of a cell backwards to a more undifferentiated or more primitive type of cell. It should be noted that placing many primary cells in culture can lead to some loss of fully differentiated characteristics. Thus, simply culturing such cells included in the term differentiated cells does not render these cells non-differentiated cells (e.g., undifferentiated cells) or pluripotent cells. The transition of a differentiated cell to pluripotency requires a reprogramming stimulus beyond the stimuli that lead to partial loss of differentiated character in culture. Reprogrammed cells also have the characteristic of the capacity of extended passaging without loss of growth potential, relative to primary cell parents, which generally have capacity for only a limited number of divisions in culture.

[0110] The cell to be reprogrammed can be either partially or terminally differentiated prior to reprogramming. Reprogramming can encompass complete reversion of the differentiation state of a differentiated cell (e.g., a somatic cell) to a pluripotent state or a multipotent state. Reprogramming can encompass complete or partial reversion of the differentiation state of a differentiated cell (e.g., a somatic cell) to an undifferentiated cell (e.g., an embryonic-like cell). Reprogramming can result in expression of particular genes by the cells, the expression of which further contributes to reprogramming. In certain examples described herein, reprogramming of a differentiated cell (e.g., a somatic cell) can cause the differentiated cell to assume an undifferentiated state (e.g., is an undifferentiated cell). The resulting cells are referred to as “reprogrammed cells,” or “induced pluripotent stem cells (iPSCs or iPS cells).”

[0111] Reprogramming can involve alteration, e.g., reversal, of at least some of the heritable patterns of nucleic acid modification (e.g., methylation), chromatin condensation, epigenetic changes, genomic imprinting, etc., that occur during cellular differentiation. Reprogramming is distinct from simply maintaining the existing undifferentiated state of a cell that is already pluripotent or maintaining the existing less than fully differentiated state of a cell that is already a multipotent cell (e.g., a myogenic stem cell). Reprogramming is also distinct from promoting the self-renewal or proliferation of cells that are already pluripotent or multipotent, although the compositions and methods described herein can also be of use for such purposes, in some examples.

[0112] Many methods are known in the art that can be used to generate pluripotent stem cells from somatic cells. Any such method that reprograms a somatic cell to the pluripotent phenotype would be appropriate for use in the methods described herein.

[0113] Reprogramming methodologies for generating pluripotent cells using defined combinations of transcription factors have been described. Mouse somatic cells can be converted to ES cell-like cells with expanded developmental potential by the direct transduction of Oct4, Sox2, Klf4, and c-Myc; see, e.g., Takahashi and Yamanaka, Cell 126(4): 663-76 (2006). iPSCs resemble ES cells, as they restore the pluripotency-associated transcriptional circuitry and much of the epigenetic landscape. In addition, mouse iPSCs satisfy all the standard assays for pluripotency: specifically, in vitro differentiation into cell types of the three germ layers, teratoma formation, contribution to chimeras, germline transmission [see, e.g., Maherali and Hochedlinger, Cell Stem Cell. 3(6):595-605 (2008)], and tetraploid complementation.

[0114] Human iPSCs can be obtained using similar transduction methods, and the transcription factor trio, OCT4, SOX2, and NANOG, has been established as the core set of transcription factors that govern pluripotency; see, e.g., Budniatzky and Gepstein, Stem Cells Transl Med. 3(4):448-57 (2014); Barrett et al., Stem Cells Trans Med 3:1-6 sctm.2014-0121 (2014); Focosi et al., Blood Cancer Journal 4: e211 (2014); and references cited therein. The production of iPSCs can be achieved by the introduction of nucleic acid sequences encoding stem cell-associated genes into an adult, somatic cell, historically using viral vectors.

[0115] iPSCs can be generated or derived from terminally differentiated somatic cells, as well as from adult stem cells, or somatic stem cells. That is, a non-pluripotent progenitor cell can be rendered pluripotent or multipotent by reprogramming. In such instances, it may not be necessary to include as many reprogramming factors as required to reprogram a terminally differentiated cell. Further, reprogramming can be induced by the non-viral introduction of reprogramming factors, e.g., by introducing the proteins themselves, or by introducing nucleic acids that encode the reprogramming factors, or by introducing messenger RNAs that upon translation produce the reprogramming factors (see e.g., Warren et al., Cell Stem Cell, 7(5):618-30 (2010). Reprogramming can be achieved by introducing a combination of nucleic acids encoding stem cell-associated genes, including, for example, Oct-4 (also known as Oct-3/4 or Pouf51), Sox1, Sox2, Sox3, Sox 15, Sox 18, NANOG, Klf1, Klf2, Klf4, Klf5, NR5A2, c-Myc, 1-Myc, n-Myc, Rem2, Tert, and LIN28. Reprogramming using the methods and compositions described herein can further comprise introducing one or more of Oct-3/4, a member of the Sox family, a member of the Klf family, and a member of the Myc family to a somatic cell. The methods and compositions described herein can further comprise introducing one or more of each of Oct-4, Sox2, Nanog, c-MYC and Klf4 for reprogramming. As noted above, the exact method used for reprogramming is not necessarily critical to the methods and compositions described herein. However, where cells differentiated from the reprogrammed cells are to be used in, e.g., human therapy, in one aspect the reprogramming is not effected by a method that alters the genome. Thus, in such examples, reprogramming can be achieved, e.g., without the use of viral or plasmid vectors.

[0116] The efficiency of reprogramming (i.e., the number of reprogrammed cells) derived from a population of starting cells can be enhanced by the addition of various agents, e.g., small molecules, as shown by Shi et al., Cell-Stem Cell 2:525-528 (2008); Huangfu et al., Nature Biotechnology 26(7):795-797 (2008) and Marson et al., Cell-Stem Cell 3: 132-135 (2008). Thus, an agent or combination of agents that enhance the efficiency or rate of induced pluripotent stem cell production can be used in the production of patient-specific or disease-specific iPSCs. Some non-limiting examples of agents that enhance reprogramming efficiency include soluble Wnt, Wnt conditioned media, BIX-01294 (a G9a histone methyltransferase), PD0325901 (a MEK inhibitor), DNA methyltransferase inhibitors, histone deacetylase (HDAC) inhibitors, valproic acid, 5′-azacytidine, dexamethasone, suberoylanilide, hydroxamic acid (SAHA), vitamin C, and trichostatin (TSA), among others.

[0117] Other non-limiting examples of reprogramming enhancing agents include: Suberoylanilide Hydroxamic Acid (SAHA (e.g., MK0683, vorinostat) and other hydroxamic acids), BML-210, Depudecin (e.g., (−)-Depudecin), HC Toxin, Nullscript (4-(1,3-Dioxo-1H,3H-benzo[de]isoquinolin-2-yl)-N-hydroxybutanamide), Phenylbutyrate (e.g., sodium phenylbutyrate) and Valproic Acid ((VP A) and other short chain fatty acids), Scriptaid, Suramin Sodium, Trichostatin A (TSA), APHA Compound 8, Apicidin, Sodium Butyrate, pivaloyloxymethyl butyrate (Pivanex, AN-9), Trapoxin B, Chlamydocin, Depsipeptide (also known as FR901228 or FK228), benzamides (e.g., CI-994 (e.g., N-acetyl dinaline) and MS-27-275), MGCD0103, NVP-LAQ-824, CBHA (m-carboxycinnaminic acid bishydroxamic acid), JNJ16241199, Tubacin, A-161906, proxamide, oxamflatin, 3-C1-UCHA (e.g., 6-(3-chlorophenylureido)caproic hydroxamic acid), AOE (2-amino-8-oxo-9, 10-epoxydecanoic acid), CHAP31 and CHAP 50. Other reprogramming enhancing agents include, for example, dominant negative forms of the HDACs (e.g., catalytically inactive forms), siRNA inhibitors of the HDACs, and antibodies that specifically bind to the HDACs. Such inhibitors are available, e.g., from BIOMOL International, Fukasawa, Merck Biosciences, Novartis, Gloucester Pharmaceuticals, Titan Pharmaceuticals, MethylGene, and Sigma Aldrich.

[0118] To confirm the induction of pluripotent stem cells for use with the methods described herein, isolated clones can be tested for the expression of a stem cell marker. Such expression in a cell derived from a somatic cell identifies the cells as induced pluripotent stem cells. Stem cell markers can be selected from the non-limiting group including SSEA3, SSEA4, CD9, Nanog, Fbxl5, Ecatl, Esgl, Eras, Gdf3, Fgf4, Cripto, Daxl, Zpf296, Slc2a3, Rexl, Utfl, and Natl. In one case, for example, a cell that expresses Oct4 or Nanog is identified as pluripotent. Methods for detecting the expression of such markers can include, for example, RT-PCR and immunological methods that detect the presence of the encoded polypeptides, such as Western blots or flow cytometric analyses. Detection can involve not only RT-PCR, but can also include detection of protein markers. Intracellular markers may be best identified via RT-PCR, or protein detection methods such as immunocytochemistry, while cell surface markers are readily identified, e.g., by immunocytochemistry.

[0119] The pluripotent stem cell character of isolated cells can be confirmed by tests evaluating the ability of the iPSCs to differentiate into cells of each of the three germ layers. As one example, teratoma formation in nude mice can be used to evaluate the pluripotent character of the isolated clones. The cells can be introduced into nude mice and histology and/or immunohistochemistry can be performed on a tumor arising from the cells. The growth of a tumor comprising cells from all three germ layers, for example, further indicates that the cells are pluripotent stem cells.

[0120] Hepatocytes

[0121] In some aspects, the genetically engineered human cells described herein are hepatocytes. A hepatocyte is a cell of the main parenchymal tissue of the liver. Hepatocytes make up 70-85% of the liver's mass. These cells are involved in: protein synthesis; protein storage; transformation of carbohydrates; synthesis of cholesterol, bile salts and phospholipids; detoxification, modification, and excretion of exogenous and endogenous substances; and initiation of formation and secretion of bile.

[0122] Creating Patient Specific iPSCs

[0123] One step of the ex vivo methods of the present disclosure can involve creating a patient specific iPS cell, patient specific iPS cells, or a patient specific iPS cell line. There are many established methods in the art for creating patient specific iPS cells, as described in Takahashi and Yamanaka 2006; Takahashi, Tanabe et al. 2007. For example, the creating step can comprise: a) isolating a somatic cell, such as a skin cell or fibroblast, from the patient; and b) introducing a set of pluripotency-associated genes into the somatic cell in order to induce the cell to become a pluripotent stem cell. The set of pluripotency-associated genes can be one or more of the genes selected from the group consisting of OCT4, SOX1, SOX2, SOX3, SOX15, SOX18, NANOG, KLF1, KLF2, KLF4, KLF5, c-MYC, n-MYC, REM2, TERT and LIN28.

[0124] Performing a Biopsy or Aspirate of the Patient's Liver or Bone Marrow

[0125] A biopsy or aspirate is a sample of tissue or fluid taken from the body. There are many different kinds of biopsies or aspirates. Nearly all of them involve using a sharp tool to remove a small amount of tissue. If the biopsy will be on the skin or other sensitive area, numbing medicine can be applied first. A biopsy or aspirate may be performed according to any of the known methods in the art. For example, in a biopsy, a needle is injected into the liver through the skin of the belly, capturing the liver tissue. For example, in a bone marrow aspirate, a large needle is used to enter the pelvis bone to collect bone marrow.

[0126] Isolating a Liver Specific Progenitor Cell or Primary Hepatocyte

[0127] Liver specific progenitor cells and primary hepatocytes may be isolated according to any method known in the art. For example, human hepatocytes are isolated from fresh surgical specimens. Healthy liver tissue is used to isolate hepatocytes by collagenase digestion. The obtained cell suspension is filtered through a 100-mm nylon mesh and sedimented by centrifugation at 50 g for 5 minutes, resuspended, and washed two to three times in cold wash medium. Human liver stem cells are obtained by culturing under stringent conditions of hepatocytes obtained from fresh liver preparations. Hepatocytes seeded on collagen-coated plates are cultured for 2 weeks. After 2 weeks, surviving cells are removed, and characterized for expression of stem cells markers (Herrera et al., STEM CELLS 2006; 24: 2840-2850).

[0128] Isolating a Mesenchymal Stem Cell

[0129] Mesenchymal stem cells can be isolated according to any method known in the art, such as from a patient's bone marrow or peripheral blood. For example, marrow aspirate can be collected into a syringe with heparin. Cells can be washed and centrifuged on a Percoll. The cells can be cultured in Dulbecco's modified Eagle's medium (DMEM) (low glucose) containing 10% fetal bovine serum (FBS) (Pittinger M F, Mackay A M, Beck S. C. et al., Science 1999; 284:143-147).

[0130] Genome Editing

[0131] The present invention provides strategies and techniques for the targeted, specific alteration of the genetic information (genome) of living organisms. As used herein, the term “alteration” or “alteration of genetic information” refers to any change in the genome of a cell. In the context of treating genetic disorders, alterations may include, but are not limited to, insertion, deletion and correction. As used herein, the term “insertion” refers to an addition of one or more nucleotides in a DNA sequence. Insertions can range from small insertions of a few nucleotides to insertions of large segments such as a cDNA or a gene. The term “deletion” refers to a loss or removal of one or more nucleotides in a DNA sequence or a loss or removal of the function of a gene. In some cases, a deletion can include, for example, a loss of a few nucleotides, an exon, an intron, a gene segment, or the entire sequence of a gene. In some cases, deletion of a gene refers to the elimination or reduction of the function or expression of a gene or its gene product. This can result from not only a deletion of sequences within or near the gene, but also other events (e.g., insertion, nonsense mutation) that disrupt the expression of the gene. The term “correction” as used herein, refers to a change of one or more nucleotides of a genome in a cell, whether by insertion, deletion or substitution. Such correction may result in a more favorable genotypic or phenotypic outcome, whether in structure or function, to the genomic site which was corrected. One non-limiting example of a “correction” includes the correction of a mutant or defective sequence to a wild-type sequence which restores structure or function to a gene or its gene product(s). Depending on the nature of the mutation, correction may be achieved via various strategies disclosed herein. In one non-limiting example, a missense mutation may be corrected by replacing the region containing the mutation with its wild-type counterpart. As another example, duplication mutations (e.g., repeat expansions) in a gene may be corrected by removing the extra sequences.

[0132] In some aspects, alterations may also include a gene knock-in, knock-out or knock-down. As used herein, the term “knock-in” refers to an addition of a DNA sequence, or fragment thereof into a genome. Such DNA sequences to be knocked-in may include an entire gene or genes, may include regulatory sequences associated with a gene or any portion or fragment of the foregoing. For example, a cDNA encoding the wild-type protein may be inserted into the genome of a cell carrying a mutant gene. Knock-in strategies need not replace the defective gene, in whole or in part. In some cases, a knock-in strategy may further involve substitution of an existing sequence with the provided sequence, e.g., substitution of a mutant allele with a wild-type copy. On the other hand, the term “knock-out” refers to the elimination of a gene or the expression of a gene. For example, a gene can be knocked out by either a deletion or an addition of a nucleotide sequence that leads to a disruption of the reading frame. As another example, a gene may be knocked out by replacing a part of the gene with an irrelevant sequence. Finally, the term “knock-down” as used herein refers to reduction in the expression of a gene or its gene product(s). As a result of a gene knock-down, the protein activity or function may be attenuated or the protein levels may be reduced or eliminated.

[0133] Genome editing generally refers to the process of modifying the nucleotide sequence of a genome, preferably in a precise or pre-determined manner. Examples of methods of genome editing described herein include methods of using site-directed nucleases to cut deoxyribonucleic acid (DNA) at precise target locations in the genome, thereby creating single-strand or double-strand DNA breaks at particular locations within the genome. Such breaks can be and regularly are repaired by natural, endogenous cellular processes, such as homology-directed repair (HDR) and non-homologous end joining (NHEJ), as recently reviewed in Cox et al., Nature Medicine 21(2), 121-31 (2015). These two main DNA repair processes consist of a family of alternative pathways. NHEJ directly joins the DNA ends resulting from a double-strand break, sometimes with the loss or addition of nucleotide sequence, which may disrupt or enhance gene expression. HDR utilizes a homologous sequence, or donor sequence, as a template for inserting a defined DNA sequence at the break point. The homologous sequence can be in the endogenous genome, such as a sister chromatid. Alternatively, the donor can be an exogenous nucleic acid, such as a plasmid, a single-strand oligonucleotide, a double-stranded oligonucleotide, a duplex oligonucleotide or a virus, that has regions of high homology with the nuclease-cleaved locus, but which can also contain additional sequence or sequence changes including deletions that can be incorporated into the cleaved target locus. A third repair mechanism can be microhomology-mediated end joining (MMEJ), also referred to as “Alternative NHEJ,” in which the genetic outcome is similar to NHEJ in that small deletions and insertions can occur at the cleavage site. MMEJ can make use of homologous sequences of a few basepairs flanking the DNA break site to drive a more favored DNA end joining repair outcome, and recent reports have further elucidated the molecular mechanism of this process; see, e.g., Cho and Greenberg, Nature 518, 174-76 (2015); Kent et al., Nature Structural and Molecular Biology, Adv. Online doi:10.1038/nsmb.2961 (2015); Mateos-Gomez et al., Nature 518, 254-57 (2015); Ceccaldi et al., Nature 528, 258-62 (2015). In some instances, it may be possible to predict likely repair outcomes based on analysis of potential microhomologies at the site of the DNA break.

[0134] Each of these genome editing mechanisms can be used to create desired genomic alterations. A step in the genome editing process can be to create one or two DNA breaks, the latter as double-strand breaks or as two single-stranded breaks, in the target locus as close as possible to the site of intended mutation. This can be achieved via the use of site-directed polypeptides, as described and illustrated herein.

[0135] CRISPR Endonuclease System

[0136] A CRISPR (Clustered Regularly Interspaced Short Palindromic Repeats) genomic locus can be found in the genomes of many prokaryotes (e.g., bacteria and archaea). In prokaryotes, the CRISPR locus encodes products that function as a type of immune system to help defend the prokaryotes against foreign invaders, such as virus and phage. There are three stages of CRISPR locus function: integration of new sequences into the CRISPR locus, expression of CRISPR RNA (crRNA), and silencing of foreign invader nucleic acid. Five types of CRISPR systems (e.g., Type I, Type II, Type III, Type U, and Type V) have been identified.

[0137] A CRISPR locus includes a number of short repeating sequences referred to as “repeats.” When expressed, the repeats can form secondary structures (e.g., hairpins) and/or comprise unstructured single-stranded sequences. The repeats usually occur in clusters and frequently diverge between species. The repeats are regularly interspaced with unique intervening sequences referred to as “spacers,” resulting in a repeat-spacer-repeat locus architecture. The spacers are identical to or have high homology with known foreign invader sequences. A spacer-repeat unit encodes a crisprRNA (crRNA), which is processed into a mature form of the spacer-repeat unit. A crRNA comprises a “seed” or spacer sequence that is involved in targeting a target nucleic acid (in the naturally occurring form in prokaryotes, the spacer sequence targets the foreign invader nucleic acid). A spacer sequence is located at the 5′ or 3′ end of the crRNA.

[0138] A CRISPR locus also comprises polynucleotide sequences encoding CRISPR Associated (Cas) genes. Cas genes encode endonucleases involved in the biogenesis and the interference stages of crRNA function in prokaryotes. Some Cas genes comprise homologous secondary and/or tertiary structures.

[0139] Type II CRISPR Systems

[0140] crRNA biogenesis in a Type II CRISPR system in nature requires a trans-activating CRISPR RNA (tracrRNA). Non-limiting examples of Type II CRISPR systems are shown in FIGS. 1A and 1B. The tracrRNA can be modified by endogenous RNaseIII, and then hybridizes to a crRNA repeat in the pre-crRNA array. Endogenous RNaseIII can be recruited to cleave the pre-crRNA. Cleaved crRNAs can be subjected to exoribonuclease trimming to produce the mature crRNA form (e.g., 5′ trimming). The tracrRNA can remain hybridized to the crRNA, and the tracrRNA and the crRNA associate with a site-directed polypeptide (e.g., Cas9). The crRNA of the crRNA-tracrRNA-Cas9 complex can guide the complex to a target nucleic acid to which the crRNA can hybridize. Hybridization of the crRNA to the target nucleic acid can activate Cas9 for targeted nucleic acid cleavage. The target nucleic acid in a Type II CRISPR system is referred to as a protospacer adjacent motif (PAM). In nature, the PAM is essential to facilitate binding of a site-directed polypeptide (e.g., Cas9) to the target nucleic acid. Type II systems (also referred to as Nmeni or CASS4) are further subdivided into Type II-A (CASS4) and II-B (CASS4a). Jinek et al., Science, 337(6096):816-821 (2012) showed that the CRISPR/Cas9 system is useful for RNA-programmable genome editing, and international patent application publication number WO2013/176772 provides numerous examples and applications of the CRISPR/Cas endonuclease system for site-specific gene editing.

[0141] Type V CRISPR Systems

[0142] Type V CRISPR systems have several important differences from Type II systems. For example, Cpf1 is a single RNA-guided endonuclease that, in contrast to Type II systems, lacks tracrRNA. In fact, Cpf1-associated CRISPR arrays can be processed into mature crRNAs without the requirement of an additional trans-activating tracrRNA. The Type V CRISPR array can be processed into short mature crRNAs of 42-44 nucleotides in length, with each mature crRNA beginning with 19 nucleotides of direct repeat followed by 23-25 nucleotides of spacer sequence. In contrast, mature crRNAs in Type II systems can start with 20-24 nucleotides of spacer sequence followed by about 22 nucleotides of direct repeat. Also, Cpf1 can utilize a T-rich protospacer-adjacent motif such that Cpf1-crRNA complexes efficiently cleave target DNA preceded by a short T-rich PAM, which is in contrast to the G-rich PAM following the target DNA for Type II systems. Thus, Type V systems cleave at a point that is distant from the PAM, while Type II systems cleave at a point that is adjacent to the PAM. In addition, in contrast to Type II systems, Cpf1 cleaves DNA via a staggered DNA double-stranded break with a 4 or 5 nucleotide 5′ overhang. Type II systems cleave via a blunt double-stranded break. Similar to Type II systems, Cpf1 contains a predicted RuvC-like endonuclease domain, but lacks a second HNH endonuclease domain, which is in contrast to Type II systems.

[0143] Cas Genes/Polypeptides and Protospacer Adjacent Motifs

[0144] Exemplary CRISPR/Cas polypeptides include the Cas9 polypeptides as published in FIG. 1 of Fonfara et al., Nucleic Acids Research, 42: 2577-2590 (2014). The CRISPR/Cas gene naming system has undergone extensive rewriting since the Cas genes were discovered. FIG. 5 of Fonfara et al. also provides PAM sequences for the Cas9 polypeptides from various.

[0145] Site-Directed Polypeptides

[0146] A site-directed polypeptide is a nuclease used in genome editing to cleave DNA. The site-directed polypeptide can be administered to a cell or a patient as either: one or more polypeptides, or one or more mRNAs encoding the polypeptide. Any of the enzymes or orthologs listed in SEQ ID NOs: 1-620, or disclosed herein, may be utilized in the methods herein.

[0147] In the context of a CRISPR/Cas9 or CRISPR/Cpf1 system, the site-directed polypeptide can bind to a guide RNA that, in turn, specifies the site in the target DNA to which the polypeptide is directed. In the CRISPR/Cas9 or CRISPR/Cpf1 systems disclosed herein, the site-directed polypeptide can be an endonuclease, such as a DNA endonuclease.

[0148] A site-directed polypeptide can comprise a plurality of nucleic acid-cleaving (i.e., nuclease) domains. Two or more nucleic acid-cleaving domains can be linked together via a linker. For example, the linker can comprise a flexible linker. Linkers can comprise 1, 2, 3, 4, 5, 6, 7, 8, 9, 10, 11, 12, 13, 14, 15, 16, 17, 18, 19, 20, 21, 22, 23, 24, 25, 30, 35, 40 or more amino acids in length.

[0149] Naturally-occurring wild-type Cas9 enzymes comprise two nuclease domains, a HNH nuclease domain and a RuvC domain. Herein, the term “Cas9” refers to both a naturally-occurring and a recombinant Cas9. Cas9 enzymes contemplated herein can comprise a HNH or HNH-like nuclease domain, and/or a RuvC or RuvC-like nuclease domain.

[0150] HNH or HNH-like domains comprise a McrA-like fold. HNH or HNH-like domains comprises two antiparallel β-strands and an α-helix. HNH or HNH-like domains comprises a metal binding site (e.g., a divalent cation binding site). HNH or HNH-like domains can cleave one strand of a target nucleic acid (e.g., the complementary strand of the crRNA targeted strand).

[0151] RuvC or RuvC-like domains comprise an RNaseH or RNaseH-like fold. RuvC/RNaseH domains are involved in a diverse set of nucleic acid-based functions including acting on both RNA and DNA. The RNaseH domain comprises 5 β-strands surrounded by a plurality of α-helices. RuvC/RNaseH or RuvC/RNaseH-like domains comprise a metal binding site (e.g., a divalent cation binding site). RuvC/RNaseH or RuvC/RNaseH-like domains can cleave one strand of a target nucleic acid (e.g., the non-complementary strand of a double-stranded target DNA).

[0152] Site-directed polypeptides can introduce double-strand breaks or single-strand breaks in nucleic acids, e.g., genomic DNA. The double-strand break can stimulate a cell's endogenous DNA-repair pathways (e.g., homology-dependent repair (HDR) or non-homologous end-joining (NHEJ) or alternative non-homologous end joining (A-NHEJ) or microhomology-mediated end joining (MMEJ)). NHEJ can repair cleaved target nucleic acid without the need for a homologous template. This can sometimes result in small deletions or insertions (indels) in the target nucleic acid at the site of cleavage, and can lead to disruption or alteration of gene expression. HDR can occur when a homologous repair template, or donor, is available. The homologous donor template can comprise sequences that are homologous to sequences flanking the target nucleic acid cleavage site. The sister chromatid is generally used by the cell as the repair template. However, for the purposes of genome editing, the repair template can be supplied as an exogenous nucleic acid, such as a plasmid, duplex oligonucleotide, single-strand oligonucleotide or viral nucleic acid. With exogenous donor templates, an additional nucleic acid sequence (such as a transgene) or modification (such as a single or multiple base change or a deletion) can be introduced between the flanking regions of homology so that the additional or altered nucleic acid sequence also becomes incorporated into the target locus. MMEJ can result in a genetic outcome that is similar to NHEJ in that small deletions and insertions can occur at the cleavage site. MMEJ can make use of homologous sequences of a few basepairs flanking the cleavage site to drive a favored end-joining DNA repair outcome. In some instances, it may be possible to predict likely repair outcomes based on analysis of potential microhomologies in the nuclease target regions.

[0153] Thus, in some cases, homologous recombination can be used to insert an exogenous polynucleotide sequence into the target nucleic acid cleavage site. An exogenous polynucleotide sequence is termed a “donor polynucleotide” (or donor or donor sequence) herein. The donor polynucleotide, a portion of the donor polynucleotide, a copy of the donor polynucleotide, or a portion of a copy of the donor polynucleotide can be inserted into the target nucleic acid cleavage site. The donor polynucleotide can be an exogenous polynucleotide sequence, i.e., a sequence that does not naturally occur at the target nucleic acid cleavage site.

[0154] The modifications of the target DNA due to NHEJ and/or HDR can lead to, for example, mutations, deletions, alterations, integrations, gene correction, gene replacement, gene tagging, transgene insertion, nucleotide deletion, gene disruption, translocations and/or gene mutation. The processes of deleting genomic DNA and integrating non-native nucleic acid into genomic DNA are examples of genome editing.

[0155] The site-directed polypeptide can comprise an amino acid sequence having at least 10%, at least 15%, at least 20%, at least 30%, at least 40%, at least 50%, at least 60%, at least 70%, at least 75%, at least 80%, at least 85%, at least 90%, at least 95%, at least 99%, or 100% amino acid sequence identity to a wild-type exemplary site-directed polypeptide [e.g., Cas9 from S. pyogenes, US2014/0068797 Sequence ID No. 8 or Sapranauskas et al., Nucleic Acids Res, 39(21): 9275-9282 (2011)], and various other site-directed polypeptides. The site-directed polypeptide can comprise at least 70, 75, 80, 85, 90, 95, 97, 99, or 100% identity to a wild-type site-directed polypeptide (e.g., Cas9 from S. pyogenes, supra) over 10 contiguous amino acids.

[0156] In some embodiments, the site-directed polypeptide comprises an amino acid sequence having at least 10%, at least 15%, at least 20%, at least 30%, at least 40%, at least 50%, at least 60%, at least 70%, at least 75%, at least 80%, at least 85%, at least 90%, at least 95%, at least 99%, or 100% amino acid sequence identity to the nuclease domain of a wild-type exemplary site-directed polypeptide (e.g., Cas9 from S. pyogenes, supra).

[0157] The site-directed polypeptide can comprise at most: 70, 75, 80, 85, 90, 95, 97, 99, or 100% identity to a wild-type site-directed polypeptide (e.g., Cas9 from S. pyogenes, supra) over 10 contiguous amino acids. The site-directed polypeptide can comprise at least: 70, 75, 80, 85, 90, 95, 97, 99, or 100% identity to a wild-type site-directed polypeptide (e.g., Cas9 from S. pyogenes, supra) over 10 contiguous amino acids in a HNH nuclease domain of the site-directed polypeptide. The site-directed polypeptide can comprise at most: 70, 75, 80, 85, 90, 95, 97, 99, or 100% identity to a wild-type site-directed polypeptide (e.g., Cas9 from S. pyogenes, supra) over 10 contiguous amino acids in a HNH nuclease domain of the site-directed polypeptide. The site-directed polypeptide can comprise at least: 70, 75, 80, 85, 90, 95, 97, 99, or 100% identity to a wild-type site-directed polypeptide (e.g., Cas9 from S. pyogenes, supra) over 10 contiguous amino acids in a RuvC nuclease domain of the site-directed polypeptide. The site-directed polypeptide can comprise at most: 70, 75, 80, 85, 90, 95, 97, 99, or 100% identity to a wild-type site-directed polypeptide (e.g., Cas9 from S. pyogenes, supra) over 10 contiguous amino acids in a RuvC nuclease domain of the site-directed polypeptide.

[0158] The site-directed polypeptide can comprise a modified form of a wild-type exemplary site-directed polypeptide. The modified form of the wild-type exemplary site-directed polypeptide can comprise a mutation that reduces the nucleic acid-cleaving activity of the site-directed polypeptide. The modified form of the wild-type exemplary site-directed polypeptide can have less than 90%, less than 80%, less than 70%, less than 60%, less than 50%, less than 40%, less than 30%, less than 20%, less than 10%, less than 5%, or less than 1% of the nucleic acid-cleaving activity of the wild-type exemplary site-directed polypeptide (e.g., Cas9 from S. pyogenes, supra). The modified form of the site-directed polypeptide can have no substantial nucleic acid-cleaving activity. When a site-directed polypeptide is a modified form that has no substantial nucleic acid-cleaving activity, it is referred to herein as “enzymatically inactive.”

[0159] The modified form of the site-directed polypeptide can comprise a mutation such that it can induce a single-strand break (SSB) on a target nucleic acid (e.g., by cutting only one of the sugar-phosphate backbones of a double-strand target nucleic acid). In some aspects, the mutation can result in less than 90%, less than 80%, less than 70%, less than 60%, less than 50%, less than 40%, less than 30%, less than 20%, less than 10%, less than 5%, or less than 1% of the nucleic acid-cleaving activity in one or more of the plurality of nucleic acid-cleaving domains of the wild-type site directed polypeptide (e.g., Cas9 from S. pyogenes, supra). In some aspects, the mutation can result in one or more of the plurality of nucleic acid-cleaving domains retaining the ability to cleave the complementary strand of the target nucleic acid, but reducing its ability to cleave the non-complementary strand of the target nucleic acid. The mutation can result in one or more of the plurality of nucleic acid-cleaving domains retaining the ability to cleave the non-complementary strand of the target nucleic acid, but reducing its ability to cleave the complementary strand of the target nucleic acid. For example, residues in the wild-type exemplary S. pyogenes Cas9 polypeptide, such as Asp10, His840, Asn854 and Asn856, are mutated to inactivate one or more of the plurality of nucleic acid-cleaving domains (e.g., nuclease domains). The residues to be mutated can correspond to residues Asp10, His840, Asn854 and Asn856 in the wild-type exemplary S. pyogenes Cas9 polypeptide (e.g., as determined by sequence and/or structural alignment). Non-limiting examples of mutations include D10A, H840A, N854A or N856A. One skilled in the art will recognize that mutations other than alanine substitutions can be suitable.

[0160] In some aspects, a D10A mutation can be combined with one or more of H840A, N854A, or N856A mutations to produce a site-directed polypeptide substantially lacking DNA cleavage activity. A H840A mutation can be combined with one or more of D10A, N854A, or N856A mutations to produce a site-directed polypeptide substantially lacking DNA cleavage activity. A N854A mutation can be combined with one or more of H840A, D10A, or N856A mutations to produce a site-directed polypeptide substantially lacking DNA cleavage activity. A N856A mutation can be combined with one or more of H840A, N854A, or D10A mutations to produce a site-directed polypeptide substantially lacking DNA cleavage activity. Site-directed polypeptides that comprise one substantially inactive nuclease domain are referred to as “nickases.”

[0161] Nickase variants of RNA-guided endonucleases, for example Cas9, can be used to increase the specificity of CRISPR-mediated genome editing. Wild type Cas9 is typically guided by a single guide RNA designed to hybridize with a specified ˜20 nucleotide sequence in the target sequence (such as an endogenous genomic locus). However, several mismatches can be tolerated between the guide RNA and the target locus, effectively reducing the length of required homology in the target site to, for example, as little as 13 nt of homology, and thereby resulting in elevated potential for binding and double-strand nucleic acid cleavage by the CRISPR/Cas9 complex elsewhere in the target genome—also known as off-target cleavage. Because nickase variants of Cas9 each only cut one strand, in order to create a double-strand break it is necessary for a pair of nickases to bind in close proximity and on opposite strands of the target nucleic acid, thereby creating a pair of nicks, which is the equivalent of a double-strand break. This requires that two separate guide RNAs—one for each nickase—must bind in close proximity and on opposite strands of the target nucleic acid. This requirement essentially doubles the minimum length of homology needed for the double-strand break to occur, thereby reducing the likelihood that a double-strand cleavage event will occur elsewhere in the genome, where the two guide RNA sites—if they exist—are unlikely to be sufficiently close to each other to enable the double-strand break to form. As described in the art, nickases can also be used to promote HDR versus NHEJ. HDR can be used to introduce selected changes into target sites in the genome through the use of specific donor sequences that effectively mediate the desired changes. Descriptions of various CRISPR/Cas systems for use in gene editing can be found, e.g., in international patent application publication number WO2013/176772, and in Nature Biotechnology 32, 347-355 (2014), and references cited therein.

[0162] Mutations contemplated can include substitutions, additions, and deletions, or any combination thereof. The mutation converts the mutated amino acid to alanine. The mutation converts the mutated amino acid to another amino acid (e.g., glycine, serine, threonine, cysteine, valine, leucine, isoleucine, methionine, proline, phenylalanine, tyrosine, tryptophan, aspartic acid, glutamic acid, asparagine, glutamine, histidine, lysine, or arginine). The mutation converts the mutated amino acid to a non-natural amino acid (e.g., selenomethionine). The mutation converts the mutated amino acid to amino acid mimics (e.g., phosphomimics). The mutation can be a conservative mutation. For example, the mutation converts the mutated amino acid to amino acids that resemble the size, shape, charge, polarity, conformation, and/or rotamers of the mutated amino acids (e.g., cysteine/serine mutation, lysine/asparagine mutation, histidine/phenylalanine mutation). The mutation can cause a shift in reading frame and/or the creation of a premature stop codon. Mutations can cause changes to regulatory regions of genes or loci that affect expression of one or more genes.

[0163] The site-directed polypeptide (e.g., variant, mutated, enzymatically inactive and/or conditionally enzymatically inactive site-directed polypeptide) can target nucleic acid. The site-directed polypeptide (e.g., variant, mutated, enzymatically inactive and/or conditionally enzymatically inactive endoribonuclease) can target DNA. The site-directed polypeptide (e.g., variant, mutated, enzymatically inactive and/or conditionally enzymatically inactive endoribonuclease) can target RNA.

[0164] The site-directed polypeptide can comprise one or more non-native sequences (e.g., the site-directed polypeptide is a fusion protein).

[0165] The site-directed polypeptide can comprise an amino acid sequence comprising at least 15% amino acid identity to a Cas9 from a bacterium (e.g., S. pyogenes), a nucleic acid binding domain, and two nucleic acid cleaving domains (i.e., a HNH domain and a RuvC domain).

[0166] The site-directed polypeptide can comprise an amino acid sequence comprising at least 15% amino acid identity to a Cas9 from a bacterium (e.g., S. pyogenes), and two nucleic acid cleaving domains (i.e., a HNH domain and a RuvC domain).

[0167] The site-directed polypeptide can comprise an amino acid sequence comprising at least 15% amino acid identity to a Cas9 from a bacterium (e.g., S. pyogenes), and two nucleic acid cleaving domains, wherein one or both of the nucleic acid cleaving domains comprise at least 50% amino acid identity to a nuclease domain from Cas9 from a bacterium (e.g., S. pyogenes).

[0168] The site-directed polypeptide can comprise an amino acid sequence comprising at least 15% amino acid identity to a Cas9 from a bacterium (e.g., S. pyogenes), two nucleic acid cleaving domains (i.e., a HNH domain and a RuvC domain), and non-native sequence (for example, a nuclear localization signal) or a linker linking the site-directed polypeptide to a non-native sequence.

[0169] The site-directed polypeptide can comprise an amino acid sequence comprising at least 15% amino acid identity to a Cas9 from a bacterium (e.g., S. pyogenes), two nucleic acid cleaving domains (i.e., a HNH domain and a RuvC domain), wherein the site-directed polypeptide comprises a mutation in one or both of the nucleic acid cleaving domains that reduces the cleaving activity of the nuclease domains by at least 50%.

[0170] The site-directed polypeptide can comprise an amino acid sequence comprising at least 15% amino acid identity to a Cas9 from a bacterium (e.g., S. pyogenes), and two nucleic acid cleaving domains (i.e., a HNH domain and a RuvC domain), wherein one of the nuclease domains comprises mutation of aspartic acid 10, and/or wherein one of the nuclease domains can comprise a mutation of histidine 840, and wherein the mutation reduces the cleaving activity of the nuclease domain(s) by at least 50%.

[0171] The one or more site-directed polypeptides, e.g. DNA endonucleases, can comprise two nickases that together effect one double-strand break at a specific locus in the genome, or four nickases that together effect or cause two double-strand breaks at specific loci in the genome. Alternatively, one site-directed polypeptide, e.g. DNA endonuclease, can effect or cause one double-strand break at a specific locus in the genome.

[0172] Non-limiting examples of Cas9 orthologs from other bacterial strains include but are not limited to, Cas proteins identified in Acaryochloris marina MBIC11017; Acetohalobium arabaticum DSM 5501; Acidithiobacillus caldus; Acidithiobacillus ferrooxidans ATCC 23270; Alicyclobacillus acidocaldarius LAA1; Alicyclobacillus acidocaldarius subsp. acidocaldarius DSM 446; Allochromatium vinosum DSM 180; Ammonifex degensii KC4; Anabaena variabilis ATCC 29413; Arthrospira maxima CS-328; Arthrospira platensis str. Paraca; Arthrospira sp. PCC 8005; Bacillus pseudomycoides DSM 12442; Bacillus selenitireducens MLS10; Burkholderiales bacterium 1_1_47; Caldicelulosiruptor becscii DSM 6725; Candidatus Desulforudis audaxviator MP104C; Caldicellulosiruptor hydrothermalis_108; Clostridium phage c-st; Clostridium botulinum A3 str. Loch Maree; Clostridium botulinum Ba4 str. 657; Clostridium difficile QCD-63q42; Crocosphaera watsonii WH 8501; Cyanothece sp. ATCC 51142; Cyanothece sp. CCY0110; Cyanothece sp. PCC 7424; Cyanothece sp. PCC 7822; Exiguobacterium sibiricum 255-15; Finegoldia magna ATCC 29328; Ktedonobacter racemifer DSM 44963; Lactobacillus delbrueckii subsp. bulgaricus PB2003/044-T3-4; Lactobacillus salivarius ATCC 11741; Listeria innocua; Lyngbya sp. PCC 8106; Marinobacter sp. ELB17; Methanohalobium evestigatum Z-7303; Microcystis phage Ma-LMM01; Microcystis aeruginosa NIES-843; Microscilla marina ATCC 23134; Microcoleus chthonoplastes PCC 7420; Neisseria meningitidis; Nitrosococcus halophilus Nc4; Nocardiopsis dassonvillei subsp. dassonvillei DSM 43111; Nodularia spumigena CCY9414; Nostoc sp. PCC 7120; Oscillatoria sp. PCC 6506; Pelotomaculum thermopropionicum_SI; Petrotoga mobilis SJ95; Polaromonas naphthalenivorans CJ2; Polaromonas sp. JS666; Pseudoalteromonas haloplanktis TAC125; Streptomyces pristinaespiralis ATCC 25486; Streptomyces pristinaespiralis ATCC 25486; Streptococcus thermophilus; Streptomyces viridochromogenes DSM 40736; Streptosporangium roseum DSM 43021; Synechococcus sp. PCC 7335; and Thermosipho africanus TCF52B (Chylinski et al., RNA Biol., 2013; 10(5): 726-737).

[0173] In addition to Cas9 orthologs, other Cas9 variants such as fusion proteins of inactive dCas9 and effector domains with different functions may be served as a platform for genetic modulation. Any of the foregoing enzymes may be useful in the present invention.

[0174] Further examples of endonucleases which may be utilized in the present invention are provided in SEQ ID NOs: 1-620. These proteins may be modified before use or may be encoded in a nucleic acid sequence such as a DNA, RNA or mRNA or within a vector construct such as the plasmids or AAV vectors taught herein. Further, they may be codon optimized.

[0175] SEQ ID NOs: 1-620 provide a non-exhaustive listing of endonuclease sequences.

[0176] Genome-Targeting Nucleic Acid

[0177] The present disclosure provides a genome-targeting nucleic acid that can direct the activities of an associated polypeptide (e.g., a site-directed polypeptide) to a specific target sequence within a target nucleic acid. The genome-targeting nucleic acid can be an RNA. A genome-targeting RNA is referred to as a “guide RNA” or “gRNA” herein. A guide RNA can comprise at least a spacer sequence that hybridizes to a target nucleic acid sequence of interest, and a CRISPR repeat sequence. In Type II systems, the gRNA also comprises a second RNA called the tracrRNA sequence. In the Type II guide RNA (gRNA), the CRISPR repeat sequence and tracrRNA sequence hybridize to each other to form a duplex. In the Type V guide RNA (gRNA), the crRNA forms a duplex. In both systems, the duplex can bind a site-directed polypeptide, such that the guide RNA and site-direct polypeptide form a complex. The genome-targeting nucleic acid can provide target specificity to the complex by virtue of its association with the site-directed polypeptide. The genome-targeting nucleic acid thus can direct the activity of the site-directed polypeptide.

[0178] Exemplary guide RNAs include the spacer sequences based on the RNA version of the DNA sequences presented in SEQ ID NOs: 5,305-14,350. As is understood by the person of ordinary skill in the art, each guide RNA can be designed to include a spacer sequence complementary to its genomic target sequence. For example, each of the spacer sequences, e.g., the RNA version of the DNA sequences presented in SEQ ID NOs: 5,305-14,350, can be put into a single RNA chimera or a crRNA (along with a corresponding tracrRNA). See Jinek et al., Science, 337, 816-821 (2012) and Deltcheva et al., Nature, 471, 602-607 (2011).

[0179] The genome-targeting nucleic acid can be a double-molecule guide RNA. The genome-targeting nucleic acid can be a single-molecule guide RNA.

[0180] A double-molecule guide RNA can comprise two strands of RNA. The first strand comprises in the 5′ to 3′ direction, an optional spacer extension sequence, a spacer sequence and a minimum CRISPR repeat sequence. The second strand can comprise a minimum tracrRNA sequence (complementary to the minimum CRISPR repeat sequence), a 3′ tracrRNA sequence and an optional tracrRNA extension sequence.

[0181] A single-molecule guide RNA (sgRNA) in a Type II system can comprise, in the 5′ to 3′ direction, an optional spacer extension sequence, a spacer sequence, a minimum CRISPR repeat sequence, a single-molecule guide linker, a minimum tracrRNA sequence, a 3′ tracrRNA sequence and an optional tracrRNA extension sequence. The optional tracrRNA extension can comprise elements that contribute additional functionality (e.g., stability) to the guide RNA. The single-molecule guide linker can link the minimum CRISPR repeat and the minimum tracrRNA sequence to form a hairpin structure. The optional tracrRNA extension can comprise one or more hairpins.

[0182] A single-molecule guide RNA (sgRNA) in a Type V system can comprise, in the 5′ to 3′ direction, a minimum CRISPR repeat sequence and a spacer sequence.

[0183] The sgRNA can comprise a 20 nucleotide spacer sequence at the 5′ end of the sgRNA sequence. The sgRNA can comprise a less than a 20 nucleotide spacer sequence at the 5′ end of the sgRNA sequence. The sgRNA can comprise a more than 20 nucleotide spacer sequence at the 5′ end of the sgRNA sequence. The sgRNA can comprise a variable length spacer sequence with 17-30 nucleotides at the 5′ end of the sgRNA sequence (see Table 5).

[0184] The sgRNA can comprise no uracil at the 3′ end of the sgRNA sequence, such as in SEQ ID NO: 14,383 of Table 5. The sgRNA can comprise one or more uracil at the 3′ end of the sgRNA sequence, such as in SEQ ID NO: 14,384 in Table 5. For example, the sgRNA can comprise 1 uracil (U) at the 3′ end of the sgRNA sequence. The sgRNA can comprise 2 uracil (UU) at the 3′ end of the sgRNA sequence. The sgRNA can comprise 3 uracil (UUU) at the 3′ end of the sgRNA sequence. The sgRNA can comprise 4 uracil (UUUU) at the 3′ end of the sgRNA sequence. The sgRNA can comprise 5 uracil (UUUUU) at the 3′ end of the sgRNA sequence. The sgRNA can comprise 6 uracil (UUUUUU) at the 3′ end of the sgRNA sequence. The sgRNA can comprise 7 uracil (UUUUUUU) at the 3′ end of the sgRNA sequence. The sgRNA can comprise 8 uracil (UUUUUUUU) at the 3′ end of the sgRNA sequence.

[0185] The sgRNA can be unmodified or modified. For example, modified sgRNAs can comprise one or more 2′-O-methyl phosphorothioate nucleotides.

TABLE 5
Sample sgRNA sequences

| SEQ | |
|---|---|
| ID NO. | sgRNA sequence |
| 14,382 | nnnnnnnnnnnnnnnnnnnnguuuuagagcuagaaauagcaa |
| | guuaaaauaaggcuaguccguuaucaacuugaaaaaguggca |
| | ccgagucggugcuuuu |
| 14,383 | nnnnnnnnnnnnnnnnnnnnguuuuagagcuagaaauagcaa |
| | guuaaaauaaggcuaguccguuaucaacuugaaaaaguggca |
| | ccgagucggugc |
| 14,384 | n₍₁₇₋₃₀₎guuuuagagcuagaaauagcaaguuaaaauaaggcu |
| | aguccguuaucaacuugaaaaaguggcaccgagucggugcu₍₁₋₈₎ |

[0186] By way of illustration, guide RNAs used in the CRISPR/Cas9 or CRISPR/Cpf1 system, or other smaller RNAs can be readily synthesized by chemical means, as illustrated below and described in the art. While chemical synthetic procedures are continually expanding, purifications of such RNAs by procedures such as high performance liquid chromatography (HPLC, which avoids the use of gels such as PAGE) tends to become more challenging as polynucleotide lengths increase significantly beyond a hundred or so nucleotides. One approach used for generating RNAs of greater length is to produce two or more molecules that are ligated together. Much longer RNAs, such as those encoding a Cas9 or Cpf1 endonuclease, are more readily generated enzymatically. Various types of RNA modifications can be introduced during or after chemical synthesis and/or enzymatic generation of RNAs, e.g., modifications that enhance stability, reduce the likelihood or degree of innate immune response, and/or enhance other attributes, as described in the art.

[0187] Spacer Extension Sequence

[0188] In some examples of genome-targeting nucleic acids, a spacer extension sequence can modify activity, provide stability and/or provide a location for modifications of a genome-targeting nucleic acid. A spacer extension sequence can modify on- or off-target activity or specificity. In some examples, a spacer extension sequence can be provided. The spacer extension sequence can have a length of more than 1, 5, 10, 15, 20, 25, 30, 35, 40, 45, 50, 60, 70, 80, 90, 100, 120, 140, 160, 180, 200, 220, 240, 260, 280, 300, 320, 340, 360, 380, 400, 1000, 2000, 3000, 4000, 5000, 6000, or 7000 or more nucleotides. The spacer extension sequence can have a length of less than 1, 5, 10, 15, 20, 25, 30, 35, 40, 45, 50, 60, 70, 80, 90, 100, 120, 140, 160, 180, 200, 220, 240, 260, 280, 300, 320, 340, 360, 380, 400, 1000, 2000, 3000, 4000, 5000, 6000, 7000 or more nucleotides. The spacer extension sequence can be less than 10 nucleotides in length. The spacer extension sequence can be between 10-30 nucleotides in length. The spacer extension sequence can be between 30-70 nucleotides in length.

[0189] The spacer extension sequence can comprise another moiety (e.g., a stability control sequence, an endoribonuclease binding sequence, a ribozyme). The moiety can decrease or increase the stability of a nucleic acid targeting nucleic acid. The moiety can be a transcriptional terminator segment (i.e., a transcription termination sequence). The moiety can function in a eukaryotic cell. The moiety can function in a prokaryotic cell. The moiety can function in both eukaryotic and prokaryotic cells. Non-limiting examples of suitable moieties include: a 5′ cap (e.g., a 7-methylguanylate cap (m7 G)), a riboswitch sequence (e.g., to allow for regulated stability and/or regulated accessibility by proteins and protein complexes), a sequence that forms a dsRNA duplex (i.e., a hairpin), a sequence that targets the RNA to a subcellular location (e.g., nucleus, mitochondria, chloroplasts, and the like), a modification or sequence that provides for tracking (e.g., direct conjugation to a fluorescent molecule, conjugation to a moiety that facilitates fluorescent detection, a sequence that allows for fluorescent detection, etc.), and/or a modification or sequence that provides a binding site for proteins (e.g., proteins that act on DNA, including transcriptional activators, transcriptional repressors, DNA methyltransferases, DNA demethylases, histone acetyltransferases, histone deacetylases, and the like).

[0190] Spacer Sequence

[0191] The spacer sequence hybridizes to a sequence in a target nucleic acid of interest. The spacer of a genome-targeting nucleic acid can interact with a target nucleic acid in a sequence-specific manner via hybridization (i.e., base pairing). The nucleotide sequence of the spacer can vary depending on the sequence of the target nucleic acid of interest.

[0192] In a CRISPR/Cas system herein, the spacer sequence can be designed to hybridize to a target nucleic acid that is located 5′ of a PAM of the Cas9 enzyme used in the system. The spacer may perfectly match the target sequence or may have mismatches. Each Cas9 enzyme has a particular PAM sequence that it recognizes in a target DNA. For example, S. pyogenes recognizes in a target nucleic acid a PAM that comprises the sequence 5′-NRG-3′, where R comprises either A or G, where N is any nucleotide and N is immediately 3′ of the target nucleic acid sequence targeted by the spacer sequence.

[0193] The target nucleic acid sequence can comprise 20 nucleotides. The target nucleic acid can comprise less than 20 nucleotides. The target nucleic acid can comprise more than 20 nucleotides. The target nucleic acid can comprise at least: 5, 10, 15, 16, 17, 18, 19, 20, 21, 22, 23, 24, 25, 30 or more nucleotides. The target nucleic acid can comprise at most: 5, 10, 15, 16, 17, 18, 19, 20, 21, 22, 23, 24, 25, 30 or more nucleotides. The target nucleic acid sequence can comprise 20 bases immediately 5′ of the first nucleotide of the PAM. For example, in a sequence comprising 5′-NNNNNNRG-3′ (SEQ ID NO: 14,381), the target nucleic acid can comprise the sequence that corresponds to the Ns, wherein N is any nucleotide, and the underlined NRG sequence is the S. pyogenes PAM. This target nucleic acid sequence is often referred to as the PAM strand, and the complementary nucleic acid sequence is often referred to the non-PAM strand. One of skill in the art would recognize that the spacer sequence hybridizes to the non-PAM strand of the target nucleic acid (FIGS. 1A and 1B).

[0194] The spacer sequence that hybridizes to the target nucleic acid can have a length of at least about 6 nucleotides (nt). The spacer sequence can be at least about 6 nt, at least about 10 nt, at least about 15 nt, at least about 18 nt, at least about 19 nt, at least about 20 nt, at least about 25 nt, at least about 30 nt, at least about 35 nt or at least about 40 nt, from about 6 nt to about 80 nt, from about 6 nt to about 50 nt, from about 6 nt to about 45 nt, from about 6 nt to about 40 nt, from about 6 nt to about 35 nt, from about 6 nt to about 30 nt, from about 6 nt to about 25 nt, from about 6 nt to about 20 nt, from about 6 nt to about 19 nt, from about 10 nt to about 50 nt, from about 10 nt to about 45 nt, from about 10 nt to about 40 nt, from about 10 nt to about 35 nt, from about 10 nt to about 30 nt, from about 10 nt to about 25 nt, from about 10 nt to about 20 nt, from about 10 nt to about 19 nt, from about 19 nt to about 25 nt, from about 19 nt to about 30 nt, from about 19 nt to about 35 nt, from about 19 nt to about 40 nt, from about 19 nt to about 45 nt, from about 19 nt to about 50 nt, from about 19 nt to about 60 nt, from about 20 nt to about 25 nt, from about 20 nt to about 30 nt, from about 20 nt to about 35 nt, from about 20 nt to about 40 nt, from about 20 nt to about 45 nt, from about 20 nt to about 50 nt, or from about 20 nt to about 60 nt. In some examples, the spacer sequence can comprise 20 nucleotides. In some examples, the spacer can comprise 19 nucleotides. In some examples, the spacer can comprise 18 nucleotides. In some examples, the spacer can comprise 22 nucleotides.

[0195] In some examples, the percent complementarity between the spacer sequence and the target nucleic acid is at least about 30%, at least about 40%, at least about 50%, at least about 60%, at least about 65%, at least about 70%, at least about 75%, at least about 80%, at least about 85%, at least about 90%, at least about 95%, at least about 97%, at least about 98%, at least about 99%, or 100%. In some examples, the percent complementarity between the spacer sequence and the target nucleic acid is at most about 30%, at most about 40%, at most about 50%, at most about 60%, at most about 65%, at most about 70%, at most about 75%, at most about 80%, at most about 85%, at most about 90%, at most about 95%, at most about 97%, at most about 98%, at most about 99%, or 100%. In some examples, the percent complementarity between the spacer sequence and the target nucleic acid is 100% over the six contiguous 5′-most nucleotides of the target sequence of the complementary strand of the target nucleic acid. The percent complementarity between the spacer sequence and the target nucleic acid can be at least 60% over about 20 contiguous nucleotides. The length of the spacer sequence and the target nucleic acid can differ by 1 to 6 nucleotides, which may be thought of as a bulge or bulges.

[0196] The spacer sequence can be designed or chosen using a computer program. The computer program can use variables, such as predicted melting temperature, secondary structure formation, predicted annealing temperature, sequence identity, genomic context, chromatin accessibility, % GC, frequency of genomic occurrence (e.g., of sequences that are identical or are similar but vary in one or more spots as a result of mismatch, insertion or deletion), methylation status, presence of SNPs, and the like.

[0197] Minimum CRISPR Repeat Sequence

[0198] In some aspects, a minimum CRISPR repeat sequence is a sequence with at least about 30%, about 40%, about 50%, about 60%, about 65%, about 70%, about 75%, about 80%, about 85%, about 90%, about 95%, or 100% sequence identity to a reference CRISPR repeat sequence (e.g., crRNA from S. pyogenes).

[0199] In some aspects, a minimum CRISPR repeat sequence comprises nucleotides that can hybridize to a minimum tracrRNA sequence in a cell. The minimum CRISPR repeat sequence and a minimum tracrRNA sequence can form a duplex, i.e. a base-paired double-stranded structure. Together, the minimum CRISPR repeat sequence and the minimum tracrRNA sequence can bind to the site-directed polypeptide. At least a part of the minimum CRISPR repeat sequence can hybridize to the minimum tracrRNA sequence. In some aspects, at least a part of the minimum CRISPR repeat sequence comprises at least about 30%, about 40%, about 50%, about 60%, about 65%, about 70%, about 75%, about 80%, about 85%, about 90%, about 95%, or 100% complementary to the minimum tracrRNA sequence. At least a part of the minimum CRISPR repeat sequence can comprise at most about 30%, about 40%, about 50%, about 60%, about 65%, about 70%, about 75%, about 80%, about 85%, about 90%, about 95%, or 100% complementary to the minimum tracrRNA sequence.

[0200] The minimum CRISPR repeat sequence can have a length from about 7 nucleotides to about 100 nucleotides. For example, the length of the minimum CRISPR repeat sequence is from about 7 nucleotides (nt) to about 50 nt, from about 7 nt to about 40 nt, from about 7 nt to about 30 nt, from about 7 nt to about 25 nt, from about 7 nt to about 20 nt, from about 7 nt to about 15 nt, from about 8 nt to about 40 nt, from about 8 nt to about 30 nt, from about 8 nt to about 25 nt, from about 8 nt to about 20 nt, from about 8 nt to about 15 nt, from about 15 nt to about 100 nt, from about 15 nt to about 80 nt, from about 15 nt to about 50 nt, from about 15 nt to about 40 nt, from about 15 nt to about 30 nt, or from about 15 nt to about 25 nt. In some aspects, the minimum CRISPR repeat sequence is approximately 9 nucleotides in length. In some aspects, the minimum CRISPR repeat sequence is approximately 12 nucleotides in length.

[0201] The minimum CRISPR repeat sequence can be at least about 60% identical to a reference minimum CRISPR repeat sequence (e.g., wild-type crRNA from S. pyogenes) over a stretch of at least 6, 7, or 8 contiguous nucleotides. For example, the minimum CRISPR repeat sequence can be at least about 65% identical, at least about 70% identical, at least about 75% identical, at least about 80% identical, at least about 85% identical, at least about 90% identical, at least about 95% identical, at least about 98% identical, at least about 99% identical or 100% identical to a reference minimum CRISPR repeat sequence over a stretch of at least 6, 7, or 8 contiguous nucleotides.

[0202] Minimum tracrRNA Sequence

[0203] A minimum tracrRNA sequence can be a sequence with at least about 30%, about 40%, about 50%, about 60%, about 65%, about 70%, about 75%, about 80%, about 85%, about 90%, about 95%, or 100% sequence identity to a reference tracrRNA sequence (e.g., wild type tracrRNA from S. pyogenes).

[0204] A minimum tracrRNA sequence can comprise nucleotides that hybridize to a minimum CRISPR repeat sequence in a cell. A minimum tracrRNA sequence and a minimum CRISPR repeat sequence form a duplex, i.e. a base-paired double-stranded structure. Together, the minimum tracrRNA sequence and the minimum CRISPR repeat can bind to a site-directed polypeptide. At least a part of the minimum tracrRNA sequence can hybridize to the minimum CRISPR repeat sequence. The minimum tracrRNA sequence can be at least about 30%, about 40%, about 50%, about 60%, about 65%, about 70%, about 75%, about 80%, about 85%, about 90%, about 95%, or 100% complementary to the minimum CRISPR repeat sequence.

[0205] The minimum tracrRNA sequence can have a length from about 7 nucleotides to about 100 nucleotides. For example, the minimum tracrRNA sequence can be from about 7 nucleotides (nt) to about 50 nt, from about 7 nt to about 40 nt, from about 7 nt to about 30 nt, from about 7 nt to about 25 nt, from about 7 nt to about 20 nt, from about 7 nt to about 15 nt, from about 8 nt to about 40 nt, from about 8 nt to about 30 nt, from about 8 nt to about 25 nt, from about 8 nt to about 20 nt, from about 8 nt to about 15 nt, from about 15 nt to about 100 nt, from about 15 nt to about 80 nt, from about 15 nt to about 50 nt, from about 15 nt to about 40 nt, from about 15 nt to about 30 nt or from about 15 nt to about 25 nt long. The minimum tracrRNA sequence can be approximately 9 nucleotides in length. The minimum tracrRNA sequence can be approximately 12 nucleotides. The minimum tracrRNA can consist of tracrRNA nt 23-48 described in Jinek et al., supra.

[0206] The minimum tracrRNA sequence can be at least about 60% identical to a reference minimum tracrRNA (e.g., wild type, tracrRNA from S. pyogenes) sequence over a stretch of at least 6, 7, or 8 contiguous nucleotides. For example, the minimum tracrRNA sequence can be at least about 65% identical, about 70% identical, about 75% identical, about 80% identical, about 85% identical, about 90% identical, about 95% identical, about 98% identical, about 99% identical or 100% identical to a reference minimum tracrRNA sequence over a stretch of at least 6, 7, or 8 contiguous nucleotides.

[0207] The duplex between the minimum CRISPR RNA and the minimum tracrRNA can comprise a double helix. The duplex between the minimum CRISPR RNA and the minimum tracrRNA can comprise at least about 1, 2, 3, 4, 5, 6, 7, 8, 9, or 10 or more nucleotides. The duplex between the minimum CRISPR RNA and the minimum tracrRNA can comprise at most about 1, 2, 3, 4, 5, 6, 7, 8, 9, or 10 or more nucleotides.

[0208] The duplex can comprise a mismatch (i.e., the two strands of the duplex are not 100% complementary). The duplex can comprise at least about 1, 2, 3, 4, or 5 or mismatches. The duplex can comprise at most about 1, 2, 3, 4, or 5 or mismatches. The duplex can comprise no more than 2 mismatches.

[0209] Bulges

[0210] In some cases, there can be a “bulge” in the duplex between the minimum CRISPR RNA and the minimum tracrRNA. A bulge is an unpaired region of nucleotides within the duplex. A bulge can contribute to the binding of the duplex to the site-directed polypeptide. The bulge can comprise, on one side of the duplex, an unpaired 5′-XXXY-3′ (SEQ ID NO: 14,385) where X is any purine and Y comprises a nucleotide that can form a wobble pair with a nucleotide on the opposite strand, and an unpaired nucleotide region on the other side of the duplex. The number of unpaired nucleotides on the two sides of the duplex can be different.

[0211] In one example, the bulge can comprise an unpaired purine (e.g., adenine) on the minimum CRISPR repeat strand of the bulge. In some examples, the bulge can comprise an unpaired 5′-AAGY-3′ of the minimum tracrRNA sequence strand of the bulge, where Y comprises a nucleotide that can form a wobble pairing with a nucleotide on the minimum CRISPR repeat strand.

[0212] A bulge on the minimum CRISPR repeat side of the duplex can comprise at least 1, 2, 3, 4, or 5 or more unpaired nucleotides. A bulge on the minimum CRISPR repeat side of the duplex can comprise at most 1, 2, 3, 4, or 5 or more unpaired nucleotides. A bulge on the minimum CRISPR repeat side of the duplex can comprise 1 unpaired nucleotide.

[0213] A bulge on the minimum tracrRNA sequence side of the duplex can comprise at least 1, 2, 3, 4, 5, 6, 7, 8, 9, or 10 or more unpaired nucleotides. A bulge on the minimum tracrRNA sequence side of the duplex can comprise at most 1, 2, 3, 4, 5, 6, 7, 8, 9, or 10 or more unpaired nucleotides. A bulge on a second side of the duplex (e.g., the minimum tracrRNA sequence side of the duplex) can comprise 4 unpaired nucleotides.

[0214] A bulge can comprise at least one wobble pairing. In some examples, a bulge can comprise at most one wobble pairing. A bulge can comprise at least one purine nucleotide. A bulge can comprise at least 3 purine nucleotides. A bulge sequence can comprise at least 5 purine nucleotides. A bulge sequence can comprise at least one guanine nucleotide. In some examples, a bulge sequence can comprise at least one adenine nucleotide.

[0215] Hairpins

[0216] In various examples, one or more hairpins can be located 3′ to the minimum tracrRNA in the 3′ tracrRNA sequence.

[0217] The hairpin can start at least about 1, 2, 3, 4, 5, 6, 7, 8, 9, 10, 15, or 20 or more nucleotides 3′ from the last paired nucleotide in the minimum CRISPR repeat and minimum tracrRNA sequence duplex. The hairpin can start at most about 1, 2, 3, 4, 5, 6, 7, 8, 9 or 10 or more nucleotides 3′ of the last paired nucleotide in the minimum CRISPR repeat and minimum tracrRNA sequence duplex.

[0218] The hairpin can comprise at least about 1, 2, 3, 4, 5, 6, 7, 8, 9, 10, 15, or 20 or more consecutive nucleotides. The hairpin can comprise at most about 1, 2, 3, 4, 5, 6, 7, 8, 9, 10, 15, or more consecutive nucleotides.

[0219] The hairpin can comprise a CC dinucleotide (i.e., two consecutive cytosine nucleotides).

[0220] The hairpin can comprise duplexed nucleotides (e.g., nucleotides in a hairpin, hybridized together). For example, a hairpin can comprise a CC dinucleotide that is hybridized to a GG dinucleotide in a hairpin duplex of the 3′ tracrRNA sequence.

[0221] One or more of the hairpins can interact with guide RNA-interacting regions of a site-directed polypeptide.

[0222] In some examples, there are two or more hairpins, and in other examples there are three or more hairpins.

[0223] 3′ tracrRNA Sequence

[0224] A 3′ tracrRNA sequence can comprise a sequence with at least about 30%, about 40%, about 50%, about 60%, about 65%, about 70%, about 75%, about 80%, about 85%, about 90%, about 95%, or 100% sequence identity to a reference tracrRNA sequence (e.g., a tracrRNA from S. pyogenes).

[0225] The 3′ tracrRNA sequence can have a length from about 6 nucleotides to about 100 nucleotides. For example, the 3′ tracrRNA sequence can have a length from about 6 nucleotides (nt) to about 50 nt, from about 6 nt to about 40 nt, from about 6 nt to about 30 nt, from about 6 nt to about 25 nt, from about 6 nt to about 20 nt, from about 6 nt to about 15 nt, from about 8 nt to about 40 nt, from about 8 nt to about 30 nt, from about 8 nt to about 25 nt, from about 8 nt to about 20 nt, from about 8 nt to about 15 nt, from about 15 nt to about 100 nt, from about 15 nt to about 80 nt, from about 15 nt to about 50 nt, from about 15 nt to about 40 nt, from about 15 nt to about 30 nt, or from about 15 nt to about 25 nt. The 3′ tracrRNA sequence can have a length of approximately 14 nucleotides.

[0226] The 3′ tracrRNA sequence can be at least about 60% identical to a reference 3′ tracrRNA sequence (e.g., wild type 3′ tracrRNA sequence from S. pyogenes) over a stretch of at least 6, 7, or 8 contiguous nucleotides. For example, the 3′ tracrRNA sequence can be at least about 60% identical, about 65% identical, about 70% identical, about 75% identical, about 80% identical, about 85% identical, about 90% identical, about 95% identical, about 98% identical, about 99% identical, or 100% identical, to a reference 3′ tracrRNA sequence (e.g., wild type 3′ tracrRNA sequence from S. pyogenes) over a stretch of at least 6, 7, or 8 contiguous nucleotides.

[0227] The 3′ tracrRNA sequence can comprise more than one duplexed region (e.g., hairpin, hybridized region). The 3′ tracrRNA sequence can comprise two duplexed regions.

[0228] The 3′ tracrRNA sequence can comprise a stem loop structure. The stem loop structure in the 3′ tracrRNA can comprise at least 1, 2, 3, 4, 5, 6, 7, 8, 9, 10, 15 or 20 or more nucleotides. The stem loop structure in the 3′ tracrRNA can comprise at most 1, 2, 3, 4, 5, 6, 7, 8, 9 or 10 or more nucleotides. The stem loop structure can comprise a functional moiety. For example, the stem loop structure can comprise an aptamer, a ribozyme, a protein-interacting hairpin, a CRISPR array, an intron, or an exon. The stem loop structure can comprise at least about 1, 2, 3, 4, or 5 or more functional moieties. The stem loop structure can comprise at most about 1, 2, 3, 4, or 5 or more functional moieties.

[0229] The hairpin in the 3′ tracrRNA sequence can comprise a P-domain. In some examples, the P-domain can comprise a double-stranded region in the hairpin.

[0230] tracrRNA Extension Sequence

[0231] A tracrRNA extension sequence may be provided whether the tracrRNA is in the context of single-molecule guides or double-molecule guides. The tracrRNA extension sequence can have a length from about 1 nucleotide to about 400 nucleotides. The tracrRNA extension sequence can have a length of more than 1, 5, 10, 15, 20, 25, 30, 35, 40, 45, 50, 60, 70, 80, 90, 100, 120, 140, 160, 180, 200, 220, 240, 260, 280, 300, 320, 340, 360, 380, or 400 nucleotides. The tracrRNA extension sequence can have a length from about 20 to about 5000 or more nucleotides. The tracrRNA extension sequence can have a length of more than 1000 nucleotides. The tracrRNA extension sequence can have a length of less than 1, 5, 10, 15, 20, 25, 30, 35, 40, 45, 50, 60, 70, 80, 90, 100, 120, 140, 160, 180, 200, 220, 240, 260, 280, 300, 320, 340, 360, 380, 400 or more nucleotides. The tracrRNA extension sequence can have a length of less than 1000 nucleotides. The tracrRNA extension sequence can comprise less than 10 nucleotides in length. The tracrRNA extension sequence can be 10-30 nucleotides in length. The tracrRNA extension sequence can be 30-70 nucleotides in length.

[0232] The tracrRNA extension sequence can comprise a functional moiety (e.g., a stability control sequence, ribozyme, endoribonuclease binding sequence). The functional moiety can comprise a transcriptional terminator segment (i.e., a transcription termination sequence). The functional moiety can have a total length from about 10 nucleotides (nt) to about 100 nucleotides, from about 10 nt to about 20 nt, from about 20 nt to about 30 nt, from about 30 nt to about 40 nt, from about 40 nt to about 50 nt, from about 50 nt to about 60 nt, from about 60 nt to about 70 nt, from about 70 nt to about 80 nt, from about 80 nt to about 90 nt, or from about 90 nt to about 100 nt, from about 15 nt to about 80 nt, from about 15 nt to about 50 nt, from about 15 nt to about 40 nt, from about 15 nt to about 30 nt, or from about 15 nt to about 25 nt. The functional moiety can function in a eukaryotic cell. The functional moiety can function in a prokaryotic cell. The functional moiety can function in both eukaryotic and prokaryotic cells.

[0233] Non-limiting examples of suitable tracrRNA extension functional moieties include a 3′ poly-adenylated tail, a riboswitch sequence (e.g., to allow for regulated stability and/or regulated accessibility by proteins and protein complexes), a sequence that forms a dsRNA duplex (i.e., a hairpin), a sequence that targets the RNA to a subcellular location (e.g., nucleus, mitochondria, chloroplasts, and the like), a modification or sequence that provides for tracking (e.g., direct conjugation to a fluorescent molecule, conjugation to a moiety that facilitates fluorescent detection, a sequence that allows for fluorescent detection, etc.), and/or a modification or sequence that provides a binding site for proteins (e.g., proteins that act on DNA, including transcriptional activators, transcriptional repressors, DNA methyltransferases, DNA demethylases, histone acetyltransferases, histone deacetylases, and the like). The tracrRNA extension sequence can comprise a primer binding site or a molecular index (e.g., barcode sequence). The tracrRNA extension sequence can comprise one or more affinity tags.

[0234] Single-Molecule Guide Linker Sequence

[0235] The linker sequence of a single-molecule guide nucleic acid can have a length from about 3 nucleotides to about 100 nucleotides. In Jinek et al., supra, for example, a simple 4 nucleotide “tetraloop” (-GAAA-) was used, Science, 337(6096):816-821 (2012). An illustrative linker has a length from about 3 nucleotides (nt) to about 90 nt, from about 3 nt to about 80 nt, from about 3 nt to about 70 nt, from about 3 nt to about 60 nt, from about 3 nt to about 50 nt, from about 3 nt to about 40 nt, from about 3 nt to about 30 nt, from about 3 nt to about 20 nt, from about 3 nt to about 10 nt. For example, the linker can have a length from about 3 nt to about 5 nt, from about 5 nt to about 10 nt, from about 10 nt to about 15 nt, from about 15 nt to about 20 nt, from about 20 nt to about 25 nt, from about 25 nt to about 30 nt, from about 30 nt to about 35 nt, from about 35 nt to about 40 nt, from about 40 nt to about 50 nt, from about 50 nt to about 60 nt, from about 60 nt to about 70 nt, from about 70 nt to about 80 nt, from about 80 nt to about 90 nt, or from about 90 nt to about 100 nt. The linker of a single-molecule guide nucleic acid can be between 4 and 40 nucleotides. The linker can be at least about 100, 500, 1000, 1500, 2000, 2500, 3000, 3500, 4000, 4500, 5000, 5500, 6000, 6500, or 7000 or more nucleotides. The linker can be at most about 100, 500, 1000, 1500, 2000, 2500, 3000, 3500, 4000, 4500, 5000, 5500, 6000, 6500, or 7000 or more nucleotides.

[0236] Linkers can comprise any of a variety of sequences, although in some examples the linker will not comprise sequences that have extensive regions of homology with other portions of the guide RNA, which might cause intramolecular binding that could interfere with other functional regions of the guide. In Jinek et al., supra, a simple 4 nucleotide sequence -GAAA- was used, Science, 337(6096):816-821 (2012), but numerous other sequences, including longer sequences can likewise be used.

[0237] The linker sequence can comprise a functional moiety. For example, the linker sequence can comprise one or more features, including an aptamer, a ribozyme, a protein-interacting hairpin, a protein binding site, a CRISPR array, an intron, or an exon. The linker sequence can comprise at least about 1, 2, 3, 4, or 5 or more functional moieties. In some examples, the linker sequence can comprise at most about 1, 2, 3, 4, or 5 or more functional moieties.

[0238] Genome Engineering Strategies for APOCIII Gene Deletion

[0239] In some aspects, the methods of the present disclosure can involve editing of one or both APOCIII alleles. Gene editing to modify the allele(s) has the advantage of permanently altering the target gene or gene products.

[0240] A step of the ex vivo methods of the present disclosure can comprise editing the hepatocytes isolated from the patient using genome engineering. Alternatively, a step of the ex vivo methods of the present disclosure can comprise editing the patient specific iPSC or mesenchymal stem cell. Likewise, a step of the in vivo methods of the invention involves editing the cells in Dyslipidemias patient using genome engineering. Similarly, a step in the cellular methods of the present disclosure can comprise editing the APOCIII gene in a human cell by genome engineering.

[0241] In some aspects, dyslipidemias patients may exhibit different mutations in the APOCIII gene. Any CRISPR endonuclease may be used in the methods of the present disclosure, each CRISPR endonuclease having its own associated PAM, which may or may not be disease specific.

[0242] For example, expression of the APOCIII gene may be disrupted or eliminated by introducing random insertions or deletions (indels) that arise due to the imprecise NHEJ repair pathway. The target region may be the coding sequences of the APOCIII gene (i.e., exons). Inserting or deleting nucleotides into the coding sequence of a gene may cause a “frame shift” where the normal 3-letter codon pattern is disturbed. In this way, gene expression and therefore protein production can be reduced or eliminated. This approach may also be used to target any intron, intron:exon junction, or regulatory DNA element of the APOCIII gene where sequence alteration may interfere with the expression of the APOCIII gene.

[0243] As another example, NHEJ can also be used to delete segments within or near the gene, either directly or by altering splice donor or acceptor sites through cleavage by one gRNA targeting several locations, or several gRNAs. This can be useful if small random indels are inefficient to knock-out the target gene. Pairs of guide strands have been used for this type of deletions.

[0244] Without a donor present, the ends from a DNA break or ends from different breaks can be joined using the several nonhomologous repair pathways in which the DNA ends are joined with little or no base-pairing at the junction. In addition to canonical NHEJ, there are similar repair mechanisms, such as alt-NHEJ. If there are two breaks, the intervening segment can be deleted or inverted. NHEJ repair pathways can lead to insertions, deletions or mutations at the joints.

[0245] NHEJ can also lead to homology-independent target integration. For example, inclusion of a nuclease target site on a donor plasmid can promote integration of a transgene into the chromosomal double-strand break following in vivo nuclease cleavage of both the donor and the chromosome (Cristea, Biotechnol Bioeng. 2013 March; 110(3):871-80). NHEJ was used to insert a 15-kb inducible gene expression cassette into a defined locus in human cell lines after nuclease cleavage. (See e.g., Maresca, M., Lin, V. G., Guo, N. & Yang, Y., Genome Res 23, 539-546 (2013); Cristea et al. Biotechnology and Bioengineering 2013, 871-80, 10.1002/bit.24733; Suzuki et al. Nature, 540, 144-149 (2016)). The integrated sequence may disrupt the reading frame of the APOCIII gene or alter the structure of the gene.

[0246] As a further alternative, homology directed repair (HDR) can also be used to knock-out a gene or alter the gene function. HDR is essentially an error-free mechanism that uses a supplied homologous DNA sequence as a template during DSB repair. The rate of HDR is a function of the distance between the mutation and the cut site so choosing overlapping or nearest target sites is important. Templates can include extra sequences flanked by the homologous regions or can contain a sequence that differs from the genomic sequence, thus allowing sequence editing.

[0247] For example, the HDR knock-out strategy can involve disrupting the structure or function of the APOCIII gene by inserting into the gene or replacing a part of the gene with a non-functional or irrelevant sequence. This can be achieved by inducing one single stranded break or double stranded break in the gene of interest with one or more CRISPR endonucleases and a gRNA (e.g., crRNA+tracrRNA, or sgRNA), or two or more single stranded breaks or double stranded breaks in the gene of interest with one or more CRISPR endonucleases and two or more gRNAs, in the presence of a donor DNA template introduced exogenously to direct the cellular DSB response to HDR (the donor DNA template can be a short single stranded oligonucleotide, a short double stranded oligonucleotide, a long single or double stranded DNA molecule). This approach can require development and optimization of gRNAs and donor DNA molecules for the APOCIII gene.

[0248] Homology directed repair is a cellular mechanism for repairing DSBs. The most common form is homologous recombination. There are additional pathways for HDR, including single-strand annealing and alternative-HDR. Genome engineering tools allow researchers to manipulate the cellular homologous recombination pathways to create site-specific modifications to the genome. It has been found that cells can repair a double-stranded break using a synthetic donor molecule provided in trans. Therefore, by introducing a double-stranded break near a specific mutation and providing a suitable donor, targeted changes can be made in the genome. Specific cleavage increases the rate of HDR more than 1,000 fold above the rate of 1 in 10⁶ cells receiving a homologous donor alone. The rate of homology directed repair (HDR) at a particular nucleotide is a function of the distance to the cut site, so choosing overlapping or nearest target sites is important. Gene editing offers the advantage over gene addition, as editing in situ leaves the rest of the genome unperturbed.

[0249] Supplied donors for editing by HDR vary markedly but can contain the intended sequence with small or large flanking homology arms to allow annealing to the genomic DNA. The homology regions flanking the introduced genetic changes can be 30 bp or smaller, or as large as a multi-kilobase cassette that can contain promoters, cDNAs, etc. Both single-stranded and double-stranded oligonucleotide donors have been used. These oligonucleotides range in size from less than 100 nt to over many kb, though longer ssDNA can also be generated and used. Double-stranded donors can be used, including PCR amplicons, plasmids, and mini-circles. In general, it has been found that an AAV vector can be a very effective means of delivery of a donor template, though the packaging limits for individual donors is <5 kb. Active transcription of the donor increased HDR three-fold, indicating the inclusion of promoter may increase conversion. Conversely, CpG methylation of the donor decreased gene expression and HDR.

[0250] In addition to wild-type endonucleases, such as Cas9, nickase variants exist that have one or the other nuclease domain inactivated resulting in cutting of only one DNA strand. HDR can be directed from individual Cas nickases or using pairs of nickases that flank the target area. Donors can be single-stranded, nicked, or dsDNA.

[0251] The donor DNA can be supplied with the nuclease or independently by a variety of different methods, for example by transfection, nano-particle, micro-injection, or viral transduction. A range of tethering options have been proposed to increase the availability of the donors for HDR. Examples include attaching the donor to the nuclease, attaching to DNA binding proteins that bind nearby, or attaching to proteins that are involved in DNA end binding or repair.

[0252] The repair pathway choice can be guided by a number of culture conditions, such as those that influence cell cycling, or by targeting of DNA repair and associated proteins. For example, to increase HDR, key NHEJ molecules can be suppressed, such as KU70, KU80 or DNA ligase IV.

[0253] In addition to genome editing by NHEJ or HDR, site-specific gene insertions have been conducted that use both the NHEJ pathway and HDR. A combination approach may be applicable in certain settings, possibly including intron/exon borders. NHEJ may prove effective for ligation in the intron, while the error-free HDR may be better suited in the coding region.

[0254] Any one or more of these exons or nearby introns can be targeted in order to create one or more insertions or deletions that disrupt the reading frame and eventually eliminate APOCIII protein activity.

[0255] In some embodiments, the methods can provide gRNA pairs that make a deletion by cutting the gene twice at locations flanking an unwanted sequence. This sequence may include one or more exons, introns, intron: exon junctions, other DNA sequences encoding regulatory elements of the APOCIII gene or combinations thereof. The cutting can be accomplished by a pair of DNA endonucleases that each makes a DSB in the genome, or by multiple nickases that together make a DSB in the genome.

[0256] Alternatively, the methods can provide one gRNA to make one double-strand cut within a coding or splicing sequence. The double-strand cut can be made by a single DNA endonuclease or multiple nickases that together make a DSB in the genome.

[0257] Splicing donor and acceptors are generally within 100 base pairs of the neighboring intron. In some examples, methods can provide gRNAs that cut approximately +/−100-3100 bp with respect to each exon/intron junction of interest.

[0258] For any of the genome editing strategies, gene editing can be confirmed by sequencing or PCR analysis.

[0259] In some embodiments, a step of the ex vivo methods of the present disclosure comprises editing the patient specific iPSC cells using genome engineering. Alternatively, a step of the ex vivo methods of the present disclosure comprises editing a mesenchymal stem cell, hepatocyte, or liver specific progenitor cell. Likewise, a step of the in vivo methods of the present disclosure comprises editing the cells in a patient with an APOCIII-related disorder or condition using genome engineering. Similarly, a step in the cellular methods of the present disclosure comprises editing the APOCIII gene in a human cell by genome engineering.

[0260] Any CRISPR endonuclease may be used in the methods of the present disclosure, each CRISPR endonuclease having its own associated PAM, which may or may not be disease specific. For example, gRNA spacer sequences for targeting the APOCIII gene with a CRISPR/Cas9 endonuclease from S. pyogenes have been identified in SEQ ID NOs: 5,987-10,852. gRNA spacer sequences for targeting the APOCIII gene with a CRISPR/Cas9 endonuclease from S. aureus have been identified in SEQ ID NOs: 5,405-5,783. gRNA spacer sequences for targeting the APOCIII gene with a CRISPR/Cas9 endonuclease from S. thermophilus have been identified in SEQ ID NOs: 5,320-5,404. gRNA spacer sequences for targeting the APOCIII gene with a CRISPR/Cas9 endonuclease from T. denticola have been identified in SEQ ID NOs: 5,305-5,319. gRNA spacer sequences for targeting the APOCIII gene with a CRISPR/Cas9 endonuclease from N. meningitides have been identified in SEQ ID NOs: 5,784-5,986. gRNA spacer sequences for targeting the APOCIII gene with a CRISPR/Cpf1 endonuclease from Acidaminococcus, Lachnospiraceae, and a Francisella novicida have been identified in SEQ ID NOs: 10,853-14,350.

[0261] The APOCIII gene contains 14 exons. Any one or more of the 14 exons or nearby introns or at least a portion thereof may be deleted reduce or eliminate the expression or function of APOCIII gene products. Any one or more of the APOCIII alleles may be deleted in order to reduce or eliminate the expression or function of APOCIII gene products.

[0262] Another genome engineering strategy involves exon deletion. Deletions can either be single exon deletions or multi-exon deletions. While multi-exon deletions can reach a larger number of patients, for larger deletions the efficiency of deletion greatly decreases with increased size. Therefore, deletions range can be from 40 to 10,000 base pairs (bp) in size. For example, deletions may range from 40-100; 100-300; 300-500; 500-1,000; 1,000-2,000; 2,000-3,000; 3,000-5,000; or 5,000-10,000 base pairs in size.

[0263] Target Sequence Selection

[0264] Shifts in the location of the 5′ boundary and/or the 3′ boundary relative to particular reference loci can be used to facilitate or enhance particular applications of gene editing, which depend in part on the endonuclease system selected for the editing, as further described and illustrated herein.

[0265] In a first non-limiting example of such target sequence selection, many endonuclease systems have rules or criteria that can guide the initial selection of potential target sites for cleavage, such as the requirement of a PAM sequence motif in a particular position adjacent to the DNA cleavage sites in the case of CRISPR Type II or Type V endonucleases.

[0266] In another non-limiting example of target sequence selection or optimization, the frequency of off-target activity for a particular combination of target sequence and gene editing endonuclease (i.e. the frequency of DSBs occurring at sites other than the selected target sequence) can be assessed relative to the frequency of on-target activity. In some embodiments, cells that have been correctly edited at the desired locus can have a selective advantage relative to other cells. Illustrative, but non-limiting, examples of a selective advantage include the acquisition of attributes such as enhanced rates of replication, persistence, resistance to certain conditions, enhanced rates of successful engraftment or persistence in vivo following introduction into a patient, and other attributes associated with the maintenance or increased numbers or viability of such cells. In other embodiments, cells that have been correctly edited at the desired locus can be positively selected for by one or more screening methods used to identify, sort or otherwise select for cells that have been correctly edited. Both selective advantage and directed selection methods can take advantage of the phenotype associated with the alteration. In some embodiments, cells can be edited two or more times in order to create a second modification that creates a new phenotype that is used to select or purify the intended population of cells. Such a second modification could be created by adding a second gRNA for a selectable or screenable marker. In some embodiments, cells can be correctly edited at the desired locus using a DNA fragment that contains the cDNA and also a selectable marker.

[0267] Whether any selective advantage is applicable or any directed selection is to be applied in a particular case, target sequence selection can also be guided by consideration of off-target frequencies in order to enhance the effectiveness of the application and/or reduce the potential for undesired alterations at sites other than the desired target. As described further and illustrated herein and in the art, the occurrence of off-target activity can be influenced by a number of factors including similarities and dissimilarities between the target site and various off-target sites, as well as the particular endonuclease used. Bioinformatics tools are available that assist in the prediction of off-target activity, and frequently such tools can also be used to identify the most likely sites of off-target activity, which can then be assessed in experimental settings to evaluate relative frequencies of off-target to on-target activity, thereby allowing the selection of sequences that have higher relative on-target activities. Illustrative examples of such techniques are provided herein, and others are known in the art.

[0268] Another aspect of target sequence selection relates to homologous recombination events. Sequences sharing regions of homology can serve as focal points for homologous recombination events that result in deletion of intervening sequences. Such recombination events occur during the normal course of replication of chromosomes and other DNA sequences, and also at other times when DNA sequences are being synthesized, such as in the case of repairs of double-strand breaks (DSBs), which occur on a regular basis during the normal cell replication cycle but can also be enhanced by the occurrence of various events (such as UV light and other inducers of DNA breakage) or the presence of certain agents (such as various chemical inducers). Many such inducers cause DSBs to occur indiscriminately in the genome, and DSBs can be regularly induced and repaired in normal cells. During repair, the original sequence can be reconstructed with complete fidelity, however, in some embodiments, small insertions or deletions (referred to as “indels”) are introduced at the DSB site.

[0269] DSBs can also be specifically induced at particular locations, as in the case of the endonucleases systems described herein, which can be used to cause directed or preferential gene modification events at selected chromosomal locations. The tendency for homologous sequences to be subject to recombination in the context of DNA repair (as well as replication) can be taken advantage of in a number of circumstances, and is the basis for one application of gene editing systems, such as CRISPR, in which homology directed repair is used to insert a sequence of interest, provided through use of a “donor” polynucleotide, into a desired chromosomal location.

[0270] Regions of homology between particular sequences, which can be small regions of “microhomology” that can comprise as few as ten basepairs or less, can also be used to bring about desired deletions. For example, a single DSB can be introduced at a site that exhibits microhomology with a nearby sequence. During the normal course of repair of such DSB, a result that occurs with high frequency is the deletion of the intervening sequence as a result of recombination being facilitated by the DSB and concomitant cellular repair process.

[0271] In some circumstances, however, selecting target sequences within regions of homology can also give rise to much larger deletions, including gene fusions (when the deletions are in coding regions), which may or may not be desired given the particular circumstances.

[0272] The examples provided herein further illustrate the selection of various target regions for the creation of DSBs designed to induce insertions, deletions or mutations that result in reduction or elimination of APOCIII protein activity, as well as the selection of specific target sequences within such regions that are designed to minimize off-target events relative to on-target events.

[0273] Nucleic Acid Modifications

[0274] In some aspects, polynucleotides introduced into cells can comprise one or more modifications that can be used individually or in combination, for example, to enhance activity, stability or specificity, alter delivery, reduce innate immune responses in host cells, or for other enhancements, as further described herein and known in the art.

[0275] In certain examples, modified polynucleotides can be used in the CRISPR/Cas9 or CRISPR/Cpf1 system, in which case the guide RNAs (either single-molecule guides or double-molecule guides) and/or a DNA or an RNA encoding a Cas9 or Cpf1 endonuclease introduced into a cell can be modified, as described and illustrated below. Such modified polynucleotides can be used in the CRISPR/Cas9 or CRISPR/Cpf1 system to edit any one or more genomic loci.

[0276] Using the CRISPR/Cas9 or CRISPR/Cpf1 system for purposes of nonlimiting illustrations of such uses, modifications of guide RNAs can be used to enhance the formation or stability of the CRISPR/Cas9 or CRISPR/Cpf1 genome editing complex comprising guide RNAs, which can be single-molecule guides or double-molecule, and a Cas9 or Cpf1 endonuclease. Modifications of guide RNAs can also or alternatively be used to enhance the initiation, stability or kinetics of interactions between the genome editing complex with the target sequence in the genome, which can be used, for example, to enhance on-target activity. Modifications of guide RNAs can also or alternatively be used to enhance specificity, e.g., the relative rates of genome editing at the on-target site as compared to effects at other (off-target) sites.

[0277] Modifications can also or alternatively be used to increase the stability of a guide RNA, e.g., by increasing its resistance to degradation by ribonucleases (RNases) present in a cell, thereby causing its half-life in the cell to be increased. Modifications enhancing guide RNA half-life can be particularly useful in aspects in which a Cas9 or Cpf1 endonuclease is introduced into the cell to be edited via an RNA that needs to be translated in order to generate endonuclease, because increasing the half-life of guide RNAs introduced at the same time as the RNA encoding the endonuclease can be used to increase the time that the guide RNAs and the encoded Cas9 or Cpf1 endonuclease co-exist in the cell.

[0278] Modifications can also or alternatively be used to decrease the likelihood or degree to which RNAs introduced into cells elicit innate immune responses. Such responses, which have been well characterized in the context of RNA interference (RNAi), including small-interfering RNAs (siRNAs), as described below and in the art, tend to be associated with reduced half-life of the RNA and/or the elicitation of cytokines or other factors associated with immune responses.

[0279] One or more types of modifications can also be made to RNAs encoding an endonuclease that are introduced into a cell, including, without limitation, modifications that enhance the stability of the RNA (such as by increasing its degradation by RNases present in the cell), modifications that enhance translation of the resulting product (i.e. the endonuclease), and/or modifications that decrease the likelihood or degree to which the RNAs introduced into cells elicit innate immune responses.

[0280] Combinations of modifications, such as the foregoing and others, can likewise be used. In the case of CRISPR/Cas9 or CRISPR/Cpf1, for example, one or more types of modifications can be made to guide RNAs (including those exemplified above), and/or one or more types of modifications can be made to RNAs encoding Cas endonuclease (including those exemplified above).

[0281] By way of illustration, guide RNAs used in the CRISPR/Cas9 or CRISPR/Cpf1 system, or other smaller RNAs can be readily synthesized by chemical means, enabling a number of modifications to be readily incorporated, as illustrated below and described in the art. While chemical synthetic procedures are continually expanding, purifications of such RNAs by procedures such as high performance liquid chromatography (HPLC, which avoids the use of gels such as PAGE) tends to become more challenging as polynucleotide lengths increase significantly beyond a hundred or so nucleotides. One approach that can be used for generating chemically-modified RNAs of greater length is to produce two or more molecules that are ligated together. Much longer RNAs, such as those encoding a Cas9 endonuclease, are more readily generated enzymatically. While fewer types of modifications are generally available for use in enzymatically produced RNAs, there are still modifications that can be used to, e.g., enhance stability, reduce the likelihood or degree of innate immune response, and/or enhance other attributes, as described further below and in the art; and new types of modifications are regularly being developed.

[0282] By way of illustration of various types of modifications, especially those used frequently with smaller chemically synthesized RNAs, modifications can comprise one or more nucleotides modified at the 2′ position of the sugar, in some aspects a 2′-O-alkyl, 2′-O-alkyl-O-alkyl, or 2′-fluoro-modified nucleotide. In some examples, RNA modifications include 2′-fluoro, 2′-amino or 2′-O-methyl modifications on the ribose of pyrimidines, abasic residues, or an inverted base at the 3′ end of the RNA. Such modifications are routinely incorporated into oligonucleotides and these oligonucleotides have been shown to have a higher Tm (i.e., higher target binding affinity) than 2′-deoxyoligonucleotides against a given target.

[0283] A number of nucleotide and nucleoside modifications have been shown to make the oligonucleotide into which they are incorporated more resistant to nuclease digestion than the native oligonucleotide; these modified oligos survive intact for a longer time than unmodified oligonucleotides. Specific examples of modified oligonucleotides include those comprising modified backbones, for example, phosphorothioates, phosphotriesters, methyl phosphonates, short chain alkyl or cycloalkyl intersugar linkages or short chain heteroatomic or heterocyclic intersugar linkages. Some oligonucleotides are oligonucleotides with phosphorothioate backbones and those with heteroatom backbones, particularly CH₂—NH—O—CH₂, CH, ˜N(CH₃)˜O˜CH₂ (known as a methylene(methylimino) or MMI backbone), CH₂—O—N(CH₃)—CH₂, CH₂—N(CH₃)—N(CH₃)—CH₂ and O—N(CH₃)—CH₂—CH₂ backbones, wherein the native phosphodiester backbone is represented as O—P—O—CH); amide backbones [see De Mesmaeker et al., Ace. Chem. Res., 28:366-374 (1995)]; morpholino backbone structures (see Summerton and Weller, U.S. Pat. No. 5,034,506); peptide nucleic acid (PNA) backbone (wherein the phosphodiester backbone of the oligonucleotide is replaced with a polyamide backbone, the nucleotides being bound directly or indirectly to the aza nitrogen atoms of the polyamide backbone, see Nielsen et al., Science 1991, 254, 1497). Phosphorus-containing linkages include, but are not limited to, phosphorothioates, chiral phosphorothioates, phosphorodithioates, phosphotriesters, aminoalkylphosphotriesters, methyl and other alkyl phosphonates comprising 3′alkylene phosphonates and chiral phosphonates, phosphinates, phosphoramidates comprising 3′-amino phosphoramidate and aminoalkylphosphoramidates, thionophosphoramidates, thionoalkylphosphonates, thionoalkylphosphotriesters, and boranophosphates having normal 3′-5′ linkages, 2′-5′ linked analogs of these, and those having inverted polarity wherein the adjacent pairs of nucleoside units are linked 3′-5′ to 5′-3′ or 2′-5′ to 5′-2′; see U.S. Pat. Nos. 3,687,808; 4,469,863; 4,476,301; 5,023,243; 5,177,196; 5,188,897; 5,264,423; 5,276,019; 5,278,302; 5,286,717; 5,321,131; 5,399,676; 5,405,939; 5,453,496; 5,455,233; 5,466,677; 5,476,925; 5,519,126; 5,536,821; 5,541,306; 5,550,111; 5,563,253; 5,571,799; 5,587,361; and 5,625,050.

[0284] Morpholino-based oligomeric compounds are described in Braasch and David Corey, Biochemistry, 41(14): 4503-4510 (2002); Genesis, Volume 30, Issue 3, (2001); Heasman, Dev. Biol., 243: 209-214 (2002); Nasevicius et al., Nat. Genet., 26:216-220 (2000); Lacerra et al., Proc. Natl. Acad. Sci., 97: 9591-9596 (2000); and U.S. Pat. No. 5,034,506, issued Jul. 23, 1991.

[0285] Cyclohexenyl nucleic acid oligonucleotide mimetics are described in Wang et al., J. Am. Chem. Soc., 122: 8595-8602 (2000).

[0286] Modified oligonucleotide backbones that do not include a phosphorus atom therein have backbones that are formed by short chain alkyl or cycloalkyl internucleoside linkages, mixed heteroatom and alkyl or cycloalkyl internucleoside linkages, or one or more short chain heteroatomic or heterocyclic internucleoside linkages. These comprise those having morpholino linkages (formed in part from the sugar portion of a nucleoside); siloxane backbones; sulfide, sulfoxide and sulfone backbones; formacetyl and thioformacetyl backbones; methylene formacetyl and thioformacetyl backbones; alkene containing backbones; sulfamate backbones; methyleneimino and methylenehydrazino backbones; sulfonate and sulfonamide backbones; amide backbones; and others having mixed N, O, S, and CH₂ component parts; see U.S. Pat. Nos. 5,034,506; 5,166,315; 5,185,444; 5,214,134; 5,216,141; 5,235,033; 5,264,562; 5,264,564; 5,405,938; 5,434,257; 5,466,677; 5,470,967; 5,489,677; 5,541,307; 5,561,225; 5,596,086; 5,602,240; 5,610,289; 5,602,240; 5,608,046; 5,610,289; 5,618,704; 5,623,070; 5,663,312; 5,633,360; 5,677,437; and 5,677,439.

[0287] One or more substituted sugar moieties can also be included, e.g., one of the following at the 2′ position: OH, SH, SCH₃, F, OCN, OCH₃ OCH₃, OCH₃ O(CH₂)n CH₃, O(CH₂)n NH₂, or O(CH₂)n CH₃, where n is from 1 to about 10; C1 to C10 lower alkyl, alkoxyalkoxy, substituted lower alkyl, alkaryl or aralkyl; Cl; Br; CN; CF₃; OCF₃; O-, S-, or N-alkyl; O-, S-, or N-alkenyl; SOCH₃; SO₂ CH₃; ONO₂; NO₂; N₃; NH₂; heterocycloalkyl; heterocycloalkaryl; aminoalkylamino; polyalkylamino; substituted silyl; an RNA cleaving group; a reporter group; an intercalator; a group for improving the pharmacokinetic properties of an oligonucleotide; or a group for improving the pharmacodynamic properties of an oligonucleotide and other substituents having similar properties. In some aspects, a modification includes 2′-methoxyethoxy (2′-O—CH₂CH₂OCH₃, also known as 2′-O-(2-methoxyethyl)) (Martin et al, Helv. Chim. Acta, 1995, 78, 486). Other modifications include 2′-methoxy (2′-O—CH₃), 2′-propoxy (2′-OCH₂ CH₂CH₃) and 2′-fluoro (2′-F). Similar modifications may also be made at other positions on the oligonucleotide, particularly the 3′ position of the sugar on the 3′ terminal nucleotide and the 5′ position of 5′ terminal nucleotide. Oligonucleotides may also have sugar mimetics, such as cyclobutyls in place of the pentofuranosyl group.

[0288] In some examples, both a sugar and an internucleoside linkage, i.e., the backbone, of the nucleotide units can be replaced with novel groups. The base units can be maintained for hybridization with an appropriate nucleic acid target compound. One such oligomeric compound, an oligonucleotide mimetic that has been shown to have excellent hybridization properties, is referred to as a peptide nucleic acid (PNA). In PNA compounds, the sugar-backbone of an oligonucleotide can be replaced with an amide containing backbone, for example, an aminoethylglycine backbone. The nucleobases can be retained and bound directly or indirectly to aza nitrogen atoms of the amide portion of the backbone. Representative United States patents that teach the preparation of PNA compounds comprise, but are not limited to, U.S. Pat. Nos. 5,539,082; 5,714,331; and 5,719,262. Further teaching of PNA compounds can be found in Nielsen et al, Science, 254: 1497-1500 (1991).

[0289] Guide RNAs can also include, additionally or alternatively, nucleobase (often referred to in the art simply as “base”) modifications or substitutions. As used herein, “unmodified” or “natural” nucleobases include adenine (A), guanine (G), thymine (T), cytosine (C), and uracil (U). Modified nucleobases include nucleobases found only infrequently or transiently in natural nucleic acids, e.g., hypoxanthine, 6-methyladenine, 5-Me pyrimidines, particularly 5-methylcytosine (also referred to as 5-methyl-2′ deoxycytosine and often referred to in the art as 5-Me-C), 5-hydroxymethylcytosine (HMC), glycosyl HMC and gentobiosyl HMC, as well as synthetic nucleobases, e.g., 2-aminoadenine, 2-(methylamino)adenine, 2-(imidazolylalkyl)adenine, 2-(aminoalklyamino)adenine or other heterosubstituted alkyladenines, 2-thiouracil, 2-thiothymine, 5-bromouracil, 5-hydroxymethyluracil, 8-azaguanine, 7-deazaguanine, N6 (6-aminohexyl)adenine, and 2,6-diaminopurine. Kornberg, A., DNA Replication, W. H. Freeman & Co., San Francisco, pp 75-77 (1980); Gebeyehu et al., Nucl. Acids Res. 15:4513 (1997). A “universal” base known in the art, e.g., inosine, can also be included. 5-Me-C substitutions have been shown to increase nucleic acid duplex stability by 0.6-1.2° C. (Sanghvi, Y. S., in Crooke, S. T. and Lebleu, B., eds., Antisense Research and Applications, CRC Press, Boca Raton, 1993, pp. 276-278) and are aspects of base substitutions.

[0290] Modified nucleobases can comprise other synthetic and natural nucleobases, such as 5-methylcytosine (5-me-C), 5-hydroxymethyl cytosine, xanthine, hypoxanthine, 2-aminoadenine, 6-methyl and other alkyl derivatives of adenine and guanine, 2-propyl and other alkyl derivatives of adenine and guanine, 2-thiouracil, 2-thiothymine and 2-thiocytosine, 5-halouracil and cytosine, 5-propynyl uracil and cytosine, 6-azo uracil, cytosine and thymine, 5-uracil (pseudo-uracil), 4-thiouracil, 8-halo, 8-amino, 8-thiol, 8-thioalkyl, 8-hydroxyl and other 8-substituted adenines and guanines, 5-halo particularly 5-bromo, 5-trifluoromethyl and other 5-substituted uracils and cytosines, 7-methylquanine and 7-methyladenine, 8-azaguanine and 8-azaadenine, 7-deazaguanine and 7-deazaadenine, and 3-deazaguanine and 3-deazaadenine.

[0291] Further, nucleobases can comprise those disclosed in U.S. Pat. No. 3,687,808, those disclosed in ‘The Concise Encyclopedia of Polymer Science And Engineering’, pages 858-859, Kroschwitz, J. I., ed. John Wiley & Sons, 1990, those disclosed by Englisch et al., Angewandle Chemie, International Edition', 1991, 30, page 613, and those disclosed by Sanghvi, Y. S., Chapter 15, Antisense Research and Applications', pages 289-302, Crooke, S. T. and Lebleu, B. ea., CRC Press, 1993. Certain of these nucleobases are particularly useful for increasing the binding affinity of the oligomeric compounds of the invention. These include 5-substituted pyrimidines, 6-azapyrimidines and N-2, N-6 and 0-6 substituted purines, comprising 2-aminopropyladenine, 5-propynyluracil and 5-propynylcytosine. 5-methylcytosine substitutions have been shown to increase nucleic acid duplex stability by 0.6-1.2° C. (Sanghvi, Y. S., Crooke, S. T. and Lebleu, B., eds, ‘Antisense Research and Applications’, CRC Press, Boca Raton, 1993, pp. 276-278) and are aspects of base substitutions, even more particularly when combined with 2′-O-methoxyethyl sugar modifications. Modified nucleobases are described in U.S. Pat. No. 3,687,808, as well as U.S. Pat. Nos. 4,845,205; 5,130,302; 5,134,066; 5,175,273; 5,367,066; 5,432,272; 5,457,187; 5,459,255; 5,484,908; 5,502,177; 5,525,711; 5,552,540; 5,587,469; 5,596,091; 5,614,617; 5,681,941; 5,750,692; 5,763,588; 5,830,653; 6,005,096; and US Patent Application Publication 2003/0158403.

[0292] Thus, the term “modified” refers to a non-natural sugar, phosphate, or base that is incorporated into a guide RNA, an endonuclease, or both a guide RNA and an endonuclease. It is not necessary for all positions in a given oligonucleotide to be uniformly modified, and in fact more than one of the aforementioned modifications can be incorporated in a single oligonucleotide, or even in a single nucleoside within an oligonucleotide.

[0293] The guide RNAs and/or mRNA (or DNA) encoding an endonuclease can be chemically linked to one or more moieties or conjugates that enhance the activity, cellular distribution, or cellular uptake of the oligonucleotide. Such moieties comprise, but are not limited to, lipid moieties such as a cholesterol moiety [Letsinger et al., Proc. Natl. Acad. Sci. USA, 86: 6553-6556 (1989)]; cholic acid [Manoharan et al., Bioorg. Med. Chem. Let., 4: 1053-1060 (1994)]; a thioether, e.g., hexyl-S-tritylthiol [Manoharan et al, Ann. N. Y. Acad. Sci., 660: 306-309 (1992) and Manoharan et al., Bioorg. Med. Chem. Let., 3: 2765-2770 (1993)]; a thiocholesterol [Oberhauser et al., Nucl. Acids Res., 20: 533-538 (1992)]; an aliphatic chain, e.g., dodecandiol or undecyl residues [Kabanov et al., FEBS Lett., 259: 327-330 (1990) and Svinarchuk et al., Biochimie, 75: 49-54 (1993)]; a phospholipid, e.g., di-hexadecyl-rac-glycerol or triethylammonium 1,2-di-O-hexadecyl-rac-glycero-3-H-phosphonate [Manoharan et al., Tetrahedron Lett., 36: 3651-3654 (1995) and Shea et al., Nucl. Acids Res., 18: 3777-3783 (1990)]; a polyamine or a polyethylene glycol chain [Mancharan et al., Nucleosides & Nucleotides, 14: 969-973 (1995)]; adamantane acetic acid [Manoharan et al., Tetrahedron Lett., 36: 3651-3654 (1995)]; a palmityl moiety [(Mishra et al., Biochim. Biophys. Acta, 1264: 229-237 (1995)]; or an octadecylamine or hexylamino-carbonyl-t oxycholesterol moiety [Crooke et al., J. Pharmacol. Exp. Ther., 277: 923-937 (1996)]. See also U.S. Pat. Nos. 4,828,979; 4,948,882; 5,218,105; 5,525,465; 5,541,313; 5,545,730; 5,552,538; 5,578,717, 5,580,731; 5,580,731; 5,591,584; 5,109,124; 5,118,802; 5,138,045; 5,414,077; 5,486,603; 5,512,439; 5,578,718; 5,608,046; 4,587,044; 4,605,735; 4,667,025; 4,762,779; 4,789,737; 4,824,941; 4,835,263; 4,876,335; 4,904,582; 4,958,013; 5,082,830; 5,112,963; 5,214,136; 5,082,830; 5,112,963; 5,214,136; 5,245,022; 5,254,469; 5,258,506; 5,262,536; 5,272,250; 5,292,873; 5,317,098; 5,371,241, 5,391,723; 5,416,203, 5,451,463; 5,510,475; 5,512,667; 5,514,785; 5,565,552; 5,567,810; 5,574,142; 5,585,481; 5,587,371; 5,595,726; 5,597,696; 5,599,923; 5,599, 928 and 5,688,941.

[0294] Sugars and other moieties can be used to target proteins and complexes comprising nucleotides, such as cationic polysomes and liposomes, to particular sites. For example, hepatic cell directed transfer can be mediated via asialoglycoprotein receptors (ASGPRs); see, e.g., Hu, et al., Protein Pept Lett. 21(10):1025-30 (2014). Other systems known in the art and regularly developed can be used to target biomolecules of use in the present case and/or complexes thereof to particular target cells of interest.

[0295] These targeting moieties or conjugates can include conjugate groups covalently bound to functional groups, such as primary or secondary hydroxyl groups. Conjugate groups of the invention include intercalators, reporter molecules, polyamines, polyamides, polyethylene glycols, polyethers, groups that enhance the pharmacodynamic properties of oligomers, and groups that enhance the pharmacokinetic properties of oligomers. Typical conjugate groups include cholesterols, lipids, phospholipids, biotin, phenazine, folate, phenanthridine, anthraquinone, acridine, fluoresceins, rhodamines, coumarins, and dyes. Groups that enhance the pharmacodynamic properties, in the context of this disclosure, include groups that improve uptake, enhance resistance to degradation, and/or strengthen sequence-specific hybridization with the target nucleic acid. Groups that enhance the pharmacokinetic properties, in the context of this invention, include groups that improve uptake, distribution, metabolism or excretion of the compounds of the present invention. Representative conjugate groups are disclosed in International Patent Application No. PCT/US92/09196, filed Oct. 23, 1992 (published as WO1993007883), and U.S. Pat. No. 6,287,860. Conjugate moieties include, but are not limited to, lipid moieties such as a cholesterol moiety, cholic acid, a thioether, e.g., hexyl-5-tritylthiol, a thiocholesterol, an aliphatic chain, e.g., dodecandiol or undecyl residues, a phospholipid, e.g., di-hexadecyl-rac-glycerol or triethylammonium1,2-di-O-hexadecyl-rac-glycero-3-H-phosphonate, a polyamine or a polyethylene glycol chain, or adamantane acetic acid, a palmityl moiety, or an octadecylamine or hexylamino-carbonyl-oxy cholesterol moiety. See, e.g., U.S. Pat. Nos. 4,828,979; 4,948,882; 5,218,105; 5,525,465; 5,541,313; 5,545,730; 5,552,538; 5,578,717, 5,580,731; 5,580,731; 5,591,584; 5,109,124; 5,118,802; 5,138,045; 5,414,077; 5,486,603; 5,512,439; 5,578,718; 5,608,046; 4,587,044; 4,605,735; 4,667,025; 4,762,779; 4,789,737; 4,824,941; 4,835,263; 4,876,335; 4,904,582; 4,958,013; 5,082,830; 5,112,963; 5,214,136; 5,082,830; 5,112,963; 5,214,136; 5,245,022; 5,254,469; 5,258,506; 5,262,536; 5,272,250; 5,292,873; 5,317,098; 5,371,241, 5,391,723; 5,416,203, 5,451,463; 5,510,475; 5,512,667; 5,514,785; 5,565,552; 5,567,810; 5,574,142; 5,585,481; 5,587,371; 5,595,726; 5,597,696; 5,599,923; 5,599,928 and 5,688,941.

[0296] Longer polynucleotides that are less amenable to chemical synthesis and are typically produced by enzymatic synthesis can also be modified by various means. Such modifications can include, for example, the introduction of certain nucleotide analogs, the incorporation of particular sequences or other moieties at the 5′ or 3′ ends of molecules, and other modifications. By way of illustration, the mRNA encoding Cas9 is approximately 4 kb in length and can be synthesized by in vitro transcription. Modifications to the mRNA can be applied to, e.g., increase its translation or stability (such as by increasing its resistance to degradation with a cell), or to reduce the tendency of the RNA to elicit an innate immune response that is often observed in cells following introduction of exogenous RNAs, particularly longer RNAs such as that encoding Cas9.

[0297] Numerous such modifications have been described in the art, such as polyA tails, 5′ cap analogs (e.g., Anti Reverse Cap Analog (ARCA) or m7G(5′)ppp(5′)G (mCAP)), modified 5′ or 3′ untranslated regions (UTRs), use of modified bases (such as Pseudo-UTP, 2-Thio-UTP, 5-Methylcytidine-5′-Triphosphate (5-Methyl-CTP) or N6-Methyl-ATP), or treatment with phosphatase to remove 5′ terminal phosphates. These and other modifications are known in the art, and new modifications of RNAs are regularly being developed.

[0298] There are numerous commercial suppliers of modified RNAs, including for example, TriLink Biotech, AxoLabs, Bio-Synthesis Inc., Dharmacon and many others. As described by TriLink, for example, 5-Methyl-CTP can be used to impart desirable characteristics, such as increased nuclease stability, increased translation or reduced interaction of innate immune receptors with in vitro transcribed RNA. 5-Methylcytidine-5′-Triphosphate (5-Methyl-CTP), N6-Methyl-ATP, as well as Pseudo-UTP and 2-Thio-UTP, have also been shown to reduce innate immune stimulation in culture and in vivo while enhancing translation, as illustrated in publications by Kormann et al. and Warren et al. referred to below.

[0299] It has been shown that chemically modified mRNA delivered in vivo can be used to achieve improved therapeutic effects; see, e.g., Kormann et al., Nature Biotechnology 29, 154-157 (2011). Such modifications can be used, for example, to increase the stability of the RNA molecule and/or reduce its immunogenicity. Using chemical modifications such as Pseudo-U, N6-Methyl-A, 2-Thio-U and 5-Methyl-C, it was found that substituting just one quarter of the uridine and cytidine residues with 2-Thio-U and 5-Methyl-C respectively resulted in a significant decrease in toll-like receptor (TLR) mediated recognition of the mRNA in mice. By reducing the activation of the innate immune system, these modifications can be used to effectively increase the stability and longevity of the mRNA in vivo; see, e.g., Kormann et al., supra.

[0300] It has also been shown that repeated administration of synthetic messenger RNAs incorporating modifications designed to bypass innate anti-viral responses can reprogram differentiated human cells to pluripotency. See, e.g., Warren, et al., Cell Stem Cell, 7(5):618-30 (2010). Such modified mRNAs that act as primary reprogramming proteins can be an efficient means of reprogramming multiple human cell types. Such cells are referred to as induced pluripotency stem cells (iPSCs), and it was found that enzymatically synthesized RNA incorporating 5-Methyl-CTP, Pseudo-UTP and an Anti Reverse Cap Analog (ARCA) could be used to effectively evade the cell's antiviral response; see, e.g., Warren et al., supra.

[0301] Other modifications of polynucleotides described in the art include, for example, the use of polyA tails, the addition of 5′ cap analogs (such as m7G(5′)ppp(5′)G (mCAP)), modifications of 5′ or 3′ untranslated regions (UTRs), or treatment with phosphatase to remove 5′ terminal phosphates—and new approaches are regularly being developed.

[0302] A number of compositions and techniques applicable to the generation of modified RNAs for use herein have been developed in connection with the modification of RNA interference (RNAi), including small-interfering RNAs (siRNAs). siRNAs present particular challenges in vivo because their effects on gene silencing via mRNA interference are generally transient, which can require repeat administration. In addition, siRNAs are double-stranded RNAs (dsRNA) and mammalian cells have immune responses that have evolved to detect and neutralize dsRNA, which is often a by-product of viral infection. Thus, there are mammalian enzymes such as PKR (dsRNA-responsive kinase), and potentially retinoic acid-inducible gene I (RIG-0, that can mediate cellular responses to dsRNA, as well as Toll-like receptors (such as TLR3, TLR7 and TLR8) that can trigger the induction of cytokines in response to such molecules; see, e.g., the reviews by Angart et al., Pharmaceuticals (Basel) 6(4): 440-468 (2013); Kanasty et al., Molecular Therapy 20(3): 513-524 (2012); Burnett et al., Biotechnol J. 6(9):1130-46 (2011); Judge and MacLachlan, Hum Gene Ther 19(2):111-24 (2008); and references cited therein.

[0303] A large variety of modifications have been developed and applied to enhance RNA stability, reduce innate immune responses, and/or achieve other benefits that can be useful in connection with the introduction of polynucleotides into human cells, as described herein; see, e.g., the reviews by Whitehead Kans. et al., Annual Review of Chemical and Biomolecular Engineering, 2: 77-96 (2011); Gaglione and Messere, Mini Rev Med Chem, 10(7):578-95 (2010); Chernolovskaya et al, Curr Opin Mol Ther., 12(2):158-67 (2010); Deleavey et al., Curr Protoc Nucleic Acid Chem Chapter 16:Unit 16.3 (2009); Behlke, Oligonucleotides 18(4):305-19 (2008); Fucini et al., Nucleic Acid Ther 22(3): 205-210 (2012); Bremsen et al., Front Genet 3:154 (2012).

[0304] As noted above, there are a number of commercial suppliers of modified RNAs, many of which have specialized in modifications designed to improve the effectiveness of siRNAs. A variety of approaches are offered based on various findings reported in the literature. For example, Dharmacon notes that replacement of a non-bridging oxygen with sulfur (phosphorothioate, PS) has been extensively used to improve nuclease resistance of siRNAs, as reported by Kole, Nature Reviews Drug Discovery 11:125-140 (2012). Modifications of the 2′-position of the ribose have been reported to improve nuclease resistance of the internucleotide phosphate bond while increasing duplex stability (Tm), which has also been shown to provide protection from immune activation. A combination of moderate PS backbone modifications with small, well-tolerated 2′-substitutions (2′-O-Methyl, 2′-Fluoro, 2′-Hydro) have been associated with highly stable siRNAs for applications in vivo, as reported by Soutschek et al. Nature 432:173-178 (2004); and 2′-O-Methyl modifications have been reported to be effective in improving stability as reported by Volkov, Oligonucleotides 19:191-202 (2009). With respect to decreasing the induction of innate immune responses, modifying specific sequences with 2′-O-Methyl, 2′-Fluoro, 2′-Hydro have been reported to reduce TLR7/TLR8 interaction while generally preserving silencing activity; see, e.g., Judge et al., Mol. Ther. 13:494-505 (2006); and Cekaite et al., J. Mol. Biol. 365:90-108 (2007). Additional modifications, such as 2-thiouracil, pseudouracil, 5-methylcytosine, 5-methyluracil, and N6-methyladenosine have also been shown to minimize the immune effects mediated by TLR3, TLR7, and TLR8; see, e.g., Kariko, K. et al., Immunity 23:165-175 (2005).

[0305] As is also known in the art, and commercially available, a number of conjugates can be applied to polynucleotides, such as RNAs, for use herein that can enhance their delivery and/or uptake by cells, including for example, cholesterol, tocopherol and folic acid, lipids, peptides, polymers, linkers and aptamers; see, e.g., the review by Winkler, Ther. Deliv. 4:791-809 (2013), and references cited therein.

[0306] Codon-Optimization

[0307] A polynucleotide encoding a site-directed polypeptide can be codon-optimized according to methods standard in the art for expression in the cell containing the target DNA of interest. For example, if the intended target nucleic acid is in a human cell, a human codon-optimized polynucleotide encoding Cas9 is contemplated for use for producing the Cas9 polypeptide.

[0308] Complexes of a Genome-Targeting Nucleic Acid and a Site-Directed Polypeptide

[0309] A genome-targeting nucleic acid interacts with a site-directed polypeptide (e.g., a nucleic acid-guided nuclease such as Cas9), thereby forming a complex. The genome-targeting nucleic acid guides the site-directed polypeptide to a target nucleic acid.

[0310] Ribonucleoprotein Complexes (RNPs)

[0311] The site-directed polypeptide and genome-targeting nucleic acid can each be administered separately to a cell or a patient. On the other hand, the site-directed polypeptide can be pre-complexed with one or more guide RNAs, or one or more crRNA together with a tracrRNA. The pre-complexed material can then be administered to a cell or a patient. Such pre-complexed material is known as a ribonucleoprotein particle (RNP). The site-directed polypeptide in the RNP can be, for example, a Cas9 endonuclease or a Cpf1 endonuclease. The site-directed polypeptide can be flanked at the N-terminus, the C-terminus, or both the N-terminus and C-terminus by one or more nuclear localization signals (NLSs). For example, a Cas9 endonuclease can be flanked by two NLSs, one NLS located at the N-terminus and the second NLS located at the C-terminus. The NLS can be any NLS known in the art, such as a SV40 NLS. The weight ratio of genome-targeting nucleic acid to site-directed polypeptide in the RNP can be 1:1. For example, the weight ratio of sgRNA to Cas9 endonuclease in the RNP can be 1:1.

[0312] Nucleic Acids Encoding System Components

[0313] The present disclosure provides a nucleic acid comprising a nucleotide sequence encoding a genome-targeting nucleic acid of the disclosure, a site-directed polypeptide of the disclosure, and/or any nucleic acid or proteinaceous molecule necessary to carry out the aspects of the methods of the disclosure.

[0314] The nucleic acid encoding a genome-targeting nucleic acid of the disclosure, a site-directed polypeptide of the disclosure, and/or any nucleic acid or proteinaceous molecule necessary to carry out the aspects of the methods of the disclosure can comprise a vector (e.g., a recombinant expression vector).

[0315] The term “vector” refers to a nucleic acid molecule capable of transporting another nucleic acid to which it has been linked. One type of vector is a “plasmid”, which refers to a circular double-stranded DNA loop into which additional nucleic acid segments can be ligated. Another type of vector is a viral vector, wherein additional nucleic acid segments can be ligated into the viral genome. Certain vectors are capable of autonomous replication in a host cell into which they are introduced (e.g., bacterial vectors having a bacterial origin of replication and episomal mammalian vectors). Other vectors (e.g., non-episomal mammalian vectors) are integrated into the genome of a host cell upon introduction into the host cell, and thereby are replicated along with the host genome.

[0316] In some examples, vectors can be capable of directing the expression of nucleic acids to which they are operatively linked. Such vectors are referred to herein as “recombinant expression vectors”, or more simply “expression vectors”, which serve equivalent functions.

[0317] The term “operably linked” means that the nucleotide sequence of interest is linked to regulatory sequence(s) in a manner that allows for expression of the nucleotide sequence. The term “regulatory sequence” is intended to include, for example, promoters, enhancers and other expression control elements (e.g., polyadenylation signals). Such regulatory sequences are well known in the art and are described, for example, in Goeddel; Gene Expression Technology: Methods in Enzymology 185, Academic Press, San Diego, Calif. (1990). Regulatory sequences include those that direct constitutive expression of a nucleotide sequence in many types of host cells, and those that direct expression of the nucleotide sequence only in certain host cells (e.g., tissue-specific regulatory sequences). It will be appreciated by those skilled in the art that the design of the expression vector can depend on such factors as the choice of the target cell, the level of expression desired, and the like.

[0318] Expression vectors contemplated include, but are not limited to, viral vectors based on vaccinia virus, poliovirus, adenovirus, adeno-associated virus, SV40, herpes simplex virus, human immunodeficiency virus, retrovirus (e.g., Murine Leukemia Virus, spleen necrosis virus, and vectors derived from retroviruses such as Rous Sarcoma Virus, Harvey Sarcoma Virus, avian leukosis virus, a lentivirus, human immunodeficiency virus, myeloproliferative sarcoma virus, and mammary tumor virus) and other recombinant vectors. Other vectors contemplated for eukaryotic target cells include, but are not limited to, the vectors pXT1, pSG5, pSVK3, pBPV, pMSG, and pSVLSV40 (Pharmacia). Other vectors can be used so long as they are compatible with the host cell.

[0319] In some examples, a vector can comprise one or more transcription and/or translation control elements. Depending on the host/vector system utilized, any of a number of suitable transcription and translation control elements, including constitutive and inducible promoters, transcription enhancer elements, transcription terminators, etc. can be used in the expression vector. The vector can be a self-inactivating vector that either inactivates the viral sequences or the components of the CRISPR machinery or other elements.

[0320] Non-limiting examples of suitable eukaryotic promoters (i.e., promoters functional in a eukaryotic cell) include those from cytomegalovirus (CMV) immediate early, herpes simplex virus (HSV) thymidine kinase, early and late SV40, long terminal repeats (LTRs) from retrovirus, human elongation factor-1 promoter (EF1), a hybrid construct comprising the cytomegalovirus (CMV) enhancer fused to the chicken beta-actin promoter (CAG), murine stem cell virus promoter (MSCV), phosphoglycerate kinase-1 locus promoter (PGK), and mouse metallothionein-I.

[0321] For expressing small RNAs, including guide RNAs used in connection with Cas endonuclease, various promoters such as RNA polymerase III promoters, including for example U6 and H1, can be advantageous. Descriptions of and parameters for enhancing the use of such promoters are known in art, and additional information and approaches are regularly being described; see, e.g., Ma, H. et al., Molecular Therapy—Nucleic Acids 3, e161 (2014) doi:10.1038/mtna.2014.12.

[0322] The expression vector can also contain a ribosome binding site for translation initiation and a transcription terminator. The expression vector can also comprise appropriate sequences for amplifying expression. The expression vector can also include nucleotide sequences encoding non-native tags (e.g., histidine tag, hemagglutinin tag, green fluorescent protein, etc.) that are fused to the site-directed polypeptide, thus resulting in a fusion protein.

[0323] A promoter can be an inducible promoter (e.g., a heat shock promoter, tetracycline-regulated promoter, steroid-regulated promoter, metal-regulated promoter, estrogen receptor-regulated promoter, etc.). The promoter can be a constitutive promoter (e.g., CMV promoter, UBC promoter). In some cases, the promoter can be a spatially restricted and/or temporally restricted promoter (e.g., a tissue specific promoter, a cell type specific promoter, etc.).

[0324] The nucleic acid encoding a genome-targeting nucleic acid of the disclosure and/or a site-directed polypeptide can be packaged into or on the surface of delivery vehicles for delivery to cells. Delivery vehicles contemplated include, but are not limited to, nanospheres, liposomes, quantum dots, nanoparticles, polyethylene glycol particles, hydrogels, and micelles. As described in the art, a variety of targeting moieties can be used to enhance the preferential interaction of such vehicles with desired cell types or locations.

[0325] Introduction of the complexes, polypeptides, and nucleic acids of the disclosure into cells can occur by viral or bacteriophage infection, transfection, conjugation, protoplast fusion, lipofection, electroporation, nucleofection, calcium phosphate precipitation, polyethyleneimine (PEI)-mediated transfection, DEAE-dextran mediated transfection, liposome-mediated transfection, particle gun technology, calcium phosphate precipitation, direct micro-injection, nanoparticle-mediated nucleic acid delivery, and the like.

[0326] Delivery

[0327] Guide RNA polynucleotides (RNA or DNA) and/or endonuclease polynucleotide(s) (RNA or DNA) can be delivered by viral or non-viral delivery vehicles known in the art. Alternatively, endonuclease polypeptide(s) can be delivered by viral or non-viral delivery vehicles known in the art, such as electroporation or lipid nanoparticles. In some embodiments, the DNA endonuclease can be delivered as one or more polypeptides, either alone or pre-complexed with one or more guide RNAs, or one or more crRNA together with a tracrRNA.

[0328] Polynucleotides can be delivered by non-viral delivery vehicles including, but not limited to, nanoparticles, liposomes, ribonucleoproteins, positively charged peptides, small molecule RNA-conjugates, aptamer-RNA chimeras, and RNA-fusion protein complexes. Some exemplary non-viral delivery vehicles are described in Peer and Lieberman, Gene Therapy, 18: 1127-1133 (2011) (which focuses on non-viral delivery vehicles for siRNA that are also useful for delivery of other polynucleotides).

[0329] For polynucleotides of the invention, the formulation may be selected from any of those taught, for example, in International Application PCT/US2012/069610, published as PCT Publication No. WO 2013/090648.

[0330] Polynucleotides, such as guide RNA, sgRNA, and mRNA encoding an endonuclease, may be delivered to a cell or a patient by a lipid nanoparticle (LNP).

[0331] A LNP refers to any particle having a diameter of less than 1000 nm, 500 nm, 250 nm, 200 nm, 150 nm, 100 nm, 75 nm, 50 nm, or 25 nm. Alternatively, a nanoparticle may range in size from 1-1000 nm, 1-500 nm, 1-250 nm, 25-200 nm, 25-100 nm, 35-75 nm, or 25-60 nm.

[0332] LNPs may be made from cationic, anionic, or neutral lipids. Neutral lipids, such as the fusogenic phospholipid DOPE or the membrane component cholesterol, may be included in LNPs as ‘helper lipids’ to enhance transfection activity and nanoparticle stability. Limitations of cationic lipids include low efficacy owing to poor stability and rapid clearance, as well as the generation of inflammatory or anti-inflammatory responses.

[0333] LNPs may also be comprised of hydrophobic lipids, hydrophilic lipids, or both hydrophobic and hydrophilic lipids.

[0334] Any lipid or combination of lipids that are known in the art can be used to produce a LNP. Examples of lipids used to produce LNPs are: DOTMA, DOSPA, DOTAP, DMRIE, DC-cholesterol, DOTAP-cholesterol, GAP-DMORIE-DPyPE, and GL67A-DOPE-DMPE-polyethylene glycol (PEG). Examples of cationic lipids are: 98N12-5, C12-200, DLin-KC2-DMA (KC2), DLin-MC3-DMA (MC3), XTC, MD1, and 7C1. Examples of neutral lipids are: DPSC, DPPC, POPC, DOPE, and SM. Examples of PEG-modified lipids are: PEG-DMG, PEG-CerC14, and PEG-CerC20.

[0335] The lipids can be combined in any number of molar ratios to produce a LNP. In addition, the polynucleotide(s) can be combined with lipid(s) in a wide range of molar ratios to produce a LNP.

[0336] As stated previously, the site-directed polypeptide and genome-targeting nucleic acid can each be administered separately to a cell or a patient. On the other hand, the site-directed polypeptide can be pre-complexed with one or more guide RNAs, or one or more crRNA together with a tracrRNA. The pre-complexed material can then be administered to a cell or a patient. Such pre-complexed material is known as a ribonucleoprotein particle (RNP).

[0337] RNA is capable of forming specific interactions with RNA or DNA. While this property is exploited in many biological processes, it also comes with the risk of promiscuous interactions in a nucleic acid-rich cellular environment. One solution to this problem is the formation of ribonucleoprotein particles (RNPs), in which the RNA is pre-complexed with an endonuclease. Another benefit of the RNP is protection of the RNA from degradation.

[0338] The endonuclease in the RNP can be modified or unmodified. Likewise, the gRNA, crRNA, tracrRNA, or sgRNA can be modified or unmodified. Numerous modifications are known in the art and can be used.

[0339] The endonuclease and sgRNA can be generally combined in a 1:1 molar ratio. Alternatively, the endonuclease, crRNA and tracrRNA can be generally combined in a 1:1:1 molar ratio. However, a wide range of molar ratios can be used to produce a RNP.

[0340] AAV (Adeno Associated Virus)

[0341] A recombinant adeno-associated virus (AAV) vector can be used for delivery. Techniques to produce rAAV particles, in which an AAV genome to be packaged that includes the polynucleotide to be delivered, rep and cap genes, and helper virus functions are provided to a cell are standard in the art. Production of rAAV typically requires that the following components are present within a single cell (denoted herein as a packaging cell): a rAAV genome, AAV rep and cap genes separate from (i.e., not in) the rAAV genome, and helper virus functions. The AAV rep and cap genes may be from any AAV serotype for which recombinant virus can be derived, and may be from a different AAV serotype than the rAAV genome ITRs, including, but not limited to, AAV serotypes described herein, such as AAV-1, AAV-2, AAV-3, AAV-4, AAV-5, AAV-6, AAV-7, AAV-8, AAV-9, AAV-10, AAV-11, AAV-12, AAV-13 and AAV rh.74. Production of pseudotyped rAAV is disclosed in, for example, international patent application publication number WO 01/83692. In another example, the AAV may be a variant, such as PHP.A or PHP.B as described in Deverman. 2016. Nature Biotechnology. 34(2): 204-209.

[0342] In one example, the AAV may be a variant, such as PHP.A or PHP.B as described in Deverman. 2016. Nature Biotechnology. 34(2): 204-209.

[0343] In one example, the AAV may be a serotype selected from any of those found in SEQ ID NOs: 4,734-5,302.

[0344] In one example, the AAV may be encoded by a sequence, fragment or variant as described in SEQ ID NOs: 4,734-5,302.

[0345] General principles of rAAV production are reviewed in, for example, Carter, 1992, Current Opinions in Biotechnology, 1533-539; and Muzyczka, 1992, Curr. Topics in Microbial. and Immunol., 158:97-129). Various approaches are described in Ratschin et al., Mol. Cell. Biol. 4:2072 (1984); Hermonat et al., Proc. Natl. Acad. Sci. USA, 81:6466 (1984); Tratschin et al., Mol. Cell. Biol. 5:3251 (1985); McLaughlin et al., J. Virol., 62:1963 (1988); and Lebkowski et al., 1988 Mol. Cell. Biol., 7:349 (1988). Samulski et al. (1989, J. Virol., 63:3822-3828); U.S. Pat. No. 5,173,414; WO 95/13365 and corresponding U.S. Pat. No. 5,658,776; WO 95/13392; WO 96/17947; PCT/US98/18600; WO 97/09441 (PCT/US96/14423); WO 97/08298 (PCT/US96/13872); WO 97/21825 (PCT/US96/20777); WO 97/06243 (PCT/FR96/01064); WO 99/11764; Perrin et al. (1995) Vaccine 13:1244-1250; Paul et al. (1993) Human Gene Therapy 4:609-615; Clark et al. (1996) Gene Therapy 3:1124-1132; U.S. Pat. Nos. 5,786,211; 5,871,982; and 6,258,595.

[0346] AAV vector serotypes can be matched to target cell types. For example, the following exemplary cell types can be transduced by the indicated AAV serotypes among others.

TABLE 6
Tissue/Cell Types and Serotypes

| Tissue/Cell Type | Serotype |
|---|---|
| Liver | AAV3, AAV5, AAV8, AAV9 |
| Skeletal muscle | AAV1, AAV7, AAV6, AAV8, AAV9 |
| Central nervous system | AAV5, AAV1, AAV4, AAV9 |
| RPE | AAV5, AAV4 |
| Photoreceptor cells | AAV5 |
| Lung | AAV9 |
| Heart | AAV8 |
| Pancreas | AAV8 |
| Kidney | AAV2, AAV8 |
| Hematopoietic stem cells | AAV6 |

[0347] In addition to adeno-associated viral vectors, other viral vectors can be used. Such viral vectors include, but are not limited to, lentivirus, alphavirus, enterovirus, pestivirus, baculovirus, herpesvirus, Epstein Barr virus, papovavirus, poxvirus, vaccinia virus, and herpes simplex virus.

[0348] In some aspects, Cas9 mRNA and sgRNA targeting one or two loci in APOCIII gene can each be separately formulated into lipid nanoparticles, or are co-formulated into one lipid nanoparticle.

[0349] In some aspects, Cas9 mRNA can be formulated in a lipid nanoparticle, while sgRNA can be delivered in an AAV vector.

[0350] Options are available to deliver the Cas9 nuclease as a DNA plasmid, as mRNA or as a protein. The guide RNA can be expressed from the same DNA, or can also be delivered as an RNA. The RNA can be chemically modified to alter or improve its half-life, or decrease the likelihood or degree of immune response. The endonuclease protein can be complexed with the gRNA prior to delivery. Viral vectors allow efficient delivery; split versions of Cas9 and smaller orthologs of Cas9 can be packaged in AAV, as can donors for HDR. A range of non-viral delivery methods also exist that can deliver each of these components, or non-viral and viral methods can be employed in tandem. For example, nano-particles can be used to deliver the protein and guide RNA, while AAV can be used to deliver a donor DNA.

[0351] Genetically Modified Cells

[0352] The term “genetically modified cell” refers to a cell that comprises at least one genetic modification introduced by genome editing (e.g., using the CRISPR/Cas9 or CRISPR/Cpf1 system). In some ex vivo examples herein, the genetically modified cell can be genetically modified progenitor cell. In some in vivo examples herein, the genetically modified cell can be a genetically modified liver cell. A genetically modified cell comprising an exogenous genome-targeting nucleic acid and/or an exogenous nucleic acid encoding a genome-targeting nucleic acid is contemplated herein.

[0353] The term “control treated population” describes a population of cells that has been treated with identical media, viral induction, nucleic acid sequences, temperature, confluency, flask size, pH, etc., with the exception of the addition of the genome editing components. Any method known in the art can be used to measure transcription of APOCIII gene or protein expression or activity, for example Western Blot analysis of the APOCIII protein or real time PCR for quantifying APOCIII mRNA.

[0354] The term “isolated cell” refers to a cell that has been removed from an organism in which it was originally found, or a descendant of such a cell. Optionally, the cell can be cultured in vitro, e.g., under defined conditions or in the presence of other cells. Optionally, the cell can be later introduced into a second organism or re-introduced into the organism from which it (or the cell from which it is descended) was isolated.

[0355] The term “isolated population” with respect to an isolated population of cells refers to a population of cells that has been removed and separated from a mixed or heterogeneous population of cells. In some cases, the isolated population can be a substantially pure population of cells, as compared to the heterogeneous population from which the cells were isolated or enriched. In some cases, the isolated population can be an isolated population of human progenitor cells, e.g., a substantially pure population of human progenitor cells, as compared to a heterogeneous population of cells comprising human progenitor cells and cells from which the human progenitor cells were derived.

[0356] The term “substantially enhanced,” with respect to a particular cell population, refers to a population of cells in which the occurrence of a particular type of cell is increased relative to pre-existing or reference levels, by at least 2-fold, at least 3-, at least 4-, at least 5-, at least 6-, at least 7-, at least 8-, at least 9, at least 10-, at least 20-, at least 50-, at least 100-, at least 400-, at least 1000-, at least 5000-, at least 20000-, at least 100000- or more fold depending, e.g., on the desired levels of such cells for ameliorating Dyslipidemias.

[0357] The term “substantially enriched” with respect to a particular cell population, refers to a population of cells that is at least about 10%, about 20%, about 30%, about 40%, about 50%, about 60%, about 70% or more with respect to the cells making up a total cell population.

[0358] The terms “substantially enriched” or “substantially pure” with respect to a particular cell population, refers to a population of cells that is at least about 75%, at least about 85%, at least about 90%, or at least about 95% pure, with respect to the cells making up a total cell population. That is, the terms “substantially pure” or “essentially purified,” with regard to a population of progenitor cells, refers to a population of cells that contain fewer than about 20%, about 15%, about 10%, about 9%, about 8%, about 7%, about 6%, about 5%, about 4%, about 3%, about 2%, about 1%, or less than 1%, of cells that are not progenitor cells as defined by the terms herein.

[0359] Differentiation of Genome-Edited iPSCs into Other Cell Types

[0360] Another step of the ex vivo methods of the present disclosure can comprise differentiating the genome-edited iPSCs into hepatocytes. The differentiating step may be performed according to any method known in the art. For example, hiPSC are differentiated into definitive endoderm using various treatments, including activin and B27 supplement (Life Technology). The definitive endoderm is further differentiated into hepatocyte, the treatment includes: FGF4, HGF, BMP2, BMP4, Oncostatin M, Dexametason, etc. (Duan et al, STEM CELLS; 2010; 28:674-686, Ma et al, STEM CELLS TRANSLATIONAL MEDICINE 2013; 2:409-419).

[0361] Differentiation of Genome-Edited Mesenchymal Stem Cells into Hepatocytes

[0362] Another step of the ex vivo methods of the present disclosure can comprise differentiating the genome-edited mesenchymal stem cells into hepatocytes. The differentiating step may be performed according to any method known in the art. For example, hMSC are treated with various factors and hormones, including insulin, transferrin, FGF4, HGF, bile acids (Sawitza I et al, Sci Rep. 2015; 5: 13320).

[0363] Implanting Cells into Patients

[0364] Another step of the ex vivo methods of the present disclosure can comprise implanting the hepatocytes into patients. This implanting step may be accomplished using any method of implantation known in the art. For example, the genetically modified cells may be injected directly in the patient's blood or otherwise administered to the patient.

[0365] Another step of the ex vivo methods of the invention involves implanting the progenitor cells or primary hepatocytes into patients. This implanting step may be accomplished using any method of implantation known in the art. For example, the genetically modified cells may be injected directly in the patient's liver or otherwise administered to the patient.

[0366] Pharmaceutically Acceptable Carriers

[0367] The ex vivo methods of administering progenitor cells to a subject contemplated herein involve the use of therapeutic compositions comprising progenitor cells.

[0368] Therapeutic compositions can contain a physiologically tolerable carrier together with the cell composition, and optionally at least one additional bioactive agent as described herein, dissolved or dispersed therein as an active ingredient. In some cases, the therapeutic composition is not substantially immunogenic when administered to a mammal or human patient for therapeutic purposes, unless so desired.

[0369] In general, the progenitor cells described herein can be administered as a suspension with a pharmaceutically acceptable carrier. One of skill in the art will recognize that a pharmaceutically acceptable carrier to be used in a cell composition will not include buffers, compounds, cryopreservation agents, preservatives, or other agents in amounts that substantially interfere with the viability of the cells to be delivered to the subject. A formulation comprising cells can include e.g., osmotic buffers that permit cell membrane integrity to be maintained, and optionally, nutrients to maintain cell viability or enhance engraftment upon administration. Such formulations and suspensions are known to those of skill in the art and/or can be adapted for use with the progenitor cells, as described herein, using routine experimentation.

[0370] A cell composition can also be emulsified or presented as a liposome composition, provided that the emulsification procedure does not adversely affect cell viability. The cells and any other active ingredient can be mixed with excipients that are pharmaceutically acceptable and compatible with the active ingredient, and in amounts suitable for use in the therapeutic methods described herein.

[0371] Additional agents included in a cell composition can include pharmaceutically acceptable salts of the components therein. Pharmaceutically acceptable salts include the acid addition salts (formed with the free amino groups of the polypeptide) that are formed with inorganic acids, such as, for example, hydrochloric or phosphoric acids, or such organic acids as acetic, tartaric, mandelic and the like. Salts formed with the free carboxyl groups can also be derived from inorganic bases, such as, for example, sodium, potassium, ammonium, calcium or ferric hydroxides, and such organic bases as isopropylamine, trimethylamine, 2-ethylamino ethanol, histidine, procaine and the like.

[0372] Physiologically tolerable carriers are well known in the art. Exemplary liquid carriers are sterile aqueous solutions that contain no materials in addition to the active ingredients and water, or contain a buffer such as sodium phosphate at physiological pH value, physiological saline or both, such as phosphate-buffered saline. Still further, aqueous carriers can contain more than one buffer salt, as well as salts such as sodium and potassium chlorides, dextrose, polyethylene glycol and other solutes. Liquid compositions can also contain liquid phases in addition to and to the exclusion of water. Exemplary of such additional liquid phases are glycerin, vegetable oils such as cottonseed oil, and water-oil emulsions. The amount of an active compound used in the cell compositions that is effective in the treatment of a particular disorder or condition can depend on the nature of the disorder or condition, and can be determined by standard clinical techniques.

[0373] Administration & Efficacy

[0374] The terms “administering,” “introducing” and “transplanting” are used interchangeably in the context of the placement of cells, e.g., progenitor cells, into a subject, by a method or route that results in at least partial localization of the introduced cells at a desired site, such as a site of injury or repair, such that a desired effect(s) is produced. The cells e.g., progenitor cells, or their differentiated progeny can be administered by any appropriate route that results in delivery to a desired location in the subject where at least a portion of the implanted cells or components of the cells remain viable. The period of viability of the cells after administration to a subject can be as short as a few hours, e.g., twenty-four hours, to a few days, to as long as several years, or even the life time of the patient, i.e., long-term engraftment. For example, in some aspects described herein, an effective amount of liver progenitor cells is administered via a systemic route of administration, such as an intraperitoneal or intravenous route.

[0375] The terms “individual,” “subject,” “host” and “patient” are used interchangeably herein and refer to any subject for whom diagnosis, treatment or therapy is desired. In some aspects, the subject is a mammal. In some aspects, the subject is a human being.

[0376] When provided prophylactically, progenitor cells described herein can be administered to a subject in advance of any symptom of Dyslipidemias. Accordingly, the prophylactic administration of a progenitor cell population serves to prevent Dyslipidemias.

[0377] A progenitor cell population being administered according to the methods described herein can comprise allogeneic progenitor cells obtained from one or more donors. Such progenitors may be of any cellular or tissue origin, e.g., liver, muscle, cardiac, etc. “Allogeneic” refers to a progenitor cell or biological samples comprising progenitor cells obtained from one or more different donors of the same species, where the genes at one or more loci are not identical. For example, a liver progenitor cell population being administered to a subject can be derived from one more unrelated donor subjects, or from one or more non-identical siblings. In some cases, syngeneic progenitor cell populations can be used, such as those obtained from genetically identical animals, or from identical twins. The progenitor cells can be autologous cells; that is, the progenitor cells are obtained or isolated from a subject and administered to the same subject, i.e., the donor and recipient are the same.

[0378] The term “effective amount” refers to the amount of a population of progenitor cells or their progeny needed to prevent or alleviate at least one or more signs or symptoms of Dyslipidemias, and relates to a sufficient amount of a composition to provide the desired effect, e.g., to treat a subject having Dyslipidemias. The term “therapeutically effective amount” therefore refers to an amount of progenitor cells or a composition comprising progenitor cells that is sufficient to promote a particular effect when administered to a typical subject, such as one who has or is at risk for Dyslipidemias. An effective amount would also include an amount sufficient to prevent or delay the development of a symptom of the disease, alter the course of a symptom of the disease (for example but not limited to, slow the progression of a symptom of the disease), or reverse a symptom of the disease. It is understood that for any given case, an appropriate “effective amount” can be determined by one of ordinary skill in the art using routine experimentation.

[0379] For use in the various aspects described herein, an effective amount of progenitor cells comprises at least 10² progenitor cells, at least 5×10² progenitor cells, at least 10³ progenitor cells, at least 5×10³ progenitor cells, at least 10⁴ progenitor cells, at least 5×10⁴ progenitor cells, at least 10⁵ progenitor cells, at least 2×10⁵ progenitor cells, at least 3×10⁵ progenitor cells, at least 4×10⁵ progenitor cells, at least 5×10⁵ progenitor cells, at least 6×10⁵ progenitor cells, at least 7×10⁵ progenitor cells, at least 8×10⁵ progenitor cells, at least 9×10⁵ progenitor cells, at least 1×10⁶ progenitor cells, at least 2×10⁶ progenitor cells, at least 3×10⁶ progenitor cells, at least 4×10⁶ progenitor cells, at least 5×10⁶ progenitor cells, at least 6×10⁶ progenitor cells, at least 7×10⁶ progenitor cells, at least 8×10⁶ progenitor cells, at least 9×10⁶ progenitor cells, or multiples thereof. The progenitor cells can be derived from one or more donors, or can be obtained from an autologous source. In some examples described herein, the progenitor cells can be expanded in culture prior to administration to a subject in need thereof.

[0380] Modest and incremental increases in the levels of functional APOCIII expressed in cells of patients having an APOCIII related disorder can be beneficial for ameliorating one or more symptoms of the disease, for increasing long-term survival, and/or for reducing side effects associated with other treatments. Upon administration of such cells to human patients, the presence of progenitors that are producing decreased levels of APOCIII is beneficial. In some cases, effective treatment of a subject gives rise to at least about 3%, 5% or 7% reduction in APOCIII level relative to total APOCIII in the treated subject. In some examples, the reduction in APOCIII will be at least about 10% of total APOCIII. In some examples, the reduction in APOCIII will be at least about 20% to 30% of total APOCIII. Similarly, the introduction of even relatively limited subpopulations of cells having significantly reduced levels of APOCIII can be beneficial in various patients because in some situations normalized cells will have a selective advantage relative to diseased cells. However, even modest levels of progenitors with reduced levels of APOCIII can be beneficial for ameliorating one or more aspects of Dyslipidemias in patients. In some examples, about 10%, about 20%, about 30%, about 40%, about 50%, about 60%, about 70%, about 80%, about 90% or more of the liver progenitors in patients to whom such cells are administered are producing decreased levels of APOCIII.

[0381] “Administered” refers to the delivery of a progenitor cell composition into a subject by a method or route that results in at least partial localization of the cell composition at a desired site. A cell composition can be administered by any appropriate route that results in effective treatment in the subject, i.e. administration results in delivery to a desired location in the subject where at least a portion of the composition delivered, i.e. at least 1×10⁴ cells are delivered to the desired site for a period of time.

[0382] In one aspect of the method, the pharmaceutical composition may be administered via a route such as, but not limited to, enteral (into the intestine), gastroenteral, epidural (into the dura matter), oral (by way of the mouth), transdermal, peridural, intracerebral (into the cerebrum), intracerebroventricular (into the cerebral ventricles), epicutaneous (application onto the skin), intradermal, (into the skin itself), subcutaneous (under the skin), nasal administration (through the nose), intravenous (into a vein), intravenous bolus, intravenous drip, intraarterial (into an artery), intramuscular (into a muscle), intracardiac (into the heart), intraosseous infusion (into the bone marrow), intrathecal (into the spinal canal), intraperitoneal, (infusion or injection into the peritoneum), intravesical infusion, intravitreal, (through the eye), intracavernous injection (into a pathologic cavity) intracavitary (into the base of the penis), intravaginal administration, intrauterine, extra-amniotic administration, transdermal (diffusion through the intact skin for systemic distribution), transmucosal (diffusion through a mucous membrane), transvaginal, insufflation (snorting), sublingual, sublabial, enema, eye drops (onto the conjunctiva), in ear drops, auricular (in or by way of the ear), buccal (directed toward the cheek), conjunctival, cutaneous, dental (to a tooth or teeth), electro-osmosis, endocervical, endosinusial, endotracheal, extracorporeal, hemodialysis, infiltration, interstitial, intra-abdominal, intra-amniotic, intra-articular, intrabiliary, intrabronchial, intrabursal, intracartilaginous (within a cartilage), intracaudal (within the cauda equine), intracisternal (within the cisterna magna cerebellomedularis), intracorneal (within the cornea), dental intracornal, intracoronary (within the coronary arteries), intracorporus cavernosum (within the dilatable spaces of the corporus cavernosa of the penis), intradiscal (within a disc), intraductal (within a duct of a gland), intraduodenal (within the duodenum), intradural (within or beneath the dura), intraepidermal (to the epidermis), intraesophageal (to the esophagus), intragastric (within the stomach), intragingival (within the gingivae), intraileal (within the distal portion of the small intestine), intralesional (within or introduced directly to a localized lesion), intraluminal (within a lumen of a tube), intralymphatic (within the lymph), intramedullary (within the marrow cavity of a bone), intrameningeal (within the meninges), intramyocardial (within the myocardium), intraocular (within the eye), intraovarian (within the ovary), intrapericardial (within the pericardium), intrapleural (within the pleura), intraprostatic (within the prostate gland), intrapulmonary (within the lungs or its bronchi), intrasinal (within the nasal or periorbital sinuses), intraspinal (within the vertebral column), intrasynovial (within the synovial cavity of a joint), intratendinous (within a tendon), intratesticular (within the testicle), intrathecal (within the cerebrospinal fluid at any level of the cerebrospinal axis), intrathoracic (within the thorax), intratubular (within the tubules of an organ), intratumor (within a tumor), intratympanic (within the aurus media), intravascular (within a vessel or vessels), intraventricular (within a ventricle), iontophoresis (by means of electric current where ions of soluble salts migrate into the tissues of the body), irrigation (to bathe or flush open wounds or body cavities), laryngeal (directly upon the larynx), nasogastric (through the nose and into the stomach), occlusive dressing technique (topical route administration which is then covered by a dressing which occludes the area), ophthalmic (to the external eye), oropharyngeal (directly to the mouth and pharynx), parenteral, percutaneous, periarticular, peridural, perineural, periodontal, rectal, respiratory (within the respiratory tract by inhaling orally or nasally for local or systemic effect), retrobulbar (behind the pons or behind the eyeball), intramyocardial (entering the myocardium), soft tissue, subarachnoid, subconjunctival, submucosal, topical, transplacental (through or across the placenta), transtracheal (through the wall of the trachea), transtympanic (across or through the tympanic cavity), ureteral (to the ureter), urethral (to the urethra), vaginal, caudal block, diagnostic, nerve block, biliary perfusion, cardiac perfusion, photopheresis and spinal.

[0383] Modes of administration include injection, infusion, instillation, and/or ingestion. “Injection” includes, without limitation, intravenous, intramuscular, intra-arterial, intrathecal, intraventricular, intracapsular, intraorbital, intracardiac, intradermal, intraperitoneal, transtracheal, subcutaneous, subcuticular, intraarticular, sub capsular, subarachnoid, intraspinal, intracerebro spinal, and intrasternal injection and infusion. In some examples, the route is intravenous. For the delivery of cells, administration by injection or infusion can be made.

[0384] The cells can be administered systemically. The phrases “systemic administration,” “administered systemically”, “peripheral administration” and “administered peripherally” refer to the administration of a population of progenitor cells other than directly into a target site, tissue, or organ, such that it enters, instead, the subject's circulatory system and, thus, is subject to metabolism and other like processes.

[0385] The efficacy of a treatment comprising a composition for the treatment of Dyslipidemias can be determined by the skilled clinician. However, a treatment is considered “effective treatment,” if any one or all of the signs or symptoms of, as but one example, levels of APOCIII are altered in a beneficial manner (e.g., decreased by at least 10%), or other clinically accepted symptoms or markers of disease are improved or ameliorated. Efficacy can also be measured by failure of an individual to worsen as assessed by hospitalization or need for medical interventions (e.g., progression of the disease is halted or at least slowed). Methods of measuring these indicators are known to those of skill in the art and/or described herein. Treatment includes any treatment of a disease in an individual or an animal (some non-limiting examples include a human, or a mammal) and includes: (1) inhibiting the disease, e.g., arresting, or slowing the progression of symptoms; or (2) relieving the disease, e.g., causing regression of symptoms; and (3) preventing or reducing the likelihood of the development of symptoms.

[0386] The treatment according to the present disclosure can ameliorate one or more symptoms associated with Dyslipidemias by decreasing or altering the amount of APOCIII in the individual.

[0387] Kits

[0388] The present disclosure provides kits for carrying out the methods described herein. A kit can include one or more of a genome-targeting nucleic acid, a polynucleotide encoding a genome-targeting nucleic acid, a site-directed polypeptide, a polynucleotide encoding a site-directed polypeptide, and/or any nucleic acid or proteinaceous molecule necessary to carry out the aspects of the methods described herein, or any combination thereof.

[0389] A kit can comprise: (1) a vector comprising a nucleotide sequence encoding a genome-targeting nucleic acid, (2) the site-directed polypeptide or a vector comprising a nucleotide sequence encoding the site-directed polypeptide, and (3) a reagent for reconstitution and/or dilution of the vector(s) and or polypeptide.

[0390] A kit can comprise: (1) a vector comprising (i) a nucleotide sequence encoding a genome-targeting nucleic acid, and (ii) a nucleotide sequence encoding the site-directed polypeptide; and (2) a reagent for reconstitution and/or dilution of the vector.

[0391] In any of the above kits, the kit can comprise a single-molecule guide genome-targeting nucleic acid. In any of the above kits, the kit can comprise a double-molecule genome-targeting nucleic acid. In any of the above kits, the kit can comprise two or more double-molecule guides or single-molecule guides. The kits can comprise a vector that encodes the nucleic acid targeting nucleic acid.

[0392] In any of the above kits, the kit can further comprise a polynucleotide to be inserted to effect the desired genetic modification.

[0393] Components of a kit can be in separate containers, or combined in a single container.

[0394] Any kit described above can further comprise one or more additional reagents, where such additional reagents are selected from a buffer, a buffer for introducing a polypeptide or polynucleotide into a cell, a wash buffer, a control reagent, a control vector, a control RNA polynucleotide, a reagent for in vitro production of the polypeptide from DNA, adaptors for sequencing and the like. A buffer can be a stabilization buffer, a reconstituting buffer, a diluting buffer, or the like. A kit can also comprise one or more components that can be used to facilitate or enhance the on-target binding or the cleavage of DNA by the endonuclease, or improve the specificity of targeting.

[0395] In addition to the above-mentioned components, a kit can further comprise instructions for using the components of the kit to practice the methods. The instructions for practicing the methods can be recorded on a suitable recording medium. For example, the instructions can be printed on a substrate, such as paper or plastic, etc. The instructions can be present in the kits as a package insert, in the labeling of the container of the kit or components thereof (i.e., associated with the packaging or subpackaging), etc. The instructions can be present as an electronic storage data file present on a suitable computer readable storage medium, e.g. CD-ROM, diskette, flash drive, etc. In some instances, the actual instructions are not present in the kit, but means for obtaining the instructions from a remote source (e.g. via the Internet), can be provided. An example of this case is a kit that comprises a web address where the instructions can be viewed and/or from which the instructions can be downloaded. As with the instructions, this means for obtaining the instructions can be recorded on a suitable substrate.

[0396] Guide RNA Formulation

[0397] Guide RNAs of the present disclosure can be formulated with pharmaceutically acceptable excipients such as carriers, solvents, stabilizers, adjuvants, diluents, etc., depending upon the particular mode of administration and dosage form. Guide RNA compositions can be formulated to achieve a physiologically compatible pH, and range from a pH of about 3 to a pH of about 11, about pH 3 to about pH 7, depending on the formulation and route of administration. In some cases, the pH can be adjusted to a range from about pH 5.0 to about pH 8. In some cases, the compositions can comprise a therapeutically effective amount of at least one compound as described herein, together with one or more pharmaceutically acceptable excipients. Optionally, the compositions can comprise a combination of the compounds described herein, or can include a second active ingredient useful in the treatment or prevention of bacterial growth (for example and without limitation, anti-bacterial or anti-microbial agents), or can include a combination of reagents of the present disclosure.

[0398] Suitable excipients include, for example, carrier molecules that include large, slowly metabolized macromolecules such as proteins, polysaccharides, polylactic acids, polyglycolic acids, polymeric amino acids, amino acid copolymers, and inactive virus particles. Other exemplary excipients can include antioxidants (for example and without limitation, ascorbic acid), chelating agents (for example and without limitation, EDTA), carbohydrates (for example and without limitation, dextrin, hydroxyalkylcellulose, and hydroxyalkylmethylcellulose), stearic acid, liquids (for example and without limitation, oils, water, saline, glycerol and ethanol), wetting or emulsifying agents, pH buffering substances, and the like.

[0399] Other Possible Therapeutic Approaches

[0400] Gene editing can be conducted using nucleases engineered to target specific sequences. To date there are four major types of nucleases: meganucleases and their derivatives, zinc finger nucleases (ZFNs), transcription activator like effector nucleases (TALENs), and CRISPR-Cas9 nuclease systems. The nuclease platforms vary in difficulty of design, targeting density and mode of action, particularly as the specificity of ZFNs and TALENs is through protein-DNA interactions, while RNA-DNA interactions primarily guide Cas9.

[0401] CRISPR endonucleases, such as Cas9, can be used in the methods of the present disclosure. However, the teachings described herein, such as therapeutic target sites, could be applied to other forms of endonucleases, such as ZFNs, TALENs, HEs, or MegaTALs, or using combinations of nucleases. However, in order to apply the teachings of the present disclosure to such endonucleases, one would need to, among other things, engineer proteins directed to the specific target sites.

[0402] Additional binding domains can be fused to the Cas9 protein to increase specificity. The target sites of these constructs would map to the identified gRNA specified site, but would require additional binding motifs, such as for a zinc finger domain. In the case of Mega-TAL, a meganuclease can be fused to a TALE DNA-binding domain. The meganuclease domain can increase specificity and provide the cleavage. Similarly, inactivated or dead Cas9 (dCas9) can be fused to a cleavage domain and require the sgRNA/Cas9 target site and adjacent binding site for the fused DNA-binding domain. This likely would require some protein engineering of the dCas9, in addition to the catalytic inactivation, to decrease binding without the additional binding site.

[0403] Zinc Finger Nucleases

[0404] Zinc finger nucleases (ZFNs) are modular proteins comprised of an engineered zinc finger DNA binding domain linked to the catalytic domain of the type II endonuclease FokI. Because FokI functions only as a dimer, a pair of ZFNs must be engineered to bind to cognate target “half-site” sequences on opposite DNA strands and with precise spacing between them to enable the catalytically active FokI dimer to form. Upon dimerization of the FokI domain, which itself has no sequence specificity per se, a DNA double-strand break is generated between the ZFN half-sites as the initiating step in genome editing.

[0405] The DNA binding domain of each ZFN is typically comprised of 3-6 zinc fingers of the abundant Cys2-His2 architecture, with each finger primarily recognizing a triplet of nucleotides on one strand of the target DNA sequence, although cross-strand interaction with a fourth nucleotide also can be important. Alteration of the amino acids of a finger in positions that make key contacts with the DNA alters the sequence specificity of a given finger. Thus, a four-finger zinc finger protein will selectively recognize a 12 bp target sequence, where the target sequence is a composite of the triplet preferences contributed by each finger, although triplet preference can be influenced to varying degrees by neighboring fingers. An important aspect of ZFNs is that they can be readily re-targeted to almost any genomic address simply by modifying individual fingers, although considerable expertise is required to do this well. In most applications of ZFNs, proteins of 4-6 fingers are used, recognizing 12-18 bp respectively. Hence, a pair of ZFNs will typically recognize a combined target sequence of 24-36 bp, not including the typical 5-7 bp spacer between half-sites. The binding sites can be separated further with larger spacers, including 15-17 bp. A target sequence of this length is likely to be unique in the human genome, assuming repetitive sequences or gene homologs are excluded during the design process. Nevertheless, the ZFN protein-DNA interactions are not absolute in their specificity so off-target binding and cleavage events do occur, either as a heterodimer between the two ZFNs, or as a homodimer of one or the other of the ZFNs. The latter possibility has been effectively eliminated by engineering the dimerization interface of the FokI domain to create “plus” and “minus” variants, also known as obligate heterodimer variants, which can only dimerize with each other, and not with themselves. Forcing the obligate heterodimer prevents formation of the homodimer. This has greatly enhanced specificity of ZFNs, as well as any other nuclease that adopts these FokI variants.

[0406] A variety of ZFN-based systems have been described in the art, modifications thereof are regularly reported, and numerous references describe rules and parameters that are used to guide the design of ZFNs; see, e.g., Segal et al., Proc Natl Acad Sci USA 96(6):2758-63 (1999); Dreier B et al., J Mol Biol. 303(4):489-502 (2000); Liu Q et al., J Biol Chem. 277(6):3850-6 (2002); Dreier et al., J Biol Chem 280(42):35588-97 (2005); and Dreier et al., J Biol Chem. 276(31):29466-78 (2001).

[0407] Transcription Activator-Like Effector Nucleases (TALENs)

[0408] TALENs represent another format of modular nucleases whereby, as with ZFNs, an engineered DNA binding domain is linked to the FokI nuclease domain, and a pair of TALENs operate in tandem to achieve targeted DNA cleavage. The major difference from ZFNs is the nature of the DNA binding domain and the associated target DNA sequence recognition properties. The TALEN DNA binding domain derives from TALE proteins, which were originally described in the plant bacterial pathogen Xanthomonas sp. TALEs are comprised of tandem arrays of 33-35 amino acid repeats, with each repeat recognizing a single basepair in the target DNA sequence that is typically up to 20 bp in length, giving a total target sequence length of up to 40 bp. Nucleotide specificity of each repeat is determined by the repeat variable diresidue (RVD), which includes just two amino acids at positions 12 and 13. The bases guanine, adenine, cytosine and thymine are predominantly recognized by the four RVDs: Asn-Asn, Asn-Ile, His-Asp and Asn-Gly, respectively. This constitutes a much simpler recognition code than for zinc fingers, and thus represents an advantage over the latter for nuclease design. Nevertheless, as with ZFNs, the protein-DNA interactions of TALENs are not absolute in their specificity, and TALENs have also benefitted from the use of obligate heterodimer variants of the FokI domain to reduce off-target activity.

[0409] Additional variants of the FokI domain have been created that are deactivated in their catalytic function. If one half of either a TALEN or a ZFN pair contains an inactive FokI domain, then only single-strand DNA cleavage (nicking) will occur at the target site, rather than a DSB. The outcome is comparable to the use of CRISPR/Cas9 or CRISPR/Cpf1 “nickase” mutants in which one of the Cas9 cleavage domains has been deactivated. DNA nicks can be used to drive genome editing by HDR, but at lower efficiency than with a DSB. The main benefit is that off-target nicks are quickly and accurately repaired, unlike the DSB, which is prone to NHEJ-mediated mis-repair.

[0410] A variety of TALEN-based systems have been described in the art, and modifications thereof are regularly reported; see, e.g., Boch, Science 326(5959):1509-12 (2009); Mak et al., Science 335(6069):716-9 (2012); and Moscou et al., Science 326(5959):1501 (2009). The use of TALENs based on the “Golden Gate” platform, or cloning scheme, has been described by multiple groups; see, e.g., Cermak et al., Nucleic Acids Res. 39(12):e82 (2011); Li et al., Nucleic Acids Res. 39(14):6315-25 (2011); Weber et al., PLoS One. 6(2):e16765 (2011); Wang et al., J Genet Genomics 41(6):339-47, Epub 2014 May 17 (2014); and Cermak T et al., Methods Mol Biol. 1239:133-59 (2015).

[0411] Homing Endonucleases

[0412] Homing endonucleases (HEs) are sequence-specific endonucleases that have long recognition sequences (14-44 base pairs) and cleave DNA with high specificity—often at sites unique in the genome. There are at least six known families of HEs as classified by their structure, including GIY-YIG, His-Cis box, H—N—H, PD-(D/E)xK, and Vsr-like that are derived from a broad range of hosts, including eukarya, protists, bacteria, archaea, cyanobacteria and phage. As with ZFNs and TALENs, HEs can be used to create a DSB at a target locus as the initial step in genome editing. In addition, some natural and engineered HEs cut only a single strand of DNA, thereby functioning as site-specific nickases. The large target sequence of HEs and the specificity that they offer have made them attractive candidates to create site-specific DSBs.

[0413] A variety of HE-based systems have been described in the art, and modifications thereof are regularly reported; see, e.g., the reviews by Steentoft et al., Glycobiology 24(8):663-80 (2014); Belfort and Bonocora, Methods Mol Biol. 1123:1-26 (2014); Hafez and Hausner, Genome 55(8):553-69 (2012); and references cited therein.

[0414] MegaTAL/Tev-mTALEN/MegaTev

[0415] As further examples of hybrid nucleases, the MegaTAL platform and Tev-mTALEN platform use a fusion of TALE DNA binding domains and catalytically active HEs, taking advantage of both the tunable DNA binding and specificity of the TALE, as well as the cleavage sequence specificity of the HE; see, e.g., Boissel et al., NAR 42: 2591-2601 (2014); Kleinstiver et al., G3 4:1155-65 (2014); and Boissel and Scharenberg, Methods Mol. Biol. 1239: 171-96 (2015).

[0416] In a further variation, the MegaTev architecture is the fusion of a meganuclease (Mega) with the nuclease domain derived from the GIY-YIG homing endonuclease I-TevI (Tev). The two active sites are positioned ˜30 bp apart on a DNA substrate and generate two DSBs with non-compatible cohesive ends; see, e.g., Wolfs et al., NAR 42, 8816-29 (2014). It is anticipated that other combinations of existing nuclease-based approaches will evolve and be useful in achieving the targeted genome modifications described herein.

[0417] dCas9-FokI or dCpf1-Fok1 and Other Nucleases

[0418] Combining the structural and functional properties of the nuclease platforms described above offers a further approach to genome editing that can potentially overcome some of the inherent deficiencies. As an example, the CRISPR genome editing system typically uses a single Cas9 endonuclease to create a DSB. The specificity of targeting is driven by a 20 or 24 nucleotide sequence in the guide RNA that undergoes Watson-Crick base-pairing with the target DNA (plus an additional 2 bases in the adjacent NAG or NGG PAM sequence in the case of Cas9 from S. pyogenes). Such a sequence is long enough to be unique in the human genome, however, the specificity of the RNA/DNA interaction is not absolute, with significant promiscuity sometimes tolerated, particularly in the 5′ half of the target sequence, effectively reducing the number of bases that drive specificity. One solution to this has been to completely deactivate the Cas9 or Cpf1 catalytic function—retaining only the RNA-guided DNA binding function—and instead fusing a FokI domain to the deactivated Cas9; see, e.g., Tsai et al., Nature Biotech 32: 569-76 (2014); and Guilinger et al., Nature Biotech. 32: 577-82 (2014). Because FokI must dimerize to become catalytically active, two guide RNAs are required to tether two FokI fusions in close proximity to form the dimer and cleave DNA. This essentially doubles the number of bases in the combined target sites, thereby increasing the stringency of targeting by CRISPR-based systems.

[0419] As further example, fusion of the TALE DNA binding domain to a catalytically active HE, such as I-TevI, takes advantage of both the tunable DNA binding and specificity of the TALE, as well as the cleavage sequence specificity of I-TevI, with the expectation that off-target cleavage can be further reduced.

[0420] Methods And Compositions of The Invention

[0421] Accordingly, the present disclosure relates in particular to the following non-limiting methods according to the invention: In a first method, Method 1, the present disclosure provides a method for editing an Apolipoprotein C3 (APOCIII) gene in a human cell by genome editing, the method comprising the step of introducing into the human cell one or more deoxyribonucleic acid (DNA) endonucleases to effect one or more single-strand breaks (SSBs) or double-strand breaks (DSBs) within or near the APOCIII gene or other DNA sequences that encode regulatory elements of the APOCIII gene that results in one or more permanent insertions, deletions or mutations of at least one nucleotide within or near the APOCIII gene, thereby reducing or eliminating the expression or function of APOCIII gene products.

[0422] In another method, Method 2, the present disclosure provides an ex vivo method for treating a patient having an APOCIII related condition or disorder comprising the steps of: i) isolating a hepatocyte from a patient; ii) editing within or near an Apolipoprotein C3 (APOCIII) gene or other DNA sequences that encode regulatory elements of the APOCIII gene of the hepatocyte; and iii) implanting said genome-edited hepatocyte into the patient.

[0423] In another method, Method 3, the present disclosure provides a method according to Method 2, wherein the editing step comprises introducing into the hepatocyte one or more deoxyribonucleic acid (DNA) endonucleases to effect one or more single-strand breaks (SSBs) or double-strand breaks (DSBs) within or near the APOCIII gene or other DNA sequences that encode regulatory elements of the APOCIII gene that results in one or more permanent insertions, deletions or mutations of at least one nucleotide within or near the APOCIII gene, thereby reducing or eliminating the expression or function of APOCIII gene products.

[0424] In another method, Method 4, the present disclosure provides an ex vivo method for treating a patient having an APOCIII related condition or disorder comprising the steps of: i) creating a patient specific induced pluripotent stem cell (iPSC); ii) editing within or near an Apolipoprotein C3 (APOCIII) gene or other DNA sequences that encode regulatory elements of the APOCIII gene of the iPSC; iii) differentiating the genome-edited iPSC into a hepatocyte; and iv) implanting said hepatocyte into the patient.

[0425] In another method, Method 5, the present disclosure provides a method according to Method 4, wherein the editing step comprises introducing into the iPSC one or more deoxyribonucleic acid (DNA) endonucleases to effect one or more single-strand breaks (SSBs) or double-strand breaks (DSBs) within or near the APOCIII gene or other DNA sequences that encode regulatory elements of the APOCIII gene that results in one or more permanent insertions, deletions or mutations of at least one nucleotide within or near the APOCIII gene, thereby reducing or eliminating the expression or function of APOCIII gene products.

[0426] In another method, Method 6, the present disclosure provides an ex vivo method for treating a patient having an APOCIII related condition or disorder comprising the steps of: i) isolating a mesenchymal stem cell from the patient; ii) editing within or near an Apolipoprotein C3 (APOCIII) gene or other DNA sequences that encode regulatory elements of the APOCIII gene of the mesenchymal stem cell; iii) differentiating the genome-edited mesenchymal stem cell into a hepatocyte; and iv) implanting the hepatocyte into the patient.

[0427] In another method, Method 7, the present disclosure provides a method according to Method 6, wherein the editing step comprises introducing into the mesenchymal stem cell one or more deoxyribonucleic acid (DNA) endonucleases to effect one or more single-strand breaks (SSBs) or double-strand breaks (DSBs) within or near the APOCIII gene or other DNA sequences that encode regulatory elements of the APOCIII gene that results in one or more permanent insertions, deletions or mutations of at least one nucleotide within or near the APOCIII gene, thereby reducing or eliminating the expression or function of APOCIII gene products.

[0428] In another method, Method 8, the present disclosure provides an in vivo method for treating a patient with an APOCIII related disorder comprising the step of editing the Apolipoprotein C3 (APOCIII) gene in a cell of the patient.

[0429] In another method, Method 9, the present disclosure provides a method according to Method 8, wherein the editing step comprises introducing into the cell one or more deoxyribonucleic acid (DNA) endonucleases to effect one or more single-strand breaks (SSBs) or double-strand breaks (DSBs) within or near the APOCIII gene or other DNA sequences that encode regulatory elements of the APOCIII gene that results in one or more permanent insertions, deletions or mutations of at least one nucleotide within or near the APOCIII gene, thereby reducing or eliminating the expression or function of APOCIII gene products.

[0430] In another method, Method 10, the present disclosure provides a method according to any one of Methods 8-9, wherein the cell is a hepatocyte.

[0431] In another method, Method 11, the present disclosure provides a method according to Method 10, wherein the one or more deoxyribonucleic acid (DNA) endonuclease is delivered to the hepatocyte by local injection, systemic infusion, or combinations thereof.

[0432] In another method, Method 12, the present disclosure provides a method of altering the contiguous genomic sequence of an APOCIII gene in a cell comprising contacting said cell with one or more deoxyribonucleic acid (DNA) endonuclease to effect one or more single-strand breaks (SSBs) or double-strand breaks (DSBs).

[0433] In another method, Method 13, the present disclosure provides a method according to Method 12, wherein the alteration of the contiguous genomic sequence occurs in one or more exons of the APOCIII gene.

[0434] In another method, Method 14, the present disclosure provides a method according to any one of Methods 1-13, wherein the one or more deoxyribonucleic acid (DNA) endonuclease is selected from any of those sequences in SEQ ID NOs: 1-620 and variants having at least 90% homology to any of those sequences disclosed in SEQ ID NOs: 1-620.

[0435] In another method, Method 15, the present disclosure provides a method according to the method 14, wherein the one or more deoxyribonucleic acid (DNA) endonuclease is one or more proteins or polypeptides.

[0436] In another method, Method 16, the present disclosure provides a method according to Method 14, wherein the one or more deoxyribonucleic acid (DNA) endonuclease is one or more polynucleotide encoding the one or more DNA endonuclease.

[0437] In another method, Method 17, the present disclosure provides a method according to the method 16, wherein the one or more deoxyribonucleic acid (DNA) endonuclease is one or more ribonucleic acid (RNA) encoding the one or more DNA endonuclease.

[0438] In another method, Method 18, the present disclosure provides a method according to Method 17, wherein the one or more ribonucleic acid (RNA) is one or more chemically modified RNA.

[0439] In another method, Method 19, the present disclosure provides a method according to Method 18, wherein the one or more ribonucleic acid (RNA) is chemically modified in the coding region.

[0440] In another method, Method 20, the present disclosure provides a method according to any one of Methods 16-19, wherein the one or more polynucleotide or one or more ribonucleic acid (RNA) is codon optimized.

[0441] In another method, Method 21, the present disclosure provides a method according to any one of Methods 1-20, wherein the method further comprises introducing into the cell one or more gRNAs or one or more sgRNAs.

[0442] In another method, Method 22, the present disclosure provides a method according to the Method 21, wherein the one or more gRNAs or one or more sgRNAs comprises a spacer sequence that is complementary to a DNA sequence within or near the APOCIII gene.

[0443] In another method, Method 23, the present disclosure provides the method of Method 21, wherein the one or more gRNA or one or more sgRNA comprises a spacer sequence that is complementary to a sequence flanking the FXN gene or other sequence that encodes a regulatory element of the FXN gene.

[0444] In another method, Method 24, the present disclosure provides a method according to any of one of Methods 21-23, wherein the one or more gRNAs or one or more sgRNAs is chemically modified.

[0445] In another method, Method 25, the present disclosure provides a method according to any one of Methods 21-24, wherein said or more gRNAs or one or more sgRNAs is pre-complexed with the one or more deoxyribonucleic acid (DNA) endonuclease.

[0446] In another method, Method 26, the present disclosure provides a method according to Method 25, wherein the pre-complexing involves a covalent attachment of said one or more gRNA or one or more sgRNA to the one or more deoxyribonucleic acid (DNA) endonuclease.

[0447] In another method, Method 27, the present disclosure provides a method according to Method 14-25, wherein the one or more deoxyribonucleic acid (DNA) endonuclease is formulated in a liposome or lipid nanoparticle.

[0448] In another method, Method 28, the present disclosure provides a method according to any one of Methods 21-25, wherein the one or more deoxyribonucleic acid (DNA) endonuclease and one or more gRNA or one or more sgRNA is formulated in a liposome or lipid nanoparticle which also comprises the one or more gRNA or one or more sgRNA.

[0449] In another method, Method 29, the present disclosure provides a method according to any one of Methods 12 or 21-22, wherein the one or more deoxyribonucleic acid (DNA) endonuclease is encoded in an AAV vector particle, where the AAV vector serotype is selected from the group consisting of any of those disclosed in SEQ ID NOs: 4,734-5,302 and Table 6.

[0450] In another method, Method 30, the present disclosure provides a method according to any one of Method 21-22, wherein the one or more gRNA or one or more sgRNA is encoded in an AAV vector particle, where the AAV vector serotype is selected from the group consisting of any of those disclosed in SEQ ID NOs: 4,734-5,302 and Table 6.

[0451] In another method, Method 31, the present disclosure provides a method according to any one of Methods 21-22, wherein: a) the one or more deoxyribonucleic acid (DNA) endonuclease; and b) one or more gRNA or one or more sgRNA, are encoded in an AAV vector particle, where the AAV vector serotype is selected from the group consisting of any of those disclosed in SEQ ID NOs: 4,734-5,302 and Table 6.

[0452] In another method, Method 32, the present disclosure provides a method according to any one of Methods 14-25, wherein the DNA endonuclease and sgRNA are formulated into separate lipid nanoparticles or coformulated into a lipid nanoparticle.

[0453] In another method, Method 33, the present disclosure provides a method according to Method 1, wherein the cell is a human cell.

[0454] In another method, Method 34, the present disclosure provides a method according to Method 33, wherein the human cell is a hepatocyte.

[0455] In another method, Method 35, the present disclosure provides a method according to Method 8, wherein the cell is a human cell.

[0456] In another method, Method 36, the present disclosure provides a method according to Method 35, wherein the human cell is a hepatocyte.

[0457] The present disclosure also provides a composition, Composition 1, comprising a single-molecule guide RNA comprising at least a spacer sequence that is an RNA sequence corresponding to any of SEQ ID NOs: 5305-14350.

[0458] In another composition, Composition 2, the present disclosure provides the single-molecule guide RNA of Composition 1, wherein the single-molecule guide RNA further comprises a spacer extension region.

[0459] In another composition, Composition 3, the present disclosure provides the single-molecule guide RNA of Composition 1, wherein the single-molecule guide RNA further comprises a tracrRNA extension region.

[0460] In another composition, Composition 4, the present disclosure provides the single-molecule guide RNA of Compositions 1-3, wherein the single-molecule guide RNA is chemically modified.

[0461] In another composition, Composition 5, the present disclosure provides a single-molecule guide RNA of Compositions 1-4 pre-complexed with a DNA endonuclease.

[0462] In another composition, Composition 6, the present disclosure provides the composition of Composition 5, wherein the DNA endonuclease is a Cas9 or Cpf1 endonuclease.

[0463] In another composition, Composition 7, the present disclosure provides the composition of Composition 6, wherein the Cas9 or Cpf1 endonuclease is S. pyogenes Cas9, S. aureus Cas9, N. meningitides Cas9, S. thermophilus CRISPR1 Cas9, S. thermophilus CRISPR 3 Cas9, T. denticola Cas9, L. bacterium ND2006 Cpf1 and Acidaminococcus sp. BV3L6 Cpf1, and variants having at least 90% homology to the enzymes.

[0464] In another composition, Composition 8, the present disclosure provides the composition of Composition 7, wherein the Cas9 or Cpf1 endonuclease comprises one or more nuclear localization signals (NLSs).

[0465] In another composition, Composition 9, the present disclosure provides the composition of Composition 8, wherein at least one NLS is at or within 50 amino acids of the amino-terminus of the Cas9 or Cpf1 endonuclease and/or at least one NLS is at or within 50 amino acids of the carboxy-terminus of the Cas9 or Cpf1 endonuclease.

[0466] In another composition, Composition 10, the present disclosure provides a DNA encoding the single-molecule guide RNA of any of Compositions 1-4.

[0467] In another composition, Composition 11, the present disclosure provides a non-naturally occurring CRISPR/Cas system comprising a polynucleotide encoding a Cas9 or Cpf1 enzyme and at least one single-molecule guide RNA from Compositions 1-4.

[0468] In another composition, Composition 12, the present disclosure provides the CRISPR/Cas system of Composition 11, wherein the polynucleotide encoding a Cas9 or Cpf1 enzyme is selected from the group consisting of S. pyogenes Cas9, S. aureus Cas9, N. meningitides Cas9, S. thermophilus CRISPR1 Cas9, S. thermophilus CRISPR 3 Cas9, T. denticola Cas9, L. bacterium ND2006 Cpf1 and Acidaminococcus sp. BV3L6 Cpf1, and variants having at least 90% homology to the enzymes.

[0469] In another composition, Composition 13, the present disclosure provides The CRISPR/Cas system of Composition 12, wherein the polynucleotide encoding a Cas9 or Cpf1 enzyme comprises one or more nuclear localization signals (NLSs).

[0470] In another composition, Composition 14, the present disclosure provides The CRISPR/Cas system of Composition 13, wherein at least one NLS is at or within 50 amino acids of the amino-terminus of the polynucleotide encoding a Cas9 or Cpf1 enzyme and/or at least one NLS is at or within 50 amino acids of the carboxy-terminus of the polynucleotide encoding a Cas9 or Cpf1 enzyme.

[0471] In another composition, Composition 15, the present disclosure provides the CRISPR/Cas system of Composition 14, wherein the polynucleotide encoding a Cas9 or Cpf1 enzyme is codon optimized for expression in a eukaryotic cell.

[0472] In another composition, Composition 16, the present disclosure provides a DNA encoding the CRISPR/Cas system of any one of Compositions 11-15.

[0473] In another composition, Composition 17, the present disclosure provides a vector comprising the DNA of Compositions 10 or 16.

[0474] In another composition, Composition 18, the present disclosure provides the vector of Composition 17, wherein the vector is a plasmid.

[0475] In another composition, Composition 19, the present disclosure provides the vector of Composition 17, wherein the vector is an AAV vector particle, and the AAV vector serotype is selected from the group consisting of those disclosed in SEQ ID NOs: 4734-5302 or Table 2.

### Definitions

[0476] The term “comprising” or “comprises” is used in reference to compositions, methods, and respective component(s) thereof, that are essential to the invention, yet open to the inclusion of unspecified elements, whether essential or not.

[0477] The term “consisting essentially of” refers to those elements required for a given aspect. The term permits the presence of additional elements that do not materially affect the basic and novel or functional characteristic(s) of that aspect of the invention.

[0478] The term “consisting of” refers to compositions, methods, and respective components thereof as described herein, which are exclusive of any element not recited in that description of the aspect.

[0479] The singular forms “a,” “an,” and “the” include plural references, unless the context clearly dictates otherwise.

[0480] Certain numerical values presented herein are preceded by the term “about.” The term “about” is used to provide literal support for the numerical value the term “about” precedes, as well as a numerical value that is approximately the numerical value, that is the approximating unrecited numerical value may be a number which, in the context it is presented, is the substantial equivalent of the specifically recited numerical value. The term “about” means numerical values within +10% of the recited numerical value.

[0481] The details of one or more embodiments of the invention are set forth in the accompanying description below. Although any materials and methods similar or equivalent to those described herein can be used in the practice or testing of the present invention, the preferred materials and methods are now described. Other features, objects and advantages of the invention will be apparent from the description. In the description, the singular forms also include the plural unless the context clearly dictates otherwise. Unless defined otherwise, all technical and scientific terms used herein have the same meaning as commonly understood by one of ordinary skill in the art to which this invention belongs. In the case of conflict, the present description will control.

[0482] Any numerical range recited in this specification describes all sub-ranges of the same numerical precision (i.e., having the same number of specified digits) subsumed within the recited range. For example, a recited range of “1.0 to 10.0” describes all sub-ranges between (and including) the recited minimum value of 1.0 and the recited maximum value of 10.0, such as, for example, “2.4 to 7.6,” even if the range of “2.4 to 7.6” is not expressly recited in the text of the specification. Accordingly, the Applicant reserves the right to amend this specification, including the claims, to expressly recite any sub-range of the same numerical precision subsumed within the ranges expressly recited in this specification. All such ranges are inherently described in this specification such that amending to expressly recite any such sub-ranges will comply with written description, sufficiency of description, and added matter requirements, including the requirements under 35 U.S.C. § 112(a) and Article 123(2) EPC. Also, unless expressly specified or otherwise required by context, all numerical parameters described in this specification (such as those expressing values, ranges, amounts, percentages, and the like) may be read as if prefaced by the word “about,” even if the word “about” does not expressly appear before a number. Additionally, numerical parameters described in this specification should be construed in light of the number of reported significant digits, numerical precision, and by applying ordinary rounding techniques. It is also understood that numerical parameters described in this specification will necessarily possess the inherent variability characteristic of the underlying measurement techniques used to determine the numerical value of the parameter.

[0483] The details of one or more aspects of the present disclosure are set forth in the accompanying description below. Although any materials and methods similar or equivalent to those described herein can be used in the practice or testing of the present disclosure, the preferred materials and methods are now described. Other features, objects and advantages of the disclosure will be apparent from the description. In the description, the singular forms also include the plural unless the context clearly dictates otherwise. Unless defined otherwise, all technical and scientific terms used herein have the same meaning as commonly understood by one of ordinary skill in the art to which this disclosure belongs. In the case of conflict, the present description will control.

[0484] The present invention is further illustrated by the following non-limiting examples.

### EXAMPLES

[0485] The invention will be more fully understood by reference to the following examples, which provide illustrative non-limiting aspects of the invention.

[0486] The examples describe the use of the CRISPR system as an illustrative genome editing technique to create defined therapeutic genomic deletions, insertions, or replacements, termed “genomic modifications” herein, in the APOCIII gene that lead to permanent deletion or mutation of the APOCIII gene, that reduce or eliminate the APOCIII protein activity. Introduction of the defined therapeutic modifications represents a novel therapeutic strategy for the potential amelioration of Dyslipidemias, as described and illustrated herein.

### Example 1—CRISPR/SpCas9 Target Sites for the APOCIII Gene

[0487] Regions of the APOCIII gene are scanned for target sites. Each area is scanned for a protospacer adjacent motif (PAM) having the sequence NRG. gRNA 20 bp spacer sequences corresponding to the PAM are then identified, as shown in SEQ ID NOs: 5,987-10,852 of the Sequence Listing.

### Example 2—CRISPR/SaCas9 Target Sites for the APOCIII Gene

[0488] Regions of the APOCIII gene were scanned for target sites. Each area is scanned for a protospacer adjacent motif (PAM) having the sequence NNGRRT. gRNA 20 bp spacer sequences corresponding to the PAM are then identified, as shown in SEQ ID NOs: 5,405-5,783 of the Sequence Listing.

### Example 3—CRISPR/StCas9 Target Sites for the APOCIII Gene

[0489] Regions of the APOCIII gene were scanned for target sites. Each area was scanned for a protospacer adjacent motif (PAM) having the sequence NNAGAAW. gRNA 20 bp spacer sequences corresponding to the PAM are then identified, as shown in SEQ ID NOs: 5,320-5,404 of the Sequence Listing.

### Example 4—CRISPR/TdCas9 Target Sites for the APOCIII Gene

[0490] Regions of the APOCIII gene were scanned for target sites. Each area was scanned for a protospacer adjacent motif (PAM) having the sequence NAAAAC. gRNA 20 bp spacer sequences corresponding to the PAM are then identified, as shown in SEQ ID NOs: 5,305-5,319 of the Sequence Listing.

### Example 5—CRISPR/NmCas9 Target Sites for the APOCIII Gene

[0491] Regions of the APOCIII gene were scanned for target sites. Each area was scanned for a protospacer adjacent motif (PAM) having the sequence NNNNGATT. gRNA 20 bp spacer sequences corresponding to the PAM are then identified, as shown in SEQ ID NOs: 5,784-5,986 of the Sequence Listing.

### Example 6—CRISPR/Cpf1 Target Sites for the APOCIII Gene

[0492] Regions of the APOCIII gene were scanned for target sites. Each area was scanned for a protospacer adjacent motif (PAM) having the sequence TTN or YTN. gRNA 22 bp spacer sequences corresponding to the PAM are then identified, as shown in SEQ ID NOs: 10,853-14,350 of the Sequence Listing.

### Example 7—Bioinformatics Analysis of the Guide Strands

[0493] Candidate guides are then screened and selected in a single process or multi-step process that involves both theoretical binding and experimentally assessed activity at both on and off-target sites. By way of illustration, candidate guides having sequences that match a particular on-target site, such as a site within the APOCIII gene, with adjacent PAM can be assessed for their potential to cleave at off-target sites having similar sequences, using one or more of a variety of bioinformatics tools available for assessing off-target binding, as described and illustrated in more detail below, in order to assess the likelihood of effects at chromosomal positions other than those intended.

[0494] Candidates predicted to have relatively lower potential for off-target activity can then be assessed experimentally to measure their on-target activity, and then off-target activities at various sites. Preferred guides have sufficiently high on-target activity to achieve desired levels of gene editing at the selected locus, and relatively lower off-target activity to reduce the likelihood of alterations at other chromosomal loci. The ratio of on-target to off-target activity is often referred to as the “specificity” of a guide.

[0495] For initial screening of predicted off-target activities, there are a number of bioinformatics tools known and publicly available that can be used to predict the most likely off-target sites; and since binding to target sites in the CRISPR/Cas9 or CRISPR/Cpf1 nuclease system is driven by Watson-Crick base pairing between complementary sequences, the degree of dissimilarity (and therefore reduced potential for off-target binding) is essentially related to primary sequence differences: mismatches and bulges, i.e. bases that are changed to a non-complementary base, and insertions or deletions of bases in the potential off-target site relative to the target site. An exemplary bioinformatics tool called COSMID (CRISPR Off-target Sites with Mismatches, Insertions and Deletions) (available on the web at crispr.bme.gatech.edu) compiles such similarities. Other bioinformatics tools include, but are not limited to, autoCOSMID, and CCTop.

[0496] Bioinformatics are used to minimize off-target cleavage in order to reduce the detrimental effects of mutations and chromosomal rearrangements. Studies on CRISPR/Cas9 systems suggested the possibility of off-target activity due to nonspecific hybridization of the guide strand to DNA sequences with base pair mismatches and/or bulges, particularly at positions distal from the PAM region. Therefore, it is important to have a bioinformatics tool that can identify potential off-target sites that have insertions and/or deletions between the RNA guide strand and genomic sequences, in addition to base-pair mismatches. Bioinformatics tools based upon the off-target prediction algorithm CCTop were used to search genomes for potential CRISPR off-target sites (CCTop is available on the web at crispr.bme.gatech.edu). The output ranked lists of the potential off-target sites based on the number and location of mismatches, allowing more informed choice of target sites, and avoiding the use of sites with more likely off-target cleavage.

[0497] Additional bioinformatics pipelines are employed that weigh the estimated on- and/or off-target activity of gRNA targeting sites in a region. Other features that may be used to predict activity include information about the cell type in question, DNA accessibility, chromatin state, transcription factor binding sites, transcription factor binding data, and other CHIP-seq data. Additional factors are weighed that predict editing efficiency, such as relative positions and directions of pairs of gRNAs, local sequence features and micro-homologies.

[0498] Bioinformatic analysis focused on designing guides against Exons 2-4 (out of 4 exons) and either full intronic sequences or ˜100-300 bp of sequences proximal to exon-intron junctions (when introns are large) for Introns 1-3. Approximately 326 guides target these sequences were identified. 192 guides (Table 7) were then prioritized for in vitro transcription-based guide screening protocol taking into consideration the predicted number and location of their off-target sites. gRNAs were also prioritized for screening based on their location within the Apoc3 sequence; preference was given to gRNAs that target 5′ exons for IVT screening.

[0499] gRNAs within exon sequences can be used to create indels leading to loss of function of the protein through a change in the protein sequence and/or truncation of the protein. gRNAs in the Intron 1 sequence can be used either alone or in combination with gRNAs within exons to remove the translation start site and prevent protein synthesis. gRNAs in the introns can be used alone or in combination with gRNAs within exons to remove splice donor and acceptor sites leading to the production of truncated proteins and consequent loss of function. gRNAs within Exon 1 and upstream sequence can be used to remove transcription start sites.

### Example 8—Testing of Preferred Guides in Cells for on-Target Activity

[0500] To identify a large spectrum of pairs of gRNAs able to edit the cognate DNA target region, an in vitro transcribed (IVT) gRNA screen was conducted. The relevant genomic sequence was submitted for analysis using a gRNA. design software. The resulting list of; RNAs were narrowed to a list of about 200 gRNAs based on uniqueness of sequence (only gRNAs without a perfect match somewhere else in the genome were screened) and minimal predicted off targets. This set of gRNAs were in vitro transcribed, and transfected using Lipofectamine MessengerMAX into HEK293T cells that constitutively express Cas9. Cells were harvested 48 hours post transfection, the genomic DNA was isolated, and cutting efficiency was evaluated using TIDE analysis. (FIGS. 2-4).

[0501] It was found that 17% of the test gRNAs induced cutting efficiencies over 30%.

TABLE 7
gRNA sequences and cutting efficiencies in HEK293T cells

| SEQ ID | | N + Guide Sequence | Donor | |
|---|---|---|---|---|
| NO: | Guide Name | (20mer) | (indel %) | R2 |
| 9578 | ApoC3_Int1_Int3_T13 | GCACGCCACCAAGACCGCCA | 78.6 | 0.958 |
| 7024 | ApoC3_Int1_Int3_T16 | GCGAGGGATCGAGGCCCAAA | 74.7 | 0.9178 |
| 9478 | ApoC3_Int1_Int3_T39 | AGGTGCCTTGATGTTCAGTC | 74.6 | 0.9722 |
| 7011 | ApoC3_Int1_Int3_T85 | ACTGAACATCAAGGCACCTG | 73.7 | 0.8939 |
| 7039 | ApoC3_Int1_Int3_T18 | GCTAATACGGGCTCTCAGAA | 69.8 | 0.9879 |
| 7043 | ApoC3_Int1_Int3_T2 | GGCCGGCTCCCTGCTAATAC | 67.8 | 0.9155 |
| 7010 | ApoC3_Int1_Int3_T29 | ACATCAAGGCACCTGCGGTC | 67.2 | 0.8721 |
| 7003 | ApoC3_Int1_Int3_T109 | GGTGATTTCTGGCCCTCTCC | 61.4 | 0.9538 |
| 7020 | ApoC3_Int1_Int3_T65 | ATCGAGGCCCAAAGGGAGGT | 59 | 0.8956 |
| 9480 | ApoC3_Int1_Int3_T76 | GCCTTGATGTTCAGTCTGGT | 58.6 | 0.8722 |
| 7072 | ApoC3_Int1_Int3_T93 | CTGCAAGGAAGTGTCCTGTG | 58 | 0.96 |
| 7126 | ApoC3_Int1_Int3_T117 | ACCCTGCATGAAGCTGAGAA | 56.9 | 0.9692 |
| 9568 | ApoC3_Int1_Int3_T125 | TCTTTCCTCAGGAGCTTCAG | 54.7 | 0.9316 |
| 7025 | ApoC3_Int1_Int3_T11 | GGCGAGGGATCGAGGCCCAA | 54.1 | 0.964 |
| 7133 | ApoC3_Int1_Int3_T79 | GCTGCTCAGTGCATCCTTGG | 54.1 | 0.8883 |
| 7070 | ApoC3_Int1_Int3_T105 | GCAAGGAAGTGTCCTGTGAG | 52.7 | 0.94 |
| 7120 | ApoC3_Int1_Int3_T107 | CTCGGCCTCTGAAGCTCCTG | 52.6 | 0.8684 |
| 9842 | ApoC3_Int3_Ex4_T43 | TGCTTCCCCTGACTGATTTA | 52.2 | 0.9598 |
| 7123 | ApoC3_Int1_Int3_T124 | GCTGAGAAGGGAGGCATCCT | 51.1 | 0.8333 |
| 7048 | ApoC3_Int1_Int3_T89 | CTGGGTCTGCCAGAAGGAGT | 48.5 | 0.967 |
| 9547 | ApoC3_Int1_Int3_T87 | GGCAGGGTGGAGGCAACTTG | 46.9 | 0.8275 |
| 9489 | ApoC3_Int1_Int3_T4 | TCTGAGAGCCCGTATTAGCA | 46.4 | 0.9835 |
| 7104 | ApoC3_Int1_Int3_T37 | GCTCCTGCTTGACCACCCAT | 44.5 | 0.9216 |
| 7080 | ApoC3_Int1_Int3_T30 | GGGCAACAACAAGGAGTACC | 43.1 | 0.7468 |
| 7044 | ApoC3_Int1_Int3_T6 | GGGCCGGCTCCCTGCTAATA | 42.2 | 0.9801 |
| 9476 | ApoC3_Int1_Int3_T5 | CGGAGATCAGTCCAGACCGC | 40.7 | 0.9521 |
| 7082 | ApoC3_Int1_Int3_T60 | GCGCCAGGAGGGCAACAACA | 40.3 | 0.788 |
| 7549 | ApoC3_Int3_Ex4_T46 | CCAGCCCCTAAATCAGTCAG | 40.1 | 0.9879 |
| 9870 | ApoC3_Int3_Ex4_T45 | CTTGGGTCCTGCAATCTCCA | 37.1 | 0.9867 |
| 9546 | ApoC3_Int1_Int3_T95 | GGGCAGGGTGGAGGCAACTT | 35 | 0.9136 |
| 9573 | ApoC3_Int1_Int3_T114 | CTCCCTTCTCAGCTTCATGC | 33.1 | 0.8893 |
| 9471 | ApoC3_Int1_Int3_T88 | AGCATGTTGGCTGGACTGGA | 31.4 | 0.9712 |
| 7075 | ApoC3_Int1_Int3_T126 | ATGGCACCTCTGTTCCTGCA | 30.8 | 0.9382 |
| 7046 | ApoC3_Int1_Int3_T99 | GGGTCTGCCAGAAGGAGTAG | 29.9 | 0.9874 |
| 7037 | ApoC3_Int1_Int3_T47 | TAATACGGGCTCTCAGAAGG | 29.7 | 0.9902 |
| 9596 | ApoC3_Int1_Int3_T38 | CCCTGGTGAGATCCCAACAA | 29.6 | 0.9153 |
| 7096 | ApoC3_Int1_Int3_T46 | CCAGTCCCACCAAGTGCTTA | 29.4 | 0.9393 |
| 7557 | ApoC3_Int3_Ex4_T15 | GGTGCTCCAGTAGTCTTTCA | 28.8 | 0.9909 |
| 7047 | ApoC3_Int1_Int3_T110 | TGGGTCTGCCAGAAGGAGTA | 28.4 | 0.9897 |
| 7131 | ApoC3_Int1_Int3_T42 | TGCATCCTTGGCGGTCTTGG | 28.3 | 0.9763 |
| 7589 | ApoC3_Int3_Ex4_T62 | CCTGGAGATTGCAGGACCCA | 28.2 | 0.9853 |
| 7598 | ApoC3_Int3_Ex4_T4 | GTCCCTTTTAAGCAACCTAC | 27.8 | 0.9841 |
| 7058 | ApoC3_Int1_Int3_T54 | GGGAGGTGGCGTGGCCCCTA | 27.5 | 0.9912 |
| 7196 | ApoC3_Int1_Int3_T80 | CTCCCGCAGCAGCCTGACAA | 27.5 | 0.9139 |
| 9551 | ApoC3_Int1_Int3_T55 | GGGATCCCAGTCCCAATGGG | 27.4 | 0.9491 |
| 7079 | ApoC3_Int1_Int3_T32 | GGCAACAACAAGGAGTACCC | 27.2 | 0.9828 |
| 7169 | ApoC3_Int1_Int3_T113 | TTGGGATCTCACCAGGGCAG | 27 | 0.9842 |
| 7040 | ApoC3_Int1_Int3_T9 | TGCTAATACGGGCTCTCAGA | 25.7 | 0.9895 |
| 7022 | ApoC3_Int1_Int3_T96 | AGGGATCGAGGCCCAAAGGG | 24.9 | 0.9905 |
| 7033 | ApoC3_Int1_Int3_T108 | CTCAGAAGGGGGACTGGTGA | 24.3 | 0.984 |
| 9534 | ApoC3_Int1_Int3_T36 | CGTAAGCACTTGGTGGGACT | 24.1 | 0.9548 |
| 7550 | ApoC3_Int3_Ex4_T30 | CCCAGCCCCTAAATCAGTCA | 23.1 | 0.9913 |
| 7127 | ApoC3_Int1_Int3_T127 | AACCCTGCATGAAGCTGAGA | 22.8 | 0.9856 |
| 9859 | ApoC3_Int3_Ex4_T48 | GTTCTGGGATTTGGACCCTG | 22.1 | 0.9918 |
| 7171 | ApoC3_Int1_Int3_T57 | CCATTGTTGGGATCTCACCA | 21.8 | 0.9852 |
| 9597 | ApoC3_Int1_Int3_T72 | GTGAGATCCCAACAATGGAA | 21.8 | 0.9875 |
| 9498 | ApoC3_Int1_Int3_T52 | CCCAGCTAAGGTTCTACCTT | 21.5 | 0.9643 |
| 9561 | ApoC3_Int1_Int3_T71 | GGAGCCCAGGGCTCGTCCAG | 21.4 | 0.9589 |
| 9599 | ApoC3_Int1_Int3_T86 | AGATCCCAACAATGGAATGG | 21.3 | 0.9877 |
| 7078 | ApoC3_Int1_Int3_T8 | GCAACAACAAGGAGTACCCG | 21.2 | 0.9869 |
| 9856 | ApoC3_Int3_Ex4_T63 | GGACAAGTTCTCTGAGTTCT | 21.2 | 0.9908 |
| 9518 | ApoC3_Int1_Int3_T74 | GGACCTGGGGTGCCCCTCAC | 20.9 | 0.9703 |
| 9608 | ApoC3_Int1_Int3_T101 | TTCCTCACAGGGCCTTTGTC | 20.6 | 0.9752 |
| 9526 | ApoC3_Int1_Int3_T103 | CAGAGGTGCCATGCAGCCCC | 20.4 | 0.9513 |
| 9602 | ApoC3_Int1_Int3_T112 | GAGGTGCTCCAGCCTCCCCT | 20.3 | 0.9878 |
| 7597 | ApoC3_Int3_Ex4_T23 | TCCCTTTTAAGCAACCTACA | 20.3 | 0.9876 |
| 7077 | ApoC3_Int1_Int3_T75 | AAGGAGTACCCGGGGCTGCA | 20 | 0.954 |
| 9869 | ApoC3_Int3_Ex4_T42 | CCTTGGGTCCTGCAATCTCC | 19.9 | 0.99 |
| 7537 | ApoC3_Int3_Ex4_T67 | ACCCACACCCATGTCCCCAC | 19.5 | 0.992 |
| 9523 | ApoC3_Int1_Int3_T92 | ACACTTCCTTGCAGGAACAG | 19.1 | 0.9415 |
| 9550 | ApoC3_Int1_Int3_T27 | TTGGGGATCCCAGTCCCAAT | 18.9 | 0.966 |
| 7551 | ApoC3_Int3_Ex4_T9 | ACCCAGCCCCTAAATCAGTC | 18.3 | 0.9944 |
| 7168 | ApoC3_Int1_Int3_T82 | GTTGGGATCTCACCAGGGCA | 18.1 | 0.987 |
| 7583 | ApoC3_Int3_Ex4_T16 | AAGGAGCTCGCAGGATGGAT | 17.7 | 0.9858 |
| 7051 | ApoC3_Int1_Int3_T66 | CCTTAGCTGGGTCTGCCAGA | 17.6 | 0.9952 |
| 9830 | ApoC3_Int3_Ex4_T8 | CTGACTGGTGTCGTCCAGTG | 17.5 | 0.9908 |
| 7212 | ApoC3_Int1_Int3_T34 | GCACGCCCTAGGACTGCTCC | 17.1 | 0.7655 |
| 9610 | ApoC3_Int1_Int3_T115 | GGCCTTTGTCAGGCTGCTGC | 17 | 0.7773 |
| 9881 | ApoC3_Int3_Ex4_T51 | TGGCCCCCCTCCAGGCATGC | 16.6 | 0.9889 |
| 7208 | ApoC3_Int1_Int3_T44 | TAGGACTGCTCCGGGGAGAA | 16.5 | 0.8898 |
| 7529 | ApoC3_Int3_Ex4_T38 | GACGACAGCCCTGAGACCTC | 16.4 | 0.9918 |
| 9492 | ApoC3_Int1_Int3_T48 | GAGCCGGCCCCTACTCCTTC | 16.3 | 0.9934 |
| 9499 | ApoC3_Int1_Int3_T41 | CCAGCTAAGGTTCTACCTTA | 16.3 | 0.9941 |
| 7533 | ApoC3_Int3_Ex4_T41 | CACCACCCTCTCAACTTCAC | 16.1 | 0.9909 |
| 9849 | ApoC3_Int3_Ex4_T28 | TCAGTTCCCTGAAAGACTAC | 16.1 | 0.9854 |
| 7596 | ApoC3_Int3_Ex4_T21 | CCCTTTTAAGCAACCTACAG | 15.8 | 0.9909 |
| 7213 | ApoC3_Int1_Int3_T24 | GGCACGCCCTAGGACTGCTC | 15.7 | 0.977 |
| 7566 | ApoC3_Int3_Ex4_T50 | CTGAAGTTGGTCTGACCTCA | 15.7 | 0.9931 |
| 7054 | ApoC3_Int1_Int3_T90 | CCTAAGGTAGAACCTTAGCT | 15.6 | 0.9836 |
| 9516 | ApoC3_Int1_Int3_T129 | TCCAGAGGCATGGGGACCTG | 15.5 | 0.9688 |
| 9623 | ApoC3_Int1_Int3_T23 | TTCTCCCCGGAGCAGTCCTA | 15.4 | 0.9639 |
| 9846 | ApoC3_Int3_Ex4_T18 | TTTAGGGGCTGGGTGACCGA | 15.2 | 0.9919 |
| 7138 | ApoC3_Int1_Int3_T61 | GCGGGTGTACCTGGCCTGCT | 15.1 | 0.9834 |
| 9823 | ApoC3_Int3_Ex4_T13 | GTCGTCCAGTGAAGTTGAGA | 14.9 | 0.9896 |
| 7103 | ApoC3_Int1_Int3_T35 | CTCCTGCTTGACCACCCATT | 14.8 | 0.9522 |
| 9554 | ApoC3_Int1_Int3_T22 | GTCCCAATGGGTGGTCAAGC | 14.5 | 0.9787 |
| 7577 | ApoC3_Int3_Ex4_T59 | TGGATAGGCAGGTGGACTTG | 14.5 | 0.9902 |
| 9832 | ApoC3_Int3_Ex4_T22 | GTGTCGTCCAGTGGGGACAT | 14.4 | 0.9917 |
| 9874 | ApoC3_Int3_Ex4_T6 | GCCCCTGTAGGTTGCTTAAA | 14.4 | 0.9908 |
| 9862 | ApoC3_Int3_Ex4_T2 | GGTCAGACCAACTTCAGCCG | 14.2 | 0.9905 |
| 9824 | ApoC3_Int3_Ex4_T55 | GTCCAGTGAAGTTGAGAGGG | 14 | 0.9906 |
| 9496 | ApoC3_Int1_Int3_T69 | CCTTCTGGCAGACCCAGCTA | 13.7 | 0.9937 |
| 9514 | ApoC3_Int1_Int3_T123 | GGTCCAGAGGCATGGGGACC | 13.3 | 0.9524 |
| 9883 | ApoC3_Int3_Ex4_T10 | TGCTGGCCTCCCAATAAAGC | 13.3 | 0.9683 |
| 7169 | ApoC3_Int1_Int3_T73 | TGTTGGGATCTCACCAGGGC | 13.2 | 0.9894 |
| 9816 | ApoC3_Int3_Ex4_T47 | GGATTCCTGCCTGAGGTCTC | 13.1 | 0.991 |
| 9867 | ApoC3_Int3_Ex4_T34 | ATCCATCCTGCGAGCTCCTT | 13.1 | 0.9871 |
| 7132 | ApoC3_Int1_Int3_T50 | CAGTGCATCCTTGGCGGTCT | 13 | 0.9816 |
| 9866 | ApoC3_Int3_Ex4_T20 | TATCCATCCTGCGAGCTCCT | 12.8 | 0.9933 |
| 7102 | ApoC3_Int1_Int3_T10 | GCTTGACCACCCATTGGGAC | 12.5 | 0.981 |
| 7034 | ApoC3_Int1_Int3_T98 | TCTCAGAAGGGGGACTGGTG | 12.4 | 0.9921 |
| 9532 | ApoC3_Int1_Int3_T17 | TCTGCCCGTAAGCACTTGGT | 12.3 | 0.9505 |
| 9515 | ApoC3_Int1_Int3_T100 | GTCCAGAGGCATGGGGACCT | 12.2 | 0.9761 |
| 7067 | ApoC3_Int1_Int3_T118 | ACCCCAGGTCCCCATGCCTC | 11.9 | 0.9765 |
| 9585 | ApoC3_Int1_Int3_T77 | GAGCAGCGTGCAGGAGTCCC | 11.9 | 0.9812 |
| 7027 | ApoC3_Int1_Int3_T81 | TGGTGAGGGGCGAGGGATCG | 11.7 | 0.9932 |
| 9622 | ApoC3_Int1_Int3_T53 | TTTCTCCCCGGAGCAGTCCT | 11.7 | 0.8631 |
| 7211 | ApoC3_Int1_Int3_T7 | CACGCCCTAGGACTGCTCCG | 11.5 | 0.9918 |
| 7562 | ApoC3_Int3_Ex4_T39 | CTCAGAGAACTTGTCCTTAA | 11.4 | 0.9932 |
| 9469 | ApoC3_Int1_Int3_T116 | AAGACACACAGCATGTTGGC | 10.9 | 0.989 |
| 9592 | ApoC3_Int1_Int3_T15 | AGCAGGCCAGGTACACCCGC | 10.9 | 0.9875 |
| 9831 | ApoC3_Int3_Ex4_T44 | GGTGTCGTCCAGTGGGGACA | 10.9 | 0.9928 |
| 9525 | ApoC3_Int1_Int3_T111 | ACAGAGGTGCCATGCAGCCC | 10.7 | 0.9554 |
| 9617 | ApoC3_Int1_Int3_T94 | GTTGAGACTGCATTCCTCCC | 10.7 | 0.95 |
| 7575 | ApoC3_Int3_Ex4_T27 | CAGGTGGACTTGGGGTATTG | 10.4 | 0.9872 |
| 9843 | ApoC3_Int3_Ex4_T24 | GCTTCCCCTGACTGATTTAG | 10.3 | 0.9925 |
| 7619 | ApoC3_Int3_Ex4_T53 | TATTGGGAGGCCAGCATGCC | 10.2 | 0.9896 |
| 9582 | ApoC3_Int1_Int3_T56 | GGATGCACTGAGCAGCGTGC | 10.1 | 0.9816 |
| 7567 | ApoC3_Int3_Ex4_T36 | GCTGAAGTTGGTCTGACCTC | 9.9 | 0.9937 |
| 7055 | ApoC3_Int1_Int3_T58 | CCCTAAGGTAGAACCTTAGC | 9.8 | 0.9907 |
| 7172 | ApoC3_Int1_Int3_T45 | TCCATTGTTGGGATCTCACC | 9.7 | 0.9897 |
| 7140 | ApoC3_Int1_Int3_T12 | GGGAGGCCAGCGGGTGTACC | 9.4 | 0.9861 |
| 7071 | ApoC3_Int1_Int3_T106 | TGCAAGGAAGTGTCCTGTGA | 9.2 | 0.9719 |
| 7005 | ApoC3_Int1_Int3_T102 | GTGTGTCTTTGGGTGATTTC | 8.7 | 0.9901 |
| 9530 | ApoC3_Int1_Int3_T19 | GGCCTCTGCCCGTAAGCACT | 8.5 | 0.9525 |
| 9479 | ApoC3_Int1_Int3_T84 | TGCCTTGATGTTCAGTCTGG | 8.3 | 0.9918 |
| 7578 | ApoC3_Int3_Ex4_T49 | ATGGATAGGCAGGTGGACTT | 8.3 | 0.9933 |
| 7139 | ApoC3_Int1_Int3_T70 | AGCGGGTGTACCTGGCCTGC | 8.1 | 0.9764 |
| 9520 | ApoC3_Int1_Int3_T63 | CTCACAGGACACTTCCTTGC | 7.9 | 0.9678 |
| 7571 | ApoC3_Int3_Ex4_T65 | ATTGAGGTCTCAGGCAGCCA | 7.9 | 0.9946 |
| 7206 | ApoC3_Int1_Int3_T97 | GACTGCTCCGGGGAGAAAGG | 7.8 | 0.9837 |
| 7038 | ApoC3_Int1_Int3_T40 | CTAATACGGGCTCTCAGAAG | 7.7 | 0.9943 |
| 9875 | ApoC3_Int3_Ex4_T17 | CCCCTGTAGGTTGCTTAAAA | 7.4 | 0.993 |
| 9470 | ApoC3_Int1_Int3_T78 | ACACAGCATGTTGGCTGGAC | 7.3 | 0.991 |
| 7538 | ApoC3_Int3_Ex4_T14 | ACTCCTCTGTAGGCAACCAT | 7.2 | 0.9921 |
| 9488 | ApoC3_Int1_Int3_T3 | TTCTGAGAGCCCGTATTAGC | 6.9 | 0.9947 |
| 9834 | ApoC3_Int3_Ex4_T60 | TCCAGTGGGGACATGGGTGT | 6.8 | 0.9946 |
| 7581 | ApoC3_Int3_Ex4_T31 | AGCTCGCAGGATGGATAGGC | 6.8 | 0.992 |
| 9527 | ApoC3_Int1_Int3_T64 | ACTCCTTGTTGTTGCCCTCC | 6.7 | 0.9801 |
| 9838 | ApoC3_Int3_Ex4_T26 | GGTCCCATGGTTGCCTACAG | 6.7 | 0.9951 |
| 7624 | ApoC3_Int3_Ex4_T33 | AGCTTCTTGTCCAGCTTTAT | 6.6 | 0.9898 |
| 7621 | ApoC3_Int3_Ex4_T35 | TCTTGTCCAGCTTTATTGGG | 6.1 | 0.9907 |
| 7540 | ApoC3_Int3_Ex4_T32 | GGGCATGAGAACTCCTCTGT | 5.9 | 0.9947 |
| 7585 | ApoC3_Int3_Ex4_T40 | GACCCAAGGAGCTCGCAGGA | 5.9 | 0.9921 |
| 7090 | ApoC3_Int1_Int3_T62 | AGTGCTTACGGGCAGAGGCC | 5.8 | 0.9558 |
| 9841 | ApoC3_Int3_Ex4_T52 | TTGCTTCCCCTGACTGATTT | 5.6 | 0.9939 |
| 9528 | ApoC3_Int1_Int3_T91 | TGTTGCCCTCCTGGCGCTCC | 5.5 | 0.9922 |
| 7174 | ApoC3_Int1_Int3_T67 | AGCACCTCCATTCCATTGTT | 5.5 | 0.9899 |
| 7534 | ApoC3_Int3_Ex4_T3 | CCCACTGGACGACACCAGTC | 5.5 | 0.9936 |
| 7101 | ApoC3_Int1_Int3_T31 | CTTGACCACCCATTGGGACT | 5.4 | 0.9823 |
| 7555 | ApoC3_Int3_Ex4_T66 | TTTCAGGGAACTGAAGCCAT | 5.3 | 0.9935 |
| 9852 | ApoC3_Int3_Ex4_T1 | AGACTACTGGAGCACCGTTA | 5.3 | 0.9914 |
| 7036 | ApoC3_Int1_Int3_T68 | CGGGCTCTCAGAAGGGGGAC | 5.1 | 0.9936 |
| 7108 | ApoC3_Int1_Int3_T21 | GAGTGGGGTGGATCGGCCTC | 5.1 | 0.982 |
| 9549 | ApoC3_Int1_Int3_T59 | CTTGGGGATCCCAGTCCCAA | 5 | 0.9797 |
| 9531 | ApoC3_Int1_Int3_T14 | CTCTGCCCGTAAGCACTTGG | 4.9 | 0.9573 |
| 9822 | ApoC3_Int3_Ex4_T37 | TGTCGTCCAGTGAAGTTGAG | 4.8 | 0.9889 |
| 7175 | ApoC3_Int1_Int3_T49 | GAGCACCTCCATTCCATTGT | 4.7 | 0.9917 |
| 9829 | ApoC3_Int3_Ex4_T5 | CCTGACTGGTGTCGTCCAGT | 4.7 | 0.993 |
| 9814 | ApoC3_Int3_Ex4_T54 | CTGTGGGGGATTCCTGCCTG | 4.5 | 0.993 |
| 7068 | ApoC3_Int1_Int3_T83 | TGTCCTGTGAGGGGCACCCC | 4 | 0.974 |
| 7092 | ApoC3_Int1_Int3_T20 | CACCAAGTGCTTACGGGCAG | 3.8 | 0.9795 |
| 9533 | ApoC3_Int1_Int3_T28 | CCGTAAGCACTTGGTGGGAC | 3.8 | 0.9571 |
| 7214 | ApoC3_Int1_Int3_T1 | GGGCTAAAACGGCACGCCCT | 3.7 | 0.982 |
| 7539 | ApoC3_Int3_Ex4_T25 | AACTCCTCTGTAGGCAACCA | 3.2 | 0.994 |
| 7591 | ApoC3_Int3_Ex4_T56 | GGGGCAGCCCTGGAGATTGC | 3.1 | 0.9943 |
| 9512 | ApoC3_Int1_Int3_T119 | AGGGAGGGGTCCAGAGGCAT | 2.8 | 0.9695 |
| 9535 | ApoC3_Int1_Int3_T104 | AGCACTTGGTGGGACTGGGC | 2.4 | 0.9758 |
| 7105 | ApoC3_Int1_Int3_T26 | TCGGCCTCTGGACGAGCCCT | 2.1 | 0.9838 |
| 7586 | ApoC3_Int3_Ex4_T19 | GCAGGACCCAAGGAGCTCGC | 2 | 0.9944 |
| 9828 | ApoC3_Int3_Ex4_T7 | TCCTGACTGGTGTCGTCCAG | 1.9 | 0.9942 |
| 9855 | ApoC3_Int3_Ex4_T64 | AGGACAAGTTCTCTGAGTTC | 1.7 | 0.9939 |
| 7594 | ApoC3_Int3_Ex4_T58 | GCAACCTACAGGGGCAGCCC | 1.7 | 0.9935 |
| 9500 | ApoC3_Int1_Int3_T43 | CAGCTAAGGTTCTACCTTAG | 1.4 | 0.995 |
| 7106 | ApoC3_Int1_Int3_T33 | ATCGGCCTCTGGACGAGCCC | 1.3 | 0.9845 |
| 7558 | ApoC3_Int3_Ex4_T12 | CGGTGCTCCAGTAGTCTTTC | 1 | 0.9939 |
| 9872 | ApoC3_Int3_Ex4_T57 | ATCTCCAGGGCTGCCCCTGT | 0.8 | 0.9936 |
| 9844 | ApoC3_Int3_Ex4_T11 | CCCCTGACTGATTTAGGGGC | 0.1 | 0.9938 |
| 9845 | ApoC3_Int3_Ex4_T29 | CCCTGACTGATTTAGGGGCT | 0 | 0.9928 |
| 7579 | ApoC3_Int3_Ex4_T61 | GATGGATAGGCAGGTGGACT | 0 | 0.9944 |
| 9491 | ApoC3_Int1_Int3_T25 | AGCCCGTATTAGCAGGGAGC | | |
| 7095 | ApoC3_Int1_Int3_T51 | CAGTCCCACCAAGTGCTTAC | | |

[0502] Note that the SEQ ID NOs represent the DNA sequence of the genomic target, while the gRNA or sgRNA spacer sequence will be the RNA version of the DNA sequence.

[0503] The gRNA or pairs of gRNA with significant activity can then be followed up in cultured cells to measure alteration of the APOCIII gene. Off-target events can be followed again. A variety of cells can be transfected and the level of gene editing and possible off-target events measured. These experiments allow optimization of nuclease and donor design and delivery.

### Example 9—Testing of Preferred Guides in Cells for Off-Target Activity

[0504] The gRNAs having the best on-target activity from the IVT screen in the above example are tested for off-target activity using Hybrid capture assays, GUIDE Seq, and whole genome sequencing, in addition to other methods.

### Example 10—In Vivo Testing in Relevant Animal Model

[0505] After the CRISPR-Cas9/guide combinations have been assessed, the lead formulations will be tested in vivo in an animal model.

[0506] Culture in human cells allows direct testing on the human target and the background human genome, as described above.

[0507] Preclinical efficacy and safety evaluations can be observed through engraftment of modified mouse or human hepatocytes in a mouse model. The modified cells can be observed in the months after engraftment.

### XI. EQUIVALENTS AND SCOPE

[0508] Those skilled in the art will recognize, or be able to ascertain using no more than routine experimentation, many equivalents to the specific examples in accordance with the invention described herein. The scope of the present disclosure is not intended to be limited to the above Description, but rather is as set forth in the appended claims.

[0509] Claims or descriptions that include “or” between one or more members of a group are considered satisfied if one, more than one, or all of the group members are present in, employed in, or otherwise relevant to a given product or process unless indicated to the contrary or otherwise evident from the context. The present disclosure includes examples in which exactly one member of the group is present in, employed in, or otherwise relevant to a given product or process. The present disclosure includes examples in which more than one, or the entire group members are present in, employed in, or otherwise relevant to a given product or process.

[0510] In addition, it is to be understood that any particular example of the present disclosure that falls within the prior art may be explicitly excluded from any one or more of the claims. Since such examples are deemed to be known to one of ordinary skill in the art, they may be excluded even if the exclusion is not set forth explicitly herein. Any particular example of the compositions of the present disclosure (e.g., any antibiotic, therapeutic or active ingredient; any method of production; any method of use; etc.) can be excluded from any one or more claims, for any reason, whether or not related to the existence of prior art.

[0511] It is to be understood that the words which have been used are words of description rather than limitation, and that changes may be made within the purview of the appended claims without departing from the true scope and spirit of the present disclosure in its broader aspects.

[0512] While the present invention has been described at some length and with some particularity with respect to the several described examples, it is not intended that it should be limited to any such particulars or examples or any particular example, but it is to be construed with references to the appended claims so as to provide the broadest possible interpretation of such claims in view of the prior art and, therefore, to effectively encompass the intended scope of the invention.

[0513] Note Regarding Illustrative Examples

[0514] While the present disclosure provides descriptions of various specific aspects for the purpose of illustrating various aspects of the present invention and/or its potential applications, it is understood that variations and modifications will occur to those skilled in the art. Accordingly, the invention or inventions described herein should be understood to be at least as broad as they are claimed, and not as more narrowly defined by particular illustrative aspects provided herein.

[0515] Any patent, publication, or other disclosure material identified herein is incorporated by reference into this specification in its entirety unless otherwise indicated, but only to the extent that the incorporated material does not conflict with existing descriptions, definitions, statements, or other disclosure material expressly set forth in this specification. As such, and to the extent necessary, the express disclosure as set forth in this specification supersedes any conflicting material incorporated by reference. Any material, or portion thereof, that is said to be incorporated by reference into this specification, but which conflicts with existing definitions, statements, or other disclosure material set forth herein, is only incorporated to the extent that no conflict arises between that incorporated material and the existing disclosure material. Applicants reserve the right to amend this specification to expressly recite any subject matter, or portion thereof, incorporated by reference herein.

The application's sequence listing, which the Patent Office published only in electronic form, follows.

SEQUENCE LISTING (14385 sequences)

SEQ ID NO: 1 - protein, 1368 aa, Streptococcus pyogenes [sequence omitted]

SEQ ID NO: 2 - DNA, 4107 bp, Streptococcus pyogenes
atggataagaaatactcaataggcttagatatcggcacaaatagcgtcggatgggcggtgatcactgatgaatataaggttccgtctaaaaagttcaaggttctgggaaatacagaccgccacagtatcaaaaaaaatcttataggggctcttttatttgacagtggagagacagcggaagcgactcgtctcaaacggacagctcgtagaaggtatacacgtcggaagaatcgtatttgttatctacaggagattttttcaaatgagatggcgaaagtagatgatagtttctttcatcgacttgaagagtcttttttggtggaagaagacaagaagcatgaacgtcatcctatttttggaaatatagtagatgaagttgcttatcatgagaaatatccaactatctatcatctgcgaaaaaaattggtagattctactgataaagcggatttgcgcttaatctatttggccttagcgcatatgattaagtttcgtggtcattttttgattgagggagatttaaatcctgataatagtgatgtggacaaactatttatccagttggtacaaacctacaatcaattatttgaagaaaaccctattaacgcaagtggagtagatgctaaagcgattctttctgcacgattgagtaaatcaagacgattagaaaatctcattgctcagctccccggtgagaagaaaaatggcttatttgggaatctcattgctttgtcattgggtttgacccctaattttaaatcaaattttgatttggcagaagatgctaaattacagctttcaaaagatacttacgatgatgatttagataatttattggcgcaaattggagatcaatatgctgatttgtttttggcagctaagaatttatcagatgctattttactttcagatatcctaagagtaaatactgaaataactaaggctcccctatcagcttcaatgattaaacgctacgatgaacatcatcaagacttgactcttttaaaagctttagttcgacaacaacttccagaaaagtataaagaaatcttttttgatcaatcaaaaaacggatatgcaggttatattgatgggggagctagccaagaagaattttataaatttatcaaaccaattttagaaaaaatggatggtactgaggaattattggtgaaactaaatcgtgaagatttgctgcgcaagcaacggacctttgacaacggctctattccccatcaaattcacttgggtgagctgcatgctattttgagaagacaagaagacttttatccatttttaaaagacaatcgtgagaagattgaaaaaatcttgacttttcgaattccttattatgttggtccattggcgcgtggcaatagtcgttttgcatggatgactcggaagtctgaagaaacaattaccccatggaattttgaagaagttgtcgataaaggtgcttcagctcaatcatttattgaacgcatgacaaactttgataaaaatcttccaaatgaaaaagtactaccaaaacatagtttgctttatgagtattttacggtttataacgaattgacaaaggtcaaatatgttactgaaggaatgcgaaaaccagcatttctttcaggtgaacagaagaaagccattgttgatttactcttcaaaacaaatcgaaaagtaaccgttaagcaattaaaagaagattatttcaaaaaaatagaatgttttgatagtgttgaaatttcaggagttgaagatagatttaatgcttcattaggtacctaccatgatttgctaaaaattattaaagataaagattttttggataatgaagaaaatgaagatatcttagaggatattgttttaacattgaccttatttgaagatagggagatgattgaggaaagacttaaaacatatgctcacctctttgatgataaggtgatgaaacagcttaaacgtcgccgttatactggttggggacgtttgtctcgaaaattgattaatggtattagggataagcaatctggcaaaacaatattagattttttgaaatcagatggttttgccaatcgcaattttatgcagctgatccatgatgatagtttgacatttaaagaagacattcaaaaagcacaagtgtctggacaaggcgatagtttacatgaacatattgcaaatttagctggtagccctgctattaaaaaaggtattttacagactgtaaaagttgttgatgaattggtcaaagtaatggggcggcataagccagaaaatatcgttattgaaatggcacgtgaaaatcagacaactcaaaagggccagaaaaattcgcgagagcgtatgaaacgaatcgaagaaggtatcaaagaattaggaagtcagattcttaaagagcatcctgttgaaaatactcaattgcaaaatgaaaagctctatctctattatctccaaaatggaagagacatgtatgtggaccaagaattagatattaatcgtttaagtgattatgatgtcgatcacattgttccacaaagtttccttaaagacgattcaatagacaataaggtcttaacgcgttctgataaaaatcgtggtaaatcggataacgttccaagtgaagaagtagtcaaaaagatgaaaaactattggagacaacttctaaacgccaagttaatcactcaacgtaagtttgataatttaacgaaagctgaacgtggaggtttgagtgaacttgataaagctggttttatcaaacgccaattggttgaaactcgccaaatcactaagcatgtggcacaaattttggatagtcgcatgaatactaaatacgatgaaaatgataaacttattcgagaggttaaagtgattaccttaaaatctaaattagtttctgacttccgaaaagatttccaattctataaagtacgtgagattaacaattaccatcatgcccatgatgcgtatctaaatgccgtcgttggaactgctttgattaagaaatatccaaaacttgaatcggagtttgtctatggtgattataaagtttatgatgttcgtaaaatgattgctaagtctgagcaagaaataggcaaagcaaccgcaaaatatttcttttactctaatatcatgaacttcttcaaaacagaaattacacttgcaaatggagagattcgcaaacgccctctaatcgaaactaatggggaaactggagaaattgtctgggataaagggcgagattttgccacagtgcgcaaagtattgtccatgccccaagtcaatattgtcaagaaaacagaagtacagacaggcggattctccaaggagtcaattttaccaaaaagaaattcggacaagcttattgctcgtaaaaaagactgggatccaaaaaaatatggtggttttgatagtccaacggtagcttattcagtcctagtggttgctaaggtggaaaaagggaaatcgaagaagttaaaatccgttaaagagttactagggatcacaattatggaaagaagttcctttgaaaaaaatccgattgactttttagaagctaaaggatataaggaagttaaaaaagacttaatcattaaactacctaaatatagtctttttgagttagaaaacggtcgtaaacggatgctggctagtgccggagaattacaaaaaggaaatgagctggctctgccaagcaaatatgtgaattttttatatttagctagtcattatgaaaagttgaagggtagtccagaagataacgaacaaaaacaattgtttgtggagcagcataagcattatttagatgagattattgagcaaatcagtgaattttctaagcgtgttattttagcagatgccaatttagataaagttcttagtgcatataacaaacatagagacaaaccaatacgtgaacaagcagaaaatattattcatttatttacgttgacgaatcttggagctcccgctgcttttaaatattttgatacaacaattgatcgtaaacgatatacgtctacaaaagaagttttagatgccactcttatccatcaatccatcactggtctttatgaaacacgcattgatttgagtcagctaggaggtgactga

SEQ ID NO: 3 - DNA, 4107 bp, Streptococcus pyogenes
atggacaagaagtactccattgggctcgctatcggcacaaacagcgtcggctgggccgtcattacggacgagtacaaggtgccgagcaaaaaattcaaagttctgggcaataccgatcgccacagcataaagaagaacctcattggcgccctcctgttcgactccggggagacggccgaagccacgcggctcaaaagaacagcacggcgcagatatacccgcagaaagaatcggatctgctacctgcaggagatctttagtaatgagatggctaaggtggatgactctttcttccataggctggaggagtcctttttggtggaggaggataaaaagcacgagcgccacccaatctttggcaatatcgtggacgaggtggcgtaccatgaaaagtacccaaccatatatcatctgaggaagaagcttgtagacagtactgataaggctgacttgcggttgatctatctcgcgctggcgcatatgatcaaatttcggggacacttcctcatcgagggggacctgaacccagacaacagcgatgtcgacaaactctttatccaactggttcagacttacaatcagcttttcgaagagaacccgatcaacgcatccggagttgacgccaaagcaatcctgagcgctaggctgtccaaatcccggcggctcgaaaacctcatcgcacagctccctggggagaagaagaacggcctgtttggtaatcttatcgccctgtcactcgggctgacccccaactttaaatctaacttcgacctggccgaagatgccaagcttcaactgagcaaagacacctacgatgatgatctcgacaatctgctggcccagatcggcgaccagtacgcagacctttttttggcggcaaagaacctgtcagacgccattctgctgagtgatattctgcgagtgaacacggagatcaccaaagctccgctgagcgctagtatgatcaagcgctatgatgagcaccaccaagacttgactttgctgaaggcccttgtcagacagcaactgcctgagaagtacaaggaaattttcttcgatcagtctaaaaatggctacgccggatacattgacggcggagcaagccaggaggaattttacaaatttattaagcccatcttggaaaaaatggacggcaccgaggagctgctggtaaagcttaacagagaagatctgttgcgcaaacagcgcactttcgacaatggaagcatcccccaccagattcacctgggcgaactgcacgctatcctcaggcggcaagaggatttctacccctttttgaaagataacagggaaaagattgagaaaatcctcacatttcggataccctactatgtaggccccctcgcccggggaaattccagattcgcgtggatgactcgcaaatcagaagagaccatcactccctggaacttcgaggaagtcgtggataagggggcctctgcccagtccttcatcgaaaggatgactaactttgataaaaatctgcctaacgaaaaggtgcttcctaaacactctctgctgtacgagtacttcacagtttataacgagctcaccaaggtcaaatacgtcacagaagggatgagaaagccagcattcctgtctggagagcagaagaaagctatcgtggacctcctcttcaagacgaaccggaaagttaccgtgaaacagctcaaagaagactatttcaaaaagattgaatgtttcgactctgttgaaatcagcggagtggaggatcgcttcaacgcatccctgggaacgtatcacgatctcctgaaaatcattaaagacaaggacttcctggacaatgaggagaacgaggacattcttgaggacattgtcctcacccttacgttgtttgaagatagggagatgattgaagaacgcttgaaaacttacgctcatctcttcgacgacaaagtcatgaaacagctcaagaggcgccgatatacaggatgggggcggctgtcaagaaaactgatcaatgggatccgagacaagcagagtggaaagacaatcctggattttcttaagtccgatggatttgccaaccggaacttcatgcagttgatccatgatgactctctcacctttaaggaggacatccagaaagcacaagtttctggccagggggacagtcttcacgagcacatcgctaatcttgcaggtagcccagctatcaaaaagggaatactgcagaccgttaaggtcgtggatgaactcgtcaaagtaatgggaaggcataagcccgagaatatcgttatcgagatggcccgagagaaccaaactacccagaagggacagaagaacagtagggaaaggatgaagaggattgaagagggtataaaagaactggggtcccaaatccttaaggaacacccagttgaaaacacccagcttcagaatgagaagctctacctgtactacctgcagaacggcagggacatgtacgtggatcaggaactggacatcaatcggctctccgactacgacgtggctgctatcgtgccccagtcttttctcaaagatgattctattgataataaagtgttgacaagatccgataaagctagagggaagagtgataacgtcccctcagaagaagttgtcaagaaaatgaaaaattattggcggcagctgctgaacgccaaactgatcacacaacggaagttcgataatctgactaaggctgaacgaggtggcctgtctgagttggataaagccggcttcatcaaaaggcagcttgttgagacacgccagatcaccaagcacgtggcccaaattctcgattcacgcatgaacaccaagtacgatgaaaatgacaaactgattcgagaggtgaaagttattactctgaagtctaagctggtctcagatttcagaaaggactttcagttttataaggtgagagagatcaacaattaccaccatgcgcatgatgcctacctgaatgcagtggtaggcactgcacttatcaaaaaatatcccaagcttgaatctgaatttgtttacggagactataaagtgtacgatgttaggaaaatgatcgcaaagtctgagcaggaaataggcaaggccaccgctaagtacttcttttacagcaatattatgaattttttcaagaccgagattacactggccaatggagagattcggaagcgaccacttatcgaaacaaacggagaaacaggagaaatcgtgtgggacaagggtagggatttcgcgacagtccggaaggtcctgtccatgccgcaggtgaacatcgttaaaaagaccgaagtacagaccggaggcttctccaaggaaagtatcctcccgaaaaggaacagcgacaagctgatcgcacgcaaaaaagattgggaccccaagaaatacggcggattcgattctcctacagtcgcttacagtgtactggttgtggccaaagtggagaaagggaagtctaaaaaactcaaaagcgtcaaggaactgctgggcatcacaatcatggagcgatcaagcttcgaaaaaaaccccatcgactttctcgaggcgaaaggatataaagaggtcaaaaaagacctcatcattaagcttcccaagtactctctctttgagcttgaaaacggccggaaacgaatgctcgctagtgcgggcgagctgcagaaaggtaacgagctggcactgccctctaaatacgttaatttcttgtatctggccagccactatgaaaagctcaaagggtctcccgaagataatgagcagaagcagctgttcgtggaacaacacaaacactaccttgatgagatcatcgagcaaataagcgaattctccaaaagagtgatcctcgccgacgctaacctcgataaggtgctttctgcttacaataagcacagggataagcccatcagggagcaggcagaaaacattatccacttgtttactctgaccaacttgggcgcgcctgcagccttcaagtacttcgacaccaccatagacagaaagcggtacacctctacaaaggaggtcctggacgccacactgattcatcagtcaattacggggctctatgaaacaagaatcgacctctctcagctcggtggagactaa

SEQ ID NO: 4 - DNA, 4140 bp, Streptococcus pyogenes
atggacaagaagtactccattgggctcgatatcggcacaaacagcgtcggctgggccgtcattacggacgagtacaaggtgccgagcaaaaaattcaaagttctgggcaataccgatcgccacagcataaagaagaacctcattggcgccctcctgttcgactccggggagacggccgaagccacgcggctcaaaagaacagcacggcgcagatatacccgcagaaagaatcggatctgctacctgcaggagatctttagtaatgagatggctaaggtggatgactctttcttccataggctggaggagtcctttttggtggaggaggataaaaagcacgagcgccacccaatctttggcaatatcgtggacgaggtggcgtaccatgaaaagtacccaaccatatatcatctgaggaagaagcttgtagacagtactgataaggctgacttgcggttgatctatctcgcgctggcgcatatgatcaaatttcggggacacttcctcatcgagggggacctgaacccagacaacagcgatgtcgacaaactctttatccaactggttcagacttacaatcagcttttcgaagagaacccgatcaacgcatccggagttgacgccaaagcaatcctgagcgctaggctgtccaaatcccggcggctcgaaaacctcatcgcacagctccctggggagaagaagaacggcctgtttggtaatcttatcgccctgtcactcgggctgacccccaactttaaatctaacttcgacctggccgaagatgccaagcttcaactgagcaaagacacctacgatgatgatctcgacaatctgctggcccagatcggcgaccagtacgcagacctttttttggcggcaaagaacctgtcagacgccattctgctgagtgatattctgcgagtgaacacggagatcaccaaagctccgctgagcgctagtatgatcaagcgctatgatgagcaccaccaagacttgactttgctgaaggcccttgtcagacagcaactgcctgagaagtacaaggaaattttcttcgatcagtctaaaaatggctacgccggatacattgacggcggagcaagccaggaggaattttacaaatttattaagcccatcttggaaaaaatggacggcaccgaggagctgctggtaaagcttaacagagaagatctgttgcgcaaacagcgcactttcgacaatggaagcatcccccaccagattcacctgggcgaactgcacgctatcctcaggcggcaagaggatttctacccctttttgaaagataacagggaaaagattgagaaaatcctcacatttcggataccctactatgtaggccccctcgcccggggaaattccagattcgcgtggatgactcgcaaatcagaagagaccatcactccctggaacttcgaggaagtcgtggataagggggcctctgcccagtccttcatcgaaaggatgactaactttgataaaaatctgcctaacgaaaaggtgcttcctaaacactctctgctgtacgagtacttcacagtttataacgagctcaccaaggtcaaatacgtcacagaagggatgagaaagccagcattcctgtctggagagcagaagaaagctatcgtggacctcctcttcaagacgaaccggaaagttaccgtgaaacagctcaaagaagactatttcaaaaagattgaatgtttcgactctgttgaaatcagcggagtggaggatcgcttcaacgcatccctgggaacgtatcacgatctcctgaaaatcattaaagacaaggacttcctggacaatgaggagaacgaggacattcttgaggacattgtcctcacccttacgttgtttgaagatagggagatgattgaagaacgcttgaaaacttacgctcatctcttcgacgacaaagtcatgaaacagctcaagaggcgccgatatacaggatgggggcggctgtcaagaaaactgatcaatgggatccgagacaagcagagtggaaagacaatcctggattttcttaagtccgatggatttgccaaccggaacttcatgcagttgatccatgatgactctctcacctttaaggaggacatccagaaagcacaagtttctggccagggggacagtcttcacgagcacatcgctaatcttgcaggtagcccagctatcaaaaagggaatactgcagaccgttaaggtcgtggatgaactcgtcaaagtaatgggaaggcataagcccgagaatatcgttatcgagatggcccgagagaaccaaactacccagaagggacagaagaacagtagggaaaggatgaagaggattgaagagggtataaaagaactggggtcccaaatccttaaggaacacccagttgaaaacacccagcttcagaatgagaagctctacctgtactacctgcagaacggcagggacatgtacgtggatcaggaactggacatcaatcggctctccgactacgacgtggatcatatcgtgccccagtcttttctcaaagatgattctattgataataaagtgttgacaagatccgataaaaatagagggaagagtgataacgtcccctcagaagaagttgtcaagaaaatgaaaaattattggcggcagctgctgaacgccaaactgatcacacaacggaagttcgataatctgactaaggctgaacgaggtggcctgtctgagttggataaagccggcttcatcaaaaggcagcttgttgagacacgccagatcaccaagcacgtggcccaaattctcgattcacgcatgaacaccaagtacgatgaaaatgacaaactgattcgagaggtgaaagttattactctgaagtctaagctggtctcagatttcagaaaggactttcagttttataaggtgagagagatcaacaattaccaccatgcgcatgatgcctacctgaatgcagtggtaggcactgcacttatcaaaaaatatcccaagcttgaatctgaatttgtttacggagactataaagtgtacgatgttaggaaaatgatcgcaaagtctgagcaggaaataggcaaggccaccgctaagtacttcttttacagcaatattatgaattttttcaagaccgagattacactggccaatggagagattcggaagcgaccacttatcgaaacaaacggagaaacaggagaaatcgtgtgggacaagggtagggatttcgcgacagtccggaaggtcctgtccatgccgcaggtgaacatcgttaaaaagaccgaagtacagaccggaggcttctccaaggaaagtatcctcccgaaaaggaacagcgacaagctgatcgcacgcaaaaaagattgggaccccaagaaatacggcggattcgattctcctacagtcgcttacagtgtactggttgtggccaaagtggagaaagggaagtctaaaaaactcaaaagcgtcaaggaactgctgggcatcacaatcatggagcgatcaagcttcgaaaaaaaccccatcgactttctcgaggcgaaaggatataaagaggtcaaaaaagacctcatcattaagcttcccaagtactctctctttgagcttgaaaacggccggaaacgaatgctcgctagtgcgggcgagctgcagaaaggtaacgagctggcactgccctctaaatacgttaatttcttgtatctggccagccactatgaaaagctcaaagggtctcccgaagataatgagcagaagcagctgttcgtggaacaacacaaacactaccttgatgagatcatcgagcaaataagcgaattctccaaaagagtgatcctcgccgacgctaacctcgataaggtgctttctgcttacaataagcacagggataagcccatcagggagcaggcagaaaacattatccacttgtttactctgaccaacttgggcgcgcctgcagccttcaagtacttcgacaccaccatagacagaaagcggtacacctctacaaaggaggtcctggacgccacactgattcatcagtcaattacggggctctatgaaacaagaatcgacctctctcagctcggtggagacagcagggctgaccccaagaagaagaggaaggtgtga

SEQ ID NO: 5 - DNA, 4200 bp, Streptococcus pyogenes
atggacaagaagtactccattgggctcgatatcggcacaaacagcgtcggctgggccgtcattacggacgagtacaaggtgccgagcaaaaaattcaaagttctgggcaataccgatcgccacagcataaagaagaacctcattggcgccctcctgttcgactccggggagacggccgaagccacgcggctcaaaagaacagcacggcgcagatatacccgcagaaagaatcggatctgctacctgcaggagatctttagtaatgagatggctaaggtggatgactctttcttccataggctggaggagtcctttttggtggaggaggataaaaagcacgagcgccacccaatctttggcaatatcgtggacgaggtggcgtaccatgaaaagtacccaaccatatatcatctgaggaagaagcttgtagacagtactgataaggctgacttgcggttgatctatctcgcgctggcgcatatgatcaaatttcggggacacttcctcatcgagggggacctgaacccagacaacagcgatgtcgacaaactctttatccaactggttcagacttacaatcagcttttcgaagagaacccgatcaacgcatccggagttgacgccaaagcaatcctgagcgctaggctgtccaaatcccggcggctcgaaaacctcatcgcacagctccctggggagaagaagaacggcctgtttggtaatcttatcgccctgtcactcgggctgacccccaactttaaatctaacttcgacctggccgaagatgccaagcttcaactgagcaaagacacctacgatgatgatctcgacaatctgctggcccagatcggcgaccagtacgcagacctttttttggcggcaaagaacctgtcagacgccattctgctgagtgatattctgcgagtgaacacggagatcaccaaagctccgctgagcgctagtatgatcaagcgctatgatgagcaccaccaagacttgactttgctgaaggcccttgtcagacagcaactgcctgagaagtacaaggaaattttcttcgatcagtctaaaaatggctacgccggatacattgacggcggagcaagccaggaggaattttacaaatttattaagcccatcttggaaaaaatggacggcaccgaggagctgctggtaaagcttaacagagaagatctgttgcgcaaacagcgcactttcgacaatggaagcatcccccaccagattcacctgggcgaactgcacgctatcctcaggcggcaagaggatttctacccctttttgaaagataacagggaaaagattgagaaaatcctcacatttcggataccctactatgtaggccccctcgcccggggaaattccagattcgcgtggatgactcgcaaatcagaagagaccatcactccctggaacttcgaggaagtcgtggataagggggcctctgcccagtccttcatcgaaaggatgactaactttgataaaaatctgcctaacgaaaaggtgcttcctaaacactctctgctgtacgagtacttcacagtttataacgagctcaccaaggtcaaatacgtcacagaagggatgagaaagccagcattcctgtctggagagcagaagaaagctatcgtggacctcctcttcaagacgaaccggaaagttaccgtgaaacagctcaaagaagactatttcaaaaagattgaatgtttcgactctgttgaaatcagcggagtggaggatcgcttcaacgcatccctgggaacgtatcacgatctcctgaaaatcattaaagacaaggacttcctggacaatgaggagaacgaggacattcttgaggacattgtcctcacccttacgttgtttgaagatagggagatgattgaagaacgcttgaaaacttacgctcatctcttcgacgacaaagtcatgaaacagctcaagaggcgccgatatacaggatgggggcggctgtcaagaaaactgatcaatgggatccgagacaagcagagtggaaagacaatcctggattttcttaagtccgatggatttgccaaccggaacttcatgcagttgatccatgatgactctctcacctttaaggaggacatccagaaagcacaagtttctggccagggggacagtcttcacgagcacatcgctaatcttgcaggtagcccagctatcaaaaagggaatactgcagaccgttaaggtcgtggatgaactcgtcaaagtaatgggaaggcataagcccgagaatatcgttatcgagatggcccgagagaaccaaactacccagaagggacagaagaacagtagggaaaggatgaagaggattgaagagggtataaaagaactggggtcccaaatccttaaggaacacccagttgaaaacacccagcttcagaatgagaagctctacctgtactacctgcagaacggcagggacatgtacgtggatcaggaactggacatcaatcggctctccgactacgacgtggatcatatcgtgccccagtcttttctcaaagatgattctattgataataaagtgttgacaagatccgataaaaatagagggaagagtgataacgtcccctcagaagaagttgtcaagaaaatgaaaaattattggcggcagctgctgaacgccaaactgatcacacaacggaagttcgataatctgactaaggctgaacgaggtggcctgtctgagttggataaagccggcttcatcaaaaggcagcttgttgagacacgccagatcaccaagcacgtggcccaaattctcgattcacgcatgaacaccaagtacgatgaaaatgacaaactgattcgagaggtgaaagttattactctgaagtctaagctggtctcagatttcagaaaggactttcagttttataaggtgagagagatcaacaattaccaccatgcgcatgatgcctacctgaatgcagtggtaggcactgcacttatcaaaaaatatcccaagcttgaatctgaatttgtttacggagactataaagtgtacgatgttaggaaaatgatcgcaaagtctgagcaggaaataggcaaggccaccgctaagtacttcttttacagcaatattatgaattttttcaagaccgagattacactggccaatggagagattcggaagcgaccacttatcgaaacaaacggagaaacaggagaaatcgtgtgggacaagggtagggatttcgcgacagtccggaaggtcctgtccatgccgcaggtgaacatcgttaaaaagaccgaagtacagaccggaggcttctccaaggaaagtatcctcccgaaaaggaacagcgacaagctgatcgcacgcaaaaaagattgggaccccaagaaatacggcggattcgattctcctacagtcgcttacagtgtactggttgtggccaaagtggagaaagggaagtctaaaaaactcaaaagcgtcaaggaactgctgggcatcacaatcatggagcgatcaagcttcgaaaaaaaccccatcgactttctcgaggcgaaaggatataaagaggtcaaaaaagacctcatcattaagcttcccaagtactctctctttgagcttgaaaacggccggaaacgaatgctcgctagtgcgggcgagctgcagaaaggtaacgagctggcactgccctctaaatacgttaatttcttgtatctggccagccactatgaaaagctcaaagggtctcccgaagataatgagcagaagcagctgttcgtggaacaacacaaacactaccttgatgagatcatcgagcaaataagcgaattctccaaaagagtgatcctcgccgacgctaacctcgataaggtgctttctgcttacaataagcacagggataagcccatcagggagcaggcagaaaacattatccacttgtttactctgaccaacttgggcgcgcctgcagccttcaagtacttcgacaccaccatagacagaaagcggtacacctctacaaaggaggtcctggacgccacactgattcatcagtcaattacggggctctatgaaacaagaatcgacctctctcagctcggtggagacgcggccgcagatccaaaaaagaagagaaaggtagatccaaaaaagaagagaaaggtagatccaaaaaagaagagaaaggtagatacggccgcatag

SEQ ID NO: 6 - DNA, 4326 bp, Streptococcus pyogenes
atggacaagaagtactccattgggctcgctatcggcacaaacagcgtcggctgggccgtcattacggacgagtacaaggtgccgagcaaaaaattcaaagttctgggcaataccgatcgccacagcataaagaagaacctcattggcgccctcctgttcgactccggggagacggccgaagccacgcggctcaaaagaacagcacggcgcagatatacccgcagaaagaatcggatctgctacctgcaggagatctttagtaatgagatggctaaggtggatgactctttcttccataggctggaggagtcctttttggtggaggaggataaaaagcacgagcgccacccaatctttggcaatatcgtggacgaggtggcgtaccatgaaaagtacccaaccatatatcatctgaggaagaagcttgtagacagtactgataaggctgacttgcggttgatctatctcgcgctggcgcatatgatcaaatttcggggacacttcctcatcgagggggacctgaacccagacaacagcgatgtcgacaaactctttatccaactggttcagacttacaatcagcttttcgaagagaacccgatcaacgcatccggagttgacgccaaagcaatcctgagcgctaggctgtccaaatcccggcggctcgaaaacctcatcgcacagctccctggggagaagaagaacggcctgtttggtaatcttatcgccctgtcactcgggctgacccccaactttaaatctaacttcgacctggccgaagatgccaagcttcaactgagcaaagacacctacgatgatgatctcgacaatctgctggcccagatcggcgaccagtacgcagacctttttttggcggcaaagaacctgtcagacgccattctgctgagtgatattctgcgagtgaacacggagatcaccaaagctccgctgagcgctagtatgatcaagcgctatgatgagcaccaccaagacttgactttgctgaaggcccttgtcagacagcaactgcctgagaagtacaaggaaattttcttcgatcagtctaaaaatggctacgccggatacattgacggcggagcaagccaggaggaattttacaaatttattaagcccatcttggaaaaaatggacggcaccgaggagctgctggtaaagcttaacagagaagatctgttgcgcaaacagcgcactttcgacaatggaagcatcccccaccagattcacctgggcgaactgcacgctatcctcaggcggcaagaggatttctacccctttttgaaagataacagggaaaagattgagaaaatcctcacatttcggataccctactatgtaggccccctcgcccggggaaattccagattcgcgtggatgactcgcaaatcagaagagaccatcactccctggaacttcgaggaagtcgtggataagggggcctctgcccagtccttcatcgaaaggatgactaactttgataaaaatctgcctaacgaaaaggtgcttcctaaacactctctgctgtacgagtacttcacagtttataacgagctcaccaaggtcaaatacgtcacagaagggatgagaaagccagcattcctgtctggagagcagaagaaagctatcgtggacctcctcttcaagacgaaccggaaagttaccgtgaaacagctcaaagaagactatttcaaaaagattgaatgtttcgactctgttgaaatcagcggagtggaggatcgcttcaacgcatccctgggaacgtatcacgatctcctgaaaatcattaaagacaaggacttcctggacaatgaggagaacgaggacattcttgaggacattgtcctcacccttacgttgtttgaagatagggagatgattgaagaacgcttgaaaacttacgctcatctcttcgacgacaaagtcatgaaacagctcaagaggcgccgatatacaggatgggggcggctgtcaagaaaactgatcaatgggatccgagacaagcagagtggaaagacaatcctggattttcttaagtccgatggatttgccaaccggaacttcatgcagttgatccatgatgactctctcacctttaaggaggacatccagaaagcacaagtttctggccagggggacagtcttcacgagcacatcgctaatcttgcaggtagcccagctatcaaaaagggaatactgcagaccgttaaggtcgtggatgaactcgtcaaagtaatgggaaggcataagcccgagaatatcgttatcgagatggcccgagagaaccaaactacccagaagggacagaagaacagtagggaaaggatgaagaggattgaagagggtataaaagaactggggtcccaaatccttaaggaacacccagttgaaaacacccagcttcagaatgagaagctctacctgtactacctgcagaacggcagggacatgtacgtggatcaggaactggacatcaatcggctctccgactacgacgtggctgctatcgtgccccagtcttttctcaaagatgattctattgataataaagtgttgacaagatccgataaagctagagggaagagtgataacgtcccctcagaagaagttgtcaagaaaatgaaaaattattggcggcagctgctgaacgccaaactgatcacacaacggaagttcgataatctgactaaggctgaacgaggtggcctgtctgagttggataaagccggcttcatcaaaaggcagcttgttgagacacgccagatcaccaagcacgtggcccaaattctcgattcacgcatgaacaccaagtacgatgaaaatgacaaactgattcgagaggtgaaagttattactctgaagtctaagctggtctcagatttcagaaaggactttcagttttataaggtgagagagatcaacaattaccaccatgcgcatgatgcctacctgaatgcagtggtaggcactgcacttatcaaaaaatatcccaagcttgaatctgaatttgtttacggagactataaagtgtacgatgttaggaaaatgatcgcaaagtctgagcaggaaataggcaaggccaccgctaagtacttcttttacagcaatattatgaattttttcaagaccgagattacactggccaatggagagattcggaagcgaccacttatcgaaacaaacggagaaacaggagaaatcgtgtgggacaagggtagggatttcgcgacagtccggaaggtcctgtccatgccgcaggtgaacatcgttaaaaagaccgaagtacagaccggaggcttctccaaggaaagtatcctcccgaaaaggaacagcgacaagctgatcgcacgcaaaaaagattgggaccccaagaaatacggcggattcgattctcctacagtcgcttacagtgtactggttgtggccaaagtggagaaagggaagtctaaaaaactcaaaagcgtcaaggaactgctgggcatcacaatcatggagcgatcaagcttcgaaaaaaaccccatcgactttctcgaggcgaaaggatataaagaggtcaaaaaagacctcatcattaagcttcccaagtactctctctttgagcttgaaaacggccggaaacgaatgctcgctagtgcgggcgagctgcagaaaggtaacgagctggcactgccctctaaatacgttaatttcttgtatctggccagccactatgaaaagctcaaagggtctcccgaagataatgagcagaagcagctgttcgtggaacaacacaaacactaccttgatgagatcatcgagcaaataagcgaattctccaaaagagtgatcctcgccgacgctaacctcgataaggtgctttctgcttacaataagcacagggataagcccatcagggagcaggcagaaaacattatccacttgtttactctgaccaacttgggcgcgcctgcagccttcaagtacttcgacaccaccatagacagaaagcggtacacctctacaaaggaggtcctggacgccacactgattcatcagtcaattacggggctctatgaaacaagaatcgacctctctcagctcggtggagacagcagggctgaccccaagaagaagaggaaggtggaggccagcggttccggacgggctgacgcattggacgattttgatctggatatgctgggaagtgacgccctcgatgattttgaccttgacatgcttggttcggatgcccttgatgactttgacctcgacatgctcggcagtgacgcccttgatgatttcgacctggacatgctgattaactctagatga

SEQ ID NO: 7 - DNA, 4359 bp, Streptococcus pyogenes
atgcccaagaagaagaggaaggtgggaagggggatggacaagaagtactccattgggctcgctatcggcacaaacagcgtcggctgggccgtcattacggacgagtacaaggtgccgagcaaaaaattcaaagttctgggcaataccgatcgccacagcataaagaagaacctcattggcgccctcctgttcgactccggggagacggccgaagccacgcggctcaaaagaacagcacggcgcagatatacccgcagaaagaatcggatctgctacctgcaggagatctttagtaatgagatggctaaggtggatgactctttcttccataggctggaggagtcctttttggtggaggaggataaaaagcacgagcgccacccaatctttggcaatatcgtggacgaggtggcgtaccatgaaaagtacccaaccatatatcatctgaggaagaagcttgtagacagtactgataaggctgacttgcggttgatctatctcgcgctggcgcatatgatcaaatttcggggacacttcctcatcgagggggacctgaacccagacaacagcgatgtcgacaaactctttatccaactggttcagacttacaatcagcttttcgaagagaacccgatcaacgcatccggagttgacgccaaagcaatcctgagcgctaggctgtccaaatcccggcggctcgaaaacctcatcgcacagctccctggggagaagaagaacggcctgtttggtaatcttatcgccctgtcactcgggctgacccccaactttaaatctaacttcgacctggccgaagatgccaagcttcaactgagcaaagacacctacgatgatgatctcgacaatctgctggcccagatcggcgaccagtacgcagacctttttttggcggcaaagaacctgtcagacgccattctgctgagtgatattctgcgagtgaacacggagatcaccaaagctccgctgagcgctagtatgatcaagcgctatgatgagcaccaccaagacttgactttgctgaaggcccttgtcagacagcaactgcctgagaagtacaaggaaattttcttcgatcagtctaaaaatggctacgccggatacattgacggcggagcaagccaggaggaattttacaaatttattaagcccatcttggaaaaaatggacggcaccgaggagctgctggtaaagcttaacagagaagatctgttgcgcaaacagcgcactttcgacaatggaagcatcccccaccagattcacctgggcgaactgcacgctatcctcaggcggcaagaggatttctacccctttttgaaagataacagggaaaagattgagaaaatcctcacatttcggataccctactatgtaggccccctcgcccggggaaattccagattcgcgtggatgactcgcaaatcagaagagaccatcactccctggaacttcgaggaagtcgtggataagggggcctctgcccagtccttcatcgaaaggatgactaactttgataaaaatctgcctaacgaaaaggtgcttcctaaacactctctgctgtacgagtacttcacagtttataacgagctcaccaaggtcaaatacgtcacagaagggatgagaaagccagcattcctgtctggagagcagaagaaagctatcgtggacctcctcttcaagacgaaccggaaagttaccgtgaaacagctcaaagaagactatttcaaaaagattgaatgtttcgactctgttgaaatcagcggagtggaggatcgcttcaacgcatccctgggaacgtatcacgatctcctgaaaatcattaaagacaaggacttcctggacaatgaggagaacgaggacattcttgaggacattgtcctcacccttacgttgtttgaagatagggagatgattgaagaacgcttgaaaacttacgctcatctcttcgacgacaaagtcatgaaacagctcaagaggcgccgatatacaggatgggggcggctgtcaagaaaactgatcaatgggatccgagacaagcagagtggaaagacaatcctggattttcttaagtccgatggatttgccaaccggaacttcatgcagttgatccatgatgactctctcacctttaaggaggacatccagaaagcacaagtttctggccagggggacagtcttcacgagcacatcgctaatcttgcaggtagcccagctatcaaaaagggaatactgcagaccgttaaggtcgtggatgaactcgtcaaagtaatgggaaggcataagcccgagaatatcgttatcgagatggcccgagagaaccaaactacccagaagggacagaagaacagtagggaaaggatgaagaggattgaagagggtataaaagaactggggtcccaaatccttaaggaacacccagttgaaaacacccagcttcagaatgagaagctctacctgtactacctgcagaacggcagggacatgtacgtggatcaggaactggacatcaatcggctctccgactacgacgtggctgctatcgtgccccagtcttttctcaaagatgattctattgataataaagtgttgacaagatccgataaagctagagggaagagtgataacgtcccctcagaagaagttgtcaagaaaatgaaaaattattggcggcagctgctgaacgccaaactgatcacacaacggaagttcgataatctgactaaggctgaacgaggtggcctgtctgagttggataaagccggcttcatcaaaaggcagcttgttgagacacgccagatcaccaagcacgtggcccaaattctcgattcacgcatgaacaccaagtacgatgaaaatgacaaactgattcgagaggtgaaagttattactctgaagtctaagctggtctcagatttcagaaaggactttcagttttataaggtgagagagatcaacaattaccaccatgcgcatgatgcctacctgaatgcagtggtaggcactgcacttatcaaaaaatatcccaagcttgaatctgaatttgtttacggagactataaagtgtacgatgttaggaaaatgatcgcaaagtctgagcaggaaataggcaaggccaccgctaagtacttcttttacagcaatattatgaattttttcaagaccgagattacactggccaatggagagattcggaagcgaccacttatcgaaacaaacggagaaacaggagaaatcgtgtgggacaagggtagggatttcgcgacagtccggaaggtcctgtccatgccgcaggtgaacatcgttaaaaagaccgaagtacagaccggaggcttctccaaggaaagtatcctcccgaaaaggaacagcgacaagctgatcgcacgcaaaaaagattgggaccccaagaaatacggcggattcgattctcctacagtcgcttacagtgtactggttgtggccaaagtggagaaagggaagtctaaaaaactcaaaagcgtcaaggaactgctgggcatcacaatcatggagcgatcaagcttcgaaaaaaaccccatcgactttctcgaggcgaaaggatataaagaggtcaaaaaagacctcatcattaagcttcccaagtactctctctttgagcttgaaaacggccggaaacgaatgctcgctagtgcgggcgagctgcagaaaggtaacgagctggcactgccctctaaatacgttaatttcttgtatctggccagccactatgaaaagctcaaagggtctcccgaagataatgagcagaagcagctgttcgtggaacaacacaaacactaccttgatgagatcatcgagcaaataagcgaattctccaaaagagtgatcctcgccgacgctaacctcgataaggtgctttctgcttacaataagcacagggataagcccatcagggagcaggcagaaaacattatccacttgtttactctgaccaacttgggcgcgcctgcagccttcaagtacttcgacaccaccatagacagaaagcggtacacctctacaaaggaggtcctggacgccacactgattcatcagtcaattacggggctctatgaaacaagaatcgacctctctcagctcggtggagacagcagggctgaccccaagaagaagaggaaggtggaggccagcggttccggacgggctgacgcattggacgattttgatctggatatgctgggaagtgacgccctcgatgattttgaccttgacatgcttggttcggatgcccttgatgactttgacctcgacatgctcggcagtgacgcccttgatgatttcgacctggacatgctgattaactctagatga

SEQ ID NO: 8 - protein, 1409 aa, Streptococcus thermophiles
MLFNKCIIISINLDFSNKEKCMTKPYSIGLDIGTNSVGWAVITDNYKVPSKKMKVLGNTSKKYIKKNLLGVLLFDSGITAEGRRLKRTARRRYTRRRNRILYLQEIFSTEMATLDDAFFQRLDDSFLVPDDKRDSKYPIFGNLVEEKVYHDEFPTIYHLRKYLADSTKKADLRLVYLALAHMIKYRGHFLIEGEFNSKNNDIQKNFQDFLDTYNAIFESDLSLENSKQLEEIVKDKISKLEKKDRILKLFPGEKNSGIFSEFLKLIVGNQADFRKCFNLDEKASLHFSKESYDEDLETLLGYIGDDYSDVFLKAKKLYDAILLSGFLTVTDNETEAPLSSAMIKRYNEHKEDLALLKEYIRNISLKTYNEVFKDDTKNGYAGYIDGKTNQEDFYVYLKNLLAEFEGADYFLEKIDREDFLRKQRTFDNGSIPYQIHLQEMRAILDKQAKFYPFLAKNKERIEKILTFRIPYYVGPLARGNSDFAWSIRKRNEKITPWNFEDVIDKESSAEAFINRMTSFDLYLPEEKVLPKHSLLYETFNVYNELTKVRFIAESMRDYQFLDSKQKKDIVRLYFKDKRKVTDKDIIEYLHAIYGYDGIELKGIEKQFNSSLSTYHDLLNIINDKEFLDDSSNEAIIEEIIHTLTIFEDREMIKQRLSKFENIFDKSVLKKLSRRHYTGWGKLSAKLINGIRDEKSGNTILDYLIDDGISNRNFMQLIHDDALSFKKKIQKAQIIGDEDKGNIKEVVKSLPGSPAIKKGILQSIKIVDELVKVMGGRKPESIVVEMARENQYTNQGKSNSQQRLKRLEKSLKELGSKILKENIPAKLSKIDNNALQNDRLYLYYLQNGKDMYTGDDLDIDRLSNYDIDHIIPQAFLKDNSIDNKVLVSSASNRGKSDDFPSLEVVKKRKTFWYQLLKSKLISQRKFDNLTKAERGGLLPEDKAGFIQRQLVETRQITKHVARLLDEKFNNKKDENNRAVRTVKIITLKSTLVSQFRKDFELYKVREINDFHHAHDAYLNAVIASALLKKYPKLEPEFVYGDYPKYNSFRERKSATEKVYFYSNIMNIFKKSISLADGRVIERPLIEVNEETGESVWNKESDLATVRRVLSYPQVNVVKKVEEQNHGLDRGKPKGLFNANLSSKPKPNSNENLVGAKEYLDPKKYGGYAGISNSFAVLVKGTIEKGAKKKITNVLEFQGISILDRINYRKDKLNFLLEKGYKDIELIIELPKYSLFELSDGSRRMLASILSTNNKRGEIHKGNQIFLSQKFVKLLYHAKRISNTINENHRKYVENHKKEFEELFYYILEFNENYVGAKKNGKLLNSAFQSWQNHSIDELCSSFIGPTGSERKGLFELTSRGSAADFEFLGVKIPRYRDYTPSSLLKDATLIHQSVTGLYETRIDLAKLGEG

SEQ ID NO: 9 - DNA, 4167 bp, Streptococcus thermophiles
atgactaagccatactcaattggacttgatattggaacgaatagtgttggatgggctgtaataactgataattacaaggttccgtctaaaaaaatgaaagtcttaggaaatacgagtaaaaagtatatcaaaaagaacctgttaggtgtattactctttgactctggaatcacagcagaaggaagaagattgaagcgtactgcaagaagacgttatactagacgccgtaatcgtatcctttatttgcaggaaatttttagcacggagatggctacattagatgatgctttctttcaaagacttgacgattcgtttttagttcctgatgataaacgtgatagtaagtatccgatatttggaaacttagtagaagaaaaagtctatcatgatgaatttccaactatctatcatttaaggaaatatttagcagatagtactaaaaaagcagatttgcgtctagtttatcttgcattggctcatatgattaaatatagaggtcacttcttaattgaaggagagtttaattcaaaaaataatgatattcagaagaattttcaagactttttggacacttataatgctatttttgaatcggatttatcacttgagaatagtaaacaacttgaggaaattgttaaagataagattagtaaattagaaaagaaagatcgtattttaaaactcttccctggggagaagaattcggggattttttcagagtttctaaagttgattgtaggaaatcaagctgattttaggaaatgttttaatttagacgaaaaagcctccttacatttttccaaagaaagctatgatgaagatttagagactttgttaggttatattggagatgattacagtgatgtctttctcaaagcaaagaaactttatgatgctattcttttatcgggttttctgactgtaactgataatgagacagaagcacctctctcttctgctatgataaagcgatataatgaacacaaagaagatttagcgttactaaaggaatatataagaaatatttcactaaaaacgtataatgaagtatttaaagatgacaccaaaaatggttatgctggttatattgatggaaaaacaaatcaggaagatttctacgtatatctaaaaaacctattggctgaatttgaaggtgcggattattttcttgaaaaaattgatcgagaagattttttgagaaagcaacgtacatttgacaatggttcgataccatatcagattcatcttcaagaaatgagagcaattcttgataagcaagctaaattttatcctttcttggctaaaaataaagaaagaatcgagaagattttaaccttccgaattccttattatgtaggtccacttgcgagagggaatagtgattttgcctggtcaataagaaaacgaaatgaaaaaattacaccttggaattttgaggacgttattgacaaagaatcttcggcagaggctttcattaatcgaatgactagttttgatttgtatttgccagaagagaaggtacttccaaagcatagtctcttatacgaaacttttaatgtatataatgaattaacaaaagttagatttattgccgaaagtatgagagattatcaatttttagatagtaagcagaagaaagatattgttagactttattttaaagataaaaggaaagttactgataaggatattattgaatatttacatgcaatttatgggtatgatggaattgaattaaaaggcatagagaaacagtttaattctagtttatctacttatcacgatcttttaaatattattaatgataaagagtttttggatgatagttcaaatgaagcgattatcgaagaaattatccatactttgacaatttttgaagatagagagatgataaaacaacgtctttcaaaatttgagaatatattcgataaatccgttttgaaaaagttatctcgtagacattacactggctggggtaagttatctgctaagcttattaatggtattcgagatgaaaaatctggtaatactattcttgattacttaattgatgatggtatttctaaccgtaatttcatgcaacttattcacgatgatgctctttcttttaaaaagaagatacagaaagcacaaattattggtgacgaagataaaggtaatattaaagaggtcgttaagtctttgccaggtagtcctgcgattaaaaaaggtattttacaaagcataaaaattgtagatgaattggtcaaagtaatgggaggaagaaaacccgagtcaattgttgttgagatggctcgtgaaaatcaatataccaatcaaggtaagtctaattcccaacaacgcttgaaacgtttagaaaaatctctcaaagagttaggtagtaagatacttaaggaaaatattcctgcaaaactttctaaaatagacaataacgcacttcaaaatgatcgactttacttatactatcttcaaaatggaaaagatatgtataccggagatgatttagatattgatagattaagtaattatgatattgatcatattattcctcaagcttttttgaaagataattctattgacaataaagtacttgtttcatctgctagtaaccgtggtaaatcagatgattttccaagtttagaggttgtcaaaaaaagaaagacattttggtatcaattattgaaatcaaaattaatttctcaacgaaaatttgataatctgacaaaagctgaacggggaggattgttacctgaggacaaagctggttttattcaacgccagttggttgaaacacgtcaaataacaaaacatgtagctcgtttacttgatgagaaatttaataataaaaaagatgaaaataatagagcggtacgaacagtaaaaattattaccttgaaatctaccttagtttctcaatttcgtaaggattttgaactttataaagttcgtgaaatcaatgattttcatcatgctcatgatgcttacttgaatgccgttatagcaagtgctttacttaagaaataccctaaactagagccagaatttgtgtacggtgattatccaaaatacaatagttttagagaaagaaagtccgctacagaaaaggtatatttctattcaaatatcatgaatatctttaaaaaatctatttctttagctgatggtagagttattgaaagaccacttattgaggtaaatgaggagaccggcgaatccgtttggaataaagaatctgatttagcaactgtaaggagagtactctcttatccgcaagtaaatgttgtgaaaaaagttgaggaacagaatcacggattggatagaggaaaaccaaagggattgtttaatgcaaatctttcctcaaagccaaaaccaaatagtaatgaaaatttagtaggtgctaaagagtatcttgaccccaaaaagtatggggggtatgctggaatttctaattcttttgctgttcttgttaaagggacaattgaaaaaggtgctaagaaaaaaataacaaatgtactagaatttcaaggtatttctattttagataggattaattatagaaaagataaacttaattttttacttgaaaaaggttataaagatattgagttaattattgaactacctaaatatagtttatttgaactttcagatggttcacgtcgtatgttggctagtattttgtcaacgaataataagaggggagagattcacaaaggaaatcagatttttctttcacagaagtttgtgaaattactttatcatgctaagagaataagtaacacaattaatgagaatcatagaaaatatgttgagaaccataaaaaagagtttgaagaattattttactacattcttgagtttaatgagaattatgttggagctaaaaagaatggtaaacttttaaactctgcctttcaatcttggcaaaatcatagtatagatgaactctgtagtagttttataggacctaccggaagtgaaagaaaggggctatttgaattaacctctcgtggaagtgctgctgattttgaatttttaggtgttaaaattccaaggtatagagactataccccatcatccctattaaaagatgccacacttattcatcaatctgttacaggcctctatgaaacacgaatagaccttgccaaactaggagagggttaa

SEQ ID NO: 10 - DNA, 3366 bp, Streptococcus thermophilus
atgagcgacctggtgctgggcctggacatcggcatcggcagcgtgggcgtgggcatcctgaacaaggtgaccggcgagatcatccacaagaacagtcgcatcttccctgctgctcaggctgagaacaacctggtgcgccgcaccaaccgccagggtcgccggcttgctcgccgcaagaagcaccggcgcgtgcgcctgaaccgcctgttcgaggagagcggcctgatcaccgacttcaccaagatcagcatcaacctgaacccctaccagctgcgcgtgaagggcctgaccgacgagctgagcaacgaggagctgttcatcgccctgaagaacatggtgaagcaccgcggcatcagctacctggacgacgccagcgacgacggcaacagcagcgtgggcgactacgcccagatcgtgaaggagaacagcaagcagctggagaccaagacccccggccagatccagctggagcgctaccagacctacggccagctgcgcggcgacttcaccgtggagaaggacggcaagaagcaccgcctgatcaacgtgttccccaccagcgcctaccgcagcgaggccctgcgcatcctgcagacccagcaggagttcaacccccagatcaccgacgagttcatcaaccgctacctggagatcctgaccggcaagcgcaagtactaccacggccccggcaacgagaagagccgcaccgactacggccgctaccgcaccagcggcgagaccctggacaacatcttcggcatcctgatcggcaagtgcaccttctaccccgacgagttccgcgccgccaaggccagctacaccgcccaggagttcaacctgctgaacgacctgaacaacctgaccgtgcccaccgagaccaagaagctgagcaaggagcagaagaaccagatcatcaactacgtgaagaacgagaaggccatgggccccgccaagctgttcaagtacatcgccaagctgctgagctgcgacgtggccgacatcaagggctaccgcatcgacaagagcggcaaggccgagatccacaccttcgaggcctaccgcaagatgaagaccctggagaccctggacatcgagcagatggaccgcgagaccctggacaagctggcctacgtgctgaccctgaacaccgagcgcgagggcatccaggaggccctggagcacgagttcgccgacggcagcttcagccagaagcaggtggacgagctggtgcagttccgcaaggccaacagcagcatcttcggcaagggctggcacaacttcagcgtgaagctgatgatggagctgatccccgagctgtacgagaccagcgaggagcagatgaccatcctgacccgcctgggcaagcagaagaccaccagcagcagcaacaagaccaagtacatcgacgagaagctgctgaccgaggagatctacaaccccgtggtggccaagagcgtgcgccaggccatcaagatcgtgaacgccgccatcaaggagtacggcgacttcgacaacatcgtgatcgagatggcccgcgagaccaacgaggacgacgagaagaaggccatccagaagatccagaaggccaacaaggacgagaaggacgccgccatgctgaaggccgccaaccagtacaacggcaaggccgagctgccccacagcgtgttccacggccacaagcagctggccaccaagatccgcctgtggcaccagcagggcgagcgctgcctgtacaccggcaagaccatcagcatccacgacctgatcaacaacagcaaccagttcgaggtggaccacatcctgcccctgagcatcaccttcgacgacagcctggccaacaaggtgctggtgtacgccaccgccaaccaggagaagggccagcgcaccccctaccaggccctggacagcatggacgacgcctggagcttccgcgagctgaaggccttcgtgcgcgagagcaagaccctgagcaacaagaagaaggagtacctgctgaccgaggaggacatcagcaagttcgacgtgcgcaagaagttcatcgagcgcaacctggtggacacccgctacgccagccgcgtggtgctgaacgccctgcaggagcacttccgcgcccacaagatcgacaccaaggtgagcgtggtgcgcggccagttcaccagccagctgcgccgccactggggcatcgagaagacccgcgacacctaccaccaccacgccgtggacgccctgatcattgcggcttctagccagctgaacctgtggaagaagcagaagaacaccctggtgagctacagcgaggaccagctgctggacatcgagaccggcgagctgatcagcgacgacgagtacaaggagagcgtgttcaaggccccctaccagcacttcgtggacaccctgaagagcaaggagttcgaggacagcatcctgttcagctaccaggtggacagcaagttcaaccgcaagatcagcgacgccaccatctacgccacccgccaggccaaggtgggcaaggacaaggccgacgagacctacgtgctgggcaagatcaaggacatctacacccaggacggctacgacgccttcatgaagatctacaagaaggacaagagcaagttcctgatgtaccgccacgacccccagaccttcgagaaggtgatcgagcccatcctggagaactaccccaacaagcagatcaacgataaaggcaaggaggtgccctgcaaccccttcctgaagtacaaggaggagcacggctacatccgcaagtacagcaagaagggcaacggccccgagatcaagagcctgaagtactacgacagcaagctgggcaaccacatcgacatcacccccaaggacagcaacaacaaggtggtgctgcagagcgtgagcccctggcgcgccgacgtgtacttcaacaagaccaccggcaagtacgagatcctgggcctgaagtacgccgacctgcagtttgataagggcaccggcacctacaagatcagccaggagaagtacaacgacatcaagaagaaggagggcgtggacagcgacagcgagttcaagttcaccctgtacaagaacgaccttctgctggtgaaggacaccgagaccaaggagcaacagctgttccgcttcctgagccgcaccatgcccaagcagaagcactacgtggagctgaagccctacgacaagcagaagttcgagggcggcgaggccctgatcaaggtgctgggcaacgtggccaacagcggccagtgcaagaagggcctgggcaagagcaacatcagcatctacaaggtgcgcaccgacgtgctgggcaaccagcacatcatcaagaacgagggcgacaagcccaagctggacttctaa

SEQ ID NO: 11 - DNA, 3366 bp, Streptococcus thermophilus
atgagcgacctggtgctgggcctggccatcggcatcggcagcgtgggcgtgggcatcctgaacaaggtgaccggcgagatcatccacaagaacagtcgcatcttccctgctgctcaggctgagaacaacctggtgcgccgcaccaaccgccagggtcgccggcttgctcgccgcaagaagcaccggcgcgtgcgcctgaaccgcctgttcgaggagagcggcctgatcaccgacttcaccaagatcagcatcaacctgaacccctaccagctgcgcgtgaagggcctgaccgacgagctgagcaacgaggagctgttcatcgccctgaagaacatggtgaagcaccgcggcatcagctacctggacgacgccagcgacgacggcaacagcagcgtgggcgactacgcccagatcgtgaaggagaacagcaagcagctggagaccaagacccccggccagatccagctggagcgctaccagacctacggccagctgcgcggcgacttcaccgtggagaaggacggcaagaagcaccgcctgatcaacgtgttccccaccagcgcctaccgcagcgaggccctgcgcatcctgcagacccagcaggagttcaacccccagatcaccgacgagttcatcaaccgctacctggagatcctgaccggcaagcgcaagtactaccacggccccggcaacgagaagagccgcaccgactacggccgctaccgcaccagcggcgagaccctggacaacatcttcggcatcctgatcggcaagtgcaccttctaccccgacgagttccgcgccgccaaggccagctacaccgcccaggagttcaacctgctgaacgacctgaacaacctgaccgtgcccaccgagaccaagaagctgagcaaggagcagaagaaccagatcatcaactacgtgaagaacgagaaggccatgggccccgccaagctgttcaagtacatcgccaagctgctgagctgcgacgtggccgacatcaagggctaccgcatcgacaagagcggcaaggccgagatccacaccttcgaggcctaccgcaagatgaagaccctggagaccctggacatcgagcagatggaccgcgagaccctggacaagctggcctacgtgctgaccctgaacaccgagcgcgagggcatccaggaggccctggagcacgagttcgccgacggcagcttcagccagaagcaggtggacgagctggtgcagttccgcaaggccaacagcagcatcttcggcaagggctggcacaacttcagcgtgaagctgatgatggagctgatccccgagctgtacgagaccagcgaggagcagatgaccatcctgacccgcctgggcaagcagaagaccaccagcagcagcaacaagaccaagtacatcgacgagaagctgctgaccgaggagatctacaaccccgtggtggccaagagcgtgcgccaggccatcaagatcgtgaacgccgccatcaaggagtacggcgacttcgacaacatcgtgatcgagatggcccgcgagaccaacgaggacgacgagaagaaggccatccagaagatccagaaggccaacaaggacgagaaggacgccgccatgctgaaggccgccaaccagtacaacggcaaggccgagctgccccacagcgtgttccacggccacaagcagctggccaccaagatccgcctgtggcaccagcagggcgagcgctgcctgtacaccggcaagaccatcagcatccacgacctgatcaacaacagcaaccagttcgaggtggctgccatcctgcccctgagcatcaccttcgacgacagcctggccaacaaggtgctggtgtacgccaccgccgctcaggagaagggccagcgcaccccctaccaggccctggacagcatggacgacgcctggagcttccgcgagctgaaggccttcgtgcgcgagagcaagaccctgagcaacaagaagaaggagtacctgctgaccgaggaggacatcagcaagttcgacgtgcgcaagaagttcatcgagcgcaacctggtggacacccgctacgccagccgcgtggtgctgaacgccctgcaggagcacttccgcgcccacaagatcgacaccaaggtgagcgtggtgcgcggccagttcaccagccagctgcgccgccactggggcatcgagaagacccgcgacacctaccaccaccacgccgtggacgccctgatcattgcggcttctagccagctgaacctgtggaagaagcagaagaacaccctggtgagctacagcgaggaccagctgctggacatcgagaccggcgagctgatcagcgacgacgagtacaaggagagcgtgttcaaggccccctaccagcacttcgtggacaccctgaagagcaaggagttcgaggacagcatcctgttcagctaccaggtggacagcaagttcaaccgcaagatcagcgacgccaccatctacgccacccgccaggccaaggtgggcaaggacaaggccgacgagacctacgtgctgggcaagatcaaggacatctacacccaggacggctacgacgccttcatgaagatctacaagaaggacaagagcaagttcctgatgtaccgccacgacccccagaccttcgagaaggtgatcgagcccatcctggagaactaccccaacaagcagatcaacgataaaggcaaggaggtgccctgcaaccccttcctgaagtacaaggaggagcacggctacatccgcaagtacagcaagaagggcaacggccccgagatcaagagcctgaagtactacgacagcaagctgggcaaccacatcgacatcacccccaaggacagcaacaacaaggtggtgctgcagagcgtgagcccctggcgcgccgacgtgtacttcaacaagaccaccggcaagtacgagatcctgggcctgaagtacgccgacctgcagtttgataagggcaccggcacctacaagatcagccaggagaagtacaacgacatcaagaagaaggagggcgtggacagcgacagcgagttcaagttcaccctgtacaagaacgaccttctgctggtgaaggacaccgagaccaaggagcaacagctgttccgcttcctgagccgcaccatgcccaagcagaagcactacgtggagctgaagccctacgacaagcagaagttcgagggcggcgaggccctgatcaaggtgctgggcaacgtggccaacagcggccagtgcaagaagggcctgggcaagagcaacatcagcatctacaaggtgcgcaccgacgtgctgggcaaccagcacatcatcaagaacgagggcgacaagcccaagctggacttctaa

SEQ ID NO: 12 - DNA, 3399 bp, Streptococcus thermophilus
atgagcgacctggtgctgggcctggacatcggcatcggcagcgtgggcgtgggcatcctgaacaaggtgaccggcgagatcatccacaagaacagtcgcatcttccctgctgctcaggctgagaacaacctggtgcgccgcaccaaccgccagggtcgccggcttgctcgccgcaagaagcaccggcgcgtgcgcctgaaccgcctgttcgaggagagcggcctgatcaccgacttcaccaagatcagcatcaacctgaacccctaccagctgcgcgtgaagggcctgaccgacgagctgagcaacgaggagctgttcatcgccctgaagaacatggtgaagcaccgcggcatcagctacctggacgacgccagcgacgacggcaacagcagcgtgggcgactacgcccagatcgtgaaggagaacagcaagcagctggagaccaagacccccggccagatccagctggagcgctaccagacctacggccagctgcgcggcgacttcaccgtggagaaggacggcaagaagcaccgcctgatcaacgtgttccccaccagcgcctaccgcagcgaggccctgcgcatcctgcagacccagcaggagttcaacccccagatcaccgacgagttcatcaaccgctacctggagatcctgaccggcaagcgcaagtactaccacggccccggcaacgagaagagccgcaccgactacggccgctaccgcaccagcggcgagaccctggacaacatcttcggcatcctgatcggcaagtgcaccttctaccccgacgagttccgcgccgccaaggccagctacaccgcccaggagttcaacctgctgaacgacctgaacaacctgaccgtgcccaccgagaccaagaagctgagcaaggagcagaagaaccagatcatcaactacgtgaagaacgagaaggccatgggccccgccaagctgttcaagtacatcgccaagctgctgagctgcgacgtggccgacatcaagggctaccgcatcgacaagagcggcaaggccgagatccacaccttcgaggcctaccgcaagatgaagaccctggagaccctggacatcgagcagatggaccgcgagaccctggacaagctggcctacgtgctgaccctgaacaccgagcgcgagggcatccaggaggccctggagcacgagttcgccgacggcagcttcagccagaagcaggtggacgagctggtgcagttccgcaaggccaacagcagcatcttcggcaagggctggcacaacttcagcgtgaagctgatgatggagctgatccccgagctgtacgagaccagcgaggagcagatgaccatcctgacccgcctgggcaagcagaagaccaccagcagcagcaacaagaccaagtacatcgacgagaagctgctgaccgaggagatctacaaccccgtggtggccaagagcgtgcgccaggccatcaagatcgtgaacgccgccatcaaggagtacggcgacttcgacaacatcgtgatcgagatggcccgcgagaccaacgaggacgacgagaagaaggccatccagaagatccagaaggccaacaaggacgagaaggacgccgccatgctgaaggccgccaaccagtacaacggcaaggccgagctgccccacagcgtgttccacggccacaagcagctggccaccaagatccgcctgtggcaccagcagggcgagcgctgcctgtacaccggcaagaccatcagcatccacgacctgatcaacaacagcaaccagttcgaggtggaccacatcctgcccctgagcatcaccttcgacgacagcctggccaacaaggtgctggtgtacgccaccgccaaccaggagaagggccagcgcaccccctaccaggccctggacagcatggacgacgcctggagcttccgcgagctgaaggccttcgtgcgcgagagcaagaccctgagcaacaagaagaaggagtacctgctgaccgaggaggacatcagcaagttcgacgtgcgcaagaagttcatcgagcgcaacctggtggacacccgctacgccagccgcgtggtgctgaacgccctgcaggagcacttccgcgcccacaagatcgacaccaaggtgagcgtggtgcgcggccagttcaccagccagctgcgccgccactggggcatcgagaagacccgcgacacctaccaccaccacgccgtggacgccctgatcattgcggcttctagccagctgaacctgtggaagaagcagaagaacaccctggtgagctacagcgaggaccagctgctggacatcgagaccggcgagctgatcagcgacgacgagtacaaggagagcgtgttcaaggccccctaccagcacttcgtggacaccctgaagagcaaggagttcgaggacagcatcctgttcagctaccaggtggacagcaagttcaaccgcaagatcagcgacgccaccatctacgccacccgccaggccaaggtgggcaaggacaaggccgacgagacctacgtgctgggcaagatcaaggacatctacacccaggacggctacgacgccttcatgaagatctacaagaaggacaagagcaagttcctgatgtaccgccacgacccccagaccttcgagaaggtgatcgagcccatcctggagaactaccccaacaagcagatcaacgataaaggcaaggaggtgccctgcaaccccttcctgaagtacaaggaggagcacggctacatccgcaagtacagcaagaagggcaacggccccgagatcaagagcctgaagtactacgacagcaagctgggcaaccacatcgacatcacccccaaggacagcaacaacaaggtggtgctgcagagcgtgagcccctggcgcgccgacgtgtacttcaacaagaccaccggcaagtacgagatcctgggcctgaagtacgccgacctgcagtttgataagggcaccggcacctacaagatcagccaggagaagtacaacgacatcaagaagaaggagggcgtggacagcgacagcgagttcaagttcaccctgtacaagaacgaccttctgctggtgaaggacaccgagaccaaggagcaacagctgttccgcttcctgagccgcaccatgcccaagcagaagcactacgtggagctgaagccctacgacaagcagaagttcgagggcggcgaggccctgatcaaggtgctgggcaacgtggccaacagcggccagtgcaagaagggcctgggcaagagcaacatcagcatctacaaggtgcgcaccgacgtgctgggcaaccagcacatcatcaagaacgagggcgacaagcccaagctggacttcagcagggctgaccccaagaagaagaggaaggtgtga

SEQ ID NO: 13 - DNA, 3459 bp, Streptococcus thermophilus
atgagcgacctggtgctgggcctggacatcggcatcggcagcgtgggcgtgggcatcctgaacaaggtgaccggcgagatcatccacaagaacagtcgcatcttccctgctgctcaggctgagaacaacctggtgcgccgcaccaaccgccagggtcgccggcttgctcgccgcaagaagcaccggcgcgtgcgcctgaaccgcctgttcgaggagagcggcctgatcaccgacttcaccaagatcagcatcaacctgaacccctaccagctgcgcgtgaagggcctgaccgacgagctgagcaacgaggagctgttcatcgccctgaagaacatggtgaagcaccgcggcatcagctacctggacgacgccagcgacgacggcaacagcagcgtgggcgactacgcccagatcgtgaaggagaacagcaagcagctggagaccaagacccccggccagatccagctggagcgctaccagacctacggccagctgcgcggcgacttcaccgtggagaaggacggcaagaagcaccgcctgatcaacgtgttccccaccagcgcctaccgcagcgaggccctgcgcatcctgcagacccagcaggagttcaacccccagatcaccgacgagttcatcaaccgctacctggagatcctgaccggcaagcgcaagtactaccacggccccggcaacgagaagagccgcaccgactacggccgctaccgcaccagcggcgagaccctggacaacatcttcggcatcctgatcggcaagtgcaccttctaccccgacgagttccgcgccgccaaggccagctacaccgcccaggagttcaacctgctgaacgacctgaacaacctgaccgtgcccaccgagaccaagaagctgagcaaggagcagaagaaccagatcatcaactacgtgaagaacgagaaggccatgggccccgccaagctgttcaagtacatcgccaagctgctgagctgcgacgtggccgacatcaagggctaccgcatcgacaagagcggcaaggccgagatccacaccttcgaggcctaccgcaagatgaagaccctggagaccctggacatcgagcagatggaccgcgagaccctggacaagctggcctacgtgctgaccctgaacaccgagcgcgagggcatccaggaggccctggagcacgagttcgccgacggcagcttcagccagaagcaggtggacgagctggtgcagttccgcaaggccaacagcagcatcttcggcaagggctggcacaacttcagcgtgaagctgatgatggagctgatccccgagctgtacgagaccagcgaggagcagatgaccatcctgacccgcctgggcaagcagaagaccaccagcagcagcaacaagaccaagtacatcgacgagaagctgctgaccgaggagatctacaaccccgtggtggccaagagcgtgcgccaggccatcaagatcgtgaacgccgccatcaaggagtacggcgacttcgacaacatcgtgatcgagatggcccgcgagaccaacgaggacgacgagaagaaggccatccagaagatccagaaggccaacaaggacgagaaggacgccgccatgctgaaggccgccaaccagtacaacggcaaggccgagctgccccacagcgtgttccacggccacaagcagctggccaccaagatccgcctgtggcaccagcagggcgagcgctgcctgtacaccggcaagaccatcagcatccacgacctgatcaacaacagcaaccagttcgaggtggaccacatcctgcccctgagcatcaccttcgacgacagcctggccaacaaggtgctggtgtacgccaccgccaaccaggagaagggccagcgcaccccctaccaggccctggacagcatggacgacgcctggagcttccgcgagctgaaggccttcgtgcgcgagagcaagaccctgagcaacaagaagaaggagtacctgctgaccgaggaggacatcagcaagttcgacgtgcgcaagaagttcatcgagcgcaacctggtggacacccgctacgccagccgcgtggtgctgaacgccctgcaggagcacttccgcgcccacaagatcgacaccaaggtgagcgtggtgcgcggccagttcaccagccagctgcgccgccactggggcatcgagaagacccgcgacacctaccaccaccacgccgtggacgccctgatcattgcggcttctagccagctgaacctgtggaagaagcagaagaacaccctggtgagctacagcgaggaccagctgctggacatcgagaccggcgagctgatcagcgacgacgagtacaaggagagcgtgttcaaggccccctaccagcacttcgtggacaccctgaagagcaaggagttcgaggacagcatcctgttcagctaccaggtggacagcaagttcaaccgcaagatcagcgacgccaccatctacgccacccgccaggccaaggtgggcaaggacaaggccgacgagacctacgtgctgggcaagatcaaggacatctacacccaggacggctacgacgccttcatgaagatctacaagaaggacaagagcaagttcctgatgtaccgccacgacccccagaccttcgagaaggtgatcgagcccatcctggagaactaccccaacaagcagatcaacgataaaggcaaggaggtgccctgcaaccccttcctgaagtacaaggaggagcacggctacatccgcaagtacagcaagaagggcaacggccccgagatcaagagcctgaagtactacgacagcaagctgggcaaccacatcgacatcacccccaaggacagcaacaacaaggtggtgctgcagagcgtgagcccctggcgcgccgacgtgtacttcaacaagaccaccggcaagtacgagatcctgggcctgaagtacgccgacctgcagtttgataagggcaccggcacctacaagatcagccaggagaagtacaacgacatcaagaagaaggagggcgtggacagcgacagcgagttcaagttcaccctgtacaagaacgaccttctgctggtgaaggacaccgagaccaaggagcaacagctgttccgcttcctgagccgcaccatgcccaagcagaagcactacgtggagctgaagccctacgacaagcagaagttcgagggcggcgaggccctgatcaaggtgctgggcaacgtggccaacagcggccagtgcaagaagggcctgggcaagagcaacatcagcatctacaaggtgcgcaccgacgtgctgggcaaccagcacatcatcaagaacgagggcgacaagcccaagctggacttcgcggccgcagatccaaaaaagaagagaaaggtagatccaaaaaagaagagaaaggtagatccaaaaaagaagagaaaggtagatacggccgcatag

SEQ ID NO: 14 - DNA, 3585 bp, Streptococcus thermophilus
atgagcgacctggtgctgggcctggccatcggcatcggcagcgtgggcgtgggcatcctgaacaaggtgaccggcgagatcatccacaagaacagtcgcatcttccctgctgctcaggctgagaacaacctggtgcgccgcaccaaccgccagggtcgccggcttgctcgccgcaagaagcaccggcgcgtgcgcctgaaccgcctgttcgaggagagcggcctgatcaccgacttcaccaagatcagcatcaacctgaacccctaccagctgcgcgtgaagggcctgaccgacgagctgagcaacgaggagctgttcatcgccctgaagaacatggtgaagcaccgcggcatcagctacctggacgacgccagcgacgacggcaacagcagcgtgggcgactacgcccagatcgtgaaggagaacagcaagcagctggagaccaagacccccggccagatccagctggagcgctaccagacctacggccagctgcgcggcgacttcaccgtggagaaggacggcaagaagcaccgcctgatcaacgtgttccccaccagcgcctaccgcagcgaggccctgcgcatcctgcagacccagcaggagttcaacccccagatcaccgacgagttcatcaaccgctacctggagatcctgaccggcaagcgcaagtactaccacggccccggcaacgagaagagccgcaccgactacggccgctaccgcaccagcggcgagaccctggacaacatcttcggcatcctgatcggcaagtgcaccttctaccccgacgagttccgcgccgccaaggccagctacaccgcccaggagttcaacctgctgaacgacctgaacaacctgaccgtgcccaccgagaccaagaagctgagcaaggagcagaagaaccagatcatcaactacgtgaagaacgagaaggccatgggccccgccaagctgttcaagtacatcgccaagctgctgagctgcgacgtggccgacatcaagggctaccgcatcgacaagagcggcaaggccgagatccacaccttcgaggcctaccgcaagatgaagaccctggagaccctggacatcgagcagatggaccgcgagaccctggacaagctggcctacgtgctgaccctgaacaccgagcgcgagggcatccaggaggccctggagcacgagttcgccgacggcagcttcagccagaagcaggtggacgagctggtgcagttccgcaaggccaacagcagcatcttcggcaagggctggcacaacttcagcgtgaagctgatgatggagctgatccccgagctgtacgagaccagcgaggagcagatgaccatcctgacccgcctgggcaagcagaagaccaccagcagcagcaacaagaccaagtacatcgacgagaagctgctgaccgaggagatctacaaccccgtggtggccaagagcgtgcgccaggccatcaagatcgtgaacgccgccatcaaggagtacggcgacttcgacaacatcgtgatcgagatggcccgcgagaccaacgaggacgacgagaagaaggccatccagaagatccagaaggccaacaaggacgagaaggacgccgccatgctgaaggccgccaaccagtacaacggcaaggccgagctgccccacagcgtgttccacggccacaagcagctggccaccaagatccgcctgtggcaccagcagggcgagcgctgcctgtacaccggcaagaccatcagcatccacgacctgatcaacaacagcaaccagttcgaggtggctgccatcctgcccctgagcatcaccttcgacgacagcctggccaacaaggtgctggtgtacgccaccgccgctcaggagaagggccagcgcaccccctaccaggccctggacagcatggacgacgcctggagcttccgcgagctgaaggccttcgtgcgcgagagcaagaccctgagcaacaagaagaaggagtacctgctgaccgaggaggacatcagcaagttcgacgtgcgcaagaagttcatcgagcgcaacctggtggacacccgctacgccagccgcgtggtgctgaacgccctgcaggagcacttccgcgcccacaagatcgacaccaaggtgagcgtggtgcgcggccagttcaccagccagctgcgccgccactggggcatcgagaagacccgcgacacctaccaccaccacgccgtggacgccctgatcattgcggcttctagccagctgaacctgtggaagaagcagaagaacaccctggtgagctacagcgaggaccagctgctggacatcgagaccggcgagctgatcagcgacgacgagtacaaggagagcgtgttcaaggccccctaccagcacttcgtggacaccctgaagagcaaggagttcgaggacagcatcctgttcagctaccaggtggacagcaagttcaaccgcaagatcagcgacgccaccatctacgccacccgccaggccaaggtgggcaaggacaaggccgacgagacctacgtgctgggcaagatcaaggacatctacacccaggacggctacgacgccttcatgaagatctacaagaaggacaagagcaagttcctgatgtaccgccacgacccccagaccttcgagaaggtgatcgagcccatcctggagaactaccccaacaagcagatcaacgataaaggcaaggaggtgccctgcaaccccttcctgaagtacaaggaggagcacggctacatccgcaagtacagcaagaagggcaacggccccgagatcaagagcctgaagtactacgacagcaagctgggcaaccacatcgacatcacccccaaggacagcaacaacaaggtggtgctgcagagcgtgagcccctggcgcgccgacgtgtacttcaacaagaccaccggcaagtacgagatcctgggcctgaagtacgccgacctgcagtttgataagggcaccggcacctacaagatcagccaggagaagtacaacgacatcaagaagaaggagggcgtggacagcgacagcgagttcaagttcaccctgtacaagaacgaccttctgctggtgaaggacaccgagaccaaggagcaacagctgttccgcttcctgagccgcaccatgcccaagcagaagcactacgtggagctgaagccctacgacaagcagaagttcgagggcggcgaggccctgatcaaggtgctgggcaacgtggccaacagcggccagtgcaagaagggcctgggcaagagcaacatcagcatctacaaggtgcgcaccgacgtgctgggcaaccagcacatcatcaagaacgagggcgacaagcccaagctggacttcagcagggctgaccccaagaagaagaggaaggtggaggccagcggttccggacgggctgacgcattggacgattttgatctggatatgctgggaagtgacgccctcgatgattttgaccttgacatgcttggttcggatgcccttgatgactttgacctcgacatgctcggcagtgacgcccttgatgatttcgacctggacatgctgattaactctagatga

SEQ ID NO: 15 - DNA, 3606 bp, Streptococcus thermophilus
atgcccaagaagaagaggaaggtgagcgacctggtgctgggcctggccatcggcatcggcagcgtgggcgtgggcatcctgaacaaggtgaccggcgagatcatccacaagaacagtcgcatcttccctgctgctcaggctgagaacaacctggtgcgccgcaccaaccgccagggtcgccggcttgctcgccgcaagaagcaccggcgcgtgcgcctgaaccgcctgttcgaggagagcggcctgatcaccgacttcaccaagatcagcatcaacctgaacccctaccagctgcgcgtgaagggcctgaccgacgagctgagcaacgaggagctgttcatcgccctgaagaacatggtgaagcaccgcggcatcagctacctggacgacgccagcgacgacggcaacagcagcgtgggcgactacgcccagatcgtgaaggagaacagcaagcagctggagaccaagacccccggccagatccagctggagcgctaccagacctacggccagctgcgcggcgacttcaccgtggagaaggacggcaagaagcaccgcctgatcaacgtgttccccaccagcgcctaccgcagcgaggccctgcgcatcctgcagacccagcaggagttcaacccccagatcaccgacgagttcatcaaccgctacctggagatcctgaccggcaagcgcaagtactaccacggccccggcaacgagaagagccgcaccgactacggccgctaccgcaccagcggcgagaccctggacaacatcttcggcatcctgatcggcaagtgcaccttctaccccgacgagttccgcgccgccaaggccagctacaccgcccaggagttcaacctgctgaacgacctgaacaacctgaccgtgcccaccgagaccaagaagctgagcaaggagcagaagaaccagatcatcaactacgtgaagaacgagaaggccatgggccccgccaagctgttcaagtacatcgccaagctgctgagctgcgacgtggccgacatcaagggctaccgcatcgacaagagcggcaaggccgagatccacaccttcgaggcctaccgcaagatgaagaccctggagaccctggacatcgagcagatggaccgcgagaccctggacaagctggcctacgtgctgaccctgaacaccgagcgcgagggcatccaggaggccctggagcacgagttcgccgacggcagcttcagccagaagcaggtggacgagctggtgcagttccgcaaggccaacagcagcatcttcggcaagggctggcacaacttcagcgtgaagctgatgatggagctgatccccgagctgtacgagaccagcgaggagcagatgaccatcctgacccgcctgggcaagcagaagaccaccagcagcagcaacaagaccaagtacatcgacgagaagctgctgaccgaggagatctacaaccccgtggtggccaagagcgtgcgccaggccatcaagatcgtgaacgccgccatcaaggagtacggcgacttcgacaacatcgtgatcgagatggcccgcgagaccaacgaggacgacgagaagaaggccatccagaagatccagaaggccaacaaggacgagaaggacgccgccatgctgaaggccgccaaccagtacaacggcaaggccgagctgccccacagcgtgttccacggccacaagcagctggccaccaagatccgcctgtggcaccagcagggcgagcgctgcctgtacaccggcaagaccatcagcatccacgacctgatcaacaacagcaaccagttcgaggtggctgccatcctgcccctgagcatcaccttcgacgacagcctggccaacaaggtgctggtgtacgccaccgccgctcaggagaagggccagcgcaccccctaccaggccctggacagcatggacgacgcctggagcttccgcgagctgaaggccttcgtgcgcgagagcaagaccctgagcaacaagaagaaggagtacctgctgaccgaggaggacatcagcaagttcgacgtgcgcaagaagttcatcgagcgcaacctggtggacacccgctacgccagccgcgtggtgctgaacgccctgcaggagcacttccgcgcccacaagatcgacaccaaggtgagcgtggtgcgcggccagttcaccagccagctgcgccgccactggggcatcgagaagacccgcgacacctaccaccaccacgccgtggacgccctgatcattgcggcttctagccagctgaacctgtggaagaagcagaagaacaccctggtgagctacagcgaggaccagctgctggacatcgagaccggcgagctgatcagcgacgacgagtacaaggagagcgtgttcaaggccccctaccagcacttcgtggacaccctgaagagcaaggagttcgaggacagcatcctgttcagctaccaggtggacagcaagttcaaccgcaagatcagcgacgccaccatctacgccacccgccaggccaaggtgggcaaggacaaggccgacgagacctacgtgctgggcaagatcaaggacatctacacccaggacggctacgacgccttcatgaagatctacaagaaggacaagagcaagttcctgatgtaccgccacgacccccagaccttcgagaaggtgatcgagcccatcctggagaactaccccaacaagcagatcaacgataaaggcaaggaggtgccctgcaaccccttcctgaagtacaaggaggagcacggctacatccgcaagtacagcaagaagggcaacggccccgagatcaagagcctgaagtactacgacagcaagctgggcaaccacatcgacatcacccccaaggacagcaacaacaaggtggtgctgcagagcgtgagcccctggcgcgccgacgtgtacttcaacaagaccaccggcaagtacgagatcctgggcctgaagtacgccgacctgcagtttgataagggcaccggcacctacaagatcagccaggagaagtacaacgacatcaagaagaaggagggcgtggacagcgacagcgagttcaagttcaccctgtacaagaacgaccttctgctggtgaaggacaccgagaccaaggagcaacagctgttccgcttcctgagccgcaccatgcccaagcagaagcactacgtggagctgaagccctacgacaagcagaagttcgagggcggcgaggccctgatcaaggtgctgggcaacgtggccaacagcggccagtgcaagaagggcctgggcaagagcaacatcagcatctacaaggtgcgcaccgacgtgctgggcaaccagcacatcatcaagaacgagggcgacaagcccaagctggacttcagcagggctgaccccaagaagaagaggaaggtggaggccagcggttccggacgggctgacgcattggacgattttgatctggatatgctgggaagtgacgccctcgatgattttgaccttgacatgcttggttcggatgcccttgatgactttgacctcgacatgctcggcagtgacgcccttgatgatttcgacctggacatgctgattaactctagatga

SEQ ID NO: 16 - DNA, 3366 bp, Streptococcus thermophilus
atgagtgacttagttttaggacttgatatcggtataggttctgttggtgtaggtatccttaacaaagtgacaggagaaattatccataaaaactcacgcatcttcccagcagctcaagcggaaaataacctagtacgtagaacgaatcgtcaaggaagacgcttgacacgacgtaaaaaacatcgtagagttcgtttaaatcgtctatttgaggaaagtggattaatcaccgattttacgaagatttcaattaatcttaacccatatcaattacgagttaagggcttgaccgatgaattgtctaatgaagaactgtttatcgctcttaaaaatatggtgaaacaccgtgggattagttacctcgatgatgctagtgatgacggaaattcatcaataggagactatgcacaaattgttaaggaaaatagtaaacaattagaaactaagacaccgggacagatacagttggaacgctaccaaacatatggtcaattacgtggtgattttactgttgagaaagatggcaaaaaacatcgcttgattaatgtctttccaacatcagcttatcgttcagaagccttaaggatactgcaaactcaacaagaatttaatccacagattacagatgaatttattaatcgttatctcgaaattttaactggaaaacggaaatattatcatggacccggaaatgaaaagtcacggactgattatggtcgttacagaacgagtggagaaactttagacaatatttttggaattctaattgggaaatgtacattttatccagacgagtttagagcagcaaaagcttcctacacggctcaagaattcaatttgctaaatgatttgaacaatctaacagttcctactgaaaccaaaaagttgagcaaagaacagaagaatcaaatcattaattatgtcaaaaatgaaaaggcaatggggccagcgaaactttttaaatatatcgctaagttactttcttgtgatgttgcagatatcaagggataccgtatcgacaaatcaggtaaggctgagattcatactttcgaagcctatcgaaaaatgaaaacgcttgaaaccttagatattgagcaaatggatagagaaacgcttgataaattagcctatgtcttaacattaaacactgagagggaaggtattcaagaagccttagaacatgaatttgctgatggtagctttagccagaagcaagttgacgaattggttcaattccgcaaagcaaatagttccatttttggaaaaggatggcataatttttctgtcaaactgatgatggagttaattccagaattgtatgagacgtcagaagagcaaatgactatcctaacacgacttggaaaacaaaaaacgacttcgtcttcaaataaaacaaaatatatagatgaaaaactattaactgaagaaatctataatcctgttgttgctaagtctgttcgccaggctataaaaatcgtaaatgcggcgattaaagaatacggagactttgacaatattgtcatcgaaatggctcgtgaaacaaatgaagatgatgaaaagaaagctattcaaaagattcaaaaagccaacaaagatgaaaaagatgcagcaatgcttaaggctgctaaccaatataatggaaaggctgaattaccacatagtgttttccacggtcataagcaattagcgactaaaatccgcctttggcatcagcaaggagaacgttgcctttatactggtaagacaatctcaatccatgatttgataaataattctaatcagtttgaagtagatcatattttacctctttctatcacattcgatgatagccttgcaaataaggttttggtttatgcaactgctaaccaagaaaaaggacaacgaacaccttatcaggctttagatagtatggatgatgcgtggtctttccgtgaattaaaagcttttgtacgtgagtcaaaaacactttcgaacaagaaaaaagaatacctccttacagaagaagatatttcaaagtttgatgttcgaaagaaatttattgaacgaaatcttgtagatacaagatacgcttcaagagttgtcctcaatgcccttcaagaacactttagagctcacaagattgatacaaaagtttccgtggttcgtggccaatttacatctcaattgagacgccattggggaattgagaagactcgtgatacttatcatcaccatgctgtcgatgcattgattattgccgcctcaagtcagttgaatttgtggaaaaaacaaaagaatacccttgtaagttattcagaagaccaactccttgatattgaaacaggtgaacttattagtgatgatgagtacaaggaatctgtgttcaaagccccttatcaacattttgttgatacattgaagagtaaagaatttgaagacagtatcttattctcttatcaagtggattctaagtttaatcgtaaaatatcagatgccactatttatgcgacaagacaggctaaagtaggaaaagataaggcggatgaaacttatgtcttagggaaaatcaaagatatttatactcaggatggttatgatgcctttatgaagatttataagaaggataagtcaaaattcctcatgtatcgtcacgacccacaaacctttgagaaagttatcgagccaattttagagaactatcctaataagcaaataaatgaaaaagggaaagaggtaccatgtaatcctttcctaaaatataaagaagaacatggctatattcgtaaatatagtaaaaaaggcaatggtcctgaaatcaagagtcttaaatactatgatagtaagctaggcaatcatattgatattactccgaaggatagtaacaataaagttgtcttacagtcagtttctccatggagagcggatgtctatttcaataagactactggaaaatacgaaatcctcggattgaaatatgctgatttacaatttgaaaaagggacaggaacatataagatttcccaggaaaaatacaatgacattaagaaaaaagagggtgtagattctgattcagaattcaagtttacactttataaaaatgatttgttactcgttaaagatacagaaacaaaagaacaacagcttttccgttttctttctcgaactatgcctaaacaaaagcattatgttgaattaaaaccttatgataaacagaaatttgaaggaggtgaggcgttaattaaagtgttgggtaacgttgctaatagtggtcaatgcaaaaaagggctaggaaaatcaaatatttctatttataaggtaagaacagatgtcctaggaaatcagcatatcatcaaaaatgagggtgataagcctaagctagatttttaa

SEQ ID NO: 17 - DNA, 4167 bp, Streptococcus thermophilus; identical to SEQ ID NO: 9

SEQ ID NO: 18 - DNA, 3249 bp, Neisseria meningitidis
atggccgccttcaagcccaaccccatcaactacatcctgggcctggacatcggcatcgccagcgtgggctgggccatggtggagatcgacgaggacgagaaccccatctgcctgatcgacctgggtgtgcgcgtgttcgagcgcgctgaggtgcccaagactggtgacagtctggctatggctcgccggcttgctcgctctgttcggcgccttactcgccggcgcgctcaccgccttctgcgcgctcgccgcctgctgaagcgcgagggtgtgctgcaggctgccgacttcgacgagaacggcctgatcaagagcctgcccaacactccttggcagctgcgcgctgccgctctggaccgcaagctgactcctctggagtggagcgccgtgctgctgcacctgatcaagcaccgcggctacctgagccagcgcaagaacgagggcgagaccgccgacaaggagctgggtgctctgctgaagggcgtggccgacaacgcccacgccctgcagactggtgacttccgcactcctgctgagctggccctgaacaagttcgagaaggagagcggccacatccgcaaccagcgcggcgactacagccacaccttcagccgcaaggacctgcaggccgagctgatcctgctgttcgagaagcagaaggagttcggcaacccccacgtgagcggcggcctgaaggagggcatcgagaccctgctgatgacccagcgccccgccctgagcggcgacgccgtgcagaagatgctgggccactgcaccttcgagccagccgagcccaaggccgccaagaacacctacaccgccgagcgcttcatctggctgaccaagctgaacaacctgcgcatcctggagcagggcagcgagcgccccctgaccgacaccgagcgcgccaccctgatggacgagccctaccgcaagagcaagctgacctacgcccaggcccgcaagctgctgggtctggaggacaccgccttcttcaagggcctgcgctacggcaaggacaacgccgaggccagcaccctgatggagatgaaggcctaccacgccatcagccgcgccctggagaaggagggcctgaaggacaagaagagtcctctgaacctgagccccgagctgcaggacgagatcggcaccgccttcagcctgttcaagaccgacgaggacatcaccggccgcctgaaggaccgcatccagcccgagatcctggaggccctgctgaagcacatcagcttcgacaagttcgtgcagatcagcctgaaggccctgcgccgcatcgtgcccctgatggagcagggcaagcgctacgacgaggcctgcgccgagatctacggcgaccactacggcaagaagaacaccgaggagaagatctacctgcctcctatccccgccgacgagatccgcaaccccgtggtgctgcgcgccctgagccaggcccgcaaggtgatcaacggcgtggtgcgccgctacggcagccccgcccgcatccacatcgagaccgcccgcgaggtgggcaagagcttcaaggaccgcaaggagatcgagaagcgccaggaggagaaccgcaaggaccgcgagaaggccgccgccaagttccgcgagtacttccccaacttcgtgggcgagcccaagagcaaggacatcctgaagctgcgcctgtacgagcagcagcacggcaagtgcctgtacagcggcaaggagatcaacctgggccgcctgaacgagaagggctacgtggagatcgaccacgccctgcccttcagccgcacctgggacgacagcttcaacaacaaggtgctggtgctgggcagcgagaaccagaacaagggcaaccagaccccctacgagtacttcaacggcaaggacaacagccgcgagtggcaggagttcaaggcccgcgtggagaccagccgcttcccccgcagcaagaagcagcgcatcctgctgcagaagttcgacgaggacggcttcaaggagcgcaacctgaacgacacccgctacgtgaaccgcttcctgtgccagttcgtggccgaccgcatgcgcctgaccggcaagggcaagaagcgcgtgttcgccagcaacggccagatcaccaacctgctgcgcggcttctggggcctgcgcaaggtgcgcgccgagaacgaccgccaccacgccctggacgccgtggtggtggcctgcagcaccgtggccatgcagcagaagatcacccgcttcgtgcgctacaaggagatgaacgccttcgacggtaaaaccatcgacaaggagaccggcgaggtgctgcaccagaagacccacttcccccagccctgggagttcttcgcccaggaggtgatgatccgcgtgttcggcaagcccgacggcaagcccgagttcgaggaggccgacacccccgagaagctgcgcaccctgctggccgagaagctgagcagccgccctgaggccgtgcacgagtacgtgactcctctgttcgtgagccgcgcccccaaccgcaagatgagcggtcagggtcacatggagaccgtgaagagcgccaagcgcctggacgagggcgtgagcgtgctgcgcgtgcccctgacccagctgaagctgaaggacctggagaagatggtgaaccgcgagcgcgagcccaagctgtacgaggccctgaaggcccgcctggaggcccacaaggacgaccccgccaaggccttcgccgagcccttctacaagtacgacaaggccggcaaccgcacccagcaggtgaaggccgtgcgcgtggagcaggtgcagaagaccggcgtgtgggtgcgcaaccacaacggcatcgccgacaacgccaccatggtgcgcgtggacgtgttcgagaagggcgacaagtactacctggtgcccatctacagctggcaggtggccaagggcatcctgcccgaccgcgccgtggtgcagggcaaggacgaggaggactggcagctgatcgacgacagcttcaacttcaagttcagcctgcaccccaacgacctggtggaggtgatcaccaagaaggcccgcatgttcggctacttcgccagctgccaccgcggcaccggcaacatcaacatccgcatccacgacctggaccacaagatcggcaagaacggcatcctggagggcatcggcgtgaagaccgccctgagcttccagaagtaccagatcgacgagctgggcaaggagatccgcccctgccgcctgaagaagcgccctcctgtgcgctaa

SEQ ID NO: 19 - DNA, 3249 bp, Neisseria meningitidis
atggccgccttcaagcccaaccccatcaactacatcctgggcctggccatcggcatcgccagcgtgggctgggccatggtggagatcgacgaggacgagaaccccatctgcctgatcgacctgggtgtgcgcgtgttcgagcgcgctgaggtgcccaagactggtgacagtctggctatggctcgccggcttgctcgctctgttcggcgccttactcgccggcgcgctcaccgccttctgcgcgctcgccgcctgctgaagcgcgagggtgtgctgcaggctgccgacttcgacgagaacggcctgatcaagagcctgcccaacactccttggcagctgcgcgctgccgctctggaccgcaagctgactcctctggagtggagcgccgtgctgctgcacctgatcaagcaccgcggctacctgagccagcgcaagaacgagggcgagaccgccgacaaggagctgggtgctctgctgaagggcgtggccgacaacgcccacgccctgcagactggtgacttccgcactcctgctgagctggccctgaacaagttcgagaaggagagcggccacatccgcaaccagcgcggcgactacagccacaccttcagccgcaaggacctgcaggccgagctgatcctgctgttcgagaagcagaaggagttcggcaacccccacgtgagcggcggcctgaaggagggcatcgagaccctgctgatgacccagcgccccgccctgagcggcgacgccgtgcagaagatgctgggccactgcaccttcgagccagccgagcccaaggccgccaagaacacctacaccgccgagcgcttcatctggctgaccaagctgaacaacctgcgcatcctggagcagggcagcgagcgccccctgaccgacaccgagcgcgccaccctgatggacgagccctaccgcaagagcaagctgacctacgcccaggcccgcaagctgctgggtctggaggacaccgccttcttcaagggcctgcgctacggcaaggacaacgccgaggccagcaccctgatggagatgaaggcctaccacgccatcagccgcgccctggagaaggagggcctgaaggacaagaagagtcctctgaacctgagccccgagctgcaggacgagatcggcaccgccttcagcctgttcaagaccgacgaggacatcaccggccgcctgaaggaccgcatccagcccgagatcctggaggccctgctgaagcacatcagcttcgacaagttcgtgcagatcagcctgaaggccctgcgccgcatcgtgcccctgatggagcagggcaagcgctacgacgaggcctgcgccgagatctacggcgaccactacggcaagaagaacaccgaggagaagatctacctgcctcctatccccgccgacgagatccgcaaccccgtggtgctgcgcgccctgagccaggcccgcaaggtgatcaacggcgtggtgcgccgctacggcagccccgcccgcatccacatcgagaccgcccgcgaggtgggcaagagcttcaaggaccgcaaggagatcgagaagcgccaggaggagaaccgcaaggaccgcgagaaggccgccgccaagttccgcgagtacttccccaacttcgtgggcgagcccaagagcaaggacatcctgaagctgcgcctgtacgagcagcagcacggcaagtgcctgtacagcggcaaggagatcaacctgggccgcctgaacgagaagggctacgtggagatcgccgctgccctgcccttcagccgcacctgggacgacagcttcaacaacaaggtgctggtgctgggcagcgaggctcagaacaagggcaaccagaccccctacgagtacttcaacggcaaggacaacagccgcgagtggcaggagttcaaggcccgcgtggagaccagccgcttcccccgcagcaagaagcagcgcatcctgctgcagaagttcgacgaggacggcttcaaggagcgcaacctgaacgacacccgctacgtgaaccgcttcctgtgccagttcgtggccgaccgcatgcgcctgaccggcaagggcaagaagcgcgtgttcgccagcaacggccagatcaccaacctgctgcgcggcttctggggcctgcgcaaggtgcgcgccgagaacgaccgccaccacgccctggacgccgtggtggtggcctgcagcaccgtggccatgcagcagaagatcacccgcttcgtgcgctacaaggagatgaacgccttcgacggtaaaaccatcgacaaggagaccggcgaggtgctgcaccagaagacccacttcccccagccctgggagttcttcgcccaggaggtgatgatccgcgtgttcggcaagcccgacggcaagcccgagttcgaggaggccgacacccccgagaagctgcgcaccctgctggccgagaagctgagcagccgccctgaggccgtgcacgagtacgtgactcctctgttcgtgagccgcgcccccaaccgcaagatgagcggtcagggtcacatggagaccgtgaagagcgccaagcgcctggacgagggcgtgagcgtgctgcgcgtgcccctgacccagctgaagctgaaggacctggagaagatggtgaaccgcgagcgcgagcccaagctgtacgaggccctgaaggcccgcctggaggcccacaaggacgaccccgccaaggccttcgccgagcccttctacaagtacgacaaggccggcaaccgcacccagcaggtgaaggccgtgcgcgtggagcaggtgcagaagaccggcgtgtgggtgcgcaaccacaacggcatcgccgacaacgccaccatggtgcgcgtggacgtgttcgagaagggcgacaagtactacctggtgcccatctacagctggcaggtggccaagggcatcctgcccgaccgcgccgtggtgcagggcaaggacgaggaggactggcagctgatcgacgacagcttcaacttcaagttcagcctgcaccccaacgacctggtggaggtgatcaccaagaaggcccgcatgttcggctacttcgccagctgccaccgcggcaccggcaacatcaacatccgcatccacgacctggaccacaagatcggcaagaacggcatcctggagggcatcggcgtgaagaccgccctgagcttccagaagtaccagatcgacgagctgggcaaggagatccgcccctgccgcctgaagaagcgccctcctgtgcgctaa

SEQ ID NO: 20 - DNA, 3282 bp, Neisseria meningitidis
atggccgccttcaagcccaaccccatcaactacatcctgggcctggacatcggcatcgccagcgtgggctgggccatggtggagatcgacgaggacgagaaccccatctgcctgatcgacctgggtgtgcgcgtgttcgagcgcgctgaggtgcccaagactggtgacagtctggctatggctcgccggcttgctcgctctgttcggcgccttactcgccggcgcgctcaccgccttctgcgcgctcgccgcctgctgaagcgcgagggtgtgctgcaggctgccgacttcgacgagaacggcctgatcaagagcctgcccaacactccttggcagctgcgcgctgccgctctggaccgcaagctgactcctctggagtggagcgccgtgctgctgcacctgatcaagcaccgcggctacctgagccagcgcaagaacgagggcgagaccgccgacaaggagctgggtgctctgctgaagggcgtggccgacaacgcccacgccctgcagactggtgacttccgcactcctgctgagctggccctgaacaagttcgagaaggagagcggccacatccgcaaccagcgcggcgactacagccacaccttcagccgcaaggacctgcaggccgagctgatcctgctgttcgagaagcagaaggagttcggcaacccccacgtgagcggcggcctgaaggagggcatcgagaccctgctgatgacccagcgccccgccctgagcggcgacgccgtgcagaagatgctgggccactgcaccttcgagccagccgagcccaaggccgccaagaacacctacaccgccgagcgcttcatctggctgaccaagctgaacaacctgcgcatcctggagcagggcagcgagcgccccctgaccgacaccgagcgcgccaccctgatggacgagccctaccgcaagagcaagctgacctacgcccaggcccgcaagctgctgggtctggaggacaccgccttcttcaagggcctgcgctacggcaaggacaacgccgaggccagcaccctgatggagatgaaggcctaccacgccatcagccgcgccctggagaaggagggcctgaaggacaagaagagtcctctgaacctgagccccgagctgcaggacgagatcggcaccgccttcagcctgttcaagaccgacgaggacatcaccggccgcctgaaggaccgcatccagcccgagatcctggaggccctgctgaagcacatcagcttcgacaagttcgtgcagatcagcctgaaggccctgcgccgcatcgtgcccctgatggagcagggcaagcgctacgacgaggcctgcgccgagatctacggcgaccactacggcaagaagaacaccgaggagaagatctacctgcctcctatccccgccgacgagatccgcaaccccgtggtgctgcgcgccctgagccaggcccgcaaggtgatcaacggcgtggtgcgccgctacggcagccccgcccgcatccacatcgagaccgcccgcgaggtgggcaagagcttcaaggaccgcaaggagatcgagaagcgccaggaggagaaccgcaaggaccgcgagaaggccgccgccaagttccgcgagtacttccccaacttcgtgggcgagcccaagagcaaggacatcctgaagctgcgcctgtacgagcagcagcacggcaagtgcctgtacagcggcaaggagatcaacctgggccgcctgaacgagaagggctacgtggagatcgaccacgccctgcccttcagccgcacctgggacgacagcttcaacaacaaggtgctggtgctgggcagcgagaaccagaacaagggcaaccagaccccctacgagtacttcaacggcaaggacaacagccgcgagtggcaggagttcaaggcccgcgtggagaccagccgcttcccccgcagcaagaagcagcgcatcctgctgcagaagttcgacgaggacggcttcaaggagcgcaacctgaacgacacccgctacgtgaaccgcttcctgtgccagttcgtggccgaccgcatgcgcctgaccggcaagggcaagaagcgcgtgttcgccagcaacggccagatcaccaacctgctgcgcggcttctggggcctgcgcaaggtgcgcgccgagaacgaccgccaccacgccctggacgccgtggtggtggcctgcagcaccgtggccatgcagcagaagatcacccgcttcgtgcgctacaaggagatgaacgccttcgacggtaaaaccatcgacaaggagaccggcgaggtgctgcaccagaagacccacttcccccagccctgggagttcttcgcccaggaggtgatgatccgcgtgttcggcaagcccgacggcaagcccgagttcgaggaggccgacacccccgagaagctgcgcaccctgctggccgagaagctgagcagccgccctgaggccgtgcacgagtacgtgactcctctgttcgtgagccgcgcccccaaccgcaagatgagcggtcagggtcacatggagaccgtgaagagcgccaagcgcctggacgagggcgtgagcgtgctgcgcgtgcccctgacccagctgaagctgaaggacctggagaagatggtgaaccgcgagcgcgagcccaagctgtacgaggccctgaaggcccgcctggaggcccacaaggacgaccccgccaaggccttcgccgagcccttctacaagtacgacaaggccggcaaccgcacccagcaggtgaaggccgtgcgcgtggagcaggtgcagaagaccggcgtgtgggtgcgcaaccacaacggcatcgccgacaacgccaccatggtgcgcgtggacgtgttcgagaagggcgacaagtactacctggtgcccatctacagctggcaggtggccaagggcatcctgcccgaccgcgccgtggtgcagggcaaggacgaggaggactggcagctgatcgacgacagcttcaacttcaagttcagcctgcaccccaacgacctggtggaggtgatcaccaagaaggcccgcatgttcggctacttcgccagctgccaccgcggcaccggcaacatcaacatccgcatccacgacctggaccacaagatcggcaagaacggcatcctggagggcatcggcgtgaagaccgccctgagcttccagaagtaccagatcgacgagctgggcaaggagatccgcccctgccgcctgaagaagcgccctcctgtgcgcagcagggctgaccccaagaagaagaggaaggtgtga

SEQ ID NO: 21 - DNA, 3342 bp, Neisseria meningitidis
atggccgccttcaagcccaaccccatcaactacatcctgggcctggacatcggcatcgccagcgtgggctgggccatggtggagatcgacgaggacgagaaccccatctgcctgatcgacctgggtgtgcgcgtgttcgagcgcgctgaggtgcccaagactggtgacagtctggctatggctcgccggcttgctcgctctgttcggcgccttactcgccggcgcgctcaccgccttctgcgcgctcgccgcctgctgaagcgcgagggtgtgctgcaggctgccgacttcgacgagaacggcctgatcaagagcctgcccaacactccttggcagctgcgcgctgccgctctggaccgcaagctgactcctctggagtggagcgccgtgctgctgcacctgatcaagcaccgcggctacctgagccagcgcaagaacgagggcgagaccgccgacaaggagctgggtgctctgctgaagggcgtggccgacaacgcccacgccctgcagactggtgacttccgcactcctgctgagctggccctgaacaagttcgagaaggagagcggccacatccgcaaccagcgcggcgactacagccacaccttcagccgcaaggacctgcaggccgagctgatcctgctgttcgagaagcagaaggagttcggcaacccccacgtgagcggcggcctgaaggagggcatcgagaccctgctgatgacccagcgccccgccctgagcggcgacgccgtgcagaagatgctgggccactgcaccttcgagccagccgagcccaaggccgccaagaacacctacaccgccgagcgcttcatctggctgaccaagctgaacaacctgcgcatcctggagcagggcagcgagcgccccctgaccgacaccgagcgcgccaccctgatggacgagccctaccgcaagagcaagctgacctacgcccaggcccgcaagctgctgggtctggaggacaccgccttcttcaagggcctgcgctacggcaaggacaacgccgaggccagcaccctgatggagatgaaggcctaccacgccatcagccgcgccctggagaaggagggcctgaaggacaagaagagtcctctgaacctgagccccgagctgcaggacgagatcggcaccgccttcagcctgttcaagaccgacgaggacatcaccggccgcctgaaggaccgcatccagcccgagatcctggaggccctgctgaagcacatcagcttcgacaagttcgtgcagatcagcctgaaggccctgcgccgcatcgtgcccctgatggagcagggcaagcgctacgacgaggcctgcgccgagatctacggcgaccactacggcaagaagaacaccgaggagaagatctacctgcctcctatccccgccgacgagatccgcaaccccgtggtgctgcgcgccctgagccaggcccgcaaggtgatcaacggcgtggtgcgccgctacggcagccccgcccgcatccacatcgagaccgcccgcgaggtgggcaagagcttcaaggaccgcaaggagatcgagaagcgccaggaggagaaccgcaaggaccgcgagaaggccgccgccaagttccgcgagtacttccccaacttcgtgggcgagcccaagagcaaggacatcctgaagctgcgcctgtacgagcagcagcacggcaagtgcctgtacagcggcaaggagatcaacctgggccgcctgaacgagaagggctacgtggagatcgaccacgccctgcccttcagccgcacctgggacgacagcttcaacaacaaggtgctggtgctgggcagcgagaaccagaacaagggcaaccagaccccctacgagtacttcaacggcaaggacaacagccgcgagtggcaggagttcaaggcccgcgtggagaccagccgcttcccccgcagcaagaagcagcgcatcctgctgcagaagttcgacgaggacggcttcaaggagcgcaacctgaacgacacccgctacgtgaaccgcttcctgtgccagttcgtggccgaccgcatgcgcctgaccggcaagggcaagaagcgcgtgttcgccagcaacggccagatcaccaacctgctgcgcggcttctggggcctgcgcaaggtgcgcgccgagaacgaccgccaccacgccctggacgccgtggtggtggcctgcagcaccgtggccatgcagcagaagatcacccgcttcgtgcgctacaaggagatgaacgccttcgacggtaaaaccatcgacaaggagaccggcgaggtgctgcaccagaagacccacttcccccagccctgggagttcttcgcccaggaggtgatgatccgcgtgttcggcaagcccgacggcaagcccgagttcgaggaggccgacacccccgagaagctgcgcaccctgctggccgagaagctgagcagccgccctgaggccgtgcacgagtacgtgactcctctgttcgtgagccgcgcccccaaccgcaagatgagcggtcagggtcacatggagaccgtgaagagcgccaagcgcctggacgagggcgtgagcgtgctgcgcgtgcccctgacccagctgaagctgaaggacctggagaagatggtgaaccgcgagcgcgagcccaagctgtacgaggccctgaaggcccgcctggaggcccacaaggacgaccccgccaaggccttcgccgagcccttctacaagtacgacaaggccggcaaccgcacccagcaggtgaaggccgtgcgcgtggagcaggtgcagaagaccggcgtgtgggtgcgcaaccacaacggcatcgccgacaacgccaccatggtgcgcgtggacgtgttcgagaagggcgacaagtactacctggtgcccatctacagctggcaggtggccaagggcatcctgcccgaccgcgccgtggtgcagggcaaggacgaggaggactggcagctgatcgacgacagcttcaacttcaagttcagcctgcaccccaacgacctggtggaggtgatcaccaagaaggcccgcatgttcggctacttcgccagctgccaccgcggcaccggcaacatcaacatccgcatccacgacctggaccacaagatcggcaagaacggcatcctggagggcatcggcgtgaagaccgccctgagcttccagaagtaccagatcgacgagctgggcaaggagatccgcccctgccgcctgaagaagcgccctcctgtgcgcgcggccgcagatccaaaaaagaagagaaaggtagatccaaaaaagaagagaaaggtagatccaaaaaagaagagaaaggtagatacggccgcatag

SEQ ID NO: 22 - DNA, 3468 bp, Neisseria meningitidis
atggccgccttcaagcccaaccccatcaactacatcctgggcctggccatcggcatcgccagcgtgggctgggccatggtggagatcgacgaggacgagaaccccatctgcctgatcgacctgggtgtgcgcgtgttcgagcgcgctgaggtgcccaagactggtgacagtctggctatggctcgccggcttgctcgctctgttcggcgccttactcgccggcgcgctcaccgccttctgcgcgctcgccgcctgctgaagcgcgagggtgtgctgcaggctgccgacttcgacgagaacggcctgatcaagagcctgcccaacactccttggcagctgcgcgctgccgctctggaccgcaagctgactcctctggagtggagcgccgtgctgctgcacctgatcaagcaccgcggctacctgagccagcgcaagaacgagggcgagaccgccgacaaggagctgggtgctctgctgaagggcgtggccgacaacgcccacgccctgcagactggtgacttccgcactcctgctgagctggccctgaacaagttcgagaaggagagcggccacatccgcaaccagcgcggcgactacagccacaccttcagccgcaaggacctgcaggccgagctgatcctgctgttcgagaagcagaaggagttcggcaacccccacgtgagcggcggcctgaaggagggcatcgagaccctgctgatgacccagcgccccgccctgagcggcgacgccgtgcagaagatgctgggccactgcaccttcgagccagccgagcccaaggccgccaagaacacctacaccgccgagcgcttcatctggctgaccaagctgaacaacctgcgcatcctggagcagggcagcgagcgccccctgaccgacaccgagcgcgccaccctgatggacgagccctaccgcaagagcaagctgacctacgcccaggcccgcaagctgctgggtctggaggacaccgccttcttcaagggcctgcgctacggcaaggacaacgccgaggccagcaccctgatggagatgaaggcctaccacgccatcagccgcgccctggagaaggagggcctgaaggacaagaagagtcctctgaacctgagccccgagctgcaggacgagatcggcaccgccttcagcctgttcaagaccgacgaggacatcaccggccgcctgaaggaccgcatccagcccgagatcctggaggccctgctgaagcacatcagcttcgacaagttcgtgcagatcagcctgaaggccctgcgccgcatcgtgcccctgatggagcagggcaagcgctacgacgaggcctgcgccgagatctacggcgaccactacggcaagaagaacaccgaggagaagatctacctgcctcctatccccgccgacgagatccgcaaccccgtggtgctgcgcgccctgagccaggcccgcaaggtgatcaacggcgtggtgcgccgctacggcagccccgcccgcatccacatcgagaccgcccgcgaggtgggcaagagcttcaaggaccgcaaggagatcgagaagcgccaggaggagaaccgcaaggaccgcgagaaggccgccgccaagttccgcgagtacttccccaacttcgtgggcgagcccaagagcaaggacatcctgaagctgcgcctgtacgagcagcagcacggcaagtgcctgtacagcggcaaggagatcaacctgggccgcctgaacgagaagggctacgtggagatcgccgctgccctgcccttcagccgcacctgggacgacagcttcaacaacaaggtgctggtgctgggcagcgaggctcagaacaagggcaaccagaccccctacgagtacttcaacggcaaggacaacagccgcgagtggcaggagttcaaggcccgcgtggagaccagccgcttcccccgcagcaagaagcagcgcatcctgctgcagaagttcgacgaggacggcttcaaggagcgcaacctgaacgacacccgctacgtgaaccgcttcctgtgccagttcgtggccgaccgcatgcgcctgaccggcaagggcaagaagcgcgtgttcgccagcaacggccagatcaccaacctgctgcgcggcttctggggcctgcgcaaggtgcgcgccgagaacgaccgccaccacgccctggacgccgtggtggtggcctgcagcaccgtggccatgcagcagaagatcacccgcttcgtgcgctacaaggagatgaacgccttcgacggtaaaaccatcgacaaggagaccggcgaggtgctgcaccagaagacccacttcccccagccctgggagttcttcgcccaggaggtgatgatccgcgtgttcggcaagcccgacggcaagcccgagttcgaggaggccgacacccccgagaagctgcgcaccctgctggccgagaagctgagcagccgccctgaggccgtgcacgagtacgtgactcctctgttcgtgagccgcgcccccaaccgcaagatgagcggtcagggtcacatggagaccgtgaagagcgccaagcgcctggacgagggcgtgagcgtgctgcgcgtgcccctgacccagctgaagctgaaggacctggagaagatggtgaaccgcgagcgcgagcccaagctgtacgaggccctgaaggcccgcctggaggcccacaaggacgaccccgccaaggccttcgccgagcccttctacaagtacgacaaggccggcaaccgcacccagcaggtgaaggccgtgcgcgtggagcaggtgcagaagaccggcgtgtgggtgcgcaaccacaacggcatcgccgacaacgccaccatggtgcgcgtggacgtgttcgagaagggcgacaagtactacctggtgcccatctacagctggcaggtggccaagggcatcctgcccgaccgcgccgtggtgcagggcaaggacgaggaggactggcagctgatcgacgacagcttcaacttcaagttcagcctgcaccccaacgacctggtggaggtgatcaccaagaaggcccgcatgttcggctacttcgccagctgccaccgcggcaccggcaacatcaacatccgcatccacgacctggaccacaagatcggcaagaacggcatcctggagggcatcggcgtgaagaccgccctgagcttccagaagtaccagatcgacgagctgggcaaggagatccgcccctgccgcctgaagaagcgccctcctgtgcgcagcagggctgaccccaagaagaagaggaaggtggaggccagcggttccggacgggctgacgcattggacgattttgatctggatatgctgggaagtgacgccctcgatgattttgaccttgacatgcttggttcggatgcccttgatgactttgacctcgacatgctcggcagtgacgcccttgatgatttcgacctggacatgctgattaactctagatga

SEQ ID NO: 23 - DNA, 3489 bp, Neisseria meningitidis
atgcccaagaagaagaggaaggtggccgccttcaagcccaaccccatcaactacatcctgggcctggccatcggcatcgccagcgtgggctgggccatggtggagatcgacgaggacgagaaccccatctgcctgatcgacctgggtgtgcgcgtgttcgagcgcgctgaggtgcccaagactggtgacagtctggctatggctcgccggcttgctcgctctgttcggcgccttactcgccggcgcgctcaccgccttctgcgcgctcgccgcctgctgaagcgcgagggtgtgctgcaggctgccgacttcgacgagaacggcctgatcaagagcctgcccaacactccttggcagctgcgcgctgccgctctggaccgcaagctgactcctctggagtggagcgccgtgctgctgcacctgatcaagcaccgcggctacctgagccagcgcaagaacgagggcgagaccgccgacaaggagctgggtgctctgctgaagggcgtggccgacaacgcccacgccctgcagactggtgacttccgcactcctgctgagctggccctgaacaagttcgagaaggagagcggccacatccgcaaccagcgcggcgactacagccacaccttcagccgcaaggacctgcaggccgagctgatcctgctgttcgagaagcagaaggagttcggcaacccccacgtgagcggcggcctgaaggagggcatcgagaccctgctgatgacccagcgccccgccctgagcggcgacgccgtgcagaagatgctgggccactgcaccttcgagccagccgagcccaaggccgccaagaacacctacaccgccgagcgcttcatctggctgaccaagctgaacaacctgcgcatcctggagcagggcagcgagcgccccctgaccgacaccgagcgcgccaccctgatggacgagccctaccgcaagagcaagctgacctacgcccaggcccgcaagctgctgggtctggaggacaccgccttcttcaagggcctgcgctacggcaaggacaacgccgaggccagcaccctgatggagatgaaggcctaccacgccatcagccgcgccctggagaaggagggcctgaaggacaagaagagtcctctgaacctgagccccgagctgcaggacgagatcggcaccgccttcagcctgttcaagaccgacgaggacatcaccggccgcctgaaggaccgcatccagcccgagatcctggaggccctgctgaagcacatcagcttcgacaagttcgtgcagatcagcctgaaggccctgcgccgcatcgtgcccctgatggagcagggcaagcgctacgacgaggcctgcgccgagatctacggcgaccactacggcaagaagaacaccgaggagaagatctacctgcctcctatccccgccgacgagatccgcaaccccgtggtgctgcgcgccctgagccaggcccgcaaggtgatcaacggcgtggtgcgccgctacggcagccccgcccgcatccacatcgagaccgcccgcgaggtgggcaagagcttcaaggaccgcaaggagatcgagaagcgccaggaggagaaccgcaaggaccgcgagaaggccgccgccaagttccgcgagtacttccccaacttcgtgggcgagcccaagagcaaggacatcctgaagctgcgcctgtacgagcagcagcacggcaagtgcctgtacagcggcaaggagatcaacctgggccgcctgaacgagaagggctacgtggagatcgccgctgccctgcccttcagccgcacctgggacgacagcttcaacaacaaggtgctggtgctgggcagcgaggctcagaacaagggcaaccagaccccctacgagtacttcaacggcaaggacaacagccgcgagtggcaggagttcaaggcccgcgtggagaccagccgcttcccccgcagcaagaagcagcgcatcctgctgcagaagttcgacgaggacggcttcaaggagcgcaacctgaacgacacccgctacgtgaaccgcttcctgtgccagttcgtggccgaccgcatgcgcctgaccggcaagggcaagaagcgcgtgttcgccagcaacggccagatcaccaacctgctgcgcggcttctggggcctgcgcaaggtgcgcgccgagaacgaccgccaccacgccctggacgccgtggtggtggcctgcagcaccgtggccatgcagcagaagatcacccgcttcgtgcgctacaaggagatgaacgccttcgacggtaaaaccatcgacaaggagaccggcgaggtgctgcaccagaagacccacttcccccagccctgggagttcttcgcccaggaggtgatgatccgcgtgttcggcaagcccgacggcaagcccgagttcgaggaggccgacacccccgagaagctgcgcaccctgctggccgagaagctgagcagccgccctgaggccgtgcacgagtacgtgactcctctgttcgtgagccgcgcccccaaccgcaagatgagcggtcagggtcacatggagaccgtgaagagcgccaagcgcctggacgagggcgtgagcgtgctgcgcgtgcccctgacccagctgaagctgaaggacctggagaagatggtgaaccgcgagcgcgagcccaagctgtacgaggccctgaaggcccgcctggaggcccacaaggacgaccccgccaaggccttcgccgagcccttctacaagtacgacaaggccggcaaccgcacccagcaggtgaaggccgtgcgcgtggagcaggtgcagaagaccggcgtgtgggtgcgcaaccacaacggcatcgccgacaacgccaccatggtgcgcgtggacgtgttcgagaagggcgacaagtactacctggtgcccatctacagctggcaggtggccaagggcatcctgcccgaccgcgccgtggtgcagggcaaggacgaggaggactggcagctgatcgacgacagcttcaacttcaagttcagcctgcaccccaacgacctggtggaggtgatcaccaagaaggcccgcatgttcggctacttcgccagctgccaccgcggcaccggcaacatcaacatccgcatccacgacctggaccacaagatcggcaagaacggcatcctggagggcatcggcgtgaagaccgccctgagcttccagaagtaccagatcgacgagctgggcaaggagatccgcccctgccgcctgaagaagcgccctcctgtgcgcagcagggctgaccccaagaagaagaggaaggtggaggccagcggttccggacgggctgacgcattggacgattttgatctggatatgctgggaagtgacgccctcgatgattttgaccttgacatgcttggttcggatgcccttgatgactttgacctcgacatgctcggcagtgacgcccttgatgatttcgacctggacatgctgattaactctagatga

SEQ ID NO: 24 - DNA, 3249 bp, Neisseria meningitidis
atggctgccttcaaacctaattcaatcaactacatcctcggcctcgatatcggcatcgcatccgtcggctgggcgatggtagaaattgacgaagaagaaaaccccatccgcctgattgatttgggcgtgcgcgtatttgagcgtgccgaagtaccgaaaacaggcgactcccttgccatggcaaggcgtttggcgcgcagtgttcgccgcctgacccgccgtcgcgcccaccgcctgcttcggacccgccgcctattgaaacgcgaaggcgtattacaagccgccaattttgacgaaaacggcttgattaaatccttaccgaatacaccatggcaacttcgcgcagccgcattagaccgcaaactgacgcctttagagtggtcggcagtcttgttgcatttaatcaaacatcgcggctatttatcgcaacggaaaaacgagggcgaaactgccgataaggagcttggcgctttgcttaaaggcgtagccggcaatgcccatgccttacagacaggcgatttccgcacaccggccgaattggctttaaataaatttgagaaagaaagcggccatatccgcaatcagcgcagcgattattcgcatacgttcagccgcaaagatttacaggcggagctgattttgctgtttgaaaaacaaaaagaatttggcaatccgcatgtttcaggcggccttaaagaaggtattgaaaccctactgatgacgcaacgccctgccctgtccggcgatgccgttcaaaaaatgttggggcattgcaccttcgaaccggcagagccgaaagccgctaaaaacacctacacagccgaacgtttcatctggctgaccaagctgaacaacctgcgtattttagagcaaggcagcgagcggccattgaccgataccgaacgcgccacgcttatggacgagccatacagaaaatccaaactgacttacgcacaagcccgtaagctgctgggtttagaagataccgcctttttcaaaggcttgcgctatggtaaagacaatgccgaagcctcaacattgatggaaatgaaggcctaccatgccatcagccgtgcactggaaaaagaaggattgaaagacaaaaaatccccattaaacctttctcccgaattacaagacgaaatcggcacggcattctccctgttcaaaaccgatgaagacattacaggccgtctgaaagaccgtatacagcccgaaatcttagaagcgctgttgaaacacatcagcttcgataagttcgtccaaatttccttgaaagcattgcgccgaattgtgcctctaatggaacaaggcaaacgttacgatgaagcctgcgccgaaatctacggagaccattacggcaagaagaatacggaagaaaagatttatctgccgccgattcccgccgacgaaatccgcaaccccgtcgtcttgcgcgccttatctcaagcacgtaaggtcattaacggcgtggtacgccgttacggctccccagctcgtatccatattgaaactgcaagggaagtaggtaaatcgtttaaagaccgcaaagaaattgagaaacgccaagaagaaaaccgcaaagaccgggaaaaagccgccgccaaattccgagagtatttccccaattttgtcggagaacccaaatccaaagatattctgaaactgcgcctgtacgagcaacaacacggcaaatgcctgtattcgggcaaagaaatcaacttaggccgtctgaacgaaaaaggctatgtcgaaatcgaccatgccctgccgttctcgcgcacatgggacgacagtttcaacaataaagtactggtattgggcagcgaaaaccaaaacaaaggcaatcaaaccccttacgaatacttcaacggcaaagacaacagccgcgaatggcaggaatttaaagcgcgtgtcgaaaccagccgtttcccgcgcagtaaaaaacaacggattctgctgcaaaaattcgatgaagacggctttaaagaacgcaatctgaacgacacgcgctacgtcaaccgtttcctgtgtcaatttgttgccgaccgtatgcggctgacaggtaaaggcaagaaacgtgtctttgcatccaacggacaaattaccaatctgttgcgcggcttttggggattgcgcaaagtgcgtgcggaaaacgaccgccatcacgccttggacgccgtcgtcgttgcctgctcgaccgttgccatgcagcagaaaattacccgttttgtacgctataaagagatgaacgcgtttgacggtaaaaccatagacaaagaaacaggagaagtgctgcatcaaaaaacacacttcccacaaccttgggaatttttcgcacaagaagtcatgattcgcgtcttcggcaaaccggacggcaaacccgaattcgaagaagccgataccctagaaaaactgcgcacgttgcttgccgaaaaattatcatctcgccccgaagccgtacacgaatacgttacgccactgtttgtttcacgcgcgcccaatcggaagatgagcgggcaagggcatatggagaccgtcaaatccgccaaacgactggacgaaggcgtcagcgtgttgcgcgtaccgctgacacagttaaaactgaaagacttggaaaaaatggtcaatcgggagcgcgaacctaagctatacgaagcactgaaagcacggctggaagcacataaagacgatcctgccaaagcctttgccgagccgttttacaaatacgataaagcaggcaaccgcacccaacaggtaaaagccgtacgcgtagagcaagtacagaaaaccggcgtatgggtgcgcaaccataacggtattgccgacaacgcaaccatggtgcgcgtagatgtgtttgagaaaggcgacaagtattatctggtaccgatttacagttggcaggtagcgaaagggattttgccggatagggctgttgtacaaggaaaagatgaagaagattggcaacttattgatgatagtttcaactttaaattctcattacaccctaatgatttagtcgaggttataacaaaaaaagctagaatgtttggttactttgccagctgccatcgaggcacaggtaatatcaatatacgcattcatgatcttgatcataaaattggcaaaaatggaatactggaaggtatcggcgtcaaaaccgccctttcattccaaaaataccaaattgacgaactgggcaaagaaatcagaccatgccgtctgaaaaaacgcccgcctgtccgttaa

SEQ ID NO: 25 - DNA, 4188 bp, Treponema denticola
atgaaaaaggaaattaaggattattttctcggattggatgtaggaaccggatcggttggttgggcagttactgatactgactataaactcttaaaggctaatcgtaaagacctttggggaatgaggtgttttgagacggcggaaactgcggaagtgagaaggcttcacaggggggctaggcgccgtattgagagaagaaaaaaaagaataaagctgcttcaagagcttttttcccaagaaattgcaaaaacagatgagggatttttccaaagaatgaaggaaagccctttctatgcagaagacaagactatattacaggaaaacactctttttaatgataaagattttgccgataagacctaccataaagcctatcctaccataaaccatctgataaaggcttggattgaaaacaaggtaaagccggatccaaggttattatacttagcctgtcataatattataaaaaaaagaggtcattttttattcgagggcgatttcgattcagaaaatcagtttgatacttctatacaagccctttttgaatatctgcgtgaagatatggaagtcgatattgatgccgatagccaaaaagtaaaagagattttaaaggatagctctttaaaaaattccgaaaaacaaagccgcctaaataagattttaggactgaaaccctccgacaaacaaaaaaaagctattactaatttaatatcaggcaacaaaataaactttgccgatctttatgataatccggatttaaaggatgcggagaaaaatagtatatctttttcgaaagatgattttgatgctttgagtgatgatcttgcttccattctaggagattcttttgagcttttattaaaagcaaaggctgtatataactgctcggttctttccaaggtaataggcgatgaacagtatctttcttttgcaaaggtaaaaatatatgaaaagcataaaaccgatttgactaaattaaaaaatgttataaaaaagcatttcccaaaagattataaaaaagtattcggatacaataaaaacgaaaaaaataacaacaattactccggatatgtaggcgtatgtaaaaccaagagtaaaaaactaattataaacaattctgtaaatcaagaagatttttacaaatttttaaaaactatcctttcagcaaaatccgagataaaggaagtaaatgatatattgaccgaaattgaaacagggacttttttacctaaacagatatctaaaagcaatgcggagattccttatcaattacgcaagatggagctggaaaaaatattatcaaacgcagaaaaacatttttcctttttaaaacaaaaagatgaaaaaggtttatctcacagtgaaaagattataatgcttttaacatttaagattccttattatattggacctataaacgataaccataaaaaattttttcccgatagatgctgggtagtaaaaaaagaaaaatcgccttccggtaaaactactccatggaacttttttgatcatatcgataaagaaaaaacagctgaagcatttattacaagcagaaccaatttttgcacatatttagtaggggaatccgttttaccaaaaagttctcttttatattccgagtataccgttttaaatgaaatcaacaatttacagattatcattgacggaaaaaatatctgcgatattaaactaaaacaaaaaatatacgaagatttatttaaaaaatataaaaagattacacaaaaacaaatttcaacttttatcaaacacgaaggtatttgcaataaaactgatgaagtaattattctaggtatcgataaagaatgtacatcttcgttaaaatcatatatagaacttaaaaacatattcggaaagcaagtagatgaaatttctacaaagaatatgcttgaagaaattatacgatgggctactatctatgatgaaggagaaggcaaaacaatacttaaaacaaaaataaaagccgaatatggaaaatattgttctgatgaacagatcaaaaaaattctaaatcttaaattttcaggttggggccgcttgtcacgcaaattccttgaaaccgtcacatcagaaatgccgggttttagcgaaccggtaaatataataactgcaatgcgggaaactcaaaataatttaatggagttgcttagcagtgaatttacatttactgaaaatattaaaaagataaattcgggatttgaagatgctgaaaagcaattttcatatgacggtttggttaagcctctgtttttatcaccatcggtaaaaaaaatgttgtggcagactctaaagcttgtaaaagaaatatcgcatattacccaagcccctcctaaaaaaatatttatagaaatggcaaagggtgcagagcttgaacctgcgaggactaagacaagattaaaaattttacaagacttatacaataactgtaaaaatgatgcggatgcttttagttccgagataaaagacctttcaggtaaaatagaaaatgaagataatttaaggcttcgaagcgacaaactttatctttattacacgcagcttggaaagtgcatgtattgcggtaaaccgattgaaataggccatgtatttgatacaagcaactatgatatagatcatatttatccccaatccaagattaaagatgacagtataagtaatcgggttttagtatgcagcagctgcaataaaaataaggaagataaatatcctttgaagtctgaaattcaatcaaagcaaaggggcttttggaattttttacaacgaaataactttataagccttgaaaaattgaataggttaacaagggccactccaatctcggatgacgaaacggcaaaattcattgccagacagcttgtagaaacaagacaggcgacaaaagtagctgcaaaagtattagaaaaaatgtttcccgaaactaagattgtttattctaaagctgaaaccgtatcaatgtttagaaataaattcgatattgtaaaatgcagagaaataaacgattttcatcatgctcatgatgcatatttaaatattgttgtcggaaatgtatataatacaaaatttacaaataatccttggaactttataaaggagaaacgggataatccaaagattgccgatacttacaattattataaagtttttgattatgatgtaaaaagaaataatattacggcatgggaaaaaggaaaaacaattatcactgtgaaggatatgcttaaaagaaatacccctatttatacacgccaagccgcctgcaaaaaaggagaactctttaaccaaaccattatgaaaaaaggattgggccagcatcctctaaaaaaagaaggtcctttttctaatatttcaaaatatgggggctataataaagtctctgctgcatattatactcttatagaatacgaagaaaaagggaataaaatacgaagcttagaaaccatccctctatatttggtaaaagacattcaaaaagatcaagatgtattaaagagttacttaacagatctgctagggaaaaaagaatttaagattttggttcctaaaataaaaatcaactccctcttaaaaattaacggtttcccttgtcatataacagggaaaaccaatgattctttcttactgcgtccggctgttcagttttgctgttcaaataatgaagttctttattttaaaaaaattataagattcagtgaaataagaagtcaaagagaaaagataggaaaaacaatttctccttatgaagacttatcctttagatcttatatcaaagaaaatttatggaaaaagacaaaaaatgatgaaataggagaaaaggagttttatgaccttcttcaaaagaagaatttggaaatctatgatatgcttttaacaaaacataaggatactatttataaaaaaagacctaactctgcaactattgatatcttagtcaaaggaaaagaaaagtttaaatctttaataatcgaaaatcagtttgaagttattttagagattttaaaactgttttctgccactagaaatgtatcagacttacaacatataggcggaagcaaatattcaggagttgcaaagataggaaataaaatatctagtcttgataactgtattttaatttaccaatcaataacaggtatttttgaaaaaaggattgatttgttaaaggtatga

SEQ ID NO: 26 - DNA, 4188 bp, Treponema denticola
atgaagaaggagatcaaggactacttcctgggcctggacgtgggcaccggcagcgtgggctgggccgtgaccgacaccgactacaagctgctgaaggccaaccgcaaggacctgtggggcatgcgctgcttcgagactgctgagaccgccgaggtgcgccggctgcaccgcggtgctcgccggcgcatcgagcgccgcaagaagcgcatcaagctgctgcaggagctgttcagccaggagatcgccaagaccgacgagggcttcttccagcgcatgaaggagagccccttctacgccgaggacaagaccatcctgcaggagaacaccctgttcaacgacaaggacttcgccgacaagacctaccacaaggcctaccccaccatcaaccacctgatcaaggcctggatcgagaacaaggtgaagcccgaccctcgcctgctgtacctggcctgccacaacatcatcaagaagcgcggccacttcctgttcgagggcgacttcgacagcgagaaccagttcgacaccagcatccaggccctgttcgagtacctgcgcgaggacatggaggtggacatcgacgccgacagccagaaggtgaaggagatcctgaaggacagcagcctgaagaacagcgagaagcagagccgcctgaacaagatcctgggcctgaagcccagcgacaagcagaagaaggccatcaccaacctgatcagcggcaacaagatcaacttcgccgacctgtacgacaaccccgacctgaaggacgccgagaagaacagcatcagcttcagcaaggacgacttcgacgccctgagcgacgacctggccagcatcctgggcgacagcttcgagctgctgctgaaggccaaggccgtgtacaactgcagcgtgctgagcaaggtgatcggcgacgagcagtacctgagcttcgccaaggtgaagatctacgagaagcacaagaccgaccttaccaagctgaagaacgtgatcaagaagcacttccccaaggactacaagaaggtgttcggctacaacaagaacgagaagaacaacaacaactacagcggctacgtgggcgtgtgcaagaccaagagcaagaagctgatcatcaacaacagcgtgaaccaggaggacttctacaagttcctgaagaccatcctgagcgccaagagcgagatcaaggaggtgaacgacatcctgaccgagatcgagaccggcaccttcctgcccaagcagatcagcaagagcaacgccgagatcccctaccagctgcgcaagatggagctggagaagatcctgagcaacgccgagaagcacttcagcttcctgaagcagaaggacgagaagggcctgagccacagcgagaagatcatcatgctgctgaccttcaagatcccctactacatcggccccatcaacgacaaccacaagaagttcttccccgaccgctgctgggtggtgaagaaggagaagagccccagcggcaagaccaccccctggaacttcttcgaccacatcgacaaggagaagaccgccgaggccttcatcaccagccgcaccaacttctgcacatacctggtgggcgagagcgtgctgcccaagagcagcctgctgtacagcgagtacaccgtgctgaacgagatcaacaacctgcagatcatcatcgacggcaagaacatctgcgacatcaagctgaagcagaagatctacgaggacctgttcaagaagtacaagaagatcacccagaagcagatcagcaccttcatcaagcacgagggcatctgcaacaagaccgacgaggtgatcatcctgggcatcgacaaggagtgcaccagcagcctgaagagctacatcgagctgaagaacatcttcggcaagcaggtggacgagatcagcaccaagaacatgctggaggagatcatccgctgggccaccatctacgacgagggcgagggcaagaccatcctgaagaccaagatcaaggccgagtacggcaagtactgcagcgacgagcagatcaagaagatcctgaacctgaagttcagcggctggggccgcctgagccgcaagttcctggagaccgtgaccagcgagatgcccggcttcagcgagcccgtgaacatcatcaccgccatgcgcgagacccagaacaacctgatggagctgctgagcagcgagttcaccttcaccgagaacatcaagaagatcaacagcggcttcgaggacgccgagaagcagttcagctacgacggcctggtgaagcccctgttcctgagccccagcgtgaagaagatgctgtggcagaccctgaagctggtgaaggagatcagccacatcacccaggctcctcctaagaagatcttcatcgagatggccaagggcgccgagctggagcctgctcgcaccaagacccgcctgaagatcctgcaggacctgtacaacaactgcaagaacgacgccgacgcattcagcagcgagatcaaggacctgagcggcaagatcgagaacgaggacaacctgcgcctgcgcagcgacaagctgtacctgtactacacccagctgggcaagtgcatgtactgcggcaagcccatcgagatcggccacgtgttcgacaccagcaactacgacatcgaccacatctacccccagagcaagatcaaggacgacagcatcagcaaccgcgtgctggtgtgcagcagctgcaacaagaacaaggaggacaagtaccctctgaagagcgagatccagagcaagcagcgcggcttctggaacttcctgcagcgcaacaacttcatcagcctggagaagctgaaccgcctgacccgcgccacccccatcagcgacgacgagaccgccaagttcatcgcccgccagctggtggagactcgccaagctaccaaggtggccgccaaggtgctggagaagatgttccccgagaccaagatcgtgtacagcaaggccgagaccgtgagcatgttccgcaacaagttcgacatcgtgaagtgccgcgagatcaacgacttccaccacgcccacgacgcctacctgaacatcgtggtgggcaacgtgtacaacaccaagttcaccaacaacccctggaatttcattaaggagaagcgcgacaaccccaagatcgccgacacctacaactactacaaggtgttcgactacgacgtgaagcgcaacaacatcaccgcctgggagaagggcaagaccatcatcaccgtgaaggacatgctgaagcgcaacacccccatctacacccgccaggccgcctgcaagaagggcgagctgttcaaccagaccatcatgaagaagggcctgggccagcaccccctgaagaaggagggccccttcagcaacatcagcaagtacggcggctacaacaaggtgagcgccgcctactacaccctgatcgagtacgaggagaagggcaacaagatccgcagcctggagaccatccccctgtacctggtgaaggacatccagaaggaccaggacgtgctgaagagctacctgaccgacctgctgggcaagaaggagttcaagatcctggtgcccaagatcaagatcaacagcctgctgaagatcaacggcttcccctgccacatcaccggcaagaccaacgacagcttcctgctgcgccccgccgtgcagttctgctgcagcaacaacgaggtgctgtacttcaagaagatcatccgcttcagcgagatccgcagccagcgcgagaagatcggcaagaccatcagcccctacgaggacctgagcttccgcagctacatcaaggagaacctgtggaagaagaccaagaacgacgagatcggcgagaaggagttctacgacctgctgcagaagaagaacctggagatctacgacatgctgctgaccaagcacaaggacaccatctacaagaagcgccccaacagcgccaccatcgacatcctggtgaagggcaaggagaagttcaagagcctgatcatcgagaaccagttcgaggtgatcctggagatcctgaagctgttcagcgccacccgcaacgtgagcgacctgcagcacatcggcggcagcaagtacagcggcgtggccaagatcggcaacaagatcagcagcctggacaactgcatcctgatctaccagagcatcaccggcatcttcgagaagcgcatcgacctgctgaaggtgtaa

SEQ ID NO: 27 - DNA, 4188 bp, Treponema denticola
atgaagaaggagatcaaggactacttcctgggcctggccgtgggcaccggcagcgtgggctgggccgtgaccgacaccgactacaagctgctgaaggccaaccgcaaggacctgtggggcatgcgctgcttcgagactgctgagaccgccgaggtgcgccggctgcaccgcggtgctcgccggcgcatcgagcgccgcaagaagcgcatcaagctgctgcaggagctgttcagccaggagatcgccaagaccgacgagggcttcttccagcgcatgaaggagagccccttctacgccgaggacaagaccatcctgcaggagaacaccctgttcaacgacaaggacttcgccgacaagacctaccacaaggcctaccccaccatcaaccacctgatcaaggcctggatcgagaacaaggtgaagcccgaccctcgcctgctgtacctggcctgccacaacatcatcaagaagcgcggccacttcctgttcgagggcgacttcgacagcgagaaccagttcgacaccagcatccaggccctgttcgagtacctgcgcgaggacatggaggtggacatcgacgccgacagccagaaggtgaaggagatcctgaaggacagcagcctgaagaacagcgagaagcagagccgcctgaacaagatcctgggcctgaagcccagcgacaagcagaagaaggccatcaccaacctgatcagcggcaacaagatcaacttcgccgacctgtacgacaaccccgacctgaaggacgccgagaagaacagcatcagcttcagcaaggacgacttcgacgccctgagcgacgacctggccagcatcctgggcgacagcttcgagctgctgctgaaggccaaggccgtgtacaactgcagcgtgctgagcaaggtgatcggcgacgagcagtacctgagcttcgccaaggtgaagatctacgagaagcacaagaccgaccttaccaagctgaagaacgtgatcaagaagcacttccccaaggactacaagaaggtgttcggctacaacaagaacgagaagaacaacaacaactacagcggctacgtgggcgtgtgcaagaccaagagcaagaagctgatcatcaacaacagcgtgaaccaggaggacttctacaagttcctgaagaccatcctgagcgccaagagcgagatcaaggaggtgaacgacatcctgaccgagatcgagaccggcaccttcctgcccaagcagatcagcaagagcaacgccgagatcccctaccagctgcgcaagatggagctggagaagatcctgagcaacgccgagaagcacttcagcttcctgaagcagaaggacgagaagggcctgagccacagcgagaagatcatcatgctgctgaccttcaagatcccctactacatcggccccatcaacgacaaccacaagaagttcttccccgaccgctgctgggtggtgaagaaggagaagagccccagcggcaagaccaccccctggaacttcttcgaccacatcgacaaggagaagaccgccgaggccttcatcaccagccgcaccaacttctgcacatacctggtgggcgagagcgtgctgcccaagagcagcctgctgtacagcgagtacaccgtgctgaacgagatcaacaacctgcagatcatcatcgacggcaagaacatctgcgacatcaagctgaagcagaagatctacgaggacctgttcaagaagtacaagaagatcacccagaagcagatcagcaccttcatcaagcacgagggcatctgcaacaagaccgacgaggtgatcatcctgggcatcgacaaggagtgcaccagcagcctgaagagctacatcgagctgaagaacatcttcggcaagcaggtggacgagatcagcaccaagaacatgctggaggagatcatccgctgggccaccatctacgacgagggcgagggcaagaccatcctgaagaccaagatcaaggccgagtacggcaagtactgcagcgacgagcagatcaagaagatcctgaacctgaagttcagcggctggggccgcctgagccgcaagttcctggagaccgtgaccagcgagatgcccggcttcagcgagcccgtgaacatcatcaccgccatgcgcgagacccagaacaacctgatggagctgctgagcagcgagttcaccttcaccgagaacatcaagaagatcaacagcggcttcgaggacgccgagaagcagttcagctacgacggcctggtgaagcccctgttcctgagccccagcgtgaagaagatgctgtggcagaccctgaagctggtgaaggagatcagccacatcacccaggctcctcctaagaagatcttcatcgagatggccaagggcgccgagctggagcctgctcgcaccaagacccgcctgaagatcctgcaggacctgtacaacaactgcaagaacgacgccgacgcattcagcagcgagatcaaggacctgagcggcaagatcgagaacgaggacaacctgcgcctgcgcagcgacaagctgtacctgtactacacccagctgggcaagtgcatgtactgcggcaagcccatcgagatcggccacgtgttcgacaccagcaactacgacatcgctgctatctacccccagagcaagatcaaggacgacagcatcagcaaccgcgtgctggtgtgcagcagctgcgccaagaacaaggaggacaagtaccctctgaagagcgagatccagagcaagcagcgcggcttctggaacttcctgcagcgcaacaacttcatcagcctggagaagctgaaccgcctgacccgcgccacccccatcagcgacgacgagaccgccaagttcatcgcccgccagctggtggagactcgccaagctaccaaggtggccgccaaggtgctggagaagatgttccccgagaccaagatcgtgtacagcaaggccgagaccgtgagcatgttccgcaacaagttcgacatcgtgaagtgccgcgagatcaacgacttccaccacgcccacgacgcctacctgaacatcgtggtgggcaacgtgtacaacaccaagttcaccaacaacccctggaatttcattaaggagaagcgcgacaaccccaagatcgccgacacctacaactactacaaggtgttcgactacgacgtgaagcgcaacaacatcaccgcctgggagaagggcaagaccatcatcaccgtgaaggacatgctgaagcgcaacacccccatctacacccgccaggccgcctgcaagaagggcgagctgttcaaccagaccatcatgaagaagggcctgggccagcaccccctgaagaaggagggccccttcagcaacatcagcaagtacggcggctacaacaaggtgagcgccgcctactacaccctgatcgagtacgaggagaagggcaacaagatccgcagcctggagaccatccccctgtacctggtgaaggacatccagaaggaccaggacgtgctgaagagctacctgaccgacctgctgggcaagaaggagttcaagatcctggtgcccaagatcaagatcaacagcctgctgaagatcaacggcttcccctgccacatcaccggcaagaccaacgacagcttcctgctgcgccccgccgtgcagttctgctgcagcaacaacgaggtgctgtacttcaagaagatcatccgcttcagcgagatccgcagccagcgcgagaagatcggcaagaccatcagcccctacgaggacctgagcttccgcagctacatcaaggagaacctgtggaagaagaccaagaacgacgagatcggcgagaaggagttctacgacctgctgcagaagaagaacctggagatctacgacatgctgctgaccaagcacaaggacaccatctacaagaagcgccccaacagcgccaccatcgacatcctggtgaagggcaaggagaagttcaagagcctgatcatcgagaaccagttcgaggtgatcctggagatcctgaagctgttcagcgccacccgcaacgtgagcgacctgcagcacatcggcggcagcaagtacagcggcgtggccaagatcggcaacaagatcagcagcctggacaactgcatcctgatctaccagagcatcaccggcatcttcgagaagcgcatcgacctgctgaaggtgtaa

SEQ ID NO: 28 - protein, 1053 aa, Streptococcus aureas
MKRNYILGLDIGITSVGYGIIDYETRDVIDAGVRLFKEANVENNEGRRSKRGARRLKRRRRHRIQRVKKLLFDYNLLTDHSELSGINPYEARVKGLSQKLSEEEFSAALLHLAKRRGVHNVNEVEEDTGNELSTKEQISRNSKALEEKYVAELQLERLKKDGEVRGSINRFKTSDYVKEAKQLLKVQKAYHQLDQSFIDTYIDLLETRRTYYEGPGEGSPFGWKDIKEWYEMLMGHCTYFPEELRSVKYAYNADLYNALNDLNNLVITRDENEKLEYYEKFQIIENVFKQKKKPTLKQIAKEILVNEEDIKGYRVTSTGKPEFTNLKVYHDIKDITARKEIIENAELLDQIAKILTIYQSSEDIQEELTNLNSELTQEEIEQISNLKGYTGTHNLSLKAINLILDELWHTNDNQIAIFNRLKLVPKKVDLSQQKEIPTTLVDDFILSPVVKRSFIQSIKVINAIIKKYGLPNDIIIELAREKNSKDAQKMINEMQKRNRQTNERIEEIIRTTGKENAKYLIEKIKLHDMQEGKCLYSLEAIPLEDLLNNPFNYEVDHIIPRSVSFDNSFNNKVLVKQEENSKKGNRTPFQYLSSSDSKISYETFKKHILNLAKGKGRISKTKKEYLLEERDINRFSVQKDFINRNLVDTRYATRGLMNLLRSYFRVNNLDVKVKSINGGFTSFLRRKWKFKKERNKGYKHHAEDALIIANADFIFKEWKKLDKAKKVMENQMFEEKQAESMPEIETEQEYKEIFITPHQIKHIKDFKDYKYSHRVDKKPNRELINDTLYSTRKDDKGNTLIVNNLNGLYDKDNDKLKKLINKSPEKLLMYHHDPQTYQKLKLIMEQYGDEKNPLYKYYEETGNYLTKYSKKDNGPVIKKIKYYGNKLNAHLDITDDYPNSRNKVVKLSLKPYRFDVYLDNGVYKFVTVKNLDVIKKENYYEVNSKCYEEAKKLKKISNQAEFIASFYNNDLIKINGELYRVIGVNNDLLNRIEVNMIDITYREYLENMNDKRPPRIIKTIASKTQSIKKYSTDILGNLYEVKSKKHPQIIKKG

SEQ ID NO: 29 - DNA, 3162 bp, Streptococcus aureas
atgaaaaggaattatatcttaggattagatatcggaattacatcagtgggttatggaattattgattatgaaactagagatgtcatagatgcgggcgtacgtttatttaaagaggctaatgttgaaaataatgaaggacgacgatcaaaaagaggtgccagaaggcttaagaggcgtcgtagacatagaatacaaagagtaaagaaacttttatttgattacaatttgttgacagatcatagtgagctaagtggaatcaatccttacgaggcgcgcgtaaagggattaagtcaaaaattaagtgaagaggaattttctgcggcattgctacatttagcaaagcgtagaggtgtacataatgttaatgaagtggaagaagatacaggtaatgaattatccactaaagaacaaatttcaagaaatagtaaagcgttagaagagaagtatgttgcagaattacagttggaacgtttgaaaaaagacggtgaagtgagaggttcgattaaccgtttcaaaacatctgactatgtaaaagaagcaaagcagttattaaaagtacaaaaagcatatcatcaacttgatcaatcatttatagacacttatattgatttattggaaacaagaagaacatattatgagggaccaggtgaaggtagcccatttggatggaaagatattaaagaatggtatgaaatgttaatgggacattgtacgtatttcccagaagaattacgtagtgtgaaatatgcctataatgctgatttatataatgcgctgaatgatttgaacaacttggttattacacgagatgagaatgagaagctagagtattatgaaaaattccaaattatcgagaatgtctttaaacaaaagaaaaagccgacgcttaaacaaattgcgaaggaaatcttggtgaatgaagaagacatcaaaggctatcgtgtcacaagtacaggtaaaccagaatttacaaacttgaaagtttatcacgatatcaaagatattacagcaagaaaagaaattatcgagaatgcagagctactcgatcaaatagctaaaatattaactatttaccagtcatcagaagatatacaagaagaattaacaaacctaaattcagaattgacacaagaagagattgaacaaatttcaaacttgaaaggttatacaggaactcataacctttcactaaaggcaataaatttaatattagacgaattgtggcatacgaacgataatcaaatagctattttcaatcgtttgaaacttgtacctaaaaaggtagatttaagccaacaaaaagaaattcctactactttagttgatgattttatactgtctccagtagtgaaacgttcatttatacaatctattaaagttattaacgctattattaaaaaatacggtttgccaaatgatattattattgaacttgcgagagaaaagaattctaaagatgcacaaaaaatgattaatgaaatgcagaagagaaatcgtcaaacgaatgaacgtattgaggaaattataagaacgacaggtaaagaaaatgctaaatatttaattgaaaaaattaagctgcacgatatgcaagaagggaaatgtttatactcgttagaagcaatccctctagaagatttacttaataatccattcaattacgaagtagaccatatcattccacgttctgtttctttcgataactctttcaataataaagtgttggtgaaacaagaagaaaatagtaaaaaaggtaatagaacgccatttcaatatttaagttcttcagattctaaaataagttatgagacattcaaaaagcatattttaaatcttgctaaaggcaaaggtagaatctctaagacgaaaaaagaatatttgttagaagaacgagatatcaatcgcttcagtgtccaaaaagattttattaaccgtaacttagtagatacacgctatgcgacaagagggttaatgaacttattaagatcttattttagagtgaataacttagatgtcaaagtgaaatcgattaatggcggattcacaagtttcttaagaaggaaatggaagttcaaaaaagaaagaaataagggctacaaacaccatgctgaagatgcactgattattgcgaacgctgattttattttcaaagaatggaaaaaactagataaagctaaaaaagtgatggaaaatcaaatgtttgaagaaaagcaagctgaaagtatgcctgaaattgagactgagcaagagtataaagaaatttttataacgcctcatcaaattaaacatattaaggattttaaagattataaatattcacatagagttgataaaaagccgaatagagagttaataaatgatacattatattctacgagaaaagatgacaagggtaatacattaatcgttaataacttaaatggtttatacgataaagataatgataaattgaaaaaattaattaataaatcacctgaaaaattattgatgtatcatcatgatccacaaacatatcaaaaattaaaattgatcatggaacaatatggcgatgagaaaaatccgctttataaatattatgaagaaacaggcaattacttaacaaaatatagtaaaaaagataacggaccagtcatcaaaaaaattaaatattatggtaacaagctaaatgcgcatttagatattacggatgattatccaaatagcagaaataaagtagtaaaactttcattaaaaccatatcgctttgatgtttatttagataatggggtatataaatttgtgacagttaaaaatttagatgttatcaaaaaagaaaactactatgaagttaattcaaagtgttatgaagaagcaaaaaaactgaagaaaattagtaatcaagcagaatttatcgcaagtttttacaataatgacttgattaagattaacggagaattatatagagtcataggtgtaaataatgatctacttaacagaattgaagtaaatatgatagacatcacatatagagaatatttagagaacatgaatgataaaagaccacctagaataattaaaacaatagcaagcaaaacacaatctattaaaaagtattctacagatattctaggcaatctttatgaagtgaagagtaaaaagcatcctcaaatcataaagaaaggatga

SEQ ID NO: 30 - protein, 1629 aa, Francisella tularensis
MNFKILPIAIDLGVKNTGVFSAFYQKGTSLERLDNKNGKVYELSKDSYTLLMNNRTARRHQRRGIDRKQLVKRLFKLIWTEQLNLEWDKDTQQAISFLFNRRGFSFITDGYSPEYLNIVPEQVKAILMDIFDDYNGEDDLDSYLKLATEQESKISEIYNKLMQKILEFKLMKLCTDIKDDKVSTKTLKEITSYEFELLADYLANYSESLKTQKFSYTDKQGNLKELSYYHHDKYNIQEFLKRHATINDRILDTLLTDDLDIWNFNFEKFDFDKNEEKLQNQEDKDHIQAHLHHFVFAVNKIKSEMASGGRHRSQYFQEITNVLDENNHQEGYLKNFCENLHNKKYSNLSVKNLVNLIGNLSNLELKPLRKYFNDKIHAKADHWDEQKFTETYCHWILGEWRVGVKDQDKKDGAKYSYKDLCNELKQKVTKAGLVDFLLELDPCRTIPPYLDNNNRKPPKCQSLILNPKFLDNQYPNWQQYLQELKKLQSIQNYLDSFETDLKVLKSSKDQPYFVEYKSSNQQIASGQRDYKDLDARILQFIFDRVKASDELLLNEIYFQAKKLKQKASSELEKLESSKKLDEVIANSQLSQILKSQHTNGIFEQGTFLHLVCKYYKQRQRARDSRLYIMPEYRYDKKLHKYNNTGRFDDDNQLLTYCNHKPRQKRYQLLNDLAGVLQVSPNFLKDKIGSDDDLFISKWLVEHIRGFKKACEDSLKIQKDNRGLLNHKINIARNTKGKCEKEIFNLICKIEGSEDKKGNYKHGLAYELGVLLFGEPNEASKPEFDRKIKKFNSIYSFAQIQQIAFAERKGNANTCAVCSADNAHRMQQIKITEPVEDNKDKIILSAKAQRLPAIPTRIVDGAVKKMATILAKNIVDDNWQNIKQVLSAKHQLHIPIITESNAFEFEPALADVKGKSLKDRRKKALERISPENIFKDKNNRIKEFAKGISAYSGANLTDGDFDGAKEELDHIIPRSHKKYGTLNDEANLICVTRGDNKNKGNRIFCLRDLADNYKLKQFETTDDLEIEKKIADTIWDANKKDFKFGNYRSFINLTPQEQKAFRHALFLADENPIKQAVIRAINNRNRTFVNGTQRYFAEVLANNIYLRAKKENLNTDKISFDYFGIPTIGNGRGIAEIRQLYEKVDSDIQAYAKGDKPQASYSHLIDAMLAFCIAADEHRNDGSIGLEIDKNYSLYPLDKNTGEVFTKDIFSQIKITDNEFSDKKLVRKKAIEGFNTHRQMTRDGIYAENYLPILIHKELNEVRKGYTWKNSEEIKIFKGKKYDIQQLNNLVYCLKFVDKPISIDIQISTLEELRNILTTNNIAATAEYYYINLKTQKLHEYYIENYNTALGYKKYSKEMEFLRSLAYRSERVKIKSIDDVKQVLDKDSNFIIGKITLPFKKEWQRLYREWQNTTIKDDYEFLKSFFNVKSITKLHKKVRKDFSLPISTNEGKFLVKRKTWDNNFIYQILNDSDSRADGTKPFIPAFDISKNEIVEAIIDSFTSKNIFWLPKNIELQKVDNKNIFAIDTSKWFEVETPSDLRDIGIATIQYKIDNNSRPKVRVKLDYVIDDDSKINYFMNHSLLKSRYPDKVLEILKQSTIIEFESSGFNKTIKEMLGMKLAGIYNETSNN

SEQ ID NO: 31 - DNA, 4890 bp, Francisella tularensis
atgaatttcaaaatattgccaatagcaatagatttaggtgttaaaaatactggtgtctttagcgcattttatcaaaaaggaacttctcttgagagattggataataaaaatggcaaagtatatgaactatcaaaagattcttatactttattgatgaataatagaacagcaagaagacatcaaagaagagggatagatagaaagcagctagtcaaaaggctctttaagcttatttggacagagcagctaaatttagagtgggataaagacactcaacaagcaattagctttttatttaatcgtagaggttttagttttattactgatggttattcgcctgaatatttaaatattgttccagagcaagtaaaagcgatacttatggatatatttgatgattacaacggtgaagatgatttagacagttatttaaaattagctactgagcaagaaagcaaaatttctgaaatttataacaagctaatgcaaaaaatattagagtttaaattaatgaaattatgtactgatattaaggatgataaagtaagtactaaaacgcttaaagaaatcacaagctatgaatttgagttattagctgattatttagcaaactatagcgagagtttaaaaacacaaaaatttagttatacagataaacaaggtaatttaaaagagctaagctactatcatcatgataaatataatattcaagaatttctaaagcgacatgctactataaatgatcgaattttagatactcttttaactgatgatttagatatttggaattttaattttgagaaatttgattttgataagaatgaagaaaagcttcagaatcaggaagataaagatcatatacaagcgcatttacatcattttgtttttgcagtaaataaaataaaaagtgaaatggcaagtggtggtcgtcatcgtagccaatattttcaagagataacaaatgtgctagatgaaaataatcatcaagagggatatctcaagaatttctgtgaaaatttgcataataaaaaatattcaaatttaagtgttaaaaatttagttaatctaattggtaacctaagtaatttagagctaaaaccgctaagaaaatattttaatgacaaaattcacgcaaaagctgatcattgggatgagcaaaagtttacagaaacttattgccactggatattaggagagtggcgagtaggtgtcaaagatcaagataagaaagatggcgctaaatatagttataaagatctgtgtaatgaattaaaacaaaaagttactaaggctggtttggtagattttttattagagttagatccatgtagaactataccaccatatctggataacaataaccgtaaaccaccaaaatgtcaaagtttgattttaaatccgaagtttttagataatcaatatccaaactggcaacaatatttacaagaattaaagaaactacaaagtattcaaaattatttagacagttttgaaactgatttaaaagtcttaaagtcaagtaaagatcaaccatattttgttgaatacaagagttcaaatcagcaaatagcaagtggtcaaagagattataaagatttagatgctcgaatattacagtttatatttgatagggtaaaagctagtgatgagttgcttttgaatgagatttattttcaggctaaaaaacttaaacaaaaagctagctctgagttagaaaaactcgagtcgagcaaaaagctagatgaagttatagcaaatagtcaactatcacagatactaaagtctcaacatacaaatggtatttttgaacagggtacttttttgcatttggtttgtaaatattataaacaaagacaaagagcgagagactctaggctatatattatgcctgaatatcgttatgataaaaaactacataaatataacaatacaggcaggtttgatgatgataatcagctgctaacatattgtaatcataagccaagacaaaaaagataccaattgttaaatgatttagctggggtgttgcaggtatcacctaattttttgaaagataaaattggttctgatgatgatctatttattagcaaatggttggtagagcatattagaggatttaaaaaagcttgtgaagatagtttaaaaatacaaaaagacaatagaggattattaaatcataaaataaatatagctaggaatacaaaaggcaaatgtgaaaaagaaatatttaatttaatatgtaaaatagaaggttcagaagataaaaaaggtaattacaagcatggtttagcttacgaattaggagtacttttatttggtgaacctaatgaagctagtaaacctgagttcgatagaaaaattaaaaaatttaactcaatatacagttttgcacagattcaacaaattgcttttgcagagcgtaaaggcaatgctaacacttgtgcagtttgtagtgctgataatgctcatagaatgcaacaaattaagatcactgagcctgtagaggacaataaagataagataatcttaagtgccaaagctcagagactaccagcgattccaactagaatagttgacggtgcggttaagaaaatggcaactatattagctaaaaatatagttgatgataattggcagaatatcaaacaagttttatcagcaaaacatcagttacatatacctattatcacagaatcaaatgcttttgagtttgaaccagcattagctgatgtaaaaggtaagagcctaaaagataggagaaaaaaagcattagagagaataagtcctgaaaatatattcaaggataaaaacaatagaataaaagaatttgctaaaggtatatcagcatatagtggtgctaatttaactgatggcgattttgatggtgcaaaagaagaattagatcatataatacctcgttcacataaaaaatacggtactctaaatgatgaagcaaatctaatttgtgtaactcgtggtgataataaaaataaaggtaatagaattttctgcctacgtgatcttgcagataactataaactaaaacagtttgagacaactgatgatttagaaattgaaaagaagatagctgatacaatctgggatgctaacaagaaagattttaaatttggtaattatcgtagttttattaacctaacaccacaagagcagaaagcatttcgtcacgcgctatttctggctgatgaaaatcctatcaaacaagcagtcataagagcgataaataatcgtaatcgtacatttgtaaatggcactcaacgctattttgcagaagtactggcaaacaatatctatctaagggctaaaaaagaaaatctaaatacagataaaatttcatttgattattttggtattccaactataggtaatggtagaggtattgctgaaatccgtcaactttatgaaaaagttgatagtgatatacaagcttatgcaaaaggtgataaacctcaagctagctactctcacctaatagatgcgatgctggctttttgtattgctgctgatgaacacagaaatgatggaagtataggtctagaaatcgataaaaattatagtttatatccattagataaaaatacaggagaagtctttaccaaagatatttttagtcaaattaaaattactgataatgagtttagcgataaaaaattagtaagaaaaaaagctatagagggctttaacacgcatagacaaatgactagagatggcatttatgcagaaaattacctaccaatactaatccataaagaactaaatgaagttagaaaaggctatacttggaaaaatagtgaagaaataaaaatattcaaaggtaaaaagtacgatatacaacaattgaataaccttgtgtattgtctaaaatttgtagataaacctatatctatagatatacaaattagtaccttagaagagttaagaaatatattaacaacaaataatatagctgctacagcagaatactattatataaatctaaaaacccaaaaattacatgagtattatatcgaaaactataatactgccttaggttataaaaaatacagtaaagaaatggagtttttgagaagcttagcttatcgtagcgaaagggtaaaaattaaatcaatagatgatgtaaagcaggttttggataaggatagtaactttatcatcggtaagattactttaccatttaaaaaagagtggcaaagactatatcgtgagtggcaaaatacaactatcaaagatgattatgagtttttaaaatcattctttaatgttaaaagtattactaagttgcataaaaaagttagaaaagatttctctttacctatttctacaaatgaaggtaaattcctggtcaaaagaaaaacatgggataacaattttatctatcagatattaaatgattctgattctagagcagacggaacaaagccatttattccagcttttgacatttctaaaaatgaaatagtcgaagccataattgattcatttacatcaaaaaatattttttggctgcctaaaaatatagaattacaaaaggtggataataaaaacatttttgctatagatactagtaaatggttcgaagtagaaacacctagtgatcttagagacattggaatagcaacaattcaatacaagatagataataattctcgccctaaagtcagagttaaacttgattatgttatcgatgatgatagtaagataaattattttatgaatcattctttattaaaatcaagatatcctgacaaagttttagaaattttaaaacaatcaactattatagaatttgaaagttcaggttttaataaaactatcaaagaaatgcttggtatgaaattagcaggtatttataatgaaacatctaataattag

SEQ ID NO: 32 - DNA, 3903 bp, Francisella tularensis
  Francisella tularensis subsp. novicida (strain U112)
atgtcaatttatcaagaatttgttaataaatatagtttaagtaaaactctaagatttgagttaatcccacagggtaaaacacttgaaaacataaaagcaagaggtttgattttagatgatgagaaaagagctaaagactacaaaaaggctaaacaaataattgataaatatcatcagttttttatagaggagatattaagttcggtttgtattagcgaagatttattacaaaactattctgatgtttattttaaacttaaaaagagtgatgatgataatctacaaaaagattttaaaagtgcaaaagatacgataaagaaacaaatatctgaatatataaaggactcagagaaatttaagaatttgtttaatcaaaaccttatcgatgctaaaaaagggcaagagtcagatttaattctatggctaaagcaatctaaggataatggtatagaactatttaaagccaatagtgatatcacagatatagatgaggcgttagaaataatcaaatcttttaaaggttggacaacttattttaagggttttcatgaaaatagaaaaaatgtttatagtagcaatgatattcctacatctattatttataggatagtagatgataatttgcctaaatttctagaaaataaagctaagtatgagagtttaaaagacaaagctccagaagctataaactatgaacaaattaaaaaagatttggcagaagagctaacctttgatattgactacaaaacatctgaagttaatcaaagagttttttcacttgatgaagtttttgagatagcaaactttaataattatctaaatcaaagtggtattactaaatttaatactattattggtggtaaatttgtaaatggtgaaaatacaaagagaaaaggtataaatgaatatataaatctatactcacagcaaataaatgataaaacactcaaaaaatataaaatgagtgttttatttaagcaaattttaagtgatacagaatctaaatcttttgtaattgataagttagaagatgatagtgatgtagttacaacgatgcaaagtttttatgagcaaatagcagcttttaaaacagtagaagaaaaatctattaaagaaacactatctttattatttgatgatttaaaagctcaaaaacttgatttgagtaaaatttattttaaaaatgataaatctcttactgatctatcacaacaagtttttgatgattatagtgttattggtacagcggtactagaatatataactcaacaaatagcacctaaaaatcttgataaccctagtaagaaagagcaagaattaatagccaaaaaaactgaaaaagcaaaatacttatctctagaaactataaagcttgccttagaagaatttaataagcatagagatatagataaacagtgtaggtttgaagaaatacttgcaaactttgcggctattccgatgatatttgatgaaatagctcaaaacaaagacaatttggcacagatatctatcaaatatcaaaatcaaggtaaaaaagacctacttcaagctagtgcggaagatgatgttaaagctatcaaggatcttttagatcaaactaataatctcttacataaactaaaaatatttcatattagtcagtcagaagataaggcaaatattttagacaaggatgagcatttttatctagtatttgaggagtgctactttgagctagcgaatatagtgcctctttataacaaaattagaaactatataactcaaaagccatatagtgatgagaaatttaagctcaattttgagaactcgactttggctaatggttgggataaaaataaagagcctgacaatacggcaattttatttatcaaagatgataaatattatctgggtgtgatgaataagaaaaataacaaaatatttgatgataaagctatcaaagaaaataaaggcgagggttataaaaaaattgtttataaacttttacctggcgcaaataaaatgttacctaaggttttcttttctgctaaatctataaaattttataatcctagtgaagatatacttagaataagaaatcattccacacatacaaaaaatggtagtcctcaaaaaggatatgaaaaatttgagtttaatattgaagattgccgaaaatttatagatttttataaacagtctataagtaagcatccggagtggaaagattttggatttagattttctgatactcaaagatataattctatagatgaattttatagagaagttgaaaatcaaggctacaaactaacttttgaaaatatatcagagagctatattgatagcgtagttaatcagggtaaattgtacctattccaaatctataataaagatttttcagcttatagcaaagggcgaccaaatctacatactttatattggaaagcgctgtttgatgagagaaatcttcaagatgtggtttataagctaaatggtgaggcagagcttttttatcgtaaacaatcaatacctaaaaaaatcactcacccagctaaagaggcaatagctaataaaaacaaagataatcctaaaaaagagagtgtttttgaatatgatttaatcaaagataaacgctttactgaagataagtttttctttcactgtcctattacaatcaattttaaatctagtggagctaataagtttaatgatgaaatcaatttattgctaaaagaaaaagcaaatgatgttcatatattaagtatagatagaggtgaaagacatttagcttactatactttggtagatggtaaaggcaatatcatcaaacaagatactttcaacatcattggtaatgatagaatgaaaacaaactaccatgataagcttgctgcaatagagaaagatagggattcagctaggaaagactggaaaaagataaataacatcaaagagatgaaagagggctatctatctcaggtagttcatgaaatagctaagctagttatagagtataatgctattgtggtttttgaggatttaaattttggatttaaaagagggcgtttcaaggtagagaagcaggtctatcaaaagttagaaaaaatgctaattgagaaactaaactatctagttttcaaagataatgagtttgataaaactgggggagtgcttagagcttatcagctaacagcaccttttgagacttttaaaaagatgggtaaacaaacaggtattatctactatgtaccagctggttttacttcaaaaatttgtcctgtaactggttttgtaaatcagttatatcctaagtatgaaagtgtcagcaaatctcaagagttctttagtaagtttgacaagatttgttataaccttgataagggctattttgagtttagttttgattataaaaactttggtgacaaggctgccaaaggcaagtggactatagctagctttgggagtagattgattaactttagaaattcagataaaaatcataattgggatactcgagaagtttatccaactaaagagttggagaaattgctaaaagattattctatcgaatatgggcatggcgaatgtatcaaagcagctatttgcggtgagagcgacaaaaagttttttgctaagctaactagtgtcctaaatactatcttacaaatgcgtaactcaaaaacaggtactgagttagattatctaatttcaccagtagcagatgtaaatggcaatttctttgattcgcgacaggcgccaaaaaatatgcctcaagatgctgatgccaatggtgcttatcatattgggctaaaaggtctgatgctactaggtaggatcaaaaataatcaagagggcaaaaaactcaatttggttatcaaaaatgaagagtattttgagttcgtgcagaataggaataactaa

SEQ ID NO: 33 - protein, 1300 aa, Francisella tularensis
  Francisella tularensis subsp. novicida (strain U112)
MSIYQEFVNKYSLSKTLRFELIPQGKTLENIKARGLILDDEKRAKDYKKAKQIIDKYHQFFIEEILSSVCISEDLLQNYSDVYFKLKKSDDDNLQKDFKSAKDTIKKQISEYIKDSEKFKNLFNQNLIDAKKGQESDLILWLKQSKDNGIELFKANSDITDIDEALEIIKSFKGWTTYFKGFHENRKNVYSSNDIPTSIIYRIVDDNLPKFLENKAKYESLKDKAPEAINYEQIKKDLAEELTFDIDYKTSEVNQRVFSLDEVFEIANFNNYLNQSGITKFNTIIGGKFVNGENTKRKGINEYINLYSQQINDKTLKKYKMSVLFKQILSDTESKSFVIDKLEDDSDVVTTMQSFYEQIAAFKTVEEKSIKETLSLLFDDLKAQKLDLSKIYFKNDKSLTDLSQQVFDDYSVIGTAVLEYITQQIAPKNLDNPSKKEQELIAKKTEKAKYLSLETIKLALEEFNKHRDIDKQCRFEEILANFAAIPMIFDEIAQNKDNLAQISIKYQNQGKKDLLQASAEDDVKAIKDLLDQTNNLLHKLKIFHISQSEDKANILDKDEHFYLVFEECYFELANIVPLYNKIRNYITQKPYSDEKFKLNFENSTLANGWDKNKEPDNTAILFIKDDKYYLGVMNKKNNKIFDDKAIKENKGEGYKKIVYKLLPGANKMLPKVFFSAKSIKFYNPSEDILRIRNHSTHTKNGSPQKGYEKFEFNIEDCRKFIDFYKQSISKHPEWKDFGFRFSDTQRYNSIDEFYREVENQGYKLTFENISESYIDSVVNQGKLYLFQIYNKDFSAYSKGRPNLHTLYWKALFDERNLQDVVYKLNGEAELFYRKQSIPKKITHPAKEAIANKNKDNPKKESVFEYDLIKDKRFTEDKFFFHCPITINFKSSGANKFNDEINLLLKEKANDVHILSIDRGERHLAYYTLVDGKGNIIKQDTFNIIGNDRMKTNYHDKLAAIEKDRDSARKDWKKINNIKEMKEGYLSQVVHEIAKLVIEYNAIVVFEDLNFGFKRGRFKVEKQVYQKLEKMLIEKLNYLVFKDNEFDKTGGVLRAYQLTAPFETFKKMGKQTGIIYYVPAGFTSKICPVTGFVNQLYPKYESVSKSQEFFSKFDKICYNLDKGYFEFSFDYKNFGDKAAKGKWTIASFGSRLINFRNSDKNHNWDTREVYPTKELEKLLKDYSIEYGHGECIKAAICGESDKKFFAKLTSVLNTILQMRNSKTGTELDYLISPVADVNGNFFDSRQAPKNMPQDADANGAYHIGLKGLMLLGRIKNNQEGKKLNLVIKNEEYFEFVQNRNN

SEQ ID NO: 34 - DNA, 3924 bp, Acidaminococcus sp.
  Acidaminococcus sp. (strain BV3L6)
atgacccaatttgaaggttttaccaatttataccaagtttcgaagacccttcgttttgaactgattccccaaggaaaaacactcaaacatatccaggagcaagggttcattgaggaggataaagctcgcaatgaccattacaaagagttaaaaccaatcattgaccgcatctataagacttatgctgatcaatgtctccaactggtacagcttgactgggagaatctatctgcagccatagactcctatcgtaaggaaaaaaccgaagaaacacgaaatgcgctgattgaggagcaagcaacatatagaaatgcgattcatgactactttataggtcggacggataatctgacagatgccataaataagcgccatgctgaaatctataaaggactttttaaagctgaacttttcaatggaaaagttttaaagcaattagggaccgtaaccacgacagaacatgaaaatgctctactccgttcgtttgacaaatttacgacctatttttccggcttttatgaaaaccgaaaaaatgtctttagcgctgaagatatcagcacggcaattccccatcgaatcgtccaggacaatttccctaaatttaaggaaaactgccatatttttacaagattgataaccgcagttccttctttgcgggagcattttgaaaatgtcaaaaaggccattggaatctttgttagtacgtctattgaagaagtcttttcctttcccttttataatcaacttctaacccaaacgcaaattgatctttataatcaacttctcggcggcatatctagggaagcaggcacagaaaaaatcaagggacttaatgaagttctcaatctggctatccaaaaaaatgatgaaacagcccatataatcgcgtccctgccgcatcgttttattcctctttttaaacaaattctttccgatcgaaatacgttatcctttattttggaagaattcaaaagcgatgaggaagtcatccaatccttctgcaaatataaaaccctcttgagaaacgaaaatgtactggagactgcagaagcccttttcaatgaattaaattccattgatttgactcatatctttatttcccataaaaagttagaaaccatctcttcagcgctttgtgaccattgggataccttgcgcaatgcactttacgaaagacggatttctgaactcactggcaaaataacaaaaagtgccaaagaaaaagttcaaaggtcattaaaacatgaggatataaatctccaagaaattatttctgctgcaggaaaagaactatcagaagcattcaaacaaaaaacaagtgaaattctttcccatgcccatgctgcacttgaccagcctcttcccacaacattaaaaaaacaggaagaaaaagaaatcctcaaatcacagctcgattcgcttttaggcctttatcatcttcttgattggtttgctgtcgatgaaagcaatgaagtcgacccagaattctcagcacggctgacaggcattaaactagaaatggaaccaagcctttcgttttataataaagcaagaaattatgcgacaaaaaagccctattcggtggaaaaatttaaattgaattttcaaatgccaacccttgcctctggttgggatgtcaataaagaaaaaaataatggagctattttattcgtaaaaaatggtctctattaccttggtatcatgcctaaacagaaggggcgctataaagccctgtcttttgagccgacagaaaaaacatcagaaggattcgataagatgtactatgactacttcccagatgccgcaaaaatgattcctaagtgttccactcagctaaaggctgtaaccgctcattttcaaactcataccacccccattcttctctcaaataatttcattgaacctcttgaaatcacaaaagaaatttatgacctgaacaatcctgaaaaggagcctaaaaagtttcaaacggcttatgcaaagaagacaggcgatcaaaaaggctatagagaagcgctttgcaaatggattgactttacgcgggattttctctctaaatatacgaaaacaacttcaatcgatttatcttcactccgcccttcttcgcaatataaagatttaggggaatattacgccgaactgaatccgcttctctatcatatctccttccaacgaattgctgaaaaggaaatcatggatgctgtagaaacgggaaaattgtatctgttccaaatctacaataaggattttgcgaagggccatcacgggaaaccaaatctccacaccctgtattggacaggtctcttcagtcctgaaaaccttgcgaaaaccagcatcaaacttaatggtcaagcagaattgttctatcgacctaaaagccgcatgaagcggatggcccatcgtcttggggaaaaaatgctgaacaaaaaactaaaggaccagaagacaccgattccagataccctctaccaagaactgtacgattatgtcaaccaccggctaagccatgatctttccgatgaagcaagggccctgcttccaaatgttatcaccaaagaagtctcccatgaaattataaaggatcggcggtttacttccgataaatttttcttccatgttcccattacactgaattatcaagcagccaatagtcccagtaaattcaaccagcgtgtcaatgcctaccttaaggagcatccggaaacgcccatcattggtatcgatcgtggagaacgcaatctaatctatattaccgtcattgacagtactgggaaaattttggagcagcgttccctgaataccatccagcaatttgactaccaaaaaaaattggacaacagggaaaaagagcgtgttgccgcccgtcaagcctggtccgtcgtcggaacgatcaaagaccttaaacaaggctacttgtcacaggtcatccatgaaattgtagacctgatgattcattaccaagctgttgtcgtccttgaaaacctcaacttcggatttaaatcaaaacggacaggcattgccgaaaaagcagtctaccaacaatttgaaaagatgctaatagataaactcaactgtttggttctcaaagattatcctgctgagaaagtgggaggcgtcttaaacccgtatcaacttacagatcagttcacgagctttgcaaaaatgggcacgcaaagcggcttccttttctatgtaccggccccttatacctcaaagattgatcccctgactggttttgtcgatccctttgtatggaagaccattaaaaatcatgaaagtcggaagcatttcctagaaggatttgatttcctgcattatgatgtcaaaacaggtgattttatcctccattttaaaatgaatcggaatctctctttccagagagggcttcctggcttcatgccagcttgggatattgttttcgaaaagaatgaaacccaatttgatgcaaaagggacgcccttcattgcaggaaaacgaattgttcctgtaatcgaaaatcatcgttttacgggtcgttacagagacctctatcccgctaatgaactcattgcccttctggaagaaaaaggcattgtctttagagacggaagtaatatattacccaaacttttagaaaatgatgattctcatgcaattgatacgatggtcgccttgattcgcagtgtactccaaatgagaaacagcaatgccgcaacgggggaagactacatcaactctcccgttagggatctgaacggggtgtgtttcgacagtcgattccaaaatccagaatggccaatggatgcggatgccaacggagcttatcatattgccttaaaagggcagcttcttctgaaccacctcaaagaaagcaaagatctgaaattacaaaacggcatcagcaaccaagattggctggcctacattcaggaactgagaaactga

SEQ ID NO: 35 - protein, 1307 aa, Acidaminococcus sp.
  Acidaminococcus sp. (strain BV3L6)
MTQFEGFTNLYQVSKTLRFELIPQGKTLKHIQEQGFIEEDKARNDHYKELKPIIDRIYKTYADQCLQLVQLDWENLSAAIDSYRKEKTEETRNALIEEQATYRNAIHDYFIGRTDNLTDAINKRHAEIYKGLFKAELFNGKVLKQLGTVTTTEHENALLRSFDKFTTYFSGFYENRKNVFSAEDISTAIPHRIVQDNFPKFKENCHIFTRLITAVPSLREHFENVKKAIGIFVSTSIEEVFSFPFYNQLLTQTQIDLYNQLLGGISREAGTEKIKGLNEVLNLAIQKNDETAHIIASLPHRFIPLFKQILSDRNTLSFILEEFKSDEEVIQSFCKYKTLLRNENVLETAEALFNELNSIDLTHIFISHKKLETISSALCDHWDTLRNALYERRISELTGKITKSAKEKVQRSLKHEDINLQEIISAAGKELSEAFKQKTSEILSHAHAALDQPLPTTLKKQEEKEILKSQLDSLLGLYHLLDWFAVDESNEVDPEFSARLTGIKLEMEPSLSFYNKARNYATKKPYSVEKFKLNFQMPTLASGWDVNKEKNNGAILFVKNGLYYLGIMPKQKGRYKALSFEPTEKTSEGFDKMYYDYFPDAAKMIPKCSTQLKAVTAHFQTHTTPILLSNNFIEPLEITKEIYDLNNPEKEPKKFQTAYAKKTGDQKGYREALCKWIDFTRDFLSKYTKTTSIDLSSLRPSSQYKDLGEYYAELNPLLYHISFQRIAEKEIMDAVETGKLYLFQIYNKDFAKGHHGKPNLHTLYWTGLFSPENLAKTSIKLNGQAELFYRPKSRMKRMAHRLGEKMLNKKLKDQKTPIPDTLYQELYDYVNHRLSHDLSDEARALLPNVITKEVSHEIIKDRRFTSDKFFFHVPITLNYQAANSPSKFNQRVNAYLKEHPETPIIGIDRGERNLIYITVIDSTGKILEQRSLNTIQQFDYQKKLDNREKERVAARQAWSVVGTIKDLKQGYLSQVIHEIVDLMIHYQAVVVLENLNFGFKSKRTGIAEKAVYQQFEKMLIDKLNCLVLKDYPAEKVGGVLNPYQLTDQFTSFAKMGTQSGFLFYVPAPYTSKIDPLTGFVDPFVWKTIKNHESRKHFLEGFDFLHYDVKTGDFILHFKMNRNLSFQRGLPGFMPAWDIVFEKNETQFDAKGTPFIAGKRIVPVIENHRFTGRYRDLYPANELIALLEEKGIVFRDGSNILPKLLENDDSHAIDTMVALIRSVLQMRNSNAATGEDYINSPVRDLNGVCFDSRFQNPEWPMDADANGAYHIALKGQLLLNHLKESKDLKLQNGISNQDWLAYIQELRN

SEQ ID NO: 36 - DNA, 3741 bp, Lachnospiraceae bacterium
  Lachnospiraceae bacterium (strain ND2006)
atgcttaagaatgttggaattgataggttagatgttgaaaaagggagaaaaaatatgtctaaattagagaagtttacaaattgttactctttgtcaaaaacacttcgttttaaggcgattcctgttggaaaaacccaagaaaatattgataataaaagattgcttgtcgaggatgaaaaacgtgcagaagattataagggggttaaaaaattacttgataggtattatttatcatttattaatgatgttcttcattccattaaactaaagaatttaaataattatatttcgttgtttagaaagaaaactcggacggaaaaagaaaacaaagaattagaaaatttagagataaatttacgtaaagaaatcgctaaggcttttaagggtaatgaaggttataaatctttatttaagaaggatattatcgagacgatattgcctgaatttcttgatgataaagatgaaattgctttggttaattcatttaatggatttacaacggcatttaccggtttttttgataatagggaaaatatgttttcggaagaagctaaatcaacctcaattgcttttcgttgtattaatgagaatttaacaagatatatatcaaatatggatatatttgaaaaagttgatgcaattttcgataagcatgaagtacaggaaataaaagaaaaaattctaaacagtgattatgatgttgaagatttcttcgaaggagaattttttaattttgttcttacgcaagaaggtatcgatgtttataacgctataattggtggctttgtgacagaatccggagaaaaaataaaaggattaaatgaatatattaatttatataatcagaaaactaagcaaaaattaccgaagtttaagcctttatataaacaggttttatcagatagagagtcactttctttttatggcgaaggttatacatctgatgaggaagttttagaagtatttagaaatactcttaataagaattcagaaatattttcttcaattaagaaattggaaaagttatttaaaaacttcgatgaatattcaagtgcaggaattttcgtaaaaaatggaccggctatttctacaatttctaaggatatatttggagagtggaatgtaattagagacaaatggaatgcggagtacgatgatatacatttaaaaaagaaggctgtagtaacagaaaaatatgaagatgacaggcgtaaatcattcaaaaaaataggaagtttttcattggagcagttgcaagaatacgctgatgctgatctatctgtggtagagaagttaaaagaaatcattatccaaaaagtggatgagatatataaagtttatggctcgtcagaaaaattgttcgatgctgattttgtactagaaaaatcgttaaaaaagaatgatgcagttgtagcaataatgaaagatttactagattctgtgaagtcttttgaaaattatataaaagccttttttggagagggaaaagaaacaaatcgagatgaatcattttatggtgattttgttttggcatatgacattcttttgaaagtggatcatatttatgatgcaatacgaaattatgtgacacaaaaaccgtattcgaaagataagtttaaattatattttcaaaacccgcaatttatggggggctgggataaggataaagagacagactatagggcaactatacttagatatggctcaaagtattacttggcgattatggataaaaaatatgctaagtgcttgcaaaaaatagataaggatgatgtaaatggaaactatgaaaaaataaattataagttgcttccaggacctaataagatgcttccaaaggtgttttttagtaagaagtggatggcttattataatccgtcggaagatattcaaaaaatatataaaaatggaacatttaaaaaaggagatatgtttaatttaaatgattgtcataaattaattgatttctttaaggattcaatcagtcggtatccgaaatggagtaacgcatatgattttaacttttctgagaccgagaaatataaggatatagcaggtttttacagagaggttgaagaacaaggatataaagtatcatttgaaagtgcgtctaaaaaagaagttgataaattggtagaagaaggaaaattatacatgttccaaatttataataaagacttttcggataaaagtcatggaacgccaaatcttcatacaatgtattttaagttgctgtttgatgaaaataatcatggtcaaattaggctttctggtggtgctgagctattcatgcgacgtgcaagtttgaaaaaggaagaattagttgtgcatcctgccaatagcccgatagcgaataaaaacccggataatccaaagaaaacgactacgttgtcatatgatgtatacaaggacaaaagattttcggaagatcagtatgagttgcatatacctattgcaataaataaatgccctaaaaatatatttaagataaatacagaggttagagtgctgctgaagcatgatgataatccttatgttataggaattgataggggggagagaaatttactttacattgtggtggttgatggtaagggtaatattgtggagcaatattcgctgaatgaaataattaataattttaatggaattagaattaagacggattaccattcacttttggataaaaaggagaaggaaagatttgaagctcgtcaaaattggacgtctatagaaaacattaaagaactaaaagccggatatattagtcaggttgttcataagatatgtgagttggtagaaaaatatgatgcggtaattgcacttgaagatttgaattctggttttaagaatagtcgagttaaagttgaaaagcaagtatatcagaaatttgaaaaaatgctgattgataaacttaactatatggtagataagaaatctaatccttgcgctacgggtggtgctctgaaaggctatcaaattactaacaagtttgagagttttaagtcgatgagtacacaaaatggttttattttttatattccggcgtggttgactagcaaaattgatccgtcaacaggatttgtaaatttgttgaaaacaaagtatacgagcattgcagattcaaagaaatttataagttcttttgacagaattatgtatgtacctgaagaagatttattcgagtttgcattagattataagaatttttctcggacagacgcggattatataaaaaaatggaaactctatagctatggtaacaggattagaatatttagaaatcctaaaaaaaataatgtatttgattgggaagaggtatgtcttacatcagcctataaggaactttttaataaatatgggattaattatcagcaaggagatatacgagctctcttatgtgaacagagtgataaggcattctatagctcttttatggcattaatgtcactcatgctgcaaatgagaaatagtataacaggtaggacggatgtagattttttgatttcaccagtaaaaaattctgacggtattttttatgattccagaaattatgaagctcaggaaaatgcaatattaccgaaaaatgcagatgctaatggggcttataatatcgcaagaaaagttttgtgggctataggtcagtttaaaaaggctgaagatgaaaaacttgataaggttaaaattgcaatatcaaataaggaatggctcgaatatgcgcaaacaagtgttaagcattga

SEQ ID NO: 37 - protein, 1228 aa, Lachnospiraceae bacterium
  Lachnospiraceae bacterium (strain ND2006)
MSKLEKFTNCYSLSKTLRFKAIPVGKTQENIDNKRLLVEDEKRAEDYKGVKKLLDRYYLSFINDVLHSIKLKNLNNYISLFRKKTRTEKENKELENLEINLRKEIAKAFKGNEGYKSLFKKDIIETILPEFLDDKDEIALVNSFNGFTTAFTGFFDNRENMFSEEAKSTSIAFRCINENLTRYISNMDIFEKVDAIFDKHEVQEIKEKILNSDYDVEDFFEGEFFNFVLTQEGIDVYNAIIGGFVTESGEKIKGLNEYINLYNQKTKQKLPKFKPLYKQVLSDRESLSFYGEGYTSDEEVLEVFRNTLNKNSEIFSSIKKLEKLFKNFDEYSSAGIFVKNGPAISTISKDIFGEWNVIRDKWNAEYDDIHLKKKAVVTEKYEDDRRKSFKKIGSFSLEQLQEYADADLSVVEKLKEIIIQKVDEIYKVYGSSEKLFDADFVLEKSLKKNDAVVAIMKDLLDSVKSFENYIKAFFGEGKETNRDESFYGDFVLAYDILLKVDHIYDAIRNYVTQKPYSKDKFKLYFQNPQFMGGWDKDKETDYRATILRYGSKYYLAIMDKKYAKCLQKIDKDDVNGNYEKINYKLLPGPNKMLPKVFFSKKWMAYYNPSEDIQKIYKNGTFKKGDMFNLNDCHKLIDFFKDSISRYPKWSNAYDFNFSETEKYKDIAGFYREVEEQGYKVSFESASKKEVDKLVEEGKLYMFQIYNKDFSDKSHGTPNLHTMYFKLLFDENNHGQIRLSGGAELFMRRASLKKEELVVHPANSPIANKNPDNPKKTTTLSYDVYKDKRFSEDQYELHIPIAINKCPKNIFKINTEVRVLLKHDDNPYVIGIDRGERNLLYIVVVDGKGNIVEQYSLNEIINNFNGIRIKTDYHSLLDKKEKERFEARQNWTSIENIKELKAGYISQVVHKICELVEKYDAVIALEDLNSGFKNSRVKVEKQVYQKFEKMLIDKLNYMVDKKSNPCATGGALKGYQITNKFESFKSMSTQNGFIFYIPAWLTSKIDPSTGFVNLLKTKYTSIADSKKFISSFDRIMYVPEEDLFEFALDYKNFSRTDADYIKKWKLYSYGNRIRIFRNPKKNNVFDWEEVCLTSAYKELFNKYGINYQQGDIRALLCEQSDKAFYSSFMALMSLMLQMRNSITGRTDVDFLISPVKNSDGIFYDSRNYEAQENAILPKNADANGAYNIARKVLWAIGQFKKAEDEKLDKVKIAISNKEWLEYAQTSVKH

SEQ ID NO: 38 - protein, 1064 aa, Bradyrhizobium sp.
  Bradyrhizobium sp. BTAi1
MKRTSLRAYRLGVDLGANSLGWFVVWLDDHGQPEGLGPGGVRIFPDGRNPQSKQSNAAGRRLARSARRRRDRYLQRRGKLMGLLVKHGLMPADEPARKRLECLDPYGLRAKALDEVLPLHHVGRALFHLNQRRGLFANRAIEQGDKDASAIKAAAGRLQTSMQACGARTLGEFLNRRHQLRATVRARSPVGGDVQARYEFYPTRAMVDAEFEAIWAAQAPHHPTMTAEAHDTIREAIFSQRAMKRPSIGKCSLDPATSQDDVDGFRCAWSHPLAQRFRIWQDVRNLAVVETGPTSSRLGKEDQDKVARALLQTDQLSFDEIRGLLGLPSDARFNLESDRRDHLKGDATGAILSARRHFGPAWHDRSLDRQIDIVALLESALDEAAIIASLGTTHSLDEAAAQRALSALLPDGYCRLGLRAIKRVLPLMEAGRTYAEAASAAGYDHALLPGGKLSPTGYLPYYGQWLQNDVVGSDDERDTNERRWGRLPNPTVHIGIGQLRRVVNELIRWHGPPAEITVELTRDLKLSPRRLAELEREQAENQRKNDKRTSLLRKLGLPASTHNLLKLRLWDEQGDVASECPYTGEAIGLERLVSDDVDIDHLIPFSISWDDSAANKVVCMRYANREKGNRTPFEAFGHRQGRPYDWADIAERAARLPRGKRWRFGPGARAQFEELGDFQARLLNETSWLARVAKQYLAAVTHPHRIHVLPGRLTALLRATWELNDLLPGSDDRAAKSRKDHRHHAIDALVAALTDQALLRRMANAHDDTRRKIEVLLPWPTFRIDLETRLKAMLVSHKPDHGLQARLHEDTAYGTVEHPETEDGANLVYRKTFVDISEKEIDRIRDRRLRDLVRAHVAGERQQGKTLKAAVLSFAQRRDIAGHPNGIRHVRLTKSIKPDYLVPIRDKAGRIYKSYNAGENAFVDILQAESGRWIARATTVFQANQANESHDAPAAQPIMRVFKGDMLRIDHAGAEKFVKIVRLSPSNNLLYLVEHHQAGVFQTRHDDPEDSFRWLFASFDKLREWNAELVRIDTLGQPWRRKRGLETGSEDATRIGWTRPKKWP

SEQ ID NO: 39 - protein, 1035 aa, Candidatus Puniceispirillum marinum
MRRLGLDLGTNSIGWCLLDLGDDGEPVSIFRTGARIFSDGRDPKSLGSLKATRREARLTRRRRDRFIQRQKNLINALVKYGLMPADEIQRQALAYKDPYPIRKKALDEAIDPYEMGRAIFHINQRRGFKSNRKSADNEAGVVKQSIADLEMKLGEAGARTIGEFLADRQATNDTVRARRLSGTNALYEFYPDRYMLEQEFDTLWAKQAAFNPSLYIEAARERLKEIVFFQRKLKPQEVGRCIFLSDEDRISKALPSFQRFRIYQELSNLAWIDHDGVAHRITASLALRDHLFDELEHKKKLTFKAMRAILRKQGVVDYPVGFNLESDNRDHLIGNLTSCIMRDAKKMIGSAWDRLDEEEQDSFILMLQDDQKGDDEVRSILTQQYGLSDDVAEDCLDVRLPDGHGSLSKKAIDRILPVLRDQGLIYYDAVKEAGLGEANLYDPYAALSDKLDYYGKALAGHVMGASGKFEDSDEKRYGTISNPTVHIALNQVRAVVNELIRLHGKPDEVVIEIGRDLPMGADGKRELERFQKEGRAKNERARDELKKLGHIDSRESRQKFQLWEQLAKEPVDRCCPFTGKMMSISDLFSDKVEIEHLLPFSLTLDDSMANKTVCFRQANRDKGNRAPFDAFGNSPAGYDWQEILGRSQNLPYAKRWRFLPDAMKRFEADGGFLERQLNDTRYISRYTTEYISTIIPKNKIWVVTGRLTSLLRGFWGLNSILRGHNTDDGTPAKKSRDDHRHHAIDAIVVGMTSRGLLQKVSKAARRSEDLDLTRLFEGRIDPWDGFRDEVKKHIDAIIVSHRPRKKSQGALHNDTAYGIVEHAENGASTVVHRVPITSLGKQSDIEKVRDPLIKSALLNETAGLSGKSFENAVQKWCADNSIKSLRIVETVSIIPITDKEGVAYKGYKGDGNAYMDIYQDPTSSKWKGEIVSRFDANQKGFIPSWQSQFPTARLIMRLRINDLLKLQDGEIEEIYRVQRLSGSKILMAPHTEANVDARDRDKNDTFKLTSKSPGKLQSASARKVHISPTGLIREG

SEQ ID NO: 40 - protein, 1358 aa, Acidaminococcus sp.
MGKMYYLGLDIGTNSVGYAVTDPSYHLLKFKGEPMWGAHVFAAGNQSAERRSFRTSRRRLDRRQQRVKLVQEIFAPVISPIDPRFFIRLHESALWRDDVAETDKHIFFNDPTYTDKEYYSDYPTIHHLIVDLMESSEKHDPRLVYLAVAWLVAHRGHFLNEVDKDNIGDVLSFDAFYPEFLAFLSDNGVSPWVCESKALQATLLSRNSVNDKYKALKSLIFGSQKPEDNFDANISEDGLIQLLAGKKVKVNKLFPQESNDASFTLNDKEDAIEEILGTLTPDECEWIAHIRRLFDWAIMKHALKDGRTISESKVKLYEQHHHDLTQLKYFVKTYLAKEYDDIFRNVDSETTKNYVAYSYHVKEVKGTLPKNKATQEEFCKYVLGKVKNIECSEADKVDFDEMIQRLTDNSFMPKQVSGENRVIPYQLYYYELKTILNKAASYLPFLTQCGKDAISNQDKLLSIMTFRIPYFVGPLRKDNSEHAWLERKAGKIYPWNFNDKVDLDKSEEAFIRRMTNTCTYYPGEDVLPLDSLIYEKFMILNEINNIRIDGYPISVDVKQQVFGLFEKKRRVTVKDIQNLLLSLGALDKHGKLTGIDTTIHSNYNTYHHFKSLMERGVLTRDDVERIVERMTYSDDTKRVRLWLNNNYGTLTADDVKHISRLRKHDFGRLSKMFLTGLKGVHKETGERASILDFMWNTNDNLMQLLSECYTFSDEITKLQEAYYAKAQLSLNDFLDSMYISNAVKRPIYRTLAVVNDIRKACGTAPKRIFIEMARDGESKKKRSVTRREQIKNLYRSIRKDFQQEVDFLEKILENKSDGQLQSDALYLYFAQLGRDMYTGDPIKLEHIKDQSFYNIDHIYPQSMVKDDSLDNKVLVQSEINGEKSSRYPLDAAIRNKMKPLWDAYYNHGLISLKKYQRLTRSTPFTDDEKWDFINRQLVETRQSTKALAILLKRKFPDTEIVYSKAGLSSDFRHEFGLVKSRNINDLHHAKDAFLAIVTGNVYHERFNRRWFMVNQPYSVKTKTLFTHSIKNGNFVAWNGEEDLGRIVKMLKQNKNTIHFTRFSFDRKEGLFDIQPLKASTGLVPRKAGLDVVKYGGYDKSTAAYYLLVRFTLEDKKTQHKLMMIPVEGLYKARIDHDKEFLTDYAQTTISEILQKDKQKVINIMFPMGTRHIKLNSMISIDGFYLSIGGKSSKGKSVLCHAMVPLIVPHKIECYIKAMESFARKFKENNKLRIVEKFDKITVEDNLNLYELFLQKLQHNPYNKFFSTQFDVLTNGRSTFTKLSPEEQVQTLLNILSIFKTCRSSGCDLKSINGSAQAARIMISADLTGLSKKYSDIRLVEQSASGLFVSKSQNLLEYL

SEQ ID NO: 41 - protein, 1358 aa, Acidaminococcus sp.; identical to SEQ ID NO: 40
  Acidaminococcus sp. D21

SEQ ID NO: 42 - protein, 1138 aa, Acidothermus cellulolyticus
MGGSEVGTVPVTWRLGVDVGERSIGLAAVSYEEDKPKEILAAVSWIHDGGVGDERSGASRLALRGMARRARRLRRFRRARLRDLDMLLSELGWTPLPDKNVSPVDAWLARKRLAEEYVVDETERRRLLGYAVSHMARHRGWRNPWTTIKDLKNLPQPSDSWERTRESLEARYSVSLEPGTVGQWAGYLLQRAPGIRLNPTQQSAGRRAELSNATAFETRLRQEDVLWELRCIADVQGLPEDVVSNVIDAVFCQKRPSVPAERIGRDPLDPSQLRASRACLEFQEYRIVAAVANLRIRDGSGSRPLSLEERNAVIEALLAQTERSLTWSDIALEILKLPNESDLTSVPEEDGPSSLAYSQFAPFDETSARIAEFIAKNRRKIPTFAQWWQEQDRTSRSDLVAALADNSIAGEEEQELLVHLPDAELEALEGLALPSGRVAYSRLTLSGLTRVMRDDGVDVHNARKTCFGVDDNWRPPLPALHEATGHPVVDRNLAILRKFLSSATMRWGPPQSIVVELARGASESRERQAEEEAARRAHRKANDRIRAELRASGLSDPSPADLVRARLLELYDCHCMYCGAPISWENSELDHIVPRTDGGSNRHENLAITCGACNKEKGRRPFASWAETSNRVQLRDVIDRVQKLKYSGNMYWTRDEFSRYKKSVVARLKRRTSDPEVIQSIESTGYAAVALRDRLLSYGEKNGVAQVAVFRGGVTAEARRWLDISIERLFSRVAIFAQSTSTKRLDRRHHAVDAVVLTTLTPGVAKTLADARSRRVSAEFWRRPSDVNRHSTEEPQSPAYRQWKESCSGLGDLLISTAARDSIAVAAPLRLRPTGALHEETLRAFSEHTVGAAWKGAELRRIVEPEVYAAFLALTDPGGRFLKVSPSEDVLPADENRHIVLSDRVLGPRDRVKLFPDDRGSIRVRGGAAYIASFHHARVFRWGSSHSPSFALLRVSLADLAVAGLLRDGVDVFTAELPPWTPAWRYASIALVKAVESGDAKQVGWLVPGDELDFGPEGVTTAAGDLSMFLKYFPERHWVVTGFEDDKRINLKPAFLSAEQAEVLRTERSDRPDTLTEAGEILAQFFPRCWRATVAKVLCHPGLTVIRRTALGQPRWRRGHLPYSWRPWSADPWSGGTP

SEQ ID NO: 43 - protein, 1045 aa, Acidovorax avenae
MQKEKPLAYRLALDLGSTSLGWAVLRLSAPGEPSAVIRAGSRIFSDGRNPKDGSSLAVTRRAARAMRRRRDRLLKRKARMLAALERHGFFPQDEAARKALEKLNPYGLRARGLESALKPEEFGRALFHLNQRRGFQSNRKTDRKDSDSGALKQAIGTLRAQMHESGCRTVGEWFWKVRMERKPEGVKGQGVRARYRETPFTTDEGKKRIDKRYDLYVDRAMVAQEFDALWAAQATFAPALFNEAARAELRDILLHQRKLRPVQPGRCTLVPEEPRALLALPSTQRFRIYQEVNHLRVLHDELREEALTLAQRDQIVALLERQAKVTFTAMRKALGFSALFNLEDAKRDGLKGNATTAALGKKDLFGPLWAGFDTALQDEIVTQLMTEESEPRLIAWLQEHTGVDEARAQAIANAGLPEGYGSLGRTALARIVPELQRDVITYDKAVQAAGFAHHSDLGFSFEHDADEVERIGERTIASTGEIKPVFAFKQLPYYGRALQRHVAFAKENPRNDEERYGKIANPTVHIGLNQVRVVVNALMCRYGRPTEVVIELARDLKQSREQKLEAQQRQADNQKRNARIRRSIAEVLGISEERVRTLDIQKWILWEELSHDAADRRCPYSGVQISASMLLGERVEIEHILPFSMTLDDSLNNRTVALREANRIKRNRTPWDARTDFEAHGWSYDGILQRAERMPQRKRHRFAPDGYERWLGEDKDFLARALNDTRYLSRVAAEYLRLVCPGSATRVIPGQMTALLRGKFGLNDVLGLDGEKNRNDHRHHAVDACVIGVTDQRMMQRFAQANAQAREDGLTRLVEDMPLPWPTYRAHVERAVRHIWVSHKPDHGFEGAMMEETSYGILRDGTIKQRRKADGSAGREISRLIRITEPSQPQRHGVDAEGRPLPYKGYVGGSNYCLEITVNDKGKWEGQVISTFDAYRIVREGGLRQLRHSTQGQNGQALAMRLVIGDSVRLEVDEQERVMRIVKINGNNGQVFMAPVHEANVDARNSDKNEAFAYTSKIAGSFQKTKARQVTISPIGELRDPGFKG

SEQ ID NO: 44 - protein, 1131 aa, Acidovorax ebreus
MAQHVFGLDIGIASVGWAILGEQRIIDLGVRCFDKAETAKEGDPLNLTRRQARLLRRRLYRRAWRLTQLSRLLKRKGLIADAKLFAKAPSYGDSAWELRRQGLDRLLTPLEWARVIYHQCKHRGFHWTSKAEEAKADSDAEGGRVKQGLAHTKALMQAKNYRSAAEMVLAEFPDAQRNKRGQYDKALSRVLLGEELALLFATQRRLGNPHASDFFEKLILGDGDRKSGLFWQQKPALSGADLLKMLGKCTFEKGEYRAPKASFSVERHVWLTRLNNLRIVVDGRSRPLNEAERQAALLLPYQTETSKYKTLKNAFIKAGLWGDGVRFGGLAYPSQAQIDAEKTKDPEDQFLVKLPAWHELRKAFKAAGHEALWQQISTPALDGDPTLLDQIATVLSVYKDGAEVVQQLRQLALPEPAASIAVLEKISFDKFSSLSLKALRRIVPLMQSGLRYDEAVAQIPEYGHHSQRIEPGAAKHLYLPPFYEAQRKYAGKGDHIGSMQFRDDADIPRNPVVLRALNQARKVVNALIREYGSPIAVNIEMARDLSRPLDERNKVKRAQEEFRDRNDRARSEFERDFGYKPKAAAFEKWMLYREQLGQCAYSQQPLDIQRVLDDHNYAQVDHALPYSRSYDDSKNNKVLVLTHENQNKGNRTAFEYLTSFPDGEDGERWRTFVAWVQGNKAYRMAKRNRLLRKNYGVDESKGFIDRNLNDTRYICKFFKNYVEEHLQLAARADGDTARRCVVVNGQLTAFLRARWGLTKVRGDSDRHHALDAAVVAACTHGMVKALADYSRRKEISFLQEGFPDPETGEILNPAAFDRARQHFPEPWTHFAHELKARLFTDDLAALREDMQRLGSYTTEDLGRLRTLFVSRAPQRRSGGAVHKETIYAQPESLKQQGGVIEKILLTSLKLQDFDKLLNPESNDHFVEPHRNERLYAAIRQRLEQFGGRADKAFGPDNLFHKPDKNNQPTGPVVRSIKLVRGKQTGIPIRGGLAKNDSMLRVDIFTKAGKFHLVPVYVHHRVTGLPNRAIVAFKDEDEWTLIDESFAFLFSVYPNDYVKVTLKKEQQSGYYSGADRSTGAMNLWAHDRAASVGKDGLIRGIGVKTALSVEKFNVDVLGRIYLAPPETRSGLA

SEQ ID NO: 45 - protein, 1056 aa, Actinobacillus minor
  Actinobacillus minor NM305
MKALNYILGLDLGIASVGWAVVEIDQNELPIRLIDLGVRTFERAEVPKTGDSLALARRLARSSRRLVRRRAVRLLKAKRLLKQEGILQADDFHSSHLKPLPNNPWELRVKGLNHLLDRKEWAAVLLHLLKHRGYLSQRKNESKTDNKELGALLKGVSENRQLLQAQAFSTPAEIAIKKFQQEEGHIRNQRGAYSHTFDRNDLLAELRLLFQKQREFNNPYTSQSLEQAIAELLMWQKPALSGEAILKMLGKCTFEPSEYKAPKNSYSAEYFVWLTKLNNLRILENGADRGLTAEERQLLINQPFEKAKFTYAQARKLLELSDLAIFKGVRYGKDNAESATLMEMKAWHAIRKALESNGLKTEWNGLKTKPELLDKIGTAFSIYKTDEDISQYLNGELSPAVLNALLENLSFDKFIRLSLQSLAKILPLMEQGLRYDEACKQVYGDHYGKKEQLELRFLPKIPVEDIRNPVVLRTLSQARKVINGVVRLYGSPARIHIETGREVGKSFSERRDISKRQEENRNERQRAVEKFKEFFPHFVGEPKAKDILKMRLYEQQHGKCLYSGKELDLNRLLEKGYVEIDHALPFSRTWDDSFNNKVLVLASENQNKGNQTPYEWLNGKENAERWKLFQALVNGSRFPYSKKQRILTKYLDEDGFRERNLNDTRYVARFLCNFIEDNMQLVGQGKKRVFASNGQITALLRRSWGIQKVREDNDRHHAVDAVVVACSTRALQKKITDYVRYKEMNVFTGEKIDQETGEIIKFHFPEPWKFFRQEVEIRVFSETPAEDVVIALPDRPQANHEFIQPLFVSRAPTRKMTGQGHMETIKSAKRLAEGLSVSRVPLTQLKLKDLENMVNREREKALYEALKVRLEKFNNDPAKAFADPFYKKGGQQVKAVRVEQVQKSGVLVRQENGVADNASMVRVDVFIKGGKYFLVPIYTWQVAKGILPNRAATQGKEEEYWDIMDETAIFQFSLYQNDLIKLVTKKKTIFGYFNGLNRATSNINIKEHDLDKSKGKDGIYLEVGVKLALSLEKYQVDELGKNIQPCRSMKKRPPVR

SEQ ID NO: 46 - protein, 1054 aa, Actinobacillus pleuropneumoniae
  Actinobacillus pleuropneumoniae serovar 10 str. D13039
MKLTPLNYILGLDLGIASVGWAVVEIDEQENPLGLIDVGVRTFDRAEVAKTGESLALARRLARSSRRLVKRRADRIKKVKRLLKSENILLSADEQLPNDVWQLRVKGLDQKLERQEWAAVLLHLLKHRGYLSQRKNESKSENKELGALRSGVAANHQILQSAEYRTPAEIAVKKFHVEEGHIRNQRGAYTHTFSRLDLLAEIELLFTRQTELGNPHTSAKLLENLTALLMWQKPALAGEAILKMLGKCTFEPTEYKAAKNSYSAERFVWLTKLNNLRILEQGAERALTDNERFALLDQPYEKAKFTYAQARTMLALPDEAIFKGVRYQGEDKKAVETKTILMEMKAYHQIRKALENADLKAEWNELKNNSELLDDIGTAFSLHKTDEDICRYLDGKLSESILNALLENLNFDKFIQLSLKALQQILPLMLQGQRYDEAVSAIYGDHYGKKSAEINRLLPTIPADEIRNPVVLRTLTQARKVINAVVRLYGSPARIHIETGREVGKSYQDRKKLEKQQEDNRKHRESAVQKFKEYFPNFVGEPKGKDILKMRLYELQQAKCLYSGKSLELHRLLEKGYVEVDHALPFSRTWDDSFNNKVLVLANENQNKGNLTPYEWLDGKNNSEPWQNFVARVQTSGFSHTKKQRILSHKLDEKGFIERNLNDTRYVVRFLCNFIADNMLLTGKGKRKVFASNGQITALLRGRWGLQKVRDDNDRHHALDAVVVACSTVAMQQKITRFVRYEEGNVFSGERIDRETGEIIPLHFPSPWAFFRENVEIRIFSENPKLELENRLPDYPQYNHEFVQPLFVSRMPTRKMTGQGHMETVKSAKRLDEGLSVLKVPLTQLKLNDLERMVNREREMALYESLKVRLEQFDNDPAKAFAEPFYKKGGALVKAVRVEQTQKSGVLVRDGNGVADNASMVRVDVFTKAGKYFLVPIYTWQVAKGILPNKAVTANVDEIDWLEMDESYQFIFTMYPNDLVKVKLKKEEFFGYYGGLDRATGAIVIKEHDLEKSKGRQGIYRIGVKLALSFEKYQVDELGKNIRPCRPTKRQHVR

SEQ ID NO: 47 - protein, 1062 aa, Actinobacillus succinogenes
MNLNYILGLDLGIASVGWAVVEIDEQENPQRLIDVGVRTFDRAEVLKTGESLALARRLARSSRRLVKRRAERIKKAKRLLKAENLLLSADEILPNEAWQLRVKGLDQKLERQEWAAVLLHLLKHRGYLSQRKNESKSENKELGALLSGVAINHQILQSAEYRTPAEIAVNKFQAEEGHIRNQRGAYTHTFSRLDLLAEMELLFQRQATLGNPHTSTKLLENLTALLMWQKPALAGEAILKMLGKCTFEPTEYKAAKNSYSAERFVWLTKLNNLRILEQGAERALTDNERFALLDQPYEKAKLTYAQVRTLLGLSDEAIFKGLRYQGEDKKAVETKTTLMEVKAYHQIRKALEGLDLKAEWNELKNNPALLDEIGTAFSLYKTDDDIHRYLDGKLSESVLNALLENLNFDKFIQLSLKALQQILPLMLQGQRYDEAVSAIYGDHYGKKSDEIDRLLPNIPTDEIRNPVVLRTLTQARKVINAVVRLYGSPARIHIETGREVGKSYQDRKKLEKQQEENRKQRENAVKKFKEYFPNFVGEPKGKDILKMRLYELQQAKCLYSGKSLELYRLLEKGYVEVDHALPFSRTWDDSFNNKVLVLANENQNKGNATPYEWLDGKNNSEGWQHFVARVQTSGFSYAKKQRVLIQELDEKSFIERNLNDTRYVARFLCNHIADNMLLTGKGKRKVFASNGQITALLRGCWGLQKVRENNDRHHALDAVVVACSTKSMQDKITKFVKYKEGRLFKDKKDGVYKGERINRETGEIISLHFPTPWKFFKENVEIRIFSENPKLELENRLPDYPQYNHEFVQPLFVSRMPTRKMTGQGHMETVKSAKRLDKGLSVLKVPLTQLKLSDLERMVNREREMALYEALKECLEQFGNDPAKAFAEPFYKKGGALVKAVRVEQTQKSGVLVRNGNGVADNATGSIVRVDVFTKGGKYFLVPIYTWQVAKGILPNKAVIQGKDESEWEEMDENAVFQFSMHKNDLIKVKTKKGEIFGYFNGLDRATGSIEIEEHDLEKSKGKNGSHRGLGVKTAFFLEKYQVDELGKNIRPCRPTKRQHVR

SEQ ID NO: 48 - protein, 1054 aa, Actinobacillus suis
MKLTPLNYILGLDLGIASVGWAVVEIDEQENPLGLIDVGVRTFDRAEVPKTGESLALARRLARSARRLVKRRADRIKKAKRLLKAENILLSADEHLPNDVWQLRVKGLDQKLERQEWAAVLLHLLKHRGYLSQRKNESKSENKELGALLSGVETNHQILQSAEYRTPAEIAVKKFHVEDGHIRNQRGAYTHTFSRLDLLAEMELLFQRQTDLGNPHTSAKLLENLTALLMWQKPALAGEAILKMLGKCTFEPTEYKAAKNSYSAERFVWLTKLNNLRILEQGAERALTDNERFALLDQPYEKAKFTYAQARTMLALPDEAIFKGVRYQGEDKKAVETKTILMEMKAYHQIRKALENADLKAEWNELKNNSELLDDIGTAFSLHKTDEDICRYLDGKLSESILNALLENLNFDKFIQLSLKALQQILPLMLQGQRYDEAVSAIYGDHYGKKSAEINRLLPTIPADEIRNPVVLRTLTQARKVINAVVRLYGSPARIHIETGREVGKSYQDRKKLEKQQEDNRKQRESAVKKFKEYFPNFVGEPKGKDILKMRLYELQQAKCLYSGKSLELHRLLEKGYVEVDHALPFSRTWDDSFNNKVLVLANENQNKGNLTPYEWLDGKNNSEHWQNFVARVQTSGFSHTKKQRILSHKLDEKGFIERNLNDTRYVARFLCNFIADNMLLTGKGKRKVFASNGQITALLRGRWGLQKVRDDNDRHHALDAVVVACSTVVMQQKITRFVRYEEGNVFSGERIDRETGEIIPLHFPSPWAFFRENVEIRIFSENPKLELENRLPDYPQYNHEFVQPLFVSRMPTRKMTGQGHMETVKSAKRLDEGLSVLKVPLTQLKLSDLERMVNREREVTLYESLKARLEQFGNDPAKAFAEPFHKKGGAVVKAVRVEQTQKSGVLVRDGNGVADNASMVRVDVFTKGGKYFLVPIYTWQVAKGILPNKAVTANVDEIDWLEMDESYQFIFTMYPNDLVKVKLKKEEFFGYYGGLDRATGAIVIKEHDLEKSKGKQGIYRIGVKLALSFEKYQVDELGKNIRPCRPTKRQHVR

SEQ ID NO: 49 - protein, 1105 aa, Actinomyces coleocanis
  Actinomyces coleocanis DSM 15436
MDNKNYRIGIDVGLNSIGFCAVEVDQHDTPLGFLNLSVYRHDAGIDPNGKKTNTTRLAMSGVARRTRRLFRKRKRRLAALDRFIEAQGWTLPDHADYKDPYTPWLVRAELAQTPIRDENDLHEKLAIAVRHIARHRGWRSPWVPVRSLHVEQPPSDQYLALKERVEAKTLLQMPEGATPAEMVVALDLSVDVNLRPKNREKTDTRPENKKPGFLGGKLMQSDNANELRKIAKIQGLDDALLRELIELVFAADSPKGASGELVGYDVLPGQHGKRRAEKAHPAFQRYRIASIVSNLRIRHLGSGADERLDVETQKRVFEYLLNAKPTADITWSDVAEEIGVERNLLMGTATQTADGERASAKPPVDVTNVAFATCKIKPLKEWWLNADYEARCVMVSALSHAEKLTEGTAAEVEVAEFLQNLSDEDNEKLDSFSLPIGRAAYSVDSLERLTKRMIENGEDLFEARVNEFGVSEDWRPPAEPIGARVGNPAVDRVLKAVNRYLMAAEAEWGAPLSVNIEHVREGFISKRQAVEIDRENQKRYQRNQAVRSQIADHINATSGVRGSDVTRYLAIQRQNGECLYCGTAITFVNSEMDHIVPRAGLGSTNTRDNLVATCERCNKSKSNKPFAVWAAECGIPGVSVAEALKRVDFWIADGFASSKEHRELQKGVKDRLKRKVSDPEIDNRSMESVAWMARELAHRVQYYFDEKHTGTKVRVFRGSLTSAARKASGFESRVNFIGGNGKTRLDRRHHAMDAATVAMLRNSVAKTLVLRGNIRASERAIGAAETWKSFRGENVADRQIFESWSENMRVLVEKFNLALYNDEVSIFSSLRLQLGNGKAHDDTITKLQMHKVGDAWSLTEIDRASTPALWCALTRQPDFTWKDGLPANEDRTIIVNGTHYGPLDKVGIFGKAAASLLVRGGSVDIGSAIHHARIYRIAGKKPTYGMVRVFAPDLLRYRNEDLFNVELPPQSVSMRYAEPKVREAIREGKAEYLGWLVVGDELLLDLSSETSGQIAELQQDFPGTTHWTVAGFFSPSRLRLRPVYLAQEGLGEDVSEGSKSIIAGQGWRPAVNKVFGSAMPEVIRRDGLGRKRRFSYSGLPVSWQG

SEQ ID NO: 50 - protein, 1113 aa, Actinomyces georgiae
  Actinomyces georgiae F0490
MSASSQNVERIRYKVGIDVGLRSIGFCAVQVDADDRPVKLLNTVVHVHDAGVSPADAKKADTRKLVSGVARRTRRLYRTRKRRLVDLDRQLDGLGWPLVDPARFADPREPWFAREKLVSGRVDDADERKELLSVALRHIAHHRGWRNPYSTVESLQADAPPSEFLQGLNQRVSEKLGTELDPGLTQGQLVAKLLHRFPNAKIRGPEGILRGKLHQSDNAGELRLICRTQGLDCHITEELVRLVFQAKSPKANKEMRKRIGRDQLPGQGAHIRAEKAHPVFQRFRIVAVLANLRIREAHVDRRLTAEEMRTLTDFLLGLAGSEQPTWEELADNLNIERHQLRGTAKASVDGAPALRFPPIDATTDRIYASKLKWLAEWWRQADEERRGYMVDALSNSGGSEDEPYLDDEIAEMLEQASEEDQAKLDSLHLPGGRASYCLDTLRRLTDAMLGGGLDLFEARKAVFHVDDDWAPPTDPIGAPVGNPPVDRVLKHVARWLEAATGRWGAPQTINIEHVREGLGSEKAARELTRMNDRRRRNNQKLVEEMGEKLGMSGRIRRSDRMRYEAIRRQNCECLYCGQPITYQTMEMDHIVPRAGAASTNSRSNLAAVCRRCNHQKGKLPFAVWAESQDSPAEVRLQDAVQRVRHWLRDAGMGQKELQALRVQVIARLKSKRPDEEFDGRSMESIAWMANELRARVEAQYRGSGTTVRVYRGALTAEARKASGFEGRVNLIGGRGKDRFDRRHHAMDALVIALMNQSVAQTLALRLNMRDSQWLTQSEQTWRQFHGAPGEAARKWEAWDRDMRDASDLFNLALDGGRIPITENVRLRVGNGRVHEDGVIRFKPEYEVKGKTIKGGEARLLGDSLPSEQIDRAETPALWTALTRLPEYDRKSGLPENPDRVIRVNGAVVQATDRIRFFGTPASVAVRGGYAKLGESIHHARIYRINGKTPKYAMIRVYTIDLMRLNHEDIFTAVLKPSTISMRCAEKKLKYAIAEGNAEQIGWLVEGDQLELDAAAYAKGVGADLMREYPMATCWRVAGFPDEAKLRLRPVLLAAEGMGEDAPKFMREVLENQGWRPAVNALLSPGSVRVVRRNVLGEPRFKSSGHLPTTVDLV

SEQ ID NO: 51 - protein, 1101 aa, Actinomyces naeslundii
  Actinomyces naeslundii str. Howell 279
MWYASLMSAHHLRVGIDVGTHSVGLATLRVDDHGTPIELLSALSHIHDSGVGKEGKKDHDTRKKLSGIARRARRLLHHRRTQLQQLDEVLRDLGFPIPTPGEFLDLNEQTDPYRVWRVRARLVEEKLPEELRGPAISMAVRHIARHRGWRNPYSKVESLLSPAEESPFMKALRERILATTGEVLDDGITPGQAMAQVALTHNISMRGPEGILGKLHQSDNANEIRKICARQGVSPDVCKQLLRAVFKADSPRGSAVSRVAPDPLPGQGSFRRAPKCDPEFQRFRIISIVANLRISETKGENRPLTADERRHVVTFLTEDSQADLTWVDVAEKLGVHRRDLRGTAVHTDDGERSAARPPIDATDRIMRQTKISSLKTWWEEADSEQRGAMIRYLYEDPTDSECAEIIAELPEEDQAKLDSLHLPAGRAAYSRESLTALSDHMLATTDDLHEARKRLFGVDDSWAPPAEAINAPVGNPSVDRTLKIVGRYLSAVESMWGTPEVIHVEHVRDGFTSERMADERDKANRRRYNDNQEAMKKIQRDYGKEGYISRGDIVRLDALELQGCACLYCGTTIGYHTCQLDHIVPQAGPGSNNRRGNLVAVCERCNRSKSNTPFAVWAQKCGIPHVGVKEAIGRVRGWRKQTPNTSSEDLTRLKKEVIARLRRTQEDPEIDERSMESVAWMANELHHRIAAAYPETTVMVYRGSITAAARKAAGIDSRINLIGEKGRKDRIDRRHHAVDASVVALMEASVAKTLAERSSLRGEQRLTGKEQTWKQYTGSTVGAREHFEMWRGHMLHLTELFNERLAEDKVYVTQNIRLRLSDGNAHTVNPSKLVSHRLGDGLTVQQIDRACTPALWCALTREKDFDEKNGLPAREDRAIRVHGHEIKSSDYIQVFSKRKKTDSDRDETPFGAIAVRGGFVEIGPSIHHARIYRVEGKKPVYAMLRVFTHDLLSQRHGDLFSAVIPPQSISMRCAEPKLRKAITTGNATYLGWVVVGDELEINVDSFTKYAIGRFLEDFPNTTRWRICGYDTNSKLTLKPIVLAAEGLENPSSAVNEIVELKGWRVAINVLTKVHPTVVRRDALGRPRYSSRSNLPTSWTIE

SEQ ID NO: 52 - protein, 1144 aa, Actinomyces sp.
  Actinomyces sp. ICM47
MSMIDSSENVPGIRYRVGIDVGLKSIGFCAVEVDRNDQPVRMLNSMVFIHDAGVDPNENKAAKSRKLTAGVARRTRRLYRTRHQRLVNLDRVLSKEFGWPLPDLTSFKDPREPWHVRAGLLEGYIADDEKRKEALSIALRHIARHRGWRNPYAKVETLLQPSEPSDFLKGLNDRISEELGRAFPADATPGQLVDTYLAHPDYVGRAGTPKLRGPQGILAGKLHQSDNAQEIRGICDVQRIEPAERDRLIRVVFEAKSPKGSAKERGLVGYDELPGQGRHVRAEKAHPAFQLFRMVSVLANLRIREGREERPLTPDELEDLVDFINQVSLKQEVTWQDLADKLRIERADLRGTAKASFDGSPVLRNPPTDVTTEKIMACKVKWLKEWWKEADDEQRGYMVDAFSNSGGSEDGTDVNDEVAELLEQATEDDQLEFEKISLPQGRAAYSLDSLRRLTDRMLRDGVDLHTARRLEFNVGDDWKPAVEPIGAPTGNPAVDRVLKQVSRWLHAATERWGEPTVINIEHARDGLGSERVARELMRENEKRRKANASAVAEMAAKLKLSGKVHRSDQIRYFALQRQNCQCLYCGAPITYTTAEMDHIVPRADGSSTNDRSNLAAVCRTCNHMKGKIPFAVWASSDKANQGVSLTGALERVNMWQRDSGMSPRQLKQLQREVCARLKSKKPDQEFDGRSMESVAWMAVELRTRIEGFYRSRDEESVPSVGVYRGQLTAEARRASGFESRVNLIGGRGKTRFDRRHHAMDALVIALMNPSVSRTLALRLNMRDAQRLTGVEETWKHFYGKPGEASKRFESWRESMLRGVELFNIALSDNAIPFVENIRLRVGSSVIHDATVHSFCPPKTPDGKQIITKGYGEQHSLGSAMPVELIDRAETPALWTALTRCPDFDPKKGLPENPQRTISVNGTRVGPTELVNFFEFSKSGPKACLKVRGGYVDLSGAIHHARIYRIAGKKTAYAMIRVFQVDLLRLKDHDVFTTPLKPSTISMRTAEPKIREALANGTATQIGWLVEGDELVIDTSKYSGGFIGEVLARYPEATSWRVAGFMTPAKLRIKPILLSKEGFVDETQAALLGVEVTSEAIQKTVDRPGWLPAVNVLFGAGGVRVIRRNCLGEERYHSSASLPVSMTLE

SEQ ID NO: 53 - protein, 1095 aa, Actinomyces sp.
  Actinomyces sp. oral taxon 175 str. F0384
MPAHHLRVGIDVGTHSVGLATLRVDDQGTPIELLSALSHIHDSGIGKEGQKDHDTRKKLSGVARRTRHLLRNRRERLQQLDKVLVDLGFPIPKPEEYPDLSERTDPYRVWRVRARLVEETLPEELRGPAISMAVRHIARHRGWRNPYSKVESLLSPAEESSFMKALRKRIMTKTGEVLDDDITPGQAMAQVALTHKIYMRGPEGILGKLHQSDNANEIRKICARQGISSDVCKQLLRAVFKAESPRGSAVSRVAPDPLPGQGSFRRAPKCDPEFQRFRIISIVANLRISETKGENRPLTVDERRQVVAFLMEDSQADLTWVDVAEKLRVSRQALRGTAMLTADGERSAAQPPIDVTDQIMRKTKISALKTWWDKADAERRGAMVRYLYEGLEDSECAEVIAKLPEKDHAKLDSLHLPAGRAAYSRESLTALSDHMLETTNDLHEARKRLFGVDDSWAPPAEPVGAPVGNPSVDRTLKIVARYLSAVESIWGTPEVIHVEHVRDGFTSERTAEERDKANRSRHNDNQKAIEKIQHDYGKEGYISRGDIVRFHALKLQGSACLYCGTTIGYHTCQLDHIVPQAGPGSNNRRGNLVAVCERCNHSKSNTPFAVWAQKCGIPHVGVKEAISRVNGWVEHNHSTSSGDLTRLKKEVIARLRRTQKDPEIDERSMESVAWMANELHHRIAAAYPETTVMVYRGSITAAARKAASIESRINLIGEKGRKDRLDRRHHAVDASVVALMEPSVAKTLAERSSLRGEQRLTGQEQTWKQYTGLTVGARERFEAWRGHMHRLTELFNESLAADEVYVTQNIRLRLSDGSAHTVKASKLVSHRLGDGLTVQQIDRACTPALWCALTREIDFDEKNGLPAREDRVIRVHGQEISSADCIQVFSKRKKTKSDRDEAPFGAIAVRGGFVEIGSSIHHARIYRIEGEKPAYAMLRVFTHDLLSQRHGDLFSAVIPPQSISMRCAATELRQAISEGRATYLGWIVSGDELHIPVETFTTHKIGSFLKDYPNTTRWRICGYDSETMLILKPRILSAEGLNNSSDIAEYVIKNKGWRVAINKLAKVHPTVVRRDALGRPRHSSRSNLPVTWSIE

SEQ ID NO: 54 - protein, 1181 aa, Actinomyces sp.
  Actinomyces sp. oral taxon 180 str. F0310
MLHCIAVIRVPPSEEPGFFETHADSCALCHHGCMTYAANDKAIRYRVGIDVGLRSIGFCAVEVDDEDHPIRILNSVVHVHDAGTGGPGETESLRKRSGVAARARRRGRAEKQRLKKLDVLLEELGWGVSSNELLDSHAPWHIRKRLVSEYIEDETERRQCLSVAMAHIARHRGWRNSFSKVDTLLLEQAPSDRMQGLKERVEDRTGLQFSEEVTQGELVATLLEHDGDVTIRGFVRKGGKATKVHGVLEGKYMQSDLVAELRQICRTQRVSETTFEKLVLSIFHSKEPAPSAARQRERVGLDELQLALDPAAKQPRAERAHPAFQKFKVVATLANMRIREQSAGERSLTSEELNRVARYLLNHTESESPTWDDVARKLEVPRHRLRGSSRASLETGGGLTYPPVDDTTVRVMSAEVDWLADWWDCANDESRGHMIDAISNGCGSEPDDVEDEEVNELISSATAEDMLKLELLAKKLPSGRVAYSLKTLREVTAAILETGDDLSQAITRLYGVDPGWVPTPAPIEAPVGNPSVDRVLKQVARWLKFASKRWGVPQTVNIEHTREGLKSASLLEEERERWERFEARREIRQKEMYKRLGISGPFRRSDQVRYEILDLQDCACLYCGNEINFQTFEVDHIIPRVDASSDSRRTNLAAVCHSCNSAKGGLAFGQWVKRGDCPSGVSLENAIKRVRSWSKDRLGLTEKAMGKRKSEVISRLKTEMPYEEFDGRSMESVAWMAIELKKRIEGYFNSDRPEGCAAVQVNAYSGRLTACARRAAHVDKRVRLIRLKGDDGHHKNRFDRRNHAMDALVIALMTPAIARTIAVREDRREAQQLTRAFESWKNFLGSEERMQDRWESWIGDVEYACDRLNELIDADKIPVTENLRLRNSGKLHADQPESLKKARRGSKRPRPQRYVLGDALPADVINRVTDPGLWTALVRAPGFDSQLGLPADLNRGLKLRGKRISADFPIDYFPTDSPALAVQGGYVGLEFHHARLYRIIGPKEKVKYALLRVCAIDLCGIDCDDLFEVELKPSSISMRTADAKLKEAMGNGSAKQIGWLVLGDEIQIDPTKFPKQSIGKFLKECGPVSSWRVSALDTPSKITLKPRLLSNEPLLKTSRVGGHESDLVVAECVEKIMKKTGWVVEINALCQSGLIRVIRRNALGEVRTSPKSGLPISLNLR

SEQ ID NO: 55 - protein, 1103 aa, Actinomyces sp.
  Actinomyces sp. oral taxon 181 str. F0379
MTKINDDLRYRVGIDVGLKSIGFCAVEVDENDQPLRLLNSMVFVHDAGVDPNENKAAKSRKLTAGVARRTQRGTAQNRRRLAELDRALSEELNWPLPNLEDFEDSYEPWHTRAELVEHYIKDDAERAEALAIAIRHIARHRGWRNPYLSVDSLLTPQEPSKFLRGLNERVTQALGREFPADATPGQLICAYIDSPKYAETQGIRGDSGILSGKLHQFDNVGEIRKICEVQRLDHDVFKLLVRKVFFAKSPRGSAAGLVGHDQIPGQGKYIRAEKAHPDFQLFRIVAVLTNLRIREGKAERCLTPDELRGLVDYILEVQLKQQVTWADLADNLGIERTDLRGTARASFDGSPALRFPPTDVTAEKIMASKVKWLKDWWDKADSERRGFMVDALSNSGGSTGDNDIDDEVAALLEAATEDEQAELEKIQLPQGRAAYSLDSLRRLTKRMLEEGVDLHTARKEEFNVDDDWRPEPEPIEAPVGNPAVDRVLKQVARWLNMATDRWGVPDVINIEHTRDGLGSEKVARELLRESQKRQDLNQKDMDKMIRELGISGKARRSSLIKYQAIQRQNSMCLYCGTEIGFETAEMDHIVPRALSGSTNDRSNLAAVCRACNHQKGAVPFAVWATSGEAHAGVSLEDAIKRVRLWQKGPGMSPKQHKAFQNEVISRLKSRKPDEEFDGRSMESVAWMAVELRTRIDGYYRKVNSDSVPKVGIYRGQLTAEARKASGFENRVNLIGGKGKTRFDRRHHAMDALVIAMMNQSVSQTLALRVNMRESQRITGQEETWKNFYGKPGQASERFEKWREGMLRAVELFNIELAKNAIPFHENVRLRVGSSKVHDDTVRKFIHAKLGEALSVAMIDCAETPALWTALTRLPDFDPKDGLPEDLSREIYIHSRKITADEQLNFFNSPSACLKVRGGYVEIGSSIHHARVYRIDGKKTTYSMVRVFATDLVKMTHEDVFTTPLKPSTISMRTADPKIRKALADGTATQIGWLVEGDELQLETDKYSGGLIGEVLAEYPQLTSWRVAGFYGVTQLRLRPYMLAAEGIPSDASESLRKVIEGKGWLPAINALLSSGCVKVVRRNCLGEPRFNAKSSLPVSQLLR

SEQ ID NO: 56 - protein, 1120 aa, Actinomyces sp.
  Actinomyces sp. oral taxon 848 str. F0332
MNAMKQYNAGIDVGINSVGFAAIEVDSKGLPLNILNNMVVLHDSGVDPGTAKTGATRLANSGTARRTRKLIARRRKRLQKLDRYIEVQGWPLVDFSSLPDPYTPWKIRAKLTQDRLEGEEQGRGLSIALRHMARHRGWRNPYEGVESLHSPKEASKQFKDLKDRVTKVSGVIFDEDATPAEVVCDIGLSPKQRLRSAPSAKYKEGATLADEPVGGKSKEGLLGGKLMQSDNANELRKIGIVQGLSNEKVNEIIDQVFASESPKGQAGKRAKKDELPGQEQYVRALRAHLAFQRFRIVAAVANLRILEAEPKHERLLSQSEKDKVIEFLMSADGDDGVTWSDVAEELGIERECLSGTAKRGADGERPSSFPPTNSTNISIVRSKVKPLIEWWRKASDDEQATLVTALSNADELTDDQPSAETVRQFLSSPDEQSQEKIDKISLPKGRAAYSVNSLERLTRRMLKDSVDLFEARKREFGVDNNWTPTPDSIGEPVGNPAVDRVLKIVNRWLLAVTRKWGPPKVVNIEHVRVGFTSAAQTRKYEEENKTNRERNLAILEELRDKFGTSGKIRREDITRFAALRRQNCQCAYCGEAITFFDCEMDHIVPRKGPGSTNTRNNLVAICERCNKSKSNMPFSLWAQNCDIPGVSVEAVIDRVRTWIKDPELNPKQYNNFKKDVIERLRKTVDDDAIDNRSIESVAWMATELADRIGSHFRTAGANTKVRVYRGWLTSEARKASGFEGKINLIGGRGKTRLDRRHHAMDAATIALMRQSVAQTLVERASIRESDRLRRVVSSSWKDYRGADRDKQFSYGSWLNSMNALAELFNRAIDADGIPVTQNLRLRLGNGEAHDATIRSLEKKRVGASWTIGEIDRASTPQLWLALTRQEDFDQNDGLPANASRELRVKNHWFHAEENVTLFPTKSAAIAVRGGYAEIGNTIHHARLYKLPGKKLTYGMIRVFAIDLLCAWHTDLFSSPLLPESISLRTAETKVRRAVEDGAAMYIGWLVDGDEIVLDPETKAFKSNKIGEYLCEFPGTKRWKVDGFPDKEKLRLRPLQLAGEGLPEDVSAGTEEILGPKGNGWRVAINALFKSSQLVVVRRTALGMVRKLSRRHLPLTTRLRG

SEQ ID NO: 57 - protein, 1114 aa, Actinomyces turicensis
  Actinomyces turicensis ACS-279-V-Col4
MQFHFYMVYVTMKGMNDKDASQQLRYRVGIDVGTHSIGFCAVEVDESGMPIQLLNSMVHKHDSGIDPGGNDTATTRLAEAGVARRTRRLIRRRKKRLQELDAFIEECGWPLVDLATITDARSPWRIRAHLATEHIDDEAEQGKLLSIALRHMARHRGWRSPYARISSLHIQADPSEQLKALAQRVSEKTGISLTADQTPAQLISVYLDVFETGKLRGPEGILGGKLMQSDNANELRRIATVQGLDNDLLKKIIGFVFAAESPKGSAAKRVGKDVLPGAHGLRAEKAHPAFQQFRIVSIVQNLRIKEGTGLRALTSEETEIVVDFLNQAGLTEAPTWEEVADNLEIPRSHLKGTATEGFDGIAPSTRPPFDVTSQKILNGKLKKLSAWWKDADYDHRCAMVNALSNVGSDDEGSLADDDVREFLSDFTDEELEALDKVELPGGRAAYSVDSLEKLTNTMLSEGCDLHSARKIAFGVDDSWTPPAEPIGQPVGNPAVDRVLKQVARWISAATNQWGTPESVNIEHVRDALGSEKASREYQRSLQTRRIRNEKLFAEMRERLDIGGKPRRSELTRYLALQRQNCQCLYCGMPITYTDAEMDHIVPRKGAASTNTRENFAAVCRACNHQKSNLPFAVWAEKTERPGVSVKEAYKRVSDMRIEPGMNGRQMNEFRKAIRLRLTTKHADAEIDGRSLESVAWMANELRHRIEGFYRSAENDVTVRVFRGAVTAEGRRASGFESRVNLIGGKGKTRLDRRHHAMDALTIALMEPGIAQTIALRMNMRESQRVLGEQETWKSFTGGSDTARKRWEHWCEEMLRASELFNVFLAEDRIPICQNKRLRLGSSAVHKAIVQPFEASDKRIVSDAMPVELIDRASTPALWTALTRDPDFDPKEGLPANPSRTIRLHDKRLGPNETVEFFPTAAACLAIRGGYCEIGAGIHHARIFRISGKKTTYAMLRVYQCDLVRFQKENLLTVELPANTISVRTAVPKLREALAHGTAEQIGWLVVGDELKIDLSGFTTGQIETFNETYPQATRWEVTGFPTKTQLRLKPLLIASEGLADDVPDDIVKIVKGPGWWPAIDKLLKIGNVVLYRRDTHGKPRVVSHRSLPLSSKLQ

SEQ ID NO: 58 - protein, 1101 aa, Akkermansia muciniphila
MSRSLTFSFDIGYASIGWAVIASASHDDADPSVCGCGTVLFPKDDCQAFKRREYRRLRRNIRSRRVRIERIGRLLVQAQIITPEMKETSGHPAPFYLASEALKGHRTLAPIELWHVLRWYAHNRGYDNNASWSNSLSEDGGNGEDTERVKHAQDLMDKHGTATMAETICRELKLEEGKADAPMEVSTPAYKNLNTAFPRLIVEKEVRRILELSAPLIPGLTAEIIELIAQHHPLTTEQRGVLLQHGIKLARRYRGSLLFGQLIPRFDNRIISRCPVTWAQVYEAELKKGNSEQSARERAEKLSKVPTANCPEFYEYRMARILCNIRADGEPLSAEIRRELMNQARQEGKLTKASLEKAISSRLGKETETNVSNYFTLHPDSEEALYLNPAVEVLQRSGIGQILSPSVYRIAANRLRRGKSVTPNYLLNLLKSRGESGEALEKKIEKESKKKEADYADTPLKPKYATGRAPYARTVLKKVVEEILDGEDPTRPARGEAHPDGELKAHDGCLYCLLDTDSSVNQHQKERRLDTMTNNHLVRHRMLILDRLLKDLIQDFADGQKDRISRVCVEVGKELTTFSAMDSKKIQRELTLRQKSHTDAVNRLKRKLPGKALSANLIRKCRIAMDMNWTCPFTGATYGDHELENLELEHIVPHSFRQSNALSSLVLTWPGVNRMKGQRTGYDFVEQEQENPVPDKPNLHICSLNNYRELVEKLDDKKGHEDDRRRKKKRKALLMVRGLSHKHQSQNHEAMKEIGMTEGMMTQSSHLMKLACKSIKTSLPDAHIDMIPGAVTAEVRKAWDVFGVFKELCPEAADPDSGKILKENLRSLTHLHHALDACVLGLIPYIIPAHHNGLLRRVLAMRRIPEKLIPQVRPVANQRHYVLNDDGRMMLRDLSASLKENIREQLMEQRVIQHVPADMGGALLKETMQRVLSVDGSGEDAMVSLSKKKDGKKEKNQVKASKLVGVFPEGPSKLKALKAAIEIDGNYGVALDPKPVVIRHIKVFKRIMALKEQNGGKPVRILKKGMLIHLTSSKDPKHAGVWRIESIQDSKGGVKLDLQRAHCAVPKNKTHECNWREVDLISLLKKYQMKRYPTSYTGTPR

SEQ ID NO: 59 - protein, 1113 aa, Alcanivorax pacificus
  Alcanivorax pacificus W11-5
MRYRVGLDLGTASVGAAVFSMDEQGNPMELIWHYERLFSEPLVPDMGQLKPKKAARRLARQQRRQIDRRASRLRRIAIVSRRLGIAPGRNDSGVHGNDVPTLRAMAVNERIELGQLRAVLLRMGKKRGYGGTFKAVRKVGEAGEVASGASRLEEEMVALASVQNKDSVTVGEYLAARVEHGLPSKLKVAANNEYYAPEYALFRQYLGLPAIKGRPDCLPNMYALRHQIEHEFERIWATQSQFHDVMKDHGVKEEIRNAIFFQRPLKSPADKVGRCSLQTNLPRAPRAQIAAQNFRIEKQMADLRWGMGRRAEMLNDHQKAVIRELLNQQKELSFRKIYKELERAGCPGPEGKGLNMDRAALGGRDDLSGNTTLAAWRKLGLEDRWQELDEVTQIQVINFLADLGSPEQLDTDDWSCRFMGKNGRPRNFSDEFVAFMNELRMTDGFDRLSKMGFEGGRSSYSIKALKALTEWMIAPHWRETPETHRVDEEAAIRECYPESLATPAQGGRQSKLEPPPLTGNEVVDVALRQVRHTINMMIDDLGSVPAQIVVEMAREMKGGVTRRNDIEKQNKRFASERKKAAQSIEENGKTPTPARILRYQLWIEQGHQCPYCESNISLEQALSGAYTNFEHILPRTLTQIGRKRSELVLAHRECNDEKGNRTPYQAFGHDDRRWRIVEQRANALPKKSSRKTRLLLLKDFEGEALTDESIDEFADRQLHESSWLAKVTTQWLSSLGSDVYVSRGSLTAELRRRWGLDTVIPQVRFESGMPVVDEEGAEITPEEFEKFRLQWEGHRVTREMRTDRRPDKRIDHRHHLVDAIVTALTSRSLYQQYAKAWKVADEKQRHGRVDVKVELPMPILTIRDIALEAVRSVRISHKPDRYPDGRFFEATAYGIAQRLDERSGEKVDWLVSRKSLTDLAPEKKSIDVDKVRANISRIVGEAIRLHISNIFEKRVSKGMTPQQALREPIEFQGNILRKVRCFYSKADDCVRIEHSSRRGHHYKMLLNDGFAYMEVPCKEGILYGVPNLVRPSEAVGIKRAPESGDFIRFYKGDTVKNIKTGRVYTIKQILGDGGGKLILTPVTETKPADLLSAKWGRLKVGGRNIHLLRLCAE

SEQ ID NO: 60 - protein, 1029 aa, Alicycliphilus denitrificans
  Alicycliphilus denitrificans BC
MRSLRYRLALDLGSTSLGWALFRLDACNRPTAVIKAGVRIFSDGRNPKDGSSLAVTRRAARAMRRRRDRLLKRKTRMQAKLVEHGFFPADAGKRKALEQLNPYALRAKGLQEALLPGEFARALFHINQRRGFKSNRKTDKKDNDSGVLKKAIGQLRQQMAEQGSRTVGEYLWTRLQQGQGVRARYREKPYTTEEGKKRIDKSYDLYIDRAMIEQEFDALWAAQAAFNPTLFHEAARADLKDTLLHQRPLRPVKPGRCTLLPEEERAPLALPSTQRFRIHQEVNHLRLLDENLREVALTLAQRDAVVTALETKAKLSFEQIRKLLKLSGSVQFNLEDAKRTELKGNATSAALARKELFGAAWSGFDEALQDEIVWQLVTEEGEGALIAWLQTHTGVDEARAQAIVDVSLPEGYGNLSRKALARIVPALRAAVITYDKAVQAAGFDHHSQLGFEYDASEVEDLVHPETGEIRSVFKQLPYYGKALQRHVAFGSGKPEDPDEKRYGKIANPTVHIGLNQVRMVVNALIRRYGRPTEVVIELARDLKQSREQKVEAQRRQADNQRRNARIRRSIAEVLGIGEERVRGSDIQKWICWEELSFDAADRRCPYSGVQISAAMLLSDEVEVEHILPFSKTLDDSLNNRTVAMRQANRIKRNRTPWDARAEFEAQGWSYEDILQRAERMPLRKRYRFAPDGYERWLGDDKDFLARALNDTRYLSRVAAEYLRLVCPGTRVIPGQLTALLRGKFGLNDVLGLDGEKNRNDHRHHAVDACVIGVTDQGLMQRFATASAQARGDGLTRLVDGMPMPWPTYRDHVERAVRHIWVSHRPDHGFEGAMMEETSYGIRKDGSIKQRRKADGSAGREISNLIRIHEATQPLRHGVSADGQPLAYKGYVGGSNYCIEITVNDKGKWEGEVISTFRAYGVVRAGGMGRLRNPHEGQNGRKLIMRLVIGDSVRLEVDGAERTMRIVKISGSNGQIFMAPIHEANVDARNTDKQDAFTYTSKYAGSLQKAKTRRVTISPIGEVRDPGFKG

SEQ ID NO: 61 - protein, 1029 aa, Alicycliphilus sp.; identical to SEQ ID NO: 60

SEQ ID NO: 62 - protein, 1146 aa, Alicyclobacillus hesperidum
  Alicyclobacillus hesperidum URH17-3-68
MAYRLGLDIGITSVGWAVVALEKDESGLKPVRIQDLGVRIFDKAEDSKTGASLALPRREARSARRRTRRRRHRLWRVKRLLEQHGILSMEQIEALYAQRTSSPDVYALRVAGLDRCLIAEEIARVLIHIAHRRGFQSNRKSEIKDSDAGKLLKAVQENENLMQSKGYRTVAEMLVSEATKTDAEGKLVHGKKHGYVSNVRNKAGEYRHTVSRQAIVDEVRKIFAAQRALGNDVMSEELEDSYLKILCSQRNFDDGPGGDSPYGHGSVSPDGVRQSIYERMVGSCTFETGEKRAPRSSYSFERFQLLTKVVNLRIYRQQEDGGRYPCELTQTERARVIDCAYEQTKITYGKLRKLLDMKDTESFAGLTYGLNRSRNKTEDTVFVEMKFYHEVRKALQRAGVFIQDLSIETLDQIGWILSVWKSDDNRRKKLSTLGLSDNVIEELLPLNGSKFGHLSLKAIRKILPFLEDGYSYDVACELAGYQFQGKTEYVKQRLLPPLGEGEVTNPVVRRALSQAIKVVNAVIRKHGSPESIHIELARELSKNLDERRKIEKAQKENQKNNEQIKDEIREILGSAHVTGRDIVKYKLFKQQQEFCMYSGEKLDVTRLFEPGYAEVDHIIPYGISFDDSYDNKVLVKTEQNRQKGNRTPLEYLRDKPEQKAKFIALVESIPLSQKKKNHLLMDKRAIDLEQEGFRERNLSDTRYITRALMNHIQAWLLFDETASTRSKRVVCVNGAVTAYMRARWGLTKDRDAGDKHHAADAVVVACIGDSLIQRVTKYDKFKRNALADRNRYVQQVSKSEGITQYVDKETGEVFTWESFDERKFLPNEPLEPWPFFRDELLARLSDDPSKNIRAIGLLTYSETEQIDPIFVSRMPTRKVTGAAHKETIRSPRIVKVDDNKGTEIQVVVSKVALTELKLTKDGEIKDYFRPEDDPRLYNTLRERLVQFGGDAKAAFKEPVYKISKDGSVRTPVRKVKIQEKLTLGVPVHGGRGIAENGGMVRIDVFAKGGKYYFVPIYVADVLKRELPNRLATAHKPYSEWRVVDDSYQFKFSLYPNDAVMIKPSREVDITYKDRKEPVGCRIMYFVSANIASASISLRTHDNSGELEGLGIQGLEVFEKYVVGPLGDTHPVYKERRMPFRVERKMN

SEQ ID NO: 63 - protein, 1052 aa, Aminomonas paucivorans
  Aminomonas paucivorans DSM 12260
MIGEHVRGGCLFDDHWTPNWGAFRLPNTVRTFTKAENPKDGSSLAEPRRQARGLRRRLRRKTQRLEDLRRLLAKEGVLSLSDLETLFRETPAKDPYQLRAEGLDRPLSFPEWVRVLYHITKHRGFQSNRRNPVEDGQERSRQEEEGKLLSGVGENERLLREGGYRTAGEMLARDPKFQDHRRNRAGDYSHTLSRSLLLEEARRLFQSQRTLGNPHASSNLEEAFLHLVAFQNPFASGEDIRNKAGHCSLEPDQIRAPRRSASAETFMLLQKTGNLRLIHRRTGEERPLTDKEREQIHLLAWKQEKVTHKTLRRHLEIPEEWLFTGLPYHRSGDKAEEKLFVHLAGIHEIRKALDKGPDPAVWDTLRSRRDLLDSIADTLTFYKNEDEILPRLESLGLSPENARALAPLSFSGTAHLSLSALGKLLPHLEEGKSYTQARADAGYAAPPPDRHPKLPPLEEADWRNPVVFRALTQTRKVVNALVRRYGPPWCIHLETARELSQPAKVRRRIETEQQANEKKKQQAEREFLDIVGTAPGPGDLLKMRLWREQGGFCPYCEEYLNPTRLAEPGYAEMDHILPYSRSLDNGWHNRVLVHGKDNRDKGNRTPFEAFGGDTARWDRLVAWVQASHLSAPKKRNLLREDFGEEAERELKDRNLTDTRFITKTAATLLRDRLTFHPEAPKDPVMTLNGRLTAFLRKQWGLHKNRKNGDLHHALDAAVLAVASRSFVYRLSSHNAAWGELPRGREAENGFSLPYPAFRSEVLARLCPTREEILLRLDQGGVGYDEAFRNGLRPVFVSRAPSRRLRGKAHMETLRSPKWKDHPEGPRTASRIPLKDLNLEKLERMVGKDRDRKLYEALRERLAAFGGNGKKAFVAPFRKPCRSGEGPLVRSLRIFDSGYSGVELRDGGEVYAVADHESMVRVDVYAKKNRFYLVPVYVADVARGIVKNRAIVAHKSEEEWDLVDGSFDFRFSLFPGDLVEIEKKDGAYLGYYKSCHRGDGRLLLDRHDRMPRESDCGTFYVSTRKDVLSMSKYQVDPLGEIRLVGSEKPPFVL

SEQ ID NO: 64 - protein, 1361 aa, Anaerococcus tetradius
  Anaerococcus tetradius ATCC 35098
MGNYYLGLDIGTNSVGWAVTDENYNIERFKKKNMWGIRLFDEAKTAESRRIHRQARRMRQRKIQRLNLLMELFDVEISKVDESFFIRKKESDLHYEDKSQDSRYALFNDKEFNDKDYHNKYPTIFHLIMDLIENDEKKDIRLLYLACHYLIKNRGHFIFEGQKFDVNSSLNNNINKLKSHLDQFYNICLDFDNDKLIEILVNQNLNISEKSKKIKELLRKTNLEVGIANLIAGGSIKLSNMFDDDELKNLDYNSLSFKNSNFDEGRELFEEVLEDRFELVEILKDIHDASVLETMLSSASISPDGGKYISSSMINSYNKHKRDLKLLKKIIKKYKKSEYDNIFRDENIKNNYLSYTRTGINKNKKVQAEDNTDSDGFYKYIVKILKDIKENDSDEDIKYILSEIDKKNFVPKQRTKENSVIPYQLREIELRKIIDNQSKYHKFLNEVDEKGISVKEKIISLLTFRIPYYIGPLNPSYNEEKNFTTSWVKRLAKGKVTPWNFEDMVDIDASREAFIENKLNKCSFLLDETVLPKDSLLYQEYMVLNELNNLKINGQSINTDLKKSIYEELFKKYKKVTRKRLISYIKEKENMSGDIVITGIDGDFKQGLKSYIAFKDIIGEKIDDDIYRKEVEKIIRDISLYGDDKSFIQKKIKNENKLDLSDDQISKIAKLKFKDWGRFSKKLLVGIKASDKNTGEIDNIIGFMRNYNYNIMQLMANVFTFKDEIEKLNSKYYTDEKINIDYLDDLYLSSPAKRMLWQSFQIVDEIKNIKNSDPKKIFIEMARSKEDKPTRKMSRKSRLEKLYTDSKKQFIKLFGPDEYDKLNNEIKNKSESDFRWDNLYLYYTQFGRCMYSLDPIDLEELSNKNLYDQDHIYPKSKIYDDSIENRVLVKKQLNLDKSNEYPIPDRVLNKDKNKLLAFWKMLNEKELIGDKKYARLIRKSPFTDEELGDFIARQLVETRQATKETANMLKRLCPDSKIVYVKAKNVSDFRRKFDILKCRSINDLHHAHDAYLNIVVGNVFDTKFTSNPLNFIKNNSKNRSYNLEKIYDYDVIRNEKIAWLAERKEENQDGSIATVLKNLSKNDIRVTRRTYIKCEDLFDENIVRKGNGKFPIKENNNKSDTNKYGGYSGIKNAYFVLLEDEKHNRILEAIPSFIYKKEKNGEKGSVINYLQNILGIKSAKILRDKIKIGSLLKIDKFPYNLAGKSGNGILISGGVQLILDKNTSKYIKKIENYKYKLDENKDYQINIFDKLSKEENIKLFDLFVDKFENSIYKNRVNIKLKEIKLARPKFEHLSIEEQIKTLTQMLILFGRENNAVNLEYIGLPKNTGKTKINKKINNKDIKIINQSITGLYETEEDLANI

SEQ ID NO: 65 - protein, 1552 aa, Anaerophaga sp.
  Anaerophaga sp. HS1
MFSQRNNPYCELLQNVKQLYKEKFGKTNQVDNSIIYGFMKRILGLDLGTNSIGWALVENDENDRKGKIIGMGSRIIPMDMSELDNFNKGASISKTAERTRLRMTRRLRERHLLRRARLHRILNIMGFLPEHYRNSIDFIDKKGCFFEGQEPKIAYKPDKNSEQFCFLFTSSFHEMLEDFRKFQPELIQNRKKVPYDWTIYYLRKKALTQKISKEELAWIILNFNTKRGYYHLRGEDEDNQDNKKIKEFRALKVVNVTEREGANSSGKKWYDMELENGWVYSRQSNLPPNLEGKTIELIVSYTLDNNGNIKKDKNGKEKYSLSMPGEEDWNLVKIKTENDLKTSKKSVGEYIYDHLLKNPDQKIRGKLISTIERKFYKEELSRILKTQMNFYEELKNRELYQKCVEELYPNNKSHQQTLLQKDFIHLIVEDIIFYQRPLKSKRAFVNNCPLEYRVYVDKKSGELIKSGVKCIPKSHPLFQEFRLWQYVRNLRIYERERMVNGRLMVNVDVTNELLPDEEHIVRLFDLLNDRKSFKQDDVLRFVGIKSPKDRKRYSWNYPEDKELPGNETRHLILAWLKKVDGVPEDWLDPEKLKALWHLLYSVTDREEIIKGLHSFAKKYELPDTFVEHFKKIPRLEREYGSFSEKAIKKLLPLMRMGKYWKAEEIPADLLEKAQKIIDAEADDRISDEVREKLLHLKDISQLKGLPLWQASYLVYGRHSETGEVVKWRTSEDLEKYILQFKQHSLRNPVVEQVILEALRVVKDIWEHYGEGKEGFFNEIHVEIGRELKNPADKRKKITSQIQENENTNLRIKALLEELFNDPSVKNVRPYSPAQQEILRIYEDGVLNGQKEIPDDILKISKMARPSKSQLVKYKLWLEQKYRSPYTGEIIPLSQLFTSAYEIEHIIPQARYFDDSFSNKVICEAEVNREKGHQLAFEFITKRGGDEIELNFGKKVTILNVEEYQKFVKDHYGRSLRSLSKMRKLLMEDIPDDFIDRQLNDSRYISKVVRNLLSNIVRAEDENSLVSKHLITCTGGVTTRLKHEWGLNDVWNELITPRFVRLNKMGKEKFGEWINKKGKQVFQIQMPLELQKGFNKKRIDHRHHALDALVVACASRSHVNYLNNDSARANASETRYDLRNKLCYKDKTDSNGNYRWKFYKPWESFTEEAKNRLAGTVVSFKSNRRIMTRSSNRYFKWVDTSEGKKKKLVRQIKGDNQAIRKPLHKDTVLGKVSLRKEKKVSLSKAIDLWESIVDKPLKKRIQSLREQGYDKKLLLKYFKDRNNQFNGQDISRVNIYFFDNNLAARRVTLDASFNSEKRIDGITDSGIKKILYAHLQNEKYHGKKDEKGNEISPYELAFSPEGLEEMNANIKKLNGGKPHCPIYKVRLAETIGEKFKLGEKGNKNKKYVEAAKGTNLFFAVYVDEKGVRSFETIPFSVALERRKQKLAVVPEENENKEKLLFYLSPNDLVYVPDEDEKLIDYRQLSINPTRIYKMVSSSGTQCFFIPHFVASPIVQTMELGPNNKSERAWDGQMIKNVCYKLSVDRLGNVKIEK

SEQ ID NO: 66 - protein, 1515 aa, Anaerophaga thermohalophila
  Anaerophaga thermohalophila DSM 12881
MKRILGLDLGTNSIGWALVESDEEQKSGKIQGIGSRIIPMDQNELDNFNKGNTVSQTAERTRLRMVRRLRERHLLRRERLHRVLKEIGFLPEHYLEQIDFTEKPGGFLPGKEPKIAYKPDNFKDKYDFLFQDSYHEMLSDFQDKNPEFIQKRKKVPQDWTIYYLRKKALTAKITKEELAWIILNFNQKRGYYQLRGEDEDVAKNTKKEEFHALKVVKVKEREDSEGASGKWYDIELENGWVYPRQSNIRPDWEGKILELIVTYNLDKDGNIKTDKEGNEKRSFRMPNKDDWTLRKKRTENEIEKSGKTVGEYIYDNLLDAPDLKIRGKLVSTIERKYYRSELEQILTAQKKYHPELSNSELFNKCISNLYPNNDIHRKALLSKDFVHLIINDIIFYQRPLKSKRSTVSNCPLEYRVYVDKVTGEKKKVPLKCIPKSHPLYQEFRLWQYVKNLRLFEKERFENGRLLTNVDVTEQFLPDEDKYVELFEFLNGRKTFKQDDILKFAGIKSAKDRVKYYWNYPQEKEYPGNETRYLIESRLKKIENVPDEWLNYEKIEELWHLLYSVTDKVEIEKGLQSFAAKYQLPDLFVEVFKGFPRMEREYGAFSKKAIKKLLPLMRMGKYWKLENINPDLIEKVQKIIDGEADDNINDGIRERFSEINEMSDLRGMPLWKASYLVYGRHSEAAEVIRWRTSADLDQYIKDFKQHALRNPIVEQVVLEALRVVKDVWNYFGEGREKFFDEIHVEIGRDLKNPADKRQKIANQIQENENTNLRIKALLVELFNDPEVQNVRPYSPVQQQLLKIYEDGVLNAERDIPDDIQKISRMANPTRNQLIRYKLWLEQKYRSPYTGEIIPLNKLFTSEYEVEHIIPRARYFDDSFSNKIISEAEVNRKKDRMLAFEFIKKLGGSTIDLNYGKKVSVLTVEEYQQFVKDHYGINPHSRLKMQKLLMDEIPESFIERQLNDSRYISKMVRNLLSNIVREENENSPVAKQLITCSGSITNTLKQEWGLNDVWNTIITPRFERLNKMGEQKYGEWVNKEGKPVFQIQMPLELQKGFNKKRIDHRHHALDALIVASATRSHVNYLSNEAAKTNAKDTRFDLRNRLCYKEKRGQNRNFTWRFYKPWNTFTEDAKNALNDIVVSFKSNHRVINKSTNRYFKWENLPGGMKKKRLVRQEKGDNWAIRQSLHKDTVLGKVSLRKVKPVSLSVALDSWNNIVDKALKKKIRSLKDQGYDKKLMLKYFKDRRNEYNGENISRVNVYYFDEEMAARRVDLDTSFNSEKRIEGITDSGIKKIIYAHLKNEKYHGQKDDKGKDISPYELAFSPEGIAEMNANIKQLNGGKPHCPIYKVRLAEPVGEKFQLGETGNKTEKLVEVAKGTNLFFGVYANDEGVRSFATVPFYLAVEREKQGLPAVPQENENGDQLLFWLSPNDLVYVPSEEDAHFANPKQIELDNSRIYKMVSSTGTQCFFIPHFVATPIVQTIELGPNNKSERAWDGQMIKKVCYKLSVDRLGNVEIE

SEQ ID NO: 67 - protein, 1168 aa, Azospirillum lipoferum
MARPAFRAPRREHVNGWTPDPHRISKPFFILVSWHLLSRVVIDSSSGCFPGTSRDHTDKFAEWECAVQPYRLSFDLGTNSIGWGLLNLDRQGKPREIRALGSRIFSDGRDPQDKASLAVARRLARQMRRRRDRYLTRRTRLMGALVRFGLMPADPAARKRLEVAVDPYLARERATRERLEPFEIGRALFHLNQRRGYKPVRTATKPDEEAGKVKEAVERLEAAIAAAGAPTLGAWFAWRKTRGETLRARLAGKGKEAAYPFYPARRMLEAEFDTLWAEQARHHPDLLTAEAREILRHRIFHQRPLKPPPVGRCTLYPDDGRAPRALPSAQRLRLFQELASLRVIHLDLSERPLTPAERDRIVAFVQGRPPKAGRKPGKVQKSVPFEKLRGLLELPPGTGFSLESDKRPELLGDETGARIAPAFGPGWTALPLEEQDALVELLLTEAEPERAIAALTARWALDEATAAKLAGATLPDFHGRYGRRAVAELLPVLERETRGDPDGRVRPIRLDEAVKLLRGGKDHSDFSREGALLDALPYYGAVLERHVAFGTGNPADPEEKRVGRVANPTVHIALNQLRHLVNAILARHGRPEEIVIELARDLKRSAEDRRREDKRQADNQKRNEERKRLILSLGERPTPRNLLKLRLWEEQGPVENRRCPYSGETISMRMLLSEQVDIDHILPFSVSLDDSAANKVVCLREANRIKRNRSPWEAFGHDSERWAGILARAEALPKNKRWRFAPDALEKLEGEGGLRARHLNDTRHLSRLAVEYLRCVCPKVRVSPGRLTALLRRRWGIDAILAEADGPPPEVPAETLDPSPAEKNRADHRHHALDAVVIGCIDRSMVQRVQLAAASAEREAAAREDNIRRVLEGFKEEPWDGFRAELERRARTIVVSHRPEHGIGGALHKETAYGPVDPPEEGFNLVVRKPIDGLSKDEINSVRDPRLRRALIDRLAIRRRDANDPATALAKAAEDLAAQPASRGIRRVRVLKKESNPIRVEHGGNPSGPRSGGPFHKLLLAGEVHHVDVALRADGRRWVGHWVTLFEAHGGRGADGAAAPPRLGDGERFLMRLHKGDCLKLEHKGRVRVMQVVKLEPSSNSVVVVEPHQVKTDRSKHVKISCDQLRARGARRVTVDPLGRVRVHAPGARVGIGGDAGRTAMEPAEDIS

SEQ ID NO: 68 - protein, 1068 aa, Bacillus cereus
  Bacillus cereus BAG4X12-1
MRYVLGLDIGIASCGWAVINQEKERIEDLGVRIFDKAENPKDGKSLAAPRRDARSTRRTLRRKKHRMQRIKILLVKQGLLFKTELNHLYESATEFDVWNLRLDALERKLHPKEFARVLIHLAKRRGFKSNRKETTLSENGQILESISENQQIMEQQNYRTVGEMILKDKKFENHKRNKDGTYIGTVTRQQLQDEIQMIFHTQRLYKNDYATEEFESSYLEIWASQRPYASKDQIEKMIGYCTLEPKEKRTPKASWSFQYFVALQTINNLRLISKDKIEELSFEEKKQIMNLALEKPIVKYIDIRKLLSIPNDFQFNSLSYSADTVDTTLENKRCIELKEYHSINKVYKQVYGKNTPNLLPIDYDTIAYGLTIFKDDKDILEYLQNKYVNAKGKPIKNLAKKTYDDTFIQALLNLNFTKMGHLSFKALKNIIPFLEEGLSYDKACEKAGYNFKGTSYTERTKYLPVIPQNTNPVVHRALSQTRKVINAIIKKYGSPNAIHIETARELSKTFQERKEIDSRYQDNSKKNEHAIHKLKELGNINPSGINIVKFKLWSEQDGRCMYSGKYIEPHRLFEEGYTEVDHILPYSRSLDDSYNNKILTLGTENQRKGNKTPYEYMGNTSIWDEFETRVQSNKKINFKKQQKLLLQNFSYAREQEFIERNLNDTRYATIYLTSLIQQHLIFSESSSKKKVRTVSGIITSHLRSRWGFNKDRKEGHIHHALDAVIVAVTSNHMIQRVTKYYKLKELNKNLQAKQLPFPEPWEGFRLELEARISPNTQQYLKGIHFKNYADVNLSDIKPIFVSRMPKRSITGELHQETIRKFLGYNEKGKVLTAIKTKLEDIPFDANGDFPMYGKETDLYTYNAIKERYLSHEKDKRKSFQEPLYKPTKSGEIGPLIKSIKIMDTRTIVNPVNQGKGVVYNSKIARTDVFKKEDKYYLIPIYTIDLLKNILPHKAITAGKGYEDWTTIDSSFTFLFSLFPNDLIQIVPSKNKTIKARTTVSKKEILLPSLTGYFKGVHSGTAGITVETHDGSVIANVGSKQLLLFEKYQVDVLGHYTKIKEEKRMGMAI

SEQ ID NO: 69 - protein, 1078 aa, Bacillus cereus
  Bacillus cereus BAG4X2-1
MRYVLGLDIGIASCGWAVINQEKERIEDLGVRIFDKAENPKDGKSLAAPRRDARSTRRTLRRKKHRMQRIKVLLVKHGLLSKTELDHLYESATEVDVWNLRLDALERKLYPKEFARILIHLAKRRGFKSNRKETTLSENGQILESISENQQIMEKQNYRTVGEMILKDKKFENHKRNKNGTYVGTVTRQQLQDEIQMIFHAQRLYKNDYATEEFESSYLEIWASQRPYASKDQIEKMIGYCTLEPKEKRAPKASWSFQYFVALQTINNLRLISKDRIEELSFEEKKQIMNLALEKSIVKYIDIRKLLSVPNEFQFNSLSYSADTVDTAVESRKCIELKEYHSINKVYKQIYGENALNLLPKYYDTIAYGLTIFKDDKDILEYLQNKYVNAKGKPISNFANKTYDDTFIQALLNLNFTKMGHLSFKALKNIIPFLEEGLSYDKACEKAGYNFKGTSYTEQTKYLPVIPQNTNPVVHRALSQTRKVINAIIKKYGSPNAIHIETARELSKTFQERKEIDSMYQDNSKKNEHAIHKLKELGNINPSGINIVKFKLWNEQDGRCMYSGKYIEPHRLFEEGYTEVDHILPYSRSLDDSYNNKTLTLGTENQRKGNKIPYEYMGNTSIWNDFETRVQSNKKINKKKQQKLLLQHFSYAREQEFIERNLNDTRYATIYLSSLIQQHLIFSESSRKKKVHTVSGIITSHLRSRWGFNKDRKEGHIHHALDAVIVAVTSDHMIQRVTKYYKLKELNRNLQAKRMPFPEPWEGFRLELEARISPNTQQYLKGLRFKNYADVNLSEIKSIFVSRMPKHSITGELHQETIRKFIGYNEKGKVLTAIKTKLEDIPFDANGDFPMYGKESDLYTYNAIKERYLSHKKDKRKSFQEPLYKPTKSGGIGPLIKSIKIMDTRTIVNPVNQGKGVVYNSKIARTDVFKKEEKYYLIPIYTIDLMKNILPQKAITAGKGYEDWTTIDPSFTFLFSLFPNDLIQIVPSKNKTIKARTTVSKKEVLLPSLTGYFKGVHSGTAGITVETHDGSVIANVGSKQLLLIEKYQVDVLGNYTKIKEEKRIGLTTYNDNKKIAAC

SEQ ID NO: 70 - protein, 1069 aa, Bacillus cereus
  Bacillus cereus Rock1-15
MNYDIGLRIGITSCGWSIINKDLERIEDLGVRVFEKAENPDGTASAAPRREARKSRRKHRRKKHRIERIKRLIVQHDLLSKKELDSLYLSPFNIDVWNLQVEALERKLDNREFARVLIHLVQRRGFQTIRKSVEIQEEGKLLENVSENERIMKVNGYKTVGEMFSKHEKFTHHKRNKDGSYTSVVTRSLLLKEIKTIFNSQRILGNVFSTQKLESDYLYIWGSQRPTLTYEQLMSMVGNCIYEKKEKRAPKTSWAFQYFSLLQKINKLKVSDDNTLRKLSKEERDIVIELAFKKKNVSFVDIRKALKLNDNTKFNHLTYSHVVETKKVEKATFIELKGYHLIKKQLKDRNVELTQELQPKDYDAIAAASTFFKNDIEFRDYLRNQYLDSNGKRKSNIANKVFEDKVIAAVFELNFSKVCHLSFKSLYKLIPHLEKGLDYKEAILCAGYNFRDENKRDKKLFLPVIQQETNPVVHRALTQARKVINAIIREYGSPNTIRFVVANDLAKTYKQRKELESTLKKNRAENEKIKTKLLSMGIINPTGMDIVKYKLWYEQSGICLYTGRQMELSSLFKPGYSIVNHIIPYNRSFDDTYHNRVLTLTETKYEKGNKIPFEYFGAEETCWNEYEKRVSTSKKIHDKKREKLLIRNFDIEYENEMISNNVFDTHYIGSYFEKYIDEHLQFKKSTKKQKVFSIHGNMVAHLHSRWGFNKNSREIYLNHAVDAAIVAVLTDQLIRNIADYYRRDNILEQKGSLKFPEPWKSFSIELEARISPQVRDLIKKLNLDSYLDVDILHIKPVFISKKPRRKVNGEAHKSTIRSLIGINEIGKTVTCIKTRLEDIPFDENGDFPMYGKDTDKYTYTAIKERYLEFNKDKEKAFSTPLYKLKRNGEPGNQIKSVKIIDTRNIVNKVNQGKGIAYNSNIIRVDVFSRDQKYYVVPIYLRDFIKGSLPNKIITAAKGFMQWPETDNSYTFLFSIFPNDLIKVVPKEGKFIKAKNENKENINLTEILGYFKGLDSSTGAFTLESHDGSLLARGIGTKNLLLIEKYQVDVLGRYNKVGNEERQDIKIQQN

SEQ ID NO: 71 - protein, 1088 aa, Bacillus smithii
  Bacillus smithii 7_3_47FAA
MNYKMGLDIGIASVGWAVINLDLKRIEDLGVRIFDKAEHPQNGESLALPRRIARSARRRLRRRKHRLERIRRLLVSENVLTKEEMNLLFKQKKQIDVWQLRVDALERKLNNDELARVLLHLAKRRGFKSNRKSERNSKESSEFLKNIEENQSILAQYRSVGEMIVKDSKFAYHKRNKLDSYSNMIARDDLEREIKLIFEKQREFNNPVCTERLEEKYLNIWSSQRPFASKEDIEKKVGFCTFEPKEKRAPKATYTFQSFIVWEHINKLRLVSPDETRALTEIERNLLYKQAFSKNKMTYYDIRKLLNLSDDIHFKGLLYDPKSSLKQIENIRFLELDSYHKIRKCIENVYGKDGIRMFNETDIDTFGYALTIFKDDEDIVAYLQNEYITKNGKRVSNLANKVYDKSLIDELLNLSFSKFAHLSMKAIRNILPYMEQGEIYSKACELAGYNFTGPKKKEKALLLPVIPNIANPVVMRALTQSRKVVNAIIKKYGSPVSIHIELARDLSHSFDERKKIQKDQTENRKKNETAIKQLIEYELTKNPTGLDIVKFKLWSEQQGRCMYSLKPIELERLLEPGYVEVDHILPYSRSLDDSYANKVLVLTKENREKGNHTPVEYLGLGSERWKKFEKFVLANKQFSKKKKQNLLRLRYEETEEKEFKERNLNDTRYISKFFANFIKEHLKFADGDGGQKVYTINGKITAHLRSRWDFNKNREESDLHHAVDAVIVACATQGMIKKITEFYKAREQNKESAKKKEPIFPQPWPHFADELKARLSKFPQESIEAFALGNYDRKKLESLRPVFVSRMPKRSVTGAAHQETLRRCVGIDEQSGKIQTAVKTKLSDIKLDKDGHFPMYQKESDPRTYEAIRQRLLEHNNDPKKAFQEPLYKPKKNGEPGPVIRTVKIIDTKNKVVHLDGSKTVAYNSNIVRTDVFEKDGKYYCVPVYTMDIMKGTLPNKAIEANKPYSEWKEMTEEYTFQFSLFPNDLVRIVLPREKTIKTSTNEEIIIKDIFAYYKTIDSATGGLELISHDRNFSLRGVGSKTLKRFEKYQVDVLGNIHKVKGEKRVGLAAPTNQKKGKTVDSLQSVSD

SEQ ID NO: 72 - protein, 1069 aa, Bacillus thuringiensis
MNYDIGLRIGITSCGWSIINKDLERIEDLGVRVFEKAENPDGTASAAPRREARKSRRKHRRKKHRIERIKRLIVQHDLLSKKELDSLYLSPFNIDVWNLRVEALERKLDNREFARVLIHLVQRRGFQTIRKSVEIQEEGKLLENVSENERIMKVNGYKTVGEMFSKHEKFTHHKRNKDGSYTSVVTRSLLLKEIKTIFNSQRILGNVFSTQKLESDYLYIWGSQRPTLTYEQLMSMVGNCIYEKKEKRAPKTSWAFQYFSLLQKINKLKVSDDNTLRKLSKEERDIVIELAFKKKNVSFVDIRKALKLNDNTKFNHLTYSHVVETKKVEKATFIELKGYHLIKKQLKDRNVELTQELQPKDYDAIAAASTFFKNDIEFRDYLRNQYLDSNGKRKSNIANKVFEDKVIAAVFELNFSKVCHLSFKSLYKLIPHLEKGLDYKEAILCAGYNFRDENKRDKKLFLPVIQQETNPVVHRALTQARKVINAIIREYGSPNTIRFVVANDLAKTYKQRKELESTLKKNRAENEKIKTKLLSMGIINPTGMDIVKYKLWYEQSGICLYTGRQMELSSLFKPGYSIVNHIIPYNRSFDDTYHNRVLTLTETKYEKGNKIPFEYFGAEETCWNEYEKRVSTSKKIHDKKREKLLIRNFDIEYENEMISNNVFDTHYIGSYFEKYIDEHLQFKKSTKKQKVFSIHGNMVAHLHSRWGFNKNSREIYLNHAVDAAIVAVLTDQLIRNIADYYRRDNILEQKGSLKFPEPWKSFSIELEARISPQVRDLIKKLNLDSYLDVDILHIKPVFISKKPRRKVNGEAHKSTIRSLIGINEIGKTVTCIKTRLEDIPFDENGDFPMYGKDTDKYTYTAIKERYLEFNKDKEKAFSTPLYKLKRNGEPGNQIKSVKIIDTRNIVNKVNQGKGIAYNSNIIRVDVFSRDQKYYVVPIYLRDFIKGSLPNKIITAAKGFMQWPETDNSYTFLFSIFPNDLIKVVPKEGKFIKAKNENKENINLTEILGYFKGLDSSTGAFTLESHDGSLLARGIGTKNLLLIEKYQVDVLGRYNKVGNEERQDIKIQQN

SEQ ID NO: 73 - protein, 1509 aa, Bacteroides coprophilus
  Bacteroides coprophilus DSM 18228
MKKTLGLDLGTNSIGWAVINSNIDSEGKEKLVGISSCGSRIIPMDATTLGDFGKGNTKSPVAERTRLRGIRRLLERSLLRRERLHRVLSVMGFLPEHYASQLDRYGKFLPETEPKLAWYKDDSGRYQFLFQKSFHEMLEDFRQHQPELVAGEKKIPYDWTIYYLRKKALSQEITKEELAWILLNFNQKRGYYQLRGEEEQEENNKSVEYHALKVVSVEDSGERKGKDIWYNVTLENGWVYRRASNIPLDWTGKVKEFVVTTELDDAGNPKKDKEGNVKRSFRAPKEDDWGLLKTRTQAQIDESGKTVGTYIYESLLCMPNQKIRGKLVRTIERKYYKDELRQILVKQSEFHAALQDHNLLLSCIEELYPNNEAHRRLLSASSFIYFLIEDILFYQRPLKSQKGLIDNCPYESHIYKDKKDGSLHHVPLKCVSKSHPLFQEFRLWQFLSNLRIYQRERMMDGSLKLDVDVTREFLPSEEDYVKLFDWLNERKEISQKFLLAYKPFGLKKNEQANYRWNYVEDKSYPCNETRAEIKSRLSKAGVPEEFLTEEKEEALWHILYSISDKKELTKALGTFAAKNCLNESFVEVFAKIPPFESNYAAYSLKAIRKLLALMRMGKYWNEQAIDRQTRDRIEKILTGEYDETIRSRVREKAMLLTDISSFRGLPLWLACYIVYDRHSESKELVKWETPADIDHFLSKFKQNSLRNPIVEQVITESLRTVRDIWKQEGKIDEIHVELGREMKNPAKERARITAQVQENENTNLRIKALLAEFMNPEFEIENVHPYSPGQQEILRIYEDGVLSGIAEKDLPDDITAILKKFRENDVKKRPTTSEVLRYKLWLEQRYRSPYTGRVIPLGKLFTPAYEIEHVIPQSRYFDDSISNKVICESAVNKLKDNCLGYEFIKKHSGEMVELGNGETVPVFSVEEYERFVKESYFGNSKKMKKLLLEDIPDSFIERQLNDSRYISRVVTSLLSNLVCEEGEQDGLSKNVIVCTGGITDRLKKDWGVQEVWNRIILPRFLRLNEITGRTDFTSTSVNGHLLPALPLYLQKGFNKKRIDHRHHAMDAIVIACANRNIVNYLNNSSARKNSEISRYDLQRLLCEKVKTDANGNYKWILRKPWETFTQDVYAALTNIVVSFKQNLRVINRTTNYYQHYNEAGEKRMIPQTKGDRWAIRKPMHKDTVYGEVNLRKEKTLPLRDVVKNPSIVVDKSLKNKLYELLKSQYDLKAIAKYFETHQDVWADVNLKKIKVYYFTKETNERFFATRKSLDPSFDQKKIEEEVTDTGVQKILLHHLQQNNNDPDMAFSPDGIDRMNQNMTILNDGKWHQPIYKVRTYEKADKFAVGESGNKAKKFVEAAKGTNLFFAVYESVQEDEAIGKQVCKRTFATIPLNEVIKRKKQGLPAAPEDLNGNLPKFVLSPNDLVYLPTEEERNSSRIIQPLDRERIYKMVSSSGSQCFFIKVFVANSIWDKNEYSSLNKMERAITNEMIKEICVPIKIDRLGNVSLIQI

SEQ ID NO: 74 - protein, 1504 aa, Bacteroides coprosuis
  Bacteroides coprosuis DSM 18011
MKKVLGLDIGTNSVGWAVVNQNDKGEFLSIEKIGSRIIPMSQDVMDKFGAGQTESSTAQRTQYRGVRRLRERSLLRRERLHRVLHILHFLPQHYDAAIGWNKKENKTYGKFLPGVEVNIPWVATDQGHQFIFMDSYAEMLKDLKQHQPHLFEKSSTPVPLDWTIYYLRKKALTQAISKEELAWILLNFNQKRGYYQLRGEEVEDNTKREEFYALKVVKVELDKDNTSAKTWYKVHLENGFIYPCPSDTPIDSWVGMVKDFIVTTTLEKDGSEKRTADGEIKRSFRAPKEDDWTLLKKKTESELEKSGKQVGAFIYDTLLSNPDQKIIGGLIKTIERKYYKKELEQILETQQKFIAELSDKKLFQACAEELYPLNDSHRENLLERDFKHLFVQDIIFYHRPLKTKKSLISNCTYEYRTFYKNGEKQISPIKCIAKSNPLFQEFRVWQFVQNLRILQRQRSEGDSIKYNVDVTAEFLKDENDIANLFTWLNERKVIKQDQLLKSYFKLKVNKETKELDYRWNYVDDKNKEYPCNATRTHILSFLEKCKEEKRIEDDRFVYSLWHLLYSVVEPIELRGALAKFAEREHLHPSFVDVFAQFPPLEKEYGSYSEKAIKRLLPLMRMGDYWHEDKIDVKTKQRIQRIIDGEADDDITHRSREKVENLRSITDFKGLPLWKAGYVVYNRHSESGELTKWKTPHELSNYIQNEFKQYSLRNPIVEQIVLETLRVVHDLWVKHGDFSEIHLELGRDIKNSSDKRKRMAERQQENENSRQRVLEMLIDLKKEAAFADLNPYSPSQQEKLRIVEDGVLRSNIEIPKDIEKITKSAKPTSRELTKYRLWLDQKYRSPYTGQPISLAQLFTSKYEIEHVIPQAKYFDDSFTNKVICESEVNKEKGSMLAHEFILKNGGSTVNVGGRQVQVLKNDAYVELINRLYGKNNPVKAKKLLAEDIDEVVGDFSERQLNDTRYISRVVQKLLSNIVREEDEQESTSKHVIGCSGQVTTALKKDWGLNDIWNKIIQPRFERLNEMTATEDYGVWQSPNHFQIRVPEEIQKGFTKKRIDHRHHAMDALVIACATRSHINYISNRSGQDRNAKFETTRTDLRSKLCYKENSSGNNYNYIFNKPWDTFTQDAHRALENIVVSHKQNLRVLTKTNNYTQFINKDGKKDLQKQVKGDHFAVRKPMHQETIYGRVSIRSIKEVALKKALENWKQIVDRTLKDKIRELIGAYGKYDAQTILKYFKDRDYKFNNLKINRVEVYEYDHNCAAVRKSIGDDLTIKQIERITDESIRKILMNHLSNYDDNLKEAFSPEGLMEMNKNIKELNGGKNHQPIYKVRLFEDLGSKFPLGVSHNNPDKYAIAAKGTNLFFGIYEDQEGKRMFDSIPLNIVIDRLKEKKSPVPETYNESKLKFHLSPNDLVYVPTDEEQKQPELVDVDHLSDEQKGRVYKAVSFTGNRAFFVNHRVSKVIHDYVEFGTKNKIENDDDKRSLKHICWKLKVNRLGEITDVKR

SEQ ID NO: 75 - protein, 1504 aa, Bacteroides dorei
  Bacteroides dorei DSM 17855
MKNIVGLDLGTNSIGWAVVNGSVNDDGSEQLVKIQASGSRIIPMDAAMIGDFNKGNSISQTAERTRLRGVRRLSERYLLRRERLHRILDILGFLPFHFAQDLDRHGKIVKGKEPKLAWRKNEAGQFEFIFQDSFKEMLEDFKLNYPNLITDDKKVPYDWTIYYLRKKGLTSKISKEELAWILLNFNQKRGYYQLRGEEEEENKDKLVEFYALKVVAVEDSGEKKGKDIWYNVHLENGWVYRRTSNMSLDWVGKTKEFIVTTDLEKDGTPKKDKEGNVKRSFRAPKEDDWSLVKKKTEADIDQTHKTVGAYIYDTLLGNPSQKIRGRLVRTIERKYYKEELKLILEKQKEFHLELQDRALYAACIEELYPINEAHRNNVGNRDFTYLFLEDILFYQRPLKSKKSLIDNCPYEENQGLDKETGEIKSFPVKCIAKSHPLFQEFRLWQFIINLRIYRKDLAQDVDVTNELLKTEEDYVALFDWLNGKKEIDQKAFLKYPVFGLKKEIENYRWNYVQDKPYPCNETRSLMLARLEKCDISIEFLTKENEEALWHILYSVEDKNEIVKALQKFADKHDLNASFVDVFQKFPPFKKEYGSYSAKAIKKLLPLMRMGKYWSENSIDKGTRERIDKIITGEYDEKIENRVREKAIHLADVSDFKGLPLWLVCYIVYGRHSEAKEIIQWKSPADIDSYLRSFKQHSLRNPIVEQIIIETLRVVRDIWKQVGNIDEIHVELGREMKNPADKRKKMTQQMSENENTNLRIKYLLTEFLNPEYEVENVRPYSPSQQDILRIYEEGVLNSVSDLPEEISDILKKFTETDLKKRPSRSEVLRYKLWLEQKYRSPYTGEVIPLGKLFTPAYEIEHVIPQSYYFDDSFSNKVICEAEVNKLKSNLLGHEFIVKHHGEIVELPFGKKVRIFTVDEYEQFVKDNYSRTRSKMKKLLMDDIPEEFVTRQLNDSRYISKVVKSLLSNIVREKGEEEAISKNVIPCTGGVTDRLKKDWGINEVWNKIILPRFQRLNELTGTNKFTTKNVGIQEIPTMPLELQKGFNKKRIDHRHHAMDAIIIACANRNIINYLNNKSATAKAELSRYDLQKMLCDKAKTDNNGNYKWVIRKPWASFTQDTYLALENIIVSFKQNLRVINKATNRFLHYNEEGKKIFVKQGKGDNWAIRKSMHKDTVFGEVNLRRIKTVALNEAMKNPQSIVVKDFKRKLLELWNLGFDAKRIKKYFEDNRETWSDINLSKIEVYYFSKDTKDRFFATRKPLDTSFDRKKIENNITDTGIQKILLRHLELKDNNPDIAFSPDGIDEMNRNIIQLNNGKYHQPIIKIRWYEQADKFAVGQTGNKSSKFVEAAKGTNLFFAVYESNILDKKTNTIIKKRNYATIPLNVAIERQKQGLPVAPEDENGNDPIFVLSPNDLVYLPTDDELANGIIAQPLDRGRIYKMVSSSGEQCFFIKHIVANVLVDKFEFSPLNKMERALTGEMIKMICIPIKVDRLGNVLESSSSYKK

SEQ ID NO: 76 - protein, 1509 aa, Bacteroides eggerthii
  Bacteroides eggerthii 1_2_48FAA
MKTILGLDLGTNSVGWAVINSVIKEQAERIWIEMAGSRIIPMDAAVLGDFDKGNSISQTSERTRLRGARRLRERQLLRRERLHKVLNILGFLPNHYLEYIDFEKHPGKFLADAEPKLAWVKDEQGKYTFLFQAAFDEMLADFAIHQPSLVSGDKKIPYDWTIYYLRKKALTEMISKEELAWILLNFNQKRGYYQLRGEEEEDNAGKSVEFYALKVLTVEATDEKKGRDVWYNVHLENGWIYRRSSSVPLDWEGQVKEFIVTTDLNPDGTPKLDKYGEVKRSFRAPKEDDWMLIKKRTEADIANTHKTVGAYIYDTLLQKPQQKIIGKLVKTVERKLYRDELSLILQKQCAFHAELQDRALYARCVEALYPSNEVRRKNIANRDFVYLLMDDILFYQRPLKTKKSLIANCPYEENEYVDRETGEIKKTPLKCIAKSHPLFQEFRLWNFLSNIRIYQKEKEINGTLHLDVDVTAEFLKTEDDYVALFDWLNSRKEIEQKTFLKYPKFGLKKEISNYRWNYVEDKQYPCNETRHAILSSLEKANVCIDFLSNEKEVALWHILYSVSDKQEIEKALRTFAAKNGLDESFVEAFKKFPPFKSEYGAYSAKAIKKMLPLMRCGKYWDVSSIDDTTKERIKKIVTGEYDERISVKVRDKVMNLSDISCFRRLPLWLACYIVYNRHSEDKEAVKWESPADIDAYLASFKQHSLRNPIVEQVITETLRVVRDIWKQVGRIDEIHIELGREMKNPADKRKRMTAQILENENANLRIKALLAEFMNPEYEIENVRPYSPSQQEILRIYEDTVLHAEDQLPEEIDAILKKFNSSKVPTKSEFLRYKLWLEQKYRSPYTGELIPLGKLFTAAYEIEHVIPQSRYFDDSFSNKVICESAVNKLKDNQLGYEFIKNHHGQKVEVGFGKSVEIFSVDSYERFVKEQYAKSAVKMKKLLMDDIPEQFIERQLNDSRYISKVIKGLLSNIVREKNDSGEYEPEAVSKNIVVCTGSVTDRLKRDWGMNDVWNSIVYPRFERLNSLTDTQSFGHWENKSGKKVFQTELPLEYQKGFSKKRIDHRHHAMDAIVIACATRNHVNYLSNESASRNAKISRYDLQRLLCDKNRTDDNGNYKWVIKKPWDTFTQDAREVLSKIVVSLKQNLRIINKTTNVYRHLDATGNRVYEKQKTGDSWAIRKPMHKDTVFGAVNLRKVKVVRLSVALDTPAMIVDKRVKNKVFELLSYKYDKKRIEKYFKENAFLWKELDLAKVAVYYFTEATTEPLVAVRKPLDSTFNEKKIKESVTDTGIQKILLNHLCTKEGKPDLAFSAEGIEEMNRNLLQLNNGKSHQPIYKVRVYEPRGNKFSVGVLGNKGTKWVEAAKGTNLFFAIYITEDGKRTYETIPLNVVIEREKQGLVPVPDRNKKGDKLLFWLSPNDLVYLPTEEEREFGRINEPIDRGRIYKMVSCTGNEGHFIPANVANPIVPVIELGSNNKAQRAWTNEMIKDICIPIKVDRLGHIIEVKYRIDE

SEQ ID NO: 77 - protein, 1526 aa, Bacteroides faecis
  Bacteroides faecis MAJ27
MKKILGLDLGTNSIGWAVLNAADDNSLKYIEAAGSRIIPMDAAILGDFDRGNSISQTAERTRIRGMRHLRERYLLRRARLHRILNLLGFLPFHYAQDIDRYGNFSADMEPKIAWCKNLEGELEFIFIESFNEMLEDFRKNQPELVADNKKVPYDWVIYYLRKKALEKKISKEELAWILLNFNQKRGYYQLRGEDDDESMKTAKTRQYFDKQIIKNIIDTNQTYKGQRILIVELQNGDKGKIFKKEIPDWIGQEKNIIVTVDIDKDGNDKYEESGSLSCRFKIPTDAEWESEWKLIKMKTQKDLDESNKTVGTYIYDSILQNPTQKVRGKLVRTIERKYYKAELKQILEKQTEFHSELQDKDLYIECLNELYSNNDTHRNAITDRDFVYLFMNDILFYQRPLKSKKSLIDNCPYERNIYIDKETGEIKYSPIKCIAKSHPLFQEFRLWKFISSIRIYQRESVVEVVDKQLDLFSSQSTSVQKLVTDVDVTDKFLTCENDYVALFEWLNKKKIIDQKEFLKYRPFGLKGDIDNYRWNYVEDKSYPCNETHAMILTYFAKAGISEDILTKEMEEALWHILYSVEDRQEITKALRTFASKYHLSDSFVKVFSNIPPFKKEYGSYSAKAIKKLLSLMRMGKYWSEDAIDVNTRERIDKIVTGEYDEKIRDRVREKTIRLNDIRHFRALPDWLACYVVYDRHSETREITEWKSPEEIDEYIRNFKQHSLRNPIVEQVITETLRTVRDIWKQVGCIDEIHVELGREMKNPADKRKRITSQIIENENANLRVKALLTEFVNSEFEIENVRPYSLSQQDILRIYEDGVLNSVAEVPGDIAGILKKFNENDAKKRPTTSEILRYKLWLEQKYRSPYTGEMIPLSKLFTSAYEIEHVIPQSRYFDDSFSNKVICEAEVNKLKDNALGYEFIKKHHGEKVELGFGKIVEIFSVSVYEQFVKDNYSRNRGKMKKLLMDEIPEQFIERQLNDSRYISKVVKTLLSNVVREKAEQEAVSKNVIVCTGGVTDRLKKDWGINDVWNKIVLPRFLRLNELTNSTNFTAKNAAGNEIPAMPLELQKGFNKKRIDHRHHAMDAIVIACANRNIVNYLNNESASRKAKISRHDLQAILCDKVRTDDKGNYQWRVKKPWDTFTQDVYVALENIIVSFKQNLRVINKTSNYYWHYENGKKVLVKQVKGDSWAIRKPMHKDTVFGEVNLRKVKSVSLNEALKNPQFIVEKDLKRQLLSLLQQNFDIKKIKKYFEEHKDIWSDISLSKMNIYYFTKETKDRYFATRKPLDASFDKKKIESCITDTGIQQILLRHLELKENDPERAFSPDGIDEMNRNIIQLNKGKGHHPIAKVRVYEKADKFEVGQRGNKSSKFVEAAKGTNLFFAVYETEYPDEKTNSIVRKRNYATIPLNIAIERQKRGLSTAPEDEKGNVPSFVLSPNDLVYLPTSEDIVNGHITQPIDKSRIYKMVSSSGSQCFFIKHNIANIIVDKYEFSPLNKMERAISNEMIKEICIPVKVDRLGNIVKLGKSE

SEQ ID NO: 78 - protein, 1509 aa, Bacteroides fluxus
  Bacteroides fluxus YIT 12057
MKTILGLDLGTNSVGWAVINSVIKEQAERIWIEMAGSRIIPMDAAVLGDFDKGNSISQTSERTRLRGVRRLRERQLLRRERLHKVLNILGFLPNHYLEYIDFEKHPGKFLSDAEPKLPWVKDEQGKYTFLFQAAFDEMLADFAIHQPSLVSGDKKIPYDWTIYYLRKKALTEMISKEELAWILLNFNQKRGYYQLRGEEEEDNAGKSVEFYALKVLTVEATDEKKGRDVWYNVHLENGWIYRRSSSVPLDWEGQIKEFIVTTDLNPDSTPKLDKYGEVKRSFRAPKEDDWMLIKKRTEADIANTHKTVGAYIYDTLLQKPQQKIIGKLVKTVERKLYRDELSLILQKQCAFHAELQDRTLYARCVEALYPNNEVQRRNIANRDFVYLLMDDVLFYQRPLKTKKSLIANCPYEENEYVDRETGEIKKAPLKCIAKSHPLFQEFRLWNFLSNIRIYQKEKEINGTLHLDVDVTAEFLKTEDDYVALFDWLNSRKEIEQKTFLKYPKFGLKKEISNYRWNYVEDKQYPCNETRHAILSRLEKANVCIDFLSNEKEVALWHILYSVSDKQEIEKALRTFAAKNGLDESFVEAFKKFPPFKSEYGAYSAKAIKKLLPLMRCGKYWDVSSIDDTTKERIKKIVAGEYDERIAVKVRDKVMNLSDISCFKRLPLWLACYIVYNRHSEDKEAVKWESPADIDAYLASFKQHSLRNPIVEQVITETLRVVRDIWKQVGRIDEIHIELGREMKNPADKRKRMTAQILENENANLRIKALLAEFMNPEYEIENVRPYSPSQQEILRIYEDMVLHAEDQLPEEIDAILKKFNSSKVPTKSEFLRYKLWLEQKYRSPYTGELIPLGKLFTAAYEIEHVIPQSRYFDDSFSNKVICESAVNKLKDNQLGYEFIKNHHGQKVEVGFGKSVEIFSVDSYERFVKEQYAKSAVKMKKMLMDDIPEQFIERQLNDSRYISKVIKGLLSNIVREKNDSGEYEPEAVSKNIVVCTGSVTDRLKRDWGMNDVWNSIVYPRFERLNSLTDTQSFGHWENKSGKKVFQTELPLEYQKGFSKKRIDHRHHAMDAIVIACATRNHVNYLSNESASRNAKISRYDLQRLLCDKSRTDDNGNYKWVIKKPWDTFTQDAREVLSKIVVSLKQNLRIINKTTNVYRHLDATGNRVYEKQKTGDSWAIRKPMHKDTVFGAVNLRKVKVVRLSVALDAPTMIVDKRVKNKVFELLSYKYDKKRIEKYFKENAVLWKELDLARVAVYYFTEATTEPLVAVRKPLDSTFNEKKIKESVTDTGIQKILLNHLCTKEGKPDLAFSAEGIEEMNRNLLQLNNGKRHQPIYKVRVYEPRGNKFSVGVLGNKGTKWVEAAKGTNLFFAIYITEDGKRTYETIPLNMVIEREKQGLAPVPDKNEKGDKLLFWLSPNDLVYLPTEEELEFGRINEPIDRGRIYKMVSSSGNQCFFIPQSISNAIIPTKELGANNKAERSWDGAMIKNICIPVKVDRLGRIIEVKYRINE

SEQ ID NO: 79 - protein, 1436 aa, Bacteroides fragilis
MKRILGLDLGTNSIGWALVNEAENKDERSSIVKLGVRVNPLTVDELTNFEKGKSITTNADRTLKRGMRRNLQRYKLRRETLTEVLKEHKLITEDTILSENGNRTTFETYRLRAKAVTEEISLEEFARVLLMINKKRGYKSSRKAKGVEEGTLIDGMDIARELYNNNLTPGELCLQLLDAGKKFLPDFYRSDLQNELDRIWEKQKEYYPEILTDVLKEELRGKKRDAVWAICAKYFVWKENYTEWNKEKGKTEQQEREHKLEGIYSKRKRDEAKRENLQWRVNGLKEKLSLEQLVIVFQEMNTQINNSSGYLGAISDRSKELYFNKQTVGQYQMEMLDKNPNASLRNMVFYRQDYLDEFNMLWEKQAVYHKELTEELKKEIRDIIIFYQRRLKSQKGLIGFCEFESRQIEVDIDGKKKIKTVGNRVISRSSPLFQEFKIWQILNNIEVTVVGKKRKRRKLKENYSALFEELNDAEQLELNGSRRLCQEEKELLAQELFIRDKMTKSEVLKLLFDNPQELDLNFKTIDGNKTGYALFQAYSKMIEMSGHEPVDFKKPVEKVVEYIKAVFDLLNWNTDILGFNSNEELDNQSYYKLWHLLYSFEGDNTPTGNGRLIQKMTELYGFEKEYATILANVSFQDDYGSLSAKAIHKILPHLKEGNRYDVACVYAGYRHSESSLTREEIANKVLKDRLMLLPKNSLHNPVVEKILNQMVNVINVIIDIYGKPDEIRVELARELKKNAKEREELTKSIAQTTKAHEEYKTLLQTEFGLTNVSRTDILRYKLYKELESCGYKTLYSNTYISREKLFSKEFDIEHIIPQARLFDDSFSNKTLEARSVNIEKGNKTAYDFVKEKFGESGADNSLEHYLNNIEDLFKSGKISKTKYNKLKMAEQDIPDGFIERDLRNTQYIAKKALSMLNEISHRVVATSGSVTDKLREDWQLIDVMKELNWEKYKALGLVEYFEDRDGRQIGRIKDWTKRNDHRHHAMDALTVAFTKDVFIQYFNNKNASLDPNANEHAIKNKYFQNGRAIAPMPLREFRAEAKKHLENTLISIKAKNKVITGNINKTRKKGGVNKNMQQTPRGQLHLETIYGSGKQYLTKEEKVNASFDMRKIGTVSKLAYRDALLKRLYENDNDPKKAFAGKNSLDKQPIWLDKEQMRKVPEKVKIVTLEAIYTIRKEISPDLKVDKVIDVGVRKILIDRLNEYGNDAKKAFSNLDENPIWLNKEKGISIKRVTISGISNAQSLHVKKDKDGKPILDENGRNIPVDFVNTGNNHHVAVYYRPVIDKRGQLVVDEAGNPKYELEEVVVSFFEAVTRANLGQPIIDKDYKTTEGWQFLFSMKQNEYFVFPNEKTGFNPKEIDLLDVENYGLISPNLFRVQKFSLKNYVFRHHLETTIKDTSSILRGITWIDFRSSKGLDTIVKVRVNHIGQIVSVGEY

SEQ ID NO: 80 - protein, 1436 aa, Bacteroides sp.
MKRILGLDLGTNSIGWALVNEAENKDERSSIVKLGVRVNPLTVDELTNFEKGKSITTNADRTLKRGMRRNLQRYKLRRETLTEVLKEHKLITEDTILSENGNRTTFETYRLRAKAVTEEISLEEFARVLLMINKKRGYKSSRKAKGVEEGTLIDGMDIARELYNNNLTPGELCLQLLDAGKKFLPDFYRSDLQNELDRIWEKQKEYYPEILTDVLKEELRGKKRDAVWAICAKYFVWKENYTEWNKEKGKTEQQEREHKLEGIYSKRKRDEAKRENLQWRVNGLKEKLSLEQLVIVFQEMNTQINNSSGYLGAISDRSKELYFNKQTVGQYQMEMLDKNPNASLRNMVFYRQDYLDEFNMLWEKQAVYHKELTEELKKEIRDIIIFYQRRLKSQKGLIGFCEFESRQIEVDIDGKKKIKTVGNRVISRSSPLFQEFKIWQILNNIEVTVVGKKRKRRKLKENYSALFEELNDAEQLELNGSRRLCQEEKELLAQELFIRDKMTKSEVLKLLFDNPQELDLNFKTIDGNKTGYALFQAYSKMIEMSGHEPVDFKKPVEKVVEYIKAVFDLLNWNTDILGFNSNEELDNQPYYKLWHLLYSFEGDNTPTGNGRLIQKMTELYGFEKEYATILANVSFQDDYGSLSAKAIHKILPHLKEGNRYDVACVYAGYRHSESSLTREEIANKVLKDRLMLLPKNSLHNPVVEKILNQMVNVINVIIDIYGKPDEIRVELARELKKNAKEREELTKSIAQTTKAHEEYKTLLQTEFGLTNVSRTDILRYKLYKELESCGYKTLYSNTYISREKLFSKEFDIEHIIPQARLFDDSFSNKTLEARSVNIEKGNKTAYDFVKEKFGESGADNSLEHYLNNIEDLFKSGKISKTKYNKLKMAEQDIPDGFIERDLRNTQYIAKKALSMLNEISHRVVATSGSVTDKLREDWQLIDVMKELNWEKYKALGLVEYFEDRDGRQIGRIKDWTKRNDHRHHAMDALTVAFTKDVFIQYFNNKNASLDPNANEHAIKNKYFQNGRAIAPMPLREFRAEAKKHLENTLISIKAKNKVITGNINKTRKKGGVNKNMQQTPRGQLHLETIYGSGKQYLTKEEKVNASFDMRKIGTVSKSAYRDALLKRLYENDNDPKKAFAGKNSLDKQPIWLDKEQMRKVPEKVKIVTLEAIYTIRKEISPDLKVDKVIDVGVRKILIDRLNEYGNDAKKAFSNLDKNPIWLNKEKGISIKRVTISGISNAQSLHVKKDKDGKPILDENGRNIPVDFVNTGNNHHVAVYYRPVIDKRGQLVVDEAGNPKYELEEVVVSFFEAVTRANLGLPIIDKDYKTTEGWQFLFSMKQNEYFVFPNEKTGFNPKEIDLLDVENYGLISPNLFRVQKFSLKNYVFRHHLETTIKDTSSILRGITWIDFRSSKGLDTIVKVRVNHIGQIVSVGEY

SEQ ID NO: 81 - protein, 1512 aa, Bacteroides nordii
  Bacteroides nordii CL02T12C05
MKNILGLDLGTNSIGWAVINSEEDGPIVKKRIELAGSRIIPMDAAVLGNFDSGVTKSQTAERTSFRSIRRLRERQLLRRERLHKVLQILGFLPEHYVNDIDFENHPGKIKRNTEPKLPWRKNSMGQFEFIFQDSFEAMLTDFATHQPVFVSEGKKVPYDWTLYYLRKKALTEGISKEELAWLILNFNQKRGYYQLRGEEEEEQSNKLVEFYALRVVKVEATDDKKGKDTWYNVHLENGWIYRRTSNIPLDWEGKVKEFIVTTDLNEDGTPKLDKYGEVKRSFRAPKEDDWTLIKKKTESDIANSHKTVGCYIYDALLQNPHQKIKGRLVRTVERKFYKEELRLILEKQLSFHPELQDRDLYRACIDALYVSNEAHKNNISGRDFVYLFIDDIIFYQRPLKTKKSLIDNCPYEENQYMDRETGEVKQAPIKCIAKSHPLFQEFRLWQFISNIRIYQRERVLDDGKLETDVDVTPDFLKTEDDYTTLFEWFNDRKEVDQKAFLKNPQFGLKKTFTEYRWNYVEDKSYPCNETRNAILNGLQKAGVSADFLSREVEEALWHILYSVEDKIEIESALRKFASKHDLDDRFADVFKKLPPFKKEYGAYSAKAIKKLLPLMRIGKYWELSNIDDKTKERIDKIITGEWDENIHDRVREKAIKLSDITDFKGLPLWLSCYVVYNRHSEARAIAKWESPEDIDSYLRLFRQHSLRNPIVEQVITETLRTVRDIWKRVGQIDEIHVELGREIKNPADKRAKMTAQIVENENTNLRIKALLAEFINSEYEIENVRPYSSNQQEKLKIYEDTVLNGVKEIPEDINTILKKFRESDLKKRPTKSDFLHYKLWLEQKYCSPYTGRIIPLGKLFTSAYEIEHIIPQAHYFDDSFSNKVICEAEVNGLKDKKLGYEFIKHNPGKMVEIGFGKPPVRIFSVEEYERFVKENYSGIKNKMNKLLMDDIPETFIERQLNDSRYISKVVKSLLSNIVREKDSNGEYEPEAISKNVIVCTGSVTDRLKRDWGVNDVWNSIIYPRFERLNELTGSQQFGCWENKEGKRVFQTAVPLEMQKGFSKKRIDHRHHAMDAIVIACATRNHINYLSNESASKKAKISRTDLQRLLCTKCRTDDNGNYKWIVKKPWPAFTQDIRKALENITVSFKQNLRVINKTTNYYVHFDESGKKVLEKQINGDSWAIRKPMHKDTVFGKVNLQKVKEVRLSLALDTPKMIVDKKLKEKVLQLYSYKYDKKRIDKYFKENASLWKDLNLSKVAVYYFTNDSTEPLVAVRKPLDTSFNAKKIKESVTDTGIQKILLNHLSNNQDDPNLAFSPDGIDKMNKNLTALNDGKYHQPIYKVRVCEPQGNKFSVGTSGNKTSKYVEAAKGTNLFFAVYQTEDGKRSYETIPLNVVIEREKLGWTPVPENNNNGDKLLFWLSPNDLVYVPTADELNNGMRLDNMDKGRIYKMISCSGPQCFFIPQNVSNAIIPVIELGANNKAEKSWNNEMIKVVCVPIRVDRLGCITQINNQK

SEQ ID NO: 82 - protein, 1436 aa, Bacteroides sp.
  Bacteroides sp. 2_1_16
MKRILGLDLGTNSIGWALVNEAENKDERSSIVKLGVRVNPLTVDELTNFEKGKSITTNADRTLKRGMRRNLQRYKLRRETLTEVLKEHKLITEDTILSENGNRTTFETYRLRAKAVTEEISLEEFARVLLMINKKRGYKSSRKAKGVEEGTLIDGMDIARELYNNNLTPGELCLQLLDAGKKFLPDFYRSDLQNELDRIWEKQKEYYPEILTDVLKEELRGKKRDAVWAICAKYFVWKETYTEWNKEKGKTEQQEREHKLEGIYSKRKRDEAKRENLQWRVNGLKEKLSLEQLVIVFQEMNTQINNSSGYLGAISDRSKELYFNKQTVGQYQMEMLDKNPNASLRNMVFYRQDYLDEFNMLWEKQAVYHKELTEELKKEIRDIIIFYQRRLKSQKGLIGFCEFESRQIEVDIDGKKKIKTVGNRVISRSSPLFQEFKIWQILNNIEVTVVGKKRKRRKLKENYSAIFEELNDAEQLELNGSRRLCQEEKELLAQELFVRDKMTKSEVLKLLFDNPQELDLNFKTIDGNKTGYALFQAYSKMIEMSGHEPVDFKKPVEKVVEYIKAVFDLLNWNTDILGFNSNEELDNQSYYKLWHLLYSFEGDNTPTGNGRLIQKMTELYGFEKEYATILANVSFQDDYGSLSAKAIHKILPHLKEGNRYDVACVYAGYRHSESSLTREEIANKVLKDRLMLLPKNSLHNPVVEKILNQMVNVINVIIDIYGKPDEIRVELARELKKNAKEREELTKSIAQTTKANEEYKTLLQTEFGLTNVSRTDILRYKLYKELESCGYKTLYSNTYISREKLFSKEFDIEHIIPQARLFDDSFSNKTLEARSVNIEKGNKTAYDFVKEKFGESGADNSLEHYLNNIEDLFKSGKISKTKYNKLKMAEQDIPDGFIERDLRNTQYIAKKALSMLNEISHRVVATSGSVTDKLREDWQLIDVMKELNWEKYKALGLVEYFEDRDGRQIGRIKDWTKRNDHRHHAMDALTVAFTKDVFIQYFNNKNASLDPNANEHAIKNKYFQNGRAIAPMPLREFRAEAKKHLENTLISIKAKNKVITGNINKTRKKGGVNKNMQQTPRGQLHLETIYGSGKQYLTKEEKVNASFDMRKIETVSKSAYRDALLKRLYENDNDPKKAFAGKNSLDKQPIWLDKEQMRKVPEKVKIVTLEAIYTIRKEISPDLKVDKVIDVGVRKILIDRLNEYGNDAKKAFSNLDKNPIWLNKEKGISIKRVTISGISNAQSLHVKKDKDGKPILDENGRNIPVDFVNTGNNHHVAVYYRPVIDKRGQLVVDEAGNPKYELEEVVVSFFEAVTRANLGLPIIDKDYKTTEGWQFLFSMKQNEYFVFPNEKIGFNPKEIDLLDVENYGLISPNLFRVQKFSLKNYVFRHHLETTIKDTSSILRGITWIDFRSSKGLDTIVKVRVNHIGQIVSVGEY

SEQ ID NO: 83 - protein, 1517 aa, Bacteroides sp.
  Bacteroides sp. 20_3
MKKIVGLDLGTNSIGWALINAYINKEHLYGIEACGSRIIPMDAAILGNFDKGNSISQTADRTSYRGIRRLRERHLLRRERLHRILDLLGFLPKHYSDSLNRYGKFLNDIECKLPWVKDETGSYKFIFQESFKEMLANFTEHHPILIANNKKVPYDWTIYYLRKKALTQKISKEELAWILLNFNQKRGYYQLRGEEEETPNKLVEYYSLKVEKVEDSGERKGKDTWYNVHLENGMIYRRTSNIPLDWEGKTKEFIVTTDLEADGSPKKDKEGNIKRSFRAPKDDDWTLIKKKTEADIDKIKMTVGAYIYDTLLQKPDQKIRGKLVRTIERKYYKNELYQILKTQSEFHEELRDKQLYIACLNELYPNNEPRRNSISTRDFCHLFIEDIIFYQRPLKSKKSLIDNCPYEENRYIDKESGEIKHASIKCIAKSHPLYQEFRLWQFIVNLRIYRKETDVDVTQELLPTEADYVTLFEWLNEKKEIDQKAFFKYPPFGFKKTTSNYRWNYVEDKPYPCNETHAQIIARLGKAHIPKAFLSKEKEETLWHILYSIEDKQEIEKALHSFANKNNLSEEFIEQFKNFPPFKKEYGSYSAKAIKKLLPLMRMGKYWSIENIDNGTRIRINKIIDGEYDENIRERVRQKAINLTDITHFRALPLWLACYLVYDRHSEVKDIVKWKTPKDIDLYLKSFKQHSLRNPIVEQVITETLRTVRDIWQQVGHIDEIHIELGREMKNPADKRARMSQQMIKNENTNLRIKALLTEFLNPEFGIENVRPYSPSQQDLLRIYEEGVLNSILELPEDIGIILGKFNQTDTLKRPTRSEILRYKLWLEQKYRSPYTGEMIPLSKLFTPAYEIEHIIPQSRYFDDSLSNKVICESEINKLKDRSLGYEFIKNHHGEKVELAFDKPVEVLSVEAYEKLVHESYSHNRSKMKKLLMEDIPDQFIERQLNDSRYISKVVKSLLSNIVREENEQEAISKNVIPCTGGITDRLKKDWGINDVWNKIVLPRFIRLNELTESTRFTSINTNNTMIPSMPLELQKGFNKKRIDHRHHAMDAIIIACANRNIVNYLNNVSASKNTKITRRDLQTLLCHKDKTDNNGNYKWVIDKPWETFTQDTLTALQKITVSFKQNLRVINKTTNHYQHYENGKKIVSNQSKGDSWAIRKSMHKETVHGEVNLRMIKTVSFNEALKKPQAIVEMDLKKKILAMLELGYDTKRIKNYFEENKDTWQDINPSKIKVYYFTKETKDRYFAVRKPIDTSFDKKKIKESITDTGIQQIMLRHLETKDNDPTLAFSPDGIDEMNRNILILNKGKKHQPIYKVRVYEKAEKFTVGQKGNKRTKFVEAAKGTNLFFAIYETEEIDKDTKKVIRKRSYSTIPLNVVIERQKQGLSSAPEDENGNLPKYILSPNDLVYVPTQEEINKGEVVMPIDRDRIYKMVDSSGITANFIPASTANLIFALPKATAEIYCNGENCIQNEYGIGSPQSKNQKAITGEMVKEICFPIKVDRLGNIIQVGSCILTN

SEQ ID NO: 84 - protein, 1424 aa, Bacteroides sp.
  Bacteroides sp. 3_1_19
MKRILGLDLGTNSIGWALVNEAETDEEVSSIIRLGVRVNPLTVDETQNFEKGKSITTNAERTLKRSMRRNLQRYKLRRDALVEFLKELGFITDETILSEQGNRTTFETCRLRAKAAEEEISLEELSRVLLMINKKRGYKSSRKVKKEEDGVLIDGMEIAKKLYEEDLTPGQLCSQLLESGKKVLPDFYHSDLQEELDRIWSVQKQFHPDVFCDAAKEEIKGKNRSQTWAILANYFVWKEEVVGWNDREAKNETIEKECKLVGLKRTTKGYELKKENYRWRAQALTEQLGLEEIAVVLQEINGQINASSGYLGAISDRSKVLYFNHQTVGQYQMAELDKNPHASLRNMVFYRQDYLDEFDRIWEKQAEFHKELTAELKKEIRDMIIFYQRRLKSQKGLISFCEFERLEIVVEKDGKKQTKVIGCKVIPRSHPLFQEFKVWQTLNDIKVLGREKKRNALSASESRALYPEEKEILARELAIKENMKKADVLKLLFENPQELDLNFKQIDGNRTGFSLFSAYSKMIEKYGYEPLDFKKPADEIIGQLRTIFTDLGWNTNLFTIDLTKEGKELEMQPYFRLWHLLYSFEGDNTSTGNGKLIEKIMQLCGVEKEYAVELASLSFQDDYGSLSAKAIKRILPYLKEGNLYDVACEYAGYRHSKSSLTKEEIENKVLKGKLEVLPKNSLRNPVVEKILSQMVNVINTIIDTYGKPDEIRVELARELKKSAKEREELTKAIAKSTREHEEIRKLLQDEFGMMNVSRNDIIRYKLYEELKDNGYKTLYSNQYIPKEKIFSKEIDIEHIIPQSRLFDDSLSNKTLEYKAINIEKGNKTAYDFVKEKYGEEGLQQYINRCESLFNDKKAKLRKLKMEQKDIPDGFIDRDLRNTQYIAKKALAMLNEICRRVVATTGSITDQLREDWQLVDVMKELNLPKYEALGFVETYEDKDGRKIKRIKDWTKRNDHRHHAMDALTVAFTKDAFIQYFNNKNAAQDSGNRNHTNIIGIKTRYFDKGRALPPIPLEQFRIEAKQHLEKLLVSIKAKNKVVTVNVNRTKKRKGENTKIQQTPRGQLHLETVYGSHKQYVTKIEKVNASFDAAKIATVSKRAYRNALLKRLETFGNDPKKAFTGKNALEKNPLYADKYQTIRVPEKVQTVEFETIYTIRKPVDPALNVDKVVDVKVRAILERRLKEYGGDPKKAFVNFWENPIWLNKEKGISIKRVSIRGINNAQSIHVKKDKNGNPIWDENGKQIPVDFVNTGNNHHVAIYRKPVLDKKGQVTFDEDGNLMYELDEVVVPFFEAVTRANLGLPIIDKDYRKSEGWQFLFSMKQNEYFVFPNEKTGFNPKEVDLLNPDNYAMISPNLFRVQTMSKVMYGNNVVRDYKFRHHLETTVKDMKELKDIAYKQYKTLSFGNSVVKIRINHIGQIVSVGEY

SEQ ID NO: 85 - protein, 1510 aa, Bacteroides sp.
  Bacteroides sp. D2
MKRILGLDLGTNSIGWALVDSEEQRILGMGSRIIPMDQGVLDTFSGGNPVETQTAARTAYRGTRRLRERALLRRERLIRVLNMMKFLPEHYASQIDFEKRLGQFFDEKEPKLAWKQNDEGRFEFIFQQSFNEMIEEFKNKGVVREDKKIPYDWTIYYLRKKALSQEIEKEELAWILLNFNQKRGYYQLRGEEEEENPNKLVEYYSLKIVDVIADEKPNSKGDIWYSLHLENGWIYRRSSKIPLFGWKDKTRDFIVTTDLNDDGTVKKDKEGIEKRSFRAPSENDWVLLKKKTESDIEKSHKTVGAYVYETLLQNPMQKVRGKLVRTIERKFYKDELKQILEKQREFHPELRDEDLYNDCVRELYRSNETYQFILSKRDFVHLFLDDILFYQRPLRSQKSAIGDCILEFKTYKDKDGNNIKEYLKVISKSNPLYQEFRIWQWLYNLKIYRKEDDEDVTLQFIANIEDKEQLFDFLSNRKSIEQKPLLEYLIKAKGLKKQVKTEAYRWNYVEDKIYPCSETKTMISTRLAKVENIPDNFFTKEIEQKLWHIIYSVTDKNEFEKALRTFAKKYDLDIASFVDNFKKIPPFKNEYGSFSEKAIKKLLPLMRLGKYWKWNDIDNNTQNRISKIITGEYDEEIKDIVREKSIALTNENDFQGLQLWLAQYLVYGRHSEADIAGKWHSVADLEKYLNEFKQHSLRNPIVEQIITETLRVVRDIWRKYGQGAENFFSEIHVELGRDMKNTADERKKIVNVVTENENTNLRIKALLMELKNNSDGKLEVENVRPYSPTQQDILKIYEEYAISTGLDNEKDEKVKEDIKKISRVAQPTTTELQRYKLWLEQKYCSPYTGKVIPLGKLFTEEYQIEHIIPKSRYYDDSFSNKVICEAAVNKLKDKCLGLEFIKNYHGQIVETGFGQKVTIFDEEAYQNFVKQHYAYNRSKRTKLLLEEIPEKMIERQMNDTRYISKFVLPLLSNLVRAEENDNGVNSKNVLPVNGKITTMLKQDWGLNDVWNDLILPRFVRMNELAKTIAFTSWNEQHQKYLPTVPLELSKGFQKKRIDHRHHAMDALVIACATRDHVNLLNNKHANTDTIRYDLQRKLRLFERVTYIDPQTKNNVTKDIPKEFKKPWDNFTVDARNELEKIIVSFKQNLRIINKATNIYTKYENGKKIKVGQKGLNWAIRKPLHKETVFAKVSLRKRKTVRLSEALKDWKKIVDKKLKQEIKRLTCQYGKFDVDTILRYFKDRKYQFGEVDVSKVKMYYFDEENAAVRKNVDTSFTEKFIQGSVTDTGIQKILLNHLEAKGNKVEIAFSPEGIEEMNKNIIQLNEGKLHLPIFKVRVYETIGNKFSVGVKGNKKDKYVEAAKGTNLFFAIYVDENGIRSYETIPLNIVIERLKQGLSVVPEKNRKEHSLLFYLSPNDLVYVPIEDERENIHAVNLDQLNNEQRKRIYKMVSCTGSECHFVPYYVASPIVNKVEYSSLNKIGRSLTGEMIKDVCIKLKVDRLGNVKGISGL

SEQ ID NO: 86 - protein, 1436 aa, Bacteroides sp.
  Bacteroides sp. D2
MKRILGLDLGTNSIGWALVDEAENKDERSSIVKLGVRVNPLTVDELTNFEKGKSITTNADRTLKRGMRRNLQRYKLRRETLMEVLKEHKLITEDTILSENGNRTTFETYRLRAKAATEKISLEEFARVLLMINKKRGYKSCRKAKGAEEGTLIDGMDIARELYNNNLTPGELCLQLLDAGKKYLPDFYRSDLQNELDRIWEKQKEYYPEILTEVLKEELRGKKRDAVWAICAKSFVWEEYYTEWNKEKGKTEQQEREHKLEGIYSKRKRDEAKRENLQWRVNGLKEKLSLEQLVIVLQEMNIQINNSSGYLGAISDRSKELYFNKQTVGQYQMEMLDKNPNASLRNMVFYRQDYLDEFNTLWEKQAEYHKELTGELKKEIRDIVIFYQRRLKSQKGLVGFCEFESRQIEVEIDGKKKIKTVGNRVIPRSSPLFQEFKIWQILNNIEVTVVGKKGKRRKQKDNSPTLFDGLDDTEQLELNGSRYLYQEEKELLAQELFVRDKMTKSDVLKLLFDNPQELDLNFKTIDGNKTGYTLFQAYSKMIEMSGHEPVDFKKTVEKVVEHVKAVFDLLNWNTDILGFNSNEELDNQSYYKLWHLLYSFEGDNTPTGNARLVQKITELYGFEKEYAIILANVTFQDDYGSLSAKAIHKILPHLKEGNRYDVACAYAGYKHSESSLTKEEIANKALKDRLTLLPKNNLRNPVVEKILNQMVNVINAIIDTYGKPDEIRVELARELKKNAKEREELTKFIAETTRKHEEFKILLQSEFGLTNVSRTDILRYKLYKELESCGYKTLYSNTYIPREKLFSKEFDIEHIIPQARLFDDSFSNKTLEARSINLEKGNKTAYDFVKEKFGESGADNSLDHYLNNIEDLFKSGKISKTKYNKLKMAEQDIPDGFINRDLRNTQYIAKKALSMLNEISRRVVATSGTITDKLRQDWQLVDVMKELNWEKYKALGLVEYFEDKDGRQIGRIKDWTKRNDHRHHAMDALTVAFTKDIFIQYFNNKNASLNSNTNEYAIKNKYFQNGRAIAPIPLREFRVEAKKHLENTLISIKAKNKVVTGNINKTKKRGGVNKYLQQTPRGQLHLETIYGSGKQYLTKEEKVNASFDMKKIATVSKSAYRDVLLKRLHENDNDPKKAFTGKNSLDKQPIWLDKEQTRKVPEKVKTVTLETIYTVRKEISPDLKVDKVIDAGVRKILTGRLNEYGNDAKKAFSNLDENPIWLNKEKGISIKRVTISGISNAQSLHVKKDKDGKPILDEDSRNIPVDFVNTGNNHHVAVYRRPVIDKRGQLVIDEAGNPKYELEEVVVSFFEAVTRANLGQPIIDKDYKTSEGWQFLFSMKQNEYFVFPNEKTGFNPKEIDLLDAENYGVISPNLFRVQKFAHKNYVFRHHLETTIKDTSSILKGITWIDFRSSKGLDAIVKVRVNHIGQIVSVGEY

SEQ ID NO: 87 - protein, 1508 aa, Bacteroides uniformis
  Bacteroides uniformis CL03T00C23
MRTILGLDLGTNSIGWAVINSVIKEQTERIWIEMAGSRIIPMDAAILGDFDKGNSISQTAERTRFRGVRRLRERQLLRRERLHKVLKILGFLPEHYLKGIDFEKHTGKFLSGSEPKLPWVKDRWGKYSFLFQTAFNEMLADFAKHQPSLVFDGKKIPYDWTVYYLRKKALTEMISKEELAWILLNFNQKRGYYQLRGEEEEDNAGKSVEFYALKVLSVEATDEKKGRDIWYNVHLENGWVYRRSSNVPLDWEGRVKEFIVTTDLNPDGTPKLDKYGEVKRSFRAPKEDDWMLIKKRTEADITGTHKTIGSYIYDALLQEPQQKIIGKLVKTVERKFYKEELNFILQKQCAFHAELQDRDLYMRCIEALYPGNEVQRRNIANRDFIYLLIDDVLFYQRPLKTKKSLIANCPYEENEYVNRKTGEIKTAPLKCIAKSHPLFQEFRLWYFLSNIRVYQKEREVNGTLHLDVDVTTEFLKTEDDYVALFDWLNSRKEIDQKAFLRYPAFGLKKEINNYRWNYVEDKFYPCNETRHAILSRLEKAGIGIDFLSDEKETALWHILYSVSDKQEIEKALATFAVKNGLNESFVEVFKKFPPFKSEYGAYSAKAIKKLLPLMRCGKYWDMSLIDGTTKERIERIIAGECDESIGAKVREKAMNLSDISCFKRLPLWLACYVVYNRHSEDKEITKWETPADIDAYLAAFKQHSLRNPIVEQVITETLRVVRDIWKQVGKIDEIRIELGREMKNPADKRKRMTTQILENENANLRIKALLAEFVNPEYGVENVRPYSPSQQEILRIYEDAVLKGEEQIPEDIDVILKKFNTSKLPTKSEFLRYKLWLEQKYRSPYTGELIPLAKLFTAAYEIEHVIPQSRYFDDSFSNKVICESAVNKLKDNQLGYEFIKNHHGQKVEVGFGKTVEIFSVDSYERFVKEQYAKSGIKMKKLLMDDIPEQFIERQLNDSRYISKVVKGLLSNIVREKNDSGEYEPEAVSKNILVCTGSVTDRLKKDWGMNDVWNSIVSPRFERLNALTETQCFGHWENKDGKKVFQTAVPLEYQKGFSKKRIDHRHHAMDAIVIACATRNHVNYLNNESASRNAKISRYDLQRLLCDKSRGDGNGNYRWIIKKPWTTFTQDAREALSGIIVSLKQNLRIINKTTNIYQHFDANGTRVYEKQKIGDSWAIRKPMHKDTVFGAVNLRKVKVVRLSVALDTPSMIVNKRVKNKVLELLSYKYDKKKIEKYFKENAFLWKELDIAKVAVYYFTENTTEPLVAVRKSLDSTFNEKKIASVTDTGIQKILLNHLKSKEGKAELAFSAEGIEEMNRNLLQLNDGKGHQPIYKVRVYEPRGNKFKVGVLGNKGAKWVEAAKGTNLFFAIYITEDGNRTYETIPLNWVIEREKQGLVPVPDRNEKGDKLLFWLSPNDLVYLPTEEERDFGRINEPIDRGRIYKMVSSSGNQCFFIPQSISNAIISTKELGSNNKAEKSWDGEMIKNICIPVKVDRLGRIIEVKYRVNE

SEQ ID NO: 88 - protein, 1504 aa, Bacteroides vulgatus
  Bacteroides vulgatus CL09T03C04
MKNIVGLDLGTNSIGWAVVNGSVNDDGSEQLVKIQASGSRIIPMDAAMIGDFNKGNSISQTAERTRLRGVRRLSERYLLRRERLHRILDILGFLPFHFAQDLDRHGKIVKGKEPKLAWRKNEAGQFEFIFQDSFKEMLEDFKLNHPNLITDDKKVPYDWTIYYLRKKGLTSKISKEELAWILLNFNQKRGYYQLRGEEEEENKNKLVEFYALKVVAVEDSGEKKGKDIWYNVHLENGWVYRRTSNMPLDWVGKTKEFIVTTDLEKDGTPKKDKEGNVKRSFRAPKEDDWSLLKKKTEADIDQTHKTVGVYIYDTLLGNPSQKIRGRLVRTIERKYYKEELKQILEKQKEFHLELQDRALYAACIEELYPINEAHRNNVGNRDFTYLFLEDILFYQRPLKSKKSLIDNCPYEENQGLDKETGEIKSFPVKCIAKSHPLFQEFRLWQFIVNLRIYRKDLAQDVDVTNELLKTEEDYVALFDWLNGKKEIDQKAFLKYPVFGLKKEIENYRWNYVQDKPYPCNETRSLMLARLEKCDISIEFLTKENEEALWHILYSVEDKNEIVKALQKFADKHDLNASFVDVFQKFPPFKKEYGSYSAKAIKKLLPLMRMGKYWSENSIDKGTRERIDKIITGEYDEKIENRVREKAIHLADVSDFKGLPLWLVCYIVYGRHSEAKEITQWKSPADIDSYLRSFKQHSLRNPIVEQIIIETLRVVRDIWKQVGNIDEIHVELGREMKNPADKRKKMTQQMSENENTNLRIKYLLTEFLNPEYEVENVRPYSPSQQDILRIYEEGVLNSVSDLPEEISDILKKFTETDLKKRPSRSEILRYKLWLEQKYRSPYTGEVIPLGKLFTPAYEIEHVIPQSCYFDDSFSNKVICEAEVNKLKSNLLGHEFIVKHHGEIVELPFGKKVRIFTVDEYEQFVKDNYSRTRSKMKKLLMDDIPEEFVTRQLNDSRYISKVVKSLLSNIVREKGEEEAISKNVIPCTGGVTDRLKKDWGINEVWNKIILPRFQRLNELTGTNKFTTKNVGIQEIPTMPLELQKGFNKKRIDHRHHAMDAIIIACANRNIINYLNNESATAKAELSRYDLQKMLCDKAKTDNNGNYKWVIRKPWASFTQDTYLALENIIVSFKQNLRVINKATNRFLHYNEEGKKIFVKQGKGDNWAIRKSMHKDTVFGEVNLRRIKTVALNEAMKNPQSIVVKDFKRKLLELWNLGFDAKRIKKYFEDNRETWSDINLSKIEVYYFSKDTKDRFFATRKPLDTSFDRKKIENNITDTGIQKILLRHLELKDNNPDIAFSPDGIDEMNRNIIQLNNGKYHQPIIKIRWYEQADKFAVGQTGNKFSKFVEAAKGTNLFFAVYESNILDKKTNTIIKKRNYATIPLNVAIERQKQGLPVAPEDENGNDPIFVLSPNDLVYLPTDDELANGIIAQPLDRGRIYKMVSCTGNEGHFIPARIANPILQTIELGSNNKAQKAWTDEMIKEICMPIKVDRLGNVLESSSSYKK

SEQ ID NO: 89 - protein, 1434 aa, Unknown
  Description of Unknown: Bacteroidetes oral taxon 274 str. F0058 polypeptide
MKNILGLDLGTNSIGWAYVKQAQNDSEKSEIAELGVRVNPLTVDEKTNFEKGKPISTNADRTLKRGARRNLQRYKLRRQELIELLKDYQVISDKTILAEDGKETTFETLRLRVKSAKEQVSLEELARILLMINKKRGYKSSRKAKNEDEGQLIDGMEIARRLYDENLTTGQLSLQLLKEGKKSLPDYYRSDLQHELDKVWNFQKQFHPDILTDEFYTSIQGKGQKATRESFSSKYGIDTAENKGSREEKKLQAYQWRADATHKELTKEELAFVITEINNNINNSSGYLGAISDRSKELIFANETVGEYLWKQIQNDPHTSLKNQVFYRQDYFDEFERIWETQSGFYPQILTESLKNELRDILIFYQRKLKSQKALVSICEFESKEIPLKDKQGNPISKNGIPVTKLVGPKVAPKSSPLFQEFKIWQNLNNVLVRPKGSRKRKVTTNQQSTLLEGQEPVFELNLEQKELLFEELNLKGNLKTDYCLELIGYSAKEWEMNYPTLEGNKTNKALYEAYLKIIDSEGYDAKKLLKVKTDKDDINLDDIKVSASEIKTMISDIFNELGINTKILDFDAELERKQFEAQASYRLWHLLYSYEGDDSKSGNELLYRLLEDKFGFKREHSKTLANVSLLSDYGNLSTKAIRTIYPYIKENKFSTACELAGYRHSKLSISKEENENRTLKDTLDVLKKNSLRQPVVEKILNQMINLINELIEKHSEKDEKGNIVKYFKFDEIHIELARELKKNAEERRELDSKVREGKDRNEKIITILKSEFGLPYPTKNDITRYRLYEELKDNGYKDLYTNTYIPREKLFSKEIDIEHIIPKSRLFNDSFSNKTICYRQDNLNKGERTAYDYIEGLGKTQLDEYLNRVENLYTNKFITKAKYRNLLKKESEIGDGFIERDLRETQYIAKKAKEMLLQITRHVVSTTGSITDRLRDDWELVNVMRELNLPKYKVLGLTEIQERKNGQTVEVITDWTKRNDHRHHAMDALTVAFTKHSHIQYLNFLNARKDEKHKEYSNIMGIQQLETEKTTDKDGKDRRVFKTPIPNFRQVAKEHLESILISHKTKNKVVTRATNKIAGSKKQQETLSPRGQLHKETVYGKYRRYVQKEEKIGSKFDLQTIERVANPLYKRLLTKRLEENGGDPKKAFTGKNALAKSPIYLDETQTQQLPEKVKLVWLETDFSIRKDITPDNFKDEKSIDKVLDEGIKRILKDRLKSFDGDAKRAFTDLEQNPIWLNKEKGIAIKRVTISGVSNAEPLHTKKDHLGNEIFDDTGKPIPVDYVSTGNNHHIAIYRDENGNLQEKAVSFFEAVTRANQGLPTVDKTYNQHLGWQFLFTMKQNEMFVFPNKETGFDPQEIDLLDPKNKKLISPNLFRVQKISTKNYFFRHHLETSVETHNALNGVTYKSQLGLNGITDIIKVRINHLGDIVHIGEY

SEQ ID NO: 90 - protein, 1153 aa, Barnesiella intestinihominis
  Barnesiella intestinihominis YIT 11860
MKNILGLDLGLSSIGWSVIRENSEEQELVAMGSRVVSLTAAELSSFTQGNGVSINSQRTQKRTQRKGYDRYQLRRTLLRNKLDTLGMLPDDSLSYLPKLQLWGLRAKAVTQRIELNELGRVLLHLNQKRGYKSIKSDFSGDKKITDYVKTVKTRYDELKEMRLTIGELFFRRLTENAFFRCKEQVYPRQAYVEEFDCIMNCQRKFYPDILTDETIRCIRDEIIYYQRPLKSCKYLVSRCEFEKRFYLNAAGKKTEAGPKVSPRTSPLFQVCRLWESINNIVVKDRRNEIVFISAEQRAALFDFLNTHEKLKGSDLLKLLGLSKTYGYRLGEQFKTGIQGNKTRVEIERALGNYPDKKRLLQFNLQEESSSMVNTETGEIIPMISLSFEQEPLYRLWHVLYSIDDREQLQSVLRQKFGIDDDEVLERLSAIDLVKAGFGNKSSKAIRRILPFLQLGMNYAEACEAAGYNHSNNYTKAENEARALLDRLPAIKKNELRQPVVEKILNQMVNVVNALMEKYGRFDEIRVELARELKQSKEERSNTYKSINKNQRENEQIAKRIVEYGVPTRSRIQKYKMWEESKHCCIYCGQPVDVGDFLRGFDVEVEHIIPKSLYFDDSFANKVCSCRSCNKEKNNRTAYDYMKSKGEKALSDYVERVNTMYTNNQISKTKWQNLLTPVDKISIDFIDRQLRESQYIARKAKEILTSICYNVTATSGSVTSFLRHVWGWDTVLHDLNFDRYKKVGLTEVIEVNHRGSVIRREQIKDWSKRFDHRHHAIDALTIACTKQAYIQRLNNLRAEEGPDFNKMSLERYIQSQPHFSVAQVREAVDRILVSFRAGKRAVTPGKRYIRKNRKRISVQSVLIPRGALSEESVYGVIHVWEKDEQGHVIQKQRAVMKYPITSINREMLDKEKVVDKRIHRILSGRLAQYNDNPKEAFAKPVYIDKECRIPIRTVRCFAKPAINTLVPLKKDDKGNPVAWVNPGNNHHVAIYRDEDGKYKERTVTFWEAVDRCRVGIPAIVTQPDTIWDNILQRNDISENVLESLPDVKWQFVLSLQQNEMFILGMNEEDYRYAMDQQDYALLNKYLYRVQKLSKSDYSFRYHTETSVEDKYDGKPNLKLSMQMGKLKRVSIKSLLGLNPHKVHISVLGEIKEIS

SEQ ID NO: 91 - protein, 1352 aa, Belliella baltica
MKKILGLDLGTTSIGWAFIKEPEKDVVGSEIVDMGVRIVPLSSDEENDFAKGNTISINADRTLKRGARRNLQRFKQRRNALLEIFKEKKLISTNFKYAEDGPSSTFSTLNLRAKAAKEKIELQDLVKVLLQINKKRGYKSSRKAKSEEDDGSAIDSMGIAKELYENDLTPGQWVYEALQKGRKNVPDFYRSDLQEEFKKIVNYQSEFFPDIFNASFVEDWMGKASTPTKQYFNKKGVQLAENKGKREERRLQEYKWRAEAVNFKIDLSEIALILSQINSQISNSSGYLGAISDRSKELYFKNLTVGQYLYQQIKKNPHTRLKGQVFYRQDYLDEFERIWSVQSSFYPQLNDALKREVRDITIFFQRRLKSQKHLISNCEFEDHHKVVPKSHPVFQEFRIWQNLNNLLLIKKDNLNEKFDLELESKIALANELAFKRELNVKDALKILGLKPNEWEFNFTKIEGNRTNQAFFDAFAKIIELEDGEPIDLGDLKADDILDQFSEAFLRIGIDTELLQVNSDIEGAEYEKQSYIQFWHLLYSSEDDQKLKLNLIRKFGFKPEHAKILASISLQDDHASLSSRAIKKILPHLQSGLIYDKACTYAGYNHSSSFTKDENEKRELRAELELLKKNSLRNPVVEKILNQMINVVNAILKDPELGRPDEIRVEMARELKANAEQRKNMTSNIASATRDHDKYREILKSEFGLKRVTKNDLLRYKLWLETDGISLYTGKPIEASKLFSKEYDIEHIIPKARLFDDSFSNKTICERQLNIDKANVTAFSFLQNKLSADEFEQYQSRVKSLYGKLSKAKIQKLLMANDKIPEDFIARQLQETRYISKKAKEILFEISRRVSVTTGTITDKLREDWGLVEIMKELNWEKYDKLGLTYTIEGKHGERLNKIKDWSKRNDHRHHAMDALTVALTKPAYIQYLNNLNAKGLNNKKGTEVFAIEQKYLKRENGKLCFIPPIENIRSEAKKHLSRILVSYKAKNKVVTINKNKTKSKAGLNEQIALTPRGQLHKETVYGKSFHYSTKFEKIGASFNVQKINTVAKKEEREALLKRLAENGNDPKKAFTGKNTLNKMPIYLDLGKNIKLSEKVKTVVLEQNYTIRKNIDPDLKVDKVIDVGIKRILESRLEEFGGNAKLAFSNLEENPIWLNKEKGISIKRVKISGVSNVESLHVKKDHFGEPILDQEGNEIPVDFVSTGNNHHVAIYEDENGNLQEEVVSFFEAVVRQNQGLPIIKKNHTLGWKFLFTLKQNEYFVFPSDDFVPADVDLMDEQNYHLISPNLFRVQKIARKNYVFNNHLETKAVDNDLLKSKKELSKITYHFYQTPEHLRGIIKIRINHLGKIIQIGEY

SEQ ID NO: 92 - protein, 1415 aa, Bergeyella zoohelcum
  Bergeyella zoohelcum ATCC 43767
MKHILGLDLGTNSIGWALIERNIEEKYGKIIGMGSRIVPMGAELSKFEQGQAQTKNADRRTNRGARRLNKRYKQRRNKLIYILQKLDMLPSQIKLKEDFSDPNKIDKITILPISKKQEQLTAFDLVSLRVKALTEKVGLEDLGKIIYKYNQLRGYAGGSLEPEKEDIFDEEQSKDKKNKSFIAFSKIVFLGEPQEEIFKNKKLNRRAIIVETEEGNFEGSTFLENIKVGDSLELLINISASKSGDTITIKLPNKTNWRKKMENIENQLKEKSKEMGREFYISEFLLELLKENRWAKIRNNTILRARYESEFEAIWNEQVKHYPFLENLDKKTLIEIVSFIFPGEKESQKKYRELGLEKGLKYIIKNQVVFYQRELKDQSHLISDCRYEPNEKAIAKSHPVFQEYKVWEQINKLIVNTKIEAGTNRKGEKKYKYIDRPIPTALKEWIFEELQNKKEITFSAIFKKLKAEFDLREGIDFLNGMSPKDKLKGNETKLQLQKSLGELWDVLGLDSINRQIELWNILYNEKGNEYDLTSDRTSKVLEFINKYGNNIVDDNAEETAIRISKIKFARAYSSLSLKAVERILPLVRAGKYFNNDFSQQLQSKILKLLNENVEDPFAKAAQTYLDNNQSVLSEGGVGNSIATILVYDKHTAKEYSHDELYKSYKEINLLKQGDLRNPLVEQIINEALVLIRDIWKNYGIKPNEIRVELARDLKNSAKERATIHKRNKDNQTINNKIKETLVKNKKELSLANIEKVKLWEAQRHLSPYTGQPIPLSDLFDKEKYDVDHIIPISRYFDDSFTNKVISEKSVNQEKANRTAMEYFEVGSLKYSIFTKEQFIAHVNEYFSGVKRKNLLATSIPEDPVQRQIKDTQYIAIRVKEELNKIVGNENVKTTTGSITDYLRNHWGLTDKFKLLLKERYEALLESEKFLEAEYDNYKKDFDSRKKEYEEKEVLFEEQELTREEFIKEYKENYIRYKKNKLIIKGWSKRIDHRHHAIDALIVACTEPAHIKRLNDLNKVLQDWLVEHKSEFMPNFEGSNSELLEEILSLPENERTEIFTQIEKFRAIEMPWKGFPEQVEQKLKEIIISHKPKDKLLLQYNKAGDRQIKLRGQLHEGTLYGISQGKEAYRIPLTKFGGSKFATEKNIQKIVSPFLSGFIANHLKEYNNKKEEAFSAEGIMDLNNKLAQYRNEKGELKPHTPISTVKIYYKDPSKNKKKKDEEDLSLQKLDREKAFNEKLYVKTGDNYLFAVLEGEIKTKKTSQIKRLYDIISFFDATNFLKEEFRNAPDKKTFDKDLLFRQYFEERNKAKLLFTLKQGDFVYLPNENEEVILDKESPLYNQYWGDLKERGKNIYVVQKFSKKQIYFIKHTIADIIKKDVEFGSQNCYETVEGRSIKENCFKLEIDRLGNIVKVIKR

SEQ ID NO: 93 - protein, 1430 aa, Bergeyella zoohelcum
  Bergeyella zoohelcum CCUG 30536
MKHILGLDLGTNSIGWAVVKEAQNDNEQSEIVDVGVRVNPLTTDEKTNFEKGKPISTNADRTLKRSARRNLQRYKLRRKELIELLKEHQLISTDTILTENGKGTTFQTLELRAKSAKEKISLEELARVFLTINKKRGYKSSRKAKNEDEGQLIDGMEIAKRLYEENLTTGQLSLQLLKEGKKSLPDYYRSDLQFELDKVWNFQKQFHSDILTDEFYAQLKGKGQRATSALFLAKYQIYTAENKGSREDKKLQAYQWRVDALSKELTREQLAFVITEINNNLNNSSGYLGAISDRSKELYFNNETVGEYLWKQIAANPHTSLKNQVFYRQDYLDEFEQIWKTQSAFYPEILTDELKKELRDVVIFYQRKLKSQKSLVSFCEFENKEIEIKKEDGTSTKKVIGLKVAPKSSPLFQEFKIWQNLNNVLIRKKGSKTKKVAKNQQAVLFEEEKTISELDLEAKQALFNELNLKGNLKADYCLEILGYSPKEWEMNYSVLEGNRTNKALYEAYLKITDLEGYDAKNHLKVKLNKDEVELDDLKVPASEIKDMVQAIFKEAGINTDILHFNAELDGKDFENQASYQLWHLLYSYEGDDSKSGNELLYKLLETKFGFKKEYAQILANVSLSDDYGSLSTKAMRKIHPYIKENKFSTACELAGYRHSKHSLTKEENDNRVLKDSLEVLKKNSLRQPVVEKILNQMINLVNALLKKYRTENPNFKFDEIRIELARELKKNAEERANMTANINKAKTEHEKIIKILKNEFGLPNPTRNDIIRYRLYEELKANGYKDLYTNIKIPQEKLFTKEIDIEHIIPKSRVFDDSFSNKTLSFRKTNLDKGERTAFDYMESKFGADKLEEYVARVEDLYKNNIISKAKYQKLLKKESEIGDGFVERDLRETQYIAKKAKEILLQITPNVLSTSGGITDRLREDWDLINVMKELNLPKYRALGLTQMEDRKYGQQVEVITDWTKRNDHRHHAMDALTVAFTKHNHIQYLNYLNARKNEKHKEHSNIMGIQQLETIKVTDKNGNEKRVFKAPMPNFRQVTKAFLENILISHKAKNKVVTKNKNKVAGSNKVQEVLTPRGQLHKETVYGKYQYYVQKEEKIGAKFDLETIKKVANPLYQSLLKKRLEENGGDPKKAFTGKNSLAKNPIYLDDTQTEQLPEKVKLVWLENSFSIRKDITPENFKDEKLIDKILDEGVKRILKERLQSFGNDAKKAFSDLDKNPIWLNKEKGITIKRVTISGVANAEPLHTKKDHLGKEILDKEGKPIPVDFISTGSNHHVAVYRDEKGNLQEKVVSVFEAVVRANQGLPIIDKTYNQHLGWEFLFTMKQNEMFVFPNESTGFNPNDIDLLDPKNKRIISPNLFRVQKFSKLQYGNSFVREFVFRHHLETTVEDRKELQGITYKQMKNSTFFNDIIKVRINHLGDIVSIGEY

SEQ ID NO: 94 - protein, 1420 aa, Bifidobacterium bifidum
MSRKNYVDDYAISLDIGNASVGWSAFTPNYRLVRAKGHELIGVRLFDPADTAESRRMARTTRRRYSRRRWRLRLLDALFDQALSEIDPSFLARRKYSWVHPDDENNADCWYGSVLFDSNEQDKRFYEKYPTIYHLRKALMEDDSQHDIREIYLAIHHMVKYRGNFLVEGTLESSNAFKEDELLKLLGRITRYEMSEGEQNSDIEQDDENKLVAPANGQLADALCATRGSRSMRVDNALEALSAVNDLSREQRAIVKAIFAGLEGNKLDLAKIFVSKEFSSENKKILGIYFNKSDYEEKCVQIVDSGLLDDEEREFLDRMQGQYNAIALKQLLGRSTSVSDSKCASYDAHRANWNLIKLQLRTKENEKDINENYGILVGWKIDSGQRKSVRGESAYENMRKKANVFFKKMIETSDLSETDKNRLIHDIEEDKLFPIQRDSDNGVIPHQLHQNELKQIIKKQGKYYPFLLDAFEKDGKQINKIEGLLTFRVPYFVGPLVVPEDLQKSDNSENHWMVRKKKGEITPWNFDEMVDKDASGRKFIERLVGTDSYLLGEPTLPKNSLLYQEYEVLNELNNVRLSVRTGNHWNDKRRMRLGREEKTLLCQRLFMKGQTVTKRTAENLLRKEYGRTYELSGLSDESKFTSSLSTYGKMCRIFGEKYVNEHRDLMEKIVELQTVFEDKETLLHQLRQLEGISEADCALLVNTHYTGWGRLSRKLLTTKAGECKISDDFAPRKHSIIEIMRAEDRNLMEIITDKQLGFSDWIEQENLGAENGSSLMEVVDDLRVSPKVKRGIIQSIRLIDDISKAVGKRPSRIFLELADDIQPSGRTISRKSRLQDLYRNANLGKEFKGIADELNACSDKDLQDDRLFLYYTQLGKDMYTGEELDLDRLSSAYDIDHIIPQAVTQNDSIDNRVLVARAENARKTDSFTYMPQIADRMRNFWQILLDNGLISRVKFERLTRQNEFSEREKERFVQRSLVETRQIMKNVATLMRQRYGNSAAVIGLNAELTKEMHRYLGFSHKNRDINDYHHAQDALCVGIAGQFAANRGFFADGEVSDGAQNSYNQYLRDYLRGYREKLSAEDRKQGRAFGFIVGSMRSQDEQKRVNPRTGEVVWSEEDKDYLRKVMNYRKMLVTQKVGDDFGALYDETRYAATDPKGIKGIPFDGAKQDTSLYGGFSSAKPAYAVLIESKGKTRLVNVTMQEYSLLGDRPSDDELRKVLAKKKSEYAKANILLRHVPKMQLIRYGGGLMVIKSAGELNNAQQLWLPYEEYCYFDDLSQGKGSLEKDDLKKLLDSILGSVQCLYPWHRFTEEELADLHVAFDKLPEDEKKNVITGIVSALHADAKTANLSIVGMTGSWRRMNNKSGYTFSDEDEFIFQSPSGLFEKRVTVGELKRKAKKEVNSKYRTNEKRLPTLSGASQP

SEQ ID NO: 95 - protein, 1138 aa, Bifidobacterium dentium
MLCRCHRRYRIGIDVGLMSVGLAAIEVDETGFPIRILNIQSVIHDGGIDPQLGKKKSISRKAISGVARRTRRMRRRKVVRLRQLDATLESLGFPIVEPDSLDTWEIWLTRAKLASSYIQDDETRKEDVSIALRHIARHRGWRNPYSNVESLFVDVAPSEQYEELRRKAEEKLGTSLSGNPTSAEIVECILKRQVGEVQLRTRSRKGVNGNAVEKEGLLPTKLMQSDNAAEIRRIFKVQRIDDETGRKLLRAVFKACSPKGSVERRVGRDALAPGLPRALKASLAFQEYRIANVLTNLVISEDGTKRKLTIAEKQRVFGFLSSNETDDITWIDVAEKLGLERRQIQGVGCLTADGEERISSTPPRNITALHIHSAKPVIREKLVAWWKAASPTVRETMVELLSNTVDIDRVREDMDYSSAVAFIDSLGDEELTALDSVDLLSGRAAYSRQTLKQLTERMLNTDDDLHEARKAVFGVDDNWKPPVDAISTSVGNPAVDRVLKIVNRYLLACQKRWRNPQSVQIEHVRESFSSVAKAKETERVQGERARYRNDLRRELCEQEGLNKIRESDIRRWESVQRQNGTCLYCGSPITFRTCEMDHIVPRKGVGSTNTRVNLAAACAACNKLKSNTAFSVWARTEGAANRKVSQRDAIERVKTFIFNKSVPPREQRAFKQAVISRLRQAESDPAIDNRSIESVAWMADELHRRIEAYFNQDADVSGNTPATQVWVFQGRVTALARKASGIEGRIHFAGEWKKTRLDRRHHAVDAAVIAMMNHSAAQTLVERDSLRLSQWITRKPETWKNYPFSEGQKKTRFKEWLDCMNALLDLLNDALDSDRVPVTRCQRMSLGNSQAHAATIRKMKRVELFSPMDADLIRRASTPALYCALTRLPEYSPEKGLPENRGREIVLNGRHIRSTETVDFFASGAAQLMVRNGSAEIGDSIHHMRIYRYRKTGAKSQEYVYGMIRVFQIDLLHASSENLFAVQLPSQSVSVRYGDKNVVQAIQEGRAEYLGHIVPNDEILISYEGVRMKDSEKIGAYANDFSGTASELAQRRHWVVVGSDVSKLALRPSYLSEEGLENSGSESERLSKQTRKVIEGKGWVVAVNILAKYHPVVIRRNALGEPRFRTNSGMPVSWRWDR

SEQ ID NO: 96 - protein, 1187 aa, Bifidobacterium longum
MLSRQLLGASHLARPVSYSYNVQDNDVHCSYGERCFMRGKRYRIGIDVGLNSVGLAAVEVSDENSPVRLLNAQSVIHDGGVDPQKNKEAITRKNMSGVARRTRRMRRRKRERLHKLDMLLGKFGYPVIEPESLDKPFEEWHVRAELATRYIEDDELRRESISIALRHMARHRGWRNPYRQVDSLISDNPYSKQYGELKEKAKAYNDDATAAEEESTPAQLVVAMLDAGYAEAPRLRWRTGSKKPDAEGYLPVRLMQEDNANELKQIFRVQRVPADEWKPLFRSVFYAVSPKGSAEQRVGQDPLAPEQARALKASLAFQEYRIANVITNLRIKDASAELRKLTVDEKQSIYDQLVSPSSEDITWSDLCDFLGFKRSQLKGVGSLTEDGEERISSRPPRLTSVQRIYESDNKIRKPLVAWWKSASDNEHEAMIRLLSNTVDIDKVREDVAYASAIEFIDGLDDDALTKLDSVDLPSGRAAYSVETLQKLTRQMLTTDDDLHEARKTLFNVTDSWRPPADPIGEPLGNPSVDRVLKNVNRYLMNCQQRWGNPVSVNIEHVRSSFSSVAFARKDKREYEKNNEKRSIFRSSLSEQLRADEQMEKVRESDLRRLEAIQRQNGQCLYCGRTITFRTCEMDHIVPRKGVGSTNTRTNFAAVCAECNRMKSNTPFAIWARSEDAQTRGVSLAEAKKRVTMFTFNPKSYAPREVKAFKQAVIARLQQTEDDAAIDNRSIESVAWMADELHRRIDWYFNAKQYVNSASIDDAEAETMKTTVSVFQGRVTASARRAAGIEGKIHFIGQQSKTRLDRRHHAVDASVIAMMNTAAAQTLMERESLRESQRLIGLMPGERSWKEYPYEGTSRYESFHLWLDNMDVLLELLNDALDNDRIAVMQSQRYVLGNSIAHDATIHPLEKVPLGSAMSADLIRRASTPALWCALTRLPDYDEKEGLPEDSHREIRVHDTRYSADDEMGFFASQAAQIAVQEGSADIGSAIHHARVYRCWKTNAKGVRKYFYGMIRVFQTDLLRACHDDLFTVPLPPQSISMRYGEPRVVQALQSGNAQYLGSLVVGDEIEMDFSSLDVDGQIGEYLQFFSQFSGGNLAWKHWVVDGFFNQTQLRIRPRYLAAEGLAKAFSDDVVPDGVQKIVTKQGWLPPVNTASKTAVRIVRRNAFGEPRLSSAHHMPCSWQWRHE

SEQ ID NO: 97 - protein, 1124 aa, Bifidobacterium longum
  Bifidobacterium longum subsp. longum 2-2B
LTGHSGHTFWPTSSSPPIQLEQEKRPLPQRNTSQNGHTFWPITRERCFMRGKRYRIGIDVGLNSVGLAAVEVSDENSPVRLLNAQSVIHDGGVDPQKNKEAITRKNMSGVARRTRRMRRRKRERLHKLDMLLGKFGYPVIEPESLDKPFEEWHVRAELATRYIEDDELRRESISIALRHMARHRGWRNPYRQVDSLISDNPYSKQYGELKEKAKAYNDDATAAEEESTPAQLVVAMLDAGYAEAPRLRWRTGSKKPDAEGYLPVRLMQEDNANELKQIFRVQRVPADEWKPLFRSVFYAVSPKGSAEQRVGQDPLAPEQARALKASLAFQEYRIANVITNLRIKDASAELRKLTVDEKQSIYDQLVSPSSEDITWSDLCDFLGFKRSQLKGVGSLTEDGEERISSRPPRLTSVQRIYESDNKIRKPLVAWWKSASDNEHEAMIRLLSNTVDIDKVREDVAYASAIEFIDGLDDDALTKLDSVDLPSGRAAYSVETLQKLTRQMLTTDDDLHEARKTLFNVTDSWRPPADPIGEPLGNPSVDRVLKNVNRYLMNCQQRWGNPVSVNIEHVRSSFSSVAFARKDKREYEKNNEKRSIFRSSLSEQLRADEQMEKVRESDLRRLEAIQRQNGQCLYCGRTITFRTCEMDHIVPRKGVGSTNTRTNFAAVCAECNRMKSNTPFAIWARSEDAQTRGVSLAEAKKRVTMFTFNPKSYAPREVKAFKQAVIARLQQTEDDAAIDNRSIESVAWMADELHRRIDWYFNAKQYVNSASIDDAEAETMKTTVSVFQGRVTASARRAAGIEGKIHFIGQQSKTRLDRRHHAVDASVIAMMNTAAAQTLMERESLRESQRLIGLMPGERSWKEYPYEGTSRYESFHLWLDNMDVLLELLNDALDNDRIAVMQSQRYVLGNSIAHDATIHPLEKVPLGSAMSADLIRRASTPALWCALTRLPDYDEKEGLPEDSHREIRVHDTRYSADDEMGFFASQAAQIAVQEGSADIGSAIHHARVYRCWKTNAKGVRKYFYGMIRVFQTDLLRACHDDLFTVPLPPQSISMRYGEPRVVQALQSGNAQYLGSLVVGDEIEMDFPVSMLMVRLASIYNSSRSLVEGTLHGNIGLLMDSLTRRS

SEQ ID NO: 98 - protein, 1138 aa, Bifidobacterium sp.
MNSVGLAAVEVSDENSPVRLLNAQSVIHDGGVDPQKNKEAITRKNMSGVARRTRRMRRRKRERLHKLDMLLGKFGYPVIEPESLDKPFEEWHVRAELATRYIEDDELRRESISIALRHMARHRGWRNPYRQVDSLISDNPYSKQYGELKEKAKAYNDDATAAEEESTPAQLVVAMLDAGYAEAPRLRWRTGSKKPDAEGYLPVRLMQEDNANELKQIFRVQRVPADEWKPLFRSVFYAVSPKGSAEQRVGQDPLAPEQARALKASLAFQEYRIANVITNLRIKDASAELRKLTVDEKQSIYDQLVSPSSEDITWSDLCDFLGFKRSQLKGVGSLTEDGEERISSRPPRLTSVQRIYESDNKIRKPLVAWWKSASDNEHEAMIRLLSNTVDIDKVREDVAYASAIEFIDGLDDDALTKLDSVDLPSGRAAYSVETLQKLTRQMLTTDDDLHEARKTLFNVTDSWRPPADPIGEPLGNPSVDRVLKNVNRYLMNCQQRWGNPVSVNIEHVRSSFSSVAFARKDKREYEKNNEKRSIFRSSLSEQLRADEQMEKVRESDLRRLEAIQRQNGQCLYCGRTITFRTCEMDHIVPRKGVGSTNTRTNFAAVCAECNRMKSNTPFAIWARSEDAQTRGVSLAEAKKRVTMFTFNPKSYAPREVKAFKQAVIARLQQTEDDAAIDNRSIESVAWMADELHRRIDWYFNAKQYVNSASIDDAEAETMKTTVSVFQGRVTASARRAAGIEGKIHFIGQQSKTRLDRRHHAVDASVIAMMNTAAAQTLMERESLRESQRLIGLMPGERSWKEYPYEGTSRYESFHLWLDNMDVLLELLNDALDNDRIAVMQSQRYVLGNSIAHDATIHPLEKVPLGSAMSADLIRRASTPALWCALTRLPDYDEKEGLPEDSHREIRVHDTRYSADDEMGFFASQAAQIAVQEGSADIGSAIHHARVYRCWKTNAKGVRKYFYGMIRVFQTDLLRACHDDLFTVPLPPQSISMRYGEPRVVQALQSGNAQYLGSLVVGDEIEMDFSSLDVDGQIGEYLQFFSQFSGGNLAWKHWVVDGFFNQTQLRIRPRYLAAEGLAKAFSDDVVPDGVQKIVTKQGWLPPVNTASKTAVRIVRRNAFGEPRLSSAHHMPCSWQWRHE

SEQ ID NO: 99 - protein, 1151 aa, Bifidobacterium sp.
  Bifidobacterium sp. 12_1_47BFAA
MRGKRYRIGIDVGLNSVGLAAVEVSDENSPVRLLNAQSVIHDGGVDPQKNKEAITRKNMSGVARRTRRMRRRKRERLHKLDMLLGKFGYPVIEPESLDKPFEEWHVRAELATRYIEDDELRRESISIALRHMARHRGWRNPYRQVDSLISDNPYSKQYGELKEKAKAYNDDATAAEEESTPAQLVVAMLDAGYAEAPRLRWRTGSKKPDAEGYLPVRLMQEDNANELKQIFRVQRVPADEWKPLFRSVFYAVSPKGSAEQRVGQDPLAPEQARALKASLAFQEYRIANVITNLRIKDASAELRKLTVDEKQSIYDQLVSPSSEDITWSDLCDFLGFKRSQLKGVGSLTEDGEERISSRPPRLTSVQRIYESDNKIRKPLVAWWKSASDNEHEAMIRLLSNTVDIDKVREDVAYASAIEFIDGLDDDALTKLDSVDLPSGRAAYSVETLQKLTRQMLTTDDDLHEARKTLFNVTDSWRPPADPIGEPLGNPSVDRVLKNVNRYLMNCQQRWGNPVSVNIEHVRSSFSSVAFARKDKREYEKNNEKRSIFRSSLSEQLRADEQMEKVRESDLRRLEAIQRQNGQCLYCGRTITFRTCEMDHIVPRKGVGSTNTRTNFAAVCAECNRMKSNTPFAIWARSEDAQTRGVSLAEAKKRVTMFTFNPKSYAPREVKAFKQAVIARLQQTEDDAAIDNRSIESVAWMADELHRRIDWYFNAKQYVNSASIDDAEAETMKTTVSVFQGRVTASARRAAGIEGKIHFIGQQSKTRLDRRHHAVDASVIAMMNTAAAQTLMERESLRESQRLIGLMPGERSWKEYPYEGTSRYESFHLWLDNMDVLLELLNDALDNDRIAVMQSQRYVLGNSIAHDATIHPLEKVPLGSAMSADLIRRASTPALWCALTRLPDYDEKEGLPEDSHREIRVHDTRYSADDEMGFFASQAAQIAVQEGSADIGSAIHHARVYRCWKTNAKGVRKYFYGMIRVFQTDLLRACHDDLFTVPLPPQSISMRYGEPRVVQALQSGNAQYLGSLVVGDEIEMDFSSLDVDGQIGEYLQFFSQFSGGNLAWKHWVVDGFFNQTQLRIRPRYLAAEGLAKAFSDDVVPDGVQKIVTKQGWLPPVNTASKTAVRIVRRNAFGEPRLSSAHHMPCSWQWRHE

SEQ ID NO: 100 - protein, 1092 aa, Brevibacillus laterosporus
  Brevibacillus laterosporus GI-9
MAYTMGIDVGIASCGWAIVDLERQRIIDIGVRTFEKAENPKNGEALAVPRREARSSRRRLRRKKHRIERLKYMFVRNGLAVDIQHLEQTLRSQNEIDVWQLRVDGLDRMLTQKEWLRVLIHLAQRRGFQSNRKTDGSSEDGQVLVNVTENDRLMEEKDYRTVAEMMVKDEKFSDHKRNKNGNYHGVVSRASLLVEIHTLFESQRQHHNFLASKDFELEYINIWSSQRPVATKDQIEKMIGTCTFLPKEKRAPKASWHFQYFMLLQTINHIRITNAQGTRPLNKEEIEQVVNMALTKSKVSYHDIRKVLDLSEEYQFVGLDYGKEDEKKKVESKETIIKLDDYHKLNKIFNEVELAKGETWEAVDYDTVAYALTFFKDDEDIRDYLQNKYKDSKNRLVKNVANKEYTNELIEKVSTLSFRKVGHLSLKALRKIIPFLEQGMTYDKACQAAGFNFQGISKKKRSVVLPVIDQISNPVVNRALTQTRKVINALIKKYGSPETIHIETARELSKRFDERKNITKDYKENRDKNERAKKHLSELGIINPTGLDIVKYKLWCEQQGRCMYSNQPISFERLRESGYTEVDHIIPYSRSMNDSYNNRVLVMTRENREKSNQTPYEYMGNDTQRWDEFEQRVTTNPQIKKEKRQNLLLKGFTNRRELEMLERNLNDTRHITKYLSHFISTNLEFSPSDKKKKVVNTSGRITSHLRSRWGLEKNREQNDLHHAMDAVVIAVTSDSFIQQVTNYYKRKERRELNGDDKFPLPWKFFREEVIARLSPNPKEQIEALPNHFYSEDELADLQPIFVSRMPKRSITGEAHQAQFRRVVGKTKEGKNITAKKTALVDISYDKNGDFNMYGRETDPATYEAIKERYLEFGGNAKKAFSTDLHKPKKDGTKGPLIKSVRIMENKTLVHPVNKGKGVVYNSSIVRTDVFQRKEKYYLLPVYVTDVTKGKLPNKVIAAKKGYDDWIEVDDSFTFLYSLYPNDLIFIRQNPKKKISLKKRIESHSISDSKEVQEILTYYKGVDSSTAAIEFITHDGSYYAKGVGVQNLDCFEKYQVDILGNYSKVKGEKRLELETSDNNHKGKDVNSIKSTSR

SEQ ID NO: 101 - protein, 1428 aa, Burkholderiales bacterium
  Burkholderiales bacterium 1_1_47
MGKTHIIGVGLDLGGTYTGTFITSHPSDEAEHRDHSSAFTVVNSEKLSFSSKSRTAVRHRVRSYKGFDLRRRLLLLVAEYQLLQKKQTLAPEERENLRIALSGYLKRKGYARTEAETDTSVLESLDPSVFSSAPSFTNFFNDSEPLNIQWEAIANSPETTKALNKELSGQKEADFKKYIKTSFPEYSAKEILANYVEGRRAILDASKYIANLQSLGHKHRSKYLSDILQDMKRDSRITRLSEAFGSTDNLWRIIGNISNLQERAVRWYFNDAKFEQGQEQLDAVKLKNVLVRALKYLRSDDKEWSASQKQIIQSLEQSGDVLDVLAGLDPDRTIPPYEDQNNRRPPEDQTLYLNPKALSSEYGEKWKSWANKFAGAYPLLTEDLTEILKNTDRKSRIKIRSDVLPDSDYRLAYILQRAFDRSIALDECSIRRTAEDFENGVVIKNEKLEDVLSGHQLEEFLEFANRYYQETAKAKNGLWFPENALLERADLHPPMKNKILNVIVGQALGVSPAEGTDFIEEIWNSKVKGRSTVHSICNAIENERKTYGPYFSEDYKFVKTALKEGKTEKELSKKFAAVIKVLKMVSEVVPFIGKELRLSDEAQSKFDNPYSLAQLYNLIETERNGFSKVSLAAHLENAWRMTMTDGSAQCCRLPADCVRPFDGFIRKAIDRNSWEVAKRIAEEVKKSVDFTNGTVKIPVAIEANSFNFTASLTDLKYIQLKEQKLKKKLEDIQRNEENQEKRWLSKEERIRADSHGICAYTGRPLDDVGEIDHIIPRSLTLKKSESIYNSEVNLIFVSAQGNQEKKNNIYLLSNLAKNYLAAVFGASDLSQITNEIESTVLQLKAAGRLGYFDLLSEKERACARHALFLNSDSEARRAVIDVLGSRRKASVNGTQAWFVRSIFSKVRQALAAWTQETGNELIFDAISVPAADSSEMRKRFAEYRPEFRKPKVQPVASHSIDAMCIYLAACSDPFKTKRMGSQLAIYEPINFDNLFTGSCQVIQNTPRNFSDKTNIANSPIFKETIYAERFLDIIVSRGEIFIGYPSNMPFEEKPNRISIGGKDPFSILSVLGAYLDKAPSSEKEKLTIYRVVKNKAFELFSKVAGSKFTAEEDKAAKILEALHFVTVKQDVAATVSDLIKSKKELSKDSIENLAKQKGCLKKVEYSSKEFKFKGSLIIPAAVEWGKVLWNVFKENTAEELKDENALRKALEAAWPSSFGTRNLHSKAKRVFSLPVVATQSGAVRIRRKTAFGDFVYQSQDTNNLYSSFPVKNGKLDWSSPIIHPALQNRNLTAYGYRFVDHDRSISMSEFREVYNKDDLMRIELAQGTSSRRYLRVEMPGEKFLAWFGENSISLGSSFKFSVSEVFDNKIYTENAEFTKFLPKPREDNKHNGTIFFELVGPRVIFNYIVGGAASSLKEIFSEAGKERS

SEQ ID NO: 102 - protein, 1442 aa, Caenispirillum salinarum
  Caenispirillum salinarum AK4
MPVLSPLSPNAAQGRRRWSLALDIGEGSIGWAVAEVDAEGRVLQLTGTGVTLFPSAWSNENGTYVAHGAADRAVRGQQQRHDSRRRRLAGLARLCAPVLERSPEDLKDLTRTPPKADPRAIFFLRADAARRPLDGPELFRVLHHMAAHRGIRLAELQEVDPPPESDADDAAPAATEDEDGTRRAAADERAFRRLMAEHMHRHGTQPTCGEIMAGRLRETPAGAQPVTRARDGLRVGGGVAVPTRALIEQEFDAIRAIQAPRHPDLPWDSLRRLVLDQAPIAVPPATPCLFLEELRRRGETFQGRTITREAIDRGLTVDPLIQALRIRETVGNLRLHERITEPDGRQRYVPRAMPELGLSHGELTAPERDTLVRALMHDPDGLAAKDGRIPYTRLRKLIGYDNSPVCFAQERDTSGGGITVNPTDPLMARWIDGWVDLPLKARSLYVRDVVARGADSAALARLLAEGAHGVPPVAAAAVPAATAAILESDIMQPGRYSVCPWAAEAILDAWANAPTEGFYDVTRGLFGFAPGEIVLEDLRRARGALLAHLPRTMAAARTPNRAAQQRGPLPAYESVIPSQLITSLRRAHKGRAADWSAADPEERNPFLRTWTGNAATDHILNQVRKTANEVITKYGNRRGWDPLPSRITVELAREAKHGVIRRNEIAKENRENEGRRKKESAALDTFCQDNTVSWQAGGLPKERAALRLRLAQRQEFFCPYCAERPKLRATDLFSPAETEIDHVIERRMGGDGPDNLVLAHKDCNNAKGKKTPHEHAGDLLDSPALAALWQGWRKENADRLKGKGHKARTPREDKDFMDRVGWRFEEDARAKAEENQERRGRRMLHDTARATRLARLYLAAAVMPEDPAEIGAPPVETPPSPEDPTGYTAIYRTISRVQPVNGSVTHMLRQRLLQRDKNRDYQTHHAEDACLLLLAGPAVVQAFNTEAAQHGADAPDDRPVDLMPTSDAYHQQRRARALGRVPLATVDAALADIVMPESDRQDPETGRVHWRLTRAGRGLKRRIDDLTRNCVILSRPRRPSETGTPGALHNATHYGRREITVDGRTDTVVTQRMNARDLVALLDNAKIVPAARLDAAAPGDTILKEICTEIADRHDRVVDPEGTHARRWISARLAALVPAHAEAVARDIAELADLDALADADRTPEQEARRSALRQSPYLGRAISAKKADGRARAREQEILTRALLDPHWGPRGLRHLIMREARAPSLVRIRANKTDAFGRPVPDAAVWVKTDGNAVSQLWRLTSVVTDDGRRIPLPKPIEKRIEISNLEYARLNGLDEGAGVTGNNAPPRPLRQDIDRLTPLWRDHGTAPGGYLGTAVGELEDKARSALRGKAMRQTLTDAGITAEAGWRLDSEGAVCDLEVAKGDTVKKDGKTYKVGVITQGIFGMPVDAAGSAPRTPEDCEKFEEQYGIKPWKAKGIPLA

SEQ ID NO: 103 - protein, 984 aa, Campylobacter coli
  Campylobacter coli 1098
MARILAFDIGISSIGWAFSENDELKDCGVRIFTKAENPKTGESLALPRRLARSARKRLARRKARLNHLKHLIANEFKLNYEDYQSFDESLAKAYKGSLISPYELRFRALNELLSKQDFARVILHIAKRRGYDDIKNNGDEEKSEILKAIKQNEEKLVNYQSVGEYLYKEYFQKFKENSKEFINVRNKKESYERCIAQSFLKDELKLIFQKQREFGFSFSKKFEEEVLSVAFYKRALKDFSHLVGNCSFFTDEKRAPKNSPLAFMFVALTRIINLLNNLKNTEGILYTKDDLNALLNEVLKNGTLTYKQTKKLLGLSDDYEFKGEKGTYFIEFKKYKEFIKALGEHNLSQDDLNEIAKDITLIKDEIKLKKALAKYDLNQNQIDSLSKLEFKDHLNISFKALKLITPLMLEGKKYDEACNELNLKVAINEDKKDFLPAFNETYYKDEVTNPVVLRAIKEYRKVLNALLKKYGKVHKINIELAREVGKNYSQRAKIEKEQNENYKAKKDAELECEKLGLKINSKNILKLRLFKEQKEFCAYSGEKIKISDLQDEKMLEIDHIYPYSRSFDDSYMNKVLVFTKQNQEKLNQTPFEAFGNDSAKWQKIEVLAKNLPTKKQKRILDKNYKDKEQKNFKDRNLNDTRYIARLVLNYTKDYLDFLPLSDDENTKLNDTQKGSKVHVEAKSGMLTSALRHTWGFSAKDRNNHLHHAIDAVIIAYANNSIVKAFSDFKKEQESNSAELYAKKISELDYKNKRKFFEPFSGFRQKVLDKIDEIFVSKPERKKPSGALHEETFRKEEEFYQSYGGKEGVLKALELGKIRKVNGKIVKNGDMFRVDIFKHKKTNKFYAVPIYTMDFALKVLPNKAVARSKKGEIKDWILMDENYEFCFSLYKDSLILIQTKDMQEPEFVYYNAFTSSTVSLIVSKHDNKFETLSKNQKILFKNANEKEVIAKSIGIQNLKVFEKYIVSALGEVTKAEFRQREDFKK

SEQ ID NO: 104 - protein, 984 aa, Campylobacter coli
  Campylobacter coli 111-3
MARILAFDIGISSIGWAFSENDELKDCGVRIFTKAENPKTGESLALPRRLARSARKRLARRKARLNHLKHLIANEFKLNYEDYQSFDESLAKAYKGSLISPYELRFRALNELLSKQDFARVILHIAKRRGYDDIKNNGDEEKSEILKAIKQNEEKLVNYQSVGEYLYKEYFQKFKENSKEFINVRNKKESYERCIAQSFLKDELKLIFQKQREFGFSFSKKFEEEVLSVAFYKRALKDFSHLVGNCSFFTDEKRAPKNSPLAFMFVALTRIINLLNNLKNTEGILYTKDDLNTLLNEVLKNGTLTYKQTKKLLGLSDDYEFKGEKGTYFIEFKKYKEFIKALGEHNLSQDNLNEIAKDITLIKDEIKLKKALAKYDLNQNQIDSLSKLEFKDHLNISFKALKLITPLMLEGKKYDEAYNELNLKVAINEDKKDFLPAFNETYYKDEVTNPVVLRAIKEYRKVLNALLKKYGKVHKINIELAREVGKNHSQRAKIEKEQNENYKAKKDAELECEKLGLKINSKNILKLRLFKEQKEFCAYSGEKIKISDLQDEKMLEIDHIYPYSRSFDDSYMNKVLVFTKQNQEKLNQTPFEAFGNDSAKWQKIEVLAKNLPTKKQKRILDKNYKDKEQKDFKDRNLNDTRYIARLVLNYTKDYLDFLPLSDDENTKLNDTQKGSKVHVEAKSGMLTSALRHTWGFSAKDRNNHLHHAIDAVIIAYANNSIVKAFSDFKKEQESNSAELYAKKISELDYKNKRKFFEPFSGFRQKVLDKIDEIFVSKPERKKPSGALHEETFRKEEEFYQSYGGKEGVLKALELGKIRKVNGKIVKNGDMFRVDIFKHKKTNKFYAVPIYTMDFALKVLPNKAVARSKKGEIKDWILMDENYEFCFSLYKDSLILIQTKDMQEPELVYFNAFTSSTVSLIVSKHDNKFETLSKNQKILFKNANEKEVIAKSIGIQNLKVFEKYIVSALGEVTKAEFRQREDFKK

SEQ ID NO: 105 - protein, 987 aa, Campylobacter coli
  Campylobacter coli 132-6
MARILAFDIGISSIGWAFSENDELKDCGVRIFTKAENPKTGESLALPRRLARSARKRLARRKARLNHLKHLIANEFKLNYEDYQSFDESLAKAYKGSLISPYELRFRALNELLSKQDFARVILHIAKRRGYDDIKNNGDEEKSEILKAIKQNEEKLVNYQSVGEYLYKEYFQKFKENSKEFINVRNKKESYERCIAQSFLKDELKLIFQKQREFGFSFSKKFEEEVLSVAFYKRALKDFSHLVGNCSFFTDEKRAPKNSPLAFMFVALTRIINLLNNLKNTEGILYTKDDLNTLLNEVLKNGTLTYKQTKKLLGLSDDYEFKGEKGTYFIEFKKYKEFIKALGEHNLSQDNLNEIAKDITLIKDEIKLKKALAKYDLNQNQIDSLSKLEFKDHLNISFKALKLITPLMLEGKKYDEAYNELNLKVAINEDKKDFLPAFNETYYKDEVTNPVVLRAIKEYRKVLNALLKKYGKVHKINIELAREVGKNHSQRAKIEKEQNENYKAKKDAELECEKLGLKINSKNILKLRLFKEQKEFCAYSGEKIKISDLQDEKMLEIDHIYPYSRSFDDSYMNKVLVFTKQNQEKLNQTPFEAFGNDSAKWQKIEVLAKNLPTKKQKRILDKNYKDKEQKDFKDRNLNDTRYIARLVLNYTKDYLDFLPLSDDENTKLNDTQKGSKVHVEAKSGMLTSALRHTWGFSAKDRNNHLHHAIDAVIIAYANNSIVKAFSDFKKEQESNSAELYAKKISELDYKNKRKFFEPFSGFRQKVLDKIDEIFVSKPERKKPSGALHEETFRKEEEFYQSYGGKEGVLKALELGKIRKVNGKIVKNGDMFRVDIFKHKKTNKFYAVPIYTMDFALKVLPNKAVARSKKGEIKDWILMDENYEFCFSLYKDSLILIQTKDMQEPELVYFNAFTSSTVSLIVSKHDNKFETLSKNQKILFKNANEKEVIAKSIGIQNLKVFEKYIVSALGEVTKAEFRQREDFKNELR

SEQ ID NO: 106 - protein, 984 aa, Campylobacter coli
  Campylobacter coli 151-9
MARILAFDIGISSIGWAFSENDELKDCGVRIFTKAENPKTGESLALPRRLARSARKRLARRKARLNHLKHLIANEFKLNYEDYQSFDESLAKAYKGSLISPYELRFRALNELLSKQDFARVILHIAKRRGYDDIKNNGDEEKSEILKAIKQNEEKLVNYQSVGEYLYKEYFQKFKENSKEFINVRNKKESYERCIAQSFLKDELKLIFQKQREFGFSFSKKFEEEVLSVAFYKRALKDFSHLVGNCSFFTDEKRAPKNSPLAFMFVALTRIINLLNNLKNTEGILYTKDDLNTLLNEVLKNGTLTYKQTKKLLGLSDDYEFKGEKGTYFIEFKKYKEFIKALGEHNLSQDNLNEIAKDITLIKDEIKLKKALAKYDLNQNQIDSLSKLEFKDHLNISFKALKLITPLMLEGKKYDEAYNELNLKVAINEDKKDFLPAFNETYYKDEVTNPVVLRAIKEYRKVLNALLKKYGKVHKINIELAREVGKNHSQRAKIEKEQNENYKAKKDAELECEKLGLKINSKNILKLRLFKEQKEFCAYSGEKIKISDLQDEKMLEIDHIYPYSRSFDDSYMNKVLVFTKQNQEKLNQTPFEAFGNDSAKWQKIEVLAKNLPTKKQKRILDKNYKDKEQKDFKDRNLNDTRYIARLVLNYTKDYLDFLPLSNDENTKLNDTQKGSKVHVEAKSGMLTSALRHTWGFSAKDRNNHLHHAIDAVIIAYANNSIVKAFSDFKKEQESNSAELYAKKISELDYKNKRKFFEPFSGFRQKVLDKIDEIFVSKPERKKPSGALHEETFRKEEEFYQSYGGKEGVLKALELGKIRKVNGKIVKNGDMFRVDIFKHKKTNKFYAVPIYTMDFALKVLPNKAVARSKKGEIKDWILMDENYEFCFSLYKDSLILIQTKDMQEPELVYFNAFTSSTVSLIVSKHDNKFETLSKNQKILFKNANEKEVIAKSIGIQNLKVFEKYIVSALGEVTKAEFRQREDFKK

SEQ ID NO: 107 - protein, 984 aa, Campylobacter coli
  Campylobacter coli 1909
MARILAFDIGISSIGWAFSENDELKDCGVRIFTKAENPKTGESLALPRRLARSARKCLARRKARLNHLKHLIANEFKLNYEDYQSFDESLAKAYKGSLISPYELRFRALNELLSKQDFARVILHIAKRRGYDDIKNNGDEEKSEILKAIKQNEEKLVNYQSVGEYLYKEYFQKFKENSKEFINVRNKKESYERCIAQSFLKDELKLIFQKQREFGFSFSKKFEEEVLSVAFYKRALKDFSHLVGNCSFFTDEKRAPKNSPLAFMFVALTRIINLLNNLKNTEGILYTKDDLNALLNEVLKNGTLTYKQTKKLLGLSDDYEFKGEKGTYFIEFKKYKEFIKALGEHNLSQDDLNEIAKDITLIKDEIKLKKALAKYDLNQNQIDSLSKLEFKDHLNISFKALKLITPLMLEGKKYDEACNELNLKVAINEDKKDFLPAFNETYYKDEVTNPVVLRAIKEYRKVLNALLKKYGKVHKINIELAREVGKNHSQRAKIEKEQNENYKAKKDAELECEKLGLKINSKNILKLRLFKEQKEFCAYSGEKIKISDLQDEKMLEIDHIYPYSRSFDDSYMNKVLVFTKQNQEKLNQTPFEAFGNDSAKWQKIEVLAKNLPTKKQKRILDKNYKDKEQKNFKDRNLNDTRYIARLVLNYTKDYLDFLPLSDDENTKLNDTQKGSKVHVEAKSGMLTSALRHTWGFSAKDRNNHLHHAIDAVIIAYANNSIVKAFSDFKKEQESNSAELYAKKISELDYKNKRKFFEPFSGFRQKVLDKIDEIFVSKPERKKPSGALHEETFRKEEEFYQSYGGKEGVLKALELGKIRKVNGKIVKNGDMFRVDIFKHKKTNKFYAVPIYTMDFALKVLPNKAVARSKKGEIKDWILMDENYEFCFSLYKDSLILIQTKDMQEPEFVYYNAFTSSTVSLIVSKHDNKFETLSKNQKILFKNANEKEVIAKSIGIQNLKVFEKYIVSALGEVTKAEFRQREDFKK

SEQ ID NO: 108 - protein, 965 aa, Campylobacter coli
  Campylobacter coli 1957
MKIIGFNLGIANIGWALRENDEIIDCGVRVFDIPENPKNGNSLALERRENKARMKIVKRKKARMLATKTFLKKELNVDLSKLFLIGSTQSIYELRTKALSSLISKEELSAIILHIAKHRGYDDSALKNENGTIIEALNKNKEAMLKFKSVGEYFYKNFVQNKEVKKIRNTTEDYSNSVPRSLLKQELDLILDKQKELGLIKNADFKEKLFEIIFFKRPLKDFSNKIGNCIFFENEKRAAKNTISACEFVALGKVVNLLKSIEKDIGIVYEKDSINEIMSIILDKTSISYKKIRDILNLPQDINFKGLDYSKNNAENSKLVDLKKLNEFKKALGDGFANLDKDILDSIATDITLTKDTATLKEKLKNYNVLNAEQIEKLSELVFNDHINLSLKALKQIIPLMYEGKRYDEACELCNFTIAKNQEKNEYLPLFEKTRFAKDISSPVVIRAICEFRKLLNDIIRRYGSVHKIHLELTRDFGISFNDRKKIIKEIEQNEQSRIKALETIKELKLEETSKNIQIVRLFEDQKGICPYSGLKMDLKCLDELVIDYIRPYNRSLDDSYSNKILTFKKLNDLKQGKTPFEAFGEDEKLWAEINERIKEYNGKKRFKIFDKFFKDKKPFDFTEQTLQDTRWLTKLVASYLNEYLLFLPINEDENTALGYGEKGSKQHVVLSSGMITQMLRNFWYLGFKNHKDYKNNAMDAIIVAFTTNSIIFAFNNFKKELDLAKAEFYANKISESDYLLKRKFLPPFSGFKEQALEKVKNIFVSHSLKIKNKGTLHELTPLKIKELKNTYGDLDLAVKLGKIRKYNDKYYANAKGSLVRTDLFADKENKFHAVSIYKADFSTKKLPNKTPATTSNGETKEGIEMNENYNFCMSLYKNTPISVKIKGMKEPIICYYHGFNTSGSKITYKKHDNNYHNLSEDEMVVFRKNDKESIVVGKILEIKKYSISPSGELSLIENEERKWF

SEQ ID NO: 109 - protein, 984 aa, Campylobacter coli
  Campylobacter coli 2692
MARILAFDIGISSIGWAFSENDELKDCGVRIFTKAENPKTGESLALPRRLARSARKRLARRKARLNHLKHLIANEFKLNYEDYQSFDESLAKAYKGSLISPYELRFRALNELLSKQDFARVILHIAKRRGYDDIKNSDDKEKGAILKAIKQNEEKLTNYQSVGEYLYKEYFQKFKENSKEFTNVRNKKESYERCIAQSFLKDELKLIFKKQREFGFSFSKKFEEEVLSVAFYKRALKDFSHLVGNCSFFTDEKRAPKNSPLAFMFVALTRIINLLNNLKNTEGILYTKDDLNALLNEVLKNGTLTYKQTKKLLGLSDDYEFKGEKGTYFIEFKKYKEFIKALGDHSLSQDDLNEIAKDITLIKDEIKLKKALAKYDLNQNQIDSLSKLEFKDHLNISFKALKLITPLMLEGKKYDEACNELNLKVAINEDKKDFLPAFNETYYKDEVTNPVVLRAIKEYRKVLNALLKKYGKVHKINIELAREVGKNYSQRAKIEKEQNENYKAKKDAELECEKLGLKINSKNILKLRLFKEQKEFCAYSGEKIKISDLQDEKMLEIDHIYPYSRSFDDSYMNKVLVFTKQNQEKLNQTPFEAFGNDSAKWQKIEVLAKNLPTKKQKRILDKNYKDKEQKDFKDRNLNDTRYIARLVLNYTKDYLDFLPLSDDENTKLNDTQKGSKVHVEAKSGMLTSALRHTWGFSAKDRNNHLHHAIDAVIIAYANNSIVKAFSDFKKEQESNSAELYAKKISELDYKNKRKFFEPFSGFRQKVLDKIDEIFVSKPERKKPSGALHEETFRKEEEFYQSYGGKEGVLKALELGKIRKVNGKIVKNGDMFRVDIFKHKKTNKFYAVPIYTMDFALKVLPNKAVARSKKGEIKDWILMDENYEFCFSLYKDSLILIQTKDMQEPEFVYYNAFTSSTVSLIVSKHDNKFETLSKNQKILFKNANEKEVIAKSIGIQNLKVFEKYIVSALGEVTKAEFRQREDFKK

SEQ ID NO: 110 - protein, 984 aa, Campylobacter coli
  Campylobacter coli 59-2
MARILAFDIGISSIGWAFSENDELKDCGVRIFTKAENPKTGESLALPRRLARSARKRLARRKARLNHLKHLIANEFKLNYEDYQSFDESLAKAYKGSLISPYELRFRALNELLSKQDFARVILHIAKRRGYDDIKNNGDEEKGKILKAIKQNEEKLVNYQSVGEYLYKEYFQKFKENSKEFINVRNKKESYERCITQSFLKYELKLIFQKQREFGFSFSKKFEEEVLSVAFYKRALKDFSHLVGNCSFFSDEKRAPKNSPLAFMFVALTRIINLLNNLKNTEGILYTKDDLNALLNEVLKNGTLTYKQTKKLLGLSDDYEFKGEKGTYFIEFKKYKEFIKALGEHNLSQDDLNEIAKDITLIKDEIKLKKALAKYDLNQNQIDSLSKLEFKDHLNISFKALKLITPLMLEGKKYDEACNELNLKVAINEDKKDFLPAFNETYYKDEVTNPVVLRAIKEYRKVLNALLKKYGKVHKINIELAREVGKNYSQRAKIEKEQNENYKAKKDAELECEKLGLKINSKNILKLRLFKEQKEFCAYSGEKIKISDLQDEKMLEIDHIYPYSRSFDDSYMNKVLVFTKQNQEKLNQTPFEAFGNDSAKWQKIEVLAKNLPTKKQKRILDKNYKDKEQKNFKDRNLNDTRYIARLVLNYTKDYLDFLPLSDDENTKLNDTQKGSKVHVEAKSGMLTSALRHTWGFSAKDRNNHLHHAIDAVIIAYANNSIVKAFSDFKKEQESNSAELYAKKISELDYKNKRKFFEPFSGFRQKVLDKIDEIFVSKPERKKPSGALHEETFRKEEEFYQSYGGKEGVLKALELGKIRKVNGKIVKNGDMFRVDIFKHKKTNKFYAVPIYTMDFALKVLPNKAVARSKKGEIKDWILMDENYEFCFSLYKDSLILIQTKDMQEPEFVYYNAFTSSTVSLIVSKHDNKFETLSKNQKILFKNANEKEVIAKSIGIQNLKVFEKYIVSALGEVTKAEFRQREDFKK

SEQ ID NO: 111 - protein, 965 aa, Campylobacter coli
  Campylobacter coli 67-8
MKIIGFNLGIANIGWALRENDEIIDCGVRVFDIPENPKNGNSLALERRENKARMKIVKRKKARMLATKTFLKKELNVDLSKLFLIGSTQSIYELRTKALSSLISKEELSAIILHIAKHRGYDDSALKNENGTIIEALNKNKEAMLKFKSVGEYFYKNFVQNKEVKKIRNTTEDYSNSVPRSLLKQELDLILDKQKELGLIKNADFKAKLFEIIFFKRPLKDFSNKIGNCIFFENEKRAAKNTISACEFVALGKVVNLLKSIEKDIGIVYEKDSINEIMSIILDKTSISYKKIRDILNLPQDINFKGLDYSKNNAENSKLVDLKKLNEFKKALGDGFANLDKDILDSIATDITLTKDTATLKEKLKNYNVLNAEQIEKLSELVFNDHINLSLKALKQIIPLMYEGKRYDEACELCNFTIAKNQEKNEYLPLFEKTRFAKDISSPVVIRAICEFRKLLNDIIRRYGSVHKIHLELTRDFGISFNDRKKIIKEIEQNEQSRIKALETIKELKLEETSKNIQIVRLFEDQKGICPYSGLKMDLKCLDELVIDYIRPYNRSLDDSYSNKVLTFKKLNDLKQGKTPFEAFGEDEKLWAEINERIKEYNGKKRFKIFDKFFKDKKPFDFTEQTLQDTRWLTKLVASYLNEYLSFLPISEDENTALGYGEKGSKQHVVLSSGMITQMLRNFWYLGFKNHKNYKNNAMDAIIVAFTTNSIIFAFNNFKKELDLAKAEFYANKISESDYLLKRKFLPPFSGFKEQALEKVKNIFVSHSLKIKNKGTLHELTPLKIKELKNTYGDLDLAVKLGKIRKYNDKYYANTKGSLVRTDLFVDKENKFHAVSIYKADFSTKKLPNKTPATTSNGETKEGIEMNENYNFCMSLYKNTPVSVKIKGMKEPIICYYHGFNTSGSKITYKKHDNNYHNLSEDEMVVFRKNDKESIVVGKILEIKKYSISPSGELSLIENEKRKWF

SEQ ID NO: 112 - protein, 965 aa, Campylobacter coli
  Campylobacter coli 80352
MKIIGFNLGIANIGWALRENDEIIDCGVRVFDIPENPKNGNSLALERRENKARMKIVKRKKARMLATKTFLKKELNVDLSKLFLIGSTQSIYELRTKALSSLISKEELSAIILHIAKHRGYDDSALKNENGTIIEALNKNKEAMLKFKSVGEYFYKNFVQNKEVKKIRNTTEDYSNSVPRSLLKQELDLILDKQKELGLIKNADFKAKLFEIIFFKRPLKDFSNKIGNCIFFENEKRAAKNTISACEFVALGKVVNLLKSIEKDIGIVYEKDSINEIMSIILDKTSISYKKIRDILNLPQDINFKGLDYSKNNVENSKLVDLKKLNEFKKALGDGFTNLDKDILDSIATDITLTKDTATLKEKLKNYNVLNAEQIEKLSELVFNDHINLSLKALKQIIPLMYEGKRYDEACELCNFTIAKNQEKNEYLPLFEKTRFAKDISSPVVIRAICEFRKLLNDIIRRYGSVHKIHLELTRDFGISFNDRKKIIKEIEQNEQSRIKALETIKELKLEETSKNIQIVRLFEDQKGICPYSGLKMDLKCLDELVIDYIRPYNRSLDDSYSNKVLTFKKLNDLKQGKTPFEAFGEDEKLWAEINERIKEYNGKKRFKIFDKFFKDKKPFDFTEQTLQDTRWLTKLVASYLNEYLSFLPISEDENTALGYGEKGSKQHVILSSGMITQMLRNFWYLGFKNHKDYKNNAMDAIIVAFTTNSIIFTFNNFKKELDLAKAEFYANKISESDYLLKRKFLPPFSGFKEQALEKVKNIFVSHSLKIKNKGTLHELTPLKIKELKNTYGDLDLAVKLGKIRKYNDKYYANAKGSLVRTDLFADKENKFHAVSIYKADFSTKKLPNKTPATTSNGETKEGIEMNENYNFCMSLYKNTPISVKIKGMKEPIICYYHGFNTSGSKITYKKHDNNYHNLSEDEMVVFRKNDKESIVVGKILEIKKYSISPSGELSLIENEERKWF

SEQ ID NO: 113 - protein, 987 aa, Campylobacter coli
  Campylobacter coli 80352
MARILAFDIGISSIGWAFSENDELKDCGVRIFTKAENPKTGESLALPRRLARSARKRLARRKARLNHLKHLIANEFKLNYEDYQSFDESLAKAYKGSLISPYELRFRALNELLSKQDFARVILHIAKRRGYDDIKNSDDKEKGAILKAIKQNEEKLANYQSVGEYLYKEYFQKFKENSKEFTNVRNKKESYERCIAQSFLKDELKLIFKKQREFGFSFSKKFEEEVLSVAFYKRALKDFSHLVGNCSFFTDEKRAPKNSPLAFMFVALTRIINLLNNLKNTEGILYTKDDLNALLNEVLKNGTLTYKQTKKLLGLSDDYEFKGEKGTYFIEFKKYKEFIKALGDHSLSQDDLNEIAKDITLIKDEIKLKKALAKYDLNQNQIDSLSKLEFKDHLNISFKALKLITPLMLEGKKYDEACNELNLKVAINEDKKDFLPAFNETYYKDEVTNPVVLRAIKEYRKVLNALLKKYGKVHKINIELAREVGKNYSQRAKIEKEQNENYKAKKDAELECEKLGLKINSKNILKLRLFKEQKEFCAYSGEKIKISDLQDEKMLEIDHIYPYSRSFDDSYMNKVLVFTKQNQEKLNKTPFEAFGNDSTKWQKIEVLAKNLPEKKQKRILDKNYKDKEQKDFKDRNLNDTRYIARLVLNYTKDYLDFLPLSDDENTKLNDTQKGSKVHVEAKSGMLTSALRHTWGFSTKDRNNHLHHAIDAVIIAYANNSIVKAFSDFKKEQESNSAELYAKKISELDYKNKRKFFEPFSGFRQKVLDKIDEIFVSKPERKKPSGALHEETFRKEEEFYQSYGGKEGVLKALELGKIRKVNGKIVKNGDMFRVDIFKHKKTNKFYAVPIYTMDFALKVLPNKAVARSKKGEIKDWILMDENYEFCFSLYKDSLILIQTKDMQEPEFVYYNAFTSSTVSLIVSKHDNKFETLSKNQKILFKNANEKEVIAKSIGIQNLKVFEKYIVSALGEVTKAEFRQREDFKNELR

SEQ ID NO: 114 - protein, 984 aa, Campylobacter jejuni
MAKILAFDIGISSIGWAFSENDELKDCGVRIFTKAENPKTGESLALPRRIARSARKRLARRKARLNHLKHLIANEFKLNYEDYQSFDEILAKAYKGSLISPYELRFRALNELLSKQDFARVILHIAKRRGYDDIKNNGDEEKGKILKAIKQNEEKLANYQSVGEYLYKEYFQKFKENSKEFINVRNKKESYERCIAQSFLKDELKLIFKKQREFGFSFSKKFEEEVLSVAFYKRALKDFSHLVGNCSFFTDEKRAPKNSPLAFMFVALTRIINLLNNLKNTLYTKDDLNALLNEVLKNGTLTYKQTKKLLGLSDDYEFKGEKGNYFIEFKKYKEFIKALGEHSLSQDDLNEIAKDITLIKDEIKLKKALAKYDLNENQIDNLSKLEFKDHLNISFKALKLITPLMLEGKKYDEACNELTLKVAINEDKKDFLPAFNETYYKDEVTNPVVLRAIKEYRKVLNALLKKYGKVHKINIELAREVGKNHSQRAKIEKEQNENYKAKKDAELECEKLGLKINSKNILKLRLFKEQKEFCVYSGEKIKLSDLQDEKMLEIDHIYPYSRSFDDSYMNKVLVFTKQNQEKLNQTPFEAFGNDSAKWQKIEVLAKNLPTKKQKRILDKNYKDKEQKDFKDRNLNDTRYIARLVLNYTKDYLDFLPLSDDENTKLNDTQKGSKVHVEAKSGMLTSALRHTWGFSTKDRNNHLHHAIDAVIIAYANNSIVKAFSDFKKEQESNTAELYAKKISELDYKNKRKFFEPFSGFRQKVLDKIDEIFVSKPERKKPSGALHEETFRKEEEFYQSYGGKEGVLKALELGKIRKVNGKIVKNGDMFRVDIFKHKKTNKFYAVPIYTMDFALKVLPNKAVARSKKGEIKDWILMDENYEFCFSLYKDSLILIQTKDMQEPEFVYYNAFTSSTVSLIVSKHDNKFETLSKNQKILFKNANEKEVIAKSIGIQNLKVFEKYIVSALGEVTKAEFRQREEFKNELR

SEQ ID NO: 115 - protein, 987 aa, Campylobacter jejuni
  Campylobacter jejuni subsp. jejuni 110-21
MARILAFDIGISSIGWAFSENDELKDCGVRIFTKAENPKTGESLALPRRLARSARKRLARRKARLNHLKHLIANEFKLNYEDYQSFDESLAKAYKGSLISPYELRFRALNELLSKQDFARVILHIAKRRGYDNIKNSDNEEKSEILKAIKQNEEKLVNYQSVGEYLYKEYFQKFKENSKEFINVRNKKESYERCIAQSFLKDELKLIFQKQREFGLSFSKKFEEEVLSVAFYKRALKDFSHLVGNCSFFTDEKRAPKNSPLAFMFVALTRIINLLNNLKNTEGILYTKDDLNTLLNEVLKNGTLTYKQTKKLLGLSDDYEFKGEKGTYFIEFKKYKEFIKALGDHSLSQDDLNEIAKDITLIKDEIKLKKALAKYDLNQNQIDSLSKLEFKDHLNISFKALKLITPLMLEGKKYDEACNELNLKVVINEDKKDFLPAFNETYYKDEVTNPVVLRAIKEYRKVLNALLKKYGKVHKINIELAREVGKNHSQRAKIEKEQNENYKAKKDAELECEKLGLKINNKNILKLRLFKEQKEFCAYSGEKIKLSDLQDEKMLEIDHIYPYSRSFDDSYMNKVLVFTKQNQEKLNKTPFEAFGNDSTKWQKIEVLAKNLPTKKQKRILDKNYKDKEQKDFKDRNLNDTRYIARLVLNYTKDYLDFLPLSDDENTKLNDIQKGSKVHVEAKSGMLTSALRHTWGFSTKDRNNHLHHAIDAVIIAYANNSIVKAFSDFKKEQESNSAELYAKKISELDYKNKRKFFEPFSGFRQKVLDKIDEIFVSKPERKKPSGALHEETFRKEEEFYQSYGGKEGVLKALELGKIRKVNGKIVKNGDMFRVDIFKHKKTNKFYAVPIYTMDFALKVLPNKAVVQGKDKKSGLIKDWILMDENYEFCFSLYKDSLILIQTKDMQEPEFVYYNAFTSSTVSLIVSKHDNKFETLSKNQKILFKNANEKEVIAKSIGIQNLKVFEKYIVSALGEVTKAEFRQREDFKK

SEQ ID NO: 116 - protein, 987 aa, Campylobacter jejuni
  Campylobacter jejuni subsp. jejuni 129-258
MARILAFDIGISSIGWAFSENDELKDCGVRIFTKAENPKTGESLALPRRLARSARKRLARRKARLNHLKHLIANEFKLNYEDYQSFNESLAKAYKGSLISPYELRFRALNELLSKQDFARVILHIAKRRGYDDIKNSDDKEKGAILKVIKQNEEKLANYQSVGEYLYKEYFQKFKENSKEFTNVRNKKESYERCIAQSFLKDELKLIFQKQREFGFSFSKKFEEEVLSVAFYKRALKDFSHLVGNCSFFTDEKRAPKNSPLAFMFVALTRIINLLNNLKNTEGILYTKDDLNALLNEVLKNGTLTYKQTKKLLGLSDDYEFKGEKGTYFIEFKKYKEFIKALGDHSLSQDDLNEIAKDITLIKDEIKLKKALAKYDLNQNQIDSLSKLEFKDHLNISFKALKLITPLMLEGKKYDEACNELNLKVAINEDKKDFLPAFNETYYKDEVTNPVVLRAIKEYRKVLNALLKKYGKVHKINIELAREVGKNYSQRAKIEKEQNENYKAKKDAELECEKLGLKINSKNILKLRLFKEQKEFCAYSGEKIKISDLQDEKMLEIDHIYPYSRSFDDSYMNKVLVFTKQNQEKLNQTPFEAFGNDSAKWQKIEVLAKNLPTKKQKRILDKNYKDKEQKDFKDRNLNDTRYIARLVLNYTKDYLDFLPLSDDENTKLNDTQKGSKVHVEAKSGMLTSALRHTWGFSAKDRNNHLHHAIDAVIIAYANNSIVKAFSDFKKEQESNSAELYAKKISELDYKNKRKFFEPFSGFRQKVLDKIDEIFVSKPERKKPSGALHEETFRKEEEFYQSYGGKEGVLKALELGKIRKVNGKIVKNGDMFRVDIFKHKKTNKFYAVPIYTMDFALKVLPNKAVARSKKGEIKDWILMDENYEFCFSLYKDSLILIQTKDMQEPELVYFNAFTSSTVSLIVSKHDNKFETLSKNQKILFKNANEKEVIAKSIGIQNLKVFEKYIVSALGEVTKAEFRQREDFKNELR

SEQ ID NO: 117 - protein, 987 aa, Campylobacter jejuni
  Campylobacter jejuni subsp. jejuni 1336
MARILAFDIGISSIGWAFSENDELKDCGVRIFTKAENPKTGESLALPRRLARSARKRLARRKARLNHLKHLIANEFKLNYEDYQSFDESLAKAYKGSLISPYELRFRALNELLSKQDFARVILHIAKRRGYDDIKNNGDEEKGKILKAIKQNEEKLVSYQSVGEYLYKEYFQKFKENSKEFINVRNKKESYERCIAQSFLKDELKLIFQKQREFGFSFSKKFEEEVLSVAFYKRALKDFSHLVGNCSFLLMKKERQKNSPLAFMFVALTRIINLLNNLKNTEGILYTKDDLNTLLNEALKNGTLTYKQTKKLLGLSNDYEFKGEKGTYFIEFQKYKEFVKALGEHNLSQDDLNEIAKDITLIKDEIKLKKALAKYDLNQNQIDSLSKLEFKDHLNISFKALKLITPLMLEGKKYDEACNELNLKVAINEDKKDFLPAFNETYYKDEVTNPVVLRAIKEYRKVLNALLKKYGKVHKINIELAREVGKNHSQRAKIEKEQNENYKAKKDAELECEKLGLKINSKNILKLRLFKEQKEFCVYSGEKIKISDLQDEKMLEIDHIYPYSRSFDDSYMNKVLVFTKQNQEKLNKTPFETFGNDRVKWQKIEVLAKNLPTKKQKRILDKNYKDKEQKDFKDRNLNDTRYIARLVLNYTKDYLDFLPLSDDENTKLNDTQKGSKVHVEAKSGMLTSTLRHTWGFSTKDRNNHLHHAIDAAIIAYANNSIVKAFSDFKKEQESNTAELYAKKISELDYKNKRKFFEPFSGFRQKLLDKIDEIFVSKPERKKPSGALHEETFRKEEEFYQSYGGKEGVLKALELGKIRKVNGKMVKNGDMFRVDIFKHKKTNKFYAVPIYTMDFALKVLPNKAVVQGKDKKSGLIKDWILMDENYEFCFSLYKDSLILIQTKDMQEPELVYYERLDSSNASLTVSKHDNKFETLSKNQKILFKNANEKEVIAKSIGIQNLKVFEKYIVSALGEVTKAEFRQREDFKK

SEQ ID NO: 118 - protein, 984 aa, Campylobacter jejuni
  Campylobacter jejuni subsp. jejuni 140-16
MARILAFDIGISSIGWAFSENDELKDCGVRIFTKVENPKTGESLALPRRLARSARKRLARRKARLNHLKHLIANEFKLNYEDYQSFDESLAKAYKGSLISPYELRFRALNELLSKQDFARVILHIAKRRGYDDIKNSDDKEKGAILKAIKQNEEKLANYQSVGEYLYKEYFQKFKENSKEFTNVRNKKESYERCIAQSFLKDELKLIFKKQREFGFSFSKKFEEEVLSVAFYKRALKDFSHLVGNCSFFTDEKRAPKNSPLAFMFVALTRIINLLNNLKNTEGILYTKDDLNALLNEVLKNGTLTYKQTKKLLGLSDDYEFKGEKGTYFIEFKKYKEFIKALGEHNLSQDDLNEIAKDITLIKDEIKLKKALAKYDLNQNQIDSLSKLEFKDHLNISFKALKLITPLMLEGKKYDEACNELNLKVAINEDKKDFLPAFNETYYKDEVTNPVVLRAIKEYRKVLNALLKKYGKVHKINIELAREVGKNHSQRAKIEKEQNENYKAKKDAELECEKLGLKINSKNILKLRLFKEQKEFCAYSGEKIKISDLQDEKMLEIDHIYPYSRSFDDSYMNKVLVFTKQNQEKLNKTPFEAFGNDSAKWQKIEVLAKNLPTKKQKRILDKNYKDKEQKDFKDRNLNDTRYIARLVLNYTKDYLDFLPLSDDENTKLNDTQKGSKVHVEAKSGMLTSALRHTWGFSTKDRNNHLHHAIDAVIIAYANNSIVKAFSDFKKEQESNSAELYAKKISELDYKNKRKFFEPFSGFRQKVLDKIDEIFVSKPERKKPSGALHEETFRKEEEFYQSYGGKEGVLKALELGKIRKVNGKIVKNGDMFRVDIFKHKKTNKFYAVPIYTMDFALKVLPNKAVARSKKGEIKDWILMDENYEFCFSLYKDSLILIQTKDMQEPEFVYYNAFTSSTVSLIVSKHDNKFETLSKNQKILFKNANEKEVIAKSIGIQNLKVFEKYIVSALGEVTKAEFIQREDFKK

SEQ ID NO: 119 - protein, 984 aa, Campylobacter jejuni
  Campylobacter jejuni subsp. jejuni 1577
MARILAFDIGISSIGWAFSENDELKDCGVRIFTKVENPKTGESLALPRRLARSARKRLARRKVRLNHLKHLIANEFKLNYEDYQSFDESLAKAYKGSLISPYELRFRALNELLSKQDFARVILHIAKRRGYDDIKNSDDKEKGAILKAIKQNEEKLANYQSVGEYLYKEYFQKFKENSKEFTNVRNKKESYERCIAQSFLKDELKLIFKKQREFGFSFSKKFEEEVLSVAFYKRALKDFSHLVGNCSFFTDEKRAPKNSPLAFMFVALTRIINLLNNLKNTEGILYTKDDLNALLNEVLKNGTLTYKQTKKLLGLSDDYEFKGEKGTYFIEFKKYKEFIKALGEHNLSQDDLNEIAKDITLIKDEIKLKKALAKYDLNQNQIDSLSKLEFKDHLNISFKALKLITPLMLEGKKYDEACNELNLKVAINEDKKDFLPAFNETYYKDEVTNPVVLRAIKEYRKVLNALLKKYGKVHKINIELAREVGKNHSQRAKIEKEQNENYKAKKDAELECEKLGLKINSKNILKLRLFKEQKEFCAYSGEKIKISDLQDEKMLEIDHIYPYSRSFDDSYMNKVLVFTKQNQEKLNKTPFEAFGNDSAKWQKIEVLAKNLPTKKQKRILDKNYKDKEQKDFKDRNLNDTRYIARLVLNYTKDYLDFLPLSDDENTKLNDTQKGSKVHVEAKSGMLTSALRHTWGFSTKDRNNHLHHAIDAVIIAYANNSIVKAFSDFKKEQESNSAELYAKKISELDYKNKRKFFEPFSGFRQKVLDKIDEIFVSKPERKKPSGALHEETFRKEEEFYQSYGGKEGVLKALELGKIRKVNGKIVKNGDMFRVDIFKHKKTNKFYAVPIYTMDFALKVLPNKAVARSKKGEIKDWILMDENYEFCFSLYKDSLILIQTKDMQEPEFVYYNAFTSSTVSLIVSKHDNKFETLSKNQKILFKNANEKEVIAKSIGIQNLKVFEKYIVSALGEVTKAEFRQREDFKK

SEQ ID NO: 120 - protein, 987 aa, Campylobacter jejuni
  Campylobacter jejuni subsp. jejuni 1854
MARILAFDIGISSIGWAFSENDELKDCGVRIFTKAENPKTGESLALPRRLARSARKRLARRKARLNHLKHLIANEFKLNYEDYQSFDESLAKAYKGSLISPYELRFRALNELLSKQDFARVILHIAKRRGYDDIKNSDDKEKGAILKAIKQNEEKLANYQSVGEYLYKEYFQKFKENSKEFTNVRNKKESYERCIAQSFLKDELKLIFKKQREFGFSFSKKFEEEVLSVAFYKRALKDFSHLVGNCSFFTDEKRAPKNSPLAFMFVALTRIINLLNNLKNTEGILYTKDDLNTLLNEVLKNGTLTYKQTKKLLGLSDDYEFKGEKGTYFIEFKKYKEFIKSLGDHSLSQDDLNEIAKDITLIKDEIKLKKALAKYDLNQNQIDSLSKLEFKDHLNISFKALKLITPLMLEGKKYDEACNELNLKVAINEDKKDFLPAFNETYYKDEVTNPVVLRAIKEYRKVLNALLKKYGKVHKINIELAREVGKNHSQRAKIEKEQNENYKAKKDAELECEKLGLKINSKNILKLRLFKEQKEFCAYSGEKIKISDLQDEKMLEIDHIYPYSRSFDDSYMNKVLVFTKQNQEKLNQTPFEAFGNDSAKWQKIEVLAKNLPTKKQKRILDKNYKDKEQKNFKDRNLNDTRYIARLVLNYTKDYLDFLPLSDDENTKLNDTQKGSKVHVEAKSGMLTSALRHTWGFSAKDRNNHLHHAIDAVIIAYANNSIVKAFSDFKKEQESNSAELYAKKISELDYKNKRKFFEPFSGFRQKVLDKIDEIFVSKPERKKPSGALHEETFRKEEEFYQSYGGKEGVLKALELGKIRKVNGKIVKNGDMFRVDIFKHKKTNKFYAVPIYTMDFALKVLPNKAVARSKKGEIKDWILMDENYEFCFSLYKDSLILIQTKDMQEPEFVYYNAFTSSTVSLIVSKHDNKFETLSKNQKILFKNANEKEVIAKSIGIQNLKVFEKYIVSALGEVTKAEFRQREDFKNELR

SEQ ID NO: 121 - protein, 984 aa, Campylobacter jejuni
  Campylobacter jejuni subsp. jejuni 1997-10
MARILAFDIGISSIGWAFSENDELKDCGVRIFTKAENPKTGESLALPRRLARSARKRLARRKARLNRLKHLIANEFKLNYEDYQSFDESLAKAYKGSLISPYELRFRALNELLSKQDFARVILHIAKRRGYDDIKNSDDKEKGAILKAIKQNEEKLANYQSVGEYLYKEYFQKFKENSKEFTNVRNKKESYERCIAQSFLKDELKLIFKKQREFGFSFSKKFEEEVLSVAFYKRALKDFSHLVGNCSFFTDEKRAPKNSPLAFMFVALTRIINLLNNLKNTEGILYTKDDLNALLNEVLKNGTLTYKQTKKLLGLSDDYEFKGEKGTYFIEFKKYKEFIKALGDHSLNQDDLNEIAKDITLIKDEIKLKKALAKYDLNQNQIDSLSKLEFKDHLNISFKALKLITPLMLEGKKYDEACNELNLKVAINEDKKDFLPAFNETYYKDEVTNPVVLRAIKEYRKVLNALLKKYGKVHKINIELAREVGKNYSQRAKIEKEQNENYKAKKDAELECEKLGLKINSKNILKLRLFKEQKEFCVYSGEKIKISDLQDEKMLEIDHIYPYSRSFDDSYMNKVLVFTKQNQEKLNQTPFEAFGNDSAKWQKIEVLAKNLPTKKQKRILDKNYKDKEQKDFKDRNLNDTRYIARLVLNYTKDYLDFLPLSDDENTKLNDTQKGSKVYVEAKSGMLTSALRHTWGFSTKDRNNHLHHAIDAVIIAYANNSIVKAFSDFKKEQESNSAELYAKKISELDYKNKRKFFEPFSGFRQKVLDKIDEIFVSKPERKKPSGALHEETFRKEEEFYQSYGGKEGVLKALELGKIRKVNGKIVKNGDMFRVDIFKHKKTNKFYAVPIYTMDFALKVLPNKAVARSKKGEIKDWILMDENYEFCFSLYKDSLILIQTKDMQEPEFVYYNAFTSSTVSLIVSKHDNKFETLSKNQKILFKNANEKEVIAKSIGIQNLKVFEKYIVSALGEVTKAEFRQREDFKK

SEQ ID NO: 122 - protein, 987 aa, Campylobacter jejuni
  Campylobacter jejuni subsp. jejuni 2008-1025
MARILAFDIGISSIGWAFSENDELKDCGVRIFTKAENPKTGESLALPRRLARSARKRLARRKARLNHLKHLIANEFKLNYEDYQSFDESLAKAYKGSLISPYELRFRALNELLSKQDFARVILHIAKRRGYDDIKNNGDEEKSEILKAIKQNEEKLVNYQSVGEYLYKEYFQKFKENSKEFINVRNKKESYERCIAQSFLKDELKLIFQKQREFGFSFSKKFEEEVLSVAFYKRALKDFSHLVGNCSFFTDEKRAPKNSPLAFMFVALTRIINLLNNLKNTEGILYTKDDLNTLLNEVLKNGTLTYKQTKKLLGLSDDYEFKGEKGTYFIEFKKYKEFIKALGEHNLSQDNLNEIAKDITLIKDEIKLKKALAKYDLNQNQIDSLSKLEFKDHLNISFKALKLITPLMLEGKKYDEAYNELNLKVAINEDKKDFLPAFNETYYKDEVTNPVVLRAIKEYRKVLNALLKKYGKVHKINIELAREVGKNHSQRAKIEKEQNENYKAKKDAELECEKLGLKINSKNILKLRLFKEQKEFCAYSGEKIKISDLQDEKMLEIDHIYPYSRSFDDSYMNKVLVFTKQNQEKLNQTPFEAFGNDSAKWQKIEVLAKNLPTKKQKRILDKNYKDKEQKDFKDRNLNDTRYIARLVLNYTKDYLDFLPLSDDENTKLNDTQKGSKVHVEAKSGMLTSALRHTWGFSAKDRNNHLHHAIDAVIIAYANNSIVKAFSDFKKEQESNSAELYAKKISELDYKNKRKFFEPFSGFRQKVLDKIDEIFVSKPERKKPSGALHEETFRKEEEFYQSYGGKEGVLKALELGKIRKVNGKIVKNGDMFRVDIFKHKKTNKFYAVPIYTMDFALKVLPNKAVVQGKDKKSGLIKDWILMDENYEFCFSLYKDSLILIQTKDMQEPELVYFNAFTSSTVSLIVSKHDNKFETLSKNQKILFKNANEKEVIAKSIGIQNLKVFEKYIVSALGEVTKAEFRQREDFKK

SEQ ID NO: 123 - protein, 984 aa, Campylobacter jejuni
  Campylobacter jejuni subsp. jejuni 2008-872
MARILAFDIGISSIGWAFSENDELKDCGVRIFTKVENPKTGESLALPRRLARSARKRLARRKARLNHLKHLIANEFKLNYEDYQSFDESLAKAYKGSLISPYELRFRALNELLSKQDFARVILHIAKRRGYDDIKNSDDKEKGAILKAIKQNEEKLANYQSVGEYLYKEYFQKFKENSKEFTNVRNKKESYERCIAQSFLKDELKLIFKKQREFGFSFSKKFEEEVLSVAFYKRALKDFSHLVGNCSFFTDEKRAPKNSPLAFMFVALTRIINLLNNLKNTEGILYTKDDLNALLNEVLKNGTLTYKQTKKLLGLSDDYEFKGEKGTYFIEFKKYKEFIKALGEHNLSQDDLNEIAKDITLIKDEIKLKKALAKYDLNQNQIDSLSKLEFKDHLNISFKALKLITPLMLEGKKYDEACNELNLKVAINEDKKDFLPAFNETYYKDEVTNPVVLRAIKEYRKVLNALLKKYGKVHKINIELAREVGKNHSQRAKIEKEQNENYKAKKDAELECEKLGLKINSKNILKLRLFKEQKEFCAYSGEKIKISDLQDEKMLEIDHIYPYSRSFDDSYMNKVLVFTKQNQEKLNKTPFEAFGNDSAKWQKIEVLAKNLPTKKQKRILDKNYKDKEQKDFKDRNLNDTRYIARLVLNYTKDYLDFLPLSDDENTKLNDTQKGSKVHVEAKSGMLTSALRHTWGFSTKDRNNHLHHAIDAVIIAYANNSIVKAFSDFKKEQESNSAELYAKKISELDYKNKRKFFEPFSGFRQKVLDKIDEIFVSKPERKKPSGALHEETFRKEEEFYQSYGGKEGVLKALELGKIRKVNGKIVKNGDMFRVDIFKHKKTNKFYAVPIYTMDFALKVLPNKAVARSKKGEIKDWILMDENYEFCFSLYKDSLILIQTKDMQEPEFVYYNAFTSSTVSLIVSKHDNKFETLSKNQKILFKNANEKEVIAKSIGIQNLKVFEKYIVSALGEVTKAEFRQREDFKK

SEQ ID NO: 124 - protein, 987 aa, Campylobacter jejuni
  Campylobacter jejuni subsp. jejuni 2008-979
MARILAFDIGISSIGWAFSENDELKDCGVRIFTKAENPKTGESLALPRRLARSARKRLARRKARLNHLKHLIANEFKLNYEDYQSFDESLAKAYKGSLISPYELRFRALNELLSKQDFARVILHIAKRRGYDDIKNSDDKEKGAILKAIKQNEEKLVNYQSVGEYLYKEYFQKFKENSKEFTNVRNKKESYERCIAQSFLKDELKLIFKKQREFGFSFSKKFEEEVLSVAFYKRALKDFSHLVGNCSFFTDEKRAPKNSPLAFMFVALTRIINLLNNLKNTEGILYTKDDLNALLNEVLKNGTLTYKQTKKLLGLSDDYEFKGEKGTYFIEFKKYKEFIKALGDHSLSQDDLNEIAKDITLIKDEIKLKKALAKYDLNQNQIDSLSKLEFKDHLNISFKALKLITPLMLEGKKYDEACNELNLKVAINEDKKDFLPAFNETYYKDEVTNPVVLRAIKEYRKVLNALLKKYGKVHKINIELAREVGKNYSQRAKIEKEQNENYKAKKDAELECEKLGLKINSKNILKLRLFKEQKEFCAYSGEKIKISDLQDEKMLEIDHIYPYSRSFDDSYMNKVLVFTKQNQEKLNQTPFEAFGNDSAKWQKIEVLAKNLPTKKQKRILDKNYKDKEQKDFKDRNLNDTRYIARLVLNYTKDYLDFLPLSDDENTKLNDTQKGSKVHVEAKSGMLTSALRHTWGFSAKDRNNHLHHAIDAVIIAYANNSIVKAFSDFKKEQESNSAELYAKKISELDYKNKRKFFEPFSGFRQKVLDKIDEIFVSKPERKKPSGALHEETFRKEEEFYQSYGGKEGVLKALELGKIRKVNGKIVKNGDMFRVDIFKHKKTNKFYAVPIYTMDFALKVLPNKAVARSEKGEIKDWILMDENYEFCFSLYKDSLILIQTKDMQEPELVYFNAFTSSTVSLIVSKHDNKFETLSKNQKILFKNANEKEVIAKSIGIQNLKVFEKYIVSALGEVTKAEFRQREDFKNELR

SEQ ID NO: 125 - protein, 965 aa, Campylobacter jejuni
  Campylobacter jejuni subsp. jejuni 2008-988
MKIIGFNLGIANIGWALRENDEIIDCGVRVFDIPENPKNGNSLALERRENKARMKIVKRKKARMLATKTFLKKELNVDLSKLFLIGSTQSIYELRAKALSSLISKEELSAIILHIAKHRGYDDSALKNENGTIIEALNKNKETMLKFKSVGEYFYKNFVQNKEVKKIRNTTEDYSNSVPRSLLKQELDLILDKQKELGLIKNADFKEKLFEIIFFKRPLKDFSNKIGNCIFFENEKRAAKNTISACEFVALGKVVNLLKSIEKDIGIVYEKDSINEIMSIILDKTSISYKKIRDILNLPQEINFKGLDYSKNNVENSKLVDLKKLNEFKKALGDGFANLDKDILDSIATDITLTKDTATLKEKLKNYNVLNAEQIEKLSELVFNDHINLSLKALKQIIPLMYEGKRYDEACELCNFTIAKNQEKSEYLPLFEKTRFAKDISSPVVIRAICEFRKLLNDIIRRYGSVHKIHLELTRDFGISFSDRKKIIKEIEQNEQSRIKALETIKELKLEETSKNIQIVRLFEDQKGICPYSGLKMDLNRLDELVIDYIRPYNRSLDDSYSNKVLTFKKLSDLKQGKTPFEAFGEDEKLWAEINERIKEYNGKKRFKIFDKFFKDKKPFDFTEQTLQDTRWLTKLVASYLNEYLSFLPISEDENTALGYGEKGSKQHVILSSGMITQMLRNFWYLGFKNHKDYKNNAMDAIIVAFTTNSIIFAFNNFKKELDLAKAEFYANKISESDYLLKRKFLPPFSGFKEQALEKVKNIFVSHSLKIKNKGTLHDLTPLKIKELKNTYGDLDLAVKLGKIRKYNDKYYANANGSLVRADLFVDKKNKFHAVSIYKADFSTKKLPNKTPATTSNGETKEGIEMNENYNFCMSLYKNTPISVKIKGMKEPIICYYHGFNTSGSKITYKKHDNNYHNLSEDEMVVFRKNDKESIAVGKILEIKKYSISPSGELSLIENEERKWF

SEQ ID NO: 126 - protein, 984 aa, Campylobacter jejuni
  Campylobacter jejuni subsp. jejuni 2008-988
MARILAFDIGISSIGWAFSENDELKDCGVRIFTKVENPKTGESLALPRRLARSARKRLARRKARLNHLKHLIANEFKLNYEDYQSFDESLAKAYKGSLISPYELRFRALNELLSKQDFARVILHIAKRRGYDDIKNSDDKEKGAILKAIKQNEEKLANYQSVGEYLYKEYFQKFKENSKEFTNVRNKKESYERCIAQSFLKDELKLIFKKQREFGFSFSKKFEEEVLSVAFYKRALKDFSHLVGNCSFFTDEKRAPKNSPLAFMFVTLTRIINLLNNLKNTEGILYTKDDLNALLNEVLKNGTLTYKQTKKLLGLSDDYEFKGEKGTYFIEFKKYKEFIKALGEHNLSQDDLNEIAKDITLIKDEIKLKKALAKYDLNQNQIDSLSKLEFKDHLNISFKALKLITPLMLEGKKYDEACNELNLKVAINEDKKDFLPAFNETYYKDEVTNPVVLRAIKEYRKVLNALLKKYGKVHKINIELAREVGKNHSQRAKIEKEQNENYKAKKDAELECEKLGLKINSKNILKLRLFKEQKEFCAYSGEKIKISDLQDEKMLEIDHIYPYSRSFDDSYMNKVLVFTKQNQEKLNKTPFEAFGNDSAKWQKIEVLAKNLPTKKQKRILDKNYKDKEQKDFKDRNLNDTRYIARLVLNYTKDYLDFLPLSDDENTKLNDTQKGSKVHVEAKSGMLTSALRHTWGFSTKDRNNHLHHAIDAVIIAYANNSIVKAFSDFKKEQESNSAELYAKKISELDYKNKRKFFEPFSGFRQKVLDKIDEIFVSKPERKKPSGALHEETFRKEEEFYQSYGGKEGVLKALELGKIRKVNGKIVKNGDMFRVDIFKHKKTNKFYAVPIYTMDFALKVLPNKAVARSKKGEIKDWILMDENYEFCFSLYKDSLILIQTKDMQEPEFVYYNAFTSSTVSLIVSKHDNKFETLSKNQKILFKNANEKEVIAKSIGIQNLKVFEKYIVSALGEVTKAEFRQREDFKK

SEQ ID NO: 127 - protein, 961 aa, Campylobacter jejuni
  Campylobacter jejuni subsp. jejuni 260.94
MARILAFDIGISSIGWAFSENDELKDCGVRIFTKAENPKTGESLALPRRLARSARKRLARRKARLNHLKHLIANEFKLNYEDYQSFDESLAKAYKGSLISPYELRFRALNELLSKQDFARVILHIAKRRGYDDIKNNGDEEKGKILKAIKQNEEKLVNYQSVGEYLYKEYFQKFKENSKEFINVRNKKESYERCITQSFLKYELKLIFQKQREFGFSFSKKFEEEVLSVAFYKRALKDFSHLVGNCSFFSDEKRAPKNSPLAFMFVALTRIINLLNNLKNTEGILYTKDDLNALLNEVLKNGTLTYKQTKKLLGLSDDYEFKGEKGTYFIEFKKYKEFIKALGEHNLSQDDLNEIAKDITLIKDEIKLKKALAKYDLNQNQIDSLSKLEFKDHLNIGFKALKLITPLMLEGKKYDEACNELNLKVAINEDKKDFLPAFNETYYKDEVTNPVVLRAIKEYRKVLNALLKKYGKVHKINIELAREVGKNHSQRAKIEKEQNENYKAKKDAELECEKLGLKINSKNILKLRLFKEQKEFCAYSGEKIKLSDLQDEKMLEIDHIYPYSRSFDDSYMNKVLVFTKQNQEKLNKTPFEAFGNDNVKWQKIEVLAKNLPEKKQKRILDKNYKDKEQKDFKDRNLNDTRYIARLVLNYTKDYLDFLPLSDDENTKLKGSKVHVEAKSGMLTSALRHTWGFSTKDRNNHLHHAIDAAIIAYANNSIVKDFSDFKKEQESNSAELYAKKISELDYKNKRKFFEPFSGFRQKVLDKIDEIFVSKPERKKPSGALHEETFRKEEEFYQSYGGKEGVLKALELGKIRKVNGKIVKNGDMFRVDIFKHKKTNKFYAVPIYTMDFALKVLPNKAVARSKKGEIKDWILMDENYEFCFSLYKDSLILIQTKDMQEPELVYFNAFTSSTVSLIVSKHDNKFETLSKNLKVFEKYIVSALGEVTKAEFRQREDFKNELR

SEQ ID NO: 128 - protein, 985 aa, Campylobacter jejuni
  Campylobacter jejuni subsp. jejuni 414
MAKILAFDIGISSIGWAFVENDELKDCGVRIFTKAENPKTGESLALPRRLARSARKRLARRKARLNHLKHLIANEFKLNYEDYQSFDESLAKAYKGTLISPYELRFKALNELLSKQDLARVILHIAKRRGYDNIKNSDDKEKGAILKAVKENEEKLANYKSVGEYLYKEYFQKFKENSKEFINVRNKKESYERCIAQSFLKDELKLIFQKQREFGFNFSKKFEEEVLSVAFYKRALKDFSHLVGNCSFFVDEKRAPKNSPLAFEFVALTRIVNLLNNLNKNNSYIKDDLNALLSEVLKNGTLTYKQTKKILGLSDDYEFKGQKGNYFIEFKKYKEFIKALCEHNLNQDDLNEIAKDITLVKDETKLKKALAKYDLNQNQIENLSKIEFKDHLNISFKALKLIVPLMREGKKYDEVCNELNLKTAINEDKKEFLPAFNETYYKDEVNNPVVLRAIKEYRKVLNSLLKKYGKVHKINIELAREVGKNHRERSKIEKEQNENFKAKKDAELECEKLGLKINSKNILKLRLFKEQKEFCVYSGEKIKISDLQDEKMLEIDHIYPYSRSFDDSYMNKVLVFTKQNQEKLNKTPFEAFGKDDVKWQKIETLAKNLPAKKQKRILDKNYKDKEQKDFKDRNLNDTRYIARLVLNYTKDYLEFLPLSDDENIKLNDTQKGSKVHVEAKSGMLTSVLRHTWGFSTKDRNNHLHHAIDAVIIAYANASVVKAFSDFKKEQENYTAELYAKKINELDFKNKRKFFEPFSNFRQKVLEKIDEIFVSKPERKKPSGALHEETFYKEEEFYKEYGGKEGVLKALELGKIRKVNGKIVSNANMFRVDIFKYKKTNKFYAVPIYTMDFALGILPNKAVVGGKDKQGIIKDWLLMDENYEFCFSLYKDSLILLQTKDMQEPELVYFKSFKSSTAGLVVSKHDNKFENLNENQKKLFKSANEKKVVAEGIGIQNLKVFEKYIVSALGEITKAEIKERENFKKK

SEQ ID NO: 129 - protein, 984 aa, Campylobacter jejuni
  Campylobacter jejuni subsp. jejuni 51037
MARILAFDIGISSIGWAFSENDELKDCGVRIFTKAENPKTGESLALPRRLARSARKRLARRKARLNHLKHLIANEFKLNYEDYQSFDESLAKAYKGSLISPYELRFRALNELLSKQDFARVILHIVKRRGYDDIKNSDDKEKGTILKAIKQNEEKLANYQSVGEYLYKEYFQKFKENSKEFTNVRNKKESYERCIAQSFLKDELKLIFKKQREFGFSFSKKFEEEVLSVAFYKRALKDFSHLVGNCSFFTDEKRAPKNSPLAFMFVALTRIINLLNNLKNTEGILYTKDDLNTLLNEVLKNGTLTYKQTKKLLGLSDDYEFKGEKGTYFIEFKKYKEFIKALGEHNLSQDDLNEIAKDITLIKDEIKLKKALAKYDLNQNQIDSLSKLEFKDHLNISFKALKLITPLMLEGKKYDEACNELNLKVAINEDKKDFLPAFNETYYKDEVTNPVVLRAIKEYRKVLNALLKKYGKVHKINIELAREVGKNYSQRAKIEKEQNENYKAKKDAELECEKLGLKINSKNILKLRLFKEQKEFCAYSGEKIKISDLQDEKMLEIDHIYPYSRSFDDSYMNKVLVFTKQNQEKLNQTPFEAFGNDSAKWQKIEVLAKNLPTKKQKRILDKNYKDKEQKDFKDRNLNDTRYIARLVLNYTKDYLDFLPLSDDENTKLNDTQKGSKVHVEAKSGMLTSALRHTWGFSAKDRNNHLHHAIDAVIIAYANNSIVKAFSDFKKEQESNSAELYAKKISELDYKNKRKFFEPFSGFRQKVLDKIDEIFVSKPERKKPSGALHEETFRKEEEFYQSYGGKEGVLKALELGKIRKVNGKIVKNGDMFRVDIFKHKKTNKFYAVPIYTMDFALKVLPNKAVARSKKGEIKDWILMDENYEFCFSLYKDSLILIQTKDMQEPEFVYYNAFTSSTVSLIVSKHDNKFETLSKNQKILFKNANEKEVIAKSIGIQNLKVFEKYIVSALGEVTKAEFRQREDFKK

SEQ ID NO: 130 - protein, 984 aa, Campylobacter jejuni
  Campylobacter jejuni subsp. jejuni 51494
MARILAFDIGISSIGWAFSENDELKDCGVRIFTKAENPKTGESLALPRRLARSARKRLARRKARLNHLKHLIANEFKLNYEDYQSFDESLAKAYKGSLISPYELRFRALNELLSKQDFARVILHIAKRRGYDDIKNSDDKEKGAILKAIKQNEEKLANYQSVGEYLYKEYFQKFKENSKEFTNVRNKKESYERCIAQSFLKDELKLIFKKQREFGFSFSKKFEEEVLSVAFYKRALKDFSHLVGNCSFFTDEKRAPKNSPLAFMFVALTRIINLLNNLKNTEGILYTKDDLNTLLNEVLKNGTLTYKQTKKLLGLSDDYEFKGEKGTYFIEFKKYKEFIKALGEHNLSQDDLNEIAKDITLIKDEIKLKKALAKYDLNQNQIDSLSKLEFKDHLNISFKALKLITPLMLEGKKYDEACNELNLKVAINEDKKDFLPAFNETYYKDEVTNPVVLRAIKEYRKVLNALLKKYGKVHKINIELAREVGKNYSQRAKIEKEQNENYKAKKDAELECEKLGLKINSKNILKLRLFKEQKEFCAYSGEKIKISDLQDEKMLEIDHIYPYSRSFDDSYMNKVLVFTKQNQEKLNKTPFEAFGNDSTKWQKIEVLAKNLPEKKQKRILDKNYKDKEQKDFKDRNLNDTRYIARLVLNYTKDYLDFLPLSDDENTKLNDTQKGLKVHVEAKSGMLTSALRHTWGFSAKDRNNHLHHAIDAVIIAYANNSIVKAFSDFKKEQESNSAELYAKKISELDYKNKRKFFEPFSGFRQKVLDKIDEIFVSKPERKKPSGALHEETFRKEEEFYQSYGGKEGVLKALELGKIRKVNGKIVKNGDMFRVDIFKHKKTNKFYAVPIYTMDFALKVLPNKAVARSKKGEIKDWILMDENYEFCFSLYKDSLILIQTKDMQEPEFVYYNAFTSSTVSLIVSKHDNKFETLSKNQKILFKNANEKEVIAKSIGIQNLKVFEKYIVSALGEVTKAEFRQREDFKK

SEQ ID NO: 131 - protein, 987 aa, Campylobacter jejuni
  Campylobacter jejuni subsp. jejuni 53161
MARILAFDIGISSIGWAFSENDELKDCGVRIFTKAENPKTGESLALPRRLARSARKRLARRKARLNHLKHLIANEFKLNYEDYQSFDEGLAKAYKGSLISPYELRFRALNELLSKQDFARVILHIAKRRGYDDIKNNGDEEKSEILKAIKQNEEKLVNYQSVGEYLYKEYFQKFKENSKEFINVRNKKESYERCIAQSFLKDELKLIFQKQREFGFSFSKKFEEEVLSVAFYKRALKDFSHLVGNCSFFTDEKRAPKNSPLAFMFVALTRIINLLNNLKNTEGILYTKDDLNTLLNEVLKNGTLTYKQTKKLLGLSDDYEFKGEKGTYFIEFKKYKEFIKALGEHNLSQDNLNEIAKDITLIKDEIKLKKALAKYDLNQNQIDSLSKLEFKDHLNISFKALKLITPLMLEGKKYDEAYNELNLKVAINEDKKDFLPAFNETYYKDEVTNPVVLRAIKEYRKVLNALLKKYGKVHKINIELAREVGKNHSQRAKIEKEQNENYKAKKDAELECEKLGLKINSKNILKLRLFKEQKEFCAYSGEKIKISDLQDEKMLEIDHIYPYSRSFDDSYMNKVLVFTKQNQEKLNQTPFEAFGNDSAKWQKIEVLAKNLPTKKQKRILDKNYKDKEQKDFKDRNLNDTRYIARLVLNYTKDYLDFLPLSDDENTKLNDTQKGSKVHVEAKSGMLTSALRHTWGFSAKDRNNHLHHAIDAVIIAYANNSIVKAFSDFKKEQESNSAELYAKKISELDYKNKRKFFEPFSGFRQKVLDKIDEIFVSKPERKKPSGALHEETFRKEEEFYQSYGGKEGVLKALELGKIRKVNGKIVKNGDMFRVDIFKHKKTNKFYAVPIYTMDFALKVLPNKAVVQGKDKKSGLIKDWILMDENYEFCFSLYKDSLILIQTKDMQEPELVYFNAFTSSTVSLIVSKHDNKFETLSKNQKILFKNANEKEVIAKSIGIQNLKVFEKYIVSALGEVTKAEFRQREDFKK

SEQ ID NO: 132 - protein, 984 aa, Campylobacter jejuni
  Campylobacter jejuni subsp. jejuni 60004
MARILAFDIGISSIGWAFSENDELKDCGVRIFTKAENPKTGESLALPRRLARSARKRLARRKARLNHLKHLIANEFKLNYEDYQSFDESLAKAYKGSLISPYELRFRALNELLSKQDFARVILHIAKRRGYDDIKNNGDEEKGKILKAIKQNEEKLVNYQSVGEYLYKEYFQKFKENSKEFINVRNKKESYERCITQSFLKYELKLIFQKQREFGFSFSKKFEEEVLSVAFYKRALKDFSHLVGNCSFFTDEKRAPKNSPLAFMFVALTRIINILNNLKNTEGILYTKDDLNALLNEVLKNGTLTYKQTKKLLGLSDDYEFKGEKGTYFIEFKKYKEFIKALGEHNLSQDDLNEIAKDITLIKDEIKLKKALAKYDLNQNQIDSLSKLEFKDHLNISFKALKLITPLMLEGKKYDEACNELNLKVAINEDKKDFLPAFNETYYKDEVTNPVVLRAIKEYRKILNALLKKYGKVHKINIELAREVGKNHSQRAKIEKEQNENYKAKKDAEIECEKLGLKINSKNILKLRLFKEQKEFCAYSGEKIKISDLQDEKMLEIDHIYPYSRSFDDSYMNKVLVFTKQNQEKLNQTPFEAFGNDSAKWQKIEVLAKNLPTKKQKRILDKNYKDKEQKDFKDRNLNDTRYIARLVLNYTKDYLDFLPLSDDENTKLNDTQKGSKVHVEAKSGMLTSALRHTWGFSAKDRNNHLHHAIDAVIIAYANNSIVKAFSDFKKEQESNSAELYAKKISELDYKNKRKFFEPFSGFRQKVLDKIDEIFVSKPERKKPSGALHEETFRKEEEFYQSYGGKEGVLKALELGKIRKVNGKIVKNGDMFRVDIFKHKKTNKFYAVPIYTMDFALKVLPNKAVARSKKGEIKDWILMDENYEFCFSLYKDSLILIQTKDMQEPEFVYYNAFTSSTVSLIVSKHDNKFETLSKNQKILFKNANEKEVIAKSIGIQNLKVFEKYIVSALGEVTKAEFRQREDFKK

SEQ ID NO: 133 - protein, 984 aa, Campylobacter jejuni
MARILAFDIGISSIGWAFSENDELKDCGVRIFTKAENPKTGESLALPRRLARSARKRLARRKARLNHLKHLIANEFKLNYEDYQSFDESLAKAYKGSLISPYELRFRALNELLSKQDFARVILHIAKRRGYDDIKNNGDEEKSEILKAIKQNEEKLVNYQSVGEYLYKEYFQKFKENSKEFINVRNKKESYERCITQSFLKDELKLIFQKQREFGFSFSKKFEEEVLSVAFYKRALKDFSHLVGNCSFFTDEKRAPKNSPLAFMFVALTRIINILNNLKNTEGILYTKDDLNALLNEVLKNGTLTYKQTKKLLGLSDDYEFKGEKGTYFIEFKKYKEFIKALGEHNLSQDDLNEIAKDITLIKDEIKLKKALAKYDLNQNQIDSLSKLEFKDHLNISFKALKLITPLMLEGKKYDEACNELNLKVAINEDKKDFLPAFNETYYKDEVTNPVVLRAIKEYRKILNALLKKYGKVHKINIELAREVGKNHSQRAKIEKEQNENYKAKKDAEIECEKLGLKINSKNILKLRLFKEQKEFCAYSGEKIKLSDLQDEKMLEIDHIYPYSRSFDDSYMNKVLVFTKQNQEKLNKTPFEAFGNDSTKWQKIEVLAKNLPEKKQKRILDKNYKDKEQKDFKDRNLNDTRYIARLVLNYTKDYLDFLPLSDDENTKLNDTQKGSKVHVEAKSGMLTSALRHTWGFSAKDRNNHLHHAIDAAIIAYANNSIVKAFSDFKKEQESNSVELYAKKISELDYKNKRKFFEPFSGFRQKVLDKIDEIFVSKPERKKPSGALHEETFRKEEEFYQSYGGKEGVLKALELGKIRKVNGKIVKNGDMFRVDIFKHKKTNKFYAVPIYTMDFALKVLPNKAVARSKKGEIKDWILMDENYEFCFSLYKDSLILIQTKDMQEPELVYFNAFTSSTVSLIVSKHDNKFETLSKNQKILFKNANEKEVIAKSIGIQNLKVFEKYIVSALGEVTKAEFRQREDFKK

SEQ ID NO: 134 - protein, 984 aa, Campylobacter jejuni
  Campylobacter jejuni subsp. jejuni 84-25
MVRILAFDIGISSIGWAFSENDELKDCGVRIFTKVENPKTGESLALPRRLARSARKRLARRKARLNHLKHLIANEFKLNYEDYQSFDESLAKAYKGSLISPYELRFRALNELLSKQDFARVILHIAKRRGYDDIKNSDDKEKGAILKAIKQNEEKLANYQSVGEYLYKEYFQKFKENSKEFTNVRNKKESYERCIAQSFLKDELKLIFKKQREFGFSFSKKFEEEVLSVAFYKRALKDFSHLVGNCSFFTDEKRAPKNSPLAFMFVALTRIINLLNNLKNTEGILYTKDDLNALLNEVLKNGTLTYKQTKKLLGLSDDYEFKGEKGTYFIEFKKYKEFIKALGEHNLSQDDLNEIAKDITLIKDEIKLKKALAKYDLNQNQIDSLSKLEFKDHLNISFKALKLITPLMLEGKKYDEACNELNLKVAINEDKKDFLPAFNETYYKDEVTNPVVLRAIKEYRKVLNALLKKYGKVHKINIELAREVGKNHSQRAKIEKEQNENYKAKKDAELECEKLGLKINSKNILKLRLFKEQKEFCAYSGEKIKISDLQDEKMLEIDHIYPYSRSFDDSYMNKVLVFTKQNQEKLNKTPFEAFGNDSAKWQKIEVLAKNLPTKKQKRILDKNYKDKEQKDFKDRNLNDTRYIARLVLNYTKDYLDFLPLSDDENTKLNDTQKGSKVHVEAKSGMLTSALRHTWGFSTKDRNNHLHHAIDAVIIAYANNSIVKAFSDFKKEQESNSAELYAKKISELDYKNKRKFFEPFSGFRQKVLDKIDEIFVSKPERKKPSGALHEETFRKEEEFYQSYGGKEGVLKALELGKIRKVNGKIVKNGDMFRVDIFKHKKTNKFYAVPIYTMDFALKVLPNKAVARSKKGEIKDWILMDENYEFCFSLYKDSLILIQTKDMQEPEFVYYNAFTSSTVSLIVSKHDNKFETLSKNQKILFKNANEKEVIAKSIGIQNLKVFEKYIVSALGEVTKAEFRQREDFKK

SEQ ID NO: 135 - protein, 984 aa, Campylobacter jejuni
  Campylobacter jejuni subsp. jejuni 87459
MARILAFDIGISSIGWAFSENDELKDCGVRIFTKAENPKTGESLALPRRLARSARKRLARRKARLNHLKHLIANEFKLNYEDYQSFDESLAKAYKGSLISPYELRFRALNELLSKQDFARVILHIAKRRGYDDIKNSDDKEKGAILKAIKQNEEKLANYQSVGEYLYKEYFQKFKENSKEFTNVRNKKESYERCIAQSFLKDELKLIFKKQREFGFSFSKKFEEEVLSVAFYKRALKDFSHLVGNCSFFTDEKRAPKNSPLAFMFVALTRIINLLNNLKNTEGILYTKDDLNTFLNEVLKNGTLTYKQTKKLLGLSDDYEFKGEKGTYFIEFKKYKEFIKALGDHNLSQDDLNEIAKDITLIKDEIKLKKALAKYDLNQNQIDSLSKLEFKDHLNISFKALKLITPLMLEGKKYDEACNELNLKVAINEDKKDFLPAFNETYYKDEVTNPVVLRAIKEYRKVLNALLKKYGKVHKINIELAREVGKNHSQRAKIEKEQNENYKAKKDAELECEKLGLKINSKNILKLRLFKEQKEFCAYSGEKIKISDLQDEKMLEIDHIYPYSRSFDDSYMNKVLVFTKQNQEKLNKTPFEAFGNDSAKWQKIEVLAKNLPTKKQKRILDKNYKDKEQKDFKDRNLNDTRYIARLVLNYTKDYLDFLPLSDDENTKLNDTQKGSKVHVEAKSGMLTSALRHTWGFSTKDRNNHLHHAIDAVIIAYANNSIVKAFSDFKKEQESNSAELYAKKISELDYKNKRKFFEPFSGFRQKVLDKIDEIFVSKPERKKPSGALHEETFRKEEEFYQSYGGKEGVLKALELGKIRKVNGKIVKNGDMFRVDIFKHKKTNKFYAVPIYTMDFALKVLPNKAVARSKKGEIKDWILMDENYEFCFSLYKDSLILIQTKDMQEPEFVYYNAFTSSTVSLIVSKHDNKFETLSKNQKILFKNANEKEVIAKSIGIQNLKVFEKYIVSALGEVTKAEFRQREDFKK

SEQ ID NO: 136 - protein, 984 aa, Campylobacter jejuni
  Campylobacter jejuni subsp. jejuni ATCC 33560
MARILAFDIGISSIGWAFSENDELKDCGVRIFTKAENPKTGESLALPRRLARSARKRLARRKARLNHLKHLIANEFKLNYEDYQSFDESLAKAYKGSLISPYELRFRALNELLSKQDFARVILHIAKRRGYDDIKNSDDKEKGAILKAIKQNEEKLANYQSVGEYLYKEYFQKFKENSKEFTNVRNKKESYERCIAQSFLKDELKLIFKKQREFGFSFSKKFEEEVLSVAFYKRALKDFSHLVGNCSFFTDEKRAPKNSPLAFMFVALTRIINLLNNLKNTEGILYTKDDLNALLNEVLKNGTLTYKQTKKLLGLSDDYEFKGEKGTYFIEFKKYKEFIKALGDHSLSQDDLNEIAKDITLIKDEIKLKKALAKYDLNQNQIDSLSKLEFKDHLNISFKALKLITPLMLEGKKYDEACNELNLKVAINEDKKDFLPAFNETYYKDEVTNPVVLRAIKEYRKVLNALLKKYGKVHKINIELAREVGKNYSQRAKIEKEQNENYKAKKDAELECEKLGLKINSKNILKLRLFKEQKEFCAYSGEKIKISDLQDEKMLEIDHIYPYSRSFDDSYMNKVLVFTKQNQEKLNQTPFEAFGNDSAKWQKIEVLAKNLPTKKQKRILDKNYKDKEQKNFKDRNLNDTRYIARLVLNYTKDYLDFLPLSDDENTKLNDTQKGSKVHVEAKSGMLTSALRHTWGFSAKDRNNHLHHTIDAVIIAYANNSIVKAFSDFKKEQESNSAELYAKKISELDYKNKRKFFEPFSGFRQKVLDKIDEIFVSKPERKKPSGALHEETFRKEEEFYQSYGGKEGVLKALELGKIRKVNGKIVKNGDMFRVDIFKHKKTNKFYAVPIYTMDFALKVLPNKAVARSKKGEIKDWILMDENYEFCFSLYKDSLILIQTKDMQEPEFVYYNAFTSSTVSLIVSKHDNKFETLSKNQKILFKNANEKEVIAKSIGIQNLKVFEKYIVSALGEVTKAEFRQREDFKK

SEQ ID NO: 137 - protein, 987 aa, Campylobacter jejuni
  Campylobacter jejuni subsp. jejuni CF93-6
MARILAFDIGISSIGWAFSENDELKDCGVRIFTKVENPKTGESLALPRRLARSARKRLARRKARLNHLKHLIANEFKLNYEDYQSFDESLAKAYKGSLISPYELRFRALNELLSKQDFARVILHIAKRRGYDDIKNSDDKEKGAILKAIKQNEEKLANYQSVGEYLYKEYFQKFKENSKEFTNVRNKKESYERCIAQSFLKDELKLIFKKQREFGFSFSKKFEEEVLSVAFYKRALKDFSHLVGNCSFFTDEKRVPKNSPLAFMFVALTRIINLLNNLKNTEGILYTKDDLNALLNEVLKNGTLTYKQTKKLLGLSDDYEFKGEKGTYFIEFKKYKEFIKALGEHNLSQDDLNEIAKDITLIKDEIKLKKALAKYDLNQNQIDSLSKLEFKDHLNISFKALKLITPLMLEGKKYDEACNELNLKVAINEDKKDFLPAFNETYYKDEVTNPVVLRAIKEYRKVLNALLKKYGKVHKINIELAREVGKNHSQRAKIEKEQNENYKAKKDAELECEKLGLKINSKNILKLRLFKEQKEFCAYSGEKIKISDLQDEKMLEIDHIYPYSRSFDDSYMNKVLVFTKQNQEKLNQTPFEAFGNDSAKWQKIEVLAKNLPTKKQKRILDKNYKDKEQKNFKDRNLNDTRYIARLVLNYTKDYLDFLPLSDDENTKLNDTQKGSKVHVEAKSGMLTSALRHTWGFSAKDRNNHLHHAIDAVIIAYANNSIVKAFSDFKKEQESNSAELYAKKISELDYKNKRKFFEPFSGFRQKVLDKIDEIFVSKPERKKPSGALHEETFRKEEEFYQSYGGKEGVLKALELGKIRKVNGKIVKNGDMFRVDIFKHKKTNKFYGVPIYTMDFALKVLPNKAVARSKKGEIKDWILMDENYEFCFSLYKDSLILIQTKDMQEPEFVYYNAFTSSTVSLIVSKHDNKFETLSKNQKILFKNANEKEVIAKSIGIQNLKVFEKYIVSALGEVTKAEFRQREDFKNELR

SEQ ID NO: 138 - protein, 984 aa, Campylobacter jejuni
  Campylobacter jejuni subsp. jejuni CG8486
MARILAFDIGISSIGWAFSENDELKDCGVRIFTKAENPKTGESLALPRRLARSARKRLARRKARLNHLKHLIANEFKLNYEDYQSFDESLAKAYKGSLISPYELRFRALNELLSKQDFARVILHIAKRRGYDDIKNSDDKEKGAILKAIKQNEEKLANYQSVGEYLYKEYFQKFKENSKEFTNVRNKKESYERCIAQSFLKDELKLIFKKQREFGFSFSKKFEEEVLSVAFYKRALKDFSHLVGNCSFFTDEKRAPKNSPLAFMFVALTRIINLLNNLKNTEGILYTKDDLNALLNEVLKNGTLTYKQTKKLLGLSDDYEFKGEKGTYFIEFKKYKEFIKALGDHSLSQDDLNEIAKDITLIKDEIKLKKALAKYDLNQNQIDSLSKLEFKDHLNISFKALKLITPLMLEGKKYDEACNELNLKVAINEDKKDFLPAFNETYYKDEVTNPVVLRAIKEYRKVLNALLKKYGKVHKINIELAREVGKNYSQRAKIEKEQNENYKAKKDAELECEKLGLKINSKNILKLRLFKEQKEFCAYSGEKIKISDLQDEKMLEIDHIYPYSRSFDDSYMNKVLVFTKQNQEKLNQTPFEAFGNDSAKWQKIEVLAKNLPTKKQKRILDKNYKDKEQKDFKDRNLNDTRYIARLVLNYTKDYLDFLPLSDDENTKLNDTQKGSKVHVEAKSGMLTSALRHTWGFSAKDRNNHLHHAIDAVIIAYANNSIVKAFSDFKKEQESNSAELYAKKISELDYKNKRKFFEPFSGFRQKVLDKIDEIFVSKPERKKPSGALHEETFRKEEEFYQSYGGKEGVLKALELGKIRKVNGKIVKNGDMFRVDIFKHKKTNKFYAVPIYTMDFALKVLPNKAVARSKKGEIKDWILMDENYEFCFSLYKDSLILIQTKDMQEPEFVYYNAFTSSTVSLIVSKHDNKFETLSKNQKILFKNANEKEVIAKSIGIQNLKVFEKYIVSALGEVTKAEFRQREDFKK

SEQ ID NO: 139 - protein, 984 aa, Campylobacter jejuni
  Campylobacter jejuni subsp. jejuni HB93-13
MARILAFDIGISSIGWAFSENDELKDCGVRIFTKVENPKTGESLALPRRLARSARKRLARRKARLNHLKHLIANEFKLNYEDYQSFDESLAKAYKGSLISPYELRFRALNELLSKQDFARVILHIAKRRGYDDIKNSDDKEKGAILKAIKQNEEKLANYQSVGEYLYKEYFQKFKENSKEFTNVRNKKESYERCIAQSFLKDELKLIFKKQREFGFSFLKKFEEEVLSVAFYKRALKDFSHLVGNCSFFTDEKRAPKNSPLAFMFVALTRIINLLNNLKNTEGILYTKDDLNALLNEVLKNGTLTYKQTKKLLGLSDDYEFKGEKGTYFIEFKKYKEFIKALGEHNLSQDDLNEIAKDITLIKDEIKLKKALAKYDLNQNQIDSLSKLEFKDHLNISFKALKLITPLMLEGKKYDEAYNELNLKVAINEDKKDFLPAFNETYYKDEVTNPVVLRAIKEYRKVLNALLKKYGKVHKINIELAREVGKNHSQRAKIEKEQNENYKAKKDAELECEKLGLKINSKNILKLRLFKEQKEFCAYSGEKIKISDLQDEKMLEIDHIYPYSRSFDDSYMNKVLVFTKQNQEKLNQTPFEAFGNDSAKWQKIEVLAKNLPTKKQKRILDKNYKDKEQKDFKDRNLNDTRYIARLVLNYTKDYLDFLPLSDDENTKLNDTQKGSKVHVEAKSGMLTSALRHTWGFSAKDRNNHLHHAIDAVIIAYANNSIVKAFSDFKKEQESNSAELYAKKISELDYKNKRKFFEPFSGFRQKVLDKIDEIFVSKPERKKPSGALHEETFRKEEEFYQSYGGKEGVLKALELGKIRKVNGKIVKNGDMFRVDIFKHKKTNKFYAVPIYTMDFALKVLPNKAVARSKKGEIKDWILMDENYEFCFSLYKDSLILIQTKDMQEPELVYFNAFTSSTVSLIVSKHDNKFETLSKNQKILFKNANEKEVIAKSIGIQNLKVFEKYIVSALGEVTKAEFRQREDFKK

SEQ ID NO: 140 - protein, 987 aa, Campylobacter jejuni
  Campylobacter jejuni subsp. jejuni LMG 23210
MARILAFDIGISSIGWAFSENDELKDCGVRIFTKAENPKTGESLALPRRLARSARKRLARRKARLNHLKHLIANEFKLNYEDYQSFDESLAKAYKGSLISPYELRFRALNELLSKQDFARVILHIAKRRGYDDIKNSDDKEKGAILKAIKQNEEKLANYQSVGEYLYKEYFQKFKENSKEFTNVRNKKESYERCIAQSFLKDELKLIFKKQREFGFSFSKKFEEEVLSVAFYKRALKDFSHLVGNCSFFTDEKRAPKNSPLAFMFVALTRIINLLNNLKNTEGILYTKDDLNALLNEVLKNGTLTYKQTKKLLGLSDDYEFKGEKGTYFIEFKKYKEFIKALGDHSLSQDDLNEIAKDITLIKDEIKLKKALVKYDLNQNQIDSLSKLEFKDHLNISFKALKLITPLMLEGKKYDEACNELNLKVAINEDKKDFLPAFNETYYKDEVTNPVVLRAIKEYRKVLNALLKKYGKVHKINIELAREVGKNYSQRAKIEKEQNENYKAKKDAELECEKLGLKINSKNILKLRLFKEQKEFCAYSGEKIKISDLQDEKMLEIDHIYPYSRSFDDSYMNKVLVFTKQNQEKLNQTPFEAFGNDSAKWQKIEVLAKNLPTKKQKRILDKNYKDKEQKDFKDRNLNDTRYIARLVLNYTKDYLDFLPLSDDENTKLNDTQKGSKVHVEAKSGMLTSALRHTWGFSAKDRNNHLHHAIDAVIIAYANNSIVKAFSDFKKEQESNSAELYAKKISELDYKNKRKFFEPFSGFRQKVLDKIDEIFVSKPERKKPSGALHEETFRKEEEFYQSYGGKEGVLKALELGKIRKVNGKIVKNGDMFRVDIFKHKKTNKFYAVPIYTMDFALKVLPNKAVARSKKGEIKDWILMDENYEFCFSLYKDSLILIQTKDMQEPELVYFNAFTSSTVSLIVSKHDNKFETLSKNQKILFKNANEKEVIAKSIGIQNLKVFEKYIVSALGEVTKAEFRQREDFKNELR

SEQ ID NO: 141 - protein, 984 aa, Campylobacter jejuni
  Campylobacter jejuni subsp. jejuni LMG 23211
MARILAFDIGISSIGWAFSENDELKDCGVRIFTKAENPKTGESLALPRRLARSARKRLARRKARLNHLKHLIANEFKLNYEDYQSFDESLAKAYKGSLISPYELRFRALNELLSKQDFARVILHIAKRRGYDDIKNNGDEEKSEILKAIKQNEEKLVNYQSVGEYLYKEYFQKFKENSKEFINVRNKKESYERCITQSFLKDELKLIFQKQREFGFSFSKKFEEEVLSVAFYKRALKDFSHLVGNCSFFTDEKRAPKNSPLAFMFVALTRIINLLNNLKNTEGILYTKDDLNALLNEVLKNGTLTYKQTKKLLGLSDDYEFKGEKGTYFIEFKKYKEFIKALDEHSLSQDDLNEIAKDITLIKDEIKLKKALAKYDLNQNQIDSLSKLEFKDHLNISFKALKLITPLMLEGKKYDEACNELNLKVAINEDKKDFLPAFNETYYKDEVTNPVVLRAIKEYRKILNALLKKYGKVHKINIELAREVGKNHSQRAKIEKEQNENYKAKKDAEIECEKLGLKINSKNILKLRLFKEQKEFCAYSGEKIKISDLQDEKMLEIDHIYPYSRSFDDSYMNKVLVFTKQNQEKLNKTPFEAFGNDGVKWQKIEVLAKNLPEKKQKRILDKNYKDKEQKDFKDRNLNDTRYIARLVLNYTKDYLDFLPLSDDENTKLNDTQKGSKVHVEAKSGMLTSALRHTWGFSTKDRNNHLHHAIDAAIIAYANNSIVKAFSDFKKEQESNSAELYAKKISELDYKNKRKFFEPFSGFRQKVLDKIDEIFVSKPERKKPSGALHEETFRKEEEFYQSYGGKEGVLKALELGKIRKVNGKIVKNGDMFRVDIFKHKKTNKFYAVPIYTMDFALKVLPNKAVARSKKGEIKDWILMDENYEFCFSLYKDSLILIQTKDMQEPELVYFNAFTSSTVSLVVSKHDNKFETLSKNQKILFKNANEKEVIAKSIGIQNLKVFEKYIVSALGEVTKAEFRQREDFKK

SEQ ID NO: 142 - protein, 984 aa, Campylobacter jejuni
  Campylobacter jejuni subsp. jejuni LMG 23263
MARILAFDIGISSIGWAFSENDELKDCGVRIFTKAENPKTGESLALPRRLARSARKRLARRKARLNHLKHLIANEFKLNYEDYQSFDESLAKAYKGSLISPYELRFRALNELLSKQDFARVILHIVKRRGYDDIKNSDDKEKGAILKAIKQNEEKLANYQSVGEYLYKEYFQKFKENSKEFTNVRNKKESYERCIAQSFLKDELKLIFKKQREFGFSFSKKFEEEVLSVAFYKRALKDFSHLVGNCSFFTDEKRAPKNSPLAFMFVALTRIINLLNNLKNTEGILYTKDDLNTLLNEVLKNGTLTYKQTKKLLGLSDDYEFKGEKGTYFIEFKKYKEFIKALGDHSLSQDDLNEIAKDITLIKDEIKLKKALAKYDLNQNQIDSLSKLEFKDHLNISFKALKLITPLMLEGKKYDEACNELNLKVAINEDKKDFLPAFNETYYKDEVTNPVVLRAIKEYRKVLNALLKKYGKVHKINIELAREVGKNHSQRAKIEKEQNENYKAKKDAEFECEKLGLKINSKNILKLRLFKEQKEFCAYSGEKIKISDLQDEKMLEIDHIYPYSRSFDDSYMNKVLVFTKQNQEKLNKTPFEAFGNDSAKWQKIEVLAKNLPTKKQKRILDKNYKDKEQKDFKDRNLNDTRYIARLVLNYTKDYLDFLPLSDDENTKLNDTQKGSKVHVEAKSGMLTSALRHTWGFSTKDRNNHLHHAIDAVIIAYANNSIVKAFSDFKKEQESNSAELYAKKISELDYKNKRKFFEPFSGFRQKVLDKIDEIFVSKPERKKPSGALHEETFRKEEEFYQSYGGKEGVLKALELGKIRKVNGKIVKNGDMFRVDIFKHKKTNKFYAVPIYTMDFALKVLPNKAVARSKKGEIKDWILMDENYEFCFSLYKDSLILIQTKDMQEPEFVYYNAFTSSTVSLIVSKHDNKFETLSKNQKILFKNANEKEVIAKSIGIQNLKVFEKYIVSALGEVTKAEFRQREDFKK

SEQ ID NO: 143 - protein, 984 aa, Campylobacter jejuni
  Campylobacter jejuni subsp. jejuni LMG 23264
MARILAFDIGISSIGWAFSENDELKDCGVRIFTKVENPKTGESLALPRRLARSARKRLARRKARLNHLKHLIANEFKLNYEDYQSFDESLAKAYKGSLISPYELRFRALNELLSKQDFARVILHIAKRRGYDDIKNSDDKEKGAILKAIKQNEEKLANYQSVGEYLYKEYFQKFKENSKEFTNVRNKKESYERCIAQSFLKDELKLIFKKQREFGFSFSKKFEEEVLSVAFYKRALKDFSHLVGNCSFFTDEKRAPKNSPLAFMFVALTRIINLLNNLKNTEGILYTKDDLNALLNEVLKNGTLTYKQTKKLLGLSDDYEFKGEKGTYFIEFKKYKEFIKALGEHNLSQDDLNEIAKDITLIKDEIKLKKALAKYDLNQNQIDSLSKLEFKDHLNISFKALKLITPLMLEGKKYDEACNELNLKVAINEDKKDFLPAFNETYYKDEVTNPVVLRAIKEYRKVLNALLKKYGKVHKINIELAREVGKNHSQRAKIEKEQNENYKAKKDAELECEKLGLKINSKNILKLRLFKEQKEFCAYSGEKIKISDLQDEKMLEIDHIYPYSRSFDDSYMNKVLVFTKQNQEKLNKTPFEAFGNDSAKWQKIEVLAKNLPTKKQKRILDKNYKDKEQKDFKDRNLNDTRYIARLVLNYTKDYLDFLPLSNDENTKLNDTQKGSKVHVEAKSGMLTSALRHTWGFSTKDRNNHLHHAIDAVIIAYANNSIVKAFSDFKKEQESNSAELYAKKISELDYKNKRKFFEPFSGFRQKVLDKIDEIFVSKPERKKPSGALHEETFRKEEEFYQSYGGKEGVLKALELGKIRKVNGKIVKNGDMFRVDIFKHKKTNKFYAVPIYTMDFALKVLPNKAVARSKKGEIKDWILMDENYEFCFSLYKDSLILIQTKDMQEPEFVYYNAFTSSTVSLIVSKHDNKFETLSKNQKILFKNANEKEVIAKSIGIQNLKVFEKYIVSALGEVTKAEFRQREDFKK

SEQ ID NO: 144 - protein, 987 aa, Campylobacter jejuni
  Campylobacter jejuni subsp. jejuni LMG 23269
MARILAFDIGISSIGWAFSENDELKDCGVRIFTKAENPKTGESLALPRRLARSARKRLARRKARLNHLKHLIANEFKLNYEDYQSFDESLAKAYKGSLISPYELRFRALNELLSKQDFARVILHIAKRRGYDDIKNNGDEEKSEILKAIKQNEEKLVNYQSVGEYLYKEYFQKFKENSKEFINVRNKKESYERCIAQSFLKDELKLIFQKQREFGFSFSKKFEEEVLSVAFYKRALKDFSHLVGNCSFFTDEKRAPKNSPLAFMFVALTRIINLLNNLKNTEGILYTKDDLNTLLNEVLKNGTLTYKQTKKLLGLSDDYEFKGEKGTYFIEFKKYKEFIKALGEHNLSQDNLNEIAKDITLIKDEIKLKKALAKYDLNQNQIDSLSKLEFKDHLNISFKALKLITPLMLEGKKYDEAYNELNLKVAINEDKKDFLPAFNETYYKDEVTNPVVLRAIKEYRKVLNALLKKYGKVHKINIELAREVGKNHSQRAKIEKEQNENYKAKKDAELECEKLGLKINSKNILKLRLFKEQKEFCAYSGEKIKISDLQDEKMLEIDHIYPYSRSFDDSYMNKVLVFTKQNQEKLNQTPFEAFGNDSAKWQKIEVLAKNLPTKKQKRILDKNYKDKEQKDFKDRNLNDTRYIARLVLNYTKDYLDFLPLSDDENTKLNDTQKGSKVHVEAKSGMLTSALRHTWGFSAKDRNNHLHHAIDAVIIAYANNSIVKAFSDFKKEQESNSAELYAKKISELDYKNKRKFFEPFSGFRQKVLDKIDEIFVSKPERKKPSGALHEETFRKEEEFHQSYGGKEGVLKALELGKIRKVNGKIVKNGDMFRVDIFKHKKTNKFYAVPIYTMDFALKVLPNKAVVQGKDKKSGLIKDWILMDENYEFCFSLYKDSLILIQTKDMQEPELVYFNAFTSSTVSLIVSKHDNKFETLSKNQKILFKNANEKEVIAKSIGIQNLKVFEKYIVSALGEVTKAEFRQREDFKK

SEQ ID NO: 145 - protein, 987 aa, Campylobacter jejuni
  Campylobacter jejuni subsp. jejuni LMG 23357
MARILAFDIGISSIGWAFSENDELKDCGVRIFTKAENPKTGESLALPRCLARSARKRLARRKARLNHLKHLIANEFKLNYEDYQSFDESLAKAYKGSLISPYELRFRALNELLSKQDFARVILHIAKRRGYDDIKNNGDEEKGEILKAIKQNEEKLVSYQSVGEYLYKEYFQKFKENSKEFINVRNKKESYERCIAQSFLKDELKLIFQKQRKFGFSFSKKFEEEVLSVAFYKRALKDFSHLVGNCSFFTDEKRAPKNSPLAFMFVALTRIINLLNNLKNTEGILYTKDDLNTLLNEVLKNGTLTYKQTKKLLGLSNDYEFKGEKGTYFIEFQKYKEFVKALGEHNLSQDDLNEIAKDITLIKDEIKLKKALAKYDLNQNQIDSLSKLEFKDHLNISFKALKLITPLMLEGKKYDEACNELNLKVAINEDKKDFLPAFNETYYKDEVTNPVVLRAIKEYRKVLNALLKKYGKVHKINIELAREVGKNHSQRAKIEKEQNENYKAKKDAELECEKLGLKINSKNILKLRLFKEQKEFCVYSGEKIKISDLQDEKMLEIDHIYPYSRSFDDSYMNKVLVFTKQNQEKLNKTPFETFGNDRVKWQKIEVLAKNLPTKKQKRILDKNYKDKEQKDFKDRNLNDTRYIARLVLNYTKDYLDFLPLSDDENTKLNDTQKGSKVHVEAKSGMLTSTLRHTWGFSTKDRNNHLHHAIDAAIIAYANNSIVKAFSDFKKEQESNTAELYAKKISELDYKNKRKFFEPFSGFRQKLLDKIDEIFVSKPERKKPSGALHEETFRKEEEFYQSYGGKEGVLKALELGKIRKVNGKIVSNGDMFRVDIFKHKKTNKFYAVPIYTMDFALKVLPNKAVVQGKDKKSGLIKDWILMDENYEFCFSLYKDSLILIQTKDMQEPELVYYERLDSSNASLTVSKHDNKFETLSKNQKILFKNANEKEVIAKSIGIQNLKVFEKYIVSALGEVTKAEFRQREDFKK

SEQ ID NO: 146 - protein, 984 aa, Campylobacter jejuni
  Campylobacter jejuni subsp. jejuni NCTC 11168 = ATCC 700819
MARILAFDIGISSIGWAFSENDELKDCGVRIFTKVENPKTGESLALPRRLARSARKRLARRKARLNHLKHLIANEFKLNYEDYQSFDESLAKAYKGSLISPYELRFRALNELLSKQDFARVILHIAKRRGYDDIKNSDDKEKGAILKAIKQNEEKLANYQSVGEYLYKEYFQKFKENSKEFTNVRNKKESYERCIAQSFLKDELKLIFKKQREFGFSFSKKFEEEVLSVAFYKRALKDFSHLVGNCSFFTDEKRAPKNSPLAFMFVALTRIINLLNNLKNTEGILYTKDDLNALLNEVLKNGTLTYKQTKKLLGLSDDYEFKGEKGTYFIEFKKYKEFIKALGEHNLSQDDLNEIAKDITLIKDEIKLKKALAKYDLNQNQIDSLSKLEFKDHLNISFKALKLVTPLMLEGKKYDEACNELNLKVAINEDKKDFLPAFNETYYKDEVTNPVVLRAIKEYRKVLNALLKKYGKVHKINIELAREVGKNHSQRAKIEKEQNENYKAKKDAELECEKLGLKINSKNILKLRLFKEQKEFCAYSGEKIKISDLQDEKMLEIDHIYPYSRSFDDSYMNKVLVFTKQNQEKLNQTPFEAFGNDSAKWQKIEVLAKNLPTKKQKRILDKNYKDKEQKNFKDRNLNDTRYIARLVLNYTKDYLDFLPLSDDENTKLNDTQKGSKVHVEAKSGMLTSALRHTWGFSAKDRNNHLHHAIDAVIIAYANNSIVKAFSDFKKEQESNSAELYAKKISELDYKNKRKFFEPFSGFRQKVLDKIDEIFVSKPERKKPSGALHEETFRKEEEFYQSYGGKEGVLKALELGKIRKVNGKIVKNGDMFRVDIFKHKKTNKFYAVPIYTMDFALKVLPNKAVARSKKGEIKDWILMDENYEFCFSLYKDSLILIQTKDMQEPEFVYYNAFTSSTVSLIVSKHDNKFETLSKNQKILFKNANEKEVIAKSIGIQNLKVFEKYIVSALGEVTKAEFRQREDFKK

SEQ ID NO: 147 - protein, 983 aa, Campylobacter jejuni
  Campylobacter jejuni subsp. jejuni NW
MARILAFDIGISSIGWAFSENDELKDCGVRIFTKAENPKTGESLALPRRLARSARKRLARRKARLNHLKHLIANEFKLNYEDYQSFDESLAKAYKGSLISPYELRFRALNELLSKQDFARVILHIAKRRGYDDIKNSDDKEKGAILKAIKQNEEKLANYQSVGEYLYKEYFQKFKENSKEFTNVRNKKESYERCIAQSFLKDELKLIFKKQREFGFSFSKKFEEEVLSVAFYKRALKDFSHLVGNCSFFTDEKRAPKNSPLAFMFVALTRIINLLNNLKNTEGILYTKDDLNALLNEVLKNGTLTYKQTKKLLGLSDDYEFKGEKGTYFIEFKKYKEFIKALGEHNLSQDDLNEIAKDITLIKDEIKLKKALAKYDLNQNQIDSLSKLEFKDHLNISFKALKLVTPLMLEGKKYDEACNELNLKVAINEDKKDFLPAFNETYYKDEVTNPVVLRAIKEYRKVLNALLKKYGKVHKINIELAREVGKNHSQRAKIEKEQNENYKAKKDAELECEKLGLKINSKNILKLRLFKEQKEFCAYSGEKIKISDLQDEKMLEIDHIYPYSRSFDDSYMNKVLVFTKQNQEKLNQTPFEAFGNDSAKWQKIEVLAKNLPTKKQKRILDKNYKDKEQKNFKDRNLNDTRYIARLVLNYTKDYLDFLPLSDDENTKLNDTQKGSKVHVEAKSGMLTSALRHTWGFSAKDRNNHLHHAIDAVIIAYANNSIVKAFSDFKKEQESNSAELYAKKISELDYKNKRKFFEPFSGFRQKVLDKIDEIFVSKPERKKPSGALHEETFRKEEFYQSYGGKEGVLKALELGKIRKVNGKIVKNGDMFRVDIFKHKKTNKFYAVPIYTMDFALKVLPNKAVARSKKGEIKDWILMDENYEFCFSLYKDSLILIQTKDMQEPEFVYYNAFTSSTVSLIVSKHDNKFETLSKNQKILFKNANEKEVIAKSIGIQNLKVFEKYIVSALGEVTKAEFRQREDFKK

SEQ ID NO: 148 - protein, 987 aa, Campylobacter jejuni
MARILAFDIGISSIGWAFSENDELKDCGVRIFTKAENPKTGESLALPRRLARSARKRLARRKARLNHLKHLIANEFKLNYEDYQSFDESLAKAYKGSLISPYELRFRALNELLSKQDFARVILHIAKRRGYDDIKNNGDEEKSEILKAIKQNEEKLVNYQSVGEYLYKEYFQKFKENSKEFINVRNKKESYERCIAQSFLKDELKLIFQKQREFGFSFSKKFEEEVLSVAFYKRALKDFSHLVGNCSFFTDEKRAPKNSPLAFMFVALTRIINLLNNLKNTEGILYTKDDLNTLLNEVLKNGTLTYKQTKKLLGLSDDYEFKGEKGTYFIEFKKYKEFIKALGEHNLSQDNLNEIAKDITLIKDEIKLKKALAKYDLNQNQIDSLSKLEFKDHLNISFKALKLITPLMLEGKKYDEAYNELNLKVAINEDKKDFLPAFNETYYKDEVTNPVVLRAIKEYRKVLNALLKKYGKVHKINIELAREVGKNHSQRAKIEKEQNENYKAKKDAELECEKLGLKINSKNILKLRLFKEQKEFCAYSGEKIKISDLQDEKMLEIDHIYPYSRSFDDSYMNKVLVFTKQNQEKLNQTPFEAFGNDSAKWQKIEVLAKNLPTKKQKRILDKNYKDKEQKDFKDRNLNDTRYIARLVLNYTKDYLDFLPLSDDENTKLNDTQKGSKVHVEAKSGMLTSALRHTWGFSAKDRNNHLHHAIDAVIIAYANNSIVKAFSDFKKEQESNSAELYAKKISELDYKNKRKFFEPFSGFRQKVLDKIDEIFVSKPERKKPSGALHEETFRKEEEFYQSYGGKEGVLKALELGKIRKVNGKIVKNGDMFRVDIFKHKKTNKFYPVPIYTMDFALKVLPNKAVVQGKDKKSGLIKDWILMDENYEFCFSLYKDSLILIQTKDMQEPELVYFNAFTSSTVSLIVSKHDNKFETLSKNQKILFKNANEKEVIAKSIGIQNLKVFEKYIVSALGEVTKAEFRQREDFKK

SEQ ID NO: 149 - protein, 1003 aa, Campylobacter lari
MRILGFDIGINSIGWAFVENDELKDCGVRIFTKAENPKNKESLALPRRNARSSRRRLKRRKARLIAIKRILAKELKLNYKDYVAADGELPKAYEGSLASVYELRYKALTQNLETKDLARVILHIAKHRGYMNKNEKKSNDAKKGKILSALKNNALKLENYQSVGEYFYKEFFQKYKKNTKNFIKIRNTKDNYNNCVLSSDLEKELKLILEKQKEFGYNYSEDFINEILKVAFFQRPLKDFSHLVGACTFFEEEKRACKNSYSAWEFVALTKIINEIKSLEKISGEIVPTQTINEVLNLILDKGSITYKKFRSCINLHESISFKSLKYDKENAENAKLIDFRKLVEFKKALGVHSLSRQELDQISTHITLIKDNVKLKTVLEKYNLSNEQINNLLEIEFNDYINLSFKALGMILPLMREGKRYDEACEIANLKPKTVDEKKDFLPAFCDSIFAHELSNPVVNRAISEYRKVLNALLKKYGKVHKIHLELARDVGLSKKAREKIEKEQKENQAVNAWALKECENIGLKASAKNILKLKLWKEQKEICIYSGNKISIEHLKDEKALEVDHIYPYSRSFDDSFINKVLVFTKENQEKLNKTPFEAFGKNIEKWSKIQTLAQNLPYKKKNKILDENFKDKQQEDFISRNLNDTRYIATLIAKYTKEYLNFLLLSENENANLKSGEKGSKIHVQTISGMLTSVLRHTWGFDKKDRNNHLHHALDAIIVAYSTNSIIKAFSDFRKNQELLKARFYAKELTSDNYKHQVKFFEPFKSFREKILSKIDEIFVSKPPRKRARRALHKDTFHSENKIIDKCSYNSKEGLQIALSCGRVRKIGTKYVENDTIVRVDIFKKQNKFYAIPIYAMDFALGILPNKIVITGKDKNNNPKQWQTIDESYEFCFSLYKNDLILLQKKNMQEPEFAYYNDFSISTSSICVEKHDNKFENLTSNQKLLFSNAKEGSVKVESLGIQNLKVFEKYIITPLGDKIKADFQPRENISLKTSKKYGLR

SEQ ID NO: 150 - protein, 1430 aa, Capnocytophaga canimorsus
MKHILGLDLGTNSIGWAVVKEAQNDNEQSEIVDVGVRVNPLTTDEKTNFEKGKPISTNADRTLKRSARRNLQRYKLRRKELIELLKEHQLISTDTILTENGKGTTFQTLELRAKSAKEKISLEELARVFLTINKKRGYKSSRKAKNEDEGQLIDGMEIAKRLYEENLTTGQLSLQLLKEGKKSLPDYYRSDLQFELDKVWNFQKQFHSHILTDEFYAQLKGKGQRATSALFLAKYQIYTAENKGSREDKKLQAYQWRVDALSKELTREQLAFVITEINNNLNNSSGYLGAISDRSKELYFNNETVGEYLWKQIAANPHTSLKNQVFYRQDYLDEFEQIWKTQSAFYPEILTDELKKELRDVVIFYQRKLKSQKSLVSFCEFENKEIEIKKEDGTSTKKVIGLKVAPKSSPLFQEFKIWQNLNNVLIRKKGSKTKKVDKNQQAVLFEEEKTIFELDLEAKQALFNELNLKGNLKAYYCLEILGYSPKEWEMNYSVLEGNRTNKALYEAYLKITDLEGYDAKNHLKVKLNKDEVELDDLKVPASEIKDMVQAIFKEAGINTDILHFNAELDGKDFENQASYQLWHLLYSYEGDDSKSGNELLYKLLETKFGFKKEYAQILANVSLSDDYGSLSTKAMRKIHPYIKENKFSTACELAGYRHSKHSLTKEENDNRVLKDSLEVLKKNSLRQPVVEKILNQMINLVNALLKKYRTENPNFKFDEIRIELARELKKNAEERANMTVNINKAKTEHEKIIKILKNEFGLPNPTRNDIIRYRLYEELKANGYKDLYTNEYIEKQDLFTKNIDIEHIIPKSRVFDDSFSNKTLSFRKTNLDKGERTAFDYIESKFGADKLEEYVARVEDLYKNNIISKAKYQKLLKKESEIGDGFVERDLRETQYIAKKAKEILLQITPNVLSTSGGITDRLREDWDLINVMKELNLPKYRALGLTQMEDRKYGQQVEVIIDWTKRNDHRHHAMDALTVAFTKHNHIQYLNYLNARKNEKHREHSNIMGIQQLETIKVTDKNGNEKRVFKAPMPNFRQVTKAFLENVLISHKAKNKVVTKNKNKVAGSNKVQEVLTPRGQLHKETVYGKYQYYVQKEEKIGGKFDLETIKKVANPLYQSLLKKRLEENGGDPKKAFTGKNSLAKNPIYLDDAQTEQLPEKVKLVWLENSFSIRKDITPENFKDEKLIDKILDEGVKRILKERLQSFGNDAKKAFSDLDKNPIWLNKEKGIAIKRVAISGVANAEPLHTKKDHLGKEILDKEGKSIPVDFISTGNNHHVAVYRDEKGNLQEKVVSVFEAVVRANQGLPIIDKTYNQHLGWEFLFTMKQNEMFVFSNESTGFNPNDIDLLDPKNKKIISPNLFRVQKFSKLQYGNSFVREFVFRHHLETTVEDRKELQGITYKQMKNSAFFNDIIKVRINHLGGIVSVGEY

SEQ ID NO: 151 - protein, 1436 aa, Capnocytophaga gingivalis
  Capnocytophaga gingivalis ATCC 33624
MKYIKYILGLDIGSNSIGWALIQLDLLQKTKRIIAAGSRIIPMDQKVLSDFGKGITISPTAQRTSYRNARHCRERHLLRRERLHRVLHILGFLPTHYDKQIDFSKRYGKFVDNTEPKIAYNEGKFLFMDSFQEMLSDFKSHQPDLFYTKKNGEESKIPYDWTIYYLRKKALSQKISKEELAWIILNFNQKRGYYQLREEEGNKENDFEIISSKIISVIKKDKDKKYNKYWYDIILENGLVYQAAFYNDFVYNWINQDREFIIERTSLKNGAEKVKLSYLPTFDEIDKMDKKEQDKYYKKIKIKTENSIGNKTVGCYIYDHILQNPNEKIKGKLVRTIERKYYKEELKAILEKQIALQPELFTDQLLADCIRELYSKNEAQQRNLAARDFVHLLVEDIIFYQRPLRRQKSTLANCSLESRSYIDKDSHTRKEAPLKVCPKSNPYYQEFRVLQWLQNLKIYEIDSDQEVTHQFIKTLEDKQQLFEFLMAQKEIDCEELLKYFLNQTYPNAKEKALKSELKKWKDTYRWNYVYDIGEKSSKKYPMNETRYELKRHLEKVANLPDDFLSSEVEYLLWHLIYSVKDKVAYEKGLKKFAQKHHLDKDSFVESFKKFNPYPSEYGSFSEKAIRKLLPLMRFGAHWDFNHIDKNTQKRIEDLITGVENEEIRTILREKAEKYQLEKETDFQDLPLWLAQYIVYNRHAEASSLEKWTSVNDLETYLNEFKQHSLRNPIVEQVVMETLRVVRDIWQQYGQGQASFFNEIHIELGRELKKTAKEREKLSKQNQKNEDINLSIKEKLKELEKYNTRAYSITHQEKYKLWLEQKHISPYTGQIISPENLFTDNYEIEHIIPQSRFFDDSLSNKVVCESIVNKAPYKDRQLGLEFIKNQGGRIVKELSKENKTIKIFTEEQYRTFIKEHYSNNPEKTKKLLLEEIPEKMVARQMNDTCYISKFISEILSKIVRSDEQDEGVHSKNVILCTGKITSILRQDWGLNDIWDNLILPRFERMNNLLQKEKFTIYSIEKQKKIPVVPINDQFKSFQKKRIDHRHHAMDAIIIACTTREHINYINNQHALEKEKDKKEKQEERDKLREKLCIKKYNNRSEGNYSWIFKKPWDTFTQEVRVALEDIVVSFKQNLRVINKATNYYERWVEENGKYIKKMVKQEGTNWAIRKPLHEETISGKIYLDREKITKNDILTATRKTVDSSFDDKRIKKITDTGIQKILLNYLKYKGSPEIAFSPEGLEELNKNLSIYNDGKPHKPIYKVRIYEKGSGRFALGEKGRKYKKYVQGASNLYFGIYQGAKRSFATIPLNEVIERQKQGLPSVPEYNEKGDLLLFSLSPNDLVYVPIEGEIIENIDFRNLSKEQKERIYNVNDFSSTCYFTPNRIAKAIFPKEVDLQRKGDKLSGSYDTKTASLEGIQIKEVCIKLKVDRLGNISKA

SEQ ID NO: 152 - protein, 1426 aa, Capnocytophaga ochracea
MKNILGLDLGTTSIGFAHIVEDENKEKSEIKELGVRIVSLTTDEQSDFEKGKSITTNANRTLKHGARLNLDRYQQRRKYLIDLLQKANLITPSSILAENGKNTTHSTWQLRAKAVTERIEKEEFARILLAINKKRGYKSSRKAKTEDEGQAIDGMAIAKRLYDENLTPGQLSLQLLQQNKKLLPDFYRSDLQKEFDLVWNFQKQFYPDILTDIFYKELQGKGKDATSKAFSKRYHFDTTENKGSKESVRLQAYQWRAEAISKQLSKEEVAYVLTEINNNLNNASGYLGAISDRSKELYFNRQTVGQYLYAKLQENRHNSLKNKVFYRQDYLDEFERIWETQASFHKELTDELKKQIRDVVIFYQRKPKSQKGLISFCEFESKEIEIEKDGKTITKNIGARVVPKSSPLFQEFKIWQILNNVICKRKGIRKKKISAKTTQLDLLNESSQTIFSLDMECKQLLFDELNLKGDLKSDKVLKLLGYSPQEWEINYNQLEGNRTQKALYEAYLKIVEMEAHDVKDILQIKSAKDDWSLDESPLSASEIREKVKAIFQTLGICTKILYFDPLLPVKEFEEQDSYQLWHLLYSYESDDSTSGNETLYRILEKKYAFKREHARILANVALQDDYGSLSTKAIRKIYPNIKENQYSTACEKAGYKHSKLSLTTEELEARELKNIIPLLKKNALRNPVVEKILNQMINVVNALIEKNSERDAEGKITKYFHFDEIRIELARELKKNAQKRYEMTQNINKAKLEHQKISEILQKEFGIKNPTKSDIIRYRLYQELEHNGYKELYTNAPIARDMLFSKNIEIEHIVPKARVFDDSFSNKTLTFHRINSDKGEYTAFDYITSLNSEEELNQYLTRVENAYKTKSISPTKYKNLLKKASEIGDDFINRDLRDTQYIAKKAKEILFQVTKNVLSTSGSITDRLREDWGLVDVMKELNMPKYQSLGLTEVEERKDGNKVTVIKNWTKRNDHRHHAMDALTVAFTKPSYIQYLNHLNARKDENNKNYSVILAIEEKETIKVPTNNGKNKRVFIEPIPNFRQVAKKHLEEIFISHKAKNKVVTKNTNKPAGTDKQQITLTPRGQLHKETIYGKYQYYINKEEKIGVKFDERTIAKVSNPVYREALLKRLQANDNDPKKAFAGKNALSKNPIYLDESKTKTLPEKVNLTYLEEDFSIRKDISPDNFKDLKSIEKVIDQGVKRILIKRLQAYDNDPKKAFVDLEKNPIWLNKEKGIAIKRVTISGVNNAQPLHIGKDHLGKTTLNKEGKEIPVDYVSTGNNHHVAIYRDKEGNLQEQIVSFFDAVVRAQQGIPIIDKTYKQAEGWQFLFTMKQNEMFVFPNATTGFNPAEIDLLDPKNKKLISPNLFRVQKIATKDYFFRHHLETNVETDNILKNVTWKREGLSGLKDIVKVRINHLGDIVSIGEY

SEQ ID NO: 153 - protein, 1437 aa, Capnocytophaga sp.
  Capnocytophaga sp. CM59
MKYIKYILGLDIGSNSIGWALIQLDLLQKTKRIIATGSRIIPMDQKVLSDFGKGITISPTAQRTSYRNARHCRERHLLRRERLHRVLHILGFLPTHYDKQIDFSKRYGKFVDNTEPKIAYNERKFLFMDSFQEMLADFKIHQPDLFYTKKNGEESKIPYDWTIYYLRKKALSRKISKEELAWIILNFNQKRGYYQLREEEEENKENDFEIISSKIISVIKKDKDKKYNKYWYDIILENGLVYQAAFYNDFVYNWINQDREFIIERISLKNGTEKVKLSYLPTFDEIDKMDKKEQDKYYKKIKIKTENSIGNKTVGCYIYDHILQNPNEKIKGKLVRTIERKYYKEELKAILEKQVALQPELFTDQLFADCIRELYSKNEAQQRNLAARDFVHLFVEDIIFYQRSLRRQKSTLANCSLESRSYIDKDSHTRKEAPLKVCPKSNPYYQEFRVLQWLQNLKIYEIDTDQEVTHEFIKTLEDKQQFFDFLMNQKEIDCEELLKYFLNQTYPNAREKALKSELKKWKDTYRWNYVYDIGEKSSKKYPMNETRYELKRHLEKVANLPDDFLSSEVEYLLWHLIYSVKDKVAYEKGLKTFAQKHHLDKDSFVESFKKFKPYPSEYGSFSEKAIRKLLPLMRFGSYWDFNHIDKNTQKRIEDLITGVENEEIRTILREKAEKYQLEKETDFQDLPLWLAQYIVYNRHAEASSLEKWTSVNDLETYLNEFKQYSLRNPIVEQVVMETLRVVRDIWQQYGQGQASFFDEIHIELGRELKKTAKEREKLSKQNQKNEDINLSIKEKLKELEKYNTRAYSITHQEKYKLWLEQKHISPYTGQIISPENLFTDNYEIEHIIPQSRFFDDSLSNKVVCESIVNKAPYKDRQLGLEFIKNQGGRIVKELSTENKTIKIFTEEQYRTFIKEHYSNNPEKTKKLLLEEIPEKMVARQMNDTCYISKFISEILSKIVRSDEQDEGVHSKNVILCTGKITSALKQDWGVNDVWNDLILPRFERMNDLTQSTLFTTYNEKYQKYLPTVPMEYSNGFQKKRIDHRHHAMDAIIIACATREHINYINNQHALEKGKDKKEKQKEHDKLREKLCIKKDNKGSEENYSWIFKKPWDTFTQEVQAALEGIVVSFKQNLRVINKATNYYERWVEENGKYIKKMVKQEGTNWAIRKPLHEETISGKIYLDREEITKNDILTATRKTVDSSFDEKRIKKITDTGIQKILLNYLKYKGSPEIAFSPEGLEELNKNLSIYNDGKPHKPIYKVRIYEKGSGRFALGEKGRKYKKYVQGAPNLYFGIYQGANKRSFATIPLNEVIERQKQGRPSIPEYNEKGDPLLFSLSPNDLVYVPVEGEIIEDIDFQNLSKEQKERIYNVNDFSSTCYFTPNRIAKAIFPKEVDLQRKGDKLPGSYDTKTASLEGIQIKEVCIKLKIDRLGNISKA

SEQ ID NO: 154 - protein, 1471 aa, Capnocytophaga sp.
  Capnocytophaga sp. oral taxon 324 str. F0483
MCKYFYIKNFITFVLSKSIIPMKHILGLDLGSNSIGWAFVQQDFENKQGKIIATGSRIIPMDQGILGDFERGNTVSQTAERTTYRSTRRLRERHLLRRERLHRVLHILGFLPPHYDAQIDFTKRYGKFIDNAEPKIAYNNGNFIFMNSFNEMIEDFKKHQPQLFYKKSNGEESKIPYDWTIYYLRKKALSQKITQQELAWLILHFNQKRGYYQLRGEEETENPNKEVAFHSLKVVDVEAEAPNKKGEIWYTIRLENGWIYRRTSKIPLDDWKGKTRDFIVTTDLNDDGTIKVDKEGKEKRSFRAPDENDWNLLKKKTEHDIDFSGKTVGAYIYDHLLQNPNQKIKGKLVRTIERKYYKDELKAILAKQIALQPELFTETLLADCIRELYRKNETQQQNLLSKDFLHLFVEDIIFYQRPLRSKKSTIANCTLEKRSYIDKETNERKDAPIKVCAKSNPYYQEFRVLQWLQNLRIYEIETDREVTAEFIETPQDCEALFNFLMSQKEIDNKGLLKYFLFAKNPQIKDKAAKSELKKWLTTYRWNYVYDAADNSSKKYPMNETGYELQRYLQKVEGLPANFLTFDITYQLWHLLYSVKDKVEFEKALKKFAKKKQLDKTSFVDSFKNFKPYPNEYGSFSEKAIKKLLPLMRFGNHWDFNRIDVSTQKRIDDLINGVANEDIRTIIREKAEKYQLNSETCFQDLPLWLAQYVVYNRHAEATDIEKWTSVSDLEAYLEDFKQHSLRNPIVEQVVTETLRVVRDIWQQYGGGQANFFDEIHIELGRELKKTAEERKQLSDKNQENESTNLRIKKLLAELKEDASIQNVRPYSLVQQELLKIYEEGVFSATDEVEEDIQKIRKKAEPSKADLQRYKLWLEQKYKSPYTGEVISLTKLFTEEYEIEHIIPQSRYYDDSLSNKVICESAVNKLKTNQLGLEFIQNHHGEKVRITANKEVTIFTEEQYKEFVKKHYANNSAKQQKLLLNEIPEKMVARQLNDTRYISKYISEILSKIVRSDEKDEGVNSKNIIPCTGKITTALKQDWGLNDVWNKLILPRFERMNQLTQTQLFTSYNDRLQKNLPTVPIEYSQGFQKKRIDHRHHAMDALVIACATREHINYMNNQHALDKSKDKKEKQQSRIDLRTILCEKKNNNWQFKKPWSTFTQEAKEALEHIVVSFKQNLRVINKATNYYEKWEEKNGVLVKKKVKQEGTNWAIRKPLHKETVSGKIVLDRKIGKDKILTATRKAVDITFTEKIISSITDTGIQKILLNYLKYKGSPEVAFSTEGLEELNKNIAQYNNGKKHQPIYKVRIFEEGSKFPLGETGAKATKYVEAAKGTNLFFGVYQGKGKRTYATIPLNEVIERQKQGLPSVPERNEKGEPLLFSLSPNDLVYVPMEGEIAETIDFNNLSKEQKERIYKTVSFTGNQCFFVQEAVATPIVNKMEYSPLNKMERDILGTMIKEVCIKLKVDRLGNITKA

SEQ ID NO: 155 - protein, 1450 aa, Capnocytophaga sp.
  Capnocytophaga sp. oral taxon 326 str. F0382
MKRILGLDLGSNSIGWAFVEQDFENKQGKIIATGSRIIPMDQGILGDFEKGNTVSQTAERTTYRSMRRLRERHLLRRERLHRVLHILGFLPPHYDAQIDFTKRYGKFIDNAEPKIAYNNGNFIFMNSFNEMIEDFKKYQPQLFYKKSNGEESKIPYDWTIYYLRKKVLSQKITQQELAWLILHFNQKRGYYQLRGEEETENPNKEVAFHSLKVVDVEAEAPNKKGEIWYTIRLENGWIYRRTSKIPLDDWKGKTRDFIVTTDLNDDGTIKVDKEGKEKRSFRAPDENDWNLLKKKTEHDIDFSGKTVGAYIYDHLLQNPNQKIKGKLVRTIERKYYKDELKAILAKQIALQPELFTETLLADCIRELYRKNETQQQNLLSKDFLHLFVEDIIFYQRPLRSKKSTIANCTLEKRSYIDKETNERKDTFIKVCAKSNPYYQEFRVLQWLQNLRIYEIETDREVTAEFIETAEDYEALFNFLMSQKEIDNEGLLKYFLFAKNPQIKDKVAKSELKKWLTTYRWNYVYDAADNSSKKYPMNETGYDLQRYLQKVEGLPANFLTFDITYRLWHLLYSVKDKVEFEKALKKFAQEYQLDEASFVDSFKNFKPYPNEYGSFSEKAIKKLLPLMRFGNHWDFNRIDVSTQKRIDDLINGVANDEIRTIIREKAEKYQLNSESCFQGLPLWLAQYVVYNRHAEATDIEKWTSVSDLETYLEDFKQHSLRNPIVEQVVTETLRVVRDIWQQYGGGQANFFDEIHIELGRELKKTAEERKQLSNRNQENENTNLRIKKLLAELKEDASIQNVRPYSPVQQELLKIYEEGVFSSTDQVEEDIQKIRKKAEPTTPEIQRYKLWLEQKYKSPYTGEVISLTKLFTEEYEIEHIIPQSRYYDDSLSNKVICESAVNKLKTNQLGLEFIQNHHGEKVRITGNKEVTIFTEEQYKEFVKKHYANNSAKQQKLLLNEIPEKMVARQLNDTRYISKYISEILSKIVRSDEKDEGVNSKNVIPCTGKITTALKQDWGLNDVWNELILPRFERMNQLTQTQLFTSYNDRFQKNLPTVPIEYSQGFQKKRIDHRHHAMDALVIACATREHINYMNNQHALDKNKDKKEKQQSRIDLRTILCEKKNNNWQFKKPWSTFTQETKEALEHIVVSFKQNLRVINKATNYYEKWEEKNGVLVKKKVKQEGTNWAIRKPLHKETVSGKIVLDRKIGKDKILTATRKEVDITFTEKIISSITDTGIQKILLNYLNYKGSPEVAFSAEGLEELNKNIAQYNDGKKHQPIYKVRIFEEGSKFPLGETGAKATKFVEAAKGTNLFFGVYQGKEKRSYATIPLNEVIERQKQGLPSVPERNEKGEPLLFSLSPNDLVYVPMEGEIAETIDFNNLSKEQKERIYKTVSFTGNQCFFVQEAVATPIVNKMEYSPLNKMERDILGTMIKEVCIKLKVDRLGNITKA

SEQ ID NO: 156 - protein, 1435 aa, Capnocytophaga sp.
  Capnocytophaga sp. oral taxon 329 str. F0087
MKNILGLDLGTTSIGFAHIVEDENKEKSEIKELGVRIVSLATDEQSDFEKGKSISTNANRTLKHGARLNLDRYQQRRKFLIDLLQKANLITSASILAENGKNTTHSTWQLRAKAVTERIEKEEFARVLLAINKKRGYKNSRKTKTEDEGQAIDGMAIAKCLYDENLTPGQLSLQLLQQNKKLLPDFYRSDLQKEFDLVWNLQKQFYPDILTDSFYKELQGKGKDATSKAFSKRYHFDTAENKGSKESVRLQAYQWRAEAISKQLSKEEVAYVLTEINNNLNNSSGYLGAISDRSKELYFNRQTVGQYLYAQLQENRHNSLKNKVFYRQDYLDEFERIWETQASFHKELTDELKKQIRDVVIFYQRKLKSQKGLVSFCEFESKEIEIEKDGKAITKSIGARVVPKSSPLFQEFKIWQILNNVTCKRKGIRKKKSSAKSTELDLFNEPSQSIFSLDMECKQLLFDELNLKGDLKSDKVLKLLGYSPQEWEINYNQLEGNRTQKSLYEAYLKIIEIEGYEVKDILQIKSTKDDWSLDESPLSASEIRERVKVIFQTLGICTKILYFDPLLPVKEFEQQYSYQLWHLLYSYESDDSTSGNETLYRILEKKYAFKREHATILANVALQDDYGSLSTKAIRKIYPYIKENQYSTACELAGYKHSKLSLTTEELEARELKNIIPLLKKNALRNPVVEKILNQMINVVNALIEKNSERDAEGKITKYFHFDEIRIELARELKKNAQERYEMTQNINKAKLEHQKISEKLQKQFGIKNPTKSDIIRYRLYQELEHNGYKELYTNTYIAPDVLFSKNIDIEHIVPKARVFDDSFSNKTLAFKEFNIKKGESTAFDYITSLNCEGELNQYLTRVENAYKTKSISLTKYKNLLKKASEIGDGFINRDLRDTQYIAKKAKEILFQVTKNVLSTSGSITDRLREDWGLVDVMKELNMPKYQSLGLTEVEERKDGNKVTVIKDWTKRNDHRHHAMDALTVAFTKPSYIQYLNHLNARKDENNKNYSVILAIEKKETIKVPINNGKNKRVFIEPILNFRQVAKKHLEEIFISHKAKNKVVTKNINKPAGTDKQQITLTPRGQLHKETIYGKYQYYVNKEEKVGVKFDERTITKVSNPLYREALLKRLQANDNDPKKAFAGKNALSKNPIYLDEAKTKTLPEKVNLTYLEEDFSIRKDISPDNFKDLKSIEKVIDQGVKRILIKRLQAYDNDPKKAFVDLEKNPIWLNKEKGIAIKRVTISGVSNAQPLHIGKDHLGKTTLNKEGKEVPVDYVSTGNNHHVAIYRDKEGNLQEQIVSFFEAVVRAQQGLPIIDKNYKQAEGWQFMFTMKQNEMFVFPNEATGFNPAEIDLLDPKNKKLISPNLFRVQTISIVKYGNSVVRDFKFRHHLETTLQDDKILQGITFQQIKSLEPLRNIVKVRINHLGDIVNIGEY

SEQ ID NO: 157 - protein, 1426 aa, Capnocytophaga sp.
  Capnocytophaga sp. oral taxon 335 str. F0486
MKNILGLDLGTTSIGFTHIVEDENKEKSEIKELGVRIVSLTTDEQSDFEKGKSISTNANRTLKHGARLNLDRYQQRRKFLIDLLQKANLITSSSILAENGKNTTHSTWQLRAKAVTERIEKEEFARVLLAINKKRGYKSSRKAKTEDEGQAIDGMAIAKRLYDENLTPGQLSLQLLQQNKKLLPDFYRSDLQKEFDLVWNFQKQFYPDILTDSFYKELQGKGKDATSKAFSKRYHFDTAENKGSRESVRLQAYQWRAEAISKQLSKEEVAYVLTEINNNLNNASGYLGAISDRSKELYFNRQTVGQYLYAQLQENKHNSLKNKVFYRQDYLDEFERIWETQASFHKELTEELKKQIRDVVIFYQRKLKSQKGLISFCEFESKEIEIEKDGKTITKSIGARVVPKSSPLFQEFKIWQILNNVTCKRKGIRKKKSSAKSTELDLFNEPSQTIFSLDMECKQLLFEELNLKGDLKSDKVLKLLGYSPQEWEINYNQLEGNRTQKALYEAYLKIVEMEAHDVKDILQIKSTKDDWALEESPLSASEIRERVKAIFQTLGICTKILYFDPLLPVKEFEEQDSYQLWHLLYSYESDDSTSGNETLYRILEKKYAFKREHATILANVTLQDDYGSLSTKAIRKIYPYIKENQYSTACEKAGYKHSKLSLTTEELEARELKNIIPLLKKNALRNPVVEKILNQMINVVNALIEKNSERDAEGKITKYFHFDEIRIELARELKKNAQERYEMTQNINKAKLEHQKISGILQKEFGIKNPTKSDITRYRLYQELAHNGYNDLYTNTYIPKELLFSKNIDIEHIVSKARVFDDSFSNKTLAFREFNIKKGESTAFDYITSLNNEEELNQYLNRVENAYKTKNISPAKYKNLLKKASEIGDGFINRDLRDTQYIAKKAKEILFQVTKNVLSTSGSITDRLREDWGLVDVMKELNMPKYQSLGLTEVEERKEGNKVTVIKNWTKRNDHRHHAMDALTVAFTKPSYIQYLNHLNARKDKNNKNYSVILAIEEKETIKVPTNNGKNKRVFIEPIPNFRQVAKKHLEEIFISHKAKNKVVTKNTNKPAGTDKQQITLTPRGQLHKETVYGKYQYYVNKEEKIGVKFDKETIAKVSNPVYREALLKRLQANDNDPKKAFAGKNALSKNPIYLDEAKTKTLTEKVNLTYLEEDFSIRKDISPDNFKDLKSIEKVIDQGVKRILIKRLQDYDNDPKKAFVDLEKNPIWLNKEKGIAIKRVTISGVNNAQPLHIGKDHLGKTTLNKEGKEIPVDYVSTGNNHHVAIYRDKEGNLQEQIVSFFEAVVGAQQGLPIVDKTYKQAEGWQFLFTMKQNEMFVFPNEATGFNPAEIDLLDPKNKKQISPNLFRVQKIATKDYFFRHHLETNVDTDNVLKNTTWKREGLSGLKDIVKVRINHLGDIVSIGEY

SEQ ID NO: 158 - protein, 1432 aa, Capnocytophaga sp.
  Capnocytophaga sp. oral taxon 380 str. F0488
MKNILGLDLGTTSIGFAHIVEDENKEKSEIKELGVRIVSLTTDEQSDFEKGKSITTNANRTLKHGARLNLDRYQQRRKYLIDLLHKANLITPSSILAENGKNTTHSTWQLRAKAVTERIEKEEFARILLAINKKRGYKSSRKAKTEDEGQAIDGMAIAKRLYDENLTPGQLSLQLLQQNKKLLPDFYRSDLQKEFDLVWNFQKQFYPDILTDIFYKELQGKGKDATSKAFSKRYHFDTAENKGSKESVRLQAYQWRAEAVSKQLSKEEVAYVLTEINNNLNNASGYLGAISDRSKELYFNRQTVGQYLYAQLQENRHNSLKNKVFYRQDYLDEFERIWETQALFHKELTDELKKQIRDVVIFYQRKPKSQKGLISFCEFESKEIEIEKDGKTITKNIGARVVPKSSPLFQEFKIWQILNNVICKRKGIRKKKISAKTTQLDLLNESSQTIFSLDMECKQLLFDELNLKGDLKSDKVLKLLGYSPQEWEINYNQLEGNRTQKALYEAYLKIVEMEAHDVKDILQIKSTKDDWSLDESPLSASEIRESVKAIFQALGICTKILYFDPLLPVKDFEEQDSYQLWHLLYSYESDDSTSGNETLYRILEKKYAFKREHARILANVALQDDYGSLSTKAIRKIYPNIKENQYSTACEMAGYKHSKLSLTTEELEARELKNIIPLLKKNALRNPVVEKILNQMINVVNALIEKNSERDAEGKITKYFHFDEIRIELARELKKNAQKRYEMTQNINKAKSEHQKISEILQKEFGIKNPTKSDIIRYRLYKELEHNGYKELYTNTYIAPDVLFSKNIDIEHIVPKARVFDDSFSNKTLAFKDFNIKKGESTAFDYITSLKNEEKLNQYLARVENAYKTKNISPAKYKNLLKKASEIGDGFINRDLRDTQYIAKKAKEILFQVTKNVLSTSGSITDRLREDWSLVDVMKELNMPKYQSLGLTEVEERKDGNKVTVIKDWTKRNDHRHHAMDALTVAFTKPSYIQYLNHLNARKDENNKNYSVILAIEKKETIKVPTNNGKNKRVFIEPIPNFRQVAKKHLEEIFISHKAKNKVVTKNTNKPAGTNKQQITLTPRGQLHKETIYGKYQYYVNKEEKVGVKFDKETIAKVSNPLYREALLKRLQANDNDPKKAFTGKNALSKNPIYLDEAKTKTLPEKVNLTYLEEDFSVRKKIVPKNPTSKEFVPNLKSIEKVVDEGVRNILIERLRVYNNDPEKAFVDLEKNPIWLNKEKGIAIKRVTISGVNNAQPLHIGKDHLGKTTLNKEGKEIPVDYVSTGNNHHVAIYRDKEGNLQEQIVSFFEAVVRTQQGLPIIDKTYKQEEGWQFLFTMKQNEMFVFPNEATGFNPAEIDLLDPKNKKQISPNLFRVQKIATKDYFFRHHLETNVETDNVLKNTTWKREGLSGLKDIVKVRINHLGDIVSIGEY

SEQ ID NO: 159 - protein, 1450 aa, Capnocytophaga sp.
  Capnocytophaga sp. oral taxon 412 str. F0487
MKHILGLDLGSNSIGWAFVQQDFENKQGKIIATGSRIIPMDQGILGDFERGNTVSQTAERTTYRNTRRLRERHLLRRERLHRVLHILGFLPPHYDSQIDFTKRYGKFIDNAEPKIAYNNGNFIFMNSFNEMIEDFKKYQPQLFYKKSNGEESKIPYDWTIYYLRKKALSQKITQQELAWLILHFNQKRGYYQLRGEEETENPNKEVAFHSLEVVDVEAEAPNKKGEIWYTIRLENGWIYRRTSKIPLDDWKGKTRDFIVTTDLNDDGTIKLDKEGKEKRSFRAPDENDWNLLKKKTEHDIDFSGKTVGAYIYDHLLQNPNQKIKGKLVRTIERKYYKDELKAILAKQIALQPELFTETLLADCIRELYRKNETQQQNLLSKDFLHLFVEDIIFYQRPLRSKKSTIANCTLEKRSYIDKETNERKDTPIKVCAKSNPYYQEFRVLQWLQNLRIYEIETDREVTAEFIETAQDNEALFNFLMSQKEIDNESLLKYFLFAKNPQIKDKVAKSELKKWLTTYRWNYVYDAADNSSKKYPMNETGYELQQYLQKVEGLPANFLTFDITYRLWHLLYSVKDKVEFEKALKKFAQEYQLDEASFVDSFKNFKPYPNEYGSFSEKAIKKLLPLMRFGNHWDFNRIDVSTQKRIDDLINGVANDEIRTIIREKAEKYQLNSETCFQGLPLWLAQYVVYNRHAEAADIEKWTSVNDLEAYLEDFKQHSLRNPIVEQVITETLRVVRDIWQRYGGGQANFFDEIHIELGRELKKTAEERKQLSNRNQENENTNLRIKKLLAELKEDASIQNVRPYSPVQQELLKIYEEGVFSATDEVEEDIQKIRKKAEPTTPEIQRYKLWLEQKYKSPYTGEVISLTKLFTEEYEIEHIIPQSRYYDDSLSNKVICESAVNKLKTNQLGLEFIQNHHGEKVRITANKEVTIFTEEQYKEFVKKHYANNSAKQQKLLLNEIPEKMVARQLNDTRYISKYISEILSKIVRSDEKDEGVNSKNIIPCTGKITTALKQDWGLNDVWNELILPRFERMNQLTQTQLFTSYNDRFQKNLPTVPIEYSQGFQKKRIDHRHHAMDALVIACATREHINYMNNQHALDKSKDKKEKQQSRIDLRTILCEKKNNNWQFKKPWSTFTQEAQEALEHIVVSFKQNLRVINKATNYYEKWEEKNGVLVKKKVKQEGTNWAIRKPLHKETVSGKIVLDRKIGKDKILTATRKSVDITFTEKIISSITDTGIQKILLNYLKYKGSPEVAFSAEGLEELNKNIAQYNDGKKHQPIYKVRIFEEGSKFPLGETGAKATKYVEAAKGTNLFFGVYQGKGKRTYATIPLNEVIERQKQGLPSVPERNEKGEPLLFSLSPNDLVYVPMEGEIAETIDFNNLSKEQKERIYKTVSFTGNQCFFVQEAVATPIVNKIEYSPLNKMERDILGTMIKEVCIKLKVDRLGNITKA

SEQ ID NO: 160 - protein, 1426 aa, Capnocytophaga sputigena
  Capnocytophaga sputigena ATCC 33612
MKNILGLDLGITSISFAHIVEDENKEKSEIKELGVRIVSLTTDEQSDFEKGKSITTNANRTLKHGARLNLDRYQQRRKYLIDLLQKANLITSSSILAENGKNTTHSTWQLRAKAVTERIEKEEFARVLLAINKKRGYKSSRKAKTEDEGQAIDGMAIAKRLYDENLTPGQLSLQLLQQNKKLLPDFYRSDLQREFDLVWNFQKQFYPDILTDSFYKELQGKGKDATSKAFSKRYHFDTAENKGSKESVRLQAYQWRAEAISKQLSKEEVAYVLTEINNNLNNASGYLGAISDRSKELYFNRQTVGQYLYAQLQENRHNSLKNKVFYRQDYLDEFERIWETQASFHKELTDELKKQIRDVVIFYQRKLKSQKGLISFCEFESKEIEIEKDGKTITKTIGARVVPKSSPLFQEFKIWQILNNVTCKRKGIRKKKSSAKSTELDLFNEPSQTIFSLDMECKQLLFDELNLKGDLKSDKVLKLLGYSPQEWEINYNQLEGNRTQKALYEAYLKIVEMEAHDVKDILQIKSAKDDWSLDESPLSASEIKEKVKDIFQALGICTKILYFDPLLPVKEFEKQDSYQLWHLLYSYESDDSTSGNETLYRILEKKYAFKREHARILANVALQDDYGSLSTKAIRKIYPNIKENQYSKACELAGYKHSKLSLTTEELEARELKNIIPLLKKNALRNPVVEKILNQMINVVNALIEKNSERDAEGKITKYFHFDEIRIELARELKKNAQKRYEMTQNINKAKLEHQKISEILQKKFGIKNPTKSDIIRYRLYQELEHNGYKELYTNAPIARDMLFSKNIEIEHIVPKARVFDDSFSNKTLTFHRINSNKGEYTAFDYITSLNSEEELNQYLTRVENAYKTKSISLTKYKNLLKKASEIGDGFINRDLRDTQYIAKKAKEILFQVTKNVLSTSGSITDRLREDWGLVDVMKELNMPKYQSLGLTEVEERKEGNKVTVIKNWTKRNDHRHHAMDALTVAFTKPSYIQYLNHLNARKDENNKNYSVILAIEEKETIKVPTNNGKNKRVFIEPIPNFRQVAKKHLEEIFISHKAKNKVVTKNVNKPAGTDKQQITLTPRGQLHKETIYGKYQYYVNKEEKVGVKFDERTITKVSNPLYREALLKRLQANDNDPKKAFTGKNALSKNPIYLDETKTKTLPEKVNLTYLEEDFSIRKDISPDNFKDLKSIEKVIDQGVKRILIKRLQDYDNDPKKAFVDLEKNPIWLNKEKGIAIKRVTISGVSNAQPLHIGKDHLGKTTLNKEGNEIPVDYVSTGNNHHVAIYRDKEGNLQEQIVSFFEAVVRTQQGLPIIDKTYKQEEGWQFLFTMKQNEMFVFPNATTGFNPAEIDLLDPKNKKLISPNLFRVQKIATKDYFFRHHLETNVETDNVLKNTTWKREGLSGLKDIVKVRINHLGDIVSIGEY

SEQ ID NO: 161 - protein, 1140 aa, Catellicoccus marimammalium
  Catellicoccus marimammalium M35/04/3
MKNMTKVNVGLDVGISSAGWSVINAETNQILESGVRLFSGSDADENVNRRNQRQGRRLFRRRKLRIQEAKKYLENVFQLKDIEPKDEWNPYEIRVRALNEKVSKEELSIALLNIVKHRGISYELEDVTDEEGTNTQSFQSGLDYNRRLLKTKTVGEIQYDRLQKYGQVRGQIQTEDGLLINIFPTKNYVEEVERILETQKKYHPEIDDVFIEKIISFVTRKREYFVGPGNEKSRTDYGIYRENGETLDNLFEILIGKDKFYPEEYRAAGSSYTAQIFNLLNDLNNLRIPTTEDHHLTKAQKEEIITELKNTSRLSGGMLKLISKVTKAPKEEISGYRKDEKDKPDLHSLAYYRKQKNMLEKEGIQIADFSEELLDELATMMTLNTEPGEIRKQLNKITNQYDILTPEVIEVLVKNHTAFVATSNHKWHRFSLKLMKEFIPELLETSKEQSTILCERGFIQNRASYLDENHHFNYAELRENLYNPVVRKSTCEMLKVFTAIQEKYPNIQNVIVELPRETNEDEQKRKIKKINDNNAKRKKEILKEAQAQSGLSEEALEEKLLKTKGLYLKLMLWYEQEGKCVYSGQEIPLSDLLQNKGGYEVDHIIPISISFDDRLCNKVLVRQQLNSQKSNQTPFEYMTTHTDGHLSFHELKELVGKNKRFSKEKRELLLAEIYSNDIETRKRFINRNLVDTSYTARIVLNALQQYKKENQLSMNVSVVRGAMTNILRKKVKLDKTRETFHHHAIDASLMAVIPNIEFFKERKEWLPKSANEEVVEVEVSEEETMPEKEFKVKMRLPESFIQDVQILQRNSFAKEEVSGPQTRERNLKIKFSHQVDQKMNRKVADDTIYGTRQAQLGKDKKEETYVIGKIKDIYNYDEYVRFKKRYDKNKESFLMYHHDPQTFEKLEEILAQYPEYIEDEKGKKKKVSPFALYREENGPVTKYAKKNNGPVIKQLKYYDSKLNRKIDISHKYSTKNRQVVLQSLKPYRTDVYRNQDTGEYTLVGIDQNDGKFVNGHYGIPKSRYEEIKANNKLSEHDEFVFSLYKNSMVKVIDENGESIVVRYLSRSMPNRKNNAEIKPVEKYQFEDGEVVPVYGKCRKQMQTVFVKKGWTLLKGNTDILGNTYFVEKESENPKKMIDDK

SEQ ID NO: 162 - protein, 1329 aa, Catenibacterium mitsuokai
  Catenibacterium mitsuokai DSM 15897
IVDYCIGLDLGTGSVGWAVVDMNHRLMKRNGKHLWGSRLFSNAETAANRRASRSIRRRYNKRRERIRLLRAILQDMVLEKDPTFFIRLEHTSFLDEEDKAKYLGTDYKDNYNLFIDEDFNDYTYYHKYPTIYHLRKALCESTEKADPRLIYLALHHIVKYRGNFLYEGQKFNMDASNIEDKLSDIFTQFTSFNNIPYEDDEKKNLEILEILKKPLSKKAKVDEVMTLIAPEKDYKSAFKELVTGIAGNKMNVTKMILCEPIKQGDSEIKLKFSDSNYDDQFSEVEKDLGEYVEFVDALHNVYSWVELQTIMGATHTDNASISEAMVSRYNKHHDDLKLLKDCIKNNVPNKYFDMFRNDSEKSKGYYNYINRPSKAPVDEFYKYVKKCIEKVDTPEAKQILNDIELENFLLKQNSRTNGSVPYQMQLDEMIKIIDNQAEYYPILKEKREQLLSILTFRIPYYFGPLNETSEHAWIKRLEGKENQRILPWNYQDIVDVDATAEGFIKRMRSYCTYFPDEEVLPKNSLIVSKYEVYNELNKIRVDDKLLEVDVKNDIYNELFMKNKTVTEKKLKNWLVNNQCCSKDAEIKGFQKENQFSTSLTPWIDFTNIFGKIDQSNFDLIENIIYDLTVFEDKKIMKRRLKKKYALPDDKVKQILKLKYKDWSRLSKKLLDGIVADNRFGSSVTVLDVLEMSRLNLMEIINDKDLGYAQMIEEATSCPEDGKFTYEEVERLAGSPALKRGIWQSLQIVEEITKVMKCRPKYIYIEFERSEEAKERTESKIKKLENVYKDLDEQTKKEYKSVLEELKGFDNTKKISSDSLFLYFTQLGKCMYSGKKLDIDSLDKYQIDHIVPQSLVKDDSFDNRVLVVPSENQRKLDDLVVPFDIRDKMYRFWKLLFDHELISPKKFYSLIKTEYTERDEERFINRQLVETRQITKNVTQIIEDHYSTTKVAAIRANLSHEFRVKNHIYKNRDINDYHHAHDAYIVALIGGFMRDRYPNMHDSKAVYSEYMKMFRKNKNDQKRWKDGFVINSMNYPYEVDGKLIWNPDLINEIKKCFYYKDCYCTTKLDQKSGQLFNLTVLSNDAHADKGVTKAVVPVNKNRSDVHKYGGFSGLQYTIVAIEGQKKKGKKTELVKKISGVPLHLKAASINEKINYIEEKEGLSDVRIIKDNIPVNQMIEMDGGEYLLTSPTEYVNARQLVLNEKQCALIADIYNAIYKQDYDNLDDILMIQLYIELTNKMKVLYPAYRGIAEKFESMNENYVVISKEEKANIIKQMLIVMHRGPQNGNIVYDDFKISDRIGRLKTKNHNLNNIVFISQSPTGIYTKKYKL

SEQ ID NO: 163 - protein, 1419 aa, Chryseobacterium sp.
  Chryseobacterium sp. CF314
MMIKNILGLDLGTNSIGWALIKQNFENKYGEILGMGSRIIPMSQDVLGEFGKGNSVSQTAARTGYRGVRRLRERFLLRRERLHRVLNVLNFLPEHYASQIDFEKRFGKFKYETEPKLAYNNDGFFFKNSFDEMLGDFKDHQFHLLENGRKVPYDWTIYYLRKKALSQKIEKEELAWILLNFNQKRGYYQLRGEDFEEEKDRVFVRLKVDRVVDSGENIKGKILYDVYFENGWKYEKQIVKTEDWIGRTKEFIVTESILKNGDTKRTFKAVDSEKDWIAIKTKTEQEIDKSHKTVGAYIYEALLQNPKQKIKGKLVRTIERKFYREELKKILERQKEFHPELQSDDLYNDCIRELYRNNEAHQITLSKKDFVHLLLNDLIFYQRPLRSQKSSVSNCTLEFRKYKDENGVEHAQYLKTIPKSNPYYQEFRVWQWMFNLNIYRKDDDTNVTKEFLSSTEDYETLFEFLNNRKEVDQKALLRHFKLNEKTHRWNYVEDKKYPCNETKTMISTRLEKVENYPSDFLTREMEQNIWHIIYSVNDKIEYEKALKSFAHKNNLDENSFFEAFKKFPPFKSEYGSFSEKAIKKLLPLLRLGKYWNWESIDRKSQGRIEKIITGEFDGNIKDKVREKAIHLTAENDFQGLQLWLAQYIVYGRHSEASMIGKWNSADDLEEFLKGFKQHSLRNPIVEQVITETLRVVKDIWLKYGNGAKDFFSEIHIELGREMKQTKDERVDATKRITENENTNLRIKALLAEMMNDNSVENIRPYSPMQQEILKIYEDGILKSDIEIDDDILKISKTAQPSSSDLKRYKLWLEQRYKSPYTGQIIPLNKLFTSEYEIEHIIPQSRYFDDSFSNKIICESAVNKLKDNYIGLGFIKQFGGMIVECGFGKSVEIFKAEEYEDFVKKHYANNRSKRNKLLLEEIPEKMIDRQLNDTRHISKYISGVLSNIVRQEDGTDEGVNSKNIVPGNGKITTQLKQDWGLNDVWNELILPRFERMNQLTNSTDFTSWNKNHQKFLPTVPIEFSKGFSKKRIDHRHHAMDALVIACATKDHINLLNNQSAKSDTKRYDLKRKLMKFERVVYSHSKTGEKIEKEVPKQFLKPWDNFTVDAKNKMETIIVSFKQNLRVINKATNHYEKWIEKDGIKRKELIKQEGTNWAIRKPMHKETVSGKVDLPGIKIPKGKILTATRKSLDTSFDLKTINSITDTGIQKILKNYLEFKGSSELAFSPEGIEDMNKNIEKFNDGKPHQSINKVRIFELGSKFSVGQTGNKKDKYVEAAKGTNLFFAVYEDKNGKRSYETIPLNEVIERQKQGLDSVSFKNKEDFLLCPNDLVYVPSEDELENIYNIDFKNLTTEKTGNIYKVVSFSGNQIFFIRQDIAISIVNKAEFSTLNKMERAIDGSMIKENCIKLKIDRLGNIAKI

SEQ ID NO: 164 - protein, 1021 aa, Clostridium cellulolyticum
MKYTLGLDVGIASVGWAVIDKDNNKIIDLGVRCFDKAEESKTGESLATARRIARGMRRRISRRSQRLRLVKKLFVQYEIIKDSSEFNRIFDTSRDGWKDPWELRYNALSRILKPYELVQVLTHITKRRGFKSNRKEDLSTTKEGVVITSIKNNSEMLRTKNYRTIGEMIFMETPENSNKRNKVDEYIHTIAREDLLNEIKYIFSIQRKLGSPFVTEKLEHDFLNIWEFQRPFASGDSILSKVGKCTLLKEELRAPTSCYTSEYFGLLQSINNLVLVEDNNTLTLNNDQRAKIIEYAHFKNEIKYSEIRKLLDIEPEILFKAHNLTHKNPSGNNESKKFYEMKSYHKLKSTLPTDIWGKLHSNKESLDNLFYCLTVYKNDNEIKDYLQANNLDYLIEYIAKLPTFNKFKHLSLVAMKRIIPFMEKGYKYSDACNMAELDFTGSSKLEKCNKLTVEPIIENVTNPVVIRALTQARKVINAIIQKYGLPYMVNIELAREAGMTRQDRDNLKKEHENNRKAREKISDLIRQNGRVASGLDILKWRLWEDQGGRCAYSGKPIPVCDLLNDSLTQIDHIYPYSRSMDDSYMNKVLVLTDENQNKRSYTPYEVWGSTEKWEDFEARIYSMHLPQSKEKRLLNRNFITKDLDSFISRNLNDTRYISRFLKNYIESYLQFSNDSPKSCVVCVNGQCTAQLRSRWGLNKNREESDLHHALDAAVIACADRKIIKEITNYYNERENHNYKVKYPLPWHSFRQDLMETLAGVFISRAPRRKITGPAHDETIRSPKHFNKGLTSVKIPLTTVTLEKLETMVKNTKGGISDKAVYNVLKNRLIEHNNKPLKAFAEKIYKPLKNGTNGAIIRSIRVETPSYTGVFRNEGKGISDNSLMVRVDVFKKKDKYYLVPIYVAHMIKKELPSKAIVPLKPESQWELIDSTHEFLFSLYQNDYLVIKTKKGITEGYYRSCHRGTGSLSLMPHFANNKNVKIDIGVRTAISIEKYNVDILGNKSIVKGEPRRGMEKYNSFKSN

SEQ ID NO: 165 - protein, 1065 aa, Clostridium perfringens
  Clostridium perfringens C str. JGS1495
MNKDINYALGLDIGITSVGWAVINLDLNRIEDLGVRIFNAAENPKDGSSLALPRRLARGRRRLLRRKAYRVERVRKLIVKNNILTKEELEGLFKNKEVIDVWEARVKGLDYKLSREEWAKILINFCKRRGFKSNRKNETKDKEAGQILSSISYNIEKMKETNSRTIGEYIYNEVKNSDDSYAPLRNKFGEYKMCVSRDVLREEIHTLFEKQRELGNNFASDEIEDKYFEIFNSQRPFSNFEDLEKLVGFCTFERKKHKRAPKHCISSEEFTLYEGINKLSIIKDGEKRKLSEEERTLVVNEAFNKKEIKYTTLRKLLGLSEDELFSTLTYSIDKDISKTENTKFVSLKGYHEIKRAIEKGVSKKAWQDIENNRNLLNDIAYVLTLGKTDDEIEKQLRLRNVPEELFESLLDMSFSKFNNLSIYALEKILPFMKEGYQYNEACEKAGYNFKAIYEGVRTKKLPVIEIDEIVNPVVNRALAQTRKVINSVIDKYGSPVRINIELARDLAKNFKDRKLIEKEQKENRANLDKIRENLRELMDKEPTAVEVLKYRLWEQQRGECAYTQSQIALERLFSPGYCEIDHIIPFSRSFDDSLSNKILVLGSENQRKGNKIPYEYFGEDSERWNSFEIWVKGSYLNYKKKANLLKKKFTEEEQRDWKARNLQDTKYICRYISNFVNNRLEFKESENKQKVITVNGRATAYLRSRWGLNKVREDGDKHHALDAAVVGVTTQGMVQKISKYSKAHELYTVRKNDEFVDVETGECVDVDEYKEIRKDILPRPWRGFSEELKLRLSDNPLEELKKLPIETYNEEFIKENVKPIFVSRVPFRKISGKLFKETIYSERAFKDGYFVSKKSLVDLKRGDLDNFYNYECDKKLYDAISERMKEFNYNGKKAFESPFRKPTKSGKEGPVVRSVKIKSAAPFKDGIPMNEGLVAKEGMVRIDIYEKEGKYFVVPVYRYQLAKGIVPKRAAIAGKSELKWPIMDQTYNFKFSIFKNDLIEIKYAKKDGYFGYYDGFDRHTASLVIENHDNSDRYRGIGVKTGVVEFNKYEVDVLGNYHKVNLGGN

SEQ ID NO: 166 - protein, 1065 aa, Clostridium perfringens
  Clostridium perfringens D str. JGS1721
MNKDINYALGLDIGITSVGWAVINLDLNRIEDLGVRIFNAAENLKDGSSLALPRRLARGRRRLLRRKAYRVERVRKLILKNNILTKEELEGLFKNKEVIDVWEARVKGLDYKLSREEWAKILINFCKRRGFKSNRKNEAKDKEAGQILSSISYNIEKMKETNSRTIGEYIYNEVKNSEDSYAPLRNKFGEYKMCVSRDVIREEIHTLFEKQRELGNNFASDEIEDKYFEIFNSQRPFSNFEDLEKLVGFCTFERKKHKRAPKHCISSEEFTLYEGINKLSIIKDGEKRKLSEEERTLVVNEAFNKKEIKYTTLRKLLGLSEEELFSTLTYSIDKDISKTENTKFVSLKGYHEIKRAIEKGVSKKAWQDIENNRNLLNDIAYVLTLGKTDDEIEKQLRLRNVPEELFESLLDMSFNKFNNLSIYALEKILPFMKEGYQYNEACEKAGYNFKAIYEGVRTKKLPVIEIDEIVNPVVNRALAQTRKVINSVIDKYGSPVRINIELARDLAKNFKDRKLIEKEQKENRANLDKIRENLRELMDKEPTVVEVLKYRLWEQQRGECAYTQSQIPLERLFSPGYCEIDHIIPFSRSFDDSLSNKILVLGSENQRKGNRTPYEYFGEDSERWNSFEIWVKGSYLNYKKKANLLKKKFSEEEQRDWKARNLQDTKYICRYISNFVNNRLEFKESENKQKVITVNGRATAYLRSRWGLNKVREDGDKHHALDAAVVGVTTQGMVQKISKYSKAHELYTVRKNDEFVDVETGECVDVDEYKEIRKDILPRPWRGFSEELKLRLSDNPLEELKKSPIETYNEEFIKENVKPIFVSRVPFRKISGKLFKETIYSERAFKDGYFVSKKSLVDLKRGDLDNFYNYECDKKLYDAISERMKEFNYNGKKAFESPFRKPTKSGKEGPVVRSVKIKSAVPFKDGIPMNEGLVAKEGMVRIDIYEKEGKYFVVPVYRYQLAKGIVPKRAAIAKKDELKWPIMDQTYNFKFSIYKNDLIEVKYDKKGVYFGYYDGFDRNSASLTIEKHDNSERYRSIGLKVGVLEINKYEVDVLGNYHKVKLGGN

SEQ ID NO: 167 - protein, 1116 aa, Clostridium spiroforme
  Clostridium spiroforme DSM 1552
MVEFLLKEMKIMGRLVLGLDIGITSVGYGVIDIDKNEFVDYGVRLFKEGTAINNEERRSKRGARRLKRRKTNRIADMKKLLERNGLIDEQYTALNNPYEIRKKGLKNKLSNYELATAILHITKNRGTCLESNADETQDEESTKNILSKNALELKDKYICEIQLARLEESGKIRGINNNFKTEDYLKELSKILENQDLEKETIDKIKEIVARRRRYDQGPGSEKSPTPYGSYRMENGELVHVNLIDMMRGKCSVFPDQLRAPQQSYSAELFNLLNDLNNLKINGEKLSSTEKQKIIDFVNEKGGITVKQLLKLIDVGITEISGFRIDKNEKPLITEFKGYKKVLKVFKNYNQESLLNDKSIVDTIMDINTKIKSIDERSDQLKQVLPSLDTSIINDLASIKGVSGYHSLSLKALNLINNEMLKTEMNQMQVLHQLDIFDKNRVSLKGQRQIYADDNAILSPVAKRAHRETFKVINKLRSIYGEFDSIVIETTRDKNTQDQKKRIKNNQKNYEERNTEVNNFLKEAGYNPENINAKTKMKIRLYIEQDAKSAYTLQDINLKELIEDEKAYEIDHIIPISISLDDSFNNKVLTTHDENQEKGNLTPISAFLKGKFHNGNLNTYKVFIQNNKNLNRKKKEYLLCEDDITRYEVVQNFINRNLVDTSYACRTVMNTLVHYFKDNEINTKVHTIKGQATSTFRKRIGLIKDREEDYFHHAIDALIVASLKKMNLINSYLMKVDFNEMYDEETGEIFNVLPDNSYLDEKYISFVSNLKNIYEESNKYIRGVMIKEKMTYPLIKVSHKIDTKPNRKISDDTIYSTRNVDNQDMLVERIKNIYDPKENAANTLINDIINDNTDKYIMYHKDPQTFDKIKAIVLNHFNEFKTDKNCYIVTKEGLYKLKGTSPLALYYEEFGPITKYAKKNNGPTIHSMKFYSEKLGNHLSITHKYSTVNKKVITKQISPYRTDFYQSPEGKYKFVTVRYKDVAYNAKKDKYIIDHSWYREQKKLKKIADEWIFVCSVHRDELIGIMKADGQKRIFDSSTESDGETLYHDAKTYEILKFTATNNDITGRFEVKPIYCYCKKQLMVSIGTCRKIQKFATDVLGNLYIVKDNVLKLEFK

SEQ ID NO: 168 - protein, 1338 aa, Coprococcus catus
  Coprococcus catus GD/7
MKQEYFLGLDMGTGSLGWAVTDSTYQVMRKHGKALWGTRLFESASTAEERRMFRTARRRLDRRNWRIQVLQEIFSEEISKVDPGFFLRMKESKYYPEDKRDAEGNCPELPYALFVDDNYTDKNYHKDYPTIYHLRKMLMETTEIPDIRLVYLVLHHMMKHRGHFLLSGDISQIKEFKSTFEQLIQNIQDEELEWHISLDDAAIQFVEHVLKDRNLTRSTKKSRLIKQLNAKSACEKAILNLLSGGTVKLSDIFNNKELDESERPKVSFADSGYDDYIGIVEAELAEQYYIIASAKAVYDWSVLVEILGNSVSISEAKIKVYQKHQADLKTLKKIVRQYMTKEDYKRVFVDTEEKLNNYSAYIGMTKKNGKKVDLKSKQCTQADFYDFLKKNVIKVIDHKEITQEIESEIEKENFLPKQVTKDNGVIPYQVHDYELKKILDNLGTRMPFIKENAEKIQQLFEFRIPYYVGPLNRVDDGKDGKFTWSVRKSDARIYPWNFTEVIDVEASAEKFIRRMTNKCTYLVGEDVLPKDSLVYSKFMVLNELNNLRLNGEKISVELKQRIYEELFCKYRKVTRKKLERYLVIEGIAKKGVEITGIDGDFKASLTAYHDFKERLTDVQLSQRAKEAIVLNVVLFGDDKKLLKQRLSKMYPNLTTGQLKGICSLSYQGWGRLSKTFLEEITVPAPGTGEVWNIMTALWQTNDNLMQLLSRNYGFTNEVEEFNTLKKETDLSYKTVDELYVSPAVKRQIWQTLKVVKEIQKVMGNAPKRVFVEMAREKQEGKRSDSRKKQLVELYRACKNEERDWITELNAQSDQQLRSDKLFLYYIQKGRCMYSGETIQLDELWDNTKYDIDHIYPQSKTMDDSLNNRVLVKKNYNAIKSDTYPLSLDIQKKMMSFWKMLQQQGFITKEKYVRLVRSDELSADELAGFIERQIVETRQSTKAVATILKEALPDTEIVYVKAGNVSNFRQTYELLKVREMNDLHHAKDAYLNIVVGNAYFVKFTKNAAWFIRNNPGRSYNLKRMFEFDIERSGEIAWKAGNKGSIVTVKKVMQKNNILVTRKAYEVKGGLFDQQIMKKGKGQVPIKGNDERLADIEKYGGYNKAAGTYFMLVKSLDKKGKEIRTIEFVPLYLKNQIEINHESAIQYLAQERGLNSPEILLSKIKIDTLFKVDGFKMWLSGRTGNQLIFKGANQLILSHQEAAILKGVVKYVNRKNENKDAKLSERDGMTEEKLLQLYDTFLDKLSNTVYSIRLSAQIKTLTEKRAKFIGLSNEDQCIVLNEILHMFQCQSGSANLKLIGGPGSAGILVMNNNITACKQISVINQSPTGIYEKEIDLIKL

SEQ ID NO: 169 - protein, 1384 aa, Coriobacterium glomerans
MKLRGIEDDYSIGLDMGTSSVGWAVTDERGTLAHFKRKPTWGSRLFREAQTAAVARMPRGQRRRYVRRRWRLDLLQKLFEQQMEQADPDFFIRLRQSRLLRDDRAEEHADYRWPLFNDCKFTERDYYQRFPTIYHVRSWLMETDEQADIRLIYLALHNIVKHRGNFLREGQSLSAKSARPDEALNHLRETLRVWSSERGFECSIADNGSILAMLTHPDLSPSDRRKKIAPLFDVKSDDAAADKKLGIALAGAVIGLKTEFKNIFGDFPCEDSSIYLSNDEAVDAVRSACPDDCAELFDRLCEVYSAYVLQGLLSYAPGQTISANMVEKYRRYGEDLALLKKLVKIYAPDQYRMFFSGATYPGTGIYDAAQARGYTKYNLGPKKSEYKPSESMQYDDFRKAVEKLFAKTDARADERYRMMMDRFDKQQFLRRLKTSDNGSIYHQLHLEELKAIVENQGRFYPFLKRDADKLVSLVSFRIPYYVGPLSTRNARTDQHGENRFAWSERKPGMQDEPIFPWNWESIIDRSKSAEKFILRMTGMCTYLQQEPVLPKSSLLYEEFCVLNELNGAHWSIDGDDEHRFDAADREGIIEELFRRKRTVSYGDVAGWMERERNQIGAHVCGGQGEKGFESKLGSYIFFCKDVFKVERLEQSDYPMIERIILWNTLFEDRKILSQRLKEEYGSRLSAEQIKTICKKRFTGWGRLSEKFLTGITVQVDEDSVSIMDVLREGCPVSGKRGRAMVMMEILRDEELGFQKKVDDFNRAFFAENAQALGVNELPGSPAVRRSLNQSIRIVDEIASIAGKAPANIFIEVTRDEDPKKKGRRTKRRYNDLKDALEAFKKEDPELWRELCETAPNDMDERLSLYFMQRGKCLYSGRAIDIHQLSNAGIYEVDHIIPRTYVKDDSLENKALVYREENQRKTDMLLIDPEIRRRMSGYWRMLHEAKLIGDKKFRNLLRSRIDDKALKGFIARQLVETGQMVKLVRSLLEARYPETNIISVKASISHDLRTAAELVKCREANDFHHAHDAFLACRVGLFIQKRHPCVYENPIGLSQVVRNYVRQQADIFKRCRTIPGSSGFIVNSFMTSGFDKETGEIFKDDWDAEAEVEGIRRSLNFRQCFISRMPFEDHGVFWDATIYSPRAKKTAALPLKQGLNPSRYGSFSREQFAYFFIYKARNPRKEQTLFEFAQVPVRLSAQIRQDENALERYARELAKDQGLEFIRIERSKILKNQLIEIDGDRLCITGKEEVRNACELAFAQDEMRVIRMLVSEKPVSRECVISLFNRILLHGDQASRRLSKQLKLALLSEAFSEASDNVQRNVVLGLIAIFNGSTNMVNLSDIGGSKFAGNVRIKYKKELASPKVNVHLIDQSVTGMFERRTKIGL

SEQ ID NO: 170 - protein, 1099 aa, Corynebacterium accolens
  Corynebacterium accolens ATCC 49725
MSLSYRVGIDVGTYSLGCTAIEVDDNDQPVNILSSVSLIHDSGLDPDQQKRAVTRLASSGVARRTRRLYRRRRRRMINLEKFLTSQGWETRPFEHYSDPYLPWNARVALVNGYISDDAQRGMYLSIAFRHIANHRGWRNPYWKVSSLYSPDKPSDAFEQIRKELEESTGHKIPETVTVGQLISFAQFGKDRLRGGGKKKDEKKPQEQVNQAVISARLHQIDHAREINEICRVQKIDDALRKQILDLVFAAESPKGAQIGRVGKDPLQPKLPRALKASDAFQQYRIVALAGNLRIYRDGVSTPLDRDEKLIVFNYLINLSHKEEPSWLKVAEVLNIDRGQLHGTATMTDDGERAGAAPPVHDTNRTILGCKIKPLVHWWEGANDDERAAMLKALSNSEVEDFDSPAGAQTQAFFANLDESEQEKLDSLHLPIGRAAYSEDTLMRLTSRMLDENLDLYEARLAEFDIPKDWAPPAPRIGEPVGNPAVDRVLKGVARWLEAAADEWGAPKSVVIEHVRDGFISKSKANEIDRANNARHKRNRELFKQMQENLGIDGKLRSSDLWRYQSVQRQNCQCAYCGSPITYTTCEMDHIVPRAGEGSTNTRDNLVATCHRCNLAKKNIPFAVWAAQTNIPGVSVKEALDRTRHWSEDSGMTSKDFKKFRKNVCDRLKRTVVDEPLDARSMESVAWMANELRGRVAQRFQEENTVVNVYRGELTAEARRAAGISDKLRFIDGTGKSRLDRRHHAVDAAVVAFTQNYVAETLAIRSNKKREAQLLQAAEQWKEFTGSDAEHRAAWNAWLPKMQKLAVLLQKALDEDRIAVTSNLRLRLGNGRAHEDSIGELKTIRVGDAISVTDIDRASSEALWCALTREPDFDENNGLPENPDRRIRIHGTWYDAEDDIEVFPVGAGAIKVRGGYAELSRFHHARIYKIPGKKAPVYCMLRVYNADLIRHRHEDLFSVEIKPQTMSVRQAEPKLRKALAENTAEYLGWLVTDDELVIDTSNFNTGQIAEMQSELGQVRRWRLDGFYSPSTLRLRPLQMSAEGLREDTSIGAKKIIDRPGWLPAINKLFGEGHVTVVRRDALGRARLTSNAHLPISWKAE

SEQ ID NO: 171 - protein, 1099 aa, Corynebacterium accolens
  Corynebacterium accolens ATCC 49726
MSLLYRVGIDVGTYSLGCTAIEVDDNDQPVSILSSVSLIHDSGLDPDQQKRAVTRLASSGVARRTRRLYRRRRRRMVKLENFLTAQGWETLPFERYSDPYLPWHARVALVNGYISDDTQRGQYLSIAFRHIANHRGWRNPYWKVSSLYSPDKPSDAFEQIRKELEASTGRQIPETATVGQLISFAQFGKDRLRGGGKQKDKKKPQEQVNQAVISARLHQIDHAREINEICRVQKIDDTLRKQILDLVFAAESPKGAQKGRVGKDPLQPKLFRALKASDAFQQYRIAALTGNLRIYRNGVTVPLDRDEKLIVFNYLVNLPKKEEPSWLKIAEILNIDRGQLRGTATMTDDGERAGATPPVHDTNRTILDSKVKPLAHWWENASDDERAAMLKSLSNSEVEDFDSPAGAQVQAFFADLDETEQEKLDSLHLPMGRAAYSEDTLMRLTNRMLDENLDLYEARLAEFGIPKDWAPPAPRIGEPVGNPAVDRVLKGVARWLEAAADEWGAPKSVVIEHVRDGFVSKSKAIEIDRANNNRHKRNRELFQKMQENLGIEGKVRSSDLWRYQSVQRQNCQCAYCGSPITYTTCEMDHIVPRAGEGSTNTRDNLVATCHRCNLAKKNIPFAVWAEKSTIPGVSVKEALDRTRHWSEDSGMSKKDFQKFRKNVCERLNRTVVDEPLDARSMESVAWMANELRGRVAQRFQEENTTVNVYRGALTAEARRAAGITDKLRFIDGTGKSRLDRRHHAVDAAVVAFIHNYVAETLAIRSNKKREAQLLQGTSQWKEFTGSDDKHRAVWNAWIPKMQKLAVLLQIALDEDRIVVTSNLRLRLGNGRAHEDTISELKTIRVGDAISVTDIDRASSEALWCALTREPDFDEKDGLPENPNRRIRVHGTWYDAEDEIEVFPVGAGAIKVRGGYAKLSRFHHARVYKIPGKKAPIYCMLRVYNTDLVQHRHEDLFSVELKPQTMSVRQAEPKLRKALAENTAEYLGWLVTDDELIIDTSTFRTGLIEEMQSEFGLVRRWRLDGFDSPSLLTLRPLHMSAEGLPDDCALGSRKIIDTKGWRVSINKVFNAGNTTVVRRDALGRARLTSNAHLPISWKEE

SEQ ID NO: 172 - protein, 1084 aa, Corynebacterium diphtheriae
MKYHVGIDVGTFSVGLAAIEVDDAGMPIKTLSLVSHIHDSGLDPDKIKSAVTRLASSGIARRTRRLYRRKRRRLQQLDKFIQRQGWPVIELEDYSDPLYPWKVRAELAASYIADEKERGEKLSVALRHIARHRGWRNPYAKVSSLYLPDEPSDAFKAIREEIKRASGQPVPETATVGQMVTLCELGTLKLRGEGGVLSARLQQSDHAREIQEICRMQEIGQELYRKIIDVVFAAESPKGSASSRVGKDPLQPGKNRALKASDAFQRYRIAALIGNLRVRVDGEKRILSVEEKNLVFDHLVNLAPKKEPEWVTIAEILGIDRGQLIGTATMTDDGERAGARPPTHDTNRSIVNSRIAPLVDWWKTASALEQHAMVKALSNAEVDDFDSPEGAKVQAFFADLDDDVHAKLDSLHLPVGRAAYSEDTLVRLTRRMLADGVDLYTARLQEFGIEPSWTPPAPRIGEPVGNPAVDRVLKTVSRWLKSATKTWGAPERVIIEHVREGFVTEKRAREMDGDMRRRAARNAKLFQEMQEKLNVQGKPSRADLWRYQSVQRQNCQCAYCGSPITFSNSEMDHIVPRAGQGSTNTRENLVAVCHRCNQSKGNTPFAIWAKNTSIEGVSVKEAVERTRHWVTDTGMRSTDFKKFTKAVVERFQRATMDEEIDARSMESVAWMANELRSRVAQHFASHGTTVRVYRGSLTAEARRASGISGKLEFLDGVGKSRLDRRHHAIDAAVIAFTSDYVAETLAVRSNLKQSQAHRQEAPQWREFTGKDAEHRAAWRVWCQKMEKLSALLTEDLRDDRVVVMSNVRLRLGNGSAHEETIGKLSKVKLGSQLSVSDIDKASSEALWCALTREPDFDPKDGLPANPERHIRVNGTHVYAGDNIGLFPVSAGSIALRGGYAELGSSFHHARVYKITSGKKPAFAMLRVYTIDLLPYRNQDLFSVELKPQTMSMRQAEKKLRDALATGNAEYLGWLVVDDELVVDTSKIATDQVKAVEAELGTIRRWRVDGFFGDTRLRLRPLQMSKEGIKKESAPELSKIIDRPGWLPAVNKLFSEGNVTVVRRDSLGRVRLESTAHLPVTWKVQ

SEQ ID NO: 173 - protein, 1084 aa, Corynebacterium diphtheriae
MKYHVGIDVGTFSVGLAAIEVDDAGMPIKTLSLVSHIHDSGLDPDKMKSAVTRLASSGIARRTRRLYRRKRRRLQQLDKFIQRQGWPVIELEDYSDPLYPWKVRAELAASYIADEKERGEKLSVALRHIARHRGWRNPYAKVSSLYLPDEPSDAFKSIREEIKRASGQPVPETATVGQMVTLCELGTLKLRGEGGVLSARLQQSDHAREIQEICRMQEIGQELYRKIIDVVFAAESPKGSASSRVGKDPLQPGKNRALKASDAFQRYRIAALIGNLRVRVDGEKRILSVEEKNLVFDHLVNLAPKKEPEWVTIAEILGIDRGQLIGTATMTDDGERAGARPPTHDTNRSIVNSRIAPLVDWWKTASALEQHAMVKALSNAEVDDFDSPEGAKVQAFFADLDDDVHAKLDSLHLPVGRAAYSEDTLVRLTRRMLADGVDLYTARLQEFGIEPSWTPPAPRIGEPVGNPAVDRVLKTVSRWLESATKTWGAPERVIIEHVREGFVTEKRAREMDGDMRRRAARNAKLFQEMQEKLNVQGKPSRADLWRYQSVQRQNCQCAYCGSPITFSNSEMDHIVPRAGQGSTNTRENLVAVCHRCNQSKGNTPFAIWAKNTSIEGVSVKEAVERTRHWVTDTGMRSTDFKKFTKAVVERFQRATMDEEIDARSMESVAWMANELRSRVAQHFASHGTTVRVYRGSLTAEARRASGISGKLEFLDGVGKSRLDRRHHAIDAAVIAFTSDYVAETLAVRSNLKQSQAHRQEAPQWREFTGKDAEHRAAWRVWCQKMEKLSALLTEDLRDDRVVVMSNVRLRLGNGSAHEETIGKLSKVKLGSQLSVSDIDKASSEALWCALTREPDFDPKDGLPANPERHIRVNGTHVYAGDNIGLFPVSAGSIALRGGYAELGSSFHHARVYKITSGKKPAFAMLRVYTIDLLPYRNQDLFSVELKPQTMSMRQAEKKLRDALATGNAEYLGWLVVDDELVVDTSKIATDQVKAVEAELGTIRRWRVDGFFGDTRLRLRPLQMSKEGIKKESAPELSKIIDRPGWLPAVNKLFSEGNVTVVRRDSLGRVRLESTAHLPVTWKVQ

SEQ ID NO: 174 - protein, 1084 aa, Corynebacterium diphtheriae
MKYHVGIDVGTFSVGLAAIEVDDAGMPIKTLSLVSHIHDSRLDPDKIKSAVTRLASSGIARRTRRLYRRKRRRLQQLDKFIQRQGWPVIELEDYSDPLYPWKVRAELAASYIADEKERGEKLSVALRHIARHRGWRNPYAKVSSLYLPDEPSDAFKAIREEIKRASGQPVPETATVGQMVTLCELGTLKLRGEGGVLSARLQQSDHAREIQEICRMQEIGQELYRKIIDVVFAAESPKGSASSRVGKDPLQPGKNRALKASDAFQRYRIAALIGNLRVRVDGEKRILSVEEKNLVFDHLVNLAPKKEPEWVTIAEILGIDRGQLIGTATMTDDGERAGARPPTHDTNRSIVNSRIAPLVDWWKTASALEQHAMVKALSNAEVDDFDSPEGAKVQAFFADLDDDVHAKLDSLHLPVGRAAYSEDTLVRLTRRMLADGVDLYTARLQEFGIEPSWTPPAPRIGEPVGNPAVDRVLKTVSRWLESATKTWGAPERVIIEHVREGFVTEKRAREMDGDMRRRAARNAKLFQEMQEKLNIQGKPSRADLWRYQSVQRQNCQCAYCGSPITFSNSEMDHIVPRAGQGSTNTRENLVAVCHRCNQSKGNTPFAIWAKNTSIEGVSVKEAVERTRHWVTDTGMRSTDFKKFTKAVVERFQRVTMDEEIDARSMESVAWMANELRSRVAQHFASRGTTVRVYRGSLTAEARRASGISGKLEFLDGVGKSRLDRRHHAIDAAVIAFTSDYVAETLAVRSNLKQSQAHRQEAPQWREFTGKDAEHRAAWRVWCQKMEKLSALLTEDLRDDRVVVMSNVRLRLGNGSAHEETIGKLSKVKLGSQLSVSDIDKASSEALWCALTREPDFDPKDGLPANPERHIRVNGTHVYAGDNIGLFPVSAGSIALRGGYAELGSSFHHARVYKITSGKKPAFAMLRVYTIDLLPYRNQDLFSVELKPQTMSMRQAEKKLRDALATGNAEYLGWLVVDDELVVDTSKIATDQVKAVEAELGTIRRWRVDGFFGDTRLRLRPLQMSKEGIKKESAPELSKIIDRPGWLPAVNKLFSEGNVTVVRRDSLGRVRLESTAHLPVTWKVQ

SEQ ID NO: 175 - protein, 1084 aa, Corynebacterium diphtheriae
  Corynebacterium diphtheriae bv. intermedius str. NCTC 5011
MKYHVGIDVGTFSVGLAAIEVDDAGMPIKTLSLVSHIHDSGLDPDEIKSAVTRLASSGIARRTRRLYRRKRRRLQQLDKFIQRQGWPVIELEDYSDPLYPWKVRAELAASYIADEKERGEKLSVALRHIARHRGWRNPYAKVSSLYLPDGPSDAFKAIREEIKRASGQPVPETATVGQMVTLCELGTLKLRGEGGVLSARLQQSDHAREIQEICRMQEIGQELYRKIIDVVFAAESPKGSASSRVGKDPLQPGKNRALKASDAFQRYRIAALIGNLRVRVDGEKRILSVEEKNLVFDHLVNLAPKKEPEWVTIAEILGIDRGQLIGTATMTDDGERAGARPPTHDTNRSIVNSRIAPLVDWWKTASALEQHAMVKALSNAEVDDFDSPEGAKVQAFFADLDDDVHAKLDSLHLPVGRAAYSEDTLVRLTRRMLADGVDLYTARLQEFGIEPSWTPPAPRIGEPVGNPAVDRVLKTVSRWLESATKTWGAPERVIIEHVREGFVTEKRAREMDGDMQRRAARNAKLFQEMQEKLNVQGKPSRADLWRYQSVQRQNCQCAYCGSPITFSNSEMDHIVPRAGQGSTNTRENLVAVCHRCNQSKGNTPFAIWAKNTSIEGVSVKEAVERTRHWVTDTGMRSPDFKKFTKAVVERFQRATMDEEIDARSMESVAWMANELRSRVAQHFASHGTTVRVYRGSLTAEARRASGISGKLKFFDGVGKSRLDRRHHAIDAAVIAFTSDYVAETLAVRSNLKQSQAHRQEAPQWREFTGKDAEHRAAWRVWCQKMEKLSALLTEDLRDDRVVVMSNVRLRLGNGSAHKETIGKLSKVKLGSQLSVSDIDKASSEALWCALTREPDFDPKEGLPANPERHIRVNGTHVYAGDNIGLFPVSAGSIALRGGYAELGSSFHHARVYKITSGKKPAFAMLRVYTIDLLPYRNQDLFSVELKPQTMSMRQAEKKLRDALATGNAEYLGWLVVDDELVVDTSKIATDQVKAVEAELGTIRRWRVDGFFSPSKLRLRPLQMSKEGIKKESAPELSKIIDRPGWLPAVNKLFSDGNVTVVRRDSLGRVRLESTAHLPVTWKVQ

SEQ ID NO: 176 - protein, 1084 aa, Corynebacterium diphtheriae
MKYHVGIDVGTFSVGLAAIEVDDAGMPIKTLSLVSHIHDSGLDPDKIKSAVTRLASSGIARRTRRLYRRKRRRLQQLDKFIQRQGWPVIELEDYSDPLYPWKVRAELAASYIADEKERGEKLSVALRHIARHRGWRNPYAKVSSLYLPDEPSDAFKAIREEIKRASGQPVPETATVGQMVTLCELGTLKLRGEGGVLSARLQQSDHAREIQEICRMQEIGQELYRKIIDVVFAAESPKGSASSRVGKDPLQPGKNRALKASDAFQRYRIAALIGNLRVRVDGEKRILSVEEKNLVFDHLVNLAPKKEPEWVTIAEILGIDRGQLIGTATMTDDGERAGARPPTHDTNRSIVNSRIAPLVDWWKTASALEQHAMVKALSNAEVDDFDSPEGAKVQAFFADLDDDVHAKLDSLHLPVGRAAYSEDTLVRLTRRMLADGVDLYTARLQEFGIEPSWTPPAPRIGEPVGNPAVDRVLKTVSRWLESATKTWGAPERVIIEHVREGFVTEKRAREMDGDMRRRAARNAKLFQEMQEKLNVQGKPSRADLWRYQSVQRQNCQCAYCGSPITFSNSEMDHIVPRAGQGSTNTRENLVAVCHRCNQSKGNTPFAIWAKNTSIEGVSVKEAVERTRHWVTDTGMRSTDFKKFTKAVVERFQRATMDEEIDARSMESVAWMANELRSRVAQHFASHGTTVRVYRGSLTAEARRASGISGKLEFLDGVGKSRLDRRHHAIDAAVIAFTSDYVAETLAVRSNLKQSQAHRQEAPQWREFTGKDAEHRAAWRVWCQKMEKLSALLTEDLRDDRVVVMSNVRLRLGNGSAHEETIGKLSKVKLGSQLSVSDIDKASSEALWCALTREPDFDPKDGLPANPERHIRVNGTHVYAGDNIGLFPVSAGSIALRGGYAELGSSFHHARVYKITSGKKPAFAMLRVYTIDLLPYRNQDLFSVELKPQTMSMRQAEKKLRDALATGNAEYLGWLVVDDELVVDTSKIATDQVKAVEAELGTIRRWRVDGFFGDTRLRLRPLQMSKEGIKKESAPELSKIIDRPGWLPAVNKLFSEGNVTVVRRDSLGRVRLESTAHLPVTWKVQ

SEQ ID NO: 177 - protein, 1084 aa, Corynebacterium diphtheriae
MKYHVGIDVGTFSVGLAAIEVDDAGMPIKTLSLVSHIHDSGLDPDEIKSAVTRLASSGIARRTRRLYRRKRRRLQQLDKFIQRQGWPVIELEDYSDPLYPWKVRAELAASYIADEKERGEKLSVALRHIARHRGWRNPYAKVSSLYLPDGPSDAFKAIREEIKRASGQPVPETATVGQMVTLCELGTLKLRGEGGVLSARLQQSDHAREIQEICRMQEIGQELYRKIIDVVFAAESPKGSASSRVGKDPLQPGKNRALKASDAFQRYRIAALIGNLRVWVDGEKRILSVEEKNLVFDHLVNLTPKKEPEWVTIAEILGIDRGQLIGTATMTDDGERAGARPPTHDTNRSIVNSRIAPLVDWWKTASALEQHAMVKALSNAEVDDFDSPERAKVQAFFADLDDDVHAKLDSLHLPVGRAAYSEDTLVRLTRRMLSDGVDLYTARLQEFGIEPSWTPPTPRIGEPVGNPAVDRVLKTVSRWLESATKTWGAPERVIIEHVREGFVTEKRAREMDGDMRRRAARNAKLFQEMQEKLNVQGKPSRADLWRYQSVQRQNCQCAYCGSPITFSNSEMDHIVPRAGQGSTNTRENLVAVCHRCNQSKGNTPFAIWAKNTSIEGVSVKEAVERTRHWVTDTGMRSTDFKKFTKAVVERFQRATMDEEIDARSMESVAWMANELRSRVAQHFASHGTTVRVYRGSLTAEARRASGISGKLEFLDGVGKSRLDRRHHAIDAAVIAFTSDYVAETLAVRSNLKQSQAHRQEAPQWREFTGKDAEHRATWRVWCQKMEKLSALLTEDLRDDRVVVMSNVRLRLGNGSAHEETIGKLSKVKLGSQLSVSDIDKASSEALWCALTREPDFDPKDGLPANPERHIRVNGTHVYAGDNIGLFPVSAGSIALRGGYAELGSSFHHARVYKITSGKKPAFAMLRVYTIDLLPYRNQDLFSVELKPQTMSMRQAEKKLRDALATGNAEYLGWLVVDDELVVDTSKIATDQVKAVEAELGTIRRWRVDGFFGDTRLRLRPLQMSKEGIKKESAPELSKIIDRPGWLPAVNKLFSEGNVTVVRRDSLGRVRLESTAHLPVTWKVQ

SEQ ID NO: 178 - protein, 1084 aa, Corynebacterium diphtheriae
MKYHVGIDVGTFSVGLAAIEVDDAGMPIKTLSLVSHIHDSGLDPDEIKSAVTRLASSGIARRTRRLYRRKRRRLQQLDKFIQRQGWPVIELEDYSDPLYPWKVRAELAASYIADEKERGEKLSVALRHIARHRGWRNPYAKVSSLYLPDGPSDAFKAIREEIKRASGQPVPETATVGQMVTLCELGTLKLRGEGGVLSARLQQSDYAREIQEICRMQEIGQELYRKIIDVVFAAESPKGSASSRVGKDPLQPGKNRALKASDAFQRYRIAALIGNLRVRVDGEKRILSVEEKNLVFDHLVNLTPKKEPEWVTIAEILGIDRGQLIGTATMTDDGERAGARPPTHDTNRSIVNSRIAPLVDWWKTASALEQHAMVKALSNAEVDDFDSPEGAKVQAFFADLDDDVHAKLDSLHLPVGRAAYSEDTLVRLTRRMLSDGVDLYTARLQEFGIEPSWTPPTPRIGEPVGNPAVDRVLKTVSRWLESATKTWGAPERVIIEHVREGFVTEKRAREMDGDMRRRAARNAKLFQEMQEKLNVQGKPSRADLWRYQSVQRQNCQCAYCGSPITFSNSEMDHIVPRAGQGSTNTRENLVAVCHRCNQSKGNTPFAIWAKNTSIEGVSVKEAVERTRHWVTDTGMRSTDFKKFTKAVVERFQRATMDEEIDARSMESVAWMANELRSRVAQHFASHGTTVRVYRGSLTAEARRASGISGKLKFFDGVGKSRLDRRHHAIDAAVIAFTSDYVAETLAVRSNLKQSQAHRQEAPQWREFTGKDAEHRAAWRVWCQKMEKLSALLTEDLRDDRVVVMSNVRLRLGNGSAHKETIGKLSKVKLSSQLSVSDIDKASSEALWCALTREPGFDPKEGLPANPERHIRVNGTHVYAGDNIGLFPVSAGSIALRGGYAELGSSFHHARVYKITSGKKPAFAMLRVYTIDLLPYRNQDLFSVELKPQTMSMRQAEKKLRDALATGNAEYLGWLVVDDELVVDTSKIATDQVKAVEAELGTIRRWRVDGFFSPSKLRLRPLQMSKEGIKKESAPELSKIIDRPGWLPAVNKLFSDGNVTVVRRDSLGRVRLESTAHLPVTWKVQ

SEQ ID NO: 179 - protein, 1084 aa, Corynebacterium diphtheriae
MKYHVGIDVGTFSVGLAAIEVDDAGMPIKTLSLVSHIHDSGLDPDKMKSAVTRLASSGIARRTRRLYRRKRRRLQQLDKFIQRQGWPVIELEDYSDPLYPWKVRAELAASYIADEKERGEKLSVALRHIARHRGWRNPYAKVSSLYLPDEPSDAFKSIREEIKRASGQPVPETATVGQMVTLCELGTLKLRGEGGVLSARLQQSDHAREIQEICRMQEIGQELYRKIIDVVFAAESPKGSASSRVGKDPLQPGKNRALKASDSFQRYRIAALISNLRVRVDGEKRILSVEEKNLVFDHLVNLAPKKEPEWVTIAEILGIDRGQLIGTATMTDDGERAGARPPTHDTNRSIVNSRIAPLVDWWKTASALEQHAMVKALSNAEVDDFDSPEGAKVQAFFADLDDDVHAKLDSLHLPVGRAAYSEDTLVRLTRRMLADGVDLYTARLQEFGIEPSWTPPAPRIGEPVGNPAVDRVLKTVSRWLESATKTWGAPERVIIEHVRDGFVTEKRAREMDGDMRRRAARNAKLFQEMQEKLNVQGKPSRADLWRYQSVQRQNCQCAYCGSPITFSNSEMDHIVPRAGQGSTNTRENLVAVCHRCNQSKGNTPFAIWAKNTSIEGVSVKEAVERTRHWVTDTGMRSTDFKKFTKAVVERFQRATMDEEIDARSMESVAWMANELRSRVAQHFASHGTTVRVYRGSLTAEARRASGISGKLEFLDGVGKSRLDRRHHAIDAAVIAFTSDYVAETLAVRSNLKQSQAHRQEAPQWREFTGKDAEHRAAWRVWCQKMEKLSALLTEDLRDDRVVVMSNVRLRLGNGSAHEETIGKLSKVKLGSQLSVSDIDKASSEALWCALTREPDFDPKDGLPANPERHIRVNGTHVYAGDNIGLFPVSAGSIALRGGYAELGSSFHHARVYKITSGKKPAFAMLRVYTIDLLPYRNQDLFSVELKPQTMSMRQAEKKLRDALATGNAEYLGWLVVDDELVVDTSKIATDQVKAVEAELGTIRRWRVDGFFGDTRLRLRPLQMSKEGIKKELAPELSKIIDRPGWLPAVNKLFSEGNVTVVRRDSLGRVRLESTAHLPVTWKVQ

SEQ ID NO: 180 - protein, 1089 aa, Corynebacterium matruchotii
  Corynebacterium matruchotii ATCC 14266
MNSANVNYRVGIDVGSYSLGMAAIAIDDDGKPTEILSAISLIHDSGVDPDSAKSAATRLATSGIARRTRRLYRRKRKRLAKLDKFISSQGWPLKEFEKYEDPFYPWRVRAELATTAITDQQELGEKLSIALRHIARHRGWRNPYSKVTALYTVTEPSDAFLAMQEECAKQLGRTIPETITVGQLVTGMNLGKTRLRGENSLLAARPRQSDNANEIHTIAKVQGLSNELVRQIIDHVFAAESPKGSAAEQVGKDPLQPTKKRALKASDAFQQYRIAALIGNLRIRGGKGNRRLTTEETRLVFDYLRSLPAKQEPTWQLVAEQLKIDRGNLVGTAIMTDDGERAGAKPPVHDTNRIMENTKIKPLATWWKSADADARAAMVKALSNAEVDDFDSQAGAQVQEFFFGISDEDQEKLDGLHLPIGRAAYSEDTLDRLTKRMIGEGMDLYEARQAEFKISNDWAPPAPEIGERVGNPAVDRVLKATARWLNAAERQWGAPKSVNIEHVRAAFMSESSARELDRDNQQRAKRNVKVVAEMQEKLGIEGRPSRADVWRFQSIQRQNGKCAYCGAEISFKNSEMDHIIPQAGEGSTNTRDNLVAVCRECNSSKSNIAFAVWAENTSRPGVSVQKAIERTHHWVTDSGLRKPEFDKFRKQVCDRLRRKATDEPIDARSLESVAWMANELRSRIAQKFKDGDTKVRVYKGALTAEARRASGISGKLEFVDGKGKSRLDRRHHAVDAAVVAFTSNYVAETLALRSNMKFDQELRRKAPQWREFTGSDHVHQVEWTKWKYRMQALAELLNNALVQDRIVVMHNLRLRLGNGAAHEDTIGKLTRLKVGDAISTTDIDRASSEALWCALTRDPDYDPKTGLPENPNRTIRIHGTHLTASDEITVFPVAAASIPIRDGFAKLGSNYHHVRLFRVPSGKKYKYCLMQVYTVDLLKFRKEDLFTVELKPQTISVRTCEALLRKALANGTAEYLGWLVSDDELLIDTSSFDTPGIVKLREEYGPVNRWRLAGLTSVTRLNLRPLYLSKEGLKPNVNPEIKKIIDNRSWIITVNKLFSSGHVKIIRRDALGRPRLHSAAHLPICWEVK

SEQ ID NO: 181 - protein, 1069 aa, Corynebacterium matruchotii
  Corynebacterium matruchotii ATCC 33806
MAAIAIDDDGKPTEILSAISLIHDSGVDPDSAKSAATRLATSGIARRTRRLYRRKRKRLAKLDKFISSQGWPLKEFEKYEDPFYPWRVRAELATTAITDQQELGEKLSIALRHIARHRGWRNPYSKVTALYTVTEPSDAFLAMQEECAKQLGRTIPETITVGQLVTGMNLGKTRLRGENSLLAARPRQSDNANEIHTIAKVQGLSNELVRQIIDHVFAAESPKGSAAEQVGKDPLQPTKKRALKASDAFQQYRIAALIGNLRIRGGKGNRRLTTEETRLVFDYLRSLPAKQEPTWQLVAEQLKIDRGNLVGTAIMTDDGERAGAKPPVHDTNRIMENTKIKPLATWWKSADADARAAMVKALSNAEVDDFDSQAGAQVQEFFFGISDEDQEKLDGLHLPIGRAAYSEDTLDRLTKRMIGEGMDLYEARQAEFKISNDWAPPAPEIGERVGNPAVDRVLKATARWLNAAERQWGAPKSVNIEHVRAAFMSESSARELDRDNQQRAKRNVKVVAEMQEKLGIEGRPSRADVWRFQSIQRQNGKCAYCGAEISFKNSEMDHIIPQVGEGSTNTRDNLVAVCRECNSSKSNIAFAVWAENTSRPGVSVQKAIERTHHWVTDSGLRKPEFDKFRKQVCDRLRRKATDEPIDARSLESVAWMANELRSRIAQKFKDGDTKVRVYKGALTAEARRASGISGKLEFVDGKGKSRLDRRHHAVDAAVVAFTSNYVAETLALRSNMKFDQELRRKAPQWREFTGSDHVHQVEWTKWKYRMQALAELLNNALVQDRIVVMHNLRLRLGNGAAHEDTIGKLTRLKVGDAISTTDIDRASSEALWCALTRDPDYDPKTGLPENPNRTIRIHGTHLTASDEITVFPVAAASIPIRDGFAKLGSNYHHVRLFRVPSGKKYKYCLMQVYTVDLLKFRKEDLFTVELKPQTISVRTCEALLRKALANGTAEYLGWLVSDDELLIDTSSFDTPGIVKLREEYGPVNRWRLAGLTSVTRLNLRPLYLSKEGLKPNVNPEIKKIIDNRSWIITVNKLFSSGHVKIIRRDALGRPRLHSAAHLPICWEVK

SEQ ID NO: 182 - protein, 1079 aa, Dinoroseobacter shibae
MRLGLDIGTSSIGWWLYETDGAGSDARITGVVDGGVRIFSDGRDPKSGASLAVDRRAARAMRRRRDRYLRRRATLMKVLAETGLMPADPAEAKALEALDPFALRAAGLDEPLPLPHLGRALFHLNQRRGFKSNRKTDRGDNESGKIKDATARLDMEMMANGARTYGEFLHKRRQKATDPRHVPSVRTRLSIANRGGPDGKEEAGYDFYPDRRHLEEEFHKLWAAQGAHHPELTETLRDLLFEKIFFQRPLKEPEVGLCLFSGHHGVPPKDPRLPKAHPLTQRRVLYETVNQLRVTADGREARPLTREERDQVIHALDNKKPTKSLSSMVLKLPALAKVLKLRDGERFTLETGVRDAIACDPLRASPAHPDRFGPRWSILDADAQWEVISRIRRVQSDAEHAALVDWLTEAHGLDRAHAEATAHAPLPDGYGRLGLTATTRILYQLTADVVTYADAVKACGWHHSDGRTGECFDRLPYYGEVLERHVIPGSYHPDDDDITRFGRITNPTVHIGLNQLRRLVNRIIETHGKPHQIVVELARDLKKSEEQKRADIKRIRDTTEAAKKRSEKLEELEIEDNGRNRMLLRLWEDLNPDDAMRRFCPYTGTRISAAMIFDGSCDVDHILPYSRTLDDSFPNRTLCLREANRQKRNQTPWQAWGDTPHWHAIAANLKNLPENKRWRFAPDAMTRFEGENGFLDRALKDTQYLARISRSYLDTLFTKGGHVWVVPGRFTEMLRRHWGLNSLLSDAGRGAVKAKNRTDHRHHAIDAAVIAATDPGLLNRISRAAGQGEAAGQSAELIARDTPPPWEGFRDDLRVRLDRIIVSHRADHGRIDHAARKQGRDSTAGQLHQETAYSIVDDIHVASRTDLLSLKPAQLLDEPGRSGQVRDPQLRKALRVATGGKTGKDFENALRYFASKPGPYQAIRRVRIIKPLQAQARVPVPAQDPIKAYQGGSNHLFEIWRLPDGEIEAQVITSFEAHTLEGEKRPHPAAKRLLRVHKGDMVALERDGRRVVGHVQKMDIANGLFIVPHNEANADTRNNDKSDPFKWIQIGARPAIASGIRRVSVDEIGRLRDGGTRPI

SEQ ID NO: 183 - protein, 1332 aa, Dolosigranulum pigrum
  Dolosigranulum pigrum ATCC 51524
MQKNYTIGLDIGTNSVGWAVMKDDYTLIRKRMKVLGNTDIKKIKKNFWGVRLFDEGETAKETRLKRGTRRRYQRRRNRLIYLQDIFQQPMLAIDENFFHRLDDSFFVPDDKSYDRHPIFGSLEEEVAYHNTYPTIYHLRKHLADNPEKADLRLVYTALAHIVKYRGHFLIEGELNTENTSISETFEQFLDTYSDIFKEQLVGDISKVEEILSSKQSRSRKHEQIMALFPNENKLGNFGRFMMLIVGNTSNFKPVFDLDDEYKLKLSDETYEEDLDTLLGMTDDVFLDVFMAAKNVYDAVEMSAIISTDTGNSKAVLSNQMINFYDEHKVDLAQLKQFFKTHLPDKYYECFSDPSKNGYAGYIDGKTNQEDFYKYIEKVMKTIKSDKKDYFLDKIDREVFLRKQRSFYNSVIPHQIHLQEMQAILDRQSQYYPFLAENRDKIESLVTFRIPYYVGPLTVSDQSEFAWMERQSDEPIRPWNFDEIVNKERSAEKFIERMTNMDTYLLEEKVLPKRSLLYQTFEVYNELTKVRYTNEQGKTEKLNRQQKAEIIETLFKQKNRVREKDIANYLEQYGYVDGTDIKGVEDKFNASLSTYNDLAKIDGAKAYLDDPEYADVWEDIIKILTIFEDKAMRKKQLQTYSDTLSPEILKKLERKHYTGWGRFSKKLINGLRDEGSNKTILDYLKSDEGSSGPTNRNFMQLIRDNTLSFKKKIEDAQTIEDTTHIYDTVAELPGSPAIKKGIRQALKIVEEIIDIIGYEPENIVVEMARESQTTKKGKDLSKERLEKLTEAIKEFDGPSDVKVKDLKNENLRNDRLYLYYLQNGRDMYTNEPLDINNLSKYDIDHIIPQSFTTDNSIDNKVLVSRTKNQGNKSDDVPSINIVHKMKPFWRQLHKAGLISDRKFKNLTKAEHGGLTEADRAHFLNRQLVETRQITKHVANLLDSQYNTAEEQRINIVLLKSSMTSRFRKEFKLYKVREINDYHHGHDAYLNAVVATTIMKVYPNLKPQFVYGQYKKTSMFKEEKATARKHFYSNITKFFKKEKVVNEETGEILWDTERHLSTIKRVLSWKQMNIVKKVEKQKGQLWKETIYPKGDSSKLIPVKEGMDPQKYGGLSQVSEAFAVVITHEKGKKKQLKSDLISIPIVDQKAYEQHPTAYLEEAGYNNPTVLHELFKYQLFELEDGSRRMIASAKEFQKGNQMVLPLELVELLYHANRYDKVKFPDSIEYVHDNLAKFDDLLEYVIDFSNKYINADKNVQKIQKIYKEHGTEDVELTVESFVNLMTFTAMGAPATFKFYGESITRSRYTSITEFRGSTLIFQSITGLYETRYKLEDN

SEQ ID NO: 184 - protein, 1340 aa, Dorea longicatena
  Dorea longicatena DSM 13814
MEQEYYLGLDMGTGSVGWAVTDSEYHVLRKHGKALWGVRLFESASTAEERRMFRTSRRRLDRRNWRIEILQEIFAEEISKKDPGFFLRMKESKYYPEDKRDINGNCPELPYALFVDDDFTDKDYHKKFPTIYHLRKMLMNTEETPDIRLVYLAIHHMMKHRGHFLLSGDINEIKEFGTTFSKLLENIKNEELDWNLELGKEEYAVVESILKDNMLNRSTKKTRLIKALKAKSICEKAVLNLLAGGTVKLSDIFGLEELNETERPKISFADNGYDDYIGEVENELGEQFYIIETAKAVYDWAVLVEILGKYTSISEAKVATYEKHKSDLQFLKKIVRKYLTKEEYKDIFVSTSDKLKNYSAYIGMTKINGKKVDLQSKRCSKEEFYDFIKKNVLKKLEGQPEYEYLKEELERETFLPKQVNRDNGVIPYQIHLYELKKILGNLRDKIDLIKENEDKLVQLFEFRIPYYVGPLNKIDDGKEGKFTWAVRKSNEKIYPWNFENVVDIEASAEKFIRRMTNKCTYLMGEDVLPKDSLLYSKYMVLNELNNVKLDGEKLSVELKQRLYTDVFCKYRKVTVKKIKNYLKCEGIISGNVEITGIDGDFKASLTAYHDFKEILTGTELAKKDKENIITNIVLFGDDKKLLKKRLNRLYPQITPNQLKKICALSYTGWGRFSKKFLEEITAPDPETGEVWNIITALWESNNNLMQLLSNEYRFMEEVETYNMGKQTKTLSYETVENMYVSPSVKRQIWQTLKIVKELEKVMKESPKRVFIEMAREKQESKRTESRKKQLIDLYKACKNEEKDWVKELGDQEEQKLRSDKLYLYYTQKGRCMYSGEVIELKDLWDNTKYDIDHIYPQSKTMDDSLNNRVLVKKKYNATKSDKYPLNENIRHERKGFWKSLLDGGFISKEKYERLIRNTELSPEELAGFIERQIVETRQSTKAVAEILKQVFPESEIVYVKAGTVSRFRKDFELLKVREVNDLHHAKDAYLNIVVGNSYYVKFTKNASWFIKENPGRTYNLKKMFTSGWNIERNGEVAWEVGKKGTIVTVKQIMNKNNILVTRQVHEAKGGLFDQQIMKKGKGQIAIKETDERLASIEKYGGYNKAAGAYFMLVESKDKKGKTIRTIEFIPLYLKNKIESDESIALNFLEKGRGLKEPKILLKKIKIDTLFDVDGFKMWLSGRTGDRLLFKCANQLILDEKIIVTMKKIVKFIQRRQENRELKLSDKDGIDNEVLMEIYNTFVDKLENTVYRIRLSEQAKTLIDKQKEFERLSLEDKSSTLFEILHIFQCQSSAANLKMIGGPGKAGILVMNNNISKCNKISIINQSPTGIFENEIDLLKI

SEQ ID NO: 185 - protein, 1380 aa, Eggerthella sp.
  Eggerthella sp. YY7918
MNLRHVGNYNIGLDMGTASVGWAAIDEQGELLHFKGKPTWGSRLFDSANTAATARMPRGQRRRYIRRRWRLDLLQKFFSEEMAEKDPEFFIRLRQSSLWPEDREGGHTAYHWPLFNDSDFNEKEYYEKFPTIFHLRQWLMETDEKADIRLIYLAFHNIVKHRGNFLQENNDSLSAQNANMRESLESFCIALEEWCDEKELTCSCDPQKLEHLFKEVKYRSDIRDGFAALLGLACSGENEVDVKAMAKEMGKAIVGYKADFSKIFTECDKEGSSFRLSDDEGPEAFLDICPDDGIALFEAIQMVYSSFILTGMLTEKGLSLSKISAYNQYGQDLESLKALVKEYVPNEYSSFFRGPTYSGSTEYDPSKAQGYTRYNLGPSKKGSGAKPMAYEDFKKSVEQLFANTNAINDERYKEMMGRFAEEKFLRRLRTSDNGRIPFQLNLEEMTAIIINQGKYYPFLLEQQEKLESLVRFRIPYYVGPLTRINARLDSKGNACFAWSKRKDGMDSASIKPWNWDEVIDKHASAQAFIERMTGTCTYLRGEPVLPRCSLLYEEYCVLNELNGARWTQDGDKFIRFDYKDRSDIIEELFKKRRGRIQYAAVADWMKQERSHANVHVSGGQGENAFESRLSSYHFFCNDVFGVDELPGSYVDMVEEIILWSTLFEDRSILREEIQRKYGDVLNEEQIKTICKKRFSGWGRLSRKLLCSLKAQTDNGPKSIMDILQEGDQNNGRVGRAMVFQEILHDEQLGFEQKIEEENTQSMLEGENLLIEDLPGSPAIRRSINQAVRIVDEIVGIAGHAPDNIFIEVTREDDTKKKGKRTTTRYSNIQKALEALKEEGAEALRELKTYKHNELDKRLSLYFMQNGKSLYSGIPLDIRRLSEYQIDHIIPQSYIKDDSYENMALVLPGENQSKADNLLISQDIRIKMKATWTALHKAGLMGDKKYNNLMNSSISDAKMKGFINRQLVETSQSVKLTQMMLSQKYPGAKVRPIKASISSQLRDACDLVKCREANDYHHAHDAYLACQVGRFVLKRHSSMFDNPIGMTKVIRDFVKRQGQEFKRNGKLPAYASRSGFIVQSFMRSGFDAETGELLRDDWNAPFEIARIKRCLNYRDCYISRMPMEDSGAFWDATIYSPKAGKKGALPVKQGLPVEKYGSYSREQFAYFFVYKAYNPKKKAYRLEFEAVPVRVASAVETRENALEEYAKSVAKQAGLEFVEVARPKVYKYQLIELGEDRLYITGKREVRNASQLAFSLDEIDLLKRLAEGEETSSEERERLFDVLIEKYARYAPRLARQLSVDSMSATFETLNAEEQLGILLSLVEIANGKRNMIDLSSAGGSKNAGCMNPTFSSELSSPGSNFTFIDQSVTGMFERRQRLEL

SEQ ID NO: 186 - protein, 1195 aa, Elusimicrobium minutum
MQKNINTKQNHIYIKQAQKIKEKLGDKPYRIGLDLGVGSIGFAIVSMEENDGNVLLPKEIIMVGSRIFKASAGAADRKLSRGQRNNHRHTRERMRYLWKVLAEQKLALPVPADLDRKENSSEGETSAKRFLGDVLQKDIYELRVKSLDERLSLQELGYVLYHIAGHRGSSAIRTFENDSEEAQKENTENKKIAGNIKRLMAKKNYRTYGEYLYKEFFENKEKHKREKISNAANNHKFSPTRDLVIKEAEAILKKQAGKDGFHKELTEEYIEKLTKAIGYESEKLIPESGFCPYLKDEKRLPASHKLNEERRLWETLNNARYSDPIVDIVTGEITGYYEKQFTKEQKQKLFDYLLTGSELTPAQTKKLLGLKNTNFEDIILQGRDKKAQKIKGYKLIKLESMPFWARLSEAQQDSFLYDWNSCPDEKLLTEKLSNEYHLTEEEIDNAFNEIVLSSSYAPLGKSAMLIILEKIKNDLSYTEAVEEALKEGKLTKEKQAIKDRLPYYGAVLQESTQKIIAKGFSPQFKDKGYKTPHTNKYELEYGRIANPVVHQTLNELRKLVNEIIDILGKKPCEIGLETARELKKSAEDRSKLSREQNDNESNRNRIYEIYIRPQQQVIITRRENPRNYILKFELLEEQKSQCPFCGGQISPNDIINNQADIEHLFPIAESEDNGRNNLVISHSACNADKAKRSPWAAFASAAKDSKYDYNRILSNVKENIPHKAWRFNQGAFEKFIENKPMAARFKTDNSYISKVAHKYLACLFEKPNIICVKGSLTAQLRMAWGLQGLMIPFAKQLITEKESESFNKDVNSNKKIRLDNRHHALDAIVIAYASRGYGNLLNKMAGKDYKINYSERNWLSKILLPPNNIVWENIDADLESFESSVKTALKNAFISVKHDHSDNGELVKGTMYKIFYSERGYTLTTYKKLSALKLTDPQKKKTPKDFLETALLKFKGRESEMKNEKIKSAIENNKRLFDVIQDNLEKAKKLLEEENEKSKAEGKKEKNINDASIYQKAISLSGDKYVQLSKKEPGKFFAISKPTPTTTGYGYDTGDSLCVDLYYDNKGKLCGEIIRKIDAQQKNPLKYKEQGFTLFERIYGGDILEVDFDIHSDKNSFRNNTGSAPENRVFIKVGTFTEITNNNIQIWFGNIIKSTGGQDDSFTINSMQQYNPRKLILSSCGFIKYRSPILKNKEG

SEQ ID NO: 187 - protein, 1337 aa, Enterococcus faecalis
  Enterococcus faecalis ATCC 29200
MKKDYVIGLDIGTNSVGWAVMTEDYQLVKKKMPIYGNTEKKKIKKNFWGVRLFEEGHTAEDRRLKRTARRRISRRRNRLRYLQAFFEEAMTDLDENFFARLQESFLVPEDKKWHRHPIFAKLEDEVAYHETYPTIYHLRKKLADSSEQADLRLIYLALAHIVKYRGHFLIEGKLSTENISVKEQFQQFMIIYNQTFVNGESRLVSAPLPESVLIEEELTEKASRTKKSEKVLQQFPQEKANGLFGQFLKLMVGNKADFKKVFGLEEEAKITYASESYEEDLEGILAKVGDEYSDVFLAAKNVYDAVELSTILADSDKKSHAKLSSSMIVRFTEHQEDLKKFKRFIRENCPDEYDNLFKNEQKDGYAGYIAHAGKVSQLKFYQYVKKIIQDIAGAEYFLEKIAQENFLRKQRTFDNGVIPHQIHLAELQAIIHRQAAYYPFLKENQEKIEQLVTFRIPYYVGPLSKGDASTFAWLKRQSEEPIRPWNLQETVDLDQSATAFIERMTNFDTYLPSEKVLPKHSLLYEKFMVFNELTKISYTDDRGIKANFSGKEKEKIFDYLFKTRRKVKKKDIIQFYRNEYNTEIVTLSGLEEDQFNASFSTYQDLLKCGLTRAELDHPDNAEKLEDIIKILTIFEDRQRIRTQLSTFKGQFSAEVLKKLERKHYTGWGRLSKKLINGIYDKESGKTILGYLIKDDGVSKHYNRNFMQLINDSQLSFKNAIQKAQSSEHEETLSETVNELAGSPAIKKGIYQSLKIVDELVAIMGYAPKRIVVEMARENQTTSTGKRRSIQRLKIVEKAMAEIGSNLLKEQPTTNEQLRDTRLFLYYMQNGKDMYTGDELSLHRLSHYDIDHIIPQSFMKDDSLDNLVLVGSTENRGKSDDVPSKEVVKDMKAYWEKLYAAGLISQRKFQRLTKGEQGGLTLEDKAHFIQRQLVETRQITKNVAGILDQRYNANSKEKKVQIITLKASLTSQFRSIFGLYKVREVNDYHHGQDAYLNCVVATTLLKVYPNLAPEFVYGEYPKFQTFKENKATAKAIIYTNLLRFFTEDEPRFTKDGEILWSNSYLKTIKKELNYHQMNIVKKVEVQKGGFSKESIKPKGPSNKLIPVKNGLDPQKYGGFDSPIVAYTVLFTHEKGKKPLIKQEILGITIMEKTRFEQNPILFLEEKGFLRPRVLMKLPKYTLYEFPEGRRRLLASAKEAQKGNQMVLPEHLLTLLYHAKQCLLPNQSESLAYVEQHQPEFQEILERVVDFAEVHTLAKSKVQQIVKLFEANQTADVKEIAASFIQLMQFNAMGAPSTFKFFQKDIERARYTSIKEIFDATIIYQSTTGLYETRRKVVD

SEQ ID NO: 188 - protein, 1337 aa, Enterococcus faecalis
  Enterococcus faecalis ATCC 4200
MKKDYVIGLDIGTNSVGWAVMTEDYQLVKKKMPIYGNTEKKKIKKNFWGVRLFEEGHTAEDRRLKRTARRRISRRRNRLRYLQAFFEEAMTALDENFFARLQESFLVPEDKKWHRHPIFAKLEDEVAYHETYPTIYHLRKKLADSSEQADLRLIYLALAHIVKYRGHFLIEGKLSTENISVKEQFQQFMIIYNQTFVNGESRLVSAPLPESVLIEEELTEKASRTKKSEKVLQQFPQEKANGLFGQFLKLMVGNKADFKKVFGLEEEAKITYASESYEEDLEGILAKVGDEYSDVFLAAKNVYDAVELSTILADSDKKSHAKLSSSMIVRFTEHQEDLKKFKRFIRENCPDEYDNLFKNEQKDGYAGYIAHAGKVSQLKFYQYVKKIIQDIAGAEYFLEKIAQENFLRKQRTFDNGVIPHQIHLAELQAIIHRQAAYYPFLKENQEKIEQLVTFRIPYYIGPLSKGDASTFAWLKRQSEEPIRPWNLQETVDLDQSATAFIERMTNFDTYLSSEKVLPKHSLLYEKFMVFNELTKISYTDDRGIKANFSGKEKEKIFDYLFKTRRKVKKKDIIQFYRNEYNTEIVTLSGLEEDQFNASFSTYQDLLKCGLTRAELDHPDNAEKLEDIIKILTIFEDRQRIRTQLSTFKGQFSAEVLKKLERKHYTGWGRLSKKLINGIYDKESGKTILGYLIKDDGVSKHYNRNFMQLINDSQLSFKNAIQKAQSSEHEETLSETVNELAGSPAIKKGIYQSLKIVDELVAIMGYAPKRIVVEMARENQTTSTGKRRSIQRLKIVEKAMAEIGSNLLKEQPTTNEQLRDTRLFLYYMQNGKDMYTGDELSLHRLSHYDIDHIIPQSFMKDDSLDNLVLVGSTENRGKSDDVPSKEVVKDMKAYWEKLYAAGLISQRKFQRLTKGEQGGLTLEDKAHFIQRQLVETRQITKNVAGILDQRYNANSKEKKVQIITLKASLTSQFRSIFGLYKVREVNDYHHGQDAYLNCVVATTLLKVYPNLAPEFVYGEYPKFQAFKENKATAKAIIYTNLLRFFTEDEPRFTKDGEILWSNSYLKTIKKELNYHQMNIVKKVEVQKGGFSKESIKPKGPSNKLIPVKNGLDPQKYGGFDSPVVAYTVLFTHEKGKKPLIKQEILGITIMEKTRFEQNPILFLEEKGFLRPRVLMKLPKYTLYEFPEGRRRLLASAKEAQKGNQMVLPEHLLTLLYHAKQCLLPNQSESLAYVEQHQPEFQEILERVVDFAEVHTLAKSKVQQIVKLFEANQTADVKEIAASFIQLMQFNAMGAPSTFKFFQKDIERARYTSIKEIFDATIIYQSTTGLYETRRKVVD

SEQ ID NO: 189 - protein, 1337 aa, Enterococcus faecalis
  Enterococcus faecalis D6
MKKDYVIGLDIGTNSVGWAVMTEDYQLVKKKMPIYGNTEKKKIKKNFWGVRLFEEGHTAEDRRLKRTARRRISRRRNRLRYLQAFFEEAMTALDENFFARLQESFLVPEDKKWHRHPIFAKLEDEVAYHETYPTIYHLRKKLADSSEQADLRLIYLALAHIVKYRGHFLIEGKLSTENISVKEQFQQFMIIYNQTFVNGESRLVSAPLPESVLIEEELTEKASRTKKSEKVLQQFPQEKANGLFGQFLKLMVGNKADFKKVFGLEEEAKITYASESYEEDLEGILAKVGDEYSDVFLAAKNVYDAVELSTILADSDKKSHAKLSSSMIVRFTEHQEDLKNFKRFIRENCPDEYDNLFKNEQKDGYAGYITHAGKVSQLKFYQYVKKIIQDIAGAEYFLEKIAQENFLRKQRTFDNGVIPHQIHLAELQAIIHRQAAYYPFLKENQEKIEQLVTFRIPYYVGPLSKGDANTFAWLKRQSEEPIRPWNLQETVDLDQSATAFIERMTNFDTYLPSEKVLPKHSLLYEKFMVFNELTKISYTDDRGIKANFSGKEKEKIFDYLFKTRRKVKKKDIIQFYRNEYNTEIVTLSGLEEDQFNASFSTYQDLLKCGLTRAELDHPDNAEKLEDIIKILTIFEDRQRIRTQLSTFKGQFSAEVLKKLERKHYTGWGRLSKKLINGIYDKESGKTILDYLIKDDGVSKHYNRNFMQLINDSQLSFKNAIQKAQSSEHEETLSETVNELAGSPAIKKGIYQSLKIVDELVAIMGYAPKRIVVEMARENQTTSTGKRRSIQRLKIVEKAMAEIGSNLLKEQPTTNEQLRDTRLFLYYMQNGKDMYTGDELSLHRLSHYDIDHIIPQSFMKDDSLDNLVLVGSTENRGKSDDVPSKEVVKDMKAYWEKLYAAGLISQRKFQRLTKGEQGGLTLEDKAHFIQRQLVETRQITKNVAGILDQRYNAKSKEKKVQIITLKASLTSQFRSIFGLYKVREVNDYHHGQDAYLNCVVATTLLKVYPNLAPEFVYGEYPKFQTFKENKATAKAIIYTNLLRFFTEDEPRFTKDGEILWSNSYLKTIKKELNYHQMNIVKKVEVQKGGFSKESIKPKGPSNKLIPVKNGLDPQKYGGFDSPIVAYTVLFTHEKGKKPLIKQEILGITIMEKTRFEQNPILFLEEKGFLRPRVLMKLPKYTLYQFPEGRRRLLASAKEAQKGNQMVLPEHLLTLLYHAKQCLLPNQSESLAYVEQHQPEFQEILERVVDFAEVHTLAKSKVQQIVKLFEANQTADVKEIAASFIQLMQFNAMGAPSTFKFFQKDIERARYTSIKEIFDATIIYQSTTGLYETRRKVVD

SEQ ID NO: 190 - protein, 1337 aa, Enterococcus faecalis
  Enterococcus faecalis E1Sol
MKKDYVIGLDIGTNSVGWAVMTEDYQLVKKKMPIYGNTEKKKIKKNFWGVRLFEEGHTAEDRRLKRTARRRISRRRNRLRYLQAFFEEAMTDLDENFFARLQESFLVPEDKKWHRHPIFAKLEDEVAYHETYPTIYHLRKKLADSSEQADLRLIYLALAHIVKYRGHFLIEGKLSTENTSVKEQFQQFMVIYNQTFVNGESRLVSAPLPESVLIEEELTEKASRTKKSEKVLQQFPQEKANGLFGQFLKLMVGNKADFKKVFGLEEEAKITYASESYEEDLEGILAKVGDEYSDVFLAAKNVYDAVELSTILADSDKKSHAKLSSSMIVRFTEHQEDLKKFKRFIRENCPDEYDNLFKNEQKDGYAGYIAHAGKVSQLKFYQYVKKIIQDIAGAEYFLEKIAQENFLRKQRTFDNGVIPHQIHLAELQAIIHRQAAYYPFLKENQEKIEQLVTFRIPYYVGPLSKGDASTFAWLKRQSEEPIRPWNLQETVDLDQSATAFIERMTNFDTYLPSEKVLPKHSLLYEKFMVFNELTKISYTDDRGIKANFSGKEKEKIFDYLFKTRRKVKKKDIIQFYRNEYNTEIVTLSGLEEDQFNASFSTYQDLLKCGLTRAELDHPDNAEKLEDIIKILTIFEDRQRIRTQLSTFKGQFSAEVLKKLERKHYTGWGRLSKKLINGIYDKESGKTILDYLVKDDGVSKHYNRNFMQLINDSQLSFKNAIQKAQSSEHEETLSETVNELAGSPAIKKGIYQSLKIVDELVAIMGYAPKRIVVEMARENQTTSTGKRRSIQRLKIVEKAMAEIGSNLLKEQPTTNEQLRDTRLFLYYMQNGKDMYTGDELSLHRLSHYDIDHIIPQSFMKDDSLDNLVLVGSTENRGKSDDVPSKKVVKKMKAYWEKLYAAGLISQRKFQRLTKGEQGGLTLEDKAHFIQRQLVETRQITKNVAGILDQRYNAKSKEKKVQIITLKASLTSQFRSIFGLYKVREVNDYHHGQDAYLNCVVATTLLKVYPNLAPEFVYGEYPKFQAFKENKATAKTIIYTNLMRFFTEDEPRFTKDSEILWSNSYLKTIKKELNYHQMNIVKKVEVQKGGFSKESIKPKGPSNKLIPVKNGLDPQKYGGFDSPVVAYTVLFTHEKGKKPLIKQEILGITIMEKTRFEQNPILFLEEKGFLRPRVLMKLPKYTLYEFPEGRRRLLASAKEAQKGNQMVLPEHLLTLLYHAKQCLLPNQSESLAYVEQHQPEFQEILERVVDFAEVHTLAKSKVQQIVKLFEANQTADVKEIAASFIQLMQFNAMGAPSTFKFFQKDIERARYTSIKEIFDATIIYQSTTGLYETRRKVVD

SEQ ID NO: 191 - protein, 1150 aa, Enterococcus faecalis
  Enterococcus faecalis Fly1
MYSIGLDLGISSVGWSVIDERTGNVIDLGVRLFSAKNSEKNLERRTNRGGRRLIRRKTNRLKDAKKILAAVGFYEDKSLKNSCPYQLRVKGLTEPLSKGEIYKVTLHILKKRGISYLDEDDTEAAKESQDYKEQVRKNAQLLTKYTPGQIQLQRLKENNRVKTGINAQGNYQLNVFKVSAYANELATILKTQQAFYPNELTDDWIALFVQPGIAEEAGLIYRKRPYYHGPGNEANNSPYGRWSDFKKTGQPATNIFDRLIGKDFQGELRASGLSLSAQQYNLLNDLTNLKIDGEIPLSPEQKEYILAELMTKEFTRFGVNDVAKLLGVKKERLSGWRLDKKGKPEIHTLKGYRNWRKIFAESGIDLATLPTETIDCLAKVLTLNTEHEGIENTLAFELPELAESVKLLVLDRYKELSQSVSTQAWHRFSLKTLHLLIPELMNATSEQNTLLEQFQLKSDVRKRYSEYKKLPTKDVLTEIYNPTVNKTVSQAFKVIDALLVKYGKEQIRYITIEMPRDDNEEDEKKRIKELHAKNSQRKNDSQSYFMQKSGWSQEKFQTTIQKNRRFLAKLLYYYEQDGICAYTGLSISPELLVSDSTEIDHIIPISISLDDSINNKVLVLSKANQVKGQQTPYDAWMDGSFKKINGKFSNWDDYQKWVESRHFSHKKENNLLETRNIFDSEQVEKFLARNLNDTRYASRLVLNTLQSFFANHETKVRVVNGSFTHTLRKKWGADLDKTRETHHHHAVDATLCAVTPFVKVSRYHYAVKEETGEKVMREIDFETGEIVDEMSYQEFKKSKKYERKTYQVKWPNFREQLKPVNLHPRIKFSHQVDRKANRKLSDATIYSVREKTEVKTLKSGKQKITTDEYTIGKIKDIYTVDGWEAFKKKQDKLLMKDLDEKTYERLLSIAETTPDFQEVEEKNGKVKRVKRSPFAVYCEENDIPAIQKYAKKNNGPLIRSLKYYDGKLNKHINITKDSQGRPVEKTKNGRKVTLQSLKPYRYDIYQDLETKAYYTVQLYYSDLRFVEGKYGITEKEYMKKVAEQTKGQVVRFCFSLQKNDGLEIEWKDSQRYDVRFYNFQSANSINFKGLEQEMMPAENQFKQKPYNNGAINLNIAKYGKEGKKLRKFNTDILGKKHYLYYEKEPKNIIK

SEQ ID NO: 192 - protein, 1337 aa, Enterococcus faecalis
MKKDYVIGLDIGTNSVGWAVMTEDYQLVKKKMPIYGNTEKKKIKKNFWGVRLFEEGHTAEDRRLKRTARRRISRRRNRLRYLQAFFEEAMTDLDENFFARLQESFLVPEDKKWHRHPIFAKLEDEVAYHETYPTIYHLRKKLADSSEQADLRLIYLALAHIVKYRGHFLIEGKLSTENISVKEQFQQFMIIYNQTFVNGESRLVSAPLPESVLIEEELTEKASRTKKSEKVLQQFPQEKANGLFGQFLKLMVGNKADFKKVFGLEEEAKITYASESYEEDLEGILAKVGDEYSDVFLAAKNVYDAVELSTILADSDKKSHAKLSSSMIVRFTEHQEDLKKFKRFIRENCPDEYDNLFKNEQKDGYAGYIAHAGKVSQLKFYQYVKKIIQDIAGAEYFLEKIAQENFLRKQRTFDNGVIPHQIHLAELQAIIHRQAAYYPFLKENQEKIEQLVTFRIPYYVGPLSKGDASTFAWLKRQSEEPIRPWNLQETVDLDQSATAFIERMTNFDTYLPSEKVLPKHSLLYEKFMVFNELTKISYTDDRGIKANFSGKEKEKIFDYLFKTRRKVKKKDIIQFYRNEYNTEIVTLSGLEEDQFNASFSTYQDLLKCGLTRAELDHPDNAEKLEDIIKILTIFEDRQRIRTQLSTFKGQFSAEVLKKLERKHYTGWGRLSKKLINGIYDKESGKTILDYLVKDDGVSKHYNRNFMQLINDSQLSFKNAIQKAQSSEHEETLSETVNELAGSPAIKKGIYQSLKIVDELVAIMGYAPKRIVVEMARENQTTSTGKRRSIQRLKIVEKAMAEIGSNLLKEQPTTNEQLRDTRLFLYYMQNGKDMYTGDELSLHRLSHYDIDHIIPQSFMKDDSLDNLVLVGSTENRGKSDDVPSKEVVKDMKAYWEKLYAAGLISQRKFQRLTKGEQGGLTLEDKAHFIQRQLVETRQITKNVAGILNQRYNANSKEKKVQIITLKASLTSQFRSIFGLYKVREVNDYHHGQDAYLNCVVATTLLKVYPNLAPEFVYGEYPKFQTFKENKATAKAIIYTNLLRFFTEDEPRFTKDGEILWSNSYLKTIKKELNYHQMNIVKKVEVQKGGFSKESIKPKGPSNKLIPVKNGLDPQKYGGFDSPVVAYTVLFTHEKGKKPLIKQEILGITIMEKTRFEQNPILFLEEKGFLRPRVLMKLPKYTLYEFPEGRRRLLASAKEAQKGNQMVLPEHLLTLLYHAKQCLLPNQSESLAYVEQHQPEFQEILERVVDFAEVHTLAKSKVQQIVKLFEANQTADVKEIAASFIQLMQFNAMGAPSTFKFFQKDIERARYTSIKEIFDATIIYQSTTGLYETRRKVVD

SEQ ID NO: 193 - protein, 1150 aa, Enterococcus faecalis
  Enterococcus faecalis R508
MYSIGLDLGISSVGWSVIDERTGNVIDLGVRLFSAKNSEKNLERRTNRGGRRLIRRKTNRLKDAKKILAAVGFYEDKSLKNSCPYQLRVKGLTEPLSKGEIYKVTLHILKKRGISYLDEDDTEAAKESQDYKEQVRKNAQLLTKYTPGQIQLQRLKENNRVKTGINVQGNYQLNVFKVSAYANELATILKTQQAFYPNELTDDWIALFVQPGIAEEAGLIYRKRPYYHGPGNEANNSPYGRWSDFQKTGEPATNIFDKLIGKDFQGELRASGLSLSAQQYNLLNDLTNLKIDGEVPLSSEQKEYILTELMTKEFTRFGVNDVVKLLGVKKERLSGWRLDKKGKPEIHTLKGYRNWRKIFAEAGIDLATLPTETIDCLAKVLTLNTEREGIENTLAFELPELSESVKLLVLDRYKELSQSISTQSWHRFSLKTLHLLIPELMNATSEQNTLLEQFQLKSDVRKRYSEYKKLPTKDVLAEIYNPTVNKTVSQAFKVIDALLVKYGKEQIRYITIEMPRDDNEEDEKKRIKELHAKNSQRKNDSQSYFMQKSGWSQEKFQTTIQKNRRFLAKLLYYYEQDGICAYTGLPISPELLVSDSTEIDHIIPISISLDDSINNKVLVLSKANQVKGQQTPYDAWMDGSFKKINGKFSNWDDYQKWVESRHFSHKKENNLLETRNIFDSEQVEKFLARNLNDTRYASRLVLNTLQSFFTNQETKVRVVNGSFTHTLRKKWGADLDKTRETHHHHAVDATLCAVTPFVKVSRYHYAVKEETGEKVMREIDFETGEIVNEMSYREFKKSKKYERKTYQVKWPNFREQLKPVNLHPRIKFSHQVDRKANRKLSDATIYSVREKTEVKTLKSGKQKITTDEYTIGKIKDIYTLDGWEAFKKKQDKLLMKDLDEKTYERLLSIAETTPDFQEVEEKNGKVKRVKRSPFAVYCEENDIPAIQKYAKKNNGPLIRSLKYYDGKLNKHINITKDSQGRPVEKTKNGRKVTLQSLKPYRYDIYQDLETKAYYTVQLYYSDLRFVEGKYGITEKEYMKKVAEQTKGQVVRFCFSLQKNDGLEIEWKDSQRYDVRFYNFQSANSINFKGLEQEIMPAENQFKQKPYNNGAINLNIAKYGKEGKKLRKFNTDILGKKHYLFYEKEPKNIIK

SEQ ID NO: 194 - protein, 1150 aa, Enterococcus faecalis
  Enterococcus faecalis T11
MYSIGLDLGISSVGWSVIDERTGNVIDLGVRLFSAKNSEKNLERRTNRGGRRLIRRKTNRLKDAKKILAAVGFYEDKSLKNSCPYQLRVKGLTEPLSKGEIYKVTLHILKKRGISYLDEDDTEAAKESQDYKEQVRENAQLLTKYTPGQIQLQRLKENNRVKTGINAQGNYQLNVFKVSAYANELATILKTQQAFYPNELTDDWIALFVQPGIAEEAGLIYRKRPYYHGPGNEANNSPYGRWSDFKKTGQPATNIFDKLIGKDFQGELRASGLSLSAQQYNLLNDLTNLKIDGEIPLSPEQKEYILAELMTKEFTRFGVNDVVKLLGVKKERLSGWRLDKKGKPEIHTLKGYRNWRKIFAESGIDLAMLPTETIDCLAKILTLNTEREGIENTLAFELPELAESVKLLVLDRYKELSQSVSTQAWHRFSLKTLHLLIPELMNATSEQNTLLEQFQLKSDVRKRYSEYKKLPTKDVLTEIYNPTVNKTVSQAFKVIDALLVKYGKEQIRYITIEMPRDDNEEDEKKRIKELHAKNSQRKNDSQSYFMQKSGWSQEKFQTTIQKNRRFLAKLLYYYEQDGICAYTGLSISPELLVSDSTEIDHIIPISISLDDSINNKVLVLSKANQVKGQQTPYDAWMDGSFKKINGKFSNWDDYQKWVESRHFSHKKENNLLETRNIFDSEQVEKFLARNLNDTRYASRLVLNTLQSFFANQETKVRVVNGSFTHTLRKKWGADLDKTRETHHHHAVDATLCAVTPFVKVSRYHYAVKEETGEKVMREIDFETGEIVDEMSYREFKKSKKYERKTYQVKWPNFREQLKPVNLHPRIKFSHQVDRKANRKLSDATIYSVREKTEVKTLKSGKQKITTDEYTIGKIKDIYTVDGWEAFKKKQDKLLMKDLDEKTYERLLSIAETTPDFQEVEEKNGKVKRVKRSPFAVYCEENDIPAIRKYAKKNNGPLIRSLKYYDGKLNKHINITKDSQGRPVEKTKNGRKVTLQSLKPYRYDIYQDLETKAYYTVQLYYSDLRFVEGKYGITEKEYMKKVAEQTKGQVVRFCFSLQKNDGLEIEWKDSQRYDVRFYNFQSANSINFKGLEQEMMPAENQFKQKPYNNGAINLNIAKYGKEGKKLRKFNTDILGKKHYLYYEKEPKNIIK

SEQ ID NO: 195 - protein, 1150 aa, Enterococcus faecalis
  Enterococcus faecalis TX0012
MYSIGLDLGISSVGWSVIDERTGNVIDLGVRLFSAKNSEKNLERRTNRGGRRLIRRKTNRLKDAKKILAAVGFYEDKSLKNSCPYQLRVKGLTEPLSRGEIYKVTLHILKKRGISYLDEVDTEAAKESQDYKEQVRKNAQLLTKYTPGQIQLQRLKENNRVKTGINAQGNYQLNVFKVSAYANELATILKTQQAFYPNELTDDWIALFVQPGIAEEAGLIYRKRPYYHGPGNEANNSPYGRWSDFQKTGEPATNIFDKLIGKDFQGELRASGLSLSAQQYNLLNDLTNLKIDGEVPLSSEQKEYILTELMTKEFTRFGVNDVVKLLGVKKERLSGWRLDKKGKPEIHTLKGYRNWRKIFAEAGIDLATLPTETIDCLAKVLTLNTEREGIENTLAFELPELSESVKLLVLDRYKELSQSISTQSWHRFSLKTLHLLIPELMNATSEQNTLLEQFQLKSDVRKRYSEYKKLPTKDVLAEIYNPTVNKTVSQAFKVIDALLVKYGKEQIRYITIEMPRDDNEEDEKKRIKELHAKNSQRKNDSQSYFMQKSGWSQEKFQTTIQKNRRFLAKLLYYYEQDGICAYTGLPISPELLVSDSTEIDHIIPISISLDDSINNKVLVLSKANQVKGQQTPYDAWMDGSFKKINGKFSNWDDYQKWVESRHFSHKKENNLLETRNIFDSEQVEKFLARNLNDTRYASRLVLNTLQSFFTNQETKVRVVNGSFTHTLRKKWGADLDKTRETHHHHAVDATLCAVTSFVKVSRYHYAVKEETGEKVMREIDFETGEIVNEMSYWEFKKSKKYERKTYQVKWPNFREQLKPVNLHPRIKFSHQVDRKANRKLSDATIYSVREKTEVKTLKSGKQKITTDEYTIGKIKDIYTLDGWEAFKKKQDKLLMKDLDEKTYERLLSIAETTPDFQEVEEKNGKVKRVKRSPFAVYCEENDIPAIQKYAKKNNGPLIRSLKYYDGKLNKHINITKDSQGRPVEKTKNGRKVTLQSLKPYRYDIYQDLETKAYYTVQLYYSDLRFVEGKYGITEKEYMKKVAEQTKGQVVRFCFSLQKNDGLEIEWKDSQRYDVRFYNFQSANSINFKGLEQEMMPAENQFKQKPYNNGAINLNIAKYGKEGKKLRKFNTDILGKKHYLFYEKEPKNIIK

SEQ ID NO: 196 - protein, 1150 aa, Enterococcus faecalis; identical to SEQ ID NO: 195
  Enterococcus faecalis TX0012

SEQ ID NO: 197 - protein, 1337 aa, Enterococcus faecalis
  Enterococcus faecalis TX0470
MKKDYVIGLDIGTNSVGWAVMTEDYQLVKKKMPIYGNTEKKKIKKNFWGVRLFEEGHTAEDRRLKRTARRRISRRRNRLRYLQAFFEEAMTALDENFFARLQESFLVPEDKKWHRHPIFAKLEDEVAYHETYPTIYHLRKKLADSSEQADLRLIYLALAHIVKYRGHFLIEGKLSTENISVKEQFQQFMIIYNQTFVNGESRLVSTPLPESVLIEEELTEKASRTKKSEKVLQQFPQEKANGLFGQFLKLMVGNKADFKKVFGLEEEAKITYASESYEEDLEGILAKVGDEYSDVFLAAKNVYDAVELSTILADSDKKSHAKLSSSMIVRFTEHQEDLKNFKRFIRENCPDEYDNLFKNEQKDGYAGYITHAGKVSQLKFYQYVKKIIQDIAGAEYFLEKIAQENFLRKQRTFDNGVIPHQIHLAELQAIIHRQAAYYPFLKENQEKIEQLVTFRIPYYVGPLSKGDASTFAWLKRQSEEPIRPWNLQETVDLDQSATAFIERMTNFDTYLPSEKVLPKHSLLYEKFMVFNELTKISYTDDRGIKANFSGKEKEKIFDYLFKTRRKVKKKDIIQFYRNEYNTEIVTLSGLEEDQFNASFSTYQDLLKCGLTRAELDHPDNAEKLEDIIKILTIFEDRQRIRTQLSTFKGQFSAEVLKKLERKHYTGWGRLSKKLINGIYDKESGKTILDYLVKDDGVSKHYNRNFMQLINDSQLSFKNAIQKAQSSEHEETLSETVNELAGSPAIKKGIYQSLKIVDELVAIMGYAPKRIVVEMARENQTTSTGKRRSIQRLKIVEKAMAEIGSNLLKEQPTTNEQLRDTRLFLYYMQNGKDMYTGDELSLHRLSHYDIDHIIPQSFMKDDSLDNLVLVGSTENRGKSDDVPSKEVVKDMKAYWEKLYAAGLISQRKFQRLTKGEQGGLTLEDKAHFIQRQLVETRQITKNVAGILDQRYNAKSKEKKVQIITLKASLTSQFRSIFGLYKVREVNDYHHGQDAYLNCVVATTLLKVYPNLAPEFVYGEYPKFQTFKENKATAKAIIYTNLLRFFTEDEPRFTKDGEILWSNSYLKTIKKELNYHQMNIVKKVEVQKGGFSKESIKPKGPSNKLIPVKNGLDPQKYGGFDSPIVAYTVLFTHEKGKKPLIKQEILGITIMEKTRFEQNPILFLEEKGFLRPRVLMKLPKYTLYEFPEGRRRLLASAKEAQKGNQMVLPEHLLTLLYHAKQCLLPNQSESLAYVEQHQPEFQEILERVVDFAEVHTLAKSKVQQIVKLFEANQTADVKEIAASFIQLMQFNAMGAPSTFKFFQKDIERARYTSIKEIFDATIIYQSTTGLYETRRKVVD

SEQ ID NO: 198 - protein, 1150 aa, Enterococcus faecalis
  Enterococcus faecalis TX1342
MYSIGLDLGVSSVGWSVIDERTGNVIDLGVRLFSAKNSEKNLERRTNRGGRRLIRRKTNRLKDAKKILAAVGFYEDKSLKNSCPYQLRVKGLTEPLSKGEIYKVTLHILKKRGISYLDEDDTEAAKESQDYKEQVRENAQLLTKYTPGQIQLQRLKENNRVKTGINAQGNYQLNVFKVSAYANELATILKTQQAFYPNELTDDWIALFVQPGIAEEAGLIYRKRPYYHGPGNEANNSPYGRWSDFKKTGQPATNIFDKLIGKDFQGELRASGLSLSAQQYNLLNDLTNLKIDGEIPLSPEQKEYILAELMTKEFTRFGINDVAKLLGVKKERLSGWRLDKKGKPEIHTLKGYRNWRKIFAESGIDLATLPTETIDCLAKVLTLNTEREGIENTLAFELPELAESVKLLVLDRYKELSQSVSTQAWHRFSLKTLHLLIPELMNATSEQNTLLEQFQLKSDVRKRYSEYKKLPTKDVLTEIYNPTVNKTVSQAFKVIDALLVKYGKEQIRYITIEMPRDDNEEDEKKRIKELHAKNSQRKNDSQSYFMQKSGWSQEKFQTTIQKNRRFLAKLLYYYEQDGICAYTGLSISPELLVSDSTEIDHIIPISISLDDSINNKVLVLSKANQVKGQQTPYDAWMDGSFKKINGKFSNWDDYQKWVESRHFSHKKENNLLETRNIFDSEQVEKFLARNLNDTRYASRLVLNTLQSFFANQETKVRVVNGSFTHTLRKKWGADLDKTRETHHHHAVDATLCAVTPFVKVSRYHYAVKEETGEKVMREIDFETGEIVDEMSYREFKKSKKYERKTYQVKWPNFREQLKPVNLHPRIKFSHQVDRKANRKLSDATIYSVREKTEVKTLKSGKQKITTDEYTIGKIKDIYTVDGWEAFKKKQDKLLMKDLDEKTYERLLSIAETTPDFQEVEEKNGKVKRVKRSPFAVYCEENDIPAIRKYAKNNNGPLIRSLKYYDGKLNKHINITKDSQGRPVEKTKNGRKVTLQSLKPYRYDIYQDLETKAYYTVQLYYSDLRFVEGKYGITEKEYMKKVAEQTKGQVVRFCFSLQKNDGLEIEWKDSQCYDVRFYNFQSANSINFKGLEQEMMPAENQFKQKPYNNGAINLNIAKYGKEGKKLRKFNTDILGKKHYLYYEKEPKNIIK

SEQ ID NO: 199 - protein, 1337 aa, Enterococcus faecalis
  Enterococcus faecalis TX4244
MKKDYVIGLDIGTNSVGWAVMTEDYQLVKKKMPIYGNTEKKKIKKNFWGVRLFEEGHTAEDRRLKRTARRRISRRRNRLRYLQAFFEEAMTDLDENFFARLQESFLVPEDKKWHRHPIFAKLEDEVAYHETYPTIYHLRKKLADSSEQADLRLIYLALAHIVKYRGHFLIEGKLSTENISVKEQFQQFMIIYNQTFVNGESRLVSAPLPESVLIEEELTEKASRTKKSEKVLQQFPQEKANGLFGQFLKLMVGNKADFKKVFGLEEEAKITYASESYEEDLEGILAKVGDEYSDVFLAAKNVYDAVELSTILADSDKKSHAKLSSSMIVRFTEHQEDLKKFKRFIRENCPDEYDNLFKNEQKDGYAGYIAHAGKVSQLKFYQYVKKIIQDIAGAEYFLEKIAQENFLRKQRTFDNGVIPHQIHLAELQAIIHRQAAYYPFLKENQEKIEQLVTFRIPYYVGPLSKGDASTFAWLKRQSEEPIRPWNLQETVDLDQSATAFIERMTNFDTYLPSEKVLPKHSLLYEKFMVFNELTKISYTDDRGIKANFSGKEKEKIFDYLFKTRRKVKKKDIIQFYRNEYNTEIVTLSGLEEDQFNASFSTYQDLLKCGLTRAELDHPDNAEKLEDIIKILTIFEDRQRIRTQLSTFKGQFSAEVLKKLERKHYTGWGRLSKKLINGIYDKESGKTILGYLIKDDGVSKHYNRNFMQLINDSQLSFKNAIQKAQSSEHEETLSETVNELAGSPAIKKGIYQSLKIVDELVAIMGYAPKRIVVEMARENQTTSTGKRRSIQRLKIVEKAMAEIGSNLLKEQPTTNEQLRDTRLFLYYMQNGKDMYTGDELSLHRLSHYDIDHIIPQSFMKDDSLDNLVLVGSTENLGKSDDVPSKEVVKDMKAYWEKLYAAGLISQRKFQRLTKGEQGGLTLEDKAHFIQRQLVETRQITKNVAGILDQRYNANSKEKKVQIITLKASLTSQFRSIFGLYKVREVNDYHHGQDAYLNCVVATTLLKVYPNLAPEFVYGEYPKFQTFKENKATAKAIIYTNLLRFFTEDEPRFTKDGEILWSNSYLKTIKKELNYHQMNIVKKVEVQKGGFSKESIKPKGPSNKLIPVKNGLDPQKYGGFDSPIVAYTVLFTHEKGKKPLIKQEILGITIMEKTRFEQNPILFLEEKGFLRPRVLMKLPKYTLYEFPEGRRRLLASAKEAQKGNQMVLPEHLLTLLYHAKQCLLPNQSESLAYVEQHQPEFQEILERVVDFAEVHTLAKSKVQQIVKLFEANQTADVKEIAASFIQLMQFNAMGAPSTFKFFQKDIERARYTSIKEIFDATIIYQSTTGLYETRRKVVD

SEQ ID NO: 200 - protein, 1339 aa, Enterococcus faecium
  Enterococcus faecium 1,141,733
MKKEYTIGLDIGTNSVGWSVLTDDYRLVSKKMKVAGNTEKSSTKKNFWGVRLFDEGQTAEARRSKRTARRRLARRRQRILELQKIFAPEILKIDEHFFARLNESFLVLDEKKQSRHPVFATIKQEKSYHQTYPTIYHLRQALADSSEKADIRLVYLAMAHLLKYRGHFLIEGELNTENSSVTETFRQFLSTYNQQFSEADDKQTEKLDEAVDCSFVFTEKMSKTKKAETLLKYFPHEKSNGYLSQFIKLMVGNQGNFKNVFGLEEAKLQFSKETYEEDLEELLEKIGDDYIDLFVQAKNVYDAVLLSEILSDSTKNTRAKLSAGMIRRYDAHKEDLVLLKRFVKENLPKKYRAFFGDNSVNGYAGYIEGHATQEDFYKFVKKELTGIRGSEVFLTKIEQENFLRKQRTFDNGVIPHQIHLTELRAIIANQKKHYPFLKEEQEKLESLLTFKIPYYVGPLAKKQENSPFAWLIRKSEEKIKPWNLPEIVDMEGSAVRFIERMINTDMYMPHNKVLPKNSLLYQKFSIYNELTKVRYQDERGQMNYFSSIEKKEIFHELFEKNRKVTKKDLQEFLYLKYDIKHAELSGIEKAFNASYTTYHDFLTMSENKREMKQWLEDPELASMFEEIIKTLTVFEDREMIKTRLSHHEATLGKHIIKKLTKKHYTGWGRLSKELIQGIRDKQSNKTILDYLINDDDFPHHRNRNFMQLINDDSLSFKKEIKKAQMITDTENLEEIVKELTGSPAIKKGILQSLKIVDEIVGIMGYEPANIVVEMARENQTTGRGLKSSRPRLKALEESLKDFGSQLLKEYPTDNSSLQKDRLYLYYLQNGRDMYTGAPLDIHRLSDYDIDHIIPRSFTTDNSIDNKVLVSSKENRLKKDDVPSEKVVKKMRSFWYDLYSSKLISKRKLDNLTKIKLTEEDKAGFIKRQLVETRQITKHVAGILHHRFNKAEDTNEPIRKVRIITLKSALVSQFRNRFGIYKVREINEYHHAHDAYLNGVVALALLKKYPQLAPEFVYGEYLKFNAHKANKATVKKEFYSNIMKFFESDTPVCDENGEIFWDKSKSIAQVKKVINHHHMNIVKKTEIQKGGFSKETVEPKKDSSKLLPRKNNWDPAKYGGLGSPNVAYTVAFTYEKGKARKRTNALEGITIMEREAFEQSPVLFLKNKGYEQAEIEMKLPKYALFELENGRKRMVASNKEAQKANSFLLPEHLVTLLYHAKQYDEISHKESFDYVNEHHKEFSEVFARVLEFAGKYTLAEKNIEKLEKIYKENQTDDLAKLASSFVNLMQFNAMGAPADFKFFDVTIPRKRYTSLTEIWQSTIIHQSITGLYETRIRMGK

SEQ ID NO: 201 - protein, 1340 aa, Enterococcus faecium
  Enterococcus faecium 1,231,408
MKKEYTIGLDIGTNSVGWSVLTDDYRLVSKKMKVAGNTEKSSTKKNFWGVRLFDEGQTAEARRSKRTARRRLARRRQRILELQKIFAPEILKIDEHFFARLNESFLVPDEKKQSRHPVFATIKQEKSYHQTYPTIYHLRQALADSSEKADIRLVYLAMAHLLKYRGHFLIEGELNTENSSVTETFRQFLSTYNQQFSEAGDKQTEKLDEAVDCSFVFTEKMSKTKKAETLLKYFPHEKSNGYLSQFIKLMVGNQGNFKNVFGLEEEAKLQFSKETYEEDLEELLEKIGDDYIDLFVQAKNVYDAVLLSEILSDSTKNTRAKLSAGMIRRYDAHKEDLVLLKRFVKENLPKKYRAFFGDNSVNGYAGYIEGHATQEAFYKFVKKELTGIRGSEVFLTKIEQENFLRKQRTFDNGVIPHQIHLSELRAIIANQKKHYPFLKEEQEKLESLLTFKIPYYVGPLAKKQENSPFAWLIRKSEEKIKPWNLPEIVDMEGSAVRFIERMINTDMYMPHNKVLPKNSLLYQKFSIYNELTKVRYQDERGQMNYFSSIEKKEIFHELFEKNRKVTKKDLQEFLYLKYDIKHAELSGIEKAFNASYTTYHDFLTMSENKREMKQWLEDPELASMFEEIIKTLTVFEDREMIKTRLSHHEATLGKHIIKKLTKKHYTGWGRLSKELIQGIRDKQSNKTILDYLINDDDFPHHRNRNFMQLINDDSLSFKKEIKKAQMITDTENLEEIVKELTGSPAIKKGILQSLKIVDEIVGIMGYEPANIVVEMARENQTTGRGLKSSRPRLKALEESLKDFGSQLLKEYPTDNSSLQKDRLYLYYLQNGRDMYTGAPLDIHRLSDYDIDHIIPRSFTTDNSIDNKVLVSSKENRLKKDDVPSEKVVKKMRSFWYDLYSSKLISKRKLDNLTKIKLTEEDKAGFIKRQLVETRQITKHVAGILHHRFNKAEDTNDPIRKVRIITLKSALVSQFRNRFGIYKVREINEYHHAHDAYLNGVVALALLKKYPQLAPEFVYGEYLKFNAHKANKATVKKEFYSNIMKFFESDTPVCDENGEIFWDKSKSIAQVKKVINHHHMNIVKKTEIQKGGFSKETVEPKKDSSKLLPRKNNWDPAKYGGLGSPNVAYTVAFTYEKGKARKRTNALEGITIMEREAFEQSPVLFLKNKGYEQAEIEMKLPKYALFELENGRKRMVASNKEAQKANSFLLPEHLVTLLYHAKQYDEISHKESFDYVNEHHKEFSEVFARVLEFAGKYTLAEKNIEKLEKIYKENQTDDLAKLASSFVNLMQFNAMGAPADFKFFDVTIPRKRYTSLTEIWQSTIIHQSITGLYETRIRMGK

SEQ ID NO: 202 - protein, 1339 aa, Enterococcus faecium
  Enterococcus faecium E1133
MKKEYTIGLDIGTNSVGWSVLTDDYRLVSKKMKVAGNTEKSSTKKNFWGVRLFDEGQTAEARRSKRTARRRLARRRQRILELQKIFAPEILKIDEHFFARLNESFLVLDEKKQSRHPVFATIKQEKSYHQTYPTIYHLRQALADSSEKADIRLVYLAMAHLLKYRGHFLIEGELNTENSSVTETFRQFLSTYNQQFSEADDKQTEKLDEAVDCSFVFTEKMSKTKKAETLLKYFPHEKSNGYLSQFIKLMVGNQGNFKNVFGLEEAKLQFSKETYEEDLEELLEKIGDDYIDLFVQAKNVYDAVLLSEILSDSTKNTRAKLSAGMIRRYDAHKEDLVLLKRFVKENLPKKYRAFFGDNSVNGYAGYIEGHATQEDFYKFVKKELTGIRGSEVFLTKIEQENFLRKQRTFDNGVIPHQIHLTELRAIIANQKKHYPFLKEEQEKLESLLTFKIPYYVGPLAKKQENSPFAWLIRKSEEKIKPWNLPEIVDMEGSAVRFIERMINTDMYIPHNKVLPKNSLLYQKFSIYNELTKVRYQDERGQMNYFSSIEKKEIFHELFEKNRKVTKKDLQEFLYLKYDIKHAELSGIEKAFNASYTTYHDFLTMSENKREMKQWLEDPELASMFEEIIKTLTVFEDREMIKTRLSHHEATLGKHIIKKLTKKHYTGWGRLSKELIQGIRDKQSNKTILDYLINDDDFPHHRNRNFMQLINDDSLSFKKEIKKAQMITDTENLEEIVKELTGSPAIKKGILQSLKIVDEIVGIMGYEPANIVVEMARENQTTGRGLKSSRPRLKALEESLKDFGSQLLKEYPTDNSSLQKDRLYLYYLQNGRDMYTGAPLDIHRLSDYDIDHIIPRSFTTDNSIDNKVLVSSKENRLKKDDVPSEKVVKKMRSFWYDLYSSKLISKRKLDNLTKIKLTEEDKAGFIKRQLVETRQITKHVAGILHHRFNKAEDTNEPIRKVRIITLKSALVSQFRNRFGIYKVREINEYHHAHDAYLNGVVALALLKKYPQLAPEFVYGEYLKFNAHKANKATVKKEFYSNIMKFFESDTPVCDENGEIFWDKSKSIAQVKKVINHHHMNIVKKTEIQKGGFSEETVEPKKDSSKLLPRKNNWDPAKYGGLGSPNVAYTVAFTYEKGKARKRTNALEGITIMEREAFEQSPVLFLKNKGYEQAEIEMKLPKYALFELENGRKRMVASNKEAQKANSFLLPEHLVTLLYHAKQYDEISHKESFDYVNEHHKEFSEVFARVLEFAGKYTLAEKNIEKLEKIYKENQTDDLAKLASSFVNLMQFNAMGAPADFKFFDVTIPRKRYTSLTEIWQSTIIHQSITGLYETRIRMGK

SEQ ID NO: 203 - protein, 1340 aa, Enterococcus faecium
  Enterococcus faecium E3083
MKKEYTIGLDIGTNSVGWSVLTDDYRLVSKKMKVAGNTEKSSTKKNFWGVRLFDEGQTAEARRSKRTARRRLARRRQRILELQKIFAPEILKIDEHFFARLNESFLVLDEKKQSRHPVFATIKQEKSYHQTYPTIYHLRQALADSSEKADIRLVYLAMAHLLKYRGHFLIEGELNTENSSVTETFRQFLSTYNQQFSEADDKQTEKLDEAVDCSFVFTEKMSKTKKAETLLKYFPHEKSNGYLSQFIKLMVGNQGNFKNVFGLEEEAKLQFSKETYEEDLEELLEKIGDDYIDLFVQAKNVYDAVLLSEILSDSTKNTRAKLSAGMIRRYDAHKEDLVLLKRFVKENLPKKYRAFFGDNSVNGYAGYIEGHATQEDFYKFVKKELTGIRGSEVFLTKIEQENFLRKQRTFDNGVIPHQIHLTELRAIIANQKKHYPFLKEEQEKLESLLTFKIPYYVGPLAKKQENSPFAWLIRKSEEKIKPWNLPEIVDMEGSAVRFIERMINTDMYIPHNKVLPKNSLLYQKFSIYNELTKVRYQDERGQMNYFSSIEKKEIFHELFEKNRKVTKKDLQEFLYLKYDIKHAELSGIEKAFNASYTTYHDFLTMSENKREMKQWLEDPELASMFEEIIKTLTVFEDREMIKTRLSHHEATLGKHIIKKLTKKHYTGWGRLSKELIQGIRDKQSNKTILDYLINDDDFPHHRNRNCMQLINDDSLSFKKEIKKAQMITDTENLEEIVKELTGSPAIKKGILQSLKIVDEIVGIMGYEPANIVVEMARENQTTGRGLKSSRPRLKALEESLKDFGSQLLKEYPTDNSSLQKDRLYLYYLQNGRDMYTGAPLDIHRLSDYDIDHIIPRSFTTDNSIDNKVLVSSKENRLKKDDVPSEKVVKKMRSFWYDLYSSKLISKRKLDNLTKIKLTEEDKAGFIKRQLVETRQITKHVAGILHHRFNKAEDTNEPIRKVRIITLKSALVSQFRNRFGIYKVREINEYHHAHDAYLNGVVALALLKKYPQLAPEFVYGEYLKFNAHKANKATVKKEFYSNIMKFFESDTPVCDENGEIFWDKSKSIAQVKKVINHHHMNIVKKTEIQKGGFSKETVEPKKDSSKLLPRKNNWDPTKYGGLGSPNVAYTVAFTYEKGKARKRTNALEGITIMEREAFEQSPVLFLKNKGYEQAEIEMKLPKYALFELENGRKRMVASNKEAQKANSFLLPEHLVTLLYHAKQYDEISHKESFDYVNEHHKEFSEVFARVLEFAGKYTLAEKNIEKLEKIYKENQTDDLAKLASSFVNLMQFNAMGAPADFKFFDVTIPRKRYTSLTEIWQSTIIHQSITGLYETRIRMGK

SEQ ID NO: 204 - protein, 1340 aa, Enterococcus faecium
  Enterococcus faecium PC4.1
MKKEYTIGLDIGTNSVGWSVLTDDYRLVSKKMKVAGNTEKSSTKKNFWGVRLFDEGQTAEARRSKRTARRRLARRRQRILELQKIFAPEILKIDEHFFARLNESFLVLDEKKQSRHPVFATIKQEKSYHQTYPTIYHLRQALADSSEKADIRLVYLAMAHLLKYRGHFLIEGELNTENSSVTETFRQFLSTYNQQFSEADDKQTEKLDEAVDCSFVFTEKMSKTKKAETLLKYFPHEKSNGYLSQFIKLMVGNQGNFKNVFGLEEEAKLQFSKETYEEDLEELLEKIGDDYIDLFVQAKNVYDAVLLSEILSDSTKNTRAKLSAGMIRRYDAHKEDLVLLKRFVKENLPKKYRAFFGDNSVNGYAGYIEGHATQEDFYKFVKKELTGIRGSEVFLTKIEQENFLRKQRTFDNGVIPHQIHLTELRAIIANQKKHYPFLKEEQEKLESLLTFKIPYYVGPLAKKQENSPFAWLIRKSEEKIKPWNLPEIVDMEGSAVRFIERMINTDMYIPHNKVLPKNSLLYQKFSIYNELTKVRYQDERGQMNYFSSIEKKEIFHELFEKNRKVTKKDLQEFLYLKYDIKHAELSGIEKAFNASYTTYHDFLTMSENKREMKQWLEDPELASMFEEIIKTLTVFEDREMIKTRLSHHEATLGKHIIKKLTKKHYTGWGRLSKELIQGIRDKQSNKTILDYLINDDDFPHHRNRNFMQLINDDSLSFKKEIKKAQMITDTENLEEIVKELTGSPAIKKGILQSLKIVDEIVGIMGYEPANIVVEMARENQTTGRGLKSSRPRLKALEESLKDFGSQLLKEYPTDNSSLQKDRLYLYYLQNGRDMYTGAPLDIHRLSDYDIDHIIPRSFTTDNSIDNKVLVSSKENRLKKDDVPSEKVVKKMRSFWYDLYSSKLISKRKLDNLTKIKLTEEDKAGFIKRQLVETRQITKHVAGILHHRFNKAEDTNEPIRKVRIITLKSALVSQFRNRFGIYKVREINEYHHAHDAYLNGVVALALLKKYPQLAPEFVYGEYLKFNAHKANKATVKKEFYSNIMKFFESDTPVCDENGEIFWDKSKSIAQVKKVINHHHMNIVKKTEIQKGGFSKETVEPKKDSSKLLPRKNNWDPAKYGGLGSPNVAYTVAFTYEKGKARKRTNALEGITIMEREAFEQSPVLFLKNKGYEQAEIEMKLPKYALFELENGRKRMVASNKEAQKANSFLLPEHLVTLLYHAKQYDEISHKESFDYVNEHHKEFSEVFARVLEFAGKYTLAEKNIEKLEKIYKENQTDDLAKLASSFVNLMQFNAMGAPADFKFFDVTIPRKRYTSLTEIWQSTIIHQSITGLYETRIRMGK

SEQ ID NO: 205 - protein, 1340 aa, Enterococcus faecium
  Enterococcus faecium TX1330
MKKEYTIGLDIGTNSVGWSVLTDDYRLVSKKMKVAGNTEKSSTKKNFWGVRLFDEGQTAEARRSKRTARRRLARRRQRILELQKIFAPEILKIDEHFFARLNESFLVLDEKKQSRHPVFATIKQEKSYHQTYPTIYHLRQALADSSEKADIRLVYLAMAHLLKYRGHFLIEGELNTENSSVTETFRQFLSTYNQQFSEADDKQTEKLDEAVDCSFVFTEKMSKTKKAETLLKYFPHEKSNGYLSQFIKLMVGNQGNFKNVFGLEEEAKLQFSKETYEEDLEELLEKIGDDYIDLFVQAKNVYDAVLLSEILSDSTKNTRAKLSAGMIRRYDAHKEDLVLLKRFVKENLPKKYRAFFGDNSVNGYAGYIEGHATQEDFYKFVKKELTGIRGSEVFLTKIEQENFLRKQRTFDNGVIPHQIHLTELRAIIANQKKHYPFLKEEQEKLESLLTFKIPYYVGPLAKKQENSPFAWLIRKSEEKIKPWNLPEIVDMEGSAVRFIERMNNTDMYIPHNKVLPKNSLLYQKFSIYNELTKVRYQDERGQMNYFSSIEKKEIFHELFEKNRKVTKKDLQEFLYLKYDIKHAELSGIEKAFNASYTTYHDFLTMSENKREMKQWLEDPELASMFEEIIKTLTVFEDREMIKTRLSHHEATLGKHIIKKLTKKHYTGWGRLSKELIQGIRDKQSNKTILDYLINDDDFPHHRNRNFMQLINDDSLSFKKEIKKAQMITDTENLEEIVKELTGSPAIKKGILQSLKIVDEIVGIMGYEPANIVVEMARENQTTGRGLKSSRPRLKALEESLKDFGSQLLKEYPTDNSSLQKDRLYLYYLQNGRDMYTGAPLDIHRLSDYDIDHIIPRSFTTDNSIDNKVLVSSKENRLKKDDVPSEKVVKKMRSFWYDLYSSKLISKRKLDNLTKIKLTEEDKAGFIKRQLVETRQITKHVAGILHHRFNKAEDTNEPIRKVRIITLKSALVSQFRNRFGIYKVREINEYHHAHDAYLNGVVALALLKKYPQLAPEFVYGEYLKFNAHKANKATVKKEFYSNIMKFFESDTPVCDENGEIFWDKSKSIAQVKKVINHHHMNIVKKTEIQKGGFSKETVEPKKDSSKLLPRKNNWDPAKYGGLGSPNVAYTVAFTYEKGKARKRTNALEGITIMEREAFEQSPVLFLKNKGYEQAEIEMKLPKYALFELENGRKRMVASNKEAQKANSFLLPEHLVTLLYHAKQYDEISHKESFDYVNEHHKEFSEVFARVLEFAGKYTLAEKNIEKLEKIYKENQTDDLAKLASSFVNLMQFNAMGAPADFKFFDVTIPRKRYTSLTEIWQSTIIHQSITGLYETRIRMGK

SEQ ID NO: 206 - protein, 1340 aa, Enterococcus faecium
  Enterococcus faecium TX1337RF
MKKEYTIGLDIGTNSVGWSVLTDDYRLVSKKMKVAGNTEKSSTKKNFWGVRLFDEGQTAEARRSKRTARRRLARRRQRILELQKIFAPEILKIDEHFFARLNESFLVLDEKKQSRHPVFATIKQEKSYHQTYPTIYHLRQALADSSEKADIRLVYLAMAHLLKYRGHFLIEGELNTENSSVTETFRQFLSTYNQQFSEADDKQTEKLDEAVDCSFVFTEKMSKTKKAETLLKYFPHEKSNGYLSQFIKLMVGNQGNFKNVFGLEEEAKLQFSKETYEEDLEELLEKIGDDYIDLFVQAKNVYDAVLLSEILSDSTKNTRAKLSAGMIRRYDAHKEDLVLLKRFVKENLPKKYRAFFGDNSVNGYAGYIEGHATQEDFYKFVKKELTGIRGSEVFLTKIEQENFLRKQRTFDNGVIPHQIHLTELRAIIANQKKHYPFLKEEQEKLESLLTFKIPYYVGPLAKKQENSPFAWLIRKSEEKIKPWNLPEIVDMEGSAVRFIERMINTDMYMPHNKVLPKNSLLYQKFSIYNELTKVRYQDERGQMNYFSSIEKKEIFHELFEKNRKVTKKDLQEFLYLKYDIKHAELSGIEKAFNASYTTYHDFLTMSENKREMKQWLEDPELASMFEEIIKTLTVFEDREMIKTRLSHHEATLGKHIIKKLTKKHYTGWGRLSKELIQGIRDKQSNKTILDYLINDDDFPHHRNRNFMQLINDDSLSFKKEIKKAQMITDTENLEEIVKELTGSPAIKKGILQSLKIVDEIVGIMGYEPANIVVEMARENQTTGRGLKSSRPRLKALEESLKDFGSQLLKEYPTDNSSLQKDRLYLYYLQNGRDMYTGAPLDIHRLSDYDIDHIIPRSFTTDNSIDNKVLVSSKENRLKKDDVPSEKVVKKMRSFWYDLYSSKLISKRKLDNLTKIKLTEEDKAGFIKRQLVETRQITKHVAGILHHRFNKAEDTNEPIRKVRIITLKSALVSQFRNRFGIYKVREINEYHHAHDAYLNGVVALALLKKYPQLAPEFVYGEYLKFNAHKANKATVKKEFYSNIMKFFESDTPVCDENGEIFWDKSKSIAQVKKVINHHHMNIVKKTEIQKGGFSKETVEPKKDSSKLLPRKNNWDPAKYGGLGSPNVAYTVAFTYEKGKARKRTNALEGITIMEREAFEQSPVLFLKNKGYEQAEIEMKLPKYALFELENGRKRMVASNKEAQKANSFLLPEHLVTLLYHAKQYDEISHKESFDYVNEHHKEFSEVFARVLEFAGKYTLAEKNIEKLEKIYKENQTDDLAKLASSFVNLMQFNAMGAPADFKFFDVTIPRKRYTSLTEIWQSTIIHQSITGLYETRIRMGK

SEQ ID NO: 207 - protein, 1336 aa, Enterococcus hirae
MTKDYTIGLDIGTNSVGWAVLTDDYQLMKRKMSVHGNTEKKKIKKNFWGARLFDEGQTAEFRRTKRTNRRRLARRKYRLSKLQDLFAEELCKQDDCFFVRLEESFLVPEEKQYKPASIFPTLEEEKEYYQKYPTIYHLRQKLVDSTEKEDLRLVYLALAHLLKYRGHFLFEGDLDTENTSIEESFRVFLEQYSKQSDQPLIVHQPVLTILTDKLSKTKKVEEILKYYPTEKINSFFAQCLKLIVGNQANFKRIFDLEAEVKLQFSKETYEEDLESLLEKIGDEYLDIFLQAKKVHDAILLSEIISSTVKHTKAKLSSGMVERYERHKADLAKFKQFVKENVPQKATVFFKDTTKNGYAGYIKGKTTQEEFYKFVKKELSGVVGSEPFLEKIDQETFLLKQRTYTNGVIPHQVHLIELKAIIDQQKQHYPFLEEAGPKIIALFKFRIPYYVGPLAKEQEASSFAWIERKTAEKINPWNFSEVVDIEKSAMRFIQRMTKQDTYLPTEKVLPKNSLLYQKYMIFNELTKVSYKDERGVKQYFSGDEKQQIFKQLFQKERGKITVKKLQNFLYTHYHIENAQIFGIEKAFNASYSTYHDFMKLAKTNQKAMQEWLEQPEMEPIFEDIVKILTIFEDRQMIKHQLSKYQEVFGEKLLKEFARKHYTGWGRFSAKLIHGIRDRKTNKTILDYLINDDDVPANRNRNLMQLINDEHLSFKEEIAKATVFSKHKSLVDVIQDLPGSPAIKKGIWQSLKIVEELIAIIGYKPKNIVIEMARENQKTHRTSPRLKALENGLKQIGSTLLKEQPTDNKALQKERLYLYYLQNGRDMYTGEPLEIENLHQYEVDHIIPRSFIVDNSIDNKVLVASKQNQKKRDDVPKKQIVNEQRIFWNQLKEAKLISPKKYAYLTKIELTPEDKARFIQRQLVETRQITKHVANILHQSFNQEEEGTDCDGVQIITLKATLTSQFRQTFGLYKVREINPHHHAHDAYLNGFIANVLLKRYPKLAPEFVYGKYVKYSLARENKATAKKEFYSNILKFLESDEPFCDENGEIYWEKSHHLPRIKKVLSSHQVNVVKKVEQQKGGFYKETVNSKEKPDKLIERKNNWDVTKYGGFGSPVIAYAIAFVYAKGKTQKKTRAIEGITIMEQAAFEKDPTTFLKEKGFPQVTEFIKLPKYTLFEFDNGRRRFLASHKESQKGNPFILSDQLVTLLYHAQHYDKITYQESFDYVNTHLSDFSAILTEVLAFAEKYTLADKNIERIQELYEENKYGETSMIAQSFLQLLQFNAIGAPADFKFFGVTIPRKRYTSLTEIWDATIIYQSVTGLYETRIRMGDLWAGEQ

SEQ ID NO: 208 - protein, 1330 aa, Enterococcus italicus
  Enterococcus italicus DSM 15952
MKNDYTIGLDIGTNSVGYSVVTDDYKVISKKMNVFGNTEKKSIKKNFWGVRLFESGQTAQEARMKRTSRRRIARRKNRICYLQEIFQPEMNHLDNNFFYRLNESFLVADDAKYDKHPIFGTLDEEIHFHEQFPTIYHLRKYLADGDEKADLRLVYLAIAHIIKFRGNFLIEGELNTENNSVIELSKVFVQLYNQTLSELEGFQFIDESIDFSEVLTQQLSKSERADNVLKLFPDEKGTGIFAQFIKLIVGNQGNFKKVFQLEEDQKLQLSTDDYEENIENLLAIIGDEYGDIFVAAQNLYQAILLAGILTSTEKTRAKLSASMIQRYEEHAKDLKLLKRFVKEHIPDKYAEIFNDATKNGYAGYIDGKTKEEEFYKYLKTTLVQKSGYQYFIEKIEQENFLRKQRIYDNGVIPHQVHAEELRAILRKQEKYYSFLKENHEKIEQIFKVRIPYYVGPLAKHNEQSRFAWNIRKSDEPIRPWNMNDVVDENASAVAFIERMTIKDIYLNENVLPRHSLIYEKFTVFNELTKVLYADDRGVFQRFSAEEKEDIFEKLFKSERKVTKKKLENYLRIELSISSPSVKGIEEQFNANFGTYLDLKKFDELHPYLDDEKYQDTLEEVIKVLTVFEDRSMIQNQLEQLPLNLSTKTIKALSRRKYTGWGRLSARLIDGIHDKNSGKTILDYLIEDESDSYIVNRNFMQLINDDHLSFKKIIEDSQPYKEQQSAEEIVSELSGSPAIKKGILQSLKIVDELVAIMGYKPKNIVVEMARENQTTGRGKQNSKPRLKGIENGLKEFSDSVLKGSSIDNKQLQNDRLYLYYLQNGKDMYTGHELDIDHLSTYDIDHIIPQSFLTDNSIDNRVLTTSKSNRGKSDNVPSEEVVRKMDRFWRKLLNAKLISERKYTNLTKKELTESDKAGFLKRQLVETRQITKHVATILDSKFNEDSNNRDVQIITLKSALVSEFRKTFNLYKVREINDLHHAHDAYLNAVVALSLLRVYPQLKPEFVYGEYGKNSIHDQNKATIKKQFYSNITRYFASKDYIINDDGEILWNKQETIAQVIKTLGMHQVNVVKKVEIQKGGFSKESIQPKGESQKLIRRKQQWNTKKYGGFDSPVVAYAILLSFDKGKRKARSFKIVGITIQDRESFEGNPILYLSKKDYHNPKVEAILPKYSLFEFENGRRRMVASASETQKGNQLIIPGHLMELLYHSKKIINGKNSDSVSYIQNNKEKFREIFEYIVDFSSKYISADANLNKIEKIFENNFHKASEQEIAKSFINLLTFTAMGAPADFEFFGEKIPRKRYVSISEIIDAVFIHQSITGLYETRVRLTEV

SEQ ID NO: 209 - protein, 1096 aa, Eubacterium dolichum
  Eubacterium dolichum DSM 3991
MMEVFMGRLVLGLDIGITSVGFGIIDLDESEIVDYGVRLFKEGTAAENETRRTKRGGRRLKRRRVTRREDMLHLLKQAGIISTSFHPLNNPYDVRVKGLNERLNGEELATALLHLCKHRGSSVETIEDDEAKAKEAGETKKVLSMNDQLLKSGKYVCEIQKERLRTNGHIRGHENNFKTRAYVDEAFQILSHQDLSNELKSAIITIISRKRMYYDGPGGPLSPTPYGRYTYFGQKEPIDLIEKMRGKCSLFPNEPRAPKLAYSAELFNLLNDLNNLSIEGEKLTSEQKAMILKIVHEKGKITPKQLAKEVGVSLEQIRGFRIDTKGSPLLSELTGYKMIREVLEKSNDEHLEDHVFYDEIAEILTKTKDIEGRKKQISELSSDLNEESVHQLAGLTKFTAYHSLSFKALRLINEEMLKTELNQMQSITLFGLKQNNELSVKGMKNIQADDTAILSPVAKRAQRETFKVVNRLREIYGEFDSIVVEMAREKNSEEQRKAIRERQKFFEMRNKQVADIIGDDRKINAKLREKLVLYQEQDGKTAYSLEPIDLKLLIDDPNAYEVDHIIPISISLDDSITNKVLVTHRENQEKGNLTPISAFVKGRFTKGSLAQYKAYCLKLKEKNIKTNKGYRKKVEQYLLNENDIYKYDIQKEFINRNLVDTSYASRVVLNTLTTYFKQNEIPTKVFTVKGSLTNAFRRKINLKKDRDEDYGHHAIDALIIASMPKMRLLSTIFSRYKIEDIYDESTGEVFSSGDDSMYYDDRYFAFIASLKAIKVRKFSHKIDTKPNRSVADETIYSTRVIDGKEKVVKKYKDIYDPKFTALAEDILNNAYQEKYLMALHDPQTFDQIVKVVNYYFEEMSKSEKYFTKDKKGRIKISGMNPLSLYRDEHGMLKKYSKKGDGPAITQMKYFDGVLGNHIDISAHYQVRDKKVVLQQISPYRTDFYYSKENGYKFVTIRYKDVRWSEKKKKYVIDQQDYAMKKAEKKIDDTYEFQFSMHRDELIGITKAEGEALIYPDETWHNFNFFFHAGETPEILKFTATNNDKSNKIEVKPIHCYCKMRLMPTISKKIVRIDKYATDVVGNLYKVKKNTLKFEFD

SEQ ID NO: 210 - protein, 1114 aa, Eubacterium rectale
MNYTEKEKLFMKYILALDIGIASVGWAILDKESETVIEAGSNIFPEASAADNQLRRDMRGAKRNNRRLKTRINDFIKLWENNNLSIPQFKSTEIVGLKVRAITEEITLDELYLILYSYLKHRGISYLEDALDDTVSGSSAYANGLKLNAKELETHYPCEIQQERLNTIGKYRGQSQIINENGEVLDLSNVFTIGAYRKEIQRVFEIQKKYHPELTDEFCDGYMLIFNRKRKYYEGPGNEKSRTDYGRFTTKLDANGNYITEDNIFEKLIGKCSVYPDELRAAAASYTAQEYNVLNDLNNLTINGRKLEENEKHEIVERIKSSNTINMRKIISDCMGENIDDFAGARIDKSGKEIFHKFEVYNKMRKALLEIGIDISNYSREELDEIGYIMTINTDKEAMMEAFQKSWIDLSDDVKQCLINMRKTNGALFNKWQSFSLKIMNELIPEMYAQPKEQMTLLTEMGVTKGTQEEFAGLKYIPVDVVSEDIFNPVVRRSVRISFKILNAVLKKYKALDTIVIEMPRDRNSEEQKKRINDSQKLNEKEMEYIEKKLAVTYGIKLSPSDFSSQKQLSLKLKLWNEQDGICLYSGKTIDPNDIINNPQLFEIDHIIPRSISFDDARSNKVLVYRSENQKKGNQTPYYYLTHSHSEWSFEQYKATVMNLSKKKEYAISRKKIQNLLYSEDITKMDVLKGFINRNINDTSYASRLVLNTIQNFFMANEADTKVKVIKGSYTHQMRCNLKLDKNRDESYSHHAVDAMLIGYSELGYEAYHKLQGEFIDFETGEILRKDMWDENMSDEVYADYLYGKKWANIRNEVVKAEKNVKYWHYVMRKSNRGLCNQTIRGTREYDGKQYKINKLDIRTKEGIKVFAKLAFSKKDSDRERLLVYLNDRRTFDDLCKIYEDYSDAANPFVQYEKETGDIIRKYSKKHNGPRIDKLKYKDGEVGACIDISHKYGFEKGSKKVILESLVPYRMDVYYKEENHSYYLVGVKQSDIKFEKGRNVIDEEAYARILVNEKMIQPGQSRADLENLGFKFKLSFYKNDIIEYEKDGKIYTERLVSRTMPKQRNYIETKPIDKAKFEKQNLVGLGKTKFIKKYRYDILGNKYSCSEEKFTSFC

SEQ ID NO: 211 - protein, 1391 aa, Eubacterium sp.
  Eubacterium sp. AS15
MENKQYYIGLDVGTNSVGWAVTDTSYNLLRAKGKDMWGARLFDEAKTAVERRTKRTSRRRSEREKARKAMLKELFADEINKVDPNFFIRLEESKFFLDDRSENNRQRYTLFNDAKFTDKDYYEKYKTIFHLRSALINSDEKFDVRLVFLAILNLFSHRGHFLNASLKGDGEIQGVDIFYNDLYEVCEEFEIDLPQISNIDNFEKILSQKGKSRTKILEELSEELSISKKEKIKYSLLKLICGMKIKVVDIYADEDIQEDDKKKDLGFRESDYEKSSLEVKEIIGDDHFELIERAKAVHDIGLLANIIGNSKYLCEARVEAYDNHHKDLQKIKELLKKYDIKAYTDMFRKMTDKNYSAYVGSVNSNIAKERRSVDNRKIEDLYEYIKKIALKNISDDNEDKIEILKKIETGEFLKKQLTASNGVIPNQLQSRELRAILKKAENYLPFLKEKGEKNLTVSEMIIQLFEFQIPYYVGPLDKNPKKDKNANSWAVIPSGGRILPWNFEDKVDVKGSRKEFIEKMVRKCTYLSEEHTLPKQSLLYEKFMVLNEINNIKIDGEKISVEAKQKIYNDLFMKGKKVSQKAIKQELISLNIMSKDSVLSGIDTVCNAYLSSIAKFRGVFDENVNNQSTIDMIEDIIFLKTVYSDEKRFVKEEIVEKYGDEIDKDKIKRILGFKFSNWGNISKSFLELEGADVGTGEIRSIIQSLWETNFNLMELLSSRFTYMDELEKRVKKLEKPLSEWTIEDLDDMYLSSPVKRMIWQSMKIVDEIQTVIGYAPKRIFVEMTRSEGEKVRTKSRKDRLKELYSAIKEDSKQWVKELDAKDESYFRSKKMYLYYLQKGRCMYSGEVIELDKLMDDNLYDIDHIYPRSFVKDDSLDNLVLVKKEINNRKQNDPITPQIQASCQGFWKVLHEQGFISNEKYSRLTRKTQEFSDEEKLSFINRQIVETGQATKCMAQILQKSMGEDVDVVFSKARLVSEFRHKFELFKSRLINDFHHANDAYLNIVVGNSYFVKFTRNPANFIKDARKNPDNPAYKYHMDRFFERDVKSKSEVAWIGQSEGNAGTIAIVKKTMSKNSPLITKKVEEGHGSITKETIVGVKEIKFGRNKVEKADKTPKKANLQAYRPIKTSDERLCNILRYGGRTSISISGYCLVEYVKKRKTIRSLEAIPVYLGRKDSLSEEKLLNYFRYNLNDGGKDSVSDIRLCLPFISTNSLVKIDGYLYYLGGKNDDRIQLYNAYQLKMKKEEVEYIRKIEKAVSMSKFDEIDREKNPVLTEEKNIELYNKIQDKFENTVFSKRMSLVKYNKKDLSFGDFLKNKKSKFEEIDLEKQCKVLYNIIFNLSNLKEVDLSDIGGSKSTGKCRCKKNITNYKEFKLIQQSITGLYSCEKDLMTI

SEQ ID NO: 212 - protein, 1107 aa, Eubacterium ventriosum
  Eubacterium ventriosum ATCC 27560
MGYTVGLDIGVASVGVAVLDENDNIVEAVSNIFDEADTSNNKVRRTLREGRRTKRRQKTRIEDFKQLWETSGYIIPHKLHLNIIELRNKGLTELLSLDELYCVLLSMLKHRGISYLEDADDGEKGNAYKKGLAFNEKQLKEKMPCEIQLERMKKYGKYHGEFIIEINDEKEYQSNVFTTKAYKKELEKIFETQRCNGNKINTKFIKKYMEIYERKREYYIGPGNEKSRTDYGIYTTRTDEEGNFIDEKNIFGKLIGKCSVYPEEYRASSASYTAQEFNLLNDLNNLKINNEKLTEFQKKEIVEIIKDASSVNMRKIIKKVIDEDIEQYSGARIDKKGKEIYHTFEIYRKLKKELKTINVDIDSFTREELDKTMDILTLNTERESIVKAFDEQKFVYEENLIKKLIEFRKNNQRLFSGWHSFSYKAMLQLIPVMYKEPKEQMQLLTEMNVFKSKKEKYVNYKYIPENEVVKEIYNPVVVKSIRTTVKILNALIKKYGYPESVVIEMPRDKNSDDEKEKIDMNQKKNQEEYEKILNKIYDEKGIEITNKDYKKQKKLVLKLKLWNEQEGLCLYSGKKIAIEDLLNHPEFFEIDHIIPKSISLDDSRSNKVLVYKTENSIKENDTPYHYLTRINGKWGFDEYKANVLELRRRGKIDDKKVNNLLCMEDITKIDVVKGFINRNLNDTRYASRVVLNEMQSFFESRKYCNTKVKVIRGSLTYQMRQDLHLKKNREESYSHHAVDAMLIAFSQKGYEAYRKIQKDCYDFETGEILDKEKWNKYIDDDEFDDILYKERMNEIRKKIIEAEEKVKYNYKIDKKCNRGLCNQTIYGTREKDGKIHKISSYNIYDDKECNSLKKMINSGKGSDLLMYNNDPKTYRDMLKILETYSSEKNPFVAYNKETGDYFRKYSKNHNGPKVEKVKYYSGQINSCIDISHKYGHAKNSKKVVLVSLNPYRTDVYYDNDTGKYYLVGVKYNHIKCVGNKYVIDSETYNELLRKEGVLNSDENLEDLNSKNITYKFSLYKNDIIQYEKGGEYYTERFLSRIKEQKNLIETKPINKPNFQRKNKKGEWENTRNQIALAKTKYVGKLVTDVLGNCYIVNMEKFSLVVDK

SEQ ID NO: 213 - protein, 1391 aa, Eubacterium yurii
  Eubacterium yurii subsp. margaretiae ATCC 43715
MENKQYYIGLDVGTNSVGWAVTDTSYNLLRAKGKDMWGARLFEKANTAAERRTKRTSRRRSEREKARKAMLKELFADEINRVDPSFFIRLEESKFFLDDRSENNRQRYTLFNDATFTDKDYYEKYKTIFHLRSALINSDEKFDVRLVFLAILNLFSHRGHFLNASLKGDGDIQGMDVFYNDLVESCEYFEIELPRITNIDNFEKILSQKGKSRTKILEELSEELSISKKDKSKYNLIKLISGLEASVVELYNIEDIQDENKKIKIGFRESDYEESSLKVKEIIGDEYFDLVERAKSVHDMGLLSNIIGNSKYLCEARVEAYENHHKDLLKIKELLKKYDKKAYNDMFRKMTDKNYSAYVGSVNSNIAKERRSVDKRKIEDLYKYIEDTALKNIPDDNKDKIEILEKIKLGEFLKKQLTASNGVIPNQLQSRELRAILKKAENYLPFLKEKGEKNLTVSEMIIQLFEFQIPYYVGPLDKNPKKDNKANSWAKIKQGGRILPWNFEDKVDVKGSRKEFIEKMVRKCTYISDEHTLPKQSLLYEKFMVLNEINNIKIDGEKISVEAKQKIYNDLFVKGKKVSQKDIKKELISLNIMDKDSVLSGTDTVCNAYLSSIGKFTGVFKEEINKQSIVDMIEDIIFLKTVYGDEKRFVKEEIVEKYGDEIDKDKIKRILGFKFSNWGNLSKSFLELEGADVGTGEVRSIIQSLWETNFNLMELLSSRFTYMDELEKRVKKLEKPLSEWTIEDLDDMYLSSPVKRMIWQSMKIVDEIQTVIGYAPKRIFVEMTRSEGEKVRTKSRKDRLKELYNGIKEDSKQWVKELDSKDESYFRSKKMYLYYLQKGRCMYSGEVIELDKLMDDNLYDIDHIYPRSFVKDDSLDNLVLVKKEINNRKQNDPITPQIQASCQGFWKILHDQGFMSNEKYSRLTRKTQEFSDEEKLSFINRQIVETGQATKCMAQILQKSMGEDVDVVFSKARLVSEFRHKFELFKSRLINDFHHANDAYLNIVVGNSYFVKFTRNPANFIKDARKNPDNPVYKYHMDRFFERDVKSKSEVAWIGQSEGNSGTIVIVKKTMAKNSPLITKKVEEGHGSITKETIVGVKEIKFGRNKVEKADKTPKKPNLQAYRPIKTSDERLCNILRYGGRTSISISGYCLVEYVKKRKTIRSLEAIPVYLGRKDSLSEEKLLNYFRYNLNDGGKDSVSDIRLCLPFISTNSLVKIDGYLYYLGGKNDDRIQLYNAYQLKMKKEEVEYIRKIEKAVSMSKFDEIDREKNPVLTEEKNIELYNKIQDKFENTVFSKRMSLVKYNKKDLSFGDFLKNKKSKFEEIDLEKQCKVLYNIIFNLSNLKEVDLSDIGGSKSTGKCRCKKNITNYKEFKLIQQSITGLYSCEKDLMTI

SEQ ID NO: 214 - protein, 1142 aa, Facklamia hominis
  Facklamia hominis CCUG 36813
MYSVGLDIGIASCGYSIINDVNGNIVELGTLLFKSRNSDNNEERRTNRGSRRLINRRRTRLDDGKKLLAEKGFKQDSKLKHVCPYELRVKGLHEKLTQGEIYKVVLHILKKRGISYLDESDENSSGIDGASYKDQVNLNLNLQKELTPGQIQLKRLKENGRIKSGVTFENGYQLNVFSVSAYANELNKILTKQSEYYSEIDQIWIDRFTKNGYRKEAGLVYRKRPYYDGPGNEKNNSIYGRWANFKEDGHPKENIFDQLIGLDSVDSTQVRASASTLTAQKYNLLNDLNNLTIIEDDRKFTTDEKVSIINYLMTQDITRFGPKELAKFYQLEVDQIRGWRIDNKGNPEIHSLKVYRDWKKIFNTSSIDLTSIQTWVVDELANVITLNTEIPSTLATLKIKIPDIDQQILNFVENNFYELKKKTSKNSWHSFSLKTLNILIPELLNTSEEQNTILERLNLKFDLKNKYAEKNQIPVKELLEQIYNPTVTKSVHQSIKLFNEIIEKYGKNNISYVTIEMPRDKNDQDQKDTIKRINKLNSERKNDSEKYFLERSGWDTIRFESALKKPRFAEKLLFYYEQKGKCAYSGQDILAESLLNESCEVDHIIPLSISFDDSIHNKVLVTASSNQEKGQRTPYMAFIDGAKLGQSWDDFVAWVNSCGFHRKKVQNLLYEENIFNPDVQRGFVSRNLNDTRYASRIVLNAIQSFFYKQKDLTKVKVVNGSFTHTLRKKWGSSLDKNRDTYHHHAVDATLCAVTPFINIVKYEFFEEDGIKYMVDLTTGEKVAYSDYKKMKFYDKRAYVPIWDGFIKQLTPANLYPKIKFSHQVDSKWNRKISDATIYSTRKIVETKINKKGVAKETVKDIVIDKIKDIYTPEGWRKFKEKQDKLLMKNFDEKTYNKLIKIAKEYPEKKEVQTSNGKVSLVEVSPFKMYCEEQNVPAIRKYSKKGNGPYIRSLKFYDKELGKHINITKDSYGNDIERTIRNKKIILKNQNSWRTDVYYNSVNNCYELLGIKYCHLKFYRGKYGIPKSIYDELKKEDEISSESVFKFSLYRHDRVRFEKDGEYIEALFGSKNESNKNYLELSPIDKNKWLSKENVKFFGEVAASGRFIKGLKPGIKVIKQSTDYMGHVYAIHQEKLKFVLSDA

SEQ ID NO: 215 - protein, 1512 aa, Fibrobacter succinogenes
MKKILGLDLGTNSIGWAVVNADEITRDDGSRYLKPNGISAAGSRIIPMSADILGDFEKGNSISQTAERTRMRMARRLHERALLRRERLLRVLNLLDFLPKHFADKIDRYGKFTDDSEPKLAWRKNTEGKYEFIFQDAFNEMLAEFKDKQPEIVEEGKKIPYDWTIYYLRKKALEKALSKEELSWILLQFNQKRGYYQLRGEEEEIPQDKKIEYLAQKVVKVEATDQKKGDDVWYNVYLENGMIYRRTSKAPLDWEGKVKEFIVTTEVENDGETPKKDKEGNIKRSFRAPKEDDWTLLKKKTEADIENSHKTVGCYIYDSLLNNPKQKIIGKLVRTVERKFYKEELTQILKKQVELIPELRDDNLYKQCIEELYPINEAHRNTIAKTDFANLFINDILFYQRPLKSKKSQIDNCPYEERIFIDSKTGEKKKVPVKCIAKSNPLFQEFRLWQFIQNLRIYQREKEIDGKLLTDIDITSECLKSEEDYVRLFDWLNDRETIEQEDLLKHLFNTKKSKNKENPYRWNYVEDKVYPCNETRATILKGFSKCGINASVLSPELEMALWHILYSVEDKKEIETALTHFAQKQGWNDDFAKVFSKAKPFKKDYGSYSEKAIKKLLSLMRMGKYWNQDNIDKNTLDRIDKIINGEYDEKISNRVRDNAINLKDISDFRGLPVWLACYIVYDRHSEAKDCTKWNSPEEIDSYLKKFKQHSLRNPIVEQVVTETLRTVRDIWIQEEQIDEIHLELGRDLKNPADKRKKMSENILKNENTNLRIKAMLMEFMNPSMGIENVRPYSPSQQDILRIYEENALDNLTKDDKDFDFISKISKQAQPSKTDIIRYKCWLEQKYRSPYTGKTISLSKLFTPAYEIEHVIPQSLYFDDSFSNKVICEAEVNKLKDRQLGYKFIAEHHGEKVQLSQGEVVEILSVDAYEKFVKENYANNRIKMKKLLMESIPDEFIERQLNDSRYISKVVKGLLSNIVREKIDDENYEPEAVSKNLISCNGAITDRLKKDWGMNDVWNSIILPRFIRMNQITGKDCFTTTNAEGHLIPQMPLELQKGFNKKRIDHRHHAMDAIVIACTTRDHVNLLNNEAAHSKFNATRYQLQRKLRRFEKAVIDGKEREVAKEFLKPWDSFSSDSKNILENIIVSFKQNQRVINKTTNAFLHFDENGKKTFIKQGKGDSWAIRKSMHKDTVFGEINLRKVRSVSLNEAIKVPERVLNKKIKEKILELKNNKIDAKNIKKYIEENHTGGYGIDSSKIDVFYFTKETKERFFATRKTLDTSFNQAKIKDSIADSGIQKILLAHLKSKNGDAEQAFSPDGIDEMNKNIVELNNGKFHQPILKVRVYEKADKFAVGQKGNKKVKFVEAAKGTNLFFAIFEKDGKRSYLTIPLNVMIDCQKQYGNQWKNNIEAYLKEKELVEKDVKLQFILSPNDLVYLPTEGSIDKKRIYKVVSFTNNRLYAIPYAIAKSIVDKNEFTQLNKIEFTDNKESIKDACVPVIIDRLGNVIEFNGKRL

SEQ ID NO: 216 - protein, 1365 aa, Filifactor alocis
MTKEYYLGLDVGTNSVGWAVTDSQYNLCKFKKKDMWGIRLFESANTAKDRRLQRGNRRRLERKKQRIDLLQEIFSPEICKIDPTFFIRLNESRLHLEDKSNDFKYPLFIEKDYSDIEYYKEFPTIFHLRKHLIESEEKQDIRLIYLALHNIIKTRGHFLIDGDLQSAKQLRPILDTFLLSLQEEQNLSVSLSENQKDEYEEILKNRSIAKSEKVKKLKNLFEISDELEKEEKKAQSAVIENFCKFIVGNKGDVCKFLRVSKEELEIDSFSFSEGKYEDDIVKNLEEKVPEKVYLFEQMKAMYDWNILVDILETEEYISFAKVKQYEKHKTNLRLLRDIILKYCTKDEYNRMFNDEKEAGSYTAYVGKLKKNNKKYWIEKKRNPEEFYKSLGKLLDKIEPLKEDLEVLTMMIEECKNHTLLPIQKNKDNGVIPHQVHEVELKKILENAKKYYSFLTETDKDGYSVVQKIESIFRFRIPYYVGPLSTRHQEKGSNVWMVRKPGREDRIYPWNMEEIIDFEKSNENFITRMTNKCTYLIGEDVLPKHSLLYSKYMVLNELNNVKVRGKKLPTSLKQKVFEDLFENKSKVTGKNLLEYLQIQDKDIQIDDLSGFDKDFKTSLKSYLDFKKQIFGEEIEKESIQNMIEDIIKWITIYGNDKEMLKRVIRANYSNQLTEEQMKKITGFQYSGWGNFSKMFLKGISGSDVSTGETFDIITAMWETDNNLMQILSKKFTFMDNVEDFNSGKVGKIDKITYDSTVKEMFLSPENKRAVWQTIQVAEEIKKVMGCEPKKIFIEMARGGEKVKKRTKSRKAQLLELYAACEEDCRELIKEIEDRDERDFNSMKLFLYYTQFGKCMYSGDDIDINELIRGNSKWDRDHIYPQSKIKDDSIDNLVLVNKTYNAKKSNELLSEDIQKKMHSFWLSLLNKKLITKSKYDRLTRKGDFTDEELSGFIARQLVETRQSTKAIADIFKQIYSSEVVYVKSSLVSDFRKKPLNYLKSRRVNDYHHAKDAYLNIVVGNVYNKKFTSNPIQWMKKNRDTNYSLNKVFEHDVVINGEVIWEKCTYHEDTNTYDGGTLDRIRKIVERDNILYTEYAYCEKGELFNATIQNKNGNSTVSLKKGLDVKKYGGYFSANTSYFSLIEFEDKKGDRARHIIGVPIYIANMLEHSPSAFLEYCEQKGYQNVRILVEKIKKNSLLIINGYPLRIRGENEVDTSFKRAIQLKLDQKNYELVRNIEKFLEKYVEKKGNYPIDENRDHITHEKMNQLYEVLLSKMKKFNKKGMADPSDRIEKSKPKFIKLEDLIDKINVINKMLNLLRCDNDTKADLSLIELPKNAGSFVVKKNTIGKSKIILVNQSVTGLYENRREL

SEQ ID NO: 217 - protein, 1347 aa, Finegoldia magna
  Finegoldia magna ACS-171-V-Col3
MKSEKKYYIGLDVGTNSVGWAVTDEFYNILRAKGKDLWGVRLFEKAKTAADTRTFRSGRRRNDRKGMRLQILREIFEDEIKKVDKDFYDRLDESKFWAEDKKVSGKYSLFNDKNFSDKQYFEKFPTIFHLRKYLMEEHGKVDIRYYFLAINQMMKRRGHFLIDGQISHVTDDKPLKEQLILLINDLLKIELEEELMDSIFEILADVNEKRTDKKNNLKELIKGQDFNKQEGNILNSIFESIVTGKAKIKNIISDEDILEKIKEDNKEDFVLTGDSYEENLQYFEEVLQENITLFNTLKSTYDFVILQSILKGKSTLSDAQVERYDEHKKDLEILKKVIKKYDEDGKLFKQVFKEDNGNGYVSYIGYYLNKNKKITAKKKISNIEFTKYVKGILEKQCDCEDEAVKYLLGKIEQENFLLKQISSINSVIPHQIHLFELDKILENLAKNYPSFNNKKEEFTKIEKIRKTFTFRIPYYVGPLNDYHKNNGGNAWIFRNKGEKIRPWNFEKIVDLHKSEEEFIKRMLNQCTYLPEETVLPKSSILYSEYMVLNELNNLRIKGKPLDTDVKLKLIEELFKKKTKVTLKSIRDYMIRNNFADKEDFDNSEKNLEIVSNMKSYIDFNNILGDKFELEMVEDLIEKITIHTGNKTLLKKYIEETYPDLSSSQIQKIINLKYKDWGRLSRKLLDGIKGRNKTDDVNTVINFMRNSSDNLMQIIEGKNYSFNEYIDNLRKKYIPQEISYEVVENLYVSPSVKKMIWQVIRVTEEITKVMGYDPDKIFIEMAKSEEEKKTTISRKNKLLDLYKAIKKDERDSQYEKLLTGLNKLDESELRSKKLYLYYTQMGRDMYTGEKIDLDKLFDSTHYDKDHIIPQSMKKDDSIINNLVLVNKNANQTTKGNIYPVPSSIRNNPDIYNYWKYLMEKEFISKEKYNRLIRNTPLTNEELGVFINRQLVETRQSTKAIKELFEKFYQKSKIIPVKASLASDLRKDMNTLKSREVNDLHHAHDAFLNIVAGDVWNREFTSNPINYVNENREGDKVKYSLSKYFTRPRKSKGKVIWTPEKGRKLIVDTLNKPSVLISNESHVKKGELFNATISGKKDYKKGKIYLPLKKDDRLKDVSKYGGYKAINGAFFFLVEHTKSKKRIRSIELFPLHLLSKFYEDKNTVLDYAINVLQLQDPKIIIDKINYRTEIIIDNFSYLISTKSNDGSITVKPNEQMYWRVDEISNLKKIENKYKKDAILTEEDRKIMESYIDKIYQQFKAGKYKNRRTTDTIIEKYEIIDLDTLDNKQLYQLLVAFISLSYKTSNNAVDFTVIGLGTECGKPRITNLPDNTYLVYKSITGIYEKRIRIK

SEQ ID NO: 218 - protein, 1348 aa, Finegoldia magna
MKSEKKYYIGLDVGTNSVGWAVTDEFYNILRAKGKDLWGVRLFEKADTAANTRIFRSGRRRNDRKGMRLQILREIFEDEIKKVDKDFYDRLDESKFWAEDKKVSGKYSLFNDKNFSDKQYFEKFPTIFHLRKYLMEEHGKVDIRYYFLAINQMMKRRGHFLIDGQISHVTDDKPLKEQLILLINDLLKIELEEELMDSIFEILADVNEKRTDKKNNLKELIKGQDFNKQEGNILNSIFESIVTGKAKIKNIISDEDILEKIKEDNKEDFVLTGDSYEENLQYFEEVLQENITLFNTLKSTYDFLILQSILKGKSTLSDAQVERYDEHKKDLEILKKVIKKYDEDGKLFKQVFKEDNGNGYVSYIGYYLNKNKKITAKKKISNIEFTKYVKGILEKQCDCEDEDVKYLLGKIEQENFLLKQISSINSVIPHQIHLFELDKILENLAKNYPSFNNKKEEFTKIEKIRKTFTFRIPYYVGPLNDYHKNNGGNAWIFRNKGEKIRPWNFEKIVDLHKSEEEFIKRMLNQCTYLPEETVLPKSSILYSEYMVLNELNNLRINGKPLDTDVKLKLIEELFKKKTKVTLKSIRDYMVRNNFADKEDFDNSEKNLEIASNMKSYIDFNNILEDKFDVEMVEDLIEKITIHTGNKKLLKKYIEETYPDLSSSQIQKIINLKYKDWGRLSRKLLDGIKGTKKETEKTDTVINFLRNSSDNLMQIIGSQNYSFNEYIDKLRKKYIPQEISYEVVENLYVSPSVKKMIWQVIRVTEEITKVMGYDPDKIFIEMAKSEEEKKTTISRKNKLLDLYKAIKKDERDSQYEKLLTGLNKLDDSDLRSRKLYLYYTQMGRDMYTGEKIDLDKLFDSTHYDKDHIIPQSMKKDDSIINNLVLVNKNANQTTKGNIYPVPSSIRNNPKIYNYWKYLMEKEFISKEKYNRLIRNTPLTNEELGGFINRQLVETRQSTKAIKELFEKFYQKSKIIPVKASLASDLRKDMNTLKSREVNDLHHAHDAFLNIVAGDVWNREFTSNPINYVKENREGDKVKYSLSKDFTRPRKSKGKVIWTPEKGRKLIVDTLNKPSVLISNESHVKKGELFNATIAGKKDYKKGKIYLPLKKDDRLQDVSKYGGYKAINGAFFFLVEHTKSKKRIRSIELFPLHLLSKFYEDKNTVLDYAINVLQLQDPKIIIDKINYRTEIIIDNFSYLISTKSNDGSITVKPNEQMYWRVDEISNLKKIENKYKKDAILTEEDRKIMESYIDKIYQQFKAGKYKNRRTTDTIIEKYEIIDLDTLDNKQLYQLLVAFISLSYKTSNNAVDFTVIGLGTECGKPRITNLPDNTYLVYKSITGIYEKRIRIK

SEQ ID NO: 219 - protein, 1348 aa, Finegoldia magna
  Finegoldia magna SY403409CC001050417
MKSEKKYYIGLDVGTNSVGWAVTDEFYNILRAKGKDLWGVRLFEKAKTAADTRTFRSGRRRNDRKGVRLQILREIFEDEIKKVDKDFYDRLDESKFWAEDKKVSGKYSLFNDKNFSDKQYFEKFPTIFHLRKYLMEEHGKVDIRYYFLAINQMMKRRGHFLIDGQISHVTDDKPLKQQLILLINDLLKIELEEEFMDSIFEILADVNEKKTEKKNILKELINAQDFNKQEGKILYSIFESIVTGKAKIKNIISDEDILEKIKEDNKEDFVLTGDSYEENLQYFEEVLQENITLFNTLKSAYDFVILQSILKGKSTLSDAQVERYDEHKKDLEILKKVIKKYDEDGKLFKQVFKEDNGNGYVSYIGYYLNKNKKITAKKKISNIEFTKYVKGILEKQCDCEDEDVKYLLGKIEQENFLLKQISSINSVIPHQIHLFELDKILENLAKYYPSFNNKKEEFTKIEKIRKTFTFRIPYYVGPLNDYHKNNGGNAWIFRNKGEKIRPWNFEKIVDLHKSEEEFIKRMLNQCTYLPEETVLPKSSILYSEYMVLNELNNLRINGKPIDTDVKLKLIEELFKKKTKVTLKSIRDYMIRNNFADKEDFDNSEKNLEIVSNMKSYIDFNNILGDKFELEMVEDLIEKITIHTGNKKLLKKYIEETYPDLSSSQIQKIINLKYKDWGRLSRKLLDGITGTNIETGEIDTVINFLRNSSDNLMQIIGSQNYSFNNDIDKLRKKYIPQEISYEVVENLYVSPSVKKMIWQVIRITEEITKVMGYDPDKIFIEMAKSEEGKKTTISRKNKLLALYKAIKKDERDSQYEKLLTGLNKLDDSDLRSRKLYLYYTQMGRDMYTGEKIDLDKLFDSTHYDKDHIIPQSMKKDDSIINNLVLVNKNANQTTKGNIYPVPSSIRNNPKIYNYWKYLMEKEFISKEKYNRLIRNTPLTNEELGGFINRQLVETRQSTKAIKELFEKFYKKSKIIPVKAILASDLRKDMNTLKSREVNDLHHAHDAFLNIVAGDVWNREFTSNPINYVKENREGDKVKYSLSKYFTRPRKSKGKVIWTPEKGRKLIVDTLNKPSVLISNESHVKKGELFNATIAGKKDYKKGKIYLPLKKDDRLQDVSKYGGYKAINGAFFFLVEHTKSKKRIRSIELFPLHLLSKFYEDKNTVLDYAINVLQLQDPKIIIDKINYRTEIIIDNFSYLISTKSNDGSITVKPNEQMYWRVDEISNLKKIENKYKKDAILTEEDRKIMESYIDKIYQQFKAGKYKNRRTTDTIIEKYEIIDLDTLDNKQLYQLLVAFISLSYKTSNNAVDFTVIGLGTECGKPRITNLPDNTYLVYKSITGIYEKRIRIK

SEQ ID NO: 220 - protein, 1516 aa, Flavobacteriaceae bacterium
  Flavobacteriaceae bacterium S85
MLKQQKDKIIGMNKKILGLDLGTNSIGWALVKQDLENKYGEIIGCGSRIIPMSQDVLGKFDAGISISQTAERTNYRSVRKLIQRNTLRRERLHRVLHQLDFLPKHYNDSIDFEKKLGQFKTDKETKLNYFVNQHGKHEFLFKDSFNEMVKEFKEEQPELFYIKNNGKETKIPYDWTIYYLRKKALSKKISKEELSWLVLNFNQKRGYYQLRGEIDEEKEKNKRYEKLYVSEVVKTNNTIKKTGEYLYDIYFDNGWKYEKQTTKPQDWLHKHKEFIITTTTLKNGETKRTFKTVDSEKDWIAIKSKTEQDIKESNKTVGAFIYDTLLKNPTQKIRGSLVKTIERKFYREEFEKILKEQIKHRPEINVNTAIGKENYTKCVTELYPRNEAHANNILTNDFNYLFTKDILFYQRPLKSKKSEIANCQYEYRTYIKKKEKTGKEERVKQPLKATPKSHPLFQEFRLWQFIHNLKIYIRETTVGNKPLFDVDITDTFFTSENDWATLFEYLNNKKEIEQKHVLEYLVSKKIISKSEKTDYRWNYVEDKKYPGNETRVDFINRLKKVENLNVDEFLTSELEFKLWHIIYSVTDKNEYEKALENFAIRQNIDKDSFVNSFKKFPPFKSDYGAYSTKAIKKLLPLMRLGKFWDGSEIPKVVVEKITDIKTRLTSVNYDESLFKKDEKKILETIVDDITPKQLLKSFVKLKGKNHLAGLNTYQACYLVYERHSESSDITQWENPDDIDSFLNHFKQHSLRNPIVEQVVTETLRTVRDIWKYYGNGSPNYFNEIHIELGREMKNPADKRKQMSAKINENENTNQRIKGILQELMNDGVQDIKPYSPSQQEILKIYEEGISQNPNVDYSKVSEDEITKIKKSNNPTLKEIQRYKLWLEQKYISPYTGKPIPLSELFTPAYQIEHIIPQSRYFDNSLSNKIICESEVNEDKSNKTAYEYLKTNGGSIVHGHHLLSLKEYEDHCQHYFKKNRTKLKNLLSEEIPEGFINRQLNDSRYISKLIKGLLSNIVREENEQEATSKNIVPVTGSITSKLKQDWGLNDKWNEIIAPRFKRLNKMTNSNDFGYFDEKINTFRIQVPDAISRGFNKKRIDHRHHTLDALVIACCTKKHIQYLNSLNNEIIKHELKPSILIKNAQGDYTKHFMLPWNNFPIDCKNAIENTIVSFKQNLRVINKTSNKYQSYKDENGNLRLGKDGKPKKGLTKQTKGNNWAVRKAMHEDTFYGEIVDGENKGKLKIKTLLDTSFDVKKIEDKVLDKSIRTILINYLKQDKYKNLSKPHEEAFSPNGIIEMNKNIISLNNNIPHKPIKRVTLKHEKGKKFSIKTLLDKKTKFAKSATGTNVFFCIYKNINGKIKYHTPSFEEIIEIQKQEFEIKYKSKLNVPETLFDKKESFELLFYLQPNDLVYLPNDEELKNRQLIDFNNLNKKQIKRIYKFTDGSGTTANFIPYQVAKVIFNLNKKEQAKSSFKYPIQNEFGVGSPQSKNQKSIEGILIKERCIKLKIDRLGNISKA

SEQ ID NO: 221 - protein, 1473 aa, Flavobacterium branchiophilum
MAKILGLDLGTNSIGWAVVERENIDFSLIDKGVRIFSEGVKSEKGIESSRAAERTGYRSARKIKYRRKLRKYETLKVLSLNRMCPLSIEEVEEWKKSGFKDYPLNPEFLKWLSTDEESNVNPYFFRDRASKHKVSLFELGRAFYHIAQRRGFLSNRLDQSAEGILEEHCPKIEAIVEDLISIDEISTNITDYFFETGILDSNEKNGYAKDLDEGDKKLVSLYKSLLAILKKNESDFENCKSEIIERLNKKDVLGKVKGKIKDISQAMLDGNYKTLGQYFYSLYSKEKIRNQYTSREEHYLSEFITICKVQGIDQINEEEKINEKKFDGLAKDLYKAIFFQRPLKSQKGLIGKCSFEKSKSRCAISHPDFEEYRMWTYLNTIKIGTQSDKKLRFLTQDEKLKLVPKFYRKNDFNFDVLAKELIEKGSSFGFYKSSKKNDFFYWFNYKPTDTVAACQVAASLKNAIGEDWKTKSFKYQTINSNKEQVSRTVDYKDLWHLLTVATSDVYLYEFAIDKLGLDEKNAKAFSKTKLKKDFASLSLSAINKILPYLKEGLLYSHAVFVANIENIVDENIWKDEKQRDYIKTQISEIIENYTLEKSRFEIINGLLKEYKSENEDGKRVYYSKEAEQSFENDLKKKLVLFYKSNEIENKEQQETIFNELLPIFIQQLKDYEFIKIQRLDQKVLIFLKGKNETGQIFCTEEKGTAEEKEKKIKNRLKKLYHPSDIEKFKKKIIKDEFGNEKIVLGSPLTPSIKNPMAMRALHQLRKVLNALILEGQIDEKTIIHIEMARELNDANKRKGIQDYQNDNKKFREDAIKEIKKLYFEDCKKEVEPTEDDILRYQLWMEQNRSEIYEEGKNISICDIIGSNPAYDIEHTIPRSRSQDNSQMNKTLCSQRFNREVKKQSMPIELNNHLEILPRIAHWKEEADNLTREIEIISRSIKAAATKEIKDKKIRRRHYLTLKRDYLQGKYDRFIWEEPKVGFKNSQIPDTGIITKYAQAYLKSYFKKVESVKGGMVAEFRKIWGIQESFIDENGMKHYKVKDRSKHTHHTIDAITIACMTKEKYDVLAHAWTLEDQQNKKEARSIIEASKPWKTFKEDLLKIEEEILVSHYTPDNVKKQAKKIVRVRGKKQFVAEVERDVNGKAVPKKAASGKTIYKLDGEGKKLPRLQQGDTIRGSLHQDSIYGAIKNPLNTDEIKYVIRKDLESIKGSDVESIVDEVVKEKIKEAIANKVLLLSSNAQQKNKLVGTVWMNEEKRIAINKVRIYANSVKNPLHIKEHSLLSKSKHVHKQKVYGQNDENYAMAIYELDGKRDFELINIFNLAKLIKQGQGFYPLHKKKEIKGKIVFVPIEKRNKRDVVLKRGQQVVFYDKEVENPKDISEIVDFKGRIYIIEGLSIQRIVRPSGKVDEYGVIMLRYFKEARKADDIKQDNFKPDGVFKLGENKPTRKMNHNQFTAFVEGIDFKVLPSGKFEKI

SEQ ID NO: 222 - protein, 1459 aa, Flavobacterium columnare
MKFNLGLDIGTNSIGWALVNEDYENKKGKIIAAGSRIIPMTQDILDKFGSGAITETQTALRTDYRSKRKLIQRFLLRRERLHRVLNVLDFLPKHYAESIDFEKYFGKFLPNTEPKLAYNQNQFIFQNSFLEMLKEFQEKHPELLTNNKKIPYDWTIYYLRKKALNQRIEKEELAWLLLQFNQKRGYNQLRDEEEESVPNKQVEFYSLKIIDVVADQPKEGRDKRWYSINLENGWTYRRESKTPLFNWEGKTKDFIVTTDLNQDGSIKKDKEGKEKRSFRAPSEGDWTLLKKKTEKEIYESGKTLGTYIYDALLNTPDLKIKGDFIRTIDRSIYKEELQQIINKQKEYHLELNSSKLYKACLEELYPKNEIYKSALKNKDIAYLFINDILYYQRPLKAPKYNIGKCTYESRTFKKEDKKIREYIPAVAKSHPLFQEFRLWQWIKNLKIYEKLSSDNCTDFFLTNEQDFENLFEFLWNKKEIDHKGILEYLVKTKFPDLKPKQVKTKVKEYRWNYVYDHEKDESKTYPCGETYFLLKNKLDKIYNAQDDFLDKERLYNLWHIIYSVTDKKQYEKALAKFALKNHLDTKSFVNTFKRIPPFKNDYAIYSLKAIKKLLPLMRVGKYWNYDDIDPITKQKIQCIITGEENDTISTLVREKTNHFSNENDFKNLPLWLAGYIVYNSHNESSEIEKWKSPQDIDTFLKKFKQHALRNPIVEQVVTETLRVVRDIWSKKGQGKKDFFNEIHIELGKDLKNPVDKRRKLSSTNTKNESTNTRIKALLIELFTQGVENVKPNSPKHQEILKIFEEGALNSGIEIEEDIIKISNTDQPTKKQLELYILWLEHKYKSPYTGQSIPLSKLFTPNYEIEHIIPRSKYYDDNLSNKVICETEINRLKNNQLGYEFINNHEIREVTLEEGKTIRLLSPEQYWNFVTTYYAKNKAKRENLLLKELPVQMVEKQLNDTRYVSKYVMQLLSKIVRKEDGTDNGINSTNILSISGKMTRALKNDWDLNDVWNDLLLYRFERLNTITKTNLFTTYSEQKQKRMPIVPDQYAKGFHKKRLDHRHHALDAIVIACITRNHINYMNNQNIQGEKLKKNAIEKENYREILQKSRLDIRAQLCEKKYNDNDPTKYNWVFIKPWADFTENTKDILESIIPSFKQNLRIINKTVNYYEKYNENGKKVKVRQIKGDNWAIRKPLHKETISGKVHLSYKTPAKGKILTATRKVLDSSMDFKSIEKITDTGIQKILKNYLEYKKSPELAFSPEGIEELNATITKYNNGFHHKPIYKVRIYEEGVKFPLGNKGNKKSKYVEAEKGTNLFFAIYKDQENNRYFETIPFNDVLETLKKGMSAVPEKNQEENTLVFALSPQDLVFVPTLDEIENPDIVDFKNLTKDQTNRIYKMVSSSGKQCFFIKAEVATSIVNKMEFSTSNKMENSIEGIQIKSNCWKLKLDRLGTITRVIK

SEQ ID NO: 223 - protein, 1535 aa, Flavobacterium columnare
MTKILGLDLGTNSIGWAIRDTENEGINQILDKGARIFSEGVKSENGKEISRAAERTAYRSARKIKYRRKLRKYETLKVLSINGMCPLSVEEVEQWKKSGFKEYPLNPEFLDWLRTNEDKNINPYLFRDKASKQKVTLFELGRALYHIAQRRGFLSNRLDQSAEGVFEEHNPQIQNLIEDLDSSNTILNELKEYYINLGIIDETEKSGFKKDLDEGEKKLKSLYNSLVAITKKNANDIETCKQELIARLNKKEDLGKVKGKIKDISQAMLDRNFKTLGQYFFSLYNKERIRNQYTSREEHYLEEFIIICQTQGIEGINTNEKLPEKKFTGLAKDLYRAIFFQRPLKSQKGLIGKCSFEKNKSRCAVSHPDYEEFRMWSYLNTIKIGTQSEKTLRFLTLEEKLKLVPKFYRKSDFNFEVLAKELVEKGASFGYYKSSKKNEFFYWFNYKPTDSVSACVVSASLENAIGKDWKIKTFEYQTRNTEKNEVTKSVDYKDLWHLLSVATSDTYLYDFAIEKLKLEPKNAKAFSKTKLKKDFASLSLAAIAKILPYLKQGLLYSHAVFMANIENIVDADIWKDEEQQKFIQSKIVELVDNYIVEKSKLELINGLLKIYNTEDKEGRKVYYSKEAESLFEADLRKKLVPFYKANIIIEEHEQEIIFQDLFPILMDQLKKQEFIKIGRLDKQIEAFLEGENEEGQIFCNHTDKLKKLYHPSDIEVFKKKTIKDEWGNEKVVLGSPLTTSIKNPMAMRALHQLRKVLNTLIANDQIDEDTRIHIEMARELNDANKRKGIQDFQNENKKFREEAIKEIKKLYLEECHKDVNPTEDDILRYQLWLEQGKCEIYEEGNNISICDIIGSNPSYDIEHTIPRSISQDNSQMNKTLCSLKFNRSIKKQKMPVELSNYNDILPRIAHWKKEAEELTRQIETISRSIKSAATKVAKDKNIRKRHYLTLKRDYILGKYERFTWEEPKVGFKNSQIPDTGIITKYAQAYLKSYFKRVESVKGGAVAEFRKLWGIQESFIDENWWKHYKDKDRDKHTHHTIDAITIACMPKDKYDLLAHAWRLEDEQDKKAAKVLIEQAKPWKTFKEDIEKIETEILVSHFTPDNVKKQSKSIIKNRGKKVYVLKNELPVNFKNKIEGKDYFKLKFDSKILYKIPKKKEKQTDTFYEELPKNYLNGVEGKDYFKINTTGKTFYKIPIFNQGDTIRGSLHQETTYGAIKLPDIDIETKKPLHTDKGGFILKKDIKGNEIVFFVVRKEISKISENDVQNIVDNVVRKKIENAIANSLITFKIVKKKKVAVIKEGVTIWMREPNIEKGIEGIPIKKVRIITNSVKNPIEIKVHSPLSKSRHKHKQKVYGQNDENYAMALYELDGKREFELINNFNLAKLLKQSQSYYPLHKEKEIKGKKILVPIEKRNNKDVILKRGQQVVFYDKTVENPKDISEIIDFRERIYIIEGLTIQRQKDKKTSKVNEYGIIQLRHFKEARKSEEISKDNFKPDGEFKINENKPTRKMNHNQFTAFVEGIDFKVLPSGKFQKI

SEQ ID NO: 224 - protein, 1354 aa, Flavobacterium psychrophilum
  Flavobacterium psychrophilum JIP02/86
MKKILGLDLGTNSIGWAFINEAENEIEVSSIVNTGVRIVPLTTDEESDFKKGNTISINADRTLKRGARRGLQRFKQRREALLETFNRIKFIATDFVYAETGAATTFSSYQLRAKSAVEAVTKEELVKVLLMLNKKRGYKSSRKAKTAEEGDAIDGMKIAKEIFENNLTPGQWVYNSLSKGGKFIPDFYHSDLQKELEKIVRFQNQFHSEQINDKLLADIQGKSRTQTSQHFSKTLNIPLAENKGTREETKLQHYQWRNEALANELDMKILAFIITEINNQINQSSGYLGAISDRSKELYFNQETVGQYQYKQLQENVHAKLKNQVFYRQDYLDEFEKIWETQAKFHSELNEKLKAEIRDITIFYQRKLKSQKHLVSFCEFEKGHKAIPKSSPLFQEFRIWQNLNNVVVKNETTKEVFELSEELKQLIAEELQFKESMTDVQMLTFCELKKGTHTVNFKKIEGNRTNTSIYKAFEKILEVEGYEIDFSKMKPLEIKETVAPIFETLNINTVILDFDPTIQGNDFDKQPYYQLWHLLYSAEDDDKLKETLKTKFGFKENHLPFILNINLQADYGSLSAKAIKKILPHLMDGHIYDKACLMVGYNHSSSLTTAQNNDRVLKDTLELLKKNSLRNPVVEKILNQMINVINAIMKDPAMGKPDEIRVELARELKANNEQRKKATSDINTATTEHERIRKLLHSEFNIPRVTRNDIIRYKLWLETGGISLYTGNPIKASDLFSKNYDIEHIIPKSRLFDDSFSNKTLCERQLNIDKSNKTAYSFLQEKLSENDFAAYENRVKDLFKTGKIKSYTKYKKLLMADNEIPEGFIDRQLRETQYIAKKAKEILLEVSRNVTATIGSVTDKLRQDWELVDVMKELNWEKYDKLGLTHIEEGKNGERLSKIKDWTKRNDHRHHAMDAITVAFTKPAYIQYLNNLNAKTQGENKANSIIGIENKHLYRDKNNKLRFISPMKNFREEAKKQLESILISYKAKNKVVTKNKNTTKKSGGTNQKIQLTPRGRLHKETVYGKLQQYATKEEKVNASFTEDYIQKVAKKEYREALLKRLEENDNDPKKAFTGKNALNKTPIYISLKDNIIVPEKVKTVWLETDYTIRKDITPDLKIDKVIDVGIKRILQNRLNEFNGDPKKAFVNLGESPIWLNKEKGIAIKRVTISGVSNAQALHTKKDHLGNEILDKNGNPIPVDFISTGNNHHVAIYRDEKGNLQEEVVSFYDAVIRRNLGLSVINKNHEKGWEFLFSMKQNEFFIFPSDGFNPHEIDLLNPNNYHLISPNIFRVQKISTKNYMFNHHLETKAVDGEMLKSKKELSKTSYHFIQTPTNLNGIIKVRINHLGKIVHLGEY

SEQ ID NO: 225 - protein, 1458 aa, Fluviicola taffensis
MTKTILGLDLGTNSIGWALINQDFDNKKGEILGMGSRIIPMTQDIKDEFGKGNSISQTAERTRLRGVRRLIHRTLLRRERLHRVLNIIGFLPEHYANQIDFEKRFGKFKPESEPKISFDGNDVFLFEKSYQEMLVDFKIHQPQLVSNGKKIPHDWTIYYLRKKALSKKIEKEELAWILLNFNQKRGYYQLRGEEEEETPNKLVEFHSLKIVEVNADEPQKGKPEIWYSLVLENGWVYRRASKTPLFDWKDKIREFIVTTEINNDGTVKTDKEGTEKRSFRAPKPEDWTLQKKKTEFELSKSGNEVGAFIYESILQKPNQKIRGKLISTIERKFYKEELKTILKTQLFFHKELKDEKLYNACIEELYKNNEAHRSLLSNKGFEHLFINDILFYQRPLRSKKSQISNCPLEKRTYKKEGIEITEGIKVISKSNPIYQEFRLWQWISNLSLYCIEPTETNVTSTFLNSIEDYENLFEFLNNRKEIEQKHLLKYLLENQGFKGKLLTNELEKFRWNFVADKKYPCNETGSLLHTRLSKVKNISPDFLTKEIEHQLWHIIYSVTDKIEYEQALKTFARKNNLDVDSFFEHFKKIPPFESTYGAYSEKAIKKLLPLIRLGKYWNWEAIDSISKDRISKILSGEYDENIKNRVREKAVHLTSENNFQGLQEWLAKYIVYDRHSEGNDLGKWTSVSDLETYLKEFKQHSLRNPIVEQVITETLRVVKDIWIKHGKGTENFFDEIHVELGREMKNNSEDRKRLTNTITENENTNLRIKALLMEMMNDNDVENVRPYSPSQQEILKIYEDGALNSNIELDDEIVKISKKAEPTKSELQRYKLWLEQKYRSPYTGQVIPLNKLFTSEYEIEHVVPQSRFFDDSFSNKVICESAVNKRKDNQLGLQFIKNHSGEKVELGFGKVVQVFTEEQYLDFVKEHYSKNRSKHNKLLLEEIPEKMIERQLNDTRYISKFVSSILSNIVRSEKDDDGLNSKNILPGNGKITTELKRDWGLNDVWNDLILPRFERMNTITNSDLFTTYNDKYQKHLPTVPFEYSKGFQKKRIDHRHHAMDALVIACATRDHLNLMNNQSAKSELKRYDLQNKLRKKEPYFNQKENKQKEAFKDFIKPWGTFTEDSKNALEKIIISFKQNLRVINKATNSYESYKDEDGNLRIGKDGKPEKGLIKQKGLNWAIRKPLHKDTVSGQINLSRIKLPNGKILTATRKNLDTSFDLKTIENSITDTGIQKILKNYLLSKESPELAFSPEGLEEMNNEIEKYNNGKFHHPINKARIYELGSKFNVGQTGNRRDKFVEAAKGTNLFFAIYQDENKNRSYETIPLNEVIEHQKWRASLPKEEQEKIPLVPVNKLKGTFIFSLSPNDLVYVPSNDELERSASIDFSKLKKEQINRLYKMVSSSGSQCFFVKSEVATSVVNKMEYSSLNKMEKSIDNLMVKEICIKLKIDRLGNISKA

SEQ ID NO: 226 - protein, 1646 aa, Francisella tularensis
MNIKILPIAIDLGAKNTGVFSAFYQKGTSLESLDNKNGKVYELSKDSYTLLMNNRTARRHQRRGIDRKQLVKRLFKLIWTKQLNLEWNKDTQQTISFLLNRRGFSFITDGYSPEYLNIAPEAVKAILMSILDDYNGEDDLDSYLQSATENDSKIDELYNKLLQKALEFKLRKLCIDIKEDKVTTKTLKELSNTEFKLLANYLVDYDRILRTQKFSYTDKQGNLRELNYYHHDKYNIQEFLKRNIIINDVILEKLTDDLDIWNLNFDKFDFEKNLEKLENQEDKDYLQTHLHHFVFAVNKIKSEMASGGRHRSQYFQEITNVLVENNHQEGYLKNFCENLHNKKYSNLSVKNLVNLIGNLSNLELKPLRKYFNDKIHAKADYWDEQKFAETYSDWILGEWRVGAKDKDKKDGAKYSYKNLCDELKQKVGINQDGIINQTKSDFVDFLLELDPCRTIPPYLDNNNRKPPKCQSLILNPKFLDNKYPNWQQYLQELKKLQTVQNYLGNFEIDLKDLKSSKEQPYFVKYKSLNQQIASGQRDYKDLDARVLQFIFDRVKASDELLLNEIYSHAKKLKQNTSSELEKLELCKKLDEVIANSQLSQILKSQHVNGIFEQGTFLHLVCKYYKQRQRARDSRLYIMPEYRYDKKLDKYNNTGRFDDDNQLLTYCNHKPRQKRYQLLNDLAGVLQVSPNFLKDKIGSDDDLFISKWLVEHIRGFKKACEDSLKIQKDNRGLLNHKINIARNTKGKCEKEIFNLICKIEGSEDKKGNYKHGLAYELGVLLFGEPNQASKLEFDRKIKKFNSIYSFAQIQQIAFAERKGNANTCAVCSADNAHRMQQIKVAKPVEGNKDNIILSAKAQRLPAIPTRIVDGAVKKIATILARNIVDDNWDNIKQALSNNQQLHVPIITESNAFEFEPALADIKGKSLKDKRKKALERIDPENVFKDKNNRIKEFAKGISAYSDANLANGDFDGAKEELDHIIPRSHKKYGTLNDEANLICVTREDNQNRGNKAVFLYDLKPNYKLKQFNTTDDLEIEKKIADTIWDASKQDFKFGNYRSFINLTPQEQIAFRHALFLADKNPIKKAVIRAIDNRNRTFVNGTQRYFAEVLANNIYLRAKKENLATNRITFDYFGIETTNSNGRGIADVRKLYEKVDSDIQAYAKGDKPQDSYSHLIDAMIAFCVAADEHKNEGSIGLKMGNQYGLFPTPDKYDENTGEIISWHNDDIFRKIKVSDNQFSDKKLVRKKATEGFNTHRQMTRDGIYGESYLPILIHKNLNEVRKGYNWENSEEIKIFKGKKYDIQQLNNLVYCLKFVDKPISIDIQITTLEELRNILETNNISTTAEYYYINLKTQKLHEYYIENYNTALGYKKYTKEMEFLRSLAYRTERVKIKSIDDVSMILAKDSNFKAGKIELPFKTEWQRLYLEWQNTTIKDNHEFLKSYFSVKNATKQHKKVRKDFSLPISTNEGKLLVKRKTWDNNFIYQILNDSDSRADGTKPFIPAFDISKNEIVETIIKSFTSKNIFWLPKNIELQKVDNKSIFAIDTSRWFEVETPKDLIEIGVSTIQYKIDNNSRPKVRVKLDYVMDDDSKINYFMNHSLLKSRYPDKVLEILKQSTIIEFESSGFNKTIKEMLGMTLAGIYNETSNN

SEQ ID NO: 227 - protein, 1629 aa, Francisella tularensis
MNFKILPIAIDLGVKNTGVFSAFYQKGTSLERLDNKNGKVYELSKDSYTLLMNNRTARRHQRRGIDRKQLVKRLFKLIWTEQLNLEWDKDTQQAISFLFNRRGFSFITDGYSPEYLNIVPEQVKAILMDIFDDYNGEDDLDSYLKLATEQESKISEIYNKLMQKILEFKLRKLCTDIKDDKVSTKTLKEITSYEFELLADYLANYSEILKTQKFSYTDKQGNLKELSYYHHDKYNIQEFLKRHATINIQILDTLLTDDLDIWNFNFEKFDFDKNEEKLQNQEDKDHIQAHLHHFVFAVNKIKSEMASGGRHRSQYFQEITNVLDENNHQEGYLKNFCENLHNKKYSNLSVKNLVNLIGNLSNLELKPLRKYFNDKIHAKADHWDEQKFTETYCHWILGEWRVGVKDQDKKDGAKYSYKDLCNELKQKVTKAGLVDFLLELDPCRTIPPYLDNNNRKPPKCQSLILNPKFLDNQYPNWQQYLQELKKLQSIQNYLESFETDLKVLKSSKDQPYFVEYRSSNQQIASGQRDYKDLDARILQFIFDRVKASDELLLNEIYFQAKKLKQKASSELEKLESSKKLDEVIANSQLSQILKSQHTNGIFEQGTFLHLVCKYYKQRQRARDSRLYIMPEYRYDKKLHKYNNTGRFDDDNQLLTYCNHKPRQKRYQLLNDLAGVLQVSPNFLKDKIGSDDDLFISKWLVEHIRGFKKACEDSLKIQKDNRGLLNHKINIARNTKGKCEKEIFNLICKIEGSEDKKGNYKHGLAYELGVLLFGEPNEASKPEFDRKIKKFNSIYSFAQIQQIAFAERKGNANTCAVCSADNAHRMQQIKITEPVEDNKDKIILSAKAQRLPAITTRIVDGAVKKMATILAKNIVDDNWQNIKQVLSAKHQLHIPIITESNAFEFEPALADVKGKSLKDRRKKALERISPENIFKDKNNRIKEFAKGISAYSGANLTDGDFDGAKEELDHIIPRSHKKYGTLNDEANLICVTRGDNKNKGNRIFCLRDLANNYKLKQFETTDDLEIEKKIADTIWDANKKDFKFGNYRSFINLTPQEQKAFRHALFLADENPIKQAVIRAINNRNRTFVNGTQRYFAEVLANNIYLRAKKENLNTDKISFDYFGIPTIGNGRGIAEIRQLYEKVDSDIQAYAKGDKPQASYSHLIDAMLAFCIAADEHRNDGSIGLEIDKNYSLYPLDKNTGEVFTKDIFSQIKITDNEFSDKKLVRKKATEGFNTHRQMTRDGIYAENYLPILIHKELDEVRKGYTWKNSEEIKIFKGKKYDIQQLNNLLYCLKFVDKPISIDIQISTLEELRNILTTNNIAATAEYYYINLKTQKLHEYYIENYNTALGYKKYTKEMEFLRSLAYRSERVKIKSIDDVKQVLDKDSNFIIGKITLPFKKEWQRLYREWQNITIKDDYEFLKSFFNVKSITKLHKKVRKDFSLPISTNEGKFLVKRKTWDNNFIYQILNDSDSRVDGTKPFIPAFDISKNEIVEAIIDSFTSKNIFWLPKNIELQKVDNKNIFAIDTSKWFEVETPSDLRDIGVATIQYKIDNNSRPKVRVKLDYVIDDDSKINYFTNHSLLKSRYPDKVLEILKQSTIIEFESSGFNKTIKEMLGMTLAGIYNETSNN

SEQ ID NO: 228 - protein, 1629 aa, Francisella novicida
  Francisella novicida FTG
MNFKILPIAIDLGVKNTGVFSAFYQKGTSLERLDNKNGKVYELSKDSYTLLMNNRTARRHQRRGIDRKQLVKRLFKLIWTEQLNLEWDKDTQQAISFLFNRRGFSFITDGYSPEYLNIVPEQVKAILMDIFDDYNGEDDLDSYLKLATEQESKISEIYNKLMQKILEFKLMKLCTDIKDDKVSTKTLKEITSYEFELLADYLANYSESLKTQKFSYTDKQGNLKELSYYHHDKYNIQEFLKRHATINDRILDTLLTDDLDIWNFNFEKFDFDKNEEKLQNQEDKDHIQAHLHHFVFAVNKIKSEMASGGRHRSQYFQEITNVLDENNHQEGYLKNFCENLHNKKYSNLSVKNLVNLIGNLSNLELKPLRKYFNDKIHAKADHWDEQKFTETYCHWILGEWRVGVKDQDKKDGAKYSYKDLCNELKQKVTKAGLVDFLLELDPCRTIPPYLDNNNRKPPKCQSLILNPKFLDNQYPNWQQYLQELKKLQSIQNYLDSFETDLKVLKSSKDQPYFVEYKSSNQQIASGQRDYKDLDARILQFIFDRVKASDELLLNEIYFQAKKLKQKASSELEKLESSKKLDEVIANSQLSQILKSQHTNGIFEQGTFLHLVCKYYKQRQRARDSRLYIMPEYRYDKKLHKYNNTGRFDDDNQLLTYCNHKPRQKRYQLLNDLAGVLQVSPNFLKDKIGSDDDLFISKWLVEHIRGFKKACEDSLKIQKDNRGLLNHKINIARNTKGKCEKEIFNLICKIEGSEDKKGNYKHGLAYELGVLLFGEPNEASKPEFDRKIKKFNSIYSFAQIQQIAFAERKGNANTCAVCSADNAHRMQQIKITEPVEDNKDKIILSAKAQRLPAIPTRIVDGAVKKMATILAKNIVDDNWQNIKQVLSAKHQLHIPIITESNAFEFEPALADVKGKSLKDRRKKALERISPENIFKDKNNRIKEFAKGISAYSGANLTDGDFDGAKEELDHIIPRSHKKYGTLNDEANLICVTRGDNKNKGNRIFCLRDLADNYKLKQFETTDDLEIEKKIADTIWDANKKDFKFGNYRSFINLTPQEQKAFRHALFLADENPIKQAVIRAINNRNRTFVNGTQRYFAEVLANNIYLRAKKENLNTDKISFDYFGIPTIGNGRGIAEIRQLYEKVDSDIQAYAKGDKPQASYSHLIDAMLAFCIAADEHRNDGSIGLEIDKNYSLYPLDKNTGEVFTKDIFSQIKITDNEFSDKKLVRKKAIEGFNTHRQMTRDGIYAENYLPILIHKELNEVRKGYTWKNSEEIKIFKGKKYDIQQLNNLVYCLKFVDKPISIDIQISTLEELRNILTTNNIAATAEYYYINLKTQKLHEYYIENYNTALGYKKYSKEMEFLRSLAYRSERVKIKSIDDVKQVLDKDSNFIIGKITLPFKKEWQRLYREWQNTTIKDDYEFLKSFFNVKSITKLHKKVRKDFSLPISTNEGKFLVKRKTWDNNFIYQILNDSDSRVDGTKPFIPAFDISKNEIVEAIIDSFTSKNIFWLPKNIELQKVDNKNIFAIDTSKWFEVETPSDLRDIGVATIQYKIDNNSRPKVRVKLDYVIDDDSKINYFTNHSLLKSRYPDKVLEILKQSTTIEFESSGFNKTIKEMLGMTLAGIYNETSNN

SEQ ID NO: 229 - protein, 1629 aa, Francisella novicida
  Francisella novicida GA99-3548
MNFKILPIAIDLGVKNTGVFSAFYQKGTSLERLDNKNGKVYELSKDSYTLLMNNRTARRHQRRGIDRKQLVKKLFKLIWTEQLNLEWDKDTQQAISFLFNRRGFSFITDGYSPEYLNIVPEQVKAILMDIFDDYNGEDDLDSYLKLATEQESKISEIYNKLMQKILEFKLRKLCTDIKDDKVSTKTLKEITSYEFELLADYLANYSESLKTQKFSYTDKQGNLKELSYYHHDKYNIQEFLKRHATINDEILDTLLTDDLDIWNFNFEKFDFDKNEEKLQNQEDKDHTQAHLHHFVFAVNKIKSEMASGGRHRGQYFQEITNVLDENNHQEGYLKNFCENLHNKKYSNLSVKNLVNLIGNLSNLELKPLRKYFNDKIHAKADHWDEQKFTETYCHWILGEWRVGLKDQDKKEGAKYSYKDLCNELKQKVTNAGLIDFLLELDPCRTIPPYLDNNNRKPPKCQSLILNPKFLDNQYPNWQQYLQELKKLQIIQDYLESFETDLKVLKSSKDQPYFVEYKSSNQQIASGQRDYKDLDARILQFIFDRVKASDELLLNEIYFQAKKLKQKASSELEKLESSKKLDEVIANSQLSKILKSQHTNGIFEQGTFLHLVCKYYKQRQRARDSRLYIMPEYRYDKKLDKYNNTGRFDDDNQLLTYCNHKPRQKRYQLLNDLAGVLQVSPNFLKDKIGSDDDLFISKWLVEHIRGFKKACEDSLKIQKDNRGLLNHKINIARNTKGKCEKEIFNLICKIEGSEDKKGNYKHGLAYELGVLLFGEPNEASKPEFDRKIKKFNSIYSFAQIQQIAFAERKGNANTCAVCSADNAHRMQQIKITEPVEDNKDKIILSAKAQRLPAIPTRIVDGAVKKMATILAKNIVDDNWQNIKQVLSAKHQLHIPIITESNAFEFEPALADVKGKSLKDRRKKALERISPENIFKDKNNRIKEFAKGISAYSGANLTDGDFDGAKEELDHIIPRSHKKYGTLNDEANLICVTRDDNKNKGNRIFCLHDLANNYKLKQFETTDDLEIEKKIADTIWDASKKDFKFGNYRSFINLTPQEQKAFRHALFLADENPIKQAVIRAINNRNRTFVNGTQRYFAEVLANNIYLRAKKENLNTDKISFDYFGIPTIGNGRGIAEIRQLYEKVDSDIQVYAKGDKPQASYSHLIDAMLAFCIAADEHRNDGSIGLEIDKNYSLYPLDKNTGEVFTKDIFSQIKITDNEFSDKKLVRKKATEGFNTHRQMTRDGIYAENYLPILIHKELDEVRKGYTWKNSEEIKIFKGKKYDIQQLNNLLYCLKFVDKPISIDIQISTLEELRNILTTNNIAATAEYYYINLKTQKLHEYYIENYNTALGYKKYTKEMEFLRSLAYRSERVKIKSIDDVKQVLDKDSNFIIGKITLPFKKEWQRLYREWQNTTIKDDYEFLKSFFNVKSITKLHKKVRKDFSLPISTNEGKFLVKRKTWDNNFIYQILNDSDSRVDGTKPFIPAFDISKNEIVEAIIDSFTSKNIFWLPKNIELQKVDNKNIFAIDTSKWFEVETPSDLRDIGVATIQYKIDNNSRPKVRVKLDYVIDDDSKINYFTNHSLLKSRYPDKVLEILKQSTIIEFESSGFNKTIKEMLGMTLAGIYNETSNN

SEQ ID NO: 230 - protein, 1629 aa, Francisella tularensis; identical to SEQ ID NO: 30

SEQ ID NO: 231 - protein, 1629 aa, Francisella novicida
  Francisella novicida GA99-3549
MNVKILPIAIDLGVKNTGVFSAFYQKGTSLERLDNKNGKVYELSKDSYTLLMNNRTARRHQRRGIDRKQLVKRLFKLIWTEQLNLEWDKDTQQAISFLFNRRGFSFITDGYSPEYLNIVPEQVKAILMDIFDDYNGEDDLDSYLKLATEQESKISEIYNKLMQKILEFKLRKLCTDIKDDKVSTKTLKEITSYEFELLADYLANYSEILKTQKFSYTDKQGNLKELSYYHHDKYNIQEFLKRHATINDEILDTLLTDDLDIWNFNFEKFDFDKNEEKLQNQEDKDHTQAHLHHFVFAVNKIKSEMASGGRHRGQYFQEITNVLDENNHQEGYLKNFCENLHNKKYSNLSVKNLVNLIGNLSNLELKPLRKYFNDKIHAKADHWDEQKFTETYCHWILGEWRVGVKDQDKKDGAKYSYKDLCNELKQKVTKAGLVDFLLELDPCRTIPPYLDNNNRKPPKCQSLILNPKFLDNQYPNWQQYLQELKKLQSIQNYLESFETDLKVLKSSKDQPYFVEYKSSNQQIASGQRDYKDLDARILQFIFDRVKASDELLLNEIYFQAKKLKQKASSELEKLESSKKLDEVIANSQLSQILKSQHTNGIFEQGTFLHLVCKYYKQRQRARDSRLYIMPEYRYDKKLDKYNNTGRFDDDNQLLTYCNHKPRQKRYQLLNDLAGVLQVSPNFLKDKIGSDDDLFISKWLVEHIRGFKKACEDSLKIQKDNRGLLNHKINIARNTKGKCEKEIFNLICKIEGSEDKKGNYKHGLAYELGVLLFGEPNEASKPEFDRKIKKFNSIYSFAQIQQIAFAERKGNANTCAVCSADNAHRMQQIKITEPVEDNKDKIILSAKAQRLPAIPTRIVDGAVKKMATILAKNIVDDNWQNIKQVLSAKHQLHIPIITESNAFEFEPALADVKGKSIKDRRKKALERISPENIFKDKNNRIKEFAKGISAYSGDNLASGDFDGAKEELDHIIPRSHKKYGTLNDEANLICVTRDDNKNKGNRIFCLHDLANNYKLKQFETTDDLEIEKKIADTIWDASKKDFKFGNYRSFINLTPQEQKAFRHALFLADENPIKQAVIRAINNRNRTFVNGTQRYFAEVLANNIYLRAKKENLNTDKISFDYFGIPTIGNGRGIVEIRQLYEKVDSDIQAYAKGDKPQASYSHLIDAMLAFCIAADEHRNDGSIGLEIDKNYSLYPLDKNTGEVFTKDIFSQIKITNNEFSDKKLVRKKATEGFNTHRQMTRDGIYAENYLPILIHKELDEVRKGYTWGNSEELKIHKGKKYDIQQLNNLVYCLKFIDKSISIDIQISTLEELRNILTTNNIATTAEYYYINLKTQKLHEYYIENYNTALGYKKYTKEMEFLRSLAYRSERVKIKSIDDVKQVLDKDSNFIIGKITLPFKKEWQRLYREWQNTTIKDDYEFLKSFFNVKSITKLHKKVRKDFSLPISTNEGKFLVKRKTWDNNFIYQILNDSDSRVDGTKPFIPAFDISKNEIVEAIIDSFTSKNIFWLPKNIELQKVDNKNIFAIDTSKWFEVETPSDLRDIGVATIQYKIDNNSRPKVRVKLDYVIDDDSKINYFTNHSLLKSRYPDKVLEILKQSTIIEFESSGFNKTIKEMLGMTLAGIYNETSNN

SEQ ID NO: 232 - protein, 1323 aa, Fructobacillus fructosus
  Fructobacillus fructosus KCTC 3544
MVYDVGLDIGTGSVGWVALDENGKLARAKGKNLVGVRLFDTAQTAADRRGFRTTRRRLSRRKWRLRLLDELFSAEINEIDSSFFQRLKYSYVHPKDEENKAHYYGGYLFPTEEETKKFHRSYPTIYHLRQELMAQPNKRFDIREIYLAIHHLVKYRGHFLSSQEKITIGSTYNPEDLANAIEVYADEKGLSWELNNPEQLTEIISGEAGYGLNKSMKADEALKLFEFDNNQDKVAIKTLLAGLTGNQIDFAKLFGKDISDKDEAKLWKLKLDDEALEEKSQTILSQLTDEEIELFHAVVQAYDGFVLIGLLNGADSVSAAMVQLYDQHREDRKLLKSLAQKAGLKHKRFSEIYEQLALATDEATIKNGISTARELVEESNLSKEVKEDTLRRLDENEFLPKQRTKANSVIPHQLHLAELQKILQNQGQYYPFLLDTFEKEDGQDNKIEELLRFRIPYYVGPLVTKKDVEHAGGDADNHWVERNEGFEKSRVTPWNFDKVFNRDKAARDFIERLTGNDTYLIGEKTLPQNSLRYQLFTVLNELNNVRVNGKKFDSKTKADLINDLFKARKTVSLSALKDYLKAQGKGDVTITGLADESKFNSSLSSYNDLKKTFDAEYLENEDNQETLEKIIEIQTVFEDSKIASRELSKLPLDDDQVKKLSQTHYTGWGRLSEKLLDSKIIDERGQKVSILDKLKSTSQNFMSIINNDKYGVQAWITEQNTGSSKLTFDEKVNELTTSPANKRGIKQSFAVLNDIKKAMKEEPRRVYLEFAREDQTSVRSVPRYNQLKEKYQSKSLSEEAKVLKKTLDGNKNKMSDDRYFLYFQQQGKDMYTGRPINFERLSQDYDIDHIIPQAFTKDDSLDNRVLVSRPENARKSDSFAYTDEVQKQDGSLWTSLLKSGFINRKKYERLTKAGKYLDGQKTGFIARQLVETRQIIKNVASLIEGEYENSKAVAIRSEITADMRLLVGIKKHREINSFHHAFDALLITAAGQYMQNRYPDRDSTNVYNEFDRYTNDYLKNLRQLSSRDEVRRLKSFGFVVGTMRKGNEDWSEENTSYLRKVMMFKNILTTKKTEKDRGPLNKETIFSPKSGKKLIPLNSKRSDTALYGGYSNVYSAYMTLVRANGKNLLIKIPISIANQIEVGNLKINDYIVNNPAIKKFEKILISKLPLGQLVNEDGNLIYLASNEYRHNAKQLWLSTTDADKIASISENSSDEELLEAYDILTSENVKNRFPFFKKDIDKLSQVRDEFLDSDKRIAVIQTILRGLQIDAAYQAPVKIISKKVSDWHKLQQSGGIKLSDNSEMIYQSATGIFETRVKISDLL

SEQ ID NO: 233 - protein, 1374 aa, Fusobacterium nucleatum
  Fusobacterium nucleatum subsp. vincentii ATCC 49256
MKKQKFSDYYLGFDIGTNSVGWCVTDLDYNVLRFNKKDMWGSRLFDEAKTAAERRVQRNSRRRLKRRKWRLNLLEEIFSDEIMKIDSNFFRRLKESSLWLEDKNSKEKFTLFNDDNYKDYDFYKQYPTIFHLRDELIKNPEKKDIRLIYLALHSIFKSRGHFLFEGQNLKEIKNFETLYNNLISFLEDNGINKSIDKDNIEKLEKIICDSGKGLKDKEKEFKGIFNSDKQLVAIFKLSVGSSVSLNDLFDTDEYKKEEVEKEKISFREQIYEDDKPIYYSILGEKIELLDIAKSFYDFMVLNNILSDSNYISEAKVKLYEEHKKDLKNLKYIIRKYNKENYDKLFKDKNENNYPAYIGLNKEKDKKEVVEKSRLKIDDLIKVIKGYLPKPERIEEKDKTIFNEILNKIELKTILPKQRISDNGTLPYQIHEVELEKILENQSKYYDFLNYEENGVSTKDKLLKTFKFRIPYYVGPLNSYHKDKGGNSWIVRKEEGKILPWNFEQKVDIEKSAEEFIKRMTNKCTYLNGEDVIPKDSFLYSEYIILNELNKVQVNDEFLNEENKRKIIDELFKENKKVSEKKFKEYLLVNQIANRTVELKGIKDSFNSNYVSYIKFKDIFGEKLNLDIYKEISEKSILWKCLYGDDKKIFEKKIKNEYGDILNKDEIKKINSFKFNTWGRLSEKLLTGIEFINLETGECYSSVMEALRRTNYNLMELLSSKFTLQESIDNENKEMNEVSYRDLIEESYVSPSLKRAILQTLKIYEEIKKITGRVPKKVFIEMARGGDESMKNKKIPARQEQLKKLYDSCGNDIANFSIDIKEMKNSLSSYDNNSLRQKKLYLYYLQFGKCMYTGREIDLDRLLQNNDTYDIDHIYPRSKVIKDDSFDNLVLVLKNENAEKSNEYPVKKEIQEKMKSFWRFLKEKNFISDEKYKRLTGKDDFELRGFMARQLVNVRQTTKEVGKILQQIEPEIKIVYSKAEIASSFREMFDFIKVRELNDTHHAKDAYLNIVAGNVYNTKFTEKPYRYLQEIKENYDVKKIYNYDIKNAWDKENSLEIVKKNMEKNTVNITRFIKEEKGELFNLNPIKKGETSNEIISIKPKLYDGKDNKLNEKYGYYTSLKAAYFIYVEHEKKNKKVKTFERITRIDSTLIKNEKNLIKYLVSQKKLLNPKIIKKIYKEQTLIIDSYPYTFTGVDSNKKVELKNKKQLYLEKKYEQILKNALKFVEDNQGETEENYKFIYLKKRNNNEKNETIDAVKERYNIEFNEMYDKFLEKLSSKDYKNYINNKLYTNFLNSKEKFKKLKLWEKSLILREFLKIFNKNTYGKYEIKDSQTKEKLFSFPEDTGRIRLGQSSLGNNKELLEESVTGLFVKKIKL

SEQ ID NO: 234 - protein, 1367 aa, Fusobacterium sp.
  Fusobacterium sp. 1_1_41FAA
MKKQQFSDYYLGFDIGTNSVGWCVTDFNYNVLRFNKKDMWGSRLFDEAKTAAERRVQRNSRRRLKRRKWRLNLLEEIFSDEILKIDSNFFRRLKESSLWLEDKSSKEKFTLFNDDNYKDYDFYKQYPTIFHLRNELIKNPEKKDIRLVYLALHSIFKSRGHFLFEGQNLKDIKNFETLYNNLMAFLEDNDIYKNIDSSYIGNLENIICDSKKGLKDKEKEFKEIFNSDKQLVGFFKLSVGSSVSLNDLFDTDEYKKGEVEKEKISFREQIYEDDKPIYYSILGEKIEFLDIAKSFYDFMVLNNILADSQYISEAKVKLYDEHKRDLKNLKYIIRKYNKENYDKLFKDKNESNYSAYIGLNKEKGKKEVIEKSRLKIDDFAKIIKGYLPKAEKIDEKDRSIFNEILDKIELKTILPKQRISDNGTLPYQIHEAELEKILENQAKYYDFLNHEENGISTKDKLLMTFKFRIPYYVGPLNSYHKNKGGNSWIVRKEEGKILPWNFEQKVDIEKSAEEFIKRMTNKCTYLNGEDVIPKDSFLYSEYIILNELNKVQVNDEFLNKEIKKKIIEDLFKKSKKISEKNFREYLLVNQITNKTVELKGVKDAFNSNYVSYIKFKDIFGDKLNLDIYKEISEKSILWKCLYGDDKKIFEKKIKSVYGDILTKDEIKKINSFKFNTWGRLSEKLLTEIEFIDLETGECYSSVMDALRRTNYNLMELLSSKFTLQENIDNENKEVSEFSYRDLVEESYVSPSLKRAILQTLKIYEEIRKITGRIPKKVFIEMARGGDETMKNKKIPARQEQLKKLYDSCGKDISNFSIDIKEMKNSLNSYDNNSLRQKKLYLYYLQFGKCMYTGKEIDLNRLLQNNDTYDIDHIYPRSKVIKDDSFDNLVLVLKNENAEKSNEYPLKKEIQEKMKSFWKFLKEKNFISDEKYKRLTGKDEFELRGFMARQLVNVRQTTKEAGKILQQIEPEIKIVYSKAEIASSFREMFDFIKVRELNDTHHAKDAYLNIVAGNVYNTKFTEKPYRYLQEIKENYDVKKIYNYDIKNAWDKEKSLEIVKKNMEKNTVNITRFIKEEKGQLFDLNPIRKGETSNEIIAIKPKFYEGSTEKLNEKYGYYKSLNPAYFIYVEHKEKNKIIRSFERVNLVDVNKIKDEKSLIKYLIENKGLIEPKVIKKVYKRQVILINNFPYSIVALDSNKLMDFENLKPLFLERKYEKILKNAIKFLEDNQGKTEEYYKFLYLKKKDRNEKNETIDSVKERYNIEFNEMYDKFLEKLDSKDYKNYINNKKYSELVNVKEKFIKLNLFDKAFTLKSFLDLFNRKTMADFSKVGLTKYLGKIQKISSNVLSKNELHLLEESVTGLFVKKIKL

SEQ ID NO: 235 - protein, 1367 aa, Fusobacterium sp.
  Fusobacterium sp. 3_1_27
MKKQKFSDYYLGFDIGTNSVGWCVTDLDYNVLRFNKKDMWGSRLFDEAKTAAERRVQRNSRRRLKRRKWRLNLLEEIFSDEIMKIDSNFFRRLKESSLWLEDKNSKEKFTLFNDDNYKDYDFYKQYPTIFHLRDELIKNPEKKDIRLIYLALHSIFKSRGHFLFEGQNLKEIKNFETLYNNLISFLEDNGINKSIDKDNIKKLEKIICDSGKGLKDKEKEFKEIFNSDKQLVAIFKLSVGSSVSLNDLFDTDEYKKEEVEKEKISFREQIYEDDKPIYYSILGEKIELLDIAKSFYDFMVLNNILSDSNYISEAKVKLYEEHKKDLKNLKYIIRKYNKENYDKLFKDKNENNYPAYIGLNKEKGKKEVVEKSGLKIDDLIKVIKGYLPKPERIEEKDKIIFNEILNKIELKTILPKQRISDNGTLPYQIHEVELEKILENQSKYYDFLNYEENGVSTKDKLLKTFKFRIPYYVGPLNSYHKDKGGNSWIVRKEEGKILPWNFEQKVDIEKSAEEFIKRMTNKCTYLNGEDVIPKDSFLYSEYIILNELNKVQVNDEFLNEENKRKIIDELFKENKKVSEKKFKEYLLVNQIANRTVELKGIKDSFNSNYVSYIKFKDIFGEKLNLDIYKEISEKSILWKCLYGDDKKIFEKKIKNEYGDILNKDEIKKINSFKFNTWGRLSEKLLTGIEFINLETGECYSSVMEALRRTNYNLMELLSSKFTLQESIDNGNKEMNEVSYRDLIEESYVSPSLKRAILQTLKIYEEIKKITGRVPKKVFIEMARGGDETMKNKKIPARQEQLKKLYDSCGNDIANFSIDIKKMKSSLSSYDNNSLRQKKLYLYYLQFGKCMYTGREIDLDRLLQNNDTYDIDHIYPRSKVIKDDSFDNLVLVLKNENAEKSNEYPVKKEIQEKMKSFWRFLKEKNFISDEKYKRLTGKDDFELRGFMARQLVNVRQTTKEVGKILQQIEPEIKIVYSKAEIASSFREMFDFIKVRELNDTHHAKDAYLNIVAGNVYNTKFTEKPYRYLQEIKENYDVKKIYNYDIKNAWDKENSLEIVKKNMKKNTVNITRFIKEEKGQLFDLNPIKKGETSNEIISIKPKLYNGKEEKLNEKYGYYKSLNPAYFLYVEHKEKNKRIKSFERVNLVDVNNIKDEKSLVKYLIENKKLVEPRLIKKVYKRQVILINDYPYSIVALDSNKLMDFENLKPLFLENKYEKILKNVIKFLEDNQGKSEENYKFIYLKKKDRYEKNETLESVKDRYNLEFNEMYDKFLEKLDSKDYKNYINNKKYKNLLDVKEKFIKLNLFDKAFTLKSFLDLFNRKTMADFSKVGLTKYLGKIQKISSNVLSKNELYLLEESVTGLFVKKIKL

SEQ ID NO: 236 - protein, 1367 aa, Fusobacterium sp.
  Fusobacterium sp. 3_1_36A2
MKKQKFSDYYLGFDIGTNSVGWCVTDLDYNVLRFNKKDMWGSRLFDEAKTAAERRVQRNSRRRLKRRKWRLNLLEEIFSDEIMKIDSNFFRRLKESSLWLEDKNSKEKFTLFNDDNYKDYDFYKQYPTIFHLRDELIKNPEKKDIRLIYLALHSIFKSRGHFLFEGQNLKEIKNFETLYNNLISFLEDNGINKSIDKDNIKKLEKIICDSGKGLKDKEKEFKEIFNSDKQLVAIFKLSVGSSVSLNDLFDTDEYKKEEVEKEKISFREQIYEDDKPIYYSILGEKIELLDIAKSFYDFMVLNNILSDSNYISEAKVKLYEEHKKDLKNLKYIIRKYNKENYDKLFKDKNENNYPAYIGLNKEKGKKEVVEKSGLKIDDLIKVIKGYLPKPERIEEKDKTIFNEILNKIELKTILPKQRISDNGTLPYQIHEVELEKILENQSKYYDFLNYEENGVSTKDKLLKTFKFRIPYYVGPLNSYHKDKGGNSWIVRKEEGKILPWNFEQKVDIEKSAEEFIKRMTNKCTYLNGEDVIPKDSFLYSEYIILNELNKVQVNDEFLNEENKRKIIDELFKENKKVSEKKFKEYLLVNQIANRTVELKGIKDSFNSNYVSYIKFKDIFGEKLNLDIYKEISEKSILWKCLYGDDKKIFEKKIKNEYGDILNKDEIKKINSFKFNTWGRLSEKLLTGIEFINLETGECYSSVMEALRRTNYNLMELLSSKFTLQESIDNGNKEMNEVSYRDLIEESYVSPSLKRAILQTLKIYEEIKKITGRVPKKVFIEMARGGDETMKNKKIPARQEQLKKLYDSCGNDIANFSIDIKKMKSSLSSYDNNSLRQKKLYLYYLQFGKCMYTGREIDLDRLLQNNDTYDIDHIYPRSKVIKDDSFDNLVLVLKNENAEKSNEYPVKKEIQEKMKSFWRFLKEKNFISDEKYKRLTGKDDFELRGFMARQLVNVRQTTKEVGKILQQIEPEIKIVYSKAEIASSFREMFDFIKVRELNDTHHAKDAYLNIVAGNVYNTKFTEKPYRYLQEIKENYDVKKIYNYDIKNAWDKENSLEIVKKNMKKNTVNITRFIKEEKGQLFDLNPIKKGETSNEIISIKPKLYNGKEEKLNEKYGYYKSLNPAYFLYVEHKEKNKRIKSFERVNLVDVNNIKDEKSLVKYLIENKKLVEPRLIKKVYKRQVILINDYPYSIVALDSNKLMDFENLKPLFLENKYEKILKNVIKFLEDNQGKSEENYKFIYLKKKDRYEKNETLESVKDRYNLEFNEMYDKFLEKLDSKDYKNYINNKKYKNLLDVKEKFIKLNLFDKAFTLKSFLDLFNRKTMADFSKVGLTKYLGKIQKISSNVLSKNELYLLEESVTGLFVKKIKL

SEQ ID NO: 237 - protein, 1391 aa, Galbibacter sp.
  Galbibacter sp. ck-I2-15
MKTILGLDLGTNSIGWALVKEAENENEVSDIIKLGVRVNPLTVDELTNFEGGKAYSNNAERTLKRGARRNLQRYKLRRENLIEILLKNGLINKDTALTEVGKETTHQTLKLRSKSANEKVSLEDLAKILLSINKKRGYKSSRKVNAEDDGVAIDGMEVAKLLYDENMTPGEYVLRLLESGKKHLPDFYRSDLQEEFNLVWKKQSEFYPLILTKELFFELHGKNKSQTWAICKEPLGIVGVKLKGSAKEQKFARYRLRKEALTQQIELEHLAIVLQDINNDSNKSSGYLGAISDRSKELFFNKETVGQYQYKQLQKDPNTSLKNQVFYRQDYLDEFEVIWRNQAKFYPQLTNELKQEIRDVVIFYQRKLKSQKNLISFCQFESTQQNYVEKETGKTKIRTIGRRVIPRSSPLFQEFKIWQSLNNLKFVNSESNQIIQFIELEDDVKKVVFDELNLRGDLKPNQVLKILSKYMKIGKLTQWKCNLEEIEGNRTNSALYNVFQMIAEEEGYGFNWGKKSALEIKSELKAIFSSIGINDSILDFDFSKKLDQQLSYQLWHLLYSAEEGNSKITEEDKFTYGNTGVALKKKLHLKFGFKPEYSTLISNLRFTSDYGNLSSKAISKILPFLRDGSDYSKACQYAGYNHSNSLSADELDNRELKPKLELLKKNSLRNPVVEKILNQMVNVVNQVIDNYGKPDEVRIELARELKKSAKERSQMTKNISDATRRNAEIKKYLSKEFGIPNPTKGDVIRYRLWEELASNGYKDLFRDKYIPKEKLFSNEIDIEHIIPKALLFDDSFSNKTLAFKVDNLKKADRTAFDFMSTDFSKDVDSYIGRIETLHKDGKISSSKYKKLMIPKSKLVDGFIERDLRNTQYIAKQARKMLLEVFKTVVPTTGKITDKLREDWDLINVMKELNFPKYKALGLTKKIERFDVGSEKIKSINVIEGWSKRNDHRHHAMDALAVAFTTHNHIQYLNYLNARKDIHHEMHGTIKSIENQIIGKDVMGKRRFIPPISDLRMKAKLQIESILISFKNKNKVVTWSVNKTKLKGKDNYNKRRQLTPRGQLHKETVYGKIKLIDPKPLKLNNKFTLVRASMIVDKVHREIVLQHLSKYDNNSEVAFDSKTIKIDPILIEGIGLKEVVCYEDVFKIRKKISGDNFKNEKHLEKVIDEKVKQILKDRVIKFQGNFKEAFSNLEENPIWLNKSKGIAVKSVAIKGVNNAESLHEGKDHFGDQILDKNKKQIPVDFVSTGNNHHVGIYEDKDGNLQERVVSFFEAVTRVNEGLPIIDKTYNSDIGWKFKFTMKQNEMFVFPSDDFDPNEFDLTDGKNAAKISPNLYRVQKIATKNYMFRHHLETVVTNDLEFTYKSIRSTGWLRNLVKVRINHLGEIVYVGEY

SEQ ID NO: 238 - protein, 1025 aa, Unknown
  Description of Unknown: gamma proteobacterium HdN1 polypeptide
MGGYMPQLMRYRLALDIGSTSIGWAMIRLSMQNEPIAIIRMGVRIFSDGRNPKDGSSLAVTRRVARQMRRRRDRLLKRKTRLLNALVQKKFFPEDADARKALVVLNPYELRKEGLYRQLSGPEFGRALFHISQRRGFLSNRKTDKKDNDSSVLKKAIVDLRQQLEVENCQTIGEWLFKQQQSGKSVRARLRGKTQKDKAYDFYIDRAMIAHEFDTLWVSQAKYDPLLFNEDARAILRDILLYQRPLKPVKPGRCTLIPDESRAPLALPLTQQARIYQELNHLRITTPALGAQALTVAQRNTIAALLEKSDVTFVKIAKALGLTSTTEFNLQDIKRDRLKGNATAIILARNQYFGRRWHDFNADLQNLIVDKLVNEGSETALIEWLKANTDVDESAAERVSGVTLPEGYGSLSVAALRRLLPALKEDVVVYSEAVKRAGFDSHSALSLIEQTGELYQELPYYGEVLQRHVGFGSGDPNDSPERRFGKIANPTVHIGLNELRKIINALIKRYGNPAEVVVELARDLKLSREKRKEIQEEQKQRQDRNEKRIKDACEILGIDPLVIDRGKRREISQKMQLWDELNPKDAANRRCPYTGDQISIEKLLSAEVEIEHILPFSKTLDDSLNNKTVAMRRANRDKGNRTPYEAFGESLNPDYDYDAILQRASLMPREKRKRFASDGYQQWLRDDKDFLSRALNDTAYLSRIAKEYLTLICPPNSVRAIPGRMTAQLRAMFGLNRLLSEGGIKNREDHRHHAIDAAVIGVTDQGLLQKFSRASARTRELQLSRLVDDMPLPWDTYREHVTRALEHLVVSHKPDHGYQGKMHEDTAWGLRDNGQVTRRVRSEDGGPRQRLLENKNVVKINSTRDFSRHGIDEQGQVNAYKGYVGGSNYCIEIWIDEKGKWNSDVVSTFQAYQIVRELGEKAAWQKLRNPLLSLSAKPLVMRLIIDDVVKMQIAGQNKIMRVVKIAQNGQIFFAEHNEANVDARDKDKNNPFKYISKTAGSLQKAGGIHMAISPIGDARPVRYGR

SEQ ID NO: 239 - protein, 1397 aa, Unknown
  Description of Unknown: gamma proteobacterium HTCC5015 polypeptide
MTKNYISPIAIDLGAKFTGVALYQYLEGADCTQEVAKGLLVDDRGNVTWSQEGRRGKRHQVRGYKRRKMAKRLLWLILDSEYGIKREEVTEPLLKFINGLLNRRGYTYISEEVDEESMNVSPLPFSEMMPDYFNSSAPLLEQLAKLLSDKNKLVRFRAEGKIPSNKNEFKKLLDTALDGKYKDEKKELSEAWGNILIASENVLKSTVDGHKSRSEYLANIKEDIKSNEELEKQISSKEIDGFYNLVGHLSNFQLRLLRKYFNDPNMSGVSYWDEKRLEKYFYQWVQGWHTKGGTDEAEKKNIILKTKGAPLLKTLKSLSADLTIPPYEDQNNRRPPKCQSVLLSDEKLTMHYPKWKEWVGQLVKQNDNAYLNENVTLANALHRIVERSRSIDPYQLRLLISITDAEKRNDLAGYKRLKLSLGSEVDEFLLLVKNIVDETKEAREGLWFETENKLFFKCGKTPPRKEKLKSTLLSAVLGKNLSDDEQSSFIEEFWKSGTPKIERRNVRGWCRLASQVQKTYGVYLKEYGLQQLHKLEAGKKLDDKPLALLYKNSGLIASKIGEALNIEPDEVSRFASPHSLAQIFNIIEGDVAGFNKTCRACTYENIWRMQEEKVESLLTNQLLSEIHGERKVPLKSAMCTRLSADSTRPFDGQMASIIEHIARKIAQHKIAQINDVPKEFSIDIPIIIESNQFSFTAELEEIKRGRGSAKAKKAKELGEKSKAGWVSKTERIKTSSEGICPYTGAPLGGSGEIDHIIPRSLTGRTKKTVFNSEANLIYCSSKGNHDKGNRVYVIEQLNDKYLKKQFSTSDVNLIKKKIKTTIQRFTEGGEKLRSFSELSREDQKAFRHALFVPELKSEVTSLLAVKNITRVNGTQAWLAKKIASLLAEHLDKQGRDYTLSAHQIDPWSVSKQRKMLASAEPIWAKKDPQPAASHVVDAVCTFLEALEQPHTASRLKTISSTSFEKTGWRSALIPDLIKVDALDRRPKYRRYNIGSTSLFKDGIYAERFLPILIDENGLMAGYDIDNSLKAKGADVVFESLSPFLLFKGEEVGAQSLSDWQERIDGRYLYMSIDKVKAFDYLQEKVGEKDIAAELLNSIHFTQRKTELRAKFSDDSGKKMKTLDAIRKSLKLTVTVNEIGKRKEKCGFSGTIGIPAKSAWENLLDEPLLETYWGTKMPPQEIWEKVYRKHFPRNIPNQAHRKVRKDFSLPVVDSVSGGFRVKRKTPNGYNYQLLAIDGYSAVGFKKEGDNVDFKSPALVPQIAESKSVTPISSELVHLDKNEIVYFDEWRKIDISDSDLKQFVSSLELAPGSQNRFYIRFTVDEDQFERHFKSALRVNGIQDLDTVNKTFDWNREIPSLLIPPRSNLFLLETGQKITFEYIANGANAEVKKAYSLRRA

SEQ ID NO: 240 - protein, 1186 aa, Gardnerella vaginalis
  Gardnerella vaginalis 1500E
MEGNISYAIGIDVGLNSVGLAAIRLDNNGEPIRILKAMSVIHDAGIDPNGAKESDTRKAISGVARRVRRLYRQRRRRLQKLDFLLHSLGFPVVENKDLDFSDSFIPWIFRAKLADEYIADEKQRKQMLSVAIRHIARHRGWRNPYQSIKSMTQETEYSEFYNELLKNIEKFAPGVGCEGSTPAQLVRDYLLLQQGKASRRLRITTDEKRKNHPNSLNPILPRKLMQSDNMLEILNIFNVQHIDDKYVREQIINAVFYAKSPRGSAENRVGKDAITGKGKRALKASLAFQKYRIISTISNLRIRENSKERCLTIEEKQSVYKLLTTSTDESSKEKSAEAPLYTWIDVADCLGIERYKLRGVGSQIGDGESVGNRPPMLNSELAIIYANNKSLGKSLLTWWLDANRTQEDKEALIEILSNTVDIEAIHDNPEYQDKYGSAIAFIDSMDETEIAALENISLPDGRAAYSLETLDKLNKQMLETDDDLFEARKKLFNLPNNWRPSEAPIAEPTGNPSVDRVLKIVHRFLISAKNRWGNPERINIEHVRSGFKSKKMANSYKELLDKRTKGKENLKAMMRNSLHLGMSDSISDADIRRYEAVQRQNGQCLYCGSEITYHTCELDHIVPRKGPGSTNTRENLVATCSLCNAQKCNTPFSTWCEQSTYCKNHDISVDSAINRVRAFIFPPNSYDKRGANQFKKEVIARLKQKVGDEAFDNRSIESVAWMANELHRRIDWYYNSQNYQTNNGISDITNKAQTNVGVYAGSLTAIARRMSGIDGKLEFFDGRRKTRFDRRHHAVDASVIAMMTPGIAQILAIKCNLRETQLLQGNKVVPGGIDWKEYPTANDQGYQQYANWSVRMNALLKLLNEEMRADRIAVVNSIRLRYNNSSVHQYKVNALLKLHVGDEIDSGTIRRSSTPALYCALTRNPDYDVNNGLPENPNRAILLHDKKLNADDSITFFKAQAVQLFVREGSAEIGSSTHHLRIYEYFKKLKSGKIKKSYGMIRVFQNDLHRHIHEDLFSCDLPEQSISMRYADTEVAHAVQTGNSNYLGYLVPGDEIIVDFSHVKLSGNIGTFVEFLNKIGANCAAYNHWVVVGTDTEKVLILKPSMISSEGIDKLYSNCKRNNFDYSSYEKSINEILVGKGWRVSVNVLAKYNAETIRRNALGEVRWTSRSHLPISWSWNTGENRE

SEQ ID NO: 241 - protein, 1186 aa, Gardnerella vaginalis
  Gardnerella vaginalis 284V
MEGNISYAIGIDVGLNSVGLAAIRLDDYGEPIRILKAMSVIHDAGIDPNGAKESDTRKAISGVARRVRRLYRQRRRRLQKLDFLLQSLGWPVVENKDLDFSDSFIPWIFRAKLADEYIADEEQRKQMLSVAIRHIARHRGWRNPYQSIKSMMQETEYSEFYNELLKNIEKLAPGVGCEGSTPAQLVRDYLLSQQGKASRRLRITTGGRRKNHPHSLDPVLPRKLMQSDNMLEILNIFNVQHIDDKYVREQIINAVFYAESPRGSAENRVGKDAITGKGKRALKASLAFQKYRIISTISNLRIRENSKERCLTIEEKQNVYKLLTTSIDKSSKRKSAEAPLYTWIDVADCLGIERYKLRGVGSQIGDGESVGNRPPMLNSELAILYANNKSLGQSLITWWLASNRTQEDKEALIEILSNTVDIEAIHDNPEYQDKYGSAIAFIDSMNETEIAALENISLPDGRAAYSLETLDELNKQMLETDDDLFEARKKLFNLPNNWRPAEAPIAEPTGNPSVDRVLKIVHRFLISAKNRWGNPERINIEHVRSGFQSKKMANSYKELLDKRTEGKENLKAMMRNSLHLGTSDSISDADIRRYEAVQRQNGQCLYCGSEITYHTCELDHIVPRKGPGSTNTRENLVATCSSCNAQKCNTPFATWCEQSTYCKNHDISADSAINRVRAFIFPPNSYDKRGANQFKKEVIARLKQKVGDEAFDNRSIESVAWMANELHRRIDWYYNSQNYQTNNGISDISNKAQTNVGVYAGSLTAIARRMSGIDGKLEFFDGRRKTRFDRRHHAVDASVIAMMTPGIAQILAIKCNLRETQLLQGNKVVPGGIDWKEYPTANDQGYQQYANWSVRMNALLKLLNEEMRADRIAVVNSIRLRYSNSSVHQYEVNALLKLHVGDEIDSETIRRSSTPALYCALTRNPDYDVNNGFPENPGRTILLHNKKLNADDSITFFKAQAVQLFVREGSAKIGNSIHHLRIYEYFEKLKSGKIKKSYGMIRVFQNDLHRHIHEDLFSCDLPEQSISMRYADTKVAHAVQTGNANYLGYLVPGDEIIVDFSHITLSENIGKFVEFLNKIGADCTAYRHWVVVGTDTEKVLILKPSMISSEGIDKLYSNCERNNFDYSSYEKSINEILAGKGWRVSVNVLAQYKAATIRRNALGEVRWASRSHLPISWSWDTGENRE

SEQ ID NO: 242 - protein, 1186 aa, Gardnerella vaginalis
  Gardnerella vaginalis 5-1
MEGNISYAIGIDVGLNSVGLAAIRLDNNGEPIRILKAMSVIHDAGIDPNGAKESDTRKAISGVARRVRRLYRQRRRRLQKLDFLLHSLGFPVVENKDLDFSDSFTPWIFRAKLADEYIADEKQRKQMLSVAIRHIARHRGWRNPYQSIKSMTQETEYSEFYNELLKNIEKFAPGVSCEGSTPAQLVRDYLLSQQGKASRRLRITTDDRRKNHPNSLDPVLPRKLMQSDNMLEILNIFNVQHIDNKYVREQIINAVFYAKSPRGSAENRVGKDAITGKGKRALKASLAFQKYRIISTISNLRIRENSKERCLTIEEKQSVYKLLTTSTDEYSKEKSAEAPLYTWIDVADCLGIERYKLRGVGSQIEDGESVGNRPPMLNSELAILYANAKSLKQSLITWWLAANRTQEDKEAFIEILSNTVDIEAIHDNPEYQDKYGSVIAFIDSMDETEIAALENISLPNGRAAYSLETLDKLNKQMLETDDDLFEARKKLFNLPNNWRPSEAPIAEPTGNPSVDRVLKIVHRFLISAKNRWGNPERINIEHVRSGFQSKKMANSYKKLLDKRTEGKENLKAMMRNSLHLGTSDSISDADIRRYEAVQRQNGQCLYCGSEITYHTCELDHIVPRKGPGSTNTRENLVATCSSCNAQKCNTPFATWCEESTYCKNHDISVDSAINRVRAFIFPPNSYDKRGASQFKKEVIARLKQKVGDEAFDNRSIESVAWMANELHRRIDWYYNSQNYQTNNGISDITNKAQTNVGVYAGSLTAIARRMSGIDGKLEFFDGRRKTRFDRRHHAVDASVIAMMTPGIAQILAIKCNLRETQLLQGNKVVPGGIDWKEYPTANDQGYQQYANWSVRMNALLELLNEEMRADRIAVVNSIRLRYSNSSVHKDDVHALLKLHVGDEIDSETIRRASTPALYCALTRNPDYDVNNGLPENTDRTILLHDKKLNADDSITFFKSKAAQLFVREGSVEIGNSIHHLRIYEYFEKLKSGKVKKSYGMIRVFQDDLHRYIHEDLFSCDLPEQSISMRYADTKVAHAVQTGNANYLGYLVPGDEIIVDFSHVKLSGYIGEFVEFLNKIGANCAAYKHWVVAGTDDKTTLILKPSMISSEGIDKLYSNCERNNFDYASYEKSIDKILVDKGWRVSVNVLDQYKAATIRRNALGEPRWASRSHLPISWSWDTGENRE

SEQ ID NO: 243 - protein, 1392 aa, Gemella haemolysans
  Gemella haemolysans ATCC 10379
MANKTWYLGLDIGSASVGWAATDTGYKIIRKNKKRLWGVRLFEEAKTAEDRRGYRSSRRRLARRKWRLNLLEELFTSEVKKVDENFFLRLKESQYHYEDKTHKVPYAIFNDKDYTDKDYYKDYPTIYHLRSKLMTEENPDIRKVFLAIHHIIKNRGHFLLQGQSFKDGNLNNLIKELLELDILHVGFEVTEEVVDKIADISLEKKTSKDKLNDIKELYPKEKQLLEVFRLIFGGKTSLDKLFAIDEYKELDAAIKSVSFKEKIYEEVRHDYEQVLSNYIELLDLAKLVYDSIILSDIKKEGKTLSESKVELFEKHRDDLLKLKNLVKNDSKLSEDKKVELYALIFKEDKDKGTNYVNYIRKSEEGKGCNYEDFKKFLVKELAKLEESSVKTEIIKDLELEQFLPLQRTKDNSVVPYQIHKEELVKILDNAARYHSFLNEKDESGYNVREKVIQLLEFRIPYYVGPLNSSKKAKEGGFAWSVRNTGYENTPVTPWNYSKVIDESASAEKFITNLTNKCTYLKGEDVLPKSSLLYSEFALLNELNALKYDGNRISLEARNTIIEKLFKQQGKKVTKTSIKNLLKAEGYIDGKGEITGIDITVKNDLKSYRDFKKILGNKFNSEHVENIILWITLYGESRKLIKAKIESVYGEVYSKDEITKMSRLVYKDWGRFSRKLLTELVSKKLYNEETGECLNIIGAMRQNNILFMELLADRFDYSKQIVEFNKELQEDVTEIAPEILDDLYVSPAVKRSIWQTVRIVEELKKIIGCAPAKIFVETTRSNQEKKKPTDSRKKQLELAYKAVKKDVKELEKEIGTINFDVLNDRLSSVEPSKLKAKKLYLYYTQLGRCMYSEEPINISELFDNNKYDIDHIYPQSKIKDDSFTNTVLVKRESNAAKTDRYPLGSDIQTPSNRRFWKFLKEKGLISDEKYNRLVRTEEFSDEELSGFIARQLVETSQSVKAVASILGELNPETSICYSKAENVSSFRQNFGKIKKGDRDSKNNDQLIKVREINDYHHAKDAYLNVVVGNVYDTKFTRNVFNFIKDKKDGRKYSLNKVFYENVSDSKTVAWEMDKTIHQVEKVMNNNNIMVTRRTSEQKGGLFDATVYKAKVAAKAKDGVYYPLKTSNSVVKDVAKYGGYTSIGIAYYSIFEYTIVNKKGEEKITRIIPIPIYISQNIKDSTALIEFGKSQIFCRAYEKIKDFKLLYRKLCIGSKININNYQYYIGGKSDERFYYDSAIQVTLDKKSEKYLKILSKYQNWKKENKDGELWENITKENNIELYNKLVEKMNSEIFTKKKSNKYNELNSEEIRNNFIKISVEEQAKVLLEILNLLTNKKSIFDLKSIDIKAARGKISFNLTSLIQFSIIEQSITGFYEKEITIIGDKGNDMENNNS

SEQ ID NO: 244 - protein, 1385 aa, Gemella morbillorum
  Gemella morbillorum M424
MKNKTWYLGLGVGPTSIGWAATDSNYKLLRKNKKRLWGVRLFEEAKTAVDRRTFRAERRRLARRKWRISLLEELFAKEVSKNDPNFFLRLKESKYHFEDKSLMNEYILFNDKDYTDKDYYKEYPTIYHLRLSLTTEENPDIRKVYLAVHSMLKNRGHFLLQGQSFNDSNIDSVIKELLELETVKINFEVTDEVIHSLKKIALEKKNLSDKNNDVKKLYPKEKQLQEIFKLVFGGKTSLDKLYDIEEYKELDNSVKSISFKEKVYEEVRPDYEQILSNYIELLDLAKLVYDSIVLADIKKEGKTISESKVELYNKHKDDLANLKKLVKIDSKLSEDKKKEVYFTIFKEDKEKGTNYVNYTHRSQEGKSCSYEDFKKFLKKELEKLEDSPTKTTILEELDLETFLPLQRTKDNSVVPYQIHKEELVKILDNAAKYHSFLAEKDDSGYSTREKVVQLFEFRIPYYIGPLNAHHNTENGGYSWAIRKKGMESVPVTPWNFKDVIDESASAEAFVNNLKNKCAYLSGEDVLPKNSLLYSEYALLNELNALRYEGNRISVEARDVIVTKLFKEQGKKVTKKTIKELLKTEGFIDGKGEIVGIDNIVKNDLKSYRDFKKILADKFDKERVENIILWITLYGESRKLIKEKITKVYGDFYTVDEIEKMSRLTYKDWGILSRKLLTELVSEKLYNEETGECLNIIGAMRQGTILFMELLADKFDYMSQIKNHNKENKDDITEITPDILENLHASPAVKRSIWQTVRIVEELKTIIGCVPTKIFIETTKRNNAPYKVPTLNRNDLVTKYKTIREHEIFELEKELKNTLDFTLNKNRLINEEPSKLKATKLYLYYTQLGRCMYTGKKIDLGELFDNNNKYDIDHIYPQSKVKDGSFNNIVLVTKASNDMKADVFPLKSKFQTKENKIFWRFLKEKKLITEEKYNRLVRTEEFSNGELTGFITRQLVETSQAIKVISNVLRELNPETTICYSKAENVSSFRQSFGKIKEANRKAENNEKLIRVQEINDYYNAKDAYLSIVVGNVYDVKFTRNVHNFIKNNKDARRYSLNGLFYTDVKNANTIAWEMDKTVHVVEKTMNNNNILITRRTSEQKGALYDATLYKAKVAEKAKEGTYYPLKTTDSKIKDVGKYGGFTKIKIAYYSIFEYTLDGKKGKQKITRIVPIPIYISQNIKDDKALLEYAQTRLPGKDLKIKYRKLCIGSLVKINNFNYYIGGKTNNNFTFDSAVQVILDKDSESYIKELAKYLNWKKENKDGKLWESITEDKNIQLYDSLVKKMNTGIFIRKTPNKYTELLTLEVKNKFINIDIDEQVKLLLEILNLLTNKKFTSKLNEIGITASRGVCSFNLSNQSQFSIIEQSVTGVYEKEKLIIEKKKEGIL

SEQ ID NO: 245 - protein, 1003 aa, Gluconacetobacter diazotrophicus
MIDESLTFGIDLGIGSCGWAVLRRPSAFGRKGVIEGMGSWCFDVPETSKERTPTNQIRRSNRLLRRVIRRRRNRMAAIRRLLHAAGLLPSTDSDALKRPGHDPWELRARGLDKPLKPVEFAVVLGHIAKRRGFKSAAKRKATNISSDDKKMLTALEATRERLGRYRTVGEMFARDPDFASRRRNREGKYDRTTARDDLEHEVHALFAAQRRLGQGFASPELEEAFTASAFHQRPMQDSERLVGFCPFERTEKRAAKLTPSFERFRLLARLLNLRITTPDGERPLTVDEIALVTRDLGKTAKLSIKRVRTLIGLEDNQRFTTIRPEDEDRDIVARTGGAMTGTATLRKALGEALWTDMQERPEQLDAIVQVLSFFEANETITEKLREIGLTLAVLDVLLTALDAGVFAKFKGAAHISTKAARNLLPHLEQGRRYDEACTMAGYDHAASRLSHHGQIVAKTQFNALVTEIGESIANPIARKALIEGLKQIWAMRNHWGLPGSIHVELARDVGNSIEKRREIEKHIEKNTALRARERREVHDLLDLEDVNGDTLLRYRLWKEQGGKCLYTGKAIHIRQIAATDNSVQVDHILPWSRFGDDSFNNKTLCLASANQQKKRSTPYEWLSGQTGDAWNAFVQRIETNKELRGFKKRNYLLKNAKEAEEKFRSRNLNDTRYAARLFAEAVKLLYAFGERQEKGGNRRVFTRPGALTAALRQAWGVESLKKQDGKRINDDRHHALDALTVAAVDEAEIQRLTKSFHEWEQQGLGRPLRRVEPPWESFRADVEATYPEVFVARPERRRARGEGHAATIRQVKERECTPIVFERKAVSSLKEADLERIKDGERNEAIVEAIRSWIATGRPADAPPRSPRGDIITKIRLATTIKAAVPVRGGTAGRGEMVRADVFSKPNRRGKDEWYLVPVYPHQIMNRKAWPKPPMRSIVANKDEDEWTEVGPEHQFRFSLYPRSNIEIIRPSGEVIEGYFVGLHRNTGALIPTPVGPDSYVIA

SEQ ID NO: 246 - protein, 1050 aa, Gluconacetobacter diazotrophicus
MGENMIDESLTFGIDLGIGSCGWAVLRRPSAFGRKGVIEGMGSWCFDVPETSKERTPTNQIRRSNRLLRRVIRRRRNRMAAIRRLLHAAGLLPSTDSDALKRPGHDPWELRARGLDKPLKPVEFAVVLGHIAKRRGFKSAAKRKATNISSDDKKMLTALEATRERLGRYRTVGEMFARDPDFASRRRNREGKYDRTTARDDLEHEVHALFAAQRRLGQGFASPELEEAFTASAFHQRPMQDSERLVGFCPFERTEKRAAKLTPSFERFRLLARLLNLRITTPDGERPLTVDEIALVTRDLGKTAKLSIKRVRTLIGLEDNQRFTTIRPEDEDRDIVARTGGAMTGTATLRKALGEALWTDMQERPEQLDAIVQVLSFFEANETITEKLREIGLTLAVLDVLLTALDAGVFAKFKGAAHISTKAARNLLPHLEQGRRYDEACTMAGYDHAASRLSHHGQIVAKTQFNALVTEIGESIANPIARKALIEGLKQIWAMRNHWGLPGSIHVELARDVGNSIEKRREIEKHIEKNTALRARERREVHDLLDLEDVNGDTLLRYRLWKEQGGKCLYTGKAIHIRQIAATDNSVQVDHILPWSRFGDDSFNNKTLCLASANQQKKRSTPYEWLSGQTGDAWNAFVQRIETNKELRGFKKRNYLLKNAKEAEEKFRSRNLNDTRYAARLFAEAVKLLYAFGERQEKGGNRRVFTRPGALTAALRQAWGVESLKKQDGKRINDDRHHALDALTVAAVDEAEIQRLTKSFHEWEQQGLGRPLRRVEPPWESFRADVEATYPEVFVARPERRRARGEGHAATIRQVKERECTPIVFERKAVSSLKEADLERIKDGERNEAIVEAIRSWIATGRPADAPPRSPRGDIITKIRLATTIKAAVPVRGGTAGRGEMVRADVFSKPNRRGKDEWYLVPVYPHQIMNRKAWPKPPMRSIVANKDEDEWTEVGPEHQFRFSLYPRSNIEIIRPSGEVIEGYFVGLHRNTGALTISAHNDPKSIHSGIGTKTLLAISKYQVDRFGRKSPVRKEVRTWHGEACISPTPPG

SEQ ID NO: 247 - protein, 1371 aa, Gordonibacter pamelaeae
  Gordonibacter pamelaeae 7-10-1-b
MNLRNVESYQVGLDIGTGSVGWAVLDDNGDLCRFKGKPTWGSRVFPTAETAAEARVHRGQRRRYDRRRQRIDLLQRFFADEVAKVDPEFFIRLNQARLHPENRDPAHADYRWPLFNGSNFTEKDYYRQFPTIYHLRAHLLKSDEPADIRLVYLALHNIVKHRGNFLHQDNPSLSARNANVGDAVEALCLALDEWCGAHDVECACDEAALAEALGDASLRPGEKRERAEAALGVEKAHKKLAKAVSSAVVGYAAEFGHVFFAESEGSKFALSNDEKVEAYVCPDEGRDLFDAMRAVHSSYVLMGILSEAQGELLSVCKVGEYERYKRDLETLKSLVRAYGPERYDEFFCGPFYEGTRDYDPGKAQGYTKYNLGASKLSHEDFLKEVQKLLKDIGAQADERYADIERAIEAGAFLRRLKTSDNGTIPYQLHLEEMDAIIERQAAFYPFLAQEKDKLKSLVSFRIPYYVGPLTQKNAARDGKGEARFAWSSRKPGMEDARVYPWNWEDVIDKDQSAEDFIRRMTGTCTYLKGEPVLARCSLDYELFCVLNELAGARWTQDGDKSYRFDAADRLGIVEDLFKKRKRVTYEAAEKWLARTHGPESGKSAGGAYHVSGGQGEDAFESQLSSHYDFCKILGVDELSDADEAMAEDIILWNTVFEDRSILKRKIKLAYGDRLGDAQVRKLCQKRYTGWGRLSGELLRGLRSATDNGPKTIMDILLEGDPNHARRMGAAMNLMEILHDDLLEFQAKIDEHNRERALAVGGMSVDEVTGSPALRRGINQALRVVDEIAGIAGKPPAHIYVEVTRDEGARNKGRRTTSRYRALEAALSSIKAQCADVYAELKERDPRALDDERLTLYFMQCGKCMYSGDALDINKLQTYQVDHILPQSYVKDDSFENKVLVRPDTNQRKGDTLLLDERLIARMRGFWRTLRDAELIGEKKFNNLTRTSVSDEQMKKFVSRQLVETGQMVKQVQQLLQARYPESEVQPVKAGVSHQLRVGCALAKSREINDFHHAHDAYLACQVGRFVQYRHSAVYSEPVKMAAVVKQFIKKQAEDYRRTRELPGSDGFIVSSFMTPGFDVKTGEVFRDAWDAGAEIDRIRRCFDYKDCFISRMPEETHGAFWDATIYSPRAAGKTLSLPLKRGLDPRKYGSYSREQFAYFFVYEAVKPKKKQRVLEFAPVPVRVASALANDPDALEDYARELAEAEGLVFERIRRRKVYKYQQIIVGDSRLYVTGREEVRNARQLAFSQDETKLICRIEQGEECEEGELLDLFRSMQRKYLACAPRLARLMKVAEMEEGFIAATASGKREVLLSLTSIAAAHRNSIDLKPIGRKGSSGQMKITFSKELSTNGILFVDSSVTGMFERRCRLGL

SEQ ID NO: 248 - protein, 1054 aa, Haemophilus parainfluenzae
  Haemophilus parainfluenzae ATCC 33392
MENKNLNYILGLDLGIASVGWAVVEIDEKENPLRLIDVGVRTFERAEVPKTGESLALSRRLARSARRLTQRRVARLKKAKRLLKSENILLSTDERLPHQVWQLRVEGLDHKLERQEWAAVLLHLIKHRGYLSQRKNESKSENKELGALLSGVDNNHKLLQQATYRSPAELAVKKFEVEEGHIRNQQGAYTHTFSRLDLLAEMELLFSRQQHFGNPFASEKLLENLTALLMWQKPALSGEAILKMLGKCTFEDEYKAAKNTYSAERFVWITKLNNLRIQENGLERALNDNERLALMEQPYDKNRLFYSQVRSILKLSDEAIFKGLRYSGEDKKAIETKAVLMEMKAYHQIRKVLEGNNLKAEWAELKANPTLLDEIGTAFSLYKTDEDISAYLAGKLSQPVLNALLENLSFDKFIQLSLKALYKLLPLMQQGLRYDEACREIYGDHYGKKTEENHHFLPQIPADEIRNPVVLRTLTQARKVINGVVRLYGSPARIHIETGREVGKSYKDRRELEKRQEENRKQRENAIKEFKEYFPHFAGEPKAKDILKMRLYKQQNAKCLYSGKPIELHRLLEKGYVEVDHALPFSRTWDDSFNNKVLVLANENQNKGNLTPFEWLDGKHNSERWRAFKALVETSAFPYAKKQRILSQKLDEKGFIERNLNDTRYVARFLCNFIADNMHLTGEGKRKVFASNGQITALLRSRWGLAKSREDNDRHHALDAVVVACSTVAMQQKITRFVRFEAGDVFTGERIDRETGEIIPLHFPTPWQFFKQEVEIRIFSDNPKLELENRLPDRPQANHEFVQPLFVSRMPTRKMTGQGHMETVKSAKRLNEGISVIKMPLTKLKLKDLELMVNREREKDLYDTLKARLEAFNDDPAKAFAEPFIKKGGAIVKSVRVEQIQKSGVLVREGNGVADNASMVRVDVFTKGGKYFLVPIYTWQVAKGILPNKAATQYKDEEDWEVMDNSATFKFSLHPNDLVKLVTKKKTILGYFNGLNRATGNIDIKEHDLDKSKGKQGIFEGVGIKLALSFEKYQVDELGKNIRLCKPSKRQPVR

SEQ ID NO: 249 - protein, 1052 aa, Haemophilus sputorum
  Haemophilus sputorum CCUG 13788
MKNTSLNYVLGLDLGISSVGWAVVEIDEKENPLSLIDVGVRTFERAETQKGESLALARRLARSARRLTQRRVARLKKAKRLLKSENILLSTDECLPHQVWQLRVEGLERKLERQEWAAVLLHLIKHRGYLSQRKNESKSENKELGALLSGVANNHKLLQQTTYRTPAELAVKKFEVEEGHIRNQQGSYTHTFSRLDLLSEMELLFSRQQHFGNPFTSEKLLENLTALLMWQKPALSGDAILKMLGKCTFENEYKAAKHTYSAERFIWITKLNNLRIQENGLERALNDNERLALMKQPYEKAKLTYAQVRSILNLSDEAIFKGLRYSGEDKKTSETKTVLMEMKAYHQIRLALEKNDLKTEWAELKVNSSLLDEIGTAFSLYKTDEDISTCLAGKLSQPVLNALLENLNFDKFIQLSLKALHKILPLMQQGLRYDEACAEIYGDHYGKKTEENHLLLPQIPADEIRNPVVLRTLTQARKVINGVVRLYSSPARIHIETGREVGKSYQDRRELEKRQEENRKQREKAISEIKTLFPNFSGEPKAKDILKMRLYYQQNAKCLYSGKPLELHRLLEQGYVEIDHALPFSRTWDDSFNNKVLVLANENQNKGNLTPFEWLDGKNNSERWKAFKALVETSAFPYTKKQRILSQKLDEKGFIERNLNDTRYVARFLCNFIADNMHLTGEGKRKVFASNGQITALLRGRWGLAKSREDNDRHHALDAVVVACSTVSMQQKITRFVRFEEGNVFTGERIDRETGEIIPLHFPAPWKFFREEVEIRIFSDNPKLELENRLIARPQANHEFVQPLFVSRMPTRKMIGQGHMETIKSAKRLNEGLSVIKMLLTKLRLKDLESMVNREREKELYEALKARLEAFNDEPAKAFAEPFMKKGGAIVKSVRVEQVQKSGVLVRDGNGVADNASMVRVDVFTKGGKYFLVPIYTWQVAKGILPNKAVIQGKNEEDWEVMDDATFRFSLHQNDLVKLVTKKKTIFGYFNGLNRATGNIDIKEHDLEKSKVKDGIHQSIGIKLALSFEKYQVDELGKNIRLCKSSKRQAVR

SEQ ID NO: 250 - protein, 1052 aa, Haemophilus parainfluenzae
MENKNLHYILGLDLGIASVGWAVVEIDEKENPLRLIDVGVRTFERAETQKGESLALSRRSARSARRLTQRRVARLKKAKRLLKSENILLSTDERLPHQVWQLRVEGLDRKLERQEWAAVLLHLIKHRGYLSQRKNESKSENKELGALLSGVASNHELLQQATYRTPAELAVKKFEVEEGHIRNQQGAYTHTFSRLDLLAEMELLFSRQQHFGNPFASEKLLENLTALLMWQKPALSGEDILKMLGKCTFEDEYKAAKNTYTAERFVWITKLNNLRIQENGLERALSDNERLMLIEQPYEKAKLTYAQVRSILNLSDDAIFKGVRYSGEDKKAIETKTTLMEMKAYHQIRKVLEGNNLKAEWVALKANPTLLDEIGTAFSLYKTDEDISAYLAGKLSQPVLNALLENLSFDKFIQLSLKALYKLLPLMQQGLRYDEACREIYGDHYGKKTEETHHFLPQIPADEIRNPVVLRTLTQARKVINGVVRLYGSPARIHIETGREVGKSYKDRHELKKRQEENRKQREKTISEIKTLFPNFSGEPKGKDILKMRLYYQQNAKCLYSGKPLELHRLFEQKYVEVDHALPLSRTWDDSFNNKVLVLANENQNKGNLTPFEWLDGKNNSERWRTFKALVETSAFPYAKKQRILSQKLDEKGFIERNLNDTRYVARFLCNFIADNMHLTGEGKRKVFASNGQITALLRRRWGLAKSREDNDRHHALDAVLVACSTVAMQQKITRFVRFKAGDVFTGERIDRETGEIIPLHFPTPWQFFKQEVEIRIFSDNPKLELENRLPDRPQANHEFVQPLFVSRMPTRKMTGQGHMETVKSAKRLNEGISMIKMPLTKLKLKDLELMVNREREKDLYDALKTRLEAFNDDPAKAFAEPFMKKGGAIVKSVRVEQVQKSGVLVRQGNGVADNASMVRVDVFTKDGKYFLVPIYTWQVAKGILPNKAVIQGKDEEDWEDIDDATFQFSLHPNDLISVKTKKDEFLGYFNGLNRHTGGINIRTHDLEKSKGKQGIFEGIGVKIALSFEKYQIDELGKNIRLCKPSKRQPVR

SEQ ID NO: 251 - protein, 1052 aa, Haemophilus sputorum
  Haemophilus sputorum HK 2154
MKNTSLNYVLGLDLGISSVGWAVVEIDEKENPLSLIDVGVRTFERAETQKGESLALARRLARSARRLTQRRVARLKKAKRLLKSENILLSTDECLPHQVWQLRVEGLERKLERQEWAAVLLHLIKHRGYLSQRKNESKSENKELGALLSGVANNHKLLQQTTYRTPAELAVKKFEVEEGHIRNQQGSYTHTFSRLDLLSEMELLFSRQQHFGNPFTSEKLLENLTALLMWQKPALSGDAILKMLGKCTFENEYKAAKHTYSAERFIWITKLNNLRIQENGLERALNDNERLALMKQPYEKAKLTYAQVRSILNLSDEAIFKGLRYSGEDKKTSETKTVLMEMKAYHQIRLALEKNDLKTEWAELKVNSSLLDEIGTAFSLYKTDEDISTCLAGKLSQPVLNALLENLNFDKFIQLSLKALHKILPLMQQGLRYDEACAEIYGDHYGKKTEENHLLLPQIPADEIRNPVVLRTLTQARKVINGVVRLYSSPARIHIETGREVGKSYQDRRELEKRQEENRKQREKAISEIKTLFPNFSGEPKAKDILKMRLYYQQNAKCLYSGKPLELHRLLEQGYVEIDHALPFSRTWDDSFNNKVLVLANENQNKGNLTPFEWLDGKNNSERWKAFKALVETSAFPYTKKQRILSQKLDEKGFIERNLNDTRYVARFLCNFIADNMHLTGEGKRKVFASNGQITALLRGRWGLAKSREDNDRHHALDAVVVACSTVSMQQKITRFVRFEEGNVFTGERIDRETGEIIPLHFPAPWKFFREEVEIRIFSDNPKLELENRLIARPQANHEFVQPLFVSRMPTRKMTGQGHMETIKSAKRLNEGLSVIKMLLTKLRLKDLESMVNREREKELYEALKARLEAFNDEPAKAFAEPFMKKGGAIVKSVRVEQVQKSGVLVRDGNGVADNASMVRVDVFTKGGKYFLVPIYTWQVAKGILPNKAVIQGKNEEDWEVMDDATFRFSLHQNDLVKLVTKKKTIFGYFNGLNRATGNIDIKEHDLEKSKVKDGIHQSIGIKLALSFEKYQVDELGKNIRLCKSSKRQAVR

SEQ ID NO: 252 - protein, 1338 aa, Helcococcus kunzii
  Helcococcus kunzii ATCC 51366
MQDYYLGLDIGTNSVGWAVTDENYNLLRKKGKDLWGVRLFKEAQPATERRGHRSSRRRTIRKSLRKQLLRELFEEEINAIDKDFFLRLDESKYWLEDKKIEGKYSLFNDENFTDKDYYEKFPTIFHLRKALIESDDKEDIRLYFLAINQMMKRRGHFLIDGKLSNVEDITPFKECIQNLINEELDTEIETEFYDKAIKIVSDYSLKKTEKKNLIKDLVKETDSIEDSKKIINIFNLLISGKSKVNGIFDDEEILEKIKEDNKEDFYLTSEKYEENLEYFSQLLDYRFELISSLKSIYDYIILQEVLKGKKYLSYAQVERYKNHKEDLRKLKQLIKKYDKNGKIYYQIFRDENFKKGYVAYLGYYKKNKKNVPVKKCDYDTFSKNIKSTLDKICDKEDPLYIELIDKIEKGGFLLKQIVSTNSVIPHQVHELELDKILENLEKNYPSFKEISDGVSKIDKIKMIFNFRIPYYVGPLNDYHKDKVNSNTWIVKNEGFENENIRPWNFSKIVDEHACEEEFIKRMINECSYIPGEKVLPKSSLLYSEYMVLNELNNLRVNGDKLNPKIKKEIVENIYKKERKVTLKKIRNFLIINNYVDSKVEFSGLSDGIKANMSSYIDFAEILDDNFDNNMVEDLIEQITIHVGNVKLLTEKISNKYPNLEKKQINKIVNLKFKDWARFSRKLLVGIEGTEKETGEINTIIGFLRETNENFMELMSNRYTFSEEISEIKKKYIPNKLSKQIVDDLYVSPAVKKMIWQVLNINDELIKVLGKQPKKIFIEMARGKEEKPEVKDSRKNKLIELYKNLGKEGKEWLNRIEDKTEADFRNRALYLYYTQMGRCMYTGEIIDIERLYDKELYDLDHIIPRKMKKDDSIHKNLVLVTRNSNQYEKKDNYPVPEVIKSRENVRHLWYALKKKGLITEEKYNRLTRINPLSDKELSEFIERQLVETRQTTKVVKDLFENYYTDSKIVTVKAGLVSELRRDFEVLKCREINDLNHAHDAFLNIIVGDVWSKKFTSNPYNFVKKNREKYTLNNIFTKNQKDLRGNEIWNCAEGKKRIIKTLNKPSVLFSVENFEQTGQLFDQNIIGKQDYKEKTSYVPIKGDERLQDISKYGGYRGISGAYFFIVEHTEKNKRVKTIESLPIYMKSYVEENGLLDFCTNEMKLVDPKIIVKKLNYKSEIIVDGFKYLISGKTENRLSLETNEYLYWNHTQTTDIKKILNINEKIELEKYNGDIESERENIIKYIQIILEKFKLKPFIKRRNLPNIEINFADYETEKLLQLLVNLIPLTTKYVSPVDLTVISGSKYAGKVLIPKKISNLNEVIFISKSITGIYESRRRII

SEQ ID NO: 253 - protein, 1007 aa, Helicobacter canadensis
  Helicobacter canadensis MIT 98-5491
MKVLGFDIGINSIGWAFVENNELKDCGVRLFTKAENPKTKESLALPRRNARSSRVRLRRRRSRLLSLKHIISKEFGLHYEDYIALDGNLPKAYTGKIESIYKLRYEALSQAISKEDLARVILHIAKHRGYMNKNQKTSQDSEKGAILSAIKENSNKIKHYQTAGEYFYKELFENLRDGTKEFKNIRNKAMKNEKTGNMESTYYNTILASDLEKELKLILEKQQAYHNYSDTFIKEVLEIAFYQRPLKDFSHLVGSCTFYENEKRACKNSYSAWEFIALGKIINTLESIKKDTGEIFSNEIITQILKEVLDKGSLSYTKLRKMINLDEKVKFKGLKYDKEGVEKTNLIEFKKLKEFKKALGEHNLERKTLDEIATHITLTKDENQLKKQLEQYALSQNQIDALAELDFNDHINLSFKALYEILPLMEKGKRYDEACNELGLKAKTSNQKSEFLPAFCDSIFAQELTNPIVNRAISEYRKVLNRLLKKYGKMHKIHIELARDAGLSKEARNKIEKEQKENKDINDKAEKTCKEFGLKPNAKNILKIKLWREQGEICAYSGKKITIDDLKEDKALEVDHIYPYSRSYDDSYNNKVLVFIKENQLKLNQTPYEAFGSNQEKWSKIQVLAQKLPYKKKNRILDENFKNKDQIEFISRNLNDTRYATSLIAKYTKEYLEFLPLSDDEDISLKSGEKGSKTHVQTMNGMLTSVLRHAWGFSQKDRNNHLHHALDAIIIAYSTNSIIKAFSDFKKNQEILKAKLYAKKLTSEEYKNQSKFTGFEKYRSKILEKLDSIFVSKPPNKNTKGALHEQTFYSYQDILEEYKTQEGLKRALECGKVRKIGTKYVVNDRMVRLDIFKKDNKFYGIPIYTMDFALGVLPNKVVTIGTDKDKIKKEWKTIDETYEFCFSLYKGDLVLIQKKEMQESEFAYYNGFDISSASISLEKHDNKFENLTENQKLLFPKAKEGDVEVRGIGIQGLKVFKKYMVTPLGEIQETRTEARQNIQPRKKHGLR

SEQ ID NO: 254 - protein, 1023 aa, Helicobacter cinaedi
  Helicobacter cinaedi CCUG 18818 = ATCC BAA-847
MKIYSFDIGVASIGWAFIENEVLQDCGIRIFTKAENPKNGASLALPRREARGVRKRLARRRGRLNTIKQLLCKEFGLQLEDYLSNDGELPKAYTASKANPLKSPYELRTLALSQKLDSKDLVRVILHIAKHRGYGNKHAKDSKDTESGKVKKAIEFNRKTLAEKGYRSVGEYLYREFFQQSRISQNNGATEFINVRNKAGNYEHCVAQDMLKEELESILNAQRQFGFSLKQDFESKLLTKIFEQRPLKSFADKVGNCCFIAGEKRAPKDSPSAIEFIALSRTINTLINLSKESGEIYNRAIILQIVESTLKKGEISYKELREIIRLDERLRFKDPRLDYSREIKEAEKVKFLEFKQLKGFKKALGESFTTLAISQLDEIAEHIALIKDRVKLNEKLESYALTKEQREALSNLSFSAHINLSLQALKQILPFMRGDNGEQCLDYDESVEKAGLKALSKDTLKGQMLPPLNEFEPYLSNPVVARALAEYRKVLNVLLKQYGSPHKIHIEYAREAKLSSTERQKYEKEQKDNYAANQAAHKKCQELGLEPSSTNLLKLKLWQEQGGLCLYSGAKITISYLQDPTALQVDHIYPYSRSFDDSYMNKCLVLTKANQEKGNRTPFEAFGTDSAKWGVITTLAQKLPHKKRRRILNTAFNDKEAGFKLRNLNDTSYIARLVADYTETYLEFLPLVESENTTLSKGQKGSKKHIAIVNGVLTSTMRYYLGFASKDRDNHLHHALDAVIIGFMNDSVIKAFSDFKKTQETSKAAYYAHTLSKQEYKKQRAFIQLPSGENFRVSVLEKVESVFVSKPPRKRVRGALHEATFYSPNDPKLLKNYGGTKGVERALALGKMRKVGAKIVSNGAMVRVDIFRHKSSGKFYGVPVYTMDFALGILPNKAVVVGKDQNGVIKDWLEMDSSYEFIFSLYKDDVILVQKKEMQRPELCYFVSFDTSGASIKVAKHDNNFSTLTENQKLLFSNATKEEVVGKSIGIQNLKVFEKWQVSVLGEVKRTQSYPRENISLASKAKK

SEQ ID NO: 255 - protein, 1023 aa, Helicobacter cinaedi
  Helicobacter cinaedi CCUG 18818
MKIYSFDIGVASIGWAFIENEVLQDCGIRIFTKAENPKNGASLALPRREARGVRKRLARRRGRLNTIKQLLCKEFGLQLEDYLSNDGELPKAYTASKANPLKSPYELRTLALSQKLDSKDLVRVILHIAKHRGYGNKHAKDSKDTESGKVKKAIEFNRKTLAEKGYRSVGEYLYREFFQQSRISQNNGATEFINVRNKAGNYEHCVAQDMLKEELESILNAQRQFGFSLKQDFENKLLTKIFEQRPLKSFADKVGNCCFIAGEKRAPKDSPSAIEFIALSRTINTLINLSKESGEIYNRAIILQIVESTLKKGEISYKELREIIRLDERLRFKDPRLDYSREIKEAEKVKFLEFKQLKGFKKALGESFTTLAISQLDEIAEHIALIKDRVKLNEKLESYALTKEQREALSNLSFSAHINLSLQALKQILPFMRGDNGEQCLDYDESVEKAGLKALSKDTLKGQMLPPLNEFEPYLSNPVVARALAEYRKVLNVLLKQYGSPHKIHIEYAREAKLSSTERQKYEKEQKDNYAANQAAHKKCQELGLEPSSTNLLKLKLWQEQGGLCLYSGAKITISYLQDPTALQVDHIYPYSRSFDDSYMNKCLVLTKANQEKGNRTPFEAFGTDSAKWGVITTLAQKLPHKKRRRILNTAFNDKEAGFKLRNLNDTSYIARLVADYTETYLEFLPLVESENTTLSKGQKGSKKHIAIVNGVLTSTMRYYLGFASKDRDNHLHHALDAVIIGFMNDSVIKAFSDFKKTQETSKAAYYAHTLSKQEYKKQRAFIQLPSGENFRVSVLEKVESVFVSKPPRKRVRGALHEATFYSPNDPKLLKNYGGTKGVERALALGKMRKVGAKIVSNGAMVRVDIFRHKSSGKFYGVPVYTMDFALGILPNKAVVVGKDQNGVIKDWLEMDSSYEFIFSLYKDDVILVQKKEMQRPELCYFVSFDTSGASIKVAKHDNNFSTLTENQKLLFSNATKEEVVGKSIGIQNLKVFEKWQVSVLGEVKRTQSYPRENISLASKAKK

SEQ ID NO: 256 - protein, 1023 aa, Helicobacter cinaedi
MKIYSFDIGVASIGWAFIENEVLQDCGIRIFTKAENPKNGASLALPRREARGVRKRLARRRGRLNTIKQLLCKEFGLQLEDYLSNDGELPKAYTASKANPLKSPYELRTLALSQKLDSKDLVRVILHIAKHRGYGNKHAKDSKDTESGKVKKAIEFNRKTLAEKGYRSVGEYLYREFFQQSRISQNNGATEFINVRNKAGNYEHCVAQDMLKEELESILNAQRQFGFSLKQDFENKLLTKIFEQRPLKSFADKVGNCCFIAGEKRTPKDSLSAIEFIALSRTINTLINLSKESGEIYNRAIILQIVESTLKKGEISYKELREIIRLDERLRFKDPRLDYSREIKEAEKVKFLEFKQLKGFKKALGESFTTLARSQLDEIAEHIALIKDRVKLNEKLESYALTKEQREALSNLSFSAHINLSLQALKQILPFMRGDNGEQCLDYDESVEKAGLKALSKDTLKGQMLPPLNEFEPYLSNPVVARALAEYRKVLNALLKQYGSPHKIHIEYAREAKLSSTERQKYEKEQKDNYAANQAAHKKCQELGLEPSSTNLLKLKLWQEQGGLCLYSGAKITISYLQDPTALQVDHIYPYSRSFDDSYMNKCLVLTKANQEKGNRTPFEAFGTDSAKWGVITTLAQKLPHKKRRRILNTAFNDKEAGFKLRNLNDTSYIARLVADYTETYLEFLPLVESENTTLGKGQKGSKKHIAIVNGALTSTMRYYLGFASKDRDNHLHHALDAVIIGFMNDSVIKAFSDFKKTQETSKAAYYAHTLSKQEYKKQRAFIQLPSGENFRASVLEKVESVFVSKPPRKRVRGALHEATFYSPNDPKLLKNYGGTKGVERALALGKMRKVGAKIVSNGAMVRVDIFRHKSSGKFYGVPVYTMDFALGILPNKAVVVGKDKNGVIKDWLEMDSSYEFIFSLYKDDLLLVQKKEMAEPELCYFMSFNSSIAQISVAKHDNNFSTLTKNQKLLFSNATQEDVSGKSIGIQNLQVFEKWQVSVLGEVKRTQSYPRENISLASKAKK

SEQ ID NO: 257 - protein, 1024 aa, Helicobacter mustelae
MIRTLGIDIGIASIGWAVIEGEYTDKGLENKEIVASGVRVFTKAENPKNKESLALPRTLARSARRRNARKKGRIQQVKHYLSKALGLDLECFVQGEKLATLFQTSKDFLSPWELRERALYRVLDKEELARVILHIAKRRGYDDITYGVEDNDSGKIKKAIAENSKRIKEEQCKTIGEMMYKLYFQKSLNVRNKKESYNRCVGRSELREELKTIFQIQQELKSPWVNEELIYKLLGNPDAQSKQEREGLIFYQRPLKGFGDKIGKCSHIKKGENSPYRACKHAPSAEEFVALTKSINFLKNLTNRHGLCFSQEDMCVYLGKILQEAQKNEKGLTYSKLKLLLDLPSDFEFLGLDYSGKNPEKAVFLSLPSTFKLNKITQDRKTQDKIANILGANKDWEAILKELESLQLSKEQIQTIKDAKLNFSKHINLSLEALYHLLPLMREGKRYDEGVEILQERGIFSKPQPKNRQLLPPLSELAKEESYFDIPNPVLRRALSEFRKVVNALLEKYGGFHYFHIELTRDVCKAKSARMQLEKINKKNKSENDAASQLLEVLGLPNTYNNRLKCKLWKQQEEYCLYSGEKITIDHLKDQRALQIDHAFPLSRSLDDSQSNKVLCLTSSNQEKSNKTPYEWLGSDEKKWDMYVGRVYSSNFSPSKKRKLTQKNFKERNEEDFLARNLVDTGYIGRVTKEYIKHSLSFLPLPDGKKEHIRIISGSMTSTMRSFWGVQEKNRDHHLHHAQDAIIIACIEPSMIQKYTTYLKDKETHRLKSHQKAQILREGDHKLSLRWPMSNFKDKIQESIQNIIPSHHVSHKVTGELHQETVRTKEFYYQAFGGEEGVKKALKFGKIREINQGIVDNGAMVRVDIFKSKDKGKFYAVPIYTYDFAIGKLPNKAIVQGKKNGIIKDWLEMDENYEFCFSLFKNDCIKIQTKEMQEAVLAIYKSTNSAKATIELEHLSKYALKNEDEEKMFTDTDKEKNKTMTRESCGIQGLKVFQKVKLSVLGEVLEHKPRNRQNIALKTTPKHV

SEQ ID NO: 258 - protein, 1688 aa, Ignavibacterium album
MEFKKVLGLDIGTNSIGCALLSLPKSIQDYGKGGRLEWLTSRVIPLDADYMKAFIDGKNGLPQVITPAGKRRQKRGSRRLKHRYKLRRSRLIRVFKTLNWLPEDFPLDNPKRIKETISTEGKFSFRISDYVPISDESYREFYREFGYPENEIEQVIEEINFRRKTKGKNKNPMIKLLPEDWVVYYLRKKALIKPTTKEELIRIIYLFNQRRGFKSSRKDLTETAILDYDEFAKRLAEKEKYSAENYETKFVSITKVKEVVELKTDGRKGKKRFKVILEDSRIEPYEIERKEKPDWEGKEYTFLVTQKLEKGKFKQNKPDLPKEEDWALCTTALDNRMGSKHPGEFFFDELLKAFKEKRGYKIRQYPVNRWRYKKELEFIWTKQCQLNPELNNLNINKEILRKLATVLYPSQSKFFGPKIKEFENSDVLHIISEDIIYYQRDLKSQKSLISECRYEKRKGIDGEIYGLKCIPKSSPLYQEFRIWQDIHNIKVIRKESEVNGKKKINIDETQLYINENIKEKLFELFNSKDSLSEKDILELISLNIINSGIKISKKEEETTHRINLFANRKELKGNETKSRYRKVFKKLGFDGEYILNHPSKLNRLWHSDYSNDYADKEKTEKSILSSLGWKNRNGKWEKSKNYDVFNLPLEVAKAIANLPPLKKEYGSYSALAIRKMLVVMRDGKYWQHPDQIAKDQENTSLMLFDKNLIQLTNNQRKVLNKYLLTLAEVQKRSTLIKQKLNEIEHNPYKLELVSDQDLEKQVLKSFLEKKNESDYLKGLKTYQAGYLIYGKHSEKDVPIVNSPDELGEYIRKKLPNNSLRNPIVEQVIRETIFIVRDVWKSFGIIDEIHIELGRELKNNSEERKKTSESQEKNFQEKERARKLLKELLNSSNFEHYDENGNKIFSSFTVNPNPDSPLDIEKFRIWKNQSGLTDEELNKKLKDEKIPTEIEVKKYILWLTQKCRSPYTGKIIPLSKLFDSNVYEIEHIIPRSKMKNDSTNNLVICELGVNKAKGDRLAANFISESNGKCKFGEVEYTLLKYGDYLQYCKDTFKYQKAKYKNLLATEPPEDFIERQINDTRYIGRKLAELLTPVVKDSKNIIFTIGSITSELKITWGLNGVWKDILRPRFKRLESIINKKLIFQDEDDPNKYHFDLSINPQLDKEGLKRLDHRHHALDATIIAATTREHVRYLNSLNAADNDEEKREYFLSLCNHKIRDFKLPWENFTSEVKSKLLSCVVSYKESKPILSDPFNKYLKWEYKNGKWQKVFAIQIKNDRWKAVRRSMFKEPIGTVWIKKIKEVSLKEAIKIQAIWEEVKNDPVRKKKEKYIYDDYAQKVIAKIVQELGLSSSMRKQDDEKLNKFINEAKVSAGVNKNLNTTNKTIYNLEGRFYEKIKVAEYVLYKAKRMPLNKKEYIEKLSLQKMFNDLPNFILEKSILDNYPEILKELESDNKYIIEPHKKNNPVNRLLLEHILEYHNNPKEAFSTEGLEKLNKKAINKIGKPIKYITRLDGDINEEEIFRGAVFETDKGSNVYFVMYENNQTKDREFLKPNPSISVLKAIEHKNKIDFFAPNRLGFSRIILSPGDLVYVPTNDQYVLIKDNSSNETIINWDDNEFISNRIYQVKKFTGNSCYFLKNDIASLILSYSASNGVGEFGSQNISEYSVDDPPIRIKDVCIKIRVDRLGNVRPL

SEQ ID NO: 259 - protein, 1092 aa, Ilyobacter polytropus
MKYSIGLDIGIASVGWSVINKDKERIEDMGVRIFQKAENPKDGSSLASSRREKRGSRRRNRRKKHRLDRIKNILCESGLVKKNEIEKIYKNAYLKSPWELRAKSLEAKISNKEIAQILLHIAKRRGFKSFRKTDRNADDTGKLLSGIQENKKIMEEKGYLTIGDMVAKDPKFNTHVRNKAGSYLFSFSRKLLEDEVRKIQAKQKELGNTHFTDDVLEKYIEVFNSQRNFDEGPSKPSPYYSEIGQIAKMIGNCTFESSEKRTAKNTWSGERFVFLQKLNNFRIVGLSGKRPLTEEERDIVEKEVYLKKEVRYEKLRKILYLKEEERFGDLNYSKDEKQDKKTEKTKFISLIGNYTIKKLNLSEKLKSEIEEDKSKLDKIIEILTFNKSDKTIESNLKKLELSREDIEILLSEEFSGTLNLSLKAIKKILPYLEKGLSYNEACEKADYDYKNNGIKFKRGELLPVVDKDLIANPVVLRAISQTRKVVNAIIRKYGTPHTIHVEVARDLAKSYDDRQTIIKENKKRELENEKTKKFISEEFGIKNVKGKLLLKYRLYQEQEGRCAYSRKELSLSEVILDESMTDIDHIIPYSRSMDDSYSNKVLVLSGENRKKSNLLPKEYFDRQGRDWDTFVLNVKAMKIHPRKKSNLLKEKFTREDNKDWKSRALNDTRYISRFVANYLENALEYRDDSPKKRVFMIPGQLTAQLRARWRLNKVRENGDLHHALDAAVVAVTDQKAINNISNISRYKELKNCKDVIPSIEYHADEETGEVYFEEVKDTRFPMPWSGFDLELQKRLESENPREEFYNLLSDKRYLGWFNYEEGFIEKLRPVFVSRMPNRGVKGQAHQETIRSSKKISNQIAVSKKPLNSIKLKDLEKMQGRDTDRKLYEALKNRLEEYDDKPEKAFAEPFYKPTNSGKRGPLVRGIKVEEKQNVGVYVNGGQASNGSMVRIDVFRKNGKFYTVPIYVHQTLLKELPNRAINGKPYKDWDLIDGSFEFLYSFYPNDLIEIEFGKSKSIKNDNKLTKTEIPEVNLSEVLGYYRGMDTSTGAATIDTQDGKIQMRIGIKTVKNIKKYQVDVLGNVYKVKREKRQTF

SEQ ID NO: 260 - protein, 1354 aa, Indibacter alkaliphilus
  Indibacter alkaliphilus LW1
MKKILGLDLGTTSIGWAFIKEPEKDVVGSEIVDMGVRIVPLSSDEENDFAKGNTISINADRTLKRGARRNLQRFKQRRNALLETFKEKNLIPSNFQYAEDGPSSTFSTLKLRDKAAKEKIELDDFVKVLLQINKKRGYKSSRKAMSEEDEGTAIDSMGIAKELYENDLTPGQWVYEALKNGRKNVPDFYRSDLQEEFKKIVNYQSEFYPDILNTSFVEDWMGKASTPTKQYFNKRGVQLAENKGKREERRLQEYKWRAEAVNFKIDLSEIALILSQINSQISNSSGYLGAISDRSKELYFKNLTVGQYLYQQVKKNPHTRLKGQVFYRQDYLDEFEKIWSVQSSFYPQLNDELKQEVRDVTIFFQRRLKSQKHLISNCEFEEHHKVVPKSHPIFQEFRIWQNLNNLTLIKKDNLNEKCELALEDKTALANELAFKKELSVKDALKVLGLKPSDWEFNFTKIEGNRTNHAFFEAFAKIIELEDGEPIDLGNLKADDILDQFSEAFLRIGIDTELLQVNSDIEGAEYEKQSYIQFWHLLYSSEDDQKLKQNLIRKFGFKPEHAKILASISLQDDHASLSSRAIKKILPHLQSGLIYDKACTYAGYNHSSSFTKDENEKRELRAELELLKKNSLRNPVVEKILNQMINVVNAILKDPNLGRPDEIRVEMARELKANAEQRKNMTSNIASATRDHEKYREILKKEFGLKRVTKNDLLRYKLWLETDGISLYTGKPIEASKLFSKEYDIEHIIPKARLFDDSFSNKTICERQLNIDKANVTAFSFLQNKLSADEFEQYQSRVKSLYGKLSKAKIQKLLMANDKIPEDFIARQLQETRYISKKAKEILFEITMRVSVTTGTITDKLREDWGLVEIMKELNWEKYDKLGLTYTIEGKHGERLNKIKDWNKRNDHRHHAMDALTVALTKPAYIQYLNNLNAKAIGNKKGTEIFAIEQKYLKRENGKLCFIPPIENIRAEAKKHLSKILVSYKAKNKVVTINKNKTKKKAGFNEQTALTPRGQLHKETVYGKSFHYSTKFEKIGASFDAQKINTVAKKEEREALLKRLAENGNDPKKAFTGKNSLNKMPIYLDLGKNIKLSEKVKTVVLEQNYTIRKNIDPDLKVDKVIDVGIKRILESRLEEFGGNAKLAFSNLEENPIWLNKEKGIPIKRVKISGVSNVESLHVKKDHFGEKILDEEGNEIPVDFVSTGNNHHVAIYEDEDGNLQDEVVNFYEAVIRRNQGESIIKYRHEEGWNFLYSIKQNEFFVFPSQDFNPNDFDLLDPKNYDLISPNLYRAQKFSKVMYGNSAVRDYVFRHHLETVLNDVKELKDVAYKQLKSLQYLNGIKKVRLNHLGQIIQVGEY

SEQ ID NO: 261 - protein, 1397 aa, Joostella marina
  Joostella marina DSM 19592
MKKVLGLDLGTNSIGWALVNEATKEEKKEGKSSEIIKLGVRVNPLTVDEKTNFEKGRPLSTNADRTLKRSARRNLQRYKLRRRNLIEILIKNGFITKDTPLTETGKDTTHQTLKLRAKSAKEKVDLKDFAKILLTINKKRGYKSSRKVNSDEDGLAIDGMAVAKHLYEQNLTPGQYVLNLLQKNKKYVPDFYRSDLQEEFKNIWNNQKTYYFDILTDTLFEELKDKNKSQTWAICKKPFDIAGIKQIGKASDKRLERYKWRTEGLTQKLNLEYLAIALQEINNDINKSSGYLGAISDRSKELFFNKETVGENLYRQLVKTPHTSLRNQVFYRQDYLDEFETIWETQAKFYPQLTHTLKEEIRDVIIFYQRKLKSQKSLISFCQFESWEQTYIEKETGKSKTRTVGRKVIPKSSPLFQEFKIWQNLNSLEFRNSDEGEIIEFIKLDEDIRQTVFEELNLRGNLKPNDVLKILGNYISLGKVSQWKCNFEEIEGNRTNAALYNVYQIIAENEGYGFDWAKKTASEINKELKNIFPQLGIDASILDFDFTQANFDKQTSYQLWHLLYSAEEDFKISEEDKVLYGNSSVSLKKKLHQKYGFKPEYTKLLTNISLQPDYGNLSAKAICNILPYLKENNVYSEACDLTGYNHSNFLTAEEQAKRPLKPILELLKKNSLRNPVVEKILNQMVNVVNQVIETYGKPDEIRIELTRELKKSAKERANMTKSIADATRRNDDYRKTIIKEFGIPNPTKSDVVRYRLWQELASRGYKDIFTDTEIKPQELFSNKIDIEHIIPKALLFDDSFSNKTLAFKKDNLKKANRTAYDFIANDYAPNLENYIERVESLHKDRKITRAKRNKLLMLQSKLPDGFIERDLRNSQYITKEAKKMLYEVCRTVVSTSGSITDKLREDWDLINVMKELNFPKYKALGLTEKIERYDIGAEKMKEVEIIEDWNKRNDHRHHAIDALTVAFSTHSHIQYLNHLNARRDEGHKKHAAIIAIESTITEKEGNKKRRFIAPLPNFRLQAKEHIESILVSFKNKNKVVTNNINKTKRIKKDKFNTKVQLTPRGQLHKETIYGKIKQPLEKHIKLNKSFTLEQAKLIIDKRQREKVLNHLEKYAHNSDIAFNSKTLKKNPLLISDEPLKEVLCFEEVFTIRKDISYDNFKNEKQLDKVIDEKVKQALKERINQYNGDFREAFSDIERNPIWLNKAKGICVKRATIKGVSNAEPLHTAKNHLGEEVLTENKEQIPVDYVSTGNNHHVAIYEDEDGNLQEKVVSFYEAVIRVNEGLPIIDKEYNKSLGWTFKFTMKQNEMFVFPSEDFNPTEIDLLDQKNASLISPNLFRVQKFTIKDYFFRHHLETTVENNNTLKNTTWRREGLSGIYGIIKIRLNHLGEIVQVGEY

SEQ ID NO: 262 - protein, 1060 aa, Kingella kingae
  Kingella kingae PYKK081
MAAKSLNYILGLDLGIASCGWAVVEMDEQENPLRLIDVGVRTFEEAENPKDGSSLAETRRLARAQRRLISRRANRMNKLCRLLKQENVLQANDYDEKGLIIGLPNQAWELRAQGLDRKLEPKEWAAVLIHLVKHRGYLSQRKNESQTADKELGALLSGMNHNHQLLQSQSNQYRTPAELAIKQFATQDGHIRNQRGAYTHTFNRLDLQNELNQLFDAQTRLGNPHVSGSLKTAINDLLMNQKAALSGDAILEMLGRCTFEPSEYKAAKNTYSAERFVWLGKLTNLRIQDNGLESALSREQRELLLNEPYNKTKLTYQQVRKLLRLPETAFFKGLRYGKDNAESATFMEMKSYHAIRKSLENKSLKSEWEKLKTQPKLLDLIGTAFSIYKTDDEIAGCLKNQLPENVIIALQGQLNFSNFMELSLKALEKLLPLMEQGLRYDEACTQIYGNRHEKIADKTEKFLPNIPADKLRNPVVLRTLTQARKVINAIIRRYGSPARVHIETGREVGKSFSDRDKLKKQQEENQEQRRRAIDEWKQFFPNAAHEPKAVDILKLRLYQLQQGKCLYSGLPIDVRRLPEKGYVEIDHALPFSRTWDDSFNNKILVLASENQNKGNQTPYEYLRGADNSESWRLFVENVQNCQFSPNKKQKIMAKQLDEKGFLERNLNDTRYVSRFLCQFISEHLHLTGKGKKRVFASNGQITALLRGRWGLSKNREENDRHHAVDAVVVACSTVAMQQKITQFVRYQKGNVFTGERIDKETGEVISIHFPTPWEHFREEVMIRVFDDNPLRTLPEKLPNRPEALHEYVMPLFVSRMPTRKMTGQGHKETIKSAKRLDEKISVLRVPLTQLKLNDLENMVNREREPALYEALKARLEQFKNDPAKAFAEPFFKQGGQQVKAVRVEIVQKSGMLLRKINGVADNGSMVRVDVFEKSGKFYLVPIYAWQVAEGILPNYAVVAHKDESDWILMDESYHFKFALYKNDLLEVQTKKGGIMGYFASLDRATGAITIREHDRDKKKCKDGEHRSIGVKMASSFKKLQVDELGKNIHETRSRKRPNIG

SEQ ID NO: 263 - protein, 1391 aa, Kordia algicida
  Kordia algicida OT-1
MKKILGLDLGTNSIGWALVNEAEHEHEQSSIVKLGVRVNPLSVDEKTNFEKGRPLSINADRTSKRSARRNLQRFKLRRKNLINLLLKHHIISNETILTEVGKNTTHQTLKLRSKATQEKISLEEFARILLSINKKRGYKSSRKEKNEDEGFTIDGMAIAKELYDNQLTPGQYVYNILQDGKNYIPDFYRSDLQAEFDDVWQFQKKFYSSILTDEFYLKLKGQGKENTRKLFLAIHQVYTAENKGKRDAVKLQYYKWRSEAVKKQLSIEEVAYVLVEINNNINKSSGYLGAISDRSKALYFNNETVGEYLYGQLVKNRHNSLRNQVFYRQDYLDEFEKIWETQAKFYDELTNELKQEIRDVVIFYQRKLKSQKHLISDCLFEKHHKAIPKSSPLFQEFKIWQNLNYLEFVHTQSKEKIFFSELDDETRQFVFAELNIRGTLKIKEIKKLIGLETPVYWKSNFDEIEGNRTNQVLYNVYQNIADDLGYGFDWSKKHAFEINAELQAIFKDVGIDTAILNFDASIEENDFDKQKSYQLWHLLYSAEDTDKATEEDKLIYGNINTKLKKQLHQKYGFEAKYGNLLANISLQQDYGNLSAKAIKKILPYLESGNSFYEACTIVGYNPSNSLTKEQQQNRKLKDKLELLPKNSLRNPVVEKILNQKVNLINQLIDEYGKPDEVRIELARELKKSAKQRADLSKHINDATLKNQNIRKTLQKDFGIQNPSKNDVIRYKLYDELKDNGYKTLFTNKYIPKEQLFSKDVDIEHIIPKAILFDDSFSNKTLAYRNVNLAKADATAFDFISSKHLDDLDNYKARVETLFQSKRISKGKYKKLLMTRQNLPEDFIERDLRNSQYIAKKATAMLKEVFRSVVPTSGRITDKLREDWDLVNVMKELNLPKYRTLGLTEFIERKNGNKIEQIIDWTKRNDHRHHAMDALTVAFTTHNHIQYLNNLNVTHGLNGVDTDHEKSRLYAIKQAITKVYIVGKTKKRKFIPPMENFRSHAKNHLEGILISFKNKNKVVTKNKNRTKTKTKGVFNEKIQLTPRGQLHKETIYGHAKKVIVTKEKVSSKFTHEKILQVTKPAYREALLKRLASFKNDPKKAFSGKNALSKNPLYFDITSGKKVPDTVKLSYFENSYVIRKEVNSDNFKNEKSLQKVLDVGIRRILEKRLADYNGNAKEAFSNLEKNPIWKDKEKGVCIKKVRIEALKNAEPLHVKKDHLGKIILDDENKSTPVDFISTGNNHHVAIYEDKDGKLHDKVVSFYEVVSRVNLGLPIIDKSFNSHLDWKFLFSMKQNEMFVFPSEDFNPKEIDIGNPKNNELISKYLFRVQKFSKVTYGNSAVRDYVFRHHLETELIDKKELKGITYYQLKSIGMLEKLVKVRINHIGKIVHIGEY

SEQ ID NO: 264 - protein, 1314 aa, Lactobacillus animalis
  Lactobacillus animalis KCTC 3501
MLKKDYSIGLDIGTNSVGHAVVTDDYKVPTKKMKVFGDTSKKTIKKNMLGVLLFNEGQTAADTRLKRGTRRRYTRRKNRLRYLQEIFAPELAKVDPNFLYRLEESSLVAEDKKYDVYPIFGKREEELLYHDTYKTIYHLRSALANNDQPADLRLVYLALAHIIKYRGNFLLEGEIDLRTTDINKVFAEFSETLNENSDENLGKLDVADIFKNNTFSKTKKSEELLKLSGAKKNQLAHQLFKMMVGNMGSFKKVLGTDEEHKLSFGKDTYEDDLNDLLAEAGDQYLDIFVAAKKVYDAAILASILDVKDTQTKTVFSQAMIERYEEHQKDLIELKRVFKKYLPEKCHDFFSEPKISGYAGYIDGKVSEEDFYKYTKKTLKGIPETEEILQKIDANNYLRKQRTFDNGAIPHQVHLKELVAIVENQGKYYPFLRENKDKFEKILNFRIPYYVGPLARGNSKFAWLTRAGEGKITPYNFDEMIDKETSAEDFIKHMTINDLYLPTEPVLPKHSLLYERYTIFNELAGVRYVTENGEAKYFDAQTKRSIFELFKLDRKVSEKMVIKHLKVVMPAIRIQALKGLDNGKFNASYGTYKDLVDMGVAPELLNDEVNSEKWEDIIKTLTIFEGRKLIKRRLENYRDFLGEDILRKLSRKKYTGWGRLSAKLLDGIYDKKTHKTILDCLMTEDYSQNFMQLINDDNYSFKETIKNAQVIEKEETLAKTVQELPGSPAIKKGILQSLEIVDEIIKVMGYKPKSIVVEMARETQKTHGTRKREDRVQQIVENLKDANELPEKLPSNAELSDERKYLYCLQNGRDMYTGAPLDYDHLQFYDVDHIIPQSFLKDDSIENKVLTIKKENVRKTNGLPSEAVIQKMGSFWKKLLDAGAMTNKKYDNLRRNLHGGLNEKLKERFIERQLVETRQITKYVAQLLDQRLNYDGNGVELDEKIAIVTLKAQLASQFRSEFKLRKVRALNNLHHAHDAYLNAIVANLIMAKYPELEPEFVYGKYRKAKFKGLGKATAKNTLYANVLYFLKENEVYPFWDKARDLPTIKRYLYRAQVNKVRKAERQIGGFSDEMLVPKSDSGKLLPRKEGLDPVKYGGYAKAVESYAVLITADEVKKGKTKKVKTLVNIPIIDSKKYEADPTAYLASRGYTNVTNSFILPKYSLLEDPEGRRRYLASFKEFQKANELILPQHLVELLYWVNAKDGEQKLEDHKAEFKELFDKIMEFADKYVVAPKNSEKIRRLYEENQDATPMELGKNFVELLRYTADGAASDFKFFGENIPRKRYNSAGSLLNGTLIYQSKTGLYETRIDLGKL

SEQ ID NO: 265 - protein, 1377 aa, Lactobacillus brevis
  Lactobacillus brevis subsp. gravesensis ATCC 27305
MESNHDGEQVKYTLGLDIGTSSIGYAAIDKHQKPIRAKGKHVIGVRLFQEGQTAADRRAFRTTRRRLKRRKWRLNLLNRLFDPYLSEVDPNFLPRLRQSNLSPKDDNKHFNGSTLFPDKTDAAFYRQYPTMYHLRYALMTEKRKFDIREVYLAIHHIVKYRGNFLNSATVDSFKTSNIDFTSQFDRLNELYRQVILDEPFQINMDQVDEMTNKLLDNDALKLDTQKQVAKLLPVIYNDKPIDKQYTRIATEFSKAILGYKTKLDVILNLDTQNAKDWVIRLDDEDIDDKLPALVENLDESRQEIVTIIRDLYAQITLNAIVPKGKSLSESMVDKYNDHKDHLDLLMGLIHELGDDSAKGIKLREAYTQYVGKSDDKTLNQDDFYAAIKKNLDEDSKRSPKIQRLIEQASFMPKQRTSANGVIPHQLHQLELDRIIENQGRYYPFLKKPNPNTHKPNGGKYKLDELVAFRIPYYVGPLITKRDQEKTSGADFAWMIRKPGQEGEITPWNFDQKVDRMASANRFIRRMTTKDSYLVAEDVLPDASLIYEKFKALNELNMLKVNDSRLSPSQKQDLFNNLFKKQKTIRTKKLQTYIRTNWELPSVMISGLADPDKFNSSLSTYIDFRDIFGEKVDDPNRQADYEEIIEWSTVFEDRKIYQAKLNQLDWLTEPQRKALLTKRYTGWGRLSKKLLTGLKDQNGDSILDQLWKTNDNFMQIQSRDEFAKQIHDENAKQFHEANNVDDILDDAFTSPQNKKAIRQVDKVVQDVVKAVGYAPDKIAIEFTRSLENNPQRTVSRQRQLQAAYKNIPREIMKSGLMAELGSVADSKKVLSDKLYLYFTQMGKDMYEDKTINIDNLPNYDIDHILPQAFIKDDSIDNRVLISKEENARKSNRVPLKFFGAKRMGFWKDLLNNGLISNRKFQNLTTDPEKISKYSAKGFIHRQLVETSQVIRLVANILGNEYSQAGTTIIEVSAKMNRQLREDFHLIKNRNVNDYHHAMDAYLTAYVGDYLYLRYPKLRPYFVYGDFKKAEDQDLNIRNFNFLHDLKDNESLDKIVDSETGEIVWEKHGSVKQLKKVYHYKFMLVSQEVYTRQDALFNQTIYPASDADKRKLIPIKNSKPVDVYGGYSGNIDAYMAIVRVHGKKEDNYKVVGIPMRAVTKLKKAEKEGHDSYLNAVHEVLKPQFTKKKKNRKTGEITETVDEFDVLLGKVYYRQLIVDGNKKFMLGSSSYQYNAKQLVLSDKAMQVLSKNGKVKSQDENQNLIDVYDEILEKVDQYFELYDQRHYRESLHKGRGIFVNLPLSNQYDGSKLTSYGKYETIDAILNGLHANATMSNLRYLGISSPFGKMQASNGLTIDPDSIICYQSPTGLFERQIKLSDL

SEQ ID NO: 266 - protein, 1371 aa, Lactobacillus buchneri
MKVNNYHIGLDIGTSSIGWVAIGKDGKPLRVKGKTAIGARLFQEGNPAADRRMFRTTRRRLSRRKWRLKLLEEIFDPYITPVDSTFFARLKQSNLSPKDSRKEFKGSMLFPDLTDMQYHKNYPTIYHLRHALMTQDKKFDIRMVYLAIHHIVKYRGNFLNSTPVDSFKASKVDFVDQFKKLNELYAAINPEESFKINLANSEDIGHQFLDPSIRKFDKKKQIPKIVPVMMNDKVTDRLNGKIASEIIHAILGYKAKLDVVLQCTPVDSKPWALKFDDEDIDAKLEKILPEMDENQQSIVAILQNLYSQVTLNQIVPNGMSLSESMIEKYNDHHDHLKLYKKLIDQLADPKKKAVLKKAYSQYVGDDGKVIEQAEFWSSVKKNLDDSELSKQIMDLIDAEKFMPKQRTSQNGVIPHQLHQRELDEIIEHQSKYYPWLVEINPNKHDLHLAKYKIEQLVAFRVPYYVGPMITPKDQAESAETVFSWMERKGTETGQITPWNFDEKVDRKASANRFIKRMTTKDTYLIGEDVLPDESLLYEKFKVLNELNMVRVNGKLLKVADKQAIFQDLFENYKHVSVKKLQNYIKAKTGLPSDPEISGLSDPEHFNNSLGTYNDFKKLFGSKVDEPDLQDDFEKIVEWSTVFEDKKILREKLNEITWLSDQQKDVLESSRYQGWGRLSKKLLTGIVNDQGERIIDKLWNTNKNFMQIQSDDDFAKRIHEANADQMQAVDVEDVLADAYTSPQNKKAIRQVVKVVDDIQKAMGGVAPKYISIEFTRSEDRNPRRTISRQRQLENTLKDTAKSLAKSINPELLSELDNAAKSKKGLTDRLYLYFTQLGKDIYTGEPINIDELNKYDIDHILPQAFIKDNSLDNRVLVLTAVNNGKSDNVPLRMFGAKMGHFWKQLAEAGLISKRKLKNLQTDPDTISKYAMHGFIRRQLVETSQVIKLVANILGDKYRNDDTKIIEITARMNHQMRDEFGFIKNREINDYHHAFDAYLTAFLGRYLYHRYIKLRPYFVYGDFKKFREDKVTMRNFNFLHDLTDDTQEKIADAETGEVIWDRENSIQQLKDVYHYKFMLISHEVYTLRGAMFNQTVYPASDAGKRKLIPVKADRPVNVYGGYSGSADAYMAIVRIHNKKGDKYRVVGVPMRALDRLDAAKNVSDADFDRALKDVLAPQLTKTKKSRKTGEITQVIEDFEIVLGKVMYRQLMIDGDKKFMLGSSTYQYNAKQLVLSDQSVKTLASKGRLDPLQESMDYNNVYTEILDKVNQYFSLYDMNKFRHKLNLGFSKFISFPNHNVLDGNTKVSSGKREILQEILNGLHANPTFGNLKDVGITTPFGQLQQPNGILLSDETKIRYQSPTGLFERTVSLKDL

SEQ ID NO: 267 - protein, 1371 aa, Lactobacillus buchneri
MKVNNYHIGLDIGTSSIGWVAIGEDGKPLRIKGKTAIGARLFQEGNPAADRRMFRTTRRRLSRRKWRLKLLEEIFDPYITPVDSTFFARLKQSNLSPKDSRKEFKGSMLFPDLTDMQYHKDYPTIYHLRHALMTQDEKFDIRMVYLAIHHIVKYRGNFLNSTPVDSFKASKVNFVDQFKKLNELYTAINPEESFQINLANSEDIGHQFLDPSIRKFDKKKQIPKIVPVSVDDKATDKINGKIASEIINAILGYKSKLDVVVQCTPVDSKSWALKFDEEDIDAKLQKILPEMDENQQSIIAILQNLYSQVTLNQIVPNGMSLSESMIEKYNDHHDHLKLYKKIIDQLADPKKKAALKKAYSQYVGDDGKVIEQADFWSSVKKNLDDSDLSKQIMDLIDAEKFMPKQRTSQNGVIPHQLHQRELDEIIEHQSKYYPWLAEINPNKHDLHLAKYKIEELVAFRVPYYVGPMITPDDQAKSAETVFSWMERKGKEAGQITPWNFDEKVDRNASANRFIKRMTTKDTYLIGEDVLPDESLLYEKFKVLNELNMVRVNGKLLKVADKQAIFQDLFENYKHISVKKLQNYIKSKTGLPSDPEISGLSDPEYFNNSLGTYNDFKKLFGNKVDEPDLQDDFEKIVEWSTVFEDKRILREKLNEITWLSDQQKDVLESSRYQGWGRLSKKLLTGIVNDQGERIIDELWNTNKNFMQIQSDNDFAKRIHEANADQMKAVDVEDVLADAYTSPQNKKAIRQVVKVVDDIQKAMGGVAPKYISIEFTRSEDRNPRRTISRQRQLENTLKDTAKSLAKSINPELLSELDNAAKSKKGLTDRLYLYFTQLGKDIYTGKPINIDEISTYDIDHILPQAFVKDDSLNNRVLVSKAINNGKSDNVPVQLFGAKMGHFWKQLAEAGLISKRKLKNLQTDPDTISKYAMHGFIRRQLVETSQVIKLVANILGDKYRNDNTKIIEITARMNHQMRDEFGFIKNREINDYHHAFDAYLTAFLGRYLYHRYIKLRPYFVYGDFKKFKEDKVTMRNFNFLHDLTDDTQEKIADAETGEVIWDRENSIQQLKDVYHYKFMLISHEVYTLRGAMFNQTVYPASDAGKRKLIPIKADRPINVYGGYSGSADAYMAIVRIHNKKGDKYRVVGVPMRARDRLDAAKKVSDADCDRALKDVLTPQLTKTKKSRKTGEITQVVEDFEIVLGKVMYRQLMIDGDKKFMLGSSTYQYNAKQLVLSDQSVKTLASKGRLDPLQESMDYNNVYTEILDKVNQYFSLYDMNKFRHKLNLGFSKFISFPNHNVFDGNTKASSGKREILEEVLNGLHANPTFGNLKDIGITTPFGQLQQPNGILLSDEAKIRYQSPTGLFERTVSLKDL

SEQ ID NO: 268 - protein, 1361 aa, Lactobacillus casei
  Lactobacillus casei BL23
MTKLGKPYGIGVDIGSNSIGFAAVDENSHLIRLKGKTVIGARLFEEGKAAADRRASRTTRRRLSRNRWRLSFLRDFFESHITPTGPNFFMRQKYSEISPKDKARYKYEKRLFNDRTDAEFYQQYPTMYHLRNRLLTDPSKADVREIYFAIHHILKSRGHFLTSGYAKDFNTNKVALNEIFPALQDAYAQVYPDLDITFDENKVNEFKTVLLNEKATPSDTQRALVNLLLAEDGDKDILKQQKQVLTEFAKAVVGLKTKLNVALGTEVDSSEATVWNFSLGQLDDKWAGIESAMTDEGTEILDQIRDLYRARLLNGIVPAGKTLSQAKVDDYAQHHEDLELFKDYLKQLEDDGTAKAIRQLYDRYIDGDDAKPFVREDFVKALTKEVTAHPNAKSPELLERLAQPDFMLKQRNKANGAIPVQMQQRELDQIIKNQSVYYDWLAAPNPVEKHRKSMPYQLDELLNFRIPYYVGPLVTAKEQKAAQGGVFAWMVRKDPDGNITPYNFDEKVDREASANTFIQRMKTTDTYLIGEDVLPKQSLLYQRYEVLNELNNVRVNNEKLSIEQKQQVIRELFERHNSVTIKQFAENLRAHGDYAHIPEIRGLADEKRFLSSLSTYRQLKSLLPDAIDDPAKQADIENIIAWSTVFEDAAIFKTKLKEINWLDSQTITKLSNIRYRGWGQFSHKFLNGLTLGNGHTIIQELFLSNNNLMQILTDETLQKKMTELNADKLKAANINDAIDDAYTSPSNKKALRQVLRVIEDIKRAADGQDPSWLYVETADGGGTPGKRTRARQHQLQEIYANAAHELIDSAVRGELEDKIADKADFNDRLVLYFMQGGRDIYTGTPLNIDQLSSYDIDHILPQSLIKDNSLDNRVLVHAIINREKNATFASTIYAQKMNATWRQWHEAGLISGRKLRNLQMRPDQIDKYASGFVARQLVETRQIIKLTEQIVAAQYPETKIIAVKAGLSHQLREELEFPKNRDVNHYHHAFDAFLAARIGTYLLKRFPNLQAFFTYGKFKKADVKKLRGFNFIRDITHAEDKIVVKDTGEVIWDKKRDVDELDRIYNFKRMLITHEVHFEKADLFKQTVYGAKDSKEAGGKKQLISKKKGYPVDIYGGYTQETGSYLSVVRLTKKAMYAVVKVSTRDAAKLAVAKSISEQKENETLNDIIDEKLSKISKNGKITHELFEVVLPRVGQKTLFKNSKYNLFLVNSDTYMHNYQELWMPREYQKMWKDISLSKYGDAQTEDQLDQIFGFIVSQVNSYFNLYDINQFRKKLNDAADKFATLPMRDTDDMQGKIATIGQLLIGLQANAARSDLRNLDIKTPLGLLQIPNGISLDSDTSVVYQSPTGLLEREVHLSDL

SEQ ID NO: 269 - protein, 1361 aa, Lactobacillus casei
  Lactobacillus casei Lc-10
MTKLGKPYGIGVDIGSNSIGFAAVDENSHLIRLKGKTVIGARLFEEGKAAADRRASRTTRRRLSRNRWRLSFLRDFFESHITPTGPNFFMRQKYSEISPKDKARYKYEKRLFNDRTDAEFYQQYPTMYHLRNRLLTDPSKADVREIYFAIHHILKSRGHFLTSGYAKDFNTNKVALNEIFPALQDAYAQVYPDLDITFDENKVNEFKTVLLNEKATPSDTQRALVNLLLAEDGDKDILKQQKQVLTEFAKAVVGLKTKLNVALGTEVDSSEATVWNFSLGQLDDKWAGIESAMTDEGTEILDQIRDLYRARLLNGIVPAGNTLSQAKVDDYAQHHEDLELFKDYLKQLEDDGTAKAIRQLYDRYIDGDDAKPFVREDFVKALTKEVTAHPNAKSPELLERLAQPDFMLKQRNKANGAIPVQMQQRELDQIIKNQSVYYDWLAAPNPVEKHRKSMPYQLDELLNFRIPYYVGPLVTAKEQKAAQGGVFAWMVRKDPDGNITPYNFDEKVDREASANTFIQRMKTTDTYLIGEDVLPKQSLLYQRYEVLNELNNVRVNNEKLSIEQKQQVIRELFERHNSVTIKQFAENLRAHGDYAHIPEIRGLADEKRFLSSLSTYRQLKSLLPDAIDDPAKQADIENIIAWSTVFEDAAIFKTKLKEINWLDSQTITKLSNIRYRGWGQFSHKFLNGLTLGNGHTIIQELFLSNNNLMQILTDETLQKKMTELNADKLKAANINDAIDDAYTSPSNKKALRQVLRVIEDIKRAADGQDPSWLYVETADGGGTPGKRTRARQHQLQEIYANAAHELIDSAVRGELEDKIADKADFNDRLVLYFMQGGRDIYTGTPLNIDQLSSYDIDHILPQSLIKDNSLDNRVLVHAIINREKNATFASTIYAQKMNATWRQWHEAGLISGRKLRNLQMRPDQIDKYASGFVARQLVETRQIIKLTEQIVAAQYPETKIIAVKAGLSHQLREELEFPKNRDVNHYHHAFDAFLAARIGTYLLKRFPNLQAFFTYGKFKKADVKKLRGFNFIRDITHAEDKIVVKDTGEVIWDKKRDVDELDRIYNFKRMLITHEVHFEKADLFKQTVYGAKDSKEAGGKKQLISKKKGYPVDIYGGYTQETGSYLSVVRLTKKAMYAVVKVSTRDAAKLAVAKSISEQKENETLNDIIDEKLSKISKNGKITHELFEVVLPRVGQKTLFKNSKYNLFLVNSDTYMHNYQELWMPREYQKMWKDISLSKYGDAQTEDQLDQIFGFIVSQVNSYFNLYDINQFRKKLNDAADKFATLPMRDTDDMQGKIATIGQLLIGLQANAARSDLRNLDIKTPLGLLQIPNGISLDSDTSVVYQSPTGLLEREVHLSDL

SEQ ID NO: 270 - protein, 1363 aa, Lactobacillus casei
  Lactobacillus casei M36
MTKLGKPYGIGVDIGSNSIGFAAVDENSHLIRLKGKTVIGARLFEEGKAAADRRASRTTRRRLSRNRWRLSFLRDFFESHITPTDPNFFMRQKYSEISPKDKARYKYEKRLFNDRTDAEFYQQYPTMYHLRNRLLTDPSKADVREIYFAIHHILKSRGHFLTSGYAKDFNTNKVALNEIFPALQDAYAQVYPDLDITFDENKVNEFKTVLLDEKATPSDTQRALVNLLLAEDGDKDILKQQKQVLTEFAKAVVGLKMKLNVALGTEVDSSEATAWNFSLGQLDDKWAGIESAMTDEGTEILDQIRDLYRARLLNGIVPAGKTLSQAKVDDYEQHHEDLELFKDYLKQLEDDGMAKVIRQLYDRYIDGDDAKPFVREDFVKALTKEVTAHPNAKSPELLERLVQPDFMLKQRNKANGAIPVQMQQRELDQIIKNQSVYYDWLAAPNPVEKHRQSMPYQLDELLNFRIPYYVGPLVTAKEQKAAQGGVFAWMVRKDPDGNITPYNFDEKVDREASANTFIQRMKTTDTYLIGEDVLPKQSLLYQSYEVLNELNNVRVNDNKLSFDQKQQVLGELFERHNTVTIKQFVDNLLAHGDYDRIPEVRGLADEKRFLSSLSTYNQLKGILHEAIDDSDKQTDIEKIIAWSTIFEDKAIFKTKLNEISWLTAGMINSLANIRYRGWGQFSHKLLNELTLSTGRTVFEELLISSHNLMQILTDEVLKQKIAELNAHELKASGIYAAIDDAYTSPSNKKALRQVLSVIDDITNAAGQAPNWLYIETADGDGVPGKRTNSRQRKIQEIYANAAQELITGSVRGELEDKIASRADFTDRLVLYFMQGGRDIYTGEPLNIDNLSSYDIDHILPQSLIKDNSLDNRVLVHPLVNREKDTIFASTRFAKQMNGMWRQWHAAGLISSRKLRNLQMRPDEIDKYASGFVARQLVETRQIIKLTEQIVADQYPDAKIIAVKAGLSSQLRKELDFPKNREVNHYHHAFDAFLAARIGTYLLKRYPNLEPFFTYGKFKKTEVKKLKSLKSFNFIRDMTHAKDKIVAKETGEIVWDNASDINELDRIYNFKRMLITHEVRFETASLFKQTLYAAKNSKNRGGSRQLIPKKKGYLVDIYGGYTQETGSYLSVVRLTKKAMYAVVKVSTRDAAKLAVAKSISEQKENETLKKIIDGKLSKTSKKGKTTHQLFEIVLPRVGQKTLFKNSKYNQFLVNSDTYMHNYQELWMPREYQRMWKDILLSNHGDAQLEGQLDQIFKFIVSQVNSYFNLYDINQFRKKIADATDKFAKLPTHDTDNARGKIATIGQLLIGLQANAMRSDLRNLDIKTPFGLLQIGTGITLDLDTSIIYQSPTGLFEREVPLTDL

SEQ ID NO: 271 - protein, 1361 aa, Lactobacillus casei; identical to SEQ ID NO: 268
  Lactobacillus casei group

SEQ ID NO: 272 - protein, 1360 aa, Lactobacillus casei
  Lactobacillus casei T71499
MTKLGKPYGIGVDIGSNSIGFAAVDENSHLIRLKGKTVIGARLFEEGKAAADRRASRTTRRRLSRNRWRLSFLRDFFESHITPTDPNFFMRQKYSEISPKDKARYKYEKRLFNDRTDAEFYQQYPTMYHLRTRLLTDPSKADVREIYFAIHHILKSRGHFLTPGYAKDFNTNKVALNEIFPALQDAYAQVYPDLDITFDENKVNEFKTVLLNEKATPSDTQRALVNLLLAEDGDKDILKQQKQVLTEFAKAVVGLKTKLNVALGTEVDSSEATVWNFSLGQLDDKWAGIESAMTDEGTEILDQIRDLYRARLLNGIVPAGKTLSQAKVDDYAQHHEDLELFKDYLKQLEDDGTAKAIRQLYDRYIDGDDAKPFVREDFVKALTKEVTAHPNAKSPELLERLAQPDFMLKQRNKANGAIPVQMQQRELDQIIKNQSVYYDWLAAPNPVEKHRKSMPYQLDELLNFRIPYYVGPLVTAKEQKAAQGGVFAWMVRKDPDGNITPYNFDEKVDREASANTFIQRMKTTDTYLIGEDVLPKQSLLYQSYEVLNELNNVRVNDNKLSFDQKQQVLGELFERHNTVTIKQFVDNLLAHGDYDRIPEVRGLADEKRFLSSLSTYNQLKGILHEAIDDADKQTDIENIIAWSTIFEDKAIFKTKLNEISWLNAGMINSLANIRYRGWGQFSHKLLNELTLSTGRTVFEELLISSRNLMQILTDEVLKQKIAELNAHELKASGIYAAIDDAYTSPSNKKALRQVLSVIDDITNAAGQAPNWLYIETADGDGVPGKRTNSRQRKIQEIYANAAQELITGSVRGELEDKIASRADFTDRLVLYFMQGGRDIYTGEPLNIDNLSSYDIDHILPQSLIKDNSLDNRVLVHPLVNREKDTIFASTRFAKQMNGMWRQWHAAGLISSRKLRNLQMRPDEIDKYASGFVARQLVETRQIIKLTEQIVADQYPDTKIIAVKAGLSSQLRKELDFPKNREVNHYHHAFDAFLAARIGTYLLKRYPNLEPFFTYGKFKKTEVKKLKSFNFIRDMTHAKDKIVAKETGEIVWDNASDINELDRIYNFKRMLITHEVRFETASLFKQTLYAAKNSKNRGGSRQLIPKKKGYLVDIYGGYTQETGSYLSVVRLTKKAMYAVVKVSTRDAAKLAVAKSISEQKENETLKKIIDGKLSKTSKKGKTTHQLFEIVLPRVGQKTLFKNSKYNQFLVNSDTYMHNYQELWMPREYQRMWKDILLSNHGDAQLEGQLDQIFKFIVSQVNSYFNLYDINQFRKKIADATDKFAKLPTHDTDNARGKIATIGQLLIGLQANAMRSDLRNLDIKTPFGLLQIGTGITLDLDTSIIYQSPTGLFEREVPLTDL

SEQ ID NO: 273 - protein, 1366 aa, Lactobacillus casei
  Lactobacillus casei UCD174
MTKLGKPYGIGVDIGSNSIGFAAVDENSHLIRLKGKTVIGARLFEEGKAAAYRRASRTTRRRLSRNRWRLSFLRDFFESHITPTDPNFFMRQKYSEISPKDKARYKYEKRLFNDRTDAEFYQQYPTMYHLRTRLLTDPSKADVREIYFAIHHILKSRGHFLTPGYAKDFNTNKVALNEIFPALQDAYAQVYPDLDITFDENKVNEFKTVLLNEKATPSDTQRALVNLLLAKEGDRDILKQQKQVLTEFAKAVVGLKTKLNVALGTEVDSSEATAWNFSLGQLDDKWAGIESAMTDEGTEILDQIRDLYRARLLNGIVPAGKTLSQAKVDDYAQHHEDLELFKDYLKQLEDDGTAKAIRQLYDRYIDGDDAKPFVREDFVKALTKEVTAHPNAKSPELLERLAQPDFMLKQRNKANGAIPVQMQQRELDQIIKNQAVYYDWLAAPNPVEKHRQSMTYQLDELLNFRIPYYVGPLVTAKEQKAAQGGVFAWMVRKDPDGNITPYNFDEKVDREASANTFIQRMKTTDTYLIGEDVLPKQSLLYQSYEVLNELNNVRVNDNKLSFDQKQQVLGELFERHNTVTIKQFVDNLLAHGDYDRIPEVRGLADEKRFLSSLSTYNQLKGILHEAIDDADKQTDIENIIAWSTIFEDKAIFKTKLNEISWLNAGMINSLANIRYRGWGQFSHKLLNELTLSTGRTVFEELLISSRNLMQILTDEVLKQKIAELNAHELKASGIYAAIDDAYTSPSNKKALRQVLSVIDDITNAAGQAPNWLYIETADGDGVPGKRTNSRQRKIQEIYANAAQELITGSVRGEFEDKIASRADFTDRLVLYFMQGGRDIYTGEPLNIDNLSSYDIDHILPQSLIKDNSLDNRVLVHPLVNREKDTIFASTRFAKQMNGMWRQWHAAGLISSRKLRNLQMRPDEIDKYASGFVARQLVETRQIIKLTEQIVADQYPDTKIIAVKAGLSSQLRKELDFPKNREVNHYHHAFDAFLAARIGTYLLKRYPNLEPFFTYGKFKKTEVKKLKSLKSLKSFNFIRDMTHAKDKIVAKETGEIVWDNASDINELDRIYNFKRMLITHEVRFETASLFKQTLYAAKNSKNRGGSRQLIPKKKGYLVDIYGGYTQETGSYLSVVRLTKKAMYAVVKVSTRDAAKLAVAKSISEQKENETLKKIIDGKLSKTSKKGKTTHQLFEIVLPRVGQKTLFKNSKYNQFLVNSDTYMHNYQELWMPREYQRMWKDILLSNHGDAQIEGQLDQIFKFIVSQVNSYFNLYDINQFRKKIADATDKFAKLPTHDTDNARGKIATIGQLLIGLQANAMRSDLRNLDIKTPFGLLQIGTGITLDLDTSIIYQSPTGLFEREVPLTDL

SEQ ID NO: 274 - protein, 1389 aa, Lactobacillus casei
MIIRTYELKTITTIAILKMFQLLTGGLSMTKLGKPYGIGVDIGSNSIGFAAVDENSHLIRLKGKTVIGARLFEEGKAAADRRASRTTRRRLSRNRWRLSFLRDFFESHITPTGPNFFMRQKYSEISPKDKARYKYEKRLFNDRTDAEFYQQYPTMYHLRNRLLTDPSKADVREIYFAIHHILKSRGHFLTSGYAKDFNTNKVALNEIFPALQDAYAQVYPDLDITFDENKVNEFKTVLLNEKATPSDTQRALVNLLLAEDGDKDILKQQKQVLTEFAKAVVGLKTKLNVALGTEVDSSEATVWNFSLGQLDDKWAGIESAMTDEGTEILDQIRDLYRARLLNGIVPAGKTLSQAKVDDYAQHHEDLELFKDYLKQLEDDGTAKAIRQLYDRYIDGDDAKPFVREDFVKALTKEVTAHPNAKSPELLERLAQPDFMLKQRNKANGAIPVQMQQRELDQIIKNQSVYYDWLAAPNPVEKHRKSMPYQLDELLNFRIPYYVGPLVTAKEQKAAQGGVFAWMVRKDPDGNITPYNFDEKVDREASANTFIQRMKTTDTYLIGEDVLPKQSLLYQRYEVLNELNNVRVNNEKLSIEQKQQVIRELFERHNSVTIKQFAENLRAHGDYAHIPEIRGLADEKRFLSSLSTYRQLKSLLPDAIDDPAKQADIENIIAWSTVFEDAAIFKTKLKEINWLDSQTITKLSNIRYRGWGQFSHKFLNGLTLGNGHTIIQELFLSNNNLMQILTDETLQKKMTELNADKLKAANINDAIDDAYTSPSNKKALRQVLRVIEDIKRAADGQDPSWLYVETADGGGTPGKRTRARQHQLQEIYANAAHELIDSAVRGELEDKIADKADFNDRLVLYFMQGGRDIYTGTPLNIDQLSSYDIDHILPQSLIKDNSLDNRVLVHAIINREKNATFASTIYAQKMNATWRQWHEAGLISGRKLRNLQMRPDQIDKYASGFVARQLVETRQIIKLTEQIVAAQYPETKIIAVKAGLSHQLREELEFPKNRDVNHYHHAFDAFLAARIGTYLLKRFPNLQAFFTYGKFKKADVKKLRGFNFIRDITHAEDKIVVKDTGEVIWDKKRDVDELDRIYNFKRMLITHEVHFEKADLFKQTVYGAKDSKEAGGKKQLISKKKGYPVDIYGGYTQETGSYLSVVRLTKKAMYAVVKVSTRDAAKLAVAKSISEQKENETLNDIIDEKLSKISKNGKITHELFEVVLPRVGQKTLFKNSKYNLFLVNSDTYMHNYQELWMPREYQKMWKDISLSKYGDAQTEDQLDQIFGFIVSQVNSYFNLYDINQFRKKLNDAADKFATLPMRDTDDMQGKIATIGQLLIGLQANAARSDLRNLDIKTPLGLLQIPNGISLDSDTSVVYQSPTGLLEREVHLSDL

SEQ ID NO: 275 - protein, 1354 aa, Lactobacillus coryniformis
  Lactobacillus coryniformis subsp. coryniformis KCTC 3167
MTLHYNVGLDIGTNSVGYTIVDDNGKILQVKGKNGYGVRVFKEGATAAERRIFRTTHRRLKRRKWRLRLLQDFFEPYILPQDDGFFIRRKESNLVLNDRDEDTASLFNDRSDRDFYQAYPTIYHLRQALMTEKRQFDVREIYLAMHHIIKYRGHFLLNGTVNNFTNNKIDLHSDFEELNALLLNVIPELKFQIDLDHSTMFQTTLLNTTISRSGRQRDLVKSFYNGSDDKQLAKQQKSVATELLKAILGLKAKFHKLFNLDLLETTEWEFSFDAEDIDDKLAKLEPLMTENQQQVMDILQRIFAAITLNGIVPEGKTLSASKVDSYQKHKQDLKLLKAIAQHSDKKTATVLQTAYNEYINGIASKPLKQEDFYKRLTNAVKKSSDPQVADMLALIDQEKFLPKQRTKENGAIPHQLHQLELERIIDNQKDYYPWLAELNPNQARQKVAKYKLSELVAFRVPYYVGPLIEPEVQQATSNAHFAWMARKEAGPITPWNFDQKVDRNVSAERFIKRMTTKDTYLLAEDVLPLHSLLYQRFIVLNELNNVRVNGQKLTKKQKQAVYQDLFKRQPHVTKKQFKSYLVQTGEFAESSKIEGLANETSFNSGLTTENELRKIFGAQLDEARYQVDFEQIIEWATLFEDAKILRTKLAEITWLTTEQIEKLAGIRYRGWGRFSRKLLAGLRDQNGQQIIDLLWDTPNNFMVIVSQAAFSEAITKENEKLIDRRGAQDVITDLYTSPQNKKALRQVLAIVADVQKAMGGVPPQRIFIEFAREDEKNPRRSVERSRQLEKLYQTISNEFLINSEVRQELKEAVDQKVNFKDRLFLYFLQGGVDLYSGKRINIDQLSHYDIDHILPQSFIKDDSLDNRVLVSQKLNRSKSDSVPLSEFANYKFGPAMQAKWLQLKEAGLLSKRKYDNLTLDPTKLSKFAPLGFVNRQLVETRQVIKLAANLLASEETKVVTIKANMTHQVRKELDFPKNRNVNNYHHAFDAYLTAFVGIFLSKRYPKLKPYFTYGDFQKGNKLPDLKNFNFLYELKNKDRSIDSNTGEIIWDKQRDLAYMNKIYNFKKVTVVHEVLTKSGALYNQTLYKASEDKASGRGTKQLIRKKDNMPTELYGGYTGSTSAFMSIVRLWKKDKPYYKVVGIPTRMAAKLANQAQLLDYLTKKFTTRKLVKKTGDYKTTVERFELVVPKVGFNQLVIDGGQPFMLGSATYQYNARELFISKEAVKALNKQLSTHVDLVQVFDEILVQVNRWFPLYDTNGFREKLSHGRDRFMKLNDSFEEKSDTQIDVLNRILIGFHANAARTNLKILGLGTDLGFMTQQAGIRLTEKAILVHQSPSGLFERKVALRDLKGLR

SEQ ID NO: 276 - protein, 1119 aa, Lactobacillus coryniformis
  Lactobacillus coryniformis subsp. torquens KCTC 3535
MGYRIGLDVGITSTGYAVLKTDKNGLPYKILTLDSVIYPRAENPQTGASLAEPRRIKRGLRRRTRRTKFRKQRTQQLFIHSGLLSKPEIEQILATPQAKYSVYELRVAGLDRRLTNSELFRVLYFFIGHRGFKSNRKAELNPENEADKKQMGQLLNSIEEIRKAIAEKGYRTVGELYLKDPKYNDHKRNKGYIDGYLSTPNRQMLVDEIKQILDKQRELGNEKLTDEFYATYLLGDENRAGIFQAQRDFDEGPGAGPYAGDQIKKMVGKDIFEPTEDRAAKATYTFQYFNLLQKMTSLNYQNTTGDTWHTLNGLDRQAIIDAVFAKAEKPTKTYKPTDFGELRKLLKLPDDARFNLVNYGSLQTQKEIETVEKKTRFVDFKAYHDLVKVLPEEMWQSRQLLDHIGTALTLYSSDKRRRRYFAEELNLPAELIEKLLPLNFSKFGHLSIKSMQNIIPYLEMGQVYSEATTNTGYDFRKKQISKDTIREEITNPVVRRAVTKTIKIVEQIIRRYGKPDGINIELARELGRNFKERGDIQKRQDKNRQTNDKIAAELTELGIPVNGQNIIRYKLHKEQNGVDPYTGDQIPFERAFSEGYEVDHIIPYSISWDDSYTNKVLTSAKCNREKGNRIPMVYLANNEQRLNALTNIADNIIRNSRKRQKLLKQKLSDEELKDWKQRNINDTRFITRVLYNYFRQAIEFNPELEKKQRVLPLNGEVTSKIRSRWGFLKVREDGDLHHAIDATVIAAITPKFIQQVTKYSQHQEVKNNQALWHDAEIKDAEYAAEAQRMDADLFNKIFNGFPLPWPEFLDELLARISDNPVEMMKSRSWNTYTPIEIAKLKPVFVVRLANHKISGPAHLDTIRSAKLFDEKGIVLSRVSITKLKINKKGQVATGDGIYDPENSNNGDKVVYSAIRQALEAHNGSGELAFPDGYLEYVDHGTKKLVRKVRVAKKVSLPVRLKNKAAADNGSMVRIDVFNTGKKFVFVPIYIKDTVEQVLPNKAIARGKSLWYQITESDQFCFSLYPGDMVHIESKTGIKPKYSNKENNTSVVPIKNFYGYFDGADIATASILVRAHDSSYTARSIGIAGLLKFEKYQVDYFGRYHKVHEKKRQLFVKRDE

SEQ ID NO: 277 - protein, 1368 aa, Lactobacillus curvatus
  Lactobacillus curvatus CRL 705
MSRPYNIGLDIGTSSIGWSVVDDQSKLVSVRGKYGYGVRLYDEGQTAAERRSFRTTRRRLKRRKWRLGLLREIFEPYITPIDDTFFLRQKQSNLSPKDQRKLYTQTSLFNDRTDRAFYDDYPTIYHLRYRLMTEKRQFDIREIYLAMHHIVKYRGHFLNEAPVSSFKSSEINLVAHFDRLNTIFADLFSESGFQLETDKLAEVKALLLDNQQSASNRQRQALSLIYTPSTNKAVEKQNKAIATELLKAILGLKAKFNVLTGIEAEDVKAWTLTFNAENFDEEMVKLESSLDDNAHQIIESLQELYSGVLLAGIVPENQSLSQAMITKYDDHQKHLKMLKAVREALAPGDRQRLKQAYDQYVDGQENTKAYSKEDFYGDITKALKNNPDHPIVSEIKKLIELDQFMPKQRTKDNGAIPHQLHQQELDRIIENQQQYYPWLAELNPNSKRQTVAKYKLDELVAFRVPYYVGPLITAEQQRQSSDAKFAWLIRKAEGRITPWNFDDKVDRQASANEFIKRMTTTDTYLLAEDVLPKQSLIYQRFEVLNELNGLKIDDQPITTELKQAIFTDLFMQKISVTVKNIQDYLVSEKRYASRPAITGLSDENKFNSRLSTYHDLKMIVGDAVDDVDKQADLEKCIEWSTIFEDGKIYSAKLNEIDWLTDQQRVQLAAKRYRGWGRLSAKLLTQIVNANGQRIMDLLWDTTDNFMRIVHSEDFDKLITEANQMMLAENDVQDVINDLYTSPQNKKALRQILLVVNDIQKAMKGQAPERILIEFAREDEVNSRLSVQRKRQVEQVYQNISNELLNNTEIRNELKDLSNSALSNTRLFLYFMQGGRDMYTGDSLNIDRLSTYDIDHILPQSFIKDNSLDNRVLVSQKMNRSKADQVPTDFTSVELGQKMQIQWEQMLRAGLITKKKYDNLTLNPDHISKYAMKGFINRQLVETRQVIKLATNLLMEQYGEDNIELITVKSGLTHQMRTEFDFPKNRNLNNHHHAFDAYLTAFVGLYLLKRYPKLKPYFVYGEYQKASQQDKWRNFNFLNGLKKDELVDENTEAVIWDKESGLAYLNKIYQFKKILVTRGVHENSGALFNQTLYAAKDDKASGQGGKQLIPAKQDRSTALYGGYSGKTVAYMCIVRIKNKKGDLYKVCGVETSWLAQLKQLTDEDSQKAFLEQKISPQFTKVKKQKGNIIEAVEEFEVIAPHILINQRFFDNGQELTLGSATYKHNEQELILDKTAVKLLNGALPLTQSEELAEQVYDEILDQVMHYFPLYDTNQFRAKLSTGKAAFMKLPWKSQWDGNKMVQVGQQVILDRILIGLHANAAMSDLKVLKMTTPFGMIQQSTGITLSADTQIIYQSPTGLFERRVALRDL

SEQ ID NO: 278 - protein, 1126 aa, Lactobacillus farciminis
  Lactobacillus farciminis KCTC 3681
MADRISLGLDIGVASVGFSVLDIDKGKVIELGARLFSATVAAGNQDRRDMRGARRLLNRNKQRRQDTGKLFKKFGLIDDFDKGSFYDNFNQNLNPYELRVKGLTEQLTKEELAESLYQIVKHRGISYALKDADVDEGGTDYSVSLKINSQELAEKTPAQIQLQRLNDYGKVRGQVVIGDDPDNQKVLLNVFPTSAYEKEAKQIIATQQQFYPESLTDKFTEEYCQILTRKRDYFVGPGNEKSRTDYGIYKTDGRTLDNLFEELIGHDKIYPEELRASAASYTAQLFNVLNDLNNLRILNYEDGKLTKEDKEKIIAEIKNNTTTINMLNVIKKVAGCSKDDIKGFRVNEKDKPEISSMPVYRKIHKDLLKAGVDISDWPVEFIDELSFILTLNTENGEIRKQLNNRLAPKFDFLNADLIQLIIDNKDSFEIKTNNKWHRFSVKTMNKLIPEMMERPVEQMTLLNEMGLVKKDKKRFENNKYLPYKEIAKDIFNPVASKSVREALKIVNAVLKKYGHIDYLVVEMPRDKNLKEEQDNIKEFQNKNKKAKDAAFEAFVKSVGSEQRVKEALSKNRKLQMKMRLWYQQQEIDPYNGKTIDATDLINNPDKFEIDHIIPQSISFYDSINNKTLCFASMNQVKGQKTPYEFMLEGHGQSYDKFKATVMANKNFGKAKRANYLFEENVSDIETRKRFLSRNLVDTRYSSRVVLNSLQDFFREKSADTKVTVIRGKFTSNMRKHWHIDKTRETFHHHAIDASIIAATPFLRMWKKGGTIFPVKVGEESIDIETGEILDDKNFDKAMYEEPYSGFVSEIMNADDRIKFSHQVDKKMNRKVSDATIYSTRTGKLAKDKKDAEYIVAKVKDIYSVDGFKKFKKVYDKDKTKFLLYKYDPRTFSKLERIISDCPDKVEKVQTNGKVKAVDISPFEMYRRDHGMIKKYSKKGNGPAIKQLKYLDKKLGSHIDITPANANGKHVILQSLKPWRTDVYLNHETGEYEIMGIKYSDLKFNKNEGYGIKKDKYLEIKKVEEVSEKSEFMFSLYRKDRVKVQDMKTGESVELLFWSRNFSNKKYAELKPISQAENDKKLPVYGKGRLIKRLIPKNCKIWKVNTTILGDPYYLEKESDSPKDILD

SEQ ID NO: 279 - protein, 1356 aa, Lactobacillus farciminis
  Lactobacillus farciminis KCTC 3681
MTKKEQPYNIGLDIGTSSVGWAVTNDNYDLLNIKKKNLWGVRLFEEAQTAKETRLNRSTRRRYRRRKNRINWLNEIFSEELAKTDPSFLIRLQNSWVSKKDPDRKRDKYNLFIDGPYTDKEYYREFPTIFHLRKELILNKDKADIRLIYLALHNILKYRGNFTYEHQKFNISNLNNNLSKELIELNQQLIKYDISFPDDCDWNHISDILIGRGNATQKSSNILKDFTLDKETKKLLKEVINLILGNVAHLNTIFKTSLTKDEEKLNFSGKDIESKLDDLDSILDDDQFTVLDAANRIYSTITLNEILNGESYFSMAKVNQYENHAIDLCKLRDMWHTTKNEEAVEQSRQAYDDYINKPKYGTKELYTSLKKFLKVALPTNLAKEAEEKISKGTYLVKPRNSENGVVPYQLNKIEMEKIIDNQSQYYPFLKENKEKLLSILSFRIPYYVGPLQSAEKNPFAWMERKSNGHARPWNFDEIVDREKSSNKFIRRMTVTDSYLVGEPVLPKNSLIYQRYEVLNELNNIRITENLKTNPIGSRLTVETKQRIYNELFKKYKKVTVKKLTKWLIAQGYYKNPILIGLSQKDEFNSTLTTYLDMKKIFGSSFMEDNKNYDQIEELIEWLTIFEDKQILNEKLHSSKYSYTPDQIKKISNMRYKGWGRLSKKILMDITTETNTPQLLQLSNYSILDLMWATNNNFISIMSNDKYDFKNYIENHNLNKNEDQNISDLVNDIHVSPALKRGITQSIKIVQEIVKFMGHAPKHIFIEVTRETKKSEITTSREKRIKRLQSKLLNKANDFKPQLREYLVPNKKIQEELKKHKNDLSSERIMLYFLQNGKSLYSEESLNINKLSDYQVDHILPRTYIPDDSLENKALVLAKENQRKADDLLLNSNVIDRNLERWTYMLNNNMIGLKKFKNLTRRVITDKDKLGFIHRQLVQTSQMVKGVANILDNMYKNQGTTCIQARANLSTAFRKALSGQDDTYHFKHPELVKNRNVNDFHHAQDAYLASFLGTYRLRRFPTNEMLLMNGEYNKFYGQVKELYSKKKKLPDSRKNGFIISPLVNGTTQYDRNTGEIIWNVGFRDKILKIFNYHQCNVTRKTEIKTGQFYDQTIYSPKNPKYKKLIAQKKDMDPNIYGGFSGDNKSSITIVKIDNNKIKPVAIPIRLINDLKDKKTLQNWLEENVKHKKSIQIIKNNVPIGQIIYSKKVGLLSLNSDREVANRQQLILPPEHSALLRLLQIPDEDLDQILAFYDKNILVEILQELITKMKKFYPFYKGEREFLIANIENFNQATTSEKVNSLEELITLLHANSTSAHLIFNNIEKKAFGRKTHGLTLNNTDFIYQSVTGLYETRIHIE

SEQ ID NO: 280 - protein, 1313 aa, Lactobacillus fermentum
  Lactobacillus fermentum 28-3-CHN
MHYLDEIFAPHLQEVDENFLRRLKQSNIHPEDPAKNQAFIGKLLFPDLLKKNERGYPTLIKMRDELPVEQRAHYPVTNIYKLREAMINEDRQFDLREVYLAVHHIMKYRGHFLNNASVDKFKVGRIDFYKSFNVLNEAYEELQNGEGSFTIEPSKVEKIGQLLLDTKMRKLNRQKAVAKLLEVKVADKEETKRNKQIATAMSKLVLGYKADFATVAMANGNEWKIDLSSETSEDEIEKFREELSDAQNDILTEITSLFSQIMLNEIVPNGMSISESMMDRYWTHERQLAEVKEYLATQPASARKEFDQVYNKYIGQAPKERGFDLEKGLKKILSKKENWKEIDELLKAGDFLPKQRTSANGVIPHQMHQQELDRIIEKQAKYYPWLATENPATGERDRHQAKYELDQLVSFRIPYYVGPLVTPEVQKATSGAKFAWAKRKEDGEITPWNLWDKIDRAESAEAFIKRMTVKDTYLLNEDVLPANSLLYQKYNVLNELNNVRVNGRRLSVGIKQDIYTELFKKKKTVKVSDVASLVMAKTRGVNKPSVEGLSDPKKFNSNLATYLDLKSIVGDKVDDNRYQTDLENIIEWRSVFEDGEIFADKLTEVEWLTDQQRSALVKKRYKGWGRLSKKLLTGIVDENGQRIIDLMWNTDQNFMQIVNQPVFKEQIDQLNQKAITNDGMTLREWVESVLDGAYTSPQNKKAIWQVVRVVEDIVKAVGNAPKSISIEFARNEGNKGEITRSRRTQLQKLFEDQAHELVKDTSLTEELEKAPDLSDRYYLYFTQGGKDMYTGDPINFDEISTKYDIDHILPQSFVKDDSLDNRVLVSRAENNKKSDRVPAKLYAAKMKPYWNQLLKQGLITQRKFENLTMDVDQNIKYRSLGFVKRQLVETRQVIKLTANILGSMYQEAGTDIIETRAGLTKQLREEFDLPKVREVNDYHHAVDAYLTTFAGQYLNRRYPKLRSFFVYGEYMKFKHGSDLKLRNFNFFHELMEGDKSQGKVVDQQTGELITTRDEVAKSFDRLLNMKYMLVSKEVHDRSDQLYGATIVTAKESGKLTSPIEIKKKRPVDLYGAYTNGTSAFMTIIKFTGNKPKYKVIGVPTTSAVGLKRVGKPGSESYNQELHRIIKSNPKVKKDFEIVVPHVSYSQLIVDDDCKFTLASDTYQHPATQLVLSKESMEIIADDFKFVKENTATADEQLVRVFDEIVNQMNHYFTIFDQRSNRQKVTKARDKFVSLPTESEYEGAKKTQVGKTEVITNLLMGLHANSAQGDLKVLGLSTFGFFQSSGGLNLSEDAMIVYQSPTGLFERRICLKDI

SEQ ID NO: 281 - protein, 1381 aa, Lactobacillus fermentum
  Lactobacillus fermentum ATCC 14931
MDYVKEYHIGLDIGTSSIGWAVTDSQFKLMRIKGKTAIGVRLFEEGKTAAERRTFRTTRRRLKRRKWRLHYLDKIFAPHLQEVDENFLRRLKQSNIHPEDPAKNQAFIGKLLFPDLLKKNERGYPTLIKMRDELPVEQRAHYPVTNIYKLREAMINEDRQFDLREVYLAVHHIVKYRGHFLNNASVDKFKVGRIDFDKSFNVLNEAYEELQNGEGSFTIEPSKVEKIGQLLLDTKMRKLDRQKAVAKLLEVKVADKEETKRNKQIATAMSKLVLGYKADFATVAMANGNEWKIDLSSETSEDEIEKFREELSDAQNDILTEITSLFSQIMLNAIVPNGMSISESMMDRYWTHERQLAEVKEYLATQPASARKEFDQVYNKYIGQVPKEKGFDLEKGLKKILSKKENWKEIDELLKAGDFLPKQRTSANGVIPHQMHQQELDRIIEKQAKYYPWLATENPATGERDRHQAKYELDQLVSFRIPYYVGPLVTPEVQKATSGAKFAWAKRKEDGEITPWNLWDKIDRAESAEAFIKRMTVKDTYLLNEDVLPANSLLYQKYNVLNELNNVRVNGRRLSVGIKQDIYTELFKKKKTVKAGDVASLVMAKTRGVNKPSVEGLSDPKKFNSNLATYLDLKSIMGDKVDDNRYQMDLENIIEWRSVFEDGEIFADKLTEVEWLTDEQRSALVKKRYKGWGRLSKKLLTGIVDENGQRIIDLMWNTDQNFMQIVNQPVFKEQIDQLNQKAITNDGMTLRERVESVLDDAYTSPQNKKAIWQVVRVVEDIVKAVGNAPKSISIEFARNEGNKGEITRSRRTQLQKLFEDQAHELVKDTSLTEELEKAPDLSDRYYFYFTQGGKDMYTGDPINFDEISTKYDIDHILPQSFVKDDSLDNRVLVSRAENNKKSDRVPAKLYAAKMKPYWNQLLKQGLITQRKFENLTMDVDQNIKYRSLGFVKRQLVETRQVIKLTANILGSMYQEAGTDIIETRAGLTKQLREEFDLPKVREVNDYHHAVDAYLTTFAGQYLNRRYPKLRSFFVYGEYMKFKHGSDLKLRNFNFFHELMEGDKSQGKVVDQQTGELITTRDEVAKSFDRLLNMKYMLVSKEVHDRSDQLYGATIVTAKESGKLTSPIEIKKNRPVDLYGAYTNGTSAFMTIIKFTGNKPKYKVIGVPTTSAVGLKRVGKPGSESYNQELHRIIKSNPKVKKDFEIVVPHVSYSQLIVDGDCKFTLASDTYQHPATQLVLSKESMEIIADDFKFVKENPATADEQLVRVFDEIVNQMNHYFTIFDQRSNRQKVTKARDKFVSLPTESEYEGAKKTQVGKTEVITNLLMGLHANAAQGDLKVLGLSTFGFFQSSGGLNLSEDAMIVYQSPTGLFERRICLKDI

SEQ ID NO: 282 - protein, 1327 aa, Lactobacillus florum
  Lactobacillus florum 2F
MTEQQQPYNIGLDIGTSSIGWAVTDQNDKLLHIRGHNGIGVRLFKEGESAAERRGFRTTRRRLSRRRWRLRFLDRIFDAELAKVDPNFLARLKQSNISPLDPNKQMFGNILFDDPQFDDQKFHQQYPTIYHLRSALAQPDAPQADVRLIYLALHHMIKFRGHFLNGAAVEKFHGGQLHLESEFQELNQIFSNQQRDHVQLQTSSLDEVATILKDNQRTPSDRQRELSARLFVPVDKTIDKENKKLATELLKAVLGLKAKFDVILGVEATDPQAFKLQFSSDDFDDKIAELASELTDEANEILTVLQRLYFSLNLADILTNRQTKQVADSISTAMINRYDDHKHHLKMLKELEAQVTQEQRDGLKKAYDEYIDGDKPTIDTFYTNIKKNLDDSELANQIKSLIDLQAFMPKQRSKENGSIPHQLHQRELDQLIEVQGKYYPWLLAAKDKLDALIAFRVPYYVGPMIDPNQSDDPQNTKFAWMVRKEAGEITPWNFEEKVDKTSSATNFIKRMTTTDTYLLGEPVLPKNSLLYQQFTVLNELNKLKVNGKALTVDQKKYLYEHVCKKQRRVTLKKLSDCLMARGDFPMGAIFTGTTDQKNMNNTLKTYQDFQEIFGDEIDNPDRQVDFEKMIEWSAIFEDREIFKLKLAELNWLTSEQLERVSKKRYQGWGRLSQKLLTHIVNENGERIIDQLWNTNQNFMEIMGQDSVKQAIQEHNGANVAQTGINETIDELYTSPQNKKAIRQILLVVDDIKKAVGYAPANIMMEFAREDRDDHRLIASRARQLEKTYQEISKNWFDNESVTQELKDQIKNKTKFTDRLYLYFIQGGIDLYTGHPLNIDQLSSYDIDHILPQSFLLDNSLNNRVLTSQAENRVHKEDRLPGETVANKMRPTWKMMREQGLMTQRKYNNLTLKPDQISKFNNRGQFINRQLVETRQVIKLAADIMSQKYQADQTKVVTVKANLTHHMREKFNFYKSRNVNDYHHAFDAYLTLFVGNWLLKEYPKLQPYFVYGDFAKTGTNNLKSFNFLYRFERDHKLNDKGAIDTDKDQQLGYMKRIYRFKKMLVTKQLETNEGALYGQTLYPAPKNDKKTRNLINSKKNRPSDIYGGYSNENGSFLTLVKLKKGSKYDYRLVAVPVSKISEIKESELATIEKAIAPQFLKSSGKYRDFQVVLSKILINQKVIDDGMIFTIGSKSYKHNAKQVVLSDNSIQIVSTLSRISDKEKLITVFDEIVDITSKYLPWYKVNDVEKTKMLFRQMQDIDEMKKIIDNSLIGLHCNASITDLGKVGLSKYWGRFVLTAGISLTVDAQLIYQSPTGLFEHRVKVSDL

SEQ ID NO: 283 - protein, 1391 aa, Lactobacillus gasseri
  Lactobacillus gasseri JV-V03
MTKIKNEYIVGLDVGTNSCGWVAMDFQNTILRMHGKTAIGSHLFDAGNSAADRRAFRTTRRRIKRRKWRLKLLEEIFDPYMTEVDPYFFARLKESGLSPLDKRKNVSSIVFPTALEDKKFYCNYPTIYHLRYDLMSEDKKFDLREIYLAIHHIVKYRGNFLYNTPVKDFEASKIDVKDSLEKLNELYERLDSEFTVELDSSNALEIEKIIRDKKVFKINKVKSIHQLLSLKTENKERTKLIKDVSKQIINAILGYKTKFETILLKNISKDEADDWEFKLTDVDADNKFENLIGDLNENEQEILLEIRNLANAITLSNIVEEGKTLSESMIDKYNKHSDDLELLKQVISDHPDRDKAKKLALAYDLYVNNRHGKLLQAKDVLGSKKTLSKEDFYKEVKKNLDDSKASQEILDTIALDSFMPKQRTNENGVIPYQLHQLELDRIIKNQGKYYPFLKEVNPVSSHLKEAPYKLDELIRFRVPYYVGPLISPNESTKNKQTKKNQNFAWMIRKEQGQITPWNFDQKVDRMASANKFIKRMTTKDTYLLGEDVLPANSLLYQKFTVLNELNNIKINGKRISVPLKEELYNNLFKKNSTVTTNKLKSYLKENYNLINVEIKGLADEKKFNSGLTTYNKLRNLKIFDQQLDDLNYDKDFERIIEWSTIFEDKAIYKDKLKTIKWLSDRQIDKLSKIRMQGWGQLSKKLLSQLTDNNGQTIIEQLWDSQNNFMQIVNQSDFKDAIAVANQNLLVNTSVEDILNEAYTSPANKKAIRQVVKVVDDIVKAASGKVPKQIAIEFTRDADDKAKISQTRANKLRKVYKELSNELASETIRNELERVAKDQKLLKDKYYLYFMQLGRDAYTGEPINIDDLGQYDIDHILPQSFIKDDSLENRVLVKKAVNNGKSDNVPVKLYGNRMAADLGMTIRHMWEKWKDQGLITKTKYNNLIIDPDKINKYESSGFIHRQLVETSQIIKLVSTILQSKYPDTEIIVVKARYNHYLRKHLNLYKSREVNDYHHAIDAYLSAICGNLLYQVYPYLRPFFVYGQYKKFSSDPKKEKIIYDKTRKYNFISQIFENKSNDIISLETKKKVFDKKDIIEKLKHAYNYKYMLVSRETETHDQEMFKMTVYPRLSRDTKKSRNLISKKKDMPTEIYGGYTNNSDAYMVIARINKKKGTEYRVFGVPMRELVNLRKAEKNGRYNAYLKQVLEPEIMYSKNGKKNKTISSFEIVKAKVPYKQVILDGDKKFMLASSTYVQNAKQLTLSQNSMQAITDNCENDTEEEKALEEKALIEAYDEILTNIDKYLPLFDINKFREKLHAGREKFINLSLDVKKDTILQVLNGLHDNAVMPKIKSLGLSTPLGFMQFSSGVPLSENAKLIYQSPTGLFEKRVKISDL

SEQ ID NO: 284 - protein, 1386 aa, Lactobacillus hominis
  Lactobacillus hominis CRBIP 24.179
MTKITEDYIVGLDIGTNSCGWVAMDSKNTILRMHGKTAIGSHLFDAGNSAADRRAFRTTRRRIKRRKWRLKLLEEIFDSHLAKVDPYFFARLKESGLSPLDTRKNVSSIIYPTSLEDKKFYVDNPTIYHLRYKLMTEDRKFDLREVYLAIHHIVKYRGNFLYNTPVKAFEASKIDVKGSLKKLNELYEGLDSEFNVELDSNNALEIENIIRDKKIFKINKVKEINQLLSLKTEDKERTKLMKDVSKQIVNAILGYKTKFETILLKDVSKDEADDWEFKLTDVDADNKFENLIGDLNENEQEILLVIRKLANAITLSNIVEEGKTLSESMKDKYKKHSDDLKLLKQVISDHPDRDKAKKLALAYDLYVNNRHGKILQAKDILEKKKTLSKEDFYKEIKKNLDDSKESQEILDAISLDSFMPKQRTNENGVIPYQLHQLELDKIIENQGKYYPFLKEVNPVSSHLKQAPYKLDELIRFRVPYYVGPLISPNESTKNKQTKKNQNFAWMIRKEQGQITPWNFDQKVDRMASANKFIKRMTTIDTYLLGEDVLPANSLLYQKFTVLNELNNVKINGKRISVPLKQELYNNLFKKNSTVTTNKLKSYLKENYKLIKVEIKGLSDEKKFNSGLTTYNKLKNLKIFDQQIDDPNYNKDFERIIEWSTIFEDKAIYKEKLKTIDWLSDRQIDKLSKIRMQGWGQLSKKLLSQLTDNNGQTIIEQLWDSQNNFMQIVNQADFKDAIAVANQNLLVDTSVEDILNEAYTSPANKKAIRQVVKVVDDIVKATSGKVPKQIAIEFTRDADDNAKISQSRANKLRKVYKEMSNELASETIRNELERVAKDQKLLKDKHYLYFMQLGRDAYTGELIDIDNLEQYDIDHVLPQSFIKDDSLENRVLVKKAVNNGKSDNVPVKLYGNRMATDLGMTIRHMWEKWKEQGLITKTKYNNLIIDPDKINKYESSGFIHRQLVETSQIIKLVSTILQSKYPDTEIIVVKARYNHYLRKRLNLYKSREVNDYHHAIDAYLSAICGNLLYQVYPYLRPFFVYGQYKKFSSEPEKEKIIYDKTRRYNFISQIFENKDNDIISRETKKKVFDKKDIIEKLKRAYNYKYMLVSRETETHDQEMFKMTVYPRLSRDTKKSRNLIPKKKDMPTEIYGGYTNNSDAYMIIARINKKKGPEYRVFGVPMRELVNLRKAEKNGHYKAYLKQVLEPEIMYSKNGKKNKTISSFEIVKAKVPYKQVILDGDKKFMLASSTYVQNAKQLTLSQYSMQAITDNCENDTEEEKALVEAYDEILTNIDKYLPLFDINKFREKLHAGREKFVDLPLAEKKETILQVLNGLHDNAVMPKIKSLGLSTPLGFMQFHTGVSLSENAKLIYQSPTGLFEKRLKISDL

SEQ ID NO: 285 - protein, 1369 aa, Lactobacillus iners
  Lactobacillus iners LactinV 11V1-d
MNNNYYLGLDLGTNSVGWAVTDDHYNIIKFHGKHMWGMRLFEEAETAKDRRLHRQARRRRQRLVERINLLEELFDKEISKVDQGFFARKKESDLHFEDKTTKSEYALFNDKSYTDRDYYKQYPTIFHLIMDLIENDKKRDIRLVYLACHYLIKHRGHFIFDGKNFTVDNSFENLLDKLITYLKDNDDITLSFPKDQLINIFKNSNLNSTEKSDQLKPFFGRTNLEKGIIKLLSGGKQDLSNMFRDETLKNSNYKNLKFSDNRFDDERDGYAADLGDRIDLLILLKQIYDASILESMMSQARVSIDGHKYISSAKVCAYEKHKSDLKRLKSLIKKYLPSEYNNIFRKITEKDNYVAYSKSNITNNKREKALKYVKYVDFTKYLTKKLKTIKTQDAEDDQEIFEIKGELEKQSFLPKQRTLDNSIIPYQLHLMELKKILDNQSKYYDFLLAKDDQEGITVKDKIISLLTFRLPYYIGPVNPAVHGKFAWVKRLANGKVTPWNYKEKIDIDASHEEFIKTKLSKCSFLIGCDVLPKNSLLYQKYMVLSELNTIKFNGVNISEKLKDDIYQNLFKNIQKVTKKRLQNYIKEHENIIGDVIVTGIDNAFKQGLVSYLKFKKIIGDKVDDDRYQKVLEKIIRDITLYDECAGKKIKKEYKDSDLFTEDELNKIVKLTFNDWGRLSAELLDQLEGEDTVSGETGKIIEFMQKHNYNLMQLMSKKFTFKSKIDEINKSYYQHDKFNYKSMIDSLYVSPATKRILWQSLKVVHEISKIMKHDPEKIFIEMARSKEDHPKRKLSRKADLKQVYKDSKKQIISIIGKDKYQDLSNELDNKDDRDLRWDNLYLYYTQLGRSMYSLKPIDISELMNKNLYDQDHIFPKSKKYDDSIENRVLVEKELNVKKSDIYPISDANIIPQKIKGQVESFWKMLYDHKLIGDKKYARLIRSKAFTDDELAGFIARQLVETRQATKETADLLKRLCPKSRIVYAKAQNASIFRQKFDIPKSRTINDLHHAQDAYLNIVVGNIFDTKFTQDPRNFIKNTKDSRNYNLEKIYDYNVERNNYVAWIAPDGETNGTIANVKCNLSTKDFRVTRPSFYKKGALFNQNLSRKGSNLAPIKEHSPKSNPLKYGGYSGKNNSFFVVVAGKDNKGKDIVKLIPVNTLIYNKMLHCDYKAKQELLTSYVANNFAINNFRIVKDDIKMYSLVKIDGAYYYLVGGTDERIEVKNAMQLLLSKDSIKAVKILEKESKDQFANIKNYKDIDIKLGRTFNEVVSKYTNSVFGKSMLISDKYRKDIFKSVEKSILEFNHLDTIGKADNLLKFVTLMRPSGSAHSLKMVGLIERIRKSNVISNFNEFKLINQSVTGLFENEEDLLKL

SEQ ID NO: 286 - protein, 1391 aa, Lactobacillus jensenii
  Lactobacillus jensenii 269-3
MKEIKDYIIGLDIGTNSCGYVVTDKQNNILKLKGKTAIGARLFKEGEAAADRRAFRTTRRRLARRRWRLSLLEEIFDEEMNKVDPSFFRRLKESDYSPKDRRKQFNSIVFESSEADKAFYEKYPTIYHLRNALMHDNQKHDLREIFLAVHHIVKYRGNFLREDSVKAFKAAKFTLQGEDGIGPVDKLNDLLKEIYIEAAPELATDNLSKIEDIIKDKKLYKQDKLKQIANLLPKAVDSKDKAKLNKDIAKQVANALMGYMFRLDTLFSFTDVDVKDYKLKFSDANIDESLDALTSLLTDAQIEFVLELQSIYNTIVLNEIVPDGMSLSESMVKKYDDHKKDLKLYKEYIDSLSDQKKAKQLEAAYALYVNYRKADLLAAKKLFEKKKIGDKKFVDVISNFEVFGKFVSDNLDDSELANKIKARLDLGEFLPKQRTNQNGVIPYQLHQVELTQILEKQGKYYPFLITPNPVESHRNNAPYEISELVSFRVPYYVGPLIDNQSIKDKQNKNKFAWMVRQKQGQITPWNFEEMVDTTESANQFIKRMTRKDTYLLAEDVLPKSSLIYQKFMILDELNRIKIDGKKLTSKLKHDIFEKLFKKQKSINLDNLKNYLLAEGNIPGLIEGLSDGINFNNSFSTYIDYRNIFGDEIDNPNKQADFEKMIEWSTVFEDRKIFKRKLKEITWLTPEQIKQVSSKRYSGWGRLSKKLLTQITDENGVNILQRLWNEPETLTEVLANPVIKRKISEANSLFVQINKVENILDDAYTSPQNKKAIRQVIRVVDDIIAAAHGKKPSQIAIEFARSSQNKAKVPDTRKKQLDKIYNKISSEILDSSIKNELKNLKSNKYLSKDKLFLYFKQMGRDAYTGDKLSLDQLQNYDIDHIFPRSFIKDDSLDNRVLTQKPINAKKSDYGIPALEFGNKYVPDLGITVKEMWKLWQENGLISKSKLINLCTNPKKIGSKRASGFINRQLVETSQVIKLVAIILQAEFPDTEIIEVKALQNTTLRESFHLYKNRSVNDYHHAIDAYLTTIVGNYLYQVYPKLRPYFVYGQFKKFNQEKNIDILKRLKNFNFLRQLIFNTDDNIYISGTKEIVFNKKDIIHKLETAYGYKYMNISRECYQETSSLFNQTLYAHNSSVKNSLIPKKKGLPTEIYGGYSGNKDSFFVLVKIVKKRTNLYRIVGIPTRELAKLNSSNNYNQALNKIVESKLCLKETESFKILIKRLLYGTLIVDNGQKFRIGSFKEKHNVQQLVLQLKSMKYIKFYIDGGQNYFTDVERKKLEKQDRDKCLLYVFDDIMNVVNKRFTLFDMSKYEKDGDSLREKFNCLDFNDKVSILSDLLKAFHANSDRTSITKLKITNLGRHQAGKNGITLTTNAQIIYQSPTGLFERRIKIKDL

SEQ ID NO: 287 - protein, 1395 aa, Lactobacillus jensenii
  Lactobacillus jensenii 27-2-CHN
MKEIKDYIIGLDIGTNSCGYVVTDKQNNILKLKGKTAIGARLFKEGQAAADRRSFRTTRRRLARRHWRLGLLEEIFDPEMEKIDPNFFRRLKESDYSPKDSRKQFNAIVFKSIKADKRFYKKYPTIYHLRNALMHDNQKHDLREIFMAVHHIVKYRGNFLREDSVNAFKAAKFSLRGEDGIGPVDKLNDLLKEIYSEYSPELATNNLSKIEDIIKDKNLYKQDKLKQVATLLIKEADSKDKAKLNKDIAKQVANSFMGYMFRLDTLFSLTDVDVKDYKLKFSDANIDESLDDLTSLLTDAQIEFVLELQSIYNTIVLNEIVPDGMSLSESMIKKYDDHKEDLKIFKEYIDSLSDQKKAKKLLSAYNLYVNYRKSDLVEAKNLFKNKKVGDKNFADVISNFEVFGKFVSDNLDDSELANKIKARLDLGEFLPKQRTNQNGVIPYQLHQVELTQILEKQGKYYPFLITPNPVESHRNNAPYEISELVSFRVPYYVGPLIDNQSIKDKQNKNKFAWMVRQKQGQITPWNLEEMVDTTESANQFIKRMTRKDTYLLAEDVLPKSSLVYQKFMILDELNRIKIDGKKLTSELKHDIFEKLFKKQKSINLDNLKNYLLVEGNIPGLIEGLSDGINFNNSFSTYIDYRNIFGDEIDNPNKQADFEKMIEWSTVFEDRKIFKRKLKEITWLTSEQIKQVSSKRYSGWGRLSKKLLTQITDENGVNILQRLWNEPETLTEVLANPVIKRKIVEANSSFTKAKDMKDILVEAYTSPQNKKAIRQVMRVVDDIIAAAHGKKPSQIAIEFAREDQDNPQMTKSRKAQLDQIYAKISDEFLDDAVKNELKNMKDNKPLAKDKVFLYFKQMGRDAYSGEKLSLDNLQDYDIDHIYPQSFIKDDSFDNRVLVQRAYNNGKSDNVPVLLFGNKIAAGLGITIRQMWKKWLELGLISKRKFNNLITDPEKISRNMASGFVNRQLVETSQVIKLVANILQAKLPDTEIIEVKASYNSILRKEFNLYKSREVNDYHHAIDAYLTTIVGNYLYQVYPKLRPYFVYGQFKKFGKAENQEDDPVKKIKKFNFIYQLIWGKDDAICISHTNQQVFSKKDIIDKLTTAYNFKYMNISHAVYTRNNNMFKQTLFPIIERTTAKTKSLIPKKLDRPTDIYGGYSNNNDAYLALVKVDKKRGSEYRVVGIPMRAAAMLKASKNYDEDLRKVIEPMVMFDKNGKAKRGIEGFRVLVGKMPFKQAVLDGNKKFMLTGTVDTPNLKQLVLSQQNMKYILDYIEDVDCRKHKFGDKVQNPDKCLLEVFDEIIEIVDKYFELFDSRDFREKLRNSRNKFIKLEASKKADTILAILKGLQAKSTRATIKELNISDFGRIITSSISPEAQLIYQSPTGLFERRVKVKDL

SEQ ID NO: 288 - protein, 1375 aa, Lactobacillus johnsonii
MTKIKDDYIVGLDIGTDSCGWVAMNSNNDILKLQGKTAIGSRLFEGGKSAAERRLFRTTHRRIKRRRWRLKLLEEFFDPYMAEVDPYFFARLKESGLSPLDKRKTVSSIVFPTSAEDKKFYDDYPTIYHLRYKLMTEDEKFDLREVYLAIHHIIKYRGNFLYNTSVKDFKASKIDVKSSIEKLNELYENLGLDLNVEFNISNTAEIEKVLKDKQIFKRDKVKKIAELFAIKTDNKEQSKRIKDISKQVANAVLGYKTRFDTIALKEISKDELSDWNFKLSDIDADSKFEALMGNLDENEQAILLTIKELFNEVTLNGIVEDGNTLSESMINKYNDHRDDLKLLKEVIENHIDRKKAKELALAYDLYVNNRHGQLLQAKKKLGKIKPRSKEDFYKVVNKNLDDSRASKEIKKKIELDSFMPKQRTNANGVIPYQLQQLELDKIIENQSKYYPFLKEINPVSSHLKEAPYKLDELIRFRVPYYVGPLISPNESTKDIQTKKNQNFAWMIRKEEGRITPWNFDQKVDRIESANKFIKRMTTKDTYLFGEDVLPANSLLYQKFTVLNELNNIRINGKRISVDLKQEIYENLFKKHTTVTVKKLENYLKENHNLVKVEIKGLADEKKFNSGLTTYNRFKNLNIFDNQIDDLKYRNDFEKIIEWSTIFEDKSIYKEKLRSIDWLNEKQINALSNIRLQGWGRLSKKLLAQLHDHNGQTIIEQLWDSQNNFMQIVTQADFKDAIAKANQNLLVATSVEDILNNAYTSPANKKAIRQVIKVVDDIVKAASGKVPKQIAIEFTRDADENPKRSQTRGSKLQKVYKDLSTELASKTIAEELNEAIKDKKLVQDKYYLYFMQLGRDAYTGEPINIDEIQKYDIDHILPQSFIKDDALDNRVLVSRAVNNGKSDNVPVKLFGNEMAANLGMTIRKMWEEWKNIGLISKTKYNNLLTDPDHINKYKSAGFIRRQLVETSQIIKLVSTILQSRYPNTEIITVKAKYNHYLREKFDLYKSREVNDYHHAIDAYLSAICGNLLYQNYPNLRPFFVYGQYKKFSSDPDKEKAIFNKTRKFSFISQLLKNKSENSKEIAKKLKRAYQFKYMLVSRETETRDQEMFKMTVYPRFSHDTVKAPRNLIPKKMGMSPDIYGGYTNNSDAYMVIVRIDKKKGTEYKILGIPTRELVNLKKAEKEDHYKSYLKEILTPRILYNKNGKRDKKITSFEIVKSKIPYKQVIQDGDKKFMLGSSTYVYNAKQLTLSTESMKAITNNFDKDSDENDALIKAYDEILDKVDKYLPLFDINKFREKLHSGREKFIKLSLEDKKDTILKVLEGLHDNAVMTKIPTIGLSTPLGFMQFPNGVILSENAKLIYQSPTGLFKKSVKISDL

SEQ ID NO: 289 - protein, 1382 aa, Lactobacillus mucosae
  Lactobacillus mucosae LM1
MDIGTNSIGWTAIDDHFSLLRVKGKNAIGVRTFKEGETAADRRGFRTARRRLSRRRWRLQFLDEFFAPYLAEVDPNFLARLKQSDISAKDPAKNQEYMGKLLFPDQEAASDGNGYPTLIQMRKAMPAEKAADFPVFNIYQLRYALMNEKRKFDLREIYLAVHHIVKYRGNFLNNTSVDKFKADQIDFNKSFETLNDLFRQVQPIAPFQIDLTKVDELGKLLLDTKQKKLDRQKAVAKLLPLIEDGTDKEIVKAHQQTAREISKLILGYKAKVGLILQNNLDQTLDMSTENSDDQLMQIAEELDDYQMELINQLSLLYSQIMLNEIVPNGETVSASMLNRYYKHRCQLKELKDYGAAQDKKTREQLDHLYAEYIGQIPKDSKFDFTKDLKKLMDKSDLGQKIKDEIEAGDYLPKQRTSANGVIPHQMHQQELDQIIENQKEYYPWLAEPNPVEKNIKNAKYKLDQLVSFRVPYYVGPMITLADQQKTSKASFAWAVRKKAGKITPWNFYDMIDREKSANNFIKRMTNKDTYLLSEDVLPASSLLYQKFTVLNELNNIRVNGRKLQPALKQAIYTDLFQKRKTVNLKTLTNFLAIHEPTLTKPKIEGLSNGRSFNSSLGTYIDMSKILGDSLDDLNYRDDIEKIIEWSTVFEDSEIYGVKLQEIQWLTNEQREKLVRKRYQGWGRLSKKLLTGITDENGQRIIDLMWDTSKNFMQIVHQPVFEEQIAELNQQLLQDADKAPLEVVDDILADAYTSPQNKKAIRQVVKVVADVVKAVGNAPASISIEFARNEDRNKELKNSRRHSIEKLYHETAEKLVKQTNLLEELGNVKDLNDRYYLYFTQAGRDMYDGTPINIDEISTHYEIDHILPQSFLKDNSLDNRVLVKKSENAAKSDRVPAKLYGAKMRAFWKQLKESQLISNRKYLNLTTDPEQVDKYQMQGFVHRQLVETRQIIKLAANIFGSLYPDSAVIETRAELTKQLREKFSLYKVRDVNDYHHAVDAYLTAFAGHYLYQRYPKLRPMFVYGDYAKIYADDLKRLRSVNLFHDLEKDQYNSGTAVNPETKEKIVDVDWLSDYVSKIQHFKYMLISKAVYTQHGQLYGATILPVAQVDKISAPIGIKDDKPVDIYGAYTNEVAAYMAIVRVNGKKPKYKVVSVPVRMLQRLKMAEQKGHDQYMQTLHDVLLRNFTSLKKNRKTGLKEAVVKDFDVLVPCVRYNQLVIDGDTKFTLGSATYQHNAKQLVLCNHSLETLANNFEYVRKHPDEADERMIMLYDDILDQVNHYFTLYDKNKFREKLNAGRDKYLKLPTFSQFENNKKTAIGKSEAIINILRGLHANAAITNLKCLGVSTPFGQLQSPSGIELSENAKLVYQSPTGLFSREVLLKDL

SEQ ID NO: 290 - protein, 1362 aa, Lactobacillus paracasei
  Lactobacillus paracasei subsp. paracasei 8700:2
MTKLGKPYGIGVDIGSNSIGFAAVDENSHLIRLKGKTVIGARLFEEGKAAAKRRAGRTTRRRLSRNRWRLSFLRDFFESHITPTDPNFFMRQKYSEISPKDKARYKYEKRLFNDRTDAEFYQQYSTMYHLRNRLMTDPSRADVREIYFAIHHILKSRGHFLTPGDAKDFNTNDVALDEIFPALQDAYAQVYPDLGITFDEDKANEFKTILLNEIATSIDTQRALVKLLLAEEDDKDILKQQKQVLTEFAKAVVGLKTKLNLALGTEVDSSEATAWNFSLGQLDDKWAGIESAMTDEGTEILDQIRDLYRARLLNGIVPTGKTLSQAKVDDYTQHHEDLQLFKAYLKQLEDDGTAKAIRQLYDRYIDGDDAAPFLRENFVKALTKDVTAHPNTKSPELLERLAQPDFMLKQRNKANGAIPVQMQQRELDQIIKNQAVYYDWLAAPNPVEKHRKSMPYQLDELLNFRIPYYVGPLVTAKEQKAAQGGVFAWMVRKDPEGNITPYNFDEKVDREASANTFIQRMKTTDTYLIGEDVLPKQSLLYQRYEVLNELNNVRVNNEKLSIEQKQQVIRELFERHNSVTIKQFAENLRAHGDYAHIPEIRGLADEKRFLSSLSTYRQLKSLLPEAIDDPAKQADIENIIAWSTVFEDAAIFKTKLKEISWLGSEAITKLSNIRYRGWGQFSRKFLNGLTLGNGHTIIQELLLSTNNLMQILTDETLQKKMTELNADKLKTANINDAIDNAYTSPSNKKALRQVLRVVDDIKRAADGQDPSWLYVETADGGGTPGKRTRARQHQLQEIYANAAHELIDTAVRGELEDKISDKADFNDRLVLYFMQGGRDIYTGAPLNIDQLSSYDIDHILPQSLIKDNSLDNRVLVHAIINREKNATFASTIYAQKMNATWRQWHEAGLISGRKLRNLQMRPDQIDKYASGFVARQLVETRQIIKLTEQIVAAQYPDTKIIAVKAGLSHQLREELEFPKNRDVNHYHHAFDAFLAARIGTYLLKRFPNLQAFFTYGKFTKADVKKLRGFNFIRDITHAEDKIVAKDTGEVVWDKQRDVDELDRIYNFKRMLITHEVRFETADLFKQTVYGARDSKEAGGSKQLIPKKKGYPVDIYGGYFRENTAYLAVVKVTKKTETIFKVVKIATSQVAALNKARSRSTAEELSVLTELLKPKFSKVGKNGKITDTPFEVVLPRVPREQLFYNAKYGFFMVNSDTMFHNFQEIWVSRSDQKILQQIRKAKIDYPNVDQDLDNLFHNLADQIVKYFDLYSIAGFKEKISQSQNTFNDLAVDDTDQSVGKITVINELLKGAQANGMTGSLKVLKISTPFGFTQDKSGVLTKDSSIIYQSPTGLFERSVRLTDL

SEQ ID NO: 291 - protein, 1382 aa, Lactobacillus pentosus
  Lactobacillus pentosus IG1
MKKIVNYNLGLDIGTSSIGYAAIDDQGRPVRHQNKTVMGVRLFKEGKTAESTRIFRGTRRRLSHRHWRLGYLDRIFDNEIAKVDENFLPRLKASKRARSDEKRSFRGSLLFPETGDDAYYQKYPTIYHLRYALITQKKQFDIRLIYLALHHMIKYRGNFLDTTPVSAFNIHDIDLTDQFASLNDCYQLLDMDFEFQFDLNNIEQVQKLLLDETLSKTKRQAAVSKVLVMSTGNKAFDDQQNGIASEFIKALLGGPFDLSKILNLSVADVKSWKLHMTDKDVDDTLNSLVEELDENHKQIVNLLQMIYSQVMMLGLLNGQQSISASMIERYDDHAKHWAALKKLLPALGEQEQSTIIHAYTAYTGHSRTKQLSRAEFYTKVNSILKKHENIAEATGLIELIDRNEFMPKQRDAVNGVIPHQLHQRELQLIIQNQQKYYPFLAAKAYPDADETMIEQLLSFRVPYYAGPLVDRDFINESSDQEQAMQNTKFSWLKRREAGEITPWNFEQKVDVQETANRFIKRLTTKDTYLMTEDVLPKESLIYQRFEVLNELNAIRINDRRLTAENKQLAFQQLFMAGNTKNVSIKKFRNFVFDSLKFPEKVKITGFAGQHNFLAKLSTYHDFKKIFGERVDHTDLQPDFERIVEWCTIFEDRHIYREKLKEIQWLSQSEIDQLVLIRNHGWGRLSKRLLTGIRDSDGRTVMDQLWFGTDNFMRIISQSDFAAAIANENRTQLNQHGLEDVLDSAFMSPQNKKAIRQVLKVVDDIEQTLGCPPKKVMIEFTRSPDKKKQRTVTRLEKVQQAYKAVADQLAGQSIVSELDQYANTHSKLSDTYYLYFMQLGRDLYSGKPIDIDSPMLDDDHILPRAFMKDNSLDNRALTEKPINNTKAAKFPSKVFGQQKEVTDFWKLLRRCGLMSNIKEKHLYLDPDNVDKWTRRGFIHRQLVETSQVIKIVANILNDRYQQSQTEVLEVPARLGTELRECFGWYKVREVNDYHHVFDAYLAAFIGNYLYRRYPKLQPYFVYGNFAELNKAQLKNIKSFNFLYNITDNKRVVKDIETGQTLWDDQIRQQIQHIYEYKYMLTSHEAFTQHKELYGQTIYPRREFKPGTLKAIKQDQPQELYGGYKNLTAAYMCIVKIQARKRRAAEYRVVRVATESLSALQQAKRLGVQAYERCLRQELVRNNEILRTNADPNSAPREFEVLLDRVLCHQMIISDGQKYLLGSHAYKINCMQLVLSNNSMKILSTSIVKLKQMTNEPLVQVYREILDVVNKYFTLYDVNSFRENLNQFFDKFRTLPITNEYESSKSGKKLIHRGQLETLTLILRGLHANSDKVQYGDQSTLLGGFQTKDGIKLSKDSVIQYTSPAGLNVRTVKLRDLEQKEAQK

SEQ ID NO: 292 - protein, 1361 aa, Lactobacillus pentosus
  Lactobacillus pentosus KCA1
MNEPYGVGLDIGTNSVGWTVVDMNGRVRKVKGKTALGARLFKEGATAEDRRGFRTTRRRLKRVKWRLRLLREFFDQPISKIDPNFFARRKYSDISPRDPNYNGLAKTLFNDRTDKEFYDDYATIYHLRDKLMTSNRKFDIREIYLAIHHIVKYRGNFLRTGPASQYGSASLHLATSFQKLNDLFAQSEETLNLKLVTDEALLQQIQQILVRTDLSRSEQQRQIWPLMAVLTGASAAEKKRQKNVVVELSKALVGLKAKMNVVTLTEVDAAVVKDWTFTMEESQDKLPEIEEQLSEVGQQIMDEVIQLYASVNLAQLIPAGKRFSQHMVEKYKHHEKNLELLKAYIHSQSDSKRGREIRATYDRYIDGVDSKPVTQEMFYKDLMKYVEADATSNHLAAEIKDEIDSEQFMPKLRTKQNGSIPYQVQQYELDQIISHQKKYYPWLGEENPVAERRGKFPYKLDELVGFRVPYYVGPLITKEDQQATSGAGFAWMVRKADGPITPWNFDQKVDRIASATAFIQRMQTTDTYLIGEDVLPARSLIYQRFMVLNELNNMRVEDRKLAPQQKQRLYNQVFKQHQHVSVKNIQQNLMDAGEYRKTPQITGLADPKGFNSSLSTYHDFKKILLEAIADEHKRADIEKIILWSTTFEDSAIFKQKLEEVAWLTDAQRKQLSGLRYRGWGQLSHKLLTAFKDDKGRSIMDGLWETSDNFMQLRKQPAIETQIKEANQANLTDADIQDTINELYTSPQNKKAIREVMLVLDDIKNAMHGQTPSWIFVEAARGGGVAGRRTQSRSSQIVEAYKGTAKEIVSEKVQHELNEKIKAKADFNTRLVLYFLQNGRDLYTNEAINIDRLSEYDIDHILPQSLVKDDSLDNRVLTSARINREKNDTFASEKFGRKMGAQWRELHRNGLMTQRKLKHLLMRPDEISKHATDFINRQLVETRQVIKLVEELISSEYPAASIVAVKANLTHQFRQTFNFPKLREVNDYHHAFDASLTAFIGMYLLKQYPKLERFFVYGKFAKQPINLTRFNIIRKLAVAEKPIANIETGEILWDKTADIKYFEKLYNYKRLLVTHEVRENYGAMFKQTLFKASYNKSKTLVPKKNHMETSVYGGYSNQETAYLAIVRIPFKSGFKFIVVGIPTRMVAKIKHYQSLGATLNQATHKVIEPKFTKISRKTKQTVISDYEVVLPKVYLDQVVRDQVKGQMYRFSLGSDKEYHNVQELYLPLSIQQAFVGHYDESDDQRSNDLVKVYDAALKQLQRYFPLHLSRNFDQVASQAHQSFEGLKNNVQTSDKQLGKKEVLNSLFVGLHANATRSNLSVLGMSKDFGRIKSNGITLTDQAEIIYQSPTGLFERKVALKDL

SEQ ID NO: 293 - protein, 1358 aa, Lactobacillus pentosus
  Lactobacillus pentosus MP-10
MNEPYGVGLDIGTNSVGWTVVDMNGRVRKVKGKTALGARLFKEGATAEDRRGFRTTRRRLKRVKWRLRLLREFFDQPISKIDPNFFARRKYSDISPRDPNYNGLAKTLFNDRTDQEFYHDYPTIYHLRDKLMTSDRKFDIREIYLAIHHIVKYRGNFLRTGPASQYGSASLHLATSFQKLNDLFAQSEESLNFKLVTDEAQLQQIQQILVRTDLSRSEQQRQIWPLMVVLMGATAAEKKRQKDFAKELANALVGLKAKLNVVTLTNVDTTVVKDWTFTLEESQDKLPEIEEQLSEVGQQIMDEVIQLYASVNLAQLIPAGKRFSQHMVEKYNHHEKNLELLKAYIHSQSDSKRGREIRATYDRYIDGVKSKPVTQEMFYKDLMKYVEADATSNHLAAEIKDEIDSEQFMPKLRTKQNGSIPYQVQQYELDQIISHQKKYYPWLGEENPVAERRGKFPYKLDELVGFRVPYYVGPLITKEDQQATSGAGFAWMVRKADGPITPWNFDQKVDRIASATAFIQRMQTTDTYLIGEDVLPARSLIYQRFMVLNELNNMRVEDQKLAPRQKQRLYNQVFKQHQHVSVKNIQQNLMDAGEYRETPKITGLADPKGFNSSLSTYHDFKKILPEAIADEHKRADIEKIILWSTTFEDSAIFKQKLEEVAWLTDAQRKQLSGLRYRGWGQLSHKLLTAFKDDNGRSVMDGLWETSDNFMQLRKQPAIETQIKEANQANLTDADIQDTINELYTSPQNKKAIREVMLVLDDIKNAMHGQTPSWIFIEAARGGGVAGRRTQSRSKQIVEAYKSTAKEIVSEKVQHELNEKIKAKADFNTRLVLYFLQNGRDLYTNEAINIDRLSEYDIDHILPQSLVKDDSLDNRVLTSARINREKNDTFASEKFGRKMGAQWRELHRNGLMTQRKLKHLLMRPDEISKHATDFINRQLVETRQVIKLVEELISSEYPSASIVAVKANLTHQFRQTFNFPKLREVNDYHHAFDASLTAFIGMYLLKQYPKLERFFVYGKFAKQPINLTRFNVIRKLAVAEEPIANIETGEILWDKTADIKCFEKLYNYKRLLVTHEVRENYGAMFDQTIFKATDSRKRLIQKKKGFATETYGGYTGRTLAYLAIVKVVTNKDTQYQVVGIPTTMVTQIQQLEASGLTSKQAVTKAIGAMINENNKKLQSYEVLLPKVRFEQVVRDEVKGHIHRFALGTDTYYHNIQELYLPLTIQRAFLGKRNDTDAQTEQNLLTVFETTLAQVNRYFPLYEMNKFKQILNSAQEKFAALPTKNKTVKNKLVTGKDGVLNNLFIGLHANASLGDLKILGMKIGFGKLQVPGGLKLTDQAEIIYQSPTGLFERKVALKDL

SEQ ID NO: 294 - protein, 1358 aa, Lactobacillus plantarum
MKEPYGVGLDIGTNSVGWTVVDASGHVRKIKGQTGIGVRLFKEGAAAADRRGFRTTRRRLKRVKWRLRLLREFFDQPISKVDINFFARRKYSDVSPRDPNYNGLEKTLFNDRSDQDFYHDYPTIYHLREALMTQHRKFDVREIYLAIHHIVKYRGNFLRNDAATAYRSGTLDLQQHFETLNHLFSQADLELNLNLTTDVALLDSIKQTLVRTDISRSDRQKLIMPLLAVLTGATTAEKKRQKAVVTEFAKALVGNKTKIDVLTLTDIDATEAKDWAFSLEENQDKLPGIEDRFSEVGQQIIDEVIRLYASVNLAQLIPEGKRFSQSMVEKYKRHGEDLKLLKAYIRSQSDAKRGRAIRATYDQYIDGVKSKQVTQEAFQKALGKFVDADVDLNSWAAQIKQAIDSEQFMPKLRTKQNGAIPYQVQQNELDQIISNQKEYYPWLGEENPVIKRRGKFPYKLDELFGFRVPYYVGPLITKEMQAATANAGFAWMVRKADGPITPWNFDDKVDRVASATAFIQRMQTTDTYLIGEEVLPARSLIYQRFMVLNELNNIRVDDGQLTPRQKQRLYNQVFKKHKRVTAKNIQDNLVAAREFPTAPRITGLADPKVFNSSLSTYHDLKQVLPEAMSDVRKQADIEKIILWSTIFEDSTIFKQKLTEISWLTAAQLKQLGQLRYRGWGQLLRKLLTGLKDDNNRSIMDGLWETNANFMQLRSQPAIENQIKSANQANLTTADLQDTINELYTSPQNKKAIREVMVVLADIKDAMHGQTPNWIFVEAARGGGVAGRRTQSRSKQIVAAYQGTAQAIVRDQVQRELKEKIKNKANFNTRLVLYFLQNGRDLYTGDAINIDRLSEYDIDHILPQSLVKDDSLDNRVLTNARINREKNDTFASEKFGKKMGAKWKEMHRMGLMTKRKLDHLLMRPDEISKYATGFINRQLVETRQVIKLVEELINAEYPSTAIVSVKANLTHQFRQTFDFPKIREVNDYHHAFDAALTAFIGTYLLKRYPKLERFFVYGKFAKQPVNLTRFNVIRKLAKTDTPITDIDTGEVLWDKLTDIKYFETLYDYKRLLVTREVSENYGAMFDQTLLKASDNGKRLIRKKQSFDTAIYGGYTGKTLAYMAIVKVSTKKDVQYQVVGVPTTMVTQIEQLEQQGMTNKQAVTKVIEPLIAANNKKMLTYEVLLPKVRFEQVVRDRIKGQTHRFALGTDTYYHNIQELYLPLTLQRAFLGKQNESEVQLNQNLLTVFDATLAQVNRYFPLYEMNKFKKILNSARDQIELLEAKNQFVKNKLVLGKQGILTNMFIGLHANASYGDLKVLGVKIDFGKLQVPGGIKLTGDAEIIYQSPTGLFERKIALKDL

SEQ ID NO: 295 - protein, 1363 aa, Lactobacillus rhamnosus
MTKLNQPYGIGLDIGSNSIGFAVVDANSHLLRLKGETAIGARLFREGQSAADRRGSRTTRRRLSRTRWRLSFLRDFFAPHITKIDPDFFLRQKYSEISPKDKDRFKYEKRLFNDRTDAEFYEDYPSMYHLRLHLMTHTHKADPREIFLAIHHILKSRGHFLTPGAAKDFNTDKVDLEDIFPALTEAYAQVYPDLELTFDLAKADDFKAKLLDEQATPSDTQKALVNLLLSSDGEKEIVKKRKQVLTEFAKAITGLKTKFNLALGTEVDEADASNWQFSMGQLDDKWSNIETSMTDQGTEIFEQIQELYRARLLNGIVPAGMSLSQAKVADYGQHKEDLELFKTYLKKLNDHELAKTIRGLYDRYINGDDAKPFLREDFVKALTKEVTAHPNEVSEQLLNRMGQANFMLKQRTKANGAIPIQLQQRELDQIIANQSKYYDWLAAPNPVEAHRWKMPYQLDELLNFHIPYYVGPLITPKQQAESGENVFAWMVRKDPSGNITPYNFDEKVDREASANTFIQRMKTTDTYLIGEDVLPKQSLLYQKYEVLNELNNVRINNECLGTDQKQRLIREVFERHSSVTIKQVADNLVAHGDFARRPEIRGLADEKRFLSSLSTYHQLKEILHEAIDDPTKLLDIENIITWSTVFEDHTIFETKLAEIEWLDPKKINELSGIRYRGWGQFSRKLLDGLKLGNGHTVIQELMLSNHNLMQILADETLKETMTELNQDKLKTDDIEDVINDAYTSPSNKKALRQVLRVVEDIKHAANGQDPSWLFIETADGTGTAGKRTQSRQKQIQTVYANAAQELIDSAVRGELEDKIADKASFTDRLVLYFMQGGRDIYTGAPLNIDQLSHYDIDHILPQSLIKDDSLDNRVLVNATINREKNNVFASTLFAGKMKATWRKWHEAGLISGRKLRNLMLRPDEIDKFAKGFVARQLVETRQIIKLTEQIAAAQYPNTKIIAVKAGLSHQLREELDFPKNRDVNHYHHAFDAFLAARIGTYLLKRYPKLAPFFTYGEFAKVDVKKFREFNFIGALTHAKKNIIAKDTGEIVWDKERDIRELDRIYNFKRMLITHEVYFETADLFKQTIYAAKDSKERGGSKQLIPKKQGYPTQVYGGYTQESGSYNALVRVAEADTTAYQVIKISAQNASKIASANLKSREKGKQLLNEIVVKQLAKRRKNWKPSANSFKIVIPRFGMGTLFQNAKYGLFMVNSDTYYRNYQELWLSRENQKLLKKLFSIKYEKTQMNHDALQVYKAIIDQVEKFFKLYDINQFRAKLSDAIERFEKLPINTDGNKIGKTETLRQILIGLQANGTRSNVKNLGIKTDLGLLQVGSGIKLDKDTQIVYQSPSGLFKRRIPLADL

SEQ ID NO: 296 - protein, 1361 aa, Lactobacillus rhamnosus
  Lactobacillus rhamnosus HN001
MTKLNQPYGIGLDIGSNSIGFAVVDANSHLLRLKGETAIGARLFREGQSAAERRESRTTRRRLSRTRWRLSFLRDFFAPHITKIDPDFFLRQKYSEISPKDKDRFKYEKRLFNDRTDAEFYEDYPSMYHLRLHLMTHTHKADPREIFLAIHHILKSRGHFLTPGAAKDFNTDKVDLEDIFPALTEAYAQVYPDLELTFDLAKADDFKAKLLDEQATPSDTQKALVNLLLSSDGEKEIVKKRKQVLTEFAKAITGLKTKFNLALGTEVDEADASNWQFSMGQLDDKWSNIETSMTDQGTEIFEQIQEHYRARLLNGIVPAGMSLSQAKVADYGQHKEDLELFKTYLKKLNDHELAKTIRGLYDRYINGDDAKPFLREDFVKALTKEVTAHPNEVSEQLLNRMGQANFMLKQRTKANGAIPVQLQQRELDQIIANQSKYYDWLAKPNPVEKHRASKPYQLDELLTFRIPYYVGPLITPKEQAESRENVFAWMIRKDPSGNITPYNFDEKVDCPASANMFIQRMKNTDTYLIGEDVLPKRSLLYQKYEVLNELNNVSIDGRRLGADQKQRLIREVFERHSSVTIKQVAENLVAHGDFAKRPEIRGLADEKRFLSSLSTYHQLKKILHEAIDDPTKEHDIENIITWSTVFEDAAIFKTELAKISWLDSDTIKALSNIRYRGWGQFSRKLLDGLKLGNGHTVIQELMLSNHNLMQILTDETLKTTMAELNQDKLKADDIEDVINDAYTSPSNKKALRQVLRVVEDIKHAANGQDPSWLYIETADGPGTAGKRTQSRQKQIQTVYANAAQELIDSAVRGELEDKIADKASFTDRLVLYFMQGGRDIYTGAPLNIDQLSHYDIDHILPQSLIKDDSLDNRVLVNATINREKNNVFASTLFASKMAATWRKWHEAGLISGRKLRNLMLRPDEIDKFAHGFVARQLVETRQIIKLTEQIAAAQYPNTKIIAVKAGLSHQLREELDFPKNRDVNHYHHAFDAFLAARIGTYLLKRYPKLAPFFTYGEFAKVDVKKFREFNFIGALTHAKKNIVAKDTGEIVWDKERDIQELDRIYNFKRMLITHEVYFETADLFKQTIYAAKDSKERGGSKQLIPKKQGYPTQVYGGYTRENTAYLAVVKTVEKKADVYRVVRIATSQVAALKEARAQSTVKERELLKKFLTTKFTKIGKNGKKAITPFDIVIPRVPREQLFHNKRYGFFMVNSDTLMHNYQELWMSRSDQQILSKLVKSAKTVENGQVGRLFENIVEQINKYFPLYDINQFRKKLDQSKDIFSKLPLEGNGTTSGKRETIQNILTGAGTGAKNGDLKNLGIKTPFGFLQVPSGIVLDDDTTLIYQSPTGMLNRIVRLSEL

SEQ ID NO: 297 - protein, 1361 aa, Lactobacillus rhamnosus
  Lactobacillus rhamnosus R0011
MTKLNQPYGIGLDIGSNSIGFAVVDANSHLLRLKGETAIGARLFREGQSAAERRESRTTRRRLSRTRWRLSFLRDFFAPHITKIDPDFFLRQKYSEISPKDKDRFKYEKRLFNDRTDAEFYEDYPSMYHLRLHLMTHTHKADPREIFLAIHHILKSRGHFLTPGAAKDFNTDKVDLEDIFPALTEAYAQVYPDLELTFDLAKADDFKAKLLDEQATPSDTQKALVNLLLSSDGEKEIVKKRKQVLTEFAKAITGLKTKFNLALGTEVDEADASNWQFSMGQLDDKWSNIETSMTDQGTEIFEQIQELYRARLLNGIVPAGMSLSQAKVADYGQHKEDLELFKTYLKKLNDHELAKTIRGLYDRYINGDDAKPFLREDFVKALTKEVTAHPNEVSEQLLNRMGQANFMLKQRTKANGAIPVQLQQRELDQIIANQSKYYDWLAKPNPVEKHRASKPYQLDELLTFRIPYYVGPLITPKEQAESRENVFAWMIRKDPSGNITPYNFDEKVDCPASANMFIQRMKNTDTYLIGEDVLPKRSLLYQKYEVLNELNNVSIDGRRLGADQKQRLIREVFERHSSVTIKQVAENLVAHGDFAKRPEIRGLADEKRFLSSLSTYHQLKKILHEAIDDPTKEHDIENIITWSTVFEDAAIFKTELAKISWLDSDTIKALSNIRYRGWGQFSRKLLDGLKLGNGHTVIQELMLSNHNLMQILTDETLKTTMAELNQDKLKADDIEDVINDAYTSPSNKKALRQVLRVVEDIKHAANGQDPSWLYIETADGPGTAGKRTQSRQKQIQTVYANAAQELIDSAVRGELEDKIADKASFTDRLVLYFMQGGRDIYTGAPLNIDQLSHYDIDHILPQSLIKDDSLDNRVLVNATINREKNNVFASTLFASKMAATWRKWHEAGLISGRKLRNLMLRPDEIDKFAHGFVARQLVETRQIIKLTEQIAAAQYPNTKIIAVKAGLSHQLREELDFPKNRDVNHYHHAFDAFLAARIGTYLLKRYPKLAPFFTYGEFAKVDVKKFREFNFIGALTHAKKNIVAKDTGEIVWDKERDIQELDRIYNFKRMLITHEVYFETADLFKQTIYAAKDSKERGGSKQLIPKKQGYPTQVYGGYTRENTAYLAVVKTVEKKADVYRVVRIATSQVAALKEARAQSTVKERELLKKFLTTKFTKIGKNGKKAITPFDIVIPRVPREQLFHNKRYGFFMVNSDTLMHNYQELWMSRSDQQILSKLVKSAKTVENGQVGRLFENIVEQINKYFPLYDINQFRKKLDQSKDIFSKLPLEGNGTTSGKRETIQNILTGAGTGAKNGDLKNLGIKTPFGFLQVPSGIVLDDDTTLIYQSPTGMLNRIVRLSEL

SEQ ID NO: 298 - protein, 1375 aa, Lactobacillus ruminis
  Lactobacillus ruminis ATCC 25644
MRKNQEPYNIGLDIGTSSIGWSIMNDNFDLMRVKGKKGIGVRLYNEGQSAAERRMHRTARRRYGRRKWRLRLLEDFFDEHMAEVDDTFFARLKDSNISPKDDKKYRKSLLFPKSKGVTYQDDGEFYKKYPTMYHLRYALMTEHRKFDLREIYLAFHHMVKYRGNFLYDTSVDSFEAKNLDIKGKFDEINDLLSSYTDFYVDNSNAALVESILLEKNTTRKDKSKKIAKLLHVEDKEKGKNKKAKDLATQISNAVLGLKCNFHLIFELQQKYSFDLCSEKTEENIAKLSEVLDENQKMLLMILKEVQDQVMLNAFVPSGMSLSEAMMQKYDDYGEQLKIYHELEHSVSDDSAAKLRGAYRDYNDNIIKRIDGDNKKDTFYKRVKNILTKISKEYVDQDVLESCGKLKKLIDENKLFIRQRTAANGVLPHQLHQIEMRKIIDNQKEYYPWLAEPNPNEKRRVYSKYKVEELIAFRIPYYVGPLVDPNNADKNKEARFSWMVRKKDGEITPWNFYDKVDWAESANNFIERMKSKDTYLLGEDVVPKESMLYQKYEVLNELNNLRINDSGLSDSFEDVKLKQAIYNDLFKKQKIVKITDLQNYLVQNHKYLVKPKISGLADENRFLSSLSTYSDLKTIFGDKVDDRTYFNDFEKMVEYSTVFEDGHDYNQKLDEYTWLTKEEKYKIGKKRYRGWGKLSKKLLTGLRDKNNHTIMDNLWETNRNFMQIQTADEFSKQIAEENERHLKGSVSDAINDMYTSPANKKAIRQVLRVVDDIQKAMGYAPSSISLEFAREDGPSVRTVSRANRMKSIYEKYASEVSEEVMKDLDGVIKDKKGLNDRLYLYFEQQGKDMYSGHPLDFDKVISGQEYDIDHILPQAVIKDDSLDNRVLTTKALNNDVKSKGVPCRMFNGMHSFWKNLYDKGFISRRKFNNLTTNPENIDKYKMKGFVNRQLVETRQIIKLVANVLNDKYQNDDVDIIEVRAELTHDVRKHFKFYKNRNVNDYHHAFDAYLTSFIGHYLFKKYPNLRPLFDYNDFMKVSDNVFKQLRGNNFLGEFLNKTGDIISTDGNFVLNKEEMINKLNKAYAFKKILVTKEVGQRTGAMFNETRYPAPNSRKAALKYRRMPKPDSLISVKDYKNTDIYGGYSGKNDAYMVIVDMGKQYMVVGVPVRYTEKLDKLRIKHSELYRDELRKVLSRDKTLLDSKGNVKRFDIVLDRVLYGQLIEDGNELFTLGSSKYKRNFRQLFLDKQCIEILDSSATPQPTDEELIWVYDQILDKVDKYFELYDINRQRETLRKGRAAFCSLPNISMKKDDVTKKKILNEILVALHANESESNCEKIGKKVFGRLQVPGGIKLSKEAKLIYQSPTGLFERVVYLKDL

SEQ ID NO: 299 - protein, 1339 aa, Lactobacillus salivarius
  Lactobacillus salivarius SMXD51
MERYHIGLDIGTSSIGWAVIGDDFKIKKKKGKNLIGTRLFNEGATAAERRGFRTQRRRLNRRKWRLKLLEEIFDPYMAEVDEYFFARLKSSNLSPKDSNKKYLGSLLFPDKSDSNFYDKYPTIYHLRRDLMEKDEKFDLREIYLAIHHIVKYRGNFLEKVPAKNYKNSGASIGFLLEEVNSLYKDIIGDESIAILNSEKFEDVEKIILDEETRNLDKQKSVGKLLVEDKKKKNIVTAFSKAIFGYKFNIEDLLLIENDEKNKLTFNDENIDDIFNELSHSLDDKQMDLLTKTREIYFKFKLNMIVPTGYTLSESMIEKYEMHKAHLKMYKEFINTLNTKDRKILKNAYSDYINTEKAKAANAQENFYKTVKKIIKDNNSDTAKKIIVLIDEGNFMPKQRTGENGVIPHQLHQIELDRIIENQAKYYPWLAEANPVEKNRKFAKYKLDELVTFRVPYYVGPLIDKTESNKNEKETKFAWMVRKAKGTITPWNFENLVDRTESANRFIKRMTSKDTYIIGEDVLPASSLLYEKFKVLNELNNIKVNEKKLDIEQKQDIYLNLFTTAKNVTKKSLATYLNCSADSISGLSDGEKFNSSLSSYIDLKAILGNIVDDCNKNEDLEKIIEYSTVFEDGNIYKEKLSEISWLTDEQIEKLSNIHFKGWGRLSKKLLTQITNENGERIIDALWNTSNNFMQIINDESIQAKLAEINGKYAGKSDLEDILSEAYTSPQNKKAIRQVMKVVEDIEKAMQCEPTSISIEFTRKKQKSRLTNTRYKKISDVYEKIADEVISEYELRKLQSELDSNANNMRDRYYLYFMQLGRDMYTGEKINIDELHQRYDIDHILPQSFIKDDSINNRVLTRKDVNNKEKSDKTAADLYAVEMSDFWRKLRKQGLITEQKYKNLLTKSDSIDKYAKKGFIKRQLVETSQVVKLVANILQDKYSDTKIIEVRAKLNSNLREEYKLIKNRAVNDYHHAIDGYLTTFIGQYLYKTYPKLRSYFVYNDFKKLDSNYLKHMKKFNFLWQLQDDKTIDIYDNVNNKFVLNVPEMKKYIQKIYNYKYMLVSKEVTTKNGAFYDQTKYNAKTVNLIPIKKNKPTNIYGGYKGKVSSYMMLVKIRKKKEVIYKFVGVPRLWTDELDRLKDTTERKILLNEIAKNSLSKTEQDFEVILDKVYYGQLIIDGNQKYTLGSSEYKYNAMQLHLSKHALEVLAKENVKDAEITDKDLVSVYEEILSVVNKYFELYDINKFRQKLNEGLEIFRKLPVYNVYESNKIKQVGKFEVLNRILMGLHANAMITDLKVLGIKTKLGQMQVNGGIKLSPDAKLIYQSPTGIFSRAVRVKDLG

SEQ ID NO: 300 - protein, 1331 aa, Lactobacillus sanfranciscensis
MNKQPYNIGLDIGTSSVGWSATELDNRLLHIKGHNGIGVRLFKEGESAADRRGFRTTRRRLARRKWRLRLLNEIFATEIAKVDPSFFARLKQSNVSPKDPNKTMFENILFDDENLDDQKFHHDYKTIYHLRQAIINHPEQKFDIRLIYLAMHHIIKYRGHFLNQANVQDFKGGKIDLEKSFKALNDIFENQGRDLRLVTDKANQYVKVLSDNAKTRSDRKKELSKLLYVPIDKDTDKNSKKVTGEILKAILGNKAKFDVIFGIEVENPKEWVLTFNSDDFDDKIEGLSSQMTDEDSEILLILKELYFALNLSDILNNSVTDKNAKTLSEAMINRYDDHKNQLAMLKKVIDSSDKKHAKELKEAYSAYIDGENNKKISFEDLKKRIQKNLVDSELSQKINDLLDHDYFLPKQRSKENGAIPHQLQQQELDQIIESQKQYYPFLAELNPNEKRSRQAKYKLDELVAFRVPYYVGPMVEVTDSNQENNGKFAWMIRKEQGEITPWNFDEKVDRTETATKFITRMTTTDTYLIGEPVLPKNSLLYQKFVVLNELNNLKINQEIITPGQKQYLYEHVMKKNKRVTLKKIADALVIKGDYPYAPEVKGTTDQKNLNNGLTTYIDLAKIFGNELDDVDREADFEKIIEWSTIFEDQHIFALKLQELKWLTEKQRNQVVKLRYQGWGKLSKELLAGLVDDNGQRIIDLLWSDNQNFMQIVNQKSFKESIADHNGAHLEEKNLKDVINDLYTSPQNKKAIRQVILVVDDIINAVGYEPANIMMEFAREDSNDHRLTNSRSRQLENVYKDITNSWFDNDSVKDELEDKIKNKDKFTDRLYLYFTQGGKDLYTGEPLNIDDLSSYDIDHILPQSFILDNSLDNRVLTSQRNNRVSKEDQLPGELFGTKMHAFWKRLKAAHLISNKKYYNLTLTPNSISKFNNQGRFINRQLVETRQVIKLAAEILHNRYSEEKGTNIVTIKANLTHHMREKFNFYKNRNVNDYHHAFDAYLTAFVGNWLLQQYPKLKPYFVYGDFAKTEINNLKSFNMLYKFEQAHQLNEKDGKIAKDADALLGYMKNVYHFKKMLVTKKLETNHGALFKQTLYPSPAHDIKKRQLIKPKDNRPTDIYGGYTHEERKYMSLVKVIGKKDNEYRMANVPLLKINKNNDIKEILKSQFSNKKFEIVLPKVLKNQLFSENGALFVIGSKGYKYNANQLVLSDLDMKLLNDLSNNKSIDEVTINQLFKNIVDSTNKYMPLYEIKNLNEVVEKFNNLEFNDKKKTITDFLLATHANPTMSNLKNIGLPSYFGRFTSGNAGIKLSENANVIYQSPTGLFSRKVKISDF

SEQ ID NO: 301 - protein, 1419 aa, Lactobacillus sp.
  Lactobacillus sp. 66c
MAKPQNYTIGLDIGTNSVGWTVTDDQNNILRIKSKKAIGARLFEEGKVAAERRSFRTTRRRLSRRKWRIKLLEELFDEEISKVDPNFFARSHESWISPKDKRERYSAIVFPTPEEDKKFHNEYPTIYHLRDRLMKDDQKHDIREIYVAIHHIMKYRGNFLHDESIETYRSGMSSLGGGDERTILNTKILDDLNDAFADNLATQGISVNSASADQINEIVTSGHLNVDSQKAIAKLLLPTTLSSDDKKQDKKIKKLATDAAKNVASAWLGYKANFAAILNIQEVDKDKKKIYSFALQGADEEDKVETLESVLSQDQIEIVDRIIRIRHAIVLGEIIPVGMTLSEAMIEKYDQHAKDLKNLKTVIRNLKDRKNAVKLQAIYDLYVNNRHADTAKAMKLAGVKKRTELLEPEEFNKSIEKLLDDSPVSAEIKKRIAEKDFLPLQRSNSNGVIPNQLHQIELDEIIKKQSKYYPFLGETNEHASADVARKAPTKLDQLLTFRVPYYVGPLITKEEQEEQDGHSFAWMIRKNPKDHEKITPWNFDEKVDRMASATQFIKRMTTKDTYLLGEDVLPSSSLKYQLFTVLNELNNLRINHKKLTREEKEQVIEDLFKKYKTVKADKFKNYWQKGHAGLDVKIQGMADPEKFNSTMSTYIDLQKIFGDQLDDAQRQNDFEKIIEYSTIFEDRKILGEKLRADFVWLSEDQIKRLCRLRLQGWGRLSLKLLTRLTDADGQNVLERLLNSNDNFMQIVKDPVIKAKIEQKNQKLLRADWSENATESILDEAYTSPQNKKAIRQVMRVVHDIVKACDGNLPAKFAIEFARSQDDDPKRTVARADRLQKIYAQISDEVVSQGVKDQLSGMKSLKDRYYLYFMQGGRDAYTGKPLNIDRLSDYDIDHIMPQSFIKDDSLDNRVLVTRAVNNQKSDNVPVLLYGNHLVADLGITIREMWDRWQKSGMISKRKLANLLTDPATLSEYRAEGFINRQLVETSQVIKLTATILQSEFPDSKIIEVPAKYNSILRKQFDLYKSREVNDYHHAIDAYLSTIVGNYLYQVYPNLRRLFVYGEFKKFSHGEEESSHQAVRRVKSMNFLDDLLRGKHGDDIYCRVTGEVIFSRKDIISKLKQAYSFKQMLVTQEVFTKKSALFDQTVYPSPARDSKTRSGLIPRKQGMDTEIYGGYSGNKDAYFVLAQVVKSKGHTLQVVGVPIRALRALANCSNYSEQLLKIVKAQVLFNKKTGKAKKGISDVRILLDKIPYRQPVLDGSAFYMLGSSTYKYNLKQISLSQQSMKYILDYIDDPNFNKHEMTKIDQQNEKECLLSVYDEILDKMDKYLSLYDINGFRKKLHVGRDKFIKLEVEKQAEAIKNVLRGFHANSDMTKLSDLGLSTSLGFMQASDGIKLSDNAVFIYQSPTGLFERRVKVSDLLK

SEQ ID NO: 302 - protein, 1289 aa, Lactobacillus versmoldensis
  Lactobacillus versmoldensis KCTC 3814
MRRRYRRRRNRLNWLDELFADELAKIDPSFLLRMKNSWVSKKESTRKRDPYNLFIDEKYNDVDYFNQYPTIFHLRKELITEDKKVDIRLIYLAIHNIIKYRGNFTLENQNFDISQLSSNFSQQISDFFALFSDFGVIMPEDFDPDKISDILLNPNLSPSGKVSEAIATISPKTNVKAKIKIILLLLVGNNGDLKKLFDLETTEKIAVKLSSRHIDSELPIILSELNEQQENIITIANSIFGSIILKDFLGDETSISAAKVISFEDHKQDLQKLKTMWRETSNKEAVKAGKKAYEDYIGHEDSETFYKKIKKFLEKAQPVDLANKALAEIELENYLPKQRNRNNTVIPYQLNENELIAILDHQEKYYPFLKENRDKILSLLTFRIPYYVGPLQDSNNNRFSWMTRKASGAIRPWNFSEKVNVEQSSNDFIKRMRSTDTYLIGEPVLPKKSLIYQCYEVLSELNNTRVKDGSSNPKRLDVTIKQRIYNEIFKNQKSVSVKVLQNWLIKESYFKSPEISGLADKKKYLSSLSTYIDFKKIFGQRFVDDPVNSPQLEELAEWLTLFEDKKILLIKLQNSKYSYDQATINKLSTMRYQGTGKLSKKLLVDLKTTKKSIGKSGAESLSILDLMWSTKDNFMQIIHDADYTFEQQIKEFNYDTEDELTPLEKVANLHGSPALKRGLNQSIKVVADIVKFMGHDPEKIFIEFTRSDDFSKLTISRYRRIKKQYLEIAKAIKKIPAEFKDIKEYQTQLEENKGKLASERLMLYFLQCGHSLYSNKPIDLNMINSSKYHVDHILPQSYIKDDSLENKALVLASENENKIDNMLISHDIIATNLPRWQALKDQNLMGSKKFADLTRTTVTENQKKGFIQRQLVQTSQIVKNITLILNDLYKNTSCIETRATLSSEFRKAFSNFDETTYHYQFPEFVKNRDVNDFHHAQDAFLACVIGEYQLKKYPKDNLRLVYDQYSKFLDSLKKDTRKKNGRMPRYTQNGFIIGSMFNGKTYVDDNGEIIWDQKIKESIRKTFNYHQFNVVRQTIEQHGKLFNDTIQPHSDRYKLIPLKTNRDPAIYGGYNNDNNAYSVVLDVDGKKKINGIPIRIANQLKSDELDLSSWLENNIKHKKPMTILIDKVPKYQRIINEETGDLLITSANEVINNVQLFLPSMYTALISLLDSTKTEMYSKLLSNYEANILIDIYDYLLTKLKNNYPLYRKEWAKLAEHRDDFIESDLVTQASTLQQLIKFMHADPSNVNLKFGNFKGNRFGRKNGNIKLSKTDFIYESPTGLFKSIKHID

SEQ ID NO: 303 - protein, 1372 aa, Legionella pneumophila
  Legionella pneumophila 130b
MESSQILSPIGIDLGGKFTGVCLSHLEAFAELPNHANTKYSVILIDHNNFQLSQAQRRATRHRVRNKKRNQFVKRVALQLFQHILSRDLNAKEETALCHYLNNRGYTYVDTDLDEYIKDETTINLLKELLPSESEHNFIDWFLQKMQSSEFRKILVSKVEEKKDDKELKNAVKNIKNFITGFEKNSVEGHRHRKVYFENIKSDITKDNQLDSIKKKIPSVCLSNLLGHLSNLQWKNLHRYLAKNPKQFDEQTFGNEFLRMLKNFRHLKGSQESLAVRNLIQQLEQSQDYISILEKTPPEITIPPYEARTNTGMEKDQSLLLNPEKLNNLYPNWRNLIPGIIDAHPFLEKDLEHTKLRDRKRIISPSKQDEKRDSYILQRYLDLNKKIDKFKIKKQLSFLGQGKQLPANLIETQKEMETHFNSSLVSVLIQIASAYNKEREDAAQGIWFDNAFSLCELSNINPPRKQKILPLLVGAILSEDFINNKDKWAKFKNFWNTHKIGRTSLKSKCKEIEEARKNSGNAFKIDYEEALNHPEHSNNKALIKIIQTIPDIIQAIQSHLGHNDSQALIYHNPFSLSQLYTILETKRDGFHKNCVAVTCENYWRSQKTEIDPEISYASRLPADSVRPFDGVLARMMQRLAYEIAMAKWEQIKHIPDNSSLLIPIYLEQNRFEFEESFKKIKGGSSDKTLEQAIEKQNIQWEEKFQRIINASMNICPYKGASIGGQGEIDHIYPRSLSKKHFGVIFNSEANLIYCSSQGNREKKEEHYLLEHLSPLYLKHQFGTDNVSDIKNFISQNVANIKKYISFHLLTPEQQKAARHALFLDYDDEAFKTITKFLMSQQKARVNGTQKFLGKQIMEFLSTLADSKQLQLEFSIKQITAEEVHDHRELLSKQEPKLVKSRQQSFPSHAIDATLTMSIGLKEFPQFSQELDNSWFINHLMPDEVHLNPVRSKEKYNKPNISSTPLFKDSLYAERFIPVWVKGETFAIGFSEKDLFEIKPSNKEKLFTLLKTYSTKNPGESLQELQAKSKAKWLYFPINKTLALEFLHHYFHKEIVTPDDTTVCHFINSLRYYTKKESITVKILKEPMPVLSVKFESSKKNVLGSFKHTIALPATKDWERLFNHPNFLALKANPAPNPKEFNEFIRKYFLSDNNPNSDIPNNGHNIKPQKHKAVRKVFSLPVIPGNAGTMMRIRRKDNKGQPLYQLQTIDDTPSMGIQINEDRLVKQEVLMDAYKTRNLSTIDGINNSEGQAYATFDNWLTLPVSTFKPEIIKLEMKPHSKTRRYIRITQSLADFIKTIDEALMIKPSDSIDDPLNMPNEIVCKNKLFGNELKPRDGKMKIVSTGKIVTYEFESDSTPQWIQTLYVTQLKKQP

SEQ ID NO: 304 - protein, 1372 aa, Legionella pneumophila
MESSQILSPIGIDLGGKFTGVCLSHLEAFAELPNHANTKYSVILIDHNNFQLSQAQRRATRHRVRNKKRNQFVKRVALQLFQHILSRDLNAKEETALCHYLNNRGYTYVDTDLDEYIKDETTINLLKELLPSESEHNFIDWFLQKMQSSEFRKILVSKVEEKKDDKELKNAVKNIKNFITGFEKNSVEGHRHRKVYFENIKSDITKDNQLDSIKKKIPSVCLSNLLGHLSNLQWKNLHRYLAKNPKQFDEQTFGNEFLRMLKNFRHLKGSQESLAVRNLIQQLEQSQDYISILEKTPPEITIPPYEARTNTGMEKDQSLLLNPEKLNNLYPNWRNLIPGIIDAHPFLEKDLEHTKLRDRKRIISPSKQDEKRDSYILQRYLDLNKKIDKFKIKKQLSFLGQGKQLPANLIETQKEMETHFNSSLVSVLIQIASAYNKEREDAAQGIWFDNAFSLCELSNINPPRKQKILPLLVGAILSEDFINNKDKWAKFKIFWNTHKIGRTSLKSKCKEIEEARKNSGNAFKIDYEEALNHPEHSNNKALIKIIQTIPDIIQAIQSHLGHNDSQALIYHNPFSLSQLYTILETKRDGFHKNCVAVTCENYWRSQKTEIDPEISYASRLPADSVRPFDGVLARMMQRLAYEIAMAKWEQIKHIPDNSSLLIPIYLEQNRFEFEESFKKIKGSSSDKTLEQAIEKQNIQWEEKFQRIINASMNICPYKGASIGGQGEIDHIYPRSLSKKHFGVIFNSEVNLIYCSSQGNREKKEEHYLLEHLSPLYLKHQFGTDNVSDIKNFISQNVANIKKYISFHLLTPEQQKAARHALFLDYDDEAFKTITKFLMSQQKARVNGTQKFLGKQIMEFLSTLADSKQLQLEFSIKQITAEEVHDHRELLSKQEPKLVKSRQQSFPSHAIDATLTMSIGLKEFPQFSQELDNSWFINHLMPDEVHLNPVRSKEKYNKPNISSTPLFKDSLYAERFIPVWVKGETFAIGFSEKDLFEIKPSNKEKLFTLLKTYSTKNPGESLQELQAKSKAKWLYFPINKTLALEFLHHYFHKEIVTPDDTTVCHFINSLRYYTKKESITVKILKEPMPVLSVKFESSKKNVLGSFKHTIALPATKDWERLFNHPNFLALKANPAPNPKEFNEFIRKYFLSDNNPNSDIPNNGHNIKPQKHKAVRKVFSLPVIPGNAGTMMRIRRKDNKGQPLYQLQTIDDTPSMGIQINEDRLVKQEVLMDAYKTRNLSTIDGINNSEGQAYATFDNWLTLPVSTFKPEIIKLEMKPHSKTRRYIRITQSLADFIKTIDEALMIKPSDSIDDPLNMPNEIVCKNKLFGNELKPRDGKMKIVSTGKIVTYEFESDSTPQWIQTLYVTQLKKQP

SEQ ID NO: 305 - protein, 1355 aa, Leuconostoc gelidum
  Leuconostoc gelidum KCTC 3527
MTYSIGLDIGTGSVGWAVIGDDYRLKRAKGKNLIGVRLFDSATTAAERRGYRTTRRRLSRRHWRLRLLNDIFASDLAEQDENFLPRLKYSWVNPDDEQNPQLNSDVANGALFGSSETDKAFHKNYPTIYHLRHELMTDTAKHDLREVYLAIHHIVKYRGNFLNTADKINAENSFNVDLFIAALDEYNEFLETPITSIKDAQLFSDKLTDINARNKSVRVENAMSETYDDKSKIFKAILTALVGNTANFQTIFDLSDLEKDEAKNFKFKLDLEDVETKLDVVRAKLSDEQNAFLEAVLIAYDGITLKMILGDYKSISQSMIESYKSHQRDWKYIKNNVRLNEQKIEPDKNSVKFFKLDPKKLIYPSNLAYLQVISSNEDEHRKGLDYFKTAIQDADILQRIENDTFLPRQRTKRNGVLPYQLHLAELEQIIKKQSKYYPFLANIYTQDNKTENKLIGLLKFRVPYYVGPLVEAEKVTGDGKNHWLIKKELQENTPITPFNFDDVVDKDKSGEQFIKRITGTDSYLIGEPTLPENSLLYQKYNVLQELNNVRNERHQRLPIKVKQDIFEHVFKIDKNVNAKKVMAYLKLNGYGDFQIAGLSDTRTGKFNSNLSSYNYFVDLLGREKTEKIREDRLEEIIEIQTVFEDKILVAKRLSNLDFLTPQEKSKLSAKHYTGWGRLSQKLLTTQFIKTALSEAGDIIPQSHSIIDLLYYTDKNLMEILNDKTFNVRNWLTEQNKGTESGNSLYDQIDALAGPKDIKRGITQVFSIIDDIKKAMGSNPETVYLEFARETQTSRLTNSRLNRVQEIYNSPELKTEFAYLAKKLEAETKESIHDDRLYLYYLQEGRDMYTGKEIPFDQISSNYDIDHIIPQAFTKDDSLDNRVLVNRATNARKSNSPTFTNDIIDNRKSWWQSLVKRGLMSKEKFERLTDKRKTFSENQTNHFIARQLVETRQIIKNVADLIKNNYDGTQAVAIRASLTGEMRRYLDWPKNRDMNDYHHAHDALMMATVGKYVDRRGFFDNGSVSDGAGNAYNLYTKDWLVAARVGTRNDSQRVNPYGFIVGSMNSKAVRQQVNKETGEIVWGNENLDYLRHVLSYKKILVTRRLSGSSGRLYAETLFSPNPKAKLIAQKANRSVALYGGFTKAESAYTALVEFNKKGDRSYKLIKVPMAIANRVNDKQITVTAYIASLNLRDFSRVVLEHLPLGTLIRESDGSEFYAASSEYKHNAKELWAPKEILRSSKKLDKATADNLIDIFDFLTNDKTISNFKFYEKDLLHLKNVRDKFVEASDEIKIKVLSDVIYELHNDAGWRDPFKHIQEKPAWTMLQVKGGIKLSEKAAIVYQSPTGLFETITIVGE

SEQ ID NO: 306 - protein, 1337 aa, Listeria innocua
  Listeria innocua ATCC 33091
MKNMKKPYTIGLDIGTNSVGWAVLTDQYDLVKRKMKIAGDSEKKQIKKNFWGVRLFDEGQTAADRRMARTARRRIERRRNRISYLQGIFAEEMSKTDANFFCRLSDSFYVDNEKRNSRHPFFATIEEEVEYHKNYPTIYHLREELVNSSEKADLRLVYLALAHIIKYRGNFLIEGALDTQNTSVDGIYKQFIQTYNQVFASGIEDGSLKKLEDNKDVAKILVEKVTRKEKLERILKLYPGEKSAGMFAQFISLIVGSKGNFQKPFDLIEKSDIECAKDSYEEDLESLLALIGDEYAELFVAAKNAYSAVVLSSIITVAETETNAKLSASMIERFDTHEEDLGELKAFIKLHLPKHYEEIFSNTEKHGYAGYIDGKTKQADFYKYMKMTLENIEGADYFIAKIEKENFLRKQRTFDNGAIPHQLHLEELEAILHQQAKYYPFLKENYDKIKSLVTFRIPYFVGPLANGQSEFAWLTRKADGEIRPWNIEEKVDFGKSAVDFIEKMTNKDTYLPKENVLPKHSLCYQKYLVYNELTKVRYINDQGKTSYFSGQEKEQIFNDLFKQKRKVKKKDLELFLRNMSHVESPTIEGLEDSFNSSYSTYHDLLKVGIKQEILDNPVNTEMLENIVKILTVFEDKRMIKEQLQQFSDVLDGVVLKKLERRHYTGWGRLSAKLLMGIRDKQSHLTILDYLMNDDGLNRNLMQLINDSNLSFKSIIEKEQVTTADKDIQSIVADLAGSPAIKKGILQSLKIVDELVSVMGYPPQTIVVEMARENQTTGKGKNNSRPRYKSLEKAIKEFGSQILKEHPTDNQELRNNRLYLYYLQNGKDMYTGQDLDIHNLSNYDIDHIVPQSFITDNSIDNLVLTSSAGNREKGDDVPPLEIVRKRKVFWEKLYQGNLMSKRKFDYLTKAERGGLTEADKARFIHRQLVETRQITKNVANILHQRFNYEKDDHGNTMKQVRIVTLKSALVSQFRKQFQLYKVRDVNDYHHAHDAYLNGVVANTLLKVYPQLEPEFVYGDYHQFDWFKANKATAKKQFYTNIMLFFAQKDRIIDENGEILWDKKYLDTVKKVMSYRQMNIVKKTEIQKGEFSKATIKPKGNSSKLISRKTNWDPMKYGGLDSPNMAYAVVIEYAKGKNKLVFEKKIIRVTIMERKAFEKDEKAFLEEQGYRQPKVLAKLPKYTLYECEEGRRRMLASANEAQKGNQQVLPNHLVTLLHHVANCEVSDGKSLDYIESNREMFAELLAHVSEFAKRYTLAEANLNKINQLFEQNKEGDIKAIAQSFVDLMAFNAMGAPASFKFFETTIERKRYNNLKELLNSTIIYQSITGLYESRKRLDD

SEQ ID NO: 307 - protein, 1334 aa, Listeria innocua
MKKPYTIGLDIGTNSVGWAVLTDQYDLVKRKMKIAGDSEKKQIKKNFWGVRLFDEGQTAADRRMARTARRRIERRRNRISYLQGIFAEEMSKTDANFFCRLSDSFYVDNEKRNSRHPFFATIEEEVEYHKNYPTIYHLREELVNSSEKADLRLVYLALAHIIKYRGNFLIEGALDTQNTSVDGIYKQFIQTYNQVFASGIEDGSLKKLEDNKDVAKILVEKVTRKEKLERILKLYPGEKSAGMFAQFISLIVGSKGNFQKPFDLIEKSDIECAKDSYEEDLESLLALIGDEYAELFVAAKNAYSAVVLSSIITVAETETNAKLSASMIERFDTHEEDLGELKAFIKLHLPKHYEEIFSNTEKHGYAGYIDGKTKQADFYKYMKMTLENIEGADYFIAKIEKENFLRKQRTFDNGAIPHQLHLEELEAILHQQAKYYPFLKENYDKIKSLVTFRIPYFVGPLANGQSEFAWLTRKADGEIRPWNIEEKVDFGKSAVDFIEKMTNKDTYLPKENVLPKHSLCYQKYLVYNELTKVRYINDQGKTSYFSGQEKEQIFNDLFKQKRKVKKKDLELFLRNMSHVESPTIEGLEDSFNSSYSTYHDLLKVGIKQEILDNPVNTEMLENIVKILTVFEDKRMIKEQLQQFSDVLDGVVLKKLERRHYTGWGRLSAKLLMGIRDKQSHLTILDYLMNDDGLNRNLMQLINDSNLSFKSIIEKEQVTTADKDIQSIVADLAGSPAIKKGILQSLKIVDELVSVMGYPPQTIVVEMARENQTTGKGKNNSRPRYKSLEKAIKEFGSQILKEHPTDNQELRNNRLYLYYLQNGKDMYTGQDLDIHNLSNYDIDHIVPQSFITDNSIDNLVLTSSAGNREKGDDVPPLEIVRKRKVFWEKLYQGNLMSKRKFDYLTKAERGGLTEADKARFIHRQLVETRQITKNVANILHQRFNYEKDDHGNTMKQVRIVTLKSALVSQFRKQFQLYKVRDVNDYHHAHDAYLNGVVANTLLKVYPQLEPEFVYGDYHQFDWFKANKATAKKQFYTNIMLFFAQKDRIIDENGEILWDKKYLDTVKKVMSYRQMNIVKKTEIQKGEFSKATIKPKGNSSKLIPRKTNWDPMKYGGLDSPNMAYAVVIEYAKGKNKLVFEKKIIRVTIMERKAFEKDEKAFLEEQGYRQPKVLAKLPKYTLYECEEGRRRMLASANEAQKGNQQVLPNHLVTLLHHAANCEVSDGKSLDYIESNREMFAELLAHVSEFAKRYTLAEANLNKINQLFEQNKEGDIKAIAQSFVDLMAFNAMGAPASFKFFETTIERKRYNNLKELLNSTIIYQSITGLYESRKRLDD

SEQ ID NO: 308 - protein, 1334 aa, Listeria monocytogenes
MKNPYTIGLDIGTNSVGWAVLTNQYDLVKRKMKVAGNSDKKQIKKNFWGVRLFDDGQTAVDRRMNRTARRRIERRRNRISYLQEIFAVEMANIDANFFCRLNDSFYVDSEKRNSRHPFFATIEEEVAYHKNYRTIYHLREELVNSSEKADLRLVYLALAHIIKYRGNFLIEGALDTKNTSVDGVYEQFIQTYNQVFMSNIEEGTLAKVEENIEVANILAGKFTRREKFERILQLYPGEKSTGMFAQFISLIVGSKGNFQKVFDLIEKTDIECAKDSYEEDLEALLAIIGDEYAELFVAAKNTYNAVVLSSIITVTATETNAKLSASMIERFDAHEKDLGELKAFIKLHLPKQYQEIFNNAAIDGYAGYIDGKTKQVDFYKYLKTILENIEGADYFIAKIEEENFLRKQRTFDNGAIPHQLHLEELEAIIHQQAKYYPFLREDYEKIKSLVTFRIPYFVGPLAKGQSEFAWLTRKADGEIRPWNIEEKVDFGKSAVDFIEKMTNKDTYLPKENVLPKHSLCYQKYMVYNELTKVRYIDDQGKTNYFSGQEKQQIFNDLFKQKRKVKKKDLELFLRNINHIESPTIEGLEDSFNASYATYHDLLKVGMKQEILDNPLNTEMLEDIVKILTVFEDKPMIKEQLQQFSDVLDGGVLKKLERRHYTGWGRLSAKLLVGIREKQSHLTILDYLMNDDGLNRNLMQLINDSNLSFKSIIEKEQVSTTDKDLQSIVADLAGSPAIKKGILQSLKIVDELVSIMGYPPQTIVVEMARENQTTGKGKNNSKPRYKSLEKAIKEFGSKILKEHPTDNQELKNNRLYLYYLQNGKDMYTGQELDIHNLSNYDIDHIVPQSFITDNSIDNLVLTSSAGNREKGGDVPPLEIVRKRKVFWEKLYQGNLMSKRKFDYLTKAERGGLTDADKARFIHRQLVETRQITKNVANILHQRFNNETDNHGNTMEQVRIVTLKSALVSQFRKQFQLYKVREVNDYHHAHDAYLNGVVANTLLKVYPQLEPEFVYGEYHQFDWFKANKATAKKQFYTNIMLFFGQKERIIDENGEILWDKKYLETIKKVLDYRQMNIVKKTEIQKGEFSKATIKPKGNSSKLIPRKENWDPMKYGGLDSPNMAYAVIIEHAKGKKKLIFEKKIIRITIMERKMFEKDEEAFLEEKGYRHPKVLTKLPKYTLYECEKGRRRMLASANEAQKGNQLVLSNHLVSLLYHAKNCEASDGKSLKYIEAHRETFSELLAQVSEFATRYTLADANLSKINNLFEQNKEGDIQAIAQSFVDLMAFNAMGAPASFKFFEATIDRKRYTNLKELLSSTIIYQSITGLYESRKRLDD

SEQ ID NO: 309 - protein, 1334 aa, Listeria monocytogenes
  Listeria monocytogenes FSL J1-194
MKNPYTIGLDIGTNSVGWAVLTDQYDLVKRKMKVAGNSDKKQIKKNFWGVRLFDDGQTAVDRRMNRTARRRIERRRNRISYLQEIFAVEMANIDANFFCRLNDSFYVDSEKRNSRHPFFATIEEEVAYHKNYRTIYHLREELVNSSEKADLRLVYLALAHIIKYRGNFLIEGALDTKNTSVDEVYKQFIQTYNQVFMSNIEEGALAKVEENTEVASILAGKFTRREKFERILRLYPGEKSTGMFAQFISLIVGNKGNFQKVFNLVEKTDIECAKDSYEEDLEALLAIIGDEYAELFVAAKNTYNAVVLSSIITVTATETNAKLSASMIERFDAHEKELGELKAFIKLHLPKQYQEIFNNAEIDGYAGYIDGKTKQVDFYKYLKTTLENVEGADYFITKIEEENFLRKQRTFDNGVIPHQLHLEELEAILHQQAKYYPFLREGYDKIKSLVTFRIPYFVGPLANGQSEFAWLTRKDDGEIRPWNIEEKVDFGKSAVDFIEKMTNKDTYLPKENVLPKHSLCYQKYMVYNELTKIRYIDDQGKTNYFSGREKQQIFNDLFKQKRKVKKKDLELFLRNINHIESPTIEGLEDSFNASYATYHDLLKVGLKQEILDNPLNTEILEDIVKILTVFEDKRMIKEQLEQFSDVLDGVVLKKLERRHYTGWGRLSAKLLVGIRDKQSHLTILDYLMNDDGLNRNLMQLINDSNLSFKSIIEKEQVSTTDKDLQSIVADLAGSPAIKKGILQSLKIVDELVSIMGYPPQTIVVEMARENQTTGKGKNNSKPRYKSLEKAIKDFGSQILKEHPTDNQELKNNRLYLYYLQNGKDIYTGQELDIHNLSNYDIDHIVPQSFITDNSIDNLVLTSSAGNREKGGDVPPLEIVRKRKVFWEKLYQGNLMSKRKFDYLTKAERGGLTEADKARFIHRQLVETRQITKNVANILHQRFNKETDNHGNTMEQVRIVTLKSALVSQFRKQFQLYKVREVNDYHHAHDAYLNGVVANTLLKVYPQLEPEFVYGEYHQFDWFKANKATAKKQFYTNIMLFFAQKERIIDENGEILWDKKYLETIKKVLDYRQINIVKKTEIQKGEFSKATIKPKGNSSKLIPRKENWDPMKYGGLDSPNMAYAVIIEHAKGKKKIVIEKKLIQINIMERKMFEKDEEAFLEEKGYHQPKVLTKLPKYTLYECEKGRRRMLSSANEAQKGNQLVLSNHLVSLLYHAKNCEASDGKSLKYIEAHRETFSELLAQVSEFATKYTLADANLSKINNLFEQNKEGDIKAIAQSFVDLMAFNAMGAPASFKFFEATIDRKRYTNLKELLSSTIIYQSITGLYESRKRLDD

SEQ ID NO: 310 - protein, 1334 aa, Listeria monocytogenes
  Listeria monocytogenes FSL J1-208
MKNPYTIGLDIGTNSVGWAVLTDQYDLVKRKMKVAGNSDKKQIKKNFWGVRLFDEGETAADRRMNRTARRRIERRRNRISYLQEIFALEMANIDANFFCRLNDSFYVDSEKRNSRHPFFATIEEEVAYHKNYRTIYHLREELVNSSEKADLRLVYLALAHIIKYRGNFLIEGALDTKNTSVDGVYKQFIQTYNQVFISNIEEGTLAKMEENTTVADILAGKFTRKEKLERILQLYPGEKSTGMFAQFISLIVGSKGNFQKVFDLVEKTDIECAKDSYEEDLEALLAIIGDEYAELFVAAKNTYNAVVLSSIITVTDTETNAKLSASMIERFDAHEKDLSELKAFIKLHLPKQYEEIFSNVAIDGYAGYIDGKTKQVDFYKYLKTLLENIEGADYFIAKIEEENFLRKQRTFDNGAIPHQLHLEELEAILHQQAKYYPFLKEAYDKIKSLVTFRIPYFVGPLANGQSDFAWLTRKADGEIRPWNIEEKVDFGKSAVDFIEKMTNKDTYLPKENVLPKHSLYYQKYMVYNELTKVRYIDDQGKTNYFSGQEKQQIFNDYFKQKRKVSKKDLEQFLRNMSHIESPTIEGLEDSFNSSYATYHDLLKVGIKQEVLENPLNTEMLEDIVKILTVFEDKRMIKEQLQQFSDVLDGAVLKKLERRHYTGWGRLSAKLLVGIRDKQSHLTILDYLMNDDGLNRNLMQLINDSNLSFKSIIEKEQVSTTDKDLQSIVADLAGSPAIKKGILQSLKIVDELVSIMGYPPQTIVVEMARENQTTVKGKNNSRPRYKSLEKAIKEFGSQILKEHPTDNQELRNNRLYLYYLQNGKDMYTGQELDIHNLSNYDIDHIVPQSFITDNSIDNLVLTSSAGNREKGDDVPPLEIVRKRKVFWEKLFQGNLMSKRKFDYLTKAERGGLTEADKATFIHRQLVETRQITKNVANILHQRFNNETDNHGNNMEQVRIVMLKSALVSQFRKQFQLYKVREVNDYHHAHDAYLNGVVANTLLKVYPQLEPEFVYGEYHQFDWFKANKATAKKQFYTNIMLFFAQKERIIDENGEILWDKKYLETIKKVLDYRQMNIVKKTEIQKGEFSKATIKPKGNSSKLIPRKENWDPMKYGGLDSPNMAYAVIIEHAKGKKKVVFEKKIIRITIMERKAFEKDEKSFLEKQGYRQPKVLTKLPKYTLYECENGRRRMLASANEAQKGNQQVLKGQLITLLHHAKNCEASDGKSLDYIESNREMFGELLAHVSEFAKRYTLADANLSKINQLFEQNKDNDIKVIAQSFVNLMAFNAMGAPASFKFFEATIERKRYTNLKELLSATIIYQSITGLYEARKRLDG

SEQ ID NO: 311 - protein, 1334 aa, Listeria monocytogenes
  Listeria monocytogenes FSL N3-165
MKKPYTIGLDIGTNSVGWAVLTDQYDLVKRKMKISGDSEKKQIKKNFWGVRLFEKGETAAKRRMSRTARRRIERRRNRISYLQEIFAIQMNEVDDNFFNRLKESFYAESDKKYNRHPFFGTVEEEVAYYKDFPTIYHLRKELIDSQKKADLRLVYLALAHIIKYRGHFLIEGALDTKNTSIDEMFKQFLQIYNQVFANDIEEASLKKTEKNQEVAQILAEKFTRKDKLDKILSLYPGEKTTGVFAQFVNIIVGSTGKFKKHFNLHEKKDINCAEDTYDTDLESLLAIIGDEFAEVFVAAKNAYNAVVLSNIITVTDSTTRAKLSASLIERFENHKEDLKKMKRFVRTYLPEKYDEIFDDTEKHGYAGYISGKTKQADFYKYMKATLEKIEGADYFIAKIEEENFLRKQRTFDNGVIPHQLHLEELEAILHQQAKYYPFLREDYEKIKSLVTFRIPYFVGPLAKGQSEFAWLTRKADGEIRPWNIEEKVDFGKSAVDFIEKMTNKDTYLPKENVLPKHSLCYQKYMVYNELTKVRYIDDQGKTNYFSGQEKQQIFNDLFKQKRKVKKKDLELFLRNINQIESPTIEGLEDSFNASYATYHDLLKVGMKQEILDNPLNTEMLEDIVKILTVFEDKRMIKEQLQQFSDVLDGTVLKKLERRHYTGWGRLSAKLLVGIRDKQSHLTILDYLMNDDGLNRNLMQLINDSNLSFKSIIEKEQVSTTDKDLQSIVAELAGSPAIKKGILQSLKIVDELVSVMGYPPQTIVVEMARENQTTNKGKNNSKPRYKSLEKAIKEFGSQILKEHPTDNQELKNNRLYLYYLQNGKDMYTGQELDIHNLSNYDIDHIVPQSFITDNSVDNLVLTSSAGNREKGDNVPPLEIVQKRKIFWEKLYQGNLMSKRKFDYLTKAERGGLTEADKARFIHRQLVETRQITKNVANILHQRFNYKTDGNKDTMETVRIVTLKSALVSQFRKQFQFYKVREVNDYHHAHDAYLNGVVANTLLKVYPQLEPEFVYGEYHQFGWFKANKATAKKQFYTNIMLFFAQKDRIIDENGEILWDKRYLETVKKVLGYRQMNIVKKTEIQKGEFSNVTPNPKGKSNKLIPRKKDWDPIKYGGFDGSKMAYAIIIEYEKQKRKVRIEKKLIQINIMEREAFEKDEKTFLEEKGYHQPKVLIKVPKYTLYECKNGRRRMLGSANEAHKGNQMLLPNHLMALLYHAEKYEAIDGESLAYIEVHRALFDELLAYISEFARKYTLSNDRLDEINMLYERNKDGDVKSIAESFVSLKKFNAFGVHQDFSFFGTKIERKRDRKLNELLNSTIIYQSITGLYESRKRLDN

SEQ ID NO: 312 - protein, 1334 aa, Listeria monocytogenes
  Listeria monocytogenes FSL R2-503
MKNPYTIGLDIGTNSVGWAVLTDQYDLVKRKMKVAGNSDKKQIKKNFWGVRLFDDGQTAVDRRMNRTARRRIERRRNRISYLQEIFAVEMANIDANFFCRLNDSFYVDSEKRNSRHPFFATIEEEVAYHKNYRTIYHLREELVNSSEKADLRLVYLALAHIIKYRGNFLIEGALDTKNTSVDEVYKQFIQTYNQVFMSNIEEGALAKVEENTEVASILAGKFTRREKFERILRLYPGEKSTGMFAQFISLIVGNKGNFQKVFNLVEKTDIECAKDSYEEDLEALLAIIGDEYAELFVAAKNTYNAVVLSSIITVTATETNAKLSASMIERFDAHEKELGELKAFIKLHLPKQYQEIFNNAEIDGYAGYIDGKTKQVDFYKYLKTTLENVEGADYFITKIEEENFLRKQRTFDNGVIPHQLHLEELEAILHQQAKYYPFLREGYDKIKSLVTFRIPYFVGPLANGQSEFAWLTRKDDGEIRPWNIEEKVDFGKSAVDFIEKMTNKDTYLPKENVLPKHSLCYQKYMVYNELTKIRYIDDQGKTNYFSGREKQQIFNDLFKQKRKVKKKDLELFLRNINHIESPTIEGLEDSFNASYATYHDLLKVGLKQEILDNPLNTEILEDIVKILTVFEDKRMIKEQLEQFSDVLDGVVLKKLERRHYTGWGRLSAKLLVGIRDKQSHLTILDYLMNDDGLNRNLMQLINDSNLSFKSIIEKEQVSTTDKDLQSIVADLAGSPAIKKGILQSLKIVDELVSIMGYPPQTIVVEMARENQTTGKGKNNSKPRYKSLEKAIKDFGSQILKEHPTDNQELKNNRLYLYYLQNGKDIYTGQELDIHNLSNYDIDHIVPQSFITDNSIDNLVLTSSAGNREKGGDVPPLEIVRKRKVFWEKLYQGNLMSKRKFDYLTKAERGGLTEADKARFIHRQLVETRQITKNVANILHQRFNKETDNHGNTMEQVRIVTLKSALVSQFRKQFQLYKVREVNDYHHAHDAYLNGVVANTLLKVYPQLEPEFVYGEYHQFDWFKANKATAKKQFYTNIMLFFAQKERIIDENGEILWDKKYLETIKKVLDYRQINIVKKTEIQKGEFSKATIKPKGNSSKLIPRKENWDPVKYGGLDSPNMAYAVIIEHAKGKKKIVIEKKLIQINIMERKMFEKDEEAFLEEKGYHQPKVLTKLPKYTLYECEKGRRRMLSSANEAQKGNQLVLSNHLVSLLYHAKNCEASDGKSLKYIEAHRETFSELLAQVSEFATKYTLADANLSKINNLFEQNKEGDIKAIAQSFVDLMAFNAMGAPASFKFFEATIDRKRYTNLKELLSSTIIYQSITGLYESRKRLDD

SEQ ID NO: 313 - protein, 1334 aa, Listeria monocytogenes
  Listeria monocytogenes serotype 1/2a str. F6854
MKNPYTIGLDIGTNSVGWAVLTNQYDLVKRKMKVAGNSDKKQIKKNFWGVRLFDDGQTAVDRRMNRTARRRIERRRNRISYLQEIFAVEMANIDANFFCRLNDSFYVDSEKRNSRHPFFATIEEEVAYHDNYRTIYHLREKLVNSSEKADLRLVYLALAHIIKYRGNFLIEGALDTKNTSVDEVYKQFIETYNQVFMSNIEEGALAKVEENIEVANILAGKFTRREKFERILQLYPGEKSTGMFAQFISLIVGSKGNFQKVFDLIEKTDIECAKDSYEEDLETLLAIIGDEYAELFVAAKNTYNAVVLSSIITVTDTETNAKLSASMIERFDAHEKDLVELKAFIKLNLPKQYEEIFSNAAIDGYAGYIDGKTKQVDFYKYLKTILENIEGSDYFIAKIEEENFLRKQRTFDNGAIPHQLHLEELEAIIHQQAKYYPFLKEDYDKIKSLVTFRIPYFVGPLANGQSEFAWLTRKADGEIRPWNIEEKVDFGKSAVDFIEKMTNKDTYLPKENVLPKHSLCYQKYMVYNELTKIRYIDDQGKTNYFSGREKQQVFNDLFKQKRKVKKKDLELFLRNINHIESPTIEGLEDSFNASYATYHDLLKVGMKQEILDNPLNTEMLEDIVKILTVFEDKPMIKEQLQQFSDVLDGGVLKKLERRHYTGWGRLSAKLLVGIREKQSHLTILDYLMNDDGLNRNLMQLINDSNLSFKSIIEKEQVSTTDKDLQSIVAELAGSPAIKKGILQSLKIVDELVSIMGYPPQTIVVEMARENQTTGKGKNNSKPRYKSLEKAIKEFGSQILKEHPTDNQELKNNRLYLYYLQNGKDMYTGQELDIHNLSNYDIDHIVPQSFITDNSIDNLVLTSSAGNREKGGDVPPLEIVRKRKVFWEKLYQGNLMSKRKFDYLTKAERGGLTEADKARFIHRQLVETRQITKNVANILYQRFNKETDNHGNTMEQVRIVTLKSALVSQFRKQFQLYKVREVNGYHHAHDAYLNGVVANTLLKVYPQLEPEFVYGEYHQFDWFKANKATAKKQFYTNIMLFFAQKERIIDENGEILWDKKYLETIKKVLDYRQMNIVKKTEIQKGEFSKATIKPKGNSSKLIPRKENWDPMKYGGLDSPNMAYAVIIEHAKGKKKIVIEKKLIQINIMERKMFEKDEEAFLEEKGYRHPKVLTKLPKYTLYECEKGRRRMLASANEAQKGNQLVLSNHLVSLLYHAKNCEASDGKSLKYIEAHRETFSELLAQVSEFATRYTLADANLSKINNLFEQNKEGDIKAIAQSFVDLMAFNAMGAPASFKFFEATIDRKRYTNLKELLSSTIIYQSITGLYESRKRLDD

SEQ ID NO: 314 - protein, 1087 aa, Listeriaceae bacterium
  Listeriaceae bacterium TTU M1-001
MKKLVLGLDIGVASVGWGIIDAENGDVVDTGVRLFSSRDASENESRRTSRQSRRLSRRKKHRRERIKQLLLAHDMDICDIVNENPYELRVKGLNEKLEVSEIYVALTHLAKRRGVSYLDDVVEEGGTIKSEHLNKNMEEIKSGKMPCEIQLERFEKYGQVRGMIEINQDTEESSFLVNIFRTSDYIKEAKTILATQQKFHKQITNEFIDEYIHIMASKRDYFIGPGNEKSRTDYGVYRTNGDTWDNLFEILIGKCSVFPEETRAARSSYVAQEFNLLNDLNNLKISNLESGKLSASQKHDIVEKVKNSKKFGTKDLLKYIASVCECKIEDIGGCRVDKNRKPIMHTFENYRKVHNALNEAGVDLRLSETDYDELMKIMTLNSETLEIKKQCKEKLPQLTEDYLNVCLVLNKKGAFSGWHALSLKAMKLMMPELYGTSKNQMQIIHTMQLGKAYLKPLNQQKYLNSEAILEEIYNPIAARSIRQTIKVTNAILKKYGHLDSVIIEMPRDYQTSEDERKMIEKMQKENEKEKKAALKRAREEYPFPDEAFRNHKELATKLRLWYQQDQFCVYSGRKISVVDLVRNPNQFEIDHIIPQSVSLDDSLNNKVLCFSEENQKKGQQTPFYYHKGKSGNWTYEQYKLFVEKLFDKKKISNKKRELLLFEEDINKWDVRRGFIARNLVDTRYASRVILNSYQQYFGNHEMGTKVKVVRGKFTSQLRKKWRIFKDRNESHSHHAIDALIVAATANLRLWKKNTLGVSDEGKVYDKETGEILPFEKLTESEYNEMMNKEPYLNFKTKLQNIETKVKYSYRVSKKVNRKISDATIYSTRERDGIDYIVGKIKNIYDVKTYKDQFLKRYKKNKEQFLMYQHDPQTFAILENIMATYQDAENPFLAYKKEYGVIRKYSKKGGGSPVTSLKFIDKVLGQKIDLTAKNQAALPKNKKVVLQSITPYRADVYYDEIDKRYHLIGVKYSLFSFSKQGYVINPIAYQKLLEKEQIHSEMKFCFSLYREDIIEFGEDPDSLTRYRFWSKNESGKNKIEVKPIEKPNFEKQTVLTITKKIKILNKYQTDVLGNSFKAQEEKDPRNIE

SEQ ID NO: 315 - protein, 1345 aa, Marinilabilia sp.
  Marinilabilia sp. AK2
MKKILGLDLGTTSIGWAFIKEPEKDVVGSEIVDMGVRIVALSSDEENDFAKGNTISINADRTLKRGARRNLQRFKLRRDALLEIFKEMKLIPSNFKYAEDGPSSTFSTLKLRDKAAKEKIELDDLVKVLLQINKKRGYRSSRKAKSEEDDGSAIDSMGIAKELYENDLTPGQWVFEALQKGRKNVPDFYRSDLQEEFKKIVNYQSEFYPDVLNSSFVEDWMGKASTPTKQYFNKKGVHLAENKGKREERRLQEYNWRAVAVNSKIDLSEIALILSQINSQISNSSGYLGAISDRSKELYFKNQTVGQYLYQQIKINPHTRLKGQVFYRQDYLDEFEKIWSVQSGFHPQLNDALKKEIRDITIFFQRRLKSQKHLISNCEFEDYHKVVPKSHPIFQEFRIWQNLNNLTLIKKDNLNEKSELALEDKIALANELAFKREQSVKDALNILGLKSSEWEFNFTKIEGNRTNHAFFEAFAKIIEIEDGEPLDLGNLKADDILDQFSEAFLRIGIDPGLLQVNNDIEGPNYEKQPYIQFWHLLYSSEDDQKLKQNLIKKFGFKPDHAKILASISLQDDHASLSSRAIKKILPHLQSGLIYDKACTYAGYNHSSSFTKEENEKRELSSELDLLKKNSLRNPVVEKILNQMINVVNAILKDPNLGKPDEIRVEMARELKANAEQRKNMTSNIASATRDHEKYREILKKEFGLKRVTKNDLLRYKLWLETDGISLYTGKPIEASKLFSKEYDIEHIIPKTRLFDDSFSNKTICERQLNIDKANVTAFSFLQNKLSGDEFEQYQSRVKSLFGKLSKAKIQKLLMANDKIPEDFIARQLQETRYISKKAKEILFEITRRVSVTTGTITDKLREDWGLVEIMKELNWEKYDKLGLTYTIEGKHGERLNKIKDWSKRNDHRHHAMDALTVALTKPAYIQYLNNLNAKELNGKKSTEIFAIEQKYLKRENGKLCFIPPVENIRTEAKKHLSKVLISYKAKNKVVTINKNRTNKKAGFNEQIALTPRGQLHKETVYGKAFHYSTKFEKIGASFDVQKINAVAKKEEREALLKRLAENGDDPKKAFTGKNSLSKMPIYLDLKRNIKLPEKVKTVVLEQNYTIRKNIDPDLKLDKVIDVGVKRILENRLKEFGGNAKLALSNLDENPIWLNKEKGITIKRVKISGVSNVESLHVKKDHFGEPILDQVGNEIPVDFVSTGNNHHVAIYEDEKGNLQEEVVSFFEAVVRQNQGLPIINKNHSLGWKFLFTLKQNEYFVFPSDDFDPTDVDLMDEENYHLISPNLFRVQKFTTKDYFFRHHLETTVEDKSELKGVSFKRLGLPGLNCIKKIRINHLGKIIQVGEY

SEQ ID NO: 316 - protein, 1352 aa, Megasphaera sp.
  Megasphaera sp. UPII 135-E
MKKRNREEYYVGLDIGTSSVGWAVATPDYRIPKFRGHKMWGSRLFAEGKRAAERRQFRTNRRRLARRRDRLQILEELFAEEMAKVDNTFFMRLKESKFFLEDKTVKEKHILFSTDKFDADRFYKDNPTIYHVRKRLMEEEPQDIRELFLAVHHILKYRGHFLFAGSLEQNGASIEELVRTLLGKQGLAILDDTIDSNEMVNILKNTGETKSDRKKDVQELWNPLKDKVKKAQAAEMAGLVLGLKSDISKLFANSDYKDLDSSIKNINFSSGDYEEKRDDYANSIGDDIVLLDTMKALYDTLILSQILQGKRSISAAKVEDYNTHKEQLRALKAILKPHKRLYNEMFRENNKKDLSNYVAYISSYSEGKRVNREGFYKYVQAVLKQVDDSDSKQAILEAIRLETFLPLLRVKDNAVIPHQIHQAELEAILETARKKYNFLNDVSDGVSVKDKIIQLFTFRIPYYVGPLNPHSGETVADRKQGTGWVVRKQRGKVYPWNFADMVDVKASAEAFITNLTNKCTYLIGEDVLPKRSLLYSEFMLLNELNMIKYDGHELPVAIKQLYIEQVFKQEHKKQTKGRVLDFLKRNGLITGSATAVITGMDDAIKGDLQSYRDMVRIFGAGFDHSMAERIIRWVTLFGEAKDILENKIREVYGNSISDSQMRAIKKLKYADWGRLSQAFLIAVKGCDKSGVERNIITCLRASSQNLMEILSDQGTYIKQIKAWNHQHTTNMMDTLDYQLVDDLYVAPSVKRSIWQSLCIVEELVKIMGQAPKKIFVEVTRTKQAEKTKKDSRKKRLVELYTAIGKEGAAWKKEIEAHQAGDFRRKKLYLYYTQMGRCMYSNEPIAMDALFTSAYDIDHIYPQSLTKDGSWDNLVLVKSQLNKEKSDQYPLRPAIREKNKAHWQYLCRAGFISEKKYERLMRTTELTAEELSGFIARQLVETSQATKAVTGLLERIYTNTEICFVKAETVSQFRHQHNFIKIRELNNYHHAKDAYLNIVVGNVYHEKFTKNPWEFIARSTERRPYNLNRMYDFDLLKQGRVIWQVPKSLETVQAMMKSNDVRITKKLLVQKGELYDATITKAHKAKEGTYFPLKGADARLRDVHRYGGYEKIKIAYYSVFSCREKASNTIHTLIIPIPVYKAGLLQTEADLTAYAWQTKQKTKPIKDIYSAITPIYKKLCINTVVKIDGFKYFLGGKTGDYMWLDPAIPVVLDEQAAAYLKAISKVGRADDVENTAQAIDLITAEANEAFYDVLLKKMEAKIFAKAYQTIVEKLASETARERFRELSIGAQCSCLLEILNLLANNKTTFTFFKDKMGVTMSRRKQPMDLTKLEECIVYETSITGLYEKAVSLL

SEQ ID NO: 317 - protein, 1080 aa, Methylocystis sp.
  Methylocystis sp. ATCC 49242
MRVLGLDGGIASIGWALIEIFEDHEPSDGRIIDTGAWMFDAPEEKSQTGTKLKSELRRIFRGQRRVIRRRRQRMNEVRRILHRHGLLSSDNRDALKQPGLDPWKIRAEGIDRLLSPIEFAVALGHIARHRGFKSNSKGAKTSDLDAESSRMKKAVGETREKLARFGSPAKLLVEDEGFVLRQTKLKSGALETVRRFRNRDGDYSRSLLRDDLAAEVRALFRAQARLQSTFAKVELEAEFTQAAFFQRPLQDSERLVGPCPFEPAEKRSPKRGYSFELFRFLSRLNHLTLREGSEERTLTVEELRTAAADFGGVAKFTFSTLRKRLALPDIAIFVGIKADDEKKLDVVARSGEAATGTARLRRVVIDALGELAWGALISAPERLDKITEIITFRSDLDRIRAGLIEAGFDTPLIEAIVRAAADGKLDAFTGVGHISAKAARNIIPGLMRGMTYDKACAAAGYDHTASRERDAFDVGMHGKEALKKILQEERISRELVGSPSARKALIEAVKQVKAIIEKYGVPDRIHVELARDVGKSIEERRDIHFGIEKRSRQKDKLRELFGKEVGHLPQDGERGKEELLRFELWNEQMGRCLYTDEYINPKQLVASDNSVQVDHILPWSRFGDDSYLNKTLCTAKANQDKKGRTPYEWFRADKPEAEWDAFVARVESIQFMKGLKKRNYKLKNAEEAAEKFRSRNLNDTRWTCRLLAEALKQLYPKGEKDKDGKERRRVFTRPGALTNRLRRAWSLQRRKKSEKGERIADDRHHALDAIIVAATTESLLIRATREVQDIERKGLHYDLTKNITQPWPGFADEALDAVEKVFVARAERRRARGKAHDATIRHIAVRDDEAKVYERKKVGDIKLGDLIRVKDAERNAPLIENLRKWIEAGSPRDNPPLSPKGDPVSKVRLVTKNKVNITLDTGNPERLATVDRGEMARVDVFRKANRKGKYEYYLVPIYPHEIATMETPPMRAVQGGGDDDKWPEIDSTFEFLWSINQLSLLELTKPDGEVIRSYFRSLDRNTGALTVSGIANSTATRKGIGTRTLIDFKKLHVDRLGQIFEVERELRTWRGETWRGKDCI

SEQ ID NO: 318 - protein, 1082 aa, Methylosinus trichosporium
  Methylosinus trichosporium OB3b
MRVLGLDAGIASLGWALIEIEESNRGELSQGTIIGAGTWMFDAPEEKTQAGAKLKSEQRRTFRGQRRVVRRRRQRMNEVRRILHSHGLLPSSDRDALKQPGLDPWRIRAEALDRLLGPVELAVALGHIARHRGFKSNSKGAKTNDPADDTSKMKRAVNETREKLARFGSAAKMLVEDESFVLRQTPTKNGASEIVRRFRNREGDYSRSLLRDDLAAEMRALFTAQARFQSAIATADLQTAFTKAAFFQRPLQDSEKLVGPCPFEVDEKRAPKRGYSFELFRFLSRLNHVTLRDGKQERTLTRDELALAAADFGAAAKVSFTALRKKLKLPETTVFVGVKADEESKLDVVARSGKAAEGTARLRSVIVDALGELAWGALLCSPEKLDKIAEVISFRSDIGRISEGLAQAGCNAPLVDALTAAASDGRFDPFTGAGHISSKAARNILSGLRQGMTYDKACCAADYDHTASRERGAFDVGGHGREALKRILQEERISRELVGSPTARKALIESIKQVKAIVERYGVPDRIHVELARDVGKSIEEREEITRGIEKRNRQKDKLRGLFEKEVGRPPQDGARGKEELLRFELWSEQMGRCLYTDDYISPSQLVATDDAVQVDHILPWSRFADDSYANKTLCMAKANQDKKGRTPYEWFKAEKTDTEWDAFIVRVEALADMKGFKKRNYKLRNAEEAAAKFRNRNLNDTRWACRLLAEALKQLYPKGEKDKDGKERRRVFSRPGALTDRLRRAWGLQWMKKSTKGDRIPDDRHHALDAIVIAATTESLLQRATREVQEIEDKGLHYDLVKNVTPPWPGFREQAVEAVEKVFVARAERRRARGKAHDATIRHIAVREGEQRVYERRKVAELKLADLDRVKDAERNARLIEKLRNWIEAGSPKDDPPLSPKGDPIFKVRLVTKSKVNIALDTGNPKRPGTVDRGEMARVDVFRKASKKGKYEYYLVPIYPHDIATMKTPPIRAVQAYKPEDEWPEMDSSYEFCWSLVPMTYLQVISSKGEIFEGYYRGMNRSVGAIQLSAHSNSSDVVQGIGARTLTEFKKFNVDRFGRKHEVERELRTWRGETWRGKAYI

SEQ ID NO: 319 - protein, 1123 aa, Mobiluncus curtisii
  Mobiluncus curtisii subsp. holmesii ATCC 35242
MFVYLNSPRGFGPATFLTDLPHFCIIFGNNDFMDNRKYHVGIDVGTNSVGFAAVEVGDSGSPIRFLNTMVVIHDSGVDPEQKKYAITRLASAGTARRTRRLYRTRRQRLRELDDFISNELGYPLVNLENFADPYEPWKVRADLATIKLPADELPEAMSIALRHMARHRGWRSPYQRVEALHLHAEISEEFSALKKRVMEKTGDVFSDDATPAEVLVDLMGRQKIRGADGMLSGKLRQSDNANELRKIASVQGIDDETLNRIIDRVFFSRSPKGKASERVGMDALPGQGSKPRALKAMPSFQKFRIVSVICNLRIKDSGDDNRPLSMEEKEQLIGYLMSSTTDDHVTWTDVAELLHVKRSNLQGTAKEGPDGERPYTRPPVNSAWSKIKDSKIKSLVALWKTGDVDVQSAIVEALSNASVLEDARPGADIVVAYLESLDDKELESLDKVGLPAGRASYSEDSLERLTERMLQDDCDLFEARKREFGVSDDWKPPADPIYAPVGNPGVDRVLKIVNRLLMAAEREWGAPTQINIEHVRSGFSSELMQREFERENERRRAQNEEAVKAILTEKGGNSHVSKYDIIRYYAVKRQNCQCLYCGTPITFSDCELDHIVPRKGVGSTNSRVNLAAACRSCNRDKSNLPFAVWAGKTSNFDVSIDGAVSRVKQWQRSQNEGAREFRAFQNEVISRLLKTTEDPEIDSRSLESVAWMARELHHRVEYYFQSKGAQTQVSVYRGAVTAQARKSSGLEDKVKMIGGGGKTRLDRRHHAMDAATIALMTPGISTTLSEKNNLRDAQKFTGQSETWKDYCGRTETAREHFAVWKSNMERLTDLFNDKLENDAIPVVQPLRLRLSDSKAHDDGIGKLDSKKLGSVWSLADIDRAATPQIWTALTRCDDFDPTKGLPENANRVIRAQGVKYESEDNIPVFPSNVAAIAVRDGYAEIGSTIHHARIYRIDDGKKIFYSMIRVFAVDLLKHQAEDLFTVKLPPSAISIRTCEDSLRRALSNGTAEYLGWLVPGDEIIVDTSDKAFHTGQIGDLLRNFPVNSFRLTGFPSNSRLRLKPVLLAGEGLRDDAEDSIKKILSGQGWRPAINVLFSKGKPRIVRRNSLGIERPSSNNGLPFSWEA

SEQ ID NO: 320 - protein, 1091 aa, Mobiluncus mulieris
  Mobiluncus mulieris 28-1
MDSRKYRVGIDVGTNSVGFAAVEEDDSGSPTRFLNTMVVIHDSGVDPEQKKYAITRLASAGTARRTRRLYRTRRQRLRELDDFISNELGYPLVNLENFADPYEPWKVRADLATTKLPNDELPEAMSIALRHMARHRGWRSPYQRVEALHLHAEISKEFAALKERVVEKTGDVFSDDATPAEVLVDLMGRQKVRGADGVLSGKLRQSDNANELRKIASVQGIDDETLNRIIDRVFSSKSPKGKASERVGMDALPGQGSKPRALKAMPSFQKFRVVSVICNLRIKDSGGDARPLSMEEKEKLIDYLMSSTTDDHVTWTDVADLLHVKRSQLQGTAKEGFDGERPYTRPPVNSTWSKIKDSKIKSLVALWKTGDVDVQSAIVEALSNASVLEDSRPGADIVVAYLESLDDKELESLDKVGLPAGRASYSEDSLERLTERMLRDDCDLFEARKREFNVADDWKPPADPIYAPVGNPGVDRVLKIVNRLLMAAEREWGAPTQINIEHVRSGFSSELMQREFERENERRRAQNEEAVKAILTEKGGNSRVSKYDITRYYAVKRQHCQCLYCGTPITFSDCELDHIVPRKGVGSTNTRVNLAAACRSCNRDKSNLPFAVWAGKASNFDVSIDDAVSRVKQWQRSQNEGVREFRAFQNEVISRLLKTTEDPEIDSRSLESVAWMARELHHRVEYYFQSKGAQTQVSVYRGAVTAQARKSSGLEDKVKMIGGGGKTRLDRRHHAMDAATIALMTPGISTTLSEKNNLRDAQKFTGQSETWKDYCGRTETARKHFAVWKSNMERLTDLFNDKLENDAIPVVQPLRLRLSNSKAHDDGIGKLDSKKLGSVWSLADIDRAATPQIWTALTRCDDFDPTKGLPENANRVIRAQGVKYESEDNIPVFPSNVAAIAVRDGYAEIGSTIHHARIYRIDDGKKTFYSMIRVFAVDLLKHQAEDLFTVKLPPSAISIRTCEDSLRRALSNGTAEYLGWLVPGDEIIVDTSDKAFHTGQIGDLLRNFPVNSFRLTGFPSNSRLRLKPVLLAGEGLRDDAEDSIKKILLGQGWRPAINVLFSKGKPRIVRRNSLGIERPSSNNGLPFSWEA

SEQ ID NO: 321 - protein, 1091 aa, Mobiluncus mulieris
  Mobiluncus mulieris FB024-16
MDSRKYRVGIDVGTNSVGFAAVEEDDSGSPTRFLNTMVVIHDSGVDSEQKKYAITRLASAGTARRTRRLYRTRRQRLRELDDFISNELGYPLVNLENFADPYEPWKVRADLATTKLPNDELPEAMSIALRHMARHRGWRSPYQRVEALHLHAEISKEFAALKERVVEKTGDVFSDDATPAEVLVDLMGRQKVRGADGVLSGKLRQSDNANELRKIASVQGIDDETLNRIIDRVFSSKSPKGKASERVGMDALPGQGSKPRALKAMPSFQKFRVVSVICNLRIKDSGGDARPLSMEEKEKLIDYLMSSTTDDHVTWTDVADLLHVKRSQLQGTAKEGFDGERPYTRPPVNSTWSKIKDSKIKSLVALWKTGDVDVQSAIVEALSNASVLEDSRPGADIVVAYLESLDDKELESLDKVGLPAGRASYSEDSLERLTERMLRDDCDLFEARKREFNVADDWKPPADPIYAPVGNPGVDRVLKIVNRLLMAAEREWGAPTQINIEHVRSGFSSELMQREFERENERRRAQNEEAVKAILTEKGGNSRVSKYDITRYYAVKRQHCQCLYCGTPITFSDCELDHIVPRKGVGSTNTRVNLAAACRSCNRDKSNLPFAVWAGKASNFDVSIDDAVSRVKQWQRSQNEGVREFRAFQNEVISRLLKTTEDPEIDSRSLESVAWMARELHHRVEYYFQSKGAQTQVSVYRGAVTAQARKSSGLEDKVKMIGGGGKTRLDRRHHAMDAATIALMTPGISTTLSEKNNLRDAQKFTGQSETWKDYCGRTETARKHFAVWKSNMERLTDLFNDKLENDAIPVVQPLRLRLSNSKAHDDGIGKLDSKKLGSVWSLADIDRAATPQIWTALTRCDDFDPTKGLPENANRVIRAQGVKYESEDNIPVFPSNVAAIAVRDGYAEIGSTIHHARIYRIDDGKKTFYSMIRVFAVDLLKHQAEDLFTVKLPPSAISIRTCEDSLRRALSNGTAEYLGWLVPGDEIIVDTSDKAFHTGQIGDLLRNFPVNSFRLTGFPSNSRLRLKPVLLAGEGLRDDAEDSIKKILLGQGWRPAINVLFSKGKPRIVRRNSLGIERPSSNNGLPFSWEA

SEQ ID NO: 322 - protein, 1473 aa, Mucilaginibacter paludis
  Mucilaginibacter paludis DSM 18603
MKNILGLDLGTNSIGWALIEKDTDQKNGNILGTGSRIIPMSQDIKDEFGKGNSISQTADRTKFRSVRRLRERHLLRRERLHRVLNVLGFLPKHYADQIDFKKRLGKLVNETEPKLVYDNKNFIFKKSFEAMLSDFNQHQPLLLADGKKVPFDWTIYYLRKKALTEKIEKEELAWLILNFNQKRGYYQLRGEEEEENPNKMVAFHSLKIVEVIADESQKGKAETWYSLILENGWIYRRSSKTPLYDWKGKQRDFIVTTDLNDDGSIKTDKEGLEKRSFRAPVEDDWTLVKKKTEQEINRSHKTVGTYIYENLLQDPKQKIKGKLVRTIEREFYKDELKMILKNQQKFHPELNDEHLYINCVRELYRNNQAHQTILSKKDFVHLFIDDIIFYQRPLRSQKSSISNCTLEFRKYKNENGTDQTDYLKAIPKSHPLFQEFRLWQWIYNLGIYQKEDDTNVTDELIKNIDGYQDLFDFLNNKKEIRQDILIKFLVEQTGLKGKPLSSVVAKYRWNFVEDKIYPCNETGTQIRTRLAKVENTPEDFLTAETEIKLWHIIYSVNDKADYEKALKTFAEKHNLDTHSFVENFKKFPPFKSEYGSFSEKAIKKLLPLIRLGKYWSWENIDKKTQERIEKILTGEFDEAIKSRVRDKAIHLTEEDHFQGLQLWLASYVVYGRHSEADNLDKWHTVADLEDYLAEFRQHSLRNPIVEQVITETLRVVKDIWLQYGQGAKDFFSEIHIELAREMKNTGDERKRLTSLVTDNENTNLRIKVLLSELLNDGNVENVRPYSPMQQEALKIFEDGVLNSDIEIEDDILKISKMAQPTNTELKRYKLWLEQKYRSPYTGQIIPLNRLFTADYEIEHIIPQSRFFDDSFSNKIICESAVNQLKDKQLGLEFIKNHSGTIVKLGMGKTAKILDVESYNEFVKGNYTKNISKRNKLMLEEIPDKMIERQLNDTRYISKFIISALSNIVRSESNDDGFNSKNVLPGNGKITSRLKQDWGMNDIWNELILPRFERMNKITDSAVFTAWNENNQKFLPIVPLEFSKGFQKKRIDHRHHALDALVIAASTREHINLLNNEHAKSDKRFDLNRKLRKFEKVAYNDPKTGKRIEKEVPTIFLKPWETFTVDAKNSLESIIVSFKQNLRVINRATNYSESYNDENGALRLGKDGNPLKEKIKQSKGDSWAIRKPMHKDFVYGKVHLQNVKLPKDKFITAIRKSLDVTFDLKRIETITDTGIQKILKNYLHSKENKVELAFSPEGIEDMNQHIERYNDGKKHQPIHKVRVFEIGSRFSLGESGNKKTKFVEAAKGTNLFFAVYQDDNKGKRNYETIPLNIVIERQKLGLHSVPTEDAKGGKLLFHLSPNDMVYVPTSEELEDNLASVNIKRLNTAQRKRIYKVEKASGVECYFIRQDIAYLIKNYDAKTKIGELESQNKLQTTMTDDRLKITDVCVKLNIDRLGSIAETFLGNQYGASKKT

SEQ ID NO: 323 - protein, 1233 aa, Mycoplasma canis
  Mycoplasma canis PG 14
MEKKRKVTLGFDLGIASVGWAIVDSETNQVYKLGSRLFDAPDTNLERRTQRGTRRLLRRRKYRNQKFYNLVKRTEVFGLSSREAIENRFRELSIKYPNIIELKTKALSQEVCPDEIAWILHDYLKNRGYFYDEKETKEDFDQQTVESMPSYKLNEFYKKYGYFKGALSQPTESEMKDNKDLKEAFFFDFSNKEWLKEINYFFNVQKNILSETFIEEFKKIFSFTRDISKGPGSDNMPSPYGIFGEFGDNGQGGRYEHIWDKNIGKCSIFTNEQRAPKYLPSALIFNFLNELANIRLYSTDKKNIQPLWKLSSVDKLNILLNLFNLPISEKKKKLTSTNINDIVKKESIKSIMISVEDIDMIKDEWAGKEPNVYGVGLSGLNIEESAKENKFKFQDLKILNVLINLLDNVGIKFEFKDRNDIIKNLELLDNLYLFLIYQKESNNKDSSIDLFIAKNESLNIENLKLKLKEFLLGAGNEFENHNSKTHSLSKKAIDEILPKLLDNNEGWNLEAIKNYDEEIKSQIEDNSSLMAKQDKKYLNDNFLKDAILPPNVKVTFQQAILIFNKIIQKFSKDFEIDKVVIELAREMTQDQENDALKGIAKAQKSKKSLVEERLEANNIDKSVFNDKYEKLIYKIFLWISQDFKDPYTGAQISVNEIVNNKVEIDHIIPYSLCFDDSSANKVLVHKQSNQEKSNSLPYEYIKQGHSGWNWDEFTKYVKRVFVNNVDSILSKKERLKKSENLLTASYDGYDKLGFLARNLNDTRYATILFRDQLNNYAEHHLIDNKKMFKVIAMNGAVTSFIRKNMSYDNKLRLKDRSDFSHHAYDAAIIALFSNKTKTLYNLIDPSLNGIISKRSEGYWVIEDRYTGEIKELKKEDWTSIKNNVQARKIAKEIEEYLIDLDDEVFFSRKTKRKTNRQLYNETIYGIATKTDEDGITNYYKKEKFSILDDKDIYLRLLREREKFVINQSNPEVIDQIIEIIESYGKENNIPSRDEAINIKYTKNKINYNLYLKQYMRSLTKSLDQFSEEFINQMIANKTFVLYNPTKNTTRKIKFLRLVNDVKINDIRKNQVINKFNGKNNEPKAFYENINSLGAIVFKNSANNFKTLSINTQIAIFGDKNWDIEDFKTYNMEKIEKYKEIYGIDKTYNFHSFIFPGTILLDKQNKEFYYISSIQTVRDIIEIKFLNKIEFKDENKNQDTSKTPKRLMFGIKSIMNNYEQVDISPFGINKKIFE

SEQ ID NO: 324 - protein, 1233 aa, Mycoplasma canis; identical to SEQ ID NO: 323
  Mycoplasma canis PG 14

SEQ ID NO: 325 - protein, 1233 aa, Mycoplasma canis
  Mycoplasma canis UF31
MEKKRKVTLGFDLGIASIGWAIVDSETNQVYKLGSRLFDAPDTNLERRTQRGTRRLLRRRKYRNQKFYNLVKRTEVFGLSSREAIENRFRELSIKYPNIIELKTKALSQEVCPDEIAWILHDYLKNRGYFYDEKETKEDFDQQTVESMPSYKLNEFYKKYGYFKGALSQPTESEMKDNKDLKEAFFFDFSNKEWLKEINYFFNVQKNILSETFIEEFKKIFSFTRDISKGPGSDNMPSPYGIFGEFGDNGQGGRYEHIWDKNIGKCSIFTNEQRAPKYLPSALIFNFLNELANIRLYSTDKKNIQPLWKLSSIDKLNILLNLFNLPISEKKKKLTNANINDIVKKESTKSIMLSVEDIDMIKDEWAGKEPNVYGVGLSGLNIEESAKENKFKFQDLKILNVLINLLDNVGIKFEFKDRNDIIKNLELLDNLYLFLIYQKESNNKDSSIDLFIAKNELLNIENLKLKLKEFLLGAGNEFENHNSKTHSLSKKAIDAILPKLLDNNEGWNLEAIKNYDEEIKSQIEDNSSLMAKQDKKYLNDNFLKDAILPPNVKVTFQQAILIFNKIIQKFSKDFEIDKVVIELAREMTQDQENDALKGIAKAQKSKKSLVEERLEANNIDKSVFNDKYEKLIYKIFLWISQDFKDPYTGAQISTNEIVNNKVEIDHIIPYSLCFDDSSANKVLVHKQSNQEKSNSLPYEYIKQGHSGWNWDEFTKYVKRVFVNNVDSILSKKERLKKSENLLTTSYDGYDKLGFLARNLNDTRYATILFRDQLNNYAEHHLIDNKKMFKVIAMNGAVTSFIRKNMSYDNKLRLKDRSDFSHHAYDAAIIALFSNKTKTLYNLIDPSLNGIISKRSEGYWVIEDRYTGEIKELKKEDWTSIKNNVQARKIAKEIEEYLIDLDDEVFFSRKTKRKTNRQLYNETIYGIAAKTDEDGITNYYKKEKFSILDDKDIYLRLLREREKFVINQSNPEVIDQIIEIIESYGKENNIPSRDEAINIKYTKNKINYNLYLKQYMRSLTKSLDQFSEEFINQMIANKTFVLYNPTKNTTRKIKFLRLVNDVKINDIRKNQVINKFNGKNNEPKAFYENINSLGAIVFKNSANNFKTLSINTQIAIFGDKNWDIEDFKTYNMEKIEKYKEIYGIDKTYNFHSFIFPGTILLDKQNKEFYYISSIQTVRDIIEIKFLNKIEFKDENKNPDTSKTPKRLMFGIKSIMNNYEQVDISPFGINKKIFE

SEQ ID NO: 326 - protein, 1233 aa, Mycoplasma canis
  Mycoplasma canis UF33
MEKKRKVTLGFDLGIASVGWAIVDSETNQVYKLGSRLFDAPDTNLERRTQRGTRRLLRRRKYRNQKFYNLVKRTEVFGLSSREAIENRFRELSIKYPNIIELKTKALSQEVCPDEIAWILHDYLKNRGYFYDEKETKEDFDQQTVESMPSYKLNEFYKKYGYFKGALSQPTESEMKDNKDLKEAFFFDFSNKEWLKEINYFFNVQKNILSETFIEEFKKIFSFTRDISKGPGSDNMPSPYGIFGEFGDNGQGGRYEHIWDKNIGKCSIFTNEQRAPKYLPSALIFNFLNELANIRLYSTDKKNIQPLWKLSSVDKLNILLNLFNLPISEKKKKLTSTNINDIVKKESIKSIMISVEDIDMIKDEWAGKEPNVYGVGLSGLNIEENAKENKFKFQDLKILNVLINLLDNVGIKFEFKDRNDIIKNLELLDNLYLFLIYQKESNNKDSSIDLFIAKNKSLNIENLKLKLKEFLLGAGNEFENHNSKSHSLSKKAIDAILPKLLDNNEGWNLEAIKNYDEEIKSQIEDNSSLMAKQDKKYLNDNFLKDAILPPNVKVTFQQAILIFNKIIQKFSKDFEIDKVVIELAREMTQDQENDALKGMAKAQKSKKSLVEERLEANNIDKSVFNDKYEKLIYKIFLWISQDFKDPYTGAQISVNEIVNNKVEIDHIIPYSLCFDDSSANKVLVHKQSNQEKSNSLPYEYIKQGHSGWNWDEFTKYVKRVFVNNVDSILSKKERLKKSENLLTTSYDGYDKLGFLARNLNDTRYATILFRDQLNNYAEHHLIDNKKMFKVIAMNGAVTSFIRKNMSYDNKLRLKDRSDFSHHAYDAAIIALFSNKTKTLYNLIDPSLNGIISKRSEGYWVIEDRYTGEIKELKKEDWTSIKNNVQARKIAKEIEEYLIDLDDEVFFSRKTKRKTNRQLYNETIYGIAAKTDEDGITNYYKKEKFSILDDKDIYLRLLREREKFVINQSNPEVIDQIIEIIESYGKENNIPSRDEAINIKYTKNKINYNLYLKQYMRSLTKSLDKFSEEFINQMIANKTFVLYNPTKNTTRKIKFLRLVNDVKINDIRKNQVINKFNGKNNEPKAFYENINSLGAIVFKNSANNFKTLSINTQIAIFGDKNWDIEDFKTYNMEKIEKYKEIYGIDKTYNFHSFIFPGTILLDKQNKEFYYISSIQTVRDIIEIKFLNKIEFKDENKNQDTSKTPKRLMFGIKSIMNNYEQVDISPFGINKKIFE

SEQ ID NO: 327 - protein, 1233 aa, Mycoplasma canis
  Mycoplasma canis UFG1
MEKKRKVTLGFDLGIASVGWAIVDSETNQVYKLGSRLFDAPDTNLERRTQRGTRRLLRRRKYRNQKFYNLVKRTEVFGLSSREAIENRFRELSIKYPNIIELKTKALSQEVCPDEIAWILHDYLKNRGYFYDEKETKEDFDQQTVESMPSYKLNEFYKKYGYFKGALSQPTESEMKDNKDLKEAFFFDFSNKEWLKEINYFFNVQKNILSETFIEEFKKIFSFTRDISKGPGSDNMPSPYGIFGEFGDNGQGGRYEHIWDKNIGKCSIFTNEQRAPKYLPSALIFNFLNELANIRLYSTDKKNIQPLWKLSSVDKLNILLNLFNLPISEKKKKLTSTNINDIVKKESIKSIMLSVEDIDMIKYEWAGKEPNVYGVGLSGLNIEESAKENKFKFQDLKILNVLINLLDNVGIKFEFKDRNDIIKNLELLDNLYLFLIYQKESNNKDSSIDLFIAKNKSLNIENLKLKLKEFLLGAGNEFENHNSKTHSLSKKAIDAILPKLLDNNEGWNLEAIKNYDEEIKSQIEDNSSLMAKQDKKYLNDNFLKDAILPPNVKVTFQQAILIFNKIIQKFSKDFEIDKVVIELAREMTQDQENDALKGIAKAQKSKKSLVEERLEANNIDKSVFDDKYEKLIYKIFLWISQDFKDPYTGAKISANEIVNNKVEIDHIIPYSLCFDDSSANKVLVHKQSNQEKSNSLPYEYIKQGHSGWNWDEFTKYVKRVFVNNVDSILSKKERLKKSENLLTTSYDGYDKLGFLARNLNDTRYATILFRDQLNNYAEHHLIDNKKMFKVIAMNGAVTSFIRKNMSYDNKLRLKDRSDFSHHAYDAAIIALFSNKTKTLYNLIDPSLNGIISKRSEGYWVIEDRYTGEIKELKKEDWTSIKNNVQARKIAKEIEEYLIDLDDEVFFSRKTKRKTNRQLYNETIYGIAAKTDEDGITNYYKKEKFSILDDKDIYLRLLREREKFVINQSNPEVIDQIIEIIESYGKENNIPSRDEAINIKYTKNKINYNLYLKQYMRSLTKSLDQFSEEFINQMIANKTFVLYNPTKNTTRKIKFLRLVNDVKINDIRKNQVINKFNGKNNEPKAFYENINSLGAIVFKNSANNFKTLSINTQIAIFGDKNWDIEDFKTYNMEKIEKYKEIYGIDKTYNFHSFIFPGTILLDKQNKEFYYISSIQTVRDIIEIKFLNKIEFKDENKNQDTSKTPKRLMFGIKSIMNNYEQVDISPFGINKKIFE

SEQ ID NO: 328 - protein, 1233 aa, Mycoplasma canis
  Mycoplasma canis UFG4
MEKKRKVTLGFDLGIASVGWAIVDSETNQVYKLGSRLFDAPDTNLERRTQRGTRRLLRRRKYRNQKFYNLVKRTEVFGLSSREAIENRFRELSIKYPNIIELKTKALSQEVCPDEIAWILHDYLKNRGYFYDEKETKEDFDQQTIESMPSYKLNEFYKKYGYFKGALSQPTESEMKDNKDLKEAFFFDFSNKEWLKEINYFFNVQKNILSETFIEEFKKIFSFTRDISKGPGSDNMPSPYGIFGEFGDNGQGGRYEHIWDKNIGKCSIFTNEQRAPKYLPSALIFNFLNELANIRLYSTDKKNIQPLWKLSSIDKLNILLNLFNLPISEKKKKLTSANINDIVKKESTKSIMLSVEDIDMIKDEWAGKEPNVYGVGLSGLNIEESAKENKFKFQDLKILNVLINLLDNVGIKFEFKDRNDIIKNLELLDNLYLFLIYQKESNNKDSSIDLFIAKNESLNIENLKLKLKEFLLGAGNEFENHNSKTHSLSKKAIDAILPKLLDNNEGWNLEAIKNYDEEIKSQIEDNSFLMAKQDKKYLNDNFLKDAILPPNVKVTFQQAILIFNKIIQKFSKDFEIDKVVIELAREMTQDQENDALKGIAKAQKSKKSLVEERLEANNIDKSVFNEKYEKLIYKIFLWISQDFKDPYTGAKISANEIVDNKVEIDHIIPYSLCFDDSSANKVLVHKQSNQEKSNSLPYEYIKQGHSGWNWDEFTKYVKRVFVNNVDSILSKKERLKKSENLLTTSYDGYDKLGFLARNLNDTRYATILFRDQLNNYAEHHLIDDKKMFKVIAMNGAVTSFIRKNMSYDNKLRLKNRNDFSHHAYDAAIIALFSNKTKTLYNLIDPSLNGIISKRSEGYWVIEDRYTGEIKELKKEDWTSIKNNVQARKIAKEIEEYLIDLDDEVFFSRKTKRKTNRQLYNETIYGIAAKTDEDGITNYYKKEKLSILDDKDIYLRLLREREKFVINQSNPEVIDQIIEIIESYGKENNIPSRDEAINIKYTKNKINYNLYLKQYMRSLTKSLDQFSEEFINQMIANKTFVLYNPTKNTTRKIKFLRLVNDVKINDIRKNQVINKFNGKNNEPKAFYENINSLGAIVFKNSANNFKTLSINTQIAIFGDKNWDIEDFKTYNMEKIEKYKEIYGIDKTYNFHSFIFPGTILLDKQNKEFYYISSIQTVRDIIEIKFLNKIEFKDENKNQDTSKTPKRLMFGIKSIMNNYEQVDISPFGINKKIFE

SEQ ID NO: 329 - protein, 1239 aa, Mycoplasma cynos
MEEKRKVTLGFDLGVASVGWAIVDSETNEVYKLGSRLFDIPDTNIDRRAKRGSRRLVRRRSYRNQKFYNLIKRTKTFGFLDKEAIEKEFVLLSIKYPNIIELKVKGLQEEVSKSEAVWILHDYLKNRGYFYDDKEEKDDLENPSIESMPSYKLYEFYKEYGYFKGALSSPTESEKNKDSDLEKAIFFNFSNKEWTKEINHFFKIQKNIFSEDFKAKFMEFFSFIRDISKGPGSENMPSQYSIFGKYGDDGMGGKYQHIWDKNIGKCSIFKDKVRAPKYLPSALFFNLLNELSNIRLYSVDKREKSVLWRLSSKDKINIILNILQIILFKNDGKISNLDINKIVKNESIKSIILNEIDLDLIKDMWFEKEPNVYGIGLSGLNIEENKKENRFKFQDLKIFSVFIDLLKKSNINIEFNNEKDIIHNLKLLDELYFFLITQKYSRDKYGSIKKFILNNKSFNIDNLDEKLNIFLSISDDEFDNHNSKTHSLSKEAIYFIFPKLLHNNEGWNLEAIKNYDIDVREEISKHSFGIKKQDKKYLDDAFLDDAILPPSVKVTIKQSILIFNKIIKKFSNKFQIDNVVIELAREMTQEKEMDAQKSLNRLKKSRKKIIEERLNANNIDSKMFRDKTGEISPNYIYKIYLWISQNFKDPYTGENISANDILKNNVEIDHIIPYSLCFDDSSSNKVLVFKHSNQSKGNFLPFDMISTFSENSVWNWKEYTQYVEKTFKTNLESILDKKERVKKADNLLTSSYDGYDKLGFLARNLNDTRYATILFRDQLINYSENHLIDSKKMFKVIAMNGGVTSFIRKNMSFDSGLKVKDRSIFSHHAYDAAIIALFSNKTKILYNLINPSLDGIISKRSEGYWVLEDRLTGEIRKLNYNDWQSIKNNVEVKKIAREIESHLSNLDNVVMFSRKSKRKTNKELYNETLYGIATRIDENGIKNYYKKEKFNILEDENIYLRLLNERENFIINRSNPEVIDAIIEIFETIDKNKIPARDVAKNIKYTDNKIKYNLYLKDYMRKLVDEFPDKFRKDFIEQMIAKKIFILFNPIKNTTRKIKSLRSINNNKIEDIRKKQVLEKFNTAKNEPRSFYESLNSLGAIIFKNNLNIYKKMSISSQIATFGDKNWKIDDINTYNKEKLNKYKEIYGIDETYDFYSFIFPGTILLDEKNKEFLYISSIQTLKDKIELKFLDRIEFEKKNVNSNLKPKIKREIISTKKLMSDYKIIKISPLGINKKIFE

SEQ ID NO: 330 - protein, 1269 aa, Mycoplasma gallisepticum
MNNSIKSKPEVTIGLDLGVGSVGWAIVDNETNIIHHLGSRLFSQAKTAEDRRSFRGARRLIRRRKYKLKRFINLIWKYNSYFGFKNKEDILNNYQEQQKLHNTVLNLKLEALNAKIDPKALSWILHDYLKNRGHFYEDNRDFNVYPTEELANYFGEYGYYKGIIDSKEDNDDKLEEGLTKYKFSNQHWLEEIKKVLSNQTGLPEKFKEEYESLFSYVRNYSEGPGSINSVSPYGIYHLDEKEGKVVQKYNNIWDKTIGKCSIFPDEYRAPKNSPIAMIFNEINELSTIRSYSIYLTGWFINQEFKKAYLNKLLDLLIKTNSEKPIDARQFKKLREETIAESIGKETLKDVEREEKLEKEDHKWKLKGLKLNTNGKIQYNDLSSLAKFVHKLKQHLKLDFLLEDQYTTLDKINFLQSLFVYLGKHLRYSNRVDSANLKEFSDSNKLFERVLQEQKDDLFKLFEQTDKDDEKILAQTHSLSTKAMLLAITRMTNLDNDEDNQKNNDKGWNFEAIKNFDQKFIDITKKNNNLSLKQDKRYLDDRFINDAILSPGVKRILREATKVFNAILKQFSEEYDVTKVVIELARELSEEKELENTKNYEKLIKKNSDKISERLEALDIAEDKIEDILKSPTKSYKVLLWLQQDHIDPYSQKEIAFEDILTKTEKTEIDHIIPYSISFDDSSSNKLLVLAESNQAKSNQTPYEFITSGNAGIKWEDYEAYCRKFKDGDTSLLDSTQRSKKFAKMMKTDTSSKYDIGFLARNLNDTRYATIVFRDALKDYANNHLVEDKPMFKVVCINGGVTSFLRKNFDKSWYAKKDRDKNIHHAVDASIISIFSNETKTLFNQLTQFADYKLFKNTDGSWKKIDPKTGVVTEVTDENWKQIRVRNQVSEIAKVINKCIQDSNIERKARYSRKIENKTNISLFNDTVYSAKKVGYEDQIKRKNLKTLDIHESAEENKNSKVKKQFVYRKLVNVSLLNNDKLADLFAEKEDILMYRANPWVINLAEQIFNEYTENKKIKSQNVFEKYMLDLTKEFPEKFSEAFVKSMLRNKTAIIYNVEKKVVHRIKRLKILSSELKENKLSNVIIRSKNESGTKLSYQDTINSIALMIMRSIDPTAKKQYIRVPLNTLNLHLGDQDFDLHNIDAYLKKPKFVKYLKANEIGDEYKPWRVLTSGTLLIHKKDKKLMYISSFQNLKDVIEIKNLIETEYKENDDSDPKKKKKANRFLMTLSTILNDYILLDAKDNFDILGLSKNRIDEILNSKLGLDKITK

SEQ ID NO: 331 - protein, 1224 aa, Mycoplasma gallisepticum
MNNSIKSKPEVTIGLDLGVGSVGWAIVDNETNIIHHLGSRLFSQAKTAEDRRSFRGARRLIRRRKYKLKRFINLIWKYNSYFGFKNKEDILNNYQEQQKLHNTVLNLKLEALNAKIDPKALSWILHDYLKNRGHFYEDNRDFNVYPTEELANYFGEYGYYKGIIDSKEDNDDKLEEGLTKYKFSNQHWLEEIKKVLSNQTGLPEKFKEEYESLFSYVRNYSEGPGSINSVSPYGIYHLDEKEGKVVQKYNNIWDKTIGKCSIFPDEYRAPKNSPIAMIFNEINELSTIRSYSIYLTGWFINQEFKKAYLNKLLDLLIKTNSEKPIDARQFKKLREETIAESIGKETLKDVEREEKLEKEDHKWKLKGLKLNTNGKIQYNDLSSLAKFVHKLKQHLKLDFLLEDQYTTLDKINFLQSLFVYLGKHLRYSNRVDSANLKEFSDSNKLFERVLQEQKDDLFKLFEQTDKDDEKILAQTHSLSTKAMLLAITRMTNLDNDEDNQKNNDKGWNFEAIKNFDQKFIDITKKNNNLSLKQDKRYLDDRFINDAILSPGVKRILREATKVFNAILKQFSEEYDVTKVVIELARELSEEKELENTKNYEKLIKKNSDKISERLEALDIAEDKIEDILKSPTKSYKVLLWLQQDHIDPYSQKEIAFEDILTKTEKTEIDHIIPYSISFDDSSSNKLLVLAESNQAKSNQTPYEFITSGNAGIKWEDYEAYCRKFKDGDTSLLDSTQRSKKFAKMMKTDTSSKYDIGFLARNLNDTRYATIVFRDALKDYANNHLVEDKPMFKVVCINGGVTSFLRKNFDKSWYAKKDRDKNIHHAVDASIISIFSNETKTLFNQLTQFADYKLFKNTDGSWKKIDPKTGVVTEVTDENWKQIRVRNQVSEIAKVINKCIQDSNIERKARYSRKIENKTNISLFNDTVYSAKKVGYEDQIKRKNLKTLDIHESAEENKNSKVKKQFVYRKLVNVSLLNNDKLADLFAEKEDILMYRANPWVINLAEQIFNEYTENKKIKSQNVFEKYMLDLTKEFPEKFSEAFVKSMLRNKTAIIYNVEKKVVHRIKRLKILSSELKENKLSNVIIRSKNESGTKLSYQDTINSIALMIMRSIDPTAKKQYIRVPLNTLNLHLGDQDFDLHNIDAYLKKPKFVKYLKANEIGDEYKPWRVLTSGTLLIHKKDKKLMYISSFQNLKDVIEIKNLIETEYKENDDSDPKKRRKQIGS

SEQ ID NO: 332 - protein, 1269 aa, Mycoplasma gallisepticum
MNNSIKSKPEVTIGLDLGVGSVGWAIVDNETNIIHHLGSRLFSQAKTAEDRRSFRGVRRLIRRRKYKLKRFVNLIWKYNSYFGFKNKEDILNNYQEQQKLHNTVLNLKSEALNAKIDPKALSWILHDYLKNRGHFYEDNRDFNVYPTKELAKYFDKYGYYKGIIDSKEDNDNKLEEELTKYKFSNKHWLEEVKKVLSNQTGLPEKFKEEYESLFSYVRNYSEGPGSINSVSPYGIYHLDEKEGKVVQKYNNIWDKTIGKCNIFPDEYRAPKNSPIAMIFNEINELSTIRSYSIYLTGWFINQEFKKAYLNKLLDLLIKTNGEKPIDARQFKKLREETIAESIGKETLKDVENEEKLEKEDHKWKLKGLKLNTNGKIQYNDLSSLAKFVHKLKQHLKLDFLLEDQYATLDKINFLQSLFVYLGKHLRYSNRVDSANLKEFSDSNKLFERILQKQKDGLFKLFEQTDKDDEKILAQTHSLSTKAMLLAITRMTNLDNDEDNQKNNDKGWNFEAIKNFDQKFIDITKKNNNLSLKQNKRYLDDRFINDAILSPGVKRILREATKVFNAILKQFSEEYDVTKVVIELARELSEEKELENTKNYKKLIKKNGDKISEGLKALGISEDEIKDILKSPTKSYKFLLWLQQDHIDPYSLKEIAFDDIFTKTEKFEIDHIIPYSISFDDSSSNKLLVLAESNQAKSNQTPYEFISSGNAGIKWEDYEAYCRKFKDGDSSLLDSTQRSKKFAKMMKTDTSSKYDIGFLARNLNDTRYATIVFRDALEDYANNHLVEDKPMFKVVCINGSVTSFLRKNFDDSSYAKKDRDKNIHHAVDASIISIFSNETKTLFNQLTQFADYKLFKNTDGSWKKIDPKTGVVTEVTDENWKQIRVRNQVSEIAKVIEKYIQDSNIERKARYSRKIENKTNISLFNDTVYSAKKVGYEDQIKRKNLKTLDIHESAKENKNSKVKRQFVYRKLVNVSLLNNDKLADLFAEKEDILMYRANPWVINLAEQIFNEYTENKKIKSQNVFEKYMLDLTKEFPEKFSEFLVKSMLRNKTAIIYDDKKNIVHRIKRLKMLSSELKENKLSNVIIRSKNQSGTKLSYQDTINSLALMIMRSIDPTAKKQYIRVPLNTLNLHLGDHDFDLHNMDAYLKKPKFVKYLKANEIGDEYKPWRVLTSGTLLIHKKDKKLMYISSFQNLNDVIEIKNLIETEYKENDDSDSKKKKKANRFLMTLSTILNDYILLDAKDNFDILGLSKNRIDEILNSKLGLDKIVK

SEQ ID NO: 333 - protein, 1269 aa, Mycoplasma gallisepticum; identical to SEQ ID NO: 332
  Mycoplasma gallisepticum str. F

SEQ ID NO: 334 - protein, 1270 aa, Mycoplasma gallisepticum
MNNSIKSKPEVTIGLDLGVGSVGWAIVDNETNIIHHLGSRLFSQAKTAEDRRSFRGVRRLIRRRKYKLKRFVNLIWKYNSYFGFKNKEDILNNYQEQQKLHNTVLNLKLEALNAKIDPKALSWILHDYLKNRGHFYEDNRDFNVYPTEELANYFDEFGYYKGIIDSKNDDDDKLEEGLTKYKFSNQHWLEEVKKVLSNQTGLPEKFKEEYESLFSYVRNYSEGPGSINSVSPYGIYHLDEKEGKVVQKYNNIWDKTIGKCSIFPDEYRAPKNSPIAMIFNEINELSTIRSYSIYLTGWFINQEFKKAYLNKLLDLLIKTNSEKPIDARQFKKLREETIAESIGKETLKDVESEEKLEKDDHKWKLKGLKLNTNGKIQYNDLSSLAKFVHKLKQHLKLDFLLEDQYTPLDKINFLQSLYVYLGKHLRYSNRVDSANLKEFSDSSRLFERVLQEQKDGLFKLFEQTDKDDEKILTQTHSLSTKAMLLAITRMTNLDNDEDNQKNNDKGWNFEAIKNFDQKFIDITKTNNNLSLKQDKRYLDDQFINDAILSPGVKRILREATKVFNAILKQFSEEYDVTKVVIELARELSEEKELENTKNYKKLIKKNGDKISEGLKALGIAEDKIEEILKSPTKSYKVLLWLQQDHIDPYSQKEIAFDDILTKTEKTEIDHIIPYSISFDDSSSNKLLVLAESNQAKSNQTPYEFINSGKAEITWEVYEAYCHKFKNGDSSLLDSTQRSKKFAKMMKTDTSSKYDIGFLARNLNDTRYATIVFRDALKDYANNHLVEDKPMFKVVCINGGVTSFLRKNFDPKSWYAKKDRDKNIHHAVDASIISIFSNETKTLFNQLTKFADYKLFKNTDGSWKKIDPKTGVVSEVTDENWKQIRVRNQVSEIAKVIDKYIQDSNIERKARYSRKIENKTNISLFNDTVYSAKKVGYEDQIKRKNLKTLDIHESAEENKNSKVKKQFVYRKLVNVSLLNNDKLADLFAEKEDILMYRANPWVINLAEQIFNEYTENKKIKSQNVFEKYMLDLTKEFPEKFSEAFVKSMIRNKTAIIYNVEKDVVHRIKRLKILSSELKENKWSNVIIRSKNESGTKLSYQDTINSIALMIMRSIDPTAKKQYIRVPLNTLNLHLGDQDFDLHNIDAYLKKPKFVKYLKANEIGDEYKPWRVLTSGTLLIHKKDKKLMYISSFQNLNDLIEIKNLIETEYKENVDSDPKKKKKASQILRSLSVILNDYILLDAKYNFDILGLSKNKIDEILNSKLDLDKIAK

SEQ ID NO: 335 - protein, 1236 aa, Mycoplasma mobile
MYFYKNKENKLNKKVVLGLDLGIASVGWCLTDISQKEDNKFPIILHGVRLFETVDDSDDKLLNETRRKKRGQRRRNRRLFTRKRDFIKYLIDNNIIELEFDKNPKILVRNFIEKYINPFSKNLELKYKSVTNLPIGFHNLRKAAINEKYKLDKSELIVLLYFYLSLRGAFFDNPEDTKSKEMNKNEIEIFDKNESIKNAEFPIDKIIEFYKISGKIRSTINLKFGHQDYLKEIKQVFEKQNIDFMNYEKFAMEEKSFFSRIRNYSEGPGNEKSFSKYGLYANENGNPELIINEKGQKIYTKIFKTLWESKIGKCSYDKKLYRAPKNSFSAKVFDITNKLTDWKHKNEYISERLKRKILLSRFLNKDSKSAVEKILKEENIKFENLSEIAYNKDDNKINLPIINAYHSLTTIFKKHLINFENYLISNENDLSKLMSFYKQQSEKLFVPNEKGSYEINQNNNVLHIFDAISNILNKFSTIQDRIRILEGYFEFSNLKKDVKSSEIYSEIAKLREFSGTSSLSFGAYYKFIPNLISEGSKNYSTISYEEKALQNQKNNFSHSNLFEKTWVEDLIASPTVKRSLRQTMNLLKEIFKYSEKNNLEIEKIVVEVTRSSNNKHERKKIEGINKYRKEKYEELKKVYDLPNENTTLLKKLWLLRQQQGYDAYSLRKIEANDVINKPWNYDIDHIVPRSISFDDSFSNLVIVNKLDNAKKSNDLSAKQFIEKIYGIEKLKEAKENWGNWYLRNANGKAFNDKGKFIKLYTIDNLDEFDNSDFINRNLSDTSYITNALVNHLTFSNSKYKYSVVSVNGKQTSNLRNQIAFVGIKNNKETEREWKRPEGFKSINSNDFLIREEGKNDVKDDVLIKDRSFNGHHAEDAYFITIISQYFRSFKRIERLNVNYRKETRELDDLEKNNIKFKEKASFDNFLLINALDELNEKLNQMRFSRMVITKKNTQLFNETLYSGKYDKGKNTIKKVEKLNLLDNRTDKIKKIEEFFDEDKLKENELTKLHIFNHDKNLYETLKIIWNEVKIEIKNKNLNEKNYFKYFVNKKLQEGKISFNEWVPILDNDFKIIRKIRYIKFSSEEKETDEIIFSQSNFLKIDQRQNFSFHNTLYWVQIWVYKNQKDQYCFISIDARNSKFEKDEIKINYEKLKTQKEKLQIINEEPILKINKGDLFENEEKELFYIVGRDEKPQKLEIKYILGKKIKDQKQIQKPVKKYFPNWKKVNLTYMGEIFKK

SEQ ID NO: 336 - protein, 1265 aa, Mycoplasma ovipneumoniae
  Mycoplasma ovipneumoniae SC01
MHNKKNITIGFDLGIASIGWAIIDSTTSKILDWGTRTFEERKTANERRAFRSTRRNIRRKAYRNQRFINLILKYKDLFELKNISDIQRANKKDTENYEKIISFFTEIYKKCAAKHSNILEVKVKALDSKIEKLDLIWILHDYLENRGFFYDLEEENVADKYEGIEHPSILLYDFFKKNGFFKSNSSIPKDLGGYSFSNLQWVNEIKKLFEVQEINPEFSEKFLNLFTSVRDYAKGPGSEHSASEYGIFQKDEKGKVFKKYDNIWDKTIGKCSFFVEENRSPVNYPSYEIFNLLNQLINLSTDLKTTNKKIWQLSSNDRNELLDELLKVKEKAKIISISLKKNEIKKIILKDFGFEKSDIDDQDTIEGRKIIKEEPTTKLEVTKHLLATIYSHSSDSNWININNILEFLPYLDAICIILDREKSRGQDEVLKKLTEKNIFEVLKIDREKQLDFVKSIFSNTKFNFKKIGNFSLKAIREFLPKMFEQNKNSEYLKWKDEEIRRKWEEQKSKLGKTDKKTKYLNPRIFQDEIISPGTKNTFEQAVLVLNQIIKKYSKENIIDAIIIESPREKNDKKTIEEIKKRNKKGKGKTLEKLFQILNLENKGYKLSDLETKPAKLLDRLRFYHQQDGIDLYTLDKINIDQLINGSQKYEIEHIIPYSMSYDNSQANKILTEKAENLKKGKLIASEYIKRNGDEFYNKYYEKAKELFINKYKKNKKLDSYVDLDEDSAKNRFRFLTLQDYDEFQVEFLARNLNDTRYSTKLFYHALVEHFENNEFFTYIDENSSKHKVKISTIKGHVTKYFRAKPVQKNNGPNENLNNNKPEKIEKNRENNEHHAVDAAIVAIIGNKNPQIANLLTLADNKTDKKFLLHDENYKENIETGELVKIPKFEVDKLAKVEDLKKIIQEKYEEAKKHTAIKFSRKTRTILNGGLSDETLYGFKYDEKEDKYFKIIKKKLVTSKNEELKKYFENPFGKKADGKSEYTVLMAQSHLSEFNKLKEIFEKYNGFSNKTGNAFVEYMNDLALKEPTLKAEIESAKSVEKLLYYNFKPSDQFTYHDNINNKSFKRFYKNIRIIEYKSIPIKFKILSKHDGGKSFKDTLFSLYSLVYKVYENGKESYKSIPVTSQMRNFGIDEFDFLDENLYNKEKLDIYKSDFAKPIPVNCKPVFVLKKGSILKKKSLDIDDFKETKETEEGNYYFISTISKRFNRDTAYGLKPLKLSVVKPVAEPSTNPIFKEYIPIHLDELGNEYPVKIKEHTDDEKLMCTIK

SEQ ID NO: 337 - protein, 1314 aa, Mycoplasma synoviae
MLRLYCANNLVLNNVQNLWKYLLLLIFDKKIIFLFKIKVILIRRYMENNNKEKIVIGFDLGVASVGWSIVNAETKEVIDLGVRLFSEPEKADYRRAKRTTRRLLRRKKFKREKFHKLILKNAEIFGLQSRNEILNVYKDQSSKYRNILKLKINALKEEIKPSELVWILRDYLQNRGYFYKNEKLTDEFVSNSFPSKKLHEHYEKYGFFRGSVKLDNKLDNKKDKAKEKDEEEESDAKKESEELIFSNKQWINEIVKVFENQSYLTESFKEEYLKLFNYVRPFNKGPGSKNSRTAYGVFSTDIDPETNKFKDYSNIWDKTIGKCSLFEEEIRAPKNLPSALIFNLQNEICTIKNEFTEFKNWWLNAEQKSEILKFVFTELFNWKDKKYSDKKFNKNLQDKIKKYLLNFALENFNLNEEILKNRDLENDTVLGLKGVKYYEKSNATADAALEFSSLKPLYVFIKFLKEKKLDLNYLLGLENTEILYFLDSIYLAISYSSDLKERNEWFKKLLKELYPKIKNNNLEIIENVEDIFEITDQEKFESFSKTHSLSREAFNHIIPLLLSNNEGKNYESLKHSNEELKKRTEKAELKAQQNQKYLKDNFLKEALVPLSVKTSVLQAIKIFNQIIKNFGKKYEISQVVIEMARELTKPNLEKLLNNATNSNIKILKEKLDQTEKFDDFTKKKFIDKIENSVVFRNKLFLWFEQDRKDPYTQLDIKINEIEDETEIDHVIPYSKSADDSWFNKLLVKKSTNQLKKNKTVWEYYQNESDPEAKWNKFVAWAKRIYLVQKSDKESKDNSEKNSIFKNKKPNLKFKNITKKLFDPYKDLGFLARNLNDTRYATKVFRDQLNNYSKHHSKDDENKLFKVVCMNGSITSFLRKSMWRKNEEQVYRFNFWKKDRDQFFHHAVDASIIAIFSLLTKTLYNKLRVYESYDVQRREDGVYLINKETGEVKKADKDYWKDQHNFLKIRENAIEIKNVLNNVDFQNQVRYSRKANTKLNTQLFNETLYGVKEFENNFYKLEKVNLFSRKDLRKFILEDLNEESEKNKKNENGSRKRILTEKYIVDEILQILENEEFKDSKSDINALNKYMDSLPSKFSEFFSQDFINKCKKENSLILTFDAIKHNDPKKVIKIKNLKFFREDATLKNKQAVHKDSKNQIKSFYESYKCVGFIWLKNKNDLEESIFVPINSRVIHFGDKDKDIFDFDSYNKEKLLNEINLKRPENKKFNSINEIEFVKFVKPGALLLNFENQQIYYISTLESSSLRAKIKLLNKMDKGKAVSMKKITNPDEYKIIEHVNPLGINLNWTKKLENNN

SEQ ID NO: 338 - protein, 1304 aa, Mycoplasma synoviae
  Mycoplasma synoviae 53
MLNNVQNLWKYLLLLIFDKKIIFLFKIKVILIRRYMENNNKEKIVIGFDLGVASVGWSIVNAETKEVIDLGVRLFSEPEKADYRRAKRTTRRLLRRKKFKREKFHKLILKNAEIFGLQSRNEILNVYKDQSSKYRNILKLKINALKEEIKPSELVWILRDYLQNRGYFYKNEKLTDEFVSNSFPSKKLHEHYEKYGFFRGSVKLDNKLDNKKDKAKEKDEEEESDAKKESEELIFSNKQWINEIVKVFENQSYLTESFKEEYLKLFNYVRPFNKGPGSKNSRTAYGVFSTDIDPETNKFKDYSNIWDKTIGKCSLFEEEIRAPKNLPSALIFNLQNEICTIKNEFTEFKNWWLNAEQKSEILKFVFTELFNWKDKKYSDKKFNKNLQDKIKKYLLNFALENFNLNEEILKNRDLENDTVLGLKGVKYYEKSNATADAALEFSSLKPLYVFIKFLKEKKLDLNYLLGLENTEILYFLDSIYLAISYSSDLKERNEWFKKLLKELYPKIKNNNLEIIENVEDIFEITDQEKFESFSKTHSLSREAFNHIIPLLLSNNEGKNYESLKHSNEELKKRTEKAELKAQQNQKYLKDNFLKEALVPLSVKTSVLQAIKIFNQIIKNFGKKYEISQVVIEMARELTKPNLEKLLNNATNSNIKILKEKLDQTEKFDDFTKKKFIDKIENSVVFRNKLFLWFEQDRKDPYTQLDIKINEIEDETEIDHVIPYSKSADDSWFNKLLVKKSTNQLKKNKTVWEYYQNESDPEAKWNKFVAWAKRIYLVQKSDKESKDNSEKNSIFKNKKPNLKFKNITKKLFDPYKDLGFLARNLNDTRYATKVFRDQLNNYSKHHSKDDENKLFKVVCMNGSITSFLRKSMWRKNEEQVYRFNFWKKDRDQFFHHAVDASIIAIFSLLTKTLYNKLRVYESYDVQRREDGVYLINKETGEVKKADKDYWKDQHNFLKIRENAIEIKNVLNNVDFQNQVRYSRKANTKLNTQLFNETLYGVKEFENNFYKLEKVNLFSRKDLRKFILEDLNEESEKNKKNENGSRKRILTEKYIVDEILQILENEEFKDSKSDINALNKYMDSLPSKFSEFFSQDFINKCKKENSLILTFDAIKHNDPKKVIKIKNLKFFREDATLKNKQAVHKDSKNQIKSFYESYKCVGFIWLKNKNDLEESIFVPINSRVIHFGDKDKDIFDFDSYNKEKLLNEINLKRPENKKFNSINEIEFVKFVKPGALLLNFENQQIYYISTLESSSLRAKIKLLNKMDKGKAVSMKKITNPDEYKIIEHVNPLGINLNWTKKLENNN

SEQ ID NO: 339 - protein, 1401 aa, Myroides injenensis
  Myroides injenensis M09-0166
MKRILGLDLGTTSIGWAYVHEAENVNETSSIQKVGVRVNPLTTEEQTNFEKGKPITTNASRTLARSARRNLQRYKLRRDNLIQILKENNWINNTTSLTETGNHSTFETYELRNKAASEKLTLDQLSRVLLMLNKKRGYKSSRKVNSKEEGQLIDGMEVAKKLYHEQLTPGQLSLQLMNQGVKKLPDYYRSDLNQELESIWNFQQQFYPNILTDKFKEEINGKGLTSTSSAFWNIYNFNTAENKGSRDEKKKQALQWRSEALSKQLSKEIVAYIIADLNGQIYNSSGYLGAISDRSKELYFNNLTVGQYLFKQLKSNPHTSLKNQVFYRQDYLNEFEKIWETQSKFYPKELTAALKREIRDVIIFYQRKLKSQKGLISFCEFEQKQKTINGKTKTIGHRVIPKSSPLFQEFKIWQQLHNVVLRNKKTNEIVSLADEQKVHLFEELNLKGKLKSNQVLKLIENKPKDWELNYTELEGNNTNKALYNAYLDILDIEGYDVRNELKVKLNKDDIELSDLDVNASEIKEMIFSVFKHLGINTEILEFDATLEDKVFEKQASYQLWHLLYSYEEDNSPTGLDRLYNLLHKKFGFKLNHAKLIGNVLFQDDYGSLSSKAIKNIFPYITENNYYTACELAGYKHSKHSLTKEENETRELKNRLTILPKNSLRNPVVEKIINQMINVVNTLIDEENNILIAQGKEPNFQFDEIRIELARELKKNAKEREELTKSINKSKTDHEKIIKILQKEDGIKNPTRNDIVRFKLYSELKNNGYKDLYTNEYIERKDIFTKEYDIEHIIPQSKLFDDSFSNKTLVRRNVNLKKGNQTAYDFILCEYGQEKANEFETRITNLYNLGKDEGISKSKFKKLLMQESEIGNGFIERDLRETQYIAKKAKSLLLEITRNVISTSGSITDRLREDWGLINVMKELNLQKYRDAGLTEFVKMKDGNKKEVIIDWTKRNDHRHHAMDALTIAFTKHNHIQYLNHLNARKNVNNELHNNIIAIEKLETTLVSDERGNKKRIFKEPIANFRTIAKSHLEAILVSHKAKNKVVTKNINKISGKKISQQTLTPRGQLHKETIYGKIRQYVSKQEKVGPKFTIEVIEQVSNPTYRNLLLKRLEENNNDPKKAFGGKNSLNKNPIYINLEKNIKVPEVLKLVWLEDNYTIRKEISPDLKIDKVIDQGVKQILQNRLAQYKGDSKLAFSNLDANPIWLNEDKGIAIKRVTISGIATAQPLHRKKDHLGQPILDHNGQEIPVDFISTGNNHHVAIYEDENGKLQESVVSHFEAVERVNQKLPIIDKTFNQHLGWKFLFTMKQNELFLFPSDDFNPNEIDLFDKQNYTVISKHLFRIQKLSTKDYSFRHHLETNVEEIKDLKTITWRREGLNGIQNIIKVRTNHLGEIIHIGEY

SEQ ID NO: 340 - protein, 1466 aa, Myroides odoratus
  Myroides odoratus DSM 2801
MKNILGLDLGTNSIGWALVKEDFENKQGEILGLGSRIIPMSQDILGEFGRGNSISQTADRTGYRGVRRLRERHLLRRERLHRVLNILGFLPNHYAKEIDFTKRLGKFINHAEPKLSFDKEFIFKDSFNEMLKDFQQNQPGFIINKHGEEALVPYDWTIYYLRKKALTQKIDKEELAWILLNFNQKRGYYQLRGEEEEENTNKLVEFYSLKIIDVIADNEVNKKGEVWYSLHLENGWIYRRSSKISLVDWKDKVRDFIVTTDVNDDGSEKLDKDGVVKRSFRAPSADDWTLLKKKTEQDIDNSNKTVGAYIYENLLLNPKQKIKGKLVRTIERKFYKDELKQILEKQKEFHQELQNEQLLQDCVRELYKYNEQHQQMLESKDFVHLFLNDIIFYQRPLRSQKSLISNCTLEKRVSRDGVVFPIKVISKSNPYYQEFRLLQWLQNLAIYRKDDDVNVTQEFLNSIESWENLLQFLNAKKEIKQEQLIKFLLEQKGLKGNSLKTAILTYRWNYVTDKVYPMNETRSLIQDKLKKVENVATDFLSFDNEMALWHIIYSVNDKIEYEKALAKFASKHNLDEISFVESFKKFPPFKSDYGSFSEKAIKKLLPLMRFGSVWNKNNIVPSVLDRIDKILTGEYDEKIKIRVREKAEQFQLNQIEDFQNLPLWLAQYVVYDRHSEAEIAGKWNSVKDLENYLKEFKQHSLRNPIVEQIITETLRVVKDIWQQYGNGVQNFFDEIHIELGREMKNTADERKRITNSVTENENTNLRIKALLVELKEDTNIENVRPHSPMQQEILKIYEEGVLNAVENIDEDILKISKTAQPSKSELIRYKLWLEQKYQSPYTGEMIPLSRLFTSDYEIEHVIPQSRYFDDSLSNKVICEAAVNKRKDNQLGLEFIKNHHSEKIELGNGRTAQVLEVEAYESFVKKNYDKNRGKRNKLLLEDVPEKMIERQLNDTRYISKFVTHLLSNIVRKDEVNSKDDGINSKNIIPGNGKITSQLKQDWGLNDVWNELILPRFERMNNLTNSTDFTSTNTNGKIIPTVPLEYSKGFSKKRIDHRHHALDALVIALATRDHVNLLNNESALPKKDRTKEEQKSFRFDLQVNLRNKEKYFNVKEGREKEKFTTFKKPWNTLTQDTRDALENMVVSFKQNLRVINKATNYYESYTDENGNLRLDKYGNPKKELISQKGTNWAIRKSLHKETVSGQIHLDRVKVTKGKIVTATRKSLDSSFNEKSIESITDTGIQKILRNYLKAKDNKPDVAFSPEGIEELNKSISVYNEGKNHQPIIKVRIFEQGSKFPVGETGNKIAKFVEAAKGTNLFFGIYQDKTGKRSYDTIPLNLVIERLKQGLSPVPETNEKGHQLLFHLSPNDLVYVPTIDDNEQLDSNRVYKFTDSSDTTCNFIPSNISAIIFNINSKEQEKRGINYPIQNELGVGSPQSKNQKSFDGFMIKEVCIKLKVDRLGNISKT

SEQ ID NO: 341 - protein, 1077 aa, Neisseria bacilliformis
  Neisseria bacilliformis ATCC BAA-1200
MQQKPQRYILGLDLGIASVGWACVWADENEHPTGLLDCGVRTFERAEVPKTGDSLALARRQARSVRRLIRRRAHRLLRLRRLLKREGVLLSADFNENGLVRGLPIDAWALRVAGLDRKLSNKEWAAVLLHLVKHRGYLSQRKNETQSKDKELGRLLAGVNGNREALQNRSDEYRTAAELAVKKFAAENNGSLRNKGGDYSHTFDRKDLQRELHLLFERQRALDNPFTSSEMEAAVDELLMKQRSALQGEAVLKMLGRCTFEPSEYKAAKNTYSAERFVWLTKLNNLRIQYNGEERALSEAERRLLLDEPYQKAKLTYKQVRTILELPESAVFKGLRYGHGEDGLKAESGTLMEMKAYHAVRKALKDAGLEGEWENRIRNPELLDAIGTAFSLYKTDEDIRANLAAFRLSENVLEALLAGLNFDKFVHLSLKALAKILPLMEQGMRYDEACKEAYGDHYGAKEQEDHRLLPPFVADDIRNPVVFRTLTQARKIVNEIVRRYGSPLRVHIETGREVGKSFSDRKEIEKRQEENRKERERAAAHFKELFPNFAGEPKAQDILKLRLYEQQHGKCLYSGKEIDLRRLPEKGYVEIDHALPFSRTWDDSFNNKVLVLGKENQDKRNRTPYEYLDGKGNSGAWRAFAERVSGCRFPYAKKQRLLTQKLDEKTEQGFLERNLNDTRYVARFLCQFIEEKMHLEGAGKKRVFASNGQITALLRGFWGLKKVREENDRHHALDAVVVACSSVSMQQKITRHFRYREELEHIDRETGEVIHGFPQPWEFFRQEVMTRVFSDDPVSELAEKLDSRPEAVHEFVTPLFVSRAPHRKVTGQGHLETIRSAKRLDEKISVVKLPLTQLKTKDIERIVGYPNREPALYDALAARLAAFKDDPAKAFSEPFYKTGKDGKCGVLVKAVRVENVQKSGLLVRKDESGKMQGVADNATMVRVDVFGKNGKNYLVPVYAWQVEKGELPNRAVVAYADEEDWDEMDDSFEFKFSLYPNDLVEVVTKKDKFFGYYSGFNRATGAINIKEHDLSKSKVKNGVYEGIGVKTAQSFQKYQVDTLGKTIRLCKPEKRMGFKKK

SEQ ID NO: 342 - protein, 1082 aa, Neisseria cinerea
  Neisseria cinerea ATCC 14685
MAAFKPNPMNYILGLDIGIASVGWAIVEIDEEENPIRLIDLGVRVFERAEVPKTGDSLAAARRLARSVRRLTRRRAHRLLRARRLLKREGVLQAADFDENGLIKSLPNTPWQLRAAALDRKLTPLEWSAVLLHLIKHRGYLSQRKNEGETADKELGALLKGVADNTHALQTGDFRTPAELALNKFEKESGHIRNQRGDYSHTFNRKDLQAELNLLFEKQKEFGNPHVSDGLKEGIETLLMTQRPALSGDAVQKMLGHCTFEPTEPKAAKNTYTAERFVWLTKLNNLRILEQGSERPLTDTERATLMDEPYRKSKLTYAQARKLLDLDDTAFFKGLRYGKDNAEASTLMEMKAYHAISRALEKEGLKDKKSPLNLSPELQDEIGTAFSLFKTDEDITGRLKDRVQPEILEALLKHISFDKFVQISLKALRRIVPLMEQGNRYDEACTEIYGDHYGKKNTEEKIYLPPIPADEIRNPVVLRALSQARKVINGVVRRYGSPARIHIETAREVGKSFKDRKEIEKRQEENRKDREKSAAKFREYFPNFVGEPKSKDILKLRLYEQQHGKCLYSGKEINLGRLNEKGYVEIDHALPFSRTWDDSFNNKVLALGSENQNKGNQTPYEYFNGKDNSREWQEFKARVETSRFPRSKKQRILLQKFDEDGFKERNLNDTRYINRFLCQFVADHMLLTGKGKRRVFASNGQITNLLRGFWGLRKVRAENDRHHALDAVVVACSTIAMQQKITRFVRYKEMNAFDGKTIDKETGEVLHQKAHFPQPWEFFAQEVMIRVFGKPDGKPEFEEADTPEKLRTLLAEKLSSRPEAVHKYVTPLFISRAPNRKMSGQGHMETVKSAKRLDEGISVLRVPLTQLKLKDLEKMVNREREPKLYEALKARLEAHKDDPAKAFAEPFYKYDKAGNRTQQVKAVRVEQVQKTGVWVHNHNGIADNATIVRVDVFEKGGKYYLVPIYSWQVAKGILPDRAVVQGKDEEDWTVMDDSFEFKFVLYANDLIKLTAKKNEFLGYFVSLNRATGAIDIRTHDTDSTKGKNGIFQSVGVKTALSFQKYQIDELGKEIRPCRLKKRPPVR

SEQ ID NO: 343 - protein, 1081 aa, Neisseria flavescens
  Neisseria flavescens SK114
MTAFKPNPINYILGLDIGIASVGWAMVEIDEEENPIRLIDLGVRVFERAEVPKTGDSLAAARRLARSVRRLTRRRAHRLLRARRLLKREGVLQAADFDENGLIKSLPNTPWQLRAAALDRKLTPLEWSAVLLHLIKHRGYLSQRKNEGETADKELGALLKGVADNAHALQTGDFRTPAELAVNKFEKESGHIRNQRGDYSHTFSRKDLQAELVLLFEKQKEFGNPHISDGLKEGIETLLMAQRPALSGDAVQKMLGYCTFEPTEPKAAKNTYTAERFIWLTKLNNLRILEQGSERPLTDTERATLIDMPYKNKLTYAKARELLGLDDTAFFKGLRYGKDNAESATLMEMKAYHAIRRALEKEGLKDKKSPLSLSPELQDEIGTAFSLFKTDEDITGRLKGCLQPEILDALLKHINFDKFVQISLKALRRIVPLMEQGKRYDEACAETYGDHYGEKNSEEMLYLPPIPADEIRNPVVLRALSQARKVINGVVRRYGSPARIHIETAREVGKSFKDRKEIEKRQEENRKDREKAAAKFREYFPNFVGEPKSKDILKLRLYEQQHGKCLYSGKAIDIRRLNGKGYVEIDHALPFSRTWDDSFNNKVLVLGSENQNKGNRTPYEYLNGKDNSREWLEFKARVETSRFPHSKKQRVLLQKFDEKGFKERNLNDTRYVNRFLCQFVADHMQLTGKGKRRVFASNGQITNLLRGFWGLHKVRAENDRHHALDAVVVACSTVAMQQKITCFVRYKEMNAFDGKTVDKETGEVLHQKTHFPQPWEFFAQEVMIRVFGKPDGKPEFEEADTPEKLRALLAEKLSSRPEAVHEYVTPLFVSRAPNRKMSGAHKDTLRSAKRFVKHNEKISVKRVWLTEIKLADLENMVNYKNGREIELYEALKARLGAYGGNAKQAFDPKDNPFYKKGGQLVKAVRVEKTQESGVLLNKKNAYTIADNGDMVRVDVFCKVDKKGKNQYFIVPIYAWQVAENILPDIDCKGYRIDDSYTFCFSLHKYDLIAFQKDEKSKVEFAYYINCDSSNGRFYLAWHDKGSKEQQFRISTQNLVLMQKYQIDELGKEIRPCRLKKRPPVR

SEQ ID NO: 344 - protein, 1082 aa, Neisseria lactamica
MAAFKPNPMNYILGLDIGIASVGWAMVEIDKEENPIRLIDLGVRVFERAEVPKTGDSLAMARRLARSVRRLTRRRAHRLLRARRLLKREGVLQDADFDENGLVKSLPNTPWQLRAAALDRKLTCLEWSAVLLHLIKHRGYLSQRKNEGETADKELGALLKGVADNAHALQTGDFRTPAELALNKFEKESGHIRNQRGDYSHTFSRKDLQAELNLLFEKQKEFSNPHVSDSLKEGIETLLMAQRPALSGDAVQKMLGHCTFEPAEPKAAKNTYTAERFIWLTKLNNLRILEQGSERPLTDTERATLMDEPYRKSKLTYAQARKLLGLEDTAFFKGLRYGKDNAEAPTLMEMKAYHAISRALEKEGLKDKKSPLNLSTELQDEIGTAFSLFKTDKDITGRLKDRVQPEILEALLKHISFDKFVQISLKALRRIVPLMEQGKRYDEACAEIYGDHYCKKNAEEKIYLPPIPADEIRNPVVLRALSQARKVINCVVRRYGSPARIHIETAREVGKSFKDRKEIEKRQEENRKDREKAAAKFREYFPNFVGEPKSKDILKLRLYEQQHGKCLYSGKEINLVRLNEKGYVEIDHALPFSRTWDDSFNNKVLVLGSENQNKGNQTPYEYFNGKDNSREWQEFKARVETSRFPRSKKQRILLQKFDEEGFKERNLNDTRYVNRFLCQFVADHILLTGKGKRRVFASNGQITNLLRGFWGLRKVRAENDRHHALDAVVVACSTVAMQQKITRFVRYKEMNAFDGKTIDKETGEVLHQKAHFPQPWEFFAQEVMIRVFGKPDGKPEFEEADTPEKLRTLLAEKLSSRPEAVHEYVTPLFVSRAPNRKMSGQGHMETVKSAKRLDEGISVLRVPLTQLKLKGLEKMVNREREPKLYDALKAQLETHKDNPAKAFAEPFYKYDKAGNRTQQVKAVRIEQVQKTGVWVRNHNGIADNATMVRVDVFEKGGKYYLVPIYSWQVAKGILPDRAVVAFKDEEDWTVMDDSFEFRFVLYANDLIKLTAKKNEFLGYFVSLNRATGAIDIRTHDTDSTKGKNGIFQSVGVKTALSFQKNQIDELGKEIRPCRLKKRPPVR

SEQ ID NO: 345 - protein, 1082 aa, Neisseria meningitidis
MAAFKPNPINYILGLDIGIASVGWAMVEIDEDENPICLIDLGVRVFERAEVPKTGDSLAMARRLARSVRRLTRRRAHRLLRARRLLKREGVLQAADFDENGLIKSLPNTPWQLRAAALDRKLTPLEWSAVLLHLIKHRGYLSQRKNEGETADKELGALLKGVADNAHALQTGDFRTPAELALNKFEKESGHIRNQRGDYSHTFSRKDLQAELNLLFEKQKEFGNPHISDGLKEGIETLLMTQRPALSGDAVQKMLGHCTFEPAEPKAAKNTYTAERFIWLTKLNNLRILEQGSERPLTDTERTTLIDEPYRKSKLTYAQARKLLELDNTAFFKGLRYGKDNAEASTLMEMKAYHAISRALEKEGLKDKKSPLNLSPELQDEIGTAFSLFKTDEDITGRLKDRVQPEILEALLKHISFDKFVQISLKALRRIVPLMEQGKRYDEACAEIYGDHYGKKNTEEKIDLPPIPADEIRNPVVLRALSQARKVINGVVRRYGSPARIHIETAREVGKSFKDRKEIEKRQEENRKDREKAATKFREYFPNFVGEPKSKDILKLRLYEQQHGKCLYSGKEINLGRLNEKGYVEIDHALPFSRTWDDSFNNKVLVLGSENQNKGNQTPYEYFNGKDNSREWQEFKARVETSRFPRSKKQRILLQKFDEEGFKERNLNDTRYVNRFLCQFVADHMLLTGKGKRRVFASNGQITNLLRGFWGLRKVRAENDRHHALDAVVVACSTVAMQQKITRFVRYKEMNAFDGKTIDKETGEVLHQKTHFPQPWEFFAQEVMIRVFGKPDGKPEFEEADTPEKLRTLLAEKLSSRPEAVHEYVTPLFVSRAPNRKMSGQGHMETVKSAKRLDEGVSVLRVPLTQLKLKDLEKMVNREREPKLYEALKARLEAHKDDPAKAFAEPFYKYDKAGNRTQQVKAVRVEQVQKTGVWVRNHNGIADNATMVRVDVFEKGDKYYLVPIYSWQVAKGILPDRAVVQGKDEEDWQLIDDSFNFKFSLHPNDLVEVITKKARMFGYFASCHRGTGNINIRIHDLDHKIGKNGILEGIGVKTALSFQKYQIDELGKEIRPCRLKKRPPVR

SEQ ID NO: 346 - protein, 1082 aa, Neisseria meningitidis
  Neisseria meningitidis 2007056
MAAFKPNPINYILGLDIGIASVGWAMVEIDEDENPICLIDLGVRVFERAEVPKTGDSLAMARRLARSVRRLTRRRAHRLLRARRLLKREGVLQAADFDENGLIKSLPNTPWQLRAAALDRKLTPLEWSAVLLHLIKHRGYLSQRKNEGETADKELGALLKGVADNAHALQTGDFRTPAELALNKFEKESGHIRNQRGDYSHTFSRKDLQAELILLFEKQKEFGNPHVSGGLKEGIETLLMTQRPALSGDAVQKMLGHCTFEPAEPKAAKNTYTAERFIWLTKLNNLRILEQGSERPLTDTERATLMDEPYRKSKLTYAQARKLLGLEDTAFFKGLRYGKDNAEASTLMEMKAYHAISRALEKEGLKDKKSPLNLSPELQDEIGTAFSLFKTDEDITGRLKDRIQPEILEALLKHISFDKFVQISLKALRRIVPLMEQGKRYDEACAEIYGDHYGKKNTEEKIYLPPIPADEIRNPVVLRALSQARKVINGVVRRYGSPARIHIETAREVGKSFKDRKEIEKRQEENRKDREKAAAKFREYFPNFVGEPKSKDILKLRLYEQQHGKCLYSGKEINLGRLNEKGYVEIDHALPFSRTWDDSFNNKVLVLGSENQNKGNQTPYEYFNGKDNSREWQEFKARVETSRFPRSKKQRILLQKFDEDGFKERNLNDTRYVNRFLCQFVADRMRLTGKGKKRVFASNGQITNLLRGFWGLRKVRAENDRHHALDAVVVACSTVAMQQKITRFVRYKEMNAFDGKTIDKETGEVLHQKTHFPQPWEFFAQEVMIRVFGKPDGKPEFEEADTPEKLRTLLAEKLSSRPEAVHEYVTPLFVSRAPNRKMSGQGHMETVKSAKRLDEGVSVLRVPLTQLKLKDLEKMVNREREPKLYEALKARLEAHKDDPAKAFAEPFYKYDKAGNRTQQVKAVRVEQVQKTGVWVRNHNGIADNATMVRVDVFEKGDKYYLVPIYSWQVAKGILPDRAVVQGKDEEDWQLIDDSFNFKFSLHPNDLVEVITKKARMFGYFASCHRGTGNINIRIHDLDHKIGKNGILEGIGVKTALSFQKYQIDELGEEIRPCRLKKRPPVR

SEQ ID NO: 347 - protein, 1082 aa, Neisseria meningitidis
  Neisseria meningitidis 63049
MAAFKPNPINYILGLDIGIASVGWAMVEIDEEENPIRLIDLSVRVFERAEVPKTGDSLAMARRLARSVRRLTRRRAHRLLRARRLLKREGVLQAADFDENGLIKSLPNTPWQLRAAALDRKLTPLEWSAVLLHLIKHRGYLSQRKNEGETADKELGALLKGVADNAHALQTGDFRTPAELALNKFEKESGHIRNQRGDYSHTFSRKDLQAELILLFEKQKEFGNPHVSGGLKEGIETLLMTQRPALSGDAVQKMLGHCTFEPAEPKAAKNTYTAERFVWLTKLNNLRILEQGSERPLTDTERATLMDEPYRKSKLTYAQARKLLGLEDTAFFKGLRYGKDNAEASTLMEMKAYHAISRALEKEGLKDKKSPLRLSPELQDEIGTAFSLFKTDEDITGRLKDRVQPEILEALLKHISFDKFVQISLKALRRIVPLMEQGKRYDEACAEIYGDHYGKKNAEEKIYLPPIPADEIRNPVVLRALSQARKVINGVVRRYGSPARIHIETAREVGKSFKDRKEIEKRQEENRKDREKAAAKFREYFPNFVGEPKSKDILKLRLYEQQHGKCLYSGKEINLGRLNEKGYVEIDHALPFSRTWDDSFNNKVLVLGSENQNKGNQTPYEYFNGKDNSREWQEFKARVETSRFPRSKKQRILLQKFDEDGFKERNLNDTRYVNRFLCQFVADRMRLTGKGKKRVFASNGQITNLLRGFWGLRKVRAENDRHHALDAVVVACSTVAMQQKITRFVRYKEMNAFDGKTIDKETGEVLHQKTHFPQPWEFFAQEVMIRVFGKPDGKPEFEEADTPEKLRTLLAEKLSSRPEAVHEYVTPLFVSRAPNRKMSGQGHMETVKSAKRLDEGVSVLRVPLTQLKLKDLEKMVNREREPKLYEALKARLEAHKDDPAKAFAEPFYKYDKAGNRTQQVKAVRVEQVQKTGVWVRNHNGIADNATMVRVDVFEKGDKYYLVPIYSWQVAKGILPDRAVVQGKDEEDWQLIDDSFNFKFSLHPNDLVEVITKKARMFGYFASCHRGTGNINIRIHDLDHKIGKNGILEGIGVKTALSFQKYQIDELGKEIRPCRLKKRPPVR

SEQ ID NO: 348 - protein, 1082 aa, Neisseria meningitidis
MAAFKPNSINYILGLDIGIASVGWAMVEIDEEENPIRLIDLGVRVFERAEVPKTGDSLAMARRLARSVRRLTRRRAHRLLRTRRLLKREGVLQAANFDENGLIKSLPNTPWQLRAAALDRKLTPLEWSAVLLHLIKHRGYLSQRKNEGETADKELGALLKGVAGNAHALQTGDFRTPAELALNKFEKESGHIRNQRSDYSHTFSRKDLQAELILLFEKQKEFGNPHVSGGLKEGIETLLMTQRPALSGDAVQKMLGHCTFEPAEPKAAKNTYTAERFIWLTKLNNLRILEQGSERPLTDTERATLMDEPYRKSKLTYAQARKLLGLEDTAFFKGLRYGKDNAEASTLMEMKAYHAISRALEKEGLKDKKSPLNLSPELQDEIGTAFSLFKTDEDITGRLKDRIQPEILEALLKHISFDKFVQISLKALRRIVPLMEQGKRYDEACAEIYGDHYGKKNTEEKIYLPPIPADEIRNPVVLRALSQARKVINGVVRRYGSPARIHIETAREVGKSFKDRKEIEKRQEENRKDREKAAAKFREYFPNFVGEPKSKDILKLRLYEQQHGKCLYSGKEINLGRLNEKGYVEIDHALPFSRTWDDSFNNKVLVLGSENQNKGNQTPYEYFNGKDNSREWQEFKARVETSRFPRSKKQRILLQKFDEDGFKERNLNDTRYVNRFLCQFVADRMRLTGKGKKRVFASNGQITNLLRGFWGLRKVRAENDRHHALDAVVVACSTVAMQQKITRFVRYKEMNAFDGKTIDKETGEVLHQKTHFPQPWEFFAQEVMIRVFGKPDGKPEFEEADTLEKLRTLLAEKLSSRPEAVHEYVTPLFVSRAPNRKMSGQGHMETVKSAKRLDEGVSVLRVPLTQLKLKDLEKMVNREREPKLYEALKARLEAHKDDPAKAFAEPFYKYDKAGNRTQQVKAVRVEQVQKTGVWVRNHNGIADNATMVRVDVFEKGDKYYLVPIYSWQVAKGILPDRAVVQGKDEEDWQLIDDSFNFKFSLHPNDLVEVITKKARMFGYFASCHRGTGNINIRIHDLDHKIGKNGILEGIGVKTALSFQKYQIDELGKEIRPCRLKKRPPVR

SEQ ID NO: 349 - protein, 1082 aa, Neisseria meningitidis
  Neisseria meningitidis 92045
MAAFKPNPINYILGLDIGIASVGWAMVEIDEEENPIRLIDLGVRVFERAEVPKTGDSLAMARRLARSVRRLTRRRAHRLLRARRLLKREGVLQAADFDENGLIKSLPNTPWQLRAAALDRKLTPLEWSAVLLHLIKHRGYLSQRKNEGETADKELGALLKGVADNAHALQTGDFRTPAELALNKFEKECGHIRNQRGDYSHTFSRKDLQAELNLLFEKQKEFGNPHVSGGLKEGIETLLMTQRPALSGDAVQKMLGHCTFEPAEPKAAKNTYTAERFIWLTKLNNLRILEQGSERPLTDTERATLMDEPYRKSKLTYAQARKLLGLEDTAFFKGLRYGKDNAEASTLMEMKAYHAISRALEKEGLKDKKSPLNLSPELQDEIGTAFSLFKTDEDITGRLKDRIQPEILEALLKHISFDKFVQISLKALRRIVPLMEQGKRYDEACAEIYGDHYGKKNTEEKIYLPPIPADEIRNPVVLRALSQARKVINGVVRRYGSPARIHIETAREVGKSFKDRKEIEKRQEENRKDREKAAAKFREYFPNFVGEPKSKDILKLRLYEQQHGKCLYSGKEINLVRLNEKGYVEIDHALPFSRTWDDSFNNKVLVLGSENQNKGNQTPYEYFNGKDNSREWQEFKARVETSRFPRSKKQRILLQKFDEEGFKERNLNDTRYVNRFLCQFVADHILLTGKGKRRVFASNGQITNLLRGFWGLRKVRAENDRHHALDAVVVACSTVAMQQKITRFVRYKEMNAFDGKTIDKETGEVLHQKTHFPQPWEFFAQEVMIRVFGKPDGKPEFEEADTPEKLRTLLAEKLSSRPEAVHEYVTPLFVSRAPNRKMSGQGHMETVKSAKRLDEGVSVLRVPLTQLKLKDLEKMVNREREPKLYEALKARLEAHKDDPAKAFAEPFYKYDKAGNRTQQVKAVRVEQVQKTGVWVRNHNGIADNATMVRVDVFEKGGKYYLVPIYSWQVAKGILPDRAVVQGKDEEDWQLIDDSFNFKFSLHPNDLVEVITKKARMFGYFASCHRGTGNINIRIHDLDHKIGKNGILEGIGVKTALSFQKYQIDELGKEIRPCRLKKRPPVR

SEQ ID NO: 350 - protein, 1081 aa, Neisseria meningitidis
  Neisseria meningitidis 93003
MAAFKPNPINYILGLDIGIASVGWAMVEIDEEENPIRLIDLGVRVFERAEVPKTGDSLAMARRLARSVRRLTRRRAHRLLRARRLLKREGVLQAADFDENGLIKSLPNTPWQLRAAALDRKLTPLEWSAVLLHLIKHRGYLSQRKNEGETADKELGALLKGVADNAHALQTGDFRTPAELALNKFEKESGHIRNQRGDYSHTFSRKDLQAELILLFEKQKEFGNPHVSGGLKEGIETLLMTQRPALSGDAVQKMLGHCTFEPAEPKAAKNTYTAERFIWLTKLNNLRILEQGSERPLTDTERATLMDEPYRKSKLTYAQARKLLGLEDTAFFKGLRYGKDNAEASTLMEMKAYHAISRALEKEGLKDKKSPLNLSPELQDEIGTAFSLFKTDEDITGRLKDRVQPEILEALLKHISFDKFVQISLKALRRIVPLMEQGKRYDEACAEIYGDHYGKKNTEEEIYLPPITADEIRNPVVLRALSQARKVINAVVRRYGSPARIHIETAREVGKSFKDRKEIEKRQEENRKDREKAAAKFREYFPNFVGEPKSKDILKLRLYEQQHGKCLYSGKEINLVRLNEKGYVEIDHALPFSRTWDDSFNNKVLVLGSENQNKGNQTPYEYFNGKENSREWQEFKARVETSRFPRSKKQRILLQKFDEDGFKERNLNDTRYVNRFLCQFVADRMRLTGKGKKRVFASNGQITNLLRGFWGLHKVRAENDRHHALDAVVVACSTIAMQQKITRFVRYKEMNAFDGKTIDKETGEVLHQKAHFPQPWEFFAQEVMIRVFGKPDGKPEFEEADTPEKLRTLLAEKLSSRPEAVHEYVTPLFVSRAPNRKMSGQGHMETVKSAKRLDEGISVLRVPLTQLKLKDLEKMVNRAREPKLYEALKARLEAHKDDPAKAFAEPFYKYDKAGNRTQQVKAVRVEQVQKTGVWVRNHNGIADNATMVRVDVFEKAGKYYLVPIYSWQVAKGILPDRAVVAYADEEDWTVIDESFRFKFVLYSNDLIKVQLKKDSFLGYFSGLDRATGAISLREHDLEKSKGKDGMHRIGVKTALSFQKYQIDEMGKEIRPCRLKKRPPVR

SEQ ID NO: 351 - protein, 1081 aa, Neisseria meningitidis
  Neisseria meningitidis 93004
MAAFKPNPINYILGLDIGIASVGWAMVEIDEDENPICLIDLGVRVFERAEVPKTGDSLAMARRLARSVRRLTRRRAHRLLRARRLLKREGVLQAADFDENGLIKSLPNTPWQLRAAALDRKLTPLEWSAVLLHLIKHRGYLSQRKNEGETADKELGALLKGVADNAHALQTGDFRTPAKLALNKFEKESGHIRNQRGDYSHTFSRKDLQAELNLLFEKQKEFGNPHISDGLKEGIETLLMTQRPALSGDAVQKMLGHCTFEPTEPKAAKNTYTAERFVWLTKLNNLRILEQGSEQPLTDTQRAKLMDEPYRKSKLTYAQARKLLGLEDTAFFKGLRYGKDNAEASTLMEMKAYHAISRALEKEGLKDKKSPLNLSPELQDEIGTAFSLFKTDEDITGRLKDRVQPEILEALLKHISFDKFVQISLKALRRIVPLMEQGKRYNEACAEIYGDHYGKKNTEEKIYLPPIPADEIRNPVVLRALSQARKVINGVVRRYGSPARIHIETAREVGKSFKDRKEIEKRQEENRKDREKAAAKFQEYFPNFVGEPKSKDILKLRLYEQQHGKCLYSGKEINLGRLNEKGYVEIDHALPFSRTWDDSFNNKVLVLGSENQNKGNQTPYEYFNGKDNSREWQEFKARVETSRFPRSKKQRILLQKFDEDGFKERNLNDTRYVNRFLCQFVADRMRLTGKGKKRVFASNGQITNLLRGFWGLRKVRAENDRHHALDAVVVACSTVAMQQKITRFVRYKEMNAFDGKTIDKETGEVLHQKTHFPQPWEFFAQEVMIRVFGKPDGKPEFEEADTPEKLRTLLAEKLSSRPEAVHEYVTPLFVSRAPNRKMSGQGHMETVKSAKRLDEGVSVLRVPLTQLKLKDLEKMVNREREPKLYEALKARLEAHKDDPAKAFAEPFYKYDKAGNRTQQVKAVRVEQVQKTGVWVRNHNGIADNATMVRVDVFEKGDKYYLVPIYSWQVAKGILPDRAVVAYADEEDWTVIDESFRFKFVLYSNDLIKVQLKKDSFLGYFSGLDRATGAISLREHDLEKSKGKDGMHRIGVKTALSFQKYQIDEMGKEIRPCRLKKRPPVR

SEQ ID NO: 352 - protein, 1082 aa, Neisseria meningitidis
  Neisseria meningitidis 96023
MAAFKPNPINYILGLDIGIASVGWAMVEIDEDENPICLIDLGVRVFERAEVPKTGDSLAMARRLARSVRRLTRRRAHRLLRARRLLKREGVLQAADFDENGLIKSLPNTPWQLRAAALDRKLTPLEWSAVLLHLIKHRGYLSQRKNEGETADKELGALLKGVADNAHALQTGDFRTPAELALNKFEKESGHIRNQRGDYSHTFSRKDLQAELILLFEKQKEFGNPHVSGGLKEGIETLLMTQRPALSSDAVQKMLGHCTFEPAEPKAAKNTYTAERFIWLTKLNNLRILEQGSERPLTDTERATLMDEPYRKSKLTYAQARKLLGLEDTAFFKGLRYGKDNAEASTLMEMKAYHAISRALEKEGLKDKKSPLNLSPELQDEIGTAFSLFKTDEDITGRLKDRIQPEILEALLKHISFDKFVQISLKALRRIVPLMEQGKRYDEACAEIYGDHYGKKNTEEKIYLPPIPADEIRNPVVLRALSQARKVINGVVRRYGSPARIHIETAREVGKSFKDRKEIEKRQEENRKDREKAAAKFREYFPNFVGEPKSKDILKLRLYEQQHGKCLYSGKEINLGRLNEKGYVEIDHALPFSRTWDDSFNNKVLVLGSENQNKGNQTPYEYFNGKDNSREWQEFKARVETSRFPRSKKQRILLQKFDEDGFKERNLNDTRYVNRFLYQFVADRMRLTGKGKKRVFASNGQITNLLRGFWGLRKVRAENDRHHALDAVVVACSTVAMQQKITRFVRYKEMNAFDGKTIDKETGEVLHQKTHFPQPWEFFAQEVMIRVFGKPDGKPEFEEADTPEKLRTLLAEKLSSRPEAVHEYVTPLFVSRAPNRKMSGQGHMETVKSAKRLDEGVSVLRVPLTQLKLKDLEKMVNREREPKLYEALKARLEAHKDDPAKAFAEPFYKYDKAGNRTQQVKAVRVEQVQKTGVWVRNHNGIADNATMVRVDVFEKGDKYYLVPIYSWQVAKGILPDRAVVQGKDEEDWQLIDDSFNFKFSLHPNDLVEVITKKARMFGYFASCHRGTGNINIRIHDLDHKIGKNGILEGIGVKTALSFQKYQIDELGKEIRPCRLKKRPPVR

SEQ ID NO: 353 - protein, 1081 aa, Neisseria meningitidis
  Neisseria meningitidis 98008
MAAFKPNPINYILGLDIGIASVGWAMVEIDEDENPICLIDLGVRVFERAEVPKTGDSLAAARRLARSVRRLTRRRAHRLLRARRLLKREGVLQAADFDENGLIKSLPNTPWQLRSAALDRKLTPLEWSAVLLHLIKHRGYLSQRKNEGETADKELGALLKGVANNAHALQTGDFRTPAELALNKFEKESGHIRNQRGDYSHTFSRKDLQAELILLFEKQKEFGNPHVSGGLKEGIETLLMTQRPALSGDAVQKMLGHCTFEPAEPKAAKNTYTAERFIWLTKLNNLRILEQGSERPLTDTERATLMDEPYRKSKLTYAQARKLLGLEDTAFFKGLRYGKDNAEASTLMEMKAYHAISRALEKEGLKDKKSPLNLSPELQDEIGTAFSLFKTDEDITGRLKDRIQPEILEALLKHISFDKFVQISLKALRRIVPLMEQGKRYDEACAEIYGDHYGKKNTEEKIYLPPIPADEIRNPVVLRALSQARKVINGVVRRYGSPARIHIETAREVGKSFKDRKEIEKRQEENRKDREKAAAKFREYFPNFVGEPKSKDILKLRLYEQQHGKCLYSGKEINLGRLNEKGYVEIDHALPFSRTWDDSFNNKVLVLGSENQNKGNQTPYEYFNGKDNSREWQEFKARVETSRFPRSKKQRILLQKFDEDGFKERNLNDTRYVNRFLCQFVADRMRLTGKGKKRVFASNGQITNLLRGFWGLRKVRAENDRHHALDAVVVACSTVAMQQKITRFVRYKEMNAFDGKTIDKETGEVLHQKTHFPQPWEFFAQEVMIRVFGKPDGKPEFEEADTPEKLRTLLAEKLSSRPEAVHEYVTPLFVSRAPNRKMSGQGHMETVKSAKRLDEGVSVLRVPLTQLKLKDLEKMVNREREPKLYEALKARLEAHKDDPAKAFAEPFYKYDKAGNRTQQVKAVRVEQVQKTGVWVRNHNGIADNATMVRVDVFEKAGKYYLVPIYSWQVAKGILPDRAVVAYADEEGWTVIDESFRFKFVLYSNDLIKVQLKKDSFLGYFSGLDRATGAISLREHDLEKSKGKDGMHRIGVKTALSFQKYQIDEMGKEIRLCRLKKRPPVR

SEQ ID NO: 354 - protein, 1082 aa, Neisseria meningitidis
MAAFKPNPINYILGLDIGIASVGWAMVEIDEEENPIRLIDLGVRVFERAEVPKTGDSLAMVRRLARSVRRLTRRRAHRLLRARRLLKREGVLQAADFDENGLIKSLPNTPWQLRAAALDRKLTPLEWSAVLLHLIKHRGYLSQRKNEGETADKELGALLKGVADNAHALQTGDFRTPAELALNKFEKESGHIRNQRGDYSHTFSRKDLQAELILLFEKQKEFGNPHISGGLKEGIETLLMTQRPALSGDAVQKMLGHCTFEPAEPKAAKNTYTAERFIWLTKLNNLRILEQGSERPLTDTERATLMDEPYRKSKLTYAQARKLLGLEDTAFFKGLRYGKDNAEASTLMEMKAYHAISRALEKEGLKDKKSPLNLSPELQDEIGTAFSLFKTDEDITGRLKDRIQPEILEALLKHISFDKFVQISLKALRRIVPLMEQGKRYDEACAEIYGDHYGKKNTEEKIYLPPIPADEIRNPVVLRALSQARKVINGVVRRYGSPARIHIETAREVGKSFKDRKEIEKRQEENRKDREKAAAKFREYFPNFVGEPKSKDILKLRLYEQQHGKCLYSGKEINLGRLNEKGYVEIDHALPFSRTWDDSFNNKVLVLGSENQNKGNQTPYEYFNGKDNSREWQEFKARVETSRFPRSKKQRILLQKFDEDGFKERNLNDTRYVNRFLCQFVADRMRLTGKGKKRVFASNGQITNLLRGFWGLRKVRAENDRHHALDAVVVACSTVAMQQKITRFVRYKEMNAFDGKTIDKETGEVLHQKTHFPQPWEFFAQEVMIRVFGKPDGKPEFEEADTPEKLRTLLAEKLSSRPEAVHEYVTPLFVSRAPNRKMSGQGHMETVKSAKRLDEGVSVLRVPLTQLKLKDLEKMVNREREPKLYEALKARLEAHKDDPAKAFAEPFYKYDKAGNRTQQVKAVRVEQVQKTGVWVRNHNGIADNATMVRVDVFEKGDKYYLVPIYSWQVAKGILPDRAVVQGKDEEDWQLIDDSFNFKFSLHPNDLVEVITKKARMFGYFASCHRGTGNINIRIHDLDHKIGKNGILEGIGVKTALSFQKYQIDELGKEIRPCRLKKRPPVR

SEQ ID NO: 355 - protein, 1082 aa, Neisseria meningitidis
  Neisseria meningitidis alpha275
MAAFKPNPINYILGLDIGIASVGWAMVEIDEDENPICLIDLGVRVFERAEVPKTGDSLAAARRLARSVRRLTRRRAHRLLRARRLLKREGVLQAADFDENGLIKSLPNTPWQLRAAALDRKLTPLEWSAVLLHLIKHRGYLSQRKNEGETADKELGALLKGVADNAHALQTGDFRTPAELALNKFEKESGHIRNQRGDYSHTFSRKDLQAELILLFEKQKEFGNPHVSGGLKEGIETLLMTQRPALSGDAVQKMLGHCTFEPAEPKAAKNTYTAERFIWLTKLNNLRILEQGSERPLTDTERATLMDEPYRKSKLTYAQARKLLGLEDTAFFKGLRYGKDNAEASTLMEMKAYHAISRALEKEGLKDKKSPLNLSPELQDEIGTAFSLFKTDEDITGRLKDRVQPEILEALLKHISFDKFVQISLKALRRIVPLMEQGKRYDEACAEIYGDHYGKKNTEEKIYLPPIPADEIRNPVVLRALSQARKVINGVVRRYGSPARIHIETAREVGKSFKDRKEIEKRQEENRKDREKAAAKFREYFPNFVGEPKSKDILKLRLYEQQHGKCLYSGKEINLGRLNEKGYVEIDHALPFSRTWDDSFNNKVLVLGSENQNKGNQTPYEYFNGKDNSREWQEFKARVETSRFPRSKKQRILLQKFDEDGFKERNLNDTRYVNRFLCQFVADRMRLTGKGKKRVFASNGQITNLLRGFWGLRKVRAENDRHHALDAVVVACSTVAMQQKITRFVRYKEMNAFDGKTIDKETGEVLHQKTHFPQPWEFFAQEVMIRVFGKPDGKPEFEEADTPEKLRTLLAEKLSSRPEAVHEYVTPLFVSRAPNRKMSGQGHMETVKSAKRLDEGVSVLRVPLTQLKLKDLEKMVNREREPKLYEALKARLEAHKDDPAKAFAEPFYKYDKAGNRTQQVKAVRVEQVQKTGVWVRNHNGIADNATMVRVDVFEKGDKYYLVPIYSWQVAKGILPDRAVVQGKDEEDWQLIDDSFNFKFSLHPNDLVEVITKKARMFGYFASCHRGTGNINIRIHDLDHKIGKNGILEGIGVKTALSFQKYQIDELGKEIRPCRLKKRPPVR

SEQ ID NO: 356 - protein, 1082 aa, Neisseria meningitidis
  Neisseria meningitidis ATCC 13091
MAAFKPNPINYILGLDIGIASVGWAMVEIDEEENPIRLIDLGVRVFERAEVPKTGDSLAMARRLARSVRRLTRRRAHRLLRTRRLLKREGVLQAANFDENGLIKSLPNTLWQLRAAALDRKLTPLEWSAVLLHLIKHRGYLSQRKNEGETADKELGALLKGVAGNAHALQTGDFRTPAELALNKFEKESGHIRNQRGDYSHTFSRKDLQAELNLLFEKQKEFGNPHISDGLKEGIETLLMTQRPALSGDAVQKMLGHCTFEPTEPKAAKNTYTTERFIWLTKLNNLRILEQGSERPLTDTERATLMDEPYRKSKLTYAQARKLLELDDIAFFKGLRYGKDNAEASTLMEMKAYHAISRALEKEGLKDKKSPLNLSPELQDEIGTAFSLFKTDEDITGRLKDRIQPEILEALLKHINFDKFVQISLKALRRIVPLMEQGKRYDEACAEIYGDHYGKKNTEEKIDLPPIPADEIHNPVVLRALSQARKVINGVVRRYGSPARIHIETAREVGKSFKDRKEIEKRQEENRKDREKAAAKFREYFPNFVGEPKSKDILKLRLYEQQHGKCLYSGKEINLGRLNEKGYVEIDHALPFSRTWDDSFNNKVLVLGSENQNKGNQTPYEYFNGKDNSREWQEFKARVETSRFPRSKKQRILLQKFDEDGFKERNLNDTRYVNRFLCQFVADRMRLTGKGKKRVFASNGQITNLLRGFWGLRKVRAENDRHHALDAVVVACSTVAMQQKITRFVRYKEMNAFDGKTIDKETGEVLHQKTHFPQPWEFFAQEVMIRVFGKPDGKPEFEEADTPEKLRTLLTEKLSSRPEAVHEYVTPLFVSRAPNRKMSGQGHMETVKSAKRLDEGISVLRVPLTQLKLKDLEKMVNREREPKLYEALKARLEAHKDDPAKAFAEPFYKYDKAGNRTQQVKAMRVEQVQKTGVWVRNHNGIADNATMVRVDVFEKGDKYYLVPIYSWQVAKGILPDRAVVQGKDEEDWQLIDDSFNFKFSLHPNDLVEVITKKARMFGYFASCHRGTGNINIRIHDLDHKIGKNGILEGIGVKTALSFQKYQIDELGKEIRPCRLKKRPPVR

SEQ ID NO: 357 - protein, 1081 aa, Neisseria meningitidis
  Neisseria meningitidis N1568
MAAFKPNPINYILGLDIGIASVGWAMVEIDEEENPIRLIDLGVRVFERAEVPKTGDSLAMARRLARSVRRLTRRRAHRLLRARRLLKREGVLQAADFDENGLIKSLPNTPWQLRAAALDRKLTPLEWSAVLLHLIKHRGYLSQRKNEGETADKELGALLKGVADNAHALQTGDFRTPAELALNKFEKECGHIRNQRGDYSHTFSRKDLQAELNLLFEKQKEFGNPHVSGGLKEGIETLLMTQRPALSGDAVQKMLGHCTFEPAEPKAAKNTYTAERFIWLTKLNNLRILEQGSERPLTDTERATLMDEPYRKSKLTYAQARKLLSLEDTAFFKGLRYGKDNAEASTLMEMKAYHTISRALEKEGLKDKKSPLNLSPELQDEIGTAFSLFKTDEDITGRLKDRIQPEILEALLKHISFDKFVQISLKALRRIVPLMEQGKRYDEACAEIYGDHYGKKNTEEKIYLPPIPADEIRNPVVLRALSQARKVINGVVRRYGSPARIHIETAREVGKSFKDRKEIEKRQEENRKDREKAAAKFREYFPNFVGEPKSKDILKLRLYEQQHGKCLYSGKEINLGRLNEKGYVEIDHALPFSRTWDDSFNNKVLVLGSENQNKGNQTPYEYFNGKDNSREWQEFKARVETSRFPRSKKQRILLQKFDEDGFKERNLNDTRYVNRFLCQFVADRMRLTGKGKKRVFASNGQITNLLRGFWGLRKVRAENDRHHALDAVVVACSTVAMQQKITRFVRYKEMNAFDGKTIDKETGEVLHQKTHFPQPWEFFAQEVMIRVFGKPDGKPEFEEADTPEKLRTLLAEKLSSRPEAVHEYVTPLFVSRAPNRKMSGQGHMETVKSAKRLDEGVSVLRVPLTQLKLKDLEKMVNREREPKLYEALKARLEAHKDDPAKAFAEPFYKYDKAGNRTQQVKAVRVEQVQKTGVWVRNHNGIADNATMVRVDVFEKGDKYYLVPIYSWQVAKGILPDRAVVAYADEEDWTVIDESFRFKFVLYSNDLIKVQLKKDSFLGYFSGLDRATGAISLREHDLEKSKGKDGMHRIGVKTALSFQKYQIDEMGKEIRPCRLKKRPPVR

SEQ ID NO: 358 - protein, 1081 aa, Neisseria meningitidis
  Neisseria meningitidis NM140
MAAFKPNPINYILGLDIGIASVGWAMVEIDEDENPICLIDLGVRVFERAEVPKTGDSLAAARRLARSVRRLTRRRAHRLLRARRLLKREGVLQAADFDENGLIKSLPNTPWQLRSAALDRKLTPLEWSAVLLHLIKHRGYLSQRKNEGETADKELGALLKGVADNAHALQTGDFRTPAELALNKFEKESGHIRNRRGDYSHTFSRKDLQAELDLLFEKQKEFGNPHISDDLKEGIETLLMTQRPALSGDAVQKMLGHCTFEPTEPKAAKNTYTAERFVWLTKLNNLRILEQGSERPLTDTERATLMDEPYRKSKLTYAQARKLLELDDTAFFKGLRYGKDNAEASTLMEMKAYHAISRALEKEGLKDKKSPLNLSPELQDEIGTAFSLFKTDEDITGRLKDRVQPEILEVLLKHISFDKFVQISLKALRRIVPLMEQGKRYDEACAEIYGDHDGKKNTEEKIYLPPIPADEIRNPVVLRALSQARKVINAVVRRYGSPARIHIETAREVGKSFKDRKEIEKRQEENRKDREKAAAKFREYFPNFVGEPKSKDILKLRLYEQQHGKCLYSGKEINLGRLNEKGYVEIDHALPFSRTWDDSFNNKVLVLGSENQNKGNQTPYEYFNGKDNSREWQEFKARVETSRFPRSKKQRILLQKFDEEGFKERNLNDTRYVNRFLCQFVADHMLLTGKGKRRVFASNGQITNLLRGFWGLRKVRAENNRHHALDAVVVACSTVAMQQKITRFVRYKEMNAFDGKTIDKETGEVLHQKTHFPQPWEFFAQEVMIRVFGKPDGKPEFEEADTPEKLRTLLAEKLSSRPEAVHEYVTPLFVSRAPNRKMSGQGHMETVKSAKRLDEGVSVLRVPLTQLKLKDLEKMVNREREPKLYEALKARLEAHKDDPAKAFAEPFYKYDKAGNRTQQVKAVRVEQVQKTGVWVRNHNGIADNATMVRVDVFEKAGKYYLVPIYSWQVAKGILPDRAVVAYADEEGWTVIDESFRFKFVLYSNDLIKVQLKKDSFLGYFSGLDRATGAISLREHDLEKSKGKDGMHRIGVKTALSFQKYQIDEMGKEIRLCRLKKRPPVR

SEQ ID NO: 359 - protein, 1082 aa, Neisseria meningitidis
  Neisseria meningitidis NM220
MAAFKPNPINYILGLDIGIASVGWAMVEIDEEENPIRLIDLGVRVFERAEVPKTGDSLAMARRLARSVRRLTRRRAHRLLRARRLLKREGVLQAADFDENGLIKSLPNTPWQLRAAALDRKLTPLEWSAVLLHLIKHRGYLSQRKNEGETADKELGALLKGVANNAHALQTGDFRTPAELALNKFEKESGHIRNQRGDYSHTFSRKDLQAELILLFEKQKEFGNPHVSGGLKEGIETLLMTQRPALSGDAVQKMLGHCTFEPAEPKAAKNTYTAERFIWLTKLNNLRILEQGSERPLTDTERATLMDEPYRKSKLTYAQARKLLGLEDTAFFKGLRYGKDNAEASTLMEMKAYHAISRALEKEGLKDKKSPLNLSSELQDEIGTAFSLFKTDEDITGRLKDRVQPEILEALLKHISFDKFVQISLKALRRIVPLMEQGKRYDEACAEIYGDHYGKKNTEEKIYLPPIPADEIRNPVVLRALSQARKVINGVVRRYGSPARIHIETAREVGKSFKDRKEIEKRQEENRKDREKAAAKFREYFPNFVGEPKSKDILKLRLYEQQHGKCLYSGKEINLVRLNEKGYVEIDHALPFSRTWDDSFNNKVLVLGSENQNKGNQTPYEYFNGKDNSREWQEFKARVETSRFPRSKKQRILLQKFDEDGFKECNLNDTRYVNRFLCQFVADHILLTGKGKRRVFASNGQITNLLRGFWGLRKVRAENDRHHALDAVVVACSTVAMQQKITRFVRYKEMNAFDGKTIDKETGKVLHQKTHFPQPWEFFAQEVMIRVFGKPDGKPEFEEADTPEKLRTLLAEKLSSRPEAVHEYVTPLFVSRAPNRKMSGAHKDTLRSAKRFVKHNEKISVKRVWLTEIKLADLENMVNYKNGREIELYEALKARLEAYGGNAKQAFDPKDNPFYKKGGQLVKAVRVEKTQESGVLLNKKNAYTIADNGDMVRVDVFCKVDKKGKNQYFIVPIYAWQVAENILPDIDCKGYRIDDSYTFCFSLHKYDLIAFQKDEKSKVEFAYYINCDSSNGRFYLAWHDKGSKEQQFRISTQNLVLIQKYQVNELGKEIRPCRLKKRPPVR

SEQ ID NO: 360 - protein, 1082 aa, Neisseria meningitidis
  Neisseria meningitidis NM233
MAAFKPNPINYILGLDIGIASVGWAMVEIDEEENPIRLIDLGVRVFERAEVPKTGDSLAMARRLARSVRRLTRRRAHRLLRARRLLKREGVLQAADFDENGLIKSLPNTPWQLRAAALDRKLTPLEWSAVLLHLIKHRGYLSQRKNEGETADKELGALLKGVANNAHALQTGDFRTPAELALNKFEKESGHIRNQRGDYSHTFSRKDLQAELILLFEKQKEFGNPHVSGGLKEGIETLLMTQRPALSGDAVQKMLGHCTFEPAEPKAAKNTYTAERFIWLTKLNNLRILEQGSERPLTDTERATLMDEPYRKSKLTYAQARKLLGLEDTAFFKGLRYGKDNAEASTLMEMKAYHAISRALEKEGLKDKKSPLNLSSELQDEIGTAFSLFKTDEDITGRLKDRVQPEILEALLKHISFDKFVQISLKALRRIVPLMEQGKRYDEACAEIYGDHYGKKNTEEKIYLPPIPADKIRNPVVLRALSQARKVINGVVRRYGSPARIHIETAREVGKSFKDRKEIEKRQEENRKDREKAAAKFREYFPNFVGEPKSKDILKLRLYEQQHGKCLYSGKEINLVRLNEKGYVEIDHALPFSRTWDDSFNNKVLVLGSENQNKGNQTPYEYFNGKDNSREWQEFKARVETSRFPRSKKQRILLQKFDEDGFKECNLNDTRYVNRFLCQFVADHILLTGKGKRRVFASNGQITNLLRGFWGLRKVRAENDRHHALDAVVVACSTVAMQQKITRFVRYKEMNAFDGKTIDKETGKVLHQKTHFPQPWEFFAQEVMIRVFGKPDGKPEFEEADTPEKLRTLLAEKLSSRPEAVHEYVTPLFVSRAPNRKMSGAHKDTLRSAKRFVKHNEKISVKRVWLTEIKLADLENMVNYKNGREIELYEALKARLEAYGGNAKQAFDPKDNPFYKKGGQLVKAVRVEKTQESGVLLNKKNAYTIADNGDMVRVDVFCKVDKKGKNQYFIVPIYAWQVAENILPDIDCKGYRIDDSYTFCFSLHKYDLIAFQKDEKSKVEFAYYINCDSSNGRFYLAWHDKGSKEQQFRISTQNLVLIQKYQVNELGKEIRPCRLKKRPPVR

SEQ ID NO: 361 - protein, 1082 aa, Neisseria meningitidis
MAAFKPNPINYILGLDIGIASVGWAMVEIDEDENPICLIDLGVRVFERAEVPKTGDSLAMARRLARSVRRLTRRRAHRLLRARRLLKREGVLQAADFDENGLIKSLPNTPWQLRAAALDRKLTPLEWSAVLLHLIKHRGYLSQRKNEGETADKELGALLKGVADNAHALQTGDFRTPAELALNKFEKESGHIRNQRGDYSHTFSRKDLQAELILLFEKQKEFGNPHVSGGLKEGIETLLMTQRPALSSDAVQKMLGHCTFEPAEPKAAKNTYTAERFIWLTKLNNLRILEQGSERPLTDTERATLMDEPYRKSKLTYAQARKLLGLEDTAFFKGLRYGKDNAEASTLMEMKAYHAISRALEKEGLKDKKSPLNLSPELQDEIGTAFSLFKTDEDITGRLKDRIQPEILEALLKHISFDKFVQISLKALRRIVPLMEQGKRYDEACAEIYGDHYGKKNTEEKIYLPPIPADEIRNPVVLRALSQARKVINGVVRRYGSPARIHIETAREVGKSFKDRKEIEKRQEENRKDREKAAAKFREYFPNFVGEPKSKDILKLRLYEQQHGKCLYSGKEINLGRLNEKGYVEIDHALPFSRTWDDSFNNKVLVLGSENQNKGNQTPYEYFNGKDNSREWQEFKARVETSRFPRSKKQRILLQKFDEDGFKERNLNDTRYVNRFLCQFVADRMRLTGKGKKRVFASNGQITNLLRGFWGLRKVRAENDRHHALDAVVVACSTVAMQQKITRFVRYKEMNAFDGKTIDKETGEVLHQKTHFPQPWEFFAQEVMIRVFGKPDGKPEFEEADTPEKLRTLLAEKLSSRPEAVHEYVTPLFVSRAPNRKMSGQGHMETVKSAKRLDEGVSVLRVPLTQLKLKDLEKMVNREREPKLYEALKARLEAHKDDPAKAFAEPFYKYDKAGNRTQQVKAVRVEQVQKTGVWVRNHNGIADNATMVRVDVFEKGDKYYLVPIYSWQVAKGILPDRAVVQGKDEEDWQLIDDSFNFKFSLHPNDLVEVITKKARMFGYFASCHRGTGNINIRIHDLDHKIGKNGILEGIGVKTALSFQKYQIDELGKEIRPCRLKKRPPVR

SEQ ID NO: 362 - protein, 1082 aa, Neisseria meningitidis
MAAFKPNPINYILGLDIGIASVGWAMVEIDEDENPICLIDLGVRVFERAEVPKTGDSLAMARRLARSVRRLTRRRAHRLLRARRLLKREGVLQAADFDENGLIKSLPNTPWQLRAAALDRKLTPLEWSAVLLHLIKHRGYLSQRKNEGETADKELGALLKGVADNAHALQTGDFRTPAELALNKFEKESGHIRNQRGDYSHTFSRKDLQAELILLFEKQKEFGNPHVSGGLKEGIETLLMTQRPALSGDAVQKMLGHCTFEPAEPKAAKNTYTAERFIWLTKLNNLRILEQGSERPLTDTERATLMDEPYRKSKLTYAQARKLLGLEDTAFFKGLRYGKDNAEASTLMEMKAYHAISRALEKEGLKDKKSPLNLSPELQDEIGTAFSLFKTDEDITGRLKDRIQPEILEALLKHISFDKFVQISLKALRRIVPLMEQGKRYDEACAEIYGDHYGKKNTEEKIYLPPIPADEIRNPVVLRALSQARKVINGVVRRYGSPARIHIETAREVGKSFKDRKEIEKRQEENRKDREKAAAKFREYFPNFVGEPKSKDILKLRLYEQQHGKCLYSGKEINLGRLNEKGYVEIDHALPFSRTWDDSFNNKVLVLGSENQNKGNQTPYEYFNGKDNSREWQEFKARVETSRFPRSKKQRILLQKFDEDGFKERNLNDTRYVNRFLCQFVADRMRLTGKGKKRVFASNGQITNLLRGFWGLRKVRAENDRHHALDAVVVACSTVAMQQKITRFVRYKEMNAFDGKTIDKETGEVLHQKTHFPQPWEFFAQEVMIRVFGKPDGKPEFEEADTPEKLRTLLAEKLSSRPEAVHEYVTPLFVSRAPNRKMSGQGHMETVKSAKRLDEGVSVLRVPLTQLKLKDLEKMVNREREPKLYEALKARLEAHKDDPAKAFAEPFYKYDKAGNRTQQVKAVRVEQVQKTGVWVRNHNGIADNATMVRVDVFEKGDKYYLVPIYSWQVAKGILPDRAVVQGKDEEDWQLIDDSFNFKFSLHPNDLVEVITKKARMFGYFASCHRGTGNINIRIHDLDHKIGKNGILEGIGVKTALSFQKYQIDELGKEIRPCRLKKRPPVR

SEQ ID NO: 363 - protein, 1089 aa, Neisseria sp.
  Neisseria sp. oral taxon 014 str. F0314
MTAFKPNPLNYILGLDIGIASVGWAMVEIDDKENPVRLIDLGVRVFERAEMPKTGDSLAAARRLARSVRRLTRRRAHRLLRARRLLKHEGVLKPEDFDENGLVKPLPYIPKQPRNTPWQLRAAALDRKLTPLEWAAVLLHLVKHRGYLSQRKNEGETDDKELGALLKGVADNTHALQAGNFRTPAELALNKFEKESGHIRNQRGDYSHTFSRKDLQAELVLLFEKQKEFGNPYVSDDLKNGIENLLMTQRPALSGDAIQKMLGHCTFEPAEPKAAKNTYTAERFIWLTKLNNLRILNQGNERPLTDAERTTLMDEPYKKSKLTYAQARKLLDLDDTAFFKGLRYGKDNAESATLMEMKAYHAISRALEKEGLKDKKSPLSLSPELQDEIGTAFSLFKTDEEITGRLKGCLQPEILDALLKHISFDKFVQISLKALRRIVPLMEQGKRYDEACAEIYGDHHGRRNSEETLYLPPIPADEIRNPVVLRALSQARKVINGVGRRYGSPARIHIETAREVGKSFKDRKEIEKRQEENRKDREKAAAEFQEYFPNFVGEPKSKDILKLRLYRQQNCKCLYSGKEINLGRLNEKGYVEIDHALPFSRTWDDSFNNKVLVLGSENQNKGNRTPYEYLNGKDNSREWQEFKARVETSRFPHSKKQRILLQKFDEEGFKERNLNDTRYVNRFLCKFVADHMQLTGKGKRRVFASNGQITNLLRGFWGLRKVRAENDRHHALDAVVVACSTVAMQQRITRFVRYKEMNAFDGKTVDKETGEVLHQKTHFPQPWEFFAQEVMIRVFGKPDGKPELEEADTPEKLRALLAEKLSSRPEAVHEYVAPLFVSRAPNRKMSGQGHMETIKSPKRLDEGISVVRVPLTQLKLKDLEKMVNREREPKLYEALKARLEAHKDDPAKAFAEPFYKQDKAGNRTQQVKAVRIEQVQKTGVWVRNQNGIADNATMVRVDVFEKGGKYYLVPIYSWQVAKGILPDKAIIAFKDEEEWQLIDDSFNFKFPLHPNDLVEVITKKARIFGYFASCHRGTGNINIRIHDLDNKVGKNGILEGIGVKTALSFQKYQIDELGKEIRPCRLKKRPPVR

SEQ ID NO: 364 - protein, 1097 aa, Neisseria wadsworthii
  Neisseria wadsworthii 9715
MKKQPQRYILGLDLGIASVGWALILVDGAENPVGLLDCGVRTFERAEVPKTGDSLALARRQARSVRRLIRRRAHRLLRLRRLLKREGILSAADFNSDGLPNLPIDAWQLRVAGLERKLTNQEWAAVLLHLVKHRGYLSQRKSETQTENKELGRLLAGVAENSKLLSESSEQYRTPAELAVKLFAEQSGHLRNKGGEYTHTFNRLDLQKELHLLFERQYALGNPFASAELQSKVDELLMTQRSALQGEAVLKMLGKCTFEPSEYKAAKNTYSAERFIWLTKLNNLRILYNGEERALDEGDRKKLLDEPYKKAKLTYKQVRSILNLPESAVFKGLRYGKDSDGLKAENGTLMEMKAYHKIRTILDKAGLKGEWENRIRNPEILDKIGTAFSLYKTDEDIQAALADLRLPENVLDALLAGLNFDKFIQLSLKALRNILPLMERGIRYDEACKEVYGDHRALAESKNQVLLPPIPADEIRNPVVLRTLTQARKVINAIIRRYGSPQRVHIETARELGKSKQERDKIDRKNKENQNDRNRLASDIRKHFNFEPTPKDILKLRLYEQQHGKCLYSDLREEKGECLYTGNVIELHRLFEDGYVEIDHALPLSRTWDNSLNNKVLVLKSSNQNKGNKTPYEWLDGANNSRRWREFQARVQGCHFPYVKKQRIQTAKLDSKAEQGFLERNLNDTRYISKFMCQFITANLRLAETSNALMEEVAGENPYWKERKRQRVFAPSGSIIALLRGLWGLKKVREDNDRHHALDAIVVACSTVSMQQKITKAMQRRETLETVDSETGEVKTRIPQPWDFFRQEVMIRVFSDSPREELAEKLNSRPEALHDFVSPLFVSRAPNRKMTGQGHLETVKSAKRLSENISVVRKPLTALKLKDIENIVGYPDREPALYQALRERLLAHKDDPVKAFADKPFYKPAKDGGQGSLVKAVRIIENTKHGLKIRNGITDTNGDMVRTDVYQKTDKKGKRQYFIVPVYAWQVEKNELPTVDCKGYEIDDNYEFCFSLYKYDLIEIQNPNDINQELRAYYINCDSSDGRFWLAYHDKSAKEQQFRISTQNQPIIKKYQVDTLGKEIRLCKAEKRTALNGKKKK

SEQ ID NO: 365 - protein, 1426 aa, Niabella soli
  Niabella soli DSM 19437
MPRKNILGLDLGTTSIGFAKIIEDDDYQCSSVELIGVRVNPLTTDEQTNFEKGKPVSVNADRTLKRGMRRNLDRYQLRRDYLIEILRTHHIITADTKLAEDGKNTTHTTYALRALAATAEIPLEAFVRVLLAINKKRGYKSSRKAKNEDEGQLIDGMAIARRLYEESLTPGQFSYQLLKEGKKYLPDFYRSDLNTELNKVWNFQKQFYPEILTDEFKRHLEGKGQRATAVAFWGQHGFSMAENKGSREEKKLHAYKWRSEAAHKQLTKEEVAFVITEINNDLNKSSGYLGAISDRSKELFFNKQTVGQYLHQQLKENPHTRLKGQVFYRQDYLDEFETIWEMQAKFYSALTLELKEEVRDVVIFYQRKLKSQMGLISLCEFESKEIEIEKNGEKAKKRIGLRVAPKSSPLFQEFKIWQVLNNLEFRNKKTKEVFVPEMAAKQQLFDELNIKGNLLASEAIKILGYKTKDWEANYHTLEGNRTNKSLYDAWLKILELEGYDENLLKLSGSDDIDVSKIEKPALEIRQMVLAVFEVLGISGAILDFDAEADGKAFEQQPAYQLWHLLYSAEDDGKKYSQEDIFTYGHDNIGLKKKLCEKFGFRPEHTKILVNVVFSDDYGNLSSKAMRRIYPFIKELTYDKACAEAGYRHSAASLTKEEIAARPLQNRLDLLKKNELRSPVVEKILNQMVNVVNTLVDDENQNRKARGLSEDFHFDEIRIELARELKKNAKERAEMTTNINTAKQSHEKIIRILQTEFGVPNPSRNDIVRYKLYEELKNNGYKDLYTNTYISRDILFSKQIDVDHIIPQMSLFDDSFSNKTVVFRKDNQDKGNKTAYDYILGKYGEQALEEYISRITSLFELGKKNKEEGIGKAKFQKLQKRLVDIGDGFIERDLRESQYIAKKANNMLYAICRSVVSTSGEITARLREDWDLVNVMQEINLPKFRALGLTEMVEKKDGAQKERITDWTKRNDHRHHAMDALAIAFTRHSHIQYLNHLNARKDEANKWHPVVSKIEEKETVLIYDDLGNRKRKFKAPMPNFREVVKEHLENVLISHKAKNKVVTKNKNKIKTVRGEKVKTELTPRGQLHKETIYGRYRYYESKEEKIGPKFDAEMIGMVTNPQYKKLLLERLAANGNDPKKAFWGKNALNKNPLYVDEARQELLPEKILLRWLNDDYSIRKDVTPENLKDIKTIEKILDKGVKKILLKRLADFGNDPKKAFSDLDKNPIWQNEAKRIAIKRVTISGIKNAAPLHHKKDHLGNDILDEKGKQIPSSFVSTGNNHHVAIYRDAEGNLQERVVSLFDAVQLVNGGEPVIDKEYNKGIGWQFLFTMKQNEMFVFPDEKTGFNPREVDLLSSGNRKLISPNLFRVQKLASKNYFFRHHLETSVEEKKELKNIAYKPQLGLNALSNIVKVRINHIGEIVSVGEY

SEQ ID NO: 366 - protein, 1132 aa, Nitratifractor salsuginis
MKKILGVDLGITSFGYAILQETGKDLYRCLDNSVVMRNNPYDEKSGESSQSIRSTQKSMRRLIEKRKKRIRCVAQTMERYGILDYSETMKINDPKNNPIKNRWQLRAVDAWKRPLSPQELFAIFAHMAKHRGYKSIATEDLIYELELELGLNDPEKESEKKADERRQVYNALRHLEELRKKYGGETIAQTIHRAVEAGDLRSYRNHDDYEKMIRREDIEEEIEKVLLRQAELGALGLPEEQVSELIDELKACITDQEMPTIDESLFGKCTFYKDELAAPAYSYLYDLYRLYKKLADLNIDGYEVTQEDREKVIEWVEKKIAQGKNLKKITHKDLRKILGLAPEQKIFGVEDERIVKGKKEPRTFVPFFFLADIAKFKELFASIQKHPDALQIFRELAEILQRSKTPQEALDRLRALMAGKGIDTDDRELLELFKNKRSGTRELSHRYILEALPLFLEGYDEKEVQRILGFDDREDYSRYPKSLRHLHLREGNLFEKEENPINNHAVKSLASWALGLIADLSWRYGPFDEIILETTRDALPEKIRKEIDKAMREREKALDKIIGKYKKEFPSIDKRLARKIQLWERQKGLDLYSGKVINLSQLLDGSADIEHIVPQSLGGLSTDYNTIVTLKSVNAAKGNRLPGDWLAGNPDYRERIGMLSEKGLIDWKKRKNLLAQSLDEIYTENTHSKGIRATSYLEALVAQVLKRYYPFPDPELRKNGIGVRMIPGKVTSKTRSLLGIKSKSRETNFHHAEDALILSTLTRGWQNRLHRMLRDNYGKSEAELKELWKKYMPHIEGLTLADYIDEAFRRFMSKGEESLFYRDMFDTIRSISYWVDKKPLSASSHKETVYSSRHEVPTLRKNILEAFDSLNVIKDRHKLTTEEFMKRYDKEIRQKLWLHRIGNTNDESYRAVEERATQIAQILTRYQLMDAQNDKEIDEKFQQALKELITSPIEVTGKLLRKMRFVYDKLNAMQIDRGLVETDKNMLGIHISKGPNEKLIFRRMDVNNAHELQKERSGILCYLNEMLFIFNKKGLIHYGCLRSYLEKGQGSKYIALFNPRFPANPKAQPSKFTSDSKIKQVGIGSATGIIKAHLDLDGHVRSYEVFGTLPEGSIEWFKEESGYGRVEDDPHH

SEQ ID NO: 367 - protein, 1166 aa, Nitrobacter hamburgensis
MHVEIDFPHFSRGDSHLAMNKNEILRGSSVLYRLGLDLGSNSLGWFVTHLEKRGDRHEPVALGPGGVRIFPDGRDPQSGTSNAVDRRMARGARKRRDRFVERRKELIAALIKYNLLPDDARERRALEVLDPYALRKTALTDTLPAHHVGRALFHLNQRRGFQSNRKTDSKQSEDGAIKQAASRLATDKGNETLGVFFADMHLRKSYEDRQTAIRAELVRLGKDHLTGNARKKIWAKVRKRLFGDEVLPRADAPHGVRARATITGTKASYDYYPTRDMLRDEFNAIWAGQSAHHATITDEARTEIEHIIFYQRPLKPAIVGKCTLDPATRPFKEDPEGYRAPWSHPLAQRFRILSEARNLEIRDTGKGSRRLTKEQSDLVVAALLANREVKFDKLRTLLKLPAEARFNLESDRRAALDGDQTAARLSDKKGFNKAWRGFPPERQIAIVARLEETEDENELIAWLEKECALDGAAAARVANTTLPDGHCRLGLRAIKKIVPIMQDGLDEDGVAGAGYHIAAKRAGYDHAKLPTGEQLGRLPYYGQWLQDAVVGSGDARDQKEKQYGQFPNPTVHIGLGQLRRVVNDLIDKYGPPTEISIEFTRALKLSEQQKAERQREQRRNQDKNKARAEELAKFGRPANPRNLLKMRLWEELAHDPLDRKCVYTGEQISIERLLSDEVDIDHILPVAMTLDDSPANKIICMRYANRHKRKQTPSEAFGSSPTLQGHRYNWDDIAARATGLPRNKRWRFDANAREEFDKRGGFLARQLNETGWLARLAKQYLGAVTDPNQIWVVPGRLTSMLRGKWGLNGLLPSDNYAGVQDKAEEFLASTDDMEFSGVKNRADHRHHAIDGLVTALTDRSLLWKMANAYDEEHEKFVIEPPWPTMRDDLKAALEKMVVSHKPDHGIEGKLHEDSAYGFVKPLDATGLKEEEAGNLVYRKAIESLNENEVDRIRDIQLRTIVRDHVNVEKTKGVALADALRQLQAPSDDYPQFKHGLRHVRILKKEKGDYLVPIANRASGVAYKAYSAGENFCVEVFETAGGKWDGEAVRRFDANKKNAGPKIAHAPQWRDANEGAKLVMRIHKGDLIRLDHEGRARIMVVHRLDAAAGRFKLADHNETGNLDKRHATNNDIDPFRWLMASYNTLKKLAAVPVRVDELGRVWRVMPN

SEQ ID NO: 368 - protein, 1044 aa, Nitrosomonas sp.
  Nitrosomonas sp. AL212
MLHKMRYRLALDLGSTSLGWAMVRLNANQQPCAVIKAGVRIFSNGRNPKDGSSLAVTRREARSMRRRRDRLLKRKARMMRTLIEYGFFPANETQRKALENLNPYALRAKGLDEALTPSEFARALFHINQRRGFKSNRKTDKKDSDSGALKTAIKQLHSVLDPQGNDGKPRTVGELLYKRFTDLSKLPKDRTVRARYRQDKIVKDDGKTKIDKYYDLYIDRAMIEQEFDALWKKQSELNPILFTENARADLKDVLLYQRSLKPVKPGRCTFMSEEERAPLALPSTQRFRMYQEVNNLRILREGLKEESLTLQQRDDLINALEKNNRRTFTQIKKLLGVGGSVQFNFEDPKREELKGNTTSAILGKSEHFGEAWFAFNEAKQDAIVLQLIKEENEAKLVRWLQDETGIDEKRAEVIANAGLPEGYGSLCIEALARILPELRRDVVTYDKAVQAAGFEHHSKLNRNEEIPDITFKIESIDRNSGEIKQFHLHKELPYYGEYLQRHVGFGSGKPEDSIEKRYGKIANPTVHIGLNQVRVVVNALIKRYGHPSEIIVEVARDLKQSKDRRDEENKRQAENQKRNERLRKDIADILGISEERVRRDDIEKMILWEELSFDPADRRCPYSGVQVSTVMLLSDEVEVEHILPFSQTLDDSLNNKTVALRQANRIKGNRTPWEAFGTSNISGFDYSGILTRAELMPKAKRYRFAEDGYQRWLKDDAGFLARALNDTRHLSKIAREYMSLICPNTRVIPGQMTAMLRRNFGLNDVLGLNGEKNRNDHRHHAVDACVIAVTDQGLLQRFAAASASARERQLNRLVENMPLPWESYREHVRRAIDGIWVSHRPDHSHEGAMHNDTAYGLRGNGRVSFHKMVEGKREYIEDNLKVIEITDTKAIDRHGLLPTGKPRPYKGYKGDSNYCIEIVRNEKGRWEGEIISTFDAYQLVRKYGIVQLRYPVLSVSGKPLVMRLIRNDFVRLEHEGITRTLRVCKMREDGQVALADVTEANVDARTRTKEICYVFKTGGSLQKAKARRITISPIGELRDPGFKE

SEQ ID NO: 369 - protein, 1498 aa, Odoribacter laneus
  Odoribacter laneus YIT 12061
METTLGIDLGTNSIGLALVDQEEHQILYSGVRIFPEGINKDTIGLGEKEESRNATRRAKRQMRRQYFRKKLRKAKLLELLIAYDMCPLKPEDVRRWKNWDKQQKSTVRQFPDTPAFREWLKQNPYELRKQAVTEDVTRPELGRILYQMIQRRGFLSSRKGKEEGKIFTGKDRMVGIDETRKNLQKQTLGAYLYDIAPKNGEKYRFRTERVRARYTLRDMYIREFEIIWQRQAGHLGLAHEQATRKKNIFLEGSATNVRNSKLITHLQAKYGRGHVLIEDTRITVTFQLPLKEVLGGKIEIEEEQLKFKSNESVLFWQRPLRSQKSLLSKCVFEGRNFYDPVHQKWIIAGPTPAPLSHPEFEEFRAYQFINNIIYGKNEHLTAIQREAVFELMCTESKDFNFEKIPKHLKLFEKFNFDDTTKVPACTTISQLRKLFPHPVWEEKREEIWHCFYFYDDNTLLFEKLQKDYALQTNDLEKIKKIRLSESYGNVSLKAIRRINPYLKKGYAYSTAVLLGGIRNSFGKRFEYFKEYEPEIEKAVCRILKEKNAEGEVIRKIKDYLVHNRFGFAKNDRAFQKLYHHSQAITTQAQKERLPETGNLRNPIVQQGLNELRRTVNKLLATCREKYGPSFKFDHIHVEMGRELRSSKTEREKQSRQIRENEKKNEAAKVKLAEYGLKAYRDNIQKYLLYKEIEEKGGTVCCPYTGKTLNISHTLGSDNSVQIEHIIPYSISLDDSLANKTLCDATFNREKGELTPYDFYQKDPSPEKWGASSWEEIEDRAFRLLPYAKAQRFIRRKPQESNEFISRQLNDTRYISKKAVEYLSAICSDVKAFPGQLTAELRHLWGLNNILQSAPDITFPLPVSATENHREYYVITNEQNEVIRLFPKQGETPRTEKGELLLTGEVERKVFRCKGMQEFQTDVSDGKYWRRIKLSSSVTWSPLFAPKPISADGQIVLKGRIEKGVFVCNQLKQKLKTGLPDGSYWISLPVISQTFKEGESVNNSKLTSQQVQLFGRVREGIFRCHNYQCPASGADGNFWCTLDTDTAQPAFTPIKNAPPGVGGGQIILTGDVDDKGIFHADDDLHYELPASLPKGKYYGIFTVESCDPTLIPIELSAPKTSKGENLIEGNIWVDEHTGEVRFDPKKNREDQRHHAIDAIVIALSSQSLFQRLSTYNARRENKKRGLDSTEHFPSPWPGFAQDVRQSVVPLLVSYKQNPKTLCKISKTLYKDGKKIHSCGNAVRGQLHKETVYGQRTAPGATEKSYHIRKDIRELKTSKHIGKVVDITIRQMLLKHLQENYHIDITQEFNIPSNAFFKEGVYRIFLPNKHGEPVPIKKIRMKEELGNAERLKDNINQYVNPRNNHHVMIYQDADGNLKEEIVSFWSVIERQNQGQPIYQLPREGRNIVSILQINDTFLIGLKEEEPEVYRNDLSTLSKHLYRVQKLSGMYYTFRHHLASTLNNEREEFRIQSLEAWKRANPVKVQIDEIGRITFLNGPLC

SEQ ID NO: 370 - protein, 1389 aa, Oenococcus kitaharae
  Oenococcus kitaharae DSM 17330
MARDYSVGLDIGTSSVGWAAIDNKYHLIRAKSKNLIGVRLFDSAVTAEKRRGYRTTRRRLSRRHWRLRLLNDIFAGPLTDFGDENFLARLKYSWVHPQDQSNQAHFAAGLLFDSKEQDKDFYRKYPTIYHLRLALMNDDQKHDLREVYLAIHHLVKYRGHFLIEGDVKADSAFDVHTFADAIQRYAESNNSDENLLGKIDEKKLSAALTDKHGSKSQRAETAETAFDILDLQSKKQIQAILKSVVGNQANLMAIFGLDSSAISKDEQKNYKFSFDDADIDEKIADSEALLSDTEFEFLCDLKAAFDGLTLKMLLGDDKTVSAAMVRRFNEHQKDWEYIKSHIRNAKNAGNGLYEKSKKFDGINAAYLALQSDNEDDRKKAKKIFQDEISSADIPDDVKADFLKKIDDDQFLPIQRTKNNGTIPHQLHRNELEQIIEKQGIYYPFLKDTYQENSHELNKITALINFRVPYYVGPLVEEEQKIADDGKNIPDPTNHWMVRKSNDTITPWNLSQVVDLDKSGRRFIERLTGTDTYLIGEPTLPKNSLLYQKFDVLQELNNIRVSGRRLDIRAKQDAFEHLFKVQKTVSATNLKDFLVQAGYISEDTQIEGLADVNGKNFNNALTTYNYLVSVLGREFVENPSNEELLEEITELQTVFEDKKVLRRQLDQLDGLSDHNREKLSRKHYTGWGRISKKLLTTKIVQNADKIDNQTFDVPRMNQSIIDTLYNTKMNLMEIINNAEDDFGVRAWIDKQNTTDGDEQDVYSLIDELAGPKEIKRGIVQSFRILDDITKAVGYAPKRVYLEFARKTQESHLTNSRKNQLSTLLKNAGLSELVTQVSQYDAAALQNDRLYLYFLQQGKDMYSGEKLNLDNLSNYDIDHIIPQAYTKDNSLDNRVLVSNITNRRKSDSSNYLPALIDKMRPFWSVLSKQGLLSKHKFANLTRTRDFDDMEKERFIARSLVETRQIIKNVASLIDSHFGGETKAVAIRSSLTADMRRYVDIPKNRDINDYHHAFDALLFSTVGQYTENSGLMKKGQLSDSAGNQYNRYIKEWIHAARLNAQSQRVNPFGFVVGSMRNAAPGKLNPETGEITPEENADWSIADLDYLHKVMNFRKITVTRRLKDQKGQLYDESRYPSVLHDAKSKASINFDKHKPVDLYGGFSSAKPAYAALIKFKNKFRLVNVLRQWTYSDKNSEDYILEQIRGKYPKAEMVLSHIPYGQLVKKDGALVTISSATELHNFEQLWLPLADYKLINTLLKTKEDNLVDILHNRLDLPEMTIESAFYKAFDSILSFAFNRYALHQNALVKLQAHRDDFNALNYEDKQQTLERILDALHASPASSDLKKINLSSGFGRLFSPSHFTLADTDEFIFQSVTGLFSTQKTVAQLYQETK

SEQ ID NO: 371 - protein, 1389 aa, Oenococcus kitaharae; identical to SEQ ID NO: 370
  Oenococcus kitaharae DSM 17330

SEQ ID NO: 372 - protein, 1399 aa, Olsenella uli
MNLRNTTDEYNIGLDMGTNSVGWAVTDKAGAIAHFKGKPTLGSRLFDAAQTAAGARIHRSQRRRYVRRRWRLDLLQSLFQDEVSKVDSEFFCRLRQSRLYVGDREKGHADYTWPIFNDSDFNEVDYYKRFPTIYHLRKWLMETDEKADIRLIYLATHNIVKHRGNFLRENNKSLSSRDANPAQAVKSLRLALNDWCSERDYECAWKGEEDDGAIDEAILNVLADGEKGRSDQAKEIAKLTGVDCGDAKQSKQCNEAIAKAIVGLKVEMKNIFGEFPAEKTSYIYLSSDEDVEAVRESCPDDSGELFQALCKLYSAYILQELLSYADPSGQTISANMVAKYKQYGRDLRLLKELTRTYAPQKYDLFFRGETYAGSSDYVVDEARGYTRYNLGTTKANYDDFQKSVKELFKGTDALQDERYQEMMVAFGEQKFLRRLKTSDNGSIYYQLHLEELHTILENQGKHYPFLLSEEDKIESLVSFRIPYYVGPLTRKNAAIGHDGKERFAWSSRKDGMEHAVITPWNWEEIIDRDKSAEDFIMRMTGDCTYLQGEPVLPKCSLLYEEFCALNEFNGAHWTVDGDDERRFDAAQRERIMCDLFRRTRSVTYNKVSDWLERKYNFTGARVRGGQGEHGFESKLGSYIFFCKDVFKTDGLDEADYTMIEQIILWSTLFEDRDILKRKIEEAYGGDRLTSEQIKVICKKRFTGWGRLSKRLLTDIKVNTDTGRKSIMDVLREGNPNNGQRSRTMVFMEVLRDEDLGFQKAIDGLNRDYFREHNNGLMDVNDLPGSPAIRRSINQAVRIVDEIASIARKEPTNIFIEVTREEDDPRKKGKRTKRRYDAIKSALEKFKKDDPSLWKELCEKAPGDMDERLSLYFMQRGKCMYSGRPIKIEELHTGKYEVDHIIPRSYIKDDSFENKVLVYREENQHKTDALLIDSSIRQKMGGYWRMLHDAKLVGDKKFRNLFRNHIDDKAMKGFVARQIVETSQMVKLVQTLFEARYPNTRIVPVKAGISHDLREAAGLVKCREANDFHHAHDAFLACRIGLFIQKRHPSVYDNPIGLARIMRDYARMQAREYKKSHCLAHTQGFIVNSFLSSGFDEETGEIFKDDWDAKAEVEGIRRVLNCRQCFISRMPVEGDTRYGGRYWGETIYSPKGKHKHEIPLKQGLDPNLYGGYSDLLYSYFLIYEASDVSSGERVLRFIGIPTSIAARMANQKRLEEYVSRLALQENLEHVRMVRKIMKKQLIEVDNCRLLVTAADAVTNATELAFSLDEMKIISTCAKCINGADPSAIDKIGNAQDSFFDNLKRRGSDRCALLFSQLKLDKLSQNFYMISSDDKSKILISILDRIRAKSNSVDLSLVGGAKHAAQMKFDFNAKLNNPASSFVLIDQSVTGMFERRTRIGL

SEQ ID NO: 373 - protein, 1535 aa, Ornithobacterium rhinotracheale
MNTILGLDLGTNSIGWALIKVLNDKTRLPLEIIDLGVVVIPTDQRTLDKFSKGESISKTAERTKQKGVRKLYERKKLRRERLHRVLNILGFLPEHYSKKIDFKKHLGQFFGNSQPKISYVENDHGKHEFIFMDSYREMLKEFSKHNIKNVPYDWTIYYLRKKALSQKISKEELAWVILNFNKKRGYYQFRDDNADENKENKIEKYYALKVTNVKKEDAQNYTITLENGWIYKNKSKISLLDWVGSTKEFISTEKFDNKGNIIKKKNGEDDRTLKLVDSEKDWIAIKKSTEDRIENYGKTVGTYLYEHLLKDPNQKLNGELINIIDRKFYKNELKQILEKQKEFHPELLNEDLFQKSIIELYPKNSTRQKELKNKDLCYLLIDDVIYYQRDLKKKNSTINKCSFESREYYLNGEKQIQKINCIAKSKPLYQEFRTLQFIKNLKVYEIIDGLEKDITSKLLPDFETKEHFFEWLNDKEKIDQLQLLSYKCFDLHDNVKNDLIAKGIKRPTEKAIRTELLEKYRWNYSKDNDRNFLLNETRFKILKYLKKVDKKLTLTNEQIESLWLLLYSAKDERELKNGLQKFSEKNKLPKKFSDIFISFPPFKKEYGAYSEKALKKLLSLVRFGKYWSFNKIDNNIQNKIMNILNGEVDDSISDRVREKTILLQDKNDFQDLPLWLASYVAYNRFSEVSEIKYWDSPDKIEFLKQHSIGNPIVEKIINETLKLIKDIWVIHGKSCKNFFSEIHIELSREIKSSSKKRAQITNNNTKNQKLNNLIKSLLIEMASDTKYENVTPYSPSQQEILKIYDEGIYSKEENSEKIKEINKIRNNNKISKSDITKYKLWLEQGYISPYTGKIIPLTKLFTAKYQKEHIIPQTKFFDDSFNNKVICEAEVNKLKDNSLAMNFIKAKGGKAVKLSDGETVTILNQEEYKQLVRTSFKKNSIKLRNLLLEEIPDTFTKRQLNDTKYISKLVLSLLSNIVREKGELESTAKRIVSTNGQITSILRNDWGLNNIWNKLITPRFERLNNINKNKIYGNWENKKGKNVFQINYLNDNLSTLNTKRIDHRHHALDALIVACTTRNHINFLNNQYAKSRNQRHDLRAKLKRRETITTEGSKKQVFKDFIKPWESFTQDALKKLETTIVNFKVNKRIINKTINWYKKWEKQKDGTYKKIQKKQTKGDAWAIRKPLHIDTIYGIVCKKLPLKSALENYKNIIDENLKHKIKELKEVNKFDNNQIINFFKECNFIFEDNNIQKVEVYDFKDNRDKTILSSSRQLIDESFTPKKIGKVLDPTIRNILLKHLNSTKYNNKFDSDGNPIKPEKLAFSPEGLKDLNKNIKHLNNNKEHQPIKRVKLFETLGNKIKVGYTQQKNKKFAETATGTNLFLGIYSDNNKRDFKTIPLILAIQREKEGLNPCPDTDEKGNQLLFSLSPNELVFVPNNEERKNPNLVDFENLSKDQIDRIYKFVSCTGSEAYFVPSRTAKPIIENENGTNNKSQRIIEFNEKTSIKNEKNEPVLIKTICWKIEVNRLGKIIKVIK

SEQ ID NO: 374 - protein, 1443 aa, Parabacteroides johnsonii
  Parabacteroides johnsonii DSM 18315
MIKLLYLEKLKQYTMKKILGLDLGTSSIGWALVNEAENSDEVSSIIKLGVRVNPLTVDEMQNFEKGKSITTNADRTLKRSMRRNLQRYKLRRDALIELLKKVGFITDKTILSEQGNRTTFETYRLRAKAAEEEISLKELARVLLMINKKRGYKSSRKAKGEEEGALIDGMEIAKKLYDEDLTPGQLCLQLLESGKKFFPDFYRSDLQEEFNKIWDFQKQFNLFSFCDVAKEEVKGKNKSQTWAILAKYFVETKKVNVWNEHEAQTENREEVYKLVGLKRTVKGEELKKENYRWRVQALTEQLDLEKIAVVLQEINGQISASSGYLGAISDRSKVLYFNRQTVGQYQMAELNKNPNMSLRNMVFYRQDYLDEFNVIWEKQAEFHKELTPELKKEIRDIIIFYQRRLKSQKGLISFCEFENREVVVEKEGKKQTKIIGCKVIPRSHPLFQEFKIWQTLNNIEVFVGEKKGKRKKSNVSSDLFGDTEDALITEGRRFLYQEEKKILAKELSIKKGLTKAEILRLLFENPQELDINFKQIDGNQTGFALFSAYSNMIEKYGYEPLDFKKPAEDLISQLKTVFTDLGWNTDLLFIDLDKENKEWEKQPYFRLWHLLYSFEGDNTPTGNGKLIEKIMQLCGIEKEYAIELANVSLQDDYGSLSAKAIKKILLYLKEGNQYDMACEYAGYRHSKSSLTKEEIENKVLKDKLEILPKNSLRNPVVEKILNQMVNVINTVMEVYGRPDEIRVELARELKKSAKEREELTKAVAKNTREHEEIRKVLQSEFGMINVSRNDIIRYKLYEELKDNGYKTLYSNQYIPREKLFSKEIDIEHIIPQSRLFDDSLSNKTLEYKSINIEKGNKTAYDFVKEKYGEEGLQQYLNRCENLCKDKKAKLRKLKMELNEIPDGFIDRDLRNTQYIAKKALSMLTEICRRVVATTGSITDKLREDWQLVDVMKELNLPKYEALGLVEVYEDKDGRKIKRIKDWTKRNDHRHHAMDALTVAFTKDVFIQYFNNKNAAWESDSKEHTNIVGIKTRYFESGKAVPPIPLGQFRVEAKCHLENLLVSIKAKNKVVTTNVNCIKKKGGTYKNTQQTPRGQLHLETIYGSHNQYVTKIEKVNASFDAVKIATVSKQDYRNALLKRLEVFGNDPKKAFTGKNSLEKNPIYLDRAQTIQVPDKVQTVELETAYTIRKPVDPTLNVDKVVDKKIRLILEQRLKEYGGDAKKAFVNLDENPIWLNEEKGISIKRVTIRGISKAQALHDKKDKDGNFILDETGKRIPVDFVNTGNNHHVAIYRKPVLDKKGQVIFDDEGNPMYELDEDVVPFFEAVTRANLGIPIIDKDYKKSEGWQFLFSMKQNEYFVFPNEKTGFNPKEVDLLDPDNYAMISPNLFRVQKIGLNDYTFRHHLETTIQNDLKFITWIRCGKSGIKDIVKVRINHIGQIVSVGEY

SEQ ID NO: 375 - protein, 1424 aa, Parabacteroides sp.
  Parabacteroides sp. D13
MKRILGLDLGTNSIGWALVNEAETDEEVSSIIRLGVRVNPLTVDETQNFEKGKSITTNAERTLKRSMRRNLQRYKLRRDALVEFLKELGFITDETILSEQGNRTTFETCRLRAKAAEEEISLEELSRVLLMINKKRGYKSSRKVKKEEDGVLIDGMEIAKKLYEEDLTPGQLCSQLLESGKKVLPDFYRSDLQEELDRIWSVQKQFHPDVFCDAAKEEIKGKNRSQTWAILANYFVWKEEVVGWNDREAKNETIEKECKLVGLKRTTKGYELKKENYRWRAQALTEQLGLEEIAVVLQEINGQINASSGYLGAISDRSKVLYFNHQTVGQYQMAELDKNPHASLRNMVFYRQDYLDEFDRIWEKQAEFHKELTAELKKEIRDMIIFYQRRLKSQKGLISFCEFERLEIVVEKDGKKQTKVIGCKVIPRSHPLFQEFKVWQTLNDIKVLGREKKRNALSASESRALYPEEKEILARELAIKENMKKADVLKLLFENPQELDLNFKQIDGNRTGFSLFSAYSKMIEKYGYEPLDFKKPADEIIGQLRTIFTDLGWNTNLFTIDLTKEGKELEMQPYFRLWHLLYSFEGDNTSTGNGKLIEKIMQLCGVEKEYAVELASLSFQDDYGSLSAKAIKRILPYLKEGNLYDVACEYAGYRHSKSSLTKEEIENKVLKGKLEVLPKNSLRNPVVEKILSQMVNVINTIIDTYGKPDEIRVELARELKKSAKEREELTKAIAKSTREHEEIRKLLQDEFGMMNVSRNDIIRYKLYEELKDNGYKTLYSNQYIPKEKIFSKEIDIEHIIPQSRLFDDSLSNKTLEYKAINIEKGNKTAYDFVKEKYGEEGLQQYINRCESLFNDKKAKLRKLKMEQKDIPDGFIDRDLRNTQYIAKKALAMLNEICRRVVATTGSITDQLREDWQLVDVMKELNLPKYEALGFVETYEDKDGRKIKRIKDWTKRNDHRHHAMDALTVAFTKDAFIQYFNNKNAAQDSGNRNHTNIIGIKTRYFDKGRALPPIPLEQFRIEAKQHLEKLLVSIKAKNKVVTVNVNRTKKRKGENTKIQQTPRGQLHLETVYGSHKQYVTKIEKVNASFDAAKIATVSKRAYRNALLKRLETFGNDPKKAFTGKNALEKNPLYADKYQTIRVPEKVQTVEFETIYTIRKPVDPALNVDKVVDVKVRAILERRLKEYGGDPKKAFVNFWENPIWLNKEKGISIKRVSIRGINNAQSIHVKKDKNGNPIWDENGKQIPVDFVNTGNNHHVAIYRKPVLDKKGQVTFDEDGNLMYELDEVVVPFFEAVTRANLGLPIIDKDYRKSEGWQFLFSMKQNEYFVFPNEKTGFNPKEVDLLNPDNYAMISPNLFRVQTMSKVMYGNNVVRDYKFRHHLETTVKDMKELKDIAYKQYKTLSFGNSVVKIRINHIGQIVSVGEY

SEQ ID NO: 376 - protein, 1428 aa, Parasutterella excrementihominis
  Parasutterella excrementihominis YIT 11859
MGKTHIIGVGLDLGGTYTGTFITSHPSDEAEHRDHSSAFTVVNSEKLSFSSKSRTAVRHRVRSYKGFDLRRRLLLLVAEYQLLQKKQTLAPEERENLRIALSGYLKRRGYARTEAETDTSVLESLDPSVFSSAPSFTNFFNDSEPLNIQWEAIANSPETTKALNKELSGQKEADFKKYIKTSFPEYSAKEILANYVEGRRAILDASKYIANLQSLGHKHRSKYLSDILQDMKRDSRITRLSEAFGSTDNLWRIIGNISNLQERAVRWYFNDAKFEQGQEQLDAVKLKNVLVRALKYLRSDDKEWSASQKQIIQSLEQSGDVLDVLAGLDPDRTIPPYEDQNNRRPPEDQTLYLNPKALSSEYGEKWKSWANKFAGAYPLLTEDLTEILKNTDRKSRIKIRSDVLPDSDYRLAYILQRAFDRSIALDECSIRRTAEDFENGVVIKNEKLEDVLSGHQLEEFLEFANRYYQETAKAKNGLWFPENALLERADLHPPMKNKILNVIVGQALGVSPAEGTDFIEEIWNSKVKGRSTVRSICNAIENERKTYGPYFSEDYKFVKTALKEGKTEKELSKKFAAVIKVLKMVSEVVPFIGKELRLSDEAQSKFDNLYSLAQLYNLIETERNGFSKVSLAAHLENAWRMTMTDGSAQCCRLPADCVRPFDGFIRKAIDRNSWEVAKRIAEEVKKSVDFTNGTVKIPVAIEANSFNFTASLTDLKYIQLKEQKLKKKLEDIQRNEENQEKRWLSKEERIRADSHGICAYTGRPLDDVGEIDHIIPRSLTLKKSESIYNSEVNLIFVSAQGNQEKKNNIYLLSNLAKNYLAAVFGTSDLSQITNEIESTVLQLKAAGRLGYFDLLSEKERACARHALFLNSDSEARRAVIDVLGSRRKASVNGTQAWFVRSIFSKVRQALAAWTQETGNELIFDAISVPAADSSEMRKRFAEYRPEFRKPKVQPVASHSIDAMCIYLAACSDPFKTKRMGSQLAIYEPINFDNLFTGSCQVIQNTPRNFSDKTNIANSPIFKETIYAERFLDIIVSRGEIFIGYPSNMPFEEKPNRISIGGKDPFSILSVLGAYLDKAPSSEKEKLTIYRVVKNKAFELFSKVAGSKFTAEEDKAAKILEALHFVTVKQDVAATVSDLIKSKKELSKDSIENLAKQKGCLKKVEYSSKEFKFKGSLIIPAAVEWGKVLWNVFKENTAEELKDENALRKALEAAWPSSFGTRNLHSKAKRVFSLPVVATQSGAVRIRRKTAFGDFVYQSQDTNNLYSSFPVKNGKLDWSSPIIHPALQNRNLTAYGYRFVDHDRSISMSEFREVYNKDDLMRIELAQGTSSRRYLRVEMPGEKFLAWFGENSISLGSSFKFSVSEVFDNKIYTENAEFTKFLPKPREDNKHNGTIFFELVGPRVIFNYIVGGAASSLKEIFSEAGKERS

SEQ ID NO: 377 - protein, 1037 aa, Parvibaculum lavamentivorans
MERIFGFDIGTTSIGFSVIDYSSTQSAGNIQRLGVRIFPEARDPDGTPLNQQRRQKRMMRRQLRRRRIRRKALNETLHEAGFLPAYGSADWPVVMADEPYELRRRGLEEGLSAYEFGRAIYHLAQHRHFKGRELEESDTPDPDVDDEKEAANERAATLKALKNEQTTLGAWLARRPPSDRKRGIHAHRNVVAEEFERLWEVQSKFHPALKSEEMRARISDTIFAQRPVFWRKNTLGECRFMPGEPLCPKGSWLSQQRRMLEKLNNLAIAGGNARPLDAEERDAILSKLQQQASMSWPGVRSALKALYKQRGEPGAEKSLKFNLELGGESKLLGNALEAKLADMFGPDWPAHPRKQEIRHAVHERLWAADYGETPDKKRVIILSEKDRKAHREAAANSFVADFGITGEQAAQLQALKLPTGWEPYSIPALNLFLAELEKGERFGALVNGPDWEGWRRTNFPHRNQPTGEILDKLPSPASKEERERISQLRNPTVVRTQNELRKVVNNLIGLYGKPDRIRIEVGRDVGKSKREREEIQSGIRRNEKQRKKATEDLIKNGIANPSRDDVEKWILWKEGQERCPYTGDQIGFNALFREGRYEVEHIWPRSRSFDNSPRNKTLCRKDVNIEKGNRMPFEAFGHDEDRWSAIQIRLQGMVSAKGGTGMSPGKVKRFLAKTMPEDFAARQLNDTRYAAKQILAQLKRLWPDMGPEAPVKVEAVTGQVTAQLRKLWTLNNILADDGEKTRADHRHHAIDALTVACTHPGMTNKLSRYWQLRDDPRAEKPALTPPWDTIRADAEKAVSEIVVSHRVRKKVSGPLHKETTYGDTGTDIKTKSGTYRQFVTRKKIESLSKGELDEIRDPRIKEIVAAHVAGRGGDPKKAFPPYPCVSPGGPEIRKVRLTSKQQLNLMAQTGNGYADLGSNHHIAIYRLPDGKADFEIVSLFDASRRLAQRNPIVQRTRADGASFVMSLAAGEAIMIPEGSKKGIWIVQGVWASGQVVLERDTDADHSTTTRPMPNPILKDDAKKVSIDPIGRVRPSND

SEQ ID NO: 378 - protein, 1058 aa, Pasteurella multocida
  Pasteurella multocida subsp. gallicida X73
MQTTNLSYILGLDLGIASVGWAVVEINENEDPIGLIDVGVRIFERAEVPKTGESLALSRRLARSTRRLIRRRAHRLLLAKRFLKREGILSTTDLEKGLPNQAWELRVAGLERRLSAIEWGAVLLHLIKHRGYLSKRKNESQTNNKELGALLSGVAQNHQLLQSDDYRTPAELALKKFAKEEGHIRNQRGAYTHTFNRLDLLAELNLLFAQQHQFGNPHCKEHIQQYMTELLMWQKPALSGEAILKMLGKCTHEKNEFKAAKHTYSAERFVWLTKLNNLRILEDGAERALNEEERQLLINHPYEKSKLTYAQVRKLLGLSEQAIFKHLRYSKESAESATFMELKAWHAIRKALENQGLKDTWQDLAKKPDLLDEIGTAFSLYKTDEDIQQYLEGKLPDSVINALLVSLNFDKFIELSLKSLRKILPLMEQGKRYDQACHEIYGHHYGEKNQQISQLLPVIPTQEIRNPVVLRTLSQARKVINAIIRQYGSPARVHIETGRELGKSFKERREIQKQQEDNRTKRESAVQKFKELFSDFSSEPKSKDILKFRLYEQQHGKCLYSGKEINIHRLNEKGYVEIDHALPFSRTWDDSFNNKVLVLASENQNKGNQTPYEWLQGKINSERWKNFVALVLGSQCSAAKKQRLLTQVIDDNKFIDRNLNDTRYIARFLSNYIQENLLLVGKNKKNVFTPNGQITALLRSRWGLIKVRENNDRHHALDAIVVACATPSMQQKITRFIRFKEVHPYKIENRYEMVDQESGEIISPHFPEPWAYFRQEVNIRVFDNHPDTVLKEMLPDRPQANHQFVQPLFVSRAPTRKMSGQGHMETIKSAKRLAEGISVLRIPLTQLKPNLLENMVNKEREPALYVGLKARLAEFNQDPAKAFATPFYKQGGQQVKAIRVELVQKSGVLVRQGNGVADNAPGSIVRTDVFIKNNKFFLVPIYTWQVAKGILPNKAIVAHKNEDEWEEMDEGAKFKFSIFPNDLIELRTKTECFLGYYIGPDRHNGSISLREHDSEISKGNAGVYRVGVKLALSLEKYHIDELGKNRRICRPHQRRPVR

SEQ ID NO: 379 - protein, 1056 aa, Pasteurella multocida
  Pasteurella multocida subsp. multocida str. P52VAC
MQTTNLSYILGLDLGIASVGWAVVEINENEDPIGLIDVGVRIFERAEVPKTGESLALSRRLARSTRRLIRRRARRLLLAKRFLKREGILSTTDLEKGLPNQAWELRVAGLERRLSAIEWGAVLLHLIKHRGYLSKRKNESQTNNKELGALLSGVAQNHQLLQSDDYRTPAELALKKFAKEEGHIRNQRGAYTHTFNRLDLLAELNLLFAQQHQFGNPHCKEHIQQYMTELLMWQKPALSGEAILKMLGKCTHEKNEFKAAKHTYSAERFVWLTKLNNLRILEDGAERALNEEERQLLINHPYEKSKLTYAQVRKLLGLSEQAIFKHLRYSKENAESATFMELKAWHAIRKALENQGLKDTWQDLAKKPDLLDEIGTAFSLYKTDEDIQQYLTNKVPNSVINALLVFLNFDKFIELALKSLRKILPLMEQGKRYDQACREIYGHHYGEANQKTSQLLPAIPAQEIRNPVVLRTLSQARKVINAIIRQYGSPARVHIETGRELGKSFKERREIQKQQEDNRTKRESAVQKFKELFSDFSSEPKSKDILKFRLYEQQHGKCLYSGKEINIHRLNEKGYVEIDHALPFSRTWDDSFNNKVLVLASENQNKGNQTPYEWLQGKINSERWKNFVALVLGSQCSAAKKQRLLTQVIDDNKFIDRNLNDTRYIARFLSNYIQENLLLVGKNKKNVFTPNGQITALLRSRWGLIKIRENNDRHHALDAIVVACATPSMQQKITRFIRFKEVHPYKIENRYEMVDQESGEIISPHFPEPWAYFRQEVNIRVFDNHPDTVLKEMLPDRPQANHQFVQPLFVSRAPTRKMSGQGHMETIKSAKRLAEGISVLRIPLTQLKPNLLENMVNKEREPALYAGLKARLAEFNQDPAKAFTTPFYKQGGQQVKAIRVEQVQKSGVLVRENNGVADNASIVRTDVFIKNNKFFLVPIYTWQVAKGILPNKAIVAHKNEDEWEEMDEGAKFKFSLFPNDLVELKTKKEYFFGYYIGLDRATGNISLKEHDGEISKGKDGVYRVGVKLALSFEKYQVDELGKNRQICRPQQRQPVR

SEQ ID NO: 380 - protein, 1056 aa, Pasteurella multocida
MQTTNLSYILGLDLGIASVGWAVVEINENEDPIGLIDVGVRIFERAEVPKTGESLALSRRLARSTRRLIRRRAHRLLLAKRFLKREGILSTIDLEKGLPNQAWELRVAGLERRLSAIEWGAVLLHLIKHRGYLSKRKNESQTNNKELGALLSGVAQNHQLLQSDDYRTPAELALKKFAKEEGHIRNQRGAYTHTFNRLDLLAELNLLFAQQHQFGNPHCKEHIQQYMTELLMWQKPALSGEAILKMLGKCTHEKNEFKAAKHTYSAERFVWLTKLNNLRILEDGAERALNEEERQLLINHPYEKSKLTYAQVRKLLGLSEQAIFKHLRYSKENAESATFMELKAWHAIRKALENQGLKDTWQDLAKKPDLLDEIGTAFSLYKTDEDIQQYLTNKVPNSVINALLVSLNFDKFIELSLKSLRKILPLMEQGKRYDQACREIYGHHYGEANQKTSQLLPAIPAQEIRNPVVLRTLSQARKVINAIIRQYGSPARVHIETGRELGKSFKERREIQKQQEDNRTKRESAVQKFKELFSDFSSEPKSKDILKFRLYEQQHGKCLYSGKEINIHRLNEKGYVEIDHALPFSRTWDDSFNNKVLVLASENQNKGNQTPYEWLQGKINSERWKNFVALVLGSQCSAAKKQRLLTQVIDDNKFIDRNLNDTRYIARFLSNYIQENLLLVGKNKKNVFTPNGQITALLRSRWGLIKARENNNRHHALDAIVVACATPSMQQKITRFIRFKEVHPYKIENRYEMVDQESGEIISPHFPEPWAYFRQEVNIRVFDNHPDTVLKEMLPDRPQANHQFVQPLFVSRAPTRKMSGQGHMETIKSAKRLAEGISVLRIPLTQLKPNLLENMVNKEREPALYAGLKARLAEFNQDPAKAFATPFYKQGGQQVKAIRVEQVQKSGVLVRENNGVADNASIVRTDVFIKNNKFFLVPIYTWQVAKGILPNKAIVAHKNEDEWEEMDEGAKFKFSLFPNDLVELKTKKEYFFGYYIGLDRATGNISLKEHDGEISKGKDGVYRVGVKLALSFEKYQVDELGKNRQICRPQQRQPVR

SEQ ID NO: 381 - protein, 1364 aa, Pediococcus acidilactici
  Pediococcus acidilactici DSM 20284
MGDRKYNLGLDIGTSSIGFAAVDENNQPIRVKGKTAIGVRLFEEGKTAADRRGFRTTRRRLSRRRWRINLLNEIFDAHLAEVDPTFLARLKESNRSNLDPKKSFQGSLLFPERKDYQFYEEYPTIYHLRKALMEKDRKFDFREIYLAVHHIIKYRGNFLNGTPMRSFKVENIELDTLFDQLNQLYAEIVPDNELAFDLAQVADVKDVLSSTTIYKMDKKKQLVKMMLLPASNKALQSENKKIVTQFVNAILNYKFKLDVLLQVETDADWSLKLNDEGADDKLEEFTGDLDENRLEIIDLLQRLHNWFSLNEITKDGNSLSAAMVEKYENHHHHLGLLKKVIENHPDAKKAKALKETYTAYVGKTDDKTQNQDDFYKAVEKNLDDSPDAKEIKRLIQLDQFMPKQRTGQNGAIPHQLHQQELDQIIEKQSKYYPFLAEPNPNVKRRKDAPYKLDELIAFKIPYYVGPLVTPEEQAQNGENVFAWMKRKAAGPITPWNFDEKVDRMESANRFIRRMTTKDTYLFGEDVLPAESMIYQKFVVLNELNNLKINGRHLSLKDKQDVYNDLFKQQKTVSIKALQNYYVTKKKAATAPTVGGLADPKKFLSSLSTYIDFKNMFGERVNDPQFQEDLEQIVEWSTIFEDRGIFKAKLQALGWLSEKQIQQLVAKRYKGWGRLSKKLLTGLKNAEGYSILDEMWRSTGNFMQIQSRPEFAALIQQANEKQFEGNDPDNVWENIENILGDAYTSPQNKKAIRQVVKVVQDIEKAVGNPPEKIAIEFTREAAANPQRTQSRLRTLEKLYESAEEVVDAGLTAELAEFKENKHVLSDKYYLYFTQLGRDVYTGDTISLDKLNDYDVDHILPQSFIKDDSLDNRVLTIRAVNNGKSDNVPAKMFGKKMGSFWRYLLDNGMISKRKYNNLITDPDNISKYAQKGFINRQLVETSQVIKLTANILNGIYDKDTEIIEVPAKMNSQMRKMFDLVKVREVNDYHHAFDAYLTIFIGNYLYKCYPKLQPYFVYDNFKKFGNKEDIGHKRFNFLGKIEREKKVVAPETGEILWSNVAPNETIKQIKKVYDYKFMIVSREITTRRAELFNQTVYPKNYHGKLIPIKEDRPTDLYGGYSGNTDAYLAIVALEDKKKGKYFKVVGIPTRVAAKLEKLKQQDSQQYLQALHKVIAPQFTKSTKKGIKKTEFEIVLDKVHYRQLVQDGPVKMMLGSSTYKYNAKQLVLSEKALQVIADDRKFDETQKDDNLIAVYDEILSIVNQSFDLYDINGFRKKLNDNRDQFIDLPAETKYEGRKVVAHGKREMILEILKGLHANAAFGNLKPIGFSTAFGQLQVPNGIILSKNAILIHQSPSGLFERKIKLSDL

SEQ ID NO: 382 - protein, 1366 aa, Pediococcus acidilactici
  Pediococcus acidilactici MA18/5M
MGDRKYNLGLDIGTSSIGFAAVDENNQPIRVKGKTAIGVRLFEEGKTAADRRGFRTTRRRLSRRRWRINLLNEIFDAHLAEVDPTFLARLKESNRSNLDPKKSFQGSLLFPERKDYQFYEEYPTIYHLRKALMEEDRKFDIREIYLAVHHIIKYRGNFLNGTPMRSFKVENIELDTLFDQLNQLYAEIVPDNELAFDLAQVADVKDVLSSTTIYKMDKKKQLVKMMLLPASNKALQSENKKIVTQFVNAILNYKFKLDVLLQVETDADWSLKLNDEGADDKLEEFTGDLDENRLEIIDLLQRLHNWFSLNEITKDGNSLSAAMVEKYENHHHHLGLLKKVIENHPDAKKAKALKETYTAYVGKTDDKTQNQDDFYKAVEKNLDDSPDAKEIKRLIQLDQFMPKQRTGQNGAIPHQLHQQELDQIIEKQSKYYPFLAEPNPNVKRRKDAPYKLDELIAFKIPYYVGPLVTPEEQAQNKENVFAWMKRKAAGPITPWNFDEKVDRMESANRFIRRMTTKDTYLFGEDVLPAESMIYQKFVVLNELNNLKINGRHLSLKDKQDVYNDLFKQQKTVSIKALQNYYVTKKKAATAPTVGGLADPKKFLSSLSTYIDFKNMFGERVNDPQFQEDLEQIVEWSTIFEDRGIFKAKLQALGWLSEKQIQQLVAKRYKGWGRLSKKLLTGLKNAEGYSILDEMWRSTENFMQIQTRPEFAALIQQANEKQFEGNDPNNVWENIESILGDAYTSPQNKKAIRQVVKVVQDIEKAVGNPPEKIAIEFTREAAANPQRTQSRLRTLEKLYESAEEVVDAGLTAELAEFKENKHVLSDKYYLYFTQLGRDVYTGDTISLDKLNDYDVDHILPQSFIKDDSLDNRVLTIRAVNNGKSDNVPAKMFGKKMGSFWRYLLDNGMISKRKYNNLITDPDNISKYAQKGFINRQLVETSQVIKLTANILNGIYDKDTEIIEVPAKMNSQMRKMFDLVKVREVNDYHHAFDAYLTIFIGKYLYKCYPKLRPYFVYGKFKKFGDNEDIEVGDGRFNFLNRIERLKNVTDPETGEILWSNVAPNETIKQIKKVYNYKFMLVSRETTTRRAELFNQTVYPKNYRGKLIPIKEDRPTDLYGGYSGNTDAYLAIVALEDKKKGKYFKVVGIPTRAAAKLEKLKQQDSQQYLQALHKVIAPQFTKSTKKGIKKTEFEIVLDKVHYRQLVQDGPVKMMLGSSTYKYNAKQLVLSEKALQVIADDRKFDETQKDDNLIAVYDEILSIVNQSFDLYDINGFRKKLNDNRDQFIDLPAETKYEGRKVVAHGKREMILEILKGLHANAAFGNLKPIGFSTAFGQLQVPNGIILSKNAILIHQSPSGLFERKIKLSDL

SEQ ID NO: 383 - protein, 1364 aa, Peptoniphilus duerdenii
  Peptoniphilus duerdenii ATCC BAA-1640
MKNLKEYYIGLDIGTASVGWAVTDESYNIPKFNGKKMWGVRLFDDAKTAEERRTQRGSRRRLNRRKERINLLQDLFATEISKVDPNFFLRLDNSDLYREDKDEKLKSKYTLFNDKDFKDRDYHKKYPTIHHLIMDLIEDEGKKDIRLLYLACHYLLKNRGHFIFEGQKFDTKNSFDKSINDLKIHLRDEYNIDLEFNNEDLIEIITDTTLNKTNKKKELKNIVGDTKFLKAISAIMIGSSQKLVDLFEDGEFEETTVKSVDFSTTAFDDKYSEYEEALGDTISLLNILKSIYDSSILENLLKDADKSKDGNKYISKAFVKKFNKHGKDLKTLKRIIKKYLPSEYANIFRNKSINDNYVAYTKSNITSNKRTKASKFTKQEDFYKFIKKHLDTIKETKLNSSENEDLKLIDEMLTDIEFKTFIPKLKSSDNGVIPYQLKLMELKKILDNQSKYYDFLNESDEYGTVKDKVESIMEFRIPYYVGPLNPDSKYAWIKRENTKITPWNFKDIVDLDSSREEFIDRLIGRCTYLKEEKVLPKASLIYNEFMVLNELNNLKLNEFLITEEMKKAIFEELFKTKKKVTLKAVSNLLKKEFNLTGDILLSGTDGDFKQGLNSYIDFKNIIGDKVDRDDYRIKIEEIIKLIVLYEDDKTYLKKKIKSAYKNDFTDDEIKKIAALNYKDWGRLSKRFLTGIEGVDKTTGEKGSIIYFMREYNLNLMELMSGHYTFTEEVEKLNPVENRELCYEMVDELYLSPSVKRMLWQSLRVVDEIKRIIGKDPKKIFIEMARAKEAKNSRKESRKNKLLEFYKFGKKAFINEIGEERYNYLLNEINSEEESKFRWDNLYLYYTQLGRCMYSLEPIDLADLKSNNIYDQDHIYPKSKIYDDSLENRVLVKKNLNHEKGNQYPIPEKVLNKNAYGFWKILFDKGLIGQKKYTRLTRRTPFEERELAEFIERQIVETRQATKETANLLKNICQDSEIVYSKAENASRFRQEFDIIKCRTVNDLHHMHDAYLNIVVGNVYNTKFTKNPLNFIKDKDNVRSYNLENMFKYDVVRGSYTAWIADDSEGNVKAATIKKVKRELEGKNYRFTRMSYIGTGGLYDQNLMRKGKGQIPQKENTNKSNIEKYGGYNKASSAYFALIESDGKAGRERTLETIPIMVYNQEKYGNTEAVDKYLKDNLELQDPKILKDKIKINSLIKLDGFLYNIKGKTGDSLSIAGSVQLIVNKEEQKLIKKMDKFLVKKKDNKDIKVTSFDNIKEEELIKLYKTLSDKLNNGIYSNKRNNQAKNISEALDKFKEISIEEKIDVLNQIILLFQSYNNGCNLKSIGLSAKTGVVFIPKKLNYKECKLINQSITGLFENEVDLLNL

SEQ ID NO: 384 - protein, 1087 aa, Phascolarctobacterium succinatutens
  Phascolarctobacterium succinatutens YIT 12067
MLRMKYAIGLDIGIASVGYAVLALDHEENPWGIIRLGSRIFDVAENPKDGASLALPRREARSVRRRLRRHHHRLERIKNLLINTEFITKDELLHLYDGNLSDVYELRVKALDYSVTNAELTRILLHLAQRRGFKSNRKSDANDKEAGQLLEAVSANAKRMQENHYRTVGEMFYKDDLFSKYKRNKGGTYLTTVHRDMIAAEARTILEKQFALGNNICTQDFIDKYLSILLSQRQFDEGPGEPSPYAGNQIANMIGKCTFEPNEYRAAKASYSFERFNLLQKVNHLRLLLEGKSIALDNEQRKKIIALAHDKADLRYSHIRKALGLDEKVLFNTITYNDDVSVIEKKTKFNFLQAYHQIKKVLAEDMQKLTTEQLDNIGQILSTYKSDNKRTEELSALGLEKKIIDALLGINGLSKFAHLSLKALRKINPYLEEGKIYNEACTAAGYDFKAHANTQKTELLPAYKEEMDDITSPVARRAIAQSIKVINAIIREQKGSPLYINIELAREMAKGFDERTQIDKANKENQAKNERIMERIRTEFHKANPTGMDLIKLKLWEEQDGRSPYSQKAISINRLFEPGYVDIDHIVPYSISFDDSFKNKVLVFSDENRDKGNRLPIAYLQSKFGAKAAENFMIWVQSNIKDYKKRQKLLKREITEEDINKFKERNLQDTKTISRFLYNYINDYLLFAPSDTGKKKRVTAVNGTITAYLRKRWGINKIRANGDKHHAVDAVVIACTTDKMIKDLSSFSRYHELEYTHTDTESFLVNSLTGEILKRFPYPWEDFRPELMARLSDNPADALRKLNLIFYHGIDLSTIKPIFVSRMPRHKVTGAAHKATIKSARCLDNGIVICKTSLQNLKLDKEGEIANYYAPESDTILYNALKERLRSYDNKPAKAFAEPFYKPKADGTPGPLVKKVKVYEKSTLNVAVQQNTAVADNDSMVRVDVFHVKGNGYYLVPIYIADTLKKELPNKAIVAYKPYADWPVMDDSNFIFSLYPNDLIKFEHKNSVKFAKVNKESTLNDFYSTKSEIVYFKGCNINTGAITIINHENTYVVSSLGVKTLPSLEKYQADVLGNYTKVKKEVRKPFR

SEQ ID NO: 385 - protein, 1333 aa, Planococcus antarcticus
  Planococcus antarcticus DSM 14505
MKNYTIGLDIGVASVGWVCIDENYKILNYNNRHAFGVHEFESAESAAGRRLKRGMRRRYNRRKKRLQLLQSLFDSYITDSGFFSKTDSQHFWKNNNEFENRSLTEVLSSLRISSRKYPTIYHLRSDLIESNKKMDLRLVYLALHNLVKYRGHFLQEGNWSEAASAEGMDDQLLELVTRYAELENLSPLDLSESQWKAAETLLLNRNLTKTDQSKELTAMFGKEYEPFCKLVAGLGVSLHQLFPSSEQALAYKETKTKVQLSNENVEEVMELLLEEESALLEAVQPFYQQVVLYELLKGETYVAKAKVSAFKQYQKDMASLKNLLDKTFGEKVYRSYFISDKNSQREYQKSHKVEVLCKLDQFNKEAKFAETFYKDLKKLLEDKSKTSIGTTEKDEMLRIIKAIDSNQFLQKQKGIQNAAIPHQNSLYEAEKILRNQQAHYPFITTEWIEKVKQILAFRIPYYIGPLVKDTTQSPFSWVERKGDAPITPWNFDEQIDKAASAEAFISRMRKTCTYLKGQEVLPKSSLTYERFEVLNELNGIQLRTTGAESDFRHRLSYEMKCWIIDNVFKQYKTVSTKRLLQELKKSPYADELYDEHTGEIKEVFGTQKENAFATSLSGYISMKSILGAVVDDNPAMTEELIYWIAVFEDREILHLKIQEKYPSITDVQRQKLALVKLPGWGRFSRLLIDGLPLDEQGQSVLDHMEQYSSVFMEVLKNKGFGLEKKIQKMNQHQVDGTKKIRYEDIEELAGSPALKRGIWRSVKIVEELVSIFGEPANIVLEVAREDGEKKRTKSRKDQWEELTKTTLKNDPDLKSFIGEIKSQGDQRFNEQRFWLYVTQQGKCLYTGKALDIQNLSMYEVDHILPQNFVKDDSLDNLALVMPEANQRKNQVGQNKMPLEIIEANQQYAMRTLWERLHELKLISSGKLGRLKKPSFDEVDKDKFIARQLVETRQIIKHVRDLLDERFSKSDIHLVKAGIVSKFRRFSEIPKIRDYNNKHHAMDALFAAALIQSILGKYGKNFLAFDLSKKDRQKQWRSVKGSNKEFFLFKNFGNLRLQSPVTGEEVSGVEYMKHVYFELPWQTTKMTQTGDGMFYKESIFSPKVKQAKYVSPKTEKFVHDEVKNHSICLVEFTFMKKEKEVQETKFIDLKVIEHHQFLKEPESQLAKFLAEKETNSPIIHARIIRTIPKYQKIWIEHFPYYFISTRELHNARQFEISYELMEKVKQLSERSSVEELKIVFGLLIDQMNDNYPIYTKSSIQDRVQKFVDTQLYDFKSFEIGFEELKKAVAANAQRSDTFGSRISKKPKPEEVAIGYESITGLKYRKPRSVVGTKR

SEQ ID NO: 386 - protein, 1197 aa, Porphyromonas sp.
  Porphyromonas sp. oral taxon 279 str. F0450
MLMSKHVLGLDLGVGSIGWCLIALDAQGDPAEILGMGSRVVPLNNATKAIEAFNAGAAFTASQERTARRTMRRGFARYQLRRYRLRRELEKVGMLPDAALIQLPLLELWELRERAATAGRRLTLPELGRVLCHINQKRGYRHVKSDAAAIVGDEGEKKKDSNSAYLAGIRANDEKLQAEHKTVGQYFAEQLRQNQSESPTGGISYRIKDQIFSRQCYIDEYDQIMAVQRVHYPDILTDEFIRMLRDEVIFMQRPLKSCKHLVSLCEFEKQERVMRVQQDDGKGGWQLVERRVKFGPKVAPKSSPLFQLCCIYEAVNNIRLTRPNGSPCDITPEERAKIVAHLQSSASLSFAALKKLLKEKALIADQLTSKSGLKGNSTRVALASALQPYPQYHHLLDMELETRMMTVQLTDEETGEVTEREVAVVTDSYVRKPLYRLWHILYSIEEREAMRRALITQLGMKEEDLDGGLLDQLYRLDFVKPGYGNKSAKFICKLLPQLQQGLGYSEACAAVGYRHSNSPTSEEITERTLLEKIPLLQRNELRQPLVEKILNQMINLVNALKAEYGIDEVRVELARELKMSREERERMARNNKDREERNKGVAAKIRECGLYPTKPRIQKYMLWKEAGRQCLYCGRSIEEEQCLREGGMEVEHIIPKSVLYDDSYGNKTCACRRCNKEKGNRTALEYIRAKGREAEYMKRINDLLKEKKISYSKHQRLRWLKEDIPSDFLERQLRLTQYISRQAMAILQQGIRRVSASEGGVTARLRSLWGYGKILHTLNLDRYDSMGETERVSREGEATEELHITNWSKRMDHRHHAIDALVVACTRQSYIQRLNRLSSEFGREDKKKEDQEAQEQQATETGRLSNLERWLTQRPHFSVRTVSDKVAEILISYRPGQRVVTRGRNIYRKKMADGREVSCVQRGVLVPRGELMEASFYGKILSQGRVRIVKRYPLHDLKGEVVDPHLRELITTYNQELKSREKGAPIPPLCLDKDKKQEVRSVRCYAKTLSLDKAIPMCFDEKGEPTAFVKSASNHHLALYRTPKGKLVESIVTFWDAVDRARYGIPLVITHPREVMEQVLQRGDIPEQVLSLLPPSDWVFVDSLQQDEMVVIGLSDEELQRALEAQNYRKISEHLYRVQKMSSSYYVFRYHLETSVADDKNTSGRIPKFHRVQSLKAYEERNIRKVRVDLLGRISLL

SEQ ID NO: 387 - protein, 1485 aa, Prevotella bivia
  Prevotella bivia JCVIHMP010
MKNILGLDLGTNSIGWAKISIDDNGKYIKDSIKLGSRIIPMSQDVLSNFSKGVTLSQTSERTSFRGARRLRERTLLRRERLHRILHLLGFLPKHYEKAIGWDRNDNKTYGKFINHAEPKLAWCKDNNGKMRFLFMDSFHDMLSEFSEKHPELLANGKKIPLDWTIYYLRKKALYKAITKEELAWILLNFNQKRGYYQLRGEEDRDSEANKKEYLELKVIGVEATGEKKGNDIWYNIHLENGWIYRRSSKNPLNDWLGKVKSFIVTTDLDADGNPKKDKDGNIKRSFRAPSEGDWTLIKKRTESLLENSGQTVGQFIYNHILEEPSAKIRGNFIRTIERKYYKDELKAILEKQKEFHHELSSESLLTECAKELYKRNIAHQEVLLKKGIIHLLLNDILFYQRPLKIKKSLIDNCPYENYKYVDKKSGDIKVKSIKCIAKSNPFFQEFRLWQFVSNLRLYRKSDDKDVTSEHLVTTDDYANLFTYLNNRKDIKQSVLLKEYFKIKKVKTINGAEYPVRWNYIDDDNKTYPCNETRYDILHALSKTELKSEWLTPERTYRLWHLLYSIESKEETKKALNKLNLSDDFTEAFLTIKPFKKEYGSYSEKAIKKLLSLMRMGYLWSEDEAIKQVGAEIEKTIEGELPDYVLQRLEKSQHNYNKISDFSGLPLWLASYIIYGRHSEAKEIIHWDNPESMMAYIKDFRQHSMRNPIVEQCVLETLRTVHDIWKEIGHIDEIHIELGREMKSTSEQRKAITQNVLHNQNTNIRIKLLLQELKNDNNITGVRPYSPMQQEILRIYEEGALQGLTKEDKDYNDILKISQTAQPTSNELTRYKLWLEQKYRSPYTGKAISLSKLFTSAYQIEHVIPQSRYFDDSLSNKVICESEVNTLKKAMLGMEFIKTCGGQKVHCTLLGDVEIYNEEDYKAFVNEHYSNNRTKRNKLLMEDIPQEFINRQLNDSRYISKMVKQLLSAIVRGQEEVEATSKFVIPCTGGITDRLKKDWGLNDIWNNLVSPRFQRMNALTGSEYFGHWENKEGKRVFQTTMPIQLQQGFSKKRIDHRHHAMDALVIACASRNIISYLNNETAQDTERRRDLRQKLCDKGGSVRKPWDSFTQDTQYALKDIIVTFKNYVRIINKATNYYEHYKTDGKKGMISQKGDELWAIRKPMHKETVFGKVNLRRPKRVSLSKAIDSVDIICNRKLKKYIKARLNEGLQKKQILNIFKELNNVWEGIDVNKIDIWEMSNDKEPMVATRKQLDTSFDEKKIRSISDTGIQKILLNYLITKNNNPELAFTPEGIQEMNSNISEYNDHKKHQPIYKVRVTEPLGAKYPIGTMGNNPKKFVEAQAGTNLYFAIYEDKEGKRNYDTIPLNIAAERLNQQLSPVPETNENNTPLKFYLSPNDLVYVPSEEERHSGNNIQLDKNRIYKMVSSTSKRCFFIHHRVAISLVDKKEFSAQNKMERSIDNEQVMIKSVCWKLITDRLGNIIKVIK

SEQ ID NO: 388 - protein, 1457 aa, Prevotella buccae
  Prevotella buccae ATCC 33574
MKTILGLDLGTNSIGWAKVSVDDYGNYLHDIKLGSRIIPMSQDVLGNFDSGVTVSQTAQRTEFRSKRRLVQRNLQRRERLHRVLHVLDFLPAHYDAAIGWDRTEAVTYGKFLNHAEPKLAWEELGNGKRRFLFMDSFHEMVADFARCQPALVADGKKIPLDWTIYYLRKKALTQAITKEELAWILLNFNQKRGYYQLRGEEEEENPTKQEEYYELKVVSVEATDSRKGNDTWYNVHLENGWIYRRSSKISLDDWVGKVKQFIVTTEYEKDGATLKTDKEGYVKRSFRAPNENDWGLRKKRTETLLEMSGKTVGAFIYDHLLQEPADKIRGNFIRTIERHYYKAELEAILAEQCKYHIELRDKEMLEACARELYLNNLPHQRSLMKKDMTYLLLYDLIFYQRPLKSKKALIANCPYEYYEYVDKETGEIKRQNIKCIAKSNPYFQEFRLWQFVLNLRLFDRVEDKEVTANYLPTADDHARLFTYLNDRKEINQETLLKDYFKLKKVKIGNEKEYPIRWNYIEDKEKKYPCNETRYELLMALDRAGIEHKWLDDNNLEYRLWHLLYSVEVKSESETALRKLKNDDAFVNSFLKVKPFKKEYGAYSEKAIKRLLAVMRKGFLWNEQDICDETRKRIEIIIKGDVDEKVKERMGHAAYSFDRVSDFQGLPEWLACYVVYGRHSEAMDIQHWDSPERLMAYINNFKQYSLRNPIVEQCILETLRTVHDIWKETGQIDEIHVELGREMKSTSEERARRTQNVLRNENTNLRIKSLLIELKNDTDICNVHPYSPMQQEILRIYEEGALQELNREDEDFEEISKISQMSQPSGKELNRYKLWLEQKYRSPYTGKAISLAKLFTPAYQIEHVIPQSRYFDDSFTNKVICEAEVNTLKSNLLGYEFIKKHGGEIIHCTTLGDVRIFSESEYKAFVMDHYANNKSKKDKLLMEDIPQEFLSRQMNDSRYISKVVKTLLSNIVRMADESEATSKSVIVCTGGVTDRLKKDWGLNDVWNSIVYSRFERLNRLTGTEAFGHWENKDGKRVFQTSMPLELQRGFRKKRIDHRHHAMDALVIACASRNIVNYLNNESANNPKKREDLRRQLCDKNRVIRKPWETFTQDAYNALENVVVSFKNYVRVINKATNRYEHYDENGKKRFVQQKGSELWAIRKPMHKETYYGHVNLRRKELVTLQKALDDIPSICDKKLRDYISALVEKHFNKRQLLAHFKSTDYYWQKQYVNKVYVWTFSDDIKPLVATRKLLDTSFDAKRIGTITDTGIQKILRNYLEAKGGNATLAFTPEGIAEMNQNISKYNDGKPHQPILKVRITEPMGAKYRVGQTGNKMAKYVEAQSGTNLYFAIYEDSEGKRSYTTVPLDEVAERLKQRLSPVPEKDENDVPLKFYLSPNDLVYVPTEEELQLRECKLNKDRIYKMVSSTGNECHFIPYYVANVIYNKGGFNMQMHRPQS

SEQ ID NO: 389 - protein, 1218 aa, Prevotella buccalis
  Prevotella buccalis ATCC 35310
MNKRILGLDTGTNSLGWAVVDWDEHAQSYELIKYGDVIFQEGVKIEKGIESSKAAERSGYKAIRKQYFRRRLRKIQVLKVLVKYHLCPYLSDDDLRQWHLQKQYPKSDELMLWQRTSDEEGKNPYYDRHRCLHEKLDLTVEADRYTLGRALYHLTQRRGFLSNRLDTSADNKEDGVVKSGISQLSTEMEEAGCEYLGDYFYKLYHEQGNKVRIRQRYTDRKKHYQHEFDAICEKQELSSELIEDLQRAIFFQLPLKSQRHGVGRCTFERGKPRCADSHPDYEEFRMLCFVNNIQVKGPHDLELRPLTYEEREKIEHLFFRKSKPNFDFEDIAKELAGKKNYAWIHDKEERAYKFNYRMTQGVPGCPTTAQLKSIFGDDWKTGIAETYTLIQKKNGSKSLQEMVDDVWNVLYSFSSVEKLKEFAHHKLQLDEENAEKFAKIKLSHSFAALSLKAIRKFLPFLRKGMYYTHASFFANIPTIVGKEIWNNEQSRKYIMENVGELVFNYQPKHRDVQGTIEMLIKDFLANNFELPAGATDKLYHPSMIETYPHALRNEFGILQLGSPRTNAIRNPMAMRSLHVLRRVVNQLLKESIIDENTEVHVEYARELNDANKRRAIADRQKEQDKQHKKYGDEIRKLYKEETGKDIEPTQTDVLKFQLWEEQNHYCLYTGEQIGITDFIGSNPKFDIEHTIPQSVGGDSTQMNLTLCDNRFNREVKKAKLPTELANHEEILTRIEPWKNKYEQLVKERDKQRTFAGMDKAVKDIRIQKRHKLQMEIDYWRGKYERFTMTEVPEGFSRRQGTGIGLISRYAGLYLKSLFHQADSRNKSNVYVVKGVATAEFRKMWGLQSEYEKKCRDNHSHHCMDAITIACIGKREYDLMAEYYHMEETFRQGRGSKPKFSKPWATFTEDVLNIYKNLLVVHDTPNNMPKHTKKYVQTSKGKVLAQGDTARGSLHLDTYYGAIERDGEIRYVVRRPLSSFTNPKELENIVDETVKRTIKEAIADKNFKQAIAEPIYMNEDKGILIKKVRCFANSVKQPINIRQHRDLSKKEYKQQYHVMNENNYLLAIYEGLVKNKVVREFEIVSYIEAAKYYKRSQDRNIFSSIVPTHSTKYGLPLKTKLLMGQQVLMFEENPDEIQVDNTKDLVKRLYKVVGIEKDGRIKFKHHQEARKEGLTIYSTPYKNNDDYVPIFRQSIKNINILVDGIDFNIDILGKVTLKE

SEQ ID NO: 390 - protein, 1422 aa, Prevotella denticola
  Prevotella denticola CRIS 18C-A
MTQKVLGLDLGTNSIGSSVRNLDLSDDLKGQLEFFSSDIFRSSVNKESNGREYSLAAQRSAHSRSRGLNEARRRKLWATLDLLIKYGFCPMSPESLMRWRTYDKQRGLFREYPIDDKNFNAWILLDFDGDGKPDYSSPYQLRRELVIRQFDFDQPIERYKLGRALYHIAQHRGFKSSKGETLSQQETNSKQSLTDDTADVAGEMKASEEKLSKGLSTYMKENNLLTVGAAFAQLEDEGVRVRNNNDYRAIRSQFQREIETIFKFQQGLSVENELYERLVSEKKNIGTIFYKRPLRSQRGNVGKCTLERTKPRCAIGHPLFEKFRAWTLINNIKVRMSEEEQAEQLPMKLRFELYNDCFLAFVRAEFKFEDIRKYLEKRLGVHFSYNDKTINYKDSTSVAGCPITARFRKLLGEDWESFHVDGQKQRQAHGKNNASFHTVSYSTNDIWHFCYDAEEPEAVLSFAQDNLKWEKKKAEELVRIWSAIPQGYAMLSQKAIRNINKMLILGLKYSDAVLLAKVPEIVEITDGEILSVTEDYHRVEAQVGYEKQINNIVNALIAKYKSASEEYRFADHNYEYQLDKSDEKDIIKQIESNIGTRKWSLLDADEQTDILQKVRDKYQNFFRSHERKFVESPKLGECFEEYLMKKFPMVEGERWKKLYHPSQIAIYRPVPANKDRSALRLGNPDIGAIKNPTVLRVLNTLRKRVNQLLDDGIISPDETRVVVETARELNDANRKWALDTYNRIRHDENEKIKKILAEFYPKRDNISTVDIDKARYVIDQREMDYFTEAKTYHKDIKKYKLWLEQGGQCMYTGRTINLSNLFDPNSFDVEHTIPESISFDSSDMNLTLCDAHYNRFIKKNHIPADLPNYDKSVVIDGKEYSPIKPRLQRWADRVERLNRNVEYWRGQARRAQNKDRKDQCMREMHLWKMELEYWTKKLERFTITEVTDEFKNSQLVDTRVITRHAVLYLKSIFPHVDVQRGDVTAKFRKILGIQSVDEKKDRSLHSHHAIDATTLTIIPGAAKRERMLELFAKIEEVNKMLSFSGNEDRTGLKQELDGLKNQLNKEVKACRIGHNVSEIGTFINDNIIINHHVKNQALTPVRRRLRKRGHIVGGMDNPRWQTGDALRGEIHKASYYGAITQYAKDKEGKVLMKEGRPQINPTIKFVIRRELKYKKSSTDSGFASWDDLGKAIVDKELFALMKGQFPEGTSFKDACEQGIYMIKKGKNGEVDTKLYRIRHIRCKTKQKNALKIKEQAYKSEKEYKRYFYAAVGDLYAMCCYTNGKTREFKIYSLYDISCHRKVGVEDIPEFITDKKGNRLMLDYKLHTGDMILLYKENPEELYDLDNVSLSKLLYKINGFENDGLRIRMVNHLVAKEAMGESVKDYAKLPDIIRCGVKTIKFLVMGENRDFVIKNGKISFNHR

SEQ ID NO: 391 - protein, 1375 aa, Prevotella histicola
  Prevotella histicola F0411
MKKILGLDLGTTSIGWALVYESENTDEKSSIVRLGVRVNPLSVDEKGNFEKGKAITTNADRQQTHGARINLQRYKLRRENLKDCLQKQGWIGTEALCEEGKTSTFETYMLRAKAAEEEISLHELCRVLFMMNKKRGYKSNRKANNKEDGKLFDGMTVAKKLYEEHLTPAEYSFQLLSSGKKFKQEYYRSDLKEEFDRIWNEQQKYYPEILTDDFKQQLQGKSKGNTSKIFLGKYGIYSADLKGLDRKLQPLKWRVEALKQQVDKEVLAFVISDLNGQIASTSGLLGAISDRSKELYFNKQTVGQYLWTSLKETPHVSIKNKPFYRQDYLDEFEKIWETQATYHKELTPELKQEIRDIIIFYQRPLKSKKGLISVCELEQRKVKVTIDGKEKEISIGPKVAPKSSPMFQEFRIWQNLNNILLIDKGNNSIHPLYEEEKNLLYEELSVKEKLSKAEALKVLNKNSKQWDLNYKEIEGNRTQAVLYDCYNRIIVMTGHEEYNFKKLKASEIRSYVKTTFTGLGFNTDILEFDSSLTGHELEKQPMYQLWHLLYSYESDNSRTGNDALLRKLETAFGFPKEYAAVLSDVVFEDSYGNLSVKAMRKILPHLQAGLNYSQACEEAGYKHSRRSLTKNELDQKEYKEKLELLPKNSLHNPVVEKILNQMINVINAVIDEYGKPDEIRIELARELKIGAAERENMTRSINQGNAENKRIREILEKEFALSYISRNDIIKYKLYEELKSNGFKTLYSDTYISKDKLFSKDFDIEHIIPKARLFDDSLSNKTIEARDVNIAKSNKTAFDFISEKYDQQGIEAYKKKLDILLQDGSISKAKYNRLLMKEADIPSGFIDRDLRDTQYIAKKAYEILSDLVRNVTPTTGAVTSRLREDWQLVDVMKELNFEKYQKLGLVEVIEDRDGRKIKRIKDWTKRNDHRHHAMDALTIAFTKPSYIQYLNNLNARSDKNSSIYGIENKELHREDNKLRFNAPLPINEFRAEARRHLKSILVSVKAKNKVMTQNVNVIKTKHGVIKKVQLTPRGELHNATFYGTKKRPIIKMVKVGAALDEVTIKKVSSSFIREALLDRLHEYNGDAKKAFTGRNSIDKNPIYIDEEHKKTVPALVKTIEWEMYHPTRKLISPDLKIDKVIDKGIREILKTRLAKFNGDAQKAFSNLDENPIYKDEAKKITLKRVSLEGVSSVIPLHTLKDREGKLVVGKDGKPVLGDYVQTSNNHHIAFYMDENGNLQDNVVSFFEAAERKSQGVPVIDKNYNHDKGWNFLFTMKQNEYFVFPNEVTGFNPSEVDLMDEANYSIISPNLYRVQKMSKASGRDYWFRHHLEAMLNDDPKLRNSMFKRITSLKALEGIVKVRINCIGKIVAVGEYD

SEQ ID NO: 392 - protein, 1380 aa, Prevotella intermedia
MKRILGLDLGTTSIGWALVNEAENNNEASSIVRLGVRVNPLTVDEKSNFEKGKAITTNADRQLRHGARINLQRYKLRRQNLHDCLQKQGWLGTEAMYEEGKASTFETYKLRAKAAEEEISLHEFARVLFMLNKKRGYKSNRKANNKEDGQLFDGMTIAKKLYEEHLTPAEYSLQLLNKGKKFTQGYYRSDLNAELERIWDEQKKYYPEILTDEFKQQLEGKTKTNTSKIFLAKYGIYSADLKGLDRKFQPLKWRVEALQQQVDKEVLAFVISDLKGQIANTSGLLGAISDRSKELYFNKQTVGQYLWASLEENPHISIKNKPFYRQDYLDEFEKIWETQAAFHKQLTPELKQEIRDIIIFYQRPLKSKKSLISVCELEQRKVKATIDGKEKEITIGPKVAPKSSPVFQEFRIWQNLNNVLLIDNDTNEKRPLDEVERNLLYKELSIKAKLSKTEALKILNKKGKQWDLNYRELEGNRTQAILFDCYNRIITLTGHEECDFKKIKASEIRHYVSTIFKNLGFSTEILDFDPSLKKHELEKQPMYQLWHLLYSYESDNSRTGNESLLRKLETTFGFPEEYATVLCDVVFEEDYGNLSVKAMREILPYLQAGNDYSQACAYAGYNHSRHSLTKEELDQKVYKERLELLPKNSLRNPVVEKILNQMINVINAIIDEYGKPDEIRIEMARELKSSAADRKKTTHAISQGNAENQRIREILEKEFSLSYISRNDIIKYKLYEELEPNYYKTLYSDTYITKDKLFSKDFDIEHIIPKARLFDDSFSNKTLEARNINLEKSNKTAFDFIKEKYGEDGAEAYKKKLDMLLENDAISRPKYNNLLRAEADIPSDFINRDLRNTQYIAKKACEILGELVKTVTPTTGKITNRLREDWQLVDVMKELNFEKYEKLGLTEIVEDRDGRKIKRIKDWTKRNDHRHHAMDALAIAFTKPSFIQYLNNLNARSNKGDSIYAIENKELHYEEGKLRFNAPIPVNEFRAEAKRHLSAILVSIKAKNKVMTQNVNKIKTKHGIIKKIQLTPRGPLHNETIYGTKMRPIIKMVKVGAALDEATINKVSSPAIREALLKRLNEYSGNAKKAFTGKNTLEKNPIYLNAGRTKTVPSLVKTVEWESFHPTRKLIDKDLNVDKVVDKGIREILKARLEEFNGDAKKAFSNLEENPIYLDEAKKIALKRVSIEGVLSAIPLHTLKNQAGKPITGKDGKPVLGNYVQTSNNHHIAFYYDEDGNLQDNAVSFFEAAERKSQGIPVIDKDYNRDKGWRFLFTMKQNEYFVFPNEATGFIPSEVDLTDEANYGIISPNLYRVQKVSRIDKGTSASRDYWFRHHLETILNDDAKLKNLAFKRIRGLLELKDIIKVRINSTGKIVAVGEYD

SEQ ID NO: 393 - protein, 1425 aa, Prevotella micans
  Prevotella micans F0438
MIQKIFGLDLGTNSIGSSVRNLELGENLTEQLEFFSSDIFGSSVSKNSNGREYSLAGNRSAHRRSRGLNEARRRKLWATLDLLIEHGLCPMSPDSLMQWRTYDKQKGLYRQYPIEDKDFNAWIMLDFNGDGKPDYSSPYQLRRELVVRQFDFDQPIERYKLGRALYHIAQHRGFKSSKGETIADQEKNEKKPIAEEGADIANEMKASETKLSKGLVAYMQENHLKTVGEAFAKLEDERVRIRNNESYRAIRSQYQDEIKEIFTYQKKLSVESELYERLTSEKKGVGTIFYKRPLRSQRGNVGKCTLERNKPRCPIGRPEFEEFRAWTLINNIKIRETAGEPYKQLPIKLRQELLKDCFLSKVKADFKFEDIRKYIEKRLGLSFSNDDKTINYKDSVSIAACPVTVRMKKLLGENWANCRIDGEKRRQAHGKNNNNEHIVSYTEEDIWHVCYNAEDPEEVSNFARKALHWDENKIKELVRLWTSIPQGYAMLSLKAIRNINRMLLLGLKYSDAVLLAKLPDIVPVSDEDILAITKEFLQLEDKLNQEKQINNIVNSLIANYKSKLEENRFADHNYQYQLGEGDDEDINTQIKSHIGAKLWVQIGADEQTKIFQAVRSKYQDFFKSYKRKFVESPKLGELLVAFLTEKFPNVKSKQWERLYHPSQIAIYRPIPVDNDRSKLRLGNPNIGAIKNPTVMRVLNTLRRRVNQLLDDGVISPDETRVVVETARELNDANTKWALDRYNRIRRDENEKIRKILKELNPTTNSISEQDIDKARYIFEQCETDFYTDGKVPYYNKDIKKYKLWLEQGGQCLYTGQTINLTNLFNPNAFDMEHTIPKSISFDNSDQNLTLCESYYNRFIKKNNIPTDMPNYDKDVTINGKEYTAIKPRLQRWKERVDRLSRNVDFWKGQARRAQDKDRKDECIREKHLWDMELAYWKGKLERFTMTDVTDGFKNSQLVDTRVITRHAVLYLKSIFNHVEVQRGETTAEFRKILGLQSIDEKKDRSLHSHHAIDATMLTVIPSAAKRDRMLELFYKIEETKKALKNYNDNNKTGLNLELKGLEEKLDKEKKDCRVGRRVNDLDRFINENIIVSHHTKDQALTPAHRRLRKRGKIVGGKEHPRWQTGDSLRGEIHKASYYGAITQFAKDANGKVLMKDGQAQIDPTIYYVIRRELKYKRSTQDSGFTNWEDLEKVIVDTDLFGLMKGQFPEGTSFKDACEQGFYMIKKGKNGEGDVKTHRIRHVRCKAVKTALRIKEQTYKSSKDYKQFFYAAVGDLYVMCYYTDGKKRDFKIYSLYDISNHRKSGTEDIPKFITDKKGNHLPLDYKLRTGDMVLLYKDNPEELKDLDQVNLKRRLYKVNRFESEGLIILLTHHLSTTTERGCSIGKIENYQNLPTAIRCGIKTIKFLIMGKHRDFVIRNGNIEFKH

SEQ ID NO: 394 - protein, 1506 aa, Prevotella nigrescens
  Prevotella nigrescens ATCC 33563
MKTILGLDLGPNSIGWAKVEVDDEGNYLRNIKLGSRIIPMTQDMLGDFDKGVKVSQTAIRTDFRGNRRLIERHLLRRERLHRVLHALKFLPKHYEDAIGWDRNEPATYGKFVNNSEPKLAWERQEDGSMRFLFMESFNEMVADFAQNQPSLVSDGKKIPLDWTIYYLRKKALTRPIKKEELAWILLNFNQKRGYYQLRGEEEEDNLTKRKEYYKLKVVGVEADGAPKGGKTWYNIHLENGWTARCQSKIPLDDWVGKVKEYIVTTEYEDDGKTPKCDKEGKVKRSFKSPEKDDWQLIKTRTEKFIDDSNKTVGAFIYDYLLEKPFDKIRGKYIRTIERKYYKNELREILREQTKYHEGLHSLEALKICAEELYKNNQQHQEYLLKKDMTFLLLNDLIFYQRPLKSKKSLIADCPYEVYKYDDKLTGKKGQKKIKCIAKSNPYYQEFRLWQFIANLRLFSVTDGKEVTAEYLKTEEDYVRLFSFLNDRKDIKQETFLRSFLKLKKESIGSEKIYPIRWNYIEDANKSYPCNATRHELLLAFDRADIPRELLDVEEREYRLWHLLYSIEAKEETESALRKLKANKAFGDLNIDDAFVNSFLKIKPFEKEYGAYSEKAIKKLLAVMRRGSLWKEADICEATKQNIAKILQNDIDEKLKKKIEAAVSSFNKLSDFQGLPTWLACYVVYGRHSEAAQIQCWQSPEDLKTYINKFKQHSLRNPIVEQCLLETLRTVYDIWKDAGQIDEIHIELGRNMKSTAEQRARKTKDILRNENTNLRIKNLLVELKNDDKIENVRPYSPSQQEILRIYEEGALQELSKEDEMFEDISKISKMAQPSPTELSRYKLWLEQKYRSPYTGRVIPLSKLFTTAYQIEHIIPQSRYFDDSFNNKVICESEVNSLKDNMLGYEFIKECGGRIVHCTLLGDVKIFTKEEYKDFVTKHYIDNTYKRDKLLLEDIPQEFSARQLNDSRYISKMVQTVLSNIVRAENEQEATSKFVVSCNGAITNRLKKDWGLNDVWSSIVCPRFKRLNEITKTNAFGHWEDKAGKHVFQTTVPLELQRGFSKKRIDHRHHAMDALVIACASRNIVNYLNNESANSPEKREDLRKKLCDEKRKIRKPWKTFTQDAREALSDVVVSFKNYVRVINKATNYYEHYSSSGNKVMISQKGNDMWAIRKPLHKESVFGRVNLCRKVIVSLKKALENIPAICDKTLRDYINALVEKHFNTRQLLAHFKSINYRLNRQCVEKVEVWQFSDEKIEMVARRKSLDTSFDDKQISSITDTGIQKILLNYLQTKDGNAEIAFTPEGIEEMNKNISLYNDGKAHQPILKVRVATPKGMKYPVGQTGNKATKFVVAEKGTNLYFAIYENELGVRSYDTIPLNIVVERLKEGLSPVPQANEADIPLKFYLSPNDLVYVPTKENEDELCRDRIYKFVDSSGTTANFVPHTSANTIYNVDKEYAEKCCNGAVFLNEYGLGSPQSKNQRALTGEMIKEICWKLKVDRLGNIIKVIK

SEQ ID NO: 395 - protein, 1380 aa, Prevotella nigrescens
  Prevotella nigrescens F0103
MKRILGLDLGTTSIGWALVNEAESNNEASSIVRLGVRVNPLTVDEKSNFEKGKAITTNADRQLRHGARINLQRYKLRRQNLHDCLQKQGWLGTEAMYEEGKASTFETYKLRAKAAEEEISLHEFARVLFMLNKKRGYKSNRKANNKEDGQLFDGMTIAKKLYEEHLTPAEYSLQLLNKGKKFTQGYYRSDLNAELERIWDEQKKYYPEILTDEFKQQLEGKTKTNTSKIFLAKYGIYSADLKGLDRKLQPLKWRVEALKQQVDKEVLAFVISDLKGQIANTSGLLGAISDRSKELYFNKQTVGQYLWASLEENPHISIKNKPFYRQDYLDEFEKIWETQATFHKQLTPELKQEIRDIIIFYQRPLKSKKSLISVCELEQRKVKATIDGKEKEITIGPKVAPKSSPVFQEFRIWQNLNNVLLIDNDTNEKRPLDEDERYLLYKELSIKAKLSKTEALKILNKKGKQWDLNYKELEGNRTQAILFDCYNRIITLTGHEECDFKKIKASEIRHYVSTIFKNLGFSTEILDFDPSLEKHELEKQPMYQLWHLLYSYESDNSRTGNESLLRKLETTFGFPEEYATVLCDVVFEEDYGNLSVKAMRKILPYLQAGNDYSQACAYAGYNHSRHSLTKEELDQKVYKERLELLPKNSLRNPVVEKILNQMINVINAIIDEYGKPDEIRIEMARELKSSAADRKKTTHAINQGNDENQCIREILEKEFALSYISRNDIIKYKLYEELKPNGFKTLYSDTYIPKDKLFSKDFDIEHIIPKARLFDDSYSNKTLEARDINLAKSNKTAFDFVKEKYGEQGAEAYKKKLDMLLGNNVISKPKYNKLLMTEADIPSDFINRDLRNTQYIARKACEILGELVRTVTPTTGKITNRLREDWQLVDVMKELNFEKYEKLGLTEIVEDRDGRKIKRIKDWTKRNDHRHHAMDALAIAFTKPSYIQYLNNLNARSNKGDSIYAIENKELHYEEGKLRFNAPIPVNVFRAEAKRHLSAILVSIKAKNKVMTQNVNKIKTKHGIIKKIQLTPRGPLHNETIYGTKMRPIIKKVKVGAALDEATINKVSSPAIREVLLKRLNEYSGNAKKAFTGKNTLDKNPIYLNAERTKTVPASVKTVEWENYHPIRKPITPDLKVDKVIDKGIGEILKARLEEFNGDAKKAFSNLEENPIYLDQTKKIALKRVSIEGVLSTIPLHTLKNQAGKPIMGKDGKPVLGNYVQTSNNHHIAFYYDEDGNLQDNAVSFFEAAERKSQGISVIDKDYNRDKGWRFLFTMKQNEYFVFPNEATGFIPSEVDLTDEANYGIISPNLYRVQKMSRIEKGTSVSRDYWFRHHLETILNDDSRLKNSAFKRINSLKPLEGIIKVRINSIGKIVAVGEYD

SEQ ID NO: 396 - protein, 1391 aa, Prevotella oralis
  Prevotella oralis ATCC 33269
MKKILGLDLGTTSIGWALVNEKENNEELSSIIRLGVRVNPLTVDEKSNFEKGKDITTNADRTKCRSARRNLQRFKLRREALADCLKRHGLMTDETPLCETNNSIIFKTYSNRAKAVCEKIALDDFVRVLFMINKKRGYKSSRKLNTDDEGTLVDGMDVAKLLYNEQITPGEYLLRLFKKGKKTRPDFYLSDLKAELERIWDFQRTFYPEILCNALKEDLKGKSRTQSSAIFYAKYKVSTAKIAGKDKRLQELTWRTDALRKQLTIDEVAYVICSINGEVNGSSQRLSMISDRSKLLYFNHQTIGQYLMQRLEENPNAGLKNIIFYRQDYEDEFNDIWNSQATYHKELTPELKKEVKDIIFYQRGLKSCKWLINYCELEHEEIEVKTPEGKLRKITIGSKTCPKSSPLFQEFKIWQVLNNLQVSPLNSRRKAKRKKDEEPSLFSDEDMNTACRYLNEEEKLTLFKELSIKKELKKKDALKLLFENYKELDLNYKVISGNVTMANLYRAFQDIISLTGNGEFDFQAMPAEEAEKTVEEIFGGLGYKTAFLHFDASLHDKEFERQPAYRLWHLLYSYAGDQSKTGIEALVKRIQELCGFEPEYARILANISFIPDYGNLSSKAMRKILPYMQDGYEYSEACSKAGYRHSASSLTKEEINKKNYKTHLDEIKRNSLRNPIVEKILNQMVNVVNSVIDTYSNIDEIRIEMARELKKSKPEREDMSFAISKATKETERIKGILEQEFKIQHVTRNDIIRYRLYEELKPNGYKTLYSNTYIPREDLFSKKFDIEHIIPKARLFDDSYSNKTLELRDINIEKGNQTAYDFVLSKYGEEGLYKYEQRVEEFKKNNEQAGTKCRKLLMREADIPSDFLNRDLNDSQYIAKKAHELLREIVPTVTATTGSITNRLREDWKLVNVMKELNWEKYDKLGLTEEYKDKDGNTVRHIKDWTKRNDHRHHAMDALTIAFTKPSFIQYLNNLNARSNRGGSIYGIEQKELERENNKLVFIPPIDPKIFRKQAKEHLSNILISIKAKNKVVTKNVNKTKSKSGTNRKVQLTPRGQLHLETVYGKIRTYKTEEIKVGTKLTEELIAKVADKKIREALMQRLSEYGGNIKKAFQNISKHPIWLNGSHTKHVPEKVKIVFFEDVFTIRKAITPDIKIDKVIDSKIRRILQERLNEFGGEASKAFSNLDENPIWFNRDKGIAIKSVKIRGIAKGTAIRVKKDIHGKTIIGNNGYPVANDYVNTGNNHHVAIFRDKDGNLQEHIVSFYEATARAIQNLPIVDRNYNSEKDWKFLFSMKQNEYFVFPNPNTGFNPSEISLKDEKNYALISPNLFRVQKLSHYYYVFRHHLETNVDTNLQLKDITWKRITAVNNLTGAVKVRIDHLGRIVDVGEYK

SEQ ID NO: 397 - protein, 1204 aa, Prevotella ruminicola
MERILGIDTGTNSLGWAIVDKDENQYHLVAKGTNIFSEGVKIEKGIESSKAAERTEHRSVRKHYWRRKIRKIRLLTILSDNDLCPRLKHEQLRQWRLKKVYPTDDTFMEWQRTEDKAQVNPYKFRYICLTQKLDLSDITQRFILGRALYHLNQRRGFLSNRKEATKESEGTVKEGISSLSKDMKDSGCEYLGEYFYQLYQQGKKIRNHYTARKEHYLKEFKAICSKQELDDALIEKLEKAIFDQRPLKSQKGQVGTCTFEKGKSRCPSSHPLYEDFRMYSFINNIKVQVDTLYDKGERSLTDEEKQLIIPLFKRKSKRTFPFEDIAKKIAGKNNYCYIKSNEEKAYKFNYQMDTQVSGSPVNAQLEEIFGEDWLSSVCEVYTLANNKSRFQIMNDVWHVLFFYDDEDKLKEFAKDRLQLDDELAEKFSKISIPNDYAALSLKAIRKIMPYLRDYGLIYSEAVFLANLVDVLPQHVWGIKEMREAAIENVIDVMHSYDKNNIDGITLEGCVKTFLKERYQVSDDNLKKLYHPSMLDPYPRQRPNDEGVFQLGSPRISSVKNPMAMHSLFRLRKVVNLMLKKGYITPDTKVHIEFSRDLNDANKRWAIQTWQRENEKERERCRKEIEKYIASPSDTDILKYQLWEEQNHKCLYTGDEIRITDFLGDNPKYDIEHTIPRSAGGDSTKMNLTLCSSRFNRDEKKTKLPAELVNHDEILERISNWKEKYEDIDKQIRKISTKGATSKEDKDSKIRRRHYLILQRDYWRGKYQRFTMTEVPEGFSRRQGTDISVISRYARMYLKSVFKQVYIVKGIATSDFRKMWGIQDEYAKKERVNHVHHCIDAITIACIGKAEYDKLADYRHQYDDYLFQGKTKPTFDKPWPSFVIDIKHIQDELLIAHYAKDNLEKFTKKNLRGKDGRIIRDKFGNKLQMKGDTSRNSLHNDKFYGAINHEGEIKYVYRTNIEALDAKSIGNIVDPTVRSIIESAIAIHGSLKAAINKGIWMNEEKHIPIKKVRVFRNDVKKPIELKDQRDLSDKDYKQHYYVTNDGNYMMLIFSKLNNKGREIRQHVVINSLEATEVIKSHKRSQVGKVVWESYYSKEGFDLIYKLKSGTMILLYENNRDEVWDLDIRNLQKRLYIITKMKYDGRIYMMHHQEAREKKDLEEKSGSFKINEDYRPLIVNSYNQFNALVQDLDFEINDLGEIRRLI

SEQ ID NO: 398 - protein, 1424 aa, Prevotella sp.
  Prevotella sp. C561
MTQKVLGLDLGTNSIGSAVRNLDLSDDLQWQLEFFSSDIFRSSVNKESNGREYSLAAQRSAHRRSRGLNEVRRRRLWATLNLLIKHGFCPMSSESLMRWCTYDKRKGLFREYPIDDKDFNAWILLDFNGDGRPDYSSPYQLRRELVTRQFDFEQPIERYKLGRALYHIAQHRGFKSSKGETLSQQETNSKPSSTDEIPDVAGAMKASEEKLSKGLSTYMKEHNLLTVGAAFAQLEDEGVRVRNNNDYRAIRSQFQHEIETIFKFQQGLSVESELYERLISEKKNVGTIFYKRPLRSQRGNVGKCTLERSKPRCAIGHPLFEKFRAWTLINNIKVRMSVDTLDEQLPMKLRLDLYNECFLAFVRTEFKFEDIRKYLEKRLGIHFSYNDKTINYKDSTSVAGCPITARFRKMLGEEWESFRVEGQKERQAHSKNNISFHRVSYSIEDIWHFCYDAEEPEAVLAFAQETLRLERKKAEELVRIWSAMPQGYAMLSQKAIRNINKILMLGLKYSDAVILAKVPELVDVSDEELLSIAKDYYLVEAQVNYDKRINSIVNGLIAKYKSVSEEYRFADHNYEYLLDESDEKDIIRQIENSLGARRWSLMDANEQTDILQKVRDRYQDFFRSHERKFVESPKLGESFENYLTKKFPMVEREQWKKLYHPSQITIYRPVSVGKDRSVLRLGNPDIGAIKNPTVLRVLNTLRRRVNQLLDDGVISPDETRVVVETARELNDANRKWALDTYNRIRHDENEKIKKILEEFYPKRDGISTDDIDKARYVIDQREVDYFTGSKTYNKDIKKYKFWLEQGGQCMYTGRTINLSNLFDPNAFDIEHTIPESLSFDSSDMNLTLCDAHYNRFIKKNHIPTDMPNYDKAITIDGKEYPAITSQLQRWVERVERLNRNVEYWKGQARRAQNKDRKDQCMREMHLWKMELEYWKKKLERFTVTEVTDGFKNSQLVDTRVITRHAVLYLKSIFPHVDVQRGDVTAKFRKILGIQSVDEKKDRSLHSHHAIDATTLTIIPVSAKRDRMLELFAKIEEINKMLSFSGSEDRTGLIQELEGLKNKLQMEVKVCRIGHNVSEIGTFINDNIIVNHHIKNQALTPVRRRLRKKGYIVGGVDNPRWQTGDALRGEIHKASYYGAITQFAKDDEGKVLMKEGRPQVNPTIKFVIRRELKYKKSAADSGFASWDDLGKAIVDKELFALMKGQFPAETSFKDACEQGIYMIKKGKNGMPDIKLHHIRHVRCEAPQSGLKIKEQTYKSEKEYKRYFYAAVGDLYAMCCYTNGKIREFRIYSLYDVSCHRKSDIEDIPEFITDKKGNRLMLDYKLRTGDMILLYKDNPAELYDLDNVNLSRRLYKINRFESQSNLVLMTHHLSTSKERGRSLGKTVDYQNLPESIRSSVKSLNFLIMGENRDFVIKNGKIIFNHR

SEQ ID NO: 399 - protein, 1483 aa, Prevotella sp.
  Prevotella sp. MSX73
MKTILGLDLGTNSIGWAKVSVDDYGNYLHDIKLGSRIIPMSQDVLGNFDSGVTVSQTAQRTEFRSKRRLVQRNLQRRERLHRVLHVLDFLPAHYDAAIGWDRTEAVTYGKFLNHAEPKLAWEELGNGKRRFLFMDSFHEMVADFARCQPALVADGKKIPLDWTIYYLRKKALTQAITKEELAWILLNFNQKRGYYQLRGEEEEENPTKQEEYYELKVVSVEATDSRKGNDTWYNVHLENGWIYRRSSKISLDDWVGKVKQFIVTTEYEKDGTTLKTDKEGNVKRSFRAPNENDWGLRKKRTETLLEMSGKTVGAFIYDHLLQEPADKIRGNFIRTIERHYYKAELEAILAEQCKYHIELRDKEMLEACARELYLNNLPHQRSLMKKDMTYLLLYDLIFYQRPLKSKKALIANCPYEYYEYVDKETGEIKRQNIKCIAKSNPYFQEFRLWQFVLNLRLFDRVEDKEVTANYLPTADDHARLFTYLNDRKEINQETLLKDYFKLKKVKIGNEKEYPIRWNYIEDKEKKYPCNETRYELLMALDRAGIEHKWLDDNNLEYRLWHLLYSVEVKSESETALRKLKNDDAFVNSFLKVKPFKKEYGAYSEKAIKRLLAVMRKGFLWNEQDICDETRKRIEIIIKGDVDEKVKERMGHAAYSFDRVSDFQGLPEWLACYVVYGRHSEAMDIQRWDSPERLMAYINNFKQYSLRNPIVEQCILETLRTVHDIWKETGQIDEIHVELGREMKSTSEERARRTQNVLRNENTNLRIKSLLIELKNDTDICNVHPYSPMQQEILRIYEEGALQELNREDEDFEEISKISQMSQPSGKELNRYKLWLEQKYRSPYTGKAISLAKLFTPAYQIEHVIPQSRYFDDSFTNKVICEAEVNTLKSNLLGYEFIKKHGGEIIHCTTLGDVRIFSESEYKAFVMDHYANNKSKKDKLLMEDIPQEFLSRQMNDSRYISKVVKTLLSNIVRMADESEATSKSVIVCTGGVTDRLKKDWGLNDVWNSIVYSRFERLNRLTGTEAFGHWENKDGKRVFQTSMPLELQRGFRKKRIDHRHHAMDALVIACASRNIVNYLNNESANNPKKREDLRRQLCDKNRVIRKPWETFTQDAYNALENVVVSFKNYVRVINKATNRYEHYDENGKKRFVQQKGSELWAIRKPMHKETYYGHVNLRRKELVTLQKALDDIPSICDKKLRDYISALVEKHFNKRQLLAHFKSTDYYWQKQYVNKVYVWTFSDDIKPLVATRKLLDTSFDAKRIGTITDTGIQKILRNYLEAKGGNATLAFTPEGIVEMNQNISKYNDGKPHQPILKVRITEPMGAKYRVGQTENKMAKYVEAQSGTNLYFAIYEDSEGKRSYTTVPLDEVAERLKQRLSPVPEKDENDVPLKFYLSPNDLVYVPTEEELQLRECKLNKDRIYKMVSSTGSECHFIPYYVANVIYNKVEFEAKNKIGRALTGEMIKAVCWKLEIDRLGNILKVIK

SEQ ID NO: 400 - protein, 1375 aa, Prevotella sp.
  Prevotella sp. oral taxon 306 str. F0472
MKKILGLDLGTTSIGWALVNESENKDEQSSIVRLGVRVIPLTVDEKGNFEKGKAITTNADRQQVHAARINLQRYKLRRENLRDCLQKQGWIGSEPMCEDGKSSTFETYKLRAKAAVEEVSLHEFARVLFMLNKKRGYKSNRKANDKEEGKLFDGMTIAKKLYEEHLTPAEYSLQLLNTGRKFTPEYYRSDLIEEFEKIWNEQQKYYPEILTDEFKQQLEGKAKSNTSKLFLGKYGIYSADTKGLDRRLQPLKWRVEAMKQQVDKDVLAFVISDLKGQIANTSGLLGAISDRSKELYFSKQTIGQYLWASLQENPHISIKNQPFYRQDYLDEFEKIWETQATYHKELTSELKQEIRDIIIFYQRPLKSKKNLIAVCELEQRKVKVTVDGKEKEITIGPKIAPKSSPMFQEFRIWQNLNNILLLDHETNSKRPLYEEERNLLYEELSVKEKLSKTEALKVLGKKSKQWDLNYKELEGNRTQAVLYDCYNRIIVMSGHEECNFKKLKASDIRHYVKMIFKNLAFNTDILCFDSSLKGHELERQPMCQLWHLLYSYEGDNSRTGNDALLRKLETSFGFPKEYAAVLADVIFEDSYGNLSVKAMRNILPHLQAGKDYSQACEEAGYKHSRRSLTKEELNQKVYKEKLELLPKNSLHNPVVEKILNQMVNVINAVIEEYGKPDEIRIELARDLKIGAAERENMTRSINQGNAENKRIREILEKEFALSYLSRNDIIKYKLYEELKSNGFKTLYSDTYISKDKLFSKDFDIEHIIPKARLFDDSLSNKTIEARDVNIAKSNKTAFDFILERYGEQGVKTYKTKLLRLLEDGAISNKKYNNLLKTEADIPSGFIDRDLRNTQYIAKKAYEILSELVKIVTPTTGSVTNRLREDWQLVDVMKELNFEKYQKLGLADVIEDRDGRKVKRIKDWTKRNDHRHHAMDALTIAFTKPSYIQYLNNLNARSDKSSSIYGIEVKELHREEGKFRFNAPLPINEFRAEAKRHLKSVLVSIKAKKKVMTQNVNKIKTKHGIIKKVQLTPRGELHNATYYGTKKRPLVRMVKVGAALDEATIKRVCSPAIRAALLKRLNAYNGDAKEAFTGRNSIDKNPIYLDIEQTKLVPVLVKTIEWGMYHPIRKRITPDLKIDKVIDKGIREKLKARLAEFNGDAQKAFSNLDENPIYMDEAKRITLKRVSIEGVLSAIPLHTLKDKAGKPVIGSDGKPVFGDYVQTSNNHHIAFYIDDKGNLQDNPVSFFEAAERKSQGVPVIDRRYNCDKGWHFVFTMKQNEYFVFPNEATGFIPSEVDLLDEANYCIISPNLYRVQKLSKASGRDYWFRHHLETMLNDDLRLKNSTFKRIQSLKGLEDIVKVRINSIGKIVAVGKYD

SEQ ID NO: 401 - protein, 1216 aa, Prevotella stercorea
  Prevotella stercorea DSM 18206
MTKILGIDTGTNSLGWAIVDKTADNYNLLDKGVNIFQEGVKIEKGIESSKAAERTEHRATRVRYYRIKLRKIRLLRILSDNHLCPPLSQEELSTWRLKKVYPKNELFMQWQRTDDDTEKTPYAYRHKCIHEKLDLSDVTDRYILGRAFYHIIQRRGFLSNRKEQGGEDSGKVKEGISTLTHEMNEAGYEYLGDYFYALYNKGEKIRKHYTARNEHFLSEFKAICEKQDLEKELGSEVVRNIEKAIFDQRPLKSQKGQVGKCVFEKNKTKCPSSHPMYEEFRMLTFINNIKIKTPNDDVLRPLNTGEREKIMPLFFRKSKKQFDFEDITKKLAPKKMYGFYKKEEDAEMPFLFNYPMDTSVSGCPVTAALKDVFGDDWITAICETYTLGEGKSRFDIVNDIWHALYFYSDKDKLAEFAINRLQLSEDEAKIFSEISLPADYASLSLKAICKILPYLRRGLIYSHAVFLGNLCEVMPKYEWSIKEMRETIIDNIIMEMDKCDTKDKRTFEVCIKDYLKGQYNVSDNSLKKLYHPSMIETYPRVQYTNEHGVYQLGSPRIDSVRNPMAMRSMFRLRKLVNRLLVEGKIDQNTEVHIEFARELNDANKRNAIALFVKENQSANDEARKQIITLFKKETGTDIEPTDKDILKYVLWEEQNHICLYTGKQIRISDFIGANPKFDIEHTIPRSVGGDSTKMNLTLCDSRFNREVKKTKLPVELPNHDEIMERIKEWKKNYELLDIQIRKNKKLSKGATTKEQKDTIIRKRHLLELRRDYWRGKYERFTMESVPEGFSRRQGTDISVISKYARLYLKSLFNRVYTVKGIATSDFRKIWGIQDIYSKKERINHVHHCIDAIVIACIGLDEYNKLGAYYHDEENNKWYGMSKASFKKPWATFVEDIKKIQDEILVYHYTPDNMPKQGRRRIKIDGKKILCKGDAARGSLHNDTYYGAIENDGAVKYVKRIDLASLEEKDVKNIVDDTVRSIIEAAIKEKGFKDAMASTIWMNEEKRVPIKKVRCFTPSITKPLNIRKQRDVSIKEYKQQYHVANDSNYLLALYIGTDNKGKEKREFEIVNILQAAQYYRTSNDKEVVDRHIVPIKSEHDYPFAYTLKIGTMVLLYEKSPNEVWDATIKERNRRLYKVTGLSTMRMKGRNGEYAYATVKLIHNEEARPSKDIKAKNGEYEQGEEFRPAIIMLHTQLNALVQGYDFEINELGEIRRLR

SEQ ID NO: 402 - protein, 1234 aa, Prevotella tannerae
  Prevotella tannerae ATCC 51259
MPNFWSIFTENLQTYLMKTRILGLDTGTNSLGWAVVDRDENNQYTPICRGDLIFTEGVKQEKGIEFSLAAERTSYRASRRHYFRRRLRKVEVLKVLVKHKLCPPLSDEALNRWHTKKEYPLDEDFILWQRTNEADNKNPYHDRHICLHRKLNLKDSQTDRYTLGRALYHLTQRRGFLSNRLDQNEEAEETGKVKSAISELSKEMKEAGCEFLGDYFYLLYRTEGNRVRIRSRYTDREKHYLQEFKEICRVQELDEDLAKALEKTIFFQRPLKSQRQGVGKCTMEKGHSRCAVSHPLYEEYRLLCYLNNIRIKTPSDDRLRPLNAEEREKITPLFYKEKNFDFEKIAKKLAGKTPFGWIRDAEDWPYQFNYRMTQEAPACPTTAQLIKVFGEDWKAALAETYTMSAKQDGTLKTEDEICTDIWNVLYSFSSKEKLKEFGLKKLQLDEVQAKAFSEIRLTRDFASLSLKAIRKILFFLRTGEDYSKAIFLANIPTIVGEEIWNDIERRSRLLYKVDLALRPQEERDAEEHRTIAERIKAAVAAEVPDAPIDLLYHPSMIEAYPDAKRNERFDCYQLGSPKTNAVRNPMAMRSLHMVRKVINHLLRKHIIDEKTEIHIEYARELNDANKRQAIADWQRELSKRHTAYAQNIRQLYKAETGLVIEPTKADILKYQLWEEQQHVCLYTGKKIGIADFLGANPKFDIEHTIPRSRGGDSTQENLTLCESKFNRDIKRDKLPTELANYEEILARIEHWKKQCYALKLKRDGIRTHSGLEKSIKDSRIRRRHLVGLEYGYLKGKYDRFTMKEVPEGFSRRQGAGIGLISKYAGLFLKSLFKDPKNPNRSNVYVVKGAITAEFRKLWGLQQADEAKSRENHTHHCIDAYTIACIGPCEYAALAAYYRSDEEFKYGRRREKPQFEKPWPTFTEDLLKLQEELLIVHQTTDKLGKRDRRKVKTPRGKFLTGGDSARGRLHQETYYGAINYDGNIKYVVRKPLDSLTEKDLDKIVDETVMGIVKGAVEAKGSLKEALADGIYMNKEKGILIKRVRIFSDVSEPINLKQLRDVSTKEYKRHIHLRKDENYLFAIYEGIDKKKNKKQTETATVDYLDAAKFYKDSKRRDKANSLVGDYSKKNKLPLKCILKKRQMVLFYEHSPEEIRFKDKKDLSRRLYIVTSIAKDGRVKFLHHQAATATGIQSSPSPFTNDGEHQPYYRLSASNIKVLVAGIDFDINILGEITPKL

SEQ ID NO: 403 - protein, 1487 aa, Prevotella timonensis
  Prevotella timonensis CRIS 5C-B1
MKNILGLDLGSNSVGWALVKVEENGNPIGSIKMGSRIIPMSQDILGSFEKGDTVSQTAQRTLYRGKRRLIERHVLRRERLCRVLHIMNFLPAHFDRLLGWDKTDNKTYGKFIDDSEPKLAWRQNKNEMGKMEFVFMDSFHEMLSDFAKHQPQLIANGKKVPLDWTIYYLRKKALTQLISKEELAWILLNFNKKRGYYQLRGEEEEEQPTKKEEYKVLKVISVDADEGQKGNGIWYNIHLEDGGIYKKKSDIPLYDWVGKTLQLIVVTTYEKDGKTPKIFDSGKQNPSYRLPKEDDWGLVKKRTESQLQSSGKTVGAFIYDNILSKPDDKIRGNLVRTIERKYYKKELIEILQQQAKYHDELHNQNLLESCAKELYAHNDVHYNEVIKSNMINLLVNDIIFYQRPLKSKKSLIANCKYESYEYVDKETGEIKEMPIKCIAKSNPYYQEFRLWQFIHNLRLSDVVTREDVTAQYLSTPQDYCNLFTYLNDRKEIKQDILLKDFFKIKKVQIDKEKVFPIEWNYIKDATKSYPCNETRYELLSALKRAGMDKQWLDDTPNMQYRLWHLLYSVEEKEESAKALRKLYDDDKFVTSFLKIKPFNKCYGAYSEKAIKRLLTLMRMGKAWNEQAIDAKTLKCIQQIITDNVDSKLKEKIDDSRYVLHHVSDFQGLPTYLASYVIYGRHSEVTDIQCWDSPEDLLKFIRDFKQHSLRNPIVEQVILETLRVVYDIWKAEKHIDEIHVEVAREMKLTAQQRNEANLRNLNNEATNLRIKYLLEELKNDTFIKDVRPLSPIHQEKMRIYEQAVLGNLNKQDKDYDDIIKISKKEHPTNAELIRYKLWLEQRYCSPYTGKAISLSKLFTTAYEIEHIIPQSRYFDNSFNNKVICEAEVNKAKGNMLGYEFIKKQGGQKIYCTQLGKAVTILKEEAYKQFVNEHYAHNKRKRDNLLAENIPESFSSRQLNDTRYITKTIMSLLSNVVRQQSEEEATAKNLLPSSGSVTDRLKNDWGLKDVWNTIVTPRFERLNKLSGTNDFGEMKEENGNRYFQTNVPLEYEKGFKKKRIDHRHHAMDALVIACTTRNMVNYISNANANSPKQREDLRQLLCDKNRIINKPWDTFTQDALKALNDIVVSFKNNVRIINRATNRYQRYDKNGKKIIFSQKGDDMWAIRKSMHKETVFGRVNLIRKEVLPIAKALDNISAICNAQLRAYVNDLVDKHFNKKQLVAHFKSLNYKWNRQDVSKVEVWISSDNKTPMVAVRKPLDTSFDKKKIASITDTGIQTILLNYLESKGGDASVAFAPEGIQEMNSNIELYNNGKAHKPIKNVRLSEPLGAKYQVGERGAKTKKYVEADKGTNLFFAIYEDEEGKRYYYSVPLREAIERQKQKLSPVPEYNEKGVALKFYLSPNDLVYVPTEEERTMGTCHIDKARIYKMVSSTGCSCYFVPSTFAKVIVDKVELQSLNKMEKAITDECIKEVCWKLKVDRLGNIINVIK

SEQ ID NO: 404 - protein, 1218 aa, Prevotella timonensis
  Prevotella timonensis CRIS 5C-B1
MNKRILGLDTGTNSLGWAVVDWDEHAQSYELIKYGDVIFQEGVKIEKGIESSKAAERSGYKAIRKQYFRRRLRKIQVLKVLVKYHLCPYLSDDDLRQWHLQKQYPKSDELMLWQRTSDEEGKNPYYDRHRCLHEKLDLTVEADRYTLGRALYHLTQRRGFLSNRLDTSADNKEDGVVKSGISQLSTEMEEAGCEYLGDYFYKLYDAQGNKVRIRQRYTDRNKHYQHEFDAICEKQELSSELIEDLQRAIFFQLPLKSQRHGVGRCTFERGKPRCADSHPDYEEFRMLCFVNNIQVKGPHDLELRPLTYEEREKIEPLFFRKSKPNFDFEDIAKALAGKKNYAWIHDKEERAYKFNYRMTQGVPGCPTIAQLKSIFGDDWKTGIAETYTLIQKKNGSKSLQEMVDDVWNVLYSFSSVEKLKEFAHHKLQLDEESAEKFAKIKLSHSFAALSLKAIRKFLPFLRKGMYYTHASFFANIPTIVGKEIWNKEQNRKYIMENVGELVFNYQPKHREVQGTIEMLIKDFLANNFELPAGATDKLYHPSMIETYPNAQRNEFGILQLGSPRTNAIRNPMAMRSLHILRRVVNQLLKESIIDENTEVHVEYARELNDANKRRAIADRQKEQDKQHKKYGDEIRKLYKEETGKDIEPTQTDVLKFQLWEEQNHHCLYTGEQIGITDFIGSNPKFDIEHTIPQSVGGDSTQMNLTLCDNRFNREVKKAKLPTELANHEEILTRIEPWKNKYEQLVKERDKQRTFAGMDKAVKDIRIQKRHKLQMEIDYWRGKYERFTMTEVPEGFSRRQGTGIGLISRYAGLYLKSLFHQADSRNKSNVYVVKGVATAEFRKMWGLQSEYEKKCRDNHSHHCMDAITIACIGKREYDLMAEYYRMEETFKQGRGSKPKFSKPWATFTEDVLNIYKNLLVVHDTPNNMPKHTKKYVQTSIGKVLAQGDTARGSLHLDTYYGAIERDGEIRYVVRRPLSSFTKPEELENIVDETVKRTIKEAIADKNFKQAIAEPIYMNEEKGILIKKVRCFAKSVKQPINIRQHRDLSKKEYKQQYHVMNENNYLLAIYEGLVKNKVVREFEIVSYIEAAKYYKRSQDRNIFSSIVPTHSTKYGLPLKTKLLMGQLVLMFEENPDEIQVDNTKDLVKRLYKVVGIEKDGRIKFKYHQEARKEGLPIFSTPYKNNDDYAPIFRQSINNINILVDGIDFTIDILGKVTLKE

SEQ ID NO: 405 - protein, 1496 aa, Prevotella veroralis
  Prevotella veroralis F0319
MKTILGLDLGTNSIGWAKVCVDDNGNYLRDIKLGSRIIPMSQDVLGNFDKGVTESQTSVRTGFRGVRRIRERSLLRRERLHRVLHVLGYLPPHYDSAIGWNKNEPSTYGKFLNHGEPKLAWEHKEDGSMRFLFMESFHEMMADFAKSQPSLVSDGKKIPLDWTIYYLRKKALSQPIRKEELAWLLLNFNQKRGYYQLRGEEDDDNPTKCEEYYELKVVGIEADEEGKNGNTWYNVKLENGWIYRRQSKIPLDDWIGKVREFIVTTEYEKDGITLKKDKNGDVKRSFRSPSEDDWGLRKKRTEKLLDSSKMTVGAFVYDHLLAEPSDKIRGKFIRTIERKYYKKELYAILCEQSKYHEELRSGDYLNKCAEELYKNNQPHRNSLLTKDLAYLLLEDLIFYQRPLKTKKSLIAECPYEAYKYVDKETGEIKRQGIKCIAKSNPYYQEFRLWQFISNLRLFNKADDKEVTADYLPTQDDYVRLFAYLNDRKEINQETLLKEFFKLKKITVNSEKVFPIRWNYIEDKEKKYPCNETRHELLLALDRARIDHSWLEKPGQEYRLWHLLYSVESKEETKEALRKLKDDDAFVESFLKVKPFKREYGAYSEKAIKKLLAVMRMGSLWRETDICDTTKGNITKILQGEIDEKLKEKISASVSSYNQLSDFQGLPVWLACYVVYGRHSEAAEIQHWKTPESLLAYINGFKQHSLRNPIVEQCILETLRTVHDIWKEVGHIDEIHVELGRNMKSTADQRARISENVLRNENTNLRIKSLLLELKNDPNIKDVRPYSPMQQEKLRIYEEGVLQELTKDDKDFTEITKISTMAQPSAKELQRYKLWLEQKYRSPYTGKSISLTKLFTSAYQIEHVIPQSRYFDDSFSNKVICESEVNSLKDNMLGYEFIKNHGGEIIHCTMLGDVKVLSESEYKAFVNDHYAHNKRKRENLLLEDIPQEFLNRQMNDSRYISKVVKALLSNIVRAEGEEEATSKFVVSCSGGITDRLKKDWGLNDVWNKIVYPRFERLNRLTGTEAFGQWENKDGKRVFQTAVPLELQRGFNKKRIDHRHHAMDALVIACTSRNIINYLNNESANNPKKREDLRQKLCDKNRTIRKPWETFTQDATAALEDVIVSFKNYVRIINKATNYYERYDVEGKKVIAEQRGDDMWAIRKPMHEATYYGRVNLRRKKKVNLRVALENISSICDNKLRIYINGLVEKGFNTKQILDKFKNTNDHFSMQKIDKVEIWQFTNEEEKLVATRKPLDTSFDTKKIASITDTGIQTILLNYLETKGGDSTIAFTPEGIVEMNQNISKYNNGKEHMPILKVRLYTKLGKKIPVGQTGCKAKQFVIAEAGTNLYFAIYEDEEGKRSYRTIPLNEVVERLKQGLSPVPEKNDKDVHLKFYLSPNDLVYVPIEDEHESLAKDHIYKFVDSSGTTANFIPHRSANVIFELNKKDAEKFCSGSIIQNEYGVGSSQSKNQKAITGEMIKAVCRKLEVDRLGNVIKVI

SEQ ID NO: 406 - protein, 1062 aa, Ralstonia syzygii
  Ralstonia syzygii R24
MAEKQHRWGLDIGTNSIGWAVIALIEGRPAGLVATGSRIFSDGRNPKDGSSLAVERRGPRQMRRRRDRYLRRRDRFMQALINVGLMPGDAAARKALVTENPYVLRQRGLDQALTLPEFGRALFHLNQRRGFQSNRKTDRATAKESGKVKNAIAAFRAGMGNARTVGEALARRLEDGRPVRARMVGQGKDEHYELYIAREWIAQEFDALWASQQRFHAEVLADAARDRLRAILLFQRKLLPVPVGKCFLEPNQPRVAAALPSAQRFRLMQELNHLRVMTLADKRERPLSFQERNDLLAQLVARPKCGFDMLRKIVFGANKEAYRFTIESERRKELKGCDTAAKLAKVNALGTRWQALSLDEQDRLVCLLLDGENDAVLADALREHYGLTDAQIDTLLGLSFEDGHMRLGRSALLRVLDALESGRDEQGLPLSYDKAVVAAGYPAHTADLENGERDALPYYGELLWRYTQDAPTAKNDAERKFGKIANPTVHIGLNQLRKLVNALIQRYGKPAQIVVELARNLKAGLEEKERIKKQQTANLERNERIRQKLQDAGVPDNRENRLRMRLFEELGQGNGLGTPCIYSGRQISLQRLFSNDVQVDHILPFSKTLDDSFANKVLAQHDANRYKGNRGPFEAFGANRDGYAWDDIRARAAVLPRNKRNRFAETAMQDWLHNETDFLARQLTDTAYLSRVARQYLTAICSKDDVYVSPGRLTAMLRAKWGLNRVLDGVMEEQGRPAVKNRDDHRHHAIDAVVIGATDRAMLQQVATLAARAREQDAERLIGDMPTPWPNFLEDVRAAVARCVVSHKPDHGPEGGLHNDTAYGIVAGPFEDGRYRVRHRVSLFDLKPGDLSNVRCDAPLQAELEPIFEQDDARAREVALTALAERYRQRKVWLEELMSVLPIRPRGEDGKTLPDSAPYKAYKGDSNYCYELFINERGRWDGELISTFRANQAAYRRFRNDPARFRRYTAGGRPLLMRLCINDYIAVGTAAERTIFRVVKMSENKITLAEHFEGGTLKQRDADKDDPFKYLTKSPGALRDLGARRIFVDLIGRVLDPGIKGD

SEQ ID NO: 407 - protein, 1066 aa, Rhodopseudomonas palustris
MSERVVRRILGIDLGIASCGWGVVDISGAGGGIIATGVRCFDAPLIDKTGEPKSATRRTARGQRRIVRRRRQRMNGVRRLLCEFGLLPDPRPDALNQAMRRISTASAAAQVTPWTLRAAAHQRLLSNEELAVVLGHIARHRGFRSNAKNEAGANAADETSKMKKAMEATREGLAKYHAFGDMIANDPKFANRKRNRDKDYSHTAKRSDLEDEVRAILRAQLRFGSAAATETLAQTFADVAFFQRPLQDSEDRVGDCPFEPGQKRAARRAPSFELFRFLSRLANLKLAVGRSPERRLTAEEIALAAKGFGETKKTITFKSLREALDLDPNARFSGIGKDKEASLDVVARTGGAAYGTKTLKDALGDAPWRSLSRTPETLDRIAEILSFREDITSIRNGLEDLGLDSLVVEALMQAAANGDFKEFTRAGHISARAARNIIPGLREGLVYSEACARVGYDHAARLSVPLDQVGSPVTRKALSEALKQVRAVAREYGPIDYFHIELARSVGKSAEERKQLTDGIEARNVEKAKRRKQAEEHLGRAPSDDELLRYELAKEQNFKCIYSGDAIDPAGVAANDTRYQVDHILPWSRFGDDSYLNKTLCTARSNQNKRGRTPFEWFEADKTDVEWMEYVARVENLQEVKGRKKRNYSIKDAAAIEDKFKARNLTDTQWATRLLADELSRMFPPRECERAICGRADGGNDGLTIVEERRVFTRPGAITSKLRRAWGLEGLKKQDGKRVEDDRHHAVDALVLAATTESLLQRLTVEVQRREREGRPDDIFHCAEPWRGFRADVRRTVYGSETMPGIFVSRAERRRARGKAHDATIKQIREIEGERLVFERKPVEKLTDKDLEKIPIPKPYGQVSDPKRLRDELVESLRAWIAAGKPKDRPPLSPKGDVIRKVRIQTNDKVSVEINGGTVDRGDMARVDVFRKKNKKAVWEYYVVPIYPHQIVALNDPPDRAVIAYAEDKDWKEIDSSYEFLWSLFGLSYVEISKANGECIDGYFRGLHRGTGAASVCKHISLGKDATVSGIGLKTLASFKKFTIDRLGRKFEIPREVRTWRGEACT

SEQ ID NO: 408 - protein, 1064 aa, Rhodopseudomonas palustris
MSECVTRRILGIDLGIASCGWGVIEVGEASGSIIASGVRCFDAPLIDKTGEPKSATRRTARGQRRIIRRRRQRMNAVRRLLAEFGVLTGRSPDALHQALLRLSQSVAGSQVTPWTLRAAAHERKLTNDELAVVLGHIARHRGFRSNSKNDGGANAADETSKMKKAMETTREGLARYHSFGAMIASDPKFADRKRNRDKDYSHTAKRSDLEDEVRTIFRSQTRFGSLVASEKLSQAFADAAFFQRPLQDSEDMVGSCPFEPGQKRTARRAPSFELFRFLSRLANLKLTVGRAPERRLTPDEIALAAKGFGETKKSITFKSLREALDLDPNARFSGVAKEKESTLDVAARTGGAAYGTKTLKDALGDAPWRSLSRMPEKLDRIAEILSFREDMKAIRNGLEEVGLDGLVVDALMQATANGDFKDFTRAAHISALAARNIIPGLREGLVYSDACTRVGYDHAARPAVPLSQIGSPVTRKALSEALKQVRAVAREYGPIDYFHIELARSIGKSAEERKKLTDGIEARNVEKEKRRKEAAEHLGRAPSDDELLRYELAKEQNFKCIYSGDPIDPAGISANDTRYQVDHILPWSRFGDDSYVNKTLCTARSNQNKRGRTPFEWFDADKTEAEWMEYSARVEDLKEVKGRKKRNYSIKDAASVEDKFKARNLTDTQWATRLLADELKRMFPPRECERVVTVRADGGNDGLSIVEERRVFTRPGAITSKLRRAWGLEGLKKQDGKRVEDDRHHAVDALVLAATTESLLNRLTVEVQQREREGRQDDIFHCSQPWPGFRVDVQRTVYGSETMPGIFVSRAERRRARGKAHDATVKQIRDIDGERIVFERKPIEKLTDKDLERIPVPEPYGKAADPKKLRDELVENLRAWIAAGKPKDKPPRSPKGDIIRKVRIETKDKVAVEINGGTVDRGDMARVDVFRKKNKKGVWEFYVIPIYPHQIVASALPPNRAVIAYKAESEWTAIDGCFEFAWSLNPMSYLELVKSNGELIEGYFRSMDRTTGAINLSPMSTNSETIRSIGVKTLSSFRKFTVDRLGRKFEIPREVRTWRGEACT

SEQ ID NO: 409 - protein, 1173 aa, Rhodospirillum rubrum
  Rhodospirillum rubrum ATCC 11170
MRPIEPWILGLDIGTDSLGWAVFSCEEKGPPTAKELLGGGVRLFDSGRDAKDHTSRQAERGAFRRARRQTRTWPWRRDRLIALFQAAGLTPPAAETRQIALALRREAVSRPLAPDALWAALLHLAHHRGFRSNRIDKRERAAAKALAKAKPAKATAKATAPAKEADDEAGFWEGAEAALRQRMAASGAPTVGALLADDLDRGQPVRMRYNQSDRDGVVAPTRALIAEELAEIVARQSSAYPGLDWPAVTRLVLDQRPLRSKGAGPCAFLPGEDRALRALPTVQDFIIRQTLANLRLPSTSADEPRPLTDEEHAKALALLSTARFVEWPALRRALGLKRGVKFTAETERNGAKQAARGTAGNLTEAILAPLIPGWSGWDLDRKDRVFSDLWAARQDRSALLALIGDPRGPTRVTEDETAEAVADAIQIVLPTGRASLSAKAARAIAQAMAPGIGYDEAVTLALGLHHSHRPRQERLARLPYYAAALPDVGLDGDPVGPPPAEDDGAAAEAYYGRIGNISVHIALNETRKIVNALLHRHGPILRLVMVETTRELKAGADERKRMIAEQAERERENAEIDVELRKSDRWMANARERRQRVRLARRQNNLCPYTSTPIGHADLLGDAYDIDHVIPLARGGRDSLDNMVLCQSDANKTKGDKTPWEAFHDKPGWIAQRDDFLARLDPQTAKALAWRFADDAGERVARKSAEDEDQGFLPRQLTDTGYIARVALRYLSLVTNEPNAVVATNGRLTGLLRLAWDITPGPAPRDLLPTPRDALRDDTAARRFLDGLTPPPLAKAVEGAVQARLAALGRSRVADAGLADALGLTLASLGGGGKNRADHRHHFIDAAMIAVTTRGLINQINQASGAGRILDLRKWPRTNFEPPYPTFRAEVMKQWDHIHPSIRPAHRDGGSLHAATVFGVRNRPDARVLVQRKPVEKLFLDANAKPLPADKIAEIIDGFASPRMAKRFKALLARYQAAHPEVPPALAALAVARDPAFGPRGMTANTVIAGRSDGDGEDAGLITPFRANPKAAVRTMGNAVYEVWEIQVKGRPRWTHRVLTRFDRTQPAPPPPPENARLVMRLRRGDLVYWPLESGDRLFLVKKMAVDGRLALWPARLATGKATALYAQLSCPNINLNGDQGYCVQSAEGIRKEKIRTTSCTALGRLRLSKKAT

SEQ ID NO: 410 - protein, 1059 aa, Rhodovulum sp.
  Rhodovulum sp. PH10
MGIRFAFDLGTNSIGWAVWRTGPGVFGEDTAASLDGSGVLIFKDGRNPKDGQSLATMRRVPRQSRKRRDRFVLRRRDLLAALRKAGLFPVDVEEGRRLAATDPYHLRAKALDESLTPHEMGRVIFHLNQRRGFRSNRKADRQDREKGKIAEGSKRLAETLAATNCRTLGEFLWSRHRGTPRTRSPTRIRMEGEGAKALYAFYPTREMVRAEFERLWTAQSRFAPDLLTPERHEEIAGILFRQRDLAPPKIGCCTFEPSERRLPRALPSVEARGIYERLAHLRITTGPVSDRGLTRPERDVLASALLAGKSLTFKAVRKTLKILPHALVNFEEAGEKGLDGALTAKLLSKPDHYGAAWHGLSFAEKDTFVGKLLDEADEERLIRRLVTENRLSEDAARRCASIPLADGYGRLGRTANTEILAALVEETDETGTVVTYAEAVRRAGERTGRNWHHSDERDGVILDRLPYYGEILQRHVVPGSGEPEEKNEAARWGRLANPTVHIGLNQLRKVVNRLIAAHGRPDQIVVELARELKLNREQKERLDRENRKNREENERRTAILAEHGQRDTAENKIRLRLFEEQARANAGIALCPYTGRAIGIAELFTSEVEIDHILPVSLTLDDSLANRVLCRREANREKRRQTPFQAFGATPAWNDIVARAAKLPPNKRWRFDPAALERFEREGGFLGRQLNETKYLSRLAKIYLGKICDPDRVYVTPGTLTGLLRARWGLNSILSDSNFKNRSDHRHHAVDAVVIGVLTRGMIQRIAHDAARAEDQDLDRVFRDVPVPFEDFRDHVRERVSTITVAVKPEHGKGGALHEDTSYGLVPDTDPNAALGNLVVRKPIRSLTAGEVDRVRDRALRARLGALAAPFRDESGRVRDAKGLAQALEAFGAENGIRRVRILKPDASVVTIADRRTGVPYRAVAPGENHHVDIVQMRDGSWRGFAASVFEVNRPGWRPEWEVKKLGGKLVMRLHKGDMVELSDKDGQRRVKVVQQIEISANRVRLSPHNDGGKLQDRHADADDPFRWDLATIPLLKDRGCVAVRVDPIGVVTLRRSNV

SEQ ID NO: 411 - protein, 1405 aa, Riemerella anatipestifer
MKTILGLDLGTNSIGWALVKEAENSNEKSEIIKLGVRVNPLTVDEKTNFEAGRPLSTNADRTAKRSARRNLQRYKLRRKNLIDLLIKNQLIDKDTPLTEIGKNTTHQTLELRAKAARERIELEDLARVFLAINKKRGYRSSRKVNNEEEGQAVDGMAVAKKLYDENLTPGQYAYELLSKGKKYVPDFYRSDLQAEFNAIWEYQKQFYADILDDELYNALKGQGQQNSRKRFLAIKGVYTAENKGKRDDVKLRHYKWRSEAISKKINIEEVAYVLVEINNDLNKSSGYLGAISDRSKELYFNKETVGENLWKQIQKNPHTSLKNQVFYRQDYLDEFEQIWETQAQFHPQLTLALKEQIRDVIIFYQRKLKSQKGLLSFCQFESWEIERKDENGNVILNKTTQLPKRQTVGRRVAPKSSPLFQEFKIWQNINNLEVTKISEGASKNKKETETLSDDERKLLFEELNLRGNLSQKEVLQILGLKDKEYKTNFSEGLEGNRTNAALFNIYQQIAENEGYGFDWSKKSAQEIKEELKAVFPQIGIQADILDFNANLDGKEFENQASYQLWHLLYSAEEDDKINEEDQIIYGNSAVSLKKKLCEKFGFTPEYAKWIANVSLQDDYGNLSTKAMRKIIPYLIDGNDYSEACALAGYNHSNSLTKEENDNRELLDKLELLPKNSLRNPVVEKILNQMVNVVNQVIETYGKPDEVRIELARELKKSAEKRAEMTKSINEATRRNEDIKKLITKDFGIPNPTKSDVVRYRLWEELAPLAYKDVFTGKQIKKEDLFSSKIDIEHIIPKALLFDDSFSNKTLVFRETNLKKADRTAYDFIESDYNATLDDYIQRVETLYNNTKGTISKGKRNKLLMAQKNLPDGFIERDLRNSQYIAKKAKAMLYQVFKDVNVTSGSITDRLREDWDLINVMKELNFPKYKALGLTEIEERYDIGQEKTKRVEVITDWTKRNDHRHHAMNALTVAFTTSSHIQYLNYLNARKNESHKEHKNIKGIENKITHKQKDKRKFIPPMPNFREEAKKHIETILVSIKNKNKVYTKNINKTKKKSGHNTKEQLTPRGQLHKETVYGKSKRPMSKPTKINKNFSLEQAQLIINVQEKELVLRHLAQFDNNPAVAFDTKTLKKMPLLKNGEPLKEVLCFEEIFTIRKDITPDLKIEKVVDEKIKAILEQRKKDFGGNAKEAFSDLDKNPIWLNKKKGICIKRVTITGVSNAEALHHQKDHLGREILDDNGNPIPADFVSTGNNHHLAVYLDSEGKLQDNIVSFYEAVVRTSQGLPVVDKGLNKDLGWKFLFSLKQNEMFVFPNDDFDINDFDLLDDKKAELISKHLYRVQKISKVSAGNSFVRDIVFRHHLETTVKEVKELKDISYIQLKSLEGLRNIKKVRINHIGKIVQVGEY

SEQ ID NO: 412 - protein, 1400 aa, Riemerella anatipestifer
MKTILGLDLGTNSIGWALVKETENSNEKSEIIKLGVRVNPLTVDEKTNFEAGRPLSTNADRTAKRSARRNLQRYKLRRKNLIDLLIKHRLIDKDTPLTEIGKNTTHQTLELRAKAARERIELEDLARVFLAINKKRGYRSSRKVNNEEEGQVVDGMAVAKKLYDENLTPGQYAYELLSKGKKYVPDFYRSDLQAEFDSIWEYQKQFYADILDDELYNALKGQGQQNSRKRFLAIKGVYTAENKGKRDEVKLQHYKWRSEAITQKLSIEEVAYVLVEINNDLNKSSGYLGAISDRSKELYFNKETVGENLWKQIQKNPHTSLKNQVFYRQDYLDEFEQIWETQAQFHPQLTLALKEQIRDVVIFYQRKLKSQKGLLSFCQFESWEIERKDENGNVILNKTTQLPKRQTVGRRVAPKSSPLFQEFKIWQNINNLEIAKISDGNSKNKKETEALSDDERKLLFEELNLRGNLSQKEVLQILGLKDKEYKTNFPEGLEGNRTNAALFNIYQQIAENEGYGDWTKKSAQEIKEELKAVFPQIGIQADILDFNAELDGKEFENQASYQLWHLLYSAEEDDKINEEDQIIYGNSAVSLKKKLCEKFGFTPEYAKWIANVSLQDDYGNLSTKAMRKIIPYLIDGNDYSEACALAGYNHSNSLTKEENDNRERLNKLELLPKNSLRNPVVEKILNQMVNVVNQVIETYGKPDEVRIELARELKKSAEERAEMTKGINEATRRNEDIKKLITKNFGIPNPTKNDVVRYRLWEELAPLAYKDVFTGRQIKKEDLFSSKIDIEHIIPKALLFDDSFSNKTLAFRETNLKKADRTAYGFIESDYNATLDDYIQRVETLYNNAKGTISKGKRNKLLMAQKNLPDGFIERDLRNSQYIAKKAKSMIEKVFNDVNVTSGSITDRLREDWDLINVMKELNFPKYKALGLTEIEERYDIGQEKTKKVEVITDWTKRNDHRHHAMDALTVAFTTKSHVQYLNNLNTIHSLKGDEVDLELSKLYGLKNTITEVVNKKRKFIPPMPNFREEAKKHIETILVSIKNKNKVYTKNINKTKKESGYHTKEQLTPRGQLHKETVYGKSKRPMNKPTKINKNFSLEQAQLIINVQEKELVLRHLAQFDNNPAVAFDTKTLKKMPLLKNGEPLKEVLCFEEIFTIRKDITPDLKIEKVVDEKIKAILEQRKKDFGGNAKEAFSDLDKNPIWLNKEKGICIKRVTITGVSNAEALHHQKDHLGREILDDNGNPIPADFVSTGNNHHVAIYEDEKGKLQEKVVSLYEAVARANQGLPVVDKGLNEDLGWKFLFTMKQNEMFVFPNDDFDVNDIDLLDENNAKIISQHLFRVQKLATKNYMFRHHLETNVQEVKELNDIAYKSIRSTEPLKNIKKVRINHIGKIVQVGEY

SEQ ID NO: 413 - protein, 1140 aa, Roseburia intestinalis
  Roseburia intestinalis L1-82
MRENGSDERRRNMDEKMDYRIGLDIGIASVGWAVLQNNSDDEPVRIVDLGVRIFDTAEIPKTGESLAGPRRAARTTRRRLRRRKHRLDRIKWLFENQGLINIDDFLKRYNMAGLPDVYQLRYEALDRKLTDEELAQVLLHIAKHRGFRSTRKAETAAKENGAVLKATDENQKRMQEKGYRTVGEMIYLDEAFRTGCSWSEKGYILTPRNKAENYQHTMLRAMLVEEVKEIFSSQRRLGNEKATEELEEKYLEIMTSQRSFDLGPGMQPDGKPSPYAMEGFSDRVGKCTFLGDQGELRGAKGTYTAEYFVALQKINHTKLVNQDGETRNFTEEERRALTLLLFTQKEVKYAAVRKKLGLPEDILFYNLNYKKAATKEEQQKENQNTEKAKFIGMPYYHDYKKCLEERVKYLTENEVRDLFDEIGMILTCYKNDDSRTERLAKLGLVPIEMEGLLAYTPTKFQHLSMKAMRNIIPFLEKGMTYDKACEEAGYDFKADSKGTKQKLLTGENVNQTINEITNPVVKRSVSQTVKVINAIIRTYGSPQAINIELAREMSKTFEERRKIKGDMEKRQKNNEDVKKQIQELGKLSPTGQDILKYRLWQEQQGICMYSGKTIPLEELFKPGYDIDHILPYSITFDDSFRNKVLVTSQENRQKGNRTPYEYMGNDEQRWNEFETRVKTTIRDYKKQQKLLKKHFSEEERSEFKERNLTDTKYITTVIYNMIRQNLEMAPLNRPEKKKQVRAVNGAITAYLRKRWGLPQKNRETDTHHAMDAVVIACCTDGMIQKISRYTKVRERCYSKGTEFVDAETGEIFRPEDYSRAEWDEIFGVHIPKPWETFRAELDVRMGDDPKGFLDTHSDVALELDYPEYIYENLRPIFVSRMPNHKVTGAAHADTIRSPRHFKDEGIVLTKTALTDLKLDKDGEIDGYYNPQSDLLLYEALKKQLLLYGNDAKKAFAQDFHKPKADGTEGPVVRKVKIQKKQTMGVFVDSGNGIAENGGMVRIDVFRVNGKYYFVPVYTADVVKKVLPNRASTAHKPYGEWKVMEDKDFLFSLYSRDLIHIKSKKDIPIKMVNGGMEGIKETYAYYIGADISAANIQGIAHDSRYKFRGLGIQSLDVLEKCQIDVLGHVSVVRSEKRMGFS

SEQ ID NO: 414 - protein, 1128 aa, Roseburia intestinalis
  Roseburia intestinalis M50/1
MDEKMDYRIGLDIGIASVGWAVLQNNSDDEPVRIVDLGVRIFDTAEIPKTGESLAGPRRAARTTRRRLRRRKHRLDRIKWLFENQGLINIDDFLKRYNMAGLPDVYQLRYEALDRKLTDEELAQVLLHIAKHRGFRSTRKAETAAKENGAVLKATDENQKRMQEKGYRTVGEMIYLDEAFRIGCSWSEKGYILTPRNKAENYQHTMLRAMLVEEVKEIFSSQRRLGNKKATEELEEKYLEIMTSQRSFDLGPGMQPDGKPSPYAMEGFSDRVGKCTFLGDQGELRGAKGTYTAEYFVALQKINHTKLVNQDGETRNFTEEERRALTLLLFTQKEVKYAAVRKKLGLPEDILFYNLNYKKAATKEEQQKENQNTEKAKFIGMPYYHDYKKCLEERVKYLTENEVRDLFDEIGMILTCYKNDDSRTERLAKLGLVPIEMEGLLAYTPTKFQHLSMKAMRNIIPFLEKGMTYDKACEEAGYDFKADSKGTKQKLLTGENVNQTINEITNPVVKRSVSQTVKVINAIIRTYGSPQAINIELAREMSKTFEERRKIKGDMEKRQKNNEDVKKQIQELGKLSPTGQDILKYRLWQEQQGICMYSGKTIPLEELFKPGYDIDHILPYSITFDDSFRNKVLVTSQENRQKGNRTPYEYMGNDEQRWNEFETRVKTTIRDYKKQQKLLKKHFSEEERSEFKERNLTDTKYITTVIYNMIRQNLEMAPLNRPEKKKQVRAVNGAITAYLRKRWGLPQKNRETDTHHAMDAVVIACCTDGMIQKISRYTKVRERCYSKGTEFVDAETGEIFRPEDYSRAEWDEIFGVHIPKPWETFRAELDVRMGDDPKGFLDTHSDVALELDYPEYIYENLRPIFVSRMPNHKVTGAAHADTIRSPRHFKDEGIVLTKTALTDLKLDKDGEIDGYYNPQSDLLLYEALKKQLLLYGNDAKKAFAQDFHKPKADGTEGPVVRKVKIQKKQTMGVFVDSGNGIAENGGMVRIDVFRVNGKYYFVPVYTADVVKKVLPNRASTANKPYSEWRTMEDKDFLFSLYSRDLVHIKSKKGIPIKNVDGSLGESKEVYAYYIGADISGAKIEGKAHDSRYTFRGIGVQKLELIEKCQVDILGHISTVKNEKRMGFS

SEQ ID NO: 415 - protein, 1152 aa, Roseburia inulinivorans
  Roseburia inulinivorans DSM 16841
MNAEHGKEGLLIMEENFQYRIGLDIGITSVGWAVLQNNSQDEPVRITDLGVRIFDVAENPKNGDALAAPRRDARTTRRRLRRRRHRLERIKFLLQENGLIEMDSFMERYYKGNLPDVYQLRYEGLDRKLKDEELAQVLIHIAKHRGFRSTRKAETKEKEGGAVLKATTENQKIMQEKGYRTVGEMLYLDEAFHTECLWNEKGYVLTPRNRPDDYKHTILRSMLVEEVHAIFAAQRAHGNQKATEGLEEAYVEIMTSQRSFDMGPGLQPDGKPSPYAMEGFGDRVGKCTFEKDEYRAPKATYTAELFVALQKINHTKLIDEFGTGRFFSEEERKTIIGLLLSSKELKYGTIRKKLNIDPSLKFNSLNYSAKKEGETEEERVLDTEKAKFASMFWTYEYSKCLKDRTEEMPVGEKADLFDRIGEILTAYKNDDSRSSRLKELGLSGEEIDGLLDLSPAKYQRVSLKAMRKMQPYLEDGLIYDKACEAAGYDFRALNDGNKKHLLKGEEINAIVNDITNPVVKRSVSQTIKVINAIIQKYGSPQAVNIELAREMSKNFQDRTNLEKEMKKRQQENERAKQQIIELGKQNPTGQDILKYRLWNDQGGYCLYSGKKIPLEELFDGGYDIDHILPYSITFDDSYRNKVLVTAQENRQKGNRTPYEYFGADEKRWEDYEASVRLLVRDYKKQQKLLKKNFTEEERKEFKERNLNDTKYITRVVYNMIRQNLELEPFNHPEKKKQVWAVNGAVTSYLRKRWGLMQKDRSTDRHHAMDAVVIACCTDGMIHKISRYMQGRELAYSRNFKFPDEETGEILNRDNFTREQWDEKFGVKVPLPWNSFRDELDIRLLNEDPKNFLLTHADVQRELDYPGWMYGEEESPIEEGRYINYIRPLFVSRMPNHKVTGSAHDATIRSARDYETRGVVITKVPLTDLKLNKDNEIEGYYDKDSDRLLYQALVRQLLLHGNDGKKAFAEDFHKPKADGTEGPVVRKVKIEKKQTSGVMVRGGTGIAANGEMVRIDVFRENGKYYFVPVYTADVVRKVLPNRAATHTKPYSEWRVMDDANFVFSLYSRDLIHVKSKKDIKTNLVNGGLLLQKEIFAYYTGADIATASIAGFANDSNFKFRGLGIQSLEIFEKCQVDILGNISVVRHENRQEFH

SEQ ID NO: 416 - protein, 1156 aa, Ruminococcus albus
  Ruminococcus albus 8
MGNYYLGLDVGIGSIGWAVINIEKKRIEDFNVRIFKSGEIQEKNRNSRASQQCRRSRGLRRLYRRKSHRKLRLKNYLSIIGLTTSEKIDYYYETADNNVIQLRNKGLSEKLTPEEIAACLIHICNNRGYKDFYEVNVEDIEDPDERNEYKEEHDSIVLISNLMNEGGYCTPAEMICNCREFDEPNSVYRKFHNSAASKNHYLITRHMLVKEVDLILENQSKYYGILDDKTIAKIKDIIFAQRDFEIGPGKNERFRRFTGYLDSIGKCQFFKDQERGSRFTVIADIYAFVNVLSQYTYTNNRGESVFDTSFANDLINSALKNGSMDKRELKAIAKSYHIDISDKNSDTSLTKCFKYIKVVKPLFEKYGYDWDKLIENYTDTDNNVLNRIGIVLSQAQTPKRRREKLKALNIGLDDGLINELTKLKLSGTANVSYKYMQGSIEAFCEGDLYGKYQAKFNKEIPDIDENAKPQKLPPFKNEDDCEFFKNPVVFRSINETRKLINAIIDKYGYPAAVNIETADELNKTFEDRAIDTKRNNDNQKENDRIVKEIIECIKCDEVHARHLIEKYKLWEAQEGKCLYSGETITKEDMLRDKDKLFEVDHIVPYSLILDNTINNKALVYAEENQKKGQRTPLMYMNEAQAADYRVRVNTMFKSKKCSKKKYQYLMLPDLNDQELLGGWRSRNLNDTRYICKYLVNYLRKNLRFDRSYESSDEDDLKIRDHYRVFPVKSRFTSMFRRWWLNEKTWGRYDKAELKKLTYLDHAADAIIIANCRPEYVVLAGEKLKLNKMYHQAGKRITPEYEQSKKACIDNLYKLFRMDRRTAEKLLSGHGRLTPIIPNLSEEVDKRLWDKNIYEQFWKDDKDKKSCEELYRENVASLYKGDPKFASSLSMPVISLKPDHKYRGTITGEEAIRVKEIDGKLIKLKRKSISEITAESINSIYTDDKILIDSLKTIFEQADYKDVGDYLKKTNQHFFTTSSGKRVNKVTVIEKVPSRWLRKEIDDNNFSLLNDSSYYCIELYKDSKGDNNLQGIAMSDIVHDRKTKKLYLKPDFNYPDDYYTHVMYIFPGDYLRIKSTSKKSGEQLKFEGYFISVKNVNENSFRFISDNKPCAKDKRVSITKKDIVIKLAVDLMGKVQGENNGKGISCGEPLSLLKEKN

SEQ ID NO: 417 - protein, 1341 aa, Ruminococcus lactaris
  Ruminococcus lactaris ATCC 29176
MGKGYYVGLDMGTGSVGWAVTDESYQILRRHGKAMWGVRLFESAKTAEERRMFRTGRRRLDRRGWRIEILQEIFAEEISRVDPGFFLRMKESKYYPEDKRDIQGNCPELPYTLFVDKTFTDKDFHKKYPTIYHLRKMLMETEDTPDMRLVYLALHHMMKHRGHFLLSGDISQVTEFKNTFNQFIENIRNEEMDFEIELDESAVQMIEETLKDKNLTRSAKKSKLVKGLNAKNVRDKAFLTLLSGGTVKLSDLFGMEELNEGERPKISFADNGYEEYAAVVEMELGELYYIVESAKAVYDWAILSDILGGSTSVSDAKVRAYEKHKADLKYLKAVVKEYFPKEVYNAVFVESSDKLNNYPAYIGMTKKNGKKVSLEGKRCSREEFMDFLKKNIVVKLPDEEAKMYLQSELEKDSFLPKQVNKDNGVIPYQVHKYELKKILDNLGDKIPFLKENAEKIEKLFSFRIPYYVGPLRTGNGENSKFAWAERKSTEKIYPWNFENVIDVEQSAENFIRRMTNKCTYLIGEDVLPKDSLLYSKFMVLNELNNLRLDGQKISVELKQKIYRDVFCRSRKVTQKKLKSYLIREGIAGKNVELTGIDGDFKGSLTAYHDFKEKLIDVELTQKEKEEIILNIVLFGDDKKLLKQRLKKKFPQLTEKQINTVTALSYKGWGRLSKKLLEEVTVPAPETGEVWNIITALWETNDNFMQLLSKEYQFSDRIEEFNEEKADPEVSYQTIEDLYVSPAVKRQIWQTLQIIQEIEKVMGEKPKRVFVEMAREKQENKRTESRKKTLSDLYTKCKKEEPEWIEALCTSLEKHEEHQLRSDKLYLYYTQKGRCMYSGEPIDLEDLWDNTKYDIDHIYPQSKTMDDSLKNRVLVKKEYNAKKSDTYPIAADIQKKMMPFWKSLLTGGFIPKEKYDRLVRNNPLDANELAGFIERQIVETRQSTKAVAEILKKILPDTEIVYVKAKTVSKFRQDFDFIKVRDMNDLHHAKDAYLNIVVGNVYFVKFTKNAAWFVKENPGRTYNLEKMFIWDVARDGEIAWKAGKSGSIVQVRAMMEKNHILVTRRSYEVKGGLFDQQILKKGKGQVPVKESDERLRDIGKYGGYNKAAGVYFMLVSSKDKKGKEQRTIEFVPIYLKDRVEKDMESARNYLMEERGLREPKILIKKIKIDTLFKVDGFYMWLSGRTSNQLIFKGANQLILSKEDMKTLKKVVKYIQRQKEDKNVKISMRDGITEEELLKLYETFLDKIRHSIYGARLSSQEKTLVNGKEKFIDLSVEAKCQVLYEILHLFQCQSGAANLKMIGGPASAGILVMNNNISKCKNISIVNQSPTGIYEKEIDLLRV

SEQ ID NO: 418 - protein, 1471 aa, Scardovia wiggsiae
  Scardovia wiggsiae F0424
MGYKAPRNDKGEIDYGVGLDLGNGSVGWVAMDKDYHLIRARGHELIGARLFDPANSAENRRESRTTRRRLSRRRWRLRMLDSLFASELAKIDPNFLARRKYSWVHPKDEQNHENWYGSIIFGSKEQDKQFYKDYPTIYHLRKKLTEDTERHDIREIYVAIHHIVKYRGHFLREGEINSENLFDPEGFVELIKDVIKLNNSYDESTPIFEASPADVSEALLNEHTSRSGRIEDTLDKLDFSVSRVDKHELKGMRDAAKAVIGAIVGNTADFSKIFNLDNLDKDSKDNLKLKFADSNFDEKYGGVVGSGLLDETQIELVDRIHAVYDAVALKGILGDAHTISEAKVESYEKHRKNWKLIKEELRTKENKDEVDLWYGDLSGRQYKNPPDPEKGPDEGSKKDSPIRDSDQKQNLIKKANDYFTELIDDSQLSEEQKNCLKNDINNGQLFPVQRSSDNGVIPYQIHLNELRRIIENQKQYYPFLAETFIRKTAEGKSYEENKIVALLKFRVPYYVGPLVSKEDMEEHSSGNSAYHWMARNPGRGEAITPWNFDEVVDKDESGARFISRLTGTDTYLLGEPTLPQHSLLYEEYMVLSELNNVRLNVRQGNHWSDKNRQRLSYKQKEFLIENLFKEHKTVTRKRAEDCLSSMGCGEVQLFGLSDEKKFASSLSSYITLKKILGKAFVDDSGNSAILERIIEVQTVFEDREPLTHQLSLIDSLTVEQRKQLAKIHYTGWGKLSRKLLTSKKGSYKIHSQNEIMRTQHSIIDIMRGDSLNLIEIIRDKKIGIGEWIDNENLDRETGESDVSRLESVFEGIVMSPRVKRGVVQAVRVIDDLAKAIGNPPQRIFIEMADEVQASQRTVSRLSRLKALYGSPSLQKEFNDLKDLRKSLNETKDADLQEDRLYLYYIQLGKDLYTGKEISIDSLSSAYDIDHIVPQALTQDDSIDNRVLVSRKENARKTDSYLYTPDLIKNMRPLWGKLLAAGLMSQKKYDALTRVDDFKDREKQRFVQRSLVETRQIMKNVSTILRTYYGEDTNVVTLKSSITHDMRKYLGFPYKNRDINDYHHAQDALCISAAGQFMLNRHFVSGGEVTDGASNAYNMYLAEYLQEFRDAKARGERKRSTAFGFVVGSMSSKDDEKRTDHRTGEIVWSETNAEYLRKVMNYKKMLITQKVGDVKTRALYDETRYGHKESSAKSIKFDNLRRDTSLYGGFSGASTAYMMLVEYKKKNKLVSITAQEASLLAVADQKNDTVSVMDGILASHGLSGAKILLPKIVTGQLLDYSDALVTLQSASELNTARQMWLPRNDYNDIDIILKSKDIEDAAHKLGYDSDTVHVLRRIQKLFEAVFRVAESQFPLHQLSKDQQEEILRDPQNYGFGSAVKLLGGLLKALHANAENTNLAGLVKVLHGDKEYSDDGKAKEFKKFGFSPRWRRISNPTGFTLSDSDTFIYQSPSGIFEQRVTVKELKEKADKQK

SEQ ID NO: 419 - protein, 1178 aa, Scardovia inopinata
  Scardovia inopinata F0304
MGKRHNSNMAKKKISYRIGIDVGLNSTGLAAIEVDDDGAPIRILNTMSVIHDGGVDPDAAKVRGTRLAISGIARRTRRMRRRRAKRLDRLEQILEKYGYTDTEPVLEEPYGPWICRAELADGFINDDEQRRMMIGIAIRHIARHRGWRNPYQNVRALLNIDDSDLSEEYKNLKEKVQDQINDGKDLPNFTPSQLVRDYLDNFSGQPAARIRTGKAGPRGNRRDAVGILPQRMRQSDYAYELQRIFDMQKIGRDEAQELLMAVFEAKSPKGSAEKRIGKDPLTGKKRALKASLAFQKYRIVATITNLRIKTGTGSERMLSPTELNDIYTYLLRVQDDNHLPTWEDICEEVLHIGRYQLAGIGKTFEGGERISNMPPVIQTSLAIHGLSEGTLAEKLTKWWDKADDDSRESMIKLLSNTVDIDRVNEVDENFASALDFIDSLDDEELTKLDKIALPRGRAAYSEEALNKLTADMLNTGDDLFSARQRIYHVNNSWRPPQPPIGEPLGNPAVDRVLKITNRYLMNCLNRWGQPRRVTIEHTRSGFTSVKQATEHQKISDKRAEYRRDIVKQLEEAGVESVHEYDIRRWEAVQRQNGQCLYCGRDITFKTCEMDHIVPRKGPGSTNTRTNFAAVCPECNRMKSNIPFASWAETKEAKDRGVSLDKAIKQVRFFNFTKNEYSPQAQRNFKKSMIERLKQKTSDEPLDNRSIESVSWMADELYKRIDWYFNHEQYETSKKAINDDKDNLSGTQVVVYPGSITAEARNAAGLGGNIHFIGGRYKTRLDRRHHAVDACVIAMMEPGIARILTERNQLRQAQRLTARIEDDEVNWKDYPTENTAGYNKYQAWSDRMHALLEYMNNALDYDKIPVVRWERLQLGNRSAHEDTIHPLKKLPLSHEISAIDINHASTPALYEALVSLPDFSEQDGLPADPSRQINVNGERYSGDDLVSFFNSNAAQIAIQGGSAELGTAFHHARIYRCWTVGKNGKKKIFFGMIRVYQHDLLHAKNEDLFTYPLKRSSVSMRYAKKEVVHAILSGNAEYVGYLCVGDELVLDLKGDKSNDEGGSRLSGQVGEFVQKFEEDSKVNSQIVNRWTVDGFPDEAKLRLRPSMFAGEGLKNMKSELVENAAIKNILSKTGWRVSVDVISKKSPVVLRRNAFGEPRWKTNAGLPVSYRWQDTETKE

SEQ ID NO: 420 - protein, 1063 aa, Simonsiella muelleri
  Simonsiella muelleri ATCC 29453
MEKFHYVLGLDLGIASVGWAAIEIDKETETSIGLLDCGVRTFERAEVPKTGDSLAKARREARSTRRLIRRRSHRLLRLKRLLKREIFRQPETFKDLPINAWQLRVKGLDSRLNEYEWAAVLLHLVKHRGYLSQRKSEMSETDSKSEMGRLLAGVAENHQLLQQEQYRTPAELALKKFVKHFRNKGGDYAHTFNRLDLQAELHLLFQKQRELGNPFTSPELERQVDDLLMTQRSALQGDAILKMLGHCGFEPEQFKAAKNTFSAERFIWLTKLNNLRIQDQGKERALTADERTKLLDEPYKKSKLTYAQVRKLLSLPQTAIFKGLRYDLEHDKKAENSTLMEMKSYHNIRQTLEKSGLKTEWQSIATQPEILDAIGTAFSIYKTDEDISHELKTCRLPENVLNELLKNINFDGFIQLSLTALRKILPLMEQGYRYDEACTQIYGNHHSGSLQQESKQFLPHIPIDDVRNPVVFRTLTQARKVVNAIIRRYGSPARVHIEMARELGKSKSDRDRIEKQQQKNKKERENAVAKFKEDFPDFVGEPRGKDILKMRLYEQQHGKCLYSGHDIDINRLNEKGYVEIDHALPFSRTWDDSQNNKVLVLGSENQNKRNQTPDEYLDGANNSQRWLEFQARVQTCHFSYGKKQRIQLAKLDDETEKGFLERNLNDTRYIARFMCQFVQENLYLTGKGKRLVFASNGGMTATLRNLWGLRKVREDNDRHHALDAIVVACSTASMQQKITKAFQRHESIEYVDTETGEVKFRIPQPWDFFRQEVMIRVFSDQPCEDLVEKLSARPEALHDNVTPLFVSRAPNRKMSGQGHLETIKSAKRLSEENSMVKKPLTTLKLKDIPEIVGYPSREPQLYAALKTRLETHDDDPIKAFAKPFYKPNKNGELGALVRSVRVKGVQNTGVMVHDGKGIADNATMVRVDVYTKAGKNYLVPVYVWQVAQGILPNRAVTSGKSEADWDLIDESFEFKFSLSRGDLVEMISNKGRIFGYYNGLDRANGSIGIREHDLEKSKGKDGVHRVGVKTATAFNKYHVDPLGKEIHRCSSEPRPTLKIKSKK

SEQ ID NO: 421 - protein, 1327 aa, Solobacterium moorei
  Solobacterium moorei F0204
MEGQMKNNGNNLQQGNYYLGLDVGTSSVGWAVTDTDYNVLKFRGKSMWGARLFDEASTAEERRTHRGNRRRLARRKYRLLLLEQLFEKEIRKIDDNFFVRLHESNLWADDKSKPSKFLLFNDTNFTDKDYLKKYPTIYHLRSDLIHNSTEHDIRLVFLALHHLIKYRGHFIYDNSANGDVKTLDEAVSDFEEYLNENDIEFNIENKKEFINVLSDKHLTKKEKKISLKKLYGDITDSENINISVLIEMLSGSSISLSNLFKDIEFDGKQNLSLDSDIEETLNDVVDILGDNIDLLIHAKEVYDIAVLTSSLGKHKYLCDAKVELFEKNKKDLMILKKYIKKNHPEDYKKIFSSPTEKKNYAAYSQTNSKNVCSQEEFCLFIKPYIRDMVKSENEDEVRIAKEVEDKSFLTKLKGTNNSVVPYQIHERELNQILKNIVAYLPFMNDEQEDISVVDKIKLIFKFKIPYYVGPLNTKSTRSWVYRSDEKIYPWNFSNVIDLDKTAHEFMNRLIGRCTYTNDPVLPMDSLLYSKYNVLNEINPIKVNGKAIPVEVKQAIYTDLFENSKKKVTRKSIYIYLLKNGYIEKEDIVSGIDIEIKSKLKSHHDFTQIVQENKCTPEEIERIIKGILVYSDDKSMLRRWLKNNIKGLSENDVKYLAKLNYKEWGRLSKTLLTDIYTINPEDGEACSILDIMWNTNATLMEILSNEKYQFKQNIENYKAENYDEKQNLHEELDDMYISPAARRSIWQALRIVDEIVDIKKSAPKKIFIEMAREKKSAMKKKRTESRKDTLLELYKSCKSQADGFYDEELFEKLSNESNSRLRRDQLYLYYTQMGRSMYTGKRIDFDKLINDKNTYDIDHIYPRSKIKDDSITNRVLVEKDINGEKTDIYPISEDIRQKMQPFWKILKEKGLINEEKYKRLTRNYELTDEELSSFVARQLVETQQSTKALATLLKKEYPSAKIVYSKAGNVSEFRNRKDKELPKFREINDLHHAKDAYLNIVVGNVYDTKFTEKFFNNIRNENYSLKRVFDFSVPGAWDAKGSTFNTIKKYMAKNNPIIAFAPYEVKGELFDQQIVPKGKGQFPIKQGKDIEKYGGYNKLSSAFLFAVEYKGKKARERSLETVYIKDVELYLQDPIKYCESVLGLKEPQIIKPKILMGSLFSINNKKLVVTGRSGKQYVCHHIYQLSINDEDSQYLKNIAKYLQEEPDGNIERQNILNITSVNNIKLFDVLCTKFNSNTYEIILNSLKNDVNEGREKFSELDILEQCNILLQLLKAFKCNRESSNLEKLNNKKQAGVIVIPHLFTKCSVFKVIHQSITGLFEKEMDLLK

SEQ ID NO: 422 - protein, 1179 aa, Sphaerochaeta globosa
MSKKVSRRYEEQAQEICQRLGSRPYSIGLDLGVGSIGVAVAAYDPIKKQPSDLVFVSSRIFIPSTGAAERRQKRGQRNSLRHRANRLKFLWKLLAERNLMLSYSEQDVPDPARLRFEDAVVRANPYELRLKGLNEQLTLSELGYALYHIANHRGSSSVRTFLDEEKSSDDKKLEEQQAMTEQLAKEKGISTFIEVLTAFNTNGLIGYRNSESVKSKGVPVPTRDIISNEIDVLLQTQKQFYQEILSDEYCDRIVSAILFENEKIVPEAGCCPYFPDEKKLPRCHFLNEERRLWEAINNARIKMPMQEGAAKRYQSASFSDEQRHILFHIARSGTDITPKLVQKEFPALKTSIIVLQGKEKAIQKIAGFRFRRLEEKSFWKRLSEEQKDDFFSAWTNTPDDKRLSKYLMKHLLLTENEVVDALKTVSLIGDYGPIGKTATQLLMKHLEDGLTYTEALERGMETGEFQELSVWEQQSLLPYYGQILTGSTQALMGKYWHSAFKEKRDSEGFFKPNTNSDEEKYGRIANPVVHQTLNELRKLMNELITILGAKPQEITVELARELKVGAEKREDIIKQQTKQEKEAVLAYSKYCEPNNLDKRYIERFRLLEDQAFVCPYCLEHISVADIAAGRADVDHIFPRDDTADNSYGNKVVAHRQCNDIKGKRTPYAAFSNTSAWGPIMHYLDETPGMWRKRRKFETNEEEYAKYLQSKGFVSRFESDNSYIAKAAKEYLRCLFNPNNVTAVGSLKGMETSILRKAWNLQGIDDLLGSRHWSKDADTSPTMRKNRDDNRHHGLDAIVALYCSRSLVQMINTMSEQGKRAVEIEAMIPIPGYASEPNLSFEAQRELFRKKILEFMDLHAFVSMKTDNDANGALLKDTVYSILGADTQGEDLVFVVKKKIKDIGVKIGDYEEVASAIRGRITDKQPKWYPMEMKDKIEQLQSKNEAALQKYKESLVQAAAVLEESNRKLIESGKKPIQLSEKTISKKALELVGGYYYLISNNKRTKTFVVKEPSNEVKGFAFDTGSNLCLDFYHDAQGKLCGEIIRKIQAMNPSYKPAYMKQGYSLYVRLYQGDVCELRASDLTEAESNLAKTTHVRLPNAKPGRTFVIIITFTEMGSGYQIYFSNLAKSKKGQDTSFTLTTIKNYDVRKVQLSSAGLVRYVSPLLVDKIEKDEVALCGE

SEQ ID NO: 423 - protein, 1426 aa, Sphingobacterium spiritivorum
  Sphingobacterium spiritivorum ATCC 33861
MKHILGLDLGTNSIGWALIKQDFENKQGEILGMGSRIIPMSQDILGDFGKGNSVSQTAERTKYRSVRRLRERFLLRRERLHRILNVLGFLPEHYASQIDFTKRFGKFKEETEPKLVYSNEGFIFKKSFEEMLSDFKTHQPQLLEDNKKIPYDWTIYYLRKKALSRKIEKEELAWILLNFNQKRGYYQLRGEEEEENPNKLIEFYSLKIVDVLADEPQKGKSDIWYSLILENGWIYRRSSKTPLFDWKEKTRDFIVTIDLNDDGSVKTDKEGNEKRSFRAPGENDWTLVKKKTEQEIDSSRKTVGTYIYETLLKNPKQKIKGKLVRTIERKFYKTELKQILEKQKEFHPELRQDDLYSDCVRELYKNNEAHQLTLSKKDFVHLFMEDIIFYQRPLGSQKSSISNCTLEFRKYKDENGTEHTQYLKAIPKSNPYYQEFRIWQWMYNLNIYKKEDDTNVTKDFLNTKADFESLFEFLNNRKEVDQKALLKHFKLNDKTHRWNYVEDKKYPCNETKTMILSRLDKVENISDDFLTREMEQKIWHIIYSVNDKVEYEKALKSFAGKNNLEDNSFFEAFKKFPPFKSEYGAFSEKAIKKLLPLMRMGKFWNYNNISEQSKSRIQKIITGEYDENIKDKVREKAIHLTTETDFQGLQLWLVQYIVYGRHSEAAMLGKWNSADDLEEFLKEFKQHSLRNPIVEQVITETLRVVKDIWQKYGNGAKDFFREIHIELGREMKLPAEERERLTRQISENENTNFRIKALLAEMMDDNSVENVRPFSPMQQEILKIYEEGVLNSDIEIEDDILKISKTAQPSSSDLKRYKLWLEQKYKSPYTGQIIPLNKLFTPEYEIEHIIPQSRYFDDSFTNKIICESAVNKLKDNYIGLEFIKKLGGSIVECGNGKSVAILKHDAYEDFIKKHYANNRSKRNKLLLEDIPEKMIERQMNDTRYISKYISGVLSNIVRVEDGTDEGVNSKNIVPGNGKITTQLKQDWGLNDVWNDLILPRFERMNHLTNSTDFTAWNENHQKFLPTVPVEFSKGFSKKRIDHRHHALDALVIACATKDHVNLLNNQSAKSDTKRYDLKKKLMKFEKVAYNHPQTGERIEREAPKQFLKPWETFTIDAKNHLETIIVSFKQNLRVINKATNYYEKYVEKEGTKVKERVEQKGTNWAIRKPMHKETVSGKIDLPRIKVPKGKILTATRKSLDTSFNLKTIGSITDTGIQKILKNYLQYKDNNPELAFSPEGIEDMNKNIEKFNNGKAHQSISKVRVFELGSKFPLGQSGNKKEKYVEAAKGTNLFFAIYQDKNGKRSYETIPLNEVIERQKQGLSVVDLKGVDDFYLSPNDLVYVPSEDELENISMIDFNKMSSERIYKVVSFTGNQIFFVRQDIATSVVNKAEFSTLNKMERAIDGTMIKETCVKLQIDRLGNISKI

SEQ ID NO: 424 - protein, 1110 aa, Sphingobium sp.
  Sphingobium sp. AP49
MAEGKKRIWRLGADLGANSLGWAAIELSAPVNGKPIAILAAGSRIFSDGRDPKSGASLAVDRRDARAMRRRRDRFKQRQKALIKYLIADGLFPADEAARNAMAAIDPYAVRARALDEALSLPELGRALFHLNQRRGFKSNRKADRKADDDAGKIAIGIDRTRDAIAEDEADAGAEPGSWTFGKWLHERRLKGQSVRTRLRPESGEDAKGDGYDFYPDRALMEEEFDAIWAAQAPHHPDVLTNDVHDRLHEIIFYQRPLKAPQVGMCSLIPGDRRLPKAHPLFQRRRLLEELNALMIVRPGEVAQRLTREERDILLLKLKDKNKVSFATLRKALKLDPDARFNKESEDRTDLKGDEVAAVMGSKTRFGNLWVHLSIEAQWDVLARLDAVESDAEDAAFCAWLVETYALTPEQARAVANAPLPPGYGRFGETATRKLIEALRDGKKDDRVLVYSEAVTEAGLGHHSDRRTGEVFEDAKGRPQLPYYGVALERHIMPGTGDPSDPEEMRVGRLTNPTVHIGLNQLRRILNVLIRAYGPPAEIAIELARELKLTDEDKKRINRENNDNRIAAERRSEKLLAIGQADSGANRALLKLWEELNPANVLDRRCIYSGRQISIDMLFSAAVEVDHILPFAATLDDSNGNKIVCLREANREKRKRSPHDAWGHSARWDEIAARAAQLPRNKRWRFEPDAMDKFRDEGGFQARHLVDTQYLARLSREYLATLYPEKGEGSGHIWVSPGRLTEMVRRKLGLNDLLPDHNFGGGADQAKNRLDHRHHAIDAVVVAIVDRGMLNAIARASGQEGAEGRERIIIPEPWDGFRDALRETVNRITVSHRTDHGTASKAGLPKGKDATAGRLHNDTAYGFTGDTDAKGNSIVVRRVPLSSFKKLADLDRIRDADLKAALYQHLNGLEGKAFEKALAEFHKLEWHNFGGVRRVRVTEPLTVIPIKDRNGRIYKGYKGDSNYRYDVWELPDGKWVTNWKNEAGEAMSSVISMFDAHQSSEPPRPHPAARKILSLHQNDLLAIEREGEDRKLMRVVKFGQSGQITLAEHQQAGDLKKRDAVSNDDDPFKYFAPTSGGLKKVKARQVRIDEIGRVLDPGFPARTARRKTRG

SEQ ID NO: 425 - protein, 1090 aa, Sphingomonas sp.
  Sphingomonas sp. S17
MDWRLGLDLGANSLGWAALRLDRAGDPIGILAMGSRIFSDGRDPKSGASLAVDRRAARAMRRRRDRFKQRQAALLKYLIRDGLFPADQADRQRLADEDPYALRARALDEELSLFEIGRALFHLNQRRGFQSNRKADRGQDDEAGKIAVGVDRLNQQMEEQGARTLGEFLHQRRRAATDANHIPSVRTRLRPETGEGAKGDGYDFYPSRALIAEEFEEIWAAQAPHYPDTLTQQVHDRLYEIIFHQRPLRAPQVGQCTLVAGETRLPKAHPLFQKRRLLEEINALMIVRPGEIAQRLTPEERDTLYLKLKDKRTVSFATLRKTLKLDSAARFNKESENRTELKGDEVAAELGAKTRLGTRWQHLSGDQQWEVVHRLMALESQADEAAFRDWISQTYDLLPEQAAAVLGARLPQGHGRFGPTATTTLIDSLLHDRTEDGRVVVYSEAVQRSGLGHHSDLRHDRDDEDVTELPYYGVALERHIMPGTAEPTDPEEMRIGRLTNPTVHIGLNQLRHVVNRLIRAYGPPKEIAIELARELKLSEDEKKKRNSENRDNRLAAEGRSKKLEEIRQRDTGANRALLKLWEELNPGNVLDRRCIYTGEQISIDMLFSDRVEVDHILPFAQTLDDSNGNKLLCLREANREKRRRSPYEAWGHTDRWPDIAERASRLPKPKRWRFEPDAMQRFATEDGFLARHLVDTQYLGRLAREYLSWLYPGRGEGSGHVWVSPGRLTEMVRRKLGLNDLLPDHNFGGGADQPKNRLDHRHHAIDALVVAIVDRGMLQAIARASGQDGSEGRERIHIPAPWDGFRDDLRVAVNGIIVSHRPDHGTVAKAGLARGRDQTAGRLHNDTAYGLTGETDAKGNSIVVRRIPLSAIKKPADIARVRDPLLRNALAEFTKGLDGKAFEARIGRFHELGPLLYRGIRRVRVVETLTVIPIRDAEGRAYKGYKGDSNYRYDVWEMPDGKWRCQVVSMFDAHQSTEQARPHPAARKILSLQRNDILAIERTEGDRELVRVVKFSEKQFAVAPPHEGGSLKTRDGNADDPFRYLYPSPNTLKGWRARQVRIDELGRVLDPGFPARKSVRRTRPRAAPVD

SEQ ID NO: 426 - protein, 1084 aa, Sporolactobacillus vineae
  Sporolactobacillus vineae DSM 21990 = SL153
MKYSIGLDIGISSVGWSVINLDRERIELMGARLFDAAENPKNGSSLAAPRRDARSARRRLRRRRYRVGRVRHFIIDRGLVTRGQADQLFDWKDGDLDIWLVRVNALERLLTDREFARVLIHIAKNRGYRSNRKSEAKSGENGQVLSAIKANKELMEEKGYQTVAEMLVNEPETFAGRKRNRGGEYTHVIARSELEHEIRLIFTKQRAFGNRFATEENENTYVKIWAAQRPVATKDDILKKIGDCTFEKGEKRAPKASYAFQYFRALDKLNRLRILSVREPSRNLTDDERNLIVPALFNHDKQKYSDLRKILQLRDDQKFNELFYDPGKSLKENENKTFLSLAEQYKIRKVIRDVQGKDGLLQYRPLDIDTIAYALTVFKDDQDTRDYLSNTFVNGNGKQVLNLANRAFDAELIDGLLSLSFAKFGHLSLKALHKLIPHMEQGLSYYDACKKVGYHDNEQVGKSKQHLLPVIPADEIRNPVVVRSLSQTRKVINAIIKRYGSPTFMYIELAREMGRPYNERRDLEKQYNKNRTVNDSAIEQIHELYPEIGAPRGHDILKYKLWQQQDCKCAYSLEKIPAEKIFEPGYAEVDHIIPYSRSFDDSNSNKVLVLSRMNQEKKNRTPYEWFGGDEHRWNKFESYVNALKVNRKKKSLLTKKNMDTEEEDTFKSRHLNDTRYITRFIKSFVEDNLLFREIEGAKQHVFTVNGAYTSLMRKRWGFNKNREESDLHHSVDAVIIAVSQPFRNEVSRYFKHREISLPQLLKRTWDYFPEPWEGFVKELRARTLQDPEKLKLALESLDLDSYDPEFIDEVKPIFISRMPKRSIKGQIHDETLRRNRGKTKDGFVKIVTRTRLENIKFDKNGDFPMYGRESDPKTYQAIKQRYLENNKDKKKAFIEPLYKPAKNPNNASLIRSVKIEDKANQIVPLRDEAVAYNASIVRTEVYRNKETGKFYLAPVYVSDVFAGREPRRFIRANVPYEQWVNITDKFTFLFNLYPNDVIYIKMKKVKTTKSNINKTISWQESYFYFKGTDIHTGAITIIDHMNSFTDRVGTQGLQLFEKYQVDPLGNLSRVHGETQYGVPALSHS

SEQ ID NO: 427 - protein, 1053 aa, Staphylococcus aureus; identical to SEQ ID NO: 28
  Staphylococcus aureus subsp. aureus

SEQ ID NO: 428 - protein, 1054 aa, Staphylococcus lugdunensis
  Staphylococcus lugdunensis M23590
MNQKFILGLDIGITSVGYGLIDYETKNIIDAGVRLFPEANVENNEGRRSKRGSRRLKRRRIHRLERVKKLLEDYNLLDQSQIPQSTNPYAIRVKGLSEALSKDELVIALLHIAKRRGIHKIDVIDSNDDVGNELSTKEQLNKNSKLLKDKFVCQIQLERMNEGQVRGEKNRFKTADIIKEIIQLLNVQKNFHQLDENFINKYIELVEMRREYFEGPGKGSPYGWEGDPKAWYETLMGHCTYFPDELRSVKYAYSADLFNALNDLNNLVIQRDGLSKLEYHEKYHIIENVFKQKKKPTLKQIANEINVNPEDIKGYRITKSGKPQFTEFKLYHDLKSVLFDQSILENEDVLDQIAEILTIYQDKDSIKSKLTELDILLNEEDKENIAQLTGYTGTHRLSLKCIRLVLEEQWYSSRNQMEIFTHLNIKPKKINLTAANKIPKAMIDEFILSPVVKRTFGQAINLINKIIEKYGVPEDIIIELARENNSKDKQKFINEMQKKNENTRKRINEIIGKYGNQNAKRLVEKIRLHDEQEGKCLYSLESIPLEDLLNNPNHYEVDHIIPRSVSFDNSYHNKVLVKQSENSKKSNLTPYQYFNSGKSKLSYNQFKQHILNLSKSQDRISKKKKEYLLEERDINKFEVQKEFINRNLVDTRYATRELTNYLKAYFSANNMNVKVKTINGSFTDYLRKVWKFKKERNHGYKHHAEDALIIANADFLFKENKKLKAVNSVLEKPEIESKQLDIQVDSEDNYSEMFIIPKQVQDIKDFRNFKYSHRVDKKPNRQLINDTLYSTRKKDNSTYIVQTIKDIYAKDNTTLKKQFDKSPEKFLMYQHDPRTFEKLEVIMKQYANEKNPLAKYHEETGEYLTKYSKKNNGPIVKSLKYIGNKLGSHLDVTHQFKSSTKKLVKLSIKPYRFDVYLTDKGYKFITISYLDVLKKDNYYYIPEQKYDKLKLGKAIDKNAKFIASFYKNDLIKLDGEIYKIIGVNSDTRNMIELDLPDIRYKEYCELNNIKGEPRIKKTIGKKVNSIEKLTTDVLGNVFTNTQYTKPQLLFKRGN

SEQ ID NO: 429 - protein, 1334 aa, Staphylococcus pseudintermedius
MGRKPYILSLDIGTGSVGYACMDKGFNVLKYHDKDALGVYLFDGALTAQERRQFRTSRRRKNRRIKRLGLLQELLAPLVQNPNFYQFQRQFAWKNDNMDFKNKSLSEVLSFLGYESKKYPTIYHLQEALLLKDEKFDPELIYMALYHLVKYRGHFLFDHLKIENLTNNDNMHDFVELIETYENLNNIKLNLDYEKTKVIYEILKDNEMTKNDRAKRVKNMEKKLEQFSIMLLGLKFNEGKLFNHADNAEELKGANQSHTFADNYEENLTPFLTVEQSEFIERANKIYLSLTLQDILKGKKSMAMSKVAAYDKFRNELKQVKDIVYKADSTRTQFKKIFVSSKKSLKQYDATPNDQTFSSLCLFDQYLIRPKKQYSLLIKELKKIIPQDSELYFEAENDTLLKVLNTTDNASIPMQINLYEAETILRNQQKYHAEITDEMIEKVLSLIQFRIPYYVGPLVNDHTASKFGWMERKSNESIKPWNFDEVVDRSKSATQFIRRMTNKCSYLINEDVLPKNSLLYQEMEVLNELNATQIRLQTDPKNRKYRMMPQIKLFAVEHIFKKYKTVSHSKFLEIMLNSNHRENFMNHGEKLSIFGTQDDKKFASKLSSYQDMTKIFGDIEGKRAQIEEIIQWITIFEDKKILVQKLKECYPELTSKQINQLKKLNYSGWGRLSEKLLTHAYQGHSIIELLRHSDENFMEILTNDVYGFQNFIKEENQVQSNKIQHQDIANLTTSPALKKGIWSTIKLVRELTSIFGEPEKIIMEFATEDQQKGKKQKSRKQLWDDNIKKNKLKSVDEYKYIIDVANKLNNEQLQQEKLWLYLSQNGKCMYSGQSIDLDALLSPNATKHYEVDHIFPRSFIKDDSIDNKVLVIKKMNQTKGDQVPLQFIQQPYERIAYWKSLNKAGLISDSKLHKLMKPEFTAMDKEGFIQRQLVETRQISVHVRDFLKEEYPNTKVIPMKAKMVSEFRKKFDIPKIRQMNDAHHAIDAYLNGVVYHGAQLAYPNVDLFDFNFKWEKVREKWKALGEFNTKQKSRELFFFKKLEKMEVSQGERLISKIKLDMNHFKINYSRKLANIPQQFYNQTAVSPKTAELKYESNKSNEVVYKGLTPYQTYVVAIKSVNKKGKEKMEYQMIDHYVFDFYKFQNGNEKELALYLAQRENKDEVLDAQIVYSLNKGDLLYINNHPCYFVSRKEVINAKQFELTVEQQLSLYNVMNNKETNVEKLLIEYDFIAEKVINEYHHYLNSKLKEKRVRTFFSESNQTHEDFIKALDELFKVVTASATRSDKIGSRKNSMTHRAFLGKGKDVKIAYTSISGLKTTKPKSLFKLAESRNEL

SEQ ID NO: 430 - protein, 1334 aa, Staphylococcus pseudintermedius; identical to SEQ ID NO: 429
  Staphylococcus pseudintermedius ED99

SEQ ID NO: 431 - protein, 1112 aa, Staphylococcus simulans
  Staphylococcus simulans ACS-120-V-Sch1
MLVGLKFKQSILFENMENAEDIKESATGSDAISLSDDYYENLSEFLTDEQLNFIESANTFFMGIMLDRILKGATSISAAKVRDYKIFKSQLKLIKDIVYQNKYDKYHEFFVTSKEDMRAYQENPDAKNFGKLSKFDQYLIHSKDQYAKLMKDLKGLVPKEYTEVLNLIDEQKFLVVQNTTDNASIPYQNNVFEAENILRNQQKYYPEITEEMIGKVINLISFRIPYYVGPLTNKNGQSDFAWMIRKSDEQTLPWNFDKVIDKSKSAEKFIRRMTSKCTYLLEEDVLPKHSLLYQEMEVLNELNNVQLRGENEPKHRIHRLDPKVKQFIYHNLFQKKKNVTHKDLITLLQNSEHRNTLNKTSGQKLKVFGTQNDSKFASKLSTYNDMKAILGSVENKRQMIEELVLWITIFEDKAILKQKIGEKYPNITEKQLNQIVKLNYSGWGRLSEKLLTKEVNGRSLIDLMYSTENNFMEIITDKTLGFDCFIKNSNKVKNAKISYKDVAELRTSPALKKGIWNAIKMVREISNLFGAPEKIIIEFATEDQAKGKRQKSRSELWDDLVKKNNLKRNKEFEGLFEELKAYPDLDFSNPKLWLYIHQNGKCMYTKKPIDLERLMSDTNNQLYEIDHILPRTFVKDDSINNKVLVIQSANQKKSGDKMPLEIFDNHVLVPFWKMLYENDLISSSKLSKLMKKEFNDLDKEGFIQRQLVETRQIISHVSDFLTEEYPSTTVVPMKANVVSELRRKFDIPKIRQLNDWHHAVDAYLNGFVYQAARVFYPKVNLFEFNFKWEKVREKWRQLGEFTENNKKREFFLFKRMENYVNEYGEGMISKLIFDLDNFKFNYSRKVESTESAFYKQSAFSPKNTTAQYDSDKNKTAIYKEMKNKRGIVVSYTYVKKDQELIGYGVFNETVFEYVNNADVDMNTRALKIVRKAFPKLDIKKAQYLFSINKGDALLVNGHPFLFVSAYERINGKQLEFDIAMQRKIKQALSPYNNMTEQEKVEFYNQFAEKVIEEFRNSIGLQSRDRKVNLIKNLFNNTEKSNDSMTQSILEVLKMTKVSAERSKELKIRWNGQTPNTFIDTKNNAEIQYKSITGLKTTKPKSIFKLAESKNEL

SEQ ID NO: 432 - protein, 1370 aa, Streptococcus agalactiae
  Streptococcus agalactiae 2603V/R
MNKPYSIGLDIGTNSVGWSIITDDYKVPAKKMRVLGNTDKEYIKKNLIGALLFDGGNTAADRRLKRTARRRYTRRRNRILYLQEIFAEEMSKVDDSFFHRLEDSFLVEEDKRGSKYPIFATLQEEKDYHEKFSTIYHLRKELADKKEKADLRLIYIALAHIIKFRGHFLIEDDSFDVRNTDISKQYQDFLEIFNTTFENNDLLSQNVDVEAILTDKISKSAKKDRILAQYPNQKSTGIFAEFLKLIVGNQADFKKYFNLEDKTPLQFAKDSYDEDLENLLGQIGDEFADLFSAAKKLYDSVLLSGILTVIDLSTKAPLSASMIQRYDEHREDLKQLKQFVKASLPEKYQEIFADSSKDGYAGYIEGKTNQEAFYKYLSKLLTKQEDSENFLEKIKNEDFLRKQRTFDNGSIPHQVHLTELKAIIRRQSEYYPFLKENQDRIEKILTFRIPYYIGPLAREKSDFAWMTRKTDDSIRPWNFEDLVDKEKSAEAFIHRMTNNDFYLPEEKVLPKHSLIYEKFTVYNELTKVRYKNEQGETYFFDSNIKQEIFDGVFKEHRKVSKKKLLDFLAKEYEEFRIVDVIGLDKENKAFNASLGTYHDLEKILDKDFLDNPDNESILEDIVQTLTLFEDREMIKKRLENYKDLFTESQLKKLYRRHYTGWGRLSAKLINGIRDKESQKTILDYLIDDGRSNRNFMQLINDDGLSFKSIISKAQAGSHSDNLKEVVGELAGSPAIKKGILQSLKIVDELVKVMGYEPEQIVVEMARENQTTNQGRRNSRQRYKLLDDGVKNLASDLNGNILKEYPTDNQALQNERLFLYYLQNGRDMYTGEALDIDNLSQYDIDHIIPQAFIKDDSIDNRVLVSSAKNRGKSDDVPSLEIVKDCKVFWKKLLDAKLMSQRKYDNLTKAERGGLTSDDKARFIQRQLVETRQITKHVARILDERFNNELDSKGRRIRKVKIVTLKSNLVSNFRKEFGFYKIREVNNYHHAHDAYLNAVVAKAILTKYPQLEPEFVYGDYPKYNSYKTRKSATEKLFFYSNIMNFFKTKVTLADGTVVVKDDIEVNNDTGEIVWDKKKHFATVRKVLSYPQNNIVKKTEIQTGGFSKESILAHGNSDKLIPRKTKDIYLDPKKYGGFDSPIVAYSVLVVADIKKGKAQKLKTVTELLGITIMERSRFEKNPSAFLESKGYLNIRADKLIILPKYSLFELENGRRRLLASAGELQKGNELALPTQFMKFLYLASRYNESKGKPEEIEKKQEFVNQHVSYFDDILQLINDFSKRVILADANLEKINKLYQDNKENISVDELANNIINLFTFTSLGAPAAFKFFDKIVDRKRYTSTKEVLNSTLIHQSITGLYETRIDLGKLGED

SEQ ID NO: 433 - protein, 1377 aa, Streptococcus agalactiae
  Streptococcus agalactiae 515
MNKPYSIGLDIGTNSVGWSIITDDYKVPAKKMRVLGNTDKEYIKKNLIGALLFDGGNTAADRRLKRTARRRYTRRRNRILYLQEIFAEEMSKVDDSFFHRLEDSFLVEEDKRGSKYPIFATMQEEKYYHEKFPTIYHLRKELADKKEKADLRLVYLALAHIIKFRGHFLIEDDRFDVRNTDIQKQYQAFLEIFDTTFENNHLLSQNVDVEAILTDKISKSAKKDRILAQYPNQKSTGIFAEFLKLIVGNQADFKKHFNLEDKTPLQFAKDSYDEDLENLLGQIGDEFADLFSVAKKLYDSVLLSGILTVTDLSTKAPLSASMIQRYDEHHEDLKHLKQFVKASLPENYREVFADSSKDGYAGYIEGKTNQEAFYKYLLKLLTKQEGSEYFLEKIKNEDFLRKQRTFDNGSIPHQVHLTELRAIIRRQSEYYPFLKENQDRIEKILTFRIPYYVGPLAREKSDFAWMTRKTDDSIRPWNFEDLVDKEKSAEAFIHRMTNNDLYLPEEKVLPKHSLIYEKFTVYNELTKVRFLAEGFKDFQFLNRKQKETIFNSLFKEKRKVTEKDIISFLNKVDGYEGIAIKGIEKQFNASLSTYHDLKKILGKDFLDNTDNELILEDIVQTLTLFEDREMIKKCLDIYKDFFTESQLKKLYRRHYTGWGRLSAKLINGIRNKENQKTILDYLIDDGSANRNFMQLINDDDLSFKPIIDKARTGSHSDNLKEVVGELAGSPAIKKGILQSLKIVDELVKVMGYEPEQIVVEMARENQTTAKGLSRSRQRLTTLRESLANLKSNILEEKKPKYVKDQVENHHLSDDRLFLYYLQNGRDMYTKKALDIDNLSQYDIDHIIPQAFIKDDSIDNRVLVSSAKNRGKSDDVPSIEIVKARKMFWKNLLDAKLMSQRKYDNLTKAERGGLTSDDKARFIQRQLVETRQITKHVARILDERFNNEVDNGKKICKVKIVTLKSNLVSNFRKEFGFYKIREVNDYHHAHDAYLNAVVAKAILTKYPQLEPEFVYGMYRQKKLSKIVHEDKEEKYSEATRKMFFYSNLMNMFKRVVRLADGSIVVRPVIETGRYMGKTAWDKKKHFATVRKVLSYPQNNIVKKTEIQTGGFSKESILAHGNSDKLIPRKTKDIYLDPKKYGGFDSPIVAYSVLVVADIKKGKAQKLKTVTELLGITIMERSRFEKNPSAFLESKGYLNIRDDKLMILPKYSLFELENGRRRLLASAGELQKGNELALPTQFMKFLYLASRYNESKGKPEEIEKKQEFVNQHVSYFDDILQLINDFSKRVILADANLEKINKLYQDNKENIPVDELANNIINLFTFTSLGAPAAFKFFDKIVDRKRYTSTKEVLNSTLIHQSITGLYETRIDLGKLGED

SEQ ID NO: 434 - protein, 1370 aa, Streptococcus agalactiae; identical to SEQ ID NO: 432

SEQ ID NO: 435 - protein, 1378 aa, Streptococcus agalactiae
  Streptococcus agalactiae ATCC 13813
MNKPYSIGLDIGTNSVGWSIITDDYKVPAKKMRVLGNTDKEYIKKNLIGALLFDGGNTAADRRLKRTARRRYTRRRNRILYLQEIFAEEMSKVDDSFFHRLEDSFLVEEDKRGSKYPIFATMQEEKYYHEKFPTIYHLRKELADKKEKADLRLIYLALAHIIKFRGHFLIEDDRFDVRNTDIQKQYQAFLEIFDTTFENNDLLSQNVDVEAILTDKISKSAKKDRILARYPNQKSTGIFAEFLKLIVGNQADFKKHFNLEDKTPLQFAKDSYDEDLENLLGQIGDEFADLFSAAKKLYDSVLLSGILTVIDLSTKAPLSASMIQRYDEHHEDLKHLKQFVKASLPENYREVFADSSKDGYAGYIEGKTSQEAFYKYLLKLLTKQEGSEYLLEKIKNEDFLRKQRTFDNGSIPHQVHLTELRAIIRRQSEYYPFLKENLDRIEKILTFRIPYYVGPLAREKSDFAWMTRKTDDSIRPWNFEDLVDKEKSAEAFIHRMTNNDLYLPEEKVLPKHSLIYEKFTVYNELTKVRFLAEGFKDFQFLNRKQKETIFNSLFKEKRKVTEKDIISFLNKVDGYEGIAIKGIEKQFNASLSTYHDLKKILGKDFLDNTDNELILEDIIQTLTLFEDREMIKKRLDIYKDFFTESQLKKLYRRHYTGWGRLSAKLINGIRNKENQKTILDYLIDDGSANRNFMQLIKDAGLSFKPIIDKARTGSHSDNLKEVVGELAGSPAIKKGILQSLKIVDELVKVMGYEPEQIVVEMARENQTTAKGLSRSRQRLTTLRESLGNLKSNILEEKKPKYVKDQVENHHLSDDRLFLYYLQNGKDMYTDDELDIDNLSQYDIDHIIPQAFIKDDSIDNRVLVSSAKNRGKSDDVPSIEIVKARKMFWKNLLDAKLMSQRKYDNLTKAERGGLTSDDKARFIQRQLVETRQITKHVARILDERFNNELDSKGRRIRKVKIVTLKSNLVSNFRKEFGFYKIREVNNYHHAHDAYLNAVVAKAILTKYPQLEPEFVYGLYRRKKLSKIVREDKEEKYSEATRKMFFYSNLMNMFKRVVRLADGSIVVRPVIETGRYMGKTAWDKKKHFATVRKVLSYPQNNIVKKTEIQTGGFSKESILAHGNSDKLIPRKTKDIYLDPKKYGGFDSPIVAYSVLVVADIKKGKAQKLKTVTELLGITIMERSRFEKNTSAFLESKGYLNIRDDKLMILPKYSLFELENGRRRLLASAGELQKGNELALPTQFMKFLYLASRYNESKGKPEEIEKKQEFVNQHVSYFDDILQLINDFSNRVILADANLEKINKLYQDNKENIPVDELANNIINLFTFTSLGAPAAFKFFDKIVDRKRYTSTKEVLNSTLIHQSITGLYETRIDLGKLGEG

SEQ ID NO: 436 - protein, 1370 aa, Streptococcus agalactiae
  Streptococcus agalactiae CJB111
  MOD_RES (117)..(117): Any amino acid
MNKPYSIGLDIGTNSVGWSIITDDYKVPAKKMRVLGNTDKEYIKKNLIGALLFDGGNTAADRRLKRTARRRYTRRRNRILYLQEIFAEEMSKVDDSFFHRLEDSFLVEEDKRGSKYXIFATLQEEKDYHEKFSTIYHLRKELADKKEKADLRLIYIALAHIIKFRGHFLIEDDSFDVRNTDISKQYQDFLEIFNTTFENNDLLSQNVDVEAILTDKISKSAKKDRILAQYPNQKSTGIFAEFLKLIVGNQADFKKYFNLEDKTPLQFAKDSYDEDLENLLGQIGDEFADLFSAAKKLYDSVLLSGILTVIDLSTKAPLSASMIQRYDEHREDLKQLKQFVKASLPEKYQEIFADSSKDGYAGYIEGKTNQEAFYKYLSKLLTKQEDSENFLEKIKNEDFLRKQRTFDNGSIPHQVHLTELKAIIRRQSEYYPFLKENQDRIEKILTFRIPYYIGPLAREKSDFAWMTRKTDDSIRPWNFEDLVDKEKSAEAFIHRMTNNDFYLPEEKVLPKHSLIYEKFTVYNELTKVRYKNEQGETYFFDSNIKQEIFDGVFKEHRKVSKKKLLDFLAKEYEEFRIVDVIGLDKENKAFNASLGTYHDLEKILDKDFLDNPDNESILEDIVQTLTLFEDREMIKKRLENYKDLFTESQLKKLYRRHYTGWGRLSAKLINGIRDKESQKTILDYLIDDGRSNRNFMQLINDDGLSFKSIISKAQAGSHSDNLKEVVGELAGSPAIKKGILQSLKIVDELVKVMGYEPEQIVVEMARENQTTNQGRRNSRQRYKLLDDGVKNLASDLNGNILKEYPTDNQALQNERLFLYYLQNGRDMYTGEALDIDNLSQYDIDHIIPQAFIKDDSIDNRVLVSSAKNRGKSDDVPSLEIVKDCKVFWKKLLDAKLMSQRKYDNLTKAERGGLTSDDKARFIQRQLVETRQITKHVARILDERFNNELDSKGRRIRKVKIVTLKSNLVSNFRKEFGFYKIREVNNYHHAHDAYLNAVVAKAILTKYPQLEPEFVYGDYPKYNSYKTRKSATEKLFFYSNIMNFFKTKVTLADGTVVVKDDIEVNNDTGEIVWDKKKHFATVRKVLSYPQNNIVKKTEIQTGGFSKESILAHGNSDKLIPRKTKDIYLDPKKYGGFDSPIVAYSVLVVADIKKGKAQKLKTVTELLGITIMERSRFEKNPSAFLESKGYLNIRADKLIILPKYSLFELENGRRRLLASAGELQKGNELALPTQFMKFLYLASRYNESKGKPEEIEKKQEFVNQHVSYFDDILQLINDFSKRVILADANLEKINKLYQDNKENISVDELANNIINLFTFTSLGAPAAFKFFDKIVDRKRYTSTKEVLNSTLIHQSITGLYETRIDLGKLGED

SEQ ID NO: 437 - protein, 1370 aa, Streptococcus agalactiae
  Streptococcus agalactiae COH1
MNKPYSIGLDIGTNSVGYSVVTDDYKVPAKKMRVLGNTDKEYIKKNLIGALLFDGGNTASDRRLKRTARRRYTRRRNRILYLQEIFAEEMSKVDDSFFHRLEDSFLVEDDKRGSKYPIFATMQEEKDYHEKFPTIYHLRKELADKKEKANLRLVYLALAHIIKFRGHFLIEDDSFDVRNTDIQRQYQAFLEIFDTTFENNHLLSQNIDVEGILTDKISKSAKKDRILAQYPNQKSTGIFAEFLKLIVGNQADFKKHFNLEDKTPLQFAKDSYDEDLENLLGQIGDEFADLFSVAKKLYDSVLLSGILTVTDLSTKAPLSASMIQRYDEHREDLKQLKQFVKASLPEKYQEIFTDSSKDGYAGYIEGKTNQGAFYKYLSKLLTKQEGSEYFLEKIKNEDFLRKQRTFDNGSIPHQVHLTELKAIIRRQSEYYPFLKENLDRIEKILTFRIPYYVGPLAREKSDFAWMTRKTDDSIRPWNFEELVDKEASAEAFIHRMTNNDLYLPEEKVLPKHSLIYEKFTVYNELTKVRYKNEQGETYFFDSNIKQEIFDGVFKEHRKVSKKKLLDFLAKEYEEFRIVDVIGLDKENKAFNASLGTYHDLKKILDKDFLDNPDNESILEDIVQTLTLFEDREMIKKRLENYKDLFTESQLKKLYRRHYTGWGRLSAKLINGIRDKESQKTILDYLISDGRANRNFMQLIHDDGLSFKPIIDKAQAGSHSDNLKEVVGELAGSPAIKKGILQSLKIVDELVKVMGYEPEQVVVEMARENQTTNQGRRNTRQRYKLLEEGVKNLASDLNGNILKEYPTDNQALQNERLFLYYLQNGRDMYTGEALDIDNLSQYDIDHIVPQAFIKDDSIDNRVLVSSAKNRGKSDNVPSIDIVKARKAFWKKLLDAKLMSQRKYDNLTKAERGGLTSDDKARFIQRQLVETRQITKHVARILDERFNNELDSKGRRIRKVKIVTLKSNLVSNFRKEFGFYKIREVNDYHHAHDAYLNAVVAKAILTKYPQLEPEFVYGDYPKYNSYKTRKSATEKLFFYSNIMNFFKTKVTLADGTVVVKDDIEVNNDTGEIVWDKKKHFATVRKVLSYPQVNIVKKTEIQTGGFSKESILAHGNSDKLIPRKTKDIYLDPKKYGGFDSPIVAYSVLVVADIKKGKAQKLKTVTELLGITIMERFRFEKNPSAFLESKGYLNIRDDKLMILPKYSLFELENGRRRLLASAGELQKGNELALPTQYMKFLYLASRYNELKGKPEEIEQKQEFVVQHVSYFDDILQIINDFSNRVILADANLEKINKLYQDNKENISVDELANNIINLFTFTSLGAPAAFKFFDKIVDRKRYTSTKEVLNSTLIHQSITGLYETRIDLGKLGED

SEQ ID NO: 438 - protein, 1370 aa, Streptococcus agalactiae
  Streptococcus agalactiae FSL S3-026
MNKPYSIGLDIGTNSVGWSIITDDYKVPAKKMRVLGNTDKEYIKKNLIGALLFDGGNTAADRRLKRTARRRYTRRRNRILYLQEIFAEEMSKVDDSFFHRLEDSFLVEEDKRGSKYPIFATMQEEKYYHEKFPTIYHLRKELADKKEKADLRLIYLALAHIIKFRGHFLIEDDRFDVRNTDIQKQYQAFLEIFDTTFENNDLLSQNVDVEAILTDKISKSAKKDRILARYPNQKSTGIFAEFLKLIVGNQADFKKHFNLEDKTPLQFAKDSYDEDLENLLGQIGDEFADLFSAAKKLYDSVLLSGILTVTDLSTKAPLSASMIQRYDEHREDLKQLKQFVKASLPEKYQEIFADSSKDGYAGYIEGKTNQEAFYKYLSKLLTKQEGSEYLLEKIKNEDFLRKQRTFDNGSIPHQVHLTELRAIIRRQSEYYPFLKENLDRIEKILTFRIPYYVGPLAREKSDFAWMTRKTDDSIRPWNFEDLVDKEKSAEAFIHRMTNNDLYLPEEKVLPKHSLIYEKFTVYNELTKVRFLAEGFKDFQFLNRKQKETIFNSLFKEKRKVTEKDIISFLNKVDGYEGIAIKGIEKQFNASLSTYHDLKKILGKDFLDNTDNELILEDIVQTLTLFEDREMIRKRLDIYKDFFTESQLKKLYRRHYTGWGRLSAKLINGIRNKENQKTILDYLIDDGSANRNFMQLIKDAGLSFKPIIDKARTGSHSDNLKEVVGELAGSPAIKKGILQSLKIVDELVKVMGYEPEQIVVEMARENQTTAKGLSRLRQRLTTLRESLANLKSNILEEKKPKYVKDQVENHHLSDDRLFLYYLQNGKDMYTDDELDIDNLSQYDIDHIIPQAFIKDDSIDNRVLVSSAKNRGKSDDVPSVEIVKDCKVFWKKLLDAKLMSQRKYDNLTKAERGGLTSDDKARFIQRQLVETRQITKHVARILDERFNNELDSKGRRIRKVKIVTLKSNLVSNFRKEFGFYKIREVNNYHHAHDAYLNAVVAKAILTKYPQLEPEFVYGDYPKYNSYKTRKSATEKLFFYSNIMNFFKTKVTLADGTVVVKDDIEVNNDTGEIVWDKKKHFATVRKVLSYPQVNIVKKTEIQTGGFSKESILAHGNSDKLIPRKTKDIYLDPKKYGGFDSPIVAYSVLVVADIKKGKAQKLKTVTELLGITIMERSRFEKNPSAFLESKGYLNIRDDKLMILPKYSLFELENGRRRLLASADELQKGNELALPTQFMKFLYLASRYNELKGKPEEIEQKQEFVVQHVSYFDDILQIINDFSNRVILADANLEKINKLYQDNKENIPVDELANNIINLFTFTSLGAPAAFKFFDKIVDRKRYTSTKEVLNSTLIHQSITGLYETRIDLGKLGED

SEQ ID NO: 439 - protein, 1370 aa, Streptococcus agalactiae
  Streptococcus agalactiae GB00112
MNKPYSIGLDIGTNSVGYSVVTDDYKVPAKKMRVLGNTDKEYIKKNLIGALLFDGGNTASDRRLKRTARRRYTRRRNRILYLQEIFAEEMSKVDDSFFHRLEDSFLVEDDKRGSKYPIFATMQEEKDYHEKFPTIYHLRKELADKKEKADLRLVYLALAHIIKFRGHFLIEDDSFDVRNTDIQRQYQAFLEIFDTTFENNHLLSQNIDVEGILTDKISKSAKKDRILAQYPNQKSTGIFAEFLKLIVGNQADFKKHFNLEDKTPLQFAKDSYDEDLENLLGQIGDEFADLFSVAKKLYDSVLLSGILTVTDLSTKAPLSASMIQRYDEHREDLKQLKQFVKASLPEKYQEIFTDSSKDGYAGYIEGKTNQGAFYKYLSKLLTKQEGSEYFLEKIKNEDFLRKQRTFDNGSIPHQVHLTELKAIIRRQSEYYPFLKENLDRIEKILTFRIPYYVGPLAREKSDFAWMTRKTDDSIRPWNFEELVDKEASAEAFIHRMTNNDLYLPEEKVLPKHSLIYEKFTVYNELTKVRYKNEQGETYFFDSNIKQEIFDGVFKEHRKVSKKKLLDFLAKEYEEFRIVDVIGLDKENKAFNASLGTYHDLKKILDKDFLDNPDNESILEDIVQTLTLFEDREMIKKRLENYKDLFTESQLKKLYRRHYTGWGRLSAKLINGIRDKESQKTILDYLISDGRANRNFMQLIHDDGLSFKPIIDKAQAGSHSDNLKEVVGELAGSPAIKKGILQSLKIVDELVKVMGYEPEQVVVEMARENQTTNQGRRNTRQRYKLLEEGVKNLASDLNGNILKEYPTDNQALQNERLFLYYLQNGRDMYTGEALDIDNLSQYDIDHIVPQAFIKDDSIDNRVLVSSAKNRGKSDNVPSIDIVKARKAFWKKLLDAKLMSQRKYDNLTKAERGGLTSDDKARFIQRQLVETRQITKHVARILDERFNNELDSKGRRIRKVKIVTLKSNLVSNFRKEFGFYKIREVNDYHHAHDAYLNAVVAKAILTKYPQLEPEFVYGDYPKYNSYKTRKSATEKLFFYSNIMNFFKTKVTLADGTVVVKDDIEVNNDTGEIVWDKKKHFATVRKVLSYPQVNIVKKTEIQTGGFSKESILAHGNSDKLIPRKTKDIYLDPKKYGGFDSPIVAYSVLVVADIKKGKAQKLKTVTELLGITIMERFRFEKNPSAFLESKGYLNIRDDKLMILPKYSLFELENGRRRLLASAGELQKGNELALPTQYMKFLYLASRYNELKGKPEEIEQKQEFVVQHVSYFDDILQIINDFSNRVILADANLEKINKLYQDNKENISVDELANNIINLFTFTSLGAPAAFKFFDKIVDRKRYTSTKEVLNSTLIHQSITGLYETRIDLGKLGED

SEQ ID NO: 440 - protein, 1370 aa, Streptococcus agalactiae
  Streptococcus agalactiae H36B
  MOD_RES (9)..(9): Any amino acid
MNKPYSIGXDIGTNSVGWSIITDDYKVPAKKMRVLGNTDKEYIKKNLIGALLFDGGNTAADRRLKRTARRRYTRRRNRILYLQEIFAEEMSKVDDSFFHRLEDSFLVEEDKRGSKYPIFATLQEEKDYHEKFSTIYHLRKELADKKEKADLRLIYIALAHIIKFRGHFLIEDDSFDVRNTDISKQYQDFLEIFNTTFENNDLLSQNVDVEAILTDKISKSAKKDRILAQYPNQKSTGIFAEFLKLIVGNQADFKKYFNLEDKTPLQFAKDSYDEDLENLLGQIGDEFADLFSAAKKLYDSVLLSGILTVIDLSTKAPLSASMIQRYDEHREDLKQLKQFVKASLPEKYQEIFADSSKDGYAGYIEGKTNQEAFYKYLSKLLTKQEDSENFLEKIKNEDFLRKQRTFDNGSIPHQVHLTELKAIIRRQSEYYPFLKENQDRIEKILTFRIPYYIGPLAREKSDFAWMTRKTDDSIRPWNFEDLVDKEKSAEAFIHRMTNNDFYLPEEKVLPKHSLIYEKFTVYNELTKVRYKNEQGETYFFDSNIKQEIFDGVFKEHRKVSKKKLLDFLAKEYEEFRIVDVIGLDKENKAFNASLGTYHDLEKILDKDFLDNPDNESILEDIVQTLTLFEDREMIKKRLENYKDLFTESQLKKLYRRHYTGWGRLSAKLINGIRDKESQKTILDYLIDDGRSNRNFMQLINDDGLSFKSIISKAQAGSHSDNLKEVVGELAGSPAIKKGILQSLKIVDELVKVMGYEPEQIVVEMARENQTTNQGRRNSRQRYKLLDDGVKNLASDLNGNILKEYPTDNQALQNERLFLYYLQNGRDMYTGEALDIDNLSQYDIDHIIPQAFIKDDSIDNRVLVSSAKNRGKSDDVPSLEIVKDCKVFWKKLLDAKLMSQRKYDNLTKAERGGLTSDDKARFIQRQLVETRQITKHVARILDERFNNELDSKGRRIRKVKIVTLKSNLVSNFRKEFGFYKIREVNNYHHAHDAYLNAVVAKAILTKYPQLEPEFVYGDYPKYNSYKTRKSATEKLFFYSNIMNFFKTKVTLADGTVVVKDDIEVNNDTGEIVWDKKKHFATVRKVLSYPQNNIVKKTEIQTGGFSKESILAHGNSDKLIPRKTKDIYLDPKKYGGFDSPIVAYSVLVVADIKKGKAQKLKTVTELLGITIMERSRFEKNPSAFLESKGYLNIRADKLIILPKYSLFELENGRRRLLASAGELQKGNELALPTQFMKFLYLASRYNESKGKPEEIEKKQEFVNQHVSYFDDILQLINDFSKRVILADANLEKINKLYQDNKENISVDELANNIINLFTFTSLGAPAAFKFFDKIVDRKRYTSTKEVLNSTLIHQSITGLYETRIDLGKLGED

SEQ ID NO: 441 - protein, 1377 aa, Streptococcus agalactiae
MNKPYSIGLDIGTNSVGWSIITDDYKVPAKKMRVLGNTDKEYIKKNLIGALLFDGGNTAADRRLKRTARRRYTRRRNRILYLQEIFAEEMSKVDDSFFHRLEDSFLVEEDKRGSKYPIFATMQEEKYYHEKFPTIYHLRKELADKKEKADLRLVYLALAHIIKFRGHFLIEDDRFDVRNTDIQKQYQAFLEIFDTTFENNHLLSQNVDVEAILTDKISKSAKKDRILAQYPNQKSTGIFAEFLKLIVGNQADFKKHFNLEDKTPLQFAKDSYDEDLENLLGQIGDEFADLFSVAKKLYDSVLLSGILTVTDLSTKAPLSASMIQRYDEHHEDLKHLKQFVKASLPENYREVFADSSKDGYAGYIEGKTNQEAFYKYLLKLLTKQEGSEYFLEKIKNEDFLRKQRTFDNGSIPHQVHLTELRAIIRRQSEYYPFLKENQDRIEKILTFRIPYYVGPLAREKSDFAWMTRKTDDSIRPWNFEDLVDKEKSAEAFIHRMTNNDLYLPEEKVLPKHSLIYEKFTVYNELTKVRFLAEGFKDFQFLNRKQKETIFNSLFKEKRKVTEKDIISFLNKVDGYEGIAIKGIEKQFNASLSTYHDLKKILGKDFLDNTDNELILEDIVQTLTLFEDREMIKKCLDIYKDFFTESQLKKLYRRHYTGWGRLSAKLINGIRNKENQKTILDYLIDDGSANRNFMQLINDDDLSFKPIIDKARTGSHSDNLKEVVGELAGSPAIKKGILQSLKIVDELVKVMGYEPEQIVVEMARENQTTAKGLSRSRQRLTTLRESLANLKSNILEEKKPKYVKDQVENHHLSDDRLFLYYLQNGRDMYTKKALDIDNLSQYDIDHIIPQAFIKDDSIDNRVLVSSAKNRGKSDDVPSIEIVKARKMFWKNLLDAKLMSQRKYDNLTKAERGGLTSDDKARFIQRQLVETRQITKHVARILDERFNNEVDNGKKICKVKIVTLKSNLVSNFRKEFGFYKIREVNDYHHAHDAYLNAVVAKAILTKYPQLEPEFVYGMYRQKKLSKIVHEDKEEKYSEATRKMFFYSNLMNMFKRVVRLADGSIVVRPVIETGRYMRKTAWDKKKHFATVRKVLSYPQNNIVKKTEIQTGGFSKESILAHGNSDKLIPRKTKDIYLDPKKYGGFDSPIVAYSVLVVADIKKGKAQKLKTVTELLGITIMERSRFEKNPSAFLESKGYLNIRDDKLMILPKYSLFELENGRRRLLASAGELQKGNELALPTQFMKFLYLASRYNESKGKPEEIEKKQEFVNQHVSYFDDILQLINDFSKRVILADANLEKINKLYQDNKENIPVDELANNIINLFTFTSLGAPAAFKFFDKIVDRKRYTSTKEVLNSTLIHQSITGLYETRIDLGKLGED

SEQ ID NO: 442 - protein, 1370 aa, Streptococcus agalactiae
MNKPYSIGLDIGTNSVGWSIITDDYKVPAKKMRVLGNTDKEYIKKNLIGALLFDGGNTAADRRLKRTARRRYTRRRNRILYLQEIFAEEMSKVDDSFFHRLEDSFLVEEDKRGSKYPIFATMQEEKDYHEKFPTIYHLRKELADKKEKADLRLVYLALAHIIKFRGHFLIEDDRFDVRNTDIQKQYQAFLEIFDTSFENNHLLSQNVDVEAILTDKISKSAKKDRILAQYPNQKSTGIFAEFLKLIVGNQADFKKHFNLEDKTPLQFAKDSYDEDLENLLGQIGDEFADLFSAAKKLYDSVLLSGILTVTDLSTKAPLSASMIQRYDEHREDLKQLKQFVKASLPEKYQEIFADSSKDGYAGYIEGKTNQEAFYKYLSKLLTKQEDSEYFLEKIKNEDFLRKQRTFDNGSIPHQVHLTELKAIIRRQSEYYPFLKENQDKIEKILTFRIPYYVGPLARGNSDFAWMTRKTDDSIRPWNFEDLVDKEKSAEAFIHRMTNNDLYLPEEKVLPKHSLIYEKFTVYNELTKVRYKNEQGETYFFDSNVKQEIFDGVFKEHRKVSKKQLLDFLAKEFEEFRIVDVTGLDKENKAFNASLGTYHDLKKILDKDFLDNPDNESILEDIVQTITLFEDREMIKKRLENYKDLFTESQLKKLYRRHYTGWGRLSAKLINGIRDRESQKTILDYLISDGRANRNFMQLINDDGLSFKSIISKAQSGSHSDNLKEVVGELAGSPAIKKGILQSLKIVDELVKVMGYEPEQIVVEMARENQTTNQGRRNSRQRYKLLEDGVKNLASDLNGDILKEYPTDNQALQNERLFLYYLQNGRDMYTGEALDIDNLSQYDIDHIVPQAFIKDDSIDNRVLVSSAKNRGKSDDVPSIDIVKARKAFWKKLLDAKLISQRKYDNLTKAERGGLTPDDKAGFIQRQLVETRQITKHVARILDERFNNKVDDNNKPIRKVKIVTLKSNLVSNFRKEFGFYKIREVNNYHHAHDAYLNAVVAKAILTKYPQLEPEFVYGDYPKYNSYKTRKSATEKLFFYSNIMNFFKTKVTLADETVVVKDDIEVNNETGEIAWDKKKHFATVRKVLSYPQVNIVKKTEVQTGGFSKESILAHSNSDKLIPRKTKDIYLDPKKYGGFDSPIVAYSVLVLADIKKGKAQKLKTVKELIGITIMERERFEKNPSAFLESKGYLNIRTDKLIILPKYSLFELENGRRRLLASAGELQKGNELALPTQYMKFLYLASRYNESKGKPEEIEKKQEFVNQHVSYFDDILQLINDFSKRVILADANLEKINKLYSDNKDNTPVDELAKNIINLFTFTSLGAPAAFKFFDKSVDRKRYTSTKEVLDSTLIHQSITGLYETRIDLGKLGED

SEQ ID NO: 443 - protein, 1370 aa, Streptococcus agalactiae
  Streptococcus agalactiae STIR-CD-17
MNKPYSIGLDIGTNSVGWSIITDDYKVPAKKMRVLGNTDKEYIKKNLIGALLFDGGNTAADRRLKRTARRRYTRRRNRILYLQEIFAEEMSKVDDSFFHRLEDSFLVEEDKRGSKYPIFATMQEEKDYHEKFPTIYHLRKELADKKEKADLRLVYLALAHIIKFRGHFLIEDDRFDVRNTDIQKQYQAFLEIFDTSFENNHLLSQNVDVEAILTDKISKSAKKDRILAQYPNQKSTGIFAEFLKLIVGNQADFKKHFNLEDKTPLQFAKDSYDEDLENLLGQIGDEFADLFSAAKKLYDSVLLSGILTVTDLSTKAPLSAYMIQRYDEHREDLKQLKQFVKASLPEKYQEIFADSSKDGYAGYIEGKTNQEAFYKYLSKLLTKQEDSEYFLEKIKNEDFLRKQRTFDNGSIPHQVHLTELKAIIRRQSEYYPFLKENQDKIEKILTFRIPYYVGPLARGNSDFAWMTRKTDDSIRPWNFEDLVDKEKSAEAFIHRMTNNDLYLPEEKVLPKHSLIYEKFTVYNELTKVRYKNEQGETYFFDSNVKQEIFDGVFKEHRKVSKKQLLDFLAKEFEEFRIVDVTGLDKENKAFNASLGTYHDLKKILDKDFLDNPDNESILEDIVQTITLFEDREMIKKRLENYKDLFTESQLKKLYRRHYTGWGRLSAKLINGIRDRESQKTILDYLISDGRANRNFMQLINDDGLSFKSIISKAQSGSHSDNLKEVVGELAGSPAIKKGILQSLKIVDELVKVMGYEPEQIVVEMARENQTTNQGRRNSRQRYKLLEDGVKNLASDLNGDILKEYPTDNQALQNERLFLYYLQNGRDMYTGEALDIDNLSQYDIDHIVPQAFIKDDSIDNRVLVSSAKNRGKSDDVPSIDIVKARKAFWKKLLDAKLISQRKYDNLTKAERGGLTPDDKAGFIQRQLVETRQITKHVARILDERFNNKVDDNNKPIRKVKIVTLKSNLVSNFRKEFGFYKIREVNNYHHAHDAYLNAVVAKAILTKYPQLEPEFVYGDYPKYNSYKTRKSATEKLFFYSNIMNFFKTKVTLADETVVVKDDIEVNNETGEIAWDKKKHFATVRKVLSYPQVNIVKKTEVQTGGFSKESILAHSNSDKLIPRKTKDIYLDPKKYGGFDSPIVAYSVLVLADIKKGKAQKLKTVKELIGITIMERERFEKNPSAFLESKGYLNIRTDKLIILPKYSLFELENGRRRLLASAGELQKGNELALPTQYMKFLYLASRYNESKGKPEEIEKKQEFVNQHISYFDDILQLINDFSKRVILADANLEKINKLYSDNKDNTPVDELAKNIINLFTFTSLGAPAAFKFFDKSVDRKRYTSTKEVLDSTLIHQSITGLYETRIDLGKLGED

SEQ ID NO: 444 - protein, 1125 aa, Streptococcus anginosus
  Streptococcus anginosus 1_2_62CV
MNGLVLGLDIGIASVGVGILNKETGEIIHANSRIFPAATADSNVERRGFRQGRRLGRRKKHRSARLNNLFEEFGFITDFSAIPLNLNPYALRVKGLSEELTNEELFIALKNIIKRRGISYLDDASEDGETASNEYGKAVEENRKLLADKTPGQIQLERFEKYGQVRGDFTVVENGENHRLINVFSTSAYKKEAERILRRQQEFNVRISDEFIEAYLTILTGKRKYYHGPGNEKSRTDYGRFRTDGTTLDNIFGILIGKCTFYPDEYRAAKASYTAQEFNLLNDLNNLTVPTETKKLSPEQKRQIVEYARTAKTLGTPTLLKYIAKLVDGSIDDIKGYRIDKSDKPEMHTFDAYRKMRTLDLVNIDALSRETLDDLAHILTLNTESEGILEALNSKMPSTFTKEQIDELIQFRKKNSAVFGKGWHNFSLKLMNELISELYETSEEQMTILTRLGKQRSREISKRTKYIDEKELTEEIYNPVVAKSVRQAIKIINEATKRYGIFDNIVIEMARENNEEDAKKDYIKRQKANQDEKNASMEKAAFQYNGKKELPDSIFHGHKELATKIRLWHQQGERCLYTGKNISIRDLIHNPHQYEIDHILPLSLSFDDGLANKVLVLATANQEKGQRTPFQAIDSMDDAWSYREFKQYVRNSKSLSNKKKDYLLTEEDISKIEVKQKFIERNLVDTRYSSRVVLNTLQEFYKTNDFDTKISVVRGQFTSQLRRKWKIEKSRDTYHHHAVDALIIAASSQLRLWKKQNNPLISYKEGQFVDPETGEILSLTDDEYKELVFRPPYDYFVDTLKSKSFEDSILFSYQVDSKYNRKISDATIYGTRKAQLGKDKQEETYVLGKIKDIYSQKGYEDFIKRYNKDETQFLIYHKDPQTFEKVIEEILKTYPDKELNEKGKEIPCNPFEKYRQENGPIRKYSKKGKGPEIKSLKYYDNKLGNHIDITPVNSQNQVVLQSLKPWRTDVYFNPRTSKYELMGLKYSDLRFEKGSGSYGISPEKYNKVKAKEGVNEDSEFKFTLYKNDLILIKDTETGEQQLFRYGSRNDTSKHYVELKPYEKAKFEGNQQLMNLLGTVAKGGQCLKGINKPNLSIYKVKTDVLGNKYFIKKEGDQPQLNFKKKF

SEQ ID NO: 445 - protein, 1345 aa, Streptococcus anginosus
  Streptococcus anginosus F0211
MDQKYSIGLDIGTNSVGWAVVTDDYKVPAKKMKVLGNTDKQSIKKNLLGALLFDSGETAEATRLKRTARRRYTRRRNRLRYLQEIFAEEMNKVDENFFQRLDDSFLVDEDKRGERHPIFGNIAAEVKYHDDFPTIYHLRKHLADISQKADLRLVYLALAHMIKFRGHFLIEGQLKAENTNVQALFKDFVEVYDKTVEESHLSEMTVDALSILTEKVSKSRRLENLIAHYPAEKKNTLFGNLIALSLGLQPNFKTNFQLSEDAKLQFSKDTYEEDLEGLLGEIGDEYADLFASAKNLYDAILLSGILTVDDNSTKAPLSASMVKRYEEHQKDLKKLKDFIKVNAPDQYNAIFKDKNKKGYAGYIENGVKQDEFYKYLKGILLQINGSGDFLDKIDREDFLRKQRTFDNGSIPHQIHLQEMHAILRRQEEHYPFLKENQDKIEKILTFRIPYYVGPLARKGSRFAWAEYKADEKITPWNFDDILDKEKSAEKFITRMTLNDLYLPEEKVLPKHSLLYETFTVYNELTKVKYVNEQGEAKFFDANMKQEIFDHVFKENRKVTKDKLLNYLNKEFEEFRIVNLTGLDKENKAFNSSLGTYHDLRKILDKSFLDDKANEKTIEDIIQTLTLFEDREMIRQRLQKYSDIFTKAQLKKLERRHYTGWGRLSYKLINGIRNKENKKTILDYLIDDGYANRNFMQLINDDALSFKEEIARAQIIGDVDDIANVVHDLPGSPAIKKGILQSVKIVDELVKVMGHNPANIIIEMARENQMTDKGRRNSQQRLKLLQDSLKNLDNPVNIKNVENQQLQNDRLFLYYIQNGKDMYTGETLDINNLSQYDIDHIIPQAFIKDNSLDNRVLTRSDKNRGKSDDVPSIEVVHEMKSFWSKLLSVKLITQRKFDNLTKAERGGLTEEDKAGFIKRQLVETRQITKHVAQILDERFNTEFDGNKRRIRNVKIITLKSNLVSNFRKEFELYKVREINDYHHAHDAYLNAVVGNALLLKYPQLEPEFVYGEYPKYNSYRSRKSATEKFLFYSNILRFFKKEDIQTNEDGEIAWNKEKHIKILRKVLSYPQVNIVKKTEEQTGGFSKESILPKGESDKLIPRKTKNSYWNPKKYGGFDSPVVAYSILVFADVEKGKSKKLRKVQDMVGITIMEKKRFEKHPVDFLEQRGYRNVRLEKIIKLPKYSLFELENKRRRLLASARELQKGNELVIPQRFTTLLYHSYQIEKNYEPEHREYVEKHKDEFKELLEYISVFSRKYVLADNNLTKIEMLFSKNKDAEVSSLAKSFISLLTFTAFGAPAAFNFFGENIDRKRYTSVTECLNATLIHQSITGLYETRIDLSKLGED

SEQ ID NO: 446 - protein, 1386 aa, Streptococcus anginosus
  Streptococcus anginosus SK1138
MNQKYSIGLDIGTNSVGWAVITDDYKVPAKKMKVLGNTDKQSIKKNLLGALLFDSGETAEATRLKRTARRRYTRRRNRLRYLQEIFAEEMMQVDESFFQRLDDSFLVDEDKRGERHPIFGNIAAEVKYHDEFPTIYHLRKHLADISQKADLRLVYLALAHMIKFRGHFLIEGQLKAENTNVQALFKDFVEVYDKTVEESHLSEITVDALSILTEKVSKSRRLENLIAHYPAEKKNTLFGNLIALFLGLQPNFKTNFQLSEDAKLQFSKDTYEEDLEGLLGEVGDEYADLFASAKNLYDAILLSGILTVDDNSTKAPLSASMVKRYEEHQKDLKKFEDFIKVNALDQYNAIFKDKNKKGYAGYIESGVKQDEFYKYLKGILLQINGSGDFLDKIDREDFLRKQRTFDNGSIPHQIHLQEMHAILRRQGEHYPFLKENQDKIEKILTFRIPYYVGPLARKGSRFAWAEYKADEKITPWNFDDILDKEKSAEKFITRMTLNDLYLPEEKVLPKHSLLYETFTVYNELTKVKYVNEQGEAKFFDANMKQEIFDHVFKENRKVTKDKLLNYLNKEFEEFRIVNLTGLDKENKVFNSSLGTYHDLRKILNKSFLDNKENAQIIEDIIQTLTLFEDREMIRQRLQKYSDIFTKAQLKKLERRHYTGWGRLSYKLINGIRNKENKKTILDYLIDDGYANRNFMQLINDDALSFKEEIAKAQIIGDVDDIANVVHDLPGSPAIKKGILQSVKIVDELVKVMGHNPANIIIEMARENQTTDRGRRNSQQRLKLLQDSLKNLDNPVNIKNVENQQLQNDRLFLYYIQNGKDMYTGETLDINNLSQYDIDHIIPQAYIKDDSFDNRVLTSSSENRGKSDNVPSIEVVCARKADWMRLRKAGLISQRKFDNLTKAERGGLTENDKAGFIKRQLVETRQITKHVAQVLDARFNAKHDENKKVIRDVKIITLKSNLVSQFRKDFKFYKVREINDYHHAHDAYLNAVIGTALLKKYPKLASEFVYGEFKKYDVRKFIAKSDKEIGKATAKYFFYSNLMNFFKKEVKFADGTVVERPDIETSEDGEIAWNKQTDFKIVRKVLSYPQVNIVKKTEVQTHGLDRGKPRGLFNANPSPKPKPDSSENLVGVKRNLDPKKYGGYAGISNSYAVLVKAIIEKGVKKKETMVLEFQGISILDRITFEKDKRAFLLGKGYKDIKKIIELPKYSLFELKDGSRRMLASILSTNNKRGEIHKGNELFVPQKFTTLLYHAKRINNPINKDHIEYVKKHRDDFKELLNYVLEFNEKYVGATKNGERLKEAVADFDSKSNEEICTSFLGAVNSKNAGLFELTSLGSASDFEFLGVKIPRYRDYTPSSLLKDSTLIHQSITGLYETRIDLSKLGED

SEQ ID NO: 447 - protein, 1396 aa, Streptococcus anginosus
  Streptococcus anginosus SK52 = DSM 20563
MTKPYSIGLDIGTNSVGWAVITDDYKVPAKKMKVLGNTNRDYIKKNLLGALLFDGGETAEGRRLKRTARRRYTRRKNRLRYLQEIFAEEMMQVDESFFQRLDDSFLVEEDKQGSKYPIFGTLKEEKEYHKKFKTIYHLREELANSKEKADLRLVYLALAHMIKFRGHFLYEGDLKAENTDVQALFKDFVEEYDKTIEESHLSEITVDALSILTEKVSKSSRLENLIAHYPTEKKNTLFGNLIALSLGLQANFKTNFQLSEDAKLQFSKDTYEEDLEGLLGEVGDEYADLFVSAKNLYDAILLSGILTVDDNSTKAPLSASMVKRYKEHKEELAAFKRFIKEKLPKKYEEIFKDDTKNGYAGYVGADKKLRKRSGKLATEEEFYKYVKGILNKVEGADYFLDKIDREDFLRKQRTFDNGSIPHQIHLQEMHAILRRQGEHYPFLKENQDKIEKILTFRIPYYVGPLARKGSRFAWAEYKADEKITPWNFDDILDKEKSAEKFITRMTLNDLYLPEEKVLPKHSPLYETFTVYNELTKVKYVNEQGEAKFFDTNMKQEIFDHVFKENRKVTKDKLLNYLNKEFEEFRIVNLTGLDKENKAFNASLGTYHDLRKILDKSFLDDKVNEKIIEDIIQTLTLFEDREMIRQRLQKYSDIFTTQQLKELERRHYTGWGRLSYKLINGIRNKENKKTILDYLIDDGYANRNFMQLINDDALSFKEEIARAQIIGDVDDIANVVHDLPGSPAIKKGILQSVKIVDELVKVMGHNPTNIIIEMARENQTTDKGRRNSQQRLKLLQDSLKNLDNPVNIKNVENQQLQNDRLFLYYIQNGKDMYTGETLDINNLSQYDIDHIIPQAFIKDNSLDNRVLTRSDKNRGKSDDVPSIEVVHEMKSFWSKLLSVKLITQRKFDNLTKAERGGLTENDKAGFIKRQLVETRQITKHVAQVLDARFNAKHDENKKVIRDVKIITLKSNLVSQFRKDFKFYKVREINDYHHAHDAYLNAVIGTALLKKYPKLASEFVYGEFKKYDVRKFIAKSDKEIGKATAKYFFYSNLMNFFKKEVKFADGTVVERPDIETSEDGEIAWNKQTDFKIVRKVLSYPQVNIVKKTEVQTHGLDRGKPRGLFNANPSPKPKPDSSENLVGIKRNLDPKKYGGYAGISNSYAVLVKAIIEKGVKKKETMVLEFQGISILDRITFEKDKRAFLLGKGYKDIKKIIELPKYSLFELKDGSRRMLASILSTNNKRGEIHKGNELFVPQKFTTLLYHAKRINNPINKDHIEYVKKHRDDFKELLNYVLEFNEKYVGATKNGERLKEAVADFDSKSNEEICTSFLGAVNSKNAGLFELTSLGSASDFEFLGVKIPRYRDYTPSSLLKDSILIHQSITGLYETRIDLSKLGED

SEQ ID NO: 448 - protein, 1373 aa, Streptococcus bovis
  Streptococcus bovis ATCC 700338
MTKKNYSIGLDIGTNSVGWAVITDDYKVPAKKMKVLGNTDKKYIKKNLLGALLFDSGETAEATRLKRTARRRYTRRKNRLRYLQEIFAEEMTKVDESFFQRLDESFLRWDDDNKKLGRYPIFGNKADVVKYHQEFPTIYHLRKHLADSSEKADLRLVYLALAHMIKFRGHFLIEGELNAENTDVQKIFADFVGVYDRTFDDSHLSEITVDAASILTEKISKSRRLENLIKYYPTEKKNTLFGNLIALALGLQPNFKMNFKLSEDAKLQFSKDSYEEDLGELLGKIGDDYADLFTSAKNLYDAILLSGILIVDDNSTKAPLSASMIKRYVEHQEDLEKLKEFIKANKSELYHDIFKDKNKNGYAGYIENGVKQDEFYKYLKNTLSKIAGSDYFLDKIEREDFLRKQRTFDNGSIPHQIHLQEMHAILRRQGDYYPFLKENQDRIEKILTFRIPYYVGPLARKDSRFSWAEYHSDEKITPWNFDKVIDKEKSAEKFITRMTLNDLYLPEEKVLPKHSHVYETYAVYNELTKIKYVNEQGKDSFFDSNMKQEIFDHVFKENRKVTKEKLLNYLNKEFPEYRIKDLIGLDKENKSFNASLGTYHDLKKILDKAFLDDKVNEEVIEDIIKTLTLFEDKDMIHERLQKYSDIFTADQLKKLERRHYTGWGRLSYKLINGIRNKENNKTILDYLIDDGSANRNFMQLINDDTLPFKQIIQKSQVVGDVDDIEAVVHDLPGSPAIKKGILQSVKIVDELVKVMGDNPDNIVIEMARENQTTNRGRSQSQQRLKKLQNSLKELGSNILNEEKPSYIEDKVENSHLQNDQLFLYYIQNGKDMYTGDELDIDHLSDYDIDHIIPQAFIKDDSIDNRVLTSSAKNRGKSDDVPSLDIVRARKAEWVRLYKSGLISKRKFDNLTKAERGGLTEADKAGFIKRQLVETRQITKHVAQILDARFNTESDENDKVIRDVKVITLKSNLVSQFRKDFEFYKVREINDYHHAHDAYLNAVVGTALLKKYPKLASEFVYGEYKKYDIRKFITNSSDKATAKYFFYSNLMNFFKRVIRYSNGKVIVRPVVEYSKDTEDIAWDKKSNFRTICKVLSYPQVNIVKKVETQTGGFSKESILPKGDSDKLIPRKTKKAYWDTKKYGGFDSPTVAYSVFVVADVEKGKAKKLKTVKELVGISIMERSFFEENPVEFLENKGYHNIREDKLIKLPKYSLFEFEGGKRRLLASASELQKGNEMVIPGHLVKLLYHAQRINSFNSTKYLDYVSAHKKEFEKVLSCVEDFANLYVDVEKNLSKIRAVADSMDNFSIEEISNSFINLLTLTALGAPADFNFLGEKIPRKRYTSTKECLNATLIHQSITGLYETRIDLSKIGEE

SEQ ID NO: 449 - protein, 1375 aa, Streptococcus canis
  Streptococcus canis FSL Z3-227
MEKKYSIGLDIGTNSVGWAVITDDYKVPSKKFKVLGNTNRKSIKKNLMGALLFDSGETAEATRLKRTARRRYTRRKNRIRYLQEIFANEMAKLDDSFFQRLEESFLVEEDKKNERHPIFGNLADEVAYHRNYPTIYHLRKKLADSPEKADLRLIYLALAHIIKFRGHFLIEGKLNAENSDVAKLFYQLIQTYNQLFEESPLDEIEVDAKGILSARLSKSKRLEKLIAVFPNEKKNGLFGNIIALALGLTPNFKSNFDLTEDAKLQLSKDTYDDDLDELLGQIGDQYADLFSAAKNLSDAILLSDILRSNSEVTKAPLSASMVKRYDEHHQDLALLKTLVRQQFPEKYAEIFKDDTKNGYAGYVGIGIKHRKRTTKLATQEEFYKFIKPILEKMDGAEELLAKLNRDDLLRKQRTFDNGSIPHQIHLKELHAILRRQEEFYPFLKENREKIEKILTFRIPYYVGPLARGNSRFAWLTRKSEEAITPWNFEEVVDKGASAQSFIERMTNFDEQLPNKKVLPKHSLLYEYFTVYNELTKVKYVTERMRKPEFLSGEQKKAIVDLLFKTNRKVTVKQLKEDYFKKIECFDSVEIIGVEDRFNASLGTYHDLLKIIKDKDFLDNEENEDILEDIVLTLTLFEDREMIEERLKTYAHLFDDKVMKQLKRRHYTGWGRLSRKMINGIRDKQSGKTILDFLKSDGFSNRNFMQLIHDDSLTFKEEIEKAQVSGQGDSLHEQIADLAGSPAIKKGILQTVKIVDELVKVMGHKPENIVIEMARENQTTTKGLQQSRERKKRIEEGIKELESQILKENPVENTQLQNEKLYLYYLQNGRDMYVDQELDINRLSDYDVDHIVPQSFIKDDSIDNKVLTRSVENRGKSDNVPSEEVVKKMKNYWRQLLNAKLITQRKFDNLTKAERGGLSEADKAGFIKRQLVETRQITKHVARILDSRMNTKRDKNDKPIREVKVITLKSKLVSDFRKDFQLYKVRDINNYHHAHDAYLNAVVGTALIKKYPKLESEFVYGDYKVYDVRKMIAKSEQEIGKATAKRFFYSNIMNFFKTEVKLANGEIRKRPLIETNGETGEVVWNKEKDFATVRKVLAMPQVNIVKKTEVQTGGFSKESILSKRESAKLIPRKKGWDTRKYGGFGSPTVAYSILVVAKVEKGKAKKLKSVKVLVGITIMEKGSYEKDPIGFLEAKGYKDIKKELIFKLPKYSLFELENGRRRMLASATELQKANELVLPQHLVRLLYYTQNISATTGSNNLGYIEQHREEFKEIFEKIIDFSEKYILKNKVNSNLKSSFDEQFAVSDSILLSNSFVSLLKYTSFGASGGFTFLDLDVKQGRLRYQTVTEVLDATLIYQSITGLYETRTDLSQLGGD

SEQ ID NO: 450 - protein, 1345 aa, Streptococcus constellatus
  Streptococcus constellatus subsp. constellatus SK53
MGKPYSIGLDIGTNSVGWAVVTDDYKVPAKKMKVLGNTDKQSIKKNLLGALLFDSGETAEATRLKRTARRRYTRRKNRLRYLQEIFTGEMNKVDENFFQRLDDSFLVDEDKRGEHHPIFGNIAAEVKYHDDFPTIYHLRRHLADTSKKADLRLVYLALAHMIKFRGHFLYEGDLKAENTDVQALFKDFVEEYDKTIEESHLSEITVDALSILTEKVSKSSRLENLIAHYPTEKKNTLFGNLIALSLDLHPNFKTNFQLSEDAKLQFSKDTYEEDLEGFLGEVGDEYADLFASAKNLYDAILLSGILTVDDNSTKAPLSASMVKRYEEHQKDLKKLKDFIKVNAPDQYNAIFKDKNKKGYASYIESGVKQDEFYKYLKGILLKINGSGDFLDKIDREDFLRKQRTFDNGSIPHQIHLQEMHAILRRQGEHYPFLKENQDKIEKILTFRIPYYVGPLARKGSRFAWAEYKADEKITPWNFDDILDKEKSAEKFITRMTLNDLYLPEEKVLPKHSPLYEAFTVYNELTKVKYVNEQGEAKFFDTNMKQEIFDHVFKENRKVTKDKLLNYLNKEFEEFRIVNLTGLDKENKAFNSSLGTYHDLRKILDKSFLDDKANEKTIEDIIQTLTLFEDREMIRQRLQKYSDIFTKAQLKKLERRHYTGWGRLSYKLINGIRNKENKKTILDYLIDDGYANRNFMQLINDDALSFKEEIARAQIIDDVDDIANVVHDLPGSPAIKKGILQSVKIVDELVKVMGHNPANIIIEMARENQTTDKGRRNSQQRLKLLQDSLKNLDNPVNIKNVENQQLQNDRLFLYYIQNGKDMYTGETLDINNLSQYDIDHIIPQAFIKDNSLDNRVLTRSDKNRGKSDDVPSIEVVHEMKSFWSKLLSVKLITQRKFDNLTKAERGGLTEEDKAGFIKRQLVETRQITKHVAQILDERFNTEFDGNKRRIRNVKIITLKSNLVSNFRKEFELYKVREINDYHHAHDAYLNAVVGNALLLKYPQLEPEFVYGEYPKYNSYRSRKSATEKFLFYSNILRFFKKEDIQTNEDGEIAWNKEKHIKILRKVLSYPQVNIVKKTEEQTGGFSKESILPKGESDKLIPRKTKNSYWDPKKYGGFDSPVVAYSILVFADVEKGKSKKLRKVQDMVGITIMEKKRFEKNPVDFLEQRGYRNVRLEKIIKLPKYSLFELENKRRRLLASAKELQKGNELVIPQRFTTLLYHSYRIEKDYEPEHREYVEKHKDEFKELLEYISVFSRKYVLADNNLTKIEMLFSKNKDAEVSSLAKSFISLLTFTAFGAPAAFNFFGENIDRKRYTSVTECLNATLIHQSITGLYETRIDLSKLGED

SEQ ID NO: 451 - protein, 1371 aa, Streptococcus dysgalactiae
MDKKYSIGLDIGTNSVGWAVITDDYKVPSKKFKVLGNTDRHSIKKNLIGALLFDSGETAEATRLKRTARRRYTRRKNRIRYLQEIFSSEMSKVDDSFFHRLEESFLVEEDKKHERHPIFGNIVDEVAYHEKYPTIYHLRKKLADSTDKADLRLIYLALAHMIKFRGHFLIEGDLNPDNSDMDKLFIQLVQTYNQLFEENPINASRVDAKAILSARLSKSRRLENLIAQLPGEKRNGLFGNLIALSLGLTPNFKSNFDLAEDAKLQLSKDTYDDDLDNLLAQIGDQYADLFLAAKNLSDAILLSDILRVNSEITKAPLSASMIKRYDEHHQDLTLLKALVRQQLPEKYKEIFFDQSKNGYAGYIDGGASQEEFYKFIKPILEKMDGTEELLAKLNREDLLRKQRTFDNGSIPHQIHLGELHAILRRQEDFYPFLKDNREKIEKILTFRIPYYVGPLARGNSRFAWMTRKSEETITPWNFEEVVDKGASAQSFIERMTNFDKNLPNEKVLPKHSLLYEYFTVYNELTKVKYVTEGMRKPEFLSGKQKEAIVDLLFKTNRKVTVKQLKEDYFKKIECFDSVEISGVEDRFNASLGTYHDLLKIIKDKDFLDNEENEDILEDIVLTLTLFEDKEMIEERLKKYANLFDDKVMKQLKRRHYTGWGRLSRKLINGIRDKQSGKTILDFLKSDGFANRNFMQLINDDSLTFKEAIQKAQVSGQGHSLHEQIANLAGSPAIKKGILQSVKVVDELVKVMGHKPENIVIEMARENQTTQKGQKNSRERMKRIEEGIKELGSQILKEHPVENTQLQNEKLYLYYLQNGRDMYVDQELDINRLSDYDVDHIVPQSFIKDDSIDNKVLTRSDKNRGKSDNVPSEEVVKKMKNYWRQLLNAKLITQRKFDNLTKAERGGLSELDKAGFIKRQLVETRQITKHVAQILDSRMNTKYDENDKLIREVKVITLKSKLVSDFRKDFQFYKVREINNYHHAHDAYLNAVVGTALIKKYPKLESEFVYGDYKVYDVRKMIAKSEQEIGKATAKRFFYSNIMNFFKTEITLANGEIRKRPLIETNEETGEIVWDKGRDFATVRKVLSMPQVNIVKKTEVQTGALTNESIYARGSFDKLISRKHRFESSKYGGFGSPTVTYSVLVVAKSKVQDGKVKKIKTGKELIGITLLDKLVFEKNPLKFIEDKGYGNVQIDKCIKLPKYSLFEFENGTRRMLASVMANNNSRGDLQKANEMFLPAKLVTLLYHAHKIESSKELEHEAYILDHYNDLYQLLSYIERFASLYVDVEKNISKVKELFSNIESYSISEICSSVINLLTLTASGAPADFKFLGTTIPRKRYGSPQSILSSTLIHQSITGLYETRIDLSQLGGD

SEQ ID NO: 452 - protein, 1371 aa, Streptococcus dysgalactiae
MDKKYSIGLDIGTNSVGWAVITDDYKVPSKKFKVLGNTDRHSIKKNLIGALLFDSGETAEATRLKRTARRRYTRRKNRIRYLQEIFSSEMSKVDDSFFHRLEESFLVEEDKKHERHPIFGNIVDEVAYHEKYPTIYHLRKKLADSTDKADLRLIYLALAHMIKFRGHFLIEGDLNPDNSDVDKLFIQLVQTYNQLFEEKPINASGVDAKAILSARLSKSKRLENLIAQLPGEKKNGLFGNLIALSLGLTPNFKSNFDLAEDAKLQLSKDTYDDDLDNLLAQIGNQYADLFLAAKNLSDAILLSDILRVNSEITKAPLSASMIKRYDEHHQDLTLLKALVRQQLPEKYKEIFFDQSKNGYAGYIDGGASQEEFYKFIKPILEKMDGTEELLAKLNREDLLRKQRTFDNGSIPHQIHLGELHAILRRQEDFYPFLKDNREKIEKILTFRIPYYVGPLARGNSRFAWMTRKSEETITPWNFEEVVDKGASAQSFIERMTNFDKNLPNEKVLPKHSLLYEYFTVYNELTKVKYVTEGMRKPEFLSGKQKEAIVDLLFKTNRKVTVKQLKEDYFKKIECFDSVEISGVEDRFNASLGTYHDLLKIIKDKDFLDNEENEDILEDIVLTLTLFEDKEMIEERLKKYANLFDDKVMKQLKRRHYTGWGRLSRKLINGIRDKQSGKTILDFLKSDGFANRNFMQLINDDSLTFKEAIQKAQVSGQGHSLHEQIANLAGSPAIKKGILQSVKVVDELVKVMGHKPENIVIEMARENQTTQKGQKNSRERMKRIEEGIKELGSQILKEHPVENTQLQNEKLYLYYLQNGRDMYVDQELDINRLSDYDVDHIVPQSFIKDDSIDNKVLTRSDKNRGKSDNVPSEEVVKKMKNYWRQLLNAKLITQRKFDNLTKAERGGLSELDKAGFIKRQLVETRQITKHVAQILDSRMNTKYDENDKLIREVKVITLKSKLVSDFRKDFQFYKVREINNYHHAHDAYLNAVVGTALIKKYPKLESEFVYGDYKVYDVRKMIAKSEQEIGKATAKRFFYSNIMNFFKTEITLANGEIRKRPLIETNEETGEIVWDKGRDFATVRKVLSMPQVNIVKKTEVQTGALTNESIYARGSFDKLISRKHRFESSKYGGFGSPTVTYSVLVVAKSKVQDGKVKKIKTGKELIGITLLDKLVFEKNPLKFIEDKGYGNVQIDKCIKLPKYSLFEFENGTRRMLASVMANNNSRGDLQKANEMFLPAKLVTLLYHAHKIESSKELEHEAYILDHYNDLYQLLSYIERFASLYVDVEKNISKVKELFSNIESYSISEICSSVINLLTLTASGAPADFKFLGTTIPRKRYGSPQSILSSTLIHQSITGLYETRIDLSQLGGD

SEQ ID NO: 453 - protein, 1371 aa, Streptococcus dysgalactiae
MDKKYSIGLDIGTNSVGWAVITDDYKVPSKKFKVLGNTDRHSIKKNLIGALLFDSGETAEATRLKRTARRRYTRRKNRIRYLQEIFSSEMSKVDDSFFHRLEESFLVEEDKKHERHPIFGNIVDEVAYHEKYPTIYHLRKKLADSTDKADLRLIYLALAHMIKFRGHFLIEGDLNPDNSDMDKLFIQLVQTYNQLFEENPINASRVDAKAILSARLSKSRRLENLIAQLPGEKRNGLFGNLIALSLGLTPNFKSNFDLAEDAKLQLSKDTYDDDLDNLLAQIGDQYADLFLAAKNLSDAILLSDILRVNSEITKAPLSASMIKRYDEHHQDLTLLKALVRQQLPEKYKEIFFDQSKNGYAGYIDGGASQEEFYKFIKPILEKMDGTEELLAKLNREDLLRKQRTFDNGSIPHQIHLGELHAILRRQEDFYPFLKDNREKIEKILTFRIPYYVGPLARGNSRFAWMTRKSEETITPWNFEEVVDKGASAQSFIERMTNFDKNLPNEKVLPKHSLLYEYFTVYNELTKVKYVTEGMRKPEFLSGKQKEAIVDLLFKTNRKVTVKQLKEDYFKKIECFDSVEISGVEDRFNASLGTYHDLLKIIKDKDFLDNEENEDILEDIVLTLTLFEDKEMIEERLKKYANLFDDKVMKQLKRRHYTGWGRLSRKLINGIRDKQSGKTILDFLKSDGFANRNFMQLINDDSLTFKEAIQKAQVSGQGHSLHEQIANLAGSPAIKKGILQSVKVVDELVKVMGHKPENIVIEMARENQTTQKGQKNSRERMKRIEEGIKELGSQILKEHPVENTQLQNEKLYLYYLQNGRDMYVDQELDINRLSDYDVDHIVPQSFIKDDSIDNKILTRSDKNRGKSDNVPSEEVVKKMKNYWRQLLNAKLITQRKFDNLTKAERGGLSELDKAGFIKRQLVETRQITKHVAQILDSRMNTKYDENDKLIREVKVITLKSKLVSDFRKDFQFYKVREINNYHHAHDAYLNAVVGTALIKKYTKLESEFVYGDYKVYDVRKMIAKSEQEIGKATAKRFFYSNIMNFFKTEITLANGEIRKRPLIETNEETGEIVWDKGRDFATVRKVLSMPQVNIVKKTEVQTGALTNESIYARGSFDKLISRKHRFESSKYGGFGSPTVTYSVLVVAKSKVQDGKVKKIKTGKELIGMTLLDKLVFEKNPLKFIEDKGYGNVQIDKCIKLPKYSLFEFENGTRRMLASVMANNNSRGDLQKANEMFLPAKLVTLLYHAHKIESSKELEHEAYILDHYNDLYQLLSYIERFASLYVDVEKNISKVKELFSNIESYSISEICSSVINLLTLTASGAPADFKFLGTTIPRKRYGSPQSILSSTLIHQSITGLYETRIDLSQLGGD

SEQ ID NO: 454 - protein, 1371 aa, Streptococcus dysgalactiae
MDKKYSIGLDIGTNSVGWAVITDDYKVPSKKFKVLGNTDRHSIKKNLIGALLFDSGETAEATRLKRTARRRYTRRKNRIRYLQEIFSSEMSKVDDSFFHRLEESFLVEEDKKHERHPIFGNIVDEVAYHEKYPTIYHLRKKLADSTDKADLRLIYLALAHMIKFRGHFLIEGDLNPDNSDMDKLFIQLVQTYNQLFEENPINASRVDAKAILSARLSKSRRLENLIAQLPGEKRNGLFGNLIALSLGLTPNFKSNFDLAEDAKLQLSKDTYDDDLDNLLAQIGDQYADLFLAAKNLSDAILLSDILRVNSEITKAPLSASMIKRYDEHHQDLTLLKALVRQQLPEKYKEIFFDQSKNGYAGYIDGGASQEEFYKFIKPILEKMDGTEELLAKLNREDLLRKQRTFDNGSIPHQIHLGELHAILRRQEDFYPFLKDNREKIEKILTFRIPYYVGPLARGNSRFAWMTRKSEETITPWNFEEVVDKGASAQSFIERMTNFDKNLPNEKVLPKHSLLYEYFTVYNELTKVKYVTEGMRKPEFLSGKQKEAIVDLLFKTNRKVTVKQLKEDYFKKIECFDSVEISGVEDRFNASLGTYHDLLKIIKDKDFLDNEENEDILEDIVLTLTLFEDKEMIEERLKTYAHLFDDKVMKQLKRRHYTGWGRLSRKLINGIRDKQSGKTILDFLKSDGFANRNFIQLIHDDSLTFKEAIQKAQVSGQGHSLHEQIANLAGSPAIKKGILQSVKVVDELVKVMGHKPENIVIEMARENQTTQKGQKNSRERMKRIEEGIKELGSQILKEHPVENTQLQNEKLYLYYLQNGRDMYVDQELDINRLSDYDVDHIVPQSFIKDDSIDNKVLTRSDKNRGKSDDVPSEEVVKKMKNYWRQLLNAKLITQRKFDNLTKAERGGLSELDKAGFIKRQLVETRQITKHVAQILDSRMNTKYDENDKLIREVKVITLKSKLVSDFRKDFQFYKVREINNYHHAHDAYLNAVVGTALIKKYPKLESEFVYGDYKVYDVRKMIAKSEQEIGKATAKRFFYSNIMNFFKTEITLANGEIRKRPLIETNEETGEIVWNKGRDFATVRKVLSMPQVNIVKKTEVQTGALTNESIYARGSFDKLISRKHRFESSKYGGFGSPTVTYSVLVVAKSKVQDGKVKKIKTGKELIGITLLDKLVFEKNPLKFIEDKGYGNVQIDKCIKLPKYSLFEFENGTRRMLASVMANNNSRGDLQKANEMFLPAKLVTLLYHAHKIESSKELEHEAYILDHYNDLYQLLSYIERFASLYVDVEKNISKVKELFSNIESYSISEICSSVINLLTLTASGAPADFKFLGTTIPRKRYGSPQSILSSTLIHQSITGLYETRIDLSQLGGD

SEQ ID NO: 455 - protein, 1348 aa, Streptococcus equi
MKKPYTIALDIGTNSVGWVVVTDDYRVPTKKMKVLGNTERKTIKKNLIGALLFDSGDTAEGTRLKRTARRRYTRRKNRLRYLKEIFTEEMAKVDDGFFQRLEDSFYVLEDKEGNKHPIFANLADEVAYHKKYPTIYHLRKELVDNPQKADLRLIYLAVAHIIKFRGHFLIEGTLSSKNNNLQKSFDHLVDTYNLLFEEQRLLTEGINAKELLSAALSKSKRLENLISLIPGQKKTGIFGNIIALSLGLTPNFKANFGLSKDVKLQLAKDTYADDLDSLLAQIGDQYADLFLAAKNLSDAILLSDILTESDEITRAPLSASMVKRYREHHKDLVTLKTLIKDQLPEKYQEIFLDKTKNGYAGYIEGQVSQEEFYKYLKPILARLDGSEPLLLKIDREDFLRKQRTFDNGSIPHQIHLEELHAILRRQEVFYPFLKDNRKKIESLLTFRIPYYVGPLARGHSRFAWVKRKFDGAIRPWNFEEIVDEEASAQIFIEKMTKNDLYLPNEKVLPKHSLLYETFTVYNELTKVKYATEGMTRPQFLSADQKQAIVDLLFKTNRKVTVKQLKENYFKKIECWDSVEITGVEDSFNASLGTYHDLLKIIQDKDFLDNPDNQKIIEDIILTLTLFEDKKMISKRLDQYAHLFDKVVLNKLERHHYTGWGRLSGKLINGIRDKQSGKTILDFLKADGFANRNFMQLIHDSELSFIDEIAKAQVIGKTEYSKDLVGNLAGSPAIKKGISQTIKIVDELVKIMGYLPQQIVIEMARENQTTAQGIKNARQRMRKLEETAKKLGSNILKEHPVDNSQLQNDKRYLYYLQNGKDMYTGDDLDIDYLSSYDIDHIIPQSFIKNNSIDNKVLTSQGANRGKLDNVPSEAIVRKMKGYWQSLLRAGAISKQKFDNLTKAERGGLTQVDKAGFIQRQLVETRQITKHVAQILDSRFNTEFDDHNKRIRKVHIITLKSKLVSDFRKEFGLYKIRDINHYHHAHDAYLNAVVAKAILGKYPQLAPEFVYGDYPKYNSFKERQKATQKMLFYSNILKFFKDQESLHVNSDGEEIWNANKHLPIIKNVLSIPQVNIVKKTEVQTGGFYKESILSKGNSDKLIPRKNNWDTRKYGGFDSPTVAYSVLVIAKMEKGKAKVLKPVKEMVGITIMERTAFEENPVVFLEARGYREIQEHLIIKLPKYSLFELENGRRRLLASASELQKGNELFLPVDYMTFLYLAAHYHELTGSSEDVLRKKYFVDRHLHYFDDIIQMINDFAERHILASSNLEKINHTYHNNSDLPVNERAENIINVFTFVALGAPAAFKFFDATIDRKRYTSTKEVLNATLIHQSVTGLYETRIDLSQLGEN

SEQ ID NO: 456 - protein, 1377 aa, Streptococcus equinus
  Streptococcus equinus ATCC 9812
MEKTYSIGLDIGTNSVGWAVITDDYKVPAKKMKVLGNTDKKYIKKNLLGALLFDSGETAEATRLKRAARRRYTRRKNRLRYLQEIFAKEMAKVDESFFQRLEESFLTDDDKTFDSHPIFGNKAEEDTYHQEFPTIYHLRKHLADSPEKVDLRLVYLALAHMIKFRGHFLIEGQLNAENTDVQKIFADFVGVYDRTFDDSHLSEITVDAASILTEKISKSRRLENLIKQYPTEKKNTLFGNLVALALGLQPNFKTNFKLSEDAKLQFSKDTYDEDLEELLGKIGDDYADLFTAAKNLYDAILLSGILTVDDNSTKAPLSASMIKRYEEHHEDLEKLKTFIKVNNFDKYHEIFKDKSKNGYAGYIENGVKQDIFYKHLKSIISEKNGGQYFLDKIEREDFLRKQRTFDNGSIPYQIHLQEMRTILRRQGEYYPFLKENQAKIEKILTFRIPYYVGPLARKNSRFAWAKYHSDEPITPWNFDEVVDKEKSAEKFITRMTLNDLYLPEEKVLPKHSYVYETFAVYNELTKIKYVNEQGKSFFFDANMKQEIFDHVFKENRKVTKAKLLSYLNNEFEEFRINDLIGLDKDSKSFNASLGTYHDLKKILDKSFLDDKTNEQIIEDIVLTLTLFEDRDMIHERLQKYSDIFTSQQLKKLERRHYTGWGRLSYKLINGIRNKENNKTILDFLIDDGDANRNFMQLINDDSLSFKTTIQEAQVVGDVDDIEAVVHDLPGSPAIKKGILQSVKIVDELVKVMGHNPQNIVIEMARENQITGYGRNRSNQRLKRLQDSLKEFGSDILSKKKPSYVDSKVENSHLQNDRLFLYYIQNGKDMYTGEELDIDHLSDYDIDHIIPQAFIKDNSIDNRVLTSSAKNRGKSDDVPSIEIVRNRKSYWYKLYKSGLISKRKFDNLTKAERGGLTETDKAGFIKRQLVETRQITKHVAQILDARFNTKCDENDKVIRDVKVITLKSSLVSQFRKEFKFYKVREINDYHHAHDAYLNAVVGTALLKKYPKLAPEFVYGEYKKYDVRKLVAKSSDNHSELGKATAKYFFYSNLMNFFKTEVKYADGRVFERPDIETNADGEVVWNKQRDFNIVRKVLSYPQVNIVKKVEVQTGGFSKESILPKGDSDKLIPRKTKKLQWETQKYGGFDSPTVAYSVLVVADVEKGKTRKLKTVKELVGISIMERSSFEENPVSFLEKKGYHNVQEDKLIKLPKYSLFEFEGGRRRLLASATELQKGNEVVLPQYMVNLLYHSQHVNNSHKPEHLNYVKQHKDEFKDIFNLIISIARINILKPKVVDNLINEFTEYGQEDISSLSESFINLLKFISFGAPGAFKFLKLDVKQSNLRYKSTTEALSATLIHQSVTGLYETRIDLSKLGEE

SEQ ID NO: 457 - protein, 1370 aa, Streptococcus gallolyticus
MTKKNYSIGLDIGTNSVGWAVITDDYKVPAKKMKVLGNTDKKYIKKNLLGALLFDSGETAEATRLKRTARRRYTRRKNRLRYLQEIFAEEMTKVDESFFYRLDESFLTTDEKDFERHPIFGNKAEEDAYHQKFPTIYHLRNYLADSSEKADLRLVYLALAHMIKYRGHFLIEGKLNAENTDVQKLFTDFVGVYDRTFDDSHLSEITVDVASTLTEKISKSRRLENLIKYYPTEKKNTLFGNLIALALGLQPNFKMNFKLSEDAKLQFSKDTYEEDLEELLGKIGDDYADLFTSAKNLYDAILLSGILTVDDNSTKAPLSASMIKRYVEHHEDLEKLKEFIKANKSELYHDIFKDKNKNGYAGYIENGVKQDEFYKYLKNTLSKIDGSDYFLDKIEREDFLRKQRTFDNGSIPHQIHLQEMHAILRRQGDYYPFLKEKQDRIEKILTFRIPYYVGPLVRKDSRFAWAEYRSDEKITPWNFDKVIDKEKSAEKFITRMTLNDLYLPEEKVLPKHSHVYETYAVYNELTKIKYVNEQGKESFFDSNMKQEIFDHVFKENRKVTKEKLLNYLNKEFPEYRIKDLIGLDKENKSFNASLGTYHDLKKILDKAFLDDKVNEEVIEDIIKTLTLFEDKDMIHERLQKYSDIFTANQLKKLERRHYTGWGRLSYKLINGIRNKENNKTILDYLIDDGSANRNFMQLINDDTLPFKQIIQKSQVVGDVDDIEAVVHDLPGSPAIKKGILQSVKIVDELVKVMGDNPDNIVIEMARENQTTNRGRSQSQQRLKKLQSSLKELGSNILNEEKPSYIEDKVENSHLQNDQLFLYYIQNGKDMYTGDELDIDHLSDYDIDHIIPQAFIKDDSIDNRVLTSSAKNRGKSDDVPSLDIVRARKAEWVRLYKSGLISKRKFDNLTKAERGGLTEADKAGFIKRQLVETRQITKHVAQILDARFNTEHDENDKVIRDVKVITLKSNLVSQFRKDFEFYKVREINDYHHAHDAYLNAVVGTALLKKYPKLASEFVYGEYKKYDIRKFITNSSDKATAKYFFYSNLMNFFKTKVKYADGTVFERPIIETNADGEIAWNKQIDFEKVRKVLSYPQVNIVKKVETQTGGFSKESILPKGDSDKLIPRKTKKVYWDTKKYGGFDSPTVAYSVFVVADVEKGKAKKLKTVKELVGISIMERSFFEENPVEFLENKGYHNIREDKLIKLPKYSLFEFEGGRRRLLASASELQKGNEMVLPGYLVELLYHAHRADNFNSTEYLNYVSEHKKEFEKVLSCVEDFANLYVDVEKNLSKIRAVADSMDNFSIEEISNSFINLLTLTALGAPADFNFLGEKIPRKRYTSTKECLTATLIHQSITGLYETRIDLSKLGEE

SEQ ID NO: 458 - protein, 1370 aa, Streptococcus gallolyticus; identical to SEQ ID NO: 457
  Streptococcus gallolyticus subsp. gallolyticus TX20005

SEQ ID NO: 459 - protein, 1371 aa, Streptococcus gallolyticus
MTEKNYSIGLDIGTNSVGWAVITDDYKVPAKKMKVLGNTDKKYIKKNLLGALLFDNGETAEATRLKRTARRRYTRRKNRLRYLQEIFAEEMAKVDESFFYRLDESFLTTDDKDFERHPIFGNKADEIKYHQEFPTIYHLRKHLADSHEKADLRLIYLALAHMIKFRGHFLIEGELNAENTDVQKLFEAFVEVYDRTFDDSNLSEITVDASSILTEKFSKSRRLENLIKHYPTEKKNTLFGNLVALALGLQPNFKTSFKLSEDAKLQFSKDTYEEDLEELIGKIGDEYADLFTSAKNLYDAILLSGILTVADNTTKAPLSASMIKRYNEHQVDLKKLKEFIKNNASDKYDEIFNDKDKNGYAGYIENGVKQDEFYKYLKTTLSKIDGSDYFLDKIEREDFLRKQRTFDNGSIPHQIHLQEMHAILRRQGEHYAFLKENQAKIEKILTFRIPYYVGPLARKNSRFAWAEYHSDEKITPWNFDEIIDKEKSAEKFITRMTLNDLYLPEEKVLPKHSLVYETYTVYNELTKVKYVNEQGKSNFFDANMKQEIFEHVFKENRKVTKDKFLNYLNKEFPEYRIQDLIGLDKENKSFNASLGTYHDLKKILDKSFLDDKTNETIIEDIIQTLTLFEDRDMIRQRLQKYSDIFTPQQLKKLERRHYTGWGRLSYKLINGIRNKENGKSILDYLIDDGYANRNFMQLISDDTLPFKQIIKDAQIIGDIDDVTSVVRELPGSPAIKKGILQSVKIVDELVKVMGHNPDNIVIEMARENQTTNRGRNQSQQRLKKLQDSLKELGSNILNEEKPSYIEGKVENNHLQDDRLFLYYIQNGKDMYTGDELDIDHLSDYDIDHIIPQAFIKDDSIDNRVLTSSAKNRGKSDDVPSLDIVHDRKADWIRLYKSGLISKRKFDNLTKAERGGLTENDKAGFIKRQLVETRQITKHVAQILDSRFNTERDENDKVIRNVKVITLKSNLVSQFRKDFKFYKVREINDYHHAHDAYLNAVVGTALLKKYPKLAPEFVYGEYKKYDIRKFITSSGDKATAKYFFYSNLMNFFKRVIRYSNGKVVVRPVIECSKDTGEIAWNKQTDFEKVRRVLSYPQVNIVKKVETQTGGFSKESILPKGNSDKLIPRKTKKFRWDTPKYGGFDSPNIAYSVFVIADVEKGKAKKLKTVKELVGISIMERSSFEENPVVFLEKKGYQNVQEDNLIKLPKYSLFEFEGGRRRLLASASELQKGNEVVLSRHLVELLYHAHRVNSFNNSEHLKYVSEHKKEFGEVLSCVENFAKSYVDVEKNLGKIRAVADKIDTFSIEDISISFVNLLTLTALGAPADFNFLGEKIPRKRYTSTKECLNATLIHQSITGLYETRIDLSKLGEE

SEQ ID NO: 460 - protein, 1130 aa, Streptococcus gallolyticus
MTNGKILGLDIGIASVGVGIIEAKTGKVVHANSRLFSAANAENNAERRGFRGSRRLNRRKKHRVKRVRDLFEKYEIVTDFRNLNLNPYELRVKGLTEQLTNEELFAALRTISKRRGISYLDDAEDDSTGSTDYAKSIDENRRLLKTKTPGQIQLERLEKYGQLRGNFTVYDENGEAHRLINVFSTSDYEKEARKILETQADYNKKITAEFIDDYVEILTQKRKYYHGPGNEKSRTDYGRFRTDGTTLENIFGILIGKCSFYPDEYRASKASYTAQEYNFLNDLNNLKVPTETGKLSTEQKEALVEFAKSTATLGPAKLLKEIAKILDCKVDEIKGYREDDKGKPDLHTFEPYRKLKFNLDSVNIDDLSREVLDKLADILTLNTEREGIEDAIRHNLPNQFTEGQISEIIKVRKSQSTAFNKGWHSFSAKLMNELIPELYATSDEQMTILTRLEKFKVNKKSSKNTKTIDEKEVTDEIYNPVVAKSVRQTIKIINAAVKKYGDFDKIVIEMPRDKNADDEKKFIDKRNKENKKEKDDALKRAAYLYNGTDKLPDEVFHGNKQLETKIRLWYQQGERCLYSGKPIPIQELVHNSNNFEIDHILPLSLSFDDSLANKVLVYAWTNQEKGQKTPYQVIDSMDAAWSFREMKDYVLKQKGLGKKKRDYLLTTENIDKIEVKKKFIERNLVDTRYASRVVLNSLQSALRELGKDTKISVIRGQFTSQLRRKWKIDKSRETYHHHAVDALIIAASSQLKLWEKQDNPMFVDYGNNQVVDKQTGEILSVSDDEYKELVFQPPYQGFVNMISSKGFEDEILFSYQVDSKYNRKVSDATIYSTRKAKIGKDKKEETYVLGKIKDIYSQNGFDTFIKKYNKDKTQFLMYQKDPLTWENVIEVILRDYPTTKKSEDGKNDVKCNPFEEYRRENGLVCKYSKKGKGTPIKSLKYYDKKLGNCIDITPEGSKNEVVLQSLNPWRADVYFNPETLKYELLGLKYSDLSFEKGTGKYHISQEKYDVIKEKEGIGKKSEFKFTLYRNDLILIKDTASGEQEIYRFLSRTMPNVKHYAELKPYDKEKFDNVQELVEALGEADKVGRCIKGLNKSNLSIYKVRTDVLGNKYFVKKEGDKPKLDFKNNKK

SEQ ID NO: 461 - protein, 1136 aa, Streptococcus gordonii
MNGLVLGLDIGIASVGVGILEKDTGKIIHASSRLFPAATADNNVERRSNRQGRRLNRRKKHRSVRLQDLFEGYGLLTDFSKVSMNLNPYQLRVQGMENQLTNEELFVALKNIVKRRGISYLDDASEDGGTVSSDYGKAVEENRKLLAEKTPGQIQLERFEKYGQLRGDFTVEENGEKHRLINVFSTSAYRKEAERILRKQQEFNSKITDEFIEDYLIILTGKRKYYHGPGNEKSRTDYGRFRTDGTTLDNIFGILIGKCTFYTEEYRASKASYTAQEFNLLNDLNNLTVPTETKKLSEEQKKLIIEYAKSAKTLGASTLLKYIAKMIDASVDQIRGYRVDVNNKPEMHTFEVYRKMQSLETIKVEELPRKVLDELAHILTLNTEREGIEEAINSKLKDIFNRDQVLELVQFRKNNSSLFSKGWHNFSIKLMMELIPELYETSEEQMTILTRLGKQRSKETSKRTKYIDEKELTEEIYNPVVAKSVRQAIKIINEATKKYGIFDNIVIEMARENNEEDAKKDYIKRQKANQDEKNAAMEKAAFQYNGKKELPDNIFHGHKELTTKIRLWHQQGEKCLYTGKNIPISDLIHNQYKYEIDHILPLSLSFDDSLSNKVLVLATANQEKGQRTPFQALDSMDDAWSYREFKSYVKDSKLLSNKKKDYLLTEEDISKIEVKQKFIERNLVDTRYSSRVVLNALQDFYKSHQLDTTISVVRGQFTSQLRRKWGIEKSRETYHHHAVDALIIAASSQLRLWKKHSNPLIAYKEGQFVDSETGEIVSLSDEEYKELVFKAPYDHFVDTLRSKKFEDSILFSYQVDSKYNRKISDATIYATRKAKLDKEKKEYTYTLGKIKDIYALGTKTPSKTGFYKFLDLYKTDKSQFLMYQKDRKTWDEVIEKIIEQYRPFKEYDKNGKEVDFNPFEKYRIGNGPIRKYSKKGNGPEIKSLKYYDILLGKHKNITPDGSRNTVALLSLNPWRTDVYYNSETKKYEFLGLKYADLCFEEGGAYGISEVKYKKIREKEGIGKNSEFKFTLYKNDLILIKDTETNCQQFFRFWSRTGKDNPKSFEKHKIELKPYEKAKFEKGEELKVLGKVPPSSNQFQKNMQIENLSIYKVKTDILGNKHFIKKEGDEPKLKFKK

SEQ ID NO: 462 - protein, 1129 aa, Streptococcus infantarius
  Streptococcus infantarius subsp. infantarius ATCC BAA-102
MSNGKILGLDIGVASVGVGIIDSKTGNVIHANSRLFSAANAENNAERRGFRGARRLTRRKKHRVKRVRDLFEKYDISTDFRNLNLNPYELRVKGLTEQLTNEELFAALRTIAKRRGISYLDDAEDDSTGSSDYAKSIDENRRLLKTKTPGQIQLERLEKYGQLRGNFTVYDENGEAHRLINVFSTSDYKNEARKILETQSNYNKQITDEFIEDYIEILTQKRKYYHGPGNEKSRTDYGRFRTDGTTLENIFGILIGKCSFYPEEYRASKASYTAQEFNFLNDLNNLKVPTETGKLSTEQKEYLVDFAKKSKALGASKLLKEIAKIVDCSVDDIKGYRVDNKDKPDLHTFEPYRKLKFNLSSIDIDELSRETLDKLADILTLNTEREGIEDAIKRNLPSQFTEEQISEIVQIRKNQSSAFNKGWHSFSAKLMNELIPELYVTSEEQMTILTRLEKFKVNKKSSKNTKTIDEKEITDEIYNPVVAKSVRQTIKIINAAVKKYGDFDKIVIEMPRDKNAEDEKKFIDKKQKENKKEKDDSLKRAAFLYNGTDNLPDGVFHGNKELKTKIRLWYQQGERCLYSGKLISIHDLVHNSNKFEIDHILPLSLSFDDSLANKVLVYAWTNQEKGQKTPYQVIDSMDTAWSFREMKDYVLKQKGLGKKKCEYLLTTENIDKIEVKKKFIERNLVDTRYASRVVLNSLQTALKELGKDTKVSVVRGQFTSQLRRKWNIDKSRETYHHHAVDALIIAASSQLKLWQKQENPMFESYGENQVVNKETGEILSISDDKYKELVFQPPYQGFVNTISSKGFEDEILFSYQVDSKFNRKVSDATIYSTRKAKLGKDKKDETYVLGKIKDIYSQDGFDTFIKRYKKDKTQFLMYQKDPLTWENVIEVILRDYPSEKLSEDGKKTVKCNPFEEYRRENGLICKYSKKGNGTPIKSLKYYDKKLGNCIDITPEKSKNRVVLRQISPWRADIYFNLETLKYELMGLKYSDLSFEKGTGKYHISQEKYDAIREKEGIGKKSEFKFTLYRNDLILIKDTLNNCERMLRFGSKNDTSKHYVELKPLEKGTFDSEEEILPVLGKVAKSGQFIKGLNKPNISIYKVRTDVLGNKFFIKKEGDKPKLDFKNNNK

SEQ ID NO: 463 - protein, 1375 aa, Streptococcus infantarius
MEKSYSIGLDIGTNSVGWAVITDDYKVPAKKMKVLGNTDKKYIKKNLLGALLFDSGETAEVTRLKRTARRRYTRRKNRLRYLQEIFAKEMTKVDESFFQRLEESFLTDDDKTFDSHPIFGNKAEEDAYHQKFPTIYHLRKYLADSQEKADLRLVYLALAHMIKYRGHFLIEGELNAENTDVQKLFNVFVETYDKIVDESHLSEIEVDASSILTEKVSKSRRLENLIKQYPTEKKNTLFGNLIALALGLQPNFKTNFKLSEDAKLQFSKDTYEEDLEELLGKVGDDYADLFISAKNLYDAILLSGILTVDDNSTKAPLSASMIKRYVEHHEDLEKLKEFIKINKLKLYHDIFKDKTKNGYAGYIDNGVKQDEFYKYLKTILTKIDDSDYFLDKIERDDFLRKQRTFDNGSIPHQIHLQEMHSILRRQGDYYPFLKENQAKIEKILTFRIPYYVGPLARKDSRFAWANYHSDEPITPWNFDEVVDKEKSAEKFITRMTLNDLYLPEEKVLPKHSHVYETFTVYNELTKIKYVNEQGESFFFDANMKQEIFDHVFKENRKVTKAKLLSYLNNEFEEFRINDLIGLDKDSKSFNASLGTYHDLKKILDKSFLDDKTNGQIIEDIVLTLTLFEDRDMIHERLQKYSDFFTSQQLKKLERRHYTGWGRLSYKLINGIRNKENNKTILDFLIDDGHANRNFMQLINDESLSFKTIIQEAQVVGDVDDIEAVVHDLPGSPAIKKGILQSVKIVDELVKVMGDNPDNIVIEMARENQTTGYGRNKSNQRLKRLQDSLKEFGSDILSKKKPSYVDSKVENSHLQNDRLFLYYIQNGKDMYTGEELDIDRLSDYDIDHIIPQAFIKDNSIDNKVLTSSAKNRGKSDDVPSIEIVRNRRSYWYKLYKSGLISKRKFDNLTKAERGGLTEADKAGFIKRQLVETRQITKHVAQILDARFNTKRDENDKVIRDVKVITLKSNLVSQFRKEFKFYKVREINDYHHAHDAYLNAVVGTALLKKYPKLTPEFVYGEYKKYDVRKLIAKSSDDYSEMGKATAKYFFYSNLMNFFKTEVKYADGRVFERPDIETNADGEVVWNKQKDFDIVRKVLSYPQVNIVKKVEAQTGGFSKESILSKGDSDKLIPRKTKKVYWNTKKYGGFDSPTVAYSVLVVADIEKGKAKKLKTVKELVGISIMERSFFEENPVSFLEKKGYHNVQEDKLIKLPKYSLFEFEGGRRRLLASATELQKGNEVMLPAHLVELLYHAHRIDSFNSTEHLKYVSEHKKEFEKVLSCVENFSNLYVDVEKNLSKVRAAAESMTNFSLEEISASFINLLTLTALGAPADFNFLGEKIPRKRYTSTKECLSATLIHQSVTGLYETRIDLSKLGEE

SEQ ID NO: 464 - protein, 1368 aa, Streptococcus iniae
  Streptococcus iniae 9117
MRKPYSIGLDIGTNSVGWAVITDDYKVPSKKMRIQGTTDRTSIKKNLIGALLFDNGETAEATRLKRTTRRRYTRRKYRIKELQKIFSSEMNELDIAFFPRLSESFLVSDDKEFENHPIFGNLKDEITYHNDYPTIYHLRQTLADSDQKADLRLIYLALAHIIKFRGHFLIEGNLDSENTDVHVLFLNLVNIYNNLFEEDIVETASIDAEKILTSKTSKSRRLENLIAEIPNQKRNMLFGNLVSLALGLTPNFKTNFELLEDAKLQISKDSYEEDLDNLLAQIGDQYADLFIAAKKLSDAILLSDIITVKGASTKAPLSASMVQRYEEHQQDLALLKNLVKKQIPEKYKEIFDNKEKNGYAGYIDGKTSQEEFYKYIKPILLKLDGTEKLISKLEREDFLRKQRTFDNGSIPHQIHLNELKAIIRRQEKFYPFLKENQKKIEKLFTFKIPYYVGPLANGQSSFAWLKRQSNESITPWNFEEVVDQEASARAFIERMTNFDTYLPEEKVLPKHSPLYEMFMVYNELTKVKYQTEGMKRPVFLSSEDKEEIVNLLFKKERKVTVKQLKEEYFSKMKCFHTVTILGVEDRFNASLGTYHDLLKIFKDKAFLDDEANQDILEEIVWTLTLFEDQAMIERRLVKYADVFEKSVLKKLKKRHYTGWGRLSQKLINGIKDKQTGKTILGFLKDDGVANRNFMQLINDSSLDFAKIIKNEQEKTIKNESLEETIANLAGSPAIKKGILQSIKIVDEIVKIMGQNPDNIVIEMARENQSTMQGIKNSRQRLRKLEEVHKNTGSKILKEYNVSNTQLQSDRLYLYLLQDGKDMYTGKELDYDNLSQYDIDHIIPQSFIKDNSIDNTVLTTQASNRGKSDNVPNIETVNKMKSFWYKQLKSGAISQRKFDHLTKAERGALSDFDKAGFIKRQLVETRQITKHVAQILDSRFNSNLTEDSKSNRNVKIITLKSKMVSDFRKDFGFYKLREVNDYHHAQDAYLNAVVGTALLKKYPKLEAEFVYGDYKHYDLAKLMIQPDSSLGKATTRMFFYSNLMNFFKKEIKLADDTIFTRPQIEVNTETGEIVWDKVKDMQTIRKVMSYPQVNIVMKTEVQTGGFSKESIWPKGDSDKLIARKKSWDPKKYGGFDSPIIAYSVLVVAKIAKGKTQKLKTIKELVGIKIMEQDEFEKDPIAFLEKKGYQDIQTSSIIKLPKYSLFELENGRKRLLASAKELQKGNELALPNKYVKFLYLASHYTKFTGKEEDREKKRSYVESHLYYFDEIMQIIVEYSNRYILADSNLIKIQNLYKEKDNFSIEEQAINMLNLFTFTDLGAPSAFKFFNGDIDRKRYSSTNEIINSTLIYQSPTGLYETRIDLSKLGGK

SEQ ID NO: 465 - protein, 1338 aa, Streptococcus macacae
  Streptococcus macacae NCTC 11558
MTKPYSIGLDIGTNSVGWAVVTDGYKVPAKKMKVLGNTDKSHIKKNLLGALLFDSGNTAKDRRLKRTARRRYTRRRNRILYLQEIFAEEMAKADESFFQRLNESFLTNDDKEFDSHPIFGNKAEEEAHHHKFPTIFHLRKHLADSTEKSDLRLIYLALAHMIKFRGHFLIEGQLKAENTNVQTLFDDFVEVYDKTVEESHLSEISVSSILTEKISKSRRLENLIKYYPTEKKNTLFGNLIALSLGLQPNFKTNFKLSEDAKLQFSKDTYEEDLGELLGKIGDNYADLFISAKNLYDAILLSGILTIDDNTTKAPLSASMIKRYEEHQEDLAQLKKFIRQNLPDQYSEVFSDKTKDGYAGYIDGKTNQEAFYKYIKNMLSKTEGADYFLDKIDREDFLRKQRTFDNGSVPHQIHLQEMHAILRRQGEYYPFLKENQDKIEKILTFRIPYYVGPLARKGSRFAWAEYKADKKVTPWNFDDILDKEKSAEEFITRMTLNDLYLPEEKVLPKHSLVYETFNVYNELTKVKYVNEQGKAIFFDANMKQEIFDHVFKENRKVTKDKLLNYLNKEFEEFRIVNLTGLDKENKAFNSSLGTYHDLRKILDKSFLDDKVNEKIIEDIIQTLTLFEDREMIRQRLQKYSDIFTTQQLKKLERRHYTGWGRLSAKLINGIRDKQSNKTILGYLIDDGYSNRNFMQLINDDSLPFKEEIARAQVIGETDDLNQLVSDIAGSPAIKKGILQSLKIVDELVKVMGHNPANIVIEMARENQTTAKGRRSSQQRYKRLEEAIKNLDHDLNHKILKEHPTDNQALQNDRLFLYYLQNGRDMYTEDPLDINRLSDYDIDHIIPQSFIKDDSIDNKVLVSSAKNRGKSDNVPSEDVVNRMRPFWNKLLSCGLISQRKYSNLTKKELKPDDKAGFIKRQLVETRQITKHVAQILDARFNTKRDENKKVIRDVKIITLKSNLVSQFRKDFKFYKVREINDYHHAHDAYLNAVIGKALLDVYPQLEPEFVYGEYPHFHGYKENKATAKKFFYSNIMNFFKKDDIRTDENGEIVWKKDEHISNIKRVLSYPQVNIVKKVEIQTVGQNGGLFDDNPKSPLEVTPSKLVPLKKELNPKKYGGYQKPTTAYPVLLITDTKQLIPISVMNKKQFEQNPVKFLRDRGYQQVGKNDFIKLPKYTLVDIGDGIKRLWASSKEIHKGNQLVVSKKSQILLYHAHHLDSDLSNDYLQNHNQQFDVLFNEIISFSKKCKLGKEHIQKIENVYSNKKNSASIEELAESFIKLLGFTQLGATSPFNFLGVKLNQKQYKGKKDYILPCTEGTLIRQSITGLYETRVDLSKIGED

SEQ ID NO: 466 - protein, 1130 aa, Streptococcus macedonicus
MTNGKILGLDIGIASVGVGIIEAKTGKVVHANSRLFSAANAENNAERRGFRGSRRLNRRKKHRVKRVRDLFEKYGIVTDFRNLNLNPYELRVKGLTEQLTNEELFAALRTISKRRGISYLDDAEDDSTGSTDYAKSIDENRRLLKTKTPGQIQLERLEKYGQLRGNFTVYDENGEAHRLINVFSTSDYEKEARKILETQADYNKKITAEFIDDYVEILTQKRKYYHGPGNEKSRTDYGRFRTDGTTLENIFGILIGKCNFYPDEYRASKASYTAQEYNFLNDLNNLKVPTETGKLSTEQKESLVEFAKNTAILGPAKLLKEIAKILDCKVDEIKGYREDDKGKPDLHTFEPYRKLKFNLDSVNIDYLSREVLDKLADILTLNTEREGIEDAIKRNLPNQFTEEQISEIINVRKSQSTAFNKGWHSFSAKLMNELIPELYATSDEQMTILTRLEKFKVKKKSSKNIKTIDEKEITDEIYNPVVAKSVRQTIKIINAAVKKYGDFDKIVIEMPRDKNADDEKKFINKRNKENKKEKDDALKRAAYLYNGTDKLPDEVFHGNKQLETKIRLWYQQGERCLYSGKPIPIQELVHNSNNFEIDHILPLSLSFDDSLANKVLVYSWTNQEKGQKTPYQVIDSMDAAWSFREMKEYVLKQKGLGKKKRDYLLTTENIDKIEVKKKFIERNLVDTRYASRVVLNSLQSALRELGKDTKVSVVRGQFTSQLRRKWKIDKSRETYHHHAVDALIIAASSQLKLWEKQDNPMFVDYGNNQVVDKQTGEILSVSDNEYKELVFQPPYQGFVNTISSKGFEDEILFSYQVDSKYNRKVSDATIYSTRKAKIGKDKKEETYVLGKIKDIYSQNGFDTFVKKYNKDKTQFLMYQKDPLTWENVIEVILGDYPTTKKSEDGKNDVKCNPFEEYRRENGLICKYSKKGKGTPIKSLKYYDKKLGNCIDITPEESRNKVILQSINPWRADVYFNPETLKYELMGLKYSDLSFEKGTGNYHISQEKYDAIKEKEGIGKKSEFKFTLYRNDLILIKDIASGEQEIYRFLSRTMPNVNHYVELKPYDKEKFDNVQELVEALGEADKVGRCIKSLNKPNISIYKVRTDVLGNKYFVKKEGDKPKLDFKNNKK

SEQ ID NO: 467 - protein, 1134 aa, Streptococcus mitis
  Streptococcus mitis ATCC 6249
MNGLVLGLDIGIASEGVGILEKNSGKIIHANSRLFPAATADNNVERRKNRQARRLNRRKKHRGVRFQDLFEDYGLLTDFSKVSINLNPYRLRVDGLNQQLTNEELFIALKNIVKRRGISYLDDASEDGGAVSSDYGKAVEENRKLLAEQTPGQIQLERFEKYGQVRGDFTVVENGEKLRLINVFSTSAYKKEAERILRKQQEFNNQITDEFIEDYLKILTGKRKYYHGPGNEKSRTDYGRFRTDGTTLDNIFGILIGKCTFYPEEYRASKASYTAQEFNLLNDLNNLTVPTETKKLSEEQKKVIVEYAKEAKTLGASTLLKYIAKMIDASVDQIRGYRVDVNNKPEMHTFEVYRKMQSLETISVGELSRNVLDELAHILTLNTEREGMEEAINTKLKDSFSQDQVLELVQFRKNNSSLFSKGWHNFSLKLMMELIPELYETSEEQMTILTRLGKQKSKETSKRTKYIDEKELTEEIYNPVVAKSVRQAIKIINEATKKHGIFDNIVIEMARENNEEDAKKDYIKRQKANQDEKNAAMEKAAFQYNGKKELPDNIFHGHKELATKIRLWHQQGEKCLYTGKTIPISDLIYNQYKYEIDHILPLSLSFDDSLSNKVLALATANQEKGQRTPFQALDSMDDAWSYREFKSYVKDLKSLSNKKKDYLLTEEDISKIEVKQKFIERNLVDTRYSSRVVLNALQDFYKSHQFDTTISVVRGQFTSQLRRKWGLEKSRETYHHHAVDALIIAASSQLRLWKKQNNPLITYKEGQFVDSQTGEIISLTDDEYKELVFKAPYDHFVDTLSSKTFEDSILFSYQVDSKFNRKISDATIYATRKAKLDKEKKEYTYTLGKIKDIYSLGTKTPSKTGFYKFLDLYNKDKSQFLMFQKDRKTWDEVIEKIMEQYRPFKEYDKTGKLVDFNPFEKYRQENEPIRKYSKKGNGPEIKSLKYYDILLGKHKNITPEGSRNTVALLSLNPWRTDVYYNMETKKYEFLGLKYADLPFEEGGAYGISTETYNELREKEGIGKNSEFKFTLYKNDLILIKDTETNCQQIFRFWSRTGKDNPKSFEKHKIELKPYEKARFEKGEELEVLGKVPPSSNQLQKNMQIENLSIYKVKTDVLGNKHFIKKEGDKPKLKF

SEQ ID NO: 468 - protein, 1392 aa, Streptococcus mitis
  Streptococcus mitis SK321
MNNNNYSIGLDIGTNSVGWAVITDDYKVPSKKMKVLGNTDKHFIKKNLIGALLFDEGATAEDRRFKRTARRRYTRRKNRLRYLQEIFSEEMSKVDSSFFHRLDDSFLVPEDKRGSKYPIFATLAEEKEYHKKFPTIYHLRKHLADSKEKTDLRLIYLALAHMIKYRGHFLYEESFDIKNNDIQKIFSEFISIYDNTFEGSSLSGQNAQVEAIFTDKISKSAKRERILKLFAYEKSTDLFSEFLKLIVGNQADFKKHFDLEEKAPLQFSKDTYDEDLENLLGQIGDDFADLFLVAKKLYDAILLSGILTVTDSSTKAPLSASMIERYENHQKDLAALKQFIQNNLQEKYDEVFSDQSKDGYARYINGKTTQEAFYKYIKNLLSKFEGSDYFLDKIEREDFLRKQRTFDNGSIPHQIHLQEMNAIIRRQGEHYPFLKEYKEKIETILTFRIPYYVGPLARGNRNFAWLTRNSDQAIRPWNFEEIVDQASSAEEFINKMTNYDLYLPEEKVLPKHSLLYETFAVYNELTKVKFISEGLRDYQFLDSGQKKQIVNQLFKEKRKVTEKDIIQYLHNVDGYDGIELKGIEKQFNASLSTYHDLLKIIKDKEFMDDPKNEEILENIVHTLTIFEDREMIKQRLAQYASIFDKKVIKALTRRHYTGWGKLSAKLINGICDKKTGKTILDYLIDDGYSNRNFMQLINDDGLSFKDIIQKAQVVGKTNDVKQVVQELPGSPAIKKGILQSIKLVDELVKVMGHAPESIVIEIARENQTTARGKKNSQQRYKRIEDALKNLAPGLDSNILKEHPTDNIQLQNDRLFLYYLQNGKDMYTGEALDINQLSSYDIDHIVPQAFIKDDSLDNRVLTSSKDNRGKSDNVPSLEVVQKRKAFWQQLLDSKLISEHKFNNLTKAERGGLDERDKVGFIRRQLVETRQITKHVAQILDARFNTEVNEKDKKNRTVKIITLKSNLVSNFRKEFKLYKVREINDYHHAHDAYLNAVVAKAILKKYPKLEPGFVYGDYQKYDIKRYISRSKDPKEVEKATEKYFFYSNLLNFFKEEVHYADGTIVKRENIEYSKDTGEIAWNKEKDFATIKKVLSLPQVNIVKKTEIQTHGLDRGKPRGLFNSNPSPKPSEDRKENLVPIKQGLDPRKYGGYAGISNSYAVLVKAIIEKGAKKQQKTVLEFQGISILDKINFEKNKENYLLEKGYIKILSTITLPKYSLFEFPDGTRRRLASILSTNNKRGEIHKGNELVIPEKYTTLLYHAKNINKTLEPEHLEYVEKHRNDFAKLLEYVLNFNDKYVGALKNGERIRQAFIDWETVDIEKLCFSFIGPRNSKNAGLFELTSQGSASDFEFLGVKIPRYRDYTPSSLLNATLIHQSITGLYETRIDLSKLGED

SEQ ID NO: 469 - protein, 1345 aa, Streptococcus mutans
  Streptococcus mutans 11SSST2
MKKPYSIGLDIGTNSVGWAVVTDDYKVPAKKMKVLGNTDKSHIKKNLLGALLFDSGNTAADRRLKRTARRRYTRRRNRILYLQEIFAEEMSKVDDSFFHRLEDSFLVTEDKRGERHPIFGNLEEEVKYHENFPTIYHLRQYLADNPEKVDLRLVYLALAHIIKFRGHFLIEGKFDTRNNDVQRLFQEFLAVYDNTFENSSLQEQNVQVEEILTDKISKSAKKDRVLKLFPNEKSNGRFAEFLKLIVGNQADFKKHFELEEKAPLQFSKDTYEEELEVLLTQIGDNYAELFLSAKKLYDSILLSGILTVTDVSTKAPLSASMIQRYNEHQMDLAQLKQFIRQKLSDKYNEVFSDVSKDGYAGYIDGKTNQEAFYKYLKGLLNKIEGSGYFLDKIEREDFLRKQRTFDNGSIPHQIHLQEMRAIIRRQAEFYPFLADNQDRIEKILTFRIPYYVGPLARGKSDFAWLSRKSADKITPWNFDEIVDKESSAEAFINRMTNYDLYLPNQKVLPKHSLLYEKFTVYNELTKVKYKTEQGKTAFFDANMKQEIFDGVFKVYRKVTKDKLMDFLEKEFDEFRIVDLTGLDKENKAFNASYGTYHDLRKILDKDFLDNSKNEKILEDIVLTLTLFEDREMIRKRLENYSDLLTKEQVKKLERRHYTGWGRLSAELIHGIRNKESRKTLLDYLIDDGNSNRNFMQLINDDALSFKEEIAKAQVIGETDNLNQVVSDIAGSPAIKKGILQSLKIVDELVKIMGHQPENIVVEMARENQFTNQGRRNSQQRLKGLTDSIKEFGSQILKEHPVENSQLQNDRLFLYYLQNGRDMYTGEELDIDYLSQYDIDHIIPQAFIKDNSIDNRVLTSSKENRGKSDDVPSKDVVRKMKPYWSKLLSAKLITQRKFDNLTKAERGGLTDDDKAGFIKRQLVETRQITKHVARILDERFNTETDENNKKIRQVKIVTLKSNLVSNFRKEFELYKVREINDYHHAHDAYLNAVIGKALLGVYPQLEPEFVYGDYPHFHGHEENKATAKKFFYSNIMNFFKKDDVRTDKNGEIIWKKDEHISNIKKVLSYPQVNIVKKVEEQTGGFSKESILPKGNSDKLIPRKTKKFYWDTKKYGGFDSPIVAYSILVIADIEKGKSKKLKTVKALVGVTIMEKMTFERDPVAFLERKGYRNVQEENIIKLPKYSLFKLENGRKRLLASARELQKGNEIVLPNHLGTLLYHAKNIHKVDEPKHLDYVDKHKDEFKELLDVVSNFSKKYTLAEGNLEKIKELYAQNNGEDLKELSSSFINLLTFTAIGAPAAFKFFDKNIDRKRYTSTTEILNATLIHQSITGLYETRIDLSKLGGD

SEQ ID NO: 470 - protein, 1345 aa, Streptococcus mutans; identical to SEQ ID NO: 469
  Streptococcus mutans 11SSST2

SEQ ID NO: 471 - protein, 1345 aa, Streptococcus mutans
  Streptococcus mutans 11VS1
MKKPYSIGLDIGTNSVGWAVVTDDYKVPAKKMKVLGNTDKSHIKKNLLGALLFDSGNTAEDRRLKRTARRRYTRRRNRILYLQEIFSEEMGKVDDSFFHRLEDSFLVTEDKRGERHPIFGNLEEEVKYHENFPTIYHLRQYLADNPEKVDLRLVYLALAHIIKFRGHFLIEGKFDTRNNDVQRLFQEFLAVYDNTFENSSLQEQNVQVEEILTDKISKSAKKDRVLKLFPNEKSNGRFAEFLKLIVGNQADFKKHFELEEKAPLQFSKDTYEEELEVLLAQIGDNYAELFLSAKKLYDSILLSGILTVTDVSTKAPLSASMIQRYNEHQMDLAQLKQFIRQKLSDKYNEVFSDVSKDGYAGYIDGKTNQEAFYKYLKGLLNKIEGSGYFLDKIEREDFLRKQRTFDNGSIPHQIHLQEMRAIIRRQAEFYPFLADNQDRIEKILTFRIPYYVGPLARGKSDFAWLSRKSADKITPWNFDEIVDKESSAEAFINRMTNYDLYLPNQKVLPKHSLLYEKFTVYNELTKVKYKTEQGKTAFFDANMKQEIFDGVFKVYRKVTKDKLMDFLEKEFDEFRIVDLTGLDKENKVFNASYGTYHDLCKILDKDFLDNSKNEKILEDIVLTLTLFEDREMIRKRLENYSDLLTKEQVKKLERRHYTGWGRLSAELIHGIRNKESRKTILDYLIDDGNSNRNFMQLINDDALSFKEEIAKAQVIGETDNLNQVVSDIAGSPAIKKGILQSLKIVDELVKIMGHQPENIVVEMARENQFTKQGRRNSQQRLKGLTDSIKEFGSQILKEHPVENSQLQNDRLFLYYLQNGRDMYTGEELDIDYLSQYDIDHIIPQAFIKDNSIDNRVLTSSKENRGKSDDVPSKDVVRKMKSYWSKLLSAKLITQRKFDNLTKAERGGLTDDDKAGFIKRQLVETRQITKHVARILDERFYTETDENNKKIRQVKIVTLKSNLVSNFRKEFELYKVREINDYHHAHDAYLNAVIGKALLGVYPQLEPEFVYGDYPHFHGHKENKATAKKFFYSNIMNFFKKDDVRTDKNGEIIWKKDEHISNIKKVLSYPQVNIVKKVEEQTGGFSKESILPKGNSDKLIPRKTKKFYWDTKKYGGFDSPIVAYSILVIADIEKGKSKKLKTVKALVGVTIMEKMTFERDPVAFLERKGYRNVQEENIIKLPKYSLFKLENGRKRLLASARELQKGNEIVLPNHLGTLLYHAKNIHKVDEPKHLDYVDKHKDEFKELLDVVSNFSKKYTLAEGNLEKIKELYAQNNGEDLKELASSFINLLTFTAIGAPATFKFFDKNIDRKRYTSTTEILNATLIHQSITGLYETRIDLSKLGGD

SEQ ID NO: 472 - protein, 1345 aa, Streptococcus mutans
  Streptococcus mutans 14D
MKKPYSIGLDIGTNSVGWAVVTDDYKVPAKKMKVLGNTDKSHIKKNLLGALLFDSGNTAADRRLKRTARRRYTRRRNRILYLQEIFAEEMSKVDDSFFHRLEDSFLVTEDKRGERHPIFGNLEEEVKYHENFPTIYHLRQYLADNPEKVDLRLVYLALAHIIKFRGHFLIEGKFDTRNNDVQRLFQEFLAVYDNTFENSSLQEQNVQVEEILTDKISKSAKKDRVLKLFPNEKSNGRFAEFLKLIVGNQADFKKHFELEEKAPLQFSKDTYEEELEVLLAQIGDNYAELFLSAKKLYDSILLSGILTVTDVSTKAPLSASMIQRYNEHQMDLAQLKQFIRQKLSDKYNEVFSDVSKDGYAGYIDGKTNQEAFYKYLKGLLNKIEGSGYFLDKIEREDFLRKQRTFDNGSIPHQIHLQEMRAIIRRQAEFYPFLADNQDRIEKILTFRIPYYVGPLARGKSDFAWLSRKSADKITPWNFDEIVDKESSAEAFINRMTNYDLYLPNQKVLPKHSLLYEKFTVYNELTKVKYKTEQGKTAFFDANMKQEIFDGVFKVYRKVTKDKLMDFLEKEFDEFRIVDLTGLDKENKAFNASYGTYHDLRKILDKDFLDNSKNEKILEDIVLTLTLFEDREMIRKRLENYSDLLTKEQVKKLERRHYTGWGRLSAELIHGIRNKESRKTILDYLIDDGNSNRNFMQLINDDALSFKEEIAKAQVIGETDNLNQVVSDIAGSPAIKKGILQSLKIVDELVKIMGHQPENIVVEMARENQFTNQGRRNSQQRLKGLTDSIKEFGSQILKEHPVEHSQLQNDRLFLYYLQNGRDMYTGEELDIDYLSQYDIDHIIPQAFIKDNSIDNRVLTSSKENRGKSDDVPSKNVVRKMKSYWSKLLSAKLITQRKFDNLTKAERGGLTDDDKAGFIKRQLVETRQITKHVARILDERFHTETDENNKKIRQVKIVTLKSNLVSNFRKEFELYKVREINDYHHAHDAYLNAVIGKALLGVYPQLEPEFVYGDYPHFHGHKENKATAKKFFYSNIMNFFKKDDVRTDKNGEIIWKKDEHISNIKKVLSYPQVNIVKKVEEQTGGFSKESILPKGNSDKLIPRKTKKFYWDTKKYGGFDSPIVAYSILVIADIEKGKSKKLKTVKALVGVTIMEKMTFERDPVAFLERKGYRNVQEENIIKLPKYSLFKLENGRKRLLASARELQKGNEIVLPNHLGTLLYHAKNIHKVDEPKHLDYVDKHKDEFKELLDVVSNFSKKYTLAEGNLEKIKELYAQNNGEDLKELASSFINLLTFTAIGAPATFKFFDKNIDRKRYTSTTEILNATLIHQSITGLYETRIDLSKLGGD

SEQ ID NO: 473 - protein, 1355 aa, Streptococcus mutans
  Streptococcus mutans 15VF2
MKKSYSIGLDIGTNSVGWAVVTDDYKVPAKKMKVLGNTDKSHIKKNLLGALLFDSGNTAEDRRLKRTARRRYTRRRNRILYLQEIFSEEMGKVDDSFFHRLDESFLTDDDKNFDSHPIFGNKAEEDAYHQKFPTIYHLRKHLADSTEKADLRLVYLALAHMIKFRGHFLIEGELNAENTDVQKLFADFVGVYDRTFDDSHLSEITVDASSILTEKISKSRRLEKLINNYPKEKKNTLFGNLIALSLGLQPNFKTNFKLSEDAKLQFSKDTYEEDLEELLGKIGDDYADLFTLAKNLYDAILLSGILTADDSSTKAPLSASMIKRYAEHHEDLEKLKEFIKANKPELYHDIFKDETKNGYAGYIENGVKQDEFYKYLKNTLSKIAGSDYFLDKIEREDFLRKQRTFDNGSIPHQIHLQEMHAILRRQGDYYPFLKENQDRIEKILTFRIPYYVGPLARKNSRFAWAEYHSDEAVMPWNFDQVIDKESSAQAFIEHMTNNDLYLPNEKVLPKHSPLYEKYTVYNELTKIKYVTEIGEAKFFDANLKQEIFDGLFKHERKVTKKKLRTFLDKNFDEFRIVDIQGLDKETETFNASYATYQDLLKVIKDKVFMDNPENAEILENIVLTLTLFEDREMIKQRLAKYADVFDKKVIDQLARRHYTGWGRLSAKLLNGIRDKQSCKTIMDYLIDDAQSNRNLMQLITDDNLTFKDDIVKAQYVDNSDDLHQVVQSLAGSPAIKKGILQSLKIVDELVKVMGKEPEQIVVEMARENQTTAKGRRNSQQRYKRLKEAIKSLDRDLNHKILKEHPTDNQALQNNRLFLYYLQNGRDMYTGESLDINRLSDYDIDHVIPQAFIKDNSIDNRVLTSSKANRGKSDDVPSEDVVNRMRPFWNKLLSSGLISQRKYNNLTKKELTPDDKAGFIKRQLVETRQITKHVARMLDERFNKEFDDNNKRIRRVKIVTLKSNLVSSFRKEFELYKVREINDYHHAHDAYLNAVVVKALLVKYPKLEPEFVYGEYPKYNSYRERKTATQKMFFYSNIMNMFKSKVKLADDQIVERPMIEVNDETGEIAWDKTKHITTVKKVLSYPQVNIVKKVEEQTIGQNGGLFDDNPKSPLEVIPSKLVPLKKALNPEKYGGYQKPTTAYPILLIVDTKQLIPISVMDKKRFEQNPVKFLKDKGYQQIEKNNFVKLPKYTLVDIGNGIKRLWASSKEVHKGNQLVVSKKSQDLLYHAHHLDNDYSNEYVKNHYQQFDILFNEITSFSKKCKLGKEHIQKIEEAYSKERDSASIEELADGFIKLLGFTQLGATSPFSFLGIKLNQKQYTGKKDYLLPCMEATLIHQSITGLYETRIDLNKLGGD

SEQ ID NO: 474 - protein, 1355 aa, Streptococcus mutans; identical to SEQ ID NO: 473
  Streptococcus mutans 15VF2

SEQ ID NO: 475 - protein, 1345 aa, Streptococcus mutans
  Streptococcus mutans 1SM1
MKKPYSIGLDIGTNSVGWAVVTDDYKVPAKKMKVLGNTDKSHIKKNLLGALLFDSGNTAEDRRLKRTARRRYTRRRNRILYLQEIFSEEMGKVDDSFFHRLEDSFLVTEDKRGERHPIFGNLEEEVKYHENFPTIYHLRQYLADNPEKVDLRLVYLALAHIIKFRGHFLIEGKFDTRNNDVQRLFQEFLAVYDNTFENSSLQEQNVQVEEILTDKISKSAKKDRVLKLFPNEKSNGRFAEFLKLIVGNQADFKKHFELEEKAPLQFSKDTYEEDLEELLGKIGDDYADLFTLAKNLYDAILLSGILTADDSSTKAPLSASMIQRYNEHQMDLAQLKQFIRQKLSDKYNEVFSDVSKDGYAGYIDGKTNQEAFYKYLKGLLNKIEGSGYFLDKIEREDFLRKQRTFDNGSIPHQIHLQEMRAIIRRQAEFYPFLADNQDRIEKILTFRIPYYVGPLARGKSDFAWLSRKSADKITPWNFDEIVDKESSAEAFINRMTNYDLYLPNQKVLPKHSLLYEKFTVYNELTKVKYKTEQGKTAFFDANMKQEIFDGVFKVYRKVTKDKLMDFLEKEFDEFRIVDLTGLDKENKVFNASYGTYHDLCKILDKDFLDNSKNEKILEDIVLTLTLFEDREMIRKRLENYSDLLTKEQVKKLERRHYTGWGRLSAELIHGIRNKESRKTILDYLIDDGNSNRNFMQLINDDALSFKEEIAKAQVIGETDNLNQVVSDIAGSPAIKKGILQSLKIVDELVKIMGHQPENIVVEMARENQFTNQGRRNSQQRLKGLTDSIKEFGSQILKEHPVENSQLQNDRLFLYYLQNGRDMYTGEELDIDYLSQYDIDHIIPQAFIKDNSIDNRVLTSSKENRGKSDDVPSKDVVRKMKSYWSKLLSAKLITQRKFDNLTKAERGGLTDDDKAGFIKRQLVETRQITKHVARILDERFYTETDENNKKIRQVKIVTLKSNLVSNFRKEFELYKVREINDYHHAHDAYLNAVIGKALLGVYPQLEPEFVYGDYPHFHGHKENKATAKKFFYSNIMNFFKKDDVRTDKNGEIIWKKDEHISNIKKVLSYPQVNIVKKVEEQTGGFSKESILPKGNSDKLIPRKTKKFYWDTKKYGGFDSPIVAYSILVIADIEKGKSKKLKTVKALVGVTIMEKMTFERDPVAFLERKGYRNVQEENIIKLPKYSLFKLENGRKRLLASARELQKGNEIVLPNHLGTLLYHAKNIHKVDEPKHLDYVDKHKDEFKELLDVVSNFSKKYTLAEGNLEKIKELYAQNNGEDLKELASSFINLLTFTAIGAPATFKFFDKNIDRKRYTSTTEILNATLIHQSITGLYETRIDLSKLGGD

SEQ ID NO: 476 - protein, 1345 aa, Streptococcus mutans; identical to SEQ ID NO: 475
  Streptococcus mutans 1SM1

SEQ ID NO: 477 - protein, 1350 aa, Streptococcus mutans
  Streptococcus mutans 24
MKKPYSIGLDIGTNSVGWAVVTDDYKVPAKKMKVLGNTDKSHIEKNLLGALLFDSGNTAEDRRLKRTARRRYTRRRNRILYLQEIFSEEMGKVDDSFFHRLEDSFLVTEDKRGERHPIFGNLEEEVKYHENFPTIYHLRQYLADNPEKVDLRLVYLALAHIIKFRGHFLIEGKFDTRNNDVQRLFQEFLAVYDNTFENSSLQEQNVQVEEILTDKISKSAKKDRVLKLFPNEKSNGRFAEFLKLIVGNQADFKKHFELEEKAPLQFSKDTYEEELEVLLAQIGDNYAELFLSAKKLYDSILLSGILTVTDVSTKAPLSASMIQRYNEHQMDLTQLKQFIRQKLSDKYNEVFSDVSKDGYAGYIDGKTNQEAFYKYLKGLLNKIEGSGYFLDKIEREDFLRKQRTFDNGSIPHQIHLQEMRAIIRRQAEFYPFLADNQDRIEKILTFRIPYYVGPLARGKSDFAWLSRKSADKITPWNFDEIVDKESSAEAFINRMTNYDLYLPNQKVLPKHSLLYEKFTVYNELTKVKYKTEQGKTAFFDANMKQEIFDGVFKVYRKVTKDKLMDFLEKEFDEFRIVDLTGLDKENKAFNASYGTYHDLRKILDKDFLDNSKNEKILEDIVLTLTLFEDREMIRKRLKNYSDLLTKEQLKKLERRHYTGWGRLSAELIHGIRNKESRKTILDYLIDDGNSNRNFMQLINDDALSFKEEIAKAQVIGETDNLNQVVSDIAGSPAIKKGILQSLKIVDELVKIMGHQPENIVVEMARENQFTNQGRQNSQQRLKGLTDSIKEFGSQILKEHPVENSQLQNDRLFLYYLQNGRDMYTGEELDIDYLSQYDIDHIIPQAFIKDNSIDNRVLTSSKENRGKSDDVPSEDVVNRMRPFWNKLLSSGLISQRKYNNLTKKELTLDDKAGFIKRQLVETRQITKHVARMLDERFNKEFDDNNKRICKVKIVTLKSNLVSSFRKEFELYKVREINDYHHAHDAYLNAVVVKALLVKYSKLEPEFVYGEYPKYNSYRERKTATQKMFFYSNIMNMFKSKVKLADDQIVERPMIEVNDETGEIAWDKTKHITTVKKVLSYPQVNIVKKVEEQTIGQNGGLFDDNPKSPLEVIPSKLVPLKKALNPEKYGGYQKPTTAYPILLIVDTKQLIPISVMDKKRFEQNPVKFLKDKGYQQIEKNNFVKLPKYTLVDIGNGIKRLWASSKEVHKGNQLVVSKKSQDLLYHAHHLDNDYSNEYVKNHYQQFDILFNEITSFSKKCKLGKEHIQKIEEAYSKERDSASIEELADGFIKLLGFTQLGATSPFSFLGIKLNQKQYTGKKDYLLPCMEATLIHQSITGLYETRIDLSKLGGD

SEQ ID NO: 478 - protein, 1350 aa, Streptococcus mutans; identical to SEQ ID NO: 477
  Streptococcus mutans 24

SEQ ID NO: 479 - protein, 1345 aa, Streptococcus mutans; identical to SEQ ID NO: 472
  Streptococcus mutans 2VS1

SEQ ID NO: 480 - protein, 1345 aa, Streptococcus mutans; identical to SEQ ID NO: 472
  Streptococcus mutans 2VS1

SEQ ID NO: 481 - protein, 1345 aa, Streptococcus mutans; identical to SEQ ID NO: 471
  Streptococcus mutans 3SN1

SEQ ID NO: 482 - protein, 1345 aa, Streptococcus mutans; identical to SEQ ID NO: 471
  Streptococcus mutans 3SN1

SEQ ID NO: 483 - protein, 1345 aa, Streptococcus mutans
  Streptococcus mutans 4SM1
MKKPYSIGLDIGTNSVGWAVVTDDYKVPAKKMKVLGNTDKSHIKKNLLGALLFDSGNTAEDRRLKRTARRRYTRRRNRILYLQEIFSEEMGKVDDSFFHRLEDSFLVTEDKRGERHPIFGNLEEEVKYHENFPTIYHLRQYLADNPEKVDLRLVYLALAHIIKFRGHFLIEGKFDTRNNDVQRLFQEFLAVYDNTFENSSLQEQNVQVEEILTDKISKSAKKDRVLKLFPNEKSNGRFAEFLKLIVGNQADFKKHFELEEKAPLQFSKDTYEEDLEELLGKIGDDYADLFTLAKNLYDAILLSGILTADDSSTKAPLSASMIQRYNEHQMDLAQLKQFIRQKLSDKYNEVFSDVSKDGYAGYIDGKTNQEAFYKYLKGLLNKIEGSGYFLDKIEREDFLRKQRTFDNGSIPHQIHLQEMRAIIRRQAEFYPFLADNQDRIEKILTFRIPYYVGPLARGKSDFAWLSRKSADKITPWNFDEIVDKESSAEAFINRMTNYDLYLPNQKVLPKHSLLYEKFTVYNELTKVKYKTEQGKTAFFDANMKQEIFDGVFKVYRKVTKDKLMDFLEKEFDEFRIVDLTGLDKENKVFNASYGTYHDLCKILDKDFLDNSKNEKILEDIVLTLTLFEDREMIRKRLENYSDLLTKEQVKKLERRHYTGWGRLSAELIHGIRNKESRKTILDYLIDDGNSNRNFMQLINDDALSFKEEIAKAQVIGETDNLNQVVSDIAGSPAIKKGILQSLKIVDELVKIMGHQPENIVVEMARENQFTNQGRRNSQQRLKGLTDSIKEFGSQILKEHPVENSQLQNDRLFLYYLQNGRDMYTGEELDIDYLSQYDIDHIIPQAFIKDNSIDNRVLTSSKENRGKSDDVPSKDVVRKMKPYWSKLLSAKLITQRKFDNLTKAERGGLTDDDKAGFIKRQLVETRQITKHVARILDERFNTETDENNKKIRQVKIVTLKSNLVSNFRKEFELYKVREINDYHHAHDAYLNAVIGKALLGVYPQLEPEFVYGDYPHFHGHEENKATAKKFFYSNIMNFFKKDDVRTDKNGEIIWKKDEHISNIKKVLSYPQVNIVKKVEEQTGGFSKESILPKGNSDKLIPRKTKKFYWDTKKYGGFDSPIVAYSILVIADIEKGKSKKLKTVKALVGVTIMEKMTFERDPVAFLERKGYRNVQEENIIKLPKYSLFKLENGRKRLLASARELQKGNEIVLPNHLGTLLYHAKNIHKVDEPKHLDYVDKHKDEFKELLDVVSNFSKKYTLAEGNLEKIKELYAQNNGEDLKELASSFINLLTFTAIGAPATFKFFDKNIDRKRYTSTTEILNATLIHQSITGLYETRIDLSKLGGD

SEQ ID NO: 484 - protein, 1345 aa, Streptococcus mutans; identical to SEQ ID NO: 483
  Streptococcus mutans 4SM1

SEQ ID NO: 485 - protein, 1345 aa, Streptococcus mutans
  Streptococcus mutans 4VF1
MKKPYSIGLDIGTNSVGWAVVTDDYKVPAKKMKVLGNTDKSHIKKNLLGALLFDSGNTAEDRRLKRTARRRYTRRRNRILYLQEIFSEEMGKVDDSFFHRLEDSFLVTEDKRGERHPIFGNLEEEVKYHENFPTIYHLRQYLADNPEKVDLRLVYLALAHIIKFRGHFLIEGKFDTRNNDVQRLFQEFLAVYDNTFENSSLQEQNVQVEEILTDKISKSAKKDRVLKLFPNEKSNGRFAEFLKLIVGNQADFKKHFELEEKAPLQFSKDTYEEELEVLLAQIGDNYAELFLSAKKLYDSILLSGILTVTDVSTKAPLSASMIQRYNEHQMDLAQLKQFIRQKLSDKYNEVFSDVSKDGYAGYIDGKTNQEAFYKYLKGLLNKIEGSGYFLDKIEREDFLRKQRTFDNGSIPHQIHLQEMRAIIRRQAEFYPFLADNQDRIEKILTFRIPYYVGPLARGKSDFAWLSRKSADKITPWNFDEIVDKESSAEAFINRMTNYDLYLPNQKVLPKHSLLYEKFTVYNELTKVKYKTEQGKTAFFDANMKQEIFDGVFKVYRKVTKDKLMDFLEKEFDEFRIVDLTGLDKENKVFNASYGTYHDLCKILDKDFLDNSKNEKILEDIVLTLTLFEDREMIRKRLENYSDLLTKEQVKKLERRHYTGWGRLSAELIHGIRNKESRKTILDYLIDDGNSNRNFMQLINDDALSFKEEIAKAQVIGETDNLNQVVSDIAGSPAIKKGILQSLKIVDELVKIMGHQPENIVVEMARENQFTKQGRRNSQQRLKGLTDSIKEFGSQILKEHPVENSQLQNDRLFLYYLQNGRDMYTGEELDIDYLSQYDIDHIIPQAFIKDNSIDNRVLTSSKENRGKSDDVPSKDVVRKMKSYWSKLLSAKLITQRKFDNLTKAERGGLTDDDKAGFIKRQLVETRQITKHVARILDERFYTETDENNKKIRQVKIVTLKSNLVSNFRKEFELYKVREINDYHHAHDAYLNAVIGKALLGVYPQLEPEFVYGDYPHFHGHKENKATAKKFFYSNIMNFFKKDDVRTDRNGEIIWKKDEHISNIKKVLSYPQVNIVKKVEEQTGGFSKESILPKGNSDKLIPRKTKKFYWDTKKYGGFDSPIVAYSILVIADIEKGKSKKLKTVKALVGVTIMEKMTFERDPVAFLERKGYRNVQEENIIKLPKYSLFKLENGRKRLLASARELQKGNEIVLPNHLGTLLYHAKNIHKVDEPKHLDYVDKHKDEFKELLDVVSNFSKKYTLAEGNLEKIKELYAQNNGEDLKELASSFINLLTFTAIGAPATFKFFDKNIDRKRYTSTTEILNATLIHQSITGLYETRIDLSKLGGD

SEQ ID NO: 486 - protein, 1345 aa, Streptococcus mutans; identical to SEQ ID NO: 485
  Streptococcus mutans 4VF1

SEQ ID NO: 487 - protein, 1345 aa, Streptococcus mutans
  Streptococcus mutans 5SM3
MKKPYSIGLDIGTNSVGWAVVTDDYKVPAKKMKVLGNTDKSHIEKNLLGALLFDSGNTAEDRRLKRTARRRYTRRRNRILYLQEIFSEEMGKVDDSFFHRLEDFFLVTEDKRGERHPIFGNLEEEVKYHENFPTIYHLRQYLADNPEKVDLRLVYLALAHIIKFRGHFLIEGKFDTRNNDVQRLFQEFLAVYDNTFENSSLQEQNVQVEEILTDKISKSAKKDRVLKLFPNEKSNGRFAEFLKLIVGNQADFKKHFELEEKAPLQFSKDTYEEELEVLLAQIGDNYAELFLSAKKLYDSILLSGILTADDSSTKAPLSASMIQRYNEHQMDLAQLKQFIRQKLSDKYNEVFSDVSKDGYAGYIDGKTNQEAFYKYLKGLLNKIEGSGYFLDKIEREDFLRKQRTFDNGSIPHQIHLQEMRAIIRRQSEFYPFLADNQDRIEKILTFRIPYYVGPLARGKSDFAWLSRKSADKITPWNFDEIVDKESSAEAFINRMTNYDLYLPNQKVLPKHSLLYEKFTVYNELTKVKYKTEQGETAFFDANMKQEIFDGVFKVYRKVTKDKLMDFLEKEFDEFRIVDLTGLDKENKAFNASYGTYHDLRKILDKDFLDNSKNEKILEDIVLTLTLFEDREMIRKRLKNYSDLLTKEQLKKLERRHYTGWGRLSAELIHGIRNKESRKTILDYLIDDGNSNRNFMQLINDDALSFKEEIAKAQVIGETDNLNQVVSDIAGSPAIKKGILQSLKIVDELVKIMGHQPENIVVEMARENQFTNQGRRNSQQRLKGLTDSIKEFGSQILKEHPVENSQLQNDRLFLYYLQNGRDMYTGEELDIDYLSQYDIDHIIPQAFIKDNSIDNRVLTSSKENRGKSDDVPSKDVVRKMKPYWSKLLSAKLITQRKFDNLTKAERGGLTDDDKAGFIKRQLVETRQITKHVARILDERFNTETDENNKKIRQVKIVTLKSNLVSNFRKEFELYKVREINDYHHAHDAYLNAVIGKALLGVYPQLEPEFVYGDYPHFHGHEENKATAKKFFYSNIMNFFKKDDVRTDKNGEIIWKKDEHISNIKKVLSYPQVNIVKKVEEQTGGFSKESILPKGNSDKLIPRKTKKFYWDTKKYGGFDSPIVAYSILVIADIEKGKSKKLKTVKALVGVTIMEKMTFERDPVAFLERKGYRNVQEENIIKLPKYSLFKLENGRKRLLASARELQKGNEIVLPNHLGTLLYHAKNIHKVDEPKHLDYVDKHKDEFKELLDVVSNFSKKYTLAEGNLEKIKELYAQNNGEDLKELASSFINLLTFTAIGAPATFKFFDKNIDRKRYTSTTEILNATLIHQSITGLYETRIDLSKLGGD

SEQ ID NO: 488 - protein, 1345 aa, Streptococcus mutans; identical to SEQ ID NO: 487
  Streptococcus mutans 5SM3

SEQ ID NO: 489 - protein, 1359 aa, Streptococcus mutans
  Streptococcus mutans 66-2A
MKKPYSIGLDIGTNSVGWAVVTDDYKVPAKKMKVLGNTDKSHIKKNLLGALLFDSGNTAEDRRLKRTARRRYTRRRNRILYLQEIFAEEMMQVDESFFQRLDDSFLVEEDKRGSRYPIFGTLKEEKKYHKEFKTIYHLREKLANSTEKADLRLVYLSLAHMIKFRGHFLIEGQLKAENTNVQALFKDFVEVYDKTVEESHLSEMTVDALSILTEKVSKSRRLENLVECYPTEKKNTLFGNLIALSLGLQPNFKTNFQLSEDAKLQFSKDTYEEDLEGLLGEIGDEYADLFASAKNLYDAILLSGILAVDDNTTKAPLSASMVKRYKEHKEELAAFKRFIKEKLPKKYEEIFKDDTKNGYAGYVGADKKLRKRSGKLATEEEFYKYVKGILNKVEGADVWLDKIDREDFLRKQRTFDNGSIPHQIHLQEMHAILRRQGEHYPFLKENQDKIEKILTFRIPYYVGPLVRKGSRFAWAEYKADEKITPWNFDDILDKEKSAEKFITRMTLNDLYLPEEKVLPKHSLLYETFTVYNELTKVKYVNEQGEAKFFDANMKQEIFDHVFKENRKVTKDKLLNYLNKEFEEFRIVNLTGLDKENKVFNSSLGTYHDLRKILNKSFLDNKENEQIIEDIIQTLTLFEDREMIRQRLQKYSDIFTKAQLKKLERRHYTGWGRLSYKLINGIRDKQSNKTILGYLIDDGYSNRNFMQLINDDALSFKEEIAKAQVIGEMDGLNQVVSDIAGSPAIKKGILQSLKIVDELVKVMGHNPANIVIEMARENQTTAKGRRSSQKRYKRLEEAIKNLDHDLNHKILKEHPTDNQALQNDRLFLYYLQNGRDMYTEDPLDINRLSDYDIDHIIPQAFIKDNSIDNRVLTRSDKNRGKSDDVPSEEVVHKMKPFWSKLLSAKLITQRKFDNLTKAERGGLTDDDKAGFIKRQLVETRQITKHVARILDERFNTETDENNKKIRQVKIVTLKSNLVSNFRKEFELYKVREINDYHHAHDAYLNAVIGKALLGVYPQLEPEFVYGDYPHFHGHKENKATAKKFFYSNIMNFFKKGDVRTDKNGEIIWKKDEHISNIKKVLSYPQVNIVKKVEEQTGGFSKESILPKGNSDKLIPRKTKKFYWDTKKYGGFDSPIVAYSILVIADIEKGKSKKLKTVKALVGVTIMEKMTFERDPVAFLERKGYRNVQEENIIKLPKYSLFKLENGRKRLLASARELQKGNEIVLPNHLETLLYHAKNIHKVDEPKHLDYVDKHKDEFKELLDVVSNFSKKYTLAEGNLEKIKELYAQNNGEDLKELASSFINLLTFTAIGAPAAFKFFDKNIDRKRYTSTTEILNATLIHQSITGLYETRIDLNKLGGD

SEQ ID NO: 490 - protein, 1359 aa, Streptococcus mutans; identical to SEQ ID NO: 489
  Streptococcus mutans 66-2A

SEQ ID NO: 491 - protein, 1345 aa, Streptococcus mutans
  Streptococcus mutans 8ID3
MKKPYSIGLDIGTNSVGWAVVTDDYKVPAKKMKVLGNTDKSHIEKNLLGALLFDSGNTAEDRRLKRTARRRYTRRRNRILYLQEIFSEEMGKVDDSFFHRLEDSFLVTEDKRGERHPIFGNLEEEVKYHENFPTIYHLRQYLADNPEKVDLRLVYLALAHIIKFRGHFLIEGKFDTRNNDVQRLFQEFLAVYDNTFENSSLQEQNVQVEEILTDKISKSAKKDRVLKLFPNEKSNGRFAEFLKLIVGNQADFKKHFELEEKAPLQFSKDTYEEELEVLLAQIGDNYAELFLSAKKLYDSILLSGILTVTDVGTKAPLSASMIQRYNEHQMDLAQLKQFIRQKLSDKYNEVFSDVSKDGYAGYIDGKTNQEAFYKYLKGLLNKIEGSGYFLDKIEREDFLRKQRTFDNGSIPHQIHLQEMRAIIRRQAEFYPFLADNQDRIEKLLTFRIPYYVGPLARGKSDFAWLSRKSADKITPWNFDEIVDKESSAEAFINRMTNYDLYLPNQKVLPKHSLLYEKFTVYNELIKVKYKTEQGKTAFFDANMKQEIFDGVFKVYRKVTKDKLMDFLEKEFDEFRIVDLTGLDKENKVFNASYGTYHDLCKILDKDFLDNSKNEKILEDIVLTLTLFEDREMIRKRLENYSDLLTKEQVKKLERRHYTGWGRLSAELIHGIRNKESRKTILDYLIDDGNSNRNFMQLINDDALSFKEEIAKAQVIGETDNLNQVVSDIAGSPAIKKGILQSLKIVDELVKIMGHQPENIVVEMARENQFTNQGRRNSQQRLKGLTDSIKEFGSQILKEHPVENSQLQNDRLFLYYLQNGRDMYTGEELDIDYLSQYDIDHIIPQAFIKDNSIDNRVLTSSKENRGKSDDVPSKDVVRKMKSYWSKLLSAKLITQRKFDNLTKAERGGLTDDDKAGFIKRQLVETRQITKHVARILDERFNTETDENNKKIRQVKIVTLKSNLVSNFRKEFELYKVREINDYHHAHDAYLNAVIGKALLGVYPQLEPEFVYGDYPHFHGHKENKATAKKFFYSNIMNFFKKDDVRTDKNGEIIWKKDEHISNIKKVLSYPQVNIVKKVEEQTGGFSKESILPKGNSDKLIPRKTKKFYWDTKKYGGFDSPIVAYSILVIADIEKGKSKKLKTVKALVGVTIMEKMTFERDPVAFLERKGYRNVQEENIIKLPKYSLFKLENGRKRLLASARELQKGNEIVLPNHLGTLLYHAKNIHKVDEPKHLDYVDKHKDEFKELLDVVSNFSKKYTLAEGNLEKIKELYAQNNGEDLKELASSFINLLTFTAIGAPATFKFFDKNIDRKRYTSTTEILNATLIHQSITGLYETRIDLNKLGGD

SEQ ID NO: 492 - protein, 1345 aa, Streptococcus mutans; identical to SEQ ID NO: 491
  Streptococcus mutans 8ID3

SEQ ID NO: 493 - protein, 1345 aa, Streptococcus mutans
  Streptococcus mutans A19
MKKPYSIGLDIGTNSVGWSVVTDDYKVPAKKMKVLGNTDKSHIEKNLLGALLFDSGNTAEDRRLKRTARRRYTRRRNRILYLQEIFSEEMGKVDDSFFHRLEDSFLVTEDKRGERHPIFGNLEEEVKYHENFPTIYHLRQYLADNPEKVDLRLVYLALAHIIKFRGHFLIEGKFDTRNNDVQRLFQEFLAVYDNTFENSSLQEQNVQVEEILTDKISKSAKKDRVLKLFPNEKSNGRFAEFLKLIVGNQADFKKHFELEEKAPLQFSKDTYEEELEVLLAQIGDNYAELFLSAKKLYDSILLSGILTVTDVGTKAPLSASMIQRYNEHQMDLAQLKQFIRQKLSDKYNEVFSDVSKDGYAGYIDGKTNQEAFYKYLKGLLNKIEGSGYFLDKIEREDFLRKQRTFDNGSIPHQIHLQEMRAIIRRQAEFYPFLADNQDRIEKLLTFRIPYYVGPLARGKSDFAWLSRKSADKITPWNFDEIVDKESSAEAFINRMTNYDLYLPNQKVLPKHSLLYEKFTVYNELTKVKYKTEQGKTAFFDANMKQEIFDGVFKVYRKVTKDKLMDFLEKEFDEFRIVDLTGLDKENKVFNASYGTYHDLCKILDKDFLDNSKNEKILEDIVLTLTLFEDREMIRKRLENYSDLLTKEQVKKLERRHYTGWGRLSAELIHGIRNKESRKTILDYLIDDGNSNRNFMQLINDDALSFKEEIAKAQVIGETDNLNQVVSDIAGSPAIKKGILQSLKIVDELVKIMGHQPENIVVEMARENQFTNQGRRNSQQRLKGLTDSIKEFGSQILKEHPVENSQLQNDRLFLYYLQNGRDMYTGEELDIDYLSQYDIDHIIPQAFIKDNSIDNRVLTSSKENRGKSDDVPSKDVVRKMKSYWSKLLSAKLITQRKFDNLTKAERGGLTDDDKAGFIKRQLVETRQITKHVARILDERFNTETDENNKKIRQVKIVTLKSNLVSNFRKEFELYKVREINDYHHAHDAYLNAVIGKALLGVYPQLEPEFVYGDYPHFHGHKENKATAKKFFYSNIMNFFKKDDVRIDKNGEIIWKKDEHISNIKKVLSYPQVNIVKKVEEQTGGFSKESILPKGNSDKLIPRKTKKFYWDTKKYGGFDSPIVAYSILVIADIEKGKSKKLKTVKALVGVTIMEKMTFERDPVAFLERKGYRNVQEENIIKLPKYSLFKLENGRKRLLASARELQKGNEIVLPNHLGTLLYHAKNIHKVDEPKHLDYVDKHKDEFKELLDVVSNFSKKYTLAEGNLEKIKELYAQNNGEDLKELASSFINLLTFTAIGAPATFKFFDKNIDRKRYTSTTEILNATLIHQSITGLYETRIDLSKLGGD

SEQ ID NO: 494 - protein, 1345 aa, Streptococcus mutans; identical to SEQ ID NO: 493
  Streptococcus mutans A19

SEQ ID NO: 495 - protein, 1345 aa, Streptococcus mutans; identical to SEQ ID NO: 472
  Streptococcus mutans B

SEQ ID NO: 496 - protein, 1345 aa, Streptococcus mutans; identical to SEQ ID NO: 472
  Streptococcus mutans G123

SEQ ID NO: 497 - protein, 1345 aa, Streptococcus mutans
MKKPYSIGLDIGTNSVGWAVVTDDYKVPAKKMKVLGNTDKSHIKKNLLGALLFDSGNTAEDRRLKRTARRRYTRRRNRILYLQEIFSEEMGKVDDSFFHRLDESFLTDDDKNFDSHPIFGNKAEEDAYHQKFPTIYHLRKHLADSTEKADLRLVYLALAHMIKFRGHFLIEGELNAENTDVQKLFADFVGVYDRTFDDSHLSEITVDASSILTEKISKSRRLEKLINNYPKEKKNTLFGNLIALSLGLQPNFKTNFKLSEDAKLQFSKDTYEEELEVLLAQIGDNYAELFLSAKKLYDSILLSGILTVTDVSTKAPLSASMIQRYNEHQMDLAQLKQFIRQKLSDKYNEVFSDVSKDGYAGYIDGKTNQEAFYKYLKGLLNKIEGSGYFLDKIEREDFLRKQRTFDNGSIPHQIHLQEMRAIIRRQAEFYPFLADNQDRIEKILTFRIPYYVGPLARGKSDFAWLSRKSADKITPWNFDEIVDKESSVEAFINRMTNYDLYLPNQKVLPKHSLLYEKFTVYNELTKVKYKTEQGKTAFFDANMKQEIFDGVFKVYRKVTKDKLMDFLEKEFDEFRIVDLTGLDKENKAFNASYGTYHDLRKILDKDFLDNSKNEKILEDIVLTLTLFEDREMIRKRLKNYSDLLTKEQLKKLERRHYTGWGRLSAELIHGIRNKESRKTILDYLIDDGNSNRNFMQLINDDALSFKEEIAKAQVIGETDNLNQVVSDIAGSPAIKKGILQSLKIVDELVKIMGHQPENIVVEMARENQFTNQGRRNSQQRLKGLTDSIKEFGSQILKEHPVENSQLQNDRLFLYYLQNGRDMYTGEELDIDYLSQYDIDHIIPQAFIKDNSIDNRVLTSSKENRGKSDDVPSKDVVRKMKSYWSKLLSAKLITQRKFDNLTKGERGGLTDDDKAGFIKRQLVETRQITKHVARILDERFNTETDENNKKIRQVKIVTLKSNLVSNFRKEFELYKVREINDYHHAHDAYLNAVIGKALLGVYPQLEPEFVYGDYPHFHGHKENKATAKKFFYSNIMNFFKKDDVRTDKNGEIIWKKDEYISNIKKVLSYPQVNIVKKVEEQTGGFSKESILPKGDSDKLIPRKTKKFYWDTKKYGGFDSPIVAYSILVIADIEKGKSKKLKTVKALVGVTIMEKMTFERDPVAFLERKGYRNVQEENIIKLPKYSLFKLENGRKRLLASARELQKGNEIVLPNHLGTLLYHAKNIHKVDEPKHLDYVDKHKDEFKELLDVVSNFSKKYTLAEGNLEKIKELYAQNNGEDLKELASSFINLLTFTAIGAPATFKFFDKNIDRKRYTSTTEILNATLIHQSITGLYETRIDLSKLGGD

SEQ ID NO: 498 - protein, 1345 aa, Streptococcus mutans
MKKPYSIGLDIGTNSVGWAVVTDDYKVPDKKMKVLGNTDKSHIKKNLLGALLFDSGNTAEDRRLKRTARRRYTRRRNRILYLQEIFSEEMGKVDDSFFHRLEDSFLVTEDKRGERHPIFGNLEEEVKYHENFPTIYHLRQYLADNPEKTDLRLVYLALAHIIKFRGHFLIEGKFDTRNNDVQRLFQEFLAVYDNTFENSSLQEQNVQVEEILTDKISKSAKKDRVLKLFPNEKSNGRFAEFLKLIVGNQADFKKHFELEEKAPLQFSKDIYEEELEVLLAQIGDNYAELFLSAKKLYDSILLSGILTVTDVSTKAPLSASMIQRYNEHQMDLAQLKQFIRQKLSDKYNEVFSDVSKDGYAGYIDGKTNQEAFYKYLKGLLNKIEGSGYFLDKIEREDFLRKQRTFDNGSIPHQIHLQEMRAIIRRQAEFYPFLADNQDRIEKILTFRIPYYVGPLARGKSDFAWLSRKSADKITPWNFDEIVDKESSVEAFINRMTNYDLYLPNQKVLPKHSLLYEKFTVYNELTKVKYKTEQGKTAFFDANMKQEIFDGVFKVYRKVTKDKLMDFLEKEFDEFRIVDLTGLDKENKAFNASYGTYHDLRKILDKDFLDNSKNEKILEDIVLTLTLFEDREMIRKRLKNYSDLLTKEQLKKLERRHYTGWGRLSAELIHGIRNKESRKTILDYLIDDGNSNRNFMQLINDDALSFKEEIAKAQVIGETDNLNQVVSDIAGSPAIKKGILQSLKIVDELVKIMGHQPENIVVEMARENQFTNQGRRNSQQRLKGLTDSIKEFGSQILKEHPVENSQLQNDRLFLYYLQNGRDMYTGEELDIDYLSQYDIDHIIPQAFIKDNSIDNRVLTSSKENRGKSDDVPSKDVVRKMKSYWSKLLSAKLITQRKFDNLTKAERGGLTDDDKAGFIKRQLVETRQITKHVARILDERFYTETDENNKKIRQVKIVTLKSNLVSNFRKEFELYKVREINDYHHAHDAYLNAVIGKALLGVYPQLEPEFVYGDYPHFHGHKENKATAKKFFYSNIMNFFKKDDVRTDKNGEIIWKKDEHISNIKKVLSYPQVNIVKKVEEQTGGFSKESILPKGNSDKLIPRKTKKFYWDTKKYGGFDSPIVAYSILVIADIEKGKSKKLKTVKALVGVTIMEKMTFERDPVAFLERKGYRNVQEENIIKLPKYSLFKLENGRKRLLASARELQKGNEIVLPNHLGTLLYHAKNIHKVDEPKHLDYVDKHKDEFKELLDVVSNFSKKYTLAEGNLEKIKELYAQNNGEDLKELASSFINLLTFTAIGAPATFKFFDKNIDRKRYTSTTEILNATLIHQSITGLYETRIDLSKLGGD

SEQ ID NO: 499 - protein, 1345 aa, Streptococcus mutans
  Streptococcus mutans M21
MKKPYSIGLDIGTNSVGWAVVTDDYKVPAKKMKVLGNTDKSHIKKNLLGALLFDSGNTAEDRRLKRTARRRYTRRRNRILYLQEIFSEEMGKVDDSFFHRLEDSFLVTEDKRGERHPIFGNLEEEVKYHENFPTIYHLRQYLADNPEKTDLRLVYLALAHIIKFRGHFLIEGKFDTRNNDVQRLFQEFLAVYDNTFENSSLQEQNVQVEEILTDKISKSAKKDRVLKLFPNEKSNGRFAEFLKLIVGNQADFKKHFELEEKAPLQFSKDIYEEELEVLLAQIGDNYAELFLSAKKLYDSILLSGILTVTDVSTKAPLSASMIQRYNEHQMDLAQLKQFIRQKLSDKYNEVFSDVSKDGYAGYIDGKTNQEAFYKYLKGLLNKIEGSGYFLDKIEREDFLRKQRTFDNGSIPHQIHLQEMRAIIRRQAEFYPFLADNQDRIEKILTFRIPYYVGPLARGKSDFAWLSRKSADKITPWNFDEIVDKESSVEAFINRMTNYDLYLPNQKVLPKHSLLYEKFTVYNELTKVKYKTEQGKTAFFDANMKQEIFDGVFKVYRKVTKDKLMDFLEKEFDEFRIVDLTGLDKENKAFNASYGTYHDLRKILDKDFLDNSKNEKILEDIVLTLTLFEDREMIRKRLKNYSDLLTKEQLKKLERRHYTGWGRLSAELIHGIRNKESRKTILDYLIDDGNSNRNFMQLINDDALSFKEEIAKAQVIGETDNLNQVVSDIAGSPAIKKGILQSLKIVDELVKIMGHQPENIVVEMARENQFTNQGRRNSQQRLKGLTDSIKEFGSQILKEHPVENSQLQNDRLFLYYLQNGRDMYTGEELDIDYLSQYDIDHIIPQAFIKDNSIDNRVLTSSKENRGKSDDVPSKNVVRKMKSYWSKLLSAKLITQRKFDNLTKAERGGLTDDDKAGFIKRQLVETRQITKHVARILDERFHTETDENNKKIRQVKIVTLKSNLVSNFRKEFELYKVREINDYHHAHDAYLNAVIGKALLGVYPQLEPEFVYGDYPHFHGHKENKATAKKFFYSNIMNFFKKDDVRTDKNGEIIWKKDEHISNIKKVLSYPQVNIVKKVEEQTGGFSKESILPKGNSDKLIPRKTKKFYWDTKKYGGFDSPIVAYSILVIADIEKGKSKKLKTVKALVGVTIMEKMTFERDPVAFLERKGYRNVQEENIIKLPKYSLFKLENGRKRLLASARELQKGNEIVLPNHLGTLLYHAKNIHKVDEPKHLDYVDKHKDEFKELLDVVSNFSKKYTLAEGNLEKIKELYAQNNGEDLKELASSFINLLTFTAIGAPATFKFFDKNIDRKRYTSTTEILNATLIHQSITGLYETRIDLSKLGGD

SEQ ID NO: 500 - protein, 1345 aa, Streptococcus mutans; identical to SEQ ID NO: 499
  Streptococcus mutans M21

SEQ ID NO: 501 - protein, 1345 aa, Streptococcus mutans
  Streptococcus mutans M230
MKKPYSIGLDIGTNSVGWAVVTDDYKVPAKKMKVLGNTDKSHIKKNLLGALLFDSGNTAEDRRLKRTARRRYTRRRNRILYLQEIFSEEMGKVDDSFFHRLEDSFLVTEDKRGERHPIFGNLEEEVKYHENFPTIYHLRQYLADNPEKVDLRLVYLALAHIIKFRGHFLIEGKFDTRNNDVQRLFQEFLAVYDNTFENSSLQEQNVQVEEILTDKISKSAKKDRVLKLFPNEKSNGRFAEFLKLIVGNQADFKKHFELEEKAPLQFSKDTYEEELEVLLAQIGDNYAELFLSAKKLYDSILLSGILTVTDVSTKAPLSASMIQRYNEHQMDLAQLKQFIRQKLSDKYNEVFSDVSKDGYAGYIDGKTNQEAFYKYLKGLLNKIEGSGYFLDKIEREDFLRKQRTFDNGSIPHQIHLQEMRAIIRRQAEFYPFLADNQDRIEKILTFRIPYYVGPLARGKSDFAWLSRKSADKITPWNFDEIVDKESSAEAFINRMTNYDLYLPNQKVLPKHSLLYEKFTVYNELTKVKYKTEQGKTAFFDANMKQEIFDGVFKVYRKVTKDKLMDFLEKEFDEFRIVDLTGLDKENKVFNASYGTYHDLCKILDKDFLDNSKNEKILEDIVLTLTLFEDREMIRKRLENYSDLLTKEQVKKLERRHYTGWGRLSAELIHGIRNKESRKTILDYLIDDGNSNRNFMQLINDDALSFKEEIAKAQVIGETDNLNQVVSDIAGSPAIKKGILQSLKIVDELVKIMGHQPENIVVEMARENQFTNQGRQNSQQRLKGLTDSIKEFGSQILKEHPVENSQLQNDRLFLYYLQNGRDMYTGEELDIDYLSQYDIDHIIPQAFIKDNSIDNRVLTSSKENRGKSDDVPSEDVVRKMKSYWSKLLSAKLITQRKFDNLTKAERGGLTDDDKAGFIKRQLVETRQITKHVARILDERFYTETDENNKKIRQVKIVTLKSNLVSNFRKEFELYKVREINDYHHAHDAYLNAVIGKALLGVYPQLEPEFVYGDYPHFHGHKENKATAKKFFYSNIMNFFKKDDVRTDKNGEIIWKKDEHISNIKKVLSYPQVNIVKKVEEQTGGFSKESILPKGNSDKLIPRKTKKFYWDTKKYGGFDSPIVAYSILVIADIEKGKSKKLKTVKALVGVTIMEKMTFERDPVAFLERKGYRNVQEENIIKLPKYSLFKLENGRKRLLASARELQKGNEIVLPNHLGTLLYHAKNIHKVDEPKHLDYVDKHKDEFKELLDVVSNFSKKYTLAEGNLEKIKELYAQNNGEDLKELASSFINLLTFTAIGAPATFKFFDKNIDRKRYTSTTEILNATLIHQSITGLYETRIDLSKLGGD

SEQ ID NO: 502 - protein, 1345 aa, Streptococcus mutans; identical to SEQ ID NO: 501
  Streptococcus mutans M230

SEQ ID NO: 503 - protein, 1345 aa, Streptococcus mutans
  Streptococcus mutans M2A
MKKPYSIGLDIGTNSVGWAVVTDDYKVPAKKMKVLGNTDKSHIKKNLLGALLFDSGNTAEDRRLKRTARRRYTRRRNRILYLQEIFSEEMGKVDDSFFHRLEDSFLVTEDKRGERHPIFGNLEEEVKYHENFPTIYHLRQYLADNPEKTDLRLVYLALAHIIKFRGHFLIEGKFDTRNNDVQRLFQEFLAVYDNTFENSSLQEQNVQVEEILTDKISKSAKKDRVLKLFPNEKSNGRFAEFLKLIVGNQADFKKHFELEEKAPLQFSKDIYEEELEVLLAQIGDNYAELFLSAKKLYDSILLSGILTVTDVSTKAPLSASMIQRYNEHQMDLAQLKQFIRQKLSDKYNEVFSDVSKDGYAGYIDGKTNQEAFYKYLKGLLNKIEGSGYFLDKIEREDFLRKQRTFDNGSIPHQIHLQEMRAIIRRQAEFYPFLADNQDRIEKILTFRIPYYVGPLARGKSDFAWLSRKSADKITPWNFDEIVDKESSVEAFINRMTNYDLYLPNQKVLPKHSLLYEKFTVYNELTKVKYKTEQGKTAFFDANMKQEIFDGVFKVYRKVTKDKLMDFLEKEFDEFRIVDLTGLDKENKAFNASYGTYHDLRKILDKDFLDNSKNEKILEDIVLTLTLFEDREMIRKRLKNYSDLLTKEQLKKLERRHYTGWGRLSAELIHGIRNKESRKTILDYLIDDGNSNRNFMQLINDDALSFKEEIAKAQVIGETDNLNQVVSDIAGSPAIKKGILQSLKIVDELVKIMGHQPENIVVEMARENQFTNQGRRNSQQRLKGLTDSIKEFGSQILKEHPVENSQLQNDRLFLYYLQNGRDMYTGEELDIDYLSQYDIDHIIPQAFIKDNSIDNRVLTSSKENRGKSDDVPSKDVVRKMKSYWSKLLSAKLITQRKFDNLTKAERGGLTDDDKAGFIKRQLVETRQITKHVARILDERFNTETDENNKKIRQVKIVTLKSNLVSNFRKEFELYKVREINDYHHAHDAYLNAVIGKALLGVYPQLEPEFVYGDYPHFHGHKENKATAKKFFYSNIMNFFKKDDVRTDKNGEIIWKKDEHISNIKKVLSYPQVNIVKKVEEQTGGFSKESILPKGNSYKLIPRKTKKFYWDTKKYGGFDSPIVAYSILVIADIEKGKSKKLKTVKALVGVTIMEKMTFERDPVAFLERKGYRNVQEENIIKLPKYSLFKLENGRKRLLASARELQKGNEIVLPNHLGTLLYHAKNIHKVDEPKHLDYVDKHKDEFKELLDVVSNFSKKYTLAEGNLEKIKELYAQNNGEDLKELASSFINLLTFTAIGAPAAFKFFDKNIDRKRYTSTTEILNATLIHQSITGLYETRIDLSKLGGD

SEQ ID NO: 504 - protein, 1345 aa, Streptococcus mutans; identical to SEQ ID NO: 503
  Streptococcus mutans M2A

SEQ ID NO: 505 - protein, 1345 aa, Streptococcus mutans
  Streptococcus mutans N29
MKKPYSIGLDIGTNSVGWAVVTDDYKVPAKKMKVLGNTDKSHIKKNLLGALLFDSGNTAADRRLKRTARRRYTRRRNRILYLQEIFAEEMSKVDDSFFHRLEDSFLVTEDKRGERHPIFGNLEEEVKYHENFPTIYHLRQYLADNPEKVDLRLVYLALAHIIKFRGHFLIEGKFDTRNNDVQRLFQEFLAVYDNTFENSSLQEQNVQVEEILTDKISKSAKKDRVLKLFPNEKSNGRFAEFLKLIVGNQADFKKHFELEEKAPLQFSKDTYEEELEVLLAQIGDNYAELFLSAKKLYDSILLSGILTVTDVSTKAPLSASMIQRYNEHQMDLAQLKQFIRQKLSDKYNEVFSDVSKDGYAGYIDGKTNQEAFYKYLKGLLNKIEGSGYFLDKIEREDFLRKQRTFDNGSIPHQIHLQEMRAIIRRQAEFYPFLADNQDRIEKILTFRIPYYVGPLARGKSDFAWLSRKSADKITPWNFDEIVDKESSAEAFINRMTNYDLYLPNQKVLPKHSLLYEKFTVYNELTKVKYKTEQGKTAFFDANMKQEIFDGVFKVYRKVTKDKLMDFLEKEFDEFRIVDLTGLDKENKAFNASYGTYHDLRKILDKDFLDNSKNEKILEDIVLTLTLFEDREMIRKRLENYSDLLTKEQVKKLERRHYTGWGRLSAELIHGIRNKESRKTILDYLIDDGNSNRNFMQLINDDALSFKEEIAKAQVIGETDNLNQVVSDIAGSPAIKKGILQSLKIVDELVKIMGHQPENIVVEMARENQFTNQGRRNSQQRLKGLTDSIKEFGSQILKEHPVENSQLQNDRLFLYYLQNGRDMYTGEELDIDYLSQYDIDHIIPQAFIKDNSIDNRVLTSSKENRGKSDDVPSKNVVRKMKSYWSKLLSAKLITQRKFDNLTKAERGGLTDDDKAGFIKRQLVETRQITKHVARILDERFHTETDENNKKIRQVKIVTLKSNLVSNFRKEFELYKVREINDYHHAHDAYLNAVIGKALLGVYPQLEPEFVYGDYPHFHGHKENKATAKKFFYSNIMNFFKKDDVRTDKNGEIIWKKDEHISNIKKVLSYPQVNIVKKVEEQTGGFSKESILPKGNSDKLIPRKTKKFYWDTKKYGGFDSPIVAYSILVIADIEKGKSKKLKTVKALVGVTIMEKMTFERDPVAFLERKGYRNVQEENIIKLPKYSLFKLENGRKRLLASARELQKGNEIVLPNHLGTLLYHAKNIHKVDEPKHLDYVDKHKDEFKELLDVVSNFSKKYTLAEGNLEKIKELYAQNNGEDLKELSSSFINLLTFTAIGAPAAFKFFDKNIDRKRYTSTTEILNATLIHQSITGLYETRIDLSKLGGD

SEQ ID NO: 506 - protein, 1345 aa, Streptococcus mutans; identical to SEQ ID NO: 505
  Streptococcus mutans N29

SEQ ID NO: 507 - protein, 1345 aa, Streptococcus mutans
  Streptococcus mutans N3209
MKKPYSIGLDIGTNSVGWAVVTDDYKVPAKKMKVLGNTDKSHIKKNLLGALLFDSGNTAEDRRLKRTTRRRYTRRRNRILYLQEIFSEEMGKVDDSFFHRLEDSFLVTEDKRGERHPIFGNLEEEVKYHENFPTIYHLRQYLADNPEKTDLRLVYLALAHIIKFRGHFLIEGKFDTRNNDVQRLFQEFLAVYDNTFENSSLQEQNVQVEEILTDKISKSAKKDRVLKLFPNEKSNGCFAEFLKLIVGNQADFKKHFELEEKAPLQFSKDTYEEELEVLLAQIGDNYAELFLSAKKLYDSILLSGILTVTDVSTKAPLSASMIQRYNEHQMDLTQLKQFIRQKLSDKYNEVFSDVSKDGYAGYIDGKTNQEAFYKYLKGLLNKIEGSGYFLDKIEREDFLRKQRTFDNGSIPHQIHLQEMRAIIRRQAEFYPFLADNQDRIEKLLTFRIPYYVGPLASGKSDFAWLSRKSADKITPWNFDEIVDKESSAEAFINRMTNYDLYLPNQKVLPKHSLLYEKFTVYNELTKVKYKTEQGKTAFFDANMKQEIFDGVFKVYRKVTKDKLMDFLEKEFDEFRIVDLTGLDKENKVFNASYGTYHDLCKILDKDFLDNSKNEKILEDIVLTLTLFEDREMIRKRLENYSDLLTKEQVKKLERRHYTGWGRLSAELIHGIRNKESRKTILDYLIDDGNSNRNFMQLINDDALSFKEEIAKAQVIGETDNLNQVVSDIAGSPAIKKGILQSLKIVDELVKIMGHQPENIVVEMARENQFTNQGRRNSQQRLKGLTDSIKEFGSQILKEHPVENSQLQNDRLFLYYLQNGRDMYTGEELDIDYLSQYDIDHIIPQAFIKDNSIDNRVLTSSKENRGKSDDVPSKDVVRKMKSYWSKLLSAKLITQRKFDNLTKAERGGLTDDDKAGFIKRQLVETRQITKHVARILDERFNTETDENNKKIRQVKIVTLKSNLVSNFRKEFELYKVREINDYHHAHDAYLNAVIGKALLGVYPQLEPEFVYGDYPHFHGHKENKATAKKFFYSNIMNFFKKDDVRTDKNGEIIWKKDEHISNIKKVLSYPQVNIVKKVEEQTGGFSKESILPKGNSDKLIPRKTKKFYWDTKKYGGFDSPIVAYSILVIADIEKGKSKKLKTVKALVGVTIMEKMTFERDPVAFLERKGYRNVQEENIIKLPKYSLFKLENGRKRLLASARELQKGNEIVLPNHLGTLLYHAKNIHKVDEPKHLDYVDKHKDEFKELLDVVSNFSKKYTLAEGNLEKIKELYAQNNGEDLKELASSFINLLTFTAIGAPATFKFFDKNIDRKRYTSTTEILNATLIHQSITGLYETRIDLSKLGGD

SEQ ID NO: 508 - protein, 1345 aa, Streptococcus mutans; identical to SEQ ID NO: 507
  Streptococcus mutans N3209

SEQ ID NO: 509 - protein, 1345 aa, Streptococcus mutans
  Streptococcus mutans N66
MKKPYSIGLDIGTNSVGWAVVTDDYKVPAKKMKVLGNTDKSHIKKNLLGALLFDSGNTAEDRRLKRTARRRYTRRRNRILYLQEIFSEEMGKVDDSFFHRLEDSFLVTEDKRGERHPIFGNLEEEVKYHENFPTIYHLRQYLADNPEKTDLRLVYLALAHIIKFRGHFLIEGKFDTRNNDVQRLFQEFLAVYDNTFENSSLQEQNVQVEEILTDKISKSAKKDRVLKLFPNEKSNGRFAEFLKLIVGNQADFKKHFELEEKAPLQFSKDIYEEELEVLLAQIGDNYAELFLSAKKLYDSILLSGILTVTDVSTKAPLSASMIQRYNEHQMDLAQLKQFIRQKLSDKYNEVFSDVSKDGYAGYIDGKTNQEAFYKYLKGLLNKIEGSGYFLDKIEREDFLRKQRTFDNGSIPHQIHLQEMRAIIRRQAEFYPFLADNQDRIEKILTFRIPYYVGPLARGKSDFAWLSRKSADKITPWNFDEIVDKESSAEAFINRMTNYDLYLPNQKVLPKHSLLYEKFTVYNELTKVKYKTEQGKTAFFDANMKQEIFDGVFKVYRKVTKDKLMDFLEKEFDEFRIVDLTGLDKENKAFNASYGTYHDLRKILDKDFLDNSKNEKILEDIVLTLTLFEDREMIRKRLKNYSDLLTKEQLKKLERRHYTGWGRLSAELIHGIRNKESRKTILDYLIDDGNSNRNFMQLINDDALSFKEEIAKAQVIGETDNLNQVVSDIAGSLAIKKGILQSLKIVDELVKIMGHQPENIVVEMARENQFTNQGRRNSQQRLKGLTDSIKEFGSQILKEHPVENSQLQNDRLFLYYLQNGRDMYTGEELDIDYLSQYDIDHIIPQAFIKDNSIDNRVLTSSKENRGKSDDVPSKDVVRKMKSYWSKLLSAKLITQRKFDNLTKGERGGLTDDDKAGFIKRQLVETRQITKHVARILDERFNTETDENNKKIRQVKIVTLKSNLVSNFRKEFELYKVREINDYHHAHDAYLNAVIGKALLGVYPQLEPEFVYGDYPHFHGHKENKATAKKFFYSNIMNFFKKDDVRTDKNGEIIWKKDEYISNIKKVLSYPQVNIVKKVEEQTGGFFKESILPKGDSDKLIPRKTKKFYWDTKKYGGFDSPIVAYSILVIADIEKGKSKKLKTVKALVGVTIMEKMTFERDPVAFLERKGYRNVQEENIIKLPKYSLFKLENGRKRLLASARELQKGNEIVLPNHLGTLLYHAKNIHKVDEPKHLDYVDKHKDEFKELLDVVSNFSKKYTLAEGNLEKIKELYAQNNGEDLKELASSFINLLTFTAIGAPATFKFFDKNIDRKRYTSTTEILNATLIHQSITGLYETRIDLSKLGGD

SEQ ID NO: 510 - protein, 1345 aa, Streptococcus mutans; identical to SEQ ID NO: 509
  Streptococcus mutans N66

SEQ ID NO: 511 - protein, 1350 aa, Streptococcus mutans
  Streptococcus mutans NFSM1
MKKPYSIGLDIGTNSVGWAVVTDDYKVPAKKMTVLGNTDKSHIKKNLLGALLFDSGNTAADRRLKRTARRRYTRRRNRILYLQEIFAEEMSKVDDSFFHRLEDSFLVTEDKRGERHPIFGNLEEEVKYHENFPTIYHLRQYLADNPEKVDLRLVYLALAHIIKFRGHFLIEGKFDTRNNDVQRLFQEFLAVYDNTFENSSLQEQNVQVEEILTDKISKSAKKDRVLKLFPNEKSNGRFAEFLKLIVGNQADFKKHFELEEKTPLQFSKDTYEEELEVLLAQIGDNYAELFLSAKKLYDSILLSGILTVTDVSTKAPLSASMIQRYNEHQMDLAQLKQFIRQKLSDKYNEVFSDVSKDGYAGYIDGKTNQEAFYKYLKGLLNKIEGSGYFLDKIEREDFLRKQRTFDNGSIPHQIHLQEMRAIIRRQAEFYPFLADNQDRIEKILTFRIPYYVGPLARGKSDFAWLSRKSADKITPWNFDEIVDKESSAEAFINRMTNYDLYLPNQKVLPKHSLLYEKFTVYNELTKVKYKTEQGKTAFFDANMKQEIFDGVFKVYRKVTKDKLMDFLEKEFDEFRIVDLTGLDKENKAFNASYGTYHDLRKILDKDFLDNSKNEKILEDIVLTLTLFEDREMIRKRLENYSDLLTKEQVKKLERRHYTGWGRLSAELIHGIRNKESRKTILDYLIDDGNSNRNFMQLINDDALSFKEEIAKAQVIGETDNLNQVVSDIAGSPAIKKGILQSLKIVDELVKIMGHQPENIVVEMARENQFTNQGRRNSQQRLKGLTDSIKEFGSQILKEHPVENSQLQNDRLFLYYLQNGRDMYTGEELDIDYLSQYDIDHIIPQAFIKDNSIDNRVLTSSKENRGKSDDVPSEDVVNRMRPFWNKLLSSGLISQRKYNNLTKKELTPDDKAGFIKRQLVETRQITKHVARMLDERFNKEFDDNNKRIRRVKIVTLKSNLVSSFRKEFELYKVREINDYHHAHDAYLNAVVVKALLVKYPKLEPEFVYGEYPKYNSYRERKTATQKMFFYSNIMNMFKSKVKLADDQIVERPMIEVNDETGEIAWDKTKHITTVKKVLSYPQVNIVKKVEEQTIGQNGGLFDDNPKSPLEVIPSKLVPLKKALNPEKYGGYQKPTTAYPILLIVDTKQLIPISVMDKKRFEQNPVKFLKDKGYQQIEKNNFVKLPKYTLVDIGNGIKRLWASSKEVHKGNQLVVSKKSQDLLYHAHHLDNDYSNEYVKNHYQQFDILFNEITSFSKKCKLGKEHIQKIEEAYSKERDSASIEELADGFIKLLGFTQLGATSPFSFLGIKLNQKQYTGKKDYLLPCMEATLIHQSITGLYETRIDLSKLGGD

SEQ ID NO: 512 - protein, 1350 aa, Streptococcus mutans; identical to SEQ ID NO: 511
  Streptococcus mutans NFSM1

SEQ ID NO: 513 - protein, 1345 aa, Streptococcus mutans; identical to SEQ ID NO: 485
  Streptococcus mutans NLML1

SEQ ID NO: 514 - protein, 1338 aa, Streptococcus mutans
  Streptococcus mutans NLML4
MDLIGTNSVGWAVVTDDYKVPAKKMKVLGNTDKSHIKKNLLGALLFDSGNTAADRRLKRTARRRYTRRRNRILYLQEIFAEEMSKVDDSFFHRLEDSFLVTEDKRGERHPIFGNLEEEVKYHENFPTIYHLRQYLADNPEKVDLRLVYLALAHIIKFRGHFLIEGKFDTRNNDVQRLFQEFLAVYDNTFENSSLQEQNVQVEEILTDKISKSAKKDRVLKLFPNEKSNGRFAEFLKLIVGNQADFKKHFELEEKAPLQFSKDTYEEELEVLLAQIGDNYAELFLSAKKLYDSILLSGILTVTDVSTKAPLSASMIQRYNEHQMDLAQLKQFIRQKLSDKYNEVFSDVSKDGYAGYIDGKTNQEAFYKYLKGLLNKIEGSGYFLDKIEREDFLRKQRTFDNGSIPHQIHLQEMRAIIRRQAEFYPFLADNQDRIEKILTFRIPYYVGPLARGKSDFAWLSRKSADKITPWNFDEIVDKESSAEAFINRMTNYDLYLPNQKVLPKHSLLYEKFTVYNELTKVKYKTEQGKTAFFDANMKQEIFDGVFKVYRKVTKDKLMDFLEKEFDEFRIVDLTGLDKENKAFNASYGTYHDLRKILDKDFLDNSKNEKILEDIVLTLTLFEDREMIRKRLENYSDLLTKEQVKKLERRHYTGWGRLSAELIHGIRNKESRKTILDYLIDDGNSNRNFMQLINDDALSFKEEIAKAQVIGETDNLNQVVSDIAGSPAIKKGILQSLKIVDELVKIMGHQPENIVVEMARENQFTNQGRRNSQQRLKGLTDSIKEFGSQILKEHPVEHSQLQNDRLFLYYLQNGRDMYTGEELDIDYLSQYDIDHIIPQAFIKDNSIDNRVLTSSKENRGKSDDVPSKNVVRKMKSYWSKLLSAKLITQRKFDNLTKAERGGLTDDDKAGFIKRQLVETRQITKHVARILDERFHTETDENNKKIRQVKIVTLKSNLVSNFRKEFELYKVREINDYHHAHDAYLNAVIGKALLGVYPQLEPEFVYGDYPHFHGHKENKATAKKFFYSNIMNFFKKDDVRTDKNGEIIWKKDEHISNIKKVLSYPQVNIVKKVEEQTGGFSKESILPKGNSDKLIPRKTKKFYWDTKKYGGFDSPIVAYSILVIADIEKGKSKKLKTVKALVGVTIMEKMTFERDPVAFLERKGYRNVQEENIIKLPKYSLFKLENGRKRLLASARELQKGNEIVLPNHLGTLLYHAKNIHKVDEPKHLDYVDKHKDEFKELLDVVSNFSKKYTLAEGNLEKIKELYAQNNGEDLKELASSFINLLTFTAIGAPATFKFFDKNIDRKRYTSTTEILNATLIHQSITGLYETRIDLSKLGGD

SEQ ID NO: 515 - protein, 1338 aa, Streptococcus mutans; identical to SEQ ID NO: 514
  Streptococcus mutans NLML4

SEQ ID NO: 516 - protein, 1128 aa, Streptococcus mutans
  Streptococcus mutans NLML5
MANSKILGLDIGIASVGVGIIDKETGKIIHVNSRIFPAATADSNVERRGFRQGRRLVRRKKHRKVRLADLFLDSNLLTDFSKVSLNLNPYQLRVKGLNEELSNEELFIALKSIVSRRGISYLDDASEDSGANSSEYGKAVEENRKLLEDRTPGQIQLERFEKYGKVRGDFTVVENGENHRLINVFSTSAYKKEAERILRRQQEFNIRIADEFIEAYLTILTGKRKYYHGPGNEKSRTDYGRFRTDGTTLDNIFGILIGKCTFYPDEYRAAKASYTAQEFNLLNDLNNLTVPTETKKLSEEQKRQIIEHAKTVKTLGAPTLLKYIAKLVGCSADDIKGYRIDKSDKPEIHTFEAYRKMRTMELIKVADLSRESLDALAHILTLNTEREGIEEAIRDRFTNKEFNQEQINELVLFRKNNSSLFGKGWHNFSLKLMKELIPELYETSEEQMTILTRLGKQRVKKSSNRTNYIDEKELTEEIYNPVVAKSVRQAIKIINLATKKYGVFDNIVIEMARESNEDDEKKAIQNAQKANEDEKEAALLKAAHQFNGKEELPDSIFHGHKELLTKIRLWHQQGEKCLYTGKTIFINDLIHNPYKYEIDHILPLSLSFDDSLANKVLVLSTANQEKGQRTPFQSLDSMDGAWTYREFKAYVKGLKTLSNKKKDYLLNEEDINKNEVKQKFIERNLVDTRYSSRVVLNTLQDFYKKREFDTKISVVRGQFTSQIRRKWRIEKTRETYHHHAVDALIIAASSQLNLWKKQNNPLISYKEDQFVDPETGEILSLSDDEYKELVFKAPYDHFVDTLKSKKFEDSILFSYQVDSKYNRKISDATIYGTRKARLGKDSQEETYVLGKIKDIYSQKGYEDFIKKYKKDKTQFLMYHKDPQTFEKVIEEILKTYSDKELNEKGKEVPCNPFEKYRQENGPVRKYSKKGNGPEIKSIKYYDNKLGNHIDITPNNSHHQVVLQSLKPWRTDVYFNPKSGKYELMGLKYSDLRFEKVSGDYGISVKKYNEIKSKEGVDENSEFKFTLYKNDLILIKDTESGEQELFRFLSRTMPNQKHYVELKPYDKSKFEGHQKLMDIFGEVAKGGQCLKGLNKSNISIYKVKTDVLGNKYFIKKEGDQPQLNFKKKI

SEQ ID NO: 517 - protein, 1128 aa, Streptococcus mutans; identical to SEQ ID NO: 516
  Streptococcus mutans NLML5

SEQ ID NO: 518 - protein, 1125 aa, Streptococcus mutans
  Streptococcus mutans NLML8
MTNGKILGLDIGIASVGVGIINAKTGNVEHASSRIFPAANADNNVERRSARGGRRLIRRKKHRLKRVEDLFEKYNIDTDFSNLNLNPYQLRVKGLNEQLSNEELFAILKNIAKRRGISYLDDAEDDSVGSSDYAKAIDENRKLLKKQTPGEIQLKRLEKYGQLRGNFTIQDENGEYHRLINVFSTSDYVKEARRILETQSYYNKFITESFVEDYIKILQGKRKYYVGPGNEKSRTDYGIYRTDGETLDNLFGILIGKCGFYPEEYRAAKASYTAQEYNFLNDLNNLTVPTETKKLSTEQKYQLVDFAKTASTLEAAKLLKEIAKLVGCQVEEIKGYRLDNKDKPDLHTFEPFRKLKSNLTTIAVENLSITTLDTLAHILTLNTEREGIEEAIQKELPNIFSDEQITGIIAVRKKNSQIFGKGWHSFSIKLMKELIPELYETSEEQMTILIRLKKVKTNSKITNRTKYINEQEVTDEIYNPVVSKSIRQTVKIINAAIKKYGAFDQIVIEMPRESNEEDERKFIADLQKSNAKEKDDAMKQAALLYNGKAELPHGVFHGHKELATKIRLWYQQGERCLYSGKHIDIHDLIHNQHMFEIDHVLPLSLSFDDSLANKVLVYSWANQEKGQRTPFQALPQMASAWSFRELRDYISKQKGISKKKRDYLLTEQDINKVEVKQKFIERNLVDTRYVSRVVLNTLQDALKVMNKETKISVIRGQFTSQLRRQWRIDKSRETYHHHAVDALIIAASSQLRLWKKQNNPMFAEDKHGQKINLDTGEVLSDDAYKELVYQAPYQGFVNTISSKSFEDEILFSYQVDSKVNRKISDATIYATRQAQLGKDKKEETYVLGKIKDIYSQAGYDAFRKKYDKDKAVFLMYQKDPETWEKVIEVILRDYKELDDKGKEIGNPFERYKVKHGFVRKYSRKNKGTEIKSLKYYDNKLGNHIDITPNNSKHSVVLQSINPWRADLYFNPETTKYELMGLKYADLSFEKGTGKYSISREKYDEIKEREGISSKSEFKFTLYKNDLILVKDIGNHKELIARFNSKNDTSKHYVELKPWNKAKFDSEEELIPAFGKVAKSGQFIKGLNKPDLSIYKVKTDILGHKYYIKKEGDKPKLNFENKIKNK

SEQ ID NO: 519 - protein, 1125 aa, Streptococcus mutans; identical to SEQ ID NO: 518
  Streptococcus mutans NLML8

SEQ ID NO: 520 - protein, 1345 aa, Streptococcus mutans
  Streptococcus mutans NLML9
MKKPYSIGLDIGTNSVGWAVVTDDYKVSAKKMKVLGNTDKSHIKKNLLGALLFDSGNTAEDRRLKRTARRRYTRRRNRILYLQEIFAEEMSKVDDSFFHRLEDSFLVTEDKRGERHPIFGNLEEEVKYHENFPTIYHLRQYLADNPEKVDLRLVYLALAHIIKFRGHFLIEGKFDTRNNDVQRLFQEFLAVYDNTFENSSLQEQNVQVEEILTDKISKSAKKDRVLKLFPNEKSNGRFAEFLKLIVGNQADFKKHFELEEKAPLQFSKDTYEEELEVLLAQIGDNYAELFLSAKKLYDSILLSGILTVTDVSTKAPLSASMIQRYNEHQMDLAQLKQFIRQKLSDKYNEVFSDVSKDGYAGYIDGKTNQEAFYKYLKGLLNKIEGSGYFLDKIEREDFLRKQRTFDNGSIPHQIHLQEMRAIIRRQAEFYPFLADNQDRIEKILTFRIPYYVGPLARGKSDFAWLSRKSADKITPWNFDEIVDKESSAEAFINRMTNYDLYLPNQKVLPKHSLLYEKFTVYNELTKVKYKTEQGKTAFFDANMKQEIFDGVFKVYRKVTKDKLMDFLEKEFDEFRIVDLTGLDKENKAFNASYGTYHDLRKILDKDFLDNSKNEKILEDIVLTLTLFEDREMIRKRLENYSDLLTKEQVKKLERRHYTGWGRLSAELIHGIRNKESRKTILDYLIDDGNSNRNFMQLINDDALSFKEEIAKAQVIGETDNLNQVVSDIAGSPAIKKGILQSLKIVDELVKIMGHQPENIVVEMARENQFTNQGRRNSQQRLKGLTDSIKEFGSQILKEHPVEHSQLQNDRLFLYYLQNGRDMYTGEELDIDYLSQYDIDHIIPQAFIKDNSIDNRVLTSSKENRGKSDDVPSKNVVRKMKSYWSKLLSAKLITQRKFDNLTKAERGGLTDDDKAGFIKRQLVETRQITKHVARILDERFHTETDENNKKIRQVKIVTLKSNLVSNFRKEFELYKVREINDYHHTHDAYLNAVIGKALLGVYPQLEPEFVYGDYPHFHGHKENKATAKKFFYSNIMNFFKKDDVRTDKNGEIIWKKDEHISNIKKVLSYPQVNIVKKVEEQTGGFSKESILPKGNSDKLIPRKTKKFYWDTKKYGGFDSPIVAYSILVIADIEKGKSKKLKTVKALVGVTIMEKMTFERDPVAFLERKGYRNVQEENIIKLPKYSLFKLENGRKRLLASARELQKGNEIVLPNHLGTLLYHAKNIHKVDEPKHLDYVDKHKDEFKELLDVVSNFSKKYTLAEGNLEKIKELYAQNNGEDLKELASSFINLLTFTAIGAPATFKFFDKNIDRKRYTSTTEILNATLIHQSITGLYETRIDLSKLGGD

SEQ ID NO: 521 - protein, 1345 aa, Streptococcus mutans; identical to SEQ ID NO: 520
  Streptococcus mutans NLML9

SEQ ID NO: 522 - protein, 1355 aa, Streptococcus mutans
  Streptococcus mutans NMT4863
MKKPYSIGLDIGTNSVGWAVVTDDYKVPAKKMKVLGNTDKSHIKKNLLGALLFDSGNTAEDRRLKRTARRRYTRRRNRILYLQEIFAEEMSKVDDSFFHRLDESFLTDDDKNFDSHPIFGNKAEEDAYHQKFPTIYHLRKHLADSTEKADLRLVYLALAHMIKFRGHFLIEGELNAENTDVQKLFADFVGVYDRTFDDSHLSEITVDASSILTEKISKSRRLEKLINNYPKEKKNTLFGNLIALSLGLQPNFKTNFKLSEDAKLQFSKDTYEEDLEELLGKIGDDYADLFTLAKNLYDAILLSGILTADDSSTKAPLSASMIKRYAEHHEDLEKLKEFIKANKPELYHDIFKDETKNGYAGYIENGVKQDEFYKYLKNTLSKITGSDYFLDQIEREDFLRKQRTFDNGSIPHQIHLQEMHAILRRQGDYYPFLKENQDRIEKILTFRIPYYVGPLARKNSRFAWAEYHSDEAVTPWNFDQVIDKESSAQAFIEHMTNNDLYLPNEKVLPKHSPLYEKYTVYNELTKIKYVTEIGEAKFFDANLKQEIFDGLFKHERKVTKKKLRTFLDKNFDEFRIVDIQGLDKETETFNASYATYQDLLKVIKDKVFMDNPENAEILENIVLTLTLFEDREMIKQRLAKYADVFDKKVIDQLARRHYTGWGRLSAKLLNGIRDKQSCKTIMDYLIDDAQSNRNLMQLITDDNLTFKDDIVKAQYVDNSDDLHQVVQSLAGSPAIKKGILQSLKIVDELVKVMGKEPEQIVVEMARENQTTAKGRRNSQQRYKRLKEAIKSLDRDLNHKILKEHPTDNQALQNNRLFLYYLQNGRDMYTGESLDINRLSDYDIDHVIPQAFIKDNSIDNRVLTSSKANRGKSDDVPSEDVVNRMRPFWNKLLSSGLISQRKYNNLTKKELTLDDKAGFIKRQLVETRQITKHVARMLDERFNKEFDDNNKRIRRVKIVTLKSNLVSSFRKEFELYKVREINDYHHAHDAYLNAVVVKALLVKYPKLEPEFVYGEYPKYNSYRERKTATQKMFFYSNIMNMFKSKVKLADDQIVERPMIEVNDETGEIAWDKTKHITTVKKVLSYPQVNIVKKVEEQTIGQNGGLFDDNPKSPLEVIPSKLVPLKKALNPEKYGGYQKPTTAYPILLIVDTKQLIPISVMDKKRFEQNPVKFLKDKGYQQIEKNNFVKLPKYTLVDIGNGIKRLWASSKEVHKGNQLVVSKKSQDLLYHAHHLDNDYSNEYVKNHYQQFDILFNEITSFSKKCKLGKEHIQKIEEAYSKERDFASIEELADGFIKLLGFTQLGATSPFSFLGIKLNQKQYTGKKDYLLPCMEATLIHQSITGLYETRIDLSKLGGD

SEQ ID NO: 523 - protein, 1355 aa, Streptococcus mutans; identical to SEQ ID NO: 522
  Streptococcus mutans NMT4863

SEQ ID NO: 524 - protein, 1345 aa, Streptococcus mutans
MKKPYSIGLDIGTNSVGWAVVTDDYKVPAKKMKVLGNTDKSHIKKNLLGALLFDSGNTAADRRLKRTARRRYTRRRNRILYLQEIFAEEMSKVDDSFFHRLEDSFLVTEDKRGERHPIFGNLEEEVKYHENFPTIYHLRQYLADNPEKVDLRLVYLALAHIIKFRGHFLIEGKFDTRNNDVQRLFQEFLAVYDNTFENSSLQEQNVQVEEILTDKISKSAKKDRVLKLFPNEKSNGRFAEFLKLIVGNQADFKKHFELEEKAPLQFSKDTYEEELEVLLAQIGDNYAELFLSAKKLYDSILLSGILTVTDVSTKAPLSASMIQRYNEHQMDLAQLKQFIRQKLSDKYNEVFSDVSKDGYAGYIDGKTNQEAFYKYLKGLLNKIEGSGYFLDKIEREDFLRKQRTFDNGSIPHQIHLQEMRAIIRRQAEFYPFLADNQDRIEKILTFRIPYYVGPLARGKSDFAWLSRKSADKITPWNFDEIVDKESSAEAFINRMTNYDLYLPNQKVLPKHSLLYEKFTVYNELTKVKYKTEQGKTAFFDANMKQEIFDGVFKVYRKVTKDKLMDFLEKEFDEFRIVDLTGLDKENKAFNASYGTYHDLRKILDKDFLDNSKNEKILEDIVLTLTLFEDREMIRKRLENYSDLLTKEQVKKLERRHYTGWGRLSAELIHGIRNKESRKTILDYLIDDGNSNRNFMQLINDDALSFKEEIAKAQVIGETDNLNQVVSDIAGSPAIKKGILQSLKIVDELVKIMGHQPENIVVEMARENQFTNQGRRNSQQRLKGLTDSIKEFGSQILKEHPVKHSQLQNDRLFLYYLQNGRDMYTGEELDIDYLSQYDIDHIIPQAFIKDNSIDNRVLTSSKENRGKSDDVPSKNVVRKMKSYWSKLLSAKLITQRKFDNLTKAERGGLTDDDKAGFIKRQLVETRQITKHVARILDERFHTETDENNKKIRQVKIVTLKSNLVSNFRKEFELYKVREINDYHHAHDAYLNAVIGKALLGVYPQLEPEFVYGDYPHFHGHKENKATAKKFFYSNIMNFFKKDDVRTDKNGEIIWKKDEHISNIKKVLSYPQVNIVKKVEEQTGGFSKESILPKGNSDKLIPRKTKKFYWDTKKYGGFDSPIVAYSILVIADIEKGKSKKLKTVKALVGVTIMEKMTFERDPVAFLERKGYRNVQEENIIKLPKYSLFKLENGRKRLLASARELQKGNEIVLPNHLGTLLYHAKNIHKVDEPKHLDYVDKHKDEFKELLDVVSNFSKKYTLAEGNLEKIKELYAQNNGEDLKELASSFINLLTFTAIGAPATFKFFDKNIDRKRYTSTTEILNATLIHQSITGLYETRIDLSKLGGD

SEQ ID NO: 525 - protein, 1345 aa, Streptococcus mutans; identical to SEQ ID NO: 471
  Streptococcus mutans NV1996

SEQ ID NO: 526 - protein, 1345 aa, Streptococcus mutans
  Streptococcus mutans NVAB
MKKPYSIGLDIGTNSVGWAVVTDDYKVPAKKMKVLGNTDKSHIKKNLLGALLFDSGNTAADRRLKRTARRRYTRRRNRILYLQEIFAEEMSKVDDSFFHRLEDSFLVTEDKRGERHPIFGNLEEEVKYHENFPTIYHLRQYLADNPEKVDLRLVYLALAHIIKFRGHFLIEGKFDTRNNDVQRLFQEFLAVYDNTFENSSLQEQNVQVEEILTDKISKSAKKDRVLKLFPNEKSNGRFAEFLKLIVGNQADFKKHFELEEKAPLQFSKDTYEEELEVLLAQIGDNYAELFLSAKKLYDSILLSGILTVTDVSTKAPLSASMIQRYNEHQMDLAQLKQFIRQKLSDKYNEVFSDVSKDGYAGYIDGKTNQEAFYKYLKGLLNKIEGSGYFLDKIEREDFLRKQRTFDNGSIPHQIHLQEMRAIIRRQAEFYPFLADNQDRIEKILTFRIPYYVGPLARGKSDFAWLSRKSADKITPWNFDEIVDKESSAEAFINRMTNYDLYLPNQKVLPKHSLLYEKFTVYNELTKVKYKTEQGKTAFFDANMKQEIFDGVFKVYRKVTKDKLMDFLEKEFDEFRIVDLTGLDKENKVFNASYGTYHDLCKILDKDFLDNSKNEKILEDIVLTLTLFEDREMIRKRLENYSDLLTKEQVKKLERRHYTGWGRLSAELIHGIRNKESRKTILDYLIDDGNSNRNFMQLINDDALSFKEEIAKAQVIGETDNLNQVVSDIAGSPAIKKGILQSLKIVDELVKIMGHQPENIVVEMARENQFTKQGRRNSQQRLKGLTDSIKEFGSQILKEHPVENSQLQNDRLFLYYLQNGRDMYTGEELDIDYLSQYDIDHIIPQAFIKDNSIDNRVLTSSKENRGKSDDVPSKDVVRKMKSYWSKLLSAKLITQRKFDNLTKAERGGLTDDDKAGFIKRQLVETRQITKHVARILDERFYTETDENNKKIRQVKIVTLKSNLVSNFRKEFELYKVREINDYHHAHDAYLNAVIGKALLGVYPQLEPEFVYGDYPHFHGHKENKATAKKFFYSNIMNFFKKDDVRTDKNGEIIWKKDEHISNIKKVLSYPQVNIVKKVEEQTGGFSKESILPKGNSDKLIPRKTKKFYWDTKKYGGFDSPIVAYSILVIADIEKGKSKKLKTVKALVGVTIMEKMTFERDPVAFLERKGYRNVQEENIIKLPKYSLFKLENGRKRLLASARELQKGNEIVLPNHLGTLLYHAKNIHKVDEPKHLDYVDKHKDEFKELLDVVSNFSKKYTLAEGNLEKIKELYAQNNGEDLKELASSFINLLTFTAIGAPATFKFFDKNIDRKRYTSTTEILNATLIHQSITGLYETRIDLSKLGGD

SEQ ID NO: 527 - protein, 1345 aa, Streptococcus mutans; identical to SEQ ID NO: 526
  Streptococcus mutans NVAB

SEQ ID NO: 528 - protein, 1345 aa, Streptococcus mutans
  Streptococcus mutans R221
MKKPYSIGLDIGTNSVGWAVVTDDYKVPAKKMKVLGNTDKSHIKKNLLGALLFDSGNTAEDRRLKRTARRRYTRRRNRILYLQEIFSEEMGKVDDSFFHRLEDSFLVTEDKRGERHPIFGNLEEEVKYHENFPTIYHLRQYLADNPEKTDLRLVYLALAHIIKFRGHFLIEGKFDTRNNDVQRLFQEFLAVYDNTFENSSLQEQNVQVEEILTDKISKSAKKDRVLKLFPNEKSNGRFAEFLKLIVGNQADFKKHFELEEKAPLQFSKDIYEEELEVLLAQIGDNYAELFLSAKKLYDSILLSGILTVTDVSTKAPLSASMIQRYNEHQMDLAQLKQFIRQKLSDKYNEVFSDVSKDGYAGYIDGKTNQEAFYKYLKGLLNKIEGSGYFLDKIEREDFLRKQRTFDNGSIPHQIHLQEMRAIIRRQAEFYPFLADNQDRIEKILTFRIPYYVGPLARGKSDFAWLSRKSADKITPWNFDEIVDKESSVEAFINRMTNYDLYLPNQKVLPKHSLLYEKFTVYNELTKVKYKTEQGKTAFFDANMKQEIFDGVFKVYRKVTKDKLMDFLEKEFDEFRIVDLTGLDKENKAFNASYGTYHDLRKILDKDFLDNSKNEKILEDIVLTLTLFEDREMIRKRLKNYSDLLTKEQLKKLERRHYTGWGRLSAELIHGIRNKESRKTILDYLIDDGNSNRNFMQLINDDALSFKEEIAKAQVIGETDNLNQVVSDIAGSPAIKKGILQSLKIVDELVKIMGHQPENIVVEMARENQFTNQGRRNSQQRLKGLTDSIKEFGSQILKEHPVENSQLQNDRLFLYYLQNGRDMYTGEELDIDYLSQYDIDHIIPQAFIKDNSIDNRVLTSSKENRGKSDDVPSKDVVRKMKSYWSKLLSAKLITQRKFDNLTKAERGGLTDDDKAGFIKRQLVETRQITKHVARILDERFNTETDENNKKIRQVKIVTLKSNLVSNFRKEFELYKVREINDYHHAHDAYLNAVIGKALLGVYPQLEPEFVYGDYPHFHGHKENKATAKKFFYSNIMNFFKKDDVRTDKNGEIIWKKDEHISNIKKVLSYPQVNIVKKVEEQTGGFSKESILPKGNSDKLIPRKTKKFYWDTKKYGGFDSPIVAYSILVIADIEKGKSKKLKTVKALVGVTIMEKMTFERDPVAFLERKGYRNVQEENIIKLPKYSLFKLENGRKRLLASARELQKGNEIVLPNHLGTLLYHAKNIHKVDEPKHLDYVDKHKDEFKELLDVVSNFSKKYTLAEGNLEKIKELYAQNNGEDLKELASSFINLLTFTAIGAPATFKFFDKNIDRKRYTSTTEILNATLIHQSITGLYETRIDLNKLGGD

SEQ ID NO: 529 - protein, 1345 aa, Streptococcus mutans; identical to SEQ ID NO: 528
  Streptococcus mutans R221

SEQ ID NO: 530 - protein, 1345 aa, Streptococcus mutans
  Streptococcus mutans S1B
MKKPYSIGLDIGTNSVGWAVVTDDYKVPAKKMKVLGNTDKSHIKKNLLGALLFDSGNTAEDRRLKRTARRRYTRRRNRILYLQEIFSEEMGKVDDSFFHRLDESFLTDDDKNFDSYPIFGNKAEEDAYHQKFPTIYHLRKHLADSTEKADLRLVYLALAHMIKFRGHFLIEGELNAENTDVQKLFADFVGVYDRTFDDSHLSEITVDASSILTEKISKSRRLEKLINNYPKEKKNTLFRNLVALSLGLQPNFKTNFKLSEDAKLQFSKDTYEEDLEELLGKIGDDYADLFTLAKNLYDAILLSGILTADDSSTKAPLSASMIKRYAEHHEDLEKLKEFIKANKPELYHDIFKDETKNGYAGYIENGVKQDEFYKYLKNTLSKIAGSDYFLDKIEREDFLRKQRTFDNGSIPHQIHLQEMHAILRRQGDYYPFLKENQDRIEKILTFRIPYYVGPLARGKSDFAWLSRKSADKITPWNFDEIVDKESSVEAFINRMTNYDLYLPNQKVLPKHSLLYEKFTVYNELTKVKYKTEQGKTAFFDANMKQEIFDGVFKVYRKVTKDKLMDFLEKEFDEFRIVDLTGLDKENKAFNASYGTYHDLRKILDKDFLDNSKNEKILEDIVLTLTLFEDREMIRKRLKNYSDLLTKEQLKKLERRHYTGWGRLSAELIHGIRNKESRKTILDYLIDDGNSNRNFMQLINDDALSFKEEIAKAQVIGETDNLNQVVSDIAGSPAIKKGILQSLKIVDELVKIMGHQPENIVVEMARENQFTNQGRRNSQQRLKGLTDSIKEFGSQILKEHPVENSQLQNDRLFLYYLQNGRDMYTGEELDIDYLSQYDIDHIIPQAFIKDNSIDNRVLTSSKENRGKSDDVPSKDVVRKMKSYWSKLLSAKLITQRKFDNLTKGERGGLTDDDKAGFIKRQLVETRQITKHVARILDERFNTETDENNKKIRQVKIVTLKSNLVSNFRKEFELYKVREINDYHHAHDAYLNAVIGKALLGVYPQLEPEFVYGDYPHFHGHKENKATAKKFFYSNIMNFFKKDDVRTDKNGEIIWKKDEYISNIKKVLSYPQVNIVKKVEEQTGGFSKESILPKGDSDKLIPRKTKKFYWDTKKYGGFDSPIVAYSILVIADIEKGKSKKLKTVKALVGVTIMEKMTFERDPVAFLERKGYRNVQEENIIKLPKYSLFKLENGRKRLLASARELQKGNEIVLPNHLGTLLYHAKNIHKVDEPKHLDYVDKHKDEFKELLDVVSNFSKKYTLAEGNLEKIKELYAQNNGEDLKELASSFINLLTFTAIGAPATFKFFDKNIDRKRYTSTTEILNATLIHQSITGLYETRIDLSKLGGD

SEQ ID NO: 531 - protein, 1345 aa, Streptococcus mutans; identical to SEQ ID NO: 530
  Streptococcus mutans S1B

SEQ ID NO: 532 - protein, 1345 aa, Streptococcus mutans; identical to SEQ ID NO: 471
  Streptococcus mutans SF1

SEQ ID NO: 533 - protein, 1345 aa, Streptococcus mutans
  Streptococcus mutans SF14
MKKPYSIGLDIGTNSVGWAVVTDDYKVPAKKMKVLGNTDKSHIKKNLLGALLFDSGNTAEDRRLKRTARRRYTRRRNRILYLQEIFSEEMGKVNDSFFHRLEDSFLVTEDKRGERHPIFGNLEEEVKYHENFPTIYHLRQYLADNPEKVDLRLVYLALAHIIKFRGHFLIEGKFDTRNNDVQRLFQEFLAVYDNTFENSSLQEQNVQVEEILTDKISKSAKKDRVLKLFPNEKSNGRFAEFLKLIVGNQADFKKHFELEEKAPLQFSKDTYEEELEVLLAQIGDNYAELFLSAKKLYDSILLSGILTVTDVSTKAPLSASMIQRYNEHQMDLAQLKQFIRQKLSDKYNEVFSDVSKDGYAGYIDGKTNQEAFYKYLKGLLNKIEGSGYFLDKIEREDFLRKQRTFDNGSIPHQIHLQEMRAIIRRQAEFYPFLADNQDRIEKILTFRIPYYVGPLARGKSDFAWLSRKSADKITPWNFDEIVDKESSAEAFINRMTNYDLYLPNQKVLPKHSLLYEKFTVYNELTKVKYKTEQGKTAFFDANMKQEIFDGVFKVYRKVTKDKLMDFLEKEFDEFRIVDLTGLDKENKVFNASYGTYHDLCKILDKDFLDNSKNEKILEDIVLTLTLFEDREMIRKRLENYSDLLTKEQVKKLERRHYTGWGRLSAELIHGIRNKESRKTILDYLIDDGNSNRNFMQLINDDALSFKEEIAKAQVIGETDNLNQVVSDIAGSPAIKKGILQSLKIVDELVKIMGHQPENIVVEMARENQFTKQGRRNSQQRLKGLTDSIKEFGSQILKEHPVENSQLQNDRLFLYYLQNGRDMYTGEELDIDYLSQYDIDHIIPQAFIKDNSIDNRVLTSSKENRGKSDDVPSKDVVRKMKSYWSKLLSAKLITQRKFDNLTKAERGGLTDDDKAGFIKRQLVETRQITKHVARILDERFYTETDENNKKIRQVKIVTLKSNLVSNFRKEFELYKVREINDYHHAHDAYLNAVIGKALLGVYPQLEPEFVYGDYPHFHGHKENKATAKKFFYSNIMNFFKKDDVRTDKNGEIIWKKDEYISNIKKVLSYPQVNIVKKVEEQTGGFSKESILPKGNSDKLIPRKTKKFYWDTKKYGGFDSPIVAYSILVIADIEKGKSKKLKTVKALVGVTIMEKMTFERDPIAFLERKGYRNVQEENIIKLPKYSLFKLENGRKRLLASARELQKGNEIVLPNHLGTLLYHAKNIHKVDEPKHLDYVDKHKDEFKELLDVVSNFSKKYTLAEGNLEKIKELYAQNNGEDLKELASSFINLLTFTAIGAPAAFKFFDKNIDRKRYTSTTEILNATLIHQSITGLYETRIDLSKLGGD

SEQ ID NO: 534 - protein, 1345 aa, Streptococcus mutans; identical to SEQ ID NO: 533
  Streptococcus mutans SF14

SEQ ID NO: 535 - protein, 1345 aa, Streptococcus mutans
  Streptococcus mutans SM1
MKKPYSIGLDIGTNSVGWAVVTDDYKVPAKKMKVLGNTDKSHIKKNLLGALLFDSGNTAEDRRLKRTARRRYTRRRNRILYLQEIFSEEMGKVDDSFFHRLEDSFLVTEDKRGERHPIFGNLEEEVKYHENFPTIYHLRQYLADNPEKVDLRLVYLALAHIIKFRGHFLIEGKFDTRNNDVQKLFQEFLAVYDNTFENSSLQEQNVQVEEILTDKISKSAKKDRVLKLFPNEKSNGRFAEFLKLIVGNQADFKKHFELEEKAPLQLSKDTYEEELEVLLAQIGDNYAELFLSAKKLYDSILLSGILTVTDVSTKAPLSASMIQRYNEHQMDLAQLKQFIRQKLSDKYNEVFSDVSKDGYAGYIDGKTNQEAFYKYLKGLLNKIEGSGYFLDKIEREDFLRKQRTFDNGSIPHQIHLQEMRAIIRRQAEFYPFLADNQDRIEKILTFRIPYYVGPLARGKSDFAWLSRKSADKITPWNFDEIVDKESSVEAFINRMTNYDLYLPNQKVLPKHSLLYEKFTVYNELTKVKYKTEQGKTAFFDANMKQEIFDGVFKVYRKVTKDKLMDFLEKEFDEFRIVDLTGLDKENKAFNASYGTYHDLRKILDKDFLDNSKNEKILEDIVLTLTLFEDREMIRKRLENYSDLLTKEQVKKLERRHYTGWGRLSAELIHGIRNKESRKTLLDYLIDDGNSNRNFMQLINDDALSFKEEIAKAQVIGETDNLNQVVSDIAGSPAIKKGILQSLKIVDELVKIMGHQPENIVVEMARENQFTNQGRRNSQQRLKGLTDSIKEFGSQILKEHPVENSQLQNDRLFLYYLQNGRDMYTGEELDIDYLSQYDIDHIIPQAFIKDNSIDNRVLTSSKENRGKSDDVPSKDVVRKMKSYWSKLLSAKLITQRKFDNLTKAERGGLTDDDKAGFIKRQLVETRQITKHVARILDERFNTETDENNKKIRQVKIVTLKSNLVSNFRKEFELYKVREINDYHHAHDAYLNAVIGKALLGVYPQLEPEFVYGDYPHFHGHKENKATAKKFFYSNIMNFFKKDDVRTDKNGEIIWKKDEYISNIKKVLSYPQVNIVKKVEEQTGGFSKESILPKGNSDKLIPRKTKKFYWDTKKYGGFDSPIVAYSILVIADIEKGKSKKLKTVKALVGVTIMEKMTFERDPIAFLERKGYRNVQEENIIKLPKYSLFKLENGRKRLLASARELQKGNEIVLPNHLGTLLYHAKNIHKVDEPKHLDYVDKHKDEFKELLDVVSNFSKKYTLAEGNLEKIKELYAQNNGEDLKELASSFINLLTFTAIGAPATFKFFDKNIDRKRYTSTTEILNATLIHQSITGLYETRIDLSKLGGD

SEQ ID NO: 536 - protein, 1345 aa, Streptococcus mutans; identical to SEQ ID NO: 535
  Streptococcus mutans SM1

SEQ ID NO: 537 - protein, 1345 aa, Streptococcus mutans
  Streptococcus mutans SM4
MKKPYSIGLDIGTNSVGWAVVTDDYKVPAKKMKVLGNTDKSHIKKNLLGALLFDSGNTAEDRRLKRTARRRYTRRRNRILYLQEIFSEEMDKVDDSFFHRLEDSFLVTEDKRGERHPIFGNLEEEVKYHENFPTIYHLRQYLADNPEKVDLRLVYLALAHIIKFRGHFLIEGKFDTRNNDVQRLFQEFLAVYDNTFENSSLQEQNVQVEEILTDKISKSAKKDRVLKLFPNEKSNGRFAEFLKLIVGNQADFKKHFELEEKAPLQFSKDTYEEELEVLLAQIGDNYAELFLSAKKLYDSILLSGILTVTDVSTKAPLSASMIQRYNEHQMDLAQLKQFIRQKLSDKYNEVFSDVSKDGYAGYIDGKTNQEAFYKYLKGLLNKIEGSGYFLDKIEREDFLRKQRTFDNGSIPHQIHLQEMRAIIRRQAEFYPFLADNQDRIEKILTFRIPYYVGPLARGKSDFAWLSRKSADKITPWNFDEIVDKESSAEAFINRMTNYDLYLPNQKVLPKHSLLYEKFTVYNELTKVKYKTEQGKTAFFDANMKQEIFDGVFKVYRKVTKDKLMDFLEKEFDEFRIVDLTGLDKENKVFNASYGTYHDLCKILDKDFLDNSKNEKILEDIVLTLTLFEDREMIRKRLENYSDLLTKEQVKKLERRHYTGWGRLSAELIHGIRNKESRKTILDYLIDDGNSNRNFMQLINDDALSFKEEIAKAQVIGETDNLNQVVSDIAGSPAIKKGILQSLKIVDELVKIMGHQPENIVVEMARENQFTKQGRRNSQQRLKGLTDSIKEFGSQILKEHPVENSQLQNDRLFLYYLQNGRDMYTGEELDIDYLSQYDIDHIIPQAFIKDNSIDNRVLTSSKENRGKSDDVPSKDVVRKMKSYWSKLLSAKLITQRKFDNLTKAERGGLTDDDKAGFIKRQLVETRQITKHVARILDERFYTETDENNKKIRQVKIVTLKSNLVSNFRKEFELYKVREINDYHHAHDAYLNAVIGKALLGVYPQLEPEFVYGDYPHFHGHKENKATAKKFFYSNIMNFFKKDDVRTDKNGEIIWKKDEHISNIKKVLSYPQVNIVKKVEEQTGGFSKESILPKGNSDKLIPRKTKKFYWDTKKYGGFDSPIVAYSILVIADIEKGKSKKLKTVKALVGVTIMEKMTFERDPVAFLERKGYRNVQEENIIKLPKYSLFKLENGRKRLLASARELQKGNEIVLPNHLGTLLYHAKNIHKVDEPKHLDYVDKHKDEFKELLDVVSNFSKKYTLAEGNLEKIKELYAQNNGEDLKELASSFINLLTFTAIGAPATFKFFDKNIDRKRYTSTTEILNATLIHQSITGLYETRIDLSKLGGD

SEQ ID NO: 538 - protein, 1345 aa, Streptococcus mutans; identical to SEQ ID NO: 537
  Streptococcus mutans SM4

SEQ ID NO: 539 - protein, 1345 aa, Streptococcus mutans
  Streptococcus mutans SM6
MKKPYSIGLDIGTNSVGWAVVTDDYKVPAKKMKVLGNTDKSHIKKNLLGALLFDSGNTAEDRRLKRTARRRYTRRRNRILYLQEIFSEEMGKVDDSFFHRLEDSFLVTEDKRGERHPIFGNLEEEVKYHENFPTIYHLRQYLADNPEKTDLRLVYLALAHIIKFGGHFLIEGKFDTRNNDVQRLFQEFLAVYDNTFENSSLQEQNVQVEEILTDKISKSAKKDRVLKLFPNEKSNGRFAEFLKLIVGNQADFKKHFELEEKAPLQFSKDIYEEELEVLLAQIGDNYAELFLSAKKLYDSILLSGILTVTDVSTKAPLSASMIQRYNEHQMDLAQLKQFIRQKLSDKYNEVFSDVSKDGYAGYIDGKTNQEAFYKYLKGLLNKIEGSGYFLDKIEREDFLRKQRTFDNGSIPHQIHLQEMRAIIRRQAEFYPFLADNQDRIEKILTFRIPYYVGPLARGKSDFAWLSRKSADKITPWNFDEIVDKESSVEAFINRMTNYDLYLPNQKVLPKHSLLYEKFTVYNELTKVKYKTEQGKTAFFDANMKQEIFDGVFKVYRKVTKDKLMDFLEKEFDEFRIVDLTGLDKENKAFNASYGTYHDLRKILDKDFLDNSKNEKILEDIVLTLTLFEDREMIRKRLKNYSDLLTKEQLKKLERRHYTGWGRLSAELIHGIRNKESRKTILDYLIDDGNSNRNFMQLINDDALSFKEEIAKAQVIGETDNLNQVVSDIAGSPAIKKGILQSLKIVDELVKIMGHQPENIVVEMARENQFTNQGRRNSQQRLKGLTDSIKEFGSQILKEHPVENSQLQNDRLFLYYLQNGRDMYTGEELDIDYLSQYDIDHIIPQAFIKDNSIDNRVLTSSKENRGKSDDVPSKNVVRKMKSYWSKLLSAKLITQRKFDNLTKAERGGLTDDDKAGFIKRQLVETRQITKHVARILDERFHTETDENNKKIRQVKIVTLKSNLVSNFRKEFELYKVREINDYHHAHDAYLNAVIGKALLGVYPQLEPEFVYGDYPHFHGHKENKATAKKFFYSNIMNFFKKDDVRTDKNGEIIWKKDEHISNIKKVLSYPQVNIVKKVEEQTGGFSKESILPKGNSDKLIPRKTKKFYWDTKKYGGFDSPIVAYSILVIADIEKGKSKKLKTVKALVGVTIMEKMTFERDPVAFLERKGYRNVQEENIIKLPKYSLFKLENGRKRLLASARELQKGNEIVLPNHLGTLLYHAKNIHKVDEPKHLDYVDKHKDEFKELLDVVSNFSKKYTLAEGNLEKIKELYAQNNGEDLKELASSFINLLTFTAIGAPATFKFFDKNIDRKRYTSTTEILNATLIHQSITGLYETRIDLSKLGGD

SEQ ID NO: 540 - protein, 1345 aa, Streptococcus mutans; identical to SEQ ID NO: 539
  Streptococcus mutans SM6

SEQ ID NO: 541 - protein, 1134 aa, Streptococcus mutans
  Streptococcus mutans ST1
MANGKILGLDIGIASVGVGIIDKETGKIIHVNSRIFPAATADSNVERRGFRQGRRLVRRKKHRKVRLADLFLDSNLLTDFSKVSLNLNPYQLRVKGLNEELSNEELFIALKSIVSRRGISYLDDASEDSGANSSEYGKAVEENRKLLEDRTPGQIQLERFEKYGKVRGDFTVVENGENHRLINVFSTSAYKKEAERILRRQQEFNMRIADEFIEAYLTILTGKRKYYHGPGNEKSRTDYGRFRTDGTTLDNIFGILIGKCTFYPDEYRAAKASYTAQEFNLLNDLNNLTVPTETKKLSEEQKRQIIEHAKTVKTLGAPTLLKYIVKLVGCSADDIKGYRIDKSDKPEIHTFEAYRKMRTMELIKVDDLSRESLDALAHILTLNTEREGIEEAIRDRFTNKEFNQEQINELVLFRKNNSSLFGKGWHNFSLKLMKELIPELYETSEEQMTILTRLGKQRVKKSSNRTNYIDEKELTEEIYNPVVAKSVRQAIKIINLATKKYGVFDNIVIEMARESNEDDEKKAIQNAQKANEDEKKAALLKAAHQFNGKEELPDSIFHGHKELLTKIRLWHQQGEKCLYTGKTIFINDLIHNPYKYEIDHILPLSLSFDDSLANKVLVLSTANQEKGQRTPFQSLDSMDGAWTYREFKSYVKGLKTLSNKKKDYLLTEENIDKIEVKQKFIERNLVDTRYSSRVVLNALQDFYKERKFDTKISVVRGQFTSQLRRKWRIEKTRETYHHHAVDALIIAASSQLNLWKKQNNPLISYKEDQFVDPETGEILSLSDDEYKKLVFKAPYEHFVDTLKSKKFEDSILFSYQVDSKYNRKISGATICGTRKAQLGKDTQEETYVLGKIKDIYSQKGYEDFIKKYKKDKTQFLMYHKDPQTFEKVIEEILKTYPDKELNEKGKEVSCNPFEKYRQENGPVRKYSKKGNGPEIKSLKYYDEVLGKNIDITPKNSLNKVVLRSLNPWRTDVYFNHETRKYEFLGLKYSDLRYLKGEHRYGILIGDYKKIKDKEGIEKESEFKFTLYKNDLILIKDTAKGKEELFRFWSRTGKDNAKTFEKNKIELKPYSKSQFEKGEDTNVLGKLYASSNQLQKSFGTLENLSIYKVRTDVLGNKYFIKKEGDKPQLNFKKKL

SEQ ID NO: 542 - protein, 1134 aa, Streptococcus mutans; identical to SEQ ID NO: 541
  Streptococcus mutans ST1

SEQ ID NO: 543 - protein, 1350 aa, Streptococcus mutans
  Streptococcus mutans ST6
MKKPYSIGLDIGTNSVGWAVVTDDYKVPAKKMKVLGNTDKSHIEKNLLGALLFDSGNTAEDRRLKRTARRRYTRRRNRILYLQEIFSEEMGKVDDSFFHRLEDSFLVTEDKRGERHPIFGNLEEEVKYHENFPTIYHLRQYLADNPEKVDLRLVYLALAHIIKFRGHFLIEGKFDTRNNDVQRLFQEFLAVYDNTFENSSLQEQNVQVEEILTDKISKSAKKDRVLKLFPNEKSNGRFAEFLKLIVGNQADFKKHFELEEKAPLQFSKDTYEEELEVLLAQIGDNYAELFLSAKKLYDSILLSGILTVTDVSTKAPLSASMIQRYNEHQMDLTQLKQFIRQKLSDKYNEVFSDVSKDGYAGYIDGKTNQEAFYKYLKGLLNKIEGSGYFLDKIEREDFLRKQRTFDNGSIPHQIHLQEMRAIIRRQAEFYSFLADNQDRIEKILTFRIPYYVGPLARGKSDFAWLSRKSADKITPWNFDEIVDKESSAEAFINRMTNYDLYLPNQKVLPKHSLLYEKFTVYNELTKVKYKTEQGKTAFFDANMKQEIFDGVFKVYRKVTKDKLMDFLEKEFDEFRIVDLTGLDKENKAFNASYGTYHDLRKILDKDFLDNSKNEKILEDIVLTLTLFEDREMIRKRLENYSDLLTKEQVKKLERRHYTGWGRLSAELIHGIRNKESRKTILDYLIDDGNSNRNFMQLINDDALSFKEEIAKAQVIGETDNLNQVVSDIAGSPAIKKGILQSLKIVDELVKIMGHQPENIVVEMARENQFTNQGRRNSQQRLKGLTDSIKEFGSQILKEHPVENSQLQNDRLFLYYLQNGRDMYTGEELDIDYLSQYDIDHIIPQAFIKDNSIDNRVLTSSKENRGKSDDVPSEDVVNRMRPFWNKLLSSGLISQRKYNNLTKKELTLDDKAGFIKRQLVETRQITKHVARMLDERFNKEFDDNNKRIRKVKIVTLKSNLVSSFRKEFELYKVREINDYHHAHDAYLNAVVVKALLVKYSKLEPEFVYGEYPKYNSYRERKTATQKMFFYSNIMNMFKSKVKLADDQIVERPMIEVNDETGEIAWDKTKHITTVKKVLSYPQVNIVKKVEEQTIGQNGGLFDDNPKSPLEVIPSKLVPLKKALNPEKYGGYQKPTTAYPILLIVDTKQLIPISVMDKKRFEQNPVKFLKDKGYQQIEKNNFVKLPKYTLVDIGNGIKRLWASSKEVHKGNQLVVSKKSQDLLYHAHHLDNDYSNEYVKNHYQQFDILFNEITSFSKKCKLGKEHIQKIEEAYSKERDSASIEELADGFIKLLGFTQLGATSPFSFLGIKLNQKQYTGKKDYLLPCMEATLIHQSITGLYETRIDLSKLGGD

SEQ ID NO: 544 - protein, 1350 aa, Streptococcus mutans; identical to SEQ ID NO: 543
  Streptococcus mutans ST6

SEQ ID NO: 545 - protein, 1125 aa, Streptococcus mutans
  Streptococcus mutans U2A
MTNGKILGLDIGIASVGVGIINAKTGNVEHASSRIFPAANADNNVERRSARGGRRLIRRKKHRLKRVEDLFEKYNIDTDFSNLNLNPYQLRVKGLNEQLSNEELFAILKNIAKRRGISYLDDAEDDSVGSSDYAKAIDENRKLLKKQTPGEIQLKRLEKYGQLRGNFTIQDENGEYHRLINVFSTSDYVKEARRILETQSYYNKFITESFVEDYIKILQGKRKYYVGPGNEKSRTDYGIYRTDGETLDNLFGILIGKCGFYPEEYRAAKASYTAQEYNFLNDLNNLTVPTETKKLSTEQKYQLVDFAKTASTLGAAKLLKEIAKLVGCQVEEIKGYRLDNKDKPDLHTFEPFRKLKSNLTTIAVENLSITTLDTLAHILTLNTEREGIEEAIQKELPNIFSDEQITEIIAVRKKNSQIFGKGWHSFSIKLMKELIPELYETSEEQMTILTRLKKVKTNSKITNRTKYINEEEITDEIYNPVVSKSIRQTVKIINATIKKYGAFDQIIIEMPRESNEEDERKFIADLQKSNAKEKDDAMKQAALLYNGKDELPHDVFHGHKELATKIRLWYQQGERCLYSGKHIDIHDLIHNQHMFEIDHVLPLSLSFDDSLANKVLVYSWANQEKGQRTPFQALPQMASAWSFRELRDYISKQKGISKKKRDYLLTEQDINKVEVKQKFIERNLVDTRYVSRVVLNTLQDALKVMNKETKISVIRGQFTSQLRRQWRIDKSRETYHHHAVDALIIAASSQLRLWKKQNNPMFAEDKHGQKINLDTGEVLSDDAYKELVYQAPYQGFVNTISSKSFEDEILFSYQVDSKVNRKISDATIYATRQAQLGKDKKEETYVLGKIKDIYSQAGYDAFRKKYDKDKAVFLMYQKDPETWEKVIEVILRDYKELDDKGKEIGNPFERYKVKHGFVRKYSRKNKGTEIKSLKYYDNKLGNHIDITPNNSKHSVVLQSINPWRADLYFNPETTKYELMGLKYADLSFEKGTGKYSISREKYDEIKEREGISSKSEFKFTLYKNDLILVKDIGNHKELIARFNSKNDTSKHYVELKPWNKAKFDSEEELIPAFGKVAKSGQFIKGLNKPDLSIYKVKTDILGHKYYIKKEGDKPKLNFENKIKNK

SEQ ID NO: 546 - protein, 1125 aa, Streptococcus mutans; identical to SEQ ID NO: 545
  Streptococcus mutans U2A

SEQ ID NO: 547 - protein, 1345 aa, Streptococcus mutans
  Streptococcus mutans UA159
MKKPYSIGLDIGTNSVGWAVVTDDYKVPAKKMKVLGNTDKSHIEKNLLGALLFDSGNTAEDRRLKRTARRRYTRRRNRILYLQEIFSEEMGKVDDSFFHRLEDSFLVTEDKRGERHPIFGNLEEEVKYHENFPTIYHLRQYLADNPEKVDLRLVYLALAHIIKFRGHFLIEGKFDTRNNDVQRLFQEFLAVYDNTFENSSLQEQNVQVEEILTDKISKSAKKDRVLKLFPNEKSNGRFAEFLKLIVGNQADFKKHFELEEKAPLQFSKDTYEEELEVLLAQIGDNYAELFLSAKKLYDSILLSGILTVTDVGTKAPLSASMIQRYNEHQMDLAQLKQFIRQKLSDKYNEVFSDVSKDGYAGYIDGKTNQEAFYKYLKGLLNKIEGSGYFLDKIEREDFLRKQRTFDNGSIPHQIHLQEMRAIIRRQAEFYPFLADNQDRIEKLLTFRIPYYVGPLARGKSDFAWLSRKSADKITPWNFDEIVDKESSAEAFINRMTNYDLYLPNQKVLPKHSLLYEKFTVYNELTKVKYKTEQGKTAFFDANMKQEIFDGVFKVYRKVTKDKLMDFLEKEFDEFRIVDLTGLDKENKVFNASYGTYHDLCKILDKDFLDNSKNEKILEDIVLTLTLFEDREMIRKRLENYSDLLTKEQVKKLERRHYTGWGRLSAELIHGIRNKESRKTILDYLIDDGNSNRNFMQLINDDALSFKEEIAKAQVIGETDNLNQVVSDIAGSPAIKKGILQSLKIVDELVKIMGHQPENIVVEMARENQFTNQGRRNSQQRLKGLTDSIKEFGSQILKEHPVENSQLQNDRLFLYYLQNGRDMYTGEELDIDYLSQYDIDHIIPQAFIKDNSIDNRVLTSSKENRGKSDDVPSKDVVRKMKSYWSKLLSAKLITQRKFDNLTKAERGGLTDDDKAGFIKRQLVETRQITKHVARILDERFNTETDENNKKIRQVKIVTLKSNLVSNFRKEFELYKVREINDYHHAHDAYLNAVIGKALLGVYPQLEPEFVYGDYPHFHGHKENKATAKKFFYSNIMNFFKKDDVRTDKNGEIIWKKDEHISNIKKVLSYPQVNIVKKVEEQTGGFSKESILPKGNSDKLIPRKTKKFYWDTKKYGGFDSPIVAYSILVIADIEKGKSKKLKTVKALVGVTIMEKMTFERDPVAFLERKGYRNVQEENIIKLPKYSLFKLENGRKRLLASARELQKGNEIVLPNHLGTLLYHAKNIHKVDEPKHLDYVDKHKDEFKELLDVVSNFSKKYTLAEGNLEKIKELYAQNNGEDLKELASSFINLLTFTAIGAPATFKFFDKNIDRKRYTSTTEILNATLIHQSITGLYETRIDLNKLGGD

SEQ ID NO: 548 - protein, 1345 aa, Streptococcus mutans; identical to SEQ ID NO: 472
  Streptococcus mutans W6

SEQ ID NO: 549 - protein, 1121 aa, Streptococcus oralis
  Streptococcus oralis SK1074
MNGLVLGLDIGIASVGVGILEKNSGKIIHANSRLFPAATADNNVERRKNRQARRLNRRKKHRGVRFQDLFEDYGLLTDFSKVSINLNPYRLRVDGLNQQLTNEELFIALKNIVKRRGISYLDDASEDGGAVSSDYGKAVEENRKLLAEQTPGQIQLERFEKYGQVRGDFTVVENGEKCRLINVFSTSAYRKEAEKILRKQQEFNNQITDEFIEDYLKILTGKRKYYHGPGNEKSRTDYGRFRTDGTTLDNIFGVLIGKCTFYPNEYRASKSSYTAQEFNLLNDLNNLTVPTETKKLSEEQKKVIVEYAKEAKTLGASTLLKYIVKMIDASVDQISGYRVDVNNKPEMHTFEVYRKMQSLETISVGELSRNVLDELAHILTLNTEREGIEEAINSKLMGVFSQDQVLELVQFRKNNSSLFSKGWHNFSLKLMMELIPELYETSEEQMTILTRLGKQKSKETSKRTKYIDEKELTEEIYNPVVAKSVRQAIKIINEATKKHGIFDNIVIEMARENNEEDAKKDYIKRQKANQDEKNAAMEKAAFQYNGKKELPGNIFNGHKELATKIRLWHQQGEKCLYTGKTIPISDLIHNQYKYEIDHILPLSLSFDDSLSNKVLVHATANQEKGQRTPFQALDSMDDAWSYREFKSYVKDLKSLSNKKKDYLLTEEDISKIEVKQKFIERNLVDTRYSSRVVLNALQDFYKSHQFDTTISVVRGQFTSQLRRKWGLEKSRETYHHHAVDALIIAASSQLRLWKKQNNPLITYKEGQFVDSQTGEIISLTDDEYKELVFKAPYDHFVDTLHSKTFEDGILFSYQVDSKYNRKISDATIYATRKAKLDKDKSEETYVLGKIKDIYSQAGYDAFIKIYNKDKRKFLMYHKDPQTFEKVIEEILRTYPSKERNDKNKEVPCNPFEKYRQENGPIRKYSKKGNGPEIKCLKYYDNKLGNYIDISPDGSDNQVVLQSLKPWRTDVYFNHQTKEYELMGLKYSDLSFEKGSGKYSISNEKYNSIKRIEGVNEQSEFKFTLYKNDLILIKDSENNEQKLFRFNSRNDTAKHYVELKPYDKARFDGQQELITILGNVAKGGQCLKGLNKSNISIFKVKTDVLGKKHIIKKEGDEPKLKF

SEQ ID NO: 550 - protein, 1373 aa, Streptococcus oralis
  Streptococcus oralis SK304
MENKNYSIGLDIGTNSVGWAVITDDYKVPSKKMKVLGNTDKRFIKKNLIGALLFDEGTTAEARRLKRTARRRYTRRKNRLRYLQEIFAEEMSKVDSSFFHRLDDSFLIPEDKKGSKYPIFATLIEEKEYHKQFPTIYHLRKQLADSKEKTDLRLIYLALAHMIKYRGHFLYEDTFDIKNNDIQKIFNEFISIYNNTFEGNSLSGQNVQVEAIFTDKISKSAKRERVLKLFPDEKSTGLFSEFLKLIVGNQADFKKHFDLEEKAPLQFSRDTYDEDLENLLGQIGDDFADLFVAAKKLYDAILLSGILTVTDPSTKAPLSASMIERYENHQKDLATLKQFIKTNLPEKYDEVFSDQSKDGYAGYIDGKTTQESFYKYIKNLLSKFEGADYFLEKIEREDFLRKQRTFDNGSIPHQIHLQEMNAILRRQGEHYPFLKENKEKIEKILTFRIPYYVGPLARGNRDFAWLTRNSDQAIRPWNFEEIVDKASSAESFINKMTNYDLYLPEEKVLPKHSLLYETFAVYNELTKVKFIAEGLRDYQFLDSRQKKDIFYTLFKAEDKRKVTEKDIIQYLHTVDGYDGIELKGIEKQFNASLSTYHDLLKIIKDKEFMDDPNNEEILENIVHTLTIFEDREMIKQRLAQYDSLFDEKVIKALTRRHYTGWGKLSSKLINGIRDKQTGKTILDYLMDDGYNNRNFMQLINDDELSFKEIIKKAQVVGKTDDVKQVVQELPGSPAIKKGILQSIKLVDELVKVMGHEPESIVIEMARENQTTARGKKNSQQRYKRIEDSLKILASGLNAKILKEHPTDNIQLQNDRLFLYYLQNGRDMYTGKPLDINQLSSYDIDHIVPQAFIKDDSLDNRVLTSLKDNRGKSDNVPSLEVVEKMKTFWQQLLDSKLISYRKFNNLTKAERGGLDERDKVGFIKRQLVETRQITKHVAQILDARYNTEVNEKDKKNRTVKIITLKSNLVSNFRKEFRLYKIREINDYHHAHDAYLNAVVAKAILKKYPKLEPEFVYGDYQKYDLKRYISRSKDPKEIEKATEKYFFYSNLLNFFKEEVHYADGTIVKRENIEYSKDTGEIAWNKEKDFATIKKVLSLPQVNIVKKREVQTGGFSKESILPKGNSDKLIPRKTKDILWDTTKYGGFDSPVIAYSILLIADIEKGKAKRLKTVKTLVGITIMEKATFEKSPIAFLENKGYHNVRKENILCLPKYSLFELKNGRRRMLASAKELQKGNEIVLPVHLTTLLYHAKNIHRLDEPEHLEYIQKHRNEFKGLLNLVSEFSQKYVLADANLEKIKNLYADNEQADIEILANSFINLLTFTALGAPAAFKFFGKDVDRKRYTTVSEILNATLIHQSITGLYETRIDLSKLGED

SEQ ID NO: 551 - protein, 1134 aa, Streptococcus oralis
  Streptococcus oralis SK313
MNGLVLGLDIGIASVGVGILEKNSGKIVHASSRIFPAATADNNVERRKNRQARRLHRRKKHRGARLKDLFEYYGLLTDFSKVSINLNPYRLRVDGLDQQLTNEELFIALKNIVKRRGISYLDDASEDGGTVSSDYGKAVEENRKLLAEQTPGQIQLERFEKYGQLRGDFTVVENSEKCRLINVFSTSAYKKEAERILRKQQEFNNQITDEFIEDYLKILTGKRKYYHGPGNEKSRTDYGRFRTDGATLDNIFGILIGKCTFYPNEYRASKASYTAQEFNLLNDLNNLTVPTETKKLSEEQKKTIIEYAKSAKTLGASTLLKYIAKMIDASVDQIRGYRVDVNNKPEMHTFEVYRKMQSLETISVGELSRNILDELAHILTLNTEREGIEEAINTKLRDSFSQDQVLELVQFRKNNSSLFSKGWHNFSLKLMMELIPELYETSEEQMTILTRLGKQKSKETSKRTKYIDEKEVTEEIYNPVVAKSVRQAIKIINEATKKHGIFDNIVIEMARENNEEDAKKDYIKRQKANQDEKYAAMEKAAFQYNGKKELPDNIFHGHKELATKIRLWHQQGEKCLYTGKSIPISDLIHNQYKYEIDHILPLSLSFDDSLSNKVLVLATANQEKGQRTPFQALDSMDDAWSYREFKSYVKESKLLGNKKKEYLLTEEDISKIEVKQKFIERNLVDTRYSSRVVLNALQDFYKNHNFDTTISVVRGQFTSQLRRKWGLEKSRETYHHHAVDALIIAASSQLRLWKKQNNPLIAYKEGQFVDSQTGEIISLTDDEYKELVFKAPYDHFVDTLSSKTFEDSILFSYQVDSKFNRKISDATIYATRKAKLDKEKKEYTYTLGKIKDIYSLGTKTPSKTGFYKFLDLYNKDKSQFLMFQKDRKTWDEVIEKIMEQYRPFKEYDKAGKLVDFNPFEKYRQENGPIRKYSKKGNGPEIKSLKYYDILLGKHKNITPEGSRNTVALLSLNPWRTDVYYNMETKKYEFLGLKYADLPFEEGGAYGISTETYNELREKEGIGKNSEFKFTLYKNDLILIKDTETNCQQFFRFWSRTGKDNPKSFEKHKIELKPYEKAKFEKGEELEVLGKVPPSSNQFQKNMQIENLSIYKVKTDVLGNKHFIKKEGDKPKLKF

SEQ ID NO: 552 - protein, 1371 aa, Streptococcus oralis
  Streptococcus oralis SK610
MENKNYSIGLDIGTNSVGWSVITDDYKVPSKKMKVLGNTDKRFIKKNLIGALLFDEGTTAEARRLKRTARRRYTRRKNRLRYLQEIFAEEMSKVDSSFFHRLDDSFLIPEDKRGSKYPIFATLAEEKEYHKQFPTIYHLRKQLADSKEKTDLRLIYLALAHMIKYRGHFLYEDTFDIKNNDIQKIFSEFISIYDNTFEGSSLSGQNAQVEAIFTDKISKSAKRERVLKLFPDEKSTGLFSEFLKLIVGNQADFKKHFDLGEKAPLQFSKDTYDEDLENLLGQIGDDFADLFLVAKKLYDAILLSGILTVTDPSTKAPLSASMIERYENHQKDLAVLKQFIKNNLPEKYDEVFSDQSKDGYAGYIDGKTTQEAFYKYIKNLLSKFEGTDYFLEKIEREDFLRKQRTFDNGSIPHQIHLQEMNAILRRQGEHYPFLKDNKEKIEKILTFRIPYYVGPLARGNRDFAWLTRNSDEAIRPWNFEEIVDKASSAEDFINKMTNYDLYLPEEKVLPKHSLLYETFAVYNELTKVKFIAEGLRDYQFLDSGQKKQIVTQLFKEKRKVTEKDIIQFLHNVDGYDGIELKGIEKQFNASLSTYHDLLKIIKDKEFMDDSKNEEILENIVHTLTIFEDREMIKQRLAQYDSLFDEKVIKALIRRHYTGWGKLSAKLIDGICDKQTGNTILDYLIDDGKNNRNFMQLINDDGLSFKEITQKAQVVGKTDDVKQVVQELPGSPAIKKGILQSIKIVDELVKVMGHTPESIVIEMARENQTTARGKKNSQQRYKRIEDALKNLASGLDSNILKEHPTNNIQLQNDRLFLYYLQNGRDMYTGKPLDINQLSSYDIDHIVPQAFIKDDSLDNRVLTSLKDNRGKSDNVPSIEVVQKRKAFWQQLLDSKLISERKFNNLTKAERGGLDERDKVGFIKRQLVETRQITKHVAQILDARFNKEVNEKDKKNRTVKIITLKSNLVSNFRKEFRLYKVREINDYHHAHDAYLNAVVAKAILKKYPKLEPEFVYGDYQKYDLKRYISRSRNPKEVEKATEKYFFYSNLLNFFKEEVHYADGTIVKRENIEYSKDTGEIAWNKEKDFATIKKVLSYPQVNIVKKREVQTGGFSKESILPKGNSDKLIPRKTKDILWETTKYGGFDSPVIAYSILLIADIEKGKAKKLKTVKTLVGITIMEKAAFEENPITFLENKGYHNVRKENILCLPKYSLFELENGRRRLLASAKELQKGNEIVLPVYLTTLLYHSKNVHKLDEPEHLEYIQKHRNEFKDLLNLVSEFSQKYVLADANLEKIQNLYADNEQADIEILANSFINLLTFTALGAPAAFKFFGKDIDRKRYTTVSEILNATLIHQSITGLYETRIDLSKLGED

SEQ ID NO: 553 - protein, 1140 aa, Streptococcus parasanguinis
  Streptococcus parasanguinis F0449
MNGLVLGLDIGIASVGVGILKKDIGEIIHTNSRLFSAATADSNIERRGHRGGKRLTRRKKHRSIRLHDLFEDFGLLTDFSKVSINLNPYQLRVQGLDNQLTNEELFIALKNIVKRRGISYLDDASEDGGTVSSDYGKAVEENRKLLAEQTPGQIQLDRFEKYGQVRGDFNVVENGEKRRLINVFTTSAYSKEAERILRKQQEFNKKITDEFIEDYLTILTGKRKYYHGPGNEKSRTDYGRYTTKKDPEGKYITLDNIFGILIGKCTFYPDEYRASKASYTAQEFNLLNDLNNLTVPTETKKLSEEQKKTIIKYAKTAKTLGASTLLKYIAKLIGASVDQIHGYRIDPNKKPEMHTFETYRKMQSLETISVEELPRKVLDELAHILTLNTEREGIEEAINATLKDTFSQDQVLELVQFRKNNSSLFSKGWHSFSLKLMMELIPELYETSEEQMTILTRLGKQKSKETSKRTKYIDEKELTEEIYNPVVAKSVRQAIKIINEATKKYGIFDNIVIEMARENNEEDAKKEYIKRQKANLDEKNAAMEKAAFQYNGKKELPDNVFHGHKELATKIRLWHQQGEKCLYTGKNIPISDLIQNQYKYEIDHILPLSLSFDDSLSNKVLVLATANQEKGQRTPFQALDSMDDAWSYREFKSYVKDSKLLGNKKKEYLLTEEDISKIEVKQKFIERNLVDTRYSSRVVLNALQDFYKEHQFDTTISVVRGQFTSQLRRKWGLEKSRETYHHHAVDALIIAASSQLRLWKKQNNPLISYTEGQFVDQVTGEIISLSDDEYKELVFKAPYDHFVDTLKSKKFEDSILFSYQVDSKYNRKISDATIYATRKAKLDKENKEYTYTLGKIKDIYALGTKSPSKTGFYKFLDLYNKDKSQFLMFQKDRKTWDEVIEKIIEQYRPFKEYDENGKEVDFNPFEKYRIENGPIRKYSKKGNGPEIKSLKYYDNLLGKFVDITPSESKNPVALLSLNPWRTDVYYNTETSKYEFLGLKYADLCFEKGGAYGISEVKYNKIREKEGIGKESEFKFTLYKNDLILIKDTETNCQQIFRFWSRTGKDNPKSFEKHKIELKPYEKARFEKGEELEVLGKVPPSSNQLQKNMQIENLSIYKVKTDVLGNKHFIKKEGEEPKLKF

SEQ ID NO: 554 - protein, 1130 aa, Streptococcus pasteurianus
MTNGKILGLDIGIASVGVGIIEAKTGKVVHANSRLFSAANAENNAERRGFRGSRRLNRRKKHRVKRVRDLFEKYGIVTDFRNLNLNPYELRVKGLTEQLKNEELFAALRTISKRRGISYLDDAEDDSTGSTDYAKSIDENRRLLKNKTPGQIQLERLEKYGQLRGNFTVYDENGEAHRLINVFSTSDYEKEARKILETQADYNKKITAEFIDDYVEILTQKRKYYHGPGNEKSRTDYGRFRTDGTTLENIFGILIGKCNFYPDEYRASKASYTAQEYNFLNDLNNLKVSTETGKLSTEQKESLVEFAKNTATLGPAKLLKEIAKILDCKVDEIKGYREDDKGKPDLHTFEPYRKLKFNLESINIDDLSREVIDKLADILTLNTEREGIEDAIKRNLPNQFTEEQISEIIKVRKSQSTAFNKGWHSFSAKLMNELIPELYATSDEQMTILTRLEKFKVNKKSSKNTKTIDEKEVTDEIYNPVVAKSVRQTIKIINAAVKKYGDFDKIVIEMPRDKNADDEKKFIDKRNKENKKEKDDALKRAAYLYNSSDKLPDEVFHGNKQLETKIRLWYQQGERCLYSGKPISIQELVHNSNNFEIDHILPLSLSFDDSLANKVLVYAWTNQEKGQKTPYQVIDSMDAAWSFREMKDYVLKQKGLGKKKRDYLLTTENIDKIEVKKKFIERNLVDTRYASRVVLNSLQSALRELGKDTKVSVVRGQFTSQLRRKWKIDKSRETYHHHAVDALIIAASSQLKLWEKQDNPMFVDYGKNQVVDKQTGEILSVSDDEYKELVFQPPYQGFVNTISSKGFEDEILFSYQVDSKYNRKVSDATIYSTRKAKIGKDKKEETYVLGKIKDIYSQNGFDTFIKKYNKDKTQFLMYQKDSLTWENVIEVILRDYPTTKKSEDGKNDVKCNPFEEYRRENGLICKYSKKGKGTPIKSLKYYDKKLGNCIDITPEESRNKVILQSINPWRADVYFNPETLKYELMGLKYSDLSFEKGTGNYHISQEKYDAIKEKEGIGKKSEFKFTLYRNDLILIKDIASGEQEIYRFLSRTMPNVNHYVELKPYDKEKFDNVQELVEALGEADKVGRCIKGLNKPNISIYKVRTDVLGNKYFVKKKGDKPKLDFKNNKK

SEQ ID NO: 555 - protein, 1374 aa, Streptococcus pseudoporcinus
  Streptococcus pseudoporcinus LQ 940-04
MKKRYSYSIGLDIGTNSVGWAVINEDYKVPAKKMTVFGNTDRKTIKKNLLGTVLFDSGETAQARRLKRTNRRRYTRRRYRLCQLQNIFATEMVKVDDTFFQRLSESFFYYQDKAFDKHPIFGNSKEERAYHKTYPTIYHLRKDLADRDQKADLRLIYLALSHIIKFRGHFLIEGKLNSENTDVQKLFIALVTVYNLLFEEEPIAGETCDAKALLTAKTSKSKRLESLISEFPGQKKNGLFGNLLALALGLRPNFKSNFGLSEDAKLQITKDTYEEELDNLLAEIGDHYADLFLAAKNLSDAILLSDILTLSDENTRAPLSASMIKRYEEHQEDLALLKKLVKEQMPEKYWEIFSNAKKNGYAGYIEGKVSQEDFYRYIKPILSRLKGGDEFLAKIDRDDFLRKQRTFDNGSIPHQIHLKELHAILRRQEKYYPFLAEQKEKIEQLLCFRIPYYVGPLAKGGNSSFAWLKRRSDEPITPWNFKDVVDEEASAQAFIEGMTNYDTYLPEEKVLPKHSPLYEMFTVYNELTKVKYIAENMTKPLYLSAEQKEAIIDHLFKQTRKVTVKDLKEKYFSQIEGLENVDVTGVEGAFNASLGTYNDLLKIIKDKAFLDDEANAEILEEIVLILTLFQDEKLIEKRLAKYANLFEKSVLKKLRKRHYRGWGRLSRQLIDGMKDKASGKTILDFLKADDFANRNFIQLINDSSLDFEKLIDDAQKKAIKRESLTEAVANLAGSPAIKKGILQSLKVVDEIVKVMGHNPDNIVIEMSRENQTTAQGLKNARQRLKKIKEVHKKTGSRILEDNSERITNLTLQDNRLYLYLLQDGKDMYTGQDLDINNLSQYDIDHIIPQSFIKDNSIDNLVLTTQKANRGKSDNVPSIEVVRDMKDRVWRRQLANGAISRQKFDHLTKAERGGLADSDKARFLRRQLVETRQITKHVAQLLDSRFNSKSNQNKKLARNVKIITLKSKIVSDFRKDFGLYKLREVNNYHHAHDAYLNAVVGTALLKKYPKLEAEFVYGDYKHFDLVKLISKSDPSLGKATAKVFFYSNIMNFFKEELSLADGTLMKRPVIETNTETGEVVWDKVKDFKTIRKVLSYPQVNIVKKTEIQSGAFSKESVLSKGNSDKLIERKKGWDPKKYGGFDSPNTAYSIFVVAKVAKRKAQKLKTVKEIVGITIMEQAEYEKDNIAFLEKKGYQDIQEKLLIKLPKYSLFELENGRRRLLASANEFQKGNELALSGKYMKFLYLASRYDKLSSKIESEQQKKLFVEQHLHYFDEILDIVVKHATCYIKAENNLKKIISLYKKKEAYSINEQALNMLNLFIFTSLGAPSTFVFFDETIDRKRYTTSSDVLNGILIQQSITGLYETRIDLSRFGGD

SEQ ID NO: 556 - protein, 1368 aa, Streptococcus pyogenes
  Streptococcus pyogenes MGAS10270
MDKKYSIGLDIGTNSVGWAVITDDYKVPSKKFKVLGNTDRHSIKKNLIGALLFDSGETAEATRLKRTARRRYTRRKNRICYLQEIFSNEMAKVDDSFFHRLEESFLVEEDKKHERHPIFGNIVDEVAYHEKYPTIYHLRKKLVDSTDKADLRLIYLALAHMIKFRGHFLIEGDLNPDNSDVDKLFIQLVQTYNQLFEENPINASGVDAKAILSARLSKSRRLENLIAQLPGEKKNGLFGNLIALSLGLTPNFKSNFDLAEDAKLQLSKDTYDDDLDNLLAQIGDQYADLFLAAKNLSDAILLSDILRLNSEITKAPLSASMIKRYDEHHQDLTLLKALVRQQLPEKYKEIFFDQSKNGYAGYIDGGASQEEFYKFIKPILEKMDGTEELLAKLNREDLLRKQRTFDNGSIPHQIHLGELHAILRRQEDFYPFLKDNREKIEKILTFRIPYYVGPLARGNSRFAWMTRKSEETITPWNFEEVVDKGASAQSFIERMTNFDKNLPNEKVLPKHSLLYEYFTVYNELTKVKYVTEGMRKPAFLSGEQKKAIVDLLFKTNRKVTVKQLKEDYFKKIECFDSVEISGVEDRFNASLGTYHDLLKIIKDKDFLDNEENEDILEDIVLTLTLFEDREMIEERLKTYAHLFDDKVMKQLKRRRYTGWGRLSRKLINGIRDKQSGKTILDFLKSDGFANRNFMQLIHDDSLTFKEDIQKAQVSGQGDSLHEHIANLAGSPAIKKGILQTVKVVDELVKVMGRHKPENIVIEMARENQTTQKGQKNSRERMKRIEEGIKELGSQILKEHPVENTQLQNEKLYLYYLQNGRDMYVDQELDINRLSDYDVDHIVPQSFIKDDSIDNKVLTRSDKNRGKSDNVPSEEVVKKMKNYWRQLLNAKLITQRKFDNLTKAERGGLSELDKAGFIKRQLVETRQITKHVAQILDSRMNTKYDENDKLIREVKVITLKSKLVSDFRKDFQFYKVREINNYHHAHDAYLNAVVGTALIKKYPKLESEFVYGDYKVYDVRKMIAKSEQEIGKATAKYFFYSNIMNFFKTEITLANGEIRKRPLIETNGETGEIVWDKGRDFATVRKVLSMPQVNIVKKTEVQTGGFSKESILPKRNSDKLIARKKDWDPKKYGGFDSPTVAYSVLVVAKVEKGKSKKLKSVKELLGLTIMERSSFEKNPIDFLEAKGYKEVKKDLIIKLPKYSLFELENGRKRMLASAGELQKGNELALPSKYVNFLYLASHYEKLKGSPEDNEQKQLFVEQHKHYLDEIIEQISEFSKRVILADANLDKVLSAYNKHRDKPIREQAENIIHLFTLTNLGAPAAFKYFDTTIDRKRYTSTKEVLDATLIHQSITGLYETRIDLSQLGGD

SEQ ID NO: 557 - protein, 1371 aa, Streptococcus pyogenes
MDKKYSIGLDIGTNSVGWAVITDDYKVPSKKFKVLGNTDRHSIKKNLIGALLFDSGETAEATRLKRTARRRYTRRKNRICYLQEIFSNEMAKVDDSFFHRLEESFLVEEDKKHERHPIFGNIVDEVAYHEKYPTIYHLRKKLADSTDKADLRLIYLALAHMIKFRGHFLIEGDLNPDNSDVDKLFIQLVQTYNQLFEENPINASRVDAKAILSARLSKSRRLENLIAQLPGEKKNGLFGNLIALSLGLTPNFKSNFDLAEDAKLQLSKDTYDDDLDNLLAQIGDQYADLFLAAKNLSDATLLSDILRVNSEITKAPLSASMIKRYDEHHQDLTLLKALVRQQLPEKYKEIFFDQSKNGYAGYIDGGASQEEFYKFIKPILEKMDGTEELLAKLNREDLLRKQRTFDNGSIPHQIHLGELHAILRRQEDFYPFLKDNREKIEKILTFRIPYYVGPLARGNSRFAWMTRKSEETITPWNFEEVVDKGASAQSFIERMTNFDKNLPNEKVLPKHSLLYEYFTVYNELTKVKYVTEGMRKPAFLSGEQKKAIVDLLFKTNRKVTVKQLKEDYFKKIECFDSVEISGVEDRFNASLGTYHDLLKIIKDKDFLDNEENEDILEDIVLTLTLFEDKEMIEERLKTYAHLFDDKVMKQLKRRHYTGWGRLSRKLINGIRDKQSGKTILDFLKSDGFANRNFIQLIHDDSLTFKEAIQKAQVSGQGHSLHEQIANLAGSPAIKKGILQSVKVVDELVKVMGHKPENIVIEMARENQTTQKGQKNSRERMKRIEEGIKELGSQILKEHPVENTQLQNEKLYLYYLQNGRDMYVDQELDINRLSDYDVDHIVPQSFIKDDSIDNKVLTRSDKNRGKSDDVPSEEVVKKMKNYWRQLLNAKLITQRKFDNLTKAERGGLSELDKAGFIKRQLVETRQITKHVAQILDSRMNTKYDENDKLIREVKVITLKSKLVSDFRKDFQFYKVREINNYHHAHDAYLNAVVGTALIKKYPKLESEFVYGDYKVYDVRKMIAKSEQEIGKATAKRFFYSNIMNFFKTEITLANGEIRKRPLIETNEETGEIVWDKGRDFATVRKVLSMPQVNIVKKTEVQTGALTNESIYARGSFDKLISRKHRFESSKYGGFGSPTVTYSVLVVAKSKVQDGKVKKIKTGKELIGITLLDKLVFEKNPLKFIEDKGYGNVQIDKCIKLPKYSLFEFENGTRRMLASVMANNNSRGDLQKANEMFLPAKLVTLLYHAHKIESSKELEHEAYILDHYNDLYQLLSYIERFASLYVDVEKNISKVKELFSNIESYSISEICSSVINLLTLTASGAPADFKFLGTTIPRKRYGSPQSILSSTLIHQSITGLYETRIDLSQLGSD

SEQ ID NO: 558 - protein, 1367 aa, Streptococcus pyogenes
MDKKYSIGLDIGTNSVGWAVITDDYKVPSKKFKVLGNTDRHSIKKNLIGALLFGSGETAEATRLKRTARRRYTRRKNRICYLQEIFSNEMAKVDDSFFHRLEESFLVEEDKKHERHPIFGNIVDEVAYHEKYPTIYHLRKKLADSTDKADLRLIYLALAHMIKFRGHFLIEGDLNPDNSDVDKLFIQLVQIYNQLFEENPINASRVDAKAILSARLSKSRRLENLIAQLPGEKRNGLFGNLIALSLGLTPNFKSNFDLAEDAKLQLSKDTYDDDLDNLLAQIGDQYADLFLAAKNLSDAILLSDILRVNSEITKAPLSASMIKRYDEHHQDLTLLKALVRQQLPEKYKEIFFDQSKNGYAGYIDGGASQEEFYKFIKPILEKMDGTEELLVKLNREDLLRKQRTFDNGSIPHQIHLGELHAILRRQEDFYPFLKDNREKIEKILTFRIPYYVGPLARGNSRFAWMTRKSEETITPWNFEEVVDKGASAQSFIERMTNFDKNLPNEKVLPKHSLLYEYFTVYNELTKVKYVTEGMRKPAFLSGEQKKAIVDLLFKTNRKVTVKQLKEDYFKKIECFDSVEISGVEDRFNASLGAYHDLLKIIKDKDFLDNEENEDILEDIVLTLTLFEDRGMIEERLKTYAHLFDDKVMKQLKRRRYTGWGRLSRKLINGIRDKQSGKTILDFLKSDGFANRNFMQLIHDDSLTFKEDIQKAQVSGQGHSLHEQIANLAGSPAIKKGILQTVKIVDELVKVMGHKPENIVIEMARENQTTQKGQKNSRERMKRIEEGIKELGSQILKEHPVENTQLQNEKLYLYYLQNGRDMYVDQELDINRLSDYDVDHIVPQSFIKDDSIDNKVLTRSDKNRGKSDNVPSEEVVKKMKNYWRQLLNAKLITQRKFDNLTKAERGGLSELDKAGFIKRQLVETRQITKHVAQILDSRMNTKYDENDKLIREVKVITLKSKLVSDFRKDFQFYKVREINNYHHAHDAYLNAVVGTALIKKYPKLESEFVYGDYKVYDVRKMIAKSEQEIGKATAKYFFYSNIMNFFKTEITLANGEIRKRPLIETNGETGEIVWDKGRDFATVRKVLSMPQVNIVKKTEVQTGGFSKESILPKRNSDKLIARKKDWDPKKYGGFDSPTVAYSVLVVAKVEKGKSKKLKSVKELLGITIMERSSFEKNPIDFLEAKGYKEVKKDLIIKLPKYSLFELENGRKRMLASAGELQKGNELALPSKYVNFLYLASHYEKLKGSPEDNEQKQLFVEQHKHYLDEIIEQISEFSKRVILADANLDKVLSAYNKHRDKPIREQAENIIHLFTLTNLGAPAAFKYFDTTIDRKRYTSTKEVLDATLIHQSITGLYETRIDLSQLGGD

SEQ ID NO: 559 - protein, 1368 aa, Streptococcus sp.
MDKKYSIGLDIGTNSVGWAVITDDYKVPSKKFKVLGNTDRHSIKKNLIGALLFDSGEIAEATRLKRTARRRYTRRKNRICYLQEIFSNEMAKVDDSFFHRLEESFLVEEDKKHERHPIFGNIVDEVAYHEKYPTIYHLRKKLVDSTDKADLRLIYLALAHMIKFRGHFLIEGDLNPDNSDVDKLFIQLVQTYNQLFEENPINASGVDAKAILSARLSKSRRLENLIAQLPGEKKNGLFGNLIALSLGLTPNFKSNFDLAEDAKLQLSKDTYDDDLDNLLAQIGDQYADLFLAAKNLSDAILLSDILRLNSEITKAPLSASMIKRYDEHHQDLTLLKALVRQQLPEKYKEIFFDQSKNGYAGYIDGGASQEEFYKFIKPILEKMDGTEELLAKLNREDLLRKQRTFDNGSIPHQIHLGELHAILRRQEDFYPFLKDNREKIEKILTFRIPYYVGPLARGNSRFAWMTRKSEETITPWNFEEVVDKGASAQSFIERMTNFDKNLPNEKVLPKHSLLYEYFTVYNELTKVKYVTEGMRKPAFLSGEQKKAIVDLLFKTNRKVTVKQLKEDYFKKIECFDSVEISGVEDRFNASLGTYHDLLKIIKDKDFLDNEENEDILEDIVLTLTLFEDREMIEERLKTYAHLFDDKVMKQLKRRRYTGWGRLSRKLINGIRDKQSGKTILDFLKSDGFANRNFMQLIHDDSLTFKEDIQKAQVSGQGDSLHEHIANLAGSPAIKKGILQTVKVVDELVKVMGRHKPENIVIEMARENQTTQKGQKNSRERMKRIEEGIKELGSQILKEHPVENTQLQNEKLYLYYLQNGRDMYVDQELDINRLSDYDVDHIVPQSFIKDDSIDNKVLTRSDKNRGKSDNVPSEEVVKKMKNYWRQLLNAKLITQRKFDNLTKAERGGLSELDKAGFIKRQLVETRQITKHVAQILDSRMNTKYDENDKLIREVKVITLKSKLVSDFRKDFQFYKVREINNYHHAHDAYLNAVVGTALIKKYPKLESEFVYGDYKVYDVRKMLAKSEQEIGKATAKYFFYSNIMNFFKTEITLANGEIRKRPLIETNGETGEIVWDKGRDFATVRKVLSMPQVNIVKKTEVQTGGFSKESILPKRNSDKLIARKKDWDPKKYGGFDSPTVAYSVLVVAKVEKGKSKKLKSVKELLGITIMERSSFEKNPIDFLEAKGYKEVRKDLIIKLPKYSLFELENGRKRMLASAGELQKGNELALPSKYVNFLYLASHYEKLKGSPEDNEQKQLFVEQHKHYLDEIIEQISEFSKRVILADANLDKVLSAYNKHRDKPIREQAENIIHLFTLTNLGAPTAFKYFDTTIDRKRYTSTKEVLDATFIHQSITGLYETRIDLSQLGGD

SEQ ID NO: 560 - protein, 1368 aa, Streptococcus pyogenes
MDKKYSIGLDIGTNSVGWAVITDDYKVPSKKLKGLGNTDRHGIKKNLIGALLFDSGETAEATRLKRTARRRYTRRKNRICYLQEIFSNEMAKVDDSFFHRLEESFLVEEDKKHERHPIFGNIVDEVAYHEKYPTIYHLRKKLADSTDKVDLRLIYLALAHMIKFRGHFLIEGDLNPDNSDVDKLFIQLVQTYNQLFEENPINASRVDAKAILSARLSKSRRLENLIAQLPGEKKNGLFGNLIALSLGLTPNFKSNFDLAEDAKLQLSKDTYDDDLDNLLAQIGDQYADLFLAAKNLSDATLLSDILRVNSEITKAPLSASMIKRYDEHHQDLTLLKALVRQQLPEKYKEIFFDQSKNGYAGYIDGGASQEEFYKFIKPILEKMDGTEELLAKLNREDLLRKQRTFDNGSIPYQIHLGELHAILRRQEDFYPFLKDNREKIEKILTFRIPYYVGPLARGNSRFAWMTRKSEETITPWNFEEVVDKGASAQSFIERMTNFDKNLPNEKVLPKHSLLYEYFTVYNELTKVKYVTEGMRKPAFLSGEQKKAIVDLLFKTNRKVTVKQLKEDYFKKIECFDSVEISGVEDRFNASLGTYHDLLKIIKDKDFLDNEENEDILEDIVLTLTLFEDREMIEERLKTYAHLFDDKVMKQLKRRRYTGWGRLSRKLINGIRDKQSGKTILDFLKSDGFANRNFMQLIHDDSLTFKEDIQKAQVSGQGDSLHEHIANLAGSPAIKKGILQTVKVVDELVKVMGRHKPENIVIEMARENQTTQKGQKNSRERMKRIEEGIKELGSDILKEYPVENTQLQNEKLYLYYLQNGRDMYVDQELDINRLSDYDVDHIVPQSFLKDDSIDNKVLTRSDKNRGKSDNVPSEEVVKKMKNYWRQLLNAKLITQRKFDNLTKAERGGLSELDKVGFIKRQLVETRQITKHVAQILDSRMNTKYDENDKLIREVRVITLKSKLVSDFRKDFQFYKVREINNYHHAHDAYLNAVVGTALIKKYPKLESEFVYGDYKVYDVRKMIAKSEQEIGKATAKYFFYSNIMNFFKTEITLANGEIRKRPLIETNGETGEIVWDKGRDFATVRKVLSMPQVNIVKKTEVQTGGFSKESILPKRNSDKLIARKKDWDPKKYGGFDSPTVAYSVLVVAKVEKGKSKKLKSVKELLGITIMERSSFEKDPIDFLEAKGYKEVRKDLIIKLPKYSLFELENGRKRMLASAGELQKGNELALPSKYVNFLYLASHYEKLKGSPEDNEQKQLFVEQHKHYLDEIIEQISEFSKRVILADANLDKVLSAYNKHRDKPIREQAENIIHLFTLTNLGAPAAFKYFDTTIDRKRYTSTKEVLDATLIHQSITGLYETRIDLSQLGGD

SEQ ID NO: 561 - protein, 1368 aa, Streptococcus pyogenes
MDKKYSIGLDIGTNSVGWAVITDDYKVPSKKFKVLGNTDRHSIKKNLIGALLFDSGETAEATRLKRTARRRYTRRKNRICYLQEIFSNEMAKVDDSFFHRLEESFLVEEDKKHERHPIFGNIVDEVAYHEKYPTIYHLRKKLVDSTDKADLRLIYLALAHMIKFRGHFLIEGDLNPDNSDVDKLFIQLVQTYNQLFEENPINASGVDAKAILSARLSKSRRLENLIAQLPGEKKNGLFGNLIALSLGLTPNFKSNFDLAEDAKLQLSKDTYDDDLDNLLAQIGDQYADLFLAAKNLSDAILLSDILRVNTEITKAPLSASMIKRYDEHHQDLTLLKALVRQQLPEKYKEIFFDQSKNGYAGYIDGGASQEEFYKFIKPILEKMDGTEELLVKLNREDLLRKQRTFDNGSIPHQIHLGELHAILRRQEDFYPFLKDNREKIEKILTFRIPYYVGPLARGNSRFAWMTRKSEETITPWNFEEVVDKGASAQSFIERMTNFDKNLPNEKVLPKHSLLYEYFTVYNELTKVKYVTEGMRKPAFLSGEQKKAIVDLLFKTNRKVTVKQLKEDYFKKIECFDSVEISGVEDRFNASLGTYHDLLKIIKDKDFLDNEENEDILEDIVLTLTLFEDREMIEERLKTYAHLFDDKVMKQLKRRRYTGWGRLSRKLINGIRDKQSGKTILDFLKSDGFANRNFMQLIHDDSLTFKEDIQKAQVSGQGDSLHEHIANLAGSPAIKKGILQTVKVVDELVKVMGRHKPENIVIEMARENQTTQKGQKNSRERMKRIEEGIKELGSQILKEHPVENTQLQNEKLYLYYLQNGRDMYVDQELDINRLSDYDVDHIVPQSFLKDDSIDNKVLTRSDKNRGKSDNVPSEEVVKKMKNYWRQLLNAKLITQRKFDNLTKAERGGLSELDKAGFIKRQLVETRQITKHVAQILDSRMNTKYDENDKLIREVKVITLKSKLVSDFRKDFQFYKVREINNYHHAHDAYLNAVVGTALIKKYPKLESEFVYGDYKVYDVRKMIAKSEQEIGKATAKYFFYSNIMNFFKTEITLANGEIRKRPLIETNGETGEIVWDKGRDFATVRKVLSMPQVNIVKKTEVQTGGFSKESILPKRNSDKLIARKKDWDPKKYGGFDSPTVAYSVLVVAKVEKGKSKKLKSVKELLGITIMERSSFEKNPIDFLEAKGYKEVKKDLIIKLPKYSLFELENGRKRMLASAGELQKGNELALPSKYVNFLYLASHYEKLKGSPEDNEQKQLFVEQHKHYLDEIIEQISEFSKRVILADANLDKVLSAYNKHRDKPIREQAENIIHLFTLTNLGAPAAFKYFDTTIDRKRYTSTKEVLDATLIHQSITGLYETRIDLSQLGGD

SEQ ID NO: 562 - protein, 1368 aa, Streptococcus pyogenes
MDKKYSIGLDIGTNSVGWAVITDDYKVPSKKFKVLGNTDRHSIKKNLIGALLFDSGETAEATRLKRTARRRYTRRKNRICYLQEIFSNEMAKVDDSFFHRLEESFLVEEDKKHERHPIFGNIVDEVAYHEKYPTIYHLRKKLVDSTDKADLRLIYLALAHMIKFRGHFLIEGDLNPDNSDVDKLFIQLVQTYNQLFEENPINASGVDAKAILSARLSKSRRLENLIAQLPGEKKNGLFGNLIALSLGLTPNFKSNFDLAEDAKLQLSKDTYDDDLDNLLAQIGDQYADLFLAAKNLSDAILLSDILRLNSEITKAPLSASMIKRYDEHHQDLTLLKALVRQQLPEKYKEIFFDQSKNGYAGYIDGGASQEEFYKFIKPILEKMDGTEELLAKLNREDLLRKQRTFDNGSIPHQIHLGELHAILRRQEDFYPFLKDNREKIEKILTFRIPYYVGPLARGNSRFAWMTRKSEETITPWNFEEVVDKGASAQSFIERMTNFDKNLPNEKVLPKHSLLYEYFTVYNELTKVKYVTEGMRKPAFLSGEQKKAIVDLLFKTNRKVTVKQLKEDYFKKIECFDSVEISGVEDRFNASLGTYHDLLKIIKDKDFLDNEENEDILEDIVLTLTLFEDREMIEERLKTYAHLFDDKVMKQLKRRRYTGWGRLSRKLINGIRDKQSGKTILDFLKSDGFANRNFMQLIHDDSLTFKEDIQKAQVSGQGDSLHEHIANLAGSPAIKKGILQTVKVVDELVKVMGRHKPENIVIEMARENQTTQKGQKNSRERMKRIEEGIKELGSQILKEHPVENTQLQNEKLYLYYLQNGRDMYVDQELDINRLSDYDVDHIVPQSFIKDDSIDNKVLTRSDKNRGKSNNVPSEEVVKKMKNYWRQLLNAKLITQRKFDNLTKAERGGLSELDKAGFIKRQLVETRQITKHVAQILDSRMNTKYDENDKLIREVKVITLKSKLVSDFRKDFQFYKVREINNYHHAHDAYLNAVVGTALIKKYPKLESEFVYGDYKVYDVRKMIAKSEQEIGKATAKYFFYSNIMNFFKTEITLANGEIRKRPLIETNGETGEIVWDKGRDFATVRKVLSMPQVNIVKKTEVQTGGFSKESILPKRNSDKLIARKKDWDPKKYGGFDSPTVAYSVLVVAKVEKGKSKKLKSVKELLGITIMERSSFEKNPIDFLEAKGYKEVRKDLIVKLPKYSLFELENGRKRMLASAGELQKGNELALPSKYVNFLYLASHYEKLKGSPEDNEQKQLFVEQHKHYLDEIIEQISEFSKRVILADANLDKVLSAYNKHRDKPIREQAENIIHLFTLTNLGAPAAFKYFDTTIDRKRYTSTKEVLDATFIHQSITGLYETRIDLSQLGGD

SEQ ID NO: 563 - protein, 1368 aa, Streptococcus pyogenes
MDKKYSIGLDIGTNSVGWAVITDDYKVPSKKFKVLGNTDRHSIKKNLIGALLFDSGEIAEATRLKRTARRRYTRRKNRICYLQEIFSNEMAKVDDSFFHRLEESFLVEEDKKHERHPIFGNIVDEVAYHEKYPTIYHLRKKLVDSTDKADLRLIYLALAHMIKFRGHFLIEGDLNPDNSDVDKLFIQLVQTYNQLFEENPINASGVDAKAILSARLSKSRRLENLIAQLPGEKKNGLFGNLIALSLGLTPNFKSNFDLAEDAKLQLSKDTYDDDLDNLLAQIGDQYADLFLAAKNLSDAILLSDILRLNSEITKAPLSASMIKRYDEHHQDLTLLKALVRQQLPEKYKEIFFDQSKNGYAGYIDGGASQEEFYKFIKPILEKMDGTEELLAKLNREDLLRKQRTFDNGSIPHQIHLGELHAILRRQEDFYPFLKDNREKIEKILTFRIPYYVGPLARGNSRFAWMTRKSEETITPWNFEEVVDKGASAQSFIERMTNFDKNLPNEKVLPKHSLLYEYFTVYNELTKVKYVTEGMRKPAFLSGEQKKAIVDLLFKTNRKVTVKQLKEDYFKKIECFDSVEISGVEDRFNASLGTYHDLLKIIKDKDFLDNEENEDILEDIVLTLTLFEDREMIEERLKTYAHLFDDKVMKQLKRRRYTVWGRLSRKLINGIRDKQSGKTILDFLKSDGFANRNFMQLIHDDSLTFKEDIQKAQVSGQGDSLHEHIANLAGSPAIKKGILQTVKVVDELVKVMGRHKPENIVIEMARENQTTQKGQKNSRERMKRIEEGIKELGSQILKEHPVENTQLQNEKLYLYYLQNGRDMYVDQELDINRLSDYDVDHIVPQSFIKDDSIDNKVLTRSDKNRGKSDNVPSEEVVKKMKNYWRQLLNAKLITQRKFDNLTKAERGGLSELDKAGFIKRQLVETRQITKHVAQILDSRMNTKYDENDKLIREVKVITLKSKLVSDFRKDFQFYKVREINNYHHAHDAYLNAVVGTALIKKYPKLESEFVYGDYKVYDVRKMLAKSEQEIGKATAKYFFYSNIMNFFKTEITLANGEIRKRPLIETNGETGEIVWDKGRDFATVRKVLSMPQVNIVKKTEVQTGGFSKESILPKRNSDKLIARKKDWDPKKYGGFDSPTVAYSVLVVAKVEKGKSKKLKSVKELLGITIMERSSFEKNPIDFLEAKGYKEVRKDLIIKLPKYSLFELENGRKRMLASAGELQKGNELALPSKYVNFLYLASHYEKLKGSPEDNEQKQLFVEQHKHYLDEIIEQISEFSKRVILADANLDKVLSAYNKHRDKPIREQAENIIHLFTLTNLGAPTAFKYFDTTIDRKRYTSTKEVLDATFIHQSITGLYETRIDLSQLGGD

SEQ ID NO: 564 - protein, 1368 aa, Streptococcus pyogenes
MDKKYSIGLDIGTNSVGWAVITDDYKVPSKKFKVLGNTDRHSIKKNLIGALLFDSGETAEATRLKRTARRRYTRRKNRICYLQEIFSNEIAKVDDSFFHRLEESFLVEEDKKHERHPIFGNIVDEVAYHEKYPTIYHLRKKLADSTDKADLRLIYLALAHMIKFRGHFLIEGDLNPDNSDVDKLFIQLVQTYNQLFEENPINASRVDAKAILSARLSKSRRLENLIAQLPGEKRNGLFGNLIALSLGLTPNFKSNFDLAEDAKLQLSKDTYDDDLDNLLAQIGDQYADLFLAAKNLSDAILLSDILRVNTEITKAPLSASMIKRYDEHHQDLTLLKALVRQQLPEKYKEIFFDQSKNGYAGYIDGGASQEEFYKFIKPILEKMDGTEELLAKLNREDLLRKQRTFDNGSIPHQIHLGELHAILRRQEDFYPFLKDNREKIEKILTFRIPYYVGPLARGNSRFAWMTRKSEETITPWNFEEVVDKGASAQSFIERMTNFDKNLPNEKVLPKHSLLYEYFTVYNELTKVKYVTEGMRKPAFLSGEQKKAIVDLLFKTNRKVTVKQLKEDYFKKIECFDSVEISGVEDRFNASLGTYHDLLKIIKDKDFLDNEENEDILEDIVLTLTLFEDREMIEERLKTYAHLFDDKVMKQLKRRRYTGWGRLSRKLINGIRDKQSGKTILDFLKSDGFANRNFMQLIHDDSLTFKEDLQKAQVSGQGDSLHEHIANLAGSPAIKKGILQTVKVVDELVKVMGRHKPENIVIEMARENQTTQKGQKNSRERMKRIEEGIKELGSDILKEYPVETTQLQNEKLYLYYLQNGRDMYVDQELDINRLSDYDVDHIVPQSFLKDDSIDNKVLTRSDKNRGKSDNVPSEEVVKKMKNYWKQLLNAKLITQRKFDNLTKAERGGLSELDKAGFIKRQLVETRQITKHVAQILDSRMNTKYDENDKLIREVRVITLKSKLVSDFRKDFQFYKVREINNYHHAHDAYLNAVVGTALIKKYPKLESEFVYGDYKVYDIRKMIAKSEQEIGKATAKYFFYSNIMNFFKTEITLANGEIRKRPLIETNGETGEIVWDKGRDFATVRKVLSMPQVNIVKKTEVQTGGFSKESILPKRNSDKLIARKKDWDPKKYGGFDSPTVAYSVLVVAKVEKGKSKKLKSVKELVGITIMERSSFEKDPVDFLEAKGYKEVRKDLIIKLPKYSLFELENGRKRMLASAGELQKGNELALPSKYVNFLYLASHYEKLKGSPEDNEQKQLFVEQHKHYLDEIIEQISEFSKRVILADANLDKVLSAYNKHRDKPIREQAENIIHLFTLTNLGAPAAFKCFDTTIGRNRYKSIKEVLDATLIHQSITGLYETRIDLSQLGGD

SEQ ID NO: 565 - protein, 1368 aa, Streptococcus pyogenes [sequence omitted]

SEQ ID NO: 566 - protein, 1368 aa, Streptococcus pyogenes; identical to SEQ ID NO: 560

SEQ ID NO: 567 - protein, 1370 aa, Streptococcus ratti
  Streptococcus ratti FA-1 = DSM 20564
MKKPYSIGLDIGTNSVGWAVITDDYKVPAKKMKVLGNTDKNYIKKNLLGALLFDSGNTAEDRRLKRTARRRYTRRRNRLLYLQDIFSDEMNKVDESFFHRLEDSFLVSEDKRGDHHPIFGNVVDEVKYHEQFPTIYHLRKYLADTPEKADLRLVYLALAHMIKFRGHFLIDDPKLDVKNTDSQELFSQFLTAYDVTQEDSHLADVKINISDIITEKMNKSRKVEALLFHFPSQKKNSFFGNLVSLVFGLLPNFKTNFNLAEDAKLQLSKDSYDEDLENLLGQIGDEYTDVFVAARKLYDSILLSGILTVNDLSTKAILSASMVRRYEEHNKDLAKLKAFVKANFTHDVFKEVFSDASKNGYAGYIEGKTSQEDFYKYVKNLIGKVDGSADFIEKIDREDFLRKQRTFDNGSIPHQVHLAEMKAILRRQGEYYPFLKEHAEKIQQILTFRIPYYVGPLDRHGHSDFAWASFNSEEKVTPWNFEEIIDKNKSAQAFIERMTNQDLYLPNEKVLPKHSPLYEKYTVYNELTKIKYVTETGTAKFFDANLKQEIFDGLFKKERKVTKRKLLTFLEKNFDEFRIVDIQGLDKETETFNASYGIYQDLLKIIKDKAFMDDSENADILEDIVLTLTLFEDREMIKQRLAKYADLFDKKVIDNLARRRYTGWGRLSAKLLNGIRDKRSRKTIMDYLVDDGRSNRNLMQLITDDNLTFKDEIAKAQYSDNSDDLHQVVQDLAGSPAIKKGILQSVKIVDELVKVMGYEPEQIVVEMARENQTTAKGRRNSQQRYKRLEEAIKNLDRDLNYKILKEHPTDNQALQNDRLFLYYLQNGRDMYTGESLDINRLSDYDIDHIIPQAFIKDNSIDNRVLVSSAKNRGKSDDVPSEDVVNRMRPFWNKLLNCGLISQRKYSNLTKKELTPNDKAGFIKRQLVETRQITKHVARILDEHFNKEFDEDKKRIRKVKVVTLKSNLVSNFRKEFELYKVREINDYHHAHDAYLNAVVAKALLMKYPKLEPEFVYGEYPKYNSYRERKTATQRMFFYSNIMNMFKSKVKLADERIIERPMIEVNDETGEIAWDKTKHIATVKKVLSYPQINIVKKVEEQTGGLTNETIYPRGSFDKLLNRKNTLEASKYGGFGSPTVAYCVLVVADSKNENGKVKKLKLGSELLGITILEKNDFENNSLDFLSRKGYQGVQEKKIIKLPKYSLFEFQDGSRRMLSSVMANDNKRGDLQKANEMILPAYLVKLLYHAKHINSVGEPAHKNYINEHCSEFQDLLNYIRQFADKFVDVDKNLSKIRSLSKSMAEYSVSEICSSFVNLLTLTALGAPADFKFFGTTIPRKRYGSPQSILSATLIHQSITGLYETRIDLSKLGED

SEQ ID NO: 568 - protein, 1127 aa, Streptococcus salivarius
MSDLVLGLDIGIGSVGVGILNKVTGEIIHKNSRIFPAAQAENNVERRINRQGRRLTRRKKHRRVRLNHLFEESGLITDFTNVSINLNPYQLRVKGLTDELSNEELFIALKNMVKHRGISYLDDASDDGNSSVGDYAQIVKENSKQLETKTPGQIQLERYQKYGQLRGDFTVEEDGKKHRLINVFPTSAYRAEALRILQTQQEFNPQITDEFINSYLQILTGKRKYYHGPGNEKSRTDYGRYTTKKDSEDEYITLDNIFGILIGKCTFYPEEYRAAKASYTAQEFNLLNDLNNLTVPTETKKLSEEQKNQIITNVKNEKAMGPAKLFKYIAKLLSCDVADIKGYRIDKSDKAEIHTFEAYRKMKTLATIDIEQMERENLDKLAYVLTLNTEKEGIQEALEHEFADGTFSQEQIDELVQFRKANSSIFGKGWHSFSVKLMMELIPELYATSEEQMTILTRLGKQKTTSSSNKTKYIDEKQLTEEIYNPVAAKSVRQAIKIVNAAIKEYGDFDNIVIEMARETNEDDEKKAIQKIQKANKDEKDAAMLKAANQYNGKAELPHSVFHGHKQLATKIRLWHQQGERCLYTGKTISIHDLINNSNQFEIDHILPLSITFDDSLANKVLVYATANQEKGQRTPYQALDSMDDAWSFRELKAFVRDSKALSNKKKEYLLTEEDISKFDVRKKFIERNLVDTRYASRVVLNALQEHFRVHKTDTKVSVVRGQFTSQLRRHWGIEKTRDTYHHHAVDALIIAASSQLNLWKKQKNTLVSYSEDQLLDIETGELISDDEYKESVFKAPYQHFVDTLKSKEFEDSILFSYQVDSKFNRKISDATIYATRQAKVGKDKKDETYVLGKIKDIYSQTGYDAFIKIYKKDKSKFLMYRHDPQTFEKVIEPILENYPNKELNEKGKEVPCNPFLKYKEDHGYIRKYSKKGNGPEIKSLKYYDSKLGNHIDITPKNSNNKVVLQSVSPWRADVYFNKTTGKYEILGLKYADLKFEKGTGTYKISEEKYNDIKIKEGVDSDSEFKFTLYKNDLLLIKDTETKEQQLFRFLSRTMPNVKHYVELKPYDKQKFDDNEELIKILGIVAKGGQCKKGVSKPNISIYKIRTDVLGNQHIIKNEGDKPKLDF

SEQ ID NO: 569 - protein, 1385 aa, Streptococcus salivarius
  Streptococcus salivarius K12
MTKPYSIGLDIGTNSVGWAVITDDYKVPSKKMKVLGNTSKKYIKKNLLGALLFDSGITAEGRRLKRTARRRYTRRRNRILYLQEIFSTEMATLDDAFFQRLDDSFLVPDDKRDSKYPIFGNLVEEKVYHDEFPTIYHLRKHLADSSKKADLRLVYLALAHMIKYRGHFLIEGDFNSKNNDLQKNFQDFLDTYNAIFESDLSLENSKQLEEIVKDKISKSAKKDRILKLFPGEKNSGIFSEFLKLIVGNQADFRKYFNLDEKTSLQFSKESYDEDLETLLGHIGDDYSDVFLKAKKLYDAILLSGILTVTDNGTEAPLSSAMIMRYKEHEEDLALLKAYIRNISLETYNEVFKDNTKNGYAGYIDGKTSQEDFYVYLKRLLAGLEGADYFLEKIDREDFLRKQRTFDNGSIPYQIYLQEMRAILDKQAKFYPFLAKNKERIEKILTFRIPYYVGPLARGNSDFAWSIRKRNEKITPWNFEDVIDKESSAEAFINRMTSFDLYLPEEKVLPKHSLLYENFTVYNELTKVRFIAEGMRDYQFLDSKQKKDIVRLYFKGKRKVTDKDIIEYLHAIDGYDGIELKGIEKQFNSSLSTYHDLLNIINDKEFLDDSSNETIIEEIIHTLTMFEDREMIKQRLSKFDNIFDKSVLKKLSRRHYTGWGKLSAKLINGIRDEKSGNTILDYLIDDGVSNRNFMQLIHDDALSFKKKIKKAQIIGDKDNIKQVVKSLPGSPAIKKGILQSIKIVDELVKVMGREPESIVVEMARENQYTNQGKSNSQQRLKRLEESLKGLGSKILKENVPTRLSKIDNNALQNDRLYLYYLQNGKDMYTGEELDIDRLSNYDIDHIIPQAFLKDDSIDNKVLVSSASNRGKSDDVPSLEVVKKRKTLWYQLLKSKLISQRKFDNLTKAERGGLSQEEKAGFIQRQLVETRQITKHVARLLDERFNNKKDENNRTLRTVKIITLKSSLVSQFRKDFELYKVREINDFHHAHDAYLNAVVASALLKKYPKLEPEFVYGDYPKYNSFRERKSATEKVYFYSNIMNIFKKSIPLADGTVIDRPLIEVNEETGESVWNKVADLNTVRKVLSYSQVNIVKKVEEQNHGLDRGKPKGLFNANLSSKPKPNSKENLVGAKEYLDPKKYGGYAGISNSFAILVKGTIEKGAKKKITNVLEFQGISILDRIYYRKDKLNFLLEKGYKDIELIIELPKYSLFELSDGSRRMLASILSTNNKRGEIHKGNQIFISQKFVKLLYHAKRISSTFNENHRKYVENHKKEFEELFYYILEFNENYVGAKKNGELLKSAFQSWQNHSIDELCSSFIGPTGSERKGLFELTSRGGAADFEFLGVKIPRYRDYTPSSLLKDATLIHQSVTGLYETRIDLGKLGED

SEQ ID NO: 570 - protein, 1135 aa, Streptococcus salivarius
  Streptococcus salivarius PS4
MSDLVLGLDIGIGSVGVGILNKVTGEIIHKNSRIFPAAQAENNLERRTNRQGRRLTRRKKHRRVRLNHLFEESGLITDFTKVSINLNPYQLRVKGLTAELSNEELFIALKNMVKHRGISYLDDASDDGNSSVGDYAQIVKENSKQLETKTPGQIQLERYQKYGQLRGDFTVEEDGRKHRLINVFPTSAYHAEALRILQTQQEFNPQITDEFINSYLEILTGKRKYYHGPGNEKSRTDYGKYTTKKDAQGQYITLNNIFGILIGKCTFYPEEYRAAKASYTAQEFNLLNDLNNLTVPTETKKLSEEQKYQIITYVKNEKAMGPAKLFKYIAKLLACDIADIKGYRIDKSDKAEIHTFEAYRKMKTLETIDIEQIEREKLDKLAYVLTLNTEREGIQEALDHEFADGTFSQEQVDELVQFRKANSSIFGKGWHSFSVKLMMELIPELYATSEEQMTILTRLGKQKTTSSSNKTKYIDEKQLTEEIYNPVVAKSVRQAIKIVNAAIKKYGDFDNIVIEMARETNEDDEKKAIQKIQKANKAEKDAAMRKAANQYNGKAELPHSVFHGHKQLATKIRLWHQQGERCLYTGKTISIHDLINNPNQFEIDHILPLSITFDDSLANKVLVYATANQEKGQRTPYQALDSMDDAWSFRELKAFVRESKALSNKKKEYLLTEEDISKFDVRKKFIERNLVDTRYASRVVLNALQEHFKAHKIDTKVSVVRGQFTSQLRRHWGIDKTRDTYHHHAVDALIIAASSQLNLWKKQKNTLVSYSEDQLLDIETGELISDDEYKESVFKAPYQHFVDTLKSKEFEDSILFSYQVDSKFNRKISDATIYATRQAKVGKDKKDETYVLGKIKDIYALGTKTPSKTGFYKFLDLYNKDKSQFLVYQKDRKTWDEVIEKIMEQYRPFKESDKNGKEVDFNPFEKYRIENGPIRKYSRKGNGPEIKSLKYYASKLGNHIDITPKDSNNKVVLQSVSPWRADVYFNKTTGSYEILGLKYADLQFEKGTGTYRISEEKYNDIKKKEGVDSDSEFKFTLYKNDLLLIKDTETKEQRLFRFLSRSMPNKKHYVELKPYSKDKFEKNESLIEILGSADKSGRCIKGLAKSNLSIFKVRTDVLGNQHIIKNEGDKPKLDF

SEQ ID NO: 571 - protein, 1377 aa, Streptococcus sanguinis
  Streptococcus sanguinis SK115
MKKPYSIGLDIGTNSVGWAVITDDYKVPSKKMKVLGNTDKHFIKKNLIGALLFDEGTTAEDRRLKRTSRRRYTRRKNRLRYLQEIFSEEISKLDSSFFHRLDDSFLVPEDKRGSKYPIFATLEEEKEYHKKFPTIYHLRKHLADSKEKTDLRLIYLALAHMIKYRGHFLYEESFDIKNNDIQKIFNEFISIYDNTFEGSSLSGQNAQVEAIFTDKISKSTKRERVLKLFSDEKSTGLFSEFLKLIVGNQADFKKHFDLEEKAPLQFSKDTYDEDLENLLGQIGDGFADLFLVAKKLYDAILLSGILTVTDPSTKAPLSASMIERYENHQEDLAALKQFIKNNLSEKYAEVFSDQSKDGYAGFIDGKTTQEAFYKYIKNLLSKLEGADYFLNKIEREDFLRKQRTFDNGSIPHQIHLQEMNAILRRQGEHYLFLKENREKIEKILAFRIPYYVGPLARGNRDFAWLTRNSDQAIRPWNFEEVVDKASSAEDFINKMTNYDLYLPEEKVLPKHSLLYETFAVYNELTKVKFIAEGLRDYQFLDSGQKKQIVNQLFKDKRKVTEKDIIHYLHNVDGYDGIELKGIEKQFNASLSTYHDLLKIIKDKEFMDNPKNGEILENIIHTLTIFEDREMIKQRLAQYDTLFDEKVIKALTRRHYTGWGKLSAKLINGIRDKQTGKTILEYLIDDGDCNRNFMQLINDDGLSFKEIIQKAQVVGKTDDVKQVVQEIPGSPAIKKGILQSIKIVDELVKVMGHNPESIVIEMARENQTTAKGKKNSQQRYKRIEDALKNLAPGLDSNILKENPTDNIQLQNDRLFLYYLQNGKDMYTGKAIDINQLSNYDIDHIIPQAFIKDDSLDNRVLTSSKDNRGKSDNVPSIEVVQKRKAFWQQLLDSKLISERKFNNLTKAKRGGLDERDKVGFIKRQLVETRQITKHVAQLLDTRFNTEVNEENQKIRTVKIITLKSNLVSNFRKEFGLYKVREINDYHHAHDAYLNAVVAKAILKKYPKLEPEFVYGDYQKYDLKRYILKSKASNTIDKATEKYFFYSNLLNFFKEKVRYADGTIKKRENIEYSNDTGEIAWNKEKDFATIKKVLSLPQVNIVKKTEEQTVGQNGGLFDNNIVSKKKVVDASKLIPIKSSLSPEKYGGYARPTIAYSVLVIADIEKGKGKAKKLKRIKEIVGITIQDKKKFESNPVTYLEECGYKNINSNLIIKLPKYSLFEFNDGQRRLLASSIELQKGNELILPYHLTALLYHAQRINKISEPIHKQYVEAHQNEFKELLTTIISLSKKYIQKPNVELLLQQAFDQADKDIYQLSESFISLLKLTSFGAPGAFKFLGVEISQSSVRYKPNSQFLDTTLIHQSITGLYETRIDLSKLGED

SEQ ID NO: 572 - protein, 1392 aa, Streptococcus sanguinis
  Streptococcus sanguinis SK330
MENKNYSIGLDIGTNSVGWAVITDDYKVPSKKMKVFGNTDKHFIKKNLIGALLFDEGATAEDRRLKRTARRRYTRRKNRLRYLQEIFSEEISKLDSSFFHRLDDSFLVPKDKRGSKYPIFATLEEEKEYHKKFPTIYHLRKHLADSKEKTDLRLIYLALAHMIKYRGHFLYEESFDIKNNDIQKIFNEFISIYDNTFEGSSLSGQNAQVEAIFTDKISKSAKRERVLKLFSDEKSTSLFSEFLKLIVGNQADFKKHFDLEEKAPLQFSKDTYDEDLENLLGQIGDGFTDLFLVAKKLYDAILLSGILTVTDPSTKAPLSASMIERYESHQKDLAALKQFIKNNLPKRYNEVFSDQSKDGYAGYIDGKTTQEAFYKYIKNLLSKFEGADYFLDKIEREDFLRKQRTFDNGSIPHQIHLQEMNAILRRQGEHYPFLKENREKIEKILTFRIPYYVGPLARGNRDFAWLTRNSDQAIRPWNFEEIVDKASSAEEFINKMTNYDLYLPEEKVLPKHSLLYETFAVYNELTKVKFIAEGLRDYQFLDSGQKKQIVNQLFKEKRKVTEKDIIHYLHNVDGYDGIELKGIEKQFNASLSTYHDLLKIIKDKEFMDDPKNEEILENIVHTLTIFEDREMIKQRLAQYDSIFDEKVIKALTRRHYTGWGKLSAKLINGICDKQTGDTILDYLIDDGKINRNFMQLINDDGLSFKEIIQKAQVVGKTDDVKQVVQELPGSPAIKKGILQSIKIVDELVKVMGYAPESIVIEMARENQTTARGKKNSQQRYKRIEDSLKNLAPGLDSNILKENPTDNIQLQNDRLFLYYLQNGKDMYTGKPLDIDQLSSYDIDHIIPQAFIKDDSIDNRVLTSSKDNRGKSDNVPSLEVVQKRKAFWQQLLDSKLISERKFNNLTKAERGGLDERDKVGFIRRQLVETRQITKHVAQILDASFNTEVNEKNQKIRTVKIITLKSNLVSNFRKEFELYKVREINDYHHAHDAYLNAVVAKAILKKYPKLEPEFVYGDYQKYDLKRYISRFKPSKEIEKATEKYFFYSNLLNFFKEEVHYADGIIVKRENIEYSKDTGEIAWNKEKDFATIKKVLSYPQVNIVKKTEIQTHGLDRGKPKGLFNSNPSPKPSEDSKENLVPIKQGLDPRKYGGYAGISNSYAVLVKAIVEKGAKKQQKTILEFQGISILDKINFENNKENYLLKKRYIEILSTITLPKYSLFEFPDGTRRRLASILSTNNKRGEIHKGNELVLPGKYTTLLYHAKNINKKLEPEHLEYVEKHRNDFAKLLECVLNFNDKYVGALKNGERIRQAFTDWETVDIEKLCFSFIGPENSKNAGLFELTSQGSASDFEFLGVKIPRYRDYAPSSLLKATLIHQSITGLYETRIDLSKLGED

SEQ ID NO: 573 - protein, 1370 aa, Streptococcus sanguinis
  Streptococcus sanguinis SK353
MKKPYSIGLDIGTNSVGWAVVTDDYKVPAKKMRVFGDTDRSHIKKNLLGTLLFDDGNTAESRRLKRTARRRYTRRRNRILYLQEIFTESMNEIDESFFHRLDDSFLVPEDKRGSKYPIFATLQEEKEYHKQFPTIYHLRKQLADSKEKSDVRLIYLALAHMIKYRGHFLYEETFDIKNNDIQKIFNEFINIYDNTFEGSSLSGQNAQVEAIFTDKISKSAKRERVLKLFPDEKSTGLFSEFLKLIVGNQADFKKHFDLEEKAPLQFSKDTYDEELENLLGQIGDDFADLFLIAKKLYDAILLSGILTVTDPSTKAPLSASMIERYENHQKDLAALKQFIKNNLPEKYVEVFSDQSKDGYAGYIDGKTTQEAFYKYIKNLLSKFEGADYFLDKIEREDFLRKQRTFDNGSIPHQIHLQEMNAILRRQGEHYPFLKENREKIEKILTFRIPYYVGPLARDNRDFSWLTRNSDEPIRPWNFEEVVDKARSAEDFIHRMTNYDLYLPEEKVLPKHSLLYETFAVYNELTKVKFIAEGLRDYQFLDSGQKKQIVNQLFKEKRKVTEKDIIHYLHNVDGYDGIELKGIEKQFNANLSTYHDLLKITKDKEFMDDPKNEEILENIVHTLTIFEDREMIKQRLAQYDTLFDEKVIKALTRRHYTGWGKLSAKLINGIRDKQSGKTILDYLIDDDKINRNFMQLINDDGLSFKEIIQKAQVVGKTDDVKQVVQELPGSPAIKKGILQSIKIVDELVKVMGYALESIVIEMARENQTTARGKKNSQQRYKRIEDALKNLAPGLDSNILKENPTDNIQLKNDRLFLYYLQNGKDMYTGKPLDINQLSSYDIDHIIPQAFIKDDSIDNRVLTSSKDNRGKSDNVPSLEVVQKRKAFWQQLLDSKLISERKFNNLTKAERGGLDERDKVGFIRRQLVETQQITKNVAQILDARFNTEVKEKNQKIRTVKIITLKSNLVSNFRKEFGLYKVREINNYHHAHDAYLNAVVAKAILKKYPKLEPEFVYGDYQKYDLKKYISRFKPSKEIEKATEKYFFYSNLLNFFKEEVLYADGTIRKRENIEYSKDTGEIAWDKEKDFATIKKVLSYPQVNIVKKREVQTGGFSKESILPKGNSDKLIPRKTKDILWDTTKYGGFDSPVIAYSILLIADIEKGKAKKLKTVKTLVGITIMEKAAFEENPITFLENKGYHNVRKENILCLPKYSLFELENGRRRLLASAKELQKGNEIVLPVCLTTLLYHSKNLHKLDEPEHLEYIQKHRNEFKDLLNLVSEFSQKYILAEANLEKIKDLYADNEQADIEILANSFINLLTFTALGAPAAFKFFGKDVDRKRYTTVSEILNATLIHQSITGLYETRIDLSKLGEE

SEQ ID NO: 574 - protein, 1421 aa, Streptococcus sanguinis
  Streptococcus sanguinis SK49
MTKFNKNYSIGLDIGVSSVGYAVVTEDYRVPAFKFKVLGNTEKEKIKKNLIGSTTFVSAQPAKGTRVFRVNRRRIDRRNHRITYLRDIFQKEIEKVDKNFYRRLDESFRVLGDKSEDLQIKQPFFGDKELETAYHKKYPTIYHLRKHLADADKNSPVADIREVYMAISHILKYRGHFLTLDKINPNNINMQNSWIDFIESCQEVFDLEISDESKNIADIFKSSENRQEKVKKILPYFQQELLKKDKSIFKQLLQLLFGLKTKFKDCFELEEEPDLNFSKENYDENLENFLGSLEEDFSDVFAKLKVLRDTILLSGMLTYTGATHARFSATMVERYEEHRKDLQRFKFFIKQNLSEQDYLDIFGRKTQNGFDVDKETKGYVGYITNKMVLTNPQKQKTIQQNFYDYISGKITGIEGAEYFLNKISDGTFLRKLRTSDNGAIPNQIHAYELEKIIERQGKDYPFLLENKDKLLSILTFKIPYYVGPLAKGSNSRFAWIKRATSSDILDDNDEDTRNGKIRPWNYQKLINMDETRDAFITNLIGNDIILLNEKVLPKRSLIYEEVMLQNELTRVKYKDKYGKAHFFDSELRQNIINGLFKNNSKRVNAKSLIKYLSDNHKDLNAIEIVSGVEKGKSFNSTLKTYNDLKTIFSEELLDSEIYQKELEEIIKVITVFDDKKSIKNYLTKFFGHLEILDEEKINQLSKLRYSGWGRYSAKLLLDIRDEDTGFNLLQFLRNDEENRNLTKLISDNTLSFEPKIKDIQSKSTIEDDIFDEIKKLAGSPAIKRGILNSIKIVDELVQIIGYPPHNIVIEMARENMTTEEGQKKAKTRKTKLESALKNIENSLLENGKVPHSDEQLQSEKLYLYYLQNGKDMYTLDKTGSPAPLYLDQLDQYEVDHIIPYSFLPIDSIDNKVLTHRENNQQKLNNIPDKETVANMKPFWEKLYNAKLISQTKYQRLTTSERTPDGVLTESMKAGFIERQLVETRQIIKHVARILDNRFSDTKIITLKSQLITNFRNTFHIAKIRELNDYHHAHDAYLAVVVGQTLLKVYPKLAPELIYGHHAHFNRHEENKATLRKHLYSNIMRFFNNPDSKVSKDIWDCNRDLPIIKDVIYNSQINFVKRTMIKKGAFYNQNPVGKFNKQLAANNRYPLKTKALCLDTSIYGGYGPMNSALSIIIIAERFNEKKGKIETVKEFHDIFIIDYEKFNNNPFQFLNDTSENGFLKKNNINRVLGFYRIPKYSLMQKIDGTRMLFESKSNLHKATQFKLTKTQNELFFHMKRLLTKSNLMDLKSKSAIKESQNFILKHKEEFDNISNQLSAFSQKMLGNTTSLKNLIKGYNERKIKEIDIRDETIKYFYDNFIKMFSFVKSGAPKDINDFFDNKCTVARMRPKPDKKLLNATLIHQSITGLYETRIDLSKLGED

SEQ ID NO: 575 - protein, 1026 aa, Streptococcus sp.
  Streptococcus sp. BS35b
MNGLVLGLDIGIASVGVGILEKNSGKIIHANSRLFPAATADNNVERRKNRQARRLNRRKKHRGVRFQDLFEDYGLLTDFSKVSINLNPYRLRVDGLNQQLTNEELFIALKNIVKRRGISYLDDASEDGGAVSSDYGKAVEENRKLLAEQTPGQIQLERFEKYGQVRGDFTVVENGEKRRLINVFSTSAYRKEAEKILRKQQEFNNQITDEFIEDYLKILTGKRKYYHGPGNEKSRTDYGRFRTDGTTLDNIFGVLIGKCTFYPNEYRASKSSYTAQEFNLLNDLNNLTVPTETKKLSEEQKKVIVEYAKEAKTLGASTLLKYIVKMIDASVDQISGYRVDVNNKPEMHTFEVYRKMQSLETISVGELSRNVLDELAHILTLNTEREGIEEAINSKLMGVFSQDQVLELVQFRKNNSSLFSKGWHNFSLKLMMELIPELYETSEEQMTILTRLGKQKSKETSKRTKYIDEKELTEEIYNPVVAKSVRQAIKIINEATKKHGIFDNIVIEMARENNEEDAKKDYIKRQKANQDEKNAAMEKAAFQYNGKKELPGNIFNGHKELATKIRLWHQQGEKCLYTGKTIPISDLIHNQYKYEIDHILPLSLSFDDSLSNKVLVHATANQEKGQRTPFQALDSMDDAWSYREFKSYVKDLKSLSNKKKDYLLTEEDISKIEVKQKFIERNLVDTRYSSRVVLNALQDFYKSHQFDTTISVVRGQFTSQLRRKWGLEKSRETYHHHAVDALIIAASSQLRLWKKQNNPLITYKEGQFIDSQTGEIISLTDDEYKELVFKAPYDHFVDTLHSKTFEDGILFSYQVDSKYNRKISDATIYATRKAKLDKDKSEETYVLGKIKDIYSQAGYDAFIKIYNKDKRKFLMYHKDPQTFEKVIEEILRTYPSKERNDKNKEVPCNPFEKYRQENGPIRKYSKKGNGPEIKCLKYYDNKLGNYIDISPDGSDNQVVLQSLKPWRTDVYFNHQTKKYELMGLKYSDLSFEKGSGKYSISNEKYNSIKRIEGVNEQSEFKFTLYK

SEQ ID NO: 576 - protein, 1139 aa, Streptococcus sp.
  Streptococcus sp. C150
MSDLVLGLDIGIGSVGVGILNKVTGEIIHKNSRIFPAAQAENNLERRTNRQGRRLTRRKKHRRVRLNHLFEESGLITDFTKVSINLNPYQLRVKGLTAELSNEELFIALKNMVKHRGISYLDDASDDGNSSVGDYAQIVKENSKQLETKTPGQIQLERYQKYGQLRGDFTVEEDGRKHRLINVFPTSAYHAEALRILQTQQEFNPQITDEFINSYLEILTGKRKYYHGPGNEKSRTDYGKYTTKKDAQGQYITLNNIFGILIGKCTFYPEEYRAAKASYTAQEFNLLNDLNNLTVPTETKKLSEEQKYQIITYVKNEKAMGPAKLFKYIAKLLSCDVADIKGYRIDKSDKAEIHTFEAYRKMKTLETLDVKKMAREELDKLAYVLTLNTEREGIQEALDHEFADGTFSQEQVDELVQFRKANSSIFGKGWHSFSVKLMMELIPELYATSEEQMTILTRLGKQKTTSSSNKTKYIDEKQLTEEIYNPVVAKSVRQAIKIVNAAIKKYGDFDNIVIEMARETNEDDEKKAIQKIQKANKAEKDAAMRKAANQYNGKAELPHSVFHGHKQLATKIRLWHQQGERCLYTGKTISIHDLINNPNQFEIDHILPLSITFDDSLANKVLVYATANQEKGQRTPYQALDSMDDAWSFRELKAFVRESKALSNKKKEYLLTEEDISKFDVRKKFIERNLVDTRYASRVVLNALQEHFRTHKIDTKVSVVRGQFTSQLRRHWGIEKTRDTYHHHAVDALIIAASSQLNLWKKQKNTLVSYSEDQLLDIETGELISDDEYKESVFKAPYQHFVDTLKSKEFEDSILFSYQVDSKFNRKISDATIYATRKAKLDKEKKEYTYTLGKIKDIYALGTKTPSKTGFYKFLDLYKKDKSQFLMYQKDRRTWDEVIEKILEQYRPFKEKDKNGKEVDFNPFEKYRIENGPIRKYSRKGNGPEIKSLKYYDNLLGRFVDITPSESKNPVALLSLNPWRTDVYYNTETRKYEFLGLKYADLCFEKGGSYGISKVKYNKIREKEGIGKNSEFKFTLYKNDLILIKDTETNRQQIFRFWSRTGKDNPKSFEKHKLELKPYEKTRFEKGEELKVLGKVPPSSNRLQKNMQIENLSIYKVRTDVLGNQHIIKNEGDKPKLDF

SEQ ID NO: 577 - protein, 1377 aa, Streptococcus sp.
  Streptococcus sp. C300
MNNKPYSIGLDIGTNSVGWSVITDDYKVPSKKMKVLGNTDKRFIKKNLIGALLFDEGTTAEARRLKRTARRRYTRRKNRLRYLQEIFAEEMSKVDSSFFHRLDDSFLIPEDKRGSKYPIFATLVEEKEYHKQFPTIYHLRKQLADSKEKADLRLIYLVLAHMIKYRGHFLYEEAFDIKNNDIQKIFNEFISIYDNTFEGSSLSGQNAQVETIFTDKISKSAKRERVLKLFPDEKSTGLFSEFLKLIVGNQADFKKHFDLEEKAPLQFSKDTYDEDLENLLEQIGDDFADLFVAAKKLYDAILLSGILTVTDPSTKAPLSASMIERYENHQKDLAVLKQFIKTNLPEKYVEVFSDQSKDGYAGYIDGKTTQEAFYKYIKNLLSKFDGADYFLDKIEREVFLRKQRTFDNGSIPHQIHLQEMNTILRRQGEHYPFLKENKEKIEKILTFRIPYHVGPLARGNRDFAWLTRNSDQAIRPWNFEEIVDKASSAEDFINKMTNYDLYLPEEKVLPKHSLLYETFAVYNELTKVKFIAEGMRDYQFLDSGQKKKIINQLFKKKRKVTEDDIIDCLQKIDNYDGIELKGIEKQFNASLSTYHDILKIIRDKEFMDDPKNGDILENVIHTLTIFEDREMIKQRLAQYNSIFDEKVIKALSRKHYTGWGKLSAKLIDGIRDKQTGKTILDYLMDDGKSNRNFMQLIKDDELSFTEIIQKAQVVGDTDNLRQVVQNLPGSPAIKKGILQSIKIVDELVKVMGHAPESIVIEMARENQTTARGKKNSQQRYKRIEDSLKNLASGLDSNILKENPTDNIQLQNDRLFLYYLQNGKDMYTGEALNINQLSSYDIDHIIPQAFIKDDSLDNRVLTSSKDNRGKSDNVPSLEVVEKMKAFWQQLLDSKLISERKYNNLTKAERERGGLNELDKVGFIKRQLVETRQITKHVAQILDARFNKEVTEKNKKNRNVKIITLKSNMVSNFRKEFGLYKVREINDYHHAHDAYLNAVVAKAILKKYPKLEPEFVYGDYQKYDLKRYISRSKDPKEVEKATEKYFFYSNLLNFFKEEVHYADGTIVKRENIEYSKDTGEIAWNKEKDFATIKKVLSLPQVNIVKKTEEQTVGQNGGLFDNNIVSKKKVVDASKLIPIKSGLSPEKYGGYARPTIAYSVLVTYKQNNKIKNTMVGIPVLTKLEFERDPNLYLRNLGINNVSHVIKLVKYTVLEFKHKYGTYRRFIVSNQELKRANQIFVTTKQMKLISQYTTLDKNEHDSLLKNNQQLIQSIWNQFLEFMLATDLVNKKQYDELILTNNQTIEECRNIMNRVITTLSFTNINAGQKKIIFDDTLSLPIKRWQFTDSDKMVKKIIESTLIHQSITGLYETRIDLSKLGED

SEQ ID NO: 578 - protein, 1371 aa, Streptococcus sp.
  Streptococcus sp. F0441
MENKNYSIGLDIGTNSVGWSVITDDYKVPSKKMKVLGNTDKHFIKKNLIGALLFDEGTTAEARRLKRTARRRYTRRKNRLRYLQEIFSEEIGKVDSSFFHRLDDSFLIPEDKRGSKYPIFATLAEEKKYHKQFPTIYHLRKQLADSKEKTDLRLIYLALAHMIKYRGHFLYEEAFDIKNNDIQKIFNEFISIYNNTFEGNSLSGQNVQVEAIFTDKISKSAKRERVLKLFPDEKSTGLFSEFLKLIVGNQADFKKHFDLEEKAPLQFSRDTYDEDLENLLGQIGDDFADLFLVAKKLYDAILLSGILTVTNPSTKAPLSASMIERYENHQKDLASLKQFIKNNLPEKYDEVFSDQSEDGYAGYIDGKTTQETFYKYIKNLLSKFEGADYFLDKIEREDFLRKQRTFDNGSIPHQIHLQEMNAILRRQGEHYPFLKENKEKIEKILTFRIPYYVGPLARGNRDFAWLTRNSDQAIRPWNFEEIVDKASSAEDFINKMTNYDLYLPEEKVLPKHSLLYETFAVYNELTKVKFIAEGLRDYQFLDSGQKKQIVTQLFKEKRKVTEKDIIQFLHNVDGYDGIELKGIEKQFNASLSTYHDLLKIIKDKAFMDDAKNEAILENIVHTLTIFEDREMIKQRLAQYDSLFDEKVIKALTRRHYTGWGKLSAKLINGISDKQTGNTILDYLIDDGEINRNFMQLINDDGLSFKEIIQKAQVVGKTNDVKQVVQELPGSPAIKKGILQSIKIVDELVKVMGHAPESIVIEMARENQTTARGKKNSQQRYKRIEDSLKILASGLNSKILKEHPTDNIQLQNDRLFLYYLQNGKDMYTGEALDINQLSSCDIDHIIPQAFIKDDSLDNRVLTSSKDNRGKSDNVPSLEVVDKMKVFWQQLLDSKLISYRKFNNLTKAERGGLNELDKVGFIKRQLVETRQITKHVAQILDARFNKEVTEKDKKNRTVKIITLKSNLVSNFRKEFELYKVREINDYHHAHDAYLNAVVAKAILKKYPKLEPEFVYGDYQKYDLKRYISRSKDPKEIEKATEKYFFYSNLLNFFKEEVHYADGTIVKRENIEYSKDTGEIAWNKEKDFATIKKVLSLPQVNIVKKREVQTGGFSKESILPKGNSDKLIPRKTKDILWDTTKYGGFDSPVIAYSILLIADIEKGKAKKLKTVKTLVGITIMEKDAFEKNPIAFLENKGYHNVCKENILCLPKYSLFELENGRRRLLASAKELQKCNEIVLPVYLTTLLYHSKNVHKLDEPGHLEYIQKHRNEFKDLLNLVSEFSQKYVLADANLEKIKNLYADNEQADIEILANSFINLLTFTALGAPAAFKFFGKDVDRKRYTTVSEILNATLIHQSITGLYETRIDLSKLGED

SEQ ID NO: 579 - protein, 1121 aa, Streptococcus sp.
  Streptococcus sp. GMD6S
MNGLVLGLDIGIASVGVGILEKNSGKIIHANSRLFPAATADNNVERRKNRQARRLHRRKKHRGVRFQDLFEDYGLLTDFSKVSINLNPYRLRVDGLNQQLTNEELFIALKNIVKRRGISYLDDASEDGGTVSSDYGKAVEENRKLLAEQTPGQIQLERFEKYGQVRGDFTVVENGEKRRLINVFSTSAYRKEAERILRKQQEFNSKITDEFIEDCLKILTGKRKYYHGPGNEKSRTDYGRFRTDGTTLDNIFGILIGKCTFYPDEYRASKASYTAQEFNLLNDLNNLTVPTETKKLSEEQKKVIVEYAKEAKTLGASTLLKYIAKMIDASVDQIRGYRVDVNNKPEIHTFEAYRKMQSLETISVGELSRNVLDELAHILTLNTEREGIEEAINTKLKDSFSQDQVLELVQFRKNNSSLFSKGWHNFSLKLMMELIPELYETSEEQMTILTRLGKQKSKEISKRTKYIDEKELTEEIYNPVVAKSVRQAIKIINEATKKHGIFDNIVIEMARENNEEDAKKDYIKRQKANQDEKNAAMEKAAFQYNGKKELPDSIFHGQKELATKIRLWHQQGEKCLYTGKNIPISDLIHNQYKYEIDHILPLSLSFDDSLSNKVLVLATANQEKGQRTPFQALDSMDDAWSYREFKSYVKESKLLGNKKKEYLLTEEDISKIEVKQKFIERNLIDTRYSSRVVLNALQDFYKAHKFDTTISVVRGQFTSQLRRKWGLEKSRETYHHHAVDALIIAASSQLRLWKKQNNPLIAYKEGQFVDSETGEIISLSDDEYKELVFKAPYDHFVDTLSSKTFEDSILFSYQVDSKFNRKISDATIYATRKAKLDKEKSEETYVLGKIKDIYSQAGYDAFIKIYNKDKSKFLMYHKDPQTFEKVIEEILRTYPSKELNDKNKEIPCNPFEKYRQENGPIRKYSKKSNGPEIKSLKYYDNKLGNHIDITPESSDNQVVLQSLKPWRTDVYFNHQTKKYELMGLKYSDLSFEKGSGKYSISNQKYNSIKRIEGIDEQSEFKFTLYKNDLILIKDSENNEQKLFRFNSRNDTAKHYIELKPYDKAKFDGEQELITILGNVAKGGRCLKGLNKSNISIFKVKTDVLGKKHIIKKEGDEPKLKF

SEQ ID NO: 580 - protein, 1375 aa, Streptococcus sp.
  Streptococcus sp. M334
MSNKSYSIGLDIGTNSVGWAVITDDYKVPSKKMKVLGNTDKHFIKKNLIGALLFDEGTTAEDRRLKRTARRRYTRRKNRLRYLQEIFSQEISKVDSSFFHRLDDFFLVPEDKRGSKYPIFATLVEEKEYHKKFPTIYHLRKHLADSKEKTDLRLIYLALAHMIKYRGHFLYEESFDIKNNDIQKIFSEFISIYDNTFEGKSLSGQNAQVEAIFTDKISKSTKRERVLKLFPDEKSTGLFSEFLKLIVGNQADFKKHFDLEEKAPLQFSKDTYDEDLENLLGQIGDDFADLFLVAKKLYDAILLSGILTVKDLSTKAPLSASMIERYENHQKDLAALKQFIQNNLQEKYDEVFSDQSKDGYAGYIDGKTTQEAFYKYIKNLLSKFEGADYFLDKIEREDFLKKQRTFDNGSIPHQIHLQEMNAIIRRQGEHYPFLQENKEKIEKILTFRIPYYVGPLARGNGDFAWLTRNSDQAIRPWNFEEIVDQASSAEDFINKMTNYDLYLPEEKVLPKHSLLYETFAVYNELTKVKFIAEGLTRYQFLDKKQKKDIFDTFFKAENKRKVTEKDIIHYLHNVDGYDGIELKGIEKQFNASLSTYHDLLKIIKDKAFMDDSKNEEILENIIHTLTIFEDREMIKQRLAQYDSLFDEKVIKALTRRHYTGWGKLSAKLINGIRDKKSGKTILDYLIDDGEINRNFMQLIHDDGLSFKEIIQKAQVFGKTNDVKQVVQELPGSPAIKKGILQSIKIVDELVKVMGHAPESIVIEMARENQTTARGKKNSQQRYKRIEDSLKNLASGLDSNILKENPTDNIQLQNDRLFLYYLQNGRDMYTGKPLEINQLSNYDIDHIIPQAFIKDDSLDNRVLTSSKDNRGKSDNVPSLEVVEKMKAFWQQLLDSKLISERKFNNLTKAERERGGLNELDKVGFIKRQLVETRQITKHVAQFLDARFNKEVTEKDKKNRNVKIITLKSNLVSNFRKEFGLYKVREINDYHHAHDAYLNAVLAKAILKKYPKLEPEFVYGDYQKYDLQRYISKSREPKEVEKATQKYFFYSNLLNFFKEEVHYADGTIVKRENIEYSKDTGEIAWNKEKDFATVKKVLSLPQVNIVKKTEVQTGGFSKESILPKGNSDKLIPRKTKEILWDTTKYGGFDSPVIAYSILLIADIEKGKAKKLKTVKTLVGITIMEKATFEKNPITFLENKGYHNVRKENILCLPKYSLFELESGRRRMLASAKELQKGNEIVLPVYLTTLLYHSKNVHKLDEPEHLEYIQKHRYEFKDLLNLVSEFSQKYVLADANLEKIKNLYADNEQADIEILANSFINLLTFTALGAPAAFKFLGKDVDRKRYTTVSEILNATLIHQSITGLYETRIDLSKLGED

SEQ ID NO: 581 - protein, 1371 aa, Streptococcus sp.
  Streptococcus sp. oral taxon 056 str. F0418
MNNNNYSIGLDIGTNSVGWAVITDDYKVPSKKMRVLGNTDKRFIKKNLIGALLFDEGTTAEDRRLKRTARRRYTRRKNRLRYLQEIFAEEMSKVDSSFFHRLDDSFLVPEDKSGSKYPIFATLAEEKEYHKKFPTIYHLRKHLADSKEKADLRLIYLALAHITKYRGHFLYEEAFDIKNNDIQKIFNEFINIYDNTFEGSSLSGQNAQVEAIFTGKISKSVKREHVLKLFPDEKSTGLFSEFLKLIVGNQADFKKHFDLEEKASLQFSKDTYDEDLENLLGQIGDDFADLFLVAKKLYDAILLSGILTVTDPSTKAPLSASMIERYENHQEDLAALKQFIKNNLPEKYAEVFSDQSKDGYAGYIDGKTTQEAFYKYIKNLLSKFEGADYFLDKIEREDFLRKQRTFDNGSIPHQIHLQEMNAILRRQGEHYPLLKENKEKIEKILTFRIPYYVGPLARGNRDFAWLTRNSDQAIRPWNFEEIVDKASSAESFINKMTNYDLYLPEEKVLPKHSLLYETFAVYNELTKVKFIAEGLRDYQFFDSGQKKQIVNQLFKEKRKVTEKDIIHYLHNVDGYDGIELKGIEKQFNASLSTYHDLLKIIKDKEFMDNHKNQEILENIVHTLTIFEDREMIKQRLAQYDSIFDEKVIKALTRRHYTGWGKLSAKLINGICDKKTGKTILDYLIDDGYNNRNFMQLINDDGLSFKEIIQKAQVVGKTDDLTQVVRELSGSPAIKKGILQSIKIVDELVKIMGYAPESIVIEMARENQTTAKGKKNSQQRYKRIEDALKNLAPGLDSTISKENPTDNIQLQNDRLFLYYLQNGKDMYTGEALDINQLSSYDIDHIIPQAFIKDDSLDNRVLTSSKDNRGKSDNVPSLEVVKKRKAFWQQLLDSKLISERKFNNLTKAERGGLDERDKVGFIKRQLVETRQITKHVARILDARFNTEVSEKNQKIRSVKIITLKSNLVSNFRKEFKLYKVREINDYHHAHDAYLNAVVAKAILKKYPKLEPEFVYGDYQKYDLKRYISKSKDPKEVEKATEKYFFYSNLLNFFKEEVHYADGTIVKRENIEYSKDTGEIAWNKEKDFVTIKKVLSYPQVNIVKKREVQTGGFSKESILPKGNSDKLIPRKTKDILWDTTKYGGFDSPVIAYSILLIADIEKGKAKKLKTVKTLVGITIMEKAAFEKNPITFLENKGYHNVRKENILCLPKYSLFELENGRRRLLASAKELQKGNEIVLPVYLTTLLYHSKNVHKLDEPEHLEYIQKHRYEFKDLLNLVSEFSQKYVLAEANLEKIKSLYVDNEQADIEILANSFINLLTFTALGAPAAFKFFGKDVDRKRYTTVSEILNATLIHQSITGLYETRIDLSKLGED

SEQ ID NO: 582 - protein, 1420 aa, Streptococcus sp.
  Streptococcus sp. oral taxon 071 str. 73H25AP
MAKFNKNYSIGLDIGVSSVGYAVVTEDYRVPAFKFKVLGNTEKEKIKKNLIGSTTFVPAQSAQGTRVFRVNRRRIDRRNHRIAYLRDIFQKEIEKIDKNFYRRLDESFRVLGDKSEDIQIKQPFFGNKELETAYHKKYPTIYHLRKHLADADKNSPVADIREVYMVLSHILKYRGHFLTLGKIDPNNINMQNSWIDFIESCQDAFDLEISDESKTIAAIFKSSENRQEKVKQILSYFQQELLKKDKSIFKQLLQLLFGLKTKFKDCFELEEEPDLNFSKENYDENLENLLGALEEDFSDVFAKLKILRDTILLSSMLTYTGATHARFSATMVERYEEHRKDLQRFKSFVKQNLSEQDYLDIFGRKTPTGFDVDKETKGYVGYISNKMVLTNPQKQKTIQQNFYDYISGKITGIEGAECFLNKISDGTFLRKLRTTDNGAIPNQIHAYELEKIIERQGRDYPFLLENKDKLLSILTFKIPYYVGPLAKGNNSRFAWIKRTTSQDVLDDNDEDTRNGKIRPWNYHKLINMDETRDAFIINLIGNDIILLNEKVLPKRSLIYEEVMLQNELTRVKYKDKYGKIHFFNSELRQEIINNLFKTNSKRVSSAMLLSYLENFTNLQAVEIVSGIEKGKSLNSTLKTYNDLKTIFSEELLDSEIYQKELEEIIKVITVFDDKKSIKNYLTKYFGHLEFLNEEKINQLSKLRYTGWGRYSGKLLLGIRDEDTGFNLMQFLRNDDENRNLTQLISDTTLSFDSAIKAIQSKSTVEDDVFEEIKNLAGSPAIKRGILNSIKIVDELVQIIGYPPQNIIIEMARENMTTEEGQKKAKTRKSKLESALKNIEDSVLESGKVPHSDEQLQSEKLYLYYLQNGKDMYSLDKTGSPTPLYRDQLDQYEVDHIIPYSFLPIDSIDNKVLTHRENNQRKLNNIPDKETVANMKPFWEKLYNAKLISQTKYQRLTTSERTPDGVLTESMKAGFIERQLVETRQIIKHVARILDNRFSDTKIITLKSQLVTNFRNTFHIAKIRELNDYHHAHDAYLAVVVGQTLLKAYPKLAPELIYGHHAHFNRHEENKATLRKHLYSNIMRFFNNPDSKVSKDIWDCNRDLPIVKDVIYNSQINFVKRTMIKKGAFYNQNPVGKLNKQIAANNRYPLKTKVSSLDTSIYGGYGPMNSALSIIIIAERFNEKKGKIETVKEFHDIFIIDYEKFNNNPFQFLNNVSEEGFLKKNDLNRVLAFYRISKYSLMQKIDGTRMLFESKSNLHKVTQFKLTKTQNELFFHMKRLLTKSNLMDLKSESAIKESQNFIQTHQNEFDNIADRLSNYSQKMLGETKSLQTLINGYNERPIKQIDNNEETIRYYYDNFIKMFSFVKSGAPKDIINFFNDKYTVPRMRPKPDRKMLDATLIHQSITGLYETRIDLSKLGED

SEQ ID NO: 583 - protein, 1122 aa, Streptococcus suis
  Streptococcus suis 89/1591
MSNGKILGLDIGIASVGVGVIDAQTGEIIHASSRIFPSANAANNAERRTFRGSRRLIRRKKHRIKRLDDLFNDFHINLDGEMSTDNPYVLRVKGLSQKLTVEELYISIKNIMKRRGISYLDDAESDNEAGRSDYAKAIERNRQLLTSKTPGEIQLERLEKYGQLRGNFTIIDEEGQSQQIINVFSTSDYVKEVEKILDCQKMYHKFISDEFCDKLIELLREKRKYYVGPGNEKSRTDYGIYRTDGTTLENLFGILIGKCTFYPDQYRSSRASYTAQEFNFLNDLNNLTVPTETKKLSQEQKEFLVNYAKETSVLGAGKILQQIAKLADCKVEDIRGYRLDNKDKPELHTFETYRAMKGLVPLVDIGVLSREQLDILADILTLNTDFEGIREALKKQLPNVFDEKQVKGLASFRKSKSQLFAKGWHNLSQKIMLEVIPELYATSDEQMTILTRLGKFEKSSVAEYPSSINVDEITDEIYNPVVAKSIRQTIKIINASIKKWGEFDQIVIEMPRDRNEDEEKKRIADGQKANAKEKADSILRAAELYCAGKVLPDYVYNGHNQLATKIRLWYQQGERCIYTGQPISIHDLIHNQNQYEIDHILPLSLTFDDSLSNKVLVLATANQEKAQRTPYNYLKSATSAWSYREFKDYVTKRKGIGKKKCEYLTFEEDINGFEVRSKFIQRNLVDTRYASKVILNALQDYFKISGIQTKVSVVRGQFTSQLRHKWGIEKTRETYHHHAVDALIIAASSQLRLWKKQESPLVVDYQEGRQVDLETGEILELTDEQYKELVYQPPYQGFVNTISSSAFDNEILFSYQVDSKVNRKISDATIYATRNAQLGKDKTEGIYVLGKIKDIYTQAGYEAFLKRYTKDKTSFLMYHKDLDTWEKVIEIILRDYREYDEKGKEIGNPFERYRRENGYVKKYSRKGNGTAIKSLKYYDNKLGNHIDITPENSRNAVVLQSLKPWRTDVYFNKETGKYEFLGIKYSDLSFEKGTGEYGISQEKYDSIKIAEGVAKKSIFKFTLYKQDLLFIKDIENNFGKLLRFTSKNDTSKHYVELKPYDKNKFGTEEPLLPVLGNVAKSGQCIKGLNKSNISIYKVRTDILGYRHFIKQEGEHPQLKFKK

SEQ ID NO: 584 - protein, 1122 aa, Streptococcus suis
MSNGKILGLDIGIASVGVGVIDAQTGEIIHASSRIFPSANAANNAERRTFRGSRRLIRRKKHRIKRLDDLFNDFHINLDGEMSTDNPYVLRVKGLSQKLTVEELYISIKNIMKRRGISYLDDAESDNEAGRSDYAKAIERNRQLLTSKTPGEIQLERLEKYGQLRGNFTIIDEEGQSQQIINVFSTSDYVKEVEKILDCQKMYHKFISDEFCDKLIELLREKRKYYVGPGNEKSRTDYGIYRTDGTTLENLFGILIGKCTFYPDQYRSSRASYTAQEFNFLNDLNNLTVPTETKKLSQEQKEFLVNYAKETSVLGAGKILQQIAKLADCKVEDIRGYRLDNKDKPELHTFETYRAMKGLVPLVDIGVLSREQLDILADILTLNTDFEGIREALKKQLPNVFDEKQVKGLASFRKSKSQLFAKGWHNLSQKIMLEVIPELYATSDEQMTILTRLGKFEKSSVAEYPSSINVDEITDEIYNPVVAKSIRQTIKIINASIKKWDEFDQIVIEMPRDRNEDEEKKRIADGQKANAKEKADSILRAAELYCAGKVLPDYVYNGHNQLATKIRLWYQQGERCIYTGQPISIHDLIHNQNQYEIDHILPLSLTFDDSLSNKVLVLATANQEKAQRTPYNYLKSATSAWSYREFKDYVTKRKGIGKKKCEYLTFEEDINGFEVRSKFIQRNLVDTRYASKVILNALQDYFKISGIQTKVSVVRGQFTSQLRHKWGIEKTRETYHHHAVDALIIAASSQLRLWKKQESPLVVDYQEGRQVDLETGEILELTDEQYKELVYQPPYQGFVNTISSSAFDNEILFSYQVDSKVNRKISDATIYATRNAQLGKDKTEGIYVLGKIKDIYTQAGYEAFLKRYTKDKTSFLMYHKDLDTWEKVIEIILRDYREYDEKGKEIGNPFERYRRENGYVKKYSRKGNGTAIKSLKYYDNKLGNHIDITPENSRNAVVLQSLKPWRTDVYFNKETGKYEFLGIKYSDLSFEKGTGEYGISQEKYDSIKIAEGVAKKSIFKFTLYKQDLLFIKDIENNFGKLLRFTSKNDTSKHYVELKPYDKNKFGTEEPLLPVLGNVAKSGQCIKGLNKSNISIYKVRTDILGYRHFIKQEGEHPQLKFKK

SEQ ID NO: 585 - protein, 1381 aa, Streptococcus suis
MVKKKYAIGIDIGTNSVGWSIVTDDYKVPSKKMKVFGNTEKRYIKKNLLGTLLFDEGNTAENRRLKRTARRRYTRRRNRILYLQEIFAEEINKIDDSFFQRLDDSFLIVEDKQGSKHPIFGTLQEEKEYHKQFPTIYHLRKQLADSSQKADIRLIYLALAHIIKYRGHFLFEGDLKSENKDVQHLFNDFVEMFDKTVEGSYLSENLPNVADVLVEKVSKSRRLENILHYFPNEKKNGLFGNFLALALGLQPNFKTNFELAEDAKIQFSKETYEEDLEELLGKIGDDYADLFIATKSLYDGILLAGILSTTDSTTKAPLSSSMVNRYEEHQKDLALLKNFIHQNLSDSYKEVFNDKLKDGYAGYIEGKTTQENFYRFIKKAIEKIEGSNYFIDKIDREDFLRKQRTFDNGSIPHQIHLQEMHAIIRRQAEFYPFLVENQDKIEKILTFRIPYYVGPLARGKSEFAWLNRKSDEKIRPWNFDEMVDKETSAENFITRMTNYDRYLPDQKVLPKHSLLYEKFAVYNELTKVKFIAEGMRDYQFLDSGQKKDIVKTLFKTKRKVTAKDIKAYLENSNGYAGVELKGLEEQFNASLPTYHDLLKILRDKAFIDAEENQEILEDIVLTLTLFEDREMIRKRLEKYKDILTEEQRKKLERRHYTGWGRLSAKLINGILDKVTRKTILGYLIDDGTSNRNFMQLINDDTLSFVDEIRLAQGSGEAEDYRAEVQNLAGSPAIKKGILQSLKIVDELIEVMGYEPEHIVVEMARENQFTNQGRRNSQQRINRLENALKDFGSKILEEQKPYGVSKVNNIHLQSDRLFLYYLQNGKDMYTDEELDIDHLSEYDIDHIIPQAFIKDDSLDNKVLTKSAKNRGKSDDVPSMEIVHNRKNFWRQLLKSKLISQRKFDNLTKAERGGLTNEDKARFIQRQLVETRQITKHVARMLDTRFNTKLDEAGNRIRDPKVNIITLKSNLVSQFRKDYQLYKIREINNYHHAHDAYINAVVATALLKKYPQLAPEFVYGEYPTYNSYNSRKSATEKVLFYSNIMNFFKRIVVHSKTGEVRIRPVIEVNKETGEIVWDKKSDFRTVRKVLSYPQVNVVKKTEVQNHGLDRGKPKGFYNANLSPRPKEGSVENLVPAKQSFDTKRYGGYAGISNSYAVLVNGIIEKGKKKSKAEVTEFQGISILARKDFDKNPKQYLLNLGYKDIKSIIKLPKYSLFELENGSRRMLASILSTNNKRGEIHKGNEMYLPDKFVTLLYHAMRVNRTLEPGHKKYVETHRHVFDELLIYILEYNEKIVGAKANGKRIVEAYSARKDTDNLEELCNSFINLLNLTALGSAVDFEFLGTKIPRYRDYTPSSLLKATLIHQSVTGLYETRIDLSKLGGD

SEQ ID NO: 586 - protein, 1122 aa, Streptococcus suis; identical to SEQ ID NO: 583

SEQ ID NO: 587 - protein, 1388 aa, Streptococcus thermophilus
MTKPYSIGLDIGTNSVGWAVITDNYKVPSKKMKVLGNTSKKYIKKNLLGVLLFDSGITAEGRRLKRTARRRYTRRRNRILYLQEIFSTEMATLDDAFFQRLDDSFLVPDDKRDSKYPIFGNLVEEKVYHDEFPTIYHLRKYLADSTKKADLRLVYLALAHMIKYRGHFLIEGEFNSKNNDIQKNFQDFLDTYNAIFESDLSLENSKQLEEIVKDKISKLEKKDRILKLFPGEKNSGIFSEFLKLIVGNQADFRKCFNLDEKASLHFSKESYDEDLETLLGYIGDDYSDVFLKAKKLYDAILLSGFLTVTDNETEAPLSSAMIKRYNEHKEDLALLKEYIRNISLKTYNEVFKDDTKNGYAGYIDGKTNQEDFYVYLKNLLAEFEGADYFLEKIDREDFLRKQRTFDNGSIPYQIHLQEMRAILDKQAKFYPFLAKNKERIEKILTFRIPYYVGPLARGNSDFAWSIRKRNEKITPWNFEDVIDKESSAEAFINRMTSFDLYLPEEKVLPKHSLLYETFNVYNELTKVRFIAESMRDYQFLDSKQKKDIVRLYFKDKRKVTDKDIIEYLHAIYGYDGIELKGIEKQFNSSLSTYHDLLNIINDKEFLDDSSNEAIIEEIIHTLTIFEDREMIKQRLSKFENIFDKSVLKKLSRRHYTGWGKLSAKLINGIRDEKSGNTILDYLIDDGISNRNFMQLIHDDALSFKKKIQKAQIIGDEDKGNIKEVVKSLPGSPAIKKGILQSIKIVDELVKVMGGRKPESIVVEMARENQYTNQGKSNSQQRLKRLEKSLKELGSKILKENIPAKLSKIDNNALQNDRLYLYYLQNGKDMYTGDDLDIDRLSNYDIDHIIPQAFLKDNSIDNKVLVSSASNRGKSDDFPSLEVVKKRKTFWYQLLKSKLISQRKFDNLTKAERGGLLPEDKAGFIQRQLVETRQITKHVARLLDEKFNNKKDENNRAVRTVKIITLKSTLVSQFRKDFELYKVREINDFHHAHDAYLNAVIASALLKKYPKLEPEFVYGDYPKYNSFRERKSATEKVYFYSNIMNIFKKSISLADGRVIERPLIEVNEETGESVWNKESDLATVRRVLSYPQVNVVKKVEEQNHGLDRGKPKGLFNANLSSKPKPNSNENLVGAKEYLDPKKYGGYAGISNSFAVLVKGTIEKGAKKKITNVLEFQGISILDRINYRKDKLNFLLEKGYKDIELIIELPKYSLFELSDGSRRMLASILSTNNKRGEIHKGNQIFLSQKFVKLLYHAKRISNTINENHRKYVENHKKEFEELFYYILEFNENYVGAKKNGKLLNSAFQSWQNHSIDELCSSFIGPTGSERKGLFELTSRGSAADFEFLGVKIPRYRDYTPSSLLKDATLIHQSVTGLYETRIDLAKLGEG

SEQ ID NO: 588 - protein, 1128 aa, Streptococcus thermophilus
MSDLVLGLDIGIGSVGVGILNKVTGEIIHKNSRIFPAAQAENNLVRRTNRQGRRLTRRKKHRIVRLNRLFEESGLITDFTKISINLNPYQLRVKGLTDELSNEELFIALKNMVKHRGISYLDDASDDGNSSVGDYAQIVKENSKQLETKTPGQIQLERYQTYGQLRGDFTVEKDGKKHRLINVFPTSAYRSEALRILQTQQEFNPQITDEFINRYLEILTGKRKYYHGPGNEKSRTDYGRYRTSGETLDNIFGILIGKCTFYPEEFRAAKASYTAQEFNLLNDLNNLTVPTETKKLSKEQKNQIINYVKNEKAMGPAKLFKYIAKLLSCDVADIKGYRIDKSGKAEIHTFEAYRKMKTLETLDIEQMDRETLDKLAYVLTLNTEREGIQEALEHEFADGSFSQKQVDELVQFRKANSSIFGKGWHNFSVKLMMELIPELYETSEEQMTILTRLGKQKRLRLQIKQNISNKTKYIDEKLLTEEIYNPVVAKSVRQAIKIVNAAIKEYGDFDNIVIEMARETNEDDEKKAIQKIQKANKDEKDAAMLKAANQYNGKAELPHSVFHGHKQLATKIRLWHQQGERCLYTGKTISIHDLINNPNQFEVDHILPLSITFDDSLANKVLVYATANQEKGQRTPYQALDSMDDAWSFRELKAFVRESKTLSNKKKEYLLTEEDISKFDVRKKFIERNLVDTRYASRVVLNALQEHFRAHKIDTKVSVVRGQFTSQLRRHWGIEKTRDTYHHHAVDALIIAASSQLNLWKKQKNTLVSYSEEQLLDIETGELISDDEYKESVFKAPYQHFVDTLKSKEFEDSILFSYQVDSKFNRKISDATIYATRQAKVGKDKKDETYVLGKIKDIYTQDGYDAFMKIYKKDKSKFLMYRHDPQTFEKVIEPILENYPNKQMNEKGKEVPCNPFLKYKEEHGYIRKYSKKGNGPEIKSLKYYDSKLLGNPIDITPENSKNKVVLQSLKPWRTDVYFNKATGKYEILGLKYADLQFEKGTGTYKISQEKYNDIKKKEGVDSDSEFKFTLYKNDLLLVKDTETKEQQLFRFLSRTLPKQKHYVELKPYDKQKFEGGEALIKVLGNVANGGQCIKGLAKSNISIYKVRTDVLGNQHIIKNEGDKPKLDF

SEQ ID NO: 589 - protein, 1121 aa, Streptococcus thermophilus
MSDLVLGLDIGIGSVGVGILNKVTGEIIHKNSRIFPAAQAENNLVRRTNRQGRRLTRRKKHRIVRLNRLFEESGLITDFTKISINLNPYQLRVKGLTDELSNEELFIALKNMVKHRGISYLDDASDDGNSSVGDYAQIVKENSKQLETKTPGQIQLERYQTYGQLRGDFTVEKDGKKHRLINVFPTSAYRSEALRILQTQQEFNPQITDEFINRYLEILTGKRKYYHGPGNEKSRTDYGRYRTSGETLDNIFGILIGKCTFYPDEFRAAKASYTAQEFNLLNDLNNLTVPTETKKLSKEQKNQIINYVKNEKAMGPAKLFKYIAKLLSCDVADIKEYRIDKSGKAEIHTFEAYRKMKTLETLDIEQMDRETLDKLAYVLTLNTEREGIQEALEHEFADGSFSQKQVDELVQFRKANSSIFGKGWHNFSVKLMMELIPELYETSEEQMTILTRLGKQKTTSSSNKTKYIDEKLLTEEIYNPVVAKSVRQAIKIVNAAIKEYGDFDNIVIEMARETNEDDEKKAIQKIQKANKDEKDAAMLKAANQYNGKAELPHSVFHGHKQLATKIRLWHQQGERCLYTGKTISIHDLINNSNQFEVDHILPLSITFDDSLANKVLVYATANQEKGQRTPYQALDSMDDAWSFRELKAFVRESKTLSNKKKEYLLTEEDISKFDVRKKFIERNLVDTRYASRVVLNALQEHFRAHKIDTKVSVVRGQFTSQLRRHWGIEKTRDTYHHHAVDALIIAASIQLNLWKKQKNTLVSYSEDQLLDIETGELISDDEYKESVFKAPYQHFVDTLKSKEFEDSILFSYQVDSKFNRKISDATIYATRQAKVGKDKADETYVLGKIKDIYTQDGYDAFMKIYKKDKSKFLMYRHDPQTFEKVIEPILENYPNKQINEKGKEVPVNPFLKYKEEHGYIRKYSKKGNGPEIKSLKYYDSKLGNHIDITPKDSNNKVVLQSVSPWRADVYFNKTTGKYEILGLKYADLQFEKGTGTYKISQEKYNDIKKKEGVDSDSEFKFTLYKNDLLLVKDTETKEQQLFRFLSRTMPKQKHYVELKPYDKQKFEGGEALIKVLGNVANSGQCKKGLGKSNISIYKVRTDVLGNQHIIKNEGDKPKLDF

SEQ ID NO: 590 - protein, 1388 aa, Streptococcus thermophilus
MTKPYSIGLDIGTNSVGWAVTTDNYKVPSKKMKVLGNTSKKYIKKNLLGVLLFDSGITAEGRRLKRTARRRYTRRRNRILYLQEIFSTEMATLDDAFFQRLDDSFLVPDDKRDSKYPIFGNLVEEKAYHDEFPTIYHLRKYLADSTKKADLRLVYLALAHMIKYRGHFLIEGEFNSKNNDIQKNFQDFLDTYNAIFESDLSLENSKQLEEIVKDKISKLEKKDRILKLFPGEKNSGIFSEFLKLIVGNQADFRKCFNLDEKASLHFSKESYDEDLETLLGYIGDDYSDVFLKAKKLYDAILLSGFLTVTDNETEAPLSSAMIKRYNEHKEDLALLKEYIRNISLKTYNEVFKDDTKNGYAGYIDGKTNQEDFYVYLKKLLAEFEGADYFLEKIDREDFLRKQRTFDNGSIPYQIHLQEMRAILDKQAKFYPFLAKNKERIEKILTFRIPYYVGPLARGNSDFAWSIRKRNEKITPWNFEDVIDKESSAEAFINRMTSFDLYLPEEKVLPKHSLLYETFNVYNELTKVRFIAESMRDYQFLDSKQKKDIVRLYFKDKRKVTDKDIIEYLHAIYGYDGIELKGIEKQFNSSLSTYHDLLNIINDKEFLDDSSNEAIIEEIIHTLTIFEDREMIKQRLSKFENIFDKSVLKKLSRRHYTGWGKLSAKLINGIRDEKSGNTILDYLIDDGISNRNFMQLIHDDALSFKKKIQKAQIIGDEDKGNIKEVVKSLPGSPAIKKGILQSIKIVDELVKVMGGRKPESIVVEMARENQYTNQGKSNSQQRLKRLEKSLKELGSKILKENIPAKLSKIDNNALQNDRLYLYYLQNGKDMYTGDDLDIDRLSNYDIDHIIPQAFLKDNSIDNKVLVSSASNRGKSDDVPSLEVVKKRKTFWYQLLKSKLISQRKFDNLTKAERGGLSPEDKAGFIQRQLVETRQITKHVARLLDEKFNNKKDENNRAVRTVKIITLKSTLVSQFRKDFELYKVREINDFHHAHDAYLNAVVASALLKKYPKLEPEFVYGDYPKYNSFRERKSATEKVYFYSNIMNIFKKSISLADGRVIERPLIEVNEETGESVWNKESDLATVRRVLSYPQVNVVKKVEEQNHGLDRGKPKGLFNANLSSKPKPNSNENLVGAKEYLDPKKYGGYAGISNSFTVLVKGTIEKGAKKKITNVLEFQGISILDRINYRKDKLNFLLEKGYKDIELIIELPKYSLFELSDGSRRMLASILSTNNKRGEIHKGNQIFLSQKFVKLLYHAKRISNTINENHRKYVENHKKEFEELFYYILEFNENYVGAKKNGKLLNSAFQSWQNHSIDELCSSFIGPTGSERKGLFELTSRGSAADFEFLGVKIPRYRDYTPSSLLKDATLIHQSVTGLYETRIDLAKLGEG

SEQ ID NO: 591 - protein, 1121 aa, Streptococcus thermophilus
MSDLVLGLDIGIGSVGVGILNKVTGEIIHKNSRIFPAAQAENNLVRRTNRQGRRLARRKKHRRVRLNRLFEESGLITDFTKISINLNPYQLRVKGLTDELSNEELFIALKNMVKHRGISYLDDASDDGNSSVGDYAQIVKENSKQLETKTPGQIQLERYQTYGQLRGDFTVEKDGKKHRLINVFPTSAYRSEALRILQTQQEFNPQITDEFINRYLEILTGKRKYYHGPGNEKSRTDYGRYRTSGETLDNIFGILIGKCTFYPDEFRAAKASYTAQEFNLLNDLNNLTVPTETKKLSKEQKNQIINYVKNEKAMGPAKLFKYIAKLLSCDVADIKGYRIDKSGKAEIHTFEAYRKMKTLETLDIEQMDRETLDKLAYVLTLNTEREGIQEALEHEFADGSFSQKQVDELVQFRKANSSIFGKGWHNFSVKLMMELIPELYETSEEQMTILTRLGKQKTTSSSNKTKYIDEKLLTEEIYNPVVAKSVRQAIKIVNAAIKEYGDFDNIVIEMARETNEDDEKKAIQKIQKANKDEKDAAMLKAANQYNGKAELPHSVFHGHKQLATKIRLWHQQGERCLYTGKTISIHDLINNSNQFEVDHILPLSITFDDSLANKVLVYATANQEKGQRTPYQALDSMDDAWSFRELKAFVRESKTLSNKKKEYLLTEEDISKFDVRKKFIERNLVDTRYASRVVLNALQEHFRAHKIDTKVSVVRGQFTSQLRRHWGIEKTRDTYHHHAVDALIIAASSQLNLWKKQKNTLVSYSEDQLLDIETGELISDDEYKESVFKAPYQHFVDTLKSKEFEDSILFSYQVDSKFNRKISDATIYATRQAKVGKDKADETYVLGKIKDIYTQDGYDAFMKIYKKDKSKFLMYRHDPQTFEKVIEPILENYPNKQINEKGKEVPCNPFLKYKEEHGYIRKYSKKGNGPEIKSLKYYDSKLGNHIDITPKDSNNKVVLQSVSPWRADVYFNKTTGKYEILGLKYADLQFEKGTGTYKISQEKYNDIKKKEGVDSDSEFKFTLYKNDLLLVKDTETKEQQLFRFLSRTMPKQKHYVELKPYDKQKFEGGEALIKVLGNVANSGQCKKGLGKSNISIYKVRTDVLGNQHIIKNEGDKPKLDF

SEQ ID NO: 592 - protein, 1122 aa, Streptococcus thermophilus
MSDLVLGLDIGIGSVGVGILNKVTGEIIHKNSRIFPAAQAENNLVRRTNRQGRRLTRRKKHRIVRLNRLFEESGLITDFTKISINLNPYQLRVKGLTDELSNEELFIALKNMVKHRGISYLDDASDDGNSSVGDYAQIVKENSKQLETKTPGQIQLERYQTYGQLRGDFTVEKDGKKHRLINVFPTSAYRSEALRILQTQQEFNSQITDEFINRYLEILTGKRKYYHGPGNEKSRTDYGRYRTNGETLDNIFGILIGKCTFYPDEFRAAKASYTAQEFNLLNDLNNLTVPTETKKLSKEQKNQIINYVKNEKVMGPAKLFKYIAKLLSCDVADIKGHRIDKSGKAEIHTFEAYRKMKTLETLDIEQMDRETLDKLAYVLTLNTEREGIQEALEHEFADGSFSQKQVDELVQFRKANSSIFGKGWHNFSVKLMMELIPELYETSEEQMTILTRLGKQKTTSSSNKTKYIDEKLLTEEIYNPVVAKSVRQAIKIVNAAIKEYGDFDNIVIEMARETNEDDEKKAIQKIQKANKDEKDAAMLKAANQYNGKAELPHSVFHGHKQLATKIRLWHQQGERCLYTGKTISIHDLINNPNQFEVDHILPLSITFDDSLANKVLVYATANQEKGQRTPYQALDSMDDAWSFRELKAFVRESKTLSNKKKEYLLTEEDISKFDVRKKFIERNLVDTRYASRVVLNALQEHFRAHKIDTKVSVVRGQFTSQLRRHWGIEKTRDTYHHHAVDALIIAASSQLNLWKKQKNTLVSYSEEQLLDIETGELISDDEYKESVFKAPYQHFVDTLKSKEFEDSILFSYQVDSKFNRKISDATIYATRQAKVGKDKKDETYVLGKIKDIYTQDGYDAFMKIYKKDKSKFLMYRHDPQTFEKVIEPILENYPNKEMNEKGKEVPCNPFLKYKEEHGYIRKYSKKGNGPEIKSLKYYDSKLLGNPIDITPENSKNKVVLQSLKPWRTDVYFNKNTGKYEILGLKYADLQFEKKTGTYKISQEKYNGIMKEEGVDSDSEFKFTLYKNDLLLVKDTETKEQQLFRFLSRTMPNVKYYVELKPYSKDKFEKNESLIEILGSADKSGRCIKGLGKSNISIYKVRTDVLGNQHIIKNEGDKPKLDF

SEQ ID NO: 593 - protein, 1388 aa, Streptococcus thermophilus
MTKPYSIGLDIGTNSVGWAVITDNYKVPSKKMKVLGNTSKKYIKKNLLGVLLFDSGITAEGRRLKRTARRRYTRRRNRILYLQEIFSTEMATLDDAFFQRLDDSFLVPDDKRDSKYPIFGNLVEEKAYHDEFPTIYHLRKYLADSTKKADLRLVYLALAHMIKYRGHFLIEGEFNSKNNDIQKNFQDFLDTYNAIFESDLSLENSKQLEEIVKDKISKLEKKDRILKLFPGEKNSGIFSEFLKLIVGNQADFRKCFNLDEKASLHFSKESYDEDLETLLGYIGDDYSDVFLKAKKLYDAILLSGFLTVTDNETEAPLSSAMIKRYNEHKEDLALLKEYIRNISLKTYNEVFKDDTKNGYAGYIDGKTNQEDFYVYLKNLLAEFEGADYFLEKIDREDFLRKQRTFDNGSIPYQIHLQEMRAILDKQAKFYPFLAKNKERIEKILTFRIPYYVGPLARGNSDFAWSIRKRNEKITPWNFEDVIDKESSAEAFINRMTSFDLYLPEEKVLPKHSLLYETFNVYNELTKVRFIAESMRDYQFLDSKQKKDIVRLYFKDKRKVTDKDIIEYLHAIYGYDGIELKGIEKQFNSSLSTYHDLLNIINDKEFLDDSSNEAIIEEIIHTLTIFEDREMIKQRLSKFENIFDKSVLKKLSRRHYTGWGKLSAKLINGIRDEKSGNTILDYLIDDGISNRNFMQLIHDDALSFKKKIQKAQIIGDEDKGNIKEVVKSLPGSPAIKKGILQSIKIVDELVKVMGGRKPESIVVEMARENQYTNQGKSNSQQRLKRLEKSLKELGSKILKENIPAKLSKIDNNALQNDRLYLYYLQNGKDMYTGDDLDIDRLSNYDIDHIIPQAFLKDNSIDNKVLVSSASNRGKSDDFPSLEVVKKRKTFWYQLLKSKLISQRKFDNLTKAERGGLLPEDKAGFIQRQLVETRQITKHVARLLDEKFNNKKDENNRAVRTVKIITLKSTLVSQFRKDFELYKVREINDFHHAHDAYLNAVIASALLKKYPKLEPEFVYGDYPKYNSFRERKSATEKVYFYSNIMNIFKKSISLADGRVIERPLIEVNEETGESVWNKESDLATVRRVLSYPQVNVVKKVEEQNHGLDRGKPKGLFNANLSSKPKPNSNENLVGAKEYLDPKKYGGYAGISNSFAVLVKGTIEKGAKKKITNVLEFQGISILDRINYRKDKLNFLLEKGYKDIELIIELPKYSLFELSDGSRRMLASILSTNNKRGEIHKGNQIFLSQKFVKLLYHAKRISNTINENHRKYVENHKKEFEELFYYILEFNENYVGAKKNGKLLNSAFQSWQNHSIDELCSSFIGPTGSERKGLFELTSRGSAADFEFLGVKIPRYRDYTPSSLLKDATLIHQSVTGLYETRIDLAKLGEG

SEQ ID NO: 594 - protein, 1121 aa, Streptococcus thermophilus
MSDLVLGLDIGIGSVGVGILNKVTGEIIHKNSRIFPAAQAENNLVRRTNRQGRRLTRRKKHRRVRLNRLFEESGLITDFTKISINLNPYQLRVKGLTDELSNEELFIALKNMVKHRGISYLDDASDDGNSSVGDYAQIVKENSKQLETKTPGQIQLERYQTYGQLRGDFTVEKDGKKHRLINVFPTSAYRSEALRILQTQQEFNPQITDEFVNRYLEILTGKRKYYHGPGNEKSRTDYGRYRTNGETLDNIFGILIGKCTFYPEEFRAAKASYTAQEFNLLNDLNNLTVPTETKKLSKEQKNQIINYVKNEKAMGPAKLFKYIAKLLSCDVADIKGYRIDKSGKAEIHTFEAYRKMKTLETLDIEQMDRETLDKLAYVLTLNTEREGIQEALEHEFADGSFSQKQVDELVQFRKANSSIFGKGWHNFSVKLMMELIPELYETSEEQMTILKRLGKQKTTSSSNKTKYIDEKLLTEEIYNPVVAKSIRQAIKIVNAAIKEYGDFDNIVIEMARETNEDDEKKAIQKIQKANKDEKDAAMLKAANQYNGKAELPHSVFHGHKQLATKIRLWHQQGERCLYTGKTISIHDLINNPNQFEVDHILPLSITFDDSLANKVLVYATANQEKGQRTPYQALDSMDDAWSFRELKAFVRESKTLSNKKKEYLLTEEDISKFDVRKKFIERNLVDTRYASRVVLNALQEHFRAHKIDTKVSVVRGQFTSQLRRHWGIEKTRDTYHHHAVDALIIAASSQLNLWKKQKNTLVSYSEDQLLDIETGELISDDEYKESVFKAPYQHFVDTLKSKEFEDSILFSYQVDSKFNRKISDATIYATRQAKVGKDKKDETYVLGKIKDIYTQDGYDAFMKIYKKDKSKFLMYRHDPQTFEKVIEPILENYPNKEMNEKGKEVPCNPFLKYKEEHGYIRKYSKKGNDPEIKSLKYYDSKLGNHIDITPKDSNNKVVLQSVSPWRADVYFNKTTGKYEILGLKYADLQFEKGTGTYKISQEKYNDIKKKEGVDSDSEFKFTLYKNDLLLVKDTETKEQQLFRFLSRTMPKQKHYVELKPYDKQKFEGGEALIKVLGNVANSGQCKKGLGKSNISIYKVRTDVLGNQHIIKNEGDKPKLDF

SEQ ID NO: 595 - protein, 1122 aa, Streptococcus thermophilus
  Streptococcus thermophilus MTCC 5460
MSDLVLGLDIGIGSVGVGILNKVTGEIIHKNSRIFPAAQAENNVERRTNRQGRRLTRRKKHRRVRLNRLFEESGLITDFTKISINLNPYQLRVRGLTDELSNEELFIALKNMVKHRGISYLDDASDDGNSSVGDYAQIVKENSKQLETKTPGQIQLERYQTYGQLRGDFTVEKDGKKHRLINVFPTSAYRSEALRILQTQQEFNSQITDEFINRYLEILTGKRKYYHGPGNEKSRTDYGRYRTSGETLDNIFGILIGKCTFYPEEFRAAKASYTAQEFNLLNDLNNLTVPTETKKLSKEQKNQIINYVKNEKAMGPAKLFKYIAKLLSCDVADIKGYRIDKSGKAEIHTFEAYRKMKTLETLDIEQMDRETLDKLAYVLTLNTEREGIQEALEHEFADGSFSQKQVDELVQFRKASSSIFGKGWHNFSVKLMMELIPELYETSEEQMTILTRLGKQKTTSSSNKTKYIDEKLLTEEIYNPVVAKSVRQAIKIVNAAIKEYGDFDNIVIEMARETNEDDEKKAIQKIQKANKDEKDAAMLKAANQYNGKAELPHSVFHGHKQLATKIRLWHQQGERCLYTGKTISIHDLINNPNQFEVDHILPLSITFDDSLANKVLVYATANQEKGQRTPYQALDSMDDAWSFRELKAFVRESKTLSNKKKEYLLTEEDISKFDVRKKFIERNLVDTRYASRVVLNALQEHFRAHKIDTKVSVVRGQFTSQLRRHWGIEKTRDTYHHHAVDALIIAASSQLNLWKKQKNTLVSYSEDQLLDIETGELISDDEYKESVFKAPYQHFVDTLKSKEFEDSILFSYQVDSKFNRKLSDATIYATRQAKVGKDKKDETYVLGKIKDIYTQDGYDAFMKIYKKDKSKFLMYRHDPQTFEKVIEPILENYPNKEMNEKGKEVPCNPFLKYKEEHGYIRKYSKKGNGPEIKSLKYYDSKLLGNPIDITPENSKNKVVLQSLKPWRADVYFNKTTGKYEILGLKYADLQFEKKTGTYKISQEKYNGIMKEEGVDSDSEFKFTLYKNDLLLVKDTETKEQQLFRFLSRTMPNVKYYVELKPYSKDKFEKNESLIEILGSADKSGRCIKGLGKSNISIYKVRTDVLGNQHIIKNEGDKPKLDF

SEQ ID NO: 596 - protein, 1121 aa, Streptococcus thermophilus
MSDLVLGLDIGIGSVGVGILNKVTGEIIHKNSRIFPAAQAENNLVRRTNRQGRRLTRRKKHRIVRLNRLFEESGLITDFTKISINLNPYQLRVKGLTDELSNEELFIALKNMVKHRGISYLDDASDDGNSSVGDYAQIVKENSKQLETKTPGQIQLERYQTYGQLRGDFTVEKDGKKHRLINVFPTSAYRSEALRILQTQQEFNPQITDEFINRYLEILTGKRKYYHGPGNEKSRTDYGRYRTSGETLDNIFGILIGKCTFYPDEFRAAKASYTAQEFNLLNDLNNLTVPTETKKLSKEQKNQIINYVKNEKAMGPAKLFKYIAKLLSCDVADIKGYRIDKSGKAEIHTFEAYRKMKTLETLDIEQMDRETLDKLAYVLTLNTEREGIQEALEHEFADGSFSQKQVDELVQFRKANSSIFGKGWHNFSVKLMMELIPELYETSEEQMTILTRLGKQKTTSSSNKTKYIDEKLLTEEIYNPVVAKSVRQAIKIVNAAIKEYGDFDNIVIEMARETNEDDEKKAIQKIQKANKDEKDAAMLKAANQYNGKAELPHSVFHGHKQLATKIRLWHQQGERCLYTGKTISIHDLINNSNQFEVDHILPLSITFDDSLANKVLVYATANQEKGQRTPYQALDSMDDAWSFRELKAFVRESKTLSNKKKEYLLTEEDISKFDVRKKFIERNLVDTRYASRVVLNALQEHFRAHKIDTKVSVVRGQFTSQLRRHWGIEKTRDTYHHHAVDALIIAASSQLNLWKKQKNTLVSYSEDQLLDIETGELISDDEYKESVFKAPYQHFVDTLKSKEFEDSILFSYQVDSKFNRKISDATIYATRQAKVGKDKADETYVLGKIKDIYTQDGYDAFMKIYKKDKSKFLMYRHDPQTFEKVIEPILENYPNKQMNEKGKEVPCNPFLKYKEEHGYIRKYSKKGNGPEIKSLKYYDSKLGNHIDITPKDSNNKVVLQSVSPWRADIYFNNTTGKYEILGLKYADLQFEKGTGTYKISQEKYNDIKKKEGVDSDSEFKFTLYKNDLLLVKETETKEQQLFRFLSRTMPKQKHYVELKPYDKQKFEGGEALIKVLGNVANGGQCIKGLGKSNISIYKVRTDVLGNQHIIKNEGDKPKLDF

SEQ ID NO: 597 - protein, 1388 aa, Streptococcus thermophilus
MTKPYSIGLDIGTNSVGWAVITDNYKVPSKKMKVLGNTSKKYIKKNLLGVLLFDSGITAEGRRLKRTARRRYTRRRNRILYLQEIFSTEMATLDDAFFQRLDDSFLVPDDKRDSKYPIFGNLVEEKAYHDEFPTIYHLRKYLADSTKKADLRLVYLALAHMIKYRGHFLIEGEFNSKNNDIQKNFQDFLDTYNAIFESDLSLENSKQLEEIVKDKISKLEKKDRILKLFPGEKNSGIFSEFLKLIVGNQADFRKCFNLDEKASLHFSKESYDEDLETLLGYIGDDYSDVFLKAKKLYDAILLSGFLTVTDNETEAPLSSAMIKRYNEHKEDLALLKEYIRNISLKTYNEVFKDDTKNGYAGYIDGKTNQEDFYVYLKNLLAEFEGADYFLEKIDREDFLRKQRTFDNGSIPYQIHLQEMRAILDKQAKFYPFLAKNKERIEKILTFRIPYYVGPLARGNSDFAWSIRKRNEKITPWNFEDVIDKESSAEAFINRMTSFDLYLPEEKVLPKHSLLYETFNVYNELTKVRFIAESMRDYQFLDSKQKKDIVRLYFKDKRKVTDKDIIEYLHAIYGYDGIELKGIEKQFNSSLSTYHDLLNIINDKEFLDDSSNEAIIEEIIHTLTIFEDREMIKQRLSKFENIFDKSVLKKLSRRHYTGWGKLSAKLINGIRDEKSGNTILDYLIDDGISNRNFMQLIHDDALSFKKKIQKAQIIGDEDKGNIKEVVKSLPGSPAIKKGILQSIKIVDELVKVMGGRKPESIVVEMARENQYTNQGKSNSQQRLKRLEKSLKELGSKILKENIPAKLSKIDNNALQNDRLYLYYLQNGKDMYTGDDLDIDRLSNYDIDHIIPQAFLKDNSIDNKVLVSSASNRGKSDDFPSLEVVKKRKTFWYQLLKSKLISQRKFDNLTKAERGGLLPEDKAGFIQRQLVETRQITKHVARLLDEKFNNKKDENNRAVRTVKIITLKSTLVSQFRKDFELYKVCEINDFHHAHDAYLNAVIASALLKKYPKLEPEFVYGDYPKYNSFRERKSATEKVYFYSNIMNIFKKSISLADGRVIERPLIEVNEETGESVWNKESDLATVRRVLSYPQVNVVKKVEEQNHGLDRGKPKGLFNANLSSKPKPNSNENLVGAKEYLDPKKYGGYAGISNSFAVLVKGTIEKGAKKKITNVLEFQGISILDRINYRKDKLNFLLEKGYKDIELIIELPKYSLFELSDGSRRMLASILSTNNKRGEIHKGNQIFLSQKFVKLLYHAKRISNTINENHRKYVENHKKEFEELFYYILEFNENYVGAKKNGKLLNSAFQSWQNHSIDELCSSFIGPTGSERKGLFELTSRGSAADFEFLGVKIPRYRDYTPSSLLKDATLIHQSVTGLYETRIDLAKLGEG

SEQ ID NO: 598 - protein, 1128 aa, Streptococcus vestibularis
  Streptococcus vestibularis ATCC 49124
MSDLVLGLDIGIGSVGVGILNKVTGEIIHKNSRIFPAAQAENNVERRTNRQGRRLTRRKKHRRVRLNHLFEESGLITDFTKVSINLNPYQLRVKGLIDELSNEELFIALKNMVKHRGISYLDDASDDGNSSVGDYAQIVKENSKQLETKTPGQIQLERYQKYGQLRGDFTVEEDGKKHRLINVFPTSAYRSEALRILQTQKEFNPQITDEFINRYLEILTGKRKYYHGPGNEKSRTDYGRYTTKKDSENEYITLDNIFGILIGKCTFYPEEYRAAKASYTAQEFNLLNDLNNLTVPTETKKLSEEQKNQIINYVKNEKAMGPAKLFKYIAKLLSCDVADIKGYRIDKSDKAEIHTFEAYRKMKTLETIDFEKMSRDQLDKLAYVLTLNTEREGIQEALDHEFADGNFSQEQIDELVQFRKANSSIFGKGWHNFSVKLMMELIPELYATSEEQMTILTRLGKQKTTSSSNKTKYIDEKLLTEEIYNPVVAKSVRQAIKIVNAAIKEYGDFDNIVIEMARETNEDDEKKAIQKIQKANKDEKDAAMLKAANQYNGRAELPHSVFHGHKQLATKIRLWHQQGERCLYTGKTISIHDLINNPNQFEIDHILPLSITFDDSLANKVLVYATANQEKGQRTPYQALDSMDDAWSFRELKAFVRESKSLSNKKKEYLLTEEDISRFDVRKKFIERNLVDTRYASRVVLNALQEHFRAHKTDTKVSVVRGQFTSQLRRHWGIEKTRDTYHHHAVDALIIAASSQLNLWKKQKNTLVNYSENQLLDIETGELISDDEYKESVFKAPYQHFVDTLKSKEFEDSILFSYQVDSKFNRKISDATIYATRQAKVGKDKKDETYVLGKIKDIYSQTGYDAFIKIYQKDKSKFLMYRHDPQTFEKVIEPILENYPNKEMNEKGKEVPCNPFLKYKEEHGDYIRKYSKKGNGPEIKSLKYYDSKLGNHIDITPKDSNNKVVLQSVSPWRADVYFNKTTGKYEILGLKYADLQFEKGTGTYKISQEKYNVIKKKEGVDSDSEFKFTLYKNDLLLIKDTETKEQQLFRFLSRTKPNVKHYVELKPYDKQKFEGNESLINVLGAVAKGGQCQKGINKPNISIYKVRTDVLGNQHIIKNEGDKPKLDF

SEQ ID NO: 599 - protein, 1084 aa, Subdoligranulum sp.
  Subdoligranulum sp. 4_3_54A2FAA
MKNTLYGIGLDIGVASVGWAVVGLNGTGEPVGLHRLGVRIFDKAEQPKTGESLAAPRRMARGMRRRLRRKALRRADVYALLERSGLSTREELAQMFEAGGLEDIYALRTRALDEPVGKAEFSRILLHLAQRRGFKSNRRTASDGEDGRLLAAVNENRRRMAQGGWRTVGEMLYRHEAFALHKRNKADDYLSTVGRDMVAEEASILFERQRAMGCSWAAPELQAEYLSILLRQRSFDEGPGGNSPYGGNQVEKMVGRCTFEPDEPRAAKAAYSFEYFSLLQKLNHIRLAENGETRPLTQPQRQQLLSLAHKTPDISLARIRKELALPETVQFNGVRCRANETLEESEKKEKFACLPAYHKMRKALDGVVKGRISSLSISQRDAAATALSLYKNEDTLRAKLTEAGFQAPEIDALAGLTGFSKFGHLSLKACRKLIPHLEQGLTYDQACTAAGYDFKGHGAGERAFTLPAAAPEMEQITSPVVRRAVAQTIKVVNGIIREMDASPAWVRIELARELSKTFGERQEMDRSMRENAAQNERLMQELRDTFHLLSPTGQDLVKYRLWKEQDGVCAYSLRRLDVERLFEPGYVDVDHIVPYSLSFDDRRSNKVLVLSSENRQKGNRLPLQYLQGKRREDFIVWTNSSVHDYRKRQNLLREKLSGDEAEGFRQRNLQDTQHMARFLYNYISDHLAFAQSEALGKKRVFAVSGAVTSHLRKRWGLSKVRADGDLHHALDAAVVACTTDGMIRRISGYYGHIEGEYLQDADGAGSQHARTKERFPAPWPRFRDELIVRLSEQPAEPLLDINPEFYCEYGTEHIRPVFVSRMPRRKVTGPGHKETIKGAAAADEGLLTVRKALTELKLDKDGEIKDYYMPSSDTLLYEALKAQLRRFGGDGKKAFAEPFYKPKADGTPGPLVRKVKTTEKATLTVPVHGGAASNDTMVRVDVFLVPGDGYYWVPVYTADTLKPELPNRAVVQGKPYSEWKEMREEDFIFSLYPNDLVYVEHKSGLKFTLQNADSTLEKTRTQTSAFAYFVSGSISTASITIRTHDNAYGIPSLGVKTLKTFHKYQVDVLGNVFPVHKETRQKFR

SEQ ID NO: 600 - protein, 1422 aa, Sutterella wadsworthensis
  Sutterella wadsworthensis 3_1_45B
MTQSERRFSCSIGIDMGAKYTGVFYALFDREELPTNLNSKAMTLVMPETGPRYVQAQRTAVRHRLRGQKRYTLARKLAFLVVDDMIKKQEKRLTDEEWKRGREALSGLLKRRGYSRPNADGEDLTPLENVRADVFAAHPAFSTYFSEVRSLAEQWEEFTANISNVEKFLGDPNIPADKEFIEFAVAEGLIDKTEKKAYQSALSTLRANANVLTGLRQMGHKPRSEYFKAIEADLKKDSRLAKINEAFGGAERLARLLGNLSNLQLRAERWYFNAPDIMKDRGWEPDRFKKTLVRAFKFFHPAKDQNKQHLELIKQIENSEDIIETLCTLDPNRTIPPYEDQNNRRPPLDQTLLLSPEKLTRQYGEIWKTWSARLTSAEPTLAPAAEILERSTDRKSRVAVNGHEPLPTLAYQLSYALQRAFDRSKALDPYALRALAAGSKSNKLTSARTALENCIGGQNVKTFLDCARRYYREADDAKVGLWFDNADGLLERSDLHPPMKKKILPLLVANILQTDETTGQKFLDEIWRKQIKGRETVASRCARIETVRKSFGGGFNIAYNTAQYREVNKLPRNAQDKELLTIRDRVAETADFIAANLGLSDEQKRKFANPFSLAQFYTLIETEVSGFSATTLAVHLENAWRMTIKDAVINGETVRAAQCSRLPAETARPFDGLVRRLVDRQAWEIAKRVSTDIQSKVDFSNGIVDVSIFVEENKFEFSASVADLKKNKRVKDKMLSEAEKLETRWLIKNERIKKASRGTCPYTGDRLAEGGEIDHILPRSLIKDARGIVFNAEPNLIYASSRGNQLKKNQRYSLSDLKANYRNEIFKTSNIAAITAEIEDVVTKLQQTHRLKFFDLLNEHEQDCVRHALFLDDGSEARDAVLELLATQRRTRVNGTQIWMIKNLANKIREELQNWCKTTNNRLHFQAAATNVSDAKNLRLKLAQNQPDFEKPDIQPIASHSIDALCSFAVGSADAERDQNGFDYLDGKTVLGLYPQSCEVIHLQAKPQEEKSHFDSVAIFKEGIYAEQFLPIFTLNEKIWIGYETLNAKGERCGAIEVSGKQPKELLEMLAPFFNKPVGDLSAHATYRILKKPAYEFLAKAALQPLSAEEKRLAALLDALRYCTSRKSLMSLFMAANGKSLKKREDVLKPKLFQLKVELKGEKSFKLNGSLTLPVKQDWLRICDSPELADAFGKPCSADELTSKLARIWKRPVMRDLAHAPVRREFSLPAIDNPSGGFRIRRTNLFGNELYQVHAINAKKYRGFASAGSNVDWSKGILFNELQHENLTECGGRFITSADVTPMSEWRKVVAEDNLSIWIAPGTEGRRYVRVETTFIQASHWFEQSVENWAITSPLSLPASFKVDKPAEFQKAVGTELSELLGQPRSEIFIENVGNAKHIRFWYIVVSSNKKMNESYNNVSKS

SEQ ID NO: 601 - protein, 1049 aa, Tistrella mobilis
MINERLTFGIDLGIGSCGWAVLRHADAAGEPGVIEGLGSWCFDVPETSKERIPTNQVRRSNRLLRRVIRRRRNRMAEIRRLFHAQGLLPSADEDALKRPRLDPWELRARGLDQCLSAEEFAVALGHIARHRGFRSSAKRKAANTSGEDSKMLSALLVTRERTARYRTVGEMFARDPEYSARRRNRDGIFDRTVARDDLIHEVGKLFEAQRARGSAFASPDLEADFNAIAFRQAEMQDSERLVGNCPFERDEKRAARWAPSFERFRLLTRLINLRIATAEGERRFTPEDLARVSAELGATAKLPVSRVRALIGLLPDERFTTIRVEDEDRDIVARTGEAAPGTWRLRKTLGEALWAEMQARPDQLDAIAHVLSFFEATAKIRSELDRLGLPAAVIEALDRGLEDGAFAKFKGAGHISAKACRNLLPHLQQGHRYDQACRLAGYDHAASTLSHTAQVVSKAGFNALVTELGESIANPIARKALTEGLKQIRAMCARWGLPGAIHIELAREVGNSIEKRRELESQRETTTKRRQTERDEIRGLLALEDVDDDTLLRYRLWKEQGGKCLYTGKDIHVRQLIATDNSVQVDHILPWSRFGDDSFNNKTLCLASANQRKRGQTPWEWFSLTGTPEAWEVFASRVETSKDLRGFKKRNLLLKNADEVAQRFRSRNLNDTRYAARLLAEAAKLFYPAGDRQEKDGRRRVLTRPGPLTAALRHAWGLESLKKADGKRVSDDRHHALDALAVAAISEREVQRLTRSFQEWEQQGLARPLRHVAPPWPGFRGDVLAAYAQAFVARPERRRARGKGHDASIRQVVGEGPEAQVFERRGLADLKEADLDRVKDPERNQAIIEAVRAWILAGRPADAPPRSPRGDVIVKLRTAPAKKIKPAVPVRGGTADRGDMVRIDVFTRPNRKGRDEWYLVPIYPHQVMNRKAWPHPPMRSVVAYKDEAGWTEIGAEHSFRFSLYPRSYVQLVKSNGDVIEGYLVSMDRSTGAFRVFVHNNPAEMAKGIGAKTLLNLRKFNVDRFGVRTEVKSEVRTWHGEVCTSPVPPD

SEQ ID NO: 602 - protein, 1395 aa, Treponema denticola
  Treponema denticola AL-2
MKKEIKDYFLGLDVGTGSVGWAVTDTDYKLLKANRKDLWGMRCFETAETAEVRRLHRGARRRIERRKKRIKLLQELFSQEIAKIDEGFFQRMKESPFYAEDKTILQENALFNDKDFTDKTYHKAYPTINHLIKAWIENKVKPDPRLLYLACHNIIKKRGHFLFEGDFDSENQFDTSIQALFEYLREDMEVDIDADSQKVKEILKDSSLKNSEKQSRLNKILGLKPSDKQKKAITNLISGNKINFADLYDNPDLKDAEKNSISFSKDDFDALSDDLASILGDSFELLLKAKAVYNCSVLSKVIGDEQYLSFAKVKIYEKHKTDLTKLKAVIKKHFPNNYKKVFGYNQDNESKNNYSGYVGVCKTKNKKLVINNSVNQEDFYKFLKPILSAKSEIKEVNDILAEIETGNFLPKQISKSNAEIPYQLRKMELEKILSNAEKHFSFLKQKDEKGLSHSEKIIMLLTFKIPYYIGPINDNHKKSFPDRCWVVKKEKSPSGKTTPWNFFDHIDKEKTAEEFITSRTNFCTYLIGESVLPKNSLLYSEYTVLNEINNLQIIIDGKNICDTKLKQKIYEDLFKKYKKITQKQISTFIKHEGICNKTDEVIILGIDKECTSSLKSYIELKNIFGKQVDEISTKNMLEEIIRWATIYDEGEGKTILKTKIKAEYGKYCSDEQIKKILNLKFSGWGRLSRKFLETVTSEMPGFSEPVNIITAMRETQNNLMELLSSEFKFTENIKKINSGFEDAEKQFSYDGLVKPLFLSPSVKKMLWQTLKLVKEISHITQAPPKKIFIEMAKGAELEPARTKTRLKILQDLYSSCKNDADAFSSEIQYLSGKIENEDNLRLRSDKLYLYYTQLGKCMYCGKPIEIGHVFDTSNYDIDHIYPQSKIKDDSISNRVLVCSSCNKNKEDKYPLKSEIQSKQRGFWNFLQRNNFISLEKLNRLTRTTPISDDETAKFIARQLVETRQATKVAAKVLEKMFPETKIVYSKAETVSMFRNKFDIIKCREINDFHHAHDAYLNIVVGNVYNTKFTNNPWNFIKEKRDNPKIADTYNYYKVFDYDVKRNNITAWEKGKTIITVKDMLKRNTPIYTRQAACKKGGLFDQTIMKKGLGQHPLKKEGPFSNISKYGGYNKVSAAYYTLIEYEEKGNKIRSLETIPLYLVKDIQKDQDVLKSYLTDLLGKKEFKILVPKIKINSLLKINGFPCHITGKTNDSFLLRPAVQFCCSNDEVLYFKKIIRFSEIRSQREKIGKTISPYEDLSFRSYIKENLCKKTKNDEIGEKEFYDLLQKKNLEIYDMLLTKHKDTIYKKRPNSATIDILVKGKEKFKSLIIENQFEVILEILKLFSATRNVSELQHIGGSKYSGVAKIGNKISSLDNCILIYQSITGIFEKRIDLLKV

SEQ ID NO: 603 - protein, 1395 aa, Treponema denticola
  Treponema denticola ASLM
MKKEIKDYFLGLDVGTGSVGWAVTDTDYKLLKANRKDLWGMRCFETAETAEVRRLHRGARRRIERRKKRIKLLQELFSQEIAKIDEGFFQRMKESPLYAEDKTILQENTLFNDKDFTDKTYHKAYPTINHLIKAWIENKVKPDPRLLYLACHNIIKKRGHFLFEGDFDSENQFDTSIQALFEYLREDMEVDIDADSQKVKEILKDSSLKNSEKQSRLNKMLGLKPSDKQKKAITNLISGNKINFADLYDNPDLKDAEKNSISFSKDDFDALSDDLASILGDSFELLLKAKAVYNCSVLSKVIGDEQYLSFAKVKIYEKHKTDLTKLKNVIKKHFPKDYKKVFGYNKNEKNNNNYSGYVGVCKTKSKKLIINNSVNQEDFYKFLKTILSAKSEIKEVNDILTEIETGTFLPKQISKSNAEIPYQLRKMELEKILSNAEKHFSFLKQKDEKGLSHSEKIIMLLTFKIPYYIGPINDNHKKSFPDRCWVVKKEKSPSGKTTPWNFFDHIDKEKTAEEFITSRTNFCTYLIGESVLPKNSLLYSEYTVLNEINNLQIIIDGKNICDTKLKQKIYEELFKKYKKITQKQISTFIKHEGICNKTDEVIILGIDKECTSSLKSYIELKNIFGKQVDEISTKNMLEEIIRWATIYDEGEGKTILKTKIKAEYGKYCSDEQIKKILNLKFSGWGRLSRKFLETVTSEMPGFSEPVNIITAMRETQNNLMELLSSEFKFTENIKKINSGFEDVEKQFSYDGLVKPLFLSPSVKKMLWQTLKLVKEISHITQAPPKKIFIEMAKGAELDPVRTKTRLKILQDLYNNCKNDADAFSSEIKDLSGKIENEDNLRLRSDKLYLYYTQLGKCMYCGKPIEIGHVFDTSNYDIDHIYPQSKIKDDSISNRVLVCSSCNKNKEDKYPLKAEIQSKQRGFWNFLQRNNFISLEKFNRLTRATPISDDETAKFIARQLVETRQATKVAARVLEKMFPETKIVYSKAETVSMFRNKFDIVKCREINDFHHAHDAYLNIVVGNVYNTKFTNNLWNFIKEKRDNPKIADTYNYYKVFDYDVKRNNITAWEKGKTIITVKDMLKRNTPIYTRQAACKKGGLFDQTIMKKGLGQHPLKKEGPFSNISKYGGYNKVSAAYYTLIEYEEKGNKIRSLETIPLYLVKDIQKDQDVLKSYLTDLLGKKEFKILVPKIKINSLLKINGFPCHITGKTNDSFLLRPAVQFCCSNDEVLYFKKIIRFSEIRSQREKIGKTISPYEDLSFRSYIKENLCKKTKNDEIGEKEFYDLLQKKNLEIYDMLLTKHKDTIYKKRPNSATIDILVKGKEKFKSLIIENQFEVILEILKLFSATRNVSDLQHIGGSKYSGVAKIGNKISSLDNCILIYQSITGIFEKRIDLLKV

SEQ ID NO: 604 - protein, 1395 aa, Treponema denticola
  Treponema denticola ATCC 35405
MKKEIKDYFLGLDVGTGSVGWAVTDTDYKLLKANRKDLWGMRCFETAETAEVRRLHRGARRRIERRKKRIKLLQELFSQEIAKTDEGFFQRMKESPFYAEDKTILQENTLFNDKDFADKTYHKAYPTINHLIKAWIENKVKPDPRLLYLACHNIIKKRGHFLFEGDFDSENQFDTSIQALFEYLREDMEVDIDADSQKVKEILKDSSLKNSEKQSRLNKILGLKPSDKQKKAITNLISGNKINFADLYDNPDLKDAEKNSISFSKDDFDALSDDLASILGDSFELLLKAKAVYNCSVLSKVIGDEQYLSFAKVKIYEKHKTDLTKLKNVIKKHFPKDYKKVFGYNKNEKNNNNYSGYVGVCKTKSKKLIINNSVNQEDFYKFLKTILSAKSEIKEVNDILTEIETGTFLPKQISKSNAEIPYQLRKMELEKILSNAEKHFSFLKQKDEKGLSHSEKIIMLLTFKIPYYIGPINDNHKKFFPDRCWVVKKEKSPSGKTTPWNFFDHIDKEKTAEAFITSRTNFCTYLVGESVLPKSSLLYSEYTVLNEINNLQIIIDGKNICDIKLKQKIYEDLFKKYKKITQKQISTFIKHEGICNKTDEVIILGIDKECTSSLKSYIELKNIFGKQVDEISTKNMLEEIIRWATIYDEGEGKTILKTKIKAEYGKYCSDEQIKKILNLKFSGWGRLSRKFLETVTSEMPGFSEPVNIITAMRETQNNLMELLSSEFTFTENIKKINSGFEDAEKQFSYDGLVKPLFLSPSVKKMLWQTLKLVKEISHITQAPPKKIFIEMAKGAELEPARTKTRLKILQDLYNNCKNDADAFSSEIKDLSGKIENEDNLRLRSDKLYLYYTQLGKCMYCGKPIEIGHVFDTSNYDIDHIYPQSKIKDDSISNRVLVCSSCNKNKEDKYPLKSEIQSKQRGFWNFLQRNNFISLEKLNRLTRATPISDDETAKFIARQLVETRQATKVAAKVLEKMFPETKIVYSKAETVSMFRNKFDIVKCREINDFHHAHDAYLNIVVGNVYNTKFTNNPWNFIKEKRDNPKIADTYNYYKVFDYDVKRNNITAWEKGKTIITVKDMLKRNTPIYTRQAACKKGELFNQTIMKKGLGQHPLKKEGPFSNISKYGGYNKVSAAYYTLIEYEEKGNKIRSLETIPLYLVKDIQKDQDVLKSYLTDLLGKKEFKILVPKIKINSLLKINGFPCHITGKTNDSFLLRPAVQFCCSNNEVLYFKKIIRFSEIRSQREKIGKTISPYEDLSFRSYIKENLWKKTKNDEIGEKEFYDLLQKKNLEIYDMLLTKHKDTIYKKRPNSATIDILVKGKEKFKSLIIENQFEVILEILKLFSATRNVSDLQHIGGSKYSGVAKIGNKISSLDNCILIYQSITGIFEKRIDLLKV

SEQ ID NO: 605 - protein, 1395 aa, Treponema denticola
  Treponema denticola H1-T
MKKEIKDYFLGLDVGTGSVGWAVTDTDYKLLKANRKDLWGMRCFETAETAEVRRLHRGARRRIERRKKRIKLLQELFSQEIAKIDEGFFQRMKESPFYAEDKTILQENALFNDKDFTDKTYHKAYPTINHLIKAWIENKVKPDPRLLYLACHNIIKKRGHFLFEGDFDSENQFDTSIQALFEYLREDMEVDIDADSQKVKEILKDSSLKNSEKQSRLNKILGLKPSDKQKKAITNLISGNKINFADLYDNPDLKDAEKNSISFSKDDFDALSDDLASILGDSFELLLKAKAVYNCSVLSKVIGDEQYLSFAKVKIYEKHKTDLTKLKAVIKKHFPNNYKKVFGYNQDNESKNNYSGYVGVCKTKNKKLVINNSVNQEDFYKFLKPILSAKSEIKEVNDILAEIETGNFLPKQISKSNAEIPYQLRKMELEKILSNAEKHFSFLKQKDEKGLSHSEKIIMLLTFKIPYYIGPINDNHKKSFPDRCWVVKKEKSPSGKTTPWNFFDHIDKEKTAEEFITSRTNFCTYLIGESVLPKNSLLYSEYTVLNEINNLQIIIDGKNICDTKLKQKIYEDLFKKYKKITQKQISTFIKHEGICNKTDEVIILGIDKECTSSLKSYIELKNIFGKQVDEISTKNMLEEIIRWATIYDEGEGKTILKTKIKAEYGKYCSDEQIKKILNLKFSGWGRLSRKFLETVTSEMPGFSEPVNIITAMRETQNNLMELLSSEFKFTENIKKINSGFEDAEKQFSYDGLVKPLFLSPSVKKMLWQTLKLVKEISHITQAPPKKIFIEMAKGAELEPARTKTRLKILQDLYSSCKNDADAFSSEIQYLSGKIENEDNLRLRSDKLYLYYTQLGKCMYCGKPIEIGHVFDTSNYDIDHIYPQSKIKDDSISNRVLVCSSCNKNKEDKYPLKSEIQSKQRGFWNFLQRNNFISLEKLNRLTRTTPISDDETAKFIARQLVETRQATKVAAKVLEKMFPETKIVYSKAETVSMFRNKFDIIKCREINDFHHAHDAYLNIVVGNVYNTKFTNNPWNFIKEKRDNPKIADTYNYYKVFDYDVKRNNITAWEKGKTIITVKDMLKRNTPIYTRQAACKKGELFNQTIMKKGLGQHPLKKEGPFSNISKYGGYNKVSAAYYTLIEYEEKVNKIRSLETIPLYLVKDIQKDQDVLKSYLTDLLGKKEIKILVPKIKINSLLKINGFPCHITGKTGDSFVLRPAVQFCCSNDEVLYFKKIIRFNEIRSQREKMGKTISPYEDLSFRSYIKENLCKKTKADEIGEKEFYDLLQKKNLEIYDMLLTKHKDTIYNKRPNSTTLGMLTKGRYEFINLKPKDQIIVMLEILKLFCTTREAIDLGLIKGKPAAGVATLGKKISNLDNCILIYQSITGIFEKRIDLLKV

SEQ ID NO: 606 - protein, 1395 aa, Treponema denticola
  Treponema denticola H-22
MKKEIKDYFLGLDVGTGSVGWAVTDTDYKLLKANRKDLWGMRCFETAETAEVRRLHRGARRRIERRKKRIKLLQELFSQEIAKIDEGFFQRMKESPFYAEDKTILQENTLFNDKDFTDKTYHKAYPTINHLIKAWIENKVKPDPRLLYLACHNIIKKRGHFLFEGDFDSENQFDTSIQALFEYLREDMEVDIDADSQKVKEILKDSSLKNSEKQSRLNKILGLKPSDKQKKAITNLISGNKINFADLYDNPDLKDAEKNSISFSKDDFDALSDDLASILGDSFELLLKAKAVYNCSVLSKVIGDEQYLSFAKVKIYEKHKTDLTKLKNVIKKHFPKDYKKVFGYNKNEKNNNNYSGYVGVCKTKSKKLIINNSVNQEDFYKFLKTILSAKSEIKEVNDILTEIETGTFLPKQISKSNAEIPYQLRKMELEKILSNAEKHFSFLKQKDEKGLSHSEKIIMLLTFKIPYYIGPINDNHKKSFPDRCWVIKKEKSPSGKTTPWNFFDHIDKDKTAEAFITSRTNFCTYLVGESVLPKSSLLYSEYTVLNEINNLQIIIDGKNICDIKLKQKIYEELFKKYKKITQKQISTFIKHEGICNKTDEVIILGIDKECTSSLKSYIELKNIFGKQVDEISTKNMLEEIIRWATIYDEGEGKTILKTKIKAEYGKYCSDEQIKKILNLKFSGWGRLSRKFLETVTSEMPGFSEPVNIITAMRETQNNLMELLSSEFKFTENIKKINSGFEDAEKQFSYNGLVKPLFLSPSVKKMLWQTLKLVKEISHITQAPPKKIFIEMAKGAELEPARTKTRLKILQDLYNNCKNDADAFSSEIKDLSGKIENEDNLRLRSDKLYLYYTQLGKCMYCGKPIEIGHVFDTSNYDIDHIYPQSKIKDDSISNRVLVCSSCNKNKEDKYPLKSEIQSKQRGFWNFLQRNNFISLEKLNRLTRTTPISDDETAKFIARQLVETRQATKVAAKVLEKMFPETKIVYSKAETVSMFRNKFDIIKCREINDFHHAHDAYLNIVVGNVYNTKFTNNPWNFIKEKRDNPKIADTYNYYKVFDYDVKRNNITAWEKGKTIITVKDMLKRNTPIYTRQAACKKGGLFDQTIMKKGLGQHPLKKEGAFSNISKYGGYNKVSAAYYTLIEYEEKGNKIRSLETIPLYLVKDIQKDQDVLKSYLTDLLGKKEIKILVPKIKINSLLKINGFPCHITGKTGDSFVLRPAVQFCCSNDEVLYFKKIIRFNEIRSQREKMGKTISPYEDLSFRSYIKENLCKKTKADEIGEKEFYDLLQKKNLEIYDMLLTKHKDTIYNKRPNSTTLGMLTKGRYEFINLKPKDQIIVMLEILKLFCTTREAIDLGLIKGKPAAGVATLGKKISNPDNCILIYQSITGIFEKRIDLLKV

SEQ ID NO: 607 - protein, 1395 aa, Treponema denticola
  Treponema denticola OTK
MKKEIKDYFLGLDVGTGSVGWAVTDTDYKLLKANRKDLWGMRCFETAETAEVRRLHRGARRRIERRKKRIKLLQELFSQEIAKIDEGFFQRMKESPLYAEDKTILQENTLFNDKDFTDKTYHKAYPTINHLIKAWIENKVKPDPRLLYLACHNIIKKRGHFLFEGDFDSENQFDTSIQALFEYLREDMELDIDADSQKVKEILKDSSLKNSEKQSRLNKMLGLKPSDKQKKAITNLISGNKINFADLYDNPDLKDAEKNSISFSKDDFDALSDDLASILGDSFELLLKAKAVYNCSVLSKVIGDEQYLSFAKVKIYEKHKTDLTKLKNVIKKHFPKDYKKVFGYNKNEKNNNNYSAYVGVCKITHKKLVIKNSASQEDFYKFLKTILSAKSEIKEVNDILTEIETGTFLPKQISKSNAEIPYQLRKMELEKILSNAEKHFSFLKQKDEKGLSHSEKIIMLLTFKIPYYIGPINDNHKKSFPDRCWVVKKEKSPSGKTTPWNFFDHIDKEKTAEEFITSRTNFCTYLIGESVLPKSSLLYSEYTVLNEINNLQIIIDGKNICDIKLKQKIYEELFKKYKKITQKQISTFIKHEGICNKTDEVIILGIDKECTSSLKSYIELKNIFGKQVDEISTKNMLEEIIRWATIYDEGEGKTILKTKIKAEYGKYCSDEQIKKILNLKFSGWGRLSRKFLETVTSEMPGFSEPVNIITAMRETQNNLMELLSSEFKFTENIKKINSGFEDAEKQFSYNGLVKPLFLSPSVKKMLWQTLKLVKEISHITQAPPKKIFIEMAKGAELEPARTKTRLKILQDLYSSCKNDADAFSSEIQYLSGKIENEDNLRLRSDKLYLYYTQLGKCMYCGKPIEIGHVFDTSNYDIDHIYPQSKIKDDSISNRVLVCSSCNKNKEDKYPLKAEIQSKQRGFWNFLQRNNFISLEKLNRLTRTSPISDDETAKFIARQLVETRQATKVAAKVLEKMFPETKIVYSKAETVSMFRNKFDIIKCREINDFHHAHDAYLNIVVGNVYNTKFTNNPWNFIKEKRDNPKIADTYNYYKVFDYDVKRNNITAWEKGKTIITVKDMLKRNTPIYTRQAACKKGELFNQTIMKKGLGQHPLKKEGPLSNISKYGGYNKVSAAYYTLIEYEEKGSKIRSLETIPLYLVKDIQKNKDGLKSYLTDQIGKKEIKILIPKIKINSLLKINGFPCHITGKMGEAFVLRPAVQFCCSNDEALYFKKIIRFNEIRKQREKMGKTISPYEDLSFRSYIKDNLCKKTKADEIEEKEFYDLLQKKNLEIYDMLLTKHKDTIYKKRPNSATIDILVKGKEKFKSLIIENQFEVILEILKLFSATRNVSDLQHIGGSKNAGNARVGNKISSLDNCILIYQSITGIFEKRIDLLKI

SEQ ID NO: 608 - protein, 1395 aa, Treponema denticola
  Treponema denticola SP37
MKKEIKDYFLGLDVGTGSVGWAVTDTDYKLLKANRKDLWGMRCFETAETAEVRRLHRGARRRIERRKKRIKLLQELFSQEIAKTDEGFFQRMKESPFYAEDKTILQENALFNDRDFTDKTYHKAYPTINHLIKAWIENKVKPDPRLLYLACHNIIKKRGHFLFEGDFDSENQFDTSIQALFEYLREDMEVDIDADSQKVKEILKDSSLKNSEKQSRLNKMLGLKPSDKQKKAITNLISGNKINFADLYDNPDLKDAEKNSISFSKDDFDALSDDLASILGDSFELLLKAKAVYNCSVLSKVIGDEQYLSFAKVKIYEKHKTDLTKLKNVIKKHFPNDYKKVFGYNKNEKNNNNYSAYVGVCKTKSKKLVINNTVNQEDFYKFLKPILLAKSEIKEVNDILTEIETGTFLPKQISKSNAEIPYQLRKMELEKILSNAEKHFSFLKQKDEKGLSHSEKIIMLLTFKIPYYIGPINDNHKKSFPDRCWVIKKEKSPSGKTTPWNFFDHIDKDKTAEAFITSRTNFCTYLVGESVLPKNSLLYSEYTVLNEINNLQIIIDGKNICDIKLKQKIYEELFKKYKKITQKQISTFIKHEGICNKTDEVIILGIDKECTSSLKSYIELKNIFGKQVDEISTKNMLEEIIRWATIYDEGEGKTILKTKIKAEYGKYCSDEQIKKILNLKFSGWGRLSRKFLETVTSEMPGFSEPVNIITAMRETQNNLMELLSSEFKFTENIKKINSGFEDVEKQFSYDSLVKPLFLSPSVKKMLWQTLKLVKEISHITQAPPKKIFIEMAKGAELDPVRTKTRLKILQDLYNNCKNDADAFSSEIKDLSGKIENEDNLRLRSDKLYLYYTQLGKCMYCGKPIEIGHVFDTSNYDIDHIYPQSKIKDDSISNRVLVCSSCNKNKEDKYPLKAEIQSKQRGFWNFLQRNNFISLEKLNRLTRTSPISDDETAKFIARQLVETRQATKVAAKVLEKMFPETKIVYSKAETVSMFRNKFDIIKCREINDFHHAHDAYLNIVVGNVYNTKFTNNPWNFIKEKRDNPKIADTYNYYKVFDYDVKRNNITAWEKGKTIITVKDMLKRNTPIYTRQAACKKGELFNQTIMKKGLGQHPLKKEGPLSNISKYGGYNKVSAAYYTLIEYEEKGSKIRSLETIPLYLVKDIQKNKDGLKSYLTDQIGKKEIKILIPKIKINSLLKINGFPCHITGKMGEAFVLRPAVQFCCSNDEALYFKKIIRFNEIRKQREKMGKTISPYEDLSFRSYIKDNLCKKTKADEIEEKEFYDLLQKKNLEIYDMLLTKHKDTIYKKRPNSATIDILVKGKEKFKSLIIENQFEVILEILKLFSATRNVSDLQHIGGSKNAGNARVGNKISSLDNCILIYQSITGIFEKRIDLLKI

SEQ ID NO: 609 - protein, 1062 aa, Treponema sp.
  Treponema sp. JC4
MIMKLEKWRLGLDLGTNSIGWSVFSLDKDNSVQDLIDMGVRIFSDGRDPKTKEPLAVARRTARSQRKLIYRRKLRRKQVFKFLQEQGLFPKTKEECMTLKSLNPYELRIKALDEKLEPYELGRALFNLAVRRGFKSNRKDGSREEVSEKKSPDEIKTQADMQTHLEKAIKENGCRTITEFLYKNQGENGGIRFAPGRMTYYPTRKMYEEEFNLIRSKQEKYYPQVDWDDIYKAIFYQRPLKPQQRGYCIYENDKERTFKAMPCSQKLRILQDIGNLAYYEGGSKKRVELNDNQDKVLYELLNSKDKVTFDQMRKALCLADSNSFNLEENRDFLIGNPTAVKMRSKNRFGKLWDEIPLEEQDLIIETIITADEDDAVYEVIKKYDLTQEQRDFIVKNTILQSGTSMLCKEVSEKLVKRLEEIADLKYHEAVESLGYKFADQTVEKYDLLPYYGKVLPGSTMEIDLSAPETNPEKHYGKISNPTVHVALNQTRVVVNALIKEYGKPSQIAIELSRDLKNNVEKKAEIARKQNQRAKENIAINDTISALYHTAFPGKSFYPNRNDRMKYRLWSELGLGNKCIYCGKGISGAELFTKEIEIEHILPFSRTLLDAESNLTVAHSSCNAFKAERSPFEAFGTNPSGYSWQEIIQRANQLKNTSKKNKFSPNAMDSFEKDSSFIARQLSDNQYIAKAALRYLKCLVENPSDVWTTNGSMTKLLRDKWEMDSILCRKFTEKEVALLGLKPEQIGNYKKNRFDHRHHAIDAVVIGLTDRSMVQKLATKNSHKGNRIEIPEFPILRSDLIEKVKNIVVSFKPDHGAEGKLSKETLLGKIKLHGKETFVCRENIVSLSEKNLDDIVDEKIKSKVKDYVAKHKGQKIEAVLSDFSKENGIKKVRCVNRVQTPIEITSGKISRYLSPEDYFAAVIWEIPGEKKTFKAQYIRRNEVEKNSKGLNVVKPAVLENGKPHPAAKQVCLLHKDDYLEFSDKGKMYFCRIAGYAATNNKLDIRPVYAVSYCADWINSTNETMLTGYWKPTPTQNWVSVNVLFDKQKARLVTVSPIGRVFRK

SEQ ID NO: 610 - protein, 1011 aa, Unknown
  Description of Unknown: uncultured delta proteobacterium HF0070_07E19 polypeptide
MSSKAIDSLEQLDLFKPQEYTLGLDLGIKSIGWAILSGERIANAGVYLFETAEELNSTGNKLISKAAERGRKRRIRRMLDRKARRGRHIRYLLEREGLPTDELEEVVVHQSNRTLWDVRAEAVERKLTKQELAAVLFHLVRHRGYFPNTKKLPPDDESDSADEEQGKINRATSRLREELKASDCKTIGQFLAQNRDRQRNREGDYSNLMARKLVFEEALQILAFQRKQGHELSKDFEKTYLDVLMGQRSGRSPKLGNCSLIPSELRAPSSAPSTEWFKFLQNLGNLQISNAYREEWSIDAPRRAQIIDACSQRSTSSYWQIRRDFQIPDEYRFNLVNYERRDPDVDLQEYLQQQERKTLANFRNWKQLEKIIGTGHPIQTLDEAARLITLIKDDEKLSDQLADLLPEASDKAITQLCELDFTTAAKISLEAMYRILPHMNQGMGFFDACQQESLPEIGVPPAGDRVPPFDEMYNPVVNRVLSQSRKLINAVIDEYGMPAKIRVELARDLGKGRELRERIKLDQLDKSKQNDQRAEDFRAEFQQAPRGDQSLRYRLWKEQNCTCPYSGRMIPVNSVLSEDTQIDHILPISQSFDNSLSNKVLCFTEENAQKSNRTPFEYLDAADFQRLEAISGNWPEAKRNKLLHKSFGKVAEEWKSRALNDTRYLTSALADHLRHHLPDSKIQTVNGRITGYLRKQWGLEKDRDKHTHHAVDAIVVACTTPAIVQQVTLYHQDIRRYKKLGEKRPTPWPETFRQDVLDVEEEIFITRQPKKVSGGIQTKDTLRKHRSKPDRQRVALTKVKLADLERLVEKDASNRNLYEHLKQCLEESGDQPTKAFKAPFYMPSGPEAKQRPILSKVTLLREKPEPPKQLTELSGGRRYDSMAQGRLDIYRYKPGGKRKDEYRVVLQRMIDLMRGEENVHVFQKGVPYDQGPEIEQNYTFLFSLYFDDLVEFQRSADSEVIRGYYRTFNIANGQLKISTYLEGRQDFDFFGANRLAHFAKVQVNLLGKVIK

SEQ ID NO: 611 - protein, 1032 aa, Unknown
  Description of Unknown: uncultured Termite group 1 bacterium phylotype Rs-D17 polypeptide
MLYHIANHRGTDSVRSFLEYDDDKIKENTLTAKIAKETKKVIDAKKYRTFGEYLYKGKIEKFQQNIRKKVSNRKTPANKNKEFAVTRDVIIKETEKILASQKQYYTYILTDEYIKKIKDAISYQTEKLIPESGYCPYFKDEKRLPRSHKLNEYRRMYEALNNAKYFDPVLDENTGEILSYQEKEFSREEKKILFDEVLLKGMELTESGAKKLLYHLPDGCEVQLQGRDKTTQKIKGYALVDLEASPFWLRLSQQQQDEFLYDWNSLPLEKLKPKLTNYYSLTESEVDETFQEIKLPSNYASVGKKAMEILLTYIKDGCSYTEALEKAVSEGKLKVDKQTMIYDSLPYYGKILKESTQKLIGKAFSKQFADRNYKEPDTNKNEREFGKIANPVVHQTLNELRKLINEIITVFGKKPLEIGLETTRELKKSKKNREYLSKQQNKNEYARNRIYKEYIEPHLSQIKSRQENPSKYISKFELLEEQNFICPFCSEKITPDDIINSKVDVEHIFPIEESEDITKNNLVIAHNECNADKGKKSPFDAFGDKTSGKYRWNCILHNAQKNLPHKVWRFYQGSLEKFLENKPMSRRFGTDNSYISKIAARYLACLFNDPYHSEIFCIKSSLIAQLRIAWDLNSIMVPLVKNILSEKELEEFKISKNKKIRIDNRHHALDAIVIAYANRGYHNFLNRIHAKEYKINYREKSWLSKILLPPLNRDLEDFKISVKDSIEKANVSIKHDHNTNGSLVKATAYKVYYSGAGEYIITTSKNVEEISFKEKEDPKDTLYRALCKFECRDIDIKDEKLIKKLKYNSTLYKKVQNNLSKAKQELEQDNKKTEEEGKKSQKITEVRIYKKACSLVKGQYIQCGSRLKDKFFAVKEPTEIKTGLGYDTGDNLFLDLYYDKTGKLCGEIIRKVNFNRNKPNYQKEGYTLFERIYQSDILEVDTSEDRISLKNKTGSAPSDRTFIKVNTFTEVNAYFDGKRDKIQIFFGNLLKSSFKNDSFFISSMQKYNVRKVILTSLGIIKYRSQILKNKEV

SEQ ID NO: 612 - protein, 1398 aa, Veillonella atypica
  Veillonella atypica ACS-134-V-Col7a
METQTSNQLITSHLKDYPKQDYFVGLDIGTNSVGWAVTNTSYELLKFHSHKMWGSRLFEEGESAVTRRGFRSMRRRLERRKLRLKLLEELFADAMAQVDSTFFIRLHESKYHYEDKTTGHSSKHILFIDEDYTDQDYFTEYPTIYHLRKDLMENGTDDIRKLFLAVHHILKYRGNFLYEGATFNSNAFTFEDVLKQALVNITFNCFDTNSAISSISNILMESGKTKSDKAKAIERLVDTYTVFDEVNTPDKPQKEQVKEDKKTLKAFANLVLGLSANLIDLFGSVEDIDDDLKKLQIVGDTYDEKRDELAKVWGDEIHIIDDCKSVYDAIILMSIKEPGLTISQSKVKAFDKHKEDLVILKSLLKLDRNVYNEMFKSDKKGLHNYVHYIKQGRTEETSCSREDFYKYTKKIVEGLADSKDKEYILNEIELQTLLPLQRIKDNGVIPYQLHLEELKVILDKCGPKFPFLHTVSDGFSVTEKLIKMLEFRIPYYVGPLNTHHNIDNGGFSWAVRKQAGRVTPWNFEEKIDREKSAAAFIKNLTNKCTYLFGEDVLPKSSLLYSEFMLLNELNNVRIDGKALAQGVKQHLIDSIFKQDHKKMTKNRIELFLKDNNYITKKHKPEITGLDGEIKNDLTSYRDMVRILGNNFDVSMAEDIITDITIFGESKKMLRQTLRNKFGSQLNDETIKKLSKLRYRDWGRLSKKLLKGIDGCDKAGNGAPKTIIELMRNDSYNLMEILGDKFSFMECIEEENAKLAQGQVVNPHDIIDELALSPAVKRAVWQALRIVDEVAHIKKALPSRIFVEVARTNKSEKKKKDSRQKRLSDLYSAIKKDDVLQSGLQDKEFGALKSGLANYDDAALRSKKLYLYYTQMGRCAYTGNIIDLNQLNTDNYDIDHIYPRSLTKDDSFDNLVLCERTANAKKSDIYPIDNRIQTKQKPFWAFLKHQGLISERKYERLTRIAPLTADDLSGFIARQLVETNQSVKATTTLLRRLYPDIDVVFVKAENVSDFRHNNNFIKVRSLNHHHHAKDAYLNIVVGNVYHEKFTRNFRLFFKKNGANRTYNLAKMFNYDVICTNAQDGKAWDVKTSMNTVKKMMASNDVRVTRRLLEQSGALADATIYKASVAAKAKDGAYIGMKTKYSVFADVTKYGGMTKIKNAYSIIVQYTGKKGEEIKEIVPLPIYLINRNATDIELIDYVKSVIPKAKDISIKYRKLCINQLVKVNGFYYYLGGKTNDKIYIDNAIELVVPHDIATYIKLLDKYDLLRKENKTLKASSITTSIYNINTSTVVSLSNKVGIDVFDYFMSKLRTPLYMKMKGNKVDELSSTGRSKFIKMTLEEQSIYLLEVLNLLTNSKTTFDVKPLGITGSRSTIGVKIHNLDEFKIINESITGLYSNEVTIV

SEQ ID NO: 613 - protein, 1398 aa, Veillonella parvula
  Veillonella parvula ATCC 17745
METQASNQLISSHLKGYPIKDYFVGLDIGTSSVGWAVTNKAYELLKFRSHKMWGSRLFDEGESAVARRGFRSMRRRLERRKLRLKLLEELFADAMAQVDPTFFMRLRESKYHYEDKTTGHSSKHILFIDKNYNDQDYFKEYPTVYHLRSELMKSGTDDIRKLFLAVHHILKYRGNFLYEGATFDSNASTLDDVIKQALENITFNCFDCNSAISSIGQILMEAGKTKSDKAKAIEHLVDTYIATDTVDTSSKTQKDQVKEDKKRLKAFANLVLGLNASLIDLFGSVEELEEDLKKLQITGDTYDDKRDELAKAWSDEIYIIDDCKSVYDAIILLSIKEPGLTISESKVKAFNKHKDDLAILKSLLKSDRSIYNTMFKVDEKGLHNYVHYIKQGRTEETSCNREDFYKYTKKIVEGLSDSKDKEYILSQIELQILLPLQRIKDNGVIPYQLHLEELKAILAKCGPKFPFLNEVADGFSVAEKLIKMLEFRIPYYVGPLNTHHNVDNGGFAWAVRKASGRVTPWNFDDKIDREKSAAAFIKNLTNKCTYLLGEDVLPKSSLLYSEFMLLNELNNVRIDGKPLEKVVKEHLIEAVFKQDHKKMTKNRIEQFLKDNGYISETHKHEITGLDGEIKNDLASYRDMVRILGDGFDRSMAEEIITDITIFGESKKMLRETLRKKFASCLDDEAIKKLTKLRYRDWGRLSQKLLNGIEGCDKAGDGTPETIIILMRNFSYNLMELLGDKFSFMERIQEINAKLTEGQIVNPHDIIDDLALSPAVKRAVWQALRIVDEVAHIKKALPARIFVEVTRSNKNEKKKKDSRQKRLSDLYAAIKKDDVLLNGLNNEIFGELKSSLAKYDDAALRSKKLYLYYTQMGRCAYTGEIIELSLLNTDNYDIDHIYPRSLTKDDSFDNLVLCKRTANAQKSDAYPISEEIQKTQKPFWTFLKQQGLISERKYERLTRITPLTADDLSGFIARQLVETNQSVKAATTLLRRLYPGVDVVFVKAENVTDFRHDNNFIKVRSLNHHHHAKDAYLNIVVGNVYHERFTRNFRAFFKKNGANRTYNLAKMFNYDVNCTNAKDGKAWDVKTSMDTVKKMMDSNDVRVTKRLLEQTGALADATIYKATVAGKAKDGAYIGMKTKSSVFADVSKYGGMTKIKNAYSIIVQYTGKKGEVIKEIVPLPIYLTNRNTTDQDLINYVASIIPQAKDISIIYGKLCINQLVKVNGFYYYLGGKTNSKFCIDNAIQVIVSNEWIPYLKVLEKFNNMRKDNKDLKANVVSTRALDNKHTIEVRIVEEKNIEFFDYLVSKLKMPIYQKMKGNKAAELSEKGYGLFKKMSLEEQSIHLIELLNLLTNQKTTFEVKPLGITASRSTVGSKISNQDEFKVINESITGLYSNEVTIV

SEQ ID NO: 614 - protein, 1395 aa, Veillonella sp.
  Veillonella sp. 6_1_27
METQASNQLISSHLKGYPIKDYFVGLDIGTSSVGWAVTNKAYELLKFRSHKMWGSRLFDEGESAVARRGFRSMRRRLERRKLRLKLLEELFADAMAQVDPTFFMRLRESKYHYEDKTTGHSSKHILFIDKNYTDQDYYKEYPTIYHLRVALMKSGTDDIRKLFLAVHHILKYRGNFLYEGATFDSNASTLDDVLKQALENITFNCFDSSAAIGSIGQILMELGKTKSDKAKAIERLVDTYIITDEVDTSGKTQKEQVKEDKKRLKSFANLVLGLSASLTDLFGSVEDLDEDLKKLQIIGDTYDERRDDLAKVWGDEIHIIDDCKSVYDAIILMSIKEPGLTISESKVKAFKKHKDDLAILKSLLKSDRSIYNTMFKVDEKGLHNYVHYIKQGRTEETSCNREDFYKYTKKVVEGLPDSKDKEYILSEIELQTLLPLQRIKDNGVIPYQLHLEELKVILAKCGPKFPFLNEVADGFSVAEKLIKMLEFRIPYYVGPLNTHHNVDNGGFAWAVRKASGRVTPWNFDDKIDREKSAAAFIKNLTNKCTYLLGEDVLPKSSLLYSEFMLLNELNNVRIDGKPLEKAVKEHLIEAVFKQDHKKMTKNRIEQFLKDNNYIPEKHKPEITGLDGEIKNDLASYRDMVRILGNNFDLSMAEEIITDITIFGESKKMLRETLRNKFSSRLDDEAIKKLSKLRYRDWGRLSRKLLNVIEGCDKAGDGTPETIIILMRNFSYNLMELLGDKFSFMERIQEINAKLIEGQIVNPHDIIDDLALSPAVKRAVWQALRIVDEIVHIKKTLPARIFVEVTRSNKAEKKKKDSRQKRLSDLYAAIKKDDALLSGLTNEEFGGLKSGLAKYDDAALRSKKLYLYYTQMGRCAYTGEVIDLSQLNTDNYDIDHIYPRSLTKDDSFDNLVLCKRTANAQKSDTYPISKEIQKAQKAFWIFLKQQGLISERKYERLTRITPLTADDLSGFIARQLVETNQSVKAATTLLRRLYPGVDVVFVKAENVTDFRHDNDFIKVRSLNHHHHAKDAYLNIVVGNVYHERFTRNFRAFFKKNGANRTYNLAKMFNYDVKCTNAKDGKAWAVKTSMDTVKKMMDSNDVRVTKRVYEQKGQLSDINLTKASKVKADIYLPIKANDPIMSQNMKYGGYSDIKNAYYTIIEYSDKKNNSIKAFIPIPIFIATKTLTKQALLEYIKTVLPKANNLRIIYKKVYNDQLLKIDGFNYYLGGRSNDRFCIDNAIQLIVPLEIQFYIKLVEKFTAIISENKNIALKASSVKSRNPINNQVENITLEYTQKLFDYLVSKFNELIYLKMRGNKLTDVNNIGRKQFIKLSLEERCKALAELLNIFTNMNKKLSLSTINVSASRKVVNFKISSLDEFKIVNESITGLYSHEITIV

SEQ ID NO: 615 - protein, 1120 aa, Veillonella sp.
  Veillonella sp. oral taxon 780 str. F0422
MGFKANLVNLFTDEDIEVILPEEKEFKSINLHEGIYEDVRDAYEDAWGDRFAIVDQCKVLHDIIVISSIIKPGQSLSEAKIESYNQHKEDLVLLKSVLKEDRKLYDDMFVVDTDKGTNYVKYTKQGVNGNTSATQEEFYKYVRKVVSVLPETEHTRRIVQKLEEGTFLPLQRISKNGVVPYQLHKEELVRILDKATVNFPFLNKVENGLTVADKIISILEFKIPYYVGPLNPTHSIENGGFAWVVRKEAGQVLPWNFEQKVDVQASAVKFIENLTNKCTYLIDQDVLPKYSLLYAEFSLLNELNNIRVNDKPLPADVKQAFIRDHFISLQDSKTATKKVVAKYLVDNNYVSQPPIITGMDQQIATKLTSHRDMTRILGEHFDHAMAEDIIRYITIFGESKDMLRQVLKNYYGDRLTTEQIKKLGKLTYTGWGRLSKKFLSDIWGMKKNDDDAEAGTIIEHMREGQENLMQLLSSSYSFIDVVQEYVTNVLGEKEKTAFEMLEDLSLSPMVKRSVWQTLRILDEIVSIRKELPKKIFVEVARTNKADKKRTQSRKALLEELYKQIKDEDVHVLQQELESKEDSALNSKKLYLYFTQMGRCMYSGRRIDIHELFTDKYDIDHIYPRSLTKDDSWHNIVLVEKQLNAEKTDRFPILSAIQSKQKGFWKLLWDRGFISEKKYDRLVRTTDLTDEELNQFINRQMVSTNQSVKAVTTLLHQLYPETEVVFSKAENVSDFRHDYDFVKVRSINHHHHAKDAYLNIVVGNVYHEKFTKNFLSFAKQKGTRRTYNLTKIFEYEIKLTEESKKVIWDPNIHMDIVKKMMKSNDVRVTQRAVPQKGGLSDETIYKKGIAKRGVYLPLKSSDERVRDVEKYGGRTSITISEYIILNIRDTSDQDRIEIFSLPLYIAGKKDIHKAIEEAYLSTCKKPASVVDIQILYRGLYIGSKVNINGFTYYMGGKTGSNVSIDSAVDVVMDITSSVYIKLLEKVAIKKIENPKTFRIENIKTSYNHKEVTVSKEQNIALYQELLKKLDTPLFSKMKGNKLEEFRTVGFDTFIALSLEEQASVLLEVLNVLTNFKTKRDITKIGMTSSRSTLGINISNTEQFSVITTSITGLYEQEIKIK

SEQ ID NO: 616 - protein, 1068 aa, Verminephrobacter eiseniae
MNKAVAYRLALDLGSTSLGWAIFRLNEAREPTAIIRAGVRIFSDGRNANSEPLAVHRRVARAMRRRRDRLLKRKKRMHDQLVQHGFFPAEVAERKELERLNPYQLRAKGLHEALTPGEFARALFHINQRRGFKSNRKTDRKDNDSGALKQAISELRKRIQDSDCATAGEWFWKERMQQKPEGVRGQWVRARYRKTPSTTDEGKKRIGYDLYVDRAMVEQEFDALWAAQAALQPGLFTEAARAELKDTLLYQRDLRPVKPGRCTLLPAEERAPLALPSTQRFRILQEVNNLRLLDEALREVPLNLAQRDAVVSALEGKKELSFAAIRKLLTLSGKFNLEDEKRAELKGNATSVILARKDLFGDAWAGFDAAVQDEIVWRLVSQESEGALIAWLQQHTGVDGVCAEAIVNTRLPDGYGRLSRKALERIVPALQREVCTYDKAVQAAGFAHHSDLGFDFDYAEDEVQQVGEHTIASTGEVQAQYAFKQLPYYGKALQRHVAFGSGDAKDHEEKCYGKIANPTVHIGLNQVRTVVNALIRRYGHPTEVVVELARDLKQSREQKQQTQREQADNQKRNEDIRKRIAPILETSPERVRDRDIKKWILWEELNKKDIADRHCPYSGERISATMLLSEAVEIEHILPFSRTLDDSLNNRTVAMRRANRIKGDRTPWEARADFEAQGWRYEAILQRAEGMPPRKRYRFAEDGYQRWLGKDRNFLARALNDTSYLSRLAANYLRLVCPQGVRVIPGQMTDKLRGKFGLNSVLGLDGKKNRNDHRHHAVDACVIGVTDQGLMQRFANASKQARENGLTRLVQDMLLPWWPSYYDHVERAVRHIRVSHRPDHGFEGAMMKGTAHGIREDGIREDGRIKQRPKAKGSADHKTITLIPIDEPRQLARHGVDAEGKPLPYKGYASGSNYCIEITKNGKGKWEGQVISTFDAYRIKAAADAAARAGQVISTVEADSIVRKSGWERLRGAQSQNGQPLVMRLVIGDSVRMEVDGRDEVMRVVKMSGKEMVFAPVREANVDKRNNMPDEQDPFTYTYKRADQLRKAKARQVTISPIGELRDPGFKG

SEQ ID NO: 617 - protein, 1440 aa, Weeksella virosa
MKTILGLDLGTNSIGWALVEQDFENKQGLILGMGSRIIPMDAGIIGKFAEGSSISQTAERTGYRSIRRLRERHLLRRERLHRVLNILKFLPEHYAAEIDFEKRFGQFLAETEPKLAWKKNAEGKFEFLFQRSFDEMVADFKANGQDIKIPYDWTIYYLRKKALTQKISPQELAWIILNFNQKRGYYQLRGEEEEENPNKKVEFYSLKIVDVVADEQPNKKGDTWYSLHLENGWVYRRSSKIPLYDWKDKVRDFIVTTDINEDGSEKLDKDGEVKRSFRAPKEDDWTLIKKKTEQEIEQFNQTVGSYIYEALLDNPTQKIRGKLVRTIERKFYKSELKKILEKQIELQPELFTEDLYNACARELYRRNVAHQQQLSSRDFVYLFLNDIIFYQRPLRSQKSLISNCSLEFRTIKDKDGNGQIIYLKAIPKSNPYYQEFRVWQWLYNLKIFTKEDDKDVTNQFINKVEDLEALFEFLMNQKEVNHTDILTYLIEPIVKSKYPNAKGKAFKDELKKELKKYRWNYVYDADKDESKSYPMNETRYELRKRLDKVENVPADFMTRKIEQHLWHIIYSVTDKIEFEKALKSFANKYDLHQESFVENFKRFKPFDSDYGTYSEKAIKKLLPLMRVGKYWSWDIIDDKTKTRIGKIITGEYDETIKNRVREKAIDLTEENHFQGLQLWLAQYIVYDRHSEADIAGKWNSVADLEQYLSEFKQHSLRNPIVEQVITETLRVVRDIWKQYGKGAKDYFDEIHIELGREMKNTAEERKRLSSIISENETTNLRIRAILEELMYDENMENVRPYSPMQQEALKIYEDGVLSSSVEIPEDIEKISKKSEPTKSEIQRYKLWLEQKYRSPYTGRPIPLSKLFTPAYQIEHIIPQARFFDDGFSNKVICESEVNALKDKMLGLEFIQNYYGQKVTTSFGEVTILTEDAYKAFVKEHYDKNRSKRNKLLLEEIPEKMIDRQMNDTRYISKYISKVLSNLVRGEKDDEGVNSKNIIPGNGKITGILKQDWGLNDVWNDLILPRFERMNQLTNSTDFTAWNEKHQKFLPSVPLELSKGFQKKRIDHRHHALDALIIACATRDHVNLLNNKHAKSRNERYDLQHKLRHTTPWQDKEGKVRTKFTEFKKPWETFTQDTKKELEKIVVNFKQNLRVINKATNYYEKIVDGKKVMFKQEGVNWAIRKPMHKETVSGKIDLPRVKVSKGKILTATRKSLDTSFNAKTILSITDTGIQKILLNYLKAKGNPELAFSPEGIEEMNQNISLYNDGKPHQPILKVRVFEQGSKFPLGETGNKTTKYVEAAKGTNLFFGVYEDNQGKRSYDTIPLNIVIERQKQGLNSVPETNEKGHRLLFSLSPNDLVYVPIEGEVFDETNPDVNRIYKVVSFSGSQMFCVRQDVATSIVYKLEFSSLNKMERTIDGIMIKEICIKLKVDRLGNISKA

SEQ ID NO: 618 - protein, 1409 aa, Wolinella succinogenes
MLVSPISVDLGGKNTGFFSFTDSLDNSQSGTVIYDESFVLSQVGRRSKRHSKRNNLRNKLVKRLFLLILQEHHGLSIDVLPDEIRGLFNKRGYTYAGFELDEKKKDALESDTLKEFLSEKLQSIDRDSDVEDFLNQIASNAESFKDYKKGFEAVFASATHSPNKKLELKDELKSEYGENAKELLAGLRVTKEILDEFDKQENQGNLPRAKYFEELGEYIATNEKVKSFFDSNSLKLTDMTKLIGNISNYQLKELRRYFNDKEMEKGDIWIPNKLHKITERFVRSWHPKNDADRQRRAELMKDLKSKEIMELLTTTEPVMTIPPYDDMNNRGAVKCQTLRLNEEYLDKHLPNWRDIAKRLNHGKFNDDLADSTVKGYSEDSTLLHRLLDTSKEIDIYELRGKKPNELLVKTLGQSDANRLYGFAQNYYELIRQKVRAGIWVPVKNKDDSLNLEDNSNMLKRCNHNPPHKKNQIHNLVAGILGVKLDEAKFAEFEKELWSAKVGNKKLSAYCKNIEELRKTHGNTFKIDIEELRKKDPAELSKEEKAKLRLTDDVILNEWSQKIANFFDIDDKHRQRFNNLFSMAQLHTVIDTPRSGFSSTCKRCTAENRFRSETAFYNDETGEFHKKATATCQRLPADTQRPFSGKIERYIDKLGYELAKIKAKELEGMEAKEIKVPIILEQNAFEYEESLRKSKTGSNDRVINSKKDRDGKKLAKAKENAEDRLKDKDKRIKAFSSGICPYCGDTIGDDGEIDHILPRSHTLKIYGTVFNPEGNLIYVHQKCNQAKADSIYKLSDIKAGVSAQWIEEQVANIKGYKTFSVLSAEQQKAFRYALFLQNDNEAYKKVVDWLRTDQSARVNGTQKYLAKKIQEKLTKMLPNKHLSFEFILADATEVSELRRQYARQNPLLAKAEKQAPSSHAIDAVMAFVARYQKVFKDGTPPNADEVAKLAMLDSWNPASNEPLTKGLSTNQKIEKMIKSGDYGQKNMREVFGKSIFGENAIGERYKPIVVQEGGYYIGYPATVKKGYELKNCKVVTSKNDIAKLEKIIKNQDLISLKENQYIKIFSINKQTISELSNRYFNMNYKNLVERDKEIVGLLEFIVENCRYYTKKVDVKFAPKYIHETKYPFYDDWRRFDEAWRYLQENQNKTSSKDRFVIDKSSLNEYYQPDKNEYKLDVDTQPIWDDFCRWYFLDRYKTANDKKSIRIKARKTFSLLAESGVQGKVFRAKRKIPTGYAYQALPMDNNVIAGDYANILLEANSKTLSLVPKSGISIEKQLDKKLDVIKKTDVRGLAIDNNSFFNADFDTHGIRLIVENTSVKVGNFPISAIDKSAKRMIFRALFEKEKGKRKKKTTISFKESGPVQDYLKVFLKKIVKIQLRTDGSISNIVVRKNAADFTLSFRSEHIQKLLK

SEQ ID NO: 619 - protein, 1059 aa, Wolinella succinogenes
MIERILGVDLGISSLGWAIVEYDKDDEAANRIIDCGVRLFTAAETPKKKESPNKARREARGIRRVLNRRRVRMNMIKKLFLRAGLIQDVDLDGEGGMFYSKANRADVWELRHDGLYRLLKGDELARVLIHIAKHRGYKFIGDDEADEESGKVKKAGVVLRQNFEAAGCRTVGEWLWRERGANGKKRNKHGDYEISIHRDLLVEEVEAIFVAQQEMRSTIATDALKAAYREIAFFVRPMQRIEKMVGHCTYFPEERRAPKSAPTAEKFIAISKFFSTVIIDNEGWEQKIIERKTLEELLDFAVSREKVEFRHLRKFLDLSDNEIFKGLHYKGKPKTAKKREATLFDPNEPTELEFDKVEAEKKAWISLRGAAKLREALGNEFYGRFVALGKHADEATKILTYYKDEGQKRRELTKLPLEAEMVERLVKIGFSDFLKLSLKAIRDILPAMESGARYDEAVLMLGVPHKEKSAILPPLNKTDIDILNPTVIRAFAQFRKVANALVRKYGAFDRVHFELAREINTKGEIEDIKESQRKNEKERKEAADWIAETSFQVPLTRKNILKKRLYIQQDGRCAYTGDVIELERLFDEGYCEIDHILPRSRSADDSFANKVLCLARANQQKTDRTPYEWFGHDAARWNAFETRTSAPSNRVRTGKGKIDRLLKKNFDENSEMAFKDRNLNDTRYMARAIKTYCEQYWVFKNSHTKAPVQVRSGKLTSVLRYQWGLESKDRESHTHHAVDAIIIAFSTQGMVQKLSEYYRFKETHREKERPKLAVPLANFRDAVEEATRIENTETVKEGVEVKRLLISRPPRARVTGQAHEQTAKPYPRIKQVKNKKKWRLAPIDEEKFESFKADRVASANQKNFYETSTIPRVDVYHKKGKFHLVPIYLHEMVLNELPNLSLGTNPEAMDENFFKFSIFKDDLISIQTQGTPKKPAKIIMGYFKNMHGANMVLSSINNSPCEGFTCTPVSMDKKHKDKCKLCPEENRIAGRCLQGFLDYWSQEGLRPPRKEFECDQGVKFALDVKKYQIDPLGYYYEVKQEKRLGTIPQMRSAKKLVKK

SEQ ID NO: 620 - protein, 1388 aa, Zunongwangia profunda
MKRILGLDLGTNSIGWALVNEAENEKEISKIIKLGVRVNPLTIDEKTNFEKGRPLSTNADRTLKRGARRNLQRYKLRRENLIEILIDNHIITKETPLTEIGKGTTYQTLSLRAKAVRERIDLEDFAKVLLAINKKRGYKSSRKASNDEEGQAIDGMAIAKELYERGITPGQYVLELLENDRKYIPDFYRSDLKQEFNKIWNNQKTFYPEILTDELFKELDGKNKSQTWAICQKPFNIKGIKRITKGREKTIENYHWRVKGLSGKLNLEKLAIILQEINNDINQSSGYLGGISDKSKKLYLNKETVGEFLYKQIAKNPHTSLKNQVFYRHDYLDEFEQIWKTQSNFNANLTDELKQEIRDVIIFYQRKIKSQKSLISFCQFESWEQEYFDKETGKTKTRTVGRRVIPKSSPLFQEFKIWQNLNHLVFTNSETDEKIEIKEVEQEIRKELFEELNLRGDLNPNDLLKILRSQFKIGKLSNWKCNFEKIEGNRTNAALFNIYQKISDFEGYGIDWNKSNAKKIRKELKATFPEIGIDASILEFDAYKKQLTNQSSYELWHLLYSAEEDFKISEQDKLIYGNSSVSLKKKLHLKFGFNPEYAKMLANLSLMSDYGNLSAKAIKKILPYLEDGHLYSEACRLAGYNHSKSLTAEELEKFEPKAKLDLLKKNSLRNPVVEKILNQMVNVVNQVIDTYGKPDGVRIELARELKKSAKERAEMTKGIADGTRRNEEIKKIITQKFGIPNPTKSDLVRYRLWQELESRGYKDIFTDKYISPDKIFSSEIDIEHIIPKALLFDDSFSNKTLSFRNVNLKKANRTALDFITQDYQSNVEAYKERVETWNKDNHISKGKRNKLLMSLKDIPDGFIERDLRNSQYIARKAKRMLYEVFPNEVLATSGSITDKLRSDWDLINVMKELNLPKYKALGLTEYEERLDKGTEELFKHEVIKDWTKRNDHRHHAMDALAVAFTTHNHIQYINNLNARKDITQDNHPIIKNIENLITEVNSKGKRVFKAPMSSFRESAKEQIEAILVSFKNKNKVVTKNINQTKKEGGFNYQNAKTPRGQLHKETIYGKSKQPLEKPVKINNRFCKKQVGLIINFKEQEAVLHHLKKYDNNEKIAFSNKTLKSDPIQVNGSPLREVKIFEEIFTIRKDINPDNFKTQKHLDKIIDKGIKEVMKKRLEEYNGDFKTAFSDLDKNPIWLNQSKGITIKRATISGVTNAEPLHQAKDHLGNIILDDNGKEIPIDYVSTGNNHHVAIYQDESGNLQEEVVSFYEAVIRKNQDQPIIKKRHPKGWKFLFTMKQNEMFVFSSENFNPSEIDLLDEKNAAIISPNLFRVQKIATKNYMFRHHLETEVTNNLDFTYRHFQATEWLRNLCKVRIDHIGRIVQIGEY

SEQ ID NO: 621-631 - skipped (11 entries)

SEQ ID NO: 632 - RNA, 22 nt, Homo sapiens
ugcucagguugcacagcuggga

SEQ ID NO: 633 - RNA, 22 nt, Homo sapiens
ucccagcugugcaaccugagca

SEQ ID NO: 634 - RNA, 22 nt, Homo sapiens
ucagguguggaaacugaggcag

SEQ ID NO: 635 - RNA, 22 nt, Homo sapiens
cugccucaguuuccacaccuga

SEQ ID NO: 636 - RNA, 22 nt, Homo sapiens
caaaaccgcgauuacucuugca

SEQ ID NO: 637 - RNA, 22 nt, Homo sapiens
ugcaagaguaaucgcgguuuug

SEQ ID NO: 638 - RNA, 21 nt, Homo sapiens
aaaaguaauugugguuuuugc

SEQ ID NO: 639 - RNA, 21 nt, Homo sapiens
gcaaaaaccacaauuacuuuu

SEQ ID NO: 640 - RNA, 21 nt, Homo sapiens
aaaaacugcaaucacuuuugc

SEQ ID NO: 641 - RNA, 21 nt, Homo sapiens
gcaaaagugauugcaguuuuu

SEQ ID NO: 642 - RNA, 22 nt, Homo sapiens
caaaagugauugugguuuuugc

SEQ ID NO: 643 - RNA, 22 nt, Homo sapiens
gcaaaaaccacaaucacuuuug

SEQ ID NO: 644 - RNA, 22 nt, Homo sapiens
agcaguguuuguuuugcccaca

SEQ ID NO: 645 - RNA, 22 nt, Homo sapiens
ugugggcaaaacaaacacugcu

SEQ ID NO: 646 - RNA, 22 nt, Homo sapiens
ucgggcgcaagagcacugcagu

SEQ ID NO: 647 - RNA, 22 nt, Homo sapiens
acugcagugcucuugcgcccga

SEQ ID NO: 648 - RNA, 21 nt, Homo sapiens
acacuuguugggaugaccugc

SEQ ID NO: 649 - RNA, 21 nt, Homo sapiens
gcaggucaucccaacaagugu

SEQ ID NO: 650 - RNA, 24 nt, Homo sapiens
aggagcuauccacuccaggugucc

SEQ ID NO: 651 - RNA, 24 nt, Homo sapiens
ggacaccuggaguggauagcuccu

SEQ ID NO: 652 - RNA, 23 nt, Homo sapiens
ccagagcagccugcgguaacagu

SEQ ID NO: 653 - RNA, 23 nt, Homo sapiens
acuguuaccgcaggcugcucugg

SEQ ID NO: 654 - RNA, 22 nt, Homo sapiens
aguugccagggcugccuuuggu

SEQ ID NO: 655 - RNA, 22 nt, Homo sapiens
accaaaggcagcccuggcaacu

SEQ ID NO: 656 - RNA, 21 nt, Homo sapiens
uagaccaucuuucuagaguau

SEQ ID NO: 657 - RNA, 21 nt, Homo sapiens
auacucuagaaagauggucua

SEQ ID NO: 658 - RNA, 22 nt, Homo sapiens
agcucuagaaagauuguugacc

SEQ ID NO: 659 - RNA, 22 nt, Homo sapiens
ggucaacaaucuuucuagagcu

SEQ ID NO: 660 - RNA, 21 nt, Homo sapiens
gggacuaggaugcagaccucc

SEQ ID NO: 661 - RNA, 21 nt, Homo sapiens
ggaggucugcauccuaguccc

SEQ ID NO: 662 - RNA, 23 nt, Homo sapiens
aggucugcauucaaauccccaga

SEQ ID NO: 663 - RNA, 23 nt, Homo sapiens
ucuggggauuugaaugcagaccu

SEQ ID NO: 664 - RNA, 20 nt, Homo sapiens
cauuacagcacagccauucu

SEQ ID NO: 665 - RNA, 20 nt, Homo sapiens
agaauggcugugcuguaaug

SEQ ID NO: 666 - RNA, 21 nt, Homo sapiens
ucuggcugugcuguaaugcag

SEQ ID NO: 667 - RNA, 21 nt, Homo sapiens
cugcauuacagcacagccaga

SEQ ID NO: 668 - RNA, 21 nt, Homo sapiens
ugacuucuaccucuuccaaag

SEQ ID NO: 669 - RNA, 21 nt, Homo sapiens
cuuuggaagagguagaaguca

SEQ ID NO: 670 - RNA, 22 nt, Homo sapiens
uuggaauaggggauaucucagc

SEQ ID NO: 671 - RNA, 22 nt, Homo sapiens
gcugagauauccccuauuccaa

SEQ ID NO: 672 - RNA, 22 nt, Homo sapiens
ucguaucagagauuccagacac

SEQ ID NO: 673 - RNA, 22 nt, Homo sapiens
gugucuggaaucucugauacga

SEQ ID NO: 674 - RNA, 23 nt, Homo sapiens
acugggaugucacugaauauggu

SEQ ID NO: 675 - RNA, 23 nt, Homo sapiens
accauauucagugacaucccagu

SEQ ID NO: 676 - RNA, 22 nt, Homo sapiens
caaaguccuuccuauuuuuccc

SEQ ID NO: 677 - RNA, 22 nt, Homo sapiens
gggaaaaauaggaaggacuuug

SEQ ID NO: 678 - RNA, 21 nt, Homo sapiens
gaagaauaggagggacuuugu

SEQ ID NO: 679 - RNA, 21 nt, Homo sapiens
acaaagucccuccuauucuuc

SEQ ID NO: 680 - RNA, 22 nt, Homo sapiens
ugggccaugcauuucuagaacu

SEQ ID NO: 681 - RNA, 22 nt, Homo sapiens
aguucuagaaaugcauggccca

SEQ ID NO: 682 - RNA, 21 nt, Homo sapiens
ucuagaaaugcaugacccacc

SEQ ID NO: 683 - RNA, 21 nt, Homo sapiens
ggugggucaugcauuucuaga

SEQ ID NO: 684 - RNA, 22 nt, Homo sapiens
uuccacugccacuaccuaauuu

SEQ ID NO: 685 - RNA, 22 nt, Homo sapiens
aaauuagguaguggcaguggaa

SEQ ID NO: 686 - RNA, 21 nt, Homo sapiens
auuagguaguggcaguggaac

SEQ ID NO: 687 - RNA, 21 nt, Homo sapiens
guuccacugccacuaccuaau

SEQ ID NO: 688 - RNA, 21 nt, Homo sapiens
caccgacucugucuccugcag

SEQ ID NO: 689 - RNA, 21 nt, Homo sapiens
cugcaggagacagagucggug

SEQ ID NO: 690 - RNA, 22 nt, Homo sapiens
cagcaggggagagagaggaguc

SEQ ID NO: 691 - RNA, 22 nt, Homo sapiens
gacuccucucucuccccugcug

SEQ ID NO: 692 - RNA, 22 nt, Homo sapiens
uuccagcccuucuaaugguagg

SEQ ID NO: 693 - RNA, 22 nt, Homo sapiens
ccuaccauuagaagggcuggaa

SEQ ID NO: 694 - RNA, 22 nt, Homo sapiens
uaccauuagaagagcuggaaga

SEQ ID NO: 695 - RNA, 22 nt, Homo sapiens
ucuuccagcucuucuaauggua

SEQ ID NO: 696 - RNA, 21 nt, Homo sapiens
ucaagugucaucugucccuag

SEQ ID NO: 697 - RNA, 21 nt, Homo sapiens
cuagggacagaugacacuuga

SEQ ID NO: 698 - RNA, 23 nt, Homo sapiens
uuugggauugacgccacaugucu

SEQ ID NO: 699 - RNA, 23 nt, Homo sapiens
agacauguggcgucaaucccaaa

SEQ ID NO: 700 - RNA, 21 nt, Homo sapiens
cugccuguucuuccacuccag

SEQ ID NO: 701 - RNA, 21 nt, Homo sapiens
cuggaguggaagaacaggcag

SEQ ID NO: 702 - RNA, 23 nt, Homo sapiens
uauggaguggacuuucagcuggc

SEQ ID NO: 703 - RNA, 23 nt, Homo sapiens
gccagcugaaaguccacuccaua

SEQ ID NO: 704 - RNA, 22 nt, Homo sapiens
ccucaccaucccuucugccugc

SEQ ID NO: 705 - RNA, 22 nt, Homo sapiens
gcaggcagaagggauggugagg

SEQ ID NO: 706 - RNA, 23 nt, Homo sapiens
caggcagaaguggggcugacagg

SEQ ID NO: 707 - RNA, 23 nt, Homo sapiens
ccugucagccccacuucugccug

SEQ ID NO: 708 - RNA, 20 nt, Homo sapiens
ucucuucaucuaccccccag

SEQ ID NO: 709 - RNA, 20 nt, Homo sapiens
cugggggguagaugaagaga

SEQ ID NO: 710 - RNA, 21 nt, Homo sapiens
uuggaggguguggaagacauc

SEQ ID NO: 711 - RNA, 21 nt, Homo sapiens
gaugucuuccacacccuccaa

SEQ ID NO: 712 - RNA, 22 nt, Homo sapiens
cugccagccccguuccagggca

SEQ ID NO: 713 - RNA, 22 nt, Homo sapiens
ugcccuggaacggggcuggcag

SEQ ID NO: 714 - RNA, 23 nt, Homo sapiens
acaaaguacagcauuagccuuag

SEQ ID NO: 715 - RNA, 23 nt, Homo sapiens
cuaaggcuaaugcuguacuuugu

SEQ ID NO: 716 - RNA, 23 nt, Homo sapiens
aaaggucauuguaagguuaaugc

SEQ ID NO: 717 - RNA, 23 nt, Homo sapiens
gcauuaaccuuacaaugaccuuu

SEQ ID NO: 718 - RNA, 22 nt, Homo sapiens
ugaggcuaaugcacuacuucac

SEQ ID NO: 719 - RNA, 22 nt, Homo sapiens
gugaaguagugcauuagccuca

SEQ ID NO: 720 - RNA, 24 nt, Homo sapiens
uauagagagcaggaagauuaaugu

SEQ ID NO: 721 - RNA, 24 nt, Homo sapiens
acauuaaucuuccugcucucuaua

SEQ ID NO: 722 - RNA, 23 nt, Homo sapiens
gugcuucaucguaauuaaccuua

SEQ ID NO: 723 - RNA, 23 nt, Homo sapiens
uaagguuaauuacgaugaagcac

SEQ ID NO: 724 - RNA, 24 nt, Homo sapiens
guggaaagcaugcauccagggugu

SEQ ID NO: 725 - RNA, 24 nt, Homo sapiens
acacccuggaugcaugcuuuccac

SEQ ID NO: 726 - RNA, 22 nt, Homo sapiens
agacacauuuggagagggaacc

SEQ ID NO: 727 - RNA, 22 nt, Homo sapiens
gguucccucuccaaaugugucu

SEQ ID NO: 728 - RNA, 22 nt, Homo sapiens
uucccuuugucauccuaugccu

SEQ ID NO: 729 - RNA, 22 nt, Homo sapiens
aggcauaggaugacaaagggaa

SEQ ID NO: 730 - RNA, 21 nt, Homo sapiens
gcugggaaggcaaagggacgu

SEQ ID NO: 731 - RNA, 21 nt, Homo sapiens
acgucccuuugccuucccagc

SEQ ID NO: 732 - RNA, 21 nt, Homo sapiens
uaccacaggguagaaccacgg

SEQ ID NO: 733 - RNA, 21 nt, Homo sapiens
ccgugguucuacccuguggua

SEQ ID NO: 734 - RNA, 22 nt, Homo sapiens
ggcuggagcgagugcaguggug

SEQ ID NO: 735 - RNA, 22 nt, Homo sapiens
caccacugcacucgcuccagcc

SEQ ID NO: 736 - RNA, 18 nt, Homo sapiens
ccaggcucugcaguggga

SEQ ID NO: 737 - RNA, 18 nt, Homo sapiens
ucccacugcagagccugg

SEQ ID NO: 738 - RNA, 22 nt, Homo sapiens
cugggaggugugauauuguggu

SEQ ID NO: 739 - RNA, 22 nt, Homo sapiens
accacaauaucacaccucccag

SEQ ID NO: 740 - RNA, 22 nt, Homo sapiens
gggaggugugaucucacacucg

SEQ ID NO: 741 - RNA, 22 nt, Homo sapiens
cgagugugagaucacaccuccc

SEQ ID NO: 742 - RNA, 22 nt, Homo sapiens
ugugauaucaugguuccuggga

SEQ ID NO: 743 - RNA, 22 nt, Homo sapiens
ucccaggaaccaugauaucaca

SEQ ID NO: 744 - RNA, 22 nt, Homo sapiens
ugugauaucgugcuuccuggga

SEQ ID NO: 745 - RNA, 22 nt, Homo sapiens
ucccaggaagcacgauaucaca

SEQ ID NO: 746 - RNA, 18 nt, Homo sapiens
ggugggcuucccggaggg

SEQ ID NO: 747 - RNA, 18 nt, Homo sapiens
cccuccgggaagcccacc

SEQ ID NO: 748 - RNA, 18 nt, Homo sapiens
cacugcaggacucagcag

SEQ ID NO: 749 - RNA, 18 nt, Homo sapiens
cugcugaguccugcagug

SEQ ID NO: 750 - RNA, 17 nt, Homo sapiens
ugagggaggagacugca

SEQ ID NO: 751 - RNA, 17 nt, Homo sapiens
ugcagucuccucccuca

SEQ ID NO: 752 - RNA, 18 nt, Homo sapiens
gaggcugaaggaagaugg

SEQ ID NO: 753 - RNA, 18 nt, Homo sapiens
ccaucuuccuucagccuc

SEQ ID NO: 754 - RNA, 22 nt, Homo sapiens
gucacugaugucuguagcugag

SEQ ID NO: 755 - RNA, 22 nt, Homo sapiens
cucagcuacagacaucagugac

SEQ ID NO: 756 - RNA, 22 nt, Homo sapiens
accugucuguggaaaggagcua

SEQ ID NO: 757 - RNA, 22 nt, Homo sapiens
uagcuccuuuccacagacaggu

SEQ ID NO: 758 - RNA, 22 nt, Homo sapiens
agaguuaacucaaaauggacua

SEQ ID NO: 759 - RNA, 22 nt, Homo sapiens
uaguccauuuugaguuaacucu

SEQ ID NO: 760 - RNA, 22 nt, Homo sapiens
uguugggauucagcaggaccau

SEQ ID NO: 761 - RNA, 22 nt, Homo sapiens
augguccugcugaaucccaaca

SEQ ID NO: 762 - RNA, 17 nt, Homo sapiens
gaagauggacguacuuu

SEQ ID NO: 763 - RNA, 17 nt, Homo sapiens
aaaguacguccaucuuc

SEQ ID NO: 764 - RNA, 21 nt, Homo sapiens
ucugaauagagucugaagagu

SEQ ID NO: 765 - RNA, 21 nt, Homo sapiens
acucuucagacucuauucaga

SEQ ID NO: 766 - RNA, 22 nt, Homo sapiens
caaggagacgggaacauggagc

SEQ ID NO: 767 - RNA, 22 nt, Homo sapiens
gcuccauguucccgucuccuug

SEQ ID NO: 768 - RNA, 20 nt, Homo sapiens
aaaagcugggcugagaggcg

SEQ ID NO: 769 - RNA, 20 nt, Homo sapiens
cgccucucagcccagcuuuu

SEQ ID NO: 770 - RNA, 18 nt, Homo sapiens
aggcuggagugagcggag

SEQ ID NO: 771 - RNA, 18 nt, Homo sapiens
cuccgcucacuccagccu

SEQ ID NO: 772 - RNA, 22 nt, Homo sapiens
gcgacucugaaaacuagaaggu

SEQ ID NO: 773 - RNA, 22 nt, Homo sapiens
accuucuaguuuucagagucgc

SEQ ID NO: 774 - RNA, 20 nt, Homo sapiens
aaagacucugcaagaugccu

SEQ ID NO: 775 - RNA, 20 nt, Homo sapiens
aggcaucuugcagagucuuu

SEQ ID NO: 776 - RNA, 21 nt, Homo sapiens
acaggagugggggugggacau

SEQ ID NO: 777 - RNA, 21 nt, Homo sapiens
augucccacccccacuccugu

SEQ ID NO: 778 - RNA, 21 nt, Homo sapiens
cgucccaccccccacuccugu

SEQ ID NO: 779 - RNA, 21 nt, Homo sapiens
acaggaguggggggugggacg

SEQ ID NO: 780 - RNA, 18 nt, Homo sapiens
aggagaaguaaaguagaa

SEQ ID NO: 781 - RNA, 18 nt, Homo sapiens
uucuacuuuacuucuccu

SEQ ID NO: 782 - RNA, 22 nt, Homo sapiens
auggccagagcucacacagagg

SEQ ID NO: 783 - RNA, 22 nt, Homo sapiens
ccucugugugagcucuggccau

SEQ ID NO: 784 - RNA, 21 nt, Homo sapiens
ugggcucaggguacaaagguu

SEQ ID NO: 785 - RNA, 21 nt, Homo sapiens
aaccuuuguacccugagccca

SEQ ID NO: 786 - RNA, 21 nt, Homo sapiens
cacaggcuuagaaaagacagu

SEQ ID NO: 787 - RNA, 21 nt, Homo sapiens
acugucuuuucuaagccugug

SEQ ID NO: 788 - RNA, 22 nt, Homo sapiens
gugacugauaccuuggaggcau

SEQ ID NO: 789 - RNA, 22 nt, Homo sapiens
augccuccaagguaucagucac

SEQ ID NO: 790 - RNA, 22 nt, Homo sapiens
ugucguggggcuugcuggcuug

SEQ ID NO: 791 - RNA, 22 nt, Homo sapiens
caagccagcaagccccacgaca

SEQ ID NO: 792 - RNA, 17 nt, Homo sapiens
acagggaggagauugua

SEQ ID NO: 793 - RNA, 17 nt, Homo sapiens
uacaaucuccucccugu

SEQ ID NO: 794 - RNA, 17 nt, Homo sapiens
gccggacaagagggagg

SEQ ID NO: 795 - RNA, 17 nt, Homo sapiens
ccucccucuuguccggc

SEQ ID NO: 796 - RNA, 17 nt, Homo sapiens
uuggaggcguggguuuu

SEQ ID NO: 797 - RNA, 17 nt, Homo sapiens
aaaacccacgccuccaa

SEQ ID NO: 798 - RNA, 18 nt, Homo sapiens
cucgaguuggaagaggcg

SEQ ID NO: 799 - RNA, 18 nt, Homo sapiens
cgccucuuccaacucgag

SEQ ID NO: 800 - RNA, 21 nt, Homo sapiens
cacggcaaaagaaacaaucca

SEQ ID NO: 801 - RNA, 21 nt, Homo sapiens
uggauuguuucuuuugccgug

SEQ ID NO: 802 - RNA, 22 nt, Homo sapiens
agauuguuucuuuugccgugca

SEQ ID NO: 803 - RNA, 22 nt, Homo sapiens
ugcacggcaaaagaaacaaucu

SEQ ID NO: 804 - RNA, 17 nt, Homo sapiens
ggugggggcuguuguuu

SEQ ID NO: 805 - RNA, 17 nt, Homo sapiens
aaacaacagcccccacc

SEQ ID NO: 806 - RNA, 20 nt, Homo sapiens
ggcuccuuggucuaggggua

SEQ ID NO: 807 - RNA, 20 nt, Homo sapiens
uaccccuagaccaaggagcc

SEQ ID NO: 808 - RNA, 22 nt, Homo sapiens
cgucccggggcugcgcgaggca

SEQ ID NO: 809 - RNA, 22 nt, Homo sapiens
ugccucgcgcagccccgggacg

SEQ ID NO: 810 - RNA, 22 nt, Homo sapiens
uggggauuuggagaagugguga

SEQ ID NO: 811 - RNA, 22 nt, Homo sapiens
ucaccacuucuccaaaucccca

SEQ ID NO: 812 - RNA, 17 nt, Homo sapiens
ugguagagcugaggaca

SEQ ID NO: 813 - RNA, 17 nt, Homo sapiens
uguccucagcucuacca

SEQ ID NO: 814 - RNA, 23 nt, Homo sapiens
uugaauucuuggccuuaagugau

SEQ ID NO: 815 - RNA, 23 nt, Homo sapiens
aucacuuaaggccaagaauucaa

SEQ ID NO: 816 - RNA, 20 nt, Homo sapiens
gagcuuggucuguagcgguu

SEQ ID NO: 817 - RNA, 20 nt, Homo sapiens
aaccgcuacagaccaagcuc

SEQ ID NO: 818 - RNA, 20 nt, Homo sapiens
ggauccgagucacggcacca

SEQ ID NO: 819 - RNA, 20 nt, Homo sapiens
uggugccgugacucggaucc

SEQ ID NO: 820 - RNA, 17 nt, Homo sapiens
aggguguguguguuuuu

SEQ ID NO: 821 - RNA, 17 nt, Homo sapiens
aaaaacacacacacccu

SEQ ID NO: 822 - RNA, 17 nt, Homo sapiens
ccugguggcuuccuuuu

SEQ ID NO: 823 - RNA, 17 nt, Homo sapiens
aaaaggaagccaccagg

SEQ ID NO: 824 - RNA, 22 nt, Homo sapiens
ucacaagguauugacuggcgua

SEQ ID NO: 825 - RNA, 22 nt, Homo sapiens
uacgccagucaauaccuuguga

SEQ ID NO: 826 - RNA, 19 nt, Homo sapiens
agagguagguguggaagaa

SEQ ID NO: 827 - RNA, 19 nt, Homo sapiens
uucuuccacaccuaccucu

SEQ ID NO: 828 - RNA, 22 nt, Homo sapiens
ccaggaggcggaggagguggag

SEQ ID NO: 829 - RNA, 22 nt, Homo sapiens
cuccaccuccuccgccuccugg

SEQ ID NO: 830 - RNA, 22 nt, Homo sapiens
auagugguugugaauuuaccuu

SEQ ID NO: 831 - RNA, 22 nt, Homo sapiens
aagguaaauucacaaccacuau

SEQ ID NO: 832 - RNA, 23 nt, Homo sapiens
gauugagacuaguagggcuaggc

SEQ ID NO: 833 - RNA, 23 nt, Homo sapiens
gccuagcccuacuagucucaauc

SEQ ID NO: 834 - RNA, 23 nt, Homo sapiens
ugacacggaggguggcuugggaa

SEQ ID NO: 835 - RNA, 23 nt, Homo sapiens
uucccaagccacccuccguguca

SEQ ID NO: 836 - RNA, 17 nt, Homo sapiens
gagacugggguggggcc

SEQ ID NO: 837 - RNA, 17 nt, Homo sapiens
ggccccaccccagucuc

SEQ ID NO: 838 - RNA, 21 nt, Homo sapiens
aagguuuggauagaugcaaua

SEQ ID NO: 839 - RNA, 21 nt, Homo sapiens
uauugcaucuauccaaaccuu

SEQ ID NO: 840 - RNA, 22 nt, Homo sapiens
cucaaguagucugaccagggga

SEQ ID NO: 841 - RNA, 22 nt, Homo sapiens
uccccuggucagacuacuugag

SEQ ID NO: 842 - RNA, 18 nt, Homo sapiens
gggugcgggccggcgggg

SEQ ID NO: 843 - RNA, 18 nt, Homo sapiens
ccccgccggcccgcaccc

SEQ ID NO: 844 - RNA, 18 nt, Homo sapiens
agagcagaaggaugagau

SEQ ID NO: 845 - RNA, 18 nt, Homo sapiens
aucucauccuucugcucu

SEQ ID NO: 846 - RNA, 21 nt, Homo sapiens
uggcaaacguggaagccgaga

SEQ ID NO: 847 - RNA, 21 nt, Homo sapiens
ucucggcuuccacguuugcca

SEQ ID NO: 848 - RNA, 18 nt, Homo sapiens
ggugggggguguuguuuu

SEQ ID NO: 849 - RNA, 18 nt, Homo sapiens
aaaacaacaccccccacc

SEQ ID NO: 850 - RNA, 22 nt, Homo sapiens
cuagugcucuccguuacaagua

SEQ ID NO: 851 - RNA, 22 nt, Homo sapiens
uacuuguaacggagagcacuag

SEQ ID NO: 852 - RNA, 22 nt, Homo sapiens
caagggaccaagcauucauuau

SEQ ID NO: 853 - RNA, 22 nt, Homo sapiens
auaaugaaugcuuggucccuug

SEQ ID NO: 854 - RNA, 22 nt, Homo sapiens
caggaaggauuuagggacaggc

SEQ ID NO: 855 - RNA, 22 nt, Homo sapiens
gccugucccuaaauccuuccug

SEQ ID NO: 856 - RNA, 22 nt, Homo sapiens
cuauuaaggacauuugugauuc

SEQ ID NO: 857 - RNA, 22 nt, Homo sapiens
gaaucacaaauguccuuaauag

SEQ ID NO: 858 - RNA, 22 nt, Homo sapiens
auuaaggacauuugugauugau

SEQ ID NO: 859 - RNA, 22 nt, Homo sapiens
aucaaucacaaauguccuuaau

SEQ ID NO: 860 - RNA, 17 nt, Homo sapiens
gaggcugagcugaggag

SEQ ID NO: 861 - RNA, 17 nt, Homo sapiens
cuccucagcucagccuc

SEQ ID NO: 862 - RNA, 22 nt, Homo sapiens
cgcgcggccgugcucggagcag

SEQ ID NO: 863 - RNA, 22 nt, Homo sapiens
cugcuccgagcacggccgcgcg

SEQ ID NO: 864 - RNA, 21 nt, Homo sapiens
agccaaguggaaguuacuuua

SEQ ID NO: 865 - RNA, 21 nt, Homo sapiens
uaaaguaacuuccacuuggcu

SEQ ID NO: 866 - RNA, 17 nt, Homo sapiens
ggagugggcuggugguu

SEQ ID NO: 867 - RNA, 17 nt, Homo sapiens
aaccaccagcccacucc

SEQ ID NO: 868 - RNA, 22 nt, Homo sapiens
uuucuauuucucaguggggcuc

SEQ ID NO: 869 - RNA, 22 nt, Homo sapiens
gagccccacugagaaauagaaa

SEQ ID NO: 870 - RNA, 22 nt, Homo sapiens
aacccagugggcuauggaaaug

SEQ ID NO: 871 - RNA, 22 nt, Homo sapiens
cauuuccauagcccacuggguu

SEQ ID NO: 872 - RNA, 17 nt, Homo sapiens
gggguggucuguuguug

SEQ ID NO: 873 - RNA, 17 nt, Homo sapiens
caacaacagaccacccc

SEQ ID NO: 874 - RNA, 20 nt, Homo sapiens
aaaaggcgggagaagcccca

SEQ ID NO: 875 - RNA, 20 nt, Homo sapiens
uggggcuucucccgccuuuu

SEQ ID NO: 876 - RNA, 20 nt, Homo sapiens
uaacggccgcgguacccuaa

SEQ ID NO: 877 - RNA, 20 nt, Homo sapiens
uuaggguaccgcggccguua

SEQ ID NO: 878 - RNA, 17 nt, Homo sapiens
gcugggcgaggcuggca

SEQ ID NO: 879 - RNA, 17 nt, Homo sapiens
ugccagccucgcccagc

SEQ ID NO: 880 - RNA, 19 nt, Homo sapiens
agagcuggcugaagggcag

SEQ ID NO: 881 - RNA, 19 nt, Homo sapiens
cugcccuucagccagcucu

SEQ ID NO: 882 - RNA, 18 nt, Homo sapiens
agggggcgggcuccggcg

SEQ ID NO: 883 - RNA, 18 nt, Homo sapiens
cgccggagcccgcccccu

SEQ ID NO: 884 - RNA, 22 nt, Homo sapiens
ucugguaagagauuugggcaua

SEQ ID NO: 885 - RNA, 22 nt, Homo sapiens
uaugcccaaaucucuuaccaga

SEQ ID NO: 886 - RNA, 22 nt, Homo sapiens
aauguggacuggugugaccaaa

SEQ ID NO: 887 - RNA, 22 nt, Homo sapiens
uuuggucacaccaguccacauu

SEQ ID NO: 888 - RNA, 17 nt, Homo sapiens
ggggcugggcgcgcgcc

SEQ ID NO: 889 - RNA, 17 nt, Homo sapiens
ggcgcgcgcccagcccc

SEQ ID NO: 890 - RNA, 21 nt, Homo sapiens
agaaggccuuuccaucucugu

SEQ ID NO: 891 - RNA, 21 nt, Homo sapiens
acagagauggaaaggccuucu

SEQ ID NO: 892 - RNA, 22 nt, Homo sapiens
ccagacuguggcugaccagagg

SEQ ID NO: 893 - RNA, 22 nt, Homo sapiens
ccucuggucagccacagucugg

SEQ ID NO: 894 - RNA, 21 nt, Homo sapiens
aauguaaacaggcuuuuugcu

SEQ ID NO: 895 - RNA, 21 nt, Homo sapiens
agcaaaaagccuguuuacauu

SEQ ID NO: 896 - RNA, 22 nt, Homo sapiens
gaggaaacugaagcugagaggg

SEQ ID NO: 897 - RNA, 22 nt, Homo sapiens
cccucucagcuucaguuuccuc

SEQ ID NO: 898 - RNA, 17 nt, Homo sapiens
cuccgggacggcugggc

SEQ ID NO: 899 - RNA, 17 nt, Homo sapiens
gcccagccgucccggag

SEQ ID NO: 900 - RNA, 22 nt, Homo sapiens
ugggcuggcagggcaagugcug

SEQ ID NO: 901 - RNA, 22 nt, Homo sapiens
cagcacuugcccugccagccca

SEQ ID NO: 902 - RNA, 17 nt, Homo sapiens
aagacugagaggaggga

SEQ ID NO: 903 - RNA, 17 nt, Homo sapiens
ucccuccucucagucuu

SEQ ID NO: 904 - RNA, 17 nt, Homo sapiens
ugagguaguaguuucuu

SEQ ID NO: 905 - RNA, 17 nt, Homo sapiens
aagaaacuacuaccuca

SEQ ID NO: 906 - RNA, 21 nt, Homo sapiens
uaugugaccucggaugaauca

SEQ ID NO: 907 - RNA, 21 nt, Homo sapiens
ugauucauccgaggucacaua

SEQ ID NO: 908 - RNA, 22 nt, Homo sapiens
gcugaugaugauggugcugaag

SEQ ID NO: 909 - RNA, 22 nt, Homo sapiens
cuucagcaccaucaucaucagc

SEQ ID NO: 910 - RNA, 22 nt, Homo sapiens
uuuaagcaggaaauagaauuua

SEQ ID NO: 911 - RNA, 22 nt, Homo sapiens
uaaauucuauuuccugcuuaaa

SEQ ID NO: 912 - RNA, 22 nt, Homo sapiens
ugugacaauagagaugaacaug

SEQ ID NO: 913 - RNA, 22 nt, Homo sapiens
cauguucaucucuauugucaca

SEQ ID NO: 914 - RNA, 18 nt, Homo sapiens
aggcugggcugggacgga

SEQ ID NO: 915 - RNA, 18 nt, Homo sapiens
uccgucccagcccagccu

SEQ ID NO: 916 - RNA, 20 nt, Homo sapiens
aaauggguggucugaggcaa

SEQ ID NO: 917 - RNA, 20 nt, Homo sapiens
uugccucagaccacccauuu

SEQ ID NO: 918 - RNA, 20 nt, Homo sapiens
cuggguugggcugggcuggg

SEQ ID NO: 919 - RNA, 20 nt, Homo sapiens
cccagcccagcccaacccag

SEQ ID NO: 920 - RNA, 17 nt, Homo sapiens
gcggggcugggcgcgcg

SEQ ID NO: 921 - RNA, 17 nt, Homo sapiens
cgcgcgcccagccccgc

SEQ ID NO: 922 - RNA, 22 nt, Homo sapiens
acuaaaggauauagaagguuuu

SEQ ID NO: 923 - RNA, 22 nt, Homo sapiens
aaaaccuucuauauccuuuagu

SEQ ID NO: 924 - RNA, 22 nt, Homo sapiens
ugagggaguaggauguaugguu

SEQ ID NO: 925 - RNA, 22 nt, Homo sapiens
aaccauacauccuacucccuca

SEQ ID NO: 926 - RNA, 22 nt, Homo sapiens
gaagaacuguugcauuugcccu

SEQ ID NO: 927 - RNA, 22 nt, Homo sapiens
agggcaaaugcaacaguucuuc

SEQ ID NO: 928 - RNA, 22 nt, Homo sapiens
cagggccucacuguaucgccca

SEQ ID NO: 929 - RNA, 22 nt, Homo sapiens
ugggcgauacagugaggcccug

SEQ ID NO: 930 - RNA, 22 nt, Homo sapiens
agacugacggcuggaggcccau

SEQ ID NO: 931 - RNA, 22 nt, Homo sapiens
augggccuccagccgucagucu

SEQ ID NO: 932 - RNA, 18 nt, Homo sapiens
acaggcaggauuggggaa

SEQ ID NO: 933 - RNA, 18 nt, Homo sapiens
uuccccaauccugccugu

SEQ ID NO: 934 - RNA, 22 nt, Homo sapiens
aggacuggacucccggcagccc

SEQ ID NO: 935 - RNA, 22 nt, Homo sapiens
gggcugccgggaguccaguccu

SEQ ID NO: 936 - RNA, 17 nt, Homo sapiens
gggagaagggucggggc

SEQ ID NO: 937 - RNA, 17 nt, Homo sapiens
gccccgacccuucuccc

SEQ ID NO: 938 - RNA, 25 nt, Homo sapiens
aaauaugaugaaacucacagcugag

SEQ ID NO: 939 - RNA, 25 nt, Homo sapiens
cucagcugugaguuucaucauauuu

SEQ ID NO: 940 - RNA, 26 nt, Homo sapiens
gcucagggaugauaacugugcugaga

SEQ ID NO: 941 - RNA, 26 nt, Homo sapiens
ucucagcacaguuaucaucccugagc

SEQ ID NO: 942 - RNA, 18 nt, Homo sapiens
cagcagugcgcagggcug

SEQ ID NO: 943 - RNA, 18 nt, Homo sapiens
cagcccugcgcacugcug

SEQ ID NO: 944 - RNA, 22 nt, Homo sapiens
gcuaaggaaguccugugcucag

SEQ ID NO: 945 - RNA, 22 nt, Homo sapiens
cugagcacaggacuuccuuagc

SEQ ID NO: 946 - RNA, 21 nt, Homo sapiens
ugacucugccuguaggccggu

SEQ ID NO: 947 - RNA, 21 nt, Homo sapiens
accggccuacaggcagaguca

SEQ ID NO: 948 - RNA, 21 nt, Homo sapiens
gaccgagagggccucggcugu

SEQ ID NO: 949 - RNA, 21 nt, Homo sapiens
acagccgaggcccucucgguc

SEQ ID NO: 950 - RNA, 21 nt, Homo sapiens
ggggggaugugcaugcugguu

SEQ ID NO: 951 - RNA, 21 nt, Homo sapiens
aaccagcaugcacaucccccc

SEQ ID NO: 952 - RNA, 22 nt, Homo sapiens
uggucugcaaagagaugacugu

SEQ ID NO: 953 - RNA, 22 nt, Homo sapiens
acagucaucucuuugcagacca

SEQ ID NO: 954 - RNA, 22 nt, Homo sapiens
ucauuauauguaugaucuggac

SEQ ID NO: 955 - RNA, 22 nt, Homo sapiens
guccagaucauacauauaauga

SEQ ID NO: 956 - RNA, 18 nt, Homo sapiens
cccagcaggacgggagcg

SEQ ID NO: 957 - RNA, 18 nt, Homo sapiens
cgcucccguccugcuggg

SEQ ID NO: 958 - RNA, 17 nt, Homo sapiens
auggagaaggcuucuga

SEQ ID NO: 959 - RNA, 17 nt, Homo sapiens
ucagaagccuucuccau

SEQ ID NO: 960 - RNA, 17 nt, Homo sapiens
ccccggggagcccggcg

SEQ ID NO: 961 - RNA, 17 nt, Homo sapiens
cgccgggcuccccgggg

SEQ ID NO: 962 - RNA, 22 nt, Homo sapiens
uggaaggagguugccggacgcu

SEQ ID NO: 963 - RNA, 22 nt, Homo sapiens
agcguccggcaaccuccuucca

SEQ ID NO: 964 - RNA, 17 nt, Homo sapiens
ggauggaggaggggucu

SEQ ID NO: 965 - RNA, 17 nt, Homo sapiens
agaccccuccuccaucc

SEQ ID NO: 966 - RNA, 17 nt, Homo sapiens
guggaccuggcugggac

SEQ ID NO: 967 - RNA, 17 nt, Homo sapiens
gucccagccagguccac

SEQ ID NO: 968 - RNA, 21 nt, Homo sapiens
ucgugcauauaucuaccacau

SEQ ID NO: 969 - RNA, 21 nt, Homo sapiens
augugguagauauaugcacga

SEQ ID NO: 970 - RNA, 21 nt, Homo sapiens
ugugguagauauaugcacgau

SEQ ID NO: 971 - RNA, 21 nt, Homo sapiens
aucgugcauauaucuaccaca

SEQ ID NO: 972 - RNA, 22 nt, Homo sapiens
ugagccgagcugagcuuagcug

SEQ ID NO: 973 - RNA, 22 nt, Homo sapiens
cagcuaagcucagcucggcuca

SEQ ID NO: 974 - RNA, 22 nt, Homo sapiens
gagcuuggaugagcugggcuga

SEQ ID NO: 975 - RNA, 22 nt, Homo sapiens
ucagcccagcucauccaagcuc

SEQ ID NO: 976 - RNA, 22 nt, Homo sapiens
gcugaacugggcugagcugggc

SEQ ID NO: 977 - RNA, 22 nt, Homo sapiens
gcccagcucagcccaguucagc

SEQ ID NO: 978 - RNA, 21 nt, Homo sapiens
uuaguccugccuguagguuua

SEQ ID NO: 979 - RNA, 21 nt, Homo sapiens
uaaaccuacaggcaggacuaa

SEQ ID NO: 980 - RNA, 20 nt, Homo sapiens
uugggcugggcuggguuggg

SEQ ID NO: 981 - RNA, 20 nt, Homo sapiens
cccaacccagcccagcccaa

SEQ ID NO: 982 - RNA, 20 nt, Homo sapiens
uaggaugggggugagaggug

SEQ ID NO: 983 - RNA, 20 nt, Homo sapiens
caccucucacccccauccua

SEQ ID NO: 984 - RNA, 22 nt, Homo sapiens
aaaaguaauuguggauuuugcu

SEQ ID NO: 985 - RNA, 22 nt, Homo sapiens
agcaaaauccacaauuacuuuu

SEQ ID NO: 986 - RNA, 22 nt, Homo sapiens
caaaaaccggcaauuacuuuug

SEQ ID NO: 987 - RNA, 22 nt, Homo sapiens
caaaaguaauugccgguuuuug

SEQ ID NO: 988 - RNA, 22 nt, Homo sapiens
gaaaacgacaaugacuuuugca

SEQ ID NO: 989 - RNA, 22 nt, Homo sapiens
ugcaaaagucauugucguuuuc

SEQ ID NO: 990 - RNA, 21 nt, Homo sapiens
caaaaacugcaauuacuuuca

SEQ ID NO: 991 - RNA, 21 nt, Homo sapiens
ugaaaguaauugcaguuuuug

SEQ ID NO: 992 - RNA, 21 nt, Homo sapiens
aaagguaauugugguuucugc

SEQ ID NO: 993 - RNA, 21 nt, Homo sapiens
gcagaaaccacaauuaccuuu

SEQ ID NO: 994 - RNA, 22 nt, Homo sapiens
caaaaacugcaguuacuuuugc

SEQ ID NO: 995 - RNA, 22 nt, Homo sapiens
gcaaaaguaacugcaguuuuug

SEQ ID NO: 996 - RNA, 20 nt, Homo sapiens
aaaagugauugcaguguuug

SEQ ID NO: 997 - RNA, 20 nt, Homo sapiens
caaacacugcaaucacuuuu

SEQ ID NO: 998 - RNA, 22 nt, Homo sapiens
aaagguaauugcaguuuuuccc

SEQ ID NO: 999 - RNA, 22 nt, Homo sapiens
gggaaaaacugcaauuaccuuu

SEQ ID NO: 1000 - RNA, 21 nt, Homo sapiens
uaaaaacugcaauuacuuuua

SEQ ID NO: 1001 - RNA, 21 nt, Homo sapiens
uaaaaguaauugcaguuuuua

SEQ ID NO: 1002 - RNA, 23 nt, Homo sapiens
ugcaaaaguaauugcaguuuuug

SEQ ID NO: 1003 - RNA, 23 nt, Homo sapiens
caaaaacugcaauuacuuuugca

SEQ ID NO: 1004 - RNA, 21 nt, Homo sapiens
aaaaguaacugcgguuuuuga

SEQ ID NO: 1005 - RNA, 21 nt, Homo sapiens
ucaaaaaccgcaguuacuuuu

SEQ ID NO: 1006 - RNA, 22 nt, Homo sapiens
aacggcaaugacuuuuguacca

SEQ ID NO: 1007 - RNA, 22 nt, Homo sapiens
ugguacaaaagucauugccguu

SEQ ID NO: 1008 - RNA, 22 nt, Homo sapiens
caaaaacugcaguuacuuuugu

SEQ ID NO: 1009 - RNA, 22 nt, Homo sapiens
acaaaaguaacugcaguuuuug

SEQ ID NO: 1010 - RNA, 22 nt, Homo sapiens
aaaaguaauugcgguuuuugcc

SEQ ID NO: 1011 - RNA, 22 nt, Homo sapiens
ggcaaaaaccgcaauuacuuuu

SEQ ID NO: 1012 - RNA, 20 nt, Homo sapiens
aaaaggcauugugguuuuug

SEQ ID NO: 1013 - RNA, 20 nt, Homo sapiens
caaaaaccacaaugccuuuu

SEQ ID NO: 1014 - RNA, 23 nt, Homo sapiens
cggcccgggcugcugcuguuccu

SEQ ID NO: 1015 - RNA, 23 nt, Homo sapiens
aggaacagcagcagcccgggccg

SEQ ID NO: 1016 - RNA, 20 nt, Homo sapiens
agagguauagggcaugggaa

SEQ ID NO: 1017 - RNA, 20 nt, Homo sapiens
uucccaugcccuauaccucu

SEQ ID NO: 1018 - RNA, 22 nt, Homo sapiens
uuccuaugcauauacuucuuug

SEQ ID NO: 1019 - RNA, 22 nt, Homo sapiens
caaagaaguauaugcauaggaa

SEQ ID NO: 1020 - RNA, 22 nt, Homo sapiens
aucauagaggaaaauccauguu

SEQ ID NO: 1021 - RNA, 22 nt, Homo sapiens
aacauggauuuuccucuaugau

SEQ ID NO: 1022 - RNA, 22 nt, Homo sapiens
cguggauauuccuucuauguuu

SEQ ID NO: 1023 - RNA, 22 nt, Homo sapiens
aaacauagaaggaauauccacg

SEQ ID NO: 1024 - RNA, 22 nt, Homo sapiens
ugaguauuacauggccaaucuc

SEQ ID NO: 1025 - RNA, 22 nt, Homo sapiens
gagauuggccauguaauacuca

SEQ ID NO: 1026 - RNA, 21 nt, Homo sapiens
cuuccgccccgccgggcgucg

SEQ ID NO: 1027 - RNA, 21 nt, Homo sapiens
cgacgcccggcggggcggaag

SEQ ID NO: 1028 - RNA, 22 nt, Homo sapiens
uagcuuaucagacugauguuga

SEQ ID NO: 1029 - RNA, 22 nt, Homo sapiens
ucaacaucagucugauaagcua

SEQ ID NO: 1030 - RNA, 22 nt, Homo sapiens
cacuagauugugagcuccugga

SEQ ID NO: 1031 - RNA, 22 nt, Homo sapiens
uccaggagcucacaaucuagug

SEQ ID NO: 1032 - RNA, 22 nt, Homo sapiens
aaggagcucacagucuauugag

SEQ ID NO: 1033 - RNA, 22 nt, Homo sapiens
cucaauagacugugagcuccuu

SEQ ID NO: 1034 - RNA, 22 nt, Homo sapiens
uacgucaucguugucaucguca

SEQ ID NO: 1035 - RNA, 22 nt, Homo sapiens
ugacgaugacaacgaugacgua

SEQ ID NO: 1036 - RNA, 22 nt, Homo sapiens
cacgcucaugcacacacccaca

SEQ ID NO: 1037 - RNA, 22 nt, Homo sapiens
ugugggugugugcaugagcgug

SEQ ID NO: 1038 - RNA, 21 nt, Homo sapiens
caacaccagucgaugggcugu

SEQ ID NO: 1039 - RNA, 21 nt, Homo sapiens
acagcccaucgacugguguug

SEQ ID NO: 1040 - RNA, 22 nt, Homo sapiens
uucaccaccuucuccacccagc

SEQ ID NO: 1041 - RNA, 22 nt, Homo sapiens
gcuggguggagaagguggugaa

SEQ ID NO: 1042 - RNA, 23 nt, Homo sapiens
cggguagagagggcagugggagg

SEQ ID NO: 1043 - RNA, 23 nt, Homo sapiens
ccucccacugcccucucuacccg

SEQ ID NO: 1044 - RNA, 18 nt, Homo sapiens
aauccuugcuaccugggu

SEQ ID NO: 1045 - RNA, 18 nt, Homo sapiens
acccagguagcaaggauu

SEQ ID NO: 1046 - RNA, 22 nt, Homo sapiens
caauuuagugugugugauauuu

SEQ ID NO: 1047 - RNA, 22 nt, Homo sapiens
aaauaucacacacacuaaauug

SEQ ID NO: 1048 - RNA, 22 nt, Homo sapiens
uauugcacauuacuaaguugca

SEQ ID NO: 1049 - RNA, 22 nt, Homo sapiens
ugcaacuuaguaaugugcaaua

SEQ ID NO: 1050 - RNA, 22 nt, Homo sapiens
ccuauucuugauuacuuguuuc

SEQ ID NO: 1051 - RNA, 22 nt, Homo sapiens
gaaacaaguaaucaagaauagg

SEQ ID NO: 1052 - RNA, 22 nt, Homo sapiens
uucaaguaauccaggauaggcu

SEQ ID NO: 1053 - RNA, 22 nt, Homo sapiens
agccuauccuggauuacuugaa

SEQ ID NO: 1054 - RNA, 23 nt, Homo sapiens
ccaguuaccgcuuccgcuaccgc

SEQ ID NO: 1055 - RNA, 23 nt, Homo sapiens
gcgguagcggaagcgguaacugg

SEQ ID NO: 1056 - RNA, 21 nt, Homo sapiens
gauuucaguggagugaaguuc

SEQ ID NO: 1057 - RNA, 21 nt, Homo sapiens
gaacuucacuccacugaaauc

SEQ ID NO: 1058 - RNA, 22 nt, Homo sapiens
uccuucauuccaccggagucug

SEQ ID NO: 1059 - RNA, 22 nt, Homo sapiens
cagacuccgguggaaugaagga

SEQ ID NO: 1060 - RNA, 23 nt, Homo sapiens
aaaauggugcccuagugacuaca

SEQ ID NO: 1061 - RNA, 23 nt, Homo sapiens
uguagucacuagggcaccauuuu

SEQ ID NO: 1062 - RNA, 21 nt, Homo sapiens
caagucacuagugguuccguu

SEQ ID NO: 1063 - RNA, 21 nt, Homo sapiens
aacggaaccacuagugacuug

SEQ ID NO: 1064 - RNA, 22 nt, Homo sapiens
ccaguauuaacugugcugcuga

SEQ ID NO: 1065 - RNA, 22 nt, Homo sapiens
ucagcagcacaguuaauacugg

SEQ ID NO: 1066 - RNA, 23 nt, Homo sapiens
ucccccaggugugauucugauuu

SEQ ID NO: 1067 - RNA, 23 nt, Homo sapiens
aaaucagaaucacaccuggggga

SEQ ID NO: 1068 - RNA, 22 nt, Homo sapiens
aaaagcuggguugagagggcga

SEQ ID NO: 1069 - RNA, 22 nt, Homo sapiens
ucgcccucucaacccagcuuuu

SEQ ID NO: 1070 - RNA, 22 nt, Homo sapiens
uggacggagaacugauaagggu

SEQ ID NO: 1071 - RNA, 22 nt, Homo sapiens
acccuuaucaguucuccgucca

SEQ ID NO: 1072 - RNA, 22 nt, Homo sapiens
uggugggccgcagaacaugugc

SEQ ID NO: 1073 - RNA, 22 nt, Homo sapiens
gcacauguucugcggcccacca

SEQ ID NO: 1074 - RNA, 22 nt, Homo sapiens
agugccugcuaugugccaggca

SEQ ID NO: 1075 - RNA, 22 nt, Homo sapiens
ugccuggcacauagcaggcacu

SEQ ID NO: 1076 - RNA, 22 nt, Homo sapiens
cuuggcaccuagcaagcacuca

SEQ ID NO: 1077 - RNA, 22 nt, Homo sapiens
ugagugcuugcuaggugccaag

SEQ ID NO: 1078 - RNA, 23 nt, Homo sapiens
uuauugcuuaagaauacgcguag

SEQ ID NO: 1079 - RNA, 23 nt, Homo sapiens
cuacgcguauucuuaagcaauaa

SEQ ID NO: 1080 - RNA, 22 nt, Homo sapiens
uugcauagucacaaaagugauc

SEQ ID NO: 1081 - RNA, 22 nt, Homo sapiens
gaucacuuuugugacuaugcaa

SEQ ID NO: 1082 - RNA, 22 nt, Homo sapiens
gugaauuaccgaagggccauaa

SEQ ID NO: 1083 - RNA, 22 nt, Homo sapiens
uuauggcccuucgguaauucac

SEQ ID NO: 1084 - RNA, 22 nt, Homo sapiens
uauggcacugguagaauucacu

SEQ ID NO: 1085 - RNA, 22 nt, Homo sapiens
agugaauucuaccagugccaua

SEQ ID NO: 1086 - RNA, 22 nt, Homo sapiens
ugauauguuugauauauuaggu

SEQ ID NO: 1087 - RNA, 22 nt, Homo sapiens
accuaauauaucaaacauauca

SEQ ID NO: 1088 - RNA, 21 nt, Homo sapiens
ugauauguuugauauuggguu

SEQ ID NO: 1089 - RNA, 21 nt, Homo sapiens
aacccaauaucaaacauauca

SEQ ID NO: 1090 - RNA, 18 nt, Homo sapiens
agcaggugcggggcggcg

SEQ ID NO: 1091 - RNA, 18 nt, Homo sapiens
cgccgccccgcaccugcu

SEQ ID NO: 1092 - RNA, 21 nt, Homo sapiens
cagugcaaguguagaugccga

SEQ ID NO: 1093 - RNA, 21 nt, Homo sapiens
ucggcaucuacacuugcacug

SEQ ID NO: 1094 - RNA, 22 nt, Homo sapiens
uauguaauaugguccacaucuu

SEQ ID NO: 1095 - RNA, 22 nt, Homo sapiens
aagauguggaccauauuacaua

SEQ ID NO: 1096 - RNA, 21 nt, Homo sapiens
aauauaacacagauggccugu

SEQ ID NO: 1097 - RNA, 21 nt, Homo sapiens
acaggccaucuguguuauauu

SEQ ID NO: 1098 - RNA, 22 nt, Homo sapiens
aucgggaaugucguguccgccc

SEQ ID NO: 1099 - RNA, 22 nt, Homo sapiens
gggcggacacgacauucccgau

SEQ ID NO: 1100 - RNA, 23 nt, Homo sapiens
aaugacacgaucacucccguuga

SEQ ID NO: 1101 - RNA, 23 nt, Homo sapiens
ucaacgggagugaucgugucauu

SEQ ID NO: 1102 - RNA, 22 nt, Homo sapiens
uacucaggagaguggcaaucac

SEQ ID NO: 1103 - RNA, 22 nt, Homo sapiens
gugauugccacucuccugagua

SEQ ID NO: 1104 - RNA, 23 nt, Homo sapiens
uggaagacuagugauuuuguugu

SEQ ID NO: 1105 - RNA, 23 nt, Homo sapiens
acaacaaaaucacuagucuucca

SEQ ID NO: 1106 - RNA, 22 nt, Homo sapiens
auaaagcuagauaaccgaaagu

SEQ ID NO: 1107 - RNA, 22 nt, Homo sapiens
acuuucgguuaucuagcuuuau

SEQ ID NO: 1108 - RNA, 23 nt, Homo sapiens
ucuuugguuaucuagcuguauga

SEQ ID NO: 1109 - RNA, 23 nt, Homo sapiens
ucauacagcuagauaaccaaaga

SEQ ID NO: 1110 - RNA, 22 nt, Homo sapiens
acaggugagguucuugggagcc

SEQ ID NO: 1111 - RNA, 22 nt, Homo sapiens
ggcucccaagaaccucaccugu

SEQ ID NO: 1112 - RNA, 24 nt, Homo sapiens
ucccugagacccuuuaaccuguga

SEQ ID NO: 1113 - RNA, 24 nt, Homo sapiens
ucacagguuaaagggucucaggga

SEQ ID NO: 1114 - RNA, 22 nt, Homo sapiens
caacaaaucccagucuaccuaa

SEQ ID NO: 1115 - RNA, 22 nt, Homo sapiens
uuagguagacugggauuuguug

SEQ ID NO: 1116 - RNA, 22 nt, Homo sapiens
cguguucacagcggaccuugau

SEQ ID NO: 1117 - RNA, 22 nt, Homo sapiens
aucaagguccgcugugaacacg

SEQ ID NO: 1118 - RNA, 20 nt, Homo sapiens
uaaggcacgcggugaaugcc

SEQ ID NO: 1119 - RNA, 20 nt, Homo sapiens
ggcauucaccgcgugccuua

SEQ ID NO: 1120 - RNA, 22 nt, Homo sapiens
aacacaccugguuaaccucuuu

SEQ ID NO: 1121 - RNA, 22 nt, Homo sapiens
aaagagguuaaccagguguguu

SEQ ID NO: 1122 - RNA, 22 nt, Homo sapiens
uaacagucuacagccauggucg

SEQ ID NO: 1123 - RNA, 22 nt, Homo sapiens
cgaccauggcuguagacuguua

SEQ ID NO: 1124 - RNA, 22 nt, Homo sapiens
accguggcuuucgauuguuacu

SEQ ID NO: 1125 - RNA, 22 nt, Homo sapiens
aguaacaaucgaaagccacggu

SEQ ID NO: 1126 - RNA, 21 nt, Homo sapiens
uaacagucuccagucacggcc

SEQ ID NO: 1127 - RNA, 21 nt, Homo sapiens
ggccgugacuggagacuguua

SEQ ID NO: 1128 - RNA, 23 nt, Homo sapiens
accuuggcucuagacugcuuacu

SEQ ID NO: 1129 - RNA, 23 nt, Homo sapiens
aguaagcagucuagagccaaggu

SEQ ID NO: 1130 - RNA, 23 nt, Homo sapiens
ucucacacagaaaucgcacccgu

SEQ ID NO: 1131 - RNA, 23 nt, Homo sapiens
acgggugcgauuucugugugaga

SEQ ID NO: 1132 - RNA, 22 nt, Homo sapiens
ugguugaccauagaacaugcgc

SEQ ID NO: 1133 - RNA, 22 nt, Homo sapiens
gcgcauguucuauggucaacca

SEQ ID NO: 1134 - RNA, 23 nt, Homo sapiens
caguaacaaagauucauccuugu

SEQ ID NO: 1135 - RNA, 23 nt, Homo sapiens
acaaggaugaaucuuuguuacug

SEQ ID NO: 1136 - RNA, 22 nt, Homo sapiens
agaguugagucuggacgucccg

SEQ ID NO: 1137 - RNA, 22 nt, Homo sapiens
cgggacguccagacucaacucu

SEQ ID NO: 1138 - RNA, 22 nt, Homo sapiens
agaauuguggcuggacaucugu

SEQ ID NO: 1139 - RNA, 22 nt, Homo sapiens
acagauguccagccacaauucu

SEQ ID NO: 1140 - RNA, 21 nt, Homo sapiens
ugauuguccaaacgcaauucu

SEQ ID NO: 1141 - RNA, 21 nt, Homo sapiens
agaauugcguuuggacaauca

SEQ ID NO: 1142 - RNA, 22 nt, Homo sapiens
uauagggauuggagccguggcg

SEQ ID NO: 1143 - RNA, 22 nt, Homo sapiens
cgccacggcuccaaucccuaua

SEQ ID NO: 1144 - RNA, 23 nt, Homo sapiens
uauggcuuuuuauuccuauguga

SEQ ID NO: 1145 - RNA, 23 nt, Homo sapiens
ucacauaggaauaaaaagccaua

SEQ ID NO: 1146 - RNA, 22 nt, Homo sapiens
auguagggcuaaaagccauggg

SEQ ID NO: 1147 - RNA, 22 nt, Homo sapiens
cccauggcuuuuagcccuacau

SEQ ID NO: 1148 - RNA, 23 nt, Homo sapiens
uauggcuuuucauuccuauguga

SEQ ID NO: 1149 - RNA, 23 nt, Homo sapiens
ucacauaggaaugaaaagccaua

SEQ ID NO: 1150 - RNA, 22 nt, Homo sapiens
aaccaucgaccguugaguggac

SEQ ID NO: 1151 - RNA, 22 nt, Homo sapiens
guccacucaacggucgaugguu

SEQ ID NO: 1152 - RNA, 22 nt, Homo sapiens
aacauucaaccugucggugagu

SEQ ID NO: 1153 - RNA, 22 nt, Homo sapiens
acucaccgacagguugaauguu

SEQ ID NO: 1154 - RNA, 25 nt, Homo sapiens
cuuccagacgcuccgccccacgucg

SEQ ID NO: 1155 - RNA, 25 nt, Homo sapiens
cgacguggggcggagcgucuggaag

SEQ ID NO: 1156 - RNA, 24 nt, Homo sapiens
aacaacaaaaucacuagucuucca

SEQ ID NO: 1157 - RNA, 24 nt, Homo sapiens
uggaagacuagugauuuuguuguu

SEQ ID NO: 1158 - RNA, 22 nt, Homo sapiens
agguagacugggauuuguuguu

SEQ ID NO: 1159 - RNA, 22 nt, Homo sapiens
aacaacaaaucccagucuaccu

SEQ ID NO: 1160 - RNA, 22 nt, Homo sapiens
aaacaccauugucacacuccac

SEQ ID NO: 1161 - RNA, 22 nt, Homo sapiens
guggagugugacaaugguguuu

SEQ ID NO: 1162 - RNA, 23 nt, Homo sapiens
uuuagugugauaauggcguuuga

SEQ ID NO: 1163 - RNA, 23 nt, Homo sapiens
ucaaacgccauuaucacacuaaa

SEQ ID NO: 1164 - RNA, 22 nt, Homo sapiens
uauggaaagacuuugccacucu

SEQ ID NO: 1165 - RNA, 22 nt, Homo sapiens
agaguggcaaagucuuuccaua

SEQ ID NO: 1166 - RNA, 21 nt, Homo sapiens
aguggcaaagucuuuccauau

SEQ ID NO: 1167 - RNA, 21 nt, Homo sapiens
auauggaaagacuuugccacu

SEQ ID NO: 1168 - RNA, 22 nt, Homo sapiens
cagcccggaucccagcccacuu

SEQ ID NO: 1169 - RNA, 22 nt, Homo sapiens
aagugggcugggauccgggcug

SEQ ID NO: 1170 - RNA, 20 nt, Homo sapiens
guggguuggggcgggcucug

SEQ ID NO: 1171 - RNA, 20 nt, Homo sapiens
cagagcccgccccaacccac

SEQ ID NO: 1172 - RNA, 23 nt, Homo sapiens
uucgggcuggccugcugcuccgg

SEQ ID NO: 1173 - RNA, 23 nt, Homo sapiens
ccggagcagcaggccagcccgaa

SEQ ID NO: 1174 - RNA, 21 nt, Homo sapiens
ugugcagcaggccaaccgaga

SEQ ID NO: 1175 - RNA, 21 nt, Homo sapiens
ucucgguuggccugcugcaca

SEQ ID NO: 1176 - RNA, 22 nt, Homo sapiens
cagggcaggaagaaguggacaa

SEQ ID NO: 1177 - RNA, 22 nt, Homo sapiens
uuguccacuucuuccugcccug

SEQ ID NO: 1178 - RNA, 22 nt, Homo sapiens
guccacuucugccugcccugcc

SEQ ID NO: 1179 - RNA, 22 nt, Homo sapiens
ggcagggcaggcagaaguggac

SEQ ID NO: 1180 - RNA, 22 nt, Homo sapiens
uuuggacagaaaacacgcaggu

SEQ ID NO: 1181 - RNA, 22 nt, Homo sapiens
accugcguguuuucuguccaaa

SEQ ID NO: 1182 - RNA, 20 nt, Homo sapiens
ccugcguguuuucuguccaa

SEQ ID NO: 1183 - RNA, 20 nt, Homo sapiens
uuggacagaaaacacgcagg

SEQ ID NO: 1184 - RNA, 22 nt, Homo sapiens
ugccgcccucucgcugcucuag

SEQ ID NO: 1185 - RNA, 22 nt, Homo sapiens
cuagagcagcgagagggcggca

SEQ ID NO: 1186 - RNA, 23 nt, Homo sapiens
gagggcagcguggguguggcgga

SEQ ID NO: 1187 - RNA, 23 nt, Homo sapiens
uccgccacacccacgcugcccuc

SEQ ID NO: 1188 - RNA, 22 nt, Homo sapiens
aggagcuagccaggcauaugca

SEQ ID NO: 1189 - RNA, 22 nt, Homo sapiens
ugcauaugccuggcuagcuccu

SEQ ID NO: 1190 - RNA, 20 nt, Homo sapiens
auaugccuggcuagcuccuc

SEQ ID NO: 1191 - RNA, 20 nt, Homo sapiens
gaggagcuagccaggcauau

SEQ ID NO: 1192 - RNA, 19 nt, Homo sapiens
cggcgcgaccggcccgggg

SEQ ID NO: 1193 - RNA, 19 nt, Homo sapiens
ccccgggccggucgcgccg

SEQ ID NO: 1194 - RNA, 21 nt, Homo sapiens
ucuugaagucagaacccgcaa

SEQ ID NO: 1195 - RNA, 21 nt, Homo sapiens
uugcggguucugacuucaaga

SEQ ID NO: 1196 - RNA, 22 nt, Homo sapiens
aacucguguucaaagccuuuag

SEQ ID NO: 1197 - RNA, 22 nt, Homo sapiens
cuaaaggcuuugaacacgaguu

SEQ ID NO: 1198 - RNA, 23 nt, Homo sapiens
ccuggacaccgcucagccggccg

SEQ ID NO: 1199 - RNA, 23 nt, Homo sapiens
cggccggcugagcgguguccagg

SEQ ID NO: 1200 - RNA, 21 nt, Homo sapiens
acucggcugcgguggacaagu

SEQ ID NO: 1201 - RNA, 21 nt, Homo sapiens
acuuguccaccgcagccgagu

SEQ ID NO: 1202 - RNA, 20 nt, Homo sapiens
ucacucucaccuugcuuugc

SEQ ID NO: 1203 - RNA, 20 nt, Homo sapiens
gcaaagcaaggugagaguga

SEQ ID NO: 1204 - RNA, 22 nt, Homo sapiens
uugcuaaguaggcugagauuga

SEQ ID NO: 1205 - RNA, 22 nt, Homo sapiens
ucaaucucagccuacuuagcaa

SEQ ID NO: 1206 - RNA, 22 nt, Homo sapiens
cacccccuguuuccuggcccac

SEQ ID NO: 1207 - RNA, 22 nt, Homo sapiens
gugggccaggaaacagggggug

SEQ ID NO: 1208 - RNA, 23 nt, Homo sapiens
ugggccagggagcagcugguggg

SEQ ID NO: 1209 - RNA, 23 nt, Homo sapiens
cccaccagcugcucccuggccca

SEQ ID NO: 1210 - RNA, 24 nt, Homo sapiens
ugcccaugccauacuuuugccuca

SEQ ID NO: 1211 - RNA, 24 nt, Homo sapiens
ugaggcaaaaguauggcaugggca

SEQ ID NO: 1212 - RNA, 22 nt, Homo sapiens
auggcaucguccccugguggcu

SEQ ID NO: 1213 - RNA, 22 nt, Homo sapiens
agccaccaggggacgaugccau

SEQ ID NO: 1214 - RNA, 22 nt, Homo sapiens
gacacaugaccauaaaugcuaa

SEQ ID NO: 1215 - RNA, 22 nt, Homo sapiens
uuagcauuuauggucauguguc

SEQ ID NO: 1216 - RNA, 23 nt, Homo sapiens
uggagagagaaaagagacagaag

SEQ ID NO: 1217 - RNA, 23 nt, Homo sapiens
cuucugucucuuuucucucucca

SEQ ID NO: 1218 - RNA, 22 nt, Homo sapiens
agacaguaguucuugccugguu

SEQ ID NO: 1219 - RNA, 22 nt, Homo sapiens
aaccaggcaagaacuacugucu

SEQ ID NO: 1220 - RNA, 19 nt, Homo sapiens
accaggcaagaaauauugu

SEQ ID NO: 1221 - RNA, 19 nt, Homo sapiens
acaauauuucuugccuggu

SEQ ID NO: 1222 - RNA, 21 nt, Homo sapiens
auugucccucucccuucccag

SEQ ID NO: 1223 - RNA, 21 nt, Homo sapiens
cugggaagggagagggacaau

SEQ ID NO: 1224 - RNA, 22 nt, Homo sapiens
acugggaagaggagcugaggga

SEQ ID NO: 1225 - RNA, 22 nt, Homo sapiens
ucccucagcuccucuucccagu

SEQ ID NO: 1226 - RNA, 23 nt, Homo sapiens
gaagauggugcugugcugaggaa

SEQ ID NO: 1227 - RNA, 23 nt, Homo sapiens
uuccucagcacagcaccaucuuc

SEQ ID NO: 1228 - RNA, 20 nt, Homo sapiens
ugugggacugcaaaugggag

SEQ ID NO: 1229 - RNA, 20 nt, Homo sapiens
cucccauuugcagucccaca

SEQ ID NO: 1230 - RNA, 21 nt, Homo sapiens
ucugaggccugccucucccca

SEQ ID NO: 1231 - RNA, 21 nt, Homo sapiens
uggggagaggcaggccucaga

SEQ ID NO: 1232 - RNA, 24 nt, Homo sapiens
ugggcgaggggugggcucucagag

SEQ ID NO: 1233 - RNA, 24 nt, Homo sapiens
cucugagagcccaccccucgccca

SEQ ID NO: 1234 - RNA, 21 nt, Homo sapiens
agguagaaugaggccugacau

SEQ ID NO: 1235 - RNA, 21 nt, Homo sapiens
augucaggccucauucuaccu

SEQ ID NO: 1236 - RNA, 19 nt, Homo sapiens
ucaggccucuuucuaccuu

SEQ ID NO: 1237 - RNA, 19 nt, Homo sapiens
aagguagaaagaggccuga

SEQ ID NO: 1238 - RNA, 20 nt, Homo sapiens
cggggugggugaggucgggc

SEQ ID NO: 1239 - RNA, 20 nt, Homo sapiens
gcccgaccucacccaccccg

SEQ ID NO: 1240 - RNA, 22 nt, Homo sapiens
guucuguuaacccauccccuca

SEQ ID NO: 1241 - RNA, 22 nt, Homo sapiens
ugaggggauggguuaacagaac

SEQ ID NO: 1242 - RNA, 22 nt, Homo sapiens
aggggacugguuaauagaacua

SEQ ID NO: 1243 - RNA, 22 nt, Homo sapiens
uaguucuauuaaccaguccccu

SEQ ID NO: 1244 - RNA, 23 nt, Homo sapiens
uggaguuaaggguugcuuggaga

SEQ ID NO: 1245 - RNA, 23 nt, Homo sapiens
ucuccaagcaacccuuaacucca

SEQ ID NO: 1246 - RNA, 22 nt, Homo sapiens
ucucugagcaaggcuuaacacc

SEQ ID NO: 1247 - RNA, 22 nt, Homo sapiens
gguguuaagccuugcucagaga

SEQ ID NO: 1248 - RNA, 22 nt, Homo sapiens
ugugggaucuggaggcaucugg

SEQ ID NO: 1249 - RNA, 22 nt, Homo sapiens
ccagaugccuccagaucccaca

SEQ ID NO: 1250 - RNA, 21 nt, Homo sapiens
acccucgucagguccccgggg

SEQ ID NO: 1251 - RNA, 21 nt, Homo sapiens
ccccggggaccugacgagggu

SEQ ID NO: 1252 - RNA, 22 nt, Homo sapiens
caccggggauggcagagggucg

SEQ ID NO: 1253 - RNA, 22 nt, Homo sapiens
cgacccucugccauccccggug

SEQ ID NO: 1254 - RNA, 23 nt, Homo sapiens
ugggcugagggcaggaggccugu

SEQ ID NO: 1255 - RNA, 23 nt, Homo sapiens
acaggccuccugcccucagccca

SEQ ID NO: 1256 - RNA, 23 nt, Homo sapiens
aauguggaaguggucugaggcau

SEQ ID NO: 1257 - RNA, 23 nt, Homo sapiens
augccucagaccacuuccacauu

SEQ ID NO: 1258 - RNA, 23 nt, Homo sapiens
gugaguguggauccuggaggaau

SEQ ID NO: 1259 - RNA, 23 nt, Homo sapiens
auuccuccaggauccacacucac

SEQ ID NO: 1260 - RNA, 22 nt, Homo sapiens
uuucuucuuagacauggcaacg

SEQ ID NO: 1261 - RNA, 22 nt, Homo sapiens
cguugccaugucuaagaagaaa

SEQ ID NO: 1262 - RNA, 22 nt, Homo sapiens
cugccaugucuaagaagaaaac

SEQ ID NO: 1263 - RNA, 22 nt, Homo sapiens
guuuucuucuuagacauggcag

SEQ ID NO: 1264 - RNA, 22 nt, Homo sapiens
uuucuucuuagacauggcagcu

SEQ ID NO: 1265 - RNA, 22 nt, Homo sapiens
agcugccaugucuaagaagaaa

SEQ ID NO: 1266 - RNA, 19 nt, Homo sapiens
uugccaugucuaagaagaa

SEQ ID NO: 1267 - RNA, 19 nt, Homo sapiens
uucuucuuagacauggcaa

SEQ ID NO: 1268 - RNA, 23 nt, Homo sapiens
ugcagcucugguggaaaauggag

SEQ ID NO: 1269 - RNA, 23 nt, Homo sapiens
cuccauuuuccaccagagcugca

SEQ ID NO: 1270 - RNA, 22 nt, Homo sapiens
caggauccacagagcuagucca

SEQ ID NO: 1271 - RNA, 22 nt, Homo sapiens
uggacuagcucuguggauccug

SEQ ID NO: 1272 - RNA, 22 nt, Homo sapiens
aacuagcucuguggauccugac

SEQ ID NO: 1273 - RNA, 22 nt, Homo sapiens
gucaggauccacagagcuaguu

SEQ ID NO: 1274 - RNA, 22 nt, Homo sapiens
aaagauggacaauuggcuaaau

SEQ ID NO: 1275 - RNA, 22 nt, Homo sapiens
auuuagccaauuguccaucuuu

SEQ ID NO: 1276 - RNA, 24 nt, Homo sapiens
agcugagcuccauggacgugcagu

SEQ ID NO: 1277 - RNA, 24 nt, Homo sapiens
acugcacguccauggagcucagcu

SEQ ID NO: 1278 - RNA, 22 nt, Homo sapiens
cuuccggucugugagccccguc

SEQ ID NO: 1279 - RNA, 22 nt, Homo sapiens
gacggggcucacagaccggaag

SEQ ID NO: 1280 - RNA, 22 nt, Homo sapiens
uggggugcccacuccgcaaguu

SEQ ID NO: 1281 - RNA, 22 nt, Homo sapiens
aacuugcggagugggcacccca

SEQ ID NO: 1282 - RNA, 26 nt, Homo sapiens
cucggccgcggcgcguagcccccgcc

SEQ ID NO: 1283 - RNA, 26 nt, Homo sapiens
ggcgggggcuacgcgccgcggccgag

SEQ ID NO: 1284 - RNA, 23 nt, Homo sapiens
cugggggacgcgugagcgcgagc

SEQ ID NO: 1285 - RNA, 23 nt, Homo sapiens
gcucgcgcucacgcgucccccag

SEQ ID NO: 1286 - RNA, 21 nt, Homo sapiens
cauacaaucugacauguauuu

SEQ ID NO: 1287 - RNA, 21 nt, Homo sapiens
aaauacaugucagauuguaug

SEQ ID NO: 1288 - RNA, 21 nt, Homo sapiens
auacaugucagauuguaugcc

SEQ ID NO: 1289 - RNA, 21 nt, Homo sapiens
ggcauacaaucugacauguau

SEQ ID NO: 1290 - RNA, 21 nt, Homo sapiens
ucccuccuucuguccccacag

SEQ ID NO: 1291 - RNA, 21 nt, Homo sapiens
cuguggggacagaaggaggga

SEQ ID NO: 1292 - RNA, 22 nt, Homo sapiens
acuggggagcagaaggagaacc

SEQ ID NO: 1293 - RNA, 22 nt, Homo sapiens
gguucuccuucugcuccccagu

SEQ ID NO: 1294 - RNA, 23 nt, Homo sapiens
gaaaauccuuuuuguuuuuccag

SEQ ID NO: 1295 - RNA, 23 nt, Homo sapiens
cuggaaaaacaaaaaggauuuuc

SEQ ID NO: 1296 - RNA, 23 nt, Homo sapiens
agggaaaaaaaaaaggauuuguc

SEQ ID NO: 1297 - RNA, 23 nt, Homo sapiens
gacaaauccuuuuuuuuuucccu

SEQ ID NO: 1298 - RNA, 22 nt, Homo sapiens
uguguccgggaaguggaggagg

SEQ ID NO: 1299 - RNA, 22 nt, Homo sapiens
ccuccuccacuucccggacaca

SEQ ID NO: 1300 - RNA, 22 nt, Homo sapiens
ugaaguuacaucauggucgcuu

SEQ ID NO: 1301 - RNA, 22 nt, Homo sapiens
aagcgaccaugauguaacuuca

SEQ ID NO: 1302 - RNA, 22 nt, Homo sapiens
aagcgaccaugauguaacuuca

SEQ ID NO: 1303 - RNA, 22 nt, Homo sapiens
ugaaguuacaucauggucgcuu

SEQ ID NO: 1304 - RNA, 21 nt, Homo sapiens
uuagugcauagucuuuggucu

SEQ ID NO: 1305 - RNA, 21 nt, Homo sapiens
agaccaaagacuaugcacuaa

SEQ ID NO: 1306 - RNA, 22 nt, Homo sapiens
accgaagacugugcgcuaaucu

SEQ ID NO: 1307 - RNA, 22 nt, Homo sapiens
agauuagcgcacagucuucggu

SEQ ID NO: 1308 - RNA, 21 nt, Homo sapiens
uuacacagcuggacagaggca

SEQ ID NO: 1309 - RNA, 21 nt, Homo sapiens
ugccucuguccagcuguguaa

SEQ ID NO: 1310 - RNA, 22 nt, Homo sapiens
uccaggcaggagccggacugga

SEQ ID NO: 1311 - RNA, 22 nt, Homo sapiens
uccaguccggcuccugccugga

SEQ ID NO: 1312 - RNA, 21 nt, Homo sapiens
cugggcucgggacgcgcggcu

SEQ ID NO: 1313 - RNA, 21 nt, Homo sapiens
agccgcgcgucccgagcccag

SEQ ID NO: 1314 - RNA, 22 nt, Homo sapiens
ggggcugugauugaccagcagg

SEQ ID NO: 1315 - RNA, 22 nt, Homo sapiens
ccugcuggucaaucacagcccc

SEQ ID NO: 1316 - RNA, 22 nt, Homo sapiens
cacuguuucaccacuggcucuu

SEQ ID NO: 1317 - RNA, 22 nt, Homo sapiens
aagagccaguggugaaacagug

SEQ ID NO: 1318 - RNA, 21 nt, Homo sapiens
gagccaguggugagacaguga

SEQ ID NO: 1319 - RNA, 21 nt, Homo sapiens
ucacugucucaccacuggcuc

SEQ ID NO: 1320 - RNA, 22 nt, Homo sapiens
aagguauuguucagacuuauga

SEQ ID NO: 1321 - RNA, 22 nt, Homo sapiens
ucauaagucugaacaauaccuu

SEQ ID NO: 1322 - RNA, 22 nt, Homo sapiens
ucugugauagagauucuuugcu

SEQ ID NO: 1323 - RNA, 22 nt, Homo sapiens
agcaaagaaucucuaucacaga

SEQ ID NO: 1324 - RNA, 21 nt, Homo sapiens
ucugaauuguaagaguuguua

SEQ ID NO: 1325 - RNA, 21 nt, Homo sapiens
uaacaacucuuacaauucaga

SEQ ID NO: 1326 - RNA, 23 nt, Homo sapiens
agaacucuugcagucuuagaugu

SEQ ID NO: 1327 - RNA, 23 nt, Homo sapiens
acaucuaagacugcaagaguucu

SEQ ID NO: 1328 - RNA, 22 nt, Homo sapiens
aacgggaaugcaggcuguaucu

SEQ ID NO: 1329 - RNA, 22 nt, Homo sapiens
agauacagccugcauucccguu

SEQ ID NO: 1330 - RNA, 23 nt, Homo sapiens
ucugaguuccuggagccuggucu

SEQ ID NO: 1331 - RNA, 23 nt, Homo sapiens
agaccaggcuccaggaacucaga

SEQ ID NO: 1332 - RNA, 23 nt, Homo sapiens
uggagauccagugcucgcccgau

SEQ ID NO: 1333 - RNA, 23 nt, Homo sapiens
aucgggcgagcacuggaucucca

SEQ ID NO: 1334 - RNA, 22 nt, Homo sapiens
uguugcaagucgguggagacgu

SEQ ID NO: 1335 - RNA, 22 nt, Homo sapiens
acgucuccaccgacuugcaaca

SEQ ID NO: 1336 - RNA, 22 nt, Homo sapiens
cucucuacugacuugcaacaua

SEQ ID NO: 1337 - RNA, 22 nt, Homo sapiens
uauguugcaagucaguagagag

SEQ ID NO: 1338 - RNA, 22 nt, Homo sapiens
ucucccuuccugcccuggcuag

SEQ ID NO: 1339 - RNA, 22 nt, Homo sapiens
cuagccagggcaggaagggaga

SEQ ID NO: 1340 - RNA, 26 nt, Homo sapiens
cccagggcuuggaguggggcaagguu

SEQ ID NO: 1341 - RNA, 26 nt, Homo sapiens
aaccuugccccacuccaagcccuggg

SEQ ID NO: 1342 - RNA, 23 nt, Homo sapiens
uaucugcugggcuuucugguguu

SEQ ID NO: 1343 - RNA, 23 nt, Homo sapiens
aacaccagaaagcccagcagaua

SEQ ID NO: 1344 - RNA, 21 nt, Homo sapiens
uggcuguuggagggggcaggc

SEQ ID NO: 1345 - RNA, 21 nt, Homo sapiens
gccugcccccuccaacagcca

SEQ ID NO: 1346 - RNA, 22 nt, Homo sapiens
cagcccuccucccgcacccaaa

SEQ ID NO: 1347 - RNA, 22 nt, Homo sapiens
uuugggugcgggaggagggcug

SEQ ID NO: 1348 - RNA, 22 nt, Homo sapiens
uaggggcagcagaggaccuggg

SEQ ID NO: 1349 - RNA, 22 nt, Homo sapiens
cccagguccucugcugccccua

SEQ ID NO: 1350 - RNA, 22 nt, Homo sapiens
uugaggagacauggugggggcc

SEQ ID NO: 1351 - RNA, 22 nt, Homo sapiens
ggcccccaccaugucuccucaa

SEQ ID NO: 1352 - RNA, 21 nt, Homo sapiens
gcagcccagcugaggccucug

SEQ ID NO: 1353 - RNA, 21 nt, Homo sapiens
cagaggccucagcugggcugc

SEQ ID NO: 1354 - RNA, 22 nt, Homo sapiens
gagcaggcgaggcugggcugaa

SEQ ID NO: 1355 - RNA, 22 nt, Homo sapiens
uucagcccagccucgccugcuc

SEQ ID NO: 1356 - RNA, 23 nt, Homo sapiens
ccagccacggacugagagugcau

SEQ ID NO: 1357 - RNA, 23 nt, Homo sapiens
augcacucucaguccguggcugg

SEQ ID NO: 1358 - RNA, 23 nt, Homo sapiens
guccuccaggccaugagcugcgg

SEQ ID NO: 1359 - RNA, 23 nt, Homo sapiens
ccgcagcucauggccuggaggac

SEQ ID NO: 1360 - RNA, 22 nt, Homo sapiens
ucaggcaguguggguaucagau

SEQ ID NO: 1361 - RNA, 22 nt, Homo sapiens
aucugauacccacacugccuga

SEQ ID NO: 1362 - RNA, 23 nt, Homo sapiens
ugagaguggaauucacaguauuu

SEQ ID NO: 1363 - RNA, 23 nt, Homo sapiens
aaauacugugaauuccacucuca

SEQ ID NO: 1364 - RNA, 23 nt, Homo sapiens
auacugugaauuucacugucaca

SEQ ID NO: 1365 - RNA, 23 nt, Homo sapiens
ugugacagugaaauucacaguau

SEQ ID NO: 1366 - RNA, 21 nt, Homo sapiens
caaauggacaggauaacaccu

SEQ ID NO: 1367 - RNA, 21 nt, Homo sapiens
agguguuauccuguccauuug

SEQ ID NO: 1368 - RNA, 22 nt, Homo sapiens
agguguuauccuauccauuugc

SEQ ID NO: 1369 - RNA, 22 nt, Homo sapiens
gcaaauggauaggauaacaccu

SEQ ID NO: 1370 - RNA, 22 nt, Homo sapiens
ugaucucaccgcugccuccuuc

SEQ ID NO: 1371 - RNA, 22 nt, Homo sapiens
gaaggaggcagcggugagauca

SEQ ID NO: 1372 - RNA, 22 nt, Homo sapiens
caggaggcagugggcgagcagg

SEQ ID NO: 1373 - RNA, 22 nt, Homo sapiens
ccugcucgcccacugccuccug

SEQ ID NO: 1374 - RNA, 22 nt, Homo sapiens
ugcaagacggauacugucaucu

SEQ ID NO: 1375 - RNA, 22 nt, Homo sapiens
agaugacaguauccgucuugca

SEQ ID NO: 1376 - RNA, 24 nt, Homo sapiens
ugucagugacuccugccccuuggu

SEQ ID NO: 1377 - RNA, 24 nt, Homo sapiens
accaaggggcaggagucacugaca

SEQ ID NO: 1378 - RNA, 22 nt, Homo sapiens
agggggcgcagucacugacgug

SEQ ID NO: 1379 - RNA, 22 nt, Homo sapiens
cacgucagugacugcgcccccu

SEQ ID NO: 1380 - RNA, 23 nt, Homo sapiens
ucaaaauguagaggaagacccca

SEQ ID NO: 1381 - RNA, 23 nt, Homo sapiens
uggggucuuccucuacauuuuga

SEQ ID NO: 1382 - RNA, 22 nt, Homo sapiens
aauuuacucugcaaucuucucc

SEQ ID NO: 1383 - RNA, 22 nt, Homo sapiens
ggagaagauugcagaguaaauu

SEQ ID NO: 1384 - RNA, 22 nt, Homo sapiens
agaagauugcagaguaaguucc

SEQ ID NO: 1385 - RNA, 22 nt, Homo sapiens
ggaacuuacucugcaaucuucu

SEQ ID NO: 1386 - RNA, 26 nt, Homo sapiens
cacaggacugacuccucaccccagug

SEQ ID NO: 1387 - RNA, 26 nt, Homo sapiens
cacuggggugaggagucaguccugug

SEQ ID NO: 1388 - RNA, 22 nt, Homo sapiens
ucuggggaugaggacagugugu

SEQ ID NO: 1389 - RNA, 22 nt, Homo sapiens
acacacuguccucauccccaga

SEQ ID NO: 1390 - RNA, 20 nt, Homo sapiens
augggugauggguguggugu

SEQ ID NO: 1391 - RNA, 20 nt, Homo sapiens
acaccacacccaucacccau

SEQ ID NO: 1392 - RNA, 22 nt, Homo sapiens
uuggccaccacaccuaccccuu

SEQ ID NO: 1393 - RNA, 22 nt, Homo sapiens
aagggguaggugugguggccaa

SEQ ID NO: 1394 - RNA, 22 nt, Homo sapiens
uguaguuguauuguauugccac

SEQ ID NO: 1395 - RNA, 22 nt, Homo sapiens
guggcaauacaauacaacuaca

SEQ ID NO: 1396 - RNA, 23 nt, Homo sapiens
uagcaauacaguacaaauauagu

SEQ ID NO: 1397 - RNA, 23 nt, Homo sapiens
acuauauuuguacuguauugcua

SEQ ID NO: 1398 - RNA, 22 nt, Homo sapiens
ucagucacauaucuagugucua

SEQ ID NO: 1399 - RNA, 22 nt, Homo sapiens
uagacacuagauaugugacuga

SEQ ID NO: 1400 - RNA, 22 nt, Homo sapiens
gacacuaggcaugugagugauu

SEQ ID NO: 1401 - RNA, 22 nt, Homo sapiens
aaucacucacaugccuaguguc

SEQ ID NO: 1402 - RNA, 22 nt, Homo sapiens
ucaaucacuugguaauugcugu

SEQ ID NO: 1403 - RNA, 22 nt, Homo sapiens
acagcaauuaccaagugauuga

SEQ ID NO: 1404 - RNA, 25 nt, Homo sapiens
agcggggaggaagugggcgcugcuu

SEQ ID NO: 1405 - RNA, 25 nt, Homo sapiens
aagcagcgcccacuuccuccccgcu

SEQ ID NO: 1406 - RNA, 22 nt, Homo sapiens
agcccgccccagccgagguucu

SEQ ID NO: 1407 - RNA, 22 nt, Homo sapiens
agaaccucggcuggggcgggcu

SEQ ID NO: 1408 - RNA, 23 nt, Homo sapiens
gccccggcgcgggcggguucugg

SEQ ID NO: 1409 - RNA, 23 nt, Homo sapiens
ccagaacccgcccgcgccggggc

SEQ ID NO: 1410 - RNA, 22 nt, Homo sapiens
agcaaggcggcaucucucugau

SEQ ID NO: 1411 - RNA, 22 nt, Homo sapiens
aucagagagaugccgccuugcu

SEQ ID NO: 1412 - RNA, 21 nt, Homo sapiens
agagaugccgccuugcuccuu

SEQ ID NO: 1413 - RNA, 21 nt, Homo sapiens
aaggagcaaggcggcaucucu

SEQ ID NO: 1414 - RNA, 23 nt, Homo sapiens
uugaagaggaggugcucuguagc

SEQ ID NO: 1415 - RNA, 23 nt, Homo sapiens
gcuacagagcaccuccucuucaa

SEQ ID NO: 1416 - RNA, 22 nt, Homo sapiens
acaacagugacuugcucuccaa

SEQ ID NO: 1417 - RNA, 22 nt, Homo sapiens
uuggagagcaagucacuguugu

SEQ ID NO: 1418 - RNA, 18 nt, Homo sapiens
gggugagggcaggugguu

SEQ ID NO: 1419 - RNA, 18 nt, Homo sapiens
aaccaccugcccucaccc

SEQ ID NO: 1420 - RNA, 18 nt, Homo sapiens
cgugucuucuggcuugau

SEQ ID NO: 1421 - RNA, 18 nt, Homo sapiens
aucaagccagaagacacg

SEQ ID NO: 1422 - RNA, 23 nt, Homo sapiens
ugcaucaggccagaagacaugag

SEQ ID NO: 1423 - RNA, 23 nt, Homo sapiens
cucaugucuucuggccugaugca

SEQ ID NO: 1424 - RNA, 21 nt, Homo sapiens
aaugagagaccuguacuguau

SEQ ID NO: 1425 - RNA, 21 nt, Homo sapiens
auacaguacaggucucucauu

SEQ ID NO: 1426 - RNA, 22 nt, Homo sapiens
uccaguacaggucucucauuuc

SEQ ID NO: 1427 - RNA, 22 nt, Homo sapiens
gaaaugagagaccuguacugga

SEQ ID NO: 1428 - RNA, 22 nt, Homo sapiens
ugggauccagacagugggagaa

SEQ ID NO: 1429 - RNA, 22 nt, Homo sapiens
uucucccacugucuggauccca

SEQ ID NO: 1430 - RNA, 22 nt, Homo sapiens
uucucccacuaccaggcuccca

SEQ ID NO: 1431 - RNA, 22 nt, Homo sapiens
ugggagccugguagugggagaa

SEQ ID NO: 1432 - RNA, 22 nt, Homo sapiens
ccaaccuagguggucagaguug

SEQ ID NO: 1433 - RNA, 22 nt, Homo sapiens
caacucugaccaccuagguugg

SEQ ID NO: 1434 - RNA, 22 nt, Homo sapiens
aacucugaccccuuagguugau

SEQ ID NO: 1435 - RNA, 22 nt, Homo sapiens
aucaaccuaaggggucagaguu

SEQ ID NO: 1436 - RNA, 23 nt, Homo sapiens
gugccaccuuaacugcagccaau

SEQ ID NO: 1437 - RNA, 23 nt, Homo sapiens
auuggcugcaguuaagguggcac

SEQ ID NO: 1438 - RNA, 22 nt, Homo sapiens
aaguuggcugcaguuaaggugg

SEQ ID NO: 1439 - RNA, 22 nt, Homo sapiens
ccaccuuaacugcagccaacuu

SEQ ID NO: 1440 - RNA, 22 nt, Homo sapiens
aagggggaaggaaacauggaga

SEQ ID NO: 1441 - RNA, 22 nt, Homo sapiens
ucuccauguuuccuucccccuu

SEQ ID NO: 1442 - RNA, 22 nt, Homo sapiens
uccauguuuccuucccccuucu

SEQ ID NO: 1443 - RNA, 22 nt, Homo sapiens
agaagggggaaggaaacaugga

SEQ ID NO: 1444 - RNA, 21 nt, Homo sapiens
acacauggguggcuguggccu

SEQ ID NO: 1445 - RNA, 21 nt, Homo sapiens
aggccacagccacccaugugu

SEQ ID NO: 1446 - RNA, 22 nt, Homo sapiens
uaggccacagccacccaugugu

SEQ ID NO: 1447 - RNA, 22 nt, Homo sapiens
acacauggguggcuguggccua

SEQ ID NO: 1448 - RNA, 21 nt, Homo sapiens
agcuguaccugaaaccaagca

SEQ ID NO: 1449 - RNA, 21 nt, Homo sapiens
ugcuugguuucagguacagcu

SEQ ID NO: 1450 - RNA, 22 nt, Homo sapiens
ucacaaaucuauaauaugcagg

SEQ ID NO: 1451 - RNA, 22 nt, Homo sapiens
ccugcauauuauagauuuguga

SEQ ID NO: 1452 - RNA, 21 nt, Homo sapiens
ugcuuaaguuguaccaaguau

SEQ ID NO: 1453 - RNA, 21 nt, Homo sapiens
auacuugguacaacuuaagca

SEQ ID NO: 1454 - RNA, 22 nt, Homo sapiens
ccuggcauauuugguauaacuu

SEQ ID NO: 1455 - RNA, 22 nt, Homo sapiens
aaguuauaccaaauaugccagg

SEQ ID NO: 1456 - RNA, 22 nt, Homo sapiens
ugagggcuccaggugacggugg

SEQ ID NO: 1457 - RNA, 22 nt, Homo sapiens
ccaccgucaccuggagcccuca

SEQ ID NO: 1458 - RNA, 22 nt, Homo sapiens
accugccagcaccucccugcag

SEQ ID NO: 1459 - RNA, 22 nt, Homo sapiens
cugcagggaggugcuggcaggu

SEQ ID NO: 1460 - RNA, 23 nt, Homo sapiens
ggcaggagggcugugccagguug

SEQ ID NO: 1461 - RNA, 23 nt, Homo sapiens
caaccuggcacagcccuccugcc

SEQ ID NO: 1462 - RNA, 22 nt, Homo sapiens
cccucucuggcuccuccccaaa

SEQ ID NO: 1463 - RNA, 22 nt, Homo sapiens
uuuggggaggagccagagaggg

SEQ ID NO: 1464 - RNA, 24 nt, Homo sapiens
ugggggagccaugagauaagagca

SEQ ID NO: 1465 - RNA, 24 nt, Homo sapiens
ugcucuuaucucauggcuccccca

SEQ ID NO: 1466 - RNA, 21 nt, Homo sapiens
guaccuucugguucagcuagu

SEQ ID NO: 1467 - RNA, 21 nt, Homo sapiens
acuagcugaaccagaagguac

SEQ ID NO: 1468 - RNA, 23 nt, Homo sapiens
aacugaaccaggagugagcuucg

SEQ ID NO: 1469 - RNA, 23 nt, Homo sapiens
cgaagcucacuccugguucaguu

SEQ ID NO: 1470 - RNA, 22 nt, Homo sapiens
uggggaaggcgucagugucggg

SEQ ID NO: 1471 - RNA, 22 nt, Homo sapiens
cccgacacugacgccuucccca

SEQ ID NO: 1472 - RNA, 21 nt, Homo sapiens
agacccugcagccuucccacc

SEQ ID NO: 1473 - RNA, 21 nt, Homo sapiens
ggugggaaggcugcagggucu

SEQ ID NO: 1474 - RNA, 22 nt, Homo sapiens
acccagguucccucuggccgca

SEQ ID NO: 1475 - RNA, 22 nt, Homo sapiens
ugcggccagagggaaccugggu

SEQ ID NO: 1476 - RNA, 23 nt, Homo sapiens
agggccagaggagccuggagugg

SEQ ID NO: 1477 - RNA, 23 nt, Homo sapiens
ccacuccaggcuccucuggcccu

SEQ ID NO: 1478 - RNA, 22 nt, Homo sapiens
auagugggaagcuggcagauuc

SEQ ID NO: 1479 - RNA, 22 nt, Homo sapiens
gaaucugccagcuucccacuau

SEQ ID NO: 1480 - RNA, 21 nt, Homo sapiens
aucugccagcuuccacagugg

SEQ ID NO: 1481 - RNA, 21 nt, Homo sapiens
ccacuguggaagcuggcagau

SEQ ID NO: 1482 - RNA, 25 nt, Homo sapiens
caugcugaccucccuccugccccag

SEQ ID NO: 1483 - RNA, 25 nt, Homo sapiens
cuggggcaggagggaggucagcaug

SEQ ID NO: 1484 - RNA, 23 nt, Homo sapiens
ugggaggggagaggcagcaagca

SEQ ID NO: 1485 - RNA, 23 nt, Homo sapiens
ugcuugcugccucuccccuccca

SEQ ID NO: 1486 - RNA, 22 nt, Homo sapiens
ucauuuaucuguugggaagcua

SEQ ID NO: 1487 - RNA, 22 nt, Homo sapiens
uagcuucccaacagauaaauga

SEQ ID NO: 1488 - RNA, 23 nt, Homo sapiens
cuggcggagcccauuccaugcca

SEQ ID NO: 1489 - RNA, 23 nt, Homo sapiens
uggcauggaaugggcuccgccag

SEQ ID NO: 1490 - RNA, 22 nt, Homo sapiens
cacacaaguggcccccaacacu

SEQ ID NO: 1491 - RNA, 22 nt, Homo sapiens
aguguugggggccacuugugug

SEQ ID NO: 1492 - RNA, 22 nt, Homo sapiens
ugcugggggccacaugagugug

SEQ ID NO: 1493 - RNA, 22 nt, Homo sapiens
cacacucauguggcccccagca

SEQ ID NO: 1494 - RNA, 21 nt, Homo sapiens
gcccugaccuguccuguucug

SEQ ID NO: 1495 - RNA, 21 nt, Homo sapiens
cagaacaggacaggucagggc

SEQ ID NO: 1496 - RNA, 23 nt, Homo sapiens
uguagagcagggagcaggaagcu

SEQ ID NO: 1497 - RNA, 23 nt, Homo sapiens
agcuuccugcucccugcucuaca

SEQ ID NO: 1498 - RNA, 22 nt, Homo sapiens
ccaccaggucuagcauugggau

SEQ ID NO: 1499 - RNA, 22 nt, Homo sapiens
aucccaaugcuagaccuggugg

SEQ ID NO: 1500 - RNA, 22 nt, Homo sapiens
aaucccaaugcuagacccggug

SEQ ID NO: 1501 - RNA, 22 nt, Homo sapiens
caccgggucuagcauugggauu

SEQ ID NO: 1502 - RNA, 22 nt, Homo sapiens
gcugcgggcugcggucagggcg

SEQ ID NO: 1503 - RNA, 22 nt, Homo sapiens
cgcccugaccgcagcccgcagc

SEQ ID NO: 1504 - RNA, 21 nt, Homo sapiens
aaaggugcucaaauuagacau

SEQ ID NO: 1505 - RNA, 21 nt, Homo sapiens
augucuaauuugagcaccuuu

SEQ ID NO: 1506 - RNA, 22 nt, Homo sapiens
ccuaauuugaacaccuucggua

SEQ ID NO: 1507 - RNA, 22 nt, Homo sapiens
uaccgaagguguucaaauuagg

SEQ ID NO: 1508 - RNA, 19 nt, Homo sapiens
aggcagguuaucugggcug

SEQ ID NO: 1509 - RNA, 19 nt, Homo sapiens
cagcccagauaaccugccu

SEQ ID NO: 1510 - RNA, 20 nt, Homo sapiens
augcgaggaugcugacagug

SEQ ID NO: 1511 - RNA, 20 nt, Homo sapiens
cacugucagcauccucgcau

SEQ ID NO: 1512 - RNA, 22 nt, Homo sapiens
ugaaacuggagcgccuggagga

SEQ ID NO: 1513 - RNA, 22 nt, Homo sapiens
uccuccaggcgcuccaguuuca

SEQ ID NO: 1514 - RNA, 22 nt, Homo sapiens
accagcgcguuuucaguuucau

SEQ ID NO: 1515 - RNA, 22 nt, Homo sapiens
augaaacugaaaacgcgcuggu

SEQ ID NO: 1516 - RNA, 25 nt, Homo sapiens
aagggaggaggagcggaggggcccu

SEQ ID NO: 1517 - RNA, 25 nt, Homo sapiens
agggccccuccgcuccuccucccuu

SEQ ID NO: 1518 - RNA, 22 nt, Homo sapiens
gcccgagaggauccgucccugc

SEQ ID NO: 1519 - RNA, 22 nt, Homo sapiens
gcagggacggauccucucgggc

SEQ ID NO: 1520 - RNA, 22 nt, Homo sapiens
aggacugauccucucgggcagg

SEQ ID NO: 1521 - RNA, 22 nt, Homo sapiens
ccugcccgagaggaucaguccu

SEQ ID NO: 1522 - RNA, 23 nt, Homo sapiens
ucaggcaaagggauauuuacaga

SEQ ID NO: 1523 - RNA, 23 nt, Homo sapiens
ucuguaaauaucccuuugccuga

SEQ ID NO: 1524 - RNA, 21 nt, Homo sapiens
uuucugucuuuucugguccag

SEQ ID NO: 1525 - RNA, 21 nt, Homo sapiens
cuggaccagaaaagacagaaa

SEQ ID NO: 1526 - RNA, 23 nt, Homo sapiens
uggccggaugggacaggaggcau

SEQ ID NO: 1527 - RNA, 23 nt, Homo sapiens
augccuccugucccauccggcca

SEQ ID NO: 1528 - RNA, 23 nt, Homo sapiens
ucuaaagacuagacuucgcuaug

SEQ ID NO: 1529 - RNA, 23 nt, Homo sapiens
cauagcgaagucuagucuuuaga

SEQ ID NO: 1530 - RNA, 23 nt, Homo sapiens
uggcccggcgacgucucacgguc

SEQ ID NO: 1531 - RNA, 23 nt, Homo sapiens
gaccgugagacgucgccgggcca

SEQ ID NO: 1532 - RNA, 23 nt, Homo sapiens
ugaguggggcucccgggacggcg

SEQ ID NO: 1533 - RNA, 23 nt, Homo sapiens
cgccgucccgggagccccacuca

SEQ ID NO: 1534 - RNA, 21 nt, Homo sapiens
agcggugcuccugcgggccga

SEQ ID NO: 1535 - RNA, 21 nt, Homo sapiens
ucggcccgcaggagcaccgcu

SEQ ID NO: 1536 - RNA, 23 nt, Homo sapiens
ccggucccaggagaaccugcaga

SEQ ID NO: 1537 - RNA, 23 nt, Homo sapiens
ucugcagguucuccugggaccgg

SEQ ID NO: 1538 - RNA, 22 nt, Homo sapiens
aaggcccgggcuuuccucccag

SEQ ID NO: 1539 - RNA, 22 nt, Homo sapiens
cugggaggaaagcccgggccuu

SEQ ID NO: 1540 - RNA, 22 nt, Homo sapiens
agggaaggaggcuuggucuuag

SEQ ID NO: 1541 - RNA, 22 nt, Homo sapiens
cuaagaccaagccuccuucccu

SEQ ID NO: 1542 - RNA, 21 nt, Homo sapiens
gagguuuggggaggauuugcu

SEQ ID NO: 1543 - RNA, 21 nt, Homo sapiens
agcaaauccuccccaaaccuc

SEQ ID NO: 1544 - RNA, 20 nt, Homo sapiens
cgccccuccugcccccacag

SEQ ID NO: 1545 - RNA, 20 nt, Homo sapiens
cugugggggcaggaggggcg

SEQ ID NO: 1546 - RNA, 22 nt, Homo sapiens
ugcggggacaggccagggcauc

SEQ ID NO: 1547 - RNA, 22 nt, Homo sapiens
gaugcccuggccuguccccgca

SEQ ID NO: 1548 - RNA, 22 nt, Homo sapiens
ccugacccacccccucccgcag

SEQ ID NO: 1549 - RNA, 22 nt, Homo sapiens
cugcgggagggggugggucagg

SEQ ID NO: 1550 - RNA, 22 nt, Homo sapiens
cucgggcggaggugguugagug

SEQ ID NO: 1551 - RNA, 22 nt, Homo sapiens
cacucaaccaccuccgcccgag

SEQ ID NO: 1552 - RNA, 24 nt, Homo sapiens
agaggacccguagcugcuagaagg

SEQ ID NO: 1553 - RNA, 24 nt, Homo sapiens
ccuucuagcagcuacggguccucu

SEQ ID NO: 1554 - RNA, 22 nt, Homo sapiens
uuguggaucucaaggaugugcu

SEQ ID NO: 1555 - RNA, 22 nt, Homo sapiens
agcacauccuugagauccacaa

SEQ ID NO: 1556 - RNA, 22 nt, Homo sapiens
uucucuuucuuuagccuugugu

SEQ ID NO: 1557 - RNA, 22 nt, Homo sapiens
acacaaggcuaaagaaagagaa

SEQ ID NO: 1558 - RNA, 22 nt, Homo sapiens
caaggccaaaggaagagaacag

SEQ ID NO: 1559 - RNA, 22 nt, Homo sapiens
cuguucucuuccuuuggccuug

SEQ ID NO: 1560 - RNA, 23 nt, Homo sapiens
augcggaccuggguuagcggagu

SEQ ID NO: 1561 - RNA, 23 nt, Homo sapiens
acuccgcuaacccagguccgcau

SEQ ID NO: 1562 - RNA, 22 nt, Homo sapiens
agccaggcucugaagggaaagu

SEQ ID NO: 1563 - RNA, 22 nt, Homo sapiens
acuuucccuucagagccuggcu

SEQ ID NO: 1564 - RNA, 22 nt, Homo sapiens
uuucccuucagagccuggcuuu

SEQ ID NO: 1565 - RNA, 22 nt, Homo sapiens
aaagccaggcucugaagggaaa

SEQ ID NO: 1566 - RNA, 22 nt, Homo sapiens
ccagagaugguugccuuccuau

SEQ ID NO: 1567 - RNA, 22 nt, Homo sapiens
auaggaaggcaaccaucucugg

SEQ ID NO: 1568 - RNA, 23 nt, Homo sapiens
cagggaggcgcucacucucugcu

SEQ ID NO: 1569 - RNA, 23 nt, Homo sapiens
agcagagagugagcgccucccug

SEQ ID NO: 1570 - RNA, 22 nt, Homo sapiens
caugacgucacagaggcuucgc

SEQ ID NO: 1571 - RNA, 22 nt, Homo sapiens
gcgaagccucugugacgucaug

SEQ ID NO: 1572 - RNA, 23 nt, Homo sapiens
aggccucugugacgucacggugu

SEQ ID NO: 1573 - RNA, 23 nt, Homo sapiens
acaccgugacgucacagaggccu

SEQ ID NO: 1574 - RNA, 23 nt, Homo sapiens
ugccccaccugcugaccacccuc

SEQ ID NO: 1575 - RNA, 23 nt, Homo sapiens
gaggguggucagcagguggggca

SEQ ID NO: 1576 - RNA, 23 nt, Homo sapiens
gugagugggagccgguggggcug

SEQ ID NO: 1577 - RNA, 23 nt, Homo sapiens
cagccccaccggcucccacucac

SEQ ID NO: 1578 - RNA, 21 nt, Homo sapiens
uaggacuagauguuggaauua

SEQ ID NO: 1579 - RNA, 21 nt, Homo sapiens
uaauuccaacaucuaguccua

SEQ ID NO: 1580 - RNA, 22 nt, Homo sapiens
aaauucauguucaaucuaaacc

SEQ ID NO: 1581 - RNA, 22 nt, Homo sapiens
gguuuagauugaacaugaauuu

SEQ ID NO: 1582 - RNA, 22 nt, Homo sapiens
uuuagauugaacaugaaguuag

SEQ ID NO: 1583 - RNA, 22 nt, Homo sapiens
cuaacuucauguucaaucuaaa

SEQ ID NO: 1584 - RNA, 21 nt, Homo sapiens
gagggcaugcgcacuuugucc

SEQ ID NO: 1585 - RNA, 21 nt, Homo sapiens
ggacaaagugcgcaugcccuc

SEQ ID NO: 1586 - RNA, 21 nt, Homo sapiens
acaaggugugcaugccugacc

SEQ ID NO: 1587 - RNA, 21 nt, Homo sapiens
ggucaggcaugcacaccuugu

SEQ ID NO: 1588 - RNA, 22 nt, Homo sapiens
cuucugaucaagauuuguggug

SEQ ID NO: 1589 - RNA, 22 nt, Homo sapiens
caccacaaaucuugaucagaag

SEQ ID NO: 1590 - RNA, 21 nt, Homo sapiens
ccaaaucuugaucagaagccu

SEQ ID NO: 1591 - RNA, 21 nt, Homo sapiens
aggcuucugaucaagauuugg

SEQ ID NO: 1592 - RNA, 24 nt, Homo sapiens
aggcaggggcuggugcugggcggg

SEQ ID NO: 1593 - RNA, 24 nt, Homo sapiens
cccgcccagcaccagccccugccu

SEQ ID NO: 1594 - RNA, 21 nt, Homo sapiens
cgccugcccagcccuccugcu

SEQ ID NO: 1595 - RNA, 21 nt, Homo sapiens
agcaggagggcugggcaggcg

SEQ ID NO: 1596 - RNA, 22 nt, Homo sapiens
uuaacuccuuucacacccaugg

SEQ ID NO: 1597 - RNA, 22 nt, Homo sapiens
ccaugggugugaaaggaguuaa

SEQ ID NO: 1598 - RNA, 21 nt, Homo sapiens
uggauguggaaggaguuaucu

SEQ ID NO: 1599 - RNA, 21 nt, Homo sapiens
agauaacuccuuccacaucca

SEQ ID NO: 1600 - RNA, 22 nt, Homo sapiens
ugagugauugauagcuauguuc

SEQ ID NO: 1601 - RNA, 22 nt, Homo sapiens
gaacauagcuaucaaucacuca

SEQ ID NO: 1602 - RNA, 21 nt, Homo sapiens
auagcaauugcucuuuuggaa

SEQ ID NO: 1603 - RNA, 21 nt, Homo sapiens
uuccaaaagagcaauugcuau

SEQ ID NO: 1604 - RNA, 21 nt, Homo sapiens
ucugaaagagcaguugguguu

SEQ ID NO: 1605 - RNA, 21 nt, Homo sapiens
aacaccaacugcucuuucaga

SEQ ID NO: 1606 - RNA, 23 nt, Homo sapiens
cgcgggcgcuccuggccgccgcc

SEQ ID NO: 1607 - RNA, 23 nt, Homo sapiens
ggcggcggccaggagcgcccgcg

SEQ ID NO: 1608 - RNA, 20 nt, Homo sapiens
ccaggagauccagagagaau

SEQ ID NO: 1609 - RNA, 20 nt, Homo sapiens
auucucucuggaucuccugg

SEQ ID NO: 1610 - RNA, 22 nt, Homo sapiens
auucucucuggaucccauggau

SEQ ID NO: 1611 - RNA, 22 nt, Homo sapiens
auccaugggauccagagagaau

SEQ ID NO: 1612 - RNA, 22 nt, Homo sapiens
ucugccauccucccuccccuac

SEQ ID NO: 1613 - RNA, 22 nt, Homo sapiens
guaggggagggaggauggcaga

SEQ ID NO: 1614 - RNA, 24 nt, Homo sapiens
ggugggauggagagaagguaugag

SEQ ID NO: 1615 - RNA, 24 nt, Homo sapiens
cucauaccuucucuccaucccacc

SEQ ID NO: 1616 - RNA, 18 nt, Homo sapiens
ugagaugacacuguagcu

SEQ ID NO: 1617 - RNA, 18 nt, Homo sapiens
agcuacagugucaucuca

SEQ ID NO: 1618 - RNA, 21 nt, Homo sapiens
agcagacuugaccuacaauua

SEQ ID NO: 1619 - RNA, 21 nt, Homo sapiens
uaauuguaggucaagucugcu

SEQ ID NO: 1620 - RNA, 22 nt, Homo sapiens
cagaacaggagcauagaaaggc

SEQ ID NO: 1621 - RNA, 22 nt, Homo sapiens
gccuuucuaugcuccuguucug

SEQ ID NO: 1622 - RNA, 22 nt, Homo sapiens
uuaauuuuuuguuucggucacu

SEQ ID NO: 1623 - RNA, 22 nt, Homo sapiens
agugaccgaaacaaaaaauuaa

SEQ ID NO: 1624 - RNA, 23 nt, Homo sapiens
cuugccauccugguccacugcau

SEQ ID NO: 1625 - RNA, 23 nt, Homo sapiens
augcaguggaccaggauggcaag

SEQ ID NO: 1626 - RNA, 22 nt, Homo sapiens
guggaccaggauggcaagggcu

SEQ ID NO: 1627 - RNA, 22 nt, Homo sapiens
agcccuugccauccugguccac

SEQ ID NO: 1628 - RNA, 22 nt, Homo sapiens
auaccucaucuagaaugcugua

SEQ ID NO: 1629 - RNA, 22 nt, Homo sapiens
uacagcauucuagaugagguau

SEQ ID NO: 1630 - RNA, 22 nt, Homo sapiens
uucuagaugagagauauauaua

SEQ ID NO: 1631 - RNA, 22 nt, Homo sapiens
uauauauaucucucaucuagaa

SEQ ID NO: 1632 - RNA, 22 nt, Homo sapiens
ucuucuuccuuugcagaguuga

SEQ ID NO: 1633 - RNA, 22 nt, Homo sapiens
ucaacucugcaaaggaagaaga

SEQ ID NO: 1634 - RNA, 22 nt, Homo sapiens
aauucuguaaaggaagaagagg

SEQ ID NO: 1635 - RNA, 22 nt, Homo sapiens
ccucuucuuccuuuacagaauu

SEQ ID NO: 1636 - RNA, 22 nt, Homo sapiens
uaggagggaauaguaaaagcag

SEQ ID NO: 1637 - RNA, 22 nt, Homo sapiens
cugcuuuuacuauucccuccua

SEQ ID NO: 1638 - RNA, 22 nt, Homo sapiens
acccuugagccugaucccuagc

SEQ ID NO: 1639 - RNA, 22 nt, Homo sapiens
gcuagggaucaggcucaagggu

SEQ ID NO: 1640 - RNA, 22 nt, Homo sapiens
aauguuggaauccucgcuagag

SEQ ID NO: 1641 - RNA, 22 nt, Homo sapiens
cucuagcgaggauuccaacauu

SEQ ID NO: 1642 - RNA, 21 nt, Homo sapiens
uagcggggauuccaauauugg

SEQ ID NO: 1643 - RNA, 21 nt, Homo sapiens
ccaauauuggaauccccgcua

SEQ ID NO: 1644 - RNA, 22 nt, Homo sapiens
ugauugucuucauaucuagaac

SEQ ID NO: 1645 - RNA, 22 nt, Homo sapiens
guucuagauaugaagacaauca

SEQ ID NO: 1646 - RNA, 22 nt, Homo sapiens
uucuggauaugaagacaaucaa

SEQ ID NO: 1647 - RNA, 22 nt, Homo sapiens
uugauugucuucauauccagaa

SEQ ID NO: 1648 - RNA, 23 nt, Homo sapiens
ccccgguguuggggcgcgucugc

SEQ ID NO: 1649 - RNA, 23 nt, Homo sapiens
gcagacgcgccccaacaccgggg

SEQ ID NO: 1650 - RNA, 21 nt, Homo sapiens
ggcgcgcccagcucccgggcu

SEQ ID NO: 1651 - RNA, 21 nt, Homo sapiens
agcccgggagcugggcgcgcc

SEQ ID NO: 1652 - RNA, 20 nt, Homo sapiens
ugaggagaugcugggacuga

SEQ ID NO: 1653 - RNA, 20 nt, Homo sapiens
ucagucccagcaucuccuca

SEQ ID NO: 1654 - RNA, 21 nt, Homo sapiens
agagucggcgacgccgccagc

SEQ ID NO: 1655 - RNA, 21 nt, Homo sapiens
gcuggcggcgucgccgacucu

SEQ ID NO: 1656 - RNA, 22 nt, Homo sapiens
ugaagccagcucuggucugggc

SEQ ID NO: 1657 - RNA, 22 nt, Homo sapiens
gcccagaccagagcuggcuuca

SEQ ID NO: 1658 - RNA, 22 nt, Homo sapiens
ugagaccaggacuggaugcacc

SEQ ID NO: 1659 - RNA, 22 nt, Homo sapiens
ggugcauccaguccuggucuca

SEQ ID NO: 1660 - RNA, 24 nt, Homo sapiens
gaugcgccgcccacugccccgcgc

SEQ ID NO: 1661 - RNA, 24 nt, Homo sapiens
gcgcggggcagugggcggcgcauc

SEQ ID NO: 1662 - RNA, 22 nt, Homo sapiens
gcggggguggcggcggcauccc

SEQ ID NO: 1663 - RNA, 22 nt, Homo sapiens
gggaugccgccgccacccccgc

SEQ ID NO: 1664 - RNA, 22 nt, Homo sapiens
uuacggaccagcuaagggaggc

SEQ ID NO: 1665 - RNA, 22 nt, Homo sapiens
gccucccuuagcugguccguaa

SEQ ID NO: 1666 - RNA, 21 nt, Homo sapiens
cacacauagcagguguauaua

SEQ ID NO: 1667 - RNA, 21 nt, Homo sapiens
uauauacaccugcuaugugug

SEQ ID NO: 1668 - RNA, 22 nt, Homo sapiens
guauacaccugauauguguaug

SEQ ID NO: 1669 - RNA, 22 nt, Homo sapiens
cauacacauaucagguguauac

SEQ ID NO: 1670 - RNA, 22 nt, Homo sapiens
ugaaugguaaagcgaugucaca

SEQ ID NO: 1671 - RNA, 22 nt, Homo sapiens
ugugacaucgcuuuaccauuca

SEQ ID NO: 1672 - RNA, 20 nt, Homo sapiens
aucgcuuuaccauucauguu

SEQ ID NO: 1673 - RNA, 20 nt, Homo sapiens
aacaugaaugguaaagcgau

SEQ ID NO: 1674 - RNA, 18 nt, Homo sapiens
uggauaugaugacugaaa

SEQ ID NO: 1675 - RNA, 18 nt, Homo sapiens
uuucagucaucauaucca

SEQ ID NO: 1676 - RNA, 18 nt, Homo sapiens
cggugagcgcucgcuggc

SEQ ID NO: 1677 - RNA, 18 nt, Homo sapiens
gccagcgagcgcucaccg

SEQ ID NO: 1678 - RNA, 23 nt, Homo sapiens
ucugcacugugaguuggcuggcu

SEQ ID NO: 1679 - RNA, 23 nt, Homo sapiens
agccagccaacucacagugcaga

SEQ ID NO: 1680 - RNA, 24 nt, Homo sapiens
acauccugcuccacagggcagagg

SEQ ID NO: 1681 - RNA, 24 nt, Homo sapiens
ccucugcccuguggagcaggaugu

SEQ ID NO: 1682 - RNA, 22 nt, Homo sapiens
ucuggcuaucucacgagacugu

SEQ ID NO: 1683 - RNA, 22 nt, Homo sapiens
acagucucgugagauagccaga

SEQ ID NO: 1684 - RNA, 22 nt, Homo sapiens
auauuauuagccacuucuggau

SEQ ID NO: 1685 - RNA, 22 nt, Homo sapiens
auccagaaguggcuaauaauau

SEQ ID NO: 1686 - RNA, 21 nt, Homo sapiens
agaaguggcuaauaauauuga

SEQ ID NO: 1687 - RNA, 21 nt, Homo sapiens
ucaauauuauuagccacuucu

SEQ ID NO: 1688 - RNA, 22 nt, Homo sapiens
uaaaguggcagaguauagacac

SEQ ID NO: 1689 - RNA, 22 nt, Homo sapiens
gugucuauacucugccacuuua

SEQ ID NO: 1690 - RNA, 22 nt, Homo sapiens
ugucuauacucugucacuuuac

SEQ ID NO: 1691 - RNA, 22 nt, Homo sapiens
guaaagugacagaguauagaca

SEQ ID NO: 1692 - RNA, 21 nt, Homo sapiens
ucucaguaaguggcacucugu

SEQ ID NO: 1693 - RNA, 21 nt, Homo sapiens
acagagugccacuuacugaga

SEQ ID NO: 1694 - RNA, 21 nt, Homo sapiens
gacagagugccacuuacugaa

SEQ ID NO: 1695 - RNA, 21 nt, Homo sapiens
uucaguaaguggcacucuguc

SEQ ID NO: 1696 - RNA, 22 nt, Homo sapiens
aacucacgaaguauaccgaagu

SEQ ID NO: 1697 - RNA, 22 nt, Homo sapiens
acuucgguauacuucgugaguu

SEQ ID NO: 1698 - RNA, 22 nt, Homo sapiens
uucgguauacuuugugaauugg

SEQ ID NO: 1699 - RNA, 22 nt, Homo sapiens
ccaauucacaaaguauaccgaa

SEQ ID NO: 1700 - RNA, 22 nt, Homo sapiens
acuggcaugcugcauuuauaua

SEQ ID NO: 1701 - RNA, 22 nt, Homo sapiens
uauauaaaugcagcaugccagu

SEQ ID NO: 1702 - RNA, 22 nt, Homo sapiens
aucuaaaugcagcaugccaguc

SEQ ID NO: 1703 - RNA, 22 nt, Homo sapiens
gacuggcaugcugcauuuagau

SEQ ID NO: 1704 - RNA, 19 nt, Homo sapiens
cauccguccgucuguccac

SEQ ID NO: 1705 - RNA, 19 nt, Homo sapiens
guggacagacggacggaug

SEQ ID NO: 1706 - RNA, 21 nt, Homo sapiens
aguggaccgaggaaggaagga

SEQ ID NO: 1707 - RNA, 21 nt, Homo sapiens
uccuuccuuccucgguccacu

SEQ ID NO: 1708 - RNA, 22 nt, Homo sapiens
uacacaagaaaaccaaggcuca

SEQ ID NO: 1709 - RNA, 22 nt, Homo sapiens
ugagccuugguuuucuugugua

SEQ ID NO: 1710 - RNA, 21 nt, Homo sapiens
uaacauaauaguguggauuga

SEQ ID NO: 1711 - RNA, 21 nt, Homo sapiens
ucaauccacacuauuauguua

SEQ ID NO: 1712 - RNA, 21 nt, Homo sapiens
ugcuuaaccuugcccucgaaa

SEQ ID NO: 1713 - RNA, 21 nt, Homo sapiens
uuucgagggcaagguuaagca

SEQ ID NO: 1714 - RNA, 21 nt, Homo sapiens
uuggacgguaagguuaagcaa

SEQ ID NO: 1715 - RNA, 21 nt, Homo sapiens
uugcuuaaccuuaccguccaa

SEQ ID NO: 1716 - RNA, 21 nt, Homo sapiens
aaaagcaucaggaaguaccca

SEQ ID NO: 1717 - RNA, 21 nt, Homo sapiens
uggguacuuccugaugcuuuu

SEQ ID NO: 1718 - RNA, 21 nt, Homo sapiens
gcaggacaggcagaaguggau

SEQ ID NO: 1719 - RNA, 21 nt, Homo sapiens
auccacuucugccuguccugc

SEQ ID NO: 1720 - RNA, 22 nt, Homo sapiens
cagggcuggcagugacaugggu

SEQ ID NO: 1721 - RNA, 22 nt, Homo sapiens
acccaugucacugccagcccug

SEQ ID NO: 1722 - RNA, 22 nt, Homo sapiens
auuucccugccauucccuuggc

SEQ ID NO: 1723 - RNA, 22 nt, Homo sapiens
gccaagggaauggcagggaaau

SEQ ID NO: 1724 - RNA, 22 nt, Homo sapiens
uggcggcgguaguuaugggcuu

SEQ ID NO: 1725 - RNA, 22 nt, Homo sapiens
aagcccauaacuaccgccgcca

SEQ ID NO: 1726 - RNA, 22 nt, Homo sapiens
gcucccucuagggucgcucgga

SEQ ID NO: 1727 - RNA, 22 nt, Homo sapiens
uccgagcgacccuagagggagc

SEQ ID NO: 1728 - RNA, 22 nt, Homo sapiens
ugggaacuuaguagagguuuaa

SEQ ID NO: 1729 - RNA, 22 nt, Homo sapiens
uuaaaccucuacuaaguuccca

SEQ ID NO: 1730 - RNA, 21 nt, Homo sapiens
uggggcuagugaugcaggacg

SEQ ID NO: 1731 - RNA, 21 nt, Homo sapiens
cguccugcaucacuagcccca

SEQ ID NO: 1732 - RNA, 22 nt, Homo sapiens
gcugacagcagggcuggccgcu

SEQ ID NO: 1733 - RNA, 22 nt, Homo sapiens
agcggccagcccugcugucagc

SEQ ID NO: 1734 - RNA, 21 nt, Homo sapiens
auuggacugcugauggcccgu

SEQ ID NO: 1735 - RNA, 21 nt, Homo sapiens
acgggccaucagcaguccaau

SEQ ID NO: 1736 - RNA, 22 nt, Homo sapiens
aggccaucagcaguccaaugaa

SEQ ID NO: 1737 - RNA, 22 nt, Homo sapiens
uucauuggacugcugauggccu

SEQ ID NO: 1738 - RNA, 22 nt, Homo sapiens
uuggacagaaaacacgcaggaa

SEQ ID NO: 1739 - RNA, 22 nt, Homo sapiens
uuccugcguguuuucuguccaa

SEQ ID NO: 1740 - RNA, 20 nt, Homo sapiens
ccugcguguuuucuguccaa

SEQ ID NO: 1741 - RNA, 20 nt, Homo sapiens
uuggacagaaaacacgcagg

SEQ ID NO: 1742 - RNA, 22 nt, Homo sapiens
ugagacaggcuuaugcugcuau

SEQ ID NO: 1743 - RNA, 22 nt, Homo sapiens
auagcagcauaagccugucuca

SEQ ID NO: 1744 - RNA, 22 nt, Homo sapiens
auagcagcaugaaccugucuca

SEQ ID NO: 1745 - RNA, 22 nt, Homo sapiens
ugagacagguucaugcugcuau

SEQ ID NO: 1746 - RNA, 20 nt, Homo sapiens
gagacagguucaugcugcua

SEQ ID NO: 1747 - RNA, 20 nt, Homo sapiens
uagcagcaugaaccugucuc

SEQ ID NO: 1748 - RNA, 21 nt, Homo sapiens
auagcagcauaagccugucuc

SEQ ID NO: 1749 - RNA, 21 nt, Homo sapiens
gagacaggcuuaugcugcuau

SEQ ID NO: 1750 - RNA, 22 nt, Homo sapiens
uguguggauccuggaggaggca

SEQ ID NO: 1751 - RNA, 22 nt, Homo sapiens
ugccuccuccaggauccacaca

SEQ ID NO: 1752 - RNA, 22 nt, Homo sapiens
agacaucaagaucagucccaaa

SEQ ID NO: 1753 - RNA, 22 nt, Homo sapiens
uuugggacugaucuugaugucu

SEQ ID NO: 1754 - RNA, 22 nt, Homo sapiens
uuugggacugaucuugaugucu

SEQ ID NO: 1755 - RNA, 22 nt, Homo sapiens
agacaucaagaucagucccaaa

SEQ ID NO: 1756 - RNA, 22 nt, Homo sapiens
aaggaaccagaaaaugagaagu

SEQ ID NO: 1757 - RNA, 22 nt, Homo sapiens
acuucucauuuucugguuccuu

SEQ ID NO: 1758 - RNA, 22 nt, Homo sapiens
ucuggccuugacuugacucuuu

SEQ ID NO: 1759 - RNA, 22 nt, Homo sapiens
aaagagucaagucaaggccaga

SEQ ID NO: 1760 - RNA, 23 nt, Homo sapiens
ucaaggccagaggucccacagca

SEQ ID NO: 1761 - RNA, 23 nt, Homo sapiens
ugcugugggaccucuggccuuga

SEQ ID NO: 1762 - RNA, 21 nt, Homo sapiens
acuccaguuuuaguucucuug

SEQ ID NO: 1763 - RNA, 21 nt, Homo sapiens
caagagaacuaaaacuggagu

SEQ ID NO: 1764 - RNA, 22 nt, Homo sapiens
aagagaacugaaaguggagccu

SEQ ID NO: 1765 - RNA, 22 nt, Homo sapiens
aggcuccacuuucaguucucuu

SEQ ID NO: 1766 - RNA, 22 nt, Homo sapiens
uaagggguguauggcagaugca

SEQ ID NO: 1767 - RNA, 22 nt, Homo sapiens
ugcaucugccauacaccccuua

SEQ ID NO: 1768 - RNA, 21 nt, Homo sapiens
uuucagauaacaguauuacau

SEQ ID NO: 1769 - RNA, 21 nt, Homo sapiens
auguaauacuguuaucugaaa

SEQ ID NO: 1770 - RNA, 22 nt, Homo sapiens
aagcaauacuguuaccugaaau

SEQ ID NO: 1771 - RNA, 22 nt, Homo sapiens
auuucagguaacaguauugcuu

SEQ ID NO: 1772 - RNA, 22 nt, Homo sapiens
uacuaacugcagauucaaguga

SEQ ID NO: 1773 - RNA, 22 nt, Homo sapiens
ucacuugaaucugcaguuagua

SEQ ID NO: 1774 - RNA, 21 nt, Homo sapiens
auugccuaacaugugccagaa

SEQ ID NO: 1775 - RNA, 21 nt, Homo sapiens
uucuggcacauguuaggcaau

SEQ ID NO: 1776 - RNA, 22 nt, Homo sapiens
ucugguauguaguagguaauaa

SEQ ID NO: 1777 - RNA, 22 nt, Homo sapiens
uuauuaccuacuacauaccaga

SEQ ID NO: 1778 - RNA, 22 nt, Homo sapiens
aguugccuuuuuguucccaugc

SEQ ID NO: 1779 - RNA, 22 nt, Homo sapiens
gcaugggaacaaaaaggcaacu

SEQ ID NO: 1780 - RNA, 21 nt, Homo sapiens
auaggcaccaaaaagcaacaa

SEQ ID NO: 1781 - RNA, 21 nt, Homo sapiens
uuguugcuuuuuggugccuau

SEQ ID NO: 1782 - RNA, 22 nt, Homo sapiens
ccugcaacuuugccugaucaga

SEQ ID NO: 1783 - RNA, 22 nt, Homo sapiens
ucugaucaggcaaaguugcagg

SEQ ID NO: 1784 - RNA, 22 nt, Homo sapiens
ugaucaggcaaaauugcagacu

SEQ ID NO: 1785 - RNA, 22 nt, Homo sapiens
agucugcaauuuugccugauca

SEQ ID NO: 1786 - RNA, 22 nt, Homo sapiens
uuguggcuggucaugaggcuaa

SEQ ID NO: 1787 - RNA, 22 nt, Homo sapiens
uuagccucaugaccagccacaa

SEQ ID NO: 1788 - RNA, 21 nt, Homo sapiens
uuagucucaugaucagacaca

SEQ ID NO: 1789 - RNA, 21 nt, Homo sapiens
ugugucugaucaugagacuaa

SEQ ID NO: 1790 - RNA, 22 nt, Homo sapiens
aaagauagacaauuggcuaaau

SEQ ID NO: 1791 - RNA, 22 nt, Homo sapiens
auuuagccaauugucuaucuuu

SEQ ID NO: 1792 - RNA, 22 nt, Homo sapiens
uuagccaauuguccaucuuuag

SEQ ID NO: 1793 - RNA, 22 nt, Homo sapiens
cuaaagauggacaauuggcuaa

SEQ ID NO: 1794 - RNA, 22 nt, Homo sapiens
ucugugagaccaaagaacuacu

SEQ ID NO: 1795 - RNA, 22 nt, Homo sapiens
aguaguucuuuggucucacaga

SEQ ID NO: 1796 - RNA, 22 nt, Homo sapiens
uuguucuuuggucuuucagcca

SEQ ID NO: 1797 - RNA, 22 nt, Homo sapiens
uggcugaaagaccaaagaacaa

SEQ ID NO: 1798 - RNA, 23 nt, Homo sapiens
cgggcuguccggaggggucggcu

SEQ ID NO: 1799 - RNA, 23 nt, Homo sapiens
agccgaccccuccggacagcccg

SEQ ID NO: 1800 - RNA, 23 nt, Homo sapiens
ucuguauucuccuuugccugcag

SEQ ID NO: 1801 - RNA, 23 nt, Homo sapiens
cugcaggcaaaggagaauacaga

SEQ ID NO: 1802 - RNA, 23 nt, Homo sapiens
uacauggauggaaaccuucaagc

SEQ ID NO: 1803 - RNA, 23 nt, Homo sapiens
gcuugaagguuuccauccaugua

SEQ ID NO: 1804 - RNA, 22 nt, Homo sapiens
uauggagguucuagaccauguu

SEQ ID NO: 1805 - RNA, 22 nt, Homo sapiens
aacauggucuagaaccuccaua

SEQ ID NO: 1806 - RNA, 22 nt, Homo sapiens
gggaccauccugccugcugugg

SEQ ID NO: 1807 - RNA, 22 nt, Homo sapiens
ccacagcaggcaggaugguccc

SEQ ID NO: 1808 - RNA, 22 nt, Homo sapiens
ucagcaggcaggcuggugcagc

SEQ ID NO: 1809 - RNA, 22 nt, Homo sapiens
gcugcaccagccugccugcuga

SEQ ID NO: 1810 - RNA, 22 nt, Homo sapiens
ucaccugaccucccaugccugu

SEQ ID NO: 1811 - RNA, 22 nt, Homo sapiens
acaggcaugggaggucagguga

SEQ ID NO: 1812 - RNA, 22 nt, Homo sapiens
caggcacgggagcucaggugag

SEQ ID NO: 1813 - RNA, 22 nt, Homo sapiens
cucaccugagcucccgugccug

SEQ ID NO: 1814 - RNA, 21 nt, Homo sapiens
ugaguguugucuacgagggca

SEQ ID NO: 1815 - RNA, 21 nt, Homo sapiens
ugcccucguagacaacacuca

SEQ ID NO: 1816 - RNA, 21 nt, Homo sapiens
acugacaggagagcauuuuga

SEQ ID NO: 1817 - RNA, 21 nt, Homo sapiens
ucaaaaugcucuccugucagu

SEQ ID NO: 1818 - RNA, 22 nt, Homo sapiens
ugaccugggacucggacagcug

SEQ ID NO: 1819 - RNA, 22 nt, Homo sapiens
cagcuguccgagucccagguca

SEQ ID NO: 1820 - RNA, 22 nt, Homo sapiens
ucucaggaguaaagacagaguu

SEQ ID NO: 1821 - RNA, 22 nt, Homo sapiens
aacucugucuuuacuccugaga

SEQ ID NO: 1822 - RNA, 22 nt, Homo sapiens
aacucugucuucacucaugagu

SEQ ID NO: 1823 - RNA, 22 nt, Homo sapiens
acucaugagugaagacagaguu

SEQ ID NO: 1824 - RNA, 22 nt, Homo sapiens
uggggcggagcuuccggaggcc

SEQ ID NO: 1825 - RNA, 22 nt, Homo sapiens
ggccuccggaagcuccgcccca

SEQ ID NO: 1826 - RNA, 22 nt, Homo sapiens
caaucagcaaguauacugcccu

SEQ ID NO: 1827 - RNA, 22 nt, Homo sapiens
agggcaguauacuugcugauug

SEQ ID NO: 1828 - RNA, 22 nt, Homo sapiens
uggcagugucuuagcugguugu

SEQ ID NO: 1829 - RNA, 22 nt, Homo sapiens
acaaccagcuaagacacugcca

SEQ ID NO: 1830 - RNA, 22 nt, Homo sapiens
ccaauauuggcugugcugcucc

SEQ ID NO: 1831 - RNA, 22 nt, Homo sapiens
ggagcagcacagccaauauugg

SEQ ID NO: 1832 - RNA, 21 nt, Homo sapiens
uagcagcacagaaauauuggc

SEQ ID NO: 1833 - RNA, 21 nt, Homo sapiens
gccaauauuucugugcugcua

SEQ ID NO: 1834 - RNA, 21 nt, Homo sapiens
uaauuuuauguauaagcuagu

SEQ ID NO: 1835 - RNA, 21 nt, Homo sapiens
acuagcuuauacauaaaauua

SEQ ID NO: 1836 - RNA, 22 nt, Homo sapiens
gagcuuauucauaaaagugcag

SEQ ID NO: 1837 - RNA, 22 nt, Homo sapiens
cugcacuuuuaugaauaagcuc

SEQ ID NO: 1838 - RNA, 22 nt, Homo sapiens
aagacgggaggaaagaagggag

SEQ ID NO: 1839 - RNA, 22 nt, Homo sapiens
cucccuucuuuccucccgucuu

SEQ ID NO: 1840 - RNA, 22 nt, Homo sapiens
cagugguuuuacccuaugguag

SEQ ID NO: 1841 - RNA, 22 nt, Homo sapiens
cuaccauaggguaaaaccacug

SEQ ID NO: 1842 - RNA, 22 nt, Homo sapiens
auucuaauuucuccacgucuuu

SEQ ID NO: 1843 - RNA, 22 nt, Homo sapiens
aaagacguggagaaauuagaau

SEQ ID NO: 1844 - RNA, 22 nt, Homo sapiens
aaccagcaccccaacuuuggac

SEQ ID NO: 1845 - RNA, 22 nt, Homo sapiens
guccaaaguuggggugcugguu

SEQ ID NO: 1846 - RNA, 24 nt, Homo sapiens
aaagacauaggauagagucaccuc

SEQ ID NO: 1847 - RNA, 24 nt, Homo sapiens
gaggugacucuauccuaugucuuu

SEQ ID NO: 1848 - RNA, 22 nt, Homo sapiens
uaacugguugaacaacugaacc

SEQ ID NO: 1849 - RNA, 22 nt, Homo sapiens
gguucaguuguucaaccaguua

SEQ ID NO: 1850 - RNA, 20 nt, Homo sapiens
cgugccacccuuuuccccag

SEQ ID NO: 1851 - RNA, 20 nt, Homo sapiens
cuggggaaaaggguggcacg

SEQ ID NO: 1852 - RNA, 17 nt, Homo sapiens
guggggccaggcggugg

SEQ ID NO: 1853 - RNA, 17 nt, Homo sapiens
ccaccgccuggccccac

SEQ ID NO: 1854 - RNA, 22 nt, Homo sapiens
aaaagcuggguugagagggcaa

SEQ ID NO: 1855 - RNA, 22 nt, Homo sapiens
uugcccucucaacccagcuuuu

SEQ ID NO: 1856 - RNA, 22 nt, Homo sapiens
gguccagaggggagauagguuc

SEQ ID NO: 1857 - RNA, 22 nt, Homo sapiens
gaaccuaucuccccucuggacc

SEQ ID NO: 1858 - RNA, 23 nt, Homo sapiens
uagccuucagaucuugguguuuu

SEQ ID NO: 1859 - RNA, 23 nt, Homo sapiens
aaaacaccaagaucugaaggcua

SEQ ID NO: 1860 - RNA, 23 nt, Homo sapiens
ccacuuggaucugaaggcugccc

SEQ ID NO: 1861 - RNA, 23 nt, Homo sapiens
gggcagccuucagauccaagugg

SEQ ID NO: 1862 - RNA, 22 nt, Homo sapiens
ugugcgcagggagaccucuccc

SEQ ID NO: 1863 - RNA, 22 nt, Homo sapiens
gggagaggucucccugcgcaca

SEQ ID NO: 1864 - RNA, 22 nt, Homo sapiens
ugucuacuacuggagacacugg

SEQ ID NO: 1865 - RNA, 22 nt, Homo sapiens
ccagugucuccaguaguagaca

SEQ ID NO: 1866 - RNA, 21 nt, Homo sapiens
aaggcagggcccccgcucccc

SEQ ID NO: 1867 - RNA, 21 nt, Homo sapiens
ggggagcgggggcccugccuu

SEQ ID NO: 1868 - RNA, 21 nt, Homo sapiens
cugacuguugccguccuccag

SEQ ID NO: 1869 - RNA, 21 nt, Homo sapiens
cuggaggacggcaacagucag

SEQ ID NO: 1870 - RNA, 25 nt, Homo sapiens
aaaaaccacaauuacuuuugcacca

SEQ ID NO: 1871 - RNA, 25 nt, Homo sapiens
uggugcaaaaguaauugugguuuuu

SEQ ID NO: 1872 - RNA, 23 nt, Homo sapiens
caaaaaccgcaauuacuuuugca

SEQ ID NO: 1873 - RNA, 23 nt, Homo sapiens
ugcaaaaguaauugcgguuuuug

SEQ ID NO: 1874 - RNA, 22 nt, Homo sapiens
augugccugagggaguaagaca

SEQ ID NO: 1875 - RNA, 22 nt, Homo sapiens
ugucuuacucccucaggcacau

SEQ ID NO: 1876 - RNA, 20 nt, Homo sapiens
ucuuacucccucaggcacug

SEQ ID NO: 1877 - RNA, 20 nt, Homo sapiens
cagugccugagggaguaaga

SEQ ID NO: 1878 - RNA, 22 nt, Homo sapiens
agacacauuuggagagggaccc

SEQ ID NO: 1879 - RNA, 22 nt, Homo sapiens
gggucccucuccaaaugugucu

SEQ ID NO: 1880 - RNA, 22 nt, Homo sapiens
gguucccucuccaaaugugucu

SEQ ID NO: 1881 - RNA, 22 nt, Homo sapiens
agacacauuuggagagggaacc

SEQ ID NO: 1882 - RNA, 21 nt, Homo sapiens
aaaauuucuuucacuacuuag

SEQ ID NO: 1883 - RNA, 21 nt, Homo sapiens
cuaaguagugaaagaaauuuu

SEQ ID NO: 1884 - RNA, 21 nt, Homo sapiens
uuagugaaggcuauuuuaauu

SEQ ID NO: 1885 - RNA, 21 nt, Homo sapiens
aauuaaaauagccuucacuaa

SEQ ID NO: 1886 - RNA, 20 nt, Homo sapiens
acuguaaacgcuuucugaug

SEQ ID NO: 1887 - RNA, 20 nt, Homo sapiens
caucagaaagcguuuacagu

SEQ ID NO: 1888 - RNA, 22 nt, Homo sapiens
gcaugugaugaagcaaaucagu

SEQ ID NO: 1889 - RNA, 22 nt, Homo sapiens
acugauuugcuucaucacaugc

SEQ ID NO: 1890 - RNA, 24 nt, Homo sapiens
caaagugaugaguaauacuggcug

SEQ ID NO: 1891 - RNA, 24 nt, Homo sapiens
cagccaguauuacucaucacuuug

SEQ ID NO: 1892 - RNA, 20 nt, Homo sapiens
gaaucggaaaggaggcgccg

SEQ ID NO: 1893 - RNA, 20 nt, Homo sapiens
cggcgccuccuuuccgauuc

SEQ ID NO: 1894 - RNA, 21 nt, Homo sapiens
uugugaagaaagaaauucuua

SEQ ID NO: 1895 - RNA, 21 nt, Homo sapiens
uaagaauuucuuucuucacaa

SEQ ID NO: 1896 - RNA, 22 nt, Homo sapiens
aggaggcaucuugagaaaugga

SEQ ID NO: 1897 - RNA, 22 nt, Homo sapiens
uccauuucucaagaugccuccu

SEQ ID NO: 1898 - RNA, 24 nt, Homo sapiens
acaaaaaaaaaagcccaacccuuc

SEQ ID NO: 1899 - RNA, 24 nt, Homo sapiens
gaaggguugggcuuuuuuuuuugu

SEQ ID NO: 1900 - RNA, 22 nt, Homo sapiens
uguuguacuuuuuuuuuuguuc

SEQ ID NO: 1901 - RNA, 22 nt, Homo sapiens
gaacaaaaaaaaaaguacaaca

SEQ ID NO: 1902 - RNA, 21 nt, Homo sapiens
ucucucggcuccucgcggcuc

SEQ ID NO: 1903 - RNA, 21 nt, Homo sapiens
gagccgcgaggagccgagaga

SEQ ID NO: 1904 - RNA, 23 nt, Homo sapiens
cgagggcauuucaugaugcaggc

SEQ ID NO: 1905 - RNA, 23 nt, Homo sapiens
gccugcaucaugaaaugcccucg

SEQ ID NO: 1906 - RNA, 22 nt, Homo sapiens
augaagugcacucaugauaugu

SEQ ID NO: 1907 - RNA, 22 nt, Homo sapiens
acauaucaugagugcacuucau

SEQ ID NO: 1908 - RNA, 22 nt, Homo sapiens
ugucuacauuaaugaaaagagc

SEQ ID NO: 1909 - RNA, 22 nt, Homo sapiens
gcucuuuucauuaauguagaca

SEQ ID NO: 1910 - RNA, 22 nt, Homo sapiens
ucacccugcaucccgcacccag

SEQ ID NO: 1911 - RNA, 22 nt, Homo sapiens
cugggugcgggaugcaggguga

SEQ ID NO: 1912 - RNA, 22 nt, Homo sapiens
gugggcugggcugggcugggcc

SEQ ID NO: 1913 - RNA, 22 nt, Homo sapiens
ggcccagcccagcccagcccac

SEQ ID NO: 1914 - RNA, 20 nt, Homo sapiens
cgcgggucggggucugcagg

SEQ ID NO: 1915 - RNA, 20 nt, Homo sapiens
ccugcagaccccgacccgcg

SEQ ID NO: 1916 - RNA, 21 nt, Homo sapiens
ucaccugagcucccgugccug

SEQ ID NO: 1917 - RNA, 21 nt, Homo sapiens
caggcacgggagcucagguga

SEQ ID NO: 1918 - RNA, 20 nt, Homo sapiens
aggcaugggaggucagguga

SEQ ID NO: 1919 - RNA, 20 nt, Homo sapiens
ucaccugaccucccaugccu

SEQ ID NO: 1920 - RNA, 23 nt, Homo sapiens
caucagcacccuauguccuuucu

SEQ ID NO: 1921 - RNA, 23 nt, Homo sapiens
agaaaggacauagggugcugaug

SEQ ID NO: 1922 - RNA, 22 nt, Homo sapiens
aaagacauaguugcaagauggg

SEQ ID NO: 1923 - RNA, 22 nt, Homo sapiens
cccaucuugcaacuaugucuuu

SEQ ID NO: 1924 - RNA, 22 nt, Homo sapiens
uuugugaccugguccacuaacc

SEQ ID NO: 1925 - RNA, 22 nt, Homo sapiens
gguuaguggaccaggucacaaa

SEQ ID NO: 1926 - RNA, 22 nt, Homo sapiens
gaugguugaccagagagcacac

SEQ ID NO: 1927 - RNA, 22 nt, Homo sapiens
gugugcucucuggucaaccauc

SEQ ID NO: 1928 - RNA, 20 nt, Homo sapiens
aaaagcuggguugagagggu

SEQ ID NO: 1929 - RNA, 20 nt, Homo sapiens
acccucucaacccagcuuuu

SEQ ID NO: 1930 - RNA, 21 nt, Homo sapiens
cacaagguauugguauuaccu

SEQ ID NO: 1931 - RNA, 21 nt, Homo sapiens
agguaauaccaauaccuugug

SEQ ID NO: 1932 - RNA, 22 nt, Homo sapiens
uaguaccaguaccuuguguuca

SEQ ID NO: 1933 - RNA, 22 nt, Homo sapiens
ugaacacaagguacugguacua

SEQ ID NO: 1934 - RNA, 22 nt, Homo sapiens
aguauucuguaccagggaaggu

SEQ ID NO: 1935 - RNA, 22 nt, Homo sapiens
accuucccugguacagaauacu

SEQ ID NO: 1936 - RNA, 22 nt, Homo sapiens
uggcaguguauuguuagcuggu

SEQ ID NO: 1937 - RNA, 22 nt, Homo sapiens
accagcuaacaauacacugcca

SEQ ID NO: 1938 - RNA, 22 nt, Homo sapiens
uauacaagggcaagcucucugu

SEQ ID NO: 1939 - RNA, 22 nt, Homo sapiens
acagagagcuugcccuuguaua

SEQ ID NO: 1940 - RNA, 22 nt, Homo sapiens
agcgagguugcccuuuguauau

SEQ ID NO: 1941 - RNA, 22 nt, Homo sapiens
auauacaaagggcaaccucgcu

SEQ ID NO: 1942 - RNA, 22 nt, Homo sapiens
caaucacuaacuccacugccau

SEQ ID NO: 1943 - RNA, 22 nt, Homo sapiens
auggcaguggaguuagugauug

SEQ ID NO: 1944 - RNA, 23 nt, Homo sapiens
uaggcagugucauuagcugauug

SEQ ID NO: 1945 - RNA, 23 nt, Homo sapiens
caaucagcuaaugacacugccua

SEQ ID NO: 1946 - RNA, 22 nt, Homo sapiens
cagccacaacuacccugccacu

SEQ ID NO: 1947 - RNA, 22 nt, Homo sapiens
aguggcaggguaguuguggcug

SEQ ID NO: 1948 - RNA, 22 nt, Homo sapiens
aggcaguguauuguuagcuggc

SEQ ID NO: 1949 - RNA, 22 nt, Homo sapiens
gccagcuaacaauacacugccu

SEQ ID NO: 1950 - RNA, 22 nt, Homo sapiens
aaucacuaaccacacggccagg

SEQ ID NO: 1951 - RNA, 22 nt, Homo sapiens
ccuggccgugugguuagugauu

SEQ ID NO: 1952 - RNA, 23 nt, Homo sapiens
aggcaguguaguuagcugauugc

SEQ ID NO: 1953 - RNA, 23 nt, Homo sapiens
gcaaucagcuaacuacacugccu

SEQ ID NO: 1954 - RNA, 20 nt, Homo sapiens
guccgcucggcgguggccca

SEQ ID NO: 1955 - RNA, 20 nt, Homo sapiens
ugggccaccgccgagcggac

SEQ ID NO: 1956 - RNA, 23 nt, Homo sapiens
gaacgccuguucuugccaggugg

SEQ ID NO: 1957 - RNA, 23 nt, Homo sapiens
ccaccuggcaagaacaggcguuc

SEQ ID NO: 1958 - RNA, 19 nt, Homo sapiens
aagugugcagggcacuggu

SEQ ID NO: 1959 - RNA, 19 nt, Homo sapiens
accagugcccugcacacuu

SEQ ID NO: 1960 - RNA, 21 nt, Homo sapiens
aggggugcuaucugugauuga

SEQ ID NO: 1961 - RNA, 21 nt, Homo sapiens
ucaaucacagauagcaccccu

SEQ ID NO: 1962 - RNA, 22 nt, Homo sapiens
cuuucagucagauguuugcugc

SEQ ID NO: 1963 - RNA, 22 nt, Homo sapiens
gcagcaaacaucugacugaaag

SEQ ID NO: 1964 - RNA, 22 nt, Homo sapiens
uguaaacauccccgacuggaag

SEQ ID NO: 1965 - RNA, 22 nt, Homo sapiens
cuuccagucggggauguuuaca

SEQ ID NO: 1966 - RNA, 22 nt, Homo sapiens
uguaaacauccucgacuggaag

SEQ ID NO: 1967 - RNA, 22 nt, Homo sapiens
cuuccagucgaggauguuuaca

SEQ ID NO: 1968 - RNA, 22 nt, Homo sapiens
agaaguaauugcgguuuugcca

SEQ ID NO: 1969 - RNA, 22 nt, Homo sapiens
uggcaaaaccgcaauuacuucu

SEQ ID NO: 1970 - RNA, 22 nt, Homo sapiens
caaaacuggcaauuacuuuugc

SEQ ID NO: 1971 - RNA, 22 nt, Homo sapiens
gcaaaaguaauugccaguuuug

SEQ ID NO: 1972 - RNA, 22 nt, Homo sapiens
aaaaguaauugcgaguuuuacc

SEQ ID NO: 1973 - RNA, 22 nt, Homo sapiens
gguaaaacucgcaauuacuuuu

SEQ ID NO: 1974 - RNA, 22 nt, Homo sapiens
caagaaccucaguugcuuuugu

SEQ ID NO: 1975 - RNA, 22 nt, Homo sapiens
acaaaagcaacugagguucuug

SEQ ID NO: 1976 - RNA, 22 nt, Homo sapiens
caaaaaucucaauuacuuuugc

SEQ ID NO: 1977 - RNA, 22 nt, Homo sapiens
gcaaaaguaauugagauuuuug

SEQ ID NO: 1978 - RNA, 22 nt, Homo sapiens
caaaaaccacaguuucuuuugc

SEQ ID NO: 1979 - RNA, 22 nt, Homo sapiens
gcaaaagaaacugugguuuuug

SEQ ID NO: 1980 - RNA, 22 nt, Homo sapiens
aaaaguaauugugguuuuugcc

SEQ ID NO: 1981 - RNA, 22 nt, Homo sapiens
ggcaaaaaccacaauuacuuuu

SEQ ID NO: 1982 - RNA, 21 nt, Homo sapiens
ugacaacuauggaugagcucu

SEQ ID NO: 1983 - RNA, 21 nt, Homo sapiens
agagcucauccauaguuguca

SEQ ID NO: 1984 - RNA, 21 nt, Homo sapiens
aacaggugacugguuagacaa

SEQ ID NO: 1985 - RNA, 21 nt, Homo sapiens
uugucuaaccagucaccuguu

SEQ ID NO: 1986 - RNA, 21 nt, Homo sapiens
aaaacggugagauuuuguuuu

SEQ ID NO: 1987 - RNA, 21 nt, Homo sapiens
aaaacaaaaucucaccguuuu

SEQ ID NO: 1988 - RNA, 21 nt, Homo sapiens
gcuaguccugacucagccagu

SEQ ID NO: 1989 - RNA, 21 nt, Homo sapiens
acuggcugagucaggacuagc

SEQ ID NO: 1990 - RNA, 21 nt, Homo sapiens
aggguaagcugaaccucugau

SEQ ID NO: 1991 - RNA, 21 nt, Homo sapiens
aucagagguucagcuuacccu

SEQ ID NO: 1992 - RNA, 22 nt, Homo sapiens
auauuaccauuagcucaucuuu

SEQ ID NO: 1993 - RNA, 22 nt, Homo sapiens
aaagaugagcuaaugguaauau

SEQ ID NO: 1994 - RNA, 22 nt, Homo sapiens
gaugagcucauuguaauaugag

SEQ ID NO: 1995 - RNA, 22 nt, Homo sapiens
cucauauuacaaugagcucauc

SEQ ID NO: 1996 - RNA, 19 nt, Homo sapiens
agguugacauacguuuccc

SEQ ID NO: 1997 - RNA, 19 nt, Homo sapiens
gggaaacguaugucaaccu

SEQ ID NO: 1998 - RNA, 20 nt, Homo sapiens
auguauaaauguauacacac

SEQ ID NO: 1999 - RNA, 20 nt, Homo sapiens
guguguauacauuuauacau

SEQ ID NO: 2000 - RNA, 24 nt, Homo sapiens
cugaagugauguguaacugaucag

SEQ ID NO: 2001 - RNA, 24 nt, Homo sapiens
cugaucaguuacacaucacuucag

SEQ ID NO: 2002 - RNA, 22 nt, Homo sapiens
aagauguggaaaaauuggaauc

SEQ ID NO: 2003 - RNA, 22 nt, Homo sapiens
gauuccaauuuuuccacaucuu

SEQ ID NO: 2004 - RNA, 21 nt, Homo sapiens
uagauaaaauauugguaccug

SEQ ID NO: 2005 - RNA, 21 nt, Homo sapiens
cagguaccaauauuuuaucua

SEQ ID NO: 2006 - RNA, 21 nt, Homo sapiens
cuucuugugcucuaggauugu

SEQ ID NO: 2007 - RNA, 21 nt, Homo sapiens
acaauccuagagcacaagaag

SEQ ID NO: 2008 - RNA, 22 nt, Homo sapiens
uaugcauuguauuuuuaggucc

SEQ ID NO: 2009 - RNA, 22 nt, Homo sapiens
ggaccuaaaaauacaaugcaua

SEQ ID NO: 2010 - RNA, 21 nt, Homo sapiens
uuuccauaggugaugagucac

SEQ ID NO: 2011 - RNA, 21 nt, Homo sapiens
gugacucaucaccuauggaaa

SEQ ID NO: 2012 - RNA, 21 nt, Homo sapiens
uuggccacaauggguuagaac

SEQ ID NO: 2013 - RNA, 21 nt, Homo sapiens
guucuaacccauuguggccaa

SEQ ID NO: 2014 - RNA, 22 nt, Homo sapiens
ugugucacucgaugaccacugu

SEQ ID NO: 2015 - RNA, 22 nt, Homo sapiens
acaguggucaucgagugacaca

SEQ ID NO: 2016 - RNA, 23 nt, Homo sapiens
acuuacagacaagagccuugcuc

SEQ ID NO: 2017 - RNA, 23 nt, Homo sapiens
gagcaaggcucuugucuguaagu

SEQ ID NO: 2018 - RNA, 19 nt, Homo sapiens
aggcugcggaauucaggac

SEQ ID NO: 2019 - RNA, 19 nt, Homo sapiens
guccugaauuccgcagccu

SEQ ID NO: 2020 - RNA, 23 nt, Homo sapiens
uaaaucccauggugccuucuccu

SEQ ID NO: 2021 - RNA, 23 nt, Homo sapiens
aggagaaggcaccaugggauuua

SEQ ID NO: 2022 - RNA, 21 nt, Homo sapiens
aaacuacugaaaaucaaagau

SEQ ID NO: 2023 - RNA, 21 nt, Homo sapiens
aucuuugauuuucaguaguuu

SEQ ID NO: 2024 - RNA, 21 nt, Homo sapiens
guucaaauccagaucuauaac

SEQ ID NO: 2025 - RNA, 21 nt, Homo sapiens
guuauagaucuggauuugaac

SEQ ID NO: 2026 - RNA, 19 nt, Homo sapiens
ccgguuccagucccuggag

SEQ ID NO: 2027 - RNA, 19 nt, Homo sapiens
cuccagggacuggaaccgg

SEQ ID NO: 2028 - RNA, 20 nt, Homo sapiens
aggguguuucucucaucucu

SEQ ID NO: 2029 - RNA, 20 nt, Homo sapiens
agagaugagagaaacacccu

SEQ ID NO: 2030 - RNA, 24 nt, Homo sapiens
gaccuggacauguuugugcccagu

SEQ ID NO: 2031 - RNA, 24 nt, Homo sapiens
acugggcacaaacauguccagguc

SEQ ID NO: 2032 - RNA, 20 nt, Homo sapiens
auggagauagauauagaaau

SEQ ID NO: 2033 - RNA, 20 nt, Homo sapiens
auuucuauaucuaucuccau

SEQ ID NO: 2034 - RNA, 19 nt, Homo sapiens
agcugucugaaaaugucuu

SEQ ID NO: 2035 - RNA, 19 nt, Homo sapiens
aagacauuuucagacagcu

SEQ ID NO: 2036 - RNA, 21 nt, Homo sapiens
agaccuggcccagaccucagc

SEQ ID NO: 2037 - RNA, 21 nt, Homo sapiens
gcugaggucugggccaggucu

SEQ ID NO: 2038 - RNA, 23 nt, Homo sapiens
acuugggcacugaaacaaugucc

SEQ ID NO: 2039 - RNA, 23 nt, Homo sapiens
ggacauuguuucagugcccaagu

SEQ ID NO: 2040 - RNA, 24 nt, Homo sapiens
acugggggcuuucgggcucugcgu

SEQ ID NO: 2041 - RNA, 24 nt, Homo sapiens
acgcagagcccgaaagcccccagu

SEQ ID NO: 2042 - RNA, 23 nt, Homo sapiens
aucgcugcgguugcgagcgcugu

SEQ ID NO: 2043 - RNA, 23 nt, Homo sapiens
acagcgcucgcaaccgcagcgau

SEQ ID NO: 2044 - RNA, 22 nt, Homo sapiens
gucccucuccaaaugugucuug

SEQ ID NO: 2045 - RNA, 22 nt, Homo sapiens
caagacacauuuggagagggac

SEQ ID NO: 2046 - RNA, 22 nt, Homo sapiens
acuuguaugcuagcucagguag

SEQ ID NO: 2047 - RNA, 22 nt, Homo sapiens
cuaccugagcuagcauacaagu

SEQ ID NO: 2048 - RNA, 22 nt, Homo sapiens
uuuaggauaagcuugacuuuug

SEQ ID NO: 2049 - RNA, 22 nt, Homo sapiens
caaaagucaagcuuauccuaaa

SEQ ID NO: 2050 - RNA, 21 nt, Homo sapiens
guguugaaacaaucucuacug

SEQ ID NO: 2051 - RNA, 21 nt, Homo sapiens
caguagagauuguuucaacac

SEQ ID NO: 2052 - RNA, 22 nt, Homo sapiens
uaugucugcugaccaucaccuu

SEQ ID NO: 2053 - RNA, 22 nt, Homo sapiens
aaggugauggucagcagacaua

SEQ ID NO: 2054 - RNA, 22 nt, Homo sapiens
ggggcuggggccggggccgagc

SEQ ID NO: 2055 - RNA, 22 nt, Homo sapiens
gcucggccccggccccagcccc

SEQ ID NO: 2056 - RNA, 22 nt, Homo sapiens
ugagguaguagguuguaugguu

SEQ ID NO: 2057 - RNA, 22 nt, Homo sapiens
aaccauacaaccuacuaccuca

SEQ ID NO: 2058 - RNA, 21 nt, Homo sapiens
gugucuuuugcucugcaguca

SEQ ID NO: 2059 - RNA, 21 nt, Homo sapiens
ugacugcagagcaaaagacac

SEQ ID NO: 2060 - RNA, 24 nt, Homo sapiens
ccccgggaacgucgagacuggagc

SEQ ID NO: 2061 - RNA, 24 nt, Homo sapiens
gcuccagucucgacguucccgggg

SEQ ID NO: 2062 - RNA, 22 nt, Homo sapiens
acccgucccguucguccccgga

SEQ ID NO: 2063 - RNA, 22 nt, Homo sapiens
uccggggacgaacgggacgggu

SEQ ID NO: 2064 - RNA, 22 nt, Homo sapiens
augggugaauuuguagaaggau

SEQ ID NO: 2065 - RNA, 22 nt, Homo sapiens
auccuucuacaaauucacccau

SEQ ID NO: 2066 - RNA, 22 nt, Homo sapiens
cuggacugagccgugcuacugg

SEQ ID NO: 2067 - RNA, 22 nt, Homo sapiens
ccaguagcacggcucaguccag

SEQ ID NO: 2068 - RNA, 22 nt, Homo sapiens
cuggacugagccaugcuacugg

SEQ ID NO: 2069 - RNA, 22 nt, Homo sapiens
ccaguagcauggcucaguccag

SEQ ID NO: 2070 - RNA, 22 nt, Homo sapiens
uacguagauauauauguauuuu

SEQ ID NO: 2071 - RNA, 22 nt, Homo sapiens
aaaauacauauauaucuacgua

SEQ ID NO: 2072 - RNA, 24 nt, Homo sapiens
aaauauauauauauauguacguau

SEQ ID NO: 2073 - RNA, 22 nt, Homo sapiens
gcucuuuucauuaauguagaca

SEQ ID NO: 2074 - RNA, 22 nt, Homo sapiens
ugcuggaucagugguucgaguc

SEQ ID NO: 2075 - RNA, 22 nt, Homo sapiens
gacucgaaccacugauccagca

SEQ ID NO: 2076 - RNA, 19 nt, Homo sapiens
uggauuuuuggaucaggga

SEQ ID NO: 2077 - RNA, 19 nt, Homo sapiens
ucccugauccaaaaaucca

SEQ ID NO: 2078 - RNA, 22 nt, Homo sapiens
uuauaaagcaaugagacugauu

SEQ ID NO: 2079 - RNA, 22 nt, Homo sapiens
aaucagucucauugcuuuauaa

SEQ ID NO: 2080 - RNA, 23 nt, Homo sapiens
uagugcaauauugcuuauagggu

SEQ ID NO: 2081 - RNA, 23 nt, Homo sapiens
acccuauaagcaauauugcacua

SEQ ID NO: 2082 - RNA, 22 nt, Homo sapiens
acccuaucaauauugucucugc

SEQ ID NO: 2083 - RNA, 22 nt, Homo sapiens
gcagagacaauauugauagggu

SEQ ID NO: 2084 - RNA, 17 nt, Homo sapiens
uaagugcuuccaugcuu

SEQ ID NO: 2085 - RNA, 17 nt, Homo sapiens
aagcauggaagcacuua

SEQ ID NO: 2086 - RNA, 22 nt, Homo sapiens
ucggccugaccacccaccccac

SEQ ID NO: 2087 - RNA, 22 nt, Homo sapiens
gugggguggguggucaggccga

SEQ ID NO: 2088 - RNA, 21 nt, Homo sapiens
ggggggggggggggggggccg

SEQ ID NO: 2089 - RNA, 21 nt, Homo sapiens
cggcccccccccccccccccc

SEQ ID NO: 2090 - RNA, 22 nt, Homo sapiens
cuauacgaccugcugccuuucu

SEQ ID NO: 2091 - RNA, 22 nt, Homo sapiens
agaaaggcagcaggucguauag

SEQ ID NO: 2092 - RNA, 22 nt, Homo sapiens
agagguaguagguugcauaguu

SEQ ID NO: 2093 - RNA, 22 nt, Homo sapiens
aacuaugcaaccuacuaccucu

SEQ ID NO: 2094 - RNA, 22 nt, Homo sapiens
ccgcacuguggguacuugcugc

SEQ ID NO: 2095 - RNA, 22 nt, Homo sapiens
gcagcaaguacccacagugcgg

SEQ ID NO: 2096 - RNA, 21 nt, Homo sapiens
uaaagugcugacagugcagau

SEQ ID NO: 2097 - RNA, 21 nt, Homo sapiens
aucugcacugucagcacuuua

SEQ ID NO: 2098 - RNA, 22 nt, Homo sapiens
aacuggaucaauuauaggagug

SEQ ID NO: 2099 - RNA, 22 nt, Homo sapiens
cacuccuauaauugauccaguu

SEQ ID NO: 2100 - RNA, 26 nt, Homo sapiens
aaguaguugguuuguaugagaugguu

SEQ ID NO: 2101 - RNA, 26 nt, Homo sapiens
aaccaucucauacaaaccaacuacuu

SEQ ID NO: 2102 - RNA, 21 nt, Homo sapiens
aagugaucuaaaggccuacau

SEQ ID NO: 2103 - RNA, 21 nt, Homo sapiens
auguaggccuuuagaucacuu

SEQ ID NO: 2104 - RNA, 22 nt, Homo sapiens
ucagaugaucuaaaggccuaua

SEQ ID NO: 2105 - RNA, 22 nt, Homo sapiens
uauaggccuuuagaucaucuga

SEQ ID NO: 2106 - RNA, 21 nt, Homo sapiens
uaggccuuuagaucacuuaaa

SEQ ID NO: 2107 - RNA, 21 nt, Homo sapiens
uuuaagugaucuaaaggccua

SEQ ID NO: 2108 - RNA, 21 nt, Homo sapiens
acucuagcugccaaaggcgcu

SEQ ID NO: 2109 - RNA, 21 nt, Homo sapiens
agcgccuuuggcagcuagagu

SEQ ID NO: 2110 - RNA, 22 nt, Homo sapiens
agaaggaaauugaauucauuua

SEQ ID NO: 2111 - RNA, 22 nt, Homo sapiens
uaaaugaauucaauuuccuucu

SEQ ID NO: 2112 - RNA, 21 nt, Homo sapiens
agagaagaagaucagccugca

SEQ ID NO: 2113 - RNA, 21 nt, Homo sapiens
ugcaggcugaucuucuucucu

SEQ ID NO: 2114 - RNA, 24 nt, Homo sapiens
agccuggaagcuggagccugcagu

SEQ ID NO: 2115 - RNA, 24 nt, Homo sapiens
acugcaggcuccagcuuccaggcu

SEQ ID NO: 2116 - RNA, 23 nt, Homo sapiens
aggaugagcaaagaaaguagauu

SEQ ID NO: 2117 - RNA, 23 nt, Homo sapiens
aaucuacuuucuuugcucauccu

SEQ ID NO: 2118 - RNA, 22 nt, Homo sapiens
aaccacuuucuuugcucaucca

SEQ ID NO: 2119 - RNA, 22 nt, Homo sapiens
uggaugagcaaagaaagugguu

SEQ ID NO: 2120 - RNA, 22 nt, Homo sapiens
cggaugagcaaagaaagugguu

SEQ ID NO: 2121 - RNA, 22 nt, Homo sapiens
aaccacuuucuuugcucauccg

SEQ ID NO: 2122 - RNA, 22 nt, Homo sapiens
aggcauugacuucucacuagcu

SEQ ID NO: 2123 - RNA, 22 nt, Homo sapiens
agcuagugagaagucaaugccu

SEQ ID NO: 2124 - RNA, 21 nt, Homo sapiens
agugaaugauggguucugacc

SEQ ID NO: 2125 - RNA, 21 nt, Homo sapiens
ggucagaacccaucauucacu

SEQ ID NO: 2126 - RNA, 21 nt, Homo sapiens
aguuaggauuaggucguggaa

SEQ ID NO: 2127 - RNA, 21 nt, Homo sapiens
uuccacgaccuaauccuaacu

SEQ ID NO: 2128 - RNA, 19 nt, Homo sapiens
auggauaaggcuuuggcuu

SEQ ID NO: 2129 - RNA, 19 nt, Homo sapiens
aagccaaagccuuauccau

SEQ ID NO: 2130 - RNA, 22 nt, Homo sapiens
augguacccuggcauacugagu

SEQ ID NO: 2131 - RNA, 22 nt, Homo sapiens
acucaguaugccaggguaccau

SEQ ID NO: 2132 - RNA, 23 nt, Homo sapiens
caagucuuauuugagcaccuguu

SEQ ID NO: 2133 - RNA, 23 nt, Homo sapiens
aacaggugcucaaauaagacuug

SEQ ID NO: 2134 - RNA, 22 nt, Homo sapiens
caggauguggucaaguguuguu

SEQ ID NO: 2135 - RNA, 22 nt, Homo sapiens
aacaacacuugaccacauccug

SEQ ID NO: 2136 - RNA, 23 nt, Homo sapiens
ccucagggcuguagaacagggcu

SEQ ID NO: 2137 - RNA, 23 nt, Homo sapiens
agcccuguucuacagcccugagg

SEQ ID NO: 2138 - RNA, 21 nt, Homo sapiens
ccuguugaaguguaaucccca

SEQ ID NO: 2139 - RNA, 21 nt, Homo sapiens
uggggauuacacuucaacagg

SEQ ID NO: 2140 - RNA, 18 nt, Homo sapiens
cgggcguggugguggggg

SEQ ID NO: 2141 - RNA, 18 nt, Homo sapiens
cccccaccaccacgcccg

SEQ ID NO: 2142 - RNA, 20 nt, Homo sapiens
cgggcgugguggugggggug

SEQ ID NO: 2143 - RNA, 20 nt, Homo sapiens
cacccccaccaccacgcccg

SEQ ID NO: 2144 - RNA, 23 nt, Homo sapiens
cuggagauauggaagagcugugu

SEQ ID NO: 2145 - RNA, 23 nt, Homo sapiens
acacagcucuuccauaucuccag

SEQ ID NO: 2146 - RNA, 26 nt, Homo sapiens
gaugaugauggcagcaaauucugaaa

SEQ ID NO: 2147 - RNA, 26 nt, Homo sapiens
uuucagaauuugcugccaucaucauc

SEQ ID NO: 2148 - RNA, 25 nt, Homo sapiens
gggcgacaaagcaagacucuuucuu

SEQ ID NO: 2149 - RNA, 25 nt, Homo sapiens
aagaaagagucuugcuuugucgccc

SEQ ID NO: 2150 - RNA, 25 nt, Homo sapiens
gaacccaugagguugaggcugcagu

SEQ ID NO: 2151 - RNA, 25 nt, Homo sapiens
acugcagccucaaccucauggguuc

SEQ ID NO: 2152 - RNA, 17 nt, Homo sapiens
gugggggagaggcuguc

SEQ ID NO: 2153 - RNA, 17 nt, Homo sapiens
gacagccucucccccac

SEQ ID NO: 2154 - RNA, 20 nt, Homo sapiens
uaaagagcccuguggagaca

SEQ ID NO: 2155 - RNA, 20 nt, Homo sapiens
ugucuccacagggcucuuua

SEQ ID NO: 2156 - RNA, 22 nt, Homo sapiens
uaguacugugcauaucaucuau

SEQ ID NO: 2157 - RNA, 22 nt, Homo sapiens
auagaugauaugcacaguacua

SEQ ID NO: 2158 - RNA, 20 nt, Homo sapiens
ucguuugccuuuuucugcuu

SEQ ID NO: 2159 - RNA, 20 nt, Homo sapiens
aagcagaaaaaggcaaacga

SEQ ID NO: 2160 - RNA, 21 nt, Homo sapiens
uggacugcccugaucuggaga

SEQ ID NO: 2161 - RNA, 21 nt, Homo sapiens
ucuccagaucagggcagucca

SEQ ID NO: 2162 - RNA, 22 nt, Homo sapiens
uggguggucuggagauuugugc

SEQ ID NO: 2163 - RNA, 22 nt, Homo sapiens
gcacaaaucuccagaccaccca

SEQ ID NO: 2164 - RNA, 22 nt, Homo sapiens
ugugagguuggcauuguugucu

SEQ ID NO: 2165 - RNA, 22 nt, Homo sapiens
agacaacaaugccaaccucaca

SEQ ID NO: 2166 - RNA, 17 nt, Homo sapiens
uucaaguaauucaggug

SEQ ID NO: 2167 - RNA, 17 nt, Homo sapiens
caccugaauuacuugaa

SEQ ID NO: 2168 - RNA, 22 nt, Homo sapiens
uucuggaauucugugugaggga

SEQ ID NO: 2169 - RNA, 22 nt, Homo sapiens
ucccucacacagaauuccagaa

SEQ ID NO: 2170 - RNA, 22 nt, Homo sapiens
uuuucaacucuaaugggagaga

SEQ ID NO: 2171 - RNA, 22 nt, Homo sapiens
ucucucccauuagaguugaaaa

SEQ ID NO: 2172 - RNA, 18 nt, Homo sapiens
acguuggcucugguggug

SEQ ID NO: 2173 - RNA, 18 nt, Homo sapiens
caccaccagagccaacgu

SEQ ID NO: 2174 - RNA, 22 nt, Homo sapiens
ccaccuccccugcaaacgucca

SEQ ID NO: 2175 - RNA, 22 nt, Homo sapiens
uggacguuugcaggggaggugg

SEQ ID NO: 2176 - RNA, 22 nt, Homo sapiens
acucggcguggcgucggucgug

SEQ ID NO: 2177 - RNA, 22 nt, Homo sapiens
cacgaccgacgccacgccgagu

SEQ ID NO: 2178 - RNA, 21 nt, Homo sapiens
ucgaccggaccucgaccggcu

SEQ ID NO: 2179 - RNA, 21 nt, Homo sapiens
agccggucgagguccggucga

SEQ ID NO: 2180 - RNA, 22 nt, Homo sapiens
ugagaacugaauuccauaggcu

SEQ ID NO: 2181 - RNA, 22 nt, Homo sapiens
agccuauggaauucaguucuca

SEQ ID NO: 2182 - RNA, 22 nt, Homo sapiens
aaucauacacgguugaccuauu

SEQ ID NO: 2183 - RNA, 22 nt, Homo sapiens
aauaggucaaccguguaugauu

SEQ ID NO: 2184 - RNA, 22 nt, Homo sapiens
uagguuauccguguugccuucg

SEQ ID NO: 2185 - RNA, 22 nt, Homo sapiens
cgaaggcaacacggauaaccua

SEQ ID NO: 2186 - RNA, 21 nt, Homo sapiens
ccaguccugugccugccgccu

SEQ ID NO: 2187 - RNA, 21 nt, Homo sapiens
aggcggcaggcacaggacugg

SEQ ID NO: 2188 - RNA, 22 nt, Homo sapiens
ucugcccccuccgcugcugcca

SEQ ID NO: 2189 - RNA, 22 nt, Homo sapiens
uggcagcagcggagggggcaga

SEQ ID NO: 2190 - RNA, 22 nt, Homo sapiens
ggaggggucccgcacugggagg

SEQ ID NO: 2191 - RNA, 22 nt, Homo sapiens
ccucccagugcgggaccccucc

SEQ ID NO: 2192 - RNA, 22 nt, Homo sapiens
cccugugcccggcccacuucug

SEQ ID NO: 2193 - RNA, 22 nt, Homo sapiens
cagaagugggccgggcacaggg

SEQ ID NO: 2194 - RNA, 20 nt, Homo sapiens
ccccagggcgacgcggcggg

SEQ ID NO: 2195 - RNA, 20 nt, Homo sapiens
cccgccgcgucgcccugggg

SEQ ID NO: 2196 - RNA, 22 nt, Homo sapiens
accuugccuugcugcccgggcc

SEQ ID NO: 2197 - RNA, 22 nt, Homo sapiens
ggcccgggcagcaaggcaaggu

SEQ ID NO: 2198 - RNA, 21 nt, Homo sapiens
auuugugcuuggcucugucac

SEQ ID NO: 2199 - RNA, 21 nt, Homo sapiens
gugacagagccaagcacaaau

SEQ ID NO: 2200 - RNA, 22 nt, Homo sapiens
auuguccuugcuguuuggagau

SEQ ID NO: 2201 - RNA, 22 nt, Homo sapiens
aucuccaaacagcaaggacaau

SEQ ID NO: 2202 - RNA, 21 nt, Homo sapiens
auccccagauacaauggacaa

SEQ ID NO: 2203 - RNA, 21 nt, Homo sapiens
uuguccauuguaucuggggau

SEQ ID NO: 2204 - RNA, 23 nt, Homo sapiens
cagugcaauaguauugucaaagc

SEQ ID NO: 2205 - RNA, 23 nt, Homo sapiens
gcuuugacaauacuauugcacug

SEQ ID NO: 2206 - RNA, 22 nt, Homo sapiens
gcucugacuuuauugcacuacu

SEQ ID NO: 2207 - RNA, 22 nt, Homo sapiens
aguagugcaauaaagucagagc

SEQ ID NO: 2208 - RNA, 23 nt, Homo sapiens
uaagugcuuccauguuuuaguag

SEQ ID NO: 2209 - RNA, 23 nt, Homo sapiens
cuacuaaaacauggaagcacuua

SEQ ID NO: 2210 - RNA, 22 nt, Homo sapiens
acuuuaacauggaagugcuuuc

SEQ ID NO: 2211 - RNA, 22 nt, Homo sapiens
gaaagcacuuccauguuaaagu

SEQ ID NO: 2212 - RNA, 23 nt, Homo sapiens
uaagugcuuccauguuucagugg

SEQ ID NO: 2213 - RNA, 23 nt, Homo sapiens
ccacugaaacauggaagcacuua

SEQ ID NO: 2214 - RNA, 22 nt, Homo sapiens
uuuaacauggggguaccugcug

SEQ ID NO: 2215 - RNA, 22 nt, Homo sapiens
cagcagguacccccauguuaaa

SEQ ID NO: 2216 - RNA, 23 nt, Homo sapiens
uaagugcuuccauguuugagugu

SEQ ID NO: 2217 - RNA, 23 nt, Homo sapiens
acacucaaacauggaagcacuua

SEQ ID NO: 2218 - RNA, 22 nt, Homo sapiens
acuuuaacauggaggcacuugc

SEQ ID NO: 2219 - RNA, 22 nt, Homo sapiens
gcaagugccuccauguuaaagu

SEQ ID NO: 2220 - RNA, 22 nt, Homo sapiens
aauugcacuuuagcaaugguga

SEQ ID NO: 2221 - RNA, 22 nt, Homo sapiens
ucaccauugcuaaagugcaauu

SEQ ID NO: 2222 - RNA, 22 nt, Homo sapiens
acuguugcuaauaugcaacucu

SEQ ID NO: 2223 - RNA, 22 nt, Homo sapiens
agaguugcauauuagcaacagu

SEQ ID NO: 2224 - RNA, 23 nt, Homo sapiens
agcucggucugaggccccucagu

SEQ ID NO: 2225 - RNA, 23 nt, Homo sapiens
acugaggggccucagaccgagcu

SEQ ID NO: 2226 - RNA, 22 nt, Homo sapiens
aaaaacugagacuacuuuugca

SEQ ID NO: 2227 - RNA, 22 nt, Homo sapiens
ugcaaaaguagucucaguuuuu

SEQ ID NO: 2228 - RNA, 19 nt, Homo sapiens
aaaaacuguaauuacuuuu

SEQ ID NO: 2229 - RNA, 19 nt, Homo sapiens
aaaaguaauuacaguuuuu

SEQ ID NO: 2230 - RNA, 22 nt, Homo sapiens
aaaacuguaauuacuuuuguac

SEQ ID NO: 2231 - RNA, 22 nt, Homo sapiens
guacaaaaguaauuacaguuuu

SEQ ID NO: 2232 - RNA, 23 nt, Homo sapiens
ugcaaaaguaauugcaguuuuug

SEQ ID NO: 2233 - RNA, 23 nt, Homo sapiens
caaaaacugcaauuacuuuugca

SEQ ID NO: 2234 - RNA, 23 nt, Homo sapiens
caaaaaccgcaauuacuuuugca

SEQ ID NO: 2235 - RNA, 23 nt, Homo sapiens
ugcaaaaguaauugcgguuuuug

SEQ ID NO: 2236 - RNA, 22 nt, Homo sapiens
aaaaguaaucgcgguuuuuguc

SEQ ID NO: 2237 - RNA, 22 nt, Homo sapiens
gacaaaaaccgcgauuacuuuu

SEQ ID NO: 2238 - RNA, 22 nt, Homo sapiens
aaaaguacuugcggauuuugcu

SEQ ID NO: 2239 - RNA, 22 nt, Homo sapiens
agcaaaauccgcaaguacuuuu

SEQ ID NO: 2240 - RNA, 22 nt, Homo sapiens
aaaaguauuugcggguuuuguc

SEQ ID NO: 2241 - RNA, 22 nt, Homo sapiens
gacaaaacccgcaaauacuuuu

SEQ ID NO: 2242 - RNA, 21 nt, Homo sapiens
caaagguauuugugguuuuug

SEQ ID NO: 2243 - RNA, 21 nt, Homo sapiens
caaaaaccacaaauaccuuug

SEQ ID NO: 2244 - RNA, 22 nt, Homo sapiens
ccaaaacugcaguuacuuuugc

SEQ ID NO: 2245 - RNA, 22 nt, Homo sapiens
gcaaaaguaacugcaguuuugg

SEQ ID NO: 2246 - RNA, 22 nt, Homo sapiens
aaaaguaauugcgguuuuugcc

SEQ ID NO: 2247 - RNA, 22 nt, Homo sapiens
ggcaaaaaccgcaauuacuuuu

SEQ ID NO: 2248 - RNA, 22 nt, Homo sapiens
uagcaaaaacugcaguuacuuu

SEQ ID NO: 2249 - RNA, 22 nt, Homo sapiens
aaaguaacugcaguuuuugcua

SEQ ID NO: 2250 - RNA, 20 nt, Homo sapiens
ggagguugggaagggcagag

SEQ ID NO: 2251 - RNA, 20 nt, Homo sapiens
cucugcccuucccaaccucc

SEQ ID NO: 2252 - RNA, 18 nt, Homo sapiens
ugaggcgggggggcgagc

SEQ ID NO: 2253 - RNA, 18 nt, Homo sapiens
gcucgcccccccgccuca

SEQ ID NO: 2254 - RNA, 20 nt, Homo sapiens
agagaugaagcgggggggcg

SEQ ID NO: 2255 - RNA, 20 nt, Homo sapiens
cgcccccccgcuucaucucu

SEQ ID NO: 2256 - RNA, 24 nt, Homo sapiens
ggaggccgggguggggcggggcgg

SEQ ID NO: 2257 - RNA, 24 nt, Homo sapiens
ccgccccgccccaccccggccucc

SEQ ID NO: 2258 - RNA, 19 nt, Homo sapiens
ggggagcgaggggcggggc

SEQ ID NO: 2259 - RNA, 19 nt, Homo sapiens
gccccgccccucgcucccc

SEQ ID NO: 2260 - RNA, 23 nt, Homo sapiens
uauucauuuauccccagccuaca

SEQ ID NO: 2261 - RNA, 23 nt, Homo sapiens
uguaggcuggggauaaaugaaua

SEQ ID NO: 2262 - RNA, 24 nt, Homo sapiens
acuggcuagggaaaaugauuggau

SEQ ID NO: 2263 - RNA, 24 nt, Homo sapiens
auccaaucauuuucccuagccagu

SEQ ID NO: 2264 - RNA, 22 nt, Homo sapiens
uucauuugccucccagccuaca

SEQ ID NO: 2265 - RNA, 22 nt, Homo sapiens
uguaggcugggaggcaaaugaa

SEQ ID NO: 2266 - RNA, 24 nt, Homo sapiens
ugggcuaagggagaugauugggua

SEQ ID NO: 2267 - RNA, 24 nt, Homo sapiens
uacccaaucaucucccuuagccca

SEQ ID NO: 2268 - RNA, 22 nt, Homo sapiens
acuccagccccacagccucagc

SEQ ID NO: 2269 - RNA, 22 nt, Homo sapiens
gcugaggcuguggggcuggagu

SEQ ID NO: 2270 - RNA, 22 nt, Homo sapiens
aggaggaauuggugcuggucuu

SEQ ID NO: 2271 - RNA, 22 nt, Homo sapiens
aagaccagcaccaauuccuccu

SEQ ID NO: 2272 - RNA, 22 nt, Homo sapiens
aggcagcgggguguaguggaua

SEQ ID NO: 2273 - RNA, 22 nt, Homo sapiens
uauccacuacaccccgcugccu

SEQ ID NO: 2274 - RNA, 22 nt, Homo sapiens
uccauuacacuacccugccucu

SEQ ID NO: 2275 - RNA, 22 nt, Homo sapiens
agaggcaggguaguguaaugga

SEQ ID NO: 2276 - RNA, 22 nt, Homo sapiens
acugcugagcuagcacuucccg

SEQ ID NO: 2277 - RNA, 22 nt, Homo sapiens
cgggaagugcuagcucagcagu

SEQ ID NO: 2278 - RNA, 23 nt, Homo sapiens
caaagugcuguucgugcagguag

SEQ ID NO: 2279 - RNA, 23 nt, Homo sapiens
cuaccugcacgaacagcacuuug

SEQ ID NO: 2280 - RNA, 23 nt, Homo sapiens
cacccggcugugugcacaugugc

SEQ ID NO: 2281 - RNA, 23 nt, Homo sapiens
gcacaugugcacacagccgggug

SEQ ID NO: 2282 - RNA, 23 nt, Homo sapiens
agcuucuuuacagugcugccuug

SEQ ID NO: 2283 - RNA, 23 nt, Homo sapiens
caaggcagcacuguaaagaagcu

SEQ ID NO: 2284 - RNA, 23 nt, Homo sapiens
agcagcauuguacagggcuauga

SEQ ID NO: 2285 - RNA, 23 nt, Homo sapiens
ucauagcccuguacaaugcugcu

SEQ ID NO: 2286 - RNA, 17 nt, Homo sapiens
ccugagaaaagggccaa

SEQ ID NO: 2287 - RNA, 17 nt, Homo sapiens
uuggcccuuuucucagg

SEQ ID NO: 2288 - RNA, 19 nt, Homo sapiens
ggccacugagucagcacca

SEQ ID NO: 2289 - RNA, 19 nt, Homo sapiens
uggugcugacucaguggcc

SEQ ID NO: 2290 - RNA, 18 nt, Homo sapiens
agggcauguccagggggu

SEQ ID NO: 2291 - RNA, 18 nt, Homo sapiens
acccccuggacaugcccu

SEQ ID NO: 2292 - RNA, 23 nt, Homo sapiens
gccuggagcuacuccaccaucuc

SEQ ID NO: 2293 - RNA, 23 nt, Homo sapiens
gagaugguggaguagcuccaggc

SEQ ID NO: 2294 - RNA, 17 nt, Homo sapiens
caguguucagagaugga

SEQ ID NO: 2295 - RNA, 17 nt, Homo sapiens
uccaucucugaacacug

SEQ ID NO: 2296 - RNA, 18 nt, Homo sapiens
aucugaccugaugaaggu

SEQ ID NO: 2297 - RNA, 18 nt, Homo sapiens
accuucaucaggucagau

SEQ ID NO: 2298 - RNA, 18 nt, Homo sapiens
ccagagguggggacugag

SEQ ID NO: 2299 - RNA, 18 nt, Homo sapiens
cucaguccccaccucugg

SEQ ID NO: 2300 - RNA, 17 nt, Homo sapiens
ccccgccaccgccuugg

SEQ ID NO: 2301 - RNA, 17 nt, Homo sapiens
ccaaggcgguggcgggg

SEQ ID NO: 2302 - RNA, 22 nt, Homo sapiens
caguugggucuaggggucagga

SEQ ID NO: 2303 - RNA, 22 nt, Homo sapiens
uccugaccccuagacccaacug

SEQ ID NO: 2304 - RNA, 19 nt, Homo sapiens
cuuggggcauggaguccca

SEQ ID NO: 2305 - RNA, 19 nt, Homo sapiens
ugggacuccaugccccaag

SEQ ID NO: 2306 - RNA, 16 nt, Homo sapiens
aggaaacagggaccca

SEQ ID NO: 2307 - RNA, 16 nt, Homo sapiens
ugggucccuguuuccu

SEQ ID NO: 2308 - RNA, 17 nt, Homo sapiens
gacauucagacuaccug

SEQ ID NO: 2309 - RNA, 17 nt, Homo sapiens
cagguagucugaauguc

SEQ ID NO: 2310 - RNA, 18 nt, Homo sapiens
auucuaagugccuuggcc

SEQ ID NO: 2311 - RNA, 18 nt, Homo sapiens
ggccaaggcacuuagaau

SEQ ID NO: 2312 - RNA, 17 nt, Homo sapiens
acucagucauggucauu

SEQ ID NO: 2313 - RNA, 17 nt, Homo sapiens
aaugaccaugacugagu

SEQ ID NO: 2314 - RNA, 19 nt, Homo sapiens
cugugggcucagcucuggg

SEQ ID NO: 2315 - RNA, 19 nt, Homo sapiens
cccagagcugagcccacag

SEQ ID NO: 2316 - RNA, 16 nt, Homo sapiens
cuaggaggccuuggcc

SEQ ID NO: 2317 - RNA, 16 nt, Homo sapiens
ggccaaggccuccuag

SEQ ID NO: 2318 - RNA, 16 nt, Homo sapiens
uccagcucgguggcac

SEQ ID NO: 2319 - RNA, 16 nt, Homo sapiens
gugccaccgagcugga

SEQ ID NO: 2320 - RNA, 21 nt, Homo sapiens
ggcuccuccucucaggaugug

SEQ ID NO: 2321 - RNA, 21 nt, Homo sapiens
cacauccugagaggaggagcc

SEQ ID NO: 2322 - RNA, 21 nt, Homo sapiens
gcaggcacagacagcccuggc

SEQ ID NO: 2323 - RNA, 21 nt, Homo sapiens
gccagggcugucugugccugc

SEQ ID NO: 2324 - RNA, 20 nt, Homo sapiens
ucagggagucaggggagggc

SEQ ID NO: 2325 - RNA, 20 nt, Homo sapiens
gcccuccccugacucccuga

SEQ ID NO: 2326 - RNA, 19 nt, Homo sapiens
gggggaagaaaaggugggg

SEQ ID NO: 2327 - RNA, 19 nt, Homo sapiens
ccccaccuuuucuuccccc

SEQ ID NO: 2328 - RNA, 18 nt, Homo sapiens
cauucaacuagugauugu

SEQ ID NO: 2329 - RNA, 18 nt, Homo sapiens
acaaucacuaguugaaug

SEQ ID NO: 2330 - RNA, 18 nt, Homo sapiens
cagcagucccucccccug

SEQ ID NO: 2331 - RNA, 18 nt, Homo sapiens
cagggggagggacugcug

SEQ ID NO: 2332 - RNA, 17 nt, Homo sapiens
ccaauuaccacuucuuu

SEQ ID NO: 2333 - RNA, 17 nt, Homo sapiens
aaagaagugguaauugg

SEQ ID NO: 2334 - RNA, 17 nt, Homo sapiens
cucagugacucaugugc

SEQ ID NO: 2335 - RNA, 17 nt, Homo sapiens
gcacaugagucacugag

SEQ ID NO: 2336 - RNA, 21 nt, Homo sapiens
gcaguucugagcacaguacac

SEQ ID NO: 2337 - RNA, 21 nt, Homo sapiens
guguacugugcucagaacugc

SEQ ID NO: 2338 - RNA, 18 nt, Homo sapiens
cuaggggguuugcccuug

SEQ ID NO: 2339 - RNA, 18 nt, Homo sapiens
caagggcaaacccccuag

SEQ ID NO: 2340 - RNA, 16 nt, Homo sapiens
cucuccucccggcuuc

SEQ ID NO: 2341 - RNA, 16 nt, Homo sapiens
gaagccgggaggagag

SEQ ID NO: 2342 - RNA, 21 nt, Homo sapiens
gaguguaguucugagcagagc

SEQ ID NO: 2343 - RNA, 21 nt, Homo sapiens
gcucugcucagaacuacacuc

SEQ ID NO: 2344 - RNA, 18 nt, Homo sapiens
gggucccggggagggggg

SEQ ID NO: 2345 - RNA, 18 nt, Homo sapiens
ccccccuccccgggaccc

SEQ ID NO: 2346 - RNA, 18 nt, Homo sapiens
uaaaauuugcauccagga

SEQ ID NO: 2347 - RNA, 18 nt, Homo sapiens
uccuggaugcaaauuuua

SEQ ID NO: 2348 - RNA, 17 nt, Homo sapiens
uggggcucagcgaguuu

SEQ ID NO: 2349 - RNA, 17 nt, Homo sapiens
aaacucgcugagcccca

SEQ ID NO: 2350 - RNA, 18 nt, Homo sapiens
gggcucacaucaccccau

SEQ ID NO: 2351 - RNA, 18 nt, Homo sapiens
auggggugaugugagccc

SEQ ID NO: 2352 - RNA, 18 nt, Homo sapiens
gcggcgaguccgacucau

SEQ ID NO: 2353 - RNA, 18 nt, Homo sapiens
augagucggacucgccgc

SEQ ID NO: 2354 - RNA, 17 nt, Homo sapiens
accccacuccugguacc

SEQ ID NO: 2355 - RNA, 17 nt, Homo sapiens
gguaccaggaguggggu

SEQ ID NO: 2356 - RNA, 19 nt, Homo sapiens
ucucccuugagggcacuuu

SEQ ID NO: 2357 - RNA, 19 nt, Homo sapiens
aaagugcccucaagggaga

SEQ ID NO: 2358 - RNA, 17 nt, Homo sapiens
uugucugcugaguuucc

SEQ ID NO: 2359 - RNA, 17 nt, Homo sapiens
ggaaacucagcagacaa

SEQ ID NO: 2360 - RNA, 19 nt, Homo sapiens
gcauugugcagggcuauca

SEQ ID NO: 2361 - RNA, 19 nt, Homo sapiens
ugauagcccugcacaaugc

SEQ ID NO: 2362 - RNA, 19 nt, Homo sapiens
ugcccuccuuucuucccuc

SEQ ID NO: 2363 - RNA, 19 nt, Homo sapiens
gagggaagaaaggagggca

SEQ ID NO: 2364 - RNA, 16 nt, Homo sapiens
uucagcaggaacagcu

SEQ ID NO: 2365 - RNA, 16 nt, Homo sapiens
agcuguuccugcugaa

SEQ ID NO: 2366 - RNA, 18 nt, Homo sapiens
ccccugggccggccuugg

SEQ ID NO: 2367 - RNA, 18 nt, Homo sapiens
ccaaggccggcccagggg

SEQ ID NO: 2368 - RNA, 17 nt, Homo sapiens
cagccugacaggaacag

SEQ ID NO: 2369 - RNA, 17 nt, Homo sapiens
cuguuccugucaggcug

SEQ ID NO: 2370 - RNA, 17 nt, Homo sapiens
gggagucuacagcaggg

SEQ ID NO: 2371 - RNA, 17 nt, Homo sapiens
cccugcuguagacuccc

SEQ ID NO: 2372 - RNA, 18 nt, Homo sapiens
cagugcaauguuuuccuu

SEQ ID NO: 2373 - RNA, 18 nt, Homo sapiens
aaggaaaacauugcacug

SEQ ID NO: 2374 - RNA, 17 nt, Homo sapiens
augugggcucaggcuca

SEQ ID NO: 2375 - RNA, 17 nt, Homo sapiens
ugagccugagcccacau

SEQ ID NO: 2376 - RNA, 16 nt, Homo sapiens
ugccuuccugucugug

SEQ ID NO: 2377 - RNA, 16 nt, Homo sapiens
cacagacaggaaggca

SEQ ID NO: 2378 - RNA, 22 nt, Homo sapiens
cugggacaggaggaggaggcag

SEQ ID NO: 2379 - RNA, 22 nt, Homo sapiens
cugccuccuccuccugucccag

SEQ ID NO: 2380 - RNA, 18 nt, Homo sapiens
gcuggugacaugagaggc

SEQ ID NO: 2381 - RNA, 18 nt, Homo sapiens
gccucucaugucaccagc

SEQ ID NO: 2382 - RNA, 18 nt, Homo sapiens
ugggagcuggacuacuuc

SEQ ID NO: 2383 - RNA, 18 nt, Homo sapiens
gaaguaguccagcuccca

SEQ ID NO: 2384 - RNA, 20 nt, Homo sapiens
ucccacuacuucacuuguga

SEQ ID NO: 2385 - RNA, 20 nt, Homo sapiens
ucacaagugaaguaguggga

SEQ ID NO: 2386 - RNA, 18 nt, Homo sapiens
ccaguguggcucagcgag

SEQ ID NO: 2387 - RNA, 18 nt, Homo sapiens
cucgcugagccacacugg

SEQ ID NO: 2388 - RNA, 17 nt, Homo sapiens
uucugagcugaggacag

SEQ ID NO: 2389 - RNA, 17 nt, Homo sapiens
cuguccucagcucagaa

SEQ ID NO: 2390 - RNA, 17 nt, Homo sapiens
ccggcauguccagggca

SEQ ID NO: 2391 - RNA, 17 nt, Homo sapiens
ugcccuggacaugccgg

SEQ ID NO: 2392 - RNA, 18 nt, Homo sapiens
ccuagacaccuccaguuc

SEQ ID NO: 2393 - RNA, 18 nt, Homo sapiens
gaacuggaggugucuagg

SEQ ID NO: 2394 - RNA, 17 nt, Homo sapiens
uggagagaaaggcagua

SEQ ID NO: 2395 - RNA, 17 nt, Homo sapiens
uacugccuuucucucca

SEQ ID NO: 2396 - RNA, 19 nt, Homo sapiens
aauguuuuuuccuguuucc

SEQ ID NO: 2397 - RNA, 19 nt, Homo sapiens
ggaaacaggaaaaaacauu

SEQ ID NO: 2398 - RNA, 18 nt, Homo sapiens
ucccuggaguuucuucuu

SEQ ID NO: 2399 - RNA, 18 nt, Homo sapiens
aagaagaaacuccaggga

SEQ ID NO: 2400 - RNA, 18 nt, Homo sapiens
cuggagucuaggauucca

SEQ ID NO: 2401 - RNA, 18 nt, Homo sapiens
uggaauccuagacuccag

SEQ ID NO: 2402 - RNA, 16 nt, Homo sapiens
gcagcauucauguccc

SEQ ID NO: 2403 - RNA, 16 nt, Homo sapiens
gggacaugaaugcugc

SEQ ID NO: 2404 - RNA, 18 nt, Homo sapiens
gaaagagagcugagugug

SEQ ID NO: 2405 - RNA, 18 nt, Homo sapiens
cacacucagcucucuuuc

SEQ ID NO: 2406 - RNA, 19 nt, Homo sapiens
ggccuuguuccugucccca

SEQ ID NO: 2407 - RNA, 19 nt, Homo sapiens
uggggacaggaacaaggcc

SEQ ID NO: 2408 - RNA, 20 nt, Homo sapiens
agcccccuggccccaaaccc

SEQ ID NO: 2409 - RNA, 20 nt, Homo sapiens
ggguuuggggccagggggcu

SEQ ID NO: 2410 - RNA, 18 nt, Homo sapiens
cucugggaaaugggacag

SEQ ID NO: 2411 - RNA, 18 nt, Homo sapiens
cugucccauuucccagag

SEQ ID NO: 2412 - RNA, 18 nt, Homo sapiens
ccgcuuucugagcuggac

SEQ ID NO: 2413 - RNA, 18 nt, Homo sapiens
guccagcucagaaagcgg

SEQ ID NO: 2414 - RNA, 17 nt, Homo sapiens
ggugaggcuagcuggug

SEQ ID NO: 2415 - RNA, 17 nt, Homo sapiens
caccagcuagccucacc

SEQ ID NO: 2416 - RNA, 17 nt, Homo sapiens
acauugccagggaguuu

SEQ ID NO: 2417 - RNA, 17 nt, Homo sapiens
aaacucccuggcaaugu

SEQ ID NO: 2418 - RNA, 17 nt, Homo sapiens
cacuguggguacaugcu

SEQ ID NO: 2419 - RNA, 17 nt, Homo sapiens
agcauguacccacagug

SEQ ID NO: 2420 - RNA, 17 nt, Homo sapiens
ucccugagcaaagccac

SEQ ID NO: 2421 - RNA, 17 nt, Homo sapiens
guggcuuugcucaggga

SEQ ID NO: 2422 - RNA, 18 nt, Homo sapiens
gggauucuguagcuuccu

SEQ ID NO: 2423 - RNA, 18 nt, Homo sapiens
aggaagcuacagaauccc

SEQ ID NO: 2424 - RNA, 21 nt, Homo sapiens
uuagcgguggaccgcccugcg

SEQ ID NO: 2425 - RNA, 21 nt, Homo sapiens
cgcagggcgguccaccgcuaa

SEQ ID NO: 2426 - RNA, 21 nt, Homo sapiens
cugugggcucagcgcgugggg

SEQ ID NO: 2427 - RNA, 21 nt, Homo sapiens
ccccacgcgcugagcccacag

SEQ ID NO: 2428 - RNA, 18 nt, Homo sapiens
cagccccacagccucaga

SEQ ID NO: 2429 - RNA, 18 nt, Homo sapiens
ucugaggcuguggggcug

SEQ ID NO: 2430 - RNA, 20 nt, Homo sapiens
cccugagacccuaaccuuaa

SEQ ID NO: 2431 - RNA, 20 nt, Homo sapiens
uuaagguuagggucucaggg

SEQ ID NO: 2432 - RNA, 18 nt, Homo sapiens
uugcacuugucucaguga

SEQ ID NO: 2433 - RNA, 18 nt, Homo sapiens
ucacugagacaagugcaa

SEQ ID NO: 2434 - RNA, 20 nt, Homo sapiens
uguuccucugucucccagac

SEQ ID NO: 2435 - RNA, 20 nt, Homo sapiens
gucugggagacagaggaaca

SEQ ID NO: 2436 - RNA, 19 nt, Homo sapiens
ggcuugcaugggggacugg

SEQ ID NO: 2437 - RNA, 19 nt, Homo sapiens
ccagucccccaugcaagcc

SEQ ID NO: 2438 - RNA, 17 nt, Homo sapiens
ccaguuuucccaggauu

SEQ ID NO: 2439 - RNA, 17 nt, Homo sapiens
aauccugggaaaacugg

SEQ ID NO: 2440 - RNA, 19 nt, Homo sapiens
ccugagacccuaguuccac

SEQ ID NO: 2441 - RNA, 19 nt, Homo sapiens
guggaacuagggucucagg

SEQ ID NO: 2442 - RNA, 19 nt, Homo sapiens
ccucagaucagagccuugc

SEQ ID NO: 2443 - RNA, 19 nt, Homo sapiens
gcaaggcucugaucugagg

SEQ ID NO: 2444 - RNA, 22 nt, Homo sapiens
cauugcacuugucucggucuga

SEQ ID NO: 2445 - RNA, 22 nt, Homo sapiens
ucagaccgagacaagugcaaug

SEQ ID NO: 2446 - RNA, 21 nt, Homo sapiens
aggcggagacuugggcaauug

SEQ ID NO: 2447 - RNA, 21 nt, Homo sapiens
caauugcccaagucuccgccu

SEQ ID NO: 2448 - RNA, 22 nt, Homo sapiens
ccuauucuugguuacuugcacg

SEQ ID NO: 2449 - RNA, 22 nt, Homo sapiens
cgugcaaguaaccaagaauagg

SEQ ID NO: 2450 - RNA, 19 nt, Homo sapiens
aauggauuuuuggagcagg

SEQ ID NO: 2451 - RNA, 19 nt, Homo sapiens
ccugcuccaaaaauccauu

SEQ ID NO: 2452 - RNA, 22 nt, Homo sapiens
ugcggggcuagggcuaacagca

SEQ ID NO: 2453 - RNA, 22 nt, Homo sapiens
ugcuguuagcccuagccccgca

SEQ ID NO: 2454 - RNA, 22 nt, Homo sapiens
aaaaguaauugcggauuuugcc

SEQ ID NO: 2455 - RNA, 22 nt, Homo sapiens
ggcaaaauccgcaauuacuuuu

SEQ ID NO: 2456 - RNA, 22 nt, Homo sapiens
caaaaguaauuguggauuuugu

SEQ ID NO: 2457 - RNA, 22 nt, Homo sapiens
acaaaauccacaauuacuuuug

SEQ ID NO: 2458 - RNA, 23 nt, Homo sapiens
uaagugcuuccauguuuugguga

SEQ ID NO: 2459 - RNA, 23 nt, Homo sapiens
ucaccaaaacauggaagcacuua

SEQ ID NO: 2460 - RNA, 23 nt, Homo sapiens
acuuaaacguggauguacuugcu

SEQ ID NO: 2461 - RNA, 23 nt, Homo sapiens
agcaaguacauccacguuuaagu

SEQ ID NO: 2462 - RNA, 21 nt, Homo sapiens
cuauacaaucuacugucuuuc

SEQ ID NO: 2463 - RNA, 21 nt, Homo sapiens
gaaagacaguagauuguauag

SEQ ID NO: 2464 - RNA, 22 nt, Homo sapiens
ugagguaguagguuguauaguu

SEQ ID NO: 2465 - RNA, 22 nt, Homo sapiens
aacuauacaaccuacuaccuca

SEQ ID NO: 2466 - RNA, 22 nt, Homo sapiens
cuguacagccuccuagcuuucc

SEQ ID NO: 2467 - RNA, 22 nt, Homo sapiens
ggaaagcuaggaggcuguacag

SEQ ID NO: 2468 - RNA, 20 nt, Homo sapiens
caccaggcauuguggucucc

SEQ ID NO: 2469 - RNA, 20 nt, Homo sapiens
ggagaccacaaugccuggug

SEQ ID NO: 2470 - RNA, 23 nt, Homo sapiens
ugaguaccgccaugucuguuggg

SEQ ID NO: 2471 - RNA, 23 nt, Homo sapiens
cccaacagacauggcgguacuca

SEQ ID NO: 2472 - RNA, 22 nt, Homo sapiens
uacccagagcaugcagugugaa

SEQ ID NO: 2473 - RNA, 22 nt, Homo sapiens
uucacacugcaugcucugggua

SEQ ID NO: 2474 - RNA, 22 nt, Homo sapiens
aagugcugucauagcugagguc

SEQ ID NO: 2475 - RNA, 22 nt, Homo sapiens
gaccucagcuaugacagcacuu

SEQ ID NO: 2476 - RNA, 23 nt, Homo sapiens
cacucagccuugagggcacuuuc

SEQ ID NO: 2477 - RNA, 23 nt, Homo sapiens
gaaagugcccucaaggcugagug

SEQ ID NO: 2478 - RNA, 22 nt, Homo sapiens
ucgacagcacgacacugccuuc

SEQ ID NO: 2479 - RNA, 22 nt, Homo sapiens
gaaggcagugucgugcugucga

SEQ ID NO: 2480 - RNA, 22 nt, Homo sapiens
uagguaguuuccuguuguuggg

SEQ ID NO: 2481 - RNA, 22 nt, Homo sapiens
cccaacaacaggaaacuaccua

SEQ ID NO: 2482 - RNA, 21 nt, Homo sapiens
uacaguacugugauaacugaa

SEQ ID NO: 2483 - RNA, 21 nt, Homo sapiens
uucaguuaucacaguacugua

SEQ ID NO: 2484 - RNA, 22 nt, Homo sapiens
caguuaucacagugcugaugcu

SEQ ID NO: 2485 - RNA, 22 nt, Homo sapiens
agcaucagcacugugauaacug

SEQ ID NO: 2486 - RNA, 23 nt, Homo sapiens
ugugcaaaucuaugcaaaacuga

SEQ ID NO: 2487 - RNA, 23 nt, Homo sapiens
ucaguuuugcauagauuugcaca

SEQ ID NO: 2488 - RNA, 22 nt, Homo sapiens
aguuuugcauaguugcacuaca

SEQ ID NO: 2489 - RNA, 22 nt, Homo sapiens
uguagugcaacuaugcaaaacu

SEQ ID NO: 2490 - RNA, 23 nt, Homo sapiens
aguuuugcagguuugcauccagc

SEQ ID NO: 2491 - RNA, 23 nt, Homo sapiens
gcuggaugcaaaccugcaaaacu

SEQ ID NO: 2492 - RNA, 22 nt, Homo sapiens
aguuuugcagguuugcauuuca

SEQ ID NO: 2493 - RNA, 22 nt, Homo sapiens
ugaaaugcaaaccugcaaaacu

SEQ ID NO: 2494 - RNA, 23 nt, Homo sapiens
ugugcaaauccaugcaaaacuga

SEQ ID NO: 2495 - RNA, 23 nt, Homo sapiens
ucaguuuugcauggauuugcaca

SEQ ID NO: 2496 - RNA, 23 nt, Homo sapiens
uacugcaucaggaacugauugga

SEQ ID NO: 2497 - RNA, 23 nt, Homo sapiens
uccaaucaguuccugaugcagua

SEQ ID NO: 2498 - RNA, 22 nt, Homo sapiens
augguuccgucaagcaccaugg

SEQ ID NO: 2499 - RNA, 22 nt, Homo sapiens
ccauggugcuugacggaaccau

SEQ ID NO: 2500 - RNA, 21 nt, Homo sapiens
agcuacaucuggcuacugggu

SEQ ID NO: 2501 - RNA, 21 nt, Homo sapiens
acccaguagccagauguagcu

SEQ ID NO: 2502 - RNA, 22 nt, Homo sapiens
cucaguagccaguguagauccu

SEQ ID NO: 2503 - RNA, 22 nt, Homo sapiens
aggaucuacacuggcuacugag

SEQ ID NO: 2504 - RNA, 22 nt, Homo sapiens
uuaucagaaucuccagggguac

SEQ ID NO: 2505 - RNA, 22 nt, Homo sapiens
guaccccuggagauucugauaa

SEQ ID NO: 2506 - RNA, 23 nt, Homo sapiens
aucaacagacauuaauugggcgc

SEQ ID NO: 2507 - RNA, 23 nt, Homo sapiens
gcgcccaauuaaugucuguugau

SEQ ID NO: 2508 - RNA, 21 nt, Homo sapiens
caaaacgugaggcgcugcuau

SEQ ID NO: 2509 - RNA, 21 nt, Homo sapiens
auagcagcgccucacguuuug

SEQ ID NO: 2510 - RNA, 22 nt, Homo sapiens
cagcagcaauucauguuuugaa

SEQ ID NO: 2511 - RNA, 22 nt, Homo sapiens
uucaaaacaugaauugcugcug

SEQ ID NO: 2512 - RNA, 18 nt, Homo sapiens
uucacagggaggugucau

SEQ ID NO: 2513 - RNA, 18 nt, Homo sapiens
augacaccucccugugaa

SEQ ID NO: 2514 - RNA, 20 nt, Homo sapiens
gcggagagagaauggggagc

SEQ ID NO: 2515 - RNA, 20 nt, Homo sapiens
gcuccccauucucucuccgc

SEQ ID NO: 2516 - RNA, 21 nt, Homo sapiens
ccugcgagucuccggcggugg

SEQ ID NO: 2517 - RNA, 21 nt, Homo sapiens
ccaccgccggagacucgcagg

SEQ ID NO: 2518 - RNA, 21 nt, Homo sapiens
gggcuagggccugcugccccc

SEQ ID NO: 2519 - RNA, 21 nt, Homo sapiens
gggggcagcaggcccuagccc

SEQ ID NO: 2520 - RNA, 19 nt, Homo sapiens
uucugcugccggccaaggc

SEQ ID NO: 2521 - RNA, 19 nt, Homo sapiens
gccuuggccggcagcagaa

SEQ ID NO: 2522 - RNA, 22 nt, Homo sapiens
uccucaucacacugcaccuuag

SEQ ID NO: 2523 - RNA, 22 nt, Homo sapiens
cuaaggugcagugugaugagga

SEQ ID NO: 2524 - RNA, 20 nt, Homo sapiens
gguagugaguuaucagcuac

SEQ ID NO: 2525 - RNA, 20 nt, Homo sapiens
guagcugauaacucacuacc

SEQ ID NO: 2526 - RNA, 20 nt, Homo sapiens
gauauucagaggcuaggugg

SEQ ID NO: 2527 - RNA, 20 nt, Homo sapiens
ccaccuagccucugaauauc

SEQ ID NO: 2528 - RNA, 21 nt, Homo sapiens
acggcccaggcggcauuggug

SEQ ID NO: 2529 - RNA, 21 nt, Homo sapiens
caccaaugccgccugggccgu

SEQ ID NO: 2530 - RNA, 21 nt, Homo sapiens
agcaugacagaggagaggugg

SEQ ID NO: 2531 - RNA, 21 nt, Homo sapiens
ccaccucuccucugucaugcu

SEQ ID NO: 2532 - RNA, 21 nt, Homo sapiens
gggaagagcuguacggccuuc

SEQ ID NO: 2533 - RNA, 21 nt, Homo sapiens
gaaggccguacagcucuuccc

SEQ ID NO: 2534 - RNA, 19 nt, Homo sapiens
ccgccugagcuagcugugg

SEQ ID NO: 2535 - RNA, 19 nt, Homo sapiens
ccacagcuagcucaggcgg

SEQ ID NO: 2536 - RNA, 24 nt, Homo sapiens
uuggaagcuuggaccaacuagcug

SEQ ID NO: 2537 - RNA, 24 nt, Homo sapiens
cagcuaguugguccaagcuuccaa

SEQ ID NO: 2538 - RNA, 19 nt, Homo sapiens
ucuagugcgggcguucccg

SEQ ID NO: 2539 - RNA, 19 nt, Homo sapiens
cgggaacgcccgcacuaga

SEQ ID NO: 2540 - RNA, 24 nt, Homo sapiens
aggagcagugccggccaaggcgcc

SEQ ID NO: 2541 - RNA, 24 nt, Homo sapiens
ggcgccuuggccggcacugcuccu

SEQ ID NO: 2542 - RNA, 19 nt, Homo sapiens
gaauacgucugguugaucc

SEQ ID NO: 2543 - RNA, 19 nt, Homo sapiens
ggaucaaccagacguauuc

SEQ ID NO: 2544 - RNA, 20 nt, Homo sapiens
cuuauaucagaggcuguggg

SEQ ID NO: 2545 - RNA, 20 nt, Homo sapiens
cccacagccucugauauaag

SEQ ID NO: 2546 - RNA, 20 nt, Homo sapiens
uuccgccagucgguggccgg

SEQ ID NO: 2547 - RNA, 20 nt, Homo sapiens
ccggccaccgacuggcggaa

SEQ ID NO: 2548 - RNA, 19 nt, Homo sapiens
aaggggcugggggagcaca

SEQ ID NO: 2549 - RNA, 19 nt, Homo sapiens
ugugcucccccagccccuu

SEQ ID NO: 2550 - RNA, 23 nt, Homo sapiens
agguugggaucgguugcaaugcu

SEQ ID NO: 2551 - RNA, 23 nt, Homo sapiens
agcauugcaaccgaucccaaccu

SEQ ID NO: 2552 - RNA, 22 nt, Homo sapiens
ggguggggauuuguugcauuac

SEQ ID NO: 2553 - RNA, 22 nt, Homo sapiens
guaaugcaacaaauccccaccc

SEQ ID NO: 2554 - RNA, 22 nt, Homo sapiens
uauugcacuugucccggccugu

SEQ ID NO: 2555 - RNA, 22 nt, Homo sapiens
acaggccgggacaagugcaaua

SEQ ID NO: 2556 - RNA, 22 nt, Homo sapiens
uauugcacucgucccggccucc

SEQ ID NO: 2557 - RNA, 22 nt, Homo sapiens
ggaggccgggacgagugcaaua

SEQ ID NO: 2558 - RNA, 22 nt, Homo sapiens
agggacgggacgcggugcagug

SEQ ID NO: 2559 - RNA, 22 nt, Homo sapiens
cacugcaccgcgucccgucccu

SEQ ID NO: 2560 - RNA, 21 nt, Homo sapiens
aucacauugccagggauuucc

SEQ ID NO: 2561 - RNA, 21 nt, Homo sapiens
ggaaaucccuggcaaugugau

SEQ ID NO: 2562 - RNA, 22 nt, Homo sapiens
gggguuccuggggaugggauuu

SEQ ID NO: 2563 - RNA, 22 nt, Homo sapiens
aaaucccauccccaggaacccc

SEQ ID NO: 2564 - RNA, 22 nt, Homo sapiens
acugcagugaaggcacuuguag

SEQ ID NO: 2565 - RNA, 22 nt, Homo sapiens
cuacaagugccuucacugcagu

SEQ ID NO: 2566 - RNA, 23 nt, Homo sapiens
agcuacauugucugcuggguuuc

SEQ ID NO: 2567 - RNA, 23 nt, Homo sapiens
gaaacccagcagacaauguagcu

SEQ ID NO: 2568 - RNA, 22 nt, Homo sapiens
accuggcauacaauguagauuu

SEQ ID NO: 2569 - RNA, 22 nt, Homo sapiens
aaaucuacauuguaugccaggu

SEQ ID NO: 2570 - RNA, 22 nt, Homo sapiens
ucguaccgugaguaauaaugcg

SEQ ID NO: 2571 - RNA, 22 nt, Homo sapiens
cgcauuauuacucacgguacga

SEQ ID NO: 2572 - RNA, 21 nt, Homo sapiens
cauuauuacuuuugguacgcg

SEQ ID NO: 2573 - RNA, 21 nt, Homo sapiens
cgcguaccaaaaguaauaaug

SEQ ID NO: 2574 - RNA, 23 nt, Homo sapiens
uacuccagagggcgucacucaug

SEQ ID NO: 2575 - RNA, 23 nt, Homo sapiens
caugagugacgcccucuggagua

SEQ ID NO: 2576 - RNA, 21 nt, Homo sapiens
ucccacguuguggcccagcag

SEQ ID NO: 2577 - RNA, 21 nt, Homo sapiens
cugcugggccacaacguggga

SEQ ID NO: 2578 - RNA, 23 nt, Homo sapiens
ccucaccaccccuucugccugca

SEQ ID NO: 2579 - RNA, 23 nt, Homo sapiens
ugcaggcagaagggguggugagg

SEQ ID NO: 2580 - RNA, 24 nt, Homo sapiens
cugcaggcagaaguggggcugaca

SEQ ID NO: 2581 - RNA, 24 nt, Homo sapiens
ugucagccccacuucugccugcag

SEQ ID NO: 2582 - RNA, 21 nt, Homo sapiens
ccaaaccagucgugccugugg

SEQ ID NO: 2583 - RNA, 21 nt, Homo sapiens
ccacaggcacgacugguuugg

SEQ ID NO: 2584 - RNA, 22 nt, Homo sapiens
cucaaaccggcugugccugugg

SEQ ID NO: 2585 - RNA, 22 nt, Homo sapiens
ccacaggcacagccgguuugag

SEQ ID NO: 2586 - RNA, 21 nt, Homo sapiens
acaggcacgacugguuuggca

SEQ ID NO: 2587 - RNA, 21 nt, Homo sapiens
ugccaaaccagucgugccugu

SEQ ID NO: 2588 - RNA, 22 nt, Homo sapiens
uccgaacucuccauuccucugc

SEQ ID NO: 2589 - RNA, 22 nt, Homo sapiens
gcagaggaauggagaguucgga

SEQ ID NO: 2590 - RNA, 20 nt, Homo sapiens
ugggaauggggguaagggcc

SEQ ID NO: 2591 - RNA, 20 nt, Homo sapiens
ggcccuuacccccauuccca

SEQ ID NO: 2592 - RNA, 22 nt, Homo sapiens
aggcgauguggggauguagaga

SEQ ID NO: 2593 - RNA, 22 nt, Homo sapiens
ucucuacauccccacaucgccu

SEQ ID NO: 2594 - RNA, 21 nt, Homo sapiens
uaguggucagagggcuuauga

SEQ ID NO: 2595 - RNA, 21 nt, Homo sapiens
ucauaagcccucugaccacua

SEQ ID NO: 2596 - RNA, 22 nt, Homo sapiens
ucugacaucagugauucuccug

SEQ ID NO: 2597 - RNA, 22 nt, Homo sapiens
caggagaaucacugaugucaga

SEQ ID NO: 2598 - RNA, 22 nt, Homo sapiens
cgcgccugcaggaacugguaga

SEQ ID NO: 2599 - RNA, 22 nt, Homo sapiens
ucuaccaguuccugcaggcgcg

SEQ ID NO: 2600 - RNA, 23 nt, Homo sapiens
ugggcaggggcuuauuguaggag

SEQ ID NO: 2601 - RNA, 23 nt, Homo sapiens
cuccuacaauaagccccugccca

SEQ ID NO: 2602 - RNA, 22 nt, Homo sapiens
ugcaggggucgggugggccagg

SEQ ID NO: 2603 - RNA, 22 nt, Homo sapiens
ccuggcccacccgaccccugca

SEQ ID NO: 2604 - RNA, 20 nt, Homo sapiens
aggcgcacccgaccacaugc

SEQ ID NO: 2605 - RNA, 20 nt, Homo sapiens
gcauguggucgggugcgccu

SEQ ID NO: 2606 - RNA, 22 nt, Homo sapiens
auaguccgaguaacgucggggc

SEQ ID NO: 2607 - RNA, 22 nt, Homo sapiens
gccccgacguuacucggacuau

SEQ ID NO: 2608 - RNA, 23 nt, Homo sapiens
cugggcccgcggcgggcgugggg

SEQ ID NO: 2609 - RNA, 23 nt, Homo sapiens
ccccacgcccgccgcgggcccag

SEQ ID NO: 2610 - RNA, 21 nt, Homo sapiens
uacuuggaaaggcaucaguug

SEQ ID NO: 2611 - RNA, 21 nt, Homo sapiens
caacugaugccuuuccaagua

SEQ ID NO: 2612 - RNA, 22 nt, Homo sapiens
ugcaacgaaccugagccacuga

SEQ ID NO: 2613 - RNA, 22 nt, Homo sapiens
ucaguggcucagguucguugca

SEQ ID NO: 2614 - RNA, 22 nt, Homo sapiens
ugcaacuuaccugagucauuga

SEQ ID NO: 2615 - RNA, 22 nt, Homo sapiens
ucaaugacucagguaaguugca

SEQ ID NO: 2616 - RNA, 21 nt, Homo sapiens
cacuguguccuuucugcguag

SEQ ID NO: 2617 - RNA, 21 nt, Homo sapiens
cuacgcagaaaggacacagug

SEQ ID NO: 2618 - RNA, 22 nt, Homo sapiens
cacuggcuccuuucuggguaga

SEQ ID NO: 2619 - RNA, 22 nt, Homo sapiens
ucuacccagaaaggagccagug

SEQ ID NO: 2620 - RNA, 22 nt, Homo sapiens
cacuguuuccuuucugagugga

SEQ ID NO: 2621 - RNA, 22 nt, Homo sapiens
uccacucagaaaggaaacagug

SEQ ID NO: 2622 - RNA, 21 nt, Homo sapiens
uauucagaaaggugccaguca

SEQ ID NO: 2623 - RNA, 21 nt, Homo sapiens
ugacuggcaccuuucugaaua

SEQ ID NO: 2624 - RNA, 20 nt, Homo sapiens
auuccuagaaauuguucaua

SEQ ID NO: 2625 - RNA, 20 nt, Homo sapiens
uaugaacaauuucuaggaau

SEQ ID NO: 2626 - RNA, 22 nt, Homo sapiens
uaauacugucugguaaaaccgu

SEQ ID NO: 2627 - RNA, 22 nt, Homo sapiens
acgguuuuaccagacaguauua

SEQ ID NO: 2628 - RNA, 22 nt, Homo sapiens
ugaaacauacacgggaaaccuc

SEQ ID NO: 2629 - RNA, 22 nt, Homo sapiens
gagguuucccguguauguuuca

SEQ ID NO: 2630 - RNA, 22 nt, Homo sapiens
cuauacaaccuacugccuuccc

SEQ ID NO: 2631 - RNA, 22 nt, Homo sapiens
gggaaggcaguagguuguauag

SEQ ID NO: 2632 - RNA, 22 nt, Homo sapiens
ugagguaguagguugugugguu

SEQ ID NO: 2633 - RNA, 22 nt, Homo sapiens
aaccacacaaccuacuaccuca

SEQ ID NO: 2634 - RNA, 22 nt, Homo sapiens
uaacacugucugguaacgaugu

SEQ ID NO: 2635 - RNA, 22 nt, Homo sapiens
acaucguuaccagacaguguua

SEQ ID NO: 2636 - RNA, 22 nt, Homo sapiens
caucuuaccggacagugcugga

SEQ ID NO: 2637 - RNA, 22 nt, Homo sapiens
uccagcacuguccgguaagaug

SEQ ID NO: 2638 - RNA, 22 nt, Homo sapiens
uaauacugccugguaaugauga

SEQ ID NO: 2639 - RNA, 22 nt, Homo sapiens
ucaucauuaccaggcaguauua

SEQ ID NO: 2640 - RNA, 22 nt, Homo sapiens
caucuuacugggcagcauugga

SEQ ID NO: 2641 - RNA, 22 nt, Homo sapiens
uccaaugcugcccaguaagaug

SEQ ID NO: 2642 - RNA, 23 nt, Homo sapiens
uaauacugccggguaaugaugga

SEQ ID NO: 2643 - RNA, 23 nt, Homo sapiens
uccaucauuacccggcaguauua

SEQ ID NO: 2644 - RNA, 22 nt, Homo sapiens
cgucuuacccagcaguguuugg

SEQ ID NO: 2645 - RNA, 22 nt, Homo sapiens
ccaaacacugcuggguaagacg

SEQ ID NO: 2646 - RNA, 22 nt, Homo sapiens
uccagcaucagugauuuuguug

SEQ ID NO: 2647 - RNA, 22 nt, Homo sapiens
caacaaaaucacugaugcugga

SEQ ID NO: 2648 - RNA, 20 nt, Homo sapiens
uacaguauagaugauguacu

SEQ ID NO: 2649 - RNA, 20 nt, Homo sapiens
aguacaucaucuauacugua

SEQ ID NO: 2650 - RNA, 22 nt, Homo sapiens
ggauaucaucauauacuguaag

SEQ ID NO: 2651 - RNA, 22 nt, Homo sapiens
cuuacaguauaugaugauaucc

SEQ ID NO: 2652 - RNA, 21 nt, Homo sapiens
cggggcagcucaguacaggau

SEQ ID NO: 2653 - RNA, 21 nt, Homo sapiens
auccuguacugagcugccccg

SEQ ID NO: 2654 - RNA, 21 nt, Homo sapiens
uccuucugcuccgucccccag

SEQ ID NO: 2655 - RNA, 21 nt, Homo sapiens
cugggggacggagcagaagga

SEQ ID NO: 2656 - RNA, 21 nt, Homo sapiens
cgggggcggggccgaagcgcg

SEQ ID NO: 2657 - RNA, 21 nt, Homo sapiens
cgcgcuucggccccgcccccg

SEQ ID NO: 2658 - RNA, 21 nt, Homo sapiens
uccugcgcgucccagaugccc

SEQ ID NO: 2659 - RNA, 21 nt, Homo sapiens
gggcaucugggacgcgcagga

SEQ ID NO: 2660 - RNA, 22 nt, Homo sapiens
caucagaauucauggaggcuag

SEQ ID NO: 2661 - RNA, 22 nt, Homo sapiens
cuagccuccaugaauucugaug

SEQ ID NO: 2662 - RNA, 22 nt, Homo sapiens
agcuuccaugacuccugaugga

SEQ ID NO: 2663 - RNA, 22 nt, Homo sapiens
uccaucaggagucauggaagcu

SEQ ID NO: 2664 - RNA, 21 nt, Homo sapiens
ugacagcgcccugccuggcuc

SEQ ID NO: 2665 - RNA, 21 nt, Homo sapiens
gagccaggcagggcgcuguca

SEQ ID NO: 2666 - RNA, 24 nt, Homo sapiens
agcgcgggcugagcgcugccaguc

SEQ ID NO: 2667 - RNA, 24 nt, Homo sapiens
gacuggcagcgcucagcccgcgcu

SEQ ID NO: 2668 - RNA, 22 nt, Homo sapiens
cugggaggugugauaucguggu

SEQ ID NO: 2669 - RNA, 22 nt, Homo sapiens
accacgauaucacaccucccag

SEQ ID NO: 2670 - RNA, 22 nt, Homo sapiens
ugugauaucaugguuccuggga

SEQ ID NO: 2671 - RNA, 22 nt, Homo sapiens
ucccaggaaccaugauaucaca

SEQ ID NO: 2672 - RNA, 22 nt, Homo sapiens
aggugcuccaggcuggcucaca

SEQ ID NO: 2673 - RNA, 22 nt, Homo sapiens
ugugagccagccuggagcaccu

SEQ ID NO: 2674 - RNA, 22 nt, Homo sapiens
gagcaauguagguagacuguuu

SEQ ID NO: 2675 - RNA, 22 nt, Homo sapiens
aaacagucuaccuacauugcuc

SEQ ID NO: 2676 - RNA, 22 nt, Homo sapiens
uguccucuagggccugcagucu

SEQ ID NO: 2677 - RNA, 22 nt, Homo sapiens
agacugcaggcccuagaggaca

SEQ ID NO: 2678 - RNA, 20 nt, Homo sapiens
aaaggcauaaaaccaagaca

SEQ ID NO: 2679 - RNA, 20 nt, Homo sapiens
ugucuugguuuuaugccuuu

SEQ ID NO: 2680 - RNA, 21 nt, Homo sapiens
uaacgcauaauauggacaugu

SEQ ID NO: 2681 - RNA, 21 nt, Homo sapiens
acauguccauauuaugcguua

SEQ ID NO: 2682 - RNA, 22 nt, Homo sapiens
uugaggaaaagauggucuuauu

SEQ ID NO: 2683 - RNA, 22 nt, Homo sapiens
aauaagaccaucuuuuccucaa

SEQ ID NO: 2684 - RNA, 26 nt, Homo sapiens
aagaggaagaaauggcugguucucag

SEQ ID NO: 2685 - RNA, 26 nt, Homo sapiens
cugagaaccagccauuucuuccucuu

SEQ ID NO: 2686 - RNA, 20 nt, Homo sapiens
gcucggacugagcagguggg

SEQ ID NO: 2687 - RNA, 20 nt, Homo sapiens
cccaccugcucaguccgagc

SEQ ID NO: 2688 - RNA, 21 nt, Homo sapiens
acagggccgcagauggagacu

SEQ ID NO: 2689 - RNA, 21 nt, Homo sapiens
agucuccaucugcggcccugu

SEQ ID NO: 2690 - RNA, 21 nt, Homo sapiens
gcagagaacaaaggacucagu

SEQ ID NO: 2691 - RNA, 21 nt, Homo sapiens
acugaguccuuuguucucugc

SEQ ID NO: 2692 - RNA, 22 nt, Homo sapiens
acugauuaucuuaacucucuga

SEQ ID NO: 2693 - RNA, 22 nt, Homo sapiens
ucagagaguuaagauaaucagu

SEQ ID NO: 2694 - RNA, 23 nt, Homo sapiens
ucucugaguaccauaugccuugu

SEQ ID NO: 2695 - RNA, 23 nt, Homo sapiens
acaaggcauaugguacucagaga

SEQ ID NO: 2696 - RNA, 22 nt, Homo sapiens
aacuaguaauguuggauuaggg

SEQ ID NO: 2697 - RNA, 22 nt, Homo sapiens
cccuaauccaacauuacuaguu

SEQ ID NO: 2698 - RNA, 22 nt, Homo sapiens
auauguauaugugacugcuacu

SEQ ID NO: 2699 - RNA, 22 nt, Homo sapiens
aguagcagucacauauacauau

SEQ ID NO: 2700 - RNA, 21 nt, Homo sapiens
uggccaaaaagcaggcagaga

SEQ ID NO: 2701 - RNA, 21 nt, Homo sapiens
ucucugccugcuuuuuggcca

SEQ ID NO: 2702 - RNA, 22 nt, Homo sapiens
ggaggaaccuuggagcuucggc

SEQ ID NO: 2703 - RNA, 22 nt, Homo sapiens
gccgaagcuccaagguuccucc

SEQ ID NO: 2704 - RNA, 23 nt, Homo sapiens
gaggcugaugugaguagaccacu

SEQ ID NO: 2705 - RNA, 23 nt, Homo sapiens
aguggucuacucacaucagccuc

SEQ ID NO: 2706 - RNA, 21 nt, Homo sapiens
cuguccuaagguuguugaguu

SEQ ID NO: 2707 - RNA, 21 nt, Homo sapiens
aacucaacaaccuuaggacag

SEQ ID NO: 2708 - RNA, 21 nt, Homo sapiens
ucuucaaccucaggacuugca

SEQ ID NO: 2709 - RNA, 21 nt, Homo sapiens
ugcaaguccugagguugaaga

SEQ ID NO: 2710 - RNA, 22 nt, Homo sapiens
ugugauaucaugguuccuggga

SEQ ID NO: 2711 - RNA, 22 nt, Homo sapiens
ucccaggaaccaugauaucaca

SEQ ID NO: 2712 - RNA, 22 nt, Homo sapiens
cugggaggugugauauuguggu

SEQ ID NO: 2713 - RNA, 22 nt, Homo sapiens
accacaauaucacaccucccag

SEQ ID NO: 2714 - RNA, 22 nt, Homo sapiens
cagguagauauuugauaggcau

SEQ ID NO: 2715 - RNA, 22 nt, Homo sapiens
augccuaucaaauaucuaccug

SEQ ID NO: 2716 - RNA, 21 nt, Homo sapiens
gccuaucacauaucugccugu

SEQ ID NO: 2717 - RNA, 21 nt, Homo sapiens
acaggcagauaugugauaggc

SEQ ID NO: 2718 - RNA, 20 nt, Homo sapiens
gggcuggggcgcggggaggu

SEQ ID NO: 2719 - RNA, 20 nt, Homo sapiens
accuccccgcgccccagccc

SEQ ID NO: 2720 - RNA, 18 nt, Homo sapiens
ugcuuccuuucagagggu

SEQ ID NO: 2721 - RNA, 18 nt, Homo sapiens
acccucugaaaggaagca

SEQ ID NO: 2722 - RNA, 21 nt, Homo sapiens
ugaguuggccaucugagugag

SEQ ID NO: 2723 - RNA, 21 nt, Homo sapiens
cucacucagauggccaacuca

SEQ ID NO: 2724 - RNA, 23 nt, Homo sapiens
aacauucauuguugucggugggu

SEQ ID NO: 2725 - RNA, 23 nt, Homo sapiens
acccaccgacaacaaugaauguu

SEQ ID NO: 2726 - RNA, 21 nt, Homo sapiens
ucacagugaaccggucucuuu

SEQ ID NO: 2727 - RNA, 21 nt, Homo sapiens
aaagagaccgguucacuguga

SEQ ID NO: 2728 - RNA, 22 nt, Homo sapiens
caacaaaucacagucugccaua

SEQ ID NO: 2729 - RNA, 22 nt, Homo sapiens
uauggcagacugugauuuguug

SEQ ID NO: 2730 - RNA, 21 nt, Homo sapiens
cucacugaacaaugaaugcaa

SEQ ID NO: 2731 - RNA, 21 nt, Homo sapiens
uugcauucauuguucagugag

SEQ ID NO: 2732 - RNA, 23 nt, Homo sapiens
aacauucauugcugucggugggu

SEQ ID NO: 2733 - RNA, 23 nt, Homo sapiens
acccaccgacagcaaugaauguu

SEQ ID NO: 2734 - RNA, 22 nt, Homo sapiens
accaucgaccguugauuguacc

SEQ ID NO: 2735 - RNA, 22 nt, Homo sapiens
gguacaaucaacggucgauggu

SEQ ID NO: 2736 - RNA, 23 nt, Homo sapiens
aacauucaacgcugucggugagu

SEQ ID NO: 2737 - RNA, 23 nt, Homo sapiens
acucaccgacagcguugaauguu

SEQ ID NO: 2738 - RNA, 22 nt, Homo sapiens
accacugaccguugacuguacc

SEQ ID NO: 2739 - RNA, 22 nt, Homo sapiens
gguacagucaacggucaguggu

SEQ ID NO: 2740 - RNA, 22 nt, Homo sapiens
cuguugccacuaaccucaaccu

SEQ ID NO: 2741 - RNA, 22 nt, Homo sapiens
agguugagguuaguggcaacag

SEQ ID NO: 2742 - RNA, 22 nt, Homo sapiens
auaagacgagcaaaaagcuugu

SEQ ID NO: 2743 - RNA, 22 nt, Homo sapiens
acaagcuuuuugcucgucuuau

SEQ ID NO: 2744 - RNA, 22 nt, Homo sapiens
auaagacgaacaaaagguuugu

SEQ ID NO: 2745 - RNA, 22 nt, Homo sapiens
acaaaccuuuuguucgucuuau

SEQ ID NO: 2746 - RNA, 21 nt, Homo sapiens
agggagggacgggggcugugc

SEQ ID NO: 2747 - RNA, 21 nt, Homo sapiens
gcacagcccccgucccucccu

SEQ ID NO: 2748 - RNA, 23 nt, Homo sapiens
ucuggcuccgugucuucacuccc

SEQ ID NO: 2749 - RNA, 23 nt, Homo sapiens
gggagugaagacacggagccaga

SEQ ID NO: 2750 - RNA, 22 nt, Homo sapiens
uggaauguaaagaaguauguau

SEQ ID NO: 2751 - RNA, 22 nt, Homo sapiens
auacauacuucuuuacauucca

SEQ ID NO: 2752 - RNA, 22 nt, Homo sapiens
aacaucacagcaagucugugcu

SEQ ID NO: 2753 - RNA, 22 nt, Homo sapiens
agcacagacuugcugugauguu

SEQ ID NO: 2754 - RNA, 21 nt, Homo sapiens
uuaagacuugcagugauguuu

SEQ ID NO: 2755 - RNA, 21 nt, Homo sapiens
aaacaucacugcaagucuuaa

SEQ ID NO: 2756 - RNA, 22 nt, Homo sapiens
aacaucacugcaagucuuaaca

SEQ ID NO: 2757 - RNA, 22 nt, Homo sapiens
uguuaagacuugcagugauguu

SEQ ID NO: 2758 - RNA, 21 nt, Homo sapiens
acagacuugcugugauguuca

SEQ ID NO: 2759 - RNA, 21 nt, Homo sapiens
ugaacaucacagcaagucugu

SEQ ID NO: 2760 - RNA, 22 nt, Homo sapiens
aaaccguuaccauuacugaguu

SEQ ID NO: 2761 - RNA, 22 nt, Homo sapiens
aacucaguaaugguaacgguuu

SEQ ID NO: 2762 - RNA, 22 nt, Homo sapiens
uagcaagagaaccauuaccauu

SEQ ID NO: 2763 - RNA, 22 nt, Homo sapiens
aaugguaaugguucucuugcua

SEQ ID NO: 2764 - RNA, 23 nt, Homo sapiens
ugaggggcagagagcgagacuuu

SEQ ID NO: 2765 - RNA, 23 nt, Homo sapiens
aaagucucgcucucugccccuca

SEQ ID NO: 2766 - RNA, 22 nt, Homo sapiens
caagcucgcuucuaugggucug

SEQ ID NO: 2767 - RNA, 22 nt, Homo sapiens
cagacccauagaagcgagcuug

SEQ ID NO: 2768 - RNA, 22 nt, Homo sapiens
aacccguagauccgaucuugug

SEQ ID NO: 2769 - RNA, 22 nt, Homo sapiens
cacaagaucggaucuacggguu

SEQ ID NO: 2770 - RNA, 22 nt, Homo sapiens
caagcucgugucuguggguccg

SEQ ID NO: 2771 - RNA, 22 nt, Homo sapiens
cggacccacagacacgagcuug

SEQ ID NO: 2772 - RNA, 22 nt, Homo sapiens
cacccguagaaccgaccuugcg

SEQ ID NO: 2773 - RNA, 22 nt, Homo sapiens
cgcaaggucgguucuacgggug

SEQ ID NO: 2774 - RNA, 23 nt, Homo sapiens
uggagacgcggcccuguuggagu

SEQ ID NO: 2775 - RNA, 23 nt, Homo sapiens
acuccaacagggccgcgucucca

SEQ ID NO: 2776 - RNA, 23 nt, Homo sapiens
ucuacagugcacgugucuccagu

SEQ ID NO: 2777 - RNA, 23 nt, Homo sapiens
acuggagacacgugcacuguaga

SEQ ID NO: 2778 - RNA, 22 nt, Homo sapiens
caaauucguaucuaggggaaua

SEQ ID NO: 2779 - RNA, 22 nt, Homo sapiens
uauuccccuagauacgaauuug

SEQ ID NO: 2780 - RNA, 23 nt, Homo sapiens
uacccuguagauccgaauuugug

SEQ ID NO: 2781 - RNA, 23 nt, Homo sapiens
cacaaauucggaucuacagggua

SEQ ID NO: 2782 - RNA, 23 nt, Homo sapiens
ccugcagcgacuugauggcuucc

SEQ ID NO: 2783 - RNA, 23 nt, Homo sapiens
ggaagccaucaagucgcugcagg

SEQ ID NO: 2784 - RNA, 22 nt, Homo sapiens
ucagugcacuacagaacuuugu

SEQ ID NO: 2785 - RNA, 22 nt, Homo sapiens
acaaaguucuguagugcacuga

SEQ ID NO: 2786 - RNA, 22 nt, Homo sapiens
aaaguucugagacacuccgacu

SEQ ID NO: 2787 - RNA, 22 nt, Homo sapiens
agucggagugucucagaacuuu

SEQ ID NO: 2788 - RNA, 22 nt, Homo sapiens
ccuguucuccauuacuuggcuc

SEQ ID NO: 2789 - RNA, 22 nt, Homo sapiens
gagccaaguaauggagaacagg

SEQ ID NO: 2790 - RNA, 21 nt, Homo sapiens
uucaaguaauucaggauaggu

SEQ ID NO: 2791 - RNA, 21 nt, Homo sapiens
accuauccugaauuacuugaa

SEQ ID NO: 2792 - RNA, 22 nt, Homo sapiens
gcccugaacgaggggucuggag

SEQ ID NO: 2793 - RNA, 22 nt, Homo sapiens
cuccagaccccucguucagggc

SEQ ID NO: 2794 - RNA, 22 nt, Homo sapiens
gcugacuccuaguccagggcuc

SEQ ID NO: 2795 - RNA, 22 nt, Homo sapiens
gagcccuggacuaggagucagc

SEQ ID NO: 2796 - RNA, 22 nt, Homo sapiens
aucacacaaaggcaacuuuugu

SEQ ID NO: 2797 - RNA, 22 nt, Homo sapiens
acaaaaguugccuuugugugau

SEQ ID NO: 2798 - RNA, 22 nt, Homo sapiens
agagguugcccuuggugaauuc

SEQ ID NO: 2799 - RNA, 22 nt, Homo sapiens
gaauucaccaagggcaaccucu

SEQ ID NO: 2800 - RNA, 21 nt, Homo sapiens
gguagauuuuccuucuauggu

SEQ ID NO: 2801 - RNA, 21 nt, Homo sapiens
accauagaaggaaaaucuacc

SEQ ID NO: 2802 - RNA, 21 nt, Homo sapiens
aucauagaggaaaauccacgu

SEQ ID NO: 2803 - RNA, 21 nt, Homo sapiens
acguggauuuuccucuaugau

SEQ ID NO: 2804 - RNA, 22 nt, Homo sapiens
guagauucuccuucuaugagua

SEQ ID NO: 2805 - RNA, 22 nt, Homo sapiens
uacucauagaaggagaaucuac

SEQ ID NO: 2806 - RNA, 22 nt, Homo sapiens
cugguacaggccugggggacag

SEQ ID NO: 2807 - RNA, 22 nt, Homo sapiens
cugucccccaggccuguaccag

SEQ ID NO: 2808 - RNA, 22 nt, Homo sapiens
ucucccaacccuuguaccagug

SEQ ID NO: 2809 - RNA, 22 nt, Homo sapiens
cacugguacaaggguugggaga

SEQ ID NO: 2810 - RNA, 22 nt, Homo sapiens
acggguuaggcucuugggagcu

SEQ ID NO: 2811 - RNA, 22 nt, Homo sapiens
agcucccaagagccuaacccgu

SEQ ID NO: 2812 - RNA, 22 nt, Homo sapiens
ucacaagucaggcucuugggac

SEQ ID NO: 2813 - RNA, 22 nt, Homo sapiens
gucccaagagccugacuuguga

SEQ ID NO: 2814 - RNA, 22 nt, Homo sapiens
aacccguagauccgaacuugug

SEQ ID NO: 2815 - RNA, 22 nt, Homo sapiens
cacaaguucggaucuacggguu

SEQ ID NO: 2816 - RNA, 21 nt, Homo sapiens
cuguacaggccacugccuugc

SEQ ID NO: 2817 - RNA, 21 nt, Homo sapiens
gcaaggcaguggccuguacag

SEQ ID NO: 2818 - RNA, 22 nt, Homo sapiens
ugagguaguaguuuguacaguu

SEQ ID NO: 2819 - RNA, 22 nt, Homo sapiens
aacuguacaaacuacuaccuca

SEQ ID NO: 2820 - RNA, 22 nt, Homo sapiens
ucccugagacccuaacuuguga

SEQ ID NO: 2821 - RNA, 22 nt, Homo sapiens
ucacaaguuagggucucaggga

SEQ ID NO: 2822 - RNA, 22 nt, Homo sapiens
caagcuuguaucuauagguaug

SEQ ID NO: 2823 - RNA, 22 nt, Homo sapiens
cauaccuauagauacaagcuug

SEQ ID NO: 2824 - RNA, 23 nt, Homo sapiens
aaagugcugcgacauuugagcgu

SEQ ID NO: 2825 - RNA, 23 nt, Homo sapiens
acgcucaaaugucgcagcacuuu

SEQ ID NO: 2826 - RNA, 22 nt, Homo sapiens
uuuagagacggggucuugcucu

SEQ ID NO: 2827 - RNA, 22 nt, Homo sapiens
agagcaagaccccgucucuaaa

SEQ ID NO: 2828 - RNA, 24 nt, Homo sapiens
uggcccugacugaagaccagcagu

SEQ ID NO: 2829 - RNA, 24 nt, Homo sapiens
acugcuggucuucagucagggcca

SEQ ID NO: 2830 - RNA, 21 nt, Homo sapiens
gcgacccauacuugguuucag

SEQ ID NO: 2831 - RNA, 21 nt, Homo sapiens
cugaaaccaaguaugggucgc

SEQ ID NO: 2832 - RNA, 22 nt, Homo sapiens
gaaaucaagcgugggugagacc

SEQ ID NO: 2833 - RNA, 22 nt, Homo sapiens
ggucucacccacgcuugauuuc

SEQ ID NO: 2834 - RNA, 21 nt, Homo sapiens
cccugggccucugcuccccag

SEQ ID NO: 2835 - RNA, 21 nt, Homo sapiens
cuggggagcagaggcccaggg

SEQ ID NO: 2836 - RNA, 24 nt, Homo sapiens
uggggagcugaggcucugggggug

SEQ ID NO: 2837 - RNA, 24 nt, Homo sapiens
cacccccagagccucagcucccca

SEQ ID NO: 2838 - RNA, 20 nt, Homo sapiens
ggggagcuguggaagcagua

SEQ ID NO: 2839 - RNA, 20 nt, Homo sapiens
uacugcuuccacagcucccc

SEQ ID NO: 2840 - RNA, 25 nt, Homo sapiens
cuagugagggacagaaccaggauuc

SEQ ID NO: 2841 - RNA, 25 nt, Homo sapiens
gaauccugguucugucccucacuag

SEQ ID NO: 2842 - RNA, 20 nt, Homo sapiens
agagucuugugaugucuugc

SEQ ID NO: 2843 - RNA, 20 nt, Homo sapiens
gcaagacaucacaagacucu

SEQ ID NO: 2844 - RNA, 23 nt, Homo sapiens
gcagcagagaauaggacuacguc

SEQ ID NO: 2845 - RNA, 23 nt, Homo sapiens
gacguaguccuauucucugcugc

SEQ ID NO: 2846 - RNA, 23 nt, Homo sapiens
ugagcgccucgacgacagagccg

SEQ ID NO: 2847 - RNA, 23 nt, Homo sapiens
cggcucugucgucgaggcgcuca

SEQ ID NO: 2848 - RNA, 23 nt, Homo sapiens
ucccuguccuccaggagcucacg

SEQ ID NO: 2849 - RNA, 23 nt, Homo sapiens
cgugagcuccuggaggacaggga

SEQ ID NO: 2850 - RNA, 22 nt, Homo sapiens
cuauacggccuccuagcuuucc

SEQ ID NO: 2851 - RNA, 22 nt, Homo sapiens
ggaaagcuaggaggccguauag

SEQ ID NO: 2852 - RNA, 22 nt, Homo sapiens
ugagguaggagguuguauaguu

SEQ ID NO: 2853 - RNA, 22 nt, Homo sapiens
aacuauacaaccuccuaccuca

SEQ ID NO: 2854 - RNA, 22 nt, Homo sapiens
cugcgcaagcuacugccuugcu

SEQ ID NO: 2855 - RNA, 22 nt, Homo sapiens
agcaaggcaguagcuugcgcag

SEQ ID NO: 2856 - RNA, 22 nt, Homo sapiens
ugagguaguaguuugugcuguu

SEQ ID NO: 2857 - RNA, 22 nt, Homo sapiens
aacagcacaaacuacuaccuca

SEQ ID NO: 2858 - RNA, 22 nt, Homo sapiens
ugcccuguggacucaguucugg

SEQ ID NO: 2859 - RNA, 22 nt, Homo sapiens
ccagaacugaguccacagggca

SEQ ID NO: 2860 - RNA, 21 nt, Homo sapiens
ugguucuagacuugccaacua

SEQ ID NO: 2861 - RNA, 21 nt, Homo sapiens
uaguuggcaagucuagaacca

SEQ ID NO: 2862 - RNA, 23 nt, Homo sapiens
ugucugcccgcaugccugccucu

SEQ ID NO: 2863 - RNA, 23 nt, Homo sapiens
agaggcaggcaugcgggcagaca

SEQ ID NO: 2864 - RNA, 22 nt, Homo sapiens
aaaaguaauugcggucuuuggu

SEQ ID NO: 2865 - RNA, 22 nt, Homo sapiens
accaaagaccgcaauuacuuuu

SEQ ID NO: 2866 - RNA, 18 nt, Homo sapiens
ucgaggagcucacagucu

SEQ ID NO: 2867 - RNA, 18 nt, Homo sapiens
agacugugagcuccucga

SEQ ID NO: 2868 - RNA, 22 nt, Homo sapiens
cuauacaaucuauugccuuccc

SEQ ID NO: 2869 - RNA, 22 nt, Homo sapiens
gggaaggcaauagauuguauag

SEQ ID NO: 2870 - RNA, 22 nt, Homo sapiens
cuauacagucuacugucuuucc

SEQ ID NO: 2871 - RNA, 22 nt, Homo sapiens
ggaaagacaguagacuguauag

SEQ ID NO: 2872 - RNA, 22 nt, Homo sapiens
ugagguaguagauuguauaguu

SEQ ID NO: 2873 - RNA, 22 nt, Homo sapiens
aacuauacaaucuacuaccuca

SEQ ID NO: 2874 - RNA, 22 nt, Homo sapiens
aaaaguaauugugguuuuggcc

SEQ ID NO: 2875 - RNA, 22 nt, Homo sapiens
ggccaaaaccacaauuacuuuu

SEQ ID NO: 2876 - RNA, 22 nt, Homo sapiens
aaaaguaauugcgguuuuugcc

SEQ ID NO: 2877 - RNA, 22 nt, Homo sapiens
ggcaaaaaccgcaauuacuuuu

SEQ ID NO: 2878 - RNA, 22 nt, Homo sapiens
ccucugaaauucaguucuucag

SEQ ID NO: 2879 - RNA, 22 nt, Homo sapiens
cugaagaacugaauuucagagg

SEQ ID NO: 2880 - RNA, 22 nt, Homo sapiens
ugagaacugaauuccauggguu

SEQ ID NO: 2881 - RNA, 22 nt, Homo sapiens
aacccauggaauucaguucuca

SEQ ID NO: 2882 - RNA, 22 nt, Homo sapiens
acagcaggcacagacaggcagu

SEQ ID NO: 2883 - RNA, 22 nt, Homo sapiens
acugccugucugugccugcugu

SEQ ID NO: 2884 - RNA, 22 nt, Homo sapiens
ugccugucuacacuugcugugc

SEQ ID NO: 2885 - RNA, 22 nt, Homo sapiens
gcacagcaaguguagacaggca

SEQ ID NO: 2886 - RNA, 22 nt, Homo sapiens
uagcaccaucugaaaucgguua

SEQ ID NO: 2887 - RNA, 22 nt, Homo sapiens
uaaccgauuucagauggugcua

SEQ ID NO: 2888 - RNA, 22 nt, Homo sapiens
acugauuucuuuugguguucag

SEQ ID NO: 2889 - RNA, 22 nt, Homo sapiens
cugaacaccaaaagaaaucagu

SEQ ID NO: 2890 - RNA, 24 nt, Homo sapiens
gcugguuucauauggugguuuaga

SEQ ID NO: 2891 - RNA, 24 nt, Homo sapiens
ucuaaaccaccauaugaaaccagc

SEQ ID NO: 2892 - RNA, 22 nt, Homo sapiens
cugguuucacaugguggcuuag

SEQ ID NO: 2893 - RNA, 22 nt, Homo sapiens
cuaagccaccaugugaaaccag

SEQ ID NO: 2894 - RNA, 23 nt, Homo sapiens
uagcaccauuugaaaucaguguu

SEQ ID NO: 2895 - RNA, 23 nt, Homo sapiens
aacacugauuucaaauggugcua

SEQ ID NO: 2896 - RNA, 22 nt, Homo sapiens
uagcaccauuugaaaucgguua

SEQ ID NO: 2897 - RNA, 22 nt, Homo sapiens
uaaccgauuucaaauggugcua

SEQ ID NO: 2898 - RNA, 22 nt, Homo sapiens
ugaccgauuucuccugguguuc

SEQ ID NO: 2899 - RNA, 22 nt, Homo sapiens
gaacaccaggagaaaucgguca

SEQ ID NO: 2900 - RNA, 23 nt, Homo sapiens
ugucacucggcucggcccacuac

SEQ ID NO: 2901 - RNA, 23 nt, Homo sapiens
guagugggccgagccgagugaca

SEQ ID NO: 2902 - RNA, 22 nt, Homo sapiens
cugccaauuccauaggucacag

SEQ ID NO: 2903 - RNA, 22 nt, Homo sapiens
cugugaccuauggaauuggcag

SEQ ID NO: 2904 - RNA, 21 nt, Homo sapiens
cugaccuaugaauugacagcc

SEQ ID NO: 2905 - RNA, 21 nt, Homo sapiens
ggcugucaauucauaggucag

SEQ ID NO: 2906 - RNA, 20 nt, Homo sapiens
acugccccaggugcugcugg

SEQ ID NO: 2907 - RNA, 20 nt, Homo sapiens
ccagcagcaccuggggcagu

SEQ ID NO: 2908 - RNA, 22 nt, Homo sapiens
aacgccauuaucacacuaaaua

SEQ ID NO: 2909 - RNA, 22 nt, Homo sapiens
uauuuagugugauaauggcguu

SEQ ID NO: 2910 - RNA, 22 nt, Homo sapiens
cuuucagucggauguuugcagc

SEQ ID NO: 2911 - RNA, 22 nt, Homo sapiens
gcugcaaacauccgacugaaag

SEQ ID NO: 2912 - RNA, 22 nt, Homo sapiens
aauugcacgguauccaucugua

SEQ ID NO: 2913 - RNA, 22 nt, Homo sapiens
uacagauggauaccgugcaauu

SEQ ID NO: 2914 - RNA, 22 nt, Homo sapiens
cggguggaucacgaugcaauuu

SEQ ID NO: 2915 - RNA, 22 nt, Homo sapiens
aaauugcaucgugauccacccg

SEQ ID NO: 2916 - RNA, 22 nt, Homo sapiens
cugggagguggauguuuacuuc

SEQ ID NO: 2917 - RNA, 22 nt, Homo sapiens
gaaguaaacauccaccucccag

SEQ ID NO: 2918 - RNA, 22 nt, Homo sapiens
uguaaacauccuacacucagcu

SEQ ID NO: 2919 - RNA, 22 nt, Homo sapiens
agcugaguguaggauguuuaca

SEQ ID NO: 2920 - RNA, 22 nt, Homo sapiens
cugggagaggguuguuuacucc

SEQ ID NO: 2921 - RNA, 22 nt, Homo sapiens
ggaguaaacaacccucucccag

SEQ ID NO: 2922 - RNA, 22 nt, Homo sapiens
cugggagaaggcuguuuacucu

SEQ ID NO: 2923 - RNA, 22 nt, Homo sapiens
agaguaaacagccuucucccag

SEQ ID NO: 2924 - RNA, 23 nt, Homo sapiens
uguaaacauccuacacucucagc

SEQ ID NO: 2925 - RNA, 23 nt, Homo sapiens
gcugagaguguaggauguuuaca

SEQ ID NO: 2926 - RNA, 22 nt, Homo sapiens
uuuuucauuauugcuccugacc

SEQ ID NO: 2927 - RNA, 22 nt, Homo sapiens
ggucaggagcaauaaugaaaaa

SEQ ID NO: 2928 - RNA, 23 nt, Homo sapiens
ucaagagcaauaacgaaaaaugu

SEQ ID NO: 2929 - RNA, 23 nt, Homo sapiens
acauuuuucguuauugcucuuga

SEQ ID NO: 2930 - RNA, 23 nt, Homo sapiens
caaagugcuuacagugcagguag

SEQ ID NO: 2931 - RNA, 23 nt, Homo sapiens
cuaccugcacuguaagcacuuug

SEQ ID NO: 2932 - RNA, 22 nt, Homo sapiens
ggauuccuggaaauacuguucu

SEQ ID NO: 2933 - RNA, 22 nt, Homo sapiens
agaacaguauuuccaggaaucc

SEQ ID NO: 2934 - RNA, 23 nt, Homo sapiens
guccaguuuucccaggaaucccu

SEQ ID NO: 2935 - RNA, 23 nt, Homo sapiens
agggauuccugggaaaacuggac

SEQ ID NO: 2936 - RNA, 22 nt, Homo sapiens
acugcauuaugagcacuuaaag

SEQ ID NO: 2937 - RNA, 22 nt, Homo sapiens
cuuuaagugcucauaaugcagu

SEQ ID NO: 2938 - RNA, 23 nt, Homo sapiens
uaaagugcuuauagugcagguag

SEQ ID NO: 2939 - RNA, 23 nt, Homo sapiens
cuaccugcacuauaagcacuuua

SEQ ID NO: 2940 - RNA, 22 nt, Homo sapiens
gaggguuggguggaggcucucc

SEQ ID NO: 2941 - RNA, 22 nt, Homo sapiens
ggagagccuccacccaacccuc

SEQ ID NO: 2942 - RNA, 22 nt, Homo sapiens
cugugcgugugacagcggcuga

SEQ ID NO: 2943 - RNA, 22 nt, Homo sapiens
ucagccgcugucacacgcacag

SEQ ID NO: 2944 - RNA, 22 nt, Homo sapiens
ccaguggggcugcuguuaucug

SEQ ID NO: 2945 - RNA, 22 nt, Homo sapiens
cagauaacagcagccccacugg

SEQ ID NO: 2946 - RNA, 22 nt, Homo sapiens
uguaacagcaacuccaugugga

SEQ ID NO: 2947 - RNA, 22 nt, Homo sapiens
uccacauggaguugcuguuaca

SEQ ID NO: 2948 - RNA, 22 nt, Homo sapiens
ucacaguggucucugggauuau

SEQ ID NO: 2949 - RNA, 22 nt, Homo sapiens
auaaucccagagaccacuguga

SEQ ID NO: 2950 - RNA, 22 nt, Homo sapiens
uaaucucagcuggcaacuguga

SEQ ID NO: 2951 - RNA, 22 nt, Homo sapiens
ucacaguugccagcugagauua

SEQ ID NO: 2952 - RNA, 22 nt, Homo sapiens
cagugccucggcagugcagccc

SEQ ID NO: 2953 - RNA, 22 nt, Homo sapiens
gggcugcacugccgaggcacug

SEQ ID NO: 2954 - RNA, 20 nt, Homo sapiens
gugcauugcuguugcauugc

SEQ ID NO: 2955 - RNA, 20 nt, Homo sapiens
gcaaugcaacagcaaugcac

SEQ ID NO: 2956 - RNA, 19 nt, Homo sapiens
acuggacuuggaggcagaa

SEQ ID NO: 2957 - RNA, 19 nt, Homo sapiens
uucugccuccaaguccagu

SEQ ID NO: 2958 - RNA, 25 nt, Homo sapiens
acuggacuuggagucagaagagugg

SEQ ID NO: 2959 - RNA, 25 nt, Homo sapiens
ccacucuucugacuccaaguccagu

SEQ ID NO: 2960 - RNA, 20 nt, Homo sapiens
acuggacuuggagucagaaa

SEQ ID NO: 2961 - RNA, 20 nt, Homo sapiens
uuucugacuccaaguccagu

SEQ ID NO: 2962 - RNA, 19 nt, Homo sapiens
acuggacuuggagucagga

SEQ ID NO: 2963 - RNA, 19 nt, Homo sapiens
uccugacuccaaguccagu

SEQ ID NO: 2964 - RNA, 20 nt, Homo sapiens
acuggacuuggagccagaag

SEQ ID NO: 2965 - RNA, 20 nt, Homo sapiens
cuucuggcuccaaguccagu

SEQ ID NO: 2966 - RNA, 20 nt, Homo sapiens
acugggcuuggagucagaag

SEQ ID NO: 2967 - RNA, 20 nt, Homo sapiens
cuucugacuccaagcccagu

SEQ ID NO: 2968 - RNA, 21 nt, Homo sapiens
acuggacuuggugucagaugg

SEQ ID NO: 2969 - RNA, 21 nt, Homo sapiens
ccaucugacaccaaguccagu

SEQ ID NO: 2970 - RNA, 21 nt, Homo sapiens
acuggacuaggagucagaagg

SEQ ID NO: 2971 - RNA, 21 nt, Homo sapiens
ccuucugacuccuaguccagu

SEQ ID NO: 2972 - RNA, 19 nt, Homo sapiens
acuggauuuggagccagaa

SEQ ID NO: 2973 - RNA, 19 nt, Homo sapiens
uucuggcuccaaauccagu

SEQ ID NO: 2974 - RNA, 20 nt, Homo sapiens
aggaauguuccuucuuugcc

SEQ ID NO: 2975 - RNA, 20 nt, Homo sapiens
ggcaaagaaggaacauuccu

SEQ ID NO: 2976 - RNA, 21 nt, Homo sapiens
ucagugcaugacagaacuugg

SEQ ID NO: 2977 - RNA, 21 nt, Homo sapiens
ccaaguucugucaugcacuga

SEQ ID NO: 2978 - RNA, 20 nt, Homo sapiens
ucacaccugccucgcccccc

SEQ ID NO: 2979 - RNA, 20 nt, Homo sapiens
ggggggcgaggcagguguga

SEQ ID NO: 2980 - RNA, 21 nt, Homo sapiens
gugggcgggggcaggugugug

SEQ ID NO: 2981 - RNA, 21 nt, Homo sapiens
cacacaccugcccccgcccac

SEQ ID NO: 2982 - RNA, 22 nt, Homo sapiens
acgcccuucccccccuucuuca

SEQ ID NO: 2983 - RNA, 22 nt, Homo sapiens
ugaagaagggggggaagggcgu

SEQ ID NO: 2984 - RNA, 22 nt, Homo sapiens
uugcauauguaggaugucccau

SEQ ID NO: 2985 - RNA, 22 nt, Homo sapiens
augggacauccuacauaugcaa

SEQ ID NO: 2986 - RNA, 23 nt, Homo sapiens
guuugcacgggugggccuugucu

SEQ ID NO: 2987 - RNA, 23 nt, Homo sapiens
agacaaggcccacccgugcaaac

SEQ ID NO: 2988 - RNA, 22 nt, Homo sapiens
gacuauagaacuuucccccuca

SEQ ID NO: 2989 - RNA, 22 nt, Homo sapiens
ugagggggaaaguucuauaguc

SEQ ID NO: 2990 - RNA, 21 nt, Homo sapiens
agggggaaaguucuauagucc

SEQ ID NO: 2991 - RNA, 21 nt, Homo sapiens
ggacuauagaacuuucccccu

SEQ ID NO: 2992 - RNA, 21 nt, Homo sapiens
cuuuuugcggucugggcuugc

SEQ ID NO: 2993 - RNA, 21 nt, Homo sapiens
gcaagcccagaccgcaaaaag

SEQ ID NO: 2994 - RNA, 21 nt, Homo sapiens
ucuuguguucucuagaucagu

SEQ ID NO: 2995 - RNA, 21 nt, Homo sapiens
acugaucuagagaacacaaga

SEQ ID NO: 2996 - RNA, 23 nt, Homo sapiens
cccaguguucagacuaccuguuc

SEQ ID NO: 2997 - RNA, 23 nt, Homo sapiens
gaacagguagucugaacacuggg

SEQ ID NO: 2998 - RNA, 22 nt, Homo sapiens
acaguagucugcacauugguua

SEQ ID NO: 2999 - RNA, 22 nt, Homo sapiens
uaaccaaugugcagacuacugu

SEQ ID NO: 3000 - RNA, 22 nt, Homo sapiens
acaguagucugcacauugguua

SEQ ID NO: 3001 - RNA, 22 nt, Homo sapiens
uaaccaaugugcagacuacugu

SEQ ID NO: 3002 - RNA, 23 nt, Homo sapiens
cccaguguuuagacuaucuguuc

SEQ ID NO: 3003 - RNA, 23 nt, Homo sapiens
gaacagauagucuaaacacuggg

SEQ ID NO: 3004 - RNA, 22 nt, Homo sapiens
uggagugugacaaugguguuug

SEQ ID NO: 3005 - RNA, 22 nt, Homo sapiens
caaacaccauugucacacucca

SEQ ID NO: 3006 - RNA, 22 nt, Homo sapiens
ugcccuaaaugccccuucuggc

SEQ ID NO: 3007 - RNA, 22 nt, Homo sapiens
gccagaaggggcauuuagggca

SEQ ID NO: 3008 - RNA, 23 nt, Homo sapiens
uaaggugcaucuagugcaguuag

SEQ ID NO: 3009 - RNA, 23 nt, Homo sapiens
cuaacugcacuagaugcaccuua

SEQ ID NO: 3010 - RNA, 22 nt, Homo sapiens
cuccuauaugaugccuuucuuc

SEQ ID NO: 3011 - RNA, 22 nt, Homo sapiens
gaagaaaggcaucauauaggag

SEQ ID NO: 3012 - RNA, 21 nt, Homo sapiens
gaacggcuucauacaggaguu

SEQ ID NO: 3013 - RNA, 21 nt, Homo sapiens
aacuccuguaugaagccguuc

SEQ ID NO: 3014 - RNA, 22 nt, Homo sapiens
ugugacugguugaccagagggg

SEQ ID NO: 3015 - RNA, 22 nt, Homo sapiens
ccccucuggucaaccagucaca

SEQ ID NO: 3016 - RNA, 23 nt, Homo sapiens
acugcccuaagugcuccuucugg

SEQ ID NO: 3017 - RNA, 23 nt, Homo sapiens
ccagaaggagcacuuagggcagu

SEQ ID NO: 3018 - RNA, 23 nt, Homo sapiens
uaaggugcaucuagugcagauag

SEQ ID NO: 3019 - RNA, 23 nt, Homo sapiens
cuaucugcacuagaugcaccuua

SEQ ID NO: 3020 - RNA, 22 nt, Homo sapiens
cagugcaaugaugaaagggcau

SEQ ID NO: 3021 - RNA, 22 nt, Homo sapiens
augcccuuucaucauugcacug

SEQ ID NO: 3022 - RNA, 21 nt, Homo sapiens
acucuuucccuguugcacuac

SEQ ID NO: 3023 - RNA, 21 nt, Homo sapiens
guagugcaacagggaaagagu

SEQ ID NO: 3024 - RNA, 24 nt, Homo sapiens
uuuggcaaugguagaacucacacu

SEQ ID NO: 3025 - RNA, 24 nt, Homo sapiens
agugugaguucuaccauugccaaa

SEQ ID NO: 3026 - RNA, 21 nt, Homo sapiens
agggcccccccucaauccugu

SEQ ID NO: 3027 - RNA, 21 nt, Homo sapiens
acaggauugagggggggcccu

SEQ ID NO: 3028 - RNA, 22 nt, Homo sapiens
cagugcaauguuaaaagggcau

SEQ ID NO: 3029 - RNA, 22 nt, Homo sapiens
augcccuuuuaacauugcacug

SEQ ID NO: 3030 - RNA, 22 nt, Homo sapiens
uucacauugugcuacugucugc

SEQ ID NO: 3031 - RNA, 22 nt, Homo sapiens
gcagacaguagcacaaugugaa

SEQ ID NO: 3032 - RNA, 22 nt, Homo sapiens
ucggauccgucugagcuuggcu

SEQ ID NO: 3033 - RNA, 22 nt, Homo sapiens
agccaagcucagacggauccga

SEQ ID NO: 3034 - RNA, 22 nt, Homo sapiens
cugaagcucagagggcucugau

SEQ ID NO: 3035 - RNA, 22 nt, Homo sapiens
aucagagcccucugagcuucag

SEQ ID NO: 3036 - RNA, 22 nt, Homo sapiens
ccucuuccccuugucucuccag

SEQ ID NO: 3037 - RNA, 22 nt, Homo sapiens
cuggagagacaaggggaagagg

SEQ ID NO: 3038 - RNA, 22 nt, Homo sapiens
ugagugacaggggaaaugggga

SEQ ID NO: 3039 - RNA, 22 nt, Homo sapiens
uccccauuuccccugucacuca

SEQ ID NO: 3040 - RNA, 22 nt, Homo sapiens
ucaggacacuucugaacuugga

SEQ ID NO: 3041 - RNA, 22 nt, Homo sapiens
uccaaguucagaaguguccuga

SEQ ID NO: 3042 - RNA, 22 nt, Homo sapiens
caguucagaaguguuccugagu

SEQ ID NO: 3043 - RNA, 22 nt, Homo sapiens
acucaggaacacuucugaacug

SEQ ID NO: 3044 - RNA, 21 nt, Homo sapiens
uuucccuuuccauccuggcag

SEQ ID NO: 3045 - RNA, 21 nt, Homo sapiens
cugccaggauggaaagggaaa

SEQ ID NO: 3046 - RNA, 21 nt, Homo sapiens
uugccagggcaggagguggaa

SEQ ID NO: 3047 - RNA, 21 nt, Homo sapiens
uuccaccuccugcccuggcaa

SEQ ID NO: 3048 - RNA, 21 nt, Homo sapiens
agagauugguagaaaucaggu

SEQ ID NO: 3049 - RNA, 21 nt, Homo sapiens
accugauuucuaccaaucucu

SEQ ID NO: 3050 - RNA, 23 nt, Homo sapiens
aaucggacccauuuaaaccggag

SEQ ID NO: 3051 - RNA, 23 nt, Homo sapiens
cuccgguuuaaauggguccgauu

SEQ ID NO: 3052 - RNA, 24 nt, Homo sapiens
ucugggcacaggcggauggacagg

SEQ ID NO: 3053 - RNA, 24 nt, Homo sapiens
ccuguccauccgccugugcccaga

SEQ ID NO: 3054 - RNA, 21 nt, Homo sapiens
ccagugacugagcuggagcca

SEQ ID NO: 3055 - RNA, 21 nt, Homo sapiens
uggcuccagcucagucacugg

SEQ ID NO: 3056 - RNA, 22 nt, Homo sapiens
aggauaggaagaaugaagugcu

SEQ ID NO: 3057 - RNA, 22 nt, Homo sapiens
agcacuucauucuuccuauccu

SEQ ID NO: 3058 - RNA, 22 nt, Homo sapiens
aggagaguggauuccagguggu

SEQ ID NO: 3059 - RNA, 22 nt, Homo sapiens
accaccuggaauccacucuccu

SEQ ID NO: 3060 - RNA, 22 nt, Homo sapiens
uccuccucuaccucaucccagu

SEQ ID NO: 3061 - RNA, 22 nt, Homo sapiens
acugggaugagguagaggagga

SEQ ID NO: 3062 - RNA, 22 nt, Homo sapiens
ugagggguuuggaaugggaugg

SEQ ID NO: 3063 - RNA, 22 nt, Homo sapiens
ccaucccauuccaaaccccuca

SEQ ID NO: 3064 - RNA, 21 nt, Homo sapiens
auccaguucucugagggggcu

SEQ ID NO: 3065 - RNA, 21 nt, Homo sapiens
agcccccucagagaacuggau

SEQ ID NO: 3066 - RNA, 22 nt, Homo sapiens
aaccccuaaggcaacuggaugg

SEQ ID NO: 3067 - RNA, 22 nt, Homo sapiens
ccauccaguugccuuagggguu

SEQ ID NO: 3068 - RNA, 21 nt, Homo sapiens
ucauccucgucucccucccag

SEQ ID NO: 3069 - RNA, 21 nt, Homo sapiens
cugggagggagacgaggauga

SEQ ID NO: 3070 - RNA, 22 nt, Homo sapiens
agggaaggggacgaggguuggg

SEQ ID NO: 3071 - RNA, 22 nt, Homo sapiens
cccaacccucguccccuucccu

SEQ ID NO: 3072 - RNA, 23 nt, Homo sapiens
aagaagagacugagucaucgaau

SEQ ID NO: 3073 - RNA, 23 nt, Homo sapiens
auucgaugacucagucucuucuu

SEQ ID NO: 3074 - RNA, 23 nt, Homo sapiens
caauggcacaaacucauucuuga

SEQ ID NO: 3075 - RNA, 23 nt, Homo sapiens
ucaagaaugaguuugugccauug

SEQ ID NO: 3076 - RNA, 21 nt, Homo sapiens
acugaauccucuuuuccucag

SEQ ID NO: 3077 - RNA, 21 nt, Homo sapiens
cugaggaaaagaggauucagu

SEQ ID NO: 3078 - RNA, 22 nt, Homo sapiens
ugggaugagggauugaagugga

SEQ ID NO: 3079 - RNA, 22 nt, Homo sapiens
uccacuucaaucccucauccca

SEQ ID NO: 3080 - RNA, 22 nt, Homo sapiens
caggccauauugugcugccuca

SEQ ID NO: 3081 - RNA, 22 nt, Homo sapiens
ugaggcagcacaauauggccug

SEQ ID NO: 3082 - RNA, 22 nt, Homo sapiens
uagcagcacauaaugguuugug

SEQ ID NO: 3083 - RNA, 22 nt, Homo sapiens
cacaaaccauuaugugcugcua

SEQ ID NO: 3084 - RNA, 22 nt, Homo sapiens
cgaaucauuauuugcugcucua

SEQ ID NO: 3085 - RNA, 22 nt, Homo sapiens
uagagcagcaaauaaugauucg

SEQ ID NO: 3086 - RNA, 22 nt, Homo sapiens
uagcagcacaucaugguuuaca

SEQ ID NO: 3087 - RNA, 22 nt, Homo sapiens
uguaaaccaugaugugcugcua

SEQ ID NO: 3088 - RNA, 22 nt, Homo sapiens
ccaauauuacugugcugcuuua

SEQ ID NO: 3089 - RNA, 22 nt, Homo sapiens
uaaagcagcacaguaauauugg

SEQ ID NO: 3090 - RNA, 22 nt, Homo sapiens
cuagguauggucccagggaucc

SEQ ID NO: 3091 - RNA, 22 nt, Homo sapiens
ggaucccugggaccauaccuag

SEQ ID NO: 3092 - RNA, 20 nt, Homo sapiens
guguguggaaaugcuucugc

SEQ ID NO: 3093 - RNA, 20 nt, Homo sapiens
gcagaagcauuuccacacac

SEQ ID NO: 3094 - RNA, 22 nt, Homo sapiens
gugugcggaaaugcuucugcua

SEQ ID NO: 3095 - RNA, 22 nt, Homo sapiens
uagcagaagcauuuccgcacac

SEQ ID NO: 3096 - RNA, 23 nt, Homo sapiens
agcagcauuguacagggcuauca

SEQ ID NO: 3097 - RNA, 23 nt, Homo sapiens
ugauagcccuguacaaugcugcu

SEQ ID NO: 3098 - RNA, 22 nt, Homo sapiens
aacuggcccucaaagucccgcu

SEQ ID NO: 3099 - RNA, 22 nt, Homo sapiens
agcgggacuuugagggccaguu

SEQ ID NO: 3100 - RNA, 22 nt, Homo sapiens
cgggguuuugagggcgagauga

SEQ ID NO: 3101 - RNA, 22 nt, Homo sapiens
ucaucucgcccucaaaaccccg

SEQ ID NO: 3102 - RNA, 21 nt, Homo sapiens
gcagggacagcaaaggggugc

SEQ ID NO: 3103 - RNA, 21 nt, Homo sapiens
gcaccccuuugcugucccugc

SEQ ID NO: 3104 - RNA, 22 nt, Homo sapiens
uucccuuugucauccuucgccu

SEQ ID NO: 3105 - RNA, 22 nt, Homo sapiens
aggcgaaggaugacaaagggaa

SEQ ID NO: 3106 - RNA, 23 nt, Homo sapiens
auggccaaaacugcaguuauuuu

SEQ ID NO: 3107 - RNA, 23 nt, Homo sapiens
aaaauaacugcaguuuuggccau

SEQ ID NO: 3108 - RNA, 25 nt, Homo sapiens
aaaaaccacaauuacuuuugcacca

SEQ ID NO: 3109 - RNA, 25 nt, Homo sapiens
uggugcaaaaguaauugugguuuuu

SEQ ID NO: 3110 - RNA, 21 nt, Homo sapiens
caaaagugaucgugguuuuug

SEQ ID NO: 3111 - RNA, 21 nt, Homo sapiens
caaaaaccacgaucacuuuug

SEQ ID NO: 3112 - RNA, 23 nt, Homo sapiens
caaagacugcaauuacuuuugcg

SEQ ID NO: 3113 - RNA, 23 nt, Homo sapiens
cgcaaaaguaauugcagucuuug

SEQ ID NO: 3114 - RNA, 23 nt, Homo sapiens
aaaaguaacugcgguuuuugccu

SEQ ID NO: 3115 - RNA, 23 nt, Homo sapiens
aggcaaaaaccgcaguuacuuuu

SEQ ID NO: 3116 - RNA, 22 nt, Homo sapiens
ugccuggaacauaguagggacu

SEQ ID NO: 3117 - RNA, 22 nt, Homo sapiens
agucccuacuauguuccaggca

SEQ ID NO: 3118 - RNA, 21 nt, Homo sapiens
auaggacucauauagugccag

SEQ ID NO: 3119 - RNA, 21 nt, Homo sapiens
cuggcacuauaugaguccuau

SEQ ID NO: 3120 - RNA, 20 nt, Homo sapiens
agacacuauacgagucauau

SEQ ID NO: 3121 - RNA, 20 nt, Homo sapiens
auaugacucguauagugucu

SEQ ID NO: 3122 - RNA, 23 nt, Homo sapiens
ugugacugcauuaugaaaauucu

SEQ ID NO: 3123 - RNA, 23 nt, Homo sapiens
agaauuuucauaaugcagucaca

SEQ ID NO: 3124 - RNA, 20 nt, Homo sapiens
uggcuuuuaacuuugauggc

SEQ ID NO: 3125 - RNA, 20 nt, Homo sapiens
gccaucaaaguuaaaagcca

SEQ ID NO: 3126 - RNA, 21 nt, Homo sapiens
cacagcaaguguagacaggca

SEQ ID NO: 3127 - RNA, 21 nt, Homo sapiens
ugccugucuacacuugcugug

SEQ ID NO: 3128 - RNA, 21 nt, Homo sapiens
ccugucugugccugcuguaca

SEQ ID NO: 3129 - RNA, 21 nt, Homo sapiens
uguacagcaggcacagacagg

SEQ ID NO: 3130 - RNA, 22 nt, Homo sapiens
uaaauagaguaggcaaaggaca

SEQ ID NO: 3131 - RNA, 22 nt, Homo sapiens
uguccuuugccuacucuauuua

SEQ ID NO: 3132 - RNA, 22 nt, Homo sapiens
uccuuugccuauucuauuuaag

SEQ ID NO: 3133 - RNA, 22 nt, Homo sapiens
cuuaaauagaauaggcaaagga

SEQ ID NO: 3134 - RNA, 22 nt, Homo sapiens
guugggacaagaggacggucuu

SEQ ID NO: 3135 - RNA, 22 nt, Homo sapiens
aagaccguccucuugucccaac

SEQ ID NO: 3136 - RNA, 17 nt, Homo sapiens
cagagaauuguuuaauc

SEQ ID NO: 3137 - RNA, 17 nt, Homo sapiens
gauuaaacaauucucug

SEQ ID NO: 3138 - RNA, 20 nt, Homo sapiens
uagaggaagcuguggagaga

SEQ ID NO: 3139 - RNA, 20 nt, Homo sapiens
ucucuccacagcuuccucua

SEQ ID NO: 3140 - RNA, 22 nt, Homo sapiens
uccccuucugcaggccugcugg

SEQ ID NO: 3141 - RNA, 22 nt, Homo sapiens
ccagcaggccugcagaagggga

SEQ ID NO: 3142 - RNA, 23 nt, Homo sapiens
aucagggcuuguggaaugggaag

SEQ ID NO: 3143 - RNA, 23 nt, Homo sapiens
cuucccauuccacaagcccugau

SEQ ID NO: 3144 - RNA, 23 nt, Homo sapiens
ucuggcaaguaaaaaacucucau

SEQ ID NO: 3145 - RNA, 23 nt, Homo sapiens
augagaguuuuuuacuugccaga

SEQ ID NO: 3146 - RNA, 23 nt, Homo sapiens
ucgaggacugguggaagggccuu

SEQ ID NO: 3147 - RNA, 23 nt, Homo sapiens
aaggcccuuccaccaguccucga

SEQ ID NO: 3148 - RNA, 24 nt, Homo sapiens
uggguagagaaggagcucagagga

SEQ ID NO: 3149 - RNA, 24 nt, Homo sapiens
uccucugagcuccuucucuaccca

SEQ ID NO: 3150 - RNA, 22 nt, Homo sapiens
uaaagaacucuuaaaacccaau

SEQ ID NO: 3151 - RNA, 22 nt, Homo sapiens
auuggguuuuaagaguucuuua

SEQ ID NO: 3152 - RNA, 23 nt, Homo sapiens
ugauggauaaaagacuacauauu

SEQ ID NO: 3153 - RNA, 23 nt, Homo sapiens
aauauguagucuuuuauccauca

SEQ ID NO: 3154 - RNA, 22 nt, Homo sapiens
ugccuaggcugagacugcagug

SEQ ID NO: 3155 - RNA, 22 nt, Homo sapiens
cacugcagucucagccuaggca

SEQ ID NO: 3156 - RNA, 22 nt, Homo sapiens
uggcccaaccuauucaguuagu

SEQ ID NO: 3157 - RNA, 22 nt, Homo sapiens
acuaacugaauagguugggcca

SEQ ID NO: 3158 - RNA, 23 nt, Homo sapiens
cugacugaauagguagggucauu

SEQ ID NO: 3159 - RNA, 23 nt, Homo sapiens
aaugacccuaccuauucagucag

SEQ ID NO: 3160 - RNA, 24 nt, Homo sapiens
ucuguagccugggagcaauggggu

SEQ ID NO: 3161 - RNA, 24 nt, Homo sapiens
accccauugcucccaggcuacaga

SEQ ID NO: 3162 - RNA, 23 nt, Homo sapiens
uaggagcucaacagaugccuguu

SEQ ID NO: 3163 - RNA, 23 nt, Homo sapiens
aacaggcaucuguugagcuccua

SEQ ID NO: 3164 - RNA, 19 nt, Homo sapiens
gagggcggguggaggagga

SEQ ID NO: 3165 - RNA, 19 nt, Homo sapiens
uccuccuccacccgcccuc

SEQ ID NO: 3166 - RNA, 25 nt, Homo sapiens
auaacauuguaaagcgcuucuuucg

SEQ ID NO: 3167 - RNA, 25 nt, Homo sapiens
cgaaagaagcgcuuuacaauguuau

SEQ ID NO: 3168 - RNA, 24 nt, Homo sapiens
agauauuuugaguguuuggaauug

SEQ ID NO: 3169 - RNA, 24 nt, Homo sapiens
caauuccaaacacucaaaauaucu

SEQ ID NO: 3170 - RNA, 22 nt, Homo sapiens
aacuccaaacacucaaaacuca

SEQ ID NO: 3171 - RNA, 22 nt, Homo sapiens
ugaguuuugaguguuuggaguu

SEQ ID NO: 3172 - RNA, 22 nt, Homo sapiens
caugcuaggauagaaagaaugg

SEQ ID NO: 3173 - RNA, 22 nt, Homo sapiens
ccauucuuucuauccuagcaug

SEQ ID NO: 3174 - RNA, 24 nt, Homo sapiens
gguugggcagugaggaggguguga

SEQ ID NO: 3175 - RNA, 24 nt, Homo sapiens
ucacacccuccucacugcccaacc

SEQ ID NO: 3176 - RNA, 22 nt, Homo sapiens
uggaaaaaacuggugugugcuu

SEQ ID NO: 3177 - RNA, 22 nt, Homo sapiens
aagcacacaccaguuuuuucca

SEQ ID NO: 3178 - RNA, 22 nt, Homo sapiens
cuggggagauccucgagguugg

SEQ ID NO: 3179 - RNA, 22 nt, Homo sapiens
ccaaccucgaggaucuccccag

SEQ ID NO: 3180 - RNA, 22 nt, Homo sapiens
caaccucgacgaucuccucagc

SEQ ID NO: 3181 - RNA, 22 nt, Homo sapiens
gcugaggagaucgucgagguug

SEQ ID NO: 3182 - RNA, 21 nt, Homo sapiens
ugaggagaucgucgagguugg

SEQ ID NO: 3183 - RNA, 21 nt, Homo sapiens
ccaaccucgacgaucuccuca

SEQ ID NO: 3184 - RNA, 22 nt, Homo sapiens
caaccucgaggaucuccccagc

SEQ ID NO: 3185 - RNA, 22 nt, Homo sapiens
gcuggggagauccucgagguug

SEQ ID NO: 3186 - RNA, 21 nt, Homo sapiens
gguggggcaaugggaucaggu

SEQ ID NO: 3187 - RNA, 21 nt, Homo sapiens
accugaucccauugccccacc

SEQ ID NO: 3188 - RNA, 23 nt, Homo sapiens
ggggaaagcgaguagggacauuu

SEQ ID NO: 3189 - RNA, 23 nt, Homo sapiens
aaaugucccuacucgcuuucccc

SEQ ID NO: 3190 - RNA, 22 nt, Homo sapiens
cagaaggggaguugggagcaga

SEQ ID NO: 3191 - RNA, 22 nt, Homo sapiens
ucugcucccaacuccccuucug

SEQ ID NO: 3192 - RNA, 21 nt, Homo sapiens
ccaggcucugcagugggaacu

SEQ ID NO: 3193 - RNA, 21 nt, Homo sapiens
aguucccacugcagagccugg

SEQ ID NO: 3194 - RNA, 21 nt, Homo sapiens
cucccacuuccagaucuuucu

SEQ ID NO: 3195 - RNA, 21 nt, Homo sapiens
agaaagaucuggaagugggag

SEQ ID NO: 3196 - RNA, 22 nt, Homo sapiens
aaagaucuggaagugggagaca

SEQ ID NO: 3197 - RNA, 22 nt, Homo sapiens
ugucucccacuuccagaucuuu

SEQ ID NO: 3198 - RNA, 22 nt, Homo sapiens
cugcccuagucuagcugaagcu

SEQ ID NO: 3199 - RNA, 22 nt, Homo sapiens
agcuucagcuagacuagggcag

SEQ ID NO: 3200 - RNA, 22 nt, Homo sapiens
uucagccaggcuagugcagucu

SEQ ID NO: 3201 - RNA, 22 nt, Homo sapiens
agacugcacuagccuggcugaa

SEQ ID NO: 3202 - RNA, 22 nt, Homo sapiens
uaggauuacaagugucggccac

SEQ ID NO: 3203 - RNA, 22 nt, Homo sapiens
guggccgacacuuguaauccua

SEQ ID NO: 3204 - RNA, 22 nt, Homo sapiens
agagcugagacuagaaagccca

SEQ ID NO: 3205 - RNA, 22 nt, Homo sapiens
ugggcuuucuagucucagcucu

SEQ ID NO: 3206 - RNA, 22 nt, Homo sapiens
ggcuuucuagucucagcucucc

SEQ ID NO: 3207 - RNA, 22 nt, Homo sapiens
ggagagcugagacuagaaagcc

SEQ ID NO: 3208 - RNA, 23 nt, Homo sapiens
cugauaagaacagaggcccagau

SEQ ID NO: 3209 - RNA, 23 nt, Homo sapiens
aucugggccucuguucuuaucag

SEQ ID NO: 3210 - RNA, 21 nt, Homo sapiens
ucccuaccccuccacucccca

SEQ ID NO: 3211 - RNA, 21 nt, Homo sapiens
uggggaguggagggguaggga

SEQ ID NO: 3212 - RNA, 23 nt, Homo sapiens
uuagggaguagaaggguggggag

SEQ ID NO: 3213 - RNA, 23 nt, Homo sapiens
cuccccacccuucuacucccuaa

SEQ ID NO: 3214 - RNA, 22 nt, Homo sapiens
uauaaaaugagggcaguaagac

SEQ ID NO: 3215 - RNA, 22 nt, Homo sapiens
gucuuacugcccucauuuuaua

SEQ ID NO: 3216 - RNA, 22 nt, Homo sapiens
ugugacuuuaagggaaauggcg

SEQ ID NO: 3217 - RNA, 22 nt, Homo sapiens
cgccauuucccuuaaagucaca

SEQ ID NO: 3218 - RNA, 22 nt, Homo sapiens
agguggaugcaaugugaccuca

SEQ ID NO: 3219 - RNA, 22 nt, Homo sapiens
ugaggucacauugcauccaccu

SEQ ID NO: 3220 - RNA, 23 nt, Homo sapiens
cgcagacaaugccuacuggccua

SEQ ID NO: 3221 - RNA, 23 nt, Homo sapiens
uaggccaguaggcauugucugcg

SEQ ID NO: 3222 - RNA, 17 nt, Homo sapiens
gaguucuacagucagac

SEQ ID NO: 3223 - RNA, 17 nt, Homo sapiens
gucugacuguagaacuc

SEQ ID NO: 3224 - RNA, 22 nt, Homo sapiens
uaggacugugcuuggcacauag

SEQ ID NO: 3225 - RNA, 22 nt, Homo sapiens
cuaugugccaagcacaguccua

SEQ ID NO: 3226 - RNA, 22 nt, Homo sapiens
cugggguucugagacagacagu

SEQ ID NO: 3227 - RNA, 22 nt, Homo sapiens
acugucugucucagaaccccag

SEQ ID NO: 3228 - RNA, 22 nt, Homo sapiens
aaaggaggaaauaggcaggcca

SEQ ID NO: 3229 - RNA, 22 nt, Homo sapiens
uggccugccuauuuccuccuuu

SEQ ID NO: 3230 - RNA, 22 nt, Homo sapiens
ugcccugccuguuuucuccuuu

SEQ ID NO: 3231 - RNA, 22 nt, Homo sapiens
aaaggagaaaacaggcagggca

SEQ ID NO: 3232 - RNA, 23 nt, Homo sapiens
uagugaguuagagaugcagagcc

SEQ ID NO: 3233 - RNA, 23 nt, Homo sapiens
ggcucugcaucucuaacucacua

SEQ ID NO: 3234 - RNA, 19 nt, Homo sapiens
acuggccugggacuaccgg

SEQ ID NO: 3235 - RNA, 19 nt, Homo sapiens
ccgguagucccaggccagu

SEQ ID NO: 3236 - RNA, 21 nt, Homo sapiens
ugcacggcacuggggacacgu

SEQ ID NO: 3237 - RNA, 21 nt, Homo sapiens
acguguccccagugccgugca

SEQ ID NO: 3238 - RNA, 23 nt, Homo sapiens
uguguacacacgugccaggcgcu

SEQ ID NO: 3239 - RNA, 23 nt, Homo sapiens
agcgccuggcacguguguacaca

SEQ ID NO: 3240 - RNA, 17 nt, Homo sapiens
ggggcgcggccggaucg

SEQ ID NO: 3241 - RNA, 17 nt, Homo sapiens
cgauccggccgcgcccc

SEQ ID NO: 3242 - RNA, 22 nt, Homo sapiens
agaaggggugaaauuuaaacgu

SEQ ID NO: 3243 - RNA, 22 nt, Homo sapiens
acguuuaaauuucaccccuucu

SEQ ID NO: 3244 - RNA, 19 nt, Homo sapiens
aucgggcccucggcgccgg

SEQ ID NO: 3245 - RNA, 19 nt, Homo sapiens
ccggcgccgagggcccgau

SEQ ID NO: 3246 - RNA, 17 nt, Homo sapiens
gcuucuguaguguaguc

SEQ ID NO: 3247 - RNA, 17 nt, Homo sapiens
gacuacacuacagaagc

SEQ ID NO: 3248 - RNA, 22 nt, Homo sapiens
gccucucucggagucgcucgga

SEQ ID NO: 3249 - RNA, 22 nt, Homo sapiens
uccgagcgacuccgagagaggc

SEQ ID NO: 3250 - RNA, 23 nt, Homo sapiens
aaagucucgcucucugccccuca

SEQ ID NO: 3251 - RNA, 23 nt, Homo sapiens
ugaggggcagagagcgagacuuu

SEQ ID NO: 3252 - RNA, 24 nt, Homo sapiens
ugaggggccucagaccgagcuuuu

SEQ ID NO: 3253 - RNA, 24 nt, Homo sapiens
aaaagcucggucugaggccccuca

SEQ ID NO: 3254 - RNA, 23 nt, Homo sapiens
agaagaaggcggucggucugcgg

SEQ ID NO: 3255 - RNA, 23 nt, Homo sapiens
ccgcagaccgaccgccuucuucu

SEQ ID NO: 3256 - RNA, 20 nt, Homo sapiens
uuggccauggggcugcgcgg

SEQ ID NO: 3257 - RNA, 20 nt, Homo sapiens
ccgcgcagccccauggccaa

SEQ ID NO: 3258 - RNA, 23 nt, Homo sapiens
ccugggcagcguguggcugaagg

SEQ ID NO: 3259 - RNA, 23 nt, Homo sapiens
ccuucagccacacgcugcccagg

SEQ ID NO: 3260 - RNA, 23 nt, Homo sapiens
agaggcuuugugcggauacgggg

SEQ ID NO: 3261 - RNA, 23 nt, Homo sapiens
ccccguauccgcacaaagccucu

SEQ ID NO: 3262 - RNA, 21 nt, Homo sapiens
cccuugggucugaugggguag

SEQ ID NO: 3263 - RNA, 21 nt, Homo sapiens
cuaccccaucagacccaaggg

SEQ ID NO: 3264 - RNA, 25 nt, Homo sapiens
ugccccaucugugcccuggguagga

SEQ ID NO: 3265 - RNA, 25 nt, Homo sapiens
uccuacccagggcacagauggggca

SEQ ID NO: 3266 - RNA, 23 nt, Homo sapiens
uguggaagguagacggccagaga

SEQ ID NO: 3267 - RNA, 23 nt, Homo sapiens
ucucuggccgucuaccuuccaca

SEQ ID NO: 3268 - RNA, 20 nt, Homo sapiens
ucuggccagcuacgucccca

SEQ ID NO: 3269 - RNA, 20 nt, Homo sapiens
uggggacguagcuggccaga

SEQ ID NO: 3270 - RNA, 23 nt, Homo sapiens
uggggacguagcuggccagacag

SEQ ID NO: 3271 - RNA, 23 nt, Homo sapiens
cugucuggccagcuacgucccca

SEQ ID NO: 3272 - RNA, 22 nt, Homo sapiens
cucucuggccgucuaccuucca

SEQ ID NO: 3273 - RNA, 22 nt, Homo sapiens
uggaagguagacggccagagag

SEQ ID NO: 3274 - RNA, 23 nt, Homo sapiens
ucugggagguuguagcaguggaa

SEQ ID NO: 3275 - RNA, 23 nt, Homo sapiens
uuccacugcuacaaccucccaga

SEQ ID NO: 3276 - RNA, 22 nt, Homo sapiens
uccugcguaggaucugaggagu

SEQ ID NO: 3277 - RNA, 22 nt, Homo sapiens
acuccucagauccuacgcagga

SEQ ID NO: 3278 - RNA, 22 nt, Homo sapiens
agcucugcugcucacuggcagu

SEQ ID NO: 3279 - RNA, 22 nt, Homo sapiens
acugccagugagcagcagagcu

SEQ ID NO: 3280 - RNA, 21 nt, Homo sapiens
ggccagccaccaggagggcug

SEQ ID NO: 3281 - RNA, 21 nt, Homo sapiens
cagcccuccugguggcuggcc

SEQ ID NO: 3282 - RNA, 17 nt, Homo sapiens
cgcgccgggcccggguu

SEQ ID NO: 3283 - RNA, 17 nt, Homo sapiens
aacccgggcccggcgcg

SEQ ID NO: 3284 - RNA, 23 nt, Homo sapiens
ggaggcgcaggcucggaaaggcg

SEQ ID NO: 3285 - RNA, 23 nt, Homo sapiens
cgccuuuccgagccugcgccucc

SEQ ID NO: 3286 - RNA, 22 nt, Homo sapiens
guggaguccuggggaauggaga

SEQ ID NO: 3287 - RNA, 22 nt, Homo sapiens
ucuccauuccccaggacuccac

SEQ ID NO: 3288 - RNA, 23 nt, Homo sapiens
agggacugccuuaggagaaaguu

SEQ ID NO: 3289 - RNA, 23 nt, Homo sapiens
aacuuucuccuaaggcagucccu

SEQ ID NO: 3290 - RNA, 17 nt, Homo sapiens
gggauaugaagaaaaau

SEQ ID NO: 3291 - RNA, 17 nt, Homo sapiens
auuuuucuucauauccc

SEQ ID NO: 3292 - RNA, 22 nt, Homo sapiens
uggaagggagaagagcuuuaau

SEQ ID NO: 3293 - RNA, 22 nt, Homo sapiens
auuaaagcucuucucccuucca

SEQ ID NO: 3294 - RNA, 22 nt, Homo sapiens
acuuuccucacucccgugaagu

SEQ ID NO: 3295 - RNA, 22 nt, Homo sapiens
acuucacgggagugaggaaagu

SEQ ID NO: 3296 - RNA, 21 nt, Homo sapiens
uucgcgggcgaaggcaaaguc

SEQ ID NO: 3297 - RNA, 21 nt, Homo sapiens
gacuuugccuucgcccgcgaa

SEQ ID NO: 3298 - RNA, 22 nt, Homo sapiens
caucuggcauccgucacacaga

SEQ ID NO: 3299 - RNA, 22 nt, Homo sapiens
ucugugugacggaugccagaug

SEQ ID NO: 3300 - RNA, 22 nt, Homo sapiens
ugagggacagaugccagaagca

SEQ ID NO: 3301 - RNA, 22 nt, Homo sapiens
ugcuucuggcaucugucccuca

SEQ ID NO: 3302 - RNA, 22 nt, Homo sapiens
aaacuaaucucuacacugcugc

SEQ ID NO: 3303 - RNA, 22 nt, Homo sapiens
gcagcaguguagagauuaguuu

SEQ ID NO: 3304 - RNA, 22 nt, Homo sapiens
gcaguaguguagagauugguuu

SEQ ID NO: 3305 - RNA, 22 nt, Homo sapiens
aaaccaaucucuacacuacugc

SEQ ID NO: 3306 - RNA, 21 nt, Homo sapiens
gcugcaccggagacuggguaa

SEQ ID NO: 3307 - RNA, 21 nt, Homo sapiens
uuacccagucuccggugcagc

SEQ ID NO: 3308 - RNA, 21 nt, Homo sapiens
uacccagucuccggugcagcc

SEQ ID NO: 3309 - RNA, 21 nt, Homo sapiens
ggcugcaccggagacugggua

SEQ ID NO: 3310 - RNA, 24 nt, Homo sapiens
uguggacagugagguagagggagu

SEQ ID NO: 3311 - RNA, 24 nt, Homo sapiens
acucccucuaccucacuguccaca

SEQ ID NO: 3312 - RNA, 22 nt, Homo sapiens
agcuuuugggaauucagguagu

SEQ ID NO: 3313 - RNA, 22 nt, Homo sapiens
acuaccugaauucccaaaagcu

SEQ ID NO: 3314 - RNA, 21 nt, Homo sapiens
accugaauuaccaaaagcuuu

SEQ ID NO: 3315 - RNA, 21 nt, Homo sapiens
aaagcuuuugguaauucaggu

SEQ ID NO: 3316 - RNA, 22 nt, Homo sapiens
auauaccuguucggucucuuua

SEQ ID NO: 3317 - RNA, 22 nt, Homo sapiens
uaaagagaccgaacagguauau

SEQ ID NO: 3318 - RNA, 22 nt, Homo sapiens
aggggaccaaagagauauauag

SEQ ID NO: 3319 - RNA, 22 nt, Homo sapiens
cuauauaucucuuugguccccu

SEQ ID NO: 3320 - RNA, 23 nt, Homo sapiens
uuuguauggauauguguguguau

SEQ ID NO: 3321 - RNA, 23 nt, Homo sapiens
auacacacacauauccauacaaa

SEQ ID NO: 3322 - RNA, 22 nt, Homo sapiens
uguguuagaauaggggcaauaa

SEQ ID NO: 3323 - RNA, 22 nt, Homo sapiens
uuauugccccuauucuaacaca

SEQ ID NO: 3324 - RNA, 22 nt, Homo sapiens
auugccucuguucuaacacaag

SEQ ID NO: 3325 - RNA, 22 nt, Homo sapiens
cuuguguuagaacagaggcaau

SEQ ID NO: 3326 - RNA, 22 nt, Homo sapiens
aagggcuuccucucugcaggac

SEQ ID NO: 3327 - RNA, 22 nt, Homo sapiens
guccugcagagaggaagcccuu

SEQ ID NO: 3328 - RNA, 21 nt, Homo sapiens
ccugcagagaggaagcccuuc

SEQ ID NO: 3329 - RNA, 21 nt, Homo sapiens
gaagggcuuccucucugcagg

SEQ ID NO: 3330 - RNA, 22 nt, Homo sapiens
aggauuucagaaauacuggugu

SEQ ID NO: 3331 - RNA, 22 nt, Homo sapiens
acaccaguauuucugaaauccu

SEQ ID NO: 3332 - RNA, 24 nt, Homo sapiens
agauguauggaaucuguauauauc

SEQ ID NO: 3333 - RNA, 24 nt, Homo sapiens
gauauauacagauuccauacaucu

SEQ ID NO: 3334 - RNA, 22 nt, Homo sapiens
cggggagagaacgcagugacgu

SEQ ID NO: 3335 - RNA, 22 nt, Homo sapiens
acgucacugcguucucuccccg

SEQ ID NO: 3336 - RNA, 19 nt, Homo sapiens
uggggcggagcuuccggag

SEQ ID NO: 3337 - RNA, 19 nt, Homo sapiens
cuccggaagcuccgcccca

SEQ ID NO: 3338 - RNA, 21 nt, Homo sapiens
ucacgcggagagauggcuuug

SEQ ID NO: 3339 - RNA, 21 nt, Homo sapiens
caaagccaucucuccgcguga

SEQ ID NO: 3340 - RNA, 22 nt, Homo sapiens
caggcgucugucuacguggcuu

SEQ ID NO: 3341 - RNA, 22 nt, Homo sapiens
aagccacguagacagacgccug

SEQ ID NO: 3342 - RNA, 22 nt, Homo sapiens
caccuugcgcuacucaggucug

SEQ ID NO: 3343 - RNA, 22 nt, Homo sapiens
cagaccugaguagcgcaaggug

SEQ ID NO: 3344 - RNA, 22 nt, Homo sapiens
aaucugagaaggcgcacaaggu

SEQ ID NO: 3345 - RNA, 22 nt, Homo sapiens
accuugugcgccuucucagauu

SEQ ID NO: 3346 - RNA, 22 nt, Homo sapiens
aaggccuuucugaaccuucaga

SEQ ID NO: 3347 - RNA, 22 nt, Homo sapiens
ucugaagguucagaaaggccuu

SEQ ID NO: 3348 - RNA, 22 nt, Homo sapiens
gugacaucacauauacggcagc

SEQ ID NO: 3349 - RNA, 22 nt, Homo sapiens
gcugccguauaugugaugucac

SEQ ID NO: 3350 - RNA, 24 nt, Homo sapiens
ucagaacaaaugccgguucccaga

SEQ ID NO: 3351 - RNA, 24 nt, Homo sapiens
ucugggaaccggcauuuguucuga

SEQ ID NO: 3352 - RNA, 22 nt, Homo sapiens
ugagaaccacgucugcucugag

SEQ ID NO: 3353 - RNA, 22 nt, Homo sapiens
cucagagcagacgugguucuca

SEQ ID NO: 3354 - RNA, 17 nt, Homo sapiens
ucauauugcuucuuucu

SEQ ID NO: 3355 - RNA, 17 nt, Homo sapiens
agaaagaagcaauauga

SEQ ID NO: 3356 - RNA, 22 nt, Homo sapiens
ugugacagauugauaacugaaa

SEQ ID NO: 3357 - RNA, 22 nt, Homo sapiens
uuucaguuaucaaucugucaca

SEQ ID NO: 3358 - RNA, 23 nt, Homo sapiens
uggaguccaggaaucugcauuuu

SEQ ID NO: 3359 - RNA, 23 nt, Homo sapiens
aaaaugcagauuccuggacucca

SEQ ID NO: 3360 - RNA, 22 nt, Homo sapiens
aagcccuuaccccaaaaaguau

SEQ ID NO: 3361 - RNA, 22 nt, Homo sapiens
auacuuuuugggguaagggcuu

SEQ ID NO: 3362 - RNA, 22 nt, Homo sapiens
aagcccuuaccccaaaaagcau

SEQ ID NO: 3363 - RNA, 22 nt, Homo sapiens
augcuuuuugggguaagggcuu

SEQ ID NO: 3364 - RNA, 22 nt, Homo sapiens
uggaauguaaggaagugugugg

SEQ ID NO: 3365 - RNA, 22 nt, Homo sapiens
ccacacacuuccuuacauucca

SEQ ID NO: 3366 - RNA, 22 nt, Homo sapiens
cuuaucagauuguauuguaauu

SEQ ID NO: 3367 - RNA, 22 nt, Homo sapiens
aauuacaauacaaucugauaag

SEQ ID NO: 3368 - RNA, 22 nt, Homo sapiens
uuauaauacaaccugauaagug

SEQ ID NO: 3369 - RNA, 22 nt, Homo sapiens
cacuuaucagguuguauuauaa

SEQ ID NO: 3370 - RNA, 22 nt, Homo sapiens
cuuagcagguuguauuaucauu

SEQ ID NO: 3371 - RNA, 22 nt, Homo sapiens
aaugauaauacaaccugcuaag

SEQ ID NO: 3372 - RNA, 22 nt, Homo sapiens
auauaauacaaccugcuaagug

SEQ ID NO: 3373 - RNA, 22 nt, Homo sapiens
cacuuagcagguuguauuauau

SEQ ID NO: 3374 - RNA, 22 nt, Homo sapiens
cacuuagcagguuguauuauau

SEQ ID NO: 3375 - RNA, 22 nt, Homo sapiens
auauaauacaaccugcuaagug

SEQ ID NO: 3376 - RNA, 22 nt, Homo sapiens
auaauacaaccugcuaagugcu

SEQ ID NO: 3377 - RNA, 22 nt, Homo sapiens
agcacuuagcagguuguauuau

SEQ ID NO: 3378 - RNA, 22 nt, Homo sapiens
uuugguccccuucaaccagcug

SEQ ID NO: 3379 - RNA, 22 nt, Homo sapiens
cagcugguugaaggggaccaaa

SEQ ID NO: 3380 - RNA, 22 nt, Homo sapiens
uuugguccccuucaaccagcua

SEQ ID NO: 3381 - RNA, 22 nt, Homo sapiens
uagcugguugaaggggaccaaa

SEQ ID NO: 3382 - RNA, 22 nt, Homo sapiens
uguaaacauccuugacuggaag

SEQ ID NO: 3383 - RNA, 22 nt, Homo sapiens
cuuccagucaaggauguuuaca

SEQ ID NO: 3384 - RNA, 22 nt, Homo sapiens
ugucaguuugucaaauacccca

SEQ ID NO: 3385 - RNA, 22 nt, Homo sapiens
ugggguauuugacaaacugaca

SEQ ID NO: 3386 - RNA, 22 nt, Homo sapiens
cguguauuugacaagcugaguu

SEQ ID NO: 3387 - RNA, 22 nt, Homo sapiens
aacucagcuugucaaauacacg

SEQ ID NO: 3388 - RNA, 21 nt, Homo sapiens
uucacaguggcuaaguuccgc

SEQ ID NO: 3389 - RNA, 21 nt, Homo sapiens
gcggaacuuagccacugugaa

SEQ ID NO: 3390 - RNA, 22 nt, Homo sapiens
agggcuuagcugcuugugagca

SEQ ID NO: 3391 - RNA, 22 nt, Homo sapiens
ugcucacaagcagcuaagcccu

SEQ ID NO: 3392 - RNA, 21 nt, Homo sapiens
aucacauugccagggauuacc

SEQ ID NO: 3393 - RNA, 21 nt, Homo sapiens
gguaaucccuggcaaugugau

SEQ ID NO: 3394 - RNA, 22 nt, Homo sapiens
uggguuccuggcaugcugauuu

SEQ ID NO: 3395 - RNA, 22 nt, Homo sapiens
aaaucagcaugccaggaaccca

SEQ ID NO: 3396 - RNA, 22 nt, Homo sapiens
cuuucagucggauguuuacagc

SEQ ID NO: 3397 - RNA, 22 nt, Homo sapiens
gcuguaaacauccgacugaaag

SEQ ID NO: 3398 - RNA, 22 nt, Homo sapiens
ugccuacugagcugauaucagu

SEQ ID NO: 3399 - RNA, 22 nt, Homo sapiens
acugauaucagcucaguaggca

SEQ ID NO: 3400 - RNA, 22 nt, Homo sapiens
ugccuacugagcugaaacacag

SEQ ID NO: 3401 - RNA, 22 nt, Homo sapiens
cuguguuucagcucaguaggca

SEQ ID NO: 3402 - RNA, 22 nt, Homo sapiens
uggcucaguucagcaggaacag

SEQ ID NO: 3403 - RNA, 22 nt, Homo sapiens
cuguuccugcugaacugagcca

SEQ ID NO: 3404 - RNA, 21 nt, Homo sapiens
uucacaguggcuaaguucugc

SEQ ID NO: 3405 - RNA, 21 nt, Homo sapiens
gcagaacuuagccacugugaa

SEQ ID NO: 3406 - RNA, 22 nt, Homo sapiens
agagcuuagcugauuggugaac

SEQ ID NO: 3407 - RNA, 22 nt, Homo sapiens
guucaccaaucagcuaagcucu

SEQ ID NO: 3408 - RNA, 23 nt, Homo sapiens
uguaguguuuccuacuuuaugga

SEQ ID NO: 3409 - RNA, 23 nt, Homo sapiens
uccauaaaguaggaaacacuaca

SEQ ID NO: 3410 - RNA, 21 nt, Homo sapiens
cauaaaguagaaagcacuacu

SEQ ID NO: 3411 - RNA, 21 nt, Homo sapiens
aguagugcuuucuacuuuaug

SEQ ID NO: 3412 - RNA, 22 nt, Homo sapiens
ugaaggucuacugugugccagg

SEQ ID NO: 3413 - RNA, 22 nt, Homo sapiens
ccuggcacacaguagaccuuca

SEQ ID NO: 3414 - RNA, 22 nt, Homo sapiens
uuguacaugguaggcuuucauu

SEQ ID NO: 3415 - RNA, 22 nt, Homo sapiens
aaugaaagccuaccauguacaa

SEQ ID NO: 3416 - RNA, 21 nt, Homo sapiens
cuggauggcuccuccaugucu

SEQ ID NO: 3417 - RNA, 21 nt, Homo sapiens
agacauggaggagccauccag

SEQ ID NO: 3418 - RNA, 23 nt, Homo sapiens
ucuuggaguaggucauugggugg

SEQ ID NO: 3419 - RNA, 23 nt, Homo sapiens
ccacccaaugaccuacuccaaga

SEQ ID NO: 3420 - RNA, 22 nt, Homo sapiens
cucaucugcaaagaaguaagug

SEQ ID NO: 3421 - RNA, 22 nt, Homo sapiens
cacuuacuucuuugcagaugag

SEQ ID NO: 3422 - RNA, 22 nt, Homo sapiens
aacuguuugcagaggaaacuga

SEQ ID NO: 3423 - RNA, 22 nt, Homo sapiens
ucaguuuccucugcaaacaguu

SEQ ID NO: 3424 - RNA, 22 nt, Homo sapiens
cuugguucagggagggucccca

SEQ ID NO: 3425 - RNA, 22 nt, Homo sapiens
uggggacccucccugaaccaag

SEQ ID NO: 3426 - RNA, 22 nt, Homo sapiens
aggaccuucccugaaccaagga

SEQ ID NO: 3427 - RNA, 22 nt, Homo sapiens
uccuugguucagggaagguccu

SEQ ID NO: 3428 - RNA, 21 nt, Homo sapiens
accuccugugugcauggauua

SEQ ID NO: 3429 - RNA, 21 nt, Homo sapiens
uaauccaugcacacaggaggu

SEQ ID NO: 3430 - RNA, 22 nt, Homo sapiens
uacccauugcauaucggaguug

SEQ ID NO: 3431 - RNA, 22 nt, Homo sapiens
caacuccgauaugcaaugggua

SEQ ID NO: 3432 - RNA, 18 nt, Homo sapiens
aaagcuggguugagaagg

SEQ ID NO: 3433 - RNA, 18 nt, Homo sapiens
ccuucucaacccagcuuu

SEQ ID NO: 3434 - RNA, 20 nt, Homo sapiens
gguauccguuuggggauggu

SEQ ID NO: 3435 - RNA, 20 nt, Homo sapiens
accauccccaaacggauacc

SEQ ID NO: 3436 - RNA, 22 nt, Homo sapiens
gaaggcagcagugcuccccugu

SEQ ID NO: 3437 - RNA, 22 nt, Homo sapiens
acaggggagcacugcugccuuc

SEQ ID NO: 3438 - RNA, 22 nt, Homo sapiens
ucagugcaucacagaacuuugu

SEQ ID NO: 3439 - RNA, 22 nt, Homo sapiens
acaaaguucugugaugcacuga

SEQ ID NO: 3440 - RNA, 22 nt, Homo sapiens
aaguucuguuauacacucaggc

SEQ ID NO: 3441 - RNA, 22 nt, Homo sapiens
gccugaguguauaacagaacuu

SEQ ID NO: 3442 - RNA, 22 nt, Homo sapiens
cuggcccucucugcccuuccgu

SEQ ID NO: 3443 - RNA, 22 nt, Homo sapiens
acggaagggcagagagggccag

SEQ ID NO: 3444 - RNA, 21 nt, Homo sapiens
cuagacugaagcuccuugagg

SEQ ID NO: 3445 - RNA, 21 nt, Homo sapiens
ccucaaggagcuucagucuag

SEQ ID NO: 3446 - RNA, 21 nt, Homo sapiens
ucgaggagcucacagucuagu

SEQ ID NO: 3447 - RNA, 21 nt, Homo sapiens
acuagacugugagcuccucga

SEQ ID NO: 3448 - RNA, 21 nt, Homo sapiens
cacauuacacggucgaccucu

SEQ ID NO: 3449 - RNA, 21 nt, Homo sapiens
agaggucgaccguguaaugug

SEQ ID NO: 3450 - RNA, 22 nt, Homo sapiens
aggugguccguggcgcguucgc

SEQ ID NO: 3451 - RNA, 22 nt, Homo sapiens
gcgaacgcgccacggaccaccu

SEQ ID NO: 3452 - RNA, 23 nt, Homo sapiens
cgcauccccuagggcauuggugu

SEQ ID NO: 3453 - RNA, 23 nt, Homo sapiens
acaccaaugcccuaggggaugcg

SEQ ID NO: 3454 - RNA, 20 nt, Homo sapiens
ccucugggcccuuccuccag

SEQ ID NO: 3455 - RNA, 20 nt, Homo sapiens
cuggaggaagggcccagagg

SEQ ID NO: 3456 - RNA, 23 nt, Homo sapiens
ccuaguagguguccaguaagugu

SEQ ID NO: 3457 - RNA, 23 nt, Homo sapiens
acacuuacuggacaccuacuagg

SEQ ID NO: 3458 - RNA, 21 nt, Homo sapiens
acggugcuggauguggccuuu

SEQ ID NO: 3459 - RNA, 21 nt, Homo sapiens
aaaggccacauccagcaccgu

SEQ ID NO: 3460 - RNA, 23 nt, Homo sapiens
ucagcaccaggauauuguuggag

SEQ ID NO: 3461 - RNA, 23 nt, Homo sapiens
cuccaacaauauccuggugcuga

SEQ ID NO: 3462 - RNA, 23 nt, Homo sapiens
ucaacaaaaucacugaugcugga

SEQ ID NO: 3463 - RNA, 23 nt, Homo sapiens
uccagcaucagugauuuuguuga

SEQ ID NO: 3464 - RNA, 22 nt, Homo sapiens
aacaauauccuggugcugagug

SEQ ID NO: 3465 - RNA, 22 nt, Homo sapiens
cacucagcaccaggauauuguu

SEQ ID NO: 3466 - RNA, 23 nt, Homo sapiens
ggcagguucucacccucucuagg

SEQ ID NO: 3467 - RNA, 23 nt, Homo sapiens
ccuagagagggugagaaccugcc

SEQ ID NO: 3468 - RNA, 23 nt, Homo sapiens
gacacgggcgacagcugcggccc

SEQ ID NO: 3469 - RNA, 23 nt, Homo sapiens
gggccgcagcugucgcccguguc

SEQ ID NO: 3470 - RNA, 21 nt, Homo sapiens
auguaugugugcaugugcaug

SEQ ID NO: 3471 - RNA, 21 nt, Homo sapiens
caugcacaugcacacauacau

SEQ ID NO: 3472 - RNA, 22 nt, Homo sapiens
uauacaagggcagacucucucu

SEQ ID NO: 3473 - RNA, 22 nt, Homo sapiens
agagagagucugcccuuguaua

SEQ ID NO: 3474 - RNA, 20 nt, Homo sapiens
ggcggcggcggaggcggggg

SEQ ID NO: 3475 - RNA, 20 nt, Homo sapiens
cccccgccuccgccgccgcc

SEQ ID NO: 3476 - RNA, 22 nt, Homo sapiens
gcaggugcucacuuguccuccu

SEQ ID NO: 3477 - RNA, 22 nt, Homo sapiens
aggaggacaagugagcaccugc

SEQ ID NO: 3478 - RNA, 19 nt, Homo sapiens
ggggccuggcggugggcgg

SEQ ID NO: 3479 - RNA, 19 nt, Homo sapiens
ccgcccaccgccaggcccc

SEQ ID NO: 3480 - RNA, 22 nt, Homo sapiens
gcccaaaggugaauuuuuuggg

SEQ ID NO: 3481 - RNA, 22 nt, Homo sapiens
cccaaaaaauucaccuuugggc

SEQ ID NO: 3482 - RNA, 22 nt, Homo sapiens
caaagaauucuccuuuugggcu

SEQ ID NO: 3483 - RNA, 22 nt, Homo sapiens
agcccaaaaggagaauucuuug

SEQ ID NO: 3484 - RNA, 22 nt, Homo sapiens
cugcaauguaagcacuucuuac

SEQ ID NO: 3485 - RNA, 22 nt, Homo sapiens
guaagaagugcuuacauugcag

SEQ ID NO: 3486 - RNA, 23 nt, Homo sapiens
aaaagugcuuacagugcagguag

SEQ ID NO: 3487 - RNA, 23 nt, Homo sapiens
cuaccugcacuguaagcacuuuu

SEQ ID NO: 3488 - RNA, 22 nt, Homo sapiens
acuguaguaugggcacuuccag

SEQ ID NO: 3489 - RNA, 22 nt, Homo sapiens
cuggaagugcccauacuacagu

SEQ ID NO: 3490 - RNA, 23 nt, Homo sapiens
caaagugcucauagugcagguag

SEQ ID NO: 3491 - RNA, 23 nt, Homo sapiens
cuaccugcacuaugagcacuuug

SEQ ID NO: 3492 - RNA, 23 nt, Homo sapiens
gggguauuguuuccgcugccagg

SEQ ID NO: 3493 - RNA, 23 nt, Homo sapiens
ccuggcagcggaaacaauacccc

SEQ ID NO: 3494 - RNA, 23 nt, Homo sapiens
uagcagcgggaacaguucugcag

SEQ ID NO: 3495 - RNA, 23 nt, Homo sapiens
cugcagaacuguucccgcugcua

SEQ ID NO: 3496 - RNA, 21 nt, Homo sapiens
cgagccucaagcaagggacuu

SEQ ID NO: 3497 - RNA, 21 nt, Homo sapiens
aagucccuugcuugaggcucg

SEQ ID NO: 3498 - RNA, 22 nt, Homo sapiens
uagucccuuccuugaagcgguc

SEQ ID NO: 3499 - RNA, 22 nt, Homo sapiens
gaccgcuucaaggaagggacua

SEQ ID NO: 3500 - RNA, 21 nt, Homo sapiens
acuggacuuggagucagaagg

SEQ ID NO: 3501 - RNA, 21 nt, Homo sapiens
ccuucugacuccaaguccagu

SEQ ID NO: 3502 - RNA, 22 nt, Homo sapiens
cuccugacuccagguccugugu

SEQ ID NO: 3503 - RNA, 22 nt, Homo sapiens
acacaggaccuggagucaggag

SEQ ID NO: 3504 - RNA, 22 nt, Homo sapiens
uuuguucguucggcucgcguga

SEQ ID NO: 3505 - RNA, 22 nt, Homo sapiens
ucacgcgagccgaacgaacaaa

SEQ ID NO: 3506 - RNA, 22 nt, Homo sapiens
acggauguuugagcaugugcua

SEQ ID NO: 3507 - RNA, 22 nt, Homo sapiens
uagcacaugcucaaacauccgu

SEQ ID NO: 3508 - RNA, 23 nt, Homo sapiens
ucaaaugcucagacuccuguggu

SEQ ID NO: 3509 - RNA, 23 nt, Homo sapiens
accacaggagucugagcauuuga

SEQ ID NO: 3510 - RNA, 22 nt, Homo sapiens
cggcaacaagaaacugccugag

SEQ ID NO: 3511 - RNA, 22 nt, Homo sapiens
cucaggcaguuucuuguugccg

SEQ ID NO: 3512 - RNA, 22 nt, Homo sapiens
uagguaguuucauguuguuggg

SEQ ID NO: 3513 - RNA, 22 nt, Homo sapiens
cccaacaacaugaaacuaccua

SEQ ID NO: 3514 - RNA, 22 nt, Homo sapiens
caauguuuccacagugcaucac

SEQ ID NO: 3515 - RNA, 22 nt, Homo sapiens
gugaugcacuguggaaacauug

SEQ ID NO: 3516 - RNA, 21 nt, Homo sapiens
gugcauuguaguugcauugca

SEQ ID NO: 3517 - RNA, 21 nt, Homo sapiens
ugcaaugcaacuacaaugcac

SEQ ID NO: 3518 - RNA, 18 nt, Homo sapiens
aucccaccucugccacca

SEQ ID NO: 3519 - RNA, 18 nt, Homo sapiens
ugguggcagaggugggau

SEQ ID NO: 3520 - RNA, 19 nt, Homo sapiens
aucccaccacugccaccau

SEQ ID NO: 3521 - RNA, 19 nt, Homo sapiens
augguggcaguggugggau

SEQ ID NO: 3522 - RNA, 22 nt, Homo sapiens
accuuccucuccaugggucuuu

SEQ ID NO: 3523 - RNA, 22 nt, Homo sapiens
aaagacccauggagaggaaggu

SEQ ID NO: 3524 - RNA, 22 nt, Homo sapiens
aaagacccauugaggagaaggu

SEQ ID NO: 3525 - RNA, 22 nt, Homo sapiens
accuucuccucaaugggucuuu

SEQ ID NO: 3526 - RNA, 21 nt, Homo sapiens
aauguagagauugaucaaaau

SEQ ID NO: 3527 - RNA, 21 nt, Homo sapiens
auuuugaucaaucucuacauu

SEQ ID NO: 3528 - RNA, 23 nt, Homo sapiens
acggaauauguauacggaauaua

SEQ ID NO: 3529 - RNA, 23 nt, Homo sapiens
uauauuccguauacauauuccgu

SEQ ID NO: 3530 - RNA, 24 nt, Homo sapiens
agagcucacagcuguccuucucua

SEQ ID NO: 3531 - RNA, 24 nt, Homo sapiens
uagagaaggacagcugugagcucu

SEQ ID NO: 3532 - RNA, 22 nt, Homo sapiens
aucaaauaaggacuagucugca

SEQ ID NO: 3533 - RNA, 22 nt, Homo sapiens
ugcagacuaguccuuauuugau

SEQ ID NO: 3534 - RNA, 23 nt, Homo sapiens
augagacucauguaaaacaucuu

SEQ ID NO: 3535 - RNA, 23 nt, Homo sapiens
aagauguuuuacaugagucucau

SEQ ID NO: 3536 - RNA, 21 nt, Homo sapiens
auggaauguauauacggaaua

SEQ ID NO: 3537 - RNA, 21 nt, Homo sapiens
uauuccguauauacauuccau

SEQ ID NO: 3538 - RNA, 22 nt, Homo sapiens
auuguagaaccuaagauuggcc

SEQ ID NO: 3539 - RNA, 22 nt, Homo sapiens
ggccaaucuuagguucuacaau

SEQ ID NO: 3540 - RNA, 22 nt, Homo sapiens
caucucuaaggaacucccccaa

SEQ ID NO: 3541 - RNA, 22 nt, Homo sapiens
uugggggaguuccuuagagaug

SEQ ID NO: 3542 - RNA, 23 nt, Homo sapiens
uauggggcuucuguagagauuuc

SEQ ID NO: 3543 - RNA, 23 nt, Homo sapiens
gaaaucucuacagaagccccaua

SEQ ID NO: 3544 - RNA, 20 nt, Homo sapiens
ccguguuucccccacgcuuu

SEQ ID NO: 3545 - RNA, 20 nt, Homo sapiens
aaagcgugggggaaacacgg

SEQ ID NO: 3546 - RNA, 15 nt, Homo sapiens
aggagauccuggguu

SEQ ID NO: 3547 - RNA, 15 nt, Homo sapiens
aacccaggaucuccu

SEQ ID NO: 3548 - RNA, 22 nt, Homo sapiens
cucgugggcucuggccacggcc

SEQ ID NO: 3549 - RNA, 22 nt, Homo sapiens
ggccguggccagagcccacgag

SEQ ID NO: 3550 - RNA, 22 nt, Homo sapiens
caguggccagagcccugcagug

SEQ ID NO: 3551 - RNA, 22 nt, Homo sapiens
cacugcagggcucuggccacug

SEQ ID NO: 3552 - RNA, 22 nt, Homo sapiens
cugcagaguuuguacggaccgg

SEQ ID NO: 3553 - RNA, 22 nt, Homo sapiens
ccgguccguacaaacucugcag

SEQ ID NO: 3554 - RNA, 20 nt, Homo sapiens
uccguacaaacucugcugug

SEQ ID NO: 3555 - RNA, 20 nt, Homo sapiens
cacagcagaguuuguacgga

SEQ ID NO: 3556 - RNA, 22 nt, Homo sapiens
cuuccccccaguaaucuucauc

SEQ ID NO: 3557 - RNA, 22 nt, Homo sapiens
gaugaagauuacuggggggaag

SEQ ID NO: 3558 - RNA, 23 nt, Homo sapiens
ugaggauauggcagggaagggga

SEQ ID NO: 3559 - RNA, 23 nt, Homo sapiens
uccccuucccugccauauccuca

SEQ ID NO: 3560 - RNA, 23 nt, Homo sapiens
uuuugcaugacccugggaguagg

SEQ ID NO: 3561 - RNA, 23 nt, Homo sapiens
ccuacucccagggucaugcaaaa

SEQ ID NO: 3562 - RNA, 22 nt, Homo sapiens
gacucacucacaggauugugca

SEQ ID NO: 3563 - RNA, 22 nt, Homo sapiens
ugcacaauccugugagugaguc

SEQ ID NO: 3564 - RNA, 22 nt, Homo sapiens
acacagugcuucauccacuacu

SEQ ID NO: 3565 - RNA, 22 nt, Homo sapiens
aguaguggaugaagcacugugu

SEQ ID NO: 3566 - RNA, 22 nt, Homo sapiens
uaguggaugaugcacucugugc

SEQ ID NO: 3567 - RNA, 22 nt, Homo sapiens
gcacagagugcaucauccacua

SEQ ID NO: 3568 - RNA, 21 nt, Homo sapiens
ugaugauacagguggagguag

SEQ ID NO: 3569 - RNA, 21 nt, Homo sapiens
cuaccuccaccuguaucauca

SEQ ID NO: 3570 - RNA, 22 nt, Homo sapiens
cuacuucuaccuguguuaucau

SEQ ID NO: 3571 - RNA, 22 nt, Homo sapiens
augauaacacagguagaaguag

SEQ ID NO: 3572 - RNA, 22 nt, Homo sapiens
ugcgacauuggaaguaguauca

SEQ ID NO: 3573 - RNA, 22 nt, Homo sapiens
ugauacuacuuccaaugucgca

SEQ ID NO: 3574 - RNA, 21 nt, Homo sapiens
uuagaccuaguacacguccuu

SEQ ID NO: 3575 - RNA, 21 nt, Homo sapiens
aaggacguguacuaggucuaa

SEQ ID NO: 3576 - RNA, 22 nt, Homo sapiens
uuuccuacccuaccugaagacu

SEQ ID NO: 3577 - RNA, 22 nt, Homo sapiens
agucuucagguaggguaggaaa

SEQ ID NO: 3578 - RNA, 22 nt, Homo sapiens
aucuguaagagaaaguaaauga

SEQ ID NO: 3579 - RNA, 22 nt, Homo sapiens
ucauuuacuuucucuuacagau

SEQ ID NO: 3580 - RNA, 24 nt, Homo sapiens
cccggacaggcguucgugcgacgu

SEQ ID NO: 3581 - RNA, 24 nt, Homo sapiens
acgucgcacgaacgccuguccggg

SEQ ID NO: 3582 - RNA, 23 nt, Homo sapiens
accuggacccagcguagacaaag

SEQ ID NO: 3583 - RNA, 23 nt, Homo sapiens
cuuugucuacgcuggguccaggu

SEQ ID NO: 3584 - RNA, 22 nt, Homo sapiens
accaagucugcgucauccucuc

SEQ ID NO: 3585 - RNA, 22 nt, Homo sapiens
gagaggaugacgcagacuuggu

SEQ ID NO: 3586 - RNA, 23 nt, Homo sapiens
aguggaugauggagacucgguac

SEQ ID NO: 3587 - RNA, 23 nt, Homo sapiens
guaccgagucuccaucauccacu

SEQ ID NO: 3588 - RNA, 24 nt, Homo sapiens
guuccacacugacacugcagaagu

SEQ ID NO: 3589 - RNA, 24 nt, Homo sapiens
acuucugcagugucaguguggaac

SEQ ID NO: 3590 - RNA, 24 nt, Homo sapiens
ccugcuggucaggaguggauacug

SEQ ID NO: 3591 - RNA, 24 nt, Homo sapiens
caguauccacuccugaccagcagg

SEQ ID NO: 3592 - RNA, 23 nt, Homo sapiens
gagggucuugggagggaugugac

SEQ ID NO: 3593 - RNA, 23 nt, Homo sapiens
gucacaucccucccaagacccuc

SEQ ID NO: 3594 - RNA, 22 nt, Homo sapiens
auauacagggggagacucuuau

SEQ ID NO: 3595 - RNA, 22 nt, Homo sapiens
auaagagucucccccuguauau

SEQ ID NO: 3596 - RNA, 22 nt, Homo sapiens
auauacagggggagacucucau

SEQ ID NO: 3597 - RNA, 22 nt, Homo sapiens
augagagucucccccuguauau

SEQ ID NO: 3598 - RNA, 21 nt, Homo sapiens
agaggauacccuuuguauguu

SEQ ID NO: 3599 - RNA, 21 nt, Homo sapiens
aacauacaaaggguauccucu

SEQ ID NO: 3600 - RNA, 22 nt, Homo sapiens
ucuacaaaggaaagcgcuuucu

SEQ ID NO: 3601 - RNA, 22 nt, Homo sapiens
agaaagcgcuuuccuuuguaga

SEQ ID NO: 3602 - RNA, 22 nt, Homo sapiens
ucaaaacugaggggcauuuucu

SEQ ID NO: 3603 - RNA, 22 nt, Homo sapiens
agaaaaugccccucaguuuuga

SEQ ID NO: 3604 - RNA, 24 nt, Homo sapiens
uucuccaaaagaaagcacuuucug

SEQ ID NO: 3605 - RNA, 24 nt, Homo sapiens
cagaaagugcuuucuuuuggagaa

SEQ ID NO: 3606 - RNA, 23 nt, Homo sapiens
uucucgaggaaagaagcacuuuc

SEQ ID NO: 3607 - RNA, 23 nt, Homo sapiens
gaaagugcuucuuuccucgagaa

SEQ ID NO: 3608 - RNA, 22 nt, Homo sapiens
ccucuagauggaagcacugucu

SEQ ID NO: 3609 - RNA, 22 nt, Homo sapiens
agacagugcuuccaucuagagg

SEQ ID NO: 3610 - RNA, 22 nt, Homo sapiens
aucgugcaucccuuuagagugu

SEQ ID NO: 3611 - RNA, 22 nt, Homo sapiens
acacucuaaagggaugcacgau

SEQ ID NO: 3612 - RNA, 22 nt, Homo sapiens
aucgugcaucccuuuagagugu

SEQ ID NO: 3613 - RNA, 22 nt, Homo sapiens
acacucuaaagggaugcacgau

SEQ ID NO: 3614 - RNA, 22 nt, Homo sapiens
aucgugcauccuuuuagagugu

SEQ ID NO: 3615 - RNA, 22 nt, Homo sapiens
acacucuaaaaggaugcacgau

SEQ ID NO: 3616 - RNA, 22 nt, Homo sapiens
caaagcgcuccccuuuagaggu

SEQ ID NO: 3617 - RNA, 22 nt, Homo sapiens
accucuaaaggggagcgcuuug

SEQ ID NO: 3618 - RNA, 23 nt, Homo sapiens
caaagcgcuucucuuuagagugu

SEQ ID NO: 3619 - RNA, 23 nt, Homo sapiens
acacucuaaagagaagcgcuuug

SEQ ID NO: 3620 - RNA, 23 nt, Homo sapiens
ucucuggagggaagcacuuucug

SEQ ID NO: 3621 - RNA, 23 nt, Homo sapiens
cagaaagugcuucccuccagaga

SEQ ID NO: 3622 - RNA, 21 nt, Homo sapiens
gaaagcgcuucucuuuagagg

SEQ ID NO: 3623 - RNA, 21 nt, Homo sapiens
ccucuaaagagaagcgcuuuc

SEQ ID NO: 3624 - RNA, 22 nt, Homo sapiens
cucuagagggaagcacuuucuc

SEQ ID NO: 3625 - RNA, 22 nt, Homo sapiens
gagaaagugcuucccucuagag

SEQ ID NO: 3626 - RNA, 22 nt, Homo sapiens
aaagugcauccuuuuagagugu

SEQ ID NO: 3627 - RNA, 22 nt, Homo sapiens
acacucuaaaaggaugcacuuu

SEQ ID NO: 3628 - RNA, 22 nt, Homo sapiens
cucuagagggaagcgcuuucug

SEQ ID NO: 3629 - RNA, 22 nt, Homo sapiens
cagaaagcgcuucccucuagag

SEQ ID NO: 3630 - RNA, 22 nt, Homo sapiens
caaagugccucccuuuagagug

SEQ ID NO: 3631 - RNA, 22 nt, Homo sapiens
cacucuaaagggaggcacuuug

SEQ ID NO: 3632 - RNA, 22 nt, Homo sapiens
aagugccuccuuuuagaguguu

SEQ ID NO: 3633 - RNA, 22 nt, Homo sapiens
aacacucuaaaaggaggcacuu

SEQ ID NO: 3634 - RNA, 22 nt, Homo sapiens
uucuccaaaagggagcacuuuc

SEQ ID NO: 3635 - RNA, 22 nt, Homo sapiens
gaaagugcucccuuuuggagaa

SEQ ID NO: 3636 - RNA, 22 nt, Homo sapiens
aaagugcuucccuuuggacugu

SEQ ID NO: 3637 - RNA, 22 nt, Homo sapiens
acaguccaaagggaagcacuuu

SEQ ID NO: 3638 - RNA, 21 nt, Homo sapiens
cuccagagggaaguacuuucu

SEQ ID NO: 3639 - RNA, 21 nt, Homo sapiens
agaaaguacuucccucuggag

SEQ ID NO: 3640 - RNA, 22 nt, Homo sapiens
acaaagugcuucccuuuagagu

SEQ ID NO: 3641 - RNA, 22 nt, Homo sapiens
acucuaaagggaagcacuuugu

SEQ ID NO: 3642 - RNA, 22 nt, Homo sapiens
cuacaaagggaagcacuuucuc

SEQ ID NO: 3643 - RNA, 22 nt, Homo sapiens
gagaaagugcuucccuuuguag

SEQ ID NO: 3644 - RNA, 22 nt, Homo sapiens
gaaggcgcuucccuuuagagcg

SEQ ID NO: 3645 - RNA, 22 nt, Homo sapiens
cgcucuaaagggaagcgccuuc

SEQ ID NO: 3646 - RNA, 21 nt, Homo sapiens
cuccagagggaugcacuuucu

SEQ ID NO: 3647 - RNA, 21 nt, Homo sapiens
agaaagugcaucccucuggag

SEQ ID NO: 3648 - RNA, 22 nt, Homo sapiens
cucuagagggaagcacuuucug

SEQ ID NO: 3649 - RNA, 22 nt, Homo sapiens
cagaaagugcuucccucuagag

SEQ ID NO: 3650 - RNA, 22 nt, Homo sapiens
gaaagugcuuccuuuuagaggc

SEQ ID NO: 3651 - RNA, 22 nt, Homo sapiens
gccucuaaaaggaagcacuuuc

SEQ ID NO: 3652 - RNA, 23 nt, Homo sapiens
cucuugagggaagcacuuucugu

SEQ ID NO: 3653 - RNA, 23 nt, Homo sapiens
acagaaagugcuucccucaagag

SEQ ID NO: 3654 - RNA, 22 nt, Homo sapiens
acuggacuuagggucagaaggc

SEQ ID NO: 3655 - RNA, 22 nt, Homo sapiens
gccuucugacccuaaguccagu

SEQ ID NO: 3656 - RNA, 22 nt, Homo sapiens
aaacaaacauggugcacuucuu

SEQ ID NO: 3657 - RNA, 22 nt, Homo sapiens
aagaagugcaccauguuuguuu

SEQ ID NO: 3658 - RNA, 22 nt, Homo sapiens
gaaguugcccauguuauuuucg

SEQ ID NO: 3659 - RNA, 22 nt, Homo sapiens
cgaaaauaacaugggcaacuuc

SEQ ID NO: 3660 - RNA, 21 nt, Homo sapiens
aaucauucacggacaacacuu

SEQ ID NO: 3661 - RNA, 21 nt, Homo sapiens
aaguguuguccgugaaugauu

SEQ ID NO: 3662 - RNA, 22 nt, Homo sapiens
gaaguuguucgugguggauucg

SEQ ID NO: 3663 - RNA, 22 nt, Homo sapiens
cgaauccaccacgaacaacuuc

SEQ ID NO: 3664 - RNA, 23 nt, Homo sapiens
ccuccguguuaccuguccucuag

SEQ ID NO: 3665 - RNA, 23 nt, Homo sapiens
cuagaggacagguaacacggagg

SEQ ID NO: 3666 - RNA, 23 nt, Homo sapiens
ugaggauggauagcaaggaagcc

SEQ ID NO: 3667 - RNA, 23 nt, Homo sapiens
ggcuuccuugcuauccauccuca

SEQ ID NO: 3668 - RNA, 22 nt, Homo sapiens
uucagaucccagcggugccucu

SEQ ID NO: 3669 - RNA, 22 nt, Homo sapiens
agaggcaccgcugggaucugaa

SEQ ID NO: 3670 - RNA, 19 nt, Homo sapiens
guccuaggaggcuccucug

SEQ ID NO: 3671 - RNA, 19 nt, Homo sapiens
cagaggagccuccuaggac

SEQ ID NO: 3672 - RNA, 21 nt, Homo sapiens
caauucucaaaggagccuccc

SEQ ID NO: 3673 - RNA, 21 nt, Homo sapiens
gggaggcuccuuugagaauug

SEQ ID NO: 3674 - RNA, 21 nt, Homo sapiens
guuggggugcaggggucugcu

SEQ ID NO: 3675 - RNA, 21 nt, Homo sapiens
agcagaccccugcaccccaac

SEQ ID NO: 3676 - RNA, 22 nt, Homo sapiens
uuuccggcucgcgugggugugu

SEQ ID NO: 3677 - RNA, 22 nt, Homo sapiens
acacacccacgcgagccggaaa

SEQ ID NO: 3678 - RNA, 23 nt, Homo sapiens
ugagugugugugugugagugugu

SEQ ID NO: 3679 - RNA, 23 nt, Homo sapiens
acacacucacacacacacacuca

SEQ ID NO: 3680 - RNA, 22 nt, Homo sapiens
agugggaggccagggcacggca

SEQ ID NO: 3681 - RNA, 22 nt, Homo sapiens
ugccgugcccuggccucccacu

SEQ ID NO: 3682 - RNA, 20 nt, Homo sapiens
ugagcccuguccucccgcag

SEQ ID NO: 3683 - RNA, 20 nt, Homo sapiens
cugcgggaggacagggcuca

SEQ ID NO: 3684 - RNA, 23 nt, Homo sapiens
aagugccgccaucuuuugagugu

SEQ ID NO: 3685 - RNA, 23 nt, Homo sapiens
acacucaaaagauggcggcacuu

SEQ ID NO: 3686 - RNA, 20 nt, Homo sapiens
acucaaacugugggggcacu

SEQ ID NO: 3687 - RNA, 20 nt, Homo sapiens
agugcccccacaguuugagu

SEQ ID NO: 3688 - RNA, 23 nt, Homo sapiens
aagugcccccacaguuugagugc

SEQ ID NO: 3689 - RNA, 23 nt, Homo sapiens
gcacucaaacugugggggcacuu

SEQ ID NO: 3690 - RNA, 22 nt, Homo sapiens
acucaaaagauggcggcacuuu

SEQ ID NO: 3691 - RNA, 22 nt, Homo sapiens
aaagugccgccaucuuuugagu

SEQ ID NO: 3692 - RNA, 22 nt, Homo sapiens
aaaccuguguuguucaagaguc

SEQ ID NO: 3693 - RNA, 22 nt, Homo sapiens
gacucuugaacaacacagguuu

SEQ ID NO: 3694 - RNA, 22 nt, Homo sapiens
acaguagagggaggaaucgcag

SEQ ID NO: 3695 - RNA, 22 nt, Homo sapiens
cugcgauuccucccucuacugu

SEQ ID NO: 3696 - RNA, 22 nt, Homo sapiens
gugaaauguuuaggaccacuag

SEQ ID NO: 3697 - RNA, 22 nt, Homo sapiens
cuagugguccuaaacauuucac

SEQ ID NO: 3698 - RNA, 23 nt, Homo sapiens
uugaacuguuaagaaccacugga

SEQ ID NO: 3699 - RNA, 23 nt, Homo sapiens
uccagugguucuuaacaguucaa

SEQ ID NO: 3700 - RNA, 22 nt, Homo sapiens
uagugguccuaaacauuucaca

SEQ ID NO: 3701 - RNA, 22 nt, Homo sapiens
ugugaaauguuuaggaccacua

SEQ ID NO: 3702 - RNA, 21 nt, Homo sapiens
ugcaggaccaagaugagcccu

SEQ ID NO: 3703 - RNA, 21 nt, Homo sapiens
agggcucaucuugguccugca

SEQ ID NO: 3704 - RNA, 21 nt, Homo sapiens
cucccacaugcaggguuugca

SEQ ID NO: 3705 - RNA, 21 nt, Homo sapiens
ugcaaacccugcaugugggag

SEQ ID NO: 3706 - RNA, 21 nt, Homo sapiens
caucccuugcaugguggaggg

SEQ ID NO: 3707 - RNA, 21 nt, Homo sapiens
cccuccaccaugcaagggaug

SEQ ID NO: 3708 - RNA, 22 nt, Homo sapiens
aaaaugaaaugagcccagccca

SEQ ID NO: 3709 - RNA, 22 nt, Homo sapiens
ugggcugggcucauuucauuuu

SEQ ID NO: 3710 - RNA, 21 nt, Homo sapiens
agccgcggggaucgccgaggg

SEQ ID NO: 3711 - RNA, 21 nt, Homo sapiens
cccucggcgauccccgcggcu

SEQ ID NO: 3712 - RNA, 19 nt, Homo sapiens
agggaccugagugucuaag

SEQ ID NO: 3713 - RNA, 19 nt, Homo sapiens
cuuagacacucaggucccu

SEQ ID NO: 3714 - RNA, 19 nt, Homo sapiens
aggugugucuguagagucc

SEQ ID NO: 3715 - RNA, 19 nt, Homo sapiens
ggacucuacagacacaccu

SEQ ID NO: 3716 - RNA, 24 nt, Homo sapiens
cauagcccggucgcugguacauga

SEQ ID NO: 3717 - RNA, 24 nt, Homo sapiens
ucauguaccagcgaccgggcuaug

SEQ ID NO: 3718 - RNA, 18 nt, Homo sapiens
cggcuggaggugugagga

SEQ ID NO: 3719 - RNA, 18 nt, Homo sapiens
uccucacaccuccagccg

SEQ ID NO: 3720 - RNA, 18 nt, Homo sapiens
cuaagaaguugacugaag

SEQ ID NO: 3721 - RNA, 18 nt, Homo sapiens
cuucagucaacuucuuag

SEQ ID NO: 3722 - RNA, 19 nt, Homo sapiens
gacuggacaagcugaggaa

SEQ ID NO: 3723 - RNA, 19 nt, Homo sapiens
uuccucagcuuguccaguc

SEQ ID NO: 3724 - RNA, 21 nt, Homo sapiens
gcuugucgcugcgguguugcu

SEQ ID NO: 3725 - RNA, 21 nt, Homo sapiens
agcaacaccgcagcgacaagc

SEQ ID NO: 3726 - RNA, 17 nt, Homo sapiens
ggcgggugcgggggugg

SEQ ID NO: 3727 - RNA, 17 nt, Homo sapiens
ccacccccgcacccgcc

SEQ ID NO: 3728 - RNA, 21 nt, Homo sapiens
ugugucccauuauuggugauu

SEQ ID NO: 3729 - RNA, 21 nt, Homo sapiens
aaucaccaauaaugggacaca

SEQ ID NO: 3730 - RNA, 22 nt, Homo sapiens
uuuaagaaaacaccauggagau

SEQ ID NO: 3731 - RNA, 22 nt, Homo sapiens
aucuccaugguguuuucuuaaa

SEQ ID NO: 3732 - RNA, 22 nt, Homo sapiens
gcuauuucacgacaccaggguu

SEQ ID NO: 3733 - RNA, 22 nt, Homo sapiens
aacccuggugucgugaaauagc

SEQ ID NO: 3734 - RNA, 23 nt, Homo sapiens
agcugguguugugaaucaggccg

SEQ ID NO: 3735 - RNA, 23 nt, Homo sapiens
cggccugauucacaacaccagcu

SEQ ID NO: 3736 - RNA, 21 nt, Homo sapiens
aauaauacaugguugaucuuu

SEQ ID NO: 3737 - RNA, 21 nt, Homo sapiens
aaagaucaaccauguauuauu

SEQ ID NO: 3738 - RNA, 22 nt, Homo sapiens
agaucgaccguguuauauucgc

SEQ ID NO: 3739 - RNA, 22 nt, Homo sapiens
gcgaauauaacacggucgaucu

SEQ ID NO: 3740 - RNA, 22 nt, Homo sapiens
aaucaugugcagugccaauaug

SEQ ID NO: 3741 - RNA, 22 nt, Homo sapiens
cauauuggcacugcacaugauu

SEQ ID NO: 3742 - RNA, 23 nt, Homo sapiens
uuuggcacuagcacauuuuugcu

SEQ ID NO: 3743 - RNA, 23 nt, Homo sapiens
agcaaaaaugugcuagugccaaa

SEQ ID NO: 3744 - RNA, 22 nt, Homo sapiens
uccuguacugagcugccccgag

SEQ ID NO: 3745 - RNA, 22 nt, Homo sapiens
cucggggcagcucaguacagga

SEQ ID NO: 3746 - RNA, 22 nt, Homo sapiens
gcuacuucacaacaccagggcc

SEQ ID NO: 3747 - RNA, 22 nt, Homo sapiens
ggcccugguguugugaaguagc

SEQ ID NO: 3748 - RNA, 22 nt, Homo sapiens
caucaucgucucaaaugagucu

SEQ ID NO: 3749 - RNA, 22 nt, Homo sapiens
agacucauuugagacgaugaug

SEQ ID NO: 3750 - RNA, 23 nt, Homo sapiens
acuccauuuguuuugaugaugga

SEQ ID NO: 3751 - RNA, 23 nt, Homo sapiens
uccaucaucaaaacaaauggagu

SEQ ID NO: 3752 - RNA, 22 nt, Homo sapiens
cuccuacauauuagcauuaaca

SEQ ID NO: 3753 - RNA, 22 nt, Homo sapiens
uguuaaugcuaauauguaggag

SEQ ID NO: 3754 - RNA, 23 nt, Homo sapiens
uuaaugcuaaucgugauaggggu

SEQ ID NO: 3755 - RNA, 23 nt, Homo sapiens
accccuaucacgauuagcauuaa

SEQ ID NO: 3756 - RNA, 22 nt, Homo sapiens
agaucagaaggugauuguggcu

SEQ ID NO: 3757 - RNA, 22 nt, Homo sapiens
agccacaaucaccuucugaucu

SEQ ID NO: 3758 - RNA, 22 nt, Homo sapiens
uacugcagacguggcaaucaug

SEQ ID NO: 3759 - RNA, 22 nt, Homo sapiens
caugauugccacgucugcagua

SEQ ID NO: 3760 - RNA, 21 nt, Homo sapiens
guuagggccaacaucucuugg

SEQ ID NO: 3761 - RNA, 21 nt, Homo sapiens
ccaagagauguuggcccuaac

SEQ ID NO: 3762 - RNA, 21 nt, Homo sapiens
aacauagaggaaauuccacgu

SEQ ID NO: 3763 - RNA, 21 nt, Homo sapiens
acguggaauuuccucuauguu

SEQ ID NO: 3764 - RNA, 21 nt, Homo sapiens
gguggauauuccuucuauguu

SEQ ID NO: 3765 - RNA, 21 nt, Homo sapiens
aacauagaaggaauauccacc

SEQ ID NO: 3766 - RNA, 23 nt, Homo sapiens
ucauagcccuguacaaugcugcu

SEQ ID NO: 3767 - RNA, 23 nt, Homo sapiens
agcagcauuguacagggcuauga

SEQ ID NO: 3768 - RNA, 22 nt, Homo sapiens
uaacacugucugguaaagaugg

SEQ ID NO: 3769 - RNA, 22 nt, Homo sapiens
ccaucuuuaccagacaguguua

SEQ ID NO: 3770 - RNA, 22 nt, Homo sapiens
caucuuccaguacaguguugga

SEQ ID NO: 3771 - RNA, 22 nt, Homo sapiens
uccaacacuguacuggaagaug

SEQ ID NO: 3772 - RNA, 22 nt, Homo sapiens
aacuggccuacaaagucccagu

SEQ ID NO: 3773 - RNA, 22 nt, Homo sapiens
acugggacuuuguaggccaguu

SEQ ID NO: 3774 - RNA, 22 nt, Homo sapiens
ugggucuuugcgggcgagauga

SEQ ID NO: 3775 - RNA, 22 nt, Homo sapiens
ucaucucgcccgcaaagaccca

SEQ ID NO: 3776 - RNA, 21 nt, Homo sapiens
augaccuaugaauugacagac

SEQ ID NO: 3777 - RNA, 21 nt, Homo sapiens
gucugucaauucauaggucau

SEQ ID NO: 3778 - RNA, 22 nt, Homo sapiens
aagcugccaguugaagaacugu

SEQ ID NO: 3779 - RNA, 22 nt, Homo sapiens
acaguucuucaacuggcagcuu

SEQ ID NO: 3780 - RNA, 22 nt, Homo sapiens
aguucuucaguggcaagcuuua

SEQ ID NO: 3781 - RNA, 22 nt, Homo sapiens
uaaagcuugccacugaagaacu

SEQ ID NO: 3782 - RNA, 22 nt, Homo sapiens
acagauucgauucuaggggaau

SEQ ID NO: 3783 - RNA, 22 nt, Homo sapiens
auuccccuagaaucgaaucugu

SEQ ID NO: 3784 - RNA, 23 nt, Homo sapiens
uacccuguagaaccgaauuugug

SEQ ID NO: 3785 - RNA, 23 nt, Homo sapiens
cacaaauucgguucuacagggua

SEQ ID NO: 3786 - RNA, 22 nt, Homo sapiens
uagcagcacguaaauauuggcg

SEQ ID NO: 3787 - RNA, 22 nt, Homo sapiens
cgccaauauuuacgugcugcua

SEQ ID NO: 3788 - RNA, 21 nt, Homo sapiens
ugagaugaagcacuguagcuc

SEQ ID NO: 3789 - RNA, 21 nt, Homo sapiens
gagcuacagugcuucaucuca

SEQ ID NO: 3790 - RNA, 22 nt, Homo sapiens
ggugcagugcugcaucucuggu

SEQ ID NO: 3791 - RNA, 22 nt, Homo sapiens
accagagaugcagcacugcacc

SEQ ID NO: 3792 - RNA, 21 nt, Homo sapiens
uugcucacuguucuucccuag

SEQ ID NO: 3793 - RNA, 21 nt, Homo sapiens
cuagggaagaacagugagcaa

SEQ ID NO: 3794 - RNA, 18 nt, Homo sapiens
cagggucagcugagcaug

SEQ ID NO: 3795 - RNA, 18 nt, Homo sapiens
caugcucagcugacccug

SEQ ID NO: 3796 - RNA, 21 nt, Homo sapiens
aagcauucuuucauugguugg

SEQ ID NO: 3797 - RNA, 21 nt, Homo sapiens
ccaaccaaugaaagaaugcuu

SEQ ID NO: 3798 - RNA, 21 nt, Homo sapiens
ccgucgccgccacccgagccg

SEQ ID NO: 3799 - RNA, 21 nt, Homo sapiens
cggcucggguggcggcgacgg

SEQ ID NO: 3800 - RNA, 27 nt, Homo sapiens
cacuguaggugauggugagagugggca

SEQ ID NO: 3801 - RNA, 27 nt, Homo sapiens
ugcccacucucaccaucaccuacagug

SEQ ID NO: 3802 - RNA, 23 nt, Homo sapiens
gggaugguagaccggugacgugc

SEQ ID NO: 3803 - RNA, 23 nt, Homo sapiens
gcacgucaccggucuaccauccc

SEQ ID NO: 3804 - RNA, 21 nt, Homo sapiens
uaggacacauggucuacuucu

SEQ ID NO: 3805 - RNA, 21 nt, Homo sapiens
agaaguagaccauguguccua

SEQ ID NO: 3806 - RNA, 22 nt, Homo sapiens
cuccugagccauucugagccuc

SEQ ID NO: 3807 - RNA, 22 nt, Homo sapiens
gaggcucagaauggcucaggag

SEQ ID NO: 3808 - RNA, 21 nt, Homo sapiens
gugccagcugcagugggggag

SEQ ID NO: 3809 - RNA, 21 nt, Homo sapiens
cucccccacugcagcuggcac

SEQ ID NO: 3810 - RNA, 21 nt, Homo sapiens
cccggagccaggaugcagcuc

SEQ ID NO: 3811 - RNA, 21 nt, Homo sapiens
gagcugcauccuggcuccggg

SEQ ID NO: 3812 - RNA, 21 nt, Homo sapiens
ucguggccuggucuccauuau

SEQ ID NO: 3813 - RNA, 21 nt, Homo sapiens
auaauggagaccaggccacga

SEQ ID NO: 3814 - RNA, 20 nt, Homo sapiens
ucugcaggguuugcuuugag

SEQ ID NO: 3815 - RNA, 20 nt, Homo sapiens
cucaaagcaaacccugcaga

SEQ ID NO: 3816 - RNA, 21 nt, Homo sapiens
uguucauguagauguuuaagc

SEQ ID NO: 3817 - RNA, 21 nt, Homo sapiens
gcuuaaacaucuacaugaaca

SEQ ID NO: 3818 - RNA, 18 nt, Homo sapiens
ucagcuggcccucauuuc

SEQ ID NO: 3819 - RNA, 18 nt, Homo sapiens
gaaaugagggccagcuga

SEQ ID NO: 3820 - RNA, 21 nt, Homo sapiens
uggcagggaggcugggagggg

SEQ ID NO: 3821 - RNA, 21 nt, Homo sapiens
ccccucccagccucccugcca

SEQ ID NO: 3822 - RNA, 20 nt, Homo sapiens
ucacuguucagacaggcgga

SEQ ID NO: 3823 - RNA, 20 nt, Homo sapiens
uccgccugucugaacaguga

SEQ ID NO: 3824 - RNA, 21 nt, Homo sapiens
ccccaccuccucucuccucag

SEQ ID NO: 3825 - RNA, 21 nt, Homo sapiens
cugaggagagaggaggugggg

SEQ ID NO: 3826 - RNA, 19 nt, Homo sapiens
gugaggacucgggaggugg

SEQ ID NO: 3827 - RNA, 19 nt, Homo sapiens
ccaccucccgaguccucac

SEQ ID NO: 3828 - RNA, 22 nt, Homo sapiens
ugagccccugugccgcccccag

SEQ ID NO: 3829 - RNA, 22 nt, Homo sapiens
cugggggcggcacaggggcuca

SEQ ID NO: 3830 - RNA, 22 nt, Homo sapiens
guggguacggcccagugggggg

SEQ ID NO: 3831 - RNA, 22 nt, Homo sapiens
ccccccacugggccguacccac

SEQ ID NO: 3832 - RNA, 22 nt, Homo sapiens
ucaccagcccuguguucccuag

SEQ ID NO: 3833 - RNA, 22 nt, Homo sapiens
cuagggaacacagggcugguga

SEQ ID NO: 3834 - RNA, 26 nt, Homo sapiens
gugagggcaugcaggccuggaugggg

SEQ ID NO: 3835 - RNA, 26 nt, Homo sapiens
ccccauccaggccugcaugcccucac

SEQ ID NO: 3836 - RNA, 23 nt, Homo sapiens
cucucaccacugcccucccacag

SEQ ID NO: 3837 - RNA, 23 nt, Homo sapiens
cugugggagggcaguggugagag

SEQ ID NO: 3838 - RNA, 24 nt, Homo sapiens
guggguaggguuugggggagagcg

SEQ ID NO: 3839 - RNA, 24 nt, Homo sapiens
cgcucucccccaaacccuacccac

SEQ ID NO: 3840 - RNA, 20 nt, Homo sapiens
gugucugggcggacagcugc

SEQ ID NO: 3841 - RNA, 20 nt, Homo sapiens
gcagcuguccgcccagacac

SEQ ID NO: 3842 - RNA, 20 nt, Homo sapiens
cuuccucgucugucugcccc

SEQ ID NO: 3843 - RNA, 20 nt, Homo sapiens
ggggcagacagacgaggaag

SEQ ID NO: 3844 - RNA, 23 nt, Homo sapiens
gugagugggagccccagugugug

SEQ ID NO: 3845 - RNA, 23 nt, Homo sapiens
cacacacuggggcucccacucac

SEQ ID NO: 3846 - RNA, 27 nt, Homo sapiens
accuucuuguauaagcacugugcuaaa

SEQ ID NO: 3847 - RNA, 27 nt, Homo sapiens
uuuagcacagugcuuauacaagaaggu

SEQ ID NO: 3848 - RNA, 22 nt, Homo sapiens
ggcgacaaaacgagacccuguc

SEQ ID NO: 3849 - RNA, 22 nt, Homo sapiens
gacagggucucguuuugucgcc

SEQ ID NO: 3850 - RNA, 22 nt, Homo sapiens
uugcuugaacccaggaagugga

SEQ ID NO: 3851 - RNA, 22 nt, Homo sapiens
uccacuuccuggguucaagcaa

SEQ ID NO: 3852 - RNA, 19 nt, Homo sapiens
ggagauggagguugcagug

SEQ ID NO: 3853 - RNA, 19 nt, Homo sapiens
cacugcaaccuccaucucc

SEQ ID NO: 3854 - RNA, 21 nt, Homo sapiens
accacugcacuccagccugag

SEQ ID NO: 3855 - RNA, 21 nt, Homo sapiens
cucaggcuggagugcaguggu

SEQ ID NO: 3856 - RNA, 22 nt, Homo sapiens
ggugguugaggcugcaguaagu

SEQ ID NO: 3857 - RNA, 22 nt, Homo sapiens
acuuacugcagccucaaccacc

SEQ ID NO: 3858 - RNA, 17 nt, Homo sapiens
ucgccuccuccucuccc

SEQ ID NO: 3859 - RNA, 17 nt, Homo sapiens
gggagaggaggaggcga

SEQ ID NO: 3860 - RNA, 22 nt, Homo sapiens
ucuauacagacccuggcuuuuc

SEQ ID NO: 3861 - RNA, 22 nt, Homo sapiens
gaaaagccagggucuguauaga

SEQ ID NO: 3862 - RNA, 22 nt, Homo sapiens
ucugggcaacaaagugagaccu

SEQ ID NO: 3863 - RNA, 22 nt, Homo sapiens
aggucucacuuuguugcccaga

SEQ ID NO: 3864 - RNA, 21 nt, Homo sapiens
gaucucacuuuguugcccagg

SEQ ID NO: 3865 - RNA, 21 nt, Homo sapiens
ccugggcaacaaagugagauc

SEQ ID NO: 3866 - RNA, 20 nt, Homo sapiens
ucgcgccccggcucccguuc

SEQ ID NO: 3867 - RNA, 20 nt, Homo sapiens
gaacgggagccggggcgcga

SEQ ID NO: 3868 - RNA, 25 nt, Homo sapiens
ugggaacggguuccggcagacgcug

SEQ ID NO: 3869 - RNA, 25 nt, Homo sapiens
cagcgucugccggaacccguuccca

SEQ ID NO: 3870 - RNA, 21 nt, Homo sapiens
uuaggccgcagaucuggguga

SEQ ID NO: 3871 - RNA, 21 nt, Homo sapiens
ucacccagaucugcggccuaa

SEQ ID NO: 3872 - RNA, 22 nt, Homo sapiens
aauaggccacggaucugggcaa

SEQ ID NO: 3873 - RNA, 22 nt, Homo sapiens
uugcccagauccguggccuauu

SEQ ID NO: 3874 - RNA, 21 nt, Homo sapiens
cacccagaucugcggccuaau

SEQ ID NO: 3875 - RNA, 21 nt, Homo sapiens
auuaggccgcagaucugggug

SEQ ID NO: 3876 - RNA, 22 nt, Homo sapiens
uuagggcccuggcuccaucucc

SEQ ID NO: 3877 - RNA, 22 nt, Homo sapiens
ggagauggagccagggcccuaa

SEQ ID NO: 3878 - RNA, 22 nt, Homo sapiens
uucauucggcuguccagaugua

SEQ ID NO: 3879 - RNA, 22 nt, Homo sapiens
uacaucuggacagccgaaugaa

SEQ ID NO: 3880 - RNA, 24 nt, Homo sapiens
uugcagcugccugggagugacuuc

SEQ ID NO: 3881 - RNA, 24 nt, Homo sapiens
gaagucacucccaggcagcugcaa

SEQ ID NO: 3882 - RNA, 21 nt, Homo sapiens
uugggacauacuuaugcuaaa

SEQ ID NO: 3883 - RNA, 21 nt, Homo sapiens
uuuagcauaaguaugucccaa

SEQ ID NO: 3884 - RNA, 22 nt, Homo sapiens
ucucacuguagccucgaacccc

SEQ ID NO: 3885 - RNA, 22 nt, Homo sapiens
gggguucgaggcuacagugaga

SEQ ID NO: 3886 - RNA, 22 nt, Homo sapiens
uuugaggcuacagugagaugug

SEQ ID NO: 3887 - RNA, 22 nt, Homo sapiens
cacaucucacuguagccucaaa

SEQ ID NO: 3888 - RNA, 18 nt, Homo sapiens
cagggaggugaaugugau

SEQ ID NO: 3889 - RNA, 18 nt, Homo sapiens
aucacauucaccucccug

SEQ ID NO: 3890 - RNA, 19 nt, Homo sapiens
gaugaugcugcugaugcug

SEQ ID NO: 3891 - RNA, 19 nt, Homo sapiens
cagcaucagcagcaucauc

SEQ ID NO: 3892 - RNA, 24 nt, Homo sapiens
ccagacagaauucuaugcacuuuc

SEQ ID NO: 3893 - RNA, 24 nt, Homo sapiens
gaaagugcauagaauucugucugg

SEQ ID NO: 3894 - RNA, 22 nt, Homo sapiens
cuccuggggcccgcacucucgc

SEQ ID NO: 3895 - RNA, 22 nt, Homo sapiens
gcgagagugcgggccccaggag

SEQ ID NO: 3896 - RNA, 21 nt, Homo sapiens
cuccguuugccuguuucgcug

SEQ ID NO: 3897 - RNA, 21 nt, Homo sapiens
cagcgaaacaggcaaacggag

SEQ ID NO: 3898 - RNA, 22 nt, Homo sapiens
cucggcgcggggcgcgggcucc

SEQ ID NO: 3899 - RNA, 22 nt, Homo sapiens
ggagcccgcgccccgcgccgag

SEQ ID NO: 3900 - RNA, 21 nt, Homo sapiens
gcccuccgcccgugcaccccg

SEQ ID NO: 3901 - RNA, 21 nt, Homo sapiens
cggggugcacgggcggagggc

SEQ ID NO: 3902 - RNA, 22 nt, Homo sapiens
gcccgcguguggagccaggugu

SEQ ID NO: 3903 - RNA, 22 nt, Homo sapiens
acaccuggcuccacacgcgggc

SEQ ID NO: 3904 - RNA, 22 nt, Homo sapiens
aaaaccgucuaguuacaguugu

SEQ ID NO: 3905 - RNA, 22 nt, Homo sapiens
acaacuguaacuagacgguuuu

SEQ ID NO: 3906 - RNA, 18 nt, Homo sapiens
uccagugcccuccucucc

SEQ ID NO: 3907 - RNA, 18 nt, Homo sapiens
ggagaggagggcacugga

SEQ ID NO: 3908 - RNA, 18 nt, Homo sapiens
ugaggcaguagauugaau

SEQ ID NO: 3909 - RNA, 18 nt, Homo sapiens
auucaaucuacugccuca

SEQ ID NO: 3910 - RNA, 22 nt, Homo sapiens
aggggcuggcuuuccucugguc

SEQ ID NO: 3911 - RNA, 22 nt, Homo sapiens
gaccagaggaaagccagccccu

SEQ ID NO: 3912 - RNA, 22 nt, Homo sapiens
uggagagaaaggcaguuccuga

SEQ ID NO: 3913 - RNA, 22 nt, Homo sapiens
ucaggaacugccuuucucucca

SEQ ID NO: 3914 - RNA, 22 nt, Homo sapiens
ucgugucuuguguugcagccgg

SEQ ID NO: 3915 - RNA, 22 nt, Homo sapiens
ccggcugcaacacaagacacga

SEQ ID NO: 3916 - RNA, 22 nt, Homo sapiens
ggcuacaacacaggacccgggc

SEQ ID NO: 3917 - RNA, 22 nt, Homo sapiens
gcccggguccuguguuguagcc

SEQ ID NO: 3918 - RNA, 21 nt, Homo sapiens
cggcggggacggcgauugguc

SEQ ID NO: 3919 - RNA, 21 nt, Homo sapiens
gaccaaucgccguccccgccg

SEQ ID NO: 3920 - RNA, 22 nt, Homo sapiens
cgcaggggccgggugcucaccg

SEQ ID NO: 3921 - RNA, 22 nt, Homo sapiens
cggugagcacccggccccugcg

SEQ ID NO: 3922 - RNA, 21 nt, Homo sapiens
ugagugccggugccugcccug

SEQ ID NO: 3923 - RNA, 21 nt, Homo sapiens
cagggcaggcaccggcacuca

SEQ ID NO: 3924 - RNA, 22 nt, Homo sapiens
gcugcgcuuggauuucgucccc

SEQ ID NO: 3925 - RNA, 22 nt, Homo sapiens
ggggacgaaauccaagcgcagc

SEQ ID NO: 3926 - RNA, 23 nt, Homo sapiens
caacggaaucccaaaagcagcug

SEQ ID NO: 3927 - RNA, 23 nt, Homo sapiens
cagcugcuuuugggauuccguug

SEQ ID NO: 3928 - RNA, 22 nt, Homo sapiens
ucaggccaggcacaguggcuca

SEQ ID NO: 3929 - RNA, 22 nt, Homo sapiens
ugagccacugugccuggccuga

SEQ ID NO: 3930 - RNA, 19 nt, Homo sapiens
accgugcaaagguagcaua

SEQ ID NO: 3931 - RNA, 19 nt, Homo sapiens
uaugcuaccuuugcacggu

SEQ ID NO: 3932 - RNA, 20 nt, Homo sapiens
ccuccugcccuccuugcugu

SEQ ID NO: 3933 - RNA, 20 nt, Homo sapiens
acagcaaggagggcaggagg

SEQ ID NO: 3934 - RNA, 20 nt, Homo sapiens
uguuuugauaacaguaaugu

SEQ ID NO: 3935 - RNA, 20 nt, Homo sapiens
acauuacuguuaucaaaaca

SEQ ID NO: 3936 - RNA, 23 nt, Homo sapiens
guguuaauuaaaccucuauuuac

SEQ ID NO: 3937 - RNA, 23 nt, Homo sapiens
guaaauagagguuuaauuaacac

SEQ ID NO: 3938 - RNA, 23 nt, Homo sapiens
cuguaauauaaauuuaauuuauu

SEQ ID NO: 3939 - RNA, 23 nt, Homo sapiens
aauaaauuaaauuuauauuacag

SEQ ID NO: 3940 - RNA, 22 nt, Homo sapiens
uuggggaaacggccgcugagug

SEQ ID NO: 3941 - RNA, 22 nt, Homo sapiens
cacucagcggccguuuccccaa

SEQ ID NO: 3942 - RNA, 21 nt, Homo sapiens
ccucccaugccaagaacuccc

SEQ ID NO: 3943 - RNA, 21 nt, Homo sapiens
gggaguucuuggcaugggagg

SEQ ID NO: 3944 - RNA, 21 nt, Homo sapiens
gguucuuagcauaggaggucu

SEQ ID NO: 3945 - RNA, 21 nt, Homo sapiens
agaccuccuaugcuaagaacc

SEQ ID NO: 3946 - RNA, 21 nt, Homo sapiens
uguucucuuugccaaggacag

SEQ ID NO: 3947 - RNA, 21 nt, Homo sapiens
cuguccuuggcaaagagaaca

SEQ ID NO: 3948 - RNA, 22 nt, Homo sapiens
aaaucucugcaggcaaauguga

SEQ ID NO: 3949 - RNA, 22 nt, Homo sapiens
ucacauuugccugcagagauuu

SEQ ID NO: 3950 - RNA, 22 nt, Homo sapiens
caugguucugucaagcaccgcg

SEQ ID NO: 3951 - RNA, 22 nt, Homo sapiens
cgcggugcuugacagaaccaug

SEQ ID NO: 3952 - RNA, 21 nt, Homo sapiens
uugugcuugaucuaaccaugu

SEQ ID NO: 3953 - RNA, 21 nt, Homo sapiens
acaugguuagaucaagcacaa

SEQ ID NO: 3954 - RNA, 22 nt, Homo sapiens
ucugcaagugucagaggcgagg

SEQ ID NO: 3955 - RNA, 22 nt, Homo sapiens
ccucgccucugacacuugcaga

SEQ ID NO: 3956 - RNA, 22 nt, Homo sapiens
gagagcaguguguguugccugg

SEQ ID NO: 3957 - RNA, 22 nt, Homo sapiens
ccaggcaacacacacugcucuc

SEQ ID NO: 3958 - RNA, 22 nt, Homo sapiens
aucacauugccagugauuaccc

SEQ ID NO: 3959 - RNA, 22 nt, Homo sapiens
ggguaaucacuggcaaugugau

SEQ ID NO: 3960 - RNA, 22 nt, Homo sapiens
agcagaggcagagaggcucagg

SEQ ID NO: 3961 - RNA, 22 nt, Homo sapiens
ccugagccucucugccucugcu

SEQ ID NO: 3962 - RNA, 23 nt, Homo sapiens
ugaggcucuguuagccuuggcuc

SEQ ID NO: 3963 - RNA, 23 nt, Homo sapiens
gagccaaggcuaacagagccuca

SEQ ID NO: 3964 - RNA, 22 nt, Homo sapiens
uaucauggaguugguaaagcac

SEQ ID NO: 3965 - RNA, 22 nt, Homo sapiens
gugcuuuaccaacuccaugaua

SEQ ID NO: 3966 - RNA, 22 nt, Homo sapiens
guuuuaccaccuccaggagacu

SEQ ID NO: 3967 - RNA, 22 nt, Homo sapiens
agucuccuggaggugguaaaac

SEQ ID NO: 3968 - RNA, 22 nt, Homo sapiens
cgccucuucagcgcugucuucc

SEQ ID NO: 3969 - RNA, 22 nt, Homo sapiens
ggaagacagcgcugaagaggcg

SEQ ID NO: 3970 - RNA, 23 nt, Homo sapiens
caggcagugacuguucagacguc

SEQ ID NO: 3971 - RNA, 23 nt, Homo sapiens
gacgucugaacagucacugccug

SEQ ID NO: 3972 - RNA, 23 nt, Homo sapiens
agaauugcguuuggacaaucagu

SEQ ID NO: 3973 - RNA, 23 nt, Homo sapiens
acugauuguccaaacgcaauucu

SEQ ID NO: 3974 - RNA, 22 nt, Homo sapiens
agauguccagccacaauucucg

SEQ ID NO: 3975 - RNA, 22 nt, Homo sapiens
cgagaauuguggcuggacaucu

SEQ ID NO: 3976 - RNA, 24 nt, Homo sapiens
agcagaagcagggagguucuccca

SEQ ID NO: 3977 - RNA, 24 nt, Homo sapiens
ugggagaaccucccugcuucugcu

SEQ ID NO: 3978 - RNA, 22 nt, Homo sapiens
uaugugggaugguaaaccgcuu

SEQ ID NO: 3979 - RNA, 22 nt, Homo sapiens
aagcgguuuaccaucccacaua

SEQ ID NO: 3980 - RNA, 22 nt, Homo sapiens
ugguuuaccgucccacauacau

SEQ ID NO: 3981 - RNA, 22 nt, Homo sapiens
auguaugugggacgguaaacca

SEQ ID NO: 3982 - RNA, 23 nt, Homo sapiens
cagugcaaugauauugucaaagc

SEQ ID NO: 3983 - RNA, 23 nt, Homo sapiens
gcuuugacaauaucauugcacug

SEQ ID NO: 3984 - RNA, 17 nt, Homo sapiens
uaauugcuuccauguuu

SEQ ID NO: 3985 - RNA, 17 nt, Homo sapiens
aaacauggaagcaauua

SEQ ID NO: 3986 - RNA, 23 nt, Homo sapiens
uugccacacugcaacaccuuaca

SEQ ID NO: 3987 - RNA, 23 nt, Homo sapiens
uguaagguguugcaguguggcaa

SEQ ID NO: 3988 - RNA, 21 nt, Homo sapiens
ucuggcuguuguggugugcaa

SEQ ID NO: 3989 - RNA, 21 nt, Homo sapiens
uugcacaccacaacagccaga

SEQ ID NO: 3990 - RNA, 22 nt, Homo sapiens
gauaucagcucaguaggcaccg

SEQ ID NO: 3991 - RNA, 22 nt, Homo sapiens
cggugccuacugagcugauauc

SEQ ID NO: 3992 - RNA, 21 nt, Homo sapiens
guuccugcugaacugagccag

SEQ ID NO: 3993 - RNA, 21 nt, Homo sapiens
cuggcucaguucagcaggaac

SEQ ID NO: 3994 - RNA, 20 nt, Homo sapiens
auauggguuuacuaguuggu

SEQ ID NO: 3995 - RNA, 20 nt, Homo sapiens
accaacuaguaaacccauau

SEQ ID NO: 3996 - RNA, 22 nt, Homo sapiens
ugcuaugccaacauauugccau

SEQ ID NO: 3997 - RNA, 22 nt, Homo sapiens
auggcaauauguuggcauagca

SEQ ID NO: 3998 - RNA, 21 nt, Homo sapiens
aggcaagaugcuggcauagcu

SEQ ID NO: 3999 - RNA, 21 nt, Homo sapiens
agcuaugccagcaucuugccu

SEQ ID NO: 4000 - RNA, 18 nt, Homo sapiens
cggggcggcaggggccuc

SEQ ID NO: 4001 - RNA, 18 nt, Homo sapiens
gaggccccugccgccccg

SEQ ID NO: 4002 - RNA, 19 nt, Homo sapiens
aaaagcuggguugagagga

SEQ ID NO: 4003 - RNA, 19 nt, Homo sapiens
uccucucaacccagcuuuu

SEQ ID NO: 4004 - RNA, 22 nt, Homo sapiens
cccaauacacggucgaccucuu

SEQ ID NO: 4005 - RNA, 22 nt, Homo sapiens
aagaggucgaccguguauuggg

SEQ ID NO: 4006 - RNA, 23 nt, Homo sapiens
agguuguccguggugaguucgca

SEQ ID NO: 4007 - RNA, 23 nt, Homo sapiens
ugcgaacucaccacggacaaccu

SEQ ID NO: 4008 - RNA, 23 nt, Homo sapiens
gcaaagcacacggccugcagaga

SEQ ID NO: 4009 - RNA, 23 nt, Homo sapiens
ucucugcaggccgugugcuuugc

SEQ ID NO: 4010 - RNA, 22 nt, Homo sapiens
ucucugggccugugucuuaggc

SEQ ID NO: 4011 - RNA, 22 nt, Homo sapiens
gccuaagacacaggcccagaga

SEQ ID NO: 4012 - RNA, 21 nt, Homo sapiens
gccccugggccuauccuagaa

SEQ ID NO: 4013 - RNA, 21 nt, Homo sapiens
uucuaggauaggcccaggggc

SEQ ID NO: 4014 - RNA, 22 nt, Homo sapiens
uccgucucaguuacuuuauagc

SEQ ID NO: 4015 - RNA, 22 nt, Homo sapiens
gcuauaaaguaacugagacgga

SEQ ID NO: 4016 - RNA, 22 nt, Homo sapiens
aacacaccuauucaaggauuca

SEQ ID NO: 4017 - RNA, 22 nt, Homo sapiens
ugaauccuugaauagguguguu

SEQ ID NO: 4018 - RNA, 24 nt, Homo sapiens
aauccuuggaaccuaggugugagu

SEQ ID NO: 4019 - RNA, 24 nt, Homo sapiens
acucacaccuagguuccaaggauu

SEQ ID NO: 4020 - RNA, 22 nt, Homo sapiens
uaaugccccuaaaaauccuuau

SEQ ID NO: 4021 - RNA, 22 nt, Homo sapiens
auaaggauuuuuaggggcauua

SEQ ID NO: 4022 - RNA, 23 nt, Homo sapiens
agggacuuuugggggcagaugug

SEQ ID NO: 4023 - RNA, 23 nt, Homo sapiens
cacaucugcccccaaaagucccu

SEQ ID NO: 4024 - RNA, 22 nt, Homo sapiens
uaaugccccuaaaaauccuuau

SEQ ID NO: 4025 - RNA, 22 nt, Homo sapiens
auaaggauuuuuaggggcauua

SEQ ID NO: 4026 - RNA, 22 nt, Homo sapiens
agggacuuucaggggcagcugu

SEQ ID NO: 4027 - RNA, 22 nt, Homo sapiens
acagcugccccugaaagucccu

SEQ ID NO: 4028 - RNA, 24 nt, Homo sapiens
gaaaaugaugaguagugacugaug

SEQ ID NO: 4029 - RNA, 24 nt, Homo sapiens
caucagucacuacucaucauuuuc

SEQ ID NO: 4030 - RNA, 23 nt, Homo sapiens
ugagcaccacacaggccgggcgc

SEQ ID NO: 4031 - RNA, 23 nt, Homo sapiens
gcgcccggccuguguggugcuca

SEQ ID NO: 4032 - RNA, 21 nt, Homo sapiens
gcuggucugcguggugcucgg

SEQ ID NO: 4033 - RNA, 21 nt, Homo sapiens
ccgagcaccacgcagaccagc

SEQ ID NO: 4034 - RNA, 22 nt, Homo sapiens
gccugcugggguggaaccuggu

SEQ ID NO: 4035 - RNA, 22 nt, Homo sapiens
accagguuccaccccagcaggc

SEQ ID NO: 4036 - RNA, 23 nt, Homo sapiens
gaagugcuucgauuuuggggugu

SEQ ID NO: 4037 - RNA, 23 nt, Homo sapiens
acaccccaaaaucgaagcacuuc

SEQ ID NO: 4038 - RNA, 22 nt, Homo sapiens
acucaaaaugggggcgcuuucc

SEQ ID NO: 4039 - RNA, 22 nt, Homo sapiens
ggaaagcgcccccauuuugagu

SEQ ID NO: 4040 - RNA, 22 nt, Homo sapiens
uauguaacaugguccacuaacu

SEQ ID NO: 4041 - RNA, 22 nt, Homo sapiens
aguuaguggaccauguuacaua

SEQ ID NO: 4042 - RNA, 21 nt, Homo sapiens
ugguagacuauggaacguagg

SEQ ID NO: 4043 - RNA, 21 nt, Homo sapiens
ccuacguuccauagucuacca

SEQ ID NO: 4044 - RNA, 22 nt, Homo sapiens
uguagauacgagcaccagccac

SEQ ID NO: 4045 - RNA, 22 nt, Homo sapiens
guggcuggugcucguaucuaca

SEQ ID NO: 4046 - RNA, 23 nt, Homo sapiens
acaggcggcuguagcaauggggg

SEQ ID NO: 4047 - RNA, 23 nt, Homo sapiens
cccccauugcuacagccgccugu

SEQ ID NO: 4048 - RNA, 22 nt, Homo sapiens
aauucccuuguagauaacccgg

SEQ ID NO: 4049 - RNA, 22 nt, Homo sapiens
ccggguuaucuacaagggaauu

SEQ ID NO: 4050 - RNA, 22 nt, Homo sapiens
uacgcgcagaccacaggauguc

SEQ ID NO: 4051 - RNA, 22 nt, Homo sapiens
gacauccuguggucugcgcgua

SEQ ID NO: 4052 - RNA, 22 nt, Homo sapiens
uuacacacaacugaggaucaua

SEQ ID NO: 4053 - RNA, 22 nt, Homo sapiens
uaugauccucaguuguguguaa

SEQ ID NO: 4054 - RNA, 23 nt, Homo sapiens
uagcccccaggcuucacuuggcg

SEQ ID NO: 4055 - RNA, 23 nt, Homo sapiens
cgccaagugaagccugggggcua

SEQ ID NO: 4056 - RNA, 23 nt, Homo sapiens
agggcauaggagaggguugauau

SEQ ID NO: 4057 - RNA, 23 nt, Homo sapiens
auaucaacccucuccuaugcccu

SEQ ID NO: 4058 - RNA, 22 nt, Homo sapiens
gaauguugcucggugaaccccu

SEQ ID NO: 4059 - RNA, 22 nt, Homo sapiens
agggguucaccgagcaacauuc

SEQ ID NO: 4060 - RNA, 23 nt, Homo sapiens
agguuacccgagcaacuuugcau

SEQ ID NO: 4061 - RNA, 23 nt, Homo sapiens
augcaaaguugcucggguaaccu

SEQ ID NO: 4062 - RNA, 22 nt, Homo sapiens
uauguaacacgguccacuaacc

SEQ ID NO: 4063 - RNA, 22 nt, Homo sapiens
gguuaguggaccguguuacaua

SEQ ID NO: 4064 - RNA, 21 nt, Homo sapiens
uaguagaccguauagcguacg

SEQ ID NO: 4065 - RNA, 21 nt, Homo sapiens
cguacgcuauacggucuacua

SEQ ID NO: 4066 - RNA, 23 nt, Homo sapiens
acuucaccugguccacuagccgu

SEQ ID NO: 4067 - RNA, 23 nt, Homo sapiens
acggcuaguggaccaggugaagu

SEQ ID NO: 4068 - RNA, 18 nt, Homo sapiens
guguucucugauggacag

SEQ ID NO: 4069 - RNA, 18 nt, Homo sapiens
cuguccaucagagaacac

SEQ ID NO: 4070 - RNA, 22 nt, Homo sapiens
caggucgucuugcagggcuucu

SEQ ID NO: 4071 - RNA, 22 nt, Homo sapiens
agaagcccugcaagacgaccug

SEQ ID NO: 4072 - RNA, 21 nt, Homo sapiens
ugucuugcaggccgucaugca

SEQ ID NO: 4073 - RNA, 21 nt, Homo sapiens
ugcaugacggccugcaagaca

SEQ ID NO: 4074 - RNA, 22 nt, Homo sapiens
aucaugaugggcuccucggugu

SEQ ID NO: 4075 - RNA, 22 nt, Homo sapiens
acaccgaggagcccaucaugau

SEQ ID NO: 4076 - RNA, 23 nt, Homo sapiens
uugcuaguugcacuccucucugu

SEQ ID NO: 4077 - RNA, 23 nt, Homo sapiens
acagagaggagugcaacuagcaa

SEQ ID NO: 4078 - RNA, 25 nt, Homo sapiens
uaggcaguguauugcuagcggcugu

SEQ ID NO: 4079 - RNA, 25 nt, Homo sapiens
acagccgcuagcaauacacugccua

SEQ ID NO: 4080 - RNA, 22 nt, Homo sapiens
auuggggacauuuugcauucau

SEQ ID NO: 4081 - RNA, 22 nt, Homo sapiens
augaaugcaaaauguccccaau

SEQ ID NO: 4082 - RNA, 22 nt, Homo sapiens
uuuugcgauguguuccuaauau

SEQ ID NO: 4083 - RNA, 22 nt, Homo sapiens
auauuaggaacacaucgcaaaa

SEQ ID NO: 4084 - RNA, 22 nt, Homo sapiens
uugggaucauuuugcauccaua

SEQ ID NO: 4085 - RNA, 22 nt, Homo sapiens
uauggaugcaaaaugaucccaa

SEQ ID NO: 4086 - RNA, 22 nt, Homo sapiens
uuuugcaauauguuccugaaua

SEQ ID NO: 4087 - RNA, 22 nt, Homo sapiens
uauucaggaacauauugcaaaa

SEQ ID NO: 4088 - RNA, 21 nt, Homo sapiens
gcaguccaugggcauauacac

SEQ ID NO: 4089 - RNA, 21 nt, Homo sapiens
guguauaugcccauggacugc

SEQ ID NO: 4090 - RNA, 22 nt, Homo sapiens
uaugugccuuuggacuacaucg

SEQ ID NO: 4091 - RNA, 22 nt, Homo sapiens
cgauguaguccaaaggcacaua

SEQ ID NO: 4092 - RNA, 23 nt, Homo sapiens
auacacauacacgcaacacacau

SEQ ID NO: 4093 - RNA, 23 nt, Homo sapiens
auguguguugcguguauguguau

SEQ ID NO: 4094 - RNA, 23 nt, Homo sapiens
uugcaugucagauuguaauuccc

SEQ ID NO: 4095 - RNA, 23 nt, Homo sapiens
gggaauuacaaucugacaugcaa

SEQ ID NO: 4096 - RNA, 21 nt, Homo sapiens
ucacuccucuccucccgucuu

SEQ ID NO: 4097 - RNA, 21 nt, Homo sapiens
aagacgggaggagaggaguga

SEQ ID NO: 4098 - RNA, 22 nt, Homo sapiens
ucaggcucaguccccucccgau

SEQ ID NO: 4099 - RNA, 22 nt, Homo sapiens
aucgggaggggacugagccuga

SEQ ID NO: 4100 - RNA, 22 nt, Homo sapiens
gucauacacggcucuccucucu

SEQ ID NO: 4101 - RNA, 22 nt, Homo sapiens
agagaggagagccguguaugac

SEQ ID NO: 4102 - RNA, 22 nt, Homo sapiens
agaggcuggccgugaugaauuc

SEQ ID NO: 4103 - RNA, 22 nt, Homo sapiens
gaauucaucacggccagccucu

SEQ ID NO: 4104 - RNA, 22 nt, Homo sapiens
aaucauacagggacauccaguu

SEQ ID NO: 4105 - RNA, 22 nt, Homo sapiens
aacuggaugucccuguaugauu

SEQ ID NO: 4106 - RNA, 22 nt, Homo sapiens
aaucguacagggucauccacuu

SEQ ID NO: 4107 - RNA, 22 nt, Homo sapiens
aaguggaugacccuguacgauu

SEQ ID NO: 4108 - RNA, 21 nt, Homo sapiens
uugaaaggcuauuucuugguc

SEQ ID NO: 4109 - RNA, 21 nt, Homo sapiens
gaccaagaaauagccuuucaa

SEQ ID NO: 4110 - RNA, 21 nt, Homo sapiens
cccagauaauggcacucucaa

SEQ ID NO: 4111 - RNA, 21 nt, Homo sapiens
uugagagugccauuaucuggg

SEQ ID NO: 4112 - RNA, 22 nt, Homo sapiens
caaccuggaggacuccaugcug

SEQ ID NO: 4113 - RNA, 22 nt, Homo sapiens
cagcauggaguccuccagguug

SEQ ID NO: 4114 - RNA, 20 nt, Homo sapiens
ccauggaucuccaggugggu

SEQ ID NO: 4115 - RNA, 20 nt, Homo sapiens
acccaccuggagauccaugg

SEQ ID NO: 4116 - RNA, 22 nt, Homo sapiens
cuuaugcaagauucccuucuac

SEQ ID NO: 4117 - RNA, 22 nt, Homo sapiens
guagaagggaaucuugcauaag

SEQ ID NO: 4118 - RNA, 22 nt, Homo sapiens
aguggggaacccuuccaugagg

SEQ ID NO: 4119 - RNA, 22 nt, Homo sapiens
ccucauggaaggguuccccacu

SEQ ID NO: 4120 - RNA, 23 nt, Homo sapiens
aggaccugcgggacaagauucuu

SEQ ID NO: 4121 - RNA, 23 nt, Homo sapiens
aagaaucuugucccgcagguccu

SEQ ID NO: 4122 - RNA, 22 nt, Homo sapiens
caaaccacacugugguguuaga

SEQ ID NO: 4123 - RNA, 22 nt, Homo sapiens
ucuaacaccacagugugguuug

SEQ ID NO: 4124 - RNA, 21 nt, Homo sapiens
cagcagcacacugugguuugu

SEQ ID NO: 4125 - RNA, 21 nt, Homo sapiens
acaaaccacagugugcugcug

SEQ ID NO: 4126 - RNA, 23 nt, Homo sapiens
uuucaagccagggggcguuuuuc

SEQ ID NO: 4127 - RNA, 23 nt, Homo sapiens
gaaaaacgcccccuggcuugaaa

SEQ ID NO: 4128 - RNA, 20 nt, Homo sapiens
ucacuaccugacaauacagu

SEQ ID NO: 4129 - RNA, 20 nt, Homo sapiens
acuguauugucagguaguga

SEQ ID NO: 4130 - RNA, 21 nt, Homo sapiens
ugcuguauugucagguaguga

SEQ ID NO: 4131 - RNA, 21 nt, Homo sapiens
ucacuaccugacaauacagca

SEQ ID NO: 4132 - RNA, 22 nt, Homo sapiens
uucugccucuguccagguccuu

SEQ ID NO: 4133 - RNA, 22 nt, Homo sapiens
aaggaccuggacagaggcagaa

SEQ ID NO: 4134 - RNA, 24 nt, Homo sapiens
agggcuggacucagcggcggagcu

SEQ ID NO: 4135 - RNA, 24 nt, Homo sapiens
agcuccgccgcugaguccagcccu

SEQ ID NO: 4136 - RNA, 21 nt, Homo sapiens
ugacugccucacugaccacuu

SEQ ID NO: 4137 - RNA, 21 nt, Homo sapiens
aaguggucagugaggcaguca

SEQ ID NO: 4138 - RNA, 24 nt, Homo sapiens
aauuugguuucugaggcacuuagu

SEQ ID NO: 4139 - RNA, 24 nt, Homo sapiens
acuaagugccucagaaaccaaauu

SEQ ID NO: 4140 - RNA, 21 nt, Homo sapiens
uacuuuucuagguuguugggg

SEQ ID NO: 4141 - RNA, 21 nt, Homo sapiens
ccccaacaaccuagaaaagua

SEQ ID NO: 4142 - RNA, 23 nt, Homo sapiens
ucacaacaaccuugcaggguaga

SEQ ID NO: 4143 - RNA, 23 nt, Homo sapiens
ucuacccugcaagguuguuguga

SEQ ID NO: 4144 - RNA, 22 nt, Homo sapiens
cuuggauuuuccugggccucag

SEQ ID NO: 4145 - RNA, 22 nt, Homo sapiens
cugaggcccaggaaaauccaag

SEQ ID NO: 4146 - RNA, 22 nt, Homo sapiens
ugaggacagggcaaauucacga

SEQ ID NO: 4147 - RNA, 22 nt, Homo sapiens
ucgugaauuugcccuguccuca

SEQ ID NO: 4148 - RNA, 22 nt, Homo sapiens
aucauaugaaccaaacucuaau

SEQ ID NO: 4149 - RNA, 22 nt, Homo sapiens
auuagaguuugguucauaugau

SEQ ID NO: 4150 - RNA, 22 nt, Homo sapiens
uagagucuggcugauaugguuu

SEQ ID NO: 4151 - RNA, 22 nt, Homo sapiens
aaaccauaucagccagacucua

SEQ ID NO: 4152 - RNA, 21 nt, Homo sapiens
ccugugcucccagggccucgc

SEQ ID NO: 4153 - RNA, 21 nt, Homo sapiens
gcgaggcccugggagcacagg

SEQ ID NO: 4154 - RNA, 22 nt, Homo sapiens
ugaggcccuuggggcacagugg

SEQ ID NO: 4155 - RNA, 22 nt, Homo sapiens
ccacugugccccaagggccuca

SEQ ID NO: 4156 - RNA, 22 nt, Homo sapiens
uccuaaaucugaaaguccaaaa

SEQ ID NO: 4157 - RNA, 22 nt, Homo sapiens
uuuuggacuuucagauuuagga

SEQ ID NO: 4158 - RNA, 24 nt, Homo sapiens
uuggacuuuuucagauuuggggau

SEQ ID NO: 4159 - RNA, 24 nt, Homo sapiens
auccccaaaucugaaaaaguccaa

SEQ ID NO: 4160 - RNA, 22 nt, Homo sapiens
augcaccugggcaaggauucug

SEQ ID NO: 4161 - RNA, 22 nt, Homo sapiens
cagaauccuugcccaggugcau

SEQ ID NO: 4162 - RNA, 23 nt, Homo sapiens
uaauccuugcuaccugggugaga

SEQ ID NO: 4163 - RNA, 23 nt, Homo sapiens
ucucacccagguagcaaggauua

SEQ ID NO: 4164 - RNA, 22 nt, Homo sapiens
uuuugugucucccauuccccag

SEQ ID NO: 4165 - RNA, 22 nt, Homo sapiens
cuggggaaugggagacacaaaa

SEQ ID NO: 4166 - RNA, 22 nt, Homo sapiens
agggggauggcagagcaaaauu

SEQ ID NO: 4167 - RNA, 22 nt, Homo sapiens
aauuuugcucugccaucccccu

SEQ ID NO: 4168 - RNA, 22 nt, Homo sapiens
gugcauggcuguauauauaaca

SEQ ID NO: 4169 - RNA, 22 nt, Homo sapiens
uguuauauauacagccaugcac

SEQ ID NO: 4170 - RNA, 21 nt, Homo sapiens
uauauauacagccaugcacuc

SEQ ID NO: 4171 - RNA, 21 nt, Homo sapiens
gagugcauggcuguauauaua

SEQ ID NO: 4172 - RNA, 22 nt, Homo sapiens
aaugcacccgggcaaggauucu

SEQ ID NO: 4173 - RNA, 22 nt, Homo sapiens
agaauccuugcccgggugcauu

SEQ ID NO: 4174 - RNA, 22 nt, Homo sapiens
aauccuuugucccugggugaga

SEQ ID NO: 4175 - RNA, 22 nt, Homo sapiens
ucucacccagggacaaaggauu

SEQ ID NO: 4176 - RNA, 22 nt, Homo sapiens
aaugcaccugggcaaggauuca

SEQ ID NO: 4177 - RNA, 22 nt, Homo sapiens
ugaauccuugcccaggugcauu

SEQ ID NO: 4178 - RNA, 21 nt, Homo sapiens
auccuugcuaucugggugcua

SEQ ID NO: 4179 - RNA, 21 nt, Homo sapiens
uagcacccagauagcaaggau

SEQ ID NO: 4180 - RNA, 22 nt, Homo sapiens
agacccuggucugcacucuauc

SEQ ID NO: 4181 - RNA, 22 nt, Homo sapiens
gauagagugcagaccagggucu

SEQ ID NO: 4182 - RNA, 21 nt, Homo sapiens
uugcagcugcgguuguaaggu

SEQ ID NO: 4183 - RNA, 21 nt, Homo sapiens
accuuacaaccgcagcugcaa

SEQ ID NO: 4184 - RNA, 22 nt, Homo sapiens
cgucaacacuugcugguuuccu

SEQ ID NO: 4185 - RNA, 22 nt, Homo sapiens
aggaaaccagcaaguguugacg

SEQ ID NO: 4186 - RNA, 22 nt, Homo sapiens
gggagccaggaaguauugaugu

SEQ ID NO: 4187 - RNA, 22 nt, Homo sapiens
acaucaauacuuccuggcuccc

SEQ ID NO: 4188 - RNA, 21 nt, Homo sapiens
uaaggcacccuucugaguaga

SEQ ID NO: 4189 - RNA, 21 nt, Homo sapiens
ucuacucagaagggugccuua

SEQ ID NO: 4190 - RNA, 22 nt, Homo sapiens
uauucaggaagguguuacuuaa

SEQ ID NO: 4191 - RNA, 22 nt, Homo sapiens
uuaaguaacaccuuccugaaua

SEQ ID NO: 4192 - RNA, 21 nt, Homo sapiens
uuuugcaccuuuuggagugaa

SEQ ID NO: 4193 - RNA, 21 nt, Homo sapiens
uucacuccaaaaggugcaaaa

SEQ ID NO: 4194 - RNA, 23 nt, Homo sapiens
ugauuguagccuuuuggaguaga

SEQ ID NO: 4195 - RNA, 23 nt, Homo sapiens
ucuacuccaaaaggcuacaauca

SEQ ID NO: 4196 - RNA, 23 nt, Homo sapiens
ggguuuguagcuuugcuggcaug

SEQ ID NO: 4197 - RNA, 23 nt, Homo sapiens
caugccagcaaagcuacaaaccc

SEQ ID NO: 4198 - RNA, 23 nt, Homo sapiens
cagggcucagggauuggauggag

SEQ ID NO: 4199 - RNA, 23 nt, Homo sapiens
cuccauccaaucccugagcccug

SEQ ID NO: 4200 - RNA, 23 nt, Homo sapiens
augcuacucggaaaucccacuga

SEQ ID NO: 4201 - RNA, 23 nt, Homo sapiens
ucagugggauuuccgaguagcau

SEQ ID NO: 4202 - RNA, 21 nt, Homo sapiens
gugggauuucugaguagcauc

SEQ ID NO: 4203 - RNA, 21 nt, Homo sapiens
gaugcuacucagaaaucccac

SEQ ID NO: 4204 - RNA, 23 nt, Homo sapiens
ccggggcagauugguguagggug

SEQ ID NO: 4205 - RNA, 23 nt, Homo sapiens
cacccuacaccaaucugccccgg

SEQ ID NO: 4206 - RNA, 23 nt, Homo sapiens
acggagacgacaagacugugcug

SEQ ID NO: 4207 - RNA, 23 nt, Homo sapiens
cagcacagucuugucgucuccgu

SEQ ID NO: 4208 - RNA, 22 nt, Homo sapiens
aauccacgcugagcuuggcauc

SEQ ID NO: 4209 - RNA, 22 nt, Homo sapiens
gaugccaagcucagcguggauu

SEQ ID NO: 4210 - RNA, 23 nt, Homo sapiens
aggaaaugaggcuggcuaggagc

SEQ ID NO: 4211 - RNA, 23 nt, Homo sapiens
gcuccuagccagccucauuuccu

SEQ ID NO: 4212 - RNA, 22 nt, Homo sapiens
ugauugguacgucuguggguag

SEQ ID NO: 4213 - RNA, 22 nt, Homo sapiens
cuacccacagacguaccaauca

SEQ ID NO: 4214 - RNA, 22 nt, Homo sapiens
aaucagugaaugccuugaaccu

SEQ ID NO: 4215 - RNA, 22 nt, Homo sapiens
agguucaaggcauucacugauu

SEQ ID NO: 4216 - RNA, 21 nt, Homo sapiens
uuacaggcgugaaccaccgcg

SEQ ID NO: 4217 - RNA, 21 nt, Homo sapiens
cgcggugguucacgccuguaa

SEQ ID NO: 4218 - RNA, 21 nt, Homo sapiens
uacugcagacaguggcaauca

SEQ ID NO: 4219 - RNA, 21 nt, Homo sapiens
ugauugccacugucugcagua

SEQ ID NO: 4220 - RNA, 21 nt, Homo sapiens
guuucaccauguuggucaggc

SEQ ID NO: 4221 - RNA, 21 nt, Homo sapiens
gccugaccaacauggugaaac

SEQ ID NO: 4222 - RNA, 23 nt, Homo sapiens
uaaauuucaccuuucugagaagg

SEQ ID NO: 4223 - RNA, 23 nt, Homo sapiens
ccuucucagaaaggugaaauuua

SEQ ID NO: 4224 - RNA, 22 nt, Homo sapiens
uucacaaggaggugucauuuau

SEQ ID NO: 4225 - RNA, 22 nt, Homo sapiens
auaaaugacaccuccuugugaa

SEQ ID NO: 4226 - RNA, 23 nt, Homo sapiens
uaaauuucaccuuucugagaaga

SEQ ID NO: 4227 - RNA, 23 nt, Homo sapiens
ucuucucagaaaggugaaauuua

SEQ ID NO: 4228 - RNA, 22 nt, Homo sapiens
uucucaaggaggugucguuuau

SEQ ID NO: 4229 - RNA, 22 nt, Homo sapiens
auaaacgacaccuccuugagaa

SEQ ID NO: 4230 - RNA, 21 nt, Homo sapiens
auugacacuucugugaguaga

SEQ ID NO: 4231 - RNA, 21 nt, Homo sapiens
ucuacucacagaagugucaau

SEQ ID NO: 4232 - RNA, 23 nt, Homo sapiens
uacucuggagagugacaaucaug

SEQ ID NO: 4233 - RNA, 23 nt, Homo sapiens
caugauugucacucuccagagua

SEQ ID NO: 4234 - RNA, 21 nt, Homo sapiens
auugacaccucugugagugga

SEQ ID NO: 4235 - RNA, 21 nt, Homo sapiens
uccacucacagaggugucaau

SEQ ID NO: 4236 - RNA, 22 nt, Homo sapiens
uucucaagagggaggcaaucau

SEQ ID NO: 4237 - RNA, 22 nt, Homo sapiens
augauugccucccucuugagaa

SEQ ID NO: 4238 - RNA, 22 nt, Homo sapiens
gagugccuucuuuuggagcguu

SEQ ID NO: 4239 - RNA, 22 nt, Homo sapiens
aacgcuccaaaagaaggcacuc

SEQ ID NO: 4240 - RNA, 18 nt, Homo sapiens
ugcuuccuuucagagggu

SEQ ID NO: 4241 - RNA, 18 nt, Homo sapiens
acccucugaaaggaagca

SEQ ID NO: 4242 - RNA, 22 nt, Homo sapiens
aucuggagguaagaagcacuuu

SEQ ID NO: 4243 - RNA, 22 nt, Homo sapiens
aaagugcuucuuaccuccagau

SEQ ID NO: 4244 - RNA, 22 nt, Homo sapiens
gaaagcgcuucccuuugcugga

SEQ ID NO: 4245 - RNA, 22 nt, Homo sapiens
uccagcaaagggaagcgcuuuc

SEQ ID NO: 4246 - RNA, 20 nt, Homo sapiens
cugcaaagggaagcccuuuc

SEQ ID NO: 4247 - RNA, 20 nt, Homo sapiens
gaaagggcuucccuuugcag

SEQ ID NO: 4248 - RNA, 21 nt, Homo sapiens
caaagcgcuucccuuuggagc

SEQ ID NO: 4249 - RNA, 21 nt, Homo sapiens
gcuccaaagggaagcgcuuug

SEQ ID NO: 4250 - RNA, 22 nt, Homo sapiens
cucuagagggaagcacuuucug

SEQ ID NO: 4251 - RNA, 22 nt, Homo sapiens
cagaaagugcuucccucuagag

SEQ ID NO: 4252 - RNA, 21 nt, Homo sapiens
aaagcgcuucccuucagagug

SEQ ID NO: 4253 - RNA, 21 nt, Homo sapiens
cacucugaagggaagcgcuuu

SEQ ID NO: 4254 - RNA, 22 nt, Homo sapiens
cucuagagggaagcgcuuucug

SEQ ID NO: 4255 - RNA, 22 nt, Homo sapiens
cagaaagcgcuucccucuagag

SEQ ID NO: 4256 - RNA, 22 nt, Homo sapiens
aaagugcauccuuuuagagguu

SEQ ID NO: 4257 - RNA, 22 nt, Homo sapiens
aaccucuaaaaggaugcacuuu

SEQ ID NO: 4258 - RNA, 22 nt, Homo sapiens
cucuagagggaagcgcuuucug

SEQ ID NO: 4259 - RNA, 22 nt, Homo sapiens
cagaaagcgcuucccucuagag

SEQ ID NO: 4260 - RNA, 22 nt, Homo sapiens
aaagugcaucuuuuuagaggau

SEQ ID NO: 4261 - RNA, 22 nt, Homo sapiens
auccucuaaaaagaugcacuuu

SEQ ID NO: 4262 - RNA, 22 nt, Homo sapiens
cucuagagggaagcgcuuucug

SEQ ID NO: 4263 - RNA, 22 nt, Homo sapiens
cagaaagcgcuucccucuagag

SEQ ID NO: 4264 - RNA, 21 nt, Homo sapiens
aaagugcuuccuuuuagaggg

SEQ ID NO: 4265 - RNA, 21 nt, Homo sapiens
cccucuaaaaggaagcacuuu

SEQ ID NO: 4266 - RNA, 22 nt, Homo sapiens
aaagugcuuccuuuuagagggu

SEQ ID NO: 4267 - RNA, 22 nt, Homo sapiens
acccucuaaaaggaagcacuuu

SEQ ID NO: 4268 - RNA, 22 nt, Homo sapiens
cucuagagggaagcacuuucug

SEQ ID NO: 4269 - RNA, 22 nt, Homo sapiens
cagaaagugcuucccucuagag

SEQ ID NO: 4270 - RNA, 22 nt, Homo sapiens
aaagugcuucucuuuggugggu

SEQ ID NO: 4271 - RNA, 22 nt, Homo sapiens
acccaccaaagagaagcacuuu

SEQ ID NO: 4272 - RNA, 20 nt, Homo sapiens
cuacaaagggaagcccuuuc

SEQ ID NO: 4273 - RNA, 20 nt, Homo sapiens
gaaagggcuucccuuuguag

SEQ ID NO: 4274 - RNA, 21 nt, Homo sapiens
aaagugcuuccuuuuugaggg

SEQ ID NO: 4275 - RNA, 21 nt, Homo sapiens
cccucaaaaaggaagcacuuu

SEQ ID NO: 4276 - RNA, 22 nt, Homo sapiens
aagugcuuccuuuuagaggguu

SEQ ID NO: 4277 - RNA, 22 nt, Homo sapiens
aacccucuaaaaggaagcacuu

SEQ ID NO: 4278 - RNA, 24 nt, Homo sapiens
acaaagugcuucccuuuagagugu

SEQ ID NO: 4279 - RNA, 24 nt, Homo sapiens
acacucuaaagggaagcacuuugu

SEQ ID NO: 4280 - RNA, 22 nt, Homo sapiens
aacgcacuucccuuuagagugu

SEQ ID NO: 4281 - RNA, 22 nt, Homo sapiens
acacucuaaagggaagugcguu

SEQ ID NO: 4282 - RNA, 22 nt, Homo sapiens
aaaaugguucccuuuagagugu

SEQ ID NO: 4283 - RNA, 22 nt, Homo sapiens
acacucuaaagggaaccauuuu

SEQ ID NO: 4284 - RNA, 22 nt, Homo sapiens
cucuagagggaagcgcuuucug

SEQ ID NO: 4285 - RNA, 22 nt, Homo sapiens
cagaaagcgcuucccucuagag

SEQ ID NO: 4286 - RNA, 23 nt, Homo sapiens
gaacgcgcuucccuauagagggu

SEQ ID NO: 4287 - RNA, 23 nt, Homo sapiens
acccucuauagggaagcgcguuc

SEQ ID NO: 4288 - RNA, 22 nt, Homo sapiens
cucuagagggaagcgcuuucug

SEQ ID NO: 4289 - RNA, 22 nt, Homo sapiens
cagaaagcgcuucccucuagag

SEQ ID NO: 4290 - RNA, 21 nt, Homo sapiens
gaaggcgcuucccuuuggagu

SEQ ID NO: 4291 - RNA, 21 nt, Homo sapiens
acuccaaagggaagcgccuuc

SEQ ID NO: 4292 - RNA, 20 nt, Homo sapiens
cugcaaagggaagcccuuuc

SEQ ID NO: 4293 - RNA, 20 nt, Homo sapiens
gaaagggcuucccuuugcag

SEQ ID NO: 4294 - RNA, 22 nt, Homo sapiens
ccucccacacccaaggcuugca

SEQ ID NO: 4295 - RNA, 22 nt, Homo sapiens
ugcaagccuugggugugggagg

SEQ ID NO: 4296 - RNA, 22 nt, Homo sapiens
caugccuugaguguaggaccgu

SEQ ID NO: 4297 - RNA, 22 nt, Homo sapiens
acgguccuacacucaaggcaug

SEQ ID NO: 4298 - RNA, 22 nt, Homo sapiens
aucauacaaggacaauuucuuu

SEQ ID NO: 4299 - RNA, 22 nt, Homo sapiens
aaagaaauuguccuuguaugau

SEQ ID NO: 4300 - RNA, 22 nt, Homo sapiens
ggagaaauuauccuuggugugu

SEQ ID NO: 4301 - RNA, 22 nt, Homo sapiens
acacaccaaggauaauuucucc

SEQ ID NO: 4302 - RNA, 22 nt, Homo sapiens
uggugggcacagaaucuggacu

SEQ ID NO: 4303 - RNA, 22 nt, Homo sapiens
aguccagauucugugcccacca

SEQ ID NO: 4304 - RNA, 25 nt, Homo sapiens
aaaggauucugcugucggucccacu

SEQ ID NO: 4305 - RNA, 25 nt, Homo sapiens
agugggaccgacagcagaauccuuu

SEQ ID NO: 4306 - RNA, 23 nt, Homo sapiens
ucggggaucaucaugucacgaga

SEQ ID NO: 4307 - RNA, 23 nt, Homo sapiens
ucucgugacaugaugauccccga

SEQ ID NO: 4308 - RNA, 22 nt, Homo sapiens
aaacauucgcggugcacuucuu

SEQ ID NO: 4309 - RNA, 22 nt, Homo sapiens
aagaagugcaccgcgaauguuu

SEQ ID NO: 4310 - RNA, 22 nt, Homo sapiens
auucugcauuuuuagcaaguuc

SEQ ID NO: 4311 - RNA, 22 nt, Homo sapiens
gaacuugcuaaaaaugcagaau

SEQ ID NO: 4312 - RNA, 22 nt, Homo sapiens
accugagguugugcauuucuaa

SEQ ID NO: 4313 - RNA, 22 nt, Homo sapiens
uuagaaaugcacaaccucaggu

SEQ ID NO: 4314 - RNA, 22 nt, Homo sapiens
ucagcaaacauuuauugugugc

SEQ ID NO: 4315 - RNA, 22 nt, Homo sapiens
gcacacaauaaauguuugcuga

SEQ ID NO: 4316 - RNA, 22 nt, Homo sapiens
ucaguaaauguuuauuagauga

SEQ ID NO: 4317 - RNA, 22 nt, Homo sapiens
ucaucuaauaaacauuuacuga

SEQ ID NO: 4318 - RNA, 22 nt, Homo sapiens
agcuacaguuacuuuugcacca

SEQ ID NO: 4319 - RNA, 22 nt, Homo sapiens
uggugcaaaaguaacuguagcu

SEQ ID NO: 4320 - RNA, 20 nt, Homo sapiens
uaaaaacugcaauuacuuuc

SEQ ID NO: 4321 - RNA, 20 nt, Homo sapiens
gaaaguaauugcaguuuuua

SEQ ID NO: 4322 - RNA, 23 nt, Homo sapiens
ugcaaaaguaauugcaguuuuug

SEQ ID NO: 4323 - RNA, 23 nt, Homo sapiens
caaaaacugcaauuacuuuugca

SEQ ID NO: 4324 - RNA, 22 nt, Homo sapiens
aaagaccgugacuacuuuugca

SEQ ID NO: 4325 - RNA, 22 nt, Homo sapiens
ugcaaaaguagucacggucuuu

SEQ ID NO: 4326 - RNA, 22 nt, Homo sapiens
agaaguaacuacgguuuuugca

SEQ ID NO: 4327 - RNA, 22 nt, Homo sapiens
ugcaaaaaccguaguuacuucu

SEQ ID NO: 4328 - RNA, 19 nt, Homo sapiens
aaaaaccacaauuacuuuu

SEQ ID NO: 4329 - RNA, 19 nt, Homo sapiens
aaaaguaauugugguuuuu

SEQ ID NO: 4330 - RNA, 19 nt, Homo sapiens
aaaaguaauugcggucuuu

SEQ ID NO: 4331 - RNA, 19 nt, Homo sapiens
aaagaccgcaauuacuuuu

SEQ ID NO: 4332 - RNA, 22 nt, Homo sapiens
caaaaacugcaauuacuuuugc

SEQ ID NO: 4333 - RNA, 22 nt, Homo sapiens
gcaaaaguaauugcaguuuuug

SEQ ID NO: 4334 - RNA, 22 nt, Homo sapiens
gaaaguaauugcuguuuuugcc

SEQ ID NO: 4335 - RNA, 22 nt, Homo sapiens
ggcaaaaacagcaauuacuuuc

SEQ ID NO: 4336 - RNA, 21 nt, Homo sapiens
uaaaacugcaguuauuuuugc

SEQ ID NO: 4337 - RNA, 21 nt, Homo sapiens
gcaaaaauaacugcaguuuua

SEQ ID NO: 4338 - RNA, 21 nt, Homo sapiens
aaaaguaauugcaguuuuugc

SEQ ID NO: 4339 - RNA, 21 nt, Homo sapiens
gcaaaaacugcaauuacuuuu

SEQ ID NO: 4340 - RNA, 22 nt, Homo sapiens
uaaaacccacaauuauguuugu

SEQ ID NO: 4341 - RNA, 22 nt, Homo sapiens
acaaacauaauuguggguuuua

SEQ ID NO: 4342 - RNA, 22 nt, Homo sapiens
aaaaguaauugcggguuuugcc

SEQ ID NO: 4343 - RNA, 22 nt, Homo sapiens
ggcaaaacccgcaauuacuuuu

SEQ ID NO: 4344 - RNA, 21 nt, Homo sapiens
caaaaccgcaguaacuuuugu

SEQ ID NO: 4345 - RNA, 21 nt, Homo sapiens
acaaaaguuacugcgguuuug

SEQ ID NO: 4346 - RNA, 22 nt, Homo sapiens
aaaaguuauugcgguuuuggcu

SEQ ID NO: 4347 - RNA, 22 nt, Homo sapiens
agccaaaaccgcaauaacuuuu

SEQ ID NO: 4348 - RNA, 21 nt, Homo sapiens
uggcaguuacuuuugcaccag

SEQ ID NO: 4349 - RNA, 21 nt, Homo sapiens
cuggugcaaaaguaacugcca

SEQ ID NO: 4350 - RNA, 21 nt, Homo sapiens
aaaaguaauugcgguuuuugc

SEQ ID NO: 4351 - RNA, 21 nt, Homo sapiens
gcaaaaaccgcaauuacuuuu

SEQ ID NO: 4352 - RNA, 20 nt, Homo sapiens
aaaacugcaguuacuuuugc

SEQ ID NO: 4353 - RNA, 20 nt, Homo sapiens
gcaaaaguaacugcaguuuu

SEQ ID NO: 4354 - RNA, 18 nt, Homo sapiens
aaaaguacuugcggauuu

SEQ ID NO: 4355 - RNA, 18 nt, Homo sapiens
aaauccgcaaguacuuuu

SEQ ID NO: 4356 - RNA, 20 nt, Homo sapiens
gugcaaaagucaucacgguu

SEQ ID NO: 4357 - RNA, 20 nt, Homo sapiens
aaccgugaugacuuuugcac

SEQ ID NO: 4358 - RNA, 22 nt, Homo sapiens
gcuggugcaaaaguaauggcgg

SEQ ID NO: 4359 - RNA, 22 nt, Homo sapiens
ccgccauuacuuuugcaccagc

SEQ ID NO: 4360 - RNA, 22 nt, Homo sapiens
aaaaguaaucacuguuuuugcc

SEQ ID NO: 4361 - RNA, 22 nt, Homo sapiens
ggcaaaaacagugauuacuuuu

SEQ ID NO: 4362 - RNA, 20 nt, Homo sapiens
agugccugagggaguaagag

SEQ ID NO: 4363 - RNA, 20 nt, Homo sapiens
cucuuacucccucaggcacu

SEQ ID NO: 4364 - RNA, 22 nt, Homo sapiens
ugucuuacucccucaggcacau

SEQ ID NO: 4365 - RNA, 22 nt, Homo sapiens
augugccugagggaguaagaca

SEQ ID NO: 4366 - RNA, 23 nt, Homo sapiens
agugccugagggaguaagagccc

SEQ ID NO: 4367 - RNA, 23 nt, Homo sapiens
gggcucuuacucccucaggcacu

SEQ ID NO: 4368 - RNA, 21 nt, Homo sapiens
gcgacccacucuugguuucca

SEQ ID NO: 4369 - RNA, 21 nt, Homo sapiens
uggaaaccaagagugggucgc

SEQ ID NO: 4370 - RNA, 22 nt, Homo sapiens
uuagcuuaaggaguaccagauc

SEQ ID NO: 4371 - RNA, 22 nt, Homo sapiens
gaucugguacuccuuaagcuaa

SEQ ID NO: 4372 - RNA, 21 nt, Homo sapiens
uaugguacuccuuaagcuaac

SEQ ID NO: 4373 - RNA, 21 nt, Homo sapiens
guuagcuuaaggaguaccaua

SEQ ID NO: 4374 - RNA, 19 nt, Homo sapiens
ugagcugcuguaccaaaau

SEQ ID NO: 4375 - RNA, 19 nt, Homo sapiens
auuuugguacagcagcuca

SEQ ID NO: 4376 - RNA, 22 nt, Homo sapiens
cacauaugaagugagccagcac

SEQ ID NO: 4377 - RNA, 22 nt, Homo sapiens
gugcuggcucacuucauaugug

SEQ ID NO: 4378 - RNA, 22 nt, Homo sapiens
ugcuggcucauuucauaugugu

SEQ ID NO: 4379 - RNA, 22 nt, Homo sapiens
acacauaugaaaugagccagca

SEQ ID NO: 4380 - RNA, 22 nt, Homo sapiens
uuccaugccuccuagaaguucc

SEQ ID NO: 4381 - RNA, 22 nt, Homo sapiens
ggaacuucuaggaggcauggaa

SEQ ID NO: 4382 - RNA, 22 nt, Homo sapiens
agccuuccaggagaaauggaga

SEQ ID NO: 4383 - RNA, 22 nt, Homo sapiens
ucuccauuucuccuggaaggcu

SEQ ID NO: 4384 - RNA, 22 nt, Homo sapiens
uaaaacuuuaagugugccuagg

SEQ ID NO: 4385 - RNA, 22 nt, Homo sapiens
ccuaggcacacuuaaaguuuua

SEQ ID NO: 4386 - RNA, 22 nt, Homo sapiens
uaggcacacuuaaaguuauagc

SEQ ID NO: 4387 - RNA, 22 nt, Homo sapiens
gcuauaacuuuaagugugccua

SEQ ID NO: 4388 - RNA, 22 nt, Homo sapiens
gaauauggguauauuaguuugg

SEQ ID NO: 4389 - RNA, 22 nt, Homo sapiens
ccaaacuaauauacccauauuc

SEQ ID NO: 4390 - RNA, 22 nt, Homo sapiens
aaacuaauauacccauauucug

SEQ ID NO: 4391 - RNA, 22 nt, Homo sapiens
cagaauauggguauauuaguuu

SEQ ID NO: 4392 - RNA, 22 nt, Homo sapiens
uaguucuucccuuugcccaauu

SEQ ID NO: 4393 - RNA, 22 nt, Homo sapiens
aauugggcaaagggaagaacua

SEQ ID NO: 4394 - RNA, 22 nt, Homo sapiens
cagggaaaugggaagaacuaga

SEQ ID NO: 4395 - RNA, 22 nt, Homo sapiens
ucuaguucuucccauuucccug

SEQ ID NO: 4396 - RNA, 22 nt, Homo sapiens
cugaauagcugggacuacaggu

SEQ ID NO: 4397 - RNA, 22 nt, Homo sapiens
accuguagucccagcuauucag

SEQ ID NO: 4398 - RNA, 22 nt, Homo sapiens
ugaaguaccagcuacucgagag

SEQ ID NO: 4399 - RNA, 22 nt, Homo sapiens
cucucgaguagcugguacuuca

SEQ ID NO: 4400 - RNA, 22 nt, Homo sapiens
cagagugacaagcugguuaaag

SEQ ID NO: 4401 - RNA, 22 nt, Homo sapiens
cuuuaaccagcuugucacucug

SEQ ID NO: 4402 - RNA, 22 nt, Homo sapiens
uauccagcuuguuacuauaugc

SEQ ID NO: 4403 - RNA, 22 nt, Homo sapiens
gcauauaguaacaagcuggaua

SEQ ID NO: 4404 - RNA, 21 nt, Homo sapiens
gccccgggcagugugaucauc

SEQ ID NO: 4405 - RNA, 21 nt, Homo sapiens
gaugaucacacugcccggggc

SEQ ID NO: 4406 - RNA, 18 nt, Homo sapiens
auggucaccuccgggacu

SEQ ID NO: 4407 - RNA, 18 nt, Homo sapiens
agucccggaggugaccau

SEQ ID NO: 4408 - RNA, 19 nt, Homo sapiens
aagucccacuaaugccagc

SEQ ID NO: 4409 - RNA, 19 nt, Homo sapiens
gcuggcauuagugggacuu

SEQ ID NO: 4410 - RNA, 21 nt, Homo sapiens
acuggcauuagugggacuuuu

SEQ ID NO: 4411 - RNA, 21 nt, Homo sapiens
aaaagucccacuaaugccagu

SEQ ID NO: 4412 - RNA, 23 nt, Homo sapiens
ugcacauggcaaccuagcuccca

SEQ ID NO: 4413 - RNA, 23 nt, Homo sapiens
ugggagcuagguugccaugugca

SEQ ID NO: 4414 - RNA, 21 nt, Homo sapiens
ggcugggugcucuugugcagu

SEQ ID NO: 4415 - RNA, 21 nt, Homo sapiens
acugcacaagagcacccagcc

SEQ ID NO: 4416 - RNA, 21 nt, Homo sapiens
uaaaguaaauaugcaccaaaa

SEQ ID NO: 4417 - RNA, 21 nt, Homo sapiens
uuuuggugcauauuuacuuua

SEQ ID NO: 4418 - RNA, 21 nt, Homo sapiens
aauaaaguucauguauggcaa

SEQ ID NO: 4419 - RNA, 21 nt, Homo sapiens
uugccauacaugaacuuuauu

SEQ ID NO: 4420 - RNA, 21 nt, Homo sapiens
uugccauacauagacuuuauu

SEQ ID NO: 4421 - RNA, 21 nt, Homo sapiens
aauaaagucuauguauggcaa

SEQ ID NO: 4422 - RNA, 21 nt, Homo sapiens
auacccauagcuuagcuccca

SEQ ID NO: 4423 - RNA, 21 nt, Homo sapiens
ugggagcuaagcuauggguau

SEQ ID NO: 4424 - RNA, 21 nt, Homo sapiens
ugggagcuaagcuauggguau

SEQ ID NO: 4425 - RNA, 21 nt, Homo sapiens
auacccauagcuuagcuccca

SEQ ID NO: 4426 - RNA, 22 nt, Homo sapiens
caaaguuuaagauccuugaagu

SEQ ID NO: 4427 - RNA, 22 nt, Homo sapiens
acuucaaggaucuuaaacuuug

SEQ ID NO: 4428 - RNA, 22 nt, Homo sapiens
aucaaggaucuuaaacuuugcc

SEQ ID NO: 4429 - RNA, 22 nt, Homo sapiens
ggcaaaguuuaagauccuugau

SEQ ID NO: 4430 - RNA, 20 nt, Homo sapiens
aaaguagcuguaccauuugc

SEQ ID NO: 4431 - RNA, 20 nt, Homo sapiens
gcaaaugguacagcuacuuu

SEQ ID NO: 4432 - RNA, 19 nt, Homo sapiens
aggcacggugucagcaggc

SEQ ID NO: 4433 - RNA, 19 nt, Homo sapiens
gccugcugacaccgugccu

SEQ ID NO: 4434 - RNA, 19 nt, Homo sapiens
gggcgccugugaucccaac

SEQ ID NO: 4435 - RNA, 19 nt, Homo sapiens
guugggaucacaggcgccc

SEQ ID NO: 4436 - RNA, 23 nt, Homo sapiens
aguauguucuuccaggacagaac

SEQ ID NO: 4437 - RNA, 23 nt, Homo sapiens
guucuguccuggaagaacauacu

SEQ ID NO: 4438 - RNA, 22 nt, Homo sapiens
gagaaaugcuggacuaaucugc

SEQ ID NO: 4439 - RNA, 22 nt, Homo sapiens
gcagauuaguccagcauuucuc

SEQ ID NO: 4440 - RNA, 22 nt, Homo sapiens
agaaaggguggcaauaccucuu

SEQ ID NO: 4441 - RNA, 22 nt, Homo sapiens
aagagguauugccacccuuucu

SEQ ID NO: 4442 - RNA, 22 nt, Homo sapiens
agguauugccacccuuucuagu

SEQ ID NO: 4443 - RNA, 22 nt, Homo sapiens
acuagaaaggguggcaauaccu

SEQ ID NO: 4444 - RNA, 22 nt, Homo sapiens
guagcaccuugcaggauaaggu

SEQ ID NO: 4445 - RNA, 22 nt, Homo sapiens
accuuauccugcaaggugcuac

SEQ ID NO: 4446 - RNA, 24 nt, Homo sapiens
uacagaugcagauucucugacuuc

SEQ ID NO: 4447 - RNA, 24 nt, Homo sapiens
gaagucagagaaucugcaucugua

SEQ ID NO: 4448 - RNA, 20 nt, Homo sapiens
aacucuagccugagcaacag

SEQ ID NO: 4449 - RNA, 20 nt, Homo sapiens
cuguugcucaggcuagaguu

SEQ ID NO: 4450 - RNA, 22 nt, Homo sapiens
acagcccagcaguuaucacggg

SEQ ID NO: 4451 - RNA, 22 nt, Homo sapiens
cccgugauaacugcugggcugu

SEQ ID NO: 4452 - RNA, 21 nt, Homo sapiens
uaucguaucguauuguauugu

SEQ ID NO: 4453 - RNA, 21 nt, Homo sapiens
acaauacaauacgauacgaua

SEQ ID NO: 4454 - RNA, 22 nt, Homo sapiens
uuagaacguuuuagggucaaau

SEQ ID NO: 4455 - RNA, 22 nt, Homo sapiens
auuugacccuaaaacguucuaa

SEQ ID NO: 4456 - RNA, 22 nt, Homo sapiens
uaacaaacaccuguaaaacagc

SEQ ID NO: 4457 - RNA, 22 nt, Homo sapiens
gcuguuuuacagguguuuguua

SEQ ID NO: 4458 - RNA, 22 nt, Homo sapiens
agcauacaccuguaguccuaga

SEQ ID NO: 4459 - RNA, 22 nt, Homo sapiens
ucuaggacuacagguguaugcu

SEQ ID NO: 4460 - RNA, 21 nt, Homo sapiens
aguuaaugaauccuggaaagu

SEQ ID NO: 4461 - RNA, 21 nt, Homo sapiens
acuuuccaggauucauuaacu

SEQ ID NO: 4462 - RNA, 21 nt, Homo sapiens
ucagcuacuaccucuauuagg

SEQ ID NO: 4463 - RNA, 21 nt, Homo sapiens
ccuaauagagguaguagcuga

SEQ ID NO: 4464 - RNA, 22 nt, Homo sapiens
uugcucugagcuccgagaaagc

SEQ ID NO: 4465 - RNA, 22 nt, Homo sapiens
gcuuucucggagcucagagcaa

SEQ ID NO: 4466 - RNA, 22 nt, Homo sapiens
caaauaauaccacagugggugu

SEQ ID NO: 4467 - RNA, 22 nt, Homo sapiens
acacccacugugguauuauuug

SEQ ID NO: 4468 - RNA, 20 nt, Homo sapiens
aauaauaucacaguaggugu

SEQ ID NO: 4469 - RNA, 20 nt, Homo sapiens
acaccuacugugauauuauu

SEQ ID NO: 4470 - RNA, 22 nt, Homo sapiens
aauaauaucacaguagguguac

SEQ ID NO: 4471 - RNA, 22 nt, Homo sapiens
guacaccuacugugauauuauu

SEQ ID NO: 4472 - RNA, 22 nt, Homo sapiens
gcaguggcucugaaaugaacuc

SEQ ID NO: 4473 - RNA, 22 nt, Homo sapiens
gaguucauuucagagccacugc

SEQ ID NO: 4474 - RNA, 21 nt, Homo sapiens
cagaucaugggacugucucag

SEQ ID NO: 4475 - RNA, 21 nt, Homo sapiens
cugagacagucccaugaucug

SEQ ID NO: 4476 - RNA, 22 nt, Homo sapiens
acuccaagaagaaucuagacag

SEQ ID NO: 4477 - RNA, 22 nt, Homo sapiens
cugucuagauucuucuuggagu

SEQ ID NO: 4478 - RNA, 22 nt, Homo sapiens
cucauuuaaguagucugaugcc

SEQ ID NO: 4479 - RNA, 22 nt, Homo sapiens
ggcaucagacuacuuaaaugag

SEQ ID NO: 4480 - RNA, 22 nt, Homo sapiens
ucaaguaguuucaugauaaagg

SEQ ID NO: 4481 - RNA, 22 nt, Homo sapiens
ccuuuaucaugaaacuacuuga

SEQ ID NO: 4482 - RNA, 22 nt, Homo sapiens
ugggggagugcagugauugugg

SEQ ID NO: 4483 - RNA, 22 nt, Homo sapiens
ccacaaucacugcacuccccca

SEQ ID NO: 4484 - RNA, 22 nt, Homo sapiens
uccugucuuuccuuguuggagc

SEQ ID NO: 4485 - RNA, 22 nt, Homo sapiens
gcuccaacaaggaaagacagga

SEQ ID NO: 4486 - RNA, 22 nt, Homo sapiens
uaaugcauuaaauuauugaagg

SEQ ID NO: 4487 - RNA, 22 nt, Homo sapiens
ccuucaauaauuuaaugcauua

SEQ ID NO: 4488 - RNA, 19 nt, Homo sapiens
uuauugucacguucugauu

SEQ ID NO: 4489 - RNA, 19 nt, Homo sapiens
aaucagaacgugacaauaa

SEQ ID NO: 4490 - RNA, 22 nt, Homo sapiens
ugagucagcaacauaucccaug

SEQ ID NO: 4491 - RNA, 22 nt, Homo sapiens
caugggauauguugcugacuca

SEQ ID NO: 4492 - RNA, 18 nt, Homo sapiens
aggagaagucgggaaggu

SEQ ID NO: 4493 - RNA, 18 nt, Homo sapiens
accuucccgacuucuccu

SEQ ID NO: 4494 - RNA, 22 nt, Homo sapiens
cgaaaacagcaauuaccuuugc

SEQ ID NO: 4495 - RNA, 22 nt, Homo sapiens
gcaaagguaauugcuguuuucg

SEQ ID NO: 4496 - RNA, 22 nt, Homo sapiens
uuaggccaucaucccauuaugc

SEQ ID NO: 4497 - RNA, 22 nt, Homo sapiens
gcauaaugggaugauggccuaa

SEQ ID NO: 4498 - RNA, 23 nt, Homo sapiens
uguuucggggcucauggccugug

SEQ ID NO: 4499 - RNA, 23 nt, Homo sapiens
cacaggccaugagccccgaaaca

SEQ ID NO: 4500 - RNA, 22 nt, Homo sapiens
aaagguaauugcaguuuuuccc

SEQ ID NO: 4501 - RNA, 22 nt, Homo sapiens
gggaaaaacugcaauuaccuuu

SEQ ID NO: 4502 - RNA, 22 nt, Homo sapiens
uucuggauaacaugcugaagcu

SEQ ID NO: 4503 - RNA, 22 nt, Homo sapiens
agcuucagcauguuauccagaa

SEQ ID NO: 4504 - RNA, 22 nt, Homo sapiens
acguuugaaugcuguacaaggc

SEQ ID NO: 4505 - RNA, 22 nt, Homo sapiens
gccuuguacagcauucaaacgu

SEQ ID NO: 4506 - RNA, 20 nt, Homo sapiens
augagcgacugugccugacc

SEQ ID NO: 4507 - RNA, 20 nt, Homo sapiens
ggucaggcacagucgcucau

SEQ ID NO: 4508 - RNA, 19 nt, Homo sapiens
gagccaguuggacaggagc

SEQ ID NO: 4509 - RNA, 19 nt, Homo sapiens
gcuccuguccaacuggcuc

SEQ ID NO: 4510 - RNA, 23 nt, Homo sapiens
uucauuugguauaaaccgcgauu

SEQ ID NO: 4511 - RNA, 23 nt, Homo sapiens
aaucgcgguuuauaccaaaugaa

SEQ ID NO: 4512 - RNA, 22 nt, Homo sapiens
uugagaaugaugaaucauuagg

SEQ ID NO: 4513 - RNA, 22 nt, Homo sapiens
ccuaaugauucaucauucucaa

SEQ ID NO: 4514 - RNA, 23 nt, Homo sapiens
uuacaguuguucaaccaguuacu

SEQ ID NO: 4515 - RNA, 23 nt, Homo sapiens
aguaacugguugaacaacuguaa

SEQ ID NO: 4516 - RNA, 21 nt, Homo sapiens
caaagaggaaggucccauuac

SEQ ID NO: 4517 - RNA, 21 nt, Homo sapiens
guaaugggaccuuccucuuug

SEQ ID NO: 4518 - RNA, 22 nt, Homo sapiens
ucaguuccaggccaaccaggcu

SEQ ID NO: 4519 - RNA, 22 nt, Homo sapiens
agccugguuggccuggaacuga

SEQ ID NO: 4520 - RNA, 22 nt, Homo sapiens
uuaugguuugccugggacugag

SEQ ID NO: 4521 - RNA, 22 nt, Homo sapiens
cucagucccaggcaaaccauaa

SEQ ID NO: 4522 - RNA, 19 nt, Homo sapiens
ugggcguaucuguaugcua

SEQ ID NO: 4523 - RNA, 19 nt, Homo sapiens
uagcauacagauacgccca

SEQ ID NO: 4524 - RNA, 20 nt, Homo sapiens
agaccauggguucucauugu

SEQ ID NO: 4525 - RNA, 20 nt, Homo sapiens
acaaugagaacccauggucu

SEQ ID NO: 4526 - RNA, 22 nt, Homo sapiens
uugugucaauaugcgaugaugu

SEQ ID NO: 4527 - RNA, 22 nt, Homo sapiens
acaucaucgcauauugacacaa

SEQ ID NO: 4528 - RNA, 19 nt, Homo sapiens
ugucucugcugggguuucu

SEQ ID NO: 4529 - RNA, 19 nt, Homo sapiens
agaaaccccagcagagaca

SEQ ID NO: 4530 - RNA, 25 nt, Homo sapiens
aggcaccagccaggcauugcucagc

SEQ ID NO: 4531 - RNA, 25 nt, Homo sapiens
gcugagcaaugccuggcuggugccu

SEQ ID NO: 4532 - RNA, 21 nt, Homo sapiens
gaagugugccguggugugucu

SEQ ID NO: 4533 - RNA, 21 nt, Homo sapiens
agacacaccacggcacacuuc

SEQ ID NO: 4534 - RNA, 21 nt, Homo sapiens
aagccugcccggcuccucggg

SEQ ID NO: 4535 - RNA, 21 nt, Homo sapiens
cccgaggagccgggcaggcuu

SEQ ID NO: 4536 - RNA, 20 nt, Homo sapiens
guugugucaguuuaucaaac

SEQ ID NO: 4537 - RNA, 20 nt, Homo sapiens
guuugauaaacugacacaac

SEQ ID NO: 4538 - RNA, 22 nt, Homo sapiens
uggucuaggauuguuggaggag

SEQ ID NO: 4539 - RNA, 22 nt, Homo sapiens
cuccuccaacaauccuagacca

SEQ ID NO: 4540 - RNA, 22 nt, Homo sapiens
cacacacugcaauuacuuuugc

SEQ ID NO: 4541 - RNA, 22 nt, Homo sapiens
gcaaaaguaauugcagugugug

SEQ ID NO: 4542 - RNA, 25 nt, Homo sapiens
aggggugguguugggacagcuccgu

SEQ ID NO: 4543 - RNA, 25 nt, Homo sapiens
acggagcugucccaacaccaccccu

SEQ ID NO: 4544 - RNA, 21 nt, Homo sapiens
ugagcuaaaugugugcuggga

SEQ ID NO: 4545 - RNA, 21 nt, Homo sapiens
ucccagcacacauuuagcuca

SEQ ID NO: 4546 - RNA, 23 nt, Homo sapiens
gcgaggaccccucggggucugac

SEQ ID NO: 4547 - RNA, 23 nt, Homo sapiens
gucagaccccgagggguccucgc

SEQ ID NO: 4548 - RNA, 25 nt, Homo sapiens
gcugggcagggcuucugagcuccuu

SEQ ID NO: 4549 - RNA, 25 nt, Homo sapiens
aaggagcucagaagcccugcccagc

SEQ ID NO: 4550 - RNA, 20 nt, Homo sapiens
gggaaaaggaagggggagga

SEQ ID NO: 4551 - RNA, 20 nt, Homo sapiens
uccucccccuuccuuuuccc

SEQ ID NO: 4552 - RNA, 20 nt, Homo sapiens
gcggaaggcggagcggcgga

SEQ ID NO: 4553 - RNA, 20 nt, Homo sapiens
uccgccgcuccgccuuccgc

SEQ ID NO: 4554 - RNA, 18 nt, Homo sapiens
gugaaggcccggcggaga

SEQ ID NO: 4555 - RNA, 18 nt, Homo sapiens
ucuccgccgggccuucac

SEQ ID NO: 4556 - RNA, 19 nt, Homo sapiens
ugagggagugggugggagg

SEQ ID NO: 4557 - RNA, 19 nt, Homo sapiens
ccucccacccacucccuca

SEQ ID NO: 4558 - RNA, 19 nt, Homo sapiens
acuggaauuggagucaaaa

SEQ ID NO: 4559 - RNA, 19 nt, Homo sapiens
uuuugacuccaauuccagu

SEQ ID NO: 4560 - RNA, 19 nt, Homo sapiens
ugagggaguuggguguaua

SEQ ID NO: 4561 - RNA, 19 nt, Homo sapiens
uauacacccaacucccuca

SEQ ID NO: 4562 - RNA, 19 nt, Homo sapiens
ugagggaguggauuguaug

SEQ ID NO: 4563 - RNA, 19 nt, Homo sapiens
cauacaauccacucccuca

SEQ ID NO: 4564 - RNA, 19 nt, Homo sapiens
ggcuggucagaugggagug

SEQ ID NO: 4565 - RNA, 19 nt, Homo sapiens
cacucccaucugaccagcc

SEQ ID NO: 4566 - RNA, 19 nt, Homo sapiens
agcagggcuggggauugca

SEQ ID NO: 4567 - RNA, 19 nt, Homo sapiens
ugcaauccccagcccugcu

SEQ ID NO: 4568 - RNA, 19 nt, Homo sapiens
ugagggaggagguugggua

SEQ ID NO: 4569 - RNA, 19 nt, Homo sapiens
uacccaaccuccucccuca

SEQ ID NO: 4570 - RNA, 19 nt, Homo sapiens
ugaggugguaggauguaga

SEQ ID NO: 4571 - RNA, 19 nt, Homo sapiens
ucuacauccuaccaccuca

SEQ ID NO: 4572 - RNA, 22 nt, Homo sapiens
uccgagccugggucucccucuu

SEQ ID NO: 4573 - RNA, 22 nt, Homo sapiens
aagagggagacccaggcucgga

SEQ ID NO: 4574 - RNA, 22 nt, Homo sapiens
ggggguccccggugcucggauc

SEQ ID NO: 4575 - RNA, 22 nt, Homo sapiens
gauccgagcaccggggaccccc

SEQ ID NO: 4576 - RNA, 22 nt, Homo sapiens
agucauuggaggguuugagcag

SEQ ID NO: 4577 - RNA, 22 nt, Homo sapiens
cugcucaaacccuccaaugacu

SEQ ID NO: 4578 - RNA, 19 nt, Homo sapiens
cagcaggaggugaggggag

SEQ ID NO: 4579 - RNA, 19 nt, Homo sapiens
cuccccucaccuccugcug

SEQ ID NO: 4580 - RNA, 22 nt, Homo sapiens
acucaaaacccuucagugacuu

SEQ ID NO: 4581 - RNA, 22 nt, Homo sapiens
aagucacugaaggguuuugagu

SEQ ID NO: 4582 - RNA, 22 nt, Homo sapiens
agacuucccauuugaagguggc

SEQ ID NO: 4583 - RNA, 22 nt, Homo sapiens
gccaccuucaaaugggaagucu

SEQ ID NO: 4584 - RNA, 23 nt, Homo sapiens
aaacucuacuuguccuucugagu

SEQ ID NO: 4585 - RNA, 23 nt, Homo sapiens
acucagaaggacaaguagaguuu

SEQ ID NO: 4586 - RNA, 21 nt, Homo sapiens
ggcuagcaacagcgcuuaccu

SEQ ID NO: 4587 - RNA, 21 nt, Homo sapiens
agguaagcgcuguugcuagcc

SEQ ID NO: 4588 - RNA, 21 nt, Homo sapiens
acagucugcugagguuggagc

SEQ ID NO: 4589 - RNA, 21 nt, Homo sapiens
gcuccaaccucagcagacugu

SEQ ID NO: 4590 - RNA, 23 nt, Homo sapiens
aucccuugcaggggcuguugggu

SEQ ID NO: 4591 - RNA, 23 nt, Homo sapiens
acccaacagccccugcaagggau

SEQ ID NO: 4592 - RNA, 22 nt, Homo sapiens
gugagucucuaagaaaagagga

SEQ ID NO: 4593 - RNA, 22 nt, Homo sapiens
uccucuuuucuuagagacucac

SEQ ID NO: 4594 - RNA, 21 nt, Homo sapiens
ucuaguaagaguggcagucga

SEQ ID NO: 4595 - RNA, 21 nt, Homo sapiens
ucgacugccacucuuacuaga

SEQ ID NO: 4596 - RNA, 22 nt, Homo sapiens
augcugacauauuuacuagagg

SEQ ID NO: 4597 - RNA, 22 nt, Homo sapiens
ccucuaguaaauaugucagcau

SEQ ID NO: 4598 - RNA, 22 nt, Homo sapiens
guucucccaacguaagcccagc

SEQ ID NO: 4599 - RNA, 22 nt, Homo sapiens
gcugggcuuacguugggagaac

SEQ ID NO: 4600 - RNA, 21 nt, Homo sapiens
uggguuuacguugggagaacu

SEQ ID NO: 4601 - RNA, 21 nt, Homo sapiens
aguucucccaacguaaaccca

SEQ ID NO: 4602 - RNA, 19 nt, Homo sapiens
gugucugcuuccuguggga

SEQ ID NO: 4603 - RNA, 19 nt, Homo sapiens
ucccacaggaagcagacac

SEQ ID NO: 4604 - RNA, 23 nt, Homo sapiens
cuaauaguaucuaccacaauaaa

SEQ ID NO: 4605 - RNA, 23 nt, Homo sapiens
uuuauugugguagauacuauuag

SEQ ID NO: 4606 - RNA, 23 nt, Homo sapiens
ugugcuugcucgucccgcccgca

SEQ ID NO: 4607 - RNA, 23 nt, Homo sapiens
ugcgggcgggacgagcaagcaca

SEQ ID NO: 4608 - RNA, 25 nt, Homo sapiens
agggaucgcgggcggguggcggccu

SEQ ID NO: 4609 - RNA, 25 nt, Homo sapiens
aggccgccacccgcccgcgaucccu

SEQ ID NO: 4610 - RNA, 21 nt, Homo sapiens
augauccaggaaccugccucu

SEQ ID NO: 4611 - RNA, 21 nt, Homo sapiens
agaggcagguuccuggaucau

SEQ ID NO: 4612 - RNA, 19 nt, Homo sapiens
aguguggcuuucuuagagc

SEQ ID NO: 4613 - RNA, 19 nt, Homo sapiens
gcucuaagaaagccacacu

SEQ ID NO: 4614 - RNA, 19 nt, Homo sapiens
ucuaggcugguacugcuga

SEQ ID NO: 4615 - RNA, 19 nt, Homo sapiens
ucagcaguaccagccuaga

SEQ ID NO: 4616 - RNA, 19 nt, Homo sapiens
aagcagcugccucugaggc

SEQ ID NO: 4617 - RNA, 19 nt, Homo sapiens
gccucagaggcagcugcuu

SEQ ID NO: 4618 - RNA, 21 nt, Homo sapiens
guggcugcacucacuuccuuc

SEQ ID NO: 4619 - RNA, 21 nt, Homo sapiens
gaaggaagugagugcagccac

SEQ ID NO: 4620 - RNA, 21 nt, Homo sapiens
aggaggcagcgcucucaggac

SEQ ID NO: 4621 - RNA, 21 nt, Homo sapiens
guccugagagcgcugccuccu

SEQ ID NO: 4622 - RNA, 21 nt, Homo sapiens
aauggcgccacuaggguugug

SEQ ID NO: 4623 - RNA, 21 nt, Homo sapiens
cacaacccuaguggcgccauu

SEQ ID NO: 4624 - RNA, 25 nt, Homo sapiens
caacccuaggagagggugccauuca

SEQ ID NO: 4625 - RNA, 25 nt, Homo sapiens
ugaauggcacccucuccuaggguug

SEQ ID NO: 4626 - RNA, 22 nt, Homo sapiens
auaauacaugguuaaccucuuu

SEQ ID NO: 4627 - RNA, 22 nt, Homo sapiens
aaagagguuaaccauguauuau

SEQ ID NO: 4628 - RNA, 21 nt, Homo sapiens
aauauuauacagucaaccucu

SEQ ID NO: 4629 - RNA, 21 nt, Homo sapiens
agagguugacuguauaauauu

SEQ ID NO: 4630 - RNA, 25 nt, Homo sapiens
ggcggagggaaguagguccguuggu

SEQ ID NO: 4631 - RNA, 25 nt, Homo sapiens
accaacggaccuacuucccuccgcc

SEQ ID NO: 4632 - RNA, 24 nt, Homo sapiens
ugccugggucucuggccugcgcgu

SEQ ID NO: 4633 - RNA, 24 nt, Homo sapiens
acgcgcaggccagagacccaggca

SEQ ID NO: 4634 - RNA, 22 nt, Homo sapiens
aggcggggcgccgcgggaccgc

SEQ ID NO: 4635 - RNA, 22 nt, Homo sapiens
gcggucccgcggcgccccgccu

SEQ ID NO: 4636 - RNA, 22 nt, Homo sapiens
gguggcccggccgugccugagg

SEQ ID NO: 4637 - RNA, 22 nt, Homo sapiens
ccucaggcacggccgggccacc

SEQ ID NO: 4638 - RNA, 20 nt, Homo sapiens
accaggaggcugaggccccu

SEQ ID NO: 4639 - RNA, 20 nt, Homo sapiens
aggggccucagccuccuggu

SEQ ID NO: 4640 - RNA, 20 nt, Homo sapiens
gucccugaguguauguggug

SEQ ID NO: 4641 - RNA, 20 nt, Homo sapiens
caccacauacacucagggac

SEQ ID NO: 4642 - RNA, 21 nt, Homo sapiens
uccgguucucagggcuccacc

SEQ ID NO: 4643 - RNA, 21 nt, Homo sapiens
gguggagcccugagaaccgga

SEQ ID NO: 4644 - RNA, 23 nt, Homo sapiens
aggaagcccuggaggggcuggag

SEQ ID NO: 4645 - RNA, 23 nt, Homo sapiens
cuccagccccuccagggcuuccu

SEQ ID NO: 4646 - RNA, 20 nt, Homo sapiens
cuguaugcccucaccgcuca

SEQ ID NO: 4647 - RNA, 20 nt, Homo sapiens
ugagcggugagggcauacag

SEQ ID NO: 4648 - RNA, 23 nt, Homo sapiens
uggugcggagagggcccacagug

SEQ ID NO: 4649 - RNA, 23 nt, Homo sapiens
cacugugggcccucuccgcacca

SEQ ID NO: 4650 - RNA, 22 nt, Homo sapiens
caacuagacugugagcuucuag

SEQ ID NO: 4651 - RNA, 22 nt, Homo sapiens
cuagaagcucacagucuaguug

SEQ ID NO: 4652 - RNA, 23 nt, Homo sapiens
aaggagcuuacaaucuagcuggg

SEQ ID NO: 4653 - RNA, 23 nt, Homo sapiens
cccagcuagauuguaagcuccuu

SEQ ID NO: 4654 - RNA, 22 nt, Homo sapiens
gggacccagggagagacguaag

SEQ ID NO: 4655 - RNA, 22 nt, Homo sapiens
cuuacgucucucccuggguccc

SEQ ID NO: 4656 - RNA, 22 nt, Homo sapiens
gcagagugcaaacaauuuugac

SEQ ID NO: 4657 - RNA, 22 nt, Homo sapiens
gucaaaauuguuugcacucugc

SEQ ID NO: 4658 - RNA, 20 nt, Homo sapiens
cggcucugggucugugggga

SEQ ID NO: 4659 - RNA, 20 nt, Homo sapiens
uccccacagacccagagccg

SEQ ID NO: 4660 - RNA, 22 nt, Homo sapiens
gcagcagggugaaacugacaca

SEQ ID NO: 4661 - RNA, 22 nt, Homo sapiens
ugugucaguuucacccugcugc

SEQ ID NO: 4662 - RNA, 21 nt, Homo sapiens
uggaggagaaggaaggugaug

SEQ ID NO: 4663 - RNA, 21 nt, Homo sapiens
caucaccuuccuucuccucca

SEQ ID NO: 4664 - RNA, 23 nt, Homo sapiens
ucugcucauaccccaugguuucu

SEQ ID NO: 4665 - RNA, 23 nt, Homo sapiens
agaaaccaugggguaugagcaga

SEQ ID NO: 4666 - RNA, 23 nt, Homo sapiens
ugcaccaugguugucugagcaug

SEQ ID NO: 4667 - RNA, 23 nt, Homo sapiens
caugcucagacaaccauggugca

SEQ ID NO: 4668 - RNA, 23 nt, Homo sapiens
cugggaucuccggggucuugguu

SEQ ID NO: 4669 - RNA, 23 nt, Homo sapiens
aaccaagaccccggagaucccag

SEQ ID NO: 4670 - RNA, 22 nt, Homo sapiens
ugagaccucuggguucugagcu

SEQ ID NO: 4671 - RNA, 22 nt, Homo sapiens
agcucagaacccagaggucuca

SEQ ID NO: 4672 - RNA, 23 nt, Homo sapiens
uccaguaccacgugucagggcca

SEQ ID NO: 4673 - RNA, 23 nt, Homo sapiens
uggcccugacacgugguacugga

SEQ ID NO: 4674 - RNA, 22 nt, Homo sapiens
ggagacugaugaguucccggga

SEQ ID NO: 4675 - RNA, 22 nt, Homo sapiens
ucccgggaacucaucagucucc

SEQ ID NO: 4676 - RNA, 21 nt, Homo sapiens
gcaggaacuugugagucuccu

SEQ ID NO: 4677 - RNA, 21 nt, Homo sapiens
aggagacucacaaguuccugc

SEQ ID NO: 4678 - RNA, 22 nt, Homo sapiens
cugcccuggcccgagggaccga

SEQ ID NO: 4679 - RNA, 22 nt, Homo sapiens
ucggucccucgggccagggcag

SEQ ID NO: 4680 - RNA, 21 nt, Homo sapiens
ccuggaaacacugagguugug

SEQ ID NO: 4681 - RNA, 21 nt, Homo sapiens
cacaaccucaguguuuccagg

SEQ ID NO: 4682 - RNA, 22 nt, Homo sapiens
uauaccucaguuuuaucaggug

SEQ ID NO: 4683 - RNA, 22 nt, Homo sapiens
caccugauaaaacugagguaua

SEQ ID NO: 4684 - RNA, 22 nt, Homo sapiens
uggugguuuacaaaguaauuca

SEQ ID NO: 4685 - RNA, 22 nt, Homo sapiens
ugaauuacuuuguaaaccacca

SEQ ID NO: 4686 - RNA, 22 nt, Homo sapiens
uggauuucuuugugaaucacca

SEQ ID NO: 4687 - RNA, 22 nt, Homo sapiens
uggugauucacaaagaaaucca

SEQ ID NO: 4688 - RNA, 21 nt, Homo sapiens
uccucuucucccuccucccag

SEQ ID NO: 4689 - RNA, 21 nt, Homo sapiens
cugggaggagggagaagagga

SEQ ID NO: 4690 - RNA, 20 nt, Homo sapiens
guagaggagauggcgcaggg

SEQ ID NO: 4691 - RNA, 20 nt, Homo sapiens
cccugcgccaucuccucuac

SEQ ID NO: 4692 - RNA, 22 nt, Homo sapiens
gugaacgggcgccaucccgagg

SEQ ID NO: 4693 - RNA, 22 nt, Homo sapiens
ccucgggauggcgcccguucac

SEQ ID NO: 4694 - RNA, 22 nt, Homo sapiens
gacugacaccucuuugggugaa

SEQ ID NO: 4695 - RNA, 22 nt, Homo sapiens
uucacccaaagaggugucaguc

SEQ ID NO: 4696 - RNA, 21 nt, Homo sapiens
uacucaaaaagcugucaguca

SEQ ID NO: 4697 - RNA, 21 nt, Homo sapiens
ugacugacagcuuuuugagua

SEQ ID NO: 4698 - RNA, 21 nt, Homo sapiens
uuaauaucggacaaccauugu

SEQ ID NO: 4699 - RNA, 21 nt, Homo sapiens
acaaugguuguccgauauuaa

SEQ ID NO: 4700 - RNA, 22 nt, Homo sapiens
auccgcgcucugacucucugcc

SEQ ID NO: 4701 - RNA, 22 nt, Homo sapiens
ggcagagagucagagcgcggau

SEQ ID NO: 4702 - RNA, 20 nt, Homo sapiens
gugagucaggguggggcugg

SEQ ID NO: 4703 - RNA, 20 nt, Homo sapiens
ccagccccacccugacucac

SEQ ID NO: 4704 - RNA, 22 nt, Homo sapiens
ugcccuuaaaggugaacccagu

SEQ ID NO: 4705 - RNA, 22 nt, Homo sapiens
acuggguucaccuuuaagggca

SEQ ID NO: 4706 - RNA, 22 nt, Homo sapiens
ucuucucuguuuuggccaugug

SEQ ID NO: 4707 - RNA, 22 nt, Homo sapiens
cacauggccaaaacagagaaga

SEQ ID NO: 4708 - RNA, 22 nt, Homo sapiens
aaauuauuguacaucggaugag

SEQ ID NO: 4709 - RNA, 22 nt, Homo sapiens
cucauccgauguacaauaauuu

SEQ ID NO: 4710 - RNA, 22 nt, Homo sapiens
uucaacggguauuuauugagca

SEQ ID NO: 4711 - RNA, 22 nt, Homo sapiens
ugcucaauaaauacccguugaa

SEQ ID NO: 4712 - RNA, 22 nt, Homo sapiens
cuauacaacuuacuacuuuccc

SEQ ID NO: 4713 - RNA, 22 nt, Homo sapiens
gggaaaguaguaaguuguauag

SEQ ID NO: 4714 - RNA, 22 nt, Homo sapiens
ugagguaguaaguuguauuguu

SEQ ID NO: 4715 - RNA, 22 nt, Homo sapiens
aacaauacaacuuacuaccuca

SEQ ID NO: 4716-4733 - skipped (18 entries)

SEQ ID NO: 4734 - DNA, 3131 bp, Adeno-associated virus
gcggccgcgaattcgcccttggctgcgtcaactggaccaatgagaactttcccttcaatgattgcgtcgacaagatggtgatctggtgggaggagggcaagatgacggccaaggtcgtggagtccgccaaggccattctcggcggcagcaaggtgcgcgtggaccaaaagtgcaagtcgtccgcccagatcgaccccacccccgtgatcgtcacctccaacaccaacatgtgcgccgtgattgacgggaacagcaccaccttcgagcaccagcagcctctccaggaccggatgtttaagttcgaactcacccgccgtctggagcacgactttggcaaggtgacaaagcaggaagtcaaagagttcttccgctgggccagtgatcacgtgaccgaggtggcgcatgagttttacgtcagaaagggcggagccagcaaaagacccgcccccgatgacgcggataaaagcgagcccaagcgggcctgcccctcagtcgcggatccatcgacgtcagacgcggaaggagctccggtggactttgccgacaggtaccaaaacaaatgttctcgtcacgcgggcatgcttcagatgctgtttccctgcaaaacgtgcgagagaatgaatcggaatttcaacatttgcttcacacacggggtcagagactgctcagagtgtttccccggcgtgtcagaatctcaaccggtcgtcagaaagaggacgtatcggaaactccgtgcgattcatcatctgctggggcgggctcccgagattgcttgctcggcctgcgatctggtcaacgtggacctggatgactgtgtttctgagcaataaatgacttaaaccaggtatggctgccgatggttatcttccagattggctcgaggacaacctctctgagggcattcgcgagtggtgggcgctgaaacctggagccccgaagcccaaagccaaccagcaaaagcaggacgacggccggggtctggtgcttcctggctacaagtacctcggacccttcaacggactcgacaagggggagcccgtcaacgcggcggacgcagcggccctcgagcacgacaaggcttacgaccagcagctgcaggcgggtgacaatccgtacctgcggtataaccacgccgacgccgagtttcaggagcgtctgcaagaagatacgtcttttgggggcaacctcgggcgagcagtcttccaggccaagaagcgggttctcgaacctctcggtctggttgaggaaggcgctaagacggctcctggaaagaagagaccggtagagccatcaccccagcgttctccagactcctctacgggcatcggcaagaaaggccaacagcccgccagaaaaagactcaattttggtcagactggcgactcagagtcagttccagaccctcaacctctcggagaacctccagcagcgccctctggtgtgggacctaatacaatggctgcaggcggtggcgcaccaatggcagacaataacgaaggcgccgacggagtgggtagttcctcgggaaattggcattgcgattccacatggctgggcgacagagtcatcaccaccagcacccgaacctgggccctgcccacctacaacaaccacctctacaagcaaatctccaacgggacatcgggaggagccaccaacgacaacacctacttcggctacagcaccccctgggggtattttgactttaacagattccactgccacctttcaccacgtgactggcagcgactcatcaacaacaactggggattccgacccaagagactcagcttcaagctcttcaacatccaggtcaaggaggtcacgcagaatgaaggcaccaagaccatcgccaataacctcaccagcaccatccaggtgtttacggactcggagtaccagctgccgtacgttctcggctctgtccaccagggctgcctgcctccgttcccggcggacgtgttcatgattccccagtacggctacctaacactcaacaacggtagtcaggccgtgggacgctcctccttctactgcctggaatactttccttcgcagatgctgagaaccggcaacaacttccagtttacttacaccttcgaggacgtgcctttccacagcagctacgcccacagctagagcttggaccggctgatgaatcctctgattgaccagtacctgtactacttgtctcggactcaaacaacaggaggcacggcaaatacgcagactctgggcttcagccaaggtgggcctaatacaatggccaatcaggcaaagaactggctgccaggaccctgttaccgccaacaacgcgtctcaacgacaaccgggcaaaacaacaatagcaactttgcctggactgctgggaccaaataccatctgaatggaagaaattcattggctaatcctggcatcgctatggcaacacacaaagacgacgaggagcgtttttttcccagtaacgggatcctgatttttggcaaacaaaatgctgccagagacaatgcggattacagcgatgtcatgctcaccagcgaggaagaaatcaaaaccactaaccctgtggctacagaggaatacggtatcgtggcagataacttgcagcagcaaaacacggctcctcaaattggaactgtcaacagccagggggccttacccggtatggtctggcagaaccgggacgtgtacctgcagggtcccatctgggccaagattcctcacacggacggcaacttccacccgtctccgctgatgggcggctttggcctgaaacatcctccgcctcagatcctgatcaagaacacgcctgtacctgcggatcctccgaccaccttcaaccagtcaaagctgaactctttcatcacgcaatacagcaccggacaggtcagcgtggaaattgaatgggagctgcagaaggaaaacagcaagcgctggaaccccgagatccagtacacctccaactactacaaatctataagtgtggactttgctgttaatacagaaggcgtgtactctgaaccccgccccattggcacccgttacctcacccgtaatctgtaattgcctgttaatcaataaaccggttgattcgtttcagttgaactttggtctctgcgaagggcgaattc

SEQ ID NO: 4735 - protein, 728 aa, Adeno-associated virus
MAADGYLPDWLEDNLSEGIREWWDLKPGAPKPKANQQKQDDGRGLVLPGYKYLGPFNGLDKGEPVNEADAAALEHDKAYDKQLEQGDNPYLKYNHADAEFQERLQEDTSFGGNLGRAVFQAKKRVLEPLGLVEEGAKTAPGKKRPIESPDSSTGIGKKGQQPAKKKLNFGQTGDSESVPDPQPLGEPPAAPSGLGSGTMAAGGGAPMADNNEGADGVGNASGNWHCDSTWLGDRVITTSTRTWALPTYNNHLYKQISSQSGATNDNHFFGYSTPWGYFDFNRFHCHFSPRDWQRLINNNWGFRPRKLRFKLFNIQVKEVTTNDGVTTIANNLTSTIQVFSDSEYQLPYVLGSAHQGCLPPFPADVFMIPQYGYLTLNNGSQSMGRSSFYCLEYFPSQMLRTGNNFEFSYTFEEVPFHSSYAHSQSLDRLMNPLIDQYLYYLARTQSTTGSTRELQFHQAGPNTMAEQSKNWLPGPCYRQQRLSKNIDSNNNSNFAWTGATKYHLNGRNSLTNPGVAMATNKDDEGQFFPINGVLVFGKTGAANKTTLENVLMTSEEEIKTTNPVATEEYGVVSSNLQSSTAGPQTQTVNSQGALPGMVWQNRDVYLQGPIWAKIPHTDGNFHPSPLMGGFGLKHPPPQILIKNTPVPANPPGVFTPALFASFITQYSTGQVSVEIEWELQKENSKRWNPEIQYTSNYAKSNNVEFAVNNEGVYTEPRPIGTRYLTRNL

SEQ ID NO: 4736 - protein, 644 aa, Adeno-associated virus
  MOD_RES (434)..(434): Any amino acid
KAYDQQLKAGDNPYLRYNHADAEFQERLQEDTSFGGNLGRAVFQAKKRVLEPLGLVETPAKTAPGKKRPVDSPDSTSGIGKKGQQPAKKRLNFGQTGDSESVPDPQPIGEPPAGPSGLGSGTMAAGGGAPMADNNEGADGVGNASGNWHCDSTWLGDRVITTSTRTWALPTYNNHLYKQISSQSAGSTNDNVYFGYSTPWGYFDFNRFHCHFSPRDWQRLINNNWGFRPKKLNFKLFNIQVKEVTTNDGVTTIANNLTSTVQVFSDSEYQLPYVLGSAHQGCLPPFPADVFMIPQYGYLTLNNGSQSVGRSSFYCLEYFPSQMLRTGNNFTFSYTFEDVPFHSSYAHSQSLDRLMNPLIDQYLYYLARTQSNAGGTAGNRELQFYQGGPTTMAEQAKNWLPGPCFRQQRVSKTLDQNNNSNFAWTGATKYHLNXRNSLVNPGVAMATHKDDEERFFPSSGVLIFGKTGAANKTTLENVLMTNEEEIRPTNPVATEEYGIVSSNLQAASTAAQTQVVNNQGALPGMVWQNRDVYLQGPIWAKIPHTDGNFHPSPLMGGFGLKHPPPQILIKNTPVPANPPEVFTPAKFASFITQYSTGQVSVEIEWELQKENSKRWNPEIQYTSNFDKQTGVDFAVDSQGVYSEP

SEQ ID NO: 4737 - DNA, 1933 bp, Adeno-associated virus
caaggcctacgaccagcagctcaaagcgggtgacaatccgtacctgcggtataaccacgccgacgccgagtttcaggagtgtcttcaagaagatacgtcttttgggggcaacctcgggcgagcagtcttccaggccaaaaagcgggttctcgaacctcttggtctggttgagacgccagctaagacggcacctggaaagaagcgaccggtagactcgccagactccacctcgggcatcggcaagaaaggccagcagcccgcgaaaaagagactcaactttgggcagactggcgactcagagtcagtccccgaccctcaaccaatcggagaaccaccagcaggcccctctggtctgggatctggtacaatggttgcaggcggtggcgcaccaatggctgacaataacgagggcgccgacggagtgggtaatgcctcaggaaattggcattgcgattccacatggctgggcgacagagtcatcaccaccagcacccgaacctgggccctgcccacctacaacaaccacctctacaagcaaatctccagtcagtcagcagggagcaccaacgataacgtctatttcggctacagcaccccctgggggtattttgacttcaacagattccattgccacttctcaccacgtgactggcagcgacttatcaacaacaactggggattccggcccaagaagctcaacttcaagctcttcaacatccaggtcaaggaggtcacgacgaatgacggtgtcacaaccatcgctaataaccttaccagcacggttcaggtcttttcggactcggaatatcaactgccgtacgtcctcggctccgcgcaccagggctgcctgcctccgttcccggcagacgtgttcatgattccgcagtacggatacctgactctgaacaatggcagccaatcggtaggccgttcctccttctactgcctggagtactttccttctcagatgctgagaacgggcaacaacttcacctttagctacaccttcgaggacgtgcctttccacagcagctacgcgcacagccagagtctggaccggctgatgaatcccctcatcgaccagtacctgtactacttggccagaacacagagcaacgcaggaggtactgctggcaatcgggaactgcagttttatcagggcggacctaccaccatggccgaacaagcaaagaactggctgcccggaccttgcttccggcaacagagagtatccaagacgctggatcaaaataacaacagcaactttgcctggactggtgccacaaaataccatttaaatggaagaaattcattggttaatcccggtgtcgccatggcaacccacaaggacgacgaggaacgcttctccccttcgagcggagttctaatttttggcaaaactggagcagctaataaaactacattagaaaacgtgctcatgacaaatgaagaagaaattcgtcctaccaacccggtagctaccgaggaatacgggattgtaagcagcaacttgcaggcggctagcaccgcagcccagacacaagttgttaacaaccagggagccttacctggcatggtctggcagaaccgggacgtgtacctgcaaggtcccatttgggccaagattcctcacacggacggcaactttcacccgtctcctctaatgggtggctttggactgaaacacccgcctccccagatcctgatcaaaaacacgccggtacctgctaatcctccagaagtgtttactcctgccaagtttgcttccttcatcacgcagtacagcaccgggcaagtcagcgttgagatcgagtgggagctgcagaaagagaacagcaagcgctggaacccagagattcagtacacctccaactttgacaaacagactggagtggactttgctgttgacagccagggtgtttactctgagcct

SEQ ID NO: 4738 - protein, 644 aa, Adeno-associated virus
KAYDQQLKAGDNPYLRYNHADAEFQECLQEDTSFGGNLGRAVFQAKKRVLEPLGLVETPAKTAPGKKRPVDSPDSTSGIGKKGQQPAKKRLNFGQTGDSESVPDPQPIGEPPAGPSGLGSGTMVAGGGAPMADNNEGADGVGNASGNWHCDSTWLGDRVITTSTRTWALPTYNNHLYKQISSQSAGSTNDNVYFGYSTPWGYFDFNRFHCHFSPRDWQRLINNNWGFRPKKLNFKLFNIQVKEVTTNDGVTTIANNLTSTVQVFSDSEYQLPYVLGSAHQGCLPPFPADVFMIPQYGYLTLNNGSQSVGRSSFYCLEYFPSQMLRTGNNFTFSYTFEDVPFHSSYAHSQSLDRLMNPLIDQYLYYLARTQSNAGGTAGNRELQFYQGGPTTMAEQAKNWLPGPCFRQQRVSKTLDQNNNSNFAWTGATKYHLNGRNSLVNPGVAMATHKDDEERFSPSSGVLIFGKTGAANKTTLENVLMTNEEEIRPTNPVATEEYGIVSSNLQAASTAAQTQVVNNQGALPGMVWQNRDVYLQGPIWAKIPHTDGNFHPSPLMGGFGLKHPPPQILIKNTPVPANPPEVFTPAKFASFITQYSTGQVSVEIEWELQKENSKRWNPEIQYTSNFDKQTGVDFAVDSQGVYSEP

SEQ ID NO: 4739 - DNA, 1933 bp, Adeno-associated virus
caaggcctacgaccagcagctcaaagcgggtgacaatccgtacctgcggtataaccacgccgacgccgagtttcaggagcgtcttcaagaagatacgtcttttgggggcaacctcgggcgagcagtcttccaggccaaaaagcgggttctcgaacctcttggtctggttgagacgccagctaagacggcacctggaaagaagcgaccggtagactcgccagactccacctcgggcatcggcaagaaaggccagcagcccgcgaaaaagagactcaactttgggcagactggcgactcagagccagtccccgaccctcaaccaatcggagaaccaccagcaggcccctctggtctgggatctggtacaatggctgcaggcggtggcgcaccaatggctgacaataacgagggcgccgacggagtgggtaatgcctcaggaaattggcattgcgattccacacggctgggcgacagagtcatcaccaccagcacccgaacctgggccctgcccacctacaacaaccacctctacaagcaaatctccagtcagtcagcagggagcaccaacgataacgtctatttcggctacagcaccccctgggggtattttgacttcaacagattccattgccacttctcaccacgtgactggcagcgacttatcaacaacaactggggattccggcccaagaagctcaacttcaagctcttcaacatccaggtcaaggaggtcacgacgaatgacggcgtcacaaccatcgctaataaccttaccagcacggttcaggtcttttcggactcggaatatcaactgccgtacgtcctcggctccgcgcaccagggctgcctgcctccgttcccggcagacgtgttcatgattccgcagtacggatacctgactctgaacaatggcagccaatcggtaggccgttcctccttctactgcctggagtactttccttctcagatgctgagaacgggcaacaacttcacctttagctacaccttcgaggacgtgcctttccacagcagctacgcgcacagccagagtctgggccggctgatgaatcccctcatcgaccagtacctgtactacttggccagaacacagagcaacgcaggaggtactgctggcaatcgggaactgcagttttatcagggcggacctaccaccatggccgaacaagcaaagaactggctgcccggaccttgcttccggcaacagagagtatccaagacgctggatcaaaataacaacagcaactttgcctggactggtgccacaaaataccatttaaatggaagaaattcattggttaatcccggtgtcgccatggcaacccacaaggacgacgaggaacgcttcttcccttcgagcggagttctaatttttggcaaaactggagcagctaataaaactacattagaaaacgtgctcatgacaaatgaagaagaaattcgtcctaccaacccggtagctaccgaggaatacgggattgtaagcagcaacttgcaggcggctagcaccgcagcccagacacaagttgttaacaaccagggagccttacctggcatggtctggcagaaccgggacgtgtacctgcaaggtcccatttgggccaagattcctcacacggacggcaactttcacccgtctcctctaatgggtggctttggactgaaacacccgcctccccagatcctgatcaaaaacacaccggtacctgctaatcctccagaagtgtttactcctgccaagtttgcttccttcatcacgcagtacagcaccgggcaagtcagcgttgagatcgaatgggagctgcagaaagagaacagcaagcgctggaacccagagattcagtacacctccaactttgacaaacagactggagtggactttgctgttgacagccagggtgtttactctgagcct

SEQ ID NO: 4740 - protein, 644 aa, Adeno-associated virus
KAYDQQLKAGDNPYLRYNHADAEFQERLQEDTSFGGNLGRAVFQAKKRVLEPLGLVETPAKTAPGKKRPVDSPDSTSGIGKKGQQPAKKRLNFGQTGDSEPVPDPQPIGEPPAGPSGLGSGTMAAGGGAPMADNNEGADGVGNASGNWHCDSTRLGDRVITTSTRTWALPTYNNHLYKQISSQSAGSTNDNVYFGYSTPWGYFDFNRFHCHFSPRDWQRLINNNWGFRPKKLNFKLFNIQVKEVTTNDGVTTIANNLTSTVQVFSDSEYQLPYVLGSAHQGCLPPFPADVFMIPQYGYLTLNNGSQSVGRSSFYCLEYFPSQMLRTGNNFTFSYTFEDVPFHSSYAHSQSLGRLMNPLIDQYLYYLARTQSNAGGTAGNRELQFYQGGPTTMAEQAKNWLPGPCFRQQRVSKTLDQNNNSNFAWTGATKYHLNGRNSLVNPGVAMATHKDDEERFFPSSGVLIFGKTGAANKTTLENVLMTNEEEIRPTNPVATEEYGIVSSNLQAASTAAQTQVVNNQGALPGMVWQNRDVYLQGPIWAKIPHTDGNFHPSPLMGGFGLKHPPPQILIKNTPVPANPPEVFTPAKFASFITQYSTGQVSVEIEWELQKENSKRWNPEIQYTSNFDKQTGVDFAVDSQGVYSEP

SEQ ID NO: 4741 - DNA, 1933 bp, Adeno-associated virus; identical to SEQ ID NO: 4739

SEQ ID NO: 4742 - protein, 644 aa, Adeno-associated virus; identical to SEQ ID NO: 4740

SEQ ID NO: 4743 - DNA, 1933 bp, Adeno-associated virus
caaggcctacgaccagcagctcaaagcgggtgacaatccgtacctgcggtataaccacgccgacgccgagtttcaggagcgtcttcaagaagatacgtcttttgggggcaacctcgggcgagcagtcttccaggccaaaaagcgggttctcgaacctcttggtctggttgagacgccagctaagacggcacctggaaagaagcgaccggtagactcgccagactccacctcgggcatcggcaagaaaggccagcagcccgcgaaaaagagactcaactttgggcagactggcgactcagagtcagtccccgaccctcaaccaatcggagaaccaccagcaggcccctctggtctgggatctggtacaatggctgcaggcggtggcgcaccaatggctgacaatagcgagggcgccgacggagtgggtaatgcctcaggaaattggcattgcgattccacatggctgggcgacagagtcatcaccaccagcacccgaacctgggccctgcccacctacaacaaccacctctacaagcaaatctccagtcagtcagcagggagcaccaacgataacgtctatttcggctacagcaccccctgggggtattttgacttcaacagattccattgccacttctcaccacgtgactggcagcgacttatcaacaacaactggggattccggcccaagaagctcaacttcaagctcttcaacatccaggtcaaggaggtcacgacgaatgacggtgtcacaaccatcgctaataaccttaccagcacggttcaggtcttttcggactcggaatatcaactgccgtacgtcctcggctccgcgcaccagggctgcctgcctccgttcccggcagacgtgttcatgattccgcagtacggatacctgactctgaacaatggcagccaatcggtaggccgttcctccttctactgcctggagtactttccttctcagatgctgagaacgggcaacaacttcacctttagctacaccttcgaggacgtgcctttccacagcagctacgcgcacagccagagtctggaccggctgatgaatcccctcatcgaccagtacctgtactacttggccagaacacagagcaacgcaggaggtactgctggcaatcgggaactgcagttttatcagggcggacctaccaccatggccgaacaagcaaagaactggctgcccggaccttgcttccggcaacagagagtatccaagacgctggatcaaaataacaacagcaactttgcctggactggtgccacaaaataccatttaaatggaagaaattcattggttaatcccggtgtcgccatggcaacccacaaggacgacgaggaacgcttcttcccttcgagcggagttctaatttttggcaaaactggagcagctaataaaactacattagaaaacgtgctcatgacaaatgaagaagaaattcgtcctaccaacccggtagctaccgaggaatacgggattgtaagcagcaacttgcaggcggctagcaccgcagcccagacacaagttgttaacaaccagggagccttacctggcatggtctggcagaaccgggacgtgtacctgcaaggtcccatttgggccaagattcctcacacggacggcaactttcacccgtctcctctaatgggtggctttggactgaaacacccgcctccccagatcctgatcaaaaacacaccggtacctgctaatcctccagaagtgtttactcctgccaagcttgcttccttcatcacgcagtacagcaccgggcaagtcagcgttgagatcgagtgggagctgcagaaagagaacagcaagcgctggaacccagagattcagtacacctccaactttgacaaacagactggagtggactttgctgttgacagccagggtgtttactctgagcct

SEQ ID NO: 4744 - protein, 644 aa, Adeno-associated virus
KAYDQQLKAGDNPYLRYNHADAEFQERLQEDTSFGGNLGRAVFQAKKRVLEPLGLVETPAKTAPGKKRPVDSPDSTSGIGKKGQQPAKKRLNFGQTGDSESVPDPQPIGEPPAGPSGLGSGTMAAGGGAPMADNSEGADGVGNASGNWHCDSTWLGDRVITTSTRTWALPTYNNHLYKQISSQSAGSTNDNVYFGYSTPWGYFDFNRFHCHFSPRDWQRLINNNWGFRPKKLNFKLFNIQVKEVTTNDGVTTIANNLTSTVQVFSDSEYQLPYVLGSAHQGCLPPFPADVFMIPQYGYLTLNNGSQSVGRSSFYCLEYFPSQMLRTGNNFTFSYTFEDVPFHSSYAHSQSLDRLMNPLIDQYLYYLARTQSNAGGTAGNRELQFYQGGPTTMAEQAKNWLPGPCFRQQRVSKTLDQNNNSNFAWTGATKYHLNGRNSLVNPGVAMATHKDDEERFFPSSGVLIFGKTGAANKTTLENVLMTNEEEIRPTNPVATEEYGIVSSNLQAASTAAQTQVVNNQGALPGMVWQNRDVYLQGPIWAKIPHTDGNFHPSPLMGGFGLKHPPPQILIKNTPVPANPPEVFTPAKLASFITQYSTGQVSVEIEWELQKENSKRWNPEIQYTSNFDKQTGVDFAVDSQGVYSEP

SEQ ID NO: 4745 - DNA, 1933 bp, Adeno-associated virus
caaggcctacgaccagcagctcaaagcgggtgacaatccgtacctgcggtataaccacgccgacgccgagtttcaggagcgtcttcaagaagatacgtcttttgggggcaacctcgggcgagcagtcttccaggccaaaaagcgggttctcgaacctcttggtctggttgagacgccagctaagacggcacctggaaagaagcgaccggtagactcgccagactccacctcgggcatcggcaagaaaggccagcagcccgcgaaaaagagactcaactttgggcagactggcgactcagagtcagtccccgaccctcaaccaatcggagaaccaccagcaggcccctctggtctgggatctggtacaatggctgcaggcggtggcgcaccaatggctgacaataacgagggcgccgacggagtgggtaatgcctcaggaaattggcattgcgattccacatggctgggcgacagagtcatcaccaccagcacccgaacctgggccctgcccacctacaacaaccacctctacaagcaaatctccagtcagtcagcagggagcaccaacgataacgtctatttcggctacagcaccccctgggggtattttgacttcaacagattccattgccacttctcaccacgtgactggcagcgacttatcaacaacaactggggattccggcccaagaagctcaacttcaagctcttcaacatccaggtcaaggaggtcacgacgaatgacggcgtcacaaccatcgctaataaccttaccagcacggttcaggtcttttcggacccggaatatcaactgccgtacgtcctcggctccgcgcaccagggctgcctgcctccgttcccggcagacgtgttcatgattccgcagtacggatacctgactctgaacaatggcagccaatcggtaggccgttcctccttctactgcctggagtactttccttctcagatgctgagaacgggcaacaacttcacctttagctacaccttcgaggacgtgcctttccacagcagctacgcgcacagccagagtctggaccggctgatgaatcccctcatcgaccagtacctgtactacttggccagaacacagagcaacgcaggaggtactgctggcaatcgggaactgcagttttatcagggcggacctaccaccatggccgaacaagcaaagaactggctgcccggaccttgcttccggcaacagagagtatccaagacgctggatcaaaataacaacagcaactttgcctggactggtgccacaaaataccatttaaatggaagaaattcattggttaatcccggtgtcgccatggcaacccacaaggacgacgaggaacgcttcttcccttcgagcggagttctaatttttggcaaaactggagcagctaataaaactacattagaaaacgtgctcatgacaaatgaagaagaaattcgtcctaccaacccggtagctaccgaggaatacgggattgtaagcagcaacttgcaggcggctagcaccgcagcccagacacaagttgttaacaaccagggagccttacctggcatggtctggcagaaccgggacgtgtacctgcaaggtcccatttgggccaagattcctcacacggacggcaactttcacccgtctcctctaatgggtggctttggactgaaacacccgcctccccagatcctgatcaaaaacacaccggtacctgctaatcctccagaagtgtttactcctgccaagattgcttccttcatcacgcagtacagcaccgggcaagtcagcgttgagatcgagtgggagctgcagaaagagaacagcaagcgctggaacccagagattcagtacacctccaactttgacaaacagactggagtggactttgctgttgacagccagggtgtttactctgagcct

SEQ ID NO: 4746 - protein, 644 aa, Adeno-associated virus
KAYDQQLKAGDNPYLRYNHADAEFQERLQEDTSFGGNLGRAVFQAKKRVLEPLGLVETPAKTAPGKKRPVDSPDSTSGIGKKGQQPAKKRLNFGQTGDSESVPDPQPIGEPPAGPSGLGSGTMAAGGGAPMADNNEGADGVGNASGNWHCDSTWLGDRVITTSTRTWALPTYNNHLYKQISSQSAGSTNDNVYFGYSTPWGYFDFNRFHCHFSPRDWQRLINNNWGFRPKKLNFKLFNIQVKEVTTNDGVTTIANNLTSTVQVFSDPEYQLPYVLGSAHQGCLPPFPADVFMIPQYGYLTLNNGSQSVGRSSFYCLEYFPSQMLRTGNNFTFSYTFEDVPFHSSYAHSQSLDRLMNPLIDQYLYYLARTQSNAGGTAGNRELQFYQGGPTTMAEQAKNWLPGPCFRQQRVSKTLDQNNNSNFAWTGATKYHLNGRNSLVNPGVAMATHKDDEERFFPSSGVLIFGKTGAANKTTLENVLMTNEEEIRPTNPVATEEYGIVSSNLQAASTAAQTQVVNNQGALPGMVWQNRDVYLQGPIWAKIPHTDGNFHPSPLMGGFGLKHPPPQILIKNTPVPANPPEVFTPAKIASFITQYSTGQVSVEIEWELQKENSKRWNPEIQYTSNFDKQTGVDFAVDSQGVYSEP

SEQ ID NO: 4747 - protein, 728 aa, Adeno-associated virus
MAADGYLPDWLEDNLSEGIREWWDLKPGAPKPKANQQKQDDGRGLVLPGYKYLRPFNGLDKGEPVNEADAAALEHDKAYDKQLEQGDNPYLKYNHADAEFQERLQEDTSFGGNLGRAVFQAKKRVLEPLGLVEEVAKTAPGKKRPIESPDSSTGIGKKGQQPAKKKLNFGQTGDSESVPDPQPLGEPPAAPSGLGSGTMAAGGGAPMADNNEGADGVGNASGNWHCDSTWLGDRVITTSTRTWALPTYNNHLYKQISSQSGATNDNHFFSYSTPWGYFDFNRFHCHFSPRDWQRLINNNWGFRPRKLRFKLFNIQVKEVTTNDGVTTIANNLTSTIQVFSDSEYQLPYVLGSAHQGCLPPFPADVFMIPQYGYLTLNNGSQSVGRSSFYCLEYFPSQMLRTGNNFEFSYTFEEVPFHSSYVHSQSLDRLMNPLIDQYLYYLARTQSTTGSTRELQFHQAGPNTMAEQSKNWLPGPCYRQQRLSKNIDSNNNSNFAWTGATKYHLNGRNSLTNPGVAMATNKDDEDQFFPINGVLVFGKTGAANKTTLENVLMTSEEEIKTTNPVATEEYGVVSSNLQSSTAGPQTQTVNSQGALPGMVWQNRDVCLQGPIWAKIPHTDGNFHPSPLMGGFGLKHPPPQILIKNTPVPANPPEVFTPAKFASFITQYSTGQVSVEIEWELQKENSKRWNPEIQYTSNYAKSNNVEFAVNNEGVYTEPRPIGTRYLTRNL

SEQ ID NO: 4748 - protein, 728 aa, Adeno-associated virus
MAADGYLPDWLEDNLSEGIREWWDLKPGAPKPKANQQKQDDGRGLVLPGYKYLGPFNGLDKGEPVNEADAAALEHDKAYDKQLEQGDNPYLKYNHADAEFQERLQEDTSFGGNLGRAVFQAKKRVLEPLGLVEEGAKTASGKKRPIESPDSSTGIGKKGQQPAKKKLNFGQTGDSESVPDPQPLGEPPAAPSGLGSGTMAAGGGAPMADNNEGADGVGNASGNWHCDSTWLGDRVITTSTRTWALPTYNNHLYKQISSQSGATNDNHFFGYSTPWGYFDFNRFHCHFSPRDWQRLINNNWGFRPRKLRFKLFNIQVKEVTTNDGVTTIANNLTSTIQVFSDSEYQLPYVLGSAHQGCLPPFPADVFMIPQYGYLTLNNGSQSVGRSSFCCLEYFPSQMLRTGNNFEFSYTFEEVPFHSSYAHSQSLDRLMNPLIDQYLYYLARTQSTTGSTRELQFHQAGPNTVAEQSKNWLPGPCYRQQRLSKNIDSNNNSNFAWTGATKYHLNGRNSLTNPGVAMATNKDDEDQFLPINGVLVFGKTGAANKTTLENVLMTSEEEIKTTNPVATEEYGVVSSNLQSSTAGPRTQTVNSQGALPGMVWQNRDVYLQGPIWAEIPHTDGNFHPSPLMGGFGLKHPPPQILIKNTPVPANPPEVFTPAKFASFITQYSTGQVSVEIEWELQKENSKRWNPEIQYTSNYAKSNNVEFAVNNEGVYTEPRPIGTRYLTRNL

SEQ ID NO: 4749 - protein, 738 aa, Adeno-associated virus
MAADGYLPDWLEDNLSEGIREWWALKPGAPKPKANQQKQDDGRGLVLPGYKYLGPFNGLDKGEPVNAADAAALEHDKAYDQQLKAGDNPYLRYNHADAEFQERLQEDTSFGGNLGRAVFQAKKRVLEPLGLVEEGAKTAPGKKRPVEPSPQRSPDSTTGIGKKGQQPAKKRLNFGQTGDSESVPDPQPIGEPPAGPSGLGSGTMAAGGGAPMADNNEGADGVGSSSGNWHCDSTWLGDRVITTSTRTWALPTYNNHLYKQISNGTSGGSTNDNTYFGYSTPWGYFDFNRFHCHFSPRDWQRLINNNWGFRPKRLNFKLFNIQVKEVTQNEGTKTIANNLTSTIQVFTDSEYQLPYVLGSARQGCLPPFPADVFMIPQYGYLTLNNGSQAVGRSSFYCLEYFPSQMLRTGNNFEFSYQFEDVPFHSSYAHSQSLDRLMNPLIDQYLYYLSRTQSTGGTAGTQQLLFSQAGPNNMSAQAKNWLPGPCYRQQRVSTTLSQNNNSNFAWTGATKYHLNGRDSLVNPGVAMATHKDDEERFFPSSGVLMFGKQGAGKGNVDYSSVMLTSEEEIKTTNPVATEQYGVVADNLQQQNAAPIVGAVNSQGALPGMVWQNRDVYLQGPIWAKIPHTDGNFHPSPLMGGFGLKHPPPQILIKNTPVPADPPTTFSQAKLASFITQYSTGQVSVEIEWELQKENSKRWNPEIQYTSNYYKSTNVDFAVNTDGTYSEPRPIGTRYLTRNL

SEQ ID NO: 4750 - DNA, 3121 bp, Adeno-associated virus
gaattcgcccttcgcagagaccaaagttcaactgaaacgaatcaaccggtttattgattaacaagcaattacagattacgggtgaggtaacgggtgccgatggggcgaggctcagaataagtgccatctgtgttaacagcaaagtccacatttgtagatttgtagtagttggaagtgtattgaatctctgggttccagcgtttgctgttttctttctgcagctcccattcaatttccacgctgacctgtccggtgctgtactgcgtgatgaacgacgccagcttagcttgactgaaggtagttggaggatccgcgggaacaggtgtattcttaatcaggatctgaggaggcgggtgtttcagtccaaagccccccatcagcggcgagggatgaaagtttccgtccgtgtgaggaatcttggcccagataggaccctgcaggtacacgtcccggttctgccagaccatgccaggtaaggctccttgactgttgacggcccctacaataggagcggcgttttgctgttgcaggttatcggccaccacgccgtactgttctgtggccactgggttggtggttttaatttcttcctcactggttagcataacgctgctatagtccacgttgccttttccagctccctgtttcccaaacattaagactccgctggacggaaaaaatcgctcttcgtcgtccttgtgggttgccatagcgacaccgggatttaccagagagtctctgccattcagatgatacttggtggcaccggtccaggcaaagttgctgttgttattttgcgacagtgtcgtggagacgcgttgctgccggtagcagggcccgggtagccagtttttggcctgagccgacatgttattaggcccggcctgagaaaatagcaactgctgagttcctgcggtacctcccgtggactgagtccgagacaggtagtacaggtactggtcgatgagggggttcatcagccggtccaggctttggctgtgcgcgtagctgctgtgaaaaggcacgtcctcaaactggtagctgaactcaaagttgttgcccgttctcagcatttgagaaggaaagtactccaggcagtagaaggaggaacggcccacggcctgactgccattgttcagagtcaggtacccgtactgaggaatcatgaagacgtccgccgggaacggaggcaggcagccctggcgcgcagagccgaggacgtacgggagctggtattccgagtccgtaaagacctgaatcgtgctggtaaggttattggcgatggtcttggtgccttcattctgcgtgacctccttgacctggatgttgaagagcttgaagttgagtctcttgggccggaatccccagttgttgttgatgagtcgctgccagtcacgtggtgagaagtggcagtggaatctgttaaagtcaaaatacccccagggggtgctgtagccgaagtaggtgttgtcgttggtgcttcctcccgaagtcccgttggagatttgcttgtagaggtggttgttgtaggtggggagggcccaggttcgggtgctggtggtgatgactctgtcgcccagccatgtggaatcgcaatgccaatttcctgaggaactacccactccgtcggcgccttcgttattgtctgccattggagcgccaccgcctgcagccattgtaccagatcccagaccagaggggcctgcggggggttctccgattggttgagggtcgggcactgactctgagtcgccagtctgcccaaagttgagtctctttttcgcgggctgctggcctttcttgccgatgcccgtagtggagtctggagaacgctggggtgatggctctaccggtctcttctttccaggagccgtcttagcgccttcctcaaccagaccgagaggttcgagaacccgcttcttggcctggaagactgctcgtccgaggttgcccccaaaagacgtatcttcttgcagacgctcctgaaactcggcgtcggcgtggttataccgcaggtacggattgtcacccgctttgagctgctggtcgtaggccttgtcgtgctcgagggccgctgcgtccgccgcgttgacgggctcccccttgtcgagtccgttgaagggtccgaggtacttgtagccaggaagcaccagaccccggccgtcgtcctgcttttgctggttggctttgggcttcggggctccaggtttcagcgcccaccactcgcgaatgccctcagagaggttgtcctcgagccaatctggaagataaccatcggcagccatacctgatctaaatcatttattgttcaaagatgcagtcatccaaatccacattgaccagatcgcaggcagtgcaagcgtctggcacctttcccatgatatgatgaatgtagcacagtttctgatacgcctttttgacgacagaaacgggttgagattctgacacgggaaagcactctaaacagtctttctgtccgtgagtgaagcagatatttgaattctgattcattctctcgcattgtctgcagggaaacagcatcagattcatgcccacgtgacgagaacatttgttttggtacctgtccgcgtagttgatcgaagcttccgcgtctgacgtcgatggctgcgcaactgactcgcgcacccgtttgggctcacttatatctgcgtcactgggggcgggtcttttcttggctccaccctttttgacgtagaattcatgctccacctcaaccacgtgatcctttgcccaccggaaaaagtctttgacttcctgcttggtgaccttcccaaagtcatgatccagacggcgggtgagttcaaatttgaacatccggtcttgcaacggctgctggtgttcgaaggtcgttgagttcccgtcaatcacggcgcacatgttggtgttggaggtgacgatcacgggagtcgggtctatctgggccgaggacttgcatttctggtccacgcgcaccttgcttcctccgagaatggctttggccgactccacgaccttggcggtcatcttcccctcctcccaccagatcaccatcttgtcgacacagtcgttgaagggaaagttctcattggtccagttgacgcagccgtagaagggcgaattc

SEQ ID NO: 4751 - DNA, 3121 bp, Adeno-associated virus
gaattcgcccttctacggctgcgtcaactggaccaatgagaactttcccttcaacgactgtgtcgacaagatggtgatctggtgggaggaggggaagatgaccgccaaggtcgtggagtcggccaaagccattctcggaggaagcaaggtgcgcgtggaccagaaatgcaagtcctcggcccagatagacccgactcccgtgatcgtcacctccaacaccaacatgtgcgccgtgattgacgggaactcaacgaccttcgaacaccagcagccgttgcaagaccggatgttcaaatttgaactcacccgccgtctggatcatgactttgggaaggtcaccaagcaggaagtcaaagactttttccggtgggcaaaggatcacgtggttgaggtggagcacgaattctacgtcaaaaagggtggagccaagaaaagacccgcccccagtgacgcagatataagtgagcccaaacgggtgcgcgagtcagttgcgcagccatcgacgtcagacgcggaagcttcgatcaactacgcagacaggtaccaaaacaaatgttctcgtcacgcgggcatgaatctgatgctgtttccctgcagacaatgcgagagaatgaatcagaattcaaatatctgcttcactcacggacagaaagactgtttagagtgctttcccgtgtcagaatctcaacccgtttctgtcgtcaaaaaggcgtatcagaaactgtgctacattcatcatatcatgggaaaggtgccagacgcttgcactgcctgcgatctggtcgatgtggatttggatgactgcatctttgaacaataaatgatttaaatcaggtatggctgccgatggttatcttccagattggctcgaggacaacctctctgagggcattcgcgagtggtgggcgctgaaacctggagccccgaagcccaaagccaaccagcaaaagcaggacggcggccggggtctggtgcttcctggctacaagtacctcggacccttcaacggactcgacaagggggagcccgtcaacgcggcggacgcagcggccctcgagcacgacaaggcctacgaccagcagctcaaagcgggtgacaatccgtacctgcggtataaccacgccgacgccgagtttcaggagcgtctgcaagaagatacgtcttttgggggcaacctcgggcgagcagtcttccaggccaagaagcgggttctcgaacctctcggtctggttgaggaaggcgctaagacggctcctggaaagaagagaccggtagagccatcaccccagcgttctccagactcctctacgggcatcggcaagaaaggccagcagcccgcgaaaaagagactcaactttgggcagactggcgactcagagtcagtgcccgaccctcaaccaatcggagaaccccccgcaggcccctctggtctgggatctggtacaatggctgcaggcggtggcgctccaatggcagacaataacgaaggcgccgacggagtgggtagttcctcaggaaattggcattgcgattccacatggctgggcgactgagtcatcaccaccagcacccgaacctgggccctccccacctacaacaaccacctctacaagcaaatctccaacgggacttcgggaggaagcaccaacgacaacacctacttcggctacagcaccccctgggggtattttgactttaacagattccactgccacttctcaccacgtgactggcagcgactcatcaacaacaactggggattccggcccaagagactcaacttcaagctcttcaacatccaggtcaaggaggtcacgcagaatgaaggcaccaagaccatcgccaataaccttaccagcacgattcaggtctttacggactcggaataccagctcccgtacgtcctcggctctgcgcaccagggctgcctgcctccgttcccggcggacgtcttcatgattcctcagtacgggtacctgactctgaacaatggcagtcaggccgtgggccgttcctccttctactgcctggagtactttccttctcaaatgctgagaacgggcaacaactttgagttcagctaccagtttgaggacgtgccttttcacagcagctacgcgcacagccaaagcctggaccggctgatgaaccccctcatcgaccagtacctgtactacctgtctcggactcagtccacgggaggtaccgcaggaactcagcagttgctattttctcaggccgggcctaataacatgtcggctcaggccaaaaactggctacccgggccctgctaccggcagtaacgcgtctccacgacactgtcgcaaaataacaacagcaactttgtctggaccggtgccaccaagtatcatctgaatggcagagactctctggtagatcccggtgtcgctatggcaacccacaaggacgacgaagagcgattttttccgtccagcggagtcataatgtttgggaaacagggagctggaaaagacaacgtggactatagcagcgtcatgctaaccagtgaggaagaaattaaaaccaccaacccagtggccacagaacagtacggcgtggtggccgataacctgcaacagcaaaacgccgctcctattgtaggggccgtcaacagtcaaggagccttacctggcatggtctggcagaaccgggacgtgtacctgcagggtcctacctgggccaagattcctcacacggacggaaactttcatccctcgccgctgatgggaggctttggactgaaacacccgcctcctcagatcctgattaagaatacacctgttcccgcggatcctccaactaccttcagtcaagctaagctggcgtcgttcatcacgcagtacagcaccggacaggtcagcgtggaaattgaatgggagctgcaggaagaaaacagcaaacgctggaacccagagattcaatacacttccaactactacaaatctacaaatgtggactttgctgttaacacagatggcacttattctgagcctcgccccatcggcacccgttacctcacccgtaatctgtaattgcttgttaatcaataaaccggttgattcgtttcagttgaactttggtctctgcgaagggcgaattc

SEQ ID NO: 4752 - protein, 738 aa, Adeno-associated virus
MAADGYLPDWLEDNLSEGIREWWALKPGAPKPKANQQKQDDGRGLVLPGYKYLGPFNGLDKGEPVNAADAAALEHDKAYDQQLKAGDNPYLRYNHADAEFQERLQEDTSFGGNLGRAVFQAKKRVLEPLGLVEEGAKTAPGKKRPVEPSPQRSPDSSTGIGKKGQQPAKKRLNFGQTGDSESVPDPQPIGEPPAGPSGLGSGTMAAGGGAPMADNNEGADGVGSSSGNWHCDSTWLGDGVITTSTRTWALPTYNNHLYKQISNGTSGGSTNDNTYFGYSTPWGYFDFNRFHCHFSPRDWQRLINNNWGFRPKSLNFKLFNIQVKEVTQNEGTKTIANNLTSTIQVFTDSEYQLPYVLGSAHQGCLPPFPADVFMIPQYGYLTLNNGSQAVGRSSFYCLEYFPSQMLRTGNNFEFSYQFEDVPFHSSYAHSQSLDRLMNPLIDQYLYYLSRTQSTGGTAGTQQLLFSQAGPNNMSAQAKNWLPGPCYRQQRVSTTLSQNDNSNFAWTGATKYHLNGRDSLVNPGVAMATHKDDEERFFPSSGVLMFGKQGAGKDNVDYSSVMLTSEEEIKTTNPVATEQYGVVADNLQQQNAAPIVGAVNSQGALPGMVWQNRDVYLQGPIWAKIPHTDGNFHPSPLMGGFGLKHPPPQILIKNTPVPADPPTTFSQAKLASFITQYSTGQVSVEIEWELQKENSKRWNPEIQYTSNYYKSTNVDFAVNTDGTYSEPRPIGTRYLTRNL

SEQ ID NO: 4753 - DNA, 3121 bp, Adeno-associated virus
gaattcgcccttcgcgagaccaaagttcaactgaaacgaatcaaccggtttattgattaacaagcaattacagattacgggtgaggtaacgggtgccgatggggcgaggctcagaataagtgccatctgtgttaacagcaaagtccacatttgtagatttgtagtagttggaagtgtattgaatctctgggttccagcgtttgctgttttctttctgcagctcccattcaatttccacgctgacctgtccggtgctgtactgcgtgatgaacgacgccagcttagcttgactgaaggtagttggaggatccgcgggaacaggtgtattcttaatcaggatctgaggaggcgggtgtttcagtccaaagcctcccatcagcggcgagggatgaaagtttccgtccgtgtgaggaatcttggcccagataggaccctgcaggtacacgtcccggttctgccagaccatgccaggtaaggctccttgactgttgacggcccctacaataggagcggcgttttgctgttgcaggttatcggccaccacgccgtactgttctgtggccactgggttggtggttttaatttcttcctcactggttagcataacgctgctatagtccacgttgtcttttccagctccctgtttcccaaacattaagactccgctggacggaaaaaatcgctcttcgtcgtccttgtgggttgccatagcgacaccgggatttaccagagagtctctgccattcagatgatacttggtggcaccggtccaggcaaagttgctgttgtcattttgcgacagtgtcgtggagacgcgttgctgccggtagcagggcccgggtagccagtttttggcctgagccgacatgttattaggcccggcctgagaaaatagcaactgctgagttcctgcggtacctcccgtggactgagtccgagacaggtagtacaggtactggtcgatgagggggttcatcagccggtccaggctttggctgtgcgcgtagctgctgtgaaaaggcacgtcctcaaactggtagctgaactcaaagttgttgcccgttctcagcatttgagaaggaaagtactccaggcagtagaaggaggaacggcccacggcctgactgccattgttcagagtcaggtacccgtactgaggaatcatgaagacgtccgccgggaacggaggcaggcagccctggtgcgcagagccgaggacgtacgggagctggtattccgagtccgtaaagacctgaatcgtgctggtaaggttattggcgatggtcttggtgccttcattctgcgtgacctccttgacctggatgttgaagagcttgaagttgaggctcttgggccggaatccccagttgttgttgatgagtcgctgccagtcacgtggtgagaagtggcagtggaatctgttaaagtcaaaatacccccagggggtgctgtagccgaagtaggtgttgtcgttggtgcttcctcccgaagtcccgttggagatttgcttgtagaggtggttgttgtaggtggggagggcccaggttcgggtgctggtggtgatgactccgtcgcccagccatgtggaatcgcaatgccaatttcctgaggaactacccactccgtcggcgccttcgttattgtctgccattggagcgccaccgcctgcagccattgtaccagatcccagaccagaggggcctgcggggggttctccgattggttgagggtcgggcactgactctgagtcgccagtctgcccaaagttgagtctctttttcgcgggctgctggcctttcttgccgatgcccgtagaggagtctggagaacgctggggtgatggctctaccggtctcttctttccaggagccgtcttagcgccttcctcaaccagaccgagaggttcgagaacccgcttcttggcctggaagactgctcgcccgaggttgcccccaaaagacgtatcttcttgcagacgctcctgaaactcggcgtcggcgtggttataccgcaggtacggattgtcacccgctttgagctgctggtcgtaggccttgtcgtgctcgagggccgctgcgtccgccgcgttgacgggctcccccttgtcgagtccgttgaagggtccgaggtacttgtagccaggaagcaccagaccccggccgtcgtcctgcttttgctggttggctttgggcttcggggctccaggtttcagcgcccaccactcgcgaatgccctcagagaggttgtcctcgagccaatctggaagataaccatcggcagccatacctgatttaaatcatttattgttcaaagatgcagtcatccaaatccacattgaccagatcgcaggcagtgcaagcgtctggcacctttcccatgatatgatgaatgtagcacagtttctgatacgcctttttgacgacagaaacgggttgagattctgacacgggaaagcactctaaacagtctttctgtccgtgagtgaagcagatatttgaattctgattcattctctcgcattgtctgcagggaaacagcatcagattcatgcccacgtgacgagaacatttgttttggtacctgtctgcgtagttgatcgaagcttccgcgtctgacgtcgatggctgcgcaactgactcgcgcacccgtttgggctcacttatatctgcgtcactgggggcgggtcttttcttggctccaccctttttgacgtagaattcatgctccacctcaaccacgtgatcctttgcccaccggaaaaagtctttgacttcctgcttggtgaccttcccaaagtcatgatccagacggcgggtgagttcaaatttgaacatccggtcttgcaacggctgctggtgttcgaaggtcgttgagttcccgtcaatcacggcgcacatgttggtgttggaggtgacgatcacgggagtcgggtctatctgggccgaggacttgcatttctggtccacgcgcaccttgcttcctccgagaatggctttggccgactccacgaccttggcggtcatcttcccctcctcccaccagatcaccatcttgtcgacacagtcgttgaagggaaagttctcattggtccagttgacgcagccgtagaaagggcgaattc

SEQ ID NO: 4754 - DNA, 2211 bp, Adeno-associated virus
atggctgctgacggttatcttccagattggctcgaggacaacctttctgaaggcattcgtgagtggtgggctctgaaacctggagtccctcaacccaaagcgaaccaacaacaccaggacaaccgtcggggtcttgtgcttccgggttacaaatacctcggacccggtaacggactcgacaaaggagagccggtcaacgaggcggacgcggcagccctcgaacacgacaaagcttacgaccagcagctcaaggccggtgacaacccgtacctcaagtacaaccacgccgacgccgagtttcaggagcgtcttcaagaagatacgtcttttgggggcaaccttggcagagcagtcttccaggccaaaaagaggatccttgagcctcttggtctggttgaggaagcagctaaaacggctcctggaaagaagggggctgtagatcagtctcctcaggaaccggactcatcatctggtgttggcaaatcgggcaaacagcctgccagaaaaagactaaatttcggtcagactggagactcagagtcagtcccagaccctcaacctctcggagaaccaccagcagcccccacaagtttgggatctaatacaatggcttcaggcggtggcgcaccaatggcagacaataacgagggtgccgatggagtgggtaattcctcaggaaattggcattgcgattcccaatggctgggcgacagagtcatcaccaccagcaccagaacctgggccctgcccacttacaacaaccatctctacaagcaaatctccagccaatcaggagcttcaaacgacaaccactactttggctacagcaccccttgggggtattttgactttaacagattccactgccacttctcaccacgtgactggcagcgactcattaacaacaactggggattccggcccaagaaactcagcttcaagctcttcaacatccaagttagaggggtcacgcagaacgatggcacgacgactattgccaataaccttaccagcacggttcaagtgtttacggactcggagtatcagctcccgtacgtgctcgggtcggcgcaccaaggctgtctcccgccgtttccagcggacgtcttcatggtccctcagtatggatacctcaccctgaacaacggaagtcaagcggtgggacgctcatccttttactgcctggagtacttcccttcgcagatgctaaggactggaaataacttccaattcagctataccttcgaggatgtaccttttcacagcagctacgctcacagccagagtttggatcgcttgatgaatcctcttattgatcagtatctgtactacctgaacagaacgcaaggaacaacctctggaacaaccaaccaatcacggctgctttttagccaggctgggcctcagtctatgtctttgcaggccagaaattggctacctgggccctgctaccggcaacagagactttcaaagactgctaacgacaacaacaacagtaactttccttggacagcggccagcaaatatcatctcaatggccgcgactcgctggtgaatccaggaccagctatggccagtcacaaggacgatgaagaaaaatttttccctatgcacggcaatctaatatttggcaaagaagggacaacggcaagtaacgcagaattagataatgtaatgattacggatgaagaagagattcgtaccaccaatcctgtggcaacagagcagtatggaactgtggcaaataacttgcagagctcaaatacagctcccacgactggaactgtcaatcatcagggggccttacctggcatggtgtggcaagatcgtgacgtgtaccttcaaggacctatctgggcaaagattcctcacacggatggacactttcatccttctcctctgatgggaggctttggactgaaacatccgcctcctcaaatcatgatcaaaaatactccggtaccggcaaatcctccgacgactttcagcccggccaagtttgcttcatttatcactcagtactccactggacaggtcagcgtggaaattgagtgggagctacagaaagaaaacagcaaacgttggaatccagagattcagtacacttccaactacaacaagtctgttaatgtggactttactgtagacactaatggtgtttatagtgaacctcgccctattggaacccggtatctcacacgaaacttgtga

SEQ ID NO: 4755 - protein, 737 aa, Adeno-associated virus
MAADGYLPDWLEDNLSEGIREWWDLKPGAPKPKANQQKQDNGRGLVLPGYKYLGPFNGLDKGEPVNAADAAALEHDKAYDQQLNAGDNPYLRYNHADAEFQERLQEDTSFGGNLGRAVFQAKKRVLEPLGLVEEGAKTAPAKKRPVEPSPQRSPDSSTGIGKKGQQPARKRLNFGQTGDSESVPDPQPLGEPPAAPSSVGSGTVAAGGGAPMADNNEGADGVGNASGNWHCDSTWLGDRVITTSTRTWALPTYNNHLYEQISSETAGSTNDNTYFGYSTPWGYFDFNRFHCHFSPRDWQRLINNNWGFRPKKLRFKLFNIQVKEVTTNDGVTTIANNLTSTIQVFSDSEYQLPYVLGSAHQGCLPPFPADVFMIPQYGYLTLNNGSQSVGRSSFYCLEYFPSQMLRTGNNFEFSYSFEDVPFHSSYAHSQSLDRLMNPLIDQYLYYLARTQSDPGGTAGNRELQFYQGGPSTMAEQAKNWLPGPCFRQQRVSKTLDQNNNSNFAWTGATKYHLNGRNSLVNPGVAMATHKDDEDRFFPSSGVLIFGKTGATNKTTLENVLMTNEEEIRPTNPVATEEYGIVSSNLQAANTAAQTQVVNNQGALPGMVWQNRDVYLQGPIWAKIPHTDGNFHPSPLMGGFGLKHPPPQILIKNTPVPANPPEVFTPAKFASFITQYSTGQVSVEIEWELQKENSKRWDPEIQYTSNFEKQTGVDFAVDSQGVYSEPRPIGTRYLTRNL

SEQ ID NO: 4756 - DNA, 2211 bp, Adeno-associated virus
atggctgctgacggttatcttccagattggctcgaggacaacctttctgaaggcattcgtgagtggtgggctctgaaacctggagtccctcaacccaaagcgaaccaacaacaccaggacaaccgtcggggtcttgtgcttccgggttacaaatacctcggacccggtaacggactcgacaaaggagagccggtcaacgaggcggacgcggcagccctcgaacacgacaaagcttacgaccagcagctcaaggccggtgacaacccgtacctcaagtacaaccacgccgacgccgagtttcaggagcgtcttcaagaagatacgtcttttgggggcaaccttggcagagcagtcttccaggccaaaaagaggatccttgagcctcttggtctggttgaggaagcagctaaaacggctcctggaaagaagggggctgtagatcagtctcctcaggaaccggactcatcatctggtgttggcaaatcgggcaaacagcctgccagaaaaagactaaatttcggtcagactggagactcagagtcagtcccagaccctcaacctctcggagaaccaccagcagcccccacaagtttgggatctaatacaatggcttcaggcggtggcgcaccaatggcagacaataacgagggtgccgatggagtgggtaattcctcaggaaattggcattgcgattcccaatggctgggcgacagagtcatcaccaccagcaccagaacctgggccctgcccacttacaacaaccatctctacaagcaaatctccagccaatcaggagcttcaaacgacaaccactactttggctacagcaccccttgggggtattttgactttaacagattccactgccacttctcaccacgtgactggcagcgactcattaacaacaactggggattccggcccaagaaactcagcttcaagctcttcaacatccaagttagaggggtcacgcagaacgatggcacgacgactattgccaataaccttaccagcacggttcaagtgtttacggactcggagtatcagctcccgtacgtgctcgggtcggcgcaccaaggctgtctcccgccgtttccagcggacgtcttcatggtccctcagtatggatacctcaccctgaacaacggaagtcaagcggtgggacgctcatccttttactgcctggagtacttcccttcgcagatgctaaggactggaaataacttccaattcagctataccttcgaggatgtaccttttcacagcagctacgctcacagccagagtttggatcgcttgatgaatcctcttattgatcagtatctgtactacctgaacagaacgcaaggaacaacctctggaacaaccaaccaatcacggctgctttttagccaggctgggcctcagtctatgtctttgcaggccagaaattggctacctgggccctgctaccggcaacagagactttcaaagactgctaacgacaacaacaacagtaactttccttggacagcggccagcaaatatcatctcaatggccgcgactcgctggtgaatccaggaccagctatggccagtcacaaggacgatgaagaaaaatttttccctatgcacggcaatctaatatttggcaaagaagggacaacggcaagtaacgcagaattagataatgtaatgattacggatgaagaagagattcgtaccaccaatcctgtggcaacagagcagtatggaactgtggcaaataacttgcagagctcaaatacagctcccacgactggaactgtcaatcatcagggggccttacctggcatggtgtggcaagatcgtgacgtgtaccttcaaggacctatctgggcaaagattcctcacacggatggacactttcatccttctcctctgatgggaggctttggactgaaacatccgcctcctcaaatcatgatcaaaaatactccggtaccggcaaatcctccgacgactttcagcccggccaagtttgcttcatttatcactcagtactccactggacaggtcagcgtggaaattgagtgggagctacagaaagaaaacagcaaacgttggaatccagagattcagtacacttccaactacaacaagtctgttaatgtggactttactgtagacactaatggtgtttatagtgaacctcgccctattggaacccggtatctcacacgaaacttgtaa

SEQ ID NO: 4757 - protein, 736 aa, Adeno-associated virus
MAADGYLPDWLEDNLSEGIREWWALKPGVPQPKANQQHQDNRRGLVLPGYKYLGPGNGLDKGEPVNEADAAALEHDKAYDQQLKAGDNPYLKYNHADAEFQERLQEDTSFGGNLGRAVFQAKKRILEPLGLVEEAAKTAPGKKGAVDQSPQEPDSSSGVGKSGKQPARKRLNFGQTGDSESVPDPQPLGEPPAAPTSLGSNTMASGGGAPMADNNEGADGVGNSSGNWHCDSQWLGDRVITTSTRTWALPTYNNHLYKQISSQSGASNDNHYFGYSTPWGYFDFNRFHCHFSPRDWQRLINNNWGFRPKKLSFKLFNIQVRGVTQNDGTTTIANNLTSTVQVFTDSEYQLPYVLGSAHQGCLPPFPADVFMVPQYGYLTLNNGSQAVGRSSFYCLEYFPSQMLRTGNNFQFSYTFEDVPFHSSYAHSQSLDRLMNPLIDQYLYYLNRTQGTTSGTTNQSRLLFSQAGPQSMSLQARNWLPGPCYRQQRLSKTANDNNNSNFPWTAASKYHLNGRDSLVNPGPAMASHKDDEEKFFPMHGNLIFGKEGTTASNAELDNVMITDEEEIRTTNPVATEQYGTVANNLQSSNTAPTTGTVNHQGALPGMVWQDRDVYLQGPIWAKIPHTDGHFHPSPLMGGFGLKHPPPQIMIKNTPVPANPPTTFSPAKFASFITQYSTGQVSVEIEWELQKENSKRWNPEIQYTSNYNKSVNVDFTVDTNGVYSEPRPIGTRYLTRNL

SEQ ID NO: 4758 - protein, 728 aa, Adeno-associated virus
MAADGYLPDWLEDNLSEGIREWWDLKPGAPKPKANQQKQDDGRGLVLPGYKYLGPFNGLDKGEPVNEADAAALEHDKAYDKQLEQGDNPYLKYNHADAEFQERLQEDTSFGGNLGRAVFQAKKRVLEPLGLVEEGAKTAPGKKRPIESPDSSTGIGRKGQQPAKKKLNFGQTGDSESVPDPQPIGEPPAGPSGLGSGTMAAGGGAPMADNNEGADGVGNASGNWHCDSTWLGDRVITTSTRTWALPTYNNHLYKQISSQSGATNDNHFFGYSTPWGYFDFNRFHCHFSPRDWQRLINNNWGFRPRKLRFKLFNIQVKEVTTNDGVTTIANNLTSTIQVFSDSEYQLPYVLGSAHQGCLPPFPADVFMIPQYGYLTLNNGSQSVGRSSFYCLEYFPSQMLRTGNNFEFSYTFEEVPFHSSYAHSQSLDRLMNPLIDQYLYYLARTQSTTGSTRELQFHQAGPNTMAEQSKNWLPGPCYRQQRLSKNIDSNNNSNFAWTGATKYHLNGRNSLTNPGVAMATNKDDEDQFFPINGVLVFGKTGAANKTTLENVLMTSEEEIKTTNPVATEEYGVVSSNLQSSTAGPQTQTVNSQGALPGMVWQNRDVYLQGPIWAKIPHTDGNFHPSPLMGGFGLKHPPPQILIKNTPVPANPPEVFTPAKFASFITQYSTGQVSVEIEWELQKENSKRWNPEIQYTSNYAKSNNVEFAVNNEGVYTEPRPIGTRYLTRNL

SEQ ID NO: 4759 - protein, 728 aa, Adeno-associated virus
MAADGYLPDWLEDNLSEGIREWWDLKPGAPKPKANQQKQDDGRGLVLPGYKYLGPFNGLDKGEPVNAADAAALEHDKAYDQQLKAGDNPYLRYNHADAEFQERLQEDTSFGGNLGRAVFQAKKRVLEPLGLVEEGAKTAPGKKRPIESPDSSTGIGKKGQQPAKKKLNFGQTGDSESVPDPQPIGEPPAGPSGLGSGTMAAGGGAPMADNNEGADGVGNASGNWHCDSTWLGDRVITTSTRTWALPTYNNHLYKQISSQSGATNDNHFFGYSTPWGYFDFNRFHCHFSPRDWQRLINNNWGFRPRKLRFKLFNIQVKEVTTNDGVTTIANNLTSTIQVFSDSEYQLPYVLGSAHQGCLPPFPADVFMIPQYGYLTLNNGSQSVGRSSFYCLEYFPSQMLRTGNNFEFSYTFEEVPFHSSYAHSQSLDRLMNPLIDQYLYYLARTQSTTGSTRELQFHQAGPNTMAEQSKNWLPGPCYRRQRLSKDIDSNNNSNFAWTGATKYHLNGRNSLTNPGVAMATNKDDEDQFFPINGVLVFGKTGAANKTTLENVLMTSEEEIKTTNPVATEEYGVVSSNLQSSTAGPQTQTVNSQGALPGMVWQNRDVYLQGPIWAKIPHTDGNFHPSPLMGGFGLKHPPPQILIKNTPVPANPPEVFTPAKFASFITQYSTGQVSVEIEWELQKENSKRWNPEIQYTSNYAKSNNVEFAVNNEGVYTEPRPIGTRYLTRNL

SEQ ID NO: 4760 - protein, 685 aa, Adeno-associated virus
MAADGYLPDWLEDNLSEGIREWWDLKPGAPKPKANQQKQDDGRGLVLPGYKYLGPFNGLDKGEPVNEADAAALEHDKAYDKQLEQGDNPYLKYNHADAEFQERLQEDTSFGGNLGRAVFQAKKRVLEPLGLVEEGAKTAPGKKRPVEPSPQRSPDSSTGIGKTGQQPAKKRLNFGQTGDSESVPDPQPIGEPPAGPSGLGSGTMAAGGGAPMADNNEGADGVGSSSGNWHCDSTWLGDRVITTSTRTWALPTYNNHLYKQISNGTSGGSTNDNTYFGYSTPWGYFDFNRFHCHFSPRDWQRLINNNWGFRPKRLNFKLFNIQVKEVTQNEGTKTIANNLTSTIQVFTDSEYQLPYVLGSAHQGCLPPFPADVFMIPQYGYLTLNNGSQAVGRSSFYCLEYFPSQMLRTGNNFEFSYQFEDVPFHSSYAHSQSLDRLTNPLIDQYLYYLARTQSTTGSTRGLQFHQAGPNTMAEQSKNWLPGPCYRQQRLSKNIDSNNNSNFAWTGATKYHLNGRNSLTNPGVAMATNKDDEDQFFPINGVLVFGKTGAANKTTLENVLMTSEEEIKTTNPVATEEYGVVSSNLQSSTAGPQTQTVNSQGALPGMVWQNRDVYLQGPIWAKIPHTDGNFHPSPLMGGFGLKHPPPQILIKYTSNYYKSTNVDFAVNTEGTYSEPRPIGTRYLTRNL

SEQ ID NO: 4761 - protein, 733 aa, Adeno-associated virus
MAADGYLPDWLEDNLSEGIREWWDLKPGAPKPKANQQKQDDGRGLVLPGYKYLGPFNGLDKGEPVNAADAAALEHDKAYDQQLKAGDNPYLRYNHADAEFQERLQEDTSFGGNLGRAVFQAKKRVLEPLGLVEEGAKTAPGKKRPIESPDSSTGIGKKGQQPAKKKLNFGQTGDSESVPDPQPIGEPPAGPSGLGSGTMAAGGGAPMADNNEGADGVGSSSGNWHCDSTWLGDRVITTSTRTWALPTYNNHLYKQISNGTSGGSTNDNTYFGYSTPWGYFDFNRFHCHFSPRDWQRLINNNWGFRPKRLNFKLFNIQVKEVTQNEGTKTIANNLTSTIQVFTDSEYQLPYVLGSAHQGCLPPFPADVFMIPQYGYLTLNNGSQAVGRSSFYCLEYFPSQMLRTGNNFEFSYQFEDVPFHSSYAHSQSLDRLMNPLIDQYLYYLSRTQSTGGTAGTQQLLFSQAGPNNMSAQAKNWLPGPCYRQQRVSTTVSQNNNSNFAWTGATKYHLNGRDSLVNPGVAMATHKGDEERFFPSSGVLMFGKQGAGKDNVDYSSVMLTSEEEIKTTNPVATEQYGVVADNLQQQNAAPIVGAVNSQGALPGMVWQNRDVYLQGPIWAKIPHTDGNFHPSPLMGGFGLKHPPPQILIKNTPVPADPPTTFSQAKLASFITQYSTGQVSVEIEWELQKENSKRWNPEIQYTSNYYKSTNVDFAVNTEGTYSEPRPIGTRYLTRSL

SEQ ID NO: 4762 - protein, 738 aa, Adeno-associated virus
MAADGYLPDWLEDNLSEGIREWWDLKPGAPKPKANQQKQDDGRGLVLPGYKYLGPFNGLDKGEPVNAADAAALEHDKAYDQQLKAGDNPYLRYNHADAEFQERLQEDTSFGGNLGRAVFQAKKRVLEPLGLVEEGAKTAPGKKRPVEPSPQRSPDSSTGIGKTGQQPAKKRLNFGQTGDSESVPDPQPIGEPPAGPSGLGSGTMAAGGGAPMADNNEGADGVGSSSGNWHCDSTWLGDRVITTSTRTWALPTYNNHLYKQISNGTSGGSTNDNTYFGYSTPWGYFDFNRFHCHFSPRDWQRLINNNWGFRPKRLNFKLFNIQVKEVTQNEGTKTIANNLTSTIQVFTDSEYQLPYVLGSAHQGCPPPFPADVFMIPQYGYLTLNNGSQAVGRSSFYCLEYFPSQMRRTGNNFEFSYQFEDVPFHSSYAHSQSLDRLMNPLIDQYLYYLSRTQSTGGTAGTQQLLFSQAGPNNMSAQAKNWLPGPCYRQQRVSTTLSQNNNSNFAWTGATKYHLNGRDSLVNPGVAMATHKDDEERFFPSSGVLMFGKQGAGKDNVDYSSVMLTSEEEIKTTNPVATEQYGVVADNLQQQNAAPIVGAVNSQGALPGMVWQNRDVYLQGPIWAKIPHTDGNFHPSPLMGGFGLKHPPPQILIKNTPVPADPPTTFSQAKLASFITQYSTGQVSVEIEWELQKENSKRWNPEIQYTSNYYKSTNVDFAVNTEGTYSEPRPIGTRYLTRNL

SEQ ID NO: 4763 - protein, 733 aa, Adeno-associated virus
MAADGYLPDWLEDNLSEGIREWWDLRPGAPKPKANQQKQDDGRGLVLPGYKYLGPFNGLDKGEPVNEADAAALEHDKAYDKQLEQGDNPYLKYNHADAEFQERLQEDTSFGGNLGRAVFQAKKRVLEPLGLVEEGAKTAPGKKRPIESPDSSTGIGKKGQQPAKKRLNFGQTGDSESVPDPQPIGEPPAGPSGLGSGTMAAGGGAPMADNNEGADGVGSSSGNWHCDSTWLGDRVITTSTRTWALPTYNNHLYKQISNGTSGGSTNDNTYFGYSTPWGYFDFNRFHCHFSPRDWQRLINNNWGFRPKRLNFKLFNIQVKEVTQNEGTKTIANNLTSTIQVFTDSEYQLPYVLGSAHQGCLPPFPADVFMIPQYGYLTLNNGSQAVGRSSFYCLEYFPSQMLRTGNNFEFSYQFEDVPFHSSYAHSQSLDRLMNPLIDQYLYYLSRTQSTGGTAGTQQLLFSQAGPNNMSAQAKNWLPGPCYRQQRVSTTVSQNNNSNFAWTGATKYHLNGRDSLVNPGVAMATHKGDEERFFPSSGVLMFGKQGAGKDNVDYSSVMLTSEEEIKTTNPVATEQYGVVADNLQQQNAAPIVGAVNSQGALPGMVWQNRDVYLQGPIWAKIPHTDGNFHPSPLMGGFGLKHPPPQILIKNTPVPADPPTTFSQAKLASFITQYSTGQVSVEIEWELQKENSKRWNPEIQYTSNYYKSTNVDFAVNTEGTYSEPRPIGTRYLTRNL

SEQ ID NO: 4764 - DNA, 3098 bp, Adeno-associated virus
gaattcgccctttctacggctgcgtcaactggaccaatgagaactttcccttcaacgattgcgtcgacaagatggtgatctggtgggaggagggcaagatgacggccaaggtcgtggagtccgccaaggccattctcggcggcagcaaggtgcgcgtggaccaaaagtgcaagtcttccgcccagatcgatcccacccccgtgatcgtcacttccaacaccaacatgtgcgctgtgattgacgggaacagcaccaccttcgagcaccagcagccgttacaagaccggatgttcaaatttgaactcacccgccgtctggagcacgactttggcaaggtgacaaagcaggaagtcaaagagttcttccgctgggcgcaggatcacgtgaccgaggtggcgcatgagttctacgtcagaaagggtggagccaacaagagacccgcccccgatgacgcggataaaagcgagcccaagcgggcctgcccctcagtcgcggatccatcgacgtcagacgcggaaggagctccggtggactttgccgacaggtaccaaaacaaatgttctcgtcacgcgggcatgcttcagatgctgtttccctgcaagacatgcgagagaatgaatcagaatttcaacatttgcttcacgcacgggaccagagactgttcagaatgtttccccggcgtgtcagaatctcaaccggtcgtcagaaagaggacgtatcggaaactctgtgccattcatcatctgctggggcgggctcccgagattgcttgctcggcctgcgatctggtcaacgtggacctggatgaccgtgtttctgagcaataaatgacttaaaccaggtatggctgccgatggttatcttccagattggctcgaggacaacctctctgagggcattcgcgagtggtgggacttgaaacctggagccccgaaacccaaagccaaccagcaaaagcaggacgacggccggggtctggtgcttcctggctacaagtacctcggacccttcaacggactcgacaagggagagccggtcaacgaggcagacgccgcggccctcgagcacgacaaggcctacgacaagcagctcgagcagggggacaacccgtacctcaagtacaaccacgccgacgccgagtttcaggagcgtcttcaagaagatacgtcttttgggggcaacctcgggcgagcagtcttccaggccaagaagcgggttctcgaacctctcggtctggttgaggaaggcgctaagacggctcctggaaagaagagacccatagaatcccccgactcctccacgggcatcggcaagaaaggccagcagcccgctaaaaagaagctcaactttgggcagactggcgactcagagtcagtgcccgacccccaacctctcggagaacctcccgccgcgccctcaggtctgggatctggtacaatggctgcaggcggtggcgcaccaatggcagacaataacgaaggcgccgacggagtgggtaatgcctccggaaattggcattgcgattccacatggctgggcgacagagtcatcaccaccagcacccgcacctgggccctgcccacctacaacaaccacctctacaagcagatatcaagtcagagcggggctaccaacgacaaccacttcttcggctacagcaccccctggggctattttgacttcaacagattccactgccacttctcaccacgtgactggcagcgactcatcaacaacaactggggattccggcccagaaagctgcggttcaagttgttcaacatccaggtcaaggaggtcacgacgaacgacggcgttacgaccatcgctaataaccttaccagcacgattcaggtcttctcggactcggagtaccaactgccgtacgtcctcggctctgcgcaccagggctgcctccctccgttccctgcggacgtgttcatgattcctcagtacggatatctgactctaaacaacggcagtcagtctgtgggacgttcctccttctactgcctggagtactttccttctcagatgctgagaacgggcaataactttgaattcagctacacctttgaggaagtgcctttccacagcagctatgcgcacagccagagcctggaccggctgatgaatcccctcatcgaccagtacctgtactacctggcccggacccagagcactacggggtccacaagggagctgcagttccatcaggctgggcccaacaccatggccgagcaatcaaagaactggctgcccggaccctgttatcggcagcagagactgtcaaaaaacatagacagcaacaacaacagtaactttgcctggaccggggccactaaataccatctgaatggtagaaattcattaaccaacccgggcgtagccatggccaccaacaaggacgacgaggaccagttctttcccatcaacggagtgctggtttttggcgaaacgggggctgccaacaagacaacgctggaaaacgtgctaatgaccagcgaggaggagatcaaaaccaccaatcccgtggctacagaagaatacggtgtggtctccagcaacctgcaatcgtctacggccggaccccagacacagactgtcaacagccagggggctctgcccggcatggtctggcagaaccgggacgtgtacctgcagggtcccatctgggccaaaattcctcacacggacggcaactttcacccgtctcccctgatgggcggatttggactcaaacacccgcctcctcaaattctcatcaaaaacaccccggtacctgctaatcctccagaggtgtttactcctgccaagtttgcctcatttatcacgcagtacagcaccggccaggtcagcgtggagatcgagtgggaactgcagaaagaaaacagcaaacgctggaatccagagattcagtacacctcaaattatgccaagtctaataatgtggaatttgctgtcaacaacgaaggggtttatactgagcctcgccccattggcacccgttacctcacccgtaacctgtaattgcctgttaatcaataaaccggttaattcgtttcagttgaactttggtctctgcgaagggcgaattc

SEQ ID NO: 4765 - protein, 728 aa, Adeno-associated virus
MAADGYLPDWLEDNLSEGIREWWDLKPGAPKPKANQQKQDDGRGLVLPGYKYLGPFNGLDKGEPVNEADAAALEHDKAYDKQLEQGDNPYLKYNHADAEFQERLQEDTSFGGNLGRAVFQAKKRVLEPLGLVEEGAKTAPGKKRPIESPDSSTGIGKKGQQPAKKKLNFGQTGDSESVPDPQPLGEPPAAPSGLGSGTMAAGGGAPMADNNEGADGVGNASGNWHCDSTWLGDRVITTSTRTWALPTYNNHLYKQISSQSGATNDNHFFGYSTPWGYFDFNRFHCHFSPRDWQRLINNNWGFRPRKLRFKLFNIQVKEVTTNDGVTTIANNLTSTIQVFSDSEYQLPYVLGSAHQGCLPPFPADVFMIPQYGYLTLNNGSQSVGRSSFYCLEYFPSQMLRTGNNFEFSYTFEEVPFHSSYAHSQSLDRLMNPLIDQYLYYLARTQSTTGSTRELQFHQAGPNTMAEQSKNWLPGPCYRQQRLSKNIDSNNNSNFAWTGATKYHLNGRNSLTNPGVAMATNKDDEDQFFPINGVLVFGETGAANKTTLENVLMTSEEEIKTTNPVATEEYGVVSSNLQSSTAGPQTQTVNSQGALPGMVWQNRDVYLQGPIWAKIPHTDGNFHPSPLMGGFGLKHPPPQILIKNTPVPANPPEVFTPAKFASFITQYSTGQVSVEIEWELQKENSKRWNPEIQYTSNYAKSNNVEFAVNNEGVYTEPRPIGTRYLTRNL

SEQ ID NO: 4766 - protein, 733 aa, Adeno-associated virus
MAADGHLPDWLEDNLSEGIREWWDLKPGAPKPKANQQKQDDGRGLVLPGYKYLGPFNGLDKGEPVNAADAAALEHDKAYDQQLKAGDNPYLRYNHADAEFQERLQEDTSFGGNLGRAVFQAKKRVLEPLGLVEEGAKTAPGKKRPIESPDSSTGIGKKGQQPAKKKLNFGQTGDSESVPDPQPIGEPPAGPSGLGSGTMAAGGGAPMADNNEGADGVGSSSGNWHCDSTWLGDRVITTSTRTWALPTYNNHLYKQISNGTSGGSTNDNTYFGYSTPWGYFDFNRFHCHFSPRDWQRLINNSWGFRPKRLNFKLFNIQVKEVTQNEGTKTIANNLTSTIQVFTDSEYQLPYVLGSAHQGCLPPFPADVFMIPQYGYLTLNNGSQAVGRSSFYCLEYFPSQMLRTGNNFEFSYQFEDVPFHSSYAHSQSLDRLMNPLIDQYLYYLSRTQSTGGTAGTQQLLFSQAGPNNMSAQAKNWLPGPCYRQQRVSTTLSQNNNSNFAWTGATKYHLNGRDSLVNPGVAMATHKDDEERFFPSSGVLMFGKQGAGKDNVDYSSVMLTSEEEIKTTNPVATEQYGVVADNLQQQNAAPIVGAVNSQGALPGMVWQNRDVYLQGPIWAKIPHTDGNFHPSPLMGGFGLKHPPPQILIKNTPVPADPPTTFSQAKLASFITQYSTGQVSVEIEWELQKENSKRWNPEIQYTSNYYKSTNVDFAVNTEGTYSEPRPIGTRYLTRNL

SEQ ID NO: 4767 - DNA, 2495 bp, Adeno-associated virus
gaattcgccctttctacggctgcgtcaactagaccaatgagaactttcccttcaacgattgcgtcgacaagatggtgatctggtgggaggagggcaagatgacggccaaggtcgtggagtccgccaaggccattcatcatctgctggggcgggctcccgagattgcttgctcggcctgcgatctggtcaacgtggacctggatgactgtgtttctgagcaataaatgacttaaaccaggtatggctgccgatggttatcttccagattggctcgaggacaacctctctgagggcattcgcgagtggtgggacttgaaacctggagccccgaaacccaaagccaaccagcaaaagcaggacgacggccggggtctggtgcttcctggctacaagtacctcggacccttcaacggactcgacaagggagagccggtcaacgaggcagacgccgcggccctcgagcacgacaaggcctacgacaagcagctcgagcagggggacaacccgtacctcaagtacaaccacgccgacgccgagtttcaggagcgtcttcaagaagatacgtcttttgggggcaacctcgggcgagcagtcttccaggccaagaagcgggttctcgaacctctcggtctggttgaggaaggcgctaagacggctcctggaaagaagagacccatagaatcccccgactcctccacgggcatcggcaagaaaggccagcagcccgctaaaaagaagctcaactttgggcagactggcgactcagagtcagtgcccgaccctcaaccaatcggagaaccccccgcaggcccctctggtctgggatctggtacaatggctgcaggcggtggcgctccaatggcagacaataacgaaggcgccgacggagtgggtaatgcctccggaaattggcattgcgattccacatggctgggcgacagagtcatcaccaccagcacccgcacctgggccctgcccacctacaacaaccacctctacaagcagatatcaagtcagagcggggctaccaacgacaaccacttcttcggctacagcaccccctggggctattttgacttcaacagattccactgccacttctcaccacgtgactggcagcgactcatcaacaacaactggggattccggcccagaaagctgcggttcaagttgttcaacatccaggtcaaggaggtcacgacgaacgacggcgttacgaccatcgctaataaccttaccagcacgattcaggtcttctcggactcggagtaccaactgccgtacgtcctcggctctgcgcaccagggctgcctccctccgttccctgcggacgtgttcatgattcctcagtacggatatctgactctaaacaacggcagtcagtctgtgggacgttcctccttctactgcctggagtactttccttctcagatgctgagaacgggcaataactttgaattcagctacacctttgaggaagtgcctttccacagcagctatgcgcacagccagagcctggaccggctgatgaatcccctcatcgaccagtacctgtactacctggcccggacccagagcactacggggtccacaagggagctgcagttccatcaggctgggcccaacaccatggccgagcaatcaaagaactggctgcccggaccctgttatcggcagcagagactgtcaaaaaacatagacagcaacaacaccagtaactttgcctggaccggggccactaaataccatctgaatggtagaaattcattaaccaacccgggcgtagccatggccaccaacaaggacgacgaggaccagttctttcccatcaacggagtgctggtttttggcaaaacgggggctgccaacaagacaacgctggaaaacgtgctaatgaccagcgaggaggagatcaaaaccaccaatcccgtggctacagaacagtacggtgtggtctccagcaacctgcaatcgtctacggccggaccccagacacagactgtcaacagccagggggctctgcccggcatggtctggcagaaccgggacgtgtacctgcagggtcccatctgggccaaaattcctcacacggacggcaactttcacccgtctcccctgatgggcggatttggactcaaacacccgcctcctcaaattctcatcaaaaacaccccggtacctgctaatcctccagaggtgtttactcctgccaagtttgcctcatttatcacgcagtacagcaccggccaggtcagcgtggagatcgagtgggaactgcagaaagaaaacagcaaacgctggaatccagagattcagtacacctcaaattatgccaagtctaataatgtggaatttgctgtcaacaacgaaggggtttatactgagcctcgccccattggcacccgttacctcacccgtaacctgtaattgcctgttaatcaataaaccggttaattcgtttcagttgaactttggtctctgcgaagggcgaattc

SEQ ID NO: 4768 - protein, 728 aa, Adeno-associated virus
MAADGYLPDWLEDNLSEGIREWWDLKPGAPKPKANQQKQDDGRGLVLPGYKYLGPFNGLDKGEPVNEADAAALEHDKAYDKQLEQGDNPYLKYNHADAEFQERLQEDTSFGGNLGRAVFQAKKRVLEPLGLVEEGAKTAPGKKRPIESPDSSTGIGKKGQQPAKKKLNFGQTGDSESVPDPQPIGEPPAGPSGLGSGTMAAGGGAPMADNNEGADGVGNASGNWHCDSTWLGDRVITTSTRTWALPTYNNHLYKQISSQSGATNDNHFFGYSTPWGYFDFNRFHCHFSPRDWQRLINNNWGFRPRKLRFKLFNIQVKEVTTNDGVTTIANNLTSTIQVFSDSEYQLPYVLGSAHQGCLPPFPADVFMIPQYGYLTLNNGSQSVGRSSFYCLEYFPSQMLRTGNNFEFSYTFEEVPFHSSYAHSQSLDRLMNPLIDQYLYYLARTQSTTGSTRELQFHQAGPNTMAEQSKNWLPGPCYRQQRLSKNIDSNNTSNFAWTGATKYHLNGRNSLTNPGVAMATNKDDEDQFFPINGVLVFGKTGAANKTTLENVLMTSEEEIKTTNPVATEQYGVVSSNLQSSTAGPQTQTVNSQGALPGMVWQNRDVYLQGPIWAKIPHTDGNFHPSPLMGGFGLKHPPPQILIKNTPVPANPPEVFTPAKFASFITQYSTGQVSVEIEWELQKENSKRWNPEIQYTSNYAKSNNVEFAVNNEGVYTEPRPIGTRYLTRNL

SEQ ID NO: 4769 - DNA, 2504 bp, Adeno-associated virus
gaattcgccctttctacggctgcgtcaactggaccaatgagaactttcccttcaacgattgcgtcgacaagatggtgatctggtgggaggagggcaagatgacggccaaggtcgtggagtccgccaaggccattcatcatctgctggggcgggctcccgagattgcttgctcggcctgcgatctggtcaacgtggacctggatgactgtgtttctgagcaataaatgacttaaaccaggtatggctgccgatggttatcttccagattggctcgaggacaacctctctgagggcattcgcgagtggtgggacttgaaacctggagccccgaaacccaaagccaaccagcaaaagcaggacgacggccggggtctggtgcttcctggctacaagtacctcggacccttcaacggactcgacaagggagagccggtcaacgaggcagacgccgcggccctcgagcacgacaaggcctacgacaagcagctcgagcagggggacaacccgtacctcaagtacaaccacgccgacgccgagtttcaggagcgtcttcaagaagatacgtcttttgggggcaacctcgggcgagcagtcttccaggccaagaagcgggttctcgaacctctcggtctggttgaggaaggcgctaagacggctcctggaaagaagagacccatagaatcccccgactcctccacgggcatcggcaagaaaggccagcagcccgctaaaaagaagctcaactttgggcagactggcgactcagagtcagtgcccgaccctcaaccaatcggagaaccccccgcaggcccctctggtctgggatctggtacaatggctgcaggcggtggcgctccaatggcagacaataacgaaggcgccgacggagtgggtaatgcctccggaaattggcattgcgattccacatggctgggcgacagagtcatcaccaccagcacccgcacctgggccctgcccacctacaacaaccacctctacaagcagatatcaagtcagagcggggctaccaacgacaaccacttcttcggctacagcaccccctggggctattttgacttcaacagattccactgccacttctcatcacgtgactggcagcgactcatcaacaacaactggggattccggcccaagagactcaacttcaagctcttcaacatccaggtcaaggaggtcacgcagaatgaaggcaccaagaccatcgccaataaccttaccagcacgattcaggtctttacggactcggaataccggctcccgtacgtcctcggctctgcgcaccagggctgcctgcctccgttcccggcggacgtcttcatgattcctcagtacgggtacctgactctgaacaacggcagtcaggccgtgggccgttcctccttctactgcctggagtactttccttctcaaatgctgagaacgggcaacaactttgagttcagctaccagtttgaggacgtgccttttcacagcagctacgcgcacagccaaagcctggaccggctgatgaaccccctcatcgaccagtacctgtactacctgtctcggactcagtccacgggaggtaccgcaggaactcagcagttgctattttctcaggccgggcctaataacatgtcggctcaggccaaaaactggctacccgggccctgctaccggcagcaacgcgtctccacgacactgtcgcaaaataacaacagcaactttgcttggaccggtgccaccaagtatcatctgaatggcagagactctctggtaaatcccggtgtcgctatggcaacgcacaaggacgacgaagagcgattttttccatccagcggagtcttgatgtttgggaaacagggagctggaaaagacaacgtggactatagcagcgttatgctaaccagtgaggaagaaatcaaaaccaccaacccagtggccacagaacagtacggcgtggtggccgataacctgcaacagcaaaacgccgctcctattgtaggggccgtcaacagtcaaggagccttacctggcatggtctggcagaaccgggacgtgtacctgcagggtcctatctgggccaagattcctcacacggacggcaactttcatccttcgccgctgatgggaggctttggactgaaacacccgcctcctcagatcctgattaagaatacacctgttcccgcggatcctccaactaccttcagtcaagccaagccggcgtcgttcatcacgcagtacagcaccggacaggtcagcgtggaaattgaatgggagctgcagaaagagaacagcaagcgctggaacccagagattcagtatacttccaactactacaaatctacaaatgtggactttgctgtcaatactgagggtacttattcagagcctcgccccattggcacccgttacctcacccgtaacctgtaattgcctgttaatcaataaaccggttaattcgtttcagttgaactttggtctctgcgaagggcgaattc

SEQ ID NO: 4770 - protein, 731 aa, Adeno-associated virus
MAADGYLPDWLEDNLSEGIREWWDLKPGAPKPKANQQKQDDGRGLVLPGYKYLGPFNGLDKGEPVNEADAAALEHDKAYDKQLEQGDNPYLKYNHADAEFQERLQEDTSFGGNLGRAVFQAKKRVLEPLGLVEEGAKTAPGKKRPIESPDSSTGIGKKGQQPAKKKLNFGQTGDSESVPDPQPIGEPPAGPSGLGSGTMAAGGGAPMADNNEGADGVGNASGNWHCDSTWLGDRVITTSTRTWALPTYNNHLYKQISSQSGATNDNHFFGYSTPWGYFDFNRFHCHFSSRDWQRLINNNWGFRPKRLNFKLFNIQVKEVTQNEGTKTIANNLTSTIQVFTDSEYRLPYVLGSAHQGCLPPFPADVFMIPQYGYLTLNNGSQAVGRSSFYCLEYFPSQMLRTGNNFEFSYQFEDVPFHSSYAHSQSLDRLMNPLIDQYLYYLSRTQSTGGTAGTQQLLFSQAGPNNMSAQAKNWLPGPCYRQQRVSTTLSQNNNSNFAWTGATKYHLNGRDSLVNPGVAMATHKDDEERFFPSSGVLMFGKQGAGKDNVDYSSVMLTSEEEIKTTNPVATEQYGVVADNLQQQNAAPIVGAVNSQGALPGMVWQNRDVYLQGPIWAKIPHTDGNFHPSPLMGGFGLKHPPPQILIKNTPVPADPPTTFSQAKPASFITQYSTGQVSVEIEWELQKENSKRWNPEIQYTSNYYKSTNVDFAVNTEGTYSEPRPIGTRYLTRNL

SEQ ID NO: 4771 - protein, 731 aa, Adeno-associated virus
MAADGYLPDWLEDNLSEGIREWWDLKPGAPKPKANQQKQDDGRGLVLPGYKYLGPFNGLDKGEPVNEADAAALEHDKAYDKQLEQGDNPYLKYNHADAEFQERLQEDTSFGGNLGRAVFRAKKRVLEPLGLVEEGAKTAPGKKRPIESPDSSTGIGKKGQQPAKKKLNFGQTGDSESVPDPQPLGEPPAAPSGLGSGTMAAGGGAPMADNNEGADGVGNASGNWHCDSTWLGDRVITTSTRTWALPTYNNHLYKQISSQSGATNDNHFFGYSTPWGYFDFNRFHCHFSPRDWQRLINNNRGFRPRKLRFKLFNIQVKEVTTNDGVTTIANNLTSTIQVFSDSEYQLPYVLGSAHQGCLPPFPADVFMIPQYGYLTLNNGSQSVGRSSFYCLEYFPSQMLRTGNNFEFSYQFEDVPFHSSYAHSQSLDRLMNPLIDQYLYYLSRTQSTGGTAGTQQLLFSQAGPNNMSAQAKNWLPGPCYRQQRVSTTLSQNNNSNFAWTGATKYHLNGRDSLVNPGVAMATHKDDEERFFPSSGVLMFGKQGAGKDNVDYSSVMLTSEEEIKTTNPVATEQYGVVADNLQQQNAAPIVGAVNSQGALPGMAWQNRDVYLQGPIWAKIPHTDGNFHPSPLMGGFGLKHPPPQILIKNTPVPADPPTTFSQAKLASFITQYSTGQVSVEIEWELQKENSKRWNPEIQYTSNYYKSTNVDFAVNTEGTYSEPRPIGTRYLTRNL

SEQ ID NO: 4772 - protein, 738 aa, Adeno-associated virus
MAADGYLPDWLEDNLSEGIREWWDLKPGAPKPKANQQKQDDGRGLVLPGYKYLGPFNGLDKGEPVNEADAAALEHDKAYDKQLEQGDNPYLKYNHADAEFQERLQEDTSFGGNLGRAVFQAKKRVLEPLGLVEEGAKTAPGKKRPVEPSPQRSPDSSTGIGKTGQQPAKKRLNFGQTGDSESVPDPQPIGEPPAGPSGLGSGTMAAGGGAPMADNNEGADGVGSSSGNWHCDSTWLGDRVITTSTRTWALPTYNNHLYKQISNGTSGGSTNDNTYFGYSTPWGYFDFNRFHCHFSPRDWQRLINNNWGFRPKRLNFKLFNIQVKEVTQNEGTKTIANNLTSTIQVFTDSEYQLPYVLGSAHQGCLPPFPADVFMIPQYGYLTLNNGSQAVGRSSFYCLEYFPSQMLRTGNNFEFSYQFEDVPFHSSYAHSQSLDRLMNPLIDQYLYYLSRTQSTGGTAGTQQLLFSQAGPNNMSAQAKNWLPGPCYRQQRVSTTLSQNNNSNFAWTGATKYHLNGRDSLVNPGVAMATHKDDEERFFPSSGVLMFGKQGAGKDNVDYSSVMLTSEEEIKTTNPVATEQYGVVADNLQQQNAAPIVGAVNSQGALPGMVWQNRDVYLQGPIWAKIPHTDGNFHPSPLMGGFGLKHPPPQILIKNTPVPADPPTTFSQAKLASFITQYSTGQVSVEIEWELQKENSKRWNPEIQYTSNYYKSTNVDFAVNTEGTYSEPRPIGTRYLTRNL

SEQ ID NO: 4773 - protein, 735 aa, Adeno-associated virus
MAADGYLPDWLEDNLSEGIREWWDLKPGAPKPKANQQKQDDGRGLVLPGYKYLGPFNGLDKGEPVNEADAAALEHDKAYDKQLEQGDNPYLKYNHADAEFQERLQEDTSFGGNLGRAVFQAKKRVLEPLGLVEEGAKTAPGKKRPVEPSPQRSPDSSTGIGKTGQQPAKKRLNFGQTGDSESVPDPQPIGEPPAGPSGLGSGTMAAGGGAPMADNNEGADGVGSSSGNWHCDSTWLGDRVITTSTRTWALPTYNNHLYKQISNGTSGGSTNDNTYFGYSTPWGYFDFNRFHCHFSPRDWQRLINNNWGFRPRKLRFKLFNIQVKEVTTDDGVTTIANNLTSTIQVFSDSEYQLPYVLGSAHQGCLPPFPADVFMIPQYGYLTLNNGSQSVGRSSFYCLEYFPSQMLRTGNNFEFSYTFEEVPFHSSYAHSQSLDRLMNPLIDQYLYYLARTQSTTGSTRELQFHQAGPNTMAEQSKNWLPGPCYRQQRLSKNIDSNNNSNFAWTGATKYHLNGRNSLTNPGVAMATNKDDEDQFFPINGVLVFGKTGAANKTTLENVLMTSEEEIKTTNPVATEEYGVVSSNLQSSTAGPQTQTVNSQGALPGMVWQNRDVYLQGPIWAKIPHTDGNFHPSPLMDGFGLKHPPPQILIKNTPVPANPPEVFTPAKFASFITQYSTGQVSVEIEWELQKENSKRWNPEIQYTSNYAKSNNVEFAVNNEGVYTEPRPIGTRYLTRNL

SEQ ID NO: 4774 - DNA, 3128 bp, Adeno-associated virus
gaattcgccctttctacggctgcgtcaactggaccaatgagaactttcccttcaacgattgcgtcgacaagatggtgatctggtgggaggagggcaagatgacggccaaggtcgtggagtccgccaaggccattctcggcggcagcaaggtgcgcgtggaccaaaagtgcaagtcttccgcccagatcgatcccacccccgtgatcgtcacttccaacaccaacatgtgcgccgtgattgacgggaacagcaccaccttcgagcaccagcagccgttacaagaccggatgttcaaatttgaactcacccgccgtctggagcacgactttggcaaggtgacaaagcaggaagtcaaagagttcttccgctgggcgcaggatcacgtgaccgaggtggcgcatgagttctacgtcagaaagggtggagccaacaagagacccgcccccgatgacgcggataaaagcgagcccaagcgggcctgcccctcagtcgcggatccatcgacgtcagacgcggaaggagctccggtggactttgccgacaggtaccaaaacaaatgttctcgtcacgcgggcatgcttcagatgctgtttccctgcaagacatgcgagagaatgaatcagaatttcaacatttgcttcacgcacgggaccagagactgttcagaatgtttccccggcgtgtcagaatctcaaccggtcgtcagaaagaggacgtatcggaaactctgtgccattcatcatctgctagggcgggctcccgagattgcttgctcggcctgcgatctggtcaacgtggacctggatgactgtgtttctgagcaataaatgacttaaaccaggtatggctgccgatggttatcttccagattggctcgaggacaacctctctgagggcattcgcgagtggtgggacttgaaacctggagccccgaaacccaaagccaaccagcaaaagcaggacgacggccggggtctggtgcttcctggctacaagtacctcggacccttcaacggactcgacaagggggagcccgtcaacgcggcggacgcagcggccctcgagcacgacaaggcctacgaccagcagctcaaagcgggtgacaatccgtacctgcggtataaccacgccgacgccgagtttcaggagcgtctgcaagaagatacgtcttttgggggcaacctcgggcgagcagtcttccaggccaagaagcgggttctcgaacctctcggtctggttgaggaaggcgctaagacggctcctggaaagaagagaccggtagagccatcaccccagcgttctccagactcctctacgggcatcggcaagacaggccagcagcccgcgaaaaagagactcaactttgggcagactggcgactcagagtcagtgcccgaccctcaaccaatcggagaaccccccgcaggcccctctggtctgggatctggtacaatggctgcaggcggtggcgctccaatggcagacaataacgaaggcgccgacggagtgggtagttcctcaggaaattggcattgcgattccacatggctgggcgacagagtcatcaccaccagcacccgaacctgggccctccccacctacaacaaccacctctacaagcaaatctccaacgggacatcgggaggaagcaccaacgacaacacctacttcggctacagcaccccctgggggtattttgactttaacagattccactgccacttctcaccacgtgactggcagcgactcatcaacaacaactggggattccggcccaagagactcaacttcaagctcttcaacatccaggtcaaggaggtcacgcagaatgaaggcaccaagaccatcgccaataaccttaccagcacgattcaggtctttacggactcggaataccagctcccgtacgtcctcggctctgcgcaccagggctgcctgcctccgttcccggcggacgtcttcatgattcctcagtacgggtacctgactctgaacaacggcagtcaggccgtgggccgttcctccttctactgcctggagtactttccttctcaaatgctgagaacgggcaacaactttgagttcagctaccagtttgaggacgtgccttttcacagcagctacgcgcacagccaaagcctggaccggctgatgaaccccctcatcgaccagtacctgtactacctgtctcggactcagtccacgggaggtaccgcaggaactcagcagttgctattttctcaggccgggcctaataacatgtcggctcaggccaaaaactggctacccgggccctgctaccggcagcaacgcgtctccacgacactgtcgcaaaataacaacagcaactttgcttggaccggtgccaccaagtatcatctgaatggcagagactctctggtaaatcccggtgtcgctatggcaacgcacaaggacgacgaagagcgattttttccatccagcggagtcttgatgtttgggaaacagggagctggaaaagacaacgtggactatagcagcgttatgctaaccagtgaggaagaaatcaaaaccaccaacccagtggccacagaacagtacggcgtggtggccgataacctgcaacagcaaaacgccgctcctattgtaggggccgtcaacagtcaaggagccttacctggcatggtctggcagaaccgggacgtgtacctgcagggtcctatctgggccaagattcctcacacggacggcaactttcatccttcgccgctgatgggaggctttggactgaaacacccgcctcctcagatcctgattaagaatacacctgttcccgcggatcctccaactaccttcagtcaagccaagctggcgtcgttcatcacgcagtacagcaccggacaggtcagcgtggaaattgaatgggagctgcagaaagagaacagcaagcgctggaacccagagattcagtatacttccaactactacaaatctacaaatgtggactttgctgtcaatactgagggtacttattcagagcctcgccccattggcacccgttacctcacccgtaacctgtaattgcctgttaatcaataaaccggctaattcgtttcagttgaactttggtctctgcgaagggcgaattc

SEQ ID NO: 4775 - protein, 738 aa, Adeno-associated virus
MAADGYLPDWLEDNLSEGIREWWDLKPGAPKPKANQQKQDDGRGLVLPGYKYLGPFNGLDKGEPVNAADAAALEHDKAYDQQLKAGDNPYLRYNHADAEFQERLQEDTSFGGNLGRAVFQAKKRVLEPLGLVEEGAKTAPGKKRPVEPSPQRSPDSSTGIGKTGQQPAKKRLNFGQTGDSESVPDPQPIGEPPAGPSGLGSGTMAAGGGAPMADNNEGADGVGSSSGNWHCDSTWLGDRVITTSTRTWALPTYNNHLYKQISNGTSGGSTNDNTYFGYSTPWGYFDFNRFHCHFSPRDWQRLINNNWGFRPKRLNFKLFNIQVKEVTQNEGTKTIANNLTSTIQVFTDSEYQLPYVLGSAHQGCLPPFPADVFMIPQYGYLTLNNGSQAVGRSSFYCLEYFPSQMLRTGNNFEFSYQFEDVPFHSSYAHSQSLDRLMNPLIDQYLYYLSRTQSTGGTAGTQQLLFSQAGPNNMSAQAKNWLPGPCYRQQRVSTTLSQNNNSNFAWTGATKYHLNGRDSLVNPGVAMATHKDDEERFFPSSGVLMFGKQGAGKDNVDYSSVMLTSEEEIKTTNPVATEQYGVVADNLQQQNAAPIVGAVNSQGALPGMVWQNRDVYLQGPIWAKIPHTDGNFHPSPLMGGFGLKHPPPQILIKNTPVPADPPTTFSQAKLASFITQYSTGQVSVEIEWELQKENSKRWNPEIQYTSNYYKSTNVDFAVNTEGTYSEPRPIGTRYLTRNL

SEQ ID NO: 4776 - DNA, 3084 bp, Adeno-associated virus
gaattcgccctttctacggctgcatcaactggaccaatgagaactttcccttcaacgattgcgtcgacaagatggtgatctggtgggaggagggcaagatgacggccaaggtcgtggagtccgccaaggccattctcggcggcagcaaggtgcgcgtggaccaaaagtgcaagtcgtccgcccagatcgaccccacccccgtgatcgtcacctccaacaccaacatgtgcgccgtgattgacgggaacagcaccaccttcgagcaccagcagccgttgcaggaccggatgttcaagttcgaactcacccgccgtctggagcacgactttggcaaggtgaccaagcaggaagtcaaagagttcttccgctgggcgcaggatcacgtgaccgaggtggcgcatgagttctacgtcagaaagggcggagccagcaaaagacccgcccccgatgacgcggatataagcgagcccaagcgggcctgcccctcagtcgcggatccatcgacgtcagacgcggaaggagctccggtggactttgccgacaggtaccaaaacaaatgttctcgtcacgcgggcatgcttcagatgctgtttccctgcaaaacgtgcgagaaaatgaatcagaatttcaacatttgcttcacgcacggggtcagagactgctcagaatgtttccccggtgcatcagaatctcaaccggtcgtcagaaaaaaaacgtatcagaaactgtgtgccattcatcatctgctggggcgggcacccgagattgcttgctcggcctgcgatctggtcaacgtggacctggacgactgtgtttctgagcaataaatgacttaaaccaggtatggctgccgatggttatcttccagattggcttgaggacaacctctctgagggcattcgcgagtggtgggacctgaaacctggagccccgaaacccaaagccaaccagcaaaagcaggacgacggccggggtctggtgcttcctggctacaagtacctcggacccttcaacggactcgacaagggggagcccgtcaacgcggcggacgcagcggccctcgagcacgacaaggcctacgaccagcagctcaaagcgggtgacaatccgtacctgcggtataaccacgccgacgccgagtttcaggagcgtctgcaagaagatacgtcttttgggggcaacctcgggcgagcagtcttccaggccaagaagcgggttctcgaacctctcggtctggttgaggaaggcgctaagacggctcctggaaagaagagaccggtagagccatcacctcagcgttcccccgactcctccacgggcatcggcaagaaaggccaccagcccgcgagaaagagactgaactttgggcagactggcgactcggagtcagtccccgaccctcaaccaatcggagaaccaccagcaggcccctctggtctgggatctggtacaatggctgcaggcggtggcgctccaatggcagacaataacgaaggcgccgacggagtgggtagttcctcaggaaattggcattgcgattccacatggctgggcgacagagtcatcaccaccagcacccgaacctgggccctgcccacctacaacaaccatctctacaagcaaatctccaacgggacatcgggaggaagcactaacgacaacacctactttggctacagcaccccctgggggtattttgacttcaacagattccactgccacttctcaccacgtgactggcagcgactcatcaacaataactggggattccggcccaagagactcaacttcaagctcttcaacatccaggtcaaggaggtcacgcagaatgaaggcaccaagaccatcgccaataaccttaccagcacgattcaggtgtttacggactcggaataccagctcccgtacgtccccggctctgcgcaccagggctgcctccctccgttcccggcggacgtcttcatgattcctcagtacgggtatctgaccctaaacaatggcagtcaggctgtgggccgttcctccttctactgcctggaatacttcccttctcaaatgctgaggacgggcaacaactttgaattcagctacaccttcgaggacgtgcctttccacagcagctacgcgcacagccagagcctggaccggctgatgaaccctctcatcgaccagtacctgtattacttatccagaactcagtccacaggaggaactcaaggtactcagcaattgttattttctcaagccgggcccgcaaacatgtcggctcaggccaagaactggctacctggaccgtgttaccgtcagcaacgagtttccacgacactgtcgcaaaacaacaacagcaattttgcttggaccggtgccaccaagtatcacctgaatggcagagactccctggttaatcccggcgttgccatggctacccacaaggacgacgaggagcgcttcttcccgtcaagcggagttctaatgtttggcaagcagggggctggaaaagacaatgtggactacagcagcgtgatgctcaccagcgaagaagaaattaaaactactaacccagtggctacagagcagtatggtgtggtggcagacaacctgcagcagaccaacggagctcccattgtgggaactgtcaacagccagggggccttacctggtatggtctggcaaaaccgggacgtgtacctgcagggccccatctgggccaaaattcctcacacggacggcaactttcatccttcgccgctgatgggaggctttggactgaaacacccgcctcctcagatcctggtgaaaaacactcctgttcctgcggatcctccgaccaccttcagccaggccaagctggcttcttttatcacgcagtacagcaccggacaggtcagcgtggaaatcgaatgggagctgcagaaagaaaacagcaagcgctggaacccagagattcagtatacttccaactactacaaatctacaaatgtggactttgctgtcaatactgagggtacttattcagagcctcgccccattggcactcgttatctcacccgtaatctgtaattgcttgttaatcaataaaccggt

SEQ ID NO: 4777 - protein, 738 aa, Adeno-associated virus
MAADGYLPDWLEDNLSEGIREWWDLKPGAPKPKANQQKQDDGRGLVLPGYKYLGPFNGLDKGEPVNAADAAALEHDKAYDQQLKAGDNPYLRYNHADAEFQERLQEDTSFGGNLGRAVFQAKKRVLEPLGLVEEGAKTAPGKKRPVEPSPQRSPDSSTGIGKKGHQPARKRLNFGQTGDSESVPDPQPIGEPPAGPSGLGSGTMAAGGGAPMADNNEGADGVGSSSGNWHCDSTWLGDRVITTSTRTWALPTYNNHLYKQISNGTSGGSTNDNTYFGYSTPWGYFDFNRFHCHFSPRDWQRLINNNWGFRPKRLNFKLFNIQVKEVTQNEGTKTIANNLTSTIQVFTDSEYQLPYVPGSAHQGCLPPFPADVFMIPQYGYLTLNNGSQAVGRSSFYCLEYFPSQMLRTGNNFEFSYTFEDVPFHSSYAHSQSLDRLMNPLIDQYLYYLSRTQSTGGTQGTQQLLFSQAGPANMSAQAKNWLPGPCYRQQRVSTTLSQNNNSNFAWTGATKYHLNGRDSLVNPGVAMATHKDDEERFFPSSGVLMFGKQGAGKDNVDYSSVMLTSEEEIKTTNPVATEQYGVVADNLQQTNGAPIVGTVNSQGALPGMVWQNRDVYLQGPIWAKIPHTDGNFHPSPLMGGFGLKHPPPQILVKNTPVPADPPTTFSQAKLASFITQYSTGQVSVEIEWELQKENSKRWNPEIQYTSNYYKSTNVDFAVNTEGTYSEPRPIGTRYLTRNL

SEQ ID NO: 4778 - DNA, 3123 bp, Adeno-associated virus
gaattcgcccttggctgcgtcaactggaccaatgagaactttcccttcaacgattgcgtcgacaagatggtgatctggtgggaggagggcaagatgacggccaaggtcgtggagtccgccaaggccattctcggcggcagcaaggtgcgcgtggaccaaaagtgcaagtcgtccgcccagatcgaccccacccccgtgatcgtcacctccaacaccaacatgtgcgccgtgattgacgggaacagcaccaccttcgagcaccagcagccgttgcaggaccggatgttcaagttcgaactcacccgccgtctggagcacgactttggcaaggtgaccaagcaggaagtcaaagagttcttccgctgggcgcaggatcacgtgaccgaggtggcgcatgagttctacgtcagaaagggcggagccagcaaaagacccgcccccgatgacgcggatataagcgagcccaagcgggcctgcccctcagtcgcggatccatcgacgtcagacgcggaaggagctccggtggactttgccgacaggtaccaaaacaaatgttctcgtcacgcgggcatgctccagatgctgtttccctgcaaaacgtgcgagagaatgaatcagaatttcaacatttgcttcacgcacggggtcagagactgctcagaatgtttccccggtgcatcagaatctcaaccggtcgtcagaaaaaaaacgtatcagaaactgtgtgccattcatcatctgctggggcgggcacccgagattgcttgctcggcctgcgatctggtcaacgtggacctggacgactgtgtttctgagcaataaatgacttaaaccaggtatggctgccgatggttatcttccagattggcttgaggacaacctctctgagggcattcgcgagtggtgggacctgaaacctggagccccgaaacccaaagccaaccagcaaaagcaggacgacggccggggtctggtgcttcctggctacaagtacctcggacccttcaacggactcgacaagggggagcccgtcaacgcggcggacgcagcggccctcgagcacgacaaggcctacgaccagcagctcaaagcgggtgacaatccgtacctgcggtataaccacgccgacgccgagtttcaggagcgtctgcaagaagatacgtcttttgggggcaacctcgggcgagcagtcttccaggccaagaagcgggttctcgaacctctcggtctggttgaggaaggcgctaagacggctcctggaaagaagagaccggtagagccatcacctcagcgttcccccgactcctccacgggcatcggcaagaaaggccaccagcccgcgagaaagagactgaactttgggcagactggcgactcggagtcagtccccgaccctcaaccaatcggagaaccaccagcaggcccctctggtctgggatctggtacaatggctgcaggcggtggcgctccaatggcagacaataacgaaggcgccgacggagtgggtagttcctcaggaaattggcattgcgattccacatggctgggcgacagagtcatcaccaccagcacccgaacctgggccctgcccacctacaacaaccatctctacaagcaaatctccaacgggacatcgggaggaagcactaacgacaacacctactttggctacagcaccccctgggggtattttgacttcaacagattccactgccacttctcaccacgtgactggcagcgactcatcaacaataactggggattccggcccaagagactcaacttcaagctcttcaacatccaggtcaaggaggtcacgcagaatgaaggcaccaagaccatcgccaataaccttaccagcacgattcaggtgtttacggactcggaataccagctcccgtacgtcctcggctctgcgcaccagggctgcctccctccgttcccggcggacgtcttcatgattcctcagtacgggtatctgaccctaaacaatggcagtcaggctgtgggccgttcctccttctactgcctggaatacttcccttctcaaatgctgaggacgggcaacaactttgaattcagctacaccttcgaggacgtgcctttccacagcagctacgcgcacagccagagcctggaccggctgatgaaccctctcatcgaccagtacctgtattacttatccagaactcagtccacaggaggaactcaaggtactcagcaattgttattttctcaagccgggcccgcaaacatgtcggctcaggccaagaactggctacctggaccgtgttaccgtcagcaacgagtttccacgacactgtcgcaaaacaacaacagcaattttgcttggaccggtgccaccaagtatcacctgaatggcagagactccctggttaatcccggcgttgccatggctacccacaaggacgacgaggagcgcttcttcccgtcaagcggagttctaatgtttggcaagcagggggctggaaaagacaatgtggactacagcagcgtgatgctcaccagcgaagaagaaattaaaactactaacccagtggctacagagcagtatggtgtggtggcagacaacctgcagcagaccaacggagctcccattgtgggaactgtcaacagccagggggccttacctggtatggtctggcaaaaccgggacgtgtacctgcagggccccatctgggccaaaattcctcacacggacggcaactttcatccttcgccgctgatgggaggctttggactgaaacacccgcctcctcagatcctggtgaaaaacactcctgttcctgcggatcctccgaccaccttcagccaggccaagctggcttcttttatcacgcagtacagcaccggacaggtcagcgtggaaatcgaatgggagctgcagaaagaaaacagcaagcgctggaacccagagattcagtatacttccaactactacaaatctacaaatgtggactttgctgtcaatactgagggtacttattcagagcctcgccccattggcactcgttatctcacccgtaatctgtaattgcttgttaatcaataaaccggttaattcgtttcagttgaactttggtctctgcgaagggcgaattc

SEQ ID NO: 4779 - protein, 738 aa, Adeno-associated virus
MAADGYLPDWLEDNLSEGIREWWDLKPGAPKPKANQQKQDDGRGLVLPGYKYLGPFNGLDKGEPVNAADAAALEHDKAYDQQLKAGDNPYLRYNHADAEFQERLQEDTSFGGNLGRAVFQAKKRVLEPLGLVEEGAKTAPGKKRPVEPSPQRSPDSSTGIGKKGHQPARKRLNFGQTGDSESVPDPQPIGEPPAGPSGLGSGTMAAGGGAPMADNNEGADGVGSSSGNWHCDSTWLGDRVITTSTRTWALPTYNNHLYKQISNGTSGGSTNDNTYFGYSTPWGYFDFNRFHCHFSPRDWQRLINNNWGFRPKRLNFKLFNIQVKEVTQNEGTKTIANNLTSTIQVFTDSEYQLPYVLGSAHQGCLPPFPADVFMIPQYGYLTLNNGSQAVGRSSFYCLEYFPSQMLRTGNNFEFSYTFEDVPFHSSYAHSQSLDRLMNPLIDQYLYYLSRTQSTGGTQGTQQLLFSQAGPANMSAQAKNWLPGPCYRQQRVSTTLSQNNNSNFAWTGATKYHLNGRDSLVNPGVAMATHKDDEERFFPSSGVLMFGKQGAGKDNVDYSSVMLTSEEEIKTTNPVATEQYGVVADNLQQTNGAPIVGTVNSQGALPGMVWQNRDVYLQGPIWAKIPHTDGNFHPSPLMGGFGLKHPPPQILVKNTPVPADPPTTFSQAKLASFITQYSTGQVSVEIEWELQKENSKRWNPEIQYTSNYYKSTNVDFAVNTEGTYSEPRPIGTRYLTRNL

SEQ ID NO: 4780 - DNA, 3122 bp, Adeno-associated virus
gaattcgccctttctacggctgcgtcaactggaccaatgagaactttcccttcaacgattgcgtcgacaagatggtgatctggtgggaggagggcaagatgacggccaaggtcgtggagtccgccaaggccattctcggcggcagcaaggtgcgtgtggaccaaaagtgcaagtcttccgcccagatcgatcccacccccgtgatcgtcacctccaacaccaacatgtgcgccgtgattgacgggaacagcgccaccttcgagcaccagcagccgttgcaggaccggatgttcaaatttgaactcacccgccgtctggagcatgactttggcaaggtgacgaagcaggaagtcaaagagttcttccgctgggcgcaggatcacgtgaccgaggtggcgcatgagttccacgtcagaaagggtggagccaacaagagacccgcccccgatgacgcggatataagcgagcccaagcgggcctgcccctcagtcgcggatccatcgacgtcagacgcggaaggagctccggtggactttgccgacaggtaccaaaacaaatgttctcgtcacgcgggcatgcttcagatgctgtttccctgcaagacatgcgagagaatgaatcagaatttcaacatttgcttcacgcacgggaccagagactgttcagaatgtttccccggcgtgtcagaatctcaaccggtcgtcagaaagaggacgtatcggaaactctgtgcgattcatcatctgctggggcgggctcccgagattgcttgctcggcctgcgatctggtcaacgtggacctggatgactgtgtttctgagcaataaatgacttaaaccaggtatggctgccgatggttatcttccagattggctcgaggacaacctctctgagggcattcgcgagtggtgggacttgaaacctggagccccgaaacccaaagccaaccagcaaaagcaggacgacggccggggtctggtgcttcctggctacaagtacctcggacccttcaacggactcgacaagggggagcccgtcaacgcggcggacgcagcggccctcgagcacgacaaagcctacgaccagcagctcaaagcgggtgacaatccgtacctgcggtataatcacgccgacgccgagtttcaggagcgtctgcaagaagatacgtcttttgggggcaacctcgggcgagcagtcttccaggccaagaagcgggttctcgaacctctcggtctggttgaggaaggcgctaagacggctcctggaaagaagagactggtagagcagtcgccacaagagccagactcctcctcgggcatcggcaagacaggccagcagcccgctaaaaagagactcaattttggtcagactggcgactcagagtcagtccccgacccacaacctctcggagaacctccagcagccccctcaggtctgggacctaatacaatggcttcaggcggtggcgctccaatggcagacaataacgaaggcgccgacggagtgggtaattcctcgggaaattggcattgcgattccacatggctgggggacagagtcatcaccaccagcacccgaacctgggccctgcccacctacaacaaccacctctacaagcaaatctccaacggcacctcgggaggaagcaccaacgacaacacctattttggctacagcaccccctgggggtattttgacttcaacagattccactgtcacttttcaccacgtgactggcaacgactcatcaacaacaattggggattccggcccaaaagactcaacttcaagctgttcaacatccaggtcaaggaagtcacgacgaacgaaggcaccaagaccatcgccaataatctcaccagcaccgtgcaggtctttacggactcggagtaccagttaccgtacgtgctaggatccgctcaccagggatgtctgcctccgttcccggcggacgtcttcacggttcctcagtacggctatttaactttaaacaatggaagccaagccctgggacgttcctccttctactgtctggagtatttcccatcgcagatgctgagaaccggcaacaactttcagttcagctacaccttcgaggacgtgcctttccacagcagctacgcgcacagccagagcctggacaggctgatgaatcccctcatcgaccagtacctgtactacctggtcagaacgcaaacgactggaactggagggacgcagactctggcattcagccaagcgggtcctagctcaatggccaaccaggctagaaattgggtgcccggaccttgctaccggcagcagcgcgtctccacgacaaccaaccagaacaacaacagcaactttgcctggacgggagctgccaagtttaagctgaacggccgagactctctaatgaatccgggcgtggcaatggcttcccacaaggatgacgacgaccgcttcttcccttcgagcggggtcctgatttttggcaagcaaggagccgggaacgatggagtggattacagccaagtgctgattacagatgaggaagaaatcaaggctaccaaccccgtggccacagaagaatatggagcagtggccatcaacaaccaggccgccaatacgcaggcgcagaccggactcgtgcacaaccagggggtgattcccggcatggtgtggcagaatagagacgtgtacctgcagggtcccatctgggccaaaattcctcacacggacggcaactttcacccgtctcccctgatgggcggctttggactgaagcacccgcctcctcaaattctcatcaagaacacaccggttccagcggacccgccgcttaccttcaaccaggccaagctgaactctttcatcacgcagtacagcaccggacaggtcagcgtggaaatcgagtgggagctgcagaaagaaaacagcaaacgctggaatccagagattcaatacacttccaactactacaaatctacaaatgtggactttgctgtcaacacggaaggagtttatagcgagcctcgccccattggcacccgttacctcacccgcaacctgtaattacatgttaatcaataaaccggttaattcgtttcagttgaactttggtctctgcgaagggcgaattc

SEQ ID NO: 4781 - protein, 736 aa, Adeno-associated virus
MAADGYLPDWLEDNLSEGIREWWDLKPGAPKPKANQQKQDDGRGLVLPGYKYLGPFNGLDKGEPVNAADAAALEHDKAYDQQLKAGDNPYLRYNHADAEFQERLQEDTSFGGNLGRAVFQAKKRVLEPLGLVEEGAKTAPGKKRLVEQSPQEPDSSSGIGKTGQQPAKKRLNFGQTGDSESVPDPQPLGEPPAAPSGLGPNTMASGGGAPMADNNEGADGVGNSSGNWHCDSTWLGDRVITTSTRTWALPTYNNHLYKQISNGTSGGSTNDNTYFGYSTPWGYFDFNRFHCHFSPRDWQRLINNNWGFRPKRLNFKLFNIQVKEVTTNEGTKTIANNLTSTVQVFTDSEYQLPYVLGSAHQGCLPPFPADVFTVPQYGYLTLNNGSQALGRSSFYCLEYFPSQMLRTGNNFQFSYTFEDVPFHSSYAHSQSLDRLMNPLIDQYLYYLVRTQTTGTGGTQTLAFSQAGPSSMANQARNWVPGPCYRQQRVSTTTNQNNNSNFAWTGAAKFKLNGRDSLMNPGVAMASHKDDDDRFFPSSGVLIFGKQGAGNDGVDYSQVLITDEEEIKATNPVATEEYGAVAINNQAANTQAQTGLVHNQGVIPGMVWQNRDVYLQGPIWAKIPHTDGNFHPSPLMGGFGLKHPPPQILIKNTPVPADPPLTFNQAKLNSFITQYSTGQVSVEIEWELQKENSKRWNPEIQYTSNYYKSTNVDFAVNTEGVYSEPRPIGTRYLTRNL

SEQ ID NO: 4782 - DNA, 3117 bp, Adeno-associated virus
gaattcgcccttggctgcgtcaactggaccaatgagaactttcccttcaacgattgcgtcgacaagatggtgatctggtgggaggagggcaagatgacggccaaggtcgtggagtccgccaaggccattctcggcggcagcaaggtgcgtgtggaccaaaagtgcaagtcttccgcccagatcgatcccacccccgtgatcgtcacctccaacaccaacatgtgcgccgtgattgacgggaacagcaccaccttcgagcaccagcagccgttgcaggaccggatgttcaaatttgaactcacccgccgtctggagcatgactttggcaaggtgacgaagcaggaagtcaaagagttcttccgctgggcgcaggatcacgtgaccgaggtggcgcatgagttccacgtcagaaagggtggagccaacaagagacccgcccccgatgacgcggatataagcgagcccaagcgggcctgcccctcagtcgcggatccatcgacgtcagacgcggaaggagctccggtggactttgccgacaggtaccaaaacaaatgttctcgtcacgcgggcatgcttcagatgctgtttccctgcaagacatgcgagagaatgaatcagaatttcaacatttgcttcacgcacgggaccagagactgttcagaatgtttccccggcgtgtcagaatctcaaccggtcgtcagaaagaggacgtatcggaaactctgtgcgattcatcatctgctggggcgggctcccgagattgcttgctcggcctgcgatctggtcaacgtggacctggatgactgtgtttctgagcaataaatgacttaaaccaggtatggctgccgatggttatcttccagattggctcgaggacaacctctctgagggcattcgcgagtggtgggacttgaaacctggagccccgaaacccaaagccaaccagcaaaagcaggacgacggccggggtctggtgcttcctggctacaagtacctcggacccttcaacggactcgacaagggggagcccgtcaacgcggcggacgcagcggccctcgagcacgacaaagcctacgaccagcagctcaaagcgggtgacaatccgtacctgcggtataatcacgccgacgccgagtttcaggagcgtctgcaagaagatacgtcttttgggggcaacctcgggcgagcagtcttccaggccaagaagcgggttctcgaacctctcggtctggttgaggaaggcgctaagacggctcctggaaagaagagaccggtagagcagtcgccacaagagccagactcctcctcgggcatcggcaagacaggccagcagcccgctaaaaagagactcaattttggtcagactggcgactcagagtcagtccccgacccacaacctctcggagaacctccagcagccccctcaggtctgggacctaatacaatggcttcaggcggtggcgctccaatggcagacaataacgaaggcgccgacggagtgggtaattcctcgggaaattggcattgcgattccacatggctgggggacagagtcatcaccaccagcacccgaacctgggccctgcccacctacaacaaccacctctacaagcaaatctccaacggcacctcgggaggaagcaccaacgacaacacctattttggctacagcaccccctgggggtattttgacttcaacagattccactgtcacttttcaccacgtgactggcaacgactcatcaacaacaattggggattccggcccaaaagactcaacttcaagctgttcaacatccaggtcaaggaagtcacgacgaacgaaggcaccaagaccatcgccaataatctcaccagcaccgtgcgggtctttacggactcggagtaccagttaccgtacgtgctaggatccgctcaccagggatgtctgcctccgttcccggcggacgtcttcatggttcctcagtacggctatttaactttaaacaatggaagccaagccctgggacgttcctccttctactgtctggagtatttcccatcgcagatgctgagaaccggcaacaactttcagttcagctacaccttcgaggacgtgcctttccacagcagctacgcgcacagccagagcctggacaggctgatgaatcccctcatcgaccagtacctgtactacctggtcagaacgcaaacgactggaactggagggacgcagactctggcattcagccaagcgggtcctagctcaatggccaaccaggctagaaattgggtgcccggaccttgctaccggcagcagcgcgtctccacgacaaccaaccagagcaacaacagcaactttgcctggacgggagctgccaagtttaagctgaacggccgagactctctaatgaatccgggcgtggcaatggcttcccacaaggatgacgacgaccgcttcttcccttcgagcggggtcctgatttttggcaagcaaggagccgggaacgatggagtggattacagccaagtgctgattacagatgaggaagaaatcaaggctaccaaccccgtggccacagaagaatatggagcagtggccatcaacaaccaggccgccaatacgcaggcgcagaccggactcgtgcacaaccagggggtgattcccggcatggtgtggcagaatagagacgtgtacctgcagggtcccatctgggccaaaattcctcacacggacggcaactttcacccgtctcccctgatgggcggctttggactgaagcacccgcctcctcaaattctcatcaagaacacaccggttccagcggacccgccgcttaccttcaaccaggccaagctgaactctttcatcacgcagtacagcaccggacaggtcagcgtggaaatcgagtgggagctgcagaaagaaaacagcaaacgctggaatccagagattcaatacacttccaactactacaaatctacaaatgtggactttgctgtcaacacggaaggagtttatagcgagcctcgccccattggcacccgttacctcacccgcaacctgtaattacatgttaatcaataaaccggttaattcgtttcagttgaactttggtctctgcgaagggcgaattc

SEQ ID NO: 4783 - protein, 736 aa, Adeno-associated virus
MAADGYLPDWLEDNLSEGIREWWDLKPGAPKPKANQQKQDDGRGLVLPGYKYLGPFNGLDKGEPVNAADAAALEHDKAYDQQLKAGDNPYLRYNHADAEFQERLQEDTSFGGNLGRAVFQAKKRVLEPLGLVEEGAKTAPGKKRPVEQSPQEPDSSSGIGKTGQQPAKKRLNFGQTGDSESVPDPQPLGEPPAAPSGLGPNTMASGGGAPMADNNEGADGVGNSSGNWHCDSTWLGDRVITTSTRTWALPTYNNHLYKQISNGTSGGSTNDNTYFGYSTPWGYFDFNRFHCHFSPRDWQRLINNNWGFRPKRLNFKLFNIQVKEVTTNEGTKTIANNLTSTVRVFTDSEYQLPYVLGSAHQGCLPPFPADVFMVPQYGYLTLNNGSQALGRSSFYCLEYFPSQMLRTGNNFQFSYTFEDVPFHSSYAHSQSLDRLMNPLIDQYLYYLVRTQTTGTGGTQTLAFSQAGPSSMANQARNWVPGPCYRQQRVSTTTNQSNNSNFAWTGAAKFKLNGRDSLMNPGVAMASHKDDDDRFFPSSGVLIFGKQGAGNDGVDYSQVLITDEEEIKATNPVATEEYGAVAINNQAANTQAQTGLVHNQGVIPGMVWQNRDVYLQGPIWAKIPHTDGNFHPSPLMGGFGLKHPPPQILIKNTPVPADPPLTFNQAKLNSFITQYSTGQVSVEIEWELQKENSKRWNPEIQYTSNYYKSTNVDFAVNTEGVYSEPRPIGTRYLTRNL

SEQ ID NO: 4784 - DNA, 3121 bp, Adeno-associated virus
gaattcgcccttctacggctgcgtcaactggaccaatgagaactttcccttcaacgattgcgtcgacaagatggtgatctggtgggaggagggcaagatgacggccaaggtcgtggagtccgccaaggccattctcggcggcagcaaggtgcgtgtggaccaaaagtgcaagtcttccgcccagatcgatcccacccccgtgatcgtcacctccaacaccaacatgtgcgccgtgattgacgggaacagcaccaccttcgagcaccagcagccgttgcaggaccggatgttcaaatttgaactcacccgccgtctggagcatgactttggcaaggtgacgaagcaggaagtcaaagagttcttccgctgggcgcaggatcacgtgaccgaggtggcgcatgagttccacgtcagaaagggtggcgccaacaagagacccgcccccgatgacgcggatataagcgagcccaagcgggcctgcccctcagtcgcggatccatcgacgtcagacgcggaaggagctccggtggactttgccgacaggtaccaaaacaaatgttctcgtcacgcgggcatgcttcagatgctgtttccctgcaagacatgcgagagaatgaatcagaatttcaacatttgcttcacgcacgggaccagagactgttcagaatgtttccccggcgtgtcagaatctcaaccggtcgtcagaaagaggacgtatcggaaactctgtgcgattcatcatctgctggggcgggctcccgagattgcttgctcggcctgcgatctggtcaacgtggacctggatgactgtgtttctgagcaataaatgacttaaaccaggtatggctgccgatggttatcttccagattggctcgaggacaacctctctgagggcattcgcgagtggtgggacttgaaacctggagccccgaaacccaaagccaaccagcaaaagcaggacgacggccggggtctggtgcttcctggctacaagtacctcggacccttcaacggactcgacaagggggagcccgtcaacgcggcggacgcagcggccctcgagcacgacaaagcctacgaccagcagctcaaagcgggtgacaatccgtacctgcggtataatcacgccgacgccgagtttcaggagcgtctgcaagaagatacgtcctttgggggcaacctcgggcgagcagtcttccaggccaagaagcgggttctcgaacctctcggtctggttgaggaaggcgctaagacggctcctggaaagaagagaccggtagagcagtcgccacaagagccagactcctcctcgggcatcggcaagacaggccagcagcccgctaaaaagagactcaattttggtcagactggcgactcagagtcagtccccgacccacaacctctcggagaacctccagcagccccctcaggtctgggacctaatacaatggcttcaggcggtggcgctccaatggcagacaataacgaaggcgccgacggagtgggtaattcctcgggaaattggcattgcgattccacatggctgggggacagagtcatcaccaccagcacccgaacctgggccctgcccacctacaacaaccacctctacaagcaaatctccaacggcacctcgggaggaagcaccaacgacaacacctattttggctacagcaccccctgggggtattttgacttcaacagattccactgtcacttttcaccacgtgactggcaacgactcatcaacaacaattggggattccggcccaaaagactcaacttcaagctgttcaacatccaggtcaaggaagtcacgacgaacgaaggcaccaagaccatcgccaataatctcaccagcaccgtgcaggtctttacggacttggagtaccagttaccgtacgtgctaggatccgctcaccagggatgtctgcctccgttcccggcggacgtcttcatggttcctcagtacggctatttaactttaaacaatggaagccaagccctgggacgttcctccttctactgtctggagtatttcccatcgcagatgccgagaaccggcaacaactttcagttcagctacaccttcgaggacgtgcctttccacagcagctacgcgcacagccagagcctggacaggctgatgaatcccctcatcgaccagtacctgtactacctggtcagaacgcaaacgactggaactggagggacgcagactctggcattcagccaagcgggtcctagctcaatggccaaccaggctagaaattgggtgcccggaccttgctaccggcagcagcgcgtctccacgacaaccaaccagaacaacaacagcaactttgcctggacgggagctgccaagtttaagctgaacggccgagactctctaatgaatccgggcgtggcaatggcttcccacaaggatgacgacgaccgcttcttcccttcgagcggggtcctgatttttggcaagcaaggagccgggaacgatggagtggattacagccaagtgctgattacagatgaggaagaaatcaaggctaccaaccccgtggccacagaagaatatggagcagtggccatcaacaaccaggccgccaatacgcaggcgcagaccggactcgtgcacaaccagggggtgattcccggcatggtgtggcagaatagagacgtgtacctgcagggtcccatctgggccaaaattcctcacacggacggcaactttcacccgtctcccctgatgggcggctttggactgaagcacccgcctcctcaaattctcatcaagaacacaccggttccagcggacccgccgcttaccttcaaccaggccaagctgaactctttcatcacgcagtacagcaccggacaggtcagcgtggaaatcgagtgggagctgcagaaagaaaacagcaaacgctggaatccagagattcaatacacttccaactactacaaatctacaaatgtggactttgctgtcaacacggaaggagtttatagcgagcctcgccccattggcacccgttacctcacccgcaacctgtaattacatgttaatcaataaaccggttaattcgtttcagttgaactttggtctctgcgaagggcgaattc

SEQ ID NO: 4785 - protein, 736 aa, Adeno-associated virus
MAADGYLPDWLEDNLSEGIREWWDLKPGAPKPKANQQKQDDGRGLVLPGYKYLGPFNGLDKGEPVNAADAAALEHDKAYDQQLKAGDNPYLRYNHADAEFQERLQEDTSFGGNLGRAVFQAKKRVLEPLGLVEEGAKTAPGKKRPVEQSPQEPDSSSGIGKTGQQPAKKRLNFGQTGDSESVPDPQPLGEPPAAPSGLGPNTMASGGGAPMADNNEGADGVGNSSGNWHCDSTWLGDRVITTSTRTWALPTYNNHLYKQISNGTSGGSTNDNTYFGYSTPWGYFDFNRFHCHFSPRDWQRLINNNWGFRPKRLNFKLFNIQVKEVTTNEGTKTIANNLTSTVQVFTDLEYQLPYVLGSAHQGCLPPFPADVFMVPQYGYLTLNNGSQALGRSSFYCLEYFPSQMPRTGNNFQFSYTFEDVPFHSSYAHSQSLDRLMNPLIDQYLYYLVRTQTTGTGGTQTLAFSQAGPSSMANQARNWVPGPCYRQQRVSTTTNQNNNSNFAWTGAAKFKLNGRDSLMNPGVAMASHKDDDDRFFPSSGVLIFGKQGAGNDGVDYSQVLITDEEEIKATNPVATEEYGAVAINNQAANTQAQTGLVHNQGVIPGMVWQNRDVYLQGPIWAKIPHTDGNFHPSPLMGGFGLKHPPPQILIKNTPVPADPPLTFNQAKLNSFITQYSTGQVSVEIEWELQKENSKRWNPEIQYTSNYYKSTNVDFAVNTEGVYSEPRPIGTRYLTRNL

SEQ ID NO: 4786 - DNA, 3122 bp, Adeno-associated virus
gaattcgccctttctacggctgcgtcaactggaccaatgagaactttcccttcaacgattgcgtcgacaagatggtgatctggtgggaggagggcaagatgacggccaaggtcgtggagtccgccaaggccattctcggcggcagcaaggtgcgtgtggaccaaaagtgcaagtcttccgcccagatcgatcccacccccgtgatcgtcacctccaacaccaacatgtgcgccgtgattgacgggaacagcaccaccttcgagcaccagcagccgttgcaggaccggatgttcaaatttgaactcacccgccgtctggagcatgactttggcaaggtgacgaagcaggaagtcaaagggttcttccgctgggcgcaggatcacgtgaccgaggtggcgcatgagttccacgtgcgagcccaagcgggcctgcccctcagtcgcggatccatcgacgtcagaccagaaagggtggagccaacaagagacccgcccccgatgacgcggatataagcggaaggagctccggtggactttgccgacaggtaccaaaacaaatgttctcgtcacgcgggcatgcttcagatgctgtttccctgcaagacatgcgagagaatgaatcagaatttcaacatttgcttcacgcacgggaccagagactgttcagaatgtttccccggcgtgtcagaatctcaaccggtcgtcagaaagaggacgtatcggaaactctgtgcgattcatcatctgctggggcgggctcccgagattgcttgctcggcctgcgatctggtcaacgtggacctggatgactgtgtttctgagcaataaatgacttaaaccaggtatggctgccgatggttatcttccagattggctcgaggacaacctctctgagggcattcgcgagtggtgggacttgaaacctggagccccgaaacccaaagccaaccagcaaaagcaggacgacggccggggtctggtgcttcctggctacaagtacctcggacccttcaacggactcgacaagggggagcccgtcaacgcggcggacgcagcggccctcgagcacgacaaagcctacgaccagcagctcaaagcgggtgacaatccgtacctgcggtataatcacgccgacgccgagtttcaggagcgtctgcaagaagatacgtcttttgggggcaacctcgggcgagcagtcttccaggccaagaagcgggttctcgaacctctcggtctggttgaggaaggcgctaagacggctcctggaaagaagagaccggtagagcagtcgccacaagagccagactcctcctcgggcatcggcaagacaggccagcagcccgctaaaaagagactcaattttggtcagactggcgactcagagtcagtccccgacccacaacctctcggagaacctccagcagccccctcaggtctgggacctaatacaatggcttcaggcggtggcgctccaatggcagacaataacgaaggcgccgacggagtgggtaattcctcgggaaattggcattgcgattccacatggctgggggacagagtcatcaccaccagcacccgaacctgggccctgcccacctacaacaaccacctctacaagcaaatctccaacggcacctcgggaggaagcaccaacgacaacacctattttggctacagcaccccctgggggtattttgacttcaacagattccactgtcacttttcaccacgtgactggcaacgactcatcaacaacaattggggattccggcccaaaagactcaacttcaagctgttcaacatccaggtcaaggaagtcacgacgaacgaaggcaccaagaccatcgccaataatctcaccagcaccgtgcaggtctttacggactcggagtaccagttaccgtacgtgctaggatccgctcaccagggatgtctgcctccgttcccggcggacgtcttcatggttcctcagtacggctatttaactttaaacaatggaagccaagccctgggacgttcctccttctactgtctggagtatttcccatcgcagatgctgagaaccggcaacaactttcagttcagctacaccttcgaggacgtgcctttccacagcagctacgcgcacagccagagcctggacaggctgatgaatcccctcatcgaccagtacctgtactacctggtcagaacgcaaacgactggaactggagggacgcagactctggcattcagccaagcgggtcctagctcaatggccaaccaggctagaaattgggtgcccggaccttgctaccggcagcagcgcgtctccacgacaaccaaccagaacaacaacagcaactttgcctggacgggagctgccaagtttaagctgaacggccgagactctctaatgaatccgggcgtggcaatggcttcccacaaggatgacgacgaccgcttcttcccttcgagcggggtcctgatttttggcaagcaaggagccgggaacgatggagtggattacagccaagtgctgattacagatgaggaagaaatcaaggctaccaaccccgtggccacagaagaatatggagcagtggccatcaacaaccaggccgccaatacgcaggcgcagaccggactcgtgcacaaccagggggtgattcccggcatggtgtggcagaatagagacgtgtacctgcagggtcccatctgggccaaaattcctcacacggacggcaactttcacccgtctcccctgatgggcggctttggactgaagcacccgcctcctcaaattctcatcaagaacacaccggttccagcggacccgccgcttaccttcaaccaggccaagctgaactctttcatcacgcagtacagcaccggacaggtcagcgtggaaatcgagtgggagctgcagaaagaaaacagcaaacgctggaatccagagattcaatacacttccaactactacaaatctacaaatgtggactttgctgtcaacacggagggggtttatagcgagcctcgccccattggcacccgttacctcacccgcaacctgtaattacatgttaatcaataaaccggttaattcgtttcagttgaactttggtctctgcgaagggcgaattc

SEQ ID NO: 4787 - protein, 736 aa, Adeno-associated virus
MAADGYLPDWLEDNLSEGIREWWDLKPGAPKPKANQQKQDDGRGLVLPGYKYLGPFNGLDKGEPVNAADAAALEHDKAYDQQLKAGDNPYLRYNHADAEFQERLQEDTSFGGNLGRAVFQAKKRVLEPLGLVEEGAKTAPGKKRPVEQSPQEPDSSSGIGKTGQQPAKKRLNFGQTGDSESVPDPQPLGEPPAAPSGLGPNTMASGGGAPMADNNEGADGVGNSSGNWHCDSTWLGDRVITTSTRTWALPTYNNHLYKQISNGTSGGSTNDNTYFGYSTPWGYFDFNRFHCHFSPRDWQRLINNNWGFRPKRLNFKLFNIQVKEVTTNEGTKTIANNLTSTVQVFTDSEYQLPYVLGSAHQGCLPPFPADVFMVPQYGYLTLNNGSQALGRSSFYCLEYFPSQMLRTGNNFQFSYTFEDVPFHSSYAHSQSLDRLMNPLIDQYLYYLVRTQTTGTGGTQTLAFSQAGPSSMANQARNWVPGPCYRQQRVSTTTNQNNNSNFAWTGAAKFKLNGRDSLMNPGVAMASHKDDDDRFFPSSGVLIFGKQGAGNDGVDYSQVLITDEEEIKATNPVATEEYGAVAINNQAANTQAQTGLVHNQGVIPGMVWQNRDVYLQGPIWAKIPHTDGNFHPSPLMGGFGLKHPPPQILIKNTPVPADPPLTFNQAKLNSFITQYSTGQVSVEIEWELQKENSKRWNPEIQYTSNYYKSTNVDFAVNTEGVYSEPRPIGTRYLTRNL

SEQ ID NO: 4788 - DNA, 2370 bp, Adeno-associated virus
gaattcgccctttctacggctgcgtcaactggaccaatgagaactttcccttcaacgattgcgtcgacaagatggtgatctggtgggaggagggcaagatgacggccaaggtcgtggagtccgccaaggccattctcggcggcagcaaggtgcgcgtggaccaaaagtgcaagtcgtccgcccagatcgaccccacccccgtgatcgtcacctccaacaccaacatgtgcgccgtgattgacgggaacagcaccaccttcgagcaccagcagccgttgcaggaccggatgttcaagttcgaactcacccgccgtctggagcacgactttggcaaggtgaccaagcaggaagtcaaagagttcttccgctgggcgcaggatcacgtgaccgaggtggcgcatgagttctacgtcagaaagggcggagccagcaaaagacccgcccccgatgacgcggatataagcgagcccaagcgggcctgcccctcagtcgcggatccatcgacgtcagacgcggaaggagctccggtggactttgccgacaggtaccaaaacaaatgttctcgtcacgcgggcatgcttcagacgctgtttccctgcaaaacgtgcgagagaatgaatcagaatttcaacatttgcttcacgcacggggtcagagactgctcagaatgtttccccggtgcatcagaatctcaaccggtcgtcagaaaaaaaacgtatcagaaactgtgtgccattcatcatctgctggggcgggcacccgagattgcttgctcggcctgcgatctggtcaacgtggacctggacgactgtgtttctgagcaataaatgacttaaaccaggtatggctgccgatggttatcttccagattggcttgaggacaacctctctgagggcattcgcgagtggtgggacctgaaacctggagccccgaaacccaaagccaaccagcaaaagcaggacgacggccggggtctggtgcttcctggctacaagtacctcggacccttcaacggactcgacaagggggagcccgtcaacgcggcggacgcagcggccctcgagcacgacaaggcctacgaccagcagctcaaagcgggtgacaatccgtacctgcggtataaccacgccgacgccgagtttcaggagcgtctgcaagaagatacgtcttttgggggcaacctcgggcgagcagtcttccaggccaagaagcgggttctcgaacctctcggtctggttgaggaaggcgctaagacggctcctggaaagaagagaccggtagagccatcacctcagcgttcccccgactcctccacgggcatcggcaagaaaggccaccagcccgcgagaaagagactgaactttgggcagactggcgactcggagtcagtccccgaccctcaaccaatcggagaaccaccagcaggcccctctggtctgggatctggtacaatggctgcaggcggtggcgctccaatggcagacaataacgaaggcgccgacggagtgggtagttcctcaggaaattggcattgcgattccacatggctgggcgacagagtcatcaccaccagcacccgaacctgggccctgcccacctacaacaaccatctctacaagcaaatctccaacgggacatcgggaggaagcactaacgacaacacctactttggctacagcaccccctgggggtattttgacttcaacagattccactgccacttctcaccacgtgactggcagcgactcatcaacaataactggggattccggcccaagagactcaacttcaagctcttcaacatccaggtcaaggaggtcacgcagaatgaaggcaccaagaccatcgccaataaccttaccagcacgattcaggtgtttacggactcggaataccagctcccgtacgtcctcggctctgcgcaccagggctgcctccctccgttcccggcggacgtcttcatgattcctcagtacgggtatctgaccctaaacaatggcagtcaggctgtgggccgttcctccttctactgcctggaatacttcccttctcaaatgctgaggacgggcaacaactttgaattcagctacaccttcgaggacgtgcctttccacagcagctacgcgcacagccagagcctggaccggctgatgaaccctctcatcgaccagtacctgtattacttatccagaactcagtccacaggaggaactcaaggtactcagcaattgttattttctcaagccgggcccgcaaacatgtyggctcaggccaagaactggctacctggaccgtgttaccgtcagcaacgagtttccacgacactgtcgcaaaacaacaacagcaattttgctggaccggtgccacca

SEQ ID NO: 4789 - protein, 738 aa, Adeno-associated virus; identical to SEQ ID NO: 4779

SEQ ID NO: 4790 - DNA, 2205 bp, Adeno-associated virus
atgactgacggttaccttccagattggctagaggacaacctctctgaaggcgttcgagagtggtgggcgctgcaacctggagcccctaaacccaaggcaaatcaacaacatcaggacaacgctcggggtcttgtgcttccgggttacaaatacctcggacccggcaacggactcgacaagggggaacccgtcaacgcagcggacgcggcagccctcgagcacgacaaggcctacgaccagcagctcaaggccggtgacaacccctacctcaagtacaaccacgccgacgcggagttccagcagcggcttcagggcgacacatcgtttgggggcaacctcggcagagcagtcttccaggccaaaaagagggttcttgaacctcttggtctggttgagcaagcgggtgagacggctcctggaaagaagagaccgttgattgaatccccccagcagcccgactcctccacgggtatcggcaaaaaaggcaagcagccggctaaaaagaagctcgttttcgaagacgaaactggagcaggcgacggaccccctgagggatcaacttccggagccatgtctgatgacagtgagatgcgtgcagcagctggcggagctgcagtcgagggcggacaaggtgccgatggagtgggtaatgcctcgggtgattggcattgcgattccacctggtctgagggccacgtcacgaccaccagcaccagaacctgggtcttgcccacctacaacaaccacctctacaagcgactcggagagagcctgcagtccaacacctacaacggattctccaccccctggggatactttgacttcaaccgcttccactgccacttctcaccacgtgactggcagcgactcatcaacaacaactggggcatgcgacccaaagccatgcgggtcaaaatcttcaacatccaggtcaaggaggtcacgacgtcgaacggcgagacaacggtggctaataaccttaccagcacggttcagatctttgcggactcgtcgtacgaactgccgtacgtgatggatgcgggtcaagagggcagcctgcctccttttcccaacgacgtctttatggtgccccagtacggctactgtggactggtgaccggcaacacttcgcagcaacagactgacagaaatgccttctactgcctggagtactttccttcgcagatgctgcggactggcaacaactttgaaattacgtacagttttgagaaggtgcctttccactcgatgtacgcgcacagccagagcctggaccggctgatgaaccctctcatcgaccagtacctgtggggactgcaatcgaccaccaccggaaccaccctgaatgccgggactgccaccaccaactttaccaagctgcggcctaccaacttttccaactttaaaaagaactggctgcccgggccttcaatcaagcagcagggcttctcaaagactgccaatcaaaactacaagatccctgccaccgggtcagacagtctcatcaaatacgagacgcacagcactctggacggaagatggagtgccctgacccccggacctccaatggccacggctggacctgcggacagcaagttcagcaacagccagctcatctttgcggggcctaaacagaacggcaacacggccaccgtacccgggactctgatcttcacctctgaggaggagctggcagccaccaacgccaccgatacggacatgtggggcaacctacctggcggtgaccagagcaacagcaacctgccgaccgtggacagactgacagccttgggagccgtgcctggaatggtctggcaaaacagagacatttactaccagggtcccatttgggccaagattcctcataccgatggacactttcacccctcaccgctgattggtgggtttgggctgaaacacccgcctcctcaaatttttatcaagaacaccccggtacctgcgaatcctgcaacgaccttcagctctactccggtaaactccttcattactcagtacagcactggccaggtgtcggtgcagattgactgggagatccagaaggagcggtccaaacgctggaaccccgaggtccagtttacctccaactacggacagcaaaactctctgttgtgggctcccgatgcggctgggaaatacactgagcctagggctatcggtacccgctacctcacccaccacctgtaa

SEQ ID NO: 4791 - protein, 734 aa, Adeno-associated virus
MTDGYLPDWLEDNLSEGVREWWALQPGAPKPKANQQHQDNARGLVLPGYKYLGPGNGLDKGEPVNAADAAALEHDKAYDQQLKAGDNPYLKYNHADAEFQQRLQGDTSFGGNLGRAVFQAKKRVLEPLGLVEQAGETAPGKKRPLIESPQQPDSSTGIGKKGKQPAKKKLVFEDETGAGDGPPEGSTSGAMSDDSEMRAAAGGAAVEGGQGADGVGNASGDWHCDSTWSEGHVTTTSTRTWVLPTYNNHLYKRLGESLQSNTYNGFSTPWGYFDFNRFHCHFSPRDWQRLINNNWGMRPKAMRVKIFNIQVKEVTTSNGETTVANNLTSTVQIFADSSYELPYVMDAGQEGSLPPFPNDVFMVPQYGYCGLVTGNTSQQQTDRNAFYCLEYFPSQMLRTGNNFEITYSFEKVPFHSMYAHSQSLDRLMNPLIDQYLWGLQSTTTGTTLNAGTATTNFTKLRPTNFSNFKKNWLPGPSIKQQGFSKTANQNYKIPATGSDSLIKYETHSTLDGRWSALTPGPPMATAGPADSKFSNSQLIFAGPKQNGNTATVPGTLIFTSEEELAATNATDTDMWGNLPGGDQSNSNLPTVDRLTALGAVPGMVWQNRDIYYQGPIWAKIPHTDGHFHPSPLIGGFGLKHPPPQIFIKNTPVPANPATTFSSTPVNSFITQYSTGQVSVQIDWEIQKERSKRWNPEVQFTSNYGQQNSLLWAPDAAGKYTEPRAIGTRYLTHHL

SEQ ID NO: 4792 - DNA, 3128 bp, Adeno-associated virus
gaattcgccctttctacggctgcgtcaactggaccaatgagaactttcccttcaacgattgcgtcgacaagatgttgatctggtgggaggagggcaagatgacggccaaggtcgtggagtccgccaaggccattctcggcggcagcaaagtgcgcgtggaccaaaagtgcaagccgtccgcccagatcgaccccacccccgtgatcgtcacctccaacaccaacatgtgcgccgtgattgacgggaacagcaccaccttcgagcaccagcagccgttgcgggaccggatgttcaagtttgaactcacccgccgtctggagcacgactttggcaaggtgacaaagcaggaagtcagagagttcttccgctgggcgcaggatcacgtgaccgaggtggcgcacgagttctacgtcagaaagggtggagccaacaagagacccgcccccgatgacgcggataaaagcgagcccaagcgggcctgcccctcagtcgcggatccatcgacgtcagacgcggaaggagctccggtggactttgccgacaggtaccaaaacaaatgttctcgtcacgcgggcatgcttcagatgctgtttccctgcaaaacatgcgagagaatgaatcagaatttcaacatttgcttcacgcacgggaccagagactgttcagaatgtttccccggcgtgtcagaatctcaaccggtcgtcagaaaaaagacgtatcggaaactctgtgcgattcatcatctgctggggcgggcacccgagattgcttgctcggcctgcgatctggtcaacgtggacctagatgactgtgtttctgagcaataaatgacttaaaccaggtatggctgccgatggttatcttccagattggctcgaggacaacctctctgagggcattcgcgagtggtgggacttgaaacctggagccccgaaacccaaagccaaccagcaaaagcaggacgacggccggggtctggtgcttcctggctacaagtacctcggacccttcaacggactcgacaagggggagcccgtcaacgcggcggacgcagcggccctcgagcacgacaaggcctacgaccagcagctcaaagcgggtgacaatccgtacctgcggtataaccacgccgacgccgagtttcaggagcgtctgcaagaagatacgtcttttgggggcaacctcgggcgagcagtcttccaggccaagaagcgggttctcgaacctctcggtctggttgaggaaggcgctaagacggctcctggaaagaagagaccggtagagccatcaccccagcgttctccagactcctctacgggcatcggcaagaaaggccagcagcccgcgaaaaagagactcaactttgggcagactggcgactcagagtcagtgcccgaccctcaaccaatcggagaaccccccgcaggcccctctggtctgggatctggtacaatggctgcaggcggtggcgctccaatggcagacaataacgaaggcgccgacggagtgggtagttcctcaggaaattggcattgcgattccacatggctgggcgacagagtcatcaccaccagcacccgaacctgggccctccccacctacaacaaccacctctacaagcaaatctccaacgggacttcgggaggaagcaccaacgacaacacctacttcggctacagcaccccctgggggtattttgactttaacagattccactgccacttctcaccacgtgactggcagcgactcatcaacaacaactggggattccggcccaagagactcaacttcaagctcttcaacatccaggtcaaggaggtcacgcagaatgaaggcaccaagaccatcgccaataaccttaccagcacgattcaggtctttacggactcggaataccagctcccgtacgtcctcggctctgcgcaccagggctgcctgcctccgttcccggcggacgtcttcatgattcctcagtacgggtacctgactctgaacaatggcagtcaggccgtgggccgttcctccttctactgcctggagtactttccttctcaaatgctgagaacgggcaacaactttgagttcagctaccagtttgaggacgtgccttttcacagcagctacgcgcacagccaaagcctggaccggctgatgaaccccctcatcgaccagtacctgtactacctgtctcggactcagtccacgggaggtaccgcaggaactcagcagttgctattttctcaggccgggcctaataacatgtcggctcaggccaaaaactggctacccgggccctgctaccggcagcaacgcgtctccacgacactgtcgcaaaataacaacagcaactgtaaatcccggtgtcgctatggcaacccacaaggacgacgaagagcgattttgcctggaccggtgccaccaagtatcatctgaatggcagagactctctgttttccgtccagcggagtcttaatgtttgggaaacagggagctggaaaagacaacgtggactatagcagcgttatgctaaccagtgaggaagaaattaaaaccaccaacccagtggccacggaacagtacggcgtggtggccgataacctgcaacagcaaaacgccgctcctattgtaggggccgtcaacagtcaaggagccttacctggcatggtctggcagaaccgggacgtgtacctgcagggtcctatctgggccaagattcctcacacggacggaaactttcatccctcgccgctgatgggaggctttggactgaaacacccgcctcctcagatcctgattaagaatacacctgttcccgcggatcctccaactaccttcagtcaagctaagctggcgtcgttcatcacgcagtacagcaccggacaggtcagcgtggaaattgaatgggagctgcagaaagaaaacagcaaacgctggaacccagagattcaatacacttccaactactacaaatctacaaatgtggacttcgctgttaacacagatggcacttattctgagcctcgccccattggcacccgttacctcacccgtaatctgtaattgctcgttaatcaataaaccggttgattcgtttcagttgaactttggtctctgcgaagggcgaattc

SEQ ID NO: 4793 - protein, 738 aa, Adeno-associated virus
MAADGYLPDWLEDNLSEGIREWWDLKPGAPKPKANQQKQDDGRGLVLPGYKYLGPFNGLDKGEPVNAADAAALEHDKAYDQQLKAGDNPYLRYNHADAEFQERLQEDTSFGGNLGRAVFQAKKRVLEPLGLVEEGAKTAPGKKRPVEPSPQRSPDSSTGIGKKGQQPAKKRLNFGQTGDSESVPDPQPIGEPPAGPSGLGSGTMAAGGGAPMADNNEGADGVGSSSGNWHCDSTWLGDRVITTSTRTWALPTYNNHLYKQISNGTSGGSTNDNTYFGYSTPWGYFDFNRFHCHFSPRDWQRLINNNWGFRPKRLNFKLFNIQVKEVTQNEGTKTIANNLTSTIQVFTDSEYQLPYVLGSAHQGCLPPFPADVFMIPQYGYLTLNNGSQAVGRSSFYCLEYFPSQMLRTGNNFEFSYQFEDVPFHSSYAHSQSLDRLMNPLIDQYLYYLSRTQSTGGTAGTQQLLFSQAGPNNMSAQAKNWLPGPCYRQQRVSTTLSQNNNSNFAWTGATKYHLNGRDSLVNPGVAMATHKDDEERFFPSSGVLMFGKQGAGKDNVDYSSVMLTSEEEIKTTNPVATEQYGVVADNLQQQNAAPIVGAVNSQGALPGMVWQNRDVYLQGPIWAKIPHTDGNFHPSPLMGGFGLKHPPPQILIKNTPVPADPPTTFSQAKLASFITQYSTGQVSVEIEWELQKENSKRWNPEIQYTSNYYKSTNVDFAVNTDGTYSEPRPIGTRYLTRNL

SEQ ID NO: 4794 - DNA, 3129 bp, Adeno-associated virus
gaattcgccctttctacggctgcgtcaactggaccaatgagaactttcccttcaacgattgcgtcgacaagatggtgatctggtgggaggagggcaagatgacggccaaggtcgtggagtccgccaaggccattctcggcggcagcaaagtgcgcgtggaccaaaagtgcaagtcgtccgcccagatcgaccccacccccgtgatcgtcacctccaacaccaacatgtgcgccgtgattgacgggaacagcaccaccttcgagcaccagcagccgttgcaggaccggatgttcaagtttgaactcacccgccgtctggagcacgactttggcaaggtgacaaagcaggaagtcagagagttcttccgctgggcgcaggatcacgtgaccgaggtggcgcacgagttctacgtcagaaagggtggagccaacaagagacccgcccccgatgacgcggataaaagcgagcccaagcgggcctgcccctcagtcgcggatccatcgacgtcagacgcggaaggagctccggtggactttgccgacaggtaccaaaacaaatgttctcgtcacgcgggcatgcttcagatgctgtttccctgcaaaacatgcgagagaatgaatcagaatttcaacatttgcttcacgcacgggaccagagactgttcagaatgtttccccggcgtgtcagaatctcaaccggtcgtcagaaaaaagacgtatcggaaactctgtgcgattcatcatctgctgggggcgggcacccgagattgcttgctcggcctgcgatctggtcaacgtggacctagatgactgtgtttctgagcaataaatgacttaaaccaggtatggctgccgatggttatcttccagattggctcgaggacaacctctctgagggcattcgcgagtggtgggacttgaaacctggagccccgaaacccaaagccaaccagcaaaagcaggacgacggccggggtctggtgcttcctggctacaagtacctcggacccttcaacggactcgacaagggggagcccgtcaacgcggcggacgcagcggccctcgagcacgacaaggcctacgaccagcagctcaaagcgggtgacaatccgtacctgcggtataaccacgccgacgccgagtttcaggagcgtctgcaagaagatacgtcttttgggggcaacctcgggcgagcagtcttccaggccaagaagcgggttctcgaacctctcggtctggttgaggaaggcgctaagacggctcctggaaagaagagaccggtagagccatcaccccagcgttctccagactcctctacgggcatcggcaagaaaggccagcagcccgcgaaaaagagactcaactttgggcagactggcgactcagagtcagtgcccgaccctcaaccaatcggagaaccccccgcaggcccctctggtctgggatctggtacaatggctgcaggcggtggcgctccaatggcagacaataacgaaggcgccgacggagtgggtagttcctcaggaaattggcattgcgattccacatggctgggcgacagagtcatcaccaccagcacccgaacctgggccctccccacctacaacaaccacctctacaagcaaatctccaacgggacttcgggaggaagcaccaacgacaacacctacttcggctacagcaccccctgggggtattttgactttaacagattccactgccacttctcaccacgtgactggcagcgactcatcaacaacaactggggattccggcccaagagactcaacttcaagctcttcaacatccaggtcaaggaggtcacgcagaatgaaggcaccaagaccatcgccaataaccttaccagcacgattcaggtctttacggactcggaataccagctcccgtacgtcctcggctctgcgcaccagggctgcctgcctccgttcccggcggacgtcttcatgattcctcagtacgggtacctgactctgaacaatggcagtcaggccgtgggccgttcctccttctactgcctggagtactttccttctcaaatgctgagaacgggcaacaactttgagttcagctaccagtttgaggacgtgccttttcacagcagctacgcgcacagccaaagcctggaccggctgatgaaccccctcatcgaccagtacctgtactacctgtctcggactcagtccacgggaggtaccgcaggaactcagcagttgctattttctcaggccgggcctaataacatgtcggctcaggccaaaaactggctacccgggccctgctaccggcagcaacgcgtctccacgacactgtcgcaaaataacaacagcaactttgcctggaccggtgccaccaagtatcatctgaatggcagagactctctggtaaatcccggtgtcgctatggcaacccacaaggacgacgaagagcgattttttccgtccagcggagtcttaatgtttgggaaacagggagctggaaaagacaacgtggactatagcagcgttatgctaaccagtgaggaagaaattaaaaccaccaacccagtggccacagaacagtacggcgtggtggccgataacctgcaacagcaaaacgccgctcctattgtaggggccgtcaacagtcaaggagccttacctggcatggtctggcagaaccgggacgtgtacctgcagggtcctatctgggccaagattcctcacacggacggaaactttcatccctcgccgctgatgggaggctttggactgaaacacccgcctcctcagatcctgattaagaatacacctgttcccgcggatcctccaactaccttcagtcaagctaagctggcgtcgttcatcacgcagtacagcaccggacaggtcagcgtggaaattgaatgggagctgcagaaagaaaacagcaaacgctggaacccagagattcaatacacttccaactactacaaatctacaaatgtggactttgctgttaacacagatggcacttattctgagcctcgccccatcggcacccgttacctcacccgtaatctgtaattgcttgttaatcaataaaccggttgattcgtttcagttgaactttggtctctgcgaagggcgaattc

SEQ ID NO: 4795 - DNA, 3128 bp, Adeno-associated virus
gaattcgccctttctacggctgcgtcaactggaccaatgagaactttcccttcaacgattgcgtcgacaagatggtgatctggtgggaggagggcaagatgacggccaaggtcgtggagtccgccaaggccattctcggcggcagcaaagtgcgcgtggaccaaaagtgcaagtcgtccgcccagatcgaccccacccccgtgatcgtcacctccaacaccaacatgtgcgccgtgattgacgggaacagcaccaccttcgagcaccagcagccgttgcaggaccggatgttcaagtttgaactcacccgccgtctggagcacgactttggcaaggtgacaaagcaggaagtcagagagttcttccgctgggcgcaggatcacgtgaccgaggtggcgcacgagttctacgtcagaaagggtggagccaacaagagacccgcccccgatgacgcggataaaagcgagcccaagcgggcctgcccctcagtcgcggatccatcgacgtcagacgcggaaggagctccggtggactttgccgacaggtaccaaaacaaatgttctcgtcacgcgggcatgcttcagatgctgtttccctgcaaaacatgcgagagaatgaatcagaatttcaacatttgcttcacgcacgggaccagagactgttcagaatgtttccccggcgtgtcagaatctcaaccggttgtcagaaaaaagacgtatcggaaactctgtgcgattcatcatctgctggggcgggcacccgagattgcttgctcggcctgcgatctggtcaacgtggacctagatgactgtgtttctgagcaataaatgacttaaaccaggtatggctgccgatggttatcttccagattggctcgaggacaacctctctgagggcattcgcgagtggtgggacttgaaacctggagccccgaaacccaaagccaaccagcaaaagcaggacgacggccggggtctggtgcttcctggctacaagtacctcggacccttcaacggactcgacaagggggagcccgtcaacgcggcggacgcagcggccctcgagcacgacaaggcctacgaccagcagctcaaagcgggtgacaatccgtacctgcggtataaccacgccgacgccgagtttcaggagcgtctgcaagaagatacgtcttttgggggcaacctcgggcgagcagtcttccaggccaagaagcgggttctcgaacctctcggtctggttgaggaaggcgctaagacggctcctggaaagaagagaccggtagagccatcaccccagcgttctccagactcctctacgggcatcggcaagaaaggccagcagcccgcgaaaaagagactcaactttgggcagactggcgactcagagtcagtgcccgaccctcaaccaatcggagaaccccccgcaggcccctctggtctgggatctggtacaatggctgcaggcggtggcgctccaatggcagacaataacgaaggcgccgacggagtgggtagttcctcaggaaattggcattgcgattccacatggctgggcgacagagtcatcaccaccagcacccgaacctgggccctccccacctacaacaaccacctctacaagcaaatctccaacgggacttcgggaggaagcaccaacgacaacacctacttcggctacagcaccccctgggggtattttgactttaacagattccactgccacttctcaccacgtgactggcagcgactcatcaacaacaactggggattccggcccaagagacccaacttcaagctcttcaacatccaggtcaaggaggtcacgcagaatgaaggcaccaagaccatcgccaataaccttaccagcacgattcaggtctttacggactcggaataccagctcccgtacgtcctcggctctgcgcaccagggctgcctgcctccgttcccggcggacgtcttcatgattcctcagtacgggtacctgactctgaacaatggcagtcaggccgtgggccgttcctccttctactgcctggagtactttccttctcaaatgctgagaacgggcaacaactttgagttcagctaccagtttgaggacgtgccttttcacagcagctacgcgcacagccaaagcctggaccggctgatgaaccccctcatcgaccagtacctgtactacctgtctcggactcagtccacgggaggtaccgcaggaactcagcagttgctattttctcaggccgggcctaataacatgtcggctcaggccaaaaactggctacccgggccctgctaccggcagcaacgcgtctccacgacactgtcgcaaaataacaacagcaactttgcctggaccggtgccaccaagtatcatctgaatggcagagactctctggtaaatcccggtgtcgctatggcaacccacaaggacgacgaagagcgattttttccgtccagcggagtcttaatgtttgggaaacagggagctggaaaagacaacgtggactatagcagcgttatgctaaccagtgaggaagaaattaaaaccaccaacccagtggccacagaacagtacggcgtggtggccgataacctgcaacagcaaaacgccgctcctattgtaggggccgtcaacagtcaaggagccttacctggcatggtctggcagaaccgggacgtgtacctgcagggtcctatctgggccaagattcctcacacggacggaaactttcatccctcgccgctgatgggaggctttggactgaaacacccgcctcctcagatcctgattaagaatacacctgttcccgcggatcctccaactaccttcagtcaagctaagctggcgtcgttcatcacgcagtacagcaccggacaggtcagcgtggaaattgaatgggagctgcagaaagaaaacagcaaacgctggaacccagagattcaatacacttccaactactacaaatctacaaatgtggactttgctgttaacacagatggcacttattctgagcctcgccccattggcacccgttacctcacccgtaatctgtaattgcttgttaatcaataaaccggttgattcgtttcagttgaactttggtctctgcgaagggcgaattc

SEQ ID NO: 4796 - protein, 738 aa, Adeno-associated virus
MAADGYLPDWLEDNLSEGIREWWDLKPGAPKPKANQQKQDDGRGLVLPGYKYLGPFNGLDKGEPVNAADAAALEHDKAYDQQLKAGDNPYLRYNHADAEFQERLQEDTSFGGNLGRAVFQAKKRVLEPLGLVEEGAKTAPGKKRPVEPSPQRSPDSSTGIGKKGQQPAKKRLNFGQTGDSESVPDPQPIGEPPAGPSGLGSGTMAAGGGAPMADNNEGADGVGSSSGNWHCDSTWLGDRVITTSTRTWALPTYNNHLYKQISNGTSGGSTNDNTYFGYSTPWGYFDFNRFHCHFSPRDWQRLINNNWGFRPKRPNFKLFNIQVKEVTQNEGTKTIANNLTSTIQVFTDSEYQLPYVLGSAHQGCLPPFPADVFMIPQYGYLTLNNGSQAVGRSSFYCLEYFPSQMLRTGNNFEFSYQFEDVPFHSSYAHSQSLDRLMNPLIDQYLYYLSRTQSTGGTAGTQQLLFSQAGPNNMSAQAKNWLPGPCYRQQRVSTTLSQNNNSNFAWTGATKYHLNGRDSLVNPGVAMATHKDDEERFFPSSGVLMFGKQGAGKDNVDYSSVMLTSEEEIKTTNPVATEQYGVVADNLQQQNAAPIVGAVNSQGALPGMVWQNRDVYLQGPIWAKIPHTDGNFHPSPLMGGFGLKHPPPQILIKNTPVPADPPTTFSQAKLASFITQYSTGQVSVEIEWELQKENSKRWNPEIQYTSNYYKSTNVDFAVNTDGTYSEPRPIGTRYLTRNL

SEQ ID NO: 4797 - protein, 738 aa, Adeno-associated virus
MAADGYLPDWLEDNLSEGIREWWDLKPGAPKPKANQQKQDDGRGLVLPGYKYLGPFNGLDKGEPVNAADAAALEHDKAYDQQLKAGDNPYLRYNHADAEFQERLQEDTSFGGNLGRAVFQAKKRVLEPLGLVEEAAKTAPGKKRPVEPSPQRSPDSSTGIGKKGQQPAKKRLNFGQTGDSESVPDPQPIGEPPAGPSGLGSGTMAAGGGAPMADNNEGADGVGSSSGNWHCDSTWLGDRVITTSTRTWALPTYNNHLYKQISNGTSGGSTNDNTYFGYSTPWGYFDFNRFHCHFSPRDWQRLINNNWGFRPKRLSFKLFNIQVKEVTQNEGTKTIANNLTSTIQVFTDSEYQLPYVLGSAHQGCLPPFPADVFMIPQYGYLTLNNGSQAVGRSSFYCLEYFPSQMLRTGNNFEFSYTFEDVPFHSSYAHSQSLDRLMNPLIDQYLYYLSRTQSTGGTQGTQQLLFSQAGPANMSAQAKNWLPGPCYRQQRVSTTLSQNNNSNFAWTGATKYHLNGRDSLVNPGVAMATHKDDEERFFPSSGVLMFGKQGAGRDNVDYSSVMLTSEEEIKTTNPVATEQYGVVADNLQQTNTGPIVGNVNSQGALPGMVWQNRDVYLQGPIWAKIPHTDGNFHPSPLMGGFGLKHPPPQILIKNTPVPADPPTTFSQAKLASFITQYSTGQVSVEIEWELQKENSKRWNPEIQYTSNYYKSTNVDFAVNTEGTYSEPRPIGTRYLTRNL

SEQ ID NO: 4798 - protein, 720 aa, Adeno-associated virus
MSFVDHPPDWLEEVGEGLREFLGLEAGPPKPKPNQQHQDQARGLVLPGYNYLGPGNGLDRGEPVNRADEVAREHDISYNEQLEAGDNPYLKYNHADAEFQEKLADDTSFGGNLGKAVFQAKKRVLEPFGLVEEGAKTAPTGKRIDDHFPKRKKARTEEDSKPSTSSDAEAGPSGSQQLQIPAQPASSLGADTMSAGGGGPLGDNNQGADGVGNASGDWHCDSTWMGDRVVTKSTRTWVLPSYNNHQYREIKSGSVDGSNANAYFGYSTPWGYFDFNRFHSHWSPRDWQRLINNYWGFRPRSLRVKIFNIQVKEVTVQDSTTTIANNLTSTVQVFTDDDYQLPYVVGNGTEGCLPAFPPQVFTLPQYGYATLNRDNTENPTERSSFFCLEYFPSKMLRTGNNFEFTYNFEEVPFHSSFAPSQNLFKLANPLVDQYLYRFVSTNNTGGVQFNKNLAGRYANTYKNWFPGPMGRTQGWNLGSGVNRASVSAFATTNRMELEGASYQVPPQPNGMTNNLQGSNTYALENTMIFNSQPANPGTTATYLEGNMLITSESETQPVNRVAYNVGGQMATNNQSSTTAPATGTYNLQEIVPGSVWMERDVYLQGPIWAKIPETGAHFHPSPAMGGFGLKHPPPMMLIKNTPVPGNITSFSDVPVSSFITQYSTGQVTVEMEWELKKENSKRWNPEIQYTNNYNDPQFVDFAPDSTGEYRTTRPIGTRYL

SEQ ID NO: 4799 - protein, 736 aa, Adeno-associated virus
MAADGYLPDWLEDNLSEGIREWWDLKPGAPKPKANQQKQDDGRGLVLPGYKYLGPFNGLDKGEPVNAADAAALEHDKAYDQQLKAGDNPYLRYNHADAEFQERLQEDTSFGGNLGRAVFQAKKRVLEPFGLVEEGAKTAPGKKRPVEQSPQEPDSSSGIGKTGQQPAKKRLNFGQTGDSESVPDPQPLGEPPATPAAVGPTTMASGGGAPMADNNEGADGVGNASGNWHCDSTWLGDRVITTSTRTWALPTYNNHLYKQISSASTGASNDNHYFGYSTPWGYFDFNRFHCHFSPRDWQRLINNNWGFRPKRLNFKLFNIQVKEVTTNDGVTTIANNLTSTVQVFSDSEYQLPYVLGSAHQGCLPPFPADVFMIPQYGYLTLNNGSQAVGRSSFYCLEYFPSQMLRTGNNFTFSYTFEDVPFHSSYAHSQSLDRLMNPLIDQYLYYLNRTQNQSGSAQNKDLLFSRGSPAGMSVQPKNWLPGPCYRQQRVSKTKTDNNNSNFTWTGASKYNLNGRESIINPGTAMASHKDDKDKFFPMSGVMIFGKESAGASNTALDNVMITDEEEIKATNPVATERFGTVAVNLQSSSTDPATGDVHVMGALPGMVWQDRDVYLQGPIWAKIPHTDGHFHPSPLMGGFGLKHPPPQILIKNTPVPANPPAEFSATKFASFITQYSTGQVSVEIEWELQKENSKRWNPEVQYTSNYAKSANVDFTVDNNGLYTEPRPIGTRYLTRPL

SEQ ID NO: 4800 - protein, 736 aa, Adeno-associated virus
MAADGYLPDWLEDNLSEGIREWWDLKPGAPKPKANQQKQDDGRGLVLPGYKYLGPFNGLDKGEPVNAADAAALEHDKAYDQQLKAGDNPYLRYNHADAEFQERLQEDTSFGGNLGRAVFQAKKRVLEPFGLVEEGAKTAPGKKRPVEQSPQEPDSSSGIGKTGQQPAKKRLNFGQTGDSESVPDPQPLGEPPATPAAVGPTTMASGGGAPMADNNEGADGVGNASGNWHCDSTWLGDRVITTSTRTWALPTYNNHLYKQISSASTGASNDNHYFGYSTPWGYFDFNRFHCHFSPRDWQRLINNNWGFRPKRLNFKLFNIQVKEVTTNDGVTTIANNLTSTVQVFSDSEYQLPYVLGSAHQGCLPPFPADVFMIPQYGYLTLNNGSQAVGRSSFYCLEYFPSQMLRTGNNFTFSYTFEDVPFHSSYAHSQSLDRLMNPLIDQYLYYLNRTQNQSGSAQNKDLLFSRGSPAGMSVQPKNWLPGPCYRQQRVSKTKTDNNNSNFTWTGASKYNLNGRESIINPGTAMASHKDDEDKFFPMSGVMIFGKESAGASNTALDNVMITDEEEIKATNPVATERFGTVAVNLQSSSTDPATGDVHVMGALPGMVWQDRDVYLQGPIWAKIPHTDGHFHPSPLMGGFGLKHPPPQILIKNTPVPANPPAEFSATKFASFITQYSTGQVSVEIEWELQKENSKRWNPEVQYTSNYAKSANVDFTVDNNGLYTEPRPIGTRYLTRPL

SEQ ID NO: 4801 - protein, 736 aa, Adeno-associated virus
MAADGYLPDWLEDNLSEGIREWWDLKPGAPKPKANQQKQDDGRGLVLPGYKYLGPFNGLDKGEPVNAADAAALEHDKAYDQQLKAGDNPYLRYNHADAEFQERLQEDTSFGGNLGRAVFQAKKRVLEPLGLVEEGAKTAPGKKRPVEQSPQEPDSSSGIGKTGQQPAKKRLNFGQTGDSESVPDPQPLGEPPATPAAVGPTTMASGGGAPMADNNEGADGVGNASGNWHCDSTWLGDRVITTSTRTWALPTYNNHLYKQISSASTGASNDNHYFGYSTPWGYFDFNRFHCHFSPRDWQRLINNNWGFRPKRLNFKLFNIQVKEVTTNDGVTTIANNLTSTVQVFSDSEYQLPYVLGSAHQGCLPPFPADVFMIPQYGYLTLNNGSQAVGRSSFYCLEYFPSQMLRTGNNFTFSYTFEDVPFHSSYAHSQSLDRLMNPLIDQYLYYLNRTQNQSGSAQNKDLLFSRGSPAGMSVQPKNWLPGPCYRQQRVSKTKTDNNNSNFTWTGASKYNLNGRESIINPGTAMASHKDDEDKFFPMSGVMIFGKESAGASNTALDNVMITDEEEIKATNPVATERFGTVAVNLQSSSTDPATGDVHVMGALPGMVWQDRDVYLQGPIWAKIPHTDGHFHPSPLMGGFGLKHPPPQILIKNTPVPANPPAEFSATKFASFITQYSTGQVSVEIEWELQKENSKRWNPEVQYTSNYAKSANVDFTVDNNGLYTEPRPIGTRYLTRPL

SEQ ID NO: 4802 - protein, 736 aa, Adeno-associated virus
MAADGYLPDWLEDNLSEGIREWWDLKPGAPKPKANQQKQDDGRGLVLPGYKYLGPFNGLDKGEPVNAADAAALEHDKAYDQQLKAGDNPYLRYNHADAEFQERLQEDTSFGGNLGRAVFQAKKRVLEPLGLVEEGAKTAPGKKRPVEQSPQEPDSSSGIGKTGQQPAKKRLNFGQTGDSESVPDPQPLGEPPATPAAVGPTTMASGGGAPMADNNEGADGVGNASGNWHCDSTWLGDRVITTSTRTWALPTYNNHLYKQISSASTGASNDNHYFGYSTPWGYFDFNRFHCHFSPRDWQRLINNNWGFRPKRLNFKLFNIQVKEVTTNDGVTTIANNLTSTVQVFSDSEYQLPYVLGSAHQGCLPPFPADVFMIPQYGYLTLNNGSQAVGRSSFYCLEYFPSQMLRTGNNFTFSYTFEDVPFHSSYAHSQSLDRLMNPLIDQYLYYLNRTQNQSGSAQNKDLLFSRGSPAGMSVQPKNWLPGPCYRQQRVSKTKTDNNNSNFTWTGASKYNLNGRESIINPGTAMASHKDDKDKFFPMSGVMIFGKESAGASNTALDNVMITDEEEIKATNPVATERFGTVAVNLQSSSTDPATGDVHVMGALPGMVWQDRDVYLQGPIWAKIPHTDGHFHPSPLMGGFGLKHPPPQILIKNTPVPANPPAEFSATKFASFITQYSTGQVSVEIEWELQKENSKRWNPEVQYTSNYAKSANVDFTVDNNGLYTEPRPIGTRYLTRPL

SEQ ID NO: 4803 - protein, 728 aa, Adeno-associated virus
MAADGYLPDWLEGNLSEGIREWWDLKPGAPKPKANQQKQDDGRGLVLPGYRYLGPFNGLDKGEPVNEADAAALEHDKAYDKQLEQGDNPYLKYNHADAEFQERLQEDTSFGGNLGRAVFQAKKRVLEPLGLVEEGAKTAPGKKRPIESPDSSTGIGKNGQPPAKKKLNFGQTGDSESVPDPQPLGEPPAAPSGLGSGTMAAGGGAPMADNNEGADGVGNASGNWHCDSTWLGDRVITTSTRTWALPTYNNHLYKQISSQSGATNDNHFFGYSTPWGYFDFNRFHCHFSPRDWQRLINNNWGFRPRKLRFKLFNIQVKEVTTNDGVTTIANNLTSTIQVFSDSEYQLPYVLGSAHQGCLPPFPADVFMIPQYGYLTLNNGSQSVGRSSFYCLEYFPSQMLRTGDNFEFSYTFEEVPFHSSYAHSQSLDRLMNPLIDQYLYYLARTQSTTGSTRELQFHQAGPNTMAEQSKNWLPGPCYRQQRLSKNIDSNNNSNFAWTGATKYHLNGRNSLTNPGVAMATNKDDEDQFFPINGVLVFGKTGAANKTTLENVLMTSEEEIKTTNPVATEEYGVVSSNLQSSTAGPQTQTVNSQGALPGMVWQNRDVYLQGPIWAKIPHTDGNFHPSPLMGGFGLKHPPPQILIKNTPVPANPPEVFTPAKFASFITQYSTGQVSVEIEWELQKENSKRWNPEIQYTSNYAKSNNVEFAVNNEGVYTEPRPIGTRYLTRNL

SEQ ID NO: 4804 - DNA, 2211 bp, Adeno-associated virus
atggctgccgatggttatcttccagattggctcgaggacaaccttagtgaaggaattcgcgagtggtgggctttgaaacctggagcccctcaacccaaggcaaatcaacaacatcaagacaacgctcgaggtcttgtgcttccgggttacaaataccttggacccggcaacggactcgacaagggggagccggtcaacgcagcagacgcggcggccctcgagcacgacaaggcctacgaccagcagctcaaggccggagacaacccgtacctcaagtacaaccacgccgacgccgagttccaggagcggctcaaagaagatacgtcttttgggggcaacctcgggcgagcagtcttccaggccaaaaagaggcttcttgaacctcttggtctggttgaggaagcggctaagacggctcctggaaagaagaggcctgtagagcagtctcctcaggaaccggactcctccgcgggtattggcaaatcgggtgcacagcccgctaaaaagagactcaatttcggtcagactggcgacacagagtcagtcccagaccctcaaccaatcggagaacctcccgcagccccctcaggtgtgggatctcttacaatggcttcaggtggtggcgcaccagtggcagacaataacgaaggtgccgatggagtgggtagttcctcgggaaattggcattgcgattcccaatggctgggggacagagtcatcaccaccagcacccgaacctgggccctgcccacctacaacaatcacctctacaagcaaatctccaacagcacatctggaggatcttcaaatgacaacgcctacttcggctacagcaccccctgggggtattttgacttcaacagattccactgccacttctcaccacgtgactggcagcgactcatcaacaacaactggggattccggcctaagcgactcaacttcaagctcttcaacattcaggtcaaagaggttacggacaacaatggagtcaagaccatcgccaataaccttaccagcacggtccaggtcttcacggactcagactatcagctcccgtacgtgctcgggtcggctcacgagggctgcctcccgccgttcccagcggacgttttcatgattcctcagtacgggtatctgacgcttaatgatggaagccaggccgtgggtcgttcgtccttttactgcctggaatatttcccgtcgcaaatgctaagaacgggtaacaacttccagttcagctacgagtttgagaacgtacctttccatagcagctacgctcacagccaaagcctggaccgactaatgaatccactcatcgaccaatacttgtactatctctcaaagactattaacggttctggacagaatcaacaaacgctaaaattcagtgtggccggacccagcaacatggctgtccagggaagaaactacatacctggacccagctaccgacaacaacgtgtctcaaccactgtgactcaaaacaacaacagcgaatttgcttggcctggagcttcttcttgggctctcaatggacgtaatagcttgatgaatcctggacctgctatggccagccacaaagaaggagaggaccgtttctttcctttgtctggatctttaatttttggcaaacaaggaactggaagagacaacgtggatgcggacaaagtcatgataaccaacgaagaagaaattaaaactactaacccggtagcaacggagtcctatggacaagtggccacaaaccaccagagtgcccaagcacaggcgcagaccggctgggttcaaaaccaaggaatacttccgggtatggtttggcaggacagagatgtgtacctgcaaggacccatttgggccaaaattcctcacacggacggcaactttcacccttctccgctgatgggagggtttggaatgaagcacccgcctcctcagatcctcatcaaaaacacacctgtacctgcggatcctccaacggccttcaacaaggacaagctgaactctttcatcacccagtattctactggccaagtcagcgtggagatcgagtgggagctgcagaaggaaaacagcaagcgctggaacccggagatccagtacacttccaactattacaagtctaataatgttgaatttgctgttaatactgaaggtgtatatagtgaaccccgccccattggcaccagatacctgactcgtaatctgtaa

SEQ ID NO: 4805 - protein, 736 aa, Adeno-associated virus
MAADGYLPDWLEDNLSEGIREWWALKPGAPQPKANQQHQDNARGLVLPGYKYLGPGNGLDKGEPVNAADAAALEHDKAYDQQLKAGDNPYLKYNHADAEFQERLKEDTSFGGNLGRAVFQAKKRLLEPLGLVEEAAKTAPGKKRPVEQSPQEPDSSAGIGKSGAQPAKKRLNFGQTGDTESVPDPQPIGEPPAAPSGVGSLTMASGGGAPVADNNEGADGVGSSSGNWHCDSQWLGDRVITTSTRTWALPTYNNHLYKQISNSTSGGSSNDNAYFGYSTPWGYFDFNRFHCHFSPRDWQRLINNNWGFRPKRLNFKLFNIQVKEVTDNNGVKTIANNLTSTVQVFTDSDYQLPYVLGSAHEGCLPPFPADVFMIPQYGYLTLNDGSQAVGRSSFYCLEYFPSQMLRTGNNFQFSYEFENVPFHSSYAHSQSLDRLMNPLIDQYLYYLSKTINGSGQNQQTLKFSVAGPSNMAVQGRNYIPGPSYRQQRVSTTVTQNNNSEFAWPGASSWALNGRNSLMNPGPAMASHKEGEDRFFPLSGSLIFGKQGTGRDNVDADKVMITNEEEIKTTNPVATESYGQVATNHQSAQAQAQTGWVQNQGILPGMVWQDRDVYLQGPIWAKIPHTDGNFHPSPLMGGFGMKHPPPQILIKNTPVPADPPTAFNKDKLNSFITQYSTGQVSVEIEWELQKENSKRWNPEIQYTSNYYKSNNVEFAVNTEGVYSEPRPIGTRYLTRNL

SEQ ID NO: 4806 - DNA, 2460 bp, Adeno-associated virus
ggtaattcctccggaaattggcattgcgattccacatggctgggcgaccgagtcattaccaccagcacccggacttgggccctgcccacctacaacaaccacctctacaagcaaatctccagccaatcgggtgccaccaacgacaaccactacttcggctacagcaccccttgggggtattttgatttcaacagattccactgccatttctcaccacgtgactggcagcgactcatcaacaacaactggggattcatggctgccgatggttatcttccagattggctcgaggacactctctctgaaggaatcagacagtggtggaagctcaaacctggcccaccaccgccgaaacctaaccaacaacaccgggacgacagtaggggtcttgtgcttcctgggtacaagtacctcggacccttcaacggactcgacaaaggagagccggtcaacgaggcagacgccgcggccctcgagcacgacaaagcctacgaccaccagctcaagcaaggggacaacccgtacctcaaatacaaccacgcggacgctgaatttcaggagcgtcttcaagaagatacgtctttcgggggcaacctcgggcgagcagtcttccaggccaaaaagagggtactcgagcctcttggtctggttgaggaagctgttaagacggctcctggaaaaaagagacctatagagcagtctcctgcagaaccggactcttcctcgggcatcggcaaatcaggccagcagcccgctaagaaaagactcaattttggtcagactggcgacacagagtcagtcccagaccctcaaccaatcggagaaccccccgcagccccctctggtgtgggatctaatacaatggcttcaggcggtggggcaccaatggcagacaataacgaaggcgccgacggagtgggtaattcctcgggaaattggcattgcgattccacatggatgggcgacagagttatcaccaccagcacaagaacctgggccctccccacctacaataatcacctctacaagcaaatctccagcgaatcgggagccaccaacgacaaccactacttcggctacagcaccccctgggggtattttgactttaacagattccactgtcacttctcaccacgtgactggcagcgactcatcaacaacaactggggatttagacccaagaaactcaatttcaagctcttcaacatccaagtcaaggaggtcacgcagaatgatggaaccacgaccatcgccaataaccttaccagcacggtgcaggtcttcacagactctgagtaccagctgccctacgtcctcggttcggctcaccagggctgccttccgccgttcccagcagacgtcttcatgattcctcagtacggctacttgactctgaacaatggcagccaagcggtaggacgttcttcattctactgtctagagtattttccctctcagatgctgaggacgggaaacaacttcaccttcagctacacttttgaagacgtgcctttccacagcagctacgcgcacagccagagtctggatcggctgatgaatcctctcattgaccagtacctgtattacctgagcaaaactcagggtacaagtggaacaacgcagcaatcgagactgcagttcagccaagctgggcctagctccatggctcagcaggccaaaaactggctaccgggacccagctaccgacagcagcgaatgtctaagacggctaatgacaacaacaacagtgaatttgcttggactgcagccaccaaatattacctgaatggaagaaattctctggtcaatcccgggcccccaatggccagtcacaaggacgatgaggaaaagtatttccccatgcacggaaatctcatctttggaaaacaaggcacaggaactaccaatgtggacattgaatcagtgcttattacagacgaagaagaaatcagaacaactaatcctgtggctacagaacaatacggacaggttgccaccaaccatcagagtcagaacaccacagcttcctatggaagtgtggacagccagggaatcttacctggaatggtgtggcaggaccgcgatgtctatcttcaaggtcccatttgggccaaaactcctcacacggacggacactttcatccttctccgctcatgggaggctttggactgaaacaccctcctccccagatcctgatcaaaaacacacctgtgccagcgaatcccgcgaccactttcactcctggaaagtttgcttcgttcattacccagtattccaccggacaggtcagcgtggaaatagagtgggagctgcagaaagaaaacagcaaacgctggaacccagaaattcagtacacctccaactacaacaagtcggtgaatgtggagtttaccgtggacgcaaacggtgtttattctgaaccccgccctattggcactcgttaccttacccggaacttg

SEQ ID NO: 4807 - DNA, 3123 bp, Adeno-associated virus
gaattcgccctttctacggctgcgtcaactggaccaatgaaaactttcccttcaacgattgcgtcgacaagatggtgatctggtgggaggagggaaagatgaccgccaaggtcgtggaatctgccaaagccattctgggtggaggcaaggttcgtgtggaccagaaatgcaagtcttcggcccagatcgacccgactccggtgattgtcacctctaacaccaacatgtgcgccgtgattgacggaaactcgaccaccttcgagcaccagcagccgttgcaagaccggatgttcaaatttgaacttacccgccgtttggatcatgactttgggaaggtcaccaagcaggaagtcaaagactttttccggtgggctcaagatcacgtgactgaggtggagcatgagttctacgtcaaaaagggtggagccaagaaaaggcccgcccccgatgatgtatatataaatgagcccaagcgggcgcgcgagtcagttgcgcagccatcgacgtcagacgcggaagcttcgataaactacgcggacaggtaccaaaacaaatgttctcgtcacgtgggcatgaatctgatgctgtttccctgtcgacaatgcgaaagaatgaatcagaattcaaatatctgcttcacacacgggcaaaaagactgtttggaatgctttcccgtgtcagaatctcaacccgtttctgtcgtcagaaaaacgtatcagaaactttgttacattcatcatatcatgggaaaagtaccagacgcctgcactgcctgcgacctggtaaatgtggacttggatgactgtatttctgagcaataaatgacttaaatcaggtatggctgctgacggttatcttccagattggctcgaggacactctctctgaaggaatcagacagtggtggaagctcaaacctggcccaccaccgccgaaacctaaccaacaacaccgggacgacagtaggggtcttgtgcttcctgggtacaagtacctcggacccttcaacggactcgacaaaggagagccggtcaacgaggcagacgccgcggccctcgagcacgacaaagcctacgaccaccagctcaagcaaggggacaacccgtacctcaaatacaaccacgcggacgctgaatttcaggagcgtcttcaagaagatacgtctttcgggggcaacctcgggcgagcagtcttccaggccaaaaagagggtactcgagcctcttggtctggttgaggaagctgttaagacggctcctggaaaaaagagacctatagagcagtctcctgcagaaccggactcttcctcgggcatcggcaaatcaggccagcagcccgctaagaaaagactcaattttggtcagactggcgacacagagtcagtcccaggccctcaaccaatcggagaaccccccgcagccccctctggtgtgggatctaatacaatggcttcaggcggtggggcaccaatggcagacaataacgaaggcgccgacggagtgggtaattcctcgggaaattggcattgcgattccacatggatgggcgacagagttatcaccaccagcacaagaacctgggccctccccacctacaataatcacctctacaagcaaatctccagcgaatcgggagccaccaacgacaaccactacttcggctacagcaccccctgggggtattttgactttaacagattccactgtcacttctcaccacgtgactggcagcgactcatcaacaacaactggggatttagacccaagaaactcaatttcaagctcttcaacatccaagtcaaggaggtcacgcagaatgatggaaccacgaccatcgccaataaccttaccagcgcggtgcaggtcttcacagactctgagtaccagctgccctacgtcctcggttcggctcaccagggctgccttccgccgttcccagcagacgtcttcatgattcctcagtacggctacttgactctgaacaatggcagccaagcggtaggacgttcttcattctactgtctagagtattttccctctcagatgctgaggacgggaaacaacttcaccttcagctacacttttgaagacgtgcctttccacagcagctacgcgcacagccagagtctggatcggctgatgaatcctctcattgaccagtacctgtattacctgagcaaaactcagggtacaagtggaacaacgcagcaatcgagactgcagttcagccaagctgggcctagctccatggctcagcaggccaaaaactggctaccgggacccagctaccgacagcagcgaatgtctaagacggctaatgacaacaacaacagtgaatttgcttggactgcagccaccaaatattacctgaatggaagaaattctctggtcaatcccgggcccccagtggccagtcacaaggacgatgaggaaaagtatttccccatgcacggaaatctcatctttggaaaacaaggcacaggaactaccaatgtggacattgaatcagtgcttattacagacgaagaagaaatcagaacaactaatcctgtggctacagaacaatacggacaggttgccaccaaccatcagagtcagaacaccacagcttcctatggaagtgtggacagccagggaatcttacctggaatggtgtggcaggaccgcgatgtctatcttcaaggtcccatttgggccaaaactcctcacacggacggacactttcatccttctccgctcatgggaggctttggactgaaacaccctcctccccagatcctgatcaaaaacacacctgtgccagcgaatcccgcgaccactttcactcctggaaagtttgcttcgttcattacccagtattccacctgacaggtcagcgtggaaatagagtgggagctgcagaaagaaaacagcaaacgctggaacccagaaattcagtacacctccaactacaacaagtcggtgaatgtggagtttaccgtggacgcaaacggtgtttattctgaaccccgccctattggcactcgttaccttacccggaacttgtaatttcctgttaatgaataagccgatttatgcgtttcagttgaactttggtctctgcgaagggcgaattcgtttaaacct

SEQ ID NO: 4808 - protein, 735 aa, Adeno-associated virus
MAADGYLPDWLEDTLSEGIRQWWKLKPGPPPPKPNQQHRDDSRGLVLPGYKYLGPFNGLDKGEPVNEADAAALEHDKAYDHQLKQGDNPYLKYNHADAEFQERLQEDTSFGGNLGRAVFQAKKRVLEPLGLVEEAVKTAPGKKRPIEQSPAEPDSSSGIGKSGQQPAKKRLNFGQTGDTESVPGPQPIGEPPAAPSGVGSNTMASGGGAPMADNNEGADGVGNSSGNWHCDSTWMGDRVITTSTRTWALPTYNNHLYKQISSESGATNDNHYFGYSTPWGYFDFNRFHCHFSPRDWQRLINNNWGFRPKKLNFKLFNIQVKEVTQNDGTTTIANNLTSAVQVFTDSEYQLPYVLGSAHQGCLPPFPADVFMIPQYGYLTLNNGSQAVGRSSFYCLEYFPSQMLRTGNNFTFSYTFEDVPFHSSYAHSQSLDRLMNPLIDQYLYYLSKTQGTSGTTQQSRLQFSQAGPSSMAQQAKNWLPGPSYRQQRMSKTANDNNNSEFAWTAATKYYLNGRNSLVNPGPPVASHKDDEEKYFPMHGNLIFGKQGTGTTNVDIESVLITDEEEIRTTNPVATEQYGQVATNHQSQNTTASYGSVDSQGILPGMVWQDRDVYLQGPIWAKTPHTDGHFHPSPLMGGFGLKHPPPQILIKNTPVPANPATTFTPGKFASFITQYSTGQVSVEIEWELQKENSKRWNPEIQYTSNYNKSVNVEFTVDANGVYSEPRPIGTRYLTRNL

SEQ ID NO: 4809 - DNA, 3123 bp, Adeno-associated virus
gaattcgccctttctacggctgcgtcaactggaccaatgaaaactttcccttcaacgattgcgtcgacaagatggtgatctggtgggaggagggaaagatgaccgccaaggtcgtggaatctgccaaagccattctgggtggaagcaaggttcgtgtggaccagaaatgcaagtcttcggcccagatcgacccgactccggtgattgtcacctctaacaccaacatgtgcgccgtgattgacggaaactcgaccaccttcgagcaccagcagccgttgcaagaccggatgttcaaatttgaacttacccgccgtttggatcatgactttgggaaggtcaccaagcaggaagtcaaagactttttccggtgggctcaagatcacgtgactgaggtggagcatgagttctacgtcaaaaagggtggagccaagaaaaggcccgcccccgatgatgtatatataaatgagcccaagcgggcgcgcgagtcagttgcgcagccatcgacgtcagacgcggaagcttcgataaactacgcgggcaggtaccaaaacaaatgttctcgtcacgtgggcatgaatctgatgctgtttccctgtcgacaatgcgaaagaatgaatcagaattcaaatatctgcttcacacacgggcaaaaagactgtttggaatgctttcccgtgtcagaatctcaacccgtttctgtcgtcagaaaaacgtatcagaaactttgttacattcatcatatcatgggaaaagaaccagacgcctgcactgcctgcgacctggtaaatgtggacttggatgactgtatttctgagcaataaatgacttaaatcaggtatggctgctgacggttatcttccagattggctcgaggacactctctctgaaggaatcagacagtggtggaagctcaaacctggcccaccaccgccgaaacctaaccaacaacaccgggacgacagtaggggtcttgtgcttcctgggtacaagtacctcggacccttcaacggactcgacaaaggagagccggtcaacgaggcagacgccgcggccctcgagcacgacaaagcctacgaccaccagctcaagcaaggggacaacccgtacctcaaatacaaccacgcggacgctgaatttcaggagcgtcttcaagaagatacgtctttcgggggcaacctcgggcgagcagtcttccaggccaaaaagagggtactcgagcctcttggtctggttgaggaagctgttaagacggctcctggaaaaaagagacctatagagcagtctcctgcagaaccggactcttcctcgggcatcggcgaatcaggccagcagcccgctaagaaaagactcaattttggtcagactggcgacacagagtcagtcccagaccctcaaccaatcggagaaccccccgcagccccctctggtgtgggatctaatacaatggcttcaggcggtggggcaccaatggcagacgataacgaaggcgccgacggagtgggtaattcctcgggaaattggcattgcgattccacatggatgggcgacagagttatcaccaccagcacaagaacctgggccctccccacctacaataatcacctctacaagcaaatctccagcgaatcgggagccaccaacgacaaccactacttcggctacagcaccccctgggggtattttgactttaacagattccactgtcacttctcaccacgtgactggcagcgactcatcaacaacaactggggatttagacccaagaaactcaatttcaagctcttcaacatccaagtcaaggaggtcacgcagaatgatggaaccacgaccatcgccaataaccttaccagcacggtgcaggtcttcacagactctgagtaccagctgccctacgtcctcggttcggctcaccagggctgccttccgccgttcccagcagacgtcttcatgattcctcagtacggctacttgactctgaacaatggcagccaagcggtaggacgttcttcattctactgtctagagtattttccctctcagatgctgaggacgggaaacaacttcaccttcagctacacttttgaagacgtgcctttccacagcagctacgcgcacagccagagtctggatcggctgatgaatcctctcattgaccagtacctgtattacctgagcaaaactcagggtacaagtggaacaacgcagcaatcgagactgcagttcagccaagctgggcctagctccatggctcagcaggccaaaaactggctaccgggacccagctaccgacagcagcgaatgtctaagacggctaatgacaacaacaacagtgaatttgcttggactgcagccaccaaatattacctgaatggaagaaattctctggtcaatcccgggcccccaatggccagtcacaaggacgatgaggaaaagtatttccccatgcacggaaatctcatctttggaaaacaaggcacaggaactaccaatgtggacattgaatcagtgcttattacagacgaagaagaaatcagaacaactaatcctgtggctacagaacaatacggacaggttgccaccaaccatcagagtcaggacaccacagcttcctatggaagtgtggacagccagggaatcttacctggaatggtgtggcaggaccgcgatgtctatcttcaaggtcccatttgggccaaaactcctcacacggacggacactttcatccttctccgctcatgggaggctttggactgaaacaccctcctccccagatcctgatcaaaaacacacctgtgccagcgaatcccgcgaccactttcactcctggaaagtttgcttcgttcattacccagtattccaccggacaggtcagcgtggaaatagagtgggagctgcagaaagaaaacagcaaacgctggaacccagaaattcagtacacctccaactacaacaagtcggtgaatgtggagtttaccgtggacgcaaacggtgtttattctgaaccccgccctattggcactcgttaccttacccggaacttgtaatttcctgttaatgaataaaccgatttatgcgtttcagttgaactttggtctctgcgaagggcgaattcgcggccgcta

SEQ ID NO: 4810 - protein, 735 aa, Adeno-associated virus
MAADGYLPDWLEDTLSEGIRQWWKLKPGPPPPKPNQQHRDDSRGLVLPGYKYLGPFNGLDKGEPVNEADAAALEHDKAYDHQLKQGDNPYLKYNHADAEFQERLQEDTSFGGNLGRAVFQAKKRVLEPLGLVEEAVKTAPGKKRPIEQSPAEPDSSSGIGESGQQPAKKRLNFGQTGDTESVPDPQPIGEPPAAPSGVGSNTMASGGGAPMADDNEGADGVGNSSGNWHCDSTWMGDRVITTSTRTWALPTYNNHLYKQISSESGATNDNHYFGYSTPWGYFDFNRFHCHFSPRDWQRLINNNWGFRPKKLNFKLFNIQVKEVTQNDGTTTIANNLTSTVQVFTDSEYQLPYVLGSAHQGCLPPFPADVFMIPQYGYLTLNNGSQAVGRSSFYCLEYFPSQMLRTGNNFTFSYTFEDVPFHSSYAHSQSLDRLMNPLIDQYLYYLSKTQGTSGTTQQSRLQFSQAGPSSMAQQAKNWLPGPSYRQQRMSKTANDNNNSEFAWTAATKYYLNGRNSLVNPGPPMASHKDDEEKYFPMHGNLIFGKQGTGTTNVDIESVLITDEEEIRTTNPVATEQYGQVATNHQSQDTTASYGSVDSQGILPGMVWQDRDVYLQGPIWAKTPHTDGHFHPSPLMGGFGLKHPPPQILIKNTPVPANPATTFTPGKFASFITQYSTGQVSVEIEWELQKENSKRWNPEIQYTSNYNKSVNVEFTVDANGVYSEPRPIGTRYLTRNL

SEQ ID NO: 4811 - DNA, 3113 bp, Adeno-associated virus
gaattcgccctttctacggctgcgtcaactggaccaatgaaaactttcccttcaacgattgcgtcgacaagatggtgatctggtgggaggagggaaagatgaccgccaaggtcgtggaatctgccaaagccattctgggtggaagcaaggttcgtgtggaccagaaatgcaagtcttcggcccagatcgacccgactccggtgattgtcacctctaacaccaacatgtgcgccgtgattgacggaaactcgaccaccttcgagcaccagcagccgttgcaagaccggatgttcaaatttgaacttacccgccgtttggatcatgactttgggaaggtcaccaagcaggaagtcaaagactttttccggtgggctcaagatcacgtgactgaggtggagcatgagttctacgtcaaaaagggtggagccaagaaaaggcccgcccccgatgatgtatatataaatgagcccaagcgggcgcgcgagtcagttgcgcagccatcgacgtcagacgcggaagcttcgataaactacgcggacaggtaccaaaacaaatgttctcgtcacgtgggcatgaatctgatgctgtttccctgtcgacaatgcgaaagaatgaatcagaattcaaatatctgcttcacacacgggcaaaaagactgtttggaatgctttcccgtgtcagaatctcaacccgttcctgtcgtcagaaaaacgtatcagaaactttgttacattcatcatatcatgggaaaagtaccagacgcctgcactgcctgcgacctggtaaatgtggacttggatgactgtatttctgagcaataaatgacttaaatcaggtatggctgctgacggttatcttccagattggctcgaggacactctctctgaaggaatcagacagtggtggaagctcaaacctggcccaccaccgccgaaacctaaccaacaacaccgggacgacagtaggggtcttgtgcttcctgggtacaagtacctcggacccttcaacggactcgacaaaggagagccggtcaacgaggcagacgccgcggccctcgagcacgacaaagcctacgaccaccagctcaagcaaggggacaacccgtacctcaaatacaaccacgcggacgctgaatttcaggagcgtcttcaagaagatacgtctttcgggggcaacctcgggcgagcagtcttccaggccaaaaagagggtactcgagcctcttggtctggttgaggaagctgttaagacggctcctggaaaaaagagacctatagagcagtctcctgcagaaccggactcttcctcgggcatcggcaaatcaggccagcagcccgctaagaaaagactcaattttggtcagactggcgacacagagtcagtcccagaccctcaaccaatcggagaaccccccgcagccccctctggtgtgggatctaatacaatggcttcaggcggtggggcaccaatggcagacaataacgaaggcgccgacggagtgggtaattcctcgggaaattggcattgcgattccacatggatgggcgacagagttatcaccaccagcacaagaacctgggccctccccacctacaataatcacctctacaagcaaatctccagcgaatcgggagccaccaacgacaaccactacttcggctacagcaccccctgggggtattttgactttaacagattccactgtcacttctcaccacgtgactggcagcgactcatcaataacaactggggatttagacccaagaaactcaatttcaagctcttcaacatccaagtcaaggaggtcacgcagaatgatggaaccacgaccatcgccaataaccttaccagcacggtgcaggtcttcacagactctgagtaccagctgccctacgtcctcggttcggctcaccagggctgccttccgccgttcccagcagacgtcttcatgattcctcagtacggctacttgactctgaacaatggcagccaagcggtaggacgttcttcattctactgtctagagtattttccctctcagatgctgaggacgggaaacaacttcaccttcagctacacttttgaagacgtgcctttccacagcagctacgcgcacagccagagtctggatcggctgatgaatcctctcattgaccagtacctgtattacctgagcaaaactcagggtacaagtggaacaacgcagcaatcgagactgcagttcaaccaagctgggcctagctccatggctcagcaggccaaaaactggctaccgggacccagctaccgacagcagcgaatgtctaagacggctaatgacaacaacaacagtgaatttgcttggactgcagccaccaaatattacccgaatggaagaaattctctggtcaatcccgggcccccaatggccagtcacaaggacgatgaggaaaagtatttccccatgcacggaaatctcatctttggaaaacaaggcacaggaactaccaatgtggacattgaatcagtgcttattacagacgaagaagaaatcagaacgactaatcctgtggctacagaacaatacggacaggttgccaccaaccgtcagagtcagaacaccacagcttcctatggaagtgtggacagccagggaatcttacctggaatggtgtggcaggaccgcgatgtctatcttcaaggtcccatttgggccaaaactcctcacacggacggacactttcatccttctccgctcatgggaggctttggactgaaacaccctcctccccagatcctgatcaaaaacacacctgtgccagcgaatcccgcgaccactttcactcctggaaagtttgcttcgttcattacccagtattccaccggacaggtcagcgtggaaatagagtgggagctgcagaaagaaaacagcaaacgctggaacccggaaattcagtacacctccaactacaacaagtcggtgaatgtggagtttaccgtggacgcaaacggtgtttattctgaaccccgccctattggcactcgttaccttacccggaacttgtaatttcctgttaatgaataaaccgatttatgcgtttcagttgaactttggtctctgcgaagggcgaattc

SEQ ID NO: 4812 - protein, 735 aa, Adeno-associated virus
MAADGYLPDWLEDTLSEGIRQWWKLKPGPPPPKPNQQHRDDSRGLVLPGYKYLGPFNGLDKGEPVNEADAAALEHDKAYDHQLKQGDNPYLKYNHADAEFQERLQEDTSFGGNLGRAVFQAKKRVLEPLGLVEEAVKTAPGKKRPIEQSPAEPDSSSGIGKSGQQPAKKRLNFGQTGDTESVPDPQPIGEPPAAPSGVGSNTMASGGGAPMADNNEGADGVGNSSGNWHCDSTWMGDRVITTSTRTWALPTYNNHLYKQISSESGATNDNHYFGYSTPWGYFDFNRFHCHFSPRDWQRLINNNWGFRPKKLNFKLFNIQVKEVTQNDGTTTIANNLTSTVQVFTDSEYQLPYVLGSAHQGCLPPFPADVFMIPQYGYLTLNNGSQAVGRSSFYCLEYFPSQMLRTGNNFTFSYTFEDVPFHSSYAHSQSLDRLMNPLIDQYLYYLSKTQGTSGTTQQSRLQFNQAGPSSMAQQAKNWLPGPSYRQQRMSKTANDNNNSEFAWTAATKYYPNGRNSLVNPGPPMASHKDDEEKYFPMHGNLIFGKQGTGTTNVDIESVLITDEEEIRTTNPVATEQYGQVATNRQSQNTTASYGSVDSQGILPGMVWQDRDVYLQGPIWAKTPHTDGHFHPSPLMGGFGLKHPPPQILIKNTPVPANPATTFTPGKFASFITQYSTGQVSVEIEWELQKENSKRWNPEIQYTSNYNKSVNVEFTVDANGVYSEPRPIGTRYLTRNL

SEQ ID NO: 4813 - DNA, 3122 bp, Adeno-associated virus
agcggccgcgaattcgccctttctacggctgcgtcaactggaccaatgaaaactttcccttcaacgattgcgtcgacaagatggtgatctggtgggaggagggaaagatgaccgccaaggtcgtggaatctgccaaagccattctgggtggaagcaaggttcgtgtggaccagaaatgcaggtcttcggcccagatcgacccgactccggtgattgtcacctctaacaccaacatgtgcgccgtgattgacggaaactcgaccaccttcgagcaccagcagccgttgcaagaccggatgttcaaatttgaacttacccgccgtttggatcatgactttgggaaggtcaccaagcaggaagtcaaagactttttccggtgggctcaagatcacgtgactgaggtggagcatgagttctacgtcaaaaagggtggagccaagaaaaggcccgcccccgatgatgtatatataaatgagcccaagcgggcgcgcgagtcagttgcgcagccatcgacgtcagacgcggaagcttcgataaactacgcggacaggtaccaaaacaaatgttctcgtcacgtgggcatgaatctgatgctgtttccctgtcgacaatgcgaaagaatgaatcagaattcaaatatctgcttcacacacgggcaaaaagactgtttggaatgctttcccgtgtcagaatctcaacccgtttctgtcgtcagaaaaacgtatcagaaactttgttacattcatcatatcatgggaaaagtaccagacgcctgcactgcctgcgacctggtaaatgtggacttggatgactgtatttctgagcaataaatgacttaaatcaggtatggctgctgacggttatcttccagattggctcgaggacactctctctgaaggaatcagacagtggtggaagctcaaacctggcccaccaccgccgaaacctaaccaacaacaccgggacgacagtaggggtcttgtgcttcctgggtacaagtacctcggacccttcaacggactcgacaaaggagagccggtcaacgaggcagacgccgcggccctcgagcacgacaaagcctacgaccaccagctcaagcaaggggacaacccgtacctcaaatacaaccacgcggacgctgaatttcaggagcgtcttcaagaagatacgtctttcgggggcaacctcgggcgagcagtcttccaggccaaaaagagggtactcgagcctcttggtctggttgaggaagctgttaagacggctcctggaaaaaagagacctatagagcagtctcctgcagaaccggactcttcctcgggcatcggcaaatcaggccagcagcccgctaagaaaagactcaattttggtcagactggcgacacagagtcagtcccagaccctcaaccaatcggagaaccccccgcagccccctctggtgtgggatctaatacaatggcttcaggcggtggggcaccaatggcagacaataacgaaggcgccgacggagtgggtaattcctcgggaaattggcattgcgattccacatggatgggcgacagagttatcaccaccagcacaagaacctgggccctccccacctacaataatcgcctctacaagcaaatctccagcgaatcgggagccaccaacgacaaccactacttcggctacagcaccccctgggggtattttgactttaacagattccactgtcacttctcaccacgtgactggcagcgactcatcaacaacaactggggatttagacccaagaaactcaatttcaagctcttcaacatccaagtcaaggaggtcacgcagaatgatggaaccacgaccatcgccaataaccttaccagcacggtgcaggtcttcacagactctgagtaccagctgccctacgtcctcggttcggctcaccagggctgccttccgccgttcccagcagacgtcttcatgattcctcagtacggctacttgactctgaacaatggcagccaagcggtaggacgttcttcattctactgtctagagtattttccctctcagatgctgaggacgggaaacaacttcaccttcagctacacttttgaagacgtgcctttccacagcagctacgcgcacagccagagtctggatcggctgatgaatcctctcattgaccagtacctgtattacctgagcaaaactcagggtacaagtggaacaacgcagcaatcgagactgcagttcagccaagctgggcctagctccatggctcagcaggccaaaaactggctaccgggacccagctaccgacagcagcgaatgtctaagacggctaatgacaacaacaacagtgaatttgcttggactgcagccaccaaatattacctgaatggaagaaattctctggtcaatcccgggcccccaatggccagtcacaaggacgatgaggaaaagtatttccccatgcacggaaatctcatctttggaaaacaaggcacaggaactaccaatgtggacattgaatcagtgcttattacagacgaagaagaaatcagaacaactaatcctgtggctacagaacaatacggacaggttgccaccaaccatcagagtcagaacaccacagcttcctatggaagtgtggacagccagggaatcttacctggaatggtgtggcaggaccgcgatgtctatcttcaaggtcccatttgggccaaaactcctcacacggacggacactttcatccttctccgctcatgggaggctttggactgaaacaccctcctccccagatcctgatcaaaaacacacctgtgccagcgaatcccgcgaccactttcactcctggaaagtttgcttcgttcattacccagtattccaccggacaggtcagcgtggaaatagagtgggagctgcagaaagaaaacagcaaacgctggaacccagaaattcagtacacctccaactacaacaagtcggtgaatgtggagtttaccgtggacgcaaacggtgtttattctgaaccccgccctattggcactcgttaccttacccggaacttgtaatttcctgttaatgaataaaccgatttatgcgtttcagttgaactttggtctctgcgaagggcgaattc

SEQ ID NO: 4814 - protein, 735 aa, Adeno-associated virus
MAADGYLPDWLEDTLSEGIRQWWKLKPGPPPPKPNQQHRDDSRGLVLPGYKYLGPFNGLDKGEPVNEADAAALEHDKAYDHQLKQGDNPYLKYNHADAEFQERLQEDTSFGGNLGRAVFQAKKRVLEPLGLVEEAVKTAPGKKRPIEQSPAEPDSSSGIGKSGQQPAKKRLNFGQTGDTESVPDPQPIGEPPAAPSGVGSNTMASGGGAPMADNNEGADGVGNSSGNWHCDSTWMGDRVITTSTRTWALPTYNNRLYKQISSESGATNDNHYFGYSTPWGYFDFNRFHCHFSPRDWQRLINNNWGFRPKKLNFKLFNIQVKEVTQNDGTTTIANNLTSTVQVFTDSEYQLPYVLGSAHQGCLPPFPADVFMIPQYGYLTLNNGSQAVGRSSFYCLEYFPSQMLRTGNNFTFSYTFEDVPFHSSYAHSQSLDRLMNPLIDQYLYYLSKTQGTSGTTQQSRLQFSQAGPSSMAQQAKNWLPGPSYRQQRMSKTANDNNNSEFAWTAATKYYLNGRNSLVNPGPPMASHKDDEEKYFPMHGNLIFGKQGTGTTNVDIESVLITDEEEIRTTNPVATEQYGQVATNHQSQNTTASYGSVDSQGILPGMVWQDRDVYLQGPIWAKTPHTDGHFHPSPLMGGFGLKHPPPQILIKNTPVPANPATTFTPGKFASFITQYSTGQVSVEIEWELQKENSKRWNPEIQYTSNYNKSVNVEFTVDANGVYSEPRPIGTRYLTRNL

SEQ ID NO: 4815 - protein, 733 aa, Adeno-associated virus
MAADGYLPDWLEDNLSEGIREWWDLKPGAPKPKANQQKQDDGRGLVLPGYKYLGPFNGLDKGEPVNAADAAALEHDKAYDQQLKAGDNPYLRYNHADAEFQERLQEDTSFGGNLGRAVFQAKKRVLEPLGLVEEGAKTAPGKKRPLESPQEPDSSSGIGKKGKQPAKKRLNFEEDTGAGDGPPEGSDTSAMSSDIEMRAAPGGNAVDAGQGSDGVGNASGDWHCDSTWSEGKVTTTSTRTWVLPTYNNHLYLRLGTTSNSNTYNGFSTPWGYFDFNRFHCHFSPRDWQRLINNNWGLRPKAMRVKIFNIQVKEVTTSNGETTVANNLTSTVQIFADSSYELPYVMDAGQEGSLSPFPNDVFMVPQYGYCGIVTGENQNQTDRNAFYCLEYFPSQMLRTGNNFEMAYNFGKVPFHSMYAYSQSPDRLMNPLLDQYLWHLQSTTSGETLNQGNAATTFGKIRSGDFAFYRKNWLPGPCVKQQRLSKTASQNYKIPASGGNALLKYDTHYTLNNRWSNIAPGPPMATAGPSDGDFSNAQLIFPGPSVTGNTTTSANNLLFTSEEEIAATNPRDTDMFGQIADNNQNATTAPITGNVTAMGVLPGMVWQNRDIYYQGPIWAKIPHADGHFHPSPLIGGFGLKHPPPQIFIKNTPVPANPATTFTAARVDSFITQYSTGQVAVQIEWEIEKERSKRWNPEVQFTSNYGNQSSMLWAPDTTGKYTEPRVIGSRYLTNHL

SEQ ID NO: 4816 - protein, 733 aa, Adeno-associated virus
MAADGYLPDWLEDNLSEGIREWWDLKPGAPKLKANQQKQDDGRGLVLPGYKYLGPFHGLDKGEPVNAADAAALEHDKAYDQQLKAGDNPYLRYNHADAEFQERLQEDTSFGGNLGRAVFQAKKRVLEPLGLVEEGAKTAPGKKRPLESPQEPDSSSGIGKKGKQPAKKRLNFEEDTGAGDGPPEGSDTSAMSSDIEMRAAPGGNAVDAGQGSDGVGNASGDWHCDSTWSEGKVTTTSTRTWVLPTYNNHLYLRLGTTSNSNTYNGFSTPWGYFDFNRFHCHFSPRDWQRLINNNWGLRPKAMRVKIFNIQVKEVTTSNGETTVANNLTSTVQIFADSSYELPYVMDAGQEGSLPPFPNDVFMVPQYGYCGIVTGENQNQTDRNAFYCLEYFPSQMLRTGNNFEMAYNFEKVPFHSMYAHSQSLDRLMNPLLDQYLWHLQSTTSGETLNQGNAATTFGKIRSGDFAFYRKNWLPGPCVKQQRFSKTASQNYKIPASGGNALLKYDTHYTLNNRWSNIAPGPPMATAGPSDGDFSNAQLIFPGPSVTGNTTTSANNLLFTSEGEIAATNPRDTDMFGQIADNNQNATTAPITGNVTAMGVLPGMVWQNRDIYYQGPIWAKIPHADGHFHPSPLIGGFGLKHPPPQIFIKNTPVPANPATTFTAARVDSFITQYSTGQVAVQIEWEIEKERSKRRNPEVQFTSNYGNQSSMLWAPDTTGKYTEPRVIGSRYLTNHL

SEQ ID NO: 4817 - protein, 733 aa, Adeno-associated virus
MAADGYLPDWLEDNLSEGIREWWDLKPGAPKPKANQQKQDDGRGLVLPGYEYLGPFNGLDKGEPVNAADAAALEHDKAYDQQLKAGDNPYLRYNHADAEFQERLQEDTSFGGNLGRAVFQAKKRVLEPLGLVEEGAKTAPGKKRPLESPQEPDSSSGIGKKGKQPAKKRLNFEEDTGAGDGPPEGSDTSAMSSDIEMRAAPGGNAVDAGQGSDGVGNASGDWHCDSTWSEGKVTTTSTRTWVLPTYNNHLYLRLGTTSNSNTYNGFSTPWGYFDFNRFHCHFSPRDWQRLINNNWGLRPKAMRVKIFNIQVKEVTTSNGETTVANNLTSTVQIFADSSYELPYVMDAGQEGSLPPFPNDVFMVPQYGYCGIVTGENQNQTDRNAFYCLEYFPSQMLRTGNNFETAYNFEKVPFHSMYAHSQSLDGLMNPLLDQYLWHLQSTTSGETLNQGNAATTFGKIRSGDFAFYRKNWLPGPCVKQQRFSKTASQNYKIPASGGNALLKYDTHYTLNNRWSNIAPGPPMATAGPSDGDFSNAQLIFPGPSVTGNTTTSANNLLFTSEEEIAATNPRDTDMFGQIADNNQNATTAPITGNVTAMGVLPGMVWQNRDIYYQGPIWAKIPHADGHFHPSPLIGGFGLKHPPPQIFIKNTPVPAYPATTFTAARVDSFITQYSTGQVAVQIEWEIEKERSKRWNPEVQFTSNCGNQSSMLWAPDTTGKYTEPRVIGSRYLTNHL

SEQ ID NO: 4818 - protein, 735 aa, Adeno-associated virus
MAADGYLPDWLEDTLSEGIRQWWKLKPGPPPPKPNQQHRDDSRGLVLPGYKYLGPFNGLDKGEPVNEADAAALEHDKAYDHQLKQGDNPYLKYNHADAEFQERLQEDTSFGGNLGRAVFQAKKRVLEPLGLVEEAVKTAPGKKRPIEQSPAEPDSSSGIGKSGQQPAKKRLNFGQTGDTESVPDPQPIGEPPAAPSGVGSNTMASGGGAPMADNNEGADGVGNSSGNWHCDSTWMGDRVITTSTRTWALPTYNNHLYKQISSESGATNDNHYFGYSTPWGYFDFNRFHCHFSPRDWQRLINNNWGFRPKKLNFKLFNIQVKEVTQNDGTTTIANNLTSTVQVFTDSEYQLPYVLGSAHQGCLPPFPADVFMIPQYGYLTLNNGSQAVGRSSFYCLEYFPSQMLRTGNNFTFSYTFEDVPFHSSYAHSQSLDRLMNPLIDQYLYYLSKTQGTSGTTQQSRLQFSQAGPSSMAQQAKNWLPGPSYRQQRMSKTANDNNNSEFAWTAATKYYLNGRNSLVNPGPPMASHKDDEEKYFPMHGNLIFGKQGTGTTNVDIESVLITDEEEIRTTNPVATEQYGQVATNHQSQNTTASYGSVDSQGILPGMVWQDRDVYLQGPIWAKIPHTDGHFHPSPLMGGFGLKHPPPQILIKNTPVPANPATTFTPGKFASFITQYSTGQVSVEIEWELQKENSKRWNPEIQYTSNYNKSVNVEFTVDANGVYSEPRPIGTRYLTRNL

SEQ ID NO: 4819 - DNA, 3127 bp, Adeno-associated virus
gcggccgcgaattcgcccttcgcagagaccaaagttcaactgaaacgaatcaaccggtttattgattaacatgcaattacagattacgggtgaggtaacgagtgccaatagggcgaggctcagagtaaacaccctggctgtcaacggcaaagtccacaccagtctgcttttcaaagttggaggtgtactgaatctccgggtcccagcgcttgctgttttccttctgcagctcccactcgatttccacgctgacttgtccggtgctgtactgtgtgatgaacgaagcaaacttggcaggagtaaacacctccggaggattagcgggaacgggagtgttcttgatcaggatctgaggaggcggatgtttaagtccaaagccgcccatcaaaggagacgggtgaaagttgccatccgtgtgaggaatcttggcccagatgggaccctgcaggtacacgtcccggttctgccagaccatgccaggtaaggctccctggttgttgacaacttgtgtctgggctgcagtattagccgcttgtaagttgctgctgactatcccgtattcttccgtggctacaggattagtaggacgaatttcttcttcatttgtcattaacacattttccaatgtagttttgttagttgctccagtttttccaaaaatcaggactccgctggatgggaaaaagcggtcctcgtcgtccttgtgagttgccatggcgacgccgggattaaccaacgagtttctgccgttcaggtgatatttggtggcaccagtccaagcaaagttgctgttgttgttttgatccagcgttttggagaccctttgttgccggaagcagggtccaggtaaccaattcttggcttgttcggccatagttgaaggcccgccctggtaaaactgcagttcccgattgccagctgtgcctcctgggtcactctgtgttctggccaggtagtacaagtactggtcgatgaggggattcatcagccggtccaggctctggctgtgtgcgtagctgctgtggaaaggcacgtcctcgaagctgtagctgaactcaaagttgttgcccgttctcagcatctgagaggggaagtactccaggcagtagaaggaggaacgtcccacagactgactgccattgttgagagtcaggtagccgtactgaggaatcatgaagacgtccgccgggaacggaggcaggcagccctggtgcgcagagccgaggacgtacggcagctggtattccgagtccgagaatacctgaatcgtgctggtaaggttattagcgatggtcgtaacgccgtcattcgtcgtgacctccttgacctggatgttgaagagcttgaaccgcagcttcttgggccggaatccccagttgttgttgatgagtcgctgccagtcacgtggtgagaagtggcagtggaatctgttaaagtcaaaatacccccagggggtgctgtagccgaagtaggtgttgtcgttggtactacctgcagtttcactggagatttgctcgtagaggtggttgttgtaggtgggcagggcccaggttcgggtgctggtggtaatgactctgtcgcccagccatgtggaatcgcaatgccaatttcctgaggcattacccactccgtcggcaccttcgttattgtctgccattggtgcgccaccgcctgcagccactgtaccagatcccacactagagggcgctgctggaggttctccgagaggttgagggtcggggactgactctgagtcgccagtctgaccgaaattgagtctctttctggcgggctgctggcccttcttgccgatgcccgtggaggagtcgggggaacgctgaggtgacggctctaccggtctcttctttgcaggagccgtcttagcgccttcctcaaccagaccgagaggttcgagaacccgcttcttggcctggaagactgctcgcccgaggttgcccccaaatgacgtatcttcttgcagacgctcctgaaactcggcgtcggcgtggttataccgcaggtacgggttgtcacccgcattgagctgctggtcgtaggccttgtcgtgctcgagggccgctgcgtccgccgcgttgacgggctcccccttgtcgagtccgttgaagggtccgaggtacttgtagccaggaagcaccagaccccggccgttgtcctgcttttgctggttggctttgggtttcggggctccaggtttcaggtcccaccactcgcgaatgccctcagagaggttgtcctcgagccaatctggaagataaccatcggcagccatacctgatttaaatcatttattgttcaaagatgcagtcatccaaatccacattgaccagatcgcaggcagtgcaagcgtctggcacctttcccatgatatgatgaatgtagcacagtttctgatacgcctttttgacgacagaaacgggtttagattctgacacgggaaagcactctaaacagtctttctgtccgtgagtgaagcagatatttgaattctgattcattctctcgcattgtctgcagggaaacagcatcagattcatgcccacgtgacgagaacatttgttttggtacctgtctgcgtagttgatcgaagcttccgcgtctgacgtcgatggctgcgcaactgactcgcgcacccgtttgggctcacttatatctgcgtcactgggggcgggtcttttcttggctccaccctttttgacgtagaattcatgctccacctcaaccacgtaatcctttgcccaccggaaaaagtctttgacttcctgcttggtgaccttcccaaagtcatgatccagacggcgggtgagttcaaatttgaacatccggtcttgcaacggctgctggtgttcgaaggtcgttgagttcccgtcgatcacggcgcacatgttggtgttggagatgacgatcgcgggagtcgggtctatctgggccgaggacttgcatttctggtccacgcgcaccttgcttcctccgagaatggctttggccgactccacgaccttggcggtcatcttcccctcctcccaccagatcaccatcttgtcgacacagtcgttgaagggaaagttctcattggtccagttgacgcagccgtagaaagggcgaattc

SEQ ID NO: 4820 - DNA, 3106 bp, Adeno-associated virus
gcggccgcgaattcgcccttcgcagagaccaaagttcaactgaaacgaatcaaccggtttattgattaacaagtaattacaggttacgggtgaggtaacgggtgccaatggggcgaggctcagtataaaccccttcgttgttgacagcaaattccacattattagacttggcataatttgaggtgtactgaatctctggattccagcgtttgctgttttctttctgcagttcccactcgatctccacgctgacctggccggtgctgtactgcgtgataaatgaggcaaacttggcaggagtaaacacctctggaggattagcaggtaccggggtgtttttgatgagaatttgaggaggcgggtgtttgagtccaaatccgcccatcaggggagacgggtgaaagttgccgtccgtgtgaggaattttggcccagatgggaccctgcaggcacacgtcccggttctgccagaccatgccgggcagagccccctggctgttgacagtctgtgtctggggtccggccgtagacgattgcaggttgctggagaccacaccgtattcttctgtagccacgggattggtggttttgatctcctcctcgctggtcattagcacgttttccagcgttgtcttgttggcagcccccgttttgccaaaaaccagcactccgttgatgggaaagaactggtcctcgtcgtccttgttggtggccatggctacgcccgggttggttaatgaatttctaccattcagatggtatttagtggccccggtccaggcaaagttactgttgttgttgctgtctatgttttttgacagtctctgctgccgataacagggtccgggcagccagttctttgattgctcggccatggtgttgggcccagcctgatggaactgcagctcccttgtggaccccgtagtgctctgggtccgggccaggtagtacaggtactggtcgatgaggggattcatcagccggtctaggctctggctgtgcacatagctgctgtggaaaggcacttcctcaaaggtgtagctgaattcaaagttattgcccgttctcagcatctgagaaggaaagtactccaggcagtagaaggaggaacgtcccacagactgactgccgttgtttagagtcagatatccgtactgaggaatcatgaacacgtccgcagggaacggagggaggcagccctggtgcgcagagccgaggacgtacggcagttggtactccgagtccgagaagacctgaatcgtgctggtaaggttattagcgatggtcgtaacgccgtcgttcgtcgtgacctccttgacctggatgttgaacaacttgaaccgcagctttctgggccggaatccccagttgttgttgatgagtcgctgccagtcacgtggtgagaagtggcagtggaatctgttgaagtcaaaatagccccagggggtgctgtagctgaagaagtggttgtcgttggtagccccgctctgacttgatatctgcttgtagaggtggttgttgtaggtgggcagggcccaggtgcgggtgctggtggtgatgactctgtcgcccagccatgtggaatcgcaatgccaatttccggaggcattacccactccgtcggcgccttcgttattgtctgccattggtgcgccaccgcctgcagccattgtaccagatcccagacctgagggcgcggcgggaggttctccgagaggttgggggtcgggcactgactctgagtcgccagtctgcccaaagttgagcttctttttagcgggctgctggcctttcttgccgatgcccgtggaggagtcgggggattctatgggtctcttctttccaggagccgtcttagcgacttcctcaaccagaccgagaggttcgagaacccgcttcttggcctggaagactgctcgcccgaggttgcccccaaaagacgtatcttcttgaagacgctcctgaaactcggcgtcggcgtggttgtacttgaggtacgggttgtccccctgctcgagctgcttgtcgtaggccttgtcgtgctcgagggccgcggcgtctgcctcgttgaccggctctcccttgtcgagtccgttgaagggtctgaggtacttgtagccaggaagcaccagaccccggccgtcgtcctgcttttgctggttggctttgggtttcggggctccaggtttcaagtcccaccactcgcgaatgccctcagagaggttgtcctcgagccaatctggaagataaccatcggcagccatacctggtttaagtcatttattgctcagaaacacagtcatccaggtccacgttgaccagatcgcaggccgagcaagcaatctcgggagcccgccccagcagatgatgaatggcacagagtttccgatacgtcctctttctgacgaccggttgagattctgacacgccggggaaacattctgaacagtctctggtcccgtgcgtgaagcaaatgttgaaattctgattcactctctcgcatgtcttgcagggaaacagcatctgaagcatgcccgcgtgacgagaacatttgttttggtacctgtcggcaaagtccaccggagctccttccgcgtctgacgtcgatggattcgcgactgaggggcaggcccgcttgggctcgcttttatccgcgtcatcgggggcgggtctcttgttggccccaccctttctgacgtagaacccatgcgccacctcggtcacgtgatcctgcgcccagcggaagaaccttttgacttcctgctttgtcaccttgccaaagttatgctccagacggcgggtgggttcaaatttgaacatccggtcctgcaacggctgctggtgctcgaaggtggcgctgttcccgtcaatcacggcgcacatgttggtgttggaggtgacggtcacgggggtggggtcgatctgggcggacgacttgcacttttggtccacgcgcaccttgctgccgccgagaatggccttggcggactccacgaccttggccgtcatcttgccctcctcccaccagatcaccatcttgtcggcgcaatcgttgaagggaaagttctcattggtccagttgacgcagccgtagaaagggcgaattc

SEQ ID NO: 4821 - DNA, 3102 bp, Adeno-associated virus
gcggccgcgaattcgcccttcgcagagaccaaagttcaactgaaacgaatcaaccggtttattgattaacaagtaattacaggttacgggtgaggtaacgggtgccaatggggcgaggctcagtataaaccccttcgttgttgacagcaaattccacattattagacttggcataatttgaggtgtactgaatctctggattccagcgtttgctgttttctttctgcagttcccactcgatctccacgctgacctggccggtgctgtactgcgtgataaatgaggcaaacttggcaggagtaaacacctctggaggattagcaggtaccggggtgtttttgatgagaatttgaggaggcgggtgtttgagtccaaatccgcccatcaggggagacgggtgaaagttgccgtccgtgtgaggaatttcggcccagatgggaccctgcaggtacacgtcccggttctgccagaccatgccgggcagagccccctggctgttgacagtctgtgtccggggtccggccgtagacgattgcaggttgctggagaccacaccgtattcttctgtagccacgggattggtggttttgatctcctcctcgctggtcattagcacgttttccagcgttgtcttgttggcagcccccgttttgccaaaaaccagcactccgttgatgggaaggaactggtcctcgtcgtccttgttggtggccatggctacgcccgggttggttaatgaatttctaccattcagatggtatttagtggccccggtccaggcaaagttactgttgttgttgctgtctatgttttttgacagtctctgctgccgataacagggtccgggcagccagttctttgattgctcggccacggtgttgggcccagcctgatggaactgcagctcccttgtggaccccgtagtgctctgggtccgggccaggtagtacaggtactggtcgatgaggggattcatcagccggtccaggctctggctgtgcgcatagctgctgtggaaaggcacttcctcaaaggtgtagctgaattcaaagttattgcccgttctcagcatctgagaaggaaagtactccaggcagcagaaggaggaacgtcccacagactgactgccgttgtttagagtcagatatccgtactgaggaatcatgaacacgtccgcagggaacggagggaggcagccctggtgcgcagagccgaggacgtacggcagttggtactccgagtccgagaagacctgaatcgtgctggtaaggttattagcgatggtcgtaacgccgtcgttcgtcgtgacctccttgacctggatgttgaacaacttgaaccgcagctttctgggccggaatccccagttgttgttgatgagtcgctgccagtcacgtggtgagaagtggcagtggaatctgttgaagtcaaaatagccccagggggtgctgtagccgaagaagtggttgtcgttggtagccccgctctgacttgatatctgcttgtagaggtggttgttgtaggtgggcagggcccaggtgcgggtgctggtggtgatgactctgtcgcccagccatgtggaatcgcaatgccaatttccggaggcattacccactccgtcggcgccttcgttattgtctgccattggtgcgccaccgcctgcagccattgtaccagatcccagacctgagggcgcggcgggaggttctccgagaggttgggggtcgggcactgactctgagtcgccagtctgcccaaagttgagcttctttttagcgggctgctggcctttcttgccgatgcccgtggaggagtcgggggattctatgggtctcttctttccggaagccgtcttagcgccttcctcaaccagaccgagaggttcgagaacccgcttcttggcctggaagactgctcgcccgaggttgcccccaaaagacgtatcttcttgaagacgctcctgaaactcggcgtcggcgtggttgtacttgaggtacgggttgtccccctgctcgagctgcttgtcgtaggccttgtcgtgctcgagggccgcggcgtctgcctcgttgaccggctctcccttgtcgagtccgttgaagggtccgaggtacttgtagccaggaagcaccagaccccggccgtcgtcctgcttttgctggttggctttgggtttcggggctccaggtttcaagtcccaccactcgcgaatgccctcagagaggttgtcctcgagccaatctggaagataaccatcggcagccatacctggtttaagtcatttattgctcagaaacacagtcatccaggtccacgttgaccagatcgcaggccgagcaagcaatctcgggagcccgccccagcagatgatgaatggcacagagtttccgatacgtcctctttctgacgaccggttgagattctgacacgccggggaaacattctgaacagtctctggtcccgtgcgtgaagcaaatgttgaaattctgattcattctctcgcatgtcttgcagggaaacagcatctgaagcatgcccgcgtgacgagaacatttgttttggtacctgtcggcaaagtccaccggagctccttccgcgtctgacgtcgatggatccgcgactgaggggcaagcccgcttgggctcgcttttatccgcgtcatcgggggcgggtctcttgttggctccaccctttctgacgtagaactcatgcgccacctcggtcacgtgatcctgcgcccagcggaagaactctttgacttcctgctttgtcaccttgccaaagtcatgctccagacggcgggtgagttcaaatttgaacatccggtcttgtaacggctgctggtgctcgaaggtggtgctgttcccgtcaatcacggcgcacatgttggtgttggaagtgacgatcacgggggtgggatcgatctgggcggacgacttgcacttttggtccacgcgcaccttgctgccgccgagaatggccttggcggactccacgaccttggccgtcatcttgccctcctcccaccagatcaccatcttgtcgacgcaatcgttgaagggaaagttctcattggtccagttgacgcagccgaagggcgaattc

SEQ ID NO: 4822 - protein, 728 aa, Adeno-associated virus
MAADGYLPDWLEDNLSEGIREWWDLKPGAPKPKANQQKQDDGRGLVLPGYRYLGPFNGLDKGEPVNEADAAALEHDKAYDKQLEQGDNPYLKYNHADAEFQERLQEDTSFGGNLGRAVFQAKKRVLEPLGLVEEGAKTAPGKKRPIESPDSSTGIGKNGQPPAKKKLNFGQTGDSESVPDPQPLGEPPAAPSGLGSGTMAAGGGAPMADNNEGADGVGNASGNWHCDSTWLGDRVITTSTRTWALPTYNNHLYKQISSQSGATNDNHFFGYSTPWGYFDFNRFHCHFSPRDWQRLINNNWGFRPRKLRFKLFNIQVKEVTTNDGVTTIANNLTSTIQVFSDSEYQLPYVLGSAHQGCLPPFPADVFMIPQYGYLTLNNGSQSVGRSSFYCLEYFPSQMLRTGNNFEFSYTFEEVPFHSSYAHSQSLDRLMNPLIDQYLYYLARTQSTTGSTRELQFHQAGPNTMAEQSKNWLPGPCYRQQRLSKNIDSNNNSNFAWTGATKYHLNGRNSLTNPGVAMATNKDDEDQFFPINGVLVFGKTGAANKTTLENVLMTSEEEIKTTNPVATEEYGVVSSNLQSSTAGPQTQTVNSQGALPGMVWQNRDVYLQGPIWAKIPHTDGNFHPSPLMGGFGLKHPPPQILIKNTPVPANPPEVFTPAKFASFITQYSTGQVSVEIEWELQKENSKRWNPEIQYTSNYAKSNNVEFAVNNEGVYTEPRPIGTRYLTRNL

SEQ ID NO: 4823 - DNA, 2187 bp, Adeno-associated virus
atggctgccgatggttatcttccagattggctcgagggcaacctctctgagggcattcgcgagtggtgggacttgaaacctggagccccgaaacccaaagccaaccagcaaaagcaggacgacggccggggtctggtgcttcctggctacaggtacctcggacccttcaacggactcgacaagggagagccggtcaacgaggcagacgccgcggccctcgagcacgacaaggcctacgacaagcagctcgagcagggggacaacccgtacctcaagtacaaccacgccgacgccgagtttcaggagcgtcttcaagaagatacgtcttttgggggcaacctcgggcgagcagtcttccaggccaagaagcgggttctcgaacctctcggtctggttgaggaaggcgctaagacggctcctggaaagaagagacccatagaatcccccgactcctccacgggcatcggcaagaacggccagccgcccgctaaaaagaagctcaactttgggcagactggcgactcagagtcagtgcccgacccccaacctctcggagaacctcccgccgcgccctcaggtctgggatctggtacaatggctgcaggcggtggcgcaccaatggcagacaataacgaaggcgccgacggagtgggtaatgcctccggaaattggcattgcgattccacatggctgggcgacagagtcatcaccaccagcacccgcacctgggccctgcccacctacaacaaccacctctacaagcagatatcaagtcagagcggggctaccaacgacaaccacttcttcggctacagcaccccctggggctattttgacttcaacagattccactgccacttctcaccacgtgactggcagcgactcatcaacaacaactggggattccggcccagaaagctgcggttcaagttgttcaacatccaggtcaaggaggtcacgacgaacgacggcgttacgaccatcgctaataaccttaccagcacgattcaggtcttctcggactcggagtaccaactgccgtacgtcctcggctctgcgcaccagggctgcctccctccgttccctgcggacgtgttcatgattcctcagtacggatatctgactctaaacaacggcagtcagtctgtgggacgttcctccttctactgcctggagtactttccttctcagatgctgagaacgggcgataactttgaattcagctacacctttgaggaagtgcctttccacagcagctatgcgcacagccagagcctggaccggctgatgaatcccctcatcgaccagtacctgtactacctggcccggacccagagcactacggggtccacaagggagctgcagttccatcaggctgggcccaacaccatggccgagcaatcaaagaactggctgcccggaccctgttatcggcagcagagactgtcaaaaaacatagacagcaacaacaacagtaactttgcctggaccggggccactaaataccatctgaatggtagaaattcattaaccaacccgggcgtagccatggccaccaacaaggacgacgaggaccagttctttcccatcaacggagtgctggtttttggcaaaacgggggctgccaacaagacaacgctggaaaacgtgctaatgaccagcgaggaggagatcaaaaccaccaatcccgtggctacagaagaatacggtgtggtctccagcaacctgcaatcgtctacggccggaccccagacacagactgtcaacagccagggggctctgcccggcatggtctggcagaaccgggacgtgtacctgcagggtcccatctgggccaaaattcctcacacggacggcaactttcacccgtctcccctgatgggcggatttggactcaaacacccgcctcctcaaattctcatcaaaaacaccccggtacctgctaatcctccagaggtgtttactcctgccaagtttgcctcatttatcacgcagtacagcaccggccaggtcagcgtggagatcgagtgggaactgcagaaagaaaacagcaaacgctggaatccagagattcagtacacctcaaattatgccaagtctaataatgtggaatttgctgtcaacaacgaaggggtttatactgagcctcgccccattggcacccgttacctcacccgtaacctgtaa

SEQ ID NO: 4824 - protein, 728 aa, Adeno-associated virus; identical to SEQ ID NO: 4803

SEQ ID NO: 4825 - DNA, 3106 bp, Adeno-associated virus
gcggccgcgaattcgcccttcgcagagaccaaagttcaactgaaacgaatcagccggtttattgattaacaagtaattacaggttacgggtgaggtaacgggtgccaatggggcgaggctcagtataaaccccttcgttgttgacagcaaattccacattattagacttggcataatttgaggtgtactgaatctctggattccagcgtttgctgttttctttctgcagttcccactcgatctccacgctgacctggccggtgctgtactgcgtgataaatgaggcaaacttggcaggagtaaacacctctggaggattagcaggtaccggggtgtttttgatgagaatttgaggaggcgggtgtttgagtccaaatccgcccatcaggggagacgggtgaaagttgccgtccgtgtgaggaattttggcccagatgggaccctgcaggtacacgtcccggttctgccagaccatgccgggcagagccccctggctgttgacagtctgtgtctggggtccggccgtagacgattgcaggttgctggagaccacaccgtattcttctgtagccacgggattggtggttttgatctcctcctcgctggtcattagcacgttttccagcgttgtcttgttggcagcccccgttttgccaaaaaccagcactccgttgatgggaaagaactggtcctcgtcgtccttgttggtggccatggctacgcccgggttggttaatgaatttctaccattcagatggtatttagtggccccggtccaggcaaagttactgttgttgttgctgtctatgttttttgacagtctctgctgccgataacagggtccgggcagccagttctttgattgctcggccatggtgttgggcccagcctgatggaactgcagctcccttgtggaccccgtagtgctctgggtccgggccaggtagtacaggtactggtcgatgaggggattcatcagccggtccaggctctggctgtgcgcatagctgctgtggaaaggcacttcctcaaaggtgtagctgaattcaaagttatcgcccgttctcagcatctgagaaggaaagtactccaggcagtagaaggaggaacgtcccacagactgactgccgttgtttagagtcagatatccgtactgaggaatcatgaacacgtccgcagggaacggagggaggcagccctggtgcgcagagccgaggacgtacggcagttggtactccgagtccgagaagacctgaatcgtgctggtaaggttattagcgatggtcgtaacgccgtcgttcgtcgtgacctccttgacctggatgttgaacaacttgaaccgcagctttctgggccggaatccccagttgttgttgatgagtcgctgccagtcacgtggtgagaagtggcagtggaatctgttgaagtcaaaatagccccagggggtgctgtagccgaagaagtggttgtcgttggtagccccgctctgacttgatatctgcttgtagaggtggttgttgtaggtgggcagggcccaggtgcgggtgctggtggtgatgactctgtcgcccagccatgtggaatcgcaatgccaatttccggaggcattacccactccgtcggcgccttcgttattgtctgccattggtgcgccaccgcctgcagccattgtaccagatcccagacctgagggcgcggcgggaggttctccgagaggttgggggtcgggcactgactctgagtcgccagtctgcccaaagttgagcttctttttagcgggcggctggccgttcttgccgatgcccgtggaggagtcgggggattctatgggtctcttctttccaggagccgtcttagcgccttcctcaaccagaccgagaggttcgagaacccgcttcttggcctggaagactgctcgcccgaggttgcccccaaaagacgtatcttcttgaagacgctcctgaaactcggcgtcggcgtggttgtacttgaggtacgggttgtccccctgctcgagctgcttgtcgtaggccttgtcgtgctcgagggccgcggcgtctgcctcgttgaccggctctcccttgtcgagtccgttgaagggtccgaggtacctgtagccaggaagcaccagaccccggccgtcgtcctgcttttgctggttggctttgggtttcggggctccaggtttcaagtcccaccactcgcgaatgccctcagagaggttgccctcgagccaatctggaagataaccatcggcagccatacctggtttaagtcatttattgctcagaaacacagtcatccaggtccacgttggccagatcgcaggccgagcaagcaatctcgggagcccgccccagcagatgatgaatggcacagagtttccgatacgtcctctttctgacgaccggttgagattctgacacgccggggaaacattctgaacagtctctggtcccgtgcgtgaagcaaatgttgaaattctgattcattctctcgcatgtcttgcaggggaacagcatctgaagcatgcccgcgtgacgagaacatttgttttggtacctgtcggcaaagtccaccggagctccttccgcgtctgacgtcgatggatccgcgactgaggggcaggcccgcttgggctcgcttttatccgcgtcatcgggggcgggtctcttgttggctccaccctttctgacgtagaactcatacgccacctcggtcacgtgatcctgcgcccagcggaagaactctttgacttcctgctttgtcaccttgccaaagtcatgctccagacggcgggtgagttcaaatttgaacatccggtcttgtaacggctgctggtgctcgaaggtggtgctgttcccgtcaatcacggcgcacatgttggtgttggaagtgacgatcacgggggtgggatcgatctgggcggacgacttgcacttttggtccacgcgcaccttgctgccgccgagaatggccttggcggactccacgaccttggccgtcatcctgccctcctcccaccagatcaccatcttgtcgacgcaatcgttgaagggaaagttctcattggtccagttgacgcagccgtagaaagggcgaattc

SEQ ID NO: 4826 - protein, 728 aa, Adeno-associated virus
MAADGYLPDWLEDNLSEGIREWWDLKPGAPKPKANQQKQDDGRGLVLPGYRYLGPFNGLDKGEPVNEADAAALEHDKAYDKQLEQGDNPYLKYNHADAEFQERLQEDTSFGGNLGRAVFQAKKRVLEPLGLVEEGAKTAPGKKRPIESPDSSTGIGKNGQPPAKKKLNFGQTGDSESVPDPQPLGEPPAAPSGLGSGTMAAGGGAPMADNNEGADGVGNASGNWHCDSTWLGDRVITTSTRTWALPTYNNHLYKQISSQSGATNDNHFFGYSTPWGYFDFNRFHCHFSPRDWQRLINNNWGFRPRKLRFKLFNIQVKEVTTNDGVTTIANNLTSTIQVFSDSEYQLPYVLGSAHQGCLPPFPADVFMIPQYGYLTLNNGSQSVGRSSFYCLEYFPSQMLRTGDNFEFSYTFEEVPFHSSYAHSQSLDRLMNPLIDQYLYYLARTQSTTGSTRELQFHQAGPNTMAEQSKNWLPGPCYRQQRLSKNIDSNNNSNFAWTGATKYHLNGRNSLTNPGVAMATNKDDEDQFFPINGVLVFGKTGAANKTTLENVLMTSEEEIKTTNPVATEEYGVVSSNLQSSTAGPQTQTVNSQGALPGMVWQNRDVYLQGPIWAKIPHTDGNFHPSPLMGGFGLKHPPPQILIKNTPVPANPPEVFTPAKFASFITQYSTGQVSVEIEWELQKENSKRWNPEIQYTSNYAKSNNVEFAVNNEGVYTEPRPIGTRYLTRNL

SEQ ID NO: 4827 - protein, 728 aa, Adeno-associated virus; identical to SEQ ID NO: 4822

SEQ ID NO: 4828 - protein, 728 aa, Adeno-associated virus
MAADGYLPDWLEDNLSEGIREWWDLKPGAPKPKANQQKQDDGRGLVLPGYKYLGPFNGLDKGEPVNEADAAALEHDKAYDKQLEQGDNPYLKYNHADAEFQERLQEDTSFGGNLGRAVFQAKKRVLEPLGLVEEGAKTAPGKKRPIESPDSSTGIGKNGQPPAKKKLNFGQTGDSESVPDPQPLGEPPAAPSGLGSGTMAAGGGAPMADNNEGADGVGNASGNWHCDSTWLGDRVITTSTRTWALPTYNNHLYKQISSQSGATNDNHFFGYSTPWGYFDFNRFHCHFSPRDWQRLINNNWGFRPRKLRFKLFNIQVKEVTTNDGVTTIANNLTSTIQVFSDSEYQLPYVLGSAHQGCLPPFPADVFMIPQYGYLTLNNGSQSVGRSSFYCLEYFPSQMLRTGNNFEFSYTFEEVPFHSSYAHSQSLDRLMNPLIDQYLYYLARTQSTTGSTRELQFHQAGPNTMAEQSKNWLPGPCYRQQRLSKNIDSNNNSNFAWTGATKYHLNGRNSLTNPGVAMATNKDDEDQFFPINGVLVFGKTGAANKTTLENVLMTSEEEIKTTNPVATEEYGVVSSNLQSSTAGPQTQTVNSQGALPGMVWQNRDVYLQGPIWAKIPHTDGNFHPSPLMGGFGLKHPPPQILIKNTPVPANPPEVFTPAKFASFITQYSTGQVSVEIEWELQKENSKRWNPEIQYTSNYAKSNNVEFAVNNEGVYTEPRPIGTRYLTRNL

SEQ ID NO: 4829 - protein, 728 aa, Adeno-associated virus
MAADGYLPDWLEDNLSEGIREWWDLKPGAPKPKANQQKQDDGRGLVLPGYKYLGPFNGLDKGEPVNEADAAALEHDKAYDKQLEQGDNPYLKYNHADAEFQERLQEDTSFGGNLGRAVFQAKKRVLEPLGLVEEGAKTAPGKKRPIESPDSSTGIGKKGQQPAKKKLNFGQTGDSESVPDPQPLGEPPAAPSGLGSGTMAAGGGAPMADNNEGADGVGNASGNWHCDSTWLGDRVITTSTRTWALPTYNNHLYKQISSQSGATNDNHFFGYSTPWGYFDFNRFHCHFSPRDWQRLINNNWGFRPRKLRFKLFNIQVKEVTTNDGVTTIANNLTSTIQVFSDSEYQLPYVLGSAHQGCLPPFPADVFMIPQYGYLTLNNGSQSVGRSSFYCLEYFPSQMLRTGNNFEFSYTFEEVPFHSSYAHSQSLDRLMNPLIDQYLYYLARTQSTTGSTRELQFHQAGPNTMAEQSKNWLPGPCYRQQRLSKNIDSNNNSNFAWTGATKYHLNGRNSLTNPGVAMATNKDDEDQFFPINGVLVFGKTGAANKTTLENVLMTSEEEIKTTNPVATEEYGVVSSNLQSSTAGPQTQTVNSQGALPGMVWQNRDVYLQGPIWAKIPHTDGNFHPSPLMGGFGLKHPPPQILIKNTPVPANPPEVFTPAKFASFITQYSTGQVSVEIEWELQKENSKRWNPEIQYTSNYAKSNNVEFAVNNEGVYTEPRPIGTRYLTRNL

SEQ ID NO: 4830 - DNA, 3098 bp, Adeno-associated virus
gaattcgcccttcgcagagaccaaagttcaactgaaacgaatcaaccggtttattgattaacaagtaattacaggttacgggtgaggtaacgggtgccaatggggcgaggctcagtataaaccccttcgttgttgacagcaaattccacattattagacttggcataatttgaggtgtactgaatctctggattccagcgtttgctgttttctttctgcagttcccactcgatctccacgctgacctggccggtgctgtactgcgtgataaatgaggcaaactaggcaggagtaaacacccctggaggattagcaggtaccggggtgtttttgatgagaatttgaggaggcgggtgtttgagtccaaatccgcccatcaggggagacgggtgaaagttgccgtccgtgtgaggaattttggcccagatgggaccctgcaggtacacgtcccggttctgccagaccatgccgggcagagccccctggctgttgacagtctgtgtctggggtccggccgtagacgattgcaggttgctggagaccacaccgtattcttctgtagccacgggattggtggttttgatctcctcctcgctggtcattagcacgttttccagcgttgtcttgttggcagcccccgttttgccaaaaaccagcactccgttgatgggaaagaactggccctcgtcgtccttgttggtggccatggctacgcccgggttggttaatgaatttctaccattcagatggtatttagtggccccggtccaggcaaagttactgttgttgttgctgtctatgttttttgacagtctctgctgccgataacagggtccgggcagccagttctttgattgctcggccatggtgttgggcccagcctgatggaactgcagctcccttgtggaccccgtagtgctctgggtccgggccaggtagtacaggtactggtcgatgaggggattcatcagccggtccaggctctggctgtgcgcatagctgctgtggaaaggcacttcctcaaaggtgtagctgaattcaaagttattgcccgttctcagcatctgagaaggaaagtactccaggcagtagaaggaggaacgtcccatagactgactgccgttgtttagagtcagatatccgtactgaggaatcatgaacacgtccgcagggaacggagggaggcagccctggtgcgcagagccgaggacgtacggcagttggtactccgagtccgagaagacctgaatcgtgctggtaaggttattagcgatggtcgtaacgccgtcgttcgtcgtgacctccttgacctggatgttgaacaacttgaaccgcagctttctgggccggaatccccagttgttgttgatgagtcgctgccagtcacgtggtgagaagtggcagtggaatctgttgaagtcaaaatagccccagggggtgctgtagccgaagaagtggttgtcgttggtagccccgctctgacttgatatctgcttgtagaggtggttgttgtaggtgggcagggcccaggtgcgggtgctggtggtgatgactctgtcgcccagccatgtggaatcgcaatgccaatttccggaggcattacccactccgtcggcgccttcgttattgtctgccattggtgcgccaccgcctgcagccattgtaccagatcccagacctgagggcgcggcgggaggttctccgagaggttgggggtcgggcactgactctgagtcgccagtctgcccaaagttgagcttctttttagcgggctgctggcctttcttgccgatgcccgtggaggagtcgggggattctatgggtctcttctttccaggagccgtcttagcgccttcctcaaccagaccgagaggttcgagaacccgcttcttggcctggaagactgctcgcccgaggttgcccccaaaagacgtatcttcttgaagacgctcctgaaactcagcgtcggcgtggttgtacttgaggtacgggttgtccccctgctcgagctgcttgtcgtaggccttgtcgtgctcgagggccgcggcgtctgcctcgttgaccggctctcccttgtcgagtccgttgaagggtccgaggtacttgtagccaggaagcaccagaccccggccgtcgtcctgcttttgctggttggctttgggtttcggggctccaggtttcaagtcccaccactcgcgaatgccctcagagaggttgtcctcgagccaatctggaagataaccatcggcagccatacctggtttaagtcatttattgctcagaaacacagtcatccaggtccacgttgaccagatcgcaggccgagcaagcaatctcgggagcccgccccagcagatgatgaatggcacagagtttccgatacgtcctctttctgacgaccggttgagattctgacacgccggggaaacattctgaacagtctctggtcccgtgcgtgaagcaaatgttgaaattctgattcattctctcgcatgtcttgcagggaaacagcatctgaagcatgcccgcgtgacgagaacatttgttttggtacctgtcggcaaagtccaccggagctccttccgcgtctgacgtcgatggatccgcgactgaggggcaggcccgcttgggctcgcttttatccgcgtcatcgggggcgggcctcttgttggctccaccctttctgacgtagaactcatgcgccacctcggtcacgtgatcctgcgcccagcggaagaactctttgacttcctgctttgtcaccttgccaaagtcctgctccagacggcgggtgagttcaaatttgaacatccggtcttgtaacggctgctggtgctcgaaggtggtgctgttcccgtcaatcacggcgcacatgttggtgttggaagtgacgatcacgggggtgggatcgatctgggcggacgacttgcacttttggtccacgcgcaccttgctgccgccgagaatggccttggcggactccacgaccttggccgtcatcttgccctcctcccaccagatcaccatcttgtcgacgcaatcgttgaagggaaagttctcattggtccagttgacgcagccgtagaaagggcgaattc

SEQ ID NO: 4831 - protein, 729 aa, Adeno-associated virus
MAADGYLPDWLEDNLSEGIREWWDLKPGAPKPKANQQKQDDGRGLVLPGYKYLGPFNGLDKGEPVNAADAAALEHDKAYDQQLKAGDNPYLRYNHADAEFQERLQEDTSFGGNLGRAVFQAKKRVLEPLGLVEEGAKTAPGKKRPIDSPDSSTGIGKKGQQPAKKKLNFGQTGDSESVPDPQPLGEPPAAPSSVGSGTMAAGGGAPMADNNEGADGVGNASGNWHCDSTWLGDRVITTSTRTWALPTYNNHLYKQISSSSSGATNDNHYFGYSTPWGYFDFNRFHCHFSPRDWQRLINNNWGFRPKKLRFKLFNIQVKEVTTNDGVTTIANNLTSTVQVFSDSEYQLPYVLGSAHQGCLPPFPADVFMIPQYGYLTLNNGSQSVGRSSFYCLEYFPSQMLRTGNNFEFSYSFEDVPFHSSYAHSQSLDRLMNPLIDQYLYYLARTQSTTGSTRELQFHQAGPNTMAEQSKNWLPGPCYRQQGLSKNLDFNNNSNFAWTAATKYHLNGRNSLTNPGIPMATNKDDEDQFFPINGVLVFGKTGAANKTTLENVLMTSEEEIKTTNPVATEEYGVVSSNLQPSTAGPQSQTINSQGALPGMVWQNRDVYLQGPIWAKIPHTDGNFHPSPLMGGFGLKHPPPQILIKNTPVPANPPEVFTPAKFASFITQYSTGQVSVEIEWELQKENSKRWNPEIQYTSNYAKSNNVEFAVNPDGVYTEPRPIGTRYLPRNL

SEQ ID NO: 4832 - protein, 1458 aa, Adeno-associated virus
MAADGYLPDWLEDNLSEGIREWWDLKPGAPKPKANQQKQDDGRGLVLPGYKYLGPFNGLDKGEPVNAADAAALEHDKAYDQQLKAGDNPYLRYNHADAEFQERLQEDTSFGGNLGRAVFQAKKRVLEPLGLVEEGAKTAPGKKRPIDSPDSSTGIGKKGQQPAKKKLNFGQTGDSESVPDPQPLGEPPAAPSSVGSGTMAAGGGAPTADNNEGADGVGNASGNWHCDSTWLGDRVITTSTRTWALPTYNNHLYKQISSSSSGATNDNHYFGYSTPWGYFDFNRFHCHFSPRDWQRLINNNWGFRPKKLRFKLFNIQVKEVTTNDGVTTIANNLTSTVQVFSDSEYQLPYVLGSAHQGCLPPFPADVFMIPQYGYLTLNNGSQSVGRSSFYCLEYFPSQMLRTGNNFEFSYSFEDVPFHSSYAHSQSLDRLMNPLIDQYLYYLARTQSTTGSTRELQFHQAGPNTMAEQSKNWLPGPCYRQQRLSKNLDFNNNSNFAWTAATKYHLNGRNSLTNPGIPMATNKDDEDQFFPINGVLVFGKTGAANKTTLENVLMTSEEEIKTTNPVATEEYGVVSSNLQSSTAGPQSQTINSQGALPGMVWQNRDVYLQGPIWAKIPHTDGNFHPSPLMGGFGLEHPPPQILIKNTPVPANPPEVFTPAKFASFITQYSTGQVSVEIEWELQKENSKRWNPEIQYTSNYAKSNNVEFAVNPDGVYTEPRPIGTRYLTRNLMAADGYLPDWLEDNLSEGIREWWDLKPGAPKPKANQQKQDDGRGLVLPGYKYLGPFNGLDKGEPVNAADAAALEHDKAYDQQLKAGDNPYLRYNHADAEFQERLQEDTSFGGNLGRAVFQAKKRVLEPLGLVEEGAKTAPGKKRPIGSPDSSTGIGKKGQQPAKKKLNFGQTGDSESVPDPQPLGEPPAAPSSVGSGTMAAGGGAPMADNNEGADGVGNASGNWHCDSTWLGDRVITTSTRTWALPTYNNHLYKQISSSSSGATNDNHYFGYSTPWGYFDFNRFHCHFSPRDWQRLINNNWGFRPKKLRFKLLNIQVKEVTTNDGVTTIANNLTSTVQVFSDSEYQLPYVLGSAHQGCLPPFPADVFMIPQYGYLTLDNGSQSVGRSSFYCLEYFPSQMLRTGNNFEFSYSFEDVPFHSSYAHSQSLDRLMNPLIDQYLYYLARTQSTTGSTRELQFHQAGPNTMAEQSKNWLPGPCYRQQRLSKNLDFNNNSNFAWTAATKYHLNGRNSLTNPGIPMATNKDDEDQFFPINGVLVFGKTGAANKTTLENVLMTSEEEIKTTNPVATEEYGVVSSNLQSSTAGPQSQTINSQGALPGMVWQNRDVYLQGPIWAKIPHTDGNFHPSPLMGGFGLKHPPPQILIKNTPVPANPPEVFTPAKFASFITQYSTGQVSVEIEWELQKENSKRWNPEIQYTSNYAKSNNVEFAVNPDGVYTEPRPIGTRYLTRNL

SEQ ID NO: 4833 - protein, 729 aa, Adeno-associated virus
MAADGYLPDWLEDNLSEGIREWWDLKPGAPKPKANQQKQDDGRGLVLPGYKYLGPFNGLDKGEPVNAADAAALEHDKAYDQQLKAGDNPYLRYNHADAEFQERLQEDTSFGGNLGRAVFQAKKRVLEPLGLVEEGAKTAPGKKRPIDSPDSSTGIGKKGQQPAKKKLNFGQTGDSESVPDPQPLGEPPAAPSSVGSGTMAAGGGAPTADNNEGADGVGNASGNWHCDSTWLGDRVITTSTRTWALPTYNNHLYKQISSSSSGATNDNHYFGYSTPWGYFDFNRFHCHFSPRDWQRLINNNWGFRPKKLRFKLFNIQVKEVTTNDGVTTIANNLTSTVQVFSDSEYQLPYVLGSAHQGCLPPFPADVFMIPQYGYLTLNNGSQSVGRSSFYCLEYFPSQMLRTGNNFEFSYSFEDVPFHSSYAHSQSLDRLMNPLIDQYLYYLARTQSTTGSTRELQFHQAGPNTMAEQSKNWLPGPCYRQQRLSKNLDFNNNSNFAWTAATKYHLNGRNSLTNPGIPMATNKDDEDQFFPINGVLVFGKTGAANKTTLENVLMTSEEEIKTTNPVATEEYGVVSSNLQSSTAGPQSQTINSQGALPGMVWQNRDVYLQGPIWAKIPHTDGNFHPSPLMGGFGLEHPPPQILIKNTPVPANPPEVFTPAKFASFITQYSTGQVSVEIEWELQKENSKRWNPEIQYTSNYAKSNNVEFAVNPDGVYTEPRPIGTRYLTRNL

SEQ ID NO: 4834 - DNA, 3075 bp, Adeno-associated virus
tgagaactttcctttcaacgattgcgtcggacaagatggtgatctggtgggaggaggggaagatgaccgccaaggtcgtggagtcggccaaagccattcttggaggaagcaaggtgcgtgtggaccagaaatgcaagtcctcggcccagatagacccgactcccgtgatcgtcacctccaacaccaacatgtgcgccgtgattgacgggaactcaacgaccttcgagcaccagcagccgttgcaagaccggatgttcaaatttgaacttacccgccgtctggatcatgactttggaaaggtcaccaagcaggaagtgaaagactttttccggtgggcaaaggatcacgtggttgaggtggagcatgaattctacgtcaaaaagggtggagctaagaaaagacccgcccccagtgacgcagatataagtgagcccaaacgggcgcgcgagtcagttgcgcagccatcaacgtcagacgcggaagcttcgatcaactacgcggacaggtaccaaaaacaaatgttctcgtcacgtgggcatgaatctgatgctgtttccctgcagacaatgcgagagaatgaatcagaattcaaatatctgcttcactcacggacagaaagactgtttagagtgctttcccgtgtcagaatctcaacccgtttctgtcgtcaaaaaggcgtatcagaaactgtgctacattcatcatatcatgggaaaggtgccagacgcttgcactgcctgcgatctggtcaatgtggatttggatgactgcatctctgaacaataaatgatttaaatcaggtatggctgccgatggttatcctccagattggctcgaggacactctctctgaagggataagacagtggtggaagctcaaacctggcccaccaccaccaaagcccgcagagcggcataaggacgacagcaggggtcttgtgcttcctgggtacaagtacctcggacccttcaacggactcgacaagggggagccggtcaacgaggcagacgccgcggccctcgagcacgacaaggcctacgaccggcagctcgacagcggagacaacccgtacctcaagtacaaccacgccgacgcagagtttcaggagcgccttaaagaagatacgtcttttgggggcaacctcggacgagcagtcttccaggcgaaaaagagggttcttgaacctctgggcctggttgaggaacctgttaagacggctccgggaaaaaagaggccggtagagcactctcctgtggagccagactcctcctcgggaaccggaaaagcgggccagcggcctgcaagaaaaagattaaattttggtcagactggagacgcagactccgtacctgacccccagcctctcggacagccaccagcagccccctctggtctgggatctactacaatggctacaggcagtggcgcaccaatggcagacaataacgagggtgccgatggagtgggtaattcctcaggaaattggcattgcgattcccaatggctgggcgacagagtcatcaccaccagcacccgaacctgggccctgcccacatacaacaaccacctctacaagcaaatctccagccaatcaggagccagcaacgacaaccactactttggctacagcaccccctgggggtattttgacttcaacagattccactgccacttttcaccacgtgactggcaaagactcatcaacaacaactggggattccggcccaaaagactcaacttcaagctctttaatattcaagtcaaagaggtcacgcagaatgacggtacgacgacgattgccaataaccttaccagcacggttcaggtgtttactgactcggagtaccagctcccgtacgtcctgggctcggcgcatcaaggatgcctcccgccgtttccagcggacgtcttcatggtcccacagtatggatacctcaccctgaacaacgggagtcaggcggtaggacgctcttccttttactgcctggagtactttccttctcagatgctgcgtactggaaacaactttcagttcagctacacttttgaagacgtgcctttccacagcagctacgctcacagccagagtctggatcggctgatgaatcctctgatcgaccagtacctgtattatctgaacaagacacaaacaaatagtggaactcttcagcagtctcggctactgtttagccaagctggaccaaccaacatgtctcttcaagctaaaaactggctgcctggaccttgctacagacagcagcgtctgtcaaaacaggcaaacgacaacaacaacagcaactttccctggactgcagctacaaagtatcatctaaatggccgggactcgttggttaatccaggaccagctatggccagtcacaaggatgacgaagaaaagtttttccccatgcatggaaccctgatatttggtaaacaaggaacaaatgccaacgacgcggatttggaaaatgtcatgattacagatgaagaagaaatcagggccaccaatcccgtggctacggagcagtacgggactgtgtcaaataatttgcaaaactcaaacactggtccaactactggaactgtcaatcgccaaggagcgttacctggtatggtgtggcaggatcgagacgtgtacctgcagggacccatttgggccaagattcctcacaccgatggacactttcatccttctccactgatgggaggttttggactcaaacacccgcctcctcagatcatgatcaaaaacactcccgttccagccaatcctcccacaaacttcagttctgccaagtttgcttctttcatcacacagtattccacgggacaggtcagcgtggagatcgagtgggagctgcagaaggagaacagcaaacgctggaatcccgaaattcagtacacttccaactacaacaagtctgttaatgtggactttactgtggacactaatggtgtgtattcagagcctcgccccattggcaccagatacctgactcgtaatctgtaattgcttgttaatcaataaaccgtttaattcgtttcagttgaactttggtctctgcgaagggcgaa

SEQ ID NO: 4835 - DNA, 3142 bp, Adeno-associated virus
aaaacgacgggccagtgattgtaatacgactcactatagggcgaaattgaaattagcggccgcgaattcgcctttcgcagagaccaaagttcaactgaaacgaattaaacggtttattgattaacaagcaattacagattacgagtcaggtatctggtgccaatggggcgaggctctgaatacacaccattagtgtccacagtaaagtccacattaacagacttgttgtagttggaagtgtactgaatttcgggattccagcgtttgctgttctccttctgcagctcccactcgatctccacgctgacctgtcccgtggaatactgtgtgatgaaagaagcaaacttggcagaactgaagtttgtgggaggattggctggaacgggagtgtttttgatcatgatctgaggaggcgggtgtttgagtccaaaacctcccatcagtggagaaggatgaaagtgtccatcggtgtgaggaatcttggcccaaatgggtccctgcaggtacacgtctcgatcctgccacaccataccaggtaacgctccttggtgattgacagttccagtagttggaccagtgtttgagttttgcaaattatttgacacagtcccgtactgctccgtagccacgggattggtggccctgatttcttcttcatctgtaatcatgacattttccaaatccgcgtcgttggcatttgttccttgtttaccaaatatcagggttccatgcatggggaaaaacttttcttcgtcatccttgtgactggccatagctggtcctggattaaccaacgagtcccggccatttagatgatactttgtagctgcagtccagggaaagttgctgttgttgttgtcgtttgcctgttttgacagacgctgctgtctgtagcaaggtccaggcagccagtttttagcttgaagagacatgttggttggtccagcttggctaaacagtagccgagactgctgaagagttccactatttgtttgtgtcttgttcagataatacaggtactggtcgatcagaggattcatcagccgatccagactctggctgtgagcgtagctgctgtggaaaggcacgtcttcaaaagtgtagctgaactgaaagttgtttccagtacgcagcatctgagaaggaaagtactccaggcagtaaaaggaagagcgtcctaccgcctgactcccgttgttcagggtgaggtatccatactgtgggaccatgaagacgtccgctggaaacggcgggaggcatccttgatgcgccgagcccaggacgtacgggagctggtactccgagtcagtaaacacctgaaccgtgctggtaaggttattggcaatcgtcgtcgtaccgtcattctgcgtgacctctttgacttgaatattaaagagcttgaagttgagtcttttgggccggaatccccggttgttgttgacgagtctttgccagtcacgtggtgaaaagtggcagtggaatctgttgaagtcaaaatacccccagggggtgctgtagccaaagtagtggttgtcgttgctggctcctgattggctggagatttgcttgtagaggtggttgttgtatgtgggcagggcccaggttcgggtgctggtggtgatgactctgtcgcccagccattgggaatcgcaatgccaatttcctgaggaattacccactccatcggcaccctcgttattgtctgccattggtgcgccactgcctgtagccattgtagtagatcccagaccagagggggctgctggtggctgtccgagaggctgggggtcaggtacggagtctgcgtctccagtctgaccaaaatttaatctttttcttgcaggctgctggcccgcttttccggttcccgaggaggagtctggctccacaggagagtgctctaccggcctcttttttcccggagccgtcttaacaggctcctcaaccaggcccagaggttcaagaaccctctttttcgcctggaagactgctcgtccgaggttgcccccaaaagacgtatcttctttaaggcgctcctgaaactctgcgtcggcgtggttgtacttgaggtacgggttgtctccgctgtcgagctgccggtcgtaggccttgtcgtgctcgagggccgcggcgtctgcctcgttgaccggctcccccttgtcgagtccgttgaagggtccgaggtacttgtacccaggaagcacaagacccctgctgtcgtccttatgccgctctgcgggctttggtggtggtgggccaggtttgagcttccaccactgtcttattccttcagagagagtgtcctcgagccaatctggaagataaccatcggcagccatacctgatttaaatcatttattgttcagagatgcagtcatccaaatccacattgaccagatcgcaggcagtgcaagcgtctggcacctttcccatgatatgatgaatgtagcacagtttctgatacgcctttttgacgacagaaacgggttgagattctgacacgggaaagcactctaaacagtctttctgtccgtgagtgaagcagatatttgaattctgattcattctctcgcattgtctgcagggaaacagcatcagattcatgcccacgtgacgagaacatttgttttggtacctgtccgcgtagttgatcgaagcttccgcgtctgacgtcgatggctgcgcaactgactcgcgcgcccgtttgggctcacttatatctgcgtcactgggggcgggtcttttcttagctccaccctttttgacgtagaattcatgctccacctcaaccacgtgatcctttgcccaccggaaaaagtctttcacttcctgcttggtgacctttccaaagtcatgatccagacggcgggtaagttcaaatttgaacatccggtcttgcaacggctgctggtgctcgaaggtcgttgagttcccgtcaatcacggcgcacatgttggtgttggaggtgacgatcacgggagtcgggtctatctgggccgaggacttgcatttctggtccacacgcaccttgcttcctccaagaatggctttggccgactccacgaccttggcggtcatcttcccctcctcccaccagatcaccatcttgtcgacgcaatggtaaaaggaaagttctcattgg

SEQ ID NO: 4836 - DNA, 2208 bp, Adeno-associated virus
atggctgccgatggttatcttccagattggctcgaggacactctctctgaaggaataagacagtggtggaagctcaaacctggcccaccaccaccaaagcccgcagagcggcataaggacgacagcaggggtcttgtgcttcctgggtacaagtacctcggacccttcaacggactcgacaagggggagccggtcaacgaggcagacgccgcggccctcgagcacgacaaggcctacgaccggcagctcgacagcggagacaacccgtacctcaagtacaaccacgccgacgcagagtttcaggagcgccttaaagaagatacgtcttttgggggcaacctcggacgagcagtcttccaggcgaaaaagagggttcttgaacctctgggcctggttgaggaacctgttaagacggctccgggaaaaaagaggccggtagagcactctcctgtggagccagactcctcctcgggaaccggaaaagcgggccagcagcctgcaagaaaaagattaaattttggtcagactggagacgcagactccgtacctgacccccagcctctcggacagccaccagcagccccctctggtctgggatctactacaatggctacaggcagtggcgcaccaatggcagacaataacgagggtgccgatggagtgggtaattcctcaggaaattggcattgcgattcccaatggctgggcgacagagtcatcaccaccagcacccgaacctgggccctgcccacatacaacaaccacctctacaagcaaatctccagccaatcaggagccagcaacgacaaccactactttggctacagcaccccctgggggtattttgacttcaacagattccactgccacttttcaccacgtgactggcaaagactcatcaacaacaactggggattccggcccaaaagactcaacttcaagctctttaatattcaagtcaaagaggtcacgcagaatggcggtacgacgacgattgccaataaccttaccagcacggttcaggtgtttactgactcggagtaccagctcccgtacgtcctgggctcggcgcatcaaggatgcctcccgccgtttccagcggacgtcttcatggtcccacagtatggatacctcaccctgaacaacgggagtcaggcggtaggacgctcttccttttactgcctggagtactttccttctcagatgctgcgtactggaaacaactttcagttcagctacacttttgaagacgtgcctttccacagcagctacgctcacagccagagtctggatcggctgatgaatcctctgatcgaccagtacctgtattatctgaacaagacacaaacaaatagtggaactcttcagcagtctcggctactgtttagccaagctggaccaaccaacatgtctcttcaagctaaaaactggctgcctggaccttgctacagacagcagcgtctgtcaaaacaggcaaacggcaacaacaacagcaactttccctggactgcagctacaaagtatcatctaaatggccgggactcgttggttaatccaggaccagctatggccagtcacaaggatgacgaagaaaagtttttccccatgcatggaaccctgatatttggtaaacaaggaacaaatgccaacgacgcggatttggaaaatgtcatgattacagatgaagaagaaatcagggccaccaatcccgtggctacggagcagtacgggactgtgtcaaataatttgcaaaactcaaacactggtccaactactggaactgtcaatcaccaaggagcgttacctggtatggtgtggcaggatcgagacgtgtacctgcagggacccatttgggccaagattcctcacaccgatggacactttcatccttctccactgacgggaggttttggactcaaacacccgcctcctcagatcatgatcaaaaacactcccgttccagccaatcctcccacaaacttcagttctgccaagtttgcttctttcatcacacagtattccacgggacaggtcagcgtggagatcgagtgggagctgcagaaggagaacagcaaacgctggaatcccgaaattcagtacacttccaactacaacaagtctgttaatgtggactttactgtggacactaatggtgtgtattcagagcctcgccccattggcaccagatacctgactcgtaatctgtaa

SEQ ID NO: 4837 - protein, 735 aa, Adeno-associated virus
MAADGYLPDWLEDTLSEGIRQWWKLKPGPPPPKPAERHKDDSRGLVLPGYKYLGPFNGLDKGEPVNEADAAALEHDKAYDRQLDSGDNPYLKYNHADAEFQERLKEDTSFGGNLGRAVFQAKKRVLEPLGLVEEPVKTAPGKKRPVEHSPVEPDSSSGTGKAGQQPARKRLNFGQTGDADSVPDPQPLGQPPAAPSGLGSTTMATGSGAPMADNNEGADGVGNSSGNWHCDSQWLGDRVITTSTRTWALPTYNNHLYKQISSQSGASNDNHYFGYSTPWGYFDFNRFHCHFSPRDWQRLINNNWGFRPKRLNFKLFNIQVKEVTQNGGTTTIANNLTSTVQVFTDSEYQLPYVLGSAHQGCLPPFPADVFMVPQYGYLTLNNGSQAVGRSSFYCLEYFPSQMLRTGNNFQFSYTFEDVPFHSSYAHSQSLDRLMNPLIDQYLYYLNKTQTNSGTLQQSRLLFSQAGPTNMSLQAKNWLPGPCYRQQRLSKQANGNNNSNFPWTAATKYHLNGRDSLVNPGPAMASHKDDEEKFFPMHGTLIFGKQGTNANDADLENVMITDEEEIRATNPVATEQYGTVSNNLQNSNTGPTTGTVNHQGALPGMVWQDRDVYLQGPIWAKIPHTDGHFHPSPLTGGFGLKHPPPQIMIKNTPVPANPPTNFSSAKFASFITQYSTGQVSVEIEWELQKENSKRWNPEIQYTSNYNKSVNVDFTVDTNGVYSEPRPIGTRYLTRNL

SEQ ID NO: 4838 - DNA, 2208 bp, Adeno-associated virus
atggctgccgatggttatcttccagattggctcgaggacactctctctgaaggaataagacagtggtggaagctcaaacctggcccaccaccaccaaagctcgcagagcggcatcaggacgacagcaggggtcttgtgcttcctgggtacaagtacctcggacccttcaacggactcgacaaaggagagccggtcaacgaggcagacgccgcggccctcgagcacgacaaggcctacgaccggcagctcgacagcggagacaacccgtacctcaagtacaaccacgccgacgcggagtttcaggagcgtcttaaagaagatacgtcttttgggggcaacctcggacgagcagtcttccaggcgaaaaagagggttcttgaacctctgggcctggttgaggaacctgttaagacggctccgggaaaaaagaggccggtagagcactctcctgtggagccagactcctcctcgggaaccggaaaggcgggccatcagcctgcgagaaagagattgaattttggtcagactggagacgcagactccgtacctgacccccagcctctcggacagccaccagcagcccccacaagtctgggatctactacaatggctacaggcagtggcgcaccaatggcagacaataacgagggtgccgatggagtgggtaattcctcaggaaattggcattgcgattcccaatggctgggcgacagagtcatcaccaccagcacccgaacctgggccctgcccacctacaacaaccacctctacaagcaaatctccagccaatcaggagcctcgaacgacaaccactactttggctacagcaccccctgggggtattttgacttcaacagattccactgtcacttctccccacgtgattggcaaagactcatcaacaacaactggggattccgacccaagagactcaacttcaagctctttaacattcaagtcaaagaggtcacgcagaatgacggtacgacgacgattgccaataaccttaccagcacggttcaggtgtttactgactcggagtaccagctcccgtacgtcctcggctcggcgcatcaaggatgcctcccgccgtttccagcggacgtcttcacggtcccacagtatggatacctcaccctgaacaacgggagtcaggcggtaggacgctcttccttttactgcctggagtactttccttctcagatgctgcgtactggaaacaaccttaccttcagctacacctttgaggacgttcctttccacagcagctacgctcacagccagagtttggaccggctgatgaatcctctgatcgaccagtatctatattatctgaacaggacacaatcaaatagtggaactcttcagcagtctaggctactgtttagccaagctggacccaccagcatgtctcttcaagctaaaaactggctgcctggaccttgctacagacagcagcgtctttcaaagcaggcaaacgacaacaacaacagcaactttccctggactgcggctacaaagtatcatctaaatggccgggactcgttggttaatccaggaccagctatggccagccacaaagacgatgaagaaaagtttttccccatgcatggaaccctgatatttggtaaacaaggaacaaatgctaacgacgcggatttggagcatgttatgattacagatgaagaagaaatcaggaccaccaatcctgtggctacagagcagtacggaaacgtgtcaaataatttgcaaaactcaaatactggtccaactacagaaaatgtcaatcaccagggagcgttacctggtatggtgtggcaggatcgagacgtgtacctgcagggacccatttgggccaagattcctcacaccgacggacactttcacccttctccactgatgggaggttttggactcaaacacccgcctcctcaaatcatgatcaaaaacactcccgttccagccaatcctcccacaaactacagttctgccaagtttgcttctttcatcacacagtattccacgggccaggtcagcgtggagattgagtgggagctgcggaaggagaacagcaaacgctggaaccccgagatccagtatacttccaactacaacaaatctgttaatgtggactttactgtggacactaatggtgtgtattcagagcctcgccccattggcaccagatacctgactcgtaatctgtaa

SEQ ID NO: 4839 - protein, 735 aa, Adeno-associated virus
MAADGYLPDWLEDTLSEGIRQWWKLKPGPPPPKLAERHQDDSRGLVLPGYKYLGPFNGLDKGEPVNEADAAALEHDKAYDRQLDSGDNPYLKYNHADAEFQERLKEDTSFGGNLGRAVFQAKKRVLEPLGLVEEPVKTAPGKKRPVEHSPVEPDSSSGTGKAGHQPARKRLNFGQTGDADSVPDPQPLGQPPAAPTSLGSTTMATGSGAPMADNNEGADGVGNSSGNWHCDSQWLGDRVITTSTRTWALPTYNNHLYKQISSQSGASNDNHYFGYSTPWGYFDFNRFHCHFSPRDWQRLINNNWGFRPKRLNFKLFNIQVKEVTQNDGTTTIANNLTSTVQVFTDSEYQLPYVLGSAHQGCLPPFPADVFTVPQYGYLTLNNGSQAVGRSSFYCLEYFPSQMLRTGNNLTFSYTFEDVPFHSSYAHSQSLDRLMNPLIDQYLYYLNRTQSNSGTLQQSRLLFSQAGPTSMSLQAKNWLPGPCYRQQRLSKQANDNNNSNFPWTAATKYHLNGRDSLVNPGPAMASHKDDEEKFFPMHGTLIFGKQGTNANDADLEHVMITDEEEIRTTNPVATEQYGNVSNNLQNSNTGPTTENVNHQGALPGMVWQDRDVYLQGPIWAKIPHTDGHFHPSPLMGGFGLKHPPPQIMIKNTPVPANPPTNYSSAKFASFITQYSTGQVSVEIEWELRKENSKRWNPEIQYTSNYNKSVNVDFTVDTNGVYSEPRPIGTRYLTRNL

SEQ ID NO: 4840 - DNA, 2208 bp, Adeno-associated virus
atggctgccgatggttatcttccagattggctcgaggacactctctctgaaggaataagacagtggtggaagctcaaacctggcccaccaccaccaaagcccgcagagcggcatcaggacgacagcaggggtcttgtgcttcctgggtacaagtacctcggacccttcaacggactcgacaaaggagagccggtcaacgaggcagacgccgcggccctcgagcacgacaaggcctacgaccggcagctcgacagcggagacaacccgtacctcaagtacaaccacgccgacgcggagtttcaggagcgtcttaaagaagatacgtcttttgggggcaacctcggacgagcagtcttccaggcgaaaaagagggttcttgaacctctgggcctggttgaggaacctgttaagacggctccgggaaaaaagaggccggtagagcactctcctgtggagccagactcctcctcgggaaccggaaaagcgggccatcagcctgcgagaaagagattgaattttggtcagactggagacgcagactccgtacctgacccccagcctctcggacagccaccagcagcccccacaagtttgggatctactacaatggctacaggcagtggcgcaccaatggcagacaataacgagggtgccgatggagtgggtaattcctcaggaaattggcattgcgattcccaatggctgggcgacagagtcatcaccaccagcacccgaacctgggccctgcccacctacaacaaccacctctacaagcaaatctccagccaatcaggagcctcgaacgacaaccactactttggctacagcaccccctgggggtattttgacttcaacagattccactgtcacttctccccacgtgattggcaaagactcatcaacaacaactggggattccgacccaagagactcaacttcaagctctttaacattcaagtcaaggaggtcacgcagaatgacggtacgacgacgattgccaataaccttaccagcacggttcaggtgtttactgactcggagtaccagctcccgtacgtcctcggctcggcgcatcaaggatgcctcccgccgtttccagcggacgtcttcatggtcccacagtatggatacctcaccctgaacaacgggagtcaggcggtaggacgctcttccttttactgcctggagtactttccttctcagatgctgcgtactggaaacaactttaccttcagctacacctttgaggacgttcctttccacagcagctacgctcacagccagagtttggaccggctgatgaatcctctgatcgaccagtatctatattatctgaacaggacacaatcaaatagtggaactcttcagcagtctaggctactgtttagccaagctggacccaccagcatgtctcttcaagctaaaaactggctgcctggaccttgctacagacagcagcgtctttcaaagcaggcaaacgacaacaacaacagcaactttccctggactgcggctacaaagtatcgtctaaatggccgggactcgttggttaatccaggaccagctatggccagccacaaagacgatgaagaaaagtttttccccatgcatggaaccctgatatttggtaaacaaggaacaaatgctaacgacgcggatttggagcatgttatgattacagatgaagaagaaatcaggaccaccaatcctgtggctacagagcagtacggaaacgtgtcaaataatttgcaaaactcaaatactggtccaactacagaaaatgtcaatcaccagggagcgttacctggtatggtgtggcaggatcgagacgtgtacctgcagggacccatttgggccaagattcctcacaccgacggacactttcacccttctccactgatgggaggttttggactcaaacacccgcctcctcaaatcatgatcaaaaacactcccgttccagccaatcctcccacaaacttcagttctgccaagtttgcttctttcatcacacagtattccacgggccaggtcagcgtggagattgagtgggagctgcagaaggagaacagcaaacgctggaaccccgagatccagtatacttccaactacaacaaatctgttaatgtggactttactgtggacactaatggtgtgtattcagagcctcgccccattggcaccagatacctgactcgtaatctgtaa

SEQ ID NO: 4841 - protein, 735 aa, Adeno-associated virus
MAADGYLPDWLEDTLSEGIRQWWKLKPGPPPPKPAERHQDDSRGLVLPGYKYLGPFNGLDKGEPVNEADAAALEHDKAYDRQLDSGDNPYLKYNHADAEFQERLKEDTSFGGNLGRAVFQAKKRVLEPLGLVEEPVKTAPGKKRPVEHSPVEPDSSSGTGKAGHQPARKRLNFGQTGDADSVPDPQPLGQPPAAPTSLGSTTMATGSGAPMADNNEGADGVGNSSGNWHCDSQWLGDRVITTSTRTWALPTYNNHLYKQISSQSGASNDNHYFGYSTPWGYFDFNRFHCHFSPRDWQRLINNNWGFRPKRLNFKLFNIQVKEVTQNDGTTTIANNLTSTVQVFTDSEYQLPYVLGSAHQGCLPPFPADVFMVPQYGYLTLNNGSQAVGRSSFYCLEYFPSQMLRTGNNFTFSYTFEDVPFHSSYAHSQSLDRLMNPLIDQYLYYLNRTQSNSGTLQQSRLLFSQAGPTSMSLQAKNWLPGPCYRQQRLSKQANDNNNSNFPWTAATKYRLNGRDSLVNPGPAMASHKDDEEKFFPMHGTLIFGKQGTNANDADLEHVMITDEEEIRTTNPVATEQYGNVSNNLQNSNTGPTTENVNHQGALPGMVWQDRDVYLQGPIWAKIPHTDGHFHPSPLMGGFGLKHPPPQIMIKNTPVPANPPTNFSSAKFASFITQYSTGQVSVEIEWELQKENSKRWNPEIQYTSNYNKSVNVDFTVDTNGVYSEPRPIGTRYLTRNL

SEQ ID NO: 4842 - DNA, 2208 bp, Adeno-associated virus
atggctgccgatggttatcttccagattggctcgaggacactctctctgaaggaataagacagtggtggaagctcaaacctggcccaccaccaccaaagcccgcagagcggcatcaggacgacagcaggggtcttgtgcttcctgggtacaagtacctcggacccttcaacggactcgacaaaggagagccggtcaacgaggcagacgccgcggccctcgagcacgacaaggcctacgaccggcagctcgacagcggagacaacccgtacctcaagtacaaccacgccgacgcggagtttcaggagcgtcttaaagaagatacgtcttttgggggcaacctcggacgagcagtcttccaggcgaaaaagagggttcttgaacctctgggcctggttgaggaacctgttaagacggctccgggaaaaaagaggccggtagagcactctcctgtggagccagactcctcctcgggaaccggaaaagcgggccatcagcctgcgagaaagagattgaattttggtcagactggagacgcagactccgtacctgacccccagcctctcggacagccaccagcagcccccacaagtttgggatctactacaatggctacaggcagtggcgcaccaatggcagacaataacgagggtgccgatggagtgggtaattcctcaggaaattggcattgcgattcccaatggctgggcgacagagtcatcaccaccagcacccgaacctgggccctgcccacctacaacaaccacctctacaagcaaatctccagccaatcaggagcctcgaacgacaaccactactttggctacagcaccccctgggggtattttgacttcaacagattccactgtcacttctccccacgtgattggcaaagactcatcaacaacaactggggattccgacccaagagactcaacttcaagctctttaacattcaagtcaaagaggtcacgcagaatgacggtacgacgacgattgccaataaccttaccagcacggttcaggtgtttactgactcggagtaccagctcccgtacgtcctcggctcggcgcatcaaggatgcctcccgccgtttccagcggacgtcttcatggtcccacagtatggatacctcaccctgaacaacgggagtcaggcggtaggacgcccttccttttactgcctggagtactttccttctcagatgctgcgtactggaaacaactttaccttcagctacacctttgaggacgttcctttccacagcagctacgctcacagccagagtttggaccggctgatgaatcctctgatcgaccagtatctatattatctgaacaggacacaatcaaatagtggaactcttcagcagtctaggctactgtttagccaagctggacccaccagcatgtctcttcaagctaaaaactggctgcctggaccttgctacagacagcagcgtctttcaaagcaggcaaacgacaacaacaacagcaactttccctggactgcggctacaaagtatcatctaaatggccgggactcgttggttaatccaggaccagctatggccagccacaaagacgatgaagaaaagtttttccccatgcatgggaccctgatatttggtaaacaaggaacaaatgctaacgacgcggatttggagcatgttatgattacagatgaagaagaaatcaggaccaccaatcctgtggctacagagcagtacggaaacgtgtcaaataatttgcaaaactcaaatactggtccaactacagaaaatgtcaatcaccagggagcgttacctggtatggtgtggcaggatcgagacgtgtacctgcagggacccatttgggccaagattcctcacaccgacggacactttcacccttctccactgatgggaggttttggactcaaacacccgcctcctcaaatcatgatcaaaaacactcccgttccagccaatcctcccacaaacttcagttctgccaagtttgcttctttcatcacacagtattccacgggccaggtcagcgtggagattgagtgggagctgcagaaggagaacagcaaacgctggaaccccgagatccagtatacttccaactacaacaaatctgttaatgtggactttactgtggacactaatggtgtgtattcagagcctcgccccattggcaccagatacctgactcgtaatctgtaa

SEQ ID NO: 4843 - protein, 735 aa, Adeno-associated virus
MAADGYLPDWLEDTLSEGIRQWWKLKPGPPPPKPAERHQDDSRGLVLPGYKYLGPFNGLDKGEPVNEADAAALEHDKAYDRQLDSGDNPYLKYNHADAEFQERLKEDTSFGGNLGRAVFQAKKRVLEPLGLVEEPVKTAPGKKRPVEHSPVEPDSSSGTGKAGHQPARKRLNFGQTGDADSVPDPQPLGQPPAAPTSLGSTTMATGSGAPMADNNEGADGVGNSSGNWHCDSQWLGDRVITTSTRTWALPTYNNHLYKQISSQSGASNDNHYFGYSTPWGYFDFNRFHCHFSPRDWQRLINNNWGFRPKRLNFKLFNIQVKEVTQNDGTTTIANNLTSTVQVFTDSEYQLPYVLGSAHQGCLPPFPADVFMVPQYGYLTLNNGSQAVGRPSFYCLEYFPSQMLRTGNNFTFSYTFEDVPFHSSYAHSQSLDRLMNPLIDQYLYYLNRTQSNSGTLQQSRLLFSQAGPTSMSLQAKNWLPGPCYRQQRLSKQANDNNNSNFPWTAATKYHLNGRDSLVNPGPAMASHKDDEEKFFPMHGTLIFGKQGTNANDADLEHVMITDEEEIRTTNPVATEQYGNVSNNLQNSNTGPTTENVNHQGALPGMVWQDRDVYLQGPIWAKIPHTDGHFHPSPLMGGFGLKHPPPQIMIKNTPVPANPPTNFSSAKFASFITQYSTGQVSVEIEWELQKENSKRWNPEIQYTSNYNKSVNVDFTVDTNGVYSEPRPIGTRYLTRNL

SEQ ID NO: 4844 - DNA, 2208 bp, Adeno-associated virus
atggctgccgatggttatcttccagattggctcgaggacactctctctgaaggaataagacagtggtggaagctcaaacctggcccaccaccaccaaagcccgcagagcggcataaggacgacagcaggggtcttgtgcttcctgggtacaagtacctcggacccttcaacggactcgacaagggagagccggtcaacgaggcagacgccgcggccctcgagcacgacaaggcctacgaccggcagctcgacagcggagacaacccgtacctcaagtacaaccacgccgacgcggagtttcaggagcgccttaaagaagatacgtcttttgggggcaacctcggacgagcagtcttccaggcaaaaaagagggttcttgaacctctgggcctggttgaggagcctgttaaaacggctccgggaaaaaagaggccggtagagcactctcctgcggagccagactcctcctcgggaaccggaaaagcgggccagcagcctgcaagaaaaagattgaatttcggtcagactggagacgcagactccgtacctgacccccagcctctcggacagccaccagcagccccctctggtctgggaactaatacgatggcttcaggcagtggcgcaccaatggcagacaataacgagggcgccgacggagtgggtaattcctcgggaaattggcattgcgattccacatggatgggcgacagagtcatcaccaccagcacccgaacttgggccctgcccacctacaacaaccatctctacaagcaaatctccagccaatcaggagccagcaacgacaaccactactttggctacagcaccccttgggggtattttgacttcaacagattccactgccacttttcaccacgtgactggcaaagactcatcaacaacaactggggattccggcccaagagactcaacttcaagctctttaacattcaagtcaaagaggtcacgcagaatgacggtacgacgacgattgccaataaccttaccagcacggttcaggtgtttactgactcggagtaccagctcccgtacgtcctcggctcggcgcatcaaggatgcctcccgccgttcccagcagacgtcttcatggtgccacagtatggatacctcaccctgaacaacgggagtcaggcagtaggacgctcttcattttactgcctggagtactttccttctcagatgctgcgtaccggaaacaactttaccttcagctacacctttgaggacgttcctttccacagcagctacgctcacagccagagtttggaccgtctcatgaatcctctcatcgaccagtacctgtattacttgagcagaacaaacactccaagcggaaccaccacgcagtccaggcttcagttttctcaggccggagcaagtgacattcgggaccagtctaggaactggcttcctggaccctgttaccgccagcagcgagtatcaaagacatctgcggataacaacaacagtgaatactcgtggactggagctaccaagtaccacctcaatggcagagactctctggtgaatccgggcccggccatggccagccacaaggacgatgaagaaaagttttttcctcagagcggggttctcatctttgggaagcaaggctcagagaaaacaaatgtggacattgaaaaggtcatgattacagacgaagaggaaatcaggaccaccaatcccgtggctacggagcagtatggttctgtatctaccaacctgcagggcggcaacacacaagcagctaccgcagatgtcaacacacaaggcgttcttccaggcatggtctggcaggacagagacgtgtacctgcaggggcccatctgggcaaagattccacacacggacggacattttcacccctctcccctcatgggcggattcggacttaaacaccctcctccacagattctcatcaagaacaccccggtacctgcgaatccttcgaccaccttcagtgcggcaaagtttgcttctttcatcacacagtattccacggggcaggtcagcgtggagatcgagtgggagctgcagaaggagaacagcaaacgctggaatcccgagatccagtacacttccaactacaacaaatctgttaatgtggactttactgttgacactaatggcgtgtattcagagcctcgccccattggcaccagatacctgactcgtaatctgtaa

SEQ ID NO: 4845 - protein, 735 aa, Adeno-associated virus
MAADGYLPDWLEDTLSEGIRQWWKLKPGPPPPKPAERHKDDSRGLVLPGYKYLGPFNGLDKGEPVNEADAAALEHDKAYDRQLDSGDNPYLKYNHADAEFQERLKEDTSFGGNLGRAVFQAKKRVLEPLGLVEEPVKTAPGKKRPVEHSPAEPDSSSGTGKAGQQPARKRLNFGQTGDADSVPDPQPLGQPPAAPSGLGTNTMASGSGAPMADNNEGADGVGNSSGNWHCDSTWMGDRVITTSTRTWALPTYNNHLYKQISSQSGASNDNHYFGYSTPWGYFDFNRFHCHFSPRDWQRLINNNWGFRPKRLNFKLFNIQVKEVTQNDGTTTIANNLTSTVQVFTDSEYQLPYVLGSAHQGCLPPFPADVFMVPQYGYLTLNNGSQAVGRSSFYCLEYFPSQMLRTGNNFTFSYTFEDVPFHSSYAHSQSLDRLMNPLIDQYLYYLSRTNTPSGTTTQSRLQFSQAGASDIRDQSRNWLPGPCYRQQRVSKTSADNNNSEYSWTGATKYHLNGRDSLVNPGPAMASHKDDEEKFFPQSGVLIFGKQGSEKTNVDIEKVMITDEEEIRTTNPVATEQYGSVSTNLQGGNTQAATADVNTQGVLPGMVWQDRDVYLQGPIWAKIPHTDGHFHPSPLMGGFGLKHPPPQILIKNTPVPANPSTTFSAAKFASFITQYSTGQVSVEIEWELQKENSKRWNPEIQYTSNYNKSVNVDFTVDTNGVYSEPRPIGTRYLTRNL

SEQ ID NO: 4846 - DNA, 3161 bp, Adeno-associated virus
gattgaatttagcggccgcgaattcgcccttgctgcgtcaactggaccaatgagaactttccattcaatgattgcgtcgacaagatggtgatctggtgggaggagggaaagatgaccgccaaggtcatggagtcggccaaagccattctcggaggaagcaaggtgcgcgtggaccagaaatgtaagtcctcggcccagatagacccgactcccgtgattgtcacctccaacaccaacatgtgcgccgtgattgacgggaactcaacgaccttcgagcaccagcagccgttgcaagaccggatgttcaaatttgaactcacccgccgtctggatcatgactttgggaaggtcaccaagcaggaagtcaaagactttttccggtgggcaaaggatcacgtggttgaggtggagcatgaattctacgtcaaaaagggtggagccaagaaaagacccgcccccagtgacgcagatataagtgagcccaaacgggcgcgcgggtcagttgcgcagccatcgacgtcagacgcggaagcttcgatcaactacgcggacaggtaccaaaacaaatgttctcgtcacgtgggcatgaatctgatgctgtttccctgcagacaatgcgagagaatgaatcaaaattcaaatatctgcttcactcacggacagaaggactgtttagagtgctttcccgtgtcagaatctcaacccgtttctgtcgtcaaaaaggcgtatcagaaactttgctacattcatcatatcatgggaaaggtgccagacgcttgcactgcctgcgatctggtcaatgtggatttggatgactgcatctctgaacaataaatgatttaaatcaggtatggctgccgatggttatcttccagattggctcaaggacactctctctgaaggaataagacagtggtggaagctcaaacctggcccaccaccaccaaagcccgcagagcggcataaggacgacagcgggggtcttgtgcttcctgggtacaagtacctcggacccttcaacggactcgacaagggagagccggtcaacgaggcagacgccgcggccctcgagtacgacaaggcctacgaccggcagctcgacagcggagacaacccgtacctcaagtacaaccacgccgacgcggagtttcaggagcgccttaaagaagatacgtcttttgggggcaacctcggacgagcagtcttccaggcgaaaaagagggttcttgaacctctgggcctggttgaggaacctgttaagacggctccgggaaaaaagaggccggtagagcactctcctgtggagccagactcctcctcgggaacaggaaaagcgggccagcagcctgcgagaaagagattgaattttggtcagactggagacgcagactccgtacctgacccccagcctctcggacagccaccagcagccccctctggtctgggaactaatacgatggctacaggcagtggcgcaccaatggcagacaataacgagggcgccgacggagtgggtaattcctcgggaagttggcattgcgattccacatggatgggcgacagagtcatcaccaccagcacccgaacctgggctctgcccacctacaacaaccatctgtacaagcagatctccagccaatcaggagccagcaacgacaaccactactttggctacagcaccccttgggggtattttgacttcaacagattccactgccacttttcaccacgtgactggcaaagactcatcaacaacaactggggattccggcccaagagactcaacttcaagctctttaacattcaagtcaaggaggtcacgcagaatgacggtacgacgacgattgccaataaccttaccagcacggttcaggtgtttactgactcggagtaccagctcccgtacgtccccggctcggcgcatcaaggatgcctcccgccgttcccagcagacgtcttcatggtgccacagtatggatacctcaccctgaacaacgggagtcaggcagtaggacgctcttcattttactgcctggagtactttccttctcagatgcttcgtaccggaaacaactttaccttcagctacacctttgaggatgttcctttccacagcagctacgctcacagccagagtttggaccgtctcatgaatcctctcatcgaccagtacctgtattacttgagcagaacaaacactccaagcggaaccaccacgcagtccaggcttcagttttctcaggccggagcaagtgacattcgggaccagtctaggaactggcttcctggaccctgttaccgccagcagcgagtatcaaagacagctgcggacaacaacaacagtgaatactcgtggactggagctaccaagtaccacctcaatggcagagactctctggtgaatccgggcccggccatggccagccacaaggacgatgaagaaaagttttttcctcaaagcggggttctcatctttgggaagcaaggctcagagaaaacaaatgtggacattgaaaaggtcatgattacagacgaagaggaaatcagaaccaccaatcccgtggccacggagcagtatggttctgtatctaccaacctccagagcggcaacacacaagcagctactgcagatgtcaacacacaaggcgttcttccaggcatggtctggcaggacagagacgtgcacctgcaggggcctatctgggcaaagattccacacacggacggacattttcacccctctcccctcatgggcggatttggacttaaacaccctcctccacagattctcatcaagaacaccccggtacctgcaaatccttcgaccaccttcagtgcggcaaagtttgcttccttcatcacacagtattccacagggcaggtcagcgtggagatcgagtgggagctgcagaaggagaacagcaaacgctggaaccccgagatccagtacacttccaactacaacaaatctgttaatgtggactttactgtggacactaatggtgtgtattcagagcctcgccccattggcaccagatacctgactcgtaatctgtaattgcttgttaatcaataaaccgtttaattcgtttcagttgaactttggtctctgcgaagggcgaattcgtttaaaccctgcaggactagtccctttagtgagg

SEQ ID NO: 4847 - DNA, 3162 bp, Adeno-associated virus
gaattgaatttagcggccgcgaattcgcccttcgcagagaccaaagttcaactgaaacgaattaaacggtttattgattaacaagcaattacagattacgagtcaggtatctggtgccaatggggcgaggctctgaatacacgccattagtgtccacagtaaagtccacattaacagacttgttgtagttggaagtgtactgaatttcgggattccagcgtttgctgttttccttctgcagctcccactcgatctccacgctgacctgtcccgtggagtactgtgtgatgaaggaagcaaactttgccgcactgaaggtggtcgaaggattcgcaggtaccggggtgttcttgatgagaatctgtggaggagggtgtttaagtccgaatccacccatgaggggagaggggtgaaaatgtccgtccgtgtgtggaatctttgcccagatgggcccctgaaggtacacatctctgtcctgccagaccatgcctggaagaacgccttgtgtgttgacatctgcggtagctgcttgtctgttgcctctctggaggttggtagatacagaaccgtactgctccgtagccacgggattggttgtcctgatttcctcttcgtctgtaatcatgaccttttcaatgtccacatttgttttctctgagccttgcttcccaaagatgagaaccccgctctgaggaaaaaacttttcttcattgtccttgtggcttgccatggccgggcccggattcaccagagagtctctgccattgaggtggtacttggtagctccagtccacgagtattcactgttgttgttatccgcagatgtctttgatactcgctgctggcggtaacagggtccaggaagccagttcctagactggtcccgaatgtcactcgctccggcctgagaaaactgaagccttgactgcgtggtggttccacttggagtgtttgttgtgctcaagtaatacaggtactggtcgatgagaggattcatgagacggtccagactctggctgtgagcgtagccgctgtggaaaggaacgtcctcaaaagtgtagctgaaggtaaagttgtttccggtacgcagcatctgagaaggaaagtactccaggcagtaaaatgaagagcgtcctactgcctgactcccgttgttcagggtgaggtatccatactgtggcaccatgaagacgtctgctgggaacggcgggaggcatccttgatgcgccgagccgaggacgtacgggagctggtactccgagtcagtaaacacctgaaccgtgctggtaaggttattggcaatcgtcgtcgtaccgtcattctgcgtgacctctttgacttgaatgttaaagagcttgaagttgagtctcttgggtcggaatccccagttgttgttgatgagtctttgccagtcacgtggtgaaaagtggcagtggaatctgttgaagtcaaaatacccccaaggggtgctgtagccaaagtagtgattgtcgttcgaggctcctgattggctggaaatttgtttgtagaggtggttgttgtaggtgggcagggcccaggttcgggtgctggtggtgatgactctgtcgcccatccatgtggaatcgcaatgccaatttcccgaggaattacccactccgtcggcgccctcgttattgtctgccattggtgcgccactgcctgtagccatcgtattagttcccagaccagagggggctgctggtggctgtccgagaggctgggggtcaggtactgagtctgcgtctccagtctgaccaaaattcaatctttttcttgcaggctgctggcccgcctttccggttcccgaggaggagtctggctccacaggagagtgctctaccggcctcttttttcctggagccgtcttgacaggttccccaaccaggcccagaggttcaagaaccctctttttcgcctggaagactgctcgtccgaggttgcccccaaaagacgtatcttctttaaggcgctcctgaaactccgcgtcggcgtggttgtacttgaggtacgggttgtctccgctgtcgagctgccggtcgtaggctttgtcgtgctcgagggccgcggcgtctgcctcgttgaccggctctcccttgtcgagtccgttgaagggtccgaggtacttgtacccaggaagcacaagacccctgctgtcgtccttatgccgctctgcgggctttggtggtggtgggccaggtttgagcttccaccactgtcttattccttcagagagagtgtcctcgagccaatctggaagataaccatcggcagccatacctgatttaaatcatttattgttcaaagatgcagtcatccaaatccacattgaccagatcgcaggcagtgcaagcgtctggcacctttcccatgatatgatgaatgtagcacagtttctgatacgcctttttgacgacagaaacgggttgagattctgacacgggaaagcactctaaacagtctttctgtccgtgagtgaagcagatatttgaattctgattcattctctcgcattgtctgcagggaaacagcatcagattcatgcccacgtgacgagaacatttgttttggtacctgtctgcgtagttgatcgaagcttccgcgtctgacgtcgatggctgcgcaactgactcgcgcacccgtttgggctcacttatatctgcgtcactgggggcgggtcttttcttggctccaccctttttgacgtagaattcatgctccacctcaaccacgtgatcctttgcccaccggaaaaagtctttgacttcctgcttggtgaccttcccaaagtcatgatccagacggcgggtgagttcaaatttgaacatccggtcttgcaacggctgctggtgttcgaaggtcgttgagttcccgtcaatcacggcgcacatgttggtgttggaggtgacgatcacgggagtcgggtctatctgggccgaggacttgcatttctggtccacgcgcaccttgcttcctccgagaatggctttggccgactccacgaccttggcggtcatcttcccctcctcccaccagatcaccatcttgtcgacacagtcgttgaagggaaagttctcattggtccagttgacgcagcaagggcgaattcgtttaaacctgcaggactagtccctttagtgaggg

SEQ ID NO: 4848 - DNA, 3164 bp, Adeno-associated virus
gcgaattgaatttagcggccgcgaattcgcccttcgcagagaccaaagttcaactgaaacgaattaaacggtttattgattaacaagcaattacaaattacgagtcaggtatctggtgccaatggggcgaggctctgaatacacgccattagtgtccacagtaaagtccacattaacagacttgttgtagttggaagtgtactgaatttcgggattccagcgtttgctgttttccttctgcagctcccactcgatctccacgctgacctgtcccgtggagtactgtgtgatgaaggaagcaaactttgccgcactgaaggtggtcgaaggattcgcaggtaccggggtgttcttgatgagaatctgtggaggagggtgtttaggtccgaatccacccatgaggggagaggggtgaaaatgtccgtccgtgtgtggaatctttgcccagatgggcccctgaaggtacacatctctgtcctgccagaccatgcctggaagaacgccttgtgtgttgacatctgcggtagctgcttgtctgttgcctctctggaggttggtagatacagaaccatactgctccgtagccacgggattggttgtcctgatttcctcttcgtctgtaatcatgaccttttcaatgtccacatttgttttctctgagccttgcttcccaaagatgagaaccccgctctgaggaaaaaacttttcttcattgtccttgtggcttgccatggccgggcccggattcaccagagagtctctgccattgaggtggtacttggtagctccagtccacgagtattcactgttgttgttatccgcagatgtctttgatactcgctgctggcggtaacagggtccaggaagccagttcctagactggtcccgaatgtcactcgctccggcctgagaaaactgaagccttgactgcgtggtggttccacttggagtgtttgttgtgctcaagtaatacaggtactggtcgatgagaggattcatgagacggtccagactctggctgtgagcgtagctgctgtggaaaggaacgtcctcaaaagtgtagctgaaggtaaagttgtttccggtacgcagcatctgagaaggaaagtactccgggcagtaaaatgaagagcgtcctactgcctgactcccgttgctcagggtgaggtatccatactgtggcaccatgaagacgtctgctgggaacggcgggaggcatccttgatgcgccgagccgaggacgtacgggagctggtactccgagtcagtaaacacctgaaccgtgctggtaaggttattggcaatcgtcgtcgtaccgtcattctgcgtgacctctttgacttgaatgttaaagagcttgaagttgagtctcttgggtcggaatccccagttgttgttgatgagtctttgccagtcacgtggtgaaaagtggcagtggaatctgttgaagtcaaaatacccccaaggggtgctgtagccaaagtagtgattgtcgttcgaggctcctgattggctggaaatttgtctgtagaggtggttgttgtaggtgggcagggcccaggttcgggtgctggtggtgatgactctgtcgcccatccatgtggaatcgcaatgccgatttcccgaggaattacccactccgtcggcgccctcgttattgtctgccattggtgcgccactgcctgtagccatcgtattagttcccagaccagagggggctgctggtggctgtccgagaggctgggggtcaggtactgagtctgcgtctccagtctgaccaaaattcaatctttttcttgcaggctgctggcccgcctttccggttcccgaggaggagtctggctccacaggagagtgctctaccggcctcttttttcccggagccgtcttaacaggttccccaaccaggcccagaggttcaagaaccctctttttcgcctggaagactgctcgtccgaggttgcccccaaaagacgtatcttctttaaggcgctcctgaaactccgcgtcggcgtggttgtacttgaggtacgggttgtctccgctgtcgagctgccggtcgtaggctttgtcgtgctcgagggccgcggcgtctgcctcgttgaccggctctcccttgtcgagtccgttgaagggtccgaggtacttgtacccaggaagcacaagacccctgctgtcgtccttatgccgctctgcgggctttggtggtggtgggccaggtttgagcttccaccactgtcttattccttcagagagagtgtcctcgagccaatctggaagataaccatcggcagccatacctgatttaaatcatttattgttcaaagatgcagtcatccaaatccacattgaccagatcgcaggcagtgcaagcgtctggcacctttcccatgatatgatgaatgtagcacagtttctgatacgcctttttgacgacagaaacgggttgagattctgacacgggaaagcactctaaacagtctttctgtccgtgagtgaagcagatatttgaattctgattcattctctcgcattgtctgcagggaaacagcatcagattcatgcccacgtgacgagaacatttgttttggtacctgtctgcgtagttgatcgaagcttccgcgtctgacgtcgatggctgcgcaactgactcgcgcacccgtttgggcccacttatatctgcgtcactgggggcgggtcttttcttggctccaccctttttgacgtagaattcatgctccacctcaaccacgtgatcctttgcccaccggaaaaagtctttgacttcctgcttggtgaccttcccaaagtcatgatccagacggcgggtgagttcaaatttgaacatccggtcttgcaacggctgctggtgttcgaaggtcgttgagttcccgtcaatcacggcgcacatgttggtgttggaggtgacgatcacgggagtcgggtctatctgggccgaggacttgcatttctggtccacgcgcaccttgcttcctccgagaatggctttggccgactccacgaccttggcggtcatcttcccctcctcccaccagatcaccatcttgtcgacacagtcgttgaagggaaagttctcattggtccagttgacgcagcaagggcgaattcgtttaaacctgcaggactagtccctttagtgaggg

SEQ ID NO: 4849 - DNA, 3163 bp, Adeno-associated virus
accctcactaaagggactagtcctgcaggtttaaacgaattcgcccttgctgcgtcaactggagcaatgagaactttcccttcaacgactgtgtcgacaagatggtgatttggtgggaggaggggaagatgaccgccaaggtcgtggagtcggccaaagccattctcggaggaagcaaggtgcgcgtggaccagaaatgcaagtcctcggcccagatagatccgactcccgtgatcgtcacctccaacaccaacatgtgcgccgtgattgacgggaactcaacgaccttcgaacaccagcagccgttgcaagaccggatgttcaaatttgaactcacccgccgtctggatcatgactttgggaaggtcaccaagcaggaagtcaaagactttttccggtgggcaaaggatcacgtggttgaggtggagcatggattctacgtcaaaaagggtggagccaagaaaagacccgcccctagtgacgcagatataagtgagcccaaacgggtgcgcgagtcagttgcgcagccatcgacgtcggacgcggaagcttcgatcaactacgcggacaggtaccaaaacaaatgttctcgtcacgtgggcatgaatctgatgctgtttccctgcagacaatgcgagagaatgaatcaaaattcaaatatctgcttcactcacggacagaaagactgtttagagtgctttcccgtgtcagaatctcaacctgtttctgtcgtcaaaaaggcgtatcagaaactgcgctacattcatcatatcatgggaaaggtgccagacgcttgcactgcctgcgatctggtcaatgtggatttggatgactgcatctctgaacaataaatgatttaaatcaggtatggctgccgatggttatcttccagattggctcgaggacactctctctgaaggaataagacagtggtggaagctcaaacctggcccaccaccaccaaagcccgcagagcggcataaggacgacagcaggggtcttgtgcttcctgggtacaagtacctcggacccttcaacggactcgacaagggagagccggtcaacgaggcagacgccgcggccctcgagcacgacaaggcctacgaccggcagctcgacagcggagacaacccgtacctcaagtacaaccacgccgacgcggagtttcaggagcgtcttaaagaagatacgtcttttgggggcaacctcggacgagcagtcttccaggcgaaaaagagggttcttgaacctctgggcctggttgaggaacctgttaagacggctccgggaaaaaagaggccggtagagcactctcctgcggagccagactcctcctcgggaaccggaaaagcgggccagcagcctgcaagaaaaagactgaatttcggtcagactggagacgcagactccgtacctgacccccagcctctcggacagccaccagcagcccccacaagtttgggatctactacaatggctacaggcagtggcgcaccaatggcagacaataacgagggtgccgatggagtgggtaattcctcaggaaattggcattgcgattcccaatggctgggcgacagagtcatcaccaccagcacccgaacctgggccctgcccacctacaacaaccacctttacaagcaaatctccagccaatcaggagcctcaaacgacaaccactactttggctacagcaccccctgggggtattttgacttcaacagattccactgccacttttcaccacgtgactggcaaagactcatcaacaacaactggggattccgacccaagagactcaacttcaagctctttaacattcaagtcaaagaggtcacgcagaatgacggtacgacgacgattgccaataaccttaccagcacggttcaggtgtttactgactcggagtaccagctcccgtacgtcctcggctcggcgcatcaaggatgcctcccgccgtttccagcggacgtcttcatggtcccacagtatggatacctcaccctgaacaacgggagtcaggcggtaggacgctcttccttttactgcctggagtgctttccttctcagatgctgcgtactggaaacaactttcagttcagctacacttttgaagacgtgcctttccacagcagctacgctcacagccagagtttggatcggctgatgaatcctctgatcgaccagtacctgtattatctaaacagaacacaaacagctagtggaactcagcagtctcggctactgtttagccaagctggacccacaagcatgtctcttcaagctaaaaactggctgcctggaccgtgttatcgccagcagcgtttgtcaaagcaggcaaacgacaacaacaacagcaactttccctggactggagctaccaagtaccacctcaatggcagagactctttggtgaacccgggcccggccatggccagccacaaggacgatgaagaaaagtttttccccatgcatggaaccctaatatttggtaaagaaggaacaaatgctaccaacgcggaattggaaaatgtcatgattacagatgaagaggaaatcaggaccaccaatcccgtggctacagagcagtacggatatgtgtcaaataatttgcaaaactcaaatactgctgcaagtactgaaactgtgaatcaccaaggagcattacctggtatggtgtggcaggatcgagacgtgtacctgcagggacccatttgggccaagattcctcacaccgatggacactttcatccttctccactgatgggaggttttggactcaaacacccgcctcctcagattatgatcaaaaacactcccgttccagccaatcctcccacaaacttcagttctgccaagtttgcttccttcatcacacagtattccacgggacaggtcagcgtggagatcgagtgggagctgcagaaggagaacagcaaacgctggaatcccgaaattcagtacacttccaactacaacaaatctgttaatgtggactttactgtggacactaatggtgtgtattcagagcctcgccccattggcaccagatacctgactcgtaatctgtaattgcttgttaatcaataaaccgtttaattcgtttcagttgaactttggtctctgcgaagggcgaattcgcggccgctaaattcaattcgcc

SEQ ID NO: 4850 - protein, 735 aa, Adeno-associated virus
MAADGYLPDWLEDTLSEGIRQWWKLKPGPPPPKPAERHKDDSRGLVLPGYKYLGPFNGLYKGEPVDEADAAALEHDKAYDRQLDSGDNPYLKYNHADAEFQERLKEDTSFGGNLGRAVFQAKKRVLEPLGLVGEPVKTAPGKKRPVEHSPVEPDSSSGTGKAGNQPARKRLNFGQTGDADSVPDPQPLGQPPAAPSGLGSTTMATGSGAPVADNNEGADGVGNSSGNWHCDSQWLGDRVITTSTRTWALPTYNNHLYKQISSQSGASNDNHYFGYSTPWGYFDFNRFHCHFSPRDRQRLINNNWGFRPKRLNFKLFNIQVKEVTQNDGTTTIANNLTSTVQVFTDSGYQLPYVLGLAHQGCLPPFPADVFMVPQYGYLTLNNGSQAVGRSSFYCLEYFPSQMLRTGNNFQFSYTFEDVPFHSSYAHSQSLDRLMNPLIDQYLYYLNKTQSNSGTLQQSRLLFSQAGPTSMSLQAKNWLPGPCYRQQRLSKQANDNNNSNFPWTAATKYHLNGRDSLVNPGPAMASHKDDEEKFFPMHGTLIFGKQGTNANDADLDNVMITDEEEIRTTNPVATEQYGYVSNNLQNSNTGPTTGTVNHQGALPGMVWQDRDVYLQGPIWAKIPHTDGHFHPSPLMGGFGLKHPPPQIMIKNTPVPANPPTNFSSAKFASFITQYSTGQVSVEIEWELQKEDSKRWNPEIQYTSNYNKPVNVDFTVDTNGVYSEPRPIGTRYLTRNL

SEQ ID NO: 4851 - DNA, 2208 bp, Adeno-associated virus
atggctgccgatggttatcttccagattggctcgaggacactctctctgaaggaataagacagtggtggaagctcaaacctggcccaccaccaccaaagcccgcagagcggcataaggacgacagcaggggtcttgtgcttcctgggtacaagtacctcggacccttcaacggactctacaagggagagccggtcgacgaggcagacgccgcggccctcgagcacgacaaggcctacgaccggcagctcgacagcggagacaacccgtacctcaagtacaaccacgccgacgcggagtttcaggagcgccttaaagaagatacgtcttttgggggcaacctcggacgagcagtcttccaggccaaaaagagggttcttgaacctctgggcttggttggggagcctgttaaaacggctccgggaaaaaagaggccggtagagcactctcctgtggagccagactcctcctcgggaaccggaaaagcgggcaaccagcctgcaagaaaaagattgaattttggtcagactggagacgcagactccgtacctgacccccagcctctcggacagccaccagcagccccctctggtctgggatctactacaatggctacaggcagtggcgcaccagtggcagacaataacgagggtgccgatggagtgggtaattcctcaggaaattggcattgcgattcccaatggctgggcgacagagtcatcaccaccagcacccgaacctgggctctgcccacctacaataaccacctctacaagcaaatctccagccaatcaggagcctcaaacgacaaccactactttggctacagcaccccctgggggtattttgacttcaacagattccactgccacttttcaccacgtgaccggcaaagactcatcaacaacaactggggattccgaccaaaaagactcaacttcaagctctttaacattcaagtcaaagaggtcacgcagaatgacggtacgacgacgattgccaataaccttaccagcacggttcaggtgtttactgactcggggtaccagctcccgtacgtcctcggcttggcgcatcaaggatgcctcccgccgttcccagcagacgtcttcatggtgccacagtatggatacctcaccctgaacaacgggagtcaggcggtaggacgctcttccttttactgcctggagtactttccttctcagatgctgcgtactggaaacaactttcagttcagctacacctttgaagacgttcctttccacagcagctacgctcacagccagagtctggatcggctgatgaatcctctgatcgaccagtacctgtattatctgaacaagacacaatcaaatagtggaactcttcagcagtctcggctactgtttagccaagctggacccaccagcatgtctcttcaagctaaaaactggctgcctggaccttgctacagacagcagcgtctgtcaaagcaggcaaacgacaacaacaacagcaactttccctggactgcggctacaaagtatcatctaaatggccgggactcgttggttaatccaggaccagctatggccagccacaaagacgatgaagaaaagtttttccccatgcatggaaccctgatatttggtaaacaaggaacaaatgctaacgacgcggatttggacaatgtcatgattacagatgaagaagaaatccgcaccaccaatcccgtggctacggagcagtacggatatgtgtcaaataatttgcaaaactcaaatactggtccaactactggaactgtcaatcaccaaggagcgttacctggtatggtgtggcaggatcgagacgtgtacctgcagggacccatttgggccaagattcctcacaccgatggacactttcatccttctccacttatgggaggttttggactcaaacacccacctcctcagatcatgattaaaaacactcccgttccagccaatcctcccacaaacttcagttctgccaagtttgcttctttcatcacacagtattccacgggacaagtcagcgtggagatcgagtgggagctgcagaaggaggacagcaaacgctggaaccccgagatccagtacacttccaactataacaaacctgttaatgtggactttactgtggacactaatggtgtgtattcagagcctcgccccattggcaccagatacctgactcgtaatctgtaa

SEQ ID NO: 4852 - DNA, 3161 bp, Adeno-associated virus
cgaattgatttagcggccgcgaattcgcccttcgcagagaccaaagttcaactgaaacgaattaaacggtttattgattaacaagcaattacagattacgagtcaggtatctggtgccaatggggcgaggctctgaatacacaccattagtgtccacagtaaagtccacattaacagatttgttgtagttggaagtgtactggatctcgggattccagcgtttgctgttctccttctgtagctcccactcgatctccacgctgacccgccccgtggaatactgtgtgatgaaggaagcaaactttgccgcactgaaggtggtcgaaggattcgcaggtaccggggtgtttttgatgagaatctgtggaggagggtgtttaagtccgaatccgcccatgaggggagaggggtgaaaatgtccgtccgtgtgcggaatctttgcccagataggcccctgcaggtacacgtctctgtcctgccagaccatgcctggaagaacgccttgtgtgttgacatctgcagtagatgcttgtgtgttgccgctctggaggttggtagatacagaaccatactgctccgtggccacgggattggtggttctgatttcctcttcgtctgtaatcatgaccttttcaatgtccacatttgttttctctgatccttgttttccaaagatgagaaccccgctctgaggaaaaaacttttcttcatcgtccttgtggctggccattgccgggcccggattcaccagagagtctctgccattgaggtggtacttggtagctccaatccacgagtattcactgttgttgttgtccgcagatgtctttgatactcgctgctggcggtaacagggtccaggaagccagttcctagactgatcccgaatgtcactcgctccggcctgagaaaactgaagcctggactgcgtggtggttccgcttggagtgtttgttctgctcaagtaatacaggtactggtcgatgagaggattcatgagacggtccaaactctggctgtgagcgtagctgctgtggaaaggaacatcctcaaaggtgtagctgaaggtaaagttgtttccggtacgcagcatctgagaagggaagtactccaggcagtaaaatgaagagcgtcctactgcctgactcccgttgttcagggtgaggtatccatactgtggcaccatgaagacgtctgctgggaacggcgggaggcatccttgatgcgccgagccgaggacgtacgggagctggtactccgagtcagtaaacacctgaaccgtgctggtaaggttattggcaatcgtcgtcgtaccatcattctgcgtgacctctctgacttgaatgttaaagagcttgaagttgagtctcttgggccggaatccccagttgttgttgatgagtctttgccagtcacgtggtgaaaagtggcagtggaatctgttgaagtcaaaatacccccaaggggtgctgtagccaaagtagtggttgtcgttgctggctcctgattggctggaaatctgcttgtacagatggttgttgtaggtgggcagagcccaggttcgggtgctggtggtgatgactctgtcgcccatccatgtggaatcgcaatgccaatttcccgaggaattacccactccgtcggcgccatcgttattgtctgccattggtgcgccactgcctgtagccatcgtattagttcccagaccagagggggctgctggtggctgtccgagaggctgggggtcaggtacggagtctgcgtctccagtctgaccgaaattcaatctctttcttgcaggctggttgcccgcttttccggttcccgaggaggagtctggctccacaggagagtgctctaccggcctcttttttcccggagccgtcttaacaggctcctcaaccaggcccagaggttcaagaaccctcttttttgcctggaagactgctcgtccgaggttgcccccaaaagacgtatcttctttaaggcgctcctgaaactccgcgtcggcgtggtcgtacttgaggtacgggttgtctccgctgtcgagctgccggtcgtaggccttgtcgtgctcgagggccgcggcgtctgcctcgttgaccggctctcccttgtcgagtccgttgaagggtccgaggtacttgtacccaggaagcacaagacccctgctgtcgtccttatgccgctctgcgggctttggtggtggtgggccaggtttgagcttccaccactgtcttattccttcagagagagtgtcctcgagccaatctggaagataaccatcggcagccatacctgatttaaatcatttattgttcagagatgcagtcatccaaatccacattgaccagatcgcaggcagtgcaagcgtctggcacctttcccatgatatgatgaatgtagcaaagtttctgatacgcctttttgacgacagaaacgggttgagattctgacacgggaaagcactctaaacagtctttctgtccgtgagtgaagcagatatttgaattctgattcattctctcgcattgtctgcagggaaacagcatcagattcatgcccacgtgacgagaacatttgttttggtacctgtccgcgtagttgatcgaagcttccgcgtctgacgtcgatggctgcgcaactgactcgcgcgcccgtttgggctcacttatatctgcgtcactgggggcgggtcttttcttggctccaccctttttgacgtagaattcatgctccacctcaaccacgtgatcctttgcccaccggaaaaagtctttcacttcctgcttggtgaccttcccaaagtcatgatccagacggcgggttagttcaaatttgaacatccggtcttgcaacggctgctggtgttcgaaggtcgttgagttcccgtcaatcacggcgcacatgttggtgttggaggtggcgatcacgggagtcgggtctatctgggccgaggacttgcacttttggtccacgcgcaccttgcttcctccgagaatggcttcggccgattccacgaccttggcggtcatctttccctcctcccaccagatcaccatcttgtcgacacagtcgttgaagggaaagttctcattggtccagttgacgcagcaagggcgaattcgtttaaacctgcaggaactagtcccttagtgagg

SEQ ID NO: 4853 - protein, 735 aa, Adeno-associated virus
MAADGYLPDWLEDTLSEGIRQWWKLKPGPPPPKPAERHKDDSRGLVLPGYKYLGPFNGLYKGEPVNEADAAALEHDKAYDRQLDSGDNPYLKYNHAGAEFQERLKEDTSFGGNLGRAVFQAKKRVLEPLGLVEEPVKTAPGKKRPVEHSPVEPDSSSGTGKAGNQPARKRLNFGQTGDADSVPDPQPLGQPPAAPSGLGSTTMATGSGAPVADNNEGADGVGNSSGNWHCDSQWLGDRVITTSTRTWALPTYNNHLYKQISSQSGASNDNHYFGYSTPWGYFDFNRFHCHFSPRDWQRLINNNWGFRPKRLNFKLFNIQVKEVTQNDGTTTIANNLTSTVQVFTDSEYQLPYVLGSAHQGCLPPFPADVFMVPQYGYLTLNNGSQAVGRSSFYCLEYFPSQMLRTGNNFQFSYTFEDVPFHSSYAHSQSLDRLMNPLIDQYLYYLNKTQSNSGTLQQSRLLFSQAGPTSMSLQAKNWLPGPCYRQQRLSKQANDNNNSNFPWTAATKYHLNGRDSLVNPGPAMASHKDDEEKFFPMHGTLIFGKQGTNANDADLDNVMITDEEEIRTTNPVATEQYGYVSNNLQDSNTGPTTGTVNHQGALPGMVWQDRDVYLQGPIWAKIPHTDGHFHPSPLMGGFGLKHPPPQIMIKNTPVPANPPTNFSSAKFASFITQYSTGQVSVEIEWELQKENSKRWNPEIQYTSNYNKSVNVDFTVDTNGVYSEPRPIGTRYLTRNL

SEQ ID NO: 4854 - DNA, 2208 bp, Adeno-associated virus
atggctgccgatggttatcttccagattggctcgaggacactctctctgaaggaataagacagtggtggaagctcaaacctggcccaccaccgccaaagcccgcagagcggcataaggacgacagcaggggtcttgtgcttcctgggtacaagtacctcggacccttcaacggactctacaagggagagccggtcaacgaggcagacgccgcggccctcgagcacgacaaggcctacgaccggcagctcgacagcggagacaacccgtacctcaagtacaaccacgccggcgcggagtttcaggagcgccttaaagaagatacgtcttttgggggcaacctcggacgagcagtcttccaggccaaaaagagggttcttgaacctctgggcttggttgaggagcctgttaaaacggctccgggaaaaaagaggccggtagagcactctcctgtggagccagactcctcctcgggaaccggaaaagcgggcaaccagcctgcaagaaaaagattgaattttggtcagactggagacgcagactccgtacctgacccccagcctctcggacagccaccagcagccccctctggtctgggatctactacaatggctacaggcagtggcgcaccagtggcagacaataacgagggtgccgatggagtgggtaattcctcaggaaattggcattgcgattcccaatggctgggcgacagagtcatcaccaccagcacccgaacctgggctctgcccacctacaacaaccacctctacaagcaaatctccagccaatcaggagcctcaaacgacaaccactactttggctacagcaccccctgggggtattttgacttcaacagattccactgccacttttcaccacgtgactggcaaagactcatcaacaacaactggggattccgaccaaagagactcaacttcaagctctttaacattcaagtcaaagaggtcacgcagaatgacggtacgacgacgattgccaataaccttaccagcacggttcaggtgtttactgactcggagtaccagctcccgtacgtcctcggctcggcgcatcaaggatgcctcccgccgttcccagcagacgtcttcatggtgccacagtatggatacctcaccctgaacaacgggagtcaggcggtaggacgctcttccttttactgcctggagtactttccttctcagatgctgcgtactggaaacaactttcagttcagctacacctttgaagacgttcctttccacagcagctacgctcacagccagagtctggatcggctgatgaatcctctgatcgaccagtacctgtattatctgaacaagacacaatcaaatagtggaacccttcagcagtctcggctactgtttagccaagctggacccaccagcatgtctcttcaagctaaaaactggctgcctggaccttgctacagacagcagcgtctgtcaaagcaggcaaacgacaacaacaacagcaactttccctggactgcggctacaaagtatcatctaaatggccgggactcgttggttaatccaggaccagctatggccagccacaaagacgatgaagaaaagtttttccccatgcatggaaccctgatatttggtaaacaaggaacaaatgctaacgacgcggatttggacaatgtcatgattacagatgaagaagaaatccgcaccaccaatcccgtggctacggagcagtacggatatgtgtcaaataatttgcaagactcaaatactggtccaactactggaactgtcaatcaccaaggagcgttacctggtatggtgtggcaggatcgagacgtgtacctgcagggacccatttgggccaagattcctcacaccgatggacactttcatccttctccacttatgggaggttttggactcaaacacccacctcctcagatcatgattaaaaacactcccgttccagccaatcctcccacaaacttcagttctgccaagtttgcttctttcatcacacagtattccacgggacaagtcagcgtagagatcgagtgggagctgcagaaggagaacagcaaacgctggaaccccgagatccagtacacttccaactataacaaatctgttaatgtggactttactgtggacactaatggtgtgtattcagagcctcgccccattggcaccagatacctgactcgtaatctgtaa

SEQ ID NO: 4855 - protein, 738 aa, Adeno-associated virus
MAADGYLPDWLEDNLSEGIREWWDLKPGAPKPKANQQKQDDGRGLVLPGCKYLGPFNGLDKGEPVNAADAAALEHDKAYDQQLKAGDNPYLRYNHADAEFQERLQEDTSFGGNLGRAVFQAKKRVLEPLGLVEEGAKTAPGKKRPVEPSPQRSPDSSTGIGKTGQQPAKKRLNFGQTGDSESVPDPQPIGEPPAGPSGLGSGTMAAGGGAPMADNNEGADGVGSSSGNWHCDSTWLGDRVITTSTRTWALPTYNNHLYKQISNGTSGGSTNDNTYFGYSTPWGYFDFNRFHCHFSPRDWQRLINNNWGFRPKRLNFKLFNIQVKEVTQNEGTKTIANNLTSTIQVFTDSEYQLPYVLGSAHQGCPPPFPADVFMIPQYGYLTLNNGSQAVGRSSFYCLEYFPSQMRRTGNNFEFSYQFEDVPFHSSYAHSQSLDRLMNPLIDQYLYYLSRTQSTGGTAGTQQLLFSQAGPNNMSAQAKNWLPGPCYRQQRVSTTLSQNNNSNFAWTGATKYHLNGRDSLVNPGVAMATHKDDEERFFPSSGVLMFGKQGAGKDNVDYSSVMLTSEEEIKTTNPVATEQYGVVADNLQQQNAAPIVGAVNSQGALPGMVWQNRDVYLQGPIWAKIPHTDGNFHPSPLMGGFGLKHPPPQILIKNTPVPADPPTTFSQAKLASFITQYSTGQVSVEIEWELQKENSKRWNPEIQYTSNYNKSVNVDFTVDTNGVYSEPRPIGTRYLTRNL

SEQ ID NO: 4856 - DNA, 2217 bp, Adeno-associated virus
atggctgccgatggttatcttccagattggctcgaggacaacctctctgagggcattcgcgagtggtgggacttgaaacctggagccccgaaacccaaagccaaccagcaaaagcaggacgacggccggggtctggtgcttcctggctgcaagtacctcggacccttcaacggactcgacaagggggagcccgtcaacgcggcggacgcagcggccctcgagcacgacaaggcctacgaccagcagctcaaagcgggtgacaatccgtacctgcggtataaccacgccgacgccgagtttcaggagcgtctgcaagaagatacgtcttttgggggcaacctcgggcgagcagtcttccaggccaagaagcgggttctcgaacctctcggtctggttgaggaaggcgctaagacggctcctggaaagaagagaccggtagagccatcaccccagcgttctccagactcctctacgggcatcggcaagacaggccagcagcccgcgaaaaagagactcaactttgggcagactggcgactcagagtcagtgcccgaccctcaaccaatcggagaaccccccgcaggcccctctggtctgggatctggtacaatggctgcaggcggtggcgctccaatggcagacaataacgaaggcgccgacggagtgggtagttcctcaggaaattggcattgcgattccacatggctgggcgacagagtcatcaccaccagcacccgaacctgggccctccccacctacaacaaccacctctacaagcaaatctccaacgggacatcgggaggaagcaccaacgacaacacctacttcggctacagcaccccctgggggtattttgactttaacagattccactgccacttctcaccacgtgactggcagcgactcatcaacaacaactggggattccggcccaagagactcaacttcaagctcttcaacatccaggtcaaggaggtcacgcagaatgaaggcaccaagaccatcgccaataaccttaccagcacgattcaggtctttacggactcggaataccagctcccgtacgtcctcggctctgcgcaccagggctgcccgcctccgttcccggcggacgtcttcatgattcctcagtacgggtacctgactctgaacaacggcagtcaggccgtgggccgttcctccttctactgcctggagtactttccttctcaaatgcggagaacgggcaacaactttgagttcagctaccagtttgaggacgtgccttttcacagcagctacgcgcatagccaaagcctggaccggctgatgaaccccctcatcgaccagtacctgtactacctgtctcggactcagtccacgggaggtaccgcaggaactcagcagttgctattttctcaggccgggcctaataacatgtcggctcaggccaaaaactggctacccgggccctgctaccggcagcaacgcgtctccacgacactgtcgcaaaataacaacagcaactttgcttggaccggtgccaccaagtatcatctgaatggcagagactctctggtaaatcccggtgtcgctatggcaacgcacaaggacgacgaagagcgattttttccatccagcggagtcttgatgtttgggaaacagggagctggaaaagacaacgtggactatagcagcgttatgctaaccagtgaggaagaaatcaaaaccaccaacccagtggccacagaacagtacggcgtggtggccgataacctgcaacagcaaaacgccgctcctattgtaggggccgtcaacagtcaaggagccttacctggcatggtctggcagaaccgggacgtgtacctgcagggtcctatctgggccaagattcctcacacggacggcaactttcatccttcgccgctgatgggaggctttggactgaaacacccgcctcctcagatcctgattaagaatacacctgttcccgcggatcctccaactaccttcagtcaagccaagctggcgtcgttcatcacgcagtacagcaccggacaggtcagcgtggaaattgaatgggagctgcagaaagagaacagcaagcgctggaacccagagattcagtatacttccaactataacaaatctgttaatgtggactttactgtggacactaatggtgtgtattcagagcctcgccccattggcaccagatacctgactcgtaatctgtaa

SEQ ID NO: 4857 - DNA, 3167 bp, Adeno-associated virus
attgaatttagcggccgcgaattcgcccttcgcagagaccaaagttcaactgaaacgaattaaacggtttattgattaacaagcaattacagattacgagtcaggtacctggtgccaatggggcgaggctctgaatacacaccattagtgtccacagtaaagtccacattaacagatttgttgtagttggaagtgtactgaatctcgggattccagcgtttgctgttctccttctgcagctcccactcgatctccacgctgacctgccccgtggagtactgtgtaatgaaggaagcaaactttgccgcactgaaggtagtcgaaggattcgcaggtaccggggtgttcttgatgagaatctgcgggggagggtgtttaagtccgaatccgcccatgaggggagaggggtgaaaatgtccgtccgtgtgtggaatctttgcccagatgggcccctgcaggtacacgtctctgtcctgccacaccatgcctggaagaacgccttgtgtgttgacatctgaggtagctgcttgtgtgttgccgctctggaggttggtagatacagaaccatactgctccgtagccacgggattggtggtcctgatttcctcttcgtctgtaatcatgaccttttcaatgtccacattagtttttcccgagtcttgttttccaaagatgagaaccccgctctgaggaaaaaacttttcttcatcgtccttgtggctggccatggccgggcccggattcaccagagagtctcttccattaaggtggtacttggtagctccagtccacgagtattcactgttgttgttatccgcagatgtctttgatactcgctgctggcggtaacagggtccaggaagccagttcctagactggtcccgaatgtcacttgctccggcctgagaaaactgaagccttgactgcgtggtggttccgcttggagtgtttgttctgctcaagtaatacaggtactggtcgatgagaggattcatgagacggtccaaactctggctgtgggcgtagctgctgtggaaaggaacgtcctcaaaggtgtagctgaaggtaaagttgtttccggtacgcagcatctgagaaggaaagtactccaggcagtaaaatgaagagcgtcctactgcctgactcccgttgttcagggtgaggtatccatactgtggcaccatgaagacgtctgctgggaacggcgggaggcatccttgatgcgccgagccgaggacgtacgggagctggtactccgagtcagtaaacacctgaaccgtgctggtaaggttattggcaatcgtcgtcgtaccgtcattctgcgtgacctccttgacttgaatgttaaagagcttgaagttgagtcttttgggccggaatccccaattgttgttgatgagtctttgccagtcacgtggcgaaaagtggcagtggaatctgttgaagtcaaaatacccccaaggggtgctgtagccaaagtagtggttgtcgtttgaggctcctgattggctggaaatctgcttgtagaggtggttgttgtaggtgggcagagcccaggtgcgggtgctggtggtgatgactctgtcgcccatccatgtggaatcgcaatgccaatttcccgaggaattacccactccgtcggcgccctcgttattgtctgccattggtgcgccactgcctgtagccatcgtattagttcccagaccagagggggctgctggtggctgtccgagaggctgggggtcaggtacggagtctgcgtctccagtctgaccgaaattcaatctctttcttgcaggctgctggcccgcttttccggttcccgaggaggagtctggctccgcaggagagtgctctaccggcctcttttttcccggagccgtcttaacaggttcctcaaccaggcccagaggttcaagaaccctctttttcgcctggaagactgctcgtccgaggttgcccccaaaagacgtatcttctttaagacgctcctggaactccgcgtcggcgtggttgtacttggggtacgggttgtctccgctgtcgagctgccggtcgtaggccttgtcgtgctcgagggccgcggcgtctgcctcgttgaccggctctcccttgtcgagtccgttgaagggtccaaggtacttgtacccaggaagcacaagacccctgctgtcgtccttatgccgctctgcgggctttggtggtggtgggccaggtttgagcttccaccactgtcttattccttcagagagagtgtcctcgagccaatctggaagataaccatcggcagccatacctgatttaaatcatttattgttcagagatgcagtcatccaaatccacattgaccagatcgcaagcagtgcaagcgtctggcacctttcccatgatatgatgaatgtagcacagtttctgatacgcctttttgacgacagaaacgggttgagattctgacacgggaaagcactctaaacagtctttctgtccgtgagtgaagcagatatttgaattctgattcattctctcgcattgtctgcagggaaacagcatcagattcatgcccacgtgacgagaacatttgttttggtacctgtccgcgtagttgattgaagcttccgcgtctgacgtcgatggctgcgcaactgactcgcgcgcccgtttgggctcacttatatctgcgtcactgggggcgggtctttttttggctccaccctttttgacgtagaattcatgctctacctcaaccacgtgatcctttgcccaccggaaaaagtctttgacttcctgcttggtgaccttcccaaagtcatgatccagacggcgggtgagttcaaatttgaacatccggtcttgcaacggctgctggtgttcgaaggtcgttgagttcccgtcaatcactgcgcacatgttggtgttggaggtgacaatcacgggagtcgggtctatctgggccgaggacttgcatttctggtccacgcgcaccttgcttcctccgagaatggctttggccgactccacgaccttggcggtcatcttcccctcctcccaccagatcaccatcttgtcgacgcaatcattgaaaggaaagttctcattggtccagttgacgcagccgtagaaagggcgaattcgtttaaacctgcaggactagtccctttagtgagggt

SEQ ID NO: 4858 - DNA, 3161 bp, Adeno-associated virus
aattgaatttagcggccgcgaattcgcccttcgcagagaccaaagttcaactgaaacgaattaaacggtttattgattaacaagcaattacagattacgagtcaggtatctggtgccaatggggcgaggctctgaatacacaccattagtgtccacagtaaagtccacattaacagatttgttgtagttggaagtgtactgaatctcgggattccagcgtttgctgttctccttctgcagctcccactcgatctccacgctgacctgccccgtggagtactgtgtaatgaaggaagcaaactttgccgcactgaaggtagtcgaaggattcgcaggtaccggggtgttcttgatgagaatctgcgggggagggtgtttaagtccgaatccgcccatgaggggagaggggtgaaaatgtccgtccgtgtgtggaatctttgcccagatgggcccctgcaggtacacgtctctgtcctgccacaccatgcctggaagaacgccttgtgtgttgacatctgaggtagctgcttgtgtgttgccgctctggaggttggtagatacagaaccatactgctccgtagccacgggattggtggtcctgatttcctcttcgtctgtaatcatgaccttttcaatgtccacattagtttttcccgagtcttgttttccaaagatgagaaccccgctctgaggaaaaaacttttcttcatcgtccttgtggctggccatggccgggcccggattcaccagagagtctcttccattaaggtggtacttggtagctccagtccacgagtattcactgttgttgttatccgcagatgtctttgatactcgctgctggcggtaacagggtccaggaagccagttcctagactggtcccgaatgtcacttgctccggcctgagaaaactgaagccttgactgcgtggtggttccgcttggagtgtttgttctgctcaagtaatacaggtactggtcgacgagaggattcatgagacggtccaaactctggctgtgggcgtagctgctgtggaaaggaacgtcctcaaaggtgtagctgaaggtaaagttgtttccggtacgcagcatctgagaaggaaagtactccaggcagtaaaatgaagagcgtcctactgcctgactcccgttgttcagggtgaggtatccatactgtggcaccatgaagacgtctgctgggaacggcgggaggcatccttgatgcgccgagccgaggacgtacgggagctggtactccgagtcagtaaacacctgaaccgtgctggtaaggttattggcaatcgtcgtcgtaccgtcattctgcgtgacctccttgacttgaatgttaaagagcttgaagttgagtcttttgggccgggatccccaattgttgttgatgagtctttgccagtcacgtggcgaaaagtggcagtggaatctgttgaagtcaaaatacccccaaggggtgctgtagccaaagtagtggttgtcgtttgaggctcctgattggctggaaatctgcctgtagaggtggttgttgtaggtgggcagagcccaggtgcgggtgctggtggtgatgactctgtcgcccatccatgtggaatcgcaatgccaatttcccgaggaattacccactccgtcggcgccctcgttattgtctgccattggtgcgccactgcctgtagccatcgtattagttcccagaccagagggggctgctggtggctgtccgagaggctgggggtcaggtacggagtctgcgtctccagtctgaccgaaattcaatctccttcttgcaggctgctggcccgcttttccggttcccgaggaggagtctggctccgcaagagagtgctctaccggcctcttttttcccggagccgtcttaacaggttcctcaaccaggcccagaggttcaagaaccctctttttcgcctggaagactgctcgtccgaggttgcccccaaaagacgtatcttctttaagacgctcctggaactccgcgtcggcgtggttgtacttgaggtacgggttgtctccgccgtcgagctgccggtcgtaggccttgtcgtgctcgagggccgcggcgtctgcctcgttgaccggctctcccttgtcgagtccgttgaagggtccaaggtacttgtacccaggaagcacaagacccctgctgtcgtccttatgccgctctgcgggctttggtggtggtgggccaggtttgagcttccaccactgtcttattccttcagagagagtgtcctcgagccaatctggaagataaccatcggcagccatacctgatttaaatcatttattgttcagagatgcagtcatccaaatccacattgaccagatcgcaagcagtgcaagcgtctggcacctttcccatgatatgatgaatgtagcacagtttctgatacgcctttttgacgacagaaacgggttgagattctgacacgggaaagcactctaaacagtctttctgtccgtgagtgaagcagatatttgaattctgattcattctctcgcattgtctgcagggaaacagcatcagattcatgcccacgtgacgagaacatttgttttggtacctgtccgcgtagttgattgaagcttccgcgtctgacgtcgatggctgcgcaactgactcgcgcgcccgtttgggctcacttatatctgcgtcactgggggcgggtctttttttggctccaccctttttgacgtagaattcatgctctacctcaaccacgtgatcctttgcccaccggaaaaagtctttgacttcctgcttggtgaccttcccaaagtcatgatccagacggcgggtgagttcaaatttgaacatccggtcttgcaacggctgctggtgttcgaaggtcgttgagttcccgtcaatcactgcgcacatgttggtgttggaggtgacaatcacgggagtcgggtctatctgggccgaggacttgcatttctggtccacgcgcaccttgcttcctccgagaatggctttggccgactccacgaccttggcggtcatcttcccctcctcccaccagatcaccatcttgtcgacgcaatcattgaaaggaaagttctcattggtccagttgacgcagcaagggcgaattcgtttaaacctgcaggactagtccctttagtgaggg

SEQ ID NO: 4859 - DNA, 3172 bp, Adeno-associated virus
gattgaatttagcggccgcgaattcgcccttgctgcgtcaactggaccaatgagaactttcccttcaacgattgcgtcgacaagatggtgatctggtgggaggagggcaagatgaccgccaaggtcgtggagtccgccaaggccattctgggtggaagcaaggtgcgcgtggaccaaaagtgcaagtcatcggcccagatcgaccccacgcccgtgatcgtcacctccaacaccaacatgtgcgccgtgatcgacgggaacagcaccaccttcgagcaccagcagcccctgcaggaccgcatgttcaagttcgagctcacccgccgtctggagcacgactttggcaaggtgaccaagcaggaagtcaaagagttcttccgctgggctcaggatcacgtgactgaggtggcgcatgagttctacgtcagaaagggcggagccaccaaaagacccgcccccagtgacgcggatataagcgagcccaagcgggcctgcccctcagttgcggagccatcgacgtcagacgcggaagcaccggtggactttgcggacaggtaccaaaacaaatgttctcgtcacgcgggcatgcttcagatgctgtttccctgcaagacatgcgagagaatgaatcagaatttcaacgtctgcttcacgcacggggtcagagactgctcagagtgcttccccggcgcgtcggaatctcaacccgtcgtcagaaaaaagacgtatcagaaactgtgcgcgattcatcatctgctggggcgggcacccgagattgcgtgttcggcctgcgatctcgtcaacgtggacttggatgactgtgtttctgagcaataaatgacttaaaccaggtatggctgctgacggttatcttccagattggctcgaggacaacctctctgagggcattcgcgagtggtgggacctgaaacctggagcccccaagcccaaggccaaccagcagaagcaggacgacggccggggtctggtgcttcctggctacaagtacctcggacccttcaacggactcgacaagggggagcccgtcaacgcggcggacgcagcggccctcgagcacgacaaggcctacgaccagcagctcaaagcgggtgacaatccgtacctgcggtataaccacgccgacgccgagtttcaggagcgtctgcaagaagatacgtcttttgggggcaacctcgggcgagcagtcttccaggccaagaagcgggttctcgaacctctcggtctggttgaggaagctgctaagacggctcctggaaagaagagaccggtagaaccgtcacctcagcgttcccccgactcctccgcgggcatcggcaagaaaggccagcagcccgctaaaaagagactgaactttggtcagactggcgactcagagtcagtccccgaccctcaaccaatcggagaaccaccagcaggcccctctggtctgggatctggtacaatggctgcaggcggtggcgctccaatggcagacaataacgaaggcgccgacggagtgggtagttcctcaggaaattggcattgcgattccacatggctgggcgacagagtcatcaccaccagcacccgaacctgggccctgcccacctacaacaaccacctctacaagcaaatatccaatgggacatcgggaggaagcaccaacgacaacacctacttcggctacagcaccccctgggggtattttgacttcaacagattccactgccacttctcaccacgtgactggcagcgactcatcaacaacaactggggattccggccaaaaagactcagcttcaagctcttcaacatccaggtcaaggaggtcacgcagaatgaaggcaccgagaccatcgccaataaccttaccagcacgattcaggtatttacggactcggaataccagctgccgtacgtcctcggctccgcgcaccagggctgcctgcctccgttcccggcggacgtcttcatgattccccagtacggctaccttacactgaacaatggaagtcaagccgtaggccgttcctccttctactgcctggaatattttccatctcaaatgctgcgaactggaaacaattttgaattcagctacaccttcgaggacgtgcctttccacagcagctgcgcacacagccagagctcggaccgactgatgaatcctctcatcgaccagtacctgtactacttatccagaactcggtccacaggaggaactcaaggtacccagcaattgttattttctcaagctgggcctgcaaacatgtcggctcaggctaagaactggctacctggaccttgctaccggcagcagcgagtctctacgacactgtcgcaaaacaacaacagcaactttgcttggactggtgccaccaaatatcacctgaacggaagagactctttggtaaatcccggtgtcgccatggcaacccacaaggacgacgaggaacgcttcttcccgtcgagtggagtcctgatgtttggaaaacagggtgctggaagagacaatgtggactacagcagcgttatgctaaccagcgaagaagaaattaaaaccactaaccctgtagccacagaacaatacggtgtggtggctgacaacttgcagcaaaccaatacagggcctattgtgggaaatgtcaacagccaaggagccttacctggcatggtctggcagaaccgagacgtgtacctgcagggtcccatctgggccaagattcctcacacggacggcaacttccacccttcaccgctaatgggaggatttggactgaagcacccacctcctcagatcctgatcaagaacacgccggtacctgcggatcctccaacaacgttcagccaggcgaaattggcttccttcattacgcagtacagcaccggacaggtcagcgtggaaatcgagtgggagctgcagaaggagaacagcaaacgctggaacccagagattcagtacacttcaaactactacaaatctacaaatgtggactttgctgtcaatacagagggaacttattctgagcctcgccccattggtactcgttacctcacccgtaatctgtaattgctggttaatcaataaaccgtttgattcgtttcagttgaactttggtctctgcgaagggcgaattcgtttaaacctgcaggactagtccctttagtgagg

SEQ ID NO: 4860 - DNA, 3172 bp, Adeno-associated virus
gattgaatttagcggccgcgaattcgcccttgctgcgtcaactggaccaatgagaactttcccttcaacgattgcgtcgacaagatggtgatctggtgggaggagggcaagatgaccgccaaggtcgtggagtccgccaaggccattctgggtggaagcaaggtgcgcgtggaccaaaagtgcaagtcatcggcccagatcgaccccacgcccgtgatcgtcacctccaacaccaacatgtgcgccgtgatcggcgggaacagcaccaccttcgagcaccagcagcccctgcaggaccgcatgttcaagttcgagctcacccgccgtctggagcacgactttggcaaggtgaccaagcaggaagtcaaagagttcttccgctgggctcaggatcacgtgactgaggtggcgcatgagttctacgtcagaaagggcggagccaccaaaagacccgcccccagtgacgcggatataagcgagcccaagcgggcctgcccctcagttgcggagccatcgacgtcagacgcggaagcaccggtggactttgcggacaggtaccaaaacaaatgttctcgtcacgcgggcatgcttcagatgctgtttccctgcaagacatgcgagagaatgaatcagaatttcaacgtctgcttcacgcacggggtcagagactgctcagagtgcctccccggcgcgtcagaatctcaacccgtcgtcagaaaaaagacgtatcagaaactgtgcgcgattcatcatctgctggggcgggcacccgagattgcgtgttcggcctgcgatctcgtcaacgtggacttggatgactgtgtttctgagcaataaatgacttaaaccaggtatggctgctgacggttatcttccagattggctcgaggacaacctctctgagggcattcgcgagtggtgggacctgaaacctggagcccccaagcccaaggccaaccagcagaagcaggacgacggccggggtctggtgcttcttggctacaagtacctcggacccttcaacggactcgacaagggggagcccgtcaatgcggcggacgcagcggccctcgagcacgacaaggcctacgaccagcagctcaaagcgggtgacaatccgtacctgcggtataaccacgccgacgccgagtttcaggagcgtctgcaagaagatacgtcttttgggggcaacctcgggcgagcagtcttccaggccaagaagcgggttctcgaacctctcggtctggttgaggaagctgctaagacggctcctggaaagaagagaccggtagaaccgtcacctcagcgttcccccgactcctccacgggcatcggcaagaaaggccagcagcccgctaaaaagagactgaactttggtcagactggcgactcagagtcagtccccgaccctcaaccaatcggagaaccaccagcaggcccctctggtctgggatctggtacaatggctgcaggcggtggcgctccaatggcagacaataacgaaggcgccgacggagtgggtagttcctcaggaaattggcattgcgattccacatggctgggcgacagagtcatcaccaccagcacccgaacctgggccctgcccacctacaacaaccacctctacaagcaaatatccaatgggacatcgggaggaagcaccaacgacaacacctacttcggctacagcaccccctgggggtattttgacttcaacagattccactgccacttctcaccacgtgactggcagcgactcatcaacaacaactggggattccggccaaaaagactcagcttcaagctcttcaacatccaggtcaaggaggtcacgcagaatgaaggcaccaagaccatcgccaataaccttaccagcacgattcaggtatttacggactcggaataccagctgccgtacgtcctcggctccgcgcaccagggctgcctgcctccgttcccggcggacgtcttcatgattccccagtacggctaccttacactgaacaatggaagtcaagccgtaggccgttcctccttctactgcctggaatattttccatctcaaatgctgcgaactggaaacaattttgaattcagctacaccttcgaggacgtgcctttccacagcggctacgcacacagccagagcttggaccgactgatgaatcctctcatcgaccagtacctgtactacttatccagaactcagtccacaggaggaactcaaggtacccagcaattgttattttctcaagctgggcctgcaaacatgtcggctcaggctaagaactggctacctggaccttgctaccggcagcagcgagtctctacgacactgtcgcaaaacaacaacagcaactttgcttggactggtgccaccaaatatcacctgaacggaagagactctttggtaaatcccggtgtcgccatggcaacccacaaggacgacgaggaacgcttcttcccgtcgagtggagtcctgatgtttggaaaacagggtgctggaagagacaatgtggactacagcagcgttatgctaaccagcgaagaagaaattaaaaccactaaccctgtagccacagaacaatacggtgtggtggctgacaacttgcagcaaaccaatacagggcctattgtgggaaatgtcaacagccaaggagccttacctggcatggtctggcagaaccgagacgtgtacctgcagggtcccatctgggccaagattcctcacacggacggcaacttccacccttcaccgctaatgggaggatttggactgaagcacccacctcctcagatcctgatcaagaacacgccggtacctgcggatcctccaacgacgttcagccaggcgaaattggcttccttcattacgcagtacagcaccggacaggtcagcgtggaaatcgagtgggagctgcagaaggagaacagcaaacgctggaacccagagattcagtacacttcaaactactacaaatctacaaatgtggactttgctgtcaatacagagggaacttattctgagcctcgccccattggtactcgttacctcacccgtaatctgtaattgctggttaatcaataaaccgtttgattcgtttcagttgaactttggtctctgcgaagggcgaattcgtttaaacctgcaggactagtccctttagtgagg

SEQ ID NO: 4861 - DNA, 2208 bp, Adeno-associated virus
atggctgccgatggttatcttccagattggctcgaggacactctctctgaaggaataagacagtggtggaagctcaaacctggcccaccaccaccaaagcccgcagagcggcataaggacgacagcaggggtcttgtgcttcctgggtacaagtacctcggacccttcaacggactcgacaagggagagccggtcaacgaggcagacgccgcggccctcgagcacgacaaggcctacgaccggcagctcgaaagcggagacaacccgtacctcaagtacaaccacgccgacgcggagtttcaggagcgtcttaaagaagatacgtcttttgggggcaacctcggacgagcagtcttccaggcgaaaaagagggttcttgaacctctgggcctggttgaggagcctgttaaaacggctccgggaaaaaagaggccggtagagcactctcctgtggagccagactcctcctcgggaaccggaaaagcgggccagcagcctgcgagaaaaagattgaattttggtcagactggagacgcagactccgtacctgacccccagcctctcggacagccaccagcagccccctctggtctgggatctactacaatggcttcaggcagtggcgcaccagtggcagacaataacgagggtgccgatggagtgggtaattcctcaggaaattggcattgcgattcccaatggctgggcgacagagtcatcaccaccagcacccgaacctgggccctgcccacctacaacaaccacctctacaagcaaatctccagccaatcaggagcctcaaacgacaaccactactttggctacagcaccccctgggggtattttgacttcaacagattccactgccacttttcaccacgtgactggcaaagactcatcaacaacagctggggattccgacccaaaagactcaacttcaagctctttaacattcaagtcaaagaggtcacgcagaatgacggtacgacgacgattgccaataaccttaccagcacggttcaagtgtttaccgactcggagtaccagctcccgtacgtcctcggctcggcgcatcaaggatgcctcccgccgttcccagcagacgtctttatggtcccacagtatggatacctcaccctgaacaacgggagtcaggcggtaggacgctcttccttttactgcctggagtactttccttctcagatgctgcgtactggaaacaactttcagttcagctacacctttgaagacgttcccttccacagcagctacgctcacagccagagtctggatcggctgctgaatcctctgatcgaccagtacctatattatctgaacaagacacaatcaaatagtggaactcttcagcagtctcggctactgtttagccaagctggacccaccagcatgtctcttcaagctaaaaactggctgcctggaccttgctacagacagcagcgtctgtcaaagcaggcaaacgacaacaacaacagcaactttccctggactgcggctacaaagtatcatctaaatggccgggactcgttggttaatccaggaccagctatggccagccacaaagacgatgaagaaaagtttttccccatgcatggaaccctgatatttggtaaacaaggaacaaatgctaacgacgcggatttggacaatgtcatgattacagatgaagaagaaatccgcaccaccaatcccgtggctacggagcagtacggatatgtgtcaaataatttgcaaaactcaaatactggtccaactactggaactgtcaatcaccaaggagcgttacctggtatggtgtggcaggatcgagacgtgtacctgcagggacccatttgggccaagattcctcacacggacgggcactttcatccttctccactaatgggaggttttgggctcaaacacccgcctcctcagatcatgatcaaaaacactcccgttccagccaatcctcctacaaacttcagttcttccaagtttgcttctttcatcacacagtattccacggggcaggtcagcgtggagatcgagtgggagctgcagaaggagaacagcaaacgctggaatcccgaaattcagtatacttccaactacaacaaatctgttaatgtggactttactgtggacactaatggtgtgtattcagagcctcgccccattggcaccagatacccgactcgtaatctgtaa

SEQ ID NO: 4862 - protein, 735 aa, Adeno-associated virus
MAADGYLPDWLEDTLSEGIRQWWKLKPGPPPPKPAERHKDDSRGLVLPGYKYLGPFNGLDKGEPVNEADAAALEHDKAYDRQLESGDNPYLKYNHADAEFQERLKEDTSFGGNLGRAVFQAKKRVLEPLGLVEEPVKTAPGKKRPVEHSPVEPDSSSGTGKAGQQPARKRLNFGQTGDADSVPDPQPLGQPPAAPSGLGSTTMASGSGAPVADNNEGADGVGNSSGNWHCDSQWLGDRVITTSTRTWALPTYNNHLYKQISSQSGASNDNHYFGYSTPWGYFDFNRFHCHFSPRDWQRLINNSWGFRPKRLNFKLFNIQVKEVTQNDGTTTIANNLTSTVQVFTDSEYQLPYVLGSAHQGCLPPFPADVFMVPQYGYLTLNNGSQAVGRSSFYCLEYFPSQMLRTGNNFQFSYTFEDVPFHSSYAHSQSLDRLLNPLIDQYLYYLNKTQSNSGTLQQSRLLFSQAGPTSMSLQAKNWLPGPCYRQQRLSKQANDNNNSNFPWTAATKYHLNGRDSLVNPGPAMASHKDDEEKFFPMHGTLIFGKQGTNANDADLDNVMITDEEEIRTTNPVATEQYGYVSNNLQNSNTGPTTGTVNHQGALPGMVWQDRDVYLQGPIWAKIPHTDGHFHPSPLMGGFGLKHPPPQIMIKNTPVPANPPTNFSSSKFASFITQYSTGQVSVEIEWELQKENSKRWNPEIQYTSNYNKSVNVDFTVDTNGVYSEPRPIGTRYPTRNL

SEQ ID NO: 4863 - DNA, 2208 bp, Adeno-associated virus
atggctgccgatggttatcttccagattggctcgaggacactctctctgaaggaataagacagtggtggaagctcaaacctggcccaccaccaccaaagcccgcagagcggcataaggacgacagcaggggtcttgtgcttcctgggtacaagtacctcggacccttcaacggactcgacaagggagagccggtcaacgaggcagacgccgcggccctcgagcacgacaaggcctacgaccggcagctcgacagcggagacaacccgtacctcaagtacaaccacgccgacgcggagtttcaggagcgtcttaaagaagatacgtcttttgggggcaacctcggacgagcagtcttccaggccaaaaagaggattcttgaacctctgggcctggttgaggaacctgttaagacggctccgggagaaaagaggccggtagagcactctcctgcggagccagactcctcctcgggaaccggaaaagcgggccagcagcctgcaagaaagagattgaattttggccagactggagacgcagactcagtacctgacccccagcctctcggacagccaccagcagccccctctggtctgggaactaatacgatggcttcaggcagtggcgcaccaatggcagacaataacgagggcgccgacggagtgggtaattcctcgggaaattggtattgcgattccacatggatgggcgacagagtcatcaccaccagcacccgcacctgggccctgcccacctacaacaaccatctgtacaagcaaatctccagccagtctggagccagcaacgacaaccactactttggctacagcaccccctgggggtattttgacttcaacagattccactgccacttctccccacgtgactggcaaagactcatcaacaacaactggggattccggcccaagagactcagcttcaagctctttaacattcaagtcaaagaggtcacgcagaatgacggtacgacgacgattgccaataaccttaccagcacggttcaggtgtttactgactcggagtaccagctcccgtacgtcctcggctcggcgcatcaaggatgcctcccgccgttcccagcagacgtcttcatggtgccacagtatggatacctcaccctgaacaacggcagtcaggcggtaggacgctcttccttttactgcctggagtactttccttctcagatgcttcgtaccggaaacaactttaccttcagctacacctttgaagacgttcctttccatagcagctacgctcacagccaaagtctggaccgtctcatgaatcctctcatcgaccagtacctgtattacttgagcagaacaaacactccaagcggaaccaccacgatgtccaggcttcagttttctcaggccggagcaagtgacattcgggaccagtctagaaactggcttcctggaccctgttaccgccagcagcgagtatcaaagacagctgcggacaacaacaacagtgattactcgtggactggagctaccaagtaccacctcaatggaagagactctctggtgaatccgggcccagctatggccagccacaaggacgatgaagaaaaatattttcctcagagcggggttctcatctttggaaaacaagactcgggaaaaactaatgtggacattgaaaaggttatgattacagacgaagaggaaatcaggaccaccaatcccgtggctacggagcagtatggttctgtatctaccaacctccagagcggcaacacacaagcagctacctcagatgtcaacacacaaggcgttcttccaggcatggtctggcaggacagagacgtgtacctgcaggggcccatctgggcaaagattccacacacggacggacattttcacccctctcccctcgtgggcggattcggacttaaacaccctcctccacaaattctcatcaagaacaccccggtacctgcgaatccttcgaccactttcagtgcggcaaagtttgcttccttcatcacacagtactccacggggcaggtcagcgtggagatcgagtgggagctgcagaaggagaacagcaaacgctggaatcccgaaattcagtacacttccaactacaacaaatctgttaatgtggactttactgtggacactaatggtgtgtattcagagcctcgccccattggcaccagatacctgactcgtaatctgtaa

SEQ ID NO: 4864 - protein, 735 aa, Adeno-associated virus
MAADGYLPDWLEDTLSEGIRQWWKLKPGPPPPKPAERHKDDSRGLVLPGYKYLGPFNGLDKGEPVNEADAAALEHDKAYDRQLDSGDNPYLKYNHADAEFQERLKEDTSFGGNLGRAVFQAKKRILEPLGLVEEPVKTAPGEKRPVEHSPAEPDSSSGTGKAGQQPARKRLNFGQTGDADSVPDPQPLGQPPAAPSGLGTNTMASGSGAPMADNNEGADGVGNSSGNWYCDSTWMGDRVITTSTRTWALPTYNNHLYKQISSQSGASNDNHYFGYSTPWGYFDFNRFHCHFSPRDWQRLINNNWGFRPKRLSFKLFNIQVKEVTQNDGTTTIANNLTSTVQVFTDSEYQLPYVLGSAHQGCLPPFPADVFMVPQYGYLTLNNGSQAVGRSSFYCLEYFPSQMLRTGNNFTFSYTFEDVPFHSSYAHSQSLDRLMNPLIDQYLYYLSRTNTPSGTTTMSRLQFSQAGASDIRDQSRNWLPGPCYRQQRVSKTAADNNNSDYSWTGATKYHLNGRDSLVNPGPAMASHKDDEEKYFPQSGVLIFGKQDSGKTNVDIEKVMITDEEEIRTTNPVATEQYGSVSTNLQSGNTQAATSDVNTQGVLPGMVWQDRDVYLQGPIWAKIPHTDGHFHPSPLVGGFGLKHPPPQILIKNTPVPANPSTTFSAAKFASFITQYSTGQVSVEIEWELQKENSKRWNPEIQYTSNYNKSVNVDFTVDTNGVYSEPRPIGTRYLTRNL

SEQ ID NO: 4865 - DNA, 2209 bp, Adeno-associated virus
atggctgccgatggttatcctccagattggctcgaggacactctctctgaagggataagacagtggtggaagctcaaacctggcccaccaccaccaaagcccgcagagcggcataaggacgacagcaggggtcttgtgcttcctgggtacaagtacctcggacccttcaacggactcgacaagggggagccggtcaacgaggcagacgccgcggccctcgagcacgacaaggcctacgaccggcagctcgacagcggagacaacccgtacctcaagtacaaccacgccgacgcagagtttcaggagcgccttaaagaagatacgtcttttgggggcaacctcggacgagcagtcttccaggcgaaaaagagggttcttgaacctctgggcctggttgaggaacctgttaagacggctccgggaaaaaagaggccggtagagcactctcctgtggagccagactcctcctcgggaaccggaaaagcgggccagcggcctgcaagaaaaagattaaattttggtcagactggagacgcagactccgtacctgacccccagcctctcggacagccaccagcagccccctctggtctgggatctactacaatggctacaggcagtggcgcaccaatggcagacaataacgagggtgccgatggagtgggtaattcctcaggaaattggcattgcgattcccaatggctgggcgacagagtcatcaccaccagcacccgaacctgggccctgcccacatacaacaaccacctctacaagcaaatctccagccaatcaggagccagcaacgacaaccactactttggctacagcaccccctgggggtattttgacttcaacagattccactgccacttttcaccacgtgactggcaaagactcatcaacaacaactggggattccggcccaaaagactcaacttcaagctctttaatattcaagtcaaagaggtcacgcagaatgacggtacgacgacgattgccaataaccttaccagcacggttcaggtgtttactgactcggagtaccagctcccgtacgtcctgggctcggcgcatcaaggatgcctcccgccgtttccagcggacgtcttcatggtcccacagtatggatacctcaccctgaacaacgggagtcaggcggtaggacgctcttccttttactgcctggagtactttccttctcagatgctgcgtactggaaacaactttcagttcagctacacttttgaagacgtgcctttccacagcagctacgctcacagccagagtctggatcggctgatgaatcctctgatcgaccagtacctgtattatctgaacaagacacaaacaaatagtggaactcttcagcagtctcggctactgtttagccaagctggaccaaccaacatgtctcttcaagctaaaaactggctgcctggaccttgctacagacagcagcgtctgtcaaaacaggcaaacgacaacaacaacagcaactttccctggactgcagctacaaagtatcatctaaatggccgggactcgttggttaatccaggaccagctatggccagtcacaaggatgacgaagaaaagtttttccccatgcatggaaccctgatatttggtaaacaaggaacaaatgccaacgacgcggatttggaaaatgtcatgattacagatgaagaagaaatcagggccaccaatcccgtggctacggagcagtacgggactgtgtcaaataatttgcaaaactcaaacactggtccaactactggaactgtcaatcgccaaggagcgttacctggtatggtgtggcaggatcgagacgtgtacctgcagggacccatttgggccaagattcctcacaccgatggacactttcatccttctccactgatgggaggttttggactcaaacacccgcctcctcagatcatgatcaaaaacactcccgttccagccaatcctcccacaaacttcagttctgccaagtttgcttctttcatcacacagtattccacgggacaggtcagcgtggagatcgagtgggagctgcagaaggagaacagcaaacgctggaatcccgaaattcagtacacttccaactacaacaagtctgttaatgtggactttactgtggacactaatggtgtgtattcagagcctcgccccattggcaccagatacctgactcgtaatctgtaat

SEQ ID NO: 4866 - protein, 735 aa, Adeno-associated virus
MAADGYPPDWLEDTLSEGIRQWWKLKPGPPPPKPAERHKDDSRGLVLPGYKYLGPFNGLDKGEPVNEADAAALEHDKAYDRQLDSGDNPYLKYNHADAEFQERLKEDTSFGGNLGRAVFQAKKRVLEPLGLVEEPVKTAPGKKRPVEHSPVEPDSSSGTGKAGQRPARKRLNFGQTGDADSVPDPQPLGQPPAAPSGLGSTTMATGSGAPMADNNEGADGVGNSSGNWHCDSQWLGDRVITTSTRTWALPTYNNHLYKQISSQSGASNDNHYFGYSTPWGYFDFNRFHCHFSPRDWQRLINNNWGFRPKRLNFKLFNIQVKEVTQNDGTTTIANNLTSTVQVFTDSEYQLPYVLGSAHQGCLPPFPADVFMVPQYGYLTLNNGSQAVGRSSFYCLEYFPSQMLRTGNNFQFSYTFEDVPFHSSYAHSQSLDRLMNPLIDQYLYYLNKTQTNSGTLQQSRLLFSQAGPTNMSLQAKNWLPGPCYRQQRLSKQANDNNNSNFPWTAATKYHLNGRDSLVNPGPAMASHKDDEEKFFPMHGTLIFGKQGTNANDADLENVMITDEEEIRATNPVATEQYGTVSNNLQNSNTGPTTGTVNRQGALPGMVWQDRDVYLQGPIWAKIPHTDGHFHPSPLMGGFGLKHPPPQIMIKNTPVPANPPTNFSSAKFASFITQYSTGQVSVEIEWELQKENSKRWNPEIQYTSNYNKSVNVDFTVDTNGVYSEPRPIGTRYLTRNL

SEQ ID NO: 4867 - DNA, 2208 bp, Adeno-associated virus
atggctgccgatggttatcttccagattggctcgaggacactctctctgaaggaataagacagtggtggaagctcaaacctggcccaccaccaccaaagcccgcagagcggcataaggacgacagcaggggtcttgtgcttcctgggtacaggtacctcggacccttcaacggactcgacaagggagagccggtcaacgaggcagacgccgcggccctcgagcacgacaaggcctacgaccggcagctcgacagcggagacaacccgtacctcaagtacaaccacgtcgacgcggagtttcaggagcgtcttaaagaagatacgtcttttgggggcaacctcggacgagcagtcttccaggccaaaaagaggattcttgaacctctgggcctggttgaggaacctgttaaggcggctccgggagaaaagaggccggtagagcactctcctgcggagccagactcctcctcgggaaccggaaaagcgggccagcagcctgcaagaaagagattgaattttggtcagactggagacgcagactcagtacctgacccccagcctctcggacagccaccagcagccccctctggtctgggaactaatacgatggcttcaggcagtggcgcaccaatggcagacaataacgagggcgccgacggagtgggtaattcctcgggaaattggcattgcgattccacatggatgggcgacagagtcatcaccaccagcacccgcacctgggccctgcccacctacaacaaccatctgtacaagcaaatctccagccagtctggagccagcaacgacaaccactactttggctacagcaccccctgggggcattttgacttcaacagattccactgccacttctccccacgtgactggcaaagactcatcaacaacaactggggattccggcccaagagactcagcttcaagctctttaacattcaagtcaaagaggtcacgcagaatgacggtacgacgacgattgccaataaccttaccagcacggttcaggtgtttactgactcggagtaccagctcccgtacgtcctcggctcggcgcatcaaggatgcctcccgccgttcccagcagacgtcttcatggtgccacagtatggatacctcaccctgaacaacggcagtcaggcggtaggacgctcttccttttactgcctggagtactttccttctcagatgcttcgtaccggaaacaactttaccttcagctacacctttgaagacgttcctttccatagcagctacgctcacagccaaagtctggaccgtctcatgaatcctctcatcgaccagtacctgtattacttgagcagaacaaacactccaagcggaaccaccacgatgtccaggcttcagttttctcaggccggagcaagtgacattcgggaccagtctagaaactggcttcctggaccctgttaccgccagcagcgagtatcaaagacagctgcggacaacaacaacagtgattactcgtggactggagctaccaagtaccacctcaatggaagagactctctggtgaatccgggcccagctatggccagccacaaggacgatgaagaaaaatattttcctcagagcggggttctcatctttggaaaacaagactcgggaaaaactaatgtggacattgaaaaggttatgattacagacgaagaggaaatcaggaccaccaatcccgtggctacggagcagtatggttctgtatctaccaacctccagagcggcaacacacaagcagctacctcagatgtcaacacacaaggcgttcttccaggcatggtctggcaggacagagacgtgtacctgcaggggcccatctgggcaaagattccacacacggacggacattttcacccctctccccccatgggcggattcggacttaaacaccctcctccacaaattctcatcaagaacaccccggtacctgcgaatccttcgaccactttcagtgcggcaaagtttgcttccttcatcacacagtactccacggggcaggtcagcgtggagatcgagtgggagctgcagaaggagaacagcaaacgctggaatcccgaaattcagtacacttccaactacaacaaatctgttaatgtggactttactgtggacactaatggtgtgtattcagagcctcgccccattggcgccagatacctgactcgtaatctgtaa

SEQ ID NO: 4868 - protein, 735 aa, Adeno-associated virus
MAADGYLPDWLEDTLSEGIRQWWKLKPGPPPPKPAERHKDDSRGLVLPGYRYLGPFNGLDKGEPVNEADAAALEHDKAYDRQLDSGDNPYLKYNHVDAEFQERLKEDTSFGGNLGRAVFQAKKRILEPLGLVEEPVKAAPGEKRPVEHSPAEPDSSSGTGKAGQQPARKRLNFGQTGDADSVPDPQPLGQPPAAPSGLGTNTMASGSGAPMADNNEGADGVGNSSGNWHCDSTWMGDRVITTSTRTWALPTYNNHLYKQISSQSGASNDNHYFGYSTPWGHFDFNRFHCHFSPRDWQRLINNNWGFRPKRLSFKLFNIQVKEVTQNDGTTTIANNLTSTVQVFTDSEYQLPYVLGSAHQGCLPPFPADVFMVPQYGYLTLNNGSQAVGRSSFYCLEYFPSQMLRTGNNFTFSYTFEDVPFHSSYAHSQSLDRLMNPLIDQYLYYLSRTNTPSGTTTMSRLQFSQAGASDIRDQSRNWLPGPCYRQQRVSKTAADNNNSDYSWTGATKYHLNGRDSLVNPGPAMASHKDDEEKYFPQSGVLIFGKQDSGKTNVDIEKVMITDEEEIRTTNPVATEQYGSVSTNLQSGNTQAATSDVNTQGVLPGMVWQDRDVYLQGPIWAKIPHTDGHFHPSPPMGGFGLKHPPPQILIKNTPVPANPSTTFSAAKFASFITQYSTGQVSVEIEWELQKENSKRWNPEIQYTSNYNKSVNVDFTVDTNGVYSEPRPIGARYLTRNL

SEQ ID NO: 4869 - DNA, 2208 bp, Adeno-associated virus
atggctgccgatggttatcttccagattggctcgaggacaccctctctgaaggaataagacagtggtggaagctcaaacctggcccaccaccaccaaagcccgcagagcggcataaggacgacagcaggggtcttgtgcttcctgggtacaagtacctcggacccttcaacggactcgacaagggagagccggtcaacgaggcagacgccgcggccctcgagcacgacaaggcctacgaccggcagctcgacagcggagataacccgtacctcaagtacaaccacgccgacgcggagtttcaggagcgccttaaagaggatacgtcttttgggggcaacctcggacgagcagtcttccaggccaaaaagaggattcttgaacctctgggcctggttgaggaacctgttaagacggctccgggaaaaaagaggccggtagagcactctcctgcggagccagactcctcctcgggaaccggaaaagcgggccagcagcctgcaagaaagagattgaattttggtcagactggagacgcagactcagtacctgacccccggcctctcggacagccaccagcagccccctctggtctgggaactaatacgatggcttcaggcagtggcgcaccaatggcagacaataacgagggcgccgacggagtgggtaattcctcgggaaattggcattgcgattccacatggatgggcgacagagtcatcaccaccagcacccgcacctgggccctgcccacctacaacaaccatctgtacaagcaaatctccagccagtctggagccagcaacgacaaccactactttggctacagcaccccctgggggtattttgacttcaacagattccactgccacttctccccacgtgactggcaaagactcatcaacaacaactggggattccggcccaagagactcagcttcaagctctttaacattcaagtcaaagaggtcacgcagaatgacggtacgacgacgattgccaataaccttaccagcacggttcaggtgtttactgactcggagtaccagctcccgtacgtcctcggctcggcgcatcaaggatgcctcccgccgttcccagcagacgtcttcatggtgccacagtatggatacctcaccctgaacaacggcagtcaggcggtaggacgctcttccttttactgcctggagtactttccttctcagatgcttcgtaccggaaacaactttaccttcagctacacctttgaagacgttcctttccatagcagctacgctcacagccaaagtctggaccgtctcatgaatcctctcatcgaccagtacctgtattacttgagcagaacaaacactccaagcggaaccaccacgatgtccaggcttcagttttctcaggccggagcaagtgacattcgggaccagtctagaaactggcttcctggaccctgttaccgccagcagcgagtatcaaagacagctgcggacaacaacaacagtgattactcgtggactggagctaccaagtaccacctcaatggaagagactctctggtgaatccgggcccagctatggccagccacaaggacgatgaagaaaaatattttcctcagagcggggttctcatctttggaaaacaagactcgggaaaaactaatgtggacattgaaaaggttatgattacagacgaagaggaaatcaggaccaccaatcccgtggctacggagcagtatggttctgtatctaccaacctccagagcggcaacacacaagcagctacctcagatgtcaacacacaaggcgttcttccaggcatggtctggcaggacagagacgtgtacctgcaggggcccatctgggcaaagattccacacacggacggacattttcacccctctcccctcatgggcggattcggacttaaacaccctcctccacaaattctcatcaagaacaccccggtacctgcgaatccttcgaccactttcagtgcggcaaagtttgcttccttcatcacacagtactccacggggcaggtcagcgtggagatcgagtgggagctgcagaaggagaacagcaaacgctggaatcccgaaattcagtacacttccaactacaacaaatctgttaatgtggactttactgtggacactaatggtgtgtattcagagcctcgccccattggcaccagatacctgactcgtaatctgtaa

SEQ ID NO: 4870 - protein, 735 aa, Adeno-associated virus
MAADGYLPDWLEDTLSEGIRQWWKLKPGPPPPKPAERHKDDSRGLVLPGYKYLGPFNGLDKGEPVNEADAAALEHDKAYDRQLDSGDNPYLKYNHADAEFQERLKEDTSFGGNLGRAVFQAKKRILEPLGLVEEPVKTAPGKKRPVEHSPAEPDSSSGTGKAGQQPARKRLNFGQTGDADSVPDPRPLGQPPAAPSGLGTNTMASGSGAPMADNNEGADGVGNSSGNWHCDSTWMGDRVITTSTRTWALPTYNNHLYKQISSQSGASNDNHYFGYSTPWGYFDFNRFHCHFSPRDWQRLINNNWGFRPKRLSFKLFNIQVKEVTQNDGTTTIANNLTSTVQVFTDSEYQLPYVLGSAHQGCLPPFPADVFMVPQYGYLTLNNGSQAVGRSSFYCLEYFPSQMLRTGNNFTFSYTFEDVPFHSSYAHSQSLDRLMNPLIDQYLYYLSRTNTPSGTTTMSRLQFSQAGASDIRDQSRNWLPGPCYRQQRVSKTAADNNNSDYSWTGATKYHLNGRDSLVNPGPAMASHKDDEEKYFPQSGVLIFGKQDSGKTNVDIEKVMITDEEEIRTTNPVATEQYGSVSTNLQSGNTQAATSDVNTQGVLPGMVWQDRDVYLQGPIWAKIPHTDGHFHPSPLMGGFGLKHPPPQILIKNTPVPANPSTTFSAAKFASFITQYSTGQVSVEIEWELQKENSKRWNPEIQYTSNYNKSVNVDFTVDTNGVYSEPRPIGTRYLTRNL

SEQ ID NO: 4871 - DNA, 2208 bp, Adeno-associated virus
atggctgccgatggttatcttccagattggctcgaggacactctctctgaaggaataagacagtggtggaagctcaaacctggcccaccaccaccaaagcccgcagagcggcataaggacgacagcaggggtcttgtgcttcctgggtacaagtacctcggacccttcaacggactcgacaagggagagccggtcaacgaggcagacgccgcggccctcgagcacgacaaggcctacgaccggcagctcgacagcggagacaacccgtacctcaagtacaaccacgccgacgcggagtttcaggagcgccttaaaggagatacgtcttttgggggcaacctcggacgagcagtcttccaggccaaaaagaggattcttgaacctctgggcctggttgaggaacctgttaagacggctccgggaaaaaagaggccggtagagcactctcctgcggagccagactcctcctcgggaaccggaaaagcgggccagcagcctgcaagaaagagattgaattttggtcagactggagacgcagactcagtacctgacccccagcctctcggacagccaccagcagccccctctggtctgggaactaatacgatggcttcaggcagtggcgcaccaatggcagacaataacgagggcgccgacggagtgggtaattcctcgggaaattggcattgcgattccacatggatgggcggcagagtcatcaccaccagcacccgcacctgggccctgcccacctacaacaaccatctgtacaagcaaatctccagccagtctggagccagcaacgacaaccactactttggctacagcaccccctgggggtattttgacttcaacagattccactgccacttctccccacgtgactggcaaagactcatcaacaacaactggggattccggcccaagagactcagcttcaagctctttaacattcaagtcaaagaggtcacgcagaatgacggtacgacgacgattgccaataaccttaccagcacggttcaggtgtttactgactcggagtaccagctcccgtacgtcctcggctcggcgcatcaaggatgcctcccgccgttcccagcagacgtcttcatggtgccacagtatggatacctcaccctgaacaacggcagtcaggcggtaggacgctcttccttttactgcctggagtactttccttctcagacgcttcgtaccggaaacaactttaccttcagctacacctttgaagacgttcctttccatagcagctacgctcacagccaaagtctggaccgtctcatgaatcctctcatcgaccagtacctgtattacttgagcagaacaaacactccaagcggaaccaccacgatgtccaggcttcagttttctcaggccggagcaagtgacattcgggaccagtctagaaactggcttcctggaccctgttaccgccagcagcgagtatcaaagacagctgcggacaacaacaacagtgattactcgtggactggagctaccaagtaccacctcaatggaagagactctctggtgaatccgggcccagctatggccagccacaaggacgatgaagaaaaatattttcctcagagcggggttctcatctttggaaaacaagactcgggaaaaactaatgtggacattgaaaaggttatgattacagacgaagaggaaatcaggaccaccaatcccgtggctacggagcagtatggttctgtatctaccaacctccagagcggcaacacacaagcagctacctcagatgtcaacacacaaggcgttcttccaggcatggtctggcaggacagagacgtgtacctgcaggggcccatctgggcaaagattccacacacggacggacattttcacccctctcccctcatgggcggattcggacttaaacaccctcctccacaaattctcatcaagaacaccccggtacctgcgaatccttcgaccactttcagtgcggcaaagtttgcttccttcatcacacagtactccacggggcaggtcagcgtggagatcgagtgggagctgcagaaggagaacagcaaacgctggaatcccgaaattcagtacacttccaactacaacaaatctgttaatgtggactttactgtggacactaatggtgtgtattcagagcctcgccccattggcaccagatacctgactcgtaatctgtaa

SEQ ID NO: 4872 - protein, 735 aa, Adeno-associated virus
MAADGYLPDWLEDTLSEGIRQWWKLKPGPPPPKPAERHKDDSRGLVLPGYKYLGPFNGLDKGEPVNEADAAALEHDKAYDRQLDSGDNPYLKYNHADAEFQERLKGDTSFGGNLGRAVFQAKKRILEPLGLVEEPVKTAPGKKRPVEHSPAEPDSSSGTGKAGQQPARKRLNFGQTGDADSVPDPQPLGQPPAAPSGLGTNTMASGSGAPMADNNEGADGVGNSSGNWHCDSTWMGGRVITTSTRTWALPTYNNHLYKQISSQSGASNDNHYFGYSTPWGYFDFNRFHCHFSPRDWQRLINNNWGFRPKRLSFKLFNIQVKEVTQNDGTTTIANNLTSTVQVFTDSEYQLPYVLGSAHQGCLPPFPADVFMVPQYGYLTLNNGSQAVGRSSFYCLEYFPSQTLRTGNNFTFSYTFEDVPFHSSYAHSQSLDRLMNPLIDQYLYYLSRTNTPSGTTTMSRLQFSQAGASDIRDQSRNWLPGPCYRQQRVSKTAADNNNSDYSWTGATKYHLNGRDSLVNPGPAMASHKDDEEKYFPQSGVLIFGKQDSGKTNVDIEKVMITDEEEIRTTNPVATEQYGSVSTNLQSGNTQAATSDVNTQGVLPGMVWQDRDVYLQGPIWAKIPHTDGHFHPSPLMGGFGLKHPPPQILIKNTPVPANPSTTFSAAKFASFITQYSTGQVSVEIEWELQKENSKRWNPEIQYTSNYNKSVNVDFTVDTNGVYSEPRPIGTRYLTRNL

SEQ ID NO: 4873 - DNA, 2208 bp, Adeno-associated virus
atggctgccgatggttatcttccagattggctcgaggacactctctctgaaggaataagacagtggtggaagctcaaacctggcccaccaccaccaaagcccgcagagcggcataaggacgacagcaggggtcttgtgcttcctgggtacaagtacctcggacccttcaacggactcgacaagggagagccggtcaacgaggcagacgccgcggccctcgagcacgacaaggcctacgaccggcagctcgacagcggagacaacccgtacctcaagtacaaccacgccgacgcggagtttcaggagcgtcttaaagaagatacgtcttttgggggcaacctcggacgagcagtcttccaggccaaaaagaggattcttgaacctctgggcctggttgaggaacctgttaagacggctccgggaaaaaagaggccggtagagcactctcctgcggagccagactcctcctcgggaaccggaaaagcgggccagcagcctgcaagaaagagattgaattttggtcagactggagacgcagactcagtacctgacccccagcctctcggacagccaccagcagccccctctggtctgggaactaatacgatggcttcaggcagtggcgcaccaatggcagacaataacgagggcgccgacggagtgggtaattcctcgggaaattggcattgcgattccacatggatgggcgacagagtcatcaccaccagcacccgcacctgggccctgcccacctgcaacaaccatctgtacaagcaaatctccagccagtctggagccagcaacgacaaccactactttggctacagcaccccctgggggtattttgacttcaacagattccactgccacttctccccacgtgactggcaaagactcatcaacaacaactggggattccggcccaagagactcagcttcaagctctttaacattcaagtcaaagaggtcacgcagaatgacggtacgacgacgattgccaataaccttaccagcacggttcaggtgtttactgactcggagtaccagctcccgtacgtcctcggctcggcgcatcaaggatgcctcccgccgttcccagcagacgtcttcatggtgccacagtatggatacctcaccctgaacaacggcagtcaggcggtaggacgctcttccttttactgcctggagtattttccttctcagatgcttcgtaccggaaacaactttaccttcagctacacctttgaagacgttcctttccatagcagctacgctcacagccaaagtctggaccgtctcatgaatcctctcatcgaccagtacctgtattacttgagcagaacaaacactccaagcggaaccaccacgatgtccaggcttcagttttctcaggccggagcaagtgacattcgggaccagtctagaaactggcttcctggaccctgttaccgccagcagcgagtatcaaagacagctgcggacaacaacaacagtgattactcgtggactggagctaccaagtaccacctcaatggaagagactctctggtgaatccgggcccagctatggccagccacaaggacgatgaagaaaaatattttcctcagagcggggttctcatctttggaaaacaagactcgggaaaaactaatgtggacattgaaaaggttatgattacagacgaagaggaaatcaggaccaccaatcccgtggctacggagcagtatggttctgtatctacctacctccagagcggcaacacacaagcagctacctcagatgtcaacacacaaggcgttcttccaggcatggtctggcaggacagagacgtgtacctgcgggggcccatctgggcaaagattccacacacggacggacattttcacccctctcccctcatgggcggatttggacttaaacaccctcctccacaaattctcatcaagaacaccccggtacctgcgaatccttcgaccactttcagtgcggcaaagtttgcttccttcatcacacagtactccacggggcaggtcagcgtggagatcgagtgggagctgcagaaggagaacagcaaacgctggaatcccgaaattcagtacacttccaactacaacaaatctgttaatgtggactttactgtggacactaatggtgtgtattcagagcctcgccccattggcaccagatacctgactcgtaatctgtaa

SEQ ID NO: 4874 - protein, 735 aa, Adeno-associated virus
MAADGYLPDWLEDTLSEGIRQWWKLKPGPPPPKPAERHKDDSRGLVLPGYKYLGPFNGLDKGEPVNEADAAALEHDKAYDRQLDSGDNPYLKYNHADAEFQERLKEDTSFGGNLGRAVFQAKKRILEPLGLVEEPVKTAPGKKRPVEHSPAEPDSSSGTGKAGQQPARKRLNFGQTGDADSVPDPQPLGQPPAAPSGLGTNTMASGSGAPMADNNEGADGVGNSSGNWHCDSTWMGDRVITTSTRTWALPTCNNHLYKQISSQSGASNDNHYFGYSTPWGYFDFNRFHCHFSPRDWQRLINNNWGFRPKRLSFKLFNIQVKEVTQNDGTTTIANNLTSTVQVFTDSEYQLPYVLGSAHQGCLPPFPADVFMVPQYGYLTLNNGSQAVGRSSFYCLEYFPSQMLRTGNNFTFSYTFEDVPFHSSYAHSQSLDRLMNPLIDQYLYYLSRTNTPSGTTTMSRLQFSQAGASDIRDQSRNWLPGPCYRQQRVSKTAADNNNSDYSWTGATKYHLNGRDSLVNPGPAMASHKDDEEKYFPQSGVLIFGKQDSGKTNVDIEKVMITDEEEIRTTNPVATEQYGSVSTYLQSGNTQAATSDVNTQGVLPGMVWQDRDVYLRGPIWAKIPHTDGHFHPSPLMGGFGLKHPPPQILIKNTPVPANPSTTFSAAKFASFITQYSTGQVSVEIEWELQKENSKRWNPEIQYTSNYNKSVNVDFTVDTNGVYSEPRPIGTRYLTRNL

SEQ ID NO: 4875 - DNA, 2208 bp, Adeno-associated virus; identical to SEQ ID NO: 4869

SEQ ID NO: 4876 - protein, 735 aa, Adeno-associated virus; identical to SEQ ID NO: 4870

SEQ ID NO: 4877 - DNA, 2208 bp, Adeno-associated virus
atggctgccgatggttatcttccagattggctcgaggacactctctctgaaggaataagacagtggtggaagctcaaacctggcccaccaccaccaaagcccgcagagcggcataaggacggcagcaggggtcttgtgcttcctgggtacaagtacctcggacccttcaacggactcgacaagggagagccggtcaacgaggcagacgccgcggccctcgagcacgacaaggcctacgaccggcagctcaacagcggagacaacccgtacctcaagtacaaccacgccgacgcggagtttcaggagcgccttaaagaagatacgtcttttgggggcaacctcggacgagcagtcttccaggcaaaaaagagggttcttgaacctctgggcctggttgaggagcctgttaaaacggctccgggaaaaaagagaccggtagagcactctcctgcggagccagactcctcctcgggaaccggaaaagcgggccagcagcctgcaagaaagagattgaattttggtcagactggagacgcagactccgtacctgacccccagcctctcggacagccaccagcagccccctctggtctgggatctactacaatggctacaggcagtggcgcaccaatggcagacaataacgagggtgccgatggagtgggtaattcctcaggaaattggcattgcgattcccaatggctgggcgacagagtcatcaccacaagcactcgaacctgggccctgcccacctacaacaaccacctctacaagcaaatctccagccaatcaggagcctcaaacgacaaccactattttggctacagcaccccttgggggtattttgacttcaacagattccactgccacttttcaccacgtgactggcaaagactcatcaacaacaactggggattccgacccaagagactcaacttcaagctctttaacattcaagtcaaagaggtcacgcagaatgacggtacgacgacgattgccaataaccttaccagcacggttcaggtgtttactgactcggagtaccagctcccgtacgtcctcggctcggcgcatcaaggatgcctcccgccgttcccagcggacgtcttcatggtcccacagtatggatacctcaccctgaacaacgggagtcaggcggtaggacgctctcccttttactgcctggagtactttccttctcagatgctgcgtactggaaacaactttcagttcagctacacttttgaagacgtgcctttccacagcagctacgctcacagccagagtctggatcggctgatgaatcctctgatcgaccagtacctgtattatctgaacaagacacaaacaaatagtggaactcttcagcagtctcggctactgtttagccaagctggacccaccaacatgtctcttcaagctaaaaactggctgcctggaccttgctacagacagcagcgtctgtcaaagcaggcaaacgacaacaacaacagcaactttccctggactgcagctacaaagtatcatctaaatggccgggactcgttggttaatccaggaccagctatggccagtcacaaggatgacgaagaaaagtttttccccatgcatggaaccctgatatttggtaaacaaggaacaaatgccaacgacgcggatttggaaaatgtcatgattacagatgaagaagaaatcaggaccaccaatcccgtggctacggagcagtacgggactgtgtcaaataatttgcaaaactcaaacactggtccaactactggaactgtcaatcaccaaggagcgttacctggtatggtgtggcaggatcgagatgtgtaccttcagggacccatttgggccaagattcctcacaccgatggacactttcatccttctccactgatgggaggttttggactcaaacacccgcctcctcagattatgatcaaaaacactcccgttccagccaatcctcctacaaacttcagttctgccaagtttgcttctttcatcacacagtattccacggggcaggtcagcgtggagatcgagtgggagctgcagaaggagaacagcaaacgctggaatcccgaaattcagtacacttccaactacaacaaatctgttaatgtggactttactgtggacaataatggcgtgtactcagagcctcgccccattggcaccagatacctgactcgtaatctgtaa

SEQ ID NO: 4878 - protein, 735 aa, Adeno-associated virus
MAADGYLPDWLEDTLSEGIRQWWKLKPGPPPPKPAERHKDGSRGLVLPGYKYLGPFNGLDKGEPVNEADAAALEHDKAYDRQLNSGDNPYLKYNHADAEFQERLKEDTSFGGNLGRAVFQAKKRVLEPLGLVEEPVKTAPGKKRPVEHSPAEPDSSSGTGKAGQQPARKRLNFGQTGDADSVPDPQPLGQPPAAPSGLGSTTMATGSGAPMADNNEGADGVGNSSGNWHCDSQWLGDRVITTSTRTWALPTYNNHLYKQISSQSGASNDNHYFGYSTPWGYFDFNRFHCHFSPRDWQRLINNNWGFRPKRLNFKLFNIQVKEVTQNDGTTTIANNLTSTVQVFTDSEYQLPYVLGSAHQGCLPPFPADVFMVPQYGYLTLNNGSQAVGRSPFYCLEYFPSQMLRTGNNFQFSYTFEDVPFHSSYAHSQSLDRLMNPLIDQYLYYLNKTQTNSGTLQQSRLLFSQAGPTNMSLQAKNWLPGPCYRQQRLSKQANDNNNSNFPWTAATKYHLNGRDSLVNPGPAMASHKDDEEKFFPMHGTLIFGKQGTNANDADLENVMITDEEEIRTTNPVATEQYGTVSNNLQNSNTGPTTGTVNHQGALPGMVWQDRDVYLQGPIWAKIPHTDGHFHPSPLMGGFGLKHPPPQIMIKNTPVPANPPTNFSSAKFASFITQYSTGQVSVEIEWELQKENSKRWNPEIQYTSNYNKSVNVDFTVDNNGVYSEPRPIGTRYLTRNL

SEQ ID NO: 4879 - DNA, 2208 bp, Adeno-associated virus
atggctgccgatggttatcttccagattggctcgaggacactctctctgaaggaataagacagtggtggaagctcaaacctggcccaccaccaccaaagcccgcagagcggcataaggacgacagcaggggtcttgtgcttcctgggtacaagtacctcggacccttcaacggactcgacaagggagagccggtcaacgaggcagacgccgcggccctcgagcacgacaaggcctacgaccggcagctcgacagcggagacaacccgtacctcaagtacaaccacgccgacgcggagtttcaggagcgtcttaaagaagatacgtcttttgggggcaacctcggacgagcagtcttccaggccaaaaagaggattcttgaacctctgggcctggttgaggaacctgttaagacggctccgggaaaaaagaggccggtagagcactctcctgcggagccagactcctcctcgggaaccggaaaagcgggccagcagcctgcaagaaagagattgaattttggtcagactggagacgcagactcagtacctgacccccagcctctcggacagccaccagcagccccctctggtctgggaactaatacgatggcttcaggcagtggcgcaccaatggcagacaataacgagggcgccgacggagtgggtaattcctcgggaaattggcattgcgattccacatggatgggcgacagagtcatcaccaccagcacccgcacctgggccctgcccacctacaacaaccatctgtacaagcaaatctccagccagtctggagccagcaacgacaaccactactttggctacagcaccccctgggggtattttgacttcaacagattccactgccacttctccccacgtgactggcaaagactcatcaacaacaactggggattccggcccaagagactcagcttcaagctctttaacattcaagtcaaagaggtcacgcagaatgacggtacgacgacgattgccaataaccttaccagcacggttcaggtgtttactgactcggagtaccagctcccgtacgtcctcggctcggcgcatcaaggatgcctcccgccgttcccagcagacgtcttcatggtgccacagtatggatacctcaccctgaacaacggcagtcaggcggtaggacgctcttccttttactgcctggagtactttccttctcagatgcttcgtaccggaaacaactttaccttcagctacacctttgaagacgttcctttccatagcagctacgctcacagccaaagtctggaccgtctcatgaatcctctcatcgaccagtacctgtattacttgagcagaacaaacactccaagcggaaccaccacgatgtccaggcttcagttttctcaggccggagcaagtgacattcgggaccagtctagaaactggcttcctggaccctgttaccgccagcagcgagtatcaaagacagctgcggacaacaacaacagtgattactcgtggactggagctaccaagtaccacctcaatggaagagactctctggtgaatccgggcccagctatggccagccacaaggacgatgaagaaaaatattttcctcagagcggggttctcatctttggaaaacaagactcgggaaaaactaatgtggacattgaaaaggttatgattacagacgaagaggaaatcaggaccaccaatcccgtggctacggagcagtatggttctgtatctaccaacctccagagcggcaacacacaagcagctacctcagatgtcaacacacaaggcgttcttccaggcatggtctggcaggacagagacgtgtacctgcaggggcccatctgggcaaagattccacacacggacggacattttcacccctctcccctcatgggcggattcggacttaaacaccctcctccacaaattctcatcaagaacaccccggtacctgcgaatccttcgaccactttcagtgcggcaaagtttgcttccttcatcacacagtactccacggggcaggtcagcgtggagatcgagtgggagctgcagaaggagaacagcaaacgctggaatcccgaaattcagtacacttccaactacaacaaatctgttaatgtggactttactgtggacactaatggtgtgtattcagagcctcgccccattggcaccagatacctgactcgtaatctgtaa

SEQ ID NO: 4880 - protein, 735 aa, Adeno-associated virus
MAADGYLPDWLEDTLSEGIRQWWKLKPGPPPPKPAERHKDDSRGLVLPGYKYLGPFNGLDKGEPVNEADAAALEHDKAYDRQLDSGDNPYLKYNHADAEFQERLKEDTSFGGNLGRAVFQAKKRILEPLGLVEEPVKTAPGKKRPVEHSPAEPDSSSGTGKAGQQPARKRLNFGQTGDADSVPDPQPLGQPPAAPSGLGTNTMASGSGAPMADNNEGADGVGNSSGNWHCDSTWMGDRVITTSTRTWALPTYNNHLYKQISSQSGASNDNHYFGYSTPWGYFDFNRFHCHFSPRDWQRLINNNWGFRPKRLSFKLFNIQVKEVTQNDGTTTIANNLTSTVQVFTDSEYQLPYVLGSAHQGCLPPFPADVFMVPQYGYLTLNNGSQAVGRSSFYCLEYFPSQMLRTGNNFTFSYTFEDVPFHSSYAHSQSLDRLMNPLIDQYLYYLSRTNTPSGTTTMSRLQFSQAGASDIRDQSRNWLPGPCYRQQRVSKTAADNNNSDYSWTGATKYHLNGRDSLVNPGPAMASHKDDEEKYFPQSGVLIFGKQDSGKTNVDIEKVMITDEEEIRTTNPVATEQYGSVSTNLQSGNTQAATSDVNTQGVLPGMVWQDRDVYLQGPIWAKIPHTDGHFHPSPLMGGFGLKHPPPQILIKNTPVPANPSTTFSAAKFASFITQYSTGQVSVEIEWELQKENSKRWNPEIQYTSNYNKSVNVDFTVDTNGVYSEPRPIGTRYLTRNL

SEQ ID NO: 4881 - DNA, 2208 bp, Adeno-associated virus
atggctgccgatggttatcttccagattggctcgaggacactctctctgaaggaataagacagtggtggaagctcaaacctggcccaccaccaccaaagcccgcagagcggcataaggacgacagcaggggtcttgtgcttcctgggtacaagtacctcggacccttcaacggactcgacaagggagagccggtcaacgaggcagacgccgcggccctcgagcacgacaaggcctacgaccggcagctcgacagcggagacaacccgtacctcaagtacaaccacgccgacgcggagtttcaggagcgtcttaaagaagatacgtcttttgggggcaacctcggacgagcagtcttccaggccaaaaagaggattcttgaacctctgggcctggttgaggaacctgttaagacggctccgggaaaaaagaggccggtagagcactctcctgcggagccagactcctcctcgggaaccggaaaagcgggccagcagcctgcaagaaagagattgaattttggtcagactggagacgcagactcagtacctgacccccagcctctcggacagccaccagcagccccctctggtctgggaactaatacgatggcttcaggcagtggcgcaccaatggcagacaataacgagggcgccgacggagtgggtaattcctcgggaaattggcattgcgattccacatggatgggcgacagagtcatcaccaccagcacccgcacctgggccctgcccacctacaacaaccatctgtacaagcaaatctccagccagtctggagccagcaacgacaaccactactttggctacagcaccccctgggggtatttcgacttcaacagattccactgccacttctccccacgtgactggcaaagactcatcaacaacaactggggattccggcccaagagactcagcttcaagctctttaacattcaagtcaaagaggtcacgcagaatgacggtacgacgacgattgccaataaccttaccagcacggttcaggtgtttactgactcggggtaccagctcccgtacgtcctcggctcggcgcatcaaggatgccttccgccgttcccagcagacgtcttcatggtgccacagtatggatacctcaccctgaacaacggcagtcaggcggtaggacgctcttccttttactgcctggagtactttccttctcagatgcttcgtaccggaaacaactttaccttcagctacacctttgaagacgttcctttccatagcagctacgctcacggccaaagtctggaccgtctcatgaatcctctcatcgaccagtacctgtattacttgagcagaacaaacactccaagcggaaccaccacgatgtccaggcttcagttttctcaggccggagcaagtgacgttcgggaccagtctagaaactggcttcctggaccctgttaccgccagcagcgagtatcaaagacagctgcggacaacaacaacagtgattactcgtggactggagctaccaagtaccacctcaatggaagagactctctggtgaatccgggcccagctatggccagccacaaggacgatgaagaaaaatattttcctcagagcggggttctcgtctttggaaaacaagactcgggaaaaactaatgtggacattgaaaaggttatgattacagacgaagaggaaatcaggaccaccaatcccgcggctacggagcagtatggttctgtatctaccaacctccagagcggcaacacacaagcagctacctcagatgtcaacacacaaggcgttcttccaggcatggtctggcaggacagagacgtgtacctgcaggggcccatctgggcaaagattccacacacggacggacattttcacccctctcccctcatgggcggattcggacttaaacaccctcctccacaaattctcatcaagaacaccccggtacctgcgaatccttcgaccactttcagtgcggcaaagtttgtttccttcatcacacagtactccacggggcaggtcagcgtggagatcgagtgggagctgcagaaggagaacagcaaacgctggaatcccgaaattcagtacacttccaactacaacaaatctgttaatgtggactttactgtggacactaatggtgtgtattcagagcctcgccccattggcaccagatacctgactcgtaatctgtaa

SEQ ID NO: 4882 - protein, 735 aa, Adeno-associated virus
MAADGYLPDWLEDTLSEGIRQWWKLKPGPPPPKPAERHKDDSRGLVLPGYKYLGPFNGLDKGEPVNEADAAALEHDKAYDRQLDSGDNPYLKYNHADAEFQERLKEDTSFGGNLGRAVFQAKKRILEPLGLVEEPVKTAPGKKRPVEHSPAEPDSSSGTGKAGQQPARKRLNFGQTGDADSVPDPQPLGQPPAAPSGLGTNTMASGSGAPMADNNEGADGVGNSSGNWHCDSTWMGDRVITTSTRTWALPTYNNHLYKQISSQSGASNDNHYFGYSTPWGYFDFNRFHCHFSPRDWQRLINNNWGFRPKRLSFKLFNIQVKEVTQNDGTTTIANNLTSTVQVFTDSGYQLPYVLGSAHQGCLPPFPADVFMVPQYGYLTLNNGSQAVGRSSFYCLEYFPSQMLRTGNNFTFSYTFEDVPFHSSYAHGQSLDRLMNPLIDQYLYYLSRTNTPSGTTTMSRLQFSQAGASDVRDQSRNWLPGPCYRQQRVSKTAADNNNSDYSWTGATKYHLNGRDSLVNPGPAMASHKDDEEKYFPQSGVLVFGKQDSGKTNVDIEKVMITDEEEIRTTNPAATEQYGSVSTNLQSGNTQAATSDVNTQGVLPGMVWQDRDVYLQGPIWAKIPHTDGHFHPSPLMGGFGLKHPPPQILIKNTPVPANPSTTFSAAKFVSFITQYSTGQVSVEIEWELQKENSKRWNPEIQYTSNYNKSVNVDFTVDTNGVYSEPRPIGTRYLTRNL

SEQ ID NO: 4883 - DNA, 2208 bp, Adeno-associated virus
atggctgccgatggttatcttccagattggctcgaggacactctctctgaaggaataagacagtggtggaaactcaaacctggcccaccaccaccaaagcccgcagagcggcataaggacgacagcaggggtcttgtgcttcctgggtacaagtacctcggacccttcaacggactcgacaagggagagccggtcaacgaggcagacgccgcggccctcgagcacgacaaggcctacgaccggcagctcgacagcggagacaacccgtacctcaagtacaaccacgccgacgcggagtttcaggagcgccttaaagaagatacgtcttttgggggcaacctcggacgagcagtcttccaggcaaaaaagagggttctggaacctctgagcctggttgaggagcctgttaagacggctccgggaaaaaagaggccggtagagcactctcccgcagagccagattcctcctccggaactggaaagtcgggcaaccagcctgcaagaaagagattgaatttcggtcagactggagactcagactccgtacctgacccccagcctctcggacagccaccagcagccccctctggtctgggaactaatacgatggctacaggcagtggcgcaccaatggcagacaataacgagggcgccgacggagtgggtaattcctcgggaaattggcattgcgattccacatggatgggcgacagagtcatcaccaccagcacccgaacctgggccctgcccacctacaacaaccatctgtacaagcaaatatccagccagtctggagccagcaacgacaatcactactttggctacagcaccccctgggggtattttgacttcaacagattccactgccacttttcaccacgtgactggcaaagactcatcaacaacaactggggattccgacccaagagactcaacttcaagctctttaacattcaagtcaaagaggtcacgcagaatgacggtacgacgacgattgccaataaccttaccagcacggttcaggtgtttactgactcggagtaccagctcccgtacgtcctcggctcggcgcatcaaggatgcctcccgccgttcccagcagacgtcttcatggtgccacagtatggatacctcaccctgaacaacgggagtcaggcagtaggacgctcttcattttactgcctagagtactttccttctcagatgctgcgtaccggaaacaactttaccttcagctacacctttgaggacgttcctttccacagcagctacgctcacagccagagtttggaccgtctcatgaatcctctcatcgaccagtacctgtattacttgagcagaacaaacactccaagcggaaccaccacgcagtccaggcttcagttttctcaggccggagcgagtgacattcaggaccagtctaggaactggcttcctggaccctgttaccgtcagcagcgagtatcaaagacatctgcggataacaacaacagtgaatactcgtggactggagctaccaagtaccacctcaatggcagagactctctggtgaatccgggcccggccatggccagccacaaagacgatgaagaaaagttttttcctcagagcggggttcttatctttgggaagcaaggctcagagaaaacaaatgtggatattgaaaaggtcatgattacagacgaagaggaaatcaggaccaccaatcccgtggctacggagcagtatggttctgtatctaccaacctccagagcggcaacacacaagcagctaccgcagatgtcaacacacaaggcgttcttccaggcatggtcgggcaagacagagacgtgtacctgcaggggcctacttgggcaaagattccacacacggacggacattttcacccctctcccctcatgggcggatttggacttaaacaccctcctccacagattctcatcaagaacaccccggtacctgcgaatccttcgaccaccttcagtgcggcaaagtttgcttccttcattacacagtactccacggggcaggtcagcgtggagatcgagtgggagctgcagaaggagaacagcaaacgctggaatcccgagatccagtacacttccaactacaacaagtctgttaatgtggactttactgtggacactaatggcgtgtattcagagcctcgccccattggcaccagatacctgactcgtaatctgtaa

SEQ ID NO: 4884 - protein, 735 aa, Adeno-associated virus
MAADGYLPDWLEDTLSEGIRQWWKLKPGPPPPKPAERHKDDSRGLVLPGYKYLGPFNGLDKGEPVNEADAAALEHDKAYDRQLDSGDNPYLKYNHADAEFQERLKEDTSFGGNLGRAVFQAKKRVLEPLSLVEEPVKTAPGKKRPVEHSPAEPDSSSGTGKSGNQPARKRLNFGQTGDSDSVPDPQPLGQPPAAPSGLGTNTMATGSGAPMADNNEGADGVGNSSGNWHCDSTWMGDRVITTSTRTWALPTYNNHLYKQISSQSGASNDNHYFGYSTPWGYFDFNRFHCHFSPRDWQRLINNNWGFRPKRLNFKLFNIQVKEVTQNDGTTTIANNLTSTVQVFTDSEYQLPYVLGSAHQGCLPPFPADVFMVPQYGYLTLNNGSQAVGRSSFYCLEYFPSQMLRTGNNFTFSYTFEDVPFHSSYAHSQSLDRLMNPLIDQYLYYLSRTNTPSGTTTQSRLQFSQAGASDIQDQSRNWLPGPCYRQQRVSKTSADNNNSEYSWTGATKYHLNGRDSLVNPGPAMASHKDDEEKFFPQSGVLIFGKQGSEKTNVDIEKVMITDEEEIRTTNPVATEQYGSVSTNLQSGNTQAATADVNTQGVLPGMVGQDRDVYLQGPTWAKIPHTDGHFHPSPLMGGFGLKHPPPQILIKNTPVPANPSTTFSAAKFASFITQYSTGQVSVEIEWELQKENSKRWNPEIQYTSNYNKSVNVDFTVDTNGVYSEPRPIGTRYLTRNL

SEQ ID NO: 4885 - DNA, 2208 bp, Adeno-associated virus
atggctgccgatggttatcttccagattggctcgaggacactctctctgaaggaataagacagtggtggaagctcaaacctggcccaccaccaccaaagcccgcagagcggcataaggacgacagcaggggtcttgtgcttcctgggtacaagtacctcggacccttcaacggactcgacaagggagagccggtcaacgaggcagacgccgcggccctcgagcacgacaaggcctacgaccggcagctcgacagcggagacaacccgtacctcaagtacaaccacgccgacgcagagtttcaggagcgccttaaagaagatacgtcttttgggggcaacctcggacgagcagtcttccaggcaaaaaagagggttctggaacctctgggcctggttgaggagcctgttaagacggctccgggaaaaaagaggccggtagagcactctcctgcagagccagattcctcctccggaactggaaagtcgggcaaccagcctgcaagaaagagattgaatttcggtcagactggagactcagactccgtacctgacccccagcctctcggacagccaccagcagccccctctggtctgggaactaatacgatggctacaggcagtggcgcaccaatggcagacaataacgagggcgccgacggagtgggtaattcctcgggaaattggcattgcgattccacatggatgggcgacagagtcatcaccaccagcacccgaacctgggccctgcccacctacaacaaccatctgtacaagcaaatatccagccagtctggagccagcaacgacaatcactactttggctacagcaccccctgggggtattttgacttcaacagattccactgccacttttcaccacgtgactggcaaagactcatcaacaacaactggggattccgacccaagagactcaacttcaagctctttaacattcaagtcaaagaggtcacgcagaatgacggtacgacgacgattgccaataaccttaccagcacggttcaggtgtttactgactcggagtaccagctcccgtacgtcctcggctcggcgcatcaaggatgcctcccgccgttcccagcagacgtcttcatggtgccacagtatggatacctcaccctgaacaacgggagtcaggcagtaggacgctcttcattttactgcctagggtactttccttctcagatgctgcgtaccggaaacaactttaccttcagctacacctttgaggacgttcctttccacagcagctacgctcacagccagagtttggaccgtctcatgaatcctctcatcgaccagtacctgtattacttgagcagaacaaacactccaagcggaaccaccacgcagtccaggcttcagttttctcaggccggagcgagtgacattcgggaccagtctaggaactggcttcctggaccctgttaccgtcagcagcgagtatcaaagacatctgcggataacaacaacagtgaatactcgtggactggagctaccaagtaccacctcaatggcagagactctctggtgaatccgggcccggccatggccagccacaaagacgatgaagaaaagttttttcctcagagcggggttcttatctttgggaagcaaggcccagagaaaacaaatgtggatattgaaaaggtcatgattacagacgaagaggaaatcaggaccaccaatcccgtggctacggagcagtatggttctgtatctaccaacctccagagcggcaacacacaagcagctaccgcagatgtcaacacacaaggcgttcttccaggcatggtctggcaagacagagacgtgtacctgcaggggcctatttgggcaaagattccacacacggacggacattttcacccctctcccctcatgggcggatttggacttaaacaccctcctccacagattctcatcaagaacaccccggtacctgcgaatccttcgaccaccttcagtgcggcaaagtttgcttccttcattacacagtactccacggggcaggtcagcgtggagatcgagtgggagctgcagaaggagaacagcaaacgctggaatcccgagatccagtacacttccaactacaacaagtctgttaatgtggactttactgtggacactaatggcgtgtattcagagcctcgccccattggcaccagatacctgactcgtaatctgtaa

SEQ ID NO: 4886 - protein, 735 aa, Adeno-associated virus
MAADGYLPDWLEDTLSEGIRQWWKLKPGPPPPKPAERHKDDSRGLVLPGYKYLGPFNGLDKGEPVNEADAAALEHDKAYDRQLDSGDNPYLKYNHADAEFQERLKEDTSFGGNLGRAVFQAKKRVLEPLGLVEEPVKTAPGKKRPVEHSPAEPDSSSGTGKSGNQPARKRLNFGQTGDSDSVPDPQPLGQPPAAPSGLGTNTMATGSGAPMADNNEGADGVGNSSGNWHCDSTWMGDRVITTSTRTWALPTYNNHLYKQISSQSGASNDNHYFGYSTPWGYFDFNRFHCHFSPRDWQRLINNNWGFRPKRLNFKLFNIQVKEVTQNDGTTTIANNLTSTVQVFTDSEYQLPYVLGSAHQGCLPPFPADVFMVPQYGYLTLNNGSQAVGRSSFYCLGYFPSQMLRTGNNFTFSYTFEDVPFHSSYAHSQSLDRLMNPLIDQYLYYLSRTNTPSGTTTQSRLQFSQAGASDIRDQSRNWLPGPCYRQQRVSKTSADNNNSEYSWTGATKYHLNGRDSLVNPGPAMASHKDDEEKFFPQSGVLIFGKQGPEKTNVDIEKVMITDEEEIRTTNPVATEQYGSVSTNLQSGNTQAATADVNTQGVLPGMVWQDRDVYLQGPIWAKIPHTDGHFHPSPLMGGFGLKHPPPQILIKNTPVPANPSTTFSAAKFASFITQYSTGQVSVEIEWELQKENSKRWNPEIQYTSNYNKSVNVDFTVDTNGVYSEPRPIGTRYLTRNL

SEQ ID NO: 4887 - protein, 735 aa, Adeno-associated virus
MAADGYLPDWLEDTLSEGIRQWWKLKPGPPPPKPAERHKDDSRGLVLPGYKYLGPFNGLDKGEPVNEADAAALEHDKAYDRQLDSGDNPYLKYNHADAEFQERLKEDTSFGGNLGRAVFQAKKRVLEPLGLVEEPVKTAPGKKRPVEHSPAEPDSSSGTGKSGNQPARKRLNFGQTGDSDSVPDPQPLGQPPAAPSGLGTNTMATGSGAPMADNNEGADGVGNSSGNWHCDSTWMGDRVITTSTRTWALPTYNNHLYKQISSQSGASNDNHYFGYSTPWGYFDFNRFHCHFSPRDWQRLINNNWGFRPKRLNFKLFNIQVKEVTQNDGTTTIANNLTSTVQVFTDSEYQLPYVLGSAHQGCLPPFPADVFMVPQYGYLTLNNGSQAVGRSSFYCLEYFPSQMLRTGNNFTFSYTFEDVPFHSSYAHSQSLDRLMNPLIDQYLYYLSRTNTPSGTTTQSRLQFSQAGASDIRDQSRNWLPGPCYRQQRVSKTSADNNNSEYSWTGATKYHLNGRDSLVNPGPAMASHKDDEEKFFPQSGVLIFGKQGPEKTNVDIEKVMITDEEEIRTTNPVATEQYGSVSTNLQSGNTQAATADVNTQGVLPGMVWQDRDVYLQGPIWAKIPHTDGHFHPSPLMGGFGLKHPPPQILIKNTPVPANPSTTFSAAKFASFITQYSTGQVSVEIEWELQKENSKRWNPEIQYTSNYNKSVNVDFTVDTNGVYSEPRPIGTRYLTRNL

SEQ ID NO: 4888 - protein, 735 aa, Adeno-associated virus; identical to SEQ ID NO: 4887

SEQ ID NO: 4889 - DNA, 2211 bp, Adeno-associated virus
atggctgccgatggttatcttccagattggctcgaggacactctctctgaaggaataagacagtggtggaagctcaaacctggcccaccaccaccaaagcccgcagagcggcataaggacgacagcaggggtcttgtgcttcctgggtacaagtacctcggacccttcaacggactcgacaagggggagccggtcaacgaggcagacgccgcggccctcgagcacgacaaggcctacgaccggcagctcgacagcggagacaacccgtacctcaagtacaaccacgccgacgcagagtttcaggagcgccttaaagaagatacgtcttttgggggcaacctcggacgagcagtcttccaggcgaaaaagagggttcttgaacctctgcggcctggtttgaggaaacctgttaagacggctccgggaaaaaagaggccggtagagcactctcctgtggagccagactcctcctcgggaaccggaaaagcgggccagcagcctgcaagaaaaagattaaattttggtcagactggagacgcagactccgtacctgacccccagcctctcggacagccaccagcagccccctctggtctgggatctactacaatggctacaggcagtggcgcaccaatggcagacaataacgagggtgccgatggagtgggtaattcctcaggaaattggcattgcgattcccaatggctggacgacagagtcatcgccaccagcacccgaacctgggccctgcccacatacaacaaccacctctacaagcaaatctccagccaatcaggagcctgcaacgacaaccactactttggctacagcaccccctgggggtattttgacttcaacagattccactgccacttttcaccacgtgactggcaaagactcatcaacagcaactggggattccggcccaaaagactcaacttcaagctctttaatattcaagtcaaagaggtcacgcagaatgacggtacgacgacgattgccaataaccttaccagcacggttcaggtgtttactgactcggagtaccagctcccgtacgtcccgggctcggcgcatcaaggatgcctcccgccgtttccagcggacgtcttcatggtcccacagtatggatacctcaccctgaacaacgggagtcaggcggtaggacgctcttccttttactgcctggagtactttccttctcagatgctgcgtactggaaacaactttcagttcagctacacttttgaagacgtgcctttccacagcagctacgctcactgccagagtctggatcggctgatgaatcctctgatcgaccagtacctgtattatctgaacaagacacaaacaaatagtggaactcttcagcagtctcggctactgtttagccaagctggaccaaccaacatgtctcttcaagctaaaaactggctgcctggaccttgctacagacagcagcgtctgtcaaaacaggcaaacgacaataacaactgcaactttccctggactgcagctacaaagtatcatctaaatggccgggactcgttggttaatccaggaccagctatggccagtcacaaggatgacgaagaaaagtttttccccatgcatggaaccctgatatttggtaaacaaggaacaaatgccaacgacgcggatttggaaaatgtcatgattacagatgaagaagaaatcaggcccaccaatcccgtggctacggagcagtacgggactgtgtcaaataatttgcaaaactcaaacactggtccaactacaggaactgtcaatcaccaaggagcgttacctggtatggtgtggcaggatcgagacgtgtacctgcagggacccatttgggccaagattcctcacaccgatggacactttcatccttctccactgatgggaggttttggactcaaacacccgcctcctcagatcatgatcaaaagcactcccgttccagccaatcctcccacaaacttcagttctgccaagtttgcttcttccatcacacagtattccacgggacaggtcagcgtggagatcgagtgggagctgcagaaggagaacagcaaacgctggaatcccgaaattcagtacacttccaactacaacaagtctgttaatgtggactttactgtggacactaatggtgtgtattcagagcctcgccccattggcaccagatacctgactcgtaatctgtaa

SEQ ID NO: 4890 - protein, 736 aa, Adeno-associated virus
MAADGYLPDWLEDTLSEGIRQWWKLKPGPPPPKPAERHKDDSRGLVLPGYKYLGPFNGLDKGEPVNEADAAALEHDKAYDRQLDSGDNPYLKYNHADAEFQERLKEDTSFGGNLGRAVFQAKKRVLEPLRPGLRKPVKTAPGKKRPVEHSPVEPDSSSGTGKAGQQPARKRLNFGQTGDADSVPDPQPLGQPPAAPSGLGSTTMATGSGAPMADNNEGADGVGNSSGNWHCDSQWLDDRVIATSTRTWALPTYNNHLYKQISSQSGACNDNHYFGYSTPWGYFDFNRFHCHFSPRDWQRLINSNWGFRPKRLNFKLFNIQVKEVTQNDGTTTIANNLTSTVQVFTDSEYQLPYVPGSAHQGCLPPFPADVFMVPQYGYLTLNNGSQAVGRSSFYCLEYFPSQMLRTGNNFQFSYTFEDVPFHSSYAHCQSLDRLMNPLIDQYLYYLNKTQTNSGTLQQSRLLFSQAGPTNMSLQAKNWLPGPCYRQQRLSKQANDNNNCNFPWTAATKYHLNGRDSLVNPGPAMASHKDDEEKFFPMHGTLIFGKQGTNANDADLENVMITDEEEIRPTNPVATEQYGTVSNNLQNSNTGPTTGTVNHQGALPGMVWQDRDVYLQGPIWAKIPHTDGHFHPSPLMGGFGLKHPPPQIMIKSTPVPANPPTNFSSAKFASSITQYSTGQVSVEIEWELQKENSKRWNPEIQYTSNYNKSVNVDFTVDTNGVYSEPRPIGTRYLTRNL

SEQ ID NO: 4891 - DNA, 2208 bp, Adeno-associated virus
atggctgccgatggttatcttccagattggctcgaggacactctctctgaaggaataagacagtggtggaagctcaaacctggcccaccaccaccaaagcccgcagagcggcataaggacgacagcaggggtcttgtgcttcctgggtacaagtacctcggacccttcaacggactcgacaagggagagccggtcaacgaggcagacgccgcggccctcgagcacgacaaggcctacgaccggcagctcgacagcggagacaacccgtacctcaagtacaaccacgccgacgcggagtttcaggagcgccttaaagaggatacgtcttttgggggcaacctcggacgagcagtcttccaggcaaaaaagagggttctggaacctctgggcctggttgaggagcctgttaagacggctccgggaaaaaagaggccggtagagcactctcctgcagagccagattcctcctccggaactggaaagtcgggcaaccagcctgcaagaaagagattgaatttcggtcagactggagactcagactccgtacctgacccccagcctctcggacagccaccagcagccccctctggtctgggaactaatacgatggctacaggcagtggcgcaccaatggcagacaataacgagggcgccgacggagtgggtaattcctcgggaaattggcattgcgattccacatggatgggcgacagagtcatcaccaccagcacccgaacctgggccctgcccacctacaacaaccatctgtacaagcaaatatccagccagtctggagccagcaacgacaatcactactttggctacagcaccccctgggggtattttgacttcaacagattccactgccacttttcaccacgtgactggcaaagactcatcaacaacaactggggattccgacccaagagactcaacttcaagctctttaacattcaagtcaaagaggtcacgcagaatgacggtacgacgacgattgccaataaccttaccagcacggttcaggtgtttactgactcggagtaccagctcccgtacgtcctcggctcggcgcatcaaggatgcctcccgccgttcccagcagacgtcttcatggtgccacagtatggatacctcaccctgaacaacgggagtcaggcagtaggacgctcttcattttactgcctagagtactttccttctcagatgctgcgtaccggaaacagctttaccttcagctacacctttgaggacgttcctttccacagcagctacgctcacagccagagtttggaccgtctcatgaatcctctcatcgaccagtacctgtattacttgagcagaacaaacactccaagcggaaccaccacgcagtccaggcttcagttttctcaggccggagcgagtgacattcgggaccagtctaggaactggcttcctggaccctgttaccgtcagcagcgagtatcaaagacatctgcggataacaacaacagtgaatactcgtggactggagctaccaagtaccacctcaatggcagagactctctggtgaatccgggcccggccatggccagccacaaagacgatgaagaaaagttctttcctcagagcggggttcttatctttgggaagcaaggctcagagaaaacaaatgtggatattgaaaaggtcatgattacagacgaagaggaaatcaggaccaccaatcccgtggctacggagcagtatggttctgtatctaccaacctccagagcggcaacacacaagcagctaccgcagatgtcaacacacaaggcgttcttccaggcatggtctggcaagacagagacgtgtacctgcaggggcctatttgggcaaagattccacacacggacggacattttcacccctctcccctcatgggcggatttggacttaaacaccctcctccacagattctcatcaagaacaccccggtacctgcgaatccttcgaccaccttcagtgcggcaaagtttgcttccttcattacacagtactccacggggcaggtcagcgtggagatcgagtgggagctgcagaaggagaacagcaaacgctggaatcccgagatccagtacacttccaactacaacaagtctgttaatgtggactttactgtggacactaatggcgtgtattcagagcctcgccccattggcaccagatacctgactcgtaatctgtaa

SEQ ID NO: 4892 - protein, 735 aa, Adeno-associated virus
MAADGYLPDWLEDTLSEGIRQWWKLKPGPPPPKPAERHKDDSRGLVLPGYKYLGPFNGLDKGEPVNEADAAALEHDKAYDRQLDSGDNPYLKYNHADAEFQERLKEDTSFGGNLGRAVFQAKKRVLEPLGLVEEPVKTAPGKKRPVEHSPAEPDSSSGTGKSGNQPARKRLNFGQTGDSDSVPDPQPLGQPPAAPSGLGTNTMATGSGAPMADNNEGADGVGNSSGNWHCDSTWMGDRVITTSTRTWALPTYNNHLYKQISSQSGASNDNHYFGYSTPWGYFDFNRFHCHFSPRDWQRLINNNWGFRPKRLNFKLFNIQVKEVTQNDGTTTIANNLTSTVQVFTDSEYQLPYVLGSAHQGCLPPFPADVFMVPQYGYLTLNNGSQAVGRSSFYCLEYFPSQMLRTGNSFTFSYTFEDVPFHSSYAHSQSLDRLMNPLIDQYLYYLSRTNTPSGTTTQSRLQFSQAGASDIRDQSRNWLPGPCYRQQRVSKTSADNNNSEYSWTGATKYHLNGRDSLVNPGPAMASHKDDEEKFFPQSGVLIFGKQGSEKTNVDIEKVMITDEEEIRTTNPVATEQYGSVSTNLQSGNTQAATADVNTQGVLPGMVWQDRDVYLQGPIWAKIPHTDGHFHPSPLMGGFGLKHPPPQILIKNTPVPANPSTTFSAAKFASFITQYSTGQVSVEIEWELQKENSKRWNPEIQYTSNYNKSVNVDFTVDTNGVYSEPRPIGTRYLTRNL

SEQ ID NO: 4893 - DNA, 2211 bp, Adeno-associated virus; identical to SEQ ID NO: 4804

SEQ ID NO: 4894 - protein, 736 aa, Adeno-associated virus
MAADGYLPDWLEDTLSEGIRQWWKLKPGPPPPKPAERHKDDSRGLVLPGYKYLGPGNGLDKGEPVNAADAAALEHDKAYDQQLKAGDNPYLKYNHADAEFQERLKEDTSFGGNLGRAVFQAKKRLLEPLGLVEEAAKTAPGKKRPVEQSPQEPDSSAGIGKSGSQPAKKKLNFGQTGDTESVPDPQPIGEPPAAPSGVGSLTMASGGGAPVADNNEGADGVGSSSGNWHCDSQWLGDRVITTSTRTWALPTYNNHLYKQISNSTSGGSSNDNAYFGYSTPWGYFDFNRFHCHFSPRDWQRLINNNWGFRPKRLNFKLFNIQVKEVTDNNGVKTIANNLTSTVQVFTDSDYQLPYVLGSAHEGCLPPFPADVFMIPQYGYLTLNDGGQAVGRSSFYCLEYFPSQMLRTGNNFQFSYEFENVPFHSSYAHSQSLDRLMNPLIDQYLYYLSKTINGSGQNQQTLKFSVAGPSNMAVQGRNYIPGPSYRQQRVSTTVTQNNNSEFAWPGASSWALNGRNSLMNPGPAMASHKEGEDRFFPLSGSLIFGKQGTGRDNVDADKVMITNEEEIKTTNPVATESYGQVATNHQSAQAQAQTGWVQNQGILPGMVWQDRDVYLQGPIWAKIPHTDGNFHPSPLMGGFGMKHPPPQILIKNTPVPADPPTAFNKDKLNSFITQYSTGQVSVEIEWELQKENSKRWNPEIQYTSNYYKSNNVEFAVSTEGVYSEPRPIGTRYLTRNL

SEQ ID NO: 4895 - DNA, 2211 bp, Adeno-associated virus
atggctgccgatggttatcttccagattggctcgaggacactctctctgaaggaataagacagtggtggaagctcaaacctggcccaccaccaccaaagcccgcagagcggcataaggacgacagcaggggtcttgtgcttcctgggtacaagtacctcggacccggcaacggactcgacaagggggagccggtcaacgcagcagacgcggcggccctcgagcacgacaaggcctacgaccagcagctcaaggccggagacaacccgtacctcaagtacaaccacgccgacgccgagttccaggagcggctcaaagaagatacgtcttttgggggcaacctcgggcgagcagtcttccaggccaaaaagaggcttcttgaacctcttggtctggttgaggaagcggctaagacggctcctggaaagaagaggcctgtagagcagtctcctcaggaaccggactcctccgcgggtattggcaaatcgggttcacagcccgctaaaaagaaactcaatttcggtcagactggcgacacagagtcagtccccgaccctcaaccaatcggagaacctcccgcagccccctcaggtgtgggatctcttacaatggcttcaggtggtggcgcaccagtggcagacaataacgaaggtgccgatggagtgggtagttcctcgggaaattggcattgcgattcccaatggctgggggacagagtcatcaccaccagcacccgaacctgggccctgcccacctacaacaatcacctctacaagcaaatctccaacagcacatctggaggatcttcaaatgacaacgcctacttcggctacagcaccccctgggggtattttgacttcaacagattccactgccacttctcaccacgtgactggcagcgactcatcaacaacaactggggattccggcctaagcgactcaacttcaagctcttcaacattcaggtcaaagaggttacggacaacaatggagtcaagaccatcgccaataaccttaccagcacggtccaggtcttcacggactcagactatcagctcccgtacgtgctcgggtcggctcacgagggctgcctcccgccgttcccagcggacgttttcatgattcctcagtacgggtatctgacgcttaatgatgggagccaggccgtgggtcgttcgtccttttactgcctggaatatttcccgtcgcaaatgctaagaacgggtaacaacttccagttcagctacgagtttgagaacgtacctttccatagcagctacgctcacagccaaagcctggaccgactaatgaatccactcatcgaccaatacttgtactatctctcaaagactattaacggttctggacagaatcaacaaacgctaaaattcagcgtggccggacccagcaacatggctgtccagggaagaaactacatacctggacccagctaccgacaacaacgtgtctcaaccactgtgactcaaaacaacaacagcgaatttgcttggcctggagcttcttcttgggctctcaatggacgtaatagcttgatgaatcctggacctgctatggccagccacaaagaaggagaggaccgtttctttcctttgtctggatctttaatttttggcaaacaaggaactggaagagacaacgtggatgcggacaaagtcatgataaccaacgaagaagaaattaaaactactaacccggtagcaacggagtcctatggacaagtggccacaaaccaccagagtgcccaagcacaggcgcagaccggctgggttcaaaaccaaggaatacttccgggtatggtttggcaggacagagatgtgtacctgcaaggacccatttgggccaaaattcctcacacggacggcaactttcacccttctccgctaatgggagggtttggaatgaagcacccgcctcctcagatcctcatcaaaaacacacctgtacctgcggatcctccaacggctttcaataaggacaagctgaactctttcatcacccagtattctactggccaagtcagcgtggagattgagtgggagctgcagaaggaaaacagcaagcgctggaacccggagatccagtacacttccaactattacaagtctaataatgttgaatttgctgttaatactgaaggtgtatatagtgaaccccgccccattggcaccagatacctgactcgtaatctgtaa

SEQ ID NO: 4896 - protein, 736 aa, Adeno-associated virus
MAADGYLPDWLEDTLSEGIRQWWKLKPGPPPPKPAERHKDDSRGLVLPGYKYLGPGNGLDKGEPVNAADAAALEHDKAYDQQLKAGDNPYLKYNHADAEFQERLKEDTSFGGNLGRAVFQAKKRLLEPLGLVEEAAKTAPGKKRPVEQSPQEPDSSAGIGKSGSQPAKKKLNFGQTGDTESVPDPQPIGEPPAAPSGVGSLTMASGGGAPVADNNEGADGVGSSSGNWHCDSQWLGDRVITTSTRTWALPTYNNHLYKQISNSTSGGSSNDNAYFGYSTPWGYFDFNRFHCHFSPRDWQRLINNNWGFRPKRLNFKLFNIQVKEVTDNNGVKTIANNLTSTVQVFTDSDYQLPYVLGSAHEGCLPPFPADVFMIPQYGYLTLNDGSQAVGRSSFYCLEYFPSQMLRTGNNFQFSYEFENVPFHSSYAHSQSLDRLMNPLIDQYLYYLSKTINGSGQNQQTLKFSVAGPSNMAVQGRNYIPGPSYRQQRVSTTVTQNNNSEFAWPGASSWALNGRNSLMNPGPAMASHKEGEDRFFPLSGSLIFGKQGTGRDNVDADKVMITNEEEIKTTNPVATESYGQVATNHQSAQAQAQTGWVQNQGILPGMVWQDRDVYLQGPIWAKIPHTDGNFHPSPLMGGFGMKHPPPQILIKNTPVPADPPTAFNKDKLNSFITQYSTGQVSVEIEWELQKENSKRWNPEIQYTSNYYKSNNVEFAVNTEGVYSEPRPIGTRYLTRNL

SEQ ID NO: 4897 - DNA, 2208 bp, Adeno-associated virus
atggctgccgatggttatcttccagattggctcgaggacactctctctgaaggaataagacagcggtggaagctcaaacctggcccaccaccaccagagcccgcagagcggcataaggacgacagcaggggtcttgtgcttcctgggtacaagtacctcggacccttcaacggactcgacaagggagagccggtcaacgaggcagacgccgcggccctcgagcacgacaaagcctacgaccggcagctcgacagcggagacaacccgtacctcaagtacaaccacgccgacgcggagtttcaggagcgccttaaagaagatacgtcttttgggggcaacctcggacgagcagtcttccaggcgaaaaagagggtacttgaacctctgggcctggttgaggaacctgttaagacggctccgggaaaaaagaggccggtagagcactctcctgtggagccagactcctcctcgggaaccggaaaggcgggccagcagcctgcaagaaaaagattgaattttggtcagactggagacgcagactcagtacctgacccccagcctctcggacagccaccagcagccccctctggtctgggaactaatacgatggctacaggcagtggcgcaccaatggcagacaataacgagggcgccgacggagtgggtaattcctcgggaaattggcattgcgattccacatggatgggcgacagagtcatcaccaccagcacccgaacctgggccctgcccacctacaacaaccacctctacaaacaaatttccagccaatcaggagcctcgaacgacaatcactactttggctacagcaccccttgggggtattttgacttcaacagattccactgccacttttcaccacgtgactggcaaagactcatcaacaacaactggggattccgacccaagagactcaacttcaagctctttaacattcaagtcaaagaggtcacgcagaatgacggtacgacgacgattgccaataaccttaccggcacggttcaggtgtttactgactcggagtaccagctcccgtacgtcctcggctcggcgcatcaaggatgcctcccgccgttcccagcagacgtcttcatggtgccacagtatggatacctcaccctgaacaacgggagtcaggcagtaggacgctcttcattttactgcctggagtactttccttctcagatgctgcgtaccggaaacaactttaccttcagctacacttttgaggacgttcctttccacagcagctacgctcacagccagagtctgggccgtctcatgaatcctctcatcgaccagtacctgtattacttgagcagaacaaacactccaagtggaaccaccacgcagtcaaggcttcagttttctcaggccggagcgagtgacattcgggaccagtctaggaactggcttcctggaccctgttaccgccagcagcgagtatcaaagacatctgcggataacaacaacagtgaatactcgtggactggagctaccaagtaccacctcaatggcagagactctctggtgaatccgggcccggccatggcaagccacaaggacgatgaagaaaagttttttcctcagagcggggttctcatctttgggaagcaaggctcagagaaaacaaatgtggacattgaaaaggtcatgattacagacgaagaggaaatcaggacaaccaatcccgtggctacggagcagtatggttctgtatctaccaacctccagagaggcaacagacaagcagctaccgcagatgtcaacacacaaggcgttcttccaggcatggtctggcaggacagagatgtgtaccttcaggggcccatctgggcaaagattccacacacggacggacattttcacccctctcccctcatgggtggattcggacttaaacaccctcctccacagattctcatcaagaacaccccggtacctgcgaatccttcgaccaccttcagtgcggcaaagtttgcttccttcatcacacagtactccacgggacaggtcagcgtggagatcgagtgggagctgcagaaggaaaacagcaaacgctggaatcccgaaattcagtacacttccaactacaacaagtctgttaatgtggactttactgtggacactaatggcgtgtattcagagcctcgccccattggcaccagatacctgactcgtaatctgtaa

SEQ ID NO: 4898 - protein, 735 aa, Adeno-associated virus
MAADGYLPDWLEDTLSEGIRQRWKLKPGPPPPEPAERHKDDSRGLVLPGYKYLGPFNGLDKGEPVNEADAAALEHDKAYDRQLDSGDNPYLKYNHADAEFQERLKEDTSFGGNLGRAVFQAKKRVLEPLGLVEEPVKTAPGKKRPVEHSPVEPDSSSGTGKAGQQPARKRLNFGQTGDADSVPDPQPLGQPPAAPSGLGTNTMATGSGAPMADNNEGADGVGNSSGNWHCDSTWMGDRVITTSTRTWALPTYNNHLYKQISSQSGASNDNHYFGYSTPWGYFDFNRFHCHFSPRDWQRLINNNWGFRPKRLNFKLFNIQVKEVTQNDGTTTIANNLTGTVQVFTDSEYQLPYVLGSAHQGCLPPFPADVFMVPQYGYLTLNNGSQAVGRSSFYCLEYFPSQMLRTGNNFTFSYTFEDVPFHSSYAHSQSLGRLMNPLIDQYLYYLSRTNTPSGTTTQSRLQFSQAGASDIRDQSRNWLPGPCYRQQRVSKTSADNNNSEYSWTGATKYHLNGRDSLVNPGPAMASHKDDEEKFFPQSGVLIFGKQGSEKTNVDIEKVMITDEEEIRTTNPVATEQYGSVSTNLQRGNRQAATADVNTQGVLPGMVWQDRDVYLQGPIWAKIPHTDGHFHPSPLMGGFGLKHPPPQILIKNTPVPANPSTTFSAAKFASFITQYSTGQVSVEIEWELQKENSKRWNPEIQYTSNYNKSVNVDFTVDTNGVYSEPRPIGTRYLTRNL

SEQ ID NO: 4899 - DNA, 2208 bp, Adeno-associated virus
atggctgccgatggttatcttccagattggctcgaggacactctctctgaaggaataagacagcggtggaagctcaaacctggcccaccaccaccagagcccgcagagcggcataaggacgacagcaggggtcttgtgcttcctgggtacaagtacctcggacccttcaacggactcgacaagggagagccggtcaacgaggcagacgccgcggccctcgagcacgacaaagcctacgaccggcagctcgacagcggagacaacccgtacctcaagtacaaccacgccgacgcggagtttcaggagcgccttaaagaagatacgtcctttgggggcaacctcggacgagcagtcttccaggcgaaaaagagggtacttgaacctctgggcctggttgaggaacctgttaagacggctccgggaaaaaagaggccggtagagcactctcctgtggagccagactcctcctcgggaaccggaaaggcgggccagcagcctgcaagaaaaagattgaattttggtcagactggagacgcagactcagtacctgacccccagcctctcggacagccaccagcagccccctctggtctgggaactaatacgatggctacaggcagtggcgcaccaatggcagacaataacgagggcgccgacggagtgggtaattcctcgggaaattggcattgcgattccacatggatgggcgacagagtcatcaccaccagcacccgaacctgggccctgcccacctacaacaaccacctctacaaacaaatttccagccaatcaggagcctcgaacgacaatcactactttggctacagcaccccttgggggtattttgacttcaacagattccactgccacttttcaccacgtgactggcaaagactcatcaacaacaactggggattccgacccaagagactcaacttcaagctctttaacattcaagtcaaagaggtcacgcagaatgacggtacgacgacgattgccaataaccttaccagcacggttcaggtgtttactgactcggagtaccagctcccgtacgtcctcggctcggcgcatcaaggatgcctcccgccgttcccagcagacgtcttcatggtgccacagtatggatacctcaccctgaacaacgagagtcaggcagtaggacgctcttcattttactgcctggagtactttccttctcagatgctgcgtaccggaaacaactttaccttcagctacacttttgaggacgttcctttccacagcagctacgctcacagccagagtctgggccgtctcatgaatcctctcatcgaccagtacctgtattacttgagcagaacaaacactccaagtggaaccaccacgcagtcaaggcttcagttttctcaggccggagcgagtgacattcgggaccagtctaggaactggcttcctggaccctgttaccgccagcagcgagtatcaaagacatctgcggataacaacaacagtgaatactcgtggactggagctaccaagtaccacctcaatggcagagactctctggtgaatccgggcccggccatggcaagccacaaggacgatgaagaaaagttttttcctcagagcggggttctcatctttgggaagcaaggctcagagaaaacaaatgtggacattgaaaaggtcatgattacagacgaagaggaaatcaggacaaccaatcccgtggctacggagcagtatggttctgtatctaccaacctccagagaggcaacagacaagcagctaccgcagatgtcaacacacaaggcgttcttccaggcatggtctggcaggacagagatgtgtaccttcaggggcccatctgggcaaagattccacacacggacggacattttcacccctctcccctcatgggtggattcggacttaaacaccctcctccacagattctcatcaagaacaccccggtacctgcgaatccttcgaccaccttcagtgcggcaaagtttgcttccttcatcacacagtactccacgggacaggtcagcgtggagatcgagtgggagctgcagaaggaaaacagcaaacgctggaatcccgaaattcagtacacttccaactacaacaagtctgttaatgtggactttactgtggacactaatggcgtgtattcagagcctcgccccattggcaccagatacctgactcgtaatctgtaa

SEQ ID NO: 4900 - protein, 735 aa, Adeno-associated virus
MAADGYLPDWLEDTLSEGIRQRWKLKPGPPPPEPAERHKDDSRGLVLPGYKYLGPFNGLDKGEPVNEADAAALEHDKAYDRQLDSGDNPYLKYNHADAEFQERLKEDTSFGGNLGRAVFQAKKRVLEPLGLVEEPVKTAPGKKRPVEHSPVEPDSSSGTGKAGQQPARKRLNFGQTGDADSVPDPQPLGQPPAAPSGLGTNTMATGSGAPMADNNEGADGVGNSSGNWHCDSTWMGDRVITTSTRTWALPTYNNHLYKQISSQSGASNDNHYFGYSTPWGYFDFNRFHCHFSPRDWQRLINNNWGFRPKRLNFKLFNIQVKEVTQNDGTTTIANNLTSTVQVFTDSEYQLPYVLGSAHQGCLPPFPADVFMVPQYGYLTLNNESQAVGRSSFYCLEYFPSQMLRTGNNFTFSYTFEDVPFHSSYAHSQSLGRLMNPLIDQYLYYLSRTNTPSGTTTQSRLQFSQAGASDIRDQSRNWLPGPCYRQQRVSKTSADNNNSEYSWTGATKYHLNGRDSLVNPGPAMASHKDDEEKFFPQSGVLIFGKQGSEKTNVDIEKVMITDEEEIRTTNPVATEQYGSVSTNLQRGNRQAATADVNTQGVLPGMVWQDRDVYLQGPIWAKIPHTDGHFHPSPLMGGFGLKHPPPQILIKNTPVPANPSTTFSAAKFASFITQYSTGQVSVEIEWELQKENSKRWNPEIQYTSNYNKSVNVDFTVDTNGVYSEPRPIGTRYLTRNL

SEQ ID NO: 4901 - DNA, 2208 bp, Adeno-associated virus
atggctgccgatggttatcttccagattggctcgaggacactctctctgaaggaataagacagcggtggaagctcaaacctggcccaccaccaccagagcccgcagagcggcataaggacgacagcaggggtcttgtgcttcctgggtacaagtacctcggacccttcaacggactcgacaagggagagccggtcaacgaggcagacgccgcggccctcgagcacgacaaagcctacgaccggcagctcgacagcggagacaacccgtacctcaagtacaaccacgccgacgcggagtttcaggagcgccttaaagaagatacgtcttttgggggcaacctcggacgagcagtcttccaggcgaaaaagagggtacttgaacctctgggcctggttgaggaacctgttaagacggctccgggaaaaaagaggccggtagagcactctcctgtggagccagactcctcctcgggaaccggaaaggcgggccagcagcctgcaagaaaaagattgaattttggtcagactggagacgcagactcagtacctgacccccagcctctcggacagccaccagcagccccctctggtctgggaactaatacgatggctacaggcagtggcgcaccaatggcagacaataacgagggcgccgacggagtgggtaattcctcgggaaattggcattgcgattccacatggatgggcgacagagtcatcaccaccagcacccgaacctgggccctgcccacctacaacaaccacctctacaaacaaatttccagccaatcaggagcctcgaacgacaatcactactttggctacagcaccccttgggggtattttgacttcaacagattccactgccacttttcaccacgtgactggcaaagactcatcaacaacaactggggattccgacccaagagactcaacttcaagctctttaacattcaagtcaaagaggtcacgcagaatgacggtacgacgacgattgccaataaccttaccagcacggttcaggtgtttactgactcggagtaccagctcccgtacgtcctcggctcggcgcatcaaggatgcctcccgccgttcccagcagacgtcttcatggtaccacagtatggatacctcaccctgaacaacgggagtcaggcagtaggacgctcttcattttactgcctggagtactttccttctcagatgctgcgtaccggaaacaactttaccttcagctacacttttgaggacgttcctttccacagcagctacgctcacagccagagtctgggccgtctcatgaatcctctcatcgaccagtacctgtattacttgagcagaacaaacactccaagtggaaccaccacgcagtcaaggcttcagttttctcaggccggagcgagtgacattcgggaccagtctaggaactggcttcctggaccctgttaccgccagcagcgagtatcaaagacatctgcggataacaacaacagtgaatactcgtggactggagctaccaagtaccacctcaatggcagagactctctggtgaatccgggcccggccatggcaagccacaaggacgatgaagaaaagttttttcctcagagcggggttctcatctttgggaagcaaggctcagagaaaacaaatgtggacattgaaaaggtcatgattacagacgaagaggaaatcaggacaaccaatcccgtggctacggagcagtatggttctgtatctaccaacctccagagaggcaacagacaagcagctaccgcagatgtcaacacacaaggcgttcttccaggcatggtctggcaggacagagatgtgtaccttcaggggcccatctgggcaaagattccacacacggacggacattttcacccctctcccctcatgggtggattcggacttaaacaccctcctccacagattctcatcaagaacaccccggtacctgcgaatccttcgaccaccttcagtgcggcaaagtttgcttccttcatcacacagtactccacgggacaggtcagcgtggagatcgagtgggagctgcagaaggaaaacagcaaacgctggaatcccgaaattcagtacacttccaactacaacaagtctgttaatgtggactttactgtggacactaatggcgtgtattcagagcctcgccccattggcaccagatacctgactcgtaatctgtaa

SEQ ID NO: 4902 - protein, 735 aa, Adeno-associated virus
MAADGYLPDWLEDTLSEGIRQRWKLKPGPPPPEPAERHKDDSRGLVLPGYKYLGPFNGLDKGEPVNEADAAALEHDKAYDRQLDSGDNPYLKYNHADAEFQERLKEDTSFGGNLGRAVFQAKKRVLEPLGLVEEPVKTAPGKKRPVEHSPVEPDSSSGTGKAGQQPARKRLNFGQTGDADSVPDPQPLGQPPAAPSGLGTNTMATGSGAPMADNNEGADGVGNSSGNWHCDSTWMGDRVITTSTRTWALPTYNNHLYKQISSQSGASNDNHYFGYSTPWGYFDFNRFHCHFSPRDWQRLINNNWGFRPKRLNFKLFNIQVKEVTQNDGTTTIANNLTSTVQVFTDSEYQLPYVLGSAHQGCLPPFPADVFMVPQYGYLTLNNGSQAVGRSSFYCLEYFPSQMLRTGNNFTFSYTFEDVPFHSSYAHSQSLGRLMNPLIDQYLYYLSRTNTPSGTTTQSRLQFSQAGASDIRDQSRNWLPGPCYRQQRVSKTSADNNNSEYSWTGATKYHLNGRDSLVNPGPAMASHKDDEEKFFPQSGVLIFGKQGSEKTNVDIEKVMITDEEEIRTTNPVATEQYGSVSTNLQRGNRQAATADVNTQGVLPGMVWQDRDVYLQGPIWAKIPHTDGHFHPSPLMGGFGLKHPPPQILIKNTPVPANPSTTFSAAKFASFITQYSTGQVSVEIEWELQKENSKRWNPEIQYTSNYNKSVNVDFTVDTNGVYSEPRPIGTRYLTRNL

SEQ ID NO: 4903 - DNA, 2208 bp, Adeno-associated virus
atggctgccgatggttatcttccagattggctcgaggacactctctctgaaggaataagacagcggtggaagctcaaacctggcccaccaccaccagagcccgcagagcggcataaggacgacagcaggggtcttgtgcttcctgggtacaagtacctcggacccttcaacggactcgacaagggagagccggtcaacgaggcagacgccgcggccctcgagcacgacaaagcctacgaccggcagctcgacagcggagacaacccgtacctcaagtacaaccacgccgacgcggagtttcaggagcgccttaaagaagatacgtcttttgggggcaacctcggacgagcagtcttccaggcgaaaaagagggtactcgaacctctgggcctggttgaggaacctgttaagacggctccgggaaaaaagaggccggtagagcactctcctgtggagccagactcctcctcgggaaccggaaaggcgggccagcagcctgcaagaaaaagattgaattttggtcagactggagacgcagactcagtacctgacccccagcctctcggacagccaccagcagccccctctggtctgggaactaatacgatggctacaggcagtggcgcaccaatggcagacaataacgagggcgccgacggagtgggtaattcctcgggaaattggcattgcgattccacatggatgggcgacagagtcatcaccaccagcacccgaacctgggccctgcccacctacaacaaccacctctacaaacaaatttccagccaatcaggagcctcgaacgacaatcactactttggctacagcaccccttgggggtattttgacttcaacagattccactgccacttttcaccacgtgactggcaaagactcatcaacaacaactggggattccgacccaagagactcaacttcaagctctttaacattcaagtcaaagaggtcacgcagaatgacggtacgacgacgattgccaataaccttaccagcacggttcaggtgtttactgactcggagtaccagctcccgtacgtcctcggctcggcgcatcaaggatgcctcccgccgttcccagcagacgtcttcatggtgccacagtatggatacctcaccctgaacaacgggagtcaggcagcaggacgctcttcattttactgcctggagtactttccttctcagatgctgcgtaccggaaacaactttaccttcagctacacttttgaggacgttcctttccacagcagctacgctcacagccagagtctgggccgtctcatgaatcctctcatcgaccagtacctgtattacttgagcagaacaaacactccaagtggaaccaccacgcagtcaaggcttcagttttctcaggccggagcgagtgacattcgggaccagtctaggaactggcttcctggaccctgttaccgccagcagcgagtatcaaagacatctgcggataacaacaacagtgaatactcgtggactggagctaccaagtaccacctcaatggcagagactctctggtgaatccgggcccggccatggcaagccacaaggacgatgaagaaaagttttttcctcagagcggggttctcatctttgggaagcaaggctcagagaaaacaaatgtggacattgaaaaggtcatgattacagacgaagaggaaatcaggacaaccaatcccgtggctacggagcagtatggttctgtatctaccaacctccagagaggcaacagacaagcagctaccgcagatgtcaacacacaaggcgttcttccaggcatggtctggcaggacagagatgtgtaccttcaggggcccatctgggcaaagattccacacacggacggacattttcacccctctcccctcatgggtggattcggacttaaacaccctcctccacagattctcatcaagaacaccccggtacctgcgaatccttcgaccaccttcagtgcggcaaagtttgcttccttcatcacacagtactccacgggacaggtcagcgtggagatcgagtgggagctgcagaaggaaaacagcaaacgctggaatcccgaaattcagtacacttccaactacaacaagtccgttaatgtggactttactgtggacactaatggcgtgtattcagagcctcgccccattggcaccagatacctgactcgtaatctgtaa

SEQ ID NO: 4904 - protein, 735 aa, Adeno-associated virus
MAADGYLPDWLEDTLSEGIRQRWKLKPGPPPPEPAERHKDDSRGLVLPGYKYLGPFNGLDKGEPVNEADAAALEHDKAYDRQLDSGDNPYLKYNHADAEFQERLKEDTSFGGNLGRAVFQAKKRVLEPLGLVEEPVKTAPGKKRPVEHSPVEPDSSSGTGKAGQQPARKRLNFGQTGDADSVPDPQPLGQPPAAPSGLGTNTMATGSGAPMADNNEGADGVGNSSGNWHCDSTWMGDRVITTSTRTWALPTYNNHLYKQISSQSGASNDNHYFGYSTPWGYFDFNRFHCHFSPRDWQRLINNNWGFRPKRLNFKLFNIQVKEVTQNDGTTTIANNLTSTVQVFTDSEYQLPYVLGSAHQGCLPPFPADVFMVPQYGYLTLNNGSQAAGRSSFYCLEYFPSQMLRTGNNFTFSYTFEDVPFHSSYAHSQSLGRLMNPLIDQYLYYLSRTNTPSGTTTQSRLQFSQAGASDIRDQSRNWLPGPCYRQQRVSKTSADNNNSEYSWTGATKYHLNGRDSLVNPGPAMASHKDDEEKFFPQSGVLIFGKQGSEKTNVDIEKVMITDEEEIRTTNPVATEQYGSVSTNLQRGNRQAATADVNTQGVLPGMVWQDRDVYLQGPIWAKIPHTDGHFHPSPLMGGFGLKHPPPQILIKNTPVPANPSTTFSAAKFASFITQYSTGQVSVEIEWELQKENSKRWNPEIQYTSNYNKSVNVDFTVDTNGVYSEPRPIGTRYLTRNL

SEQ ID NO: 4905 - protein, 738 aa, Adeno-associated virus; identical to SEQ ID NO: 4797

SEQ ID NO: 4906 - DNA, 2217 bp, Adeno-associated virus
atggctgctgacggttatcttccagattggctcgaggacaacctctctgagggcattcgcgagtggtgggacctgaaacctggagcccccaagcccaaggccaaccagcagaagcaggacgacggccggggtctggtgcttcctggctacaagtacctcggacccttcaacggactcgacaagggggagcccgtcaacgcggcggacgcagcggccctcgagcacgacaaggcctacgaccagcagctcaaagcgggtgacaatccgtacctgcggtataaccacgccgacgccgagtttcaggagcgtctgcaagaagatacgtcttttgggggcaacctcgggcgagcagtcttccaggccaagaagcgggttctcgaacctctcggtctggttgaggaagctgctaagacggctcctggaaagaagagaccggtagaaccgtcacctcagcgttcccccgactcctccacgggcatcggcaagaaaggccagcagcccgctaaaaagagactgaactttggtcagactggcgactcagagtcagtccccgaccctcaaccaatcggagaaccaccagcaggcccctctggtctgggatctggtacaatggctgcaggcggtggcgctccaatggcagacaataacgaaggcgccgacggagtgggtagttcctcaggaaattggcattgcgattccacatggctgggcgacagagtcatcaccaccagcacccgaacctgggccctgcccacctacaacaaccacctctacaagcaaatatccaatgggacatcgggaggaagcaccaacgacaacacctacttcggctacagcaccccctgggggtattttgacttcaacagattccactgccacttctcaccacgtgactggcagcgactcatcaacaacaactggggattccggccaaaaagactcagcttcaagctcttcaacatccaggtcaaggaggtcacgcagaatgaaggcaccaagaccatcgccaataaccttaccagcacgattcaggtatttacggactcggaataccagctgccgtacgtcctcggctccgcgcaccagggctgcctgcctccgttcccggcggacgtcttcatgattccccagtacggctaccttacactgaacaatggaagtcaagccgtaggccgttcctccttctactgcctggaatattttccatctcaaatgctgcgaactggaaacaattttgaattcagctacaccttcgaggacgtgcctttccacagcagctacgcacacagccagagcttggaccgactgatgaatcctctcatcgaccagtacctgtactacttatccagaactcagtccacaggaggaactcaaggtacccagcaattgttattttctcaagctgggcctgcaaacatgtcggctcaggctaagaactggctacctggaccttgctaccggcagcagcgagtctctacgacactgtcgcaaaacaacaacagcaactttgcttggactggtgccaccaaatatcacctgaacggaagagactctttggtaaatcccggtgtcgccatggcaacccacaaggacgacgaggaacgcttcttcccgtcgagtggagtcctgatgttcggaaaacagggtgctggaagagacaatgtggactacagcagcgttatgctaaccagcgaagaagaaattaaaaccactaaccccgtagccacagaacaatacggtgtggtggctgacaacttgcagcaaaccaatacagggcctattgtgggaaatgtcaacagccaaggagccttacctggcatggtctggcagaaccgagacgtgtacctgcagggtcccatctgggccaagattcctcacacggacggcaacttccacccttcaccgctaatgggaggatttggactgaagcacccacctcctcagatcctgatcaagaacacgccggtacctgcggatcctccaacaacgttcagccaggcgaaattggcttccttcattacgcagtacagcaccggacaggtcagcgtggaaatcgagtgggagctgcagaaggagaacagcaaacgctggaacccagagattcagtacacttcaaactactacaaatctacaaatgtggactttgctgtcaatacagagggaacttattctgagcctcgccccattggtactcgttacctcacccgtaatctgtaa

SEQ ID NO: 4907 - protein, 738 aa, Adeno-associated virus
MAADGYLPDWLEDNLSEGIREWWDLKPGAPKPKANQQKQDDGRGLVLPGYKYLGPFNGLDKGEPVNAADAAALEHDKAYDQQLKAGDNPYLRYNHADAEFQERLQEDTSFGGNLGRAVFQAKKRVLEPLGLVEEAAKTAPGKKRPVEPSPQRSPDSSTGIGKKGQQPAKKRLNFGQTGDSESVPDPQPIGEPPAGPSGLGSGTMAAGGGAPMADNNEGADGVGSSSGNWHCDSTWLGDRVITTSTRTWALPTYNNHLYKQISNGTSGGSTNDNTYFGYSTPWGYFDFNRFHCHFSPRDWQRLINNNWGFRPKRLSFKLFNIQVKEVTQNEGTKTIANNLTSTIQVFTDSEYQLPYVLGSAHQGCLPPFPADVFMIPQYGYLTLNNGSQAVGRSSFYCLEYFPSQMLRTGNNFEFSYTFEDVPFHSSYAHSQSLDRLMNPLIDQYLYYLSRTQSTGGTQGTQQLLFSQAGPANMSAQAKNWLPGPCYRQQRVSTTLSQNNNSNFAWTGATKYHLNGRDSLVNPGVAMATHKDDEERFFPSSGVLMFGKQGAGRDNVDYSSVMLTSEEEIKTTNPVATEQYGVVADNLQQTNTGPIVGNVNSQGALPGMVWQNRDVYLQGPIWAKIPHTDGNCHPSPLMGGFGLKHPPPQILIKNTPVPADPPTTFSQAKLASFITQYSTGQVSVEIEWELQKENSKRWNPEIQYTSNYYKSTNVDFAVNTEGTYSEPRPIGTRYLTRNL

SEQ ID NO: 4908 - protein, 738 aa, Adeno-associated virus
MAADGYLPDWLEDNLSEGIREWWDLKPGAPKPKANQQKQDDGRGLVLPGYKYLGPFNGLDKGEPVNAADAAALEHDKAYDQQLKAGDNPYLRYNHADAEFQERLQEDTSFGGNLGRAVFQAKKRVLEPLGLVEEGAKTAPGKKRPVEPSPQRSPDSSTGIGKKGQQPARKRLNFGRTGDSESVPDPQPIGEPPAAPSSVGSGTMAAGGGAPMADNNEGADGVGSSSGNWHCDSTWLGDRVITTSTRTWALPTYNNHLYKQISNGTSGGSTNDNTYFGYSTPWGYLDFNRFHCHFSPRDWQRLINNNWGFRPKRLSFKLFNIQVKEVTQNEGTKTIANNLASTIQVFTDSEYQPPYVLGSAHQGCLPPFPADVFMIPQYGYLTLNNGSQAVGRSSFYCLEYFPSQMLRTGNNFSFSYTFEDVPFHSSYAHSQSLDRLMNPLIDQYLYYLSRTQSTGGTAGTQQLLFSRAGPSNMSAQARNWLPGPCYRQQRVSTTLSQNNNSNFAWTGATKYHLNGRDSLVNPGVAMATNKDDEDRFFPSSGILMFGKQGAGKDNVDYSNVMLTSEEEIKTTNPVATEQYGVVADNLQQQNTAPTVGAVNSQGALPGMVWQNRDVYLQGPIWAKIPHTDGNFHPSPLMGGFGLKHPPPQILIKNTPVPADPPTAFNQAKLNSFIAQYSTGQVSVEIEWELQKENSKRWNPEIQYTSNYYKSTNADFAVNTEGVYSEPRPIGTRYLTRNL

SEQ ID NO: 4909 - DNA, 2217 bp, Adeno-associated virus
atggctgccgatggttatcttccagattggctcgaggacaacctctctgagggcattcgcgagtggtgggacctgaaacctggagccccgaaacccaaagccaaccagcaaaagcaggacgacggccggggtctggtgcttcctggctacaagtacctcggacccttcaacggactcgacaagggggagcccgtcaacgcggcggacgcagcggccctcgagcacgacaaggcctacgaccagcagctcaaagcgggtgacaatccgtacctgcggtataatcacgccgacgccgagtttcaggagcgtctgcaagaagatacgtcttttgggggcaacctcgggcgagcagtcttccaggccaagaagcgggttctcgaacctctcggtctggttgaggaaggcgctaagacggctcctggaaagaagagaccggtagagccgtcaccacagcgttcccccgactcctccacgggcatcggcaagaaaggccagcagcccgccagaaagagactcaatttcggtcggactggcgactcagagtcagtccccgaccctcaacctatcggagaacctccagcagcgccctctagtgtgggatctggtacaatggctgcaggcggtggcgcaccaatggcagacaataacgaaggtgccgacggagtgggtagttcctcgggaaattggcattgcgattccacatggctgggcgacagagttatcaccaccagcacccgaacctgggccctgcccacctacaacaaccacctctacaagcaaatctccaacgggacctcgggaggcagcaccaacgacaacacctactttggctacagcaccccctgggggtatcttgactttaacagattccactgccacttctcaccacgtgactggcagcgactcatcaacaacaactggggattccggcccaagagactcagcttcaagctcttcaacatccaggtcaaagaggtcacgcagaatgaaggcaccaagaccatcgccaataacctcgccagcaccatccaggtgtttacggactcggaataccagccgccgtacgtcctcggctctgcccaccagggctgcctgcctccgttcccggcggacgtcttcatgattcctcagtacggctacctgactctcaacaacggtagtcaggccgtgggacgttcctccttctactgcctggagtacttcccctctcagatgctgagaacgggcaacaacttttccttcagctacactttcgaggacgtgcctttccacagcagctacgcgcacagccagagtttggacaggctgatgaatcctctcatcgaccagtacctgtactacctgtcaagaacccagtctacgggaggcacagcgggaacccagcagttgctgttttctcgggccgggcctagcaacatgtcggctcaggccagaaactggctgcctggaccctgctacagacagcagcgcgtctccacgacactgtcgcaaaacaacaacagcaactttgcctggactggtgccaccaagtatcatctgaacggcagagactctctggtgaatccgggcgtcgccatggcaaccaacaaggacgacgaggaccgcttcttcccatccagcggcatcctcatgtttggcaagcagggagctggaaaagacaacgtggactatagcaacgtgatgctaaccagcgaggaagaaatcaagaccaccaaccccgtggccacagaacagtatggcgtggtggctgataacctacagcagcaaaacaccgctcctactgtgggggccgtcaacagccagggagccttacctggcatggtctggcagaaccgggacgtgtacctgcagggtcctatttgggccaagattcctcacacagatggcaactttcacccgtctcctttaatgggcggctttggacttaaacatccgcctcctcagatcctcatcaaaaacactcctgttcctgcggatcctccaacagcgttcaaccaggccaagctgaattctttcatcgcgcagtacagcaccggacaagtcagcgtggagatcgagtgggagctgcagaaggagaacagcaagcgctggaacccagagattcagtatacttccaactactacaaatctacaaatgcggactttgctgttaatactgagggtgtttactctgagcctcgccccattggcactcgttacctcacccgtaatctgtaa

SEQ ID NO: 4910 - DNA, 2208 bp, Adeno-associated virus
atggctgccgatggttatcttccagattggctcgaggacactctctctgaaggaataagacagtggtggaagctcaaacctggcccaccaccaccaaagcccgcagagcggcataaggacgacagcaggggtcttgtgcttcctgggtacaagtacctcggacccttcaacggactcgacaagggggagccggtcaacgaggcagacgccgcggccctcgagcacgacaaggcctacgaccggcagctcgacagcggagacaacccgtacctcaagtacaaccacgccgacgcagagtttcaggagcgccttaaagaagatacgtcttttgggggcaacctcggacgagcagtcttccaggcgaaaaagagggttcttgaacctctgggcctggttgaggagcctgttaagacggctccgggaaaaaagaggccggtagagcactctcctgtggagccagactcctcctcgggaaccggaaaagcgggccagcagcctgcaagaaaaagattaaattttggtcagactggagacgcagactccgtacctgacccccagcctctcggacagccaccagcagccccctctggtctgggatctactacaatggctacaggcagtggcgcaccaatggcagacaataacgagggtgccgatggagtgggtaattcctcaggaaattggcattgcgattcccaatggctgggcgacagagtcatcaccaccagcacccgaacctgggccctgcccacatacaacaaccacctctacaagcaaatctccagccaatcaggagccagcaacgacaaccactactttggctacagcaccccctgggggtattttgacttcaacagattccactgccacttttcaccacgtgactggcaaagactcgtcaacaacaaccggggattccggcccaaaagactcaacttcaagctctttaatattcaagtcaaagaggtcacgcagaatgacggtacgacgacgattgccaataaccttaccagcacggttcaggtgtttactgactcggagtaccagctcccgtacgtcctgggctcggcgcatcaaggatgcctcccgccgtttccagcggacgtcttcatggtcccacagtatggatacctcaccctgaacaacgggagtcaggcggtaggacgctcttccttttactgcctggagtactttccttctcagatgctgcgtactggaaacaactttcagttcagctacacttttgaagacgtgcctttccacagcagctacgctcacagccagagtctggatcggctgatgaatcctctgatcgaccagtacctgtattatctgaacaagacacaaacaaatagtggaactcttcagcagtctcggctactgtttagccaagctggaccaaccaacatgtctcttcaagctaaaaactggctgcctggaccttgctacagacagcagcgtctgtcaaaacaggcaaacgacaacaacaacagcaactttccctggactgcagctacaaagtatcatctaaatggccgggactcgttggttaatccaggaccagctatggccagtcacaaggatgacgaagaaaagtttttccccatgcatggaaccctgatatttggtaaacaaggaacaaatgccaacgacgcggatttggaaaatgtcatgattacagatgaagaagaaatcagggccaccaatcccgtggctacggagcagtacgggactgtgtcaaataatttgcaaaactcaaacactggtccaactactggaactgtcaatcaccaaggagcgttacctggtatggtgtggcaggatcgagacgtgtacctgcagggacccatttgggccaagattcctcacaccgatggacactttcatccttctccactgatgggaggttttggactcaaacacccgcctcctcagatcatgatcaaaaacactcccgttccagccaatcctcccacaaacttcagttctgccaagtttgcttctttcatcacacagtattccacgggacaggtcagcgtggagatcgagtgggagctgcagaaggagaacagcaaacgctggaatcccgaaattcagtacacttccaactacaacaagtctgttaatgtggactttactgtggacactaatggtgtgtattcagagcctcgccccattggcaccagatacctgactcgtaatctgtaa

SEQ ID NO: 4911 - protein, 735 aa, Adeno-associated virus
MAADGYLPDWLEDTLSEGIRQWWKLKPGPPPPKPAERHKDDSRGLVLPGYKYLGPFNGLDKGEPVNEADAAALEHDKAYDRQLDSGDNPYLKYNHADAEFQERLKEDTSFGGNLGRAVFQAKKRVLEPLGLVEEPVKTAPGKKRPVEHSPVEPDSSSGTGKAGQQPARKRLNFGQTGDADSVPDPQPLGQPPAAPSGLGSTTMATGSGAPMADNNEGADGVGNSSGNWHCDSQWLGDRVITTSTRTWALPTYNNHLYKQISSQSGASNDNHYFGYSTPWGYFDFNRFHCHFSPRDWQRLVNNNRGFRPKRLNFKLFNIQVKEVTQNDGTTTIANNLTSTVQVFTDSEYQLPYVLGSAHQGCLPPFPADVFMVPQYGYLTLNNGSQAVGRSSFYCLEYFPSQMLRTGNNFQFSYTFEDVPFHSSYAHSQSLDRLMNPLIDQYLYYLNKTQTNSGTLQQSRLLFSQAGPTNMSLQAKNWLPGPCYRQQRLSKQANDNNNSNFPWTAATKYHLNGRDSLVNPGPAMASHKDDEEKFFPMHGTLIFGKQGTNANDADLENVMITDEEEIRATNPVATEQYGTVSNNLQNSNTGPTTGTVNHQGALPGMVWQDRDVYLQGPIWAKIPHTDGHFHPSPLMGGFGLKHPPPQIMIKNTPVPANPPTNFSSAKFASFITQYSTGQVSVEIEWELQKENSKRWNPEIQYTSNYNKSVNVDFTVDTNGVYSEPRPIGTRYLTRNL

SEQ ID NO: 4912 - protein, 738 aa, Adeno-associated virus
MAADGYLPDWLEDNLSEGIREWWDLKPGAPKPKANQQKQDDGRGLVLPGYKYLGPFNGLDKGEPVNAADAAALEHDKAYDQQLKAGDNPYLRYNHADAEFQERLQEDTSFGGNLGRAVFQAKKRVLEPLGLVEEAAKTAPGKKRPVEPSPQRSPDSSTGIGKKGQQPAKKRLSFGQTGDSESVPDPQPIGEPPAGPSGLGSGTMAAGGGAPMADNNEGADGVGSSSGNWHCDSTWLGDRVITTSTRTWALPTYNNHLYKQISNGTSGGSTNDNTYFGYSTPWGYFDFNRFHCHFSPRDWQRLINNNWGFRPKRLSFKLFNIQVKEVTQNEGTKTIANNLTSTIQVFTDSEYQLPYVLGSAHQGCLPPFPADVFMIPQYGYLTLNNGSQAVGRSSFYCLEYFPSQMLRTGNNSEFSYTFEDVPFHSSYAHSQSLDRLMNPLIDQYLYYLSRTQSTGGTQGTQQLLFSQAGPANMSAQAKNWLPGPCYRQQRVSTTLSQNNNSNFAWTGATKYHLNGRDSLVNPGVAMATHKDDEERFFPSSGVLMFGKQGAGRDNVDYSSVMLTSEEEIKTTNPVATEQYGVVADNLQQTNTGPIVGNVNSQGALPGMVWQNRDVYLQGPIWAKIPHTDGNFHPSPLMGGFGLKHPPPQILIKNTPVPADPPTTFSQAKLASFITQYSTGQVSVEIEWELQKENSKRWNPEIQYTSNYYKSTNVDFAVNTEGTYSEPRPIGTRYLTRNL

SEQ ID NO: 4913 - DNA, 2217 bp, Adeno-associated virus
atggctgctgacggttatcttccagattggctcgaggacaacctctctgagggcattcgcgagtggtgggacctgaaacctggagcccccaagcccaaggccaaccagcagaagcaggacgacggccggggtctggtgcttcctggctacaagtacctcggacccttcaacggactcgacaagggggagcccgtcaacgcggcggacgcagcggccctcgagcacgacaaggcctacgaccagcagctcaaagcgggtgacaatccgtacctgcggtataaccacgccgacgccgagtttcaggagcgtctgcaagaagatacgtcttttgggggcaacctcgggcgagcagtcttccaggccaagaagcgggttctcgaacctctcggtctggttgaggaagctgctaagacggctcctggaaagaagagaccggtagaaccgtcacctcagcgttcccccgactcctccacgggcatcggcaagaaaggccagcagcccgctaaaaagagactgagctttggtcagactggcgactcagagtcagtccccgaccctcaaccaatcggagaaccaccagcaggcccctctggtctgggatctggtacaatggctgcaggcggtggcgctccaatggcagacaataacgaaggcgccgacggagtgggtagttcctcaggaaattggcattgcgattccacatggctgggcgacagagtcatcaccaccagcacccgaacctgggccctgcccacctacaacaaccacctctacaagcaaatatccaatgggacatcgggaggaagcaccaacgacaacacctacttcggctacagcaccccctgggggtattttgacttcaacagattccactgccacttctcaccacgtgactggcagcgactcatcaacaacaactggggattccggccaaaaagactcagcttcaagctcttcaacatccaggtcaaggaggtcacgcagaatgaaggcaccaagaccatcgccaataaccttaccagcacgattcaggtatttacggactcggaataccagctgccgtacgtcctcggctccgcgcaccagggctgcctgcctccgttcccggcggacgtcttcatgattccccagtacggctaccttacactgaacaatggaagtcaagccgtaggccgttcctccttctactgcctggaatattttccatctcaaatgctgcgaactggaaacaattctgaattcagctacaccttcgaggacgtgcctttccacagcagctacgcacacagccagagcttggaccgactgatgaatcctctcatcgaccagtacctgtactacttatccagaactcagtccacaggaggaactcaaggtacccagcaattgttattttctcaagctgggcctgcaaacatgtcggctcaggctaagaactggctacctggaccttgctaccggcagcagcgagtctctacgacactgtcgcaaaacaacaacagcaactttgcttggactggtgccaccaaatatcacctgaacggaagagactctttggtaaatcccggtgtcgccatggcaacccacaaggacgacgaggaacgcttcttcccgtcgagtggagtcctgatgtttggaaaacagggtgctggaagagacaatgtggactacagcagcgttatgctaaccagcgaagaagaaattaaaaccactaaccctgtagccacagaacaatacggtgtggtggctgacaacttgcagcaaaccaatacagggcctattgtgggaaatgtcaacagccaaggagccttacctggcatggtctggcagaaccgagacgtgtacctgcagggtcccatctgggccaagattcctcacacggacggcaacttccacccttcaccgctaatgggaggatttggactgaagcacccacctcctcagatcctgatcaagaacacgccggtacctgcggatcctccaacaacgttcagccaggcgaaattggcttccttcattacgcagtacagcaccggacaggtcagcgtggaaatcgagtgggagctgcagaaggagaacagcaaacgctggaacccagagattcagtacacttcaaactactacaaatctacaaatgtggactttgctgtcaatacagagggaacttattctgagcctcgccccattggtactcgttacctcacccgtaatctgtaa

SEQ ID NO: 4914 - protein, 738 aa, Adeno-associated virus
MAADGYLPDWLEDNLSEGIREWWDLKPGAPKPKANQQKQDDGRGLVLPGYKYLGPFNGLDKGEPVNAADAAALEHDKAYDQQLKAGDNPYLRYNHADAEFQERLQEDTSFGGNLGRAVFQAKKRVLEPLGPVEEAAKTAPGKKRPVEPPPQRSPDSSTGIGKKGQQPAKKRLNFGQTGDSESVPDPQPIGEPPAGPSGLGSGTMAAGGGAPMADNNEGADGVGSSSGNWHCDSTWLGDRVITTSTRTWALPTYNNHLYKQISNGTSGGSTNDNTYFGYSTPWGYFDFNRFHCHFSPRDWQRLINNNWGFRPKRLSFKLFNIQVKEVTQNEGTKTVANNLTSTIQVFTDSEYQLPYVLGSAHQGCLPPFPADVFMIPQYGYLTLNNGSQAVGRSSFYCLEYFPSQMLRTGNNFEFSYTFEDVPFHSSYAHSQSLDRLMNPLIDQYLYYLSRTQSTGGTQGTQQLLFSQAGPANMSAQAKNWLPGPCYRQQRVSTTLSQNNNSNFAWTGATKYHLNGRDSLVNPGVAMATHKDDEERFFPSSGVLMFGKQGAGRDNVDYSSVMLTSEEEIKTTNPVATEQYGVVADNLQQTNTGPIVGNVNSQGALPGMVWQNRDVYLQGPIWAKIPHTDGNFHPSPLMGGFGLKHPPPQILIKNTPVPADPPTTFSQAKLASFITQYSTGQVSVEIEWELQKENSKRWNPEIQYTSNYYKSTNVDFAVNTEGTYSEPRPIGTRYLTRNL

SEQ ID NO: 4915 - DNA, 2217 bp, Adeno-associated virus
atggctgctgacggttatcttccagattggctcgaggacaacctctctgagggcattcgcgagtggtgggacctgaaacctggagcccccaagcccaaggccaaccagcagaagcaggacgacggccggggtctggtgcttcctggctacaagtacctcggacccttcaacggactcgacaagggggagcccgtcaacgcggcggacgcagcggccctcgagcacgacaaggcctacgaccagcagctcaaagcgggtgacaatccgtacctgcggtataaccacgccgacgccgagtttcaggagcgtctacaagaagatacgtcttttgggggcaacctcgggcgagcagtcttccaggccaagaagcgggttctcgaacctctcggtccggttgaggaagctgctaagacggctcctggaaagaagagaccggtagaaccgccacctcagcgttcccccgactcctccacgggcatcggcaagaaaggccagcagcccgctaaaaagagactgaactttggtcagactggcgactcagagtcagtccccgaccctcaaccaatcggagaaccaccagcaggcccctctggtctgggatctggtacaatggctgcaggcggtggcgctccaatggcagacaataacgaaggcgccgacggagtgggtagttcctcaggaaattggcattgcgattccacatggctgggcgacagagtcatcaccaccagcacccgaacctgggccctgcccacctacaacaaccacctctacaagcaaatatccaatgggacatcgggaggaagcaccaacgacaacacctacttcggctacagcaccccctgggggtattttgacttcaacagattccactgccacttctcaccacgtgactggcagcgactcatcaacaacaactggggattccggccaaaaagactcagcttcaagctcttcaacatccaggtcaaggaggtcacgcagaatgaaggcaccaagaccgtcgccaataaccttaccagcacgattcaggtatttacggactcggaataccagctgccgtacgtcctcggctccgcgcaccagggctgcctgcctccgttcccggcggacgtcttcatgattccccagtacggctaccttacactgaacaatggaagtcaagccgtaggccgttcctccttctactgcctggaatattttccatctcaaatgctgcgaactggaaacaattttgaattcagctacaccttcgaggacgtgcctttccacagcagctacgcacacagccagagcttggaccgactgatgaatcctctcatcgaccagtacctgtactacttatccagaactcagtccacaggaggaactcaaggtacccagcaattgttattttctcaagctgggcctgcaaacatgtcggctcaggctaagaactggctacctggaccttgctaccggcagcagcgagtctctacgacactgtcgcaaaacaacaacagcaactttgcttggactggtgccaccaaatatcacctgaacggaagagactctttggtaaatcccggtgtcgccatggcaacccacaaggacgacgaggaacgcttcttcccgtcgagtggagtcctgatgtttggaaaacagggtgctggaagagacaatgtggactacagcagcgttatgctaaccagcgaagaagaaattaaaaccactaaccctgtagccacagaacaatacggtgtggtggctgacaacttgcagcaaaccaatacagggcctattgtgggaaatgtcaacagccaaggagccttacctggcatggtctggcagaaccgagacgtgtacctgcagggtcccatctgggccaagattcctcacacggacggcaacttccacccttcaccgctaatgggaggatttggactgaagcacccacctcctcagatcctgatcaagaacacgccggtacctgcggatcctccaacaacgttcagccaggcgaaattggcttccttcattacgcagtacagcaccggacaggtcagcgtggaaatcgagtgggagctgcagaaggagaacagcaaacgttggaacccagagattcagtacacttcaaactactacaaatctacaaatgtggactttgctgtcaatacagagggaacttattctgagcctcgccccattggtactcgttacctcacccgtaatctgtaa

SEQ ID NO: 4916 - protein, 738 aa, Adeno-associated virus
MAADGYLPDWLEDNLSEGIREWWDLKPGAPKPKANQQKQDDGRGLVLPGYKYLGPFNGLDKGEPVNAADAAALEHDKAYDQQLKAGDNPYLRYNHADAEFQERLQEDTSFGGNLGRAVFQAKKRVLEPLGLVEEAAKTAPGKKRPVEPSPQRSPDSSTGIGKKGQQPAKKRLNFGQTGDSESVPDPQPIGEPPAGPSGLGSGTMAAGGGAPMADNNEGADGVGSSSGNWHCDSTWLGDRVITTSTRTWALPTYNNHLYKQISNGTSGGSTNDNTYFGYSTPWGYFDFNRFHCHFSPRDWQRLINNNWGFRPKRLSFKLFNIQVKEVTQNEGTKTIANNLTSTIQVFTDSEYQLPYVLGSAHQGCLPPFPADVFMIPQYGYLTLNNGSQAVGRSSFYCLEYFPSQMLRTGNNFEFSYTFEDVPFHSSYAHSQSLDRLMNPLIDQYLYYLSRTQSTGGTQGTQQLLFSQAGPANMSAQAKNWLPGPCYRQQRVSTTLSQSNNSNFAWTGATKYHLNGRDSLVNPGVAMATHKDDEERFFPSSGVLMFGKQGAGRDNVDYSSVMLTSEEEIKTTNPVATEQYGVVADNLQQTNTGPIVGNVNSQGALPGMVWQNRDVYLQGPIWAKIPHTDGNFHPSPLMGGLGLKHPPPQILIKNTPVPADPPTTFSQAKLASFITQYSTGQVSVEIEWELQKENSKRWNPEIQYTSNYYKSTNVDFAVNTEGTYSEPRPIGTRYLTRNL

SEQ ID NO: 4917 - DNA, 2217 bp, Adeno-associated virus
atggctgctgacggttatcttccagattggctcgaggacaacctctctgagggcattcgcgagtggtgggacctgaaacctggagcccccaagcccaaggccaaccagcagaagcaggacgacggccggggtctggtgcttcctggctacaagtacctcggacccttcaacggactcgacaagggggagcccgtcaacgcggcggacgcagcggccctcgagcacgacaaggcctacgaccagcagctcaaagcgggtgacaatccgtacctgcggtataaccacgccgacgccgagtttcaggagcgtctgcaagaagatacgtcttttgggggcaacctcgggcgagcagtcttccaggccaagaagcgggttctcgaacctctcggtctggttgaggaagcggctaagacggctcctggaaagaagagaccggtagaaccgtcacctcagcgttcccccgactcctccacgggcatcggcaagaaaggccagcagcccgctaaaaagagactgaactttggtcagactggcgactcagagtcagtccccgaccctcaaccaatcggagaaccaccagcaggcccctctggtctgggatctggtacaatggctgcaggcggtggcgctccaatggcagacaataacgaaggcgccgacggagtgggtagttcctcaggaaattggcattgcgattccacatggctgggcgacagagtcatcaccaccagcacccgaacctgggccctgcccacctacaacaaccacctctacaagcaaatatccaatgggacatcgggaggaagcaccaacgacaacacctacttcggctacagcaccccctgggggtattttgacttcaacagattccactgccacttctcaccacgtgactggcagcgactcatcaacaacaactggggattccggccaaaaagactcagcttcaagctcttcaacatccaggtcaaggaggtcacgcagaatgaaggcaccaagaccatcgccaataaccttaccagcacgattcaggtatttacggactcggaataccagctgccgtacgtcctcggctccgcgcaccagggctgcctgcctccgttcccggcggacgtcttcatgattccccagtacggctaccttacactgaacaatggaagtcaagccgtaggccgttcctccttctactgcctggaatattttccatctcaaatgctgcgaactggaaacaattttgaattcagctacaccttcgaggacgtgcctttccacagcagctacgcacacagccagagcttggaccgactgatgaatcctctcatcgaccagtacctgtactacttatccagaactcagtccacaggaggaactcaaggtacccagcaattgttattttctcaagctgggcctgcaaacatgtcggctcaggctaagaactggctacctggaccttgctaccggcagcagcgagtctctacgacactgtcgcaaagcaacaacagcaactttgcttggactggtgccaccaaatatcacctgaacggaagagactctttggtaaatcccggtgtcgccatggcaacccacaaggacgacgaggaacgcttcttcccgtcgagtggagtcctgatgtttggaaaacagggtgctggaagagacaatgtggactacagcagcgttatgctaaccagcgaagaagaaattaaaaccactaaccctgtagccacagaacaatacggtgtggtggctgacaacttgcagcaaaccaatacagggcctattgtgggaaatgtcaacagccaaggagccttacctggcatggtctggcagaaccgagacgtgtacctgcagggtcccatctgggccaagattcctcacacggacggcaacttccacccttcaccgctaatgggaggacttggactgaagcacccacctcctcagatcctgatcaagaacacgccggtacctgcggatcctccaacaacgttcagccaggcgaaattggcttccttcattacgcagtacagcaccggacaggtcagcgtggaaatcgagtgggagctgcagaaggagaacagcaaacgctggaacccagagattcagtacacttcaaactactacaaatctacaaatgtggactttgctgtcaatacagagggaacttattctgagcctcgccccattggtactcgttacctcacccgtaatctgtaa

SEQ ID NO: 4918 - protein, 737 aa, Adeno-associated virus
MAADGYLPDWLEDNLSEGIREWWDLKPGAPKPKANQQKQDDGRGLVLPGYKYLGPFNGLDKGEPVNAADAAALEHDKAYDQQLKAGDNPYPRYNHADAEFQERLQEDTPFGGNLGRAVFQAKKRVLEPLGLVEEAAKTAPGKKRPVEPSPQRSPDSSTGIGKKGQQPAKKRLNFGQTGDSESVPDPQPIGEPPAGPSGLGSGTMAAGGGAPMADNNEGADGVGNASGNWHCDSTWLGDRVITTSTRTWALPTYNNHLYKQISSASTGASNDNHYFGYSTPWGYFDFNRFHCHFSPRDWQRLINNNWGFRPKRLNFKLFNIQVKEVTTNDGVTTIANNLTSTVQVFSDSEYQLPYVLGSAHQGCLPPFPADVFMIPQYGYLTLNNGSQAVGRSSFYCLEYFPSQMLRTGNNFTFSYTFEEVPLHSSYAHSQSLDRLMNPLIVQYLYYLNRTQNQSGSAQNKDLLFSRGSPAGMSVQPKNWLPGPCYRQQRVSKTKTDNNNSNFTWTGASKYNLNGRESIINPGTAMASHKDDEDKFFPMSGVMIFGKESAGASNTALDNVMITDEEEIKATNPVATERFGTVAVNFQSSSTDPATGDVHAMGALPGMVWQDRDVYLQGPIWAKIPHTDGHFHPSPLMGGFGLKNPPPQILIKNTPVPANPPAEFSATKFASFITQYSTGQVSVEIEWELQKENSKRWNPEVQYTSNYAKSASVDFTVDNNGLYTEPRPIGTRYLTRPL

SEQ ID NO: 4919 - protein, 737 aa, Adeno-associated virus
MAADGYLPDWLEDNLSEGIREWWDLKPGAPKPKANQQKQDDGRGLVLPGYKYLGPFNGLDKGEPVNAADAAALEHDKAYDQQLKAGDNPYPRYNHADAEFQERLQEDTSFGGNLGRAVFQAKKRVLEPLGLVEEAAKTAPGKKRPVEPSPQRSPDSSTGIGKKGQQPAKKRLNFGQTGDSESVPDPQPIGEPPAGPSGLGSGTMAAGGGAPMADNNEGADGVGNASGNWHCDSTWLGDRVITTSTRTWALPTYNNHLYKQISSASTGASNDNHYFGYSTPWGYFDFNRFHCHFSPRDWQRLINNNWGFRPKRLNFKLFNIQVKEVTTNDGVTTIANNLTSTVQVFSDSEYQLPYVLGSAHQGCLPPFPADVFMIPQYGYLTLNNGSQAVGRSSFYCLEYFPSQMLRTGNNFTFSYTFEEVPLHSSYAHSQSLDRLMNPLIDQYLYYLNRTQNQSGSAQNKDLLFSRGSPAGMSVQPKNWLPGPCYRQQRVSKTKTDNNNSNFTWTGASKYNLNGRESIINPGTAMASHKDDEDKFFPMSGVMIFGKESAGASNTALDNVMITDEEEIKATNPVATERFGTVAVNFQSSSTDPATGDVHAMGALPGMVWQDRDVYLQGPIWAKIPHTDGHFHPSPLMGGFGLKNPPPQILIKNTPVPANPPAEFSATKFASFITQYSTGQVSVEIEWELQKENSKRWNPEVQYTSNYAKSASVDFTVDNNGLYTEPRPIGTRYLTRPL

SEQ ID NO: 4920 - DNA, 2214 bp, Adeno-associated virus
atggctgctgacggttatcttccagattggctcgaggacaacctctctgagggcattcgcgagtggtgggacctgaaacctggagcccccaagcccaaggccaaccagcagaagcaggacgacggccggggtctggtgcttcctggctacaagtacctcggacccttcaacggactcgacaagggggagcccgtcaacgcggcggacgcagcggccctcgagcacgacaaggcctacgaccagcagctcaaagcgggtgacaatccgtacccgcggtataaccacgccgacgccgagtttcaggagcgtctgcaagaagatacgccttttgggggcaacctcgggcgagcagtcttccaggccaagaagcgggttctcgaacctctcggtctggttgaggaagctgctaagacggctcctggaaagaagagaccggtagaaccgtcacctcagcgttcccccgactcctccacgggcatcggcaagaaaggccagcagcccgctaaaaagagactgaactttggtcagactggcgactcagagtcagtccccgaccctcaaccaatcggagaaccaccagcaggcccctctggtctgggatctggtacaatggctgcaggcggtggcgctccaatggcagacaataacgaaggcgccgacggagtgggtaatgcctcaggaaattggcattgcgattccacatggctgggcgacagagtcatcaccaccagcacccgcacctgggccttgcccacctacaataaccacctctacaagcaaatctccagtgcttcaacgggggccagcaacgacaaccactacttcggctacagcaccccctgggggtattttgatttcaacagattccactgccacttttcaccacgtgactggcagcgactcatcaacaacaattggggattccggcccaagagactcaacttcaaactcttcaacatccaagtcaaggaggtcacgacgaatgatggcgtcacaaccatcgctaataaccttaccagcacggttcaagtcttctcggactcggagtaccagcttccgtacgtcctcggctctgcgcaccagggctgcctccctccgttcccggcggacgtgttcatgattccgcaatacggctacctgacgctcaacaatggcagccaagccgtgggacgttcatccttttactgcctggaatatttcccttctcagatgctgagaacgggcaacaactttaccttcagctacacctttgaggaagtgcctctccacagcagctacgcgcacagccagagcctggaccggctgatgaatcctctcatcgtccaatacctgtattacctgaacagaactcaaaatcagtccggaagtgcccaaaacaaggacttgctgttcagccgtgggtctccagctggcatgtctgttcagcccaaaaactggctacctggaccctgttatcggcagcagcgcgtttctaaaacaaaaacagacaacaacaacagcaattttacctggactggtgcttcaaaatataacctcaatgggcgtgaatccatcatcaaccctggcactgctatggcctcacacaaagacgacgaagacaagttctttcccatgagcggtgtcatgatttttggaaaagagagcgccggagcttcaaacactgcattggacaatgtcatgattacagacgaagaggaaattaaagccactaaccctgtggccaccgaaagatttgggaccgtggcagtcaatttccagagcagcagcacagaccctgcgaccggagatgtgcatgctatgggagcattacctggcatggtgtggcaagatagagacgtgtacctgcagggtcccatttgggccaaaattcctcacacagatggacactttcacccgtctcctcttatgggcggctttggactcaagaacccgcctcctcagatcctcatcaaaaacacgcctgttcctgcgaatcctccggcggagttttcagctacaaagtttgcttcattcatcacccaatactccacaggacaagtgagtgtggaaattgaatgggagctgcagaaagaaaacagcaagcgctggaatcccgaagtgcagtacacatccaattatgcaaaatctgccagcgttgattttactgtggacaacaatggactttatactgagcctcgccccattggcacccgttaccttacccgtcccctgtaa

SEQ ID NO: 4921 - protein, 736 aa, Adeno-associated virus
MAADGYLPDWLEDTLSEGIRQWWKLRPGPPPPKPAERHKDDSRGLVLPGYKYLGPFNGLDKGEPVNEADAAALEHDKAYDRQLDSGDNPYLKYNHADAEFQERLKEDTSFGGNLGRAVFQAKKRVLEPLGLVEEGAETAPGKKRPVEQSPQGPDSSSGIGKTGQQPAKKRLNFGQTGDSESVPDPQPLGEPPATPAAVGPTTMASGGGAPMADNNEGADGVGNASGNWHCDSTWLGDRVITTSTRTWALPTYNNHLYKQISSASTGASNDNHYFGYSTPWGYFDFNRFHCHFSPRDWQRLINNNWGFRPKRLNFKLFNIQVKEVTTNDGVTTIANNLTSTVQVFSDSEYQLPYVLGSAHQGCLPPFPADVFMIPQYGYLTLNNGSQAVGRSSFYCLEYFPSQMLRTGNNFTFSYTFEEVPFHSSYAHSQSLDRLMNPLIDQYLYYPNRTQNQSGSAQNKDLLFSRGSPAGMSVQPKNWLPGPCYRQQRVSKTKTDNNNSNFTWTGASKYNLNGRESIINPGTAMASHKDDEDKFFPMSGVMIFGKESAGASNTALDNVMITDEEEIKATNPVATERFGTVAVNFQSSSTDPATGDVHAMGALPGMVWQGRDVYLQGPIWAKIPHTDGHFHPSPLMGGFGLKNPPPQILIKNTPVPANPPAEFSATKFASFITQYSTGQVSVEIEWELQKENSKRWNPEVQYTSNYAKSANVDFTVDNNGLYTEPRPIGTRYLTRPL

SEQ ID NO: 4922 - DNA, 2211 bp, Adeno-associated virus
atggctgccgatggttatcttccagattggctcgaggacactctctctgaaggaataagacagtggtggaagctcagacctggcccaccaccaccaaagcccgcagagcggcataaggacgacagcaggggtcttgtgcttcctgggtacaagtacctcggacccttcaacggactcgacaagggagagccggtcaacgaggcagacgccgcggccctcgagcacgacaaagcctacgaccggcagctcgacagcggagacaacccgtacctcaagtacaaccacgccgacgcggagtttcaggagcgccttaaagaagatacgtcttttgggggcaacctcgggcgagcagtcttccaggccaagaagcgggttctcgaacctctcggtctggttgaggaaggcgctgagacggctcctggaaagaaacgtccggtagagcagtcgccacaagggccagactcctcctcgggcatcggcaagacaggccagcagcccgctaaaaagagactcaattttggtcagactggcgactcagagtcagtccccgatccacaacctctcggagaacctccagcaacccccgctgctgtgggacctactacaatggcttcaggcggtggcgcaccaatggcagacaataacgaaggcgccgacggagtgggtaatgcctcaggaaattggcattgcgattccacatggctgggcgacagagtcatcaccaccagcacccgcacctgggccttgcccacctacaataaccacctctacaagcaaatctccagtgcttcaacgggggccagcaacgacaaccactacttcggctacagcaccccctgggggtattttgatttcaacagattccactgccacttttcaccacgtgactggcagcgactcatcaacaacaattggggattccggcccaagagactcaacttcaaactcttcaacatccaagtcaaggaggtcacgacgaatgatggcgtcacaaccatcgctaataaccttaccagcacggttcaagtcttctcggactcggagtaccagcttccgtacgtcctcggctctgcgcaccagggctgcctccctccgttcccggcggacgtgttcatgattccgcaatacggctacctgacgctcaacaatggcagccaagccgtgggacgttcatccttttactgcctggaatatttcccttctcagatgctgagaacgggcaacaactttaccttcagctacacctttgaggaagtgcctttccacagcagctacgcgcacagccagagcctggaccggctgatgaatcctctcatcgaccaatacctgtattacccgaacagaactcaaaatcagtccggaagtgcccaaaacaaggacttgctgtttagccgtgggtctccagctggcatgtctgttcagcccaaaaactggctacctggaccctgttatcggcagcagcgcgtttctaaaacaaaaacagacaacaacaacagcaattttacctggactggtgcttcaaaatataacctcaatgggcgtgaatccatcatcaaccctggcactgctatggcctcacacaaagacgacgaagacaagttctttcccatgagcggtgtcatgatttttggaaaagagagcgccggagcttcaaacactgcattggacaatgtcatgattacagacgaagaggaaattaaagccactaaccctgtggccaccgaaagatttgggaccgtggcagtcaatttccagagcagcagcacagaccctgcgaccggagatgtgcatgctatgggagcattacctggcatggtgtggcaaggtagagacgtgtacctgcagggtcccatttgggccaaaattcctcacacagatggacactttcacccgtctcctcttatgggcggctttggactcaagaacccgcctcctcagatcctcatcaaaaacacgcctgttcctgcgaatcctccggcggagttttcagctacaaagtttgcttcattcatcacccaatactccacaggacaagtgagtgtggaaattgaatgggagctgcagaaagaaaacagcaagcgctggaatcccgaagtgcagtacacatccaattatgcaaaatctgccaacgttgattttactgtggacaacaatggactttatactgagcctcgccccattggcacccgttaccttacccgtcccctgtaa

SEQ ID NO: 4923 - protein, 736 aa, Adeno-associated virus
MAADGYLPDWLEDTLSEGIRQWWKLRPGPPPPKPAERHKDDSRGLVLPGYKYLGPFNGLDKGEPVNEADAAALEHDKAYDRQLDSGDNPYLKYNHADAEFQERLKEDTSFGGNLGRAVFQAKKRVLEPLGLVEEGAKTAPGKKRPVEQSPQGPDSSSGIGKTGQQPAKKRLNFGQTGDSESVPDPQPLGEPPATPAAVGPTTMASGGGAPMADNNEGADGVGNASGNWHCDSTWLGDRVITTSTRTWALPTYNNHLYKQISSASTGASNDNHYFGYSTPWGYFDFNRFHCHFSPRDWQRLINNNWGFRPKRLNFKLFNIQVKEVTTNDGVTTIANNLTSTVQVFSDSEYQLPYVLGSAHQGCLPPFPADVFMIPQYGYLTLNNGSQAVGRSSFYCLEYFPSQMLRTGNNFTFSYTFEEVPFHSSYAHSQSLDRLMNPLIDQYLYYPNRTQNQSGSAQNKDLLFSRGSPAGMSVQPKNWLPGPCYRQQRVSKTKTDNNNSNFTWTGASKYNLNGRESIINPGTAMASHKDDEDKFFPMSGVMIFGKESAGASNTALDNVMITDEEEIKATNPVATERFGTVAVNFQSSSTDPATGDVHAMGALPGMVWQGRDVYLQGPIWAKIPHTDGHFHPSPLMGGFGLKNPPPQILIKNTPVPANPPAEFSATKFASFITQYSTGQVSVEIEWELQKENSKRWNPEVQYTSNYAKSANVDFTVDNNGLYTEPRPIGTRYLTRPL

SEQ ID NO: 4924 - protein, 736 aa, Adeno-associated virus
MAADGYLPDWLEDTLSEGIRQWWKLRPGPPPPKPAERHKDDSRGLVLPGYKYLGPFNGLDKGEPVNEADAAALEHDKAYDRQLDSGDNPYLKYNHADAEFQERLKEDTSFGGNLGRAVFQAKKRVLEPLGLVEEGAKTAPGKKRPVEQSPQGPDSSSGIGKTGQQPAKKRLNFGQTGDSESVPDPQPLGEPPATPAAVGPTTMASGGGAPMADNNEGADGVGNASGNWHCDSTWLGDRVITTSTRTWALPTYNNHLYKQISSASTGASNDNHYFGYSTPWGYFDFNRFHCHFSPRDWQRLINNNWGFRPKRLNFKLFNIQVKEVTTNDGVTTIANNLTSTVQVFSDSEYQLPYVLGSAHQGCLPPFPADVFMIPQYGYLTLNNGSQAVGRSSFYCLEYFPSQMLRTGNNFTFSYTFEEVPFHSSYAHSQSLDRLMNPLIDQYLYYLNRTQNQSGSAQNKDLLFSRGSPAGMSVQPKNWLPGPCYRQQRVSKTKTDNNNSNFTWTGASKYNLNGRESIINPGTAMASHKDDEDKFFPMSGVMIFGKESAGASNTALDNVMITDEEEIKATNPVATERFGTVAVNFQSSSTDPATGDVHAMGALPGMVWQGRDVYLQGPIWAKIPHTDGHFHPSPLMGGFGLKNPPPQILIKNTPVPANPPAEFSATKFASFITQYSTGQVSVEIEWELQKENSKRWNPEVQYTSNYAKSANVDFTVDNNGLYTEPRPIGTRYLTRPL

SEQ ID NO: 4925 - protein, 736 aa, Adeno-associated virus
MAADGYLPDWLEDTLSEGIRQWWKLRPGPPPPKPAERHKDDSRGLVLPGYKYLGPFNGLDKGEPVNEADAAALEHDKAYDRQLDSGDNPYLKYNHADAEFQERLKEDTSFGGNLGRAVFQAKKRVLEPLGLVEEGAKTAPGKKRPVEQSPQGPDSSSGIGKTGQQPAKKRLNFGQTGDSESVPDPQPLGEPPATPAAVGPTTMASGGGAPMADNNEGADGVGNASGNWHCDSTWLGDRVITTSTRTWALPTYNNHLYKQISSASTGASNDNHYFGYSTPWGYFDFNRFHCHFSPRDWQRLINNNWGFRPKRLNFKLFNIQVKEVTTNDGVTTIANNLTSTVQVFSDSEYQLPYVLGSAHQGCLPPFPADVFMIPQYGYLTLNNGSQAVGRSSFYCLEYFPSQMLRTGNNFTFSYTFEEVPFHSSYAHSQSLDRLMNPLIDQYLYYLNRTQNQSGSAQNKDLLFSRGSPAGMSVQPKNWLPGPCYRQQRVSKTKTDNNNSNFTWTGASKYNLNGRESIINPGTAMASHKDDEDKFFPMSGVMIFGKESAGASNTALDNVMITDEEEIKATNPVATERFGTVAVNFQSSSTDPATGDVHAMGALPGMVWQDRDVYLQGPIWAKIPHTDGHFHPSPLMGGFGLKNPPPQILIKNTPVPANPPAEFSATKFASFITQYSTGQVSVEIEWELQKENSKRWNPEVQYTSNYAKSANVDFTVDNNGLYTEPRPIGTRYLTRPL

SEQ ID NO: 4926 - DNA, 2208 bp, Adeno-associated virus
atggctgccgatggctatcttccagattggctcgaggacactctctctgaaggaataagacagtggtggaagctcaaacctggcccaccaccaccaaagcccgcagagcggcatagggacgacagcaggggtcttgtgcttcctgggtacaagtacctcggacccttcaacggactcgacaagggagagccggtcaacgaggcagacgccgcggccctcgagcacgacaaagcctacgaccggcagctcgacagcggagacaacccgtacctcaagtacaaccacgccgacgcggagtttcaggagcgccttaaagaagatacgtcttttgggggcaacctcggacgagcagtcttccaggcgaaaaagagggttcttgaacctctgggcctggttgaggaacctgttaagacggctccgggaaaaaagaggccggtagagcactctcctgtggagccagactcctcctcgggaaccggaaaggcgggccagcagcctgcaagaaaaagattgaattttggtcagactggagacgcagactcagtacctgacccccagcctctcggacagccaccagcagccccctctggtctgggaactaatacgatggctacaggcagtggcgcaccaatggcagacaataacgagggcgccgacggagtgggtaattcctcgggaaattggcattgcgattccacatggatgggcgacagagtcatcaccaccagcacccgaacctgggccctgcccacctacaacaaccacctctacaaacaaatttccagccaatcaggagcctcgaacgacaatcactactttggctacagcaccccttgggggtattttgacttcaacagattccactgccacttttcaccacgtgactggcaaagactcatcaacaacaactggggattccgacccaagagactcaacttcaagctctttaacattcaagtcaaagaggtcacgcagaatgacggtacgacgacgattgccaataaccttaccagcacggttcaggtgtttactgactcggggtaccagctcccgtacgtcctcggctcggcgcatcaaggatgcctcccgccgttcccagcagacgtcttcatggtgccacagtatggataccccaccctgaacaacgggagtcaggcagtaggacgctcttcattttactgcctggagtactttccttctcagatgctgcgtaccggaaacaactttaccttcagctacacttttgaggacgttcctttccacagcagctacgctcacagccagagtctggaccgtctcatgaatcctctcatcgaccagtacctgtattacttgagcacaacaaacactccaagtggaaccaccacgcagtcaaggcttcagttttctcaggccggagcgagtgacattcgggaccagtctaggaactggcttcctggaccctgttaccgccagcagcgagtatcaaagacatctgcggataacaacaacagtgaatactcgtggactggagctaccaagtaccacctcaatggcagagactctctggtgaatccgggcccggccgtggcaagccacaaggacgatgaagaaaagttttttcctcagagcggggttctcatctttgggaagcaaggctcagagaaaacaaatgtggacattgaaaaggtcatgattacagacgaagaggaaatcaggacaaccaatcccgtggctacggagcagtatggttctgtatctaccaacctccagagaggcaacagacaagcagctaccgcagatgtcaacacacaaggcgttcttccaggcatggtctggcaggacagagatgtgtaccttcaggggcccatctgggcaaagattccacacacggacggacattttcacccctctcccctcatgggtggattcggacttaaacaccctcctccacagattctcatcaagaacaccccggtacctgcgaatccttcgaccaccttcagtgcggcaaagtttgcttccttcatcacacagtactccacgggacaggtcagcgtggagatcgagtgggagctgcagaaggaaaacagcaaacgctggaatcccgaaattcagtacacttccaactacaacaagtctgttaatgtggactttactgtggacactaatggcgtgtattcagagcctcgccccattggcaccagatacctgactcgtaatctgtaa

SEQ ID NO: 4927 - protein, 735 aa, Adeno-associated virus
MAADGYLPDWLEDTLSEGIRQWWKLKPGPPPPKPAERHRDDSRGLVLPGYKYLGPFNGLDKGEPVNEADAAALEHDKAYDRQLDSGDNPYLKYNHADAEFQERLKEDTSFGGNLGRAVFQAKKRVLEPLGLVEEPVKTAPGKKRPVEHSPVEPDSSSGTGKAGQQPARKRLNFGQTGDADSVPDPQPLGQPPAAPSGLGTNTMATGSGAPMADNNEGADGVGNSSGNWHCDSTWMGDRVITTSTRTWALPTYNNHLYKQISSQSGASNDNHYFGYSTPWGYFDFNRFHCHFSPRDWQRLINNNWGFRPKRLNFKLFNIQVKEVTQNDGTTTIANNLTSTVQVFTDSGYQLPYVLGSAHQGCLPPFPADVFMVPQYGYPTLNNGSQAVGRSSFYCLEYFPSQMLRTGNNFTFSYTFEDVPFHSSYAHSQSLDRLMNPLIDQYLYYLSTTNTPSGTTTQSRLQFSQAGASDIRDQSRNWLPGPCYRQQRVSKTSADNNNSEYSWTGATKYHLNGRDSLVNPGPAVASHKDDEEKFFPQSGVLIFGKQGSEKTNVDIEKVMITDEEEIRTTNPVATEQYGSVSTNLQRGNRQAATADVNTQGVLPGMVWQDRDVYLQGPIWAKIPHTDGHFHPSPLMGGFGLKHPPPQILIKNTPVPANPSTTFSAAKFASFITQYSTGQVSVEIEWELQKENSKRWNPEIQYTSNYNKSVNVDFTVDTNGVYSEPRPIGTRYLTRNL

SEQ ID NO: 4928 - DNA, 2211 bp, Adeno-associated virus
atggctgccgacggttatcttccagattggctcgaggacactctctctgaaggaataagacagtggtggaagctcaaacctggcccaccaccaccaaagcccgcagagcggcataaggacgacagcaggggtcttgtgcttcctgggtacaagtacctcggacccttcaacggactcgacaagggagagccggtcaacgaggcagacgccgcggccctcgagcacgacaaagcctacgaccggcagctcgacagcggagacaacccgtacctcaagtacaaccacgccgacgcggagtttcaggagcgccttaaagaagatacgtcttttgggggcaacctcgggcgggcagtcttccaggccaagaagcgggttctcgaacctctcggtctggttgaggaaggcgctaagacggctcctggaaagaaacgtccggtagagcagtcgccacaagagccagactccccctcgggcatcggcaagacaggccagcagcccgctaaaaagagactcaattttggtcagactggcgactcagagtcagtccccgatccacaacctctcggagaacctccagcaacccccgctgctgtgggacctactacaatggcttcaggcggtggcgcaccaatggcagacaataacgaaggcgccgacggagtgggtaatgcctcaggaaattggcactgcgattccacatggctgggcgacagagtcatcaccaccagcacccgcacctgggccttgcccacctacaataaccacctctacaagcaaatctccagtgcttcaacgggggccagcaacgacaaccactacttcggctacagcaccccctgggggtattttgatttcaacagattccactgccacttttcaccacgtgactggcagcgactcatcaacaacaattggggattccggcccaagagactcaacttcaaactcttcaacatccaagtcaaggaggtcacgacgaatgatggcgtcacaaccatcgctaataaccttaccagcacggttcaagtcttctcggactcggagtaccagcttccgtacgtcctcggctctgcgcaccagggccgcctccctccgttcccggcggacgtgttcatgattccgcaatacggctacctgacgctcaacaatggcagccaagccgtgggacgttcatcctcttactgcctggaatatttcccttctcagatgctgagaacgggcaacaactttaccttcagctacacctttgaggaagtgcctctccacagcagctgcgcgcacagccagagcctggaccggctgatgaatcctctcatcgaccaatacctgtattacctgaacagaactcaaaatcagtccggaagtgcccaaaacagggacttgctgttcagccgtgggtctccagctggcatgtctgttcagcccaaaaactggctacctggaccctgttatcggcagcagcgcgtttctaaaacaaaaacagacaacaacaacagcaattttacctggactggtgcttcaaaatataacctcaatgggcgtgaatccatcatcaaccctggcactgctatggcctcacacaaagacgacgaagacaagttctttcccatgagcggtgtcatgatttttggaaaagagagcgccggagcttcaaacactgcattggacaatgtcatgattacagacgaagaggaaattaaagccactaaccctgtggccaccgaaagatttgggaccgtggcagtcaatttccagagcagcagcacagaccctgcgaccggagatgtgcatgctatgggagcattacctggcatggtgtggcaagatagagacgtgtacctgcagggtcccatttgggccaaaattcctcacacagatggacactttcacccgtctcctcttatgggcggctttggactcaagaacccgcctcctcagatcctcatcaaaaacacgcctgttcctgcgaatcctccggcggagttttcagctacaaagtttgcttcattcatcacccaatactccgcaggacaagtgagtgtggaaattgaatgggagctgcagaaagaaaacagcaagcgctggaatcccgaagtgcagtacacatccaattatgcaaaatctgccaacgttgattttactgtggacaacaatggactttatactgagcctcgccccattggcacccgttaccttacccgtcccctgtaa

SEQ ID NO: 4929 - protein, 736 aa, Adeno-associated virus
MAADGYLPDWLEDTLSEGIRQWWKLKPGPPPPKPAERHKDDSRGLVLPGYKYLGPFNGLDKGEPVNEADAAALEHDKAYDRQLDSGDNPYLKYNHADAEFQERLKEDTSFGGNLGRAVFQAKKRVLEPLGLVEEGAKTAPGKKRPVEQSPQEPDSPSGIGKTGQQPAKKRLNFGQTGDSESVPDPQPLGEPPATPAAVGPTTMASGGGAPMADNNEGADGVGNASGNWHCDSTWLGDRVITTSTRTWALPTYNNHLYKQISSASTGASNDNHYFGYSTPWGYFDFNRFHCHFSPRDWQRLINNNWGFRPKRLNFKLFNIQVKEVTTNDGVTTIANNLTSTVQVFSDSEYQLPYVLGSAHQGRLPPFPADVFMIPQYGYLTLNNGSQAVGRSSSYCLEYFPSQMLRTGNNFTFSYTFEEVPLHSSCAHSQSLDRLMNPLIDQYLYYLNRTQNQSGSAQNRDLLFSRGSPAGMSVQPKNWLPGPCYRQQRVSKTKTDNNNSNFTWTGASKYNLNGRESIINPGTAMASHKDDEDKFFPMSGVMIFGKESAGASNTALDNVMITDEEEIKATNPVATERFGTVAVNFQSSSTDPATGDVHAMGALPGMVWQDRDVYLQGPIWAKIPHTDGHFHPSPLMGGFGLKNPPPQILIKNTPVPANPPAEFSATKFASFITQYSAGQVSVEIEWELQKENSKRWNPEVQYTSNYAKSANVDFTVDNNGLYTEPRPIGTRYLTRPL

SEQ ID NO: 4930 - protein, 736 aa, Adeno-associated virus
MAADGYLPDWLEDTLSEGIRQWWKLKPGPPPPKPAERHKDDSRGLVLPGYKYLGPFNGLDKGEPVNEADAAALEHDKAYDRQLDSGDNPYLKYNHADAEFQERLKEDTSFGGNLGRAVFQAKKRVLEPLGLVEEGAKTAPGKKRPVEQSPQEPDSSSGIGKTGQQPAKKRLNFGQTGDSESVPDPQPLGEPPATPAAVGPTTMASGGGAPMADNNEGADGVGNASGNWHCDSTWLGDRVITTSTRTWALPTYNNHLYKQISSASTGASNDNHYFGYSTPWGYFDFNRFHCHFSPRDWQRLINNNWGFRPKRLNFKLFNIQVKEVTTNDGVTTIANNLTSTVQVFSDSEYQLPYVLGSAHQGCLPPFPADVFMIPQYGYLTLNNGSQAVGRSSFYCLEYFPSQMLRTGNNFTFSYTFEEVPLHSSCAHSQSLDRLMNPLIDQYLYYLNRTQNQSGSAQNRDLLFSRGSPAGMSVQPKNWLPGPCYRQQRVSKTKTDNNNSNFTWTGASKYNLNGRESIINPGTAMASHKDDEDKFFPMSGVMIFGKESAGASNTALDNVMITDEEEIKATNPVATERFGTVAVNFQSSSTDPATGDVHAMGALPGMVWQDRDVYLQGPIWAKIPHTDGHFHPSPLMGGFGLKNPPPQILIKNTPVPANPPAEFSATKFASFITQYSTGQVSVEIEWELQKENSKRWNPEVQYTSNYAKSANVDFTVDNNGLYTEPRPIGTRYLTRPL

SEQ ID NO: 4931 - DNA, 2208 bp, Adeno-associated virus
atggctgccgatggctatcttccagattggctcgaggacactctctctgaaggaataagacagtggtggaagctcaaacctggcccaccaccaccaaagcccgcagagcggcatagggacgacagcaggggtcttgtgcttcctgggtacaagtacctcggacccttcaacggactcgacaagggagagccggtcaacgaggcagacgccgcggccctcgagcacgacaaagcctacgaccggcagctcgacagcggagacaacccgtacctcaagtacaaccacgccgacgcggagtttcaggagcgccttaaagaagatacgtcttttgggggcaacctcggacgagcagtcttccaggcgaaaaagagggttcttgaacctctgggcctggttggggaacctgttaagacggctccgggaaaaaagaggccggtagagcactctcctgtggagccagactcctcctcgggaaccggaaaggcgggccagcagcctgcaagaaaaagattgaattttggtcagactggagacgcagactcagtacctgacccccagcctctcggacagccaccagcagccccctctggtctgggaactaatacgatggctacaggcagtggcgcaccaatggcagacaataacgagggcgccgacggagtgggtaattcctcgggaaattggcattgcgattccacatggatgggcgacagagtcatcaccaccagcacccgaacctgggccctgcccacctacaacaaccacctctacaaacaaatttccagccaatcaggagcctcgaacgacagtcactactttggctacagcaccccttgggggtattttgacttcaacagattccactgccacttttcaccacgtgactggcaaagactcatcaacaacaactggggattccgacccaagagactcaacttcaagctctttaacattcaagtcaaagaggtcacgcagaatgacggtacgacgacgattgccaataaccttaccagcacggttcaggtgtttactgactcggagtaccagctcccgtacgtcctcggctcggcgcatcaaggatgcctcccgccgttcccagcagacgtcttcatggtgccacagtatggatacctcaccctgaacaacgggagtcaggcagtaggacgctcttcattttactgcctggagtactttccttctcagatgctgcgtaccggaaacaactttaccttcagctacacttttgaggacgttcctttccacagcagctacgctcacagccagagtctggaccgtctcatgaatcctctcatcgaccagtacctgtattacttgagcacaacaaacactccaagtggaaccaccacgcagtcaaggctccagttttctcaggccggagcgagtgacattcgggaccagtctaggaactggcttcctggaccctgttaccgccagcagcgagtatcaaagacatctgcggataacaacaacagtgaatactcgtggactggagctaccaagtaccacctcaatggcagagactctctggtgaatccgggcccggccatggcaagccacaaggacaatgaagaaaagttttttcctcagagcggggttctcatctttgggaagcaaggctcagagaaaacaaatgtggacattgaaaaggtcatgattacagacgaagaggaaatcaggacaaccaatcccgtggctacggagcagtatggttctgtatctaccaacctccagagaggcaacagacaagcagctaccgcagatgtcaacacacaaggcgttcttccaggcatggtctggcaggacagagatgtgtaccttcaggggcccatctgggcaaagattccacacacggacggacattttcacccctctcccctcatgggtggattcggacttaaacaccctcctccacagattctcatcaagaacaccccggtacctgcgaatccttcgaccaccttcagtgcggcaaagtttgcttccttcatcacacagtactccacgggacaggtcagcgtggagatcgagtgggagctgcagaaggaaaacagcaaacgctggaatcccgaaattcagtacacttccaactacaacaagtctgttaatgtggactttactgtggacactaatggcgtgtattcagagcctcgccccattggcaccagatacctgactcgtaatctgtaa

SEQ ID NO: 4932 - protein, 735 aa, Adeno-associated virus
MAADGYLPDWLEDTLSEGIRQWWKLKPGPPPPKPAERHRDDSRGLVLPGYKYLGPFNGLDKGEPVNEADAAALEHDKAYDRQLDSGDNPYLKYNHADAEFQERLKEDTSFGGNLGRAVFQAKKRVLEPLGLVGEPVKTAPGKKRPVEHSPVEPDSSSGTGKAGQQPARKRLNFGQTGDADSVPDPQPLGQPPAAPSGLGTNTMATGSGAPMADNNEGADGVGNSSGNWHCDSTWMGDRVITTSTRTWALPTYNNHLYKQISSQSGASNDSHYFGYSTPWGYFDFNRFHCHFSPRDWQRLINNNWGFRPKRLNFKLFNIQVKEVTQNDGTTTIANNLTSTVQVFTDSEYQLPYVLGSAHQGCLPPFPADVFMVPQYGYLTLNNGSQAVGRSSFYCLEYFPSQMLRTGNNFTFSYTFEDVPFHSSYAHSQSLDRLMNPLIDQYLYYLSTTNTPSGTTTQSRLQFSQAGASDIRDQSRNWLPGPCYRQQRVSKTSADNNNSEYSWTGATKYHLNGRDSLVNPGPAMASHKDNEEKFFPQSGVLIFGKQGSEKTNVDIEKVMITDEEEIRTTNPVATEQYGSVSTNLQRGNRQAATADVNTQGVLPGMVWQDRDVYLQGPIWAKIPHTDGHFHPSPLMGGFGLKHPPPQILIKNTPVPANPSTTFSAAKFASFITQYSTGQVSVEIEWELQKENSKRWNPEIQYTSNYNKSVNVDFTVDTNGVYSEPRPIGTRYLTRNL

SEQ ID NO: 4933 - protein, 737 aa, Adeno-associated virus
RMAADGYLPDWLEDNLSEGIREWWDLKPGAPKPKANQQKQDDGRGLVLPGYKYLGPFNGLDKGEPVNAADAAALEHDKAYDQQLKAGDNPYLRYNHADAEFQERLQEDTSFGGNLGRAVFQAKKRVLEPLGLVEEGAKTAPGKKRPVEQSPQEPDSSSGIGKTGQQPAKKRLNFGQTGDSESVPDPQPLGEPPATPAAVGPTTMASGGGAPMADNNEGADGVGNASGNWHCDSTWLGDRVITTSTRTWALPTYNNHLYKQISSTSTGASNDNHYFGYGTPWGYFDFNRFHCHFSPRDWQRLINNNWGFRPKRLNFKLFNIQVEEVTTNDGVTTIANNLTSTVQVFSDSEYQLPYVLGSAHQGCLPPFPADVFMIPQYGYLTLNNGSQAVGRSSFYCLEYFPSQMLRTGNNFTFSYTFEEVPFHSSYAHSQSLDRLMNPLIDQYLYYLNRTQNQSGSAQNKDLLFSRGSPAGMSVQPKNWLPGPCYRQQRVSKTKTDNNNSNFTWTGASKYNLNGRESIINPGTAVASHKDDEDKFFPMSGVMIFGKESAGASSTALDNVMITDEEEIKATNPVATERFGTVAVNFQSSSTDPATGDVHAMGALPGMVWQDRDVYLQGPIWAKIPHTDGHFHPSPLMGGFGLKNPPPQILIKNTPVPANPPAEFSATKFASFITQYSTGQVSVEIEWELQKENSKRWNPEVQYTSNYAKSANVDFTVDNNGLYTEPRPIGTRYLTRPL

SEQ ID NO: 4934 - protein, 736 aa, Adeno-associated virus
MAADGYLPDWLEDNLSEGIREWWDLKPGAPKPKANQQKQDDGRGLVLPGYKYLGPFNGLDKGEPVNAADAAALEHDKAYDQQLKAGDNPYLRYNHADAEFQERLQEDTSFGGNLGRAVFQAKKRVLEPLGLVEEGAKTAPGKKRPVEQSPQEPDSSSGIGKTGQQPAKKRLNFGQTGDSESVPDPQPLGEPPATPAAVGPTTMASGGGAPMADNNEGADGVGNASGNWHCDSTWLGDRVITTSTRTWALPTYNNHLYKQISSTSTGASNDNHYFGYGTPWGYFDFNRFHCHFSPRDWQRLINNNWGFRPKRLNFKLFNIQVEEVTTNDGVTTIANNLTSTVQVFSDSEYQLPYVLGSAHQGCLPPFPADVFMIPQYGYLTLNNGSQAVGRSSFYCLEYFPSQMLRTGNNFTFSYTFEEVPFHSSYAHSQSLDRLMNPLIDQYLYYLNRTQNQSGSAQNKDLLFSRGSPAGMSVQPKNWLPGPCYRQQRVSKTKTDNNNSNFTWTGASKYNLNGRESIINPGTAVASHKDDEDKFFPMSGVMIFGKESAGASSTALDNVMITDEEEIKATNPVATERFGTVAVNFQSSSTDPATGDVHAMGALPGMVWQDRDVYLQGPIWAKIPHTDGHFHPSPLMGGFGLKNPPPQILIKNTPVPANPPAEFSATKFASFITQYSTGQVSVEIEWELQKENSKRWNPEVQYTSNYAKSANVDFTVDNNGLYTEPRPIGTRYLTRPL

SEQ ID NO: 4935 - DNA, 2211 bp, Adeno-associated virus
atggctgccgatggttatcttccagattggctcgaggacaacctctctgagggcattcgcgagtggtgggacttgaaacctggagccccgaagcccaaagccaaccagcaaaagcaggacgacggccggggtctggtgcttcctggctacaagtacctcggacccttcaacggactcgacaagggggagcccgtcaacgcggcggacgcagcggccctcgagcacgacaaggcctacgaccagcagctcaaagcgggtgacaatccgtacctgcggtataaccacgccgacgccgagtttcaggagcgtctgcaagaagatacgtcttttgggggcaacctcgggcgagcagtcttccaggccaagaagcgggttctcgaacctctcggtctggttgaggaaggcgctaagacggctcctggaaagaaacgtccggtagagcagtcgccacaagagccagactcctcctcgggcatcggcaagacaggccagcagcccgctaaaaagagactcaattttggccagactggcgactcagagtcagtccccgatccacaacctctcggagaacctccagcaacccccgctgctgtgggacctactacaatggcttcaggcggtggcgcaccaatggcagacaataacgaaggcgccgacggagtgggtaatgcctcaggaaattggcattgcgattccacatggctgggcgacagagtcatcaccaccagcacccgcacctgggccttgcccacctacaataaccacctctacaagcaaatctccagtacttcaacgggggccagcaacgacaaccactacttcggctacggcaccccctgggggtattttgatttcaacagattccactgccacttttcaccacgtgactggcagcgactcatcaacaacaattggggattccggcccaagagactcaacttcaaactcttcaacatccaagtcgaggaggtcacgacgaatgatggcgtcacaaccatcgctaataaccttaccagcacggttcaagtcttctcggactcggagtaccagcttccgtacgtcctcggctctgcgcaccagggctgcctccctccgttcccggcggacgtgttcatgattccgcaatacggctacctgacgctcaacaatggcagccaagccgtgggacgttcatccttttactgcctggaatatttcccttctcagatgctgagaacgggcaacaactttaccttcagctacacctttgaggaagtgcctttccacagcagctacgcgcacagccagagcctggaccggctgatgaatcctctcatcgaccaatacctgtattacctgaacagaacacaaaatcagtccggaagtgcccaaaacaaggacttgctgtttagccgtgggtctccagctggcatgtctgttcagcccaaaaactggctacctggaccctgttatcggcagcagcgcgtttctaaaacaaaaacagacaacaacaacagcaattttacctggactggtgcttcaaaatataacctcaatgggcgtgaatccatcatcaaccctggcaccgctgtggcctcacacaaagacgacgaagacaagttctttcccatgagcggtgtcatgatttttggaaaagagagcgccggagcttcaagcactgcattggacaatgtcatgattacagacgaagaggaaattaaagccactaaccctgtggccaccgaaagatttgggaccgtggcagtcaatttccagagcagcagcacagaccctgcgaccggagatgtgcatgctatgggagcattacctggcatggtgtggcaagatagagacgtgtacctgcagggtcccatttgggccaaaattcctcacacagatggacactttcacccgtctcctcttatgggcggctttggactcaagaacccgcctcctcagatcctcatcaaaaacacgcctgttcctgcgaatcctccggcggagttttcagctacaaagtttgcttcattcatcacccaatactccacaggacaagtgagtgtggaaattgaatgggagctgcagaaagaaaacagcaagcgctggaatcccgaagtgcagtacacatccaattatgcaaaatctgccaacgttgattttactgtggacaacaatggactttatactgagcctcgccccattggcacccgttaccttacccgtcccctgtaa

SEQ ID NO: 4936 - protein, 737 aa, Adeno-associated virus
RMAADGYLPDWLEDNLSEGIREWWDLKPGAPKPKANQQKQDDGRGLVLPGYKYLGPFNGLDKGEPVNAADAAALEHDKAYDQQLKAGDNPYLRYNHADAEFQERLQEDTSFGGNLGRAVFQAKKRVLEPLGLVEEGAKTAPGKKRPVEQSPQEPDSSSGIGKTGQQPAKKRLNFGQTGDSESVPDPQPLGEPPATPAAVGPTTMASGGGAPMADNNEGADGVGNASGNWHCDSTWLGDRVITTSTRTWALPTYNNHLYKQISSTSTGASNDNHYFGYSTPWGYFDFNRFHCHFSPRDWQRLINNNWGFRPKRLNFKLFNIQVEEVTTNDGVTTIANNLTSTVQVFSDSEYQLPYVLGSAHQGCLPPFPADVFMIPQYGYLTLNNGSQAVGRSSFYCLEYFPSQMLRTGNNFTFSYTFEEVPFHSSYAHSQSLDRLMNPLIDQYLYYLNRTQNQSGSAQNKDLLFSRGSPAGMSVQPKNWLPGPCYRQQRVSKTKTDNNNSNFTWTGASKYNLNGRESIINPGTAVASHKDDEDKFFPMSGVMIFGKESAGASSTALDNVMITDEEEIKATNPVATERFGTVAVNFQSSSTDPATGDVHAMGALPGMVWQDRDVYLQGPIWAKIPHTDGHFHPSPLMGGFGLKNPPPQILIKNTPVPANPPAEFSATKFASFITQYSTGQVSVEIEWELQKENSKRWNPEVQYTSNYAKSANVDFTVDNNGLYTEPRPIGTRYLTRPL

SEQ ID NO: 4937 - protein, 737 aa, Adeno-associated virus
RMAADGYLPDWLEDNLSEGIREWWDLKPGAPKPKANQQKQDDGRGLVLPGYKYLGPFNGLDKGEPVNAADAAALEHDKAYDQQLKAGDNPYLRYNHADAEFQERLQEDTSFGGNLGRAVFQAKKRVLEPLGLVEEGAKTAPGKKRPVEQSPQEPDSSSGIGKTGQQPAKKRLNFGQTGDSESVPDPQPLGEPPATPAAVGPTTMASGGGAPMADNNEGADGVGNASGNWHCDSTWLGDRVITTSTRTWALPTYNNHLYKQISSTSTGASNDNHYFGYSTPWGYFDFNRFHCHFSPRDWQRLINNNWGFRPKRLNFKLFNIQVKEVTTNDGVTTIANNLTSTVQVFSDSEYQLPYVLGSAHQGCLPPFPADVFMIPQYGYLTLNNGSQAVGRSSFYCLEYFPSQMLRTGNNFTFSYTFEEVPFHSSYAHSQSLDRLMNPLIDQYLYYLNRTQNQSGSAQNKDLLFSRGSPAGMSVQPKNWLPGPCYRQQRVSKTKTDNNNSNFTWTGASKYNLNGRESIINPGTAVASHKDDEDKFFPMSGVMIFGKESAGASSTALDNVMITDEEEIKATNPVATERFGTVAVNFQSSSTDPATGDVHAMGALPGMVWQDRDVYLQGPIWAKIPHTDGHFHPSPLMGGFGLKNPPPQILIKNTPVPANPPAEFSATKFASFITQYSTGQVSVEIEWELQKENSKRWNPEVQYTSNYAKSANVDFTVDNNGLYTEPRPIGTRYLTRPL

SEQ ID NO: 4938 - protein, 737 aa, Adeno-associated virus
RMAADGYLPDWLEDNLSEGIREWWDLKPGAPKPKANQQKQDDGRGLVLPGYKYLGPFNGLDKGEPVNAADAAALEHDKAYDQQLKAGDNPYLRYNHADAEFQERLQEDTSFGGNLGRAVFQAKKRVLEPLGLVEEGAKTAPGKKRPVEQSPQEPDSSSGIGKTGQQPAKKRLNFGQTGDSESVPDPQPLGEPPATPAAVGPTTMASGGGAPMADNNEGADGVGNASGNWHCDSTWLGDRVITTSTRTWALPTYNNHLYKQISSTSTGASNDNHYFGYSTPWGYFDFNRFHCHFSPRDWQRLINNNWGFRPKRLNFKLFNIQVKEVTTNDGVTTIANNLTSTVQVFSDSEYQLPYVLGSAHQGCLPPFPADVFMIPQYGYLTLNNGSQAVGRSSFYCLEYFPSQMLRTGNNFTFSYTFEEVPFHSSYAHSQSLDRLMNPLIDQYLYYLNRTQNQSGSAQNKDLLFSRGSPAGMSVQPKNWLPGPCYRQQRVSKTKTDNNNSNFTWTGASKYNLNGRESIINPGTAVASHKDDEDKFFPMSGVMIFGKESAGANSTALDNVMITDEEEIKATNPVATERFGTVAVNFQSSSTDPATGDVHAMGALPGMVWQDRDVYLQGPIWAKIPHTDGHFHPSPLMGGFGLKNPPPQILIKNTPVPANPPAEFSATKFASFITQYSTGQVSVEIEWELQKENSKRWNPEVQYTSNYAKSANVDFTVDNNGLYTEPRPIGTRYLTRPL

SEQ ID NO: 4939 - DNA, 2208 bp, Adeno-associated virus
atggctgccgatggttatcttccagattggctcaaggacactctctctgaaggaataagacagtggtggaagctcaaacctggcccaccaccaccaaagcccgcagagcggcataaggacgacagcgggggtcttgtgcttcctgggtacaagtacctcggacccttcaacggactcgacaagggagagccggtcaacgaggcagacgccgcggccctcgagtacgacaaggcctacgaccggcagctcgacagcggagacaacccgtacctcaagtacaaccacgccgacgcggagtttcaggagcgccttaaagaagatacgtcttttgggggcaacctcggacgagcagtcttccaggcgaaaaagagggttcttgaacctctgggcctggttgaggaacctgttaagacggctccgggaaaaaagaggccggtagagcactctcctgtggagccagactcctcctcgggaacaggaaaagcgggccagcagcctgcgagaaagagattgaattttggtcagactggagacgcagactccgtacctgacccccagcctctcggacagccaccagcagccccctctggtctgggaactaatacgatggctacaggcagtggcgcaccaatggcagacaataacgagggcgccgacggagtgggtaattcctcgggaagttggcattgcgattccacatggatgggcgacagagtcatcaccaccagcacccgaacctgggctctgcccacctacaacaaccatctgtacaagcagatctccagccaatcaggagccagcaacgacaaccactactttggctacagcaccccttgggggtattttgacttcaacagattccactgccacttttcaccacgtgactggcaaagactcatcaacaacaactggggattccggcccaagagactcaacttcaagctctttaacattcaagtcaaggaggtcacgcagaatgacggtacgacgacgattgccaataaccttaccagcacggttcaggtgtttactgactcggagtaccagctcccgtacgtccccggctcggcgcatcaaggatgcctcccgccgttcccagcagacgtcttcatggtgccacagtatggatacctcaccctgaacaacgggagtcaggcagtaggacgctcttcattttactgcctggagtactttccttctcagatgcttcgtaccggaaacaactttaccttcagctacacctttgaggatgttcctttccacagcagctacgctcacagccagagtttggaccgtctcatgaatcctctcatcgaccagtacctgtattacttgagcagaacaaacactccaagcggaaccaccacgcagtccaggcttcagttttctcaggccggagcaagtgacattcgggaccagtctaggaactggcttcctggaccctgttaccgccagcagcgagtatcaaagacagctgcggacaacaacaacagtgaatactcgtggactggagctaccaagtaccacctcaatggcagagactctctggtgaatccgggcccggccatggccagccacaaggacgatgaagaaaagttttttcctcaaagcggggttctcatctttgggaagcaaggctcagagaaaacaaatgtggacattgaaaaggtcatgattacagacgaagaggaaatcagaaccaccaatcccgtggccacggagcagtatggttctgtatctaccaacctccagagcggcaacacacaagcagctactgcagatgtcaacacacaaggcgttcttccaggcatggtctggcaggacagagacgtgcacctgcaggggcctatctgggcaaagattccacacacggacggacattttcacccctctcccctcatgggcggatttggacttaaacaccctcctccacagattctcatcaagaacaccccggtacctgcaaatccttcgaccaccttcagtgcggcaaagtttgcttccttcatcacacagtattccacagggcaggtcagcgtggagatcgagtgggagctgcagaaggagaacagcaaacgctggaaccccgagatccagtacacttccaactacaacaaatctgttaatgtggactttactgtggacactaatggtgtgtattcagagcctcgccccattggcaccagatacctgactcgtaatctgtaa

SEQ ID NO: 4940 - protein, 735 aa, Adeno-associated virus
MAADGYLPDWLKDTLSEGIRQWWKLKPGPPPPKPAERHKDDSGGLVLPGYKYLGPFNGLDKGEPVNEADAAALEYDKAYDRQLDSGDNPYLKYNHADAEFQERLKEDTSFGGNLGRAVFQAKKRVLEPLGLVEEPVKTAPGKKRPVEHSPVEPDSSSGTGKAGQQPARKRLNFGQTGDADSVPDPQPLGQPPAAPSGLGTNTMATGSGAPMADNNEGADGVGNSSGSWHCDSTWMGDRVITTSTRTWALPTYNNHLYKQISSQSGASNDNHYFGYSTPWGYFDFNRFHCHFSPRDWQRLINNNWGFRPKRLNFKLFNIQVKEVTQNDGTTTIANNLTSTVQVFTDSEYQLPYVPGSAHQGCLPPFPADVFMVPQYGYLTLNNGSQAVGRSSFYCLEYFPSQMLRTGNNFTFSYTFEDVPFHSSYAHSQSLDRLMNPLIDQYLYYLSRTNTPSGTTTQSRLQFSQAGASDIRDQSRNWLPGPCYRQQRVSKTAADNNNSEYSWTGATKYHLNGRDSLVNPGPAMASHKDDEEKFFPQSGVLIFGKQGSEKTNVDIEKVMITDEEEIRTTNPVATEQYGSVSTNLQSGNTQAATADVNTQGVLPGMVWQDRDVHLQGPIWAKIPHTDGHFHPSPLMGGFGLKHPPPQILIKNTPVPANPSTTFSAAKFASFITQYSTGQVSVEIEWELQKENSKRWNPEIQYTSNYNKSVNVDFTVDTNGVYSEPRPIGTRYLTRNL

SEQ ID NO: 4941 - DNA, 2208 bp, Adeno-associated virus
atggctgccgatggttatcttccagattggctcgaggacactctctctgaaggaataagacagtggtggaagctcaaacctggcccaccaccaccaaagcccgcagagcggcataaggacgacagcaggggtcttgtgcttcctgggtacaagtacctcggacccttcaacggactcgacaagggggagccggtcaacgaggcagacgccgcggccctcgagcacgacaaggcctacgaccggcagctcgacagcggagacaacccgtacctcaagtacaaccacgccgacgcagagtttcaggagcgccttaaagaagatacgtcttttgggggcaacctcggacgagcagtcttccaggcgaaaaagagggttcttgaacctctgggcctggttgaggaacctgttaagacggctccgggaaaaaagaggccggtagagcactctcctgtggagccagactcctcctcgggaaccggaaaagcgggccagcagcctgcaagaaaaagattaaattttggtcagactggagacgcagactccgtacctgacccccagcctctcggacagccaccagcagccccctctggtctgggatctactacaatggctacaggcagtggcgcaccaatggcagacaataacgagggtgccgatggagtgggtaattcctcaggaaattggcattgcgattcccaatggctgggcgacagagtcatcaccaccagcacccgaacctgggccctgcccacatacaacaaccacctctacaagcaaatctccagccaatcaggagccagcaacgacaaccactactttggctacagcaccccctgggggtattttgacttcaacagattccactgccacttttcaccacgtgactggcaaagactcatcaacaacaactggggattccggcccaaaagactcaacttcaagctctttaatattcaagtcaaagaggtcacgcagaatgacggtacgacgacgattgccaataaccttaccagcacggttcaggtgtttactgactcggagtaccagctcccgtacgtcctgggctcggcgcatcaaggatgcctcccgccgtttccagcggacgtcttcatggtcccacagtatggatacctcaccctgaacaacgggagtcaggcggtaggacgctcttccttttactgcctggagtactttccttctcagatgctgcgtactggaaacaactttcagttcagctacacttttgaagacgtgcctttccacagcagctacgctcacagccagagtctggatcggctgatgaatcctctgatcgaccagtacctgtattatctgaacaagacacaaacaaatagtggaactcttcagcagtctcggctactgtttagccaagctggaccaaccaacatgtctcttcaagctaaaaactggctgcctggaccttgctacagacagcagcgtctgtcaaaacaggcaaacgacaacaacaacagcaactttccctggactgcagctacaaagtatcatctaaatggccgggactcgttggttaatccaggaccagctatggccagtcgcaaggatgacgaagaaaagtttttccccatgcatggaaccctgatatttggtaaacaaggaacaaatgccaacgacgcggatttggaaaatgtcatgattacagatgaagaagaaatcagggccaccaatcccgtggctacggagcagtacgggactgtgtcaaataatttgcaaaactcaaacactggtccaactactggaactgtcaatcaccaaggagcgttacctggtatggtgtggcaggatcgagacgtgtacctgcagggacccatttgggccaagattcctcacaccgatggacactttcatccttctccactgatgggaggttttggactcaaacacccgcctcctcagatcatgatcaaaaacactcccgttccagccaatcctcccacaaacttcagttctgccaagtttgcttctttcatcacacagtattccacgggacaggtcagcgtggagatcgagtgggagctgcagaaggagaacagcaaacgctggaatcccgaaattcagtacacttccaactacaacaagtctgttaatgtggactttactgtggacactaatggtgtgtattcagagcctcgccccattggcaccagatacctgactcgtaatctgtaa

SEQ ID NO: 4942 - protein, 735 aa, Adeno-associated virus
MAADGYLPDWLEDTLSEGIRQWWKLKPGPPPPKPAERHKDDSRGLVLPGYKYLGPFNGLDKGEPVNEADAAALEHDKAYDRQLDSGDNPYLKYNHADAEFQERLKEDTSFGGNLGRAVFQAKKRVLEPLGLVEEPVKTAPGKKRPVEHSPVEPDSSSGTGKAGQQPARKRLNFGQTGDADSVPDPQPLGQPPAAPSGLGSTTMATGSGAPMADNNEGADGVGNSSGNWHCDSQWLGDRVITTSTRTWALPTYNNHLYKQISSQSGASNDNHYFGYSTPWGYFDFNRFHCHFSPRDWQRLINNNWGFRPKRLNFKLFNIQVKEVTQNDGTTTIANNLTSTVQVFTDSEYQLPYVLGSAHQGCLPPFPADVFMVPQYGYLTLNNGSQAVGRSSFYCLEYFPSQMLRTGNNFQFSYTFEDVPFHSSYAHSQSLDRLMNPLIDQYLYYLNKTQTNSGTLQQSRLLFSQAGPTNMSLQAKNWLPGPCYRQQRLSKQANDNNNSNFPWTAATKYHLNGRDSLVNPGPAMASRKDDEEKFFPMHGTLIFGKQGTNANDADLENVMITDEEEIRATNPVATEQYGTVSNNLQNSNTGPTTGTVNHQGALPGMVWQDRDVYLQGPIWAKIPHTDGHFHPSPLMGGFGLKHPPPQIMIKNTPVPANPPTNFSSAKFASFITQYSTGQVSVEIEWELQKENSKRWNPEIQYTSNYNKSVNVDFTVDTNGVYSEPRPIGTRYLTRNL

SEQ ID NO: 4943 - DNA, 2208 bp, Adeno-associated virus
atggctgccgatggttatcttccagattggctcgaggacactctctctgaaggaataagacagtggtggaagctcaaacctggcccaccaccaccaaagcccgcagagcggcataaggacgacagcaggggtcttgtgcttcctgggtacaagtacctcggacccttcaacggactcgacaagggagagccggtcaacgaggcagacgccgcggccctcgagcacgacaaagcctacgaccggcagctcgacagcggagacaacccgtacctcaagtacaaccacgccgacgcggagtttcaggagcgccttaaagaagatacgtcttttgggggcaacctcggacgagcagtcttccaggcgaaaaagagggttcttgaacctctgggcctggttggggaacctgtcaagacggctccaggaaaaaagaggccggtagagcactctcctgtggagccagactcctcctcgggaaccggaaaggcgggccagcagcctgcaagaaaaagattgaattttggtcagactggagacgcagactcagtacctgacccccagcctctcggacagccaccagcagccccctctggtctgggaactaatacgatggctacaggcagtggcgcaccaatggcagacaataacgagggcgccgacggagtgggtaattcctcgggaaattggcattgcgattccacatggatgggcgacagagtcatcaccaccagcacccgaacctgggccctgcccacctacaacaaccacctctacaaacaaatttccagccaatcaggagcctcgaacgacaatcactactttggctacagcaccccttgggggtattttgacttcaacagattccactgccacttttcaccacgtgactggcaaagactcatcaacaacaactggggattccgacccaagagactcaacttcaagctctttaacattcaagtcaaagaggtcacgcagaatgacggtacgacgacgattgccaataaccttaccagcacggttcaggtgtttactgactcggagtaccagctcccgtacgtcctcggctcggcgcatcaaggatgcctcccgccgttcccagcagacgtcttcatggtgccacagtatggatacctcaccctgaacaacgggagtcaggcagtaggacgctcttcattttactgcctggagtactttccttctcagatgctgcgtaccggaaacaactttaccttcagctacacttttgaggacgttcctttccacagcggctacgctcacagccagagtctggaccgtctcatgaatcctctcatcgaccagtacctgtattacttgagcacaacaaacactccaagtggaaccaccacgcagtcaaggcttcagttttctcaggccggagcgagtgacattcgggaccagtctaggaactggcttcctggaccctgttaccgccagcagcgagtatcaaagacatctgcggataacaacaacagtgaatactcgtggactggagctaccaagtaccacctcaatggcagagactctctggtgaatccgggcccggccatggcaagccacaaggacaatgaagaaaagttttttcctcagagcggggttctcatctttgggaagcaaggctcagagaaaacaaatgtggacattgaaaaggtcatgattacagacgaagaggaaatcaggacaaccaatcccgtggctacggagcagtacggttctgtatctaccaacctccagagaggcaacagacaagcagctaccgcagatgtcaacacacaaggcgttcttccaggcatggtctggcaggacagagatgtgtaccttcaggggcccatctgggcaaagattccacacacggacggacattttcacccctctcccctcatgggtggattcggacttaaacaccctcctccacagattctcatcaagaacaccccggtacctgcgaatccttcgaccaccttcagtgcggcaaagtttgcttccttcatcacacagtactccacgggacaggtcagcgtggagatcgagtgggagctgcagaaggaaaacagcaaacgctggaatcccgaaattcagtacacttccaactacaacaagtctgttaatgtggactttactgtggacactaatggcgtgtattcagagcctcgccccattggcaccagatacctgactcgtaatctgtaa

SEQ ID NO: 4944 - protein, 735 aa, Adeno-associated virus
MAADGYLPDWLEDTLSEGIRQWWKLKPGPPPPKPAERHKDDSRGLVLPGYKYLGPFNGLDKGEPVNEADAAALEHDKAYDRQLDSGDNPYLKYNHADAEFQERLKEDTSFGGNLGRAVFQAKKRVLEPLGLVGEPVKTAPGKKRPVEHSPVEPDSSSGTGKAGQQPARKRLNFGQTGDADSVPDPQPLGQPPAAPSGLGTNTMATGSGAPMADNNEGADGVGNSSGNWHCDSTWMGDRVITTSTRTWALPTYNNHLYKQISSQSGASNDNHYFGYSTPWGYFDFNRFHCHFSPRDWQRLINNNWGFRPKRLNFKLFNIQVKEVTQNDGTTTIANNLTSTVQVFTDSEYQLPYVLGSAHQGCLPPFPADVFMVPQYGYLTLNNGSQAVGRSSFYCLEYFPSQMLRTGNNFTFSYTFEDVPFHSGYAHSQSLDRLMNPLIDQYLYYLSTTNTPSGTTTQSRLQFSQAGASDIRDQSRNWLPGPCYRQQRVSKTSADNNNSEYSWTGATKYHLNGRDSLVNPGPAMASHKDNEEKFFPQSGVLIFGKQGSEKTNVDIEKVMITDEEEIRTTNPVATEQYGSVSTNLQRGNRQAATADVNTQGVLPGMVWQDRDVYLQGPIWAKIPHTDGHFHPSPLMGGFGLKHPPPQILIKNTPVPANPSTTFSAAKFASFITQYSTGQVSVEIEWELQKENSKRWNPEIQYTSNYNKSVNVDFTVDTNGVYSEPRPIGTRYLTRNL

SEQ ID NO: 4945 - DNA, 2208 bp, Adeno-associated virus
atggctgccgatggttatcttccagattggctcgaggacactctctctgaaggaataagacagtggtggaagctcaaacctggcccaccaccaccaaagcccgcagagcggcataaggacgacagcaggggtcttgtgcttcctgggtacaagtacctcggacccttcaacggactcgacaagggagagccggtcaacgaggcagacgccgcggccctcgagcacgacaaagcctacgaccggcagctcgacagcggagacaacccgtacctcaagtacaaccacgccgacgcggagtttcaggagcgccttaaagaagatacgtcttttgggggcaacctcggacgagcagtcttccaggcgaaaaagagggttcttgaacctctgggcctggttggggaacctgttaagacggctccgggaaaaaagaggccggtagagcactctcctgtggagccagactcctcctcgggaaccggaaaggcgggccagcagcctgcaagaaaaagattgaattttggtcagactggagacgcagactcagtacctgacccccagcctctcggacagccaccagcagccccctctggtctgggaactaatacgatggctacaggcagtggcgcaccaatggcagacaataacgagggcgccgacggagtgggtaattcctcgggaaatcggcattgcgattccacatggatgggcgacagagtcatcaccaccagcacccgaacctgggccctgcccacctacaacaaccacctctacagacaaatttccagccaatcaggagcctcgaacgacaatcactactttggctacagcaccccttgggggtattttgacttcaacagattccactgccacttttcaccacgtgactggcaaagactcatcaacaacaactggggattccgacccaagagactcaacttcaagctctttaacattcaagtcaaagaggtcacgcagaatgacggtacgacgacgattgccaataaccttaccagcacggttcaggtgtttactgactcggagtaccagctcccgtacgtcctcggctcggcgcatcaaggatgcctcccgccgttcccagcagacgtcttcatggtgccacagtatggatacctcaccctgagcaacgggagtcaggcagtaggacgctcttcattttactgcccggagtactttccttctcagatgctgcgtaccggaaacaactttaccttcagctacacttttgaggacgttcctttccacagcagctacgctcacagccagagtctggaccgtctcatgaatcctctcatcgaccagtacctgtattacttgagcacaacaaacactccaagtggaaccaccacgcagtcaaggcttcagttttctcaggccggagcgagtgacattcgggaccagtctaggaactggcttcctggaccctgttaccgccagcagcgagtatcaaagacatctgcggataacaacaacagtgaatactcgtggactggagctaccaagtaccacctcaatggcagagactctctggtgaatccgggcccggccatggcaagccacaaggacaatgaagaaaagttttttcctcagagcggggttctcatctttgggaagcaaggctcagagaaaacaaatgtggacattgaaaaggtcatgattacagacgaagaggaaatcaggacaaccaatcccgtggctacggagcagtatggttctgtatctaccaacctccagagaggcaacagacaagcagctaccgcagatgtcaacacacaaggcgttcttccaggcatggtctggcaggacagagatgtgtaccttcaggggcccatctgggcaaagattccacacacggacggacattttcacccctctcccctcatgggtggattcggacctaaacaccctcctccacagattctcatcaagaacaccccggtacctgcgaatccttcgaccaccttcagtgcggcaaagtttgcttccttcatcacacagtactccacgggacaggtcagcgtggagatcgagtgggagctgcagaaggaaaacagcaaacgctggaatcccgaaattcagtacacttccaactacaacaagtctgttaatgtggactttactgtggacactaatggcgtgtattcagagcctcgccccattggcaccagatacctgactcgtaatttgtaa

SEQ ID NO: 4946 - protein, 735 aa, Adeno-associated virus
MAADGYLPDWLEDTLSEGIRQWWKLKPGPPPPKPAERHKDDSRGLVLPGYKYLGPFNGLDKGEPVNEADAAALEHDKAYDRQLDSGDNPYLKYNHADAEFQERLKEDTSFGGNLGRAVFQAKKRVLEPLGLVGEPVKTAPGKKRPVEHSPVEPDSSSGTGKAGQQPARKRLNFGQTGDADSVPDPQPLGQPPAAPSGLGTNTMATGSGAPMADNNEGADGVGNSSGNRHCDSTWMGDRVITTSTRTWALPTYNNHLYRQISSQSGASNDNHYFGYSTPWGYFDFNRFHCHFSPRDWQRLINNNWGFRPKRLNFKLFNIQVKEVTQNDGTTTIANNLTSTVQVFTDSEYQLPYVLGSAHQGCLPPFPADVFMVPQYGYLTLSNGSQAVGRSSFYCPEYFPSQMLRTGNNFTFSYTFEDVPFHSSYAHSQSLDRLMNPLIDQYLYYLSTTNTPSGTTTQSRLQFSQAGASDIRDQSRNWLPGPCYRQQRVSKTSADNNNSEYSWTGATKYHLNGRDSLVNPGPAMASHKDNEEKFFPQSGVLIFGKQGSEKTNVDIEKVMITDEEEIRTTNPVATEQYGSVSTNLQRGNRQAATADVNTQGVLPGMVWQDRDVYLQGPIWAKIPHTDGHFHPSPLMGGFGPKHPPPQILIKNTPVPANPSTTFSAAKFASFITQYSTGQVSVEIEWELQKENSKRWNPEIQYTSNYNKSVNVDFTVDTNGVYSEPRPIGTRYLTRNL

SEQ ID NO: 4947 - DNA, 2205 bp, Adeno-associated virus
atggctgccgatggttatcttccagattggctcgaggacactctctctgaaggaataagacagtggtggaagctcaaacctggcccaccaccaccaaagcccgcagagcggcataaggacgacagcaggggtcttgtgcttcctgggtacaagtacctcggacccttcaacggactcgacaagggagagccggtcaacgaggcagacgccgcggccctcgagcacgacaaggcctacgaccggcagctcgacagcggagacaacccgtacctcaagtacaaccacgccgacgcggagtttcaggagcgtcttaaagaagatacgtcttttgggggcaacctcggacgagcagtcttccaggcgaaaaagagggttcttgaacctctgggcctggttgaggaacctgttaagacggctccgggaaaaaagaggccggtagagcactctcctgcggagccagactcctcctcgggaaccggaaaagcgggccagcagcctgcaagaaaaagactgaatttcggtcagactggagacgcagactccgtacctgacccccagcctctcagacagccaccagcagcccccacaagtttgggatctactacaatggctacaggcagtggcgcaccaatggcagacaataacgagggtgccgatggagtgggtaattcctcaggaaattggcattgcgattcccaatggctgggcgacagagtcatcaccaccagcacccgaacctgggccctgcccacctacaacaaccacctttacaagcaaatctccagccaatcaggagcctcaaacgacaaccactactttggctacagcaccccctgggggtattttgacttcaacagattccactgccacttttcaccacgtgactggcaaagactcatcaacaacaactggggattccgacccaagagactcaacttcaagctctttaacattcaagtcaaagaggtcacgcagaatgacggtacgacgacgattgccaataaccttaccagcacggttcaggtgtttactgactcggagtaccagctcccgtacgtcctcggctcggcgcatcaaggatgcctcccgccgtttccagcggacgtcttcatggtcccacagtatggatacctcaccctgaacaacgggagtcaggcggtaggacgctcttccttttactgcctggagtactttccttctcagatgctgcgtactggaaacaactttcagttcagctacacttttgaagacgtgcctttccacagcagctacgctcacagccagagtttggatcggctgatgaatcctctgatcgaccagtacctgtattatctaaacagaacacaaacagctagtggaactcagcagtctcggctactgtttagccaagctggacccacaagcatgtctcttcaagctaaaaactggctgcctggaccgtgttatcgccagcagcgtttgtcaaagcaggcaaacgacaacaacaacagcaactttccctggactggagctaccaagtactacctcaatggcagagactctttggtgaacccgggcccggccatggccagccacaaggacgatgaagaaaagtttttccccatgcatggaaccctaatatttggtaaagaaggaacaaatgctaccaacgcggaattggaaaatgtcatgattacagatgaagaggaaatcaggaccaccaatcccgtggctacagagcagtacggatatgtgtcaaataatttgcaaaactcaaatactgctgcaagtactgaaactgtgaatcaccaaggagcattacctggtatggtgtggcaggatcgagacgtgtacctgcagggacccatttgggccaagattcctcacaccgatggacactttcatccttctccactgatgggaggttttggactcaaacacccgcctcctcagattatgatcaaaaacactcccgttccagccaatcctcccacaaacttcagttctgccaagtttgcttccttcatcacacagtattccacgggacaggtcagcgtggagatcgagtgggagctgcagaaggagaacagcaaacgctggaatcccgaaattcagtacacttccaactacaacaaatctgttaatgtggactttactgtggacactaatggtgtgtattcagagcctcgccccattggcaccagatacctgactcgtaatctgtaa

SEQ ID NO: 4948 - protein, 734 aa, Adeno-associated virus
MAADGYLPDWLEDTLSEGIRQWWKLKPGPPPPKPAERHKDDSRGLVLPGYKYLGPFNGLDKGEPVNEADAAALEHDKAYDRQLDSGDNPYLKYNHADAEFQERLKEDTSFGGNLGRAVFQAKKRVLEPLGLVEEPVKTAPGKKRPVEHSPAEPDSSSGTGKAGQQPARKRLNFGQTGDADSVPDPQPLRQPPAAPTSLGSTTMATGSGAPMADNNEGADGVGNSSGNWHCDSQWLGDRVITTSTRTWALPTYNNHLYKQISSQSGASNDNHYFGYSTPWGYFDFNRFHCHFSPRDWQRLINNNWGFRPKRLNFKLFNIQVKEVTQNDGTTTIANNLTSTVQVFTDSEYQLPYVLGSAHQGCLPPFPADVFMVPQYGYLTLNNGSQAVGRSSFYCLEYFPSQMLRTGNNFQFSYTFEDVPFHSSYAHSQSLDRLMNPLIDQYLYYLNRTQTASGTQQSRLLFSQAGPTSMSLQAKNWLPGPCYRQQRLSKQANDNNNSNFPWTGATKYYLNGRDSLVNPGPAMASHKDDEEKFFPMHGTLIFGKEGTNATNAELENVMITDEEEIRTTNPVATEQYGYVSNNLQNSNTAASTETVNHQGALPGMVWQDRDVYLQGPIWAKIPHTDGHFHPSPLMGGFGLKHPPPQIMIKNTPVPANPPTNFSSAKFASFITQYSTGQVSVEIEWELQKENSKRWNPEIQYTSNYNKSVNVDFTVDTNGVYSEPRPIGTRYLTRNL

SEQ ID NO: 4949 - DNA, 3160 bp, Adeno-associated virus
acccttcactaaagggactagtcctgcaggtttaaacgaattcgcccttgctgcgtcaactggaccaatgagaactttcccttcaacgactgtgtcgacaagatggtgatttggtgggaggaggggaagatgaccgccaaggtcgtggagtcggccaaagccattctcggaggaagcaaggtgcgcgtggaccagaaatgcaagtcctcggcccagatagatccgactcccgtgatcgtcacctccaacaccaacatgtgcgccgtgattgacgggaactcaacgaccttcgaacaccagcagccgttgcaagaccggatgttcaaatttgaactcacccgccgtctggatcatgactttgggaaggtcaccaagcgggaagtcaaagactttttccggtgggcaaaggatcacgtggttgaggtggagcatgaattctacgtcaaaaagggtggagccaagaaaagacccgcccctagtgacgcagatataagtgagcccaaacgggtgcgcgagtcagttgcgcagccatcgacgtcagacgcggaagcttcgatcaactacgcggacaggtaccaaaacaaatgttctcgtcacgtgggcatgaatctgatgctgtttccctgcagacaatgcgagagaatgaatcaaaattcaaatatctgcttcactcacggacagaaagactgtttagagtgctttcccgtgtcagaatctcaacctgtttctgtcgtcaaaaaggcgtatcagaaactgtgctacattcatcatatcatgggaaaggtgccagacgcttgcactgcctgcgatctggtcaatgtggatttggatgactgcatctctgaacaataaatgatttaaatcaggtatggctgccgatggttatcttccagattggctcgaggacactctctctgaaggaataagacagtggtggaagctcaaacctggcccaccaccaccaaagcccgcagagcggcataaggacgacagcaggggtcttgtgcttcctgggtacaagtacctcggacccttcaacggactcgacaagggagagccggtcaacgaggcagacgccgcggccctcgagcacgacaaggcctacgaccggcagctcgacagcggagacaacccgtacctcaagtacaaccacgccgacgcggagtttcaggagcgtcttaaagaagatacgtcttttgggggcaacctcggacgagcagtcttccaggcgaaaaagagggttcttgaacctctgggcctggttgaggaacctgttaagacggctccgggaaaaaagaggccggtagagcactctcctgcggagccagactcctcctcgggaaccggaaaagcgggccagcagcctgcaagaaaaagactgaatttcggtcagactggagacgcagactccgtacctgacccccagcctctcagacagccaccagcagcccccacaagtttgggatctactacaatggctacaggcagtggcgcaccaatggcagacaataacgagggtgccgatggagtgggtaattcctcaggaaattggcattgcgattcccaatggctgggcgacagagtcatcaccaccagcacccgaacctgggccctgcccacctacaacaaccacctttacaagcaaatctccagccaatcaggagcctcaaacgacaaccactactttggctacagcaccccctgggggtattttgacttcaacagattccactgccacttttcaccacgtgactggcaaagactcatcaacaacaactggggattccgacccaagagactcaacttcaagctctttaacattcaagtcaaagaggtcacgcagaatgacggtacgacgacgattgccaataaccttaccagcacggttcaggtgtttactgactcggagtaccagctcccgtacgtcctcggctcggcgcatcaaggatgcctcccgccgtttccagcggacgtcttcatggtcccacagtatggatacctcaccctgaacaacgggagtcaggcggtaggacgctcttccttttactgcctggagtactttccttctcagatgctgcgtactggaaacaactttcagttcagctacacttttgaagacgtgcctttccacagcagctacgctcacagccagagtttggatcggctgatgaatcctctgatcgaccagtacctgtattatctaaacagaacacaaacagctagtggaactcagcagtctcggctactgtttagccaagctggacccacaagcatgtctcttcaagctaaaaactggctgcctggaccgtgttatcgccagcagcgtttgtcaaagcaggcaaacgacaacaacaacagcaactttccctggactggagctaccaagtactacctcaatggcagagactctttggtgaacccgggcccggccatggccagccacaaggacgatgaagaaaagtttttccccatgcatggaaccctaatatttggtaaagaaggaacaaatgctaccaacgcggaattggaaaatgtcatgattacagatgaagaggaaatcaggaccaccaatcccgtggctacagagcagtacggatatgtgtcaaataatttgcaaaactcaaatactgctgcaagtactgaaactgtgaatcaccaaggagcattacctggtatggtgtggcaggatcgagacgtgtacctgcagggacccatttgggccaagattcctcacaccgatggacactttcatccttctccactgatgggaggttttggactcaaacacccgcctcctcagattatgatcaaaaacactcccgttccagccaatcctcccacaaacttcagttctgccaagtttgcttccttcatcacacagtattccacgggacaggtcagcgtggagatcgagtgggagctgcagaaggagaacagcaaacgctggaatcccgaaattcagtacacttccaactacaacaaatctgttaatgtggactttactgtggacactaatggtgtgtattcagagcctcgccccattggcaccagatacctgactcgtaatctgtaattgcttgttaatcaataaaccgtttaattcgtttcagttgaactttggtctctgcgaagggcgaattcgcggccgctaaatcaatcg

SEQ ID NO: 4950 - protein, 734 aa, Adeno-associated virus
MAADGYLPDWLEDTLSEGIRQWWKLKPGPPPPKPAERHKDDSRGLVLPGYKYLGPFNGLDKGEPVNEADAAALEHDKAYDRQLDSGDNPYLKYNHADAEFQERLKEDTSFGGNLGRAVFQAKKRVLEPLGLVEEPVKTAPGKKRPVEHSPAEPDSSSGTGKAGQQPARKRLNFGQTGDADSVPDPQPLGQPPAAPTSLGSTTMATGSGAPMADNNEGADGVGNSSGNWHCDSQWLGDRVITTSTRTWALPTYNNHLYKQISSQSGASNDNHYFGYSTPWGYFDFNRFHCRFSPRDWQRLINNNWGFRPKRLNFKLFNIQVKEVTQNDGTTTIANNLTSTVQVFTDSEYQLPYVLGSAHQGCLPPFPADVFMVPQYGYLTLNNGSQAVGRSSFYCLEYFPSQMLRTGNNFQFSYTFEDVPFHSSYAHSQGLDRLMNPLIDQYLYYLNRTQTASGTQQSRLLFSQAGPTSMSLQAKNWLPGPCYRQQRLSKQANDNNNSNFPWTGATKYHLNGGDSLVNPGPAMASHKDDEEKFFPMHGTLIFGKEGTNATNAELENVMITDEEEIRTTNPVATEQYGYVSNNLQNSNTAASTETVNHQGALPGMVWQDRDVYLRGPIWAKIPHADGHFHPSPLMGGFGLKHPPPQIMIKNTPVPANPPTNFSSAKFASFITQYSTGQVSVEIEWELQKENSKRWNPEIQYTSNYNKSVNVDFTVDTNGVYSEPRPIGTRYLTRNL

SEQ ID NO: 4951 - DNA, 3157 bp, Adeno-associated virus
ctcactaagggactagtcctgcaggtttaaacgaattcgcccttgctgcgtcaactggaccaatgagaactttcccttcaacgactgtgtcgacaagatggtgatttggtgggaggaggggaagatgaccgccaaggtcgtggagtcggccaaagccactctcggaggaagcaaggtgcgcgtggaccagaaacgcaagtcctcggcccagatagatccgactcccgtgatcgtcacctccaacaccaacatgtgcgccgtgattgacgggaactcaacgaccttcgaacaccagcagccgttgcaagaccgaatgttcaaatttgaactcacccgccgtctggatcatgacttcgggaaggtcaccaagcaggaagtcaaagactttttccggtgggcaaaggatcacgtggttgaggtggagcatgaattctacgtcaaaaagggtggagccaagaaaagacccgcccctagtgacgcagatataagtgagcccaaacgggtgcgcgagtcagttgcgcagccatcgacgtcagacgcggaagcttcgatcaactacgcggacaggtaccaaaacaaatgttctcgtcacgtgggcatgaatctgatgctgtttccctgcagacaatgcgagagaatgaatcaaaattcaaatatctgcttcactcacggacagaaagactgtttagagtgctttcccgtgtcagaatctcaacctgtttctgtcgtcaaaaaggcgtatcagaaactgtgctacattcatcatatcatgggaaaggtgccagacgcttgcactgcctgcgatctggtcaatgtggatttggatgactgcatctctgaacaataaatgatttaaatcaggtatggctgccgatggttatcttccagattggctcgaggacactctctctgaaggaataagacagtggtggaagctcaaacctggcccaccaccaccaaagcccgcagagcggcataaggacgacagcaggggtcttgtgcttcctgggtacaagtacctcggacccttcaacggactcgacaagggagagccggtcaacgaggcagacgccgcggctctcgagcacgacaaggcctacgaccggcagctcgacagcggagacaacccgtacctcaagtacaaccacgccgacgcggagtttcaggagcgtcttaaagaagatacgtcttttgggggcaacctcggacgagcagtcttccaggcgaaaaagagggttcttgaacctctgggcctggttgaggaacctgttaagacggctccgggaaaaaagaggccggtagagcactctcctgcggagccagactcctcctcgggaaccggaaaagcgggccagcagcctgcaagaaaaagactgaatttcggtcagactggagacgcagactccgtacctgacccccagcctctcggacagccaccagcagcccccacaagtttgggatctactacaatggctacaggcagtggcgcaccaatggcagacaataacgagggtgccgatggagtgggtaattcctcaggaaattggcattgcgattcccaatggctgggcgacagagtcatcaccaccagcacccgaacctgggccctgcccacctacaacaaccacctttacaagcaaatctccagccaatcaggagcctcaaacgacaaccactactttggctacagcaccccctgggggtattttgacttcaacagattccactgccgcttttcaccacgtgactggcaaagactcatcaacaacaactggggattccgacccaagagactcaacttcaagctctttaacattcaagtcaaagaggtcacgcagaatgacggtacgacgacgattgccaataaccttaccagcacggttcaggtgtttactgactcggagtaccagctcccgtacgtcctcggctcggcgcatcaaggatgcctcccgccgtttccagcggacgtcttcatggtcccacagtatggatacctcaccctgaacaacgggagtcaggcggtaggacgctcttccttttactgcctggagtactttccttctcagatgctgcgtactggaaacaactttcagttcagctacacttttgaagacgtgcctttccacagcagctacgctcacagccagggtttggatcggctgatgaatcctctgatcgaccagtacctgtattatctaaacagaacacaaacagctagtggaactcagcagtctcggctactgtttagccaagctggacccacaagcatgtctcttcaagctaaaaactggctgcctggaccgtgttatcgccagcagcgtttgtcaaagcaggcaaacgacaacaacaacagcaactttccctggactggagctaccaagtaccacctcaatggcggagactctttggtgaacccgggcccggccatggccagccacaaggacgatgaagaaaagtttttccccatgcatggaaccctaatatttggtaaagaaggaacaaatgctaccaacgcggaattggaaaatgtcatgattacagatgaagaggaaatcaggaccaccaatcccgtggctacagagcagtacggatatgtgtcaaataatttgcaaaactcaaatactgctgcaagtactgaaactgtgaatcaccaaggagcattacctggtatggtgtggcaggatcgagacgtgtacctgcggggacccatttgggccaagattcctcacgccgatggacactttcatccttctccactgatgggaggttttggactcaaacacccgcctcctcagattatgatcaaaaacactcccgttccagccaatcctcccacaaacttcagttctgccaagtttgcttccttcatcacacagtattccacgggacaggtcagcgtggagatcgagtgggagctgcagaaggagaacagcaaacgctggaatcccgaaattcagtacacttccaactacaacaaatctgttaatgtggactttactgtggacactaatggtgtgtattcagagcctcgccccattggcaccagatacctgactcgtaatctgtaattgcttgttaatcaataaaccgtttaattcgtttcagttgaactttggtctctgcgaagggcgaattcgcggccgctaaattcaattcg

SEQ ID NO: 4952 - protein, 734 aa, Adeno-associated virus
MAADGYLPDWLEDTLSEGIRQWWKLKPGPPPPKPAERHKDDSRGLVLPGYKYLGPFNGLDKGEPVNEADAAALEHDKAYDRQLDSGDNPYLKYNHADAEFQERLKEDTSFGGNLGRAVFQAKKRVLEPLGLVEEPVKTAPGKKRPVEHSPAEPDSSSGTGKAGQQPARKRLNFGQTGDADSVPDPQPLGQPPAAPTSLGSTTMATGSGAPMADNNEGADGVGNSSGNWHCDSQWLGDRVITTSTRTWALPTYNNHLYKQISSQSGASNDNHYFGYSTPWGYFDFNRFHCHFSPRDWQRLINNNWGFRPKRLNFKLFNIQVKEVTQNDGTTTIANNLTSTVQVFTDSEYQLPYVLGSAHQGCLPPFPADVFMVPQYGYLTLNNGSQAVGRSSFYCLECFPSQMLRTGNNFQFSYTFEDVPFHSSYAHSQSLDRLMNPLIDQYLYYLNRTQTASGTQQSRLLFSQAGPTSMSLQAKNWLPGPCYRQQRLSKQANDNNNSNFPWTGATKYHLNGRDSLVNPGPAMASHKDDEEKFFPMHGTLIFGKEGTNATNAELENVMITDEEEIRTTNPVATEQYGYVSNNLQNSNTAASTETVNHQGALPGMVWQDRDVYLQGPIWAKIPHTDGHFHPSPLMGGFGLKHPPPQIMIKNTPVPANPPTNFSSAKFASFITQYSTGQVSVEIEWELQKENSKRWNPEIQYTSNYNKSVNVDFTVDTNGVYSEPRPIGTRYLTRNL

SEQ ID NO: 4953 - DNA, 2208 bp, Adeno-associated virus
atggctgccgatggttatcttccagattggctcgaggacactctctctgaaggaataagacagtggtggaagctcaaacctggcccaccaccaccaaagcccgcagagcggcataaggacgacagcaggggtcttgtgcttcctggatacaagtacctcggacccttcaacggactcgacaagggagagccggtcaacgaggcagacgccgcggccctcgagcacgacaaggcctacgaccggcagctcgacagcggagacaacccgtacctcaagtacaaccacgccgacgcggagtttcaggagcgccttaaagaagatacgtcttttgggggcaacctcggacgagcagtcttccaggcgaaaaagagggttcttgaacctctgggcctggttgaggaacctgttaagacggctccgggaaaaaagaggccggtagagcactctcctgtggagccagactcctcctcgggaaccggaaaagcgggcaaccagcctgcaagaaaaagattgaatttcggtcagactggagacgcagactccgtacctgacccccagcctctcggacagccaccagcatccccctctggtctgggaactaatacgatggctacaggcagtggcgcaccaatggcagacaataacgagggcgccgacggagtgggtaattcctcgggaaattggcattgcgattccacatggatgggcgacagagtcgtcaccaccagcacccgcacctgggccctgcccacctacaacaaccacctctacaagcagatttccagccaatcaggagccagcaacgacaaccactactttggctacagcaccccttgggggtattttgacttcaacagattccactgccacttttcgccacgcgactggcagagactcatcaacaacaactggggattccggcccaaaagactcaacttcaagctgtttaacattcaagtcaaggaggtcacgcagaatgacggtacgacgacgattgccaataaccttaccagcacggttcaggtgtttactgacttggagtaccagctcccgtacgtcctcggctcggcgcatcaaggatgcctcccgccgttcccagcagacgtcttcatggtgccacagtatggatacctcaccctgaacaacgggagtcaggcggtaggacgctcttccttttactgcctggagtactttccttctcagatgcttcgcaccggaaacaactttaccttcagctacacttttgaagacgttcctttccacagcagctacgctcacagtcaaagtctggaccgtctcatgaatcctctcatcgaccagtacctgtattacttgagcagaacaaacactccaagcggaaccactacgcagtccaggcttcagttttctcaggccggagcgagtgacattcgggaccagtctaggaactggcttcctggaccctgttaccgccagcagcgagtatcaaagacagctgcggataacaacaacagtgaatactcgtggactggagctaccaagtaccacctcaatggcagagactctctggtgaatccgggcccggccatggccagccacaaggacgatgaagaaaagttttttcctcaaagcggggttctcatctttgggaagcaaggctcagagaaaacaaatgtggacattgaaaaggtcatgattacagacgaagaggaaatcaggaccaccaatcccgtggctacggagcagtatggttctgtatctaccaacctccagagcggcaacacacaagcagctacctcagatgtcaacacacaaggcgttcttccaggcatggtctggcaggacagagacgtgtacctgcaggggcccatctgggcaaaaattccacacacggacggacattttcacccctctcccctcatgggcggatttggacttaaacaccctcctccacagattctcattaagaataccccggtacctgcgaatccttcgaccaccttcagcgcggcaaagtttgcttccttcatcacacagtattccacggggcaggtcagcgtggagatcgagtgggagctgcagaaggagaacagcaaacgctggaatcccgaaattcagtacacttccaactacaacaaatctgttaatgtggactttactgtggacactaatggggtgtattcagagcctcgccctattggcaccagatacctgactcgtaatctgtaa

SEQ ID NO: 4954 - DNA, 3159 bp, Adeno-associated virus
gattgatttagcggccgcgaattcgcccttgctgcgtcaactggaccaatgagaactttcccttcaacgattgcgtcgacaagatggtgatctggtgggaggagggaaagatgaccgccaaggtcgtggagtcggccaaagccattctcggaggaagcaaggtgcgtgtggaccaaaagtgcaagtcttcggcccagatcgacccgactcccgtgatcgtcacctccaacaccaacatgtgcgccgtgattgatggaaactcaacgaccttcgagcaccagcagccgttgcaagaccggatgttcaaatttgaacttacccgccgtctggatcatgactttggaaaggtcaccaagcaggaagtgaaagactttttccggtgggcaaaggatcacgtggttgaggtggagcatgagttctacgtcaaaaagggtggagccaaaaaaagacccgcccccagtgacgcagatataagtgagcccaaacgggcgcgcgagtcagttgcgcagccatcgacgtcagacgcggaagcttcgatcaactacgcggacaggtaccaaaacaaatgttctcgtcacgtgggcatgaatctgatgctgtttccctgcagacaatgcgagagaatgaatcagaattcaaatatctgcttcactcacggacagaaagactgtccatagtgctttcccgtgtcagaatctcaacccgtttctgtcgtcaaaaaggcgtatcagaaactgtgctacattcatcacatcatgggaaaggtgccagacgcttgcactgcttgcgacctggtcaatgtggatttggatgactgcatctctgaacaataaatgatttaaatcaggtatggctgccgatggttatcttccagattggctcgaggacactctctctgaaggaataagacagtggtggaagctcaaacctggcccaccaccaccaaagcccgcagagcggcataaggacgacagcaggggtcttgtgcttcctggatacaagtacctcggacccttcaacggactcgacaagggagagccggtcaacgaggcagacgccgcggccctcgagcacgacaaggcctacgaccggcagctcgacagcggagacaacccgtacctcaagtacaaccacgccgacgcggagtttcaggagcgccttaaagaagatacgtcttttgggggcaacctcggacgagcagtcttccaggcgaaaaagagggttcttgaacctctgggcctggttgaggaacctgttaagacggctccgggaaaaaagaggccggtagagcactctcctgtggagccagactcctcctcgggaaccggaaaagcgggcaaccagcctgcaagaaaaagattgaatttcggtcagactggagacgcagactccgtacctgacccccagcctctcggacagccaccagcatccccctctggtctgggaactaatacgatggctacaggcagtggcgcaccaatggcagacaataacgagggcgccgacggagtgggtaattcctcgggaaattggcattgcgattccacatggatgggcgacagagtcgtcaccaccagcacccgcacctgggccctgcccacctacaacaaccacctctacaagcagatttccagccaatcaggagccagcaacgacaaccactactttggctacagcaccccttgggggtattttgacttcaacagattccactgccacttttcgccacgcgactggcagagactcatcaacaacaactggggattccggcccaaaagactcaacttcaagctgtttaacattcaagtcaaggaggtcacgcagaatgacggtacgacgacgattgccaataaccttaccagcacggttcaggtgtttactgacttggagtaccagctcccgtacgtcctcggctcggcgcatcaaggatgcctcccgccgttcccagcagacgtcttcatggtgccacagtatggatacctcaccctgaacaacgggagtcaggcggtaggacgctcttccttttactgcctggagtactttccttctcagatgcttcgcaccggaaacaactttaccttcagctacacttttgaagacgttcctttccacagcagctacgctcacagtcaaagtctggaccgtctcatgaatcctctcatcgaccagtacctgtattacttgagcagaacaaacactccaagcggaaccactacgcagtccaggcttcagttttctcaggccggagcgagtgacattcgggaccagtctaggaactggcttcctggaccctgttaccgccagcagcgagtatcaaagacagctgcggataacaacaacagtgaatactcgtggactggagctaccaagtaccacctcaatggcagagactctctggtgaatccgggcccggccatggccagccacaaggacgatgaagaaaagttttttcctcaaagcggggttctcatctttgggaagcaaggctcagagaaaacaaatgtggacattgaaaaggtcatgattacagacgaagaggaaatcaggaccaccaatcccgtggctacggagcagtatggttctgtatctaccaacctccagagcggcaacacacaagcagctacctcagatgtcaacacacaaggcgttcttccaggcatggtctggcaggacagagacgtgtacctgcaggggcccatctgggcaaaaattccacacacggacggacattttcacccctctcccctcatgggcggatttggacttaaacaccctcctccacagattctcattaagaataccccggtacctgcgaatccttcgaccaccttcagcgcggcaaagtttgcttccttcatcacacagtattccacggggcaggtcagcgtggagatcgagtgggagctgcagaaggagaacagcaaacgctggaatcccgaaattcagtacacttccaactacaacaaatctgttaatgtggactttactgtggacactaatggggtgtattcagagcctcgccctattggcaccagatacctgactcgtaatctgtaattgcttgttaatcaataaaccgtttaattcgtttcagttgaactttggtctctgcgaagggcgaattcgtttaaacctgcaggactagtccctttagtgagg

SEQ ID NO: 4955 - protein, 735 aa, Adeno-associated virus
MAADGYLPDWLEDTLSEGIRQWWKLKPGPPPPKPAERHKDDSRGLVLPGYKYLGPFNGLDKGEPVNEADAAALEHDKAYDRQLDSGDNPYLKYNHADAEFQERLKEDTSFGGNLGRAVFQAKKRVLEPLGLVEEPVKTAPGKKRPVEHSPVEPDSSSGTGKAGNQPARKRLNFGQTGDADSVPDPQPLGQPPASPSGLGTNTMATGSGAPMADNNEGADGVGNSSGNWHCDSTWMGDRVVTTSTRTWALPTYNNHLYKQISSQSGASNDNHYFGYSTPWGYFDFNRFHCHFSPRDWQRLINNNWGFRPKRLNFKLFNIQVKEVTQNDGTTTIANNLTSTVQVFTDLEYQLPYVLGSAHQGCLPPFPADVFMVPQYGYLTLNNGSQAVGRSSFYCLEYFPSQMLRTGNNFTFSYTFEDVPFHSSYAHSQSLDRLMNPLIDQYLYYLSRTNTPSGTTTQSRLQFSQAGASDIRDQSRNWLPGPCYRQQRVSKTAADNNNSEYSWTGATKYHLNGRDSLVNPGPAMASHKDDEEKFFPQSGVLIFGKQGSEKTNVDIEKVMITDEEEIRTTNPVATEQYGSVSTNLQSGNTQAATSDVNTQGVLPGMVWQDRDVYLQGPIWAKIPHTDGHFHPSPLMGGFGLKHPPPQILIKNTPVPANPSTTFSAAKFASFITQYSTGQVSVEIEWELQKENSKRWNPEIQYTSNYNKSVNVDFTVDTNGVYSEPRPIGTRYLTRNL

SEQ ID NO: 4956 - DNA, 2205 bp, Adeno-associated virus
atggctgccgatggttatcttccagattggctcgaggacactctctctgaaggaataagacagtggtggaagctcaaacctggcccaccaccaaagcccgcagagcggcataaggacgacagcaggggtcttgtgcttcctggatacaagtacctcggacccttcaacggactcgacaagggagagccggtcaacgaggcagacgccgcggccctcgagcacgacaaggcctacgaccggcagctcgacagcggagacaacccgtacctcaagtacaaccacgccgacgcggagtttcaggagcgccttaaagaagatacgtcttttgggggcaacctcggacgagcagtcttccaggcgaaaaagagggttcttgaacctctgggcctggttgaggaacctgttaagacggctccgggaaaaaagaggcccgtagagcactctcctgtggagccagactcctcctcgggaaccggaaaagcgggcaaccagcctgcaagaaaaagattgaatttcggtcagactggagacgcagactccgtacctgacccccagcctctcggacagccaccagcagccccctctggtctgggaactaatacgatggctacaggcagtggcgcaccaatggcagacaataacgagggcgccgacggagtgggtaattcctcgggagattggcattgcgattccacatggatgggcgacagagtcatcaccaccagcacccgcacctgggccctgcccacctacaacaaccacctctacaagcagatttccagccaatcaggagccagcaatgacaaccactactttggctacagcaccccttgggggtattttgacttcaacagattccactgccacttttcgccacgcgactggcagagactcatcaacaacaactggggattccggcccaaaagactcaacctcaagctgtttaacattcaagtcaaggaggtcacgcagaatgacggtacgacgacgattgccaataaccttaccagcacggttcaggtgtttactgacttggagtaccagctcccgtacgtcctcggctcggcgcatcaaggatgcctcccgccgttcccagcagacgtcttcatggtgccacagtatggatacctcaccctgaacaacgggagtcaggcggtaggacgctcttccttttactgcctggagtactttccttctcagatgcttcgtaccggaaacaactttaccttcagctacacttttgaagacgttcctttccacagcagctacgctcacagtcaaagtctggaccgtctcatgaatcctctcatcgaccagtacctgtattacttgagcagaacaaacactccaagcggaaccactacgcagtccaggcttcagttttctcaggccggagcgagtgacattcgggaccagtctaggaactggcttcctggaccctgttaccgccagcagcgagtatcaaagacagctgcggataacaacaacggtgaatactcgtggactggagctaccaagtaccacctcaatggcagagactctctggtgaatccgggcccggccatggccagccacaaggacgatgaagaaaagttttttcctcaaagcggggttctcatctttgggaagcaaggctcagagaaaacaaatgtggacattgaaaaggtcatgattacagacgaagaggaaatcaggaccaccaatcccgtggctacggagcagtatggttctgtatctaccaacctccagagcggcaacacacgagcagctacctcagatgtcaacacacaaggcgttcttccaggcatggtctggcaggacagagacgtgtacctgcaggggcccatctgggcaaaaattccacacacggacggacattttcacccctctcccctcatgggcggatttggacttaaacaccctcctccacagattctcattaagaataccccggtacctgcgaatccttcgaccaccttcagcgcggcaaagtttgcttccttcatcacacagtattccacggggcaggtcagcgtggagatcgagtgggagctgcagaaggagaacagcaaacgctggaatcccgaaattcagtacacttccaactacaacaaatctgttaatgtggactttactgtggacactaatggggtgtattcagagcctcgccctattggcaccagatacctgactcgtaatctgtaa

SEQ ID NO: 4957 - DNA, 3156 bp, Adeno-associated virus
cgattgaatttagcggccgcgaattcgcccttgctgcgtcaacggaccaatgagaactttcccttcaacgattgcgtcgacaagatggtgatctggtgggaggagggaaagatgaccgccaaggtcgtggagtcggccaaagccattctcggaggaagcaaggtgcgtgtggaccaaaagtgcaagtcttcggcccagatcgacccgactcccgtgatcgtcacctccaacaccaacatgtgcgccgtgattgatggaaactcaacgaccttcgagcaccagcagccgttgcaagaccggatgttcaaatttgaacttacccgccgtctggatcatgactttggaaaggtcaccaagcaggaagtgaaagactttttccggtgggcaaaggatcacgtggttgaggtggagcatgagttctacgtcaaaaagggtggagccaaaaaaagacccgcccccagtgacgcagatataagtgagcccaaacgggcgcgcgagtcagttgcgcagccatcgacgtcagacgcggaagcttcgatcaactacgcggacaggtaccaaaacaaatgttctcgtcacgtgggcatgaatctgatgctgtttccctgcagacaatgcgagcgaatgaatcagaattcaaatatctgcttcactcacggacagaaagactgtttagagtgctttcccgtgtcagaatctcaacccgtttctgtcgtcaaaaaggcgtatcagaaactgtgctacattcatcacatcatgggaaaggtgccagacgcttgcactgcttgcgacctggtcaatgtggatttggatgactgcatctctgaacaataaatgatttaaatcaggtatggctgccgatggttatcttccagattggctcgaggacactctctctgaaggaataagacagtggtggaagctcaaacctggcccaccaccaaagcccgcagagcggcataaggacgacagcaggggtcttgtgcttcctggatacaagtacctcggacccttcaacggactcgacaagggagagccggtcaacgaggcagacgccgcggccctcgagcacgacaaggcctacgaccggcagctcgacagcggagacaacccgtacctcaagtacaaccacgccgacgcggagtttcaggagcgccttaaagaagatacgtcttttgggggcaacctcggacgagcagtcttccaggcgaaaaagagggttcttgaacctctgggcctggttgaggaacctgttaagacggctccgggaaaaaagaggcccgtagagcactctcctgtggagccagactcctcctcgggaaccggaaaagcgggcaaccagcctgcaagaaaaagattgaatttcggtcagactggagacgcagactccgtacctgacccccagcctctcggacagccaccagcagccccctctggtctgggaactaatacgatggctacaggcagtggcgcaccaatggcagacaataacgagggcgccgacggagtgggtaattcctcgggagattggcattgcgattccacatggatgggcgacagagtcatcaccaccagcacccgcacctgggccctgcccacctacaacaaccacctctacaagcagatttccagccaatcaggagccagcaatgacaaccactactttggctacagcaccccttgggggtattttgacttcaacagattccactgccacttttcgccacgcgactggcagagactcatcaacaacaactggggattccggcccaaaagactcaacctcaagctgtttaacattcaagtcaaggaggtcacgcagaatgacggtacgacgacgattgccaataaccttaccagcacggttcaggtgtttactgacttggagtaccagctcccgtacgtcctcggctcggcgcatcaaggatgcctcccgccgttcccagcagacgtcttcatggtgccacagtatggatacctcaccctgaacaacgggagtcaggcggtaggacgctcttccttttactgcctggagtactttccttctcagatgcttcgtaccggaaacaactttaccttcagctacacttttgaagacgttcctttccacagcagctacgctcacagtcaaagtctggaccgtctcatgaatcctctcatcgaccagtacctgtattacttgagcagaacaaacactccaagcggaaccactacgcagtccaggcttcagttttctcaggccggagcgagtgacattcgggaccagtctaggaactggcttcctggaccctgttaccgccagcagcgagtatcaaagacagctgcggataacaacaacggtgaatactcgtggactggagctaccaagtaccacctcaatggcagagactctctggtgaatccgggcccggccatggccagccacaaggacgatgaagaaaagttttttcctcaaagcggggttctcatctttgggaagcaaggctcagagaaaacaaatgtggacattgaaaaggtcatgattacagacgaagaggaaatcaggaccaccaatcccgtggctacggagcagtatggttctgtatctaccaacctccagagcggcaacacacgagcagctacctcagatgtcaacacacaaggcgttcttccaggcatggtctggcaggacagagacgtgtacctgcaggggcccatctgggcaaaaattccacacacggacggacattttcacccctctcccctcatgggcggatttggacttaaacaccctcctccacagattctcattaagaataccccggtacctgcgaatccttcgaccaccttcagcgcggcaaagtttgcttccttcatcacacagtattccacggggcaggtcagcgtggagatcgagtgggagctgcagaaggagaacagcaaacgctggaatcccgaaattcagtacacttccaactacaacaaatctgttaatgtggactttactgtggacactaatggggtgtattcagagcctcgccctattggcaccagatacctgactcgtaatctgtaattgcttgttaatcaataaaccgtttaattcgtttcagttgaactttggtctctgcgaagggcgaattcgtttaaacctgcaggactagtccctttagtgag

SEQ ID NO: 4958 - protein, 734 aa, Adeno-associated virus
MAADGYLPDWLEDTLSEGIRQWWKLKPGPPPKPAERHKDDSRGLVLPGYKYLGPFNGLDKGEPVNEADAAALEHDKAYDRQLDSGDNPYLKYNHADAEFQERLKEDTSFGGNLGRAVFQAKKRVLEPLGLVEEPVKTAPGKKRPVEHSPVEPDSSSGTGKAGNQPARKRLNFGQTGDADSVPDPQPLGQPPAAPSGLGTNTMATGSGAPMADNNEGADGVGNSSGDWHCDSTWMGDRVITTSTRTWALPTYNNHLYKQISSQSGASNDNHYFGYSTPWGYFDFNRFHCHFSPRDWQRLINNNWGFRPKRLNLKLFNIQVKEVTQNDGTTTIANNLTSTVQVFTDLEYQLPYVLGSAHQGCLPPFPADVFMVPQYGYLTLNNGSQAVGRSSFYCLEYFPSQMLRTGNNFTFSYTFEDVPFHSSYAHSQSLDRLMNPLIDQYLYYLSRTNTPSGTTTQSRLQFSQAGASDIRDQSRNWLPGPCYRQQRVSKTAADNNNGEYSWTGATKYHLNGRDSLVNPGPAMASHKDDEEKFFPQSGVLIFGKQGSEKTNVDIEKVMITDEEEIRTTNPVATEQYGSVSTNLQSGNTRAATSDVNTQGVLPGMVWQDRDVYLQGPIWAKIPHTDGHFHPSPLMGGFGLKHPPPQILIKNTPVPANPSTTFSAAKFASFITQYSTGQVSVEIEWELQKENSKRWNPEIQYTSNYNKSVNVDFTVDTNGVYSEPRPIGTRYLTRNL

SEQ ID NO: 4959 - DNA, 2208 bp, Adeno-associated virus
atggctgccgatggttatcttccagattggctcgaggacactctctctgaaggaataagacagtggtggaagctcaaacctggcccaccaccaccaaagcccgcagagcggcataaggacgacagcaggggtcttgtgcttcctgggtacaagtacctcggacccttcaacggactcgacaagggagagccggtcaacgaggcagacgccgcggccctcgagcacgacaaggcctacgaccggcagctcgacagcggagacaacccgtacctcaagtacgaccacgccgacgcggagtttcaggagcgccttaaagaagatacgtcttttgggggcaacctcggacgagcagtcttccaggcaaaaaagagggttcttgaacctctgggcctggttgaggagcctgttaagacggctccgggaaaaaagaggccggtagagcactctcctgtggagccagactcctcctcgggaaccggaaaagcgggcaaccagcctgcaagaaagagattgaatttcggtcagactggagacgcagactccgtacctgacccccagcctctcggacagccaccagcagccccctctggtctgggaactaatacgatggctacaggcagtggcgcaccaatggcagacaataacgatggcgccgacggagtgggtaattcctcgggaaattggcattgcgattccacatggatgggcgacagagtcatcaccaccagcacccgaacctgggctctgcccacctacaacaaccatctgtacaagcagatttccagccaatcaggagccagcaacgacaaccactactttggctacagcaccccttgggggtattttgacttcaacagattccactgccacttttcaccacgtgactggcaaagactcatcaacaacaactggggattccggcccaagagactcaacttcaagctctttaacattcaagtcagagaggtcacgcagaatgatggtacgacgacgattgccaataaccttaccagcacggttcaggtgtttactgactcggagtaccagctcccgtacgtcctcggctcggcgcatcaaggatgcctcccgccgttcccagcagacgtcttcatggtgccacagtatggatacctcaccctgaacaacgggagtcaggcagtaggacgctcttcattttactgcctggagtacttcccttctcagatgctgcgtaccggaaacaactttaccttcagctacacctttgaggatgttcctttccacagcagctacgctcacagccagagtttggaccgtctcatgaatcctctcatcgaccagtacctgtattacttgagcagaacaaacactccaagcggaaccaccacgcagtccaggcttcagttttctcaggccggagcgagtgacattcgggatcagtctaggaactggcttcctggaccctgttaccgccagcagcgagtatcaaagacatctgcggacaacaacaacagtgaatactcgtggattggagctaccaagtaccacctcaatggcagagactctctggtgaatccgggcccggcaatggccagccacaaggacgatgaagaaaagttttttcctcagagcggggttctcatctttggaaaacaaggatcagagaaaacaaatgtggacattgaaaaggtcatgattacagacgaagaggaaatcagaaccaccaatcccgtggccacggagcagtatggttctgtatctaccaacctccagagcggcaacacacaagcatctactgcagatgtcaacacacaaggcgttcttccaggcatggtctggcaggacagagacgtgtacctgcaggggcctatctgggcaaagattccgcacacggacggacattttcacccctctcccctcatgggcggattcggacttaaacaccctcctccacagattctcatcaaaaacaccccggtacctgcgaatccttcgaccaccttcagtgcggcaaagtttgcttccttcatcacacagtattccacggggcgggtcagcgtggagatcgagtgggagctacagaaggagaacagcaaacgctggaatcccgagatccagtacacttccaactacaacaaatctgttaatgtggactttactgtggacactaatggtgtgtattcagagcctcgccccattggcaccagatacctgactcgtaatctgtaa

SEQ ID NO: 4960 - protein, 735 aa, Adeno-associated virus
MAADGYLPDWLEDTLSEGIRQWWKLKPGPPPPKPAERHKDDSRGLVLPGYKYLGPFNGLDKGEPVNEADAAALEHDKAYDRQLDSGDNPYLKYDHADAEFQERLKEDTSFGGNLGRAVFQAKKRVLEPLGLVEEPVKTAPGKKRPVEHSPVEPDSSSGTGKAGNQPARKRLNFGQTGDADSVPDPQPLGQPPAAPSGLGTNTMATGSGAPMADNNDGADGVGNSSGNWHCDSTWMGDRVITTSTRTWALPTYNNHLYKQISSQSGASNDNHYFGYSTPWGYFDFNRFHCHFSPRDWQRLINNNWGFRPKRLNFKLFNIQVREVTQNDGTTTIANNLTSTVQVFTDSEYQLPYVLGSAHQGCLPPFPADVFMVPQYGYLTLNNGSQAVGRSSFYCLEYFPSQMLRTGNNFTFSYTFEDVPFHSSYAHSQSLDRLMNPLIDQYLYYLSRTNTPSGTTTQSRLQFSQAGASDIRDQSRNWLPGPCYRQQRVSKTSADNNNSEYSWIGATKYHLNGRDSLVNPGPAMASHKDDEEKFFPQSGVLIFGKQGSEKTNVDIEKVMITDEEEIRTTNPVATEQYGSVSTNLQSGNTQASTADVNTQGVLPGMVWQDRDVYLQGPIWAKIPHTDGHFHPSPLMGGFGLKHPPPQILIKNTPVPANPSTTFSAAKFASFITQYSTGRVSVEIEWELQKENSKRWNPEIQYTSNYNKSVNVDFTVDTNGVYSEPRPIGTRYLTRNL

SEQ ID NO: 4961 - DNA, 2217 bp, Adeno-associated virus
atggctgccgatggttatcttccagattggctcgaggacaacctctctgagggcattcgcgagtggtgggacttgaaacctggagccccgaaacccaaagccaaccagcaaaagcaggacgacggccggggtctggtgcttcctggctacaagtacctcggacccttcaacggactcgacaagggggagcccgtcaacgcggcggacgcagcggccctcgagcacgacaaggcctacgaccagcagctcaaagcgggtgacaatccgtacctgcggtataaccacgccgacgccgagtttcaggagcgtctgcaagaagatacgtcttttgggggcaacctcgggcgagcagtcttccaggccaagaagcgggttctcgaacctctcggtctggttgaggaaggcgctaagacggctcctggaaagaagagaccggtagagccatcaccccagcgttctccagactcctctacgggcatcggcaagacaggccagcagcccgcgaaaaagagactcaactttgggcagactggcgactcagagtcagtgcccgaccctcaaccaatcggagaaccccccgcaggcccctctggtctgggatctggtacaatggctgcaggcggtggcgctccaatggcagacaataacgaaggcgccgacggagtgggtagttcctcaggaaattggcattgcgattccgcatggctgggcgacagagtcatcaccaccagcacccgaccctgggccctccccacctacaacaaccacctctacaagcaaatctccaacgggacatcgggaggaagcaccaacgacaacacctacttcggctacagcaccccctgggggtattttgactttaacagattccactgccacttctcaccacgtgactggcagcgactcatcaacaacaactggggattccggcccaagagactcaacttcaagctcttcaacatccaggtcaaggaggtcacgcagaatgaaggcaccaagaccatcgccaataaccttaccagcacgattcaggtctttacggactcggaataccagctcccgtacgtcctcggctctgcgcaccagggctgcccgcctccgttcccggcggacgtcttcatgattcctcagtacgggtacctgactctgaacaacggcagtcaggccgtgggccgttcctccttctactgcctggagtactttccttctcaaatgcggagaacgggcaacaactttgagttcagctaccagtttgaggacgtgccttttcacagcagctacgcgcatagccaaagcctggaccggctgatgaaccccctcatcgaccagtacctgtactacctgtctcggactcagtccacgggaggtaccgcaggaactcagcagttgctattttctcaggccgggcctaataacatgtcggctcaggccaaaaactggctacccgggccctgctaccggcagcaacgcgtctccacgacactgtcgcaaaataacaacagcaactttgcttggaccggtgccaccaagtatcatctgaatggcagagactctctggtaaatcccggtgtcgctatggcaacgcacaaggacgacgaagagcgattttttccatccagcggagtcttgatgtttgggaaacagggagctggaaaagacaacgtggactatagcagcgttatgctaaccagtgaggaagaaatcaaaaccaccaacccagtggccacagaacagtacggcgtggtggccgataacctgcaacagcaaaacgccgctcctattgtaggggccgtcaacagtcaaggagccttacctggcatggtctggcagaaccgggacgtgtacctgcagggtcctatctgggccaagattcctcacacggacggcaactttcatccttcgccgctgatgggaggctttggactgaaacacccgcctcctcagatcctgattaagaatacacctgttcccgcggatcctccaactaccttcagtcaagccaagctggcgtcgttcatcacgcagtacagcaccggacaggtcagcgtggaaattgaatgggagctgcagaaagagaacagcaagcgctggaacccagagattcagtatacttccaactactacaaatctacaaatgtggactttgctgtcaatactgagggtacttattcagagcctcgccccattggcacccgttacctcacccgtaacctgtaa

SEQ ID NO: 4962 - protein, 738 aa, Adeno-associated virus
MAADGYLPDWLEDNLSEGIREWWDLKPGAPKPKANQQKQDDGRGLVLPGYKYLGPFNGLDKGEPVNAADAAALEHDKAYDQQLKAGDNPYLRYNHADAEFQERLQEDTSFGGNLGRAVFQAKKRVLEPLGLVEEGAKTAPGKKRPVEPSPQRSPDSSTGIGKTGQQPAKKRLNFGQTGDSESVPDPQPIGEPPAGPSGLGSGTMAAGGGAPMADNNEGADGVGSSSGNWHCDSAWLGDRVITTSTRPWALPTYNNHLYKQISNGTSGGSTNDNTYFGYSTPWGYFDFNRFHCHFSPRDWQRLINNNWGFRPKRLNFKLFNIQVKEVTQNEGTKTIANNLTSTIQVFTDSEYQLPYVLGSAHQGCPPPFPADVFMIPQYGYLTLNNGSQAVGRSSFYCLEYFPSQMRRTGNNFEFSYQFEDVPFHSSYAHSQSLDRLMNPLIDQYLYYLSRTQSTGGTAGTQQLLFSQAGPNNMSAQAKNWLPGPCYRQQRVSTTLSQNNNSNFAWTGATKYHLNGRDSLVNPGVAMATHKDDEERFFPSSGVLMFGKQGAGKDNVDYSSVMLTSEEEIKTTNPVATEQYGVVADNLQQQNAAPIVGAVNSQGALPGMVWQNRDVYLQGPIWAKIPHTDGNFHPSPLMGGFGLKHPPPQILIKNTPVPADPPTTFSQAKLASFITQYSTGQVSVEIEWELQKENSKRWNPEIQYTSNYYKSTNVDFAVNTEGTYSEPRPIGTRYLTRNL

SEQ ID NO: 4963 - protein, 735 aa, Adeno-associated virus
MAADGYLPDWLEDTLSEGIRQWWKLKPGPPPPKPAERHKDDSRGLVLPGYKYLGPFNGLDKGEPVNEADAAALEHDKAYDRQLDSGDNPYLKYNHADAEFQERLKEDTSFGGNLGRAVFQAKKRVLEPLGLVEEPVKTAPGKKRPVEHSPVEPDSSSGTGKAGQQPARKRLNFGQTGDADSVPDPQPLGQPPAAPSGLGSTTMATGSGAPMADNNEGADGVGNSSGNWHCDSQWLGDRVITTSTRTWALPTYNNHLYKQISSQSGASNDNHYFGYSTPWGYFDFNRFHCHFSPRDWQRLINNNWGFRPKRLNFKLFNIQVKEVTQNDGTTTIANNLTSTVQVFTDSEYQLPYVLGSAHQGCLPPFPADVFMVPQYGYLTLNNGSQAVGRSSFYCLEYFPSQMLRTGNNFQFSYTFEDVPFHSSYAHSQSLDRLMNPLVDQYLYYLNKTQTNSGTLQQSRLLFSQAGPTNMSLQAKNWLPGPCYRQQRLSKQANDNNNSNFPWTAATKYHLNGRDSLVNPGPAMASHKDDEEKFFPMHGTLIFGKQGTNANDADLENVMITDEEEIRTTNPVATEQYGTVSNNLQNSNTGPTTGTVNHQGALPGMVWQDRDVYLQGPIWAKIPHTDGHFHPSPLMGGFGLKHPPPQIMIKNTPVPANPPTNFSSAKFASFITQYSTGQVSVEIEWELQKENSKRWNPEIQYTSNYNKSVNVDFTVDTNGVYSEPRPIGTRYLTRNL

SEQ ID NO: 4964 - DNA, 3158 bp, Adeno-associated virus
gattgaatttagcggccgcgaattcgcccttgctgcgtcaactggaccaatgagaactttcctttcaatgattgcgtcgacaagatggtgatctggtgggaggagggaaagatgaccgccaaggtcgtggagtcggccaaagccattctcggaggaagcaaggtgcgcgcggaccagaaatgcaagtcctcggcccagatagacccgactcccgtgattgtcacctccaacaccaacatgtgcgccgtgattgacgggaactcaacgaccttcgaacaccagcagccgttgcaagaccggatgttcaaatttgaactcacccgccgtctggatcatgactttgggaaggtcaccaagcaggaagtcaaagactttttccggtgggcaaaggatcacgtggttgaggtggagcatgaattctacgtcaaaaagggtggagctaagaaaagacccgcccccagtgacgcagatataagtgagcccaaacgggcgcgcgagtcagttgcgcagccatcgacgtcagacgcggaagcttcgatcaactacgcgggcaggtaccaaaacaaatgttctcgtcacgtgggcatgaatctgatgctgtttccctgcagacaatgcgagagaatgaatcagaattcaaatatctgcttcactcacggacagaaagactgtttagagtgctttcccgtgtcagaatctcaacccgtttctgtcgtcaaaaaggcgtatcagaaactttgctacattcatcatatcatgggaaaggtgccagacgcttgcactgcctgcgatctggtcaatgtggatttggatgactgcatctctgaacaataaatgatttaaatcaggtatggctgccgatggttatcttccagattggctcgaggacactctctctgaaggaataagacagtggtggaagctcaaacctggcccaccaccaccaaagcccgcagagcggcataaggacgacagcaggggtcttgtgcttcctgggtacaagtacctcggacccttcaacggactcgacaagggggagccggtcaacgaggcagacgccgcggccctcgagcacgacaaggcctacgaccggcagctcgacagcggagacaacccgtacctcaagtacaaccacgccgacgcggagtttcaggagcgccttaaagaagatacgtcttttgggggcaacctcggacgagcagtcttccaggcaaaaaagagggttcttgaacctctgggcctggttgaggaacctgttaaaacggctccgggaaaaaagaggccggtagagcactctcctgtggagccagactcctcctcgggaaccggaaaagcgggccagcagcctgcaagaaaaagattgaatttcggtcagactggagacgcagactccgtacctgacccccagcctctcggacagccaccagcagccccctctggtctgggatctactacaatggctacaggcagtggcgcaccaatggcagacaataacgagggtgccgatggagtgggtaattcctcgggaaattggcattgcgattcccaatggctgggcgacagagtcatcaccaccagcacccgcacctgggccctgcccacctacaacaaccacctctacaagcaaatctccagccaatcaggagcctcaaacgacaaccactactttggctacagcaccccctgggggtattttgacttcaacagattccactgccacttttcaccacgtgactggcaaagactcatcaacaacaactggggattccgacccaagagactcaacttcaagctctttaacattcaagtcaaagaggtcacgcagaatgacggtacgacgacgattgccaataaccttaccagcacggttcaggtgtttactgactcggagtaccagctcccgtacgtcctcggctcggcgcatcaaggatgcctcccgccgtttccagcggacgtcttcatggtcccacagtatggatacctcaccctgaacaacgggagtcaggcagtaggacgctcttcattttactgcctggagtactttccttctcagatgctgcgtaccggaaacaactttcaattcagctacacttttgaagacgtgcctttccacagcagctacgctcacagccagagtctggatcggctgatgaatcctctggtcgaccagtacctgtattatctgaacaagacacaaacaaatagtggaactcttcagcagtctcggctactgtttagccaagctggacccaccaacatgtctcttcaagctaaaaactggctgcctggaccttgctacagacagcagcgtctgtcaaagcaggcaaacgacaacaacaacagcaactttccctggactgcagctacaaagtatcatctaaatggccgggactcgttggttaatccaggaccagctatggccagtcacaaggatgacgaagaaaagtttttccccatgcatggaacccttatatttggtaaacaaggaacaaatgccaacgacgcggatttggaaaatgtcatgattacagatgaagaagaaatcaggaccaccaatcccgtggctacggagcagtacggaactgtatcaaataatttgcaaaactcaaacactggtccaactactggaactgtcaatcaccaaggagcgttacctggtatggtgtggcaggatcgagacgtgtacctgcagggacccatttgggccaagattcctcacaccgatggacactttcatccttctccactgatgggaggttttggactcaaacacccacctcctcaaatcatgatcaaaaacactcccgttccagccaatcctcccacaaacttcagttctgccaagtttgcttctttcatcacacagtattccacggggcaggtcagcgtggagatcgagtgggagctgcagaaggagaacagcaaacgctggaatcccgaaattcagtacacttccaactacaacaaatctgttaatgtggactttactgtggacactaatggtgtgtattcagagcctcgccccattggcaccagatacctgactcgtaatctgtaattgcttgttaatcaataaaccgtttaattcgtttcagttgaactttggtctctgcgaagggcgaattcgtttaaacctgcaggactagtccctttagtga

SEQ ID NO: 4965 - protein, 735 aa, Adeno-associated virus
MAADGYLPDWLEDTLSEGIRQWWKLKPGPPPPKPAERHKDDSRGLVLPGYKYLGPFNGLDKGEPVNEADAAALEHDKAYDRQLDSGDNPYLKYNHADAEFQERLKEDTSFGGNLGRAVFQAKKRVLEPLGLVEEPVKTAPGKKRPVEHPPVEPDSSSGTGKAGQQPARKRLNFGQTGDADSVPDPQPLGQPPAAPSGLGSTTMATGSGAPMADNNEGADGVGNSSGNWHCDSQWLGDRVITTSTRTWALPTYNNHLYKQISSQSGASNDNHYFGYSTPWGYFDFNRFHCHFSPRDWQRLINNNWGFRPKRLNFKLFNIQVKEVTQNDGTTTIANNLTSTVQVFTDSEYQLPYVLGSAHQGCLPPFPADVFMVPQYGYLTLNNGSQAVGRSSFYCLEYFPSQMLRTGNNFQFSYTFEDVPFHSSYAHSQSLDRLMNPLIDQYLYYLNKTQTNSGTLQQSRLLFSQAGPTNMSLQAKNRLPGPCYRQQRLSKQANDNNNSNFPWTAATKYHLNGRDSLVNPGPAMASHKDDEEKFFPMHGTLIFGKQGTNANDADLENVMITDEEEIRTTNPVATEQYGTVSNNLQNSNTGPTTGTVNHQGALPGMVWQDRDVYLQGPIWAKIPHTDGHFHPSPLVGGFGLKHPPPQIMIKNTPVPANPPTNFSSAKFASFITQYSTGQVSVEIEWELQKENSKRWNPEIQYTSNYNKSVNVDFTVDTNGVYSEPRPIGTRYLTRNL

SEQ ID NO: 4966 - DNA, 3159 bp, Adeno-associated virus
gattgaatttagcggccgcgaattcgcccttgctgcgtcaactggaccaatgagaactttcctttcaatgattgcgtcgacaagatggtgatctggtgggaggagggaaagatgaccgccaaggtcgtggagtcggccaaagccattctcggaggaagcaaggtgcgcgtggaccagaaatgcaagtcctcggcccagatagacccgactcccgtgattgtcacctccaacaccgacatgtgcgccgtgattgacgggaactcaacgaccttcgaacaccagcagccgttgcaagaccggatgttcaaatttgaactcacccgccgtctggatcatgactttgggaaggtcaccaagcaggaagtcaaagactttttccggtgggcaaaggatcacgtggttgaggtggagcatgaattctacgtcaaaaagggtggagctaagaaaagacccgcccccagtgacgcagatataagtgagcccaaacgggcgcgcgagtcagttgcgcagccatcgacgtcagacgcggaagcttcgatcaactacgcggacaggtaccaaaacaaatgttctcgtcacgtgggcatgaatctgatgctgtttccctgcagacaatgcgagagaatgaatcagaattcaaatatctgcttcactcacggacagaaagactgtttagagtgctttcccgtgtcagaatctcaacccgtttctgtcgtcaaaaaggcgtatcagaaactttgctacattcatcatatcatgggaaaggtgccagacgcttgcactgcctgcgatctggtcaatgtggatttggatgactgcatctctgaacaataaatgatttaaatcaggtatggctgccgatggttatcttccagattggctcgaggacactctctctgaaggaataagacagtggtggaagctcaaacctggcccaccaccaccaaagcccgcagagcggcataaggacgacagcaggggtcttgtgcttcctgggtacaagtacctcggacccttcaacggactcgacaagggggagccggtcaacgaggcagacgccgcggccctcgagcacgacaaggcctacgaccggcagctcgacagcggagacaacccgtacctcaagtacaaccacgccgacgcggagtttcaggagcgccttaaagaagatacgtcttttgggggcaacctcggacgagcagtcttccaggcaaaaaagagggttcttgaacctctgggcctggttgaggaacctgttaaaacggctccgggaaaaaagaggccggtagagcaccctcctgtggagccagactcctcctcgggaaccggaaaagcgggccagcagcctgcaagaaaaagattgaatttcggtcagactggagacgcagactccgtacctgacccccagcctctcggacagccaccagcagccccctctggtctgggatctactacaatggctacaggcagtggcgcaccaatggcagacaataacgagggtgccgatggagtgggtaattcctcgggaaattggcattgcgattcccaatggctgggcgacagagtcatcaccaccagcacccgcacctgggccctgcccacctacaacaaccacctctacaagcaaatctccagccaatcaggagcctcaaacgacaaccactactttggctacagcaccccctgggggtattttgacttcaacagattccactgccacttttcaccacgtgactggcaaagactcatcaacaacaactggggattccgacccaagagactcaacttcaagctctttaacattcaagtcaaagaggtcacgcagaatgacggtacgacgacgattgccaataaccttaccagcacggttcaggtgtttactgactcggagtaccagctcccgtacgtcctcggctcggcgcatcaaggatgcctcccgccgtttccagcggacgtcttcatggtcccacagtatggatacctcaccctgaacaacgggagtcaggcagtaggacgctcttcattttactgcctggagtactttccttctcagatgctgcgtaccggaaacaactttcagttcagctacacttttgaagacgtgcctttccacagcagctacgctcacagccagagtctggatcggctgatgaatcctctgatcgaccagtacctgtattatctgaacaagacacaaacaaatagtggaactcttcagcagtctcggctactgtttagccaagctggacccaccaacatgtctcttcaagctaaaaaccggctgcctggaccttgctacagacagcagcgtctgtcaaagcaggcaaacgacaacaacaacagcaactttccctggaccgcagctacaaagtatcatctaaatggccgggactcgttggttaatccaggaccagctatggccagtcacaaggatgacgaagaaaagtttttccccatgcatggaacccttatatttggtaaacaaggaacaaatgccaacgacgcggatttggaaaatgtcatgattacagatgaagaagaaatcaggaccaccaatcccgtggctacggagcagtacggaactgtatcaaataatttgcaaaactcaaacactggtccaactactggaactgtcaatcaccaaggagcgttacctggtatggtgtggcaggatcgagacgtgtacctgcagggacccatttgggccaagattcctcacaccgatggacactttcatccttctccactggtgggaggttttggactcaaacacccacctcctcaaatcatgatcaaaaacactcccgttccagccaatcctcccacaaacttcagttctgccaagtttgcttctttcatcacacagtattccacggggcaggtcagcgtggagatcgagtgggagctgcagaaggagaacagcaaacgctggaatcccgaaattcagtacacttccaactacaacaaatctgttaatgtggactttactgtggacactaatggtgtgtattcagagcctcgccccattggcaccagatacctgactcgtaatctgtaattgcttgttaatcaataaaccgtttaattcgtttcagttgaactttggtctctgcgaagggcgaattcgtttaaacctgcaggactagtccctttagtgag

SEQ ID NO: 4967 - DNA, 2208 bp, Adeno-associated virus
atggctgccgatggttatcttccagattggctcgaggacactctctctgaaggaataagacagtggtggaagctcaaacctggcccaccaccaccaaagcccgcagagcggcataaggacgacagcaggggtcttgtgcttcctgggtacaagtaccttggacccttcaacggactcgacaagggagagccggtcaacgaggcagacgccgcggccctcgagcacgacaaggcctacgaccggcagctcgacagcggagacaacccgtaccccaagtacaaccacgccgacgcggagttccaggagcgtcttaaagaagatacgtcttttgggggcaacctcggacgagcagtcttccaggcgaaaaagagggttcttgaacctctgggcctggttgaggaacctgttaagacggctccgggaaaaaagaggccggtagagcactctcctgcggagccagactcctcctcgggaaccggaaaagcgggccagcagcctgcaagaaagagattgaatttcggtcagactggagacgcagactccgtacctgacccccagcctctcggacagccaccagcagccccctctggtctgggaactaatacgatggctacaggcagtggcgcaccaatggcagacaataacgagggcgccgacggagtgggtaattcctcgggaaattggcattgcgattccacatggatgggcgacagagtcatcaccaccagcacccgcacctgggctctgcccacctacaacaaccacctctacaagcagatttccagccaatcaggagcctcaaacgacaaccactactttggctacagcaccccttgggggtattttgacttcaacagattccactgccacttttcgccacgtgactggcaaagactcatcaacaacaattggggattccggcccaaaagactcaacttcaagctctttaacattcaagtcaaggaggtcacgcagaatgacggtacgacgacgattgccaataaccttaccagcacggttcaggtgtttactgactcggagtaccagctcccgtacgtcctcggctcggcgcatcaaggatgcctcccgccgttcccagcagacgtcttcatggtgccacagtatggatacctcaccctgaacaacgggagtcaggcagtaggacgctcttcattttactgcctggagtactttccttctcagatgctgcgtaccggaaacaactttaccttcagctacacctttgaggacgttcctttccacagcagctacgcccacagccagagtttggaccgtctcatgaatcctctcatcgaccagtacctgtattacttgagcagaacaaacactccaagcggaaccaccacgcagtcaaggcttcagttttctcaggccggagcaagtgacattcgggaccagtctaggaactggcttcctggaccctgttaccgccagcagcgagtatcaaagacatctgcggataacaacaacagtgaatactcgtggactggagctaccaagtaccaccttaatggaagagactctctggtgaatccgggcccggccatggccagccacaaggacgatgaagaaaagttttttcctcagagcggggttctcatctttggaaaacaagactcgggaaaaactaatgtggacattgaaaaggtcatgattacagacgaagaggaaatcaggaccaccaatcccgtggctacggagcagtatggttctgtatctaccaacctccagagcggcaacacacaagcagctacctcagatgtcaacacacaaggcgttcttccaggcatggtgtggcaggacagagacgtgtacctgcaggggcccatctgggcaaagattccacacacggacggacattttcacccctctcccctcatgggcggattcggacttaaacaccctcccccgcagattctcatcaagaacaccccggtacctgcgaatccttcgactaccttcagtgcggcaaagtttgcttccttcattacacagtactccacggggcaggtcagcgtggagatcgagtgggagctgcagaaggagaacagcaaacgctggaatcccgagattcagtacacttccaactacaacaaatctgttaatgtggactttactgtggacactaatggtgtgtattcagagcctcgccccattggcaccaggtacctgactcgtaatctgtaa

SEQ ID NO: 4968 - protein, 735 aa, Adeno-associated virus
MAADGYLPDWLEDTLSEGIRQWWKLKPGPPPPKPAERHKDDSRGLVLPGYKYLGPFNGLDKGEPVNEADAAALEHDKAYDRQLDSGDNPYPKYNHADAEFQERLKEDTSFGGNLGRAVFQAKKRVLEPLGLVEEPVKTAPGKKRPVEHSPAEPDSSSGTGKAGQQPARKRLNFGQTGDADSVPDPQPLGQPPAAPSGLGTNTMATGSGAPMADNNEGADGVGNSSGNWHCDSTWMGDRVITTSTRTWALPTYNNHLYKQISSQSGASNDNHYFGYSTPWGYFDFNRFHCHFSPRDWQRLINNNWGFRPKRLNFKLFNIQVKEVTQNDGTTTIANNLTSTVQVFTDSEYQLPYVLGSAHQGCLPPFPADVFMVPQYGYLTLNNGSQAVGRSSFYCLEYFPSQMLRTGNNFTFSYTFEDVPFHSSYAHSQSLDRLMNPLIDQYLYYLSRTNTPSGTTTQSRLQFSQAGASDIRDQSRNWLPGPCYRQQRVSKTSADNNNSEYSWTGATKYHLNGRDSLVNPGPAMASHKDDEEKFFPQSGVLIFGKQDSGKTNVDIEKVMITDEEEIRTTNPVATEQYGSVSTNLQSGNTQAATSDVNTQGVLPGMVWQDRDVYLQGPIWAKIPHTDGHFHPSPLMGGFGLKHPPPQILIKNTPVPANPSTTFSAAKFASFITQYSTGQVSVEIEWELQKENSKRWNPEIQYTSNYNKSVNVDFTVDTNGVYSEPRPIGTRYLTRNL

SEQ ID NO: 4969 - DNA, 2208 bp, Adeno-associated virus
atggctgccgatggttatcttccagattggctcgaggacactctctctgaaggaataagacagtggtggaagctcaaacctggcccaccaccaccaaagcccgcagagcggcataaggacgacagcaggggtcttgtgcttcctgggtacaagtaccttggacccttcaacggactcgacaagggagagccggtcaacgaggcagacgccgcggccctcgagcacgacaaggcctacgaccggcagctcgacggcggagacaacccgtacctcaagtacaaccacgccgacgcggagttccaggagcgtcttaaagaagatacgtcttttgggggcaacctcggacgagcagtcttccaggcgaaaaagagggttcttgaacctctgggcctggttgaggaacctgttaagacggctccgggaaaaaagaggccggtagagcactctcttgcggagccagactcctcctcgggaaccggaaaagcgggccagcagcctgcaagaaggagattgaatttcggtcagactggagacgcagactccgtacctgacccccagcctctcggacagccaccagcagccccctctggtctgggaactaatacgatggctacaggcagtggcgcaccaatggcagacaataacgagggcgccgacggagtgggtaattcctcgggaaattggcattgcgattccacatggatgggcgacagagtcatcaccaccagcacccgcacctgggctctgcccacctacaacaaccacctctacaggcagatttccagccaatcaggagcctcaaacgacaaccactactttggctacagcaccccttgggggtattttgacttcaacagattccactgccacttttcgccacgtgactggcaaagactcatcaacaacaattggggatcccggcccaaaagactcaacttcaagctctttaacattcaagtcaaggaggtcacgcagaatgacggtacgacgacgattgccaataaccttaccagcacggttcaggtgtttactgactcggagtaccagctcccgtacgtcctcggctcggcgcatcaaggatgcctcccgccgttcccagcagacgtcttcatggtgccacagtatggatacctcaccctgaacaacgggagtcaggcagtaggacgctcttcattttactgcctggagtactttccttctcagatgctgcgtaccggaaacaactttaccttcagctacacctttgaggacgttcctttccacagcagctacgcccacagccagagtttggaccgtctcatgaatcctctcgtcgaccagtacctgtattacttgagcagaacaaacactccaagcggaaccaccacgcagtcaaggcttcagttttctcaggccggagcaagtgacattcgggaccagtctaggaactggcttcctggaccctgttaccgccagcagcgagtatcaaagacatctgcggataacaacaacagtgaatactcgtggactggagctaccaagtaccaccttaatggaagagactctctggtgaatccgggcccggccatggccagccacaaggacgatgaagaaaagttttttcctcagagcggggttctcatctttggaaaacaagactcgggaaaaactaatgtggacattgaaaaggtcatgattacagacgaagaggaaatcaggaccaccaatcccgtggctacggagcagtatggttctgtatctaccaacctccagagcggcaacacacaagcagctacctcagatgtcaacacacaaggcgttcttccaggcatggtgtggcaggacagagacgtgtacctgcaggggcccatctgggcaaagattccacacacggacggacattttcacccctctcccctcatgggcggattcggacttaaacaccctcccccgcagattctcatcaagaacaccccggtacctgcgaatccttcgactaccttcagtgcggcaaagtttgcttccttcattacacagtactccacggggcaggtcagcgtggagatcgagtgggagctgcagaaggagaacagcaaacgctggaatcccgagattcagtacacttccaactacaacaaatctgttaatgtggactttactgtggacactaatggtgtgtattcagagcctcgccccattggcaccagatacctgactcgtaatctgtaa

SEQ ID NO: 4970 - protein, 735 aa, Adeno-associated virus
MAADGYLPDWLEDTLSEGIRQWWKLKPGPPPPKPAERHKDDSRGLVLPGYKYLGPFNGLDKGEPVNEADAAALEHDKAYDRQLDGGDNPYLKYNHADAEFQERLKEDTSFGGNLGRAVFQAKKRVLEPLGLVEEPVKTAPGKKRPVEHSLAEPDSSSGTGKAGQQPARRRLNFGQTGDADSVPDPQPLGQPPAAPSGLGTNTMATGSGAPMADNNEGADGVGNSSGNWHCDSTWMGDRVITTSTRTWALPTYNNHLYRQISSQSGASNDNHYFGYSTPWGYFDFNRFHCHFSPRDWQRLINNNWGSRPKRLNFKLFNIQVKEVTQNDGTTTIANNLTSTVQVFTDSEYQLPYVLGSAHQGCLPPFPADVFMVPQYGYLTLNNGSQAVGRSSFYCLEYFPSQMLRTGNNFTFSYTFEDVPFHSSYAHSQSLDRLMNPLVDQYLYYLSRTNTPSGTTTQSRLQFSQAGASDIRDQSRNWLPGPCYRQQRVSKTSADNNNSEYSWTGATKYHLNGRDSLVNPGPAMASHKDDEEKFFPQSGVLIFGKQDSGKTNVDIEKVMITDEEEIRTTNPVATEQYGSVSTNLQSGNTQAATSDVNTQGVLPGMVWQDRDVYLQGPIWAKIPHTDGHFHPSPLMGGFGLKHPPPQILIKNTPVPANPSTTFSAAKFASFITQYSTGQVSVEIEWELQKENSKRWNPEIQYTSNYNKSVNVDFTVDTNGVYSEPRPIGTRYLTRNL

SEQ ID NO: 4971 - protein, 738 aa, Adeno-associated virus
MAADGYLPDWLEDNLSEGIREWWDLKPGAPKPKANQQKQDDGRGLVLPGYKYLGPFNGLDKGEPVNAADAAALEHDKAYDQQLKAGDNPYLRYNHADAEFQERLQEDTSFGGNLGRAVFQAKKRVLEPLGLVEEAAKTAPGKKRPVEPSPQRSPDSSAGIGKKGQQPAKKRLNFGQTGDSESVPDPQPIGEPPAGPSGLGSGTMAAGGGAPMADNNEGADGVGSSSGNWHCDSTWLGDRVITTSTRTWALPTYNNHLYKQISNGTSGGSTNDNTYFGYSTPWGYFDFNRFHCHFSPRDWQRLINNNWGFRPKRLSFKLFNIQVKEVTQNEGTETIANNLTSTIQVFTDSEYQLPYVLGSAHQGCLPPFPADVFMIPQYGYLTLNNGSQAVGRSSFYCLEYFPSQMLRTGNNFEFSYTFEDVPFHSSCAHSQSSDRLMNPLIDQYLYYLSRTRSTGGTQGTQQLLFSQAGPANMSAQAKNWLPGPCYRQQRVSTTLSQNNNSNFAWTGATKYHLNGRDSLVNPGVAMATHKDDEERFFPSSGVLMFGKQGAGRDNVDYSSVMLTSEEEIKTTNPVATEQYGVVADNLQQTNTGPIVGNVNSQGALPGMVWQNRDVYLQGPIWAKIPHTDGNFHPSPLMGGFGLKHPPPQILIKNTPVPADPPTTFSQAKLASFITQYSTGQVSVEIEWELQKENSKRWNPEIQYTSNYYKSTNVDFAVNTEGTYSEPRPIGTRYLTRNL

SEQ ID NO: 4972 - DNA, 2217 bp, Adeno-associated virus
atggctgctgacggttatcttccagattggctcgaggacaacctctctgagggcattcgcgagtggtgggacctgaaacctggagcccccaagcccaaggccaaccagcagaagcaggacgacggccggggtctggtgcttcttggctacaagtacctcggacccttcaacggactcgacaagggggagcccgtcaatgcggcggacgcagcggccctcgagcacgacaaggcctacgaccagcagctcaaagcgggtgacaatccgtacctgcggtataaccacgccgacgccgagtttcaggagcgtctgcaagaagatacgtcttttgggggcaacctcgggcgagcagtcttccaggccaagaagcgggttctcgaacctctcggtctggttgaggaagctgctaagacggctcctggaaagaagagaccggtagaaccgtcacctcagcgttcccccgactcctccacgggcatcggcaagaaaggccagcagcccgctaaaaagagactgaactttggtcagactggcgactcagagtcagtccccgaccctcaaccaatcggagaaccaccagcaggcccctctggtctgggatctggtacaatggctgcaggcggtggcgctccaatggcagacaataacgaaggcgccgacggagtgggtagttcctcaggaaattggcattgcgattccacatggctgggcgacagagtcatcaccaccagcacccgaacctgggccctgcccacctacaacaaccacctctacaagcaaatatccaatgggacatcgggaggaagcaccaacgacaacacctacttcggctacagcaccccctgggggtattttgacttcaacagattccactgccacttctcaccacgtgactggcagcgactcatcaacaacaactggggattccggccaaaaagactcagcttcaagctcttcaacatccaggtcaaggaggtcacgcagaatgaaggcaccaagaccatcgccaataaccttaccagcacgattcaggtatttacggactcggaataccagctgccgtacgtcctcggctccgcgcaccagggctgcctgcctccgttcccggcggacgtcttcatgattccccagtacggctaccttacactgaacaatggaagtcaagccgtaggccgttcctccttctactgcctggaatattttccatctcaaatgctgcgaactggaaacaattttgaattcagctacaccttcgaggacgtgcctttccacagcggctacgcacacagccagagcttggaccgactgatgaatcctctcatcgaccagtacctgtactacttatccagaactcagtccacaggaggaactcaaggtacccagcaattgttattttctcaagctgggcctgcaaacatgtcggctcaggctaagaactggctacctggaccttgctaccggcagcagcgagtctctacgacactgtcgcaaaacaacaacagcaactttgcttggactggtgccaccaaatatcacctgaacggaagagactctttggtaaatcccggtgtcgccatggcaacccacaaggacgacgaggaacgcttcttcccgtcgagtggagtcctgatgtttggaaaacagggtgctggaagagacaatgtggactacagcagcgttatgctaaccagcgaagaagaaattaaaaccactaaccctgtagccacagaacaatacggtgtggtggctgacaacttgcagcaaaccaatacagggcctattgtgggaaatgtcaacagccaaggagccttacctggcatggtctggcagaaccgagacgtgtacctgcagggtcccatctgggccaagattcctcacacggacggcaacttccacccttcaccgctaatgggaggatttggactgaagcacccacctcctcagatcctgatcaagaacacgccggtacctgcggatcctccaacgacgttcagccaggcgaaattggcttccttcattacgcagtacagcaccggacaggtcagcgtggaaatcgagtgggagctgcagaaggagaacagcaaacgctggaacccagagattcagtacacttcaaactactacaaatctacaaatgtggactttgctgtcaatacagagggaacttattctgagcctcgccccattggtactcgttacctcacccgtaatctgtaa

SEQ ID NO: 4973 - protein, 738 aa, Adeno-associated virus
MAADGYLPDWLEDNLSEGIREWWDLKPGAPKPKANQQKQDDGRGLVLLGYKYLGPFNGLDKGEPVNAADAAALEHDKAYDQQLKAGDNPYLRYNHADAEFQERLQEDTSFGGNLGRAVFQAKKRVLEPLGLVEEAAKTAPGKKRPVEPSPQRSPDSSTGIGKKGQQPAKKRLNFGQTGDSESVPDPQPIGEPPAGPSGLGSGTMAAGGGAPMADNNEGADGVGSSSGNWHCDSTWLGDRVITTSTRTWALPTYNNHLYKQISNGTSGGSTNDNTYFGYSTPWGYFDFNRFHCHFSPRDWQRLINNNWGFRPKRLSFKLFNIQVKEVTQNEGTKTIANNLTSTIQVFTDSEYQLPYVLGSAHQGCLPPFPADVFMIPQYGYLTLNNGSQAVGRSSFYCLEYFPSQMLRTGNNFEFSYTFEDVPFHSGYAHSQSLDRLMNPLIDQYLYYLSRTQSTGGTQGTQQLLFSQAGPANMSAQAKNWLPGPCYRQQRVSTTLSQNNNSNFAWTGATKYHLNGRDSLVNPGVAMATHKDDEERFFPSSGVLMFGKQGAGRDNVDYSSVMLTSEEEIKTTNPVATEQYGVVADNLQQTNTGPIVGNVNSQGALPGMVWQNRDVYLQGPIWAKIPHTDGNFHPSPLMGGFGLKHPPPQILIKNTPVPADPPTTFSQAKLASFITQYSTGQVSVEIEWELQKENSKRWNPEIQYTSNYYKSTNVDFAVNTEGTYSEPRPIGTRYLTRNL

SEQ ID NO: 4974 - protein, 735 aa, Adeno-associated virus
MAADGYLPDWLEDTLSEGIRQWWKLKPGPPPPKPAERHKDDSRGLVLPGYKYLGPFNGLDKGEPVNEADAAALEHDKAYDRQLDSGDNPYLKYNHADAEFQERLKEDTSFGGNLGRAVFQAKKRVLEPLGLVEPPVKTAPGKKRPVEHSPAEPDSSSGTGKAGQQPARKRLNFGQTGDADSVPDPQPLGQPPAAPSGLGSTTMATGSGAPMADNNEGADGVGNSSGNWHCDSQWLGDRVITTSTRTWALPTYNNHLYKQISSQSGASNDNHYFGYSTPWGYFDFNRFHCHFSPRDWQRLINNNWGFRPKRLNFKLFNIQVKEVTQNDGTTTIANNLTSTVQVFTDSEYQLPYVLGSAHQGCLPPFPADVFMVPQYGYLTLNNGSQAVGRSSFYCLEYFPSQMLRTGNNFQFSYTFEDVPFHSSYAHSQSLDRLMNPLIDQYLYYLNKTQSNSGTLQQSRLLFSQAGPTSMSLQAKNWLPGPCYRQQRLSKQANDNNNSNFPWTAATKYHLNGRDSLVNPGPAMASHKDDEEKFFPMHGTLIFGKQGTNANDADLDNVMITDEEEIRTTNPVATEQYGYVSNNLQNSNTGPTTGTVNHQGALPGMVWQDRDVYLQGPIWAKIPHTDGHFHPSPLMGGFGLKHPPPQIMIKNTPVPANPPTNFSSAKFASFITQYSTGQVSVEIEWELQKENSKRWNPEIQYTSNYNKSVNVDFTVDTNGVYSEPRPIGTRYLTRNL

SEQ ID NO: 4975 - protein, 735 aa, Adeno-associated virus
MAADGYLPDWLEDTLSEGIRQWWKLKPGPPPPKPAERHKDDSRGLVLPGYKYLGPFNGLDKGEPVNEADAAALEHDKAYDRQLDSGDNPYLKYNHADAEFQERLKEDTSFGGNLGRAVFQAKKRVLEPLGLVEGPVKTAPGKKRPVEHSPAEPDSSSGTGKAGQQPARKRLNFGQTGDADSVPDPQPLGQPPAAPSGLGSTTMATGSGAPMADNNEGADGVGNSSGNWHCDSQWLGDRVITTSTRTWALPTYNNHLYKQISSQSGASNDNHYFGYSTPWGYFDFNRFHCHFSPRDWQRLINNNWGFRPKRLNFKLFNIQVKEVTQNDGTTTIANNLTSTVQVFTDSEYQLPYVLGSAHQGCLPPFPADVFMVPQYGYLTLNNGSQAVGRSSFYCLEYFPSQMLRTGNNFQFSYTFEDVPFHSSYAHSQSLDRLMNPLIDQYLYYLNKTQSNSGTLQQSRLLFSQAGPTSMSLQAKNWLPGPCYRQQRLSKQANDNNNSNFPWTAATKYHLNGRDSLVNPGPAMASHKDDEEKFFPMHGTLIFGKQGTNANDADLDNVMITDEEEIRTTNPVATEQYGYVSNNLQNSNTGPTTGTVNHQGALPGMVWQDRDVYLQGPIWAKIPHTDGHFHPSPLMGGFGLKHPPPQIMIKNTPVPANPPTNFSSAKFASFITQYSTGQVSVEIEWELQKENSKRWNPEIQYTSNYNKSVNVDFTVDTNGVYSEPRPIGTRYLTRNL

SEQ ID NO: 4976 - DNA, 2208 bp, Adeno-associated virus
atggctgccgatggttatcttccagattggctcgaggacactctctctgaaggaataagacagtggtggaagctcaaacctggcccaccaccaccaaagcccgcagagcggcataaggacgacagcaggggtcttgtgcttcctgggtacaagtacctcggacccttcaacggactcgacaagggggagccggtcaacgaggcagacgccgcggccctcgagcacgacaaggcctacgaccggcagctcgacagcggagacaacccgtacctcaagtacaaccacgccgacgcggagtttcaggagcgtcttaaagaagatacgtcttttgggggcaacctcggacgagcagtcttccaggcgaaaaagagggttcttgaacctctgggcctggttgagggacctgttaagacggctccgggaaaaaagaggccggtagagcactctcctgcggagccagactcctcctcgggaaccggaaaagcgggccagcagcctgcaagaaaaagattgaattttggtcagactggagacgcagactccgtacctgacccccagcctctcggacagccaccagcagccccctctggtttgggatctactacaatggctacaggcagtggcgcaccaatggcagacaataacgagggtgccgatggagtgggtaattcctcaggaaattggcattgcgattcccaatggctgggcgacagagtcatcaccaccagcacccgaacctgggccctgcccacctacaacaaccacctctacaagcaaatctcaagccaatcaggagcctcaaacgacaaccactactttggctacagcaccccttgggggtattttgacttcaacagattccactgccacttttcaccacgtgactggcaaagactcatcaacaacaactggggattccgacccaagagactcaacttcaagctctttaacattcaagtcaaagaggtcacgcagaatgacggtacgacgacgattgccaataaccttaccagcacggttcaggtgtttactgactcggagtaccagctcccgtacgtcctcgggtcggcgcatcaaggatgcctcccgccgtttccagcggacgtcttcatggtcccacagtatggatacctcaccctgaacaacgggagtcaggcggtaggacgctcttccttttactgcctggagtactttccttctcagatgcttcgtactggaaacaactttcagttcagctacacctttgaagacgttcctttccacagcagctacgctcacagccagagtctggatcggctgatgaatcctctgatcgaccagtacctgtattatctgaacaaaacacaatcaaatagtggaactcttcagcagtctcggctactgtttagtcaagctggacccaccagcatgtctcttcaagctaaaaactggctacctggaccttgctacagacagcagcgtctgtcaaagcaggcaaacgacaacaacaacagcaactttccctggactgcggctacaaagtatcacctaaatggccgggactcgttggttaatccaggaccagctatggccagtcacaaagacgatgaagaaaagtttttccccatgcatggaaccctgatatttggtaaacaaggaacaaatgctaacgacgcggatttggacaatgtcatgattacagatgaagaagaaatccgcaccaccaatcccgtggctacggagcagtacggatatgtgtcaaataatttgcaaaactcaaatactggtccaactactggaactgtcaatcaccaaggagcgttacctggcatggtgtggcaggatcgagacgtgtacctgcagggacccatttgggccaagattcctcacaccgatggacactttcatccttctccactgatgggaggttttgggctcaaacacccgcctcctcagatcatgatcaaaaacactcccgttccagccaatcctcccacaaacttcagttctgccaagtttgcttctttcatcacacagtattccacggggcaggtcagcgtggagatcgagtgggagctgcagaaagagaacagcaaacgctggaatcccgaaattcagtacacttccaactacaacaaatctgttaatgtggactttactgtggacactaatggcgtgtattcagagcctcgccccattggcaccagatacctgactcgtaatctgtaa

SEQ ID NO: 4977 - DNA, 2211 bp, Adeno-associated virus
atggctgccgatggttatcttccagattggctcgaggacaacctctctgagggcattcgcgagtggtgggacttgaaacctggagccccgaagcccaaagccaaccagcaaaagcaggacgacggccggggtctggtgcttcctggctacaagtacctcggacccttcaacggactcgacaagggggagcccgtcaacgcggcggacgcagcggccctcgagcacgacaaggcctacgaccagcagctcaaagcgggtgacaatccgtacctgcggtataaccacgccgacgccgagtttcaggagcgtctgcaagaagatacgtcttttgggggcaacctcgggcgagcagtcttccaggccaagaagcgggttctcgaacctctcggtctggttgaggaaggcgctaagacggctcctggaaagaaacgtccggtagagcagtcgccacaagagccagactcctcctcgggcatcggcaagacaggccagcagcccgctaaaaagagactcaattttggtcagactggcgactcagagtcagtccccgatccacaacctctcggagaacctccagcaacccccgctgctgtgggacctactacaatggcttcaggcggtggcgcaccaatggcagacaataacgaaggcgccgacggagtgggtaatgcctcaggaaattggcattgcgattccacatggctgggcgacagagtcatcaccaccagcacccgcacctgggccttgcccacctacaataaccacctctacaagcaaatctccagtgcttcaacgggggccagcaacgacaaccactacttcggctacagcaccccctgggggtattttgatttcaacagattccactgccacttttcaccacgtgactggcagcgactcatcaacaacaattggggattccggcccaagagactcaacttcaaactcttcaacatccaagtcaaggaggtcacgacgaatgatggcgtcacaaccatcgctaataaccttaccagcacggttcaagtcttctcggactcggagtaccagcttccgtacgtcctcggctctgcgcaccagggctgcctccctccgttcccggcggacgtgttcatgattccgcaatacggctacctgacgctcaacaatggcagccaagccgtgggacgttcatccttttactgcctggaatatttcccttctcagatgctgagaacgggcaacaactttaccttcagctacacctttgaggaagtgcctttccacagcagctacgcgcacagccagagcctggaccggctgatgaatcctctcatcgaccaatacctgtattacctgaacagaactcaaaatcagtccggaagtgcccaaaacaaggacttgctgtttagccgtgggtctccagctggcatgtctgttcagcccaaaaactggctacctggaccctgttatcggcagcagcgcgtttctaaaacaaaaacagacaacaacaacagcaattttacctggactggtgcttcaaaatataacctcaatgggcgtgaatccatcatcaaccctggcactgctatggcctcacacaaagacgacgaagacaagttctttcccatgagcggtgtcatgatttttggaaaagagagcgccggagcttcaaacactgcattggacaatgtcatgattacagacgaagaggaaattaaagccactaaccctgtggccaccgaaagatttgggaccgtggcagtcaatttccagagcagcagcacagaccctgcgaccggagatgtgcatgctatgggagcattacctggcatggtgtggcaagatagagacgtgtacctgcagggtcccatttgggccaaaattcctcacacagatggacactttcacccgtctcctcttatgggcggctttggactcaagaacccgcctcctcagatcctcatcaaaaacacgcctgttcctgcgaatcctccggcggagttttcagctacaaagtttgcttcattcatcacccaatactccacaggacaagtgagtgtggaaattgaatgggagctgcagaaagaaaacagcaagcgctggaatcccgaagtgcagtacacatccaattatgcaaaatctgccaacgttgattttactgtggacaacaatggactttatactgagcctcgccccattggcacccgttaccttacccgtcccctgtaa

SEQ ID NO: 4978 - DNA, 2208 bp, Adeno-associated virus
atggctgccgatggttatcttccagattggctcgaggacactctctctgaaggaacaagacagtggtggaagctcaaacctggcccaccaccaccaaagcccgcagagcggcataaggacgacagcaggggtcttgtgcttcctgggtacaagtacctcggacccttcaacggactcgacaagggggagccggtcaacgaggcagacgccgcggccctcgagcacgacaaggcctacgaccggcagctcgacagcggagacaacccgtacctcaagtacaaccacgccgacgcggagtttcaggagcgtcttaaagaagatacgtcttttgggggcaacctcggacgagcagtcttccaggcgaaaaagagggttcttgaacctctgggcctggttgaggaacctgttaagacggctccgggaaaaaagaggccggtagagcactctcctgcggagccagactcctcctcgggaaccggaaaagcgggccagcagcctgcaagaaaaagattgaattttggtcagactggagacgcagactccgtacctgacccccagcctctcggacagccaccagcagccccctctggtttgggatctactacaatggctacaggcagtggcgcaccaatggcagacaataacgagggtgccgatggagtgggtaattcctcaggaaattggcattgcgattcccaatggctgggcgacagagtcatcaccaccagcacccgaacctgggccctgcccacctacaacaaccacctctacaagcaaatctcaagccaatcaggagcctcaaacgacaaccactactttggctacagcaccccttgggggtattttgacttcaacagattccactgccacttttcaccacgtgactggcaaagactcatcaacaacaactggggattccgacccaagagactcaacttcaagctctttaacattcaagtcaaagaggtcacgcagaatgacggtacgacgacgattgccaataaccttaccagcacggttcaggtgtttactgactcggagtaccagctcccgtacgtcctcgggtcggcgcatcaaggatgcctcccgccgtttccagcggacgtcttcatggtcccacagtatggatacctcaccctgaacaacgggagtcaggcggtaggacgctcttccttttactgcctggagtactttccttctcagatgcttcgtactggaaacaactttcagttcagctacacctttgaagacgttcctttccacagcagctacgctcacagccagagtctggatcggctgatgaatcctctgatcgaccagtacctgtattatctgaacaaaacacaatcaaatagtggaactcttcagcagtctcggctactgtttagtcaagctggacccaccagcatgtctcttcaagctaaaaactggctacctggaccttgctacagacagcagcgtctgtcaaagcaggcaaacgacaacaacaacagcaactttccctggactgcggctacaaagtaccacctaaatggccgggactcgttggttaatccaggaccagctatggccagtcacaaagacgatgaagaaaagtttttccccatgcatggaaccctgatatttggtaaacaaggaacaaatgctaacgacgcggatttggacaatgtcatgattacagatgaagaagaaatccgcaccaccaatcccgtggctacggagcagtacggatatgtgtcaaataatttgcaaaactcaaatactggtccaactactggaactgtcaatcaccaaggagcgttacctggcatggtgtggcaggatcgagacgtgtacctgcagggacccatttgggccaagattcctcacaccgatggacactttcatccttctccactgatgggaggttttgggctcaaacacccgcctcctcagatcatgatcaaaaacactcccgttccagccaatcctcccacaaacttcagttctgccaagtttgcttctttcatcacacagtattccacggggcaggtcagcgtggagatcgagtgggagctgcagaaagagaacagcaaacgctggaatcccgaaattcagtacacttccaactacaacaaatctgttaatgtggactttactgtggacactaatggcgtgtattcagagcctcgccccattggcaccagatacctgactcgtaatctgtaa

SEQ ID NO: 4979 - DNA, 2217 bp, Adeno-associated virus
atggctgctgacggttatcttccagattggctcgaggacaacctctctgagggcattcgcgagtggtgggacctgaaacctggagcccccaagcccaaggccaaccagcagaagcaggacgacggccggggtctggtgcttcctggctacaagtacctcggacccttcaacggactcgacaagggggagcccgtcaacgcggcggacgcagcggccctcgagcacgacaaggcctacgaccagcagctcaaagcgggtgacaatccgtacctgcggtataaccacgccgacgccgagtttcaggagcgtctgcaagaagatacgtcttttgggggcaacctcgggcgagcagtcttccaggccaagaagcgggttctcgaacctctcggtctggttgaggaagctgctaagacggctcctggaaagaagagaccggtagaaccgtcacctcagcgttcccccgactcctccacgggcatcggcaagaaaggccagcagcccgctaaaaagagactgaactttggtcagactggcgactcagagtcagtccccgaccctcaaccaatcggagaaccacctgcaggcccctctggtctgggatctggtacaatggctgcaggcggtggcgctccaatggcagacaataacgaaggcgccgacggagtgggtagttcctcaggaaattggcattgcgattccacatggctgggcgacagagtcatcaccaccagcacccgaacctgggccctgcccacctacaacaaccacctctacaagcaaatatccaatgggacatcgggagggagcaccaacgacaacacctacttcggctacagcaccccctgggggtattttgacttcaacagattccactgccacttctcaccacgtgactggcagcgactcatcaacaacaactggggattccggccaaaaagactcagcttcaagctcttcaacatccaggtcaaggaggtcacgcagaatgaaggcaccaagaccatcgccaataaccttaccagcacgattcaggtatttacggactcggaataccagctgccgtacgtcctcggctccgcgcaccagggctgcctgcctccgttcccggcggacgtcttcatgattccccagtacggctaccttacactgaacaatggaagtcaagccgtaggccgttcctccttctactgcctggaatattttccatctcaaatgctgcgaactggaaacaattttgaattcagctacaccttcgaggacgtgcctttccacagcagctacgcacacagccagagcttggaccgactgatgaatcctctcatcgaccagtacctgtactacttatccagaactcagtccacaggaggaactcaaggtacccagcaattgttattttctcaagctgggcctgcaaacatgtcggctcaggctaagaactggctacctggaccttgctaccggcagcagcgagtctctacgacactgtcgcaaaacaacaacagcaactttgcttggactggtgccaccaaatatcacctgaacggaagagactctttggtaaatcccggtgtcgccatggcaacccacaaggacgacgaggaacgcttcttcccgtcgagtggagtcctgatgtttggaaaacagggtgctggaagagacaatgtggactacagcagcgttatgctaaccagcgaagaagaaattaaaaccactaaccctgtagccacagaacaatacggtgtggtggctgacaacttgcagcaaaccaatacagggcctattgtgggaaatgtcaacagccaaggagccttacctggcatggtctggcagaaccgagacgtgtacctgcagggtcccatctgggccaagattcctcacacggacggcaactgccacccttcaccgctaatgggaggatttggactgaagcacccacctcctcagatcctgatcaagaacacgccggtacctgcggatcctccaacaacgttcagccaggcgaaattggcttccttcattacgcagtacagcaccggacaggtcagcgtggaaatcgagtgggagctgcagaaggagaacagcaaacgctggaacccagagattcagtacacttcaaactactacaaatctacaaatgtggactttgctgtcaatacagagggaacttattctgagcctcgccccattggtactcgttacctcacccgtaatctgtaa

SEQ ID NO: 4980 - protein, 735 aa, Adeno-associated virus
MAADGYLPDWLEDTLSEGTRQWWKLKPGPPPPKPAERHKDDSRGLVLPGYKYLGPFNGLDKGEPVNEADAAALEHDKAYDRQLDSGDNPYLKYNHADAEFQERLKEDTSFGGNLGRAVFQAKKRVLEPLGLVEEPVKTAPGKKRPVEHSPAEPDSSSGTGKAGQQPARKRLNFGQTGDADSVPDPQPLGQPPAAPSGLGSTTMATGSGAPMADNNEGADGVGNSSGNWHCDSQWLGDRVITTSTRTWALPTYNNHLYKQISSQSGASNDNHYFGYSTPWGYFDFNRFHCHFSPRDWQRLINNNWGFRPKRLNFKLFNIQVKEVTQNDGTTTIANNLTSTVQVFTDSEYQLPYVLGSAHQGCLPPFPADVFMVPQYGYLTLNNGSQAVGRSSFYCLEYFPSQMLRTGNNFQFSYTFEDVPFHSSYAHSQSLDRLMNPLIDQYLYYLNKTQSNSGTLQQSRLLFSQAGPTSMSLQAKNWLPGPCYRQQRLSKQANDNNNSNFPWTAATKYHLNGRDSLVNPGPAMASHKDDEEKFFPMHGTLIFGKQGTNANDADLDNVMITDEEEIRTTNPVATEQYGYVSNNLQNSNTGPTTGTVNHQGALPGMVWQDRDVYLQGPIWAKIPHTDGHFHPSPLMGGFGLKHPPPQIMIKNTPVPANPPTNFSSAKFASFITQYSTGQVSVEIEWELQKENSKRWNPEIQYTSNYNKSVNVDFTVDTNGVYSEPRPIGTRYLTRNL

SEQ ID NO: 4981 - DNA, 2208 bp, Adeno-associated virus
atggctgccgatggttatcttccagattggctcgaggacactctctctgaaggaataagacagtggtggaagctcaaacctggcccaccaccaccaaagcccgcagagcggcatcaggacaacagcaggggtcttgtgcttcctgggtacaagtacctcggaccctccaacggactcgacaaaggagagccggtcaacgaggcagacgccgcggccctcgagcacgacaaggcctacgaccggcagctcgacagcggagacaacccgtacctcaagtacaaccacgccgacgcggagtttcaggagcgtcttaaagaagatacgtcttttgggggcaacctcggacgagcagtcttccaggcgaaaaagagggttcttgaacctctgggcctggttgaggaacctgttaagacggctccgggaaaaaagaggccggtagagcactctcctgtggagccagactcctcctcgggaaccggaaaagcgggccatcagcctgcgagaaagagattgaattttggtcagactggagacgcagactccgtacctgacccccagcctctcggacagccaccagcagcccccacaagtttgggatctactacaatggctacaggcagtggcgcaccaatggcagacaataacgagggtgccgatggagtgggtaattcctcaggaaattggcattgcgattcccaatggctgggcgacagagtcatcaccaccagcacccgaacctgggccctgcccacctacaacaaccacctctacaagcaaatctccagccaatcaggagcctcgaacgacaaccactactttggctgcagcaccccctgggggtattttgacttcaacagattccactgtcacttctccccacgtgattggcaaagactcatcaacaacaactggggattccgacccaagagactcaacttcaagctctttaacattcaagtcaaagaggtcacgcagaatgacggtacgacgacgattgccaataaccttaccagcacggttcaggtgtttactgactcggagtacccgctcccgtacgtcctcggctcggcgcatcaaggatgcctcccgccgtttccagcggacgtcttcatggtcccacagtatggatacctcaccctgaacaacgggagtcaggcggtaggacgctcttccttttactgcctggagtactttccttctcagatgctgcgtaccggaaacaactttaccttcagctacacctttgaggacgttcctttccacagcagctacgctcacagccagagtttggaccggctgatgaatcctctgatcgaccagtatctatattatctgaacaggacacaatcaaatagtggaactcttcagcagtctaggctactgtttagccaagctggacccaccagcatgtctcttcaagctaaaaactggctgcctggaccttgctacagacagcagcgtctttcaaagcaggcaaacgacaacaacaacagcaactttccctggactgcggctacaaagtatcatctaaatggccgggactcgttggttaatccaggaccagctatggccagccacaaagacgatgaagaaaagtttttccccatgcatggaaccctgatatttggtaaacaaggaacaaatgctaacgacgcggatttggagcatgttatgattacagatgaagaagaaatcaggaccaccaatcctgtggctacagagcagtacggaaacgtgtcaaataatttgcaaaactcaaatactggtccaactacagaaaatgtcaatcaccagggagcgttacctggtatggtgtggcaggatcgagacgtgtacctgcagggacccatttgggccaagattcctcacaccgacggacactttcacccttctccactgatgggaggttttggactcaaacacccgcctcctcaaatcatgatcaaaaacactcccgttccagccaatcctcccacaaacttcagttctgccaagtttgcttctttcatcacacagtattccacgggccaggtcagcgtggagattgagtgggagctgcagaaggagaacagcaaacgctggaaccccgagatccagtatacttccaactacaacaaatctgttaatgtggactttactgtggacactaatggtgtgtattcagagccttgccccattggcaccagatacctgactcgtaatctgtaa

SEQ ID NO: 4982 - protein, 735 aa, Adeno-associated virus
MAADGYLPDWLEDTLSEGIRQWWKLKPGPPPPKPAERHQDNSRGLVLPGYKYLGPSNGLDKGEPVNEADAAALEHDKAYDRQLDSGDNPYLKYNHADAEFQERLKEDTSFGGNLGRAVFQAKKRVLEPLGLVEEPVKTAPGKKRPVEHSPVEPDSSSGTGKAGHQPARKRLNFGQTGDADSVPDPQPLGQPPAAPTSLGSTTMATGSGAPMADNNEGADGVGNSSGNWHCDSQWLGDRVITTSTRTWALPTYNNHLYKQISSQSGASNDNHYFGCSTPWGYFDFNRFHCHFSPRDWQRLINNNWGFRPKRLNFKLFNIQVKEVTQNDGTTTIANNLTSTVQVFTDSEYPLPYVLGSAHQGCLPPFPADVFMVPQYGYLTLNNGSQAVGRSSFYCLEYFPSQMLRTGNNFTFSYTFEDVPFHSSYAHSQSLDRLMNPLIDQYLYYLNRTQSNSGTLQQSRLLFSQAGPTSMSLQAKNWLPGPCYRQQRLSKQANDNNNSNFPWTAATKYHLNGRDSLVNPGPAMASHKDDEEKFFPMHGTLIFGKQGTNANDADLEHVMITDEEEIRTTNPVATEQYGNVSNNLQNSNTGPTTENVNHQGALPGMVWQDRDVYLQGPIWAKIPHTDGHFHPSPLMGGFGLKHPPPQIMIKNTPVPANPPTNFSSAKFASFITQYSTGQVSVEIEWELQKENSKRWNPEIQYTSNYNKSVNVDFTVDTNGVYSEPCPIGTRYLTRNL

SEQ ID NO: 4983 - DNA, 2196 bp, Adeno-associated virus
atggctgctgacggttatcttccagattggctcgaggacaacctctctgagggcattcgcgagtggtgggcgctgaaacctggagccccgcaacccaaagccaaccagcaaaagcaggacgacggccggggtctggtgcttcctggctacaagtacctcggacccttcaacggactcgacaagggggagcccgtcaacgaggcggacgccgcggccctcgagcacgacaaggcctacgaccagcagctcaaagcgggtgacaatccgtacctgcggtataatcacgccgacgccgagtttcaagagcgtctgcaagaagatacgtcctttgggggcaacctcgggcgagcagtcttccaggccaaaaagagggtactcgagcctctgggtctggttgaggaaggcgctaagacggctcctggaaagaagcggccagtagaaccggactccagctcgggcatcggcaagtcaggccagcagcccgcgaaaaagagactgaattttgggcagactggcgactcagagtcagtgcctgacccccaacctctctcagaaccacccgcaggtccctctggtctgggatctggtacaatggctgctggcggtggcgctccaatggcagacaataacgaaggcgccgacggagtgggtaatgtctcaggaaattggcattgcgattccacatggctgggcgaccgagtcatcaccaccagcactcggacctgggccctccccacctacaacaaccacctctacaagcaaatctccaacgggacctcgggaggcagcagcaacgacaacacctactttggctacagcaccccctgggggtattttgactttaacagattccactgccacttttcaccacgtgactggcagcgactcatcaacaacaactgggggttccggcccaagaagctcaacttcaagctcttcaacatccaggtcaaggaggtcacccagaatgaaggcaccaagaccatcgccaataacctcaccagcacggtgcaggtctttacggactcggagtaccagctcccgtacgtgctcggctctgcccaccagggctgcctgcctccgttcccggcggacgtgttcatgattccgcagtacgggtacctgacgctgaacaacgggagccaggccgtggggcgatcctccttctactgcctggagtactttccctcgcagatgctgagaacgggcaacaactttaccttcagctacaccttcgaggacgtgcccttccacagcagctacgcgcacagccagagcctggaccggctgatgaacccgctgattgaccagtacctgtactacctgtctcggactcagaccaacgggaccaatgccacgcagactctgttgtttgctcaggccgggcctcagaacatgtcggctcaggccaagaactggctgcctggtccttgctatcggcagcagcgcgtctctacgacagtgtcgcaaaacaacaacagcaactttacctggaccggggcgaccaagtaccacctgaacggccgagactccctggtgagccccggtgtcgccatggcaacgcacaaggacgacgaggagcgcttcttcccgagcagcggggtcctgatgtttggcaagcagggcgctggaaaggacaatgtcgagtacaccaacgtgatgctcaccagcgaggaggagatcaagaccaccaaccctgtggccacggagcagtacggcgtggtggctgacaatctgcagcagaccaactcagctcccattgtgggggcagtcaacagccagggggccttacccggtatggtctggcagaaccgggacgtgtacctgcagggtcccatctgggccaagatcccgcatacggacggcaactttcacccgtctcctctcatgggcggctttggactgaaacacccgcctccccagatcctgatcaaaaacacgccggtacctgcggatcccccggtgaactttacggacgctaagctggcgagtttcatcacgcagtacagcaccgggcaggtcagcgtggagattgagtgggagctgcagaaggagaacagcaagcgctggaatcccgagattcagtacacttccaattattataaatcagctaatgtggactttgccgtcaatgcagatggtgtatatagtgaaccccgccccattggcactcgttacctcacccgtaatctgtaa

SEQ ID NO: 4984 - protein, 731 aa, Adeno-associated virus
MAADGYLPDWLEDNLSEGIREWWALKPGAPQPKANQQKQDDGRGLVLPGYKYLGPFNGLDKGEPVNEADAAALEHDKAYDQQLKAGDNPYLRYNHADAEFQERLQEDTSFGGNLGRAVFQAKKRVLEPLGLVEEGAKTAPGKKRPVEPDSSSGIGKSGQQPAKKRLNFGQTGDSESVPDPQPLSEPPAGPSGLGSGTMAAGGGAPMADNNEGADGVGNVSGNWHCDSTWLGDRVITTSTRTWALPTYNNHLYKQISNGTSGGSSNDNTYFGYSTPWGYFDFNRFHCHFSPRDWQRLINNNWGFRPKKLNFKLFNIQVKEVTQNEGTKTIANNLTSTVQVFTDSEYQLPYVLGSAHQGCLPPFPADVFMIPQYGYLTLNNGSQAVGRSSFYCLEYFPSQMLRTGNNFTFSYTFEDVPFHSSYAHSQSLDRLMNPLIDQYLYYLSRTQTNGTNATQTLLFAQAGPQNMSAQAKNWLPGPCYRQQRVSTTVSQNNNSNFTWTGATKYHLNGRDSLVSPGVAMATHKDDEERFFPSSGVLMFGKQGAGKDNVEYTNVMLTSEEEIKTTNPVATEQYGVVADNLQQTNSAPIVGAVNSQGALPGMVWQNRDVYLQGPIWAKIPHTDGNFHPSPLMGGFGLKHPPPQILIKNTPVPADPPVNFTDAKLASFITQYSTGQVSVEIEWELQKENSKRWNPEIQYTSNYYKSANVDFAVNADGVYSEPRPIGTRYLTRNL

SEQ ID NO: 4985 - DNA, 2196 bp, Adeno-associated virus
atggctgctgacggttatcttccagattggctcgaggacaacctctctgagggcattcgcgagtggtgggcgctgaaacctggagccccgcaacccaaagccaaccagcaaaagcaggacgacggccggggtctggtgcttcctggctacaagtacctcggacccttcaacggactcgacaagggggagcccgtcaacgaggcggacgccgcggccctcgagcacgacaaggcctacgaccagcagctcaaagcgggtgacaatccgtacctgcggtataatcacgccgacgccgagtttcaagagcgtctgcaagaagatacgtcctttgggggcaacctcgggcgagcagtcttccaggccaaaaagagggtactcgagcctctgggtctggttgaggaaggcgctaagacggctcctggaaagaagcggccagtagaaccggactccagctcgggcatcggcaagtcaggccggcagcccgcgaaaaagagactgaattttgggcagactggcgactcagagtcagtgcctgacccccaacctctctcagaaccacccgcaggtccctctggtctgggatctggtacaatggctgcaggcggtggcgctccaatggcagacaataacgaaggcgccgacggagtgggtaatgcctcaggaaattggcattgcgattccacatggctgggcgaccgagtcatcaccaccagcactcggacctgggccctccccacctacaacaaccacctctacaagcaaatctccaacgggacctcgggaggcagcagcaacgacaacacctactttggctacagcaccccctgggggtattttgactttaacagattccactgccacttttcaccacgtgactggcagcgactcatcaacaacaactggggattccggcccaagaggctcaacttcaagctcttcaacatccaggtcaaggaggtcacccagaatgaaggcaccaagaccatcgccaataacctcaccagcacggtgcaggtctttacggactcgaagtaccagctcccgtacgtgctcggctctgcccaccagggctgcctgcctccgttcccggcggacgtgttcatgattccgcagtacgggtacctgacgctgaacaacgggagccaggccgtggggcgatcctccttctactgcctggagtactttccctcgcagatgctgagaacgggcaacaactttaccttcagctacaccttcgaggacgtgcccttccacagcagctacgcgcacagccagagcctggaccggctgatgaacccgctgattgaccagtacctgtactacctgtctcggactcagaccaacgggaccaatgccacgcagactctgttgtttgctcaggccgggcctcagaacatgtcggctcaggccaagaactggctgcctggtccttgctatcggcagcagcgcgtctctacgacagtgtcgcaaaacaacaacagcaactttacctggaccggggcgaccaagtaccacctgaacggccgagactccctggtgaaccccggtgtcgccatggcaacgcacaaggacgacgaggagcgcttcttcccgagcagcggggtcctgatgtttggcaagcagggcgctggaaaggacaatgtcgagtacaccaacgtgatgctcaccagcgaggaggagatcaagaccaccaaccctgtggccacggagcagtacggtgtggtggctgacaatctgcagcagaccaactcggctcccattgtgggggcagtcaacagccagggggccttacccggtatggtctggcagaaccgggacgtgtacctgcagggtcccatctgggccaagatcccgcatacggacggcaactttcacccgtctcctctcatgggcggctttggactgaaacacccgcctccccagatcctgatcaaaaacacgccggtacctgcggatcccccggtgaactttacggacgctaagctggcgagtttcatcacgcagtacagcaccgggcaggtcagcgtggagattgagtgggagctgcagaaggagaacagcaagcgctggaatcccgagattcagtacacttccaattattataaatcagctaatgtggactttgccgtcaatgcagatggtgtatatagtgaaccccgccccattggcactcgttacctcacccgtaatctgtaa

SEQ ID NO: 4986 - protein, 731 aa, Adeno-associated virus
MAADGYLPDWLEDNLSEGIREWWALKPGAPQPKANQQKQDDGRGLVLPGYKYLGPFNGLDKGEPVNEADAAALEHDKAYDQQLKAGDNPYLRYNHADAEFQERLQEDTSFGGNLGRAVFQAKKRVLEPLGLVEEGAKTAPGKKRPVEPDSSSGIGKSGRQPAKKRLNFGQTGDSESVPDPQPLSEPPAGPSGLGSGTMAAGGGAPMADNNEGADGVGNASGNWHCDSTWLGDRVITTSTRTWALPTYNNHLYKQISNGTSGGSSNDNTYFGYSTPWGYFDFNRFHCHFSPRDWQRLINNNWGFRPKRLNFKLFNIQVKEVTQNEGTKTIANNLTSTVQVFTDSKYQLPYVLGSAHQGCLPPFPADVFMIPQYGYLTLNNGSQAVGRSSFYCLEYFPSQMLRTGNNFTFSYTFEDVPFHSSYAHSQSLDRLMNPLIDQYLYYLSRTQTNGTNATQTLLFAQAGPQNMSAQAKNWLPGPCYRQQRVSTTVSQNNNSNFTWTGATKYHLNGRDSLVNPGVAMATHKDDEERFFPSSGVLMFGKQGAGKDNVEYTNVMLTSEEEIKTTNPVATEQYGVVADNLQQTNSAPIVGAVNSQGALPGMVWQNRDVYLQGPIWAKIPHTDGNFHPSPLMGGFGLKHPPPQILIKNTPVPADPPVNFTDAKLASFITQYSTGQVSVEIEWELQKENSKRWNPEIQYTSNYYKSANVDFAVNADGVYSEPRPIGTRYLTRNL

SEQ ID NO: 4987 - DNA, 2196 bp, Adeno-associated virus
atggctgctgacggttatcttccagattggctcgaggacaacctctctgagggcattcgcgagtggtgggcgctgaaacctggagccccgcaacccaaagccaaccagcaaaagcaggacgacggccggggtctggtgcttcctggctacaagtacctcggacccttcaacggactcgacaagggggagcccgtcaacgaggcggacgccgcggccctcgagcacgacaaggcctacgaccagcagctcaaagcgggtgacaatccgtacctgcggtataatcacgccgacgccgagtttcaagagcgtctgcaagaagatacgtcctttgggggcaacctcgggcgagcagtcttccaggccaaaaagagggtactcgagcctctgggtctggttgaggaaggcgctaagacggctcctggaaagaagcggccagtagaaccggactccagctcgggcatcggcaagtcaggccagcagcccgcgaaaaagagactgaattttgggccgactggcgactcagagtcagtgcctgacccccaacctctctcagaaccacctgcaggtccctctggtctgggatctggtacaatggctgcaggcggtggcgctccaatggcagacaataacgaaggcgccgacggagtgggtaatgtctcaggaaattggcattgcgattccacatggctgggcgaccgagtcatcaccaccagcactcggacctgggccctccccacctacaacaaccacctctacaagcaaatctccaacgggacctcgggaggcagcagcaacgacaacacctactttggctacagcaccccctgggggtattttgactttaacagattccactgccacttttcaccacgcgactggcagcgactcatcaacaacaactggggattccggcccaagaagctcaacttcaagctcttcaacatccaggtcaaggaggtcacccagaatgaaggcaccaagaccaccgccaataacctcaccagcacggtgcaggtctttacggactcggagtaccagctcccgtacgtgctcggctctgcccaccagggctgcctgcctccgttcccggcggacgtgttcatgattccgcagtacgggtacctgacgctgaacaacgggagccaggccgtggggcgatcctccttctactgcctggagtactttccctcgcagatgctgagaacgggcaacaactttaccttcagctacaccttcgaggacgtgcccttccacagcagctacgcgcacagccagagcctggaccggctgatgaacccgctgattgaccagtacctgtactacctgtctcggactcagaccaacgggaccaatgccacgcagactctgttgtttgctcaggccgggcctcagaacatgtcggctcaggccaagaactggctgcctggtccttgctatcggcagcagcgcgtctctacggcagtgtcgcaaaacaacaacagcaactttacctggaccggggcgaccaagtaccacctgaacggccgagactccctggtgaaccccggtgtcgccatggcaacgcacaaggacgacgaggagcgcttcttcccgagcagcggggtcctgatgtttggcaagcagggcgctggaaaggacaatgtcgagtacaccaacgtgatgctcaccagcgaggaggagatcaagaccaccaaccctgtggccacggagcagtacggtgtggtggctgacaatctgcagcagaccaactcggctcccattgtgggggcagtcaacagccagggggccttacccggtatggtctggcagaaccgggacgtgtacctgcagggtcccatctgggccaagatcccgcatacggacggcaactttcacccgtctcctctcatgggcggctttggactgaaacacccgcctccccagatcctgatcaaaaacacgccggtacctgcggatcccccggtgaactttacggacgctaagctggcgagtttcatcacgcagtacagcaccgggcaggtcagcgtggagattgagtgggagctgcagaaggagaacagcaagcgctggaatcccgagattcagtacacttccaattattataaatcagctaatgtggactttgccgtcaatgcagatggtgtatatagcgaaccccgccccattggcactcgttacctcacccgtaatctgtaa

SEQ ID NO: 4988 - protein, 731 aa, Adeno-associated virus
MAADGYLPDWLEDNLSEGIREWWALKPGAPQPKANQQKQDDGRGLVLPGYKYLGPFNGLDKGEPVNEADAAALEHDKAYDQQLKAGDNPYLRYNHADAEFQERLQEDTSFGGNLGRAVFQAKKRVLEPLGLVEEGAKTAPGKKRPVEPDSSSGIGKSGQQPAKKRLNFGPTGDSESVPDPQPLSEPPAGPSGLGSGTMAAGGGAPMADNNEGADGVGNVSGNWHCDSTWLGDRVITTSTRTWALPTYNNHLYKQISNGTSGGSSNDNTYFGYSTPWGYFDFNRFHCHFSPRDWQRLINNNWGFRPKKLNFKLFNIQVKEVTQNEGTKTTANNLTSTVQVFTDSEYQLPYVLGSAHQGCLPPFPADVFMIPQYGYLTLNNGSQAVGRSSFYCLEYFPSQMLRTGNNFTFSYTFEDVPFHSSYAHSQSLDRLMNPLIDQYLYYLSRTQTNGTNATQTLLFAQAGPQNMSAQAKNWLPGPCYRQQRVSTAVSQNNNSNFTWTGATKYHLNGRDSLVNPGVAMATHKDDEERFFPSSGVLMFGKQGAGKDNVEYTNVMLTSEEEIKTTNPVATEQYGVVADNLQQTNSAPIVGAVNSQGALPGMVWQNRDVYLQGPIWAKIPHTDGNFHPSPLMGGFGLKHPPPQILIKNTPVPADPPVNFTDAKLASFITQYSTGQVSVEIEWELQKENSKRWNPEIQYTSNYYKSANVDFAVNADGVYSEPRPIGTRYLTRNL

SEQ ID NO: 4989 - DNA, 4404 bp, Adeno-associated virus
atggctgccgatggttatcttccagattggctcgagggcaacctctctgagggcattcgcgagtggtgggacttgaaacctggagccccgaaacccaaagccaaccagcaaaagcaggacgacggccggggtctggtgcttcctggctacaggtacctcggacccttcaacggactcgacaagggagagccggtcaacgaggcagacgccgcggccctcgagcacgacaaggcctacgacaagcagctcgagcagggggacaacccgtacctcaagtacaaccacgccgacgccgagtttcaggagcgtcttcaagaagatacgtcttttgggggcaacctcgggcgagcagtcttccaggccaagaagcgggttctcgaacctctcggtctggttgaggaaggcgctaagacggctcctggaaagaagagacccatagaatcccccgactcctccacgggcatcggcaagaacggccagccgcccgctaaaaagaagctcaactttgggcagactggcgactcagagtcagtgcccgacccccaacctctcggagaacctcccgccgcgccctcaggtctgggatctggtacaatggctgcaggcggtggcgcaccaatggcagacaataacgaaggcgccgacggagtgggtaatgcctccggaaattggcattgcgattccacatggctgggcgacagagtcatcaccaccagcacccgcacctgggccctgcccacctacaacaaccacctctacaagcagatatcaagtcagagcggggctaccaacgacaaccacttcttcggctacagcaccccctggggctattttgacttcaacagattccactgccacttctcaccacgtgactggcagcgactcatcaacaacaactggggattccggcccagaaagctgcggttcaagttgttcaacatccaggtcaaggaggtcacgacgaacgacggcgttacgaccatcgctaataaccttaccagcacgattcaggtcttctcggactcggagtaccaactgccgtacgtcctcggctctgcgcaccagggctgcctccctccgttccctgcggacgtgttcatgattcctcagtacggatatctgactctaaacaacggcagtcagtctgtgggacgttcctccttctactgcctggagtactttccttctcagatgctgagaacgggcgataactttgaattcagctacacctttgaggaagtgcctttccacagcagctatgcgcacagccagagcctggaccggctgatgaatcccctcatcgaccagtacctgtactacctggcccggacccagagcactacggggtccacaagggagctgcagttccatcaggctgggcccaacaccatggccgagcaatcaaagaactggctgcccggaccctgttatcggcagcagagactgtcaaaaaacatagacagcaacaacaacagtaactttgcctggaccggggccactaaataccatctgaatggtagaaattcattaaccaacccgggcgtagccatggccaccaacaaggacgacgaggaccagttctttcccatcaacggagtgctggtttttggcaaaacgggggctgccaacaagacaacgctggaaaacgtgctaatgaccagcgaggaggagatcaaaaccaccaatcccgtggctacagaagaatacggtgtggtctccagcaacctgcaatcgtctacggccggaccccagacacagactgtcaacagccagggggctctgcccggcatggtctggcagaaccgggacgtgtacctgcagggtcccatctgggccaaaattcctcacacggacggcaactttcacccgtctcccctgatgggcggatttggactcaaacacccgcctcctcaaattctcatcaaaaacaccccggtacctgctaatcctccagaggtgtttactcctgccaagtttgcctcatttatcacgcagtacagcaccggccaggtcagcgtggagatcgagtgggaactgcagaaagaaaacagcaaacgctggaatccagagattcagtacacctcaaattatgccaagtctaataatgtggaatttgctgtcaacaacgaaggggtttatactgagcctcgccccattggcacccgttacctcacccgtaacctgtaaatggctgccgatggttatcttccagattggctcgaggacaacctctctgagggcattcgcgagtggtgggacttgaaacctggagccccgaaacccaaagccaaccagcaaaagcaggacgacggccggggtctggtgcttcctggctacaagtacctcggacccttcaacggactcgacaagggggagcccgtcaacgcggcggacgcagcggccctcgagcacgacaaggcctacgaccagcagctcaaagcgggtgacaatccgtacctgcggtataaccacgccgacgccgagtttcaggagcgtctgcaagaagatacgtcttttgggggcaacctcgggcgagcagtcttccaggccaagaagcgggttctcgaacctctcggtctggttgaggaaggcgctaagacggctcctggaaagaagagaccggtagagccatcaccccagcgttctccagactcctctacgggcatcggcaagaaaggccagcagcccgcgaaaaagagactcaactttgggcagactggcgactcagagtcagtgcccgaccctcaaccaatcggagaaccccccgcaggcccctctggtctgggatctggtacaatggctgcaggcggtggcgctccaatggcagacaataacgaaggcgccgacggagtgggtagttcctcaggaaattggcattgcgattccacatggctgggcgacagagtcatcaccaccagcacccgaacctgggccctccccacctacaacaaccacctctacaagcaaatctccaacgggacttcgggaggaagcaccaacgacaacacctacttcggctacagcaccccctgggggtattttgactttaacagattccactgccacttctcaccacgtgactggcagcgactcatcaacaacaactggggattccggcccaagagactcaacttcaagctcttcaacatccaggtcaaggaggtcacgcagaatgaaggcaccaagaccatcgccaataaccttaccagcacgattcaggtctttacggactcggaataccagctcccgtacgtcctcggctctgcgcaccagggctgcctgcctccgttcccggcggacgtcttcatgattcctcagtacgggtacctgactctgaacaatggcagtcaggccgtgggccgttcctccttctactgcctggagtactttccttctcaaatgctgagaacgggcaacaactttgagttcagctaccagtttgaggacgtgccttttcacagcagctacgcgcacagccaaagcctggaccggctgatgaaccccctcatcgaccagtacctgtactacctgtctcggactcagtccacgggaggtaccgcaggaactcagcagttgctattttctcaggccgggcctaataacatgtcggctcaggccaaaaactggctacccgggccctgctaccggcagcaacgcgtctccacgacactgtcgcaaaataacaacagcaactttgcctggaccggtgccaccaagtatcatctgaatggcagagactctctggtaaatcccggtgtcgctatggcaacccacaaggacgacgaagagcgattttttccgtccagcggagtcttaatgtttgggaaacagggagctggaaaagacaacgtggactatagcagcgttatgctaaccagtgaggaagaaattaaaaccaccaacccagtggccacagaacagtacggcgtggtggccgataacctgcaacagcaaaacgccgctcctattgtaggggccgtcaacagtcaaggagccttacctggcatggtctggcagaaccgggacgtgtacctgcagggtcctatctgggccaagattcctcacacggacggaaactttcatccctcgccgctgatgggaggctttggactgaaacacccgcctcctcagatcctgattaagaatacacctgttcccgcggatcctccaactaccttcagtcaagctaagctggcgtcgttcatcacgcagtacagcaccggacaggtcagcgtggaaattgaatgggagctgcagaaagaaaacagcaaacgctggaacccagagattcaatacacttccaactactacaaatctacaaatgtggactttgctgttaacacagatggcacttattctgagcctcgccccatcggcacccgttacctcacccgtaatctgtaa

SEQ ID NO: 4990 - protein, 738 aa, Adeno-associated virus; identical to SEQ ID NO: 4793

SEQ ID NO: 4991 - protein, 738 aa, Adeno-associated virus; identical to SEQ ID NO: 4793

SEQ ID NO: 4992 - DNA, 2501 bp, Adeno-associated virus
gaattcgcccttggctgcgtcaactggaccaatgagaactttcccttcaacgattgcgtcgacaagatggtgatctggtgggaggagggcaagatgacggccaaggtcgtggagtccgccaaggccattcatcatctgctggggcgggctcccgagattgcttgctcggcctgcgatctggtcaacgtggacctggatgactgtgtttctgagcaataaatgacttaaaccaggtatggctgccgatggttatcttccagattggctcgaggacaacctctctgagggcattcgcgagtggtgggacttgagacctggagccccgaaacccaaagccaaccagcaaaagcaggacgacggccggggtctggtgcttcctggctacaagtacctcggacccttcaacggactcgacaagggagagccggtcaacgaggcagacgccgcggccctcgagcacgacaaggcctacgacaagcagctcgagcagggggacaacccgtacctcaagtacaaccacgccgacgccgagtttcaggagcgtcttcaagaagatacgtcttttgggggcaacctcgggcgagcagtcttccaggccaagaagcgggttctcgaacctctcggtctggttgaggaaggcgctaagacggctcctggaaagaagagacccatagaatcccccgactcctccacgggcatcggcaagaaaggccagcagcccgctaaaaagagactcaactttgggcagactggcgactcagagtcagtgcccgaccctcaaccaatcggagaaccccccgcaggcccctctggtctgggatctggcacaatggctgcaggcggtggcgctccaatggcagacaataacgaaggcgccgacggagtgggtagttcctcaggaaattggcattgcgattccacatggctgggcgacagagtcatcaccaccagcacccgaacctgggccctccccacctacaacaaccacctctacaagcaaatctccaacgggacatcgggaggaagcaccaacgacaacacctacttcggctacagcaccccctgggggtattttgactttaacagattccactgccacttctcaccacgtgactggcagcgactcatcaacaacaactggggattccggcccaagagactcaacttcaagctcttcaacatccaggtcaaggaggtcacgcagaatgaaggcaccaagaccatcgccaataaccttaccagcacgattcaggtctttacggactcggaataccagctcccgtacgtcctcggctctgcgcaccagggctgcctgcctccgttcccggcggacgtcttcatgattcctcagtacgggtacctgactctgaacaacggcagtcaggccgtgggccgttcctccttctactgcctggagtactttccttctcaaatgctgagaacgggcaacaactttgagttcagctaccagtttgaggacgtgccttttcacagcagctatgcgcacagccaaagcctggaccggctgatgaaccccctcatcgaccagtacctgtactacctgtctcggactcagtccacgggaggtaccgcaggaactcagcagttgctattttctcaggccgggcctaataacatgtcggctcaggccaaaaactggctacccgggccctgctaccggcagcaacgcgtctccacgacagtgtcgcaaaataacaacagcaactttgcttggaccggtgccaccaagtatcatctgaatggcagagactctctggtaaatcccggtgtcgctatggcaacgcacaagggcgacgaagagcgattttttccatccagcggagtcttgatgtttgggaaacagggagctggaaaagacaacgtagactatagcagcgttatgctaaccagtgaggaagaaatcaaaaccaccaacccagtggccacagaacagtacggcgtggtggccgataacctgcaacagcaaaacgccgctcctattgtaggggccgtcaacagtcaaggagccttacctggcatggtctggcagaaccgggacgtgtacctgcagggtcctatctgggccaagattcctcacacggacggcaactttcatccttcgccgctgatgggaggctttggactgaaacacccgcctcctcagatcctgattaagaatacacctgttcccgcggatcctccaactaccttcagtcaagccaagctggcgtcgttcatcacgcagtacagcaccggacaggtcagcgtggaaattgaatgggagctgcagaaagagaacagcaagcgctggaacccagagattcagtatacttccaactactacaaatctacaaatgtggactttgctgtcaatactgagggtacttattcagagcctcgccccattggcacccgttacctcacccgtaacctgtaattgcctgttaatcaataaaccggttgattcgtttcagttgaactttggtctcaagggcgaattc

SEQ ID NO: 4993 - DNA, 2187 bp, Adeno-associated virus
atggctgccgatggttatcttccagattggctcgaggacaacctctctgagggcattcgcgagtggtgggacttgaaacctggagccccgaaacccaaagccaaccagcaaaagcaggacgacggccggggtctggtgcttcctggctacaagtacctcggacccttcaacggactcgacaagggagagccggtcaacgaggcagacgccgcggccctcgagcacgacaaggcctacgacaagcagctcgagcagggggacaacccgtacctcaagtacaaccacgccgacgccgagtttcaggagcgtcttcaagaagatacgtcttttgggggcaacctcgggcgagcagtcttccaggccaagaagcgggttctcgaacctctcggtctggttgaggaaggcgctaagacggctcctggaaagaagagacccatagaatcccccgactcctccacgggcatcggcaagaaaggccagcagcccgctaaaaagaagctcaactttgggcagactggcgactcagagtcagtgcccgacccccaacctctcggagaacctcccgccgcgccctcaggtctgggatctggtacaatggctgcaggcggtggcgcaccaatggcagacaataacgaaggcgccgacggagtgggtaatgcctccggaaattggcattgcgattccacatggctgggcgacagagtcatcaccaccagcacccgcacctgggccctgcccacctacaacaaccacctctacaagcagatatcaagtcagagcggggctaccaacgacaaccacttcttcggctacagcaccccctggggctattttgacttcaacagattccactgccacttctcaccacgtgactggcagcgactcatcaacaacaactggggattccggcccagaaagctgcggttcaagttgttcaacatccaggtcaaggaggtcacgacgaacgacggcgttacgaccatcgctaataaccttaccagcacgattcaggtcttctcggactcggagtaccaactgccgtacgtcctcggctctgcgcaccagggctgcctccctccgttccctgcggacgtgttcatgattcctcagtacggatatctgactctaaacaacggcagtcagtctgtgggacgttcctccttctactgcctggagtactttccttctcagatgctgagaacgggcaataactttgaattcagctacacctttgaggaagtgcctttccacagcagctatgcgcacagccagagcctggaccggctgatgaatcccctcatcgaccagtacctgtactacctggcccggacccagagcactacggggtccacaagggagctgcagttccatcaggctgggcccaacaccatggccgagcaatcaaagaactggctgcccggaccctgttatcggcagcagagactgtcaaaaaacatagacagcaacaacaacagtaactttgcctggaccggggccactaaataccatctgaatggtagaaattcattaaccaacccgggcgtagccatggccaccaacaaggacgacgaggaccagttctttcccatcaacggagtgctggtttttggcgaaacgggggctgccaacaagacaacgctggaaaacgtgctaatgaccagcgaggaggagatcaaaaccaccaatcccgtggctacagaagaatacggtgtggtctccagcaacctgcaatcgtctacggccggaccccagacacagactgtcaacagccagggggctctgcccggcatggtctggcagaaccgggacgtgtacctgcagggtcccatctgggccaaaattcctcacacggacggcaactttcacccgtctcccctgatgggcggatttggactcaaacacccgcctcctcaaattctcatcaaaaacaccccggtacctgctaatcctccagaggtgtttactcctgccaagtttgcctcatttatcacgcagtacagcaccggccaggtcagcgtggagatcgagtgggaactgcagaaagaaaacagcaaacgctggaatccagagattcagtacacctcaaattatgccaagtctaataatgtggaatttgctgtcaacaacgaaggggtttatactgagcctcgccccattggcacccgttacctcacccgtaacctgtaa

SEQ ID NO: 4994 - protein, 728 aa, Adeno-associated virus; identical to SEQ ID NO: 4765

SEQ ID NO: 4995 - protein, 728 aa, Adeno-associated virus; identical to SEQ ID NO: 4829

SEQ ID NO: 4996 - protein, 728 aa, Adeno-associated virus; identical to SEQ ID NO: 4829

SEQ ID NO: 4997 - DNA, 3113 bp, Adeno-associated virus
gaattcgccctttctacggctgcgtcaactggaccaatgagaactttcccttcaacgattgcgtcgacaagatggtgatctggtgggaggagggcaagatgacggccaaggtcgtggagtccgccaaggccattctcggcggcagcaaggtgcgcgtggaccaaaagtgcaagtcgtccgcccagatcgatcccacccccgtgatcgtcacttccaacaccaacatgtgcgccgtgattgacgggaacagcaccaccttcgagcaccagcagccgttacaagaccggatgttcaaatttgaactcacccgccgtctggagcatgactttggcaaggtgacaaagcaggaagtcaaagagttcttccgctgggcgcaggatcacgtgaccgaggtggcgcatgagttctacgtcagaaagggtggagccaacaagagacccgcccccgatgacgcggataaaagcgagcccaagcgggcctgcccctcagtcgcggatccatcgacgtcagacgcggaaggagctccggtggactttgccgacaggtaccaaaacaaatgttctcgtcacgcgggcatgcttcagatgctgcttccctgcaagacatgcgagagaatgaatcagaatttcagcatttgcttcacgcacgggaccagagactgttcagaatgtttccccggcgtgtcagaatctcaaccggtcgtcagaaagaggacgtatcggaaactctgtgccattcatcatctgctggggcgggctcccgagattgcttgctcggcctgcgatctggtcaacgtggacctggatgactgtgtttctgagcaataaatgacttaaaccaggtatggctgccgatggtcatcttccagattggctcgaggacaacctctctgagggcattcgcgagtggtgggacttgaaacctggagccccgaaacccaaagccaaccagcaaaagcaggacgacggccggggtctggtgcttcctggctacaagtacctcggacccttcaacggactcgacaagggggagcccgtcaacgcggcggacgcagcggccctcgagcacgacaaggcctacgaccagcagctcaaagcgggtgacaatccgtacctgcggtataaccacgccgacgccgagtttcaggagcgtcttcaagaagatacgtcttttgggggcaacctcgggcgagcagtcttccaggccaagaagcgggttctcgaacctctcggtctggttgaggaaggcgctaagacggctcctggaaagaagagacccatagaatcccccgactcctccacgggcatcggcaagaaaggccagcagcccgctaaaaagaagctcaactttgggcagactggcgactcagagtcagtgcccgaccctcaaccaatcggagaaccccccgcaggcccctctggtctgggatctggtacaatggctgcaggcggtggcgctccaatggcagacaataacgaaggcgccgacggagtgggtagttcctcaggaaattggcattgcgattccacatagctgggcgacagagtcatcaccaccagcacccgaacctgggccctccccacctacaacaaccacctctacaagcaaatctccaacgggacatcgggaggaagcaccaacgacaacacctacttcggctacagcaccccctgggggtattttgactttaacagattccactgccacttctcaccacgtgactggcagcgactcatcaacaacagctggggattccggcccaagagactcaacttcaagctcttcaacatccaggtcaaggaggtcacgcagaatgaaggcaccaagaccatcgccaataaccttaccagcacgattcaggtctttacggactcggaataccagctcccgtacgtcctcggctctgcgcaccagggctgcctgcctccgttcccggcggacgtcttcatgattcctcagtacgggtacctgactctgaacaacggcagtcaggccgtgggccgttcctccttctactgcctggagtactttccttctcaaatgctgagaacgggcaacaactttgagttcagctaccagtttgaggacgtgccttttcacagcagctacgcgcacagccaaagcctggaccggctgatgaaccccctcatcgaccagtacctgtactacctgtctcggactcagtccacgggaggtaccgcaggaactcagcagttgctattttctcaggccgggcctaataacatgtcggctcaggccaaaaactggctacccgggccctgctaccggcagcaacgcgtctccacgacactgtcgcaaaataacaacagcaactttgcttggaccggtgccaccaagtatcatctgaatggcagagactctctggtaaatcccggtgtcgctatggcaacgcacaaggacgacgaagagcgattttttccatccagcggagtcttgatgtttgggaaacagggagctggaaaagacaacgtggactatagcagcgttatgctaaccagtgaggaagaaatcaaaaccaccaacccagtggccacagaacagtacggcgtggtggccgataacctgcaacagcaaaacgccgctcctattgtaggggccgtcaacagtcaaggagccttacctggcatggtctggcagaaccgggacgtgtacctgcagggtcctatctgggccaagattcctcacacggacggcaactttcatccttcgccgctgatgggaggctttggactgaaacacccgcctcctcagatcctgattaagaatacacctgttcccgcggatcctccaactaccttcagtcaagccaagctggcgtcgttcatcacgcagtacagcaccggacaggtcagcgtggaaattgaatgggagctgcagaaagagaacagcaagcgctggaacccagagattcagtatacttccaactactacaaatctacaaatgtggactttgctgtcaatactgagggtacttattcagagcctcgccccattggcacccgttacctcacccgtaacctgtaattgcctgttaatcaataaaccggttaattcgtttcagttgaactttggtctctgcgaagggcgaattc

SEQ ID NO: 4998 - DNA, 3106 bp, Adeno-associated virus
gaattcgcccttctacggctgcgtcaactggaccaatgagaactttcccttcaacgattgcgtcgacaagatggtgatctggtgggaggagggcaagatgacggccaaggtcgtggagtccgccaaggccattctcggcggcagcaaggtgcgcgtggaccaaaagtgcaagtcgtccgcccagatcgaccccacccccgtgatcgtcacctccaacaccaacatgtgcgccgtgattgacgggaacagcaccaccttcgagcaccagcagccgttgcaggaccggatgttcaaatttgaactcacccgccgtctggagcatgactttggcaaggcgacaaagcaggaagtcaaagagttcttccgctgggcgcaggatcacgtgaccgaggtggcgcatgagttctacgtcagaaagggtggagccaacaagagacccgcccccgatgacgcggataaaagcgagcccaagcgggcccgcccctcagtcgcggatccatcgacgtcagacgcggaaggagctccggtggactttgccgacaggtaccaaaacaaatgttctcgtcacgcgggcatgcttcagatgctgtttccctgcaaaacatgcgagagaatgaatcagaatttcaacatttgcttcacgcacgggaccagagactgttcagaatgtttccccggcgtgtcagaatctcaaccggtcgtcagaaagaggacgtatcggaaactctgtgccattcatcatctgctggggcgggctcccgagattgcttgctcggcctgcgatctggtcaacgtggacctggatgactgtgtttctgagcaataaatgacttaaaccaggtatggctgccgatggttatcttccagattggctcgaggacaacctctctgagggcattcgcgagtggtgggacttgaaacctggagccccgaaacccaaagccaaccagcaaaagcaggacgacggccggggtctggtgcttcctggctacaagtacctcggacccttcaacggactcgacaagggagagccggtcaacgaggcagacgccgcggccctcgagcacgacaaggcctacgacaagcagctcgagcagggggacaacccgtacctcaagtacaaccacgccgacgccgagtttcaggagcgtcttcaagaagatacgtcttttgggggcaacctcgggcgagcagtcttccgggccaagaagcgggttctcgaacctctcggtctggttgaggaaggcgctaagacggctcctggaaagaagagacccatagaatcccccgactcctccacgggcatcggcaagaaaggccagcagcccgctaaaaagaagctcaactttgggcagactggcgactcagagtcagtgcccgacccccaacctctcggagaacctcccgccgcgccctcaggtctgggatctggtacaatggctgcaggcggtggcgcaccaatggcagacaataacgaaggcgccgacggagtgggtaatgcctccggaaattggcattgcgattccacatggctgggcgacagagtcatcaccaccagcacccgcacctgggccctgcccacctacaacaaccacctctacaagcagatatcaagtcagagcggggctaccaacgacaaccacttcttcggctacagcaccccctggggctattttgacttcaacagattccactgccacttctcaccacgtgactggcagcgactcatcaacaacaaccggggattccggcccagaaagctgcggttcaagttgttcaacatccaggtcaaggaggtcacgacgaacgacggcgttacgaccatcgctaataaccttaccagcacgattcaggtcttctcggactcggagtaccaactgccgtacgtcctcggctctgcgcaccagggctgcctccctccgttccctgcggacgtgttcatgattcctcagtacggatatctgactctaaacaacggcagtcagtctgtgggacgttcctccttctactgcctggagtactttccttctcagatgctgagaacgggcaataactttgaattcagctaccagtttgaggacgtgccctttcacagcagctacgcgcacagccaaagcctggaccggctgatgaaccccctcatcgaccagtacctgtactacctgtctcggactcagtccacgggaggtaccgcaggaactcagcagttgctattttctcaggccgggcctaataacatgtcggctcaggccaaaaactggctacccgggccctgctaccggcagcaacgcgtctccacgacactgtcgcaaaataacaacagcaactttgcttggaccggtgccaccaagtatcatctgaatggcagagactctctggtaaatcccggtgtcgctatggcaacgcacaaggacgacgaagagcgattttttccatccagcggagtcttgatgtttgggaaacagggagctggaaaagacaacgtggactatagcagcgttatgctaaccagtgaggaagaaatcaaaaccaccaacccagtggccacagaacagtacggcgtggtggccgataacctgcaacagcaaaacgccgctcctattgtaggggccgtcaacagtcaaggagccttacctggcatggcctggcagaaccgggacgtgtacctgcagggtcctatctgggccaagattcctcacacggacggcaactttcatccttcgccgctgatgggaggctttggactgaaacacccgcctcctcagatcctgattaagaatacacctgttcccgcggatcctccaactaccttcagtcaagccaagctggcgtcgttcatcacgcagtacagcaccggacaggtcagcgtggaaattgaatgggagctgcagaaagagaacagcaagcgctggaacccagagattcagtatacttccaactactacaaatctacaaatgtggactttgctgtcaatactgagggtacttattcagagcctcgccccattggcacccgttacctcacccgtaacctgtaattgcctgttaatcaataaaccggttaattcgtttcagttgaactttggtctctgcgaagggcgaattc

SEQ ID NO: 4999 - DNA, 3197 bp, Adeno-associated virus
gaattcgccctttctacggctgcgtcaactggaccaatgagaactttcccttcaacgattgcgtcgacaagatggtgatctggtgggaggagggcaagatgacggccaaggtcgtggagtccgccaaggccattctcggcggcagcaaggtgcgcgtggaccaaaagtgcaagtcgtccgcccagatcgaccccacccccgtgatcgtcacctccaacaccaacatgtgcgccgtgattgacgggaacagcaccaccttcgagcaccagcagccgttacaagaccggatgttcaaatttgaactcacccgccgtctggagcacgactttggcaaggtgacaaagcaggaagtcaaagagttcttccgctgggcgcaggatcacgtgaccgaggtggcgcatgagttctacgtcagaaagggtggagccaacaagagacccgcccccgatgacgcggataaaagcgagcccaagcgggcctgcccctcagtcgcggatccatcgacgtcagacgcggaaggagctccggtggactttgccgacaggtaccaaaacaaatgttctcgtcacgcgggcatgcttcagatgctgtttccctgcaagacatgcgagagaatgaatcagaatttcaacatttgcttcacgcacgggaccagagactgttcagaatgtttccccggcgtgtcagaatctcaaccggtcgtcagaaagaggacgtatcggaaactctgtgccattcatcatctgctggggcgggctcccgagattgcttgctcggcctgcgatctggtcaacgtggacctggatgactgtgtttctgagcaataaatgacttaaaccaggtatggctgccgatggttatcttccagattggctcgaggacaacctctctgagggcattcgcgagtggtgggacttgaaacctggagccccgaaacccaaagccaaccagcaaaagcaggacgacggccggggtctggtgcttcctggctacaagtacctcggacccttcaacggactcgacaagggagagccggtcaacgaggcagacgccgcggccctcgagcacgacaaggcctacgacaagcagctcgagcagggggacaacccgtacctcaagtacaaccacgccgacgccgagtttcaggagcgtcttcaagaagatacgtcttttgggggcaacctcgggcgagcagtcttccaggccaagaagcgggttctcgaacctctcggtctggttgaggaaggcgctaagacggctcctggaaagaagagaccggtagagccatcaccccagcgttctccagactcctctacgggcatcggcaagacaggccagcagcccgcgaaaaagagactcaactttgggcagactggcgactcagagtcagtgcccgaccctcaaccaatcggagaaccccccgcaggcccctctggtctgggatctggtacaatggctgcaggcggtggcgctccaatggcagacaataacgaaggcgccgacggagtgggtagttcctcaggaaattggcattgcgattccacatggctgggcgacagagtcatcaccaccagcacccgaacctgggccctccccacctacaacaaccacctctacaagcaaatctccaacgggacatcgggaggaagcaccaacgacaacacctacttcggctacagcaccccctgggggtattttgactttaacagattccactgccacttctcaccacgtgactggcagcgactcatcaacaacaactggggattccggcccaagagactcaacttcaagctcttcaacatccaggtcaaggaggtcacgcagaatgaaggcaccaagaccatcgccaataaccttaccagcacgattcaggtctttacggactcggaataccagctcccgtacgtcctcggctctgcgcaccagggctgcctgcctccgttcccggcggacgtcttcatgattcctcagtacgggtacctgactctgaacaacggcagtcaggccgtgggccgttcctccttctactgcctggagtactttccttctcaaatgctgagaacgggcaacaactttgagttcagctaccagtttgaggacgtgccttttcacagcagctacgcgcacagccaaagcctggaccggctgatgaaccccctcatcgaccagtacctgtactacctgtctcggactcagtccacgggaggtaccgcaggaactcagcagttgctattttctcaggccgggcctaataacatgtcggctcaggccaaaaactggctacccgggccctgctaccggcagcaacgcgtctccacgacactgtcgcaaaataacaacagcaactttgcttggaccggtgccaccaagtatcatctgaatggcagagactctctggtaaatcccggtgtcgctatggcaacgcacaaggacgacgaagagcgattttttccatccagcggagtcttgatgtttgggaaacagggagctggaaaagacaacgtggactatagcagcgttatgctaaccagtgaggaagaaatcaaaaccaccaacccagtggccacagaacagtacggcgtggtggccgataacctgcaacagcaaaacgccgctcctattgtaggggccgtcaacagtcaaggagccttacctggcatggtctggcagaaccgggacgtgtacctgcagggtcctatctgggccaagattcctcacacggacggcaactttcatccttcgccgctgatgggaggctttggactgaaacacccgcctcctcagatcctgattaagaatacacctgttcccgcggatcctccaactaccttcagtcaagccaagctggcgtcgttcatcacgcagtacagcaccggacaggtcagcgtggaaattgaatgggagctgcagaaagagaacagcaagcgctggaacccagagattcagtatacttccaactactacaaatctacaaatgtggactttgctgtcaatactgagggtacttattcagagcctcgccccattggcacccgttacctcacccgtaacctgtaattgcctgttaatcaataaaccggttaattcgtttcagttgaactttggtctctgcgaagggcgaattcgtttaaacctgcaggactagtccctttagtgagggttaattctgagcttggcgtaatcatgggtcatag

SEQ ID NO: 5000 - DNA, 3276 bp, Adeno-associated virus
gaattcgcccttcgcagagaccaaagttcaactgaaacgaattaaccggtttattgattaacaggcaattacaggttacgggtgaggtaacgggtgccaatggggcgaggctcagtataaaccccttcgttgttgacagcaaattccacattattagacttggcataatttgaggtgtactgaatctctggattccagcgtttgctgttttctttctgcagttcccactcgatctccacgctgacctggccggtgctgtactgcgtgataaatgaggcaaacttggcaggagtaaacacctctggaggattagcaggtaccggggtgtttttgatgagaatttgaggaggcgggtgtttgagtccaaatccgtccatcaggggagacgggtgaaagttgccgtccgtgtgaggaattttggcccagatgggaccctgcaggtacacgtcccggttctgccagaccatgccgggcagagccccctggctgttgacagtctgtgtctggggtccggccgtagacgattgcaggttgctggagaccacaccgtattcttctgtagccacgggattggtggttttgatctcctcctcgctggtcattagcacgttttccagcgttgtcttgttggcagcccccgttttgccaaaaaccagcactccgttgatgggaaagaactggtcctcgtcgtccttgttggtggccatggctacgcccgggttggttaatgaatttctaccattcagatggtatttagtggccccggtccaggcaaagttactgttgttgttgctgtctatgttttttgacagtctctgctgccgataacagggtccgggcagccagttctttgattgctcggccatggtgttgggcccagcctgatggaactgcagctcccttgtggaccccgtagtgctctgggtccgggccaggtagtacaggtactggtcgatgaggggattcatcagccggtccaggctctggctatgcgcatagctgctgtggaaaggcacttcctcaaaggtgtagctgaattcaaagttattgcccgttctcagcatctgagaaggaaagtactccaggcagtagaaggaggaacgtcccacagactgactgccgttgtttagagtcagatatccgtactgaggaatcatgaacacgtccgcagggaacggagggaggcagccctggtgcgcagagccgaggacgtacggcagttggtactccgagtccgagaagacctgaatcgtgctggtaaggttattagcgatggtcgtaacgccgtcgtccgtcgtgacctccttgacctggatgttgaacaacttgaaccgcagctttctgggccggaatccccagttgttgttgatgagtcgctgccagtcacgtggtgagaagtggcagtggaatctgttaaagtcaaaatacccccagggggtgctgtagccgaagtaggtgttgtcgttggtgcttcctcccgatgtcccgttggagatttgcttgtagaggtggttgttgtaggtggggagggcccaggttcgggtgctggtggtgatgactctgtcgcccagccatgtggaatcgcaatgccaatttcctgaggaactacccactccgtcggcgccttcgttattgtctgccattggagcgccaccgcctgcagccattgtaccagatcccagaccagaggggcctgcggggggttctccgattggttgagggtcgggcactgactctgagtcgccagtctgcccaaagttgagtctctttttcgcgggctgctggcctgtcttgccgatgcccgtagaggagtctggagaacgctggggtgatggctctaccggtctcttctttccaggagccgtcttagcgccttcctcaaccagaccgagaggttcgagaacccgcttcttggcctggaagactgctcgcccgaggttgcccccaaaagacgtatcttcttgaagacgctcctgaaactcggcgtcggcgtggttgtacttgaggtacgggttgtccccctgctcgagctgcttgtcgtaggccttgtcgtgctcgagggccgcggcgtctgcctcgttgaccggctctcccttgtcgagtccgttgaagggtccgaggtacttgtagccaggaagcaccagaccccggccgtcgtcctgcttttgctggttggctttgggtttcggggctccaggtttcaagtcccaccactcgcgaatgccctcagagaggttgtcctcgagccaatctggaagataaccatcggcagccatacctggtttaagtcatttattgctcagaaacacagtcatccaggtccacgttgaccagatcgcaggccgagcaagcaatctcgggagcccgccccagcagatgatgaatggcacagagtttccgatacgtcctctttctgacgaccggttgagattctgacacgccggggaaacattctgaacagtctctggtcccgtgcgtgaagcaaatgttgaaattctgattcattctctcgcatgtcttgcagggaaacagcatctgaagcatgcccgcgtgacgagaacacttgttttggtacctgtcggcaaagtccaccggagctccttccgcgtctgacgtcgatggatgcaaaatgtcgcaaaagcactcacgtgacagctaatacaggaccactcccctatgacgtgatttacgtcagcgctatgcccgcgtgacgagaacatttgttttggtacctgtcggcaaagtccaccggagctccttccgcgtctgacgtcgatggatccgcgactgaggggcaggcccgcttgggctcgcttttatccgcgtcatcgggggcgggtctcttgttggctccaccctttctgacgtagaactcatgcgccacctcggtcacgtgatcctgcgcccagcggaagaactctttgacttcctgctttgtcaccttgccaaagtcatgctccagacggcgggtgagttcaaatttgaacatccggtcctgcaacggctgctggtgctcgaaggtggtgctgttcccgtcaatcacggcgcacatgttggtgttggaagtgacgatcacgggggtgggatcgatctgggcggaagacttgcacttttggtccacgcgcaccttgctgccgccgagaatggccttggcggactccacgaccttggccgtcatcttgccctcctcccaccagatcaccatcttgtcgacgcaatcgttgaagggaaagttctcattggtccagttgacgcagccgtagaaagggcgaattc

SEQ ID NO: 5001 - protein, 738 aa, Adeno-associated virus; identical to SEQ ID NO: 4777

SEQ ID NO: 5002 - protein, 738 aa, Adeno-associated virus
MAADGYLPDWLEDNLSEGIREWWDLKPGAPKPKANQQKQDDGRGLVLPGYKYLGPFNGLDKGEPVNAADAAALEHDKAYDQQLKAGDNPYLRYNHADAEFQERLQEDTSFGGNLGRAVFQAKKRVLEPLGLVEEGAKTAPGKKRPVEPSPQRSPDSSTGIGKKGHQPARKRLNFGQTGDSESVPDPQPIGEPPAGPSGLGSGTMAAGGGAPMADNNEGADGVGSSSGNWHCDSTWLGDRVITTSTRTWALPTYNNHLYKQISNGTSGGSTNDNTYFGYSTPWGYFDFNRFHCHFSPRDWQRLINNNWGFRPKRLNFKLFNIQVKEVTQNEGTKTIANNLTSTIQVFTDSEYQLPYVPGSAHQGCLPPFPADVFMIPQYGYLTLNNGSQAVGRSSFYCLEYFPSQMLRTGNNFEFSYTFEDVPFHSSYAHSQSLDRLMNPLIDQYLYYLSRTQSTGGTQGTQQLLFSQAGPANMSAQAKNWLPGPCYRQQRVSTTLSQNNNSNFAWTGATKYHLNGRDSLVNPGVAMATHKDDEERFFPSSGVLMFGKQGAGKDNVDYSSVMLTSEEEIKTTNPVATEQYGVVADNLQQTNGAPIVGTVNSQGALPGMVWQNRDVYLQGPIWAKIPHTDGNFHPSPLMGGFGLKHPPPQILIKNTPVPADPPTTFSQAKLASFITQYSTGQVSVEIEWELQKENSKRWNPEIQYTSNYYKSTNVDFAVNTEGTYSEPRPIGTRYLTRNL

SEQ ID NO: 5003 - protein, 738 aa, Adeno-associated virus; identical to SEQ ID NO: 4775

SEQ ID NO: 5004 - DNA, 2489 bp, Adeno-associated virus
gaattcgccctttctacggctgcgtcaactggaccaatgagaactttcccttcaacgattgcgtcgacaagatggtgatctggtgggaggagggcaagatgacggccaaggtcgtgaagtccgccaaggccattcatcatctgctggggcgggctcccgagattgcttgctcggcctgcgatctggtcaacgtggacctggatgactgtgtttctgagcaataaatgacttaaaccaggtatggctgccgatggttatcttccagattggctcgaggacaacctctctgagggcattcgcgagtggtgggacttgaaacctggagccccgaaacccaaagccaaccagcaaaagcaggacgacggccggggtctggtgcttcctggctacaagtacctcggacccttcaacggactcgacaagggagagccggtcaacgaggcagacgccgcggccctcgagcacgacaaggcctacgacaagcagctcgagcagggggacaacccgtacctcaagtacaaccacgccgacgccgagtttcaggagcgtcttcaagaagatacgtcttttgggggcaacctcgggcgagcagtcttccaggccaagaagcgggttctcgaacctctcggtctggttgaggaaggcgctaagacggctcctggaaagaagagacccatagaatcccccgactcctccacgggcatcggcaggaaaggccagcagcccgctaaaaagaagctcaactttgggcagactggcgactcagagtcagtgcccgaccctcaaccaatcggagaaccccccgcaggcccctctggtctgggatctggtacaatggctgcaggcggtggcgctccaatggcagacaataacgaaggcgccgacggagtgggtaatgcctccggaaattggcattgcgattccacatggctgggcgacagagtcatcaccaccagcacccgcacctgggccctgcccacctacaacaaccacctctacaagcagatatcaagtcagagcggggctaccaacgacaaccacttcttcggctacagcaccccctggggctattttgacttcaacagattccactgccacttctcaccacgtgactggcagcgactcatcaacaacaactggggattccggcccagaaagctgcggttcaagttgttcaacatccaggtcaaggaggtcacgacgaacgacggcgttacgaccatcgccaataaccttaccagcacgattcaggtcttctcggactcggagtaccaactgccgtacgtcctcggctctgcgcaccagggctgcctccctccgttccctgcggacgtgttcatgattcctcagtacggatatctgactctaaacaacggcagtcagtctgtgggacgttcctccttctactgcctggagtactttccttctcagatgctgagaacgggcaataactttgaattcagctacacctttgaggaagtgcctttccacagcagctatgcgcacagccagagcctggaccggctgatgaatcccctcatcgaccagtacctgtactacctggcccggacccagagcactacggggtccacaagggagctgcagttccatcaggctgggcccaacaccatggccgagcaatcaaagaactggctgcccggaccctgttatcggcagcagagactgtcaaaaaacatagacagcaacaacaacagtaactttgcctggaccggggccactaaataccatctgaatggtagaaattcattaaccaacccgggcgtagccatggccaccaacaaggacgacgaggaccagttctttcccatcaacggagtgctggtttttggcaaaacgggggctgccaacaagacaacgctggaaaacgtgctaatgaccagcgaggaggagatcaaaaccaccaatcccgtggctacagaagaatacggtgtggtctccagcaacctgcaatcgtctacggccggaccccagacacagactgtcaacagccagggggctctgcccggcatggtctggcagaaccgggacgtgtacctgcagggtcccatctgggccaaaattcctcacacggacggcaactttcacccgtctcccctgatgggcggatttggactcaaacacccgcctcctcaaattctcatcaaaaacaccccggtacctgctaatcctccagaggtgtttactcctgccaagtttgcctcatttatcacgcagtacagcaccggccaggtcagcgtggagatcgagtgggaactgcagaaagaaaacagcaaacgctggaatccagagattcagtacacctcaaattatgccaagtctaataatgtggaatttgctgtcaacaacgaaggggtttatactgagcctcgccccattggcacccgttacctcacccgtaacctgtaattgcctgttaatcaataaaccggttaattcgtttcagttgaactttggtcaagggcgaattc

SEQ ID NO: 5005 - DNA, 3098 bp, Adeno-associated virus
gaattcgccctttctacggctgcgtcaactggaccaatgagaactttcccttcaacgattgcgtcgacaagatggtgatctggtgggaggagggcaagatgacggccaaggtcgtggagtccgccaaggccattctcggcggcagcaaggtgcgcgtggaccaaaagtgcaagtcttccgcccagatcgatcccacccccgtgatcgtcacttccaacaccaacatgtgcgccgtgattgacgggaacagcaccaccttcgagcaccagcagccgttacaagaccggatgttcaaatttgaactcacccgccgtctggagcacgactttggcaaggtgacaaagcaggaagtcaaagagttcttccgctgggcgcaggatcacgtgaccgaggtggcgcatgagttctacgtcagaaagggtggagccaacaagagacccgcccccgatgacgcggataaaagcgagcccaagcgggcctgcccctcagtcgcggatccatcgacgtcagacgcggaaggagctccggtggactttgccgacaggtaccaaaacaaatgttctcgtcacgcgggcatgcttcagatgctgtttccctgcaagacatgcgagagaatgaatcagaatttcaacatttgcttcacgcacgggaccggagactgttcagaatgtttccccggcgtgtcagaatctcaaccggtcgtcagaaagaggacgtatcggaaactctgtgccattcatcatctgctggggcgggctcccgagattgcttgctcggcctgcgatctggtcaacgtggacctggatgactgtgtttctgagcaataaatgacttaaaccaggtatggctgccgatggttatcttccagattggctcgaggacaacctctctgagggcattcgcgagtggtgggacttgaaacctggagccccgaaacccaaagccaaccagcaaaagcaggacgacggccggggtctggtgcttcctggctacaagtacctcggacccttcaacggactcgacaagggagagccggtcaacgcggcggacgcagcggccctcgagcacgacaaggcctacgaccagcagctcaaagcgggtgacaatccgtacctgcggtataaccacgccgacgccgagtttcaggagcgtcttcaagaagatacgtcttttgggggcaacctcgggcgagcagtcttccaggccaagaagcgggttctcgaacctctcggtctggttgaggaaggcgctaagacggctcctggaaagaagagacccatagaatcccccgactcctccacgggcatcggcaagaaaggccagcagcccgctaaaaagaagctcaactttgggcagactggcgactcagagtcagtgcccgaccctcaaccaatcggagaaccccccgcaggcccctctggtctgggatctggtacaatggctgcaggcggtggcgctccaatggcagacaataacgaaggcgccgacggagtgggtaatgcctccggaaattggcattgcgattccacatggctgggcgacagagtcatcaccaccagcacccgcacctgggccctgcccacctacaacaaccacctctacaagcagatatcaagtcagagcggggctaccaacgacaaccacttcttcggctacagcaccccctggggctattttgacttcaacagattccactgccacttctcaccacgtgactggcagcgactcatcaacaacaactggggattccggcccagaaagctgcggttcaagttgttcaacatccaggtcaaggaggtcacgacgaacgacggcgttacgaccatcgctaataaccttaccagcacgattcaggtcttctcggactcggagtaccaactgccgtacgtcctcggctctgcgcaccagggctgcctccctccgttccctgcggacgtgttcatgattcctcagtacggatatctgactctaaacaacggcagtcagtctgtgggacgttcctccttctactgcctggagtactttccttctcagatgctgagaacgggcaataactttgaattcagctacacctttgaggaagtgcctttccacagcagctatgcgcacagccagagcctggaccggctgatgaatcccctcatcgaccagtacctgtactacctggcccggacccagagcactacggggtccacaagggagctgcagttccatcaggctgggcccaacaccatggccgagcaatcaaagaactggctgcccggaccctgttatcggcggcagagactgtcaaaagacatagacagcaacaacaacagtaactttgcctggaccggggccactaaataccatctgaatggtagaaattcattaaccaacccgggcgtagccatggccaccaacaaggacgacgaggaccagttctttcccatcaacggagtgctggtttttggcaaaacgggggctgccaacaagacaacgctggaaaacgtgctaatgaccagcgaggaggagatcaaaaccaccaatcccgtggctacagaagaatacggtgtggtctccagcaacctgcaatcgtctacggccggaccccagacacagactgtcaacagccagggggctctgcccggcatggtctggcagaaccgggacgtgtacctgcagggtcccatctgggccaaaattcctcacacggacggcaactttcacccgtctcccctgatgggcggatttggactcaaacacccgcctcctcaaattctcatcaaaaacaccccggtacctgctaatcctccagaggtgtttactcctgccaagtttgcctcatttatcacgcagtacagcaccggccaggtcagcgtggagatcgagtgggaactgcagaaagagaacagcaaacgctggaatccagagattcagtacacctcaaattatgccaagtctaataatgtggaatttgctgtcaacaacgaaggggtttatactgagcctcgccccattggcacccgttacctcacccgtaacctgtaattacttgttaatcaataaaccggttgattcgtttcagttgaactttggtctctgcgaagggcgaattc

SEQ ID NO: 5006 - DNA, 2969 bp, Adeno-associated virus
gaattcgccctttctacggctgcgtcaactggaccaatgagaactttcccttcaacgattgcgtcgacaagatggtgatctggtgggaggagggcaagatgacggccaaggtcgtggagtccgccaaggccattctcggcggcagcaaggtgcgcgtggaccaaaagtgcaagtcgtccgcccagatcgaccccacccccgtgatcgtcacctccaacaccaacatgtgcgccgtgattgacgggaacagcaccaccttcgagcaccagcagccgttacaagaccggatgttcaaatttgaactcacccgccgtctggagcacgactttggcaaggtgacaaagcaggaagtcaaagagttcttccgctgggcgcaggatcacgtgaccgaggtggcgcatgagttctacgtcagaaagggtggagccaacaagagacccgcccccgatgacgcggataaaagcgagcccaagcgggcctgcccctcagtcgcggatccatcgacgtcagacgcggaaggagctccggtggactttgccgacaggtaccaaaacaaatgttctcgtcacgcgggcatgcttcagatgctgtttccctgcaagacatgcgagagaatgaatcagaatttcaacatttgcttcacgcacgggaccagagactgttcagaatgtttccccggcgtgtcagaatctcaaccggtcgtcagaaagaggacgtatcggaaactctgtgccattcatcatctgctggggcgggctcccgagattgcttgctcggcctgcgatctggtcaacgtggacctggatgactgtgtttctgagcaataaatgacttaaaccaggtatggctgccgatggttatcttccagattggctcgaggacaacctctctgagggcatccgcgagtggtgggacttgaaacctggagccccgaaacccaaagccaaccagcaaaagcaggacgacggccggggtctggtgcttcctggctacaagtacctcggacccttcaacggactcgacaagggagagccggtcaacgaggcagacgccgcggccctcgagcacgacaaggcctacgacaagcagctcgagcagggggacaacccgtacctcaagtacaaccacgccgacgccgagtttcaggagcgtcttcaagaagatacgtcttttgggggcaacctcgggcgagcagtcttccaggccaagaagcgggttctcgaacctctcggtctggttgaggaaggcgctaagacggctcctggaaagaagagaccggtagagccatcaccccagcgttctccagactcctctacgggcatcggcaagacaggccagcagcccgcgaaaaagagactcaactttgggcagactggcgactcagagtcagtgcccgaccctcaaccaatcggagaaccccccgcaggcccctctggtctgggatctggtacaatggctgcaggcggtggcgctccaatggcagacaataacgaaggcgccgacggagtgggtagttcctcaggaaattggcattgcgattccacatggctgggcgacagagtcatcaccaccagcacccgaacctgggccctccccacctacaacaaccacctctacaagcaaatctccaacgggacatcgggaggaagcaccaacgacaacacctacttcggctacagcaccccctgggggtattttgactttaacagattccactgccacttctcaccacgtgactggcagcgactcatcaacaacaactggggattccggcccaagagactcaacttcaagctcttcaacatccaggtcaaggaggtcacgcagaatgaaggcaccaagaccatcgccaataaccttaccagcacgattcaggtctttacggactcggaataccagctcccgtacgtcctcggctctgcgcaccagggctgcctgcctccgttcccggcggacgtcttcatgattcctcagtacgggtacctgactctgaacaacggcagtcaggccgtgggccgttcctccttctactgcctggagtactttccttctcaaatgctgagaacgggcaacaactttgagttcagctaccagtttgaggacgtgccttttcacagcagctacgcgcacagccaaagcctggaccggctgacgaaccccctcatcgaccagtacctgtactacctggcccggacccagagcactacggggtccacaagggggctgcagttccatcaggctgggcccaacaccatggccgagcaatcaaagaactggctgcccggaccctgttatcggcagcagagactgtcaaaaaacatagacagcaacaacaacagtaactttgcctggaccggggccactaaataccatctgaatggtagaaattcattaaccaacccgggcgtagccatggccaccaacaaggacgacgaggaccagttctttcccatcaacggagtgctggtttttggcaaaacgggggctgccaacaagacaacgctggaaaacgtgctaatgaccagcgaggaggagatcaaaaccaccaatcccgtggctacagaagaatacggtgtggtctccagcaacctgcaatcgtctacggccggaccccagacacagactgtcaacagccagggggctctgcccggcatggtctggcagaaccgggacgtgtacctgcagggtcccatctgggccaaaattcctcacacggacggcaactttcacccgtctcccctgatgggcggatttggactcaaacacccgcctcctcaaattctcatcaagtatacttccaactactacaaatctacaaatgtggactttgctgtcaatactgagggtacttattcagagcctcgccccattggcacccgttacctcacccgtaacctgtaattgcctgttaatcaataaaccggttaattcgtttcagttgaactttggtctctgcgaagggcgaattc

SEQ ID NO: 5007 - DNA, 3113 bp, Adeno-associated virus
gaattcgccctttctacggctgcgtcaactggaccaatgagaactttcccttcaacgattgcgtcgacaagatggtgatctggtgggaggagggcaagatgacggccaaggtcgtggagtccgccaaggccattctcggcggcagcaaggtgcgcgtggaccaaaagtgcaagtcgtccgcccagatcgatcccacccccgtgatcgtcacttccaacaccaacatgtgcgccgtgattgacgggaacagcaccaccttcgagcaccagcagccgttacaagaccggatgttcaaatttgaactcacccgccgtctggagcatgactttggcaaggtgacaaagcaggaagtcaaagagttcttccgctgggcgcaggatcacgtgaccgaggtggcgcatgagttctacgtcagaaagggtggagccaacaagagacccgcccccgatgacgcggataaaagcgagcccaagcgggcctgcccctcagtcgcggatccatcgacgtcagacgcggaaggagctccggtggactttgccgacaggtaccaaaacaaatgttctcgtcacgcgggcatgcttcagatgctgtttccctgcaagacatgcgagagaatgaatcagaatttcaacatttgcttcacgcacgggaccagagactgttcagaatgtttccccggcgtgtcagaatctcaaccggtcgtcagaaagaggacgtatcggaaactctgtgccattcatcatctgctggggcgggctcccgagattgcttgctcggcctgcgatctggtcaacgtggacctggatgactgtgtttctgagcaataaatgacttaaaccaggtatggctgccgatggttatcttccagattggctcgaggacaacctctctgagggcattcgcgagtggtgggacttgaaacctggagccccgaaacccaaagccaaccagcaaaagcaggacgacggccggggtctggtgcttcctggctacaagtacctcggacccttcaacggactcgacaagggggagcccgtcaacgcggcggacgcagcggccctcgagcacgacaaggcctacgaccagcagctcaaagcgggtgacaatccgtacctgcggtataaccacgccgacgccgagtttcaggagcgtcttcaagaagatacgtcttttgggggcaacctcgggcgagcagtcttccaggccaagaagcgggttctcgaacctctcggtctggttgaggaaggcgctaagacggctcctggaaagaagagacccatagaatcccccgactcctccacgggcatcggcaagaaaggccagcagcccgctaaaaagaagctcaactttgggcagactggcgactcagagtcagtgcccgaccctcaaccaatcggagaaccccccgcaggcccctctggtctgggatctggtacaatggctgcaggcggtggcgctccaatggcagacaataacgaaggcgccgacggagtgggtagttcctcaggaaattggcattgcgattccacatggctgggcgacagagtcatcaccaccagcacccgaacctgggccctccccacctacaacaaccacctctacaagcaaatctccaacgggacatcgggaggaagcaccaacgacaacacctacttcggctacagcaccccctgggggtattttgactttaacagattccactgccacttctcaccacgtgactggcagcgactcatcaacaacaactggggattccggcccaagagactcaacttcaagctcttcaacatccaggtcaaggaggtcacgcagaatgaaggcaccaagaccatcgccaataaccttaccagcacgattcaggtctttacggactcggaataccagctcccgtacgtcctcggctctgcgcaccagggctgcctgcctccgttcccggcggacgtcttcatgattcctcagtacgggtacctgactctgaacaacggcagtcaggccgtgggccgttcctccttctactgcctggagtactttccttctcaaatgctgagaacgggcaacaactttgagttcagctaccagtttgaggacgtgccttttcacagcagctatgcgcacagccaaagcctggaccggctgatgaaccccctcatcgaccagtacctgtactacctgtctcggactcagtccacgggaggtaccgcaggaactcagcagttgctattttctcaggccgggcctaataacatgtcggctcaggccaaaaactggctacccgggccctgctaccggcagcaacgcgtctccacgacagtgtcgcaaaataacaacagcaactttgcttggaccggtgccaccaagtatcatctgaatggcagagactctctggtaaatcccggtgtcgctatggcaacgcacaagggcgacgaagagcgattttttccatccagcggagtcttgatgtttgggaaacagggagctggaaaagacaacgtggactatagcagcgttatgctaaccagtgaggaagaaatcaaaaccaccaacccagtggccacagaacagtacggcgtggtggccgataacctgcaacagcaaaacgccgctcctattgtaggggccgtcaacagtcaaggagccttacctggcatggtctggcagaaccgggacgtgtacctgcagggtcctatctgggccaagattcctcacacggacggcaactttcatccttcgccgctgatgggaggctttggactgaaacacccgcctcctcagatcctgattaagaatacacctgttcccgcggatcctccaactaccttcagtcaagccaagctggcgtcgttcatcacgcagtacagcaccggacaggtcagcgtggaaattgaatgggagctgcagaaagagaacagcaagcgctggaacccagagattcagtatacttccaactactacaaatctacaaatgtggactttgctgtcaatactgagggtacttattcagagcctcgccccattggcacccgttacctcacccgtagcctgtaattgcctgttaatcaataaaccggttgattcgtttcagttgaactttggtctctgcgaagggcgaattc

SEQ ID NO: 5008 - DNA, 3128 bp, Adeno-associated virus
gaattcgccctttctacggctgcgtcaactggaccaatgagaactttcccttcaacgattgcgtcgacaagatggtgatctggtgggaggagggcaagatgacggccaaggtcgtggagtccgccaaggccattctcggcggcagcaaggtgcgcgtggaccaaaagtgcaagtcgtccgcccagatcgaccccacccccgtgatcgtcacctccaacaccaacatgtgcgccgtgattgacgggaacagcaccaccttcgagcaccagcagccgttgcaggaccggatgttcaaatttgaactcacccgccgtctggagcatgactttggcaaggtgacaaagcaggaagtcaaagagttcttccgctgggcgcaggatcacgtgaccgaggtggcgcatgagttctacgtcagaaagggtggagccaacaagagacccgcccccgatgacgcggataaaagcgagcccaagcgggcctgcccctcagtcgcggatccatcgacgtcagacgcggaaggagctccggtggactttgccgacaggtaccaaaacaaatgttctcgtcacgcgggcatgcttcagatgctgtttccctgcaagacatgcgagagaatgaatcagaatttcaacatttgcttcacgcgcgggaccagagactgttcagaatgtttcccgggcgtgtcagaatctcaaccggtcgtcagaaagaggacgtatcggaaactctgtgccattcatcatctgctggggcgggctcccgagattgcttgctcggcctgcgatctggtcaacgtggacctggatgactgtgtttctgagcaataaatgacttaaaccaggtatggctgccgatggttatcttccagattggctcgaggacaacctctctgagggcattcgcgagtggtgggacttgaaacctggagccccgaaacccaaagccaaccagcaaaagcaggacgacggccggggtctggtgcttcctggctacaagtacctcggacccttcaacggactcgacaagggggagcccgtcaacgcggcggacgcagcggccctcgagcacgacaaggcctacgaccagcagctcaaagcgggtgacaatccgtacctgcggtataaccacgccgacgccgagtttcaggagcgtctgcaagaagatacgtcttttgggggcaacctcgggcgagcagtcttccaggccaagaagcgggttctcgaacctctcggtctggttgaggaaggcgctaagacggctcctggaaagaagagaccggtagagccatcaccccagcgttctccagactcctctacgggcatcggcaagacaggccagcagcccgcgaaaaagagactcaactttgggcagactggcgactcagagtcagtgcccgaccctcaaccaatcggagaaccccccgcaggcccctctggtctgggatctggtacaatggctgcaggcggtggcgctccaatggcagacaataacgaaggcgccgacggagtgggtagttcctcaggaaattggcattgcgattccacatggctgggcgacagagtcatcaccaccagcacccgaacctgggccctccccacctacaacaaccacctctacaagcaaatctccaacgggacatcgggaggaagcaccaacgacaacacctacttcggctacagcaccccctgggggtattttgactttaacagattccactgccacttctcaccacgtgactggcagcgactcatcaacaacaactggggattccggcccaagagactcaacttcaagctcttcaacatccaggtcaaggaggtcacgcagaatgaaggcaccaagaccatcgccaataaccttaccagcacgattcaggtctttacggactcggaataccagctcccgtacgtcctcggctctgcgcaccagggctgcccgcctccgttcccggcggacgtcttcatgattcctcagtacgggtacctgactctgaacaacggcagtcaggccgtgggccgttcctccttctactgcctggagtactttccttctcaaatgcggagaacgggcaacaactttgagttcagctaccagtttgaggacgtgccttttcacagcagctacgcgcatagccaaagcctggaccggctgatgaaccccctcatcgaccagtacctgtactacctgtctcggactcagtccacgggaggtaccgcaggaactcagcagttgctattttctcaggccgggcctaataacatgtcggctcaggccaaaaactggctacccgggccctgctaccggcagcaacgcgtctccacgacactgtcgcaaaataacaacagcaactttgcttggaccggtgccaccaagtatcatctgaatggcagagactctctggtaaatcccggtgtcgctatggcaacgcacaaggacgacgaagagcgattttttccatccagcggagtcttgatgtttgggaaacagggagctggaaaagacaacgtggactatagcagcgttatgctaaccagtgaggaagaaatcaaaaccaccaacccagtggccacagaacagtacggcgtggtggccgataacctgcaacagcaaaacgccgctcctattgtaggggccgtcaacagtcaaggagccttacctggcatggtctggcagaaccgggacgtgtacctgcagggtcctatctgggccaagattcctcacacggacggcaactttcatccttcgccgctgatgggaggctttggactgaaacacccgcctcctcagatcctgattaagaatacacctgttcccgcggatcctccaactaccttcagtcaagccaagctggcgtcgttcatcacgcagtacagcaccggacaggtcagcgtggaaattgaatgggagctgcagaaagagaacagcaagcgctggaacccagagattcagtatacttccaactactacaaatctacaaatgtggactttgctgtcaatactgagggtacttattcagagcctcgccccattggcacccgttacctcacccgtaacctgtaattgcctgttaatcaataaaccggttaattcgtttcagttgaactttggtctctgcgaagggcgaattc

SEQ ID NO: 5009 - protein, 738 aa, Adeno-associated virus; identical to SEQ ID NO: 5002

SEQ ID NO: 5010 - DNA, 1933 bp, Adeno-associated virus
  modified_base (1302)..(1302): a, c, t or g
caaggcctacgaccagcagctcaaagcgggtgacaatccgtacctgcggtataaccacgccgacgccgagtttcaggagcgtcttcaagaagatacgtcttttgggggcaacctcgggcgagcagtcttccaggccaaaaagcgggttctcgaacctcttggtctggttgagacgccagctaagacggcacctggaaagaagcgaccggtagactcgccagactccacctcgggcatcggcaagaaaggccagcagcccgcgaaaaagagactcaactttgggcagactggcgactcagagtcagtccccgaccctcaaccaatcggagaaccaccagcaggcccctctggtctgggatctggtacaatggctgcaggcggtggcgcaccaatggctgacaataacgagggcgccgacggagtgggtaatgcctcaggaaattggcattgcgattccacatggctgggcgacagagtcatcaccaccagcacccgaacctgggccctgcccacctacaacaaccacctctacaagcaaatctccagtcagtcagcagggagcaccaacgataacgtctatttcggctacagcaccccctgggggtattttgacttcaacagattccattgccacttctcaccacgtgactggcagcgacttatcaacaacaactggggattccggcccaagaagctcaacttcaagctcttcaacatccaggtcaaggaggtcacgacgaatgacggtgtcacaaccatcgctaataaccttaccagcacggttcaggtcttttcggactcggaatatcaactgccgtacgtcctcggctccgcgcaccagggctgcctgcctccgttcccggcagacgtgttcatgattccgcagtacggatacctgactctgaacaatggcagccaatcggtaggccgttcctccttctactgcctggagtactttccttctcagatgctgagaacgggcaacaacttcacctttagctacaccttcgaggacgtgcctttccacagcagctacgcgcacagccagagtctggaccggctgatgaatcccctcatcgaccagtacctgtactacttggccagaacacagagcaacgcaggaggtactgctggcaatcgggaactgcagttttatcagggcggacctaccaccatggccgaacaagcaaagaactggctgcccggaccttgcttccggcaacagagagtatccaagacgctggatcaaaataacaacagcaactttgcctggactggtgccacaaaataccatttaaatgnaagaaattcattggttaatcccggtgtcgccatggcaacccacaaggacgacgaggaacgcttcttcccttcgagcggagttctaatttttggcaaaactggagcagctaataaaactacattagaaaacgtgctcatgacaaatgaagaagaaattcgtcctaccaacccggtagctaccgaggaatacgggattgtaagcagcaacttgcaggcggctagcaccgcagcccagacacaagttgttaacaaccagggagccttacctggcatggtctggcagaaccgggacgtgtacctgcaaggtcccatttgggccaagattcctcacacggacggcaactttcacccgtctcctctaatgggtggctttggactgaaacacccgcctccccagatcctgatcaaaaacacaccggtacctgctaatcctccagaagtgtttactcctgccaagtttgcttccttcatcacgcagtacagcaccgggcaagtcagcgttgagatcgagtgggagctgcagaaagagaacagcaagcgctggaacccagagattcagtacacctccaactttgacaaacagactggagtggactttgctgttgacagccagggtgtttactctgagcct

SEQ ID NO: 5011 - DNA, 3105 bp, Adeno-associated virus
gaattcgcccttgctgcgtcaactggaccaatgagaactttcccttcaacgattgcgtcgacaagatggtgatctggtgggaggagggcaagatgaccgccaaggtcgtggagtccgccaaggccattctgggcggaagcaaggtgcgcgtggaccaaaagtgcaagtcatcggcccagatcgaccccacgcccgtgatcgtcacctccaacaccaacatgtgcgccgtgatcgacgggaacagcaccaccttcgagcaccagcagccgctgcaggaccgcatgttcaagttcgagctcacccgccgtctggagcacgactttggcaaggtgaccaagcaggaagtcaaagagttcttccgctgggctcaggatcacgtgactgaggtggcgcatgagttctacgtcagaaagggcggagccaccaaaagacccgcccccagtgacgcggatataagcgagcccaagcgggcctgcccctcagttgcggagccatcgacgtcagacgcggaagcaccggtggactttgcggacaggtaccaaaacaaatgttctcgtcacgcgggcatgcttcagatgctgtttccctgcaagacatgcgagagaatgaatcagaatttcaacgtctgcttcacgcacggggtcagagactgctcagagtgcttccccggcgcgtcagaatctcaacccgtcgtcagaaaaaagacgtatcagaaactgtgcgcgattcatcatctgctggggcgggcacccgagattgcgtgttcggcccgcgatctcgtcaacgtggacttggatgactgtgtttctgagcaataaatgacttaaaccaggtatggctgctgacggttatcttccagattggctcgaggacaacctctctgagggcattcgcgagtggtgggacctgaaacctggagcccccaagcccaaggccaaccagcagaagcaggacgacggccggggtctggtgcttcctggctacaagtacctcggacccttcaacggactcgacaagggggagcccgtcaacgcggcggacgcagcggccctcgagcacgacaaggcctacgaccagcagctcaaagcgggtgacaatccgtacctgcggtataaccacgccgacgccgagtttcaggagcgtctgcaagaagatacgtcttttgggggcaacctcgggcgagcagtcttccaggccaagaagagggtactcgaacctctgggcctggttgaagaaggtgctaagacggctcctggaaagaagagaccgttagagtcaccacaagagcccgactcctcctcaggaatcggcaaaaaaggcaaacaaccagccaaaaagagactcaactttgaagaggacactggagccggagacggaccccctgaaggatcagataccagcgccatgtcttcagacattgaaatgcgtgcagcaccgggcggaaatgctgtcgatgcgggacaaggttccgatggagtgggtaatgcctcgggtgattggcattgcgattccacctggtctgagggcaaggtcacaacaacctcgaccagaacctgggtcttgcccacctacaacaaccacttgtacctgcggctcggaacaacatcaaacagcaacacctacaacggattctccaccccctggggatactttgactttaacagattccactgtcacttctcaccacgtgactggcaaagactcatcaacaacaactggggactacgaccaaaagccatgcgcgttaaaatcttcaatatccaagttaaggaggtcacaacgtcgaacggcgagactacggtcgctaataaccttaccagcacggttcagatatttgcggactcgtcgtatgagctcccgtacgtgatggacgctggacaagagggaagtctgtctcctttccccaatgacgtcttcatggtgcctcaatatggctactgtggcattgtgactggcgaaaatcagaaccagacggacagaaatgctttctactgcctggagtattttccttcacaaatgctgagaactggcaataactttgaaatggcttacaactttgggaaggtgccgttccactcaatgtatgcttacagccagagcccggacagactgatgaatcccctcctggaccagtacctgtggcacttacagtcgaccacctctggagagactctgaatcaaggcaatgcagcaaccacatttggaaaaatcaggagtggagactttgccttttacagaaagaactggctgcctgggccttgtgttaaacagcagagactctcaaaaactgccagtcaaaattacaagattcctgccagcgggggcaacgctctgttaaagtatgacacccactataccttaaacaaccgctggagcaacatagcgcctggacctccaatggcaacagctggaccttcagatggggacttcagcaacgcccagctcatcttccctggaccatcagtcaccggaaacacaacaacctcagcaaacaatctgttgtttacatcagaagaagaaattgctgccaccaacccaagagacacggacatgtttggtcagattgctgacaataatcagaatgctacaactgctcccataaccggcaacgtgactgctatgggagtgcttcctggcatggtgtggcaaaacagagacatttactaccaagggccaatttgggccaagatcccacacgcggacggacattttcatccttcaccgctaattggcggttttggactgaaacatccgcctccccagatatttatcaaaaacacccccgtacctgccaatcctgcgacaaccttcactgcagccagagtggactctttcatcacacaatacagcaccggccaggtcgctgttcagattgaatgggaaatcgaaaaggaacgctccaaacgctggaatcctgaagtgcagtttacttcaaactatgggaaccagtcttctatgttgtgggctcccgatacaactgggaagtatacagagccgcgggttattggctctcgttatttgactaatcatttgtaactgcctagttaatcaataaaccgtgtgattcgtttcagttgaactttggtctctgcgaagggcgaattc

SEQ ID NO: 5012 - protein, 733 aa, Adeno-associated virus
MAADGYLPDWLEDNLSEGIREWWDLKPGAPKPKANQQKQDDGRGLVLPGYKYLGPFNGLDKGEPVNAADAAALEHDKAYDQQLKAGDNPYLRYNHADAEFQERLQEDTSFGGNLGRAVFQAKKRVLEPLGLVEEGAKTAPGKKRPLESPQEPDSSSGIGKKGKQPAKKRLNFEEDTGAGDGPPEGSDTSAMSSDIEMRAAPGGNAVDAGQGSDGVGNASGDWHCDSTWSEGKVTTTSTRTWVLPTYNNHLYLRLGTTSNSNTYNGFSTPWGYFDFNRFHCHFSPRDWQRLINNNWGLRPKAMRVKIFNIQVKEVTTSNGETTVANNLTSTVQIFADSSYELPYVMDAGQEGSLPPFPNDVFMVPQYGYCGIVTGENQNQTDRNAFYCLEYFPSQMLRTGNNFEMAYNFEKVPFHSMYAHSQSLDRLMNPLLDQYLWHLQSTTSGETLNQGNAATTFGKIRSGDFAFYRKNWLPGPCVKQQRFSKTASQNYKIPASGGNALLKYDTHYTLNNRWSNIAPGPPMATAGPSDGDFSNAQLIFPGPSVTGNTTTSANNLLFTSEEEIAATNPRDTDMFGQIADNNQNATTAPITGNVTAMGVLPGMVWQNRDIYYQGPIWAKIPHADGHFHPSPLIGGFGLKHPPPQIFIKNTPVPANPATTFTAARVDSFITQYSTGQVAVQIEWEIEKERSKRWNPEVQFTSNYGNQSSMLWAPDTTGKYTEPRVIGSRYLTNHL

SEQ ID NO: 5013 - DNA, 3105 bp, Adeno-associated virus
gaattcgcccttgctgcgtcaactggaccaatgagaactttcccttcaacgattgcgtcgacaagatggtgatctggtgggaggagggcaagatgaccgccaaggtcgtggagtccgccaaggccattctgggcggaagcaaggtgcgcgtggaccaaaagtgcaagtcatcggcccagatcgaccccacgcccgtgatcgtcacctccaacaccaacatgtgcgccgtgatcgacgggaacagcaccaccttcgagcaccagcagccgctgcaggaccgcatgttcaagttcgagctcacccgccgtctggagcacgactttggcaaggtgaccaagcaggaagtcaaagagttcttccgctgggctcaggatcacgtgactgaggtggcgcatgagttctacgtcagaaagggcggagccaccaaaagacccgcccccagtgacgcggatataagcgagcccaagcgggcctgcccctcagttgcggagccatcgacgtcagacgcggaagcaccggtggactttgcggacaggtaccaaaacaaatgttctcgtcacgcgggcatgcttcagatgctgtttccctgcaagacatgcgagagaatgaatcagaatttcaacgtctgcttcacgcacggggtcagagactgctcagagtgcttccccggcgcgtcagaatctcaacccgtcgtcagaaaaaagacgtatcagaaactgtgcgcgattcatcatctgctggggcgggcacccgagattgcgtgttcggcctgcgatctcgtcaacgtggacttggatgactgtgtttctgagcaataaatgacttaaaccaggtatggctgctgacggttatcttccagattggctcgaggacaacctctctgagggcattcgcgagtggtgggacctgaaacctggagcccccaagctcaaggccaaccagcagaagcaggacgacggccggggtctggtgcttcctggctacaagtacctcggacccttccacggactcgacaagggggagcccgtcaacgcggcggacgcagcggccctcgagcacgacaaggcctacgaccagcagctcaaagcgggtgacaatccgtacctgcggtataaccacgccgacgccgagtttcaggagcgtctgcaagaagatacgtcttttgggggcaacctcgggcgagcagtcttccaggccaagaagagggtactcgaaccactgggcctggttgaagaaggtgctaagacggctcctggaaagaagagaccgttagagtcaccacaagagcccgactcctcctcaggaatcggcaaaaaaggcaaacaaccagccaaaaagagactcaactttgaagaggacactggagccggagacggaccccctgaaggatcagataccagcgccatgtcttcagacattgaaatgcgtgcagcaccgggcggaaatgctgtcgatgcgggacaaggttccgatggagtgggtaatgcctcgggtgattggcattgcgattccacctggtctgagggcaaggtcacaacaacctcgaccagaacctgggtcttgcccacctacaacaaccacttgtacctgcggctcggaacaacatcaaacagcaacacctacaacggattctccaccccctggggatactttgactttaacagattccactgtcacttctcaccacgtgactggcaaagactcatcaacaacaactggggactacgaccaaaagccatgcgcgttaaaatcttcaatatccaagttaaggaggtcacaacgtcgaacggcgagactacggtcgctaataaccttaccagcacggttcagatatttgcggactcgtcgtatgagctcccgtacgtgatggacgctggacaagagggaagtctgcctcctttccccaatgacgtcttcatggtgcctcaatatggctactgtggcattgtgactggcgaaaatcagaaccagacggacagaaatgctttctactgcctggagtattttccttcacaaatgctgagaactggcaataactttgaaatggcttacaactttgagaaggtgccgttccactcaatgtatgctcacagccagagcctggacagactgatgaatcccctcctggaccagtacctgtggcacttacagtcgaccacctctggagagactctgaatcaaggcaatgcagcaaccacatttggaaaaatcaggagtggagactttgccttttacagaaagaactggctgcctgggccttgtgttaaacagcagagattctcaaaaactgccagtcaaaattacaagattcctgccagcgggggcaacgctctgttaaagtatgacacccactataccttaaacaaccgctggagcaacatagcgcctggacctccaatggcaacagctggaccttcagatggggacttcagcaacgcccagctcatcttccctggaccatcagtcaccggaaacacaacaacctcagcaaacaatctgttgtttacatcagaaggagaaattgctgccaccaacccaagagacacggacatgtttggtcagattgctgacaataatcagaatgctacaactgctcccataaccggcaacgtgactgctatgggagtgcttcctggcatggtgtggcaaaacagagacatttactaccaagggccaatttgggccaagatcccacacgcggacggacattttcatccttcaccgctaattggcggttttggactgaaacatccgcctccccagatatttatcaaaaacacccccgtacctgccaatcctgcgacaaccttcactgcagccagagtggactctttcatcacacaatacagcaccggccaggtcgctgttcagattgaatgggaaatcgaaaaggaacgctccaaacgccggaatcctgaagtgcagtttacttcaaactatgggaaccagtcttctatgttgtgggctcccgatacaactgggaagtatacagagccgcgggttattggctctcgttatttgactaatcatttgtaactgcctagttaatcaataaaccgtgtgattcgtttcagttgaactttggtctctgcgaagggcgaattc

SEQ ID NO: 5014 - DNA, 3105 bp, Adeno-associated virus
gaattcgcccttcgcagagaccaaagttcaactgaaacgaatcacacggtttattgattaactaggcagttacaaatgattagtcaaataacgagagccaataacccgcggctctgtatacttcccagttgtatcgggagcccacaacatagaagactggttcccacagtttgaagtaaactgcacttcaggattccagcgtttggagcgttccttttcgatttcccattcaatctgaacagcgacctggccggtgctgtattgtgtgatgaaagagtccactctggctgcagtgaaggttgtcgcaggataggcaggtacgggggtgtttttgataaatatctggggaggcggatgtttcagtccaaaaccgccaattagcggtgaaggatgaaaatgtccgtccgcgtgtgggatcttggcccaaattggcccttggtagtaaatgtctctgttttgccacaccatgccaggaagcactcccatagcagtcacgttgccggttatgggagcagttgtagcattctgattattgtcagcaatctgaccaaacatgtccgtgtctcttgggttggtggcagcaatttcttcttctgatgtaaacaacagattgtttgctgaggttgttgtgtttccggtgactgatggtccagggaagatgagctgggcgttgctgaagtccccatctgaaggtccagctgttgccattggaggtccaggcgctatgttgctccagcggttgtttaaggtatagtgggtgtcatactttaacagagcgttgcccccgctggcaggaatcttgtaattttgactggcagtttttgagaatctctgctgtttaacacaaggcccaggcagccagttctttctgtaaaaggcaaagtctccactcctgatttttccaaatgtggttgctgcattgccttgattcagagtctctccagaggtggtcgactgtaagtgccacaggtactggtccaggaggggattcatcagtccgtccaggctctggctgtgagcatacattgagtggaacggcaccttctcaaagttgtaagccgtttcaaagttattgccagttctcagcatttgtgaaggaaaatactccaggcagtagaaagcatttctgtccgtctggttctgattttcgccagtcacaatgccacagtagccatattgaggcaccatgaagacgtcattggggaaaggaggcagacttccctcttgtccagcgtccatcacgtacgggagctcatacgacgagtccgcaaatatctgaaccgtgctggtaaggttattagcgaccgtagtctcgccgttcgacgttgtgacctccttaacttggatattgaagattttaacgcgcatggcttttggtcgtagtccccagttgttgttgatgagtctttgccagtcacgtggtgagaagtgacagtggaatctgttaaagtcaaagtatccccagggggtggagaatccgttgtaggtgttgctgtttgatgttgttccgagccgcaggtacaagtggttgttgtaggtgggcaagacccaggttctggtcgaggttgttgtgaccttgccctcagaccaggtggaatcgcaatgccaatcacccgaggcattacccactccatcggaaccttgtcccgcatcgacagcatttccgcccggtgctgcacgcatttcaatgtctgaagacatggcgctggtatctgatccttcagggggtccgtctccggctccagtgtcctcttcaaagttgagtctctttttggctggttgtttgccttttttgccgattcctgaggaggagtcgggctcttgtggtgactctaacggtctcttctttccaggagccgtcttagcaccttcttcaaccaggcccagaggttcgagtaccctcttcttggcctggaagactgctcgcccgaggttgcccccaaaagacgtatcttcttgcagacgctcctgaaactcggcgtcggcgtggttataccgcaggtacggattgtcacccgctttgagctgctggtcgtaggccttgtcgtgctcgagggccgctgcgtccgccgcgttgacgggctcccccttgtcgagtccgttgaagggtccgaggtactcgtagccaggaagcaccagaccccggccgtcgtcctgcttctgctggttggccttgggcttgggggctccaggtttcaggtcccaccactcgcgaatgccctcagagaggttgtcctcgagccaatctggaagataaccgtcagcagccatacctggtttaagtcatttattgctcagaaacacagtcatccaagtccacgttgacgagatcgcaggccgaacacgcaatctcgggtgcccgccccagcagatgatgaatcgcgcacagtttctgatacgtcttttttctgacgacgggttgagattctgacgcgccggggaagcactctgagcagtctctgaccccgtgcgtgaagcagacgttgaaattctgattcattctctcgcatgtcttgcagggaaacagcatctgaagcatgcccgcgtgacgagaacatttgttttggtacctgtccgcaaggtccaccggtgcttccgcgtctgacgtcgatggctccgcaactgaggggcaggcccgcttgggctcgcttatatccgcgtcactgggggcgggtcttttggtggctccgccctttctgacgtagaactcatgcgccacctcagtcacgtgatcctgagcccagcggaagaactctttgacttcctgcttggtcaccttgccaaagtcgtgctccagacggcgggtgagctcgaacttgaacatgcggtcctgcagcggctgctggtgctcgaaggtggtgctgttcccgtcgatcacggcgcacatgttggtgttggaggtgacgatcacgggcgtggggtcgatctgggccgatgacttgcacttttggtccacgcgcaccttgcttccgcccagaatggccttggcggactccacgaccttggcggtcatcttgccctcctcccaccagatcaccatcttgtcgacgcaatcgttgaagggaaagttctcattggtccagttgacgcagcaagggcgaattc

SEQ ID NO: 5015 - DNA, 3094 bp, Adeno-associated virus
gaattcgcccttgctgcgtcaactggaccaagagaactttcccttcaacgattgcgtcgacaagatggtgatctggtgggaggagggcaagatgacggccaaggtcgtggagtccgccaaagccattctgggcggaagcaaggtgcgcgtcgaccaaaagtgcaagtcctcggcccagatcgatcccacccccgtgatcgtcacctccaacaccaacatgtgcgccgtgatcgacgggaacagcaccaccttcgagcaccagcagccgttgcaggaccggatgttcaaatttgaactcacccgccgtctggaacacgactttggcaaggtgaccaagcaggaagtcaaagagttcttccgctgggctagtgatcacgtgactgaggtgacgcatgagttctacgtcagaaagggcggagccagcaaaagacccgcccccgatgacgcggatataagcgagcccaagcgggcctgtccctcagtcacggacccatcgacgtcagacgcggaaggagctccggtggactttgccgacaggtaccaaaacaaatgttctcgtcacgcgggcatgcttcagatgctgtttccctgcaaaacgtgcgagagaatgaatcagaatttcaacatttgcttcacgcacggggtcagagactgtttagaatgtttccccggcgtgtcagaatctcaaccggtcgtcagaaaaaagacgtatcggaagctgtgtgcgattcatcatctgctggggcgggcacccgagattgcttgctcggcctgcgacctggtcaacgtggacctggacgactgtgtttctgagcaataaatgacttaaaccgggtatggctgccgatggttatcttccagattggctcgaggacaacctctctgagggcattcgcgagtggtgggacctgaaacctggagccccgaaacccaaagccaaccagcaaaagcaggacgacggccggggtctggtgcttcctggctacaagtacctcggacccttcaacggactcgacaagggggagcccgtcaacgcggcggacgcagcggccctcgagcacgacaaggcctacgaccagcagctcaaagcgggtgacaatccgtacctgcggtataaccacgccgacgccgagtttcaggagcgtctgcaagaagatacgtcatttgggggcaacctcgggcgagcagtcttccaggccaagaagcgggttctcgaacctctcggtctggttgaggaaggcgctaagacggctcctggaaagaagagacccatagactctccagactcctccacgggcatcggcaaaaaaggccagcagcccgctaaaaagaagctcaattttggtcagactggcgactcagagtcagtccccgaccctcaacctcttggagaacctccagcagcgccctctagtgtgggatctggtacaatggctgcaggcggtggcgcaccaatggcagacaataacgaaggtgccgacggagtgggtaatgcctcaggaaattggcattgcgattccacatggctgggcgacagagtcatcaccaccagcaccagaacctgggccctccccacctacaacaaccacctctacaagcaaatctccagcagcagctcaggagccaccaatgacaaccactacttcggctacagcaccccctgggggtattttgactttaacagattccactgccacttctcaccacgtgactggcagcgactcatcaacaacaactggggattccggcccaagaagctgcggttcaagctcttcaacatccaggtcaaggaggtcacaacgaatgacggcgtcacgaccatcgctaataaccttaccagcacggttcaggtcttctcggactcggaataccagctgccgtacgtcctcggctctgcgcaccagggctgcctgcctccgttcccggcggacgtcttcatgattcctcagtacggctacctgactctgaacaacggcagccaatcggtgggccgttcctccttctactgcctggaatatttcccctctcaaatgctgagaacgggcaacaactttgagttcagttacagcttcgaggacgtgcctttccacagcagctacgcgcacagccagagcctagaccggctgatgaaccctctcatcgaccagtacctgtactacctggcccggacccagagcaccacgggttccaccagggaactgcaatttcatcaagctgggcccaatactatggccgagcagtcaaagaactggctgcctggaccctgctataggcaacagggactgtcaaagaacttggactttaacaacaacagcaattttgcctggactgctgccactaaatatcatctgaatggcagaaactctttgaccaatcctggcattcccatggcaaccaacaaggatgatgaggaccagttctttcccatcaacggggtactggtttttggcaagacgggagctgccaacaaaactacgctggaaaacgttctgatgaccagcgaggaggagatcaagaccactaaccctgtggctacagaagaatacggtgtggtctccagcaacctgcagccgtctacagccgggcctcaatcacagactatcaacagccagggagcactgcctggcatggtctggcagaaccgggacgtgtatctgcagggtcccatctgggccaaaattcctcacacggatggcaactttcacccgtctcctctgatgggcggttttggactcaaacacccgcctccacagatcctgatcaaaaacacacctgtacctgctaatcctccggaggtgtttactcctgccaagtttgcctccttcatcacgcagtacagcaccggacaagtcagcgtggaaatcgagtgggagctgcagaaagaaaacagcaagcgctggaacccagaaattcagtatacttccaattatgccaagtctaataatgttgaatttgctgtgaaccctgatggtgtttatactgagcctcgccccattggcactcgttacctcccccgtaatctgtaattgcttgttaatcaataaaccggttgattcgtttcagttgaactttggtctctgcgaagggcgaattc

SEQ ID NO: 5016 - DNA, 3095 bp, Adeno-associated virus
gaattcgcccttcgcagagaccaaagttcaactgaaacgaatcaaccggtttattgattaacaagcaattacagattacgggtgaggtaacgagtgccaatggggcgaggctcagtataaacaccatcagggttcacagcaaattcaacattattagacttggcataattggaagtatactgaatttctgggttccagcgcttgctgttttctttctgcagctcccactcgatttccacgctgacttgtccggtgctgtactgcgtgatgaaggaggcaaacttggcaggagtaaacacctccggaggattagcaggtacaggtgtgtttttgatcaggatctgtggaggcgggtgtttgagtccaaaaccgcccatcagaggagacgggtgaaagttgccatccgtgtgaggaattttggcccagatgggaccctgcagatacacgtcccggttctgccagaccatgccaggcagtgctccctggctgttgatagtctgtgattgaggcccggctgtagacgactgcaggttgctggagaccacaccgtattcttctgtagccacagggttagtggtcttgatctcctcctcgctggtcatcagaacgttttccagcgtagttttgttggcagctcccgtcttgccaaaaaccagtaccccgttgatgggaaagaactggtcctcatcatccttgttggttgccatgggaatgccaggattggtcaaagagtttctgccattcagatgatatttagtggcagcagtccaggcaaaattgctgttgttgttaaagtccaagttctttgacagtctctgttgcctatagcagggtccaggcagccagttctttgactgctcggccatagtattgggcccagcttgatgaaattgcagttccctggtggaacccgtggtgctctgggtccgggccaggtagtacaggtactggtcgatgagagggttcatcagccggtctaggctctggctgtgcgcgtagctgctgtggaaaggcacgtcctcgaagctgtaactgaactcaaagttgttgcccgttctcagcatttgagaggggaaatattccaggcagtagaaggaggaacggcccaccgattggctgccgttgtccagagtcaggtagccgtactgaggaatcatgaagacgtccgccgggaacggaggcaggcagccctggtgcgcagagccgaggacgtacggcagctggtattccgagtccgagaagacctgaaccgtgctggtaaggttattagcgatggtcgtgacgccgtcattcgttgtgacctccttgacctggatgttgaggagcttgaaccgcagcttcttgggccggaatccccagttgttgttgatgagtcgctgccagtcacgtggtgagaagtggcagtggaatctgttaaagtcaaaatacccccagggggtgctgtagccgaagtagtggttgtcattggtggctcctgagctgctgctggagatttgcttgtagaggtggttgttgtaggtggggagggcccaggttctggtgctggtggtgatgactctgtcgcccagccatgtggaatcgcaatgccaatttcctgaggcattacccactccgtcggcaccttcgttattgtctgccattggtgcgccaccgcctgcagccattgtaccagatcccacactagagggcgctgctggaggttctccaagaggttgagggtcggggactgactctgagtcgccagtctgaccaaaattgagcttctttttagcgggctgctggccttttttgccgatgcccgtggaggagtctggagagcctatgggtctcttctttccaggagccgtcttagcgccttcctcaaccagaccgagaggttcgagaacccgcttcttggcctggaagactgctcgcccgaggttgcccccaaatgacgtatcttcttgcagacgctcctgaaactcggcgtcggcgtggttataccgcaggtacggattgtcacccgctttgagctgctggtcgtaggccttgtcgtgctcgagggccgctgcgtccgccgcgttgacgggctcccccttgtcgagtccgttgaagggtccgaggtacttgtagccaggaagcaccagaccccggccgtcgtcctgcttttgctggttggctttgggtttcggggctccaggtttcaggtcccaccactcgcgaatgccctcagagaggttgtcctcgagccaatctggaagataaccatcggcagccatacctggtttaagtcatttattgctcagaaacacagtcgtccaggtccacgttgaccaggtcgcaggccgagcaagcaatctcgggtgcccgccccagcagatgatgaatcgcacacagcttccgatacgtcttttttctgacgaccggttgagattctgacacgccggggaaacattctaaacagtctctgaccccgtgcgtgaagcaaatgttgaaattctgattcattctctcgcacgttttgcagggaaacagcacctgaagcatgcccgcgtgacgagaacatttgttttggtacctgtcggcaaagtccaccggagctccttccgcgtctgacgtcgatgggtccgtgactgagggacgggcccgcttgggctcgcttatatccgcgtcatcgggggcgggtcttttgctggctccgccctttctgacgtagaactcatgcgtcacctcagtcacgtgatcactagcccagcggaagaactctttgacttcctgctttgtcaccttgccaaagtcgtgttccagacggcgggtgagttcaaatttgaacatccggtcctgcaacggttgctggtgctcgaaggtggtgctgttcccgtcgatcacggcgcacatgttggtgttggaggtgacgatcacgggggtgggatcgatctgggcggacgacttgcacttttggtccacgcgcaccttgctgccgccgagaatggccttggcggactccacgaccttggccgtcatcttgccctcctcccaccagatcaccatcttgtcgacgcaatcgttgaagggaaagttctcattggtccagttgacgcagcaagggcgaattc

SEQ ID NO: 5017 - DNA, 3095 bp, Adeno-associated virus
gaattcgcccttcgcagagaccaaagttcaactgaaacgaatcaaccggtttattgattaacaagcaattacagattacgggtgaggtaacgagtgccaatggggcgaggctcagtataaacaccatcagggttcacagcaaattcaacattattagacttggcataattggaagtatactgaatttctgggttccagcgcttgctgttttctttctgcagctcccactcgatttccacgctgacttgtccggtgctgtactgcgtgatgaaggaggcaaacttggcaggagtaaacacctccggaggattagcaggtacaggtgtgtttttgatcaggatctgtggaggcgggtgttcgagtccaaaaccgcccatcagaggagacgggtgaaagttgccatccgtgtgaggaattttggcccagatgggaccctgcagatacacgtcccggttctgccagaccatgccaggcagtgctccctggctgttgatagtctgtgattgaggcccggctgtagacgactgcaggttgctggagaccacaccgtattcttctgtagccacagggttagtggtcttgatctcctcctcgctggtcatcagaacgttttccagcgtagttttgttggcagctcccgtcttgccaaaaaccagtaccccgttgatgggaaagaactggtcctcatcatccttgttggttgccatgggaatgccaggattggtcaaagagtttctgccattcagatgatatttagtggcagcagtccaggcaaaattgctgttgttgttaaagtccaagttctttgacagtctctgttgcctatagcagggtccaggcagccagttctttgactgctcggccatagtattgggcccagcttgatgaaattgcagttccctggtggaacccgtggtgctctgggtccgggccaggtagtacaggtactggtcgatgagagggttcatcagccggtctaggctctggctgtgcgcgtagctgctgtggaaaggcacgtcctcgaagctgtaactgaactcaaagttgttgcccgttctcagcatttgagaggggaaatattccaggcagtagaaggaggaacggcccaccgattggctgccgttgttcagagtcaggtagccgtactgaggaatcatgaagacgtccgccgggaacggaggcaggcagccctggtgcgcagagccgaggacgtacggcagctggtattccgagtccgagaagacctgaaccgtgctggtaaggttattagcgatggtcgtgacgccgtcattcgttgtgacctccttgacctggatgttgaagagcttgaaccgcagcttcttgggccggaatccccagttgttgttgatgagtcgctgccagtcacgtggtgagaagtggcagtggaatctgttaaagtcaaaatacccccagggggtgctgtagccgaagtagtggttgtcattggtggctcctgagctgctgctggagatttgcttgtagaggtggttgttgtaggtggggagggcccaggttctggtgctggtggtgatgactctgtcgcccagccatgtggaatcgcaatgccaatttcctgaggcattacccactccgtcggcaccttcgttattgtctgccgttggtgcgccaccgcctgcagccattgtaccagatcccacactagagggcgctgctggaggttctccaagaggttgagggtcggggactgactctgagtcgccagtctgaccaaaattgagcttctttttagcgggctgctggccttttttgccgatgcccgtggaggagtctggagagtctatgggtctcttctttccaggagccgtcttagcgccttcctcaaccagaccgagaggttcgagaacccgcttcttggcctggaagactgctcgcccgaggttgcccccaaatgacgtatcttcttgcaggcgctcctgaaactcggcgtcggcgtggttataccgcaggtacggattgtcacccgctttgagctgctggtcgtaggccttgtcgtgctcgagggccgctgcgtccgccgcgttgacgggctcccccttgtcgagtccgttgaagggtccgaggtacttgtagccaggaagcaccagaccccggccgtcgtcctgcttttgctggttggctttgggtttcggggctccaggtttcaggtcccaccactcgcgaatgccctcagagaggttgtcctcgagccaatctggaagataaccatcggcagccatacctggtttaagccatttattgctcagaaacacagtcgtccaggtccacgttgaccaggtcgcaggccgagcaggcaatctcgggtgcccgccccagcagatgatgaatcgcacacagcttccgatacgtcttttttctgacgaccggttgagattctgacacgccggggaaacattctaaacagtctctgaccccgtgcgtgaagcaaatgttgaaattctgattcattctctcgcacgttttgcagggaaacagcatctgaagcatgcccgcgtggcgagaacatttgttttggtacctgtcggcaaagtccaccggagctccttccgcgtctgacgtcgatgggtccgtgactgagggacaggcccgcttgggctcgcttatatccgcgtcatcgggggcgggtcttttgctggctccgccctttctgacgtagaactcatgcgtcacctcagtcacgtgatcactagcccagcggaagaactctttgacttcctgctttgtcaccttgccaaagtcgtgttccagacggcgggtgagttcaaatttgaacatccggtcctgcaacggctgctggtgctcgaaggtggtgctgttcccgtcgatcacggcgcgcatgttggtgttggaggtgacgatcacgggggtgggatcgatctgggcggacgacttgcacttttggtccacgcgcaccttgctgccgccgagaatggccttggcggactccacgaccttggccgtcatcttgccctcctcccaccagatcaccatcttgtcgacgcaatcgttgaagggaaagttctcattggtccagttgacgcagcaagggcgaattc

SEQ ID NO: 5018 - protein, 729 aa, Adeno-associated virus; identical to SEQ ID NO: 4833

SEQ ID NO: 5019 - protein, 729 aa, Adeno-associated virus
MAADGYLPDWLEDNLSEGIREWWDLKPGAPKPKANQQKQDDGRGLVLPGYKYLGPFNGLDKGEPVNAADAAALEHDKAYDQQLKAGDNPYLRYNHADAEFQERLQEDTSFGGNLGRAVFQAKKRVLEPLGLVEEGAKTAPGKKRPIDSPDSSTGIGKKGQQPAKKKLNFGQTGDSESVPDPQPLGEPPAAPSSVGSGTMAAGGGAPTADNNEGADGVGNASGNWHCDSTWLGDRVITTSTRTWALPTYNNHLYKQISSSSSGATNDNHYFGYSTPWGYFDFNRFHCHFSPRDWQRLINNNWGFRPKKLRFKLFNIQVKEVTTNDGVTTIANNLTSTVQVFSDSEYQLPYVLGSAHQGCLPPFPADVFMIPQYGYLTLNNGSQSVGRSSFYCLEYFPSQMLRTGNNFEFSYSFEDVPFHSSYAHSQSLDRLMNPLIDQYLYYLARTQSTTGSTRELQFHQAGPNTMAEQSKNWLPGPCYRQQRLSKNLDFNNNSNFAWTAATKYHLNGRNSLTNPGIPMATNKDDEDQFFPINGVLVFGKTGAANKTTLENVLMTSEEEIKTTNPVATEEYGVVSSNLQSSTAGPQSQTINSQGALPGMVWQNRDVYLQGPIWAKIPHTDGNFHPSPLMGGFGLKHPPPQILIKNTPVPANPPEVFTPAKFASFITQYSTGQVSVEIEWELQKENSKRWNPEIQYTSNYAKSNNVEFAVNPDGVYTEPRPIGTRYLTRNL

SEQ ID NO: 5020 - protein, 729 aa, Adeno-associated virus
MAADGYLPDWLEDNLSEGIREWWDLKPGAPKPKANQQKQDDGRGLVLPGYKYLGPFNGLDKGEPVNAADAAALEHDKAYDQQLKAGDNPYLRYNHADAEFQERLQEDTSFGGNLGRAVFQAKKRVLEPLGLVEEGAKTAPGKKRPIDSPDSSTGIGKKGQQPAKKKLNFGQTGDSESVPDPQPLGEPPAAPSSVGSGTMAAGGGAPMADNNEGADGVGNASGNWHCDSTWLGDRVITTSTRTWALPTYNNHLYKQISSSSSGATNDNHYFGYSTPWGYFDFNRFHCHFSPRDWQRLINNNWGFRPKKLRFKLFNIQVKEVTTNDGVTTIANNLTSTVQVFSDSEYQLPYVLGSAHQGCLPPFPADVFMIPQYGYLTLNNGSQSVGRSSFYCLEYFPSQMLRTGNNFEFSYSFEDVPFHSSYAHSQSLDRLMNPLIDQYLYYLARTQSTTGSTRELQFHQAGPNTMAEQSKNWLPGPCYRQQRLSKNLDFNNNSNFAWTAATKYHLNGRNSLTNPGIPMATNKDDEDQFFPINGVLVFGKTGAANKTTLENVLMTSEEEIKTTNPVATEEYGVVSSNLQSSTAGPQSQTINSQGALPGMVWQNRDVYLQGPIWAKIPHTDGNFHPSPLMGGFGLKHPPPQILIKNTPVPANPPEVFTPAKFASFITQYSTGQVSVEIEWELQKENSKRWNPEIQYTSNYAKSNNVEFAVNPDGVYTEPRPIGTRYLTRNL

SEQ ID NO: 5021 - DNA, 2217 bp, Adeno-associated virus
atggctgctgacggttatcttccagattggctcgaggacaacctctctgagggcattcgcgagtggtgggacctgaaacctggagcccccaagcccaaggccaaccagcagaagcaggacgacggccggggtctggtgcttcctggctacaagtacctcggacccttcaacggactcgacaagggggagcccgtcaacgcggcggacgcagcggccctcgagcacgacaaggcctacgaccagcagctcaaagcgggtgacaatccgtacctgcggtataaccacgccgacgccgagtttcaggagcgtctacaagaagatacgtcttttgggggcaacctcgggcgagcagtcttccaggccaagaagcgggttctcgaacctctcggtctggttgaggaagctgctaagacggctcctggaaagaagagaccggtagaaccgtcacctcagcgttcccccgactcctccacgggcatcggcaagaaaggccagcggcccgctaaaaagagactgaactttggtcagactggcgactcagagtcagtccccgaccctcaaccaatcggagaaccaccagcaggcccctctggtctgggatctggtacaatggctgcaggcggtggcgctccaatggcagacaataacgaaggcgccgacggagtgggtagttcctcaggaaattggcattgcgattccacatggctgggcgacagagtcatcaccaccagcacccgaacctgggccctgcccacctacaacaaccacctctacaagcaaatatccaatgggacatcgggaggaagcaccaacgacaacacctacttcggctacagcaccccctgggggtattttgacttcaacagattccactgccacttctcaccacgtgactggcagcgactcatcaacaacaactggggattccggccaaaaagactcagcttcaagcccttcaacatccaggtcaaggaggtcacgcagaatgaaggcaccaagaccatcgccaataaccttaccagcacgattcaggtatttacggactcggaataccagctgccgtacgtcctcggctccgcgcaccagggctgcctgcctccgttcccggcggacgtcttcatgattccccagtacggctaccttacactgaacaatggaagtcaagccgtaggccgttcctccttctactgcctggaatattttccatctcaaatgctgcgaactggaaacaattttgaattcagctacaccttcgaggacgtgcctttccacagcagctacgcacacagccagagcttggaccgactgatgaatcctctcatcgaccagtacctgcactacttatccagaactcagtccacaggaggaactcaaggtacccagcaattgttattttctcaagctgggcctgcaaacatgtcggctcaggctaagaactggctacctggaccttgctaccggcagcagcgagtctctacgacactgtcgcaaaacaacaacagcaactttgcttggactggtgccaccaaatatcacctgaacggaagagactctttggtaaatcccggtgtcgccatggcaacccacaaggacgacgaggaacgcttcttcccgtcgagtggagtcctgatgtttggaaaacagggtgctggaagagacaatgtggactacagcagcgttatgctaaccagcgaagaagaaattaaaaccactaaccctgtagccacagaacaatacggtgtggtggctgacaacttgcagcaaaccaatacagggcctattgtgggaaatgtcaacagccaaggagccttacctggcatggtctggcagaaccgagacgtgtacctgcagggtcccatctgggccaagattcctcacacggacggcaacttccacccttcaccgctaatgggaggatttggactgaagcacccacctcctcagatcctgatcaagaacacgccggtacctgcggatcctccaacaacgttcagccaggcgaaattggcttccttcattacgcagtacagcaccggacaggtcagcgtggaaatcgagtgggagctgcagaaggagaacagcaaacgctggaacccagagattcagtacacttcaaactactacaaatctacaaatgtggactttgctgtcaatacagagggaacttattctgagcctcgccccattggtactcgctacctcacccgtaatctgtaa

SEQ ID NO: 5022 - protein, 738 aa, Adeno-associated virus
MAADGYLPDWLEDNLSEGIREWWDLKPGAPKPKANQQKQDDGRGLVLPGYKYLGPFNGLDKGEPVNAADAAALEHDKAYDQQLKAGDNPYLRYNHADAEFQERLQEDTSFGGNLGRAVFQAKKRVLEPLGLVEEAAKTAPGKKRPVEPSPQRSPDSSTGIGKKGQRPAKKRLNFGQTGDSESVPDPQPIGEPPAGPSGLGSGTMAAGGGAPMADNNEGADGVGSSSGNWHCDSTWLGDRVITTSTRTWALPTYNNHLYKQISNGTSGGSTNDNTYFGYSTPWGYFDFNRFHCHFSPRDWQRLINNNWGFRPKRLSFKPFNIQVKEVTQNEGTKTIANNLTSTIQVFTDSEYQLPYVLGSAHQGCLPPFPADVFMIPQYGYLTLNNGSQAVGRSSFYCLEYFPSQMLRTGNNFEFSYTFEDVPFHSSYAHSQSLDRLMNPLIDQYLHYLSRTQSTGGTQGTQQLLFSQAGPANMSAQAKNWLPGPCYRQQRVSTTLSQNNNSNFAWTGATKYHLNGRDSLVNPGVAMATHKDDEERFFPSSGVLMFGKQGAGRDNVDYSSVMLTSEEEIKTTNPVATEQYGVVADNLQQTNTGPIVGNVNSQGALPGMVWQNRDVYLQGPIWAKIPHTDGNFHPSPLMGGFGLKHPPPQILIKNTPVPADPPTTFSQAKLASFITQYSTGQVSVEIEWELQKENSKRWNPEIQYTSNYYKSTNVDFAVNTEGTYSEPRPIGTRYLTRNL

SEQ ID NO: 5023 - DNA, 2217 bp, Adeno-associated virus
atggctgctgacggttatcttccagattggctcgaggacaacctctctgagggcattcgcgagtggtgggacctgaaacctggagcccccaagcccaaggccaaccagcagaagcaggacgacggccggggtctggtgcttcctggctacaagtacctcggacccttcaacggactcgacaagggggagcccgtcaacgcggcggacgcagcggccctcgagcacgacaaggcctacgaccagcagctcaaagcgggtgacaatccgtacctgcggtataaccacgccgacgccgagtttcaggagcgtctgcaagaagatacgtcttttgggggcaacctcgggcgagcagtcttccaggccaagaagcgggttctcgaacctctcggtctggttgaggaagctgctaagacggctcctggaaagaagagaccggtagaaccgtcacctcagcgttcccccgactcctccacgggcatcggcaagaaaggccagcagcccgctaaaaagagactgaactttggtcagactggcgactcagagtcagtccccgaccctcaaccaatcggagaaccaccagcaggcccctctggtctgggatctggtacaatggctgcaggcggtggcgctccaatggcagacaataacgaaggcgccgacggagtgggtagttcctcaggaaattggcattgcgattccacatggctgggcgacagagtcatcaccaccagcacccgaacctgggccctgcccacctacaacaaccacctctacaagcaaatatccaatgggacatcgggaggaagcaccaacgacaacacctacttcggctacagcaccccctgggggtattttgacttcaacagattccactgccacttctcaccacgtgactggcagcgactcatcaacaacaactggggattccggccaaaaagactcagcttcaagctcttcaacatccaggtcaaggaggtcacgcagaatgaaggcaccaagaccatcgccaataaccttaccagcacgattcaggtatttacggactcggaataccagctgccgtacgtcctcggctccgcgcaccagggctgcctgcctccgttcccggcggacgtcttcatgattccccagtacggctaccttacactgaacaatggaagtcaagccgtaggccgttcctccttctactgcctggaatattttccatctcaaatgctgcgaactggaaacaattttgaattcagctacaccttcgaggacgtgcctttccacagcagctacgcacacagccagagcttggaccgactgatgaatcctctcatcgaccagtacctgtactacttatccagaactcagtccacaggaggaactcaaggtacccagcaattgttattttctcaagctgggcctgcaaacatgtcggctcaggctaagaactggctacctggaccttgctaccggcagcagcgagtctctacgacactgtcgcaaaacaacaacagcaactttgcttggactggtgccaccaaatatcacctgaacggaagagactctttggtaaatcccggtgtcgccatggcaacccacaaggacgacgaggaacgcttcttcccgtcgagtggagtcctgatgtttggaaaacagggtgctggaagagacaatgtggactacagcagcgttatgctaaccagcgaagaagaaattaaaaccactaaccctgtagccacagaacaatacggtgtggtggctgataacttgcagcaaaccaatacggggcctattgtgggaaatgtcaacagccaaggagccttacctggcatggtctggcagaaccgagacgtgtacctgcagggtcccatctgggccaagattcctcacacggacggcaacttccacccttcaccgctaatgggaggatttggactgaagcacccacctcctcagatcctgatcaagaacacgccggtacctgcggatcctccaacaacgttcagccaggcgaaattggcttccttcattacgcagtacagcaccggacaggtcagcgtggaaatcgagtgggagctgcagaaggagaacagcaaacgctggaacccagagattcagtacacttcaaactactacaaatctacaaatgtggactttgctgtcaatacagagggaacttattctgagcctcgccccattggtactcgttacctcacccgtaatctgtaa

SEQ ID NO: 5024 - protein, 738 aa, Adeno-associated virus; identical to SEQ ID NO: 4797

SEQ ID NO: 5025 - protein, 738 aa, Adeno-associated virus
MAADGYLPDWLEDNLSEGIREWWDLKPGAPKPKANQQKQDDGRGLVLPGYKYLGPFNGLDKGEPVNAADAAALEHDKAYDQQLKAGDNPYLRYNHADAEFQERLQEDTSFGGNLGRAVFQAKKRVLEPLGLVEEAAKTAPGKKRPVEPSPQRSPDSSTGIGKKGQQPAKKRLNFGQTGDSESVPDPQPIGEPPAGPSGLGSGTMAAGGGAPMADNNEGADGVGSSSGNWHCDSTWLGDRVITTSTRTWALPTYNNHLYKQISNGTSGGSTNDNTYFGYSTPWGYFDFNRFHCHFSPRDWQRLINNNWGFRPKRLSFKLFNIQVKEVTQDEGTKTIANNLTSTIQVFTDSEYQLPYVLGSAHQGCLPPFPADVFMIPQYGYLTLNNGSQAVGRSSFYCLEYFPSQMLRTGNNFEFSYTFEDVPFHSSYAHSQSLDRLMNPLIDQYLYYLSRTQSTGGTQGTQQLLFSQAGPANMSARAKNWLPGPCYRQQRVSTTLSQNNNSNFAWTGATKYHLNGRDSLVNPGVAMATHKDDEERFFPSSGVLMFGKQGAGRDNVDYSSVMLTSEEEIKTTNPVATEQYGVVADNLQQANTGPIVGNVNSQGALPGMVWQNRDVYLQGPIWAKIPHTDGNFHPSPLMGGFGLKHPPPQILIKNTPVPADPPTTFSQAKLASFITQYSTGQVSVEIEWELQKENSKRWNPEIQYTSNYYKSTNVDFAVNSEGTYSEPRPIGTRYLTRNL

SEQ ID NO: 5026 - DNA, 2217 bp, Adeno-associated virus
atggctgctgacggttatcttccagattggctcgaggacaacctctctgagggcattcgcgagtggtgggacctgaaacctggagcccccaagcccaaggccaaccagcagaagcaggacgacggccggggtctggtgcttcctggctacaagtacctcggacccttcaacggactcgacaagggggagcccgtcaacgcggcggacgcagcggccctcgagcacgacaaggcctacgaccagcagctcaaagcgggtgacaatccgtacctgcggtataaccacgccgacgccgagtttcaggagcgtctgcaagaagatacgtcttttgggggcaacctcgggcgagcagtcttccaggccaagaagcgggttctcgaacctctcggtctggttgaggaagctgctaagacggctcctggaaagaagagaccggtagaaccgtcacctcagcgttcccccgactcctccacgggcatcggcaagaaaggccagcagcccgctaaaaagagactgaactttggtcagactggcgactcagagtcagtccccgaccctcaaccaatcggagaaccaccagcaggcccctctggtctgggatctggtacaatggctgcaggcggtggcgctccaatggcagacaataacgaaggcgccgacggagtgggtagttcctcaggaaattggcattgcgattccacatggctgggcgacagagtcatcaccaccagcacccgaacctgggccctgcccacctacaacaaccacctctacaagcaaatatccaatgggacatcgggaggaagcaccaacgacaacacctacttcggctacagcaccccctgggggtattttgacttcaacagattccactgccacttctcaccacgtgactggcagcgactcatcaacaacaactggggattccggccaaaaagactcagcttcaagctcttcaacatccaggtcaaggaggtcacgcaggatgaaggcaccaagaccatcgccaataaccttaccagcacgattcaggtatttacggactcggaataccagctgccgtacgtcctcggctccgcgcaccagggctgcctgcctccgttcccggcggacgtcttcatgattccccagtacggctaccttacactgaacaatggaagtcaagccgtaggccgttcctccttctactgcctggaatattttccatctcaaatgctgcgaactggaaacaattttgaattcagctacaccttcgaggacgtgcctttccacagcagctacgcacacagccagagcttggaccgactgatgaatcctctcatcgaccagtacctgtactacttatccagaactcagtccacaggaggaactcaaggtacccagcaattgttattttctcaagctgggcctgcaaacatgtcggctcgggctaagaactggctacctggaccttgctaccggcagcagcgagtctctacgacactgtcgcaaaacaacaacagcaactttgcttggactggtgccaccaaatatcacctgaacggaagagactctttggtaaatcccggtgttgctatggcaacgcataaggacgacgaggaacgtttctttccatcgagcggagtcctgatgtttggaaaacagggtgctggaagagacaatgtggactatagcagcgttatgctaaccagcgaggaagaaattaaaaccactaaccctgtagccacagaacaatacggtgtggtggctgacaacttgcagcaagccaatacagggcctattgtgggaaatgtcaacagccaaggagccttacctggcatggtctggcagaaccgagacgtgtacctgcagggtcccatctgggccaaaattcctcacacggacggcaattttcacccgtctcctctgatgggcggctttggactgaagcacccacctccccagatcctgatcaagaatacgccggtacctgcggatcctccaacgacgttcagccaggcaaaattggcttccttcatcacgcagtacagcaccggccaggtcagcgtggagatcgagtgggagctgcagaaggagaacagcaagcgatggaacccagaaattcagtacacttccaactactacaaatctacaaatgtggactttgctgtcaattctgagggtacatattcagagcctcgccccattggtactcgttatctgacacgtaatctgtaa

SEQ ID NO: 5027 - DNA, 2211 bp, Adeno-associated virus
atggctgccgatggttatcttccagattggctcgaggacaacctctctgagggcattcgcgagtggtgggacttgaaacctggagccccgaaacccaaagccaaccagcaaaagcaggacgacggccggggcctggtgcttcctggctacaagtacctcggacccttcaacggactcgacaagggggagcccgtcaacgcggcggacgcagcggccctcgagcacgacaaggcctacgaccagcagctcgaagcgggtgacaatccgtacctgcggtataaccacgccgacgccgagtttcaggagcgtctgcaagaagatacgtcttttgggggcaacctcgggcgagcagtcttccaggccaagaagcgggttctcgaacctctcggtctggttgaggaaggcgctaagacggctcctggaaagaagagaccagtagagcagtcaccccaagaaccagactcctcctcgggcatcggcaagaaaggccaacagcccgccagaaaaagactcaattttggccagactggcgactcagagtcagttccagaccctcaacctctcggagaacctccagcagcgccctctggtgtgggacctaatacaatggctgcaggcggtggcgcaccaatggcagacaataacgaaggcgccgacggagtgggtagttcctcgggaaattggcattgcgattccacatggctgggcgacagagtcatcaccaccagcacccgaacctgggccctgcccacctacaacaaccacctctacaagcaaatctccaacgggacatcgggaggagccaccaacgacaacacctacttcggctacagcaccccctgggggtattttgactttaacagattccactgccacttttcaccacgtgactggcagcgactcatcaacaacaactggggattccggcccaagagactcagcttcaagctcttcaacatccaggtcaaggaggtcacgcagaatgaaggcaccaagaccatcgccaataacctcaccagcaccatccaggtgtttacggactcggagtaccagctgccgtacgttctcggctctgcccaccagggctgcctgcctccgttcccggcggacgtgttcatgattccccagtacggctacctaacactcaacaacggtagtcaggccgtgggacgctcctccttctactgcctggaatactttccttcgcagatgctgagaaccggcaacaacttccagtttacttacaccttcgaggacgtgcctttccacagcagctacgcccacagccagagcttggaccggctgatgaatcctctgattgaccagtacctgtactacttgtctcggactcaaacaacaggaggcacggcaaatacgcagactctgggcttcagccaaggtgggcctaatacaatggccaatcaggcaaagaactggctgccaggaccctgttaccgccaacaacgcgtctcaacgacaaccgggcaaaacaacaatagcaactttgcctggactgctgggaccaaataccatctgaatggaagaaattcattggctaatcctggcatcgctatggcaacacacaaagacgacgaggagcgttttttcccagtaacgggatcctgtttttggcaacaaaatgctgccagagacaatgcggattacagcgatgtcatgctcaccagcgaggaagaaatcaaaaccactaaccctgtggctacagaggaatacggtatcgtggcagataacttgcagcagcaaaacacggctcctcaaattggaactgtcaacagccagggggccttacccggtatggtctggcagaaccgggacgtgtacctgcagggtcccatctgggccaagattcctcacacggacggcaacttccacccgtctccgctgatgggcggctttggcctgaaacatcctccgcctcagatcctgatcaagaacacgcctgtacctgcggatcctccgaccaccttcaaccagtcaaagctgaactctttcatcacgcaatacagcaccggacaggtcagcgtggaaattgaatgggagctacagaaggaaaacagcaagcgctggaaccccgagatccagtacacctccaactactacaaatctacaagtgtggactttgctgttaatacagaaggcgtgtactctgaaccccgccccattggcacccgttacctcacccgtaatctgtaa

SEQ ID NO: 5028 - protein, 736 aa, Adeno-associated virus
MAADGYLPDWLEDNLSEGIREWWDLKPGAPKPKANQQKQDDGRGLVLPGYKYLGPFNGLDKGEPVNAADAAALEHDKAYDQQLEAGDNPYLRYNHADAEFQERLQEDTSFGGNLGRAVFQAKKRVLEPLGLVEEGAKTAPGKKRPVEQSPQEPDSSSGIGKKGQQPARKRLNFGQTGDSESVPDPQPLGEPPAAPSGVGPNTMAAGGGAPMADNNEGADGVGSSSGNWHCDSTWLGDRVITTSTRTWALPTYNNHLYKQISNGTSGGATNDNTYFGYSTPWGYFDFNRFHCHFSPRDWQRLINNNWGFRPKRLSFKLFNIQVKEVTQNEGTKTIANNLTSTIQVFTDSEYQLPYVLGSAHQGCLPPFPADVFMIPQYGYLTLNNGSQAVGRSSFYCLEYFPSQMLRTGNNFQFTYTFEDVPFHSSYAHSQSLDRLMNPLIDQYLYYLSRTQTTGGTANTQTLGFSQGGPNTMANQAKNWLPGPCYRQQRVSTTTGQNNNSNFAWTAGTKYHLNGRNSLANPGIAMATHKDDEERFFPVTGSCFWQQNAARDNADYSDVMLTSEEEIKTTNPVATEEYGIVADNLQQQNTAPQIGTVNSQGALPGMVWQNRDVYLQGPIWAKIPHTDGNFHPSPLMGGFGLKHPPPQILIKNTPVPADPPTTFNQSKLNSFITQYSTGQVSVEIEWELQKENSKRWNPEIQYTSNYYKSTSVDFAVNTEGVYSEPRPIGTRYLTRNL

SEQ ID NO: 5029 - DNA, 2214 bp, Adeno-associated virus
atggctgctgacggttatcttccagattggctcgaggacaacctctctgagggcattcgcgagtggtgggacctgaaacctggagcccccaagcccaaggccaaccagcagaagcaggacgacggccggggtctggtgcttcctggctacaagtacctcggacccttcaacggactcgacaagggggagcccgtcagcgcggcggacgcagcggccctcgagcacgacaaggcctgcgaccagcggctcaaagcgggtgacaatccgtacctgcggtataaccacgccgacgccgagtttcaggagcgtctgcaagaagatacgtcttttgggggcaacctcgggcgagcagtcttccaggccaagaagcgggttctcgaacctctcggtctggttgaggaagctgctaagacggctcctggaaagaagggaccggtagaaccgtcacctcagcgttcccccgactcctccacgggcatcggcaagaaaggccagcagcccgctagaaagagactgaactttgggcagactggcgactcagagtcagtccccgaccctcaaccaatcggagaaccaccagcaggcccctctggtctgggatctggtacaatggctgcaggcggtggcgcaccaatggctgacaataacgagggcgccgacggagtgggtaatgcctcaggaaattggcattgcgattccacatggctgggcgacagagtcatcaccaccagcacccgaacctgggctttgcccacctacaacaatcacctctacaagcaaatctccagtcagtcagcaggtagcaccaacgacaacgtctacttcggctacagcaccccctgggggtattttgacttcaacagattccactgtcacttctcaccacgtgactggcagcggctcatcaacaacaactggggattccggcccaagaagctcaacttcaagctgttcaacatccaggtcaaggaggtcacaacgaatgacggcgtcacgaccatcgccaataaccttaccagcacggttcaggtcttttcggactcggaataccagctgccctacgtcctcggctccgcacaccagggctgcctgcctccgttcccggcggacgtcttcatgattccccagtacggctacctgactctgaacaatggcagccaatcggtgggtcgttcctctttctactgcctggaatatttcccttctcaaatgctgagaacgggcaacaacttcaccttcagctacaccttcgaggacgttcccttccacagcagctacgcacacagccagagcctggaccggctgatgaatcctcttatcgaccagtacctgtattacctggccagaacacagagcaacgcaggaggcacagctggcaatcgggaactgcagttttatcagggcgggcctaccaccatggccgaacaagccaaaaactggctgcctggaccttgcttccggcaacaaagagtctccaagacgctggatcaaaacaacaacagcaactttgcttggactggtgccaccaaataccatctaaatggaagaaattcattggttaatcccggtgtcgccatggcaacccacaaggacgacgaggaacgcttcttcccttcgagcggagtcctgatttttggaaaaactggagcagctaataagactacactggaaaatgtgttaatgacaaatgaagaggaaattcgtcctaccaacccggtagccaccgaggaatacgggactgttagcagcaacctgcaggcggctaacactgcagcccagacacaagttgtcaacaaccagggagccttacctggtatggtctggcagaaccgggacgtgtacctgcagggtcccatctgggccaagattcctcacacggacggcaactttcacccgtctccgctgatgggcggctttggactgaagcatccgcctcctcagatcctgatcaaaaacactcctgttcctgctaatcccccggaggtgtttacgcctgccaagtttgcttctttcatcacacagtacagcaccggccaggtcagcgtggagatcgagtgggagctgcagaaggagaacagcaagcgctggaacccagagattcagtatacctccaattttgacgaacagactggtgtggactttgccgttgacagccagggtgtttattctgagcctcgccccattggtactcgttacctcacccgtaatctgtaa

SEQ ID NO: 5030 - protein, 737 aa, Adeno-associated virus
MAADGYLPDWLEDNLSEGIREWWDLKPGAPKPKANQQKQDDGRGLVLPGYKYLGPFNGLDKGEPVSAADAAALEHDKACDQRLKAGDNPYLRYNHADAEFQERLQEDTSFGGNLGRAVFQAKKRVLEPLGLVEEAAKTAPGKKGPVEPSPQRSPDSSTGIGKKGQQPARKRLNFGQTGDSESVPDPQPIGEPPAGPSGLGSGTMAAGGGAPMADNNEGADGVGNASGNWHCDSTWLGDRVITTSTRTWALPTYNNHLYKQISSQSAGSTNDNVYFGYSTPWGYFDFNRFHCHFSPRDWQRLINNNWGFRPKKLNFKLFNIQVKEVTTNDGVTTIANNLTSTVQVFSDSEYQLPYVLGSAHQGCLPPFPADVFMIPQYGYLTLNNGSQSVGRSSFYCLEYFPSQMLRTGNNFTFSYTFEDVPFHSSYAHSQSLDRLMNPLIDQYLYYLARTQSNAGGTAGNRELQFYQGGPTTMAEQAKNWLPGPCFRQQRVSKTLDQNNNSNFAWTGATKYHLNGRNSLVNPGVAMATHKDDEERFFPSSGVLIFGKTGAANKTTLENVLMTNEEEIRPTNPVATEEYGTVSSNLQAANTAAQTQVVNNQGALPGMVWQNRDVYLQGPIWAKIPHTDGNFHPSPLMGGFGLKHPPPQILIKNTPVPANPPEVFTPAKFASFITQYSTGQVSVEIEWELQKENSKRWNPEIQYTSNFDEQTGVDFAVDSQGVYSEPRPIGTRYLTRNL

SEQ ID NO: 5031 - DNA, 2214 bp, Adeno-associated virus
atggctgccgatggttatcttccagattggctcgaggacaacctctctgagggcattcgcgagtggtgggacctgaaacctggagccccgaaacccaaagccaaccagcaaaagcaggacgacggccggggtctggtgcttcctggctacaagtacctcggacccttcaacggactcgacaagggggagcccgtcaacgcggcggacgcagcggccctcgagcacgacaaggcctacgaccagcagctcaaagcgggtgacaatccgtacctgcggtataaccacgccgacgccgagtttcaggagcgtctgcaagaagatacgtcttttgggggcaacctcgggcgagcagtcttccaggccaagaagcgggttctcgaacctctcggtctggttgaggaagctgctaagacggctcctggaaagaagagaccggtagaaccgtcacctcagcgttcccccgactcctccacgggcatcggcaagaaaggccagcagcccgctagaaagagactgaactttgggcagactggcgactcagagtcagtccccgaccctcaaccaatcggagaaccaccagcaggcccctctggtctgggatctggtacaatggctgcaggcggtggcgctccaatggcagacaataacgaaggcgccgacggagtgggtaatgcctcaggaaattggcattgcgattccacatggctgggcgacagagtcatcaccaccagcacccgaacctgggctttgcccacctacaacaaccacctctacaagcaaatctccagtcagtcagcaggtagcaccaacgacaacgtctacttcggctacagcaccccctgggggtattttgacttcaacagattccactgtcacttctcaccacgtgactggcagcggctcatcaacaacaactggggattccggcccaagaagctcaacttcaagctgttcaacatccaggtcaaggaggtcacaacgaatgacggcgtcacgaccatcgccaataaccttaccagcacggttcaggtcttttcggactcggaataccagctgccctacgtcctcggctccgcacaccagggctgcctgcctccgttcccggcggacgtcttcatgattcctcagtacggctacctgactctcaacaacggtagtcaggccgtgggacgttcctccttctactgcctggagtacttcccctctcagatgctgagaacgggcaacaacttttccttcagctacactttcgaggacgtgcctttccacagcagctacgcgcacagccagagtttggacaggctgatgaatcctctcatcgaccagtacctgtactacctgtcaagaacccagtctacgggaggcacagcgggaacccagcagttgctgttttctcaggccgggcctagcaacatgtcgactcaggccagaaactggctgcctggaccctgctacagacagcagcgcgtctccacgacactgtcgcaaaacaacaacagcaactttgcctggactggtgccaccaagtatcatctgaacggcagagactctctggtgaatccgggcgtcgccatggcaaccaacaaggacgacgaggaccgcttcttcccatccagcggcatcctcatgtttggcaagcagggagctggaaaagacaacgtggactatagcaacgtgatgctaaccagcgaggaagaaatcaagaccaccaaccccgtggccacagaacagtatggcgtggtggctgataacctacagcagcaaaacaccgctcctattgtgggggccgtcaacagccagggagccttacctggcatggtctggcagaaccgggacgtgtacctgcagggtcctatttgggccaagattcctcacacagatggcaactttcacccgtctcctttaatgggcggctttggacttaaacatccgcctcctcagatccttatcaaaaacactcctgttcctgcggatcctccaacagcgttcaaccaggccaagctgaattctttcatcacgcagtacagcaccggacaagtcagcgtggagatcgagtgggagctgcagaaggagaacagcaagcgctggaacccagagattcagtatacttccaactactacaaatctacaaatgtggactttgctgttaatactgagggtgcttactctgagcctcgccccattggcactcgttacctcacccgtaatctgtaa

SEQ ID NO: 5032 - protein, 737 aa, Adeno-associated virus
MAADGYLPDWLEDNLSEGIREWWDLKPGAPKPKANQQKQDDGRGLVLPGYKYLGPFNGLDKGEPVNAADAAALEHDKAYDQQLKAGDNPYLRYNHADAEFQERLQEDTSFGGNLGRAVFQAKKRVLEPLGLVEEAAKTAPGKKRPVEPSPQRSPDSSTGIGKKGQQPARKRLNFGQTGDSESVPDPQPIGEPPAGPSGLGSGTMAAGGGAPMADNNEGADGVGNASGNWHCDSTWLGDRVITTSTRTWALPTYNNHLYKQISSQSAGSTNDNVYFGYSTPWGYFDFNRFHCHFSPRDWQRLINNNWGFRPKKLNFKLFNIQVKEVTTNDGVTTIANNLTSTVQVFSDSEYQLPYVLGSAHQGCLPPFPADVFMIPQYGYLTLNNGSQAVGRSSFYCLEYFPSQMLRTGNNFSFSYTFEDVPFHSSYAHSQSLDRLMNPLIDQYLYYLSRTQSTGGTAGTQQLLFSQAGPSNMSTQARNWLPGPCYRQQRVSTTLSQNNNSNFAWTGATKYHLNGRDSLVNPGVAMATNKDDEDRFFPSSGILMFGKQGAGKDNVDYSNVMLTSEEEIKTTNPVATEQYGVVADNLQQQNTAPIVGAVNSQGALPGMVWQNRDVYLQGPIWAKIPHTDGNFHPSPLMGGFGLKHPPPQILIKNTPVPADPPTAFNQAKLNSFITQYSTGQVSVEIEWELQKENSKRWNPEIQYTSNYYKSTNVDFAVNTEGAYSEPRPIGTRYLTRNL

SEQ ID NO: 5033 - DNA, 2217 bp, Adeno-associated virus
atggctgccgatggttatcttccagattggctcgaggacaacctctctgagggcattcgcgagtggtgggacctgaaacctggagccccgaaacccaaagccaaccagcaaaagcaggacgacggccggggtctggtgcttcctggctacaagtacctcggacccttcaacggactcgacaagggggagcccgtcaacgcggcggacgcagcggccctcgagcacgacaaggcctacgaccagcagctcaaagcgggtgacaatccgtacctgcggtataatcacgccgacgccgagtttcaggagcgtctgcaagaagatacgtcttttgggggcaacctcgggcgagcagtcttccaggccaagaagcgggttctcgaacctctcggtctggttgaggaaggcgctaagacggctcctggaaagaagagaccggtagagccgtcaccacagcgttcccccgactcctccacgggcatcggcaagaaaggccagcagcccgccagaaagagactcaatttcggtcagactggcgactcagagtcagtccccgaccctcaacctatcggagaacctccagcagcgccctctagtgtgggatctggtacaatggctgcaggcggtggcgcaccaatggcagacaataacgaaggtgccgacggagtgggtagttcctcgggaaattggcattgcgattccacatggctgggcgacagagtcatcaccaccagcacccgaacctgggccctgcccacctacaacaaccacctctacaagcaaatctccaacgggacctcgggaggcagcaccaacgacaacacctactttggctacagcaccccctgggggtattttgactttaacagattccactgccacttctcaccacgtgactggcagcgactcatcaacaacaactggggattccggcccaagagactcagcttcaagctcttcaacatccaggtcaaagaggtcacgcagaatgaaggcaccaagaccatcgccaataacctcaccagcaccatccaggtgtttacggactcggaataccagctgccgtacgtcctcggctctgcccaccagggctgcctgcctccgttcccggcggacgtcttcatgattcctcagtacggctacctgactctcaacaacggtagtcaggccgtgggacgttcctccttctactgcctggagtacttcccctctcagatgctgagaacgggcaacaacttttccttcagctacactttcgaggacgtgcctttccacagcagctacgcgcacagccagagtttggacaggctgatgaatcctctcatcgaccagtacctgtactacctgtcaagaacccagtctacgggaggcacagcgggaacccagcagttgctgttttctcaggccgggcctagcaacatgtcggctcaggccagaaactggctgcctggaccctgctacagacagcagcgcgtctccacgacactgtcgcaaaacaacaacagcaactttgcctggactggtgccaccaagtatcatctgaacggcagagactctctggtgaatccgggcgtcgccatggcaaccaacaaggacgacgaggaccgcttcttcccatccagcggcatcctcatgtttggcaagcagggagctggaaaagacaacgtggactatagcaacgtgatgctaaccagcgaggaagaaatcaaggccaccaaccccgtggccacagaacagtatggcgtggtggctgataacctacagcagcaaaacaccgctcctattgtgggggccgtcaacagccagggagccttacctggcatggtctggcagaaccgggacgtgtacctgcagggtcctatttgggccaagattcctcacacagatggcaactttcacccgtctcctttaatgggcggctttggacttaaacatccgcctcctcagatcctcatcaaaaacactcctgttcctgcggatcctccaacagcgttcaaccaggccaagctgaattctttcatcacgcagtacagcaccggacaagtcagcgtggagatcgagtgggagctgcagaaggagaacagcaagcgctggaacccagagattcagtatacttccaactactacaaatctacaaatgtggactttgctgttaatactgagggtgtttactctgagcctcgccccattggcactcgttacctcacccgtaatctgtaa

SEQ ID NO: 5034 - protein, 738 aa, Adeno-associated virus
MAADGYLPDWLEDNLSEGIREWWDLKPGAPKPKANQQKQDDGRGLVLPGYKYLGPFNGLDKGEPVNAADAAALEHDKAYDQQLKAGDNPYLRYNHADAEFQERLQEDTSFGGNLGRAVFQAKKRVLEPLGLVEEGAKTAPGKKRPVEPSPQRSPDSSTGIGKKGQQPARKRLNFGQTGDSESVPDPQPIGEPPAAPSSVGSGTMAAGGGAPMADNNEGADGVGSSSGNWHCDSTWLGDRVITTSTRTWALPTYNNHLYKQISNGTSGGSTNDNTYFGYSTPWGYFDFNRFHCHFSPRDWQRLINNNWGFRPKRLSFKLFNIQVKEVTQNEGTKTIANNLTSTIQVFTDSEYQLPYVLGSAHQGCLPPFPADVFMIPQYGYLTLNNGSQAVGRSSFYCLEYFPSQMLRTGNNFSFSYTFEDVPFHSSYAHSQSLDRLMNPLIDQYLYYLSRTQSTGGTAGTQQLLFSQAGPSNMSAQARNWLPGPCYRQQRVSTTLSQNNNSNFAWTGATKYHLNGRDSLVNPGVAMATNKDDEDRFFPSSGILMFGKQGAGKDNVDYSNVMLTSEEEIKATNPVATEQYGVVADNLQQQNTAPIVGAVNSQGALPGMVWQNRDVYLQGPIWAKIPHTDGNFHPSPLMGGFGLKHPPPQILIKNTPVPADPPTAFNQAKLNSFITQYSTGQVSVEIEWELQKENSKRWNPEIQYTSNYYKSTNVDFAVNTEGVYSEPRPIGTRYLTRNL

SEQ ID NO: 5035 - DNA, 2217 bp, Adeno-associated virus
atggctgccgatggttatcttccagattggctcgaggacaacctctctgagggcattcgcgagtggtgggacctgaaacctggagccccgaaacccaaagccaaccagcaaaagcaggacgacggccggggtctggtgcttcctggctacaagcacctcggacccttcaacggactcgacaagggggagcccgtcaacgcggcggacgcagcggccctcgagcacgacaaggcctacgaccagcagctcaaagcgggtgacaatccgtacctgcggtataatcacgctgacgccgagtttcaggagcgtctgcaagaagatacgtcttttgggggcaacctcgggcgagcagtcttccaggccaagaagcgggttctcgaacctctcggtctggttgaggaaggcgctaagacggctcctggaaagaagagaccggtagagccgtcaccacagcgttcccccgactcctccacgggcatcggcaagaaaggccagcagcccgccagaaagagactcaatttcggtcagactggcgactcagagtcagtccccgaccctcaacctatcggagaacctccagcagcgccctctagtgtgggatctggtacaatggctgcaggcggtggcgcaccaatggcagacaataacgaaggtgccgacggagtgggtagttcctcgggaaattggcattgcgattccacatggctgggcgacagagtcatcaccaccagcacccgaacctgggccctgcccacctacaacaaccacctctacaagcaaatctccaacgggacctcgggaggcagcaccaacgacaacacctactttggctacagcaccccctgggggtattttgactttaacagattccactgccacttctcaccacgtgactggcagcgactcatcaacaacaactggggattccggcccaagagactcagcttcaagctcttcaacatccaggtcaaagaggtcacgcagaatgaaggcaccaagaccatcgccaataaccttaccagcacggttcaggtcttttcggactcggaataccagctgccctacgtcctcggctccgcacaccagggctgcctgcctccgttcccggcggacgtcttcatgattccccagtacggctacctgactctgaacaatggcagccaatcggtgggtcgttcctctttctactgcctggaatatttcccttctcaaatgctgagaacgggcaacaacttcaccttcagctacaccttcgaggacgttcccttccacagcagctacgcacacagccagagcctggaccggctgatgaatcctcttatcgaccagtacctgtattacctggccagaacacagagcaacgcaggaggcacagctggcaatcgggaactgcagttttatcagggcgggcctaccaccatggccgaacaagccaaaaactggctgcctggaccttgcttccggcaacaaagagtctccaagacgctggatcaaaacaacaacagcaactttgcttggactggtgccaccaaataccatctaaatggaagaaattcattggttaatcccggtgtcgccatggcaacccacaaggacgacgaggaacgcttcttcccttcgagcggagtcctgatttttggaaaaactggagcagctaataagactacactggaaaatgtgttaatgacaaatgaagaggaaattcgtcctaccaacccggtagccaccgaggaatacgggactgttagcagcaacctgcaggcggctaacactgcagcccagacacaagttgtcaacaaccagggagccttacctggtatggtctggcagaaccgggacgtgtacctgcagggtcccatctgggccaagattcctcacacggacggcaactttcacccgtctccgctgatgggcggctttggactgaagcatccgcctcctcagatcctgatcaaaaacactcctgttcctgctaatcccccggaggtgtttacgcctgccaagtttgcttctttcatcacacagtacagcaccggccaggtcagcgtggagatcgagtgggagctgcagaaggagaacagcaagcgctggaacccagagattcagtatacctccaattttgacaaacagactggtgtggactttgccgttgacagccagggtgtttattctgagcctcgccccattggtactcgttacctcacccgtaatctgtaa

SEQ ID NO: 5036 - protein, 738 aa, Adeno-associated virus
MAADGYLPDWLEDNLSEGIREWWDLKPGAPKPKANQQKQDDGRGLVLPGYKHLGPFNGLDKGEPVNAADAAALEHDKAYDQQLKAGDNPYLRYNHADAEFQERLQEDTSFGGNLGRAVFQAKKRVLEPLGLVEEGAKTAPGKKRPVEPSPQRSPDSSTGIGKKGQQPARKRLNFGQTGDSESVPDPQPIGEPPAAPSSVGSGTMAAGGGAPMADNNEGADGVGSSSGNWHCDSTWLGDRVITTSTRTWALPTYNNHLYKQISNGTSGGSTNDNTYFGYSTPWGYFDFNRFHCHFSPRDWQRLINNNWGFRPKRLSFKLFNIQVKEVTQNEGTKTIANNLTSTVQVFSDSEYQLPYVLGSAHQGCLPPFPADVFMIPQYGYLTLNNGSQSVGRSSFYCLEYFPSQMLRTGNNFTFSYTFEDVPFHSSYAHSQSLDRLMNPLIDQYLYYLARTQSNAGGTAGNRELQFYQGGPTTMAEQAKNWLPGPCFRQQRVSKTLDQNNNSNFAWTGATKYHLNGRNSLVNPGVAMATHKDDEERFFPSSGVLIFGKTGAANKTTLENVLMTNEEEIRPTNPVATEEYGTVSSNLQAANTAAQTQVVNNQGALPGMVWQNRDVYLQGPIWAKIPHTDGNFHPSPLMGGFGLKHPPPQILIKNTPVPANPPEVFTPAKFASFITQYSTGQVSVEIEWELQKENSKRWNPEIQYTSNFDKQTGVDFAVDSQGVYSEPRPIGTRYLTRNL

SEQ ID NO: 5037 - protein, 737 aa, Adeno-associated virus
MAADGYLPDWLEDNLSEGIREWWDLKPGAPKPKANQQKQDDGRGLVLPGYKYLGPFNGLDKGEPVNAADAAALEHDKAYDQQLKAGDNPYLRYNHADAEFQERLQEDTSFGGNLGRAVFQAKKRVLEPLGLVEEAAKTAPGKKRPVEPSPQRSPDSSTGIGKKGQQPARKRLNFGQTGDSESVPDPQPIGEPPAGPSGLGSGTMAAGGGAPMADNNKGADGVGNASGNWHCDSTWLGDRVITTSTRTWALPTYNNHLYKQISSQSAGSTNDNVYFGYSTPWGYFDFNRFHCHFSPRDWQRLINSNWGFRPKKLNFKLFNIQVKEVTTNDGVTTIANNLTSTVQVFSDSEYQLPYVLGSAHQGCLPPFPADVFMIPQYGYLTLNNGSQSVGRSSFYCLEYFPSQMLRTGNNFTFSYTFEDVPFHSSYAHSQSLDRLMNPLIDQYLYYLARTQSNAGGTAGNRELQFYQGGPTTMAEQAKNWLPGPCFRQQRVSKTLDQNNNSNFAWTGATKYHLNGRNSLVNPGVAMATHKDDEERFFPSSGVLIFGKTGAANKTTLENVLMTNEEEIRPTNPVATEEYGTVSSNLQAANTAAQTQVVNNQGALPGMVWQNRDVYLQGPIWAKIPHTDGNFHPSPLMGGFGLKHPPPQILIKNTPVPANPPEVFTPAKFASFITQYSTGQVSVEIEWELQKENSKRWNPEIQYTSNFDKQTGVDFAVDSQGVYSEPRPIGTRYLTRNL

SEQ ID NO: 5038 - DNA, 2214 bp, Adeno-associated virus
atggctgctgacggttatcttccagattggctcgaggacaacctctctgagggcattcgcgagtggtgggacctgaaacctggagcccccaagcccaaggccaaccagcagaagcaggacgacggccggggtctggtgcttcctggctacaagtacctcggacccttcaacggactcgacaagggggagcccgtcaacgcggcggacgcagcggccctcgagcacgacaaggcctacgaccagcagctcaaagcgggtgacaatccgtacctgcggtataaccacgccgacgccgagtttcaggagcgtctgcaagaagatacgtcttttgggggcaacctcgggcgagcagtcttccaggccaagaagcgggttctcgaacctctcggtctggttgaggaagctgctaagacggctcctggaaagaagagaccggtagaaccgtcacctcagcgttcccccgactcctccacgggcatcggcaagaaaggccagcagcccgctagaaagagactgaactttgggcagactggcgactcagagtcagtccccgaccctcaaccaatcggagaaccaccagcaggcccctctggtctgggatctggtacaatggctgcaggcggtggcgcaccaatggctgacaataacaagggcgccgacggagtgggtaatgcctcaggaaattggcattgcgattccacatggctgggcgacagagtcatcaccaccagcacccgaacctgggctttgcccacctacaacaaccacctctacaagcaaatctccagtcagtcagcaggtagcaccaacgacaacgtctacttcggctacagcaccccctgggggtattttgacttcaacagattccactgtcacttctcaccacgtgactggcagcggctcatcaacagcaactggggattccggcccaagaagctcaacttcaagctgttcaacatccaggtcaaggaggtcacaacgaatgacggcgtcacgaccatcgccaataaccttaccagcacggttcaggtcttttcggactcggaataccagctgccctacgtcctcggctccgcacaccagggctgcctgcctccgttcccggcggacgtcttcatgattccccagtacggctacctgactctgaacaatggcagccaatcggtgggtcgttcctctttctactgcctggaatatttcccttctcaaatgctgagaacgggcaacaacttcaccttcagctacaccttcgaggacgttcccttccacagcagctacgcacacagccagagcctggaccggctgatgaatcctcttatcgaccagtacctgtattacctggccagaacacagagcaacgcaggaggcacagctggcaatcgggaactgcagttttatcagggcgggcctaccaccatggccgaacaagccaaaaactggctgcctggaccttgcttccggcaacaaagagtctccaagacgctggatcaaaacaacaacagcaactttgcttggactggtgccaccaaataccatctaaatggaagaaattcattggttaatcccggtgtcgccatggcaacccacaaggacgacgaggaacgcttcttcccttcgagcggagtcctgatttttggaaaaactggagcagctaataagactacactggaaaatgtgttaatgacaaatgaagaggaaattcgtcctaccaacccggtagccaccgaggaatacgggactgttagcagcaacctgcaggcggctaacactgcagcccagacacaagttgtcaacaaccagggagccttacctggtatggtctggcagaaccgggacgtgtacctgcagggtcccatctgggccaagattcctcacacggacggcaactttcacccgtctccgctgatgggcggctttggactgaagcatccgcctcctcagatcctgatcaaaaacactcctgttcctgctaatcccccggaggtgtttacgcctgccaagtttgcttctttcatcacacagtacagcaccggccaggtcagcgtggagatcgagtgggagctgcagaaggagaacagcaagcgctggaacccagagattcagtatacctccaattttgacaaacagactggtgtggactttgccgttgacagccagggtgtttattctgagcctcgccccattggtactcgttacctcacccgtaatctgtaa

SEQ ID NO: 5039 - protein, 737 aa, Adeno-associated virus
MAADGYLPDWLEDNLSEGIREWWDLKPGAPKPKANQQKQDDGRGLVLPGYKYLGPFNGLDKGEPVNAADAAALEHDKAYDQQLKAGDNPYLRYNHADAEFQERLQEDTSFGGNLGRAVFQAKKRVLEPLGLVEEAAKTAPGKKRPVEPSPQRSPDSSTGIGKKGQQPARKRLNFGQTGDSESVPDPQPIGEPPAGPSGLGSGTMAAGGGAPMADNNEGADGVGNASGNWHCDSTWLGDRVITTSTRTWALPTYNNHLYKQISSQSAGSTNDNVYFGYSTPWGYFDFNRFHCHFSPRDWQRLINSNWGFRPKKLNFKLFNIQVKEVTTNDGVTTIANNLTSTVQVFSDSEYQLPYVLGSAHQGCLPPFPADVFMIPQYGYLTLNNGSQSVGRSSFYCLEYFPSQMLRTGNNFTFSYTFEDVPFHSSYAHSQSLDRLMNPLIDQYLYYLARTQSNAGGTAGNRELQFYQGGPTTMAEQAKNWLPGPCFRQQRVSKTLDQNNNSNFAWTGATKYHLNGRNSLVNPGVAMATHKDDEERFFPSSGVLIFGKTGAANKTTLENVLMTNEEEIRPTNPVATEEYGTVSSNLQAANTAAQTQVVNNQGALPGMVWQNRDVYLQGPIWAKIPHTDGNFHPSPLMGGFGLKHPPPQILIKNTPVPANPPEVFTPAKFASFITQYSTGQVSVEIEWELQKENSKRWNPEIQYTSNFDKQTGVDFAVDSQGVYSEPRPIGTRYLTRNL

SEQ ID NO: 5040 - protein, 737 aa, Adeno-associated virus
MAADGYLPDWLEDNLSEGIREWWDLKPGAPKPKANQQKQDDGRGLVLPGYKYLGPFNGLDKGEPVNAADAAALEHDKAYDQQLKAGDNPYLRYNHADAEFQERLQEDTSFGGNLGRAVFQAKKRVLEPLGLVEEAAKTAPGKKRPVEPSPQRSPDSSTGIGKKGQQPARKRLNFGQTGDSESVPDPQPIGEPPAGPSGLGSGTMAAGGGAPMADNNEGADGVGNASGNWHCDSTWLGDRVITTSTRTWALPTYNNHLYKQISSQSAGSTNDNVYFGYSTPWGYFDFNRFHCHFSPRDWQRLINNNWGFRPKKLNFKLFNIQVKEVTTNDGVTTIANNLTSTVQVFSDSEYQLPYVLGSAHQGCLPPFPADVFMIPQYGYLTLNNGSQSVGRSSFYCLEYFPSQMLRTGNNFTFSYTFEDVPFHSSYAHSQSLDRLMNPLIDQYLYYLARTQSNAGGTAGNRELQFYQGGPTTMAEQAKNWLPGPCFRQQRVSKTLDQNNNSNFAWTGATKYHLNGRNSLVNPGVAMATHKDDEERFFPSSGVLIFGKTGAANKTTLENVLMTNEEEIRPTNPVATEEYGTVSSNLQAANTAAQTQVVNNQGALPGMVWQNRDVYLQGPIWAKIPHTDGNFHPSPLMGGFGLKHPPPQILIKNTPVPANPPEVFTPAKFASFITQYSTGQVSVEIEWELQKENSKRWNPEIQYTSNFDKQTGVDFAVDSQGVYSEPRPIGTRYLTRNL

SEQ ID NO: 5041 - protein, 737 aa, Adeno-associated virus
MAADGYLPDWLEDNLSEGIREWWDLKPGAPKPKANQQKQDDGRGLVLPGYKYLGPFNGLDKGEPVNAADAAALEHDKAYDQQLKAGDNPYLRYNHADAEFQERLQEDTSFGGNLGRAVFQAKKRVLEPLGLVEEAAKTAPGKKRPVEPSPQRSPDSSTGIGKKGQQPARKRLNFGQTGDSESVPDPQPIGEPPAGPSGLGSGTMAAGGGAPMADNNKGADGVGNASGNWHCDSTWLGDRVITTSTRTWALPTYNNHLYKQISSQSAGSTNDNVYFGYSTPWGYFDFNRFHCHFSPRDWQRLINNNWGFRPKKLNFKLFNIQVKEVTTNDGVTTIANNLTSTVQVFSDSEYQLPYVLGSAHQGCLPPFPADVFMIPQYGYLTLNNGSQSVGRSSFYCLEYFPSQMLRTGNNFTFSYTFEDVPFHSSYAHSQSLDRLMNPLIDQYLYYLARTQSNAGGTAGNRELQFYQGGPTTMAEQAKNWLPGPCFRQQRVSKTLDQNNNSNFAWTGATKYHLNGRNSLVNPGVAMATHKDDEERFFPSSGVLIFGKTGAANKTTLENVLMTNEEEIRPTNPVATEEYGTVSSNLQAANTAAQTQVVNNQGALPGMVWQNRDVYLQGPIWAKIPHTDGNFHPSPLMGGFGLKHPPPQILIKNTPVPANPPEVFTPAKFASFITQYSTGQVSVEIEWELQKENSKRWNPEIQYTSNFDKQTGVDFAVDSQGVYSEPRPIGTRYLTRNL

SEQ ID NO: 5042 - DNA, 2217 bp, Adeno-associated virus
atggctgccgatggttatcttccagattggctcgaggacaacctctctgagggcattcgcgagtggtgggacctgaaacctggagccccgaaacccaaagccaaccagcaaaagcaggacgacggccggggtctggtgcttcctggctacaagtacctcggacccttcaacggactcgacaagggggagcccgtcaacgcggcggacgcagcggccctcgagcacgacaaggcctacgaccagcagctcaaagcgggtgacaatccgcacctgcggtataatcacgccgacgccgagtttcaggagcgtctgcaagaagatacgtcttttgggggcaacctcgggcgagcagtcttccaggccaagaagcgggttctcgaacctctcggtctggttgaggaaggcgctaagacggctcctggaaagaagagaccggtagagccgtcaccacagcgttcccccgactcctccacgggcatcggcaagaaaggccagcagcccgccagaaagagactcaatttcggtcagactggcgactcagagtcagtccccgaccctcaacttatcggagaacctccagcagcgccctctagtgtgggatctggtacaatggctgcaggcggtggcgcaccaatggcagacaataacgaaggtgccgacggagtgggtagttcctcgggaaattggcattgcgattccacatggctgggcgacagagtcatcaccaccagcacccgaacctgggccctgcccacctacaacaaccacctctacaagcaaatctccaacgggacctcgggaggcagcaccaacgacaacacctactttggctacagcaccccctgggggtattttgactttaacagattccactgccacttctcaccacgtgactggcagcgactcatcaacaacaactggggattccggcccaagagactcagcttcaagctcttcaacatccaggtcaaagaggtcacgcagaatgaaggcaccaagaccatcgccaataacctcaccagcaccatccaggtgtttacggactcggagtaccagctgccgtacgtcctcggctctgcccaccagggctgcctgcctccgttcccggcggacgtcttcatgattcctcagtacggcaacctgactctcaacaacggtagtcaggccgtgggacgttcctccttctactgcctggagtacttcccctctcagatgctgagaacgggcaacaacttttccttcagctacactttcgaggacgtgcctttccacagcagctacgcgcacagccagagtttggacaggctgatgaatcctctcatcgaccagtacctgtactacctgtcaagaacccagtctacgggaggcacagcgggaacccagcagttgctgttttctcaggccgggcctagcaacatgtcggctcaggccagaaactggctgcctggaccctgctacagacagcagcgcgtctccacgacactgtcgcaaaacaacaacagcaactttgcctggactggtgccaccaagtatcatctgaacggcagagactctctggtgaatccgggcgtcgccatggcaaccaacaaggacgacgaggaccgcttcttcccatccagcggcatcctcatgtttggcaagcagggagctggaaaagacaacatgggctatagcaacgtgatgctaaccagcgaggaagaaatcaagaccaccaaccccgtggccacagaacagtatggcgtggtggctgataacctacagcagcaaaacaccgctcctattgtgggggccgtcaacagccagggagccttacctggcatggtctggcagaaccgggacgtgtacctgcagggtcctatttgggccaagattcctcacacagatggcaactttcacccgtctcctttaatgggcggctttggacttaaacatccgcctcctcagatcctcatcaaaaacactcctgttcctgcggatcctccaacagcgttcaaccaggccaagctgaattctttcatcacgcagtacggcaccggacaagtcagcgtggagatcgagtgggagctgcagaaggagaacagcaagcgctggaacccagagattcagtatacttccaactactacaaatctacaaatgtggactttgctgttaatactgagggtgtttactctgagcctcgccccattggcactcgttacctcacccgtaatctgtaa

SEQ ID NO: 5043 - protein, 738 aa, Adeno-associated virus
MAADGYLPDWLEDNLSEGIREWWDLKPGAPKPKANQQKQDDGRGLVLPGYKYLGPFNGLDKGEPVNAADAAALEHDKAYDQQLKAGDNPHLRYNHADAEFQERLQEDTSFGGNLGRAVFQAKKRVLEPLGLVEEGAKTAPGKKRPVEPSPQRSPDSSTGIGKKGQQPARKRLNFGQTGDSESVPDPQLIGEPPAAPSSVGSGTMAAGGGAPMADNNEGADGVGSSSGNWHCDSTWLGDRVITTSTRTWALPTYNNHLYKQISNGTSGGSTNDNTYFGYSTPWGYFDFNRFHCHFSPRDWQRLINNNWGFRPKRLSFKLFNIQVKEVTQNEGTKTIANNLTSTIQVFTDSEYQLPYVLGSAHQGCLPPFPADVFMIPQYGNLTLNNGSQAVGRSSFYCLEYFPSQMLRTGNNFSFSYTFEDVPFHSSYAHSQSLDRLMNPLIDQYLYYLSRTQSTGGTAGTQQLLFSQAGPSNMSAQARNWLPGPCYRQQRVSTTLSQNNNSNFAWTGATKYHLNGRDSLVNPGVAMATNKDDEDRFFPSSGILMFGKQGAGKDNMGYSNVMLTSEEEIKTTNPVATEQYGVVADNLQQQNTAPIVGAVNSQGALPGMVWQNRDVYLQGPIWAKIPHTDGNFHPSPLMGGFGLKHPPPQILIKNTPVPADPPTAFNQAKLNSFITQYGTGQVSVEIEWELQKENSKRWNPEIQYTSNYYKSTNVDFAVNTEGVYSEPRPIGTRYLTRNL

SEQ ID NO: 5044 - DNA, 2217 bp, Adeno-associated virus
atggctgccgatggttatcttccagattggctcgaggacaacctctctgagggcattcgcgagtggtgggacctgaaacctggagccccgaaacccaaagccaaccagcaaaagcaggacgacggccggggtctggtgcttcctggctacaagtacctcggacccttcaacggactcgacaagggggagcccgtcaacgcggcggacgcagcggccctcgagcacgacaaggcctacgaccagcagctcaaagcgggtgacaatccgtacctgcggtataatcacgccgacgccgagtttcaggagcgtctgcaagaagatacgtcttttgggggcaacctcgggcgagcagtcttccaggccaagaagcgggttctcgaacctctcggtctggttgaggaaggcgctaagacggctcctggaaagaagagaccggtagagccgtcaccacagcgttcccccgactcctccacgggcatcggcaagaaaggccagcagcccgccggaaagagactcaatttcggtcagactggcgactcagagtcagtccccgaccctcaacctatcggagaacctccagcagcgccctctagtgtgggatctggtacaatggctgcaggcggtggcgcaccaatggcagacaataacgaaggtgccgacggagtgggtagttcctcgggaaattggcattgcgattccacatggctgggcgacagagtcatcaccaccagcacccgaacctgggccctgcccacctacaacaaccacctctacaagcaaatctccaacgggacctcgggaggcagcaccaacgacaacacctactttggctacagcaccccctgggggtattttgactttaacagattccactgccacttctcaccacgtgactggcagcgactcatcaacaacaactggggattccggcccaagagactcagcttcaagctcttcaacatccaggtcaaagaggtcacgcagaatgaaggcaccaagaccatcgccaataacctcaccagcaccatccaggtgtttacggactcggaataccagctgccgtacgtcctcggctctgcccaccagggctgcctgcctccgttcccggcggacgtcttcatgattcctcagtacggctacctgactctcaacaacggtagtcaggccgtgggacgttcctccttctactgcctggagtacttcccctctcagatgctgagaacgggcaacaacttttccttcagctacactttcgaggacgtgcctttccacagcagctacgcgcacagccagagtttggacaggctgatgaatcctctcgtcgaccagtacctgtactacctgtcaagaacccagtctacgggaggcacagcgggaacccagcagttgctgttttctcaggccgggcctagcaacatgtcggctcaggccagaaactggctgcctggaccctgctacagacagcagcgcgtctccacgacactgtcgcaaaacaacaacagcaactttgcctggactggtgccaccaagtatcatctgaacggcagagactctctggtgaatccgggcgtcgccatggcaaccaacaaggacgacgaggaccgcttcttcccatccagcggcatcctcatgtttggcaagcagggagctggaaaagacaacgtggactatagcaacgtgatgctaaccagcgaggaagaaatcaagaccaccaaccccgtggccacagaacagtatggcgtggtggctgataacctacagcagcaaaacaccgctcctattgtgggggccgtcaacagccagggagccttacctggcatggtctggcagaaccgggacgtgtacctgcagggtcctatttgggccaagattcctcacacagatggcaactttcacccgtctcctttaatgggcggctttggacttaaacatccgcctcctcagatcctcatcaaaaacactcctgttcctgcggatcctccaacagcgttcaaccaggccaagctgaattctttcatcacgcagtacagcaccggacaagtcagcgtggagatcgagtgggagctgcagaaggagaacagcaagcgctggagcccagagattcagtatacttccaactactacaaatctacaaatgtggactttgctgttaatactgagggtgtttactctgagcctcgccccattggcactcgttacctcacccgtaatctgtaa

SEQ ID NO: 5045 - protein, 738 aa, Adeno-associated virus
MAADGYLPDWLEDNLSEGIREWWDLKPGAPKPKANQQKQDDGRGLVLPGYKYLGPFNGLDKGEPVNAADAAALEHDKAYDQQLKAGDNPYLRYNHADAEFQERLQEDTSFGGNLGRAVFQAKKRVLEPLGLVEEGAKTAPGKKRPVEPSPQRSPDSSTGIGKKGQQPAGKRLNFGQTGDSESVPDPQPIGEPPAAPSSVGSGTMAAGGGAPMADNNEGADGVGSSSGNWHCDSTWLGDRVITTSTRTWALPTYNNHLYKQISNGTSGGSTNDNTYFGYSTPWGYFDFNRFHCHFSPRDWQRLINNNWGFRPKRLSFKLFNIQVKEVTQNEGTKTIANNLTSTIQVFTDSEYQLPYVLGSAHQGCLPPFPADVFMIPQYGYLTLNNGSQAVGRSSFYCLEYFPSQMLRTGNNFSFSYTFEDVPFHSSYAHSQSLDRLMNPLVDQYLYYLSRTQSTGGTAGTQQLLFSQAGPSNMSAQARNWLPGPCYRQQRVSTTLSQNNNSNFAWTGATKYHLNGRDSLVNPGVAMATNKDDEDRFFPSSGILMFGKQGAGKDNVDYSNVMLTSEEEIKTTNPVATEQYGVVADNLQQQNTAPIVGAVNSQGALPGMVWQNRDVYLQGPIWAKIPHTDGNFHPSPLMGGFGLKHPPPQILIKNTPVPADPPTAFNQAKLNSFITQYSTGQVSVEIEWELQKENSKRWSPEIQYTSNYYKSTNVDFAVNTEGVYSEPRPIGTRYLTRNL

SEQ ID NO: 5046 - DNA, 2217 bp, Adeno-associated virus
atggttgccgatggttatcttccagattggctcgaggacaacctctctgagggcattcgcgagtggtgggacctgaaacctggagccccgaaacccaaagccaaccagcaaaagcagggcgacggccggggtctggtgcttcctggctacaagtacctcggacccttcaacggactcgacaagggggagcccgtcaacgcggcggacgcagcggccctcgagcacgacaaggcctacgaccagcagcttaaagcgggtgacaatccgtacctgcggtataatcacgccgacgccgagcttcaggagcgtctgcaagaagatacgtcttttgggggcaacctcgggcgagcagtcttccaggccaagaagcgggttctcgaacctctcggtctggttgaggaaggcgctaagacggctcctggaaagaagagaccggtagagccgtcaccacagcgttcccccgactcctccacgggcatcggcaagaaaggccagcagcccgccagaaagagactcaatttcggtcagactggcgactcagagtcagtccccgaccctcaacctatcggagaacctccagcagcgccctctagtgtgggatctggtacaatggctgcaggcggtggcgcgccaatggcagacaataacgaaggtgccgacggagtgggtagttcctcgggaaattggcattgcgattccacatggctgggcgacagagtcatcaccaccagcacccgaacctgggccctgcccacctacaacaaccacctctacaagcaaatctccaacgggacctcgggaggcagcaccaacgacaacacctactttggctacagcaccccctgggggtattttgactttaacagattccactgccacttctcaccacgtgactggcagcgactcatcaacaacaactggggattccggcccaagagactcagcttcaagctcttcaacatccaggtcaaagaggtcacgcagaatgaaggcaccaagaccatcgccaataacctcaccagcaccatccaggtgtttacggactcggaataccagctgccgtacgtcctcggctctgcccaccagggctgccagcctccgttcccggcggacgtcttcatgattcctcagtacggctacctgactctcaacaacggtagtcaggccgtgggacgttcctccttctactgcctggagtacttcccctctcagatgctgagaacgggcaacaacttttccttcagctacactttcgaggacgtgcctttccacagcagctacgcgcacagccagagtttggacaggctgatgaatcctctcatcgaccagtacctgtactacctgtcaagaacccagtctacgggaggcacagcgggaacccagcagttgctgttttctcaggccgggcctagcaacatgtcggctcaggccagaaactggctgcctggaccctgctacagacagcagcgcgtctccacgacactgtcgcaaaacaacaacagcaactttgcctggactggtgccaccaagtatcatctgaacggcagagactctctggtgaatccgggcgtcgccatggcaaccaacaaggacgacgaggaccgcttcttcccatccagcggcatcctcatgtttggcaagcagggagctggaaaagacaacgtggactatagcaacgtgatgctaaccagcgaggaagaaatcaagaccaccaaccccgtggccacagaacagtatggcgtggtggctgataacctacagcagcaaaacaccgctcctattgtgggggccgtcaacagccagggagccttacctggcatggtctggcagaaccgggacgtgtacctgcagggtcctatttgggccaagattcctcacacagatggcaactttcacccgtctcctttaatgggcggctttggacttaaacatccgcctcctcagatcctcatcaaaaacactcctgttcctgcggatcctccaacagcgttcaaccaggccaagctgaattctttcatcacgcagtacagcaccggacaagtcagcgtggagatcgagtgggagccgcagaaggagaacagcaagcgctggaacccagagattcagtatacttccaactactacaaatctacaaatgtggactttgctgttaatactgagggtgtttactctgagcctcgccccattggcactcgttacctcacccgtaatctgtaa

SEQ ID NO: 5047 - protein, 738 aa, Adeno-associated virus
MVADGYLPDWLEDNLSEGIREWWDLKPGAPKPKANQQKQGDGRGLVLPGYKYLGPFNGLDKGEPVNAADAAALEHDKAYDQQLKAGDNPYLRYNHADAELQERLQEDTSFGGNLGRAVFQAKKRVLEPLGLVEEGAKTAPGKKRPVEPSPQRSPDSSTGIGKKGQQPARKRLNFGQTGDSESVPDPQPIGEPPAAPSSVGSGTMAAGGGAPMADNNEGADGVGSSSGNWHCDSTWLGDRVITTSTRTWALPTYNNHLYKQISNGTSGGSTNDNTYFGYSTPWGYFDFNRFHCHFSPRDWQRLINNNWGFRPKRLSFKLFNIQVKEVTQNEGTKTIANNLTSTIQVFTDSEYQLPYVLGSAHQGCQPPFPADVFMIPQYGYLTLNNGSQAVGRSSFYCLEYFPSQMLRTGNNFSFSYTFEDVPFHSSYAHSQSLDRLMNPLIDQYLYYLSRTQSTGGTAGTQQLLFSQAGPSNMSAQARNWLPGPCYRQQRVSTTLSQNNNSNFAWTGATKYHLNGRDSLVNPGVAMATNKDDEDRFFPSSGILMFGKQGAGKDNVDYSNVMLTSEEEIKTTNPVATEQYGVVADNLQQQNTAPIVGAVNSQGALPGMVWQNRDVYLQGPIWAKIPHTDGNFHPSPLMGGFGLKHPPPQILIKNTPVPADPPTAFNQAKLNSFITQYSTGQVSVEIEWEPQKENSKRWNPEIQYTSNYYKSTNVDFAVNTEGVYSEPRPIGTRYLTRNL

SEQ ID NO: 5048 - DNA, 2217 bp, Adeno-associated virus
atggctgccgatggttatcttccagattggctcgaggacaacctctctgagggcattcgcgagtggtgggacctgaaacctggagccccgaaacccaaagccaaccagcaaaagcaggacgacggccggggtctggtgcttcctggctacaagtacctcggacccttcaacggactcgacaagggggagcccgtcaacgcggcggacgcagcggccctcgagcacgacaaggcctacgaccagcagctcaaagcgggtgacaatccgtacctgcggtataatcacgccgacgccgagtttcaggagcgtctgcaagaagatacgtcttttgggggcaacctcgggcgagcagtcttccaggccaagaagcgggttctcgaacctctcggtctggttgaggaaggcgctaagacggctcctggaaagaagagaccggtagagccgtcaccacagcgttcccccgactcctccacgggcatcggcaagaaaggccagcagcccgccagaaagagactcaatttcggtcagactggcgactcagagtcagtccccgaccctcaacctatcggagaacctccagcagcgccctctagtgtgggatctggtacaatggctgcaggcggtggcgcaccaatggcagacaataacgaaggtgccgacggagtgggtagttcctcgggaaattggcattgcgattccacatggctgggcgacagagtcatcaccaccagcacccgaacctgggccctgcccacctacaacaaccacctctacaagcaaatctccaacgggacctcgggaggcagcaccaacgacaacacctactttggctacagcaccccctgggggtattttgactttaacagattccactgccacttctcaccacgtgactggcagcgactcatcaacaacaactggggattccggcccaagagactcagcttcaagctcttcaacatccaggtcaaagaggtcacgcagaatgaaggcaccaagaccatcgccaatagcctcaccagcaccatccaggtgtttacggactcggaataccagctgccgtacgtcctcggctctgcccaccagggctgcctgcctccgttcccggcggacgtcttcatgattcctcagtacggctacctgactcccaacaacggtagtcaggccgtgggacgttcctccttctactgcctggagtacttcccctctcagatgctgagaacgggcaacaacttttccttcagctacactttcgaggacgtgcctttccacagcagctacgcgcacagccagagtttggacaggctgatgaatcctctcatcgaccagtacctgtactacctgtcaagaacccagtctacgggaggcacagcgggaacccagcagttgctgtcttctcaggccgggcctagcaacatgtcggctcaggccagaaactggctgcctggaccctgctacagacagcagcgcgtctccacgacactgtcgcaaaacaacaacagcaactttgcctggactggtgccaccaagtatcatctgaacggcagagactctctggtgaatccgggcgtcgccatggcaaccaacaaggacgacgaggaccgcttcttcccatccagcggcatcctcatgtttggcaagcagggagctggaaaagacaacgtggactatagcaacgtgatgctaaccagcgaggaagaaatcaagaccaccaaccccgtggccacagaacagtatggcgtggtggctgataacctacagcagcaaaacaccgctcctattgtgggggccgtcaacagccagggagccttacctggcatggtctggcagaaccgggacgtgtacttgcagggtcctatttgggccaagattcctcacacagatggcaactttcacccgtctcctttaatgggcggctttggacttaaacatccgcctcctcagatcctcatcaaaaacactcctgttcctgcggatcctccaacagcgttcaaccaggccaagctgaattctttcatcacgcagtacagcaccggacaagtcagcgtggagatcgagtgggagctgcagaaggagaacagcaagcgctggaacccagagattcagtatacttccaactactacaaatctacaaatgtggactttgctgttaatactgagggtgtttactctgagcctcgccccattggcactcgttacctcacccgtaatctgtaa

SEQ ID NO: 5049 - protein, 738 aa, Adeno-associated virus
MAADGYLPDWLEDNLSEGIREWWDLKPGAPKPKANQQKQDDGRGLVLPGYKYLGPFNGLDKGEPVNAADAAALEHDKAYDQQLKAGDNPYLRYNHADAEFQERLQEDTSFGGNLGRAVFQAKKRVLEPLGLVEEGAKTAPGKKRPVEPSPQRSPDSSTGIGKKGQQPARKRLNFGQTGDSESVPDPQPIGEPPAAPSSVGSGTMAAGGGAPMADNNEGADGVGSSSGNWHCDSTWLGDRVITTSTRTWALPTYNNHLYKQISNGTSGGSTNDNTYFGYSTPWGYFDFNRFHCHFSPRDWQRLINNNWGFRPKRLSFKLFNIQVKEVTQNEGTKTIANSLTSTIQVFTDSEYQLPYVLGSAHQGCLPPFPADVFMIPQYGYLTPNNGSQAVGRSSFYCLEYFPSQMLRTGNNFSFSYTFEDVPFHSSYAHSQSLDRLMNPLIDQYLYYLSRTQSTGGTAGTQQLLSSQAGPSNMSAQARNWLPGPCYRQQRVSTTLSQNNNSNFAWTGATKYHLNGRDSLVNPGVAMATNKDDEDRFFPSSGILMFGKQGAGKDNVDYSNVMLTSEEEIKTTNPVATEQYGVVADNLQQQNTAPIVGAVNSQGALPGMVWQNRDVYLQGPIWAKIPHTDGNFHPSPLMGGFGLKHPPPQILIKNTPVPADPPTAFNQAKLNSFITQYSTGQVSVEIEWELQKENSKRWNPEIQYTSNYYKSTNVDFAVNTEGVYSEPRPIGTRYLTRNL

SEQ ID NO: 5050 - protein, 738 aa, Adeno-associated virus
MAADGYLPDWLEDNLSEGIREWWDLKPGAPKPKANQQKQDDGRGLVLPGYKYLGPFNGLDKGEPVNAADAAALEHDKAYDQQLKAGDNPYLRYNHADAEFQERLQEDTSFGGNLGRAVFQAKKRVLEPLGLVEEGAKTAPGKKRPVEPSPQRSPDSSTGIGKKGQQPARKRLNFGQTGDSESVPDPQPIGEPPAAPSSVGSGTMAAGGGAPMADNNEGADGVGSSSGNWHCDSTWLGDRVITTSTRTWALPTYNNHLYKQISNGTSGGSTNDNTYFGYSTPWGYFDFNRFHCHFSPRDWQRLINNNWGFRPKRLSFKLFNIQVKEVTQNEGTKTIANNLTSTIQVFTDSEYQLPYVLGSAHQGCLPPFPADVFMIPQYGYLTLNNGSQAVGRSSFYCLEYFPSQMLRTGNNFSFSYTFEDVPFHSSYVHSQSLDRLMNPLIDQYLYYLSRTQSTGGTAGTQQLLFSQAGPSNMSAQARNWLPGPCYRQQRVSTTLSQNNNSNFAWTGATKYHLNGRDSLVNSGVAMATNKDDEDRFFPSSGILMFGKQGAGKDNVDYSNVMLTSEEEIKTTNPVATEQYGVVADNLQQQNTAPIVGAVNSQGALPGMVWQNRDVYLQGPIWAKIPHTDGNFHPSPLMGGFGLKHPPPQILIKNTPVPADPPTAFNQAKLNSFITQYSTGQVSVEIEWELQKENSKRWNPEIQYTSNYYKSTNVDFAVNTEGVYSEPRPIGTRYPTRNL

SEQ ID NO: 5051 - DNA, 2217 bp, Adeno-associated virus
atggctgccgatggttatcttccagattggctcgaggacaacctctctgagggcattcgcgagtggtgggacctgaaacctggagccccgaaacccaaagccaaccagcaaaagcaggacgacggccggggtctggtgcttcctggctacaagtacctcggacccttcaacggactcgacaagggggagcccgtcaacgcggcggacgcagcggccctcgagcacgacaaggcctacgaccagcagctcaaagcgggtgacaatccgtacctgcggtataatcacgccgacgccgagtttcaggagcgtctgcaagaagatacgtcttttgggggcaacctcgggcgagcagtcttccaggccaagaagcgggttctcgaacctctcggtctggttgaggaaggcgctaagacggctcctggaaagaagagaccggtagagccgtcaccacagcgttcccccgactcctccacgggcatcggcaagaaaggccagcagcccgccagaaagagactcaatttcggtcagactggcgactcagagtcagtccccgaccctcaacctatcggagaacctccagcagcgccctctagtgtgggatctggtacaatggctgcaggcggtggcgcaccaatggcagacaataacgaaggtgccgacggagtgggtagttcctcgggaaattggcattgcgattccacatggctgggcgacagagtcatcaccaccagcacccgaacctgggccctgcccacctacaacaaccacctctacaagcaaatctccaacgggacctcgggaggcagcaccaacgacaacacctactttggctacagcaccccctgggggtattttgactttaacagattccactgccacttctcaccacgtgactggcagcgactcatcaacaacaactggggattccggcccaagagactcagcttcaagctcttcaacatccaggtcaaagaggtcacgcagaatgaaggcaccaagaccatcgccaataacctcaccagcaccatccaggtgtttacggactcggaataccagctgccgtacgtcctcggctctgcccaccagggctgcctgcctccgttcccggcggacgtcttcatgattcctcagtacggctacctgactctcaacaacggtagtcaggccgtgggacgttcctccttctactgcctggagtacttcccctctcagatgctgagaacgggcaacaacttttccttcagctacactttcgaggacgtgcctttccacagcagctacgtgcacagccagagtttggacaggctgatgaatcctctcatcgaccagtacctgtactacctgtcaagaacccagtctacgggaggcacagcgggaacccagcagttgctgttttctcaggccgggcctagcaacatgtcggctcaggccagaaactggctgcctggaccctgctacagacagcagcgcgtctccacgacactgtcgcaaaacaacaacagcaactttgcctggactggtgccaccaagtatcatctgaacggcagagactctctggtgaattcgggcgtcgccatggcaaccaacaaggacgacgaggaccgcttcttcccatccagcggcatcctcatgtttggcaagcagggagctggaaaagacaacgtggactatagcaacgtgatgctaaccagcgaggaagaaatcaagaccaccaaccccgtggccacagaacagtatggcgtggtggctgataacctacagcagcaaaacaccgctcctattgtgggggccgtcaacagccagggagccttacctggcatggtctggcagaaccgggacgtgtacctgcagggtcctatttgggccaagattcctcacacagatggcaactttcacccgtctcctttaatgggcggctttggacttaaacatccgcctcctcagatcctcatcaaaaacactcctgttcctgcggatcctccaacagcgttcaaccaggccaagctgaattctttcatcacgcagtacagcaccggacaagtcagcgtggagatcgagtgggagctgcagaaggagaacagcaagcgctggaacccagagattcagtatacttccaactactacaaatctacaaatgtggactttgctgttaatactgagggtgtttactctgagcctcgccccattggcactcgttaccccacccgtaatctgtaa

SEQ ID NO: 5052 - protein, 734 aa, Adeno-associated virus; identical to SEQ ID NO: 4948

SEQ ID NO: 5053 - DNA, 2214 bp, Adeno-associated virus
atggctgctgacggttatcttccagattggctcgaggacaacctctctgagggcattcgcgagtggtgggacctgaaacctggagccccgaaacccaaagccaaccagcagaagcaggacgacggccggggtctggtgcttcctggctacaagtacctcggacccttcaacggactcgacaagggggagcccgtcaacgcggcggacgcagcggccctcgagcacgacaaggcctacgaccagcagctcaaagcgggtgacaatccgtacctgcggtataaccacgccgacgccgagtttcaggagcgtctgcaagaagatacgtcttttgggggcaacctcgggcgagcagtcttccaggccaagaagcgggttctcgaacctctcggtctggttgaggaagctgctaagacggctcctggaaagaagagaccggtagaaccgtcacctcagcgttcccccgactcctccacgggcatcggcaagaaaggccagcagcccgctagaaagagactgaactttgggcagactggcgactcagagtcagtccccgaccctcaacctctcggagaaccaccagcaggcccctctggtctgggatctggtacaatggctgcaggcggtggcgctccaatggcagacaataacgaaggcgccgacggagtgggtaatgcctcaggaaattggcattgcgattccacatggctgggcgacagagtcatcaccaccagcacccgaacctgggctttgcccacctacaacaaccacctctacaagcaaatctccagtcagtcagcaggtagcaccaacgacaacgtctacttcggctacagcaccccctgggggtattttgacttcaacagattccactgtcacttctcaccacgtgactggcagcgactcatcaacaacaactggggattccggcccaagaagctcaacttcaagctcttcaacatccaagtcaaggaggtcacgacgaatgacggcgtcacgaccatcgctaataaccttaccagcacggttcaggtcttttcggactcggagtaccagctgccgtacgtcctcggctctgcccaccagggctgcctgcctccgttcccggcggacgtcttcatgattcctcagtacggctacctgactctgaacaatggcagccaatcggtgggacgttcatccttctactgcctggaatacttcccttctcaggtgctgagaacgggtaacaacttcaccttcagttacaccttcgaggacgtgcctttccacagcagctacgcgcacagccagagcctagaccggctgatgaatcccctcatcgaccagtacctgtattacctggctagaacacagagtaacccaggaggcacatctggcaatcgggaactgcagttttaccagggcgggccttccaccatggccgaacaagccaagaactggttacctggaccttgcttccggcaacaaagagtttccaaaacactggatcaaaacaacaacagcaactttgcttggactggtgccaccaaatatcacctgaacggcagaaactcattggtgaatcctggtgtcgccatggcaactcacaaggacgacgaggaccgctttttcccatccagcggagtcctgatttttggaaaaactggagcaaccaacaagactacattggaaaacgtgttaatgacaaatgaagaagaaattcgtcctactaatcctgtggccacagaagaatacgggatagtcagcagcaatttacaagcggccaatactgcagcccagacacaagttgtcaacaaccagggagccttacctggcatggtctggcagaaccgggacgtgtacctgcagggtcccatctgggccaaaattcctcacacagacggcaactttcacccgtctccgctgatgggcggctttggactgaagcatccgcctcctcagatcctgatcaaaaacactcctgttcctgctaatcccccggaggtgtttacgcctgccaagtttgcttctttcatcacacagtacagcaccggccaggtcagcgtggagatcgagtgggagctgcagaaggagaacagcaagcgctggaacccagagattcagtatacctccaattttgacaaacagactggtgtggactttgccgttgacagccagggtgtttattctgagcctcgccccattggtactcgttacctcacccgtaatctgtaa

SEQ ID NO: 5054 - protein, 737 aa, Adeno-associated virus
MAADGYLPDWLEDNLSEGIREWWDLKPGAPKPKANQQKQDDGRGLVLPGYKYLGPFNGLDKGEPVNAADAAALEHDKAYDQQLKAGDNPYLRYNHADAEFQERLQEDTSFGGNLGRAVFQAKKRVLEPLGLVEEAAKTAPGKKRPVEPSPQRSPDSSTGIGKKGQQPARKRLNFGQTGDSESVPDPQPLGEPPAGPSGLGSGTMAAGGGAPMADNNEGADGVGNASGNWHCDSTWLGDRVITTSTRTWALPTYNNHLYKQISSQSAGSTNDNVYFGYSTPWGYFDFNRFHCHFSPRDWQRLINNNWGFRPKKLNFKLFNIQVKEVTTNDGVTTIANNLTSTVQVFSDSEYQLPYVLGSAHQGCLPPFPADVFMIPQYGYLTLNNGSQSVGRSSFYCLEYFPSQVLRTGNNFTFSYTFEDVPFHSSYAHSQSLDRLMNPLIDQYLYYLARTQSNPGGTSGNRELQFYQGGPSTMAEQAKNWLPGPCFRQQRVSKTLDQNNNSNFAWTGATKYHLNGRNSLVNPGVAMATHKDDEDRFFPSSGVLIFGKTGATNKTTLENVLMTNEEEIRPTNPVATEEYGIVSSNLQAANTAAQTQVVNNQGALPGMVWQNRDVYLQGPIWAKIPHTDGNFHPSPLMGGFGLKHPPPQILIKNTPVPANPPEVFTPAKFASFITQYSTGQVSVEIEWELQKENSKRWNPEIQYTSNFDKQTGVDFAVDSQGVYSEPRPIGTRYLTRNL

SEQ ID NO: 5055 - DNA, 2214 bp, Adeno-associated virus
atggctgccgatggttatcttccagattggctcgaggacaacctctctgagggcattcgcgagtggtgggacctgaaacctggagccccgaaacccaaagccaaccagcaaaagcaggacgacggccggggtctggtgcttcctggctacaagtacctcggacccttcaacggactcgacaagggggagcccgtcaacgcggcggacgcagcggccctcgagcacgacaaggcctacgaccagcagctcaaagcgggtgacaatccgtacctgcggtataatcacgccgacgccgagtttcaggagcgtctgcaagaagatacgtcttttgggggcaacctcgggcgagcagtcttccaggccaagaagcgggttctcgaacctctcggtctggttgaggaaggcgctaagacggctcctggaaagaagagaccggtagagccgtcaccacagcgttcccccgactcctccacgggcatcggcaagaaaggccagcagcccgccagaaagagactcaatttcggtcagactggcgactcagagtcagtccccgaccctcaacctatcggagaacctccagcagcgccctctagtgtgggatctggtacaatggctgcaggcggtggcgcaccaatggcagacaataacgaaggtgccgacggagtgggtagttcctcgggaaattggcattgcgattccacacggctgggcgacagagtcatcaccaccagcacccggacctgggctttgcccacctacaacaaccacctctacaagcaaatctccagtcagtcagcaggtagcaccaacgacaacgtctacttcggctacagcaccccctgggggtattttgacttcaacagattccactgtcacttctcaccacgtgactggcagcggctcatcaacaacaactggggattccggcccaagaagctcaacttcaagctgttcaacatccaggtcaaggaggtcacaacgaatgacggcgtcacgaccatcgccaataaccttaccagcacggttcaggtcttttcggactcggaataccagctgccctacgtcctcggctccgcacaccagggctgcctgcctccgttcccggcggacgtcttcatgattccccagtacggctacctgactctgaacaatggcagccaatcggtgggtcgttcctctttctactgcctggaatatttcccttctcaaatgctgagaacgggcaacaacttcaccttcagctacaccttcgaggacgttcccttccacagcagctacgcacacagccagagcctggaccggctgatgaatcctcttatcgaccagtacctgtattacctggccagaacacagagcaacgcaggaggcacagctggcaatcgggaactgcagttttatcagggcgggcctaccaccatggccgaacaagccaaaaactggctgcctggaccttgcttccggcaacgaagagtctccaagacgctggatcaaaacaacaacagcaactttgcttggactggtgccaccaaataccatctaaatggaagaaattcattggttaatcccggtgtcgccatggcaacccacaaggacgacgaggaacgcttcttcccttcgagcggagtcctgatttttggaaaaactggagcagctaataagactacactggaaaatgtgttaatgacaaatgaagaggaaattcgtcctaccaacccggtagccaccgaggaatacgggactgttagcagcaacctgcaggcggctaacactgcagcccagacacaagttgtcaacaaccagggagccttacctggtatggtctggcagaaccgggacgtgtacctgcagggtcccatctgggccaagattcctcacacggacggcaactttcacccgtctccgctgatgggcggctttggactgaagcatccgcctcctcagatcctgatcaaaaacactcctgttcctgctaatcccccggaggtgtttacgcctgccaagtttgcttctttcatcacacagtacagcaccggccaggtcagcgtggagatcgagtgggagctgcagaaggagaacagcaagcgctggaacccagagattcagtatacctccaattttgacaaacagactggtgtggactttgccgttgacagccagggtgtttattctgagcctcgccccattggtactcgttacctcacccgtaatctgtaa

SEQ ID NO: 5056 - protein, 737 aa, Adeno-associated virus
MAADGYLPDWLEDNLSEGIREWWDLKPGAPKPKANQQKQDDGRGLVLPGYKYLGPFNGLDKGEPVNAADAAALEHDKAYDQQLKAGDNPYLRYNHADAEFQERLQEDTSFGGNLGRAVFQAKKRVLEPLGLVEEGAKTAPGKKRPVEPSPQRSPDSSTGIGKKGQQPARKRLNFGQTGDSESVPDPQPIGEPPAAPSSVGSGTMAAGGGAPMADNNEGADGVGSSSGNWHCDSTRLGDRVITTSTRTWALPTYNNHLYKQISSQSAGSTNDNVYFGYSTPWGYFDFNRFHCHFSPRDWQRLINNNWGFRPKKLNFKLFNIQVKEVTTNDGVTTIANNLTSTVQVFSDSEYQLPYVLGSAHQGCLPPFPADVFMIPQYGYLTLNNGSQSVGRSSFYCLEYFPSQMLRTGNNFTFSYTFEDVPFHSSYAHSQSLDRLMNPLIDQYLYYLARTQSNAGGTAGNRELQFYQGGPTTMAEQAKNWLPGPCFRQRRVSKTLDQNNNSNFAWTGATKYHLNGRNSLVNPGVAMATHKDDEERFFPSSGVLIFGKTGAANKTTLENVLMTNEEEIRPTNPVATEEYGTVSSNLQAANTAAQTQVVNNQGALPGMVWQNRDVYLQGPIWAKIPHTDGNFHPSPLMGGFGLKHPPPQILIKNTPVPANPPEVFTPAKFASFITQYSTGQVSVEIEWELQKENSKRWNPEIQYTSNFDKQTGVDFAVDSQGVYSEPRPIGTRYLTRNL

SEQ ID NO: 5057 - DNA, 2208 bp, Adeno-associated virus
atggctgccgatggttatcttccagattggctcgaggacactctctctgaaggaataagacagtggtggaagctcaaacctggcccaccaccaccaaagcccgcagagcggcataaggacgacagcaggggtcttgtgcttcctgggtacaagtacctcggacccttcaacggactcgacaagggggagccggtcaacgaggcagacgccgcggccctcgagcacgacaaggcctacgaccggcagctcgacagcggagacaacccgtacctcaagtacaaccacgccgacgcggagtttcaggagcgtcttaaagaagatacgtcttttgggggcaacctcggacgagcagtcttccaggcgaaaaagagggttcttgaacctctgggcctggttgaggaacctgttaagacggctccgggaaaaaagaggccggtagagcactctcctgcggagccagactcctcctcgggaaccggaaaagcgggccagcagcctgcaagaaaaagattgaattttggtcagactggagacgcagactccgtacctgacccccagcctctcggacagccaccagcagccccctctggtttgggatctactacaatggctacaggcagtggcgcaccaatggcagacaataacgagggtgccgatggagtgggtaattcttcaggaaattggcattgcgattcccaatggctgggcgacagagtcatcaccaccagcacccgaacctgggcccagcccacctacaacaaccacctctacaagcaaatctcaagccaatcaggagcctcaaacgacaaccactactttggctacagcaccccttgggggtattttgacttcaacagattccactgccacttttcaccacgtgactggcaaagactcatcaacaacaactggggattccgacccaagagactcaacttcaagctctttaacattcaagtcaaagaggtcacgcagaatgacggtacgacgacgattgccaataaccttaccagcacggttcaggtgtttactgactcggagtaccagctcccgtacgtcctcgggtcggcgcatcaaggatgcctcccgccgtttccagcggacgtcttcatggtcccacagtatggatacctcaccctgaacaacgggagtcaggcggtaggacgctcttccttttactgcctggagtactttccttctcagatgcttcgtactggaaacaactttcagttcagctacacctttgaagacgttcctttccacagcagctacgctcacagccagagtctggatcggctgatgaatcctctgatcgaccagtacctgtattatctgaacaaaacacaatcaaatagtggagctcttcagcagtctcggctactgtttagtcaagctggacccaccagcatgtctcttcaagctaaaaactggctacctggaccttgctacagacagcagcgtctgtcaaagcaggcaaacgacaacaacaacagcaactttccctggactgcggctacaaagtaccacctaaatggccgggactcgttggttaatccaggaccagctatggccagtcacaaagacgatgaagaaaagtttttccccatgcatggaaccctgatatttggtaaacaaggaacaaatgctaacgacgcggatttggacaatgtcatgattacagatgaagaagaaatccgcaccaccaatcccgtggctacggagcagtacggatatgtgtcaaataatttgcaaaactcaaatactggtccaactactggaactgtcaatcaccgaggagcgttacctggcatggtgtggcaggatcgagacgtgtacctgcagggacccatttgggccaagattcctcacaccgatggacactttcatccttctccactgatgggaggttttgggctcaaacacccgcctcctcagatcatgatcaaaaacactcccgttccagccaatcctcccacaaacttcagttctgccaagtttgcttctttcatcacacagtattccacggggcaggtcagcgtggagatcgagtgggagctgcagaaagagaacagcaaacgctggaatcccgaaattcagtacacttccaactacaacaaatctgttaatgtggactttactgtggacactaatggcgtgtattcagagcctcgccccattggcaccagatacctgactcgtaatctgtaa

SEQ ID NO: 5058 - protein, 735 aa, Adeno-associated virus
MAADGYLPDWLEDTLSEGIRQWWKLKPGPPPPKPAERHKDDSRGLVLPGYKYLGPFNGLDKGEPVNEADAAALEHDKAYDRQLDSGDNPYLKYNHADAEFQERLKEDTSFGGNLGRAVFQAKKRVLEPLGLVEEPVKTAPGKKRPVEHSPAEPDSSSGTGKAGQQPARKRLNFGQTGDADSVPDPQPLGQPPAAPSGLGSTTMATGSGAPMADNNEGADGVGNSSGNWHCDSQWLGDRVITTSTRTWAQPTYNNHLYKQISSQSGASNDNHYFGYSTPWGYFDFNRFHCHFSPRDWQRLINNNWGFRPKRLNFKLFNIQVKEVTQNDGTTTIANNLTSTVQVFTDSEYQLPYVLGSAHQGCLPPFPADVFMVPQYGYLTLNNGSQAVGRSSFYCLEYFPSQMLRTGNNFQFSYTFEDVPFHSSYAHSQSLDRLMNPLIDQYLYYLNKTQSNSGALQQSRLLFSQAGPTSMSLQAKNWLPGPCYRQQRLSKQANDNNNSNFPWTAATKYHLNGRDSLVNPGPAMASHKDDEEKFFPMHGTLIFGKQGTNANDADLDNVMITDEEEIRTTNPVATEQYGYVSNNLQNSNTGPTTGTVNHRGALPGMVWQDRDVYLQGPIWAKIPHTDGHFHPSPLMGGFGLKHPPPQIMIKNTPVPANPPTNFSSAKFASFITQYSTGQVSVEIEWELQKENSKRWNPEIQYTSNYNKSVNVDFTVDTNGVYSEPRPIGTRYLTRNL

SEQ ID NO: 5059 - DNA, 2217 bp, Adeno-associated virus
atggctgccgatggttatcttccagattggctcgaggacaacctctctgagggcattcgcgagtggtgggcgctgaaacctggagccccgaagcccaaagccaaccagcaaaagcaggacgacggccggggtctggtgcttcctggctacaagtacctcggacccttcaacggactcgacaagggggagcccgtcaacgcggcggacgcagcggccctcgagcacgacaaggcctacgaccagcagctgcaggcgggtgacaatccgtacctgcggtataatcacgccgacgccgagtttcaggagcgtctgcaagaagatacgtcttttgggggcaacctcgggcgagcagtcttccaggccaagaagcgggttctcgaacctctcggtctggttgaggaaggcgctaagacggctcctggaaagaagagaccggtagagccgtcaccacagcgttcccccgactcctccacgggcatcggcaagaaaggccagcagcccgccagaaagagactcaatttcggtcagactggcgactcagagtcagtccccgaccctcaacctatcggagaacctccagcagcgccctctagtgtgggatctggtacaatggctgcaggcggtggcgcgccaatggcagacaataacgaaggtgccgacggagtgggtagttcctcgggaaattggcattgcgattccacatggctgggcgacagagtcatcaccaccagcacccgaacctgggccctgcccacctacaacaaccacctctacaagcaaacctccaacgggacctcgggaggcagcaccaacgacaacacctactttggctacagcaccccctgggggtattttgactttaacagattccactgccacttctcaccacgtgactggcagcgactcatcaacaacaactggggattccggcccaagagactcagcttcaagctcttcaacatccaggtcaaagaggtcacgcagaatgaaggcaccaagaccatcgccaataacctcaccagcaccatccaggtgtttacggactcggaataccagctgccgtacgtcctcggctctgcccaccagggctgcctgcctccgttcccggcggacgtcttcatgattcctcagtacggctacctgactctcaacaacggtagtcaggccgtgggacgttcctccttctactgcctggagtacttcccctctcagatgctgagaacgggcaacaacttttccttcagctacactttcgaggacgtgcctttccacagcagctacgcgcacagccagagtttggacaggctgatgaatcctctcatcgaccagtacctgtactacctgtcaagaacccagtctacgggaggcacagcgggaacccagcagttgctgttttctcaggccgggcctagcaacatgtcggctcaggccagaaactggctgcctggaccctgctacagacagcagcgcgtctccacgacactgtcgcaaaacaacaacagcaactttgcctggactggtgccaccaagtatcatctgaacggcagagactctctggtgaatccgggcgtcgccatggcaaccaacaaggacgacgaggaccgcttcttcccatccagcggcatcctcatgtttggcaagcagggagctggaaaagacaacgtggactatagcaacgtgatgctaaccagcgaggaagaaatcaagaccaccaaccccgtggccacagaacagtatggcgtggtggctgataacctacagcagcaaaacaccgctcctattgtgggggccgtcaacagccagggagccttacctggcatggtctggcagaaccgggacgtgtacctgcagggtcctatttgggccaagattcctcacacagatggcaactttcacccgtctcctttaatgggcggctttggacttaaacatccgcctcctcagatcctcatcaaaaacactcctgttcctgcggatcctccaacagcgttcaaccaggccaagctgaattctttcatcacgcagtacagcaccggacaagtcagcgcggagatcgagtgggagctgcagaaggagaacagcaagcgctggaacccagagattcagtatacttccaactactacaaatctacaaatgtggactttgctgttaatactgagggtgtttactctgagcctcgccccattggcactcgttacctcacccgtaatctgtaa

SEQ ID NO: 5060 - protein, 738 aa, Adeno-associated virus
MAADGYLPDWLEDNLSEGIREWWALKPGAPKPKANQQKQDDGRGLVLPGYKYLGPFNGLDKGEPVNAADAAALEHDKAYDQQLQAGDNPYLRYNHADAEFQERLQEDTSFGGNLGRAVFQAKKRVLEPLGLVEEGAKTAPGKKRPVEPSPQRSPDSSTGIGKKGQQPARKRLNFGQTGDSESVPDPQPIGEPPAAPSSVGSGTMAAGGGAPMADNNEGADGVGSSSGNWHCDSTWLGDRVITTSTRTWALPTYNNHLYKQTSNGTSGGSTNDNTYFGYSTPWGYFDFNRFHCHFSPRDWQRLINNNWGFRPKRLSFKLFNIQVKEVTQNEGTKTIANNLTSTIQVFTDSEYQLPYVLGSAHQGCLPPFPADVFMIPQYGYLTLNNGSQAVGRSSFYCLEYFPSQMLRTGNNFSFSYTFEDVPFHSSYAHSQSLDRLMNPLIDQYLYYLSRTQSTGGTAGTQQLLFSQAGPSNMSAQARNWLPGPCYRQQRVSTTLSQNNNSNFAWTGATKYHLNGRDSLVNPGVAMATNKDDEDRFFPSSGILMFGKQGAGKDNVDYSNVMLTSEEEIKTTNPVATEQYGVVADNLQQQNTAPIVGAVNSQGALPGMVWQNRDVYLQGPIWAKIPHTDGNFHPSPLMGGFGLKHPPPQILIKNTPVPADPPTAFNQAKLNSFITQYSTGQVSAEIEWELQKENSKRWNPEIQYTSNYYKSTNVDFAVNTEGVYSEPRPIGTRYLTRNL

SEQ ID NO: 5061 - DNA, 2217 bp, Adeno-associated virus
atggctgctgacggttatcttccagattggctcgaggacaacctctctgagggcattcgcgagtggtgggacctgaaacctggagcccccaagcccaaggccaaccagcagaagcaggacgacggccggggtctggtgcttcctggctacaagtacctcggacccttcaacggactcgacaagggggagcccgtcaacgcggcggacgcagcggccctcgagcacgacaaggcctacgaccagcagctcaaagcgggtgacaatccgtacctgcggtataatcacgccgacgccgagtttcaggagcgtctgcaagaagatacgtcttttgggggcaacctcgggcgagcagtcttccaggccaagaagcgggttctcgaacctctcggtctggttgaggaagctgctaagacggctcctggaaagaagagaccggtagaaccgtcacctcagcgttcccccgactcctccacgggcatcggcaagaaaggccagcagcccgctagaaagagactgaactttgggcagactggcgactcagagtcagtccccgaccctcaaccaatcggagaacctccagcagcgccctctagtgtgggatctggtacaatggccgcaggcggtggcgcaccaatggcagacaataacgaaggtgccgacggagtgggtagttcctcgggaaattggcattgcgattccacatggctgggcgacagagtcatcaccaccagcacccgaacctgggccctgcccacctacaacaaccacctctacaagcaaatctccaacgggacctcgggaggcagcaccaacgacaacacctactttggctacagcaccccctgggggtattttgactttaacagattccactgccacttctcaccacgtgactggcagcgactcatcaacaacaactggggattccggcccaagagactcagcttcaagctcttcaacatccaggtcaaagaggtcacgcagaatgaaggcaccaagaccatcgccaataacctcaccagcaccatccaggtgtttacggactcggaataccagctgccgtacgtcctcggctctgcccaccagggctgcctgcctccgttcccggcggacgtcttcatgattcctcagtacggctacctgactctcaacaacggtagtcaggccgtgggacgttcctccttctactgcctggagtacttcccctctcagatgctgagaacgggcaacaacttttccttcagctacactttcgaggacgtgcctttccacagcagctacgcgcacagccagagtttggacaggctgatgaatcctctcatcgaccagtacctgtactacctgtcaagaacccagtctacgggaggcacagcgggaacccagcagctgctgttttctcaggccgggcctagcaacatgtcggctcaggccagaaactggctgcctggaccctgctacagacagcagcgcgtctccacgacactgtcgcaaaacaacaacagcaactttgcctggactggtgccaccaagtatcatctgaacggcagagactctctggtgaatccgggcgtcgccatggcaaccaacaaggacgacgaggaccgcttcttcccatccagcggcatcctcatgtttggcaagcagggagctggaaaagacaacgtggactatagcaacgtgatgctaaccagcgaggaagaaatcaagaccaccaaccccgtggccacagaacagtatggcgtggtggctgataacctacagcagcaaaacaccgctcctattgtgggggccgtcaacagccagggagccttacctggcatggtctggcagaaccgggacgtgtacctgcagggtcctatttgggccaagattcctcacacagatggcaactttcacccgtctcctttaatgggcggctttggacttaaacatccgcctcctcagatcctcatcaaaagcactcctgttcctgcggatcctccaacagcgttcaaccaggccaagctgaattctttcatcacgcagtacagcaccggacaagtcagcgtggagatcgagtgggagctgcagaaggagaacagcaagtgctggaacccagagattcagtatacttccaactactacaaatctacaaatgtggactttgctgttaatactgagggtgtttactctgagcctcgccccattggcactcgttacctcacccgtaatctgtaa

SEQ ID NO: 5062 - protein, 738 aa, Adeno-associated virus
MAADGYLPDWLEDNLSEGIREWWDLKPGAPKPKANQQKQDDGRGLVLPGYKYLGPFNGLDKGEPVNAADAAALEHDKAYDQQLKAGDNPYLRYNHADAEFQERLQEDTSFGGNLGRAVFQAKKRVLEPLGLVEEAAKTAPGKKRPVEPSPQRSPDSSTGIGKKGQQPARKRLNFGQTGDSESVPDPQPIGEPPAAPSSVGSGTMAAGGGAPMADNNEGADGVGSSSGNWHCDSTWLGDRVITTSTRTWALPTYNNHLYKQISNGTSGGSTNDNTYFGYSTPWGYFDFNRFHCHFSPRDWQRLINNNWGFRPKRLSFKLFNIQVKEVTQNEGTKTIANNLTSTIQVFTDSEYQLPYVLGSAHQGCLPPFPADVFMIPQYGYLTLNNGSQAVGRSSFYCLEYFPSQMLRTGNNFSFSYTFEDVPFHSSYAHSQSLDRLMNPLIDQYLYYLSRTQSTGGTAGTQQLLFSQAGPSNMSAQARNWLPGPCYRQQRVSTTLSQNNNSNFAWTGATKYHLNGRDSLVNPGVAMATNKDDEDRFFPSSGILMFGKQGAGKDNVDYSNVMLTSEEEIKTTNPVATEQYGVVADNLQQQNTAPIVGAVNSQGALPGMVWQNRDVYLQGPIWAKIPHTDGNFHPSPLMGGFGLKHPPPQILIKSTPVPADPPTAFNQAKLNSFITQYSTGQVSVEIEWELQKENSKCWNPEIQYTSNYYKSTNVDFAVNTEGVYSEPRPIGTRYLTRNL

SEQ ID NO: 5063 - protein, 738 aa, Adeno-associated virus
MAADGYLPDWLEDNLSEGIREWWDLKPGAPKPKANQQKQDDGRGLVLPGYKYLGPFNGLDKGEPVNAADAAALEHDKAYDQQLKAGDNPYLRYNHADAEFQERLQEDTSFGGNLGRAVFQAKKRVLEPLGLVEEAAKTAPGKKRPVEPSPQRSPDSSTGIGKKGQQPARKRLNFGQTGDSESVPDPQPIGEPPAAPSSVGSGTMAAGGGAPMADNNEGADGVGSSSGNWHCDSTWLGDRVITTSTRTWALPTYNNHLYKQISNGTSGGSTNDNTYFGYSTPWGYFDFNRFHCHFSPRDWQRLINNNWGFRPKRLSFKLFNIQVKEVTQNEGTKTIANNLTSTIQVFTDSEYQLPYVLGSAHQGCLPPFPADVFMIPQYGYLTLNNGSQAVGRSSFYCLEYFPSQMLRTGNNFSFSYTFEDVPFHSSYAHSQSLDRLMNPLIDQYLYYLSRTQSTGGTAGTQQLLFSQAGPSNMSAQARNWLPGPCYRQQRVSTTLSQNNNSNFAWTGATKYHLNGRDSLVNPGVAMATNKDDEDRFFPSSGILMFGKQGAGKDNVDYSNVMLTSEEEIKTTNPVATEQYGVVADNLQQQNTAPIVGAVNSQGALPGMVWQNRDVYLQGPIWAKIPHTDGNFHPSPLMGGFGLKHPPPQILIKSTPVPADPPTAFNQAKLNSFITQYSTGQVSVEIEWELQKENSKRWNPEIQYTSNYYKSTNVDFAVNTEGVYSEPRPIGTRYLTRNL

SEQ ID NO: 5064 - DNA, 2217 bp, Adeno-associated virus
atggctgctgacggttatcttccagattggctcgaggacaacctctctgagggcattcgcgagtggtgggacctgaaacctggagcccccaagcccaaggccaaccagcagaagcaggacgacggccggggtctggtgcttcctggctacaagtacctcggacccttcaacggactcgacaagggggagcccgtcaacgcggcggacgcagcggccctcgagcacgacaaggcctacgaccagcagctcaaagcgggtgacaatccgtacctgcggtataaccacgccgacgccgagtttcaggagcgtctgcaagaagatacgtcttttgggggcaacctcgggcgagcagtcttccaggccaagaagcgggttctcgaacctctcggtctggttgaggaagctgctaagacggctcctggaaagaagagaccggtagaaccgtcacctcagcgttcccccgactcctccacgggcatcggcaagaaaggccagcagcccgctagaaagagactgaactttgggcagactggcgactcagagtcagtccccgaccctcaaccaatcggagaaccaccagcaggcccctctggtctgggatctggtacaatggctgcaggcggtggcgcaccaatggctgacaataacgagggcgccgacggagtgggtaatgcctcaggaaattggcattgcgattccacatggctgggcgacagagtcatcaccaccagcacccgaacctgggctttgcccacctacaacaaccacctctacaagcaaatctccagtcagtcagcaggtagcaccaacgacaacgtctacttcggctacagcaccccctgggggtattttgacttcaacagattccactgtcacttctcaccacgtgactggcagcggctcatcaacaacaactggggattccggcccaagaagctcaacttcaagctgttcaacatccaggtcaaggaggtcacaacgaatgacggcgtcacgaccatcgccaataaccctaccagcacggttcaggtcttttcggactcggaataccagctgccctacgtcctcggctccgcacaccagggctgcctgcctccgttcccggcggacgtcttcatgattccccagtacggctacctgactctgaacaatggcagccaatcggtgggtcgttcctctttctactgcctggaatatttcccttctcaaatgctgagaacgggcaacaacttcaccttcagctacaccttcgaggacgttcccttccacagcagctacgcacacagccagagcctggaccggctgatgaatcctcttatcgaccagtacctgtattacctggccagaacacagagcaacgcaggaggcacagctggcaatcgggaactgcagttttatcagggcgggcctaccaccatggccgaacaagccaaaaactggctgcctggaccctgctacagacagcagcgcgtctccacgacactgtcgcaaaacaacaacagcaactttgcctggactggtgccaccaagtatcatctgaacggcagagactctctggtgaatccgggcgtcgccatggcaaccaacaaggacgacgaggaccgcttcttcccatccagcggcatcctcatgtttggcaagcagggagctggaaaagacaacgtggactatagcaacgtgatgctaaccagcgaggaagaaatcaagaccaccaaccccgtggccacagaacagtatggcgtggtggctgataacctacagcagcaaaacaccgctcctattgtgggggccgtcaacagccagggagccttacctggcatggtctggcagaaccgggacgtgtacctgcagggtcctatttgggccaagattcctcacacagatggcaactttcacccgtctcctttaatgggcggctttggacttaaacatccgcctcctcagatcctcatcaaaaacactcctgttcctgcggatcctccaacagcgttcaaccaggccaagctgaattctttcatcacgcagtacagcaccggacaagtcagcgtggagatcgagtgggagctgcagaaggagaacagcaagcgctggaacccagagattcagtatacttccaactactacaaatctacaaatgtggactttgctgttaatactgagggtgtttactctgagcctcgccccattggcactcgttacctcacccgtaatctgtaa

SEQ ID NO: 5065 - protein, 738 aa, Adeno-associated virus
MAADGYLPDWLEDNLSEGIREWWDLKPGAPKPKANQQKQDDGRGLVLPGYKYLGPFNGLDKGEPVNAADAAALEHDKAYDQQLKAGDNPYLRYNHADAEFQERLQEDTSFGGNLGRAVFQAKKRVLEPLGLVEEAAKTAPGKKRPVEPSPQRSPDSSTGIGKKGQQPARKRLNFGQTGDSESVPDPQPIGEPPAGPSGLGSGTMAAGGGAPMADNNEGADGVGNASGNWHCDSTWLGDRVITTSTRTWALPTYNNHLYKQISSQSAGSTNDNVYFGYSTPWGYFDFNRFHCHFSPRDWQRLINNNWGFRPKKLNFKLFNIQVKEVTTNDGVTTIANNPTSTVQVFSDSEYQLPYVLGSAHQGCLPPFPADVFMIPQYGYLTLNNGSQSVGRSSFYCLEYFPSQMLRTGNNFTFSYTFEDVPFHSSYAHSQSLDRLMNPLIDQYLYYLARTQSNAGGTAGNRELQFYQGGPTTMAEQAKNWLPGPCYRQQRVSTTLSQNNNSNFAWTGATKYHLNGRDSLVNPGVAMATNKDDEDRFFPSSGILMFGKQGAGKDNVDYSNVMLTSEEEIKTTNPVATEQYGVVADNLQQQNTAPIVGAVNSQGALPGMVWQNRDVYLQGPIWAKIPHTDGNFHPSPLMGGFGLKHPPPQILIKNTPVPADPPTAFNQAKLNSFITQYSTGQVSVEIEWELQKENSKRWNPEIQYTSNYYKSTNVDFAVNTEGVYSEPRPIGTRYLTRNL

SEQ ID NO: 5066 - DNA, 2208 bp, Adeno-associated virus
atggctgccgatggttatcttccagattggctcgaggacaacctctctgagggcattcacgagtggtgggacccgaaacctggagccccgaaacccaaagccaaccagcaaaagcaggacgacggccggggtctggtgcttcctggctacaagtacctcggacccttcaacggactcgacaagggggagcccgtcaacgcggcggacgcagcggccctcgagcacgacaaggcctacgaccagcagctcaaagcgggtgacaatccgtacctgcggtataatcacgccgacgccgagtttcaggagcgtctgcaagaagatacgtcttttgggggcaacctcgggcgagcagtcttccaggccaagaagcgggttctcgaacctctcggtctggttgaggaaggcgctaagacggctcctggaaagaagagaccggtagagccgtcaccacagcgttcccccgactcctccacgggcatcggcaagaaaggccagcagcccgccagaaagagactcaatttcggtcagactggcgactcagagtcagtccccgaccctcaacctatcggagaacctccagcagcgccctctagtgtgggatctggtacaatggctgcaggcggtggcgcaccaatggcagacaataacgaaggtgccgacggagtgggtagttcctcgggaaattggcattgcgattccacatggctgggcgacagagtcatcaccaccagcacccgaacctgggccctgcccacccacaacaaccacctctacaagcaaatctccaacgggacctcgggaggcagcaccaacgacaacgtctacttcggctacagcaccccctgggggtattttgacttcaacagattccactgtcacttctcaccacgtgaccggcagcgactcatcaacaacaactggggattccggcccaagagactcagcttcaagctcttcaacatccaggtcaaagaggtcacgcagaatgaaggcaccaagaccatcgccaataacctcaccagcaccatccaggtgtttacggactcggaataccagctgccgtacgtcctcggctctgcccaccagggctgcctgcctccgttcccggcggacgtcttcatgattcctcagtacggctacctgactctcaacaacggtagtcaggccgtgggacgttcctccttctactgcctggagtacttcccctctcagatgctgagaacgggcaacaacttttccttcagctacactttcgaggacgtgcctttccacagcagctacgcgcacagccagagtttggacaggctgatgaatcctctcatcgaccagtacctgtactacctgtcaagaacccagtctacggaaggcacagcgggaacccagcagttgctgttttctcaggccgggcctagcaacatgtcggctcaggccagaaactggctgcctggaccctgctacagacagcagcgcgtctccacgacactgtcgcaaaacaacaacagcaactttgcctggactggtgccaccaagtatcatctgaacggcagagactctctggtgaatccgggcgtcgccatggcaacccacaaggacgacgaggaacgcttcttcccttcgagcggagtcctgatttttggaaaaactggagcagctaataagactacactggaaaatgtgttaatgacaaatgaagaggaaattcgtcctaccaacccggtagccaccgaggaatacgggactgttagcagcaacctgcaggcggctaacactgcagcccagacacaagttgtcaacaaccagggagccttacctggtatggtctggcagaaccgggacgtgtacctgcagggtcccatctgggccaagattcctcacacggacggcaactttcacccgtctccgctgatgggcggctttggactgaagcatcctcagatcctgatcaaaaacactcctgttcctgctaatcccccggaggtgtttacgcctgccaagtttgcttctttcatcacacagtacagcaccggccaggtcagcgtggagatcgagtgggagctgcagaaggagaacagcaagcgctggaacccagagattcagtatacctccaattttgacaaacagactggtgtggactttgccgttgacagccagggtgtttattctgagcctcgccccattggtactcgttacctcacccgtaatctgtaa

SEQ ID NO: 5067 - protein, 735 aa, Adeno-associated virus
MAADGYLPDWLEDNLSEGIHEWWDPKPGAPKPKANQQKQDDGRGLVLPGYKYLGPFNGLDKGEPVNAADAAALEHDKAYDQQLKAGDNPYLRYNHADAEFQERLQEDTSFGGNLGRAVFQAKKRVLEPLGLVEEGAKTAPGKKRPVEPSPQRSPDSSTGIGKKGQQPARKRLNFGQTGDSESVPDPQPIGEPPAAPSSVGSGTMAAGGGAPMADNNEGADGVGSSSGNWHCDSTWLGDRVITTSTRTWALPTHNNHLYKQISNGTSGGSTNDNVYFGYSTPWGYFDFNRFHCHFSPRDRQRLINNNWGFRPKRLSFKLFNIQVKEVTQNEGTKTIANNLTSTIQVFTDSEYQLPYVLGSAHQGCLPPFPADVFMIPQYGYLTLNNGSQAVGRSSFYCLEYFPSQMLRTGNNFSFSYTFEDVPFHSSYAHSQSLDRLMNPLIDQYLYYLSRTQSTEGTAGTQQLLFSQAGPSNMSAQARNWLPGPCYRQQRVSTTLSQNNNSNFAWTGATKYHLNGRDSLVNPGVAMATHKDDEERFFPSSGVLIFGKTGAANKTTLENVLMTNEEEIRPTNPVATEEYGTVSSNLQAANTAAQTQVVNNQGALPGMVWQNRDVYLQGPIWAKIPHTDGNFHPSPLMGGFGLKHPQILIKNTPVPANPPEVFTPAKFASFITQYSTGQVSVEIEWELQKENSKRWNPEIQYTSNFDKQTGVDFAVDSQGVYSEPRPIGTRYLTRNL

SEQ ID NO: 5068 - protein, 738 aa, Adeno-associated virus
MAADGYLPDWLEDNLSEGIREWWDLKPGAPKPKANQQKQDDGRGLVLPGYKYLGPFNGLDKGEPVNAADAAALEHDKAYDQQLKAGDNPYLRYNHADAEFQERLQEDTSFGGNLGRAVFQAKKRVLEPLGLVEEGAKTAPGKKRPVEPSPQRSPDSSTGIGKKGQQPARKRLNFGQTGDSESVPDPQPIGEPPAAPSSVGSGTMAAGGGAPMADNNEGADGVGSSSGNWHCDSTWLGDRVITTSTRTWALPTYNNHLYKQISNGTSGGSTNDNTYFGYSTPWGYFDFNRFHCHFSPRDWQRPINNNWGFRPKRLSFKLFNIQVKEVTQNEGTKTIANNLTSTIQVFTDSEYQLPYVLGSAHQGCLPPFPADVFMIPQYGYLTLNNGSQAVGRSSFYCLEYFPSQMLRTGNNFSFSYPFEDVPFHSSYAHSQSLDRLMNPLIDQYLYYLSRTQSTGGTAGTQQLLFSQAGPSNMSAQARNWLPGPCYRQQRVSTTLSQNNNSNFAWTGATKYHLNGRDSLVNPGVAMATNKDDEDRFFPSSGILMFGKQGAGKDNVDYSNVMLTSEEEIKTTNPVATEQYGVVADNLQQQDTAPIVGAVNSQGALPGMVWQNRDVYLQGPIWAKIPHTDGNFHPSPLMGGFGLKHPPPQVLIKNTPVPADPPTAFNQAKLNSFITQYSTGQVSVEIEWELQKENSKRWNPEIQYTSNYYKSTNVDFAVNTEGVYSEPRPIGTRYLTRNL

SEQ ID NO: 5069 - DNA, 2217 bp, Adeno-associated virus
atggctgccgatggttatcttccagattggctcgaggacaacctctctgagggcattcgcgagtggtgggacctgaaacctggagccccgaaacccaaggccaaccagcaaaagcaggacgacggccggggtctggtgcttcctggctacaagtacctcggacccttcaacggactcgacaagggggagcccgtcaacgcggcggacgcagcggccctcgagcacgacaaggcctacgaccagcagctcaaagcgggtgacaatccgtacctgcggtataatcacgccgacgccgagtttcaggagcgtctgcaagaagatacgtcttttgggggcaacctcgggcgagcagtcttccaggccaagaagcgggttctcgaacctctcggtctggttgaggaaggcgctaagacggctcctggaaagaagagaccggtagagccgtcaccacagcgttcccccgactcctccacgggcatcggcaagaaaggccagcagcccgccagaaagagactcaatttcggtcagactggcgactcagagtcagtccccgaccctcaacctatcggagaacctccagcagcgccctctagtgtgggatctggtacaatggctgcaggcggtggcgcaccaatggcagacaataacgaaggtgccgacggagtgggtagttcctcgggaaattggcattgcgattccacatggctgggcgacagagtcatcaccaccagcacccgaacctgggccctgcccacctacaacaaccacctctacaagcaaatctccaacgggacctcgggaggcagcaccaacgacaacacctactttggctacagcaccccctgggggtattttgactttaacagattccactgccacttctcaccacgtgactggcagcgacccatcaacaacaactggggattccggcccaagagactcagcttcaagctcttcaacatccaggtcaaagaggtcacgcagaatgaaggcaccaagaccatcgccaataacctcaccagcaccatccaggtgtttacggactcggaataccagctgccgtacgtcctcggctctgcccaccagggctgcctgcctccgttcccggcggacgtcttcatgattcctcagtacggctacctgactctcaacaacggtagtcaggccgtgggacgttcctccttctactgcctggagtacttcccctctcagatgctgagaacgggcaacaacttttccttcagctaccctttcgaggacgtgcctttccacagcagctacgcgcacagccagagtttggacaggctgatgaatcctctcatcgaccagtacctgtactacctgtcaagaacccagtctacgggaggcacagcgggaacccagcagttgctgttttctcaggccgggcctagcaacatgtcggctcaggccagaaactggctgcctggaccctgctacagacagcagcgcgtctccacgacactgtcgcaaaacaacaacagcaactttgcctggactggtgccaccaagtatcatctgaacggcagagactctctggtgaatccgggcgtcgccatggcaaccaacaaggacgacgaggaccgcttcttcccatccagcggcatcctcatgtttggcaagcagggagctggaaaagacaacgtggactatagcaacgtgatgctaaccagcgaggaagaaatcaagaccaccaaccccgtggccacagaacagtatggcgtggtggctgataacctacagcagcaagacaccgctcctattgtgggggccgtcaacagccagggagccttacctggcatggtctggcagaaccgggacgtgtacctgcagggtcctatttgggccaagattcctcacacagatggcaactttcacccgtctcctttaatgggcggctttggacttaaacatccgcctcctcaggtcctcatcaaaaacactcctgttcctgcggatcctccaacagcgttcaaccaggccaagctgaattctttcatcacgcagtacagcaccggacaagtcagcgtggagatcgagtgggagctgcagaaggagaacagcaagcgctggaacccagagattcagtatacttccaactactacaaatctacaaatgtggactttgctgttaatactgagggtgtttactctgagcctcgccccattggcactcgttacctcacccgtaatctgtaa

SEQ ID NO: 5070 - DNA, 2214 bp, Adeno-associated virus
atggctgctgacggttatcttccagattggctcgaggacaacctctctgagggcattcgcgagtggtgggacctgaaacctggagcccccaagcccaaggccaaccagcagaagcaggacgacggccggggtctggtgcttcctggctacaagtacctcggacccttcaacggactcgacaagggggagcccgtcaacgcggcggacgcagcggccctcgagcacgacaaggcctacgaccagcagctcaaagcgggtgacaatccgtacctgcggtataaccacgccgacgccgagttccaggagcgtctgcaagaagatacgtcttttgggggcaacctcgggcgagcagtcttccaggccaagaagcgggttctcgaacctctcggtctggctgaggaagctgctaagacggctcctggaaagaagagaccggtagaaccgtcacctcagcgttcccccgactcctccacgggcatcggcaagaaaggccagcagcccgctagaaagagactgaactttgggcagactggcgactcagagtcagtccccgaccctcaaccaatcggagagccaccagcaggcccctctggtctgggatctggtacaatggctgcaggcggtggcgcaccaatggctgacaataacaagggcgccgacggagtgggtaatgcctcaggaaattggcattgcgattccacatggctgggcgacagagtcatcaccaccagcacccgaacctgggctttgcccacctacaacaaccacctctacaagcaaatctccagtcagtcagcaggtagcaccaacgacaacgtctacttcggctacagcaccccctgggggtattttgacttcaacagattccactgtcacttctcaccacgtgactggcagcggctcatcaacaacaactggggattccggcccaagaagctcaacttcaagctgttcaacatccaggtcaaggaggtcacaacgggtgacggcgtcacgaccatcgccaataaccttaccagcacggttcaggtcttttcggactcggaataccagctgccctacgtcctcggctccgcacaccagggctgcctgcctccgttcccggcggacgtcttcatgattccccagtacggctacctgactctgaacaatgacagccaatcggtgggtcgttcctctttctactgcctggaatatttcccttctcaaatgctgagaacgggcaacaacttcaccttcagctacaccttcgaggacgttcccttccacagcagctacgcacacagccagagcctggaccggctgatgaatcctcttatcgaccagtacctgtattacctggccagaacacagagcaacgcaggaggcacagctggcaatcgggaactgcagttttatcagggcgggcctaccaccatggccgaacaagccaaaaactggctgcctggaccttgcttccggcaacaaagagtctccaagacgctggatcaaaacaacaacagcaactttgcttggactggtgccaccaaataccatctaaatggaagaaattcattggttaatcccggtgtcgccatggcaacccacaaggacgacgaggaacgcttcttcccttcgagcggagtcctgatttttggaaaaactggagcagctaataagactacactggaaaatgtgttaatgacaaatgaagaggaaattcgtcctaccaacccggtagccaccgaggaatacgggactgttagcagcaacctgcaggcggctaacactgcagcccagacacaagttgtcaacaaccagggagccttacctggtatggtctggcagaaccgggacgtgtacctgcagggtcccatctgggccaagattcctcacacggacggcaactttcacccgtctccgctgatgggcggctttggactgaagcatccgcctcctcagatcctgatcaaaaacactcctgttcctgctaatcccccggaggtgtttacgcctgccaagtttgcttctttcatcacacagtacagcaccggccaggtcagcgtggagatcgagtgggagctgcagaaggagaacagcaagcgctggaacccagagattcagtatacctccaattttgacaaacagactggtgtggactttgccgttgacagccagggtgtttattctgagcctcgccccattggtactcgttacctcacccgtaatctgtaa

SEQ ID NO: 5071 - protein, 737 aa, Adeno-associated virus
MAADGYLPDWLEDNLSEGIREWWDLKPGAPKPKANQQKQDDGRGLVLPGYKYLGPFNGLDKGEPVNAADAAALEHDKAYDQQLKAGDNPYLRYNHADAEFQERLQEDTSFGGNLGRAVFQAKKRVLEPLGLAEEAAKTAPGKKRPVEPSPQRSPDSSTGIGKKGQQPARKRLNFGQTGDSESVPDPQPIGEPPAGPSGLGSGTMAAGGGAPMADNNKGADGVGNASGNWHCDSTWLGDRVITTSTRTWALPTYNNHLYKQISSQSAGSTNDNVYFGYSTPWGYFDFNRFHCHFSPRDWQRLINNNWGFRPKKLNFKLFNIQVKEVTTGDGVTTIANNLTSTVQVFSDSEYQLPYVLGSAHQGCLPPFPADVFMIPQYGYLTLNNDSQSVGRSSFYCLEYFPSQMLRTGNNFTFSYTFEDVPFHSSYAHSQSLDRLMNPLIDQYLYYLARTQSNAGGTAGNRELQFYQGGPTTMAEQAKNWLPGPCFRQQRVSKTLDQNNNSNFAWTGATKYHLNGRNSLVNPGVAMATHKDDEERFFPSSGVLIFGKTGAANKTTLENVLMTNEEEIRPTNPVATEEYGTVSSNLQAANTAAQTQVVNNQGALPGMVWQNRDVYLQGPIWAKIPHTDGNFHPSPLMGGFGLKHPPPQILIKNTPVPANPPEVFTPAKFASFITQYSTGQVSVEIEWELQKENSKRWNPEIQYTSNFDKQTGVDFAVDSQGVYSEPRPIGTRYLTRNL

SEQ ID NO: 5072 - DNA, 2217 bp, Adeno-associated virus
atggctgccgatggttatcttccagattggctcgaggacaacctctctgagggcattcgcgagtggtgggacctgaaacctggagccccgaaacccaaagccaaccagcaaaagcaggacgacggccggggtctggtgcttcctggctacaagtacctcggacccttcaacggactcgacaagggggagcccgtcaacgcggcggacgcagcggccctcgagcacgacaaggcctacgaccagcagctcaaagcgggtgacaatccgtacctgcggtataatcacgccgacgccgagtttcaggagcgtctgcaagaagatacgtcttttgggggcaacctcgggcgagcagtcttccaggccaagaagcgggttctcgaacctctcggtctggttgaggaaggcgctaagacggctcctggaaagaagagaccggtagagccgtcaccacagcgttcccccgactcctccacgggcatcggcaagaaaggccagcagcccgccagaaagagactcaatttcggtcagactggcgactcagagtcagtccccgaccctcaacctatcggagaacctccagcagcgccctctagtgtgggatctggtacaatggctgcaggcggtggcgcaccaatggcagacaataacgaaggtgccgacggagtgggtagttcctcgggaaattggcattgcgattccacatggctgggcgacagagtcatcaccaccagcacccgaacctgggccctgcccacctacaacaaccacctctacaagcaaatctccaacgggacctcgggaggcagcaccaacgacaacacctactttggctacagcaccccctgggggtattttgactttaacagattccactgccacttctcaccacgtgactggcagcgactcatcaacaacaactggggattccggcccaagagactcagcttcaagctcttcaacatccaggtcaaagaggtcacgcagaatgaaggcaccaagaccatcgccaataacctcaccagcaccatccaggtgtttacggactcggaataccagctgccgtacgtcctcggctctgcccaccagggctgcctgcctccgttcccggcggacgtcttcatgattcctcagtacggctacctgactctcaacaacggtagtcaggccgtgggacgttcctccttctactgcctggagtacttcccctctcagatgctgagaacgggcaacaacttttccttcagctacactttcgaggacgtgcctttccacagcagctacgcgcacagccagagtttggacaggctgatgaatcctctcatcgaccagtacctgtactacctgtcaagaacccagtctacgggaggcacagcgggaacccagcagttgctgttttctcaggccgggcctagcaacatgtcggctcaggccagaaactggctgcctggaccctgctacagacagcagcgcgtctccacgacactgtcgcaaaacaacaacagcaactttgcctggactggtgccaccaagtatcatctgaacggcagagactctctggtgaatccgggcgtcgccatggcaaccaacaaggacgacgaggaccgcttcttcccatccagcggcatcctcatgtttggcaagcagggagctggaaaagacaacgtggactatagcaacgtgatgctaaccagcgaggaagaaatcaagaccaccaaccccgtggccacagaacagtatggcgtggtggctgataacctacagcagcaaaacaccgctcctattgtgggggccgtcaacagccagggagccttacctggcatggtctggcagaaccgggacgtgtacctgcagggtcctatttgggccaagattcctcacacagatggcaactttcacccgtctcctttaatgggcggctttggacttaaacatccgcctcctcagatcctcatcaaaaacactcctgttcctgcggatcctccaacagcgttcaaccaggccaagctgaattctttcatcacgcagtacagcaccggacaagtcagcgtggagatcgtgtgggagctgcagaaggagaacagcaagcgcaggaacccagagattcagtatacttccaactactacaaatctacaaatgtggactttgctgttaatactgagggtgtttactctgagcctcgccccattggcactcgttacctcacccgtaatctgtaa

SEQ ID NO: 5073 - protein, 738 aa, Adeno-associated virus
MAADGYLPDWLEDNLSEGIREWWDLKPGAPKPKANQQKQDDGRGLVLPGYKYLGPFNGLDKGEPVNAADAAALEHDKAYDQQLKAGDNPYLRYNHADAEFQERLQEDTSFGGNLGRAVFQAKKRVLEPLGLVEEGAKTAPGKKRPVEPSPQRSPDSSTGIGKKGQQPARKRLNFGQTGDSESVPDPQPIGEPPAAPSSVGSGTMAAGGGAPMADNNEGADGVGSSSGNWHCDSTWLGDRVITTSTRTWALPTYNNHLYKQISNGTSGGSTNDNTYFGYSTPWGYFDFNRFHCHFSPRDWQRLINNNWGFRPKRLSFKLFNIQVKEVTQNEGTKTIANNLTSTIQVFTDSEYQLPYVLGSAHQGCLPPFPADVFMIPQYGYLTLNNGSQAVGRSSFYCLEYFPSQMLRTGNNFSFSYTFEDVPFHSSYAHSQSLDRLMNPLIDQYLYYLSRTQSTGGTAGTQQLLFSQAGPSNMSAQARNWLPGPCYRQQRVSTTLSQNNNSNFAWTGATKYHLNGRDSLVNPGVAMATNKDDEDRFFPSSGILMFGKQGAGKDNVDYSNVMLTSEEEIKTTNPVATEQYGVVADNLQQQNTAPIVGAVNSQGALPGMVWQNRDVYLQGPIWAKIPHTDGNFHPSPLMGGFGLKHPPPQILIKNTPVPADPPTAFNQAKLNSFITQYSTGQVSVEIVWELQKENSKRRNPEIQYTSNYYKSTNVDFAVNTEGVYSEPRPIGTRYLTRNL

SEQ ID NO: 5074 - protein, 738 aa, Adeno-associated virus
MAADGYLPDWLEDNLSEGIREWWDLKPGAPKPKANQQKQDDGRGLVLPGYKYLGPFNGLDKGEPVNAADAAALEHDKAYDQQLKAGDNPYLRYNHADAEFQERLQEDTSFGGNLGRAVFQAKKRVLEPLGLVEEGAKTAPGKKRPVEPSPQRSPDSSTGIGKKGQQPARKRLNFGQTGDSESVPDPQPIGEPPAAPSSVGSGTMAAGGGAPMADNNEGADGVGSSSGNWHCDSTWLGDRVITTSTRTWALPTYNNHLYKQISNGTSGGSTNDNTYFGYSTPWGYFDFNRFHCHFSPRDWQRLINNNWGFRPKRLSFKLFNIQVKEVTQNEGTKTIANNLTSTIQVFTDSEYQLPYVLGSAHQGCLPPFPADVFMIPQYGYLTLNNGSQAVGRSSFYCLEYFPSQMLRTGNNFSFSYTFEDVPFHSSYAHSQSLDRLMNPLIDQYLYYLSRTQSTGGTAGTQQLLFSQAGPSNMSAQARNWLPGPCYRQQRVSTTLSQNNNSNFAWTGATKYHLNGRDSLVNPGVAMATNKDDEDRFFPSSGILMFGKQGAGKDNVDYSNVMLTSEEEIKTTNPVATEQYGVVADNLQQQNTAPIVGAVNSQGALPGMVWQNRDVYLQGPIWAKIPHTDGNFHPSPLMGGFGLKHPPPQILIKNTPVPADPPTAFNQAKLNSFITQYSTGQVSVEIEWELQKENSKRWNPEIQYTSNYYKSTNVDFAVNTEGVYSEPRPIGTRYLTRNL

SEQ ID NO: 5075 - protein, 738 aa, Adeno-associated virus
MAADGYLPDWLEDNLSEGIREWWDLKPGAPKPKANQQKQDDGRGLVLPGYKYLGPFNGLDKGEPVNAADAAALEHDKAYDQQLKAGDNPYLRYNHADAEFQERLQEDTSFGGNLGRAVFQAKKRVLEPLGLVEEGAKTAPGKKRPVEPSPQRSPDSSTGIGKKGQQPARKRLNFGQTGDSESVPDPQPIGEPPAAPSSVGSGTMAAGGGAPMADNNEGADGVGSSSGNWHCDSTWLGDRVITTSTRTWALPTYNNHLYKQISNGTSGGSTNDNTYFGYSTPWGYFDFNRFHCHFSPRDWQRLINNNWGFRPKRLSFKLFNIQVKEVTQNEGTKTIANNLTSTIQVFTDSEYQLPYVLGSAHQGCLPPFPADVFMIPQYGYLTLNNGSQAVGRSSFYCLEYFPSQMLRTGNNFSFSYTFEDVPFHSSYAHSQSLDRLMNPLIDQYLYYLSRTQSTGGTAGTQQLLFSQAGPSNMSAQARNWLPGPCYRQQRVSTTLSQNNNSNFAWTGATKYHLNGRDSLVNPGVAMATNKDDEDRFFPSSGILMFGKQGAGKDNVDYSNVMLTSEEEIKTTNPVATEQYGVVADNLQQQNTAPIVGAVNSQGALPGMVWQNRDVYLQGPIWAKIPHTDGNFHPSPLMGGFGLKHPPPQILIKNTPVPADPPTAFNQAKLNSFITQYSTGQVSVEIVWELQKENSKRWNPEIQYTSNYYKSTNVDFAVNTEGVYSEPRPIGTRYLTRNL

SEQ ID NO: 5076 - protein, 738 aa, Adeno-associated virus; identical to SEQ ID NO: 5074

SEQ ID NO: 5077 - DNA, 2214 bp, Adeno-associated virus
atggctgctgacggttatcttccagattggctcgaggacaacctctctgagggcattcgcgagtggtgggacctgaaacctggagcccccaagcccaaggccaaccagcagaagcaggacgacggccggggtctggtgcttcctggctacaagtacctcggacccttcaacggactcgacaagggggagcccgtcaacgcggcggacgcagcggccctcgagcacgacaaggcctacgaccagcagctcaaagcgggtgacaatccgtacctgcggtataaccacgccgacgccgagtttcaggagcgtctgcaagaagatacgtcttttgggggcaacctcgggcgagcagtcttccaggccaagaagcgggttctcgaacctctcggtctggttgaggaagctgctaagacggctcctggaaagaagagaccggtagaaccgtcacctcagcgttcccccgactcctccacgggcatcggcaagaaaggccagcagcccgctagaaagagactgaactttgggcagactggcgactcagagtcagtccccgaccctcaaccaatcggagaaccaccagcaggcccctctggtctgggatctggtacaatggctgcaggcggtggcgctccaatggcagacaataacgaaggcgccgacggagtgggtaatgcctcaggaaattggcattgcgattccacatggctgggcgacagagtcatcaccaccagcacccgaacctgggctttgcccacctacaacaaccacctctacaagcaaatctccagtcagtcagcaggtagcaccaacgacaacgtctacttcggctacagcaccccctgggggtattttgacttcaacagattccactgtcacttctcaccacgtgactggcagcggctcatcaacaacaactggggattccggcccaagaagctcaacttcaagctgttcaacatccaggtcaaggaggtcacaacgaatgacggcgtcacgaccatcgccaataaccttaccagcacggttcaggtcttttcggactcggaataccagctgccctacgtcctcggctccgcacaccagggctgcctgcctccgttcccggcggacgtcttcatgattccccagtacggctacctgactctgaacaatggcagccaatcggtgggtcgttcctctttctactgcctggaatatttcccttctcaaatgctgagaacgggcaacaacttcaccttcagctacaccttcgaggacgttcccttccacagcagctacgcacacagccagagcctggaccggctgatgaatcctcttatcgaccagtacctgtattacctggccagaacacagagcaacgcaggaggcacagctggcaatcgggaactgcagttttatcagggcgggcctaccaccatggccgaacaagccaaaaactggctgcctagaccttgcttccggcaacaaagagtctccaagacgctggatcaaaacaacaacagcaactttgcttggactggtgccaccaaataccatctaaatggaagaaattcattggttaatcccggtgtcgccatggcaacccacaaggacgacgaggaacgcttcttcccttcgagcggagtcctgatttttggaaaaactggagcagctaataagactacactggaaaatgtgttaatgacaaatgaagaggaaattcgtcctaccaacccggtagccaccgaggaatacgggactgttagcagcaacctgcaggcggctaacactgcagcccagacacaagttgtcaacaaccagggagccttacctggtatggtctggcagaaccgggacgtgtacctgcagggtcccatctgggccaagattcctcacacggacggcaactttcacccgtctccgctgatgggcggctttggactgaagcatccgcctcctcagatcctgatcaaaaacactcctgttcctgctaatcccccggaggtgtttacgcctgccaagtttgcttctttcatcacacagtacagcaccggccaggtcagcgtggagatcgagtgggagctgcagaaggagaacagcaagcgctggaacccagagattcagtatacctccaattttgacaaacagactggtgtggactttgccgttgacagccagggtgtttattctgagcctcgccccattggtactcgttacctcacccgtaatctgtaa

SEQ ID NO: 5078 - protein, 737 aa, Adeno-associated virus
MAADGYLPDWLEDNLSEGIREWWDLKPGAPKPKANQQKQDDGRGLVLPGYKYLGPFNGLDKGEPVNAADAAALEHDKAYDQQLKAGDNPYLRYNHADAEFQERLQEDTSFGGNLGRAVFQAKKRVLEPLGLVEEAAKTAPGKKRPVEPSPQRSPDSSTGIGKKGQQPARKRLNFGQTGDSESVPDPQPIGEPPAGPSGLGSGTMAAGGGAPMADNNEGADGVGNASGNWHCDSTWLGDRVITTSTRTWALPTYNNHLYKQISSQSAGSTNDNVYFGYSTPWGYFDFNRFHCHFSPRDWQRLINNNWGFRPKKLNFKLFNIQVKEVTTNDGVTTIANNLTSTVQVFSDSEYQLPYVLGSAHQGCLPPFPADVFMIPQYGYLTLNNGSQSVGRSSFYCLEYFPSQMLRTGNNFTFSYTFEDVPFHSSYAHSQSLDRLMNPLIDQYLYYLARTQSNAGGTAGNRELQFYQGGPTTMAEQAKNWLPRPCFRQQRVSKTLDQNNNSNFAWTGATKYHLNGRNSLVNPGVAMATHKDDEERFFPSSGVLIFGKTGAANKTTLENVLMTNEEEIRPTNPVATEEYGTVSSNLQAANTAAQTQVVNNQGALPGMVWQNRDVYLQGPIWAKIPHTDGNFHPSPLMGGFGLKHPPPQILIKNTPVPANPPEVFTPAKFASFITQYSTGQVSVEIEWELQKENSKRWNPEIQYTSNFDKQTGVDFAVDSQGVYSEPRPIGTRYLTRNL

SEQ ID NO: 5079 - DNA, 2214 bp, Adeno-associated virus
atggctgctgacggttatcttccagattggctcgaggacaacctctctgagggcattcgcgagtggtgggacctgaaacctggagcccccaagcccaaggccaaccagcagaagcaggacgacggccggggtctggtgcttcctggctacaagtacctcggacccttcaacggactcgacaagggggagcccgtcaacgcggcggacgcagcggccctcgagcacgacaaggcctacgaccagcagctcaaagcgggtgacaatccgtacctgcggtataaccatgccgacgccgagtttcaggagcgtctgcaagaagatacgtcttttgggggcaacctcgggcgagcagtcctccaggccaagaagcgggttctcgaacctctcggtctggttgaggaagctgctaagacggctcctggaaagaagagaccggtagaaccgtcacctcagcgttcccccgactcctccacgggcatcggcaagaaaggccagcagcccgctagaaagagactgaactttgggcagactggcgactcagagtcagtccccgaccctcaaccaatcggagaaccaccagcaggcccctctggtctgggatctggtacaatggctgcaggcggtggcgctccaatggcagacaataacgaaggcgccgacggagtgggtaatgcctcaggaaattggcattgcgattccacatggctgggcgacagagtcatcaccaccagcacccgaacctgggctttgcccacctacaacaaccacctctacaagcaaatctccagtcagtcagcaggtagcaccaacgacaacgtctacttcggctacagcaccccctgggggtattttgacttcaacagattccactgtcacttctcaccacgtgactggcagcggctcatcaacaacaactggggattccggcccaagaagctcaacttcaagctgttcaacatccaggtcaaggaggtcacaacgaatgacggcgtcacgaccatcgccaataaccttaccagcacggttcaggtcttttcggactcggaataccagctgccctacgtcctcggctccgcacaccagggctgcctgcctccgttcccggcggacgtcttcatgattccccagtacggctacctgactctgaacaatggcagccaatcggtgggtcgttcctctttctactgcctggaatatttcccttctcaaatgctgagaacgggcaacaacttcaccttcagctacaccttcgaggacgttcccttccacagcagctacgcacacagccagagcctggaccggctgatgaatcctcttatcgaccagtacctgtattacctggccagaacacagagcaacgcaggaggcacagctggcaatcgggaactgcagttttatcagggcgggcctaccaccatggccgaacaagccaaaaactggctgcctggaccttgcttccggcaacaaagagtctccaagacgctggatcaaaacaacaacagcaactttgcttggactggtgccaccaaataccatctaaatggaagaaattcattggttaatcccggtgtcgccatggcaacccacaaggacgacgaggaacgcttcttcccttcgagcggagtcctgatttttggaaaaactggagcagctaataagactacactggaaaatgtgttaatgacaaatgaagaggaaattcgtcctaccaacccggtagccaccgaggaatacgggactgttagcagcaacctgcaggcggctaacactgcagcccagacacaagttgtcaacaaccagggagccttacctggtatggtctggcagaaccgggacgtgtacctgcagggtcccatctgggccaagattcctcacacggacggcaactttcacccgtctccgctgatgggcggctttggactgaagcatccgcctcctcagatcctgatcaaaaacactcctgttcctgctaatcccccggaggtgtttacgcctgccaagtttgcttctttcatcacacagtacagcaccggccaggtcagcgtggagatcgagtgggagctgcagaaggagaacagcaagcgctggaacccagagattcagtatacctccaattttgacaaacagactggtgtggactttgccgttgacagccagggtgtttattctgagcctcgccccattggtactcgttacctcacccgtaatctgtaa

SEQ ID NO: 5080 - protein, 737 aa, Adeno-associated virus; identical to SEQ ID NO: 5040

SEQ ID NO: 5081 - protein, 737 aa, Adeno-associated virus
MAADGYLPDWLEDNLSEGIREWWDLKPGAPKPKANQQKQDDGRGLVLPGYKYLGPFNGLDKGEPVNAADAAALEHDKAYDQQLKAGDNPYLRYNHADAEFQERLQEDTSFGGNLGRAVLQAKKRVLEPLGLVEEAAKTAPGKKRPVEPSPQRSPDSSTGIGKKGQQPARKRLNFGQTGDSESVPDPQPIGEPPAGPSGLGSGTMAAGGGAPMADNNEGADGVGNASGNWHCDSTWLGDRVITTSTRTWALPTYNNHLYKQISSQSAGSTNDNVYFGYSTPWGYFDFNRFHCHFSPRDWQRLINNNWGFRPKKLNFKLFNIQVKEVTTNDGVTTIANNLTSTVQVFSDSEYQLPYVLGSAHQGCLPPFPADVFMIPQYGYLTLNNGSQSVGRSSFYCLEYFPSQMLRTGNNFTFSYTFEDVPFHSSYAHSQSLDRLMNPLIDQYLYYLARTQSNAGGTAGNRELQFYQGGPTTMAEQAKNWLPGPCFRQQRVSKTLDQNNNSNFAWTGATKYHLNGRNSLVNPGVAMATHKDDEERFFPSSGVLIFGKTGAANKTTLENVLMTNEEEIRPTNPVATEEYGTVSSNLQAANTAAQTQVVNNQGALPGMVWQNRDVYLQGPIWAKIPHTDGNFHPSPLMGGFGLKHPPPQILIKNTPVPANPPEVFTPAKFASFITQYSTGQVSVEIEWELQKENSKRWNPEIQYTSNFDKQTGVDFAVDSQGVYSEPRPIGTRYLTRNL

SEQ ID NO: 5082 - DNA, 2217 bp, Adeno-associated virus
atggctgccgatggttatcttccagattggctcgaggacaacctctctgagggcattcgcgagtggtgggacctgaaacctggagccccgaaacccaaagccaaccagcaaaagcaggacgacggccggggtctggtgcttcctggctacaagtacctcggacccttcaacggactcgacaagggggagcccgtcaacgcggcggacgcagcggccctcgagcacgacaaggcctacgaccagcagctcaaagcgggtgacaatccgtacctgcggtataatcacgccgacgccgagtttcaggagcgtctgcaagaagatacgtcttttgggggcaacctcgggcgagcagtcttccaggccaagaagcgggttctcgaacctctcggtctggttgaggaaggcgctaagacggctcctggaaagaagagaccggtagagccgtcaccacagcgttcccccgactcctccacgggcatcggcaagaaaggccagcagcccgccagaaagagactcaatttcggtcagactggcgactcagagtcagtccccgaccctcaacctatcggagaacctccagcagcgccctctagtgtgggatctggtacaatggctgcaggcggtggcgcaccaatggcagacaataacgaaggtgccgacggagtgggtagttcctcgggaaattggcattgcgattccacatggctgggcgacagagtcatcaccaccagcacccgaacctgggccctgcccacctacaacaaccacctctacaagcaaatctccaacgggacctcgggaggcagcaccaacgacaacacctactttggctacagcaccccctgggggtattttgactttaacagattccactgccacttctcaccacgtgactggcagcgactcatcaacaacaactggggattccggcccaagagactcagcttcaagctcttcaacatccaggtcaaagaggtcacgcagaatgaaggcaccaagaccatcgccaataacctcaccagcaccatccaggtgtttacggactcggaataccagctgccgtacgtcctcggctctgcccaccagggctgcctgcctccgttcccggcggacgtcttcatgattcctcagtacggctacctgactctcaacaacggtagtcaggccgtgggacgttcctccttctactgcctggagtacttcccctctcagatgctgagaacgggcaacaacttttccttcagctacactttcgaggacgtgcctttccacagcagctacgcgcacagccagagtttggacaggctgatgaatcctctcatcgaccagtacctgtactacctgtcaagaacccagtctacgggaggcacagcgggaacccagcagttgctgttttctcaggccgggcctagcaacatgtcggctcaggccagaaactggctgcctggaccctgctacagacagcagcgcgtctccacgacactgtcgcaaaacaacaacagcaactttgcctggactggtgccaccaagtatcatctgaacggcagagactctctggtgaatccgggcgtcgccatggcaaccaacaaggacgacgaggaccgcttcttcccacccagcggcatcctcatgtttggcaagcagggagctggaaaagacaacgtggactatagcaacgtgatgctaaccagcgaggaagaaatcaagaccaccaaccccgtggccacagaacagtatggcgtggtggctgataacctacagcagcaaaacaccgctcctattgtgggggccgtcaacagccagggagccttacctggcatggtctggcagaaccgggacgtgtacctgcagggtcctatttgggccaagattcctcacacagatggcaactttcacccgtctcctttaatgggcggctttggacttaaacatccgcctcctcagatcctcatcaaaaacactcctgttcctgcggatcctccaacagcgttcaaccaggccaagctgaattctttcatcacgcagtacagcaccggacaagtcagcgtggtgatcgagtgggagctgcagaaggagaacagcaagcgctggaacccagagattcagtatacttccaactactacaaatctacaaatgtggactttgctgttaatactgagggtgtttactctgagcttcgccccattggcactcgttacctcacccgtaatctgtaa

SEQ ID NO: 5083 - protein, 738 aa, Adeno-associated virus
MAADGYLPDWLEDNLSEGIREWWDLKPGAPKPKANQQKQDDGRGLVLPGYKYLGPFNGLDKGEPVNAADAAALEHDKAYDQQLKAGDNPYLRYNHADAEFQERLQEDTSFGGNLGRAVFQAKKRVLEPLGLVEEGAKTAPGKKRPVEPSPQRSPDSSTGIGKKGQQPARKRLNFGQTGDSESVPDPQPIGEPPAAPSSVGSGTMAAGGGAPMADNNEGADGVGSSSGNWHCDSTWLGDRVITTSTRTWALPTYNNHLYKQISNGTSGGSTNDNTYFGYSTPWGYFDFNRFHCHFSPRDWQRLINNNWGFRPKRLSFKLFNIQVKEVTQNEGTKTIANNLTSTIQVFTDSEYQLPYVLGSAHQGCLPPFPADVFMIPQYGYLTLNNGSQAVGRSSFYCLEYFPSQMLRTGNNFSFSYTFEDVPFHSSYAHSQSLDRLMNPLIDQYLYYLSRTQSTGGTAGTQQLLFSQAGPSNMSAQARNWLPGPCYRQQRVSTTLSQNNNSNFAWTGATKYHLNGRDSLVNPGVAMATNKDDEDRFFPPSGILMFGKQGAGKDNVDYSNVMLTSEEEIKTTNPVATEQYGVVADNLQQQNTAPIVGAVNSQGALPGMVWQNRDVYLQGPIWAKIPHTDGNFHPSPLMGGFGLKHPPPQILIKNTPVPADPPTAFNQAKLNSFITQYSTGQVSVVIEWELQKENSKRWNPEIQYTSNYYKSTNVDFAVNTEGVYSELRPIGTRYLTRNL

SEQ ID NO: 5084 - DNA, 2214 bp, Adeno-associated virus
atggctgctgacggttatcttccagattggctcgaggacaacctctctgagggcattcgcgagtggtgggacctgaaacctggagcccccaagcccaaggccaaccagcagaagcaggacgacggccggggtctggtgcttcctggctacaagtacctcggacccttcaacggactcgacaagggggagcccgtcaacgcggcggacgcagcggccctcgagcacgacaaggcctacgaccagcagctcaaagcgggtgacaatccgtacctgcggtataaccacgccgacgccgagtttcaggagcgtctgcaagaagatacgtcttttgggggcaacctcgggcgagcagtcttccaggccaagaagcgggttctcgaacctctcggtctggttgaggaagctgctaagacggctcctggaaagaagagaccggtagaaccgtcacctcagcgttcccccgactcctccacgggcatcggcaagaaaggccagcagcccgctagaaagagactgaactttgggcagactggcgactcagagtcagtccccgaccctcaaccaatcggagaaccaccagcaggcccctctggtctgggatctggtacaatggctgcaggcggtggcgccccaatggcagacaataacgaaggcgccgacggagtgggtaatgcctcaggaaattggcattgcgattccacatggctgggcgacagagtcatcaccaccagcacccgaacctgggctttgcccacctacaacaaccacctctacaagcaaatctccagtcagtcagcaggtagcaccaacgacaacgtctacttcggctacagcaccccctgggggtattttgacttcaacagattccactgtcacttctcaccacgtgactggcagcggctcatcaacaacaactggggattccggcccaagaagctcaacttcaagctgttcaacatccaggtcaaggaggtcacaacgaatgacggcgtcacgaccatcgccaataaccttaccagcacggttcaggtcttttcggactcggaataccagctgccctacgtcctcggctccgcacaccagggctgcctgcctccgttcccggcggacgtcttcatgattccccagtacggctacctgactctgaacaatggcagccaatcggtgggtcgttcctctttctactgcctggaatatttcccttctcaaatgctgagaacgggcaacaacttcaccatcagctacaccttcgaggacgttcccttccacagcagctacgcacacagccagagcctggaccggctgatgaatcctcttatcgaccagtacctgtattacctggccagaacacagagcaacgcaggaggcacagctggcaatcaggaactgcagttttatcagggcgggcctaccaccatggccgaacaagccaaaaactggctgcctggaccttgcttccggcaacaaagagtctccaagacgctggatcaaaacaacaacagcaactttgcttggactggtgccaccaaataccatctaaatggaagaaattcattggttaatcccggtgtcgccatggcaacccacaaggacgacgaggaacgcttcttcccttcgagcggagtcctgatttttggaaaaactggagcagctaataagactacactggaaaatgtgttaatgacaaatgaagaggaaattcgtcctaccaacccggtagccaccgaggaatacgggactgttagcagcaacctgcaggcggctaacactgcagcccagacacaagttgtcaacaaccagggagccttacctggtatggtctggcagaaccgggacgtgtacctgcagggtcccatctgggccaagattcctcacacagatggcaactttcacccgtctcctttaatgggcggctttggacttaaacatccgcctcctcagatcctcatcaaaaacactcctgttcctgcggatcctccaacagcgttcaaccaggccaagctgaattctttcatcacgcagtacagcaccggacaagtcagcgtggagatcgagtgggagctgcagaaggagaacagcaagcgctggaacccagagattcagtatacttccaactactacaaatctacaaatgtggactttgctgttaatactgagggtgtttactctgagcctcgccccattggcactcgttacctcacccgtaatctgtaa

SEQ ID NO: 5085 - protein, 737 aa, Adeno-associated virus
MAADGYLPDWLEDNLSEGIREWWDLKPGAPKPKANQQKQDDGRGLVLPGYKYLGPFNGLDKGEPVNAADAAALEHDKAYDQQLKAGDNPYLRYNHADAEFQERLQEDTSFGGNLGRAVFQAKKRVLEPLGLVEEAAKTAPGKKRPVEPSPQRSPDSSTGIGKKGQQPARKRLNFGQTGDSESVPDPQPIGEPPAGPSGLGSGTMAAGGGAPMADNNEGADGVGNASGNWHCDSTWLGDRVITTSTRTWALPTYNNHLYKQISSQSAGSTNDNVYFGYSTPWGYFDFNRFHCHFSPRDWQRLINNNWGFRPKKLNFKLFNIQVKEVTTNDGVTTIANNLTSTVQVFSDSEYQLPYVLGSAHQGCLPPFPADVFMIPQYGYLTLNNGSQSVGRSSFYCLEYFPSQMLRTGNNFTISYTFEDVPFHSSYAHSQSLDRLMNPLIDQYLYYLARTQSNAGGTAGNQELQFYQGGPTTMAEQAKNWLPGPCFRQQRVSKTLDQNNNSNFAWTGATKYHLNGRNSLVNPGVAMATHKDDEERFFPSSGVLIFGKTGAANKTTLENVLMTNEEEIRPTNPVATEEYGTVSSNLQAANTAAQTQVVNNQGALPGMVWQNRDVYLQGPIWAKIPHTDGNFHPSPLMGGFGLKHPPPQILIKNTPVPADPPTAFNQAKLNSFITQYSTGQVSVEIEWELQKENSKRWNPEIQYTSNYYKSTNVDFAVNTEGVYSEPRPIGTRYLTRNL

SEQ ID NO: 5086 - DNA, 2217 bp, Adeno-associated virus
atggctgccgatggttatcttccagattggctcgaggacaacctctctgagggcattcgcgagtggtgggacctgaaacctggagccccgaaacccaaagccaaccagcaaaagcaggacgacggccggggtctggtgcttcctggctacaagtacctcggacccttcaacggactcgacaagggggagcccgtcaacgcggcggacgcagcggccctcgagcacgacaaggcctacgaccagcagctcaaagcgggtgacaatccgtacctgcggtataatcacgccgacgccgagtttcaggagcgtctgcaagaagatacgtcttttgggggcaacctcgggcgagcagtcttccaggccaagaagcgggttctcgaacctctcggtctggttgaggaaggcgctaagacggctcctggaaagaagagaccggtagagccgtcaccacagcgttcccccgactcctccacgggcatcggcaagaaaggccagcagcccgccagaaagagactcaatttcggtcagactggcgactcagagtcagtccccgaccctcaacctatcggagaacctccagcagcgccctctagtgtgggatctggtacaatggctgcaggcggtggcgcaccaatggcagacaataacgaaggtgccgacggagtgggtagttcctcgggaaattggcattgcgattccacatggctgggcgacagagtcatcaccaccagcacccgaacctgggccctgcccgcctacaacaaccacctctacaagcaaatctccaacgggacctcgggaggcagcaccaacgacaacacctactttggctacagcaccccctgggggtattttgactttaacagattccactgccacttctcaccacgtgactggcagcgactcatcaacaacaactggggattccggcccaagagactcagcttcaagctcttcaacatccaggtcaaagaggtcacgcagaatgaaggcaccaagaccatcgccaataacctcaccagcaccatccaggtgtttacggactcggaataccagctgccgtacgtcctcggctctgcccaccagggctgcctgcctccgttcccggcggatgtcttcatgattcctcagtacggctacctgactctcaacaacggtagtcaggccgtgggacgttcctccttctactgcctggagtacttcccctctcagatgctgagaacgggcaacaacttttccttcagctacactttcgaggacgtgcctttccacagcagctacgcgcacagccagagtttggacaggctgatgaatcctctcatcgaccagtacctgtactacctgtcaagaacccagtctacgggaggcacagcgggaacccagcagttgctgttttctcaggccgggcctagcaacatgtcggctcaggccagaaactggctgcctggaccctgctacagacagcagcgcgtctccacgacactgtcgcaaaacaacaacagcaactttgcctggactggtgccaccaagtatcatctgagcggcagagactctctggtgaatccgggcgtcgccatggcaaccaacaaggacgacgaggaccgcttcttcccatccagcggcatcctcatgtttggcaagcagggagctggaaaagacaacgtggactatagcaacgtgatgctaaccagcgaggaagaaatcaagaccaccaaccccgtggccacagaacagtatggcgtggtggctgataacctacagcagcaaaacaccgctcctattgtgggggccgtcaacagccagggagccttacctggcatggtctggcagaaccgggacgtgtacctgcagggtcctatttgggccaagattcctcacacagatggcaactttcacccgtctcctttaatgggcggctttggacttaaacatccgcctcctcagatcctcatcaaaaacactcctgttcctgcggatcctccaacagcgttcaaccaggccaagctgaattcttccatcacgcagtacagcaccggacaagtcagcgtggagatcgagtgggagctgcagaaggagaacagcaagcgctggaacccagagattcagtatacttccaactactacaaatctacaaatgtggactttgctgttaatactgagggtgtttactctgagcctcgccccattggcactcgttacctcacccgtaatttgtaa

SEQ ID NO: 5087 - protein, 738 aa, Adeno-associated virus
MAADGYLPDWLEDNLSEGIREWWDLKPGAPKPKANQQKQDDGRGLVLPGYKYLGPFNGLDKGEPVNAADAAALEHDKAYDQQLKAGDNPYLRYNHADAEFQERLQEDTSFGGNLGRAVFQAKKRVLEPLGLVEEGAKTAPGKKRPVEPSPQRSPDSSTGIGKKGQQPARKRLNFGQTGDSESVPDPQPIGEPPAAPSSVGSGTMAAGGGAPMADNNEGADGVGSSSGNWHCDSTWLGDRVITTSTRTWALPAYNNHLYKQISNGTSGGSTNDNTYFGYSTPWGYFDFNRFHCHFSPRDWQRLINNNWGFRPKRLSFKLFNIQVKEVTQNEGTKTIANNLTSTIQVFTDSEYQLPYVLGSAHQGCLPPFPADVFMIPQYGYLTLNNGSQAVGRSSFYCLEYFPSQMLRTGNNFSFSYTFEDVPFHSSYAHSQSLDRLMNPLIDQYLYYLSRTQSTGGTAGTQQLLFSQAGPSNMSAQARNWLPGPCYRQQRVSTTLSQNNNSNFAWTGATKYHLSGRDSLVNPGVAMATNKDDEDRFFPSSGILMFGKQGAGKDNVDYSNVMLTSEEEIKTTNPVATEQYGVVADNLQQQNTAPIVGAVNSQGALPGMVWQNRDVYLQGPIWAKIPHTDGNFHPSPLMGGFGLKHPPPQILIKNTPVPADPPTAFNQAKLNSSITQYSTGQVSVEIEWELQKENSKRWNPEIQYTSNYYKSTNVDFAVNTEGVYSEPRPIGTRYLTRNL

SEQ ID NO: 5088 - protein, 736 aa, Adeno-associated virus
MAADGYLPDWLEDNLSEGIREWWDLKPGAPKPKANQQKQDDGRGLVLPGYKYLGPFNGLDKGEPVNAADAAALEHDKAYDQQLKAGDNPYLRYNHADAEFQERLQEDTSFGGNLGRAVFQAKKRVLEPLGLVEEGAKTAPGKKRPVEQSPQEPDSSSGIGKTGQQPAKKRLNFGQTGDSESVPDPQPLGEPPATPAAVGPTTMASGGGAPMADNNEGADGVGNASGNWHCDSTWLGDRVITTSTRTWALPTYNNHLYKQISSASTGASNDNHYFGYSTPWGYFDFNRFHCHFSPRDWQRLINNNWGFRPKRLNFKLFNIQVKEVTTNDGVTTIANNLTSTVQVFSDSEYQLPYVLGSAHQGCLPPFPADVFMIPQYGYLTLNNGSQAVGRSSFYCLEYFPSQMLRTGNNFTFSYTFEEVPFHSSYAHSQSLDRLMNPLIDQYLYYLNRTQNQSGSAQNKDLLFSRGSPAGMSVQPKNWLPGPCYRQQRVSKTKTDNNNSNFTWTGASKYNLNGRESIINPGTAMASHKDDEDKFFPMSGVMIFGKESAGASNTALDNVMITDEEEIKATNPVATERFGTVAVNFQSSSTDPATGDVHAMGALPGMVWQDRDVYLQGPIWAKIPHTDGHFHPSPLMGGFGLKNPPPQILIKNTPVPANPPAEFSATKFASFITQYSTGQVSVEIEWELQKENSKRWNPEVQYTSNYAKSANVDFTVDNNGLYTEPRPIGTRYLTRPL

SEQ ID NO: 5089 - DNA, 2217 bp, Adeno-associated virus
atggctgctgacggttatcttccagattggctcgaggacaacctctctgagggcattcgcgagtggtgggacctgaaacctggagcccccaagcccaaggccaaccagcagaagcaggacgacggccggggtctggtgcttcctggctacaagtacctcggacccttcaacggactcgacaagggggagcccgtcaacgcggcggacgcagcggccctcgagcacgacaaggcctacgaccagcagctcaaagcgggtgacaatccgtacctgcggtataaccacgccgacgccgagtttcaggagcgtctgcaagaagatacgtcttttgggggcaacctcgggcgagcagtcttccaggccaagaagcgggttctcgaacctctcggtctggttgaggaagctgctaagacggctcctggaaagaagagaccggtagaaccgtcacctcagcgttcccccgactcctccacgggcatcggcaagaaaggccagcagcccgctaaaaagagactgaactttggtcagactggcgactcagagtcagtccccgaccctcaaccaatcggagaaccaccagcaggcccctctggtctgggatctggtacaatggctgcaggcggtggcgctccaatggcagacaataacgaaggcgccgacggagtgggtagttcctcaggaaattggcattgcgattccacatggctgggcgacagagtcatcaccaccagcacccgaacctgggccctgcccacctacaacaaccacctctacaagcaaatatccaatgggacatcgggaggaagcaccaacgacaacacctacttcggctacagcaccccctgggggtattttgacttcaacagattccactgccacttctcaccacgtgactggcagcgactcatcaacaacaactggggattccggccaaaaagactcagcttcaagctcttcaacatccaggtcaaggaggtcacgcagaatgaaggcaccaagaccatcgccaataaccttaccagcacgattcaggtatttacggactcggaataccagctgccgtacgtcctcggctccgcgcaccagggctgcctgcctccgttcccggcggacgtcttcatgattccccagtacggctaccttacactgaacaatggaagtcaagccgtaggccgttcctccttctactgcctggaatattttccatctcaaatgctgcgaactggaaacaattttgaattcagctacaccttcgaggacgtgcctttccacagcagctacgcacacagccagagcttggaccgactgatgaatcctctcatcgaccagtacctgtactacttatccagaactcagtccacaggaggaactcaaggtacccagcaattgttattttctcaagctgggcctgcaaacatgtcggctcaggctaagaactggctacctggaccttgctaccggcagcagcgagtctctacgacactgtcgcaaaacaacaacagcaactttgcttggactggtgccaccaaatatcacctgaacggaagagactctttggtaaatcccggtgtcgccatggcaacccacaaggacgacgaggaacgcttcttcccgtcgagtggagtcctgatgtttggaaaacagggtgctggaagagacaatgtggactacagcagcgttatgctaaccagcgaagaagaaattaaaaccactaaccctgtagccacagaacaatacggtgtggtggctgacaacttgcagcaaaccaatacagggcctattgtgggaaatgtcaacagccaaggagccttacctggcatggtctggcagaaccgagacgtgtacctgcagggtcccatctgggccaagattcctcacacggacggcaacttccacccttcaccgctaatgggaggatttggactgaagcacccacctcctcagatcctgatcaagaacacgccggtacctgcggatcctccaacaacgttcagccaggcgaaattggcttccttcattacgcagtacagcaccggacaggtcagcgtggaaatcgagtgggagctgcagaaggagaacagcaaacgctggaacccagagattcagtacacttcaaactactacaaatctacaaatgtggactttgctgtcaatacagagggaacttattctgagcctcgccccattggtactcgttacctcacccgtaatctgtaa

SEQ ID NO: 5090 - protein, 738 aa, Adeno-associated virus
MAADGYLPDWLEDNLSEGIREWWDLKPGAPKPKANQQKQDDGRGLVLPGYKYLGPFNGLDKGEPVNAADAAALEHDKAYDQQLKAGDNPYLRYNHADAEFQERLQEDTSFGGNLGRAVFQAKKRVLEPLGLVEEGAKTAPGKKRPVEPSPQRSPDSSTGIGKKGQQPARKRLNFGQTGDSESVPDPQPLGEPPAAPSSVGSGTMAAGGGAPMADNNEGADGVGSSSGNWHCDSTWLGDRVITTSTRTWALPTYNNHLYKQISNGTSGGSTNDNTYFGYSTPWGYFDFNRFHCHFSPRDWQRLINNNWGFRPKRLSFKLFNIQVKEVTQNEGTKTIANNLTSTIQVFTDSEYQLPYVLGSAHQGCLPPFPADVFMIPQYGYLTLNNGSQAVGRSSFYCLEYFPSQMLRTGNNFSFSYTFEDVPFHSSYAHSQSLDRLMNPLIDQYLYYLSRTQSTGGTAGTQQLLFSQAGPSNMSAQARNWLPGPCYRQQRVSTTLSQNNNSNFAWTGATKYHLNGRDSLVNPGVAMATNKDDEDRFFPSSGILMFGKQGAGKDNVDYSNVMLTSEEEIKTTNPVATEQYGVVADNLQRQNTAPIVGAVNSQGALPGMVWQNRDVYLQGPIWAKIPHTDGNFHPSPLMGGFGLKHPPPQILIKNTPVPADPPTAFNQAKLNSFITQYSTGQVSVEIEWELQKENSKRWNPEIQYTSNYYKSTNVDFAVNTEGVYSEPRPIGTRYLTRNL

SEQ ID NO: 5091 - protein, 736 aa, Adeno-associated virus
MAADGYLPDWLEDNLSEGIREWLNLKPGAPQPKANQQKQDNARGLVLPGYKYLGPFNGLDKGDPVNEADAAALEHDKAYGQQLKAGDNPYLKYNHADAEFQERLQKDTSFGGNLGKAVFQAKKRILEPLGLVETPAKTAPGKKRPVDPSPQRSPDSSSGIGKKSPHPARKRLNFGQTGEAESVPDPQPIGEPPSDPSSVGSGTMAAGGGAPMADNNEGADGVGNSSGNWHCDSTWLGDRVITTSTRTWALPTYNNHLYKQISSQSGATNDNHYFGYSTPWGYFDFNRFHCHFSPRDWQRLINNNWGFRPKRLSFKLFNIQVKEVTQNDGTTTIANNLTSTVQVFTDSEYQLPYVLGSAHQGCLPPFPADVFMIPQYGYLTLNNGSQAVGRSSFYCLEYFPSQMLRTGNNFQFSYTFEDVPFHSSYAHSQSLDRLMNPLIDQYLYYLSKTQGTNATVQGAKLQFSQAGPSNMRDQARNWLPGPCYRQQRVSKTANDNNNSEYAWTGATKYHLNGRDSLVNPGPAMASHKDDEEKFFPMNGTLVFGKNGAGNSNVDIENVMITDEEEIRTTNPVATEQYGVVSDNLQSSNTRPITGDVDSQGVLPGMVWQDRDVYLQGPIWAKIPHTDGHFHPSPLMGGFGLKHPPPQILIKNTPVPANPATTFTPGKFASFITQYSTGQVSVQIEWELQKENSKRWNPEIQYTSNYNKSVNVDFTVDTNGVYSEPRPIGTRYLTRNL

SEQ ID NO: 5092 - protein, 736 aa, Adeno-associated virus; identical to SEQ ID NO: 4787

SEQ ID NO: 5093 - protein, 736 aa, Adeno-associated virus
MAADGYLPDWLEDNLSEGIREWWDLKPGAPKPKANQQKQDDGRGLVLPGYKYLGPFNGLDKGEPVNAADAAALEHDKAYDQQLKAGDNPYLRYNHADAEFQERLQEDTSFGGNLGRAVFQAKKRVLEPLGLVEEGAKTAPGKKRPVEQSPQEPDSSSGIGKTGQQPAKKRLNFGQTGDSESVPDPQPLGEPPAAPSGLGPNTMASGGGAPMADNNEGADGVGNSSGNWHCDSTWLGDRVITTSTRTWALPTYNNHLYKQISNGTSGGSTNDNTYFGYSTPWGYFDFNRFHCHFSPRDWQRLINNNWGFRPKRLNFKLFNIQVKEVTTNEGTKTIANNLTSTVQVFTDSEYQLPYVLGSAHQGCLPPFPADVFMVPQYGYLTLNNGSQALGRSSFYCLEYFPSQMLRTGNNFQFSYTFEDVPFHSSYAHSQSLDRLMNPLIDQYLYYLVRTQTTGTGGTQTLAFSQAGPSSMANQARNWVPGPCYRQQRVSTTTNQNNNSNFAWTGAAKFKLNGRDSLMNPGVAMASHKDDEDRFFPSSGVLIFGKQGAGNDGVDYSQVLITDEEEIKATNPVATEEYGAVAINNQAANTQAQTGLVHNQGVIPGMVWQNRDVYLQGPIWAKIPHTDGNFHPSPLMGGFGLKHPPPQILIKNTPVPADPPLTFNQAKLNSFITQYSTGQVSVEIEWELQKENSKRWNPEIQYTSNYYKSTNVDFAVNTEGVYSEPRPIGTRYLTRNL

SEQ ID NO: 5094 - DNA, 2211 bp, Adeno-associated virus 1; identical to SEQ ID NO: 4977

SEQ ID NO: 5095 - protein, 736 aa, Adeno-associated virus 1; identical to SEQ ID NO: 5088

SEQ ID NO: 5096 - DNA, 4718 bp, Adeno-associated virus 1
ttgcccactccctctctgcgcgctcgctcgctcggtggggcctgcggaccaaaggtccgcagacggcagagctctgctctgccggccccaccgagcgagcgagcgcgcagagagggagtgggcaactccatcactaggggtaatcgcgaagcgcctcccacgctgccgcgtcagcgctgacgtaaattacgtcataggggagtggtcctgtattagctgtcacgtgagtgcttttgcgacattttgcgacaccacgtggccatttagggtatatatggccgagtgagcgagcaggatctccattttgaccgcgaaatttgaacgagcagcagccatgccgggcttctacgagatcgtgatcaaggtgccgagcgacctggacgagcacctgccgggcatttctgactcgtttgtgagctgggtggccgagaaggaatgggagctgcccccggattctgacatggatctgaatctgattgagcaggcacccctgaccgtggccgagaagctgcagcgcgacttcctggtccaatggcgccgcgtgagtaaggccccggaggccctcttctttgttcagttcgagaagggcgagtcctacttccacctccatattctggtggagaccacgggggtcaaatccatggtgctgggccgcttcctgagtcagattagggacaagctggtgcagaccatctaccgcgggatcgagccgaccctgcccaactggttcgcggtgaccaagacgcgtaatggcgccggaggggggaacaaggtggtggacgagtgctacatccccaactacctcctgcccaagactcagcccgagctgcagtgggcgtggactaacatggaggagtatataagcgcctgtttgaacctggccgagcgcaaacggctcgtggcgcagcacctgacccacgtcagccagacccaggagcagaacaaggagaatctgaaccccaattctgacgcgcctgtcatccggtcaaaaacctccgcgcgctacatggagctggtcgggtggctggtggaccggggcatcacctccgagaagcagtggatccaggaggaccaggcctcgtacatctccttcaacgccgcttccaactcgcggtcccagatcaaggccgctctggacaatgccggcaagatcatggcgctgaccaaatccgcgcccgactacctggtaggccccgctccgcccgcggacattaaaaccaaccgcatctaccgcatcctggagctgaacggctacgaacctgcctacgccggctccgtctttctcggctgggcccagaaaaggttcgggaagcgcaacaccatctggctgtttgggccggccaccacgggcaagaccaacatcgcggaagccatcgcccacgccgtgcccttctacggctgcgtcaactggaccaatgagaactttcccttcaatgattgcgtcgacaagatggtgatctggtgggaggagggcaagatgacggccaaggtcgtggagtccgccaaggccattctcggcggcagcaaggtgcgcgtggaccaaaagtgcaagtcgtccgcccagatcgaccccacccccgtgatcgtcacctccaacaccaacatgtgcgccgtgattgacgggaacagcaccaccttcgagcaccagcagccgttgcaggaccggatgttcaaatttgaactcacccgccgtctggagcatgactttggcaaggtgacaaagcaggaagtcaaagagttcttccgctgggcgcaggatcacgtgaccgaggtggcgcatgagttctacgtcagaaagggtggagccaacaaaagacccgcccccgatgacgcggataaaagcgagcccaagcgggcctgcccctcagtcgcggatccatcgacgtcagacgcggaaggagctccggtggactttgccgacaggtaccaaaacaaatgttctcgtcacgcgggcatgcttcagatgctgtttccctgcaagacatgcgagagaatgaatcagaatttcaacatttgcttcacgcacgggacgagagactgttcagagtgcttccccggcgtgtcagaatctcaaccggtcgtcagaaagaggacgtatcggaaactctgtgccattcatcatctgctggggcgggctcccgagattgcttgctcggcctgcgatctggtcaacgtggacctggatgactgtgtttctgagcaataaatgacttaaaccaggtatggctgccgatggttatcttccagattggctcgaggacaacctctctgagggcattcgcgagtggtgggacttgaaacctggagccccgaagcccaaagccaaccagcaaaagcaggacgacggccggggtctggtgcttcctggctacaagtacctcggacccttcaacggactcgacaagggggagcccgtcaacgcggcggacgcagcggccctcgagcacgacaaggcctacgaccagcagctcaaagcgggtgacaatccgtacctgcggtataaccacgccgacgccgagtttcaggagcgtctgcaagaagatacgtcttttgggggcaacctcgggcgagcagtcttccaggccaagaagcgggttctcgaacctctcggtctggttgaggaaggcgctaagacggctcctggaaagaaacgtccggtagagcagtcgccacaagagccagactcctcctcgggcatcggcaagacaggccagcagcccgctaaaaagagactcaattttggtcagactggcgactcagagtcagtccccgatccacaacctctcggagaacctccagcaacccccgctgctgtgggacctactacaatggcttcaggcggtggcgcaccaatggcagacaataacgaaggcgccgacggagtgggtaatgcctcaggaaattggcattgcgattccacatggctgggcgacagagtcatcaccaccagcacccgcacctgggccttgcccacctacaataaccacctctacaagcaaatctccagtgcttcaacgggggccagcaacgacaaccactacttcggctacagcaccccctgggggtattttgatttcaacagattccactgccacttttcaccacgtgactggcagcgactcatcaacaacaattggggattccggcccaagagactcaacttcaaactcttcaacatccaagtcaaggaggtcacgacgaatgatggcgtcacaaccatcgctaataaccttaccagcacggttcaagtcttctcggactcggagtaccagcttccgtacgtcctcggctctgcgcaccagggctgcctccctccgttcccggcggacgtgttcatgattccgcaatacggctacctgacgctcaacaatggcagccaagccgtgggacgttcatccttttactgcctggaatatttcccttctcagatgctgagaacgggcaacaactttaccttcagctacacctttgaggaagtgcctttccacagcagctacgcgcacagccagagcctggaccggctgatgaatcctctcatcgaccaatacctgtattacctgaacagaactcaaaatcagtccggaagtgcccaaaacaaggacttgctgtttagccgtgggtctccagctggcatgtctgttcagcccaaaaactggctacctggaccctgttatcggcagcagcgcgtttctaaaacaaaaacagacaacaacaacagcaattttacctggactggtgcttcaaaatataacctcaatgggcgtgaatccatcatcaaccctggcactgctatggcctcacacaaagacgacgaagacaagttctttcccatgagcggtgtcatgatttttggaaaagagagcgccggagcttcaaacactgcattggacaatgtcatgattacagacgaagaggaaattaaagccactaaccctgtggccaccgaaagatttgggaccgtggcagtcaatttccagagcagcagcacagaccctgcgaccggagatgtgcatgctatgggagcattacctggcatggtgtggcaagatagagacgtgtacctgcagggtcccatttgggccaaaattcctcacacagatggacactttcacccgtctcctcttatgggcggctttggactcaagaacccgcctcctcagatcctcatcaaaaacacgcctgttcctgcgaatcctccggcggagttttcagctacaaagtttgcttcattcatcacccaatactccacaggacaagtgagtgtggaaattgaatgggagctgcagaaagaaaacagcaagcgctggaatcccgaagtgcagtacacatccaattatgcaaaatctgccaacgttgattttactgtggacaacaatggactttatactgagcctcgccccattggcacccgttaccttacccgtcccctgtaattacgtgttaatcaataaaccggttgattcgtttcagttgaactttggtctcctgtccttcttatcttatcggttaccatggttatagcttacacattaactgcttggttgcgcttcgcgataaaagacttacgtcatcgggttacccctagtgatggagttgcccactccctctctgcgcgctcgctcgctcggtggggcctgcggaccaaaggtccgcagacggcagagctctgctctgccggccccaccgagcgagcgagcgcgcagagagggagtgggcaa

SEQ ID NO: 5097 - DNA, 255 bp, Adeno-associated virus 10
ggtaattcctccggaaattggcattgcgattccacatggctgggcgacagagtcatcaccaccagcacccgaacctgggtcctgcccacctacaacaaccacatctacaagcaaatctccagcgagacaggagccaccaacgacaaccactacttcggctacagcaccccctgggggtattttgactttaacagattccactgccacttttcaccacgtgactggcagcgactcatcaacaacaactggggattc

SEQ ID NO: 5098 - protein, 738 aa, Adeno-associated virus 10
MAADGYLPDWLEDNLSEGIREWWDLKPGAPKPKANQQKQDDGRGLVLPGYKYLGPFNGLDKGEPVNAADAAALEHDKAYDQQLKAGDNPYLRYNHADAEFQERLQEDTSFGGNLGRAVFQAKKRVLEPLGLVEEAAKTAPGKKRPVEPSPQRSPDSSTGIGKKGQQPAKKRLNFGQTGESESVPDPQPIGEPPAGPSGLGSGTMAAGGGAPMADNNEGADGVGSSSGNWHCDSTWLGDRVITTSTRTWALPTYNNHLYKQISNGTSGGSTNDNTYFGYSTPWGYFDFNRFHCHFSPRDWQRLINNNWGFRPKRLSFKLFNIQVKEVTQNEGTKTIANNLTSTIQVFTDSEYQLPYVLGSAHQGCLPPFPADVFMIPQYGYLTLNNGSQAVGRSSFYCLEYFPSQMLRTGNNFEFSYTFEDVPFHSSYAHSQSLDRLMNPLIDQYLYYLSRTQSTGGTQGTQQLLFSQAGPANMSAQAKNWLPGPCYRQQRVSTTLSQNNNSNFAWTGATKYHLNGRDSLVNPGVAMATHKDDEERFFPSSGVLMFGKQGAGRDNVDYSSVMLTSEEEIKTTNPVATEQYGVVADNLQQANTGPIVGNVNSQGALPGMVWQNRDVYLQGPIWAKIPHTDGNFHPSPLMGGFGLKHPPPQILIKNTPVPADPPTTFSQAKLASFITQYSTGQVSVEIEWELQKENSKRWNPEIQYTSNYYKSTNVDFAVNTEGTYSEPRPIGTRYLTRNL

SEQ ID NO: 5099 - protein, 738 aa, Adeno-associated virus 10; identical to SEQ ID NO: 4793

SEQ ID NO: 5100 - DNA, 258 bp, Adeno-associated virus 11
ggtaattcctccggaaattggcattgcgattccacatggctgggcgacagagtcatcaccaccagcacccgaacctgggccctgccaacctacaacaaccacctctacaaacaaatctccagcgcttcaacgggggccagcaacgacaaccactactttggctacagcaccccctgggggtattttgactttaacagattccactgccacttctcaccacgtgactggcagcgactcatcaacaacaactggggattc

SEQ ID NO: 5101 - DNA, 255 bp, Adeno-associated virus 12
ggtaattcctccggaaattggcattgcgattccacatggctgggcgaccgagtcattaccaccagcacccggacttgggccctgcccacctacaacaaccacctctacaagcaaatctccagccaatcgggtgccaccaacgacaaccactacttcggctacagcaccccttgggggtattttgatttcaacagattccactgccatttctcaccacgtgactggcagcgactcatcaacaacaactggggattc

SEQ ID NO: 5102 - DNA, 2208 bp, Adeno-associated virus 2
atggctgccgatggttatcttccagattggctcgaggacactctctctgaaggaataagacagtggtggaagctcaaacctggcccaccaccaccaaagcccgcagagcggcataaggacgacagcaggggtcttgtgcttcctgggtacaagtacctcggacccttcaacggactcgacaagggagagccggtcaacgaggcagacgccgcggccctcgagcacgacaaagcctacgaccggcagctcgacagcggagacaacccgtacctcaagtacaaccacgccgacgcggagtttcaggagcgccttaaagaagatacgtcttttgggggcaacctcggacgagcagtcttccaggcgaaaaagagggttcttgaacctctgggcctggttgaggaacctgttaagacggctccgggaaaaaagaggccggtagagcactctcctgtggagccagactcctcctcgggaaccggaaaggcgggccagcagcctgcaagaaaaagattgaattttggtcagactggagacgcagactcagtacctgacccccagcctctcggacagccaccagcagccccctctggtctgggaactaatacgatggctacaggcagtggcgcaccaatggcagacaataacgagggcgccgacggagtgggtaattcctcgggaaattggcattgcgattccacatggatgggcgacagagtcatcaccaccagcacccgaacctgggccctgcccacctacaacaaccacctctacaaacaaatttccagccaatcaggagcctcgaacgacaatcactactttggctacagcaccccttgggggtattttgacttcaacagattccactgccacttttcaccacgtgactggcaaagactcatcaacaacaactggggattccgacccaagagactcaacttcaagctctttaacattcaagtcaaagaggtcacgcagaatgacggtacgacgacgattgccaataaccttaccagcacggttcaggtgtttactgactcggagtaccagctcccgtacgtcctcggctcggcgcatcaaggatgcctcccgccgttcccagcagacgtcttcatggtgccacagtatggatacctcaccctgaacaacgggagtcaggcagtaggacgctcttcattttactgcctggagtactttccttctcagatgctgcgtaccggaaacaactttaccttcagctacacttttgaggacgttcctttccacagcagctacgctcacagccagagtctggaccgtctcatgaatcctctcatcgaccagtacctgtattacttgagcagaacaaacactccaagtggaaccaccacgcagtcaaggcttcagttttctcaggccggagcgagtgacattcgggaccagtctaggaactggcttcctggaccctgttaccgccagcagcgagtatcaaagacatctgcggataacaacaacagtgaatactcgtggactggagctaccaagtaccacctcaatggcagagactctctggtgaatccgggcccggccatggcaagccacaaggacgatgaagaaaagttttttcctcagagcggggttctcatctttgggaagcaaggctcagagaaaacaaatgtggacattgaaaaggtcatgattacagacgaagaggaaatcaggacaaccaatcccgtggctacggagcagtatggttctgtatctaccaacctccagagaggcaacagacaagcagctaccgcagatgtcaacacacaaggcgttcttccaggcatggtctggcaggacagagatgtgtaccttcaggggcccatctgggcaaagattccacacacggacggacattttcacccctctcccctcatgggtggattcggacttaaacaccctcctccacagattctcatcaagaacaccccggtacctgcgaatccttcgaccaccttcagtgcggcaaagtttgcttccttcatcacacagtactccacgggacaggtcagcgtggagatcgagtgggagctgcagaaggaaaacagcaaacgctggaatcccgaaattcagtacacttccaactacaacaagtctgttaatgtggactttactgtggacactaatggcgtgtattcagagcctcgccccattggcaccagatacctgactcgtaatctgtaa

SEQ ID NO: 5103 - protein, 735 aa, Adeno-associated virus 2 [sequence omitted]

SEQ ID NO: 5104 - protein, 621 aa, Adeno-associated virus 2
MPGFYEIVIKVPSDLDGHLPGISDSFVNWVAEKEWELPPDSDMDLNLIEQAPLTVAEKLQRDFLTEWRRVSKAPEALFFVQFEKGESYFHMHVLVETTGVKSMVLGRFLSQIREKLIQRIYRGIEPTLPNWFAVTKTRNGAGGGNKVVDECYIPNYLLPKTQPELQWAWTNMEQYLSACLNLTERKRLVAQHLTHVSQTQEQNKENQNPNSDAPVIRSKTSARYMELVGWLVDKGITSEKQWIQEDQASYISFNAASNSRSQIKAALDNAGKIMSLTKTAPDYLVGQQPVEDISSNRIYKILELNGYDPQYAASVFLGWATKKFGKRNTIWLFGPATTGKTNIAEAIAHTVPFYGCVNWTNENFPFNDCVDKMVIWWEEGKMTAKVVESAKAILGGSKVRVDQKCKSSAQIDPTPVIVTSNTNMCAVIDGNSTTFEHQQPLQDRMFKFELTRRLDHDFGKVTKQEVKDFFRWAKDHVVEVEHEFYVKKGGAKKRPAPSDADISEPKRVRESVAQPSTSDAEASINYADRYQNKCSRHVGMNLMLFPCRQCERMNQNSNICFTHGQKDCLECFPVSESQPVSVVKKAYQKLCYIHHIMGKVPDACTACDLVNVDLDDCIFEQ

SEQ ID NO: 5105 - DNA, 4675 bp, Adeno-associated virus 2
ttggccactccctctctgcgcgctcgctcgctcactgaggccgggcgaccaaaggtcgcccgacgcccgggctttgcccgggcggcctcagtgagcgagcgagcgcgcagagagggagtggccaactccatcactaggggttcctggaggggtggagtcgtgacgtgaattacgtcatagggttagggaggtcctgtattagaggtcacgtgagtgttttgcgacattttgcgacaccatgtggtcacgctgggtatttaagcccgagtgagcacgcagggtctccattttgaagcgggaggtttgaacgcgcagccgccatgccggggttttacgagattgtgattaaggtccccagcgaccttgacgggcatctgcccggcatttctgacagctttgtgaactgggtggccgagaaggaatgggagttgccgccagattctgacatggatctgaatctgattgagcaggcacccctgaccgtggccgagaagctgcagcgcgactttctgacggaatggcgccgtgtgagtaaggccccggaggcccttttctttgtgcaatttgagaagggagagagctacttccacatgcacgtgctcgtggaaaccaccggggtgaaatccatggttttgggacgtttcctgagtcagattcgcgaaaaactgattcagagaatttaccgcgggatcgagccgactttgccaaactggttcgcggtcacaaagaccagaaatggcgccggaggcgggaacaaggtggtggatgagtgctacatccccaattacttgctccccaaaacccagcctgagctccagtgggcgtggactaatatggaacagtatttaagcgcctgtttgaatctcacggagcgtaaacggttggtggcgcagcatctgacgcacgtgtcgcagacgcaggagcagaacaaagagaatcagaatcccaattctgatgcgccggtgatcagatcaaaaacttcagccaggtacatggagctggtcgggtggctcgtggacaaggggattacctcggagaagcagtggatccaggaggaccaggcctcatacatctccttcaatgcggcctccaactcgcggtcccaaatcaaggctgccttggacaatgcgggaaagattatgagcctgactaaaaccgcccccgactacctggtgggccagcagcccgtggaggacatttccagcaatcggatttataaaattttggaactaaacgggtacgatccccaatatgcggcttccgtctttctgggatgggccacgaaaaagttcggcaagaggaacaccatctggctgtttgggcctgcaactaccgggaagaccaacatcgcggaggccatagcccacactgtgcccttctacgggtgcgtaaactggaccaatgagaactttcccttcaacgactgtgtcgacaagatggtgatctggtgggaggaggggaagatgaccgccaaggtcgtggagtcggccaaagccattctcggaggaagcaaggtgcgcgtggaccagaaatgcaagtcctcggcccagatagacccgactcccgtgatcgtcacctccaacaccaacatgtgcgccgtgattgacgggaactcaacgaccttcgaacaccagcagccgttgcaagaccggatgttcaaatttgaactcacccgccgtctggatcatgactttgggaaggtcaccaagcaggaagtcaaagactttttccggtgggcaaaggatcacgtggttgaggtggagcatgaattctacgtcaaaaagggtggagccaagaaaagacccgcccccagtgacgcagatataagtgagcccaaacgggtgcgcgagtcagttgcgcagccatcgacgtcagacgcggaagcttcgatcaactacgcagacaggtaccaaaacaaatgttctcgtcacgtgggcatgaatctgatgctgtttccctgcagacaatgcgagagaatgaatcagaattcaaatatctgcttcactcacggacagaaagactgtttagagtgctttcccgtgtcagaatctcaacccgtttctgtcgtcaaaaaggcgtatcagaaactgtgctacattcatcatatcatgggaaaggtgccagacgcttgcactgcctgcgatctggtcaatgtggatttggatgactgcatctttgaacaataaatgatttaaatcaggtatggctgccgatggttatcttccagattggctcgaggacactctctctgaaggaataagacagtggtggaagctcaaacctggcccaccaccaccaaagcccgcagagcggcataaggacgacagcaggggtcttgtgcttcctgggtacaagtacctcggacccttcaacggactcgacaagggagagccggtcaacgaggcagacgccgcggccctcgagcacgtacaaagcctacgaccggcagctcgacagcggagacaacccgtacctcaagtacaaccacgccgacgcggagtttcaggagcgccttaaagaagatacgtcttttgggggcaacctcggacgagcagtcttccaggcgaaaaagagggttcttgaacctctgggcctggttgaggaacctgttaagacggctccgggaaaaaagaggccggtagagcactctcctgtggagccagactcctcctcgggaaccggaaaggcgggccagcagcctgcaagaaaaagattgaattttggtcagactggagacgcagactcagtacctgacccccagcctctcggacagccaccagcagccccctctggtctgggaactaatacgatggctacaggcagtggcgcaccaatggcagacaataacgagggcgccgacggagtgggtaattcctccggaaattggcattgcgattccacatggatgggcgacagagtcatcaccaccagcacccgaacctgggccctgcccacctacaacaaccacctctacaaacaaatttccagccaatcaggagcctcgaacgacaatcactactttggctacagcaccccttgggggtattttgacttcaacagattccactgccacttttcaccacgtgactggcaaagactcatcaacaacaactggggattccgacccaagagactcaacttcaagctctttaacattcaagtcaaagaggtcacgcagaatgacggtacgacgacgattgccaataaccttaccagcacggttcaggtgtttactgactcggagtaccagctcccgtacgtcctcggctcggcgcatcaaggatgcctcccgccgttcccagcagacgtcttcatggtgccacagtatggatacctcaccctgaacaacgggagtcaggcagtaggacgctcttcattttactgcctggagtactttccttctcagatgctgcgtaccggaaacaactttaccttcagctacacttttgaggacgttcctttccacagcagctacgctcacagccagagtctggaccgtctcatgaatcctctcatcgaccagtacctgtattacttgagcagaacaaacactccaagtggaaccaccacgcagtcaaggcttcagttttctcaggccggagcgagtgacattcgggaccagtctaggaactggcttcctggaccctgttaccgccagcagcgagtatcaaagacatctgcggataacaacaacagtgaatactcgtggactggagctaccaagtaccacctcaatggcagagactctctggtgaatccggccatggcaagccacaaggacgatgaagaaaagttttttcctcagagcggggttctcatctttgggaagcaaggctcagagaaaacaaatgtgaacattgaaaaggtcatgattacagacgaagaggaaatcggaacaaccaatcccgtggctacggagcagtatggttctgtatctaccaacctccagagaggcaacagacaagcagctaccgcagatgtcaacacacaaggcgttcttccaggcatggtctggcaggacagagatgtgtaccttcaggggcccatctgggcaaagattccacacacggacggacattttcacccctctcccctcatgggtggattcggacttaaacaccctcctccacagattctcatcaagaacaccccggtacctgcgaatccttcgaccaccttcagtgcggcaaagtttgcttccttcatcacacagtactccacgggacacggtcagcgtggagatcgagtgggagctgcagaaggaaaacagcaaacgctggaatcccgaaattcagtacacttccaactacaacaagtctgttaatcgtggacttaccgtggatactaatggcgtgtattcagagcctcgccccattggcaccagatacctgactcgtaatctgtaattgcttgttaatcaataaaccgtttaattcgtttcagttgaactttggtctctgcgtatttctttcttatctagtttccatggctacgtagataagtagcatggcgggttaatcattaactacaaggaacccctagtgatggagttggccactccctctctgcgcgctcgctcgctcactgaggccgggcgaccaaaggtcgcccgacgcccgggctttgcccgggcggcctcagtgagcgagcgagcgcgcagagagggagtggccaa

SEQ ID NO: 5106 - DNA, 4679 bp, Adeno-associated virus 2
ttggccactccctctctgcgcgctcgctcgctcactgaggccgggcgaccaaaggtcgcccgacgcccgggctttgcccgggcggcctcagtgagcgagcgagcgcgcagagagggagtggccaactccatcactaggggttcctggaggggtggagtcgtgacgtgaattacgtcatagggttagggaggtcctgtattagaggtcacgtgagtgttttgcgacattttgcgacaccatgtggtcacgctgggtatttaagcccgagtgagcacgcagggtctccattttgaagcgggaggtttgaacgcgcagccgccatgccggggttttacgagattgtgattaaggtccccagcgaccttgacgggcatctgcccggcatttctgacagctttgtgaactgggtggccgagaaggaatgggagttgccgccagattctgacatggatctgaatctgattgagcaggcacccctgaccgtggccgagaagctgcagcgcgactttctgacggaatggcgccgtgtgagtaaggccccggaggcccttttctttgtgcaatttgagaagggagagagctacttccacatgcacgtgctcgtggaaaccaccggggtgaaatccatggttttgggacgtttcctgagtcagattcgcgaaaaactgattcagagaatttaccgcgggatcgagccgactttgccaaactggttcgcggtcacaaagaccagaaatggcgccggaggcgggaacaaggtggtggatgagtgctacatccccaattacttgctccccaaaacccagcctgagctccagtgggcgtggactaatatggaacagtatttaagcgcctgtttgaatctcacggagcgtaaacggttggtggcgcagcatctgacgcacgtgtcgcagacgcaggagcagaacaaagagaatcagaatcccaattctgatgcgccggtgatcagatcaaaaacttcagccaggtacatggagctggtcgggtggctcgtggacaaggggattacctcggagaagcagtggatccaggaggaccaggcctcatacatctccttcaatgcggcctccaactcgcggtcccaaatcaaggctgccttggacaatgcgggaaagattatgagcctgactaaaaccgcccccgactacctggtgggccagcagcccgtggaggacatttccagcaatcggatttataaaattttggaactaaacgggtacgatccccaatatgcggcttccgtctttctgggatgggccacgaaaaagttcggcaagaggaacaccatctggctgtttgggcctgcaactaccgggaagaccaacatcgcggaggccatagcccacactgtgcccttctacgggtgcgtaaactggaccaatgagaactttcccttcaacgactgtgtcgacaagatggtgatctggtgggaggaggggaagatgaccgccaaggtcgtggagtcggccaaagccattctcggaggaagcaaggtgcgcgtggaccagaaatgcaagtcctcggcccagatagacccgactcccgtgatcgtcacctccaacaccaacatgtgcgccgtgattgacgggaactcaacgaccttcgaacaccagcagccgttgcaagaccggatgttcaaatttgaactcacccgccgtctggatcatgactttgggaaggtcaccaagcaggaagtcaaagactttttccggtgggcaaaggatcacgtggttgaggtggagcatgaattctacgtcaaaaagggtggagccaagaaaagacccgcccccagtgacgcagatataagtgagcccaaacgggtgcgcgagtcagttgcgcagccatcgacgtcagacgcggaagcttcgatcaactacgcagacaggtaccaaaacaaatgttctcgtcacgtgggcatgaatctgatgctgtttccctgcagacaatgcgagagaatgaatcagaattcaaatatctgcttcactcacggacagaaagactgtttagagtgctttcccgtgtcagaatctcaacccgtttctgtcgtcaaaaaggcgtatcagaaactgtgctacattcatcatatcatgggaaaggtgccagacgcttgcactgcctgcgatctggtcaatgtggatttggatgactgcatctttgaacaataaatgatttaaatcaggtatggctgccgatggttatcttccagattggctcgaggacactctctctgaaggaataagacagtggtggaagctcaaacctggcccaccaccaccaaagcccgcagagcggcataaggacgacagcaggggtcttgtgcttcctgggtacaagtacctcggacccttcaacggactcgacaagggagagccggtcaacgaggcagacgccgcggccctcgagcacgacaaagcctacgaccggcagctcgacagcggagacaacccgtacctcaagtacaaccacgccgacgcggagtttcaggagcgccttaaagaagatacgtcttttgggggcaacctcggacgagcagtcttccaggcgaaaaagagggttcttgaacctctgggcctggttgaggaacctgttaagacggctccgggaaaaaagaggccggtagagcactctcctgtggagccagactcctcctcgggaaccggaaaggcgggccagcagcctgcaagaaaaagattgaattttggtcagactggagacgcagactcagtacctgacccccagcctctcggacagccaccagcagccccctctggtctgggaactaatacgatggctacaggcagtggcgcaccaatggcagacaataacgagggcgccgacggagtgggtaattcctccggaaattggcattgcgattccacatggatgggcgacagagtcatcaccaccagcacccgaacctgggccctgcccacctacaacaaccacctctacaaacaaatttccagccaatcaggagcctcgaacgacaatcactactttggctacagcaccccttgggggtattttgacttcaacagattccactgccacttttcaccacgtgactggcaaagactcatcaacaacaactggggattccgacccaagagactcaacttcaagctctttaacattcaagtcaaagaggtcacgcagaatgacggtacgacgacgattgccaataaccttaccagcacggttcaggtgtttactgactcggagtaccagctcccgtacgtcctcggctcggcgcatcaaggatgcctcccgccgttcccagcagacgtcttcatggtgccacagtatggatacctcaccctgaacaacgggagtcaggcagtaggacgctcttcattttactgcctggagtactttccttctcagatgctgcgtaccggaaacaactttaccttcagctacacttttgaggacgttcctttccacagcagctacgctcacagccagagtctggaccgtctcatgaatcctctcatcgaccagtacctgtattacttgagcagaacaaacactccaagtggaaccaccacgcagtcaaggcttcagttttctcaggccggagcgagtgacattcgggaccagtctaggaactggcttcctggaccctgttaccgccagcagcgagtatcaaagacatctgcggataacaacaacagtgaatactcgtggactggagctaccaagtaccacctcaatggcagagactctctggtgaatccgggcccggccatggcaagccacaaggacgatgaagaaaagttttttcctcagagcggggttctcatctttgggaagcaaggctcagagaaaacaaatgtggacattgaaaaggtcatgattacagacgaagaggaaatcaggacaaccaatcccgtggctacggagcagtatggttctgtatctaccaacctccagagaggcaacagacaagcagctaccgcagatgtcaacacacaaggcgttcttccaggcatggtctggcaggacagagatgtgtaccttcaggggcccatctgggcaaagattccacacacggacggacattttcacccctctcccctcatgggtggattcggacttaaacaccctcctccacagattctcatcaagaacaccccggtacctgcgaatccttcgaccaccttcagtgcggcaaagtttgcttccttcatcacacagtactccacgggacaggtcagcgtggagatcgagtgggagctgcagaaggaaaacagcaaacgctggaatcccgaaattcagtacacttccaactacaacaagtctgttaatgtggactttactgtggacactaatggcgtgtattcagagcctcgccccattggcaccagatacctgactcgtaatctgtaattgcttgttaatcaataaaccgtttaattcgtttcagttgaactttggtctctgcgtatttctttcttatctagtttccatggctacgtagataagtagcatggcgggttaatcattaactacaaggaacccctagtgatggagttggccactccctctctgcgcgctcgctcgctcactgaggccgggcgaccaaaggtcgcccgacgcccgggctttgcccgggcggcctcagtgagcgagcgagcgcgcagagagggagtggccaa

SEQ ID NO: 5107 - protein, 735 aa, Adeno-associated virus 2
MAADGYLPDWLEDTLSEGIRQWWKLKPGPPPPKPAERHKDDSRGLVLPGYKYLGPFNGLDKGEPVNEADAAALEHDKAYDRQLDSGDNPYLKYNHADAEFQERLKEDTSFGGNLGRAVFQAKKRVLEPLGLVEEPVKTAPGKKRPVEHSPVEPDSSSGTGKAGQQPARKRLNFGQTGDADSVPDPQPLGEPPATPAAVGPTTMASGGGAPMADNNEGADGVGNASGNWHCDSTWLGDRVITTSTRTWALPTYNNHLYKQISSASTGASNDNHYFGYSTPWGYFDFNRFHCHFSPRDWQRLINNNWGFRPKRLNFKLFNIQVKEVTQNDGTTTIANNLTSTVQVFTDSEYQLPYVLGSAHQGCLPPFPADVFMIPQYGYLTLNNGSQAVGRSSFYCLEYFPSQMLRTGNNFTFSYTFEDVPFHSSYAHSQSLDRLMNPLIDQYLYYLNRTQNQSGSAQDKALLFSRGSPAGMSVQPKNWLPGPCYRQQRVSKTKTDNNNSNFTWTGASKYNLNGRESIINPGTAMASHKDDKDKFFPMSGVMIFGKESAGASNTALDNVMITDEEEIKATNPVATERFGTVAVNFQSSSTDPATGDVHVMGALPGMVWQDRDVYLQGPIWAKIPHTDGHFHPSPLMGGFGLKHPPPQILIKNTPVPANPPAEFSATKFASFITQYSTGQVSVEIEWELQKENSKRWNPEVQYTSNYAKSANVDFTVDNNGLYTEPRPIGTRYLTRP

SEQ ID NO: 5108 - protein, 740 aa, Adeno-associated virus 2
MAADGYLPDWLEDTLSEGIRQWWKLKPGPPPPKPAERHKDDSRGLVLPGYKYLGPFNGLDKGEPVNAADAAALEHDKAYDRQLDSGDNPYLKYNHADAEFQERLKEDTSFGGNLGRAVFQAKKRVLEPLGLVEEPVKTAPGKKRPVEHSPVEPDSSSGTGKAGQQPARKRLNFGQTGDADSVPDPQPLGQPPAAPSGLGTNTMATGSGAPMADNNEGADGVGNSSGNWHCDSTWMGDRVITTSTRTWALPTYNNHLYKQISSQSGASNDNHYFGYSTPWGYFDFNRFHCHFSPRDWQRLINNNWGFRPKRLNFKLFNIQVKEVTQNDGTTTIANNLTSTVQVFTDSEYQLPYVLGSAHQGCLPPFPADVFMVPQYGYLTLNNGSQAVGRSSFYCLEYFPSQMLRTGNNFTFSYTFEDVPFHSSYAHSQSLDRLMNPLIDQYLYYLSRTNTPSGTTTQSGLQFSQAGASDIRDQSRNWLPGPCYRQQRVSKTSADNNNSEYSWTGATKYHLNGRDSLVNPGPAMASHKDDEEKFFPQSGVLIFGKQGSEKTNVDIEKVMITDEEEIRTTNPVATEQYGSVSTNLQRGNRQAATADVNTQGVLPGMVWQDRDVYLQGPIWAKIPHTDGHFHPSPLMGGFGLKHPPPQILIKNTPVPANPSTTFSAAKFASFITQYSTGQVSVEIEWELQKENSKRWNPEIQYTSNYNKSVNVDFTVDTNGVYSEPRPIGTRYLTRNLLLAAA

SEQ ID NO: 5109 - protein, 734 aa, Adeno-associated virus 2
MAADGYLPDWLEDTLSEGIRQWWKLKPGPPPPKPAERHKDDSRGLVLPGYKYLGPFNGLDKGEPVNEADAAALEHDKAYDRQLDSGDNPYLKYNHADAEFQERLKEDTSFGGNLGRAVFQAKKRVLEPLGLVEEPVKTAPGKKRPVEHSPVEPDSSSGTGKAGQQPARKRLNFGQTGDADSVPDPQPLGQPPAAPSGLGTNTMATGSGAPMADNNEGADGVGNSSGNWHCDSTWMGDRVITTSTRTWALPTYNNHLYKQISSQSGASNDNHYFGYSTPWGYFDFNRFHCHFSPRDWQRLINNNWGFRPKRLNFKLFNIQVKEVTQNDGTTTIANNLTSTVQVFTDSEYQLPYVLGSAHQGCLPPFPADVFMVPQYGYLTLNNGSQAVGRSSFYCLEYFPSQMLRTGNNFTFSYTFEDVPFHSSYAHSQSLDRLMNPLIDQYLYYLSRTNTPSGTTTQSGLQFSQAGASDIRDQSRNWLPGPCYRQQRVSKTSADNNNSEYSWTGATMYHLNGRDSLVNPGPAMASHKDDEEKFFPQSGVLIFGKQGSEKTNVDIEKVMITDEEEIRTTNPVATEQYGSVSTNLQRGNRQAATADVNTQGVLPGMVWQDRDVYLQGPIWAKIPHTDGHFHPSPLMGGFGLKHPPPQILIKNTPVPANPSTTFSAAKFASFITQYSTGQVSVEIEWELQKENSKRWNPEIQYTSNYNKSINVDFTVDTNGVYSEPRPIGTRYLTRN

SEQ ID NO: 5110 - protein, 734 aa, Adeno-associated virus 2
MAADGYLPDWLEDTLSEGIRQWWKLKPGPPPPKPAERHKDDSRGLVLPGYKYLGPFNGLDKGEPVNEADAAALEHDKAYDRQLDSGDNPYLKYNHADAEFQERLKEDTSFGGNLGRAVFQAKKRVLEPLGLVEEPVKTAPGKKRPVEHSPVEPDSSSGTGKAGQQPARKRLNFGQTGDADSVPDPQPLGQPPAAPSGLGTNTMATGSGAPMADNNEGADGVGNSSGNWHCDSTWMGDRVITTSTRTWALPTYNNHLYKQISSQSGASNDNHYFGYSTPWGYFDFNRFHCHFSPRDWQRLINNNWGFRPKRLNFKLFNIQVKEVTQNDGTTTIANNLTSTVQVFTDSEYQLPYVLGSAHQGCLPPFPADVFMVPQYGYLTLNNGSQAVGRSSFYCLEYFPSQMLRTGNNFTFSYTFEDVPFHSSYAHSQSLDRLMNPLIDQYLYYLSRTNTPSGTTTQSGLQFSQAGASDIRDQSRNWLPGPCYRQQRVSKTSADNNNSEYSWTGATKYHLNGRDSLVNPGPAMASHKDDEEKFFPQSGVLIFGKQGSEKTNVDIEKVMITDEEEIRTTNPVATEQYGSVSTNLQRGNRQAATADVNTQGVLPGMVWQDRDVYLQGPIWAKIPHTDGHFHPSPLMGGFGLKHPPPQILIKNTPVPANPSTTFSEAKFASFITQYSTGQVSVEIEWELQKENSKRWNPEIQYTSNYNKSVNVDFTVDTNGVYSEPRPIGTRYLTRN

SEQ ID NO: 5111 - protein, 739 aa, Adeno-associated virus 2
MAADGYLPDWLEDTLSEGIRQWWKLKPGPPPPKPAERHKDDSRGLVLPGYKYLGPFNGLDKGEPVNEADAAALEHDKAYDRQLDSGDNPYLKYNHADAEFQERLKEDTSFGGNLGRAVFQAKKRVLEPLGLVEEPVKTAPGKKRPVEHSPVEPDSSSGTGKAGQQPARKRLNFGQTGDADSVPDPQPLGQPPAAPSGLGTNTMATGSGAPMADNNEGADGVGNSSGNWHCDSTWMGDRVITTSTRTWALPTYNNHLYKQISSQSGASNDNHYFGYSTPWGYFDFNRFHCHFSPRDWQRLINNNWGFRPKRLNFKLFNIQVKEVTQNDGTTTIANNLTSTVQVFTDSEYQLPYVLGSAHQGCLPPFPADVFMVPQYGYLTLNNGSQAVGRSSFYCLEYFPSQMLRTGNNFTFSYTFEDVPFHSSYAHSQSLDRLMNPLIDQYLYYLSRTNTPSGTTTQSGLQFSQAGASDIRDQSRNWLPGPCYRQQRVSKTSADNNNSEYSWTGATKYHLNGRDSLVNPGPAMASHKDDEEKFFPQSGVLIFGKQGSEKTNVDIEKVMITDEEEIRTTNPVATEQYGSVSTNLQRGNRQAATADVNTQGVLPGMVWQDRDVYLQGPIWAKIPHTDGHFHPSPLMGGFGLKHPPPQILIKNTPVPANPSTTFSAAKFASFITQYSTGQVSVEIEWELQKENSKRWNPEIQYTSNYNKSVNVDFTVDTNGVYSEPRPIGTRYLTRNLLLAA

SEQ ID NO: 5112 - protein, 725 aa, Adeno-associated virus 2
MAADGYLPDWLEDTLSEGIRQWWKLKPGPPPPKPAERHKDDSRGLVLPGYKYLGPFNGLDKGEPVNEADAAALEHDKAYDRQLDSGDNPYLKYNHADAEFQERLKEDTSFGGNLGRAVFQAKKRVLEPLGLVEEPVKTAPGKKRPVEHSPVEPDSSSGTGKAGQQPARKRLNFGQTGDADSVPDPQPLGQPPAAPSGLGTNTMATGSGAPMADNNEGADGVGNSSGNWHCDSTWMGDRVITTSTRTWALPTYNNHLYKQISSQSGASNDNHYFGYSTPWGYFDFNRFHCHFSPRDWQRLINNNWGFRPKRLNFKLFNIQVKEVTQNDGTTTIANNLTSTVQVFTDSEYQLPYVLGSAHQGCLPPFPADVFMVPQYGYLTLNNGSQAVGRSSFYCLEYFPSQMLRTGNNFTFSYTFEDVPFHSSYAHSQSLDRLMNPLIDQYLYYLSRTNTPSGTTTQSGLQFSQAGASDIRDQSRNWLPGPCYRQQRVSKTSADNNNSEYSWTGATKYHLNGRDSLVNPGPAMASHKDDEEKFFPQSGVLIFGKQGSEKTNVDIEKVMITDEEEIRTTNPVATEQYGSVSTNLQRGNRQAATADVNTQGVLPGMVWQDRDVYLQGPIWAKIPHTDGHFHPSPLMGGFGLKHPPPQILIKNTPVPANPSTTFSAAKFASFITQYSTGQVSVEIEWELQKENSKRWNPEIQYTSNYNKSVNVDFTVDTNGVYSEPRP

SEQ ID NO: 5113 - protein, 707 aa, Adeno-associated virus 2
MAADGYLPDWLEDTLSEGIRQWWKLKPGPPPPKPAERHKDDSRGLVLPGYKYLGPFNGLDKGEPVNEADAAALEHDKAYDRQLDSGDNPYLKYNHADAEFQERLKEDTSFGGNLGRAVFQAKKRVLEPLGLVEEPVKTAPGKKRPVEHSPVEPDSSSGTGKAGQQPARKRLNFGQTGDADSVPDPQPLGQPPAAPSGLGTNTMATGSGAPMADNNEGADGVGNSSGNWHCDSTWMGDRVITTSTRTWALPTYNNHLYKQISSQSGASNDNHYFGYSTPWGYFDFNRFHCHFSPRDWQRLINNNWGFRPKRLNFKLFNIQVKEVTQNDGTTTIANNLTSTVQVFTDSEYQLPYVLGSAHQGCLPPFPADVFMVPQYGYLTLNNGSQAVGRSSFYCLEYFPSQMLRTGNNFTFSYTFEDVPFHSSYAHSQSLDRLMNPLIDQYLYYLSRTNTPSGTTTQSGLQFSQAGASDIRDQSRNWLPGPCYRQQRVSKTSADNNNSEYSWTGATKYHLNGRDSLVNPGPAMASHKDDEEKFFPQSGVLIFGKQGSEKTNVDIEKVMITDEEEIRTTNPVATEQYGSCIYQPPERQQTSSYRRCQHTRRSSRHGLAGQRCVPSGAHLGKDSTHGRTFSPLSPHGWIRTTPSSTDSHQEHPGTCESFDHLQCGKVCFLHHTVLHGTGQRGDRVRAAEGKQQTLESRNSVHFQLQQVC

SEQ ID NO: 5114 - protein, 739 aa, Adeno-associated virus 2; identical to SEQ ID NO: 5111

SEQ ID NO: 5115 - protein, 737 aa, Adeno-associated virus 2
MASDGYLPDWLEDNLSEGIREWWDLKPGAPKPKANQQKQDDGRGLVLPGYKYLGPFNGLDKGEPVNAADAAALEHDKAYDQQLKAGDNPYLRYNHADAEFQERLQEDTSFGGNLGRAVFQAKKRVLEPFGLVEEGAKTAPGKKRPVEQSPQEPDSSSGIGKTGQQPAKKRLNFGQTGDSESVPDPQPLGEPPATPAAVGPTTMASGGGAPMADNNEGADGVGNASGNWHCDSTWLGDRVITTSTRTWALPTYNNHLYKQISSASTGASNDNHYFGYSTPWGYFDFNRFHCHFSPRDWQRLINNNWGFRPKRLNFKLFNIQVKEVTTNDGTTTIANNLTSTVQVFTDSEYQLPYVLGSAHQGCLPPFPADVFMVPQYGYLTLNNGSQAVGRSSFYCLEYFPSQMLRTGNNFTFSYTFEDVPFHSSYAHSQSLDRLMNPLIDQYLYYLSRTNTPSGTTTQSGLQFSQAGASDIRDQSRNWLPGPCYRQQRVSKTSADNNNSEYSWTGATKYHLNGRDSLVNPGPAMASHKDDEEKFFPQSGVLIFGKQGSEKTNVDIEKVMITDEEEIRTTNPVATEQYGSVSTNLQRGNRQAATADVNTQGVLPGMVWQDRDVYLQGPIWAKIPHTDGHFHPSPLMGGFGLKHHPPQILIKNTPVPANPSTTFSAAKFASFITQYSTGQVSVEIEWELQKENSKRWNPEIQYTSNYNKSVNVDFTVDTNGVYSEPRPIGTRYLTRNLL

SEQ ID NO: 5116 - protein, 741 aa, Adeno-associated virus 2
MAADGYLPDWLEDTLSEGIREWWALKPGAPKPKANQQKQDDGRGLVLPGYKYLGPFNGLDKGEPVNEADAAALEHDKAYDQQLQAGDNPYLRYNHADAEFQERLQEDTSFGGNLGRAVFQAKKRVLEPLGLVEEPVKTAPGKKRPVEHSPVEPDSSSGTGKSGQQPARKRLNFGQTGDADSVPDPQPLGQPPAAPSGLGTNTMATGSGAPMADNNEGADGVGNSSGNWHCDSTWMGDRVITTSTRTWALPTYNNHLYKQISSQSGASNDNHYFGYSTPWGYFDFNRFHCHFSPRDWQRLINNNWGFRPKRLNFKLFNIQVKEVTQNDGTTTIANNLTSTVQVFTDSEYQLPYVLGSAHQGCLPPFPADVFMVPQYGYLTLNNGSQAVGRSSFYCLEYFPSQMLRTGNNFTFSYTFEDVPFHSSYAHSQSLDRLMNPLIDQYLYYLSRTNTPSGTTTQSGLQFSQAGASDIRDQSRNWLPGPCYRQQRVSKTSADNNNSEYSWTGATKYHLNGRDSLVNPGPAMASHKDDEEKFFPQSGVLIFGKQGSEKTNVDIEKVMITDEEEIRTTNPVATEQYGSVSTNLQRGNLANHNNTTNARQAATADVNTQGVLPGMVWQDRDVYLQGPIWAKIPHTDGHFHPSPLMGGFGLKHPPPQILIKNTPVPANPSTTFSAAKFASFITQYSTGQVSVEIEWELQKENSKRWNPEIQYTSNYNKSINVDFTVDTNGVYSEPRPIGTRYL

SEQ ID NO: 5117 - protein, 730 aa, Adeno-associated virus 2
MASDGYLPDWLEDNLSEGIREWWDLKPGAPKPKANQQKQDDGRGLVLPGYKYLGPFNGLDKGEPVNAADAAALEHDKAYDQQLKAGDNPYLRYNHADAEFQERLQEDTSFGGNLGRAVFQAKKRVLEPFGLVEEGAKTAPGKKRPVEQSPQEPDSSSGIGKTGQQPAKKRLNFGQTGDSESVPDPQPLGEPPATPAAVGPTTMASGGGAPMADNNEGADGVGNASGNWHCDSTWLGDRVITTSTRTWALPTYNNHLYKQISSASTGASNDNHYFGYSTPWGYFDFNRFHCHFSPRDWQRLINNNWGFRPKRLNFKLFNIQVKEVTTNDGVTTIANNLTSTVQVFSDSEYQLPYVLGSAHQGCLPPFPADVFMIPQYGYLTLNNGSQAVGRSSFYCLEYFPSQMLRTGNNFTFSYTFEDVPFHSSYAHSQSLDRLMNPLIDQYLYYLNRTQNQSGSAQNNDLLFSRGSPAGMSVQPKNWLPGPCYRQQRVSKTKTDNNNSNFTWTGASKYNLNGRESIINPGTAMASHKDDKDKFFPMSGVMIFGKESAGASNTALDNVMITDEEEIKATNPVATERFGTVAVNLQSSSTDPATGDVHVMGALPGMVWQDRDVYLQGPIWAKIPHTDGHFHPSPLMGGFGLKNPPPQILIKNTPVPANPPAEFSATKFASFITQYSTGQVSVEIEWELQKENSKRWNPEVQYTSNYAKSANVDFTVDNNGLYTEPRPIGTR

SEQ ID NO: 5118 - protein, 735 aa, Adeno-associated virus 2
  MOD_RES (239)..(239): Any amino acid
MASDGYLPDWLEDNLSEGIREWWDLKPGAPKPKANQQKQDDGRGLVLPGYKYLGPFNGLDKGEPVNAADAAALEHDKAYDQQLKAGDNPYLRYNHADAEFQERLQEDTSFGGNLGRAVFQAKKRVLEPFGLVEEGAKTAPGKKRPVEQSPQEPDSSSGIGKTGQQPAKKRLNFGQTGDSESVPDPQPLGEPPATPAAVGPTTMASGGGAPMADNNEGADGVGNASGNWHCDSTWLGDRXITTSTRTWALPTYNNHLYKQISSASTGASNDNHYFGYSTPWGYFDFNRFHCHFSPRDWQRLINNNWGFRPKRLNFKLFNIQVKEVTTNDGVTTIANNLTSTVQVFSDSEYQLPYVLGSAHQGCLPPFPADVFMIPQYGYLTLNNGSQAVGRSSFYCLEYFPSQMLRTGNNFTFSYTFEDVPFHSSYAHSQSLDRLMNPLIDQYLYYLNRTQNQSGSAQNNDLLFSRGSPAGMSVQPKNWLPGPCYRQQRVSKTKTDNNNSNFTWTGASKYNLNGRESIINPGTAMASHKDDKDKFFPMSGVMIFGKESAGASNTALDNVMITDEEEIKATNPVATERFGTVAVNLQSSSTDPATGDVHVMGALPGMVWQDRDVYLQGPIWAKIPHTDGHFHPSPLMGGFGLKNPPPQILIKNTPVPANPPAEFSATKFASFITQYSTGQVSVEIEWELQKENSKRWNPEVQYTSNYAKSANVDFTVDNNGLYTEPRPIGTRYLTRP

SEQ ID NO: 5119 - protein, 733 aa, Adeno-associated virus 2
MASDGYLPDWLEDNLSEGIREWWDLKPGAPKPKANQQKQDDGRGLVLPGYKYLGPFNGLDKGEPVNAADAAALEHDKAYDQQLKAGDNPYLRYNHADAEFQERLQEDTSFGGNLGRAVFLAKKRVLEPFGLVEEGAKTAPGKKRPVEQSPQEPDSSSGIGKTGQQPAKKRLNFGQTGDSESVPDPQPLGEPPATPAAVGPTTMASGGGAPMADNNEGADGVGNASGNWHCDSTWLGDRVITTSTRTWALPTYNNHLYKQISSASTGASNDNHYFGYSTPWGYFDFNRFHCHFSPRDWQRLINNNWGFRPKRLNFKLFNIQVKEVTTNDGVTTIANNLTSTVQVFSDSEYQLPYVLGSAHQGCLPPFPADVFMIPQYGYLTLNNGSQAVGRSSFYCLEYFPSQMLRTGNNFTFSYTFEDVPFHSSYAHSQSLDRLMNPLIDQYLYYLNRTQNQSGSAQNNDLLFSRGSPAGMSVQPKNWLPGPCYRQQRVSKTKTDNNNSNFTWTGASKYNLNGRESIINPGTAMASHKDDKDKFFPMSGVMIFGKESAGASNTALDNVMITDEEEIKATNPVATERFGTVAVNLQSSSTDPATGDVHVMGALPGMVWQDRDVYLQGPIWAKIPHTDGHFHPSPLMGGFGLKNPPPQILIKNTPVPANPPAEFSATKFASFITQYSTGQVSVEIEWELQKENSKRWNPEVQYTSNYAKSANVDFTVDNNGLYTEPRPIGTRYLT

SEQ ID NO: 5120 - protein, 734 aa, Adeno-associated virus 2
MAADGYLPDWLEDTLSEGIRQWWKLKPGPPPPKPAERHKDDSRGLVLPGCKYLGPFNGLDKGEPVNEADAAALEHDKAYDRQLDSGDNPYLKYNHADAEFQERLKEDTSFGGNLGRAVFQAKKRVLEPLGLVEEPVKTAPGKKRPVEHSPVEPDSSSGTGKAGQQPARKRLNFGQTGDADSVPDPQPLGQPPAAPSGLGTNTMATGSGAPMADNNEGADGVGNSSGNWHCDSTWMGDRVITTSTRTWALPTYNNHLYKQISSQSGASNDNHYFGYSTPWGYFDFNRFHCHFSPRDWQRLINNNWGFRPKRLNFKLFNIQVKEVTQNDGTTTIANNLTSTVQVFSDSEYQLPYVLGSAHQGCLPPFPADVFMIPQYGYLTLNNGSQAVGRSSFYCLEYFPSQMLRTGNNFTFNYTFEDVPFHSSYAHSQSLDRLMNPLIDQYLYYLNRTQNQSGSAQNNDLLFSRGSPAGMSVQPKNWLPGPCYRQQRVSKTKTDNNNSNFTWTGASKYNLNGRESIINPGTAMASHKDDKDKFFPMSGVMIFGKESAGASNTALDNVMITDEEEIKATNPVATERFGTVAVNLQSSSTDPATGDVHVMGALPGMVWQDRDVYLQGPIWAKIPHTDGHFHPSPLMGGFGLKNPPPQILIKNTPVPANPPAEFSATKFASFITQYSTGQVSVEIEWELQKENSKRWNPEVQYTSNYAKSANVDFTVDNNGLYTEPRPIGTRYLTRP

SEQ ID NO: 5121 - protein, 734 aa, Adeno-associated virus 2
MAADGYLPDWLEDTLSEGIRQWWKLKPGPPPPKPAERHKDDSRGLVLPGYKYLGPFNGLDKGEPVNEADAAALEHDKAYDRQLDSGDNPYLKYNHADAEFQERLKEDTSFGGNLGRAVFQAKKRVLEPLGLVEEPVKTAPGKKRPVEHSPVEPDSSSGTGKAGQQPARKRLNFGQTGDADSVPDPQPLGQPPAAPSGLGTNTMATGSGAPMADNNEGADGVGNSSGNWHCDSTWMGDRVITTSTRTWALSTYNNHLYKQISSQSGASNDNHYFGYSTPWGYFDFNRFHCHFSPRDWQRLINNNWGFRPKRLNFKLFNIQVKEVTQNDGTTTIANNLTSTVQVFTDSEYQLPYVLGSAHQGCLPPFPADVFMVPQYGYLTLNNGSQAVGRSSFYCLEYFPSQMLRTGNNFTFSYTFEDVPFHSSYAHSQSLDRLMNPLIDQYLYYLSRTNTPSGTTTQSRLQFSQAGASDIRDQSRNWLPGPCYRQQRVSKTSADNNNSEYSWTGATKYHLNGRDSLVNPGPAMASHKDDEEKFFPQSGVLIFGKQGSEKTNVDIEKVMITDEEEIRTTNPVATEQYGSVSTNLQRGNRQAATADVNTQGVLPGMVWQDRDVYLQGPIWAKIPHTDGHFHPSPLMGGFGLKHPPPQILIKNTPVPANPSTTFSAAKFASFITQYSTGQVSVEIEWELQKENSKRWNPEIQYTSNYNKSINVDFTVDTNGVYSEPRPIGTRYLTRN

SEQ ID NO: 5122 - protein, 738 aa, Adeno-associated virus 2
MAADGYLPDWLEDTLSEGIRQWWKLKPGPPPPKPAERHKDDSRGLVLPGYKYLGPFNGLDKGEPVNEADAAALEHDKAYDRQLDGGDNPYLKYNHADAEFQERLKEDTSFGGNLGRAVFQAKKRVLEPLGLVEEPVKTAPGKKRPVEHSPVEPDSSSGTGKAGQQPARKRLNFGQTGDADSVPDPQPLGQPPAAPSGLGTNTMATGSGAPMADNNEGADGVGNSSGNWHCDSTWMGDRVITTSTRTWALPTYNNHLYKQISSQSGASNDNHYFGYSTPWGYFDFNRFHCHFSPRDWQRLINNNWGFRPKRLNFKLFNIQVKEVTQNDGTTTIANNLTSTVQVFTDSEYQLPYVLGSAHQGCLPPFPADVFMVPQYGYLTLNNGSQAVGRSSFYCLEYFPSQMLRTGNNFTFSYTFEDVPFHSSYAHSQSLDRLMNPLIDQYLYYLSRTNTPSGTTTQSGLQFSQAGASDIRDQSRNWLPGPCYRQQRVSKTSADNNNSEYSWTGATKYHLNGRDSLVNPGPAMASHKDDEEKFFPQSGVLIFGKQGSEKTNVDIEKVMITDEEEIRTTNPVATEQYGSVSTNLQRGNRQAATADVNTQGVLPGMVWQDRDVYLQGPIWAKIPHTDGHFHPSPLMGGFGLKHPPPQILIKNTPVPANPSTTFSAAKFASFITQYSTGQVSVEIEWELQKENSKRWNPEIQYTSNYNKSVNVDFTVDTNGVYSEPRPIGTRYLTRNLLRP

SEQ ID NO: 5123 - protein, 736 aa, Adeno-associated virus 3; identical to SEQ ID NO: 4757

SEQ ID NO: 5124 - DNA, 4726 bp, Adeno-associated virus 3
ttggccactccctctatgcgcactcgctcgctcggtggggcctggcgaccaaaggtcgccagacggacgtgctttgcacgtccggccccaccgagcgagcgagtgcgcatagagggagtggccaactccatcactagaggtatggcagtgacgtaacgcgaagcgcgcgaagcgagaccacgcctaccagctgcgtcagcagtcaggtgacccttttgcgacagtttgcgacaccacgtggccgctgagggtatatattctcgagtgagcgaaccaggagctccattttgaccgcgaaatttgaacgagcagcagccatgccggggttctacgagattgtcctgaaggtcccgagtgacctggacgagcgcctgccgggcatttctaactcgtttgttaactgggtggccgagaaggaatgggacgtgccgccggattctgacatggatccgaatctgattgagcaggcacccctgaccgtggccgaaaagcttcagcgcgagttcctggtggagtggcgccgcgtgagtaaggccccggaggccctcttttttgtccagttcgaaaagggggagacctacttccacctgcacgtgctgattgagaccatcggggtcaaatccatggtggtcggccgctacgtgagccagattaaagagaagctggtgacccgcatctaccgcggggtcgagccgcagcttccgaactggttcgcggtgaccaaaacgcgaaatggcgccgggggcgggaacaaggtggtggacgactgctacatccccaactacctgctccccaagacccagcccgagctccagtgggcgtggactaacatggaccagtatttaagcgcctgtttgaatctcgcggagcgtaaacggctggtggcgcagcatctgacgcacgtgtcgcagacgcaggagcagaacaaagagaatcagaaccccaattctgacgcgccggtcatcaggtcaaaaacctcagccaggtacatggagctggtcgggtggctggtggaccgcgggatcacgtcagaaaagcaatggattcaggaggaccaggcctcgtacatctccttcaacgccgcctccaactcgcggtcccagatcaaggccgcgctggacaatgcctccaagatcatgagcctgacaaagacggctccggactacctggtgggcagcaacccgccggaggacattaccaaaaatcggatctaccaaatcctggagctgaacgggtacgatccgcagtacgcggcctccgtcttcctgggctgggcgcaaaagaagttcgggaagaggaacaccatctggctctttgggccggccacgacgggtaaaaccaacatcgcggaagccatcgcccacgccgtgcccttctacggctgcgtaaactggaccaatgagaactttcccttcaacgattgcgtcgacaagatggtgatctggtgggaggagggcaagatgacggccaaggtcgtggagagcgccaaggccattctgggcggaagcaaggtgcgcgtggaccaaaagtgcaagtcatcggcccagatcgaacccactcccgtgatcgtcacctccaacaccaacatgtgcgccgtgattgacgggaacagcaccaccttcgagcatcagcagccgctgcaggaccggatgtttgaatttgaacttacccgccgtttggaccatgactttgggaaggtcaccaaacaggaagtaaaggactttttccggtgggcttccgatcacgtgactgacgtggctcatgagttctacgtcagaaagggtggagctaagaaacgccccgcctccaatgacgcggatgtaagcgagccaaaacgggagtgcacgtcacttgcgcagccgacaacgtcagacgcggaagcaccggcggactacgcggacaggtaccaaaacaaatgttctcgtcacgtgggcatgaatctgatgctttttccctgtaaaacatgcgagagaatgaatcaaatttccaatgtctgttttacgcatggtcaaagagactgtggggaatgcttccctggaatgtcagaatctcaacccgtttctgtcgtcaaaaagaagacttatcagaaactgtgtccaattcatcatatcctgggaagggcacccgagattgcctgttcggcctgcgatttggccaatgtggacttggatgactgtgtttctgagcaataaatgacttaaaccaggtatggctgctgacggttatcttccagattggctcgaggacaacctttctgaaggcattcgtgagtggtgggctctgaaacctggagtccctcaacccaaagcgaaccaacaacaccaggacaaccgtcggggtcttgtgcttccgggttacaaatacctcggacccggtaacggactcgacaaaggagagccggtcaacgaggcggacgcggcagccctcgaacacgacaaagcttacgaccagcagctcaaggccggtgacaacccgtacctcaagtacaaccacgccgacgccgagtttcaggagcgtcttcaagaagatacgtcttttgggggcaaccttggcagagcagtcttccaggccaaaaagaggatccttgagcctcttggtctggttgaggaagcagctaaaacggctcctggaaagaagggggctgtagatcagtctcctcaggaaccggactcatcatctggtgttggcaaatcgggcaaacagcctgccagaaaaagactaaatttcggtcagactggagactcagagtcagtcccagaccctcaacctctcggagaaccaccagcagcccccacaagtttgggatctaatacaatggcttcaggcggtggcgcaccaatggcagacaataacgagggtgccgatggagtgggtaattcctcaggaaattggcattgcgattcccaatggctgggcgacagagtcatcaccaccagcaccagaacctgggccctgcccacttacaacaaccatctctacaagcaaatctccagccaatcaggagcttcaaacgacaaccactactttggctacagcaccccttgggggtattttgactttaacagattccactgccacttctcaccacgtgactggcagcgactcattaacaacaactggggattccggcccaagaaactcagcttcaagctcttcaacatccaagttagaggggtcacgcagaacgatggcacgacgactattgccaataaccttaccagcacggttcaagtgtttacggactcggagtatcagctcccgtacgtgctcgggtcggcgcaccaaggctgtctcccgccgtttccagcggacgtcttcatggtccctcagtatggatacctcaccctgaacaacggaagtcaagcggtgggacgctcatccttttactgcctggagtacttcccttcgcagatgctaaggactggaaataacttccaattcagctataccttcgaggatgtaccttttcacagcagctacgctcacagccagagtttggatcgcttgatgaatcctcttattgatcagtatctgtactacctgaacagaacgcaaggaacaacctctggaacaaccaaccaatcacggctgctttttagccaggctgggcctcagtctatgtctttgcaggccagaaattggctacctgggccctgctaccggcaacagagactttcaaagactgctaacgacaacaacaacagtaactttccttggacagcggccagcaaatatcatctcaatggccgcgactcgctggtgaatccaggaccagctatggccagtcacaaggacgatgaagaaaaatttttccctatgcacggcaatctaatatttggcaaagaagggacaacggcaagtaacgcagaattagataatgtaatgattacggatgaagaagagattcgtaccaccaatcctgtggcaacagagcagtatggaactgtggcaaataacttgcagagctcaaatacagctcccacgactggaactgtcaatcatcagggggccttacctggcatggtgtggcaagatcgtgacgtgtaccttcaaggacctatctgggcaaagattcctcacacggatggacactttcatccttctcctctgatgggaggctttggactgaaacatccgcctcctcaaatcatgatcaaaaatactccggtaccggcaaatcctccgacgactttcagcccggccaagtttgcttcatttatcactcagtactccactggacaggtcagcgtggaaattgagtgggagctacagaaagaaaacagcaaacgttggaatccagagattcagtacacttccaactacaacaagtctgttaatgtggactttactgtagacactaatggtgtttatagtgaacctcgccctattggaacccggtatctcacacgaaacttgtgaatcctggttaatcaataaaccgtttaattcgtttcagttgaactttggctcttgtgcacttctttatctttatcttgtttccatggctactgcgtagataagcagcggcctgcggcgcttgcgcttcgcggtttacaactgctggttaatatttaactctcgccatacctctagtgatggagttggccactccctctatgcgcactcgctcgctcggtggggcctggcgaccaaaggtcgccagacggacgtgctttgcacgtccggccccaccgagcgagcgagtgcgcatagagggagtggccaa

SEQ ID NO: 5125 - protein, 736 aa, Adeno-associated virus 3A; identical to SEQ ID NO: 4757

SEQ ID NO: 5126 - protein, 624 aa, Adeno-associated virus 3A
MPGFYEIVLKVPSDLDERLPGISNSFVNWVAEKEWDVPPDSDMDPNLIEQAPLTVAEKLQREFLVEWRRVSKAPEALFFVQFEKGETYFHLHVLIETIGVKSMVVGRYVSQIKEKLVTRIYRGVEPQLPNWFAVTKTRNGAGGGNKVVDDCYIPNYLLPKTQPELQWAWTNMDQYLSACLNLAERKRLVAQHLTHVSQTQEQNKENQNPNSDAPVIRSKTSARYMELVGWLVDRGITSEKQWIQEDQASYISFNAASNSRSQIKAALDNASKIMSLTKTAPDYLVGSNPPEDITKNRIYQILELNGYDPQYAASVFLGWAQKKFGKRNTIWLFGPATTGKTNIAEAIAHAVPFYGCVNWTNENFPFNDCVDKMVIWWEEGKMTAKVVESAKAILGGSKVRVDQKCKSSAQIEPTPVIVTSNTNMCAVIDGNSTTFEHQQPLQDRMFEFELTRRLDHDFGKVTKQEVKDFFRWASDHVTDVAHEFYVRKGGAKKRPASNDADVSEPKRECTSLAQPTTSDAEAPADYADRYQNKCSRHVGMNLMLFPCKTCERMNQISNVCFTHGQRDCGECFPGMSESQPVSVVKKKTYQKLCPIHHILGRAPEIACSACDLANVDLDDCVSEQ

SEQ ID NO: 5127 - protein, 736 aa, Adeno-associated virus 3B
MAADGYLPDWLEDNLSEGIREWWALKPGVPQPKANQQHQDNRRGLVLPGYKYLGPGNGLDKGEPVNEADAAALEHDKAYDQQLKAGDNPYLKYNHADAEFQERLQEDTSFGGNLGRAVFQAKKRILEPLGLVEEAAKTAPGKKRPVDQSPQEPDSSSGVGKSGKQPARKRLNFGQTGDSESVPDPQPLGEPPAAPTSLGSNTMASGGGAPMADNNEGADGVGNSSGNWHCDSQWLGDRVITTSTRTWALPTYNNHLYKQISSQSGASNDNHYFGYSTPWGYFDFNRFHCHFSPRDWQRLINNNWGFRPKKLSFKLFNIQVKEVTQNDGTTTIANNLTSTVQVFTDSEYQLPYVLGSAHQGCLPPFPADVFMVPQYGYLTLNNGSQAVGRSSFYCLEYFPSQMLRTGNNFQFSYTFEDVPFHSSYAHSQSLDRLMNPLIDQYLYYLNRTQGTTSGTTNQSRLLFSQAGPQSMSLQARNWLPGPCYRQQRLSKTANDNNNSNFPWTAASKYHLNGRDSLVNPGPAMASHKDDEEKFFPMHGNLIFGKEGTTASNAELDNVMITDEEEIRTTNPVATEQYGTVANNLQSSNTAPTTRTVNDQGALPGMVWQDRDVYLQGPIWAKIPHTDGHFHPSPLMGGFGLKHPPPQIMIKNTPVPANPPTTFSPAKFASFITQYSTGQVSVEIEWELQKENSKRWNPEIQYTSNYNKSVNVDFTVDTNGVYSEPRPIGTRYLTRNL

SEQ ID NO: 5128 - protein, 624 aa, Adeno-associated virus 3B
MPGFYEIVLKVPSDLDEHLPGISNSFVNWVAEKEWELPPDSDMDPNLIEQAPLTVAEKLQREFLVEWRRVSKAPEALFFVQFEKGETYFHLHVLIETIGVKSMVVGRYVSQIKEKLVTRIYRGVEPQLPNWFAVTKTRNGAGGGNKVVDDCYIPNYLLPKTQPELQWAWTNMDQYLSACLNLAERKRLVAQHLTHVSQTQEQNKENQNPNSDAPVIRSKTSARYMELVGWLVDRGITSEKQWIQEDQASYISFNAASNSRSQIKAALDNASKIMSLTKTAPDYLVGSNPPEDITKNRIYQILELNGYDPQYAASVFLGWAQKKFGKRNTIWLFGPATTGKTNIAEAIAHAVPFYGCVNWTNENFPFNDCVDKMVIWWEEGKMTAKVVESAKAILGGSKVRVDQKCKSSAQIEPTPVIVTSNTNMCAVIDGNSTTFEHQQPLQDRMFKFELTRRLDHDFGKVTKQEVKDFFRWASDHVTDVAHEFYVRKGGAKKRPASNDADVSEPKRQCTSLAQPTTSDAEAPADYADRYQNKCSRHVGMNLMLFPCKTCERMNQISNVCFTHGQRDCGECFPGMSESQPVSVVKKKTYQKLCPIHHILGRAPEIACSACDLANVDLDDCVSEQ

SEQ ID NO: 5129 - DNA, 4722 bp, Adeno-associated virus 3B
tggccactccctctatgcgcactcgctcgctcggtggggcctggcgaccaaaggtcgccagacggacgtgctttgcacgtccggccccaccgagcgagcgagtgcgcatagagggagtggccaactccatcactagaggtatggcagtgacgtaacgcgaagcgcgcgaagcgagaccacgcctaccagctgcgtcagcagtcaggtgacccttttgcgacagtttgcgacaccacgtggccgctgagggtatatattctcgagtgagcgaaccaggagctccattttgaccgcgaaatttgaacgagcagcagccatgccggggttctacgagattgtcctgaaggtcccgagtgacctggacgagcacctgccgggcatttctaactcgtttgttaactgggtggccgagaaggaatgggagctgccgccggattctgacatggatccgaatctgattgagcaggcacccctgaccgtggccgaaaagcttcagcgcgagttcctggtggagtggcgccgcgtgagtaaggccccggaggccctcttttttgtccagttcgaaaagggggagacctacttccacctgcacgtgctgattgagaccatcggggtcaaatccatggtggtcggccgctacgtgagccagattaaagagaagctggtgacccgcatctaccgcggggtcgagccgcagcttccgaactggttcgcggtgaccaaaacgcgaaatggcgccgggggcgggaacaaggtggtggacgactgctacatccccaactacctgctccccaagacccagcccgagctccagtgggcgtggactaacatggaccagtatttaagcgcctgtttgaatctcgcggagcgtaaacggctggtggcgcagcatctgacgcacgtgtcgcagacgcaggagcagaacaaagagaatcagaaccccaattctgacgcgccggtcatcaggtcaaaaacctcagccaggtacatggagctggtcgggtggctggtggaccgcgggatcacgtcagaaaagcaatggattcaggaggaccaggcctcgtacatctccttcaacgccgcctccaactcgcggtcccagatcaaggccgcgctggacaatgcctccaagatcatgagcctgacaaagacggctccggactacctggtgggcagcaacccgccggaggacattaccaaaaatcggatctaccaaatcctggagctgaacgggtacgatccgcagtacgcggcctccgtcttcctgggctgggcgcaaaagaagttcgggaagaggaacaccatctggctctttgggccggccacgacgggtaaaaccaacatcgcggaagccatcgcccacgccgtgcccttctacggctgcgtaaactggaccaatgagaactttcccttcaacgattgcgtcgacaagatggtgatctggtgggaggagggcaagatgacggccaaggtcgtggagagcgccaaggccattctgggcggaagcaaggtgcgcgtggaccaaaagtgcaagtcatcggcccagatcgaacccactcccgtgatcgtcacctccaacaccaacatgtgcgccgtgattgacgggaacagcaccaccttcgagcatcagcagccgctgcaggaccggatgtttaaatttgaacttacccgccgtttggaccatgactttgggaaggtcaccaaacaggaagtaaaggactttttccggtgggcttccgatcacgtgactgacgtggctcatgagttctacgtcagaaagggtggagctaagaaacgccccgcctccaatgacgcggatgtaagcgagccaaaacggcagtgcacgtcacttgcgcagccgacaacgtcagacgcggaagcaccggcggactacgcggacaggtaccaaaacaaatgttctcgtcacgtgggcatgaatctgatgctttttccctgtaaaacatgcgagagaatgaatcaaatttccaatgtctgttttacgcatggtcaaagagactgtggggaatgcttccctggaatgtcagaatctcaacccgtttctgtcgtcaaaaagaagacttatcagaaactgtgtccaattcatcatatcctgggaagggcacccgagattgcctgttcggcctgcgatttggccaatgtggacttggatgactgtgtttctgagcaataaatgacttaaaccaggtatggctgctgacggttatcttccagattggctcgaggacaacctttctgaaggcattcgtgagtggtgggctctgaaacctggagtccctcaacccaaagcgaaccaacaacaccaggacaaccgtcggggtcttgtgcttccgggttacaaatacctcggacccggtaacggactcgacaaaggagagccggtcaacgaggcggacgcggcagccctcgaacacgacaaagcttacgaccagcagctcaaggccggtgacaacccgtacctcaagtacaaccacgccgacgccgagtttcaggagcgtcttcaagaagatacgtcttttgggggcaaccttggcagagcagtcttccaggccaaaaagaggatccttgagcctcttggtctggttgaggaagcagctaaaacggctcctggaaagaagaggcctgtagatcagtctcctcaggaaccggactcatcatctggtgttggcaaatcgggcaaacagcctgccagaaaaagactaaatttcggtcagactggcgactcagagtcagtcccagaccctcaacctctcggagaaccaccagcagcccccacaagtttgggatctaatacaatggcttcaggcggtggcgcaccaatggcagacaataacgagggtgccgatggagtgggtaattcctcaggaaattggcattgcgattcccaatggctgggcgacagagtcatcaccaccagcaccagaacctgggccctgcccacttacaacaaccatctctacaagcaaatctccagccaatcaggagcttcaaacgacaaccactactttggctacagcaccccttgggggtattttgactttaacagattccactgccacttctcaccacgtgactggcagcgactcattaacaacaactggggattccggcccaagaaactcagcttcaagctcttcaacatccaagttaaagaggtcacgcagaacgatggcacgacgactattgccaataaccttaccagcacggttcaagtgtttacggactcggagtatcagctcccgtacgtgctcgggtcggcgcaccaaggctgtctcccgccgtttccagcggacgtcttcatggtccctcagtatggatacctcaccctgaacaacggaagtcaagcggtgggacgctcatccttttactgcctggagtacttcccttcgcagatgctaaggactggaaataacttccaattcagctataccttcgaggatgtaccttttcacagcagctacgctcacagccagagtttggatcgcttgatgaatcctcttattgatcagtatctgtactacctgaacagaacgcaaggaacaacctctggaacaaccaaccaatcacggctgctttttagccaggctgggcctcagtctatgtctttgcaggccagaaattggctacctgggccctgctaccggcaacagagactttcaaagactgctaacgacaacaacaacagtaactttccttggacagcggccagcaaatatcatctcaatggccgcgactcgctggtgaatccaggaccagctatggccagtcacaaggacgatgaagaaaaatttttccctatgcacggcaatctaatatttggcaaagaagggacaacggcaagtaacgcagaattagataatgtaatgattacggatgaagaagagattcgtaccaccaatcctgtggcaacagagcagtatggaactgtggcaaataacttgcagagctcaaatacagctcccacgactagaactgtcaatgatcagggggccttacctggcatggtgtggcaagatcgtgacgtgtaccttcaaggacctatctgggcaaagattcctcacacggatggacactttcatccttctcctctgatgggaggctttggactgaaacatccgcctcctcaaatcatgatcaaaaatactccggtaccggcaaatcctccgacgactttcagcccggccaagtttgcttcatttatcactcagtactccactggacaggtcagcgtggaaattgagtgggagctacagaaagaaaacagcaaacgttggaatccagagattcagtacacttccaactacaacaagtctgttaatgtggactttactgtagacactaatggtgtttatagtgaacctcgccctattggaacccggtatctcacacgaaacttgtaatcctggttaatcaataaaccgtttaattcgtttcagttgaactttggctcttgtgcacttcttatcttatcttgtttccatggctactgcgtagataagcagcggcctgcggcgcttgcgcttcgcggtttacaactgctggttaatatttaactctcgccatacctctagtgatggagttggccactccctctatgcgcactcgctcgctcggtggggccggacgtgcaaagcacgtccgtctggcgacctttggtcgccaggccccaccgagcgagcgagtgcgcatagagggagtggccaa

SEQ ID NO: 5130 - DNA, 1800 bp, Adeno-associated virus 4
  modified_base (342)..(342): a, c, t or g
acggctcctggaaagaagagaccgttgattgaatccccccagcagcccgactcctccacgggtatcggcaaaaaaggcaagcagccggctaaaaagaagctcgttttcgaagacgaaactggagcaggcgacggaccccctgagggatcaacttccggagccatgtctgatgacagtgagatgcgtgcagcagctggcggagctgcagtcgagggsggacaaggtgccgatggagtgggtaatgcctcgggtgattggcattgcgattccacctggtctgagggccacgtcacgaccaccagcaccagaacctgggtcttgcccacctacaacaaccacctntacaagcgactcggagagagcctgcagtccaacacctacaacggattctccaccccctggggatactttgacttcaaccgcttccactgccacttctcaccacgtgactggcagcgactcatcaacaacaactggggcatgcgacccaaagccatgcgggtcaaaatcttcaacatccaggtcaaggaggtcacgacgtcgaacggcgagacaacggtggctaataaccttaccagcacggttcagatctttgcggactcgtcgtacgaactgccgtacgtgatggatgcgggtcaagagggcagcctgcctccttttcccaacgacgtctttatggtgccccagtacggctactgtggactggtgaccggcaacacttcgcagcaacagactgacagaaatgccttctactgcctggagtactttccttcgcagatgctgcggactggcaacaactttgaaattacgtacagttttgagaaggtgcctttccactcgatgtacgcgcacagccagagcctggaccggctgatgaaccctctcatcgaccagtacctgtggggactgcaatcgaccaccaccggaaccaccctgaatgccgggactgccaccaccaactttaccaagctgcggcctaccaacttttccaactttaaaaagaactggctgcccgggccttcaatcaagcagcagggcttctcaaagactgccaatcaaaactacaagatccctgccaccgggtcagacagtctcatcaaatacgagacgcacagcactctggacggaagatggagtgccctgacccccggacctccaatggccacggctggacctgcggacagcaagttcagcaacagccagctcatctttgcggggcctaaacagaacggcaacacggccaccgtacccgggactctgatcttcacctctgaggaggagctggcagccaccaacgccaccgatacggacatgtggggcaacctacctggcggtgaccagagcaacagcaacctgccgaccgtggacagactgacagccttgggagccgtgcctggaatggtctggcaaaacagagacatttactaccagggtcccatttgggccaagattcctcataccgatggacactttcacccctcaccgctgattggtgggtttgggctgaaacacccgcctcctcaaatttttatcaagaacaccccggtacctgcgaatcctgcaacgaccttcagctctactccggtaaactccttcattactcagtacagcactggccaggtgtcggtgcagattgactgggagatccagaaggagcggtccaaacgctggaaccccgaggtccagtttacctccaactacggacagcaaaactctctgttgtgggctcccgatgcggctgggaaatacactgagcctagggctatcggtacccgctacctcacccaccacctgtaataa

SEQ ID NO: 5131 - DNA, 2208 bp, Adeno-associated virus 4
  modified_base (750)..(750): a, c, t or g
atgactgacggttaccttccagattggctagaggacaacctctctgaaggcgttcgagagtggtgggcgctgcaacctggagcccctaaacccaaggcaaatcaacaacatcaggacaacgctcggggtcttgtgcttccgggttacaaatacctcggacccggcaacggactcgacaagggggaacccgtcaacgcagcggacgcggcagccctcgagcacgacaaggcctacgaccagcagctcaaggccggtgacaacccctacctcaagtacaaccacgccgacgcggagttccagcagcggcttcagggcgacacatcgtttgggggcaacctcggcagagcagtcttccaggccaaaaagagggttcttgaacctcttggtctggttgagcaagcgggtgagacggctcctggaaagaagagaccgttgattgaatccccccagcagcccgactcctccacgggtatcggcaaaaaaggcaagcagccggctaaaaagaagctcgttttcgaagacgaaactggagcaggcgacggaccccctgagggatcaacttccggagccatgtctgatgacagtgagatgcgtgcagcagctggcggagctgcagtcgagggsggacaaggtgccgatggagtgggtaatgcctcgggtgattggcattgcgattccacctggtctgagggccacgtcacgaccaccagcaccagaacctgggtcttgcccacctacaacaaccacctntacaagcgactcggagagagcctgcagtccaacacctacaacggattctccaccccctggggatactttgacttcaaccgcttccactgccacttctcaccacgtgactggcagcgactcatcaacaacaactggggcatgcgacccaaagccatgcgggtcaaaatcttcaacatccaggtcaaggaggtcacgacgtcgaacggcgagacaacggtggctaataaccttaccagcacggttcagatctttgcggactcgtcgtacgaactgccgtacgtgatggatgcgggtcaagagggcagcctgcctccttttcccaacgacgtctttatggtgccccagtacggctactgtggactggtgaccggcaacacttcgcagcaacagactgacagaaatgccttctactgcctggagtactttccttcgcagatgctgcggactggcaacaactttgaaattacgtacagttttgagaaggtgcctttccactcgatgtacgcgcacagccagagcctggaccggctgatgaaccctctcatcgaccagtacctgtggggactgcaatcgaccaccaccggaaccaccctgaatgccgggactgccaccaccaactttaccaagctgcggcctaccaacttttccaactttaaaaagaactggctgcccgggccttcaatcaagcagcagggcttctcaaagactgccaatcaaaactacaagatccctgccaccgggtcagacagtctcatcaaatacgagacgcacagcactctggacggaagatggagtgccctgacccccggacctccaatggccacggctggacctgcggacagcaagttcagcaacagccagctcatctttgcggggcctaaacagaacggcaacacggccaccgtacccgggactctgatcttcacctctgaggaggagctggcagccaccaacgccaccgatacggacatgtggggcaacctacctggcggtgaccagagcaacagcaacctgccgaccgtggacagactgacagccttgggagccgtgcctggaatggtctggcaaaacagagacatttactaccagggtcccatttgggccaagattcctcataccgatggacactttcacccctcaccgctgattggtgggtttgggctgaaacacccgcctcctcaaatttttatcaagaacaccccggtacctgcgaatcctgcaacgaccttcagctctactccggtaaactccttcattactcagtacagcactggccaggtgtcggtgcagattgactgggagatccagaaggagcggtccaaacgctggaaccccgaggtccagtttacctccaactacggacagcaaaactctctgttgtgggctcccgatgcggctgggaaatacactgagcctagggctatcggtacccgctacctcacccaccacctgtaataa

SEQ ID NO: 5132 - DNA, 1872 bp, Adeno-associated virus 4
atgccggggttctacgagatcgtgctgaaggtgcccagcgacctggacgagcacctgcccggcatttctgactcttttgtgagctgggtggccgagaaggaatgggagctgccgccggattctgacatggacttgaatctgattgagcaggcacccctgaccgtggccgaaaagctgcaacgcgagttcctggtcgagtggcgccgcgtgagtaaggccccggaggccctcttctttgtccagttcgagaagggggacagctacttccacctgcacatcctggtggagaccgtgggcgtcaaatccatggtggtgggccgctacgtgagccagattaaagagaagctggtgacccgcatctaccgcggggtcgagccgcagcttccgaactggttcgcggtgaccaagacgcgtaatggcgccggaggcgggaacaaggtggtggacgactgctacatccccaactacctgctccccaagacccagcccgagctccagtgggcgtggactaacatggaccagtatataagcgcctgtttgaatctcgcggagcgtaaacggctggtggcgcagcatctgacgcacgtgtcgcagacgcaggagcagaacaaggaaaaccagaaccccaattctgacgcgccggtcatcaggtcaaaaacctccgccaggtacatggagctggtcgggtggctggtggaccgcgggatcacgtcagaaaagcaatggatccaggaggaccaggcgtcctacatctccttcaacgccgcctccaactcgcggtcacaaatcaaggccgcgctggacaatgcctccaaaatcatgagcctgacaaagacggctccggactacctggtgggccagaacccgccggaggacatttccagcaaccgcatctaccgaatcctcgagatgaacgggtacgatccgcagtacgcggcctccgtcttcctgggctgggcgcaaaagaagttcgggaagaggaacaccatctggctctttgggccggccacgacgggtaaaaccaacatcgcggaagccatcgcccacgccgtgcccttctacggctgcgtgaactggaccaatgagaactttccgttcaacgattgcgtcgacaagatggtgatctggtgggaggagggcaagatgacggccaaggtcgtagagagcgccaaggccatcctgggcggaagcaaggtgcgcgtggaccaaaagtgcaagtcatcggcccagatcgacccaactcccgtgatcgtcacctccaacaccaacatgtgcgcggtcatcgacggaaactcgaccaccttcgagcaccaacaaccactccaggaccggatgttcaagttcgagctcaccaagcgcctggagcacgactttggcaaggtcaccaagcaggaagtcaaagactttttccggtgggcgtcagatcacgtgaccgaggtgactcacgagttttacgtcagaaagggtggagctagaaagaggcccgcccccaatgacgcagatataagtgagcccaagcgggcctgtccgtcagttgcgcagccatcgacgtcagacgcggaagctccggtggactacgcggacaggtaccaaaacaaatgttctcgtcacgtgggtatgaatctgatgctttttccctgccggcaatgcgagagaatgaatcagaatgtggacatttgcttcacgcacggggtcatggactgtgccgagtgcttccccgtgtcagaatctcaacccgtgtctgtcgtcagaaagcggacgtatcagaaactgtgtccgattcatcacatcatggggagggcgcccgaggtggcctgctcggcctgcgaactggccaatgtggacttggatgactgtgacatggaacaataa

SEQ ID NO: 5133 - DNA, 1611 bp, Adeno-associated virus 4
atgccggggttctacgagatcgtgctgaaggtgcccagcgacctggacgagcacctgcccggcatttctgactcttttgtgagctgggtggccgagaaggaatgggagctgccgccggattctgacatggacttgaatctgattgagcaggcacccctgaccgtggccgaaaagctgcaacgcgagttcctggtcgagtggcgccgcgtgagtaaggccccggaggccctcttctttgtccagttcgagaagggggacagctacttccacctgcacatcctggtggagaccgtgggcgtcaaatccatggtggtgggccgctacgtgagccagattaaagagaagctggtgacccgcatctaccgcggggtcgagccgcagcttccgaactggttcgcggtgaccaagacgcgtaatggcgccggaggcgggaacaaggtggtggacgactgctacatccccaactacctgctccccaagacccagcccgagctccagtgggcgtggactaacatggaccagtatataagcgcctgtttgaatctcgcggagcgtaaacggctggtggcgcagcatctgacgcacgtgtcgcagacgcaggagcagaacaaggaaaaccagaaccccaattctgacgcgccggtcatcaggtcaaaaacctccgccaggtacatggagctggtcgggtggctggtggaccgcgggatcacgtcagaaaagcaatggatccaggaggaccaggcgtcctacatctccttcaacgccgcctccaactcgcggtcacaaatcaaggccgcgctggacaatgcctccaaaatcatgagcctgacaaagacggctccggactacctggtgggccagaacccgccggaggacatttccagcaaccgcatctaccgaatcctcgagatgaacgggtacgatccgcagtacgcggcctccgtcttcctgggctgggcgcaaaagaagttcgggaagaggaacaccatctggctctttgggccggccacgacgggtaaaaccaacatcgcggaagccatcgcccacgccgtgcccttctacggctgcgtgaactggaccaatgagaactttccgttcaacgattgcgtcgacaagatggtgatctggtgggaggagggcaagatgacggccaaggtcgtagagagcgccaaggccatcctgggcggaagcaaggtgcgcgtggaccaaaagtgcaagtcatcggcccagatcgacccaactcccgtgatcgtcacctccaacaccaacatgtgcgcggtcatcgacggaaactcgaccaccttcgagcaccaacaaccactccaggaccggatgttcaagttcgagctcaccaagcgcctggagcacgactttggcaaggtcaccaagcaggaagtcaaagactttttccggtgggcgtcagatcacgtgaccgaggtgactcacgagttttacgtcagaaagggtggagctagaaagaggcccgcccccaatgacgcagatataagtgagcccaagcgggcctgtccgtcagttgcgcagccatcgacgtcagacgcggaagctccggtggactacgcggacagattggctagaggacaacctctctga

SEQ ID NO: 5134 - DNA, 1872 bp, Adeno-associated virus 4; identical to SEQ ID NO: 5132

SEQ ID NO: 5135 - DNA, 1617 bp, Adeno-associated virus 4
  modified_base (162)..(162): a, c, t or g
atgcgtgcagcagctggcggagctgcagtcgagggsggacaaggtgccgatggagtgggtaatgcctcgggtgattggcattgcgattccacctggtctgagggccacgtcacgaccaccagcaccagaacctgggtcttgcccacctacaacaaccacctntacaagcgactcggagagagcctgcagtccaacacctacaacggattctccaccccctggggatactttgacttcaaccgcttccactgccacttctcaccacgtgactggcagcgactcatcaacaacaactggggcatgcgacccaaagccatgcgggtcaaaatcttcaacatccaggtcaaggaggtcacgacgtcgaacggcgagacaacggtggctaataaccttaccagcacggttcagatctttgcggactcgtcgtacgaactgccgtacgtgatggatgcgggtcaagagggcagcctgcctccttttcccaacgacgtctttatggtgccccagtacggctactgtggactggtgaccggcaacacttcgcagcaacagactgacagaaatgccttctactgcctggagtactttccttcgcagatgctgcggactggcaacaactttgaaattacgtacagttttgagaaggtgcctttccactcgatgtacgcgcacagccagagcctggaccggctgatgaaccctctcatcgaccagtacctgtggggactgcaatcgaccaccaccggaaccaccctgaatgccgggactgccaccaccaactttaccaagctgcggcctaccaacttttccaactttaaaaagaactggctgcccgggccttcaatcaagcagcagggcttctcaaagactgccaatcaaaactacaagatccctgccaccgggtcagacagtctcatcaaatacgagacgcacagcactctggacggaagatggagtgccctgacccccggacctccaatggccacggctggacctgcggacagcaagttcagcaacagccagctcatctttgcggggcctaaacagaacggcaacacggccaccgtacccgggactctgatcttcacctctgaggaggagctggcagccaccaacgccaccgatacggacatgtggggcaacctacctggcggtgaccagagcaacagcaacctgccgaccgtggacagactgacagccttgggagccgtgcctggaatggtctggcaaaacagagacatttactaccagggtcccatttgggccaagattcctcataccgatggacactttcacccctcaccgctgattggtgggtttgggctgaaacacccgcctcctcaaatttttatcaagaacaccccggtacctgcgaatcctgcaacgaccttcagctctactccggtaaactccttcattactcagtacagcactggccaggtgtcggtgcagattgactgggagatccagaaggagcggtccaaacgctggaaccccgaggtccagtttacctccaactacggacagcaaaactctctgttgtgggctcccgatgcggctgggaaatacactgagcctagggctatcggtacccgctacctcacccaccacctgtaa

SEQ ID NO: 5136 - DNA, 939 bp, Adeno-associated virus 4
atggagctggtcgggtggctggtggaccgcgggatcacgtcagaaaagcaatggatccaggaggaccaggcgtcctacatctccttcaacgccgcctccaactcgcggtcacaaatcaaggccgcgctggacaatgcctccaaaatcatgagcctgacaaagacggctccggactacctggtgggccagaacccgccggaggacatttccagcaaccgcatctaccgaatcctcgagatgaacgggtacgatccgcagtacgcggcctccgtcttcctgggctgggcgcaaaagaagttcgggaagaggaacaccatctggctctttgggccggccacgacgggtaaaaccaacatcgcggaagccatcgcccacgccgtgcccttctacggctgcgtgaactggaccaatgagaactttccgttcaacgattgcgtcgacaagatggtgatctggtgggaggagggcaagatgacggccaaggtcgtagagagcgccaaggccatcctgggcggaagcaaggtgcgcgtggaccaaaagtgcaagtcatcggcccagatcgacccaactcccgtgatcgtcacctccaacaccaacatgtgcgcggtcatcgacggaaactcgaccaccttcgagcaccaacaaccactccaggaccggatgttcaagttcgagctcaccaagcgcctggagcacgactttggcaaggtcaccaagcaggaagtcaaagactttttccggtgggcgtcagatcacgtgaccgaggtgactcacgagttttacgtcagaaagggtggagctagaaagaggcccgcccccaatgacgcagatataagtgagcccaagcgggcctgtccgtcagttgcgcagccatcgacgtcagacgcggaagctccggtggactacgcggacagattggctagaggacaacctctctga

SEQ ID NO: 5137 - DNA, 1197 bp, Adeno-associated virus 4
atggagctggtcgggtggctggtggaccgcgggatcacgtcagaaaagcaatggatccaggaggaccaggcgtcctacatctccttcaacgccgcctccaactcgcggtcacaaatcaaggccgcgctggacaatgcctccaaaatcatgagcctgacaaagacggctccggactacctggtgggccagaacccgccggaggacatttccagcaaccgcatctaccgaatcctcgagatgaacgggtacgatccgcagtacgcggcctccgtcttcctgggctgggcgcaaaagaagttcgggaagaggaacaccatctggctctttgggccggccacgacgggtaaaaccaacatcgcggaagccatcgcccacgccgtgcccttctacggctgcgtgaactggaccaatgagaactttccgttcaacgattgcgtcgacaagatggtgatctggtgggaggagggcaagatgacggccaaggtcgtagagagcgccaaggccatcctgggcggaagcaaggtgcgcgtggaccaaaagtgcaagtcatcggcccagatcgacccaactcccgtgatcgtcacctccaacaccaacatgtgcgcggtcatcgacggaaactcgaccaccttcgagcaccaacaaccactccaggaccggatgttcaagttcgagctcaccaagcgcctggagcacgactttggcaaggtcaccaagcaggaagtcaaagactttttccggtgggcgtcagatcacgtgaccgaggtgactcacgagttttacgtcagaaagggtggagctagaaagaggcccgcccccaatgacgcagatataagtgagcccaagcgggcctgtccgtcagttgcgcagccatcgacgtcagacgcggaagctccggtggactacgcggacaggtaccaaaacaaatgttctcgtcacgtgggtatgaatctgatgctttttccctgccggcaatgcgagagaatgaatcagaatgtggacatttgcttcacgcacggggtcatggactgtgccgagtgcttccccgtgtcagaatctcaacccgtgtctgtcgtcagaaagcggacgtatcagaaactgtgtccgattcatcacatcatggggagggcgcccgaggtggcctgctcggcctgcgaactggccaatgtggacttggatgactgtgacatggaacaa

SEQ ID NO: 5138 - DNA, 245 bp, Adeno-associated virus 4
ctccatcatctaggtttgcccactgacgtcaatgtgacgtcctagggttagggaggtccctgtattagcagtcacgtgagtgtcgtatttcgcggagcgtagcggagcgcataccaagctgccacgtcacagccacgtggtccgtttgcgacagtttgcgacaccatgtggtcaggagggtatataaccgcgagtgagccagcgaggagctccattttgcccgcgaattttgaacgagcagcagc

SEQ ID NO: 5139 - protein, 313 aa, Adeno-associated virus 4
  MOD_RES (313)..(313): Any amino acid
MELVGWLVDRGITSEKQWIQEDQASYISFNAASNSRSQIKAALDNASKIMSLTKTAPDYLVGQNPPEDISSNRIYRILEMNGYDPQYAASVFLGWAQKKFGKRNTIWLFGPATTGKTNIAEAIAHAVPFYGCVNWTNENFPFNDCVDKMVIWWEEGKMTAKVVESAKAILGGSKVRVDQKCKSSAQIDPTPVIVTSNTNMCAVIDGNSTTFEHQQPLQDRMFKFELTKRLEHDFGKVTKQEVKDFFRWASDHVTEVTHEFYVRKGGARKRPAPNDADISEPKRACPSVAQPSTSDAEAPVDYADRLARGQPLX

SEQ ID NO: 5140 - protein, 399 aa, Adeno-associated virus 4
MELVGWLVDRGITSEKQWIQEDQASYISFNAASNSRSQIKAALDNASKIMSLTKTAPDYLVGQNPPEDISSNRIYRILEMNGYDPQYAASVFLGWAQKKFGKRNTIWLFGPATTGKTNIAEAIAHAVPFYGCVNWTNENFPFNDCVDKMVIWWEEGKMTAKVVESAKAILGGSKVRVDQKCKSSAQIDPTPVIVTSNTNMCAVIDGNSTTFEHQQPLQDRMFKFELTKRLEHDFGKVTKQEVKDFFRWASDHVTEVTHEFYVRKGGARKRPAPNDADISEPKRACPSVAQPSTSDAEAPVDYADRYQNKCSRHVGMNLMLFPCRQCERMNQNVDICFTHGVMDCAECFPVSESQPVSVVRKRTYQKLCPIHHIMGRAPEVACSACELANVDLDDCDMEQ

SEQ ID NO: 5141 - protein, 623 aa, Adeno-associated virus 4
MPGFYEIVLKVPSDLDEHLPGISDSFVSWVAEKEWELPPDSDMDLNLIEQAPLTVAEKLQREFLVEWRRVSKAPEALFFVQFEKGDSYFHLHILVETVGVKSMVVGRYVSQIKEKLVTRIYRGVEPQLPNWFAVTKTRNGAGGGNKVVDDCYIPNYLLPKTQPELQWAWTNMDQYISACLNLAERKRLVAQHLTHVSQTQEQNKENQNPNSDAPVIRSKTSARYMELVGWLVDRGITSEKQWIQEDQASYISFNAASNSRSQIKAALDNASKIMSLTKTAPDYLVGQNPPEDISSNRIYRILEMNGYDPQYAASVFLGWAQKKFGKRNTIWLFGPATTGKTNIAEAIAHAVPFYGCVNWTNENFPFNDCVDKMVIWWEEGKMTAKVVESAKAILGGSKVRVDQKCKSSAQIDPTPVIVTSNTNMCAVIDGNSTTFEHQQPLQDRMFKFELTKRLEHDFGKVTKQEVKDFFRWASDHVTEVTHEFYVRKGGARKRPAPNDADISEPKRACPSVAQPSTSDAEAPVDYADRYQNKCSRHVGMNLMLFPCRQCERMNQNVDICFTHGVMDCAECFPVSESQPVSVVRKRTYQKLCPIHHIMGRAPEVACSACELANVDLDDCDMEQ

SEQ ID NO: 5142 - protein, 537 aa, Adeno-associated virus 4
  MOD_RES (537)..(537): Any amino acid
MPGFYEIVLKVPSDLDEHLPGISDSFVSWVAEKEWELPPDSDMDLNLIEQAPLTVAEKLQREFLVEWRRVSKAPEALFFVQFEKGDSYFHLHILVETVGVKSMVVGRYVSQIKEKLVTRIYRGVEPQLPNWFAVTKTRNGAGGGNKVVDDCYIPNYLLPKTQPELQWAWTNMDQYISACLNLAERKRLVAQHLTHVSQTQEQNKENQNPNSDAPVIRSKTSARYMELVGWLVDRGITSEKQWIQEDQASYISFNAASNSRSQIKAALDNASKIMSLTKTAPDYLVGQNPPEDISSNRIYRILEMNGYDPQYAASVFLGWAQKKFGKRNTIWLFGPATTGKTNIAEAIAHAVPFYGCVNWTNENFPFNDCVDKMVIWWEEGKMTAKVVESAKAILGGSKVRVDQKCKSSAQIDPTPVIVTSNTNMCAVIDGNSTTFEHQQPLQDRMFKFELTKRLEHDFGKVTKQEVKDFFRWASDHVTEVTHEFYVRKGGARKRPAPNDADISEPKRACPSVAQPSTSDAEAPVDYADRLARGQPLX

SEQ ID NO: 5143 - protein, 623 aa, Adeno-associated virus 4; identical to SEQ ID NO: 5141

SEQ ID NO: 5144 - protein, 544 aa, Adeno-associated virus 4
MSDDSEMRAAAGGAAVEGGQGADGVGNASGDWHCDSTWSEGHVTTTSTRTWVLPTYNNHLYKRLGESLQSNTYNGFSTPWGYFDFNRFHCHFSPRDWQRLINNNWGMRPKAMRVKIFNIQVKEVTTSNGETTVANNLTSTVQIFADSSYELPYVMDAGQEGSLPPFPNDVFMVPQYGYCGLVTGNTSQQQTDRNAFYCLEYFPSQMLRTGNNFEITYSFEKVPFHSMYAHSQSLDRLMNPLIDQYLWGLQSTTTGTTLNAGTATTNFTKLRPTNFSNFKKNWLPGPSIKQQGFSKTANQNYKIPATGSDSLIKYETHSTLDGRWSALTPGPPMATAGPADSKFSNSQLIFAGPKQNGNTATVPGTLIFTSEEELAATNATDTDMWGNLPGGDQSNSNLPTVDRLTALGAVPGMVWQNRDIYYQGPIWAKIPHTDGHFHPSPLIGGFGLKHPPPQIFIKNTPVPANPATTFSSTPVNSFITQYSTGQVSVQIDWEIQKERSKRWNPEVQFTSNYGQQNSLLWAPDAAGKYTEPRAIGTRYLTHHL

SEQ ID NO: 5145 - protein, 734 aa, Adeno-associated virus 4; identical to SEQ ID NO: 4791

SEQ ID NO: 5146 - protein, 598 aa, Adeno-associated virus 4
TAPGKKRPLIESPQQPDSSTGIGKKGKQPAKKKLVFEDETGAGDGPPEGSTSGAMSDDSEMRAAAGGAAVEGGQGADGVGNASGDWHCDSTWSEGHVTTTSTRTWVLPTYNNHLYKRLGESLQSNTYNGFSTPWGYFDFNRFHCHFSPRDWQRLINNNWGMRPKAMRVKIFNIQVKEVTTSNGETTVANNLTSTVQIFADSSYELPYVMDAGQEGSLPPFPNDVFMVPQYGYCGLVTGNTSQQQTDRNAFYCLEYFPSQMLRTGNNFEITYSFEKVPFHSMYAHSQSLDRLMNPLIDQYLWGLQSTTTGTTLNAGTATTNFTKLRPTNFSNFKKNWLPGPSIKQQGFSKTANQNYKIPATGSDSLIKYETHSTLDGRWSALTPGPPMATAGPADSKFSNSQLIFAGPKQNGNTATVPGTLIFTSEEELAATNATDTDMWGNLPGGDQSNSNLPTVDRLTALGAVPGMVWQNRDIYYQGPIWAKIPHTDGHFHPSPLIGGFGLKHPPPQIFIKNTPVPANPATTFSSTPVNSFITQYSTGQVSVQIDWEIQKERSKRWNPEVQFTSNYGQQNSLLWAPDAAGKYTEPRAIGTRYLTHHL

SEQ ID NO: 5147 - DNA, 129 bp, Adeno-associated virus 4
ttggccactccctctatgcgcgctcgctcactcactcggccctgcggccagaggccggcagtctggagacctttggtgtccagggcagggccgagtgagtgagcgagcgcgcatagagggagtggccaa

SEQ ID NO: 5148 - DNA, 125 bp, Adeno-associated virus 4
ttggccactccctctatgcgcgctcgctcactcactcggccctggagaccaaaggtctccagactgccggcctctggccggcagggccgagtgagtgagcgagcgcgcatagagggagtggccaa

SEQ ID NO: 5149 - DNA, 4768 bp, Adeno-associated virus 4
  modified_base (3009)..(3009): a, c, t or g
ttggccactccctctatgcgcgctcgctcactcactcggccctggagaccaaaggtctccagactgccggcctctggccggcagggccgagtgagtgagcgagcgcgcatagagggagtggccaactccatcatctaggtttgcccactgacgtcaatgtgacgtcctagggttagggaggtccctgtattagcagtcacgtgagtgtcgtatttcgcggagcgtagcggagcgcataccaagctgccacgtcacagccacgtggtccgtttgcgacagtttgcgacaccatgtggtcaggagggtatataaccgcgagtgagccagcgaggagctccattttgcccgcgaattttgaacgagcagcagccatgccggggttctacgagatcgtgctgaaggtgcccagcgacctggacgagcacctgcccggcatttctgactcttttgtgagctgggtggccgagaaggaatgggagctgccgccggattctgacatggacttgaatctgattgagcaggcacccctgaccgtggccgaaaagctgcaacgcgagttcctggtcgagtggcgccgcgtgagtaaggccccggaggccctcttctttgtccagttcgagaagggggacagctacttccacctgcacatcctggtggagaccgtgggcgtcaaatccatggtggtgggccgctacgtgagccagattaaagagaagctggtgacccgcatctaccgcggggtcgagccgcagcttccgaactggttcgcggtgaccaagacgcgtaatggcgccggaggcgggaacaaggtggtggacgactgctacatccccaactacctgctccccaagacccagcccgagctccagtgggcgtggactaacatggaccagtatataagcgcctgtttgaatctcgcggagcgtaaacggctggtggcgcagcatctgacgcacgtgtcgcagacgcaggagcagaacaaggaaaaccagaaccccaattctgacgcgccggtcatcaggtcaaaaacctccgccaggtacatggagctggtcgggtggctggtggaccgcgggatcacgtcagaaaagcaatggatccaggaggaccaggcgtcctacatctccttcaacgccgcctccaactcgcggtcacaaatcaaggccgcgctggacaatgcctccaaaatcatgagcctgacaaagacggctccggactacctggtgggccagaacccgccggaggacatttccagcaaccgcatctaccgaatcctcgagatgaacgggtacgatccgcagtacgcggcctccgtcttcctgggctgggcgcaaaagaagttcgggaagaggaacaccatctggctctttgggccggccacgacgggtaaaaccaacatcgcggaagccatcgcccacgccgtgcccttctacggctgcgtgaactggaccaatgagaactttccgttcaacgattgcgtcgacaagatggtgatctggtgggaggagggcaagatgacggccaaggtcgtagagagcgccaaggccatcctgggcggaagcaaggtgcgcgtggaccaaaagtgcaagtcatcggcccagatcgacccaactcccgtgatcgtcacctccaacaccaacatgtgcgcggtcatcgacggaaactcgaccaccttcgagcaccaacaaccactccaggaccggatgttcaagttcgagctcaccaagcgcctggagcacgactttggcaaggtcaccaagcaggaagtcaaagactttttccggtgggcgtcagatcacgtgaccgaggtgactcacgagttttacgtcagaaagggtggagctagaaagaggcccgcccccaatgacgcagatataagtgagcccaagcgggcctgtccgtcagttgcgcagccatcgacgtcagacgcggaagctccggtggactacgcggacaggtaccaaaacaaatgttctcgtcacgtgggtatgaatctgatgctttttccctgccggcaatgcgagagaatgaatcagaatgtggacatttgcttcacgcacggggtcatggactgtgccgagtgcttccccgtgtcagaatctcaacccgtgtctgtcgtcagaaagcggacgtatcagaaactgtgtccgattcatcacatcatggggagggcgcccgaggtggcctgctcggcctgcgaactggccaatgtggacttggatgactgtgacatggaacaataaatgactcaaaccagatatgactgacggttaccttccagattggctagaggacaacctctctgaaggcgttcgagagtggtgggcgctgcaacctggagcccctaaacccaaggcaaatcaacaacatcaggacaacgctcggggtcttgtgcttccgggttacaaatacctcggacccggcaacggactcgacaagggggaacccgtcaacgcagcggacgcggcagccctcgagcacgacaaggcctacgaccagcagctcaaggccggtgacaacccctacctcaagtacaaccacgccgacgcggagttccagcagcggcttcagggcgacacaccgtttgggggcaacctcggcagagcagtcttccaggccaaaaagagggttcttgaacctcttggtctggttgagcaagcgggtgagacggctcctggaaagaagagaccgttgattgaatccccccagcagcccgactcctccacgggtatcggcaaaaaaggcaagcagccggctaaaaagaagctcgttttcgaagacgaaactggagcaggcgacggaccccctgagggatcaacttccggagccatgtctgatgacagtgagatgcgtgcagcagctggcggagctgcagtcgagggsggacaaggtgccgatggagtgggtaatgcctcgggtgattggcattgcgattccacctggtctgagggccacgtcacgaccaccagcaccagaacctgggtcttgcccacctacaacaaccacctntacaagcgactcggagagagcctgcagtccaacacctacaacggattctccaccccctggggatactttgacttcaaccgcttccactgccacttctcaccacgtgactggcagcgactcatcaacaacaactggggcatgcgacccaaagccatgcgggtcaaaatcttcaacatccaggtcaaggaggtcacgacgtcgaacggcgagacaacggtggctaataaccttaccagcacggttcagatctttgcggactcgtcgtacgaactgccgtacgtgatggatgcgggtcaagagggcagcctgcctccttttcccaacgacgtctttatggtgccccagtacggctactgtggactggtgaccggcaacacttcgcagcaacagactgacagaaatgccttctactgcctggagtactttccttcgcagatgctgcggactggcaacaactttgaaattacgtacagttttgagaaggtgcctttccactcgatgtacgcgcacagccagagcctggaccggctgatgaaccctctcatcgaccagtacctgtggggactgcaatcgaccaccaccggaaccaccctgaatgccgggactgccaccaccaactttaccaagctgcggcctaccaacttttccaactttaaaaagaactggctgcccgggccttcaatcaagcagcagggcttctcaaagactgccaatcaaaactacaagatccctgccaccgggtcagacagtctcatcaaatacgagacgcacagcactctggacggaagatggagtgccctgacccccggacctccaatggccacggctggacctgcggacagcaagttcagcaacagccagctcatctttgcggggcctaaacagaacggcaacacggccaccgtacccgggactctgatcttcacctctgaggaggagctggcagccaccaacgccaccgatacggacatgtggggcaacctacctggcggtgaccagagcaacagcaacctgccgaccgtggacagactgacagccttgggagccgtgcctggaatggtctggcaaaacagagacatttactaccagggtcccatttgggccaagattcctcataccgatggacactttcacccctcaccgctgattggtgggtttgggctgaaacacccgcctcctcaaatttttatcaagaacaccccggtacctgcgaatcctgcaacgaccttcagctctactccggtaaactccttcattactcagtacagcactggccaggtgtcggtgcagattgactgggagatccagaaggagcggtccaaacgctggaaccccgaggtccagtttacctccaactacggacagcaaaactctctgttgtgggctcccgatgcggctgggaaatacactgagcctagggctatcggtacccgctacctcacccaccacctgtaataacctgttaatcaataaaccggtttattcgtttcagttgaactttggtctccgtgtccttcttatcttatctcgtttccatggctactgcgtacataagcagcggcctgcggcgcttgcgcttcgcggtttacaactgccggttaatcagtaacttctggcaaaccatgatgatggagttggccactccctctatgcgcgctcgctcactcactcggccctggagaccaaaggtctccagactgccggcctctggccggcagggccgagtgagtgagcgagcgcgcatagagggagtggccaa

SEQ ID NO: 5150 - protein, 725 aa, Adeno-associated virus 5
MAADGYLPDWLEDTLSEGIRQWWKLKPGPPPPKPAERHKDDSRGLVLPGYKYLGPFNGLDKGEPVNEADAAALEHDKAYDRQLDSGDNPYLKYNHADAEFQERLKEDTSFGGNLGRAVFQAKKRVLEPFGLVEEGAKTAPTGKRIDDHFPKRKKARTEEDSKPSTSSDAEAGPSGSQQLQIPAQPASSLGADTMSAGGGGPLGDNNQGADGVGNASGDWHCDSTWMGDRVVTKSTRTWVLPSYNNHQYREIKSGSVDGSNANAYFGYSTPWGYFDFNRFHSHWSPRDWQRLINNYWGFRPRSLRVKIFNIQVKEVTVQDSTTTIANNLTSTVQVFTDDDYQLPYVVGNGTEGCLPAFPPQVFTLPQYGYATLNRDNTENPTERSSFFCLEYFPSKMLRTGNNFEFTYNFEEVPFHSSFAPSQNLFKLANPLVDQYLYRFVSTNNTGGVQFNKNLAGRYANTYKNWFPGPMGRTQGWNLGSGVNRASVSAFATTNRMELEGASYQVPPQPNGMTNNLQGSNTYALENTMIFNSQPANPGTTATYLEGNMLITSESETQPVNRVAYNVGGQMATNNQSSTTAPTTGTYNLQEIVPGSVWMERDVYLQGPIWAKIPETGAHFHPSPAMGGFGLKHPPPMMLIKNTPVPGNITSFSDVPVSSFITQYSTGQVTVEMEWELKKENSKRWNPEIQYTNNYNDPQFVDFAPDSTGEYRTTRPIGTRYLTRPL

SEQ ID NO: 5151 - protein, 724 aa, Adeno-associated virus 5
MSFVDHPPDWLEEVGEGLREFLGLEAGPPKPKPNQQHQDQARGLVLPGYNYLGPGNGLDRGEPVNRADEVAREHDISYNEQLEAGDNPYLKYNHADAEFQEKLADDTSFGGNLGKAVFQAKKRVLEPFGLVEEGAKTAPTGKRIDDHFPKRKKARTEEDSKPSTSSDAEAGPSGSQQLQIPAQPASSLGADTMSAGGGGPLGDNNQGADGVGNASGDWHCDSTWMGDRVVTKSTRTWVLPSYNNHQYREIKSGSVDGSNANAYFGYSTPWGYFDFNRFHSHWSPRDWQRLINNYWGFRPRSLRVKIFNIQVKEVTVQDSTTTIANNLTSTVQVFTDDDYQLPYVVGNGTEGCLPAFPPQVFTLPQYGYATLNRDNTENPTERSSFFCLEYFPSKMLRTGNNFEFTYNFEEVPFHSSFAPSQNLFKLANPLVDQYLYRFVSTNNTGGVQFNKNLAGRYANTYKNWFPGPMGRTQGWNLGSGVNRASVSAFATTNRMELEGASYQVPPQPNGMTNNLQGSNTYALENTMIFNSQPANPGTTATYLEGNMLITSESETQPVNRVAYNVGGQMATNNQSSTTAPATGTYNLQEIVPGSVWMERDVYLQGPIWAKIPETGAHFHPSPAMGGFGLKHPPPMMLIKNTPVPGNITSFSDVPVSSFITQYSTGQVTVEMEWELKKENSKRWNPEIQYTNNYNDPQFVDFAPDSTGEYRTTRPIGTRYLTRPL

SEQ ID NO: 5152 - DNA, 2175 bp, Adeno-associated virus 5
atgtcttttgttgatcaccctccagattggttggaagaagttggtgaaggtcttcgcgagtttttgggccttgaagcgggcccaccgaaaccaaaacccaatcagcagcatcaagatcaagcccgtggtcttgtgctgcctggttataactatctcggacccggaaacggtctcgatcgaggagagcctgtcaacagggcagacgaggtcgcgcgagagcacgacatctcgtacaacgagcagcttgaggcgggagacaacccctacctcaagtacaaccacgcggacgccgagtttcaggagaagctcgccgacgacacatccttcgggggaaacctcggaaaggcagtctttcaggccaagaaaagggttctcgaaccttttggcctggttgaagagggtgctaagacggcccctaccggaaagcggatagacgaccactttccaaaaagaaagaaggctcggaccgaagaggactccaagccttccacctcgtcagacgccgaagctggacccagcggatcccagcagctgcaaatcccagcccaaccagcctcaagtttgggagctgatacaatgtctgcgggaggtggcggcccattgggcgacaataaccaaggtgccgatggagtgggcaatgcctcgggagattggcattgcgattccacgtggatgggggacagagtcgtcaccaagtccacccgaacctgggtgctgcccagctacaacaaccaccagtaccgagagatcaaaagcggctccgtcgacggaagcaacgccaacgcctactttggatacagcaccccctgggggtactttgactttaaccgcttccacagccactggagcccccgagactggcaaagactcatcaacaactactggggcttcagaccccggtccctcagagtcaaaatcttcaacattcaagtcaaagaggtcacggtgcaggactccaccaccaccatcgccaacaacctcacctccaccgtccaagtgtttacggacgacgactaccagctgccctacgtcgtcggcaacgggaccgagggatgcctgccggccttccctccgcaggtctttacgctgccgcagtacggttacgcgacgctgaaccgcgacaacacagaaaatcccaccgagaggagcagcttcttctgcctagagtactttcccagcaagatgctgagaacgggcaacaactttgagtttacctacaactttgaggaggtgcccttccactccagcttcgctcccagtcagaacctgttcaagctggccaacccgctggtggaccagtacttgtaccgcttcgtgagcacaaataacactggcggagtccagttcaacaagaacctggccgggagatacgccaacacctacaaaaactggttcccggggcccatgggccgaacccagggctggaacctgggctccggggtcaaccgcgccagtgtcagcgccttcgccacgaccaataggatggagctcgagggcgcgagttaccaggtgcccccgcagccgaacggcatgaccaacaacctccagggcagcaacacctatgccctggagaacactatgatcttcaacagccagccggcgaacccgggcaccaccgccacgtacctcgagggcaacatgctcatcaccagcgagagcgagacgcagccggtgaaccgcgtggcgtacaacgtcggcgggcagatggccaccaacaaccagagctccaccactgcccccgcgaccggcacgtacaacctccaggaaatcgtgcccggcagcgtgtggatggagagggacgtgtacctccaaggacccatctgggccaagatcccagagacgggggcgcactttcacccctctccggccatgggcggattcggactcaaacacccaccgcccatgatgctcatcaagaacacgcctgtgcccggaaatatcaccagcttctcggacgtgcccgtcagcagcttcatcacccagtacagcaccgggcaggtcaccgtggagatggagtgggagctcaagaaggaaaactccaagaggtggaacccagagatccagtacacaaacaactacaacgacccccagtttgtggactttgccccggacagcaccggggaatacagaaccaccagacctatcggaacccgataccttacccgacccctttaa

SEQ ID NO: 5153 - DNA, 2208 bp, Adeno-associated virus 6
atggctgccgatggttatcttccagattggctcgaggacaacctctctgagggcattcgcgagtggtgggacttgaaacctggagccccgaaacccaaagccaaccagcaaaagcaggacgacggccggggtctggtgcttcctggctacaagtacctcggacccttcaacggactcgacaagggggagcccgtcaacgcggcggatgcagcggccctcgagcacgacaaggcctacgaccagcagctcaaagcgggtgacaatccgtacctgcggtataaccacgccgacgccgagtttcaggagcgtctgcaagaagatacgtcttttgggggcaacctcgggcgagcagtcttccaggccaagaagagggttctcgaaccttttggtctggttgaggaaggtgctaagacggctcctggaaagaaacgtccggtagagcagtcgccacaagagccagactcctcctcgggcattggcaagacaggccagcagcccgctaaaaagagactcaattttggtcagactggcgactcagagtcagtccccgacccacaacctctcggagaacctccagcaacccccgctgctgtgggacctactacaatggcttcaggcggtggcgcaccaatggcagacaataacgaaggcgccgacggagtgggtaatgcctcaggaaattggcattgcgattccacatggctgggcgacagagtcatcaccaccagcacccgaacatgggccttgcccacctataacaaccacctctacaagcaaatctccagtgcttcaacgggggccagcaacgacaaccactacttcggctacagcaccccctgggggtattttgatttcaacagattccactgccatttctcaccacgtgactggcagcgactcatcaacaacaattggggattccggcccaagagactcaacttcaagctcttcaacatccaagtcaaggaggtcacgacgaatgatggcgtcacgaccatcgctaataaccttaccagcacggttcaagtcttctcggactcggagtaccagttgccgtacgtcctcggctctgcgcaccagggctgcctccctccgttcccggcggacgtgttcatgattccgcagtacggctacctaacgctcaacaatggcagccaggcagtgggacggtcatccttttactgcctggaatatttcccatcgcagatgctgagaacgggcaataactttaccttcagctacaccttcgaggacgtgcctttccacagcagctacgcgcacagccagagcctggaccggctgatgaatcctctcatcgaccagtacctgtattacctgaacagaactcagaatcagtccggaagtgcccaaaacaaggacttgctgtttagccgggggtctccagctggcatgtctgttcagcccaaaaactggctacctggaccctgttaccggcagcagcgcgtttctaaaacaaaaacagacaacaacaacagcaactttacctggactggtgcttcaaaatataaccttaatgggcgtgaatctataatcaaccctggcactgctatggcctcacacaaagacgacaaagacaagttctttcccatgagcggtgtcatgatttttggaaaggagagcgccggagcttcaaacactgcattggacaatgtcatgatcacagacgaagaggaaatcaaagccactaaccccgtggccaccgaaagatttgggactgtggcagtcaatctccagagcagcagcacagaccctgcgaccggagatgtgcatgttatgggagccttacctggaatggtgtggcaagacagagacgtatacctgcagggtcctatttgggccaaaattcctcacacggatggacactttcacccgtctcctctcatgggcggctttggacttaagcacccgcctcctcagatcctcatcaaaaacacgcctgttcctgcgaatcctccggcagagttttcggctacaaagtttgcttcattcatcacccagtattccacaggacaagtgagcgtggagattgaatgggagctgcagaaagaaaacagcaaacgctggaatcccgaagtgcagtatacatctaactatgcaaaatctgccaacgttgatttcactgtggacaacaatggactttatactgagcctcgccccattggcacccgttacctcacccgtcccctg

SEQ ID NO: 5154 - protein, 736 aa, Adeno-associated virus 6; identical to SEQ ID NO: 4799

SEQ ID NO: 5155 - protein, 623 aa, Adeno-associated virus 6
MPGFYEIVIKVPSDLDEHLPGISDSFVNWVAEKEWELPPDSDMDLNLIEQAPLTVAEKLQRDFLVQWRRVSKAPEALFFVQFEKGESYFHLHILVETTGVKSMVLGRFLSQIRDKLVQTIYRGIEPTLPNWFAVTKTRNGAGGGNKVVDECYIPNYLLPKTQPELQWAWTNMEEYISACLNLAERKRLVAHDLTHVSQTQEQNKENLNPNSDAPVIRSKTSARYMELVGWLVDRGITSEKQWIQEDQASYISFNAASNSRSQIKAALDNAGKIMALTKSAPDYLVGPAPPADIKTNRIYRILELNGYDPAYAGSVFLGWAQKRFGKRNTIWLFGPATTGKTNIAEAIAHAVPFYGCVNWTNENFPFNDCVDKMVIWWEEGKMTAKVVESAKAILGGSKVRVDQKCKSSAQIDPTPVIVTSNTNMCAVIDGNSTTFEHQQPLQDRMFKFELTRRLEHDFGKVTKQEVKEFFRWAQDHVTEVAHEFYVRKGGANKRPAPDDADKSEPKRACPSVADPSTSDAEGAPVDFADRYQNKCSRHAGMLQMLFPCKTCERMNQNFNICFTHGTRDCSECFPGVSESQPVVRKRTYRKLCAIHHLLGRAPEIACSACDLVNVDLDDCVSEQ

SEQ ID NO: 5156 - DNA, 4683 bp, Adeno-associated virus 6
ttggccactccctctctgcgcgctcgctcgctcactgaggccgggcgaccaaaggtcgcccgacgcccgggctttgcccgggcggcctcagtgagcgagcgagcgcgcagagagggagtggccaactccatcactaggggttcctggaggggtggagtcgtgacgtgaattacgtcatagggttagggaggtcctgtattagaggtcacgtgagtgttttgcgacattttgcgacaccatgtggtcacgctgggtatttaagcccgagtgagcacgcagggtctccattttgaagcgggaggtttgaacgcgcagcgccatgccggggttttacgagattgtgattaaggtccccagcgaccttgacgagcatctgcccggcatttctgacagctttgtgaactgggtggccgagaaggaatgggagttgccgccagattctgacatggatctgaatctgattgagcaggcacccctgaccgtggccgagaagctgcagcgcgacttcctggtccagtggcgccgcgtgagtaaggccccggaggccctcttctttgttcagttcgagaagggcgagtcctacttccacctccatattctggtggagaccacgggggtcaaatccatggtgctgggccgcttcctgagtcagattagggacaagctggtgcagaccatctaccgcgggatcgagccgaccctgcccaactggttcgcggtgaccaagacgcgtaatggcgccggaggggggaacaaggtggtggacgagtgctacatccccaactacctcctgcccaagactcagcccgagctgcagtgggcgtggactaacatggaggagtatataagcgcgtgtttaaacctggccgagcgcaaacggctcgtggcgcacgacctgacccacgtcagccagacccaggagcagaacaaggagaatctgaaccccaattctgacgcgcctgtcatccggtcaaaaacctccgcacgctacatggagctggtcgggtggctggtggaccggggcatcacctccgagaagcagtggatccaggaggaccaggcctcgtacatctccttcaacgccgcctccaactcgcggtcccagatcaaggccgctctggacaatgccggcaagatcatggcgctgaccaaatccgcgcccgactacctggtaggccccgctccgcccgccgacattaaaaccaaccgcatttaccgcatcctggagctgaacggctacgaccctgcctacgccggctccgtctttctcggctgggcccagaaaaggttcggaaaacgcaacaccatctggctgtttgggccggccaccacgggcaagaccaacatcgcggaagccatcgcccacgccgtgcccttctacggctgcgtcaactggaccaatgagaactttcccttcaacgattgcgtcgacaagatggtgatctggtgggaggagggcaagatgacggccaaggtcgtggagtccgccaaggccattctcggcggcagcaaggtgcgcgtggaccaaaagtgcaagtcgtccgcccagatcgatcccacccccgtgatcgtcacctccaacaccaacatgtgcgccgtgattgacgggaacagcaccaccttcgagcaccagcagccgttgcaggaccggatgttcaaatttgaactcacccgccgtctggagcatgactttggcaaggtgacaaagcaggaagtcaaagagttcttccgctgggcgcaggatcacgtgaccgaggtggcgcatgagttctacgtcagaaagggtggagccaacaagagacccgcccccgatgacgcggataaaagcgagcccaagcgggcctgcccctcagtcgcggatccatcgacgtcagacgcggaaggagctccggtggactttgccgacaggtaccaaaacaaatgttctcgtcacgcgggcatgcttcagatgctgtttccctgcaaaacatgcgagagaatgaatcagaatttcaacatttgcttcacgcacgggaccagagactgttcagaatgtttccccggcgtgtcagaatctcaaccggtcgtcagaaagaggacgtatcggaaactctgtgccattcatcatctgctggggcgggctcccgagattgcttgctcggcctgcgatctggtcaacgtggatctggatgactgtgtttctgagcaataaatgacttaaaccaggtatggctgccgatggttatcttccagattggctcgaggacaacctctctgagggcattcgcgagtggtgggacttgaaacctggagccccgaaacccaaagccaaccagcaaaagcaggacgacggccggggtctggtgcttcctggctacaagtacctcggacccttcaacggactcgacaagggggagcccgtcaacgcggcggatgcagcggccctcgagcacgacaaggcctacgaccagcagctcaaagcgggtgacaatccgtacctgcggtataaccacgccgacgccgagtttcaggagcgtctgcaagaagatacgtcttttgggggcaacctcgggcgagcagtcttccaggccaagaagagggttctcgaaccttttggtctggttgaggaaggtgctaagacggctcctggaaagaaacgtccggtagagcagtcgccacaagagccagactcctcctcgggcattggcaagacaggccagcagcccgctaaaaagagactcaattttggtcagactggcgactcagagtcagtccccgacccacaacctctcggagaacctccagcaacccccgctgctgtgggacctactacaatggcttcaggcggtggcgcaccaatggcagacaataacgaaggcgccgacggagtgggtaatgcctcaggaaattggcattgcgattccacatggctgggcgacagagtcatcaccaccagcacccgaacatgggccttgcccacctataacaaccacctctacaagcaaatctccagtgcttcaacgggggccagcaacgacaaccactacttcggctacagcaccccctgggggtattttgatttcaacagattccactgccatttctcaccacgtgactggcagcgactcatcaacaacaattggggattccggcccaagagactcaacttcaagctcttcaacatccaagtcaaggaggtcacgacgaatgatggcgtcacgaccatcgctaataaccttaccagcacggttcaagtcttctcggactcggagtaccagttgccgtacgtcctcggctctgcgcaccagggctgcctccctccgttcccggcggacgtgttcatgattccgcagtacggctacctaacgctcaacaatggcagccaggcagtgggacggtcatccttttactgcctggaatatttcccatcgcagatgctgagaacgggcaataactttaccttcagctacaccttcgaggacgtgcctttccacagcagctacgcgcacagccagagcctggaccggctgatgaatcctctcatcgaccagtacctgtattacctgaacagaactcagaatcagtccggaagtgcccaaaacaaggacttgctgtttagccgggggtctccagctggcatgtctgttcagcccaaaaactggctacctggaccctgttaccggcagcagcgcgtttctaaaacaaaaacagacaacaacaacagcaactttacctggactggtgcttcaaaatataaccttaatgggcgtgaatctataatcaaccctggcactgctatggcctcacacaaagacgacaaagacaagttctttcccatgagcggtgtcatgatttttggaaaggagagcgccggagcttcaaacactgcattggacaatgtcatgatcacagacgaagaggaaatcaaagccactaaccccgtggccaccgaaagatttgggactgtggcagtcaatctccagagcagcagcacagaccctgcgaccggagatgtgcatgttatgggagccttacctggaatggtgtggcaagacagagacgtatacctgcagggtcctatttgggccaaaattcctcacacggatggacactttcacccgtctcctctcatgggcggctttggacttaagcacccgcctcctcagatcctcatcaaaaacacgcctgttcctgcgaatcctccggcagagttttcggctacaaagtttgcttcattcatcacccagtattccacaggacaagtgagcgtggagattgaatgggagctgcagaaagaaaacagcaaacgctggaatcccgaagtgcagtatacatctaactatgcaaaatctgccaacgttgatttcactgtggacaacaatggactttatactgagcctcgccccattggcacccgttacctcacccgtcccctgtaattgtgtgttaatcaataaaccggttaattcgtgtcagttgaactttggtctcatgtcgttattatcttatctggtcaccatagcaaccggttacacattaactgcttagttgcgcttcgcgaatacccctagtgatggagttgcccactccctctatgcgcgctcgctcgctcggtggggccggcagagcagagctctgccgtctgcggacctttggtccgcaggccccaccgagcgagcgagcgcgcatagagggagtgggcaa

SEQ ID NO: 5157 - DNA, 2211 bp, Adeno-associated virus 6
atggctgccgatggttatcttccagattggctcgaggacaacctctctgagggcattcgcgagtggtgggacttgaaacctggagccccgaaacccaaagccaaccagcaaaagcaggacgacggccggggtctggtgcttcctggctacaagtacctcggacccttcaacggactcgacaagggggagcccgtcaacgcggcggatgcagcggccctcgagcacgacaaggcctacgaccagcagctcaaagcgggtgacaatccgtacctgcggtataaccacgccgacgccgagtttcaggagcgtctgcaagaagatacgtcttttgggggcaacctcgggcgagcagtcttccaggccaagaagagggttctcgaaccttttggtctggttgaggaaggtgctaagacggctcctggaaagaaacgtccggtagagcagtcgccacaagagccagactcctcctcgggcattggcaagacaggccagcagcccgctaaaaagagactcaattttggtcagactggcgactcagagtcagtccccgacccacaacctctcggagaacctccagcaacccccgctgctgtgggacctactacaatggcttcaggcggtggcgcaccaatggcagacaataacgaaggcgccgacggagtgggtaatgcctcaggaaattggcattgcgattccacatggctgggcgacagagtcatcaccaccagcacccgaacatgggccttgcccacctataacaaccacctctacaagcaaatctccagtgcttcaacgggggccagcaacgacaaccactacttcggctacagcaccccctgggggtattttgatttcaacagattccactgccatttctcaccacgtgactggcagcgactcatcaacaacaattggggattccggcccaagagactcaacttcaagctcttcaacatccaagtcaaggaggtcacgacgaatgatggcgtcacgaccatcgctaataaccttaccagcacggttcaagtcttctcggactcggagtaccagttgccgtacgtcctcggctctgcgcaccagggctgcctccctccgttcccggcggacgtgttcatgattccgcagtacggctacctaacgctcaacaatggcagccaggcagtgggacggtcatccttttactgcctggaatatttcccatcgcagatgctgagaacgggcaataactttaccttcagctacaccttcgaggacgtgcctttccacagcagctacgcgcacagccagagcctggaccggctgatgaatcctctcatcgaccagtacctgtattacctgaacagaactcagaatcagtccggaagtgcccaaaacaaggacttgctgtttagccgggggtctccagctggcatgtctgttcagcccaaaaactggctacctggaccctgttaccggcagcagcgcgtttctaaaacaaaaacagacaacaacaacagcaactttacctggactggtgcttcaaaatataaccttaatgggcgtgaatctataatcaaccctggcactgctatggcctcacacaaagacgacaaagacaagttctttcccatgagcggtgtcatgatttttggaaaggagagcgccggagcttcaaacactgcattggacaatgtcatgatcacagacgaagaggaaatcaaagccactaaccccgtggccaccgaaagatttgggactgtggcagtcaatctccagagcagcagcacagaccctgcgaccggagatgtgcatgttatgggagccttacctggaatggtgtggcaagacagagacgtatacctgcagggtcctatttgggccaaaattcctcacacggatggacactttcacccgtctcctctcatgggcggctttggacttaagcacccgcctcctcagatcctcatcaaaaacacgcctgttcctgcgaatcctccggcagagttttcggctacaaagtttgcttcattcatcacccagtattccacaggacaagtgagcgtggagattgaatgggagctgcagaaagaaaacagcaaacgctggaatcccgaagtgcagtatacatctaactatgcaaaatctgccaacgttgatttcactgtggacaacaatggactttatactgagcctcgccccattggcacccgttacctcacccgtcccctgtaa

SEQ ID NO: 5158 - DNA, 2214 bp, Adeno-associated virus 7
atggctgccgatggttatcttccagattggctcgaggacaacctctctgagggcattcgcgagtggtgggacctgaaacctggagccccgaaacccaaagccaaccagcaaaagcaggacaacggccggggtctggtgcttcctggctacaagtacctcggacccttcaacggactcgacaagggggagcccgtcaacgcggcggacgcagcggccctcgagcacgacaaggcctacgaccagcagctcaaagcgggtgacaatccgtacctgcggtataaccacgccgacgccgagtttcaggagcgtctgcaagaagatacgtcatttgggggcaacctcgggcgagcagtcttccaggccaagaagcgggttctcgaacctctcggtctggttgaggaaggcgctaagacggctcctgcaaagaagagaccggtagagccgtcacctcagcgttcccccgactcctccacgggcatcggcaagaaaggccagcagcccgccagaaagagactcaatttcggtcagactggcgactcagagtcagtccccgaccctcaacctctcggagaacctccagcagcgccctctagtgtgggatctggtacagtggctgcaggcggtggcgcaccaatggcagacaataacgaaggtgccgacggagtgggtaatgcctcaggaaattggcattgcgattccacatggctgggcgacagagtcattaccaccagcacccgaacctgggccctgcccacctacaacaaccacctctacaagcaaatctccagtgaaactgcaggtagtaccaacgacaacacctacttcggctacagcaccccctgggggtattttgactttaacagattccactgccacttctcaccacgtgactggcagcgactcatcaacaacaactggggattccggcccaagaagctgcggttcaagctcttcaacatccaggtcaaggaggtcacgacgaatgacggcgttacgaccatcgctaataaccttaccagcacgattcaggtattctcggactcggaataccagctgccgtacgtcctcggctctgcgcaccagggctgcctgcctccgttcccggcggacgtcttcatgattcctcagtacggctacctgactctcaacaatggcagtcagtctgtgggacgttcctccttctactgcctggagtacttcccctctcagatgctgagaacgggcaacaactttgagttcagctacagcttcgaggacgtgcctttccacagcagctacgcacacagccagagcctggaccggctgatgaatcccctcatcgaccagtacttgtactacctggccagaacacagagtaacccaggaggcacagctggcaatcgggaactgcagttttaccagggcgggccttcaactatggccgaacaagccaagaattggttacctggaccttgcttccggcaacaaagagtctccaaaacgctggatcaaaacaacaacagcaactttgcttggactggtgccaccaaatatcacctgaacggcagaaactcgttggttaatcccggcgtcgccatggcaactcacaaggacgacgaggaccgctttttcccatccagcggagtcctgatttttggaaaaactggagcaactaacaaaactacattggaaaatgtgttaatgacaaatgaagaagaaattcgtcctactaatcctgtagccacggaagaatacgggatagtcagcagcaacttacaagcggctaatactgcagcccagacacaagttgtcaacaaccagggagccttacctggcatggtctggcagaaccgggacgtgtacctgcagggtcccatctgggccaagattcctcacacggatggcaactttcacccgtctcctttgatgggcggctttggacttaaacatccgcctcctcagatcctgatcaagaacactcccgttcccgctaatcctccggaggtgtttactcctgccaagtttgcttcgttcatcacacagtacagcaccggacaagtcagcgtggaaatcgagtgggagctgcagaaggaaaacagcaagcgctggaacccggagattcagtacacctccaactttgaaaagcagactggtgtggactttgccgttgacagccagggtgtttactctgagcctcgccctattggcactcgttacctcacccgtaatctgtaa

SEQ ID NO: 5159 - protein, 738 aa, Adeno-associated virus 7
MAADGYLPDWLEDNLSEGIREWWALKPGAPKPKANQQKQDDGRGLVLPGYKYLGPFNGLDKGEPVNAADAAALEHDKAYDQQLQAGDNPYLRYNHADAEFQERLQEDTSFGGNLGRAVFQAKKRVLEPLGLVEEGAKTAPGKKRPVEPSPQRSPDSSTGIGKKGQQPARKRLNFGQTGDSESVPDPQPLGEPPAAPSGVGPNTMAAGGGAPMADNNEGADGVGSSSGNWHCDSTWLGDRVITTSTRTWALPTYNNHLYKQISNGTSGGATNDNTYFGYSTPWGYFDFNRFHCHFSPRDWQRLINNNWGFRPKRLSFKLFNIQVKEVTQNEGTKTIANNLTSTIQVFTDSEYQLPYVLGSAHQGCLPPFPADVFMIPQYGYLTLNNGSQAVGRSSFYCLEYFPSQMLRTGNNFQFTYTFEDVPFHSSYAHSQSLDRLMNPLIDQYLYYLSRTQTTGGTANTQTLGFSQGGPNTMANQAKNWLPGPCYRQQRVSTTTGQNNNSNFAWTAGTKYHLNGRNSLANPGIAMATHKDDEERFFPSNGILIFGKQNAARDNADYSDVMLTSEEEIKTTNPVATEEYGIVADNLQQQNTAPQIGTVNSQGALPGMVWQNRDVYLQGPIWAKIPHTDGNFHPSPLMGGFGLKHPPPQILIKNTPVPADPPTTFNQSKLNSFITQYSTGQVSVEIEWELQKENSKRWNPEIQYTSNYYKSTSVDFAVNTEGVYSEPRPIGTRYLTRNL

SEQ ID NO: 5160 - protein, 737 aa, Adeno-associated virus 7
MAADGYLPDWLEDNLSEGIREWWDLKPGAPKPKANQQKQDNGRGLVLPGYKYLGPFNGLDKGEPVNAADAAALEHDKAYDQQLKAGDNPYLRYNHADAEFQERLQEDTSFGGNLGRAVFQAKKRVLEPLGLVEEGAKTAPAKKRPVEPSPQRSPDSSTGIGKKGQQPARKRLNFGQTGDSESVPDPQPLGEPPAAPSSVGSGTVAAGGGAPMADNNEGADGVGNASGNWHCDSTWLGDRVITTSTRTWALPTYNNHLYKQISSETAGSTNDNTYFGYSTPWGYFDFNRFHCHFSPRDWQRLINNNWGFRPKKLRFKLFNIQVKEVTTNDGVTTIANNLTSTIQVFSDSEYQLPYVLGSAHQGCLPPFPADVFMIPQYGYLTLNNGSQSVGRSSFYCLEYFPSQMLRTGNNFEFSYSFEDVPFHSSYAHSQSLDRLMNPLIDQYLYYLARTQSNPGGTAGNRELQFYQGGPSTMAEQAKNWLPGPCFRQQRVSKTLDQNNNSNFAWTGATKYHLNGRNSLVNPGVAMATHKDDEDRFFPSSGVLIFGKTGATNKTTLENVLMTNEEEIRPTNPVATEEYGIVSSNLQAANTAAQTQVVNNQGALPGMVWQNRDVYLQGPIWAKIPHTDGNFHPSPLMGGFGLKHPPPQILIKNTPVPANPPEVFTPAKFASFITQYSTGQVSVEIEWELQKENSKRWNPEIQYTSNFEKQTGVDFAVDSQGVYSEPRPIGTRYLTRNL

SEQ ID NO: 5161 - protein, 623 aa, Adeno-associated virus 7
MPGFYEIVIKVPSDLDEHLPGISDSFVNWVAEKEWELPPDSDMDLNLIEQAPLTVAEKLQRDFLVQWRRVSKAPEALFFVQFEKGESYFHLHVLVETTGVKSMVLGRFLSQIREKLVQTIYRGVEPTLPNWFAVTKTRNGAGGGNKVVDECYIPNYLLPKTQPELQWAWTNMEEYISACLNLAERKRLVAQHLTHVSQTQEQNKENLNPNSDAPVIRSKTSARYMELVGWLVDRGITSEKQWIQEDQASYISFNAASNSRSQIKAALDNAGKIMALTKSAPDYLVGPSLPADIKTNRIYRILELNGYDPAYAGSVFLGWAQKKFGKRNTIWLFGPATTGKTNIAEAIAHAVPFYGCVNWTNENFPFNDCVDKMVIWWEEGKMTAKVVESAKAILGGSKVRVDQKCKSSAQIDPTPVIVTSNTNMCAVIDGNSTTFEHQQPLQDRMFKFELTRRLEHDFGKVTKQEVKEFFRWASDHVTEVAHEFYVRKGGASKRPAPDDADISEPKRACPSVADPSTSDAEGAPVDFADRYQNKCSRHAGMIQMLFPCKTCERMNQNFNICFTHGVRDCLECFPGVSESQPVVRKKTYRKLCAIHHLLGRAPEIACSACDLVNVDLDDCVSEQ

SEQ ID NO: 5162 - DNA, 4721 bp, Adeno-associated virus 7
ttggccactccctctatgcgcgctcgctcgctcggtggggcctgcggaccaaaggtccgcagacggcagagctctgctctgccggccccaccgagcgagcgagcgcgcatagagggagtggccaactccatcactaggggtaccgcgaagcgcctcccacgctgccgcgtcagcgctgacgtaaatcacgtcataggggagtggtcctgtattagctgtcacgtgagtgcttttgcgacattttgcgacaccacgtggccatttgaggtatatatggccgagtgagcgagcaggatctccattttgaccgcgaaatttgaacgagcagcagccatgccgggtttctacgagatcgtgatcaaggtgccgagcgacctggacgagcacctgccgggcatttctgactcgtttgtgaactgggtggccgagaaggaatgggagctgcccccggattctgacatggatctgaatctgatcgagcaggcacccctgaccgtggccgagaagctgcagcgcgacttcctggtccaatggcgccgcgtgagtaaggccccggaggccctgttctttgttcagttcgagaagggcgagagctacttccaccttcacgttctggtggagaccacgggggtcaagtccatggtgctaggccgcttcctgagtcagattcgggagaagctggtccagaccatctaccgcggggtcgagcccacgctgcccaactggttcgcggtgaccaagacgcgtaatggcgccggcggggggaacaaggtggtggacgagtgctacatccccaactacctcctgcccaagacccagcccgagctgcagtgggcgtggactaacatggaggagtatataagcgcgtgtttgaacctggccgaacgcaaacggctcgtggcgcagcacctgacccacgtcagccagacgcaggagcagaacaaggagaatctgaaccccaattctgacgcgcccgtgatcaggtcaaaaacctccgcgcgctacatggagctggtcgggtggctggtggaccggggcatcacctccgagaagcagtggatccaggaggaccaggcctcgtacatctccttcaacgccgcctccaactcgcggtcccagatcaaggccgcgctggacaatgccggcaagatcatggcgctgaccaaatccgcgcccgactacctggtggggccctcgctgcccgcggacattaaaaccaaccgcatctaccgcatcctggagctgaacgggtacgatcctgcctacgccggctccgtctttctcggctgggcccagaaaaagttcgggaagcgcaacaccatctggctgtttgggcccgccaccaccggcaagaccaacattgcggaagccatcgcccacgccgtgcccttctacggctgcgtcaactggaccaatgagaactttcccttcaacgattgcgtcgacaagatggtgatctggtgggaggagggcaagatgacggccaaggtcgtggagtccgccaaggccattctcggcggcagcaaggtgcgcgtggaccaaaagtgcaagtcgtccgcccagatcgaccccacccccgtgatcgtcacctccaacaccaacatgtgcgccgtgattgacgggaacagcaccaccttcgagcaccagcagccgttgcaggaccggatgttcaaatttgaactcacccgccgtctggagcacgactttggcaaggtgacgaagcaggaagtcaaagagttcttccgctgggccagtgatcacgtgaccgaggtggcgcatgagttctacgtcagaaagggcggagccagcaaaagacccgcccccgatgacgcggatataagcgagcccaagcgggcctgcccctcagtcgcggatccatcgacgtcagacgcggaaggagctccggtggactttgccgacaggtaccaaaacaaatgttctcgtcacgcgggcatgattcagatgctgtttccctgcaaaacgtgcgagagaatgaatcagaatttcaacatttgcttcacacacggggtcagagactgtttagagtgtttccccggcgtgtcagaatctcaaccggtcgtcagaaaaaagacgtatcggaaactctgcgcgattcatcatctgctggggcgggcgcccgagattgcttgctcggcctgcgacctggtcaacgtggacctggacgactgcgtttctgagcaataaatgacttaaaccaggtatggctgccgatggttatcttccagattggctcgaggacaacctctctgagggcattcgcgagtggtgggacctgaaacctggagccccgaaacccaaagccaaccagcaaaagcaggacaacggccggggtctggtgcttcctggctacaagtacctcggacccttcaacggactcgacaagggggagcccgtcaacgcggcggacgcagcggccctcgagcacgacaaggcctacgaccagcagctcaaagcgggtgacaatccgtacctgcggtataaccacgccgacgccgagtttcaggagcgtctgcaagaagatacgtcatttgggggcaacctcgggcgagcagtcttccaggccaagaagcgggttctcgaacctctcggtctggttgaggaaggcgctaagacggctcctgcaaagaagagaccggtagagccgtcacctcagcgttcccccgactcctccacgggcatcggcaagaaaggccagcagcccgccagaaagagactcaatttcggtcagactggcgactcagagtcagtccccgaccctcaacctctcggagaacctccagcagcgccctctagtgtgggatctggtacagtggctgcaggcggtggcgcaccaatggcagacaataacgaaggtgccgacggagtgggtaatgcctcaggaaattggcattgcgattccacatggctgggcgacagagtcattaccaccagcacccgaacctgggccctgcccacctacaacaaccacctctacaagcaaatctccagtgaaactgcaggtagtaccaacgacaacacctacttcggctacagcaccccctgggggtattttgactttaacagattccactgccacttctcaccacgtgactggcagcgactcatcaacaacaactggggattccggcccaagaagctgcggttcaagctcttcaacatccaggtcaaggaggtcacgacgaatgacggcgttacgaccatcgctaataaccttaccagcacgattcaggtattctcggactcggaataccagctgccgtacgtcctcggctctgcgcaccagggctgcctgcctccgttcccggcggacgtcttcatgattcctcagtacggctacctgactctcaacaatggcagtcagtctgtgggacgttcctccttctactgcctggagtacttcccctctcagatgctgagaacgggcaacaactttgagttcagctacagcttcgaggacgtgcctttccacagcagctacgcacacagccagagcctggaccggctgatgaatcccctcatcgaccagtacttgtactacctggccagaacacagagtaacccaggaggcacagctggcaatcgggaactgcagttttaccagggcgggccttcaactatggccgaacaagccaagaattggttacctggaccttgcttccggcaacaaagagtctccaaaacgctggatcaaaacaacaacagcaactttgcttggactggtgccaccaaatatcacctgaacggcagaaactcgttggttaatcccggcgtcgccatggcaactcacaaggacgacgaggaccgctttttcccatccagcggagtcctgatttttggaaaaactggagcaactaacaaaactacattggaaaatgtgttaatgacaaatgaagaagaaattcgtcctactaatcctgtagccacggaagaatacgggatagtcagcagcaacttacaagcggctaatactgcagcccagacacaagttgtcaacaaccagggagccttacctggcatggtctggcagaaccgggacgtgtacctgcagggtcccatctgggccaagattcctcacacggatggcaactttcacccgtctcctttgatgggcggctttggacttaaacatccgcctcctcagatcctgatcaagaacactcccgttcccgctaatcctccggaggtgtttactcctgccaagtttgcttcgttcatcacacagtacagcaccggacaagtcagcgtggaaatcgagtgggagctgcagaaggaaaacagcaagcgctggaacccggagattcagtacacctccaactttgaaaagcagactggtgtggactttgccgttgacagccagggtgtttactctgagcctcgccctattggcactcgttacctcacccgtaatctgtaattgcatgttaatcaataaaccggttgattcgtttcagttgaactttggtctcctgtgcttcttatcttatcggtttccatagcaactggttacacattaactgcttgggtgcgcttcacgataagaacactgacgtcaccgcggtacccctagtgatggagttggccactccctctatgcgcgctcgctcgctcggtggggcctgcggaccaaaggtccgcagacggcagagctctgctctgccggccccaccgagcgagcgagcgcgcatagagggagtggccaa

SEQ ID NO: 5163 - DNA, 2214 bp, Adeno-associated virus 7; identical to SEQ ID NO: 5158

SEQ ID NO: 5164 - protein, 737 aa, Adeno-associated virus 7; identical to SEQ ID NO: 5160

SEQ ID NO: 5165 - DNA, 2217 bp, Adeno-associated virus 8
atggctgccgatggttatcttccagattggctcgaggacaacctctctgagggcattcgcgagtggtgggcgctgaaacctggagccccgaagcccaaagccaaccagcaaaagcaggacgacggccggggtctggtgcttcctggctacaagtacctcggacccttcaacggactcgacaagggggagcccgtcaacgcggcggacgcagcggccctcgagcacgacaaggcctacgaccagcagctgcaggcgggtgacaatccgtacctgcggtataaccacgccgacgccgagtttcaggagcgtctgcaagaagatacgtcttttgggggcaacctcgggcgagcagtcttccaggccaagaagcgggttctcgaacctctcggtctggttgaggaaggcgctaagacggctcctggaaagaagagaccggtagagccatcaccccagcgttctccagactcctctacgggcatcggcaagaaaggccaacagcccgccagaaaaagactcaattttggtcagactggcgactcagagtcagttccagaccctcaacctctcggagaacctccagcagcgccctctggtgtgggacctaatacaatggctgcaggcggtggcgcaccaatggcagacaataacgaaggcgccgacggagtgggtagttcctcgggaaattggcattgcgattccacatggctgggcgacagagtcatcaccaccagcacccgaacctgggccctgcccacctacaacaaccacctctacaagcaaatctccaacgggacatcgggaggagccaccaacgacaacacctacttcggctacagcaccccctgggggtattttgactttaacagattccactgccacttttcaccacgtgactggcagcgactcatcaacaacaactggggattccggcccaagagactcagcttcaagctcttcaacatccaggtcaaggaggtcacgcagaatgaaggcaccaagaccatcgccaataacctcaccagcaccatccaggtgtttacggactcggagtaccagctgccgtacgttctcggctctgcccaccagggctgcctgcctccgttcccggcggacgtgttcatgattccccagtacggctacctaacactcaacaacggtagtcaggccgtgggacgctcctccttctactgcctggaatactttccttcgcagatgctgagaaccggcaacaacttccagtttacttacaccttcgaggacgtgcctttccacagcagctacgcccacagccagagcttggaccggctgatgaatcctctgattgaccagtacctgtactacttgtctcggactcaaacaacaggaggcacggcaaatacgcagactctgggcttcagccaaggtgggcctaatacaatggccaatcaggcaaagaactggctgccaggaccctgttaccgccaacaacgcgtctcaacgacaaccgggcaaaacaacaatagcaactttgcctggactgctgggaccaaataccatctgaatggaagaaattcattggctaatcctggcatcgctatggcaacacacaaagacgacgaggagcgtttttttcccagtaacgggatcctgatttttggcaaacaaaatgctgccagagacaatgcggattacagcgatgtcatgctcaccagcgaggaagaaatcaaaaccactaaccctgtggctacagaggaatacggtatcgtggcagataacttgcagcagcaaaacacggctcctcaaattggaactgtcaacagccagggggccttacccggtatggtctggcagaaccgggacgtgtacctgcagggtcccatctgggccaagattcctcacacggacggcaacttccacccgtctccgctgatgggcggctttggcctgaaacatcctccgcctcagatcctgatcaagaacacgcctgtacctgcggatcctccgaccaccttcaaccagtcaaagctgaactctttcatcacgcaatacagcaccggacaggtcagcgtggaaattgaatgggagctgcagaaggaaaacagcaagcgctggaaccccgagatccagtacacctccaactactacaaatctacaagtgtggactttgctgttaatacagaaggcgtgtactctgaaccccgccccattggcacccgttacctcacccgtaatctgtaa

SEQ ID NO: 5166 - DNA, 2213 bp, Adeno-associated virus 8
atggctgccgatggttatcttccagattggctcgaggacaacctctctgagggcattcgcgagtggtgggcgctgaaacctggagccccgaagcccaaagccaaccagcaaaagcaggacgacggccggggtctggtgcttcctggctacaagtacctcggacccttcaacggactcgacaagggggagcccgtcaacgcggcggacgcagcggccctcgagcacgacaaggcctacgaccagcagctgcaggcgggtgacaatccgtacctgcggtataaccacgccgacgccgagtttcaggagcgtctgcaagaagatacgtcttttgggggcaacctcgggcgagcagtcttccaggccaagaagcgggttctcgaacctctcggtctggttgaggaaggcgctaagacggctcctggaaagaagagaccggtagagccatcaccccagcgttctccagactcctctacgggcatcggcaagaaaggccaacagcccgccagaaaaagactcaattttggtcagactggcgactcagagtcagttccagaccctcaacctctcggagaacctccagcagcgccctctggtgtgggacctaatacaatggctgcaggcggtggcgcaccaatggcagacaataacgaaggcgccgacggagtgggtagttcctcgggaaattggcattgcgattccacatggctgggcgacagagtcatcaccaccagcacccgaacctgggccctgcccacctacaacaaccacctctacaagcaaatctccaacgggacatcgggaggagccaccaacgacaacacctacttcggctacagcaccccctgggggtattttgactttaacagattccactgccacttttcaccacgtgactggcagcgactcatcaacaacaactggggattccggcccaagagactcagcttcaagctcttcaacatccaggtcaaggaggtcacgcagaatgaaggcaccaagaccatcgccaataacctcaccagcaccatccaggtgtttacggactcggagtaccagctgccgtacgttctcggctctgcccaccagggctgcctgcctccgttcccggcggacgtgttcatgattccccagtacggctacctaacactcaacaacggtagtcaggccgtgggacgctcctccttctactgcctggaatactttccttcgcagatgctgagaaccggcaacaacttccagtttacttacaccttcgaggacgtgcctttccacagcagctacgcccacagccagagcttggaccggctgatgaatcctctgattgaccagtacctgtactacttgtctcggactcaaacaacaggaggcacggcaaatacgcagactctgggcttcagccaaggtgggcctaatacaatggccaatcaggcaaagaactggctgccaggaccctgttaccgccaacaacgcgtctcaacgacaaccgggcaaaacaacaatagcaactttgcctggactgctgggaccaaataccatctgaatggaagaaattcattggctaatcctggcatcgctatggcaacacacaaagacgacgaggagcgtttttttcccagtaacgggatcctgatttttggcaaacaaaatgctgccagagacaatgcggattacagcgatgtcatgctcaccagcgaggaagaaatcaaaaccactaaccctgtggctacagaggaatacggtatcgtggcagataacttgcagcagcaaaacacggctcctcaaattggaactgtcaacagccagggggccttacccggtatggtctggcagaaccgggacgtgtacctgcagggtcccatctgggccaagattcctcacacggacggcaacttccacccgtctccgctgatgggcggctttggcctgaaacatcctccgcctcagatcctgatcaagaacacgcctgtacctgcggatcctccgaccaccttcaaccagtcaaagctgaactctttcatcacgcaatacagcaccggacaggtcagcgtggaaattgaatgggagctgcagaaggaaaacagcaagcgctggaaccccgagatccagtacacctccaactactacaaatctacaagtgtggactttgctgtaatacagaaggcgtgtactctgaaccccgccccattggcacccgttacctcacccgtaatctg

SEQ ID NO: 5167 - DNA, 4393 bp, Adeno-associated virus 8
cagagagggagtggccaactccatcactaggggtagcgcgaagcgcctcccacgctgccgcgtcagcgctgacgtaaattacgtcataggggagtggtcctgtattagctgtcacgtgagtgcttttgcggcattttgcgacaccacgtggccatttgaggtatatatggccgagtgagcgagcaggatctccattttgaccgcgaaatttgaacgagcagcagccatgccgggcttctacgagatcgtgatcaaggtgccgagcgacctggacgagcacctgccgggcatttctgactcgtttgtgaactgggtggccgagaaggaatgggagctgcccccggattctgacatggatcggaatctgatcgagcaggcacccctgaccgtggccgagaagctgcagcgcgacttcctggtccaatggcgccgcgtgagtaaggccccggaggccctcttctttgttcagttcgagaagggcgagagctactttcacctgcacgttctggtcgagaccacgggggtcaagtccatggtgctaggccgcttcctgagtcagattcgggaaaagcttggtccagaccatctacccgcggggtcgagccccaccttgcccaactggttcgcggtgaccaaagacgcggtaatggcgccggcgggggggaacaaggtggtggacgagtgctacatccccaactacctcctgcccaagactcagcccgagctgcagtgggcgtggactaacatggaggagtatataagcgcgtgcttgaacctggccgagcgcaaacggctcgtggcgcagcacctgacccacgtcagccagacgcaggagcagaacaaggagaatctgaaccccaattctgacgcgcccgtgatcaggtcaaaaacctccgcgcgctatatggagctggtcgggtggctggtggaccggggcatcacctccgagaagcagtggatccaggaggaccaggcctcgtacatctccttcaacgccgcctccaactcgcggtcccagatcaaggccgcgctggacaatgccggcaagatcatggcgctgaccaaatccgcgcccgactacctggtggggccctcgctgcccgcggacattacccagaaccgcatctaccgcatcctcgctctcaacggctacgaccctgcctacgccggctccgtctttctcggctgggctcagaaaaagttcgggaaacgcaacaccatctggctgtttggacccgccaccaccggcaagaccaacattgcggaagccatcgcccacgccgtgcccttctacggctgcgtcaactggaccaatgagaactttcccttcaatgattgcgtcgacaagatggtgatctggtgggaggagggcaagatgacggccaaggtcgtggagtccgccaaggccattctcggcggcagcaaggtgcgcgtggaccaaaagtgcaagtcgtccgcccagatcgaccccacccccgtgatcgtcacctccaacaccaacatgtgcgccgtgattgacgggaacagcaccaccttcgagcaccagcagcctctccaggaccggatgtttaagttcgaactcacccgccgtctggagcacgactttggcaaggtgacaaagcaggaagtcaaagagttcttccgctgggccagtgatcacgtgaccgaggtggcgcatgagttttacgtcagaaagggcggagccagcaaaagacccgcccccgatgacgcggataaaagcgagcccaagcgggcctgcccctcagtcgcggatccatcgacgtcagacgcggaaggagctccggtggactttgccgacaggtaccaaaacaaatgttctcgtcacgcgggcatgcttcagatgctgtttccctgcaaaacgtgcgagagaatgaatcagaatttcaacatttgcttcacacacggggtcagagactgctcagagtgtttccccggcgtgtcagaatctcaaccggtcgtcagaaagaggacgtatcggaaactctgtgcgattcatcatctgctggggcgggctcccgagattgcttgctcggcctgcgatctggtcaacgtggacctggatgactgtgtttctgagcaataaatgacttaaaccaggtatggctgccgatggttatcttccagattggctcgaggacaacctctctgagggcattcgcgagtggtgggcgctgaaacctggagccccgaagcccaaagccaaccagcaaaagcaggacgacggccggggtctggtgcttcctggctacaagtacctcggacccttcaacggactcgacaagggggagcccgtcaacgcggcggacgcagcggccctcgagcacgacaaggcctacgaccagcagctgcaggcgggtgacaatccgtacctgcggtataaccacgccgacgccgagtttcaggagcgtctgcaagaagatacgtcttttgggggcaacctcgggcgagcagtcttccaggccaagaagcgggttctcgaacctctcggtctggttgaggaaggcgctaagacggctcctggaaagaagagaccggtagagccatcaccccagcgttctccagactcctctacgggcatcggcaagaaaggccaacagcccgccagaaaaagactcaattttggtcagactggcgactcagagtcagttccagaccctcaacctctcggagaacctccagcagcgccctctggtgtgggacctaatacaatggctgcaggcggtggcgcaccaatggcagacaataacgaaggcgccgacggagtgggtagttcctcgggaaattggcattgcgattccacatggctgggcgacagagtcatcaccaccagcacccgaacctgggccctgcccacctacaacaaccacctctacaagcaaatctccaacgggacatcgggaggagccaccaacgacaacacctacttcggctacagcaccccctgggggtattttgactttaacagattccactgccacttttcaccacgtgactggcagcgactcatcaacaacaactggggattccggcccaagagactcagcttcaagctcttcaacatccaggtcaaggaggtcacgcagaatgaaggcaccaagaccatcgccaataacctcaccagcaccatccaggtgtttacggactcggagtaccagctgccgtacgttctcggctctgcccaccagggctgcctgcctccgttcccggcggacgtgttcatgattccccagtacggctacctaacactcaacaacggtagtcaggccgtgggacgctcctccttctactgcctggaatactttccttcgcagatgctgagaaccggcaacaacttccagtttacttacaccttcgaggacgtgcctttccacagcagctacgcccacagccagagcttggaccggctgatgaatcctctgattgaccagtacctgtactacttgtctcggactcaaacaacaggaggcacggcaaatacgcagactctgggcttcagccaaggtgggcctaatacaatggccaatcaggcaaagaactggctgccaggaccctgttaccgccaacaacgcgtctcaacgacaaccgggcaaaacaacaatagcaactttgcctggactgctgggaccaaataccatctgaatggaagaaattcattggctaatcctggcatcgctatggcaacacacaaagacgacgaggagcgtttttttcccagtaacgggatcctgatttttggcaaacaaaatgctgccagagacaatgcggattacagcgatgtcatgctcaccagcgaggaagaaatcaaaaccactaaccctgtggctacagaggaatacggtatcgtggcagataacttgcagcagcaaaacacggctcctcaaattggaactgtcaacagccagggggccttacccggtatggtctggcagaaccgggacgtgtacctgcagggtcccatctgggccaagattcctcacacggacggcaacttccacccgtctccgctgatgggcggctttggcctgaaacatcctccgcctcagatcctgatcaagaacacgcctgtacctgcggatcctccgaccaccttcaaccagtcaaagctgaactctttcatcacgcaatacagcaccggacaggtcagcgtggaaattgaatgggagctgcagaaggaaaacagcaagcgctggaaccccgagatccagtacacctccaactactacaaatctacaagtgtggactttgctgttaatacagaaggcgtgtactctgaaccccgccccattggcacccgttacctcacccgtaatctgtaattgcctgttaatcaataaaccggttgattcgtttcagttgaactttggtctctgcg

SEQ ID NO: 5168 - protein, 738 aa, Adeno-associated virus 8; identical to SEQ ID NO: 5159

SEQ ID NO: 5169 - protein, 737 aa, Adeno-associated virus 8
MAADGYLPDWLEDNLSEGIREWWALKPGAPKPKANQQKQDDGRGLVLPGYKYLGPFNGLDKGEPVNAADAAALEHDKAYDQQLQAGDNPYLRYNHADAEFQERLQEDTSFGGNLGRAVFQAKKRVLEPLGLVEEGAKTAPGKKRPVEPSPQRSPDSSTGIGKKGQQPARKRLNFGQTGDSESVPDPQPLGEPPAAPSGVGPNTMAAGGGAPMADNNEGADGVGSSSGNWHCDSTWLGDRVITTSTRTWALPTYNNHLYKQISNGTSGGATNDNTYFGYSTPWGYFDFNRFHCHFSPRDWQRLINNNWGFRPKRLSFKLFNIQVKEVTQNEGTKTIANNLTSTIQVFTDSEYQLPYVLGSAHQGCLPPFPADVFMIPQYGYLTLNNGSQAVGRSSFYCLEYFPSQMLRTGNNFQFTYTFEDVPFHSSYAHSQSLDRLMNPLIDQYLYYLSRTQTTGGTANTQTLGFSQGGPNTMANQAKNWLPGPCYRQQRVSTTTGQNNNSNFAWTAGTKYHLNGRNSLANPGIAMATHKDDEERFFPSNGILIFGKQNAARDNADYSDVMLTSEEEIKTTNPVATEEYGIVADNLQQQNTAPQIGTVNSQGALPGMVWQNRDVYLQGPIWAKIPHTDGNFHPSPLMGGFGLKHPPPQILIKNTPVPADPPTTFNQSKLNSFITQYSTGQVSVEIEWELQKENSKRWNPEIQYTSNYYKSTSVDFAVIQKACTLNPAPLAPVTSPVI

SEQ ID NO: 5170 - DNA, 2217 bp, Adeno-associated virus 8; identical to SEQ ID NO: 5165

SEQ ID NO: 5171 - DNA, 4385 bp, Adeno-associated virus 9
cagagagggagtggccaactccatcactaggggtaatcgcgaagcgcctcccacgctgccgcgtcagcgctgacgtagattacgtcataggggagtggtcctgtattagctgtcacgtgagtgcttttgcgacattttgcgacaccacatggccatttgaggtatatatggccgagtgagcgagcaggatctccattttgaccgcgaaatttgaacgagcagcagccatgccgggcttctacgagattgtgatcaaggtgccgagcgacctggacgagcacctgccgggcatttctgactcttttgtgaactgggtggccgagaaggaatgggagctgcccccggattctgacatggatcggaatctgatcgagcaggcacccctgaccgtggccgagaagctgcagcgcgacttcctggtccaatggcgccgcgtgagtaaggccccggaggccctcttctttgttcagttcgagaagggcgagagctactttcacctgcacgttctggtcgagaccacgggggtcaagtccatggtgctaggccgcttcctgagtcagattcgggagaagctggtccagaccatctaccgcgggatcgagccgaccctgcccaactggttcgcggtgaccaagacgcgtaatggcgccggcggggggaacaaggtggtggacgagtgctacatccccaactacctcctgcccaagactcagcccgagctgcagtgggcgtggactaacatggaggagtatataagcgcgtgcttgaacctggccgagcgcaaacggctcgtggcgcagcacctgacccacgtcagccagacgcaggagcagaacaaggagaatctgaaccccaattctgacgcgcccgtgatcaggtcaaaaacctccgcgcgctacatggagctggtcgggtggctggtggaccggggcatcacctccgagaagcagtggatccaggaggaccaggcctcgtacatctccttcaacgccgcctccaactcgcggtcccagatcaaggccgcgctggacaatgccggcaagatcatggcgctgaccaaatccgcgcccgactacctggtaggcccttcacttccggtggacattacgcagaaccgcatctaccgcatcctgcagctcaacggctacgaccctgcctacgccggctccgtctttctcggctgggcacaaaagaagttcgggaaacgcaacaccatctggctgtttgggccggccaccacgggaaagaccaacatcgcagaagccattgcccacgccgtgcccttctacggctgcgtcaactggaccaatgagaactttcccttcaacgattgcgtcgacaagatggtgatctggtgggaggagggcaagatgacggccaaggtcgtggagtccgccaaggccattctcggcggcagcaaggtgcgcgtggaccaaaagtgcaagtcgtccgcccagatcgaccccactcccgtgatcgtcacctccaacaccaacatgtgcgccgtgattgacgggaacagcaccaccttcgagcaccagcagcctctccaggaccggatgtttaagttcgaactcacccgccgtctggagcacgactttggcaaggtgacaaagcaggaagtcaaagagttcttccgctgggccagtgatcacgtgaccgaggtggcgcatgagttttacgtcagaaagggcggagccagcaaaagacccgcccccgatgacgcggataaaagcgagcccaagcgggcctgcccctcagtcgcggatccatcgacgtcagacgcggaaggagctccggtggactttgccgacaggtaccaaaacaaatgttctcgtcacgcgggcatgcttcagatgctgcttccctgcaaaacgtgcgagagaatgaatcagaatttcaacatttgcttcacacacggggtcagagactgctcagagtgtttccccggcgtgtcagaatctcaaccggtcgtcagaaagaggacgtatcggaaactctgtgcgattcatcatctgctggggcgggctcccgagattgcttgctcggcctgcgatctggtcaacgtggacctggatgactgtgtttctgagcaataaatgacttaaaccaggtatggctgccgatggttatcttccagattggctcgaggacaacctctctgagggcattcgcgagtggtgggcgctgaaacctggagccccgaagcccaaagccaaccagcaaaagcaggacgacggccggggtctggtgcttcctggctacaagtacctcggacccttcaacggactcgacaagggggagcccgtcaacgcggcggacgcagcggccctcgagcacggcaaggcctacgaccagcagctgcaggcgggtgacaatccgtacctgcggtataaccacgccgacgccgagtttcaggagcgtctgcaagaagatacgtcttttgggggcaacctcgggcgagcagtcttccaggccaagaagcgggttctcgaacctctcggtctggttgaggaaggcgctaagacggctcctggaaagaagagaccggtagagccatcaccccagcgttctccagactcctctacgggcatcggcaagaaaggccaacagcccgccagaaaaagactcaattttggtcagactggcgactcagagtcagttccagaccctcaacctctcggagaacctccagcagcgccctctggtgtgggacctaatacaatggctgcaggcggtggcgcaccaatggcagacaataacgaaggcgccgacggagtgggtaattcctcgggaaattggcattgcgattccacatggctgggggacagagtcatcaccaccagcacccgaacctgggcattgcccacctacaacaaccacctctacaagcaaatctccaatggaacatcgggaggaagcaccaacgacaacacctactttggctacagcaccccctgggggtattttgacttcaacagattccactgccacttctcaccacgtgactggcagcgactcatcaacaacaactggggattccggccaaagagactcaacttcaagctgttcaacatccaggtcaaggaggttacgacgaacgaaggcaccaagaccatcgccaataaccttaccagcaccgtccaggtctttacggactcggagtaccagctaccgtacgtcctaggctctgcccaccaaggatgcctgccaccgtttcctgcagacgtcttcatggttcctcagtacggctacctgacgctcaacaatggaagtcaagcgttaggacgttcttctttctactgtctggaatacttcccttctcagatgctgagaaccggcaacaactttcagttcagctacactttcgaggacgtgcctttccacagcagctacgcacacagccagagtctagatcgactgatgaaccccctcatcgaccagtacctatactacctggtcagaacacagacaactggaactgggggaactcaaactttggcattcagccaagcaggccctagctcaatggccaatcaggctagaaactgggtacccgggccttgctaccgtcagcagcgcgtctccacaaccaccaaccaaaataacaacagcaactttgcgtggacgggagctgctaaattcaagctgaacgggagagactcgctaatgaatcctggcgtggctatggcatcgcacaaagacgacgaggaccgcttctttccatcaagtggcgttctcatatttggcaagcaaggagccgggaacgatggagtcgactacagccaggtgctgattacagatgaggaagaaattaaagccaccaaccctgtagccacagaggaatacggagcagtggccatcaacaaccaggccgctaacacgcaggcgcaaactggacttgtgcataaccagggagttattcctggtatggtctggcagaaccgggacgtgtacctgcagggccctatttgggctaaaatacctcacacagatggcaactttcacccgtctcctctgatgggtggatttggactgaaacacccacctccacagattctaattaaaaatacaccagtgccggcagatcctcctcttaccttcaatcaagccaagctgaactctttcatcacgcagtacagcacgggacaagtcagcgtggaaatcgagtgggagctgcagaaagaaaacagcaagcgctggaatccagagatccagtatacttcaaactactacaaatctacaaatgtggactttgctgtcaataccaaaggtgtttactctgagcctcgccccattggtactcgttacctcacccgtaatttgtaattgcctgttaatcaataaaccggttaattcgtttcagttgaactttggtctctgcg

SEQ ID NO: 5172 - DNA, 4382 bp, Adeno-associated virus 9
cagagagggagtggccaactccatcactaggggtaatcgcgaagcgcctcccacgctgccgcgtcagcgctgacgtagattacgtcataggggagtggtcctgtattagctgtcacgtgagtgcttttgcgacattttgcgacaccacatggccatttgaggtatatatggccgagtgagcgagcaggatctccattttgaccgcgaaatttgaacgagcagcagccatgccgggcttctacgagattgtgatcaaggtgccgagcgacctggacgagcacctgccgggcatttctgactcttttgtgaactgggtggccgagaaggaatgggagctgcccccggattctgacatggatcggaatctgatcgagcaggcacccctgaccgtggccgagaagctgtagcgcgacttcctggtccaatggcgccgcgtgagtaaggccccggaggccctcttctttgttcagttcgagaagggcgagagctactttcacctgcacgttctggtcgagaccacgggggtcaagtccatggtgctaggccgcttcctgagtcagattcgggagaagctggtccagaccatctaccgcgggatcgagccgaccctgcccaactggttcgcggtgaccaagacgcgtaatggcgccggcggggggaacaaggtggtggacgagtgctacatccccaactacctcctgcccaagactcagcccgagctgcagtgggcgtggactaacatggaggagtatataagcgcgtgcttgaacctggccgagcgcaaacggctcgtggcgcagcacctgacccacgtcagccagacgcaggagcagaacaaggagaatctgaaccccaattctgacgcgcccgtgatcaggtcaaaaacctccgcgcgctacatggagctggtcgggtggctggtggaccggggcatcacctccgagaagcagtggatccaggaggaccaggcctcgtacatctccttcaacgccgcctccaactcgcggtcccagatcaaggccgcgctggacaatgccggcaagatcatggcgctgaccaaatccgcgcccgactacctggtaggcccttcacttccggtggacattacgcagaaccgcatctaccgcatcctgcagctcaacggctacgaccctgcctacgccggctccgtctttctcggctgggcacaaaagaagttcgggaaacgcaacaccatctggctgtttgggccggccaccacgggaaagaccaacatcgcagaagccattgcccacgccgtgcccttctacggctgcgtcaactggaccaatgagaactttcccttcaacgattgcgtcgacaagatggtgatctggtgggaggagggcaagatgacggccaaggtcgtggagtccgccaaggccattctcggcggcagcaaggtgcgcgtggaccaaaagtgcaagtcgtccgcccagatcgaccccactcccgtgatcgtcacctccaacaccaacatgtgcgccgtgattgacgggaacagcaccaccttcgagcaccagcagcctctccaggaccggatgtttaagttcgaactcacccgccgtctggagcacgactttggcaaggtgacaaagcaggaagtcaaagagttcttccgctgggccagtgatcacgtgaccgaggtggcgcatgagttttacgtcagaaagggcggagccagcaaaagacccgcccccgatgacgcggataaaagcgagcccaagcgggcctgcccctcagtcgcggatccatcgacgtcagacgcggaaggagctccggtggactttgccgacaggtaccaaaacaaatgttctcgtcacgcgggcatgcttcagatgctgcttccctgcaaaacgtgcgagagaatgaatcagaatttcaacatttgcttcacacacggggtcagagactgctcagagtgtttccccggcgtgtcagaatctcaaccggtcgtcagaaagaggacgtatcggaaactctgtgcgattcatcatctgctggggcgggctcccgagattgcttgctcggcctgcgatctggtcaacgtggacctggatgactgtgtttctgagcaataaatgacttaaaccaggtatggctgccgatggttatcttccagattggctcgaggacaacctctctgagggcattcgcgagtggtgggacctgaaacctggagccccgaaacccaaagccaaccagcaaaagcaggacgacggccggggtctggtgcttcctggctacaagtacctcggacccttcaacggactcgacaagggggagcccgtcaacgcggcggacgcagcggccctcgagcacgacaaggcctacgaccagcagctcaaagcgggtgacaatccgtacctgcggtataaccacgccgacgccgagtttcaggagcgtctgcaagaagatacgtcttttgggggcaacctcgggcgagcagtcttccaggccaagaagcgggttctcgaacctctcggtctggttgaggaaggcgctaagacggctcctggaaagaagagaccggtagagcagtcaccccaagaaccagactcatcctcgggcatcggcaaatcaggccagcagcccgctaaaaagagactcaattttggtcagactggcgactcagagtcagtccccgacccacaacctctcggagaacctccagaagccccctcaggtctgggacctaatacaatggcttcaggcggtggcgctccaatggcagacaataacgaaggcgccgacggagtgggtaattcctcgggaaattggcattgcgattccacatggctgggggacagagtcatcaccaccagcacccgaacctgggcattgcccacctacaacaaccacctctacaagcaaatctccaatggaacatcgggaggaagcaccaacgacaacacctactttggctacagcaccccctgggggtattttgacttcaacagattccactgccacttctcaccacgtgactggcagcgactcatcaacaacaactggggattccggccaaagagactcaacttcaagctgttcaacatccaggtcaaggaggttacgacgaacgaaggcaccaagaccatcgccaataaccttaccagcaccgtccaggtctttacggactcggagtaccagctaccgtacgtcctaggctctgcccaccaaggatgcctgccaccgtttcctgcagacgtcttcatggttcctcagtacggctacctgacgctcaacaatggaagtcaagcgttaggacgttcttctttctactgtctggaatacttcccttctcagatgctgagaaccggcaacaactttcagttcagctacactttcgaggacgtgcctttccacagcagctacgcacacagccagagtctagatcgactgatgaaccccctcatcgaccagtacctatactacctggtcagaacacagacaactggaactgggggaactcaaactttggcattcagccaagcaggccctagctcaatggccaatcaggctagaaactgggtacccgggccttgctaccgtcagcagcgcgtctccacaaccaccaaccaaaataacaacagcaactttgcgtggacgggagctgctaaattcaagctgaacgggagagactcgctaatgaatcctggcgtggctatggcatcgcacaaagacgacgaggaccgcttctttccatcaagtggcgttctcatatttggcaagcaaggagccgggaacgatggagtcgactacagccaggtgctgattacagatgaggaagaaattaaagccaccaaccctgtagccacagaggaatacggagcagtggccatcaacaaccaggccgctaacacgcaggcgcaaactggacttgtgcataaccagggagttattcctggtatggtctggcagaaccgggacgtgtacctgcagggccctatttgggctaaaatacctcacacagatggcaactttcacccgtctcctctgatgggtggatttggactgaaacacccacctccacagattctaattaaaaatacaccagtgccggcagatcctcctcttaccttcaatcaagccaagctgaactctttcatcacgcagtacagcacgggacaagtcagcgtggaaatcgagtgggagctgcagaaagaaaacagcaagcgctggaatccagagatccagtatacttcaaactactacaaatctacaaatgtggactttgctgtcaataccgaaggtgtttactctgagcctcgccccattggtactcgttacctcacccgtaatttgtaattgcctgttaatcaataaaccggttaattcgtttcagttgaactttggtctctgcg

SEQ ID NO: 5173 - protein, 736 aa, Adeno-associated virus 9; identical to SEQ ID NO: 4805

SEQ ID NO: 5174 - protein, 736 aa, Adeno-associated virus 9
MAADGYLPDWLEDNLSEGIREWWDLKPGAPKPKANQQKQDDGRGLVLPGYKYLGPFNGLDKGEPVNAADAAALEHDKAYDQQLKAGDNPYLRYNHADAEFQERLQEDTSFGGNLGRAVFQAKKRVLEPLGLVEEGAKTAPGKKRPVEQSPQEPDSSSGIGKSGQQPAKKRLNFGQTGDSESVPDPQPLGEPPEAPSGLGPNTMASGGGAPMADNNEGADGVGNSSGNWHCDSTWLGDRVITTSTRTWALPTYNNHLYKQISNGTSGGSTNDNTYFGYSTPWGYFDFNRFHCHFSPRDWQRLINNNWGFRPKRLNFKLFNIQVKEVTTNEGTKTIANNLTSTVQVFTDSEYQLPYVLGSAHQGCLPPFPADVFMVPQYGYLTLNNGSQALGRSSFYCLEYFPSQMLRTGNNFQFSYTFEDVPFHSSYAHSQSLDRLMNPLIDQYLYYLVRTQTTGTGGTQTLAFSQAGPSSMANQARNWVPGPCYRQQRVSTTTNQNNNSNFAWTGAAKFKLNGRDSLMNPGVAMASHKDDEDRFFPSSGVLIFGKQGAGNDGVDYSQVLITDEEEIKATNPVATEEYGAVAINNQAANTQAQTGLVHNQGVIPGMVWQNRDVYLQGPIWAKIPHTDGNFHPSPLMGGFGLKHPPPQILIKNTPVPADPPLTFNQAKLNSFITQYSTGQVSVEIEWELQKENSKRWNPEIQYTSNYYKSTNVDFAVNTEGVYSEPRPIGTRYLTRNL

SEQ ID NO: 5175 - protein, 623 aa, Adeno-associated virus 9
MPGFYEIVIKVPSDLDEHLPGISDSFVNWVAEKEWELPPDSDMDRNLIEQAPLTVAEKLQRDFLVQWRRVSKAPEALFFVQFEKGESYFHLHVLVETTGVKSMVLGRFLSQIREKLVQTIYRGIEPTLPNWFAVTKTRNGAGGGNKVVDECYIPNYLLPKTQPELQWAWTNMEEYISACLNLAERKRLVAQHLTHVSQTQEQNKENLNPNSDAPVIRSKTSARYMELVGWLVDRGITSEKQWIQEDQASYISFNAASNSRSQIKAALDNAGKIMALTKSAPDYLVGPSLPVDITQNRIYRILQLNGYDPAYAGSVFLGWAQKKFGKRNTIWLFGPATTGKTNIAEAIAHAVPFYGCVNWTNENFPFNDCVDKMVIWWEEGKMTAKVVESAKAILGGSKVRVDQKCKSSAQIDPTPVIVTSNTNMCAVIDGNSTTFEHQQPLQDRMFKFELTRRLEHDFGKVTKQEVKEFFRWASDHVTEVAHEFYVRKGGASKRPAPDDADKSEPKRACPSVADPSTSDAEGAPVDFADRYQNKCSRHAGMLQMLLPCKTCERMNQNFNICFTHGVRDCSECFPGVSESQPVVRKRTYRKLCAIHHLLGRAPEIACSACDLVNVDLDDCVSEQ

SEQ ID NO: 5176 - DNA, 1797 bp, Artificial Sequence
  Description of Artificial Sequence: Synthetic polynucleotide
acggctccgaccggagacaagcggaaaggcgaagacgaacctcgtttgcccgacacttcttcacagactcccaagaaaaacaagaagcctcgcaaggaaagaccttccggcggggcagaagatccgggcgaaggcacctcttccaacgctggagcagcagcacccgcctctagtgtgggatcatctatcatggctgaaggaggtggcggcccagtgggcgatgcaggccagggtgccgatggagtgggcaattcctccggaaattggcattgcgattcccaatggctggaaaacggagtcgtcactcgaaccacccgaacctgggtcttgcccagctacaacaaccacctgtacaaacgaatccaaggacccagcggaggcgacaacaacaacaaattctttggattcagcaccccctggggatactttgactacaatcgattccactgccacttttccccgcgagactggcaacgactcatcaacaacaactggggcatccgtcccaaagcgatgcgctttagactctttaacatccaggttaaagaggtcacggtccaagacttcaacaccaccatcggcaacaacctcaccagtacggtccaggtctttgcggacaaggactaccaactgccgtacgtcctcggatcggctaccgaaggcaccttcccgccgttcccagcggatatctacacgatcccgcagtacgggtactgcacgctaaactacaacaacgaggcggtggatcgttcggccttctactgtctggactactttccctcagacatgctgcggacaggaaataactttgagtttacttacaccttcgaggacgttcctttccatagcatgtttgcccacaaccagacgctagaccggctgatgaatcccctcgtggatcagtacctctgggctttcagctccgtcagccaagcaggctcatctggacgagctcttcattactcgcgggcgactaaaaccaacatggcggctcaatataggaactggttacctgggcctttcttccgtgatcagcaaatctttacgggcgctagcaacatcactaaaaataacgtctttagcgtttgggaaaaaggcaagcaatgggaactcgacaatcggaccaacctaatgcagcccggtcctgcggcagcgaccacctttagcggagaacctgaccgtcaagccatgcaaaacacgctggcttttagcaggaccgtctacgatcaaacgaccgccacgaccgatcgtaaccagatactcatcaccaacgaagacgaaatcagacccaccaactcggtcggtatcgacgcgtggggagcagttcccaccaacaaccagtcgatcgtgacccccggcactcgcgcggccgtcaacaatcaaggggcgcttcccgggatggtgtggcaaaacagagacatttaccctacagggacccatttggccaaaattcccgacactgacaatcacttccatccgtccccgcttattgggcggtttggctgcaagcatccccctccccagattttcattaaaaacacacccgtccctgccaacccttcggaaacgttccagacggccaaagtggcctccttcatcaaccagtactcgaccggacagtgcaccgtcgaaatcttttgggaactcaagaaggaaacctccaagcgctggaaccccgaaatccagttcacctccaactttggcaacgcggccgacatccagtttgccgtctccgacacgggatcctattccgaacctcgtcccatcggtacccgttaccttaccaaacctctgtaa

SEQ ID NO: 5177 - DNA, 1989 bp, Artificial Sequence
  Description of Artificial Sequence: Synthetic polynucleotide
atgaggtcgtactacgaggtcatcgttcagctgcccaacgacgtcgagagtcaggtacctggaatctccgattcgttcgtcaactggattacgtcgcgagaatggacgttgcctgaggacgccgattgggatttggaccaggtcgatcaagttcaactgacgctcggcgacaaaatccaacgggagattcgaactcattgggggacgatggccaaagaaccggactttcactattttatccaactggaacaaggtgaggtgttctttcatttacacgtcctgctggaaacgtgttccgtaaagccgatggtactcggaagatatatccgacatattcaacaaaaaattgtgagtaaagtctactgcgccacgagcctacgatggaaggatggatgcgtggtgaccaagaccaaaaatttcgggggcgcgaacaaggtccgggccgagtcgtatattcccgcctacctgatcccgaaacagcaaccggaagtgcagtgggcgtggactaacgtgcccgagtatataaaagcgtgcttgcaccgagaactgcgtgccagtctcgcgcgacttcacttcgaggaggcgggcgtctcgcaatccaaggaaaatctcgcgagaactgcagacggcgctcccgtgatgccgacccgcgtcagcaaacgctacatggagctcgtggattggctcgtggagaaggggatcaccaccgagaaggaatggctgctggaaaacagagaaagctttcggagctttcaggcctcgagcaactcggcgcgtcagatcaagacggccctgcaaggcgccattcaggagatgcttctgaccaagacggcggaggactacctcgtcggaaaggatcccgtctcggacgacgacatccgtcagaaccgcatctacaagattctggaactgaaccactacgacccagcgtacgtggggagtattttggtcgggtggtgccagaagaaatggggcaagcgaaacacgctgtggctgttcggacatgcgaccaccggcaagaccaacatcgcggaggctattgcccatgctgtgccgttctatggatgcgttaactggaccaacgagaactttccgttcaacgactgcgtcgaaaaaatgattatctggtgggaggagggcaaaatgaccgccaaagtggtggaaacagccaaggcgattctgggaggatctcgggtgagagtggaccaaaaatgcaaagcttcggttccgatcgaaccgacgccggtcattattaccagtaacaccaacatgtgttatgtcatcgacgggaacacgaccacgttcgagcataagcagccgttggaggacaggatgtttaagctcgaattgctgactcggttgcctgatgactttggtaaggtgaccaaacaggaggtgcgtcaattcttcaggtggtctcaggatcacctgacccctgtgatcccagaattcctagtgcggaaggcggagtctcgcaaaagacccgccccttccggggaaggctatataagcccgacaaagcggcccgcgctcgcagagcagcagcaggcgtcggagagcgcggacccggttcccaccaggtatcgtatcaaatgctcgaaacattgcggtatggataaaatgttgtttccttgccaaatttgtgaatcgatgaacagagatattaatatttgtgctattcataaaacgaccgactgtaaagagtgtttccccgactacggggataaagatgatgtagaactacccccctgtacagaacacaacgtgtctcgttgttatcaatgtcattcgggcgaattgtatcgcgtgacttcggactctgacgagaaacctgcccccgagagtgatgaaggcaccgagccatcctatgctccctgcacgattcaccacctgatgggcaagagtcacgggttagtcacttgcgcggcgtgtcggttgaaaaatagtacgttgcatgatgacttggatgacggtgatctcgaacaataa

SEQ ID NO: 5178 - DNA, 1626 bp, Artificial Sequence
  Description of Artificial Sequence: Synthetic polynucleotide
atgaggtcgtactacgaggtcatcgttcagctgcccaacgacgtcgagagtcaggtacctggaatctccgattcgttcgtcaactggattacgtcgcgagaatggacgttgcctgaggacgccgattgggatttggaccaggtcgatcaagttcaactgacgctcggcgacaaaatccaacgggagattcgaactcattgggggacgatggccaaagaaccggactttcactattttatccaactggaacaaggtgaggtgttctttcatttacacgtcctgctggaaacgtgttccgtaaagccgatggtactcggaagatatatccgacatattcaacaaaaaattgtgagtaaagtctactgcgccacgagcctacgatggaaggatggatgcgtggtgaccaagaccaaaaatttcgggggcgcgaacaaggtccgggccgagtcgtatattcccgcctacctgatcccgaaacagcaaccggaagtgcagtgggcgtggactaacgtgcccgagtatataaaagcgtgcttgcaccgagaactgcgtgccagtctcgcgcgacttcacttcgaggaggcgggcgtctcgcaatccaaggaaaatctcgcgagaactgcagacggcgctcccgtgatgccgacccgcgtcagcaaacgctacatggagctcgtggattggctcgtggagaaggggatcaccaccgagaaggaatggctgctggaaaacagagaaagctttcggagctttcaggcctcgagcaactcggcgcgtcagatcaagacggccctgcaaggcgccattcaggagatgcttctgaccaagacggcggaggactacctcgtcggaaaggatcccgtctcggacgacgacatccgtcagaaccgcatctacaagattctggaactgaaccactacgacccagcgtacgtggggagtattttggtcgggtggtgccagaagaaatggggcaagcgaaacacgctgtggctgttcggacatgcgaccaccggcaagaccaacatcgcggaggctattgcccatgctgtgccgttctatggatgcgttaactggaccaacgagaactttccgttcaacgactgcgtcgaaaaaatgattatctggtgggaggagggcaaaatgaccgccaaagtggtggaaacagccaaggcgattctgggaggatctcgggtgagagtggaccaaaaatgcaaagcttcggttccgatcgaaccgacgccggtcattattaccagtaacaccaacatgtgttatgtcatcgacgggaacacgaccacgttcgagcataagcagccgttggaggacaggatgtttaagctcgaattgctgactcggttgcctgatgactttggtaaggtgaccaaacaggaggtgcgtcaattcttcaggtggtctcaggatcacctgacccctgtgatcccagaattcctagtgcggaaggcggagtctcgcaaaagacccgccccttccggggaaggctatataagcccgacaaagcggcccgcgctcgcagagcagcagcaggcgtcggagagcgcggacccggttcccaccagattggttggagcggttggtcaaaaagggagtgaatgctgcagctga

SEQ ID NO: 5179 - DNA, 1323 bp, Artificial Sequence
  Description of Artificial Sequence: Synthetic polynucleotide
atggagctcgtggattggctcgtggagaaggggatcaccaccgagaaggaatggctgctggaaaacagagaaagctttcggagctttcaggcctcgagcaactcggcgcgtcagatcaagacggccctgcaaggcgccattcaggagatgcttctgaccaagacggcggaggactacctcgtcggaaaggatcccgtctcggacgacgacatccgtcagaaccgcatctacaagattctggaactgaaccactacgacccagcgtacgtggggagtattttggtcgggtggtgccagaagaaatggggcaagcgaaacacgctgtggctgttcggacatgcgaccaccggcaagaccaacatcgcggaggctattgcccatgctgtgccgttctatggatgcgttaactggaccaacgagaactttccgttcaacgactgcgtcgaaaaaatgattatctggtgggaggagggcaaaatgaccgccaaagtggtggaaacagccaaggcgattctgggaggatctcgggtgagagtggaccaaaaatgcaaagcttcggttccgatcgaaccgacgccggtcattattaccagtaacaccaacatgtgttatgtcatcgacgggaacacgaccacgttcgagcataagcagccgttggaggacaggatgtttaagctcgaattgctgactcggttgcctgatgactttggtaaggtgaccaaacaggaggtgcgtcaattcttcaggtggtctcaggatcacctgacccctgtgatcccagaattcctagtgcggaaggcggagtctcgcaaaagacccgccccttccggggaaggctatataagcccgacaaagcggcccgcgctcgcagagcagcagcaggcgtcggagagcgcggacccggttcccaccaggtatcgtatcaaatgctcgaaacattgcggtatggataaaatgttgtttccttgccaaatttgtgaatcgatgaacagagatattaatatttgtgctattcataaaacgaccgactgtaaagagtgtttccccgactacggggataaagatgatgtagaactacccccctgtacagaacacaacgtgtctcgttgttatcaatgtcattcgggcgaattgtatcgcgtgacttcggactctgacgagaaacctgcccccgagagtgatgaaggcaccgagccatcctatgctccctgcacgattcaccacctgatgggcaagagtcacgggttagtcacttgcgcggcgtgtcggttgaaaaatagtacgttgcatgatgacttggatgacggtgatctcgaacaataa

SEQ ID NO: 5180 - DNA, 960 bp, Artificial Sequence
  Description of Artificial Sequence: Synthetic polynucleotide
atggagctcgtggattggctcgtggagaaggggatcaccaccgagaaggaatggctgctggaaaacagagaaagctttcggagctttcaggcctcgagcaactcggcgcgtcagatcaagacggccctgcaaggcgccattcaggagatgcttctgaccaagacggcggaggactacctcgtcggaaaggatcccgtctcggacgacgacatccgtcagaaccgcatctacaagattctggaactgaaccactacgacccagcgtacgtggggagtattttggtcgggtggtgccagaagaaatggggcaagcgaaacacgctgtggctgttcggacatgcgaccaccggcaagaccaacatcgcggaggctattgcccatgctgtgccgttctatggatgcgttaactggaccaacgagaactttccgttcaacgactgcgtcgaaaaaatgattatctggtgggaggagggcaaaatgaccgccaaagtggtggaaacagccaaggcgattctgggaggatctcgggtgagagtggaccaaaaatgcaaagcttcggttccgatcgaaccgacgccggtcattattaccagtaacaccaacatgtgttatgtcatcgacgggaacacgaccacgttcgagcataagcagccgttggaggacaggatgtttaagctcgaattgctgactcggttgcctgatgactttggtaaggtgaccaaacaggaggtgcgtcaattcttcaggtggtctcaggatcacctgacccctgtgatcccagaattcctagtgcggaaggcggagtctcgcaaaagacccgccccttccggggaaggctatataagcccgacaaagcggcccgcgctcgcagagcagcagcaggcgtcggagagcgcggacccggttcccaccagattggttggagcggttggtcaaaaagggagtgaatgctgcagctga

SEQ ID NO: 5181 - DNA, 1608 bp, Artificial Sequence
  Description of Artificial Sequence: Synthetic polynucleotide
atggctgaaggaggtggcggcccagtgggcgatgcaggccagggtgccgatggagtgggcaattcctccggaaattggcattgcgattcccaatggctggaaaacggagtcgtcactcgaaccacccgaacctgggtcttgcccagctacaacaaccacctgtacaaacgaatccaaggacccagcggaggcgacaacaacaacaaattctttggattcagcaccccctggggatactttgactacaatcgattccactgccacttttccccgcgagactggcaacgactcatcaacaacaactggggcatccgtcccaaagcgatgcgctttagactctttaacatccaggttaaagaggtcacggtccaagacttcaacaccaccatcggcaacaacctcaccagtacggtccaggtctttgcggacaaggactaccaactgccgtacgtcctcggatcggctaccgaaggcaccttcccgccgttcccagcggatatctacacgatcccgcagtacgggtactgcacgctaaactacaacaacgaggcggtggatcgttcggccttctactgtctggactactttccctcagacatgctgcggacaggaaataactttgagtttacttacaccttcgaggacgttcctttccatagcatgtttgcccacaaccagacgctagaccggctgatgaatcccctcgtggatcagtacctctgggctttcagctccgtcagccaagcaggctcatctggacgagctcttcattactcgcgggcgactaaaaccaacatggcggctcaatataggaactggttacctgggcctttcttccgtgatcagcaaatctttacgggcgctagcaacatcactaaaaataacgtctttagcgtttgggaaaaaggcaagcaatgggaactcgacaatcggaccaacctaatgcagcccggtcctgcggcagcgaccacctttagcggagaacctgaccgtcaagccatgcaaaacacgctggcttttagcaggaccgtctacgatcaaacgaccgccacgaccgatcgtaaccagatactcatcaccaacgaagacgaaatcagacccaccaactcggtcggtatcgacgcgtggggagcagttcccaccaacaaccagtcgatcgtgacccccggcactcgcgcggccgtcaacaatcaaggggcgcttcccgggatggtgtggcaaaacagagacatttaccctacagggacccatttggccaaaattcccgacactgacaatcacttccatccgtccccgcttattgggcggtttggctgcaagcatccccctccccagattttcattaaaaacacacccgtccctgccaacccttcggaaacgttccagacggccaaagtggcctccttcatcaaccagtactcgaccggacagtgcaccgtcgaaatcttttgggaactcaagaaggaaacctccaagcgctggaaccccgaaatccagttcacctccaactttggcaacgcggccgacatccagtttgccgtctccgacacgggatcctattccgaacctcgtcccatcggtacccgttaccttaccaaacctctgtaa

SEQ ID NO: 5182 - DNA, 2232 bp, Artificial Sequence
  Description of Artificial Sequence: Synthetic polynucleotide
atgtctctcatttctgatgcgattccagattggttggagcggttggtcaaaaagggagtgaatgctgcagctgatttctaccatttggaaagcggtcctcctcgtcctaaggcaaatcagcaaactcaagaatctcttgaaaaggacgattcgagaggtctcgtgttcccaggctacaattatctaggccctttcaacggtctagataaaggagaacccgtcaacgaggcagacgctgccgccttagaacacgacaaggcttacgacctcgaaatcaaggacgggcacaacccgtactttgagtacaacgaggccgacagacgtttccaggaacgtctcaaagacgatacctcctttggaggcaatttaggtaaagccatcttccaggccaaaaagagggttctcgaaccctttggtctggtggaagactcaaagacggctccgaccggagacaagcggaaaggcgaagacgaacctcgtttgcccgacacttcttcacagactcccaagaaaaacaagaagcctcgcaaggaaagaccttccggcggggcagaagatccgggcgaaggcacctcttccaacgctggagcagcagcacccgcctctagtgtgggatcatctatcatggctgaaggaggtggcggcccagtgggcgatgcaggccagggtgccgatggagtgggcaattcctccggaaattggcattgcgattcccaatggctggaaaacggagtcgtcactcgaaccacccgaacctgggtcttgcccagctacaacaaccacctgtacaaacgaatccaaggacccagcggaggcgacaacaacaacaaattctttggattcagcaccccctggggatactttgactacaatcgattccactgccacttttccccgcgagactggcaacgactcatcaacaacaactggggcatccgtcccaaagcgatgcgctttagactctttaacatccaggttaaagaggtcacggtccaagacttcaacaccaccatcggcaacaacctcaccagtacggtccaggtctttgcggacaaggactaccaactgccgtacgtcctcggatcggctaccgaaggcaccttcccgccgttcccagcggatatctacacgatcccgcagtacgggtactgcacgctaaactacaacaacgaggcggtggatcgttcggccttctactgtctggactactttccctcagacatgctgcggacaggaaataactttgagtttacttacaccttcgaggacgttcctttccatagcatgtttgcccacaaccagacgctagaccggctgatgaatcccctcgtggatcagtacctctgggctttcagctccgtcagccaagcaggctcatctggacgagctcttcattactcgcgggcgactaaaaccaacatggcggctcaatataggaactggttacctgggcctttcttccgtgatcagcaaatctttacgggcgctagcaacatcactaaaaataacgtctttagcgtttgggaaaaaggcaagcaatgggaactcgacaatcggaccaacctaatgcagcccggtcctgcggcagcgaccacctttagcggagaacctgaccgtcaagccatgcaaaacacgctggcttttagcaggaccgtctacgatcaaacgaccgccacgaccgatcgtaaccagatactcatcaccaacgaagacgaaatcagacccaccaactcggtcggtatcgacgcgtggggagcagttcccaccaacaaccagtcgatcgtgacccccggcactcgcgcggccgtcaacaatcaaggggcgcttcccgggatggtgtggcaaaacagagacatttaccctacagggacccatttggccaaaattcccgacactgacaatcacttccatccgtccccgcttattgggcggtttggctgcaagcatccccctccccagattttcattaaaaacacacccgtccctgccaacccttcggaaacgttccagacggccaaagtggcctccttcatcaaccagtactcgaccggacagtgcaccgtcgaaatcttttgggaactcaagaaggaaacctccaagcgctggaaccccgaaatccagttcacctccaactttggcaacgcggccgacatccagtttgccgtctccgacacgggatcctattccgaacctcgtcccatcggtacccgttaccttaccaaacctctgtaa

SEQ ID NO: 5183 - protein, 535 aa, Artificial Sequence
  Description of Artificial Sequence: Synthetic polypeptide
MAEGGGGPVGDAGQGADGVGNSSGNWHCDSQWLENGVVTRTTRTWVLPSYNNHLYKRIQGPSGGDNNNKFFGFSTPWGYFDYNRFHCHFSPRDWQRLINNNWGIRPKAMRFRLFNIQVKEVTVQDFNTTIGNNLTSTVQVFADKDYQLPYVLGSATEGTFPPFPADIYTIPQYGYCTLNYNNEAVDRSAFYCLDYFPSDMLRTGNNFEFTYTFEDVPFHSMFAHNQTLDRLMNPLVDQYLWAFSSVSQAGSSGRALHYSRATKTNMAAQYRNWLPGPFFRDQQIFTGASNITKNNVFSVWEKGKQWELDNRTNLMQPGPAAATTFSGEPDRQAMQNTLAFSRTVYDQTTATTDRNQILITNEDEIRPTNSVGIDAWGAVPTNNQSIVTPGTRAAVNNQGALPGMVWQNRDIYPTGTHLAKIPDTDNHFHPSPLIGRFGCKHPPPQIFIKNTPVPANPSETFQTAKVASFINQYSTGQCTVEIFWELKKETSKRWNPEIQFTSNFGNAADIQFAVSDTGSYSEPRPIGTRYLTKPL

SEQ ID NO: 5184 - protein, 440 aa, Artificial Sequence
  Description of Artificial Sequence: Synthetic polypeptide
MELVDWLVEKGITTEKEWLLENRESFRSFQASSNSARQIKTALQGAIQEMLLTKTAEDYLVGKDPVSDDDIRQNRIYKILELNHYDPAYVGSILVGWCQKKWGKRNTLWLFGHATTGKTNIAEAIAHAVPFYGCVNWTNENFPFNDCVEKMIIWWEEGKMTAKVVETAKAILGGSRVRVDQKCKASVPIEPTPVIITSNTNMCYVIDGNTTTFEHKQPLEDRMFKLELLTRLPDDFGKVTKQEVRQFFRWSQDHLTPVIPEFLVRKAESRKRPAPSGEGYISPTKRPALAEQQQASESADPVPTRYRIKCSKHCGMDKMLFPCQICESMNRDINICAIHKTTDCKECFPDYGDKDDVELPPCTEHNVSRCYQCHSGELYRVTSDSDEKPAPESDEGTEPSYAPCTIHHLMGKSHGLVTCAACRLKNSTLHDDLDDGDLEQ

SEQ ID NO: 5185 - protein, 319 aa, Artificial Sequence
  Description of Artificial Sequence: Synthetic polypeptide
MELVDWLVEKGITTEKEWLLENRESFRSFQASSNSARQIKTALQGAIQEMLLTKTAEDYLVGKDPVSDDDIRQNRIYKILELNHYDPAYVGSILVGWCQKKWGKRNTLWLFGHATTGKTNIAEAIAHAVPFYGCVNWTNENFPFNDCVEKMIIWWEEGKMTAKVVETAKAILGGSRVRVDQKCKASVPIEPTPVIITSNTNMCYVIDGNTTTFEHKQPLEDRMFKLELLTRLPDDFGKVTKQEVRQFFRWSQDHLTPVIPEFLVRKAESRKRPAPSGEGYISPTKRPALAEQQQASESADPVPTRLVGAVGQKGSECCS

SEQ ID NO: 5186 - protein, 662 aa, Artificial Sequence
  Description of Artificial Sequence: Synthetic polypeptide
MRSYYEVIVQLPNDVESQVPGISDSFVNWITSREWTLPEDADWDLDQVDQVQLTLGDKIQREIRTHWGTMAKEPDFHYFIQLEQGEVFFHLHVLLETCSVKPMVLGRYIRHIQQKIVSKVYCATSLRWKDGCVVTKTKNFGGANKVRAESYIPAYLIPKQQPEVQWAWTNVPEYIKACLHRELRASLARLHFEEAGVSQSKENLARTADGAPVMPTRVSKRYMELVDWLVEKGITTEKEWLLENRESFRSFQASSNSARQIKTALQGAIQEMLLTKTAEDYLVGKDPVSDDDIRQNRIYKILELNHYDPAYVGSILVGWCQKKWGKRNTLWLFGHATTGKTNIAEAIAHAVPFYGCVNWTNENFPFNDCVEKMIIWWEEGKMTAKVVETAKAILGGSRVRVDQKCKASVPIEPTPVIITSNTNMCYVIDGNTTTFEHKQPLEDRMFKLELLTRLPDDFGKVTKQEVRQFFRWSQDHLTPVIPEFLVRKAESRKRPAPSGEGYISPTKRPALAEQQQASESADPVPTRYRIKCSKHCGMDKMLFPCQICESMNRDINICAIHKTTDCKECFPDYGDKDDVELPPCTEHNVSRCYQCHSGELYRVTSDSDEKPAPESDEGTEPSYAPCTIHHLMGKSHGLVTCAACRLKNSTLHDDLDDGDLEQ

SEQ ID NO: 5187 - protein, 541 aa, Artificial Sequence
  Description of Artificial Sequence: Synthetic polypeptide
MRSYYEVIVQLPNDVESQVPGISDSFVNWITSREWTLPEDADWDLDQVDQVQLTLGDKIQREIRTHWGTMAKEPDFHYFIQLEQGEVFFHLHVLLETCSVKPMVLGRYIRHIQQKIVSKVYCATSLRWKDGCVVTKTKNFGGANKVRAESYIPAYLIPKQQPEVQWAWTNVPEYIKACLHRELRASLARLHFEEAGVSQSKENLARTADGAPVMPTRVSKRYMELVDWLVEKGITTEKEWLLENRESFRSFQASSNSARQIKTALQGAIQEMLLTKTAEDYLVGKDPVSDDDIRQNRIYKILELNHYDPAYVGSILVGWCQKKWGKRNTLWLFGHATTGKTNIAEAIAHAVPFYGCVNWTNENFPFNDCVEKMIIWWEEGKMTAKVVETAKAILGGSRVRVDQKCKASVPIEPTPVIITSNTNMCYVIDGNTTTFEHKQPLEDRMFKLELLTRLPDDFGKVTKQEVRQFFRWSQDHLTPVIPEFLVRKAESRKRPAPSGEGYISPTKRPALAEQQQASESADPVPTRLVGAVGQKGSECCS

SEQ ID NO: 5188 - protein, 743 aa, Artificial Sequence
  Description of Artificial Sequence: Synthetic polypeptide
MSLISDAIPDWLERLVKKGVNAAADFYHLESGPPRPKANQQTQESLEKDDSRGLVFPGYNYLGPFNGLDKGEPVNEADAAALEHDKAYDLEIKDGHNPYFEYNEADRRFQERLKDDTSFGGNLGKAIFQAKKRVLEPFGLVEDSKTAPTGDKRKGEDEPRLPDTSSQTPKKNKKPRKERPSGGAEDPGEGTSSNAGAAAPASSVGSSIMAEGGGGPVGDAGQGADGVGNSSGNWHCDSQWLENGVVTRTTRTWVLPSYNNHLYKRIQGPSGGDNNNKFFGFSTPWGYFDYNRFHCHFSPRDWQRLINNNWGIRPKAMRFRLFNIQVKEVTVQDFNTTIGNNLTSTVQVFADKDYQLPYVLGSATEGTFPPFPADIYTIPQYGYCTLNYNNEAVDRSAFYCLDYFPSDMLRTGNNFEFTYTFEDVPFHSMFAHNQTLDRLMNPLVDQYLWAFSSVSQAGSSGRALHYSRATKTNMAAQYRNWLPGPFFRDQQIFTGASNITKNNVFSVWEKGKQWELDNRTNLMQPGPAAATTFSGEPDRQAMQNTLAFSRTVYDQTTATTDRNQILITNEDEIRPTNSVGIDAWGAVPTNNQSIVTPGTRAAVNNQGALPGMVWQNRDIYPTGTHLAKIPDTDNHFHPSPLIGRFGCKHPPPQIFIKNTPVPANPSETFQTAKVASFINQYSTGQCTVEIFWELKKETSKRWNPEIQFTSNFGNAADIQFAVSDTGSYSEPRPIGTRYLTKPL

SEQ ID NO: 5189 - protein, 598 aa, Artificial Sequence
  Description of Artificial Sequence: Synthetic polypeptide
TAPTGDKRKGEDEPRLPDTSSQTPKKNKKPRKERPSGGAEDPGEGTSSNAGAAAPASSVGSSIMAEGGGGPVGDAGQGADGVGNSSGNWHCDSQWLENGVVTRTTRTWVLPSYNNHLYKRIQGPSGGDNNNKFFGFSTPWGYFDYNRFHCHFSPRDWQRLINNNWGIRPKAMRFRLFNIQVKEVTVQDFNTTIGNNLTSTVQVFADKDYQLPYVLGSATEGTFPPFPADIYTIPQYGYCTLNYNNEAVDRSAFYCLDYFPSDMLRTGNNFEFTYTFEDVPFHSMFAHNQTLDRLMNPLVDQYLWAFSSVSQAGSSGRALHYSRATKTNMAAQYRNWLPGPFFRDQQIFTGASNITKNNVFSVWEKGKQWELDNRTNLMQPGPAAATTFSGEPDRQAMQNTLAFSRTVYDQTTATTDRNQILITNEDEIRPTNSVGIDAWGAVPTNNQSIVTPGTRAAVNNQGALPGMVWQNRDIYPTGTHLAKIPDTDNHFHPSPLIGRFGCKHPPPQIFIKNTPVPANPSETFQTAKVASFINQYSTGQCTVEIFWELKKETSKRWNPEIQFTSNFGNAADIQFAVSDTGSYSEPRPIGTRYLTKPL

SEQ ID NO: 5190 - DNA, 4694 bp, Artificial Sequence
  Description of Artificial Sequence: Synthetic polynucleotide
tggccagtttccaagacaggctcgctcgctcactcgggccggggccccaaaggggcccctagcgaccgcttcgcggtcgcggcccgagtgagcgagcgagcctgtcttggaaactggccagcactccggtgaggtaatgccgtcacgtggtcgggaatgggaacgggaaatctcgcgagaacgtaaacaaatataagacggcgccacacggcgctgcgtcatacgcgcgcgcgcaccggcgagatgaggtcgtactacgaggtcatcgttcagctgcccaacgacgtcgagagtcaggtacctggaatctccgattcgttcgtcaactggattacgtcgcgagaatggacgttgcctgaggacgccgattgggatttggaccaggtcgatcaagttcaactgacgctcggcgacaaaatccaacgggagattcgaactcattgggggacgatggccaaagaaccggactttcactattttatccaactggaacaaggtgaggtgttctttcatttacacgtcctgctggaaacgtgttccgtaaagccgatggtactcggaagatatatccgacatattcaacaaaaaattgtgagtaaagtctactgcgccacgagcctacgatggaaggatggatgcgtggtgaccaagaccaaaaatttcgggggcgcgaacaaggtccgggccgagtcgtatattcccgcctacctgatcccgaaacagcaaccggaagtgcagtgggcgtggactaacgtgcccgagtatataaaagcgtgcttgcaccgagaactgcgtgccagtctcgcgcgacttcacttcgaggaggcgggcgtctcgcaatccaaggaaaatctcgcgagaactgcagacggcgctcccgtgatgccgacccgcgtcagcaaacgctacatggagctcgtggattggctcgtggagaaggggatcaccaccgagaaggaatggctgctggaaaacagagaaagctttcggagctttcaggcctcgagcaactcggcgcgtcagatcaagacggccctgcaaggcgccattcaggagatgcttctgaccaagacggcggaggactacctcgtcggaaaggatcccgtctcggacgacgacatccgtcagaaccgcatctacaagattctggaactgaaccactacgacccagcgtacgtggggagtattttggtcgggtggtgccagaagaaatggggcaagcgaaacacgctgtggctgttcggacatgcgaccaccggcaagaccaacatcgcggaggctattgcccatgctgtgccgttctatggatgcgttaactggaccaacgagaactttccgttcaacgactgcgtcgaaaaaatgattatctggtgggaggagggcaaaatgaccgccaaagtggtggaaacagccaaggcgattctgggaggatctcgggtgagagtggaccaaaaatgcaaagcttcggttccgatcgaaccgacgccggtcattattaccagtaacaccaacatgtgttatgtcatcgacgggaacacgaccacgttcgagcataagcagccgttggaggacaggatgtttaagctcgaattgctgactcggttgcctgatgactttggtaaggtgaccaaacaggaggtgcgtcaattcttcaggtggtctcaggatcacctgacccctgtgatcccagaattcctagtgcggaaggcggagtctcgcaaaagacccgccccttccggggaaggctatataagcccgacaaagcggcccgcgctcgcagagcagcagcaggcgtcggagagcgcggacccggttcccaccaggtatcgtatcaaatgctcgaaacattgcggtatggataaaatgttgtttccttgccaaatttgtgaatcgatgaacagagatattaatatttgtgctattcataaaacgaccgactgtaaagagtgtttccccgactacggggataaagatgatgtagaactacccccctgtacagaacacaacgtgtctcgttgttatcaatgtcattcgggcgaattgtatcgcgtgacttcggactctgacgagaaacctgcccccgagagtgatgaaggcaccgagccatcctatgctccctgcacgattcaccacctgatgggcaagagtcacgggttagtcacttgcgcggcgtgtcggttgaaaaatagtacgttgcatgatgacttggatgacggtgatctcgaacaataaatgattgaaatgtagccatgtctctcatttctgatgcgattccagattggttggagcggttggtcaaaaagggagtgaatgctgcagctgatttctaccatttggaaagcggtcctcctcgtcctaaggcaaatcagcaaactcaagaatctcttgaaaaggacgattcgagaggtctcgtgttcccaggctacaattatctaggccctttcaacggtctagataaaggagaacccgtcaacgaggcagacgctgccgccttagaacacgacaaggcttacgacctcgaaatcaaggacgggcacaacccgtactttgagtacaacgaggccgacagacgtttccaggaacgtctcaaagacgatacctcctttggaggcaatttaggtaaagccatcttccaggccaaaaagagggttctcgaaccctttggtctggtggaagactcaaagacggctccgaccggagacaagcggaaaggcgaagacgaacctcgtttgcccgacacttcttcacagactcccaagaaaaacaagaagcctcgcaaggaaagaccttccggcggggcagaagatccgggcgaaggcacctcttccaacgctggagcagcagcacccgcctctagtgtgggatcatctatcatggctgaaggaggtggcggcccagtgggcgatgcaggccagggtgccgatggagtgggcaattcctccggaaattggcattgcgattcccaatggctggaaaacggagtcgtcactcgaaccacccgaacctgggtcttgcccagctacaacaaccacctgtacaaacgaatccaaggacccagcggaggcgacaacaacaacaaattctttggattcagcaccccctggggatactttgactacaatcgattccactgccacttttccccgcgagactggcaacgactcatcaacaacaactggggcatccgtcccaaagcgatgcgctttagactctttaacatccaggttaaagaggtcacggtccaagacttcaacaccaccatcggcaacaacctcaccagtacggtccaggtctttgcggacaaggactaccaactgccgtacgtcctcggatcggctaccgaaggcaccttcccgccgttcccagcggatatctacacgatcccgcagtacgggtactgcacgctaaactacaacaacgaggcggtggatcgttcggccttctactgtctggactactttccctcagacatgctgcggacaggaaataactttgagtttacttacaccttcgaggacgttcctttccatagcatgtttgcccacaaccagacgctagaccggctgatgaatcccctcgtggatcagtacctctgggctttcagctccgtcagccaagcaggctcatctggacgagctcttcattactcgcgggcgactaaaaccaacatggcggctcaatataggaactggttacctgggcctttcttccgtgatcagcaaatctttacgggcgctagcaacatcactaaaaataacgtctttagcgtttgggaaaaaggcaagcaatgggaactcgacaatcggaccaacctaatgcagcccggtcctgcggcagcgaccacctttagcggagaacctgaccgtcaagccatgcaaaacacgctggcttttagcaggaccgtctacgatcaaacgaccgccacgaccgatcgtaaccagatactcatcaccaacgaagacgaaatcagacccaccaactcggtcggtatcgacgcgtggggagcagttcccaccaacaaccagtcgatcgtgacccccggcactcgcgcggccgtcaacaatcaaggggcgcttcccgggatggtgtggcaaaacagagacatttaccctacagggacccatttggccaaaattcccgacactgacaatcacttccatccgtccccgcttattgggcggtttggctgcaagcatccccctccccagattttcattaaaaacacacccgtccctgccaacccttcggaaacgttccagacggccaaagtggcctccttcatcaaccagtactcgaccggacagtgcaccgtcgaaatcttttgggaactcaagaaggaaacctccaagcgctggaaccccgaaatccagttcacctccaactttggcaacgcggccgacatccagtttgccgtctccgacacgggatcctattccgaacctcgtcccatcggtacccgttaccttaccaaacctctgtaaattaaacccttcaataaaccgtttatgcgtaactgtatttccgtctcctgtcgttattcagtcacatgatgcggcattacctcaccggagtgctggccagtttccaagacaggctcgctcgctcactcgggccggggccccaaaggggcccctagcgaccgcttcgcggtcgcggcccgagtgagcgagcgagcctgtcttggaaactggcca

SEQ ID NO: 5191 - DNA, 2211 bp, Artificial Sequence
  Description of Artificial Sequence: Synthetic polynucleotide
atggctgctgatggttatcttccagattggctcgaggacactctctctgaaggaataagacagtggtggaagctcaaacctggcccaccaccaccaaagcccgcagagcggcataaggacgacagcaggggtcttgtgcttcctgggtacaagtacctcggacccttcaacggactcgacaagggagagccggtcaacgaggcagacgcagcggccctcgagcacgacaaggcctacgaccagcagctcaaggccggtgacaacccctacctcaagtacaaccacgccgacgcggagttccagcagcggcttcagggcgacacatcgtttgggggcaacctcggcagagcagtcttccaggccaaaaagagggttcttgaacctcttggtctggttgagcaagcgggtgagacggctcctggaaagaagagaccgttgattgaatccccccagcagcccgactcctccacgggtatcggcaaaaaaggcaagcagccggctaaaaagagactcaattttggtcagactggcgactcagagtcagtccccgacccacaacctctcggagaacctccagcaacccccgctgctgtgggacctactacaatggcttcaggtggtggcgcaccaatggcagacaataacgaaggcgccgacggagtgggtaatgcctcaggaaattggcattgcgattccacatggctgggcgacagagtcatcaccaccagcacccgcacctgggccttgcccacctacaataaccacctctacaagcaaatctccagtgcttcaacgggggccagcaacgacaaccactacttcggctacagcaccccctgggggtattttgacttcaacagattccactgccacttttcaccacgtgactggcagcgactcatcaacaacaattggggattccggcccaagagactcaacttcaaactcttcaacatccaagtcaaggaggtcacgacgaatgatggcgtcacaaccatcgctaataaccttaccagcacggttcaagtcttctcggactcagactatcagctcccgtacgtgctcgggtcggctcacgagggctgcctcccgccgttcccagcagacgtcttcatggtgccacagtatggatacctcaccctgaacaacgggagtcaggcagtaggacgctcttcattttactgcctggagtactttccttctcagatgctgcgtaccggaaacaactttaccttcagctacacttttgaggacgttcctttccacagcagctacgctcacagccagagtctggaccgtctcatgaatcctctcatcgaccagtacctgtattacctgaacagaactcagaatcagtccggaagtgcccaaaacaaggacttgctgtttagccgggggtctccagctggcatgtctgttcagcccaaaaactggctacctggaccctgttatcggcagcagcgcgtttctaaaacaaaaacagacaacaacaacagcaactttacctggactggtgcttcaaaatataaccttaatgggcgtgaatctataatcaaccctggcactgctatggcctcacacaaagacgacaaagacaagttctttcccatgagcggtgtcatgatttttggaaaggagagcgccggagcttcaaacactgcattggacaatgtcatgatcacagacgaagaggaaatcaaagccactaaccccgtggccaccgaaagatttgggactgtggcagtcaatctccagagcagcagcacagaccctgcgaccggagatgtgcatgttatgggagccttacctggaatggtgtggcaagacagagacgtatacctgcagggtcccatttgggccaaaattcctcacacagatggacactttcacccgtctcctcttatgggcggctttggactcaagaacccgcctcctcagatcctcatcaaaaacacgcctgttcctgcgaatcctccggcggagttttcagctacaaagtttgcttcattcatcacccaatactccacaggacaagtgagtgtggaaattgaatgggagctgcagaaagaaaacagcaagcgctggaatcccgaagtgcagtacacatccaattatgcaaaatctgccaacgttgattttactgtggacaacaatggactttatactgagcctcgccccattggcacccgttacctcacccgtcccctgtaa

SEQ ID NO: 5192 - protein, 736 aa, Artificial Sequence
  Description of Artificial Sequence: Synthetic polypeptide
MAADGYLPDWLEDTLSEGIRQWWKLKPGPPPPKPAERHKDDSRGLVLPGYKYLGPFNGLDKGEPVNEADAAALEHDKAYDQQLKAGDNPYLKYNHADAEFQQRLQGDTSFGGNLGRAVFQAKKRVLEPLGLVEQAGETAPGKKRPLIESPQQPDSSTGIGKKGKQPAKKRLNFGQTGDSESVPDPQPLGEPPATPAAVGPTTMASGGGAPMADNNEGADGVGNASGNWHCDSTWLGDRVITTSTRTWALPTYNNHLYKQISSASTGASNDNHYFGYSTPWGYFDFNRFHCHFSPRDWQRLINNNWGFRPKRLNFKLFNIQVKEVTTNDGVTTIANNLTSTVQVFSDSDYQLPYVLGSAHEGCLPPFPADVFMVPQYGYLTLNNGSQAVGRSSFYCLEYFPSQMLRTGNNFTFSYTFEDVPFHSSYAHSQSLDRLMNPLIDQYLYYLNRTQNQSGSAQNKDLLFSRGSPAGMSVQPKNWLPGPCYRQQRVSKTKTDNNNSNFTWTGASKYNLNGRESIINPGTAMASHKDDKDKFFPMSGVMIFGKESAGASNTALDNVMITDEEEIKATNPVATERFGTVAVNLQSSSTDPATGDVHVMGALPGMVWQDRDVYLQGPIWAKIPHTDGHFHPSPLMGGFGLKNPPPQILIKNTPVPANPPAEFSATKFASFITQYSTGQVSVEIEWELQKENSKRWNPEVQYTSNYAKSANVDFTVDNNGLYTEPRPIGTRYLTRPL

SEQ ID NO: 5193 - DNA, 2211 bp, Artificial Sequence
  Description of Artificial Sequence: Synthetic polynucleotide
atggcttccgatggttatcttccagattggctcgaggacaacctctctgagggcatccgcgagtggtgggacttgaaacctggagccccgaaacccaaagccaaccagcaaaagcaggacgacggccggggtctggtgcttcctggctacaagtacctcggacccttcaacggactcgacaagggggagcccgtcaacgcggcggatgcagcggccctcgagcacgacaaggcctacgaccagcagctcagagcgggtgacaatccgtacctgcggtataaccacgccgacgccgagtttcaggagcgtctgcaagaagatacgtcttttgggggcaacctcgggcgagcagtcttccaggccaagaagagggttctcgaaccttttggtctggttgaggaaggtgctaagacggctcctggaaagaaacgtccggtagagcagtcgccacaagagccagactcctcctcgggcattggcaagacaggccagcagcccgctaaaaagagactcaattttggtcagactggcgactcagagtcagtccccgacccacaacctctcggagaacctccagcaacccccgctgctgtgggacctactacaatggcttcaggcggtggcgcaccaatggcagacaataacgaaggcgccgacggagtgggtaatgcctcaggaaattggcattgcgattccacatggctgggcgacagagtcatcaccaccagcacccgaacatgggccttgcccacctataacaaccacctctacaagcaaatctccagtgcttcaacgggggccagcaacgacaaccactacttcggctacagcaccccctgggggtattttgatttcaacagattccactgccatttctcaccacgtgactggcagcgactcatcaacaacaattggggattccggcccaagagactcaacttcaaactcttcaacatccaagtcaaggaggtcacgacgaatgatggcgtcacaaccatcgctaataaccttaccagcacggttcaagtcttctcggactcggagtaccagcttccgtacgtcctcggctctgcgcaccagggctgcctccctccgttcccggcggacgtgttcatgattccgcagtacggctacctaacgctcaacaatggcagccaggcagtgggacggtcatccttttactgcctggaatatttcccatcgcagatgctgagaacgggcaataactttaccttcagctacaccttcgaggacgtgcctttccacagcagctacgcgcacagccagagcctggaccggctgatgaatcctctcatcgaccagtacctgtattacctgaacagaactcagaatcagtccggaagtgcccaaaacaaggacttgctgtttagccgggggtctccagctggcatgtctgttcagcccaaaaactggctacctggaccctgttaccggcagcagcgcgtttctaaaacaaaaacagacaacaacaacagcaactttacctggactggtgcttcaaaatataaccttaatgggcgtgaatctataatcaaccctggcactgctatggcctcacacaaagacgacaaagacaagttctttcccatgagcggtgtcatgatttttggaaaggagagcgccggagcttcaaacactgcattggacaatgtcatgatcacagacgaagaggaaatcaaagccactaaccccgtggccaccgaaagatttgggactgtggcagtcaatctccagagcagcagcacagaccctgcgaccggagatgtgcatgttatgggagccttacctggaatggtgtggcaagacagagacgtatacctgcagggtcccatttgggccaaaattcctcacacagatggacactttcacccgtctcctcttatgggcggctttggacttaagcacccgcctcctcagatcctcatcaaaaacacgcctgttcctgcgaatcctccggcagagttttcggctacaaagtttgcttcattcatcacccagtattctactggccaagtcagcgtggagattgaatgggagctgcagaaagaaaacagcaaacgctggaatcccgaagtgcagtatacatctaactatgcaaaatctgccaacgttgatttcactgtggacaacaatggactttatactgagcctcgtcccattggcacccgttacctcacccgtcccctgtaa

SEQ ID NO: 5194 - protein, 736 aa, Artificial Sequence
  Description of Artificial Sequence: Synthetic polypeptide
MASDGYLPDWLEDNLSEGIREWWDLKPGAPKPKANQQKQDDGRGLVLPGYKYLGPFNGLDKGEPVNAADAAALEHDKAYDQQLRAGDNPYLRYNHADAEFQERLQEDTSFGGNLGRAVFQAKKRVLEPFGLVEEGAKTAPGKKRPVEQSPQEPDSSSGIGKTGQQPAKKRLNFGQTGDSESVPDPQPLGEPPATPAAVGPTTMASGGGAPMADNNEGADGVGNASGNWHCDSTWLGDRVITTSTRTWALPTYNNHLYKQISSASTGASNDNHYFGYSTPWGYFDFNRFHCHFSPRDWQRLINNNWGFRPKRLNFKLFNIQVKEVTTNDGVTTIANNLTSTVQVFSDSEYQLPYVLGSAHQGCLPPFPADVFMIPQYGYLTLNNGSQAVGRSSFYCLEYFPSQMLRTGNNFTFSYTFEDVPFHSSYAHSQSLDRLMNPLIDQYLYYLNRTQNQSGSAQNKDLLFSRGSPAGMSVQPKNWLPGPCYRQQRVSKTKTDNNNSNFTWTGASKYNLNGRESIINPGTAMASHKDDKDKFFPMSGVMIFGKESAGASNTALDNVMITDEEEIKATNPVATERFGTVAVNLQSSSTDPATGDVHVMGALPGMVWQDRDVYLQGPIWAKIPHTDGHFHPSPLMGGFGLKHPPPQILIKNTPVPANPPAEFSATKFASFITQYSTGQVSVEIEWELQKENSKRWNPEVQYTSNYAKSANVDFTVDNNGLYTEPRPIGTRYLTRPL

SEQ ID NO: 5195 - DNA, 2211 bp, Artificial Sequence
  Description of Artificial Sequence: Synthetic polynucleotide
atggctgctgatggttatcttccagattggctcgaggacactctctctgaaggaataagacagtggtggaagctcaaacctggcccaccaccaccaaagcccgcagagcggcataaggacgacagcaggggtcttgtgcttcctgggtacaagtacctcggacccttcaacggactcgacaagggagagccggtcaacgaggcagacgcagcggccctcgagcacgacaaggcctacgaccagcagctcaaggccggtgacaacccctacctcaagtacaaccacgccgacgcggagttccagcagcggcttcagggcgacacatcgtttgggggcaacctcggcagagcagtcttccaggccaaaaagagggttcttgaacctcttggtctggttgagcaagcgggtgagacggctcctggaaagaagagaccgttgattgaatccccccagcagcccgactcctccacgggtatcggcaaaaaaggcaagcagccggctaaaaagagactcaattttggtcagactggcgactcagagtcagtccccgacccacaacctctcggagaacctccagcaacccccgctgctgtgggacctactacaatggcttcaggtggtggcgcaccaatggcagacaataacgaaggcgccgacggagtgggtaatgcctcaggaaattggcattgcgattccacatggctgggcgacagagtcatcaccaccagcacccgcacctgggccttgcccacctacaataaccacctctacaagcaaatctccagtgcttcaacgggggccagcaacgacaaccactacttcggctacagcaccccctgggggtattttgacttcaacagattccactgccacttttcaccacgtgactggcagcgactcatcaacaacaattggggattccggcccaagagactcaacttcaaactcttcaacatccaagtcaaggaggtcacgacgaatgatggcgtcacaaccatcgctaataaccttaccagcacggttcaagtcttctcggactcagactatcagctcccgtacgtgctcgggtcggctcacgagggctgcctcccgccgttcccagcagacgtcttcatggtgccacagtatggatacctcaccctgaacaacgggagtcaggcagtaggacgctcttcattttactgcctggagtactttccttctcagatgctgcgtaccggaaacaactttaccttcagctacacttttgaggacgttcctttccacagcagctacgctcacagccagagtctggaccgtctcatgaatcctctcatcgaccagtacctgtattacctgaacagaactcagaatcagtccggaagtgcccaaaacaaggacttgctgtttagccgggggtctccaactggcatgtctgttcagcccaaaaactggctacctggaccctgttatcggcagcagcgcgtttctaaaacaaaaacagacaacaacaacagcaactttacctggactggtgcttcaaaatataaccttaatgggcgtgaatctataatcaaccctggcactgctatggcctcacacaaagacgacaaagacaagttctttcccatgagcggtgtcatgatttttggaaaggagagcgccggagcttcaaacactgcattggacaatgtcatgatcacagacgaagaggaaatcaaagccactaaccccgtggccactgaaagatttgggactgtggcagtcaatctccagagcagcagcacagaccctgcgaccggagatgtgcatgccatgggagccttacctggaatggtgtggcaagacagagacgtatacctgcagggtcctatttgggccaaaattcctcacacggatggacactttcacccgtctcctctcatgggcggctttggactcaagaacccgcctcctcagatcctcatcaaaaacacgcctgttcctgcgaatcctccggcggagttttcagctacaaagtttgcttcattcatcacccagtattccacaggacaagtgagcgtggagattgaatgggagctgcagaaagaaaacagcaaacgctggaatcccgaagtgcagtatacatctaactatgcaaaatctgccaacgttgatttcactgtggacaacaatggactttatactgagcctcgccccattggcacccgttacctcacccgtcccctgtaa

SEQ ID NO: 5196 - protein, 736 aa, Artificial Sequence
  Description of Artificial Sequence: Synthetic polypeptide
MAADGYLPDWLEDTLSEGIRQWWKLKPGPPPPKPAERHKDDSRGLVLPGYKYLGPFNGLDKGEPVNEADAAALEHDKAYDQQLKAGDNPYLKYNHADAEFQQRLQGDTSFGGNLGRAVFQAKKRVLEPLGLVEQAGETAPGKKRPLIESPQQPDSSTGIGKKGKQPAKKRLNFGQTGDSESVPDPQPLGEPPATPAAVGPTTMASGGGAPMADNNEGADGVGNASGNWHCDSTWLGDRVITTSTRTWALPTYNNHLYKQISSASTGASNDNHYFGYSTPWGYFDFNRFHCHFSPRDWQRLINNNWGFRPKRLNFKLFNIQVKEVTTNDGVTTIANNLTSTVQVFSDSDYQLPYVLGSAHEGCLPPFPADVFMVPQYGYLTLNNGSQAVGRSSFYCLEYFPSQMLRTGNNFTFSYTFEDVPFHSSYAHSQSLDRLMNPLIDQYLYYLNRTQNQSGSAQNKDLLFSRGSPTGMSVQPKNWLPGPCYRQQRVSKTKTDNNNSNFTWTGASKYNLNGRESIINPGTAMASHKDDKDKFFPMSGVMIFGKESAGASNTALDNVMITDEEEIKATNPVATERFGTVAVNLQSSSTDPATGDVHAMGALPGMVWQDRDVYLQGPIWAKIPHTDGHFHPSPLMGGFGLKNPPPQILIKNTPVPANPPAEFSATKFASFITQYSTGQVSVEIEWELQKENSKRWNPEVQYTSNYAKSANVDFTVDNNGLYTEPRPIGTRYLTRPL

SEQ ID NO: 5197 - DNA, 2211 bp, Artificial Sequence
  Description of Artificial Sequence: Synthetic polynucleotide
atggctgccgatggttatcttccagattggctcgaggacaacctctctgagggcattcgcgagtggtgggcgctgaaacctggagccccgaagcccaaagccaaccagcaaaagcaggacgacggccggggtctggtgcttcctggctacaagtacctcggacccttcaacggactcgacaagggggagcccgtcaacgcggcggatgcagcggccctcgagcacgacaaggcctacgaccagcagctcaaagcgggtgacaatccgtacctgcggtataaccacgccgacgccgagtttcaggagcgtctgcaagaagatacgtcttttgggggcaacctcgggcgagcagtcttccaggccaagaagcgggttctcgaacctctcggtctggttgaggaaggcgctaagacggctcctggaaagaaacgtccggtagagcaatcgccacaagagccagactcctcctcgggcatcggcaagacaggccagcagcccgctaaaaagagactcaattttggtcagactggcgactcagagtcagtccccgacccacaacctctcggagaacctccagcaacccccgctgctgtgggacctactacaatggcttcaggcggtggcgcaccaatggcagacaataacgaaggcgccgacggagtgggtaatgcctcaggaaattggcattgcgattccacatggctgggcgacagagtcatcaccaccagcacccgaacatgggccttgcccacctataacaaccacctctacaagcaaatctccagtgcttcgacgggggccagcaacgacaaccactacttcggctacagcaccccctgggggtattttgactttaacagattccactgccacttttcaccacgtgactggcagcgactcatcaacaacaactggggattccggcccaagagactcagcttcaagctcttcaacatccaggtcaaggaggtcacgacgaatgatggcgtcacaaccatcgctaataaccttaccagcacggttcaagtcttctcggactcggagtaccagcttccgtacgtcctcggctctgcgcaccagggctgcctccctccgttcccggcggacgtgttcatgattccgcaatacggctacctgacgctcaacaatggcagccaagccgtgggacgttcatccttttactgcctggaatatttcccttctcagatgctgagaacgggcaacaactttaccttcagctacacctttgaggaagtgcctttccacagcagctacgcgcacagccagagcctggaccggctgatgaatcctctcatcgatcaatacctgtattacctgaacagaactcaaaatcagtccggaagtgcccaaaacaaggacttgctgtttagccgtgggtctccagctggcatgtctgttcagcccaaaaactggctacctggaccctgttatcggcagcagcgcgtttctaaaacaaaaacagacaacaacaacagcaattttacctggactggtgcttcaaaatataacctcaatgggcgtgaatccatcatcaaccctggcactgctatggcctcacataaagacgacgaagacaagttctttcccatgagcggtgtcatgatttttggaaaagagagcgccggagcttcaaacactgcattggacaatgtcatgattacagacgaagaggaaattaaagccactaaccctgtggccaccgaaagatttgggaccgtggcagtcaatttccagagcagcagcacagaccctgcgaccggagatgtgcatgctatgggagcattacctggcatggtgtggcaagatagagacgtgtacctgcagggtcccatttgggccaaaattcctcacacagatggacactttcacccgtctcctcttatgggcggctttggactcaagaacccgcctcctcagatcctcatcaaaaacacgcctgttcctgcgaatcctccggcggagttttcagctacaaagtttgcttcattcatcacccaatactccacaggacaagtgagcgtggagattgaatgggagctgcagaaagaaaacagcaaacgctggaatcccgaagtgcagtatacatctaactatgcaaaatctgccaacattgatttcactgtggacaacaatggactttatactgagcctcgccccattggcacccgttacctcacccgtccccagtaa

SEQ ID NO: 5198 - protein, 736 aa, Artificial Sequence
  Description of Artificial Sequence: Synthetic polypeptide
MAADGYLPDWLEDNLSEGIREWWALKPGAPKPKANQQKQDDGRGLVLPGYKYLGPFNGLDKGEPVNAADAAALEHDKAYDQQLKAGDNPYLRYNHADAEFQERLQEDTSFGGNLGRAVFQAKKRVLEPLGLVEEGAKTAPGKKRPVEQSPQEPDSSSGIGKTGQQPAKKRLNFGQTGDSESVPDPQPLGEPPATPAAVGPTTMASGGGAPMADNNEGADGVGNASGNWHCDSTWLGDRVITTSTRTWALPTYNNHLYKQISSASTGASNDNHYFGYSTPWGYFDFNRFHCHFSPRDWQRLINNNWGFRPKRLSFKLFNIQVKEVTTNDGVTTIANNLTSTVQVFSDSEYQLPYVLGSAHQGCLPPFPADVFMIPQYGYLTLNNGSQAVGRSSFYCLEYFPSQMLRTGNNFTFSYTFEEVPFHSSYAHSQSLDRLMNPLIDQYLYYLNRTQNQSGSAQNKDLLFSRGSPAGMSVQPKNWLPGPCYRQQRVSKTKTDNNNSNFTWTGASKYNLNGRESIINPGTAMASHKDDEDKFFPMSGVMIFGKESAGASNTALDNVMITDEEEIKATNPVATERFGTVAVNFQSSSTDPATGDVHAMGALPGMVWQDRDVYLQGPIWAKIPHTDGHFHPSPLMGGFGLKNPPPQILIKNTPVPANPPAEFSATKFASFITQYSTGQVSVEIEWELQKENSKRWNPEVQYTSNYAKSANIDFTVDNNGLYTEPRPIGTRYLTRPQ

SEQ ID NO: 5199 - DNA, 2211 bp, Artificial Sequence
  Description of Artificial Sequence: Synthetic polynucleotide
atggctgccgatggttatcttccagattggctcgaggacaacctctctgagggcattcgcgagtggtgggacttgaaacctggagccccgaaacccaaagccaaccagcaaaagcaggacgacggccggggtctggtgcttcctggctacaagtacctcggacccttcaacggactcgacaagggggagcccgtcaacgcggcggatgcagcggccctcgagcacgacaaggcctacgaccagcagctcaaagcgggtgacaatccgtaccttcggtataaccacgccgacgccgagtttcaggagcgtctgcaagaagatacgtcttttgggggcaacctcgggcgagcagtcttccaggccaaaaagagggttctcgaacctctcggtctggttgaggaagcggctaagacggctcctggaaagaaacgtccggtagagcagtcgccacaagagccagactcctcctcgggcattggcaagacaggccagcagcccgctaaaaagagactcaattttggtcagactggcgactcagagtcagtccccgacccacaacctctcggagaacctcccgcagccccctcaggtgtgggatctcttacaatggcttcaggtggtggcgcaccaatggcagacaataacgaaggcgccgacggagtgggtaatgcctcaggaaattggcattgcgattccacatggctgggcgacagagtcatcaccaccagcacccgcacctgggccttgcccacctacaataaccacctctacaagcaaatctccagtgcttcaacgggggccagcaacgacaaccactacttcggctacagcaccccctgggggtattttgacttcaacagattccactgccacttttcaccacgtgactggcaaagactcatcaacaacaattggggattccggcccaagagactcaacttcaagctcttcaacatccaagtcaaggaggtcacgacgaatgatggcgtcacgaccatcgctaataaccttaccagcacggttcaagtcttctcggactcggagtaccagttgccgtacgtcctcggctctgcgcaccagggctgcctccctccgttcccggcggacgtgttcatgattccgcagtacggctacctaacgctcaacaatggcagccaggcagtgggacggtcatccttttactgcctggaatatttcccatcgcagatgctgagaacgggcaacaactttaccttcagctacacctttgaggaagtgcctttccacagcagctacgcgcacagccagagcctggaccggctgatgaatcctctcatcgaccagtacctgtattacctgaacagaactcaaaatcagtccggaagtgcccaaaacaaggacttgctgtttagccgtgggtctccagctggcatgtctgttcagcccaaaaactggctacctggaccctgttaccggcagcagtgcgtttctaaaacaaaaacagacaacaacaacagcaactttacctggactggtgcttcaaaatataaccttaatgggcgtgaatctataatcaaccctggcactgctatggcctcacacaaagacgacaaagacaagttctttcccatgagcggtgtcatgatttttggaaaggagagcgccggagcttcaaacactgcattggacaatgtcatgatcacagacgaagaggaaatcaaagccactaaccccgtggccaccgaaagatttgggactgtggcagtcaatctccagagcagcagcacagaccctgcgaccggagatgtgcatgttatgggagccttacctggaatggtgtggcaagacagagacgtatacctgcagggtcctatttgggccaaaattcctcacacagatggacactttcacccgtctcctcttatgggcggctttggactcaagaacccgcctcctcagatcctcatcaaaaacacgcctgttcctgcgaatcctccggcggagttttcagctacaaagtttgcttcattcatcacccaatactccacaggacaagtgagcgtggagattgaatgggagctgcagaaagaaaacagcaagcgctggaatcccgaagtgcagtacacatccaattatgcaaaatctgccaacgttgatttcactgtggacaacaatggactttatactgagcctcgccccattggcacccgttacctcacccgtcccctgtaa

SEQ ID NO: 5200 - protein, 736 aa, Artificial Sequence
  Description of Artificial Sequence: Synthetic polypeptide
MAADGYLPDWLEDNLSEGIREWWDLKPGAPKPKANQQKQDDGRGLVLPGYKYLGPFNGLDKGEPVNAADAAALEHDKAYDQQLKAGDNPYLRYNHADAEFQERLQEDTSFGGNLGRAVFQAKKRVLEPLGLVEEAAKTAPGKKRPVEQSPQEPDSSSGIGKTGQQPAKKRLNFGQTGDSESVPDPQPLGEPPAAPSGVGSLTMASGGGAPMADNNEGADGVGNASGNWHCDSTWLGDRVITTSTRTWALPTYNNHLYKQISSASTGASNDNHYFGYSTPWGYFDFNRFHCHFSPRDWQRLINNNWGFRPKRLNFKLFNIQVKEVTTNDGVTTIANNLTSTVQVFSDSEYQLPYVLGSAHQGCLPPFPADVFMIPQYGYLTLNNGSQAVGRSSFYCLEYFPSQMLRTGNNFTFSYTFEEVPFHSSYAHSQSLDRLMNPLIDQYLYYLNRTQNQSGSAQNKDLLFSRGSPAGMSVQPKNWLPGPCYRQQCVSKTKTDNNNSNFTWTGASKYNLNGRESIINPGTAMASHKDDKDKFFPMSGVMIFGKESAGASNTALDNVMITDEEEIKATNPVATERFGTVAVNLQSSSTDPATGDVHVMGALPGMVWQDRDVYLQGPIWAKIPHTDGHFHPSPLMGGFGLKNPPPQILIKNTPVPANPPAEFSATKFASFITQYSTGQVSVEIEWELQKENSKRWNPEVQYTSNYAKSANVDFTVDNNGLYTEPRPIGTRYLTRPL

SEQ ID NO: 5201 - DNA, 2211 bp, Artificial Sequence
  Description of Artificial Sequence: Synthetic polynucleotide
atggctgccgatggttatcttccagattggctcgaggacaacctctctgagggcattcgcgaatggtgggacttgaaacctggagccccgaaacccaaagtcaaccagcaaaagcaggacaacgctcggggtcttgtgcttccgggttacaaatacctcggacccttcaacggactcgacaagggggagcccgtcaacgcggcggacgcagcggccctcgagcacgacaaggcctacgaccagcagctcaaagcgggtgacaatccgtaccttcggtataaccacgccgacgccgagtttcaggagcgtctgcaagaagatacgtcttttgggggcaaccttggacgagcagtcttccaggccaagaagagggttctcgaaccttttggtctggttgaggaaggtgctaagacggctcctggaaagaaacgtccggtagagcagtcgccacaagagccagactcctcctcgggcattggcaagacaggccagcagcccgctaaaaagagactcaattttggtcagactggcgactcagagtcagtccccgacccacaacctctcggagaacctccagcaacccccgctgctgtgggacctactacaatggcttcaggcggtggcgcaccaatggcagacaataacgaaggcgccgacggagtgggtaatgcctcaggaaattggcattgcgattccacatggctgggcgacagagtcatcaccaccagcacccgcacctgggccttgcccacctacaataaccacctctacaagcaaatctccagtgcttcaacgggggccagcaacgacaaccactacttcggctacagcaccccctgggggtattttgacttcaacagattccactgccacttttcaccacgtgactggcaaagactcatcaacaacaattggggattccggcccaagagactcaacttcaagctcttcaacatccaagtcaaggaggtcacgacgaatgatggcgtcacgaccatcgctaataaccttaccagcacggttcaagtcttctcggactcggagtaccagttgccgtacgtcctcggctctgcgcaccagggctgcctccctccgttcccggcggacgtgttcatgattccgcaatacggctacctgacgctcaacaatggcagccaggcagtgggacggtcatccttttactgcctggaatatttcccatcgcagatgctgagaacgggcaataactttaccttcagctacacttttgaggacgttcctttccacagcagctacgctcacagccagagcctggaccggctgatgaatcctctcatcgaccagtacctgtattacctgaacagaactcagaatcagtccggaagtgcccaaaacaaggacttgctgtttagccgtgggtctccaactggcatgtctgttcagcccaaaaactggctacctggaccctgttatcggcagcagcgcgtttctaaaacaaaaacagacaacaacaacagcaactttacctggactggtgcttcaaaatataaccttaatgggcgtgaatctataatcaaccctggcactgctatggcctcacacaaagacgacgaagacaagttctttcccatgagcggtgtcatgatttttggaaaggagagcgccggagcttcaaacactgcattggacaatgtcatgatcacagacgaagaggaaatcaaagccactaaccccgtggccactgaaagatttgggactgtggcagtcaatctccagagcagcagcacagaccctgcgaccggagatgtgcatgccatgggagccttacctggaatggtgtggcaagacagagacgtatacctgcagggtcctatttgggccaaaattcctcacacggatggacactttcacccgtctcctctcatgggcggctttggacttaagcacccgcctcctcagatcctcatcaaaaacacgcctgttcctgcgaatcctccggcagagttttcggctacaaagtttgcttcattcatcacccagtattccacaggacaagtgagcgtggagattgaatgggagctgcagaaagaaaacagcaaacgctggaatcccgaagtgcagtatacatctaactatgcaaaatctgccaacgttgatttcactgtggacaacaatggactttatactgagcctcgccccattggcacccgttacctcacccgtcccctgtaa

SEQ ID NO: 5202 - protein, 736 aa, Artificial Sequence
  Description of Artificial Sequence: Synthetic polypeptide
MAADGYLPDWLEDNLSEGIREWWDLKPGAPKPKVNQQKQDNARGLVLPGYKYLGPFNGLDKGEPVNAADAAALEHDKAYDQQLKAGDNPYLRYNHADAEFQERLQEDTSFGGNLGRAVFQAKKRVLEPFGLVEEGAKTAPGKKRPVEQSPQEPDSSSGIGKTGQQPAKKRLNFGQTGDSESVPDPQPLGEPPATPAAVGPTTMASGGGAPMADNNEGADGVGNASGNWHCDSTWLGDRVITTSTRTWALPTYNNHLYKQISSASTGASNDNHYFGYSTPWGYFDFNRFHCHFSPRDWQRLINNNWGFRPKRLNFKLFNIQVKEVTTNDGVTTIANNLTSTVQVFSDSEYQLPYVLGSAHQGCLPPFPADVFMIPQYGYLTLNNGSQAVGRSSFYCLEYFPSQMLRTGNNFTFSYTFEDVPFHSSYAHSQSLDRLMNPLIDQYLYYLNRTQNQSGSAQNKDLLFSRGSPTGMSVQPKNWLPGPCYRQQRVSKTKTDNNNSNFTWTGASKYNLNGRESIINPGTAMASHKDDEDKFFPMSGVMIFGKESAGASNTALDNVMITDEEEIKATNPVATERFGTVAVNLQSSSTDPATGDVHAMGALPGMVWQDRDVYLQGPIWAKIPHTDGHFHPSPLMGGFGLKHPPPQILIKNTPVPANPPAEFSATKFASFITQYSTGQVSVEIEWELQKENSKRWNPEVQYTSNYAKSANVDFTVDNNGLYTEPRPIGTRYLTRPL

SEQ ID NO: 5203 - DNA, 2208 bp, Artificial Sequence
  Description of Artificial Sequence: Synthetic polynucleotide
  modified_base (955)..(955): a, c, t or g
  modified_base (971)..(972): a, c, t or g
  modified_base (981)..(981): a, c, t or g
  modified_base (986)..(986): a, c, t or g
  modified_base (1235)..(1235): a, c, t or g
  modified_base (1694)..(1696): a, c, t or g
  modified_base (1698)..(1698): a, c, t or g
  modified_base (1763)..(1765): a, c, t or g
  modified_base (1778)..(1778): a, c, t or g
  modified_base (2204)..(2204): a, c, t or g
atggctgccgatggttatcttccagattggctcgaggacaacctctctgagggcattcgcgaatggtgggacttgaaacctggagccccgaaacccaaagtcaaccagcaaaagcaggacaacgctcggggtcttgtgcttccgggttacaaatacctcggacccttcaacggactcgacaagggggagcccgtcaacgcggcggacgcagcggccctcgagcacgacaaggcctacgaccagcagctcaaagcgggtgacaatccgtaccttcggtataaccacgccgacgccgagtttcaggagcgtctgcaagaagatacgtcttttgggggcaaccttggacgagcagtcttccaggccaagaagagggttctcgaaccttttggtctggttgaggaaggtgctaagacggctcctggaaagaaacgtccggtagagcagtcgccacaagagccagactcctcctcgggcattggcaagacaggccagcagcccgctaaaaagagactcaattttggtcagactggcgactcagagtcagtccccgacccacaacctctcggagaacctccagcaacccccgctgctgtgggacctactacaatggcttcaggcggtggcgcaccaatggcagacaataacgaaggcgccgacggagtgggtaatgcctcaggaaattggcattgcgattccacatggctgggcgacagagtcatcaccaccagcacccgaacatgggccttgcccacctataacaaccacctctacaagcaaatctccagtgcttcaacgggggccagcaacgacaaccactacttcggctacagcaccccctgggggtattttgatttcaacagattccactgccacttttcaccacgtgactggcagcgactcatcaataacaattggggattccggcccaagagactcaacttcaaactcttcaacntccaagtcaaggaggnnacgacgaangatgncgtcacaaccatcgctaataaccttaccagcacggttcaagtcttctcggactcggagtaccagcttccgtacgtcctcggctctgcgcaccagggctgcctccctccgttcccggcggacgtgttcatgattccgcaatacggctacctgacgctcaacaatggcagccaggcagtgggacggtcatccttttactgcctggaatatttcccatcgcagatgctgagaacgggcaataactttacctncagctacacttttgaggacgttcctttccacagcagctacgctcacagccagagcctggaccggctgatgaatcctctcatcgaccagtacctgtattacctgaacagaactcagaatcagtccggaagtgcccaaaacaaggacttgctgtttagccgtgggtctccaactggcatgtctgttcagcccaaaaactggctacctggaccctgttatcggcagcagcgcgtttctaaaacaaaaacagacaacaacaacagcaactttacctggactggtgcttcaaaatataaccttaatgggcgtgaatctataatcaaccctggcactgctatggcctcacacaaagacgacgaagacaagttctttcccatgagcggtgtcatgatttttggaaaggagagcgccggagcttcaaacactgcattggacaatgtcatgatcacagacgaagagannncnaagccactaaccccgtggccactgaaagatttgggactgtggcagtcaatctccaagcagcacannnaccctgcgaccgnagatgtgcatgccatgggagccttacctggaatggtgtggcaagacagagacgtatacctgcagggtcctatttgggccaaaattcctcacacggatggacactttcacccgtctcctctcatgggcggctttggacttaagcacccgcctcctcagatcctcatcaaaaacacgcctgttcctgcgaatcctccggcagagttttcggctacaaagtttgcttcattcatcacccagtattccacaggacaagtgagcgtggagattgaatgggagctgcagaaagaaaacagcaaacgctggaatcccgaagtgcagtatacatctaactatgcaaaatctgccaacgttgatttcactgtggacaacaatggactttatactgagcctcgccccattggcacccgttacctcacccgtccccngtaa

SEQ ID NO: 5204 - protein, 723 aa, Artificial Sequence
  Description of Artificial Sequence: Synthetic polypeptide
MAADGYLPDWLEDNLSEGIREWWDLKPGAPKPKVNQQKQDNARGLVLPGYKYLGPFNGLDKGEPVNAADAAALEHDKAYDQQLKAGDNPYLRYNHADAEFQERLQEDTSFGGNLGRAVFQAKKRVLEPFGLVEEGAKTAPGKKRPVEQSPQEPDSSSGIGKTGQQPAKKRLNFGQTGDSESVPDPQPLGEPPATPAAVGPTTMASGGGAPMADNNEGADGVGNASGNWHCDSTWLGDRVITTSTRTWALPTYNNHLYKQISSASTGASNDNHYFGYSTPWGYFDFNRFHCHFSPRDWQRLINNNWGFRPKRLNFKLFNQVKETTDVTTIANNLTSTVQVFSDSEYQLPYVLGSAHQGCLPPFPADVFMIPQYGYLTLNNGSQAVGRSSFYCLEYFPSQMLRTGNNFTSYTFEDVPFHSSYAHSQSLDRLMNPLIDQYLYYLNRTQNQSGSAQNKDLLFSRGSPTGMSVQPKNWLPGPCYRQQRVSKTKTDNNNSNFTWTGASKYNLNGRESIINPGTAMASHKDDEDKFFPMSGVMIFGKESAGASNTALDNVMITDEEATNPVATERFGTVAVNLQSSPATDVHAMGALPGMVWQDRDVYLQGPIWAKIPHTDGHFHPSPLMGGFGLKHPPPQILIKNTPVPANPPAEFSATKFASFITQYSTGQVSVEIEWELQKENSKRWNPEVQYTSNYAKSANVDFTVDNNGLYTEPRPIGTRYLTRP

SEQ ID NO: 5205 - DNA, 2208 bp, Artificial Sequence
  Description of Artificial Sequence: Synthetic polynucleotide
atggctgccgatggttatcttccagattggctcgaggacactctctctgaaggaataagacagtggtggaagctcaaacctggcccaccaccaccaaagcccgcagagcggcataaggacgacagcaggggtcttgtgcttcctgggtacaagtacctcggacccttcaacggactcgacaagggagagccggtcaacgaggcagacgccgcggccctcgagcacgacaaagcctatgaccggcagctcgacagcggagacaacccgtacctcaagtacaaccacgccgacgcggagtttcaggagcgccttaaagaagatacgtcttttgggggcaacctcggacgagcagtcttccaggcgaaaaagagggttcttgaacctctgggcctggttgaggaacctgttaagacggctccgggaaaaaagaggccggtagagcactctcctgtggagccagactcctcctcgggaaccggaaaggcgggtcagcagcctgcaagaaaaagattgaattttggtcagactggagacgcagactcagtacctgacccccagcctctcggacagccaccagcagccccctctggtctgggaactaatacgatggctacaggcagtggcgcaccaatggcagacaataacgagggcgccgacggagtgggtaattcctcgggaaattggcattgcgattccacatggatgggcgacagagtcatcaccaccagcacccgaacctgggccctgcccacctacaacaaccacctctacaaacaaatttccagccaatcaggagcctcgaacgacaatcactactttggctacagcaccccttgggggtattttgacttcaacagattccactgccacttttcaccacgtgactggcaaagactcatcaacaacaactggggattccgacccaagagactcaagttcaagctctttaacattcaagtcaaagaggtcacgcagaatgacggtacgacgacgattgccaataaccttaccagcacggttcaggtgtttactgactcggagtaccagctcccgtacgtcctcggctcggcgcatcaaggatgcctcccgccgttcccagcagacgtcttcatggtgccacagtatggatacctcaccctgaacaacgggagtcaggcagtaggacgctcttcattttactgcctggagtactttccttctcagatgctgcgtaccggtaacaactttaccttcagctacacttttgaggacgttcctttccacagcagctacgctcacagccagagtctggaccgtctcatgaatcctctcatcgaccagtacctgtattacttgagcagaacagacgctccaagtggaaccaccacgcagtcaaggcttcagttttctcaggccggagcgagtgacattcgggaccagtctaggaactggcttcctggaccctgttaccgccagcagcgagtatcaaagacatctgcggataacaacaacagtgaatactcgtggactggagctaccaagtaccacctcaatggcagagactctctggtgaatccgggcccggccatggcaagccacaaggacgatgaagaaaagttttttcctcagagcggggttctcatctttgggaagcaaggctcagagaaaacaagtgtggacattgaaaaggtcatgattacagacgaagaggaaatcaggacaaccaatcccgtggctacggagcagtatggttctgtatctaccaacctccagagaggcaacagacaagcagctaccgcagatgtcaacacacaaggcgttcttccaggcatggtctggcaggacagagatgtgtaccttcaggggcccatctgggcaaagattccacacacggacggacattttcacccctctcccctcatgggtggattcggacttaaacaccctcctccacagattctcatcaagaacaccccggtacctgcgaatccttcgaccaccttcagtgcggcaaagtttgcttccttcatcacacagtactccacgggacaggtcagcgtggagatcgagtgggagctgcagaaggaaaacagcaaacgctggaatcccgaagttcagtacacttccaactacaacaagtctgttaatgtggactttactgtggacactaatggcgtgtattcagagcctcgccccattggcaccagatacctgactcgtaatctgtaa

SEQ ID NO: 5206 - protein, 735 aa, Artificial Sequence
  Description of Artificial Sequence: Synthetic polypeptide
MAADGYLPDWLEDTLSEGIRQWWKLKPGPPPPKPAERHKDDSRGLVLPGYKYLGPFNGLDKGEPVNEADAAALEHDKAYDRQLDSGDNPYLKYNHADAEFQERLKEDTSFGGNLGRAVFQAKKRVLEPLGLVEEPVKTAPGKKRPVEHSPVEPDSSSGTGKAGQQPARKRLNFGQTGDADSVPDPQPLGQPPAAPSGLGTNTMATGSGAPMADNNEGADGVGNSSGNWHCDSTWMGDRVITTSTRTWALPTYNNHLYKQISSQSGASNDNHYFGYSTPWGYFDFNRFHCHFSPRDWQRLINNNWGFRPKRLKFKLFNIQVKEVTQNDGTTTIANNLTSTVQVFTDSEYQLPYVLGSAHQGCLPPFPADVFMVPQYGYLTLNNGSQAVGRSSFYCLEYFPSQMLRTGNNFTFSYTFEDVPFHSSYAHSQSLDRLMNPLIDQYLYYLSRTDAPSGTTTQSRLQFSQAGASDIRDQSRNWLPGPCYRQQRVSKTSADNNNSEYSWTGATKYHLNGRDSLVNPGPAMASHKDDEEKFFPQSGVLIFGKQGSEKTSVDIEKVMITDEEEIRTTNPVATEQYGSVSTNLQRGNRQAATADVNTQGVLPGMVWQDRDVYLQGPIWAKIPHTDGHFHPSPLMGGFGLKHPPPQILIKNTPVPANPSTTFSAAKFASFITQYSTGQVSVEIEWELQKENSKRWNPEVQYTSNYNKSVNVDFTVDTNGVYSEPRPIGTRYLTRNL

SEQ ID NO: 5207 - DNA, 2208 bp, Artificial Sequence
  Description of Artificial Sequence: Synthetic polynucleotide
atggctgccgatggttatcttccagattggctcgaggacactctctctgaaggaataagacagtggtggaagctcaaacctggcccaccaccaccaaagcccgcagagcggcataaggacgacagcaggggtcttgtgcttcctgggtacaagtacctcggacccttcaacggactcgacaagggagagccggtcaacgaggcagacgccgcggccctcgagcacgacaaagcctatgaccggcagctcgacagcggagacaacccgtacctcaagtacaaccacgccgacgcggagtttcaggagcgccttaaagaagatacgtcttttgggggcaacctcggacgagcagtcttccaggcgaaaaagagggttcttgaacctctgggcctggttgaggaacctgttaagacggctccgggaaaaaagaggccggtagagcactctcctgtggagccagactcctcctcgggaaccggaaaggcgggccagcagcctgcaagaaaaagattgaattttggtcagactggagacgcaaactcagtacctgacccccagcctctcggacagccaccagcagccccctctggtctgggaactaatacgatggctacaggcagtggcgcaccaatggcagacaataacgagggcgccgacggagtgggtaattcctcgggaaattggcattgcgattccacatggatgggcgacagagtcatcaccaccagcacccgaacctgggccctgcccacctacaacaaccacctctacaaacaaatttccagccaatcaggagcctcgaacgacaatcactactttggctacagcaccccttgggggtattttgacttcaacagattccactgccacttttcaccacgtgactggcaaagactcatcaacaacaactggggattccgacccaagagactcaagttcaagctctttaacattcaagtcaaagaggtcacgcagaatgacggtacgacgacgattgccaataaccttaccagcacggttcaggtgtttactgactcggagtaccagctcccgtacgtcctcggctcggcgcatcaaggatgcctcccgccgttcccagcagacgtcttcatggtgccacagtatggatacctcaccctgaacaacgggagtcgggcagtaggacgctcttcattttactgcctggagtactttccttctcagatgctgcgtaccggtaacaactttaccttcagctacacttttgaggacgttcctttccacagcagctacgctcacagccagagtctggaccgtctcatgaatcctctcatcgaccagtacctgtattacttgagcagaacagacactccaagtggaaccaccacgcagtcaaggcttcagttttctcaggccggagcgagtgacattcgggaccagtctaggaactggcttcctggaccctgttaccgccagcagcgagtatcaaagacatctgcggataacaacaacagtgaatactcgtggactggagctaccaagtaccacctcaatggcagagactctctggtgaatccgggcccggccatggcaagccacaaggacgatgaagaaaagttttttcctcagagcggggttctcatctttgggaagcaaggctcagagaaaacaagtgtggacattgaaaaggtcatgattacagacgaagaggaaatcaggacgaccaatcccgtggctacggagcagtatggttctgtatctaccaacctccagagaggcaacagacaagcagctaccgcagatgtcaacacacaaggcgttcttccaggcatggtctggcaggacagagatgtgtaccttcaggggcccatctgggcaaagattccacacacggacggacattttcacccctctcccctcatgggtggattcggacttaaacaccctcctccacagattctcatcaagaacaccccggtacctgcgaatccttcgaccaccttcagtgcggcaaagtttgcttccttcatcacacagtactccacgggacaggtcagcgtggagatcgagtgggagctgcagaaggaaaacagcaaacgctggaatcccgaagttcagtacacttccaactacaacaagtctgttaatgtggactttactgtggacactaatggcgtgtatacagagcctcgccccattggcaccagatacctgactcgtaatctgtaa

SEQ ID NO: 5208 - protein, 735 aa, Artificial Sequence
  Description of Artificial Sequence: Synthetic polypeptide
MAADGYLPDWLEDTLSEGIRQWWKLKPGPPPPKPAERHKDDSRGLVLPGYKYLGPFNGLDKGEPVNEADAAALEHDKAYDRQLDSGDNPYLKYNHADAEFQERLKEDTSFGGNLGRAVFQAKKRVLEPLGLVEEPVKTAPGKKRPVEHSPVEPDSSSGTGKAGQQPARKRLNFGQTGDANSVPDPQPLGQPPAAPSGLGTNTMATGSGAPMADNNEGADGVGNSSGNWHCDSTWMGDRVITTSTRTWALPTYNNHLYKQISSQSGASNDNHYFGYSTPWGYFDFNRFHCHFSPRDWQRLINNNWGFRPKRLKFKLFNIQVKEVTQNDGTTTIANNLTSTVQVFTDSEYQLPYVLGSAHQGCLPPFPADVFMVPQYGYLTLNNGSRAVGRSSFYCLEYFPSQMLRTGNNFTFSYTFEDVPFHSSYAHSQSLDRLMNPLIDQYLYYLSRTDTPSGTTTQSRLQFSQAGASDIRDQSRNWLPGPCYRQQRVSKTSADNNNSEYSWTGATKYHLNGRDSLVNPGPAMASHKDDEEKFFPQSGVLIFGKQGSEKTSVDIEKVMITDEEEIRTTNPVATEQYGSVSTNLQRGNRQAATADVNTQGVLPGMVWQDRDVYLQGPIWAKIPHTDGHFHPSPLMGGFGLKHPPPQILIKNTPVPANPSTTFSAAKFASFITQYSTGQVSVEIEWELQKENSKRWNPEVQYTSNYNKSVNVDFTVDTNGVYTEPRPIGTRYLTRNL

SEQ ID NO: 5209 - DNA, 2211 bp, Artificial Sequence
  Description of Artificial Sequence: Synthetic polynucleotide
atggctgccgatggttatcttccagattggctcgaggacactctctctgaaggaataagacagtggtggaagctcaaacctggcccaccaccaccaaagcccgcagagcggcataaggacgacagcaggggtcttgtgcttcctgggtacaagtacctcggacccttcaacggactcgacaagggagagccggtcaacgaggcagacgccgcggccctcgagcacgacaaggcctacgaccagcagctcaaagcgggtgacaatccgtacctgcggtataaccacgccgacgccgagtttcaggagcgtctgcaagaagatacgtcttttgggggcaacctcgggcgagcagtcttccaggccaagaagcgggttctcgaacctctcggtctggttgaggaaggcgctaagacggctcctggaaagaaacgtccggtagagcagtcgccacaagagccagactcctcctcgggcatcggcaagacaggccagcagcccgctaaaaagagactcaattttggtcagactggcgactcagagtcagtccccgacccacaacctctcggagaacctccagcaacccccgctgctgtgggacctactacaatggcttcaggcggtggcgcaccaatggcagacaataacgaaggcgccgacggagtgggtaatgcctcaggaaattggcattgcgattccacatggctgggcgacagagtcatcaccaccagcacccgaacatgggccttgcccacctataacaaccacctctacaagcaaatctccagtgcttcgacgggggccagcaacgacaaccactacttcggctacagcaccccctgggggtattttgactttaacagattccactgccacttttcaccacgtgactggcagcgactcatcaacaataactggggattccggcccaagagactcagcttcaagctcttcaacatccaggtcaaggaggtcacgacgaatgatggcgtcacaaccatcgctaataaccttaccagcacggttcaagtcttctcggactcggagtaccagcttccgtacgtcctcggctctgcgcaccagggctgcctccctccgttcccggcggacgtgttcatgattccgcaatacggctacctgacgctcaacaatggcagccaagccgtgggacgttcatccttttactgcctggaatatttcccttctcagatgctgagaacgggcaacaactttaccttcagctacacctttgaggaagtgcctttccacagcagctacgcgcacagccagagcctggaccggctgatgaatcctctcatcgatcaatacctgtattacctgaacagaactcaaaatcagtccggaagtgcccaaaacaaggacttgctgtttagccgtgggtctccagctggcatgtctgttcagcccaaaaactggctacctggaccctgttatcggcagcagcgcgtttctaaaacaaaaacagacaacaacaacagcaattttacctggactggtgcttcaaaatataacctcaatgggcgtgaatccatcatcaaccctggcactgctatggcctcacacaaagacgacgaagacaagttctttcccatgagcggtgtcatgatttttggaaaagagagcgccggagcttcaaacactgcattggacaatgtcatgattacggacgaagaggaaattaaagccactaaccctgtggccaccgaaagatttgggaccgtggcagtcaatttccagagcagcagcacagaccctgcgaccggagatgtgcatgctatgggagcattacctggcatggtgtggcaagatagagacgtgtacctgcagggtcccatttgggccaaaattcctcacacagatggacactttcacccgtctcctcttatgggcggctttggactcaagaacccgcctcctcagatcctcatcaaaaacacgcctgttcctgcgaatcctccggcggagttttcagctacaaagtttgcttcattcatcactcaatactccacaggacaagtgagcgtggaaattgaatgggagctgcagaaagaaaacagcaaacgctggaatcccgaagtgcagtatacatctaactatgcaaaatctgccaacgttgatttcactgtggacaacaatggactttatactgagcctcgccccattggcacccgttacctcacccgtcccctgtaa

SEQ ID NO: 5210 - protein, 736 aa, Artificial Sequence
  Description of Artificial Sequence: Synthetic polypeptide
MAADGYLPDWLEDTLSEGIRQWWKLKPGPPPPKPAERHKDDSRGLVLPGYKYLGPFNGLDKGEPVNEADAAALEHDKAYDQQLKAGDNPYLRYNHADAEFQERLQEDTSFGGNLGRAVFQAKKRVLEPLGLVEEGAKTAPGKKRPVEQSPQEPDSSSGIGKTGQQPAKKRLNFGQTGDSESVPDPQPLGEPPATPAAVGPTTMASGGGAPMADNNEGADGVGNASGNWHCDSTWLGDRVITTSTRTWALPTYNNHLYKQISSASTGASNDNHYFGYSTPWGYFDFNRFHCHFSPRDWQRLINNNWGFRPKRLSFKLFNIQVKEVTTNDGVTTIANNLTSTVQVFSDSEYQLPYVLGSAHQGCLPPFPADVFMIPQYGYLTLNNGSQAVGRSSFYCLEYFPSQMLRTGNNFTFSYTFEEVPFHSSYAHSQSLDRLMNPLIDQYLYYLNRTQNQSGSAQNKDLLFSRGSPAGMSVQPKNWLPGPCYRQQRVSKTKTDNNNSNFTWTGASKYNLNGRESIINPGTAMASHKDDEDKFFPMSGVMIFGKESAGASNTALDNVMITDEEEIKATNPVATERFGTVAVNFQSSSTDPATGDVHAMGALPGMVWQDRDVYLQGPIWAKIPHTDGHFHPSPLMGGFGLKNPPPQILIKNTPVPANPPAEFSATKFASFITQYSTGQVSVEIEWELQKENSKRWNPEVQYTSNYAKSANVDFTVDNNGLYTEPRPIGTRYLTRPL

SEQ ID NO: 5211 - protein, 735 aa, Artificial Sequence
  Description of Artificial Sequence: Synthetic polypeptide
MAADGYLPDWLEDTLSEGIRQWWKLKPGPPPPKPAERHKDDSRGLVLPGYKYLGPFNGLDKGEPVNEADAAALEHDKAYDRQLDSGDNPYLKYNHADAEFQERLKEDTSFGGNLGRAVFQAKKRVLEPLGLVEEPVKTAPGKKRPVEHSPVEPDSSSGTGKAGQQPARKRLNFGQTGDADSVPDPQPLGQPPAAPSGLGTNTMATGSGAPMADNNEGADGVGNSSGNWHCDSTWMGDRVITTSTRTWALPTYNNHLYKQISSQSGASNDNHYFGYSTPWGYFDFNRFHCHFSPRDWQRLINNNWGFRPKRLKFKLFNIQVKEVTQNDGTTTIANNLTSTVQVFTDSEYQLPYVLGSAHQGCLPPFPADVFMVPQYGYLTLNNGSQAVGRSSFYCLEYFPSQMLRTGNNFTFSYTFEDVPFHSSYAHSQSLDRLMNPLIDQYLYYLSRTDTPSGTTTQSRLQFSQAGASDIRNQSRNWLPGPCYRQQRVSKTSADNNNSEYSWTGATKYHLNGRDSLVNPGPAMASHKDDEEKFFPQSGVLIFGKQGSEKTSVDIEKVMITDEEEIRTTNPVATEQYGSVSTNLQRGNRQAATADVNTQGVLPGMVWQDRDVYLQGPIWAKIPHTDGHFHPSPLMGGFGLKHPPPQILIKNTPVPANPSTTFSAAKFASFITQYSTGQVSVEIEWELQKENSKRWNPEVQYTSNYNKSVNVDFTVDTNGVYSEPRPIGTRYLTRNQ

SEQ ID NO: 5212 - DNA, 2208 bp, Artificial Sequence
  Description of Artificial Sequence: Synthetic polynucleotide
atggctgccgatggttatcttccagattggctcgaggacactctctctgaaggaataagacagtggtggaagctcaaacctggcccaccaccaccaaagcccgcagagcggcataaggacgacagcaggggtcttgtgcttcctgggtacaagtacctcggacccttcaacggactcgacaagggagagccggtcaacgaggcagacgccgcggccctcgagcacgacaaagcctatgaccggcagctcgacagcggagacaacccgtacctcaagtacaaccacgccgacgcggagtttcaggaacgccttaaagaagatacgtcttttgggggcaacctcggacgagcagtcttccaggcgaaaaagagggttcttgaacctctgggcctggttgaggaacctgttaagacggctccgggaaaaaagaggccggtagagcactctcctgtggagccagactcctcctcgggaaccggaaaggcgggccagcagcctgcaagaaaaagattgaattttggtcagactggagacgcagactcagtacctgacccccagcctctcggacagccaccagcagccccctctggtctgggaactaatacgatggctacaggcagtggcgcaccaatggcagacaataacgagggcgccgacggagtgggtaattcctcgggaaattggcattgcgattccacatggatgggcgacagagtcatcaccaccagcacccgaacctgggccctgcccacctacaacaaccacctctacaaacaaatttccagccaatcaggagcctcgaacgacaatcactactttggctacagcaccccttgggggtattttgacttcaacagattccactgccacttttcaccacgtgactggcaaagactcatcaacaacaactggggattccgacccaagagactcaagttcaagctctttaacattcaagtcaaagaggtcacgcagaatgacggtacgacgacgattgccaataaccttaccagcacggttcaggtgtttactgactcggagtaccagctcccgtacgtcctcggctcggcgcatcaaggatgcctcccgccgttcccagcagacgtcttcatggtgccacagtatggatacctcaccctgaacaacgggagtcaggcagtaggacgctcttcattttactgcctggagtactttccttctcagatgctgcgtaccggtaacaactttaccttcagctacacttttgaggacgttcctttccacagcagctacgctcacagccagagtctggaccgtctcatgaatcctctcatcgaccagtacctgtattacttgagcagaacagacactccaagtggaaccaccacgcagtcaaggcttcagttttctcaggccggagcgagtgacattcggaaccagtctaggaactggcttcctggaccctgttaccgccagcagcgagtatcaaagacatctgcggataacaacaacagtgaatactcgtggactggagctaccaagtaccacctcaatggcagagactctctggtgaatccgggcccggccatggcaagccacaaggacgatgaagaaaagttttttcctcagagcggggttctcatctttgggaagcaaggctcagagaaaacaagtgtggacattgaaaaggtcatgattacagacgaagaggaaatcaggacaaccaatcccgtggctacggagcagtatggttctgtatctaccaacctccagagaggcaacagacaagcagctaccgcagatgtcaacacacaaggcgttcttccaggcatggtctggcaggacagagatgtgtaccttcaggggcccatctgggcaaagattccacacacggacggacattttcacccctctcccctcatgggtggattcggacttaaacaccctcctccacagattctcatcaagaacaccccggtacctgcgaatccttcgaccaccttcagtgcggcaaagtttgcttccttcatcacacagtactccacgggacaggtcagcgtggagatcgagtgggagctgcagaaggaaaacagcaaacgctggaatcccgaagttcagtacacttccaactacaacaagtctgttaatgtggactttactgtggacactaatggcgtgtattcagagcctcgccccattggcaccagatacctgactcgtaatcagtaa

SEQ ID NO: 5213 - DNA, 2208 bp, Artificial Sequence
  Description of Artificial Sequence: Synthetic polynucleotide
atggctgccgatggttatcttccagattggctcgaggacactctctctgaaggaataagacagtggtggaagctcaaacctggcccaccaccaccaaagcccgcagagcggcataaggacgacagcaggggtcttgtgcttcctgggtacaagtacctcggacccttcaacggactcgacaagggagagccggtcaacgaggcagacgccgcggccctcgagcacgacaaagcctatgaccggcagctcgacagcggagacaacccgtacctcaagtacaaccacgccgacgcggagtttcaggagcgccttaaagaagatacgtcttttgggggcaacctcggacgagcagtcttccaggcgaaaaagagggttcttgaacctctgggcctggttgaggaacctgttaagacggctccgggaaaaaagaggccggtagagcactctcctgtggagccagactcctcctcgggaaccggaaaggcgggccagcagcctgcaagaaaaagattgaattttggtcagactggagacgcagactcagtacctgatccccagcctctcggacagccaccagcagccccctctggtctgggaactaatacgatggctacaggcagtggcgcaccaatggcagacaataacgagggcgccgacggagtgggtaattcctcgggaaattggcattgcgattccacatggatgggcgacagagtcatcaccaccagcacccgaacctgggccctgcccacctacaacaaccacctctacaaacaaatttccagccaatcaggagcctcgaacgacaatcactactttggctacagcaccccttgggggtattttgacttcaacagattccactgccacttttcaccacgtgactggcaaagactcatcaacaacaactggggattccgacccaagagactcaagttcaagctctttaacattcaagtcaaagaggtcacgcagaatgacggtacgacgacgattgccaataaccttaccagcacggttcaggtgtttactgactcggagtaccagctcccgtatgtcctcggctcggcgcatcaaggatgcctcccgccgttcccagcagacgtcttcatggtgccacagtatggatacctcaccctgaacaacgggagtcaggcagtaggacgctcttcattttactgcctggagtactttccttctcagatgctgcgtaccggtaacaactttaccttcagctacacttttgaggacgttcctttccacagcagctacgctcacagccagagtctggaccgtctcatgaatcctctcatcgaccagtacctgtattacttgagcagaacagacactccaagtggaaccaccacgcagtcaaggcttcagttttctcaggccggagcgagtgacattcgggaccagtctaggaactggcttcctggaccctgttaccgccagcagcgagtatcaaagacatctgcggataacaacaacagtgaatactcgtggactggagctaccaagtaccacctcaatggcagagactctctggtgaatccgggcccggccatggcaagccacaaggacgatgaagaaaagttttttcctcagagcggggttctcatctttgggaagcaaggctcagagaaaacaagtgtggacattgaaaaggtcatgattacagacgaagaggaaatcaggacaaccaatcccgtggctacggagcagtatggttctgtatctaccaacctccagagaggcaacagacaagcagctaccgcagatgtcaacacacaaggcgttcttccaggcatggtctggcaggacagagatgtgtaccttcaggggcccatctgggcaaagattccacacacggacggacattttcacccctctcccctcatgggtggattcggacttaaacaccctcctccacagattctcatcaagaacaccccggtacctgcgaatccttcgaccaccttcagtgcggcaaagtttgcttccttcatcacacagtactccacgggacaggtcagcgtggagatcgagtgggagctgcagaaggaaaacagcaaacgctggaatcccgaagttcagtacacttccaactacaacaagtctgttaatgtggactttactgtggacactaatggcgtgtattcagagcctcgccccattggcaccagatacctgactcgtaatctgtaa

SEQ ID NO: 5214 - protein, 735 aa, Artificial Sequence
  Description of Artificial Sequence: Synthetic polypeptide
MAADGYLPDWLEDTLSEGIRQWWKLKPGPPPPKPAERHKDDSRGLVLPGYKYLGPFNGLDKGEPVNEADAAALEHDKAYDRQLDSGDNPYLKYNHADAEFQERLKEDTSFGGNLGRAVFQAKKRVLEPLGLVEEPVKTAPGKKRPVEHSPVEPDSSSGTGKAGQQPARKRLNFGQTGDADSVPDPQPLGQPPAAPSGLGTNTMATGSGAPMADNNEGADGVGNSSGNWHCDSTWMGDRVITTSTRTWALPTYNNHLYKQISSQSGASNDNHYFGYSTPWGYFDFNRFHCHFSPRDWQRLINNNWGFRPKRLKFKLFNIQVKEVTQNDGTTTIANNLTSTVQVFTDSEYQLPYVLGSAHQGCLPPFPADVFMVPQYGYLTLNNGSQAVGRSSFYCLEYFPSQMLRTGNNFTFSYTFEDVPFHSSYAHSQSLDRLMNPLIDQYLYYLSRTDTPSGTTTQSRLQFSQAGASDIRDQSRNWLPGPCYRQQRVSKTSADNNNSEYSWTGATKYHLNGRDSLVNPGPAMASHKDDEEKFFPQSGVLIFGKQGSEKTSVDIEKVMITDEEEIRTTNPVATEQYGSVSTNLQRGNRQAATADVNTQGVLPGMVWQDRDVYLQGPIWAKIPHTDGHFHPSPLMGGFGLKHPPPQILIKNTPVPANPSTTFSAAKFASFITQYSTGQVSVEIEWELQKENSKRWNPEVQYTSNYNKSVNVDFTVDTNGVYSEPRPIGTRYLTRNL

SEQ ID NO: 5215 - DNA, 2172 bp, Artificial Sequence
  Description of Artificial Sequence: Synthetic polynucleotide
atgtcttttgttgatcaccctccagattggttggaagaagttggtgaaggtcttcgcgagtttttgggccttgaagcgggcccaccgaaaccaaaacccaatcagcagcatcaagatcaagcccgtggtcttgtgctgcctggttataactatctcggacccggaaacggtctcgatcgaggagagcctgtcaacagggcagacgaggtcgcgcgagagcacgacatctcgtacaacgagcagcttgaggcgggagacaacccctacctcaagtacaaccacgcggacgccgagtttcaggagaagctcgccgacgacacatccttcgggggaaacctcggaaaggcagtctttcaggccaagaaaagggttctcgaaccttttggcctggttgaagagggtgctaagacggcccctaccggaaagcggatagacgaccactttccaaaaagaaagaaggctcggaccgaagaggactccaagccttccacctcgtcagacgccgaagctggacccagcggatcccagcagctgcaaatcccagcccaaccagcctcaagtttgggagctgatacaatgtctgcgggaggtggcggcccattgggcgacaataaccaaggtgccgatggagtgggcaatgcctcgggagattggcattgcgattccacgtggatgggggacagagtcgtcaccaagtccacccgaacctgggtgctgcccagctacaacaaccaccagtaccgagagatcaaaagcggctccgtcgacggaagcaacgccaacgcctactttggatacagcaccccctgggggtactttgactttaaccgcttccacagccactggagcccccgagactggcaaagactcatcaacaactactggggcttcagaccccggtccctcagagtcaaaatcttcaacattcaagtcaaagaggtcacggtgcaggactccaccaccaccatcgccaacaacctcacctccaccgtccaagtgtttacggacgacgactaccagctgccctacgtcgtcggcaacgggaccgagggatgcctgccggccttccctccgcaggtctttacgctgccgcagtacggttacgcgacgctgaaccgcgacaacacagaaaatcccaccgagaggagcagcttcttctgcctagagtactttcccagcaagatgctgagaacgggcaacaactttgagtttacctacaactttgaggaggtgcccttccactccagcttcgctcccagtcagaacctgttcaagctggccaacccgctggtggaccagtacttgtaccgcttcgtgagcacaaataacactggcggagtccagttcaacaagaacctggccgggagatacgccaacacctacaaaaactggttcccggggcccatgggccgaacccagggctggaacctgggctccggggtcaaccgcgccagtgtcagcgccttcgccacgaccaataggatggagctcgagggcgcgagttaccaggtgcccccgcagccgaacggcatgaccaacaacctccagggcagcaacacctatgccctggagaacactatgatcttcaacagccagccggcgaacccgggcaccaccgccacgtacctcgagggcaacatgctcatcaccagcgagagcgagacgcagccggtgaaccgcgtggcgtacaacgtcggcgggcagatggccaccaacaaccagagctccaccactgcccccgcgaccggcacgtacaacctccaggaaatcgtgcccggcagcgtgtggatggagagggacgtgtacctccaaggacccatctgggccaagatcccagagacgggggcgcactttcacccctctccggccatgggcggattcggactcaaacacccaccgcccatgatgctcatcaagaacacgcctgtgcccggaaatatcaccagcttctcggacgtgcccgtcagcagcttcatcacccagtacagcaccgggcaggtcaccgtggagatggagtgggagctcaagaaggaaaactccaagaggtggaacccagagatccagtacacaaacaactacaacgacccccagtttgtggactttgccccggacagcaccggggaatacagaaccaccagacctatcggaacccgataccttacccgacccctt

SEQ ID NO: 5216 - DNA, 2214 bp, Artificial Sequence
  Description of Artificial Sequence: Synthetic polynucleotide
atggctgccgatggttatcttccagattggctcgaggacaacctctctgagggcattcgcgagtggtgggcgctgaaacctggagccccgaagcccaaagccaaccagcaaaagcaggacgacggccggggtctggtgcttcctggctacaagtacctcggacccttcaacggactcgacaagggggagcccgtcaacgcggcggacgcagcggccctcgagcacgacaaggcctacgaccagcagctgcaggcgggtgacaatccgtacctgcggtataaccacgccgacgccgagtttcaggagcgtctgcaagaagatacgtcttttgggggcaacctcgggcgagcagtcttccaggccaagaagcgggttctcgaacctctcggtctggttgaggaaggcgctaagacggctcctggaaagaagagaccggtagagccatcaccccagcgttctccagactcctctacgggcatcggcaagaaaggccaacagcccgccagaaaaagactcaattttggtcagactggcgactcagagtcagttccagaccctcaacctctcggagaacctccagcagcgccctctggtgtgggacctaatacaatggctgcaggcggtggcgcaccaatggcagacaataacgaaggcgccgacggagtgggtagttcctcgggaaattggcattgcgattccacatggctgggcgacagagtcatcaccaccagcacccgaacctgggccctgcccacctacaacaaccacctctacaagcaaatctccaacgggacatcgggaggagccaccaacgacaacacctacttcggctacagcaccccctgggggtattttgactttaacagattccactgccacttttcaccacgtgactggcagcgactcatcaacaacaactggggattccggcccaagagactcagcttcaagctcttcaacatccaggtcaaggaggtcacgcagaatgaaggcaccaagaccatcgccaataacctcaccagcaccatccaggtgtttacggactcggagtaccagctgccgtacgttctcggctctgcccaccagggctgcctgcctccgttcccggcggacgtgttcatgattccccagtacggctacctaacactcaacaacggtagtcaggccgtgggacgctcctccttctactgcctggaatactttccttcgcagatgctgagaaccggcaacaacttccagtttacttacaccttcgaggacgtgcctttccacagcagctacgcccacagccagagcttggaccggctgatgaatcctctgattgaccagtacctgtactacttgtctcggactcaaacaacaggaggcacggcaaatacgcagactctgggcttcagccaaggtgggcctaatacaatggccaatcaggcaaagaactggctgccaggaccctgttaccgccaacaacgcgtctcaacgacaaccgggcaaaacaacaatagcaactttgcctggactgctgggaccaaataccatctgaatggaagaaattcattggctaatcctggcatcgctatggcaacacacaaagacgacgaggagcgtttttttcccagtaacgggatcctgatttttggcaaacaaaatgctgccagagacaatgcggattacagcgatgtcatgctcaccagcgaggaagaaatcaaaaccactaaccctgtggctacagaggaatacggtatcgtggcagataacttgcctgagcggacggcgatgagtcttccgggaactgtcaacagccagggggccttacccggtatggtctggcagaaccgggacgtgtacctgcagggtcccatctgggccaagattcctcacacggacggcaacttccacccgtctccgctgatgggcggctttggcctgaaacatcctccgcctcagatcctgatcaagaacacgcctgtacctgcggatcctccgaccaccttcaaccagtcaaagctgaactctttcatcacgcaatacagcaccggacaggtcagcgtggaaattgaatgggagctgcagaaggaaaacagcaagcgctggaaccccgagatccagtacacctccaactactacaaatctacaagtgtggactttgctgttaatacagaaggcgtgtactctgaaccccgccccattggcacccgttacctcacccgtaatctg

SEQ ID NO: 5217 - protein, 738 aa, Artificial Sequence
  Description of Artificial Sequence: Synthetic polypeptide
MAADGYLPDWLEDNLSEGIREWWALKPGAPKPKANQQKQDDGRGLVLPGYKYLGPFNGLDKGEPVNAADAAALEHDKAYDQQLQAGDNPYLRYNHADAEFQERLQEDTSFGGNLGRAVFQAKKRVLEPLGLVEEGAKTAPGKKRPVEPSPQRSPDSSTGIGKKGQQPARKRLNFGQTGDSESVPDPQPLGEPPAAPSGVGPNTMAAGGGAPMADNNEGADGVGSSSGNWHCDSTWLGDRVITTSTRTWALPTYNNHLYKQISNGTSGGATNDNTYFGYSTPWGYFDFNRFHCHFSPRDWQRLINNNWGFRPKRLSFKLFNIQVKEVTQNEGTKTIANNLTSTIQVFTDSEYQLPYVLGSAHQGCLPPFPADVFMIPQYGYLTLNNGSQAVGRSSFYCLEYFPSQMLRTGNNFQFTYTFEDVPFHSSYAHSQSLDRLMNPLIDQYLYYLSRTQTTGGTANTQTLGFSQGGPNTMANQAKNWLPGPCYRQQRVSTTTGQNNNSNFAWTAGTKYHLNGRNSLANPGIAMATHKDDEERFFPSNGILIFGKQNAARDNADYSDVMLTSEEEIKTTNPVATEEYGIVADNLPERTAMSLPGTVNSQGALPGMVWQNRDVYLQGPIWAKIPHTDGNFHPSPLMGGFGLKHPPPQILIKNTPVPADPPTTFNQSKLNSFITQYSTGQVSVEIEWELQKENSKRWNPEIQYTSNYYKSTSVDFAVNTEGVYSEPRPIGTRYLTRNL

SEQ ID NO: 5218 - DNA, 2214 bp, Artificial Sequence
  Description of Artificial Sequence: Synthetic polynucleotide
atggctgccgatggttatcttccagattggctcgaggacaacctctctgagggcattcgcgagtggtgggcgctgaaacctggagccccgaagcccaaagccaaccagcaaaagcaggacgacggccggggtctggtgcttcctggctacaagtacctcggacccttcaacggactcgacaagggggagcccgtcaacgcggcggacgcagcggccctcgagcacgacaaggcctacgaccagcagctgcaggcgggtgacaatccgtacctgcggtataaccacgccgacgccgagtttcaggagcgtctgcaagaagatacgtcttttgggggcaacctcgggcgagcagtcttccaggccaagaagcgggttctcgaacctctcggtctggttgaggaaggcgctaagacggctcctggaaagaagagaccggtagagccatcaccccagcgttctccagactcctctacgggcatcggcaagaaaggccaacagcccgccagaaaaagactcaattttggtcagactggcgactcagagtcagttccagaccctcaacctctcggagaacctccagcagcgccctctggtgtgggacctaatacaatggctgcaggcggtggcgcaccaatggcagacaataacgaaggcgccgacggagtgggtagttcctcgggaaattggcattgcgattccacatggctgggcgacagagtcatcaccaccagcacccgaacctgggccctgcccacctacaacaaccacctctacaagcaaatctccaacgggacatcgggaggagccaccaacgacaacacctacttcggctacagcaccccctgggggtattttgactttaacagattccactgccacttttcaccacgtgactggcagcgactcatcaacaacaactggggattccggcccaagagactcagcttcaagctcttcaacatccaggtcaaggaggtcacgcagaatgaaggcaccaagaccatcgccaataacctcaccagcaccatccaggtgtttacggactcggagtaccagctgccgtacgttctcggctctgcccaccagggctgcctgcctccgttcccggcggacgtgttcatgattccccagtacggctacctaacactcaacaacggtagtcaggccgtgggacgctcctccttctactgcctggaatactttccttcgcagatgctgagaaccggcaacaacttccagtttacttacaccttcgaggacgtgcctttccacagcagctacgcccacagccagagcttggaccggctgatgaatcctctgattgaccagtacctgtactacttgtctcggactcaaacaacaggaggcacggcaaatacgcagactctgggcttcagccaaggtgggcctaatacaatggccaatcaggcaaagaactggctgccaggaccctgttaccgccaacaacgcgtctcaacgacaaccgggcaaaacaacaatagcaactttgcctggactgctgggaccaaataccatctgaatggaagaaattcattggctaatcctggcatcgctatggcaacacacaaagacgacgaggagcgtttttttcccagtaacgggatcctgatttttggcaaacaaaatgctgccagagacaatgcggattacagcgatgtcatgctcaccagcgaggaagaaatcaaaaccactaaccctgtggctacagaggaatacggtatcgtggcagataacttgagttttagtcgtgcggttctttgtgatggaactgtcaacagccagggggccttacccggtatggtctggcagaaccgggacgtgtacctgcagggtcccatctgggccaagattcctcacacggacggcaacttccacccgtctccgctgatgggcggctttggcctgaaacatcctccgcctcagatcctgatcaagaacacgcctgtacctgcggatcctccgaccaccttcaaccagtcaaagctgaactctttcatcacgcaatacagcaccggacaggtcagcgtggaaattgaatgggagctgcagaaggaaaacagcaagcgctggaaccccgagatccagtacacctccaactactacaaatctacaagtgtggactttgctgttaatacagaaggcgtgtactctgaaccccgccccattggcacccgttacctcacccgtaatctg

SEQ ID NO: 5219 - protein, 738 aa, Artificial Sequence
  Description of Artificial Sequence: Synthetic polypeptide
MAADGYLPDWLEDNLSEGIREWWALKPGAPKPKANQQKQDDGRGLVLPGYKYLGPFNGLDKGEPVNAADAAALEHDKAYDQQLQAGDNPYLRYNHADAEFQERLQEDTSFGGNLGRAVFQAKKRVLEPLGLVEEGAKTAPGKKRPVEPSPQRSPDSSTGIGKKGQQPARKRLNFGQTGDSESVPDPQPLGEPPAAPSGVGPNTMAAGGGAPMADNNEGADGVGSSSGNWHCDSTWLGDRVITTSTRTWALPTYNNHLYKQISNGTSGGATNDNTYFGYSTPWGYFDFNRFHCHFSPRDWQRLINNNWGFRPKRLSFKLFNIQVKEVTQNEGTKTIANNLTSTIQVFTDSEYQLPYVLGSAHQGCLPPFPADVFMIPQYGYLTLNNGSQAVGRSSFYCLEYFPSQMLRTGNNFQFTYTFEDVPFHSSYAHSQSLDRLMNPLIDQYLYYLSRTQTTGGTANTQTLGFSQGGPNTMANQAKNWLPGPCYRQQRVSTTTGQNNNSNFAWTAGTKYHLNGRNSLANPGIAMATHKDDEERFFPSNGILIFGKQNAARDNADYSDVMLTSEEEIKTTNPVATEEYGIVADNLSFSRAVLCDGTVNSQGALPGMVWQNRDVYLQGPIWAKIPHTDGNFHPSPLMGGFGLKHPPPQILIKNTPVPADPPTTFNQSKLNSFITQYSTGQVSVEIEWELQKENSKRWNPEIQYTSNYYKSTSVDFAVNTEGVYSEPRPIGTRYLTRNL

SEQ ID NO: 5220 - DNA, 2215 bp, Artificial Sequence
  Description of Artificial Sequence: Synthetic polynucleotide
atggctgccgatggttatcttccagattggctcgaggacactctctctgaaggaataagacagtggtggaagctcaaacctggcccaccaccaccaaagcccgcagagcggcataaggacgacagcaggggtcttgtgcttcctgggtacaagtacctcggacccttcaacggactcgacaagggagagccggtcaacgaggcagacgccgcggccctcgagcacgacaaagcctacgaccggcagctcgacagcggagacaacccgtacctcaagtacaaccacgccgacgccgagttccaggagcggctcaaagaagatacgtcttttgggggcaacctcgggcgagcagtcttccaggccaaaaagaggcttcttgaacctcttggtctggttgaggaagcggctaagacggctcctggaaagaagaggcctgtagagcactctcctgtggagccagactcctcctcgggaaccggaaaggcgggccagcagcctgcaagaaaaagattgaattttggtcagactggagacgcagactcagtcccagaccctcaaccaatcggagaacctcccgcagccccctcaggtgtgggatctcttacaatggctgcaggcggtggcgcaccaatggcagacaataacgagggcgccgacggagtgggtaattcctcgggaaattggcattgcgattccacatggatgggcgacagagtcatcaccaccagcacccgaacctgggccctgcccacctacaacaaccacctctacaagcaaatctccaacagcacatctggaggatcttcaaatgacaacgcctacttcggctacagcaccccctgggggtattttgactttaacagattccactgccacttttcaccacgtgactggcagcgactcatcaacaacaactggggattccggcccaagagactcagcttcaagctcttcaacatccaggtcaaggaggtcacgcagaatgaaggcaccaagaccatcgccaataacctcaccagcaccatccaggtgtttacggactcggagtaccagctgccgtacgttctcggctctgcccaccagggctgcctgcctccgttcccggcggacgtgttcatgattccccagtacggctacctaacactcaacaacggtagtcaggccgtgggacgctcctccttctactgcctggaatactttccttcgcagatgctgagaaccggcaacaacttccagtttacttacaccttcgaggacgtgcctttccacagcagctacgcccacagccagagcttggaccggctgatgaatcctctgattgaccagtacctgtactacttgtctcggactcaaacaacaggaggcacgacaaatacgcagactctgggcttcagccaaggtgggcctaatacaatggccaatcaggcaaagaactggctgccaggaccctgttaccgccagcagcgagtatcaaagacatctgcggataacaacaacagtgaatactcgtggactggagctaccaagtaccacctcaatggcagagactctctggtgaatccgggcccggccatggcaagccacaaggacgatgaagaaaagtttttttcctcagagcggggttctcatctttgggaagcaaggctcagagaaaacaaatgtggacattgaaaaggtcatgattacagacgaagaggaaatcaggacaaccaatcccgtggctacggagcagtatggttctgtatctaccaacctccagagaggcaacagacaagcagctaccgcagatgtcaacacacaaggcgttcttccaggcatggtctggcaggacagagatgtgtaccttcaggggcccatctgggcaaagattccacacacggacggacattttcacccctctcccctcatgggtggattcggacttaaacaccctccgcctcagatcctgatcaagaacacgcctgtacctgcggatcctccgaccaccttcaaccagtcaaagctgaactctttcatcacccagtattctactggccaagtcagcgtggagatcgagtgggagctgcagaaggaaaacagcaagcgctggaaccccgagatccagtacacctccaactactacaaatctacaagtgtggactttgctgttaatacagaaggcgtgtactctgaaccccgccccattggcacccgttacctcacccgtaatctgtaa

SEQ ID NO: 5221 - protein, 737 aa, Artificial Sequence
  Description of Artificial Sequence: Synthetic polypeptide
MAADGYLPDWLEDTLSEGIRQWWKLKPGPPPPKPAERHKDDSRGLVLPGYKYLGPFNGLDKGEPVNEADAAALEHDKAYDRQLDSGDNPYLKYNHADAEFQERLKEDTSFGGNLGRAVFQAKKRLLEPLGLVEEAAKTAPGKKRPVEHSPVEPDSSSGTGKAGQQPARKRLNFGQTGDADSVPDPQPIGEPPAAPSGVGSLTMAAGGGAPMADNNEGADGVGNSSGNWHCDSTWMGDRVITTSTRTWALPTYNNHLYKQISNSTSGGSSNDNAYFGYSTPWGYFDFNRFHCHFSPRDWQRLINNNWGFRPKRLSFKLFNIQVKEVTQNEGTKTIANNLTSTIQVFTDSEYQLPYVLGSAHQGCLPPFPADVFMIPQYGYLTLNNGSQAVGRSSFYCLEYFPSQMLKTGNNFQFTYTFEDVPFHSSYAHSQSLDRLMNPLIDQYLYYLSRTQTTGGTTNTQTLGFSQGGPNTMANQAKNWLPGPCYRQQRVSKTSADNNNSEYSWTGATKYHLNGRDSLVNPGPAMASHKDDEEKFFPQSGVLIFGKQGSEKTNVDIEKVMITDEEEIRTTNPVATEQYGSVSTNLQRGNRQAATADVNTQGVLPGMVWQDRDVYLQGPIWAKIPHTDGHFHPSPLMGGFGLKHPPPQILIKNTPVPADPPTTFNQSKLNSFITQYSTGQVSVEIEWELQKENSKRWNPEIQYTSNYYKSTSVDFAVNTEGVYSEPRPIGTRYLTRNL

SEQ ID NO: 5222 - protein, 737 aa, Artificial Sequence
  Description of Artificial Sequence: Synthetic polypeptide
MAADGYLPDWLEDTLSEGIRQWWKLKPGPPPPKPAERHKDDSRGLVLPGYKYLGPFNGLDKGEPVNEADAAALEHDKAYDRQLDSGDNPYLKYNHADAEFQERLKEDTSFGGNLGRAVFQAKKRLLEPLGLVEEAAKTAPGKKRPVEHSPVEPDSSSGTGKAGQQPARKRLNFGQTGDADSVPDPQPIGEPPAAPSGVGSLTMAAGGGAPMADNNEGADGVGNSSGNWHCDSTWMGDRVITTSTRTWALPTYNNHLYKQISNSTSGGSSNDNAYFGYSTPWGYFDFNRFHCHFSPRDWQRLINNNWGFRPKRLSFKLFNIQVKEVTQNEGTKTIANNLTSTIQVFTDSEYQLPYVLGSAHQGCLPPFPADVFMIPQYGYLTLNNGSQAVGRSSFYCLEYFPSQMLKTGNNFQFTYTFEDVPFHSSYAHSQSLDRLMNPLIDQYLYYLSRTQTTGGTTNTQTLGFSQGGPNTMANQAKNWLPGPCYRQQRVSKTSADNNNSEYSWTGATKYHLNGRDSLVNPGPAMASHKDDEEKFFPQSGVLIFGKQGSEKTNVDIEKVMITDEEEIRTTNPVATEQYGSVSTNLQQGNTQAATADVNTQGVLPGMVWQDRDVYLQGPIWAKIPHTDGHFHPSPLMGGFGLKHPPPQILIKNTPVPADPPTTFNQSKLNSFITQYSTGQVSVEIEWELQKENSKRWNPEIQYTSNYYKSTSVDFAVNTEGVYSEPRPIGTRYLTRNL

SEQ ID NO: 5223 - protein, 737 aa, Artificial Sequence
  Description of Artificial Sequence: Synthetic polypeptide
MAADGYLPDWLEDTLSEGIRQWWKLKPGPPPPKPAERHKDDSRGLVLPGYKYLGPFNGLDKGEPVNEADAAALEHDKAYDRQLDSGDNPYLKYNHADAEFQERLKEDTSFGGNLGRAVFQAKKRLLEPLGLVEEAAKTAPGKKRPVEHSPVEPDSSSGTGKAGQQPARKRLNFGQTGDADSVPDPQPIGEPPAAPSGVGSLTMAAGGGAPMADNNEGADGVGNSSGNWHCDSTWMGDRVITTSTRTWALPTYNNHLYKQISNSTSGGSSNDNAYFGYSTPWGYFDFNRFHCHFSPRDWQRLINNNWGFRPKRLSFKLFNIQVKEVTQNEGTKTIANNLTSTIQVFTDSEYQLPYVLGSAHQGCLPPFPADVFMIPQYGYLTLNNGSQAVGRSSFYCLEYFPSQMLRTGNNFQFTYTFEDVPFHSSYAHSQSLDRLMNPLIDQYLYYLSRTQTTGGTTNTQTLGFSQGGPNTMANQAKNWLPGPCYRQQRVSKTSADNNNSEYSWTGATKYHLNGRDSLVNPGPAMASHKDDEEKFFPQSGVLIFGKQGSEKTNVDIEKVMITDEEEIRTTNPVATEQYGSVSTNLQQGNTQAATADVNTQGVLPGMVWQDRDVYLQGPIWAKIPHTDGHFHPSPLMGGFGLKHPPPQILIKNTPVPADPPTTFNQSKLNSFITQYSTGQVSVEIEWELQKENSKRWNPEIQYTSNYYKSTSVDFAVNTEGVYSEPRPIGTRYLTRNL

SEQ ID NO: 5224 - DNA, 2214 bp, Artificial Sequence
  Description of Artificial Sequence: Synthetic polynucleotide
atggctgccgatggttatcttccagattggctcgaggacaaccttagtgaaggaattcgcgagtggtgggctttgaaacctggagcccctcaacccaaggcaaatcaacaacatcaagacaacgctcgaggtcttgtgcttccgggttacaaataccttggacccggcaacggactcgacaagggggagccggtcaacgcagcagacgcggcggccctcgagcacgacaaggcctacgaccagcagctgcaggcgggtgacaatccgtacctgcggtataaccacgccgacgccgagtttcaggagcgtctgcaagaagatacgtcttttgggggcaaccttggcagagcagtcttccaggccaaaaagaggatccttgagcctcttggtctggttgaggaagcagctaaaacggctcctggaaagaagaggcctgtagatcagtctcctcaggaaccggactcatcatctggtgttggcaaatcgggcaaacagcctgccagaaaaagactaaatttcggtcagactggcgactcagagtcagtcccagaccctcaacctctcggagaaccaccagcagcccccacaagtttgggatctaatacaatggcttcaggcggtggcgcaccaatggcagacaataacgagggtgccgatggggtgggtagttcctcgggaaattggcattgcgattcccaatggctgggggacagagtcatcaccaccagcacccgaacctgggccctgcccacctacaacaatcacctctacaagcaaatctccaacgggacatcgggaggagccaccaacgacaacacctacttcggctacagcaccccctgggggtattttgactttaacagattccactgccacttttcaccacgtgactggcagcgactcatcaacaacaactggggattccggcccaagagactcagcttcaagctcttcaacatccaggtcaaggaggtcacgcagaatgaaggcaccaagaccatcgccaataacctcaccagcaccatccaggtgtttacggactcggagtaccagctgccgtacgttctcggctctgcgcaccagggctgcctccctccgttcccggcggacgtgttcatgattccgcaatacggctacctgacgctcaacaatggcagccaagccgtgggacgttcatccttttactgcctggaatatttcccttctcagatgctgagaacgggcaacaactttaccttcagctacacctttgaggaagtgcctttccacagcagctacgcgcacagccagagcttggaccggctgatgaatcctctgattgaccagtacctgtactacttgtctcggactcaaacaacaggaggcacggcaaatacgcagactctgggcttcagccaaggtgggcctaatacaatggccaatcaggcaaagaactggctgccaggaccctgttaccgccaacaacgcgtctcaacgacaaccgggcaaaacaacaatagcaactttgcctggactgctgggaccaaataccatctgaatggaagaaattcattggctaatcctggcatcgctatggcaacacacaaagacgacgaggagcgtttttttcccagtaacgggatcctgatttttggcaaacaaaatgctgccagagacaatgcggattacagcgatgtcatgctcaccagcgaggaagaaatcaaaaccactaaccctgtggctacagaggaatacggtatcgtggcagataacttgcagcagcaaaacacggctcctcaaattggaactgtcaacagccagggggccttacccggtatggtctggcagaaccgggacgtgtacctgcagggtcccatctgggccaagattcctcacacggacggcaacttccacccgtctccgctgatgggcggctttggcctgaaacatcctccgcctcagatcctgatcaagaacacgcctgtacctgcggatcctccgaccaccttcaaccagtcaaagctgaactctttcatcacgcaatacagcaccggacaggtcagcgtggagatcgagtgggagctgcagaaggaaaacagcaagcgctggaacccggagatccagtacacttccaactattacaagtctaataatgttgaatttgctgttaatactgaaggtgtatatagtgaaccccgccccattggcaccagatacctgactcgtaatctgtaa

SEQ ID NO: 5225 - protein, 737 aa, Artificial Sequence
  Description of Artificial Sequence: Synthetic polypeptide
MAADGYLPDWLEDNLSEGIREWWALKPGAPQPKANQQHQDNARGLVLPGYKYLGPGNGLDKGEPVNAADAAALEHDKAYDQQLQAGDNPYLRYNHADAEFQERLQEDTSFGGNLGRAVFQAKKRILEPLGLVEEAAKTAPGKKRPVDQSPQEPDSSSGVGKSGKQPARKRLNFGQTGDSESVPDPQPLGEPPAAPTSLGSNTMASGGGAPMADNNEGADGVGSSSGNWHCDSQWLGDRVITTSTRTWALPTYNNHLYKQISNGTSGGATNDNTYFGYSTPWGYFDFNRFHCHFSPRDWQRLINNNWGFRPKRLSFKLFNIQVKEVTQNEGTKTIANNLTSTIQVFTDSEYQLPYVLGSAHQGCLPPFPADVFMIPQYGYLTLNNGSQAVGRSSFYCLEYFPSQMLRTGNNFTFSYTFEEVPFHSSYAHSQSLDRLMNPLIDQYLYYLSRTQTTGGTANTQTLGFSQGGPNTMANQAKNWLPGPCYRQQRVSTTTGQNNNSNFAWTAGTKYHLNGRNSLANPGIAMATHKDDEERFFPSNGILIFGKQNAARDNADYSDVMLTSEEEIKTTNPVATEEYGIVADNLQQQNTAPQIGTVNSQGALPGMVWQNRDVYLQGPIWAKIPHTDGNFHPSPLMGGFGLKHPPPQILIKNTPVPADPPTTFNQSKLNSFITQYSTGQVSVEIEWELQKENSKRWNPEIQYTSNYYKSNNVEFAVNTEGVYSEPRPIGTRYLTRNL

SEQ ID NO: 5226 - DNA, 2211 bp, Artificial Sequence
  Description of Artificial Sequence: Synthetic polynucleotide
atggctgccgatggttatcttccagattggctcgaggacaacctctctgagggcattcgcgagtggtgggacttgaaacctggagccccgaagcccaaagccaaccagcaaaagcaggacgacggccggggtctggtgcttcctggctacaagtacctcggacccttcaacggactcgacaagggggagcccgtcaacgcggcggacgcagcggccctcgagcacgacaaggcctacgaccagcagctcaaagcgggtgacaatccgtacctgcggtataaccacgccgacgccgagtttcaggagcgtctgcaagaagatacgtcttttgggggcaacctcgggcgagcagtcttccaggccaagaagcgggttctcgaacctctcggtctggttgaggaaggcgctaagacggctcctggaaagaaacgtccggtagagcagtcgccacaagagccagactcctcctcgggcatcggcaagacaggccagcagcccgctaaaaagagactcaattttggtcagactggcgactcagagtcagtccccgacccacaacctctcggagaacctccagcaacccccgctgctgtgggacctactacaatggcttcaggcggtggcgcaccaatggcagacaataacgaaggcgccgacggagtgggtaatgcctcaggaaattggcattgcgattccacatggctgggcgacagagtcatcaccaccagcacccgaacatgggccttgcccacctataacaaccacctctacaagcaaatctccagtgcttcaacgggggccagcaacgacaaccactacttcggctacagcaccccctgggggtattttgatttcaacagattccactgccatttctcaccacgtgactggcagcgactcatcaacaacaattggggattccggcccaagagactcaacttcaagctcttcaacatccaagtcaaggaggtcacgacgaatgatggcgtcacgaccatcgctaataaccttaccagcacggttcaagtcttctcggactcggagtaccagctgccgtacgttctcggctctgcccaccagggctgcctgcctccgttcccggcggacgtgttcatgattccccagtacggctacctaacactcaacaacggtagtcaggccgtgggacgctcctccttctactgcctggaatactttccttcgcagatgctgagaaccggcaacaacttccagtttacttacaccttcgaggacgtgcctttccacagcagctacgcccacagccagagcttggaccggctgatgaatcctctgattgaccagtacctgtactacttgtctcggactcaaacaacaggaggcacggcaaatacgcagactctgggcttcagccaaggtgggcctaatacaatggccaatcaggcaaagaactggctgccaggaccctgttaccgccaacaacgcgtctcaacgacaaccgggcaaaacaacaatagcaattttacctggactggtgcttcaaaatataacctcaatgggcgtgaatccatcatcaaccctggcactgctatggcctcacacaaagacgacgaagacaagttctttcccatgagcggtgtcatgatttttggaaaagagagcgccggagcttcaaacactgcattggacaatgtcatgattacagacgaagaggaaattaaagccactaaccctgtggccaccgaaagatttgggaccgtggcagtcaatttccagagcagcagcacagaccctgcgaccggagatgtgcatgctatgggagcattacctggcatggtgtggcaagatagagacgtgtacctgcagggtcccatttgggccaaaattcctcacacagatggacactttcacccgtctcctcttatgggcggctttggactcaagaacccgcctcctcagatcctcatcaaaaacacgcctgttcctgcgaatcctccggcggagttttcagctacaaagtttgcttcattcatcacccaatactccacaggacaagtgagtgtggaaattgaatgggagctgcagaaagaaaacagcaagcgctggaatcccgaagtgcagtacacatccaattatgcaaaatctgccaacgttgattttactgtggacaacaatggactttatactgagcctcgccccattggcacccgttacctcacccgtcccctgtaa

SEQ ID NO: 5227 - protein, 736 aa, Artificial Sequence
  Description of Artificial Sequence: Synthetic polypeptide
MAADGYLPDWLEDNLSEGIREWWDLKPGAPKPKANQQKQDDGRGLVLPGYKYLGPFNGLDKGEPVNAADAAALEHDKAYDQQLKAGDNPYLRYNHADAEFQERLQEDTSFGGNLGRAVFQAKKRVLEPLGLVEEGAKTAPGKKRPVEQSPQEPDSSSGIGKTGQQPAKKRLNFGQTGDSESVPDPQPLGEPPATPAAVGPTTMASGGGAPMADNNEGADGVGNASGNWHCDSTWLGDRVITTSTRTWALPTYNNHLYKQISSASTGASNDNHYFGYSTPWGYFDFNRFHCHFSPRDWQRLINNNWGFRPKRLNFKLFNIQVKEVTTNDGVTTIANNLTSTVQVFSDSEYQLPYVLGSAHQGCLPPFPADVFMIPQYGYLTLNNGSQAVGRSSFYCLEYFPSQMLRTGNNFQFTYTFEDVPFHSSYAHSQSLDRLMNPLIDQYLYYLSRTQTTGGTANTQTLGFSQGGPNTMANQAKNWLPGPCYRQQRVSTTTGQNNNSNFTWTGASKYNLNGRESIINPGTAMASHKDDEDKFFPMSGVMIFGKESAGASNTALDNVMITDEEEIKATNPVATERFGTVAVNFQSSSTDPATGDVHAMGALPGMVWQDRDVYLQGPIWAKIPHTDGHFHPSPLMGGFGLKNPPPQILIKNTPVPANPPAEFSATKFASFITQYSTGQVSVEIEWELQKENSKRWNPEVQYTSNYAKSANVDFTVDNNGLYTEPRPIGTRYLTRPL

SEQ ID NO: 5228 - DNA, 2211 bp, Artificial Sequence
  Description of Artificial Sequence: Synthetic polynucleotide
atggctgctgacggttatcttccagattggctcgaggacaacctttctgaaggcattcgagagtggtgggcgctgcaacctggagcccctaaacccaaggcaaatcaacaacatcaggacaacgctcggggtcttgtgcttccgggttacaaatacctcggacccggcaacggactcgacaagggggaacccgtcaacgcagcggacgcggcagccctcgagcacgacaaggcctacgaccagcagctcaaggccggtgacaacccctacctcaagtacaaccacgccgacgccgagttccaggagcggctcaaagaagatacgtcttttgggggcaacctcgggcgagcagtcttccaggccaaaaagaggcttcttgaacctcttggtctggttgaggaagcggctaagacggctcctggaaagaagaggcctgtagatcagtctcctcaggaaccggactcatcatctggtgttggcaaatcgggcaaacagcctgccagaaaaagactaaatttcggtcagactggcgactcagagtcagtcccagaccctcaacctctcggagaaccaccagcagcccccacaagtttgggatctaatacaatggcttcaggcggtggcgcaccaatggcagacaataacgagggtgccgatggagtgggtaattcctcaggaaattggcattgcgattcccaatggctgggcgacagagtcatcaccaccagcaccagaacctgggccctgcccacttacaacaaccatctctacaagcaaatctccagccaatcaggagcttcaaacgacaaccactactttggctacagcaccccttgggggtattttgactttaacagattccactgccacttctcaccacgtgactggcagcgactcattaacaacaactggggattccggcccaagaaactcagcttcaagctcttcaacatccaagttaaagaggtcacgcagaacgatggcacgacgactattgccaataaccttaccagcacggttcaagtgtttacggactcggagtatcagctcccgtacgtgctcgggtcggcgcaccaaggctgtctcccgccgtttccagcggacgtcttcatggtccctcagtatggatacctcaccctgaacaacggaagtcaagcggtgggacgctcatccttttactgcctggagtacttcccttcgcagatgctaaggactggaaataacttccaattcagctataccttcgaggatgtaccttttcacagcagctacgctcacagccagagtttggatcgcttgatgaatcctcttattgatcagtatctgtactacctgaacagaacgcaaggaacaacctctggaacaaccaaccaatcacggctgctttttagccaggctgggcctcagtctatgtctttgcaggccagaaattggctacctgggccctgctaccggcaacagagactttcaaagactgctaacgacaacaacaacagtaactttccttggacagcggccagcaaatatcatctcaatggccgcgactcgctggtgaatccaggaccagctatggccagtcacaaggacgatgaagaaaaatttttccctatgcacggcaatctaatatttggcaaagaagggacaacggcaagtaacgcagaattagataatgtaatgattacggatgaagaagagattcgtaccaccaatcctgtggcaacagagcagtatggaactgtggcaaataacttgcagagctcaaatacagctcccacgactagaactgtcaatgatcagggggccttacctggcatggtgtggcaagatcgtgacgtgtaccttcaaggacctatctgggcaaagattcctcacacggatggacactttcatccttctcctctgatgggaggctttggactgaaacatccgcctcctcaaatcatgatcaaaaatactccggtaccggcaaatcctccgacgactttcagcccggccaagtttgcttcatttatcactcagtactccactggacaggtcagcgtggaaattgagtgggagctacagaaagaaaacagcaaacgttggaatccagagattcagtacacttccaactacaacaagtctgttaatgtggactttactgtagacactaatggtgtttatagtgaacctcgccccattggcacccgttaccttacccgtcccctgtaa

SEQ ID NO: 5229 - protein, 736 aa, Artificial Sequence
  Description of Artificial Sequence: Synthetic polypeptide
MAADGYLPDWLEDNLSEGIREWWALQPGAPKPKANQQHQDNARGLVLPGYKYLGPGNGLDKGEPVNAADAAALEHDKAYDQQLKAGDNPYLKYNHADAEFQERLKEDTSFGGNLGRAVFQAKKRLLEPLGLVEEAAKTAPGKKRPVDQSPQEPDSSSGVGKSGKQPARKRLNFGQTGDSESVPDPQPLGEPPAAPTSLGSNTMASGGGAPMADNNEGADGVGNSSGNWHCDSQWLGDRVITTSTRTWALPTYNNHLYKQISSQSGASNDNHYFGYSTPWGYFDFNRFHCHFSPRDWQRLINNNWGFRPKKLSFKLFNIQVKEVTQNDGTTTIANNLTSTVQVFTDSEYQLPYVLGSAHQGCLPPFPADVFMVPQYGYLTLNNGSQAVGRSSFYCLEYFPSQMLRTGNNFQFSYTFEDVPFHSSYAHSQSLDRLMNPLIDQYLYYLNRTQGTTSGTTNQSRLLFSQAGPQSMSLQARNWLPGPCYRQQRLSKTANDNNNSNFPWTAASKYHLNGRDSLVNPGPAMASHKDDEEKFFPMHGNLIFGKEGTTASNAELDNVMITDEEEIRTTNPVATEQYGTVANNLQSSNTAPTTRTVNDQGALPGMVWQDRDVYLQGPIWAKIPHTDGHFHPSPLMGGFGLKHPPPQIMIKNTPVPANPPTTFSPAKFASFITQYSTGQVSVEIEWELQKENSKRWNPEIQYTSNYNKSVNVDFTVDTNGVYSEPRPIGTRYLTRPL

SEQ ID NO: 5230 - DNA, 2211 bp, Artificial Sequence
  Description of Artificial Sequence: Synthetic polynucleotide
atggctgccgatggttatcttccagattggctcgaggacaaccttagtgaaggaattcgcgagtggtgggctttgaaacctggagcccctcaacccaaggcaaatcaacaacatcaagacaacgctcgaggtcttgtgcttccgggttacaaataccttggacccggcaacggactcgacaagggggagccggtcaacgcagcagacgcggcggccctcgagcacgacaaggcctacgaccagcagctcaaggccggagacaacccgtacctcaagtacaaccacgccgacgccgagttccaggagcggctcaaagaagatacgtcttttgggggcaacctcgggcgagcagtcttccaggccaaaaagaggcttcttgaacctcttggtctggttgaggaagcggctaagacggctcctggaaagaagagaccggtagagccatcaccccagcgttctccagactcctctacgggcatcggcaagaaaggccaacagcccgctaaaaagagactcaattttggtcagactggcgactcagagtcagtccccgacccacaacctctcggagaacctccagcaacccccgctgctgtgggacctactacaatggcttcaggcggtggcgcaccaatggcagacaataacgagggtgccgatggagtgggtaattcctcaggaaattggcattgcgattcccaatggctgggcgacagagtcatcaccaccagcaccagaacctgggccctgcccacttacaacaaccatctctacaagcaaatctccagccaatcaggagcttcaaacgacaaccactactttggctacagcaccccttgggggtattttgactttaacagattccactgccacttttcaccacgtgactggcaaagactcatcaacaacaactggggattccgacccaagagactcaacttcaagctcttcaacatccaagtcaaggaggtcacgacgaatgatggcgtcacgaccatcgctaataaccttaccagcacggttcaagtcttctcggactcggagtaccagttgccgtacgtcctcggctctgcgcaccagggctgcctccctccgttcccggcggacgtgttcatgattccgcagtacggctacctaacgctcaacaatggcagccaagccgtgggacgttcatccttttactgcctggaatatttcccttctcagatgctgagaacgggcaacaactttaccttcagctacacttttgaggacgttcctttccacagcagctacgctcacagccagagtctggaccgtctcatgaatcctctcatcgaccagtacctgtattacttgagcagaacaaacactccaagtggaaccaccacgcagtcaaggcttcagttttctcaggccggagcgagtgacattcgggaccagtctaggaactggcttcctggaccctgttaccgccagcagcgcgtttctaaaacaaaaacagacaacaacaacagcaattttacctggactggtgcttcaaaatataaccttaatgggcgtgaatctataatcaaccctggcactgctatggcctcacacaaagacgacgaagacaagttctttcccatgagcggtgtcatgatttttggaaaagagagcgccggagcttcaaacactgcattggacaatgtcatgattacagacgaagaggaaattaaagccactaaccctgtggccaccgaaagatttgggaccgtggcagtcaatttccagagcagcagcacagaccctgcgaccggagatgtgcatgttatgggagccttacctggaatggtgtggcaagacagagacgtatacctgcagggtcctatttgggccaaaattcctcacacggatggacactttcacccgtctcctcttatgggcggctttggactcaagaacccgcctcctcagatcctcatcaaaaacacgcctgttcctgcgaatcctccggcggagttttcagctacaaagtttgcttcattcatcacccaatactccacaggacaagtgagtgtggaaattgaatgggagctgcagaaagaaaacagcaagcgctggaatcccgaagtgcagtacacatccaattatgcaaaatctgccaacgttgattttactgtggacaacaatggactttatactgagcctcgccccattggcacccgttaccttacccgtcccctgtaa

SEQ ID NO: 5231 - protein, 736 aa, Artificial Sequence
  Description of Artificial Sequence: Synthetic polypeptide
MAADGYLPDWLEDNLSEGIREWWALKPGAPQPKANQQHQDNARGLVLPGYKYLGPGNGLDKGEPVNAADAAALEHDKAYDQQLKAGDNPYLKYNHADAEFQERLKEDTSFGGNLGRAVFQAKKRLLEPLGLVEEAAKTAPGKKRPVEPSPQRSPDSSTGIGKKGQQPAKKRLNFGQTGDSESVPDPQPLGEPPATPAAVGPTTMASGGGAPMADNNEGADGVGNSSGNWHCDSQWLGDRVITTSTRTWALPTYNNHLYKQISSQSGASNDNHYFGYSTPWGYFDFNRFHCHFSPRDWQRLINNNWGFRPKRLNFKLFNIQVKEVTTNDGVTTIANNLTSTVQVFSDSEYQLPYVLGSAHQGCLPPFPADVFMIPQYGYLTLNNGSQAVGRSSFYCLEYFPSQMLRTGNNFTFSYTFEDVPFHSSYAHSQSLDRLMNPLIDQYLYYLSRTNTPSGTTTQSRLQFSQAGASDIRDQSRNWLPGPCYRQQRVSKTKTDNNNSNFTWTGASKYNLNGRESIINPGTAMASHKDDEDKFFPMSGVMIFGKESAGASNTALDNVMITDEEEIKATNPVATERFGTVAVNFQSSSTDPATGDVHVMGALPGMVWQDRDVYLQGPIWAKIPHTDGHFHPSPLMGGFGLKNPPPQILIKNTPVPANPPAEFSATKFASFITQYSTGQVSVEIEWELQKENSKRWNPEVQYTSNYAKSANVDFTVDNNGLYTEPRPIGTRYLTRPL

SEQ ID NO: 5232 - DNA, 2211 bp, Artificial Sequence
  Description of Artificial Sequence: Synthetic polynucleotide
atggctgccgatggttatcttccagattggctcgaggacaacctctctgagggcattcgcgagtggtgggacttgaaacctggagcccctaaacccaaggcaaatcaacaacatcaggacaacgctcgaggtcttgtgcttccgggttacaaataccttggacccggcaacggactcgacaagggggagccggtcaacgcagcagacgcggcggccctcgagcacgacaaggcctacgaccagcagctcaaggccggagacaacccgtacctcaagtacaaccacgccgacgccgagttccaggagcggctcaaagaagatacgtcttttgggggcaacctcgggcgagcagtcttccaggccaaaaagaggcttcttgaacctcttggtctggttgaggaagcggctaagacggctcctggaaagaagagaccggtagagccatcaccccagcgttctccagactcctctacgggcatcggcaagaaaggccaacagcccgctaaaaagagactcaattttggtcagactggcgactcagagtcagtccccgacccacaacctctcggagaacctccagcaacccccgctgctgtgggacctactacaatggcttcaggcggtggcgcaccaatggcagacaataacgagggtgccgatggagtgggtaattcctcaggaaattggcattgcgattcccaatggctgggcgacagagtcatcaccaccagcaccagaacctgggccctgcccacttacaacaaccatctctacaagcaaatctccagccaatcaggagcttcaaacgacaaccactactttggctacagcaccccttgggggtattttgactttaacagattccactgccacttttcaccacgtgactggcaaagactcatcaacaacaactggggattccgacccaagagactcaacttcaagctcttcaacatccaagtcaaggaggtcacgacgaatgatggcgtcacgaccatcgctaataaccttaccagcacggttcaagtcttctcggactcggagtaccagttgccgtacgtcctcggctctgcgcaccagggctgcctccctccgttcccggcggacgtgttcatgattccgcagtacggctacctaacgctcaacaatggcagccaagccgtgggacgttcatccttttactgcctggaatatttcccttctcagatgctgagaacgggcaacaactttaccttcagctacacttttgaggacgttcctttccacagcagctacgctcacagccagagtctggaccgtctcatgaatcccctcatcgaccagtacctgtattacttgagcagaacaaacactccaagtggaaccaccacgcagtcaaggcttcagttttctcaggccggagcgagtgacattcgggaccagtctaggaactggcttcctggaccctgttaccggcagcagcgcgtttctaaaacaaaaacagacaacaacaacagcaactttacctggactggtgcttcaaaatataaccttaatgggcgtgaatctataatcaaccctggcactgctatggcctcacacaaagacgacgaagacaagttctttcccatgagcggtgtcatgatttttggaaaggagagcgccggagcttcaaacactgcattggacaatgtcatgatcacagacgaagaggaaatcaaagccactaaccccgtggccaccgaaagatttgggactgtggcagtcaatctccagagcagcagcacagaccctgcgaccggagatgtgcatgttatgggagccttacctggaatggtgtggcaagacagagacgtgtacctgcagggtcctatttgggccaaaattcctcacacggatggacactttcacccgtctcctctcatgggcggctttggacttaagcacccgcctcctcagatcctcatcaaaaacacgcctgttcctgcgaatcctccggcagagttttcggctacaaagtttgcttcattcatcacccagtattccacaggacaagtgagtgtggaaattgaatgggagctgcagaaagaaaacagcaagcgctggaatcccgaagtgcagtacacatccaattatgcaaaatctgccaacgttgattttactgtggacaacaatggactttatactgagcctcgccccattggcacccgttacctcacccgtcccctgtaa

SEQ ID NO: 5233 - protein, 736 aa, Artificial Sequence
  Description of Artificial Sequence: Synthetic polypeptide
MAADGYLPDWLEDNLSEGIREWWDLKPGAPKPKANQQHQDNARGLVLPGYKYLGPGNGLDKGEPVNAADAAALEHDKAYDQQLKAGDNPYLKYNHADAEFQERLKEDTSFGGNLGRAVFQAKKRLLEPLGLVEEAAKTAPGKKRPVEPSPQRSPDSSTGIGKKGQQPAKKRLNFGQTGDSESVPDPQPLGEPPATPAAVGPTTMASGGGAPMADNNEGADGVGNSSGNWHCDSQWLGDRVITTSTRTWALPTYNNHLYKQISSQSGASNDNHYFGYSTPWGYFDFNRFHCHFSPRDWQRLINNNWGFRPKRLNFKLFNIQVKEVTTNDGVTTIANNLTSTVQVFSDSEYQLPYVLGSAHQGCLPPFPADVFMIPQYGYLTLNNGSQAVGRSSFYCLEYFPSQMLRTGNNFTFSYTFEDVPFHSSYAHSQSLDRLMNPLIDQYLYYLSRTNTPSGTTTQSRLQFSQAGASDIRDQSRNWLPGPCYRQQRVSKTKTDNNNSNFTWTGASKYNLNGRESIINPGTAMASHKDDEDKFFPMSGVMIFGKESAGASNTALDNVMITDEEEIKATNPVATERFGTVAVNLQSSSTDPATGDVHVMGALPGMVWQDRDVYLQGPIWAKIPHTDGHFHPSPLMGGFGLKHPPPQILIKNTPVPANPPAEFSATKFASFITQYSTGQVSVEIEWELQKENSKRWNPEVQYTSNYAKSANVDFTVDNNGLYTEPRPIGTRYLTRPL

SEQ ID NO: 5234 - DNA, 2214 bp, Artificial Sequence
  Description of Artificial Sequence: Synthetic polynucleotide
atggctgccgatggttatcttccagattggctcgaggacaaccttagtgaaggaattcgcgagtggtgggctttgaaacctggagcccctcaacccaaggcaaatcaacaacatcaagacaacgctcgaggtcttgtgcttccgggttacaaataccttggacccggcaacggactcgacaagggggagccggtcaacgcagcagacgcggcggccctcgagcacgacaaggcctacgaccagcagctgcaggcgggtgacaatccgtacctgcggtataaccacgccgacgccgagtttcaggagcgtctgcaagaagatacgtcttttgggggcaaccttggcagagcagtcttccaggccaaaaagaggatccttgagcctcttggtctggttgaggaagcagctaaaacggctcctggaaagaagaggcctgtagatcagtctcctcaggaaccggactcatcatctggtgttggcaaatcgggcaaacagcctgccagaaaaagactaaatttcggtcagactggcgactcagagtcagtcccagaccctcaacctctcggagaaccaccagcagcccccacaagtttgggatctaatacaatggcttcaggcggtggcgcaccaatggcagacaataacgagggtgccgatggggtgggtagttcctcgggaaattggcattgcgattcccaatgactgggggacagagtcatcaccaccagcacccgaacctgggccctgcccacctacaacaatcacctctacaagcaaatctccaacgggacatcgggaggagccaccaacgacaacacctacttcggctacagcaccccctgggggtattttgactttaacagattccactgccacttttcaccacgtgactggcagcgactcatcaacaacaactggggattccggcccaagagactcagcttcaagctcttcaacatccaggtcaaggaggtcacgcagaatgaaggcaccaagaccatcgccaataacctcaccagcaccatccaggtgtttacggactcggagtaccagctgccgtacgttctcggctctgcgcaccagggctgcctccctccgttcccggcggacgtgttcatgattccgcaatacggctacctgacgctcaacaatggcagccaagccgtgggacgttcatccttttactgcctggaatatttcccttctcagatgctgagaacgggcaacaactttaccttcagctacacctttgaggaagtgcctttccacagcagctacgcgcacagccagagcttggaccggctgatgaatcctctgattgaccagtacctgtactacttgtctcggactcaaacaacaggaggcacggcaaatacgcagactctgggcttcagccaaggtgggcctaatacaatggccaatcaggcaaagaactggctgccaggaccctgttaccgccaacaacgcgtctcaacgacaaccgggcaaaacaacaatagcaactttgcctggactgctgggaccaaataccatctgaatggaagaaattcattggctaatcctggcatcgctatggcaacacacaaagacgacgaggagcgtttttttcccagtaacgggatcctgatttttggcaaacaaaatgctgccagagacaatgcggattacagcgatgtcatgctcaccagcgaggaagaaatcaaaaccactaaccctgtggctacagaggaatacggtatcgtggcagataacttgcagcagcaaaacacggctcctcaaattggaactgtcaacagccagggggccttacccggtatggtctggcagaaccgggacgtgtacctgcagggtcccatctgggccaagattcctcacacggacggcaacttccacccgtctccgctgatgggcggctttggcctgaaacatcctccgcctcagatcctgatcaagaacacgcctgtacctgcggatcctccgaccaccttcaaccagtcaaagctgaactctttcatcacgcaatacagcaccggacaggtcagcgtggagatcgagtgggagctgcagaaggaaaacagcaagcgctggaacccggagatccagtacacttccaactattacaagtctaataatgttgaatttgctgttaatactgaaggtgtatatagtgaaccccgccccattggcaccagatacctgactcgtaatctgtaa

SEQ ID NO: 5235 - protein, 736 aa, Artificial Sequence
  Description of Artificial Sequence: Synthetic polypeptide
MAADGYLPDWLEDNLSEGIREWWALKPGAPQPKANQQHQDNARGLVLPGYKYLGPGNGLDKGEPVNAADAAALEHDKAYDQQLQAGDNPYLRYNHADAEFQERLQEDTSFGGNLGRAVFQAKKRILEPLGLVEEAAKTAPGKKRPVDQSPQEPDSSSGVGKSGKQPARKRLNFGQTGDSESVPDPQPLGEPPAAPTSLGSNTMASGGGAPMADNNEGADGVGSSSGNWHCDSQLGDRVITTSTRTWALPTYNNHLYKQISNGTSGGATNDNTYFGYSTPWGYFDFNRFHCHFSPRDWQRLINNNWGFRPKRLSFKLFNIQVKEVTQNEGTKTIANNLTSTIQVFTDSEYQLPYVLGSAHQGCLPPFPADVFMIPQYGYLTLNNGSQAVGRSSFYCLEYFPSQMLRTGNNFTFSYTFEEVPFHSSYAHSQSLDRLMNPLIDQYLYYLSRTQTTGGTANTQTLGFSQGGPNTMANQAKNWLPGPCYRQQRVSTTTGQNNNSNFAWTAGTKYHLNGRNSLANPGIAMATHKDDEERFFPSNGILIFGKQNAARDNADYSDVMLTSEEEIKTTNPVATEEYGIVADNLQQQNTAPQIGTVNSQGALPGMVWQNRDVYLQGPIWAKIPHTDGNFHPSPLMGGFGLKHPPPQILIKNTPVPADPPTTFNQSKLNSFITQYSTGQVSVEIEWELQKENSKRWNPEIQYTSNYYKSNNVEFAVNTEGVYSEPRPIGTRYLTRNL

SEQ ID NO: 5236 - DNA, 2214 bp, Artificial Sequence
  Description of Artificial Sequence: Synthetic polynucleotide
atggctgccgatggttatcttccagattggctcgaggacaaccttagtgaaggaattcgcgagtggtgggctttgaaacctggagcccctcaacccaaggcaaatcaacaacatcaagacaacgctcgaggtcttgtgcttccgggttacaaataccttggacccggcaacggactcgacaagggggagccggtcaacgcagcagacgcggcggccctcgagcacgacaaggcctacgaccagcagctgcaggcgggtgacaatccgtacctgcggtataaccacgccgacgccgagtttcaggagcgtctgcaagaagatacgtcttttgggggcaaccttggcagagcagtcttccaggccaaaaagaggatccttgagcctcttggtctggttgaggaagcagctaaaacggctcctggaaagaagaggcctgtagatcagtctcctcaggaaccggactcatcatctggtgttggcaaatcgggcaaacagcctgccagaaaaagactaaatttcggtcagactggcgactcagagtcagtcccagaccctcaacctctcggagaaccaccagcagcccccacaagtttgggatctaatacaatggcttcaggcggtggcgcaccaatggcagacaataacgagggtgccgatggggtgggtagttcctcgggaaattggcattgcgattcccaatggctgggggacagagtcatcaccaccagcacccgaacctgggccctgcccacctacaacaatcacctctacaagcaaatctccaacgggacatcgggaggagccaccaacgacaacacctacttcggctacagcaccccctgggggtattttgactttaacagattccactgccacttttcaccacgtgactggcagcgactcatcaacaacaactggggattccggcccaagagactcagcttcaagctcttcaacatccaggtcaaggaggtcacgcagaatgaaggcaccaagaccatcgccaataacctcaccagcaccatccaggtgtttacggactcggagtaccagctgccgtacgttctcggctctgcgcaccagggctgcctccctccgttcccggcggacgtgttcatgattccgcaatacggctacctgacgctcaacaatggcagccaagccgtgggacgttcatccttttactgcctggaatatttcccttctcagatgctgagaacgggcaacaactttaccttcagctacacctttgaggaagtgccttttcacagcagctacgcgcacagccagagcttggaccggctgatgaatcctctgattgaccagtacctgtactacttgtctcggactcaaacaacaggaggcacggcaaatacgcagactctgggcttcagccaaggtgggcctaatacaatggccaatcaggcaaagaactggctgccaggaccctgttaccgccaacaacgcgtctcaacgacaaccgggcaaaacaacaatagcaactttgcctggactgctgggaccaaataccatctgaatggaagaaattcattggctaatcctggcatcgctatggcaacacacaaagacgacgaggagcgtttttttcccagtaacgggatcctgatttttggcaaacaaaatgctgccagagacaatgcggattacagcgatgtcatgctcaccagcgaggaagaaatcaaaaccactaaccctgtggctacagaggaatacggtatcgtggcagataacttgcagcagcaaaacacggctcctcaaattggaactgtcaacagccagggggccttacccggtatggtctggcagaaccgggacgtgtacctgcagggtcccatctgggccaagattcctcacacggacggcaacttccacccgtctccgctgatgggcggctttggcctgaaacatcctccgcctcagatcctgatcaagaacacgcctgtacctgcggatcctccgaccaccttcaaccagtcaaagctgaactctttcatcacgcaatacagcaccggacaggtcagcgtggagatcgagtgggagctgcagaaggaaaacagcaagcgctggaacccggagatccagtacacttccaactattacaagtctaataatgttgaatttgctgttaatactgaaggtgtatatagtgaaccccgccccattggcaccagatacctgactcgtaatctgtaa

SEQ ID NO: 5237 - protein, 737 aa, Artificial Sequence; identical to SEQ ID NO: 5225
  Description of Artificial Sequence: Synthetic polypeptide

SEQ ID NO: 5238 - DNA, 2211 bp, Artificial Sequence
  Description of Artificial Sequence: Synthetic polynucleotide
atggctgccgatggttatcttccagattggctcgaggacaacctctctgagggcattcgcgagtggtgggacttgaaacctggagcccctaaacccaaggcaaatcaacaacatcaggacaacgctcgaggtcttgtgcttccgggttacaaataccttggacccggcaacggactcgacaagggggagccggtcaacgcagcagacgcggcggccctcgagcacgacaaggcctacgaccagcagctcaaggccggagacaacccgtacctcaagtacaaccacgccgacgccgagttccaggagcggctcaaagaagatacgtcttttgggggcaacctcgggcgagcagtcttccaggccaaaaagaggcttcttgaacctcttggtctggttgaggaagcggctaagacggctcctggaaagaagagaccggtagagccatcaccccagcgttctccagactcctctacgggcatcggcaagaaaggccaacagcccgctaaaaagagactcaattttggtcagactggcgactcagagtcagtccccgacccacaacctctcggagaacctccagcaacccccgctgctgtgggacctactacaatggcttcaggcggtggcgcaccaatggcagacaataacgagggtgccgatggagtgggtaattcctcaggaaattggcattgcgattcccaatggctgggcgacagagtcatcaccaccagcaccagaacctgggccctgcccacttacaacaaccatctctacaagcaaatctccagccaatcaggagcttcaaacgacaaccactactttggctacagcaccccttgggggtattttgactttaacagattccactgccacttttcaccacgtgactggcaaagactcatcaacaacaactggggattccgacccaagagactcaacttcaagctcttcaacatccaagtcaaggaggtcacgacgaatgatggcgtcacgaccatcgctaataaccttaccagcacggttcaagtcttctcggactcggagtaccagttgccgtacgtcctcggctctgcgcaccagggctgcctccctccgttcccggcggacgtgttcatgattccgcagtacggctacctaacgctcaacaatggcagccaagccgtgggacgttcatccttttactgcctggaatatttcccttctcagatgctgagaacgggcaacaactttaccttcagctacacttttgaggacgttcctttccacagcagctacgctcacagccagagtctggaccgtctcatgaatcctctcatcgaccagtacctgtattacttgagcagaacaaacactccaagtggaaccaccacgcagtcaaggcttcagttttctcaggccggagcgagtgacattcgggaccagtctaggaactggcttcctggaccctgttaccgccagcagcgcgtttctaaaacaaaaacagacaacaacaacagcaattttacctggactggtgcttcaaaatataaccttaatgggcgtgaatctataatcaaccctggcactgctatggcctcacacaaagacgacgaagacaagttctttcccatgagcggtgtcatgatttttggaaaagagagcgccggagcttcaaacactgcattggacaatgtcatgattacagacgaagaggaaattaaagccactaaccctgtggccaccgaaagatttgggaccgtggcagtcaatttccagagcagcagcacagaccctgcgaccggagatgtgcatgctatgggagcattacctggcatggtgtggcaagatagagacgtgtacctgcagggtcccatttgggccaaaattcctcacacagatggacactttcacccgtctcctcttatgggcggctttggactcaagaacccgcctcctcagatcctcatcaaaaacacgcctgttcctgcgaatcctccggcggagttttcagctacaaagtttgcttcattcatcacccaatactccacaggacaagtgagtgtggaaattgaatgggagctgcagaaagaaaacagcaagcgctggaatcccgaagtgcagtacacatccaattatgcaaaatctgccaacgttgattttactgtggacaacaatggactttatactgagcctcgccccattggcacccgttaccttacccgtcccctgtaa

SEQ ID NO: 5239 - protein, 736 aa, Artificial Sequence
  Description of Artificial Sequence: Synthetic polypeptide
MAADGYLPDWLEDNLSEGIREWWDLKPGAPKPKANQQHQDNARGLVLPGYKYLGPGNGLDKGEPVNAADAAALEHDKAYDQQLKAGDNPYLKYNHADAEFQERLKEDTSFGGNLGRAVFQAKKRLLEPLGLVEEAAKTAPGKKRPVEPSPQRSPDSSTGIGKKGQQPAKKRLNFGQTGDSESVPDPQPLGEPPATPAAVGPTTMASGGGAPMADNNEGADGVGNSSGNWHCDSQWLGDRVITTSTRTWALPTYNNHLYKQISSQSGASNDNHYFGYSTPWGYFDFNRFHCHFSPRDWQRLINNNWGFRPKRLNFKLFNIQVKEVTTNDGVTTIANNLTSTVQVFSDSEYQLPYVLGSAHQGCLPPFPADVFMIPQYGYLTLNNGSQAVGRSSFYCLEYFPSQMLRTGNNFTFSYTFEDVPFHSSYAHSQSLDRLMNPLIDQYLYYLSRTNTPSGTTTQSRLQFSQAGASDIRDQSRNWLPGPCYRQQRVSKTKTDNNNSNFTWTGASKYNLNGRESIINPGTAMASHKDDEDKFFPMSGVMIFGKESAGASNTALDNVMITDEEEIKATNPVATERFGTVAVNFQSSSTDPATGDVHAMGALPGMVWQDRDVYLQGPIWAKIPHTDGHFHPSPLMGGFGLKNPPPQILIKNTPVPANPPAEFSATKFASFITQYSTGQVSVEIEWELQKENSKRWNPEVQYTSNYAKSANVDFTVDNNGLYTEPRPIGTRYLTRPL

SEQ ID NO: 5240 - DNA, 2211 bp, Artificial Sequence
  Description of Artificial Sequence: Synthetic polynucleotide
atggctgccgatggttatcttccagattggctcgaggacaaccttagtgaaggaattcgcgagtggtgggcgctgaaacctggagccccgaagcccaaagccaaccagcaaaagcaggacgacggccggggtctggtgcttccgggttacaaatacctcggacccggtaacggactcgacaaaggagagccggtcaacgaggcggacgcggcagccctcgagcacgacaaggcctacgaccagcagctcaaagcgggtgacaatccgtacctgcggtataaccacgccgacgccgagtttcaggagcgtctgcaagaagatacgtcttttgggggcaacctcgggcgagcagtcttccaggccaagaagcgggttctcgaacctctcggtctggttgaggaaggcgctaagacggctcccggaaagaaacgtccggtagagcagtcgccacaagagccagactcctctacgggcatcggcaagaaaggccaacagcccgccagaaaaagactcaatttcggtcagactggcgactcagagtcagttccagaccctcaacctctcggagaacctccagcagcgccctctggtgtgggacctactacaatggcttcaggcggtggcgcaccaatggcagacaataacgaaggcgccgacggagtgggtaatgcctcaggaaattggcattgcgattccacatggctgggcgacagagtcatcaccaccagcacccgaacatgggccttgcccacctataacaaccacctctacaagcaaatctccagtgcttcaacgggggccagcaacgacaacacctacttcggctacagcaccccctgggggtattttgatttcaacagattccactgccatttctcaccacgtgactggcagcgactcatcaacaacaattggggattccggcccaagagactcaacttcaaactcttcaacatccaagtcaaggaggtcacgacgaatgatggcgtcacgaccatcgctaataaccttaccagcacggttcaagtcttctcggactcggagtaccagttgccgtacgtcctcggctctgcgcaccagggctgcctccctccgttcccggcggacgtgttcatgattccgcagtacggctacctaacgctcaacaatggcagccaggcagtgggacggtcatccttttactgcctggaatatttcccatcgcagatgctgagaacgggcaataactttaccttcagctacaccttcgaggacgtgcctttccacagcagctacgcgcacagccagagcctggaccggctgatgaatcctctcatcgaccagtacctgtattacctgaacagaactcagaatcagtccggaagtgcccaaaacaaggacttgctgtttagccgggggtctccagctggcatgtctgttcagcccaaaaactggctacctggaccctgttatcggcagcagcgcgtttctaaaacaaaaacagacaacaacaacagcaattttacctggactggtgcttcaaaatataacctcaatgggcgtgaatccatcatcaaccctggcactgctatggcctcacacaaagacgacgaagacaagttctttcccatgagcggtgtcatgatttttggaaaagagagcgccggagcttcaaacactgcattggacaatgtcatgattacagacgaagaggaaattaaagccactaaccctgtggccaccgaaagatttgggaccgtggcagtcaatttccagagcagcagcacagaccctgcgaccggagatgtgcatgttatgggagccttacctggaatggtgtggcaagacagagacgtatacctgcagggtcctatttgggccaaaattcctcacacagatggacactttcacccgtctcctcttatgggcggctttggactcaagaacccgcctcctcagatcctcatcaaaaacacgcctgttcctgcgaatcctccggcagagttttcggctacaaagtttgcttcattcatcacccagtattccacaggacaagtgagcgtggagattgaatgggagctgcagaaagaaaacagcaaacgctggaatcccgaagtgcagtatacatctaactatgcaaaatctgccaacgttgatttcactgtggacaacaatggactttatactgagcctcgccccattggcacccgttacctcacccgtcccctgtaa

SEQ ID NO: 5241 - protein, 736 aa, Artificial Sequence
  Description of Artificial Sequence: Synthetic polypeptide
MAADGYLPDWLEDNLSEGIREWWALKPGAPKPKANQQKQDDGRGLVLPGYKYLGPGNGLDKGEPVNEADAAALEHDKAYDQQLKAGDNPYLRYNHADAEFQERLQEDTSFGGNLGRAVFQAKKRVLEPLGLVEEGAKTAPGKKRPVEQSPQEPDSSTGIGKKGQQPARKRLNFGQTGDSESVPDPQPLGEPPAAPSGVGPTTMASGGGAPMADNNEGADGVGNASGNWHCDSTWLGDRVITTSTRTWALPTYNNHLYKQISSASTGASNDNTYFGYSTPWGYFDFNRFHCHFSPRDWQRLINNNWGFRPKRLNFKLFNIQVKEVTTNDGVTTIANNLTSTVQVFSDSEYQLPYVLGSAHQGCLPPFPADVFMIPQYGYLTLNNGSQAVGRSSFYCLEYFPSQMLRTGNNFTFSYTFEDVPFHSSYAHSQSLDRLMNPLIDQYLYYLNRTQNQSGSAQNKDLLFSRGSPAGMSVQPKNWLPGPCYRQQRVSKTKTDNNNSNFTWTGASKYNLNGRESIINPGTAMASHKDDEDKFFPMSGVMIFGKESAGASNTALDNVMITDEEEIKATNPVATERFGTVAVNFQSSSTDPATGDVHVMGALPGMVWQDRDVYLQGPIWAKIPHTDGHFHPSPLMGGFGLKNPPPQILIKNTPVPANPPAEFSATKFASFITQYSTGQVSVEIEWELQKENSKRWNPEVQYTSNYAKSANVDFTVDNNGLYTEPRPIGTRYLTRPL

SEQ ID NO: 5242 - DNA, 2205 bp, Artificial Sequence
  Description of Artificial Sequence: Synthetic polynucleotide
atggctgctgacggttatcttccagattggctcgaggacaacctttctgaaggcattcgtgagtggtgggctctgaaacctggagtccctcaacccaaagcgaaccaacaacaccaggacaaccgtcggggtcttgtgcttccgggttacaaatacctcggacccggtaacggactcgacaaaggagagccggtcaacgaggcggacgcggcagccctcgaacacgacaaggcctacgaccagcagctcaaggccggagacaacccgtacctcaagtacaaccacgccgacgccgagttccaggagcggctcaaagaagatacgtcttttgggggcaacctcgggcgagcagtcttccaggccaaaaagaggcttcttgaacctcttggtctggttgaggaagcggctaagacggctcctggaaagaagaggcctgtagagcagtctcctcaggaaccggactcctccgcgggtattggcaaatcgggtgcacagcccgctaaaaagagactcaatttcggtcagactggcgacacagagtcagtcccagaccctcaaccaatcggagaacctcccgcagccccctcaggtgtgggatctcttacaatggcttcaggtggtggcgcaccagtggcagacaataacgaaggtgccgatggagtgggtagttcctcgggaaattggcattgcgattcccaatggctgggggacagagtcatcaccaccagcacccgaacctgggccctgcccacctacaacaaccacctctacaaacaaatttccagccaatcaggagcctcgaacgacaatcactactttggctacagcaccccttgggggtattttgacttcaacagattccactgccacttttcaccacgtgactggcagcgactcatcaacaacaactggggattccggcccaagagactcagcttcaagctcttcaacatccaggtcaaagaggttacggacaacaatggagtcaagaccatcgccaataaccttaccagcacggtccaggtcttcacggactcagactatcagctcccgtacgtgctcgggtcggctcacgagggctgcctcccgccgttcccagcggacgttttcatgattcctcagtacgggtatctgacgcttaatgatggaagccaggccgtgggtcgttcgtccttttactgcctggaatatttcccgtcgcaaatgctaagaacgggtaacaacttccagttcagctacgagtttgagaacgtacctttccatagcagctacgctcacagccaaagcctggaccgactaatgaatccactcatcgaccaatacttgtactatctctcaaagactattaacggttctggacagaatcaacaaacgctaaaattcagtgtggccggacccagcaacatggctgtccagggaagaaactacatacctggacccagctaccgacaacaacgtgtctcaaccactgtgactcaaaacaacaacagcgaatttgcttggcctggagcttcttcttgggctctcaatggacgtaatagcttgatgaatcctggacctgctatggccagccacaaagaaggagaggaccgtttctttcctttgtctggatctttaatttttggcaaacaaggaactggaagagacaacgtggatgcggacaaagtcatgataaccaacgaagaagaaattaaaactactaacccggtagcaacggagtcctatggacaagtggccacaaaccaccagagtgcccaagcacaggcgcagaccggctgggttcaaaaccaaggaatacttccgggtatggtttggcaggacagagatgtgtacctgcaaggacccatctgggccaagattcctcacacggacggcaacttccacccgtctccgctgatgggcggctttggcctgaaacatcctccgcctcagatcctgatcaagaacacgcctgtacctgcggatcctccgaccaccttcaaccagtcaaagctgaactctttcatcacgcaatacagcaccggacaggtcagcgtggaaattgaatgggagctgcagaaggaaaacagcaagcgctggaatcccgaagtgcagtatacatctaactatgcaaaatctgccaacgttgatttcactgtggacaacaatggactttatactgagcctcgccccattggcacccgttacctcacccgtcccctgtaa

SEQ ID NO: 5243 - protein, 734 aa, Artificial Sequence
  Description of Artificial Sequence: Synthetic polypeptide
MAADGYLPDWLEDNLSEGIREWWALKPGVPQPKANQQHQDNRRGLVLPGYKYLGPGNGLDKGEPVNEADAAALEHDKAYDQQLKAGDNPYLKYNHADAEFQERLKEDTSFGGNLGRAVFQAKKRLLEPLGLVEEAAKTAPGKKRPVEQSPQEPDSSAGIGKSGAQPAKKRLNFGQTGDTESVPDPQPIGEPPAAPSGVGSLTMASGGGAPVADNNEGADGVGSSSGNWHCDSQWLGDRVITTSTRTWALPTYNNHLYKQISSQSGASNDNHYFGYSTPWGYFDFNRFHCHFSPRDWQRLINNNWGFRPKRLSFKLFNIQVKEVTDNNGVKTIANNLTSTVQVFTDSDYQLPYVLGSAHEGCLPPFPADVFMIPQYGYLTLNDGSQAVGRSSFYCLEYFPSQMLRTGNNFQFSYEFENVPFHSSYAHSQSLDRLMNPLIDQYLYYLSKTINGSGQNQQTLKFSVAGPSNMAVQGRNYIPGPSYRQQRVSTTVTQNNNSEFAWPGASSWALNGRNSLMNPGPAMASHKEGEDRFFPLSGSLIFGKQGTGRDNVDADKVMITNEEEIKTTNPVATESYGQVATNHQSAQAQAQTGWVQNQGILPGMVWQDRDVYLQGPIWAKIPHTDGNFHPSPLMGGFGLKHPPPQILIKNTPVPADPPTTFNQSKLNSFITQYSTGQVSVEIEWELQKENSKRWNPEVQYTSNYAKSANVDFTVDNNGLYTEPRPIGTRYLTRPL

SEQ ID NO: 5244 - DNA, 2211 bp, Artificial Sequence
  Description of Artificial Sequence: Synthetic polynucleotide
atggctgccgatggttatcttccagattggctcgaggacaacctctctgagggcattcgcgagtggtgggcgctgaaacctggagccccgaagcccaaagccaaccagcaaaagcaggacgacggccggggtctggtgcttcctggctacaagtacctcggacccttcaacggactcgacaagggggagcccgtcaacgcggcggacgcagcggccctcgagcacgacaaggcctacgaccagcagctgcaggcgggtgacaatccgtacctgcggtataaccacgccgacgccgagtttcaggagcgtctgcaagaagatacgtcttttgggggcaacctcgggcgagcagtcttccaggccaagaagtgggttctcgaacctctcggtctggttgaggaaggcgctaagacggctcctggaaagaaacgtccggtagagcagtcgccacaagagccagactcctcctcgggcatcggcaagacaggccagcagcccgctaaaaagagactcaattttggtcagactggcgactcagagtcagtccccgacccacaacctctcggagaacctccagcaacccccgctgctgtgggacctactacaatggcttcaggcggtggcgcaccaatggcagacaataacgaaggcgccgacggagtgggtaatgcctcaggaaattggcattgcgattccacatggctgggcgacagagtcatcaccaccagcacccgcacctgggccttgcccacctacaataaccacctctacaagcaaatctccagtgcttcaacgggggccagcaacgacaaccactacttcggctacagcaccccctgggggtattttgatttcaacagattccactgccatttctcaccacgtgactggcagcgactcatcaacaacaattggggattccggcccaagagactcaacttcaagctcttcaacatccaagtcaaggaggtcacgacgaatgatggcgtcacaaccatcgctaataaccttaccagcacggttcaagtcttctcggactcggagtaccagcttccgtacgtcctcggctctgcgcaccagggctgcctccctccgttcccggcggacgtgttcatgattccgcaatacggctacctgacgctcaacaatggcagccaagccgtgggacgttcatccttttactgcctggaatatttcccttctcagatgctgagaacgggcaacaactttaccttcagctacacctttgaggaagtgcctttccacagcagctacgcgcacagccagagcctggaccggctgatgaatcctctcatcgaccaatacctgtattacctgaacagaactcaaaatcagtccggaagtgcccaaaacaaggacttgctgtttagccgtgggtctccagctggcatgtctgttcagcccaaaaactggctacctggaccctgttatcggcagcagcgcgtttctaaaacaaaaacagacaacaacaacagcaattttacctggactggtgcttcaaaatataacctcaatgggcgtgaatccatcatcaaccctggcactgctatggcctcacacaaagacgacgaagacaagttctttcccatgagcggtgtcatgatttttggaaaggagagcgccggagcttcaaacactgcattggacaatgtcatgatcaccgacgaagaggaaatcaaagccactaaccccgtggccaccgaaagatttgggactgtggcagtcaatctccagagcagcagcacagaccctgcgaccggagatgtgcatgttatgggagccttacctggcatggtgtggcaagatagagacgtgtacctgcagggtcccatttgggccaaaattcctcacacagatggacactttcacccgtctcctcttatgggcggctttggactcaagaacccgcctcctcagatcctcatcaaaaacacgcctgttcctgcgaatcctccggcggagttttcagctacaaagtttgcttcattcatcacccaatactccacaggacaagtgagtgtggaaattgaatgggagctgcagaaagaaaacagcaagcgctggaatcccgaagtgcagtacacatccaattatgcaaaatctgccaacgttgattttactgtggacaacaatggactttatactgagcctcgccccattggcacccgttacctcacccgtcccctgtaa

SEQ ID NO: 5245 - protein, 736 aa, Artificial Sequence
  Description of Artificial Sequence: Synthetic polypeptide
MAADGYLPDWLEDNLSEGIREWWALKPGAPKPKANQQKQDDGRGLVLPGYKYLGPFNGLDKGEPVNAADAAALEHDKAYDQQLQAGDNPYLRYNHADAEFQERLQEDTSFGGNLGRAVFQAKKWVLEPLGLVEEGAKTAPGKKRPVEQSPQEPDSSSGIGKTGQQPAKKRLNFGQTGDSESVPDPQPLGEPPATPAAVGPTTMASGGGAPMADNNEGADGVGNASGNWHCDSTWLGDRVITTSTRTWALPTYNNHLYKQISSASTGASNDNHYFGYSTPWGYFDFNRFHCHFSPRDWQRLINNNWGFRPKRLNFKLFNIQVKEVTTNDGVTTIANNLTSTVQVFSDSEYQLPYVLGSAHQGCLPPFPADVFMIPQYGYLTLNNGSQAVGRSSFYCLEYFPSQMLRTGNNFTFSYTFEEVPFHSSYAHSQSLDRLMNPLIDQYLYYLNRTQNQSGSAQNKDLLFSRGSPAGMSVQPKNWLPGPCYRQQRVSKTKTDNNNSNFTWTGASKYNLNGRESIINPGTAMASHKDDEDKFFPMSGVMIFGKESAGASNTALDNVMITDEEEIKATNPVATERFGTVAVNLQSSSTDPATGDVHVMGALPGMVWQDRDVYLQGPIWAKIPHTDGHFHPSPLMGGFGLKNPPPQILIKNTPVPANPPAEFSATKFASFITQYSTGQVSVEIEWELQKENSKRWNPEVQYTSNYAKSANVDFTVDNNGLYTEPRPIGTRYLTRPL

SEQ ID NO: 5246 - DNA, 2214 bp, Artificial Sequence
  Description of Artificial Sequence: Synthetic polynucleotide
atggctgccgatggttatcttccagattggctcgaggacaaccttagtgaaggaattcgcgagtggtgggctttgaaacctggagcccctcaacccaaggcaaatcaacaacatcaagacaacgctcgaggtcttgtgcttccgggttacaaataccttggacccggcaacggactcgacaagggggagccggtcaacgcagcagacgcggcggccctcgagcacgacaaggcctacgaccagcagctgcaggcgggtgacaatccgtacctgcggtataaccacgccgacgccgagtttcaggagcgtctgcaagaagatacgtcttttgggggcaaccttggcagagcagtcttccaggccaaaaagaggatccttgagcctcttggtctggttgaggaagcagctaaaacggctcctggaaagaagaggcctgtagatcagtctcctcaggaaccggactcatcatctggtgttggcaaatcgggcaaacagcctgccagaaaaagactaaatttcggtcagactggcgactcagagtcagtcccagaccctcaacctctcggagaaccaccagcagcccccacaagtttgggatctaatacaatggcttcaggcggtggcgcaccaatggcagacaataacgagggtgccgatggggtgggtagttcctcgggaaattggcattgcgattcccaatggctgggggacagagtcatcaccaccagcacccgaacctgggccctgcccacctacaacaatcacctctacaagcaaatctccaacgggacatcgggaggagccaccaacgacaacacctacttcggctacagcaccccctgggggtattttgactttaacagattccactgccacttttcaccacgtgactggcagcgactcatcaacaacaactggggattccggcccaagagactcagcttcaagctcttcaacatccaggtcaaggaggtcacgcagaatgaaggcaccaagaccatcgccaataacctcaccagcaccatccaggtgtttacggactcggagtaccagctgccgtacgttctcggctcggcgcaccagggctgcctccctccgttcccggcggacgtcttcatggtgccacagtatggatacctgacgctcaacaatggcagccaagccgtgggacgttcatccttttactgcctggaatatttcccttctcagatgctgagaacgggcaacaactttaccttcagctacacctttgaggaagtgcctttccacagcagctacgcgcacagccagagcttggaccggctgatgaatcctctgattgaccagtacctgtactacttgtctcggactcaaacaacaggaggcacggcaaatacgcagactctgggcttcagccaaggtgggcctaatacaatggccaatcaggcaaagaactggctgccaggaccctgttaccgccaacaacgcgtctcaacgacaaccgggcaaaacaacaatagcaactttgcctggactgctgggaccaaataccatctgaatggaagaaattcattggctaatcctggcatcgctatggcaacacacaaagacgacgaggagcgtttttttcccagtaacgggatcctgatttttggcaaacaaaatgctgccagagacaatgcggattacagcgatgtcatgctcaccagcgaggaagaaatcaaaaccactaaccctgtggctacagaggaatacggtatcgtggcagataacttgcagcagcaaaacacggctcctcaaattggaactgtcaacagccagggggacttacccggtatggtctggcagaaccgggacgtgtacctgcagggtcccatctgggccaagattcctcacacggacggcaacttccacccgtctccgctgatgggcggctttggcctgaaacatcctccgcctcagatcctgatcaagaacacgcctgtacctgcggatcctccgaccaccttcaaccagtcaaagctgaactctttcatcacgcaatacagcaccggacaggtcagcgtggagatcgagtgggagctgcagaaggaaaacagcaagcgctggaacccggagatccagtacacttccaactattacaagtctaataatgttgaatttgctgttaatactgaaggtgtatatagtgaaccccgccccattggcaccagatacctgactcgtaatctgtaa

SEQ ID NO: 5247 - protein, 737 aa, Artificial Sequence
  Description of Artificial Sequence: Synthetic polypeptide
MAADGYLPDWLEDNLSEGIREWWALKPGAPQPKANQQHQDNARGLVLPGYKYLGPGNGLDKGEPVNAADAAALEHDKAYDQQLQAGDNPYLRYNHADAEFQERLQEDTSFGGNLGRAVFQAKKRILEPLGLVEEAAKTAPGKKRPVDQSPQEPDSSSGVGKSGKQPARKRLNFGQTGDSESVPDPQPLGEPPAAPTSLGSNTMASGGGAPMADNNEGADGVGSSSGNWHCDSQWLGDRVITTSTRTWALPTYNNHLYKQISNGTSGGATNDNTYFGYSTPWGYFDFNRFHCHFSPRDWQRLINNNWGFRPKRLSFKLFNIQVKEVTQNEGTKTIANNLTSTIQVFTDSEYQLPYVLGSAHQGCLPPFPADVFMVPQYGYLTLNNGSQAVGRSSFYCLEYFPSQMLRTGNNFTFSYTFEEVPFHSSYAHSQSLDRLMNPLIDQYLYYLSRTQTTGGTANTQTLGFSQGGPNTMANQAKNWLPGPCYRQQRVSTTTGQNNNSNFAWTAGTKYHLNGRNSLANPGIAMATHKDDEERFFPSNGILIFGKQNAARDNADYSDVMLTSEEEIKTTNPVATEEYGIVADNLQQQNTAPQIGTVNSQGDLPGMVWQNRDVYLQGPIWAKIPHTDGNFHPSPLMGGFGLKHPPPQILIKNTPVPADPPTTFNQSKLNSFITQYSTGQVSVEIEWELQKENSKRWNPEIQYTSNYYKSNNVEFAVNTEGVYSEPRPIGTRYLTRNL

SEQ ID NO: 5248 - DNA, 2205 bp, Artificial Sequence
  Description of Artificial Sequence: Synthetic polynucleotide
atggctgctgacggttatcttccagattggctcgaggacaacctttctgaaggcattcgtgagtggtgggctctgaaacctggagtccctcaacccaaagcgaaccaacaacaccaggacaactgtcggggtcttgtgcttccgggttacaaatacctcggacccggtaacggactcgacaaaggagagccggtcaacgaggcggacgcggcagccctcgaacacgacaaggcctacgaccagcagctcaaggccggagacaacccgtacctcaagtacaaccacgccgacgccgagttccaggagcggctcaaagaagatacgtcttttgggggcaacctcgggcgagcagtcttccagaccaaaaagaggcttcttgaacctcttggtctggttgaggaagcggctaagacggctcctggaaagaagaggcctgtagagcagtctcctcaggaaccggactcctccgcgggtattggcaaatcgggtgcacagcccgctaaaaagagactcaatttcggtcagactggcgacacagagtcagtcccagaccctcaaccaatcggagaacctcccgcagccccctcaggtgtgggatctcttacaatggcttcaggtggtggcgcaccagtggcagacaataacgaaggtgccgatggagtgggtagttcctcgggaaattggcattgcgattcccaatggctgggggacagagtcatcaccaccagcacccgaacctgggccctgcccacctacaacaaccacctctacaaacaaatttccagccaatcaggagcctcgaacgacaatcactactttggctacagcaccccttgggggtattttgacttcaacagattccactgccacttttcaccacgtgactggcagcgactcatcaacaacaactggggattccggcccaagagactcagcttcaagctcttcaacatccaggtcaaagaggttacggacaacaatggagtcaagaccatcgccaataaccttaccagcacggtccaggtcttcacggactcagactatcagctcccgtacgtgctcgggtcggctcacgagggctgcctcccgccgttcccagcggacgttttcatgattcctcagtacgggtatctgacgcttaatgatggaagccaggccgtgggtcgttcgtccttttactgcctggaatatttcccgtcgcaaatgctaagaacgggtaacaacttccagttcagctacgagtttgagaacgtacctttccatagcagctacgctcacagccaaagcctggaccgactaatgaatccactcatcgaccaatacttgtactatctctcaaagactattaacggttctggacagaatcaacaaacgctaaaattcagtgtggccggacccagcaacatggctgtccagggaagaaactacatacctggacccagctaccgacaacaacgtgtctcaaccactgtgactcaaaacaacaacagcgaatttgcttggcctggagcttcttcttgggctctcaatggacgtaatagcttgatgaatcctggacctgctatggccagccacaaagaaggagaggaccgtttctttcctttgtctggatctttaatttttggcaaacaaggaactggaagagacaacgtggatgcggacaaagtcatgataaccaacgaagaagaaattaaaactactaacccggtagcaacggagtcctatggacaagtggccacaaaccaccagagtgcccaagcacaggcgcagaccggctgggttcaaaaccaaggaatacttccgggtatggtttggcaggacagagatgtgtacctgcaaggacccatctgggccaagattcctcacacggacggcaacttccacccgtctccgctgatgggcggctttggcctgaaacatcctccgcctcagatcctgatcaagaacacgcctgttcctgcgaatcctccggcggagttttcagctacaaagtttgcttcattcatcacccagtactccacaggacaagtgagtgtggaaattgaatgggagctgcagaaagaaaacagcaagcgctggaatcccgaagtgcagtacacatccaattatgcaaaatctgccaacgttgattttactgtggacaacaatggactttatactgagcctcgccccattggcacccgttaccttaccaaacctctgtaa

SEQ ID NO: 5249 - protein, 734 aa, Artificial Sequence
  Description of Artificial Sequence: Synthetic polypeptide
MAADGYLPDWLEDNLSEGIREWWALKPGVPQPKANQQHQDNCRGLVLPGYKYLGPGNGLDKGEPVNEADAAALEHDKAYDQQLKAGDNPYLKYNHADAEFQERLKEDTSFGGNLGRAVFQTKKRLLEPLGLVEEAAKTAPGKKRPVEQSPQEPDSSAGIGKSGAQPAKKRLNFGQTGDTESVPDPQPIGEPPAAPSGVGSLTMASGGGAPVADNNEGADGVGSSSGNWHCDSQWLGDRVITTSTRTWALPTYNNHLYKQISSQSGASNDNHYFGYSTPWGYFDFNRFHCHFSPRDWQRLINNNWGFRPKRLSFKLFNIQVKEVTDNNGVKTIANNLTSTVQVFTDSDYQLPYVLGSAHEGCLPPFPADVFMIPQYGYLTLNDGSQAVGRSSFYCLEYFPSQMLRTGNNFQFSYEFENVPFHSSYAHSQSLDRLMNPLIDQYLYYLSKTINGSGQNQQTLKFSVAGPSNMAVQGRNYIPGPSYRQQRVSTTVTQNNNSEFAWPGASSWALNGRNSLMNPGPAMASHKEGEDRFFPLSGSLIFGKQGTGRDNVDADKVMITNEEEIKTTNPVATESYGQVATNHQSAQAQAQTGWVQNQGILPGMVWQDRDVYLQGPIWAKIPHTDGNFHPSPLMGGFGLKHPPPQILIKNTPVPANPPAEFSATKFASFITQYSTGQVSVEIEWELQKENSKRWNPEVQYTSNYAKSANVDFTVDNNGLYTEPRPIGTRYLTKPL

SEQ ID NO: 5250 - DNA, 2211 bp, Artificial Sequence
  Description of Artificial Sequence: Synthetic polynucleotide
atggctgccgatggttatcttccagattggctcgaggacaacctctctgagggcattcgcgagtggtgggacttgaaacctggagcccctaaacccaaggcaaatcaacaacatcaggacaacgctcgaggtcttgtgcttccgggttacaaataccttggacccggcaacggactcgacaagggggagccggtcaacgcagcagacgcggcggccctcgagcacgacaaggcctacgaccagcagctcaaggccggagacaacccgtacctcaagtacaaccacgccgacgccgagttccaggagcggctcaaagaagatacgtcttttgggggcaacctcgggcgagcagtcttccaggccaaaaagaggcttcttgaacctcttggtctggttgaggaagcggctaagacggctcctggaaagaagagaccggtagagccatcaccccagcgttctccagactcctctacgggcatcggcaagaaaggccaacagcccgctaaaaagagactcaattttggtcagactggcgactcagagtcagtccccgacccacaacctctcggagaacctccagcaacccccgctgctgtgggacctactacaatggcttcaggcggtggcgcaccaatggcagacaataacgagggtgccgatggagtgggtaattcctcaggaaattggcattgcgattcccaatggctgggcgacagagtcatcaccaccagcaccagaacctgggccctgcccacttacaacaaccatctctacaagcaaatctccagccaatcaggagcttcaaacgacaaccactactttggctacagcaccccttgggggtattttgactttaacagattccactgccacttttcaccacgtgactggcaaagactcatcaacaacaactggggattccgacccaagagactcaacttcaagctcttcaacatccaagtcaaggaggtcacgacgaatgatggcgtcacgaccatcgctaataaccttaccagcacggttcaagtcttctcggactcggagtaccagttgccgtacgtcctcggctctgcgcaccagggctgcctccctccgttcccggcggacgtgttcatgattccgcagtacggctacctaacgctcaacaatggcagccaagccgtgggacgttcatccttttactgcctggaatatttcccttctcagatgctgagaacgggcaacaactttaccttcagctacacttttgaggacgttcctttccacagcagctacgctcacagccagagtctggaccgtctcatgaatcctctcatcgaccagtacctgtattacttgagcagaacaaacactccaagtggaaccaccacgcagtcaaggcttcagttttctcaggccggagcgagtgacattcgggaccagtctaggaactggcttcctggaccctgttaccgccagcagcgcgtttctaaaacaaaaacagacaacaacaacagcaattttacctggactggtgcttcaaaatataaccttaatgggcgtgaatctataatcaaccctggcactgctatggcctcacacaaagacgacgaagacaagttctttcccatgagcggtgtcatgatttttggaaaagagagcgccggagcttcaaacactgcattggacaatgtcatgatcacagacgaagaggaaatcaaagccactaaccccgtggccaccgaaagatttgggactgtggcagtcaatctccagagcagcagcacagaccctgcgaccggagatgtgcatgttatgggagcattacctggcatggtgtggcaagatagagacgtgtacctgcagggtcccatttgggccaaaattcctcacacagatggacactttcacccgtctcctcttatgggcggctttggactcaagaacccgcctcctcagatcctcatcaaaaacacgcctgttcctgcgaatcctccggcggagttttcagctacaaagtttgcttcattcatcacccaatactccacaggacaagtgagtgtggaaattgaatgggagctgcagaaagaaaacagcaagcgctggaatcccgaagtgcagtacacatccaattatgcaaaatctgccaacgttgattttactgtggacaacaatggactttatactgagcctcgccccattggcacccgttaccttacccgtcccctgtaa

SEQ ID NO: 5251 - protein, 736 aa, Artificial Sequence
  Description of Artificial Sequence: Synthetic polypeptide
MAADGYLPDWLEDNLSEGIREWWDLKPGAPKPKANQQHQDNARGLVLPGYKYLGPGNGLDKGEPVNAADAAALEHDKAYDQQLKAGDNPYLKYNHADAEFQERLKEDTSFGGNLGRAVFQAKKRLLEPLGLVEEAAKTAPGKKRPVEPSPQRSPDSSTGIGKKGQQPAKKRLNFGQTGDSESVPDPQPLGEPPATPAAVGPTTMASGGGAPMADNNEGADGVGNSSGNWHCDSQWLGDRVITTSTRTWALPTYNNHLYKQISSQSGASNDNHYFGYSTPWGYFDFNRFHCHFSPRDWQRLINNNWGFRPKRLNFKLFNIQVKEVTTNDGVTTIANNLTSTVQVFSDSEYQLPYVLGSAHQGCLPPFPADVFMIPQYGYLTLNNGSQAVGRSSFYCLEYFPSQMLRTGNNFTFSYTFEDVPFHSSYAHSQSLDRLMNPLIDQYLYYLSRTNTPSGTTTQSRLQFSQAGASDIRDQSRNWLPGPCYRQQRVSKTKTDNNNSNFTWTGASKYNLNGRESIINPGTAMASHKDDEDKFFPMSGVMIFGKESAGASNTALDNVMITDEEEIKATNPVATERFGTVAVNLQSSSTDPATGDVHVMGALPGMVWQDRDVYLQGPIWAKIPHTDGHFHPSPLMGGFGLKNPPPQILIKNTPVPANPPAEFSATKFASFITQYSTGQVSVEIEWELQKENSKRWNPEVQYTSNYAKSANVDFTVDNNGLYTEPRPIGTRYLTRPL

SEQ ID NO: 5252 - DNA, 2214 bp, Artificial Sequence; identical to SEQ ID NO: 5224
  Description of Artificial Sequence: Synthetic polynucleotide

SEQ ID NO: 5253 - protein, 737 aa, Artificial Sequence; identical to SEQ ID NO: 5225
  Description of Artificial Sequence: Synthetic polypeptide

SEQ ID NO: 5254 - DNA, 2205 bp, Artificial Sequence
  Description of Artificial Sequence: Synthetic polynucleotide
atggctgctgacggttatcttccagattggctcgaggacaacctttctgaaggcattcgtgagtggtgggctctgaaacctggagtccctcaacccaaagcgaaccaacaacaccaggacaaccgtcggggtcttgtgcttccgggttacaaatacctcggacccggtaacggactcgacaaaggagagccggtcaacgaggcggacgcggcagccctcgaacacgacaaggcctacgaccagcagctcaaggccggagacaacccgtacctcaagtacaaccacgccgacgccgagttccaggagcggctcaaagaagatacgtcttttgggggcaacctcgggcgagcagtcttccaggccaaaaagaggcttcttgaacctcttggtctggttgaggaagcggctaagacggctcctggaaagaagaggcctgtagagcagtctcctcaggaaccggactcctccgcgggtattggcaaatcgggtgcacagcccgctaaaaagagactcaatttcggtcagactggcgacacagagtcagtcccagaccctcaaccaatcggagaacctcccgcagccccctcaggtgtgggatctcttacaatggcttcaggtggtggcgcaccagtggcagacaataacgaaggtgccgatggagtgggtagttcctcgggaaattggcattgcgattcccaatggctgggggacagagtcatcaccaccagcacccgaacctgggccctgcccacctacaacaaccacctctacaaacaaatttccagccaatcaggagcctcgaacgacaatcactactttggctacagcaccccttgggggtattttgacttcaacagattccactgccacttttcaccacgtgactggcagcgactcatcaacaacaactggggattccggcccaagagactcagcttcaagctcttcaacatccaggtcaaagaggttacggacaacaatggagtcaagaccatcgccaataaccttaccagcacggtccaggtcttcacggactcagactatcagctcccgtacgtgctcgggtcggctcacgagggctgcctcccgccgttcccagcggacgttttcatgattcctcagtacgggtatctgacgcttaatgatggaagccaggccgtgggtcgttcgtccttttactgcctggaatatttcccgtcgcaaatgctaagaacgggtaacaacttccagttcagctacgagtttgagaacgtacctttccatagcagctacgctcacagccaaagcctggaccgactaatgaatccactcatcgaccaatacttgtactatctctcaaagactattaacggttctggacagaatcaacaaacgctaaaattcagtgtggccggacccagcaacatggctgtccagggaagaaactacatacctggacccagctaccgacaacaacgtgtctcaaccactgtgactcaaaacaacaacagcgaatttgcttggcctggagcttcttcttgggctctcaatggacgtaatagcttgatgaatcctggacctgctatggccagccacaaagaaggagaggaccgtttctttcctttgtctggatctttaatttttggcaaacaaggaactggaagagacaacgtggatgcggacaaagtcatgataaccaacgaagaagaaattaaaactactaacccggtagcaacggagtcctatggacaagtggccacaaaccaccagagtgcccaagcacaggcgcagaccggctgggttcaaaaccaaggaatacttccgggtatggtttggcaggacagagatgtgtacctgcaaggacccatttgggccaaaattcctcacacggacggcaactttcacccttctccgctgatgggagggtttggaatgaaacacccgcctcctcagatcctcatcaaaaacacacctgtacctgcggatcctccaacggccttcaacaaggacaagctgaactctttcatcacccagtattctactggccaagtcagcgtggagatcgagtgggagctgcagaaggaaaacagcaagcgctggaaccccgagatccagtacacctccaactactacaaatctacaagtgtggactttgctgttaatacagaaggcgtgtactctgaaccccgccccattggcacccgttacctcacccgtaatctgtaa

SEQ ID NO: 5255 - protein, 734 aa, Artificial Sequence
  Description of Artificial Sequence: Synthetic polypeptide
MAADGYLPDWLEDNLSEGIREWWALKPGVPQPKANQQHQDNRRGLVLPGYKYLGPGNGLDKGEPVNEADAAALEHDKAYDQQLKAGDNPYLKYNHADAEFQERLKEDTSFGGNLGRAVFQAKKRLLEPLGLVEEAAKTAPGKKRPVEQSPQEPDSSAGIGKSGAQPAKKRLNFGQTGDTESVPDPQPIGEPPAAPSGVGSLTMASGGGAPVADNNEGADGVGSSSGNWHCDSQWLGDRVITTSTRTWALPTYNNHLYKQISSQSGASNDNHYFGYSTPWGYFDFNRFHCHFSPRDWQRLINNNWGFRPKRLSFKLFNIQVKEVTDNNGVKTIANNLTSTVQVFTDSDYQLPYVLGSAHEGCLPPFPADVFMIPQYGYLTLNDGSQAVGRSSFYCLEYFPSQMLRTGNNFQFSYEFENVPFHSSYAHSQSLDRLMNPLIDQYLYYLSKTINGSGQNQQTLKFSVAGPSNMAVQGRNYIPGPSYRQQRVSTTVTQNNNSEFAWPGASSWALNGRNSLMNPGPAMASHKEGEDRFFPLSGSLIFGKQGTGRDNVDADKVMITNEEEIKTTNPVATESYGQVATNHQSAQAQAQTGWVQNQGILPGMVWQDRDVYLQGPIWAKIPHTDGNFHPSPLMGGFGMKHPPPQILIKNTPVPADPPTAFNKDKLNSFITQYSTGQVSVEIEWELQKENSKRWNPEIQYTSNYYKSTSVDFAVNTEGVYSEPRPIGTRYLTRNL

SEQ ID NO: 5256 - DNA, 2217 bp, Artificial Sequence
  Description of Artificial Sequence: Synthetic polynucleotide
atggctgccgatggttatcttccagattggctcgaggacaacctctctgagggcattcgcgagtggtgggcgctgaaacctggagccccgaagcccaaagccaaccagcaaaagcaggacgacggccggggtctggtgcttcctggctacaagtacctcggacccttcaacggactcgacaagggggagcccgtcaacgcggcggacgcagcggccctcgagcacgacaaggcctacgaccagcagctgcaggcgggtgacaatccgtacctgcggtataaccacgccgacgccgagtttcaggagcgtctgcaagaagatacgtcttttgggggcaacctcgggcgagcagtcttccaggccaagaagcgggttctcgaacctctcggtctggttgaggaaggcgctaagacggctcctggaaagaagagaccggtagagccatcaccccagcgttctccagactcctctacgggcatcggcaagaaaggccaacagcccgccagaaaaagactcaattttggtcagactggcgactcagagtcagttccagaccctcaacctctcggagaacctccagcagcgccctctggtgtgggacctaatacaatggctgcaggcggtggcgcaccaatggcagacaataacgaaggcgccgacggagtgggtagttcctcgggaaattggcattgcgattccacatggctgggcgacagagtcatcaccaccagcacccgaacctgggccctgcccacctacaacaaccacctctacaagcaaatctccaacgggacatcgggaggagccaccaacgacaacacctacttcggctacagcaccccctgggggtattttgactttaacagattccactgccacttttcaccacgtgactggcagcgactcatcaacaacaactggggattccggcccaagagactcagcttcaagctcttcaacatccaggtcaaggaggtcacgcagaatgaaggcaccaagaccatcgccaataacctcaccagcaccatccaggtgtttacggactcggagtaccagctgccgtacgttctcggctctgcccaccagggctgcctgcctccgttcccggcggacgtgttcatgattccccagtacggctacctaacactcaacaacggtagtcaggccgtgggacgctcctccttctactgcctggaatactttccttcgcagatgctgagaaccggcaacaacttccagtttacttacaccttcgaggacgtgcctttccacagcagctacgcccacagccagagcttggaccggctgatgaatcctctgattgaccagtacctgtactacttgtctcggactcaaacaacaggaggcacggcaaatacgcagactctgggcttcagccaaggtgggcctaatacaatggccaatcaggcaaagaactggctgccaggaccctgttaccgccaacaacgcgtctcaacgacaaccgggcaaaacaacaatagcaactttgcctggactgctgggaccaaataccatctgaatggaagaaattcattggctaatcctggcatcgctatggcaacacacaaagacgacgaggagcgtttttttcccagtaacgggatcctgatttttggcaaacaaaatgctgccagagacaatgcggattacagcgatgtcatgctcaccagcgaggaagaaatcaaaaccactaaccctgtggctacagaggaatacggtatcgtggcagataacttgcagcagcaaaacacggctcctcaaattggaactgtcaacagccagggggccttacccggtatggtctggcagaaccgggacgtgtacctgcagggtcccatctgggccaagattcctcacacggacggcaacttccacccctctcccctcatgggtggattcggacttaaacatcctccgcctcagatcctgatcaagaacacgcctgtacctgcggatcctccgaccaccttcaaccagtcaaagctgaactctttcatcacgcaatacagcaccggacaggtcagcgtggaaattgaatgggagctgcagaaggaaaacagcaagcgctggaaccccgagatccagtacacctccaactactacaaatctacaagtgtggactttgctgttaatacagaaggcgtgtactctgaaccccgccccattggcacccgttacctcacccgtaatctgtaa

SEQ ID NO: 5257 - protein, 738 aa, Artificial Sequence; identical to SEQ ID NO: 5159
  Description of Artificial Sequence: Synthetic polypeptide

SEQ ID NO: 5258 - DNA, 2211 bp, Artificial Sequence
  Description of Artificial Sequence: Synthetic polynucleotide
atggctgctgacggttatcttccagattggctcgaggacaacctttctgaaggcattcgagagtggtgggcgctgcaacctggagcccctaaacccaaggcaaatcaacaacatcaggacaacgctcggggtcttgtgcttccgggttacaaatacctcggacccggcaacggactcgacaagggggaacccgtcaacgcagcggacgcggcagccctcgagcacgacaaggcctacgaccagcagctcaaggccggtgacaacccctacctcaagtacaaccacgccgacgccgagttccaggagcggctcaaagaagatacgtcttttgggggcaacctcgggcgagcagtcttccaggccaaaaagaggcttcttgaacctcttggtctggttgaggaagcggctaagacggctcctggaaagaagaggcctgtagatcagtctcctcaggaaccggactcatcatctggtgttggcaaatcgggcaaacagcctgccagaaaaagactaaatttcggtcagactggcgactcagagtcagtcccagaccctcaacctctcggagaaccaccagcagcccccacaagtttgggatctaatacaatggcttcaggcggtggcgcaccaatggcagacaataacgagggtgccgatggagtgggtaattcctcaggaaattggcattgcgattcccaatggctgggcgacagagtcatcaccaccagcaccagaacctgggccctgcccacttacaacaaccatctctacaagcaaatctccagccaatcaggagcttcaaacgacaaccactactttggctacagcaccccttgggggtattttgactttaacagattccactgccacttctcaccacgtgactggcagcgactcattaacaacaactggggattccggcccaagaaactcagcttcaagctcttcaacatccaagttaaagaggtcacgcagaacgatggcacgacgactattgccaataaccttaccagcacggttcaggtgtttacggactcggagtatcagctcccgtacgtgctcgggtcggcgcaccaaggctgtctcccgccgtttccagcggacgtcttcatggtccctcagtatggatacctcaccctgaacaacggaagtcaagcggtgggacgctcatccttttactgcctggagtacttcccttcgcagatgctaaggactggaaataacttccaattcagctataccttcgaggatgtaccttttcacagcagctacgctcacagccagagtttggatcgcttgatgaatcctcttattgatcagtatctgtactacctgaacagaacgcaaggaacaacctctggaacaaccaaccaatcacggctgctttttagccaggctgggcctcagtctatgtctttgcaggccagaaattggctacctgggccctgctaccggcaacagagactttcaaagactgctaacgacaacaacaacagtaactttccttggacagcggccagcaaatatcatctcaatggccgcgactcgctggtgaatccaggaccagctatggccagtcacaaggacgatgaagaaaaatttttccctatgcacggcaatctaatatttggcaaagaagggacaacggcaagtaacgcagaattagataatgtaatgattacggatgaagaagagattcgtaccaccaatcctgtggcaacagagcagtatggaactgtggcaaataacttgcagagctcaaatacagctcccacgactagaactgtcaatgatcagggggccttacctggcatggtgtggcaagatcgtgacgtgtaccttcaaggacctatctgggcaaagattcctcacacggatggacactttcatccttctcctctgatgggaggctttggactgaaacatccgcctcctcaaatcatgatcaaaaatactccggtaccggcaaatcctccgacgactttcagcccggccaagtttgcttcatttatcactcagtactccactggacaggtcagcgtggaaattgagtgggagctacagaaagaaaacagcaaacgttggaatccagagattcagtacacttccaactacaacaagtctgttaatgtggactttactgtagacactaatggtgtttatagtgaacctcgccccattggcacccgttaccttacccgtcccctgtaa

SEQ ID NO: 5259 - protein, 736 aa, Artificial Sequence; identical to SEQ ID NO: 5229
  Description of Artificial Sequence: Synthetic polypeptide

SEQ ID NO: 5260 - DNA, 2211 bp, Artificial Sequence; identical to SEQ ID NO: 5228
  Description of Artificial Sequence: Synthetic polynucleotide

SEQ ID NO: 5261 - protein, 736 aa, Artificial Sequence; identical to SEQ ID NO: 5229
  Description of Artificial Sequence: Synthetic polypeptide

SEQ ID NO: 5262 - DNA, 2211 bp, Artificial Sequence
  Description of Artificial Sequence: Synthetic polynucleotide
atggctgctgacggttatcttccagattggctcgaggacaacctttctgaaggcattcgtgagtggtgggctctgaaacctggagtccctcaacccaaagcgaaccaacaacaccaggacaaccgtcggggtcttgtgcttccgggttacaaatacctcggacccggtaacggactcgacaaaggagagcccgtcaacgcggcggatgcagcggccctcgagcacgacaaggcctacgaccagcagctcaaagcgggtgacaatccgtacctgcggtataaccacgccgacgccgagtttcaggagcgtctgcaagaagatacgtcttttgggggcaacctcgggcgagcagtcttccaggccaagaagagggttctcgaaccttttggtctggttgaggaaggtgctaagacggctcctggaaagaaacgtccggtagagcagtcgccacaagagccagactcctcctcgggcatcggcaagacaggccagcagcccgctaaaaagagactcaattttggtcagactggcgactcagagtcagtccccgacccacaacctctcggagaacctccagcaacccccgctgctgtgggacctactacaatggcttcaggcggtggcgcaccaatggcagacaataacgaaggcgccgacggagtgggtaatgcctcaggaaattggcattgcgattccacatggctgggcgacagagtcatcaccaccagcacccgcacctgggccttgcccacctacaataaccacctctacaagcaaatctccagtgcttcaacgggggccagcaacgacaaccactacttcggctacagcaccccctgggggtattttgatttcaacagattccactgccatttctcaccacgtgactggcagcgactcatcaacaacaattggggattccggcccaagagactcaacttcaagctcttcaacatccaagtcaaggaggtcacgacgaatgatggcgtcacgaccatcgctaataaccttaccagcacggttcaagtcttctcggactcggagtaccagcttccgtacgtcctcggctctgcgcaccagggctgcctccctccgttcccggcggacgtgttcatgattccgcaatacggctacctgacgctcaacaatggcagccaagccgtgggacgttcatccttttactgcctggaatatttcccttctcagatgctgagaacgggcaacaactttaccttcagctacacctttgaggaagtgcctttccacagcagctacgcgcacagccagagcctggaccggctgatgaatcctctcatcgaccaatacctgtattacctgaacagaactcaaaatcagtccggaagtgcccaaaacaaggacttgctgtttagccgtgggtctccagctggcatgtctgttcagcccaaaaactggctacctggaccctgttatcggcagcagcgcgtttctaaaacaaaaacagacaacaacaacagcaattttacctggactggtgcttcaaaatataacctcaatgggcgtgaatccatcatcaaccctggcactgctatggcctcacacaaagacgacgaagacaagttctttcccatgagcggtgtcatgatttttggaaaagagagcgccggagcttcaaacactgcattggacaatgtcatgattacagacgaagaggaaattaaagccactaaccctgtggccaccgaaagatttgggaccgtggcagtcaatttccagagcagcagcacagaccctgcgaccggagatgtgcatgttatgggagccttacctggaatggtgtggcaagacagagacgtatacctgcagggtcctatttgggccaaaattcctcacacggatggacactttcacccgtctcctctcatgggcggctttggacttaagcacccgcctcctcagatcctcatcaaaaacacgcctgttcctgcgaatcctccggcagagttttcggctacaaagtttgcttcattcatcacccagtattccacaggacaagtgagcgtggagattgaatgggagctgcagaaagaaaacagcaaacgctggaatcccgaagtgcagtatacatctaactatgcaaaatctgccaacgttgatttcactgtggacaacaatggactttatactgagcctcgccccattggcacccgttacctcacccgtcccctgtaa

SEQ ID NO: 5263 - protein, 736 aa, Artificial Sequence
  Description of Artificial Sequence: Synthetic polypeptide
MAADGYLPDWLEDNLSEGIREWWALKPGVPQPKANQQHQDNRRGLVLPGYKYLGPGNGLDKGEPVNAADAAALEHDKAYDQQLKAGDNPYLRYNHADAEFQERLQEDTSFGGNLGRAVFQAKKRVLEPFGLVEEGAKTAPGKKRPVEQSPQEPDSSSGIGKTGQQPAKKRLNFGQTGDSESVPDPQPLGEPPATPAAVGPTTMASGGGAPMADNNEGADGVGNASGNWHCDSTWLGDRVITTSTRTWALPTYNNHLYKQISSASTGASNDNHYFGYSTPWGYFDFNRFHCHFSPRDWQRLINNNWGFRPKRLNFKLFNIQVKEVTTNDGVTTIANNLTSTVQVFSDSEYQLPYVLGSAHQGCLPPFPADVFMIPQYGYLTLNNGSQAVGRSSFYCLEYFPSQMLRTGNNFTFSYTFEEVPFHSSYAHSQSLDRLMNPLIDQYLYYLNRTQNQSGSAQNKDLLFSRGSPAGMSVQPKNWLPGPCYRQQRVSKTKTDNNNSNFTWTGASKYNLNGRESIINPGTAMASHKDDEDKFFPMSGVMIFGKESAGASNTALDNVMITDEEEIKATNPVATERFGTVAVNFQSSSTDPATGDVHVMGALPGMVWQDRDVYLQGPIWAKIPHTDGHFHPSPLMGGFGLKHPPPQILIKNTPVPANPPAEFSATKFASFITQYSTGQVSVEIEWELQKENSKRWNPEVQYTSNYAKSANVDFTVDNNGLYTEPRPIGTRYLTRPL

SEQ ID NO: 5264 - DNA, 2217 bp, Artificial Sequence
  Description of Artificial Sequence: Synthetic polynucleotide
atggctgccgatggttatcttccagattggctcgaggacaacctctctgagggcattcgcgagtggtgggacttgaaacctggagccccgaaacccaaagccaaccagcaaaagcaggacgacggccggggtctggtgcttcctggctacaagtacctcggacccttcaacggactcgacaagggggagcccgtcaacgcggcggatgcaacggccctcgagcacgacaaggcctacgaccagcagctgcaggcgggtgacaatccgtacctgcggtataaccacgccgacgccgagtttcaggagcgtctgcaagaagatacgtcttttgggggcaacctcgggcgagcagtcttccaggccaagaagcgggttctcgaacctctcggtctggttgaggaaggcgctaagacggctcctggaaagaagagaccggtagagccatcaccccagcgttctccagactcctctacgggcatcggcaagaaaggccaacagcccgccagaaaaagactcaattttggtcagactggcgactcagagtcagttccagaccctcaacctctcggagaaccaccagcagcccccacaagtttgggatctaatacaatggcttcaggcggtggcgcaccaatggcagacaataacgagggtgccgatggagtgggtaattcctcaggaaattggcattgcgattcccaatggctgggcgacagagtcatcaccaccagcacccgcacctgggccttgcccacctacaataaccacctctacaagcaaatctccagtgcttcaacgggggccagcaacgacaaccactacttcggctacagcaccccctgggggtattttgactttaaccgcttccactgccacttctcgccaagagactggcaaagactcatcaacaacaattggggattccggcccaagagactcaacttcaaactcttcaacatccaagtcaaggaggtcacgacgaatgatggcgtcacgaccatcgccaataacctcaccagcaccatccaggtgtttacggactcggagtaccagctgccgtacgttctcggctctgcccaccagggctgcctgcctccgttcccggcggacgtgttcatgattccccagtatggatacctcaccctgaacaacggaagtcaagcggtgggacgctcatccttttactgcctggagtacttcccttcgcagatgctaaggactggaaataacttccaattcagctataccttcgaggatgtaccttttcacagcagctacgctcacagccagagtttggatcgcttgatgaatcctcttattgatcagtatctgtactacctgaacagaacgcaaggaacaacctctggaacaaccaaccaatcacggctgctttttagccaggctgggcctcagtctatgtctttgcaggccagaaattggctacctgggccctgctaccggcaacagagactttcaaagactgctaacgacaacaacaacagtaactttccttggacagcagccagcaaatatcatctcaatggccgcgactcgctggtgaatccaggaccagctatggccagtcacaaggacgatgaagaaaaatttttccctatgcacggcaatctaatatttggcaaagaagggacaacggcaagtaacgcagaattagataatgtaatgattacggatgaagaagagattcgtaccaccaatcctgtggcaacagagcagtatggaactgtggcaaataacttgcagagctcaaatacagctcccacgactagaactgtcaatgatcagggggccttacctggcatggtgtggcaagatcgtgacgtgtaccttcaggggcccatctgggcaaagattccacacacggacggacattttcacccctctcccctcatgggtggattcggacttaaacaccctcctccgcagattctcatcaagaacaccccggtacctgcgaatccttcgaccaccttcagtgcggcaaagtttgcttccttcatcacacagtactccacgggacaggtcagcgtggagatcgagtgggagctgcagaaggaaaacagcaagcgctggaacccggagatccagtacacttccaactattacaagtctaataatgttgaatttgctgttaatactgaaggtgtatatagtgaaccccgccccattggcaccagatacctgactcgtaatctgtaa

SEQ ID NO: 5265 - protein, 738 aa, Artificial Sequence
  Description of Artificial Sequence: Synthetic polypeptide
MAADGYLPDWLEDNLSEGIREWWDLKPGAPKPKANQQKQDDGRGLVLPGYKYLGPFNGLDKGEPVNAADATALEHDKAYDQQLQAGDNPYLRYNHADAEFQERLQEDTSFGGNLGRAVFQAKKRVLEPLGLVEEGAKTAPGKKRPVEPSPQRSPDSSTGIGKKGQQPARKRLNFGQTGDSESVPDPQPLGEPPAAPTSLGSNTMASGGGAPMADNNEGADGVGNSSGNWHCDSQWLGDRVITTSTRTWALPTYNNHLYKQISSASTGASNDNHYFGYSTPWGYFDFNRFHCHFSPRDWQRLINNNWGFRPKRLNFKLFNIQVKEVTTNDGVTTIANNLTSTIQVFTDSEYQLPYVLGSAHQGCLPPFPADVFMIPQYGYLTLNNGSQAVGRSSFYCLEYFPSQMLRTGNNFQFSYTFEDVPFHSSYAHSQSLDRLMNPLIDQYLYYLNRTQGTTSGTTNQSRLLFSQAGPQSMSLQARNWLPGPCYRQQRLSKTANDNNNSNFPWTAASKYHLNGRDSLVNPGPAMASHKDDEEKFFPMHGNLIFGKEGTTASNAELDNVMITDEEEIRTTNPVATEQYGTVANNLQSSNTAPTTRTVNDQGALPGMVWQDRDVYLQGPIWAKIPHTDGHFHPSPLMGGFGLKHPPPQILIKNTPVPANPSTTFSAAKFASFITQYSTGQVSVEIEWELQKENSKRWNPEIQYTSNYYKSNNVEFAVNTEGVYSEPRPIGTRYLTRNL

SEQ ID NO: 5266 - DNA, 2208 bp, Artificial Sequence
  Description of Artificial Sequence: Synthetic polynucleotide
atggctgccgatggttatcttccagattggctcgaggacaaccttagtgaaggaattcgcgagtggtgggacttgaaacctggagccccgaagcccaaagccaaccagcaaaagcaggacgacggccggggtctggtgcttcctggctacaagtacctcggacccttcaacggactcgacaagggggagcccgtcaacgcggcggacgcagcggccctcgagcacgacaaggcctacgaccagcagctcaaagcgggtgacaatccgtacctgcggtataaccacgccgacgccgagtttcaggagcgtctgcaagaagatacgtcttttgggggcaacctcgggcgagcagtcttccaggccaagaagcgggttctcgaacctctcggtctggttgaggaaggtgctaagacggctcctggaaagaaacgtccggtagagcagtcgccacaagagccagactcctcctcgggcattggcaagacaggccagcagcccgctaaaaagagactcaattttggtcagactggcgactcagagtcagtccccgacccacaacctctcggagaacctccagcaacccccgctgctgtgggacctactacaatggcttcaggcggtggcgcaccaatggcagacaataacgaaggcgccgacggagtgggtaatgcctcaggaaattggcattgcgattccacatggctgggcgacagagtcatcaccaccagcacccgaacctgggccctgcccacctacaacaaccacctctacaaacaaatttccagccaatcaggagcctcgaacgacaatcactactttggctacagcaccccttgggggtattttgatttcaacagattccactgccacttttcaccacgtgactggcagcgactcatcaacaacaattggggattccggcccaagagactcagcttcaagctcttcaacatccaggtcaaggaggtcacgcagaatgaaggcaccaagaccatcgccaataaccttaccagcacggttcaagtgtttacggactcggagtatcagctcccgtacgtgctcggctcggcgcatcaaggatgcctcccgccgttcccagcagacgtcttcatggtgccacagtatggatacctcaccctgaacaacgggagtcaggcagtaggacgctcttcattttactgcctggagtactttccttctcagatgctgcgtaccggaaacaactttaccttcagctacacttttgaggacgttcctttccacagcagctacgctcacagccagagtctggaccgtctcatgaatcctctgattgaccagtacctgtattacttgagcagaacaaacactccaagtggaaccaccacgcagtcaaggcttcagttttctcaggccggagcgagtgacattcgggaccagtctaggaactggcttcctggaccctgttaccgccagcagcgagtatcaaagacatctgcggataacaacaacagtgaatactcgtggactggagctaccaagtaccacctcaatggcagagactctctggtgaatccgggcccggccatggcaagccacaaggactatgaagaaaagttttttcctcagagcggggttctcatctttgggaagcaaggctcagagaaaacaaatgtggacattgaaaaggtcatgattacagacgaagaggaaatcaggacaaccaatcccgtggctacggagcagtatggttctgtatctaccaacctccagagaggcaacagacaagcagctaccgcagatgtcaacacacaaggcgttcttccaggcatggtctggcaggacagagatgtgtaccttcaggggcccatctgggcaaagattccacacacggacggacattttcacccgtctccgctgatgggcggctttggcctgaaacatcctccgcctcagatcctgatcaagaacacgcctgtacctgcggatcctccgaccaccttcaaccagtcaaagctgaactctttcatcactcagtattctactggccaagtcagcgtggagatcgagtgggagctgcagaaggaaaacagcaagcgctggaaccccgagatccagtacacctccaactactacaaatctacaagtgtggactttgctgttaatacagaaggcgtgtactctgaaccccgccccattggcacccgttacctcacccgtaatctgtaa

SEQ ID NO: 5267 - protein, 735 aa, Artificial Sequence
  Description of Artificial Sequence: Synthetic polypeptide
MAADGYLPDWLEDNLSEGIREWWDLKPGAPKPKANQQKQDDGRGLVLPGYKYLGPFNGLDKGEPVNAADAAALEHDKAYDQQLKAGDNPYLRYNHADAEFQERLQEDTSFGGNLGRAVFQAKKRVLEPLGLVEEGAKTAPGKKRPVEQSPQEPDSSSGIGKTGQQPAKKRLNFGQTGDSESVPDPQPLGEPPATPAAVGPTTMASGGGAPMADNNEGADGVGNASGNWHCDSTWLGDRVITTSTRTWALPTYNNHLYKQISSQSGASNDNHYFGYSTPWGYFDFNRFHCHFSPRDWQRLINNNWGFRPKRLSFKLFNIQVKEVTQNEGTKTIANNLTSTVQVFTDSEYQLPYVLGSAHQGCLPPFPADVFMVPQYGYLTLNNGSQAVGRSSFYCLEYFPSQMLRTGNNFTFSYTFEDVPFHSSYAHSQSLDRLMNPLIDQYLYYLSRTNTPSGTTTQSRLQFSQAGASDIRDQSRNWLPGPCYRQQRVSKTSADNNNSEYSWTGATKYHLNGRDSLVNPGPAMASHKDYEEKFFPQSGVLIFGKQGSEKTNVDIEKVMITDEEEIRTTNPVATEQYGSVSTNLQRGNRQAATADVNTQGVLPGMVWQDRDVYLQGPIWAKIPHTDGHFHPSPLMGGFGLKHPPPQILIKNTPVPADPPTTFNQSKLNSFITQYSTGQVSVEIEWELQKENSKRWNPEIQYTSNYYKSTSVDFAVNTEGVYSEPRPIGTRYLTRNL

SEQ ID NO: 5268 - DNA, 2214 bp, Artificial Sequence
  Description of Artificial Sequence: Synthetic polynucleotide
atggctgccgatggttatcttccagattggctcgaggacaacctctctgagggcattcgcgagtggtgggacttgaaacctggagccccgaaacccaaagccaaccagcaaaagcaggacgacggccggggtctggtgcttcctggctacaagtacctcggacccttcaacggactcgacaagggggagcccgtcaacgcggcggatgcagcggccctcgagcacgacaaggcctacgaccagcagctcaaagcgggtgacaatccgtacctgcggtataaccacgccgacgccgagtttcaggagcgtctgcaagaagatacgtcttttgggggcaacctcgggcgagcagtcttccaggccaagaagagggttctcgaaccttttggtctggttgaggaaggtgctaagacggctcctggaaagaaacgtccggtagagcagtcgccacaagagccagactcctcctcgggcattggcaagacaggccagcagcctgcaagaaaaagattgaattttggtcagactggagacgcagactcagtacctgacccccagcctctcggacagccaccagcagccccctctggtctgggaactaatacgatggctacaggcagtggcgcaccaatggcagacaataacgagggcgccgacggagtgggtaattcctcgggaaattggcattgcgattcccaatggctgggggacagagtcatcaccaccagcacccgaacctgggccctgcccacctacaacaatcacctctacaagcaaatctccaacagcacatctggaggatcttcaaatgacaacgcctacttcggctacagcaccccctgggggtattttgatttcaacagattccactgccatttctcaccacgtgactggcagcgactcatcaacaacaattggggattccggcccaagagactcaacttcaagctcttcaacatccaggtcaaggaggtcacgcagaatgaaggcaccaagaccatcgccaataacctcaccagcaccatccaggtgtttacggactcggagtaccagctgccgtacgttctcggctctgcccaccagggctgcctgcctccgttcccggcggacgtgttcatgattccccagtacggctacctaacactcaacaacggtagtcaggccgtgggacgctcctccttctactgcctggaatactttccttcgcagatgctgagaaccggcaacaacttccagtttacttacaccttcgaggacgtgcctttccacagcagctacgcccacagccagagcttggaccggctgatgaatcctctgattgaccagtacctgtactacttgtctcggactcaaacaacaggaggcacgacaaatacgcagactctgggcttcagccaaggtgggcctaatacaatggccaatcaggcaaagaactggctgccaggaccctgttaccgccagcagcgagtatcaaagacatttgcggataacaacaacagtgaatactcgtggactggagctaccaagtaccacctcaatggcagagactctctggtgaatccgggcccggccatggcaagccacaaggacgatgaagaaaagttttttcctcagagcggggttctcatctttgggaagcaaggctcagagaaaacaaatgtggacattgaaaaggtcatgattacagacgaagaggaaatcaggacaaccaatcccgtggctacggagcagtatggttctgtatctaccaacctccagagaggcaacagacaagcagctaccgcagatgtcaacacacaaggcgttcttccaggcatggtctggcaggacagagatgtgtaccttcaggggcccatctgggcaaagattccacacacggacggacattttcacccctctcccctcatgggtggattcggacttaaacaccctccgcctcagatcctgatcaagaacacgcctgtacccgcggatcctccgaccaccttcaaccagtcaaagctgaactctttcatcacccagtattctactggccaagtcagcgtggagatcgagtgggagctgcagaaggaaaacagcaagcgctggaaccccgagatccagtacacctccaactactacaaatctacaagtgtggactttgctgttaatacagaaggcgtgtactctgaaccccgccccattggcacccgttacctcacccgtaatctgtaa

SEQ ID NO: 5269 - protein, 737 aa, Artificial Sequence
  Description of Artificial Sequence: Synthetic polypeptide
MAADGYLPDWLEDNLSEGIREWWDLKPGAPKPKANQQKQDDGRGLVLPGYKYLGPFNGLDKGEPVNAADAAALEHDKAYDQQLKAGDNPYLRYNHADAEFQERLQEDTSFGGNLGRAVFQAKKRVLEPFGLVEEGAKTAPGKKRPVEQSPQEPDSSSGIGKTGQQPARKRLNFGQTGDADSVPDPQPLGQPPAAPSGLGTNTMATGSGAPMADNNEGADGVGNSSGNWHCDSQWLGDRVITTSTRTWALPTYNNHLYKQISNSTSGGSSNDNAYFGYSTPWGYFDFNRFHCHFSPRDWQRLINNNWGFRPKRLNFKLFNIQVKEVTQNEGTKTIANNLTSTIQVFTDSEYQLPYVLGSAHQGCLPPFPADVFMIPQYGYLTLNNGSQAVGRSSFYCLEYFPSQMLRTGNNFQFTYTFEDVPFHSSYAHSQSLDRLMNPLIDQYLYYLSRTQTTGGTTNTQTLGFSQGGPNTMANQAKNWLPGPCYRQQRVSKTFADNNNSEYSWTGATKYHLNGRDSLVNPGPAMASHKDDEEKFFPQSGVLIFGKQGSEKTNVDIEKVMITDEEEIRTTNPVATEQYGSVSTNLQRGNRQAATADVNTQGVLPGMVWQDRDVYLQGPIWAKIPHTDGHFHPSPLMGGFGLKHPPPQILIKNTPVPADPPTTFNQSKLNSFITQYSTGQVSVEIEWELQKENSKRWNPEIQYTSNYYKSTSVDFAVNTEGVYSEPRPIGTRYLTRNL

SEQ ID NO: 5270 - DNA, 2217 bp, Artificial Sequence
  Description of Artificial Sequence: Synthetic polynucleotide
atggctgccgatggttatcttccagattggctcgaggacactctctctgaaggaataagacagtggtgggcgctgaaacctggagccccgaagcccaaagccaaccagcaaaagcaggacgacggccggggtctggtgcttcctggctacaagtacctcggacccttcaacggactcgacaagggggagcccgtcaacgcggcggatgcagcggccctcgagcacgacaaggcctacgaccagcagctcaaagcgggtgacaatccgtacctgcggtataaccacgccgacgccgagtttcaggagcgtctgcaagaagatacgtcttttgggggcaacctcgggcgagcagtcttccaggccaagaagcgggttctcgaacctctcggtctggttgaggaaggcgctaagacggctcctggaaagaagagaccggtagagccatcaccccagcgttctccagactcctctacgggcatcggcaagaaaggccaacagcccgccagaaaaagactcaattttggtcagactggcgactcagagtcagttccagaccctcaacctctcggagaaccaccagcagcccccacaagtttgggatctaatacaatggcttcaggcggtggcgcaccaatggcagacaataacgagggtgccgatggagtgggtaattcctcaggaaattggcattgcgattcccaatggctgggcgacagagtcatcaccaccagcacccgcacctgggccttgcccacctacaataaccacctctacaagcaaatctccagtgcttcaacgggggccagcaacgacaaccactacttcggctacagcaccccctgggggtattttgactttaaccgcttccactgccacttctcgccaagagactggcaaagactcatcaacaacaattggggattccggcccaagagactcaacttcaaactcttcaacatccaagtcaaggaggtcacgacgaatgatggcgtcacgaccatcgccaataacctcaccagcaccatccaggtgtttacggactcggagtaccagctgccgtacgttctcggctctgcccaccagggctgcctgcctccgttcccggcggacgtgttcatgattccccagtatggatacctcaccctgaacaacggaagtcaagcggtgggacgctcatccttttactgcctggagtacttcccttcgcagatgctaaggactggaaataacttccaattcagctataccttcgaggatgtaccttttcacagcagctacgctcacagccagagtttggatcgcttgatgaatcctcttattgatcagtatctgtactacctgaacagaacgcaaggaacaacctctggaacaaccaaccaatcacggctgctttttagccaggctgggcctcagtctatgtctttgcaggccagaaattggctacctgggccctgctaccggcaacagagactttcaaagactgctaacgacaacaacaacagtaactttccttggacagcagccagcaaatatcatctcaatggccgcgactcgctggtgaatccaggaccagctatggccagtcacaaggacgatgaagaaaaatttttccctatgcacggcaatctaatatttggcaaagaagggacaacggcaagtaacgcagaattagataatgtaatgattacggatgaagaagagattcgtaccaccaatcctgtggcaacagagcagtatggaactgtggcaaataacttgcagagctcaaatacagctcccacgactagaactgtcaatgatcagggggccttacctggcatggtgtggcaagatcgtgacgtgtaccttcaggggcccatctgggcaaagattccacacacggacggacattttcacccctctcccctcatgggtggattcggacttaaacaccctcctccgcagattctcatcaagaacaccccggtacctgcgaatccttcgaccaccttcagtgcggcaaagtttgcttccttcatcacacagtactccacgggacaggtcagcgtggagatcgagtgggagctgcagaaggaaaacagcaagcgctggaacccggagatccagtacacttccaactattacaagtctaataatgttgaatttgctgttaatactgaaggtgtatatagtgaaccccgccccattggcaccagatacctgactcgtaatctgtaa

SEQ ID NO: 5271 - protein, 738 aa, Artificial Sequence
  Description of Artificial Sequence: Synthetic polypeptide
MAADGYLPDWLEDTLSEGIRQWWALKPGAPKPKANQQKQDDGRGLVLPGYKYLGPFNGLDKGEPVNAADAAALEHDKAYDQQLKAGDNPYLRYNHADAEFQERLQEDTSFGGNLGRAVFQAKKRVLEPLGLVEEGAKTAPGKKRPVEPSPQRSPDSSTGIGKKGQQPARKRLNFGQTGDSESVPDPQPLGEPPAAPTSLGSNTMASGGGAPMADNNEGADGVGNSSGNWHCDSQWLGDRVITTSTRTWALPTYNNHLYKQISSASTGASNDNHYFGYSTPWGYFDFNRFHCHFSPRDWQRLINNNWGFRPKRLNFKLFNIQVKEVTTNDGVTTIANNLTSTIQVFTDSEYQLPYVLGSAHQGCLPPFPADVFMIPQYGYLTLNNGSQAVGRSSFYCLEYFPSQMLRTGNNFQFSYTFEDVPFHSSYAHSQSLDRLMNPLIDQYLYYLNRTQGTTSGTTNQSRLLFSQAGPQSMSLQARNWLPGPCYRQQRLSKTANDNNNSNFPWTAASKYHLNGRDSLVNPGPAMASHKDDEEKFFPMHGNLIFGKEGTTASNAELDNVMITDEEEIRTTNPVATEQYGTVANNLQSSNTAPTTRTVNDQGALPGMVWQDRDVYLQGPIWAKIPHTDGHFHPSPLMGGFGLKHPPPQILIKNTPVPANPSTTFSAAKFASFITQYSTGQVSVEIEWELQKENSKRWNPEIQYTSNYYKSNNVEFAVNTEGVYSEPRPIGTRYLTRNL

SEQ ID NO: 5272 - DNA, 2208 bp, Artificial Sequence; identical to SEQ ID NO: 5102
  Description of Artificial Sequence: Synthetic polynucleotide

SEQ ID NO: 5273 - protein, 735 aa, Artificial Sequence [sequence omitted]

SEQ ID NO: 5274 - DNA, 2208 bp, Artificial Sequence
  Description of Artificial Sequence: Synthetic polynucleotide
atggctgccgatggttatcttccagattggctcgaggacaacctctctgagggcattcgcgagtggtgggcgctgaaacctggagccccgaagcccaaagccaaccagcaaaagcaggacgacggccggggtctggtgcttcctggctacaagtacctcggacccttcaacggactcgacaagggggagcccgtcaacgcggcggacgccgcggccctcgagcacgacaaggcctacgaccagcagctgcaggcgggtgacaatccgtacctgcggtataaccacgccgacgccgagtttcaggagcgtctgcaagaagatacgtcttttgggggcaacctcgggcgagcagtcttccaggccaaaaagaggcttcttgaacctcttggtctggttgaggaagcagctaaaacggctcctggaaagaagaggcctgtagagcagtctcctcaggaaccggactcctccgcgggtattggcaaatcgggtgcacagcccgccaaaaagagactcaatttcggtcagactggcgactcagagtcagtcccagaccctcaacctctcggagaaccaccagcagcccccacaagtttgggatctaatacaatggcttcaggcggtggcgcaccaatggcagacaataacgaaggcgccgacggagtgggtaatgcctcaggaaattggcattgcgattccacatggctgggcgacagagtcatcaccaccagcacccgcacctgggccttgcccacctacagcaaccatctctacaagcaaatctccagccaatcaggagcttcaaacgacaacgactactttggctacagcaccccttgggggtattttgatttcaacagattccactgccacttttcaccacgtgactggcaaagactcatcaacaacaactggggattccgacccaagagactcaacttcaagctctttaacattcaagtcaaagaggtcacgcagaatgacggtacgacgacgattgccaataaccttaccagcacggttcaggtgtttactgactcggagtaccagctcccgtacgtcctcggctcggcgcatcaaggatgcctcccgccgttcccagcagacgtcttcatggtgccacagtatggatacctcaccctgaacaacgggagtcaggcagtaggacgctcttcattttactgcctggagtactttccttctcagatgctgcgtaccggaaacaactttaccttcagctacacttttgaggacgttcctttccacagcagctacgctcacagccagagtctggaccgtctcatgaatcctctcatcgaccagtacctgtattacttgagcagaacaaacactccaagtggaaccaccacgcagtcaaggcttcagttttctcaggccggagcgagtgacattcgggaccagtctaggaactggcttcctggaccctgttaccgccagcagcgagtatcaaagacatctgaggataacaacaacagtgaatactcgtggactggagctaccaagtaccacctcaatggcagagactctctggtgaatccgggcccggccatggcaagccacaaggacgatgaagaaaagttttttcctcagagcggggttctcatctttgggaagcaaggctcagagaaaacaaatgtggacattgaaaaggtcatgattacagacgaagaggaaatcaggacaaccaatcccgtggctacggagcagtatggttctgtatctaccaacctccagagaggcaacagacaagcagctaccgcagatgtcaacacacaaggcgttcttccaggcatggtctggcaggacagagatgtgtaccttcaggggcccatctgggcaaagattccacacacggacggacattttcacccctctcccctcatgggtggattcggacttaaacaccctcctccacagattctcatcaagaacaccccggtacctgcgaatccttcgaccaccttcagtgcggcaaagtttgcttccttcatcacacagtactccacgggacaggtcagcgtggagatcgagtgggagctgcagaaggaaaacagcaaacgctggaatcccgaaattcagtacacttccaactacaacaagtctgttaatgtggactttactgtggacactaatggcgtgtattcagagcctcgccccattggcaccagatacctgactcgtaatctgtaa

SEQ ID NO: 5275 - protein, 735 aa, Artificial Sequence
  Description of Artificial Sequence: Synthetic polypeptide
MAADGYLPDWLEDNLSEGIREWWALKPGAPKPKANQQKQDDGRGLVLPGYKYLGPFNGLDKGEPVNAADAAALEHDKAYDQQLQAGDNPYLRYNHADAEFQERLQEDTSFGGNLGRAVFQAKKRLLEPLGLVEEAAKTAPGKKRPVEQSPQEPDSSAGIGKSGAQPAKKRLNFGQTGDSESVPDPQPLGEPPAAPTSLGSNTMASGGGAPMADNNEGADGVGNASGNWHCDSTWLGDRVITTSTRTWALPTYSNHLYKQISSQSGASNDNDYFGYSTPWGYFDFNRFHCHFSPRDWQRLINNNWGFRPKRLNFKLFNIQVKEVTQNDGTTTIANNLTSTVQVFTDSEYQLPYVLGSAHQGCLPPFPADVFMVPQYGYLTLNNGSQAVGRSSFYCLEYFPSQMLRTGNNFTFSYTFEDVPFHSSYAHSQSLDRLMNPLIDQYLYYLSRTNTPSGTTTQSRLQFSQAGASDIRDQSRNWLPGPCYRQQRVSKTSEDNNNSEYSWTGATKYHLNGRDSLVNPGPAMASHKDDEEKFFPQSGVLIFGKQGSEKTNVDIEKVMITDEEEIRTTNPVATEQYGSVSTNLQRGNRQAATADVNTQGVLPGMVWQDRDVYLQGPIWAKIPHTDGHFHPSPLMGGFGLKHPPPQILIKNTPVPANPSTTFSAAKFASFITQYSTGQVSVEIEWELQKENSKRWNPEIQYTSNYNKSVNVDFTVDTNGVYSEPRPIGTRYLTRNL

SEQ ID NO: 5276 - DNA, 2208 bp, Artificial Sequence
  Description of Artificial Sequence: Synthetic polynucleotide
atggctgccgatggttatcttccagattggctcgaggacaacctctctgagggcattcgcgagtggtgggcgctgaaacctggagccccgaagcccaaagccaaccagcaaaagcaggacgacggccggggtctggtgcttcctggctacaagtacctcggacccttcaacggactcgacaagggggagcccgtcaacgcggcggacgcagcggccctcgagcacgacaaggcctacgaccagcagctgcaggcgggtgacaatccgtacctgcggtataaccacgccgacgccgagttccaggagcgtctgcaagaagatacgtcttttgggggcaacctcgggcgagcagtcttccaggccaagaagagggttctcgaaccttttggtctggttgaggaaggtgctaagacggctcctggaaagaaacgtccggtagagcagtcgccacaagagccagactcctcctcgggcattggcaagacaggccagcagcccgctaaaaagagactcaattttggtcagactggcgactcagagtcagtcccagaccctcaacctctcggagaaccaccagcagcccccacaagtttgggatctaatacaatggcttcaggcggtggcgcaccaatggcagacaataacgagggcgccgacggagtgggtaattcctcgggaaattggcattgcgattccacatggatgggcgacagagtcatcaccaccagcacccgaacctgggccctgcccacctacaacaaccacctctacaaacaaatttccagccaatcaggagcttcaaacgacaaccactactttggctacagcaccccttgggggtattttgactttaacagattccactgccacttttcaccacgtgactggcagcgactcattaacaacaactggggattccggcccaagaaactcaacttcaagctctttaacatccaggtcaaggaggtcacgcagaatgaaggcaccaagaccatcgccaataacctcaccagcaccatccaggtgtttacggactcggagtaccagctgccgtacgttctcggctctgcccaccagggctgcctgcctccgttcccggcggacgtgttcatgattccccagtacggctacctaacactcaacaacggtagtcaggccgtgggacgctcctccttctactgcctggaatactttccttcgcagatgctgagaaccggcaacaacttccagtttacttacaccttcgaggacgtgcctttccacagcagctacgcccacagccagagcttggaccggctgatgaatcctctgattgaccagtacctgtattacttgtctcggactcaaacaacaggaggcacgacaaatacgcagactctgggcttcagccaaggtgggcctaatacaatggccaatcaggcaaagaactggctgcctggaccctgttaccgccagcagcgagtatcaaagacatctgcggataacaacaacagtgaatactcgtggactggagctaccaagtaccacctcaatggcagagactctctggtgaatccgggcccggccatggcaagccacaaggacgatgaagaaaagttttttcctcagagcggggttctcatctttgggaagcaaggctcagagaaaacaaatgtggacattgaaaaggttatgattacagacgaagaggaaatcaggacaaccaatcccgtggctacggagcagtatggttctgtatctaccaacctccagagaggcaacagacaagcagctaccgcagatgtcaacacacagggcgttcttccaggcatggtctggcaggacagagatgtgtaccttcagggtcccatttgggccaaaattcctcacacagatggacactttcacccgtcccctcttatgggcggctttggactcaagaacccgcctcctcagatcctcatcaaaaacacgcctgttcctgcgaatcctccggcagagttttcagctacaaagtttgcttcattcatcacccaatactccacaggacaagtgagtgtggaaattgaatgggagctgcagaaagaaaacagcaagcgctggaatcccgaagtgcagtacacatccaattatgcaaaatctgccaacgttgattttactgtggacactaatggcgtgtattcagagcctcgccccattggcaccagatacctcacccgtaatctgtaa

SEQ ID NO: 5277 - protein, 735 aa, Artificial Sequence
  Description of Artificial Sequence: Synthetic polypeptide
MAADGYLPDWLEDNLSEGIREWWALKPGAPKPKANQQKQDDGRGLVLPGYKYLGPFNGLDKGEPVNAADAAALEHDKAYDQQLQAGDNPYLRYNHADAEFQERLQEDTSFGGNLGRAVFQAKKRVLEPFGLVEEGAKTAPGKKRPVEQSPQEPDSSSGIGKTGQQPAKKRLNFGQTGDSESVPDPQPLGEPPAAPTSLGSNTMASGGGAPMADNNEGADGVGNSSGNWHCDSTWMGDRVITTSTRTWALPTYNNHLYKQISSQSGASNDNHYFGYSTPWGYFDFNRFHCHFSPRDWQRLINNNWGFRPKKLNFKLFNIQVKEVTQNEGTKTIANNLTSTIQVFTDSEYQLPYVLGSAHQGCLPPFPADVFMIPQYGYLTLNNGSQAVGRSSFYCLEYFPSQMLRTGNNFQFTYTFEDVPFHSSYAHSQSLDRLMNPLIDQYLYYLSRTQTTGGTTNTQTLGFSQGGPNTMANQAKNWLPGPCYRQQRVSKTSADNNNSEYSWTGATKYHLNGRDSLVNPGPAMASHKDDEEKFFPQSGVLIFGKQGSEKTNVDIEKVMITDEEEIRTTNPVATEQYGSVSTNLQRGNRQAATADVNTQGVLPGMVWQDRDVYLQGPIWAKIPHTDGHFHPSPLMGGFGLKNPPPQILIKNTPVPANPPAEFSATKFASFITQYSTGQVSVEIEWELQKENSKRWNPEVQYTSNYAKSANVDFTVDTNGVYSEPRPIGTRYLTRNL

SEQ ID NO: 5278 - DNA, 2214 bp, Artificial Sequence; identical to SEQ ID NO: 5268
  Description of Artificial Sequence: Synthetic polynucleotide

SEQ ID NO: 5279 - protein, 737 aa, Artificial Sequence; identical to SEQ ID NO: 5269
  Description of Artificial Sequence: Synthetic polypeptide

SEQ ID NO: 5280 - protein, 736 aa, Artificial Sequence; identical to SEQ ID NO: 5093
  Description of Artificial Sequence: Synthetic polypeptide

SEQ ID NO: 5281 - protein, 736 aa, Artificial Sequence
  Description of Artificial Sequence: Synthetic polypeptide
MAADGYLPDWLEDNLSEGIREWWDLKPGAPKPKANQQKQDDGRGLVLPGYKYLGPFNGLDKGEPVNAADAAALEHDKAYDQQLKAGDNPYLRYNHADAEFQERLQEDTSFGGNLGRAVFQAKKRVLEPLGLVEEGAKTAPGKKRPVEQSPQEPDSSSGIGKTGQQPAKKRLNFGQTGDSESVPDPQPLGEPPAAPSGLGPNTMASGGGAPMADNNEGADGVGNSSGNWHCDSTWLGDRVITTSTRTWALPTYNNHLYKQISNGTSGGSTNDNTYFGYSTPWGYFDFNRFHCHFSPRDWQRLINNNWGFRPKRLNFKLFNIQVKEVTTNEGTKTIANNLTSTVQVFTDSEYQLPYVLGSAHQGCLPPFPADVFMVPQYGYLTLNNGSQALGRSSFYCLEYFPSQMLRTGNNFQFSYTFEDVPFHSSYAHSQSLDRLMNPLIDQYLYYLVRTQTTGTGGTQTLAFSQAGPSSMANQARNWVPGPCYRQQRVSTTTNQNNNSNFAWTGAAKFKLNGRDSLMNPGVAMASHKDDEDRFFPSSGVLIFGKQGAGNDGVDYSQVLITDEEEIKATNPVATEEYGAVAINNQRANTQAQTGLVHNQGVIPGMVWQNRDVYLQGPIWAKIPHTDGNFHPSPLMGGFGLKHPPPQILIKNTPVPADPPLTFNQAKLNSFITQYSTGQVSVEIEWELQKENSKRWNPEIQYTSNYYKSTNVDFAVNTEGVYSEPRPIGTRYLTRNL

SEQ ID NO: 5282 - protein, 736 aa, Artificial Sequence
  Description of Artificial Sequence: Synthetic polypeptide
MAADGYLPDWLEDNLSEGIREWWDLKPGAPKPKANQQKQDDGRGLVLPGYKYLGPFNGLDKGEPVNAADAAALEHDKAYDQQLKAGDNPYLRYNHADAEFQERLQEDTSFGGNLGRAVFQAKKRVLEPLGLVEEGAKTAPGKKRPVEQSPQEPDSSSGIGKTGQQPAKKRLNFGQTGDSESVPDPQPLGEPPAAPSGLGPNTMASGGGAPMADNNEGADGVGNSSGNWHCDSTWLGDRVITTSTRTWALPTYNNHLYKQISNGTSGGSTNDNTYFGYSTPWGYFDFNRFHCHFSPRDWQRLINNNWGFRPKRLNFKLFNIQVKEVTTNEGTKTIANNLTSTVQVFTDSEYQLPYVLGSAHQGCLPPFPADVFMVPQYGYLTLNNGSQALGRSSFYCLEYFPSQMLRTGNNFQFSYTFEDVPFHSSYAHSQSLDRLMNPLIDQYLYYLVRTQTTGTGGTQTLAFSQAGPSSMANQARNWVPGPCYRQQRVSTTTNQNNNSNFAWTGAAKFKLNGRDSLMNPGVAMASHKDDEDAFFPSSGVLIFGKQGAGNDGVDYSQVLITDEEEIKATNPVATEEYGAVAINNQAANTQAQTGLVHNQGVIPGMVWQNRDVYLQGPIWAKIPHTDGNFHPSPLMGGFGLKHPPPQILIKNTPVPADPPLTFNQAKLNSFITQYSTGQVSVEIEWELQKENSKRWNPEIQYTSNYYKSTNVDFAVNTEGVYSEPRPIGTRYLTRNL

SEQ ID NO: 5283 - protein, 538 aa, Artificial Sequence
  Description of Artificial Sequence: Synthetic polypeptide
MRAAAGGNGGDAGQGAEGVGNASGDWHCDSTWSESHVTTTSTRTWVLPTYNNHLYLRLGSSNASDTFNGFSTPWGYFDFNRFHCHFSPRDWQRLINNHWGLRPKSMQVRIFNIQVKEVTTSNGETTVSNNLTSTVQIFADSTYELPYVMDAGQEGSLPPFPNDVFMVPQYGYCGLVTGGSSQNQTDRNAFYCLEYFPSQMLRTGNNFEMVYKFENVPFHSMYAHSQSLDRLMNPLLDQYLWELQSTTSGGTLNQGNSATNFAKLTKTNFSGYRKNWLPGPMMKQQRFSKTASQNYKIPQGRNNSLLHYETRTTLDGRWSNFAPGTAMATAANDATDFSQAQLIFAGPNITGNTTTDANNLMFTSEDELRATNPRDTDLFGHLATNQQNATTVPTVDDVDGVGVYPGMVWQDRDIYYQGPIWAKIPHTDGHFHPSPLIGGFGLKSPPPQIFIKNTPVPANPATTFSPARINSFITQYSTGQVAVKIEWEIQKERSKRWNPEVQFTSNYGAQDSLLWAPDNAGAYKEPRAIGSRYLTNHL

SEQ ID NO: 5284 - protein, 736 aa, Artificial Sequence
  Description of Artificial Sequence: Synthetic polypeptide
MSFVDHPPDWLESIGDGFREFLGLEAGPPKPKANQQKQDNARGLVLPGYKYLGPGNGLDKGDPVNFADEVAREHDLSYQKQLEAGDNPYLKYNHADAEFQEKLASDTSFGGNLGKAVFQAKKRILEPLGLVETPDKTAPAAKKRPLEQSPQEPDSSSGVGKKGKQPARKRLNFDDEPGAGDGPPPEGPSSGAMSTETEMRAAAGGNGGDAGQGAEGVGNASGDWHCDSTWSESHVTTTSTRTWVLPTYNNHLYLRLGSSNASDTFNGFSTPWGYFDFNRFHCHFSPRDWQRLINNHWGLRPKSMQVRIFNIQVKEVTTSNGETTVSNNLTSTVHIFADSTYELPYVMDAGQEGSLPPFPNDVFMVPQYGYCGLVTGGSSQNQTDRNAFYCLEYFPSQMLRTGNNFEMVYKFENVPFHSMYAHSQSLDRLMNPLLDQYLWELQSTTSGGTLNQGNSATNFAKLTNKNFSGYRKNWLPGPMMKQQRFSKTASQNYKIPQGGNNSLLHYETRTTLDRRWSNFAPGTAMATAANDATDFSQAQLIFAGPNITGNTTTDANNLMFTSEDELRATNPRDTDLFGHLATNQQNATTVPTVDDVDGVGVYPGMVWQDRDIYYQGPIWAKIPHTDGHFHPSPLIGGFGLKSPPPQIFIKNTPVPANPATTFSPARINSFITQYSTGQVAVKIEWEIQKERSKRWNPEVQFTSNYGAQDSLLWAPDNAGAYKEPRAIGSRYLTNHL

SEQ ID NO: 5285 - protein, 736 aa, Artificial Sequence
  Description of Artificial Sequence: Synthetic polypeptide
MSFVDHPPDWLESIGDGFREFLGLEAGPPKPKANQQKQDNARGLVLPGYKYLGPGNGLDKGDPVNFADEVAREHDLSYQKQLEAGDNPYLKYNHADAEFQEKLASDTSFGGNLGKAVFQAKKRILEPLGLVETPDKTAPAAKKRPLEQSPQEPDSSSGVGKKGKQPARKRLNFDDEPGAGDGPPPEGPSSGAMSTETEMRAAAGGNGGDAGQGAEGVGNASGDWHCDSTWSESHVTTTSTRTWVLPTYNNHLYLRLGSSNASDTFNGFSTPWGYFDFNRFHCHFSPRDWQRLINNHWGLRPKSMQVRIFNIQVKEVTTSNGETTVSNNLTSTVQIFADSTYELPYVMDAGQEGSLPPFPNDVFMVPQYGYCGLVTGGSSQNQTDRNAFYCLEYFPSQMLRTGNNFEMVYKFENVPFHSMYAHSQSLDRLMNPLLDQYLWELQSTTSGGTLNQGNSATNFAKLTKTNFSGYRKNWLPGPMMKQQRFSKTASQNYKIPQGRNNSLLHYETRTTLDGRWSNFAPGTAMATAANDATDFSQAQLIFAGPNITGNTTTDANNLMFTSEDELRATNPRDTDLFGHLATNQQNATTVPTVDDVDGVGVYPGMVWQDRDIYYQGPIWAKIPHTDGHFHPSPLIGGFGLKSPPPQIFIKNTPVPANPATTFSPARINSFITQYSTGQVAVKIEWEIQKERSKRWNPEVQFTSNYGAQDSLLWAPDNAGAYKEPRAIGSRYLTNHL

SEQ ID NO: 5286 - DNA, 2214 bp, Artificial Sequence
  Description of Artificial Sequence: Synthetic polynucleotide
atggctgccgatggttatcttccagattggctcgaggacactctctctgaaggaataagacagtggtggaagctcaaacctggcccaccaccaccaaagcccgcagagcggcataaggacgacagcaggggtcttgtgcttcctgggtacaagtacctcggacccttcaacggactcgacaagggagagccggtcaacgaggcagacgccgcggccctcgagcacgacaaagcctacgaccggcagctcgacagcggagacaacccgtacctcaagtacaaccacgccgacgcggagtttcaggagcgccttaaagaagatacgtcttttgggggcaacctcgggcgagcagtcttccaggccaaaaagaggcttcttgaacctcttggtctggttgaggaagcggctaagacggctcctggaaagaagaggcctgtagagcagtctcctcaggaaccggactcctcctcgggcatcggcaagacaggccagcagcccgctaaaaagagactcaatttcggtcagactggcgacacagagtcagtcccagaccctcaaccaatcggagaacctcccgcagccccctcaggtgtgggatctcttacaatggcttcaggtggtggcgcaccagtggcagacaataacgaaggtgccgatggagtgggtagttcctcgggaaattggcattgcgattcccaatggctgggggacagagtcatcaccaccagcacccgaacctgggccctgcccacctacaacaatcacctctacaagcaaatctccaacgggacatcgggaggagccaccaacgacaacacctacttcggctacagcaccccctgggggtattttgactttaacagattccactgccacttttcaccacgtgactggcagcgactcatcaacaacaactggggattccggcccaagagactcagcttcaagctcttcaacatccaggtcaaggaggtcacgcagaatgaaggcaccaagaccatcgccaataaccttaccagcacggtccaggtcttcacggactcggagtaccagctgccgtacgttctcggctctgcccaccagggctgcctgcctccgttcccggcggacgtgttcatgattccccagtacggctacctaacactcaacaacggtagtcaggccgtgggacgctcctccttctactgcctggaatactttccttcgcagatgctgagaaccggcaacaacttccagtttacttacaccttcgaggacgtgcctttccacagcagctacgcccacagccagagcttggaccggctgatgaatcctctgattgaccagtacctgtactacttgtctcggactcaaacaacaggaggcacggcaaatacgcagactctgggcttcagccaaggtgggcctaatacaatggccaatcaggcaaagaactggctgccaggaccctgttaccgccaacaacgcgtctcaacgacaaccgggcaaaacaacaatagcaactttgcctggactgctgggaccaaataccatctgaatggaagaaattcattggctaatcctggcatcgctatggcaacacacaaagacgacaaggagcgtttttttcccagtaacgggatcctgatttttggcaaacaaaatgctgccagagacaatgcggattacagcgatgtcatgctcaccagcgaggaagaaatcaaaaccactaaccctgtggctacagaggaatacggtatcgtggcagataacttgcagcagcaaaacacggctcctcaaattggaactgtcaacagccagggggccttacccggtatggtttggcagaaccgggacgtgtacctgcagggtcccatctgggccaagattcctcacacggacggcaacttccacccgtctccgctgatgggcggctttggcctgaaacatcctccgcctcagatcctgatcaagaacacgcctgtacctgcggatcctccgaccaccttcaaccagtcaaagctgaactctttcatcacgcaatacagcaccggacaggtcagcgtggaaattgaatgggagctgcagaaggaaaacagcaagcgctggaaccccgagatccagtacacctccaactactacaaatctacaagtgtggactttgctgttaatacagaaggcgtgtactctgaaccccaccccattggcacccgttacctcacccgtcccctgtaa

SEQ ID NO: 5287 - protein, 737 aa, Artificial Sequence
  Description of Artificial Sequence: Synthetic polypeptide
MAADGYLPDWLEDTLSEGIRQWWKLKPGPPPPKPAERHKDDSRGLVLPGYKYLGPFNGLDKGEPVNEADAAALEHDKAYDRQLDSGDNPYLKYNHADAEFQERLKEDTSFGGNLGRAVFQAKKRLLEPLGLVEEAAKTAPGKKRPVEQSPQEPDSSSGIGKTGQQPAKKRLNFGQTGDTESVPDPQPIGEPPAAPSGVGSLTMASGGGAPVADNNEGADGVGSSSGNWHCDSQWLGDRVITTSTRTWALPTYNNHLYKQISNGTSGGATNDNTYFGYSTPWGYFDFNRFHCHFSPRDWQRLINNNWGFRPKRLSFKLFNIQVKEVTQNEGTKTIANNLTSTVQVFTDSEYQLPYVLGSAHQGCLPPFPADVFMIPQYGYLTLNNGSQAVGRSSFYCLEYFPSQMLRTGNNFQFTYTFEDVPFHSSYAHSQSLDRLMNPLIDQYLYYLSRTQTTGGTANTQTLGFSQGGPNTMANQAKNWLPGPCYRQQRVSTTTGQNNNSNFAWTAGTKYHLNGRNSLANPGIAMATHKDDKERFFPSNGILIFGKQNAARDNADYSDVMLTSEEEIKTTNPVATEEYGIVADNLQQQNTAPQIGTVNSQGALPGMVWQNRDVYLQGPIWAKIPHTDGNFHPSPLMGGFGLKHPPPQILIKNTPVPADPPTTFNQSKLNSFITQYSTGQVSVEIEWELQKENSKRWNPEIQYTSNYYKSTSVDFAVNTEGVYSEPHPIGTRYLTRPL

SEQ ID NO: 5288 - protein, 736 aa, Artificial Sequence
  Description of Artificial Sequence: Synthetic polypeptide
MAADGYLPDWLEDNLSEGIREWWDLKPGAPKPKANQQKQDDGRGLVLPGYKYLGPFNGLDKGEPVNAADAAALEHDKAYDQQLKAGDNPYLRYNHADAEFQERLQEDTSFGGNLGRAVFQAKKRVLEPLGLVEEGAKTAPGKKRPVEQSPQEPDSSSGIGKTGQQPAKKRLNFGQTGDTESVPDPQPIGEPPAAPSGVGSLTMASGGGAPVADNNEGADGVGSSSGNWHCDSQWLGDRVITTSTRTWALPTYNNHLYKQISSASTGASNDNHYFGYSTPWGYFDFNRFHCHFSPRDWQRLINNNWGFRPKRLNFKLFNIQVKEVTDNNGVKTIANNLTSTVQVFTDSDYQLPYVLGSAHQGCLPPFPADVFMIPQYGYLTLNNGSQAVGRSSFYCLEYFPSQMLRTGNNFQFTYTFEDVPFHSSYAHSQSLDRLMNPLIDQYLYYLSRTQTTGGTANTQTLGFSQGGPNTMANQAKNWLPGPCYRQQRVSTTTGQNNNSNFAWTAGTKYHLNGRNSLANPGIAMATHKDDKERFFPSNGILIFGKQNAARDNADYSDVMLTSEEEIKTTNPVATEEYGIVADNLQQQNTAPQIGTVNSQGALPGMVWQNRDVYLQGPIWAKIPHTDGNFHPSPLMGGFGLKHPPPQILIKNTPVPADPPTTFNQSKLNSFITQYSTGQVSVEIEWELQKENSKRWNPEIQYTSNYYKSTSVDFAVNTEGVYSEPHPIGTRYLTRPL

SEQ ID NO: 5289 - protein, 736 aa, Artificial Sequence
  Description of Artificial Sequence: Synthetic polypeptide
MAADGYLPDWLEDTLSEGIRQWWKLKPGPPPPKPAERHKDDSRGLVLPGYKYLGPFNGLDKGEPVNEADAAALEHDKAYDRQLDSGDNPYLKYNHADAEFQERLQGDTSFGGNLGRAVFQAKKRVLEPLGLVEEGAKTAPGKKRPVEQSPQEPDSSSGIGETGQQPAKKRLNFGQTGDSESVPDPQPLGEPPATPAAVGPTTMASGGGAPMADNNEGADGVGSSSGNWHCDSQWLGDRVITTSTRTWALPTYNNHLYKQISSASTGASNDNHYFGYSTPWGYFDFNRFHCHFSPRDWQRLINNNWGFRPKRLSFKLFNIQVKEVTDNNGVKTIANNLTSTVQVFTDSEYQLPYVLGSAHQGCLPPFPADVFMIPQYGYLTLNNGSQAVGRSSFYCLEYFPSQMLRTGNNFTFSYTFEDVPFHSSYAHSQSLDRLMNPLIDQYLYYLSRTQTTGGTANTQTLGFSQGGPNTMANQAKNWLPGPCYRQQRVSTTTGQNNNSNFAWTAGTKYHLNGRNSLANPGIAMATHKDDKERFFPSNGILIFGKQNAARDNADYSDVMLTSEEEIKTTNPVATEEYGIVADNLQQQNTAPQIGTVNSQGALPGMVWQNRDVYLQGPIWAKIPHTDGNFHPSPLMGGFGLKHPPPQILIKNTPVPADPPTTFNQSKLNSFITQYSTGQVSVEIEWELQKENSKRWNPEIQYTSNYYKSTSVDFAVNTEGVYSEPHPIGTRYLTRPL

SEQ ID NO: 5290 - DNA, 2181 bp, Artificial Sequence
  Description of Artificial Sequence: Synthetic polynucleotide
atgtcttttgttgatcaccctccagattggttggaagaagttggtgaaggtcttcgcgagtttttgggccttgaagcgggcccaccgaaaccaaaacccaatcagcagcatcaagatcaagcccgtggtcttgtgctgcctggttataactatctcggacccggaaacggtctcgatcgaggagagcctgtcaacagggcagacgaggtcgcgcgagagcacgacatctcgtacaacgagcagcttgaggcgggagacaacccctacctcaagtacaaccacgcggacgccgagtttcaggagaagctcgccgacgacacatccttcgggggaaacctcggaaaggcagtctttcaggccaagaaaagggttctcgaaccttttggcctggttgaagagggtgctaagacggcccctaccggaaagcggatagacgaccactttccaaaaagaaagaaggctcggaccgaagaggactccaagccttccacctcgtcagacgccgaagctggacccagcggatcccagcagctgcaaatcccagcacaaccagcctcaagtttgggagctgatacaatgtctgcgggaggtggcggcccattgggcgacaataaccaaggtgccgatggagtgggcaatgcctcgggagattggcattgcgattccacgtggatgggggacagagtcgtcaccaagtccacccgcacctgggtgctgcccagctacaacaaccaccagtaccgagagatcaaaagcggctccgtcgacggaagcaacgccaacgcctactttggatacagcaccccctgggggtactttgactttaaccgcttccacagccactggagcccccgagactggcaaagactcatcaacaactattggggcttcagaccccggtctctcagagtcaaaatcttcaacatccaagtcaaagaggtcacggtgcaggactccaccaccaccatcgccaacaacctcacctccaccgtccaagtgtttacggacgacgactaccaactcccgtacgtcgtcggcaacgggaccgagggatgcctgccggccttccccccgcaggtctttacgctgccgcagtacggctacgcgacgctgaaccgagacaacggagacaacccgacagagcggagcagcttcttttgcctagagtactttcccagcaagatgctgaggacgggcaacaactttgagtttacctacagctttgaagaggtgcccttccactgcagcttcgccccgagccagaacctctttaagctggccaacccgctggtggaccagtacctgtaccgcttcgtgagcacctcggccacgggcgccatccagttccaaaagaacctggcgggcagatacgccaacacctacaaaaactggttcccggggcccatgggccgaacccagggctggaacacgagctctggggtcagcagcaccaacagagtcagcgtcaacaacttttccgtctcaaaccggatgaacctggagggggccagctaccaagtgaacccccagcccaacgggatgacaaacacgctccaaggcagcaaccgctacgcgctggaaaacaccatgatcttcaacgctcaaaacgccacgccgggaactacctcggtgtacccagaggacaatctactgctgaccagcgagagcgagactcagcccgtcaaccgggtggcttacaacacgggcggtcagatggccaccaacgcccagaacgccaccacggctcccacggtcgggacctacaacctccaggaagtgcttcctggcagcgtatggatggagagggacgtgtacctccaaggacccatctgggccaagatcccagagacgggggcgcactttcacccctctccggccatgggcggattcggactcaaacacccgccgcccatgatgctcatcaaaaacacgccggtgcccggcaacatcaccagcttctcggacgtgcccgtcagcagcttcatcacccagtacagcaccgggcaggtcaccgtggagatggaatgggagctcaaaaaggaaaactccaagaggtggaacccagagatccagtacaccaacaactacaacgacccccagtttgtggactttgctccagacggctccggcgaatacagaaccaccagagccatcggaacccgatacctcacccgacccctt

SEQ ID NO: 5291 - protein, 726 aa, Artificial Sequence
  Description of Artificial Sequence: Synthetic polypeptide
MSFVDHPPDWLEEVGEGLREFLGLEAGPPKPKPNQQHQDQARGLVLPGYNYLGPGNGLDRGEPVNRADEVAREHDISYNEQLEAGDNPYLKYNHADAEFQEKLADDTSFGGNLGKAVFQAKKRVLEPFGLVEEGAKTAPTGKRIDDHFPKRKKARTEEDSKPSTSSDAEAGPSGSQQLQIPAQPASSLGADTMSAGGGGPLGDNNQGADGVGNASGDWHCDSTWMGDRVVTKSTRTWVLPSYNNHQYREIKSGSVDGSNANAYFGYSTPWGYFDFNRFHSHWSPRDWQRLINNYWGFRPRSLRVKIFNIQVKEVTVQDSTTTIANNLTSTVQVFTDDDYQLPYVVGNGTEGCLPAFPPQVFTLPQYGYATLNRDNGDNPTERSSFFCLEYFPSKMLRTGNNFEFTYSFEEVPFHCSFAPSQNLFKLANPLVDQYLYRFVSTSATGAIQFQKNLAGRYANTYKNWFPGPMGRTQGWNTSSGSSTNRVSVNNFSVSNRMNLEGASYQVNPQPNGMTNTLQGSNRYALENTMIFNAQNATPGTTSVYPEDNLLLTSESETQPVNRVAYNTGGQMATNAQNATTAPTVGTYNLQEVLPGSVWMERDVYLQGPIWAKIPETGAHFHPSPAMGGFGLKHPPPMMLIKNTPVPGNITSFSDVPVSSFITQYSTGQVTVEMEWELKKENSKRWNPEIQYTNNYNDPQFVDFAPDGSGEYRTTRAIGTRYLTRPL

SEQ ID NO: 5292 - protein, 735 aa, Artificial Sequence
  Description of Artificial Sequence: Synthetic polypeptide
MAADGYLPDWLEDTLSEGIRQWWKLKPGPPPPKPAERHKDDSRGLVLPGYKYLGPFNGLDKGEPVNEADAAALEHDKAYDRQLDSGDNPYLKYNHADAEFQERLKEDTSFGGNLGRAVFQAKKRILEPLGLVEEPVKTAPGKKRPVEHSPAEPDSSSGTGKSGQQPARKRLNFGQTGDADSVPDPQPLGQPPAAPSGLGTNTMASGSGAPMADNNEGADGVGNSSGNWHCDSTWMGDRVITTSTRTWALPTYNNHLYKQISSQSGASNDNHYFGYSTPWGYFDFNRFHCHFSPRDWQRLINNNWGFRPKRLSFKLFNIQVKEVTQNDGTTTIANNLTSTVQVFTDSEYQLPYVLGSAHQGCLPPFPADVFMVPQYGYLTLNNGSQAVGRSSFYCLEYFPSQMLRTGNNFTFSYTFEDVPFHSSYAHSQSLDRLMNPLIDQYLYYLSRTNTPSGTTTMSRLQFSQAGASDIRDQSRNWLPGPCYRQQRVSKTAADNNNSDYSWTGATKYHLNGRDSLVNPGPAMASHKDDEEKYFPQSGVLIFGKQDSGKTNVDIEKVMITDEEEIRTTNPVATEQYGSVSTNLQSGNTQAATSDVNTQGVLPGMVWQDRDVYLQGPIWAKIPHTDGHFHPSPLMGGFGLKHPPPQILIKNTPVPANPSTTFSAAKFASFITQYSTGQVSVEIEWELQKENSKRWNPEIQYTSNYNKSVNVDFTVDTNGVYSEPRPIGTRYLTRNL

SEQ ID NO: 5293 - DNA, 1803 bp, Bovine adeno-associated virus
acggcgcctgcggcaaaaaagaggcctctagagcagagtcctcaagagccagactcctcgagcggagttggcaagaaaggcaaacagcctgccagaaagagactcaactttgacgacgaacctggagccggagacgggcctcccccagaaggaccatcttccggagctatgtctactgagactgaaatgcgtgcagcagctggcggaaatggtggcgatgcgggacaaggtgccgagggagtgggtaatgcctccggtgattggcattgcgattccacttggtcagagagccacgtcaccaccacctcaacccgcacctgggtcctgccgacctacaacaaccacctgtacctgcggctcggctcgagcaacgccagcgacaccttcaacggattctccaccccctggggatactttgactttaaccgcttccactgccacttctcgccaagagactggcaaaggctcatcaacaaccactggggactgcgccccaaaagcatgcaagtccgcatcttcaacatccaagttaaggaggtcacgacgtctaacggggagacgaccgtatccaacaacctcaccagcacggtccagatctttgcggacagcacgtacgagctcccgtacgtgatggatgcaggtcaggagggcagcttgcctcctttccccaacgacgtgttcatggtgcctcagtacgggtactgcggactggtaaccggaggcagctctcaaaaccagacagacagaaatgccttctactgtctggagtactttcccagccagatgctgagaaccggaaacaactttgagatggtgtacaagtttgaaaacgtgcccttccactccatgtacgctcacagccagagcctggataggctgatgaacccgctgctggaccagtacctgtgggagctccagtctaccacctctggaggaactctcaaccagggcaattcagccaccaactttgccaagctgaccaaaacaaacttttctggctaccgcaaaaactggctcccggggcccatgatgaagcagcagagattctccaagactgccagtcaaaactacaagattccccagggaagaaacaacagtctgctccattatgagaccagaactaccctcgacggaagatggagcaattttgccccgggaacggccatggcaaccgcagccaacgacgccaccgacttctctcaggcccagctcatctttgcggggcccaacatcaccggcaacaccaccacagatgccaataacctgatgttcacttcagaagatgaacttagggccaccaacccccgggacactgacctgtttggccacctggcaaccaaccagcaaaacgccaccaccgttcctaccgtagacgacgtggacggagtcggcgtgtacccgggaatggtgtggcaggacagagacatttactaccaagggcccatttgggccaaaattccacacacggatggacactttcacccgtctcctctcattggcggatttggactgaaaagcccgcctccacaaatattcatcaaaaacactcctgtacccgccaatcccgcaacgaccttctctccggccagaatcaacagcttcatcacccagtacagcaccggacaggtggctgtcaaaatagaatgggaaatccagaaggagcggtccaagagatggaacccagaggtccagttcacgtccaactacggagcacaggactcgcttctctgggctcccgacaacgccggagcctacaaagagcccagggccattggatcccgatacctcaccaaccacctctag

SEQ ID NO: 5294 - DNA, 1617 bp, Bovine adeno-associated virus
atgcgtgcagcagctggcggaaatggtggcgatgcgggacaaggtgccgagggagtgggtaatgcctccggtgattggcattgcgattccacttggtcagagagccacgtcaccaccacctcaacccgcacctgggtcctgccgacctacaacaaccacctgtacctgcggctcggctcgagcaacgccagcgacaccttcaacggattctccaccccctggggatactttgactttaaccgcttccactgccacttctcgccaagagactggcaaaggctcatcaacaaccactggggactgcgccccaaaagcatgcaagtccgcatcttcaacatccaagttaaggaggtcacgacgtctaacggggagacgaccgtatccaacaacctcaccagcacggtccagatctttgcggacagcacgtacgagctcccgtacgtgatggatgcaggtcaggagggcagcttgcctcctttccccaacgacgtgttcatggtgcctcagtacgggtactgcggactggtaaccggaggcagctctcaaaaccagacagacagaaatgccttctactgtctggagtactttcccagccagatgctgagaaccggaaacaactttgagatggtgtacaagtttgaaaacgtgcccttccactccatgtacgctcacagccagagcctggataggctgatgaacccgctgctggaccagtacctgtgggagctccagtctaccacctctggaggaactctcaaccagggcaattcagccaccaactttgccaagctgaccaaaacaaacttttctggctaccgcaaaaactggctcccggggcccatgatgaagcagcagagattctccaagactgccagtcaaaactacaagattccccagggaagaaacaacagtctgctccattatgagaccagaactaccctcgacggaagatggagcaattttgccccgggaacggccatggcaaccgcagccaacgacgccaccgacttctctcaggcccagctcatctttgcggggcccaacatcaccggcaacaccaccacagatgccaataacctgatgttcacttcagaagatgaacttagggccaccaacccccgggacactgacctgtttggccacctggcaaccaaccagcaaaacgccaccaccgttcctaccgtagacgacgtggacggagtcggcgtgtacccgggaatggtgtggcaggacagagacatttactaccaagggcccatttgggccaaaattccacacacggatggacactttcacccgtctcctctcattggcggatttggactgaaaagcccgcctccacaaatattcatcaaaaacactcctgtacccgccaatcccgcaacgaccttctctccggccagaatcaacagcttcatcacccagtacagcaccggacaggtggctgtcaaaatagaatgggaaatccagaaggagcggtccaagagatggaacccagaggtccagttcacgtccaactacggagcacaggactcgcttctctgggctcccgacaacgccggagcctacaaagagcccagggccattggatcccgatacctcaccaaccacctctag

SEQ ID NO: 5295 - DNA, 1173 bp, Bovine adeno-associated virus
atggcgctggtaagctggctggtggaacatggcatcacttccgagaagcagtggattcaggagaatcaggagagctacctgtccttcaactccacgggaaactctcggagccagattaaagccgcgcttgacaacgcgtcaaaaattatgagtctgaccaaatctgcctcagactatctcgtgggacagactgttccagaggacatttctgaaaacagaatctggcagatttttgatctcaacggctacgacccggcatacgcgggctctgttctctacggctggtgcactcgcgcctttggaaagaggaacaccgtctggctgtatggacccgcgaccaccggaaagaccaacatcgcggaagccatctctcacaccgtgcccttttatggctgtgtgaactggactaatgagaactttccctttaatgactgtgtggaaaaaatgttgatctggtgggaggagggaaagatgaccagcaaggtggtggaacccgccaaggccatcttgggggggtctagagtacgagtggatcaaaaatgtaaatcctctgtacaagtagactctaccccggtgattatcacctccaatactaacatgtgtgtggtggtggatgggaactccacgacctttgaacaccagcagccgctggaagaccgcatgttcagatttgaactcatgcggcggctcccgccagattttggcaagattaccaagcaggaagtcaaagacttttttgcttgggcaaaggtcaaccaggtgccggtgactcacgagtttatggttcccaagaaagtggcgggaactgagagggcggagacttctagaaaacgcccactggatgacgtcaccaataccaactataaaagtccggagaagcgggcccggctctcagttgttcctgagacgcctcgcagttcagacgtgcctgtagagcccgctcctctgcgacctctcaactggtcttccaggtatgaatgcagatgtgactatcatgctaaatttgactctgtaacgggggaatgtgacgagtgtgaatatttgaatcggggcaaaaatggctgtatctttcataatgctacacattgtcaaatttgtcacgctgttcctccatgggaaaaggaaaatgtgtcagattttaatgattttgatgactgtaataaagagcagtaa

SEQ ID NO: 5296 - DNA, 1833 bp, Bovine adeno-associated virus
atggctaccttctatgaagtcattgttcgcgttccatttgatgtggaagagcacctgcctggaatttctgacaactttgtagactgggtaactggtcaaatttgggagctgcctcccgagtcagatttgaatttgactctgattgagcagcctcagctgacggtggctgacagaattcgccgcgtgttcctgtacgagtggaacaaattttccaagcaggagagcaaattctttgtgcagtttgaaaagggatctgaatattttcatctgcacacgctcgtggagacctccggcatctcttctatggtccttggccgctacgtgagtcagattcgcgcccagctggtgaaggtggtgttccagaacattgagccgcggattaacgactgggtcgccatcaccaaggtaaagaagggcggagccaataaggtggtggattctgggtatattcccgcctacctgctgccgaaggtccaaccagagcttcagtgggcgtggactaacctcgaagagtataaattggccgccctcaatctggaggagcgcaaacggctcgtcgctcagtttcagcttgagtcctcgcagcgctcgcaagaggcatcttcccagagggacgtttcggctgacccggtcatcaagagcaagacttcccagaaatacatggcgctggtaagctggctggtggaacatggcatcacttccgagaagcagtggattcaggagaatcaggagagctacctgtccttcaactccacgggaaactctcggagccagattaaagccgcgcttgacaacgcgtcaaaaattatgagtctgaccaaatctgcctcagactatctcgtgggacagactgttccagaggacatttctgaaaacagaatctggcagatttttgatctcaacggctacgacccggcatacgcgggctctgttctctacggctggtgcactcgcgcctttggaaagaggaacaccgtctggctgtatggacccgcgaccaccggaaagaccaacatcgcggaagccatctctcacaccgtgcccttttatggctgtgtgaactggactaatgagaactttccctttaatgactgtgtggaaaaaatgttgatctggtgggaggagggaaagatgaccagcaaggtggtggaacccgccaaggccatcttgggggggtctagagtacgagtggatcaaaaatgtaaatcctctgtacaagtagactctaccccggtgattatcacctccaatactaacatgtgtgtggtggtggatgggaactccacgacctttgaacaccagcagccgctggaagaccgcatgttcagatttgaactcatgcggcggctcccgccagattttggcaagattaccaagcaggaagtcaaagacttttttgcttgggcaaaggtcaaccaggtgccggtgactcacgagtttatggttcccaagaaagtggcgggaactgagagggcggagacttctagaaaacgcccactggatgacgtcaccaataccaactataaaagtccggagaagcgggcccggctctcagttgttcctgagacgcctcgcagttcagacgtgcctgtagagcccgctcctctgcgacctctcaactggtcttccaggtatgaatgcagatgtgactatcatgctaaatttgactctgtaacgggggaatgtgacgagtgtgaatatttgaatcggggcaaaaatggctgtatctttcataatgctacacattgtcaaatttgtcacgctgttcctccatgggaaaaggaaaatgtgtcagattttaatgattttgatgactgtaataaagagcagtaa

SEQ ID NO: 5297 - DNA, 2211 bp, Bovine adeno-associated virus
atgtcttttgttgaccaccctccagattggttggaatcgatcggcgacggctttcgtgaatttctcggccttgaggcgggtcccccgaaacccaaggccaatcaacagaagcaagataacgctcgaggtcttgtgcttcctgggtacaagtatcttggtcctgggaacggccttgataagggcgatcctgtcaattttgctgacgaggttgcccgagagcacgacctctcctaccagaaacagcttgaggcgggcgataacccttacctcaagtacaaccacgcggacgcagagtttcaggagaaactcgcttctgacacttcttttgggggaaaccttgggaaggctgttttccaggctaaaaagaggattctcgaacctcttggcctggttgagacgccggataaaacggcgcctgcggcaaaaaagaggcctctagagcagagtcctcaagagccagactcctcgagcggagttggcaagaaaggcaaacagcctgccagaaagagactcaactttgacgacgaacctggagccggagacgggcctcccccagaaggaccatcttccggagctatgtctactgagactgaaatgcgtgcagcagctggcggaaatggtggcgatgcgggacaaggtgccgagggagtgggtaatgcctccggtgattggcattgcgattccacttggtcagagagccacgtcaccaccacctcaacccgcacctgggtcctgccgacctacaacaaccacctgtacctgcggctcggctcgagcaacgccagcgacaccttcaacggattctccaccccctggggatactttgactttaaccgcttccactgccacttctcgccaagagactggcaaaggctcatcaacaaccactggggactgcgccccaaaagcatgcaagtccgcatcttcaacatccaagttaaggaggtcacgacgtctaacggggagacgaccgtatccaacaacctcaccagcacggtccagatctttgcggacagcacgtacgagctcccgtacgtgatggatgcaggtcaggagggcagcttgcctcctttccccaacgacgtgttcatggtgcctcagtacgggtactgcggactggtaaccggaggcagctctcaaaaccagacagacagaaatgccttctactgtctggagtactttcccagccagatgctgagaaccggaaacaactttgagatggtgtacaagtttgaaaacgtgcccttccactccatgtacgctcacagccagagcctggataggctgatgaacccgctgctggaccagtacctgtgggagctccagtctaccacctctggaggaactctcaaccagggcaattcagccaccaactttgccaagctgaccaaaacaaacttttctggctaccgcaaaaactggctcccggggcccatgatgaagcagcagagattctccaagactgccagtcaaaactacaagattccccagggaagaaacaacagtctgctccattatgagaccagaactaccctcgacggaagatggagcaattttgccccgggaacggccatggcaaccgcagccaacgacgccaccgacttctctcaggcccagctcatctttgcggggcccaacatcaccggcaacaccaccacagatgccaataacctgatgttcacttcagaagatgaacttagggccaccaacccccgggacactgacctgtttggccacctggcaaccaaccagcaaaacgccaccaccgttcctaccgtagacgacgtggacggagtcggcgtgtacccgggaatggtgtggcaggacagagacatttactaccaagggcccatttgggccaaaattccacacacggatggacactttcacccgtctcctctcattggcggatttggactgaaaagcccgcctccacaaatattcatcaaaaacactcctgtacccgccaatcccgcaacgaccttctctccggccagaatcaacagcttcatcacccagtacagcaccggacaggtggctgtcaaaatagaatgggaaatccagaaggagcggtccaagagatggaacccagaggtccagttcacgtccaactacggagcacaggactcgcttctctgggctcccgacaacgccggagcctacaaagagcccagggccattggatcccgatacctcaccaaccacctctag

SEQ ID NO: 5298 - DNA, 4694 bp, Bovine adeno-associated virus
gtggcactcccccccctgtcgcgttcgctcgttcgctggctcgattgggggggtggcagctcaaagagctgccagacgacggccctctgggccgtcgcccccccaatcgagccagcgaacgagcgaacgcgacaggggggggagtgccacactctctagcaagggggttttgtaggtggtgatgtcattgttgatgtcattatagttgtcacgcgatagttaatgattaacagtcatgtgatgtgtgttatccaataggatgaaagcgcgcgaatgagatctcgcgagacttccggggtataaaaggggtgagtgaacgagcccgccgccattctctgctctggactgctagaggaccctcgctgccatggctaccttctatgaagtcattgttcgcgttccatttgatgtggaagagcacctgcctggaatttctgacaactttgtagactgggtaactggtcaaatttgggagctgcctcccgagtcagatttgaatttgactctgattgagcagcctcagctgacggtggctgacagaattcgccgcgtgttcctgtacgagtggaacaaattttccaagcaggagagcaaattctttgtgcagtttgaaaagggatctgaatattttcatctgcacacgctcgtggagacctccggcatctcttctatggtccttggccgctacgtgagtcagattcgcgcccagctggtgaaggtggtgttccagaacattgagccgcggattaacgactgggtcgccatcaccaaggtaaagaagggcggagccaataaggtggtggattctgggtatattcccgcctacctgctgccgaaggtccaaccagagcttcagtgggcgtggactaacctcgaagagtataaattggccgccctcaatctggaggagcgcaaacggctcgtcgctcagtttcagcttgagtcctcgcagcgctcgcaagaggcatcttcccagagggacgtttcggctgacccggtcatcaagagcaagacttcccagaaatacatggcgctggtaagctggctggtggaacatggcatcacttccgagaagcagtggattcaggagaatcaggagagctacctgtccttcaactccacgggaaactctcggagccagattaaagccgcgcttgacaacgcgtcaaaaattatgagtctgaccaaatctgcctcagactatctcgtgggacagactgttccagaggacatttctgaaaacagaatctggcagatttttgatctcaacggctacgacccggcatacgcgggctctgttctctacggctggtgcactcgcgcctttggaaagaggaacaccgtctggctgtatggacccgcgaccaccggaaagaccaacatcgcggaagccatctctcacaccgtgcccttttatggctgtgtgaactggactaatgagaactttccctttaatgactgtgtggaaaaaatgttgatctggtgggaggagggaaagatgaccagcaaggtggtggaacccgccaaggccatcttgggggggtctagagtacgagtggatcaaaaatgtaaatcctctgtacaagtagactctaccccggtgattatcacctccaatactaacatgtgtgtggtggtggatgggaactccacgacctttgaacaccagcagccgctggaagaccgcatgttcagatttgaactcatgcggcggctcccgccagattttggcaagattaccaagcaggaagtcaaagacttttttgcttgggcaaaggtcaaccaggtgccggtgactcacgagtttatggttcccaagaaagtggcgggaactgagagggcggagacttctagaaaacgcccactggatgacgtcaccaataccaactataaaagtccggagaagcgggcccggctctcagttgttcctgagacgcctcgcagttcagacgtgcctgtagagcccgctcctctgcgacctctcaactggtcttccaggtatgaatgcagatgtgactatcatgctaaatttgactctgtaacgggggaatgtgacgagtgtgaatatttgaatcggggcaaaaatggctgtatctttcataatgctacacattgtcaaatttgtcacgctgttcctccatgggaaaaggaaaatgtgtcagattttaatgattttgatgactgtaataaagagcagtaaataaagtgagtagtcatgtcttttgttgaccaccctccagattggttggaatcgatcggcgacggctttcgtgaatttctcggccttgaggcgggtcccccgaaacccaaggccaatcaacagaagcaagataacgctcgaggtcttgtgcttcctgggtacaagtatcttggtcctgggaacggccttgataagggcgatcctgtcaattttgctgacgaggttgcccgagagcacgacctctcctaccagaaacagcttgaggcgggcgataacccttacctcaagtacaaccacgcggacgcagagtttcaggagaaactcgcttctgacacttcttttgggggaaaccttgggaaggctgttttccaggctaaaaagaggattctcgaacctcttggcctggttgagacgccggataaaacggcgcctgcggcaaaaaagaggcctctagagcagagtcctcaagagccagactcctcgagcggagttggcaagaaaggcaaacagcctgccagaaagagactcaactttgacgacgaacctggagccggagacgggcctcccccagaaggaccatcttccggagctatgtctactgagactgaaatgcgtgcagcagctggcggaaatggtggcgatgcgggacaaggtgccgagggagtgggtaatgcctccggtgattggcattgcgattccacttggtcagagagccacgtcaccaccacctcaacccgcacctgggtcctgccgacctacaacaaccacctgtacctgcggctcggctcgagcaacgccagcgacaccttcaacggattctccaccccctggggatactttgactttaaccgcttccactgccacttctcgccaagagactggcaaaggctcatcaacaaccactggggactgcgccccaaaagcatgcaagtccgcatcttcaacatccaagttaaggaggtcacgacgtctaacggggagacgaccgtatccaacaacctcaccagcacggtccagatctttgcggacagcacgtacgagctcccgtacgtgatggatgcaggtcaggagggcagcttgcctcctttccccaacgacgtgttcatggtgcctcagtacgggtactgcggactggtaaccggaggcagctctcaaaaccagacagacagaaatgccttctactgtctggagtactttcccagccagatgctgagaaccggaaacaactttgagatggtgtacaagtttgaaaacgtgcccttccactccatgtacgctcacagccagagcctggataggctgatgaacccgctgctggaccagtacctgtgggagctccagtctaccacctctggaggaactctcaaccagggcaattcagccaccaactttgccaagctgaccaaaacaaacttttctggctaccgcaaaaactggctcccggggcccatgatgaagcagcagagattctccaagactgccagtcaaaactacaagattccccagggaagaaacaacagtctgctccattatgagaccagaactaccctcgacggaagatggagcaattttgccccgggaacggccatggcaaccgcagccaacgacgccaccgacttctctcaggcccagctcatctttgcggggcccaacatcaccggcaacaccaccacagatgccaataacctgatgttcacttcagaagatgaacttagggccaccaacccccgggacactgacctgtttggccacctggcaaccaaccagcaaaacgccaccaccgttcctaccgtagacgacgtggacggagtcggcgtgtacccgggaatggtgtggcaggacagagacatttactaccaagggcccatttgggccaaaattccacacacggatggacactttcacccgtctcctctcattggcggatttggactgaaaagcccgcctccacaaatattcatcaaaaacactcctgtacccgccaatcccgcaacgaccttctctccggccagaatcaacagcttcatcacccagtacagcaccggacaggtggctgtcaaaatagaatgggaaatccagaaggagcggtccaagagatggaacccagaggtccagttcacgtccaactacggagcacaggactcgcttctctgggctcccgacaacgccggagcctacaaagagcccagggccattggatcccgatacctcaccaaccacctctagcccaattctgttgcataccctcaataaaccgtgtattcgtttcagtaaaatactgcctcttgtggtcattcggcgtacaacagcttacaacaacaacaaaacccccttgctagagagtgtggcactcccccccctgtcgcgttcgctcgttcgctggctcgattgggggggtggcagctcaaagagctgccagacgacggccctctgggccgtcgcccccccaatcgagccagcgaacgagcgaacgcgacaggggggggagtgccac

SEQ ID NO: 5299 - protein, 390 aa, Bovine adeno-associated virus
MALVSWLVEHGITSEKQWIQENQESYLSFNSTGNSRSQIKAALDNASKIMSLTKSASDYLVGQTVPEDISENRIWQIFDLNGYDPAYAGSVLYGWCTRAFGKRNTVWLYGPATTGKTNIAEAISHTVPFYGCVNWTNENFPFNDCVEKMLIWWEEGKMTSKVVEPAKAILGGSRVRVDQKCKSSVQVDSTPVIITSNTNMCVVVDGNSTTFEHQQPLEDRMFRFELMRRLPPDFGKITKQEVKDFFAWAKVNQVPVTHEFMVPKKVAGTERAETSRKRPLDDVTNTNYKSPEKRARLSVVPETPRSSDVPVEPAPLRPLNWSSRYECRCDYHAKFDSVTGECDECEYLNRGKNGCIFHNATHCQICHAVPPWEKENVSDFNDFDDCNKEQ

SEQ ID NO: 5300 - protein, 610 aa, Bovine adeno-associated virus
MATFYEVIVRVPFDVEEHLPGISDNFVDWVTGQIWELPPESDLNLTLIEQPQLTVADRIRRVFLYEWNKFSKQESKFFVQFEKGSEYFHLHTLVETSGISSMVLGRYVSQIRAQLVKVVFQNIEPRINDWVAITKVKKGGANKVVDSGYIPAYLLPKVQPELQWAWTNLEEYKLAALNLEERKRLVAQFQLESSQRSQEASSQRDVSADPVIKSKTSQKYMALVSWLVEHGITSEKQWIQENQESYLSFNSTGNSRSQIKAALDNASKIMSLTKSASDYLVGQTVPEDISENRIWQIFDLNGYDPAYAGSVLYGWCTRAFGKRNTVWLYGPATTGKTNIAEAISHTVPFYGCVNWTNENFPFNDCVEKMLIWWEEGKMTSKVVEPAKAILGGSRVRVDQKCKSSVQVDSTPVIITSNTNMCVVVDGNSTTFEHQQPLEDRMFRFELMRRLPPDFGKITKQEVKDFFAWAKVNQVPVTHEFMVPKKVAGTERAETSRKRPLDDVTNTNYKSPEKRARLSVVPETPRSSDVPVEPAPLRPLNWSSRYECRCDYHAKFDSVTGECDECEYLNRGKNGCIFHNATHCQICHAVPPWEKENVSDFNDFDDCNKEQ

SEQ ID NO: 5301 - protein, 736 aa, Bovine adeno-associated virus; identical to SEQ ID NO: 5285

SEQ ID NO: 5302 - protein, 600 aa, Bovine adeno-associated virus
TAPAAKKRPLEQSPQEPDSSSGVGKKGKQPARKRLNFDDEPGAGDGPPPEGPSSGAMSTETEMRAAAGGNGGDAGQGAEGVGNASGDWHCDSTWSESHVTTTSTRTWVLPTYNNHLYLRLGSSNASDTFNGFSTPWGYFDFNRFHCHFSPRDWQRLINNHWGLRPKSMQVRIFNIQVKEVTTSNGETTVSNNLTSTVQIFADSTYELPYVMDAGQEGSLPPFPNDVFMVPQYGYCGLVTGGSSQNQTDRNAFYCLEYFPSQMLRTGNNFEMVYKFENVPFHSMYAHSQSLDRLMNPLLDQYLWELQSTTSGGTLNQGNSATNFAKLTKTNFSGYRKNWLPGPMMKQQRFSKTASQNYKIPQGRNNSLLHYETRTTLDGRWSNFAPGTAMATAANDATDFSQAQLIFAGPNITGNTTTDANNLMFTSEDELRATNPRDTDLFGHLATNQQNATTVPTVDDVDGVGVYPGMVWQDRDIYYQGPIWAKIPHTDGHFHPSPLIGGFGLKSPPPQIFIKNTPVPANPATTFSPARINSFITQYSTGQVAVKIEWEIQKERSKRWNPEVQFTSNYGAQDSLLWAPDNAGAYKEPRAIGSRYLTNHL

SEQ ID NO: 5303 - DNA, 3367 bp, Homo sapiens
ggctgcagggctggcgggacagcagcgtggactcagtctcctagggatttcccaactctcccgcccgcttgctgcatctggacaccctgcctcaggccctcatctccactggtcagcaggtgacctttgcccagcgccctgggtcctcagtgcctgctgccctggagatgatataaaacaggtcagaaccctcctgcctgtctgctcagttcatccctagaggcagctgctccaggtaatgccctctggggaggggaaagaggaggggaggaggatgaagaggggcaagaggagctccctgcccagcccagccagcaagcctggagaagcacttgctagagctaaggaagcctcggagctggacgggtgccccccacccctcatcataacctgaagaacatggaggcccgggaggggtgtcacttgcccaaagctacacagggggtggggctggaagtggctccaagtgcaggttcccccctcattcttcaggcttagggctggaggaagccttagacagcccagtcctaccccagacagggaaactgaggcctggagagggccagaaatcacccaaagacacacagcatgttggctggactggacggagatcagtccagaccgcaggtgccttgatgttcagtctggtgggttttctgctccatcccacccacctccctttgggcctcgatccctcgcccctcaccagtcccccttctgagagcccgtattagcagggagccggcccctactccttctggcagacccagctaaggttctaccttaggggccacgccacctccccagggaggggtccagaggcatggggacctggggtgcccctcacaggacacttccttgcaggaacagaggtgccatgcagccccgggtactccttgttgttgccctcctggcgctcctggcctctgcccgtaagcacttggtgggactgggctgggggcagggtggaggcaacttggggatcccagtcccaatgggtggtcaagcaggagcccagggctcgtccagaggccgatccaccccactcagccctgctctttcctcaggagcttcagaggccgaggatgcctcccttctcagcttcatgcagggttacatgaagcacgccaccaagaccgccaaggatgcactgagcagcgtgcaggagtcccaggtggcccagcaggccaggtacacccgctggcctccctccccatcccccctgccagctgcctccattcccacccgcccctgccctggtgagatcccaacaatggaatggaggtgctccagcctcccctgggcctgtgcctcttcagcctcctctttcctcacagggcctttgtcaggctgctgcgggagagatgacagagttgagactgcattcctcccaggtccctcctttctccccggagcagtcctagggcgtgccgttttagccctcatttccattttcctttcctttccctttctttctctttctatttctttctttctttctttctttctttctttctttctttctttctttctttctttctttctttctttcctttctttctttcctttctttctttcctttctttctttctttcctttctttctctttctttctttctttcctttttctttctttccctctcttcctttctctctttctttcttcttcttttttttttaatggagtctccctctgtcacctaggctggagtgcagtggtgccatctcggctcactgcaacctccgtctcccgggttcaacccattctcctgcctcagcctcccaagtagctgggattacaggcacgcgccaccacacccagctaatttttgtatttttagcagagatggggtttcaccatgttggccaggttggtcttgaattcctgacctcaggggatcctcctgcctcggcctcccaaagtgctgggattacaggcatgagccactgcgcctggccccattttccttttctgaaggtctggctagagcagtggtcctcagcctttttggcaccagggaccagttttgtggtggacaatttttccatgggccagcggggatggttttgggatgaagctgttccacctcagatcatcaggcattagattctcataaggagccctccacctagatccctggcatgtgcagttcacaatagggttcacactcctatgagaatgtaaggccacttgatctgacaggaggcggagctcaggcggtattgctcactcacccaccactcacttcgtgctgtgcagcccggctcctaacagtccatggaccagtacctatctatgacttgggggttggggacccctgggctaggggtttgccttgggaggccccacctgacccaattcaagcccgtgagtgcttctgctttgttctaagacctggggccagtgtgagcagaagtgtgtccttcctctcccatcctgcccctgcccatcagtactctcctctcccctactcccttctccacctcaccctgactggcattagctggcatagcagaggtgttcataaacattcttagtccccagaaccggctttggggtaggtgttattttctcactttgcagatgagaaaattgaggctcagagcgattaggtgacctgccccagatcacacaactaatcaatcctccaatgactttccaaatgagaggctgcctccctctgtcctaccctgctcagagccaccaggttgtgcaactccaggcggtgctgtttgcacagaaaacaatgacagccttgacctttcacatctccccaccctgtcactttgtgcctcaggcccaggggcataaacatctgaggtgacctggagatggcagggtttgacttgtgctggggttcctgcaaggatatctcttctcccagggtggcagctgtgggggattcctgcctgaggtctcagggctgtcgtccagtgaagttgagagggtggtgtggtcctgactggtgtcgtccagtggggacatgggtgtgggtcccatggttgcctacagaggagttctcatgccctgctctgttgcttcccctgactgatttaggggctgggtgaccgatggcttcagttccctgaaagactactggagcaccgttaaggacaagttctctgagttctgggatttggaccctgaggtcagaccaacttcagccgtggctgcctgagacctcaataccccaagtccacctgcctatccatcctgcgagctccttgggtcctgcaatctccagggctgcccctgtaggttgcttaaaagggacagtattctcagtgctctcctaccccacctcatgcctggcccccctccaggcatgctggcctcccaataaagctggacaagaagctgctatga

SEQ ID NO: 5304 - DNA, 13181 bp, Homo sapiens
ccgggttcacgccattctcctgcctcagcctcccaagtagctgggaccataggcgcccgccaccacgcccggctaatttttttttttttttttgtatttttagtagagatggggtttcgccgtgttagccaggatggtctcgatctcctgacctcgtgatccgcccgcctcaacctcccaaagtgctgagattacaggcgtgagccaccacgcccggcctaaaaaattattttcaatccaaggttggttgaatccatggacacagaaaccaaggatacagagggctgcctatagagctcctggcacagagtaagctctgaaaaatagttgctgttattataataatcatactgtataataatcatactgtgttcctgatttggagcaaagcagggagggtagcagagtgctccctcctctagtgagagtggcagagtgagactcagccctctgaggggcgccaggtgggccagaggcagggtgatgggtgggaccagcctgaggcctgactcctgcccttcttgccccccagccacactccctgggcaggagcagctggcttgagcagaatcttgggacctgaggctctcaggggacctcccattgggggatggagggcaatggtggtggtgcccaggaggtcttctacttagatgtctattggatctctaaatgaggctgcatgcataatcacacacaaacatccactgagaaggtgacacaccacgtcagcatgggtccctctgccggaccacaccactcctagtgactatgaggtgacatccaggcacgttgcactattggctcctgtcggtgagtgcagtgcctgacaacagtgagctacatttatttgtaaaaatgaacgccatcagagtagaccacaattgtactaactctaatttgctttgtgttcattttttcagtttccagaagtggcttaatgtttcctagggtcaaaggcagtcaaatgacctcctgactctggcaccccttctgctgggtccccactgccctgtagtggtccccacgctaccatgctgcctcctttttgatgcagcctgtgccatctctccgtgattgttggggtcagatgctggagtccactccctggcttggcatccaggctccaacacgtactgcctgtgtgtccttgggcaagtctcataacctctctgagcctcagttaccttggtgagacataaccattgtacctgcctcctaggctgtgaggattcactgagatgatcttatagtgcttgcaacaatgtctggcacataggaaaagtgatcactaaatgttagccacgtcttactcctgcaaggctcacctccctggaacccatcggtcccaaccctgctcctgaatcaggcacagtccagcttgcagcgggagcaaaggtcagtactcagtgcccctgtcccttccccaggccagaggggaggaggagactgagtcacgaatgacacctcagccgcagtttgacctccaggacttacagtcctagcagccggtgccactagcatgtgagaggtccagaggcgcttctgtctcacccgcccgcctgggtgcacccatgctgggagcgcctgcaccatttgagcatgtccgagagcatccaccagagtgtgtgtggattcacagaagtgtgcaaatcactaagaaccaagggactggcacagcccatgcgtgcacccacgctcgcgaggggacctgctgcctttcaacgtggcggggacgtgacctgttaatgaatgtatttacttcccaaagtctgagggtacgttttgcatcaatctgtagatggatttgttttggggagcagggagagaatgagagccccctgtgctcagtcttagagggtgcaagtagctgatgggaagagcagactgccttccagccaggcctggtcctgtgagtcagggacgtccatcttagtgggcatgaaaggcctgtgtgatctcgagggagacatcgcctctccaagcctctccttatctgtgcaacaggcagacttaatgattggtgaggcaatgaggctgatagctcagcattagctacagccacccctcctggccaaccacacagggatcaaaccaggggtcagtccagaggtcagagtcaggagcagacaactcagatccagccagggacaggcaggtcacacggacatgtgcctcacgtatgcttcaaggggccctcccccgggcagaactgaaggacagctcctgttgccataggagggagctgggtgagatactaggaggaacttccggcatgatgatgtgtgatgaacaagggcctctggccaacaggtctgaatcagggctgcccagcccagcctggtgggaagggcatggagcatgggggctcatgtactaaacctcacctggacacaaggtgaaacagcccaaccccagaggaccatttttggccccggatggtcaaatcccctcttcctcccatctaccactggcttctccctggagcagtcttcatcccaggggagccatgatgggagagaggggcagcgcaggctggccaccaagagatcccctgccggggtgcaggttggactgttggtgaggggccacaggtattctcaggtaccaagcccttggaaggagacaaggtaccaggcttcctggaggtgtgctacatctagctcagcaccctgccaggtctctctacccacatgtcctgacctccctgggtccgttgccatgcgggagagagaggccaggctcctccagaccctctgcagagatggaaaggcttggagggtctggggccacgggaccccgccagcccattctagcacacccgggcccatagaccttgttgcctgcccctgcctggatctgggtccccactgtgcctttgcctctggggctatggagcaggccgcagcagaagaggaaagggcatccccaataccaaatcctccagtgaccacttcttcaccttctaccccaccaccaaagtctgcaggagacttgagacaggtttgttctgggcgtgtgactgatgcctctataggggtctcagtgctctaagccgtctggtatttgcctggggtgtgtgaagacctggattaaggttcccagccttactactaatgggctgtgcacttggagcccttagagccttaggtttctaacctataaaatggacttaacgtctacttcacagggttctatttgcattttaacagaaaacaaagtcttaagtcaaaggaatgaatctctctctctctctctctctctcttttttagaccaagtctagctctgtcactggagtgcaatggtgcgatctctgctcactgcaacctccacctccggggttcaagcaattctcgtgcctcagcctcctgagtagctgggactacaggcgtgcatcaccatgctcggctaattttttgtatttttagtagagactgggtttcgccatgttgcccaggctggtctcgaactcctggcctcagatatccgtccgtcccagcctcccaaagtgctgggattacaggcatgagccactgtgcccagccaggaatggatcgctaatagaggaattccaagtctcacccaccgataaagaattctgagggcagagccgggccactttctcaggcctctgatttcatactgtggtgttagttacttctgagaggacagcttgctgccagagctctattttttatgttagaggctccttctgcctgcagactctgctgtctgggaagggcacagcgttaggagggagagggaggtgtgagtccctccatggacccgctgctttgtacttctctatctcatttccttttcagcaccactctgggcaatcagtattccagccccattttatcctcagaaaattgaggctctgagatgttatctctgtgacctgggtcctattacgtgccaaaggcatcatttaagcctaagatgtcctggctccaaggtgtcagcatctggaagacaggcgccctcatcctgccatccctgctgcggcttcactgtgggcccaggggacatctcagccccgagaagggtcagcggcccctcctggaccaccgactccccgcagaactcctctgtgccctctcctcaccagaccttgttcctcccagttgctcccacagccagggggcagtgagggctgctcttcccccagccccactgaggaacccaggaaggtgaacgagagaatcagtcctggtgggggctggggagggccccagacatgagaccagctcctcccccaggggatgttatcagtgggtccagagggcaaaatagggagcctggtggagggaggggcaaaggcctcgggctctgagcggccttggcccttctccaccaacccctgccctacactaagggggaggcagcggggggcacacagggtgggggcgggtggggggctgctgggtgagcagcactcgcctgcctggattgaaacccagagatggaggtgctgggaggggctgtgagagctcagccctgtaaccaggccttgccggagccactgatgcctggtcttctgtgcctttactccaaacaccccccagcccaagccacccacttgttctcaagtctgaagaagcccctcacccctctactccaggctgtgttcagggcttggggctggtggagggaggggcctgaaattccagtgtgaaaggctgagatgggcccgaggcccctggcctatgtccaagccatttcccctctcaccagcctctccctggggagccagtcagctaggaaggaatgagggctccccaggcccacccccagttcctgagctcatctgggctgcagggctggcgggacagcagcgtggactcagtctcctagggatttcccaactctcccgcccgcttgctgcatctggacaccctgcctcaggccctcatctccactggtcagcaggtgacctttgcccagcgccctgggtcctcagtgcctgctgccctggagatgatataaaacaggtcagaaccctcctgcctgtctgctcagttcatccctagaggcagctgctccaggtaatgccctctggggaggggaaagaggaggggaggaggatgaagaggggcaagaggagctccctgcccagcccagccagcaagcctggagaagcacttgctagagctaaggaagcctcggagctggacgggtgccccccacccctcatcataacctgaagaacatggaggcccgggaggggtgtcacttgcccaaagctacacagggggtggggctggaagtggctccaagtgcaggttcccccctcattcttcaggcttagggctggaggaagccttagacagcccagtcctaccccagacagggaaactgaggcctggagagggccagaaatcacccaaagacacacagcatgttggctggactggacggagatcagtccagaccgcaggtgccttgatgttcagtctggtgggttttctgctccatcccacccacctccctttgggcctcgatccctcgcccctcaccagtcccccttctgagagcccgtattagcagggagccggcccctactccttctggcagacccagctaaggttctaccttaggggccacgccacctccccagggaggggtccagaggcatggggacctggggtgcccctcacaggacacttccttgcaggaacagaggtgccatgcagccccgggtactccttgttgttgccctcctggcgctcctggcctctgcccgtaagcacttggtgggactgggctgggggcagggtggaggcaacttggggatcccagtcccaatgggtggtcaagcaggagcccagggctcgtccagaggccgatccaccccactcagccctgctctttcctcaggagcttcagaggccgaggatgcctcccttctcagcttcatgcagggttacatgaagcacgccaccaagaccgccaaggatgcactgagcagcgtgcaggagtcccaggtggcccagcaggccaggtacacccgctggcctccctccccatcccccctgccagctgcctccattcccacccgcccctgccctggtgagatcccaacaatggaatggaggtgctccagcctcccctgggcctgtgcctcttcagcctcctctttcctcacagggcctttgtcaggctgctgcgggagagatgacagagttgagactgcattcctcccaggtccctcctttctccccggagcagtcctagggcgtgccgttttagccctcatttccattttcctttcctttccctttctttctctttctatttctttctttctttctttctttctttctttctttctttctttctttctttctttctttctttctttcctttctttctttcctttctttctttcctttctttctttctttcctttctttctctttctttctttctttcctttttctttctttccctctcttcctttctctctttctttcttcttcttttttttttaatggagtctccctctgtcacctaggctggagtgcagtggtgccatctcggctcactgcaacctccgtctcccgggttcaacccattctcctgcctcagcctcccaagtagctgggattacaggcacgcgccaccacacccagctaatttttgtatttttagcagagatggggtttcaccatgttggccaggttggtcttgaattcctgacctcaggggatcctcctgcctcggcctcccaaagtgctgggattacaggcatgagccactgcgcctggccccattttccttttctgaaggtctggctagagcagtggtcctcagcctttttggcaccagggaccagttttgtggtggacaatttttccatgggccagcggggatggttttgggatgaagctgttccacctcagatcatcaggcattagattctcataaggagccctccacctagatccctggcatgtgcagttcacaatagggttcacactcctatgagaatgtaaggccacttgatctgacaggaggcggagctcaggcggtattgctcactcacccaccactcacttcgtgctgtgcagcccggctcctaacagtccatggaccagtacctatctatgacttgggggttggggacccctgggctaggggtttgccttgggaggccccacctgacccaattcaagcccgtgagtgcttctgctttgttctaagacctggggccagtgtgagcagaagtgtgtccttcctctcccatcctgcccctgcccatcagtactctcctctcccctactcccttctccacctcaccctgactggcattagctggcatagcagaggtgttcataaacattcttagtccccagaaccggctttggggtaggtgttattttctcactttgcagatgagaaaattgaggctcagagcgattaggtgacctgccccagatcacacaactaatcaatcctccaatgactttccaaatgagaggctgcctccctctgtcctaccctgctcagagccaccaggttgtgcaactccaggcggtgctgtttgcacagaaaacaatgacagccttgacctttcacatctccccaccctgtcactttgtgcctcaggcccaggggcataaacatctgaggtgacctggagatggcagggtttgacttgtgctggggttcctgcaaggatatctcttctcccagggtggcagctgtgggggattcctgcctgaggtctcagggctgtcgtccagtgaagttgagagggtggtgtggtcctgactggtgtcgtccagtggggacatgggtgtgggtcccatggttgcctacagaggagttctcatgccctgctctgttgcttcccctgactgatttaggggctgggtgaccgatggcttcagttccctgaaagactactggagcaccgttaaggacaagttctctgagttctgggatttggaccctgaggtcagaccaacttcagccgtggctgcctgagacctcaataccccaagtccacctgcctatccatcctgcgagctccttgggtcctgcaatctccagggctgcccctgtaggttgcttaaaagggacagtattctcagtgctctcctaccccacctcatgcctggcccccctccaggcatgctggcctcccaataaagctggacaagaagctgctatgagtgggccgtcgcaagtgtgccatctgtgtctgggcatgggaaagggccgaggctgttctgtgggtgggcactggacagactccaggtcaggcaggcatggaggccagcgctctatccaccttctggtagctgggcagtctctgggcctcagtttcttcatctctaaggtaggaatcaccctccgtaccctgccttccttgacagctttgtgcggaaggtcaaacaggacaataagtttgctgatactttgataaactgttaggtgctgcacaacatgacttgagtgtgtgccccatgccagccactatgcctggcacttaagttgtcatcagagttgagactgtgtgtgtttactcaaaactgtggagctgacctcccctatccaggccccctagccctcttaggcgcacgtgaagggaggaggccggatgggctagaggttggagtaagatgcaacgaggcactattcttggctccaccacttgatatcagcctcagtttcttacatgtaaagtggatacaaccgtaccccctccaccgtaggtttgccgtgagattgaaatgagagagcgttcgaaccgtttggcacagcacctgcacgtaaagatgcttgatcaatgttgtcatgattacagttgagctgactgggcccttgggacccggactggagtggtggggggcagtgtcctgggaccaaaaagaagcacaaggtctcccaatagaggctgcttcctttgtgtccccaccacccgaaagatgtcaggtcagagagcccgagagctgcagatggcttgagtagggctccactcttcagatcaaaaaactgtggcccggagaggcgaaggcacttggccagcatcacagagccagcacgtggcagggccagaccttgagcccaggtcagctgcgtgtattctgctcagttggtgcagaaaacagttttgtcactcctatgtcaggtgttagggactcctttacagatctcagtggcatcagtacatccagccccacctggagactgctttctctctgaaaattccccagggcttctctctgggctgagagatctcagcacccgtatctagaaaatgttcccacccagacctggctggatgactgctgttgtagctctggaaggttaggaactaaaaagcccactcctttacctagggtagctaagatacactggagatggggacatggggatggggccgattatccaggggcctgcatgagggggcaaaaggccctgcagagagagggtagggaaggcactgcccagatctgtgaagccatgtgcgtgcacgcggggacattcagacatgagtgcaaggagggaccgtgagcagggaggtcatgtgagaatacacaggcatgcctgcacacccatgtgaacttgagtgccaggccacacactcttttttttttttttttttttttagctggagtcttgctccgtcgcccaggctggagtgcagtggcatgatttcggctcactgtgacctctgcctcccaggttcaagcgattctcctgcctcagccttcctagtagctgggattacgggtgcaagccaccatgcccagctgattttttttgtatttttagtagagacagggtttcaccatattggccaggctggtctcaaactcctggcctgaagtgatacgcccacctcagcctcccaaagtgctgggattacaggcttgagccaccgcacccgacccgcgcactcttttcaataatcatggatggccaggggtgcagggtctaaaaagcgcggcctagcccatcctgctgttcactgggcaagcgacgtcacaggtccaggcttcagtgtcctcatccatgctctgcgtctgatggcaatctagccaggatgtggggaagggaggatgcagtgagagcacagatatgagagcatcttggaaataaaaatgtacctgcaagaggtggtggtgaattttcttactcaggccagcttctgccagggctggcagaaagagggggtggcatggcatggagccgcagggggtggaggactggcttccactgctgtgcctgaggaagccgcggctgtttctgggcgggatgggagtagtgggagggggatactggccttgtgagaagaaaagggaagtgtctgtttgagaggtttttgaattagtaaaggaggacaggcgcaaactccaagcgcttcacttgcacccgggaccaaaccccaatcccagtggctggctccctgaggccgccccgctccgtcccgccccgctgacagcggctgggctggagaaggctctatacggacacacctctggggacggggaacccactgctcccagctaaagcaaccctgtttcctggcccgcctcagacagggctgcaggccttgtttgagcccctttcagggcacctggccttggattgtctgtggctttgcctggtccgctgtgacttcctttctacttgagccttgctaaggcagactctactccctcactcgtaagcagccaggcgtccagcaggtcctccaacgtcgatcttggccctaagacgtccagtctgggcacggagttgttgagatccggcaggaagtccctgctccagggccaaaggccccacccgggctcccccggatgtccccgcacccccctctattctcccaaaagaaagaagctgcttcccactttggaaacgtttattctgagcaccgggaaggggggcggcggcgggcgcctcactgggtgttgagcttcttagtgtactcctcgagagcgctcaggaagctgaccttgaagctctccagcacgggcagcaggccttggcggaggtcctcgagcgcgggcttggccttctcgctgagcgtgctcagatgctcggtggccttggcgtggtactcggccagtctggcgccgccgttctccttgagagcctcaaggcgcgcggccaagcgctggcgcagctcgtcgctgtagggggccagatgcgtgcgcagcgcgtccacatgggcgcgcgcgcggtcgcgcatctcctcgcccagtgggctcagcttctcttgcagctcgtgcagcttctggcgcgcgccctcttggagctctgcgcgcagcggctccaccttctggcggtagagctccatctcctcctgccacttcttctggaagtcgtccaggtagggctgcaccttggccttcacctcctccagatccttgctcatctcctgcctcaggccctctgtctccttttccaggttatcccagaactcctgggtcacagggccgagctgttcgcgcagcttgctgaaggtggaggtcacgctgtcccagttgtcaaggagctttaggctggagggtgagacagaagggttgagggctggcctcccagcgccccagcctatcaggggtgagccctgggtgacacctgtccgcggaggtgcagtggcctagcatttccagtacactctcaaccaacacccctgccccgccaggccatgccccgttgtgcagctggaccgaggcacagagaggagctaaaaaggagacagagctgggactagtgcccagttacgttggtctccaaagtgggcccttgaaggacctcgcttctatgcctccagcgcattctcctctccgaagacagcccacagtcttgctgggcaggagcagaggaggtggtgaagaagggaaaggggcttgctacacttgcaggcacaatgtggctctgtgatcacgcatcgggcagccctggtctgtcctttgcaggggacatgggctgtgaccctgcctggagatcccattccagtttctccatccagaccatctgtggggcccagctcatcagatattaggtgaggactcggccagtctggcttcaacatcatcccacaggcctctgccccctacccctgccctcaaccccaggctgggtccttactttagctgttttcccaaggcggagccttcaaactgggacacatagtctctgccgctgtctttgagcacatccacgtacacagtggccaggtccttcactcgatcccaggggctctgggggggttcatcttgctgccagaaatgccgagcctggctccctgagggtgggaggggagacccagatcaggccagctgtgggctgagatctgagccgaaaggccaagcttggaggtgggggagagggggccagtgagaaacctgctgcctctgcccaggagggtgggccacggggatttagggagaaagccccccgatggttggctccctaggttaggggacacctacccgtcaggaagagcacggccaaggtcagcaccgcagctttcatcctgaagggccgtgggggacctggaggagaagaagggcctggctgagtggggtgccttcagcatgcagaagccccgtgctcccccactcattgcagccaggtgaggagaagggcacagagcgggagaagacctcaggtacccagaggcccggcctggggcaaggcctgaaccttgagctggggagccagagtgaccggggcaggcagcaggacgcacctccttctcgcagtctctaagcagccagctcttgcagggcctatttatgtctgcagccagggtctgggctgggaggctgataagcccagccccggccctgttgctgctcactggtcctggcaatgtggaacttaagagttcaaggatcagctctgtccctggggctgggcaaatagagtgggcaaacagcaagctgcgggggctgcagggcaggggtcaagggttcagtgggggcgggaggggagtgtctgcaggcttgcaggtctcccgggtggggtcggggttccctgcactcatccccttcccctccatgggagtgtgtgggcagttgccattgtccattgtgttggcagaggaggggaggggagggacgctgggactcctccaccaaggagactgcctcccccaccaccagcattccagggagactacttcactcccctcccccttcccccgccctgtcctccc

SEQ ID NO: 5305 - DNA, 20 bp, Artificial Sequence
  Description of Artificial Sequence: Synthetic oligonucleotide
  Target: APOC3; (-) strand; PAM type: NAAAAC; PAM sequence: CAAAAC
aatccatctacagattgatg

SEQ ID NO: 5306 - DNA, 20 bp, Artificial Sequence
  Description of Artificial Sequence: Synthetic oligonucleotide
  Target: APOC3; (-) strand; PAM type: NAAAAC; PAM sequence: CAAAAC
ctcattctctccctgctccc

SEQ ID NO: 5307 - DNA, 20 bp, Artificial Sequence
  Description of Artificial Sequence: Synthetic oligonucleotide
  Target: APOC3; (-) strand; PAM type: NAAAAC; PAM sequence: GAAAAC
gaggtgggtgggatggagca

SEQ ID NO: 5308 - DNA, 20 bp, Artificial Sequence
  Description of Artificial Sequence: Synthetic oligonucleotide
  Target: APOC3; (-) strand; PAM type: NAAAAC; PAM sequence: TAAAAC
aggaaaatggaaatgagggc

SEQ ID NO: 5309 - DNA, 20 bp, Artificial Sequence
  Description of Artificial Sequence: Synthetic oligonucleotide
  Target: APOC3; (-) strand; PAM type: NAAAAC; PAM sequence: CAAAAC
catggaaaaattgtccacca

SEQ ID NO: 5310 - DNA, 20 bp, Artificial Sequence
  Description of Artificial Sequence: Synthetic oligonucleotide
  Target: APOC3; (-) strand; PAM type: NAAAAC; PAM sequence: CAAAAC
gaggtggaacagcttcatcc

SEQ ID NO: 5311 - DNA, 20 bp, Artificial Sequence
  Description of Artificial Sequence: Synthetic oligonucleotide
  Target: APOC3; (-) strand; PAM type: NAAAAC; PAM sequence: CAAAAC
aacacctgacataggagtga

SEQ ID NO: 5312 - DNA, 20 bp, Artificial Sequence
  Description of Artificial Sequence: Synthetic oligonucleotide
  Target: APOC3; (-) strand; PAM type: NAAAAC; PAM sequence: AAAAAC
ctgtcctcctttactaattc

SEQ ID NO: 5313 - DNA, 20 bp, Artificial Sequence
  Description of Artificial Sequence: Synthetic oligonucleotide
  Target: APOC3; (-) strand; PAM type: NAAAAC; PAM sequence: GAAAAC
gtttgaaggctccgccttgg

SEQ ID NO: 5314 - DNA, 20 bp, Artificial Sequence
  Description of Artificial Sequence: Synthetic oligonucleotide
  Target: APOC3; (+) strand; PAM type: NAAAAC; PAM sequence: GAAAAC
gttctatttgcattttaaca

SEQ ID NO: 5315 - DNA, 20 bp, Artificial Sequence
  Description of Artificial Sequence: Synthetic oligonucleotide
  Target: APOC3; (+) strand; PAM type: NAAAAC; PAM sequence: TAAAAC
ctgctgccctggagatgata

SEQ ID NO: 5316 - DNA, 20 bp, Artificial Sequence
  Description of Artificial Sequence: Synthetic oligonucleotide
  Target: APOC3; (+) strand; PAM type: NAAAAC; PAM sequence: GAAAAC
caggcggtgctgtttgcaca

SEQ ID NO: 5317 - DNA, 20 bp, Artificial Sequence
  Description of Artificial Sequence: Synthetic oligonucleotide
  Target: APOC3; (+) strand; PAM type: NAAAAC; PAM sequence: CAAAAC
tgagactgtgtgtgtttact

SEQ ID NO: 5318 - DNA, 20 bp, Artificial Sequence
  Description of Artificial Sequence: Synthetic oligonucleotide
  Target: APOC3; (+) strand; PAM type: NAAAAC; PAM sequence: AAAAAC
gggctccactcttcagatca

SEQ ID NO: 5319 - DNA, 20 bp, Artificial Sequence
  Description of Artificial Sequence: Synthetic oligonucleotide
  Target: APOC3; (+) strand; PAM type: NAAAAC; PAM sequence: GAAAAC
tattctgctcagttggtgca

SEQ ID NO: 5320 - DNA, 20 bp, Artificial Sequence
  Description of Artificial Sequence: Synthetic oligonucleotide
  Target: APOC3; (-) strand; PAM type: NNAGAAW; PAM sequence: GGAGAAT
ctacttgggaggctgaggca

SEQ ID NO: 5321 - DNA, 20 bp, Artificial Sequence
  Description of Artificial Sequence: Synthetic oligonucleotide
  Target: APOC3; (-) strand; PAM type: NNAGAAW; PAM sequence: TGAGAAT
ccttccaagggcttggtacc

SEQ ID NO: 5322 - DNA, 20 bp, Artificial Sequence
  Description of Artificial Sequence: Synthetic oligonucleotide
  Target: APOC3; (-) strand; PAM type: NNAGAAW; PAM sequence: CTAGAAT
ggtctatgggcccgggtgtg

SEQ ID NO: 5323 - DNA, 20 bp, Artificial Sequence
  Description of Artificial Sequence: Synthetic oligonucleotide
  Target: APOC3; (-) strand; PAM type: NNAGAAW; PAM sequence: TTAGAAA
cgttaagtccattttatagg

SEQ ID NO: 5324 - DNA, 20 bp, Artificial Sequence
  Description of Artificial Sequence: Synthetic oligonucleotide
  Target: APOC3; (-) strand; PAM type: NNAGAAW; PAM sequence: CGAGAAT
ctactcaggaggctgaggca

SEQ ID NO: 5325 - DNA, 20 bp, Artificial Sequence
  Description of Artificial Sequence: Synthetic oligonucleotide
  Target: APOC3; (-) strand; PAM type: NNAGAAW; PAM sequence: TCAGAAT
aaagtggcccggctctgccc

SEQ ID NO: 5326 - DNA, 20 bp, Artificial Sequence
  Description of Artificial Sequence: Synthetic oligonucleotide
  Target: APOC3; (-) strand; PAM type: NNAGAAW; PAM sequence: TGAGAAA
acagtatgaaatcagaggcc

SEQ ID NO: 5327 - DNA, 20 bp, Artificial Sequence
  Description of Artificial Sequence: Synthetic oligonucleotide
  Target: APOC3; (-) strand; PAM type: NNAGAAW; PAM sequence: GAAGAAT
cttcctccagccctaagcct

SEQ ID NO: 5328 - DNA, 20 bp, Artificial Sequence
  Description of Artificial Sequence: Synthetic oligonucleotide
  Target: APOC3; (-) strand; PAM type: NNAGAAW; PAM sequence: GCAGAAA
agggaggtgggtgggatgga

SEQ ID NO: 5329 - DNA, 20 bp, Artificial Sequence
  Description of Artificial Sequence: Synthetic oligonucleotide
  Target: APOC3; (-) strand; PAM type: NNAGAAW; PAM sequence: GGAGAAA
acgccctaggactgctccgg

SEQ ID NO: 5330 - DNA, 20 bp, Artificial Sequence
  Description of Artificial Sequence: Synthetic oligonucleotide
  Target: APOC3; (-) strand; PAM type: NNAGAAW; PAM sequence: AAAGAAA
aaagaaagaaatagaaagag

SEQ ID NO: 5331 - DNA, 20 bp, Artificial Sequence
  Description of Artificial Sequence: Synthetic oligonucleotide
  Target: APOC3; (-) strand; PAM type: NNAGAAW; PAM sequence: AGAGAAA
aaagaaagaaagaaatagaa

SEQ ID NO: 5332 - DNA, 20 bp, Artificial Sequence
  Description of Artificial Sequence: Synthetic oligonucleotide
  Target: APOC3; (-) strand; PAM type: NNAGAAW; PAM sequence: ATAGAAA
agaaagaaagaaagaaagaa

SEQ ID NO: 5333 - DNA, 20 bp, Artificial Sequence
  Description of Artificial Sequence: Synthetic oligonucleotide
  Target: APOC3; (-) strand; PAM type: NNAGAAW; PAM sequence: AAAGAAA
aaagaaagaaagaaagaaag

SEQ ID NO: 5334 - DNA, 20 bp, Artificial Sequence
  Description of Artificial Sequence: Synthetic oligonucleotide
  Target: APOC3; (-) strand; PAM type: NNAGAAW; PAM sequence: AAAGAAA
aaagaaagaaagaaagaaag

SEQ ID NO: 5335 - DNA, 20 bp, Artificial Sequence
  Description of Artificial Sequence: Synthetic oligonucleotide
  Target: APOC3; (-) strand; PAM type: NNAGAAW; PAM sequence: AAAGAAA
aaagaaagaaagaaagaaag

SEQ ID NO: 5336 - DNA, 20 bp, Artificial Sequence
  Description of Artificial Sequence: Synthetic oligonucleotide
  Target: APOC3; (-) strand; PAM type: NNAGAAW; PAM sequence: AAAGAAA
aaagaaagaaagaaagaaag

SEQ ID NO: 5337 - DNA, 20 bp, Artificial Sequence
  Description of Artificial Sequence: Synthetic oligonucleotide
  Target: APOC3; (-) strand; PAM type: NNAGAAW; PAM sequence: AAAGAAA
aaagaaagaaagaaagaaag

SEQ ID NO: 5338 - DNA, 20 bp, Artificial Sequence
  Description of Artificial Sequence: Synthetic oligonucleotide
  Target: APOC3; (-) strand; PAM type: NNAGAAW; PAM sequence: AAAGAAA
aaagaaagaaagaaagaaag

SEQ ID NO: 5339 - DNA, 20 bp, Artificial Sequence
  Description of Artificial Sequence: Synthetic oligonucleotide
  Target: APOC3; (-) strand; PAM type: NNAGAAW; PAM sequence: AAAGAAA
aaagaaagaaagaaagaaag

SEQ ID NO: 5340 - DNA, 20 bp, Artificial Sequence
  Description of Artificial Sequence: Synthetic oligonucleotide
  Target: APOC3; (-) strand; PAM type: NNAGAAW; PAM sequence: AAAGAAA
aaagaaagaaagaaagaaag

SEQ ID NO: 5341 - DNA, 20 bp, Artificial Sequence
  Description of Artificial Sequence: Synthetic oligonucleotide
  Target: APOC3; (-) strand; PAM type: NNAGAAW; PAM sequence: AAAGAAA
aaagaaagaaagaaagaaag

SEQ ID NO: 5342 - DNA, 20 bp, Artificial Sequence
  Description of Artificial Sequence: Synthetic oligonucleotide
  Target: APOC3; (-) strand; PAM type: NNAGAAW; PAM sequence: AAAGAAA
aaagaaagaaagaaagaaag

SEQ ID NO: 5343 - DNA, 20 bp, Artificial Sequence
  Description of Artificial Sequence: Synthetic oligonucleotide
  Target: APOC3; (-) strand; PAM type: NNAGAAW; PAM sequence: AAAGAAA
aaagaaagaaagaaagaaag

SEQ ID NO: 5344 - DNA, 20 bp, Artificial Sequence
  Description of Artificial Sequence: Synthetic oligonucleotide
  Target: APOC3; (-) strand; PAM type: NNAGAAW; PAM sequence: AAAGAAA
aaggaaagaaagaaagaaag

SEQ ID NO: 5345 - DNA, 20 bp, Artificial Sequence
  Description of Artificial Sequence: Synthetic oligonucleotide
  Target: APOC3; (-) strand; PAM type: NNAGAAW; PAM sequence: AAAGAAA
aagaaaggaaagaaagaaag

SEQ ID NO: 5346 - DNA, 20 bp, Artificial Sequence
  Description of Artificial Sequence: Synthetic oligonucleotide
  Target: APOC3; (-) strand; PAM type: NNAGAAW; PAM sequence: AAAGAAA
aagaaagaaaggaaagaaag

SEQ ID NO: 5347 - DNA, 20 bp, Artificial Sequence
  Description of Artificial Sequence: Synthetic oligonucleotide
  Target: APOC3; (-) strand; PAM type: NNAGAAW; PAM sequence: AAAGAAA
aggaaagaaagaaaggaaag

SEQ ID NO: 5348 - DNA, 20 bp, Artificial Sequence
  Description of Artificial Sequence: Synthetic oligonucleotide
  Target: APOC3; (-) strand; PAM type: NNAGAAW; PAM sequence: AAAGAAA
agaaaggaaagaaagaaagg

SEQ ID NO: 5349 - DNA, 20 bp, Artificial Sequence
  Description of Artificial Sequence: Synthetic oligonucleotide
  Target: APOC3; (-) strand; PAM type: NNAGAAW; PAM sequence: AAAGAAA
aggaaagaaagaaaggaaag

SEQ ID NO: 5350 - DNA, 20 bp, Artificial Sequence
  Description of Artificial Sequence: Synthetic oligonucleotide
  Target: APOC3; (-) strand; PAM type: NNAGAAW; PAM sequence: AAAGAAA
agaaaggaaagaaagaaagg

SEQ ID NO: 5351 - DNA, 20 bp, Artificial Sequence
  Description of Artificial Sequence: Synthetic oligonucleotide
  Target: APOC3; (-) strand; PAM type: NNAGAAW; PAM sequence: AAAGAAA
aagaaagaaagaaaggaaag

SEQ ID NO: 5352 - DNA, 20 bp, Artificial Sequence
  Description of Artificial Sequence: Synthetic oligonucleotide
  Target: APOC3; (-) strand; PAM type: NNAGAAW; PAM sequence: AAAGAAA
aggaaagaaagaaagaaagg

SEQ ID NO: 5353 - DNA, 20 bp, Artificial Sequence
  Description of Artificial Sequence: Synthetic oligonucleotide
  Target: APOC3; (-) strand; PAM type: NNAGAAW; PAM sequence: AAAGAAA
gagaaagaaaggaaagaaag

SEQ ID NO: 5354 - DNA, 20 bp, Artificial Sequence
  Description of Artificial Sequence: Synthetic oligonucleotide
  Target: APOC3; (-) strand; PAM type: NNAGAAW; PAM sequence: AAAGAAA
gaaagagaaagaaaggaaag

SEQ ID NO: 5355 - DNA, 20 bp, Artificial Sequence
  Description of Artificial Sequence: Synthetic oligonucleotide
  Target: APOC3; (-) strand; PAM type: NNAGAAW; PAM sequence: AAAGAAA
gaaagaaagagaaagaaagg

SEQ ID NO: 5356 - DNA, 20 bp, Artificial Sequence
  Description of Artificial Sequence: Synthetic oligonucleotide
  Target: APOC3; (-) strand; PAM type: NNAGAAW; PAM sequence: AAAGAAA
ggaaagaaagaaagaaagag

SEQ ID NO: 5357 - DNA, 20 bp, Artificial Sequence
  Description of Artificial Sequence: Synthetic oligonucleotide
  Target: APOC3; (-) strand; PAM type: NNAGAAW; PAM sequence: AGAGAAA
aaaaggaaagaaagaaagaa

SEQ ID NO: 5358 - DNA, 20 bp, Artificial Sequence
  Description of Artificial Sequence: Synthetic oligonucleotide
  Target: APOC3; (-) strand; PAM type: NNAGAAW; PAM sequence: AAAGAAA
gaaagaaaaaggaaagaaag

SEQ ID NO: 5359 - DNA, 20 bp, Artificial Sequence
  Description of Artificial Sequence: Synthetic oligonucleotide
  Target: APOC3; (-) strand; PAM type: NNAGAAW; PAM sequence: AAAGAAA
gaaagaaagaaaaaggaaag

SEQ ID NO: 5360 - DNA, 20 bp, Artificial Sequence
  Description of Artificial Sequence: Synthetic oligonucleotide
  Target: APOC3; (-) strand; PAM type: NNAGAAW; PAM sequence: AAAGAAA
gagggaaagaaagaaaaagg

SEQ ID NO: 5361 - DNA, 20 bp, Artificial Sequence
  Description of Artificial Sequence: Synthetic oligonucleotide
  Target: APOC3; (-) strand; PAM type: NNAGAAW; PAM sequence: AAAGAAA
agaaaggaagagagggaaag

SEQ ID NO: 5362 - DNA, 20 bp, Artificial Sequence
  Description of Artificial Sequence: Synthetic oligonucleotide
  Target: APOC3; (-) strand; PAM type: NNAGAAW; PAM sequence: AAAGAAA
agagagaaaggaagagaggg

SEQ ID NO: 5363 - DNA, 20 bp, Artificial Sequence
  Description of Artificial Sequence: Synthetic oligonucleotide
  Target: APOC3; (-) strand; PAM type: NNAGAAW; PAM sequence: AGAGAAA
aaaaagaagaagaaagaaag

SEQ ID NO: 5364 - DNA, 20 bp, Artificial Sequence
  Description of Artificial Sequence: Synthetic oligonucleotide
  Target: APOC3; (-) strand; PAM type: NNAGAAW; PAM sequence: AAAGAAA
attaaaaaaaaaagaagaag

SEQ ID NO: 5365 - DNA, 20 bp, Artificial Sequence
  Description of Artificial Sequence: Synthetic oligonucleotide
  Target: APOC3; (-) strand; PAM type: NNAGAAW; PAM sequence: GAAGAAA
ctccattaaaaaaaaaagaa

SEQ ID NO: 5366 - DNA, 20 bp, Artificial Sequence
  Description of Artificial Sequence: Synthetic oligonucleotide
  Target: APOC3; (-) strand; PAM type: NNAGAAW; PAM sequence: GGAGAAT
ctacttgggaggctgaggca

SEQ ID NO: 5367 - DNA, 20 bp, Artificial Sequence
  Description of Artificial Sequence: Synthetic oligonucleotide
  Target: APOC3; (-) strand; PAM type: NNAGAAW; PAM sequence: TCAGAAA
ccactgctctagccagacct

SEQ ID NO: 5368 - DNA, 20 bp, Artificial Sequence
  Description of Artificial Sequence: Synthetic oligonucleotide
  Target: APOC3; (-) strand; PAM type: NNAGAAW; PAM sequence: TGAGAAT
tctaggtggagggctcctta

SEQ ID NO: 5369 - DNA, 20 bp, Artificial Sequence
  Description of Artificial Sequence: Synthetic oligonucleotide
  Target: APOC3; (-) strand; PAM type: NNAGAAW; PAM sequence: TAAGAAT
ccaaagccggttctggggac

SEQ ID NO: 5370 - DNA, 20 bp, Artificial Sequence
  Description of Artificial Sequence: Synthetic oligonucleotide
  Target: APOC3; (-) strand; PAM type: NNAGAAW; PAM sequence: TGAGAAA
caattttctcatctgcaaag

SEQ ID NO: 5371 - DNA, 20 bp, Artificial Sequence
  Description of Artificial Sequence: Synthetic oligonucleotide
  Target: APOC3; (-) strand; PAM type: NNAGAAW; PAM sequence: TGAGAAT
gaggtggggtaggagagcac

SEQ ID NO: 5372 - DNA, 20 bp, Artificial Sequence
  Description of Artificial Sequence: Synthetic oligonucleotide
  Target: APOC3; (-) strand; PAM type: NNAGAAW; PAM sequence: GAAGAAA
gtgattcctaccttagagat

SEQ ID NO: 5373 - DNA, 20 bp, Artificial Sequence
  Description of Artificial Sequence: Synthetic oligonucleotide
  Target: APOC3; (-) strand; PAM type: NNAGAAW; PAM sequence: CAAGAAT
ctgatatcaagtggtggagc

SEQ ID NO: 5374 - DNA, 20 bp, Artificial Sequence
  Description of Artificial Sequence: Synthetic oligonucleotide
  Target: APOC3; (-) strand; PAM type: NNAGAAW; PAM sequence: TAAGAAA
ggttgtatccactttacatg

SEQ ID NO: 5375 - DNA, 20 bp, Artificial Sequence
  Description of Artificial Sequence: Synthetic oligonucleotide
  Target: APOC3; (-) strand; PAM type: NNAGAAW; PAM sequence: GCAGAAT
ctgttttctgcaccaactga

SEQ ID NO: 5376 - DNA, 20 bp, Artificial Sequence
  Description of Artificial Sequence: Synthetic oligonucleotide
  Target: APOC3; (-) strand; PAM type: NNAGAAW; PAM sequence: AGAGAAA
aagccctggggaattttcag

SEQ ID NO: 5377 - DNA, 20 bp, Artificial Sequence
  Description of Artificial Sequence: Synthetic oligonucleotide
  Target: APOC3; (-) strand; PAM type: NNAGAAW; PAM sequence: GGAGAAT
ctactaggaaggctgaggca

SEQ ID NO: 5378 - DNA, 20 bp, Artificial Sequence
  Description of Artificial Sequence: Synthetic oligonucleotide
  Target: APOC3; (-) strand; PAM type: NNAGAAW; PAM sequence: TAAGAAA
ctggcagaagctggcctgag

SEQ ID NO: 5379 - DNA, 20 bp, Artificial Sequence
  Description of Artificial Sequence: Synthetic oligonucleotide
  Target: APOC3; (-) strand; PAM type: NNAGAAW; PAM sequence: CCAGAAA
tcccactactcccatcccgc

SEQ ID NO: 5380 - DNA, 20 bp, Artificial Sequence
  Description of Artificial Sequence: Synthetic oligonucleotide
  Target: APOC3; (-) strand; PAM type: NNAGAAW; PAM sequence: GTAGAAA
tctgccttagcaaggctcaa

SEQ ID NO: 5381 - DNA, 20 bp, Artificial Sequence
  Description of Artificial Sequence: Synthetic oligonucleotide
  Target: APOC3; (-) strand; PAM type: NNAGAAW; PAM sequence: GGAGAAT
gaagcagcttctttcttttg

SEQ ID NO: 5382 - DNA, 20 bp, Artificial Sequence
  Description of Artificial Sequence: Synthetic oligonucleotide
  Target: APOC3; (-) strand; PAM type: NNAGAAW; PAM sequence: TCAGAAT
gccgccccccttcccggtgc

SEQ ID NO: 5383 - DNA, 20 bp, Artificial Sequence
  Description of Artificial Sequence: Synthetic oligonucleotide
  Target: APOC3; (-) strand; PAM type: NNAGAAW; PAM sequence: GGAGAAT
ctgtgggctgtcttcggaga

SEQ ID NO: 5384 - DNA, 20 bp, Artificial Sequence
  Description of Artificial Sequence: Synthetic oligonucleotide
  Target: APOC3; (-) strand; PAM type: NNAGAAW; PAM sequence: GGAGAAA
gccccacagatggtctggat

SEQ ID NO: 5385 - DNA, 20 bp, Artificial Sequence
  Description of Artificial Sequence: Synthetic oligonucleotide
  Target: APOC3; (+) strand; PAM type: NNAGAAW; PAM sequence: ACAGAAA
ggttggttgaatccatggac

SEQ ID NO: 5386 - DNA, 20 bp, Artificial Sequence
  Description of Artificial Sequence: Synthetic oligonucleotide
  Target: APOC3; (+) strand; PAM type: NNAGAAW; PAM sequence: GCAGAAT
ggcaggagcagctggcttga

SEQ ID NO: 5387 - DNA, 20 bp, Artificial Sequence
  Description of Artificial Sequence: Synthetic oligonucleotide
  Target: APOC3; (+) strand; PAM type: NNAGAAW; PAM sequence: AGAGAAT
atttgttttggggagcaggg

SEQ ID NO: 5388 - DNA, 20 bp, Artificial Sequence
  Description of Artificial Sequence: Synthetic oligonucleotide
  Target: APOC3; (+) strand; PAM type: NNAGAAW; PAM sequence: ACAGAAA
agggttctatttgcatttta

SEQ ID NO: 5389 - DNA, 20 bp, Artificial Sequence
  Description of Artificial Sequence: Synthetic oligonucleotide
  Target: APOC3; (+) strand; PAM type: NNAGAAW; PAM sequence: AAAGAAT
tccaagtctcacccaccgat

SEQ ID NO: 5390 - DNA, 20 bp, Artificial Sequence
  Description of Artificial Sequence: Synthetic oligonucleotide
  Target: APOC3; (+) strand; PAM type: NNAGAAW; PAM sequence: TCAGAAA
attccagccccattttatcc

SEQ ID NO: 5391 - DNA, 20 bp, Artificial Sequence
  Description of Artificial Sequence: Synthetic oligonucleotide
  Target: APOC3; (+) strand; PAM type: NNAGAAW; PAM sequence: AGAGAAT
ggaacccaggaaggtgaacg

SEQ ID NO: 5392 - DNA, 20 bp, Artificial Sequence
  Description of Artificial Sequence: Synthetic oligonucleotide
  Target: APOC3; (+) strand; PAM type: NNAGAAW; PAM sequence: CCAGAAA
aaactgaggcctggagaggg

SEQ ID NO: 5393 - DNA, 20 bp, Artificial Sequence
  Description of Artificial Sequence: Synthetic oligonucleotide
  Target: APOC3; (+) strand; PAM type: NNAGAAW; PAM sequence: TGAGAAT
caatagggttcacactccta

SEQ ID NO: 5394 - DNA, 20 bp, Artificial Sequence
  Description of Artificial Sequence: Synthetic oligonucleotide
  Target: APOC3; (+) strand; PAM type: NNAGAAW; PAM sequence: TGAGAAA
ttattttctcactttgcaga

SEQ ID NO: 5395 - DNA, 20 bp, Artificial Sequence
  Description of Artificial Sequence: Synthetic oligonucleotide
  Target: APOC3; (+) strand; PAM type: NNAGAAW; PAM sequence: ACAGAAA
ctccaggcggtgctgtttgc

SEQ ID NO: 5396 - DNA, 20 bp, Artificial Sequence
  Description of Artificial Sequence: Synthetic oligonucleotide
  Target: APOC3; (+) strand; PAM type: NNAGAAW; PAM sequence: GCAGAAA
gtgtattctgctcagttggt

SEQ ID NO: 5397 - DNA, 20 bp, Artificial Sequence
  Description of Artificial Sequence: Synthetic oligonucleotide
  Target: APOC3; (+) strand; PAM type: NNAGAAW; PAM sequence: CTAGAAA
agagatctcagcacccgtat

SEQ ID NO: 5398 - DNA, 20 bp, Artificial Sequence
  Description of Artificial Sequence: Synthetic oligonucleotide
  Target: APOC3; (+) strand; PAM type: NNAGAAW; PAM sequence: TGAGAAT
ccgtgagcagggaggtcatg

SEQ ID NO: 5399 - DNA, 20 bp, Artificial Sequence
  Description of Artificial Sequence: Synthetic oligonucleotide
  Target: APOC3; (+) strand; PAM type: NNAGAAW; PAM sequence: GCAGAAA
gccagcttctgccagggctg

SEQ ID NO: 5400 - DNA, 20 bp, Artificial Sequence
  Description of Artificial Sequence: Synthetic oligonucleotide
  Target: APOC3; (+) strand; PAM type: NNAGAAW; PAM sequence: GAAGAAA
gggggatactggccttgtga

SEQ ID NO: 5401 - DNA, 20 bp, Artificial Sequence
  Description of Artificial Sequence: Synthetic oligonucleotide
  Target: APOC3; (+) strand; PAM type: NNAGAAW; PAM sequence: AAAGAAA
cacccccctctattctccca

SEQ ID NO: 5402 - DNA, 20 bp, Artificial Sequence
  Description of Artificial Sequence: Synthetic oligonucleotide
  Target: APOC3; (+) strand; PAM type: NNAGAAW; PAM sequence: CCAGAAA
tgggggggttcatcttgctg

SEQ ID NO: 5403 - DNA, 20 bp, Artificial Sequence
  Description of Artificial Sequence: Synthetic oligonucleotide
  Target: APOC3; (+) strand; PAM type: NNAGAAW; PAM sequence: TGAGAAA
ggtgggggagagggggccag

SEQ ID NO: 5404 - DNA, 20 bp, Artificial Sequence
  Description of Artificial Sequence: Synthetic oligonucleotide
  Target: APOC3; (+) strand; PAM type: NNAGAAW; PAM sequence: GGAGAAA
ggtgggccacggggatttag

SEQ ID NO: 5405 - DNA, 20 bp, Artificial Sequence
  Description of Artificial Sequence: Synthetic oligonucleotide
  Target: APOC3; (-) strand; PAM type: NNGRRT; PAM sequence: GAGAAT
tacttgggaggctgaggcag

SEQ ID NO: 5406 - DNA, 20 bp, Artificial Sequence
  Description of Artificial Sequence: Synthetic oligonucleotide
  Target: APOC3; (-) strand; PAM type: NNGRRT; PAM sequence: GCGGAT
actttgggaggttgaggcgg

SEQ ID NO: 5407 - DNA, 20 bp, Artificial Sequence
  Description of Artificial Sequence: Synthetic oligonucleotide
  Target: APOC3; (-) strand; PAM type: NNGRRT; PAM sequence: TTGGAT
gtccatggattcaaccaacc

SEQ ID NO: 5408 - DNA, 20 bp, Artificial Sequence
  Description of Artificial Sequence: Synthetic oligonucleotide
  Target: APOC3; (-) strand; PAM type: NNGRRT; PAM sequence: ATGGAT
tatccttggtttctgtgtcc

SEQ ID NO: 5409 - DNA, 20 bp, Artificial Sequence
  Description of Artificial Sequence: Synthetic oligonucleotide
  Target: APOC3; (-) strand; PAM type: NNGRRT; PAM sequence: CTGAGT
acctggcgcccctcagaggg

SEQ ID NO: 5410 - DNA, 20 bp, Artificial Sequence
  Description of Artificial Sequence: Synthetic oligonucleotide
  Target: APOC3; (-) strand; PAM type: NNGRRT; PAM sequence: AGGAGT
ggctggggggcaagaagggc

SEQ ID NO: 5411 - DNA, 20 bp, Artificial Sequence
  Description of Artificial Sequence: Synthetic oligonucleotide
  Target: APOC3; (-) strand; PAM type: NNGRRT; PAM sequence: GGGAGT
aagccagctgctcctgccca

SEQ ID NO: 5412 - DNA, 20 bp, Artificial Sequence
  Description of Artificial Sequence: Synthetic oligonucleotide
  Target: APOC3; (-) strand; PAM type: NNGRRT; PAM sequence: GTGGAT
cgtggtgtgtcaccttctca

SEQ ID NO: 5413 - DNA, 20 bp, Artificial Sequence
  Description of Artificial Sequence: Synthetic oligonucleotide
  Target: APOC3; (-) strand; PAM type: NNGRRT; PAM sequence: AGGAGT
gatgtcacctcatagtcact

SEQ ID NO: 5414 - DNA, 20 bp, Artificial Sequence
  Description of Artificial Sequence: Synthetic oligonucleotide
  Target: APOC3; (-) strand; PAM type: NNGRRT; PAM sequence: CTGGAT
gagccaatagtgcaacgtgc

SEQ ID NO: 5415 - DNA, 20 bp, Artificial Sequence
  Description of Artificial Sequence: Synthetic oligonucleotide
  Target: APOC3; (-) strand; PAM type: NNGRRT; PAM sequence: TAGAGT
aaaatgaacacaaagcaaat

SEQ ID NO: 5416 - DNA, 20 bp, Artificial Sequence
  Description of Artificial Sequence: Synthetic oligonucleotide
  Target: APOC3; (-) strand; PAM type: NNGRRT; PAM sequence: CAGAGT
ggacccagcagaaggggtgc

SEQ ID NO: 5417 - DNA, 20 bp, Artificial Sequence
  Description of Artificial Sequence: Synthetic oligonucleotide
  Target: APOC3; (-) strand; PAM type: NNGRRT; PAM sequence: AGGGGT
ggcagtggggacccagcaga

SEQ ID NO: 5418 - DNA, 20 bp, Artificial Sequence
  Description of Artificial Sequence: Synthetic oligonucleotide
  Target: APOC3; (-) strand; PAM type: NNGRRT; PAM sequence: GGGAGT
ggagcctggatgccaagcca

SEQ ID NO: 5419 - DNA, 20 bp, Artificial Sequence
  Description of Artificial Sequence: Synthetic oligonucleotide
  Target: APOC3; (-) strand; PAM type: NNGRRT; PAM sequence: CTGGAT
caggcagtacgtgttggagc

SEQ ID NO: 5420 - DNA, 20 bp, Artificial Sequence
  Description of Artificial Sequence: Synthetic oligonucleotide
  Target: APOC3; (-) strand; PAM type: NNGRRT; PAM sequence: GTGAAT
agcactataagatcatctca

SEQ ID NO: 5421 - DNA, 20 bp, Artificial Sequence
  Description of Artificial Sequence: Synthetic oligonucleotide
  Target: APOC3; (-) strand; PAM type: NNGRRT; PAM sequence: AGGAGT
tccagggaggtgagccttgc

SEQ ID NO: 5422 - DNA, 20 bp, Artificial Sequence
  Description of Artificial Sequence: Synthetic oligonucleotide
  Target: APOC3; (-) strand; PAM type: NNGRRT; PAM sequence: ATGGGT
caggagcagggttgggaccg

SEQ ID NO: 5423 - DNA, 20 bp, Artificial Sequence
  Description of Artificial Sequence: Synthetic oligonucleotide
  Target: APOC3; (-) strand; PAM type: NNGRRT; PAM sequence: CAGGGT
gactgtgcctgattcaggag

SEQ ID NO: 5424 - DNA, 20 bp, Artificial Sequence
  Description of Artificial Sequence: Synthetic oligonucleotide
  Target: APOC3; (-) strand; PAM type: NNGRRT; PAM sequence: CTGAGT
ctggggaagggacaggggca

SEQ ID NO: 5425 - DNA, 20 bp, Artificial Sequence
  Description of Artificial Sequence: Synthetic oligonucleotide
  Target: APOC3; (-) strand; PAM type: NNGRRT; PAM sequence: GCGGGT
gcatgggtgcacccaggcgg

SEQ ID NO: 5426 - DNA, 20 bp, Artificial Sequence
  Description of Artificial Sequence: Synthetic oligonucleotide
  Target: APOC3; (-) strand; PAM type: NNGRRT; PAM sequence: ATGGGT
atggtgcaggcgctcccagc

SEQ ID NO: 5427 - DNA, 20 bp, Artificial Sequence
  Description of Artificial Sequence: Synthetic oligonucleotide
  Target: APOC3; (-) strand; PAM type: NNGRRT; PAM sequence: GTGGAT
gtgaatccacacacactctg

SEQ ID NO: 5428 - DNA, 20 bp, Artificial Sequence
  Description of Artificial Sequence: Synthetic oligonucleotide
  Target: APOC3; (-) strand; PAM type: NNGRRT; PAM sequence: GTGAAT
ttagtgatttgcacacttct

SEQ ID NO: 5429 - DNA, 20 bp, Artificial Sequence
  Description of Artificial Sequence: Synthetic oligonucleotide
  Target: APOC3; (-) strand; PAM type: NNGRRT; PAM sequence: GTGGGT
cagcaggtcccctcgcgagc

SEQ ID NO: 5430 - DNA, 20 bp, Artificial Sequence
  Description of Artificial Sequence: Synthetic oligonucleotide
  Target: APOC3; (-) strand; PAM type: NNGRRT; PAM sequence: AGGGGT
tccctgtgtggttggccagg

SEQ ID NO: 5431 - DNA, 20 bp, Artificial Sequence
  Description of Artificial Sequence: Synthetic oligonucleotide
  Target: APOC3; (-) strand; PAM type: NNGRRT; PAM sequence: CTGAGT
ctgcctgtccctggctggat

SEQ ID NO: 5432 - DNA, 20 bp, Artificial Sequence
  Description of Artificial Sequence: Synthetic oligonucleotide
  Target: APOC3; (-) strand; PAM type: NNGRRT; PAM sequence: CTGGAT
tgtgacctgcctgtccctgg

SEQ ID NO: 5433 - DNA, 20 bp, Artificial Sequence
  Description of Artificial Sequence: Synthetic oligonucleotide
  Target: APOC3; (-) strand; PAM type: NNGRRT; PAM sequence: TGGGGT
cggggccaaaaatggtcctc

SEQ ID NO: 5434 - DNA, 20 bp, Artificial Sequence
  Description of Artificial Sequence: Synthetic oligonucleotide
  Target: APOC3; (-) strand; PAM type: NNGRRT; PAM sequence: GGGGAT
agtggtagatgggaggaaga

SEQ ID NO: 5435 - DNA, 20 bp, Artificial Sequence
  Description of Artificial Sequence: Synthetic oligonucleotide
  Target: APOC3; (-) strand; PAM type: NNGRRT; PAM sequence: TGGGAT
ctctcccatcatggctcccc

SEQ ID NO: 5436 - DNA, 20 bp, Artificial Sequence
  Description of Artificial Sequence: Synthetic oligonucleotide
  Target: APOC3; (-) strand; PAM type: NNGRRT; PAM sequence: GGGGAT
gtccaacctgcaccccggca

SEQ ID NO: 5437 - DNA, 20 bp, Artificial Sequence
  Description of Artificial Sequence: Synthetic oligonucleotide
  Target: APOC3; (-) strand; PAM type: NNGRRT; PAM sequence: GAGAAT
cttccaagggcttggtacct

SEQ ID NO: 5438 - DNA, 20 bp, Artificial Sequence
  Description of Artificial Sequence: Synthetic oligonucleotide
  Target: APOC3; (-) strand; PAM type: NNGRRT; PAM sequence: CAGGGT
atgtgggtagagagacctgg

SEQ ID NO: 5439 - DNA, 20 bp, Artificial Sequence
  Description of Artificial Sequence: Synthetic oligonucleotide
  Target: APOC3; (-) strand; PAM type: NNGRRT; PAM sequence: GTGGGT
acccagggaggtcaggacat

SEQ ID NO: 5440 - DNA, 20 bp, Artificial Sequence
  Description of Artificial Sequence: Synthetic oligonucleotide
  Target: APOC3; (-) strand; PAM type: NNGRRT; PAM sequence: GAGGGT
caagcctttccatctctgca

SEQ ID NO: 5441 - DNA, 20 bp, Artificial Sequence
  Description of Artificial Sequence: Synthetic oligonucleotide
  Target: APOC3; (-) strand; PAM type: NNGRRT; PAM sequence: CGGGGT
ggtgtgctagaatgggctgg

SEQ ID NO: 5442 - DNA, 20 bp, Artificial Sequence
  Description of Artificial Sequence: Synthetic oligonucleotide
  Target: APOC3; (-) strand; PAM type: NNGRRT; PAM sequence: TAGAAT
gtctatgggcccgggtgtgc

SEQ ID NO: 5443 - DNA, 20 bp, Artificial Sequence
  Description of Artificial Sequence: Synthetic oligonucleotide
  Target: APOC3; (-) strand; PAM type: NNGRRT; PAM sequence: CCGGGT
aggcaacaaggtctatgggc

SEQ ID NO: 5444 - DNA, 20 bp, Artificial Sequence
  Description of Artificial Sequence: Synthetic oligonucleotide
  Target: APOC3; (-) strand; PAM type: NNGRRT; PAM sequence: GGGGAT
tcactggaggatttggtatt

SEQ ID NO: 5445 - DNA, 20 bp, Artificial Sequence
  Description of Artificial Sequence: Synthetic oligonucleotide
  Target: APOC3; (-) strand; PAM type: NNGRRT; PAM sequence: GAGGAT
aggtgaagaagtggtcactg

SEQ ID NO: 5446 - DNA, 20 bp, Artificial Sequence
  Description of Artificial Sequence: Synthetic oligonucleotide
  Target: APOC3; (-) strand; PAM type: NNGRRT; PAM sequence: TGGGGT
tctcctgcagactttggtgg

SEQ ID NO: 5447 - DNA, 20 bp, Artificial Sequence
  Description of Artificial Sequence: Synthetic oligonucleotide
  Target: APOC3; (-) strand; PAM type: NNGRRT; PAM sequence: GAGAAT
tactcaggaggctgaggcac

SEQ ID NO: 5448 - DNA, 20 bp, Artificial Sequence
  Description of Artificial Sequence: Synthetic oligonucleotide
  Target: APOC3; (-) strand; PAM type: NNGRRT; PAM sequence: AGGAGT
acggacggatatctgaggcc

SEQ ID NO: 5449 - DNA, 20 bp, Artificial Sequence
  Description of Artificial Sequence: Synthetic oligonucleotide
  Target: APOC3; (-) strand; PAM type: NNGRRT; PAM sequence: ACGGAT
actttgggaggctgggacgg

SEQ ID NO: 5450 - DNA, 20 bp, Artificial Sequence
  Description of Artificial Sequence: Synthetic oligonucleotide
  Target: APOC3; (-) strand; PAM type: NNGRRT; PAM sequence: TGGAAT
ctttatcggtgggtgagact

SEQ ID NO: 5451 - DNA, 20 bp, Artificial Sequence
  Description of Artificial Sequence: Synthetic oligonucleotide
  Target: APOC3; (-) strand; PAM type: NNGRRT; PAM sequence: GTGGGT
gccctcagaattctttatcg

SEQ ID NO: 5452 - DNA, 20 bp, Artificial Sequence
  Description of Artificial Sequence: Synthetic oligonucleotide
  Target: APOC3; (-) strand; PAM type: NNGRRT; PAM sequence: CAGAAT
aagtggcccggctctgccct

SEQ ID NO: 5453 - DNA, 20 bp, Artificial Sequence
  Description of Artificial Sequence: Synthetic oligonucleotide
  Target: APOC3; (-) strand; PAM type: NNGRRT; PAM sequence: CAGAGT
gctgtgcccttcccagacag

SEQ ID NO: 5454 - DNA, 20 bp, Artificial Sequence
  Description of Artificial Sequence: Synthetic oligonucleotide
  Target: APOC3; (-) strand; PAM type: NNGRRT; PAM sequence: GCGGGT
agatagagaagtacaaagca

SEQ ID NO: 5455 - DNA, 20 bp, Artificial Sequence
  Description of Artificial Sequence: Synthetic oligonucleotide
  Target: APOC3; (-) strand; PAM type: NNGRRT; PAM sequence: CAGAGT
gggctggaatactgattgcc

SEQ ID NO: 5456 - DNA, 20 bp, Artificial Sequence
  Description of Artificial Sequence: Synthetic oligonucleotide
  Target: APOC3; (-) strand; PAM type: NNGRRT; PAM sequence: TGGAAT
ttctgaggataaaatggggc

SEQ ID NO: 5457 - DNA, 20 bp, Artificial Sequence
  Description of Artificial Sequence: Synthetic oligonucleotide
  Target: APOC3; (-) strand; PAM type: NNGRRT; PAM sequence: GAGGAT
tctcagagcctcaattttct

SEQ ID NO: 5458 - DNA, 20 bp, Artificial Sequence
  Description of Artificial Sequence: Synthetic oligonucleotide
  Target: APOC3; (-) strand; PAM type: NNGRRT; PAM sequence: CAGGAT
tgaagccgcagcagggatgg

SEQ ID NO: 5459 - DNA, 20 bp, Artificial Sequence
  Description of Artificial Sequence: Synthetic oligonucleotide
  Target: APOC3; (-) strand; PAM type: NNGRRT; PAM sequence: AGGGAT
gcccacagtgaagccgcagc

SEQ ID NO: 5460 - DNA, 20 bp, Artificial Sequence
  Description of Artificial Sequence: Synthetic oligonucleotide
  Target: APOC3; (-) strand; PAM type: NNGRRT; PAM sequence: GGGAGT
gggcacagaggagttctgcg

SEQ ID NO: 5461 - DNA, 20 bp, Artificial Sequence
  Description of Artificial Sequence: Synthetic oligonucleotide
  Target: APOC3; (-) strand; PAM type: NNGRRT; PAM sequence: AGGAGT
ctggtgaggagagggcacag

SEQ ID NO: 5462 - DNA, 20 bp, Artificial Sequence
  Description of Artificial Sequence: Synthetic oligonucleotide
  Target: APOC3; (-) strand; PAM type: NNGRRT; PAM sequence: CTGGGT
tgattctctcgttcaccttc

SEQ ID NO: 5463 - DNA, 20 bp, Artificial Sequence
  Description of Artificial Sequence: Synthetic oligonucleotide
  Target: APOC3; (-) strand; PAM type: NNGRRT; PAM sequence: AGGGGT
cctcccccttagtgtagggc

SEQ ID NO: 5464 - DNA, 20 bp, Artificial Sequence
  Description of Artificial Sequence: Synthetic oligonucleotide
  Target: APOC3; (-) strand; PAM type: NNGRRT; PAM sequence: GCGAGT
ctgggtttcaatccaggcag

SEQ ID NO: 5465 - DNA, 20 bp, Artificial Sequence
  Description of Artificial Sequence: Synthetic oligonucleotide
  Target: APOC3; (-) strand; PAM type: NNGRRT; PAM sequence: CTGGGT
ccctcccagcacctccatct

SEQ ID NO: 5466 - DNA, 20 bp, Artificial Sequence
  Description of Artificial Sequence: Synthetic oligonucleotide
  Target: APOC3; (-) strand; PAM type: NNGRRT; PAM sequence: TGGAGT
ggcttgggctggggggtgtt

SEQ ID NO: 5467 - DNA, 20 bp, Artificial Sequence
  Description of Artificial Sequence: Synthetic oligonucleotide
  Target: APOC3; (-) strand; PAM type: NNGRRT; PAM sequence: GGGGGT
caagtgggtggcttgggctg

SEQ ID NO: 5468 - DNA, 20 bp, Artificial Sequence
  Description of Artificial Sequence: Synthetic oligonucleotide
  Target: APOC3; (-) strand; PAM type: NNGRRT; PAM sequence: GTGGGT
ttcttcagacttgagaacaa

SEQ ID NO: 5469 - DNA, 20 bp, Artificial Sequence
  Description of Artificial Sequence: Synthetic oligonucleotide
  Target: APOC3; (-) strand; PAM type: NNGRRT; PAM sequence: AGGGGT
ctgaacacagcctggagtag

SEQ ID NO: 5470 - DNA, 20 bp, Artificial Sequence
  Description of Artificial Sequence: Synthetic oligonucleotide
  Target: APOC3; (-) strand; PAM type: NNGRRT; PAM sequence: TGGAGT
cccaagccctgaacacagcc

SEQ ID NO: 5471 - DNA, 20 bp, Artificial Sequence
  Description of Artificial Sequence: Synthetic oligonucleotide
  Target: APOC3; (-) strand; PAM type: NNGRRT; PAM sequence: TGGAAT
cccatctcagcctttcacac

SEQ ID NO: 5472 - DNA, 20 bp, Artificial Sequence
  Description of Artificial Sequence: Synthetic oligonucleotide
  Target: APOC3; (-) strand; PAM type: NNGRRT; PAM sequence: GGGGGT
cccagatgagctcaggaact

SEQ ID NO: 5473 - DNA, 20 bp, Artificial Sequence
  Description of Artificial Sequence: Synthetic oligonucleotide
  Target: APOC3; (-) strand; PAM type: NNGRRT; PAM sequence: CTGAGT
gttgggaaatccctaggaga

SEQ ID NO: 5474 - DNA, 20 bp, Artificial Sequence
  Description of Artificial Sequence: Synthetic oligonucleotide
  Target: APOC3; (-) strand; PAM type: NNGRRT; PAM sequence: GAGAGT
cagatgcagcaagcgggcgg

SEQ ID NO: 5475 - DNA, 20 bp, Artificial Sequence
  Description of Artificial Sequence: Synthetic oligonucleotide
  Target: APOC3; (-) strand; PAM type: NNGRRT; PAM sequence: CAGGGT
gtggagatgagggcctgagg

SEQ ID NO: 5476 - DNA, 20 bp, Artificial Sequence
  Description of Artificial Sequence: Synthetic oligonucleotide
  Target: APOC3; (-) strand; PAM type: NNGRRT; PAM sequence: GAGGGT
tgaactgagcagacaggcag

SEQ ID NO: 5477 - DNA, 20 bp, Artificial Sequence
  Description of Artificial Sequence: Synthetic oligonucleotide
  Target: APOC3; (-) strand; PAM type: NNGRRT; PAM sequence: AGGGAT
tacctggagcagctgcctct

SEQ ID NO: 5478 - DNA, 20 bp, Artificial Sequence
  Description of Artificial Sequence: Synthetic oligonucleotide
  Target: APOC3; (-) strand; PAM type: NNGRRT; PAM sequence: AGGGGT
atgttcttcaggttatgatg

SEQ ID NO: 5479 - DNA, 20 bp, Artificial Sequence
  Description of Artificial Sequence: Synthetic oligonucleotide
  Target: APOC3; (-) strand; PAM type: NNGRRT; PAM sequence: AAGAAT
ttcctccagccctaagcctg

SEQ ID NO: 5480 - DNA, 20 bp, Artificial Sequence
  Description of Artificial Sequence: Synthetic oligonucleotide
  Target: APOC3; (-) strand; PAM type: NNGRRT; PAM sequence: TGGGGT
caggcctcagtttccctgtc

SEQ ID NO: 5481 - DNA, 20 bp, Artificial Sequence
  Description of Artificial Sequence: Synthetic oligonucleotide
  Target: APOC3; (-) strand; PAM type: NNGRRT; PAM sequence: TTGGGT
agccaacatgctgtgtgtct

SEQ ID NO: 5482 - DNA, 20 bp, Artificial Sequence
  Description of Artificial Sequence: Synthetic oligonucleotide
  Target: APOC3; (-) strand; PAM type: NNGRRT; PAM sequence: TGGGAT
gaggcccaaagggaggtggg

SEQ ID NO: 5483 - DNA, 20 bp, Artificial Sequence
  Description of Artificial Sequence: Synthetic oligonucleotide
  Target: APOC3; (-) strand; PAM type: NNGRRT; PAM sequence: GTGGGT
ggatcgaggcccaaagggag

SEQ ID NO: 5484 - DNA, 20 bp, Artificial Sequence
  Description of Artificial Sequence: Synthetic oligonucleotide
  Target: APOC3; (-) strand; PAM type: NNGRRT; PAM sequence: AGGGAT
agggggactggtgaggggcg

SEQ ID NO: 5485 - DNA, 20 bp, Artificial Sequence
  Description of Artificial Sequence: Synthetic oligonucleotide
  Target: APOC3; (-) strand; PAM type: NNGRRT; PAM sequence: AGGAGT
ccttagctgggtctgccaga

SEQ ID NO: 5486 - DNA, 20 bp, Artificial Sequence
  Description of Artificial Sequence: Synthetic oligonucleotide
  Target: APOC3; (-) strand; PAM type: NNGRRT; PAM sequence: CTGGGT
cccctaaggtagaaccttag

SEQ ID NO: 5487 - DNA, 20 bp, Artificial Sequence
  Description of Artificial Sequence: Synthetic oligonucleotide
  Target: APOC3; (-) strand; PAM type: NNGRRT; PAM sequence: AGGAGT
gcgccaggagggcaacaaca

SEQ ID NO: 5488 - DNA, 20 bp, Artificial Sequence
  Description of Artificial Sequence: Synthetic oligonucleotide
  Target: APOC3; (-) strand; PAM type: NNGRRT; PAM sequence: TGGGAT
gcttgaccacccattgggac

SEQ ID NO: 5489 - DNA, 20 bp, Artificial Sequence
  Description of Artificial Sequence: Synthetic oligonucleotide
  Target: APOC3; (-) strand; PAM type: NNGRRT; PAM sequence: GTGGAT
aaagagcagggctgagtggg

SEQ ID NO: 5490 - DNA, 20 bp, Artificial Sequence
  Description of Artificial Sequence: Synthetic oligonucleotide
  Target: APOC3; (-) strand; PAM type: NNGRRT; PAM sequence: TGGGGT
gaggaaagagcagggctgag

SEQ ID NO: 5491 - DNA, 20 bp, Artificial Sequence
  Description of Artificial Sequence: Synthetic oligonucleotide
  Target: APOC3; (-) strand; PAM type: NNGRRT; PAM sequence: CTGAGT
ctcctgaggaaagagcaggg

SEQ ID NO: 5492 - DNA, 20 bp, Artificial Sequence
  Description of Artificial Sequence: Synthetic oligonucleotide
  Target: APOC3; (-) strand; PAM type: NNGRRT; PAM sequence: GCGGGT
ggggatggggagggaggcca

SEQ ID NO: 5493 - DNA, 20 bp, Artificial Sequence
  Description of Artificial Sequence: Synthetic oligonucleotide
  Target: APOC3; (-) strand; PAM type: NNGRRT; PAM sequence: GGGGAT
gaatggaggcagctggcagg

SEQ ID NO: 5494 - DNA, 20 bp, Artificial Sequence
  Description of Artificial Sequence: Synthetic oligonucleotide
  Target: APOC3; (-) strand; PAM type: NNGRRT; PAM sequence: GGGAAT
tcaccagggcaggggcgggt

SEQ ID NO: 5495 - DNA, 20 bp, Artificial Sequence
  Description of Artificial Sequence: Synthetic oligonucleotide
  Target: APOC3; (-) strand; PAM type: NNGRRT; PAM sequence: GCGGGT
gggatctcaccagggcaggg

SEQ ID NO: 5496 - DNA, 20 bp, Artificial Sequence
  Description of Artificial Sequence: Synthetic oligonucleotide
  Target: APOC3; (-) strand; PAM type: NNGRRT; PAM sequence: TGGGAT
gagcacctccattccattgt

SEQ ID NO: 5497 - DNA, 20 bp, Artificial Sequence
  Description of Artificial Sequence: Synthetic oligonucleotide
  Target: APOC3; (-) strand; PAM type: NNGRRT; PAM sequence: AGGAAT
ggagaaaggagggacctggg

SEQ ID NO: 5498 - DNA, 20 bp, Artificial Sequence
  Description of Artificial Sequence: Synthetic oligonucleotide
  Target: APOC3; (-) strand; PAM type: NNGRRT; PAM sequence: ATGGGT
tgggaggctgaggcaggaga

SEQ ID NO: 5499 - DNA, 20 bp, Artificial Sequence
  Description of Artificial Sequence: Synthetic oligonucleotide
  Target: APOC3; (-) strand; PAM type: NNGRRT; PAM sequence: GAGAAT
tacttgggaggctgaggcag

SEQ ID NO: 5500 - DNA, 20 bp, Artificial Sequence
  Description of Artificial Sequence: Synthetic oligonucleotide
  Target: APOC3; (-) strand; PAM type: NNGRRT; PAM sequence: CTGGGT
gctaaaaatacaaaaattag

SEQ ID NO: 5501 - DNA, 20 bp, Artificial Sequence
  Description of Artificial Sequence: Synthetic oligonucleotide
  Target: APOC3; (-) strand; PAM type: NNGRRT; PAM sequence: AGGAAT
caggaggatcccctgaggtc

SEQ ID NO: 5502 - DNA, 20 bp, Artificial Sequence
  Description of Artificial Sequence: Synthetic oligonucleotide
  Target: APOC3; (-) strand; PAM type: NNGRRT; PAM sequence: GAGGAT
actttgggaggccgaggcag

SEQ ID NO: 5503 - DNA, 20 bp, Artificial Sequence
  Description of Artificial Sequence: Synthetic oligonucleotide
  Target: APOC3; (-) strand; PAM type: NNGRRT; PAM sequence: GAGAAT
ctaggtggagggctccttat

SEQ ID NO: 5504 - DNA, 20 bp, Artificial Sequence
  Description of Artificial Sequence: Synthetic oligonucleotide
  Target: APOC3; (-) strand; PAM type: NNGRRT; PAM sequence: AGGGAT
tattgtgaactgcacatgcc

SEQ ID NO: 5505 - DNA, 20 bp, Artificial Sequence
  Description of Artificial Sequence: Synthetic oligonucleotide
  Target: APOC3; (-) strand; PAM type: NNGRRT; PAM sequence: AGGAGT
aagtggccttacattctcat

SEQ ID NO: 5506 - DNA, 20 bp, Artificial Sequence
  Description of Artificial Sequence: Synthetic oligonucleotide
  Target: APOC3; (-) strand; PAM type: NNGRRT; PAM sequence: GTGAGT
cagcacgaagtgagtggtgg

SEQ ID NO: 5507 - DNA, 20 bp, Artificial Sequence
  Description of Artificial Sequence: Synthetic oligonucleotide
  Target: APOC3; (-) strand; PAM type: NNGRRT; PAM sequence: GTGGGT
tgcacagcacgaagtgagtg

SEQ ID NO: 5508 - DNA, 20 bp, Artificial Sequence
  Description of Artificial Sequence: Synthetic oligonucleotide
  Target: APOC3; (-) strand; PAM type: NNGRRT; PAM sequence: GTGAGT
gccgggctgcacagcacgaa

SEQ ID NO: 5509 - DNA, 20 bp, Artificial Sequence
  Description of Artificial Sequence: Synthetic oligonucleotide
  Target: APOC3; (-) strand; PAM type: NNGRRT; PAM sequence: AGGGGT
ccaaggcaaacccctagccc

SEQ ID NO: 5510 - DNA, 20 bp, Artificial Sequence
  Description of Artificial Sequence: Synthetic oligonucleotide
  Target: APOC3; (-) strand; PAM type: NNGRRT; PAM sequence: TTGGGT
gaagcactcacgggcttgaa

SEQ ID NO: 5511 - DNA, 20 bp, Artificial Sequence
  Description of Artificial Sequence: Synthetic oligonucleotide
  Target: APOC3; (-) strand; PAM type: NNGRRT; PAM sequence: TTGAAT
aagcagaagcactcacgggc

SEQ ID NO: 5512 - DNA, 20 bp, Artificial Sequence
  Description of Artificial Sequence: Synthetic oligonucleotide
  Target: APOC3; (-) strand; PAM type: NNGRRT; PAM sequence: CAGGAT
agagtactgatgggcagggg

SEQ ID NO: 5513 - DNA, 20 bp, Artificial Sequence
  Description of Artificial Sequence: Synthetic oligonucleotide
  Target: APOC3; (-) strand; PAM type: NNGRRT; PAM sequence: GAGAGT
gagaagggagtaggggagag

SEQ ID NO: 5514 - DNA, 20 bp, Artificial Sequence
  Description of Artificial Sequence: Synthetic oligonucleotide
  Target: APOC3; (-) strand; PAM type: NNGRRT; PAM sequence: GGGAGT
agtcagggtgaggtggagaa

SEQ ID NO: 5515 - DNA, 20 bp, Artificial Sequence
  Description of Artificial Sequence: Synthetic oligonucleotide
  Target: APOC3; (-) strand; PAM type: NNGRRT; PAM sequence: CAGGGT
ctatgccagctaatgccagt

SEQ ID NO: 5516 - DNA, 20 bp, Artificial Sequence
  Description of Artificial Sequence: Synthetic oligonucleotide
  Target: APOC3; (-) strand; PAM type: NNGRRT; PAM sequence: AAGAAT
caaagccggttctggggact

SEQ ID NO: 5517 - DNA, 20 bp, Artificial Sequence
  Description of Artificial Sequence: Synthetic oligonucleotide
  Target: APOC3; (-) strand; PAM type: NNGRRT; PAM sequence: GAGGAT
tctcatttggaaagtcattg

SEQ ID NO: 5518 - DNA, 20 bp, Artificial Sequence
  Description of Artificial Sequence: Synthetic oligonucleotide
  Target: APOC3; (-) strand; PAM type: NNGRRT; PAM sequence: CAGGGT
cacaacctggtggctctgag

SEQ ID NO: 5519 - DNA, 20 bp, Artificial Sequence
  Description of Artificial Sequence: Synthetic oligonucleotide
  Target: APOC3; (-) strand; PAM type: NNGRRT; PAM sequence: TGGAGT
tctgtgcaaacagcaccgcc

SEQ ID NO: 5520 - DNA, 20 bp, Artificial Sequence
  Description of Artificial Sequence: Synthetic oligonucleotide
  Target: APOC3; (-) strand; PAM type: NNGRRT; PAM sequence: CAGGGT
gggcctgaggcacaaagtga

SEQ ID NO: 5521 - DNA, 20 bp, Artificial Sequence
  Description of Artificial Sequence: Synthetic oligonucleotide
  Target: APOC3; (-) strand; PAM type: NNGRRT; PAM sequence: AGGAAT
acagccctgagacctcaggc

SEQ ID NO: 5522 - DNA, 20 bp, Artificial Sequence
  Description of Artificial Sequence: Synthetic oligonucleotide
  Target: APOC3; (-) strand; PAM type: NNGRRT; PAM sequence: CAGGGT
ggctgaagttggtctgacct

SEQ ID NO: 5523 - DNA, 20 bp, Artificial Sequence
  Description of Artificial Sequence: Synthetic oligonucleotide
  Target: APOC3; (-) strand; PAM type: NNGRRT; PAM sequence: TGGGGT
gatggataggcaggtggact

SEQ ID NO: 5524 - DNA, 20 bp, Artificial Sequence
  Description of Artificial Sequence: Synthetic oligonucleotide
  Target: APOC3; (-) strand; PAM type: NNGRRT; PAM sequence: ATGGAT
ggacccaaggagctcgcagg

SEQ ID NO: 5525 - DNA, 20 bp, Artificial Sequence
  Description of Artificial Sequence: Synthetic oligonucleotide
  Target: APOC3; (-) strand; PAM type: NNGRRT; PAM sequence: CAGGAT
tgcaggacccaaggagctcg

SEQ ID NO: 5526 - DNA, 20 bp, Artificial Sequence
  Description of Artificial Sequence: Synthetic oligonucleotide
  Target: APOC3; (-) strand; PAM type: NNGRRT; PAM sequence: GAGAAT
aggtggggtaggagagcact

SEQ ID NO: 5527 - DNA, 20 bp, Artificial Sequence
  Description of Artificial Sequence: Synthetic oligonucleotide
  Target: APOC3; (-) strand; PAM type: NNGRRT; PAM sequence: TGGGGT
gaggggggccaggcatgagg

SEQ ID NO: 5528 - DNA, 20 bp, Artificial Sequence
  Description of Artificial Sequence: Synthetic oligonucleotide
  Target: APOC3; (-) strand; PAM type: NNGRRT; PAM sequence: TGGAGT
gcctccatgcctgcctgacc

SEQ ID NO: 5529 - DNA, 20 bp, Artificial Sequence
  Description of Artificial Sequence: Synthetic oligonucleotide
  Target: APOC3; (-) strand; PAM type: NNGRRT; PAM sequence: GTGGAT
gactgcccagctaccagaag

SEQ ID NO: 5530 - DNA, 20 bp, Artificial Sequence
  Description of Artificial Sequence: Synthetic oligonucleotide
  Target: APOC3; (-) strand; PAM type: NNGRRT; PAM sequence: GAGGGT
gtcaaggaaggcagggtacg

SEQ ID NO: 5531 - DNA, 20 bp, Artificial Sequence
  Description of Artificial Sequence: Synthetic oligonucleotide
  Target: APOC3; (-) strand; PAM type: NNGRRT; PAM sequence: CAGGGT
cacaaagctgtcaaggaagg

SEQ ID NO: 5532 - DNA, 20 bp, Artificial Sequence
  Description of Artificial Sequence: Synthetic oligonucleotide
  Target: APOC3; (-) strand; PAM type: NNGRRT; PAM sequence: TTGAGT
gggaggtcagctccacagtt

SEQ ID NO: 5533 - DNA, 20 bp, Artificial Sequence
  Description of Artificial Sequence: Synthetic oligonucleotide
  Target: APOC3; (-) strand; PAM type: NNGRRT; PAM sequence: CTGGAT
gcctaagagggctagggggc

SEQ ID NO: 5534 - DNA, 20 bp, Artificial Sequence
  Description of Artificial Sequence: Synthetic oligonucleotide
  Target: APOC3; (-) strand; PAM type: NNGRRT; PAM sequence: AAGAAT
tgatatcaagtggtggagcc

SEQ ID NO: 5535 - DNA, 20 bp, Artificial Sequence
  Description of Artificial Sequence: Synthetic oligonucleotide
  Target: APOC3; (-) strand; PAM type: NNGRRT; PAM sequence: GGGGGT
cacggcaaacctacggtgga

SEQ ID NO: 5536 - DNA, 20 bp, Artificial Sequence
  Description of Artificial Sequence: Synthetic oligonucleotide
  Target: APOC3; (-) strand; PAM type: NNGRRT; PAM sequence: CCGGGT
ctgccccccaccactccagt

SEQ ID NO: 5537 - DNA, 20 bp, Artificial Sequence
  Description of Artificial Sequence: Synthetic oligonucleotide
  Target: APOC3; (-) strand; PAM type: NNGRRT; PAM sequence: TCGGGT
gctctctgacctgacatctt

SEQ ID NO: 5538 - DNA, 20 bp, Artificial Sequence
  Description of Artificial Sequence: Synthetic oligonucleotide
  Target: APOC3; (-) strand; PAM type: NNGRRT; PAM sequence: AAGAGT
ggccacagttttttgatctg

SEQ ID NO: 5539 - DNA, 20 bp, Artificial Sequence
  Description of Artificial Sequence: Synthetic oligonucleotide
  Target: APOC3; (-) strand; PAM type: NNGRRT; PAM sequence: CAGAAT
tgttttctgcaccaactgag

SEQ ID NO: 5540 - DNA, 20 bp, Artificial Sequence
  Description of Artificial Sequence: Synthetic oligonucleotide
  Target: APOC3; (-) strand; PAM type: NNGRRT; PAM sequence: AGGAGT
gagtccctaacacctgacat

SEQ ID NO: 5541 - DNA, 20 bp, Artificial Sequence
  Description of Artificial Sequence: Synthetic oligonucleotide
  Target: APOC3; (-) strand; PAM type: NNGRRT; PAM sequence: AGGAGT
gatgccactgagatctgtaa

SEQ ID NO: 5542 - DNA, 20 bp, Artificial Sequence
  Description of Artificial Sequence: Synthetic oligonucleotide
  Target: APOC3; (-) strand; PAM type: NNGRRT; PAM sequence: CTGGAT
aaagcagtctccaggtgggg

SEQ ID NO: 5543 - DNA, 20 bp, Artificial Sequence
  Description of Artificial Sequence: Synthetic oligonucleotide
  Target: APOC3; (-) strand; PAM type: NNGRRT; PAM sequence: GGGAAT
cagcccagagagaagccctg

SEQ ID NO: 5544 - DNA, 20 bp, Artificial Sequence
  Description of Artificial Sequence: Synthetic oligonucleotide
  Target: APOC3; (-) strand; PAM type: NNGRRT; PAM sequence: ACGGGT
ggtgggaacattttctagat

SEQ ID NO: 5545 - DNA, 20 bp, Artificial Sequence
  Description of Artificial Sequence: Synthetic oligonucleotide
  Target: APOC3; (-) strand; PAM type: NNGRRT; PAM sequence: CTGGGT
cagcagtcatccagccaggt

SEQ ID NO: 5546 - DNA, 20 bp, Artificial Sequence
  Description of Artificial Sequence: Synthetic oligonucleotide
  Target: APOC3; (-) strand; PAM type: NNGRRT; PAM sequence: AGGAGT
atcttagctaccctaggtaa

SEQ ID NO: 5547 - DNA, 20 bp, Artificial Sequence
  Description of Artificial Sequence: Synthetic oligonucleotide
  Target: APOC3; (-) strand; PAM type: NNGRRT; PAM sequence: CTGGAT
ttgccccctcatgcaggccc

SEQ ID NO: 5548 - DNA, 20 bp, Artificial Sequence
  Description of Artificial Sequence: Synthetic oligonucleotide
  Target: APOC3; (-) strand; PAM type: NNGRRT; PAM sequence: CTGAAT
gtccctccttgcactcatgt

SEQ ID NO: 5549 - DNA, 20 bp, Artificial Sequence
  Description of Artificial Sequence: Synthetic oligonucleotide
  Target: APOC3; (-) strand; PAM type: NNGRRT; PAM sequence: ATGGGT
ggcctggcactcaagttcac

SEQ ID NO: 5550 - DNA, 20 bp, Artificial Sequence
  Description of Artificial Sequence: Synthetic oligonucleotide
  Target: APOC3; (-) strand; PAM type: NNGRRT; PAM sequence: AAGAGT
aaaaaaaaaaaaaaaaaaaa

SEQ ID NO: 5551 - DNA, 20 bp, Artificial Sequence
  Description of Artificial Sequence: Synthetic oligonucleotide
  Target: APOC3; (-) strand; PAM type: NNGRRT; PAM sequence: GAGAAT
tactaggaaggctgaggcag

SEQ ID NO: 5552 - DNA, 20 bp, Artificial Sequence
  Description of Artificial Sequence: Synthetic oligonucleotide
  Target: APOC3; (-) strand; PAM type: NNGRRT; PAM sequence: AGGAGT
tgggcgtatcacttcaggcc

SEQ ID NO: 5553 - DNA, 20 bp, Artificial Sequence
  Description of Artificial Sequence: Synthetic oligonucleotide
  Target: APOC3; (-) strand; PAM type: NNGRRT; PAM sequence: TCGGGT
tattgaaaagagtgcgcggg

SEQ ID NO: 5554 - DNA, 20 bp, Artificial Sequence
  Description of Artificial Sequence: Synthetic oligonucleotide
  Target: APOC3; (-) strand; PAM type: NNGRRT; PAM sequence: GCGGGT
atgattattgaaaagagtgc

SEQ ID NO: 5555 - DNA, 20 bp, Artificial Sequence
  Description of Artificial Sequence: Synthetic oligonucleotide
  Target: APOC3; (-) strand; PAM type: NNGRRT; PAM sequence: AAGAGT
ggccatccatgattattgaa

SEQ ID NO: 5556 - DNA, 20 bp, Artificial Sequence
  Description of Artificial Sequence: Synthetic oligonucleotide
  Target: APOC3; (-) strand; PAM type: NNGRRT; PAM sequence: CAGGAT
gtcgcttgcccagtgaacag

SEQ ID NO: 5557 - DNA, 20 bp, Artificial Sequence
  Description of Artificial Sequence: Synthetic oligonucleotide
  Target: APOC3; (-) strand; PAM type: NNGRRT; PAM sequence: ATGGAT
attgccatcagacgcagagc

SEQ ID NO: 5558 - DNA, 20 bp, Artificial Sequence
  Description of Artificial Sequence: Synthetic oligonucleotide
  Target: APOC3; (-) strand; PAM type: NNGRRT; PAM sequence: CTGAGT
cagccctggcagaagctggc

SEQ ID NO: 5559 - DNA, 20 bp, Artificial Sequence
  Description of Artificial Sequence: Synthetic oligonucleotide
  Target: APOC3; (-) strand; PAM type: NNGRRT; PAM sequence: TGGAGT
ccgggtgcaagtgaagcgct

SEQ ID NO: 5560 - DNA, 20 bp, Artificial Sequence
  Description of Artificial Sequence: Synthetic oligonucleotide
  Target: APOC3; (-) strand; PAM type: NNGRRT; PAM sequence: CCGGGT
actgggattggggtttggtc

SEQ ID NO: 5561 - DNA, 20 bp, Artificial Sequence
  Description of Artificial Sequence: Synthetic oligonucleotide
  Target: APOC3; (-) strand; PAM type: NNGRRT; PAM sequence: TGGGGT
agggagccagccactgggat

SEQ ID NO: 5562 - DNA, 20 bp, Artificial Sequence
  Description of Artificial Sequence: Synthetic oligonucleotide
  Target: APOC3; (-) strand; PAM type: NNGRRT; PAM sequence: TGGGAT
ggcctcagggagccagccac

SEQ ID NO: 5563 - DNA, 20 bp, Artificial Sequence
  Description of Artificial Sequence: Synthetic oligonucleotide
  Target: APOC3; (-) strand; PAM type: NNGRRT; PAM sequence: GTGGGT
ggttgctttagctgggagca

SEQ ID NO: 5564 - DNA, 20 bp, Artificial Sequence
  Description of Artificial Sequence: Synthetic oligonucleotide
  Target: APOC3; (-) strand; PAM type: NNGRRT; PAM sequence: CAGGGT
gtctgaggcgggccaggaaa

SEQ ID NO: 5565 - DNA, 20 bp, Artificial Sequence
  Description of Artificial Sequence: Synthetic oligonucleotide
  Target: APOC3; (-) strand; PAM type: NNGRRT; PAM sequence: TAGAGT
gctgcttacgagtgagggag

SEQ ID NO: 5566 - DNA, 20 bp, Artificial Sequence
  Description of Artificial Sequence: Synthetic oligonucleotide
  Target: APOC3; (-) strand; PAM type: NNGRRT; PAM sequence: GGGAGT
gcctggctgcttacgagtga

SEQ ID NO: 5567 - DNA, 20 bp, Artificial Sequence
  Description of Artificial Sequence: Synthetic oligonucleotide
  Target: APOC3; (-) strand; PAM type: NNGRRT; PAM sequence: ACGAGT
tgctggacgcctggctgctt

SEQ ID NO: 5568 - DNA, 20 bp, Artificial Sequence
  Description of Artificial Sequence: Synthetic oligonucleotide
  Target: APOC3; (-) strand; PAM type: NNGRRT; PAM sequence: CCGGAT
cctggagcagggacttcctg

SEQ ID NO: 5569 - DNA, 20 bp, Artificial Sequence
  Description of Artificial Sequence: Synthetic oligonucleotide
  Target: APOC3; (-) strand; PAM type: NNGRRT; PAM sequence: CCGGGT
gcggggacatccgggggagc

SEQ ID NO: 5570 - DNA, 20 bp, Artificial Sequence
  Description of Artificial Sequence: Synthetic oligonucleotide
  Target: APOC3; (-) strand; PAM type: NNGRRT; PAM sequence: GGGGGT
tttcttttgggagaatagag

SEQ ID NO: 5571 - DNA, 20 bp, Artificial Sequence
  Description of Artificial Sequence: Synthetic oligonucleotide
  Target: APOC3; (-) strand; PAM type: NNGRRT; PAM sequence: GAGAAT
aagcagcttctttcttttgg

SEQ ID NO: 5572 - DNA, 20 bp, Artificial Sequence
  Description of Artificial Sequence: Synthetic oligonucleotide
  Target: APOC3; (-) strand; PAM type: NNGRRT; PAM sequence: CAGAAT
ccgccccccttcccggtgct

SEQ ID NO: 5573 - DNA, 20 bp, Artificial Sequence
  Description of Artificial Sequence: Synthetic oligonucleotide
  Target: APOC3; (-) strand; PAM type: NNGRRT; PAM sequence: AGGAGT
cagcttcctgagcgctctcg

SEQ ID NO: 5574 - DNA, 20 bp, Artificial Sequence
  Description of Artificial Sequence: Synthetic oligonucleotide
  Target: APOC3; (-) strand; PAM type: NNGRRT; PAM sequence: CCGAGT
gaacggcggcgccagactgg

SEQ ID NO: 5575 - DNA, 20 bp, Artificial Sequence
  Description of Artificial Sequence: Synthetic oligonucleotide
  Target: APOC3; (-) strand; PAM type: NNGRRT; PAM sequence: AAGGAT
gcctgaggcaggagatgagc

SEQ ID NO: 5576 - DNA, 20 bp, Artificial Sequence
  Description of Artificial Sequence: Synthetic oligonucleotide
  Target: APOC3; (-) strand; PAM type: NNGRRT; PAM sequence: TGGGAT
gccctgtgacccaggagttc

SEQ ID NO: 5577 - DNA, 20 bp, Artificial Sequence
  Description of Artificial Sequence: Synthetic oligonucleotide
  Target: APOC3; (-) strand; PAM type: NNGRRT; PAM sequence: AGGAGT
acagctcggccctgtgaccc

SEQ ID NO: 5578 - DNA, 20 bp, Artificial Sequence
  Description of Artificial Sequence: Synthetic oligonucleotide
  Target: APOC3; (-) strand; PAM type: NNGRRT; PAM sequence: GAGAGT
gcggggcaggggtgttggtt

SEQ ID NO: 5579 - DNA, 20 bp, Artificial Sequence
  Description of Artificial Sequence: Synthetic oligonucleotide
  Target: APOC3; (-) strand; PAM type: NNGRRT; PAM sequence: AGGGGT
ggggcatggcctggcggggc

SEQ ID NO: 5580 - DNA, 20 bp, Artificial Sequence
  Description of Artificial Sequence: Synthetic oligonucleotide
  Target: APOC3; (-) strand; PAM type: NNGRRT; PAM sequence: GAGAAT
tgtgggctgtcttcggagag

SEQ ID NO: 5581 - DNA, 20 bp, Artificial Sequence
  Description of Artificial Sequence: Synthetic oligonucleotide
  Target: APOC3; (-) strand; PAM type: NNGRRT; PAM sequence: CAGGGT
actggaatgggatctccagg

SEQ ID NO: 5582 - DNA, 20 bp, Artificial Sequence
  Description of Artificial Sequence: Synthetic oligonucleotide
  Target: APOC3; (-) strand; PAM type: NNGRRT; PAM sequence: TGGGAT
tctggatggagaaactggaa

SEQ ID NO: 5583 - DNA, 20 bp, Artificial Sequence
  Description of Artificial Sequence: Synthetic oligonucleotide
  Target: APOC3; (-) strand; PAM type: NNGRRT; PAM sequence: TGGAAT
gatggtctggatggagaaac

SEQ ID NO: 5584 - DNA, 20 bp, Artificial Sequence
  Description of Artificial Sequence: Synthetic oligonucleotide
  Target: APOC3; (-) strand; PAM type: NNGRRT; PAM sequence: CTGGAT
agctgggccccacagatggt

SEQ ID NO: 5585 - DNA, 20 bp, Artificial Sequence
  Description of Artificial Sequence: Synthetic oligonucleotide
  Target: APOC3; (-) strand; PAM type: NNGRRT; PAM sequence: CCGAGT
tgatgttgaagccagactgg

SEQ ID NO: 5586 - DNA, 20 bp, Artificial Sequence
  Description of Artificial Sequence: Synthetic oligonucleotide
  Target: APOC3; (-) strand; PAM type: NNGRRT; PAM sequence: TGGGAT
gggtagggggcagaggcctg

SEQ ID NO: 5587 - DNA, 20 bp, Artificial Sequence
  Description of Artificial Sequence: Synthetic oligonucleotide
  Target: APOC3; (-) strand; PAM type: NNGRRT; PAM sequence: AGGGGT
cccagcctggggttgagggc

SEQ ID NO: 5588 - DNA, 20 bp, Artificial Sequence
  Description of Artificial Sequence: Synthetic oligonucleotide
  Target: APOC3; (-) strand; PAM type: NNGRRT; PAM sequence: TGGGGT
gctaaagtaaggacccagcc

SEQ ID NO: 5589 - DNA, 20 bp, Artificial Sequence
  Description of Artificial Sequence: Synthetic oligonucleotide
  Target: APOC3; (-) strand; PAM type: NNGRRT; PAM sequence: GTGGAT
aggacctggccactgtgtac

SEQ ID NO: 5590 - DNA, 20 bp, Artificial Sequence
  Description of Artificial Sequence: Synthetic oligonucleotide
  Target: APOC3; (-) strand; PAM type: NNGRRT; PAM sequence: TCGAGT
cccccccagagcccctggga

SEQ ID NO: 5591 - DNA, 20 bp, Artificial Sequence
  Description of Artificial Sequence: Synthetic oligonucleotide
  Target: APOC3; (-) strand; PAM type: NNGRRT; PAM sequence: TGGGAT
atgaacccccccagagcccc

SEQ ID NO: 5592 - DNA, 20 bp, Artificial Sequence
  Description of Artificial Sequence: Synthetic oligonucleotide
  Target: APOC3; (-) strand; PAM type: NNGRRT; PAM sequence: CTGGGT
cagcccacagctggcctgat

SEQ ID NO: 5593 - DNA, 20 bp, Artificial Sequence
  Description of Artificial Sequence: Synthetic oligonucleotide
  Target: APOC3; (-) strand; PAM type: NNGRRT; PAM sequence: ACGGGT
ccttggccgtgctcttcctg

SEQ ID NO: 5594 - DNA, 20 bp, Artificial Sequence
  Description of Artificial Sequence: Synthetic oligonucleotide
  Target: APOC3; (-) strand; PAM type: NNGRRT; PAM sequence: CAGGAT
ccaggtcccccacggccctt

SEQ ID NO: 5595 - DNA, 20 bp, Artificial Sequence
  Description of Artificial Sequence: Synthetic oligonucleotide
  Target: APOC3; (-) strand; PAM type: NNGRRT; PAM sequence: ATGAGT
cttctcctcacctggctgca

SEQ ID NO: 5596 - DNA, 20 bp, Artificial Sequence
  Description of Artificial Sequence: Synthetic oligonucleotide
  Target: APOC3; (-) strand; PAM type: NNGRRT; PAM sequence: CTGGGT
ccttgccccaggccgggcct

SEQ ID NO: 5597 - DNA, 20 bp, Artificial Sequence
  Description of Artificial Sequence: Synthetic oligonucleotide
  Target: APOC3; (-) strand; PAM type: NNGRRT; PAM sequence: ATGAGT
ctcccatggaggggaagggg

SEQ ID NO: 5598 - DNA, 20 bp, Artificial Sequence
  Description of Artificial Sequence: Synthetic oligonucleotide
  Target: APOC3; (-) strand; PAM type: NNGRRT; PAM sequence: GGGGAT
cacactcccatggaggggaa

SEQ ID NO: 5599 - DNA, 20 bp, Artificial Sequence
  Description of Artificial Sequence: Synthetic oligonucleotide
  Target: APOC3; (-) strand; PAM type: NNGRRT; PAM sequence: AGGAGT
ggaggcagtctccttggtgg

SEQ ID NO: 5600 - DNA, 20 bp, Artificial Sequence
  Description of Artificial Sequence: Synthetic oligonucleotide
  Target: APOC3; (-) strand; PAM type: NNGRRT; PAM sequence: TGGAAT
ggggagtgaagtagtctccc

SEQ ID NO: 5601 - DNA, 20 bp, Artificial Sequence
  Description of Artificial Sequence: Synthetic oligonucleotide
  Target: APOC3; (-) strand; PAM type: NNGRRT; PAM sequence: GGGAGT
cagggcgggggaagggggag

SEQ ID NO: 5602 - DNA, 20 bp, Artificial Sequence
  Description of Artificial Sequence: Synthetic oligonucleotide
  Target: APOC3; (+) strand; PAM type: NNGRRT; PAM sequence: TGGGGT
ttttgtatttttagtagaga

SEQ ID NO: 5603 - DNA, 20 bp, Artificial Sequence
  Description of Artificial Sequence: Synthetic oligonucleotide
  Target: APOC3; (+) strand; PAM type: NNGRRT; PAM sequence: CAGGAT
tggggtttcgccgtgttagc

SEQ ID NO: 5604 - DNA, 20 bp, Artificial Sequence
  Description of Artificial Sequence: Synthetic oligonucleotide
  Target: APOC3; (+) strand; PAM type: NNGRRT; PAM sequence: TTGAAT
tattttcaatccaaggttgg

SEQ ID NO: 5605 - DNA, 20 bp, Artificial Sequence
  Description of Artificial Sequence: Synthetic oligonucleotide
  Target: APOC3; (+) strand; PAM type: NNGRRT; PAM sequence: AAGGAT
aatccatggacacagaaacc

SEQ ID NO: 5606 - DNA, 20 bp, Artificial Sequence
  Description of Artificial Sequence: Synthetic oligonucleotide
  Target: APOC3; (+) strand; PAM type: NNGRRT; PAM sequence: CAGAGT
tgcctatagagctcctggca

SEQ ID NO: 5607 - DNA, 20 bp, Artificial Sequence
  Description of Artificial Sequence: Synthetic oligonucleotide
  Target: APOC3; (+) strand; PAM type: NNGRRT; PAM sequence: GAGGGT
ctgatttggagcaaagcagg

SEQ ID NO: 5608 - DNA, 20 bp, Artificial Sequence
  Description of Artificial Sequence: Synthetic oligonucleotide
  Target: APOC3; (+) strand; PAM type: NNGRRT; PAM sequence: CAGAGT
gagcaaagcagggagggtag

SEQ ID NO: 5609 - DNA, 20 bp, Artificial Sequence
  Description of Artificial Sequence: Synthetic oligonucleotide
  Target: APOC3; (+) strand; PAM type: NNGRRT; PAM sequence: GAGAGT
agagtgctccctcctctagt

SEQ ID NO: 5610 - DNA, 20 bp, Artificial Sequence
  Description of Artificial Sequence: Synthetic oligonucleotide
  Target: APOC3; (+) strand; PAM type: NNGRRT; PAM sequence: CAGAGT
ccctcctctagtgagagtgg

SEQ ID NO: 5611 - DNA, 20 bp, Artificial Sequence
  Description of Artificial Sequence: Synthetic oligonucleotide
  Target: APOC3; (+) strand; PAM type: NNGRRT; PAM sequence: CAGGGT
ggcgccaggtgggccagagg

SEQ ID NO: 5612 - DNA, 20 bp, Artificial Sequence
  Description of Artificial Sequence: Synthetic oligonucleotide
  Target: APOC3; (+) strand; PAM type: NNGRRT; PAM sequence: ATGGGT
ggtgggccagaggcagggtg

SEQ ID NO: 5613 - DNA, 20 bp, Artificial Sequence
  Description of Artificial Sequence: Synthetic oligonucleotide
  Target: APOC3; (+) strand; PAM type: NNGRRT; PAM sequence: CAGAAT
gcaggagcagctggcttgag

SEQ ID NO: 5614 - DNA, 20 bp, Artificial Sequence
  Description of Artificial Sequence: Synthetic oligonucleotide
  Target: APOC3; (+) strand; PAM type: NNGRRT; PAM sequence: GGGGAT
tctcaggggacctcccattg

SEQ ID NO: 5615 - DNA, 20 bp, Artificial Sequence
  Description of Artificial Sequence: Synthetic oligonucleotide
  Target: APOC3; (+) strand; PAM type: NNGRRT; PAM sequence: TTGGAT
gtcttctacttagatgtcta

SEQ ID NO: 5616 - DNA, 20 bp, Artificial Sequence
  Description of Artificial Sequence: Synthetic oligonucleotide
  Target: APOC3; (+) strand; PAM type: NNGRRT; PAM sequence: ATGGGT
aggtgacacaccacgtcagc

SEQ ID NO: 5617 - DNA, 20 bp, Artificial Sequence
  Description of Artificial Sequence: Synthetic oligonucleotide
  Target: APOC3; (+) strand; PAM type: NNGRRT; PAM sequence: GTGAGT
tgcactattggctcctgtcg

SEQ ID NO: 5618 - DNA, 20 bp, Artificial Sequence
  Description of Artificial Sequence: Synthetic oligonucleotide
  Target: APOC3; (+) strand; PAM type: NNGRRT; PAM sequence: CAGAGT
tttgtaaaaatgaacgccat

SEQ ID NO: 5619 - DNA, 20 bp, Artificial Sequence
  Description of Artificial Sequence: Synthetic oligonucleotide
  Target: APOC3; (+) strand; PAM type: NNGRRT; PAM sequence: TAGGGT
agaagtggcttaatgtttcc

SEQ ID NO: 5620 - DNA, 20 bp, Artificial Sequence
  Description of Artificial Sequence: Synthetic oligonucleotide
  Target: APOC3; (+) strand; PAM type: NNGRRT; PAM sequence: CTGGGT
tgactctggcaccccttctg

SEQ ID NO: 5621 - DNA, 20 bp, Artificial Sequence
  Description of Artificial Sequence: Synthetic oligonucleotide
  Target: APOC3; (+) strand; PAM type: NNGRRT; PAM sequence: TGGGGT
tgccatctctccgtgattgt

SEQ ID NO: 5622 - DNA, 20 bp, Artificial Sequence
  Description of Artificial Sequence: Synthetic oligonucleotide
  Target: APOC3; (+) strand; PAM type: NNGRRT; PAM sequence: TGGAGT
tgattgttggggtcagatgc

SEQ ID NO: 5623 - DNA, 20 bp, Artificial Sequence
  Description of Artificial Sequence: Synthetic oligonucleotide
  Target: APOC3; (+) strand; PAM type: NNGRRT; PAM sequence: GAGGAT
gtacctgcctcctaggctgt

SEQ ID NO: 5624 - DNA, 20 bp, Artificial Sequence
  Description of Artificial Sequence: Synthetic oligonucleotide
  Target: APOC3; (+) strand; PAM type: NNGRRT; PAM sequence: CTGAAT
catcggtcccaaccctgctc

SEQ ID NO: 5625 - DNA, 20 bp, Artificial Sequence
  Description of Artificial Sequence: Synthetic oligonucleotide
  Target: APOC3; (+) strand; PAM type: NNGRRT; PAM sequence: CTGAGT
ggccagaggggaggaggaga

SEQ ID NO: 5626 - DNA, 20 bp, Artificial Sequence
  Description of Artificial Sequence: Synthetic oligonucleotide
  Target: APOC3; (+) strand; PAM type: NNGRRT; PAM sequence: ACGAAT
ggggaggaggagactgagtc

SEQ ID NO: 5627 - DNA, 20 bp, Artificial Sequence
  Description of Artificial Sequence: Synthetic oligonucleotide
  Target: APOC3; (+) strand; PAM type: NNGRRT; PAM sequence: CTGGGT
cttctgtctcacccgcccgc

SEQ ID NO: 5628 - DNA, 20 bp, Artificial Sequence
  Description of Artificial Sequence: Synthetic oligonucleotide
  Target: APOC3; (+) strand; PAM type: NNGRRT; PAM sequence: CAGAGT
gcatgtccgagagcatccac

SEQ ID NO: 5629 - DNA, 20 bp, Artificial Sequence
  Description of Artificial Sequence: Synthetic oligonucleotide
  Target: APOC3; (+) strand; PAM type: NNGRRT; PAM sequence: GTGGAT
gagcatccaccagagtgtgt

SEQ ID NO: 5630 - DNA, 20 bp, Artificial Sequence
  Description of Artificial Sequence: Synthetic oligonucleotide
  Target: APOC3; (+) strand; PAM type: NNGRRT; PAM sequence: ATGAAT
ggcggggacgtgacctgtta

SEQ ID NO: 5631 - DNA, 20 bp, Artificial Sequence
  Description of Artificial Sequence: Synthetic oligonucleotide
  Target: APOC3; (+) strand; PAM type: NNGRRT; PAM sequence: GAGGGT
gtatttacttcccaaagtct

SEQ ID NO: 5632 - DNA, 20 bp, Artificial Sequence
  Description of Artificial Sequence: Synthetic oligonucleotide
  Target: APOC3; (+) strand; PAM type: NNGRRT; PAM sequence: ATGGAT
cgttttgcatcaatctgtag

SEQ ID NO: 5633 - DNA, 20 bp, Artificial Sequence
  Description of Artificial Sequence: Synthetic oligonucleotide
  Target: APOC3; (+) strand; PAM type: NNGRRT; PAM sequence: GAGAAT
tttgttttggggagcaggga

SEQ ID NO: 5634 - DNA, 20 bp, Artificial Sequence
  Description of Artificial Sequence: Synthetic oligonucleotide
  Target: APOC3; (+) strand; PAM type: NNGRRT; PAM sequence: GAGGGT
gccccctgtgctcagtctta

SEQ ID NO: 5635 - DNA, 20 bp, Artificial Sequence
  Description of Artificial Sequence: Synthetic oligonucleotide
  Target: APOC3; (+) strand; PAM type: NNGRRT; PAM sequence: GTGAGT
ttccagccaggcctggtcct

SEQ ID NO: 5636 - DNA, 20 bp, Artificial Sequence
  Description of Artificial Sequence: Synthetic oligonucleotide
  Target: APOC3; (+) strand; PAM type: NNGRRT; PAM sequence: AGGGAT
cccctcctggccaaccacac

SEQ ID NO: 5637 - DNA, 20 bp, Artificial Sequence
  Description of Artificial Sequence: Synthetic oligonucleotide
  Target: APOC3; (+) strand; PAM type: NNGRRT; PAM sequence: AGGGGT
aaccacacagggatcaaacc

SEQ ID NO: 5638 - DNA, 20 bp, Artificial Sequence
  Description of Artificial Sequence: Synthetic oligonucleotide
  Target: APOC3; (+) strand; PAM type: NNGRRT; PAM sequence: CAGAGT
ccaggggtcagtccagaggt

SEQ ID NO: 5639 - DNA, 20 bp, Artificial Sequence
  Description of Artificial Sequence: Synthetic oligonucleotide
  Target: APOC3; (+) strand; PAM type: NNGRRT; PAM sequence: CTGGGT
cctgttgccataggagggag

SEQ ID NO: 5640 - DNA, 20 bp, Artificial Sequence
  Description of Artificial Sequence: Synthetic oligonucleotide
  Target: APOC3; (+) strand; PAM type: NNGRRT; PAM sequence: CTGAAT
agggcctctggccaacaggt

SEQ ID NO: 5641 - DNA, 20 bp, Artificial Sequence
  Description of Artificial Sequence: Synthetic oligonucleotide
  Target: APOC3; (+) strand; PAM type: NNGRRT; PAM sequence: CCGGAT
ccagaggaccatttttggcc

SEQ ID NO: 5642 - DNA, 20 bp, Artificial Sequence
  Description of Artificial Sequence: Synthetic oligonucleotide
  Target: APOC3; (+) strand; PAM type: NNGRRT; PAM sequence: CGGGGT
gccaccaagagatcccctgc

SEQ ID NO: 5643 - DNA, 20 bp, Artificial Sequence
  Description of Artificial Sequence: Synthetic oligonucleotide
  Target: APOC3; (+) strand; PAM type: NNGRRT; PAM sequence: CTGGGT
acccacatgtcctgacctcc

SEQ ID NO: 5644 - DNA, 20 bp, Artificial Sequence
  Description of Artificial Sequence: Synthetic oligonucleotide
  Target: APOC3; (+) strand; PAM type: NNGRRT; PAM sequence: GAGGGT
tgcagagatggaaaggcttg

SEQ ID NO: 5645 - DNA, 20 bp, Artificial Sequence
  Description of Artificial Sequence: Synthetic oligonucleotide
  Target: APOC3; (+) strand; PAM type: NNGRRT; PAM sequence: CTGGAT
accttgttgcctgcccctgc

SEQ ID NO: 5646 - DNA, 20 bp, Artificial Sequence
  Description of Artificial Sequence: Synthetic oligonucleotide
  Target: APOC3; (+) strand; PAM type: NNGRRT; PAM sequence: CTGGGT
ttgcctgcccctgcctggat

SEQ ID NO: 5647 - DNA, 20 bp, Artificial Sequence
  Description of Artificial Sequence: Synthetic oligonucleotide
  Target: APOC3; (+) strand; PAM type: NNGRRT; PAM sequence: AGGGGT
cgtgtgactgatgcctctat

SEQ ID NO: 5648 - DNA, 20 bp, Artificial Sequence
  Description of Artificial Sequence: Synthetic oligonucleotide
  Target: APOC3; (+) strand; PAM type: NNGRRT; PAM sequence: TGGGGT
taagccgtctggtatttgcc

SEQ ID NO: 5649 - DNA, 20 bp, Artificial Sequence
  Description of Artificial Sequence: Synthetic oligonucleotide
  Target: APOC3; (+) strand; PAM type: NNGRRT; PAM sequence: CTGGAT
tgcctggggtgtgtgaagac

SEQ ID NO: 5650 - DNA, 20 bp, Artificial Sequence
  Description of Artificial Sequence: Synthetic oligonucleotide
  Target: APOC3; (+) strand; PAM type: NNGRRT; PAM sequence: CAGGGT
tggacttaacgtctacttca

SEQ ID NO: 5651 - DNA, 20 bp, Artificial Sequence
  Description of Artificial Sequence: Synthetic oligonucleotide
  Target: APOC3; (+) strand; PAM type: NNGRRT; PAM sequence: AGGAAT
aaaacaaagtcttaagtcaa

SEQ ID NO: 5652 - DNA, 20 bp, Artificial Sequence
  Description of Artificial Sequence: Synthetic oligonucleotide
  Target: APOC3; (+) strand; PAM type: NNGRRT; PAM sequence: ATGAAT
caaagtcttaagtcaaagga

SEQ ID NO: 5653 - DNA, 20 bp, Artificial Sequence
  Description of Artificial Sequence: Synthetic oligonucleotide
  Target: APOC3; (+) strand; PAM type: NNGRRT; PAM sequence: TGGAGT
accaagtctagctctgtcac

SEQ ID NO: 5654 - DNA, 20 bp, Artificial Sequence
  Description of Artificial Sequence: Synthetic oligonucleotide
  Target: APOC3; (+) strand; PAM type: NNGRRT; PAM sequence: CGGGGT
ctcactgcaacctccacctc

SEQ ID NO: 5655 - DNA, 20 bp, Artificial Sequence
  Description of Artificial Sequence: Synthetic oligonucleotide
  Target: APOC3; (+) strand; PAM type: NNGRRT; PAM sequence: CTGAGT
aattctcgtgcctcagcctc

SEQ ID NO: 5656 - DNA, 20 bp, Artificial Sequence
  Description of Artificial Sequence: Synthetic oligonucleotide
  Target: APOC3; (+) strand; PAM type: NNGRRT; PAM sequence: CTGGGT
ttttgtatttttagtagaga

SEQ ID NO: 5657 - DNA, 20 bp, Artificial Sequence
  Description of Artificial Sequence: Synthetic oligonucleotide
  Target: APOC3; (+) strand; PAM type: NNGRRT; PAM sequence: TGGGAT
gtcccagcctcccaaagtgc

SEQ ID NO: 5658 - DNA, 20 bp, Artificial Sequence
  Description of Artificial Sequence: Synthetic oligonucleotide
  Target: APOC3; (+) strand; PAM type: NNGRRT; PAM sequence: AGGAAT
atgagccactgtgcccagcc

SEQ ID NO: 5659 - DNA, 20 bp, Artificial Sequence
  Description of Artificial Sequence: Synthetic oligonucleotide
  Target: APOC3; (+) strand; PAM type: NNGRRT; PAM sequence: ATGGAT
gccactgtgcccagccagga

SEQ ID NO: 5660 - DNA, 20 bp, Artificial Sequence
  Description of Artificial Sequence: Synthetic oligonucleotide
  Target: APOC3; (+) strand; PAM type: NNGRRT; PAM sequence: AGGAAT
caggaatggatcgctaatag

SEQ ID NO: 5661 - DNA, 20 bp, Artificial Sequence
  Description of Artificial Sequence: Synthetic oligonucleotide
  Target: APOC3; (+) strand; PAM type: NNGRRT; PAM sequence: AAGAAT
ccaagtctcacccaccgata

SEQ ID NO: 5662 - DNA, 20 bp, Artificial Sequence
  Description of Artificial Sequence: Synthetic oligonucleotide
  Target: APOC3; (+) strand; PAM type: NNGRRT; PAM sequence: GTGAGT
gttaggagggagagggaggt

SEQ ID NO: 5663 - DNA, 20 bp, Artificial Sequence
  Description of Artificial Sequence: Synthetic oligonucleotide
  Target: APOC3; (+) strand; PAM type: NNGRRT; PAM sequence: CTGGGT
tgagatgttatctctgtgac

SEQ ID NO: 5664 - DNA, 20 bp, Artificial Sequence
  Description of Artificial Sequence: Synthetic oligonucleotide
  Target: APOC3; (+) strand; PAM type: NNGRRT; PAM sequence: AAGGGT
ggggacatctcagccccgag

SEQ ID NO: 5665 - DNA, 20 bp, Artificial Sequence
  Description of Artificial Sequence: Synthetic oligonucleotide
  Target: APOC3; (+) strand; PAM type: NNGRRT; PAM sequence: GAGAAT
gaacccaggaaggtgaacga

SEQ ID NO: 5666 - DNA, 20 bp, Artificial Sequence
  Description of Artificial Sequence: Synthetic oligonucleotide
  Target: APOC3; (+) strand; PAM type: NNGRRT; PAM sequence: GGGGAT
tgagaccagctcctccccca

SEQ ID NO: 5667 - DNA, 20 bp, Artificial Sequence
  Description of Artificial Sequence: Synthetic oligonucleotide
  Target: APOC3; (+) strand; PAM type: NNGRRT; PAM sequence: GTGGGT
tcccccaggggatgttatca

SEQ ID NO: 5668 - DNA, 20 bp, Artificial Sequence
  Description of Artificial Sequence: Synthetic oligonucleotide
  Target: APOC3; (+) strand; PAM type: NNGRRT; PAM sequence: CAGGGT
gggaggcagcggggggcaca

SEQ ID NO: 5669 - DNA, 20 bp, Artificial Sequence
  Description of Artificial Sequence: Synthetic oligonucleotide
  Target: APOC3; (+) strand; PAM type: NNGRRT; PAM sequence: GCGGGT
ggggggcacacagggtgggg

SEQ ID NO: 5670 - DNA, 20 bp, Artificial Sequence
  Description of Artificial Sequence: Synthetic oligonucleotide
  Target: APOC3; (+) strand; PAM type: NNGRRT; PAM sequence: CTGGGT
tgggggcgggtggggggctg

SEQ ID NO: 5671 - DNA, 20 bp, Artificial Sequence
  Description of Artificial Sequence: Synthetic oligonucleotide
  Target: APOC3; (+) strand; PAM type: NNGRRT; PAM sequence: CTGGAT
ggtgagcagcactcgcctgc

SEQ ID NO: 5672 - DNA, 20 bp, Artificial Sequence
  Description of Artificial Sequence: Synthetic oligonucleotide
  Target: APOC3; (+) strand; PAM type: NNGRRT; PAM sequence: AGGAAT
ggggagccagtcagctagga

SEQ ID NO: 5673 - DNA, 20 bp, Artificial Sequence
  Description of Artificial Sequence: Synthetic oligonucleotide
  Target: APOC3; (+) strand; PAM type: NNGRRT; PAM sequence: AGGGAT
cagcgtggactcagtctcct

SEQ ID NO: 5674 - DNA, 20 bp, Artificial Sequence
  Description of Artificial Sequence: Synthetic oligonucleotide
  Target: APOC3; (+) strand; PAM type: NNGRRT; PAM sequence: CTGGGT
ggtgacctttgcccagcgcc

SEQ ID NO: 5675 - DNA, 20 bp, Artificial Sequence
  Description of Artificial Sequence: Synthetic oligonucleotide
  Target: APOC3; (+) strand; PAM type: NNGRRT; PAM sequence: GAGGAT
gaggggaaagaggaggggag

SEQ ID NO: 5676 - DNA, 20 bp, Artificial Sequence
  Description of Artificial Sequence: Synthetic oligonucleotide
  Target: APOC3; (+) strand; PAM type: NNGRRT; PAM sequence: ACGGGT
taaggaagcctcggagctgg

SEQ ID NO: 5677 - DNA, 20 bp, Artificial Sequence
  Description of Artificial Sequence: Synthetic oligonucleotide
  Target: APOC3; (+) strand; PAM type: NNGRRT; PAM sequence: AGGGGT
gaagaacatggaggcccggg

SEQ ID NO: 5678 - DNA, 20 bp, Artificial Sequence
  Description of Artificial Sequence: Synthetic oligonucleotide
  Target: APOC3; (+) strand; PAM type: NNGRRT; PAM sequence: GGGGGT
cacttgcccaaagctacaca

SEQ ID NO: 5679 - DNA, 20 bp, Artificial Sequence
  Description of Artificial Sequence: Synthetic oligonucleotide
  Target: APOC3; (+) strand; PAM type: NNGRRT; PAM sequence: GTGGGT
gtgccttgatgttcagtctg

SEQ ID NO: 5680 - DNA, 20 bp, Artificial Sequence
  Description of Artificial Sequence: Synthetic oligonucleotide
  Target: APOC3; (+) strand; PAM type: NNGRRT; PAM sequence: AGGGGT
gccacgccacctccccaggg

SEQ ID NO: 5681 - DNA, 20 bp, Artificial Sequence
  Description of Artificial Sequence: Synthetic oligonucleotide
  Target: APOC3; (+) strand; PAM type: NNGRRT; PAM sequence: TGGGGT
ggtccagaggcatggggacc

SEQ ID NO: 5682 - DNA, 20 bp, Artificial Sequence
  Description of Artificial Sequence: Synthetic oligonucleotide
  Target: APOC3; (+) strand; PAM type: NNGRRT; PAM sequence: CCGGGT
aacagaggtgccatgcagcc

SEQ ID NO: 5683 - DNA, 20 bp, Artificial Sequence
  Description of Artificial Sequence: Synthetic oligonucleotide
  Target: APOC3; (+) strand; PAM type: NNGRRT; PAM sequence: CAGGGT
tggtgggactgggctggggg

SEQ ID NO: 5684 - DNA, 20 bp, Artificial Sequence
  Description of Artificial Sequence: Synthetic oligonucleotide
  Target: APOC3; (+) strand; PAM type: NNGRRT; PAM sequence: GGGGAT
gggcagggtggaggcaactt

SEQ ID NO: 5685 - DNA, 20 bp, Artificial Sequence
  Description of Artificial Sequence: Synthetic oligonucleotide
  Target: APOC3; (+) strand; PAM type: NNGRRT; PAM sequence: ATGGGT
acttggggatcccagtccca

SEQ ID NO: 5686 - DNA, 20 bp, Artificial Sequence
  Description of Artificial Sequence: Synthetic oligonucleotide
  Target: APOC3; (+) strand; PAM type: NNGRRT; PAM sequence: GAGGAT
cctcaggagcttcagaggcc

SEQ ID NO: 5687 - DNA, 20 bp, Artificial Sequence
  Description of Artificial Sequence: Synthetic oligonucleotide
  Target: APOC3; (+) strand; PAM type: NNGRRT; PAM sequence: CAGGGT
cctcccttctcagcttcatg

SEQ ID NO: 5688 - DNA, 20 bp, Artificial Sequence
  Description of Artificial Sequence: Synthetic oligonucleotide
  Target: APOC3; (+) strand; PAM type: NNGRRT; PAM sequence: AAGGAT
agcacgccaccaagaccgcc

SEQ ID NO: 5689 - DNA, 20 bp, Artificial Sequence
  Description of Artificial Sequence: Synthetic oligonucleotide
  Target: APOC3; (+) strand; PAM type: NNGRRT; PAM sequence: AGGAGT
ggatgcactgagcagcgtgc

SEQ ID NO: 5690 - DNA, 20 bp, Artificial Sequence
  Description of Artificial Sequence: Synthetic oligonucleotide
  Target: APOC3; (+) strand; PAM type: NNGRRT; PAM sequence: TGGAAT
ccctggtgagatcccaacaa

SEQ ID NO: 5691 - DNA, 20 bp, Artificial Sequence
  Description of Artificial Sequence: Synthetic oligonucleotide
  Target: APOC3; (+) strand; PAM type: NNGRRT; PAM sequence: CAGAGT
ggctgctgcgggagagatga

SEQ ID NO: 5692 - DNA, 20 bp, Artificial Sequence
  Description of Artificial Sequence: Synthetic oligonucleotide
  Target: APOC3; (+) strand; PAM type: NNGRRT; PAM sequence: TGGAGT
tcttcttcttttttttttaa

SEQ ID NO: 5693 - DNA, 20 bp, Artificial Sequence
  Description of Artificial Sequence: Synthetic oligonucleotide
  Target: APOC3; (+) strand; PAM type: NNGRRT; PAM sequence: TGGAGT
tctccctctgtcacctaggc

SEQ ID NO: 5694 - DNA, 20 bp, Artificial Sequence
  Description of Artificial Sequence: Synthetic oligonucleotide
  Target: APOC3; (+) strand; PAM type: NNGRRT; PAM sequence: CCGGGT
ctcactgcaacctccgtctc

SEQ ID NO: 5695 - DNA, 20 bp, Artificial Sequence
  Description of Artificial Sequence: Synthetic oligonucleotide
  Target: APOC3; (+) strand; PAM type: NNGRRT; PAM sequence: TGGGAT
gcctcagcctcccaagtagc

SEQ ID NO: 5696 - DNA, 20 bp, Artificial Sequence
  Description of Artificial Sequence: Synthetic oligonucleotide
  Target: APOC3; (+) strand; PAM type: NNGRRT; PAM sequence: TGGGGT
ttttgtatttttagcagaga

SEQ ID NO: 5697 - DNA, 20 bp, Artificial Sequence
  Description of Artificial Sequence: Synthetic oligonucleotide
  Target: APOC3; (+) strand; PAM type: NNGRRT; PAM sequence: TTGAAT
ccatgttggccaggttggtc

SEQ ID NO: 5698 - DNA, 20 bp, Artificial Sequence
  Description of Artificial Sequence: Synthetic oligonucleotide
  Target: APOC3; (+) strand; PAM type: NNGRRT; PAM sequence: GGGGAT
gtcttgaattcctgacctca

SEQ ID NO: 5699 - DNA, 20 bp, Artificial Sequence
  Description of Artificial Sequence: Synthetic oligonucleotide
  Target: APOC3; (+) strand; PAM type: NNGRRT; PAM sequence: TGGGAT
gcctcggcctcccaaagtgc

SEQ ID NO: 5700 - DNA, 20 bp, Artificial Sequence
  Description of Artificial Sequence: Synthetic oligonucleotide
  Target: APOC3; (+) strand; PAM type: NNGRRT; PAM sequence: GGGGAT
caatttttccatgggccagc

SEQ ID NO: 5701 - DNA, 20 bp, Artificial Sequence
  Description of Artificial Sequence: Synthetic oligonucleotide
  Target: APOC3; (+) strand; PAM type: NNGRRT; PAM sequence: TGGGAT
tgggccagcggggatggttt

SEQ ID NO: 5702 - DNA, 20 bp, Artificial Sequence
  Description of Artificial Sequence: Synthetic oligonucleotide
  Target: APOC3; (+) strand; PAM type: NNGRRT; PAM sequence: TAGGGT
ctggcatgtgcagttcacaa

SEQ ID NO: 5703 - DNA, 20 bp, Artificial Sequence
  Description of Artificial Sequence: Synthetic oligonucleotide
  Target: APOC3; (+) strand; PAM type: NNGRRT; PAM sequence: GAGAAT
aatagggttcacactcctat

SEQ ID NO: 5704 - DNA, 20 bp, Artificial Sequence
  Description of Artificial Sequence: Synthetic oligonucleotide
  Target: APOC3; (+) strand; PAM type: NNGRRT; PAM sequence: GGGGGT
ccagtacctatctatgactt

SEQ ID NO: 5705 - DNA, 20 bp, Artificial Sequence
  Description of Artificial Sequence: Synthetic oligonucleotide
  Target: APOC3; (+) strand; PAM type: NNGRRT; PAM sequence: AGGGGT
gggttggggacccctgggct

SEQ ID NO: 5706 - DNA, 20 bp, Artificial Sequence
  Description of Artificial Sequence: Synthetic oligonucleotide
  Target: APOC3; (+) strand; PAM type: NNGRRT; PAM sequence: GTGAGT
acctgacccaattcaagccc

SEQ ID NO: 5707 - DNA, 20 bp, Artificial Sequence
  Description of Artificial Sequence: Synthetic oligonucleotide
  Target: APOC3; (+) strand; PAM type: NNGRRT; PAM sequence: TGGGGT
ttagtccccagaaccggctt

SEQ ID NO: 5708 - DNA, 20 bp, Artificial Sequence
  Description of Artificial Sequence: Synthetic oligonucleotide
  Target: APOC3; (+) strand; PAM type: NNGRRT; PAM sequence: CAGGGT
ctgaggtgacctggagatgg

SEQ ID NO: 5709 - DNA, 20 bp, Artificial Sequence
  Description of Artificial Sequence: Synthetic oligonucleotide
  Target: APOC3; (+) strand; PAM type: NNGRRT; PAM sequence: TGGGGT
tggcagggtttgacttgtgc

SEQ ID NO: 5710 - DNA, 20 bp, Artificial Sequence
  Description of Artificial Sequence: Synthetic oligonucleotide
  Target: APOC3; (+) strand; PAM type: NNGRRT; PAM sequence: AAGGAT
acttgtgctggggttcctgc

SEQ ID NO: 5711 - DNA, 20 bp, Artificial Sequence
  Description of Artificial Sequence: Synthetic oligonucleotide
  Target: APOC3; (+) strand; PAM type: NNGRRT; PAM sequence: CAGGGT
tgcaaggatatctcttctcc

SEQ ID NO: 5712 - DNA, 20 bp, Artificial Sequence
  Description of Artificial Sequence: Synthetic oligonucleotide
  Target: APOC3; (+) strand; PAM type: NNGRRT; PAM sequence: GGGGAT
ctcccagggtggcagctgtg

SEQ ID NO: 5713 - DNA, 20 bp, Artificial Sequence
  Description of Artificial Sequence: Synthetic oligonucleotide
  Target: APOC3; (+) strand; PAM type: NNGRRT; PAM sequence: GAGGGT
ctgtcgtccagtgaagttga

SEQ ID NO: 5714 - DNA, 20 bp, Artificial Sequence
  Description of Artificial Sequence: Synthetic oligonucleotide
  Target: APOC3; (+) strand; PAM type: NNGRRT; PAM sequence: ATGGGT
tggtgtcgtccagtggggac

SEQ ID NO: 5715 - DNA, 20 bp, Artificial Sequence
  Description of Artificial Sequence: Synthetic oligonucleotide
  Target: APOC3; (+) strand; PAM type: NNGRRT; PAM sequence: GTGGGT
cgtccagtggggacatgggt

SEQ ID NO: 5716 - DNA, 20 bp, Artificial Sequence
  Description of Artificial Sequence: Synthetic oligonucleotide
  Target: APOC3; (+) strand; PAM type: NNGRRT; PAM sequence: AGGAGT
ggtcccatggttgcctacag

SEQ ID NO: 5717 - DNA, 20 bp, Artificial Sequence
  Description of Artificial Sequence: Synthetic oligonucleotide
  Target: APOC3; (+) strand; PAM type: NNGRRT; PAM sequence: CTGGGT
tcccctgactgatttagggg

SEQ ID NO: 5718 - DNA, 20 bp, Artificial Sequence
  Description of Artificial Sequence: Synthetic oligonucleotide
  Target: APOC3; (+) strand; PAM type: NNGRRT; PAM sequence: CTGAGT
caccgttaaggacaagttct

SEQ ID NO: 5719 - DNA, 20 bp, Artificial Sequence
  Description of Artificial Sequence: Synthetic oligonucleotide
  Target: APOC3; (+) strand; PAM type: NNGRRT; PAM sequence: TGGGAT
aggacaagttctctgagttc

SEQ ID NO: 5720 - DNA, 20 bp, Artificial Sequence
  Description of Artificial Sequence: Synthetic oligonucleotide
  Target: APOC3; (+) strand; PAM type: NNGRRT; PAM sequence: TTGGGT
ctatccatcctgcgagctcc

SEQ ID NO: 5721 - DNA, 20 bp, Artificial Sequence
  Description of Artificial Sequence: Synthetic oligonucleotide
  Target: APOC3; (+) strand; PAM type: NNGRRT; PAM sequence: ATGAGT
aagctggacaagaagctgct

SEQ ID NO: 5722 - DNA, 20 bp, Artificial Sequence
  Description of Artificial Sequence: Synthetic oligonucleotide
  Target: APOC3; (+) strand; PAM type: NNGRRT; PAM sequence: GTGGGT
gaaagggccgaggctgttct

SEQ ID NO: 5723 - DNA, 20 bp, Artificial Sequence
  Description of Artificial Sequence: Synthetic oligonucleotide
  Target: APOC3; (+) strand; PAM type: NNGRRT; PAM sequence: AGGAAT
agtttcttcatctctaaggt

SEQ ID NO: 5724 - DNA, 20 bp, Artificial Sequence
  Description of Artificial Sequence: Synthetic oligonucleotide
  Target: APOC3; (+) strand; PAM type: NNGRRT; PAM sequence: TTGAGT
taggtgctgcacaacatgac

SEQ ID NO: 5725 - DNA, 20 bp, Artificial Sequence
  Description of Artificial Sequence: Synthetic oligonucleotide
  Target: APOC3; (+) strand; PAM type: NNGRRT; PAM sequence: CAGAGT
cctggcacttaagttgtcat

SEQ ID NO: 5726 - DNA, 20 bp, Artificial Sequence
  Description of Artificial Sequence: Synthetic oligonucleotide
  Target: APOC3; (+) strand; PAM type: NNGRRT; PAM sequence: CCGGAT
gcgcacgtgaagggaggagg

SEQ ID NO: 5727 - DNA, 20 bp, Artificial Sequence
  Description of Artificial Sequence: Synthetic oligonucleotide
  Target: APOC3; (+) strand; PAM type: NNGRRT; PAM sequence: TGGAGT
aggccggatgggctagaggt

SEQ ID NO: 5728 - DNA, 20 bp, Artificial Sequence
  Description of Artificial Sequence: Synthetic oligonucleotide
  Target: APOC3; (+) strand; PAM type: NNGRRT; PAM sequence: GTGGAT
ctcagtttcttacatgtaaa

SEQ ID NO: 5729 - DNA, 20 bp, Artificial Sequence
  Description of Artificial Sequence: Synthetic oligonucleotide
  Target: APOC3; (+) strand; PAM type: NNGRRT; PAM sequence: TGGAGT
tgggcccttgggacccggac

SEQ ID NO: 5730 - DNA, 20 bp, Artificial Sequence
  Description of Artificial Sequence: Synthetic oligonucleotide
  Target: APOC3; (+) strand; PAM type: NNGRRT; PAM sequence: TTGAGT
gcccgagagctgcagatggc

SEQ ID NO: 5731 - DNA, 20 bp, Artificial Sequence
  Description of Artificial Sequence: Synthetic oligonucleotide
  Target: APOC3; (+) strand; PAM type: NNGRRT; PAM sequence: CTGGAT
atgttcccacccagacctgg

SEQ ID NO: 5732 - DNA, 20 bp, Artificial Sequence
  Description of Artificial Sequence: Synthetic oligonucleotide
  Target: APOC3; (+) strand; PAM type: NNGRRT; PAM sequence: TAGGGT
aaaaagcccactcctttacc

SEQ ID NO: 5733 - DNA, 20 bp, Artificial Sequence
  Description of Artificial Sequence: Synthetic oligonucleotide
  Target: APOC3; (+) strand; PAM type: NNGRRT; PAM sequence: GGGGAT
tacactggagatggggacat

SEQ ID NO: 5734 - DNA, 20 bp, Artificial Sequence
  Description of Artificial Sequence: Synthetic oligonucleotide
  Target: APOC3; (+) strand; PAM type: NNGRRT; PAM sequence: GAGGGT
ggcaaaaggccctgcagaga

SEQ ID NO: 5735 - DNA, 20 bp, Artificial Sequence
  Description of Artificial Sequence: Synthetic oligonucleotide
  Target: APOC3; (+) strand; PAM type: NNGRRT; PAM sequence: ATGAGT
gcacgcggggacattcagac

SEQ ID NO: 5736 - DNA, 20 bp, Artificial Sequence
  Description of Artificial Sequence: Synthetic oligonucleotide
  Target: APOC3; (+) strand; PAM type: NNGRRT; PAM sequence: GAGAAT
cgtgagcagggaggtcatgt

SEQ ID NO: 5737 - DNA, 20 bp, Artificial Sequence
  Description of Artificial Sequence: Synthetic oligonucleotide
  Target: APOC3; (+) strand; PAM type: NNGRRT; PAM sequence: TTGAGT
gcctgcacacccatgtgaac

SEQ ID NO: 5738 - DNA, 20 bp, Artificial Sequence
  Description of Artificial Sequence: Synthetic oligonucleotide
  Target: APOC3; (+) strand; PAM type: NNGRRT; PAM sequence: TGGAGT
tttttttttttttttttagc

SEQ ID NO: 5739 - DNA, 20 bp, Artificial Sequence
  Description of Artificial Sequence: Synthetic oligonucleotide
  Target: APOC3; (+) strand; PAM type: NNGRRT; PAM sequence: TGGAGT
tcttgctccgtcgcccaggc

SEQ ID NO: 5740 - DNA, 20 bp, Artificial Sequence
  Description of Artificial Sequence: Synthetic oligonucleotide
  Target: APOC3; (+) strand; PAM type: NNGRRT; PAM sequence: TGGGAT
gcctcagccttcctagtagc

SEQ ID NO: 5741 - DNA, 20 bp, Artificial Sequence
  Description of Artificial Sequence: Synthetic oligonucleotide
  Target: APOC3; (+) strand; PAM type: NNGRRT; PAM sequence: ACGGGT
ccttcctagtagctgggatt

SEQ ID NO: 5742 - DNA, 20 bp, Artificial Sequence
  Description of Artificial Sequence: Synthetic oligonucleotide
  Target: APOC3; (+) strand; PAM type: NNGRRT; PAM sequence: CAGGGT
ttttgtatttttagtagaga

SEQ ID NO: 5743 - DNA, 20 bp, Artificial Sequence
  Description of Artificial Sequence: Synthetic oligonucleotide
  Target: APOC3; (+) strand; PAM type: NNGRRT; PAM sequence: TGGGAT
acctcagcctcccaaagtgc

SEQ ID NO: 5744 - DNA, 20 bp, Artificial Sequence
  Description of Artificial Sequence: Synthetic oligonucleotide
  Target: APOC3; (+) strand; PAM type: NNGRRT; PAM sequence: ATGGAT
gcgcactcttttcaataatc

SEQ ID NO: 5745 - DNA, 20 bp, Artificial Sequence
  Description of Artificial Sequence: Synthetic oligonucleotide
  Target: APOC3; (+) strand; PAM type: NNGRRT; PAM sequence: AGGGGT
ttcaataatcatggatggcc

SEQ ID NO: 5746 - DNA, 20 bp, Artificial Sequence
  Description of Artificial Sequence: Synthetic oligonucleotide
  Target: APOC3; (+) strand; PAM type: NNGRRT; PAM sequence: CAGGGT
atcatggatggccaggggtg

SEQ ID NO: 5747 - DNA, 20 bp, Artificial Sequence
  Description of Artificial Sequence: Synthetic oligonucleotide
  Target: APOC3; (+) strand; PAM type: NNGRRT; PAM sequence: CAGGAT
gcgtctgatggcaatctagc

SEQ ID NO: 5748 - DNA, 20 bp, Artificial Sequence
  Description of Artificial Sequence: Synthetic oligonucleotide
  Target: APOC3; (+) strand; PAM type: NNGRRT; PAM sequence: GAGGAT
tagccaggatgtggggaagg

SEQ ID NO: 5749 - DNA, 20 bp, Artificial Sequence
  Description of Artificial Sequence: Synthetic oligonucleotide
  Target: APOC3; (+) strand; PAM type: NNGRRT; PAM sequence: GTGAAT
tgtacctgcaagaggtggtg

SEQ ID NO: 5750 - DNA, 20 bp, Artificial Sequence
  Description of Artificial Sequence: Synthetic oligonucleotide
  Target: APOC3; (+) strand; PAM type: NNGRRT; PAM sequence: GGGGGT
tgccagggctggcagaaaga

SEQ ID NO: 5751 - DNA, 20 bp, Artificial Sequence
  Description of Artificial Sequence: Synthetic oligonucleotide
  Target: APOC3; (+) strand; PAM type: NNGRRT; PAM sequence: GGGGGT
tggcatggcatggagccgca

SEQ ID NO: 5752 - DNA, 20 bp, Artificial Sequence
  Description of Artificial Sequence: Synthetic oligonucleotide
  Target: APOC3; (+) strand; PAM type: NNGRRT; PAM sequence: CGGGAT
aagccgcggctgtttctggg

SEQ ID NO: 5753 - DNA, 20 bp, Artificial Sequence
  Description of Artificial Sequence: Synthetic oligonucleotide
  Target: APOC3; (+) strand; PAM type: NNGRRT; PAM sequence: GGGAGT
cggctgtttctgggcgggat

SEQ ID NO: 5754 - DNA, 20 bp, Artificial Sequence
  Description of Artificial Sequence: Synthetic oligonucleotide
  Target: APOC3; (+) strand; PAM type: NNGRRT; PAM sequence: GGGGAT
cgggatgggagtagtgggag

SEQ ID NO: 5755 - DNA, 20 bp, Artificial Sequence
  Description of Artificial Sequence: Synthetic oligonucleotide
  Target: APOC3; (+) strand; PAM type: NNGRRT; PAM sequence: TTGAAT
agtgtctgtttgagaggttt

SEQ ID NO: 5756 - DNA, 20 bp, Artificial Sequence
  Description of Artificial Sequence: Synthetic oligonucleotide
  Target: APOC3; (+) strand; PAM type: NNGRRT; PAM sequence: TTGGAT
ccctttcagggcacctggcc

SEQ ID NO: 5757 - DNA, 20 bp, Artificial Sequence
  Description of Artificial Sequence: Synthetic oligonucleotide
  Target: APOC3; (+) strand; PAM type: NNGRRT; PAM sequence: CGGAGT
taagacgtccagtctgggca

SEQ ID NO: 5758 - DNA, 20 bp, Artificial Sequence
  Description of Artificial Sequence: Synthetic oligonucleotide
  Target: APOC3; (+) strand; PAM type: NNGRRT; PAM sequence: CCGGAT
aaggccccacccgggctccc

SEQ ID NO: 5759 - DNA, 20 bp, Artificial Sequence
  Description of Artificial Sequence: Synthetic oligonucleotide
  Target: APOC3; (+) strand; PAM type: NNGRRT; PAM sequence: CTGGGT
gggcggcggcgggcgcctca

SEQ ID NO: 5760 - DNA, 20 bp, Artificial Sequence
  Description of Artificial Sequence: Synthetic oligonucleotide
  Target: APOC3; (+) strand; PAM type: NNGRRT; PAM sequence: CTGGGT
tccaggttatcccagaactc

SEQ ID NO: 5761 - DNA, 20 bp, Artificial Sequence
  Description of Artificial Sequence: Synthetic oligonucleotide
  Target: APOC3; (+) strand; PAM type: NNGRRT; PAM sequence: GAGGGT
tgtcaaggagctttaggctg

SEQ ID NO: 5762 - DNA, 20 bp, Artificial Sequence
  Description of Artificial Sequence: Synthetic oligonucleotide
  Target: APOC3; (+) strand; PAM type: NNGRRT; PAM sequence: AAGGGT
taggctggagggtgagacag

SEQ ID NO: 5763 - DNA, 20 bp, Artificial Sequence
  Description of Artificial Sequence: Synthetic oligonucleotide
  Target: APOC3; (+) strand; PAM type: NNGRRT; PAM sequence: AGGGGT
tcccagcgccccagcctatc

SEQ ID NO: 5764 - DNA, 20 bp, Artificial Sequence
  Description of Artificial Sequence: Synthetic oligonucleotide
  Target: APOC3; (+) strand; PAM type: NNGRRT; PAM sequence: CTGGGT
cagcctatcaggggtgagcc

SEQ ID NO: 5765 - DNA, 20 bp, Artificial Sequence
  Description of Artificial Sequence: Synthetic oligonucleotide
  Target: APOC3; (+) strand; PAM type: NNGRRT; PAM sequence: CTGGGT
cccctgccctcaaccccagg

SEQ ID NO: 5766 - DNA, 20 bp, Artificial Sequence
  Description of Artificial Sequence: Synthetic oligonucleotide
  Target: APOC3; (+) strand; PAM type: NNGRRT; PAM sequence: GGGGGT
ctcgatcccaggggctctgg

SEQ ID NO: 5767 - DNA, 20 bp, Artificial Sequence
  Description of Artificial Sequence: Synthetic oligonucleotide
  Target: APOC3; (+) strand; PAM type: NNGRRT; PAM sequence: GAGGGT
aatgccgagcctggctccct

SEQ ID NO: 5768 - DNA, 20 bp, Artificial Sequence
  Description of Artificial Sequence: Synthetic oligonucleotide
  Target: APOC3; (+) strand; PAM type: NNGRRT; PAM sequence: GAGGGT
aacctgctgcctctgcccag

SEQ ID NO: 5769 - DNA, 20 bp, Artificial Sequence
  Description of Artificial Sequence: Synthetic oligonucleotide
  Target: APOC3; (+) strand; PAM type: NNGRRT; PAM sequence: GGGGAT
tgcccaggagggtgggccac

SEQ ID NO: 5770 - DNA, 20 bp, Artificial Sequence
  Description of Artificial Sequence: Synthetic oligonucleotide
  Target: APOC3; (+) strand; PAM type: NNGRRT; PAM sequence: CTGAGT
ggaggagaagaagggcctgg

SEQ ID NO: 5771 - DNA, 20 bp, Artificial Sequence
  Description of Artificial Sequence: Synthetic oligonucleotide
  Target: APOC3; (+) strand; PAM type: NNGRRT; PAM sequence: TGGGGT
agaagaagggcctggctgag

SEQ ID NO: 5772 - DNA, 20 bp, Artificial Sequence
  Description of Artificial Sequence: Synthetic oligonucleotide
  Target: APOC3; (+) strand; PAM type: NNGRRT; PAM sequence: CAGAGT
tgaaccttgagctggggagc

SEQ ID NO: 5773 - DNA, 20 bp, Artificial Sequence
  Description of Artificial Sequence: Synthetic oligonucleotide
  Target: APOC3; (+) strand; PAM type: NNGRRT; PAM sequence: CAGGGT
ggcctatttatgtctgcagc

SEQ ID NO: 5774 - DNA, 20 bp, Artificial Sequence
  Description of Artificial Sequence: Synthetic oligonucleotide
  Target: APOC3; (+) strand; PAM type: NNGRRT; PAM sequence: AAGAGT
gtcctggcaatgtggaactt

SEQ ID NO: 5775 - DNA, 20 bp, Artificial Sequence
  Description of Artificial Sequence: Synthetic oligonucleotide
  Target: APOC3; (+) strand; PAM type: NNGRRT; PAM sequence: AAGGAT
aatgtggaacttaagagttc

SEQ ID NO: 5776 - DNA, 20 bp, Artificial Sequence
  Description of Artificial Sequence: Synthetic oligonucleotide
  Target: APOC3; (+) strand; PAM type: NNGRRT; PAM sequence: TAGAGT
tgtccctggggctgggcaaa

SEQ ID NO: 5777 - DNA, 20 bp, Artificial Sequence
  Description of Artificial Sequence: Synthetic oligonucleotide
  Target: APOC3; (+) strand; PAM type: NNGRRT; PAM sequence: AGGGGT
agctgcgggggctgcagggc

SEQ ID NO: 5778 - DNA, 20 bp, Artificial Sequence
  Description of Artificial Sequence: Synthetic oligonucleotide
  Target: APOC3; (+) strand; PAM type: NNGRRT; PAM sequence: AAGGGT
ggggctgcagggcaggggtc

SEQ ID NO: 5779 - DNA, 20 bp, Artificial Sequence
  Description of Artificial Sequence: Synthetic oligonucleotide
  Target: APOC3; (+) strand; PAM type: NNGRRT; PAM sequence: GGGAGT
gggttcagtgggggcgggag

SEQ ID NO: 5780 - DNA, 20 bp, Artificial Sequence
  Description of Artificial Sequence: Synthetic oligonucleotide
  Target: APOC3; (+) strand; PAM type: NNGRRT; PAM sequence: CCGGGT
tctgcaggcttgcaggtctc

SEQ ID NO: 5781 - DNA, 20 bp, Artificial Sequence
  Description of Artificial Sequence: Synthetic oligonucleotide
  Target: APOC3; (+) strand; PAM type: NNGRRT; PAM sequence: TGGGGT
aggcttgcaggtctcccggg

SEQ ID NO: 5782 - DNA, 20 bp, Artificial Sequence
  Description of Artificial Sequence: Synthetic oligonucleotide
  Target: APOC3; (+) strand; PAM type: NNGRRT; PAM sequence: CGGGGT
gcaggtctcccgggtggggt

SEQ ID NO: 5783 - DNA, 20 bp, Artificial Sequence
  Description of Artificial Sequence: Synthetic oligonucleotide
  Target: APOC3; (+) strand; PAM type: NNGRRT; PAM sequence: GGGAGT
ctcatccccttcccctccat

SEQ ID NO: 5784 - DNA, 20 bp, Artificial Sequence
  Description of Artificial Sequence: Synthetic oligonucleotide
  Target: APOC3; (-) strand; PAM type: NNNNGHTT; PAM sequence: CTTGGATT
tgtccatggattcaaccaac

SEQ ID NO: 5785 - DNA, 20 bp, Artificial Sequence
  Description of Artificial Sequence: Synthetic oligonucleotide
  Target: APOC3; (-) strand; PAM type: NNNNGHTT; PAM sequence: CATGGATT
gtatccttggtttctgtgtc

SEQ ID NO: 5786 - DNA, 20 bp, Artificial Sequence
  Description of Artificial Sequence: Synthetic oligonucleotide
  Target: APOC3; (-) strand; PAM type: NNNNGHTT; PAM sequence: CTTGGTTT
tataggcagccctctgtatc

SEQ ID NO: 5787 - DNA, 20 bp, Artificial Sequence
  Description of Artificial Sequence: Synthetic oligonucleotide
  Target: APOC3; (-) strand; PAM type: NNNNGHTT; PAM sequence: CAGAGCTT
taataacagcaactattttt

SEQ ID NO: 5788 - DNA, 20 bp, Artificial Sequence
  Description of Artificial Sequence: Synthetic oligonucleotide
  Target: APOC3; (-) strand; PAM type: NNNNGHTT; PAM sequence: GTATGATT
cacagtatgattattataca

SEQ ID NO: 5789 - DNA, 20 bp, Artificial Sequence
  Description of Artificial Sequence: Synthetic oligonucleotide
  Target: APOC3; (-) strand; PAM type: NNNNGHTT; PAM sequence: GTATGATT
tgctccaaatcaggaacaca

SEQ ID NO: 5790 - DNA, 20 bp, Artificial Sequence
  Description of Artificial Sequence: Synthetic oligonucleotide
  Target: APOC3; (-) strand; PAM type: NNNNGHTT; PAM sequence: CCCTGCTT
agggagcactctgctaccct

SEQ ID NO: 5791 - DNA, 20 bp, Artificial Sequence
  Description of Artificial Sequence: Synthetic oligonucleotide
  Target: APOC3; (-) strand; PAM type: NNNNGHTT; PAM sequence: CCAAGATT
tcccctgagagcctcaggtc

SEQ ID NO: 5792 - DNA, 20 bp, Artificial Sequence
  Description of Artificial Sequence: Synthetic oligonucleotide
  Target: APOC3; (-) strand; PAM type: NNNNGHTT; PAM sequence: GTGTGATT
ccttctcagtggatgtttgt

SEQ ID NO: 5793 - DNA, 20 bp, Artificial Sequence
  Description of Artificial Sequence: Synthetic oligonucleotide
  Target: APOC3; (-) strand; PAM type: NNNNGHTT; PAM sequence: GGATGTTT
tggtgtgtcaccttctcagt

SEQ ID NO: 5794 - DNA, 20 bp, Artificial Sequence
  Description of Artificial Sequence: Synthetic oligonucleotide
  Target: APOC3; (-) strand; PAM type: NNNNGHTT; PAM sequence: GCCTGATT
cccgctgcaagctggactgt

SEQ ID NO: 5795 - DNA, 20 bp, Artificial Sequence
  Description of Artificial Sequence: Synthetic oligonucleotide
  Target: APOC3; (-) strand; PAM type: NNNNGHTT; PAM sequence: TAGTGATT
tgtgccagtcccttggttct

SEQ ID NO: 5796 - DNA, 20 bp, Artificial Sequence
  Description of Artificial Sequence: Synthetic oligonucleotide
  Target: APOC3; (-) strand; PAM type: NNNNGHTT; PAM sequence: TACAGATT
ctccccaaaacaaatccatc

SEQ ID NO: 5797 - DNA, 20 bp, Artificial Sequence
  Description of Artificial Sequence: Synthetic oligonucleotide
  Target: APOC3; (-) strand; PAM type: NNNNGHTT; PAM sequence: AGAGGCTT
tgcctgttgcacagataagg

SEQ ID NO: 5798 - DNA, 20 bp, Artificial Sequence
  Description of Artificial Sequence: Synthetic oligonucleotide
  Target: APOC3; (-) strand; PAM type: NNNNGHTT; PAM sequence: CCTGGTTT
ctctgacctctggactgacc

SEQ ID NO: 5799 - DNA, 20 bp, Artificial Sequence
  Description of Artificial Sequence: Synthetic oligonucleotide
  Target: APOC3; (-) strand; PAM type: NNNNGHTT; PAM sequence: CCCTGATT
caccaggctgggctgggcag

SEQ ID NO: 5800 - DNA, 20 bp, Artificial Sequence
  Description of Artificial Sequence: Synthetic oligonucleotide
  Target: APOC3; (-) strand; PAM type: NNNNGHTT; PAM sequence: TGAGGTTT
tgtttcaccttgtgtccagg

SEQ ID NO: 5801 - DNA, 20 bp, Artificial Sequence
  Description of Artificial Sequence: Synthetic oligonucleotide
  Target: APOC3; (-) strand; PAM type: NNNNGHTT; PAM sequence: GGCTGTTT
aaaatggtcctctggggttg

SEQ ID NO: 5802 - DNA, 20 bp, Artificial Sequence
  Description of Artificial Sequence: Synthetic oligonucleotide
  Target: APOC3; (-) strand; PAM type: NNNNGHTT; PAM sequence: AGGGGATT
cagtggtagatgggaggaag

SEQ ID NO: 5803 - DNA, 20 bp, Artificial Sequence
  Description of Artificial Sequence: Synthetic oligonucleotide
  Target: APOC3; (-) strand; PAM type: NNNNGHTT; PAM sequence: AAGGGCTT
ctggtaccttgtctccttcc

SEQ ID NO: 5804 - DNA, 20 bp, Artificial Sequence
  Description of Artificial Sequence: Synthetic oligonucleotide
  Target: APOC3; (-) strand; PAM type: NNNNGHTT; PAM sequence: GGAGGATT
aaggtgaagaagtggtcact

SEQ ID NO: 5805 - DNA, 20 bp, Artificial Sequence
  Description of Artificial Sequence: Synthetic oligonucleotide
  Target: APOC3; (-) strand; PAM type: NNNNGHTT; PAM sequence: GACGGCTT
cacaccccaggcaaatacca

SEQ ID NO: 5806 - DNA, 20 bp, Artificial Sequence
  Description of Artificial Sequence: Synthetic oligonucleotide
  Target: APOC3; (-) strand; PAM type: NNNNGHTT; PAM sequence: CTTTGTTT
ttcattcctttgacttaaga

SEQ ID NO: 5807 - DNA, 20 bp, Artificial Sequence
  Description of Artificial Sequence: Synthetic oligonucleotide
  Target: APOC3; (-) strand; PAM type: NNNNGHTT; PAM sequence: GAGAGATT
aagagagagagagagagaga

SEQ ID NO: 5808 - DNA, 20 bp, Artificial Sequence
  Description of Artificial Sequence: Synthetic oligonucleotide
  Target: APOC3; (-) strand; PAM type: NNNNGHTT; PAM sequence: AATTGCTT
tcaggaggctgaggcacgag

SEQ ID NO: 5809 - DNA, 20 bp, Artificial Sequence
  Description of Artificial Sequence: Synthetic oligonucleotide
  Target: APOC3; (-) strand; PAM type: NNNNGHTT; PAM sequence: TACTGATT
aggataaaatggggctggaa

SEQ ID NO: 5810 - DNA, 20 bp, Artificial Sequence
  Description of Artificial Sequence: Synthetic oligonucleotide
  Target: APOC3; (-) strand; PAM type: NNNNGHTT; PAM sequence: TTAGGCTT
caccttggagccaggacatc

SEQ ID NO: 5811 - DNA, 20 bp, Artificial Sequence
  Description of Artificial Sequence: Synthetic oligonucleotide
  Target: APOC3; (-) strand; PAM type: NNNNGHTT; PAM sequence: GACTGATT
ccctccccagcccccaccag

SEQ ID NO: 5812 - DNA, 20 bp, Artificial Sequence
  Description of Artificial Sequence: Synthetic oligonucleotide
  Target: APOC3; (-) strand; PAM type: NNNNGHTT; PAM sequence: CTGGGTTT
ccctcccagcacctccatct

SEQ ID NO: 5813 - DNA, 20 bp, Artificial Sequence
  Description of Artificial Sequence: Synthetic oligonucleotide
  Target: APOC3; (-) strand; PAM type: NNNNGHTT; PAM sequence: GGGTGTTT
agtgggtggcttgggctggg

SEQ ID NO: 5814 - DNA, 20 bp, Artificial Sequence
  Description of Artificial Sequence: Synthetic oligonucleotide
  Target: APOC3; (-) strand; PAM type: NNNNGHTT; PAM sequence: GGTGGCTT
ttcagacttgagaacaagtg

SEQ ID NO: 5815 - DNA, 20 bp, Artificial Sequence
  Description of Artificial Sequence: Synthetic oligonucleotide
  Target: APOC3; (-) strand; PAM type: NNNNGHTT; PAM sequence: AGGGGCTT
cagcctggagtagaggggtg

SEQ ID NO: 5816 - DNA, 20 bp, Artificial Sequence
  Description of Artificial Sequence: Synthetic oligonucleotide
  Target: APOC3; (-) strand; PAM type: NNNNGHTT; PAM sequence: AATGGCTT
gagaggctggtgagagggga

SEQ ID NO: 5817 - DNA, 20 bp, Artificial Sequence
  Description of Artificial Sequence: Synthetic oligonucleotide
  Target: APOC3; (-) strand; PAM type: NNNNGHTT; PAM sequence: ACCTGTTT
agacaggcaggagggttctg

SEQ ID NO: 5818 - DNA, 20 bp, Artificial Sequence
  Description of Artificial Sequence: Synthetic oligonucleotide
  Target: APOC3; (-) strand; PAM type: NNNNGHTT; PAM sequence: CCAGGCTT
tagctctagcaagtgcttct

SEQ ID NO: 5819 - DNA, 20 bp, Artificial Sequence
  Description of Artificial Sequence: Synthetic oligonucleotide
  Target: APOC3; (-) strand; PAM type: NNNNGHTT; PAM sequence: AAGTGCTT
gaggcttccttagctctagc

SEQ ID NO: 5820 - DNA, 20 bp, Artificial Sequence
  Description of Artificial Sequence: Synthetic oligonucleotide
  Target: APOC3; (-) strand; PAM type: NNNNGHTT; PAM sequence: CGAGGCTT
ggggggcacccgtccagctc

SEQ ID NO: 5821 - DNA, 20 bp, Artificial Sequence
  Description of Artificial Sequence: Synthetic oligonucleotide
  Target: APOC3; (-) strand; PAM type: NNNNGHTT; PAM sequence: TGTAGCTT
acttccagccccaccccctg

SEQ ID NO: 5822 - DNA, 20 bp, Artificial Sequence
  Description of Artificial Sequence: Synthetic oligonucleotide
  Target: APOC3; (-) strand; PAM type: NNNNGHTT; PAM sequence: TAAGGCTT
tggggtaggactgggctgtc

SEQ ID NO: 5823 - DNA, 20 bp, Artificial Sequence
  Description of Artificial Sequence: Synthetic oligonucleotide
  Target: APOC3; (-) strand; PAM type: NNNNGHTT; PAM sequence: CTCAGTTT
atttctggccctctccaggc

SEQ ID NO: 5824 - DNA, 20 bp, Artificial Sequence
  Description of Artificial Sequence: Synthetic oligonucleotide
  Target: APOC3; (-) strand; PAM type: NNNNGHTT; PAM sequence: GGGTGATT
ccaacatgctgtgtgtcttt

SEQ ID NO: 5825 - DNA, 20 bp, Artificial Sequence
  Description of Artificial Sequence: Synthetic oligonucleotide
  Target: APOC3; (-) strand; PAM type: NNNNGHTT; PAM sequence: AAGTGCTT
gcccccagcccagtcccacc

SEQ ID NO: 5826 - DNA, 20 bp, Artificial Sequence
  Description of Artificial Sequence: Synthetic oligonucleotide
  Target: APOC3; (-) strand; PAM type: NNNNGHTT; PAM sequence: TCCTGCTT
cctctggacgagccctgggc

SEQ ID NO: 5827 - DNA, 20 bp, Artificial Sequence
  Description of Artificial Sequence: Synthetic oligonucleotide
  Target: APOC3; (-) strand; PAM type: NNNNGHTT; PAM sequence: GCGTGCTT
catccttggcggtcttggtg

SEQ ID NO: 5828 - DNA, 20 bp, Artificial Sequence
  Description of Artificial Sequence: Synthetic oligonucleotide
  Target: APOC3; (-) strand; PAM type: NNNNGHTT; PAM sequence: AACAGCTT
tgcctgatgatctgaggtgg

SEQ ID NO: 5829 - DNA, 20 bp, Artificial Sequence
  Description of Artificial Sequence: Synthetic oligonucleotide
  Target: APOC3; (-) strand; PAM type: NNNNGHTT; PAM sequence: ACGGGCTT
agaacaaagcagaagcactc

SEQ ID NO: 5830 - DNA, 20 bp, Artificial Sequence
  Description of Artificial Sequence: Synthetic oligonucleotide
  Target: APOC3; (-) strand; PAM type: NNNNGHTT; PAM sequence: GAATGTTT
aagccggttctggggactaa

SEQ ID NO: 5831 - DNA, 20 bp, Artificial Sequence
  Description of Artificial Sequence: Synthetic oligonucleotide
  Target: APOC3; (-) strand; PAM type: NNNNGHTT; PAM sequence: GATTGATT
catttggaaagtcattggag

SEQ ID NO: 5832 - DNA, 20 bp, Artificial Sequence
  Description of Artificial Sequence: Synthetic oligonucleotide
  Target: APOC3; (-) strand; PAM type: NNNNGHTT; PAM sequence: GGAGGATT
ctctcatttggaaagtcatt

SEQ ID NO: 5833 - DNA, 20 bp, Artificial Sequence
  Description of Artificial Sequence: Synthetic oligonucleotide
  Target: APOC3; (-) strand; PAM type: NNNNGHTT; PAM sequence: CATTGTTT
atgtgaaaggtcaaggctgt

SEQ ID NO: 5834 - DNA, 20 bp, Artificial Sequence
  Description of Artificial Sequence: Synthetic oligonucleotide
  Target: APOC3; (-) strand; PAM type: NNNNGHTT; PAM sequence: AGATGTTT
tgccatctccaggtcacctc

SEQ ID NO: 5835 - DNA, 20 bp, Artificial Sequence
  Description of Artificial Sequence: Synthetic oligonucleotide
  Target: APOC3; (-) strand; PAM type: NNNNGHTT; PAM sequence: TGGAGATT
gcaacctacaggggcagccc

SEQ ID NO: 5836 - DNA, 20 bp, Artificial Sequence
  Description of Artificial Sequence: Synthetic oligonucleotide
  Target: APOC3; (-) strand; PAM type: NNNNGHTT; PAM sequence: TCCAGCTT
ccactcatagcagcttcttg

SEQ ID NO: 5837 - DNA, 20 bp, Artificial Sequence
  Description of Artificial Sequence: Synthetic oligonucleotide
  Target: APOC3; (-) strand; PAM type: NNNNGHTT; PAM sequence: AGCAGCTT
acttgcgacggcccactcat

SEQ ID NO: 5838 - DNA, 20 bp, Artificial Sequence
  Description of Artificial Sequence: Synthetic oligonucleotide
  Target: APOC3; (-) strand; PAM type: NNNNGHTT; PAM sequence: GGGTGATT
caaggaaggcagggtacgga

SEQ ID NO: 5839 - DNA, 20 bp, Artificial Sequence
  Description of Artificial Sequence: Synthetic oligonucleotide
  Target: APOC3; (-) strand; PAM type: NNNNGHTT; PAM sequence: TCCTGTTT
aagtatcagcaaacttattg

SEQ ID NO: 5840 - DNA, 20 bp, Artificial Sequence
  Description of Artificial Sequence: Synthetic oligonucleotide
  Target: APOC3; (-) strand; PAM type: NNNNGHTT; PAM sequence: AACAGTTT
agtcatgttgtgcagcacct

SEQ ID NO: 5841 - DNA, 20 bp, Artificial Sequence
  Description of Artificial Sequence: Synthetic oligonucleotide
  Target: APOC3; (-) strand; PAM type: NNNNGHTT; PAM sequence: CACAGTTT
tggataggggaggtcagctc

SEQ ID NO: 5842 - DNA, 20 bp, Artificial Sequence
  Description of Artificial Sequence: Synthetic oligonucleotide
  Target: APOC3; (-) strand; PAM type: NNNNGHTT; PAM sequence: TTGTGCTT
gcagcctctattgggagacc

SEQ ID NO: 5843 - DNA, 20 bp, Artificial Sequence
  Description of Artificial Sequence: Synthetic oligonucleotide
  Target: APOC3; (-) strand; PAM type: NNNNGHTT; PAM sequence: CACAGTTT
gtgccttcgcctctccgggc

SEQ ID NO: 5844 - DNA, 20 bp, Artificial Sequence
  Description of Artificial Sequence: Synthetic oligonucleotide
  Target: APOC3; (-) strand; PAM type: NNNNGHTT; PAM sequence: AACTGTTT
acctgacataggagtgacaa

SEQ ID NO: 5845 - DNA, 20 bp, Artificial Sequence
  Description of Artificial Sequence: Synthetic oligonucleotide
  Target: APOC3; (-) strand; PAM type: NNNNGHTT; PAM sequence: GTGGGCTT
tagctaccctaggtaaagga

SEQ ID NO: 5846 - DNA, 20 bp, Artificial Sequence
  Description of Artificial Sequence: Synthetic oligonucleotide
  Target: APOC3; (-) strand; PAM type: NNNNGHTT; PAM sequence: CATGGCTT
aatgtccccgcgtgcacgca

SEQ ID NO: 5847 - DNA, 20 bp, Artificial Sequence
  Description of Artificial Sequence: Synthetic oligonucleotide
  Target: APOC3; (-) strand; PAM type: NNNNGHTT; PAM sequence: AATCGCTT
taggaaggctgaggcaggag

SEQ ID NO: 5848 - DNA, 20 bp, Artificial Sequence
  Description of Artificial Sequence: Synthetic oligonucleotide
  Target: APOC3; (-) strand; PAM type: NNNNGHTT; PAM sequence: GGTGGCTT
aaaaaaaatcagctgggcat

SEQ ID NO: 5849 - DNA, 20 bp, Artificial Sequence
  Description of Artificial Sequence: Synthetic oligonucleotide
  Target: APOC3; (-) strand; PAM type: NNNNGHTT; PAM sequence: AGGAGTTT
tgggcgtatcacttcaggcc

SEQ ID NO: 5850 - DNA, 20 bp, Artificial Sequence
  Description of Artificial Sequence: Synthetic oligonucleotide
  Target: APOC3; (-) strand; PAM type: NNNNGHTT; PAM sequence: CCATGATT
gaccctgcacccctggccat

SEQ ID NO: 5851 - DNA, 20 bp, Artificial Sequence
  Description of Artificial Sequence: Synthetic oligonucleotide
  Target: APOC3; (-) strand; PAM type: NNNNGHTT; PAM sequence: CCGCGCTT
gaacagcaggatgggctagg

SEQ ID NO: 5852 - DNA, 20 bp, Artificial Sequence
  Description of Artificial Sequence: Synthetic oligonucleotide
  Target: APOC3; (-) strand; PAM type: NNNNGHTT; PAM sequence: CGTCGCTT
actgaagcctggacctgtga

SEQ ID NO: 5853 - DNA, 20 bp, Artificial Sequence
  Description of Artificial Sequence: Synthetic oligonucleotide
  Target: APOC3; (-) strand; PAM type: NNNNGHTT; PAM sequence: GCTAGATT
cctcccttccccacatcctg

SEQ ID NO: 5854 - DNA, 20 bp, Artificial Sequence
  Description of Artificial Sequence: Synthetic oligonucleotide
  Target: APOC3; (-) strand; PAM type: NNNNGHTT; PAM sequence: CGCGGCTT
ccatcccgcccagaaacagc

SEQ ID NO: 5855 - DNA, 20 bp, Artificial Sequence
  Description of Artificial Sequence: Synthetic oligonucleotide
  Target: APOC3; (-) strand; PAM type: NNNNGHTT; PAM sequence: TGGAGTTT
ccgggtgcaagtgaagcgct

SEQ ID NO: 5856 - DNA, 20 bp, Artificial Sequence
  Description of Artificial Sequence: Synthetic oligonucleotide
  Target: APOC3; (-) strand; PAM type: NNNNGHTT; PAM sequence: AAGCGCTT
tttggtcccgggtgcaagtg

SEQ ID NO: 5857 - DNA, 20 bp, Artificial Sequence
  Description of Artificial Sequence: Synthetic oligonucleotide
  Target: APOC3; (-) strand; PAM type: NNNNGHTT; PAM sequence: TGGGGTTT
agggagccagccactgggat

SEQ ID NO: 5858 - DNA, 20 bp, Artificial Sequence
  Description of Artificial Sequence: Synthetic oligonucleotide
  Target: APOC3; (-) strand; PAM type: NNNNGHTT; PAM sequence: CTGGGATT
cggcctcagggagccagcca

SEQ ID NO: 5859 - DNA, 20 bp, Artificial Sequence
  Description of Artificial Sequence: Synthetic oligonucleotide
  Target: APOC3; (-) strand; PAM type: NNNNGHTT; PAM sequence: GGTTGCTT
tgaggcgggccaggaaacag

SEQ ID NO: 5860 - DNA, 20 bp, Artificial Sequence
  Description of Artificial Sequence: Synthetic oligonucleotide
  Target: APOC3; (-) strand; PAM type: NNNNGHTT; PAM sequence: GGCTGCTT
ggaggacctgctggacgcct

SEQ ID NO: 5861 - DNA, 20 bp, Artificial Sequence
  Description of Artificial Sequence: Synthetic oligonucleotide
  Target: APOC3; (-) strand; PAM type: NNNNGHTT; PAM sequence: AGCAGCTT
taaacgtttccaaagtggga

SEQ ID NO: 5862 - DNA, 20 bp, Artificial Sequence
  Description of Artificial Sequence: Synthetic oligonucleotide
  Target: APOC3; (-) strand; PAM type: NNNNGHTT; PAM sequence: AAACGTTT
cccttcccggtgctcagaat

SEQ ID NO: 5863 - DNA, 20 bp, Artificial Sequence
  Description of Artificial Sequence: Synthetic oligonucleotide
  Target: APOC3; (-) strand; PAM type: NNNNGHTT; PAM sequence: GTCAGCTT
ccgtgctggagagcttcaag

SEQ ID NO: 5864 - DNA, 20 bp, Artificial Sequence
  Description of Artificial Sequence: Synthetic oligonucleotide
  Target: APOC3; (-) strand; PAM type: NNNNGHTT; PAM sequence: GAGAGCTT
aaggcctgctgcccgtgctg

SEQ ID NO: 5865 - DNA, 20 bp, Artificial Sequence
  Description of Artificial Sequence: Synthetic oligonucleotide
  Target: APOC3; (-) strand; PAM type: NNNNGHTT; PAM sequence: CAGCGCTT
cctacagcgacgagctgcgc

SEQ ID NO: 5866 - DNA, 20 bp, Artificial Sequence
  Description of Artificial Sequence: Synthetic oligonucleotide
  Target: APOC3; (-) strand; PAM type: NNNNGHTT; PAM sequence: CCCAGTTT
cagcggcagagactatgtgt

SEQ ID NO: 5867 - DNA, 20 bp, Artificial Sequence
  Description of Artificial Sequence: Synthetic oligonucleotide
  Target: APOC3; (-) strand; PAM type: NNNNGHTT; PAM sequence: CCAAGCTT
tggccccctctcccccacct

SEQ ID NO: 5868 - DNA, 20 bp, Artificial Sequence
  Description of Artificial Sequence: Synthetic oligonucleotide
  Target: APOC3; (-) strand; PAM type: NNNNGHTT; PAM sequence: GCAGGTTT
caccctcctgggcagaggca

SEQ ID NO: 5869 - DNA, 20 bp, Artificial Sequence
  Description of Artificial Sequence: Synthetic oligonucleotide
  Target: APOC3; (-) strand; PAM type: NNNNGHTT; PAM sequence: GGGGGCTT
acctagggagccaaccatcg

SEQ ID NO: 5870 - DNA, 20 bp, Artificial Sequence
  Description of Artificial Sequence: Synthetic oligonucleotide
  Target: APOC3; (-) strand; PAM type: NNNNGHTT; PAM sequence: CGGGGCTT
ctgcaatgagtgggggagca

SEQ ID NO: 5871 - DNA, 20 bp, Artificial Sequence
  Description of Artificial Sequence: Synthetic oligonucleotide
  Target: APOC3; (-) strand; PAM type: NNNNGHTT; PAM sequence: GGCTGCTT
aaataggccctgcaagagct

SEQ ID NO: 5872 - DNA, 20 bp, Artificial Sequence
  Description of Artificial Sequence: Synthetic oligonucleotide
  Target: APOC3; (-) strand; PAM type: NNNNGHTT; PAM sequence: CTGGGCTT
gagcagcaacagggccgggg

SEQ ID NO: 5873 - DNA, 20 bp, Artificial Sequence
  Description of Artificial Sequence: Synthetic oligonucleotide
  Target: APOC3; (-) strand; PAM type: NNNNGHTT; PAM sequence: TGCTGTTT
gccctgcagcccccgcagct

SEQ ID NO: 5874 - DNA, 20 bp, Artificial Sequence
  Description of Artificial Sequence: Synthetic oligonucleotide
  Target: APOC3; (-) strand; PAM type: NNNNGHTT; PAM sequence: CGCAGCTT
gacccctgccctgcagcccc

SEQ ID NO: 5875 - DNA, 20 bp, Artificial Sequence
  Description of Artificial Sequence: Synthetic oligonucleotide
  Target: APOC3; (+) strand; PAM type: NNNNGHTT; PAM sequence: TGGGGTTT
ttttgtatttttagtagaga

SEQ ID NO: 5876 - DNA, 20 bp, Artificial Sequence
  Description of Artificial Sequence: Synthetic oligonucleotide
  Target: APOC3; (+) strand; PAM type: NNNNGHTT; PAM sequence: CTGAGATT
cgcctcaacctcccaaagtg

SEQ ID NO: 5877 - DNA, 20 bp, Artificial Sequence
  Description of Artificial Sequence: Synthetic oligonucleotide
  Target: APOC3; (+) strand; PAM type: NNNNGHTT; PAM sequence: TCCTGATT
gtataataatcatactgtgt

SEQ ID NO: 5878 - DNA, 20 bp, Artificial Sequence
  Description of Artificial Sequence: Synthetic oligonucleotide
  Target: APOC3; (+) strand; PAM type: NNNNGHTT; PAM sequence: GCTGGCTT
acactccctgggcaggagca

SEQ ID NO: 5879 - DNA, 20 bp, Artificial Sequence
  Description of Artificial Sequence: Synthetic oligonucleotide
  Target: APOC3; (+) strand; PAM type: NNNNGHTT; PAM sequence: ATTTGCTT
ccacaattgtactaactcta

SEQ ID NO: 5880 - DNA, 20 bp, Artificial Sequence
  Description of Artificial Sequence: Synthetic oligonucleotide
  Target: APOC3; (+) strand; PAM type: NNNNGHTT; PAM sequence: TTCAGTTT
atttgctttgtgttcatttt

SEQ ID NO: 5881 - DNA, 20 bp, Artificial Sequence
  Description of Artificial Sequence: Synthetic oligonucleotide
  Target: APOC3; (+) strand; PAM type: NNNNGHTT; PAM sequence: AGTGGCTT
tcattttttcagtttccaga

SEQ ID NO: 5882 - DNA, 20 bp, Artificial Sequence
  Description of Artificial Sequence: Synthetic oligonucleotide
  Target: APOC3; (+) strand; PAM type: NNNNGHTT; PAM sequence: TAATGTTT
ttcagtttccagaagtggct

SEQ ID NO: 5883 - DNA, 20 bp, Artificial Sequence
  Description of Artificial Sequence: Synthetic oligonucleotide
  Target: APOC3; (+) strand; PAM type: NNNNGHTT; PAM sequence: CCGTGATT
atgcagcctgtgccatctct

SEQ ID NO: 5884 - DNA, 20 bp, Artificial Sequence
  Description of Artificial Sequence: Synthetic oligonucleotide
  Target: APOC3; (+) strand; PAM type: NNNNGHTT; PAM sequence: CCTGGCTT
tcagatgctggagtccactc

SEQ ID NO: 5885 - DNA, 20 bp, Artificial Sequence
  Description of Artificial Sequence: Synthetic oligonucleotide
  Target: APOC3; (+) strand; PAM type: NNNNGHTT; PAM sequence: TGAGGATT
tgtacctgcctcctaggctg

SEQ ID NO: 5886 - DNA, 20 bp, Artificial Sequence
  Description of Artificial Sequence: Synthetic oligonucleotide
  Target: APOC3; (+) strand; PAM type: NNNNGHTT; PAM sequence: TAGTGCTT
gattcactgagatgatctta

SEQ ID NO: 5887 - DNA, 20 bp, Artificial Sequence
  Description of Artificial Sequence: Synthetic oligonucleotide
  Target: APOC3; (+) strand; PAM type: NNNNGHTT; PAM sequence: TCCAGCTT
tgctcctgaatcaggcacag

SEQ ID NO: 5888 - DNA, 20 bp, Artificial Sequence
  Description of Artificial Sequence: Synthetic oligonucleotide
  Target: APOC3; (+) strand; PAM type: NNNNGHTT; PAM sequence: CGCAGTTT
gtcacgaatgacacctcagc

SEQ ID NO: 5889 - DNA, 20 bp, Artificial Sequence
  Description of Artificial Sequence: Synthetic oligonucleotide
  Target: APOC3; (+) strand; PAM type: NNNNGHTT; PAM sequence: AGGCGCTT
ctagcatgtgagaggtccag

SEQ ID NO: 5890 - DNA, 20 bp, Artificial Sequence
  Description of Artificial Sequence: Synthetic oligonucleotide
  Target: APOC3; (+) strand; PAM type: NNNNGHTT; PAM sequence: TGTGGATT
agagcatccaccagagtgtg

SEQ ID NO: 5891 - DNA, 20 bp, Artificial Sequence
  Description of Artificial Sequence: Synthetic oligonucleotide
  Target: APOC3; (+) strand; PAM type: NNNNGHTT; PAM sequence: GTACGTTT
ttacttcccaaagtctgagg

SEQ ID NO: 5892 - DNA, 20 bp, Artificial Sequence
  Description of Artificial Sequence: Synthetic oligonucleotide
  Target: APOC3; (+) strand; PAM type: NNNNGHTT; PAM sequence: GATGGATT
acgttttgcatcaatctgta

SEQ ID NO: 5893 - DNA, 20 bp, Artificial Sequence
  Description of Artificial Sequence: Synthetic oligonucleotide
  Target: APOC3; (+) strand; PAM type: NNNNGHTT; PAM sequence: ATTTGTTT
ttgcatcaatctgtagatgg

SEQ ID NO: 5894 - DNA, 20 bp, Artificial Sequence
  Description of Artificial Sequence: Synthetic oligonucleotide
  Target: APOC3; (+) strand; PAM type: NNNNGHTT; PAM sequence: TAATGATT
atctgtgcaacaggcagact

SEQ ID NO: 5895 - DNA, 20 bp, Artificial Sequence
  Description of Artificial Sequence: Synthetic oligonucleotide
  Target: APOC3; (+) strand; PAM type: NNNNGHTT; PAM sequence: GTATGCTT
cacacggacatgtgcctcac

SEQ ID NO: 5896 - DNA, 20 bp, Artificial Sequence
  Description of Artificial Sequence: Synthetic oligonucleotide
  Target: APOC3; (+) strand; PAM type: NNNNGHTT; PAM sequence: ACTGGCTT
ccctcttcctcccatctacc

SEQ ID NO: 5897 - DNA, 20 bp, Artificial Sequence
  Description of Artificial Sequence: Synthetic oligonucleotide
  Target: APOC3; (+) strand; PAM type: NNNNGHTT; PAM sequence: CCAGGCTT
ccttggaaggagacaaggta

SEQ ID NO: 5898 - DNA, 20 bp, Artificial Sequence
  Description of Artificial Sequence: Synthetic oligonucleotide
  Target: APOC3; (+) strand; PAM type: NNNNGHTT; PAM sequence: AAAGGCTT
cagaccctctgcagagatgg

SEQ ID NO: 5899 - DNA, 20 bp, Artificial Sequence
  Description of Artificial Sequence: Synthetic oligonucleotide
  Target: APOC3; (+) strand; PAM type: NNNNGHTT; PAM sequence: ACAGGTTT
aagtctgcaggagacttgag

SEQ ID NO: 5900 - DNA, 20 bp, Artificial Sequence
  Description of Artificial Sequence: Synthetic oligonucleotide
  Target: APOC3; (+) strand; PAM type: NNNNGHTT; PAM sequence: CCTGGATT
ttgcctggggtgtgtgaaga

SEQ ID NO: 5901 - DNA, 20 bp, Artificial Sequence
  Description of Artificial Sequence: Synthetic oligonucleotide
  Target: APOC3; (+) strand; PAM type: NNNNGHTT; PAM sequence: TTAGGTTT
cacttggagcccttagagcc

SEQ ID NO: 5902 - DNA, 20 bp, Artificial Sequence
  Description of Artificial Sequence: Synthetic oligonucleotide
  Target: APOC3; (+) strand; PAM type: NNNNGHTT; PAM sequence: CTGGGTTT
ttttgtatttttagtagaga

SEQ ID NO: 5903 - DNA, 20 bp, Artificial Sequence
  Description of Artificial Sequence: Synthetic oligonucleotide
  Target: APOC3; (+) strand; PAM type: NNNNGHTT; PAM sequence: CTGGGATT
cgtcccagcctcccaaagtg

SEQ ID NO: 5904 - DNA, 20 bp, Artificial Sequence
  Description of Artificial Sequence: Synthetic oligonucleotide
  Target: APOC3; (+) strand; PAM type: NNNNGHTT; PAM sequence: CTCTGATT
gccgggccactttctcaggc

SEQ ID NO: 5905 - DNA, 20 bp, Artificial Sequence
  Description of Artificial Sequence: Synthetic oligonucleotide
  Target: APOC3; (+) strand; PAM type: NNNNGHTT; PAM sequence: GACAGCTT
gtgttagttacttctgagag

SEQ ID NO: 5906 - DNA, 20 bp, Artificial Sequence
  Description of Artificial Sequence: Synthetic oligonucleotide
  Target: APOC3; (+) strand; PAM type: NNNNGHTT; PAM sequence: CGCTGCTT
tgtgagtccctccatggacc

SEQ ID NO: 5907 - DNA, 20 bp, Artificial Sequence
  Description of Artificial Sequence: Synthetic oligonucleotide
  Target: APOC3; (+) strand; PAM type: NNNNGHTT; PAM sequence: TGCGGCTT
cctcatcctgccatccctgc

SEQ ID NO: 5908 - DNA, 20 bp, Artificial Sequence
  Description of Artificial Sequence: Synthetic oligonucleotide
  Target: APOC3; (+) strand; PAM type: NNNNGHTT; PAM sequence: CCTGGATT
gggtgagcagcactcgcctg

SEQ ID NO: 5909 - DNA, 20 bp, Artificial Sequence
  Description of Artificial Sequence: Synthetic oligonucleotide
  Target: APOC3; (+) strand; PAM type: NNNNGHTT; PAM sequence: CAGGGCTT
cctctactccaggctgtgtt

SEQ ID NO: 5910 - DNA, 20 bp, Artificial Sequence
  Description of Artificial Sequence: Synthetic oligonucleotide
  Target: APOC3; (+) strand; PAM type: NNNNGHTT; PAM sequence: TAGGGATT
gcagcgtggactcagtctcc

SEQ ID NO: 5911 - DNA, 20 bp, Artificial Sequence
  Description of Artificial Sequence: Synthetic oligonucleotide
  Target: APOC3; (+) strand; PAM type: NNNNGHTT; PAM sequence: GCCCGCTT
agggatttcccaactctccc

SEQ ID NO: 5912 - DNA, 20 bp, Artificial Sequence
  Description of Artificial Sequence: Synthetic oligonucleotide
  Target: APOC3; (+) strand; PAM type: NNNNGHTT; PAM sequence: TCAGGCTT
gcaggttcccccctcattct

SEQ ID NO: 5913 - DNA, 20 bp, Artificial Sequence
  Description of Artificial Sequence: Synthetic oligonucleotide
  Target: APOC3; (+) strand; PAM type: NNNNGHTT; PAM sequence: GTGGGTTT
gtgccttgatgttcagtctg

SEQ ID NO: 5914 - DNA, 20 bp, Artificial Sequence
  Description of Artificial Sequence: Synthetic oligonucleotide
  Target: APOC3; (+) strand; PAM type: NNNNGHTT; PAM sequence: AGGAGCTT
ctcagccctgctctttcctc

SEQ ID NO: 5915 - DNA, 20 bp, Artificial Sequence
  Description of Artificial Sequence: Synthetic oligonucleotide
  Target: APOC3; (+) strand; PAM type: NNNNGHTT; PAM sequence: CTCAGCTT
aggccgaggatgcctccctt

SEQ ID NO: 5916 - DNA, 20 bp, Artificial Sequence
  Description of Artificial Sequence: Synthetic oligonucleotide
  Target: APOC3; (+) strand; PAM type: NNNNGHTT; PAM sequence: TGCCGTTT
cccggagcagtcctagggcg

SEQ ID NO: 5917 - DNA, 20 bp, Artificial Sequence
  Description of Artificial Sequence: Synthetic oligonucleotide
  Target: APOC3; (+) strand; PAM type: NNNNGHTT; PAM sequence: CTGGGATT
tgcctcagcctcccaagtag

SEQ ID NO: 5918 - DNA, 20 bp, Artificial Sequence
  Description of Artificial Sequence: Synthetic oligonucleotide
  Target: APOC3; (+) strand; PAM type: NNNNGHTT; PAM sequence: TGGGGTTT
ttttgtatttttagcagaga

SEQ ID NO: 5919 - DNA, 20 bp, Artificial Sequence
  Description of Artificial Sequence: Synthetic oligonucleotide
  Target: APOC3; (+) strand; PAM type: NNNNGHTT; PAM sequence: CTGGGATT
tgcctcggcctcccaaagtg

SEQ ID NO: 5920 - DNA, 20 bp, Artificial Sequence
  Description of Artificial Sequence: Synthetic oligonucleotide
  Target: APOC3; (+) strand; PAM type: NNNNGHTT; PAM sequence: ACCAGTTT
cagcctttttggcaccaggg

SEQ ID NO: 5921 - DNA, 20 bp, Artificial Sequence
  Description of Artificial Sequence: Synthetic oligonucleotide
  Target: APOC3; (+) strand; PAM type: NNNNGHTT; PAM sequence: GATGGTTT
tttttccatgggccagcggg

SEQ ID NO: 5922 - DNA, 20 bp, Artificial Sequence
  Description of Artificial Sequence: Synthetic oligonucleotide
  Target: APOC3; (+) strand; PAM type: NNNNGHTT; PAM sequence: ATTAGATT
tccacctcagatcatcaggc

SEQ ID NO: 5923 - DNA, 20 bp, Artificial Sequence
  Description of Artificial Sequence: Synthetic oligonucleotide
  Target: APOC3; (+) strand; PAM type: NNNNGHTT; PAM sequence: AGGGGTTT
gggttggggacccctgggct

SEQ ID NO: 5924 - DNA, 20 bp, Artificial Sequence
  Description of Artificial Sequence: Synthetic oligonucleotide
  Target: APOC3; (+) strand; PAM type: NNNNGHTT; PAM sequence: GAGTGCTT
ctgacccaattcaagcccgt

SEQ ID NO: 5925 - DNA, 20 bp, Artificial Sequence
  Description of Artificial Sequence: Synthetic oligonucleotide
  Target: APOC3; (+) strand; PAM type: NNNNGHTT; PAM sequence: TTCTGCTT
caattcaagcccgtgagtgc

SEQ ID NO: 5926 - DNA, 20 bp, Artificial Sequence
  Description of Artificial Sequence: Synthetic oligonucleotide
  Target: APOC3; (+) strand; PAM type: NNNNGHTT; PAM sequence: ACCGGCTT
aaacattcttagtccccaga

SEQ ID NO: 5927 - DNA, 20 bp, Artificial Sequence
  Description of Artificial Sequence: Synthetic oligonucleotide
  Target: APOC3; (+) strand; PAM type: NNNNGHTT; PAM sequence: GAGCGATT
gatgagaaaattgaggctca

SEQ ID NO: 5928 - DNA, 20 bp, Artificial Sequence
  Description of Artificial Sequence: Synthetic oligonucleotide
  Target: APOC3; (+) strand; PAM type: NNNNGHTT; PAM sequence: TGCTGTTT
ggttgtgcaactccaggcgg

SEQ ID NO: 5929 - DNA, 20 bp, Artificial Sequence
  Description of Artificial Sequence: Synthetic oligonucleotide
  Target: APOC3; (+) strand; PAM type: NNNNGHTT; PAM sequence: CAGGGTTT
ctgaggtgacctggagatgg

SEQ ID NO: 5930 - DNA, 20 bp, Artificial Sequence
  Description of Artificial Sequence: Synthetic oligonucleotide
  Target: APOC3; (+) strand; PAM type: NNNNGHTT; PAM sequence: GGGGGATT
tctcccagggtggcagctgt

SEQ ID NO: 5931 - DNA, 20 bp, Artificial Sequence
  Description of Artificial Sequence: Synthetic oligonucleotide
  Target: APOC3; (+) strand; PAM type: NNNNGHTT; PAM sequence: TGTTGCTT
ggagttctcatgccctgctc

SEQ ID NO: 5932 - DNA, 20 bp, Artificial Sequence
  Description of Artificial Sequence: Synthetic oligonucleotide
  Target: APOC3; (+) strand; PAM type: NNNNGHTT; PAM sequence: GACTGATT
cctgctctgttgcttcccct

SEQ ID NO: 5933 - DNA, 20 bp, Artificial Sequence
  Description of Artificial Sequence: Synthetic oligonucleotide
  Target: APOC3; (+) strand; PAM type: NNNNGHTT; PAM sequence: GATGGCTT
gatttaggggctgggtgacc

SEQ ID NO: 5934 - DNA, 20 bp, Artificial Sequence
  Description of Artificial Sequence: Synthetic oligonucleotide
  Target: APOC3; (+) strand; PAM type: NNNNGHTT; PAM sequence: CTGGGATT
aaggacaagttctctgagtt

SEQ ID NO: 5935 - DNA, 20 bp, Artificial Sequence
  Description of Artificial Sequence: Synthetic oligonucleotide
  Target: APOC3; (+) strand; PAM type: NNNNGHTT; PAM sequence: GGTTGCTT
tctccagggctgcccctgta

SEQ ID NO: 5936 - DNA, 20 bp, Artificial Sequence
  Description of Artificial Sequence: Synthetic oligonucleotide
  Target: APOC3; (+) strand; PAM type: NNNNGHTT; PAM sequence: CTCAGTTT
tagctgggcagtctctgggc

SEQ ID NO: 5937 - DNA, 20 bp, Artificial Sequence
  Description of Artificial Sequence: Synthetic oligonucleotide
  Target: APOC3; (+) strand; PAM type: NNNNGHTT; PAM sequence: GACAGCTT
ctccgtaccctgccttcctt

SEQ ID NO: 5938 - DNA, 20 bp, Artificial Sequence
  Description of Artificial Sequence: Synthetic oligonucleotide
  Target: APOC3; (+) strand; PAM type: NNNNGHTT; PAM sequence: ATAAGTTT
gcggaaggtcaaacaggaca

SEQ ID NO: 5939 - DNA, 20 bp, Artificial Sequence
  Description of Artificial Sequence: Synthetic oligonucleotide
  Target: APOC3; (+) strand; PAM type: NNNNGHTT; PAM sequence: GTGTGTTT
gtcatcagagttgagactgt

SEQ ID NO: 5940 - DNA, 20 bp, Artificial Sequence
  Description of Artificial Sequence: Synthetic oligonucleotide
  Target: APOC3; (+) strand; PAM type: NNNNGHTT; PAM sequence: CTCAGTTT
ctccaccacttgatatcagc

SEQ ID NO: 5941 - DNA, 20 bp, Artificial Sequence
  Description of Artificial Sequence: Synthetic oligonucleotide
  Target: APOC3; (+) strand; PAM type: NNNNGHTT; PAM sequence: GTAGGTTT
acaaccgtaccccctccacc

SEQ ID NO: 5942 - DNA, 20 bp, Artificial Sequence
  Description of Artificial Sequence: Synthetic oligonucleotide
  Target: APOC3; (+) strand; PAM type: NNNNGHTT; PAM sequence: GTGAGATT
ccctccaccgtaggtttgcc

SEQ ID NO: 5943 - DNA, 20 bp, Artificial Sequence
  Description of Artificial Sequence: Synthetic oligonucleotide
  Target: APOC3; (+) strand; PAM type: NNNNGHTT; PAM sequence: AACCGTTT
ttgaaatgagagagcgttcg

SEQ ID NO: 5944 - DNA, 20 bp, Artificial Sequence
  Description of Artificial Sequence: Synthetic oligonucleotide
  Target: APOC3; (+) strand; PAM type: NNNNGHTT; PAM sequence: AGATGCTT
ggcacagcacctgcacgtaa

SEQ ID NO: 5945 - DNA, 20 bp, Artificial Sequence
  Description of Artificial Sequence: Synthetic oligonucleotide
  Target: APOC3; (+) strand; PAM type: NNNNGHTT; PAM sequence: TCATGATT
aagatgcttgatcaatgttg

SEQ ID NO: 5946 - DNA, 20 bp, Artificial Sequence
  Description of Artificial Sequence: Synthetic oligonucleotide
  Target: APOC3; (+) strand; PAM type: NNNNGHTT; PAM sequence: GGCTGCTT
gcacaaggtctcccaataga

SEQ ID NO: 5947 - DNA, 20 bp, Artificial Sequence
  Description of Artificial Sequence: Synthetic oligonucleotide
  Target: APOC3; (+) strand; PAM type: NNNNGHTT; PAM sequence: GATGGCTT
cagagagcccgagagctgca

SEQ ID NO: 5948 - DNA, 20 bp, Artificial Sequence
  Description of Artificial Sequence: Synthetic oligonucleotide
  Target: APOC3; (+) strand; PAM type: NNNNGHTT; PAM sequence: AACAGTTT
tctgctcagttggtgcagaa

SEQ ID NO: 5949 - DNA, 20 bp, Artificial Sequence
  Description of Artificial Sequence: Synthetic oligonucleotide
  Target: APOC3; (+) strand; PAM type: NNNNGHTT; PAM sequence: GACTGCTT
tacatccagccccacctgga

SEQ ID NO: 5950 - DNA, 20 bp, Artificial Sequence
  Description of Artificial Sequence: Synthetic oligonucleotide
  Target: APOC3; (+) strand; PAM type: NNNNGHTT; PAM sequence: CAGGGCTT
ctttctctctgaaaattccc

SEQ ID NO: 5951 - DNA, 20 bp, Artificial Sequence
  Description of Artificial Sequence: Synthetic oligonucleotide
  Target: APOC3; (+) strand; PAM type: NNNNGHTT; PAM sequence: GGCCGATT
agatggggacatggggatgg

SEQ ID NO: 5952 - DNA, 20 bp, Artificial Sequence
  Description of Artificial Sequence: Synthetic oligonucleotide
  Target: APOC3; (+) strand; PAM type: NNNNGHTT; PAM sequence: GCATGATT
gcccaggctggagtgcagtg

SEQ ID NO: 5953 - DNA, 20 bp, Artificial Sequence
  Description of Artificial Sequence: Synthetic oligonucleotide
  Target: APOC3; (+) strand; PAM type: NNNNGHTT; PAM sequence: AAGCGATT
gacctctgcctcccaggttc

SEQ ID NO: 5954 - DNA, 20 bp, Artificial Sequence
  Description of Artificial Sequence: Synthetic oligonucleotide
  Target: APOC3; (+) strand; PAM type: NNNNGHTT; PAM sequence: CTGGGATT
tgcctcagccttcctagtag

SEQ ID NO: 5955 - DNA, 20 bp, Artificial Sequence
  Description of Artificial Sequence: Synthetic oligonucleotide
  Target: APOC3; (+) strand; PAM type: NNNNGHTT; PAM sequence: AGCTGATT
gggtgcaagccaccatgccc

SEQ ID NO: 5956 - DNA, 20 bp, Artificial Sequence
  Description of Artificial Sequence: Synthetic oligonucleotide
  Target: APOC3; (+) strand; PAM type: NNNNGHTT; PAM sequence: CAGGGTTT
ttttgtatttttagtagaga

SEQ ID NO: 5957 - DNA, 20 bp, Artificial Sequence
  Description of Artificial Sequence: Synthetic oligonucleotide
  Target: APOC3; (+) strand; PAM type: NNNNGHTT; PAM sequence: CTGGGATT
cacctcagcctcccaaagtg

SEQ ID NO: 5958 - DNA, 20 bp, Artificial Sequence
  Description of Artificial Sequence: Synthetic oligonucleotide
  Target: APOC3; (+) strand; PAM type: NNNNGHTT; PAM sequence: ACAGGCTT
cctcccaaagtgctgggatt

SEQ ID NO: 5959 - DNA, 20 bp, Artificial Sequence
  Description of Artificial Sequence: Synthetic oligonucleotide
  Target: APOC3; (+) strand; PAM type: NNNNGHTT; PAM sequence: CCAGGCTT
gggcaagcgacgtcacaggt

SEQ ID NO: 5960 - DNA, 20 bp, Artificial Sequence
  Description of Artificial Sequence: Synthetic oligonucleotide
  Target: APOC3; (+) strand; PAM type: NNNNGHTT; PAM sequence: GCCAGCTT
tggtgaattttcttactcag

SEQ ID NO: 5961 - DNA, 20 bp, Artificial Sequence
  Description of Artificial Sequence: Synthetic oligonucleotide
  Target: APOC3; (+) strand; PAM type: NNNNGHTT; PAM sequence: ACTGGCTT
ggagccgcagggggtggagg

SEQ ID NO: 5962 - DNA, 20 bp, Artificial Sequence
  Description of Artificial Sequence: Synthetic oligonucleotide
  Target: APOC3; (+) strand; PAM type: NNNNGHTT; PAM sequence: GGCTGTTT
gctgtgcctgaggaagccgc

SEQ ID NO: 5963 - DNA, 20 bp, Artificial Sequence
  Description of Artificial Sequence: Synthetic oligonucleotide
  Target: APOC3; (+) strand; PAM type: NNNNGHTT; PAM sequence: GTCTGTTT
tgtgagaagaaaagggaagt

SEQ ID NO: 5964 - DNA, 20 bp, Artificial Sequence
  Description of Artificial Sequence: Synthetic oligonucleotide
  Target: APOC3; (+) strand; PAM type: NNNNGHTT; PAM sequence: AGAGGTTT
aaaagggaagtgtctgtttg

SEQ ID NO: 5965 - DNA, 20 bp, Artificial Sequence
  Description of Artificial Sequence: Synthetic oligonucleotide
  Target: APOC3; (+) strand; PAM type: NNNNGHTT; PAM sequence: AAGCGCTT
ggaggacaggcgcaaactcc

SEQ ID NO: 5966 - DNA, 20 bp, Artificial Sequence
  Description of Artificial Sequence: Synthetic oligonucleotide
  Target: APOC3; (+) strand; PAM type: NNNNGHTT; PAM sequence: CCCTGTTT
actgctcccagctaaagcaa

SEQ ID NO: 5967 - DNA, 20 bp, Artificial Sequence
  Description of Artificial Sequence: Synthetic oligonucleotide
  Target: APOC3; (+) strand; PAM type: NNNNGHTT; PAM sequence: CCTTGTTT
gcctcagacagggctgcagg

SEQ ID NO: 5968 - DNA, 20 bp, Artificial Sequence
  Description of Artificial Sequence: Synthetic oligonucleotide
  Target: APOC3; (+) strand; PAM type: NNNNGHTT; PAM sequence: CTTGGATT
cccctttcagggcacctggc

SEQ ID NO: 5969 - DNA, 20 bp, Artificial Sequence
  Description of Artificial Sequence: Synthetic oligonucleotide
  Target: APOC3; (+) strand; PAM type: NNNNGHTT; PAM sequence: TGTGGCTT
gcacctggccttggattgtc

SEQ ID NO: 5970 - DNA, 20 bp, Artificial Sequence
  Description of Artificial Sequence: Synthetic oligonucleotide
  Target: APOC3; (+) strand; PAM type: NNNNGHTT; PAM sequence: AGCTGCTT
ctattctcccaaaagaaaga

SEQ ID NO: 5971 - DNA, 20 bp, Artificial Sequence
  Description of Artificial Sequence: Synthetic oligonucleotide
  Target: APOC3; (+) strand; PAM type: NNNNGHTT; PAM sequence: AAACGTTT
gaagctgcttcccactttgg

SEQ ID NO: 5972 - DNA, 20 bp, Artificial Sequence
  Description of Artificial Sequence: Synthetic oligonucleotide
  Target: APOC3; (+) strand; PAM type: NNNNGHTT; PAM sequence: TTGAGCTT
ggcgggcgcctcactgggtg

SEQ ID NO: 5973 - DNA, 20 bp, Artificial Sequence
  Description of Artificial Sequence: Synthetic oligonucleotide
  Target: APOC3; (+) strand; PAM type: NNNNGHTT; PAM sequence: GCGGGCTT
cttggcggaggtcctcgagc

SEQ ID NO: 5974 - DNA, 20 bp, Artificial Sequence
  Description of Artificial Sequence: Synthetic oligonucleotide
  Target: APOC3; (+) strand; PAM type: NNNNGHTT; PAM sequence: CTCAGCTT
gcatctcctcgcccagtggg

SEQ ID NO: 5975 - DNA, 20 bp, Artificial Sequence
  Description of Artificial Sequence: Synthetic oligonucleotide
  Target: APOC3; (+) strand; PAM type: NNNNGHTT; PAM sequence: TGCAGCTT
tcagcttctcttgcagctcg

SEQ ID NO: 5976 - DNA, 20 bp, Artificial Sequence
  Description of Artificial Sequence: Synthetic oligonucleotide
  Target: APOC3; (+) strand; PAM type: NNNNGHTT; PAM sequence: CGCAGCTT
tcacagggccgagctgttcg

SEQ ID NO: 5977 - DNA, 20 bp, Artificial Sequence
  Description of Artificial Sequence: Synthetic oligonucleotide
  Target: APOC3; (+) strand; PAM type: NNNNGHTT; PAM sequence: AGGAGCTT
tcacgctgtcccagttgtca

SEQ ID NO: 5978 - DNA, 20 bp, Artificial Sequence
  Description of Artificial Sequence: Synthetic oligonucleotide
  Target: APOC3; (+) strand; PAM type: NNNNGHTT; PAM sequence: CCTCGCTT
caaagtgggcccttgaagga

SEQ ID NO: 5979 - DNA, 20 bp, Artificial Sequence
  Description of Artificial Sequence: Synthetic oligonucleotide
  Target: APOC3; (+) strand; PAM type: NNNNGHTT; PAM sequence: AGGGGCTT
ggaggtggtgaagaagggaa

SEQ ID NO: 5980 - DNA, 20 bp, Artificial Sequence
  Description of Artificial Sequence: Synthetic oligonucleotide
  Target: APOC3; (+) strand; PAM type: NNNNGHTT; PAM sequence: TCCAGTTT
accctgcctggagatcccat

SEQ ID NO: 5981 - DNA, 20 bp, Artificial Sequence
  Description of Artificial Sequence: Synthetic oligonucleotide
  Target: APOC3; (+) strand; PAM type: NNNNGHTT; PAM sequence: TCTGGCTT
ttaggtgaggactcggccag

SEQ ID NO: 5982 - DNA, 20 bp, Artificial Sequence
  Description of Artificial Sequence: Synthetic oligonucleotide
  Target: APOC3; (+) strand; PAM type: NNNNGHTT; PAM sequence: AGCTGTTT
ccaggctgggtccttacttt

SEQ ID NO: 5983 - DNA, 20 bp, Artificial Sequence
  Description of Artificial Sequence: Synthetic oligonucleotide
  Target: APOC3; (+) strand; PAM type: NNNNGHTT; PAM sequence: CCAAGCTT
ctgagatctgagccgaaagg

SEQ ID NO: 5984 - DNA, 20 bp, Artificial Sequence
  Description of Artificial Sequence: Synthetic oligonucleotide
  Target: APOC3; (+) strand; PAM type: NNNNGHTT; PAM sequence: CGGGGATT
ctgcccaggagggtgggcca

SEQ ID NO: 5985 - DNA, 20 bp, Artificial Sequence
  Description of Artificial Sequence: Synthetic oligonucleotide
  Target: APOC3; (+) strand; PAM type: NNNNGHTT; PAM sequence: CGCAGCTT
agcacggccaaggtcagcac

SEQ ID NO: 5986 - DNA, 20 bp, Artificial Sequence
  Description of Artificial Sequence: Synthetic oligonucleotide
  Target: APOC3; (+) strand; PAM type: NNNNGHTT; PAM sequence: GCAGGCTT
ggggcgggaggggagtgtct

SEQ ID NO: 5987 - DNA, 20 bp, Artificial Sequence
  Description of Artificial Sequence: Synthetic oligonucleotide
  Target: APOC3; (-) strand; PAM type: NRG; PAM sequence: CGG
gcaggagaatggcgtgaacc

SEQ ID NO: 5988 - DNA, 20 bp, Artificial Sequence
  Description of Artificial Sequence: Synthetic oligonucleotide
  Target: APOC3; (-) strand; PAM type: NRG; PAM sequence: TGG
gggaggctgaggcaggagaa

SEQ ID NO: 5989 - DNA, 20 bp, Artificial Sequence
  Description of Artificial Sequence: Synthetic oligonucleotide
  Target: APOC3; (-) strand; PAM type: NRG; PAM sequence: GAG
tacttgggaggctgaggcag

SEQ ID NO: 5990 - DNA, 20 bp, Artificial Sequence
  Description of Artificial Sequence: Synthetic oligonucleotide
  Target: APOC3; (-) strand; PAM type: NRG; PAM sequence: AGG
gctacttgggaggctgaggc

SEQ ID NO: 5991 - DNA, 20 bp, Artificial Sequence
  Description of Artificial Sequence: Synthetic oligonucleotide
  Target: APOC3; (-) strand; PAM type: NRG; PAM sequence: CAG
agctacttgggaggctgagg

SEQ ID NO: 5992 - DNA, 20 bp, Artificial Sequence
  Description of Artificial Sequence: Synthetic oligonucleotide
  Target: APOC3; (-) strand; PAM type: NRG; PAM sequence: AGG
cccagctacttgggaggctg

SEQ ID NO: 5993 - DNA, 20 bp, Artificial Sequence
  Description of Artificial Sequence: Synthetic oligonucleotide
  Target: APOC3; (-) strand; PAM type: NRG; PAM sequence: GAG
tcccagctacttgggaggct

SEQ ID NO: 5994 - DNA, 20 bp, Artificial Sequence
  Description of Artificial Sequence: Synthetic oligonucleotide
  Target: APOC3; (-) strand; PAM type: NRG; PAM sequence: AGG
tatggtcccagctacttggg

SEQ ID NO: 5995 - DNA, 20 bp, Artificial Sequence
  Description of Artificial Sequence: Synthetic oligonucleotide
  Target: APOC3; (-) strand; PAM type: NRG; PAM sequence: GAG
ctatggtcccagctacttgg

SEQ ID NO: 5996 - DNA, 20 bp, Artificial Sequence
  Description of Artificial Sequence: Synthetic oligonucleotide
  Target: APOC3; (-) strand; PAM type: NRG; PAM sequence: GGG
gcctatggtcccagctactt

SEQ ID NO: 5997 - DNA, 20 bp, Artificial Sequence
  Description of Artificial Sequence: Synthetic oligonucleotide
  Target: APOC3; (-) strand; PAM type: NRG; PAM sequence: TGG
cgcctatggtcccagctact

SEQ ID NO: 5998 - DNA, 20 bp, Artificial Sequence
  Description of Artificial Sequence: Synthetic oligonucleotide
  Target: APOC3; (-) strand; PAM type: NRG; PAM sequence: CAG
gtggcgggcgcctatggtcc

SEQ ID NO: 5999 - DNA, 20 bp, Artificial Sequence
  Description of Artificial Sequence: Synthetic oligonucleotide
  Target: APOC3; (-) strand; PAM type: NRG; PAM sequence: TGG
ggcgtggtggcgggcgccta

SEQ ID NO: 6000 - DNA, 20 bp, Artificial Sequence
  Description of Artificial Sequence: Synthetic oligonucleotide
  Target: APOC3; (-) strand; PAM type: NRG; PAM sequence: GGG
aattagccgggcgtggtggc

SEQ ID NO: 6001 - DNA, 20 bp, Artificial Sequence
  Description of Artificial Sequence: Synthetic oligonucleotide
  Target: APOC3; (-) strand; PAM type: NRG; PAM sequence: CGG
aaattagccgggcgtggtgg

SEQ ID NO: 6002 - DNA, 20 bp, Artificial Sequence
  Description of Artificial Sequence: Synthetic oligonucleotide
  Target: APOC3; (-) strand; PAM type: NRG; PAM sequence: TGG
aaaaaattagccgggcgtgg

SEQ ID NO: 6003 - DNA, 20 bp, Artificial Sequence
  Description of Artificial Sequence: Synthetic oligonucleotide
  Target: APOC3; (-) strand; PAM type: NRG; PAM sequence: TGG
aaaaaaaaattagccgggcg

SEQ ID NO: 6004 - DNA, 20 bp, Artificial Sequence
  Description of Artificial Sequence: Synthetic oligonucleotide
  Target: APOC3; (-) strand; PAM type: NRG; PAM sequence: GGG
aaaaaaaaaaaaaattagcc

SEQ ID NO: 6005 - DNA, 20 bp, Artificial Sequence
  Description of Artificial Sequence: Synthetic oligonucleotide
  Target: APOC3; (-) strand; PAM type: NRG; PAM sequence: CGG
aaaaaaaaaaaaaaattagc

SEQ ID NO: 6006 - DNA, 20 bp, Artificial Sequence
  Description of Artificial Sequence: Synthetic oligonucleotide
  Target: APOC3; (-) strand; PAM type: NRG; PAM sequence: TAG
acaaaaaaaaaaaaaaaaat

SEQ ID NO: 6007 - DNA, 20 bp, Artificial Sequence
  Description of Artificial Sequence: Synthetic oligonucleotide
  Target: APOC3; (-) strand; PAM type: NRG; PAM sequence: CGG
cgagaccatcctggctaaca

SEQ ID NO: 6008 - DNA, 20 bp, Artificial Sequence
  Description of Artificial Sequence: Synthetic oligonucleotide
  Target: APOC3; (-) strand; PAM type: NRG; PAM sequence: TGG
tcaggagatcgagaccatcc

SEQ ID NO: 6009 - DNA, 20 bp, Artificial Sequence
  Description of Artificial Sequence: Synthetic oligonucleotide
  Target: APOC3; (-) strand; PAM type: NRG; PAM sequence: GAG
gatcacgaggtcaggagatc

SEQ ID NO: 6010 - DNA, 20 bp, Artificial Sequence
  Description of Artificial Sequence: Synthetic oligonucleotide
  Target: APOC3; (-) strand; PAM type: NRG; PAM sequence: GAG
cgggcggatcacgaggtcag

SEQ ID NO: 6011 - DNA, 20 bp, Artificial Sequence
  Description of Artificial Sequence: Synthetic oligonucleotide
  Target: APOC3; (-) strand; PAM type: NRG; PAM sequence: AGG
ggcgggcggatcacgaggtc

SEQ ID NO: 6012 - DNA, 20 bp, Artificial Sequence
  Description of Artificial Sequence: Synthetic oligonucleotide
  Target: APOC3; (-) strand; PAM type: NRG; PAM sequence: CAG
aggcgggcggatcacgaggt

SEQ ID NO: 6013 - DNA, 20 bp, Artificial Sequence
  Description of Artificial Sequence: Synthetic oligonucleotide
  Target: APOC3; (-) strand; PAM type: NRG; PAM sequence: AGG
gttgaggcgggcggatcacg

SEQ ID NO: 6014 - DNA, 20 bp, Artificial Sequence
  Description of Artificial Sequence: Synthetic oligonucleotide
  Target: APOC3; (-) strand; PAM type: NRG; PAM sequence: GAG
ggttgaggcgggcggatcac

SEQ ID NO: 6015 - DNA, 20 bp, Artificial Sequence
  Description of Artificial Sequence: Synthetic oligonucleotide
  Target: APOC3; (-) strand; PAM type: NRG; PAM sequence: CGG
ctttgggaggttgaggcggg

SEQ ID NO: 6016 - DNA, 20 bp, Artificial Sequence
  Description of Artificial Sequence: Synthetic oligonucleotide
  Target: APOC3; (-) strand; PAM type: NRG; PAM sequence: GGG
gcactttgggaggttgaggc

SEQ ID NO: 6017 - DNA, 20 bp, Artificial Sequence
  Description of Artificial Sequence: Synthetic oligonucleotide
  Target: APOC3; (-) strand; PAM type: NRG; PAM sequence: CGG
agcactttgggaggttgagg

SEQ ID NO: 6018 - DNA, 20 bp, Artificial Sequence
  Description of Artificial Sequence: Synthetic oligonucleotide
  Target: APOC3; (-) strand; PAM type: NRG; PAM sequence: AGG
ctcagcactttgggaggttg

SEQ ID NO: 6019 - DNA, 20 bp, Artificial Sequence
  Description of Artificial Sequence: Synthetic oligonucleotide
  Target: APOC3; (-) strand; PAM type: NRG; PAM sequence: GAG
tctcagcactttgggaggtt

SEQ ID NO: 6020 - DNA, 20 bp, Artificial Sequence
  Description of Artificial Sequence: Synthetic oligonucleotide
  Target: APOC3; (-) strand; PAM type: NRG; PAM sequence: AGG
tgtaatctcagcactttggg

SEQ ID NO: 6021 - DNA, 20 bp, Artificial Sequence
  Description of Artificial Sequence: Synthetic oligonucleotide
  Target: APOC3; (-) strand; PAM type: NRG; PAM sequence: GAG
ctgtaatctcagcactttgg

SEQ ID NO: 6022 - DNA, 20 bp, Artificial Sequence
  Description of Artificial Sequence: Synthetic oligonucleotide
  Target: APOC3; (-) strand; PAM type: NRG; PAM sequence: GGG
gcctgtaatctcagcacttt

SEQ ID NO: 6023 - DNA, 20 bp, Artificial Sequence
  Description of Artificial Sequence: Synthetic oligonucleotide
  Target: APOC3; (-) strand; PAM type: NRG; PAM sequence: TGG
cgcctgtaatctcagcactt

SEQ ID NO: 6024 - DNA, 20 bp, Artificial Sequence
  Description of Artificial Sequence: Synthetic oligonucleotide
  Target: APOC3; (-) strand; PAM type: NRG; PAM sequence: CAG
gtggctcacgcctgtaatct

SEQ ID NO: 6025 - DNA, 20 bp, Artificial Sequence
  Description of Artificial Sequence: Synthetic oligonucleotide
  Target: APOC3; (-) strand; PAM type: NRG; PAM sequence: TGG
attttttaggccgggcgtgg

SEQ ID NO: 6026 - DNA, 20 bp, Artificial Sequence
  Description of Artificial Sequence: Synthetic oligonucleotide
  Target: APOC3; (-) strand; PAM type: NRG; PAM sequence: TGG
ataattttttaggccgggcg

SEQ ID NO: 6027 - DNA, 20 bp, Artificial Sequence
  Description of Artificial Sequence: Synthetic oligonucleotide
  Target: APOC3; (-) strand; PAM type: NRG; PAM sequence: GGG
tgaaaataattttttaggcc

SEQ ID NO: 6028 - DNA, 20 bp, Artificial Sequence
  Description of Artificial Sequence: Synthetic oligonucleotide
  Target: APOC3; (-) strand; PAM type: NRG; PAM sequence: CGG
ttgaaaataattttttaggc

SEQ ID NO: 6029 - DNA, 20 bp, Artificial Sequence
  Description of Artificial Sequence: Synthetic oligonucleotide
  Target: APOC3; (-) strand; PAM type: NRG; PAM sequence: AGG
tggattgaaaataatttttt

SEQ ID NO: 6030 - DNA, 20 bp, Artificial Sequence
  Description of Artificial Sequence: Synthetic oligonucleotide
  Target: APOC3; (-) strand; PAM type: NRG; PAM sequence: TAG
ttggattgaaaataattttt

SEQ ID NO: 6031 - DNA, 20 bp, Artificial Sequence
  Description of Artificial Sequence: Synthetic oligonucleotide
  Target: APOC3; (-) strand; PAM type: NRG; PAM sequence: TGG
tccatggattcaaccaacct

SEQ ID NO: 6032 - DNA, 20 bp, Artificial Sequence
  Description of Artificial Sequence: Synthetic oligonucleotide
  Target: APOC3; (-) strand; PAM type: NRG; PAM sequence: TGG
atccttggtttctgtgtcca

SEQ ID NO: 6033 - DNA, 20 bp, Artificial Sequence
  Description of Artificial Sequence: Synthetic oligonucleotide
  Target: APOC3; (-) strand; PAM type: NRG; PAM sequence: TGG
taggcagccctctgtatcct

SEQ ID NO: 6034 - DNA, 20 bp, Artificial Sequence
  Description of Artificial Sequence: Synthetic oligonucleotide
  Target: APOC3; (-) strand; PAM type: NRG; PAM sequence: CAG
tgtgccaggagctctatagg

SEQ ID NO: 6035 - DNA, 20 bp, Artificial Sequence
  Description of Artificial Sequence: Synthetic oligonucleotide
  Target: APOC3; (-) strand; PAM type: NRG; PAM sequence: AGG
ctctgtgccaggagctctat

SEQ ID NO: 6036 - DNA, 20 bp, Artificial Sequence
  Description of Artificial Sequence: Synthetic oligonucleotide
  Target: APOC3; (-) strand; PAM type: NRG; PAM sequence: TAG
actctgtgccaggagctcta

SEQ ID NO: 6037 - DNA, 20 bp, Artificial Sequence
  Description of Artificial Sequence: Synthetic oligonucleotide
  Target: APOC3; (-) strand; PAM type: NRG; PAM sequence: GAG
cagagcttactctgtgccag

SEQ ID NO: 6038 - DNA, 20 bp, Artificial Sequence
  Description of Artificial Sequence: Synthetic oligonucleotide
  Target: APOC3; (-) strand; PAM type: NRG; PAM sequence: AGG
ttcagagcttactctgtgcc

SEQ ID NO: 6039 - DNA, 20 bp, Artificial Sequence
  Description of Artificial Sequence: Synthetic oligonucleotide
  Target: APOC3; (-) strand; PAM type: NRG; PAM sequence: CAG
tttcagagcttactctgtgc

SEQ ID NO: 6040 - DNA, 20 bp, Artificial Sequence
  Description of Artificial Sequence: Synthetic oligonucleotide
  Target: APOC3; (-) strand; PAM type: NRG; PAM sequence: GAG
ataacagcaactatttttca

SEQ ID NO: 6041 - DNA, 20 bp, Artificial Sequence
  Description of Artificial Sequence: Synthetic oligonucleotide
  Target: APOC3; (-) strand; PAM type: NRG; PAM sequence: CAG
taataacagcaactattttt

SEQ ID NO: 6042 - DNA, 20 bp, Artificial Sequence
  Description of Artificial Sequence: Synthetic oligonucleotide
  Target: APOC3; (-) strand; PAM type: NRG; PAM sequence: CAG
cagtatgattattataataa

SEQ ID NO: 6043 - DNA, 20 bp, Artificial Sequence
  Description of Artificial Sequence: Synthetic oligonucleotide
  Target: APOC3; (-) strand; PAM type: NRG; PAM sequence: CAG
aacacagtatgattattata

SEQ ID NO: 6044 - DNA, 20 bp, Artificial Sequence
  Description of Artificial Sequence: Synthetic oligonucleotide
  Target: APOC3; (-) strand; PAM type: NRG; PAM sequence: CAG
tttgctccaaatcaggaaca

SEQ ID NO: 6045 - DNA, 20 bp, Artificial Sequence
  Description of Artificial Sequence: Synthetic oligonucleotide
  Target: APOC3; (-) strand; PAM type: NRG; PAM sequence: AGG
tccctgctttgctccaaatc

SEQ ID NO: 6046 - DNA, 20 bp, Artificial Sequence
  Description of Artificial Sequence: Synthetic oligonucleotide
  Target: APOC3; (-) strand; PAM type: NRG; PAM sequence: CAG
ctccctgctttgctccaaat

SEQ ID NO: 6047 - DNA, 20 bp, Artificial Sequence
  Description of Artificial Sequence: Synthetic oligonucleotide
  Target: APOC3; (-) strand; PAM type: NRG; PAM sequence: GAG
gccactctcactagaggagg

SEQ ID NO: 6048 - DNA, 20 bp, Artificial Sequence
  Description of Artificial Sequence: Synthetic oligonucleotide
  Target: APOC3; (-) strand; PAM type: NRG; PAM sequence: GGG
ctgccactctcactagagga

SEQ ID NO: 6049 - DNA, 20 bp, Artificial Sequence
  Description of Artificial Sequence: Synthetic oligonucleotide
  Target: APOC3; (-) strand; PAM type: NRG; PAM sequence: AGG
tctgccactctcactagagg

SEQ ID NO: 6050 - DNA, 20 bp, Artificial Sequence
  Description of Artificial Sequence: Synthetic oligonucleotide
  Target: APOC3; (-) strand; PAM type: NRG; PAM sequence: GAG
ctctgccactctcactagag

SEQ ID NO: 6051 - DNA, 20 bp, Artificial Sequence
  Description of Artificial Sequence: Synthetic oligonucleotide
  Target: APOC3; (-) strand; PAM type: NRG; PAM sequence: AGG
cactctgccactctcactag

SEQ ID NO: 6052 - DNA, 20 bp, Artificial Sequence
  Description of Artificial Sequence: Synthetic oligonucleotide
  Target: APOC3; (-) strand; PAM type: NRG; PAM sequence: GAG
tcactctgccactctcacta

SEQ ID NO: 6053 - DNA, 20 bp, Artificial Sequence
  Description of Artificial Sequence: Synthetic oligonucleotide
  Target: APOC3; (-) strand; PAM type: NRG; PAM sequence: TAG
tctcactctgccactctcac

SEQ ID NO: 6054 - DNA, 20 bp, Artificial Sequence
  Description of Artificial Sequence: Synthetic oligonucleotide
  Target: APOC3; (-) strand; PAM type: NRG; PAM sequence: GAG
ctggcgcccctcagagggct

SEQ ID NO: 6055 - DNA, 20 bp, Artificial Sequence
  Description of Artificial Sequence: Synthetic oligonucleotide
  Target: APOC3; (-) strand; PAM type: NRG; PAM sequence: GGG
cccacctggcgcccctcaga

SEQ ID NO: 6056 - DNA, 20 bp, Artificial Sequence
  Description of Artificial Sequence: Synthetic oligonucleotide
  Target: APOC3; (-) strand; PAM type: NRG; PAM sequence: AGG
gcccacctggcgcccctcag

SEQ ID NO: 6057 - DNA, 20 bp, Artificial Sequence
  Description of Artificial Sequence: Synthetic oligonucleotide
  Target: APOC3; (-) strand; PAM type: NRG; PAM sequence: GAG
ggcccacctggcgcccctca

SEQ ID NO: 6058 - DNA, 20 bp, Artificial Sequence
  Description of Artificial Sequence: Synthetic oligonucleotide
  Target: APOC3; (-) strand; PAM type: NRG; PAM sequence: CAG
ctggcccacctggcgcccct

SEQ ID NO: 6059 - DNA, 20 bp, Artificial Sequence
  Description of Artificial Sequence: Synthetic oligonucleotide
  Target: APOC3; (-) strand; PAM type: NRG; PAM sequence: TGG
caccctgcctctggcccacc

SEQ ID NO: 6060 - DNA, 20 bp, Artificial Sequence
  Description of Artificial Sequence: Synthetic oligonucleotide
  Target: APOC3; (-) strand; PAM type: NRG; PAM sequence: TGG
cccacccatcaccctgcctc

SEQ ID NO: 6061 - DNA, 20 bp, Artificial Sequence
  Description of Artificial Sequence: Synthetic oligonucleotide
  Target: APOC3; (-) strand; PAM type: NRG; PAM sequence: TGG
gcaggagtcaggcctcaggc

SEQ ID NO: 6062 - DNA, 20 bp, Artificial Sequence
  Description of Artificial Sequence: Synthetic oligonucleotide
  Target: APOC3; (-) strand; PAM type: NRG; PAM sequence: AGG
aagggcaggagtcaggcctc

SEQ ID NO: 6063 - DNA, 20 bp, Artificial Sequence
  Description of Artificial Sequence: Synthetic oligonucleotide
  Target: APOC3; (-) strand; PAM type: NRG; PAM sequence: CAG
gaagggcaggagtcaggcct

SEQ ID NO: 6064 - DNA, 20 bp, Artificial Sequence
  Description of Artificial Sequence: Synthetic oligonucleotide
  Target: APOC3; (-) strand; PAM type: NRG; PAM sequence: AGG
gggcaagaagggcaggagtc

SEQ ID NO: 6065 - DNA, 20 bp, Artificial Sequence
  Description of Artificial Sequence: Synthetic oligonucleotide
  Target: APOC3; (-) strand; PAM type: NRG; PAM sequence: CAG
ggggcaagaagggcaggagt

SEQ ID NO: 6066 - DNA, 20 bp, Artificial Sequence
  Description of Artificial Sequence: Synthetic oligonucleotide
  Target: APOC3; (-) strand; PAM type: NRG; PAM sequence: GAG
ctggggggcaagaagggcag

SEQ ID NO: 6067 - DNA, 20 bp, Artificial Sequence
  Description of Artificial Sequence: Synthetic oligonucleotide
  Target: APOC3; (-) strand; PAM type: NRG; PAM sequence: AGG
ggctggggggcaagaagggc

SEQ ID NO: 6068 - DNA, 20 bp, Artificial Sequence
  Description of Artificial Sequence: Synthetic oligonucleotide
  Target: APOC3; (-) strand; PAM type: NRG; PAM sequence: CAG
tggctggggggcaagaaggg

SEQ ID NO: 6069 - DNA, 20 bp, Artificial Sequence
  Description of Artificial Sequence: Synthetic oligonucleotide
  Target: APOC3; (-) strand; PAM type: NRG; PAM sequence: GGG
gtgtggctggggggcaagaa

SEQ ID NO: 6070 - DNA, 20 bp, Artificial Sequence
  Description of Artificial Sequence: Synthetic oligonucleotide
  Target: APOC3; (-) strand; PAM type: NRG; PAM sequence: AGG
agtgtggctggggggcaaga

SEQ ID NO: 6071 - DNA, 20 bp, Artificial Sequence
  Description of Artificial Sequence: Synthetic oligonucleotide
  Target: APOC3; (-) strand; PAM type: NRG; PAM sequence: AAG
gagtgtggctggggggcaag

SEQ ID NO: 6072 - DNA, 20 bp, Artificial Sequence
  Description of Artificial Sequence: Synthetic oligonucleotide
  Target: APOC3; (-) strand; PAM type: NRG; PAM sequence: AAG
agggagtgtggctggggggc

SEQ ID NO: 6073 - DNA, 20 bp, Artificial Sequence
  Description of Artificial Sequence: Synthetic oligonucleotide
  Target: APOC3; (-) strand; PAM type: NRG; PAM sequence: GGG
gcccagggagtgtggctggg

SEQ ID NO: 6074 - DNA, 20 bp, Artificial Sequence
  Description of Artificial Sequence: Synthetic oligonucleotide
  Target: APOC3; (-) strand; PAM type: NRG; PAM sequence: GGG
tgcccagggagtgtggctgg

SEQ ID NO: 6075 - DNA, 20 bp, Artificial Sequence
  Description of Artificial Sequence: Synthetic oligonucleotide
  Target: APOC3; (-) strand; PAM type: NRG; PAM sequence: GGG
ctgcccagggagtgtggctg

SEQ ID NO: 6076 - DNA, 20 bp, Artificial Sequence
  Description of Artificial Sequence: Synthetic oligonucleotide
  Target: APOC3; (-) strand; PAM type: NRG; PAM sequence: GGG
cctgcccagggagtgtggct

SEQ ID NO: 6077 - DNA, 20 bp, Artificial Sequence
  Description of Artificial Sequence: Synthetic oligonucleotide
  Target: APOC3; (-) strand; PAM type: NRG; PAM sequence: TGG
tcctgcccagggagtgtggc

SEQ ID NO: 6078 - DNA, 20 bp, Artificial Sequence
  Description of Artificial Sequence: Synthetic oligonucleotide
  Target: APOC3; (-) strand; PAM type: NRG; PAM sequence: TGG
ctgctcctgcccagggagtg

SEQ ID NO: 6079 - DNA, 20 bp, Artificial Sequence
  Description of Artificial Sequence: Synthetic oligonucleotide
  Target: APOC3; (-) strand; PAM type: NRG; PAM sequence: GAG
gccagctgctcctgcccagg

SEQ ID NO: 6080 - DNA, 20 bp, Artificial Sequence
  Description of Artificial Sequence: Synthetic oligonucleotide
  Target: APOC3; (-) strand; PAM type: NRG; PAM sequence: GGG
aagccagctgctcctgccca

SEQ ID NO: 6081 - DNA, 20 bp, Artificial Sequence
  Description of Artificial Sequence: Synthetic oligonucleotide
  Target: APOC3; (-) strand; PAM type: NRG; PAM sequence: AGG
caagccagctgctcctgccc

SEQ ID NO: 6082 - DNA, 20 bp, Artificial Sequence
  Description of Artificial Sequence: Synthetic oligonucleotide
  Target: APOC3; (-) strand; PAM type: NRG; PAM sequence: CAG
tcaagccagctgctcctgcc

SEQ ID NO: 6083 - DNA, 20 bp, Artificial Sequence
  Description of Artificial Sequence: Synthetic oligonucleotide
  Target: APOC3; (-) strand; PAM type: NRG; PAM sequence: CAG
tcccaagattctgctcaagc

SEQ ID NO: 6084 - DNA, 20 bp, Artificial Sequence
  Description of Artificial Sequence: Synthetic oligonucleotide
  Target: APOC3; (-) strand; PAM type: NRG; PAM sequence: AAG
caggtcccaagattctgctc

SEQ ID NO: 6085 - DNA, 20 bp, Artificial Sequence
  Description of Artificial Sequence: Synthetic oligonucleotide
  Target: APOC3; (-) strand; PAM type: NRG; PAM sequence: AAG
ccctgagagcctcaggtccc

SEQ ID NO: 6086 - DNA, 20 bp, Artificial Sequence
  Description of Artificial Sequence: Synthetic oligonucleotide
  Target: APOC3; (-) strand; PAM type: NRG; PAM sequence: AGG
ggaggtcccctgagagcctc

SEQ ID NO: 6087 - DNA, 20 bp, Artificial Sequence
  Description of Artificial Sequence: Synthetic oligonucleotide
  Target: APOC3; (-) strand; PAM type: NRG; PAM sequence: CAG
gggaggtcccctgagagcct

SEQ ID NO: 6088 - DNA, 20 bp, Artificial Sequence
  Description of Artificial Sequence: Synthetic oligonucleotide
  Target: APOC3; (-) strand; PAM type: NRG; PAM sequence: GAG
cccaatgggaggtcccctga

SEQ ID NO: 6089 - DNA, 20 bp, Artificial Sequence
  Description of Artificial Sequence: Synthetic oligonucleotide
  Target: APOC3; (-) strand; PAM type: NRG; PAM sequence: GAG
cccccaatgggaggtcccct

SEQ ID NO: 6090 - DNA, 20 bp, Artificial Sequence
  Description of Artificial Sequence: Synthetic oligonucleotide
  Target: APOC3; (-) strand; PAM type: NRG; PAM sequence: AGG
gccctccatcccccaatggg

SEQ ID NO: 6091 - DNA, 20 bp, Artificial Sequence
  Description of Artificial Sequence: Synthetic oligonucleotide
  Target: APOC3; (-) strand; PAM type: NRG; PAM sequence: GAG
tgccctccatcccccaatgg

SEQ ID NO: 6092 - DNA, 20 bp, Artificial Sequence
  Description of Artificial Sequence: Synthetic oligonucleotide
  Target: APOC3; (-) strand; PAM type: NRG; PAM sequence: GGG
attgccctccatcccccaat

SEQ ID NO: 6093 - DNA, 20 bp, Artificial Sequence
  Description of Artificial Sequence: Synthetic oligonucleotide
  Target: APOC3; (-) strand; PAM type: NRG; PAM sequence: TGG
cattgccctccatcccccaa

SEQ ID NO: 6094 - DNA, 20 bp, Artificial Sequence
  Description of Artificial Sequence: Synthetic oligonucleotide
  Target: APOC3; (-) strand; PAM type: NRG; PAM sequence: GGG
atctaagtagaagacctcct

SEQ ID NO: 6095 - DNA, 20 bp, Artificial Sequence
  Description of Artificial Sequence: Synthetic oligonucleotide
  Target: APOC3; (-) strand; PAM type: NRG; PAM sequence: TGG
catctaagtagaagacctcc

SEQ ID NO: 6096 - DNA, 20 bp, Artificial Sequence
  Description of Artificial Sequence: Synthetic oligonucleotide
  Target: APOC3; (-) strand; PAM type: NRG; PAM sequence: AAG
tccaatagacatctaagtag

SEQ ID NO: 6097 - DNA, 20 bp, Artificial Sequence
  Description of Artificial Sequence: Synthetic oligonucleotide
  Target: APOC3; (-) strand; PAM type: NRG; PAM sequence: TAG
agatccaatagacatctaag

SEQ ID NO: 6098 - DNA, 20 bp, Artificial Sequence
  Description of Artificial Sequence: Synthetic oligonucleotide
  Target: APOC3; (-) strand; PAM type: NRG; PAM sequence: AAG
tagagatccaatagacatct

SEQ ID NO: 6099 - DNA, 20 bp, Artificial Sequence
  Description of Artificial Sequence: Synthetic oligonucleotide
  Target: APOC3; (-) strand; PAM type: NRG; PAM sequence: TAG
agcctcatttagagatccaa

SEQ ID NO: 6100 - DNA, 20 bp, Artificial Sequence
  Description of Artificial Sequence: Synthetic oligonucleotide
  Target: APOC3; (-) strand; PAM type: NRG; PAM sequence: GAG
tatgcatgcagcctcattta

SEQ ID NO: 6101 - DNA, 20 bp, Artificial Sequence
  Description of Artificial Sequence: Synthetic oligonucleotide
  Target: APOC3; (-) strand; PAM type: NRG; PAM sequence: TAG
attatgcatgcagcctcatt

SEQ ID NO: 6102 - DNA, 20 bp, Artificial Sequence
  Description of Artificial Sequence: Synthetic oligonucleotide
  Target: APOC3; (-) strand; PAM type: NRG; PAM sequence: CAG
tttgtgtgtgattatgcatg

SEQ ID NO: 6103 - DNA, 20 bp, Artificial Sequence
  Description of Artificial Sequence: Synthetic oligonucleotide
  Target: APOC3; (-) strand; PAM type: NRG; PAM sequence: TGG
gtggtgtgtcaccttctcag

SEQ ID NO: 6104 - DNA, 20 bp, Artificial Sequence
  Description of Artificial Sequence: Synthetic oligonucleotide
  Target: APOC3; (-) strand; PAM type: NRG; PAM sequence: CAG
gacgtggtgtgtcaccttct

SEQ ID NO: 6105 - DNA, 20 bp, Artificial Sequence
  Description of Artificial Sequence: Synthetic oligonucleotide
  Target: APOC3; (-) strand; PAM type: NRG; PAM sequence: TGG
cagagggacccatgctgacg

SEQ ID NO: 6106 - DNA, 20 bp, Artificial Sequence
  Description of Artificial Sequence: Synthetic oligonucleotide
  Target: APOC3; (-) strand; PAM type: NRG; PAM sequence: GGG
gagtggtgtggtccggcaga

SEQ ID NO: 6107 - DNA, 20 bp, Artificial Sequence
  Description of Artificial Sequence: Synthetic oligonucleotide
  Target: APOC3; (-) strand; PAM type: NRG; PAM sequence: AGG
ggagtggtgtggtccggcag

SEQ ID NO: 6108 - DNA, 20 bp, Artificial Sequence
  Description of Artificial Sequence: Synthetic oligonucleotide
  Target: APOC3; (-) strand; PAM type: NRG; PAM sequence: GAG
aggagtggtgtggtccggca

SEQ ID NO: 6109 - DNA, 20 bp, Artificial Sequence
  Description of Artificial Sequence: Synthetic oligonucleotide
  Target: APOC3; (-) strand; PAM type: NRG; PAM sequence: CAG
ctaggagtggtgtggtccgg

SEQ ID NO: 6110 - DNA, 20 bp, Artificial Sequence
  Description of Artificial Sequence: Synthetic oligonucleotide
  Target: APOC3; (-) strand; PAM type: NRG; PAM sequence: CGG
tcactaggagtggtgtggtc

SEQ ID NO: 6111 - DNA, 20 bp, Artificial Sequence
  Description of Artificial Sequence: Synthetic oligonucleotide
  Target: APOC3; (-) strand; PAM type: NRG; PAM sequence: TGG
catagtcactaggagtggtg

SEQ ID NO: 6112 - DNA, 20 bp, Artificial Sequence
  Description of Artificial Sequence: Synthetic oligonucleotide
  Target: APOC3; (-) strand; PAM type: NRG; PAM sequence: TGG
cacctcatagtcactaggag

SEQ ID NO: 6113 - DNA, 20 bp, Artificial Sequence
  Description of Artificial Sequence: Synthetic oligonucleotide
  Target: APOC3; (-) strand; PAM type: NRG; PAM sequence: GAG
tgtcacctcatagtcactag

SEQ ID NO: 6114 - DNA, 20 bp, Artificial Sequence
  Description of Artificial Sequence: Synthetic oligonucleotide
  Target: APOC3; (-) strand; PAM type: NRG; PAM sequence: AGG
gatgtcacctcatagtcact

SEQ ID NO: 6115 - DNA, 20 bp, Artificial Sequence
  Description of Artificial Sequence: Synthetic oligonucleotide
  Target: APOC3; (-) strand; PAM type: NRG; PAM sequence: TAG
ggatgtcacctcatagtcac

SEQ ID NO: 6116 - DNA, 20 bp, Artificial Sequence
  Description of Artificial Sequence: Synthetic oligonucleotide
  Target: APOC3; (-) strand; PAM type: NRG; PAM sequence: TAG
cgtgcctggatgtcacctca

SEQ ID NO: 6117 - DNA, 20 bp, Artificial Sequence
  Description of Artificial Sequence: Synthetic oligonucleotide
  Target: APOC3; (-) strand; PAM type: NRG; PAM sequence: TGG
agccaatagtgcaacgtgcc

SEQ ID NO: 6118 - DNA, 20 bp, Artificial Sequence
  Description of Artificial Sequence: Synthetic oligonucleotide
  Target: APOC3; (-) strand; PAM type: NRG; PAM sequence: TAG
cactcaccgacaggagccaa

SEQ ID NO: 6119 - DNA, 20 bp, Artificial Sequence
  Description of Artificial Sequence: Synthetic oligonucleotide
  Target: APOC3; (-) strand; PAM type: NRG; PAM sequence: GAG
ggcactgcactcaccgacag

SEQ ID NO: 6120 - DNA, 20 bp, Artificial Sequence
  Description of Artificial Sequence: Synthetic oligonucleotide
  Target: APOC3; (-) strand; PAM type: NRG; PAM sequence: AGG
caggcactgcactcaccgac

SEQ ID NO: 6121 - DNA, 20 bp, Artificial Sequence
  Description of Artificial Sequence: Synthetic oligonucleotide
  Target: APOC3; (-) strand; PAM type: NRG; PAM sequence: CAG
tcaggcactgcactcaccga

SEQ ID NO: 6122 - DNA, 20 bp, Artificial Sequence
  Description of Artificial Sequence: Synthetic oligonucleotide
  Target: APOC3; (-) strand; PAM type: NRG; PAM sequence: AGG
aaatgtagctcactgttgtc

SEQ ID NO: 6123 - DNA, 20 bp, Artificial Sequence
  Description of Artificial Sequence: Synthetic oligonucleotide
  Target: APOC3; (-) strand; PAM type: NRG; PAM sequence: CAG
taaatgtagctcactgttgt

SEQ ID NO: 6124 - DNA, 20 bp, Artificial Sequence
  Description of Artificial Sequence: Synthetic oligonucleotide
  Target: APOC3; (-) strand; PAM type: NRG; PAM sequence: TAG
ttcatttttacaaataaatg

SEQ ID NO: 6125 - DNA, 20 bp, Artificial Sequence
  Description of Artificial Sequence: Synthetic oligonucleotide
  Target: APOC3; (-) strand; PAM type: NRG; PAM sequence: TGG
acaattgtggtctactctga

SEQ ID NO: 6126 - DNA, 20 bp, Artificial Sequence
  Description of Artificial Sequence: Synthetic oligonucleotide
  Target: APOC3; (-) strand; PAM type: NRG; PAM sequence: TGG
aattagagttagtacaattg

SEQ ID NO: 6127 - DNA, 20 bp, Artificial Sequence
  Description of Artificial Sequence: Synthetic oligonucleotide
  Target: APOC3; (-) strand; PAM type: NRG; PAM sequence: TAG
aacacaaagcaaattagagt

SEQ ID NO: 6128 - DNA, 20 bp, Artificial Sequence
  Description of Artificial Sequence: Synthetic oligonucleotide
  Target: APOC3; (-) strand; PAM type: NRG; PAM sequence: GAG
aatgaacacaaagcaaatta

SEQ ID NO: 6129 - DNA, 20 bp, Artificial Sequence
  Description of Artificial Sequence: Synthetic oligonucleotide
  Target: APOC3; (-) strand; PAM type: NRG; PAM sequence: TAG
aaaatgaacacaaagcaaat

SEQ ID NO: 6130 - DNA, 20 bp, Artificial Sequence
  Description of Artificial Sequence: Synthetic oligonucleotide
  Target: APOC3; (-) strand; PAM type: NRG; PAM sequence: AAG
aaactgaaaaaatgaacaca

SEQ ID NO: 6131 - DNA, 20 bp, Artificial Sequence
  Description of Artificial Sequence: Synthetic oligonucleotide
  Target: APOC3; (-) strand; PAM type: NRG; PAM sequence: TGG
aggaaacattaagccacttc

SEQ ID NO: 6132 - DNA, 20 bp, Artificial Sequence
  Description of Artificial Sequence: Synthetic oligonucleotide
  Target: APOC3; (-) strand; PAM type: NRG; PAM sequence: AAG
ctttgaccctaggaaacatt

SEQ ID NO: 6133 - DNA, 20 bp, Artificial Sequence
  Description of Artificial Sequence: Synthetic oligonucleotide
  Target: APOC3; (-) strand; PAM type: NRG; PAM sequence: AGG
atttgactgcctttgaccct

SEQ ID NO: 6134 - DNA, 20 bp, Artificial Sequence
  Description of Artificial Sequence: Synthetic oligonucleotide
  Target: APOC3; (-) strand; PAM type: NRG; PAM sequence: TAG
catttgactgcctttgaccc

SEQ ID NO: 6135 - DNA, 20 bp, Artificial Sequence
  Description of Artificial Sequence: Synthetic oligonucleotide
  Target: APOC3; (-) strand; PAM type: NRG; PAM sequence: AGG
gaaggggtgccagagtcagg

SEQ ID NO: 6136 - DNA, 20 bp, Artificial Sequence
  Description of Artificial Sequence: Synthetic oligonucleotide
  Target: APOC3; (-) strand; PAM type: NRG; PAM sequence: GAG
agaaggggtgccagagtcag

SEQ ID NO: 6137 - DNA, 20 bp, Artificial Sequence
  Description of Artificial Sequence: Synthetic oligonucleotide
  Target: APOC3; (-) strand; PAM type: NRG; PAM sequence: AGG
gcagaaggggtgccagagtc

SEQ ID NO: 6138 - DNA, 20 bp, Artificial Sequence
  Description of Artificial Sequence: Synthetic oligonucleotide
  Target: APOC3; (-) strand; PAM type: NRG; PAM sequence: CAG
agcagaaggggtgccagagt

SEQ ID NO: 6139 - DNA, 20 bp, Artificial Sequence
  Description of Artificial Sequence: Synthetic oligonucleotide
  Target: APOC3; (-) strand; PAM type: NRG; PAM sequence: GAG
acccagcagaaggggtgcca

SEQ ID NO: 6140 - DNA, 20 bp, Artificial Sequence
  Description of Artificial Sequence: Synthetic oligonucleotide
  Target: APOC3; (-) strand; PAM type: NRG; PAM sequence: CAG
ggacccagcagaaggggtgc

SEQ ID NO: 6141 - DNA, 20 bp, Artificial Sequence
  Description of Artificial Sequence: Synthetic oligonucleotide
  Target: APOC3; (-) strand; PAM type: NRG; PAM sequence: GGG
cagtggggacccagcagaag

SEQ ID NO: 6142 - DNA, 20 bp, Artificial Sequence
  Description of Artificial Sequence: Synthetic oligonucleotide
  Target: APOC3; (-) strand; PAM type: NRG; PAM sequence: GGG
gcagtggggacccagcagaa

SEQ ID NO: 6143 - DNA, 20 bp, Artificial Sequence
  Description of Artificial Sequence: Synthetic oligonucleotide
  Target: APOC3; (-) strand; PAM type: NRG; PAM sequence: AGG
ggcagtggggacccagcaga

SEQ ID NO: 6144 - DNA, 20 bp, Artificial Sequence
  Description of Artificial Sequence: Synthetic oligonucleotide
  Target: APOC3; (-) strand; PAM type: NRG; PAM sequence: AAG
gggcagtggggacccagcag

SEQ ID NO: 6145 - DNA, 20 bp, Artificial Sequence
  Description of Artificial Sequence: Synthetic oligonucleotide
  Target: APOC3; (-) strand; PAM type: NRG; PAM sequence: CAG
acagggcagtggggacccag

SEQ ID NO: 6146 - DNA, 20 bp, Artificial Sequence
  Description of Artificial Sequence: Synthetic oligonucleotide
  Target: APOC3; (-) strand; PAM type: NRG; PAM sequence: CAG
actacagggcagtggggacc

SEQ ID NO: 6147 - DNA, 20 bp, Artificial Sequence
  Description of Artificial Sequence: Synthetic oligonucleotide
  Target: APOC3; (-) strand; PAM type: NRG; PAM sequence: GGG
gggaccactacagggcagtg

SEQ ID NO: 6148 - DNA, 20 bp, Artificial Sequence
  Description of Artificial Sequence: Synthetic oligonucleotide
  Target: APOC3; (-) strand; PAM type: NRG; PAM sequence: GGG
ggggaccactacagggcagt

SEQ ID NO: 6149 - DNA, 20 bp, Artificial Sequence
  Description of Artificial Sequence: Synthetic oligonucleotide
  Target: APOC3; (-) strand; PAM type: NRG; PAM sequence: TGG
tggggaccactacagggcag

SEQ ID NO: 6150 - DNA, 20 bp, Artificial Sequence
  Description of Artificial Sequence: Synthetic oligonucleotide
  Target: APOC3; (-) strand; PAM type: NRG; PAM sequence: CAG
gcgtggggaccactacaggg

SEQ ID NO: 6151 - DNA, 20 bp, Artificial Sequence
  Description of Artificial Sequence: Synthetic oligonucleotide
  Target: APOC3; (-) strand; PAM type: NRG; PAM sequence: GGG
gtagcgtggggaccactaca

SEQ ID NO: 6152 - DNA, 20 bp, Artificial Sequence
  Description of Artificial Sequence: Synthetic oligonucleotide
  Target: APOC3; (-) strand; PAM type: NRG; PAM sequence: AGG
ggtagcgtggggaccactac

SEQ ID NO: 6153 - DNA, 20 bp, Artificial Sequence
  Description of Artificial Sequence: Synthetic oligonucleotide
  Target: APOC3; (-) strand; PAM type: NRG; PAM sequence: CAG
tggtagcgtggggaccacta

SEQ ID NO: 6154 - DNA, 20 bp, Artificial Sequence
  Description of Artificial Sequence: Synthetic oligonucleotide
  Target: APOC3; (-) strand; PAM type: NRG; PAM sequence: GGG
ggaggcagcatggtagcgtg

SEQ ID NO: 6155 - DNA, 20 bp, Artificial Sequence
  Description of Artificial Sequence: Synthetic oligonucleotide
  Target: APOC3; (-) strand; PAM type: NRG; PAM sequence: GGG
aggaggcagcatggtagcgt

SEQ ID NO: 6156 - DNA, 20 bp, Artificial Sequence
  Description of Artificial Sequence: Synthetic oligonucleotide
  Target: APOC3; (-) strand; PAM type: NRG; PAM sequence: TGG
aaggaggcagcatggtagcg

SEQ ID NO: 6157 - DNA, 20 bp, Artificial Sequence
  Description of Artificial Sequence: Synthetic oligonucleotide
  Target: APOC3; (-) strand; PAM type: NRG; PAM sequence: TAG
tcaaaaaggaggcagcatgg

SEQ ID NO: 6158 - DNA, 20 bp, Artificial Sequence
  Description of Artificial Sequence: Synthetic oligonucleotide
  Target: APOC3; (-) strand; PAM type: NRG; PAM sequence: TGG
gcatcaaaaaggaggcagca

SEQ ID NO: 6159 - DNA, 20 bp, Artificial Sequence
  Description of Artificial Sequence: Synthetic oligonucleotide
  Target: APOC3; (-) strand; PAM type: NRG; PAM sequence: CAG
aggctgcatcaaaaaggagg

SEQ ID NO: 6160 - DNA, 20 bp, Artificial Sequence
  Description of Artificial Sequence: Synthetic oligonucleotide
  Target: APOC3; (-) strand; PAM type: NRG; PAM sequence: AGG
cacaggctgcatcaaaaagg

SEQ ID NO: 6161 - DNA, 20 bp, Artificial Sequence
  Description of Artificial Sequence: Synthetic oligonucleotide
  Target: APOC3; (-) strand; PAM type: NRG; PAM sequence: GAG
gcacaggctgcatcaaaaag

SEQ ID NO: 6162 - DNA, 20 bp, Artificial Sequence
  Description of Artificial Sequence: Synthetic oligonucleotide
  Target: APOC3; (-) strand; PAM type: NRG; PAM sequence: AGG
tggcacaggctgcatcaaaa

SEQ ID NO: 6163 - DNA, 20 bp, Artificial Sequence
  Description of Artificial Sequence: Synthetic oligonucleotide
  Target: APOC3; (-) strand; PAM type: NRG; PAM sequence: AAG
atggcacaggctgcatcaaa

SEQ ID NO: 6164 - DNA, 20 bp, Artificial Sequence
  Description of Artificial Sequence: Synthetic oligonucleotide
  Target: APOC3; (-) strand; PAM type: NRG; PAM sequence: AGG
caatcacggagagatggcac

SEQ ID NO: 6165 - DNA, 20 bp, Artificial Sequence
  Description of Artificial Sequence: Synthetic oligonucleotide
  Target: APOC3; (-) strand; PAM type: NRG; PAM sequence: CAG
acaatcacggagagatggca

SEQ ID NO: 6166 - DNA, 20 bp, Artificial Sequence
  Description of Artificial Sequence: Synthetic oligonucleotide
  Target: APOC3; (-) strand; PAM type: NRG; PAM sequence: TGG
ccccaacaatcacggagaga

SEQ ID NO: 6167 - DNA, 20 bp, Artificial Sequence
  Description of Artificial Sequence: Synthetic oligonucleotide
  Target: APOC3; (-) strand; PAM type: NRG; PAM sequence: GAG
ctgaccccaacaatcacgga

SEQ ID NO: 6168 - DNA, 20 bp, Artificial Sequence
  Description of Artificial Sequence: Synthetic oligonucleotide
  Target: APOC3; (-) strand; PAM type: NRG; PAM sequence: GAG
atctgaccccaacaatcacg

SEQ ID NO: 6169 - DNA, 20 bp, Artificial Sequence
  Description of Artificial Sequence: Synthetic oligonucleotide
  Target: APOC3; (-) strand; PAM type: NRG; PAM sequence: CGG
gcatctgaccccaacaatca

SEQ ID NO: 6170 - DNA, 20 bp, Artificial Sequence
  Description of Artificial Sequence: Synthetic oligonucleotide
  Target: APOC3; (-) strand; PAM type: NRG; PAM sequence: CAG
ccaagccagggagtggactc

SEQ ID NO: 6171 - DNA, 20 bp, Artificial Sequence
  Description of Artificial Sequence: Synthetic oligonucleotide
  Target: APOC3; (-) strand; PAM type: NRG; PAM sequence: TGG
ctggatgccaagccagggag

SEQ ID NO: 6172 - DNA, 20 bp, Artificial Sequence
  Description of Artificial Sequence: Synthetic oligonucleotide
  Target: APOC3; (-) strand; PAM type: NRG; PAM sequence: GAG
agcctggatgccaagccagg

SEQ ID NO: 6173 - DNA, 20 bp, Artificial Sequence
  Description of Artificial Sequence: Synthetic oligonucleotide
  Target: APOC3; (-) strand; PAM type: NRG; PAM sequence: GGG
ggagcctggatgccaagcca

SEQ ID NO: 6174 - DNA, 20 bp, Artificial Sequence
  Description of Artificial Sequence: Synthetic oligonucleotide
  Target: APOC3; (-) strand; PAM type: NRG; PAM sequence: AGG
tggagcctggatgccaagcc

SEQ ID NO: 6175 - DNA, 20 bp, Artificial Sequence
  Description of Artificial Sequence: Synthetic oligonucleotide
  Target: APOC3; (-) strand; PAM type: NRG; PAM sequence: CAG
ttggagcctggatgccaagc

SEQ ID NO: 6176 - DNA, 20 bp, Artificial Sequence
  Description of Artificial Sequence: Synthetic oligonucleotide
  Target: APOC3; (-) strand; PAM type: NRG; PAM sequence: AAG
cgtgttggagcctggatgcc

SEQ ID NO: 6177 - DNA, 20 bp, Artificial Sequence
  Description of Artificial Sequence: Synthetic oligonucleotide
  Target: APOC3; (-) strand; PAM type: NRG; PAM sequence: TGG
aggcagtacgtgttggagcc

SEQ ID NO: 6178 - DNA, 20 bp, Artificial Sequence
  Description of Artificial Sequence: Synthetic oligonucleotide
  Target: APOC3; (-) strand; PAM type: NRG; PAM sequence: GAG
cacacaggcagtacgtgttg

SEQ ID NO: 6179 - DNA, 20 bp, Artificial Sequence
  Description of Artificial Sequence: Synthetic oligonucleotide
  Target: APOC3; (-) strand; PAM type: NRG; PAM sequence: TGG
gacacacaggcagtacgtgt

SEQ ID NO: 6180 - DNA, 20 bp, Artificial Sequence
  Description of Artificial Sequence: Synthetic oligonucleotide
  Target: APOC3; (-) strand; PAM type: NRG; PAM sequence: CAG
cttgcccaaggacacacagg

SEQ ID NO: 6181 - DNA, 20 bp, Artificial Sequence
  Description of Artificial Sequence: Synthetic oligonucleotide
  Target: APOC3; (-) strand; PAM type: NRG; PAM sequence: AGG
agacttgcccaaggacacac

SEQ ID NO: 6182 - DNA, 20 bp, Artificial Sequence
  Description of Artificial Sequence: Synthetic oligonucleotide
  Target: APOC3; (-) strand; PAM type: NRG; PAM sequence: CAG
gagacttgcccaaggacaca

SEQ ID NO: 6183 - DNA, 20 bp, Artificial Sequence
  Description of Artificial Sequence: Synthetic oligonucleotide
  Target: APOC3; (-) strand; PAM type: NRG; PAM sequence: AGG
gaggttatgagacttgccca

SEQ ID NO: 6184 - DNA, 20 bp, Artificial Sequence
  Description of Artificial Sequence: Synthetic oligonucleotide
  Target: APOC3; (-) strand; PAM type: NRG; PAM sequence: AAG
agaggttatgagacttgccc

SEQ ID NO: 6185 - DNA, 20 bp, Artificial Sequence
  Description of Artificial Sequence: Synthetic oligonucleotide
  Target: APOC3; (-) strand; PAM type: NRG; PAM sequence: GAG
ctgaggctcagagaggttat

SEQ ID NO: 6186 - DNA, 20 bp, Artificial Sequence
  Description of Artificial Sequence: Synthetic oligonucleotide
  Target: APOC3; (-) strand; PAM type: NRG; PAM sequence: AGG
aaggtaactgaggctcagag

SEQ ID NO: 6187 - DNA, 20 bp, Artificial Sequence
  Description of Artificial Sequence: Synthetic oligonucleotide
  Target: APOC3; (-) strand; PAM type: NRG; PAM sequence: GAG
caaggtaactgaggctcaga

SEQ ID NO: 6188 - DNA, 20 bp, Artificial Sequence
  Description of Artificial Sequence: Synthetic oligonucleotide
  Target: APOC3; (-) strand; PAM type: NRG; PAM sequence: GAG
accaaggtaactgaggctca

SEQ ID NO: 6189 - DNA, 20 bp, Artificial Sequence
  Description of Artificial Sequence: Synthetic oligonucleotide
  Target: APOC3; (-) strand; PAM type: NRG; PAM sequence: CAG
tcaccaaggtaactgaggct

SEQ ID NO: 6190 - DNA, 20 bp, Artificial Sequence
  Description of Artificial Sequence: Synthetic oligonucleotide
  Target: APOC3; (-) strand; PAM type: NRG; PAM sequence: AGG
atgtctcaccaaggtaactg

SEQ ID NO: 6191 - DNA, 20 bp, Artificial Sequence
  Description of Artificial Sequence: Synthetic oligonucleotide
  Target: APOC3; (-) strand; PAM type: NRG; PAM sequence: GAG
tatgtctcaccaaggtaact

SEQ ID NO: 6192 - DNA, 20 bp, Artificial Sequence
  Description of Artificial Sequence: Synthetic oligonucleotide
  Target: APOC3; (-) strand; PAM type: NRG; PAM sequence: AGG
acaatggttatgtctcacca

SEQ ID NO: 6193 - DNA, 20 bp, Artificial Sequence
  Description of Artificial Sequence: Synthetic oligonucleotide
  Target: APOC3; (-) strand; PAM type: NRG; PAM sequence: AAG
tacaatggttatgtctcacc

SEQ ID NO: 6194 - DNA, 20 bp, Artificial Sequence
  Description of Artificial Sequence: Synthetic oligonucleotide
  Target: APOC3; (-) strand; PAM type: NRG; PAM sequence: TGG
agcctaggaggcaggtacaa

SEQ ID NO: 6195 - DNA, 20 bp, Artificial Sequence
  Description of Artificial Sequence: Synthetic oligonucleotide
  Target: APOC3; (-) strand; PAM type: NRG; PAM sequence: AGG
atcctcacagcctaggaggc

SEQ ID NO: 6196 - DNA, 20 bp, Artificial Sequence
  Description of Artificial Sequence: Synthetic oligonucleotide
  Target: APOC3; (-) strand; PAM type: NRG; PAM sequence: CAG
aatcctcacagcctaggagg

SEQ ID NO: 6197 - DNA, 20 bp, Artificial Sequence
  Description of Artificial Sequence: Synthetic oligonucleotide
  Target: APOC3; (-) strand; PAM type: NRG; PAM sequence: AGG
gtgaatcctcacagcctagg

SEQ ID NO: 6198 - DNA, 20 bp, Artificial Sequence
  Description of Artificial Sequence: Synthetic oligonucleotide
  Target: APOC3; (-) strand; PAM type: NRG; PAM sequence: GAG
agtgaatcctcacagcctag

SEQ ID NO: 6199 - DNA, 20 bp, Artificial Sequence
  Description of Artificial Sequence: Synthetic oligonucleotide
  Target: APOC3; (-) strand; PAM type: NRG; PAM sequence: AGG
tcagtgaatcctcacagcct

SEQ ID NO: 6200 - DNA, 20 bp, Artificial Sequence
  Description of Artificial Sequence: Synthetic oligonucleotide
  Target: APOC3; (-) strand; PAM type: NRG; PAM sequence: TAG
ctcagtgaatcctcacagcc

SEQ ID NO: 6201 - DNA, 20 bp, Artificial Sequence
  Description of Artificial Sequence: Synthetic oligonucleotide
  Target: APOC3; (-) strand; PAM type: NRG; PAM sequence: CAG
atcatctcagtgaatcctca

SEQ ID NO: 6202 - DNA, 20 bp, Artificial Sequence
  Description of Artificial Sequence: Synthetic oligonucleotide
  Target: APOC3; (-) strand; PAM type: NRG; PAM sequence: CAG
caagcactataagatcatct

SEQ ID NO: 6203 - DNA, 20 bp, Artificial Sequence
  Description of Artificial Sequence: Synthetic oligonucleotide
  Target: APOC3; (-) strand; PAM type: NRG; PAM sequence: AAG
gacattgttgcaagcactat

SEQ ID NO: 6204 - DNA, 20 bp, Artificial Sequence
  Description of Artificial Sequence: Synthetic oligonucleotide
  Target: APOC3; (-) strand; PAM type: NRG; PAM sequence: AAG
tatgtgccagacattgttgc

SEQ ID NO: 6205 - DNA, 20 bp, Artificial Sequence
  Description of Artificial Sequence: Synthetic oligonucleotide
  Target: APOC3; (-) strand; PAM type: NRG; PAM sequence: CAG
tgatcacttttcctatgtgc

SEQ ID NO: 6206 - DNA, 20 bp, Artificial Sequence
  Description of Artificial Sequence: Synthetic oligonucleotide
  Target: APOC3; (-) strand; PAM type: NRG; PAM sequence: TAG
agtaagacgtggctaacatt

SEQ ID NO: 6207 - DNA, 20 bp, Artificial Sequence
  Description of Artificial Sequence: Synthetic oligonucleotide
  Target: APOC3; (-) strand; PAM type: NRG; PAM sequence: TGG
agccttgcaggagtaagacg

SEQ ID NO: 6208 - DNA, 20 bp, Artificial Sequence
  Description of Artificial Sequence: Synthetic oligonucleotide
  Target: APOC3; (-) strand; PAM type: NRG; PAM sequence: AAG
gaggtgagccttgcaggagt

SEQ ID NO: 6209 - DNA, 20 bp, Artificial Sequence
  Description of Artificial Sequence: Synthetic oligonucleotide
  Target: APOC3; (-) strand; PAM type: NRG; PAM sequence: GAG
cagggaggtgagccttgcag

SEQ ID NO: 6210 - DNA, 20 bp, Artificial Sequence
  Description of Artificial Sequence: Synthetic oligonucleotide
  Target: APOC3; (-) strand; PAM type: NRG; PAM sequence: AGG
tccagggaggtgagccttgc

SEQ ID NO: 6211 - DNA, 20 bp, Artificial Sequence
  Description of Artificial Sequence: Synthetic oligonucleotide
  Target: APOC3; (-) strand; PAM type: NRG; PAM sequence: CAG
ttccagggaggtgagccttg

SEQ ID NO: 6212 - DNA, 20 bp, Artificial Sequence
  Description of Artificial Sequence: Synthetic oligonucleotide
  Target: APOC3; (-) strand; PAM type: NRG; PAM sequence: GAG
ccgatgggttccagggaggt

SEQ ID NO: 6213 - DNA, 20 bp, Artificial Sequence
  Description of Artificial Sequence: Synthetic oligonucleotide
  Target: APOC3; (-) strand; PAM type: NRG; PAM sequence: AGG
gggaccgatgggttccaggg

SEQ ID NO: 6214 - DNA, 20 bp, Artificial Sequence
  Description of Artificial Sequence: Synthetic oligonucleotide
  Target: APOC3; (-) strand; PAM type: NRG; PAM sequence: GAG
tgggaccgatgggttccagg

SEQ ID NO: 6215 - DNA, 20 bp, Artificial Sequence
  Description of Artificial Sequence: Synthetic oligonucleotide
  Target: APOC3; (-) strand; PAM type: NRG; PAM sequence: GGG
gttgggaccgatgggttcca

SEQ ID NO: 6216 - DNA, 20 bp, Artificial Sequence
  Description of Artificial Sequence: Synthetic oligonucleotide
  Target: APOC3; (-) strand; PAM type: NRG; PAM sequence: AGG
ggttgggaccgatgggttcc

SEQ ID NO: 6217 - DNA, 20 bp, Artificial Sequence
  Description of Artificial Sequence: Synthetic oligonucleotide
  Target: APOC3; (-) strand; PAM type: NRG; PAM sequence: CAG
gggttgggaccgatgggttc

SEQ ID NO: 6218 - DNA, 20 bp, Artificial Sequence
  Description of Artificial Sequence: Synthetic oligonucleotide
  Target: APOC3; (-) strand; PAM type: NRG; PAM sequence: GGG
ggagcagggttgggaccgat

SEQ ID NO: 6219 - DNA, 20 bp, Artificial Sequence
  Description of Artificial Sequence: Synthetic oligonucleotide
  Target: APOC3; (-) strand; PAM type: NRG; PAM sequence: TGG
aggagcagggttgggaccga

SEQ ID NO: 6220 - DNA, 20 bp, Artificial Sequence
  Description of Artificial Sequence: Synthetic oligonucleotide
  Target: APOC3; (-) strand; PAM type: NRG; PAM sequence: GGG
cctgattcaggagcagggtt

SEQ ID NO: 6221 - DNA, 20 bp, Artificial Sequence
  Description of Artificial Sequence: Synthetic oligonucleotide
  Target: APOC3; (-) strand; PAM type: NRG; PAM sequence: TGG
gcctgattcaggagcagggt

SEQ ID NO: 6222 - DNA, 20 bp, Artificial Sequence
  Description of Artificial Sequence: Synthetic oligonucleotide
  Target: APOC3; (-) strand; PAM type: NRG; PAM sequence: GGG
ctgtgcctgattcaggagca

SEQ ID NO: 6223 - DNA, 20 bp, Artificial Sequence
  Description of Artificial Sequence: Synthetic oligonucleotide
  Target: APOC3; (-) strand; PAM type: NRG; PAM sequence: AGG
actgtgcctgattcaggagc

SEQ ID NO: 6224 - DNA, 20 bp, Artificial Sequence
  Description of Artificial Sequence: Synthetic oligonucleotide
  Target: APOC3; (-) strand; PAM type: NRG; PAM sequence: CAG
gactgtgcctgattcaggag

SEQ ID NO: 6225 - DNA, 20 bp, Artificial Sequence
  Description of Artificial Sequence: Synthetic oligonucleotide
  Target: APOC3; (-) strand; PAM type: NRG; PAM sequence: GAG
ctggactgtgcctgattcag

SEQ ID NO: 6226 - DNA, 20 bp, Artificial Sequence
  Description of Artificial Sequence: Synthetic oligonucleotide
  Target: APOC3; (-) strand; PAM type: NRG; PAM sequence: AGG
agctggactgtgcctgattc

SEQ ID NO: 6227 - DNA, 20 bp, Artificial Sequence
  Description of Artificial Sequence: Synthetic oligonucleotide
  Target: APOC3; (-) strand; PAM type: NRG; PAM sequence: CAG
aagctggactgtgcctgatt

SEQ ID NO: 6228 - DNA, 20 bp, Artificial Sequence
  Description of Artificial Sequence: Synthetic oligonucleotide
  Target: APOC3; (-) strand; PAM type: NRG; PAM sequence: TGG
cctttgctcccgctgcaagc

SEQ ID NO: 6229 - DNA, 20 bp, Artificial Sequence
  Description of Artificial Sequence: Synthetic oligonucleotide
  Target: APOC3; (-) strand; PAM type: NRG; PAM sequence: AAG
ctgacctttgctcccgctgc

SEQ ID NO: 6230 - DNA, 20 bp, Artificial Sequence
  Description of Artificial Sequence: Synthetic oligonucleotide
  Target: APOC3; (-) strand; PAM type: NRG; PAM sequence: GAG
ggggaagggacaggggcact

SEQ ID NO: 6231 - DNA, 20 bp, Artificial Sequence
  Description of Artificial Sequence: Synthetic oligonucleotide
  Target: APOC3; (-) strand; PAM type: NRG; PAM sequence: GGG
ctggcctggggaagggacag

SEQ ID NO: 6232 - DNA, 20 bp, Artificial Sequence
  Description of Artificial Sequence: Synthetic oligonucleotide
  Target: APOC3; (-) strand; PAM type: NRG; PAM sequence: GGG
tctggcctggggaagggaca

SEQ ID NO: 6233 - DNA, 20 bp, Artificial Sequence
  Description of Artificial Sequence: Synthetic oligonucleotide
  Target: APOC3; (-) strand; PAM type: NRG; PAM sequence: AGG
ctctggcctggggaagggac

SEQ ID NO: 6234 - DNA, 20 bp, Artificial Sequence
  Description of Artificial Sequence: Synthetic oligonucleotide
  Target: APOC3; (-) strand; PAM type: NRG; PAM sequence: CAG
cctctggcctggggaaggga

SEQ ID NO: 6235 - DNA, 20 bp, Artificial Sequence
  Description of Artificial Sequence: Synthetic oligonucleotide
  Target: APOC3; (-) strand; PAM type: NRG; PAM sequence: GGG
ctcccctctggcctggggaa

SEQ ID NO: 6236 - DNA, 20 bp, Artificial Sequence
  Description of Artificial Sequence: Synthetic oligonucleotide
  Target: APOC3; (-) strand; PAM type: NRG; PAM sequence: AGG
cctcccctctggcctgggga

SEQ ID NO: 6237 - DNA, 20 bp, Artificial Sequence
  Description of Artificial Sequence: Synthetic oligonucleotide
  Target: APOC3; (-) strand; PAM type: NRG; PAM sequence: AAG
tcctcccctctggcctgggg

SEQ ID NO: 6238 - DNA, 20 bp, Artificial Sequence
  Description of Artificial Sequence: Synthetic oligonucleotide
  Target: APOC3; (-) strand; PAM type: NRG; PAM sequence: GGG
tcctcctcccctctggcctg

SEQ ID NO: 6239 - DNA, 20 bp, Artificial Sequence
  Description of Artificial Sequence: Synthetic oligonucleotide
  Target: APOC3; (-) strand; PAM type: NRG; PAM sequence: GGG
ctcctcctcccctctggcct

SEQ ID NO: 6240 - DNA, 20 bp, Artificial Sequence
  Description of Artificial Sequence: Synthetic oligonucleotide
  Target: APOC3; (-) strand; PAM type: NRG; PAM sequence: TGG
tctcctcctcccctctggcc

SEQ ID NO: 6241 - DNA, 20 bp, Artificial Sequence
  Description of Artificial Sequence: Synthetic oligonucleotide
  Target: APOC3; (-) strand; PAM type: NRG; PAM sequence: TGG
ctcagtctcctcctcccctc

SEQ ID NO: 6242 - DNA, 20 bp, Artificial Sequence
  Description of Artificial Sequence: Synthetic oligonucleotide
  Target: APOC3; (-) strand; PAM type: NRG; PAM sequence: CAG
ctgaggtgtcattcgtgact

SEQ ID NO: 6243 - DNA, 20 bp, Artificial Sequence
  Description of Artificial Sequence: Synthetic oligonucleotide
  Target: APOC3; (-) strand; PAM type: NRG; PAM sequence: AGG
tggaggtcaaactgcggctg

SEQ ID NO: 6244 - DNA, 20 bp, Artificial Sequence
  Description of Artificial Sequence: Synthetic oligonucleotide
  Target: APOC3; (-) strand; PAM type: NRG; PAM sequence: GAG
ctggaggtcaaactgcggct

SEQ ID NO: 6245 - DNA, 20 bp, Artificial Sequence
  Description of Artificial Sequence: Synthetic oligonucleotide
  Target: APOC3; (-) strand; PAM type: NRG; PAM sequence: CGG
aagtcctggaggtcaaactg

SEQ ID NO: 6246 - DNA, 20 bp, Artificial Sequence
  Description of Artificial Sequence: Synthetic oligonucleotide
  Target: APOC3; (-) strand; PAM type: NRG; PAM sequence: AGG
gctaggactgtaagtcctgg

SEQ ID NO: 6247 - DNA, 20 bp, Artificial Sequence
  Description of Artificial Sequence: Synthetic oligonucleotide
  Target: APOC3; (-) strand; PAM type: NRG; PAM sequence: GAG
tgctaggactgtaagtcctg

SEQ ID NO: 6248 - DNA, 20 bp, Artificial Sequence
  Description of Artificial Sequence: Synthetic oligonucleotide
  Target: APOC3; (-) strand; PAM type: NRG; PAM sequence: TGG
gctgctaggactgtaagtcc

SEQ ID NO: 6249 - DNA, 20 bp, Artificial Sequence
  Description of Artificial Sequence: Synthetic oligonucleotide
  Target: APOC3; (-) strand; PAM type: NRG; PAM sequence: AAG
gcaccggctgctaggactgt

SEQ ID NO: 6250 - DNA, 20 bp, Artificial Sequence
  Description of Artificial Sequence: Synthetic oligonucleotide
  Target: APOC3; (-) strand; PAM type: NRG; PAM sequence: AGG
tgctagtggcaccggctgct

SEQ ID NO: 6251 - DNA, 20 bp, Artificial Sequence
  Description of Artificial Sequence: Synthetic oligonucleotide
  Target: APOC3; (-) strand; PAM type: NRG; PAM sequence: TAG
atgctagtggcaccggctgc

SEQ ID NO: 6252 - DNA, 20 bp, Artificial Sequence
  Description of Artificial Sequence: Synthetic oligonucleotide
  Target: APOC3; (-) strand; PAM type: NRG; PAM sequence: CGG
ctctcacatgctagtggcac

SEQ ID NO: 6253 - DNA, 20 bp, Artificial Sequence
  Description of Artificial Sequence: Synthetic oligonucleotide
  Target: APOC3; (-) strand; PAM type: NRG; PAM sequence: TGG
ctggacctctcacatgctag

SEQ ID NO: 6254 - DNA, 20 bp, Artificial Sequence
  Description of Artificial Sequence: Synthetic oligonucleotide
  Target: APOC3; (-) strand; PAM type: NRG; PAM sequence: TAG
cctctggacctctcacatgc

SEQ ID NO: 6255 - DNA, 20 bp, Artificial Sequence
  Description of Artificial Sequence: Synthetic oligonucleotide
  Target: APOC3; (-) strand; PAM type: NRG; PAM sequence: TGG
gggtgagacagaagcgcctc

SEQ ID NO: 6256 - DNA, 20 bp, Artificial Sequence
  Description of Artificial Sequence: Synthetic oligonucleotide
  Target: APOC3; (-) strand; PAM type: NRG; PAM sequence: AAG
caggcgggcgggtgagacag

SEQ ID NO: 6257 - DNA, 20 bp, Artificial Sequence
  Description of Artificial Sequence: Synthetic oligonucleotide
  Target: APOC3; (-) strand; PAM type: NRG; PAM sequence: CAG
acccaggcgggcgggtgaga

SEQ ID NO: 6258 - DNA, 20 bp, Artificial Sequence
  Description of Artificial Sequence: Synthetic oligonucleotide
  Target: APOC3; (-) strand; PAM type: NRG; PAM sequence: GAG
gtgcacccaggcgggcgggt

SEQ ID NO: 6259 - DNA, 20 bp, Artificial Sequence
  Description of Artificial Sequence: Synthetic oligonucleotide
  Target: APOC3; (-) strand; PAM type: NRG; PAM sequence: GGG
atgggtgcacccaggcgggc

SEQ ID NO: 6260 - DNA, 20 bp, Artificial Sequence
  Description of Artificial Sequence: Synthetic oligonucleotide
  Target: APOC3; (-) strand; PAM type: NRG; PAM sequence: CGG
catgggtgcacccaggcggg

SEQ ID NO: 6261 - DNA, 20 bp, Artificial Sequence
  Description of Artificial Sequence: Synthetic oligonucleotide
  Target: APOC3; (-) strand; PAM type: NRG; PAM sequence: GGG
cagcatgggtgcacccaggc

SEQ ID NO: 6262 - DNA, 20 bp, Artificial Sequence
  Description of Artificial Sequence: Synthetic oligonucleotide
  Target: APOC3; (-) strand; PAM type: NRG; PAM sequence: CGG
ccagcatgggtgcacccagg

SEQ ID NO: 6263 - DNA, 20 bp, Artificial Sequence
  Description of Artificial Sequence: Synthetic oligonucleotide
  Target: APOC3; (-) strand; PAM type: NRG; PAM sequence: AGG
ctcccagcatgggtgcaccc

SEQ ID NO: 6264 - DNA, 20 bp, Artificial Sequence
  Description of Artificial Sequence: Synthetic oligonucleotide
  Target: APOC3; (-) strand; PAM type: NRG; PAM sequence: CAG
gctcccagcatgggtgcacc

SEQ ID NO: 6265 - DNA, 20 bp, Artificial Sequence
  Description of Artificial Sequence: Synthetic oligonucleotide
  Target: APOC3; (-) strand; PAM type: NRG; PAM sequence: GGG
ggtgcaggcgctcccagcat

SEQ ID NO: 6266 - DNA, 20 bp, Artificial Sequence
  Description of Artificial Sequence: Synthetic oligonucleotide
  Target: APOC3; (-) strand; PAM type: NRG; PAM sequence: TGG
tggtgcaggcgctcccagca

SEQ ID NO: 6267 - DNA, 20 bp, Artificial Sequence
  Description of Artificial Sequence: Synthetic oligonucleotide
  Target: APOC3; (-) strand; PAM type: NRG; PAM sequence: CAG
tcaaatggtgcaggcgctcc

SEQ ID NO: 6268 - DNA, 20 bp, Artificial Sequence
  Description of Artificial Sequence: Synthetic oligonucleotide
  Target: APOC3; (-) strand; PAM type: NRG; PAM sequence: AGG
cggacatgctcaaatggtgc

SEQ ID NO: 6269 - DNA, 20 bp, Artificial Sequence
  Description of Artificial Sequence: Synthetic oligonucleotide
  Target: APOC3; (-) strand; PAM type: NRG; PAM sequence: CAG
tcggacatgctcaaatggtg

SEQ ID NO: 6270 - DNA, 20 bp, Artificial Sequence
  Description of Artificial Sequence: Synthetic oligonucleotide
  Target: APOC3; (-) strand; PAM type: NRG; PAM sequence: TGG
tgctctcggacatgctcaaa

SEQ ID NO: 6271 - DNA, 20 bp, Artificial Sequence
  Description of Artificial Sequence: Synthetic oligonucleotide
  Target: APOC3; (-) strand; PAM type: NRG; PAM sequence: CGG
cacactctggtggatgctct

SEQ ID NO: 6272 - DNA, 20 bp, Artificial Sequence
  Description of Artificial Sequence: Synthetic oligonucleotide
  Target: APOC3; (-) strand; PAM type: NRG; PAM sequence: TGG
tgaatccacacacactctgg

SEQ ID NO: 6273 - DNA, 20 bp, Artificial Sequence
  Description of Artificial Sequence: Synthetic oligonucleotide
  Target: APOC3; (-) strand; PAM type: NRG; PAM sequence: TGG
ctgtgaatccacacacactc

SEQ ID NO: 6274 - DNA, 20 bp, Artificial Sequence
  Description of Artificial Sequence: Synthetic oligonucleotide
  Target: APOC3; (-) strand; PAM type: NRG; PAM sequence: TAG
tgtgccagtcccttggttct

SEQ ID NO: 6275 - DNA, 20 bp, Artificial Sequence
  Description of Artificial Sequence: Synthetic oligonucleotide
  Target: APOC3; (-) strand; PAM type: NRG; PAM sequence: TGG
catgggctgtgccagtccct

SEQ ID NO: 6276 - DNA, 20 bp, Artificial Sequence
  Description of Artificial Sequence: Synthetic oligonucleotide
  Target: APOC3; (-) strand; PAM type: NRG; PAM sequence: CAG
ggtgcacgcatgggctgtgc

SEQ ID NO: 6277 - DNA, 20 bp, Artificial Sequence
  Description of Artificial Sequence: Synthetic oligonucleotide
  Target: APOC3; (-) strand; PAM type: NRG; PAM sequence: GGG
gcgagcgtgggtgcacgcat

SEQ ID NO: 6278 - DNA, 20 bp, Artificial Sequence
  Description of Artificial Sequence: Synthetic oligonucleotide
  Target: APOC3; (-) strand; PAM type: NRG; PAM sequence: TGG
cgcgagcgtgggtgcacgca

SEQ ID NO: 6279 - DNA, 20 bp, Artificial Sequence
  Description of Artificial Sequence: Synthetic oligonucleotide
  Target: APOC3; (-) strand; PAM type: NRG; PAM sequence: GGG
gcaggtcccctcgcgagcgt

SEQ ID NO: 6280 - DNA, 20 bp, Artificial Sequence
  Description of Artificial Sequence: Synthetic oligonucleotide
  Target: APOC3; (-) strand; PAM type: NRG; PAM sequence: TGG
agcaggtcccctcgcgagcg

SEQ ID NO: 6281 - DNA, 20 bp, Artificial Sequence
  Description of Artificial Sequence: Synthetic oligonucleotide
  Target: APOC3; (-) strand; PAM type: NRG; PAM sequence: GAG
aaggcagcaggtcccctcgc

SEQ ID NO: 6282 - DNA, 20 bp, Artificial Sequence
  Description of Artificial Sequence: Synthetic oligonucleotide
  Target: APOC3; (-) strand; PAM type: NRG; PAM sequence: AGG
ccgccacgttgaaaggcagc

SEQ ID NO: 6283 - DNA, 20 bp, Artificial Sequence
  Description of Artificial Sequence: Synthetic oligonucleotide
  Target: APOC3; (-) strand; PAM type: NRG; PAM sequence: CAG
cccgccacgttgaaaggcag

SEQ ID NO: 6284 - DNA, 20 bp, Artificial Sequence
  Description of Artificial Sequence: Synthetic oligonucleotide
  Target: APOC3; (-) strand; PAM type: NRG; PAM sequence: CAG
gtccccgccacgttgaaagg

SEQ ID NO: 6285 - DNA, 20 bp, Artificial Sequence
  Description of Artificial Sequence: Synthetic oligonucleotide
  Target: APOC3; (-) strand; PAM type: NRG; PAM sequence: AGG
cacgtccccgccacgttgaa

SEQ ID NO: 6286 - DNA, 20 bp, Artificial Sequence
  Description of Artificial Sequence: Synthetic oligonucleotide
  Target: APOC3; (-) strand; PAM type: NRG; PAM sequence: AAG
tcacgtccccgccacgttga

SEQ ID NO: 6287 - DNA, 20 bp, Artificial Sequence
  Description of Artificial Sequence: Synthetic oligonucleotide
  Target: APOC3; (-) strand; PAM type: NRG; PAM sequence: AGG
aagtaaatacattcattaac

SEQ ID NO: 6288 - DNA, 20 bp, Artificial Sequence
  Description of Artificial Sequence: Synthetic oligonucleotide
  Target: APOC3; (-) strand; PAM type: NRG; PAM sequence: CAG
gaagtaaatacattcattaa

SEQ ID NO: 6289 - DNA, 20 bp, Artificial Sequence
  Description of Artificial Sequence: Synthetic oligonucleotide
  Target: APOC3; (-) strand; PAM type: NRG; PAM sequence: AAG
acgtaccctcagactttggg

SEQ ID NO: 6290 - DNA, 20 bp, Artificial Sequence
  Description of Artificial Sequence: Synthetic oligonucleotide
  Target: APOC3; (-) strand; PAM type: NRG; PAM sequence: GGG
aaaacgtaccctcagacttt

SEQ ID NO: 6291 - DNA, 20 bp, Artificial Sequence
  Description of Artificial Sequence: Synthetic oligonucleotide
  Target: APOC3; (-) strand; PAM type: NRG; PAM sequence: TGG
caaaacgtaccctcagactt

SEQ ID NO: 6292 - DNA, 20 bp, Artificial Sequence
  Description of Artificial Sequence: Synthetic oligonucleotide
  Target: APOC3; (-) strand; PAM type: NRG; PAM sequence: CAG
attgatgcaaaacgtaccct

SEQ ID NO: 6293 - DNA, 20 bp, Artificial Sequence
  Description of Artificial Sequence: Synthetic oligonucleotide
  Target: APOC3; (-) strand; PAM type: NRG; PAM sequence: CAG
ccccaaaacaaatccatcta

SEQ ID NO: 6294 - DNA, 20 bp, Artificial Sequence
  Description of Artificial Sequence: Synthetic oligonucleotide
  Target: APOC3; (-) strand; PAM type: NRG; PAM sequence: GGG
cctctaagactgagcacagg

SEQ ID NO: 6295 - DNA, 20 bp, Artificial Sequence
  Description of Artificial Sequence: Synthetic oligonucleotide
  Target: APOC3; (-) strand; PAM type: NRG; PAM sequence: GGG
ccctctaagactgagcacag

SEQ ID NO: 6296 - DNA, 20 bp, Artificial Sequence
  Description of Artificial Sequence: Synthetic oligonucleotide
  Target: APOC3; (-) strand; PAM type: NRG; PAM sequence: GGG
accctctaagactgagcaca

SEQ ID NO: 6297 - DNA, 20 bp, Artificial Sequence
  Description of Artificial Sequence: Synthetic oligonucleotide
  Target: APOC3; (-) strand; PAM type: NRG; PAM sequence: AGG
caccctctaagactgagcac

SEQ ID NO: 6298 - DNA, 20 bp, Artificial Sequence
  Description of Artificial Sequence: Synthetic oligonucleotide
  Target: APOC3; (-) strand; PAM type: NRG; PAM sequence: CAG
gcaccctctaagactgagca

SEQ ID NO: 6299 - DNA, 20 bp, Artificial Sequence
  Description of Artificial Sequence: Synthetic oligonucleotide
  Target: APOC3; (-) strand; PAM type: NRG; PAM sequence: GAG
tacttgcaccctctaagact

SEQ ID NO: 6300 - DNA, 20 bp, Artificial Sequence
  Description of Artificial Sequence: Synthetic oligonucleotide
  Target: APOC3; (-) strand; PAM type: NRG; PAM sequence: AAG
atcagctacttgcaccctct

SEQ ID NO: 6301 - DNA, 20 bp, Artificial Sequence
  Description of Artificial Sequence: Synthetic oligonucleotide
  Target: APOC3; (-) strand; PAM type: NRG; PAM sequence: CAG
aggcagtctgctcttcccat

SEQ ID NO: 6302 - DNA, 20 bp, Artificial Sequence
  Description of Artificial Sequence: Synthetic oligonucleotide
  Target: APOC3; (-) strand; PAM type: NRG; PAM sequence: CAG
gaccaggcctggctggaagg

SEQ ID NO: 6303 - DNA, 20 bp, Artificial Sequence
  Description of Artificial Sequence: Synthetic oligonucleotide
  Target: APOC3; (-) strand; PAM type: NRG; PAM sequence: AGG
caggaccaggcctggctgga

SEQ ID NO: 6304 - DNA, 20 bp, Artificial Sequence
  Description of Artificial Sequence: Synthetic oligonucleotide
  Target: APOC3; (-) strand; PAM type: NRG; PAM sequence: AAG
acaggaccaggcctggctgg

SEQ ID NO: 6305 - DNA, 20 bp, Artificial Sequence
  Description of Artificial Sequence: Synthetic oligonucleotide
  Target: APOC3; (-) strand; PAM type: NRG; PAM sequence: TGG
ctcacaggaccaggcctggc

SEQ ID NO: 6306 - DNA, 20 bp, Artificial Sequence
  Description of Artificial Sequence: Synthetic oligonucleotide
  Target: APOC3; (-) strand; PAM type: NRG; PAM sequence: TGG
ctgactcacaggaccaggcc

SEQ ID NO: 6307 - DNA, 20 bp, Artificial Sequence
  Description of Artificial Sequence: Synthetic oligonucleotide
  Target: APOC3; (-) strand; PAM type: NRG; PAM sequence: AGG
cgtccctgactcacaggacc

SEQ ID NO: 6308 - DNA, 20 bp, Artificial Sequence
  Description of Artificial Sequence: Synthetic oligonucleotide
  Target: APOC3; (-) strand; PAM type: NRG; PAM sequence: CAG
acgtccctgactcacaggac

SEQ ID NO: 6309 - DNA, 20 bp, Artificial Sequence
  Description of Artificial Sequence: Synthetic oligonucleotide
  Target: APOC3; (-) strand; PAM type: NRG; PAM sequence: AGG
gatggacgtccctgactcac

SEQ ID NO: 6310 - DNA, 20 bp, Artificial Sequence
  Description of Artificial Sequence: Synthetic oligonucleotide
  Target: APOC3; (-) strand; PAM type: NRG; PAM sequence: CAG
agatggacgtccctgactca

SEQ ID NO: 6311 - DNA, 20 bp, Artificial Sequence
  Description of Artificial Sequence: Synthetic oligonucleotide
  Target: APOC3; (-) strand; PAM type: NRG; PAM sequence: TGG
gcctttcatgcccactaaga

SEQ ID NO: 6312 - DNA, 20 bp, Artificial Sequence
  Description of Artificial Sequence: Synthetic oligonucleotide
  Target: APOC3; (-) strand; PAM type: NRG; PAM sequence: AAG
acaggcctttcatgcccact

SEQ ID NO: 6313 - DNA, 20 bp, Artificial Sequence
  Description of Artificial Sequence: Synthetic oligonucleotide
  Target: APOC3; (-) strand; PAM type: NRG; PAM sequence: AGG
tgtctccctcgagatcacac

SEQ ID NO: 6314 - DNA, 20 bp, Artificial Sequence
  Description of Artificial Sequence: Synthetic oligonucleotide
  Target: APOC3; (-) strand; PAM type: NRG; PAM sequence: CAG
atgtctccctcgagatcaca

SEQ ID NO: 6315 - DNA, 20 bp, Artificial Sequence
  Description of Artificial Sequence: Synthetic oligonucleotide
  Target: APOC3; (-) strand; PAM type: NRG; PAM sequence: GAG
ggagaggcgatgtctccctc

SEQ ID NO: 6316 - DNA, 20 bp, Artificial Sequence
  Description of Artificial Sequence: Synthetic oligonucleotide
  Target: APOC3; (-) strand; PAM type: NRG; PAM sequence: AGG
agataaggagaggcttggag

SEQ ID NO: 6317 - DNA, 20 bp, Artificial Sequence
  Description of Artificial Sequence: Synthetic oligonucleotide
  Target: APOC3; (-) strand; PAM type: NRG; PAM sequence: GAG
cagataaggagaggcttgga

SEQ ID NO: 6318 - DNA, 20 bp, Artificial Sequence
  Description of Artificial Sequence: Synthetic oligonucleotide
  Target: APOC3; (-) strand; PAM type: NRG; PAM sequence: GAG
cacagataaggagaggcttg

SEQ ID NO: 6319 - DNA, 20 bp, Artificial Sequence
  Description of Artificial Sequence: Synthetic oligonucleotide
  Target: APOC3; (-) strand; PAM type: NRG; PAM sequence: TGG
tgcacagataaggagaggct

SEQ ID NO: 6320 - DNA, 20 bp, Artificial Sequence
  Description of Artificial Sequence: Synthetic oligonucleotide
  Target: APOC3; (-) strand; PAM type: NRG; PAM sequence: AGG
cctgttgcacagataaggag

SEQ ID NO: 6321 - DNA, 20 bp, Artificial Sequence
  Description of Artificial Sequence: Synthetic oligonucleotide
  Target: APOC3; (-) strand; PAM type: NRG; PAM sequence: GAG
gcctgttgcacagataagga

SEQ ID NO: 6322 - DNA, 20 bp, Artificial Sequence
  Description of Artificial Sequence: Synthetic oligonucleotide
  Target: APOC3; (-) strand; PAM type: NRG; PAM sequence: GAG
ctgcctgttgcacagataag

SEQ ID NO: 6323 - DNA, 20 bp, Artificial Sequence
  Description of Artificial Sequence: Synthetic oligonucleotide
  Target: APOC3; (-) strand; PAM type: NRG; PAM sequence: AGG
gtctgcctgttgcacagata

SEQ ID NO: 6324 - DNA, 20 bp, Artificial Sequence
  Description of Artificial Sequence: Synthetic oligonucleotide
  Target: APOC3; (-) strand; PAM type: NRG; PAM sequence: AAG
agtctgcctgttgcacagat

SEQ ID NO: 6325 - DNA, 20 bp, Artificial Sequence
  Description of Artificial Sequence: Synthetic oligonucleotide
  Target: APOC3; (-) strand; PAM type: NRG; PAM sequence: CAG
cattaagtctgcctgttgca

SEQ ID NO: 6326 - DNA, 20 bp, Artificial Sequence
  Description of Artificial Sequence: Synthetic oligonucleotide
  Target: APOC3; (-) strand; PAM type: NRG; PAM sequence: AAG
tcattgcctcaccaatcatt

SEQ ID NO: 6327 - DNA, 20 bp, Artificial Sequence
  Description of Artificial Sequence: Synthetic oligonucleotide
  Target: APOC3; (-) strand; PAM type: NRG; PAM sequence: CAG
tgtagctaatgctgagctat

SEQ ID NO: 6328 - DNA, 20 bp, Artificial Sequence
  Description of Artificial Sequence: Synthetic oligonucleotide
  Target: APOC3; (-) strand; PAM type: NRG; PAM sequence: GAG
gggtggctgtagctaatgct

SEQ ID NO: 6329 - DNA, 20 bp, Artificial Sequence
  Description of Artificial Sequence: Synthetic oligonucleotide
  Target: APOC3; (-) strand; PAM type: NRG; PAM sequence: TAG
ttggccaggaggggtggctg

SEQ ID NO: 6330 - DNA, 20 bp, Artificial Sequence
  Description of Artificial Sequence: Synthetic oligonucleotide
  Target: APOC3; (-) strand; PAM type: NRG; PAM sequence: TGG
gtgtggttggccaggagggg

SEQ ID NO: 6331 - DNA, 20 bp, Artificial Sequence
  Description of Artificial Sequence: Synthetic oligonucleotide
  Target: APOC3; (-) strand; PAM type: NRG; PAM sequence: GGG
cctgtgtggttggccaggag

SEQ ID NO: 6332 - DNA, 20 bp, Artificial Sequence
  Description of Artificial Sequence: Synthetic oligonucleotide
  Target: APOC3; (-) strand; PAM type: NRG; PAM sequence: GGG
ccctgtgtggttggccagga

SEQ ID NO: 6333 - DNA, 20 bp, Artificial Sequence
  Description of Artificial Sequence: Synthetic oligonucleotide
  Target: APOC3; (-) strand; PAM type: NRG; PAM sequence: AGG
tccctgtgtggttggccagg

SEQ ID NO: 6334 - DNA, 20 bp, Artificial Sequence
  Description of Artificial Sequence: Synthetic oligonucleotide
  Target: APOC3; (-) strand; PAM type: NRG; PAM sequence: GAG
atccctgtgtggttggccag

SEQ ID NO: 6335 - DNA, 20 bp, Artificial Sequence
  Description of Artificial Sequence: Synthetic oligonucleotide
  Target: APOC3; (-) strand; PAM type: NRG; PAM sequence: AGG
tgatccctgtgtggttggcc

SEQ ID NO: 6336 - DNA, 20 bp, Artificial Sequence
  Description of Artificial Sequence: Synthetic oligonucleotide
  Target: APOC3; (-) strand; PAM type: NRG; PAM sequence: CAG
ttgatccctgtgtggttggc

SEQ ID NO: 6337 - DNA, 20 bp, Artificial Sequence
  Description of Artificial Sequence: Synthetic oligonucleotide
  Target: APOC3; (-) strand; PAM type: NRG; PAM sequence: TGG
tggtttgatccctgtgtggt

SEQ ID NO: 6338 - DNA, 20 bp, Artificial Sequence
  Description of Artificial Sequence: Synthetic oligonucleotide
  Target: APOC3; (-) strand; PAM type: NRG; PAM sequence: TGG
cccctggtttgatccctgtg

SEQ ID NO: 6339 - DNA, 20 bp, Artificial Sequence
  Description of Artificial Sequence: Synthetic oligonucleotide
  Target: APOC3; (-) strand; PAM type: NRG; PAM sequence: TGG
ctgacctctggactgacccc

SEQ ID NO: 6340 - DNA, 20 bp, Artificial Sequence
  Description of Artificial Sequence: Synthetic oligonucleotide
  Target: APOC3; (-) strand; PAM type: NRG; PAM sequence: TGG
ctgctcctgactctgacctc

SEQ ID NO: 6341 - DNA, 20 bp, Artificial Sequence
  Description of Artificial Sequence: Synthetic oligonucleotide
  Target: APOC3; (-) strand; PAM type: NRG; PAM sequence: GAG
gcctgtccctggctggatct

SEQ ID NO: 6342 - DNA, 20 bp, Artificial Sequence
  Description of Artificial Sequence: Synthetic oligonucleotide
  Target: APOC3; (-) strand; PAM type: NRG; PAM sequence: TGG
gtgacctgcctgtccctggc

SEQ ID NO: 6343 - DNA, 20 bp, Artificial Sequence
  Description of Artificial Sequence: Synthetic oligonucleotide
  Target: APOC3; (-) strand; PAM type: NRG; PAM sequence: TGG
ccgtgtgacctgcctgtccc

SEQ ID NO: 6344 - DNA, 20 bp, Artificial Sequence
  Description of Artificial Sequence: Synthetic oligonucleotide
  Target: APOC3; (-) strand; PAM type: NRG; PAM sequence: AGG
ggccccttgaagcatacgtg

SEQ ID NO: 6345 - DNA, 20 bp, Artificial Sequence
  Description of Artificial Sequence: Synthetic oligonucleotide
  Target: APOC3; (-) strand; PAM type: NRG; PAM sequence: GAG
gggccccttgaagcatacgt

SEQ ID NO: 6346 - DNA, 20 bp, Artificial Sequence
  Description of Artificial Sequence: Synthetic oligonucleotide
  Target: APOC3; (-) strand; PAM type: NRG; PAM sequence: AAG
gcccgggggagggccccttg

SEQ ID NO: 6347 - DNA, 20 bp, Artificial Sequence
  Description of Artificial Sequence: Synthetic oligonucleotide
  Target: APOC3; (-) strand; PAM type: NRG; PAM sequence: GGG
cttcagttctgcccggggga

SEQ ID NO: 6348 - DNA, 20 bp, Artificial Sequence
  Description of Artificial Sequence: Synthetic oligonucleotide
  Target: APOC3; (-) strand; PAM type: NRG; PAM sequence: AGG
ccttcagttctgcccggggg

SEQ ID NO: 6349 - DNA, 20 bp, Artificial Sequence
  Description of Artificial Sequence: Synthetic oligonucleotide
  Target: APOC3; (-) strand; PAM type: NRG; PAM sequence: GAG
tccttcagttctgcccgggg

SEQ ID NO: 6350 - DNA, 20 bp, Artificial Sequence
  Description of Artificial Sequence: Synthetic oligonucleotide
  Target: APOC3; (-) strand; PAM type: NRG; PAM sequence: GGG
tgtccttcagttctgcccgg

SEQ ID NO: 6351 - DNA, 20 bp, Artificial Sequence
  Description of Artificial Sequence: Synthetic oligonucleotide
  Target: APOC3; (-) strand; PAM type: NRG; PAM sequence: GGG
ctgtccttcagttctgcccg

SEQ ID NO: 6352 - DNA, 20 bp, Artificial Sequence
  Description of Artificial Sequence: Synthetic oligonucleotide
  Target: APOC3; (-) strand; PAM type: NRG; PAM sequence: GGG
gctgtccttcagttctgccc

SEQ ID NO: 6353 - DNA, 20 bp, Artificial Sequence
  Description of Artificial Sequence: Synthetic oligonucleotide
  Target: APOC3; (-) strand; PAM type: NRG; PAM sequence: CGG
agctgtccttcagttctgcc

SEQ ID NO: 6354 - DNA, 20 bp, Artificial Sequence
  Description of Artificial Sequence: Synthetic oligonucleotide
  Target: APOC3; (-) strand; PAM type: NRG; PAM sequence: CAG
tggcaacaggagctgtcctt

SEQ ID NO: 6355 - DNA, 20 bp, Artificial Sequence
  Description of Artificial Sequence: Synthetic oligonucleotide
  Target: APOC3; (-) strand; PAM type: NRG; PAM sequence: GAG
gctccctcctatggcaacag

SEQ ID NO: 6356 - DNA, 20 bp, Artificial Sequence
  Description of Artificial Sequence: Synthetic oligonucleotide
  Target: APOC3; (-) strand; PAM type: NRG; PAM sequence: AGG
cagctccctcctatggcaac

SEQ ID NO: 6357 - DNA, 20 bp, Artificial Sequence
  Description of Artificial Sequence: Synthetic oligonucleotide
  Target: APOC3; (-) strand; PAM type: NRG; PAM sequence: CAG
ccagctccctcctatggcaa

SEQ ID NO: 6358 - DNA, 20 bp, Artificial Sequence
  Description of Artificial Sequence: Synthetic oligonucleotide
  Target: APOC3; (-) strand; PAM type: NRG; PAM sequence: TGG
tctcacccagctccctccta

SEQ ID NO: 6359 - DNA, 20 bp, Artificial Sequence
  Description of Artificial Sequence: Synthetic oligonucleotide
  Target: APOC3; (-) strand; PAM type: NRG; PAM sequence: CAG
gttcctcctagtatctcacc

SEQ ID NO: 6360 - DNA, 20 bp, Artificial Sequence
  Description of Artificial Sequence: Synthetic oligonucleotide
  Target: APOC3; (-) strand; PAM type: NRG; PAM sequence: TAG
atcatgccggaagttcctcc

SEQ ID NO: 6361 - DNA, 20 bp, Artificial Sequence
  Description of Artificial Sequence: Synthetic oligonucleotide
  Target: APOC3; (-) strand; PAM type: NRG; PAM sequence: AAG
atcacacatcatcatgccgg

SEQ ID NO: 6362 - DNA, 20 bp, Artificial Sequence
  Description of Artificial Sequence: Synthetic oligonucleotide
  Target: APOC3; (-) strand; PAM type: NRG; PAM sequence: CGG
ttcatcacacatcatcatgc

SEQ ID NO: 6363 - DNA, 20 bp, Artificial Sequence
  Description of Artificial Sequence: Synthetic oligonucleotide
  Target: APOC3; (-) strand; PAM type: NRG; PAM sequence: AGG
gattcagacctgttggccag

SEQ ID NO: 6364 - DNA, 20 bp, Artificial Sequence
  Description of Artificial Sequence: Synthetic oligonucleotide
  Target: APOC3; (-) strand; PAM type: NRG; PAM sequence: GAG
tgattcagacctgttggcca

SEQ ID NO: 6365 - DNA, 20 bp, Artificial Sequence
  Description of Artificial Sequence: Synthetic oligonucleotide
  Target: APOC3; (-) strand; PAM type: NRG; PAM sequence: CAG
cctgattcagacctgttggc

SEQ ID NO: 6366 - DNA, 20 bp, Artificial Sequence
  Description of Artificial Sequence: Synthetic oligonucleotide
  Target: APOC3; (-) strand; PAM type: NRG; PAM sequence: TGG
cagccctgattcagacctgt

SEQ ID NO: 6367 - DNA, 20 bp, Artificial Sequence
  Description of Artificial Sequence: Synthetic oligonucleotide
  Target: APOC3; (-) strand; PAM type: NRG; PAM sequence: CAG
tgggctgggcagccctgatt

SEQ ID NO: 6368 - DNA, 20 bp, Artificial Sequence
  Description of Artificial Sequence: Synthetic oligonucleotide
  Target: APOC3; (-) strand; PAM type: NRG; PAM sequence: CAG
tcccaccaggctgggctggg

SEQ ID NO: 6369 - DNA, 20 bp, Artificial Sequence
  Description of Artificial Sequence: Synthetic oligonucleotide
  Target: APOC3; (-) strand; PAM type: NRG; PAM sequence: GGG
ccttcccaccaggctgggct

SEQ ID NO: 6370 - DNA, 20 bp, Artificial Sequence
  Description of Artificial Sequence: Synthetic oligonucleotide
  Target: APOC3; (-) strand; PAM type: NRG; PAM sequence: TGG
cccttcccaccaggctgggc

SEQ ID NO: 6371 - DNA, 20 bp, Artificial Sequence
  Description of Artificial Sequence: Synthetic oligonucleotide
  Target: APOC3; (-) strand; PAM type: NRG; PAM sequence: GGG
catgcccttcccaccaggct

SEQ ID NO: 6372 - DNA, 20 bp, Artificial Sequence
  Description of Artificial Sequence: Synthetic oligonucleotide
  Target: APOC3; (-) strand; PAM type: NRG; PAM sequence: TGG
ccatgcccttcccaccaggc

SEQ ID NO: 6373 - DNA, 20 bp, Artificial Sequence
  Description of Artificial Sequence: Synthetic oligonucleotide
  Target: APOC3; (-) strand; PAM type: NRG; PAM sequence: AGG
tgctccatgcccttcccacc

SEQ ID NO: 6374 - DNA, 20 bp, Artificial Sequence
  Description of Artificial Sequence: Synthetic oligonucleotide
  Target: APOC3; (-) strand; PAM type: NRG; PAM sequence: CAG
atgctccatgcccttcccac

SEQ ID NO: 6375 - DNA, 20 bp, Artificial Sequence
  Description of Artificial Sequence: Synthetic oligonucleotide
  Target: APOC3; (-) strand; PAM type: NRG; PAM sequence: GAG
ccaggtgaggtttagtacat

SEQ ID NO: 6376 - DNA, 20 bp, Artificial Sequence
  Description of Artificial Sequence: Synthetic oligonucleotide
  Target: APOC3; (-) strand; PAM type: NRG; PAM sequence: TAG
ccttgtgtccaggtgaggtt

SEQ ID NO: 6377 - DNA, 20 bp, Artificial Sequence
  Description of Artificial Sequence: Synthetic oligonucleotide
  Target: APOC3; (-) strand; PAM type: NRG; PAM sequence: AGG
tttcaccttgtgtccaggtg

SEQ ID NO: 6378 - DNA, 20 bp, Artificial Sequence
  Description of Artificial Sequence: Synthetic oligonucleotide
  Target: APOC3; (-) strand; PAM type: NRG; PAM sequence: GAG
gtttcaccttgtgtccaggt

SEQ ID NO: 6379 - DNA, 20 bp, Artificial Sequence
  Description of Artificial Sequence: Synthetic oligonucleotide
  Target: APOC3; (-) strand; PAM type: NRG; PAM sequence: AGG
ggctgtttcaccttgtgtcc

SEQ ID NO: 6380 - DNA, 20 bp, Artificial Sequence
  Description of Artificial Sequence: Synthetic oligonucleotide
  Target: APOC3; (-) strand; PAM type: NRG; PAM sequence: CAG
gggctgtttcaccttgtgtc

SEQ ID NO: 6381 - DNA, 20 bp, Artificial Sequence
  Description of Artificial Sequence: Synthetic oligonucleotide
  Target: APOC3; (-) strand; PAM type: NRG; PAM sequence: GGG
aaaaatggtcctctggggtt

SEQ ID NO: 6382 - DNA, 20 bp, Artificial Sequence
  Description of Artificial Sequence: Synthetic oligonucleotide
  Target: APOC3; (-) strand; PAM type: NRG; PAM sequence: TGG
caaaaatggtcctctggggt

SEQ ID NO: 6383 - DNA, 20 bp, Artificial Sequence
  Description of Artificial Sequence: Synthetic oligonucleotide
  Target: APOC3; (-) strand; PAM type: NRG; PAM sequence: GGG
gggccaaaaatggtcctctg

SEQ ID NO: 6384 - DNA, 20 bp, Artificial Sequence
  Description of Artificial Sequence: Synthetic oligonucleotide
  Target: APOC3; (-) strand; PAM type: NRG; PAM sequence: GGG
ggggccaaaaatggtcctct

SEQ ID NO: 6385 - DNA, 20 bp, Artificial Sequence
  Description of Artificial Sequence: Synthetic oligonucleotide
  Target: APOC3; (-) strand; PAM type: NRG; PAM sequence: TGG
cggggccaaaaatggtcctc

SEQ ID NO: 6386 - DNA, 20 bp, Artificial Sequence
  Description of Artificial Sequence: Synthetic oligonucleotide
  Target: APOC3; (-) strand; PAM type: NRG; PAM sequence: TGG
tgaccatccggggccaaaaa

SEQ ID NO: 6387 - DNA, 20 bp, Artificial Sequence
  Description of Artificial Sequence: Synthetic oligonucleotide
  Target: APOC3; (-) strand; PAM type: NRG; PAM sequence: GGG
agaggggatttgaccatccg

SEQ ID NO: 6388 - DNA, 20 bp, Artificial Sequence
  Description of Artificial Sequence: Synthetic oligonucleotide
  Target: APOC3; (-) strand; PAM type: NRG; PAM sequence: GGG
aagaggggatttgaccatcc

SEQ ID NO: 6389 - DNA, 20 bp, Artificial Sequence
  Description of Artificial Sequence: Synthetic oligonucleotide
  Target: APOC3; (-) strand; PAM type: NRG; PAM sequence: CGG
gaagaggggatttgaccatc

SEQ ID NO: 6390 - DNA, 20 bp, Artificial Sequence
  Description of Artificial Sequence: Synthetic oligonucleotide
  Target: APOC3; (-) strand; PAM type: NRG; PAM sequence: GGG
gtggtagatgggaggaagag

SEQ ID NO: 6391 - DNA, 20 bp, Artificial Sequence
  Description of Artificial Sequence: Synthetic oligonucleotide
  Target: APOC3; (-) strand; PAM type: NRG; PAM sequence: GGG
agtggtagatgggaggaaga

SEQ ID NO: 6392 - DNA, 20 bp, Artificial Sequence
  Description of Artificial Sequence: Synthetic oligonucleotide
  Target: APOC3; (-) strand; PAM type: NRG; PAM sequence: AGG
cagtggtagatgggaggaag

SEQ ID NO: 6393 - DNA, 20 bp, Artificial Sequence
  Description of Artificial Sequence: Synthetic oligonucleotide
  Target: APOC3; (-) strand; PAM type: NRG; PAM sequence: GAG
ccagtggtagatgggaggaa

SEQ ID NO: 6394 - DNA, 20 bp, Artificial Sequence
  Description of Artificial Sequence: Synthetic oligonucleotide
  Target: APOC3; (-) strand; PAM type: NRG; PAM sequence: AAG
agccagtggtagatgggagg

SEQ ID NO: 6395 - DNA, 20 bp, Artificial Sequence
  Description of Artificial Sequence: Synthetic oligonucleotide
  Target: APOC3; (-) strand; PAM type: NRG; PAM sequence: AGG
agaagccagtggtagatggg

SEQ ID NO: 6396 - DNA, 20 bp, Artificial Sequence
  Description of Artificial Sequence: Synthetic oligonucleotide
  Target: APOC3; (-) strand; PAM type: NRG; PAM sequence: GAG
gagaagccagtggtagatgg

SEQ ID NO: 6397 - DNA, 20 bp, Artificial Sequence
  Description of Artificial Sequence: Synthetic oligonucleotide
  Target: APOC3; (-) strand; PAM type: NRG; PAM sequence: GGG
gggagaagccagtggtagat

SEQ ID NO: 6398 - DNA, 20 bp, Artificial Sequence
  Description of Artificial Sequence: Synthetic oligonucleotide
  Target: APOC3; (-) strand; PAM type: NRG; PAM sequence: TGG
agggagaagccagtggtaga

SEQ ID NO: 6399 - DNA, 20 bp, Artificial Sequence
  Description of Artificial Sequence: Synthetic oligonucleotide
  Target: APOC3; (-) strand; PAM type: NRG; PAM sequence: TAG
ctccagggagaagccagtgg

SEQ ID NO: 6400 - DNA, 20 bp, Artificial Sequence
  Description of Artificial Sequence: Synthetic oligonucleotide
  Target: APOC3; (-) strand; PAM type: NRG; PAM sequence: TGG
ctgctccagggagaagccag

SEQ ID NO: 6401 - DNA, 20 bp, Artificial Sequence
  Description of Artificial Sequence: Synthetic oligonucleotide
  Target: APOC3; (-) strand; PAM type: NRG; PAM sequence: CAG
agactgctccagggagaagc

SEQ ID NO: 6402 - DNA, 20 bp, Artificial Sequence
  Description of Artificial Sequence: Synthetic oligonucleotide
  Target: APOC3; (-) strand; PAM type: NRG; PAM sequence: AAG
atgaagactgctccagggag

SEQ ID NO: 6403 - DNA, 20 bp, Artificial Sequence
  Description of Artificial Sequence: Synthetic oligonucleotide
  Target: APOC3; (-) strand; PAM type: NRG; PAM sequence: GAG
gggatgaagactgctccagg

SEQ ID NO: 6404 - DNA, 20 bp, Artificial Sequence
  Description of Artificial Sequence: Synthetic oligonucleotide
  Target: APOC3; (-) strand; PAM type: NRG; PAM sequence: GGG
ctgggatgaagactgctcca

SEQ ID NO: 6405 - DNA, 20 bp, Artificial Sequence
  Description of Artificial Sequence: Synthetic oligonucleotide
  Target: APOC3; (-) strand; PAM type: NRG; PAM sequence: AGG
cctgggatgaagactgctcc

SEQ ID NO: 6406 - DNA, 20 bp, Artificial Sequence
  Description of Artificial Sequence: Synthetic oligonucleotide
  Target: APOC3; (-) strand; PAM type: NRG; PAM sequence: CAG
ccctgggatgaagactgctc

SEQ ID NO: 6407 - DNA, 20 bp, Artificial Sequence
  Description of Artificial Sequence: Synthetic oligonucleotide
  Target: APOC3; (-) strand; PAM type: NRG; PAM sequence: AAG
atcatggctcccctgggatg

SEQ ID NO: 6408 - DNA, 20 bp, Artificial Sequence
  Description of Artificial Sequence: Synthetic oligonucleotide
  Target: APOC3; (-) strand; PAM type: NRG; PAM sequence: GGG
tctcccatcatggctcccct

SEQ ID NO: 6409 - DNA, 20 bp, Artificial Sequence
  Description of Artificial Sequence: Synthetic oligonucleotide
  Target: APOC3; (-) strand; PAM type: NRG; PAM sequence: TGG
ctctcccatcatggctcccc

SEQ ID NO: 6410 - DNA, 20 bp, Artificial Sequence
  Description of Artificial Sequence: Synthetic oligonucleotide
  Target: APOC3; (-) strand; PAM type: NRG; PAM sequence: TGG
gctgcccctctctcccatca

SEQ ID NO: 6411 - DNA, 20 bp, Artificial Sequence
  Description of Artificial Sequence: Synthetic oligonucleotide
  Target: APOC3; (-) strand; PAM type: NRG; PAM sequence: CAG
gcaggggatctcttggtggc

SEQ ID NO: 6412 - DNA, 20 bp, Artificial Sequence
  Description of Artificial Sequence: Synthetic oligonucleotide
  Target: APOC3; (-) strand; PAM type: NRG; PAM sequence: TGG
cccggcaggggatctcttgg

SEQ ID NO: 6413 - DNA, 20 bp, Artificial Sequence
  Description of Artificial Sequence: Synthetic oligonucleotide
  Target: APOC3; (-) strand; PAM type: NRG; PAM sequence: TGG
caccccggcaggggatctct

SEQ ID NO: 6414 - DNA, 20 bp, Artificial Sequence
  Description of Artificial Sequence: Synthetic oligonucleotide
  Target: APOC3; (-) strand; PAM type: NRG; PAM sequence: GGG
tccaacctgcaccccggcag

SEQ ID NO: 6415 - DNA, 20 bp, Artificial Sequence
  Description of Artificial Sequence: Synthetic oligonucleotide
  Target: APOC3; (-) strand; PAM type: NRG; PAM sequence: GGG
gtccaacctgcaccccggca

SEQ ID NO: 6416 - DNA, 20 bp, Artificial Sequence
  Description of Artificial Sequence: Synthetic oligonucleotide
  Target: APOC3; (-) strand; PAM type: NRG; PAM sequence: AGG
agtccaacctgcaccccggc

SEQ ID NO: 6417 - DNA, 20 bp, Artificial Sequence
  Description of Artificial Sequence: Synthetic oligonucleotide
  Target: APOC3; (-) strand; PAM type: NRG; PAM sequence: CAG
cagtccaacctgcaccccgg

SEQ ID NO: 6418 - DNA, 20 bp, Artificial Sequence
  Description of Artificial Sequence: Synthetic oligonucleotide
  Target: APOC3; (-) strand; PAM type: NRG; PAM sequence: CGG
caacagtccaacctgcaccc

SEQ ID NO: 6419 - DNA, 20 bp, Artificial Sequence
  Description of Artificial Sequence: Synthetic oligonucleotide
  Target: APOC3; (-) strand; PAM type: NRG; PAM sequence: CAG
tacctgtggcccctcaccaa

SEQ ID NO: 6420 - DNA, 20 bp, Artificial Sequence
  Description of Artificial Sequence: Synthetic oligonucleotide
  Target: APOC3; (-) strand; PAM type: NRG; PAM sequence: TGG
ttggtacctgagaatacctg

SEQ ID NO: 6421 - DNA, 20 bp, Artificial Sequence
  Description of Artificial Sequence: Synthetic oligonucleotide
  Target: APOC3; (-) strand; PAM type: NRG; PAM sequence: GAG
cttccaagggcttggtacct

SEQ ID NO: 6422 - DNA, 20 bp, Artificial Sequence
  Description of Artificial Sequence: Synthetic oligonucleotide
  Target: APOC3; (-) strand; PAM type: NRG; PAM sequence: TGG
cttgtctccttccaagggct

SEQ ID NO: 6423 - DNA, 20 bp, Artificial Sequence
  Description of Artificial Sequence: Synthetic oligonucleotide
  Target: APOC3; (-) strand; PAM type: NRG; PAM sequence: GGG
ggtaccttgtctccttccaa

SEQ ID NO: 6424 - DNA, 20 bp, Artificial Sequence
  Description of Artificial Sequence: Synthetic oligonucleotide
  Target: APOC3; (-) strand; PAM type: NRG; PAM sequence: AGG
tggtaccttgtctccttcca

SEQ ID NO: 6425 - DNA, 20 bp, Artificial Sequence
  Description of Artificial Sequence: Synthetic oligonucleotide
  Target: APOC3; (-) strand; PAM type: NRG; PAM sequence: AAG
ctggtaccttgtctccttcc

SEQ ID NO: 6426 - DNA, 20 bp, Artificial Sequence
  Description of Artificial Sequence: Synthetic oligonucleotide
  Target: APOC3; (-) strand; PAM type: NRG; PAM sequence: TGG
tagcacacctccaggaagcc

SEQ ID NO: 6427 - DNA, 20 bp, Artificial Sequence
  Description of Artificial Sequence: Synthetic oligonucleotide
  Target: APOC3; (-) strand; PAM type: NRG; PAM sequence: AAG
agatgtagcacacctccagg

SEQ ID NO: 6428 - DNA, 20 bp, Artificial Sequence
  Description of Artificial Sequence: Synthetic oligonucleotide
  Target: APOC3; (-) strand; PAM type: NRG; PAM sequence: AGG
gctagatgtagcacacctcc

SEQ ID NO: 6429 - DNA, 20 bp, Artificial Sequence
  Description of Artificial Sequence: Synthetic oligonucleotide
  Target: APOC3; (-) strand; PAM type: NRG; PAM sequence: CAG
agctagatgtagcacacctc

SEQ ID NO: 6430 - DNA, 20 bp, Artificial Sequence
  Description of Artificial Sequence: Synthetic oligonucleotide
  Target: APOC3; (-) strand; PAM type: NRG; PAM sequence: TAG
gcagggtgctgagctagatg

SEQ ID NO: 6431 - DNA, 20 bp, Artificial Sequence
  Description of Artificial Sequence: Synthetic oligonucleotide
  Target: APOC3; (-) strand; PAM type: NRG; PAM sequence: TAG
gacctggcagggtgctgagc

SEQ ID NO: 6432 - DNA, 20 bp, Artificial Sequence
  Description of Artificial Sequence: Synthetic oligonucleotide
  Target: APOC3; (-) strand; PAM type: NRG; PAM sequence: GAG
gagagacctggcagggtgct

SEQ ID NO: 6433 - DNA, 20 bp, Artificial Sequence
  Description of Artificial Sequence: Synthetic oligonucleotide
  Target: APOC3; (-) strand; PAM type: NRG; PAM sequence: GGG
gtgggtagagagacctggca

SEQ ID NO: 6434 - DNA, 20 bp, Artificial Sequence
  Description of Artificial Sequence: Synthetic oligonucleotide
  Target: APOC3; (-) strand; PAM type: NRG; PAM sequence: AGG
tgtgggtagagagacctggc

SEQ ID NO: 6435 - DNA, 20 bp, Artificial Sequence
  Description of Artificial Sequence: Synthetic oligonucleotide
  Target: APOC3; (-) strand; PAM type: NRG; PAM sequence: CAG
atgtgggtagagagacctgg

SEQ ID NO: 6436 - DNA, 20 bp, Artificial Sequence
  Description of Artificial Sequence: Synthetic oligonucleotide
  Target: APOC3; (-) strand; PAM type: NRG; PAM sequence: TGG
gacatgtgggtagagagacc

SEQ ID NO: 6437 - DNA, 20 bp, Artificial Sequence
  Description of Artificial Sequence: Synthetic oligonucleotide
  Target: APOC3; (-) strand; PAM type: NRG; PAM sequence: GAG
ggtcaggacatgtgggtaga

SEQ ID NO: 6438 - DNA, 20 bp, Artificial Sequence
  Description of Artificial Sequence: Synthetic oligonucleotide
  Target: APOC3; (-) strand; PAM type: NRG; PAM sequence: GAG
gaggtcaggacatgtgggta

SEQ ID NO: 6439 - DNA, 20 bp, Artificial Sequence
  Description of Artificial Sequence: Synthetic oligonucleotide
  Target: APOC3; (-) strand; PAM type: NRG; PAM sequence: TAG
gggaggtcaggacatgtggg

SEQ ID NO: 6440 - DNA, 20 bp, Artificial Sequence
  Description of Artificial Sequence: Synthetic oligonucleotide
  Target: APOC3; (-) strand; PAM type: NRG; PAM sequence: GGG
ccagggaggtcaggacatgt

SEQ ID NO: 6441 - DNA, 20 bp, Artificial Sequence
  Description of Artificial Sequence: Synthetic oligonucleotide
  Target: APOC3; (-) strand; PAM type: NRG; PAM sequence: TGG
cccagggaggtcaggacatg

SEQ ID NO: 6442 - DNA, 20 bp, Artificial Sequence
  Description of Artificial Sequence: Synthetic oligonucleotide
  Target: APOC3; (-) strand; PAM type: NRG; PAM sequence: AGG
gcaacggacccagggaggtc

SEQ ID NO: 6443 - DNA, 20 bp, Artificial Sequence
  Description of Artificial Sequence: Synthetic oligonucleotide
  Target: APOC3; (-) strand; PAM type: NRG; PAM sequence: CAG
ggcaacggacccagggaggt

SEQ ID NO: 6444 - DNA, 20 bp, Artificial Sequence
  Description of Artificial Sequence: Synthetic oligonucleotide
  Target: APOC3; (-) strand; PAM type: NRG; PAM sequence: AGG
gcatggcaacggacccaggg

SEQ ID NO: 6445 - DNA, 20 bp, Artificial Sequence
  Description of Artificial Sequence: Synthetic oligonucleotide
  Target: APOC3; (-) strand; PAM type: NRG; PAM sequence: GAG
cgcatggcaacggacccagg

SEQ ID NO: 6446 - DNA, 20 bp, Artificial Sequence
  Description of Artificial Sequence: Synthetic oligonucleotide
  Target: APOC3; (-) strand; PAM type: NRG; PAM sequence: GGG
cccgcatggcaacggaccca

SEQ ID NO: 6447 - DNA, 20 bp, Artificial Sequence
  Description of Artificial Sequence: Synthetic oligonucleotide
  Target: APOC3; (-) strand; PAM type: NRG; PAM sequence: AGG
tcccgcatggcaacggaccc

SEQ ID NO: 6448 - DNA, 20 bp, Artificial Sequence
  Description of Artificial Sequence: Synthetic oligonucleotide
  Target: APOC3; (-) strand; PAM type: NRG; PAM sequence: CAG
ctcccgcatggcaacggacc

SEQ ID NO: 6449 - DNA, 20 bp, Artificial Sequence
  Description of Artificial Sequence: Synthetic oligonucleotide
  Target: APOC3; (-) strand; PAM type: NRG; PAM sequence: CGG
ctctctctcccgcatggcaa

SEQ ID NO: 6450 - DNA, 20 bp, Artificial Sequence
  Description of Artificial Sequence: Synthetic oligonucleotide
  Target: APOC3; (-) strand; PAM type: NRG; PAM sequence: TGG
cctggcctctctctcccgca

SEQ ID NO: 6451 - DNA, 20 bp, Artificial Sequence
  Description of Artificial Sequence: Synthetic oligonucleotide
  Target: APOC3; (-) strand; PAM type: NRG; PAM sequence: TGG
gcagagggtctggaggagcc

SEQ ID NO: 6452 - DNA, 20 bp, Artificial Sequence
  Description of Artificial Sequence: Synthetic oligonucleotide
  Target: APOC3; (-) strand; PAM type: NRG; PAM sequence: GAG
tctctgcagagggtctggag

SEQ ID NO: 6453 - DNA, 20 bp, Artificial Sequence
  Description of Artificial Sequence: Synthetic oligonucleotide
  Target: APOC3; (-) strand; PAM type: NRG; PAM sequence: AGG
catctctgcagagggtctgg

SEQ ID NO: 6454 - DNA, 20 bp, Artificial Sequence
  Description of Artificial Sequence: Synthetic oligonucleotide
  Target: APOC3; (-) strand; PAM type: NRG; PAM sequence: GAG
ccatctctgcagagggtctg

SEQ ID NO: 6455 - DNA, 20 bp, Artificial Sequence
  Description of Artificial Sequence: Synthetic oligonucleotide
  Target: APOC3; (-) strand; PAM type: NRG; PAM sequence: TGG
ttccatctctgcagagggtc

SEQ ID NO: 6456 - DNA, 20 bp, Artificial Sequence
  Description of Artificial Sequence: Synthetic oligonucleotide
  Target: APOC3; (-) strand; PAM type: NRG; PAM sequence: GGG
agcctttccatctctgcaga

SEQ ID NO: 6457 - DNA, 20 bp, Artificial Sequence
  Description of Artificial Sequence: Synthetic oligonucleotide
  Target: APOC3; (-) strand; PAM type: NRG; PAM sequence: AGG
aagcctttccatctctgcag

SEQ ID NO: 6458 - DNA, 20 bp, Artificial Sequence
  Description of Artificial Sequence: Synthetic oligonucleotide
  Target: APOC3; (-) strand; PAM type: NRG; PAM sequence: GAG
caagcctttccatctctgca

SEQ ID NO: 6459 - DNA, 20 bp, Artificial Sequence
  Description of Artificial Sequence: Synthetic oligonucleotide
  Target: APOC3; (-) strand; PAM type: NRG; PAM sequence: CAG
tccaagcctttccatctctg

SEQ ID NO: 6460 - DNA, 20 bp, Artificial Sequence
  Description of Artificial Sequence: Synthetic oligonucleotide
  Target: APOC3; (-) strand; PAM type: NRG; PAM sequence: AAG
cccgtggccccagaccctcc

SEQ ID NO: 6461 - DNA, 20 bp, Artificial Sequence
  Description of Artificial Sequence: Synthetic oligonucleotide
  Target: APOC3; (-) strand; PAM type: NRG; PAM sequence: CAG
ctggcggggtcccgtggccc

SEQ ID NO: 6462 - DNA, 20 bp, Artificial Sequence
  Description of Artificial Sequence: Synthetic oligonucleotide
  Target: APOC3; (-) strand; PAM type: NRG; PAM sequence: TGG
aatgggctggcggggtcccg

SEQ ID NO: 6463 - DNA, 20 bp, Artificial Sequence
  Description of Artificial Sequence: Synthetic oligonucleotide
  Target: APOC3; (-) strand; PAM type: NRG; PAM sequence: GGG
tgtgctagaatgggctggcg

SEQ ID NO: 6464 - DNA, 20 bp, Artificial Sequence
  Description of Artificial Sequence: Synthetic oligonucleotide
  Target: APOC3; (-) strand; PAM type: NRG; PAM sequence: GGG
gtgtgctagaatgggctggc

SEQ ID NO: 6465 - DNA, 20 bp, Artificial Sequence
  Description of Artificial Sequence: Synthetic oligonucleotide
  Target: APOC3; (-) strand; PAM type: NRG; PAM sequence: CGG
ggtgtgctagaatgggctgg

SEQ ID NO: 6466 - DNA, 20 bp, Artificial Sequence
  Description of Artificial Sequence: Synthetic oligonucleotide
  Target: APOC3; (-) strand; PAM type: NRG; PAM sequence: TGG
ccgggtgtgctagaatgggc

SEQ ID NO: 6467 - DNA, 20 bp, Artificial Sequence
  Description of Artificial Sequence: Synthetic oligonucleotide
  Target: APOC3; (-) strand; PAM type: NRG; PAM sequence: GGG
gggcccgggtgtgctagaat

SEQ ID NO: 6468 - DNA, 20 bp, Artificial Sequence
  Description of Artificial Sequence: Synthetic oligonucleotide
  Target: APOC3; (-) strand; PAM type: NRG; PAM sequence: TGG
tgggcccgggtgtgctagaa

SEQ ID NO: 6469 - DNA, 20 bp, Artificial Sequence
  Description of Artificial Sequence: Synthetic oligonucleotide
  Target: APOC3; (-) strand; PAM type: NRG; PAM sequence: TAG
gtctatgggcccgggtgtgc

SEQ ID NO: 6470 - DNA, 20 bp, Artificial Sequence
  Description of Artificial Sequence: Synthetic oligonucleotide
  Target: APOC3; (-) strand; PAM type: NRG; PAM sequence: GGG
gcaacaaggtctatgggccc

SEQ ID NO: 6471 - DNA, 20 bp, Artificial Sequence
  Description of Artificial Sequence: Synthetic oligonucleotide
  Target: APOC3; (-) strand; PAM type: NRG; PAM sequence: CGG
ggcaacaaggtctatgggcc

SEQ ID NO: 6472 - DNA, 20 bp, Artificial Sequence
  Description of Artificial Sequence: Synthetic oligonucleotide
  Target: APOC3; (-) strand; PAM type: NRG; PAM sequence: GGG
gggcaggcaacaaggtctat

SEQ ID NO: 6473 - DNA, 20 bp, Artificial Sequence
  Description of Artificial Sequence: Synthetic oligonucleotide
  Target: APOC3; (-) strand; PAM type: NRG; PAM sequence: TGG
ggggcaggcaacaaggtcta

SEQ ID NO: 6474 - DNA, 20 bp, Artificial Sequence
  Description of Artificial Sequence: Synthetic oligonucleotide
  Target: APOC3; (-) strand; PAM type: NRG; PAM sequence: AGG
ccaggcaggggcaggcaaca

SEQ ID NO: 6475 - DNA, 20 bp, Artificial Sequence
  Description of Artificial Sequence: Synthetic oligonucleotide
  Target: APOC3; (-) strand; PAM type: NRG; PAM sequence: AAG
tccaggcaggggcaggcaac

SEQ ID NO: 6476 - DNA, 20 bp, Artificial Sequence
  Description of Artificial Sequence: Synthetic oligonucleotide
  Target: APOC3; (-) strand; PAM type: NRG; PAM sequence: AGG
acccagatccaggcaggggc

SEQ ID NO: 6477 - DNA, 20 bp, Artificial Sequence
  Description of Artificial Sequence: Synthetic oligonucleotide
  Target: APOC3; (-) strand; PAM type: NRG; PAM sequence: CAG
gacccagatccaggcagggg

SEQ ID NO: 6478 - DNA, 20 bp, Artificial Sequence
  Description of Artificial Sequence: Synthetic oligonucleotide
  Target: APOC3; (-) strand; PAM type: NRG; PAM sequence: GGG
ggggacccagatccaggcag

SEQ ID NO: 6479 - DNA, 20 bp, Artificial Sequence
  Description of Artificial Sequence: Synthetic oligonucleotide
  Target: APOC3; (-) strand; PAM type: NRG; PAM sequence: GGG
tggggacccagatccaggca

SEQ ID NO: 6480 - DNA, 20 bp, Artificial Sequence
  Description of Artificial Sequence: Synthetic oligonucleotide
  Target: APOC3; (-) strand; PAM type: NRG; PAM sequence: AGG
gtggggacccagatccaggc

SEQ ID NO: 6481 - DNA, 20 bp, Artificial Sequence
  Description of Artificial Sequence: Synthetic oligonucleotide
  Target: APOC3; (-) strand; PAM type: NRG; PAM sequence: CAG
agtggggacccagatccagg

SEQ ID NO: 6482 - DNA, 20 bp, Artificial Sequence
  Description of Artificial Sequence: Synthetic oligonucleotide
  Target: APOC3; (-) strand; PAM type: NRG; PAM sequence: AGG
cacagtggggacccagatcc

SEQ ID NO: 6483 - DNA, 20 bp, Artificial Sequence
  Description of Artificial Sequence: Synthetic oligonucleotide
  Target: APOC3; (-) strand; PAM type: NRG; PAM sequence: CAG
gcacagtggggacccagatc

SEQ ID NO: 6484 - DNA, 20 bp, Artificial Sequence
  Description of Artificial Sequence: Synthetic oligonucleotide
  Target: APOC3; (-) strand; PAM type: NRG; PAM sequence: CAG
gcaaaggcacagtggggacc

SEQ ID NO: 6485 - DNA, 20 bp, Artificial Sequence
  Description of Artificial Sequence: Synthetic oligonucleotide
  Target: APOC3; (-) strand; PAM type: NRG; PAM sequence: GGG
ccagaggcaaaggcacagtg

SEQ ID NO: 6486 - DNA, 20 bp, Artificial Sequence
  Description of Artificial Sequence: Synthetic oligonucleotide
  Target: APOC3; (-) strand; PAM type: NRG; PAM sequence: GGG
cccagaggcaaaggcacagt

SEQ ID NO: 6487 - DNA, 20 bp, Artificial Sequence
  Description of Artificial Sequence: Synthetic oligonucleotide
  Target: APOC3; (-) strand; PAM type: NRG; PAM sequence: TGG
ccccagaggcaaaggcacag

SEQ ID NO: 6488 - DNA, 20 bp, Artificial Sequence
  Description of Artificial Sequence: Synthetic oligonucleotide
  Target: APOC3; (-) strand; PAM type: NRG; PAM sequence: CAG
tagccccagaggcaaaggca

SEQ ID NO: 6489 - DNA, 20 bp, Artificial Sequence
  Description of Artificial Sequence: Synthetic oligonucleotide
  Target: APOC3; (-) strand; PAM type: NRG; PAM sequence: AGG
ctccatagccccagaggcaa

SEQ ID NO: 6490 - DNA, 20 bp, Artificial Sequence
  Description of Artificial Sequence: Synthetic oligonucleotide
  Target: APOC3; (-) strand; PAM type: NRG; PAM sequence: AAG
gctccatagccccagaggca

SEQ ID NO: 6491 - DNA, 20 bp, Artificial Sequence
  Description of Artificial Sequence: Synthetic oligonucleotide
  Target: APOC3; (-) strand; PAM type: NRG; PAM sequence: AGG
ggcctgctccatagccccag

SEQ ID NO: 6492 - DNA, 20 bp, Artificial Sequence
  Description of Artificial Sequence: Synthetic oligonucleotide
  Target: APOC3; (-) strand; PAM type: NRG; PAM sequence: GAG
cggcctgctccatagcccca

SEQ ID NO: 6493 - DNA, 20 bp, Artificial Sequence
  Description of Artificial Sequence: Synthetic oligonucleotide
  Target: APOC3; (-) strand; PAM type: NRG; PAM sequence: CAG
tgcggcctgctccatagccc

SEQ ID NO: 6494 - DNA, 20 bp, Artificial Sequence
  Description of Artificial Sequence: Synthetic oligonucleotide
  Target: APOC3; (-) strand; PAM type: NRG; PAM sequence: TAG
ttctgctgcggcctgctcca

SEQ ID NO: 6495 - DNA, 20 bp, Artificial Sequence
  Description of Artificial Sequence: Synthetic oligonucleotide
  Target: APOC3; (-) strand; PAM type: NRG; PAM sequence: CGG
tgccctttcctcttctgctg

SEQ ID NO: 6496 - DNA, 20 bp, Artificial Sequence
  Description of Artificial Sequence: Synthetic oligonucleotide
  Target: APOC3; (-) strand; PAM type: NRG; PAM sequence: GGG
cactggaggatttggtattg

SEQ ID NO: 6497 - DNA, 20 bp, Artificial Sequence
  Description of Artificial Sequence: Synthetic oligonucleotide
  Target: APOC3; (-) strand; PAM type: NRG; PAM sequence: GGG
tcactggaggatttggtatt

SEQ ID NO: 6498 - DNA, 20 bp, Artificial Sequence
  Description of Artificial Sequence: Synthetic oligonucleotide
  Target: APOC3; (-) strand; PAM type: NRG; PAM sequence: TGG
gtcactggaggatttggtat

SEQ ID NO: 6499 - DNA, 20 bp, Artificial Sequence
  Description of Artificial Sequence: Synthetic oligonucleotide
  Target: APOC3; (-) strand; PAM type: NRG; PAM sequence: TGG
gaagtggtcactggaggatt

SEQ ID NO: 6500 - DNA, 20 bp, Artificial Sequence
  Description of Artificial Sequence: Synthetic oligonucleotide
  Target: APOC3; (-) strand; PAM type: NRG; PAM sequence: AGG
ggtgaagaagtggtcactgg

SEQ ID NO: 6501 - DNA, 20 bp, Artificial Sequence
  Description of Artificial Sequence: Synthetic oligonucleotide
  Target: APOC3; (-) strand; PAM type: NRG; PAM sequence: GAG
aggtgaagaagtggtcactg

SEQ ID NO: 6502 - DNA, 20 bp, Artificial Sequence
  Description of Artificial Sequence: Synthetic oligonucleotide
  Target: APOC3; (-) strand; PAM type: NRG; PAM sequence: TGG
gaaggtgaagaagtggtcac

SEQ ID NO: 6503 - DNA, 20 bp, Artificial Sequence
  Description of Artificial Sequence: Synthetic oligonucleotide
  Target: APOC3; (-) strand; PAM type: NRG; PAM sequence: TGG
tggggtagaaggtgaagaag

SEQ ID NO: 6504 - DNA, 20 bp, Artificial Sequence
  Description of Artificial Sequence: Synthetic oligonucleotide
  Target: APOC3; (-) strand; PAM type: NRG; PAM sequence: AAG
tggtggggtagaaggtgaag

SEQ ID NO: 6505 - DNA, 20 bp, Artificial Sequence
  Description of Artificial Sequence: Synthetic oligonucleotide
  Target: APOC3; (-) strand; PAM type: NRG; PAM sequence: AAG
tggtggtggggtagaaggtg

SEQ ID NO: 6506 - DNA, 20 bp, Artificial Sequence
  Description of Artificial Sequence: Synthetic oligonucleotide
  Target: APOC3; (-) strand; PAM type: NRG; PAM sequence: AGG
gactttggtggtggggtaga

SEQ ID NO: 6507 - DNA, 20 bp, Artificial Sequence
  Description of Artificial Sequence: Synthetic oligonucleotide
  Target: APOC3; (-) strand; PAM type: NRG; PAM sequence: AAG
agactttggtggtggggtag

SEQ ID NO: 6508 - DNA, 20 bp, Artificial Sequence
  Description of Artificial Sequence: Synthetic oligonucleotide
  Target: APOC3; (-) strand; PAM type: NRG; PAM sequence: TAG
tgcagactttggtggtgggg

SEQ ID NO: 6509 - DNA, 20 bp, Artificial Sequence
  Description of Artificial Sequence: Synthetic oligonucleotide
  Target: APOC3; (-) strand; PAM type: NRG; PAM sequence: GGG
tcctgcagactttggtggtg

SEQ ID NO: 6510 - DNA, 20 bp, Artificial Sequence
  Description of Artificial Sequence: Synthetic oligonucleotide
  Target: APOC3; (-) strand; PAM type: NRG; PAM sequence: GGG
ctcctgcagactttggtggt

SEQ ID NO: 6511 - DNA, 20 bp, Artificial Sequence
  Description of Artificial Sequence: Synthetic oligonucleotide
  Target: APOC3; (-) strand; PAM type: NRG; PAM sequence: TGG
tctcctgcagactttggtgg

SEQ ID NO: 6512 - DNA, 20 bp, Artificial Sequence
  Description of Artificial Sequence: Synthetic oligonucleotide
  Target: APOC3; (-) strand; PAM type: NRG; PAM sequence: TGG
aagtctcctgcagactttgg

SEQ ID NO: 6513 - DNA, 20 bp, Artificial Sequence
  Description of Artificial Sequence: Synthetic oligonucleotide
  Target: APOC3; (-) strand; PAM type: NRG; PAM sequence: TGG
ctcaagtctcctgcagactt

SEQ ID NO: 6514 - DNA, 20 bp, Artificial Sequence
  Description of Artificial Sequence: Synthetic oligonucleotide
  Target: APOC3; (-) strand; PAM type: NRG; PAM sequence: CAG
aacctgtctcaagtctcctg

SEQ ID NO: 6515 - DNA, 20 bp, Artificial Sequence
  Description of Artificial Sequence: Synthetic oligonucleotide
  Target: APOC3; (-) strand; PAM type: NRG; PAM sequence: AAG
gcccagaacaaacctgtctc

SEQ ID NO: 6516 - DNA, 20 bp, Artificial Sequence
  Description of Artificial Sequence: Synthetic oligonucleotide
  Target: APOC3; (-) strand; PAM type: NRG; PAM sequence: CAG
agaggcatcagtcacacgcc

SEQ ID NO: 6517 - DNA, 20 bp, Artificial Sequence
  Description of Artificial Sequence: Synthetic oligonucleotide
  Target: APOC3; (-) strand; PAM type: NRG; PAM sequence: CAG
tgagacccctatagaggcat

SEQ ID NO: 6518 - DNA, 20 bp, Artificial Sequence
  Description of Artificial Sequence: Synthetic oligonucleotide
  Target: APOC3; (-) strand; PAM type: NRG; PAM sequence: AGG
gagcactgagacccctatag

SEQ ID NO: 6519 - DNA, 20 bp, Artificial Sequence
  Description of Artificial Sequence: Synthetic oligonucleotide
  Target: APOC3; (-) strand; PAM type: NRG; PAM sequence: GAG
agagcactgagacccctata

SEQ ID NO: 6520 - DNA, 20 bp, Artificial Sequence
  Description of Artificial Sequence: Synthetic oligonucleotide
  Target: APOC3; (-) strand; PAM type: NRG; PAM sequence: TAG
ttagagcactgagaccccta

SEQ ID NO: 6521 - DNA, 20 bp, Artificial Sequence
  Description of Artificial Sequence: Synthetic oligonucleotide
  Target: APOC3; (-) strand; PAM type: NRG; PAM sequence: GAG
accagacggcttagagcact

SEQ ID NO: 6522 - DNA, 20 bp, Artificial Sequence
  Description of Artificial Sequence: Synthetic oligonucleotide
  Target: APOC3; (-) strand; PAM type: NRG; PAM sequence: GAG
ggcaaataccagacggctta

SEQ ID NO: 6523 - DNA, 20 bp, Artificial Sequence
  Description of Artificial Sequence: Synthetic oligonucleotide
  Target: APOC3; (-) strand; PAM type: NRG; PAM sequence: TAG
caggcaaataccagacggct

SEQ ID NO: 6524 - DNA, 20 bp, Artificial Sequence
  Description of Artificial Sequence: Synthetic oligonucleotide
  Target: APOC3; (-) strand; PAM type: NRG; PAM sequence: CGG
caccccaggcaaataccaga

SEQ ID NO: 6525 - DNA, 20 bp, Artificial Sequence
  Description of Artificial Sequence: Synthetic oligonucleotide
  Target: APOC3; (-) strand; PAM type: NRG; PAM sequence: CAG
cacacaccccaggcaaatac

SEQ ID NO: 6526 - DNA, 20 bp, Artificial Sequence
  Description of Artificial Sequence: Synthetic oligonucleotide
  Target: APOC3; (-) strand; PAM type: NRG; PAM sequence: AGG
tccaggtcttcacacacccc

SEQ ID NO: 6527 - DNA, 20 bp, Artificial Sequence
  Description of Artificial Sequence: Synthetic oligonucleotide
  Target: APOC3; (-) strand; PAM type: NRG; PAM sequence: CAG
atccaggtcttcacacaccc

SEQ ID NO: 6528 - DNA, 20 bp, Artificial Sequence
  Description of Artificial Sequence: Synthetic oligonucleotide
  Target: APOC3; (-) strand; PAM type: NRG; PAM sequence: AGG
aaggctgggaaccttaatcc

SEQ ID NO: 6529 - DNA, 20 bp, Artificial Sequence
  Description of Artificial Sequence: Synthetic oligonucleotide
  Target: APOC3; (-) strand; PAM type: NRG; PAM sequence: CAG
taaggctgggaaccttaatc

SEQ ID NO: 6530 - DNA, 20 bp, Artificial Sequence
  Description of Artificial Sequence: Synthetic oligonucleotide
  Target: APOC3; (-) strand; PAM type: NRG; PAM sequence: GGG
agcccattagtagtaaggct

SEQ ID NO: 6531 - DNA, 20 bp, Artificial Sequence
  Description of Artificial Sequence: Synthetic oligonucleotide
  Target: APOC3; (-) strand; PAM type: NRG; PAM sequence: TGG
cagcccattagtagtaaggc

SEQ ID NO: 6532 - DNA, 20 bp, Artificial Sequence
  Description of Artificial Sequence: Synthetic oligonucleotide
  Target: APOC3; (-) strand; PAM type: NRG; PAM sequence: AGG
tgcacagcccattagtagta

SEQ ID NO: 6533 - DNA, 20 bp, Artificial Sequence
  Description of Artificial Sequence: Synthetic oligonucleotide
  Target: APOC3; (-) strand; PAM type: NRG; PAM sequence: AAG
gtgcacagcccattagtagt

SEQ ID NO: 6534 - DNA, 20 bp, Artificial Sequence
  Description of Artificial Sequence: Synthetic oligonucleotide
  Target: APOC3; (-) strand; PAM type: NRG; PAM sequence: TAG
ccaagtgcacagcccattag

SEQ ID NO: 6535 - DNA, 20 bp, Artificial Sequence
  Description of Artificial Sequence: Synthetic oligonucleotide
  Target: APOC3; (-) strand; PAM type: NRG; PAM sequence: TAG
gctccaagtgcacagcccat

SEQ ID NO: 6536 - DNA, 20 bp, Artificial Sequence
  Description of Artificial Sequence: Synthetic oligonucleotide
  Target: APOC3; (-) strand; PAM type: NRG; PAM sequence: CAG
ctctaagggctccaagtgca

SEQ ID NO: 6537 - DNA, 20 bp, Artificial Sequence
  Description of Artificial Sequence: Synthetic oligonucleotide
  Target: APOC3; (-) strand; PAM type: NRG; PAM sequence: AAG
cctaaggctctaagggctcc

SEQ ID NO: 6538 - DNA, 20 bp, Artificial Sequence
  Description of Artificial Sequence: Synthetic oligonucleotide
  Target: APOC3; (-) strand; PAM type: NRG; PAM sequence: GGG
ttagaaacctaaggctctaa

SEQ ID NO: 6539 - DNA, 20 bp, Artificial Sequence
  Description of Artificial Sequence: Synthetic oligonucleotide
  Target: APOC3; (-) strand; PAM type: NRG; PAM sequence: AGG
gttagaaacctaaggctcta

SEQ ID NO: 6540 - DNA, 20 bp, Artificial Sequence
  Description of Artificial Sequence: Synthetic oligonucleotide
  Target: APOC3; (-) strand; PAM type: NRG; PAM sequence: AAG
ggttagaaacctaaggctct

SEQ ID NO: 6541 - DNA, 20 bp, Artificial Sequence
  Description of Artificial Sequence: Synthetic oligonucleotide
  Target: APOC3; (-) strand; PAM type: NRG; PAM sequence: AGG
ttttataggttagaaaccta

SEQ ID NO: 6542 - DNA, 20 bp, Artificial Sequence
  Description of Artificial Sequence: Synthetic oligonucleotide
  Target: APOC3; (-) strand; PAM type: NRG; PAM sequence: AAG
attttataggttagaaacct

SEQ ID NO: 6543 - DNA, 20 bp, Artificial Sequence
  Description of Artificial Sequence: Synthetic oligonucleotide
  Target: APOC3; (-) strand; PAM type: NRG; PAM sequence: TAG
gttaagtccattttataggt

SEQ ID NO: 6544 - DNA, 20 bp, Artificial Sequence
  Description of Artificial Sequence: Synthetic oligonucleotide
  Target: APOC3; (-) strand; PAM type: NRG; PAM sequence: AGG
agacgttaagtccattttat

SEQ ID NO: 6545 - DNA, 20 bp, Artificial Sequence
  Description of Artificial Sequence: Synthetic oligonucleotide
  Target: APOC3; (-) strand; PAM type: NRG; PAM sequence: TAG
tagacgttaagtccatttta

SEQ ID NO: 6546 - DNA, 20 bp, Artificial Sequence
  Description of Artificial Sequence: Synthetic oligonucleotide
  Target: APOC3; (-) strand; PAM type: NRG; PAM sequence: AAG
aaccctgtgaagtagacgtt

SEQ ID NO: 6547 - DNA, 20 bp, Artificial Sequence
  Description of Artificial Sequence: Synthetic oligonucleotide
  Target: APOC3; (-) strand; PAM type: NRG; PAM sequence: TAG
gcaaatagaaccctgtgaag

SEQ ID NO: 6548 - DNA, 20 bp, Artificial Sequence
  Description of Artificial Sequence: Synthetic oligonucleotide
  Target: APOC3; (-) strand; PAM type: NRG; PAM sequence: AAG
aatgcaaatagaaccctgtg

SEQ ID NO: 6549 - DNA, 20 bp, Artificial Sequence
  Description of Artificial Sequence: Synthetic oligonucleotide
  Target: APOC3; (-) strand; PAM type: NRG; PAM sequence: TAG
gttttctgttaaaatgcaaa

SEQ ID NO: 6550 - DNA, 20 bp, Artificial Sequence
  Description of Artificial Sequence: Synthetic oligonucleotide
  Target: APOC3; (-) strand; PAM type: NRG; PAM sequence: AAG
gagattcattcctttgactt

SEQ ID NO: 6551 - DNA, 20 bp, Artificial Sequence
  Description of Artificial Sequence: Synthetic oligonucleotide
  Target: APOC3; (-) strand; PAM type: NRG; PAM sequence: GAG
gagagagagagagagagaga

SEQ ID NO: 6552 - DNA, 20 bp, Artificial Sequence
  Description of Artificial Sequence: Synthetic oligonucleotide
  Target: APOC3; (-) strand; PAM type: NRG; PAM sequence: GAG
aagagagagagagagagaga

SEQ ID NO: 6553 - DNA, 20 bp, Artificial Sequence
  Description of Artificial Sequence: Synthetic oligonucleotide
  Target: APOC3; (-) strand; PAM type: NRG; PAM sequence: GAG
aaaagagagagagagagaga

SEQ ID NO: 6554 - DNA, 20 bp, Artificial Sequence
  Description of Artificial Sequence: Synthetic oligonucleotide
  Target: APOC3; (-) strand; PAM type: NRG; PAM sequence: GAG
aaaaaagagagagagagaga

SEQ ID NO: 6555 - DNA, 20 bp, Artificial Sequence
  Description of Artificial Sequence: Synthetic oligonucleotide
  Target: APOC3; (-) strand; PAM type: NRG; PAM sequence: GAG
ctaaaaaagagagagagaga

SEQ ID NO: 6556 - DNA, 20 bp, Artificial Sequence
  Description of Artificial Sequence: Synthetic oligonucleotide
  Target: APOC3; (-) strand; PAM type: NRG; PAM sequence: GAG
gtctaaaaaagagagagaga

SEQ ID NO: 6557 - DNA, 20 bp, Artificial Sequence
  Description of Artificial Sequence: Synthetic oligonucleotide
  Target: APOC3; (-) strand; PAM type: NRG; PAM sequence: GAG
tggtctaaaaaagagagaga

SEQ ID NO: 6558 - DNA, 20 bp, Artificial Sequence
  Description of Artificial Sequence: Synthetic oligonucleotide
  Target: APOC3; (-) strand; PAM type: NRG; PAM sequence: GAG
cttggtctaaaaaagagaga

SEQ ID NO: 6559 - DNA, 20 bp, Artificial Sequence
  Description of Artificial Sequence: Synthetic oligonucleotide
  Target: APOC3; (-) strand; PAM type: NRG; PAM sequence: GAG
gacttggtctaaaaaagaga

SEQ ID NO: 6560 - DNA, 20 bp, Artificial Sequence
  Description of Artificial Sequence: Synthetic oligonucleotide
  Target: APOC3; (-) strand; PAM type: NRG; PAM sequence: GAG
tagacttggtctaaaaaaga

SEQ ID NO: 6561 - DNA, 20 bp, Artificial Sequence
  Description of Artificial Sequence: Synthetic oligonucleotide
  Target: APOC3; (-) strand; PAM type: NRG; PAM sequence: GAG
gctagacttggtctaaaaaa

SEQ ID NO: 6562 - DNA, 20 bp, Artificial Sequence
  Description of Artificial Sequence: Synthetic oligonucleotide
  Target: APOC3; (-) strand; PAM type: NRG; PAM sequence: AAG
gagctagacttggtctaaaa

SEQ ID NO: 6563 - DNA, 20 bp, Artificial Sequence
  Description of Artificial Sequence: Synthetic oligonucleotide
  Target: APOC3; (-) strand; PAM type: NRG; PAM sequence: TGG
tccagtgacagagctagact

SEQ ID NO: 6564 - DNA, 20 bp, Artificial Sequence
  Description of Artificial Sequence: Synthetic oligonucleotide
  Target: APOC3; (-) strand; PAM type: NRG; PAM sequence: TAG
ttgcactccagtgacagagc

SEQ ID NO: 6565 - DNA, 20 bp, Artificial Sequence
  Description of Artificial Sequence: Synthetic oligonucleotide
  Target: APOC3; (-) strand; PAM type: NRG; PAM sequence: GAG
accattgcactccagtgaca

SEQ ID NO: 6566 - DNA, 20 bp, Artificial Sequence
  Description of Artificial Sequence: Synthetic oligonucleotide
  Target: APOC3; (-) strand; PAM type: NRG; PAM sequence: CAG
gcaccattgcactccagtga

SEQ ID NO: 6567 - DNA, 20 bp, Artificial Sequence
  Description of Artificial Sequence: Synthetic oligonucleotide
  Target: APOC3; (-) strand; PAM type: NRG; PAM sequence: CAG
gagatcgcaccattgcactc

SEQ ID NO: 6568 - DNA, 20 bp, Artificial Sequence
  Description of Artificial Sequence: Synthetic oligonucleotide
  Target: APOC3; (-) strand; PAM type: NRG; PAM sequence: GAG
ggtggaggttgcagtgagca

SEQ ID NO: 6569 - DNA, 20 bp, Artificial Sequence
  Description of Artificial Sequence: Synthetic oligonucleotide
  Target: APOC3; (-) strand; PAM type: NRG; PAM sequence: CAG
gaggtggaggttgcagtgag

SEQ ID NO: 6570 - DNA, 20 bp, Artificial Sequence
  Description of Artificial Sequence: Synthetic oligonucleotide
  Target: APOC3; (-) strand; PAM type: NRG; PAM sequence: GAG
ccggaggtggaggttgcagt

SEQ ID NO: 6571 - DNA, 20 bp, Artificial Sequence
  Description of Artificial Sequence: Synthetic oligonucleotide
  Target: APOC3; (-) strand; PAM type: NRG; PAM sequence: CAG
aaccccggaggtggaggttg

SEQ ID NO: 6572 - DNA, 20 bp, Artificial Sequence
  Description of Artificial Sequence: Synthetic oligonucleotide
  Target: APOC3; (-) strand; PAM type: NRG; PAM sequence: AGG
tgcttgaaccccggaggtgg

SEQ ID NO: 6573 - DNA, 20 bp, Artificial Sequence
  Description of Artificial Sequence: Synthetic oligonucleotide
  Target: APOC3; (-) strand; PAM type: NRG; PAM sequence: GAG
ttgcttgaaccccggaggtg

SEQ ID NO: 6574 - DNA, 20 bp, Artificial Sequence
  Description of Artificial Sequence: Synthetic oligonucleotide
  Target: APOC3; (-) strand; PAM type: NRG; PAM sequence: TGG
aattgcttgaaccccggagg

SEQ ID NO: 6575 - DNA, 20 bp, Artificial Sequence
  Description of Artificial Sequence: Synthetic oligonucleotide
  Target: APOC3; (-) strand; PAM type: NRG; PAM sequence: AGG
gagaattgcttgaaccccgg

SEQ ID NO: 6576 - DNA, 20 bp, Artificial Sequence
  Description of Artificial Sequence: Synthetic oligonucleotide
  Target: APOC3; (-) strand; PAM type: NRG; PAM sequence: GAG
cgagaattgcttgaaccccg

SEQ ID NO: 6577 - DNA, 20 bp, Artificial Sequence
  Description of Artificial Sequence: Synthetic oligonucleotide
  Target: APOC3; (-) strand; PAM type: NRG; PAM sequence: CGG
cacgagaattgcttgaaccc

SEQ ID NO: 6578 - DNA, 20 bp, Artificial Sequence
  Description of Artificial Sequence: Synthetic oligonucleotide
  Target: APOC3; (-) strand; PAM type: NRG; PAM sequence: GAG
tactcaggaggctgaggcac

SEQ ID NO: 6579 - DNA, 20 bp, Artificial Sequence
  Description of Artificial Sequence: Synthetic oligonucleotide
  Target: APOC3; (-) strand; PAM type: NRG; PAM sequence: AGG
cccagctactcaggaggctg

SEQ ID NO: 6580 - DNA, 20 bp, Artificial Sequence
  Description of Artificial Sequence: Synthetic oligonucleotide
  Target: APOC3; (-) strand; PAM type: NRG; PAM sequence: GAG
tcccagctactcaggaggct

SEQ ID NO: 6581 - DNA, 20 bp, Artificial Sequence
  Description of Artificial Sequence: Synthetic oligonucleotide
  Target: APOC3; (-) strand; PAM type: NRG; PAM sequence: AGG
tgtagtcccagctactcagg

SEQ ID NO: 6582 - DNA, 20 bp, Artificial Sequence
  Description of Artificial Sequence: Synthetic oligonucleotide
  Target: APOC3; (-) strand; PAM type: NRG; PAM sequence: GAG
ctgtagtcccagctactcag

SEQ ID NO: 6583 - DNA, 20 bp, Artificial Sequence
  Description of Artificial Sequence: Synthetic oligonucleotide
  Target: APOC3; (-) strand; PAM type: NRG; PAM sequence: AGG
gcctgtagtcccagctactc

SEQ ID NO: 6584 - DNA, 20 bp, Artificial Sequence
  Description of Artificial Sequence: Synthetic oligonucleotide
  Target: APOC3; (-) strand; PAM type: NRG; PAM sequence: CAG
cgcctgtagtcccagctact

SEQ ID NO: 6585 - DNA, 20 bp, Artificial Sequence
  Description of Artificial Sequence: Synthetic oligonucleotide
  Target: APOC3; (-) strand; PAM type: NRG; PAM sequence: CAG
gtgatgcacgcctgtagtcc

SEQ ID NO: 6586 - DNA, 20 bp, Artificial Sequence
  Description of Artificial Sequence: Synthetic oligonucleotide
  Target: APOC3; (-) strand; PAM type: NRG; PAM sequence: TAG
agcatggtgatgcacgcctg

SEQ ID NO: 6587 - DNA, 20 bp, Artificial Sequence
  Description of Artificial Sequence: Synthetic oligonucleotide
  Target: APOC3; (-) strand; PAM type: NRG; PAM sequence: TGG
tacaaaaaattagccgagca

SEQ ID NO: 6588 - DNA, 20 bp, Artificial Sequence
  Description of Artificial Sequence: Synthetic oligonucleotide
  Target: APOC3; (-) strand; PAM type: NRG; PAM sequence: GAG
aaaaatacaaaaaattagcc

SEQ ID NO: 6589 - DNA, 20 bp, Artificial Sequence
  Description of Artificial Sequence: Synthetic oligonucleotide
  Target: APOC3; (-) strand; PAM type: NRG; PAM sequence: TAG
ctactaaaaatacaaaaaat

SEQ ID NO: 6590 - DNA, 20 bp, Artificial Sequence
  Description of Artificial Sequence: Synthetic oligonucleotide
  Target: APOC3; (-) strand; PAM type: NRG; PAM sequence: CAG
ctgggcaacatggcgaaacc

SEQ ID NO: 6591 - DNA, 20 bp, Artificial Sequence
  Description of Artificial Sequence: Synthetic oligonucleotide
  Target: APOC3; (-) strand; PAM type: NRG; PAM sequence: TGG
cgagaccagcctgggcaaca

SEQ ID NO: 6592 - DNA, 20 bp, Artificial Sequence
  Description of Artificial Sequence: Synthetic oligonucleotide
  Target: APOC3; (-) strand; PAM type: NRG; PAM sequence: GGG
caggagttcgagaccagcct

SEQ ID NO: 6593 - DNA, 20 bp, Artificial Sequence
  Description of Artificial Sequence: Synthetic oligonucleotide
  Target: APOC3; (-) strand; PAM type: NRG; PAM sequence: TGG
ccaggagttcgagaccagcc

SEQ ID NO: 6594 - DNA, 20 bp, Artificial Sequence
  Description of Artificial Sequence: Synthetic oligonucleotide
  Target: APOC3; (-) strand; PAM type: NRG; PAM sequence: CAG
tgaggccaggagttcgagac

SEQ ID NO: 6595 - DNA, 20 bp, Artificial Sequence
  Description of Artificial Sequence: Synthetic oligonucleotide
  Target: APOC3; (-) strand; PAM type: NRG; PAM sequence: GAG
atatctgaggccaggagttc

SEQ ID NO: 6596 - DNA, 20 bp, Artificial Sequence
  Description of Artificial Sequence: Synthetic oligonucleotide
  Target: APOC3; (-) strand; PAM type: NRG; PAM sequence: GAG
ggacggatatctgaggccag

SEQ ID NO: 6597 - DNA, 20 bp, Artificial Sequence
  Description of Artificial Sequence: Synthetic oligonucleotide
  Target: APOC3; (-) strand; PAM type: NRG; PAM sequence: AGG
acggacggatatctgaggcc

SEQ ID NO: 6598 - DNA, 20 bp, Artificial Sequence
  Description of Artificial Sequence: Synthetic oligonucleotide
  Target: APOC3; (-) strand; PAM type: NRG; PAM sequence: CAG
gacggacggatatctgaggc

SEQ ID NO: 6599 - DNA, 20 bp, Artificial Sequence
  Description of Artificial Sequence: Synthetic oligonucleotide
  Target: APOC3; (-) strand; PAM type: NRG; PAM sequence: AGG
ctgggacggacggatatctg

SEQ ID NO: 6600 - DNA, 20 bp, Artificial Sequence
  Description of Artificial Sequence: Synthetic oligonucleotide
  Target: APOC3; (-) strand; PAM type: NRG; PAM sequence: GAG
gctgggacggacggatatct

SEQ ID NO: 6601 - DNA, 20 bp, Artificial Sequence
  Description of Artificial Sequence: Synthetic oligonucleotide
  Target: APOC3; (-) strand; PAM type: NRG; PAM sequence: CGG
ctttgggaggctgggacgga

SEQ ID NO: 6602 - DNA, 20 bp, Artificial Sequence
  Description of Artificial Sequence: Synthetic oligonucleotide
  Target: APOC3; (-) strand; PAM type: NRG; PAM sequence: CGG
agcactttgggaggctggga

SEQ ID NO: 6603 - DNA, 20 bp, Artificial Sequence
  Description of Artificial Sequence: Synthetic oligonucleotide
  Target: APOC3; (-) strand; PAM type: NRG; PAM sequence: GGG
tcccagcactttgggaggct

SEQ ID NO: 6604 - DNA, 20 bp, Artificial Sequence
  Description of Artificial Sequence: Synthetic oligonucleotide
  Target: APOC3; (-) strand; PAM type: NRG; PAM sequence: TGG
atcccagcactttgggaggc

SEQ ID NO: 6605 - DNA, 20 bp, Artificial Sequence
  Description of Artificial Sequence: Synthetic oligonucleotide
  Target: APOC3; (-) strand; PAM type: NRG; PAM sequence: AGG
tgtaatcccagcactttggg

SEQ ID NO: 6606 - DNA, 20 bp, Artificial Sequence
  Description of Artificial Sequence: Synthetic oligonucleotide
  Target: APOC3; (-) strand; PAM type: NRG; PAM sequence: GAG
ctgtaatcccagcactttgg

SEQ ID NO: 6607 - DNA, 20 bp, Artificial Sequence
  Description of Artificial Sequence: Synthetic oligonucleotide
  Target: APOC3; (-) strand; PAM type: NRG; PAM sequence: GGG
gcctgtaatcccagcacttt

SEQ ID NO: 6608 - DNA, 20 bp, Artificial Sequence
  Description of Artificial Sequence: Synthetic oligonucleotide
  Target: APOC3; (-) strand; PAM type: NRG; PAM sequence: TGG
tgcctgtaatcccagcactt

SEQ ID NO: 6609 - DNA, 20 bp, Artificial Sequence
  Description of Artificial Sequence: Synthetic oligonucleotide
  Target: APOC3; (-) strand; PAM type: NRG; PAM sequence: CAG
gtggctcatgcctgtaatcc

SEQ ID NO: 6610 - DNA, 20 bp, Artificial Sequence
  Description of Artificial Sequence: Synthetic oligonucleotide
  Target: APOC3; (-) strand; PAM type: NRG; PAM sequence: TGG
ccattcctggctgggcacag

SEQ ID NO: 6611 - DNA, 20 bp, Artificial Sequence
  Description of Artificial Sequence: Synthetic oligonucleotide
  Target: APOC3; (-) strand; PAM type: NRG; PAM sequence: CAG
gatccattcctggctgggca

SEQ ID NO: 6612 - DNA, 20 bp, Artificial Sequence
  Description of Artificial Sequence: Synthetic oligonucleotide
  Target: APOC3; (-) strand; PAM type: NRG; PAM sequence: GGG
ttagcgatccattcctggct

SEQ ID NO: 6613 - DNA, 20 bp, Artificial Sequence
  Description of Artificial Sequence: Synthetic oligonucleotide
  Target: APOC3; (-) strand; PAM type: NRG; PAM sequence: TGG
attagcgatccattcctggc

SEQ ID NO: 6614 - DNA, 20 bp, Artificial Sequence
  Description of Artificial Sequence: Synthetic oligonucleotide
  Target: APOC3; (-) strand; PAM type: NRG; PAM sequence: TGG
ctctattagcgatccattcc

SEQ ID NO: 6615 - DNA, 20 bp, Artificial Sequence
  Description of Artificial Sequence: Synthetic oligonucleotide
  Target: APOC3; (-) strand; PAM type: NRG; PAM sequence: TAG
gagacttggaattcctctat

SEQ ID NO: 6616 - DNA, 20 bp, Artificial Sequence
  Description of Artificial Sequence: Synthetic oligonucleotide
  Target: APOC3; (-) strand; PAM type: NRG; PAM sequence: TGG
ctttatcggtgggtgagact

SEQ ID NO: 6617 - DNA, 20 bp, Artificial Sequence
  Description of Artificial Sequence: Synthetic oligonucleotide
  Target: APOC3; (-) strand; PAM type: NRG; PAM sequence: GAG
agaattctttatcggtgggt

SEQ ID NO: 6618 - DNA, 20 bp, Artificial Sequence
  Description of Artificial Sequence: Synthetic oligonucleotide
  Target: APOC3; (-) strand; PAM type: NRG; PAM sequence: GGG
cctcagaattctttatcggt

SEQ ID NO: 6619 - DNA, 20 bp, Artificial Sequence
  Description of Artificial Sequence: Synthetic oligonucleotide
  Target: APOC3; (-) strand; PAM type: NRG; PAM sequence: TGG
ccctcagaattctttatcgg

SEQ ID NO: 6620 - DNA, 20 bp, Artificial Sequence
  Description of Artificial Sequence: Synthetic oligonucleotide
  Target: APOC3; (-) strand; PAM type: NRG; PAM sequence: CGG
ctgccctcagaattctttat

SEQ ID NO: 6621 - DNA, 20 bp, Artificial Sequence
  Description of Artificial Sequence: Synthetic oligonucleotide
  Target: APOC3; (-) strand; PAM type: NRG; PAM sequence: CAG
aagtggcccggctctgccct

SEQ ID NO: 6622 - DNA, 20 bp, Artificial Sequence
  Description of Artificial Sequence: Synthetic oligonucleotide
  Target: APOC3; (-) strand; PAM type: NRG; PAM sequence: CGG
agaggcctgagaaagtggcc

SEQ ID NO: 6623 - DNA, 20 bp, Artificial Sequence
  Description of Artificial Sequence: Synthetic oligonucleotide
  Target: APOC3; (-) strand; PAM type: NRG; PAM sequence: TGG
aaatcagaggcctgagaaag

SEQ ID NO: 6624 - DNA, 20 bp, Artificial Sequence
  Description of Artificial Sequence: Synthetic oligonucleotide
  Target: APOC3; (-) strand; PAM type: NRG; PAM sequence: AAG
atgaaatcagaggcctgaga

SEQ ID NO: 6625 - DNA, 20 bp, Artificial Sequence
  Description of Artificial Sequence: Synthetic oligonucleotide
  Target: APOC3; (-) strand; PAM type: NRG; PAM sequence: GAG
cagtatgaaatcagaggcct

SEQ ID NO: 6626 - DNA, 20 bp, Artificial Sequence
  Description of Artificial Sequence: Synthetic oligonucleotide
  Target: APOC3; (-) strand; PAM type: NRG; PAM sequence: AGG
acaccacagtatgaaatcag

SEQ ID NO: 6627 - DNA, 20 bp, Artificial Sequence
  Description of Artificial Sequence: Synthetic oligonucleotide
  Target: APOC3; (-) strand; PAM type: NRG; PAM sequence: GAG
aacaccacagtatgaaatca

SEQ ID NO: 6628 - DNA, 20 bp, Artificial Sequence
  Description of Artificial Sequence: Synthetic oligonucleotide
  Target: APOC3; (-) strand; PAM type: NRG; PAM sequence: CAG
ctaacaccacagtatgaaat

SEQ ID NO: 6629 - DNA, 20 bp, Artificial Sequence
  Description of Artificial Sequence: Synthetic oligonucleotide
  Target: APOC3; (-) strand; PAM type: NRG; PAM sequence: CAG
ctcagaagtaactaacacca

SEQ ID NO: 6630 - DNA, 20 bp, Artificial Sequence
  Description of Artificial Sequence: Synthetic oligonucleotide
  Target: APOC3; (-) strand; PAM type: NRG; PAM sequence: AAG
gcagcaagctgtcctctcag

SEQ ID NO: 6631 - DNA, 20 bp, Artificial Sequence
  Description of Artificial Sequence: Synthetic oligonucleotide
  Target: APOC3; (-) strand; PAM type: NRG; PAM sequence: CAG
ctggcagcaagctgtcctct

SEQ ID NO: 6632 - DNA, 20 bp, Artificial Sequence
  Description of Artificial Sequence: Synthetic oligonucleotide
  Target: APOC3; (-) strand; PAM type: NRG; PAM sequence: AAG
aaaaatagagctctggcagc

SEQ ID NO: 6633 - DNA, 20 bp, Artificial Sequence
  Description of Artificial Sequence: Synthetic oligonucleotide
  Target: APOC3; (-) strand; PAM type: NRG; PAM sequence: CAG
cataaaaaatagagctctgg

SEQ ID NO: 6634 - DNA, 20 bp, Artificial Sequence
  Description of Artificial Sequence: Synthetic oligonucleotide
  Target: APOC3; (-) strand; PAM type: NRG; PAM sequence: TGG
taacataaaaaatagagctc

SEQ ID NO: 6635 - DNA, 20 bp, Artificial Sequence
  Description of Artificial Sequence: Synthetic oligonucleotide
  Target: APOC3; (-) strand; PAM type: NRG; PAM sequence: GAG
agcctctaacataaaaaata

SEQ ID NO: 6636 - DNA, 20 bp, Artificial Sequence
  Description of Artificial Sequence: Synthetic oligonucleotide
  Target: APOC3; (-) strand; PAM type: NRG; PAM sequence: TAG
ggagcctctaacataaaaaa

SEQ ID NO: 6637 - DNA, 20 bp, Artificial Sequence
  Description of Artificial Sequence: Synthetic oligonucleotide
  Target: APOC3; (-) strand; PAM type: NRG; PAM sequence: GAG
gcagagtctgcaggcagaag

SEQ ID NO: 6638 - DNA, 20 bp, Artificial Sequence
  Description of Artificial Sequence: Synthetic oligonucleotide
  Target: APOC3; (-) strand; PAM type: NRG; PAM sequence: AGG
cagcagagtctgcaggcaga

SEQ ID NO: 6639 - DNA, 20 bp, Artificial Sequence
  Description of Artificial Sequence: Synthetic oligonucleotide
  Target: APOC3; (-) strand; PAM type: NRG; PAM sequence: AAG
acagcagagtctgcaggcag

SEQ ID NO: 6640 - DNA, 20 bp, Artificial Sequence
  Description of Artificial Sequence: Synthetic oligonucleotide
  Target: APOC3; (-) strand; PAM type: NRG; PAM sequence: CAG
cagacagcagagtctgcagg

SEQ ID NO: 6641 - DNA, 20 bp, Artificial Sequence
  Description of Artificial Sequence: Synthetic oligonucleotide
  Target: APOC3; (-) strand; PAM type: NRG; PAM sequence: AGG
tcccagacagcagagtctgc

SEQ ID NO: 6642 - DNA, 20 bp, Artificial Sequence
  Description of Artificial Sequence: Synthetic oligonucleotide
  Target: APOC3; (-) strand; PAM type: NRG; PAM sequence: CAG
ttcccagacagcagagtctg

SEQ ID NO: 6643 - DNA, 20 bp, Artificial Sequence
  Description of Artificial Sequence: Synthetic oligonucleotide
  Target: APOC3; (-) strand; PAM type: NRG; PAM sequence: GAG
tgtgcccttcccagacagca

SEQ ID NO: 6644 - DNA, 20 bp, Artificial Sequence
  Description of Artificial Sequence: Synthetic oligonucleotide
  Target: APOC3; (-) strand; PAM type: NRG; PAM sequence: CAG
gctgtgcccttcccagacag

SEQ ID NO: 6645 - DNA, 20 bp, Artificial Sequence
  Description of Artificial Sequence: Synthetic oligonucleotide
  Target: APOC3; (-) strand; PAM type: NRG; PAM sequence: CAG
aacgctgtgcccttcccaga

SEQ ID NO: 6646 - DNA, 20 bp, Artificial Sequence
  Description of Artificial Sequence: Synthetic oligonucleotide
  Target: APOC3; (-) strand; PAM type: NRG; PAM sequence: CAG
tcctaacgctgtgcccttcc

SEQ ID NO: 6647 - DNA, 20 bp, Artificial Sequence
  Description of Artificial Sequence: Synthetic oligonucleotide
  Target: APOC3; (-) strand; PAM type: NRG; PAM sequence: GGG
caaagcagcgggtccatgga

SEQ ID NO: 6648 - DNA, 20 bp, Artificial Sequence
  Description of Artificial Sequence: Synthetic oligonucleotide
  Target: APOC3; (-) strand; PAM type: NRG; PAM sequence: AGG
acaaagcagcgggtccatgg

SEQ ID NO: 6649 - DNA, 20 bp, Artificial Sequence
  Description of Artificial Sequence: Synthetic oligonucleotide
  Target: APOC3; (-) strand; PAM type: NRG; PAM sequence: GAG
tacaaagcagcgggtccatg

SEQ ID NO: 6650 - DNA, 20 bp, Artificial Sequence
  Description of Artificial Sequence: Synthetic oligonucleotide
  Target: APOC3; (-) strand; PAM type: NRG; PAM sequence: TGG
agtacaaagcagcgggtcca

SEQ ID NO: 6651 - DNA, 20 bp, Artificial Sequence
  Description of Artificial Sequence: Synthetic oligonucleotide
  Target: APOC3; (-) strand; PAM type: NRG; PAM sequence: GGG
atagagaagtacaaagcagc

SEQ ID NO: 6652 - DNA, 20 bp, Artificial Sequence
  Description of Artificial Sequence: Synthetic oligonucleotide
  Target: APOC3; (-) strand; PAM type: NRG; PAM sequence: CGG
gatagagaagtacaaagcag

SEQ ID NO: 6653 - DNA, 20 bp, Artificial Sequence
  Description of Artificial Sequence: Synthetic oligonucleotide
  Target: APOC3; (-) strand; PAM type: NRG; PAM sequence: CAG
tgagatagagaagtacaaag

SEQ ID NO: 6654 - DNA, 20 bp, Artificial Sequence
  Description of Artificial Sequence: Synthetic oligonucleotide
  Target: APOC3; (-) strand; PAM type: NRG; PAM sequence: AAG
aaatgagatagagaagtaca

SEQ ID NO: 6655 - DNA, 20 bp, Artificial Sequence
  Description of Artificial Sequence: Synthetic oligonucleotide
  Target: APOC3; (-) strand; PAM type: NRG; PAM sequence: AAG
gaaaaggaaatgagatagag

SEQ ID NO: 6656 - DNA, 20 bp, Artificial Sequence
  Description of Artificial Sequence: Synthetic oligonucleotide
  Target: APOC3; (-) strand; PAM type: NRG; PAM sequence: GAG
gctgaaaaggaaatgagata

SEQ ID NO: 6657 - DNA, 20 bp, Artificial Sequence
  Description of Artificial Sequence: Synthetic oligonucleotide
  Target: APOC3; (-) strand; PAM type: NRG; PAM sequence: TAG
gtgctgaaaaggaaatgaga

SEQ ID NO: 6658 - DNA, 20 bp, Artificial Sequence
  Description of Artificial Sequence: Synthetic oligonucleotide
  Target: APOC3; (-) strand; PAM type: NRG; PAM sequence: GAG
agtggtgctgaaaaggaaat

SEQ ID NO: 6659 - DNA, 20 bp, Artificial Sequence
  Description of Artificial Sequence: Synthetic oligonucleotide
  Target: APOC3; (-) strand; PAM type: NRG; PAM sequence: AGG
tgcccagagtggtgctgaaa

SEQ ID NO: 6660 - DNA, 20 bp, Artificial Sequence
  Description of Artificial Sequence: Synthetic oligonucleotide
  Target: APOC3; (-) strand; PAM type: NRG; PAM sequence: AAG
ttgcccagagtggtgctgaa

SEQ ID NO: 6661 - DNA, 20 bp, Artificial Sequence
  Description of Artificial Sequence: Synthetic oligonucleotide
  Target: APOC3; (-) strand; PAM type: NRG; PAM sequence: TGG
ggaatactgattgcccagag

SEQ ID NO: 6662 - DNA, 20 bp, Artificial Sequence
  Description of Artificial Sequence: Synthetic oligonucleotide
  Target: APOC3; (-) strand; PAM type: NRG; PAM sequence: GAG
gctggaatactgattgccca

SEQ ID NO: 6663 - DNA, 20 bp, Artificial Sequence
  Description of Artificial Sequence: Synthetic oligonucleotide
  Target: APOC3; (-) strand; PAM type: NRG; PAM sequence: CAG
gggctggaatactgattgcc

SEQ ID NO: 6664 - DNA, 20 bp, Artificial Sequence
  Description of Artificial Sequence: Synthetic oligonucleotide
  Target: APOC3; (-) strand; PAM type: NRG; PAM sequence: TGG
ttctgaggataaaatggggc

SEQ ID NO: 6665 - DNA, 20 bp, Artificial Sequence
  Description of Artificial Sequence: Synthetic oligonucleotide
  Target: APOC3; (-) strand; PAM type: NRG; PAM sequence: GGG
aattttctgaggataaaatg

SEQ ID NO: 6666 - DNA, 20 bp, Artificial Sequence
  Description of Artificial Sequence: Synthetic oligonucleotide
  Target: APOC3; (-) strand; PAM type: NRG; PAM sequence: GGG
caattttctgaggataaaat

SEQ ID NO: 6667 - DNA, 20 bp, Artificial Sequence
  Description of Artificial Sequence: Synthetic oligonucleotide
  Target: APOC3; (-) strand; PAM type: NRG; PAM sequence: TGG
tcaattttctgaggataaaa

SEQ ID NO: 6668 - DNA, 20 bp, Artificial Sequence
  Description of Artificial Sequence: Synthetic oligonucleotide
  Target: APOC3; (-) strand; PAM type: NRG; PAM sequence: AGG
ctcagagcctcaattttctg

SEQ ID NO: 6669 - DNA, 20 bp, Artificial Sequence
  Description of Artificial Sequence: Synthetic oligonucleotide
  Target: APOC3; (-) strand; PAM type: NRG; PAM sequence: GAG
tctcagagcctcaattttct

SEQ ID NO: 6670 - DNA, 20 bp, Artificial Sequence
  Description of Artificial Sequence: Synthetic oligonucleotide
  Target: APOC3; (-) strand; PAM type: NRG; PAM sequence: GAG
gtcacagagataacatctca

SEQ ID NO: 6671 - DNA, 20 bp, Artificial Sequence
  Description of Artificial Sequence: Synthetic oligonucleotide
  Target: APOC3; (-) strand; PAM type: NRG; PAM sequence: CAG
aggtcacagagataacatct

SEQ ID NO: 6672 - DNA, 20 bp, Artificial Sequence
  Description of Artificial Sequence: Synthetic oligonucleotide
  Target: APOC3; (-) strand; PAM type: NRG; PAM sequence: GAG
gtaataggacccaggtcaca

SEQ ID NO: 6673 - DNA, 20 bp, Artificial Sequence
  Description of Artificial Sequence: Synthetic oligonucleotide
  Target: APOC3; (-) strand; PAM type: NRG; PAM sequence: CAG
acgtaataggacccaggtca

SEQ ID NO: 6674 - DNA, 20 bp, Artificial Sequence
  Description of Artificial Sequence: Synthetic oligonucleotide
  Target: APOC3; (-) strand; PAM type: NRG; PAM sequence: AGG
tttggcacgtaataggaccc

SEQ ID NO: 6675 - DNA, 20 bp, Artificial Sequence
  Description of Artificial Sequence: Synthetic oligonucleotide
  Target: APOC3; (-) strand; PAM type: NRG; PAM sequence: CAG
ctttggcacgtaataggacc

SEQ ID NO: 6676 - DNA, 20 bp, Artificial Sequence
  Description of Artificial Sequence: Synthetic oligonucleotide
  Target: APOC3; (-) strand; PAM type: NRG; PAM sequence: AGG
tgatgcctttggcacgtaat

SEQ ID NO: 6677 - DNA, 20 bp, Artificial Sequence
  Description of Artificial Sequence: Synthetic oligonucleotide
  Target: APOC3; (-) strand; PAM type: NRG; PAM sequence: TAG
atgatgcctttggcacgtaa

SEQ ID NO: 6678 - DNA, 20 bp, Artificial Sequence
  Description of Artificial Sequence: Synthetic oligonucleotide
  Target: APOC3; (-) strand; PAM type: NRG; PAM sequence: TGG
ttaggcttaaatgatgcctt

SEQ ID NO: 6679 - DNA, 20 bp, Artificial Sequence
  Description of Artificial Sequence: Synthetic oligonucleotide
  Target: APOC3; (-) strand; PAM type: NRG; PAM sequence: AGG
ccttggagccaggacatctt

SEQ ID NO: 6680 - DNA, 20 bp, Artificial Sequence
  Description of Artificial Sequence: Synthetic oligonucleotide
  Target: APOC3; (-) strand; PAM type: NRG; PAM sequence: TAG
accttggagccaggacatct

SEQ ID NO: 6681 - DNA, 20 bp, Artificial Sequence
  Description of Artificial Sequence: Synthetic oligonucleotide
  Target: APOC3; (-) strand; PAM type: NRG; PAM sequence: AGG
gatgctgacaccttggagcc

SEQ ID NO: 6682 - DNA, 20 bp, Artificial Sequence
  Description of Artificial Sequence: Synthetic oligonucleotide
  Target: APOC3; (-) strand; PAM type: NRG; PAM sequence: CAG
agatgctgacaccttggagc

SEQ ID NO: 6683 - DNA, 20 bp, Artificial Sequence
  Description of Artificial Sequence: Synthetic oligonucleotide
  Target: APOC3; (-) strand; PAM type: NRG; PAM sequence: GAG
ttccagatgctgacaccttg

SEQ ID NO: 6684 - DNA, 20 bp, Artificial Sequence
  Description of Artificial Sequence: Synthetic oligonucleotide
  Target: APOC3; (-) strand; PAM type: NRG; PAM sequence: TGG
tcttccagatgctgacacct

SEQ ID NO: 6685 - DNA, 20 bp, Artificial Sequence
  Description of Artificial Sequence: Synthetic oligonucleotide
  Target: APOC3; (-) strand; PAM type: NRG; PAM sequence: CAG
ggatgagggcgcctgtcttc

SEQ ID NO: 6686 - DNA, 20 bp, Artificial Sequence
  Description of Artificial Sequence: Synthetic oligonucleotide
  Target: APOC3; (-) strand; PAM type: NRG; PAM sequence: GGG
cagcagggatggcaggatga

SEQ ID NO: 6687 - DNA, 20 bp, Artificial Sequence
  Description of Artificial Sequence: Synthetic oligonucleotide
  Target: APOC3; (-) strand; PAM type: NRG; PAM sequence: AGG
gcagcagggatggcaggatg

SEQ ID NO: 6688 - DNA, 20 bp, Artificial Sequence
  Description of Artificial Sequence: Synthetic oligonucleotide
  Target: APOC3; (-) strand; PAM type: NRG; PAM sequence: GAG
cgcagcagggatggcaggat

SEQ ID NO: 6689 - DNA, 20 bp, Artificial Sequence
  Description of Artificial Sequence: Synthetic oligonucleotide
  Target: APOC3; (-) strand; PAM type: NRG; PAM sequence: AGG
gaagccgcagcagggatggc

SEQ ID NO: 6690 - DNA, 20 bp, Artificial Sequence
  Description of Artificial Sequence: Synthetic oligonucleotide
  Target: APOC3; (-) strand; PAM type: NRG; PAM sequence: CAG
tgaagccgcagcagggatgg

SEQ ID NO: 6691 - DNA, 20 bp, Artificial Sequence
  Description of Artificial Sequence: Synthetic oligonucleotide
  Target: APOC3; (-) strand; PAM type: NRG; PAM sequence: TGG
cagtgaagccgcagcaggga

SEQ ID NO: 6692 - DNA, 20 bp, Artificial Sequence
  Description of Artificial Sequence: Synthetic oligonucleotide
  Target: APOC3; (-) strand; PAM type: NRG; PAM sequence: GGG
cccacagtgaagccgcagca

SEQ ID NO: 6693 - DNA, 20 bp, Artificial Sequence
  Description of Artificial Sequence: Synthetic oligonucleotide
  Target: APOC3; (-) strand; PAM type: NRG; PAM sequence: AGG
gcccacagtgaagccgcagc

SEQ ID NO: 6694 - DNA, 20 bp, Artificial Sequence
  Description of Artificial Sequence: Synthetic oligonucleotide
  Target: APOC3; (-) strand; PAM type: NRG; PAM sequence: CAG
ggcccacagtgaagccgcag

SEQ ID NO: 6695 - DNA, 20 bp, Artificial Sequence
  Description of Artificial Sequence: Synthetic oligonucleotide
  Target: APOC3; (-) strand; PAM type: NRG; PAM sequence: CAG
ctgggcccacagtgaagccg

SEQ ID NO: 6696 - DNA, 20 bp, Artificial Sequence
  Description of Artificial Sequence: Synthetic oligonucleotide
  Target: APOC3; (-) strand; PAM type: NRG; PAM sequence: AAG
tgtcccctgggcccacagtg

SEQ ID NO: 6697 - DNA, 20 bp, Artificial Sequence
  Description of Artificial Sequence: Synthetic oligonucleotide
  Target: APOC3; (-) strand; PAM type: NRG; PAM sequence: CAG
tgagatgtcccctgggccca

SEQ ID NO: 6698 - DNA, 20 bp, Artificial Sequence
  Description of Artificial Sequence: Synthetic oligonucleotide
  Target: APOC3; (-) strand; PAM type: NRG; PAM sequence: GGG
tcggggctgagatgtcccct

SEQ ID NO: 6699 - DNA, 20 bp, Artificial Sequence
  Description of Artificial Sequence: Synthetic oligonucleotide
  Target: APOC3; (-) strand; PAM type: NRG; PAM sequence: TGG
ctcggggctgagatgtcccc

SEQ ID NO: 6700 - DNA, 20 bp, Artificial Sequence
  Description of Artificial Sequence: Synthetic oligonucleotide
  Target: APOC3; (-) strand; PAM type: NRG; PAM sequence: GAG
cgctgacccttctcggggct

SEQ ID NO: 6701 - DNA, 20 bp, Artificial Sequence
  Description of Artificial Sequence: Synthetic oligonucleotide
  Target: APOC3; (-) strand; PAM type: NRG; PAM sequence: GGG
ggggccgctgacccttctcg

SEQ ID NO: 6702 - DNA, 20 bp, Artificial Sequence
  Description of Artificial Sequence: Synthetic oligonucleotide
  Target: APOC3; (-) strand; PAM type: NRG; PAM sequence: GGG
aggggccgctgacccttctc

SEQ ID NO: 6703 - DNA, 20 bp, Artificial Sequence
  Description of Artificial Sequence: Synthetic oligonucleotide
  Target: APOC3; (-) strand; PAM type: NRG; PAM sequence: CGG
gaggggccgctgacccttct

SEQ ID NO: 6704 - DNA, 20 bp, Artificial Sequence
  Description of Artificial Sequence: Synthetic oligonucleotide
  Target: APOC3; (-) strand; PAM type: NRG; PAM sequence: GGG
gggagtcggtggtccaggag

SEQ ID NO: 6705 - DNA, 20 bp, Artificial Sequence
  Description of Artificial Sequence: Synthetic oligonucleotide
  Target: APOC3; (-) strand; PAM type: NRG; PAM sequence: GGG
ggggagtcggtggtccagga

SEQ ID NO: 6706 - DNA, 20 bp, Artificial Sequence
  Description of Artificial Sequence: Synthetic oligonucleotide
  Target: APOC3; (-) strand; PAM type: NRG; PAM sequence: AGG
cggggagtcggtggtccagg

SEQ ID NO: 6707 - DNA, 20 bp, Artificial Sequence
  Description of Artificial Sequence: Synthetic oligonucleotide
  Target: APOC3; (-) strand; PAM type: NRG; PAM sequence: GAG
gcggggagtcggtggtccag

SEQ ID NO: 6708 - DNA, 20 bp, Artificial Sequence
  Description of Artificial Sequence: Synthetic oligonucleotide
  Target: APOC3; (-) strand; PAM type: NRG; PAM sequence: AGG
ctgcggggagtcggtggtcc

SEQ ID NO: 6709 - DNA, 20 bp, Artificial Sequence
  Description of Artificial Sequence: Synthetic oligonucleotide
  Target: APOC3; (-) strand; PAM type: NRG; PAM sequence: CAG
tctgcggggagtcggtggtc

SEQ ID NO: 6710 - DNA, 20 bp, Artificial Sequence
  Description of Artificial Sequence: Synthetic oligonucleotide
  Target: APOC3; (-) strand; PAM type: NRG; PAM sequence: TGG
ggagttctgcggggagtcgg

SEQ ID NO: 6711 - DNA, 20 bp, Artificial Sequence
  Description of Artificial Sequence: Synthetic oligonucleotide
  Target: APOC3; (-) strand; PAM type: NRG; PAM sequence: CGG
agaggagttctgcggggagt

SEQ ID NO: 6712 - DNA, 20 bp, Artificial Sequence
  Description of Artificial Sequence: Synthetic oligonucleotide
  Target: APOC3; (-) strand; PAM type: NRG; PAM sequence: GAG
gcacagaggagttctgcggg

SEQ ID NO: 6713 - DNA, 20 bp, Artificial Sequence
  Description of Artificial Sequence: Synthetic oligonucleotide
  Target: APOC3; (-) strand; PAM type: NRG; PAM sequence: GGG
gggcacagaggagttctgcg

SEQ ID NO: 6714 - DNA, 20 bp, Artificial Sequence
  Description of Artificial Sequence: Synthetic oligonucleotide
  Target: APOC3; (-) strand; PAM type: NRG; PAM sequence: GGG
agggcacagaggagttctgc

SEQ ID NO: 6715 - DNA, 20 bp, Artificial Sequence
  Description of Artificial Sequence: Synthetic oligonucleotide
  Target: APOC3; (-) strand; PAM type: NRG; PAM sequence: CGG
gagggcacagaggagttctg

SEQ ID NO: 6716 - DNA, 20 bp, Artificial Sequence
  Description of Artificial Sequence: Synthetic oligonucleotide
  Target: APOC3; (-) strand; PAM type: NRG; PAM sequence: GAG
ggtgaggagagggcacagag

SEQ ID NO: 6717 - DNA, 20 bp, Artificial Sequence
  Description of Artificial Sequence: Synthetic oligonucleotide
  Target: APOC3; (-) strand; PAM type: NRG; PAM sequence: AGG
ctggtgaggagagggcacag

SEQ ID NO: 6718 - DNA, 20 bp, Artificial Sequence
  Description of Artificial Sequence: Synthetic oligonucleotide
  Target: APOC3; (-) strand; PAM type: NRG; PAM sequence: GAG
tctggtgaggagagggcaca

SEQ ID NO: 6719 - DNA, 20 bp, Artificial Sequence
  Description of Artificial Sequence: Synthetic oligonucleotide
  Target: APOC3; (-) strand; PAM type: NRG; PAM sequence: CAG
ggtctggtgaggagagggca

SEQ ID NO: 6720 - DNA, 20 bp, Artificial Sequence
  Description of Artificial Sequence: Synthetic oligonucleotide
  Target: APOC3; (-) strand; PAM type: NRG; PAM sequence: GGG
aacaaggtctggtgaggaga

SEQ ID NO: 6721 - DNA, 20 bp, Artificial Sequence
  Description of Artificial Sequence: Synthetic oligonucleotide
  Target: APOC3; (-) strand; PAM type: NRG; PAM sequence: AGG
gaacaaggtctggtgaggag

SEQ ID NO: 6722 - DNA, 20 bp, Artificial Sequence
  Description of Artificial Sequence: Synthetic oligonucleotide
  Target: APOC3; (-) strand; PAM type: NRG; PAM sequence: GAG
ggaacaaggtctggtgagga

SEQ ID NO: 6723 - DNA, 20 bp, Artificial Sequence
  Description of Artificial Sequence: Synthetic oligonucleotide
  Target: APOC3; (-) strand; PAM type: NRG; PAM sequence: GAG
gaggaacaaggtctggtgag

SEQ ID NO: 6724 - DNA, 20 bp, Artificial Sequence
  Description of Artificial Sequence: Synthetic oligonucleotide
  Target: APOC3; (-) strand; PAM type: NRG; PAM sequence: AGG
gggaggaacaaggtctggtg

SEQ ID NO: 6725 - DNA, 20 bp, Artificial Sequence
  Description of Artificial Sequence: Synthetic oligonucleotide
  Target: APOC3; (-) strand; PAM type: NRG; PAM sequence: GAG
tgggaggaacaaggtctggt

SEQ ID NO: 6726 - DNA, 20 bp, Artificial Sequence
  Description of Artificial Sequence: Synthetic oligonucleotide
  Target: APOC3; (-) strand; PAM type: NRG; PAM sequence: TGG
caactgggaggaacaaggtc

SEQ ID NO: 6727 - DNA, 20 bp, Artificial Sequence
  Description of Artificial Sequence: Synthetic oligonucleotide
  Target: APOC3; (-) strand; PAM type: NRG; PAM sequence: AGG
gggagcaactgggaggaaca

SEQ ID NO: 6728 - DNA, 20 bp, Artificial Sequence
  Description of Artificial Sequence: Synthetic oligonucleotide
  Target: APOC3; (-) strand; PAM type: NRG; PAM sequence: AAG
tgggagcaactgggaggaac

SEQ ID NO: 6729 - DNA, 20 bp, Artificial Sequence
  Description of Artificial Sequence: Synthetic oligonucleotide
  Target: APOC3; (-) strand; PAM type: NRG; PAM sequence: AGG
tggctgtgggagcaactggg

SEQ ID NO: 6730 - DNA, 20 bp, Artificial Sequence
  Description of Artificial Sequence: Synthetic oligonucleotide
  Target: APOC3; (-) strand; PAM type: NRG; PAM sequence: GAG
ctggctgtgggagcaactgg

SEQ ID NO: 6731 - DNA, 20 bp, Artificial Sequence
  Description of Artificial Sequence: Synthetic oligonucleotide
  Target: APOC3; (-) strand; PAM type: NRG; PAM sequence: GGG
ccctggctgtgggagcaact

SEQ ID NO: 6732 - DNA, 20 bp, Artificial Sequence
  Description of Artificial Sequence: Synthetic oligonucleotide
  Target: APOC3; (-) strand; PAM type: NRG; PAM sequence: TGG
cccctggctgtgggagcaac

SEQ ID NO: 6733 - DNA, 20 bp, Artificial Sequence
  Description of Artificial Sequence: Synthetic oligonucleotide
  Target: APOC3; (-) strand; PAM type: NRG; PAM sequence: GAG
tcactgccccctggctgtgg

SEQ ID NO: 6734 - DNA, 20 bp, Artificial Sequence
  Description of Artificial Sequence: Synthetic oligonucleotide
  Target: APOC3; (-) strand; PAM type: NRG; PAM sequence: GGG
cctcactgccccctggctgt

SEQ ID NO: 6735 - DNA, 20 bp, Artificial Sequence
  Description of Artificial Sequence: Synthetic oligonucleotide
  Target: APOC3; (-) strand; PAM type: NRG; PAM sequence: TGG
ccctcactgccccctggctg

SEQ ID NO: 6736 - DNA, 20 bp, Artificial Sequence
  Description of Artificial Sequence: Synthetic oligonucleotide
  Target: APOC3; (-) strand; PAM type: NRG; PAM sequence: TGG
gagcagccctcactgccccc

SEQ ID NO: 6737 - DNA, 20 bp, Artificial Sequence
  Description of Artificial Sequence: Synthetic oligonucleotide
  Target: APOC3; (-) strand; PAM type: NRG; PAM sequence: CAG
cagtggggctgggggaagag

SEQ ID NO: 6738 - DNA, 20 bp, Artificial Sequence
  Description of Artificial Sequence: Synthetic oligonucleotide
  Target: APOC3; (-) strand; PAM type: NRG; PAM sequence: GAG
cctcagtggggctgggggaa

SEQ ID NO: 6739 - DNA, 20 bp, Artificial Sequence
  Description of Artificial Sequence: Synthetic oligonucleotide
  Target: APOC3; (-) strand; PAM type: NRG; PAM sequence: AAG
ttcctcagtggggctggggg

SEQ ID NO: 6740 - DNA, 20 bp, Artificial Sequence
  Description of Artificial Sequence: Synthetic oligonucleotide
  Target: APOC3; (-) strand; PAM type: NRG; PAM sequence: GGG
gggttcctcagtggggctgg

SEQ ID NO: 6741 - DNA, 20 bp, Artificial Sequence
  Description of Artificial Sequence: Synthetic oligonucleotide
  Target: APOC3; (-) strand; PAM type: NRG; PAM sequence: GGG
tgggttcctcagtggggctg

SEQ ID NO: 6742 - DNA, 20 bp, Artificial Sequence
  Description of Artificial Sequence: Synthetic oligonucleotide
  Target: APOC3; (-) strand; PAM type: NRG; PAM sequence: GGG
ctgggttcctcagtggggct

SEQ ID NO: 6743 - DNA, 20 bp, Artificial Sequence
  Description of Artificial Sequence: Synthetic oligonucleotide
  Target: APOC3; (-) strand; PAM type: NRG; PAM sequence: TGG
cctgggttcctcagtggggc

SEQ ID NO: 6744 - DNA, 20 bp, Artificial Sequence
  Description of Artificial Sequence: Synthetic oligonucleotide
  Target: APOC3; (-) strand; PAM type: NRG; PAM sequence: GGG
ccttcctgggttcctcagtg

SEQ ID NO: 6745 - DNA, 20 bp, Artificial Sequence
  Description of Artificial Sequence: Synthetic oligonucleotide
  Target: APOC3; (-) strand; PAM type: NRG; PAM sequence: GGG
accttcctgggttcctcagt

SEQ ID NO: 6746 - DNA, 20 bp, Artificial Sequence
  Description of Artificial Sequence: Synthetic oligonucleotide
  Target: APOC3; (-) strand; PAM type: NRG; PAM sequence: TGG
caccttcctgggttcctcag

SEQ ID NO: 6747 - DNA, 20 bp, Artificial Sequence
  Description of Artificial Sequence: Synthetic oligonucleotide
  Target: APOC3; (-) strand; PAM type: NRG; PAM sequence: CAG
gttcaccttcctgggttcct

SEQ ID NO: 6748 - DNA, 20 bp, Artificial Sequence
  Description of Artificial Sequence: Synthetic oligonucleotide
  Target: APOC3; (-) strand; PAM type: NRG; PAM sequence: GGG
attctctcgttcaccttcct

SEQ ID NO: 6749 - DNA, 20 bp, Artificial Sequence
  Description of Artificial Sequence: Synthetic oligonucleotide
  Target: APOC3; (-) strand; PAM type: NRG; PAM sequence: TGG
gattctctcgttcaccttcc

SEQ ID NO: 6750 - DNA, 20 bp, Artificial Sequence
  Description of Artificial Sequence: Synthetic oligonucleotide
  Target: APOC3; (-) strand; PAM type: NRG; PAM sequence: AGG
ggccctccccagcccccacc

SEQ ID NO: 6751 - DNA, 20 bp, Artificial Sequence
  Description of Artificial Sequence: Synthetic oligonucleotide
  Target: APOC3; (-) strand; PAM type: NRG; PAM sequence: CAG
gggccctccccagcccccac

SEQ ID NO: 6752 - DNA, 20 bp, Artificial Sequence
  Description of Artificial Sequence: Synthetic oligonucleotide
  Target: APOC3; (-) strand; PAM type: NRG; PAM sequence: CAG
ctcatgtctggggccctccc

SEQ ID NO: 6753 - DNA, 20 bp, Artificial Sequence
  Description of Artificial Sequence: Synthetic oligonucleotide
  Target: APOC3; (-) strand; PAM type: NRG; PAM sequence: GGG
aggagctggtctcatgtctg

SEQ ID NO: 6754 - DNA, 20 bp, Artificial Sequence
  Description of Artificial Sequence: Synthetic oligonucleotide
  Target: APOC3; (-) strand; PAM type: NRG; PAM sequence: GGG
gaggagctggtctcatgtct

SEQ ID NO: 6755 - DNA, 20 bp, Artificial Sequence
  Description of Artificial Sequence: Synthetic oligonucleotide
  Target: APOC3; (-) strand; PAM type: NRG; PAM sequence: TGG
ggaggagctggtctcatgtc

SEQ ID NO: 6756 - DNA, 20 bp, Artificial Sequence
  Description of Artificial Sequence: Synthetic oligonucleotide
  Target: APOC3; (-) strand; PAM type: NRG; PAM sequence: TGG
acatcccctgggggaggagc

SEQ ID NO: 6757 - DNA, 20 bp, Artificial Sequence
  Description of Artificial Sequence: Synthetic oligonucleotide
  Target: APOC3; (-) strand; PAM type: NRG; PAM sequence: GAG
gataacatcccctgggggag

SEQ ID NO: 6758 - DNA, 20 bp, Artificial Sequence
  Description of Artificial Sequence: Synthetic oligonucleotide
  Target: APOC3; (-) strand; PAM type: NRG; PAM sequence: AGG
ctgataacatcccctggggg

SEQ ID NO: 6759 - DNA, 20 bp, Artificial Sequence
  Description of Artificial Sequence: Synthetic oligonucleotide
  Target: APOC3; (-) strand; PAM type: NRG; PAM sequence: GAG
actgataacatcccctgggg

SEQ ID NO: 6760 - DNA, 20 bp, Artificial Sequence
  Description of Artificial Sequence: Synthetic oligonucleotide
  Target: APOC3; (-) strand; PAM type: NRG; PAM sequence: GGG
ccactgataacatcccctgg

SEQ ID NO: 6761 - DNA, 20 bp, Artificial Sequence
  Description of Artificial Sequence: Synthetic oligonucleotide
  Target: APOC3; (-) strand; PAM type: NRG; PAM sequence: GGG
cccactgataacatcccctg

SEQ ID NO: 6762 - DNA, 20 bp, Artificial Sequence
  Description of Artificial Sequence: Synthetic oligonucleotide
  Target: APOC3; (-) strand; PAM type: NRG; PAM sequence: GGG
acccactgataacatcccct

SEQ ID NO: 6763 - DNA, 20 bp, Artificial Sequence
  Description of Artificial Sequence: Synthetic oligonucleotide
  Target: APOC3; (-) strand; PAM type: NRG; PAM sequence: TGG
gacccactgataacatcccc

SEQ ID NO: 6764 - DNA, 20 bp, Artificial Sequence
  Description of Artificial Sequence: Synthetic oligonucleotide
  Target: APOC3; (-) strand; PAM type: NRG; PAM sequence: TGG
aggctccctattttgccctc

SEQ ID NO: 6765 - DNA, 20 bp, Artificial Sequence
  Description of Artificial Sequence: Synthetic oligonucleotide
  Target: APOC3; (-) strand; PAM type: NRG; PAM sequence: AGG
cctttgcccctccctccacc

SEQ ID NO: 6766 - DNA, 20 bp, Artificial Sequence
  Description of Artificial Sequence: Synthetic oligonucleotide
  Target: APOC3; (-) strand; PAM type: NRG; PAM sequence: CAG
gcctttgcccctccctccac

SEQ ID NO: 6767 - DNA, 20 bp, Artificial Sequence
  Description of Artificial Sequence: Synthetic oligonucleotide
  Target: APOC3; (-) strand; PAM type: NRG; PAM sequence: AGG
ccaaggccgctcagagcccg

SEQ ID NO: 6768 - DNA, 20 bp, Artificial Sequence
  Description of Artificial Sequence: Synthetic oligonucleotide
  Target: APOC3; (-) strand; PAM type: NRG; PAM sequence: GAG
gccaaggccgctcagagccc

SEQ ID NO: 6769 - DNA, 20 bp, Artificial Sequence
  Description of Artificial Sequence: Synthetic oligonucleotide
  Target: APOC3; (-) strand; PAM type: NRG; PAM sequence: GAG
agaagggccaaggccgctca

SEQ ID NO: 6770 - DNA, 20 bp, Artificial Sequence
  Description of Artificial Sequence: Synthetic oligonucleotide
  Target: APOC3; (-) strand; PAM type: NRG; PAM sequence: CAG
ggagaagggccaaggccgct

SEQ ID NO: 6771 - DNA, 20 bp, Artificial Sequence
  Description of Artificial Sequence: Synthetic oligonucleotide
  Target: APOC3; (-) strand; PAM type: NRG; PAM sequence: AGG
gggttggtggagaagggcca

SEQ ID NO: 6772 - DNA, 20 bp, Artificial Sequence
  Description of Artificial Sequence: Synthetic oligonucleotide
  Target: APOC3; (-) strand; PAM type: NRG; PAM sequence: AAG
ggggttggtggagaagggcc

SEQ ID NO: 6773 - DNA, 20 bp, Artificial Sequence
  Description of Artificial Sequence: Synthetic oligonucleotide
  Target: APOC3; (-) strand; PAM type: NRG; PAM sequence: GGG
gggcaggggttggtggagaa

SEQ ID NO: 6774 - DNA, 20 bp, Artificial Sequence
  Description of Artificial Sequence: Synthetic oligonucleotide
  Target: APOC3; (-) strand; PAM type: NRG; PAM sequence: AGG
agggcaggggttggtggaga

SEQ ID NO: 6775 - DNA, 20 bp, Artificial Sequence
  Description of Artificial Sequence: Synthetic oligonucleotide
  Target: APOC3; (-) strand; PAM type: NRG; PAM sequence: AAG
tagggcaggggttggtggag

SEQ ID NO: 6776 - DNA, 20 bp, Artificial Sequence
  Description of Artificial Sequence: Synthetic oligonucleotide
  Target: APOC3; (-) strand; PAM type: NRG; PAM sequence: GAG
gtgtagggcaggggttggtg

SEQ ID NO: 6777 - DNA, 20 bp, Artificial Sequence
  Description of Artificial Sequence: Synthetic oligonucleotide
  Target: APOC3; (-) strand; PAM type: NRG; PAM sequence: TGG
tagtgtagggcaggggttgg

SEQ ID NO: 6778 - DNA, 20 bp, Artificial Sequence
  Description of Artificial Sequence: Synthetic oligonucleotide
  Target: APOC3; (-) strand; PAM type: NRG; PAM sequence: TGG
ccttagtgtagggcaggggt

SEQ ID NO: 6779 - DNA, 20 bp, Artificial Sequence
  Description of Artificial Sequence: Synthetic oligonucleotide
  Target: APOC3; (-) strand; PAM type: NRG; PAM sequence: GGG
tcccccttagtgtagggcag

SEQ ID NO: 6780 - DNA, 20 bp, Artificial Sequence
  Description of Artificial Sequence: Synthetic oligonucleotide
  Target: APOC3; (-) strand; PAM type: NRG; PAM sequence: GGG
ctcccccttagtgtagggca

SEQ ID NO: 6781 - DNA, 20 bp, Artificial Sequence
  Description of Artificial Sequence: Synthetic oligonucleotide
  Target: APOC3; (-) strand; PAM type: NRG; PAM sequence: AGG
cctcccccttagtgtagggc

SEQ ID NO: 6782 - DNA, 20 bp, Artificial Sequence
  Description of Artificial Sequence: Synthetic oligonucleotide
  Target: APOC3; (-) strand; PAM type: NRG; PAM sequence: CAG
gcctcccccttagtgtaggg

SEQ ID NO: 6783 - DNA, 20 bp, Artificial Sequence
  Description of Artificial Sequence: Synthetic oligonucleotide
  Target: APOC3; (-) strand; PAM type: NRG; PAM sequence: GGG
gctgcctcccccttagtgta

SEQ ID NO: 6784 - DNA, 20 bp, Artificial Sequence
  Description of Artificial Sequence: Synthetic oligonucleotide
  Target: APOC3; (-) strand; PAM type: NRG; PAM sequence: AGG
cgctgcctcccccttagtgt

SEQ ID NO: 6785 - DNA, 20 bp, Artificial Sequence
  Description of Artificial Sequence: Synthetic oligonucleotide
  Target: APOC3; (-) strand; PAM type: NRG; PAM sequence: TAG
ccgctgcctcccccttagtg

SEQ ID NO: 6786 - DNA, 20 bp, Artificial Sequence
  Description of Artificial Sequence: Synthetic oligonucleotide
  Target: APOC3; (-) strand; PAM type: NRG; PAM sequence: TAG
gccccccgctgcctccccct

SEQ ID NO: 6787 - DNA, 20 bp, Artificial Sequence
  Description of Artificial Sequence: Synthetic oligonucleotide
  Target: APOC3; (-) strand; PAM type: NRG; PAM sequence: CAG
ggcgagtgctgctcacccag

SEQ ID NO: 6788 - DNA, 20 bp, Artificial Sequence
  Description of Artificial Sequence: Synthetic oligonucleotide
  Target: APOC3; (-) strand; PAM type: NRG; PAM sequence: CAG
gcaggcgagtgctgctcacc

SEQ ID NO: 6789 - DNA, 20 bp, Artificial Sequence
  Description of Artificial Sequence: Synthetic oligonucleotide
  Target: APOC3; (-) strand; PAM type: NRG; PAM sequence: GAG
gggtttcaatccaggcaggc

SEQ ID NO: 6790 - DNA, 20 bp, Artificial Sequence
  Description of Artificial Sequence: Synthetic oligonucleotide
  Target: APOC3; (-) strand; PAM type: NRG; PAM sequence: AGG
ctctgggtttcaatccaggc

SEQ ID NO: 6791 - DNA, 20 bp, Artificial Sequence
  Description of Artificial Sequence: Synthetic oligonucleotide
  Target: APOC3; (-) strand; PAM type: NRG; PAM sequence: CAG
tctctgggtttcaatccagg

SEQ ID NO: 6792 - DNA, 20 bp, Artificial Sequence
  Description of Artificial Sequence: Synthetic oligonucleotide
  Target: APOC3; (-) strand; PAM type: NRG; PAM sequence: AGG
ccatctctgggtttcaatcc

SEQ ID NO: 6793 - DNA, 20 bp, Artificial Sequence
  Description of Artificial Sequence: Synthetic oligonucleotide
  Target: APOC3; (-) strand; PAM type: NRG; PAM sequence: CAG
tccatctctgggtttcaatc

SEQ ID NO: 6794 - DNA, 20 bp, Artificial Sequence
  Description of Artificial Sequence: Synthetic oligonucleotide
  Target: APOC3; (-) strand; PAM type: NRG; PAM sequence: GGG
ctcccagcacctccatctct

SEQ ID NO: 6795 - DNA, 20 bp, Artificial Sequence
  Description of Artificial Sequence: Synthetic oligonucleotide
  Target: APOC3; (-) strand; PAM type: NRG; PAM sequence: TGG
cctcccagcacctccatctc

SEQ ID NO: 6796 - DNA, 20 bp, Artificial Sequence
  Description of Artificial Sequence: Synthetic oligonucleotide
  Target: APOC3; (-) strand; PAM type: NRG; PAM sequence: CAG
tgagctctcacagcccctcc

SEQ ID NO: 6797 - DNA, 20 bp, Artificial Sequence
  Description of Artificial Sequence: Synthetic oligonucleotide
  Target: APOC3; (-) strand; PAM type: NRG; PAM sequence: CAG
gttacagggctgagctctca

SEQ ID NO: 6798 - DNA, 20 bp, Artificial Sequence
  Description of Artificial Sequence: Synthetic oligonucleotide
  Target: APOC3; (-) strand; PAM type: NRG; PAM sequence: GAG
caaggcctggttacagggct

SEQ ID NO: 6799 - DNA, 20 bp, Artificial Sequence
  Description of Artificial Sequence: Synthetic oligonucleotide
  Target: APOC3; (-) strand; PAM type: NRG; PAM sequence: GGG
tccggcaaggcctggttaca

SEQ ID NO: 6800 - DNA, 20 bp, Artificial Sequence
  Description of Artificial Sequence: Synthetic oligonucleotide
  Target: APOC3; (-) strand; PAM type: NRG; PAM sequence: AGG
ctccggcaaggcctggttac

SEQ ID NO: 6801 - DNA, 20 bp, Artificial Sequence
  Description of Artificial Sequence: Synthetic oligonucleotide
  Target: APOC3; (-) strand; PAM type: NRG; PAM sequence: CAG
gctccggcaaggcctggtta

SEQ ID NO: 6802 - DNA, 20 bp, Artificial Sequence
  Description of Artificial Sequence: Synthetic oligonucleotide
  Target: APOC3; (-) strand; PAM type: NRG; PAM sequence: TGG
tcagtggctccggcaaggcc

SEQ ID NO: 6803 - DNA, 20 bp, Artificial Sequence
  Description of Artificial Sequence: Synthetic oligonucleotide
  Target: APOC3; (-) strand; PAM type: NRG; PAM sequence: AGG
aggcatcagtggctccggca

SEQ ID NO: 6804 - DNA, 20 bp, Artificial Sequence
  Description of Artificial Sequence: Synthetic oligonucleotide
  Target: APOC3; (-) strand; PAM type: NRG; PAM sequence: AAG
caggcatcagtggctccggc

SEQ ID NO: 6805 - DNA, 20 bp, Artificial Sequence
  Description of Artificial Sequence: Synthetic oligonucleotide
  Target: APOC3; (-) strand; PAM type: NRG; PAM sequence: CGG
agaccaggcatcagtggctc

SEQ ID NO: 6806 - DNA, 20 bp, Artificial Sequence
  Description of Artificial Sequence: Synthetic oligonucleotide
  Target: APOC3; (-) strand; PAM type: NRG; PAM sequence: TGG
cacagaagaccaggcatcag

SEQ ID NO: 6807 - DNA, 20 bp, Artificial Sequence
  Description of Artificial Sequence: Synthetic oligonucleotide
  Target: APOC3; (-) strand; PAM type: NRG; PAM sequence: CAG
aggcacagaagaccaggcat

SEQ ID NO: 6808 - DNA, 20 bp, Artificial Sequence
  Description of Artificial Sequence: Synthetic oligonucleotide
  Target: APOC3; (-) strand; PAM type: NRG; PAM sequence: AGG
gagtaaaggcacagaagacc

SEQ ID NO: 6809 - DNA, 20 bp, Artificial Sequence
  Description of Artificial Sequence: Synthetic oligonucleotide
  Target: APOC3; (-) strand; PAM type: NRG; PAM sequence: CAG
ggagtaaaggcacagaagac

SEQ ID NO: 6810 - DNA, 20 bp, Artificial Sequence
  Description of Artificial Sequence: Synthetic oligonucleotide
  Target: APOC3; (-) strand; PAM type: NRG; PAM sequence: AAG
tgtttggagtaaaggcacag

SEQ ID NO: 6811 - DNA, 20 bp, Artificial Sequence
  Description of Artificial Sequence: Synthetic oligonucleotide
  Target: APOC3; (-) strand; PAM type: NRG; PAM sequence: CAG
gggtgtttggagtaaaggca

SEQ ID NO: 6812 - DNA, 20 bp, Artificial Sequence
  Description of Artificial Sequence: Synthetic oligonucleotide
  Target: APOC3; (-) strand; PAM type: NRG; PAM sequence: AGG
ctggggggtgtttggagtaa

SEQ ID NO: 6813 - DNA, 20 bp, Artificial Sequence
  Description of Artificial Sequence: Synthetic oligonucleotide
  Target: APOC3; (-) strand; PAM type: NRG; PAM sequence: AAG
gctggggggtgtttggagta

SEQ ID NO: 6814 - DNA, 20 bp, Artificial Sequence
  Description of Artificial Sequence: Synthetic oligonucleotide
  Target: APOC3; (-) strand; PAM type: NRG; PAM sequence: GAG
cttgggctggggggtgtttg

SEQ ID NO: 6815 - DNA, 20 bp, Artificial Sequence
  Description of Artificial Sequence: Synthetic oligonucleotide
  Target: APOC3; (-) strand; PAM type: NRG; PAM sequence: TGG
ggcttgggctggggggtgtt

SEQ ID NO: 6816 - DNA, 20 bp, Artificial Sequence
  Description of Artificial Sequence: Synthetic oligonucleotide
  Target: APOC3; (-) strand; PAM type: NRG; PAM sequence: GGG
agtgggtggcttgggctggg

SEQ ID NO: 6817 - DNA, 20 bp, Artificial Sequence
  Description of Artificial Sequence: Synthetic oligonucleotide
  Target: APOC3; (-) strand; PAM type: NRG; PAM sequence: GGG
aagtgggtggcttgggctgg

SEQ ID NO: 6818 - DNA, 20 bp, Artificial Sequence
  Description of Artificial Sequence: Synthetic oligonucleotide
  Target: APOC3; (-) strand; PAM type: NRG; PAM sequence: GGG
caagtgggtggcttgggctg

SEQ ID NO: 6819 - DNA, 20 bp, Artificial Sequence
  Description of Artificial Sequence: Synthetic oligonucleotide
  Target: APOC3; (-) strand; PAM type: NRG; PAM sequence: GGG
acaagtgggtggcttgggct

SEQ ID NO: 6820 - DNA, 20 bp, Artificial Sequence
  Description of Artificial Sequence: Synthetic oligonucleotide
  Target: APOC3; (-) strand; PAM type: NRG; PAM sequence: TGG
aacaagtgggtggcttgggc

SEQ ID NO: 6821 - DNA, 20 bp, Artificial Sequence
  Description of Artificial Sequence: Synthetic oligonucleotide
  Target: APOC3; (-) strand; PAM type: NRG; PAM sequence: GGG
tgagaacaagtgggtggctt

SEQ ID NO: 6822 - DNA, 20 bp, Artificial Sequence
  Description of Artificial Sequence: Synthetic oligonucleotide
  Target: APOC3; (-) strand; PAM type: NRG; PAM sequence: TGG
ttgagaacaagtgggtggct

SEQ ID NO: 6823 - DNA, 20 bp, Artificial Sequence
  Description of Artificial Sequence: Synthetic oligonucleotide
  Target: APOC3; (-) strand; PAM type: NRG; PAM sequence: TGG
cagacttgagaacaagtggg

SEQ ID NO: 6824 - DNA, 20 bp, Artificial Sequence
  Description of Artificial Sequence: Synthetic oligonucleotide
  Target: APOC3; (-) strand; PAM type: NRG; PAM sequence: GGG
cttcagacttgagaacaagt

SEQ ID NO: 6825 - DNA, 20 bp, Artificial Sequence
  Description of Artificial Sequence: Synthetic oligonucleotide
  Target: APOC3; (-) strand; PAM type: NRG; PAM sequence: TGG
tcttcagacttgagaacaag

SEQ ID NO: 6826 - DNA, 20 bp, Artificial Sequence
  Description of Artificial Sequence: Synthetic oligonucleotide
  Target: APOC3; (-) strand; PAM type: NRG; PAM sequence: AAG
gcttcttcagacttgagaac

SEQ ID NO: 6827 - DNA, 20 bp, Artificial Sequence
  Description of Artificial Sequence: Synthetic oligonucleotide
  Target: APOC3; (-) strand; PAM type: NRG; PAM sequence: GAG
tgaggggcttcttcagactt

SEQ ID NO: 6828 - DNA, 20 bp, Artificial Sequence
  Description of Artificial Sequence: Synthetic oligonucleotide
  Target: APOC3; (-) strand; PAM type: NRG; PAM sequence: CAG
agaggggtgaggggcttctt

SEQ ID NO: 6829 - DNA, 20 bp, Artificial Sequence
  Description of Artificial Sequence: Synthetic oligonucleotide
  Target: APOC3; (-) strand; PAM type: NRG; PAM sequence: GGG
gcctggagtagaggggtgag

SEQ ID NO: 6830 - DNA, 20 bp, Artificial Sequence
  Description of Artificial Sequence: Synthetic oligonucleotide
  Target: APOC3; (-) strand; PAM type: NRG; PAM sequence: GGG
agcctggagtagaggggtga

SEQ ID NO: 6831 - DNA, 20 bp, Artificial Sequence
  Description of Artificial Sequence: Synthetic oligonucleotide
  Target: APOC3; (-) strand; PAM type: NRG; PAM sequence: AGG
cagcctggagtagaggggtg

SEQ ID NO: 6832 - DNA, 20 bp, Artificial Sequence
  Description of Artificial Sequence: Synthetic oligonucleotide
  Target: APOC3; (-) strand; PAM type: NRG; PAM sequence: GAG
acagcctggagtagaggggt

SEQ ID NO: 6833 - DNA, 20 bp, Artificial Sequence
  Description of Artificial Sequence: Synthetic oligonucleotide
  Target: APOC3; (-) strand; PAM type: NRG; PAM sequence: GGG
gaacacagcctggagtagag

SEQ ID NO: 6834 - DNA, 20 bp, Artificial Sequence
  Description of Artificial Sequence: Synthetic oligonucleotide
  Target: APOC3; (-) strand; PAM type: NRG; PAM sequence: GGG
tgaacacagcctggagtaga

SEQ ID NO: 6835 - DNA, 20 bp, Artificial Sequence
  Description of Artificial Sequence: Synthetic oligonucleotide
  Target: APOC3; (-) strand; PAM type: NRG; PAM sequence: AGG
ctgaacacagcctggagtag

SEQ ID NO: 6836 - DNA, 20 bp, Artificial Sequence
  Description of Artificial Sequence: Synthetic oligonucleotide
  Target: APOC3; (-) strand; PAM type: NRG; PAM sequence: GAG
cctgaacacagcctggagta

SEQ ID NO: 6837 - DNA, 20 bp, Artificial Sequence
  Description of Artificial Sequence: Synthetic oligonucleotide
  Target: APOC3; (-) strand; PAM type: NRG; PAM sequence: TAG
gccctgaacacagcctggag

SEQ ID NO: 6838 - DNA, 20 bp, Artificial Sequence
  Description of Artificial Sequence: Synthetic oligonucleotide
  Target: APOC3; (-) strand; PAM type: NRG; PAM sequence: GAG
caagccctgaacacagcctg

SEQ ID NO: 6839 - DNA, 20 bp, Artificial Sequence
  Description of Artificial Sequence: Synthetic oligonucleotide
  Target: APOC3; (-) strand; PAM type: NRG; PAM sequence: TGG
cccaagccctgaacacagcc

SEQ ID NO: 6840 - DNA, 20 bp, Artificial Sequence
  Description of Artificial Sequence: Synthetic oligonucleotide
  Target: APOC3; (-) strand; PAM type: NRG; PAM sequence: CAG
ccagccccaagccctgaaca

SEQ ID NO: 6841 - DNA, 20 bp, Artificial Sequence
  Description of Artificial Sequence: Synthetic oligonucleotide
  Target: APOC3; (-) strand; PAM type: NRG; PAM sequence: AAG
cccctccctccaccagcccc

SEQ ID NO: 6842 - DNA, 20 bp, Artificial Sequence
  Description of Artificial Sequence: Synthetic oligonucleotide
  Target: APOC3; (-) strand; PAM type: NRG; PAM sequence: CAG
tttcaggcccctccctccac

SEQ ID NO: 6843 - DNA, 20 bp, Artificial Sequence
  Description of Artificial Sequence: Synthetic oligonucleotide
  Target: APOC3; (-) strand; PAM type: NRG; PAM sequence: AGG
gcctttcacactggaatttc

SEQ ID NO: 6844 - DNA, 20 bp, Artificial Sequence
  Description of Artificial Sequence: Synthetic oligonucleotide
  Target: APOC3; (-) strand; PAM type: NRG; PAM sequence: CAG
agcctttcacactggaattt

SEQ ID NO: 6845 - DNA, 20 bp, Artificial Sequence
  Description of Artificial Sequence: Synthetic oligonucleotide
  Target: APOC3; (-) strand; PAM type: NRG; PAM sequence: TGG
cccatctcagcctttcacac

SEQ ID NO: 6846 - DNA, 20 bp, Artificial Sequence
  Description of Artificial Sequence: Synthetic oligonucleotide
  Target: APOC3; (-) strand; PAM type: NRG; PAM sequence: CAG
caggggcctcgggcccatct

SEQ ID NO: 6847 - DNA, 20 bp, Artificial Sequence
  Description of Artificial Sequence: Synthetic oligonucleotide
  Target: APOC3; (-) strand; PAM type: NRG; PAM sequence: GGG
ggacataggccaggggcctc

SEQ ID NO: 6848 - DNA, 20 bp, Artificial Sequence
  Description of Artificial Sequence: Synthetic oligonucleotide
  Target: APOC3; (-) strand; PAM type: NRG; PAM sequence: CGG
tggacataggccaggggcct

SEQ ID NO: 6849 - DNA, 20 bp, Artificial Sequence
  Description of Artificial Sequence: Synthetic oligonucleotide
  Target: APOC3; (-) strand; PAM type: NRG; PAM sequence: GGG
atggcttggacataggccag

SEQ ID NO: 6850 - DNA, 20 bp, Artificial Sequence
  Description of Artificial Sequence: Synthetic oligonucleotide
  Target: APOC3; (-) strand; PAM type: NRG; PAM sequence: GGG
aatggcttggacataggcca

SEQ ID NO: 6851 - DNA, 20 bp, Artificial Sequence
  Description of Artificial Sequence: Synthetic oligonucleotide
  Target: APOC3; (-) strand; PAM type: NRG; PAM sequence: AGG
aaatggcttggacataggcc

SEQ ID NO: 6852 - DNA, 20 bp, Artificial Sequence
  Description of Artificial Sequence: Synthetic oligonucleotide
  Target: APOC3; (-) strand; PAM type: NRG; PAM sequence: CAG
gaaatggcttggacataggc

SEQ ID NO: 6853 - DNA, 20 bp, Artificial Sequence
  Description of Artificial Sequence: Synthetic oligonucleotide
  Target: APOC3; (-) strand; PAM type: NRG; PAM sequence: AGG
aggggaaatggcttggacat

SEQ ID NO: 6854 - DNA, 20 bp, Artificial Sequence
  Description of Artificial Sequence: Synthetic oligonucleotide
  Target: APOC3; (-) strand; PAM type: NRG; PAM sequence: TAG
gaggggaaatggcttggaca

SEQ ID NO: 6855 - DNA, 20 bp, Artificial Sequence
  Description of Artificial Sequence: Synthetic oligonucleotide
  Target: APOC3; (-) strand; PAM type: NRG; PAM sequence: TGG
tggtgagaggggaaatggct

SEQ ID NO: 6856 - DNA, 20 bp, Artificial Sequence
  Description of Artificial Sequence: Synthetic oligonucleotide
  Target: APOC3; (-) strand; PAM type: NRG; PAM sequence: TGG
gaggctggtgagaggggaaa

SEQ ID NO: 6857 - DNA, 20 bp, Artificial Sequence
  Description of Artificial Sequence: Synthetic oligonucleotide
  Target: APOC3; (-) strand; PAM type: NRG; PAM sequence: GGG
cagggagaggctggtgagag

SEQ ID NO: 6858 - DNA, 20 bp, Artificial Sequence
  Description of Artificial Sequence: Synthetic oligonucleotide
  Target: APOC3; (-) strand; PAM type: NRG; PAM sequence: GGG
ccagggagaggctggtgaga

SEQ ID NO: 6859 - DNA, 20 bp, Artificial Sequence
  Description of Artificial Sequence: Synthetic oligonucleotide
  Target: APOC3; (-) strand; PAM type: NRG; PAM sequence: AGG
cccagggagaggctggtgag

SEQ ID NO: 6860 - DNA, 20 bp, Artificial Sequence
  Description of Artificial Sequence: Synthetic oligonucleotide
  Target: APOC3; (-) strand; PAM type: NRG; PAM sequence: GAG
ccccagggagaggctggtga

SEQ ID NO: 6861 - DNA, 20 bp, Artificial Sequence
  Description of Artificial Sequence: Synthetic oligonucleotide
  Target: APOC3; (-) strand; PAM type: NRG; PAM sequence: GAG
ctccccagggagaggctggt

SEQ ID NO: 6862 - DNA, 20 bp, Artificial Sequence
  Description of Artificial Sequence: Synthetic oligonucleotide
  Target: APOC3; (-) strand; PAM type: NRG; PAM sequence: TGG
ctggctccccagggagaggc

SEQ ID NO: 6863 - DNA, 20 bp, Artificial Sequence
  Description of Artificial Sequence: Synthetic oligonucleotide
  Target: APOC3; (-) strand; PAM type: NRG; PAM sequence: AGG
ctgactggctccccagggag

SEQ ID NO: 6864 - DNA, 20 bp, Artificial Sequence
  Description of Artificial Sequence: Synthetic oligonucleotide
  Target: APOC3; (-) strand; PAM type: NRG; PAM sequence: GAG
gctgactggctccccaggga

SEQ ID NO: 6865 - DNA, 20 bp, Artificial Sequence
  Description of Artificial Sequence: Synthetic oligonucleotide
  Target: APOC3; (-) strand; PAM type: NRG; PAM sequence: GAG
tagctgactggctccccagg

SEQ ID NO: 6866 - DNA, 20 bp, Artificial Sequence
  Description of Artificial Sequence: Synthetic oligonucleotide
  Target: APOC3; (-) strand; PAM type: NRG; PAM sequence: GGG
cctagctgactggctcccca

SEQ ID NO: 6867 - DNA, 20 bp, Artificial Sequence
  Description of Artificial Sequence: Synthetic oligonucleotide
  Target: APOC3; (-) strand; PAM type: NRG; PAM sequence: AGG
tcctagctgactggctcccc

SEQ ID NO: 6868 - DNA, 20 bp, Artificial Sequence
  Description of Artificial Sequence: Synthetic oligonucleotide
  Target: APOC3; (-) strand; PAM type: NRG; PAM sequence: CAG
ttcctagctgactggctccc

SEQ ID NO: 6869 - DNA, 20 bp, Artificial Sequence
  Description of Artificial Sequence: Synthetic oligonucleotide
  Target: APOC3; (-) strand; PAM type: NRG; PAM sequence: TGG
ctcattccttcctagctgac

SEQ ID NO: 6870 - DNA, 20 bp, Artificial Sequence
  Description of Artificial Sequence: Synthetic oligonucleotide
  Target: APOC3; (-) strand; PAM type: NRG; PAM sequence: TAG
ggggagccctcattccttcc

SEQ ID NO: 6871 - DNA, 20 bp, Artificial Sequence
  Description of Artificial Sequence: Synthetic oligonucleotide
  Target: APOC3; (-) strand; PAM type: NRG; PAM sequence: GAG
gaactgggggtgggcctggg

SEQ ID NO: 6872 - DNA, 20 bp, Artificial Sequence
  Description of Artificial Sequence: Synthetic oligonucleotide
  Target: APOC3; (-) strand; PAM type: NRG; PAM sequence: GGG
aggaactgggggtgggcctg

SEQ ID NO: 6873 - DNA, 20 bp, Artificial Sequence
  Description of Artificial Sequence: Synthetic oligonucleotide
  Target: APOC3; (-) strand; PAM type: NRG; PAM sequence: GGG
caggaactgggggtgggcct

SEQ ID NO: 6874 - DNA, 20 bp, Artificial Sequence
  Description of Artificial Sequence: Synthetic oligonucleotide
  Target: APOC3; (-) strand; PAM type: NRG; PAM sequence: TGG
tcaggaactgggggtgggcc

SEQ ID NO: 6875 - DNA, 20 bp, Artificial Sequence
  Description of Artificial Sequence: Synthetic oligonucleotide
  Target: APOC3; (-) strand; PAM type: NRG; PAM sequence: GGG
tgagctcaggaactgggggt

SEQ ID NO: 6876 - DNA, 20 bp, Artificial Sequence
  Description of Artificial Sequence: Synthetic oligonucleotide
  Target: APOC3; (-) strand; PAM type: NRG; PAM sequence: TGG
atgagctcaggaactggggg

SEQ ID NO: 6877 - DNA, 20 bp, Artificial Sequence
  Description of Artificial Sequence: Synthetic oligonucleotide
  Target: APOC3; (-) strand; PAM type: NRG; PAM sequence: GGG
cagatgagctcaggaactgg

SEQ ID NO: 6878 - DNA, 20 bp, Artificial Sequence
  Description of Artificial Sequence: Synthetic oligonucleotide
  Target: APOC3; (-) strand; PAM type: NRG; PAM sequence: GGG
ccagatgagctcaggaactg

SEQ ID NO: 6879 - DNA, 20 bp, Artificial Sequence
  Description of Artificial Sequence: Synthetic oligonucleotide
  Target: APOC3; (-) strand; PAM type: NRG; PAM sequence: GGG
cccagatgagctcaggaact

SEQ ID NO: 6880 - DNA, 20 bp, Artificial Sequence
  Description of Artificial Sequence: Synthetic oligonucleotide
  Target: APOC3; (-) strand; PAM type: NRG; PAM sequence: TGG
gcccagatgagctcaggaac

SEQ ID NO: 6881 - DNA, 20 bp, Artificial Sequence
  Description of Artificial Sequence: Synthetic oligonucleotide
  Target: APOC3; (-) strand; PAM type: NRG; PAM sequence: AGG
cctgcagcccagatgagctc

SEQ ID NO: 6882 - DNA, 20 bp, Artificial Sequence
  Description of Artificial Sequence: Synthetic oligonucleotide
  Target: APOC3; (-) strand; PAM type: NRG; PAM sequence: CAG
ccctgcagcccagatgagct

SEQ ID NO: 6883 - DNA, 20 bp, Artificial Sequence
  Description of Artificial Sequence: Synthetic oligonucleotide
  Target: APOC3; (-) strand; PAM type: NRG; PAM sequence: GAG
gccagccctgcagcccagat

SEQ ID NO: 6884 - DNA, 20 bp, Artificial Sequence
  Description of Artificial Sequence: Synthetic oligonucleotide
  Target: APOC3; (-) strand; PAM type: NRG; PAM sequence: CAG
gtcccgccagccctgcagcc

SEQ ID NO: 6885 - DNA, 20 bp, Artificial Sequence
  Description of Artificial Sequence: Synthetic oligonucleotide
  Target: APOC3; (-) strand; PAM type: NRG; PAM sequence: CAG
ctgctgtcccgccagccctg

SEQ ID NO: 6886 - DNA, 20 bp, Artificial Sequence
  Description of Artificial Sequence: Synthetic oligonucleotide
  Target: APOC3; (-) strand; PAM type: NRG; PAM sequence: CAG
agtccacgctgctgtcccgc

SEQ ID NO: 6887 - DNA, 20 bp, Artificial Sequence
  Description of Artificial Sequence: Synthetic oligonucleotide
  Target: APOC3; (-) strand; PAM type: NRG; PAM sequence: GAG
tgggaaatccctaggagact

SEQ ID NO: 6888 - DNA, 20 bp, Artificial Sequence
  Description of Artificial Sequence: Synthetic oligonucleotide
  Target: APOC3; (-) strand; PAM type: NRG; PAM sequence: GAG
gagagttgggaaatccctag

SEQ ID NO: 6889 - DNA, 20 bp, Artificial Sequence
  Description of Artificial Sequence: Synthetic oligonucleotide
  Target: APOC3; (-) strand; PAM type: NRG; PAM sequence: AGG
gggagagttgggaaatccct

SEQ ID NO: 6890 - DNA, 20 bp, Artificial Sequence
  Description of Artificial Sequence: Synthetic oligonucleotide
  Target: APOC3; (-) strand; PAM type: NRG; PAM sequence: TAG
cgggagagttgggaaatccc

SEQ ID NO: 6891 - DNA, 20 bp, Artificial Sequence
  Description of Artificial Sequence: Synthetic oligonucleotide
  Target: APOC3; (-) strand; PAM type: NRG; PAM sequence: GGG
agcaagcgggcgggagagtt

SEQ ID NO: 6892 - DNA, 20 bp, Artificial Sequence
  Description of Artificial Sequence: Synthetic oligonucleotide
  Target: APOC3; (-) strand; PAM type: NRG; PAM sequence: TGG
cagcaagcgggcgggagagt

SEQ ID NO: 6893 - DNA, 20 bp, Artificial Sequence
  Description of Artificial Sequence: Synthetic oligonucleotide
  Target: APOC3; (-) strand; PAM type: NRG; PAM sequence: GAG
gatgcagcaagcgggcggga

SEQ ID NO: 6894 - DNA, 20 bp, Artificial Sequence
  Description of Artificial Sequence: Synthetic oligonucleotide
  Target: APOC3; (-) strand; PAM type: NRG; PAM sequence: GAG
cagatgcagcaagcgggcgg

SEQ ID NO: 6895 - DNA, 20 bp, Artificial Sequence
  Description of Artificial Sequence: Synthetic oligonucleotide
  Target: APOC3; (-) strand; PAM type: NRG; PAM sequence: GGG
tccagatgcagcaagcgggc

SEQ ID NO: 6896 - DNA, 20 bp, Artificial Sequence
  Description of Artificial Sequence: Synthetic oligonucleotide
  Target: APOC3; (-) strand; PAM type: NRG; PAM sequence: CGG
gtccagatgcagcaagcggg

SEQ ID NO: 6897 - DNA, 20 bp, Artificial Sequence
  Description of Artificial Sequence: Synthetic oligonucleotide
  Target: APOC3; (-) strand; PAM type: NRG; PAM sequence: GGG
ggtgtccagatgcagcaagc

SEQ ID NO: 6898 - DNA, 20 bp, Artificial Sequence
  Description of Artificial Sequence: Synthetic oligonucleotide
  Target: APOC3; (-) strand; PAM type: NRG; PAM sequence: CGG
gggtgtccagatgcagcaag

SEQ ID NO: 6899 - DNA, 20 bp, Artificial Sequence
  Description of Artificial Sequence: Synthetic oligonucleotide
  Target: APOC3; (-) strand; PAM type: NRG; PAM sequence: AAG
gcagggtgtccagatgcagc

SEQ ID NO: 6900 - DNA, 20 bp, Artificial Sequence
  Description of Artificial Sequence: Synthetic oligonucleotide
  Target: APOC3; (-) strand; PAM type: NRG; PAM sequence: CAG
tgaggcagggtgtccagatg

SEQ ID NO: 6901 - DNA, 20 bp, Artificial Sequence
  Description of Artificial Sequence: Synthetic oligonucleotide
  Target: APOC3; (-) strand; PAM type: NRG; PAM sequence: CAG
agggcctgaggcagggtgtc

SEQ ID NO: 6902 - DNA, 20 bp, Artificial Sequence
  Description of Artificial Sequence: Synthetic oligonucleotide
  Target: APOC3; (-) strand; PAM type: NRG; PAM sequence: GGG
ggagatgagggcctgaggca

SEQ ID NO: 6903 - DNA, 20 bp, Artificial Sequence
  Description of Artificial Sequence: Synthetic oligonucleotide
  Target: APOC3; (-) strand; PAM type: NRG; PAM sequence: AGG
tggagatgagggcctgaggc

SEQ ID NO: 6904 - DNA, 20 bp, Artificial Sequence
  Description of Artificial Sequence: Synthetic oligonucleotide
  Target: APOC3; (-) strand; PAM type: NRG; PAM sequence: CAG
gtggagatgagggcctgagg

SEQ ID NO: 6905 - DNA, 20 bp, Artificial Sequence
  Description of Artificial Sequence: Synthetic oligonucleotide
  Target: APOC3; (-) strand; PAM type: NRG; PAM sequence: AGG
ccagtggagatgagggcctg

SEQ ID NO: 6906 - DNA, 20 bp, Artificial Sequence
  Description of Artificial Sequence: Synthetic oligonucleotide
  Target: APOC3; (-) strand; PAM type: NRG; PAM sequence: GAG
accagtggagatgagggcct

SEQ ID NO: 6907 - DNA, 20 bp, Artificial Sequence
  Description of Artificial Sequence: Synthetic oligonucleotide
  Target: APOC3; (-) strand; PAM type: NRG; PAM sequence: GGG
ctgctgaccagtggagatga

SEQ ID NO: 6908 - DNA, 20 bp, Artificial Sequence
  Description of Artificial Sequence: Synthetic oligonucleotide
  Target: APOC3; (-) strand; PAM type: NRG; PAM sequence: AGG
cctgctgaccagtggagatg

SEQ ID NO: 6909 - DNA, 20 bp, Artificial Sequence
  Description of Artificial Sequence: Synthetic oligonucleotide
  Target: APOC3; (-) strand; PAM type: NRG; PAM sequence: GAG
acctgctgaccagtggagat

SEQ ID NO: 6910 - DNA, 20 bp, Artificial Sequence
  Description of Artificial Sequence: Synthetic oligonucleotide
  Target: APOC3; (-) strand; PAM type: NRG; PAM sequence: GAG
aggtcacctgctgaccagtg

SEQ ID NO: 6911 - DNA, 20 bp, Artificial Sequence
  Description of Artificial Sequence: Synthetic oligonucleotide
  Target: APOC3; (-) strand; PAM type: NRG; PAM sequence: TGG
aaaggtcacctgctgaccag

SEQ ID NO: 6912 - DNA, 20 bp, Artificial Sequence
  Description of Artificial Sequence: Synthetic oligonucleotide
  Target: APOC3; (-) strand; PAM type: NRG; PAM sequence: CAG
ggcaaaggtcacctgctgac

SEQ ID NO: 6913 - DNA, 20 bp, Artificial Sequence
  Description of Artificial Sequence: Synthetic oligonucleotide
  Target: APOC3; (-) strand; PAM type: NRG; PAM sequence: AGG
ggacccagggcgctgggcaa

SEQ ID NO: 6914 - DNA, 20 bp, Artificial Sequence
  Description of Artificial Sequence: Synthetic oligonucleotide
  Target: APOC3; (-) strand; PAM type: NRG; PAM sequence: AAG
aggacccagggcgctgggca

SEQ ID NO: 6915 - DNA, 20 bp, Artificial Sequence
  Description of Artificial Sequence: Synthetic oligonucleotide
  Target: APOC3; (-) strand; PAM type: NRG; PAM sequence: GGG
cactgaggacccagggcgct

SEQ ID NO: 6916 - DNA, 20 bp, Artificial Sequence
  Description of Artificial Sequence: Synthetic oligonucleotide
  Target: APOC3; (-) strand; PAM type: NRG; PAM sequence: TGG
gcactgaggacccagggcgc

SEQ ID NO: 6917 - DNA, 20 bp, Artificial Sequence
  Description of Artificial Sequence: Synthetic oligonucleotide
  Target: APOC3; (-) strand; PAM type: NRG; PAM sequence: GGG
cagcaggcactgaggaccca

SEQ ID NO: 6918 - DNA, 20 bp, Artificial Sequence
  Description of Artificial Sequence: Synthetic oligonucleotide
  Target: APOC3; (-) strand; PAM type: NRG; PAM sequence: AGG
gcagcaggcactgaggaccc

SEQ ID NO: 6919 - DNA, 20 bp, Artificial Sequence
  Description of Artificial Sequence: Synthetic oligonucleotide
  Target: APOC3; (-) strand; PAM type: NRG; PAM sequence: CAG
ggcagcaggcactgaggacc

SEQ ID NO: 6920 - DNA, 20 bp, Artificial Sequence
  Description of Artificial Sequence: Synthetic oligonucleotide
  Target: APOC3; (-) strand; PAM type: NRG; PAM sequence: AGG
ctccagggcagcaggcactg

SEQ ID NO: 6921 - DNA, 20 bp, Artificial Sequence
  Description of Artificial Sequence: Synthetic oligonucleotide
  Target: APOC3; (-) strand; PAM type: NRG; PAM sequence: GAG
tctccagggcagcaggcact

SEQ ID NO: 6922 - DNA, 20 bp, Artificial Sequence
  Description of Artificial Sequence: Synthetic oligonucleotide
  Target: APOC3; (-) strand; PAM type: NRG; PAM sequence: AGG
tatatcatctccagggcagc

SEQ ID NO: 6923 - DNA, 20 bp, Artificial Sequence
  Description of Artificial Sequence: Synthetic oligonucleotide
  Target: APOC3; (-) strand; PAM type: NRG; PAM sequence: CAG
ttatatcatctccagggcag

SEQ ID NO: 6924 - DNA, 20 bp, Artificial Sequence
  Description of Artificial Sequence: Synthetic oligonucleotide
  Target: APOC3; (-) strand; PAM type: NRG; PAM sequence: CAG
gttttatatcatctccaggg

SEQ ID NO: 6925 - DNA, 20 bp, Artificial Sequence
  Description of Artificial Sequence: Synthetic oligonucleotide
  Target: APOC3; (-) strand; PAM type: NRG; PAM sequence: GGG
cctgttttatatcatctcca

SEQ ID NO: 6926 - DNA, 20 bp, Artificial Sequence
  Description of Artificial Sequence: Synthetic oligonucleotide
  Target: APOC3; (-) strand; PAM type: NRG; PAM sequence: AGG
acctgttttatatcatctcc

SEQ ID NO: 6927 - DNA, 20 bp, Artificial Sequence
  Description of Artificial Sequence: Synthetic oligonucleotide
  Target: APOC3; (-) strand; PAM type: NRG; PAM sequence: CAG
gacctgttttatatcatctc

SEQ ID NO: 6928 - DNA, 20 bp, Artificial Sequence
  Description of Artificial Sequence: Synthetic oligonucleotide
  Target: APOC3; (-) strand; PAM type: NRG; PAM sequence: GGG
aactgagcagacaggcagga

SEQ ID NO: 6929 - DNA, 20 bp, Artificial Sequence
  Description of Artificial Sequence: Synthetic oligonucleotide
  Target: APOC3; (-) strand; PAM type: NRG; PAM sequence: AGG
gaactgagcagacaggcagg

SEQ ID NO: 6930 - DNA, 20 bp, Artificial Sequence
  Description of Artificial Sequence: Synthetic oligonucleotide
  Target: APOC3; (-) strand; PAM type: NRG; PAM sequence: GAG
tgaactgagcagacaggcag

SEQ ID NO: 6931 - DNA, 20 bp, Artificial Sequence
  Description of Artificial Sequence: Synthetic oligonucleotide
  Target: APOC3; (-) strand; PAM type: NRG; PAM sequence: AGG
gatgaactgagcagacaggc

SEQ ID NO: 6932 - DNA, 20 bp, Artificial Sequence
  Description of Artificial Sequence: Synthetic oligonucleotide
  Target: APOC3; (-) strand; PAM type: NRG; PAM sequence: CAG
ggatgaactgagcagacagg

SEQ ID NO: 6933 - DNA, 20 bp, Artificial Sequence
  Description of Artificial Sequence: Synthetic oligonucleotide
  Target: APOC3; (-) strand; PAM type: NRG; PAM sequence: AGG
tagggatgaactgagcagac

SEQ ID NO: 6934 - DNA, 20 bp, Artificial Sequence
  Description of Artificial Sequence: Synthetic oligonucleotide
  Target: APOC3; (-) strand; PAM type: NRG; PAM sequence: CAG
ctagggatgaactgagcaga

SEQ ID NO: 6935 - DNA, 20 bp, Artificial Sequence
  Description of Artificial Sequence: Synthetic oligonucleotide
  Target: APOC3; (-) strand; PAM type: NRG; PAM sequence: CAG
gcctctagggatgaactgag

SEQ ID NO: 6936 - DNA, 20 bp, Artificial Sequence
  Description of Artificial Sequence: Synthetic oligonucleotide
  Target: APOC3; (-) strand; PAM type: NRG; PAM sequence: GAG
gctgcctctagggatgaact

SEQ ID NO: 6937 - DNA, 20 bp, Artificial Sequence
  Description of Artificial Sequence: Synthetic oligonucleotide
  Target: APOC3; (-) strand; PAM type: NRG; PAM sequence: GGG
acctggagcagctgcctcta

SEQ ID NO: 6938 - DNA, 20 bp, Artificial Sequence
  Description of Artificial Sequence: Synthetic oligonucleotide
  Target: APOC3; (-) strand; PAM type: NRG; PAM sequence: AGG
tacctggagcagctgcctct

SEQ ID NO: 6939 - DNA, 20 bp, Artificial Sequence
  Description of Artificial Sequence: Synthetic oligonucleotide
  Target: APOC3; (-) strand; PAM type: NRG; PAM sequence: TAG
ttacctggagcagctgcctc

SEQ ID NO: 6940 - DNA, 20 bp, Artificial Sequence
  Description of Artificial Sequence: Synthetic oligonucleotide
  Target: APOC3; (-) strand; PAM type: NRG; PAM sequence: CAG
ccagagggcattacctggag

SEQ ID NO: 6941 - DNA, 20 bp, Artificial Sequence
  Description of Artificial Sequence: Synthetic oligonucleotide
  Target: APOC3; (-) strand; PAM type: NRG; PAM sequence: GAG
tccccagagggcattacctg

SEQ ID NO: 6942 - DNA, 20 bp, Artificial Sequence
  Description of Artificial Sequence: Synthetic oligonucleotide
  Target: APOC3; (-) strand; PAM type: NRG; PAM sequence: TGG
cctccccagagggcattacc

SEQ ID NO: 6943 - DNA, 20 bp, Artificial Sequence
  Description of Artificial Sequence: Synthetic oligonucleotide
  Target: APOC3; (-) strand; PAM type: NRG; PAM sequence: GGG
tcctctttcccctccccaga

SEQ ID NO: 6944 - DNA, 20 bp, Artificial Sequence
  Description of Artificial Sequence: Synthetic oligonucleotide
  Target: APOC3; (-) strand; PAM type: NRG; PAM sequence: AGG
ctcctctttcccctccccag

SEQ ID NO: 6945 - DNA, 20 bp, Artificial Sequence
  Description of Artificial Sequence: Synthetic oligonucleotide
  Target: APOC3; (-) strand; PAM type: NRG; PAM sequence: GAG
cctcctctttcccctcccca

SEQ ID NO: 6946 - DNA, 20 bp, Artificial Sequence
  Description of Artificial Sequence: Synthetic oligonucleotide
  Target: APOC3; (-) strand; PAM type: NRG; PAM sequence: CAG
cccctcctctttcccctccc

SEQ ID NO: 6947 - DNA, 20 bp, Artificial Sequence
  Description of Artificial Sequence: Synthetic oligonucleotide
  Target: APOC3; (-) strand; PAM type: NRG; PAM sequence: GAG
tgctggctgggctgggcagg

SEQ ID NO: 6948 - DNA, 20 bp, Artificial Sequence
  Description of Artificial Sequence: Synthetic oligonucleotide
  Target: APOC3; (-) strand; PAM type: NRG; PAM sequence: GGG
cttgctggctgggctgggca

SEQ ID NO: 6949 - DNA, 20 bp, Artificial Sequence
  Description of Artificial Sequence: Synthetic oligonucleotide
  Target: APOC3; (-) strand; PAM type: NRG; PAM sequence: AGG
gcttgctggctgggctgggc

SEQ ID NO: 6950 - DNA, 20 bp, Artificial Sequence
  Description of Artificial Sequence: Synthetic oligonucleotide
  Target: APOC3; (-) strand; PAM type: NRG; PAM sequence: CAG
ggcttgctggctgggctggg

SEQ ID NO: 6951 - DNA, 20 bp, Artificial Sequence
  Description of Artificial Sequence: Synthetic oligonucleotide
  Target: APOC3; (-) strand; PAM type: NRG; PAM sequence: GGG
ccaggcttgctggctgggct

SEQ ID NO: 6952 - DNA, 20 bp, Artificial Sequence
  Description of Artificial Sequence: Synthetic oligonucleotide
  Target: APOC3; (-) strand; PAM type: NRG; PAM sequence: TGG
tccaggcttgctggctgggc

SEQ ID NO: 6953 - DNA, 20 bp, Artificial Sequence
  Description of Artificial Sequence: Synthetic oligonucleotide
  Target: APOC3; (-) strand; PAM type: NRG; PAM sequence: GGG
cttctccaggcttgctggct

SEQ ID NO: 6954 - DNA, 20 bp, Artificial Sequence
  Description of Artificial Sequence: Synthetic oligonucleotide
  Target: APOC3; (-) strand; PAM type: NRG; PAM sequence: TGG
gcttctccaggcttgctggc

SEQ ID NO: 6955 - DNA, 20 bp, Artificial Sequence
  Description of Artificial Sequence: Synthetic oligonucleotide
  Target: APOC3; (-) strand; PAM type: NRG; PAM sequence: TGG
aagtgcttctccaggcttgc

SEQ ID NO: 6956 - DNA, 20 bp, Artificial Sequence
  Description of Artificial Sequence: Synthetic oligonucleotide
  Target: APOC3; (-) strand; PAM type: NRG; PAM sequence: AGG
gctctagcaagtgcttctcc

SEQ ID NO: 6957 - DNA, 20 bp, Artificial Sequence
  Description of Artificial Sequence: Synthetic oligonucleotide
  Target: APOC3; (-) strand; PAM type: NRG; PAM sequence: CAG
agctctagcaagtgcttctc

SEQ ID NO: 6958 - DNA, 20 bp, Artificial Sequence
  Description of Artificial Sequence: Synthetic oligonucleotide
  Target: APOC3; (-) strand; PAM type: NRG; PAM sequence: AAG
gaggcttccttagctctagc

SEQ ID NO: 6959 - DNA, 20 bp, Artificial Sequence
  Description of Artificial Sequence: Synthetic oligonucleotide
  Target: APOC3; (-) strand; PAM type: NRG; PAM sequence: TAG
ctccgaggcttccttagctc

SEQ ID NO: 6960 - DNA, 20 bp, Artificial Sequence
  Description of Artificial Sequence: Synthetic oligonucleotide
  Target: APOC3; (-) strand; PAM type: NRG; PAM sequence: TAG
gtccagctccgaggcttcct

SEQ ID NO: 6961 - DNA, 20 bp, Artificial Sequence
  Description of Artificial Sequence: Synthetic oligonucleotide
  Target: APOC3; (-) strand; PAM type: NRG; PAM sequence: AGG
ggggcacccgtccagctccg

SEQ ID NO: 6962 - DNA, 20 bp, Artificial Sequence
  Description of Artificial Sequence: Synthetic oligonucleotide
  Target: APOC3; (-) strand; PAM type: NRG; PAM sequence: GAG
gggggcacccgtccagctcc

SEQ ID NO: 6963 - DNA, 20 bp, Artificial Sequence
  Description of Artificial Sequence: Synthetic oligonucleotide
  Target: APOC3; (-) strand; PAM type: NRG; PAM sequence: CAG
aggggtggggggcacccgtc

SEQ ID NO: 6964 - DNA, 20 bp, Artificial Sequence
  Description of Artificial Sequence: Synthetic oligonucleotide
  Target: APOC3; (-) strand; PAM type: NRG; PAM sequence: GGG
aggttatgatgaggggtggg

SEQ ID NO: 6965 - DNA, 20 bp, Artificial Sequence
  Description of Artificial Sequence: Synthetic oligonucleotide
  Target: APOC3; (-) strand; PAM type: NRG; PAM sequence: GGG
caggttatgatgaggggtgg

SEQ ID NO: 6966 - DNA, 20 bp, Artificial Sequence
  Description of Artificial Sequence: Synthetic oligonucleotide
  Target: APOC3; (-) strand; PAM type: NRG; PAM sequence: GGG
tcaggttatgatgaggggtg

SEQ ID NO: 6967 - DNA, 20 bp, Artificial Sequence
  Description of Artificial Sequence: Synthetic oligonucleotide
  Target: APOC3; (-) strand; PAM type: NRG; PAM sequence: GGG
ttcaggttatgatgaggggt

SEQ ID NO: 6968 - DNA, 20 bp, Artificial Sequence
  Description of Artificial Sequence: Synthetic oligonucleotide
  Target: APOC3; (-) strand; PAM type: NRG; PAM sequence: TGG
cttcaggttatgatgagggg

SEQ ID NO: 6969 - DNA, 20 bp, Artificial Sequence
  Description of Artificial Sequence: Synthetic oligonucleotide
  Target: APOC3; (-) strand; PAM type: NRG; PAM sequence: GGG
gttcttcaggttatgatgag

SEQ ID NO: 6970 - DNA, 20 bp, Artificial Sequence
  Description of Artificial Sequence: Synthetic oligonucleotide
  Target: APOC3; (-) strand; PAM type: NRG; PAM sequence: GGG
tgttcttcaggttatgatga

SEQ ID NO: 6971 - DNA, 20 bp, Artificial Sequence
  Description of Artificial Sequence: Synthetic oligonucleotide
  Target: APOC3; (-) strand; PAM type: NRG; PAM sequence: AGG
atgttcttcaggttatgatg

SEQ ID NO: 6972 - DNA, 20 bp, Artificial Sequence
  Description of Artificial Sequence: Synthetic oligonucleotide
  Target: APOC3; (-) strand; PAM type: NRG; PAM sequence: GAG
catgttcttcaggttatgat

SEQ ID NO: 6973 - DNA, 20 bp, Artificial Sequence
  Description of Artificial Sequence: Synthetic oligonucleotide
  Target: APOC3; (-) strand; PAM type: NRG; PAM sequence: AGG
cccgggcctccatgttcttc

SEQ ID NO: 6974 - DNA, 20 bp, Artificial Sequence
  Description of Artificial Sequence: Synthetic oligonucleotide
  Target: APOC3; (-) strand; PAM type: NRG; PAM sequence: CAG
tcccgggcctccatgttctt

SEQ ID NO: 6975 - DNA, 20 bp, Artificial Sequence
  Description of Artificial Sequence: Synthetic oligonucleotide
  Target: APOC3; (-) strand; PAM type: NRG; PAM sequence: GGG
gggcaagtgacacccctccc

SEQ ID NO: 6976 - DNA, 20 bp, Artificial Sequence
  Description of Artificial Sequence: Synthetic oligonucleotide
  Target: APOC3; (-) strand; PAM type: NRG; PAM sequence: CGG
tgggcaagtgacacccctcc

SEQ ID NO: 6977 - DNA, 20 bp, Artificial Sequence
  Description of Artificial Sequence: Synthetic oligonucleotide
  Target: APOC3; (-) strand; PAM type: NRG; PAM sequence: AAG
ccccctgtgtagctttgggc

SEQ ID NO: 6978 - DNA, 20 bp, Artificial Sequence
  Description of Artificial Sequence: Synthetic oligonucleotide
  Target: APOC3; (-) strand; PAM type: NRG; PAM sequence: GGG
cccaccccctgtgtagcttt

SEQ ID NO: 6979 - DNA, 20 bp, Artificial Sequence
  Description of Artificial Sequence: Synthetic oligonucleotide
  Target: APOC3; (-) strand; PAM type: NRG; PAM sequence: TGG
ccccaccccctgtgtagctt

SEQ ID NO: 6980 - DNA, 20 bp, Artificial Sequence
  Description of Artificial Sequence: Synthetic oligonucleotide
  Target: APOC3; (-) strand; PAM type: NRG; PAM sequence: TAG
ttccagccccaccccctgtg

SEQ ID NO: 6981 - DNA, 20 bp, Artificial Sequence
  Description of Artificial Sequence: Synthetic oligonucleotide
  Target: APOC3; (-) strand; PAM type: NRG; PAM sequence: CAG
cctgcacttggagccacttc

SEQ ID NO: 6982 - DNA, 20 bp, Artificial Sequence
  Description of Artificial Sequence: Synthetic oligonucleotide
  Target: APOC3; (-) strand; PAM type: NRG; PAM sequence: GAG
gaggggggaacctgcacttg

SEQ ID NO: 6983 - DNA, 20 bp, Artificial Sequence
  Description of Artificial Sequence: Synthetic oligonucleotide
  Target: APOC3; (-) strand; PAM type: NRG; PAM sequence: TGG
atgaggggggaacctgcact

SEQ ID NO: 6984 - DNA, 20 bp, Artificial Sequence
  Description of Artificial Sequence: Synthetic oligonucleotide
  Target: APOC3; (-) strand; PAM type: NRG; PAM sequence: GGG
ctaagcctgaagaatgaggg

SEQ ID NO: 6985 - DNA, 20 bp, Artificial Sequence
  Description of Artificial Sequence: Synthetic oligonucleotide
  Target: APOC3; (-) strand; PAM type: NRG; PAM sequence: GGG
cctaagcctgaagaatgagg

SEQ ID NO: 6986 - DNA, 20 bp, Artificial Sequence
  Description of Artificial Sequence: Synthetic oligonucleotide
  Target: APOC3; (-) strand; PAM type: NRG; PAM sequence: GGG
ccctaagcctgaagaatgag

SEQ ID NO: 6987 - DNA, 20 bp, Artificial Sequence
  Description of Artificial Sequence: Synthetic oligonucleotide
  Target: APOC3; (-) strand; PAM type: NRG; PAM sequence: GGG
gccctaagcctgaagaatga

SEQ ID NO: 6988 - DNA, 20 bp, Artificial Sequence
  Description of Artificial Sequence: Synthetic oligonucleotide
  Target: APOC3; (-) strand; PAM type: NRG; PAM sequence: AGG
agccctaagcctgaagaatg

SEQ ID NO: 6989 - DNA, 20 bp, Artificial Sequence
  Description of Artificial Sequence: Synthetic oligonucleotide
  Target: APOC3; (-) strand; PAM type: NRG; PAM sequence: GAG
cagccctaagcctgaagaat

SEQ ID NO: 6990 - DNA, 20 bp, Artificial Sequence
  Description of Artificial Sequence: Synthetic oligonucleotide
  Target: APOC3; (-) strand; PAM type: NRG; PAM sequence: AAG
ttcctccagccctaagcctg

SEQ ID NO: 6991 - DNA, 20 bp, Artificial Sequence
  Description of Artificial Sequence: Synthetic oligonucleotide
  Target: APOC3; (-) strand; PAM type: NRG; PAM sequence: AAG
ctaaggcttcctccagccct

SEQ ID NO: 6992 - DNA, 20 bp, Artificial Sequence
  Description of Artificial Sequence: Synthetic oligonucleotide
  Target: APOC3; (-) strand; PAM type: NRG; PAM sequence: CAG
gggctgtctaaggcttcctc

SEQ ID NO: 6993 - DNA, 20 bp, Artificial Sequence
  Description of Artificial Sequence: Synthetic oligonucleotide
  Target: APOC3; (-) strand; PAM type: NRG; PAM sequence: AGG
gggtaggactgggctgtcta

SEQ ID NO: 6994 - DNA, 20 bp, Artificial Sequence
  Description of Artificial Sequence: Synthetic oligonucleotide
  Target: APOC3; (-) strand; PAM type: NRG; PAM sequence: AAG
ggggtaggactgggctgtct

SEQ ID NO: 6995 - DNA, 20 bp, Artificial Sequence
  Description of Artificial Sequence: Synthetic oligonucleotide
  Target: APOC3; (-) strand; PAM type: NRG; PAM sequence: GGG
tccctgtctggggtaggact

SEQ ID NO: 6996 - DNA, 20 bp, Artificial Sequence
  Description of Artificial Sequence: Synthetic oligonucleotide
  Target: APOC3; (-) strand; PAM type: NRG; PAM sequence: TGG
ttccctgtctggggtaggac

SEQ ID NO: 6997 - DNA, 20 bp, Artificial Sequence
  Description of Artificial Sequence: Synthetic oligonucleotide
  Target: APOC3; (-) strand; PAM type: NRG; PAM sequence: AGG
tcagtttccctgtctggggt

SEQ ID NO: 6998 - DNA, 20 bp, Artificial Sequence
  Description of Artificial Sequence: Synthetic oligonucleotide
  Target: APOC3; (-) strand; PAM type: NRG; PAM sequence: TAG
ctcagtttccctgtctgggg

SEQ ID NO: 6999 - DNA, 20 bp, Artificial Sequence
  Description of Artificial Sequence: Synthetic oligonucleotide
  Target: APOC3; (-) strand; PAM type: NRG; PAM sequence: GGG
ggcctcagtttccctgtctg

SEQ ID NO: 7000 - DNA, 20 bp, Artificial Sequence
  Description of Artificial Sequence: Synthetic oligonucleotide
  Target: APOC3; (-) strand; PAM type: NRG; PAM sequence: GGG
aggcctcagtttccctgtct

SEQ ID NO: 7001 - DNA, 20 bp, Artificial Sequence
  Description of Artificial Sequence: Synthetic oligonucleotide
  Target: APOC3; (-) strand; PAM type: NRG; PAM sequence: TGG
caggcctcagtttccctgtc

SEQ ID NO: 7002 - DNA, 20 bp, Artificial Sequence
  Description of Artificial Sequence: Synthetic oligonucleotide
  Target: APOC3; (-) strand; PAM type: NRG; PAM sequence: CAG
ttctggccctctccaggcct

SEQ ID NO: 7003 - DNA, 20 bp, Artificial Sequence
  Description of Artificial Sequence: Synthetic oligonucleotide
  Target: APOC3; (-) strand; PAM type: NRG; PAM sequence: AGG
ggtgatttctggccctctcc

SEQ ID NO: 7004 - DNA, 20 bp, Artificial Sequence
  Description of Artificial Sequence: Synthetic oligonucleotide
  Target: APOC3; (-) strand; PAM type: NRG; PAM sequence: CAG
gggtgatttctggccctctc

SEQ ID NO: 7005 - DNA, 20 bp, Artificial Sequence
  Description of Artificial Sequence: Synthetic oligonucleotide
  Target: APOC3; (-) strand; PAM type: NRG; PAM sequence: TGG
gtgtgtctttgggtgatttc

SEQ ID NO: 7006 - DNA, 20 bp, Artificial Sequence
  Description of Artificial Sequence: Synthetic oligonucleotide
  Target: APOC3; (-) strand; PAM type: NRG; PAM sequence: GGG
ccaacatgctgtgtgtcttt

SEQ ID NO: 7007 - DNA, 20 bp, Artificial Sequence
  Description of Artificial Sequence: Synthetic oligonucleotide
  Target: APOC3; (-) strand; PAM type: NRG; PAM sequence: TGG
gccaacatgctgtgtgtctt

SEQ ID NO: 7008 - DNA, 20 bp, Artificial Sequence
  Description of Artificial Sequence: Synthetic oligonucleotide
  Target: APOC3; (-) strand; PAM type: NRG; PAM sequence: CAG
ggactgatctccgtccagtc

SEQ ID NO: 7009 - DNA, 20 bp, Artificial Sequence
  Description of Artificial Sequence: Synthetic oligonucleotide
  Target: APOC3; (-) strand; PAM type: NRG; PAM sequence: CAG
ggtctggactgatctccgtc

SEQ ID NO: 7010 - DNA, 20 bp, Artificial Sequence
  Description of Artificial Sequence: Synthetic oligonucleotide
  Target: APOC3; (-) strand; PAM type: NRG; PAM sequence: TGG
acatcaaggcacctgcggtc

SEQ ID NO: 7011 - DNA, 20 bp, Artificial Sequence
  Description of Artificial Sequence: Synthetic oligonucleotide
  Target: APOC3; (-) strand; PAM type: NRG; PAM sequence: CGG
actgaacatcaaggcacctg

SEQ ID NO: 7012 - DNA, 20 bp, Artificial Sequence
  Description of Artificial Sequence: Synthetic oligonucleotide
  Target: APOC3; (-) strand; PAM type: NRG; PAM sequence: AGG
acccaccagactgaacatca

SEQ ID NO: 7013 - DNA, 20 bp, Artificial Sequence
  Description of Artificial Sequence: Synthetic oligonucleotide
  Target: APOC3; (-) strand; PAM type: NRG; PAM sequence: AAG
aacccaccagactgaacatc

SEQ ID NO: 7014 - DNA, 20 bp, Artificial Sequence
  Description of Artificial Sequence: Synthetic oligonucleotide
  Target: APOC3; (-) strand; PAM type: NRG; PAM sequence: CAG
ggatggagcagaaaacccac

SEQ ID NO: 7015 - DNA, 20 bp, Artificial Sequence
  Description of Artificial Sequence: Synthetic oligonucleotide
  Target: APOC3; (-) strand; PAM type: NRG; PAM sequence: CAG
gggaggtgggtgggatggag

SEQ ID NO: 7016 - DNA, 20 bp, Artificial Sequence
  Description of Artificial Sequence: Synthetic oligonucleotide
  Target: APOC3; (-) strand; PAM type: NRG; PAM sequence: GAG
aaagggaggtgggtgggatg

SEQ ID NO: 7017 - DNA, 20 bp, Artificial Sequence
  Description of Artificial Sequence: Synthetic oligonucleotide
  Target: APOC3; (-) strand; PAM type: NRG; PAM sequence: TGG
ccaaagggaggtgggtggga

SEQ ID NO: 7018 - DNA, 20 bp, Artificial Sequence
  Description of Artificial Sequence: Synthetic oligonucleotide
  Target: APOC3; (-) strand; PAM type: NRG; PAM sequence: GGG
aggcccaaagggaggtgggt

SEQ ID NO: 7019 - DNA, 20 bp, Artificial Sequence
  Description of Artificial Sequence: Synthetic oligonucleotide
  Target: APOC3; (-) strand; PAM type: NRG; PAM sequence: TGG
gaggcccaaagggaggtggg

SEQ ID NO: 7020 - DNA, 20 bp, Artificial Sequence
  Description of Artificial Sequence: Synthetic oligonucleotide
  Target: APOC3; (-) strand; PAM type: NRG; PAM sequence: GGG
atcgaggcccaaagggaggt

SEQ ID NO: 7021 - DNA, 20 bp, Artificial Sequence
  Description of Artificial Sequence: Synthetic oligonucleotide
  Target: APOC3; (-) strand; PAM type: NRG; PAM sequence: TGG
gatcgaggcccaaagggagg

SEQ ID NO: 7022 - DNA, 20 bp, Artificial Sequence
  Description of Artificial Sequence: Synthetic oligonucleotide
  Target: APOC3; (-) strand; PAM type: NRG; PAM sequence: AGG
agggatcgaggcccaaaggg

SEQ ID NO: 7023 - DNA, 20 bp, Artificial Sequence
  Description of Artificial Sequence: Synthetic oligonucleotide
  Target: APOC3; (-) strand; PAM type: NRG; PAM sequence: GAG
gagggatcgaggcccaaagg

SEQ ID NO: 7024 - DNA, 20 bp, Artificial Sequence
  Description of Artificial Sequence: Synthetic oligonucleotide
  Target: APOC3; (-) strand; PAM type: NRG; PAM sequence: GGG
gcgagggatcgaggcccaaa

SEQ ID NO: 7025 - DNA, 20 bp, Artificial Sequence
  Description of Artificial Sequence: Synthetic oligonucleotide
  Target: APOC3; (-) strand; PAM type: NRG; PAM sequence: AGG
ggcgagggatcgaggcccaa

SEQ ID NO: 7026 - DNA, 20 bp, Artificial Sequence
  Description of Artificial Sequence: Synthetic oligonucleotide
  Target: APOC3; (-) strand; PAM type: NRG; PAM sequence: AAG
gggcgagggatcgaggccca

SEQ ID NO: 7027 - DNA, 20 bp, Artificial Sequence
  Description of Artificial Sequence: Synthetic oligonucleotide
  Target: APOC3; (-) strand; PAM type: NRG; PAM sequence: AGG
tggtgaggggcgagggatcg

SEQ ID NO: 7028 - DNA, 20 bp, Artificial Sequence
  Description of Artificial Sequence: Synthetic oligonucleotide
  Target: APOC3; (-) strand; PAM type: NRG; PAM sequence: GAG
ctggtgaggggcgagggatc

SEQ ID NO: 7029 - DNA, 20 bp, Artificial Sequence
  Description of Artificial Sequence: Synthetic oligonucleotide
  Target: APOC3; (-) strand; PAM type: NRG; PAM sequence: GGG
gggggactggtgaggggcga

SEQ ID NO: 7030 - DNA, 20 bp, Artificial Sequence
  Description of Artificial Sequence: Synthetic oligonucleotide
  Target: APOC3; (-) strand; PAM type: NRG; PAM sequence: AGG
agggggactggtgaggggcg

SEQ ID NO: 7031 - DNA, 20 bp, Artificial Sequence
  Description of Artificial Sequence: Synthetic oligonucleotide
  Target: APOC3; (-) strand; PAM type: NRG; PAM sequence: GAG
aagggggactggtgaggggc

SEQ ID NO: 7032 - DNA, 20 bp, Artificial Sequence
  Description of Artificial Sequence: Synthetic oligonucleotide
  Target: APOC3; (-) strand; PAM type: NRG; PAM sequence: GGG
tcagaagggggactggtgag

SEQ ID NO: 7033 - DNA, 20 bp, Artificial Sequence
  Description of Artificial Sequence: Synthetic oligonucleotide
  Target: APOC3; (-) strand; PAM type: NRG; PAM sequence: GGG
ctcagaagggggactggtga

SEQ ID NO: 7034 - DNA, 20 bp, Artificial Sequence
  Description of Artificial Sequence: Synthetic oligonucleotide
  Target: APOC3; (-) strand; PAM type: NRG; PAM sequence: AGG
tctcagaagggggactggtg

SEQ ID NO: 7035 - DNA, 20 bp, Artificial Sequence
  Description of Artificial Sequence: Synthetic oligonucleotide
  Target: APOC3; (-) strand; PAM type: NRG; PAM sequence: GAG
ctctcagaagggggactggt

SEQ ID NO: 7036 - DNA, 20 bp, Artificial Sequence
  Description of Artificial Sequence: Synthetic oligonucleotide
  Target: APOC3; (-) strand; PAM type: NRG; PAM sequence: TGG
cgggctctcagaagggggac

SEQ ID NO: 7037 - DNA, 20 bp, Artificial Sequence
  Description of Artificial Sequence: Synthetic oligonucleotide
  Target: APOC3; (-) strand; PAM type: NRG; PAM sequence: GGG
taatacgggctctcagaagg

SEQ ID NO: 7038 - DNA, 20 bp, Artificial Sequence
  Description of Artificial Sequence: Synthetic oligonucleotide
  Target: APOC3; (-) strand; PAM type: NRG; PAM sequence: GGG
ctaatacgggctctcagaag

SEQ ID NO: 7039 - DNA, 20 bp, Artificial Sequence
  Description of Artificial Sequence: Synthetic oligonucleotide
  Target: APOC3; (-) strand; PAM type: NRG; PAM sequence: GGG
gctaatacgggctctcagaa

SEQ ID NO: 7040 - DNA, 20 bp, Artificial Sequence
  Description of Artificial Sequence: Synthetic oligonucleotide
  Target: APOC3; (-) strand; PAM type: NRG; PAM sequence: AGG
tgctaatacgggctctcaga

SEQ ID NO: 7041 - DNA, 20 bp, Artificial Sequence
  Description of Artificial Sequence: Synthetic oligonucleotide
  Target: APOC3; (-) strand; PAM type: NRG; PAM sequence: AAG
ctgctaatacgggctctcag

SEQ ID NO: 7042 - DNA, 20 bp, Artificial Sequence
  Description of Artificial Sequence: Synthetic oligonucleotide
  Target: APOC3; (-) strand; PAM type: NRG; PAM sequence: CAG
tccctgctaatacgggctct

SEQ ID NO: 7043 - DNA, 20 bp, Artificial Sequence
  Description of Artificial Sequence: Synthetic oligonucleotide
  Target: APOC3; (-) strand; PAM type: NRG; PAM sequence: GGG
ggccggctccctgctaatac

SEQ ID NO: 7044 - DNA, 20 bp, Artificial Sequence
  Description of Artificial Sequence: Synthetic oligonucleotide
  Target: APOC3; (-) strand; PAM type: NRG; PAM sequence: CGG
gggccggctccctgctaata

SEQ ID NO: 7045 - DNA, 20 bp, Artificial Sequence
  Description of Artificial Sequence: Synthetic oligonucleotide
  Target: APOC3; (-) strand; PAM type: NRG; PAM sequence: CGG
ctgccagaaggagtaggggc

SEQ ID NO: 7046 - DNA, 20 bp, Artificial Sequence
  Description of Artificial Sequence: Synthetic oligonucleotide
  Target: APOC3; (-) strand; PAM type: NRG; PAM sequence: GGG
gggtctgccagaaggagtag

SEQ ID NO: 7047 - DNA, 20 bp, Artificial Sequence
  Description of Artificial Sequence: Synthetic oligonucleotide
  Target: APOC3; (-) strand; PAM type: NRG; PAM sequence: GGG
tgggtctgccagaaggagta

SEQ ID NO: 7048 - DNA, 20 bp, Artificial Sequence
  Description of Artificial Sequence: Synthetic oligonucleotide
  Target: APOC3; (-) strand; PAM type: NRG; PAM sequence: AGG
ctgggtctgccagaaggagt

SEQ ID NO: 7049 - DNA, 20 bp, Artificial Sequence
  Description of Artificial Sequence: Synthetic oligonucleotide
  Target: APOC3; (-) strand; PAM type: NRG; PAM sequence: TAG
gctgggtctgccagaaggag

SEQ ID NO: 7050 - DNA, 20 bp, Artificial Sequence
  Description of Artificial Sequence: Synthetic oligonucleotide
  Target: APOC3; (-) strand; PAM type: NRG; PAM sequence: GAG
ttagctgggtctgccagaag

SEQ ID NO: 7051 - DNA, 20 bp, Artificial Sequence
  Description of Artificial Sequence: Synthetic oligonucleotide
  Target: APOC3; (-) strand; PAM type: NRG; PAM sequence: AGG
ccttagctgggtctgccaga

SEQ ID NO: 7052 - DNA, 20 bp, Artificial Sequence
  Description of Artificial Sequence: Synthetic oligonucleotide
  Target: APOC3; (-) strand; PAM type: NRG; PAM sequence: AAG
accttagctgggtctgccag

SEQ ID NO: 7053 - DNA, 20 bp, Artificial Sequence
  Description of Artificial Sequence: Synthetic oligonucleotide
  Target: APOC3; (-) strand; PAM type: NRG; PAM sequence: CAG
agaaccttagctgggtctgc

SEQ ID NO: 7054 - DNA, 20 bp, Artificial Sequence
  Description of Artificial Sequence: Synthetic oligonucleotide
  Target: APOC3; (-) strand; PAM type: NRG; PAM sequence: GGG
cctaaggtagaaccttagct

SEQ ID NO: 7055 - DNA, 20 bp, Artificial Sequence
  Description of Artificial Sequence: Synthetic oligonucleotide
  Target: APOC3; (-) strand; PAM type: NRG; PAM sequence: TGG
ccctaaggtagaaccttagc

SEQ ID NO: 7056 - DNA, 20 bp, Artificial Sequence
  Description of Artificial Sequence: Synthetic oligonucleotide
  Target: APOC3; (-) strand; PAM type: NRG; PAM sequence: TAG
tggcccctaaggtagaacct

SEQ ID NO: 7057 - DNA, 20 bp, Artificial Sequence
  Description of Artificial Sequence: Synthetic oligonucleotide
  Target: APOC3; (-) strand; PAM type: NRG; PAM sequence: TAG
aggtggcgtggcccctaagg

SEQ ID NO: 7058 - DNA, 20 bp, Artificial Sequence
  Description of Artificial Sequence: Synthetic oligonucleotide
  Target: APOC3; (-) strand; PAM type: NRG; PAM sequence: AGG
gggaggtggcgtggccccta

SEQ ID NO: 7059 - DNA, 20 bp, Artificial Sequence
  Description of Artificial Sequence: Synthetic oligonucleotide
  Target: APOC3; (-) strand; PAM type: NRG; PAM sequence: AAG
ggggaggtggcgtggcccct

SEQ ID NO: 7060 - DNA, 20 bp, Artificial Sequence
  Description of Artificial Sequence: Synthetic oligonucleotide
  Target: APOC3; (-) strand; PAM type: NRG; PAM sequence: TGG
ccctccctggggaggtggcg

SEQ ID NO: 7061 - DNA, 20 bp, Artificial Sequence
  Description of Artificial Sequence: Synthetic oligonucleotide
  Target: APOC3; (-) strand; PAM type: NRG; PAM sequence: TGG
tggacccctccctggggagg

SEQ ID NO: 7062 - DNA, 20 bp, Artificial Sequence
  Description of Artificial Sequence: Synthetic oligonucleotide
  Target: APOC3; (-) strand; PAM type: NRG; PAM sequence: AGG
ctctggacccctccctgggg

SEQ ID NO: 7063 - DNA, 20 bp, Artificial Sequence
  Description of Artificial Sequence: Synthetic oligonucleotide
  Target: APOC3; (-) strand; PAM type: NRG; PAM sequence: GAG
cctctggacccctccctggg

SEQ ID NO: 7064 - DNA, 20 bp, Artificial Sequence
  Description of Artificial Sequence: Synthetic oligonucleotide
  Target: APOC3; (-) strand; PAM type: NRG; PAM sequence: GGG
tgcctctggacccctccctg

SEQ ID NO: 7065 - DNA, 20 bp, Artificial Sequence
  Description of Artificial Sequence: Synthetic oligonucleotide
  Target: APOC3; (-) strand; PAM type: NRG; PAM sequence: GGG
atgcctctggacccctccct

SEQ ID NO: 7066 - DNA, 20 bp, Artificial Sequence
  Description of Artificial Sequence: Synthetic oligonucleotide
  Target: APOC3; (-) strand; PAM type: NRG; PAM sequence: TGG
catgcctctggacccctccc

SEQ ID NO: 7067 - DNA, 20 bp, Artificial Sequence
  Description of Artificial Sequence: Synthetic oligonucleotide
  Target: APOC3; (-) strand; PAM type: NRG; PAM sequence: TGG
accccaggtccccatgcctc

SEQ ID NO: 7068 - DNA, 20 bp, Artificial Sequence
  Description of Artificial Sequence: Synthetic oligonucleotide
  Target: APOC3; (-) strand; PAM type: NRG; PAM sequence: AGG
tgtcctgtgaggggcacccc

SEQ ID NO: 7069 - DNA, 20 bp, Artificial Sequence
  Description of Artificial Sequence: Synthetic oligonucleotide
  Target: APOC3; (-) strand; PAM type: NRG; PAM sequence: CAG
gtgtcctgtgaggggcaccc

SEQ ID NO: 7070 - DNA, 20 bp, Artificial Sequence
  Description of Artificial Sequence: Synthetic oligonucleotide
  Target: APOC3; (-) strand; PAM type: NRG; PAM sequence: GGG
gcaaggaagtgtcctgtgag

SEQ ID NO: 7071 - DNA, 20 bp, Artificial Sequence
  Description of Artificial Sequence: Synthetic oligonucleotide
  Target: APOC3; (-) strand; PAM type: NRG; PAM sequence: GGG
tgcaaggaagtgtcctgtga

SEQ ID NO: 7072 - DNA, 20 bp, Artificial Sequence
  Description of Artificial Sequence: Synthetic oligonucleotide
  Target: APOC3; (-) strand; PAM type: NRG; PAM sequence: AGG
ctgcaaggaagtgtcctgtg

SEQ ID NO: 7073 - DNA, 20 bp, Artificial Sequence
  Description of Artificial Sequence: Synthetic oligonucleotide
  Target: APOC3; (-) strand; PAM type: NRG; PAM sequence: GAG
cctgcaaggaagtgtcctgt

SEQ ID NO: 7074 - DNA, 20 bp, Artificial Sequence
  Description of Artificial Sequence: Synthetic oligonucleotide
  Target: APOC3; (-) strand; PAM type: NRG; PAM sequence: AAG
gcacctctgttcctgcaagg

SEQ ID NO: 7075 - DNA, 20 bp, Artificial Sequence
  Description of Artificial Sequence: Synthetic oligonucleotide
  Target: APOC3; (-) strand; PAM type: NRG; PAM sequence: AGG
atggcacctctgttcctgca

SEQ ID NO: 7076 - DNA, 20 bp, Artificial Sequence
  Description of Artificial Sequence: Synthetic oligonucleotide
  Target: APOC3; (-) strand; PAM type: NRG; PAM sequence: AAG
catggcacctctgttcctgc

SEQ ID NO: 7077 - DNA, 20 bp, Artificial Sequence
  Description of Artificial Sequence: Synthetic oligonucleotide
  Target: APOC3; (-) strand; PAM type: NRG; PAM sequence: TGG
aaggagtacccggggctgca

SEQ ID NO: 7078 - DNA, 20 bp, Artificial Sequence
  Description of Artificial Sequence: Synthetic oligonucleotide
  Target: APOC3; (-) strand; PAM type: NRG; PAM sequence: GGG
gcaacaacaaggagtacccg

SEQ ID NO: 7079 - DNA, 20 bp, Artificial Sequence
  Description of Artificial Sequence: Synthetic oligonucleotide
  Target: APOC3; (-) strand; PAM type: NRG; PAM sequence: GGG
ggcaacaacaaggagtaccc

SEQ ID NO: 7080 - DNA, 20 bp, Artificial Sequence
  Description of Artificial Sequence: Synthetic oligonucleotide
  Target: APOC3; (-) strand; PAM type: NRG; PAM sequence: CGG
gggcaacaacaaggagtacc

SEQ ID NO: 7081 - DNA, 20 bp, Artificial Sequence
  Description of Artificial Sequence: Synthetic oligonucleotide
  Target: APOC3; (-) strand; PAM type: NRG; PAM sequence: GAG
gccaggagggcaacaacaag

SEQ ID NO: 7082 - DNA, 20 bp, Artificial Sequence
  Description of Artificial Sequence: Synthetic oligonucleotide
  Target: APOC3; (-) strand; PAM type: NRG; PAM sequence: AGG
gcgccaggagggcaacaaca

SEQ ID NO: 7083 - DNA, 20 bp, Artificial Sequence
  Description of Artificial Sequence: Synthetic oligonucleotide
  Target: APOC3; (-) strand; PAM type: NRG; PAM sequence: AAG
agcgccaggagggcaacaac

SEQ ID NO: 7084 - DNA, 20 bp, Artificial Sequence
  Description of Artificial Sequence: Synthetic oligonucleotide
  Target: APOC3; (-) strand; PAM type: NRG; PAM sequence: GGG
agaggccaggagcgccagga

SEQ ID NO: 7085 - DNA, 20 bp, Artificial Sequence
  Description of Artificial Sequence: Synthetic oligonucleotide
  Target: APOC3; (-) strand; PAM type: NRG; PAM sequence: AGG
cagaggccaggagcgccagg

SEQ ID NO: 7086 - DNA, 20 bp, Artificial Sequence
  Description of Artificial Sequence: Synthetic oligonucleotide
  Target: APOC3; (-) strand; PAM type: NRG; PAM sequence: GAG
gcagaggccaggagcgccag

SEQ ID NO: 7087 - DNA, 20 bp, Artificial Sequence
  Description of Artificial Sequence: Synthetic oligonucleotide
  Target: APOC3; (-) strand; PAM type: NRG; PAM sequence: AGG
gggcagaggccaggagcgcc

SEQ ID NO: 7088 - DNA, 20 bp, Artificial Sequence
  Description of Artificial Sequence: Synthetic oligonucleotide
  Target: APOC3; (-) strand; PAM type: NRG; PAM sequence: CAG
cgggcagaggccaggagcgc

SEQ ID NO: 7089 - DNA, 20 bp, Artificial Sequence
  Description of Artificial Sequence: Synthetic oligonucleotide
  Target: APOC3; (-) strand; PAM type: NRG; PAM sequence: GAG
tgcttacgggcagaggccag

SEQ ID NO: 7090 - DNA, 20 bp, Artificial Sequence
  Description of Artificial Sequence: Synthetic oligonucleotide
  Target: APOC3; (-) strand; PAM type: NRG; PAM sequence: AGG
agtgcttacgggcagaggcc

SEQ ID NO: 7091 - DNA, 20 bp, Artificial Sequence
  Description of Artificial Sequence: Synthetic oligonucleotide
  Target: APOC3; (-) strand; PAM type: NRG; PAM sequence: CAG
aagtgcttacgggcagaggc

SEQ ID NO: 7092 - DNA, 20 bp, Artificial Sequence
  Description of Artificial Sequence: Synthetic oligonucleotide
  Target: APOC3; (-) strand; PAM type: NRG; PAM sequence: AGG
caccaagtgcttacgggcag

SEQ ID NO: 7093 - DNA, 20 bp, Artificial Sequence
  Description of Artificial Sequence: Synthetic oligonucleotide
  Target: APOC3; (-) strand; PAM type: NRG; PAM sequence: GAG
ccaccaagtgcttacgggca

SEQ ID NO: 7094 - DNA, 20 bp, Artificial Sequence
  Description of Artificial Sequence: Synthetic oligonucleotide
  Target: APOC3; (-) strand; PAM type: NRG; PAM sequence: CAG
tcccaccaagtgcttacggg

SEQ ID NO: 7095 - DNA, 20 bp, Artificial Sequence
  Description of Artificial Sequence: Synthetic oligonucleotide
  Target: APOC3; (-) strand; PAM type: NRG; PAM sequence: GGG
cagtcccaccaagtgcttac

SEQ ID NO: 7096 - DNA, 20 bp, Artificial Sequence
  Description of Artificial Sequence: Synthetic oligonucleotide
  Target: APOC3; (-) strand; PAM type: NRG; PAM sequence: CGG
ccagtcccaccaagtgctta

SEQ ID NO: 7097 - DNA, 20 bp, Artificial Sequence
  Description of Artificial Sequence: Synthetic oligonucleotide
  Target: APOC3; (-) strand; PAM type: NRG; PAM sequence: AAG
gcccccagcccagtcccacc

SEQ ID NO: 7098 - DNA, 20 bp, Artificial Sequence
  Description of Artificial Sequence: Synthetic oligonucleotide
  Target: APOC3; (-) strand; PAM type: NRG; PAM sequence: CAG
cctccaccctgcccccagcc

SEQ ID NO: 7099 - DNA, 20 bp, Artificial Sequence
  Description of Artificial Sequence: Synthetic oligonucleotide
  Target: APOC3; (-) strand; PAM type: NRG; PAM sequence: CAG
agttgcctccaccctgcccc

SEQ ID NO: 7100 - DNA, 20 bp, Artificial Sequence
  Description of Artificial Sequence: Synthetic oligonucleotide
  Target: APOC3; (-) strand; PAM type: NRG; PAM sequence: AAG
ccattgggactgggatcccc

SEQ ID NO: 7101 - DNA, 20 bp, Artificial Sequence
  Description of Artificial Sequence: Synthetic oligonucleotide
  Target: APOC3; (-) strand; PAM type: NRG; PAM sequence: GGG
cttgaccacccattgggact

SEQ ID NO: 7102 - DNA, 20 bp, Artificial Sequence
  Description of Artificial Sequence: Synthetic oligonucleotide
  Target: APOC3; (-) strand; PAM type: NRG; PAM sequence: TGG
gcttgaccacccattgggac

SEQ ID NO: 7103 - DNA, 20 bp, Artificial Sequence
  Description of Artificial Sequence: Synthetic oligonucleotide
  Target: APOC3; (-) strand; PAM type: NRG; PAM sequence: GGG
ctcctgcttgaccacccatt

SEQ ID NO: 7104 - DNA, 20 bp, Artificial Sequence
  Description of Artificial Sequence: Synthetic oligonucleotide
  Target: APOC3; (-) strand; PAM type: NRG; PAM sequence: TGG
gctcctgcttgaccacccat

SEQ ID NO: 7105 - DNA, 20 bp, Artificial Sequence
  Description of Artificial Sequence: Synthetic oligonucleotide
  Target: APOC3; (-) strand; PAM type: NRG; PAM sequence: GGG
tcggcctctggacgagccct

SEQ ID NO: 7106 - DNA, 20 bp, Artificial Sequence
  Description of Artificial Sequence: Synthetic oligonucleotide
  Target: APOC3; (-) strand; PAM type: NRG; PAM sequence: TGG
atcggcctctggacgagccc

SEQ ID NO: 7107 - DNA, 20 bp, Artificial Sequence
  Description of Artificial Sequence: Synthetic oligonucleotide
  Target: APOC3; (-) strand; PAM type: NRG; PAM sequence: GAG
gggtggatcggcctctggac

SEQ ID NO: 7108 - DNA, 20 bp, Artificial Sequence
  Description of Artificial Sequence: Synthetic oligonucleotide
  Target: APOC3; (-) strand; PAM type: NRG; PAM sequence: TGG
gagtggggtggatcggcctc

SEQ ID NO: 7109 - DNA, 20 bp, Artificial Sequence
  Description of Artificial Sequence: Synthetic oligonucleotide
  Target: APOC3; (-) strand; PAM type: NRG; PAM sequence: CGG
cagggctgagtggggtggat

SEQ ID NO: 7110 - DNA, 20 bp, Artificial Sequence
  Description of Artificial Sequence: Synthetic oligonucleotide
  Target: APOC3; (-) strand; PAM type: NRG; PAM sequence: TGG
aagagcagggctgagtgggg

SEQ ID NO: 7111 - DNA, 20 bp, Artificial Sequence
  Description of Artificial Sequence: Synthetic oligonucleotide
  Target: APOC3; (-) strand; PAM type: NRG; PAM sequence: GGG
ggaaagagcagggctgagtg

SEQ ID NO: 7112 - DNA, 20 bp, Artificial Sequence
  Description of Artificial Sequence: Synthetic oligonucleotide
  Target: APOC3; (-) strand; PAM type: NRG; PAM sequence: GGG
aggaaagagcagggctgagt

SEQ ID NO: 7113 - DNA, 20 bp, Artificial Sequence
  Description of Artificial Sequence: Synthetic oligonucleotide
  Target: APOC3; (-) strand; PAM type: NRG; PAM sequence: TGG
gaggaaagagcagggctgag

SEQ ID NO: 7114 - DNA, 20 bp, Artificial Sequence
  Description of Artificial Sequence: Synthetic oligonucleotide
  Target: APOC3; (-) strand; PAM type: NRG; PAM sequence: GAG
cctgaggaaagagcagggct

SEQ ID NO: 7115 - DNA, 20 bp, Artificial Sequence
  Description of Artificial Sequence: Synthetic oligonucleotide
  Target: APOC3; (-) strand; PAM type: NRG; PAM sequence: GGG
aagctcctgaggaaagagca

SEQ ID NO: 7116 - DNA, 20 bp, Artificial Sequence
  Description of Artificial Sequence: Synthetic oligonucleotide
  Target: APOC3; (-) strand; PAM type: NRG; PAM sequence: AGG
gaagctcctgaggaaagagc

SEQ ID NO: 7117 - DNA, 20 bp, Artificial Sequence
  Description of Artificial Sequence: Synthetic oligonucleotide
  Target: APOC3; (-) strand; PAM type: NRG; PAM sequence: CAG
tgaagctcctgaggaaagag

SEQ ID NO: 7118 - DNA, 20 bp, Artificial Sequence
  Description of Artificial Sequence: Synthetic oligonucleotide
  Target: APOC3; (-) strand; PAM type: NRG; PAM sequence: GAG
ctctgaagctcctgaggaaa

SEQ ID NO: 7119 - DNA, 20 bp, Artificial Sequence
  Description of Artificial Sequence: Synthetic oligonucleotide
  Target: APOC3; (-) strand; PAM type: NRG; PAM sequence: AAG
gcctctgaagctcctgagga

SEQ ID NO: 7120 - DNA, 20 bp, Artificial Sequence
  Description of Artificial Sequence: Synthetic oligonucleotide
  Target: APOC3; (-) strand; PAM type: NRG; PAM sequence: AGG
ctcggcctctgaagctcctg

SEQ ID NO: 7121 - DNA, 20 bp, Artificial Sequence
  Description of Artificial Sequence: Synthetic oligonucleotide
  Target: APOC3; (-) strand; PAM type: NRG; PAM sequence: GAG
cctcggcctctgaagctcct

SEQ ID NO: 7122 - DNA, 20 bp, Artificial Sequence
  Description of Artificial Sequence: Synthetic oligonucleotide
  Target: APOC3; (-) strand; PAM type: NRG; PAM sequence: AAG
ggaggcatcctcggcctctg

SEQ ID NO: 7123 - DNA, 20 bp, Artificial Sequence
  Description of Artificial Sequence: Synthetic oligonucleotide
  Target: APOC3; (-) strand; PAM type: NRG; PAM sequence: CGG
gctgagaagggaggcatcct

SEQ ID NO: 7124 - DNA, 20 bp, Artificial Sequence
  Description of Artificial Sequence: Synthetic oligonucleotide
  Target: APOC3; (-) strand; PAM type: NRG; PAM sequence: AGG
ctgcatgaagctgagaaggg

SEQ ID NO: 7125 - DNA, 20 bp, Artificial Sequence
  Description of Artificial Sequence: Synthetic oligonucleotide
  Target: APOC3; (-) strand; PAM type: NRG; PAM sequence: GAG
cctgcatgaagctgagaagg

SEQ ID NO: 7126 - DNA, 20 bp, Artificial Sequence
  Description of Artificial Sequence: Synthetic oligonucleotide
  Target: APOC3; (-) strand; PAM type: NRG; PAM sequence: GGG
accctgcatgaagctgagaa

SEQ ID NO: 7127 - DNA, 20 bp, Artificial Sequence
  Description of Artificial Sequence: Synthetic oligonucleotide
  Target: APOC3; (-) strand; PAM type: NRG; PAM sequence: AGG
aaccctgcatgaagctgaga

SEQ ID NO: 7128 - DNA, 20 bp, Artificial Sequence
  Description of Artificial Sequence: Synthetic oligonucleotide
  Target: APOC3; (-) strand; PAM type: NRG; PAM sequence: AAG
taaccctgcatgaagctgag

SEQ ID NO: 7129 - DNA, 20 bp, Artificial Sequence
  Description of Artificial Sequence: Synthetic oligonucleotide
  Target: APOC3; (-) strand; PAM type: NRG; PAM sequence: GAG
atgtaaccctgcatgaagct

SEQ ID NO: 7130 - DNA, 20 bp, Artificial Sequence
  Description of Artificial Sequence: Synthetic oligonucleotide
  Target: APOC3; (-) strand; PAM type: NRG; PAM sequence: AAG
gcttcatgtaaccctgcatg

SEQ ID NO: 7131 - DNA, 20 bp, Artificial Sequence
  Description of Artificial Sequence: Synthetic oligonucleotide
  Target: APOC3; (-) strand; PAM type: NRG; PAM sequence: TGG
tgcatccttggcggtcttgg

SEQ ID NO: 7132 - DNA, 20 bp, Artificial Sequence
  Description of Artificial Sequence: Synthetic oligonucleotide
  Target: APOC3; (-) strand; PAM type: NRG; PAM sequence: TGG
cagtgcatccttggcggtct

SEQ ID NO: 7133 - DNA, 20 bp, Artificial Sequence
  Description of Artificial Sequence: Synthetic oligonucleotide
  Target: APOC3; (-) strand; PAM type: NRG; PAM sequence: CGG
gctgctcagtgcatccttgg

SEQ ID NO: 7134 - DNA, 20 bp, Artificial Sequence
  Description of Artificial Sequence: Synthetic oligonucleotide
  Target: APOC3; (-) strand; PAM type: NRG; PAM sequence: TGG
cacgctgctcagtgcatcct

SEQ ID NO: 7135 - DNA, 20 bp, Artificial Sequence
  Description of Artificial Sequence: Synthetic oligonucleotide
  Target: APOC3; (-) strand; PAM type: NRG; PAM sequence: CAG
tgggactcctgcacgctgct

SEQ ID NO: 7136 - DNA, 20 bp, Artificial Sequence
  Description of Artificial Sequence: Synthetic oligonucleotide
  Target: APOC3; (-) strand; PAM type: NRG; PAM sequence: GGG
cctggcctgctgggccacct

SEQ ID NO: 7137 - DNA, 20 bp, Artificial Sequence
  Description of Artificial Sequence: Synthetic oligonucleotide
  Target: APOC3; (-) strand; PAM type: NRG; PAM sequence: TGG
acctggcctgctgggccacc

SEQ ID NO: 7138 - DNA, 20 bp, Artificial Sequence
  Description of Artificial Sequence: Synthetic oligonucleotide
  Target: APOC3; (-) strand; PAM type: NRG; PAM sequence: GGG
gcgggtgtacctggcctgct

SEQ ID NO: 7139 - DNA, 20 bp, Artificial Sequence
  Description of Artificial Sequence: Synthetic oligonucleotide
  Target: APOC3; (-) strand; PAM type: NRG; PAM sequence: TGG
agcgggtgtacctggcctgc

SEQ ID NO: 7140 - DNA, 20 bp, Artificial Sequence
  Description of Artificial Sequence: Synthetic oligonucleotide
  Target: APOC3; (-) strand; PAM type: NRG; PAM sequence: TGG
gggaggccagcgggtgtacc

SEQ ID NO: 7141 - DNA, 20 bp, Artificial Sequence
  Description of Artificial Sequence: Synthetic oligonucleotide
  Target: APOC3; (-) strand; PAM type: NRG; PAM sequence: GGG
ggatggggagggaggccagc

SEQ ID NO: 7142 - DNA, 20 bp, Artificial Sequence
  Description of Artificial Sequence: Synthetic oligonucleotide
  Target: APOC3; (-) strand; PAM type: NRG; PAM sequence: CGG
gggatggggagggaggccag

SEQ ID NO: 7143 - DNA, 20 bp, Artificial Sequence
  Description of Artificial Sequence: Synthetic oligonucleotide
  Target: APOC3; (-) strand; PAM type: NRG; PAM sequence: CAG
ggggggatggggagggaggc

SEQ ID NO: 7144 - DNA, 20 bp, Artificial Sequence
  Description of Artificial Sequence: Synthetic oligonucleotide
  Target: APOC3; (-) strand; PAM type: NRG; PAM sequence: AGG
ggcaggggggatggggaggg

SEQ ID NO: 7145 - DNA, 20 bp, Artificial Sequence
  Description of Artificial Sequence: Synthetic oligonucleotide
  Target: APOC3; (-) strand; PAM type: NRG; PAM sequence: GAG
tggcaggggggatggggagg

SEQ ID NO: 7146 - DNA, 20 bp, Artificial Sequence
  Description of Artificial Sequence: Synthetic oligonucleotide
  Target: APOC3; (-) strand; PAM type: NRG; PAM sequence: GGG
gctggcaggggggatgggga

SEQ ID NO: 7147 - DNA, 20 bp, Artificial Sequence
  Description of Artificial Sequence: Synthetic oligonucleotide
  Target: APOC3; (-) strand; PAM type: NRG; PAM sequence: AGG
agctggcaggggggatgggg

SEQ ID NO: 7148 - DNA, 20 bp, Artificial Sequence
  Description of Artificial Sequence: Synthetic oligonucleotide
  Target: APOC3; (-) strand; PAM type: NRG; PAM sequence: GAG
cagctggcaggggggatggg

SEQ ID NO: 7149 - DNA, 20 bp, Artificial Sequence
  Description of Artificial Sequence: Synthetic oligonucleotide
  Target: APOC3; (-) strand; PAM type: NRG; PAM sequence: GGG
ggcagctggcaggggggatg

SEQ ID NO: 7150 - DNA, 20 bp, Artificial Sequence
  Description of Artificial Sequence: Synthetic oligonucleotide
  Target: APOC3; (-) strand; PAM type: NRG; PAM sequence: GGG
aggcagctggcaggggggat

SEQ ID NO: 7151 - DNA, 20 bp, Artificial Sequence
  Description of Artificial Sequence: Synthetic oligonucleotide
  Target: APOC3; (-) strand; PAM type: NRG; PAM sequence: TGG
gaggcagctggcagggggga

SEQ ID NO: 7152 - DNA, 20 bp, Artificial Sequence
  Description of Artificial Sequence: Synthetic oligonucleotide
  Target: APOC3; (-) strand; PAM type: NRG; PAM sequence: GGG
aatggaggcagctggcaggg

SEQ ID NO: 7153 - DNA, 20 bp, Artificial Sequence
  Description of Artificial Sequence: Synthetic oligonucleotide
  Target: APOC3; (-) strand; PAM type: NRG; PAM sequence: GGG
gaatggaggcagctggcagg

SEQ ID NO: 7154 - DNA, 20 bp, Artificial Sequence
  Description of Artificial Sequence: Synthetic oligonucleotide
  Target: APOC3; (-) strand; PAM type: NRG; PAM sequence: GGG
ggaatggaggcagctggcag

SEQ ID NO: 7155 - DNA, 20 bp, Artificial Sequence
  Description of Artificial Sequence: Synthetic oligonucleotide
  Target: APOC3; (-) strand; PAM type: NRG; PAM sequence: GGG
gggaatggaggcagctggca

SEQ ID NO: 7156 - DNA, 20 bp, Artificial Sequence
  Description of Artificial Sequence: Synthetic oligonucleotide
  Target: APOC3; (-) strand; PAM type: NRG; PAM sequence: AGG
tgggaatggaggcagctggc

SEQ ID NO: 7157 - DNA, 20 bp, Artificial Sequence
  Description of Artificial Sequence: Synthetic oligonucleotide
  Target: APOC3; (-) strand; PAM type: NRG; PAM sequence: CAG
gtgggaatggaggcagctgg

SEQ ID NO: 7158 - DNA, 20 bp, Artificial Sequence
  Description of Artificial Sequence: Synthetic oligonucleotide
  Target: APOC3; (-) strand; PAM type: NRG; PAM sequence: TGG
cgggtgggaatggaggcagc

SEQ ID NO: 7159 - DNA, 20 bp, Artificial Sequence
  Description of Artificial Sequence: Synthetic oligonucleotide
  Target: APOC3; (-) strand; PAM type: NRG; PAM sequence: CAG
ggggcgggtgggaatggagg

SEQ ID NO: 7160 - DNA, 20 bp, Artificial Sequence
  Description of Artificial Sequence: Synthetic oligonucleotide
  Target: APOC3; (-) strand; PAM type: NRG; PAM sequence: AGG
gcaggggcgggtgggaatgg

SEQ ID NO: 7161 - DNA, 20 bp, Artificial Sequence
  Description of Artificial Sequence: Synthetic oligonucleotide
  Target: APOC3; (-) strand; PAM type: NRG; PAM sequence: GAG
ggcaggggcgggtgggaatg

SEQ ID NO: 7162 - DNA, 20 bp, Artificial Sequence
  Description of Artificial Sequence: Synthetic oligonucleotide
  Target: APOC3; (-) strand; PAM type: NRG; PAM sequence: TGG
agggcaggggcgggtgggaa

SEQ ID NO: 7163 - DNA, 20 bp, Artificial Sequence
  Description of Artificial Sequence: Synthetic oligonucleotide
  Target: APOC3; (-) strand; PAM type: NRG; PAM sequence: GGG
tcaccagggcaggggcgggt

SEQ ID NO: 7164 - DNA, 20 bp, Artificial Sequence
  Description of Artificial Sequence: Synthetic oligonucleotide
  Target: APOC3; (-) strand; PAM type: NRG; PAM sequence: TGG
ctcaccagggcaggggcggg

SEQ ID NO: 7165 - DNA, 20 bp, Artificial Sequence
  Description of Artificial Sequence: Synthetic oligonucleotide
  Target: APOC3; (-) strand; PAM type: NRG; PAM sequence: GGG
gatctcaccagggcaggggc

SEQ ID NO: 7166 - DNA, 20 bp, Artificial Sequence
  Description of Artificial Sequence: Synthetic oligonucleotide
  Target: APOC3; (-) strand; PAM type: NRG; PAM sequence: CGG
ggatctcaccagggcagggg

SEQ ID NO: 7167 - DNA, 20 bp, Artificial Sequence
  Description of Artificial Sequence: Synthetic oligonucleotide
  Target: APOC3; (-) strand; PAM type: NRG; PAM sequence: GGG
ttgggatctcaccagggcag

SEQ ID NO: 7168 - DNA, 20 bp, Artificial Sequence
  Description of Artificial Sequence: Synthetic oligonucleotide
  Target: APOC3; (-) strand; PAM type: NRG; PAM sequence: GGG
gttgggatctcaccagggca

SEQ ID NO: 7169 - DNA, 20 bp, Artificial Sequence
  Description of Artificial Sequence: Synthetic oligonucleotide
  Target: APOC3; (-) strand; PAM type: NRG; PAM sequence: AGG
tgttgggatctcaccagggc

SEQ ID NO: 7170 - DNA, 20 bp, Artificial Sequence
  Description of Artificial Sequence: Synthetic oligonucleotide
  Target: APOC3; (-) strand; PAM type: NRG; PAM sequence: CAG
ttgttgggatctcaccaggg

SEQ ID NO: 7171 - DNA, 20 bp, Artificial Sequence
  Description of Artificial Sequence: Synthetic oligonucleotide
  Target: APOC3; (-) strand; PAM type: NRG; PAM sequence: GGG
ccattgttgggatctcacca

SEQ ID NO: 7172 - DNA, 20 bp, Artificial Sequence
  Description of Artificial Sequence: Synthetic oligonucleotide
  Target: APOC3; (-) strand; PAM type: NRG; PAM sequence: AGG
tccattgttgggatctcacc

SEQ ID NO: 7173 - DNA, 20 bp, Artificial Sequence
  Description of Artificial Sequence: Synthetic oligonucleotide
  Target: APOC3; (-) strand; PAM type: NRG; PAM sequence: CAG
ttccattgttgggatctcac

SEQ ID NO: 7174 - DNA, 20 bp, Artificial Sequence
  Description of Artificial Sequence: Synthetic oligonucleotide
  Target: APOC3; (-) strand; PAM type: NRG; PAM sequence: GGG
agcacctccattccattgtt

SEQ ID NO: 7175 - DNA, 20 bp, Artificial Sequence
  Description of Artificial Sequence: Synthetic oligonucleotide
  Target: APOC3; (-) strand; PAM type: NRG; PAM sequence: TGG
gagcacctccattccattgt

SEQ ID NO: 7176 - DNA, 20 bp, Artificial Sequence
  Description of Artificial Sequence: Synthetic oligonucleotide
  Target: APOC3; (-) strand; PAM type: NRG; PAM sequence: GAG
cacaggcccaggggaggctg

SEQ ID NO: 7177 - DNA, 20 bp, Artificial Sequence
  Description of Artificial Sequence: Synthetic oligonucleotide
  Target: APOC3; (-) strand; PAM type: NRG; PAM sequence: TGG
ggcacaggcccaggggaggc

SEQ ID NO: 7178 - DNA, 20 bp, Artificial Sequence
  Description of Artificial Sequence: Synthetic oligonucleotide
  Target: APOC3; (-) strand; PAM type: NRG; PAM sequence: AGG
aagaggcacaggcccagggg

SEQ ID NO: 7179 - DNA, 20 bp, Artificial Sequence
  Description of Artificial Sequence: Synthetic oligonucleotide
  Target: APOC3; (-) strand; PAM type: NRG; PAM sequence: GAG
gaagaggcacaggcccaggg

SEQ ID NO: 7180 - DNA, 20 bp, Artificial Sequence
  Description of Artificial Sequence: Synthetic oligonucleotide
  Target: APOC3; (-) strand; PAM type: NRG; PAM sequence: GGG
ctgaagaggcacaggcccag

SEQ ID NO: 7181 - DNA, 20 bp, Artificial Sequence
  Description of Artificial Sequence: Synthetic oligonucleotide
  Target: APOC3; (-) strand; PAM type: NRG; PAM sequence: GGG
gctgaagaggcacaggccca

SEQ ID NO: 7182 - DNA, 20 bp, Artificial Sequence
  Description of Artificial Sequence: Synthetic oligonucleotide
  Target: APOC3; (-) strand; PAM type: NRG; PAM sequence: AGG
ggctgaagaggcacaggccc

SEQ ID NO: 7183 - DNA, 20 bp, Artificial Sequence
  Description of Artificial Sequence: Synthetic oligonucleotide
  Target: APOC3; (-) strand; PAM type: NRG; PAM sequence: CAG
aggctgaagaggcacaggcc

SEQ ID NO: 7184 - DNA, 20 bp, Artificial Sequence
  Description of Artificial Sequence: Synthetic oligonucleotide
  Target: APOC3; (-) strand; PAM type: NRG; PAM sequence: AGG
agaggaggctgaagaggcac

SEQ ID NO: 7185 - DNA, 20 bp, Artificial Sequence
  Description of Artificial Sequence: Synthetic oligonucleotide
  Target: APOC3; (-) strand; PAM type: NRG; PAM sequence: CAG
aagaggaggctgaagaggca

SEQ ID NO: 7186 - DNA, 20 bp, Artificial Sequence
  Description of Artificial Sequence: Synthetic oligonucleotide
  Target: APOC3; (-) strand; PAM type: NRG; PAM sequence: AGG
gaggaaagaggaggctgaag

SEQ ID NO: 7187 - DNA, 20 bp, Artificial Sequence
  Description of Artificial Sequence: Synthetic oligonucleotide
  Target: APOC3; (-) strand; PAM type: NRG; PAM sequence: GAG
tgaggaaagaggaggctgaa

SEQ ID NO: 7188 - DNA, 20 bp, Artificial Sequence
  Description of Artificial Sequence: Synthetic oligonucleotide
  Target: APOC3; (-) strand; PAM type: NRG; PAM sequence: AAG
tgtgaggaaagaggaggctg

SEQ ID NO: 7189 - DNA, 20 bp, Artificial Sequence
  Description of Artificial Sequence: Synthetic oligonucleotide
  Target: APOC3; (-) strand; PAM type: NRG; PAM sequence: AGG
aggccctgtgaggaaagagg

SEQ ID NO: 7190 - DNA, 20 bp, Artificial Sequence
  Description of Artificial Sequence: Synthetic oligonucleotide
  Target: APOC3; (-) strand; PAM type: NRG; PAM sequence: GAG
aaggccctgtgaggaaagag

SEQ ID NO: 7191 - DNA, 20 bp, Artificial Sequence
  Description of Artificial Sequence: Synthetic oligonucleotide
  Target: APOC3; (-) strand; PAM type: NRG; PAM sequence: AGG
caaaggccctgtgaggaaag

SEQ ID NO: 7192 - DNA, 20 bp, Artificial Sequence
  Description of Artificial Sequence: Synthetic oligonucleotide
  Target: APOC3; (-) strand; PAM type: NRG; PAM sequence: GAG
acaaaggccctgtgaggaaa

SEQ ID NO: 7193 - DNA, 20 bp, Artificial Sequence
  Description of Artificial Sequence: Synthetic oligonucleotide
  Target: APOC3; (-) strand; PAM type: NRG; PAM sequence: AAG
tgacaaaggccctgtgagga

SEQ ID NO: 7194 - DNA, 20 bp, Artificial Sequence
  Description of Artificial Sequence: Synthetic oligonucleotide
  Target: APOC3; (-) strand; PAM type: NRG; PAM sequence: AGG
agcctgacaaaggccctgtg

SEQ ID NO: 7195 - DNA, 20 bp, Artificial Sequence
  Description of Artificial Sequence: Synthetic oligonucleotide
  Target: APOC3; (-) strand; PAM type: NRG; PAM sequence: GAG
cagcctgacaaaggccctgt

SEQ ID NO: 7196 - DNA, 20 bp, Artificial Sequence
  Description of Artificial Sequence: Synthetic oligonucleotide
  Target: APOC3; (-) strand; PAM type: NRG; PAM sequence: AGG
ctcccgcagcagcctgacaa

SEQ ID NO: 7197 - DNA, 20 bp, Artificial Sequence
  Description of Artificial Sequence: Synthetic oligonucleotide
  Target: APOC3; (-) strand; PAM type: NRG; PAM sequence: AAG
tctcccgcagcagcctgaca

SEQ ID NO: 7198 - DNA, 20 bp, Artificial Sequence
  Description of Artificial Sequence: Synthetic oligonucleotide
  Target: APOC3; (-) strand; PAM type: NRG; PAM sequence: CAG
ctctgtcatctctcccgcag

SEQ ID NO: 7199 - DNA, 20 bp, Artificial Sequence
  Description of Artificial Sequence: Synthetic oligonucleotide
  Target: APOC3; (-) strand; PAM type: NRG; PAM sequence: CAG
caactctgtcatctctcccg

SEQ ID NO: 7200 - DNA, 20 bp, Artificial Sequence
  Description of Artificial Sequence: Synthetic oligonucleotide
  Target: APOC3; (-) strand; PAM type: NRG; PAM sequence: CAG
ggagggacctgggaggaatg

SEQ ID NO: 7201 - DNA, 20 bp, Artificial Sequence
  Description of Artificial Sequence: Synthetic oligonucleotide
  Target: APOC3; (-) strand; PAM type: NRG; PAM sequence: AGG
ggagaaaggagggacctggg

SEQ ID NO: 7202 - DNA, 20 bp, Artificial Sequence
  Description of Artificial Sequence: Synthetic oligonucleotide
  Target: APOC3; (-) strand; PAM type: NRG; PAM sequence: GAG
gggagaaaggagggacctgg

SEQ ID NO: 7203 - DNA, 20 bp, Artificial Sequence
  Description of Artificial Sequence: Synthetic oligonucleotide
  Target: APOC3; (-) strand; PAM type: NRG; PAM sequence: GGG
cggggagaaaggagggacct

SEQ ID NO: 7204 - DNA, 20 bp, Artificial Sequence
  Description of Artificial Sequence: Synthetic oligonucleotide
  Target: APOC3; (-) strand; PAM type: NRG; PAM sequence: TGG
ccggggagaaaggagggacc

SEQ ID NO: 7205 - DNA, 20 bp, Artificial Sequence
  Description of Artificial Sequence: Synthetic oligonucleotide
  Target: APOC3; (-) strand; PAM type: NRG; PAM sequence: GGG
actgctccggggagaaagga

SEQ ID NO: 7206 - DNA, 20 bp, Artificial Sequence
  Description of Artificial Sequence: Synthetic oligonucleotide
  Target: APOC3; (-) strand; PAM type: NRG; PAM sequence: AGG
gactgctccggggagaaagg

SEQ ID NO: 7207 - DNA, 20 bp, Artificial Sequence
  Description of Artificial Sequence: Synthetic oligonucleotide
  Target: APOC3; (-) strand; PAM type: NRG; PAM sequence: GAG
ggactgctccggggagaaag

SEQ ID NO: 7208 - DNA, 20 bp, Artificial Sequence
  Description of Artificial Sequence: Synthetic oligonucleotide
  Target: APOC3; (-) strand; PAM type: NRG; PAM sequence: AGG
taggactgctccggggagaa

SEQ ID NO: 7209 - DNA, 20 bp, Artificial Sequence
  Description of Artificial Sequence: Synthetic oligonucleotide
  Target: APOC3; (-) strand; PAM type: NRG; PAM sequence: AAG
ctaggactgctccggggaga

SEQ ID NO: 7210 - DNA, 20 bp, Artificial Sequence
  Description of Artificial Sequence: Synthetic oligonucleotide
  Target: APOC3; (-) strand; PAM type: NRG; PAM sequence: GAG
cgccctaggactgctccggg

SEQ ID NO: 7211 - DNA, 20 bp, Artificial Sequence
  Description of Artificial Sequence: Synthetic oligonucleotide
  Target: APOC3; (-) strand; PAM type: NRG; PAM sequence: GGG
cacgccctaggactgctccg

SEQ ID NO: 7212 - DNA, 20 bp, Artificial Sequence
  Description of Artificial Sequence: Synthetic oligonucleotide
  Target: APOC3; (-) strand; PAM type: NRG; PAM sequence: GGG
gcacgccctaggactgctcc

SEQ ID NO: 7213 - DNA, 20 bp, Artificial Sequence
  Description of Artificial Sequence: Synthetic oligonucleotide
  Target: APOC3; (-) strand; PAM type: NRG; PAM sequence: CGG
ggcacgccctaggactgctc

SEQ ID NO: 7214 - DNA, 20 bp, Artificial Sequence
  Description of Artificial Sequence: Synthetic oligonucleotide
  Target: APOC3; (-) strand; PAM type: NRG; PAM sequence: AGG
gggctaaaacggcacgccct

SEQ ID NO: 7215 - DNA, 20 bp, Artificial Sequence
  Description of Artificial Sequence: Synthetic oligonucleotide
  Target: APOC3; (-) strand; PAM type: NRG; PAM sequence: TAG
agggctaaaacggcacgccc

SEQ ID NO: 7216 - DNA, 20 bp, Artificial Sequence
  Description of Artificial Sequence: Synthetic oligonucleotide
  Target: APOC3; (-) strand; PAM type: NRG; PAM sequence: CGG
aatggaaatgagggctaaaa

SEQ ID NO: 7217 - DNA, 20 bp, Artificial Sequence
  Description of Artificial Sequence: Synthetic oligonucleotide
  Target: APOC3; (-) strand; PAM type: NRG; PAM sequence: GGG
ggaaaggaaaatggaaatga

SEQ ID NO: 7218 - DNA, 20 bp, Artificial Sequence
  Description of Artificial Sequence: Synthetic oligonucleotide
  Target: APOC3; (-) strand; PAM type: NRG; PAM sequence: AGG
aggaaaggaaaatggaaatg

SEQ ID NO: 7219 - DNA, 20 bp, Artificial Sequence
  Description of Artificial Sequence: Synthetic oligonucleotide
  Target: APOC3; (-) strand; PAM type: NRG; PAM sequence: GAG
aaggaaaggaaaatggaaat

SEQ ID NO: 7220 - DNA, 20 bp, Artificial Sequence
  Description of Artificial Sequence: Synthetic oligonucleotide
  Target: APOC3; (-) strand; PAM type: NRG; PAM sequence: TGG
aaagggaaaggaaaggaaaa

SEQ ID NO: 7221 - DNA, 20 bp, Artificial Sequence
  Description of Artificial Sequence: Synthetic oligonucleotide
  Target: APOC3; (-) strand; PAM type: NRG; PAM sequence: AGG
gagaaagaaagggaaaggaa

SEQ ID NO: 7222 - DNA, 20 bp, Artificial Sequence
  Description of Artificial Sequence: Synthetic oligonucleotide
  Target: APOC3; (-) strand; PAM type: NRG; PAM sequence: AAG
agagaaagaaagggaaagga

SEQ ID NO: 7223 - DNA, 20 bp, Artificial Sequence
  Description of Artificial Sequence: Synthetic oligonucleotide
  Target: APOC3; (-) strand; PAM type: NRG; PAM sequence: AGG
agaaagagaaagaaagggaa

SEQ ID NO: 7224 - DNA, 20 bp, Artificial Sequence
  Description of Artificial Sequence: Synthetic oligonucleotide
  Target: APOC3; (-) strand; PAM type: NRG; PAM sequence: AAG
tagaaagagaaagaaaggga

SEQ ID NO: 7225 - DNA, 20 bp, Artificial Sequence
  Description of Artificial Sequence: Synthetic oligonucleotide
  Target: APOC3; (-) strand; PAM type: NRG; PAM sequence: GGG
gaaatagaaagagaaagaaa

SEQ ID NO: 7226 - DNA, 20 bp, Artificial Sequence
  Description of Artificial Sequence: Synthetic oligonucleotide
  Target: APOC3; (-) strand; PAM type: NRG; PAM sequence: AGG
agaaatagaaagagaaagaa

SEQ ID NO: 7227 - DNA, 20 bp, Artificial Sequence
  Description of Artificial Sequence: Synthetic oligonucleotide
  Target: APOC3; (-) strand; PAM type: NRG; PAM sequence: AAG
aagaaatagaaagagaaaga

SEQ ID NO: 7228 - DNA, 20 bp, Artificial Sequence
  Description of Artificial Sequence: Synthetic oligonucleotide
  Target: APOC3; (-) strand; PAM type: NRG; PAM sequence: AAG
aagaaagaaatagaaagaga

SEQ ID NO: 7229 - DNA, 20 bp, Artificial Sequence
  Description of Artificial Sequence: Synthetic oligonucleotide
  Target: APOC3; (-) strand; PAM type: NRG; PAM sequence: GAG
aagaaagaaagaaatagaaa

SEQ ID NO: 7230 - DNA, 20 bp, Artificial Sequence
  Description of Artificial Sequence: Synthetic oligonucleotide
  Target: APOC3; (-) strand; PAM type: NRG; PAM sequence: AAG
gaaagaaagaaagaaataga

SEQ ID NO: 7231 - DNA, 20 bp, Artificial Sequence
  Description of Artificial Sequence: Synthetic oligonucleotide
  Target: APOC3; (-) strand; PAM type: NRG; PAM sequence: TAG
gaaagaaagaaagaaagaaa

SEQ ID NO: 7232 - DNA, 20 bp, Artificial Sequence
  Description of Artificial Sequence: Synthetic oligonucleotide
  Target: APOC3; (-) strand; PAM type: NRG; PAM sequence: AAG
aagaaagaaagaaagaaaga

SEQ ID NO: 7233 - DNA, 20 bp, Artificial Sequence
  Description of Artificial Sequence: Synthetic oligonucleotide
  Target: APOC3; (-) strand; PAM type: NRG; PAM sequence: AAG
aagaaagaaagaaagaaaga

SEQ ID NO: 7234 - DNA, 20 bp, Artificial Sequence
  Description of Artificial Sequence: Synthetic oligonucleotide
  Target: APOC3; (-) strand; PAM type: NRG; PAM sequence: AAG
aagaaagaaagaaagaaaga

SEQ ID NO: 7235 - DNA, 20 bp, Artificial Sequence
  Description of Artificial Sequence: Synthetic oligonucleotide
  Target: APOC3; (-) strand; PAM type: NRG; PAM sequence: AAG
aagaaagaaagaaagaaaga

SEQ ID NO: 7236 - DNA, 20 bp, Artificial Sequence
  Description of Artificial Sequence: Synthetic oligonucleotide
  Target: APOC3; (-) strand; PAM type: NRG; PAM sequence: AAG
aagaaagaaagaaagaaaga

SEQ ID NO: 7237 - DNA, 20 bp, Artificial Sequence
  Description of Artificial Sequence: Synthetic oligonucleotide
  Target: APOC3; (-) strand; PAM type: NRG; PAM sequence: AAG
aagaaagaaagaaagaaaga

SEQ ID NO: 7238 - DNA, 20 bp, Artificial Sequence
  Description of Artificial Sequence: Synthetic oligonucleotide
  Target: APOC3; (-) strand; PAM type: NRG; PAM sequence: AAG
aagaaagaaagaaagaaaga

SEQ ID NO: 7239 - DNA, 20 bp, Artificial Sequence
  Description of Artificial Sequence: Synthetic oligonucleotide
  Target: APOC3; (-) strand; PAM type: NRG; PAM sequence: AAG
aagaaagaaagaaagaaaga

SEQ ID NO: 7240 - DNA, 20 bp, Artificial Sequence
  Description of Artificial Sequence: Synthetic oligonucleotide
  Target: APOC3; (-) strand; PAM type: NRG; PAM sequence: AAG
aagaaagaaagaaagaaaga

SEQ ID NO: 7241 - DNA, 20 bp, Artificial Sequence
  Description of Artificial Sequence: Synthetic oligonucleotide
  Target: APOC3; (-) strand; PAM type: NRG; PAM sequence: AAG
aagaaagaaagaaagaaaga

SEQ ID NO: 7242 - DNA, 20 bp, Artificial Sequence
  Description of Artificial Sequence: Synthetic oligonucleotide
  Target: APOC3; (-) strand; PAM type: NRG; PAM sequence: AAG
aagaaagaaagaaagaaaga

SEQ ID NO: 7243 - DNA, 20 bp, Artificial Sequence
  Description of Artificial Sequence: Synthetic oligonucleotide
  Target: APOC3; (-) strand; PAM type: NRG; PAM sequence: AAG
aggaaagaaagaaagaaaga

SEQ ID NO: 7244 - DNA, 20 bp, Artificial Sequence
  Description of Artificial Sequence: Synthetic oligonucleotide
  Target: APOC3; (-) strand; PAM type: NRG; PAM sequence: AAG
agaaaggaaagaaagaaaga

SEQ ID NO: 7245 - DNA, 20 bp, Artificial Sequence
  Description of Artificial Sequence: Synthetic oligonucleotide
  Target: APOC3; (-) strand; PAM type: NRG; PAM sequence: AAG
agaaagaaaggaaagaaaga

SEQ ID NO: 7246 - DNA, 20 bp, Artificial Sequence
  Description of Artificial Sequence: Synthetic oligonucleotide
  Target: APOC3; (-) strand; PAM type: NRG; PAM sequence: AAG
ggaaagaaagaaaggaaaga

SEQ ID NO: 7247 - DNA, 20 bp, Artificial Sequence
  Description of Artificial Sequence: Synthetic oligonucleotide
  Target: APOC3; (-) strand; PAM type: NRG; PAM sequence: AAG
gaaaggaaagaaagaaagga

SEQ ID NO: 7248 - DNA, 20 bp, Artificial Sequence
  Description of Artificial Sequence: Synthetic oligonucleotide
  Target: APOC3; (-) strand; PAM type: NRG; PAM sequence: AGG
gaaagaaaggaaagaaagaa

SEQ ID NO: 7249 - DNA, 20 bp, Artificial Sequence
  Description of Artificial Sequence: Synthetic oligonucleotide
  Target: APOC3; (-) strand; PAM type: NRG; PAM sequence: AAG
agaaagaaaggaaagaaaga

SEQ ID NO: 7250 - DNA, 20 bp, Artificial Sequence
  Description of Artificial Sequence: Synthetic oligonucleotide
  Target: APOC3; (-) strand; PAM type: NRG; PAM sequence: AAG
ggaaagaaagaaaggaaaga

SEQ ID NO: 7251 - DNA, 20 bp, Artificial Sequence
  Description of Artificial Sequence: Synthetic oligonucleotide
  Target: APOC3; (-) strand; PAM type: NRG; PAM sequence: AAG
gaaaggaaagaaagaaagga

SEQ ID NO: 7252 - DNA, 20 bp, Artificial Sequence
  Description of Artificial Sequence: Synthetic oligonucleotide
  Target: APOC3; (-) strand; PAM type: NRG; PAM sequence: AGG
gaaagaaaggaaagaaagaa

SEQ ID NO: 7253 - DNA, 20 bp, Artificial Sequence
  Description of Artificial Sequence: Synthetic oligonucleotide
  Target: APOC3; (-) strand; PAM type: NRG; PAM sequence: AAG
agaaagaaaggaaagaaaga

SEQ ID NO: 7254 - DNA, 20 bp, Artificial Sequence
  Description of Artificial Sequence: Synthetic oligonucleotide
  Target: APOC3; (-) strand; PAM type: NRG; PAM sequence: AAG
agaaagaaagaaaggaaaga

SEQ ID NO: 7255 - DNA, 20 bp, Artificial Sequence
  Description of Artificial Sequence: Synthetic oligonucleotide
  Target: APOC3; (-) strand; PAM type: NRG; PAM sequence: AAG
ggaaagaaagaaagaaagga

SEQ ID NO: 7256 - DNA, 20 bp, Artificial Sequence
  Description of Artificial Sequence: Synthetic oligonucleotide
  Target: APOC3; (-) strand; PAM type: NRG; PAM sequence: AGG
gaaaggaaagaaagaaagaa

SEQ ID NO: 7257 - DNA, 20 bp, Artificial Sequence
  Description of Artificial Sequence: Synthetic oligonucleotide
  Target: APOC3; (-) strand; PAM type: NRG; PAM sequence: AAG
agaaaggaaagaaagaaaga

SEQ ID NO: 7258 - DNA, 20 bp, Artificial Sequence
  Description of Artificial Sequence: Synthetic oligonucleotide
  Target: APOC3; (-) strand; PAM type: NRG; PAM sequence: AAG
agaaagaaaggaaagaaaga

SEQ ID NO: 7259 - DNA, 20 bp, Artificial Sequence
  Description of Artificial Sequence: Synthetic oligonucleotide
  Target: APOC3; (-) strand; PAM type: NRG; PAM sequence: AAG
aaagagaaagaaaggaaaga

SEQ ID NO: 7260 - DNA, 20 bp, Artificial Sequence
  Description of Artificial Sequence: Synthetic oligonucleotide
  Target: APOC3; (-) strand; PAM type: NRG; PAM sequence: AAG
aaagaaagagaaagaaagga

SEQ ID NO: 7261 - DNA, 20 bp, Artificial Sequence
  Description of Artificial Sequence: Synthetic oligonucleotide
  Target: APOC3; (-) strand; PAM type: NRG; PAM sequence: AGG
aaagaaagaaagagaaagaa

SEQ ID NO: 7262 - DNA, 20 bp, Artificial Sequence
  Description of Artificial Sequence: Synthetic oligonucleotide
  Target: APOC3; (-) strand; PAM type: NRG; PAM sequence: AAG
gaaagaaagaaagagaaaga

SEQ ID NO: 7263 - DNA, 20 bp, Artificial Sequence
  Description of Artificial Sequence: Synthetic oligonucleotide
  Target: APOC3; (-) strand; PAM type: NRG; PAM sequence: AAG
gaaagaaagaaagaaagaga

SEQ ID NO: 7264 - DNA, 20 bp, Artificial Sequence
  Description of Artificial Sequence: Synthetic oligonucleotide
  Target: APOC3; (-) strand; PAM type: NRG; PAM sequence: GAG
aaaggaaagaaagaaagaaa

SEQ ID NO: 7265 - DNA, 20 bp, Artificial Sequence
  Description of Artificial Sequence: Synthetic oligonucleotide
  Target: APOC3; (-) strand; PAM type: NRG; PAM sequence: AAG
aaaaaggaaagaaagaaaga

SEQ ID NO: 7266 - DNA, 20 bp, Artificial Sequence
  Description of Artificial Sequence: Synthetic oligonucleotide
  Target: APOC3; (-) strand; PAM type: NRG; PAM sequence: AAG
aaagaaaaaggaaagaaaga

SEQ ID NO: 7267 - DNA, 20 bp, Artificial Sequence
  Description of Artificial Sequence: Synthetic oligonucleotide
  Target: APOC3; (-) strand; PAM type: NRG; PAM sequence: AAG
aaagaaagaaaaaggaaaga

SEQ ID NO: 7268 - DNA, 20 bp, Artificial Sequence
  Description of Artificial Sequence: Synthetic oligonucleotide
  Target: APOC3; (-) strand; PAM type: NRG; PAM sequence: AAG
agggaaagaaagaaaaagga

SEQ ID NO: 7269 - DNA, 20 bp, Artificial Sequence
  Description of Artificial Sequence: Synthetic oligonucleotide
  Target: APOC3; (-) strand; PAM type: NRG; PAM sequence: AGG
agagagggaaagaaagaaaa

SEQ ID NO: 7270 - DNA, 20 bp, Artificial Sequence
  Description of Artificial Sequence: Synthetic oligonucleotide
  Target: APOC3; (-) strand; PAM type: NRG; PAM sequence: AAG
aagagagggaaagaaagaaa

SEQ ID NO: 7271 - DNA, 20 bp, Artificial Sequence
  Description of Artificial Sequence: Synthetic oligonucleotide
  Target: APOC3; (-) strand; PAM type: NRG; PAM sequence: AAG
gaaaggaagagagggaaaga

SEQ ID NO: 7272 - DNA, 20 bp, Artificial Sequence
  Description of Artificial Sequence: Synthetic oligonucleotide
  Target: APOC3; (-) strand; PAM type: NRG; PAM sequence: AAG
gagagaaaggaagagaggga

SEQ ID NO: 7273 - DNA, 20 bp, Artificial Sequence
  Description of Artificial Sequence: Synthetic oligonucleotide
  Target: APOC3; (-) strand; PAM type: NRG; PAM sequence: GGG
gaaagagagaaaggaagaga

SEQ ID NO: 7274 - DNA, 20 bp, Artificial Sequence
  Description of Artificial Sequence: Synthetic oligonucleotide
  Target: APOC3; (-) strand; PAM type: NRG; PAM sequence: AGG
agaaagagagaaaggaagag

SEQ ID NO: 7275 - DNA, 20 bp, Artificial Sequence
  Description of Artificial Sequence: Synthetic oligonucleotide
  Target: APOC3; (-) strand; PAM type: NRG; PAM sequence: GAG
aagaaagagagaaaggaaga

SEQ ID NO: 7276 - DNA, 20 bp, Artificial Sequence
  Description of Artificial Sequence: Synthetic oligonucleotide
  Target: APOC3; (-) strand; PAM type: NRG; PAM sequence: GAG
gaaagaaagagagaaaggaa

SEQ ID NO: 7277 - DNA, 20 bp, Artificial Sequence
  Description of Artificial Sequence: Synthetic oligonucleotide
  Target: APOC3; (-) strand; PAM type: NRG; PAM sequence: AAG
aagaaagaaagagagaaagg

SEQ ID NO: 7278 - DNA, 20 bp, Artificial Sequence
  Description of Artificial Sequence: Synthetic oligonucleotide
  Target: APOC3; (-) strand; PAM type: NRG; PAM sequence: AGG
aagaagaaagaaagagagaa

SEQ ID NO: 7279 - DNA, 20 bp, Artificial Sequence
  Description of Artificial Sequence: Synthetic oligonucleotide
  Target: APOC3; (-) strand; PAM type: NRG; PAM sequence: AAG
gaagaagaaagaaagagaga

SEQ ID NO: 7280 - DNA, 20 bp, Artificial Sequence
  Description of Artificial Sequence: Synthetic oligonucleotide
  Target: APOC3; (-) strand; PAM type: NRG; PAM sequence: GAG
aaaagaagaagaaagaaaga

SEQ ID NO: 7281 - DNA, 20 bp, Artificial Sequence
  Description of Artificial Sequence: Synthetic oligonucleotide
  Target: APOC3; (-) strand; PAM type: NRG; PAM sequence: GAG
aaaaaagaagaagaaagaaa

SEQ ID NO: 7282 - DNA, 20 bp, Artificial Sequence
  Description of Artificial Sequence: Synthetic oligonucleotide
  Target: APOC3; (-) strand; PAM type: NRG; PAM sequence: AAG
aaaaaaaagaagaagaaaga

SEQ ID NO: 7283 - DNA, 20 bp, Artificial Sequence
  Description of Artificial Sequence: Synthetic oligonucleotide
  Target: APOC3; (-) strand; PAM type: NRG; PAM sequence: AAG
ttaaaaaaaaaagaagaaga

SEQ ID NO: 7284 - DNA, 20 bp, Artificial Sequence
  Description of Artificial Sequence: Synthetic oligonucleotide
  Target: APOC3; (-) strand; PAM type: NRG; PAM sequence: AAG
tccattaaaaaaaaaagaag

SEQ ID NO: 7285 - DNA, 20 bp, Artificial Sequence
  Description of Artificial Sequence: Synthetic oligonucleotide
  Target: APOC3; (-) strand; PAM type: NRG; PAM sequence: AAG
gactccattaaaaaaaaaag

SEQ ID NO: 7286 - DNA, 20 bp, Artificial Sequence
  Description of Artificial Sequence: Synthetic oligonucleotide
  Target: APOC3; (-) strand; PAM type: NRG; PAM sequence: AAG
ggagactccattaaaaaaaa

SEQ ID NO: 7287 - DNA, 20 bp, Artificial Sequence
  Description of Artificial Sequence: Synthetic oligonucleotide
  Target: APOC3; (-) strand; PAM type: NRG; PAM sequence: GAG
tccagcctaggtgacagagg

SEQ ID NO: 7288 - DNA, 20 bp, Artificial Sequence
  Description of Artificial Sequence: Synthetic oligonucleotide
  Target: APOC3; (-) strand; PAM type: NRG; PAM sequence: GGG
actccagcctaggtgacaga

SEQ ID NO: 7289 - DNA, 20 bp, Artificial Sequence
  Description of Artificial Sequence: Synthetic oligonucleotide
  Target: APOC3; (-) strand; PAM type: NRG; PAM sequence: AGG
cactccagcctaggtgacag

SEQ ID NO: 7290 - DNA, 20 bp, Artificial Sequence
  Description of Artificial Sequence: Synthetic oligonucleotide
  Target: APOC3; (-) strand; PAM type: NRG; PAM sequence: GAG
gcactccagcctaggtgaca

SEQ ID NO: 7291 - DNA, 20 bp, Artificial Sequence
  Description of Artificial Sequence: Synthetic oligonucleotide
  Target: APOC3; (-) strand; PAM type: NRG; PAM sequence: CAG
ctgcactccagcctaggtga

SEQ ID NO: 7292 - DNA, 20 bp, Artificial Sequence
  Description of Artificial Sequence: Synthetic oligonucleotide
  Target: APOC3; (-) strand; PAM type: NRG; PAM sequence: AGG
gcaccactgcactccagcct

SEQ ID NO: 7293 - DNA, 20 bp, Artificial Sequence
  Description of Artificial Sequence: Synthetic oligonucleotide
  Target: APOC3; (-) strand; PAM type: NRG; PAM sequence: TAG
ggcaccactgcactccagcc

SEQ ID NO: 7294 - DNA, 20 bp, Artificial Sequence
  Description of Artificial Sequence: Synthetic oligonucleotide
  Target: APOC3; (-) strand; PAM type: NRG; PAM sequence: CAG
gagatggcaccactgcactc

SEQ ID NO: 7295 - DNA, 20 bp, Artificial Sequence
  Description of Artificial Sequence: Synthetic oligonucleotide
  Target: APOC3; (-) strand; PAM type: NRG; PAM sequence: TGG
gaggttgcagtgagccgaga

SEQ ID NO: 7296 - DNA, 20 bp, Artificial Sequence
  Description of Artificial Sequence: Synthetic oligonucleotide
  Target: APOC3; (-) strand; PAM type: NRG; PAM sequence: GAG
gacggaggttgcagtgagcc

SEQ ID NO: 7297 - DNA, 20 bp, Artificial Sequence
  Description of Artificial Sequence: Synthetic oligonucleotide
  Target: APOC3; (-) strand; PAM type: NRG; PAM sequence: GAG
cgggagacggaggttgcagt

SEQ ID NO: 7298 - DNA, 20 bp, Artificial Sequence
  Description of Artificial Sequence: Synthetic oligonucleotide
  Target: APOC3; (-) strand; PAM type: NRG; PAM sequence: CAG
aacccgggagacggaggttg

SEQ ID NO: 7299 - DNA, 20 bp, Artificial Sequence
  Description of Artificial Sequence: Synthetic oligonucleotide
  Target: APOC3; (-) strand; PAM type: NRG; PAM sequence: AGG
gggttgaacccgggagacgg

SEQ ID NO: 7300 - DNA, 20 bp, Artificial Sequence
  Description of Artificial Sequence: Synthetic oligonucleotide
  Target: APOC3; (-) strand; PAM type: NRG; PAM sequence: GAG
tgggttgaacccgggagacg

SEQ ID NO: 7301 - DNA, 20 bp, Artificial Sequence
  Description of Artificial Sequence: Synthetic oligonucleotide
  Target: APOC3; (-) strand; PAM type: NRG; PAM sequence: CGG
aatgggttgaacccgggaga

SEQ ID NO: 7302 - DNA, 20 bp, Artificial Sequence
  Description of Artificial Sequence: Synthetic oligonucleotide
  Target: APOC3; (-) strand; PAM type: NRG; PAM sequence: GAG
ggagaatgggttgaacccgg

SEQ ID NO: 7303 - DNA, 20 bp, Artificial Sequence
  Description of Artificial Sequence: Synthetic oligonucleotide
  Target: APOC3; (-) strand; PAM type: NRG; PAM sequence: GGG
caggagaatgggttgaaccc

SEQ ID NO: 7304 - DNA, 20 bp, Artificial Sequence
  Description of Artificial Sequence: Synthetic oligonucleotide
  Target: APOC3; (-) strand; PAM type: NRG; PAM sequence: CGG
gcaggagaatgggttgaacc

SEQ ID NO: 7305 - DNA, 20 bp, Artificial Sequence
  Description of Artificial Sequence: Synthetic oligonucleotide
  Target: APOC3; (-) strand; PAM type: NRG; PAM sequence: GGG
ggaggctgaggcaggagaat

SEQ ID NO: 7306 - DNA, 20 bp, Artificial Sequence
  Description of Artificial Sequence: Synthetic oligonucleotide
  Target: APOC3; (-) strand; PAM type: NRG; PAM sequence: TGG
gggaggctgaggcaggagaa

SEQ ID NO: 7307 - DNA, 20 bp, Artificial Sequence
  Description of Artificial Sequence: Synthetic oligonucleotide
  Target: APOC3; (-) strand; PAM type: NRG; PAM sequence: GAG
tacttgggaggctgaggcag

SEQ ID NO: 7308 - DNA, 20 bp, Artificial Sequence
  Description of Artificial Sequence: Synthetic oligonucleotide
  Target: APOC3; (-) strand; PAM type: NRG; PAM sequence: AGG
gctacttgggaggctgaggc

SEQ ID NO: 7309 - DNA, 20 bp, Artificial Sequence
  Description of Artificial Sequence: Synthetic oligonucleotide
  Target: APOC3; (-) strand; PAM type: NRG; PAM sequence: CAG
agctacttgggaggctgagg

SEQ ID NO: 7310 - DNA, 20 bp, Artificial Sequence
  Description of Artificial Sequence: Synthetic oligonucleotide
  Target: APOC3; (-) strand; PAM type: NRG; PAM sequence: AGG
cccagctacttgggaggctg

SEQ ID NO: 7311 - DNA, 20 bp, Artificial Sequence
  Description of Artificial Sequence: Synthetic oligonucleotide
  Target: APOC3; (-) strand; PAM type: NRG; PAM sequence: GAG
tcccagctacttgggaggct

SEQ ID NO: 7312 - DNA, 20 bp, Artificial Sequence
  Description of Artificial Sequence: Synthetic oligonucleotide
  Target: APOC3; (-) strand; PAM type: NRG; PAM sequence: AGG
tgtaatcccagctacttggg

SEQ ID NO: 7313 - DNA, 20 bp, Artificial Sequence
  Description of Artificial Sequence: Synthetic oligonucleotide
  Target: APOC3; (-) strand; PAM type: NRG; PAM sequence: GAG
ctgtaatcccagctacttgg

SEQ ID NO: 7314 - DNA, 20 bp, Artificial Sequence
  Description of Artificial Sequence: Synthetic oligonucleotide
  Target: APOC3; (-) strand; PAM type: NRG; PAM sequence: GGG
gcctgtaatcccagctactt

SEQ ID NO: 7315 - DNA, 20 bp, Artificial Sequence
  Description of Artificial Sequence: Synthetic oligonucleotide
  Target: APOC3; (-) strand; PAM type: NRG; PAM sequence: TGG
tgcctgtaatcccagctact

SEQ ID NO: 7316 - DNA, 20 bp, Artificial Sequence
  Description of Artificial Sequence: Synthetic oligonucleotide
  Target: APOC3; (-) strand; PAM type: NRG; PAM sequence: CAG
gtggcgcgtgcctgtaatcc

SEQ ID NO: 7317 - DNA, 20 bp, Artificial Sequence
  Description of Artificial Sequence: Synthetic oligonucleotide
  Target: APOC3; (-) strand; PAM type: NRG; PAM sequence: TGG
caaaaattagctgggtgtgg

SEQ ID NO: 7318 - DNA, 20 bp, Artificial Sequence
  Description of Artificial Sequence: Synthetic oligonucleotide
  Target: APOC3; (-) strand; PAM type: NRG; PAM sequence: TGG
atacaaaaattagctgggtg

SEQ ID NO: 7319 - DNA, 20 bp, Artificial Sequence
  Description of Artificial Sequence: Synthetic oligonucleotide
  Target: APOC3; (-) strand; PAM type: NRG; PAM sequence: GGG
taaaaatacaaaaattagct

SEQ ID NO: 7320 - DNA, 20 bp, Artificial Sequence
  Description of Artificial Sequence: Synthetic oligonucleotide
  Target: APOC3; (-) strand; PAM type: NRG; PAM sequence: TGG
ctaaaaatacaaaaattagc

SEQ ID NO: 7321 - DNA, 20 bp, Artificial Sequence
  Description of Artificial Sequence: Synthetic oligonucleotide
  Target: APOC3; (-) strand; PAM type: NRG; PAM sequence: TAG
tctgctaaaaatacaaaaat

SEQ ID NO: 7322 - DNA, 20 bp, Artificial Sequence
  Description of Artificial Sequence: Synthetic oligonucleotide
  Target: APOC3; (-) strand; PAM type: NRG; PAM sequence: TGG
caagaccaacctggccaaca

SEQ ID NO: 7323 - DNA, 20 bp, Artificial Sequence
  Description of Artificial Sequence: Synthetic oligonucleotide
  Target: APOC3; (-) strand; PAM type: NRG; PAM sequence: TGG
tcaggaattcaagaccaacc

SEQ ID NO: 7324 - DNA, 20 bp, Artificial Sequence
  Description of Artificial Sequence: Synthetic oligonucleotide
  Target: APOC3; (-) strand; PAM type: NRG; PAM sequence: AAG
tcccctgaggtcaggaattc

SEQ ID NO: 7325 - DNA, 20 bp, Artificial Sequence
  Description of Artificial Sequence: Synthetic oligonucleotide
  Target: APOC3; (-) strand; PAM type: NRG; PAM sequence: AGG
caggaggatcccctgaggtc

SEQ ID NO: 7326 - DNA, 20 bp, Artificial Sequence
  Description of Artificial Sequence: Synthetic oligonucleotide
  Target: APOC3; (-) strand; PAM type: NRG; PAM sequence: CAG
gcaggaggatcccctgaggt

SEQ ID NO: 7327 - DNA, 20 bp, Artificial Sequence
  Description of Artificial Sequence: Synthetic oligonucleotide
  Target: APOC3; (-) strand; PAM type: NRG; PAM sequence: AGG
cgaggcaggaggatcccctg

SEQ ID NO: 7328 - DNA, 20 bp, Artificial Sequence
  Description of Artificial Sequence: Synthetic oligonucleotide
  Target: APOC3; (-) strand; PAM type: NRG; PAM sequence: GAG
ccgaggcaggaggatcccct

SEQ ID NO: 7329 - DNA, 20 bp, Artificial Sequence
  Description of Artificial Sequence: Synthetic oligonucleotide
  Target: APOC3; (-) strand; PAM type: NRG; PAM sequence: AGG
ctttgggaggccgaggcagg

SEQ ID NO: 7330 - DNA, 20 bp, Artificial Sequence
  Description of Artificial Sequence: Synthetic oligonucleotide
  Target: APOC3; (-) strand; PAM type: NRG; PAM sequence: GAG
actttgggaggccgaggcag

SEQ ID NO: 7331 - DNA, 20 bp, Artificial Sequence
  Description of Artificial Sequence: Synthetic oligonucleotide
  Target: APOC3; (-) strand; PAM type: NRG; PAM sequence: AGG
gcactttgggaggccgaggc

SEQ ID NO: 7332 - DNA, 20 bp, Artificial Sequence
  Description of Artificial Sequence: Synthetic oligonucleotide
  Target: APOC3; (-) strand; PAM type: NRG; PAM sequence: CAG
agcactttgggaggccgagg

SEQ ID NO: 7333 - DNA, 20 bp, Artificial Sequence
  Description of Artificial Sequence: Synthetic oligonucleotide
  Target: APOC3; (-) strand; PAM type: NRG; PAM sequence: AGG
cccagcactttgggaggccg

SEQ ID NO: 7334 - DNA, 20 bp, Artificial Sequence
  Description of Artificial Sequence: Synthetic oligonucleotide
  Target: APOC3; (-) strand; PAM type: NRG; PAM sequence: GAG
tcccagcactttgggaggcc

SEQ ID NO: 7335 - DNA, 20 bp, Artificial Sequence
  Description of Artificial Sequence: Synthetic oligonucleotide
  Target: APOC3; (-) strand; PAM type: NRG; PAM sequence: AGG
tgtaatcccagcactttggg

SEQ ID NO: 7336 - DNA, 20 bp, Artificial Sequence
  Description of Artificial Sequence: Synthetic oligonucleotide
  Target: APOC3; (-) strand; PAM type: NRG; PAM sequence: GAG
ctgtaatcccagcactttgg

SEQ ID NO: 7337 - DNA, 20 bp, Artificial Sequence
  Description of Artificial Sequence: Synthetic oligonucleotide
  Target: APOC3; (-) strand; PAM type: NRG; PAM sequence: GGG
gcctgtaatcccagcacttt

SEQ ID NO: 7338 - DNA, 20 bp, Artificial Sequence
  Description of Artificial Sequence: Synthetic oligonucleotide
  Target: APOC3; (-) strand; PAM type: NRG; PAM sequence: TGG
tgcctgtaatcccagcactt

SEQ ID NO: 7339 - DNA, 20 bp, Artificial Sequence
  Description of Artificial Sequence: Synthetic oligonucleotide
  Target: APOC3; (-) strand; PAM type: NRG; PAM sequence: CAG
gtggctcatgcctgtaatcc

SEQ ID NO: 7340 - DNA, 20 bp, Artificial Sequence
  Description of Artificial Sequence: Synthetic oligonucleotide
  Target: APOC3; (-) strand; PAM type: NRG; PAM sequence: TGG
gaaaatggggccaggcgcag

SEQ ID NO: 7341 - DNA, 20 bp, Artificial Sequence
  Description of Artificial Sequence: Synthetic oligonucleotide
  Target: APOC3; (-) strand; PAM type: NRG; PAM sequence: CAG
aaggaaaatggggccaggcg

SEQ ID NO: 7342 - DNA, 20 bp, Artificial Sequence
  Description of Artificial Sequence: Synthetic oligonucleotide
  Target: APOC3; (-) strand; PAM type: NRG; PAM sequence: AGG
cagaaaaggaaaatggggcc

SEQ ID NO: 7343 - DNA, 20 bp, Artificial Sequence
  Description of Artificial Sequence: Synthetic oligonucleotide
  Target: APOC3; (-) strand; PAM type: NRG; PAM sequence: CAG
tcagaaaaggaaaatggggc

SEQ ID NO: 7344 - DNA, 20 bp, Artificial Sequence
  Description of Artificial Sequence: Synthetic oligonucleotide
  Target: APOC3; (-) strand; PAM type: NRG; PAM sequence: GGG
accttcagaaaaggaaaatg

SEQ ID NO: 7345 - DNA, 20 bp, Artificial Sequence
  Description of Artificial Sequence: Synthetic oligonucleotide
  Target: APOC3; (-) strand; PAM type: NRG; PAM sequence: GGG
gaccttcagaaaaggaaaat

SEQ ID NO: 7346 - DNA, 20 bp, Artificial Sequence
  Description of Artificial Sequence: Synthetic oligonucleotide
  Target: APOC3; (-) strand; PAM type: NRG; PAM sequence: TGG
agaccttcagaaaaggaaaa

SEQ ID NO: 7347 - DNA, 20 bp, Artificial Sequence
  Description of Artificial Sequence: Synthetic oligonucleotide
  Target: APOC3; (-) strand; PAM type: NRG; PAM sequence: AGG
tctagccagaccttcagaaa

SEQ ID NO: 7348 - DNA, 20 bp, Artificial Sequence
  Description of Artificial Sequence: Synthetic oligonucleotide
  Target: APOC3; (-) strand; PAM type: NRG; PAM sequence: AAG
ctctagccagaccttcagaa

SEQ ID NO: 7349 - DNA, 20 bp, Artificial Sequence
  Description of Artificial Sequence: Synthetic oligonucleotide
  Target: APOC3; (-) strand; PAM type: NRG; PAM sequence: CAG
cactgctctagccagacctt

SEQ ID NO: 7350 - DNA, 20 bp, Artificial Sequence
  Description of Artificial Sequence: Synthetic oligonucleotide
  Target: APOC3; (-) strand; PAM type: NRG; PAM sequence: CAG
ctgaggaccactgctctagc

SEQ ID NO: 7351 - DNA, 20 bp, Artificial Sequence
  Description of Artificial Sequence: Synthetic oligonucleotide
  Target: APOC3; (-) strand; PAM type: NRG; PAM sequence: TAG
aaggctgaggaccactgctc

SEQ ID NO: 7352 - DNA, 20 bp, Artificial Sequence
  Description of Artificial Sequence: Synthetic oligonucleotide
  Target: APOC3; (-) strand; PAM type: NRG; PAM sequence: AGG
ccctggtgccaaaaaggctg

SEQ ID NO: 7353 - DNA, 20 bp, Artificial Sequence
  Description of Artificial Sequence: Synthetic oligonucleotide
  Target: APOC3; (-) strand; PAM type: NRG; PAM sequence: GAG
tccctggtgccaaaaaggct

SEQ ID NO: 7354 - DNA, 20 bp, Artificial Sequence
  Description of Artificial Sequence: Synthetic oligonucleotide
  Target: APOC3; (-) strand; PAM type: NRG; PAM sequence: AGG
actggtccctggtgccaaaa

SEQ ID NO: 7355 - DNA, 20 bp, Artificial Sequence
  Description of Artificial Sequence: Synthetic oligonucleotide
  Target: APOC3; (-) strand; PAM type: NRG; PAM sequence: AAG
aactggtccctggtgccaaa

SEQ ID NO: 7356 - DNA, 20 bp, Artificial Sequence
  Description of Artificial Sequence: Synthetic oligonucleotide
  Target: APOC3; (-) strand; PAM type: NRG; PAM sequence: TGG
tccaccacaaaactggtccc

SEQ ID NO: 7357 - DNA, 20 bp, Artificial Sequence
  Description of Artificial Sequence: Synthetic oligonucleotide
  Target: APOC3; (-) strand; PAM type: NRG; PAM sequence: TGG
aaaattgtccaccacaaaac

SEQ ID NO: 7358 - DNA, 20 bp, Artificial Sequence
  Description of Artificial Sequence: Synthetic oligonucleotide
  Target: APOC3; (-) strand; PAM type: NRG; PAM sequence: TGG
aaaccatccccgctggccca

SEQ ID NO: 7359 - DNA, 20 bp, Artificial Sequence
  Description of Artificial Sequence: Synthetic oligonucleotide
  Target: APOC3; (-) strand; PAM type: NRG; PAM sequence: TGG
catcccaaaaccatccccgc

SEQ ID NO: 7360 - DNA, 20 bp, Artificial Sequence
  Description of Artificial Sequence: Synthetic oligonucleotide
  Target: APOC3; (-) strand; PAM type: NRG; PAM sequence: CAG
cctgatgatctgaggtggaa

SEQ ID NO: 7361 - DNA, 20 bp, Artificial Sequence
  Description of Artificial Sequence: Synthetic oligonucleotide
  Target: APOC3; (-) strand; PAM type: NRG; PAM sequence: TGG
taatgcctgatgatctgagg

SEQ ID NO: 7362 - DNA, 20 bp, Artificial Sequence
  Description of Artificial Sequence: Synthetic oligonucleotide
  Target: APOC3; (-) strand; PAM type: NRG; PAM sequence: AGG
atctaatgcctgatgatctg

SEQ ID NO: 7363 - DNA, 20 bp, Artificial Sequence
  Description of Artificial Sequence: Synthetic oligonucleotide
  Target: APOC3; (-) strand; PAM type: NRG; PAM sequence: GAG
aatctaatgcctgatgatct

SEQ ID NO: 7364 - DNA, 20 bp, Artificial Sequence
  Description of Artificial Sequence: Synthetic oligonucleotide
  Target: APOC3; (-) strand; PAM type: NRG; PAM sequence: GAG
ctaggtggagggctccttat

SEQ ID NO: 7365 - DNA, 20 bp, Artificial Sequence
  Description of Artificial Sequence: Synthetic oligonucleotide
  Target: APOC3; (-) strand; PAM type: NRG; PAM sequence: GGG
atgccagggatctaggtgga

SEQ ID NO: 7366 - DNA, 20 bp, Artificial Sequence
  Description of Artificial Sequence: Synthetic oligonucleotide
  Target: APOC3; (-) strand; PAM type: NRG; PAM sequence: AGG
catgccagggatctaggtgg

SEQ ID NO: 7367 - DNA, 20 bp, Artificial Sequence
  Description of Artificial Sequence: Synthetic oligonucleotide
  Target: APOC3; (-) strand; PAM type: NRG; PAM sequence: GAG
acatgccagggatctaggtg

SEQ ID NO: 7368 - DNA, 20 bp, Artificial Sequence
  Description of Artificial Sequence: Synthetic oligonucleotide
  Target: APOC3; (-) strand; PAM type: NRG; PAM sequence: TGG
gcacatgccagggatctagg

SEQ ID NO: 7369 - DNA, 20 bp, Artificial Sequence
  Description of Artificial Sequence: Synthetic oligonucleotide
  Target: APOC3; (-) strand; PAM type: NRG; PAM sequence: AGG
actgcacatgccagggatct

SEQ ID NO: 7370 - DNA, 20 bp, Artificial Sequence
  Description of Artificial Sequence: Synthetic oligonucleotide
  Target: APOC3; (-) strand; PAM type: NRG; PAM sequence: TAG
aactgcacatgccagggatc

SEQ ID NO: 7371 - DNA, 20 bp, Artificial Sequence
  Description of Artificial Sequence: Synthetic oligonucleotide
  Target: APOC3; (-) strand; PAM type: NRG; PAM sequence: GGG
attgtgaactgcacatgcca

SEQ ID NO: 7372 - DNA, 20 bp, Artificial Sequence
  Description of Artificial Sequence: Synthetic oligonucleotide
  Target: APOC3; (-) strand; PAM type: NRG; PAM sequence: AGG
tattgtgaactgcacatgcc

SEQ ID NO: 7373 - DNA, 20 bp, Artificial Sequence
  Description of Artificial Sequence: Synthetic oligonucleotide
  Target: APOC3; (-) strand; PAM type: NRG; PAM sequence: CAG
ctattgtgaactgcacatgc

SEQ ID NO: 7374 - DNA, 20 bp, Artificial Sequence
  Description of Artificial Sequence: Synthetic oligonucleotide
  Target: APOC3; (-) strand; PAM type: NRG; PAM sequence: GAG
gtggccttacattctcatag

SEQ ID NO: 7375 - DNA, 20 bp, Artificial Sequence
  Description of Artificial Sequence: Synthetic oligonucleotide
  Target: APOC3; (-) strand; PAM type: NRG; PAM sequence: AGG
aagtggccttacattctcat

SEQ ID NO: 7376 - DNA, 20 bp, Artificial Sequence
  Description of Artificial Sequence: Synthetic oligonucleotide
  Target: APOC3; (-) strand; PAM type: NRG; PAM sequence: TAG
caagtggccttacattctca

SEQ ID NO: 7377 - DNA, 20 bp, Artificial Sequence
  Description of Artificial Sequence: Synthetic oligonucleotide
  Target: APOC3; (-) strand; PAM type: NRG; PAM sequence: TGG
ccgcctcctgtcagatcaag

SEQ ID NO: 7378 - DNA, 20 bp, Artificial Sequence
  Description of Artificial Sequence: Synthetic oligonucleotide
  Target: APOC3; (-) strand; PAM type: NRG; PAM sequence: AAG
gctccgcctcctgtcagatc

SEQ ID NO: 7379 - DNA, 20 bp, Artificial Sequence
  Description of Artificial Sequence: Synthetic oligonucleotide
  Target: APOC3; (-) strand; PAM type: NRG; PAM sequence: CAG
gcctgagctccgcctcctgt

SEQ ID NO: 7380 - DNA, 20 bp, Artificial Sequence
  Description of Artificial Sequence: Synthetic oligonucleotide
  Target: APOC3; (-) strand; PAM type: NRG; PAM sequence: GAG
gtgagtgagcaataccgcct

SEQ ID NO: 7381 - DNA, 20 bp, Artificial Sequence
  Description of Artificial Sequence: Synthetic oligonucleotide
  Target: APOC3; (-) strand; PAM type: NRG; PAM sequence: GAG
gaagtgagtggtgggtgagt

SEQ ID NO: 7382 - DNA, 20 bp, Artificial Sequence
  Description of Artificial Sequence: Synthetic oligonucleotide
  Target: APOC3; (-) strand; PAM type: NRG; PAM sequence: GAG
gcacgaagtgagtggtgggt

SEQ ID NO: 7383 - DNA, 20 bp, Artificial Sequence
  Description of Artificial Sequence: Synthetic oligonucleotide
  Target: APOC3; (-) strand; PAM type: NRG; PAM sequence: GGG
cacagcacgaagtgagtggt

SEQ ID NO: 7384 - DNA, 20 bp, Artificial Sequence
  Description of Artificial Sequence: Synthetic oligonucleotide
  Target: APOC3; (-) strand; PAM type: NRG; PAM sequence: TGG
gcacagcacgaagtgagtgg

SEQ ID NO: 7385 - DNA, 20 bp, Artificial Sequence
  Description of Artificial Sequence: Synthetic oligonucleotide
  Target: APOC3; (-) strand; PAM type: NRG; PAM sequence: TGG
gctgcacagcacgaagtgag

SEQ ID NO: 7386 - DNA, 20 bp, Artificial Sequence
  Description of Artificial Sequence: Synthetic oligonucleotide
  Target: APOC3; (-) strand; PAM type: NRG; PAM sequence: GAG
cgggctgcacagcacgaagt

SEQ ID NO: 7387 - DNA, 20 bp, Artificial Sequence
  Description of Artificial Sequence: Synthetic oligonucleotide
  Target: APOC3; (-) strand; PAM type: NRG; PAM sequence: AAG
gagccgggctgcacagcacg

SEQ ID NO: 7388 - DNA, 20 bp, Artificial Sequence
  Description of Artificial Sequence: Synthetic oligonucleotide
  Target: APOC3; (-) strand; PAM type: NRG; PAM sequence: CAG
ctgttaggagccgggctgca

SEQ ID NO: 7389 - DNA, 20 bp, Artificial Sequence
  Description of Artificial Sequence: Synthetic oligonucleotide
  Target: APOC3; (-) strand; PAM type: NRG; PAM sequence: GGG
tccatggactgttaggagcc

SEQ ID NO: 7390 - DNA, 20 bp, Artificial Sequence
  Description of Artificial Sequence: Synthetic oligonucleotide
  Target: APOC3; (-) strand; PAM type: NRG; PAM sequence: CGG
gtccatggactgttaggagc

SEQ ID NO: 7391 - DNA, 20 bp, Artificial Sequence
  Description of Artificial Sequence: Synthetic oligonucleotide
  Target: APOC3; (-) strand; PAM type: NRG; PAM sequence: GAG
actggtccatggactgttag

SEQ ID NO: 7392 - DNA, 20 bp, Artificial Sequence
  Description of Artificial Sequence: Synthetic oligonucleotide
  Target: APOC3; (-) strand; PAM type: NRG; PAM sequence: AGG
gtactggtccatggactgtt

SEQ ID NO: 7393 - DNA, 20 bp, Artificial Sequence
  Description of Artificial Sequence: Synthetic oligonucleotide
  Target: APOC3; (-) strand; PAM type: NRG; PAM sequence: TAG
ggtactggtccatggactgt

SEQ ID NO: 7394 - DNA, 20 bp, Artificial Sequence
  Description of Artificial Sequence: Synthetic oligonucleotide
  Target: APOC3; (-) strand; PAM type: NRG; PAM sequence: TGG
catagataggtactggtcca

SEQ ID NO: 7395 - DNA, 20 bp, Artificial Sequence
  Description of Artificial Sequence: Synthetic oligonucleotide
  Target: APOC3; (-) strand; PAM type: NRG; PAM sequence: TGG
cccaagtcatagataggtac

SEQ ID NO: 7396 - DNA, 20 bp, Artificial Sequence
  Description of Artificial Sequence: Synthetic oligonucleotide
  Target: APOC3; (-) strand; PAM type: NRG; PAM sequence: AGG
ccaacccccaagtcatagat

SEQ ID NO: 7397 - DNA, 20 bp, Artificial Sequence
  Description of Artificial Sequence: Synthetic oligonucleotide
  Target: APOC3; (-) strand; PAM type: NRG; PAM sequence: TAG
cccaacccccaagtcataga

SEQ ID NO: 7398 - DNA, 20 bp, Artificial Sequence
  Description of Artificial Sequence: Synthetic oligonucleotide
  Target: APOC3; (-) strand; PAM type: NRG; PAM sequence: TAG
ggtccccaacccccaagtca

SEQ ID NO: 7399 - DNA, 20 bp, Artificial Sequence
  Description of Artificial Sequence: Synthetic oligonucleotide
  Target: APOC3; (-) strand; PAM type: NRG; PAM sequence: AAG
cccaggggtccccaaccccc

SEQ ID NO: 7400 - DNA, 20 bp, Artificial Sequence
  Description of Artificial Sequence: Synthetic oligonucleotide
  Target: APOC3; (-) strand; PAM type: NRG; PAM sequence: GGG
aaggcaaacccctagcccag

SEQ ID NO: 7401 - DNA, 20 bp, Artificial Sequence
  Description of Artificial Sequence: Synthetic oligonucleotide
  Target: APOC3; (-) strand; PAM type: NRG; PAM sequence: GGG
caaggcaaacccctagccca

SEQ ID NO: 7402 - DNA, 20 bp, Artificial Sequence
  Description of Artificial Sequence: Synthetic oligonucleotide
  Target: APOC3; (-) strand; PAM type: NRG; PAM sequence: AGG
ccaaggcaaacccctagccc

SEQ ID NO: 7403 - DNA, 20 bp, Artificial Sequence
  Description of Artificial Sequence: Synthetic oligonucleotide
  Target: APOC3; (-) strand; PAM type: NRG; PAM sequence: CAG
cccaaggcaaacccctagcc

SEQ ID NO: 7404 - DNA, 20 bp, Artificial Sequence
  Description of Artificial Sequence: Synthetic oligonucleotide
  Target: APOC3; (-) strand; PAM type: NRG; PAM sequence: TAG
ggcctcccaaggcaaacccc

SEQ ID NO: 7405 - DNA, 20 bp, Artificial Sequence
  Description of Artificial Sequence: Synthetic oligonucleotide
  Target: APOC3; (-) strand; PAM type: NRG; PAM sequence: AGG
gggtcaggtggggcctccca

SEQ ID NO: 7406 - DNA, 20 bp, Artificial Sequence
  Description of Artificial Sequence: Synthetic oligonucleotide
  Target: APOC3; (-) strand; PAM type: NRG; PAM sequence: AAG
tgggtcaggtggggcctccc

SEQ ID NO: 7407 - DNA, 20 bp, Artificial Sequence
  Description of Artificial Sequence: Synthetic oligonucleotide
  Target: APOC3; (-) strand; PAM type: NRG; PAM sequence: GGG
ggcttgaattgggtcaggtg

SEQ ID NO: 7408 - DNA, 20 bp, Artificial Sequence
  Description of Artificial Sequence: Synthetic oligonucleotide
  Target: APOC3; (-) strand; PAM type: NRG; PAM sequence: GGG
gggcttgaattgggtcaggt

SEQ ID NO: 7409 - DNA, 20 bp, Artificial Sequence
  Description of Artificial Sequence: Synthetic oligonucleotide
  Target: APOC3; (-) strand; PAM type: NRG; PAM sequence: TGG
cgggcttgaattgggtcagg

SEQ ID NO: 7410 - DNA, 20 bp, Artificial Sequence
  Description of Artificial Sequence: Synthetic oligonucleotide
  Target: APOC3; (-) strand; PAM type: NRG; PAM sequence: AGG
tcacgggcttgaattgggtc

SEQ ID NO: 7411 - DNA, 20 bp, Artificial Sequence
  Description of Artificial Sequence: Synthetic oligonucleotide
  Target: APOC3; (-) strand; PAM type: NRG; PAM sequence: CAG
ctcacgggcttgaattgggt

SEQ ID NO: 7412 - DNA, 20 bp, Artificial Sequence
  Description of Artificial Sequence: Synthetic oligonucleotide
  Target: APOC3; (-) strand; PAM type: NRG; PAM sequence: GGG
agcactcacgggcttgaatt

SEQ ID NO: 7413 - DNA, 20 bp, Artificial Sequence
  Description of Artificial Sequence: Synthetic oligonucleotide
  Target: APOC3; (-) strand; PAM type: NRG; PAM sequence: TGG
aagcactcacgggcttgaat

SEQ ID NO: 7414 - DNA, 20 bp, Artificial Sequence
  Description of Artificial Sequence: Synthetic oligonucleotide
  Target: APOC3; (-) strand; PAM type: NRG; PAM sequence: GGG
aacaaagcagaagcactcac

SEQ ID NO: 7415 - DNA, 20 bp, Artificial Sequence
  Description of Artificial Sequence: Synthetic oligonucleotide
  Target: APOC3; (-) strand; PAM type: NRG; PAM sequence: CGG
gaacaaagcagaagcactca

SEQ ID NO: 7416 - DNA, 20 bp, Artificial Sequence
  Description of Artificial Sequence: Synthetic oligonucleotide
  Target: APOC3; (-) strand; PAM type: NRG; PAM sequence: AAG
caggtcttagaacaaagcag

SEQ ID NO: 7417 - DNA, 20 bp, Artificial Sequence
  Description of Artificial Sequence: Synthetic oligonucleotide
  Target: APOC3; (-) strand; PAM type: NRG; PAM sequence: CAG
ccccaggtcttagaacaaag

SEQ ID NO: 7418 - DNA, 20 bp, Artificial Sequence
  Description of Artificial Sequence: Synthetic oligonucleotide
  Target: APOC3; (-) strand; PAM type: NRG; PAM sequence: AAG
tggccccaggtcttagaaca

SEQ ID NO: 7419 - DNA, 20 bp, Artificial Sequence
  Description of Artificial Sequence: Synthetic oligonucleotide
  Target: APOC3; (-) strand; PAM type: NRG; PAM sequence: TAG
ctcacactggccccaggtct

SEQ ID NO: 7420 - DNA, 20 bp, Artificial Sequence
  Description of Artificial Sequence: Synthetic oligonucleotide
  Target: APOC3; (-) strand; PAM type: NRG; PAM sequence: AGG
cttctgctcacactggcccc

SEQ ID NO: 7421 - DNA, 20 bp, Artificial Sequence
  Description of Artificial Sequence: Synthetic oligonucleotide
  Target: APOC3; (-) strand; PAM type: NRG; PAM sequence: CAG
acttctgctcacactggccc

SEQ ID NO: 7422 - DNA, 20 bp, Artificial Sequence
  Description of Artificial Sequence: Synthetic oligonucleotide
  Target: APOC3; (-) strand; PAM type: NRG; PAM sequence: TGG
ggacacacttctgctcacac

SEQ ID NO: 7423 - DNA, 20 bp, Artificial Sequence
  Description of Artificial Sequence: Synthetic oligonucleotide
  Target: APOC3; (-) strand; PAM type: NRG; PAM sequence: AGG
aggggcaggatgggagagga

SEQ ID NO: 7424 - DNA, 20 bp, Artificial Sequence
  Description of Artificial Sequence: Synthetic oligonucleotide
  Target: APOC3; (-) strand; PAM type: NRG; PAM sequence: AAG
caggggcaggatgggagagg

SEQ ID NO: 7425 - DNA, 20 bp, Artificial Sequence
  Description of Artificial Sequence: Synthetic oligonucleotide
  Target: APOC3; (-) strand; PAM type: NRG; PAM sequence: AGG
gggcaggggcaggatgggag

SEQ ID NO: 7426 - DNA, 20 bp, Artificial Sequence
  Description of Artificial Sequence: Synthetic oligonucleotide
  Target: APOC3; (-) strand; PAM type: NRG; PAM sequence: GAG
tgggcaggggcaggatggga

SEQ ID NO: 7427 - DNA, 20 bp, Artificial Sequence
  Description of Artificial Sequence: Synthetic oligonucleotide
  Target: APOC3; (-) strand; PAM type: NRG; PAM sequence: GAG
gatgggcaggggcaggatgg

SEQ ID NO: 7428 - DNA, 20 bp, Artificial Sequence
  Description of Artificial Sequence: Synthetic oligonucleotide
  Target: APOC3; (-) strand; PAM type: NRG; PAM sequence: GGG
ctgatgggcaggggcaggat

SEQ ID NO: 7429 - DNA, 20 bp, Artificial Sequence
  Description of Artificial Sequence: Synthetic oligonucleotide
  Target: APOC3; (-) strand; PAM type: NRG; PAM sequence: TGG
actgatgggcaggggcagga

SEQ ID NO: 7430 - DNA, 20 bp, Artificial Sequence
  Description of Artificial Sequence: Synthetic oligonucleotide
  Target: APOC3; (-) strand; PAM type: NRG; PAM sequence: AGG
gagtactgatgggcaggggc

SEQ ID NO: 7431 - DNA, 20 bp, Artificial Sequence
  Description of Artificial Sequence: Synthetic oligonucleotide
  Target: APOC3; (-) strand; PAM type: NRG; PAM sequence: CAG
agagtactgatgggcagggg

SEQ ID NO: 7432 - DNA, 20 bp, Artificial Sequence
  Description of Artificial Sequence: Synthetic oligonucleotide
  Target: APOC3; (-) strand; PAM type: NRG; PAM sequence: GGG
aggagagtactgatgggcag

SEQ ID NO: 7433 - DNA, 20 bp, Artificial Sequence
  Description of Artificial Sequence: Synthetic oligonucleotide
  Target: APOC3; (-) strand; PAM type: NRG; PAM sequence: GGG
gaggagagtactgatgggca

SEQ ID NO: 7434 - DNA, 20 bp, Artificial Sequence
  Description of Artificial Sequence: Synthetic oligonucleotide
  Target: APOC3; (-) strand; PAM type: NRG; PAM sequence: AGG
agaggagagtactgatgggc

SEQ ID NO: 7435 - DNA, 20 bp, Artificial Sequence
  Description of Artificial Sequence: Synthetic oligonucleotide
  Target: APOC3; (-) strand; PAM type: NRG; PAM sequence: CAG
gagaggagagtactgatggg

SEQ ID NO: 7436 - DNA, 20 bp, Artificial Sequence
  Description of Artificial Sequence: Synthetic oligonucleotide
  Target: APOC3; (-) strand; PAM type: NRG; PAM sequence: GGG
ggggagaggagagtactgat

SEQ ID NO: 7437 - DNA, 20 bp, Artificial Sequence
  Description of Artificial Sequence: Synthetic oligonucleotide
  Target: APOC3; (-) strand; PAM type: NRG; PAM sequence: TGG
aggggagaggagagtactga

SEQ ID NO: 7438 - DNA, 20 bp, Artificial Sequence
  Description of Artificial Sequence: Synthetic oligonucleotide
  Target: APOC3; (-) strand; PAM type: NRG; PAM sequence: GAG
gaagggagtaggggagagga

SEQ ID NO: 7439 - DNA, 20 bp, Artificial Sequence
  Description of Artificial Sequence: Synthetic oligonucleotide
  Target: APOC3; (-) strand; PAM type: NRG; PAM sequence: GAG
gagaagggagtaggggagag

SEQ ID NO: 7440 - DNA, 20 bp, Artificial Sequence
  Description of Artificial Sequence: Synthetic oligonucleotide
  Target: APOC3; (-) strand; PAM type: NRG; PAM sequence: AGG
tggagaagggagtaggggag

SEQ ID NO: 7441 - DNA, 20 bp, Artificial Sequence
  Description of Artificial Sequence: Synthetic oligonucleotide
  Target: APOC3; (-) strand; PAM type: NRG; PAM sequence: GAG
gtggagaagggagtagggga

SEQ ID NO: 7442 - DNA, 20 bp, Artificial Sequence
  Description of Artificial Sequence: Synthetic oligonucleotide
  Target: APOC3; (-) strand; PAM type: NRG; PAM sequence: GAG
aggtggagaagggagtaggg

SEQ ID NO: 7443 - DNA, 20 bp, Artificial Sequence
  Description of Artificial Sequence: Synthetic oligonucleotide
  Target: APOC3; (-) strand; PAM type: NRG; PAM sequence: GGG
tgaggtggagaagggagtag

SEQ ID NO: 7444 - DNA, 20 bp, Artificial Sequence
  Description of Artificial Sequence: Synthetic oligonucleotide
  Target: APOC3; (-) strand; PAM type: NRG; PAM sequence: GGG
gtgaggtggagaagggagta

SEQ ID NO: 7445 - DNA, 20 bp, Artificial Sequence
  Description of Artificial Sequence: Synthetic oligonucleotide
  Target: APOC3; (-) strand; PAM type: NRG; PAM sequence: AGG
ggtgaggtggagaagggagt

SEQ ID NO: 7446 - DNA, 20 bp, Artificial Sequence
  Description of Artificial Sequence: Synthetic oligonucleotide
  Target: APOC3; (-) strand; PAM type: NRG; PAM sequence: TAG
gggtgaggtggagaagggag

SEQ ID NO: 7447 - DNA, 20 bp, Artificial Sequence
  Description of Artificial Sequence: Synthetic oligonucleotide
  Target: APOC3; (-) strand; PAM type: NRG; PAM sequence: GAG
tcagggtgaggtggagaagg

SEQ ID NO: 7448 - DNA, 20 bp, Artificial Sequence
  Description of Artificial Sequence: Synthetic oligonucleotide
  Target: APOC3; (-) strand; PAM type: NRG; PAM sequence: GGG
agtcagggtgaggtggagaa

SEQ ID NO: 7449 - DNA, 20 bp, Artificial Sequence
  Description of Artificial Sequence: Synthetic oligonucleotide
  Target: APOC3; (-) strand; PAM type: NRG; PAM sequence: AGG
cagtcagggtgaggtggaga

SEQ ID NO: 7450 - DNA, 20 bp, Artificial Sequence
  Description of Artificial Sequence: Synthetic oligonucleotide
  Target: APOC3; (-) strand; PAM type: NRG; PAM sequence: AAG
ccagtcagggtgaggtggag

SEQ ID NO: 7451 - DNA, 20 bp, Artificial Sequence
  Description of Artificial Sequence: Synthetic oligonucleotide
  Target: APOC3; (-) strand; PAM type: NRG; PAM sequence: GAG
atgccagtcagggtgaggtg

SEQ ID NO: 7452 - DNA, 20 bp, Artificial Sequence
  Description of Artificial Sequence: Synthetic oligonucleotide
  Target: APOC3; (-) strand; PAM type: NRG; PAM sequence: TGG
taatgccagtcagggtgagg

SEQ ID NO: 7453 - DNA, 20 bp, Artificial Sequence
  Description of Artificial Sequence: Synthetic oligonucleotide
  Target: APOC3; (-) strand; PAM type: NRG; PAM sequence: AGG
agctaatgccagtcagggtg

SEQ ID NO: 7454 - DNA, 20 bp, Artificial Sequence
  Description of Artificial Sequence: Synthetic oligonucleotide
  Target: APOC3; (-) strand; PAM type: NRG; PAM sequence: GAG
cagctaatgccagtcagggt

SEQ ID NO: 7455 - DNA, 20 bp, Artificial Sequence
  Description of Artificial Sequence: Synthetic oligonucleotide
  Target: APOC3; (-) strand; PAM type: NRG; PAM sequence: GGG
atgccagctaatgccagtca

SEQ ID NO: 7456 - DNA, 20 bp, Artificial Sequence
  Description of Artificial Sequence: Synthetic oligonucleotide
  Target: APOC3; (-) strand; PAM type: NRG; PAM sequence: AGG
tatgccagctaatgccagtc

SEQ ID NO: 7457 - DNA, 20 bp, Artificial Sequence
  Description of Artificial Sequence: Synthetic oligonucleotide
  Target: APOC3; (-) strand; PAM type: NRG; PAM sequence: CAG
ctatgccagctaatgccagt

SEQ ID NO: 7458 - DNA, 20 bp, Artificial Sequence
  Description of Artificial Sequence: Synthetic oligonucleotide
  Target: APOC3; (-) strand; PAM type: NRG; PAM sequence: CAG
tctgctatgccagctaatgc

SEQ ID NO: 7459 - DNA, 20 bp, Artificial Sequence
  Description of Artificial Sequence: Synthetic oligonucleotide
  Target: APOC3; (-) strand; PAM type: NRG; PAM sequence: CAG
tatgaacacctctgctatgc

SEQ ID NO: 7460 - DNA, 20 bp, Artificial Sequence
  Description of Artificial Sequence: Synthetic oligonucleotide
  Target: APOC3; (-) strand; PAM type: NRG; PAM sequence: AAG
caaagccggttctggggact

SEQ ID NO: 7461 - DNA, 20 bp, Artificial Sequence
  Description of Artificial Sequence: Synthetic oligonucleotide
  Target: APOC3; (-) strand; PAM type: NRG; PAM sequence: GGG
ctaccccaaagccggttctg

SEQ ID NO: 7462 - DNA, 20 bp, Artificial Sequence
  Description of Artificial Sequence: Synthetic oligonucleotide
  Target: APOC3; (-) strand; PAM type: NRG; PAM sequence: GGG
cctaccccaaagccggttct

SEQ ID NO: 7463 - DNA, 20 bp, Artificial Sequence
  Description of Artificial Sequence: Synthetic oligonucleotide
  Target: APOC3; (-) strand; PAM type: NRG; PAM sequence: TGG
acctaccccaaagccggttc

SEQ ID NO: 7464 - DNA, 20 bp, Artificial Sequence
  Description of Artificial Sequence: Synthetic oligonucleotide
  Target: APOC3; (-) strand; PAM type: NRG; PAM sequence: CGG
aataacacctaccccaaagc

SEQ ID NO: 7465 - DNA, 20 bp, Artificial Sequence
  Description of Artificial Sequence: Synthetic oligonucleotide
  Target: APOC3; (-) strand; PAM type: NRG; PAM sequence: AAG
agaaaataacacctacccca

SEQ ID NO: 7466 - DNA, 20 bp, Artificial Sequence
  Description of Artificial Sequence: Synthetic oligonucleotide
  Target: APOC3; (-) strand; PAM type: NRG; PAM sequence: GAG
aattttctcatctgcaaagt

SEQ ID NO: 7467 - DNA, 20 bp, Artificial Sequence
  Description of Artificial Sequence: Synthetic oligonucleotide
  Target: APOC3; (-) strand; PAM type: NRG; PAM sequence: AAG
cctcaattttctcatctgca

SEQ ID NO: 7468 - DNA, 20 bp, Artificial Sequence
  Description of Artificial Sequence: Synthetic oligonucleotide
  Target: APOC3; (-) strand; PAM type: NRG; PAM sequence: GAG
gcaggtcacctaatcgctct

SEQ ID NO: 7469 - DNA, 20 bp, Artificial Sequence
  Description of Artificial Sequence: Synthetic oligonucleotide
  Target: APOC3; (-) strand; PAM type: NRG; PAM sequence: AGG
ttagttgtgtgatctggggc

SEQ ID NO: 7470 - DNA, 20 bp, Artificial Sequence
  Description of Artificial Sequence: Synthetic oligonucleotide
  Target: APOC3; (-) strand; PAM type: NRG; PAM sequence: CAG
attagttgtgtgatctgggg

SEQ ID NO: 7471 - DNA, 20 bp, Artificial Sequence
  Description of Artificial Sequence: Synthetic oligonucleotide
  Target: APOC3; (-) strand; PAM type: NRG; PAM sequence: GGG
ttgattagttgtgtgatctg

SEQ ID NO: 7472 - DNA, 20 bp, Artificial Sequence
  Description of Artificial Sequence: Synthetic oligonucleotide
  Target: APOC3; (-) strand; PAM type: NRG; PAM sequence: GGG
attgattagttgtgtgatct

SEQ ID NO: 7473 - DNA, 20 bp, Artificial Sequence
  Description of Artificial Sequence: Synthetic oligonucleotide
  Target: APOC3; (-) strand; PAM type: NRG; PAM sequence: TGG
gattgattagttgtgtgatc

SEQ ID NO: 7474 - DNA, 20 bp, Artificial Sequence
  Description of Artificial Sequence: Synthetic oligonucleotide
  Target: APOC3; (-) strand; PAM type: NRG; PAM sequence: TAG
aaagtcattggaggattgat

SEQ ID NO: 7475 - DNA, 20 bp, Artificial Sequence
  Description of Artificial Sequence: Synthetic oligonucleotide
  Target: APOC3; (-) strand; PAM type: NRG; PAM sequence: AGG
ctcatttggaaagtcattgg

SEQ ID NO: 7476 - DNA, 20 bp, Artificial Sequence
  Description of Artificial Sequence: Synthetic oligonucleotide
  Target: APOC3; (-) strand; PAM type: NRG; PAM sequence: GAG
tctcatttggaaagtcattg

SEQ ID NO: 7477 - DNA, 20 bp, Artificial Sequence
  Description of Artificial Sequence: Synthetic oligonucleotide
  Target: APOC3; (-) strand; PAM type: NRG; PAM sequence: TGG
cctctcatttggaaagtcat

SEQ ID NO: 7478 - DNA, 20 bp, Artificial Sequence
  Description of Artificial Sequence: Synthetic oligonucleotide
  Target: APOC3; (-) strand; PAM type: NRG; PAM sequence: AAG
gaggcagcctctcatttgga

SEQ ID NO: 7479 - DNA, 20 bp, Artificial Sequence
  Description of Artificial Sequence: Synthetic oligonucleotide
  Target: APOC3; (-) strand; PAM type: NRG; PAM sequence: TGG
gagggaggcagcctctcatt

SEQ ID NO: 7480 - DNA, 20 bp, Artificial Sequence
  Description of Artificial Sequence: Synthetic oligonucleotide
  Target: APOC3; (-) strand; PAM type: NRG; PAM sequence: CAG
cagggtaggacagagggagg

SEQ ID NO: 7481 - DNA, 20 bp, Artificial Sequence
  Description of Artificial Sequence: Synthetic oligonucleotide
  Target: APOC3; (-) strand; PAM type: NRG; PAM sequence: AGG
gagcagggtaggacagaggg

SEQ ID NO: 7482 - DNA, 20 bp, Artificial Sequence
  Description of Artificial Sequence: Synthetic oligonucleotide
  Target: APOC3; (-) strand; PAM type: NRG; PAM sequence: GAG
tgagcagggtaggacagagg

SEQ ID NO: 7483 - DNA, 20 bp, Artificial Sequence
  Description of Artificial Sequence: Synthetic oligonucleotide
  Target: APOC3; (-) strand; PAM type: NRG; PAM sequence: GGG
tctgagcagggtaggacaga

SEQ ID NO: 7484 - DNA, 20 bp, Artificial Sequence
  Description of Artificial Sequence: Synthetic oligonucleotide
  Target: APOC3; (-) strand; PAM type: NRG; PAM sequence: AGG
ctctgagcagggtaggacag

SEQ ID NO: 7485 - DNA, 20 bp, Artificial Sequence
  Description of Artificial Sequence: Synthetic oligonucleotide
  Target: APOC3; (-) strand; PAM type: NRG; PAM sequence: GAG
gctctgagcagggtaggaca

SEQ ID NO: 7486 - DNA, 20 bp, Artificial Sequence
  Description of Artificial Sequence: Synthetic oligonucleotide
  Target: APOC3; (-) strand; PAM type: NRG; PAM sequence: CAG
tggctctgagcagggtagga

SEQ ID NO: 7487 - DNA, 20 bp, Artificial Sequence
  Description of Artificial Sequence: Synthetic oligonucleotide
  Target: APOC3; (-) strand; PAM type: NRG; PAM sequence: AGG
ctggtggctctgagcagggt

SEQ ID NO: 7488 - DNA, 20 bp, Artificial Sequence
  Description of Artificial Sequence: Synthetic oligonucleotide
  Target: APOC3; (-) strand; PAM type: NRG; PAM sequence: TAG
cctggtggctctgagcaggg

SEQ ID NO: 7489 - DNA, 20 bp, Artificial Sequence
  Description of Artificial Sequence: Synthetic oligonucleotide
  Target: APOC3; (-) strand; PAM type: NRG; PAM sequence: GGG
caacctggtggctctgagca

SEQ ID NO: 7490 - DNA, 20 bp, Artificial Sequence
  Description of Artificial Sequence: Synthetic oligonucleotide
  Target: APOC3; (-) strand; PAM type: NRG; PAM sequence: AGG
acaacctggtggctctgagc

SEQ ID NO: 7491 - DNA, 20 bp, Artificial Sequence
  Description of Artificial Sequence: Synthetic oligonucleotide
  Target: APOC3; (-) strand; PAM type: NRG; PAM sequence: CAG
cacaacctggtggctctgag

SEQ ID NO: 7492 - DNA, 20 bp, Artificial Sequence
  Description of Artificial Sequence: Synthetic oligonucleotide
  Target: APOC3; (-) strand; PAM type: NRG; PAM sequence: GAG
ttgcacaacctggtggctct

SEQ ID NO: 7493 - DNA, 20 bp, Artificial Sequence
  Description of Artificial Sequence: Synthetic oligonucleotide
  Target: APOC3; (-) strand; PAM type: NRG; PAM sequence: TGG
cctggagttgcacaacctgg

SEQ ID NO: 7494 - DNA, 20 bp, Artificial Sequence
  Description of Artificial Sequence: Synthetic oligonucleotide
  Target: APOC3; (-) strand; PAM type: NRG; PAM sequence: TGG
ccgcctggagttgcacaacc

SEQ ID NO: 7495 - DNA, 20 bp, Artificial Sequence
  Description of Artificial Sequence: Synthetic oligonucleotide
  Target: APOC3; (-) strand; PAM type: NRG; PAM sequence: GAG
tgtgcaaacagcaccgcctg

SEQ ID NO: 7496 - DNA, 20 bp, Artificial Sequence
  Description of Artificial Sequence: Synthetic oligonucleotide
  Target: APOC3; (-) strand; PAM type: NRG; PAM sequence: TGG
tctgtgcaaacagcaccgcc

SEQ ID NO: 7497 - DNA, 20 bp, Artificial Sequence
  Description of Artificial Sequence: Synthetic oligonucleotide
  Target: APOC3; (-) strand; PAM type: NRG; PAM sequence: CAG
gtcattgttttctgtgcaaa

SEQ ID NO: 7498 - DNA, 20 bp, Artificial Sequence
  Description of Artificial Sequence: Synthetic oligonucleotide
  Target: APOC3; (-) strand; PAM type: NRG; PAM sequence: AGG
tggggagatgtgaaaggtca

SEQ ID NO: 7499 - DNA, 20 bp, Artificial Sequence
  Description of Artificial Sequence: Synthetic oligonucleotide
  Target: APOC3; (-) strand; PAM type: NRG; PAM sequence: AAG
gtggggagatgtgaaaggtc

SEQ ID NO: 7500 - DNA, 20 bp, Artificial Sequence
  Description of Artificial Sequence: Synthetic oligonucleotide
  Target: APOC3; (-) strand; PAM type: NRG; PAM sequence: AGG
acagggtggggagatgtgaa

SEQ ID NO: 7501 - DNA, 20 bp, Artificial Sequence
  Description of Artificial Sequence: Synthetic oligonucleotide
  Target: APOC3; (-) strand; PAM type: NRG; PAM sequence: AAG
gacagggtggggagatgtga

SEQ ID NO: 7502 - DNA, 20 bp, Artificial Sequence
  Description of Artificial Sequence: Synthetic oligonucleotide
  Target: APOC3; (-) strand; PAM type: NRG; PAM sequence: GAG
gcacaaagtgacagggtggg

SEQ ID NO: 7503 - DNA, 20 bp, Artificial Sequence
  Description of Artificial Sequence: Synthetic oligonucleotide
  Target: APOC3; (-) strand; PAM type: NRG; PAM sequence: GGG
aggcacaaagtgacagggtg

SEQ ID NO: 7504 - DNA, 20 bp, Artificial Sequence
  Description of Artificial Sequence: Synthetic oligonucleotide
  Target: APOC3; (-) strand; PAM type: NRG; PAM sequence: GGG
gaggcacaaagtgacagggt

SEQ ID NO: 7505 - DNA, 20 bp, Artificial Sequence
  Description of Artificial Sequence: Synthetic oligonucleotide
  Target: APOC3; (-) strand; PAM type: NRG; PAM sequence: TGG
tgaggcacaaagtgacaggg

SEQ ID NO: 7506 - DNA, 20 bp, Artificial Sequence
  Description of Artificial Sequence: Synthetic oligonucleotide
  Target: APOC3; (-) strand; PAM type: NRG; PAM sequence: GGG
gcctgaggcacaaagtgaca

SEQ ID NO: 7507 - DNA, 20 bp, Artificial Sequence
  Description of Artificial Sequence: Synthetic oligonucleotide
  Target: APOC3; (-) strand; PAM type: NRG; PAM sequence: AGG
ggcctgaggcacaaagtgac

SEQ ID NO: 7508 - DNA, 20 bp, Artificial Sequence
  Description of Artificial Sequence: Synthetic oligonucleotide
  Target: APOC3; (-) strand; PAM type: NRG; PAM sequence: CAG
gggcctgaggcacaaagtga

SEQ ID NO: 7509 - DNA, 20 bp, Artificial Sequence
  Description of Artificial Sequence: Synthetic oligonucleotide
  Target: APOC3; (-) strand; PAM type: NRG; PAM sequence: AAG
gcccctgggcctgaggcaca

SEQ ID NO: 7510 - DNA, 20 bp, Artificial Sequence
  Description of Artificial Sequence: Synthetic oligonucleotide
  Target: APOC3; (-) strand; PAM type: NRG; PAM sequence: AGG
tgtttatgcccctgggcctg

SEQ ID NO: 7511 - DNA, 20 bp, Artificial Sequence
  Description of Artificial Sequence: Synthetic oligonucleotide
  Target: APOC3; (-) strand; PAM type: NRG; PAM sequence: GAG
atgtttatgcccctgggcct

SEQ ID NO: 7512 - DNA, 20 bp, Artificial Sequence
  Description of Artificial Sequence: Synthetic oligonucleotide
  Target: APOC3; (-) strand; PAM type: NRG; PAM sequence: GGG
cctcagatgtttatgcccct

SEQ ID NO: 7513 - DNA, 20 bp, Artificial Sequence
  Description of Artificial Sequence: Synthetic oligonucleotide
  Target: APOC3; (-) strand; PAM type: NRG; PAM sequence: TGG
acctcagatgtttatgcccc

SEQ ID NO: 7514 - DNA, 20 bp, Artificial Sequence
  Description of Artificial Sequence: Synthetic oligonucleotide
  Target: APOC3; (-) strand; PAM type: NRG; PAM sequence: CAG
ctgccatctccaggtcacct

SEQ ID NO: 7515 - DNA, 20 bp, Artificial Sequence
  Description of Artificial Sequence: Synthetic oligonucleotide
  Target: APOC3; (-) strand; PAM type: NRG; PAM sequence: AGG
agtcaaaccctgccatctcc

SEQ ID NO: 7516 - DNA, 20 bp, Artificial Sequence
  Description of Artificial Sequence: Synthetic oligonucleotide
  Target: APOC3; (-) strand; PAM type: NRG; PAM sequence: CAG
aagtcaaaccctgccatctc

SEQ ID NO: 7517 - DNA, 20 bp, Artificial Sequence
  Description of Artificial Sequence: Synthetic oligonucleotide
  Target: APOC3; (-) strand; PAM type: NRG; PAM sequence: AAG
ccttgcaggaaccccagcac

SEQ ID NO: 7518 - DNA, 20 bp, Artificial Sequence
  Description of Artificial Sequence: Synthetic oligonucleotide
  Target: APOC3; (-) strand; PAM type: NRG; PAM sequence: CAG
agatatccttgcaggaaccc

SEQ ID NO: 7519 - DNA, 20 bp, Artificial Sequence
  Description of Artificial Sequence: Synthetic oligonucleotide
  Target: APOC3; (-) strand; PAM type: NRG; PAM sequence: AGG
gggagaagagatatccttgc

SEQ ID NO: 7520 - DNA, 20 bp, Artificial Sequence
  Description of Artificial Sequence: Synthetic oligonucleotide
  Target: APOC3; (-) strand; PAM type: NRG; PAM sequence: CAG
tgggagaagagatatccttg

SEQ ID NO: 7521 - DNA, 20 bp, Artificial Sequence
  Description of Artificial Sequence: Synthetic oligonucleotide
  Target: APOC3; (-) strand; PAM type: NRG; PAM sequence: GAG
cagctgccaccctgggagaa

SEQ ID NO: 7522 - DNA, 20 bp, Artificial Sequence
  Description of Artificial Sequence: Synthetic oligonucleotide
  Target: APOC3; (-) strand; PAM type: NRG; PAM sequence: AAG
cacagctgccaccctgggag

SEQ ID NO: 7523 - DNA, 20 bp, Artificial Sequence
  Description of Artificial Sequence: Synthetic oligonucleotide
  Target: APOC3; (-) strand; PAM type: NRG; PAM sequence: GAG
ccccacagctgccaccctgg

SEQ ID NO: 7524 - DNA, 20 bp, Artificial Sequence
  Description of Artificial Sequence: Synthetic oligonucleotide
  Target: APOC3; (-) strand; PAM type: NRG; PAM sequence: GGG
tcccccacagctgccaccct

SEQ ID NO: 7525 - DNA, 20 bp, Artificial Sequence
  Description of Artificial Sequence: Synthetic oligonucleotide
  Target: APOC3; (-) strand; PAM type: NRG; PAM sequence: TGG
atcccccacagctgccaccc

SEQ ID NO: 7526 - DNA, 20 bp, Artificial Sequence
  Description of Artificial Sequence: Synthetic oligonucleotide
  Target: APOC3; (-) strand; PAM type: NRG; PAM sequence: CAG
cctcaggcaggaatccccca

SEQ ID NO: 7527 - DNA, 20 bp, Artificial Sequence
  Description of Artificial Sequence: Synthetic oligonucleotide
  Target: APOC3; (-) strand; PAM type: NRG; PAM sequence: AGG
acagccctgagacctcaggc

SEQ ID NO: 7528 - DNA, 20 bp, Artificial Sequence
  Description of Artificial Sequence: Synthetic oligonucleotide
  Target: APOC3; (-) strand; PAM type: NRG; PAM sequence: CAG
gacagccctgagacctcagg

SEQ ID NO: 7529 - DNA, 20 bp, Artificial Sequence
  Description of Artificial Sequence: Synthetic oligonucleotide
  Target: APOC3; (-) strand; PAM type: NRG; PAM sequence: AGG
gacgacagccctgagacctc

SEQ ID NO: 7530 - DNA, 20 bp, Artificial Sequence
  Description of Artificial Sequence: Synthetic oligonucleotide
  Target: APOC3; (-) strand; PAM type: NRG; PAM sequence: CAG
ggacgacagccctgagacct

SEQ ID NO: 7531 - DNA, 20 bp, Artificial Sequence
  Description of Artificial Sequence: Synthetic oligonucleotide
  Target: APOC3; (-) strand; PAM type: NRG; PAM sequence: GAG
cttcactggacgacagccct

SEQ ID NO: 7532 - DNA, 20 bp, Artificial Sequence
  Description of Artificial Sequence: Synthetic oligonucleotide
  Target: APOC3; (-) strand; PAM type: NRG; PAM sequence: CAG
ctctcaacttcactggacga

SEQ ID NO: 7533 - DNA, 20 bp, Artificial Sequence
  Description of Artificial Sequence: Synthetic oligonucleotide
  Target: APOC3; (-) strand; PAM type: NRG; PAM sequence: TGG
caccaccctctcaacttcac

SEQ ID NO: 7534 - DNA, 20 bp, Artificial Sequence
  Description of Artificial Sequence: Synthetic oligonucleotide
  Target: APOC3; (-) strand; PAM type: NRG; PAM sequence: AGG
cccactggacgacaccagtc

SEQ ID NO: 7535 - DNA, 20 bp, Artificial Sequence
  Description of Artificial Sequence: Synthetic oligonucleotide
  Target: APOC3; (-) strand; PAM type: NRG; PAM sequence: CAG
ccccactggacgacaccagt

SEQ ID NO: 7536 - DNA, 20 bp, Artificial Sequence
  Description of Artificial Sequence: Synthetic oligonucleotide
  Target: APOC3; (-) strand; PAM type: NRG; PAM sequence: CAG
atgtccccactggacgacac

SEQ ID NO: 7537 - DNA, 20 bp, Artificial Sequence
  Description of Artificial Sequence: Synthetic oligonucleotide
  Target: APOC3; (-) strand; PAM type: NRG; PAM sequence: TGG
acccacacccatgtccccac

SEQ ID NO: 7538 - DNA, 20 bp, Artificial Sequence
  Description of Artificial Sequence: Synthetic oligonucleotide
  Target: APOC3; (-) strand; PAM type: NRG; PAM sequence: GGG
actcctctgtaggcaaccat

SEQ ID NO: 7539 - DNA, 20 bp, Artificial Sequence
  Description of Artificial Sequence: Synthetic oligonucleotide
  Target: APOC3; (-) strand; PAM type: NRG; PAM sequence: TGG
aactcctctgtaggcaacca

SEQ ID NO: 7540 - DNA, 20 bp, Artificial Sequence
  Description of Artificial Sequence: Synthetic oligonucleotide
  Target: APOC3; (-) strand; PAM type: NRG; PAM sequence: AGG
gggcatgagaactcctctgt

SEQ ID NO: 7541 - DNA, 20 bp, Artificial Sequence
  Description of Artificial Sequence: Synthetic oligonucleotide
  Target: APOC3; (-) strand; PAM type: NRG; PAM sequence: TAG
agggcatgagaactcctctg

SEQ ID NO: 7542 - DNA, 20 bp, Artificial Sequence
  Description of Artificial Sequence: Synthetic oligonucleotide
  Target: APOC3; (-) strand; PAM type: NRG; PAM sequence: GAG
gaagcaacagagcagggcat

SEQ ID NO: 7543 - DNA, 20 bp, Artificial Sequence
  Description of Artificial Sequence: Synthetic oligonucleotide
  Target: APOC3; (-) strand; PAM type: NRG; PAM sequence: GGG
tcaggggaagcaacagagca

SEQ ID NO: 7544 - DNA, 20 bp, Artificial Sequence
  Description of Artificial Sequence: Synthetic oligonucleotide
  Target: APOC3; (-) strand; PAM type: NRG; PAM sequence: AGG
gtcaggggaagcaacagagc

SEQ ID NO: 7545 - DNA, 20 bp, Artificial Sequence
  Description of Artificial Sequence: Synthetic oligonucleotide
  Target: APOC3; (-) strand; PAM type: NRG; PAM sequence: CAG
agtcaggggaagcaacagag

SEQ ID NO: 7546 - DNA, 20 bp, Artificial Sequence
  Description of Artificial Sequence: Synthetic oligonucleotide
  Target: APOC3; (-) strand; PAM type: NRG; PAM sequence: GAG
atcagtcaggggaagcaaca

SEQ ID NO: 7547 - DNA, 20 bp, Artificial Sequence
  Description of Artificial Sequence: Synthetic oligonucleotide
  Target: APOC3; (-) strand; PAM type: NRG; PAM sequence: CAG
aaatcagtcaggggaagcaa

SEQ ID NO: 7548 - DNA, 20 bp, Artificial Sequence
  Description of Artificial Sequence: Synthetic oligonucleotide
  Target: APOC3; (-) strand; PAM type: NRG; PAM sequence: AAG
gcccctaaatcagtcagggg

SEQ ID NO: 7549 - DNA, 20 bp, Artificial Sequence
  Description of Artificial Sequence: Synthetic oligonucleotide
  Target: APOC3; (-) strand; PAM type: NRG; PAM sequence: GGG
ccagcccctaaatcagtcag

SEQ ID NO: 7550 - DNA, 20 bp, Artificial Sequence
  Description of Artificial Sequence: Synthetic oligonucleotide
  Target: APOC3; (-) strand; PAM type: NRG; PAM sequence: GGG
cccagcccctaaatcagtca

SEQ ID NO: 7551 - DNA, 20 bp, Artificial Sequence
  Description of Artificial Sequence: Synthetic oligonucleotide
  Target: APOC3; (-) strand; PAM type: NRG; PAM sequence: AGG
acccagcccctaaatcagtc

SEQ ID NO: 7552 - DNA, 20 bp, Artificial Sequence
  Description of Artificial Sequence: Synthetic oligonucleotide
  Target: APOC3; (-) strand; PAM type: NRG; PAM sequence: CAG
cacccagcccctaaatcagt

SEQ ID NO: 7553 - DNA, 20 bp, Artificial Sequence
  Description of Artificial Sequence: Synthetic oligonucleotide
  Target: APOC3; (-) strand; PAM type: NRG; PAM sequence: CAG
cggtcacccagcccctaaat

SEQ ID NO: 7554 - DNA, 20 bp, Artificial Sequence
  Description of Artificial Sequence: Synthetic oligonucleotide
  Target: APOC3; (-) strand; PAM type: NRG; PAM sequence: CAG
aactgaagccatcggtcacc

SEQ ID NO: 7555 - DNA, 20 bp, Artificial Sequence
  Description of Artificial Sequence: Synthetic oligonucleotide
  Target: APOC3; (-) strand; PAM type: NRG; PAM sequence: CGG
tttcagggaactgaagccat

SEQ ID NO: 7556 - DNA, 20 bp, Artificial Sequence
  Description of Artificial Sequence: Synthetic oligonucleotide
  Target: APOC3; (-) strand; PAM type: NRG; PAM sequence: AAG
agtagtctttcagggaactg

SEQ ID NO: 7557 - DNA, 20 bp, Artificial Sequence
  Description of Artificial Sequence: Synthetic oligonucleotide
  Target: APOC3; (-) strand; PAM type: NRG; PAM sequence: GGG
ggtgctccagtagtctttca

SEQ ID NO: 7558 - DNA, 20 bp, Artificial Sequence
  Description of Artificial Sequence: Synthetic oligonucleotide
  Target: APOC3; (-) strand; PAM type: NRG; PAM sequence: AGG
cggtgctccagtagtctttc

SEQ ID NO: 7559 - DNA, 20 bp, Artificial Sequence
  Description of Artificial Sequence: Synthetic oligonucleotide
  Target: APOC3; (-) strand; PAM type: NRG; PAM sequence: CAG
acggtgctccagtagtcttt

SEQ ID NO: 7560 - DNA, 20 bp, Artificial Sequence
  Description of Artificial Sequence: Synthetic oligonucleotide
  Target: APOC3; (-) strand; PAM type: NRG; PAM sequence: TAG
tgtccttaacggtgctccag

SEQ ID NO: 7561 - DNA, 20 bp, Artificial Sequence
  Description of Artificial Sequence: Synthetic oligonucleotide
  Target: APOC3; (-) strand; PAM type: NRG; PAM sequence: CAG
acttgtccttaacggtgctc

SEQ ID NO: 7562 - DNA, 20 bp, Artificial Sequence
  Description of Artificial Sequence: Synthetic oligonucleotide
  Target: APOC3; (-) strand; PAM type: NRG; PAM sequence: CGG
ctcagagaacttgtccttaa

SEQ ID NO: 7563 - DNA, 20 bp, Artificial Sequence
  Description of Artificial Sequence: Synthetic oligonucleotide
  Target: APOC3; (-) strand; PAM type: NRG; PAM sequence: GAG
ggtccaaatcccagaactca

SEQ ID NO: 7564 - DNA, 20 bp, Artificial Sequence
  Description of Artificial Sequence: Synthetic oligonucleotide
  Target: APOC3; (-) strand; PAM type: NRG; PAM sequence: CAG
agggtccaaatcccagaact

SEQ ID NO: 7565 - DNA, 20 bp, Artificial Sequence
  Description of Artificial Sequence: Synthetic oligonucleotide
  Target: APOC3; (-) strand; PAM type: NRG; PAM sequence: CAG
tgacctcagggtccaaatcc

SEQ ID NO: 7566 - DNA, 20 bp, Artificial Sequence
  Description of Artificial Sequence: Synthetic oligonucleotide
  Target: APOC3; (-) strand; PAM type: NRG; PAM sequence: GGG
ctgaagttggtctgacctca

SEQ ID NO: 7567 - DNA, 20 bp, Artificial Sequence
  Description of Artificial Sequence: Synthetic oligonucleotide
  Target: APOC3; (-) strand; PAM type: NRG; PAM sequence: AGG
gctgaagttggtctgacctc

SEQ ID NO: 7568 - DNA, 20 bp, Artificial Sequence
  Description of Artificial Sequence: Synthetic oligonucleotide
  Target: APOC3; (-) strand; PAM type: NRG; PAM sequence: CAG
ggctgaagttggtctgacct

SEQ ID NO: 7569 - DNA, 20 bp, Artificial Sequence
  Description of Artificial Sequence: Synthetic oligonucleotide
  Target: APOC3; (-) strand; PAM type: NRG; PAM sequence: TGG
caggcagccacggctgaagt

SEQ ID NO: 7570 - DNA, 20 bp, Artificial Sequence
  Description of Artificial Sequence: Synthetic oligonucleotide
  Target: APOC3; (-) strand; PAM type: NRG; PAM sequence: AAG
gtctcaggcagccacggctg

SEQ ID NO: 7571 - DNA, 20 bp, Artificial Sequence
  Description of Artificial Sequence: Synthetic oligonucleotide
  Target: APOC3; (-) strand; PAM type: NRG; PAM sequence: CGG
attgaggtctcaggcagcca

SEQ ID NO: 7572 - DNA, 20 bp, Artificial Sequence
  Description of Artificial Sequence: Synthetic oligonucleotide
  Target: APOC3; (-) strand; PAM type: NRG; PAM sequence: CAG
tggggtattgaggtctcagg

SEQ ID NO: 7573 - DNA, 20 bp, Artificial Sequence
  Description of Artificial Sequence: Synthetic oligonucleotide
  Target: APOC3; (-) strand; PAM type: NRG; PAM sequence: AGG
acttggggtattgaggtctc

SEQ ID NO: 7574 - DNA, 20 bp, Artificial Sequence
  Description of Artificial Sequence: Synthetic oligonucleotide
  Target: APOC3; (-) strand; PAM type: NRG; PAM sequence: CAG
gacttggggtattgaggtct

SEQ ID NO: 7575 - DNA, 20 bp, Artificial Sequence
  Description of Artificial Sequence: Synthetic oligonucleotide
  Target: APOC3; (-) strand; PAM type: NRG; PAM sequence: AGG
caggtggacttggggtattg

SEQ ID NO: 7576 - DNA, 20 bp, Artificial Sequence
  Description of Artificial Sequence: Synthetic oligonucleotide
  Target: APOC3; (-) strand; PAM type: NRG; PAM sequence: GAG
gcaggtggacttggggtatt

SEQ ID NO: 7577 - DNA, 20 bp, Artificial Sequence
  Description of Artificial Sequence: Synthetic oligonucleotide
  Target: APOC3; (-) strand; PAM type: NRG; PAM sequence: GGG
tggataggcaggtggacttg

SEQ ID NO: 7578 - DNA, 20 bp, Artificial Sequence
  Description of Artificial Sequence: Synthetic oligonucleotide
  Target: APOC3; (-) strand; PAM type: NRG; PAM sequence: GGG
atggataggcaggtggactt

SEQ ID NO: 7579 - DNA, 20 bp, Artificial Sequence
  Description of Artificial Sequence: Synthetic oligonucleotide
  Target: APOC3; (-) strand; PAM type: NRG; PAM sequence: TGG
gatggataggcaggtggact

SEQ ID NO: 7580 - DNA, 20 bp, Artificial Sequence
  Description of Artificial Sequence: Synthetic oligonucleotide
  Target: APOC3; (-) strand; PAM type: NRG; PAM sequence: TGG
tcgcaggatggataggcagg

SEQ ID NO: 7581 - DNA, 20 bp, Artificial Sequence
  Description of Artificial Sequence: Synthetic oligonucleotide
  Target: APOC3; (-) strand; PAM type: NRG; PAM sequence: AGG
agctcgcaggatggataggc

SEQ ID NO: 7582 - DNA, 20 bp, Artificial Sequence
  Description of Artificial Sequence: Synthetic oligonucleotide
  Target: APOC3; (-) strand; PAM type: NRG; PAM sequence: CAG
gagctcgcaggatggatagg

SEQ ID NO: 7583 - DNA, 20 bp, Artificial Sequence
  Description of Artificial Sequence: Synthetic oligonucleotide
  Target: APOC3; (-) strand; PAM type: NRG; PAM sequence: AGG
aaggagctcgcaggatggat

SEQ ID NO: 7584 - DNA, 20 bp, Artificial Sequence
  Description of Artificial Sequence: Synthetic oligonucleotide
  Target: APOC3; (-) strand; PAM type: NRG; PAM sequence: TAG
caaggagctcgcaggatgga

SEQ ID NO: 7585 - DNA, 20 bp, Artificial Sequence
  Description of Artificial Sequence: Synthetic oligonucleotide
  Target: APOC3; (-) strand; PAM type: NRG; PAM sequence: TGG
gacccaaggagctcgcagga

SEQ ID NO: 7586 - DNA, 20 bp, Artificial Sequence
  Description of Artificial Sequence: Synthetic oligonucleotide
  Target: APOC3; (-) strand; PAM type: NRG; PAM sequence: AGG
gcaggacccaaggagctcgc

SEQ ID NO: 7587 - DNA, 20 bp, Artificial Sequence
  Description of Artificial Sequence: Synthetic oligonucleotide
  Target: APOC3; (-) strand; PAM type: NRG; PAM sequence: CAG
tgcaggacccaaggagctcg

SEQ ID NO: 7588 - DNA, 20 bp, Artificial Sequence
  Description of Artificial Sequence: Synthetic oligonucleotide
  Target: APOC3; (-) strand; PAM type: NRG; PAM sequence: GAG
tggagattgcaggacccaag

SEQ ID NO: 7589 - DNA, 20 bp, Artificial Sequence
  Description of Artificial Sequence: Synthetic oligonucleotide
  Target: APOC3; (-) strand; PAM type: NRG; PAM sequence: AGG
cctggagattgcaggaccca

SEQ ID NO: 7590 - DNA, 20 bp, Artificial Sequence
  Description of Artificial Sequence: Synthetic oligonucleotide
  Target: APOC3; (-) strand; PAM type: NRG; PAM sequence: AAG
ccctggagattgcaggaccc

SEQ ID NO: 7591 - DNA, 20 bp, Artificial Sequence
  Description of Artificial Sequence: Synthetic oligonucleotide
  Target: APOC3; (-) strand; PAM type: NRG; PAM sequence: AGG
ggggcagccctggagattgc

SEQ ID NO: 7592 - DNA, 20 bp, Artificial Sequence
  Description of Artificial Sequence: Synthetic oligonucleotide
  Target: APOC3; (-) strand; PAM type: NRG; PAM sequence: CAG
aggggcagccctggagattg

SEQ ID NO: 7593 - DNA, 20 bp, Artificial Sequence
  Description of Artificial Sequence: Synthetic oligonucleotide
  Target: APOC3; (-) strand; PAM type: NRG; PAM sequence: GAG
aacctacaggggcagccctg

SEQ ID NO: 7594 - DNA, 20 bp, Artificial Sequence
  Description of Artificial Sequence: Synthetic oligonucleotide
  Target: APOC3; (-) strand; PAM type: NRG; PAM sequence: TGG
gcaacctacaggggcagccc

SEQ ID NO: 7595 - DNA, 20 bp, Artificial Sequence
  Description of Artificial Sequence: Synthetic oligonucleotide
  Target: APOC3; (-) strand; PAM type: NRG; PAM sequence: CAG
ttttaagcaacctacagggg

SEQ ID NO: 7596 - DNA, 20 bp, Artificial Sequence
  Description of Artificial Sequence: Synthetic oligonucleotide
  Target: APOC3; (-) strand; PAM type: NRG; PAM sequence: GGG
cccttttaagcaacctacag

SEQ ID NO: 7597 - DNA, 20 bp, Artificial Sequence
  Description of Artificial Sequence: Synthetic oligonucleotide
  Target: APOC3; (-) strand; PAM type: NRG; PAM sequence: GGG
tcccttttaagcaacctaca

SEQ ID NO: 7598 - DNA, 20 bp, Artificial Sequence
  Description of Artificial Sequence: Synthetic oligonucleotide
  Target: APOC3; (-) strand; PAM type: NRG; PAM sequence: AGG
gtcccttttaagcaacctac

SEQ ID NO: 7599 - DNA, 20 bp, Artificial Sequence
  Description of Artificial Sequence: Synthetic oligonucleotide
  Target: APOC3; (-) strand; PAM type: NRG; PAM sequence: CAG
tgtcccttttaagcaaccta

SEQ ID NO: 7600 - DNA, 20 bp, Artificial Sequence
  Description of Artificial Sequence: Synthetic oligonucleotide
  Target: APOC3; (-) strand; PAM type: NRG; PAM sequence: AAG
ctgagaatactgtccctttt

SEQ ID NO: 7601 - DNA, 20 bp, Artificial Sequence
  Description of Artificial Sequence: Synthetic oligonucleotide
  Target: APOC3; (-) strand; PAM type: NRG; PAM sequence: GAG
aggtggggtaggagagcact

SEQ ID NO: 7602 - DNA, 20 bp, Artificial Sequence
  Description of Artificial Sequence: Synthetic oligonucleotide
  Target: APOC3; (-) strand; PAM type: NRG; PAM sequence: GAG
aggcatgaggtggggtagga

SEQ ID NO: 7603 - DNA, 20 bp, Artificial Sequence
  Description of Artificial Sequence: Synthetic oligonucleotide
  Target: APOC3; (-) strand; PAM type: NRG; PAM sequence: GAG
ccaggcatgaggtggggtag

SEQ ID NO: 7604 - DNA, 20 bp, Artificial Sequence
  Description of Artificial Sequence: Synthetic oligonucleotide
  Target: APOC3; (-) strand; PAM type: NRG; PAM sequence: AGG
ggccaggcatgaggtggggt

SEQ ID NO: 7605 - DNA, 20 bp, Artificial Sequence
  Description of Artificial Sequence: Synthetic oligonucleotide
  Target: APOC3; (-) strand; PAM type: NRG; PAM sequence: TAG
gggccaggcatgaggtgggg

SEQ ID NO: 7606 - DNA, 20 bp, Artificial Sequence
  Description of Artificial Sequence: Synthetic oligonucleotide
  Target: APOC3; (-) strand; PAM type: NRG; PAM sequence: GGG
ggggggccaggcatgaggtg

SEQ ID NO: 7607 - DNA, 20 bp, Artificial Sequence
  Description of Artificial Sequence: Synthetic oligonucleotide
  Target: APOC3; (-) strand; PAM type: NRG; PAM sequence: GGG
aggggggccaggcatgaggt

SEQ ID NO: 7608 - DNA, 20 bp, Artificial Sequence
  Description of Artificial Sequence: Synthetic oligonucleotide
  Target: APOC3; (-) strand; PAM type: NRG; PAM sequence: TGG
gaggggggccaggcatgagg

SEQ ID NO: 7609 - DNA, 20 bp, Artificial Sequence
  Description of Artificial Sequence: Synthetic oligonucleotide
  Target: APOC3; (-) strand; PAM type: NRG; PAM sequence: AGG
ctggaggggggccaggcatg

SEQ ID NO: 7610 - DNA, 20 bp, Artificial Sequence
  Description of Artificial Sequence: Synthetic oligonucleotide
  Target: APOC3; (-) strand; PAM type: NRG; PAM sequence: GAG
cctggaggggggccaggcat

SEQ ID NO: 7611 - DNA, 20 bp, Artificial Sequence
  Description of Artificial Sequence: Synthetic oligonucleotide
  Target: APOC3; (-) strand; PAM type: NRG; PAM sequence: AGG
agcatgcctggaggggggcc

SEQ ID NO: 7612 - DNA, 20 bp, Artificial Sequence
  Description of Artificial Sequence: Synthetic oligonucleotide
  Target: APOC3; (-) strand; PAM type: NRG; PAM sequence: CAG
cagcatgcctggaggggggc

SEQ ID NO: 7613 - DNA, 20 bp, Artificial Sequence
  Description of Artificial Sequence: Synthetic oligonucleotide
  Target: APOC3; (-) strand; PAM type: NRG; PAM sequence: GGG
aggccagcatgcctggaggg

SEQ ID NO: 7614 - DNA, 20 bp, Artificial Sequence
  Description of Artificial Sequence: Synthetic oligonucleotide
  Target: APOC3; (-) strand; PAM type: NRG; PAM sequence: GGG
gaggccagcatgcctggagg

SEQ ID NO: 7615 - DNA, 20 bp, Artificial Sequence
  Description of Artificial Sequence: Synthetic oligonucleotide
  Target: APOC3; (-) strand; PAM type: NRG; PAM sequence: GGG
ggaggccagcatgcctggag

SEQ ID NO: 7616 - DNA, 20 bp, Artificial Sequence
  Description of Artificial Sequence: Synthetic oligonucleotide
  Target: APOC3; (-) strand; PAM type: NRG; PAM sequence: GGG
gggaggccagcatgcctgga

SEQ ID NO: 7617 - DNA, 20 bp, Artificial Sequence
  Description of Artificial Sequence: Synthetic oligonucleotide
  Target: APOC3; (-) strand; PAM type: NRG; PAM sequence: AGG
tgggaggccagcatgcctgg

SEQ ID NO: 7618 - DNA, 20 bp, Artificial Sequence
  Description of Artificial Sequence: Synthetic oligonucleotide
  Target: APOC3; (-) strand; PAM type: NRG; PAM sequence: GAG
ttgggaggccagcatgcctg

SEQ ID NO: 7619 - DNA, 20 bp, Artificial Sequence
  Description of Artificial Sequence: Synthetic oligonucleotide
  Target: APOC3; (-) strand; PAM type: NRG; PAM sequence: TGG
tattgggaggccagcatgcc

SEQ ID NO: 7620 - DNA, 20 bp, Artificial Sequence
  Description of Artificial Sequence: Synthetic oligonucleotide
  Target: APOC3; (-) strand; PAM type: NRG; PAM sequence: CAG
gtccagctttattgggaggc

SEQ ID NO: 7621 - DNA, 20 bp, Artificial Sequence
  Description of Artificial Sequence: Synthetic oligonucleotide
  Target: APOC3; (-) strand; PAM type: NRG; PAM sequence: AGG
tcttgtccagctttattggg

SEQ ID NO: 7622 - DNA, 20 bp, Artificial Sequence
  Description of Artificial Sequence: Synthetic oligonucleotide
  Target: APOC3; (-) strand; PAM type: NRG; PAM sequence: GAG
ttcttgtccagctttattgg

SEQ ID NO: 7623 - DNA, 20 bp, Artificial Sequence
  Description of Artificial Sequence: Synthetic oligonucleotide
  Target: APOC3; (-) strand; PAM type: NRG; PAM sequence: GGG
gcttcttgtccagctttatt

SEQ ID NO: 7624 - DNA, 20 bp, Artificial Sequence
  Description of Artificial Sequence: Synthetic oligonucleotide
  Target: APOC3; (-) strand; PAM type: NRG; PAM sequence: TGG
agcttcttgtccagctttat

SEQ ID NO: 7625 - DNA, 20 bp, Artificial Sequence
  Description of Artificial Sequence: Synthetic oligonucleotide
  Target: APOC3; (-) strand; PAM type: NRG; PAM sequence: CAG
actcatagcagcttcttgtc

SEQ ID NO: 7626 - DNA, 20 bp, Artificial Sequence
  Description of Artificial Sequence: Synthetic oligonucleotide
  Target: APOC3; (-) strand; PAM type: NRG; PAM sequence: CAG
ttgcgacggcccactcatag

SEQ ID NO: 7627 - DNA, 20 bp, Artificial Sequence
  Description of Artificial Sequence: Synthetic oligonucleotide
  Target: APOC3; (-) strand; PAM type: NRG; PAM sequence: TAG
cacttgcgacggcccactca

SEQ ID NO: 7628 - DNA, 20 bp, Artificial Sequence
  Description of Artificial Sequence: Synthetic oligonucleotide
  Target: APOC3; (-) strand; PAM type: NRG; PAM sequence: CGG
cacagatggcacacttgcga

SEQ ID NO: 7629 - DNA, 20 bp, Artificial Sequence
  Description of Artificial Sequence: Synthetic oligonucleotide
  Target: APOC3; (-) strand; PAM type: NRG; PAM sequence: TGG
ttcccatgcccagacacaga

SEQ ID NO: 7630 - DNA, 20 bp, Artificial Sequence
  Description of Artificial Sequence: Synthetic oligonucleotide
  Target: APOC3; (-) strand; PAM type: NRG; PAM sequence: CAG
ccctttcccatgcccagaca

SEQ ID NO: 7631 - DNA, 20 bp, Artificial Sequence
  Description of Artificial Sequence: Synthetic oligonucleotide
  Target: APOC3; (-) strand; PAM type: NRG; PAM sequence: CAG
cctcggccctttcccatgcc

SEQ ID NO: 7632 - DNA, 20 bp, Artificial Sequence
  Description of Artificial Sequence: Synthetic oligonucleotide
  Target: APOC3; (-) strand; PAM type: NRG; PAM sequence: CGG
gcccacccacagaacagcct

SEQ ID NO: 7633 - DNA, 20 bp, Artificial Sequence
  Description of Artificial Sequence: Synthetic oligonucleotide
  Target: APOC3; (-) strand; PAM type: NRG; PAM sequence: CAG
tccagtgcccacccacagaa

SEQ ID NO: 7634 - DNA, 20 bp, Artificial Sequence
  Description of Artificial Sequence: Synthetic oligonucleotide
  Target: APOC3; (-) strand; PAM type: NRG; PAM sequence: CAG
gtctgtccagtgcccaccca

SEQ ID NO: 7635 - DNA, 20 bp, Artificial Sequence
  Description of Artificial Sequence: Synthetic oligonucleotide
  Target: APOC3; (-) strand; PAM type: NRG; PAM sequence: CAG
tgcctgacctggagtctgtc

SEQ ID NO: 7636 - DNA, 20 bp, Artificial Sequence
  Description of Artificial Sequence: Synthetic oligonucleotide
  Target: APOC3; (-) strand; PAM type: NRG; PAM sequence: GAG
ctccatgcctgcctgacctg

SEQ ID NO: 7637 - DNA, 20 bp, Artificial Sequence
  Description of Artificial Sequence: Synthetic oligonucleotide
  Target: APOC3; (-) strand; PAM type: NRG; PAM sequence: TGG
gcctccatgcctgcctgacc

SEQ ID NO: 7638 - DNA, 20 bp, Artificial Sequence
  Description of Artificial Sequence: Synthetic oligonucleotide
  Target: APOC3; (-) strand; PAM type: NRG; PAM sequence: TGG
ccagaaggtggatagagcgc

SEQ ID NO: 7639 - DNA, 20 bp, Artificial Sequence
  Description of Artificial Sequence: Synthetic oligonucleotide
  Target: APOC3; (-) strand; PAM type: NRG; PAM sequence: GAG
cagctaccagaaggtggata

SEQ ID NO: 7640 - DNA, 20 bp, Artificial Sequence
  Description of Artificial Sequence: Synthetic oligonucleotide
  Target: APOC3; (-) strand; PAM type: NRG; PAM sequence: TAG
cccagctaccagaaggtgga

SEQ ID NO: 7641 - DNA, 20 bp, Artificial Sequence
  Description of Artificial Sequence: Synthetic oligonucleotide
  Target: APOC3; (-) strand; PAM type: NRG; PAM sequence: TGG
actgcccagctaccagaagg

SEQ ID NO: 7642 - DNA, 20 bp, Artificial Sequence
  Description of Artificial Sequence: Synthetic oligonucleotide
  Target: APOC3; (-) strand; PAM type: NRG; PAM sequence: AGG
gagactgcccagctaccaga

SEQ ID NO: 7643 - DNA, 20 bp, Artificial Sequence
  Description of Artificial Sequence: Synthetic oligonucleotide
  Target: APOC3; (-) strand; PAM type: NRG; PAM sequence: AAG
agagactgcccagctaccag

SEQ ID NO: 7644 - DNA, 20 bp, Artificial Sequence
  Description of Artificial Sequence: Synthetic oligonucleotide
  Target: APOC3; (-) strand; PAM type: NRG; PAM sequence: CAG
cccagagactgcccagctac

SEQ ID NO: 7645 - DNA, 20 bp, Artificial Sequence
  Description of Artificial Sequence: Synthetic oligonucleotide
  Target: APOC3; (-) strand; PAM type: NRG; PAM sequence: CAG
actgaggcccagagactgcc

SEQ ID NO: 7646 - DNA, 20 bp, Artificial Sequence
  Description of Artificial Sequence: Synthetic oligonucleotide
  Target: APOC3; (-) strand; PAM type: NRG; PAM sequence: GAG
gatgaagaaactgaggccca

SEQ ID NO: 7647 - DNA, 20 bp, Artificial Sequence
  Description of Artificial Sequence: Synthetic oligonucleotide
  Target: APOC3; (-) strand; PAM type: NRG; PAM sequence: CAG
gagatgaagaaactgaggcc

SEQ ID NO: 7648 - DNA, 20 bp, Artificial Sequence
  Description of Artificial Sequence: Synthetic oligonucleotide
  Target: APOC3; (-) strand; PAM type: NRG; PAM sequence: AGG
ccttagagatgaagaaactg

SEQ ID NO: 7649 - DNA, 20 bp, Artificial Sequence
  Description of Artificial Sequence: Synthetic oligonucleotide
  Target: APOC3; (-) strand; PAM type: NRG; PAM sequence: GAG
accttagagatgaagaaact

SEQ ID NO: 7650 - DNA, 20 bp, Artificial Sequence
  Description of Artificial Sequence: Synthetic oligonucleotide
  Target: APOC3; (-) strand; PAM type: NRG; PAM sequence: AAG
tgattcctaccttagagatg

SEQ ID NO: 7651 - DNA, 20 bp, Artificial Sequence
  Description of Artificial Sequence: Synthetic oligonucleotide
  Target: APOC3; (-) strand; PAM type: NRG; PAM sequence: GAG
ggagggtgattcctacctta

SEQ ID NO: 7652 - DNA, 20 bp, Artificial Sequence
  Description of Artificial Sequence: Synthetic oligonucleotide
  Target: APOC3; (-) strand; PAM type: NRG; PAM sequence: TAG
acggagggtgattcctacct

SEQ ID NO: 7653 - DNA, 20 bp, Artificial Sequence
  Description of Artificial Sequence: Synthetic oligonucleotide
  Target: APOC3; (-) strand; PAM type: NRG; PAM sequence: GGG
caaggaaggcagggtacgga

SEQ ID NO: 7654 - DNA, 20 bp, Artificial Sequence
  Description of Artificial Sequence: Synthetic oligonucleotide
  Target: APOC3; (-) strand; PAM type: NRG; PAM sequence: AGG
tcaaggaaggcagggtacgg

SEQ ID NO: 7655 - DNA, 20 bp, Artificial Sequence
  Description of Artificial Sequence: Synthetic oligonucleotide
  Target: APOC3; (-) strand; PAM type: NRG; PAM sequence: GAG
gtcaaggaaggcagggtacg

SEQ ID NO: 7656 - DNA, 20 bp, Artificial Sequence
  Description of Artificial Sequence: Synthetic oligonucleotide
  Target: APOC3; (-) strand; PAM type: NRG; PAM sequence: CGG
ctgtcaaggaaggcagggta

SEQ ID NO: 7657 - DNA, 20 bp, Artificial Sequence
  Description of Artificial Sequence: Synthetic oligonucleotide
  Target: APOC3; (-) strand; PAM type: NRG; PAM sequence: GGG
caaagctgtcaaggaaggca

SEQ ID NO: 7658 - DNA, 20 bp, Artificial Sequence
  Description of Artificial Sequence: Synthetic oligonucleotide
  Target: APOC3; (-) strand; PAM type: NRG; PAM sequence: AGG
acaaagctgtcaaggaaggc

SEQ ID NO: 7659 - DNA, 20 bp, Artificial Sequence
  Description of Artificial Sequence: Synthetic oligonucleotide
  Target: APOC3; (-) strand; PAM type: NRG; PAM sequence: CAG
cacaaagctgtcaaggaagg

SEQ ID NO: 7660 - DNA, 20 bp, Artificial Sequence
  Description of Artificial Sequence: Synthetic oligonucleotide
  Target: APOC3; (-) strand; PAM type: NRG; PAM sequence: AGG
ccgcacaaagctgtcaagga

SEQ ID NO: 7661 - DNA, 20 bp, Artificial Sequence
  Description of Artificial Sequence: Synthetic oligonucleotide
  Target: APOC3; (-) strand; PAM type: NRG; PAM sequence: AAG
tccgcacaaagctgtcaagg

SEQ ID NO: 7662 - DNA, 20 bp, Artificial Sequence
  Description of Artificial Sequence: Synthetic oligonucleotide
  Target: APOC3; (-) strand; PAM type: NRG; PAM sequence: AGG
ccttccgcacaaagctgtca

SEQ ID NO: 7663 - DNA, 20 bp, Artificial Sequence
  Description of Artificial Sequence: Synthetic oligonucleotide
  Target: APOC3; (-) strand; PAM type: NRG; PAM sequence: AAG
accttccgcacaaagctgtc

SEQ ID NO: 7664 - DNA, 20 bp, Artificial Sequence
  Description of Artificial Sequence: Synthetic oligonucleotide
  Target: APOC3; (-) strand; PAM type: NRG; PAM sequence: AAG
cctgtttgaccttccgcaca

SEQ ID NO: 7665 - DNA, 20 bp, Artificial Sequence
  Description of Artificial Sequence: Synthetic oligonucleotide
  Target: APOC3; (-) strand; PAM type: NRG; PAM sequence: CAG
ctaacagtttatcaaagtat

SEQ ID NO: 7666 - DNA, 20 bp, Artificial Sequence
  Description of Artificial Sequence: Synthetic oligonucleotide
  Target: APOC3; (-) strand; PAM type: NRG; PAM sequence: AAG
cagcacctaacagtttatca

SEQ ID NO: 7667 - DNA, 20 bp, Artificial Sequence
  Description of Artificial Sequence: Synthetic oligonucleotide
  Target: APOC3; (-) strand; PAM type: NRG; PAM sequence: CAG
tcatgttgtgcagcacctaa

SEQ ID NO: 7668 - DNA, 20 bp, Artificial Sequence
  Description of Artificial Sequence: Synthetic oligonucleotide
  Target: APOC3; (-) strand; PAM type: NRG; PAM sequence: CAG
cacactcaagtcatgttgtg

SEQ ID NO: 7669 - DNA, 20 bp, Artificial Sequence
  Description of Artificial Sequence: Synthetic oligonucleotide
  Target: APOC3; (-) strand; PAM type: NRG; PAM sequence: AAG
ctggcatggggcacacactc

SEQ ID NO: 7670 - DNA, 20 bp, Artificial Sequence
  Description of Artificial Sequence: Synthetic oligonucleotide
  Target: APOC3; (-) strand; PAM type: NRG; PAM sequence: GGG
caggcatagtggctggcatg

SEQ ID NO: 7671 - DNA, 20 bp, Artificial Sequence
  Description of Artificial Sequence: Synthetic oligonucleotide
  Target: APOC3; (-) strand; PAM type: NRG; PAM sequence: GGG
ccaggcatagtggctggcat

SEQ ID NO: 7672 - DNA, 20 bp, Artificial Sequence
  Description of Artificial Sequence: Synthetic oligonucleotide
  Target: APOC3; (-) strand; PAM type: NRG; PAM sequence: TGG
gccaggcatagtggctggca

SEQ ID NO: 7673 - DNA, 20 bp, Artificial Sequence
  Description of Artificial Sequence: Synthetic oligonucleotide
  Target: APOC3; (-) strand; PAM type: NRG; PAM sequence: TGG
taagtgccaggcatagtggc

SEQ ID NO: 7674 - DNA, 20 bp, Artificial Sequence
  Description of Artificial Sequence: Synthetic oligonucleotide
  Target: APOC3; (-) strand; PAM type: NRG; PAM sequence: TGG
aacttaagtgccaggcatag

SEQ ID NO: 7675 - DNA, 20 bp, Artificial Sequence
  Description of Artificial Sequence: Synthetic oligonucleotide
  Target: APOC3; (-) strand; PAM type: NRG; PAM sequence: TAG
gacaacttaagtgccaggca

SEQ ID NO: 7676 - DNA, 20 bp, Artificial Sequence
  Description of Artificial Sequence: Synthetic oligonucleotide
  Target: APOC3; (-) strand; PAM type: NRG; PAM sequence: AGG
ctgatgacaacttaagtgcc

SEQ ID NO: 7677 - DNA, 20 bp, Artificial Sequence
  Description of Artificial Sequence: Synthetic oligonucleotide
  Target: APOC3; (-) strand; PAM type: NRG; PAM sequence: CAG
tctgatgacaacttaagtgc

SEQ ID NO: 7678 - DNA, 20 bp, Artificial Sequence
  Description of Artificial Sequence: Synthetic oligonucleotide
  Target: APOC3; (-) strand; PAM type: NRG; PAM sequence: AAG
ctcaactctgatgacaactt

SEQ ID NO: 7679 - DNA, 20 bp, Artificial Sequence
  Description of Artificial Sequence: Synthetic oligonucleotide
  Target: APOC3; (-) strand; PAM type: NRG; PAM sequence: CAG
cagttttgagtaaacacaca

SEQ ID NO: 7680 - DNA, 20 bp, Artificial Sequence
  Description of Artificial Sequence: Synthetic oligonucleotide
  Target: APOC3; (-) strand; PAM type: NRG; PAM sequence: GAG
gaggtcagctccacagtttt

SEQ ID NO: 7681 - DNA, 20 bp, Artificial Sequence
  Description of Artificial Sequence: Synthetic oligonucleotide
  Target: APOC3; (-) strand; PAM type: NRG; PAM sequence: CAG
gataggggaggtcagctcca

SEQ ID NO: 7682 - DNA, 20 bp, Artificial Sequence
  Description of Artificial Sequence: Synthetic oligonucleotide
  Target: APOC3; (-) strand; PAM type: NRG; PAM sequence: CAG
ggggcctggataggggaggt

SEQ ID NO: 7683 - DNA, 20 bp, Artificial Sequence
  Description of Artificial Sequence: Synthetic oligonucleotide
  Target: APOC3; (-) strand; PAM type: NRG; PAM sequence: AGG
ctagggggcctggatagggg

SEQ ID NO: 7684 - DNA, 20 bp, Artificial Sequence
  Description of Artificial Sequence: Synthetic oligonucleotide
  Target: APOC3; (-) strand; PAM type: NRG; PAM sequence: GAG
gctagggggcctggataggg

SEQ ID NO: 7685 - DNA, 20 bp, Artificial Sequence
  Description of Artificial Sequence: Synthetic oligonucleotide
  Target: APOC3; (-) strand; PAM type: NRG; PAM sequence: GGG
gggctagggggcctggatag

SEQ ID NO: 7686 - DNA, 20 bp, Artificial Sequence
  Description of Artificial Sequence: Synthetic oligonucleotide
  Target: APOC3; (-) strand; PAM type: NRG; PAM sequence: GGG
agggctagggggcctggata

SEQ ID NO: 7687 - DNA, 20 bp, Artificial Sequence
  Description of Artificial Sequence: Synthetic oligonucleotide
  Target: APOC3; (-) strand; PAM type: NRG; PAM sequence: AGG
gagggctagggggcctggat

SEQ ID NO: 7688 - DNA, 20 bp, Artificial Sequence
  Description of Artificial Sequence: Synthetic oligonucleotide
  Target: APOC3; (-) strand; PAM type: NRG; PAM sequence: TAG
agagggctagggggcctgga

SEQ ID NO: 7689 - DNA, 20 bp, Artificial Sequence
  Description of Artificial Sequence: Synthetic oligonucleotide
  Target: APOC3; (-) strand; PAM type: NRG; PAM sequence: TGG
cctaagagggctagggggcc

SEQ ID NO: 7690 - DNA, 20 bp, Artificial Sequence
  Description of Artificial Sequence: Synthetic oligonucleotide
  Target: APOC3; (-) strand; PAM type: NRG; PAM sequence: GGG
gtgcgcctaagagggctagg

SEQ ID NO: 7691 - DNA, 20 bp, Artificial Sequence
  Description of Artificial Sequence: Synthetic oligonucleotide
  Target: APOC3; (-) strand; PAM type: NRG; PAM sequence: GGG
cgtgcgcctaagagggctag

SEQ ID NO: 7692 - DNA, 20 bp, Artificial Sequence
  Description of Artificial Sequence: Synthetic oligonucleotide
  Target: APOC3; (-) strand; PAM type: NRG; PAM sequence: GGG
acgtgcgcctaagagggcta

SEQ ID NO: 7693 - DNA, 20 bp, Artificial Sequence
  Description of Artificial Sequence: Synthetic oligonucleotide
  Target: APOC3; (-) strand; PAM type: NRG; PAM sequence: AGG
cacgtgcgcctaagagggct

SEQ ID NO: 7694 - DNA, 20 bp, Artificial Sequence
  Description of Artificial Sequence: Synthetic oligonucleotide
  Target: APOC3; (-) strand; PAM type: NRG; PAM sequence: TAG
tcacgtgcgcctaagagggc

SEQ ID NO: 7695 - DNA, 20 bp, Artificial Sequence
  Description of Artificial Sequence: Synthetic oligonucleotide
  Target: APOC3; (-) strand; PAM type: NRG; PAM sequence: GGG
cccttcacgtgcgcctaaga

SEQ ID NO: 7696 - DNA, 20 bp, Artificial Sequence
  Description of Artificial Sequence: Synthetic oligonucleotide
  Target: APOC3; (-) strand; PAM type: NRG; PAM sequence: AGG
tcccttcacgtgcgcctaag

SEQ ID NO: 7697 - DNA, 20 bp, Artificial Sequence
  Description of Artificial Sequence: Synthetic oligonucleotide
  Target: APOC3; (-) strand; PAM type: NRG; PAM sequence: GAG
ctcccttcacgtgcgcctaa

SEQ ID NO: 7698 - DNA, 20 bp, Artificial Sequence
  Description of Artificial Sequence: Synthetic oligonucleotide
  Target: APOC3; (-) strand; PAM type: NRG; PAM sequence: AAG
tcctcccttcacgtgcgcct

SEQ ID NO: 7699 - DNA, 20 bp, Artificial Sequence
  Description of Artificial Sequence: Synthetic oligonucleotide
  Target: APOC3; (-) strand; PAM type: NRG; PAM sequence: CGG
actccaacctctagcccatc

SEQ ID NO: 7700 - DNA, 20 bp, Artificial Sequence
  Description of Artificial Sequence: Synthetic oligonucleotide
  Target: APOC3; (-) strand; PAM type: NRG; PAM sequence: TAG
ttgcatcttactccaacctc

SEQ ID NO: 7701 - DNA, 20 bp, Artificial Sequence
  Description of Artificial Sequence: Synthetic oligonucleotide
  Target: APOC3; (-) strand; PAM type: NRG; PAM sequence: TAG
tcaagtggtggagccaagaa

SEQ ID NO: 7702 - DNA, 20 bp, Artificial Sequence
  Description of Artificial Sequence: Synthetic oligonucleotide
  Target: APOC3; (-) strand; PAM type: NRG; PAM sequence: AAG
tgatatcaagtggtggagcc

SEQ ID NO: 7703 - DNA, 20 bp, Artificial Sequence
  Description of Artificial Sequence: Synthetic oligonucleotide
  Target: APOC3; (-) strand; PAM type: NRG; PAM sequence: GAG
gaggctgatatcaagtggtg

SEQ ID NO: 7704 - DNA, 20 bp, Artificial Sequence
  Description of Artificial Sequence: Synthetic oligonucleotide
  Target: APOC3; (-) strand; PAM type: NRG; PAM sequence: TGG
ctgaggctgatatcaagtgg

SEQ ID NO: 7705 - DNA, 20 bp, Artificial Sequence
  Description of Artificial Sequence: Synthetic oligonucleotide
  Target: APOC3; (-) strand; PAM type: NRG; PAM sequence: TGG
aaactgaggctgatatcaag

SEQ ID NO: 7706 - DNA, 20 bp, Artificial Sequence
  Description of Artificial Sequence: Synthetic oligonucleotide
  Target: APOC3; (-) strand; PAM type: NRG; PAM sequence: AAG
aagaaactgaggctgatatc

SEQ ID NO: 7707 - DNA, 20 bp, Artificial Sequence
  Description of Artificial Sequence: Synthetic oligonucleotide
  Target: APOC3; (-) strand; PAM type: NRG; PAM sequence: AGG
actttacatgtaagaaactg

SEQ ID NO: 7708 - DNA, 20 bp, Artificial Sequence
  Description of Artificial Sequence: Synthetic oligonucleotide
  Target: APOC3; (-) strand; PAM type: NRG; PAM sequence: GAG
cactttacatgtaagaaact

SEQ ID NO: 7709 - DNA, 20 bp, Artificial Sequence
  Description of Artificial Sequence: Synthetic oligonucleotide
  Target: APOC3; (-) strand; PAM type: NRG; PAM sequence: AAG
gttgtatccactttacatgt

SEQ ID NO: 7710 - DNA, 20 bp, Artificial Sequence
  Description of Artificial Sequence: Synthetic oligonucleotide
  Target: APOC3; (-) strand; PAM type: NRG; PAM sequence: CGG
aacctacggtggagggggta

SEQ ID NO: 7711 - DNA, 20 bp, Artificial Sequence
  Description of Artificial Sequence: Synthetic oligonucleotide
  Target: APOC3; (-) strand; PAM type: NRG; PAM sequence: GGG
cggcaaacctacggtggagg

SEQ ID NO: 7712 - DNA, 20 bp, Artificial Sequence
  Description of Artificial Sequence: Synthetic oligonucleotide
  Target: APOC3; (-) strand; PAM type: NRG; PAM sequence: GGG
acggcaaacctacggtggag

SEQ ID NO: 7713 - DNA, 20 bp, Artificial Sequence
  Description of Artificial Sequence: Synthetic oligonucleotide
  Target: APOC3; (-) strand; PAM type: NRG; PAM sequence: GGG
cacggcaaacctacggtgga

SEQ ID NO: 7714 - DNA, 20 bp, Artificial Sequence
  Description of Artificial Sequence: Synthetic oligonucleotide
  Target: APOC3; (-) strand; PAM type: NRG; PAM sequence: AGG
tcacggcaaacctacggtgg

SEQ ID NO: 7715 - DNA, 20 bp, Artificial Sequence
  Description of Artificial Sequence: Synthetic oligonucleotide
  Target: APOC3; (-) strand; PAM type: NRG; PAM sequence: GAG
ctcacggcaaacctacggtg

SEQ ID NO: 7716 - DNA, 20 bp, Artificial Sequence
  Description of Artificial Sequence: Synthetic oligonucleotide
  Target: APOC3; (-) strand; PAM type: NRG; PAM sequence: TGG
atctcacggcaaacctacgg

SEQ ID NO: 7717 - DNA, 20 bp, Artificial Sequence
  Description of Artificial Sequence: Synthetic oligonucleotide
  Target: APOC3; (-) strand; PAM type: NRG; PAM sequence: CGG
tcaatctcacggcaaaccta

SEQ ID NO: 7718 - DNA, 20 bp, Artificial Sequence
  Description of Artificial Sequence: Synthetic oligonucleotide
  Target: APOC3; (-) strand; PAM type: NRG; PAM sequence: CGG
gctctctcatttcaatctca

SEQ ID NO: 7719 - DNA, 20 bp, Artificial Sequence
  Description of Artificial Sequence: Synthetic oligonucleotide
  Target: APOC3; (-) strand; PAM type: NRG; PAM sequence: CGG
cgtgcaggtgctgtgccaaa

SEQ ID NO: 7720 - DNA, 20 bp, Artificial Sequence
  Description of Artificial Sequence: Synthetic oligonucleotide
  Target: APOC3; (-) strand; PAM type: NRG; PAM sequence: AGG
gatcaagcatctttacgtgc

SEQ ID NO: 7721 - DNA, 20 bp, Artificial Sequence
  Description of Artificial Sequence: Synthetic oligonucleotide
  Target: APOC3; (-) strand; PAM type: NRG; PAM sequence: CAG
tgatcaagcatctttacgtg

SEQ ID NO: 7722 - DNA, 20 bp, Artificial Sequence
  Description of Artificial Sequence: Synthetic oligonucleotide
  Target: APOC3; (-) strand; PAM type: NRG; PAM sequence: AAG
taatcatgacaacattgatc

SEQ ID NO: 7723 - DNA, 20 bp, Artificial Sequence
  Description of Artificial Sequence: Synthetic oligonucleotide
  Target: APOC3; (-) strand; PAM type: NRG; PAM sequence: CAG
ccgggtcccaagggcccagt

SEQ ID NO: 7724 - DNA, 20 bp, Artificial Sequence
  Description of Artificial Sequence: Synthetic oligonucleotide
  Target: APOC3; (-) strand; PAM type: NRG; PAM sequence: CAG
cagtccgggtcccaagggcc

SEQ ID NO: 7725 - DNA, 20 bp, Artificial Sequence
  Description of Artificial Sequence: Synthetic oligonucleotide
  Target: APOC3; (-) strand; PAM type: NRG; PAM sequence: GGG
cactccagtccgggtcccaa

SEQ ID NO: 7726 - DNA, 20 bp, Artificial Sequence
  Description of Artificial Sequence: Synthetic oligonucleotide
  Target: APOC3; (-) strand; PAM type: NRG; PAM sequence: AGG
ccactccagtccgggtccca

SEQ ID NO: 7727 - DNA, 20 bp, Artificial Sequence
  Description of Artificial Sequence: Synthetic oligonucleotide
  Target: APOC3; (-) strand; PAM type: NRG; PAM sequence: AAG
accactccagtccgggtccc

SEQ ID NO: 7728 - DNA, 20 bp, Artificial Sequence
  Description of Artificial Sequence: Synthetic oligonucleotide
  Target: APOC3; (-) strand; PAM type: NRG; PAM sequence: GGG
gccccccaccactccagtcc

SEQ ID NO: 7729 - DNA, 20 bp, Artificial Sequence
  Description of Artificial Sequence: Synthetic oligonucleotide
  Target: APOC3; (-) strand; PAM type: NRG; PAM sequence: CGG
tgccccccaccactccagtc

SEQ ID NO: 7730 - DNA, 20 bp, Artificial Sequence
  Description of Artificial Sequence: Synthetic oligonucleotide
  Target: APOC3; (-) strand; PAM type: NRG; PAM sequence: CAG
gacactgccccccaccactc

SEQ ID NO: 7731 - DNA, 20 bp, Artificial Sequence
  Description of Artificial Sequence: Synthetic oligonucleotide
  Target: APOC3; (-) strand; PAM type: NRG; PAM sequence: AGG
ttgtgcttctttttggtccc

SEQ ID NO: 7732 - DNA, 20 bp, Artificial Sequence
  Description of Artificial Sequence: Synthetic oligonucleotide
  Target: APOC3; (-) strand; PAM type: NRG; PAM sequence: CAG
cttgtgcttctttttggtcc

SEQ ID NO: 7733 - DNA, 20 bp, Artificial Sequence
  Description of Artificial Sequence: Synthetic oligonucleotide
  Target: APOC3; (-) strand; PAM type: NRG; PAM sequence: TGG
ggagaccttgtgcttctttt

SEQ ID NO: 7734 - DNA, 20 bp, Artificial Sequence
  Description of Artificial Sequence: Synthetic oligonucleotide
  Target: APOC3; (-) strand; PAM type: NRG; PAM sequence: GAG
aaggaagcagcctctattgg

SEQ ID NO: 7735 - DNA, 20 bp, Artificial Sequence
  Description of Artificial Sequence: Synthetic oligonucleotide
  Target: APOC3; (-) strand; PAM type: NRG; PAM sequence: GGG
caaaggaagcagcctctatt

SEQ ID NO: 7736 - DNA, 20 bp, Artificial Sequence
  Description of Artificial Sequence: Synthetic oligonucleotide
  Target: APOC3; (-) strand; PAM type: NRG; PAM sequence: TGG
acaaaggaagcagcctctat

SEQ ID NO: 7737 - DNA, 20 bp, Artificial Sequence
  Description of Artificial Sequence: Synthetic oligonucleotide
  Target: APOC3; (-) strand; PAM type: NRG; PAM sequence: CAG
tggtggggacacaaaggaag

SEQ ID NO: 7738 - DNA, 20 bp, Artificial Sequence
  Description of Artificial Sequence: Synthetic oligonucleotide
  Target: APOC3; (-) strand; PAM type: NRG; PAM sequence: AAG
gggtggtggggacacaaagg

SEQ ID NO: 7739 - DNA, 20 bp, Artificial Sequence
  Description of Artificial Sequence: Synthetic oligonucleotide
  Target: APOC3; (-) strand; PAM type: NRG; PAM sequence: AGG
ttcgggtggtggggacacaa

SEQ ID NO: 7740 - DNA, 20 bp, Artificial Sequence
  Description of Artificial Sequence: Synthetic oligonucleotide
  Target: APOC3; (-) strand; PAM type: NRG; PAM sequence: AAG
tttcgggtggtggggacaca

SEQ ID NO: 7741 - DNA, 20 bp, Artificial Sequence
  Description of Artificial Sequence: Synthetic oligonucleotide
  Target: APOC3; (-) strand; PAM type: NRG; PAM sequence: GGG
ctgacatctttcgggtggtg

SEQ ID NO: 7742 - DNA, 20 bp, Artificial Sequence
  Description of Artificial Sequence: Synthetic oligonucleotide
  Target: APOC3; (-) strand; PAM type: NRG; PAM sequence: GGG
cctgacatctttcgggtggt

SEQ ID NO: 7743 - DNA, 20 bp, Artificial Sequence
  Description of Artificial Sequence: Synthetic oligonucleotide
  Target: APOC3; (-) strand; PAM type: NRG; PAM sequence: TGG
acctgacatctttcgggtgg

SEQ ID NO: 7744 - DNA, 20 bp, Artificial Sequence
  Description of Artificial Sequence: Synthetic oligonucleotide
  Target: APOC3; (-) strand; PAM type: NRG; PAM sequence: TGG
ctgacctgacatctttcggg

SEQ ID NO: 7745 - DNA, 20 bp, Artificial Sequence
  Description of Artificial Sequence: Synthetic oligonucleotide
  Target: APOC3; (-) strand; PAM type: NRG; PAM sequence: GGG
tctctgacctgacatctttc

SEQ ID NO: 7746 - DNA, 20 bp, Artificial Sequence
  Description of Artificial Sequence: Synthetic oligonucleotide
  Target: APOC3; (-) strand; PAM type: NRG; PAM sequence: CGG
ctctctgacctgacatcttt

SEQ ID NO: 7747 - DNA, 20 bp, Artificial Sequence
  Description of Artificial Sequence: Synthetic oligonucleotide
  Target: APOC3; (-) strand; PAM type: NRG; PAM sequence: GGG
tcaagccatctgcagctctc

SEQ ID NO: 7748 - DNA, 20 bp, Artificial Sequence
  Description of Artificial Sequence: Synthetic oligonucleotide
  Target: APOC3; (-) strand; PAM type: NRG; PAM sequence: CGG
ctcaagccatctgcagctct

SEQ ID NO: 7749 - DNA, 20 bp, Artificial Sequence
  Description of Artificial Sequence: Synthetic oligonucleotide
  Target: APOC3; (-) strand; PAM type: NRG; PAM sequence: CAG
agccctactcaagccatctg

SEQ ID NO: 7750 - DNA, 20 bp, Artificial Sequence
  Description of Artificial Sequence: Synthetic oligonucleotide
  Target: APOC3; (-) strand; PAM type: NRG; PAM sequence: AAG
tgaagagtggagccctactc

SEQ ID NO: 7751 - DNA, 20 bp, Artificial Sequence
  Description of Artificial Sequence: Synthetic oligonucleotide
  Target: APOC3; (-) strand; PAM type: NRG; PAM sequence: GAG
gttttttgatctgaagagtg

SEQ ID NO: 7752 - DNA, 20 bp, Artificial Sequence
  Description of Artificial Sequence: Synthetic oligonucleotide
  Target: APOC3; (-) strand; PAM type: NRG; PAM sequence: TGG
cagttttttgatctgaagag

SEQ ID NO: 7753 - DNA, 20 bp, Artificial Sequence
  Description of Artificial Sequence: Synthetic oligonucleotide
  Target: APOC3; (-) strand; PAM type: NRG; PAM sequence: GAG
ccacagttttttgatctgaa

SEQ ID NO: 7754 - DNA, 20 bp, Artificial Sequence
  Description of Artificial Sequence: Synthetic oligonucleotide
  Target: APOC3; (-) strand; PAM type: NRG; PAM sequence: AAG
ggccacagttttttgatctg

SEQ ID NO: 7755 - DNA, 20 bp, Artificial Sequence
  Description of Artificial Sequence: Synthetic oligonucleotide
  Target: APOC3; (-) strand; PAM type: NRG; PAM sequence: CAG
gccttcgcctctccgggcca

SEQ ID NO: 7756 - DNA, 20 bp, Artificial Sequence
  Description of Artificial Sequence: Synthetic oligonucleotide
  Target: APOC3; (-) strand; PAM type: NRG; PAM sequence: GGG
ccaagtgccttcgcctctcc

SEQ ID NO: 7757 - DNA, 20 bp, Artificial Sequence
  Description of Artificial Sequence: Synthetic oligonucleotide
  Target: APOC3; (-) strand; PAM type: NRG; PAM sequence: CGG
gccaagtgccttcgcctctc

SEQ ID NO: 7758 - DNA, 20 bp, Artificial Sequence
  Description of Artificial Sequence: Synthetic oligonucleotide
  Target: APOC3; (-) strand; PAM type: NRG; PAM sequence: AAG
ctggctctgtgatgctggcc

SEQ ID NO: 7759 - DNA, 20 bp, Artificial Sequence
  Description of Artificial Sequence: Synthetic oligonucleotide
  Target: APOC3; (-) strand; PAM type: NRG; PAM sequence: TGG
acgtgctggctctgtgatgc

SEQ ID NO: 7760 - DNA, 20 bp, Artificial Sequence
  Description of Artificial Sequence: Synthetic oligonucleotide
  Target: APOC3; (-) strand; PAM type: NRG; PAM sequence: TGG
ggtctggccctgccacgtgc

SEQ ID NO: 7761 - DNA, 20 bp, Artificial Sequence
  Description of Artificial Sequence: Synthetic oligonucleotide
  Target: APOC3; (-) strand; PAM type: NRG; PAM sequence: TGG
gctgacctgggctcaaggtc

SEQ ID NO: 7762 - DNA, 20 bp, Artificial Sequence
  Description of Artificial Sequence: Synthetic oligonucleotide
  Target: APOC3; (-) strand; PAM type: NRG; PAM sequence: AGG
acgcagctgacctgggctca

SEQ ID NO: 7763 - DNA, 20 bp, Artificial Sequence
  Description of Artificial Sequence: Synthetic oligonucleotide
  Target: APOC3; (-) strand; PAM type: NRG; PAM sequence: AAG
cacgcagctgacctgggctc

SEQ ID NO: 7764 - DNA, 20 bp, Artificial Sequence
  Description of Artificial Sequence: Synthetic oligonucleotide
  Target: APOC3; (-) strand; PAM type: NRG; PAM sequence: GGG
agaatacacgcagctgacct

SEQ ID NO: 7765 - DNA, 20 bp, Artificial Sequence
  Description of Artificial Sequence: Synthetic oligonucleotide
  Target: APOC3; (-) strand; PAM type: NRG; PAM sequence: TGG
cagaatacacgcagctgacc

SEQ ID NO: 7766 - DNA, 20 bp, Artificial Sequence
  Description of Artificial Sequence: Synthetic oligonucleotide
  Target: APOC3; (-) strand; PAM type: NRG; PAM sequence: CAG
ccaactgagcagaatacacg

SEQ ID NO: 7767 - DNA, 20 bp, Artificial Sequence
  Description of Artificial Sequence: Synthetic oligonucleotide
  Target: APOC3; (-) strand; PAM type: NRG; PAM sequence: CAG
tgttttctgcaccaactgag

SEQ ID NO: 7768 - DNA, 20 bp, Artificial Sequence
  Description of Artificial Sequence: Synthetic oligonucleotide
  Target: APOC3; (-) strand; PAM type: NRG; PAM sequence: GAG
aactgttttctgcaccaact

SEQ ID NO: 7769 - DNA, 20 bp, Artificial Sequence
  Description of Artificial Sequence: Synthetic oligonucleotide
  Target: APOC3; (-) strand; PAM type: NRG; PAM sequence: GAG
gtccctaacacctgacatag

SEQ ID NO: 7770 - DNA, 20 bp, Artificial Sequence
  Description of Artificial Sequence: Synthetic oligonucleotide
  Target: APOC3; (-) strand; PAM type: NRG; PAM sequence: AGG
gagtccctaacacctgacat

SEQ ID NO: 7771 - DNA, 20 bp, Artificial Sequence
  Description of Artificial Sequence: Synthetic oligonucleotide
  Target: APOC3; (-) strand; PAM type: NRG; PAM sequence: TAG
ggagtccctaacacctgaca

SEQ ID NO: 7772 - DNA, 20 bp, Artificial Sequence
  Description of Artificial Sequence: Synthetic oligonucleotide
  Target: APOC3; (-) strand; PAM type: NRG; PAM sequence: GAG
tgccactgagatctgtaaag

SEQ ID NO: 7773 - DNA, 20 bp, Artificial Sequence
  Description of Artificial Sequence: Synthetic oligonucleotide
  Target: APOC3; (-) strand; PAM type: NRG; PAM sequence: AGG
gatgccactgagatctgtaa

SEQ ID NO: 7774 - DNA, 20 bp, Artificial Sequence
  Description of Artificial Sequence: Synthetic oligonucleotide
  Target: APOC3; (-) strand; PAM type: NRG; PAM sequence: AAG
tgatgccactgagatctgta

SEQ ID NO: 7775 - DNA, 20 bp, Artificial Sequence
  Description of Artificial Sequence: Synthetic oligonucleotide
  Target: APOC3; (-) strand; PAM type: NRG; PAM sequence: GAG
ctggatgtactgatgccact

SEQ ID NO: 7776 - DNA, 20 bp, Artificial Sequence
  Description of Artificial Sequence: Synthetic oligonucleotide
  Target: APOC3; (-) strand; PAM type: NRG; PAM sequence: TGG
aagcagtctccaggtggggc

SEQ ID NO: 7777 - DNA, 20 bp, Artificial Sequence
  Description of Artificial Sequence: Synthetic oligonucleotide
  Target: APOC3; (-) strand; PAM type: NRG; PAM sequence: GGG
gagaaagcagtctccaggtg

SEQ ID NO: 7778 - DNA, 20 bp, Artificial Sequence
  Description of Artificial Sequence: Synthetic oligonucleotide
  Target: APOC3; (-) strand; PAM type: NRG; PAM sequence: GGG
agagaaagcagtctccaggt

SEQ ID NO: 7779 - DNA, 20 bp, Artificial Sequence
  Description of Artificial Sequence: Synthetic oligonucleotide
  Target: APOC3; (-) strand; PAM type: NRG; PAM sequence: TGG
gagagaaagcagtctccagg

SEQ ID NO: 7780 - DNA, 20 bp, Artificial Sequence
  Description of Artificial Sequence: Synthetic oligonucleotide
  Target: APOC3; (-) strand; PAM type: NRG; PAM sequence: AGG
tcagagagaaagcagtctcc

SEQ ID NO: 7781 - DNA, 20 bp, Artificial Sequence
  Description of Artificial Sequence: Synthetic oligonucleotide
  Target: APOC3; (-) strand; PAM type: NRG; PAM sequence: CAG
ttcagagagaaagcagtctc

SEQ ID NO: 7782 - DNA, 20 bp, Artificial Sequence
  Description of Artificial Sequence: Synthetic oligonucleotide
  Target: APOC3; (-) strand; PAM type: NRG; PAM sequence: CAG
gggaattttcagagagaaag

SEQ ID NO: 7783 - DNA, 20 bp, Artificial Sequence
  Description of Artificial Sequence: Synthetic oligonucleotide
  Target: APOC3; (-) strand; PAM type: NRG; PAM sequence: AAG
ctggggaattttcagagaga

SEQ ID NO: 7784 - DNA, 20 bp, Artificial Sequence
  Description of Artificial Sequence: Synthetic oligonucleotide
  Target: APOC3; (-) strand; PAM type: NRG; PAM sequence: GAG
agccctggggaattttcaga

SEQ ID NO: 7785 - DNA, 20 bp, Artificial Sequence
  Description of Artificial Sequence: Synthetic oligonucleotide
  Target: APOC3; (-) strand; PAM type: NRG; PAM sequence: GAG
gaagccctggggaattttca

SEQ ID NO: 7786 - DNA, 20 bp, Artificial Sequence
  Description of Artificial Sequence: Synthetic oligonucleotide
  Target: APOC3; (-) strand; PAM type: NRG; PAM sequence: CAG
gagaagccctggggaatttt

SEQ ID NO: 7787 - DNA, 20 bp, Artificial Sequence
  Description of Artificial Sequence: Synthetic oligonucleotide
  Target: APOC3; (-) strand; PAM type: NRG; PAM sequence: GGG
cagcccagagagaagccctg

SEQ ID NO: 7788 - DNA, 20 bp, Artificial Sequence
  Description of Artificial Sequence: Synthetic oligonucleotide
  Target: APOC3; (-) strand; PAM type: NRG; PAM sequence: GGG
tcagcccagagagaagccct

SEQ ID NO: 7789 - DNA, 20 bp, Artificial Sequence
  Description of Artificial Sequence: Synthetic oligonucleotide
  Target: APOC3; (-) strand; PAM type: NRG; PAM sequence: TGG
ctcagcccagagagaagccc

SEQ ID NO: 7790 - DNA, 20 bp, Artificial Sequence
  Description of Artificial Sequence: Synthetic oligonucleotide
  Target: APOC3; (-) strand; PAM type: NRG; PAM sequence: AAG
agatctctcagcccagagag

SEQ ID NO: 7791 - DNA, 20 bp, Artificial Sequence
  Description of Artificial Sequence: Synthetic oligonucleotide
  Target: APOC3; (-) strand; PAM type: NRG; PAM sequence: GAG
ctgagatctctcagcccaga

SEQ ID NO: 7792 - DNA, 20 bp, Artificial Sequence
  Description of Artificial Sequence: Synthetic oligonucleotide
  Target: APOC3; (-) strand; PAM type: NRG; PAM sequence: GAG
tgctgagatctctcagccca

SEQ ID NO: 7793 - DNA, 20 bp, Artificial Sequence
  Description of Artificial Sequence: Synthetic oligonucleotide
  Target: APOC3; (-) strand; PAM type: NRG; PAM sequence: CAG
ggtgctgagatctctcagcc

SEQ ID NO: 7794 - DNA, 20 bp, Artificial Sequence
  Description of Artificial Sequence: Synthetic oligonucleotide
  Target: APOC3; (-) strand; PAM type: NRG; PAM sequence: CAG
atacgggtgctgagatctct

SEQ ID NO: 7795 - DNA, 20 bp, Artificial Sequence
  Description of Artificial Sequence: Synthetic oligonucleotide
  Target: APOC3; (-) strand; PAM type: NRG; PAM sequence: GAG
attttctagatacgggtgct

SEQ ID NO: 7796 - DNA, 20 bp, Artificial Sequence
  Description of Artificial Sequence: Synthetic oligonucleotide
  Target: APOC3; (-) strand; PAM type: NRG; PAM sequence: GGG
tgggaacattttctagatac

SEQ ID NO: 7797 - DNA, 20 bp, Artificial Sequence
  Description of Artificial Sequence: Synthetic oligonucleotide
  Target: APOC3; (-) strand; PAM type: NRG; PAM sequence: CGG
gtgggaacattttctagata

SEQ ID NO: 7798 - DNA, 20 bp, Artificial Sequence
  Description of Artificial Sequence: Synthetic oligonucleotide
  Target: APOC3; (-) strand; PAM type: NRG; PAM sequence: TAG
gtctgggtgggaacattttc

SEQ ID NO: 7799 - DNA, 20 bp, Artificial Sequence
  Description of Artificial Sequence: Synthetic oligonucleotide
  Target: APOC3; (-) strand; PAM type: NRG; PAM sequence: GGG
tcatccagccaggtctgggt

SEQ ID NO: 7800 - DNA, 20 bp, Artificial Sequence
  Description of Artificial Sequence: Synthetic oligonucleotide
  Target: APOC3; (-) strand; PAM type: NRG; PAM sequence: TGG
gtcatccagccaggtctggg

SEQ ID NO: 7801 - DNA, 20 bp, Artificial Sequence
  Description of Artificial Sequence: Synthetic oligonucleotide
  Target: APOC3; (-) strand; PAM type: NRG; PAM sequence: GGG
gcagtcatccagccaggtct

SEQ ID NO: 7802 - DNA, 20 bp, Artificial Sequence
  Description of Artificial Sequence: Synthetic oligonucleotide
  Target: APOC3; (-) strand; PAM type: NRG; PAM sequence: TGG
agcagtcatccagccaggtc

SEQ ID NO: 7803 - DNA, 20 bp, Artificial Sequence
  Description of Artificial Sequence: Synthetic oligonucleotide
  Target: APOC3; (-) strand; PAM type: NRG; PAM sequence: AGG
acaacagcagtcatccagcc

SEQ ID NO: 7804 - DNA, 20 bp, Artificial Sequence
  Description of Artificial Sequence: Synthetic oligonucleotide
  Target: APOC3; (-) strand; PAM type: NRG; PAM sequence: CAG
tacaacagcagtcatccagc

SEQ ID NO: 7805 - DNA, 20 bp, Artificial Sequence
  Description of Artificial Sequence: Synthetic oligonucleotide
  Target: APOC3; (-) strand; PAM type: NRG; PAM sequence: CAG
gagctacaacagcagtcatc

SEQ ID NO: 7806 - DNA, 20 bp, Artificial Sequence
  Description of Artificial Sequence: Synthetic oligonucleotide
  Target: APOC3; (-) strand; PAM type: NRG; PAM sequence: CAG
accttccagagctacaacag

SEQ ID NO: 7807 - DNA, 20 bp, Artificial Sequence
  Description of Artificial Sequence: Synthetic oligonucleotide
  Target: APOC3; (-) strand; PAM type: NRG; PAM sequence: CAG
ctaaccttccagagctacaa

SEQ ID NO: 7808 - DNA, 20 bp, Artificial Sequence
  Description of Artificial Sequence: Synthetic oligonucleotide
  Target: APOC3; (-) strand; PAM type: NRG; PAM sequence: GAG
ttttagttcctaaccttcca

SEQ ID NO: 7809 - DNA, 20 bp, Artificial Sequence
  Description of Artificial Sequence: Synthetic oligonucleotide
  Target: APOC3; (-) strand; PAM type: NRG; PAM sequence: CAG
ctttttagttcctaaccttc

SEQ ID NO: 7810 - DNA, 20 bp, Artificial Sequence
  Description of Artificial Sequence: Synthetic oligonucleotide
  Target: APOC3; (-) strand; PAM type: NRG; PAM sequence: TAG
aggtaaaggagtgggctttt

SEQ ID NO: 7811 - DNA, 20 bp, Artificial Sequence
  Description of Artificial Sequence: Synthetic oligonucleotide
  Target: APOC3; (-) strand; PAM type: NRG; PAM sequence: GGG
gctaccctaggtaaaggagt

SEQ ID NO: 7812 - DNA, 20 bp, Artificial Sequence
  Description of Artificial Sequence: Synthetic oligonucleotide
  Target: APOC3; (-) strand; PAM type: NRG; PAM sequence: TGG
agctaccctaggtaaaggag

SEQ ID NO: 7813 - DNA, 20 bp, Artificial Sequence
  Description of Artificial Sequence: Synthetic oligonucleotide
  Target: APOC3; (-) strand; PAM type: NRG; PAM sequence: GAG
cttagctaccctaggtaaag

SEQ ID NO: 7814 - DNA, 20 bp, Artificial Sequence
  Description of Artificial Sequence: Synthetic oligonucleotide
  Target: APOC3; (-) strand; PAM type: NRG; PAM sequence: AGG
atcttagctaccctaggtaa

SEQ ID NO: 7815 - DNA, 20 bp, Artificial Sequence
  Description of Artificial Sequence: Synthetic oligonucleotide
  Target: APOC3; (-) strand; PAM type: NRG; PAM sequence: AAG
tatcttagctaccctaggta

SEQ ID NO: 7816 - DNA, 20 bp, Artificial Sequence
  Description of Artificial Sequence: Synthetic oligonucleotide
  Target: APOC3; (-) strand; PAM type: NRG; PAM sequence: AGG
cagtgtatcttagctaccct

SEQ ID NO: 7817 - DNA, 20 bp, Artificial Sequence
  Description of Artificial Sequence: Synthetic oligonucleotide
  Target: APOC3; (-) strand; PAM type: NRG; PAM sequence: TAG
ccagtgtatcttagctaccc

SEQ ID NO: 7818 - DNA, 20 bp, Artificial Sequence
  Description of Artificial Sequence: Synthetic oligonucleotide
  Target: APOC3; (-) strand; PAM type: NRG; PAM sequence: TAG
tccccatctccagtgtatct

SEQ ID NO: 7819 - DNA, 20 bp, Artificial Sequence
  Description of Artificial Sequence: Synthetic oligonucleotide
  Target: APOC3; (-) strand; PAM type: NRG; PAM sequence: CAG
catccccatgtccccatctc

SEQ ID NO: 7820 - DNA, 20 bp, Artificial Sequence
  Description of Artificial Sequence: Synthetic oligonucleotide
  Target: APOC3; (-) strand; PAM type: NRG; PAM sequence: CGG
catgcaggcccctggataat

SEQ ID NO: 7821 - DNA, 20 bp, Artificial Sequence
  Description of Artificial Sequence: Synthetic oligonucleotide
  Target: APOC3; (-) strand; PAM type: NRG; PAM sequence: TGG
tgccccctcatgcaggcccc

SEQ ID NO: 7822 - DNA, 20 bp, Artificial Sequence
  Description of Artificial Sequence: Synthetic oligonucleotide
  Target: APOC3; (-) strand; PAM type: NRG; PAM sequence: AGG
ggccttttgccccctcatgc

SEQ ID NO: 7823 - DNA, 20 bp, Artificial Sequence
  Description of Artificial Sequence: Synthetic oligonucleotide
  Target: APOC3; (-) strand; PAM type: NRG; PAM sequence: CAG
gggccttttgccccctcatg

SEQ ID NO: 7824 - DNA, 20 bp, Artificial Sequence
  Description of Artificial Sequence: Synthetic oligonucleotide
  Target: APOC3; (-) strand; PAM type: NRG; PAM sequence: GGG
ttccctaccctctctctgca

SEQ ID NO: 7825 - DNA, 20 bp, Artificial Sequence
  Description of Artificial Sequence: Synthetic oligonucleotide
  Target: APOC3; (-) strand; PAM type: NRG; PAM sequence: AGG
cttccctaccctctctctgc

SEQ ID NO: 7826 - DNA, 20 bp, Artificial Sequence
  Description of Artificial Sequence: Synthetic oligonucleotide
  Target: APOC3; (-) strand; PAM type: NRG; PAM sequence: CAG
ccttccctaccctctctctg

SEQ ID NO: 7827 - DNA, 20 bp, Artificial Sequence
  Description of Artificial Sequence: Synthetic oligonucleotide
  Target: APOC3; (-) strand; PAM type: NRG; PAM sequence: CAG
catggcttcacagatctggg

SEQ ID NO: 7828 - DNA, 20 bp, Artificial Sequence
  Description of Artificial Sequence: Synthetic oligonucleotide
  Target: APOC3; (-) strand; PAM type: NRG; PAM sequence: GGG
gcacatggcttcacagatct

SEQ ID NO: 7829 - DNA, 20 bp, Artificial Sequence
  Description of Artificial Sequence: Synthetic oligonucleotide
  Target: APOC3; (-) strand; PAM type: NRG; PAM sequence: TGG
cgcacatggcttcacagatc

SEQ ID NO: 7830 - DNA, 20 bp, Artificial Sequence
  Description of Artificial Sequence: Synthetic oligonucleotide
  Target: APOC3; (-) strand; PAM type: NRG; PAM sequence: CAG
cgtgcacgcacatggcttca

SEQ ID NO: 7831 - DNA, 20 bp, Artificial Sequence
  Description of Artificial Sequence: Synthetic oligonucleotide
  Target: APOC3; (-) strand; PAM type: NRG; PAM sequence: TGG
tgtccccgcgtgcacgcaca

SEQ ID NO: 7832 - DNA, 20 bp, Artificial Sequence
  Description of Artificial Sequence: Synthetic oligonucleotide
  Target: APOC3; (-) strand; PAM type: NRG; PAM sequence: CGG
tcacatgacctccctgctca

SEQ ID NO: 7833 - DNA, 20 bp, Artificial Sequence
  Description of Artificial Sequence: Synthetic oligonucleotide
  Target: APOC3; (-) strand; PAM type: NRG; PAM sequence: AGG
tcaagttcacatgggtgtgc

SEQ ID NO: 7834 - DNA, 20 bp, Artificial Sequence
  Description of Artificial Sequence: Synthetic oligonucleotide
  Target: APOC3; (-) strand; PAM type: NRG; PAM sequence: CAG
ctcaagttcacatgggtgtg

SEQ ID NO: 7835 - DNA, 20 bp, Artificial Sequence
  Description of Artificial Sequence: Synthetic oligonucleotide
  Target: APOC3; (-) strand; PAM type: NRG; PAM sequence: GGG
cctggcactcaagttcacat

SEQ ID NO: 7836 - DNA, 20 bp, Artificial Sequence
  Description of Artificial Sequence: Synthetic oligonucleotide
  Target: APOC3; (-) strand; PAM type: NRG; PAM sequence: TGG
gcctggcactcaagttcaca

SEQ ID NO: 7837 - DNA, 20 bp, Artificial Sequence
  Description of Artificial Sequence: Synthetic oligonucleotide
  Target: APOC3; (-) strand; PAM type: NRG; PAM sequence: AAG
gagtgtgtggcctggcactc

SEQ ID NO: 7838 - DNA, 20 bp, Artificial Sequence
  Description of Artificial Sequence: Synthetic oligonucleotide
  Target: APOC3; (-) strand; PAM type: NRG; PAM sequence: TGG
aaaaaaaagagtgtgtggcc

SEQ ID NO: 7839 - DNA, 20 bp, Artificial Sequence
  Description of Artificial Sequence: Synthetic oligonucleotide
  Target: APOC3; (-) strand; PAM type: NRG; PAM sequence: TGG
aaaaaaaaaaaaagagtgtg

SEQ ID NO: 7840 - DNA, 20 bp, Artificial Sequence
  Description of Artificial Sequence: Synthetic oligonucleotide
  Target: APOC3; (-) strand; PAM type: NRG; PAM sequence: GAG
aaaaaaaaaaaaaaaaaaaa

SEQ ID NO: 7841 - DNA, 20 bp, Artificial Sequence
  Description of Artificial Sequence: Synthetic oligonucleotide
  Target: APOC3; (-) strand; PAM type: NRG; PAM sequence: AAG
aaaaaaaaaaaaaaaaaaaa

SEQ ID NO: 7842 - DNA, 20 bp, Artificial Sequence
  Description of Artificial Sequence: Synthetic oligonucleotide
  Target: APOC3; (-) strand; PAM type: NRG; PAM sequence: CAG
tgggcgacggagcaagactc

SEQ ID NO: 7843 - DNA, 20 bp, Artificial Sequence
  Description of Artificial Sequence: Synthetic oligonucleotide
  Target: APOC3; (-) strand; PAM type: NRG; PAM sequence: AAG
tccagcctgggcgacggagc

SEQ ID NO: 7844 - DNA, 20 bp, Artificial Sequence
  Description of Artificial Sequence: Synthetic oligonucleotide
  Target: APOC3; (-) strand; PAM type: NRG; PAM sequence: GAG
gcactccagcctgggcgacg

SEQ ID NO: 7845 - DNA, 20 bp, Artificial Sequence
  Description of Artificial Sequence: Synthetic oligonucleotide
  Target: APOC3; (-) strand; PAM type: NRG; PAM sequence: CGG
ctgcactccagcctgggcga

SEQ ID NO: 7846 - DNA, 20 bp, Artificial Sequence
  Description of Artificial Sequence: Synthetic oligonucleotide
  Target: APOC3; (-) strand; PAM type: NRG; PAM sequence: GGG
atgccactgcactccagcct

SEQ ID NO: 7847 - DNA, 20 bp, Artificial Sequence
  Description of Artificial Sequence: Synthetic oligonucleotide
  Target: APOC3; (-) strand; PAM type: NRG; PAM sequence: TGG
catgccactgcactccagcc

SEQ ID NO: 7848 - DNA, 20 bp, Artificial Sequence
  Description of Artificial Sequence: Synthetic oligonucleotide
  Target: APOC3; (-) strand; PAM type: NRG; PAM sequence: CAG
gaaatcatgccactgcactc

SEQ ID NO: 7849 - DNA, 20 bp, Artificial Sequence
  Description of Artificial Sequence: Synthetic oligonucleotide
  Target: APOC3; (-) strand; PAM type: NRG; PAM sequence: GAG
tgggaggcagaggtcacagt

SEQ ID NO: 7850 - DNA, 20 bp, Artificial Sequence
  Description of Artificial Sequence: Synthetic oligonucleotide
  Target: APOC3; (-) strand; PAM type: NRG; PAM sequence: CAG
aacctgggaggcagaggtca

SEQ ID NO: 7851 - DNA, 20 bp, Artificial Sequence
  Description of Artificial Sequence: Synthetic oligonucleotide
  Target: APOC3; (-) strand; PAM type: NRG; PAM sequence: AGG
cgcttgaacctgggaggcag

SEQ ID NO: 7852 - DNA, 20 bp, Artificial Sequence
  Description of Artificial Sequence: Synthetic oligonucleotide
  Target: APOC3; (-) strand; PAM type: NRG; PAM sequence: GAG
tcgcttgaacctgggaggca

SEQ ID NO: 7853 - DNA, 20 bp, Artificial Sequence
  Description of Artificial Sequence: Synthetic oligonucleotide
  Target: APOC3; (-) strand; PAM type: NRG; PAM sequence: CAG
aatcgcttgaacctgggagg

SEQ ID NO: 7854 - DNA, 20 bp, Artificial Sequence
  Description of Artificial Sequence: Synthetic oligonucleotide
  Target: APOC3; (-) strand; PAM type: NRG; PAM sequence: AGG
gagaatcgcttgaacctggg

SEQ ID NO: 7855 - DNA, 20 bp, Artificial Sequence
  Description of Artificial Sequence: Synthetic oligonucleotide
  Target: APOC3; (-) strand; PAM type: NRG; PAM sequence: GAG
ggagaatcgcttgaacctgg

SEQ ID NO: 7856 - DNA, 20 bp, Artificial Sequence
  Description of Artificial Sequence: Synthetic oligonucleotide
  Target: APOC3; (-) strand; PAM type: NRG; PAM sequence: GGG
caggagaatcgcttgaacct

SEQ ID NO: 7857 - DNA, 20 bp, Artificial Sequence
  Description of Artificial Sequence: Synthetic oligonucleotide
  Target: APOC3; (-) strand; PAM type: NRG; PAM sequence: TGG
gcaggagaatcgcttgaacc

SEQ ID NO: 7858 - DNA, 20 bp, Artificial Sequence
  Description of Artificial Sequence: Synthetic oligonucleotide
  Target: APOC3; (-) strand; PAM type: NRG; PAM sequence: GAG
tactaggaaggctgaggcag

SEQ ID NO: 7859 - DNA, 20 bp, Artificial Sequence
  Description of Artificial Sequence: Synthetic oligonucleotide
  Target: APOC3; (-) strand; PAM type: NRG; PAM sequence: AGG
gctactaggaaggctgaggc

SEQ ID NO: 7860 - DNA, 20 bp, Artificial Sequence
  Description of Artificial Sequence: Synthetic oligonucleotide
  Target: APOC3; (-) strand; PAM type: NRG; PAM sequence: CAG
agctactaggaaggctgagg

SEQ ID NO: 7861 - DNA, 20 bp, Artificial Sequence
  Description of Artificial Sequence: Synthetic oligonucleotide
  Target: APOC3; (-) strand; PAM type: NRG; PAM sequence: AGG
cccagctactaggaaggctg

SEQ ID NO: 7862 - DNA, 20 bp, Artificial Sequence
  Description of Artificial Sequence: Synthetic oligonucleotide
  Target: APOC3; (-) strand; PAM type: NRG; PAM sequence: GAG
tcccagctactaggaaggct

SEQ ID NO: 7863 - DNA, 20 bp, Artificial Sequence
  Description of Artificial Sequence: Synthetic oligonucleotide
  Target: APOC3; (-) strand; PAM type: NRG; PAM sequence: AGG
cgtaatcccagctactagga

SEQ ID NO: 7864 - DNA, 20 bp, Artificial Sequence
  Description of Artificial Sequence: Synthetic oligonucleotide
  Target: APOC3; (-) strand; PAM type: NRG; PAM sequence: AAG
ccgtaatcccagctactagg

SEQ ID NO: 7865 - DNA, 20 bp, Artificial Sequence
  Description of Artificial Sequence: Synthetic oligonucleotide
  Target: APOC3; (-) strand; PAM type: NRG; PAM sequence: AGG
cacccgtaatcccagctact

SEQ ID NO: 7866 - DNA, 20 bp, Artificial Sequence
  Description of Artificial Sequence: Synthetic oligonucleotide
  Target: APOC3; (-) strand; PAM type: NRG; PAM sequence: TAG
gcacccgtaatcccagctac

SEQ ID NO: 7867 - DNA, 20 bp, Artificial Sequence
  Description of Artificial Sequence: Synthetic oligonucleotide
  Target: APOC3; (-) strand; PAM type: NRG; PAM sequence: CAG
gtggcttgcacccgtaatcc

SEQ ID NO: 7868 - DNA, 20 bp, Artificial Sequence
  Description of Artificial Sequence: Synthetic oligonucleotide
  Target: APOC3; (-) strand; PAM type: NRG; PAM sequence: TGG
aaaaaatcagctgggcatgg

SEQ ID NO: 7869 - DNA, 20 bp, Artificial Sequence
  Description of Artificial Sequence: Synthetic oligonucleotide
  Target: APOC3; (-) strand; PAM type: NRG; PAM sequence: TGG
caaaaaaaatcagctgggca

SEQ ID NO: 7870 - DNA, 20 bp, Artificial Sequence
  Description of Artificial Sequence: Synthetic oligonucleotide
  Target: APOC3; (-) strand; PAM type: NRG; PAM sequence: GGG
aaatacaaaaaaaatcagct

SEQ ID NO: 7871 - DNA, 20 bp, Artificial Sequence
  Description of Artificial Sequence: Synthetic oligonucleotide
  Target: APOC3; (-) strand; PAM type: NRG; PAM sequence: TGG
aaaatacaaaaaaaatcagc

SEQ ID NO: 7872 - DNA, 20 bp, Artificial Sequence
  Description of Artificial Sequence: Synthetic oligonucleotide
  Target: APOC3; (-) strand; PAM type: NRG; PAM sequence: CAG
actaaaaatacaaaaaaaat

SEQ ID NO: 7873 - DNA, 20 bp, Artificial Sequence
  Description of Artificial Sequence: Synthetic oligonucleotide
  Target: APOC3; (-) strand; PAM type: NRG; PAM sequence: TGG
tgagaccagcctggccaata

SEQ ID NO: 7874 - DNA, 20 bp, Artificial Sequence
  Description of Artificial Sequence: Synthetic oligonucleotide
  Target: APOC3; (-) strand; PAM type: NRG; PAM sequence: TGG
ccaggagtttgagaccagcc

SEQ ID NO: 7875 - DNA, 20 bp, Artificial Sequence
  Description of Artificial Sequence: Synthetic oligonucleotide
  Target: APOC3; (-) strand; PAM type: NRG; PAM sequence: CAG
tcaggccaggagtttgagac

SEQ ID NO: 7876 - DNA, 20 bp, Artificial Sequence
  Description of Artificial Sequence: Synthetic oligonucleotide
  Target: APOC3; (-) strand; PAM type: NRG; PAM sequence: GAG
tcacttcaggccaggagttt

SEQ ID NO: 7877 - DNA, 20 bp, Artificial Sequence
  Description of Artificial Sequence: Synthetic oligonucleotide
  Target: APOC3; (-) strand; PAM type: NRG; PAM sequence: GAG
ggcgtatcacttcaggccag

SEQ ID NO: 7878 - DNA, 20 bp, Artificial Sequence
  Description of Artificial Sequence: Synthetic oligonucleotide
  Target: APOC3; (-) strand; PAM type: NRG; PAM sequence: AGG
tgggcgtatcacttcaggcc

SEQ ID NO: 7879 - DNA, 20 bp, Artificial Sequence
  Description of Artificial Sequence: Synthetic oligonucleotide
  Target: APOC3; (-) strand; PAM type: NRG; PAM sequence: CAG
gtgggcgtatcacttcaggc

SEQ ID NO: 7880 - DNA, 20 bp, Artificial Sequence
  Description of Artificial Sequence: Synthetic oligonucleotide
  Target: APOC3; (-) strand; PAM type: NRG; PAM sequence: AGG
tgaggtgggcgtatcacttc

SEQ ID NO: 7881 - DNA, 20 bp, Artificial Sequence
  Description of Artificial Sequence: Synthetic oligonucleotide
  Target: APOC3; (-) strand; PAM type: NRG; PAM sequence: CAG
ctgaggtgggcgtatcactt

SEQ ID NO: 7882 - DNA, 20 bp, Artificial Sequence
  Description of Artificial Sequence: Synthetic oligonucleotide
  Target: APOC3; (-) strand; PAM type: NRG; PAM sequence: GGG
gcactttgggaggctgaggt

SEQ ID NO: 7883 - DNA, 20 bp, Artificial Sequence
  Description of Artificial Sequence: Synthetic oligonucleotide
  Target: APOC3; (-) strand; PAM type: NRG; PAM sequence: TGG
agcactttgggaggctgagg

SEQ ID NO: 7884 - DNA, 20 bp, Artificial Sequence
  Description of Artificial Sequence: Synthetic oligonucleotide
  Target: APOC3; (-) strand; PAM type: NRG; PAM sequence: AGG
cccagcactttgggaggctg

SEQ ID NO: 7885 - DNA, 20 bp, Artificial Sequence
  Description of Artificial Sequence: Synthetic oligonucleotide
  Target: APOC3; (-) strand; PAM type: NRG; PAM sequence: GAG
tcccagcactttgggaggct

SEQ ID NO: 7886 - DNA, 20 bp, Artificial Sequence
  Description of Artificial Sequence: Synthetic oligonucleotide
  Target: APOC3; (-) strand; PAM type: NRG; PAM sequence: AGG
tgtaatcccagcactttggg

SEQ ID NO: 7887 - DNA, 20 bp, Artificial Sequence
  Description of Artificial Sequence: Synthetic oligonucleotide
  Target: APOC3; (-) strand; PAM type: NRG; PAM sequence: GAG
ctgtaatcccagcactttgg

SEQ ID NO: 7888 - DNA, 20 bp, Artificial Sequence
  Description of Artificial Sequence: Synthetic oligonucleotide
  Target: APOC3; (-) strand; PAM type: NRG; PAM sequence: GGG
gcctgtaatcccagcacttt

SEQ ID NO: 7889 - DNA, 20 bp, Artificial Sequence
  Description of Artificial Sequence: Synthetic oligonucleotide
  Target: APOC3; (-) strand; PAM type: NRG; PAM sequence: TGG
agcctgtaatcccagcactt

SEQ ID NO: 7890 - DNA, 20 bp, Artificial Sequence
  Description of Artificial Sequence: Synthetic oligonucleotide
  Target: APOC3; (-) strand; PAM type: NRG; PAM sequence: CAG
gtggctcaagcctgtaatcc

SEQ ID NO: 7891 - DNA, 20 bp, Artificial Sequence
  Description of Artificial Sequence: Synthetic oligonucleotide
  Target: APOC3; (-) strand; PAM type: NRG; PAM sequence: AAG
cgggtcgggtgcggtggctc

SEQ ID NO: 7892 - DNA, 20 bp, Artificial Sequence
  Description of Artificial Sequence: Synthetic oligonucleotide
  Target: APOC3; (-) strand; PAM type: NRG; PAM sequence: TGG
agtgcgcgggtcgggtgcgg

SEQ ID NO: 7893 - DNA, 20 bp, Artificial Sequence
  Description of Artificial Sequence: Synthetic oligonucleotide
  Target: APOC3; (-) strand; PAM type: NRG; PAM sequence: CGG
aagagtgcgcgggtcgggtg

SEQ ID NO: 7894 - DNA, 20 bp, Artificial Sequence
  Description of Artificial Sequence: Synthetic oligonucleotide
  Target: APOC3; (-) strand; PAM type: NRG; PAM sequence: GGG
ttgaaaagagtgcgcgggtc

SEQ ID NO: 7895 - DNA, 20 bp, Artificial Sequence
  Description of Artificial Sequence: Synthetic oligonucleotide
  Target: APOC3; (-) strand; PAM type: NRG; PAM sequence: CGG
attgaaaagagtgcgcgggt

SEQ ID NO: 7896 - DNA, 20 bp, Artificial Sequence
  Description of Artificial Sequence: Synthetic oligonucleotide
  Target: APOC3; (-) strand; PAM type: NRG; PAM sequence: GGG
gattattgaaaagagtgcgc

SEQ ID NO: 7897 - DNA, 20 bp, Artificial Sequence
  Description of Artificial Sequence: Synthetic oligonucleotide
  Target: APOC3; (-) strand; PAM type: NRG; PAM sequence: CGG
tgattattgaaaagagtgcg

SEQ ID NO: 7898 - DNA, 20 bp, Artificial Sequence
  Description of Artificial Sequence: Synthetic oligonucleotide
  Target: APOC3; (-) strand; PAM type: NRG; PAM sequence: GAG
ccatccatgattattgaaaa

SEQ ID NO: 7899 - DNA, 20 bp, Artificial Sequence
  Description of Artificial Sequence: Synthetic oligonucleotide
  Target: APOC3; (-) strand; PAM type: NRG; PAM sequence: AAG
ggccatccatgattattgaa

SEQ ID NO: 7900 - DNA, 20 bp, Artificial Sequence
  Description of Artificial Sequence: Synthetic oligonucleotide
  Target: APOC3; (-) strand; PAM type: NRG; PAM sequence: TGG
ctttttagaccctgcacccc

SEQ ID NO: 7901 - DNA, 20 bp, Artificial Sequence
  Description of Artificial Sequence: Synthetic oligonucleotide
  Target: APOC3; (-) strand; PAM type: NRG; PAM sequence: TAG
atgggctaggccgcgctttt

SEQ ID NO: 7902 - DNA, 20 bp, Artificial Sequence
  Description of Artificial Sequence: Synthetic oligonucleotide
  Target: APOC3; (-) strand; PAM type: NRG; PAM sequence: AGG
agtgaacagcaggatgggct

SEQ ID NO: 7903 - DNA, 20 bp, Artificial Sequence
  Description of Artificial Sequence: Synthetic oligonucleotide
  Target: APOC3; (-) strand; PAM type: NRG; PAM sequence: TAG
cagtgaacagcaggatgggc

SEQ ID NO: 7904 - DNA, 20 bp, Artificial Sequence
  Description of Artificial Sequence: Synthetic oligonucleotide
  Target: APOC3; (-) strand; PAM type: NRG; PAM sequence: GGG
tgcccagtgaacagcaggat

SEQ ID NO: 7905 - DNA, 20 bp, Artificial Sequence
  Description of Artificial Sequence: Synthetic oligonucleotide
  Target: APOC3; (-) strand; PAM type: NRG; PAM sequence: TGG
ttgcccagtgaacagcagga

SEQ ID NO: 7906 - DNA, 20 bp, Artificial Sequence
  Description of Artificial Sequence: Synthetic oligonucleotide
  Target: APOC3; (-) strand; PAM type: NRG; PAM sequence: AGG
tcgcttgcccagtgaacagc

SEQ ID NO: 7907 - DNA, 20 bp, Artificial Sequence
  Description of Artificial Sequence: Synthetic oligonucleotide
  Target: APOC3; (-) strand; PAM type: NRG; PAM sequence: CAG
gtcgcttgcccagtgaacag

SEQ ID NO: 7908 - DNA, 20 bp, Artificial Sequence
  Description of Artificial Sequence: Synthetic oligonucleotide
  Target: APOC3; (-) strand; PAM type: NRG; PAM sequence: CAG
gacgtcgcttgcccagtgaa

SEQ ID NO: 7909 - DNA, 20 bp, Artificial Sequence
  Description of Artificial Sequence: Synthetic oligonucleotide
  Target: APOC3; (-) strand; PAM type: NRG; PAM sequence: CAG
gacctgtgacgtcgcttgcc

SEQ ID NO: 7910 - DNA, 20 bp, Artificial Sequence
  Description of Artificial Sequence: Synthetic oligonucleotide
  Target: APOC3; (-) strand; PAM type: NRG; PAM sequence: TGG
tggatgaggacactgaagcc

SEQ ID NO: 7911 - DNA, 20 bp, Artificial Sequence
  Description of Artificial Sequence: Synthetic oligonucleotide
  Target: APOC3; (-) strand; PAM type: NRG; PAM sequence: AAG
gagcatggatgaggacactg

SEQ ID NO: 7912 - DNA, 20 bp, Artificial Sequence
  Description of Artificial Sequence: Synthetic oligonucleotide
  Target: APOC3; (-) strand; PAM type: NRG; PAM sequence: AGG
tcagacgcagagcatggatg

SEQ ID NO: 7913 - DNA, 20 bp, Artificial Sequence
  Description of Artificial Sequence: Synthetic oligonucleotide
  Target: APOC3; (-) strand; PAM type: NRG; PAM sequence: GAG
atcagacgcagagcatggat

SEQ ID NO: 7914 - DNA, 20 bp, Artificial Sequence
  Description of Artificial Sequence: Synthetic oligonucleotide
  Target: APOC3; (-) strand; PAM type: NRG; PAM sequence: TGG
ttgccatcagacgcagagca

SEQ ID NO: 7915 - DNA, 20 bp, Artificial Sequence
  Description of Artificial Sequence: Synthetic oligonucleotide
  Target: APOC3; (-) strand; PAM type: NRG; PAM sequence: GAG
ctagattgccatcagacgca

SEQ ID NO: 7916 - DNA, 20 bp, Artificial Sequence
  Description of Artificial Sequence: Synthetic oligonucleotide
  Target: APOC3; (-) strand; PAM type: NRG; PAM sequence: CAG
ggctagattgccatcagacg

SEQ ID NO: 7917 - DNA, 20 bp, Artificial Sequence
  Description of Artificial Sequence: Synthetic oligonucleotide
  Target: APOC3; (-) strand; PAM type: NRG; PAM sequence: CAG
catcctggctagattgccat

SEQ ID NO: 7918 - DNA, 20 bp, Artificial Sequence
  Description of Artificial Sequence: Synthetic oligonucleotide
  Target: APOC3; (-) strand; PAM type: NRG; PAM sequence: TAG
tcccttccccacatcctggc

SEQ ID NO: 7919 - DNA, 20 bp, Artificial Sequence
  Description of Artificial Sequence: Synthetic oligonucleotide
  Target: APOC3; (-) strand; PAM type: NRG; PAM sequence: TGG
atcctcccttccccacatcc

SEQ ID NO: 7920 - DNA, 20 bp, Artificial Sequence
  Description of Artificial Sequence: Synthetic oligonucleotide
  Target: APOC3; (-) strand; PAM type: NRG; PAM sequence: AAG
gcaggtacatttttatttcc

SEQ ID NO: 7921 - DNA, 20 bp, Artificial Sequence
  Description of Artificial Sequence: Synthetic oligonucleotide
  Target: APOC3; (-) strand; PAM type: NRG; PAM sequence: AGG
aattcaccaccacctcttgc

SEQ ID NO: 7922 - DNA, 20 bp, Artificial Sequence
  Description of Artificial Sequence: Synthetic oligonucleotide
  Target: APOC3; (-) strand; PAM type: NRG; PAM sequence: CAG
aaattcaccaccacctcttg

SEQ ID NO: 7923 - DNA, 20 bp, Artificial Sequence
  Description of Artificial Sequence: Synthetic oligonucleotide
  Target: APOC3; (-) strand; PAM type: NRG; PAM sequence: AAG
tggcagaagctggcctgagt

SEQ ID NO: 7924 - DNA, 20 bp, Artificial Sequence
  Description of Artificial Sequence: Synthetic oligonucleotide
  Target: APOC3; (-) strand; PAM type: NRG; PAM sequence: GAG
gccctggcagaagctggcct

SEQ ID NO: 7925 - DNA, 20 bp, Artificial Sequence
  Description of Artificial Sequence: Synthetic oligonucleotide
  Target: APOC3; (-) strand; PAM type: NRG; PAM sequence: TGG
ctgccagccctggcagaagc

SEQ ID NO: 7926 - DNA, 20 bp, Artificial Sequence
  Description of Artificial Sequence: Synthetic oligonucleotide
  Target: APOC3; (-) strand; PAM type: NRG; PAM sequence: AAG
ctttctgccagccctggcag

SEQ ID NO: 7927 - DNA, 20 bp, Artificial Sequence
  Description of Artificial Sequence: Synthetic oligonucleotide
  Target: APOC3; (-) strand; PAM type: NRG; PAM sequence: CAG
cctctttctgccagccctgg

SEQ ID NO: 7928 - DNA, 20 bp, Artificial Sequence
  Description of Artificial Sequence: Synthetic oligonucleotide
  Target: APOC3; (-) strand; PAM type: NRG; PAM sequence: TGG
ccccctctttctgccagccc

SEQ ID NO: 7929 - DNA, 20 bp, Artificial Sequence
  Description of Artificial Sequence: Synthetic oligonucleotide
  Target: APOC3; (-) strand; PAM type: NRG; PAM sequence: CAG
atgccaccccctctttctgc

SEQ ID NO: 7930 - DNA, 20 bp, Artificial Sequence
  Description of Artificial Sequence: Synthetic oligonucleotide
  Target: APOC3; (-) strand; PAM type: NRG; PAM sequence: CGG
agccagtcctccaccccctg

SEQ ID NO: 7931 - DNA, 20 bp, Artificial Sequence
  Description of Artificial Sequence: Synthetic oligonucleotide
  Target: APOC3; (-) strand; PAM type: NRG; PAM sequence: CAG
tcaggcacagcagtggaagc

SEQ ID NO: 7932 - DNA, 20 bp, Artificial Sequence
  Description of Artificial Sequence: Synthetic oligonucleotide
  Target: APOC3; (-) strand; PAM type: NRG; PAM sequence: AAG
ttcctcaggcacagcagtgg

SEQ ID NO: 7933 - DNA, 20 bp, Artificial Sequence
  Description of Artificial Sequence: Synthetic oligonucleotide
  Target: APOC3; (-) strand; PAM type: NRG; PAM sequence: TGG
ggcttcctcaggcacagcag

SEQ ID NO: 7934 - DNA, 20 bp, Artificial Sequence
  Description of Artificial Sequence: Synthetic oligonucleotide
  Target: APOC3; (-) strand; PAM type: NRG; PAM sequence: CAG
cgcggcttcctcaggcacag

SEQ ID NO: 7935 - DNA, 20 bp, Artificial Sequence
  Description of Artificial Sequence: Synthetic oligonucleotide
  Target: APOC3; (-) strand; PAM type: NRG; PAM sequence: CAG
agccgcggcttcctcaggca

SEQ ID NO: 7936 - DNA, 20 bp, Artificial Sequence
  Description of Artificial Sequence: Synthetic oligonucleotide
  Target: APOC3; (-) strand; PAM type: NRG; PAM sequence: AGG
gaaacagccgcggcttcctc

SEQ ID NO: 7937 - DNA, 20 bp, Artificial Sequence
  Description of Artificial Sequence: Synthetic oligonucleotide
  Target: APOC3; (-) strand; PAM type: NRG; PAM sequence: CAG
agaaacagccgcggcttcct

SEQ ID NO: 7938 - DNA, 20 bp, Artificial Sequence
  Description of Artificial Sequence: Synthetic oligonucleotide
  Target: APOC3; (-) strand; PAM type: NRG; PAM sequence: CGG
atcccgcccagaaacagccg

SEQ ID NO: 7939 - DNA, 20 bp, Artificial Sequence
  Description of Artificial Sequence: Synthetic oligonucleotide
  Target: APOC3; (-) strand; PAM type: NRG; PAM sequence: CAG
actcccatcccgcccagaaa

SEQ ID NO: 7940 - DNA, 20 bp, Artificial Sequence
  Description of Artificial Sequence: Synthetic oligonucleotide
  Target: APOC3; (-) strand; PAM type: NRG; PAM sequence: CAG
cccactactcccatcccgcc

SEQ ID NO: 7941 - DNA, 20 bp, Artificial Sequence
  Description of Artificial Sequence: Synthetic oligonucleotide
  Target: APOC3; (-) strand; PAM type: NRG; PAM sequence: CAG
cccttttcttctcacaaggc

SEQ ID NO: 7942 - DNA, 20 bp, Artificial Sequence
  Description of Artificial Sequence: Synthetic oligonucleotide
  Target: APOC3; (-) strand; PAM type: NRG; PAM sequence: AGG
acttcccttttcttctcaca

SEQ ID NO: 7943 - DNA, 20 bp, Artificial Sequence
  Description of Artificial Sequence: Synthetic oligonucleotide
  Target: APOC3; (-) strand; PAM type: NRG; PAM sequence: AAG
cacttcccttttcttctcac

(The sequence listing continues in the following parts.)

1. A method for editing an Apolipoprotein C3 (APOCIII) gene in a cell by genome editing, the method comprising the step of introducing into the cell one or more deoxyribonucleic acid (DNA) endonucleases to effect one or more single-strand breaks (SSBs) or double-strand breaks (DSBs) within or near the APOCIII gene or other DNA sequences that encode regulatory elements of the APOCIII gene that results in one or more permanent insertions, deletions or mutations of at least one nucleotide within or near the APOCIII gene, thereby reducing or eliminating the expression or function of APOCIII gene products, and introducing into the cell one or more gRNAs or one or more sgRNAs.

2.-11. (canceled)

12. A method of altering the contiguous genomic sequence of an APOCIII gene in a cell comprising contacting said cell with one or more deoxyribonucleic acid (DNA) endonuclease to effect one or more single-strand breaks (SSBs) or double-strand breaks (DSBs), and introducing into the cell one or more gRNAs or one or more SgRNAs.

13. (canceled)

14. The method of claim 1, wherein the one or more deoxyribonucleic acid (DNA) endonuclease is selected from any of those in SEQ ID NOs: 1-620 and variants having at least 90% homology to any of those sequences disclosed in SEQ ID NOs: 1-620.

15. The method of claim 14, wherein the one or more deoxyribonucleic acid (DNA) endonuclease is one or more proteins or polypeptides or one or more polynucleotide encoding the one or more DNA endonuclease.

16.-20. (canceled)

21. The method of claim 1, wherein the method further comprises introducing into the cell one or more gRNAs or one or more sgRNAs induce a cutting efficiency over 30%.

22. The method of claim 21, wherein the one or more gRNAs or one or more sgRNAs comprises a spacer sequence that is complementary to a DNA sequence within or near the APOCIII gene or is complementary to a sequence flanking the APOCIII gene or other sequence that encodes a regulatory element of the APOCIII gene.

23. (canceled)

24. The method of claim 21, wherein the one or more gRNAs or one or more sgRNAs is chemically modified.

25. The method of claim 21, wherein said one or more gRNAs or one or more sgRNAs is pre-complexed with the one or more deoxyribonucleic acid (DNA) endonuclease.

26. (canceled)

27. The method of claim 14, wherein the one or more deoxyribonucleic acid (DNA) endonuclease is formulated in a liposome or lipid nanoparticle.

28. The method of claim 21, wherein the one or more deoxyribonucleic acid (DNA) endonuclease is formulated in a liposome or lipid nanoparticle which also comprises the one or more gRNA or one or more sgRNA.

29. (canceled)

30. (canceled)

31. The method of claim 21, wherein: a) the one or more deoxyribonucleic acid (DNA) endonuclease; and/or b) one or more gRNA or one or more sgRNA, are encoded in an AAV vector particle, where the AAV vector serotype is selected from the group consisting of any of those disclosed in SEQ ID NOs: 4,734-5,302 and Table 6.

32. The method of claim 1, wherein the cell is a human cell.

33. The method of claim 32, wherein the human cell is a hepatocyte.

34. (canceled)

35. A single-molecule guide RNA comprising at least a spacer sequence that is an RNA sequence corresponding to any of SEQ ID NOs: 5305-14350.

36. (canceled)

37. (canceled)

38. The single-molecule guide RNA of claim 35, wherein the single-molecule guide RNA is chemically modified.

39. The single-molecule guide RNA of claim 35, pre-complexed with a DNA endonuclease.

40. The single-molecule guide RNA of claim 39, wherein the DNA endonuclease is a Cas9 or Cpf1 endonuclease.

41.-43. (canceled)

44. A DNA encoding the single-molecule guide RNA of claim 35.

45. The method of claim 1, wherein the one or more gRNAs or one or more sgRNAs comprises at least a spacer sequence that is an RNA sequence corresponding to any of SEQ ID NOs: 9578, 7024, 9478, 7011, 7039, 7043, 7010, 7003, 7020, 9480, 7072, 7126, 9568, 7025, 7133, 7070, 7120, 9842, 7123, 7048, 9547, 9489, 7104, 7080, 7044, 9476, 7082, 7549, 9870, 9546, 9573, 9471 or 7075.

46. The single-molecule guide RNA of claim 35, wherein the spacer sequence is an RNA sequence corresponding to any of SEQ ID NOs: 9578, 7024, 9478, 7011, 7039, 7043, 7010, 7003, 7020, 9480, 7072, 7126, 9568, 7025, 7133, 7070, 7120, 9842, 7123, 7048, 9547, 9489, 7104, 7080, 7044, 9476, 7082, 7549, 9870, 9546, 9573, 9471 or 7075.
